United States Patent Application Publication US 2015/0315605 A1 - sequence listing, part 26

SEQ ID NO: 39302 - DNA, 3653 bp, Zea Mays
ctaggccttacatctctagccacacccacacctgtacctgtttgctgctgttttttctcccacgcgatccaaccgtttgtttacgccgggctaggtttctcgaccgtacggggacaggacatcagtgcaactgtgcaagcgaccgccaccgcattacccggaactgcccagatcttcgtcgaatcgtcgggccctttgctggcgacgagcaaccacagcttgcaatggcacaatagtgacatcttgggaaacaatgaaacgttttgtctatatcaatgatgattcgtgccggtattcctactgtgacaaccggatatccaataccaagtatactctgtggaattttctcccgaaaaatttatgggagcaattcaggcgtttcatgaatcagtattttctactaatagcctgccttcagttgtggtcccgtatcacccctgtcagccctgcaactacatggggtccacttatcatcatcttcattgtttctgcttcaaaagaggcttgggatgattacaataggtatctttctgacaagaaagcaaatgagaggaaaatatggttggtaaaggatggcgtccgcatacagatcaaagcacaggaggtacatgttggagatttagtgtggctccatgagaatgatgagataccatgtgatcttgttctcattggcacttctgatcgacaaggcatttgttatgttgagactgctgctttggatggtgaaactgacttgaaaacaagaaccattcctccaatttctgctaacttgtcagtagagcagctaggaaaagtcaagggtgtaattgagtgccccaacccagacaatgacatacggaggtttgatgctaacatgcgcttgttcctccctataattgacaatgaaaaaagtcctttgactatcaacaatacacttcttcagtcatgttaccttcgatacactgaatgggcttgtggagttgcagtttacacaggcaatgaaacaaaatctggaataagtaggggagctgcggagcccaagttcactgctgctgatcaatggtatcttatgtatcctatggaggtagagggcccatggtatgatttcttgattatcccgttacgctttgagctgttgtgctccataatgattccaatctccataaaggttactcttgatttggctaaaggtttgtatgcaaagtttattgactgggatgagcaaatgtttgattgggaaacaaatacacctgctcattcagctaacacagctattagcgaggacctcggacagattgaatatattttgagtgacaaaactgggacactcacagagaataaaatgatcttcaaacaatgctgcataagtgatactttgtatggaaatgacaacggagatgcattaaacggttgtctacttactcattatgttctttacatcctattaagggacaatgttcatccttttcttttctctattaaggcatgcttgttatgtgtatgaattatgagaaattgcggaggtggaattgggggataagggtacatcagccctctaaatggaggagactgagctgggcgtaatacaacacgtcaacacccatggttctatttctgcaagtgagcagttgtaacactccaactactccaagataagtttccgaaaaagaagaagcaaagctgtttttcgtccactgacaattctctcaacttagatgtcagacttgtaaatgcggtctcaagtaatgatcctgatgtcatcaaatttctgttggttatggctctttgcaatacagtggtccctatcaaaagcaatgatggtactgtgtcatacaaagcacaatcccaagatgaggaagctttagttaacgctgcagcaaagctgaatatgatgctcatcagtaaagacaccattacagctgagatttgtttcaatgggtctaagttttggtatgagttgttggacattttggaattcacttctgatcgcaaaagaatgtctgtagtggtaaaggaaggggagactggtaagatccttcttttatcaaaaggtgctgatgaagctctcctgcctcgtgcctgtccaggacaacaaatacagagatatcttgaagcagtagaaatgtattctcagttgggattgcgaaccttatgtttggggtggcgtgatttaaaagaaaatgaatataaggaatggtccaaaaactttcaaaaggctagctgctcattggacaatagagagtttaaaattgctgaagtttgtaatagcttagagcaagaccttcaaattcttggtgttactgctatagaggatcgtcttcaggatggtgttcctgaaaccattaaattgttgaggaatgctggaattaatgtgtggatgctaaccggtgataagcaaaatacagcaattcagattggacttctctgtaacctcataacttctgggtcttgcatttgttttggatggttgggcacttgaattaattttgaagcattccaaggagtcttttactaggttggcgatgctgtcaaaaacagcaatatgctgtcgaatgacacctttgcagaaagcacagagttcaagtttcttaagagattgatacttattcatgggcgttattcatacaatcgaacagcatttatttcacagtactccttctacaagtcacttcttatgtgctttattcagattctgtttgcctttttgtcggggctatctgggactagcttattcaactcaattagcttgatggcttataacgttttctatacaagtttacccgtcatgactataatctttgacaaggatatctctgaaacaacggttatgcagtacccccagattttactgcattctcaagctgggaggcttttaaatctcactacattttgcggatggtttgggcgctcgctatatcacgcactcgtcgttttcttcattacgatatgcgcctactcagatgagaaaagtgagatgcaggaactgtcaatggtagcactgtccggttgcatttggttacaggcttttgttgtgacaatggatacaaactcattcacttgcccgcaaatccttctcatctggggaaactttgtggccttctacatgatcaacttaatactcagtaccgtcccaagtctccaactgtacacaatcacgttccgcctgtgtagccaaccttcctactggatctccatggctctgacggttgcagtaggaatgggaccggtggtggctttcaggtacttgaagaacctgtatcagcctagcgccgttaacatactccagcaggtcgagcagcgcaatggatctatcagaacttctgggaatctggagtcggcgggagccaatctcactaatctactgactggctcacgtaaaaacagggattctaattatcgccctctgctttcagagtctgcggagtctgtaagtgcaagcggcagctaagaattgtctaggctttccgtactagcatgacagtcatacactcatacagacggcagaacagtgaactgtaacagaatcatgcttgtactaaaaaatatttcgtcggggtcaaagccaataattgttttgttggcctaaatttgatcatttttctcagtctgcgctgtggcaccgtctgtgctgtccgctgtcgcacgtagggatggtaataggatctaaattttac

SEQ ID NO: 39303 - DNA, 378 bp, Zea Mays
gacggtggctggatcgtggattctgggttgtgcggctgtgatgagaacacgcatacccctttcgtgtatcctgatctggtctgtcggattgggatcggacgggatagagtgcatcatcggcgtggacaattgttaaccatggatctcggaaccggtggcccgtattcaatactggttcatcagtgaggtaaatctaatccgagcactcggattgtaatccaacggctacaagatgacccataccccttcagccgacccgttttacaaaagagcccttacactttccagaaaacaacccgcagttccgcggcagtatagtttgagtctgggccacttttgcgttattgcccctggactcttgtgataacttgtgcgcag

SEQ ID NO: 39304 - DNA, 738 bp, Zea Mays
caagcgcaatataaacatcgcgccttgcgctgggcgcataaaaccctactaaccgcgtctcctctccagcgcccgccgtcgccgccgccctcctcttggtcccgccgtccgtcgaggtcatcatggtgagggtcagtgtgctcaacgatgcgctcaagtccatgtacaatgcagagaagaggggcaagaggcaggtcatgatcaggccgtcgtccaaggtgatcatcaagttcctgacggtcatgcagcgtcatggatacattggcgagttcgagtacgtggatgaccacagagctgggaagattgtggtggaactgaacggcagactaaacaaatgcggtgtaattagcccccggtttgatgttggggtaaaggaaatcgaaggctggactgcgaggctgcttccgtctcgccagtttggctatatcgtgcttacaacctctgcgggaattatggatcacgaggaggcccgacgcaagaacgtcggaggcaaagtccttggtttcttttattaattaaagggtcgtccgagtttcttctattaaatggtgggtcgaccgagtttttgtttttgtttttggtctgaattgaatagagtgtttgcttcgttaagactggaatgtgggaatctttatgagtgattcggcatgtaactaactggaggccacgagacagtttggcgcaaggcctatgaccccctaggaggagtgtcgatcaactagattctcacatttttta

SEQ ID NO: 39305 - DNA, 3636 bp, Zea Mays
ctcatctatacactaatcagcatccccccctcccgacggcccctccctccatctctctcacactcacctctctctctctctctgacacaaacaccgagggagtagtgactactactgtcctcagacctgttgtggacttgtggcactgactggctgagtttgatctcccttgaccacagaatcctatgtatatagctcgttccctctttgtctttaaacatagccgaaacagtaagttccatgaccagttattccaactattctacgtatagctgaagcagccagaagagttcctgagggtagcatgatgccatccatggcggatcctactgtcgaggctccgaatgctgaagccaacaggaggcaataacctgcaggtgatagggacctgggaactccaagctgctcttaagcaatgtatgggggtgctctccggaggcagctcccgcatccagcgtttcccttcgtattatgctctgcgaacatttgaccgagcatgggagtgcagattcagatgctgaagctgcaaaggttcaagaggaactggttttgctggatggtaaactaaagcagataacgctgcagaggaggcagtcactaaataactatttggatctgaaagggaatataagggtgttctgtcgtgtgaggccttttcaccatgaagaaaattatcaatccagaactctgtacaccctggatgagagtaatatattcctaaaagttgctgagaccaagataaagcaatacaagtttgacaaggttttcaaccaatgctcaacacaaggtataacagatttgcgtttataggaactgcgaaactgaagtgaataatttgaatgcaagtcaggttacagtagtgtgatttccaggtgatgtatttgctgaagtggaaccagtgataaaatcagctttagatggctataatgtttgtatatttgcctatggtcagacaggtagtggaaaaacttataccatggtgagctttacttattccagctccttatctcattcatgaagaacaaaaaatgaaaaataagaagcccaaacaaactgaaaccaacagaaatttaatattttatgtttataatccattaccacttcaatcaggaaggcaagcctacagatctaggtgtcataccacgtgggattcaagcactgtttgatcgaacttcagagagcaacagaaggtttctgttcactttcagtatgctcgagatatatatgggaaatttgcgagacctgctagttccaagaggcaaggcacaaggttttaagaaggtaccaagcctttccattaaaacagatccagatggcggcatcgagattgaaaacctagtggcagttactgtcagtagttttcatgaagtgaaaagactatatgaagtggggacccactttagatcaacagcttccactatggctaattctacatcaagcagatctcactgagaggaaaagagcaagaaacaaattatggatgattgatctaggtggaagtgaaaggcttgtaaagacaaaggcaactgggaaaaggctcaaggaaggcaaagccataaatctgtcgctgtcagccctagcggatgtcatagatgcactacagaccaaaaaatcccacatcccttataggatgtgagtccaaaacgcttatgcttgttcatatccgtccaaatgaggatgatttgtgtgagagcatctgtaccttgggttttgcgacaagagtcagaagtattcgcctggaaaatgaagaaccacaagaagtaaaagcaagaaaggaacatttattaatggaattagaaaaggagatcagtgatctagaacaagaatgtgaaggtattgttagaaagattaagaagctcaaggagacaatggagcattttaaagggcatcagccatctgctgaagcaaattttgacatttcacatccatccagtgaagagctgaaaactgtcatgccaaagaatacaaaggattcaaagaatcggagagatgtttcttccaggttacccaggtttatgaagccaacagcgtctagccagcacaggatagacttaaataaacaaatacctgttagtaacaagacaaaaccaccagtgccaccaaagagaaggccttcctcagtttatgctgagtctgtaaggctgccagtaaatgctgcaacttggcagtcagaatgtagttctgaatgcagtatctccatgacaagtgacatgaactggataccaagtatacaagatgggacagaatgcagccaggatacatcagaatatgagaccaaacaagtgattttctcagaacatgagaaaccacctcagagtcaagtgatttcatttgaagaatcaggggagatgcaggataaaaccaaggaaatgggcatcatagacattgacagctggattcatcaacagatcattgaaaacactggcatatgtcagtgtcacactgaaaggacgctagatgttattgaagtaaatgaatatgaaacttacaattctaatactgcttcaccagttcagaaggaatttactaatggttccaaaccctcactggatgaagatagcaacctgaacctttgtccccccacgcaaaacacagaagatagcaaggaaaccagggctgttaatcaattcacaaaaacagaattatacactcctccattaaaagaactttgcggcagtgccaaaattaaggaacataagaatgaaaagcttgggcgtcatggaagttgcagaagatcactgcaggaagagctcggcaattgcaagccagagcagccagacaaggaaccaaaagctgatccaaacatgcaacctgaaattgaattccatgacaacaaacaccatataggtaagttgacaaaattcattcaagctcttcgaacagcatggattggtgctcttcttggactaggcaccatgaaccttggattagagcaagacttcttcaagagcttaacactctgatttaactagaacttcaccatttcaaaaggatttaacgaagctgtatacagtttcagtaagagtatctacttcaggaatcaatgggcactgtatatataaggctgcaatgaaatgtaagctgccaatatgccagtggcagatgaattgctagtctgaaatggtttctttggttataaatggatagtttcaagacaagtgggaaaatgggaagaaatgtgatatatgacaaattttgaattaacattatcaatttatcataaatgataaatgattgttacagtatgcagagaagctattgcaatatctgaactgagggagagttatttacatctccaggccatttcagtcgattgagcactatatatgccaaacataacatgtcacagcaatgactcttactatgatatctttcatatagcaacttttgagctaaagctgtaaagtagtggcgtattttcttccaaatatatgcaaaaggagaagcatgtagactggggtgccaaccataagtttatatcaagtcacgaggccctgcagctgattttcatacctgtaaggtccatatacttcaataaaattaaatcttttgttcaaaagtaagtctatagtagatcagagctttgagtttaactttatgtattgtgggaaaccctagccctaacacagggttggg

SEQ ID NO: 39306 - DNA, 214 bp, Zea Mays
cgtccatgcaaaaaagggaggccacagaatcgaactcagaaatgcacgatataaagcagcgctgctgaccagttgaaaccccaaatagaattcaatggatgagacaatgagaagtatttaatatgggtaaaatcggaaatatgacttctacttaaacactccttggtacgcgtattcatgtccaaaatgactagtatttcaatatcggagggag

SEQ ID NO: 39307 - DNA, 2321 bp, Zea Mays
cacgctgtcatgctcccaaattacggcgcctactctgttttctgattcactgaaccgagcgagttctcgtcgcatcgtatgcgcctccttctctgattccccaaaaatattccctgttttgctgttcttttcttcctcgtaatccgctcggcttccattgttgccgccgctaccgacggcgacggcagacatcaagtgtcagtcctccttccgccgaagtcttcttttggttggactccgactctccgacaggagttgcgctcctcctccccctctactctactggattacactagcgtggagatccatctctatttgtttttggtctcttctttgcttggggcaaggtcaatcacagttgataagataccacttgtactctaatctgtcagtctccacgtgcggctgcatatatactgtttcaaaatttcggagtaaggtctgaagtctgaaccctcatgctgcttcagagggattgaggctggttgttggtcgcacttgcacatggcgcagccacagcagcgggtgtaccaagcttggaagggggataacaggttcttctttggtgggcggttgatatttggaccaaatgttaaatctctaggtgtttctgttgccctcattgttatcccagttgctgttttttgtgtgtttgtcgcacaccatctccgtcatcagtttcatgcatatgatgcaggatatgcaattcttgtcatagcaatagtgctcacaattagggtgcttctattactcttaaccactgccgctcgggatccgggaattgtacctcgtgcttcacatccacctgaggatattcactatgataatttgtctcttactgacacacctggaatactacagttcccctgtgtaaaagaagttatagtaaatgggatgcctgtgaaagtaaaatattgtgaaacttgtatggtttttcgcccacctcggtgttcacactgttccatttgcaacaattgtgtggaacgctttgatcaccactgtccatgggtaggacagtgcattggaaagcgcaattgccgttattttttcctatttgttgtctcttcaagtctcctctgcatttatttgtttgttatatcggccttgtacatcaagtttctcatggatggagactatcctacagtttggaaggcattgaaacattcccctgcttctctagcactaatgatatactgttttatctctctctggtttgttggtgggctcacaggatttcatacatatctcatcagcactaatcagaccacatacgaaaattttcggtacaggtcggatggcaggcttaatgtctatgatcaagggtgtctgagtaactttcaagaagtagtgtgtgccaagatagagccttctaaacataagttccgggcgcacatacaagaggaagtgcgaggtccactagctaaccgtgctggagagactgaagaagaacaagttggtggtcctcgagcgtaagcgggggatggcctcgatattgatggtgatctgatgaagatttcacataggcataaccatgaggacatcgatattgaaataggatgtggggatgctaatgaggtggaatgctcagtttcagattccaaagttaaagacaatatggatgcacatatgtgatatgtagagttagaaataaggtaaatggagaacagtcgagttgggttccagcggtttaatgaatgtgtttgtttagttcataagtaggcaaaatgccgtctcctccggtggtttcagcattattctttttgtaaatggctagtgcaggatacttaggatgctaccctgcaggttctcttgtgcattccgaccagcgtgtgtgttgaattcttaccctcggatccttcagaagacgtttgtgtatagtgtcttggttgagaaatcccaagatggtgtatgaattcagattggtagttctaaacttgttgtctttcagttccacacaggcagaagtcattgcttttcagctcaggctgtctactttagcatcagtttgctctgtccagaaagaaaataaaaaaaaagaactgcagcaagattggcatggtgctatgaccaccagagtcacatctgtctttgaacgctaatctggttggttcatgccaaacattcctttgttgccttgtggatttaaaagacttggacgcttggctgggctttggtcggcgctggcagtatcatgccgaactctgaagacaccaaaactgtcagctcctcctcttgtcaattcaacaaaatgtctgcttcaaaatggttctgcgatgccgaagaaaagtccgggagttgataaaataataccatgggacgtg

SEQ ID NO: 39308 - DNA, 346 bp, Zea Mays
aatcgaccccccggcgaccgatccacaacaagcgctgatgcaaaacaatgcgaaggtgatcgcgagttagatggtagactcacctccatggattagggcgcttcgaaacctgcccgcagcacaaggcggcacggccgtggaggccaattccgatgagcaattcctggagctccggctgacactttctcgagccaagcgcgaattcaccaccgccatggtccaatgatgctcccggtccaacacccgagggttgagacgttgactagcttgacttccgcggcggtgctgccctttccccgccgcgccgtttgtgtcagcaccatggtcggataataggcgagtgcca

SEQ ID NO: 39309 - DNA, 1769 bp, Zea Mays
tttgctttggaataccaaatgtgcgatacgtcatgtcctgcttgctggccgttgtctcattgtctggccgccggaccaaatccgaaaacccaccgagtaactgacaatctcgatccccgcagtcatcgcgggatcggcccgtcctcgccggcgactcattcccgcaactcacctgctctcaaccgcgaactcggcgccctgcacggcctccaagtcgcacgatgcggcggcgcccacatcatacgtggctgcgtctccgcctccgctttcgccgcgccgacgtgtcagcttcccgtccactacagagtccacattgtcctcctattacttgctccgccggcaactattagcccctccccagtcgccactaaatccgctgccgtttcttctcgagtgtgaccatggcggctcagggatccctcgtcatgtggagggcggtcttcgcagcgctgggcttgctcatggtggccacgctggtgtacaccttggccaccgacggctcgccgttccgccttgagctgtttacgccgtggatggtggcaacactggctgatttttatgttaatgttattgcaatctcggcttgggttatctacaaggaagcaaactgggttagttctgctgtgtgggtggttctgttgttttgctttggcagtgctgtcacttgcgcttatattgttaagaaacttcttgaagtaacatctgcagggtcatcccaagatcctcttgaccttctatttatcaggcaaggtaatctatcccaaagaaagtgctcttatgttgtaattggaagggttattttcagcattttggggatattcatggctgcggttgtcacatatactgtcatcactgatggactaccttttaggaaggaattgttgacaccgtggatggcggcaaccttaattgatttctacataaatgtctttgcgatatcggtctgggttgctcacaaggaatcatcatggatatcaactaccatttggattgtcttgctgatatgctttggaagcatcacaacatgcggctacattgtcatccaacttttcaaagtatcatatcaagatccaatctaccacgtgctattgaactcccacagcaagtaccacaattaaggggacaggaggatagcaattagacaagttgttttactttgaataaaataactcatgtgctgagttatctgctaaatgaactgtaacgtgaaatcctttattgtatttctgattgaaattgcttgaacaataatctcctttgttatggtttcattgcaaacaatttagaagatcgagtgatggtttaattttgaatgacggactagaagtcagcagctcagtctcagcattcagttgggcagattagctcagggccaagccctttgagaatggaccgaggccaagcctctttcagttgggcagatttagcaatgatcagatcagcaacaggaggatcaggaggtgagagccccctccagggggcaggaaaggaaacaaaaggttgttctgcctcgaacaaaaattcaagaaaccaaagatctctagagaaactcgtatggcactacaagcagtaatacgaacaccgagaacatgaggggtacatatgtattttcagtgaagaggagccacagtttactctgcagcagccccaaatccagtctaccctctaacagtctggttgtatgcactctcaccagcttgaggtgactaggtaaggagggatgtttggcaacaatgtttttcaaaattatagttttacaatactttgtc

SEQ ID NO: 39310 - DNA, 1855 bp, Zea Mays
ctacttcttcctcccccacgtcctcacgccgctccagggcacccacccaaaatcggccgcgtccgggccgacctcctcgaccaccccgctgccagggccagggaccccatcttctgggaggctattagggccagttcctcgtcgcgcgacgacggggaaggcggcggcgtcgccgtgcacgtccccggtggcgggggaggtggcgctggcgacgagggtgcggggaaggagggctggggtggttccaatctcggcagggatttgcccacgcccaaggagatttgtaaggggctcgacaagtatgtgattgggcaggacagagccaagaaggtgctatctgttgcagtttacaaccactataaacggatataccatcaaactttacaaaagggtaggtctggagcagatttgggtggttttaatggggaagctgatgatgacgacaacgtggaactagagaaaagcaatgtgctgttaatgggacctactggctctggtaaaactttacttgcaaagacattagctcgttttgtgaatgtaccatttgtaattgctgatgcaacaacattgacccaggcagggtatgtaggagaagatgtagaatctatattatacaagttactcacggtggcagattttaatgtgcaagcagcacaacaagggatggtgtacatagatgaagttgataagatcacaaaaaaggctgaaagtcttaacattagcagagacgtatctggtgaaggtgttcagcaggcattgctgaaaatgctggaaggcacgatagtcaacgttcctgagaaaggagcaaggaagcatcctcgtggtgataatatacagatagataccaaagatattctttttatatgtggtggtgctttcgtggatttggaaaaaactatatcagagagacggcaggattcatctattggtttcggcgccccagttcgtgcaaacatgagggctggtggcatttcaagtgctcaagtgacatcatccttgttggaatctaatttattggacgcttccctatccttgtgagcctggccgctctaaatgaggaccagcttgttcaggttctgattgagccaaagaatgccctgggcaaacaattcaagaaattgtttagcatgaataatgttaagcttcactttacagatggtgcacttagaataattgccaaaaaggcaatgtcaaaaaatacaggtgcacggggtttaagaactatccttgagaatattctcatggattctatgtatgagatcccagatgcaaaatctggggagaagcgaatcgatgcagtggttgtagatgaagatgcagtaggatcagtggaccaacctggctgcggagctaagattctttacggtgatggtgctttggatcaatatctatcccagataaaggtgtcaggagacggagtggggagcgaaatggatggggaagctgagctttcgtcatcgagagccattggcatgtgattcctggttctgaccgcaccagtgtaacctgtaaaaatctaatcccagttatatcaatgtaagtagtagtagccttgtaaatgaaacgatatgtgcagcgtccattgttcttctgaagccctggcacacgttgccccgcccgcgctcacgcattgcatgatttgcagcaggattttaatgagtgtagtcgagcaggttcgtgtagataccagtcgcttataaatggcgcaatgccatgaattgtaatagctgccggatctatgttaaaacttgaaacaaagaaatggatcaagagggcatggagttgcaaatttgtgatctcgattcttttcgaaactgcattgcatagcgttatcctggcattgcttgaagagagg

SEQ ID NO: 39311 - DNA, 225 bp, Zea Mays
gccgtgttagttgacagattcatgttcttctatatgtatttatttatactccctgcatatcaattcatgttcttctatatgtatttatttatccaaaactgacttatttttgtgtattaacaggatgaggacacactagaattttctaagaataatgaagatgtagcaagtggctcctctccatgagcaatgtgtcttatgtttgttgacagatgagccttggtt

SEQ ID NO: 39312 - DNA, 285 bp, Zea Mays
cccagattaagaaaacctagctgccatcactagagggagagcttagagaggcaagtcagagagcacggcgccacgccgggaaattctaggattggggcgtacctcaccaacactcgcatcgaggtgaccgctttggtgcagggaggtcgggcgtaacactctcacttggtgccggaactgggagcgtcaccaatcgaccgttgattcgagccagggcatagcgaatcctcggctcatcgccgccgggacaaatcgctaccttctgtcttctgtgcggtatgcttt

SEQ ID NO: 39313 - DNA, 2836 bp, Zea Mays
ccccaccacagcagcttttaaagataaaccaaatccgctgtcgtccctgccctgcatcgcaacttgctcacaggacacagccgataagcagcggccaaaacagaaagcgcgatttgtttgatcgcttcctcctccactaccactagctagcctgccgccgtccgccgtgcagtgtgcgagctccgcccgccggtgccggaggcagaggaggaagatgcaggtgctgccgaggaagaggaggcgctccgggtcctggcttctagacgttgtgaaccagatcttggtgcggttgcccgagtagtttactcgtctagaggaggggtttggttctcgacccgattcggtgggggcttcgccactgggatagggggacagtttggcctgctggatctttatcgccagttgttggttctgtcctttccattgggctggtactttcttgacggattggttaagcgctgtctgtggggttgttgtgctgctcctcccttcatctcgttttgtggtgattggtggggggaggaggaagagctaggaggattctctctcttgttcttgggtcagttcttggcacggcaggatgaagtatatgaagcttggatcaaagccggatgtccttcagacggaggggagcaatatcaggtttgtcgcgacagatttggcaacagacgttgttatattgattggggatgtcaagttttaccttcacaagttccctcttctatcaaagagttcacgcctgcaaagattagttgcttcaatcaatgaggagaaaaatgacgaagtggatatctctgacatccctggtgggccttcagcatttgaaatatgtgctaagttctgctatggcatgattgtgacactcaatgcgtataatgtcctcgccgcccggtgcgcagccgagtacctagagatgttcgagaccattgacaaaggaaacctcatatacaagatcgatgtgtttctgacatcaagtgtgttccgcacctggaaggactcgatcatagttctacagagcacaaggtcactggtaccttggtgtgaggatttgaaagtgatcagccactgcatcgactctatcgcgtcgaaggcgtcgattgatccatcagaggttgagtggtcatacacttacaacagaaagaaactcccgtctgagaacggtatcgattcgcattggaatggtgtcaggatgcaacctatggtccctactgactggtgggtagaggacctctgtgagcttgaagtggactcgtacaagcgggtgatcatgagcatcaaggcaaagggaagcacgccagctgttgtcgtcggagaagcattgagggcctacgcgtaccgacggctgcttggctccctggaagacgctgtgagcaatggagttgattgcgcaaagcctcgtgcagttcttgacgctattgtatctctcttgcccgctgaggaaggctcggtgtcatgtggttttcttcttaagctgctgggagctgcatgtttgctggaatctgatctggtcatggcaatagtggaggaatttcatgtcgttacagaatagcgacagtggcaaggagaaatttcaagatgatgaagagatcgtggagactgagaaacgtggcatcggtttccagcacgtcaaagctgggcagttgcaaagctgatcgatggatatcttgctgaggttgccaaaggatcccaaccttcctcttccgaagctgaccgcgcttgctgaaatgggtgtcttccctaccccggccaacgcatgacggcctctaccgtgccattgacatgtatctgaaggagcaccccagcctgtcgaagagcgagaagaagaaactatgcgggctgatggactgcaagcagctgtcgcacgatgcgtgcatgcacgccgtgcagaacgagcgtctccccttgcgtgtggtcgtgcaggttctcttcttcgagcaggtccgggcgtctgtcgcctctgcgaggagtgacccttcttcagctgagcttccatctgccgttcgctcgcttcttcccagagagaacggtaactctgttggcagctccaggtcagctgccacgacgacaacggaggaggacggatgtggggtcccgacgtcgagtgacgtcaactcgttgaggtcaacaaggctcgccaacaacagcggcggaagcgagaggagcagtggcagcagcgacatcaacaggagcgccgcggggaggggggcaagggggattctgatgccgaagaagatgctgagcaagctctggtctgggaaaacgaacgccggtgagaacagcagctcagacacgtcgcagagccctgggtccgtcaacaacccggaggaggtgaagtccacgcagtcaaggatcacaaggcgctcggtatcctagtcgcggaggggtaaccgcggtcacagcctagttttgttcttgctcttgatttttgccttcactggagagtagtggcaatctaaaaaatgtggagttactggagtaggtttggtcattgatgatgttttcagccatgttccatgggaactttttacatacaaagaaagtataggttgttataattgatgtatttttgctggcaaaatcatagtgttttagtttgctttttacggccaccggccaagcccggcacgattaatttcaagggctgaagacagagtgaagtaaatgctttatgatgtgattggatttgttagagcaactataaagagactctctctagcctttctaattgttaagaataaaaatattggtaaaagaatatactttagtaactttttaaatggttatctaaatatagtcatctttagttctgaatttgtcgctagtcaaaaataaaaaa

SEQ ID NO: 39314 - DNA, 2731 bp, Zea Mays
tccctcccgtctcccgaaacctcgtccgccggttcccgtcgccatggtggtggtagtgtccacctccctatgctccttcctgcccgcgcacccgttcagcctcgcgcgccctcgccgtccccacccaacgaacccgaccgccaaacccctctcccgtaccctctccatccgctgcatcgccacaaccgcggcgggacccccgccgctcccaccgccgaagctggtccgctgcccagctctcgaccgccaggcggcgcgcgcaagccgactccgctttgcgcgcaagctcctcaccctcctcctctccaagccgcgccatttcctcccgctccgcgtgctcaaccgctgccgccgcttcctcggcctcccgcgccgcggccgcccgctcatccccatggtcctccgctacccgaccctcttccgcctcttccaggcccacacctccctcccgctctccccgtccctctccaccctcgcggtcgcgctcactcccgccgccgaggcgctcgccgccgatcttgcggcgctccgcgccaccggcacaggcgcaggcgcgctcgccgccaagatccaccgccttctcctcatgaccccgcgccgaaacattccggtgaacaggctcgtccacctcgcccccgacctcggcttttccatggacttccgcgcgacgctttgcccccgccacccggacctcttcagactcgtgaacacctcccgcggccacgcactccagctcgctgatcccccgccaacgccccctccgccgcccctctctcttcgccccgccgcgccgcccgaccgcctcatggaccggccgcggaggtttccgcacctcccgctccgccgcgggcttaacctccgccgggtgcaccgggactacctcctgcggttccatagccttcccgaggtgtccccgttcgagccactggatgagggcgctagtctggagatgttggagcggcgggcgtgtgctgtggtgcgggaggtgctggccatgacggtggagaagcggacgctggtggatcacctcacgcacttcaggaaagaccttggcttgccaaaccggctgcgcgccatgctggtgcgacatccagagctgttttatgtcagtgtgaagggggtgcgtcactcagtgttccttgtggaggcgtttgatgatgatgggaggctcctagtggaggatgagatgctggttgggagggataggctggaggagcttgttcgggagggaaagcggatgaggcgtgctcggaagaaaggtgttctcacgttcgatggtgacagtgatgaggatgaagatgatgatgcagcagaagaggaaggttcattaaaggtggatgatgaatttggggacttgtttgaggatggtgtcattggggaggactgggaggaggtaggcgatggaggtggaagtgatgcatatgaagagtacgatgctgaatcaggtgacatggaggagttttgggtcaagaaggctgtggctcaaggactggttggcaatggtaatgagcaggatgtttggtgagtgcatcagcttgtgggactgctcaggaagttaacgaagattgagaattcctcaagtgtgcttttctcagcaatgcacataaaccagtaagcatcagtacatatccgggtatcttggacctcttggtcccatttgccgcctgtctgttggtacttgcaagacagacagatgaagcggctccgttatccttttactttgttctggagaggagctatttggacagtcacgatgtccgtcctccagggcactgtttctgctttgatgcttatgaggcatgctctcttacttcccaagatctcttgcacggaaacacatccaaagatagcacagcttctagaacatcacaaacctaatgtgtcacttcttatgctaaagtgtgcagagtgcgatagcttctctgctacagaaaactttgaaaaagatggcgtttcatctcttaaggaggcagccactgtatccgtgttagagttgaatgtgccctcctgtcagaagcgtttatgtattataggaggtactgctctaaggtgaaagagcaatgctcagcagatatgatacatgctgaggatgcattcaaaagctcttggatttatcatgctgaggtgatgatggctgagttttgtactgtctgcattgaaaagaatttaattgataaaatgattgatctgccctgggattccgaggaagacaaacatcttcacaagttcctcttcaactctgctcgagaagtgcgcatgaaaccaaatgatagtctgcttgttgtctactaccttgggatacaggtctctggatatgctgagaaacctttcatcttaaatggaactggtgtagcccaaaatggccctgctaaaaggtctgtctctggatatgctggctaccagccaaggataacatcttgattctgcacgctggtttgtggcgatatgtttcgtcgtggtcctggttttaatttgggagttcaaaatgtaatatcagtggaatgaaattcgtgcgttttgagtagctcggggtatagaatttgaatctgactacgtttcaaatactagagttagatgactgcagtggctggcttccagcttctttattatttttgtctattattctcctatctgtcaatgtggccggtttacagtcaattagcgctaacagaggctacatcattcagtgacaaaaaaaaatagtgaatggtgaaggtatacaaactgagct

SEQ ID NO: 39315 - DNA, 1755 bp, Zea Mays
cgccagcccccattgttccgctccgcaccacggaagacgaagcgcagcagccacgccccgaaaaaggcagaagaaacgcggtgcctcgagccatcagatgccccaccccaccccaccccaccgtgttgatctaggagttggagtcggacggcgctgggagtcgccgagtcggggcatggcatccatagccatacatctcctcgcggagcctggggcggagctgtcaccaccatgcccaatcctatcgcaccaaggaggactctgcctcgtgctcctcgtagtcttcgtacccacccctccacgcttcccctttccttgcacggtcccgatccctagccctgcccctctcctccagcgccgctcgccagctctctgcccccgccgcgcccagagatgcagatcccccaccgccgttaccgctgggtgaaggagtgggtctcgcaagaactggtcgtcgccggaggcccctgcgtgctgtacaagtgggtgcgagaggacagactagcagctttgaaggctaaggacaagaagcatggggcagaatctgcaactcctgaacccaactctgaggttctcttcctgtgcagctacgaaggatgtgggaagacattttttgatgcaggggctcttaggaagcatgctcacgtccatggggagaggcaatatatctgtcactatgagaactgtggcaagaaattcttagatagttctaagttgaagagacattttcttattcatacaggagaaaagaattttgtgtgcccacatgaaggttgtgggaagataactatcatgtgtgccagtacccagaatgtggccgaagatttacacaagaatcaaaactaagagctcatatcagggcacaacatgagaaaaatccaggtgcttcggctatgaaccatagtgcaattggagaacagcatcagccccctaagccagcaaaggtctcagcaacgcctccagctccctcagctgagcgcccttacgtctgcccctacgatggttgcgacaaggcatacatccacgagtacaagctgaacctccatttgaaaaaggagcatcccaaccactaccaggatggtggtccacaaggcgctgccccttcaaagcgcagcatctcgaagagttcccataggagcagaccggacatcactgctagaatgccaccagccaaggtctccaagcgcaaaggagggtacgcagcgccatcgccagctgtgaacctccctgaggagcaccttcccgaggagcagcagtggccaaggaaagtgatgtacgaggatgacagcgaggagaccgaggaagaagaggggggcaacaatgtcgaggatagatggaactacaacagagttgctagtagcgatgacgaggaaaccgaagacgaacaatgagcttctagcaggcgtccatctgttctgtagttgtgcatataccataaattttaaactttgagggttatagcttttgcatacatgtaaaattttaaaataaggcggacttgttgtagacagcataggttgtaggtggtctgccccttctcaatcagacatgccatgagttcagaaaggataatggatcattgttctcgtttcgcttgtttttgtgtttgtgtttgtgccttttggttcgttatcacagatgagttattactgtaaccctgatttcagtgtttggcaatcaatctcgtcagccttacatttgtaagatgaggatgccatgtttgctttgagagagtaatgcatccaccggtttcag

SEQ ID NO: 39316 - DNA, 2180 bp, Zea Mays
gcgcgctgcacgtgagatcacgagcggcctggccgggcagttcagacttcagactgtgagtcccagtgtgcgtggtagtcaaaactctccaaaggagcggacgcgcgaggtcaacgtgtcagagccgtcggagccaaggcctgatcgataggagatctcgatgcgccacttgctgcaagaagtaacatctctctagctctagaggccgcacacgcaccgcagacacacgaagcactctctccaggacgcgtaccgcacgcaccggcggccgtcgccctccatctagcggggctcacatggactggcgccgggccggcagcccgacctacggccgccggcgctcggcgggtgggatctactcggcgccggcgtcccctgcgcaccctttgggccccgccgccgccgcgtcgcccgtgcacccgctggcggcgcagtccaagacccgcgcggccgctgccatggcgcacgccatgtcgcgcgcgggcccgcgagacaacgactacgacaactacgacgacgacgcgggcgactccgctaccagcaacggggtggcgaggtacgacggcgggcggagccccctccgcgggtacgggtacggcggccggagcccgctgcactacgctgcggccggcggcggcggagccaaggacaagtacttcggtatcgctcttcctaagttaggtcggaatggtgtggactcagctgcagcgaatcgcactccatcaacaggaaggtcaacctttgcacctccagttggcgttagtgtgaggcctctacaagctgtggaaattcccaatgggacacctagggatagaagggctgtttatcccgatcctactttcgcccagtccacacggtcacgggactcacatgacagttcaacactgacagaagagcttgaaatgctaaaagatgagaatgtaaatcttctggagaagcttgggctagcagaagagaaacttagacaatctgaagcccggacaacagagctcgagaaacaggttgctaatcttggcaatgggttatctatggaagtaaagcttatgaaaaggagggaggaaatgcttgtaagaaaggagcaagagataagaaaagctcttatatccaagaatggtaaaagcgaggaactcaccactcttcagcaacagctacagtctgcaagagaagaagcatcggctgctgtgaagaaactcaaagaagctgaatccgaaacacaagagttacatacaatgacacgcaggatgatcttaagcaaagaagaaatggaagaggttgtcatgaagaggtgttggttagcccgttattggggtttggctgtccaatatggcatctatccagacatctcaatgtcaaaacatgaatactggtcttcacttgcacctcttccatttgagtatgtaacatctgctggacagagagccaaggatggatccgaagcagaaggtaatggtttggaagacgtggacaagcttgttcatgatttgactgttacagcaggggaaggcaacgtagaaaccatgcttgctgttgataaaggacttcaagaactagctttcctgaaggtggaggatgcggtactttttgcccttgcccaacaccatcgtactaatgttgctggagcagctgatccagatattaaatcatctggggatgaaaaattcactgaggcatttgacctaagcaaggaggaggaagaagatgtacagttcaagcaggcttggctcatatttttctggaggagggctaagaccaacaacgtggaagaagatattgccgaggagcgattgcacatgtggatcgatcgacacggccagcaaccaacgtcacatgacgctgtggatgttgagcaaggcatacacgagctgaggaagcttggcatcgagcagctcctgtgggagctctcccgccacgaggcgaaccttgccaaagacagtccatctgatgtcgaggacctgacctaacagtaacagcctgagcggacgacggtggccatctcccacccaaatgcagtccaggctccagccatatatttgtatatcatacagataactgggacatgtaaacattttttgtggttttggtttttcagctttgtcacaaacagttcactgactctccccgatgtacataacttccaccccccgcttttgttgtttgtaaaaggcagcttgaggtgtgca

SEQ ID NO: 39317 - DNA, 2215 bp, Zea Mays
ttcagttttcacccatcccttcccagttctgtccctctcgaaccctaactccaaaaaccctcgctctcctctcatggccgccgccgcagctgacgacgcagccgaggtggagcggctttacgagctcggcgagcgcctctcctccgccaatgacaagtccgagcatgcggcggactacgaggcgattattgcagcggtgaagggacagagtgccaaggcgaagcagctcgcagcgcagcttatccccaggttcttccggagcttccctgcactcggcacgcgcgccatgtcagccatgttcgatctcgtcgatatggaggagctcgcgatcagaatacaagctattcgtggctttccacttcttggcaaagatactgaatttgtgtcaaaaattgcagatgttttgggtcagctccttacaagcgaggaaaatgttgagcgtgatgctgttcataaagcgctcatgtcccttatacggcaagatgttaaaaattcattacaacctttatttaagcatgtggagcaaggatcagagattcgtgagaagattatttgttttcttcgagacaaggtctttcctcttaaagcagagctgctgaaacctcaagcagaaatggagagatttataacggatttgataaagaaaagtgtgcaagatgtaactggttcagaattcgaactattcatggggttcttgcgaagcttgagcatatttggggattctgctcctagagagtcctttcaagaactaattgaaattattcaagcacaggctgatctgaattcacaattcaacgtttctgacattgaccacattgagaggtggatttcatgcatgtatatggctcttccgatcttcatgagaggagcatcagcaagcaagttcctcaattacttcgttaaacaaattgttccagcatttgagaagattcctgaagaaaagaaactggatttgctaaagactattgcttcaagttcaccatatgctgcagcacaagattcacgtcagctgcttccatctgttgttcagttactcaagaagtatatgcctgggaagaaggtggaagatatcaaccataattatgttgagtgcttgctatacacttttcatcatttggctcacaagactccaaacacaacgaacagtctatgtggttacaagattgttactgggcaaccatcagatagacttggagaggacttctcagagcattacaaagatttcacagagaggttaactggaacagaagagacggtacgagcagcctccaagcgactaactcaggggatggcagatttcaacaaggcaatatcttcagcaaaaactgacgaggaaaagactaaaattaaaggcgatcagcaaacttcaacaaggacaatgaggtcatataacaatatattggcaatgacacagtcattgcattcaaaatcccctttatttatcggtgataagaaaatcactctgtcatggatggagcagcccaacaaagcagcagctacgaaagcaggggggaagaggtcacaacctagtacaaatgggaatgaccctgcaaacaagaaggggagaggaggaatgcaaaaccagctagtgaacagagcttttgaaggactgtctcatgttggaagaggcagtggaagagggcggggcaggggtggccgaggaagaggaagaggatggagtgggtaccactgagatgacctggaaattctgttcaaacctgacaagggatgagctttctgcttccaccagagagtaaactccaaggtcgatgttttattggtgtgcattactgcaacgcgttgaaatggatcaaggcacacaacagcagaaatgcgtacacagagaaaggatgctaagaaatgtctgcaatgtttgaagagacgaccaagcttgtgctgactttgtttgagttcgttttatgtttcgtccttgtactgacacagatgtattagtgatgtttaacttttatgtaacgattgatctagctgtaatataagttaagcatttaatgagatataaaaatgaaaagaaatatttggtgtcaatcaatacaaatttaacaaatcatgatttccatttgagaaaaataactgaatcagatcatccattagcagggaaccaatgaacatcctgatcaacactaatgtgtctggttcagctataaactatgaaaaaaactgtttttgagttgtctgctttgaaaaaaaaaatata

SEQ ID NO: 39318 - DNA, 1277 bp, Zea Mays
cggctttaaaggtggcttcgaatccacaagcgaaacgcgaagcagaatgcagtgaaaggctgccattttaaaaccttgctctccggtataaaaaaaccttgctctccttctccgctcgatccccaacccacccgcacggcaccaccaccaatccatccatccttacgcattagctacactccccggcgtcgagcccccgcgaaccctagaccgccgccctcgcatctccgctcgtcgccgcggggtactccctccacccgtctagtgggagtcgcggcgggacgtccccgatccgagctctctccgccttagggtttttggggccggccatggactccatggagcagccggagcccaaaaccgcgggccactactacgcccttcaggttggctccgttttcctgacgggctactacaacgtcctgacgaaccagccgcacctggcgaaccagttctacacggacaacagcagtgttgttagactggactgcgagacgggtcggtggtcgtttggagagacggtggaggttatcaatgatatgatgatgtccatgaaactaagcaaggttgaggttaaaacagcgaatttcttagagtcatgggctggggcgattacgctgttggttactggcctagtgaaattgaagcactaccctgttcgcaagcgatttgctcagaatattgttcttgctccaaaggaagatggatattttatattcagtgacatctttaagctcatttgtgatgagtatgatgatcagtacccttttgctgattacaattgtgctgacaacatgccccaagtggaagcgtcttacacaatggctgaaatagggtctgattatttggatggagaacctgaggcacaggagactgttgatcctgctgaaaatcatgtgcagcaccaagattatttggaatataaggctggcaatgtgattgatgatgaaactcatttggaagagcatattcccccattccccagttcaacggatgttaaaagggattcacctcttgctcttccccaccctccatcacctaccctcgaagaacctgtggaagaagcacccaagacatatgcttcagtgttgcgaacgaaatcaaaggcaacgctggcgattacagagtcacagcaggctcaacagctggcccagcagccacagtctgcctcagtgcatgaaaagtctaacctggacaaccaccgggatgttagcgtccctgaggatgaaggtaatgaacatggctaaaaatccattcgatccttgtgcgcctgaact

SEQ ID NO: 39319 - DNA, 3202 bp, Zea Mays
catttccaggatttactagctgggtttaccatagcccgtaggatgtcgagcgatctccactcggcatcggacgtgatcgccggtcgccgcctcctctccaggctgcagcacctgagcgccagcttcatgagcttctcggcctgcacctccggccagggcccggcggacgcgtccagcacgctgtgcacggcgtccatcttcaccgcctcgcgcgcctgctccgcgacgttgagatccagcagccccgtgagcatctgcagaatcaccatgccgaacgcgtacacgtccgactccgttgtgagctcgccggtcatgaagaacacggggtccatgtaccccgccgtgcccatcgggttcgtgcggcggccgatggtctcctcctccagcggtttcacgtgcaccgcccgcgccgtcccgaagtctcccagccggctcgcgttgccggcgtccaggaggatgttggtcagcttcacgtcggcgtggatgatggcgtggggccgcctggagtggaggtacgccagcgcagagcgcagctcgccgaggatcctgacgcggtccttccacaggaggcccttggagagcctgtccttgagcgtgccgttggggaggtgctcgtacaccaggccgcacgactccgggcacacgccaatcagcctcacgatgtgtgggtgctccaatttgctcagcaccaccacctgaggatcagagcacccccagtgcgattatgactgggccataacctcctcctccgatgaaatttcttgagtggaagttgtcggtcgccttttcgatttgcgacatcgagaattgttcaatgttctctggaatctgcagctctggatatctaggctctgatagactctttcgcttcagtgacgcagccatttgtctaggtgacaagctcctctcgtcgtgattacgctcctctccttgcagctgtttcagtttcttttgcagccggtctatttcctcctatcgcaagttgaaaccatctgtgtttgtagttaactaaggcttatggctctgtgtttaggagtagaatctgaggaaggttgtacccttaccatgattttttcagccttgtcagctatgtttctgaaattctgtatctcatcagactgatcagcattctcttgaaaaaagttttccatgtcttcagaagtgactgattcctctgtgccttgttcagtcaatgtttcatcttcctgcacatcatggtggacgcaatcaatctattgcacctacactggtgggcacaagttaaagactccctgtcaagggcgtcgggccctagtgacgccggacctcaactacgaagttcgtagtctcagaagaaggagattagatttggtaattcttccctttttcatagggttttttaatttggtgcccttagttttggtggtatgctcacttatacccttagtcgtgtttttttgctcagttgtgtccttctgttctatagcactggaagagcacagctggacaaaaaacacgactaaaggtataagtgagcacaccaccaaaactgagggttacaagagcccaaggctccaaccactcttcctaaacttaaggagataaatacgaaactaatctactcctaaacttaaggagataagaaactaatcttttctttcctaatttgagcccgctgcactctgtggcgcggcgcacgtctcgggcccgacggcgcctggtacgtgcacccccacatgacactcccaaacatacttaagtacacagtgaacttaaatgtctctttttttctaaaagaagagattttgaatgcacatatcctggaaatttaccctaaagatatgactctcagaaagtatatgtaccgttactaattgatcagaatcattcatttcagccgactcctcatccatggtttcgtctacctgtaataaattaaaatatgacagtacagcagaattagaactaattttgaagtatggccacaaacttgttggtagaaatggtgattgttttagtggatgtcaattgttcactggaaatttacttacaagatcacttcgtggtgtcacgtagccgtcagattcctcacctagctcatgtatagatgccaaaatacctgagctcccccctccatatcctatattttcactatattccaggtgatcattgctgtattcaaatagttgtattcatcaagtcatttccagattttgtccggaggttaatgaaagtagatcatcggtaattaacatcgcagatctctagtatacctggtggagatgtgtttgccgttgagtaccagccaaacctgacagcactggcgaaccacaacttgccttgacatgttcctgcacaagttactttagtttttcattctagagtacaccattagttttatccttgtacaacttatacatagagcagcaaatctgaagagatgcttcattttattttcagaatgtgatgtttgatgtgtagattcagttctgaccttgaaccgatgactattcttttaattttgagcttctttatgaggttcacaacaccggcaacagtgtcatcatgtgtaaggtaatgtgcactaacctgcaataacacatacttgtttacaaggcatgcgtgttccctgcaattaaacaactatatttatccttcgttttaggaggcagttgcaatattaatttcaatttatggtactgctaatgtagattaaaattgcagatgtgattcaaatagtgtatcaaagaggaatgtctaattgccattttcttcttggctcagaccatttcttttaaacaaactcagataacttttttagttgttcatgttgcctgacttttcctctttcctctctcgtggacagacctgggccttcttagccttcatttagcccttcttttatttctcacaaagacctttttttttgcttttctttattaaaacaaatattaaccacttggggttttcccctactatttttttgctaaaaataaggtgtagatcatttctttttttcatttgcatgaagggccacatgcatatttactggtcttagcagtttagcctcctacttagcatgaagcctctaactatctgattattaggattcttttaccatataaccacaaataagcactgcataatctgatgaggcctattaatctgaagtaactcaaatataaggataaatagcattacctttctcgtcccgcacattttt

SEQ ID NO: 39320 - DNA, 884 bp, Zea Mays
ccaggttcagtgtcctaaccaaggttgtgtactggtggggtatgagagcatgttagccacgtgttgaagtccatatgtgctggcgctctaggacacactgcttcactgcatgttggccatgtctagggacgtttgctatatatatggtggctctgaaatctagttcagtgaaggattcacctggccttcggattctagccctagaccagtgtaaaagtgtggaagtccttgtgctccagttgatgccagtctcttcccagccactaggtttgctctgcacaagtgttggcacaccatcggtctgccagtagtgaccacgccggtcagtttggccatgtcgccgtggccaagacaactcagcaagctccgagcagaaggagtgtaaattcaagacgaagtggttgtggaagaggagtttgctccagtgcctattcagcaagtggatggagctatctaactggttattgggtagaaaggtcttaagcctcttcactgcaataaaggatggcggtgccgaagattgatagtccgaagcacgttccgaaggctgttgaagcttctcttaggcctgcctgtgtagagcttagtaacatttgtattaactttgtagaaaaaactgtaatcaaggattgaacaatgttatgtataactgtccataccttgtaatatatttttaccttttcatccatgtacaagttgctttgctgtggacgaaacttgtattttttgagccgaaggcgaaaaacacattcccttctttttgtacacaacaaagcatcctgttgcgtcacatgtatacgtttgaaacgaagcttctttgtgttcatcgaagcactgtcgtcgaagatggagtatctctgttcgtgcttcatgttatgatgatg

SEQ ID NO: 39321 - DNA, 1269 bp, Zea Mays
aattgctctacgtgaacgaagcttctggaaactcgctggcccgatggcatcggaggccgcgattgctcgtgcgcagtgcctccttcgcttccgccgctggtcgccactgccgcttcttcctctcccttcccctcccgctaccacacgagcagcttcctgccgccgcagcgtacgcatggcctcgtcggacggctctgccgcggccctgcccagcgctaccgtcgatgtgcccggcgccggggcccctgtcctcgtcgtgggcgcgccggggctccccgaggctgacttcaggaacgcggtggagtcgtcgctgttcaagcagtggctgcggaacctgcagtcggagaagggcgtcctcacctacgggaggctgagcctcacgcgggttctcatccagggcgttgacatgttcgggaaacgggtgggctttctcaagttcaaggctgatatcgtggacgaggaaaccaaaaccaaggaattgtctttgcaagagggcccgcggttgctgtgttgattcttttggagtcgaatggagaaacatatgctgtgcttaccgaacaggttagagttcctattggaaaattcctgttggagctgcctgctgggatgctagatgacgaaaaaggtgattttgttggcaccgcagtccgtgaggtggaagaagagactggtataaagctgaatatagaagacatggttgatcttacggcactgctggaccctgctactggaggtcgaatgctaccatcaccgggtggctgcgacgaagagattggcctgttcctgtacaggggccgcgttgacgaggagaccataagatcgctccaggggaaggaaaccgggctgcgcgaccacggtgagctgatcaagctgcgcgtggttccgtacagcgagctctggcggtcgaccggcgacgcgaaagcactctccgcgatagccctgtacgagatggccaagagggaaggcctgctgccgcagccgacgccgtcggccaacttgtgaagacctgctagcactttaaaacagtggtggccgtcatgcctgtaaaatggaaggaggaacgtcactcgcgaaaccaaatcatatatatctctatctcttcgtttggtataacgcgcttaagcttgtctgtttgtgttatgtatacatatactaataatttaaaaataaaagtataatcgtgtttaaataaatatttcatttaatcctatataatatatagaatgtacgatcaattgactagtaaacatgaacatcgagtttaaagtt

SEQ ID NO: 39322 - DNA, 1607 bp, Zea Mays
caaaagctcgcgccgtcgtaccgcacagggtgcatatacgccggccggctggggttctcggcgcagccgcggagccgcggcgcgcaggtgttcacgtaccgcgagctggagcgcgcgacggactggttcagcgagtgcaacgtggtggggcggggcgcctccggcgcggtcttccgcggccggctcgccgacggcaccaccgccgccatcaagcggctgcggctggaccagcggcggcagggagagcgcgagttccgcatcgaggtggacctgctgagcaggatggactcgccgtacctggtggggctgctgggctactgcgccgaccagagccaccggctgctggtgttcgagtacatggccaacggcagcctcaagagccgcctccaccacccggcgcccgccgcagccgcagccgcgggcccgccgccgccgccgccgctggactggcagacgcggctgggcatcgcgctggactgcgcgcgcgcgctcgagttcctgcacgagcacagcagccccgccgtgatccaccgcgacttcaactgcagcaacgtcctgctggaccataactaccgcgcccgcgtgtccgacttcggcatggccaaggtcggctccaacaggacagacggccaggtcgtcacccgcgtgctcggcaccacaggctacctcgcgccagagtacgcgtcgactgggaagctgacgaccaagtcggacgtgtacagctacggggtcgtgctactggagctgctcaccggccgggtaccggtggacacgcagcggccgcccggagagcatgtcctggtttcctgggcccttccgcgacttacgaaccgccagaaactcgtgcagatggttgaccctgccctgaaaggccagtttgccctcaaggatctgatccaggtggccgccatcgcggcgatgtgcgtgcagacgaaggcggagtacaggccgctgatgacggacgtggtgcagtcgctgatccccatcgccaagaccaccccggcgatgtcctgctcctccacgccgctcagaccggccctgcagcacgtcatcttcatgggcccgcagtgcggcgacgacaaggcatcctcctagccctagtcctgccatggaggtaccctacccaccactgcctggatcggagcgtggtggagtcggtggccatcgactatagcgcgcgctaagaattctcgttccttgatgtatagagctcctcccctcttctccaggatctgcagacgcaacgcatcgttgcagtagtgcatcgtgattgtattcgggcacaagcgtacggcgtgtcatttattggtacggactgttttaaagataacatggaaatacaaataaatattctttgttcatcatcttcttttttacaaataagtagagtgagaggacacttcttattgtagaaaggatttaattgaactggcatcttgagctctctctctgaccttcactggttgcaactcaatgtcttacaatagtttttgcaatgtctgatcttaaaaacatggtctcttagtactcacacaagcagtaggtttatactgaagtagcagaattacagttactggtgcattttcctcgtcgaaacaaaactgacg

SEQ ID NO: 39323 - DNA, 224 bp, Zea Mays
caaatgtggccccatgggttgcttacggatggttttgcttgctgtctatttttttcccctccccgttattatccttgatcaaatgttgaagcaggcgatggtagtttaatttgagcctggtagacttgtgggcaacggtagggtagtagaggcggagctaaagtaaatttgagaaggacaaaccctctgaagtgcatatattttttatactatgagagtgccaa

SEQ ID NO: 39324 - DNA, 1595 bp, Zea Mays
accctgcgcccctctcttgttctccgtttccccgcggcgtactcttcctgctcttcctccccctctgtttatctctctctcggtcctcccgtgtccatcgcgtgcgctctgtctccggtggcgccgcctccgccaccctgcaccaggtagccataccttcgccggagacgagcgcccaccagatcagattcgtggatatgtctgataatgagaaattggtgggggagggaaccacccgccgaggggcggactgggaagttgtcactctcacagcatctgcctatgaagcagcgccagggcctgttggaacggaagtaaagcctgttaacgaagatcaagagcgtagttcatccgatgcactgctcatgtctgaccactttgtgtttccgccgagtgaacacgagaacctgccaatacaaaccagttttgatgagatacatgctgagaaggatgtgcagaaacctagtaccagtgtggaggattatagtatcaagaatgatgttgggtctgagagagttcagtttgacgatgaagggaaacacctctcagatgatgatgtggagatgaaagatgacacccctgggtacggttcctctcacgctgaagatgatgcacatggttttgttgcccatggtgatggcattgagtctggtgaagattttgatgaaaaatcaggccaccctttagagctctcagacagcaagagctgtgatactggtgcctcttgcaaatgttggttgaagaagcatatgacatgcctgtataaccaaacaaaggaaacaaatgctatctggtctgtggtggttgcagctgcactagttggtattgtgatcttgggacgttggcacaaagataaattccaccttaaccagcttaagtggtgctctggctcagcagtgaggtgcgcccgtacagctgggaaaggataatagggggcgattgcaggcccaagccatcagcgtgtgcaacttaacagattttaggaatgtcatccaaggaaatgcaaacttagaatagtggccgttcagggaagttggaaattttgaaggcattcaggggatcaatataaatttcagtggcaatgaggaatttattcatattctagcgtgaggattagcctttcacttttcaccagaaccaagaggatgatcaacaattggcttgttgaaaactcagatgagtcaattcaactgtcaccaaaatggttttggaatattgttgtgacggtgacgaaaaggagtatgttcaatgtaataatatgttcaactggaatttcacttgccacctacaatgagtgcctcgtgggcttctaagtcaaactcactcctgccatacacattatcttacagtttttcttgcaacctggcacatgatttttggttcctggcttcctgctacttgctgtggtgtatcatatatgttgactgatggctgtagaacatagtacaattgcatactgcaaagtctgttgaaattttggtggttctgcgagaacaattcacgtgcgattgtgaaaatggaggacaaggaaagtttgtttggctcttatttgttgttactcctgagtattgaaatattgcttaggtctagtttgg

SEQ ID NO: 39325 - DNA, 1246 bp, Zea Mays
ccggcatatgtatagttcctgctaactgatcgagatcgctctcgtttgtactttctccctttgaggaaagagtttccccttttctgtgcttcaagttcttctggtatcgccagcatgggtaggggaaggattgagatcaagaggatcgagaacaacacgagccggcaggtcaccttctgcaagcgccgcaatgggctcctcaagaaggcgtatgagctctccgtcctctgcgacgctgaggtggccctcatcgtcttctctagccgtggtcgcctctacgagtatgccaacaacagtgtcaaggctactattgagaggtacaagaaggcacacaccgttggctcttcctctgggccaccgctcctagagcacaatgcccagcaattctaccagcaagaatcagcaaaactgcgcaaccagatccagatgctgcaaaacactaacaggcacttggttggtgattccgtgggaaacctgtcactcaaggagctgaagcagctggagagccgccttgagaaaggcatctctaagatcagggccaggaagagtgagctgctggctgcggagatcagttacatggccaaaagggagactgagcttcagaatgaccacatgaccctcaggaccaagattgaggagggagagcaacagctgcagcaggtgaccgtggcacggtcagttgcagcagcagcagcagctgccaccaacttggagctgaacccattcttagagatggataccaaatgcttcttcactggcggccccttcgcaacgctggacatgaagtgctttctccccggcagcttgcagcagatgctggaggcacagcagcgccagatgctcgccaccgagctgaacctcggctaccaactggcgccgcctggttctgacgctgccgacaataaccctcatcatcagttctaaactggatgcatgcacgagaagcttttcaagcgaactgtgaacgatggaagctggctgttgcctctagatgttcttggcttccatgacctagcttattatggtgtgtattgttgttgccttttgtgtgtgattctccttgctactctactgatggagaactaaacctaatcgattggacataatgatcaaatgctacagatcctgtgatgctgtgatcaggttaaggcaaaacatgtatactgattgcttaaatgggtttacgagtgacgacaatgctatttgttgcttctattactgctcaactctctcttgcttccggttt

SEQ ID NO: 39326 - DNA, 1419 bp, Zea Mays
cttttctgttggatgttctgaaaccaaacttgccagagcatgcttttcttcaaaccaaggttttggagataaacttagtgacttacccaaatgttgttgatgccattcttgctaatgccctccagcccattaacaacttccttggacaggcacttgttgagttctttggcacattgtcaagagagtgggctttggaatgcatgaaagaccttctactggttaatctgaggggaaatcttcagattgttgtgcaggccacgaaagaatactctgagcagctaggggttgatgcttgcatcaaattatttgagcaattcaaatcttatgaggacctttactttttcttgggatcttatctgagctccagcgaggacccagatatccatttcaagtacatagaagcagcagcaaggactggacaaatcaaagaagttgaacgtgtaaccagagagtcaaacttctatgatgctgagaagataatgaactttttgatggaagcaaaattacctaatgcccgtccactgattaatgtttgtgatcgctttggttttgtgccagatctcactcactatctgtacacaaacaacatgcttcgatatatcgaaggctatgttcagaaggtgaatcccgggaatgctccattggtagtggggcaattacttgatgatgaatgccctaaagattttatcaagggtttgatcctatttgttcgttctctcctccctgttgagcctttggttgatgaatgtgagaagagacgtgggcagtgtgacgatgaacttattaacgtcactaacaagaattcgttattcaagctgcaagctaggtatgtggttgagagaatggatggtgatctatgggataaagttcttcagcccgagaatgaatatagaaggcaactcattgaccaagtggtttcgactgcattacctgagagcaagagccccgagcaagtgtctgctgctgttaaggctttcatgactgctgacctgccacatgaactgattgagcttcttgaaaagattattcttcagaattctgctttcagtggaaatttcaatctgcagaacctgctcatcttgactgccaaagcccagttacgtgaaggtctggtcagtgaagcaattgagtccttcattcgtgtagatgatgctgcacacttccttgatgttatccgtgcagccgaggaagctaatgtgtacaatgatttagtgaagtacctagatcaactcacttgttatgattgttgagttgattcttgatagcatcactaaacaatgatatatttgtgtacaagtgtcccccgttgcaacgcacgggcatatacctagttaatattttaattatagaaacaacatgaacactaatttctttattttatgccttttagaaaaaaactaattgatatacatatacatg

SEQ ID NO: 39327 - DNA, 8524 bp, Zea Mays
gcggcatctcgtctcgtctccccagtccccaccccgagatcgctcgtcgccgccgccgtctctttactgaacagggattccctcgcggaccgcggcccgaccgcctccccgaagctagggttcgagggaggttatgccggcgctgtcgcaggcacggatccgggcggcgtgacgcggatccgccggacgctggcagggtcggccatggcgtcctccccagtcaagttcttctcggtgttcctggccgtctccgtcgtcggatggatcgtcttcacgtttgcttcaagattgttagcttggttcttgagccgtgtattctctgcttctgtcggatttcgagttgctggtttcaactgtttgagggatgtaacaataaagttctgtaagggttcagttgaatctgtttcgattggtgaaataaaactaagtttccgcaagtctctagtcaaactaagttttggtgttatctcaaaagacccgaagttgcaattgcttataaatgatctcgaaattgtaactagatcatcttctgaaaataaaaagatacgaaagtcagcaaagcctcgctctacaggaaaagggaaatggctggttacatcaagcatggcaagacttttatcagtttccgtgacagatctgataatcaaggtaccgaaaggcgctcttgacatcaaagaactaacggtggatacatttaaaattgctgggcctaatcatactcttggtgtcaagttgcatcttttacctttgaatatactccttggagatttgggattgactactgatccaatgggcagttgtagtctgtttgatgctttccagtctgatcaagcttctgtatctaactcagagaaaagcttggccccatttgtttgtgaagatttgttggttacttgtaaccttggccatgaaaaggagaaaggtattaaaatcattaacctggaattgaaatgtgggtatgctattgccaacattgatgaaaggatgtttcacaagaagcgcacgattccagaatataacactgtctctttgaacaccggagattctatcacagatacttcagcgctcaaacaaacatcgaaaagcaaatctattctaccgctgttaaagaaacacatgctcacatttccagataaggttagcttcagtgtgccgaagcttgatgtgaagttcagacacctgcatgaaggacttagtgttgacaacaacattacagggatccagtttacttgtgcaaaatccctaccacaagatgattttgaagaagcgacaccacacttcgatgttcaaattgatcttagcgaaattcatttaattagagaaggttctagttctctgttggaagttctgaaagtttttacaatagcttctttggatgtccctgttgacccatttcttccaatcagagctgagattgatgccaagcttggtggtacccaatgcaatattatgttaagcagactgatgccatggatgcggcttcattctttgagaaccaaaggaatgaaactttctaaaagaaactccaatcaagaaatttctcaaaaaaaggagatgaagccaattttgtggacttgcacggtcgctgccccagaaatgactgtcttgctttacagtctaaatggattggtcttgtaccatgcttgttcccagtcatcacatttgtttgcaaataatattgcaagcaaggggattcagatacacacagaacttggtgaattgctggtgcacatggaggaggaatatagagagttattaaaggaaaacatatttggtgtggatacttactctggttccctaatgcatattgctcggatgagccttgattggggatatagggaaagtgatgtccaagatatggttgaaactagcaggaatgcacttgttttttcgattgatataagtgatatggaagtgaaatttggcttcaagcatttggaatcaattgtgcttaatttgatgtcgtttaggactctatttaagagtctccagctatctggcggaagtgctaaagaaaagaatttggagcgtaaaggggagaagaaaatgaaaggtgtgaagaaactgaaattaagcctacaaaaattctctattacatactgtggtgatgcaaacataataagtatgccaattgctgatccaaagcgtgtgaactacggctctcaaggtggtcaagtaattgttagtgtttctgctgatggcacaccacgtagggcaagtataacatcagttttaccagactgccacttgcggttctccgcatctttggtaatatctcatctctctatgtgtatagacaaggagagaaagacaacagaagcggaattggaacgggtgaaggcaatctatgaggaattacctgaggatcgctctggtgtcagagtaactttactagatatgcagaatgctaaaattgttcgccgatccagtggtcatgcggaagttgctgtttgttccctctttagtgctactgatatttatttgagatgggaacctgatgctcatttagcactatatgagacattcatccgctttaagcatttcctacatcataatgtgtcccaaaattctgaaaagatgattaatactgaagttgcaagtaccaaatcaaatgaacatggcaacataactgccggtttcattaattctcagaaatccaacagaaaagggtcaatttttgccattgatgtggacatgttaagggtatctgctgaacttgctgatggtgttgaagcaaacatgcatgtacagtcaatctttactgaaaatgccaagataggtgtactgtctgaaggtctttctcttacttttaatggcgctagagttctaaagagcacccgtatacaaatatcctgtatacctttcagcactgggagtttacttgatgcaaagattgaaccatcatccaaaagagactgggttgttcaaggtctagatgtccatatttgcatgccttacaggttgccattgcgtgccatagaagatgctgttgaagatatgtttcgtgcccttaagcttgtctcatctgccaaaagaagtataatctgtcctgatgaaaaggaaaaatctagaaaggttaattctgggggatccaaatttggatctgtgaaatttgtattgcgtaaattgacagcagatatagaggaagagcccatccaaggttggctcgatgaacattaccatttgatgaggaacaaaatctgtgagctaggtgttaggttgaattatcttgaggaagctatatcaggaagtgtagatccgagcaatcacagctctgagagaaaagttctctacaatggtgttgaagttgacattcatgacaccacagctcttcaaaagttgcaggaagaaatccataagcaagcatttcgatcatattatgtgtcttgtcagaacatggtacttgcagaagggtcaggagcgtgctcagaaggttttcaagctggattcagacaaagctcgcgaagagcttctcttctttcactttctgcttccgatctggatgttactttgaccaggatagatggtggagagatagaaatggttgaatttataaaggggcttgaccctgtctgtcaggagcaaaacataccattttctcggttgtatggtagtgatgtttctgtcgttgctgggtccttggttgtacagctaagagactatacttctcctctgttctcttcactcagtgggaaatgtcaaggccgtattgtgcttgctcagcaggcaacatgttttcaaccccaaatacaccaagagttgtatattggaagatggcaaaaggtcacgatgctacgttctgccagtggtactacgccagcaatgaaaatgtactctaatttacctatttatttccagaagggagagatatcttttggagttggttatgagccatctttcgctgatataagctatgcatttcaagtagccctgcggaaagttaaccttagcactagagcaagctgttctggtctagcagtccaactgcctaaaaaggagcgcagcttaccatggtgggatgacatgagatactacttgcatggaaagataattttatatttcaatgagaccaaatggaagttcctggcaacaactaatccttatgagcatgtggataaactccaaattgtctctgaatacatggagatccagcaaactgatggtcgtgtggatgtttctgcgaaagaattcaagatatacataagcagcgtagagagtattacaaagaaccgccgcataaaagttccatctcgtgtgcccagaccttttatatatgctcctctattctccctaaatgtggttattgattggcagtgcgaatctaggaatccattgaatcattatttgcatgcactccctgttgagggggaacctcggaagaaagtttatgatccatttcgatctacttatctctctcttaggtggaacttctccctcagaccattgcaatcccagtatggtaatggcccaccacctcccttttatggaaataattcaatgctccgtgggatcatgtctggtagtccttgcaaaatgactgatgatgacttccctaccatgaacctgggagctcatgaccttgcttgggttttcaaatggtggagcttgaattacagcccccctcacaaacttcgttccttctctagatggcgtcgttttggaattcctcgggctactagatctggtaacctctcgctggacaaagttttggttgaattctttttccgtgttgatgctactccctgttgcataaggcatgcacctttaagtgaggatgatgaccctgcttttggtttgacgtttaagatgtcaaatttgaagtacgagttatgttacagtcgaggtaaacaacagtacacatttgattgtaaacgtgaatcactggaccttgtttatcgtggtctggatcttcacaggccggaggtttatttgatgcgagataacaatttgtcttcagttgaaaatgtatccaaagtaaggactatggtccaacagtcacatggaaaatttgttcatgacagatgcaacatgggtaatttccaagaaaagcatgaggatggcttcctcttgtcttcagattatatcacgataagaaggcaaacacgtaaagcagatcctgaaagacttatgggatggcaggatactgggaggagtcatgagataacatatgttaggtctgagtttgaggatgacagtgaaagtgaccacactctatctgagcctagcgacgacgacgatgattttaatgtggtgcttgctgacaattgccaaagagtatttgtttatggccttaggattttatggactattgagaatcgagacgcggtttggtcgtgggttggaggaatttccaaagcatttgagcctccaaaaccctctccttcacgacaatatgcacaaagaaagatgattgaagaaaggaatgctgagggctccaaggtgccgcaagattccagctcttccatacatgtgggttctccatcagtgcaacatctggatgcttcgggttcatcttcctcgttgcatagtaaagccaatcgctcctctgatgtggctgtaaatcatgacatttttgatgattcggataaaggagggacagcccaatatatggttaatgttattacaccccaattcaacctacactctgaagaagcaaatggaaggtttctacttgctgcagccagtggtcgtgtactggctcgttcatttcattcagttgttcatcttgggaaagaaatactagaacaagcacttggaacaagcagtgcacagattcttgagttacaacctgaaatgacctggaacaagtcggaactctcggtgatgcttaaagatgttcaagctcatgtagcccccactgatgtggatcctggtgctggtctacagtggctccctaaggttctgggtagctctgagaaattgaagcgcacaggtgccttgttagagagagtgtttatgccttgtcaaatgtatttccgttacactagacacaagggtggaactgcagacttgagggttaaaccactgaaggagctacgctttaactctccagacattactgcaacgatgacctctcgccagtttcaagttatgtttgacgtgcttagaaatcttctattcgcaagacttcccaagcctaggaaaaacagtcttcagtatccatcagatgatgaagatattgaagaagaggctgacgaggtagtacctgatggagttgaagaagtggagcttgcgaaaattacactcgaacagagggaaagggaaattaagttactgcttgatgatataaggtctctcactggaaatggtgataatgggaccgatcactgtcattctgcagaaaaaggtgattgtttatggatgatcaacagcgggaaagcttcattggtggaaggactgaaaagggatttcgcaaacctacaaaagtctagaatatttgcatcatcagcattgaggaaagcactttcaaatgcttcacaatcacatttggagaaagaaaagaacaaaaccacttcttgtgccatgcggatttctatgaaaattagcaaggttgtatggagcatgctcgcagatggaaacacttttgcagaagctgagatcaatgatatggtgtatgattttgatcgggattacaaagatataggcattgccctgtttacaactaaatactttgttgtgcggaattgcatggttaatgcgaaatgtgacaccttattgtctgcctggaacacacctcctggaaaaattaacatgcttcgtgtggatgccaagcaaggtgctcctaaggatggaagttctccacttgagctcttccaggtggagatctacccactgagaatatatctatctgaagcaatgtatagaatgatgtgggattacttcttccctgaagaagacgattcacaacgaagacaggaagtttggagagtttcaacatcaaccgggcctagaagaacaagaaggctctcttctggtgtcgatgctgttacttctagcagctattctgtcagagatcatgaacttcctgggaaatcaagtacaactgtatctacatcaacaaatgtttcaagttggcaaggtgtcaaagtttcagagtataaaagcaaatatggtatgtggttcgcatcaagagttgcaccggtcgtcttcatttgaaaggaattgggaagaaagcgctgcagaaagtgttgcaagtaatgatgtggtatcactcctgaattcttcaattgtttcttcaaaagtagatgctagcaattctgtcttagagaaccctgttgtgggaagtgagatgtggagaagtaaaacgaaagattctaagcctgccaagtctggacgtctatctcacgaagaaaagaagcttgggaagtctaatgatgaaaagaagacaaaacctcggaagtcaatggaatttcataacatcaagattggcaaggttgaacttcttgttacatacgagggatcaaggcttgctattaatgacctaaggttgcttatggatactttccacaaggcagaatttactggtacatggaggcgactattctctagagtcaaaaaagggaagaagtttagcaaccatagggaaacacttgagggttctattcctgaaaatgatcttaacttgagtgacagtgatgttggtcaacctggaagacatgatcaattaacagcttcatggttgaagaggccaggcgatggtgcaggtgatggatttgtcacgtcaattagggggcttttcaatacacagcgccgtaaagcgaaggcctttgtgattcggacaatgcgcggtgaagggcataatgacgaatatcaagacgaatggagcgagagcgatggtgaatacccttttgcgaggcagcttacaattacaaaggccaagaagctcatacgaaggaagttccgtccaagggtgcaaaagaacccaggtctgtcgatgcaagattcactcccatctagtccgcgggaaacaactccatatcaaagtgactcctccaggtcatcttacgaggacttccatgagcagtaaaacaatctggtgatgctgctttcagcttctacatttggtcgataagatgcagccatttatattggttatagtagggtgtatgtatatagtaggatgtaccatcaaaatccaatgtatcatgtatagtggttaggcaatactccgtaattatgtgcttgtaagttaataagaggccagctcgtactcctagaaaacaaaacccgtgatctatggcatggggcattctcattcccttgtacttcaggactagtatggattgtaaattcaacggtgaaggtgttgcaacatttattcagtaaagtatccttgttgaagaatttgtaaaaactatggcagaaacaatagggaaggagcaagtgactaggtgcctaggtgtattatgattcttttgctgactagttggaagttagaaatgcattgctccacgtcaaaaagaaatgcgtggcagacaaggttgttgcttaacagatcggtgagctatgaaatgctatctgttca

SEQ ID NO: 39328 - DNA, 1887 bp, Zea Mays
gattcggctgcttctatcttgcagctcagaaacatgtggcgataaaggtatataagccaaacgcttttgcaaactgggagcctgggatcaccaaatggaccgtgttcttctgagctcccacttgccatctcacgctcatgcaaacacgaggttgcagcagggtcctggtggcctcaacagtataggatttgcagtcataaaaaagggatgcttgaagttaagatgttacgcgatcggcgatgaactcggtggtccagggcgctttagacactggagatttctttgtcagtgacgcagagggtgatccagacaaacctaccgatgggttctcctcgatcgaccaggctataggtgctttgcgtgaagggaagtttgttattgctgtagatgatgagaacggcgacaacgaaggcgaccttgtgatggcggccactctagtggaccagaagtcagtcgcattcatgatcaggaatggctctgggattatctcggtaggcatggaggaggaggacctgactagactgatgattccgatgatgtcccctatcacagaaatcgaagatatcacggctgctgcttccacggtgacagtggatgccagggttggcatatctacgggtgtgtcggctgcagacagggcgaagaccatcctcactctagcctcctctgactccaagcccagtgatctgaggagaccaggccacatattccccctcaagtaccggaacgggggcgtgctgaagagagctggccacacagaagcgtcggtggatctggttgcgttggcaggtctccgtcctgtgtccgttctctccaccgtcatggaccccagggacggttcgatggcaggcgtaacggttctccagcagatggctatggagcatgacatacccatcgtttcgattgctgatctcatccggtataggagaaagcgggagaagctggtggagctgattgctgtgtctcgcttgccgacgaaatggggcctcttccgagcctactgctaccagtccaggctcgatggaaccgagcacatcgctgttgtgaagggcgatatcggcgacggcgaagaggtcctggtgagggtgcactcggagtgcctgacgggggacatcctcggctcagcccgctgcgactgcggcaaccagctggagctggcgatgcagctgatcgagaaggccggccgtggcgtgctcgtgtacctccgcggccacgagggccgcggcattggcctgggccagaagctccgcgcctacaacctccaggacgagggccacgacaccgtcgaggccaacgtcgagctcggcctcgccgtggacgcccgcgagtacggcatcggcgcccagatactccgtgacatcggcgtgcgcacgatgcggctgatgaccaacaaccccgccaagttcatcgggctcaagggctacgggctcgccgtggtggggagggtgccggtgatctctcccatcaccaaggagaaccagaagtacctcgagaccaagcgcaccaagatgggccacgtctacggctccgatctcccgggaagcctgccggagttcgccaacccacaagaggcccccacagaacaagacgacgacgataaccaaaactgataaaaaaactatacggtgtcgtttttttaggaaaagataccaatataaccacaaattcttgtattccactgagaacgagtattgcagagtatttatttatcaactgcaaaattattaagtataatagagatacaaacttttatcaacgcctcttttacggaggtaaagcatgtttctccctaatatttattagagcctcatgtaagagaagcggatcaagctctcggccaggtactttccgtctgattggatgaccgcgcccatgcgtacaatctcg

SEQ ID NO: 39329 - DNA, 955 bp, Zea Mays
cgacggcccaccaggtcggtcagcagtcagcacgtctccgtccccgacgatgccggggagcaatgccaatggagggcgcagcctgtacggacacggccgaccggccatcttcatccccctctccttgccgccctcggttccggactctgctcccctgccccatacccccaccgctcctcacgcctcgcctgactgccaaggcaatcccggaagctcctcccgcgcgcgaacatgaatgaagtcaaatttcactgctctgctagaaatgacctgctggaacgttggtgcagatttggcctgcaacaacgcagaggaggtgatcttatgtaactacaaaagatagtaatggggatatccaaggtgacaggcattgccgcgacagcttttcttgtcacatctgttagtctgtgccagttgggaatgaggattattatgcttccattcctagccaccggtattgttgcttccattgtcacggttgcatcgcatgatgccatcaacctaccgtggatcttggggaagaactcggttggaagatttcctctttggtcgattatactgtttggtcctttcttgacgcttgctcggacatatgcgatggttaagagatacatgaggaaggaggccgtgtatgacaagatcgtggaaggcctatatctcggaggatggccgtttctcttgaaacatttgccccctggaaacccatctgtcatagattgcacttgtgagcttccaagaagttcattcgttccagcaaacgagtatctttgccttgcaacttgggataccagagctccaacaccgcaccagatcgaaaaggctgcacgttgggcttgtgaaaagagatctgaggggaagccagtttatgtccattgcgcatttgatcggagggcctgaatccacccatccagaggaagcagcgctcggcgggggtcgtccacaccccagtgatgag

SEQ ID NO: 39330 - DNA, 828 bp, Zea Mays
cttgtgttagcgctggtgattcggcagccagcgaggctgatccgggaccgggtggctggccggtggccacaccagaggtctattatacctggattccgcgaggccacggaccacggtgcgcgcgctcttgtcttgttcctgtgcctgccactgccagtgccaccatctcgccgtcggcgtcggctcgtcgcctgagagccgaggccacgcaggcacccgggccgggggatgtcggcgccggcggcacaggccgtggtggcgctggctctcgcggccatcctctcgaccccggcgccccaggcggacaccttctccaacgtcccgcccacgctctccgggggcgacgggaagcaagagcggatcaagcaccccaggtcggccaaggcgttgcagtgcacgaccaagtgcgtcggcacctgcatccgcggcggcggcggcgcgcccggcgaggggcccctcaacgtcaggaggcccctcgtggtgttcaaggacggcttccgcagccggcagtactgtttgttgttcaattagcctgatagagtgctcggacatttgcaatcgcatcaaggatgggcaggacggaccctgagacgggccagaggaacaacatgcccaagcccaaagttgttggagcaactgccatggctgcggtgcaggctagatatgggatccggttcttctgccaggcctccagaagcagaacttcagaggcgacaagggtaataaggtacagtaaaccagtcagtaacatataggatccagagacatttgctagcaacaaaatccgagaaaagctgttaagagtgatgcgtagtggtcttgataacc

SEQ ID NO: 39331 - DNA, 2320 bp, Zea Mays
aattcccatcagggtccgtcacgaaccggtgggcggagtcttccagaggccaatattctgacacagcggaccccgtgggccgtggccgtctcgtttcccgtctcccgcatagaggttcccaaaccattctctttcgctttcgtctccgcaccctagggtttctgtgcctcgccagcgaagcgatgcagccgccgcaccaaccgccgatgaacgggcaacactcccagcctccgccgcaaggacccgtggtgcccatgcctccgcagcagcaggcgcccccgctgccgtactaccagcagcagcaggcgccgcagtactaccaacaggccctcccgcagccgtgggggcagcagcagcagtacgctgcaccgccgccgcagtacccgcctccgcctcagacgcagcattacgcgacaccaccgcagcagtacgcccctctgccgcagcagcagtacgctcctccaccgcagcagcagtacgctccttcgccatatggtaccacgccgggaagcggtgaagtcaggacgctgtggatcggagatcttcagcactggatggacgagaactacctccactacaacgcctttgcggccgtggcccagcagattgcttctgtgaaaattatacggaacaagcaaactgggcactcagaaggctatggttttattgagttttactctcgagctgctgcagaacatactctgatgaacttcaatgggcagatgatgccgaatgttgagatgacttttaagctgaactgggcttctgctagcactggtgataagcgtggagatagtggttctgatcgcacaatatttgttggtgatttggctcatgatgttactgactccatgttggaagatgtgttcagagctaagtacccttcagttagaggagctaatgttgttgttgataggatgactggatggcccaaaggatttggtttcgtgcgttttggagatctgaatgagcaggcacgtgctatgactgagatgaatggaatgttgttatctacaaggcaaatgaggattggtgctgcagctaacaagaagaatagggatgctcagcagacatatgcaactgacggatgtcatgccatctgcatttaaggcctggaattgtcttcagatgtctatgtaaccagtgcctcggttagctaagcagtacatgcagtgaacaactaattgaagcaaggatttcttgtattcttcctctgacctcattggaatgctaaccatttctttatttgttttatttacttacatcattgcaaatgctgttgactattttggatccttactagaaatatgttaagctattacttttgctggccagaatatgggtgtccagtgttccgttgctattattttgggggtctgaattcccagccaatttgccaactttgttgctgatggtttgtcttgccattgcaggagcataccagagctctaaaggaaattcttcagagaatgatcctaacaatacaacagtctttgtaggtgggttagattccaatgtaaatgaggagtatctaaggcaaatttttactccgtatggagaaatttcctatgtgaagattcctgtaggcaaacattgtggatttgttcaatttaccagcaggtcatgtgcagaggaagccatccgaatgctgaatgggagtcaggttggtgggcagaaagttcggctttcatggggccgtagtcctcaaaacagacaggcttctcagcatgatgccaacaaccagtataatgggaacagctattatggataccaacagccgggttatgaaggttatggctatggtgcttccagtgcacaagacccaagcatgcaaaactactacggatactctggttgtggtaactatgagcagcagcagccaacacaggaacagcagctgcagcagcctccaccaccacagcactgacgattgcttgcacacctctggagtgctatcggattagagtgatggtggagtcacggggcgctgcaatgagacatcctatatagatatgaaggtcatatagtcgcataggagtggttagactttcttggggaccagtgttaatcgatgatggcactccggatgtttcttctgtttgtcgttgagatcttgactgttgaagtgtgctctgttgatattaatgtcttcgtcagattgttaatttgcttgtttcagatgtcccagaaccatttgtacttagggagtgtttgaatgcactagacctaacagatagttggctaaaaaatttgctagtgaaattagctaaataataaatagctagctaactattagctaatttgctaaaaatagttatta

SEQ ID NO: 39332 - DNA, 2965 bp, Zea Mays
ccggcttccttcccctggaagcctcctcccctctcgcgccgctccaaaaacttgctccaactcccggcacgcgcacccaaagccaaaacccctcgcgtcgtcggccgtcgcggacgcttccctccatcgtgcgtctgcgccgtcacgttttccgcgatgccccgccccagttcacgcgccaaggcggcatcaccgccggaggcggtggccggtgcctcgcagcgcacccctgcgccgtccccgtccacctccctccgcctcggcattggccccgtagcctccgatgacaaccgcggcgccggatccctcgacctcaagcaacccgccgctgggcctcgccgacacagcctgcgcctcatgggcgccgccctcggcctcggcctaggcccggtctcccaccacgatgactgcggcgccggatgccccaacctcagtcctcccgccgccgtgcctccccgacgcagcctgcgcctcgcgggccccgccttgggtactccaaacactctctccgctcgtgacggcagttcctccgggttcgggtcgggcgggagcgagaagaggtcggggagggcccgtgctcgagtccctgcctcttcgcttgctacatccatctcgccgaggactgggaactccaatagcgatggcggagggtcgggggcggacagggtttccgcgagcggcgacagctctggcggttcggatcccttcacgaccctgcggtcagggtttcggatcgcgaagcgtcggatggaggcgggtggggaggcggagactgggtcgtctcgtcgaggacaggtgcataacgaaatgctgcaccaacacgtggacacgccgacgaagcggtgtaagaccatattggtcggtggagtggagacagagcatgtctctgacacaaagggtgattctgatgaggattgtatgatgctgggtccaagtgggaccgaactgaattatgttgctacgaagactgaaaagggggatgtggatgatcctgccaatgcaagcaatggagaatctctgcagacgcataatctgttaccggcagcaaatggtggggtggttgagcaattagtatatgcttcaggaagtcctgcaagttttgaagcacaagtctctgcagatatgtgtctcaaggaaggttcgagccaatgcagttctaggaaggaaggcaaagtgaaagagaagcttgttttggggaataacaaatcttgcgcttatgctaatgtgggctctgcagtcgatacctgttcccacaaattcaaccctgatagcaaaggaaaggaaaagatggttgcagaagatagtttatcatctctgacctcgagcgaggatgagccagatttcgatccagtggattccaaagagactcagctcaactcaggatcagtttctgcttctatggagtcatatcgcagacaaaccgtaaaagaaagggctatcaagctggcccctaaatttgcattcttcaaagcagataaagatgagcatagtgaagatgacgatgaagagttagagcctggtcctgacactgaagactggccaggcccatttgcaactgcggcaaggatatatgaagaaagagaagctaagttgagagctcgagagttgaattctttaaagctggacgaatctgcaaacagggtcatccgttggtcgccttcaaaggataggaaaaatctagtacaagctcaagttgctccatcacttacaagtgtatgcttaaatacccttgcggaacattctgaatggattcaatcgcttgaaggtgtcccagaggagctaaagcacaagctgttaaagattctgtgtgattccaggaagatgaatactcatcttctcaataaactattgtgtgacagtcctacagaactgcatctcagcgagtgttcatggctgagtgaggatgactttgagaaaacttttgggaaatgcagcactgaaagtttgcaggatctacagcttgatatatctgggagatgcatacctgactacatattgccaactaccttagctaagaagattaagcatctagaggttttgtcaatgtctagaatacaatctgtttgtgacaaatttgtgaaggggctcattcctgtacatggtttaaatctgaaggagttagcatttgctggttgcttgaaacttacctcatcttccatcaagactattggggaatactgtcaaaaaataacttcattggacctttgcaacttgaatcggctgcgtgactcagcaatgatgcatcttcgtggttgtaggctaataaggaaactaaagcttcaaagaaatgcattcagtgatgaagctgtgtctcaatatttggaagcatctggaggatgcctgactgagctaatgctaaacaatgttgaggttggagaccttactgcgcttgcaatttctcgcaagtgttatgtttcattggaggctctggatctttccttctgccgtgaactgacagacgaagctttggggctgattgtcgacagctgtccatcattgaggattcttaagctatttggttgtacccaggtcacggatttgttcctcaagggtcactcgaacacatcggtcaaaatcgtcggaataggagggagcatactagtgcaaatggatagccgttagtttgattggagaacgacactacattctcctgttcattcagttatctagcttaggattcgaggcactaaaggtcctcaatgtggctgcagcactaagatgccatattcccgggacaacggaatcgaagggaaaagaaaatggaacatggctgcagcactaagcagaacatcaaacgcggaatattttgtgaacctaccttgcttataccagttagcagtgtagagatctttcttgaaatgcttttgtttttcttggttaacgttttttcttgaaaggtttctcggttaacttgaagcagcgtaaagtctgatgctgcataatgcaaactattgataaaaaaata

SEQ ID NO: 39333 - DNA, 1097 bp, Zea Mays
tccggcgaaagagacgccgagatctacacatatcctcgagagccactttcgccaaggtccccataggccataggttgccctgcgggttttacaaaacaagaagaaaaaaaatcacctgctcaacggcggcatcatcggcaagacggcgggtttctgtaccaatctcagcctgtacctttggtacccatgtgtttttgctacgacagttagcttcacccaaagctgccataagctgttcttctaactttattgcaccacggatgcatacctttggctgaagaaagtcgtgtctatctgattccaggaatcaagcgtattgtggtgaacatgaactccacatcttctcagcgtggttaccctgccaagaggtggtgtgcagcgaacatgagctccacatctatgcgtcactctgcatggaagtctgagccctggactcaccttacccacaaacagagacgaccacaatggattgcttataatccaaggacaatgaggcctccaccacttagcactgataccaattctatgaagattctgtcctggaacgttaatggactgcaagctattgtacagtcagggttttctgcagatgaattggttgccagagagaactttgacgtcttatgtcttcaagagacacacttggaggagcgcaatgttgacctttttaaaaacctggtacatgaatatgattacacctgttggtcatgcagtgttgcaaggcttggttattcaggaactgctgttatatcacgggtacaaccaatctcagttcaatatgggcttggcataccagagcatgatcaggaaggcaggcttattaccttggagtttgatgatttttacttggtcaatgcttatgtcccaaattctggccgtggtttacgtagactgaattacaggatcaatgattgggatccatgctttagcgacttcataaagaaactggaatgttctaaaccagtaattgttgctggggatctaaactgtgctcgtcaaagtattgacattcacaatcctcaagtgccaattttgttaaggggaattgcagactttattttacattgttaggtgttaattttaaggggaattgcaga

SEQ ID NO: 39334 - DNA, 290 bp, Zea Mays
ggggctataaaagggacccctaggcgcatggaggagtcaaccaagcatactttgagcattctaagtcttccacactccatctccgcgcacttgattgactttcttagtgatttgagctctgttctagtggtgaacttgttgcgattcatttgagctcaagtcttggctgtgtgtgtgcgtattgctgcggatttgtgtgtattgctttcctcccttactctaagtgctttcactttgatctttgttgtaagggcgagagattccaagttgtggaaattcctcgcagacgg

SEQ ID NO: 39335 - DNA, 2344 bp, Zea Mays
gaagaaaaaagatttcacaactggcttgaaggtgcacgtgattgggccattagcagaagtagattctggggtactccacttccactgtggatgagtcaagatcgtaaagaaattgttgttatggattctatcgaaaagcttgaaaaattatctggagtcaaggtcactgatcttcaccgacactatgttgatgatattacaattccctctaagaggggacccaagtttgggacgctcaaacgtgttgatgatgtttttgactgctggtttgagagtggatcaatgccatatgcctacattcactatccatttgagaatcgagagctatttgaaaagaattttcctgggaattttgtggcagagggtttggatcaaacccgtggatggttttatactctgatggttctctcgacggcactgtttgggaagcctgcatttaagaatcttatatgcaatggccttgtcttggctgaggatggtaagaaaatgagtaagagtaaaaagaactatccttcaccaaaagatctcattgacgagtttggagcggattctctgcgtctatatttggtaaactctccagttgtacgtgcagagtctctacgattcaaacgtactggtgtctttgctgttgtgaaagatgtcttcctcccatggtataatgcgtacagattctttgtccaaaatgcaaagagactggaagtcgagggtcttgcctcattttctccgatggaacaagcggtacttctgaagtcatccaatgtgttggatcactggataaactcagcaactgaaagtctagttagctttgttcaccaggagatggatgcatatcgtctttacacggttgtgccatatttggtaaaatacattgactatcttactaacatatatgtgcgcttgaaccgcaaacggttcaaaggacgtactggagaagaagactgcagaatttctctctcaacactctaccatgttctcgtaacaacttgcgtggtgatggctccatttacaccattctttactgaagttctttatcaaaatttgcggaaggtatcaagtaaatctgaggagagcattcacttctgcaagttcccttccacaactggtgagagagatgagcgtgttgagcaaagtgtaaataggatggtgaccatcattgatcttgcacgtaatattcgtgagcggcataacaaagctctcaaaacaccactcaaggagatggtggttgtgcatccagacaatgactttcttgaagacataactggtaaactaaaagagtatgtcatggaggaaatcaatgttaagactgtcactccatgcaatgaccccttgatgtatgcttctctgcgagctgaacctaatttcagtgtgctgggaaaaagacttggaaaggacatgggcaaagtatcaaatgtggtgaagaagatgactcaggaacagatcttagacttcgaaaaaagtggagagatttcattcttcggtcattgcttgaagctagatgatattaaggttgtccgacaattcaagcgtcctgaaaacgtgtcggagaaggagattgatgctgcaggagatggcgacgttttagtcattttagatctacgagctgaccagtcattgtttgaagctggagtggctcgagaggttgtgaacaggatccaaaaattacggaagactgctcagcttgaacctgctgatccagttgatgtgtattacgaatctgtgggcagtgacaaaaacacactggaagagattttgaagtcacagtatattagggacgcacttggttcaccaattatgccaaaagaaatggcaccaacagatgatgtaatacttggcgaggagtctcacaatgtacatgacatgtcatttgtcatatgcattgcaaggtccacccctattcttgcaccagatcttctttctcatgcctcaggcaaaagcaatcatgtggaggcgttgagagtatatcttctgtcaaggtctctttccagattgaagaaccagttccaagctggaaagggcatgattacagttgactgcatcgaaggttatccaccggtcagtttactgctaggaaagcacgttttcctaagtgcaggggatttttatctggctagtcgatcctagtttcgtttgctgcatcccaattttgagctgcttcacccattgttttgccgcaatcagcttaaaacagcttggttccatttatgcatctcaccaaagtcatgtattcagtaaaggtgaaagtctcaatgtatgctaatatgctatagcatgacatgtaagctaagattttcaaatacctggctatgggttcccataggtgatagcatgtttgtttgcaatctct

SEQ ID NO: 39336 - DNA, 1679 bp, Zea Mays
cgagacacatacagtatgccagctgactaactgggttggagcctagcttcgagctgagcatacccaccaccagttggagctttcttgagagagcatttgagagttcgagcactagctagcttgtaggggatgaagcaagcaaggcgtgggagtaacaagctgaagcaatggagcagagcggcgccggcgctgtggctcctgctgcctcttctagttttgatggtgctcaagacaaatctcctgccagtgcttgcacgatattcagtagtcgggtctccacatatcgcggcatcaacacgcggtgcgagtgtgaccagcaacgacgtcgatgccccgaaagctgtggctgcaccaatgataagcagcaagctaatctgcaacttgagcaaccatcagtcgaacacgtgcaccatgaaaggcgacgtgcgcatccatggcaaatccgcaactgtatacgtcgtctcggcgtccacctactgtccggaaaattcgacgatcaagctccgcccgtatgcacgcaagtgggaggagcaggtgatgctgctggttcgcgaggtcaccgtgcgttccagttcgccaccagcaggcggcggtagtgcccacgacccaccaccaccgcagtgctcggttcggcacgacatgccagccgtggttttctctaccggcggatacaacaggaacttcttccacgtcatgaccgacgtgatcatcccactctacctgacggcccgagagtacgacggccacgtccaactgcttgccaccgactacgagcccaagtggatcgccaagtacaaggccatcctcgccgcactgtccagctacccagtcatcgacatggacaccgaggacaccgtgcgctgcttccagtcggcccatgtcgggctggagagccacaaggagctgggcatcgtcccggctctctcccgcaacggctacacgatggtcagcttccgggacttcatccgctccgcctactcgctgcagcgggcacgggtgacacccgtgagcaggagcacaaccgggcggaagcctcggctcgtcatggtcctgcggcgcaactcgaggcaactcaagaacgaggccgacgccatcgccgccgcggccggtgtcggcttcgaggtggtggctgcgggaccagacgacgtcagtgacctggagcgctttcccggggtggttaactcctgcgacgtgctcatgggcgtgcacggcgctgggctggccaacatgctcttcctgcctcacaacgccacggtggtgcagatcatcccgtggggcgagctcaggtgggcgtgccggcattcgtacggagacccggtgccagacatgggactccgctatctcgactacgaggcctcggcggaggagaccacgttgaaggagacctacccccgcgaccacgccgtctttacggacccgctctccatacatcaccagggattcgacaagatgtggaacatcttcatcaacggacagcatgtcatcgtagacatcgaccggttcacagggttcatgaagcaactttaccagtccatcaccacggagtagagtaggcatcagttggatggttcatgttagaccatatatagatgtgcaactctgctagctcttcattggatactcaggttccctaattaaatactactctctcagttctaaattattgtagcttattttag

SEQ ID NO: 39337 - DNA, 2063 bp, Zea Mays
cgcgtgttctgcctcccgcgatctcgctcgtgatattccagccccgccgccgccgtccccgcccccatccgtgacaccccaccatcaccgccgcgccacgcgcgacaactccatcccccgtccgcacccctaccccgagcatcgcagcgcctcccgcacgaggtcgttgcgcttgtcgatctgatggcggcccatggcaaaggagcaggtagaaaatggccgatgccgaggatatccagcccctcgtctgcgacaacggaactggcatggtcaaggctgggttcgctggcgacgacgccccgagggccgtcttccccagcatcgtggggcgcccgcgccacattggtgtcatggtcgggatggggcagaaggacgcctacgtcggtgacgaggtgcagtccaagaggggtatcctgaccctcaagtacctcagcttacacatcacattattccccacattacagcaatcagtgcaacaatcagagcatttatttaggttctgcaaaccgatcatgacaaaaccaaaggtagctttgaagccgcagactctgtctccacaacctgaagcccaagcacctcatgatcctcaaacaccagagcaacaacaaagcgggactggtgtaggcgtgtagctggtgagccgggtagtgaaggaggtgtgtaccaggcctccagtgagcaaatgggcatggtgccggatgcatctgcggccggtggcaggaaggtcgagctggatggggacatgcgatggacatcacagaacagaagacgaaatgaatcgcaaggggaaactaacatgcgagagaggaggagctagccacaaccaaagagcttggttcaatacttcaatggctagaataatgaacgatatgaagatcaggtagcattatatatgtcaataagaagcagaggagagaagcagcccacatcgcaggagacaaggacttcacttgtttggccagttcaggacttcaggatgttgtcgatgatgtccatgctatattccctcgcttcatgcttaacaatgagggagagactaagtgaggggctgaaggccgttggtgctgtcagaatgtttttttggagttttggtggatgatgctcagtgactgcaatgcaaaggatccttctgttttgtatattgaatgagattacatcactgtttttttcttagcgatatgttgagctcatgtgctcgtttatgttagtcgatctctggctcttgtagtaacttggaaagcttgctgctttttttaagggcatacatgcctgtgatgtgtggtcatgatcatttttttctcctgttattttagttgtcgtatcataaatgccatgtttgcattggtgttccaacatgtcaatattattgaataaatgtttgcattggcggcagcggggacgacgctaagtcgagcaatggcgaagcggcccgtggtggcagtaacggtggagagaagcagggggatgaatccaacggtggcgggatacttagcgctgtggcttccaggattggcgtggtcgtgtccagcgccaacggggaccgcagcggcagcgctgaggatggtgccaagacgagcgctggcgacgctggtcacggtagcaagggcgaggagaaggggcgtggtgtgaacggtggtagaatagtcgagcagatcatttccaatctgccctcagatgatcaggcgcctgatgccgatgaagcttccttgctcatcgccattatcgaagattagctccatgttccgaaggctctctaggtcgtcctcaacgccaggatcaaatcatcagctgagccggagactgaaaacaataaagaaaagcaagcagctggtcatagtaaacatcatgtagcgaggcttagcagattgcttttttttcccgttagaatcagtccacatgtcctcgacacgggctagatttgttctaggattatttttccagtagtaagccatgtatccatggacagtccacagcgcgacgtctaatgtaacatcatcaaggttcttttgactatcccataagaaaccattccttaagacaaccgatattgtgagttgataacc

SEQ ID NO: 39338 - DNA, 864 bp, Zea Mays
ctagtcgctacgcaggatagggaggcgtggtggcgattatatacctgcagtgtagtacgtgtgctgtgtcttcctcccttccttccaagcacgctgccccaggcggacggaacacacgacgcagcagcggtcgtctcgtcctcgtctctgcagatgacgggctgttgtcgtcgcggcagcaggagcagggtggtctgtcgtcccgcactggcgctgctactgctagtggcgctgcttctcctgctgggtccgtgttcggccgagctgaacgccggcgcgggccggcggctgctggtgtcgcggccgtcgacgagccggcaaaacaaggccgagcagcagcagcagcagcagatgcgggtcggcgggaggaacacgcccttcaagcaggccgccgccagcttcggccggaggatacccagatccggctggaaccccatccagaacagatgagagggaccgcgtcctagatgaagccgccgtccgtacgtcggcggcagggtcccggcatctgatgggctgcgtcttggaagcgtgctcgagctcggtccaggactagctcagaaaccacacgcgcacacacggcgcgacccatcgagttttttttttttggatccttggcgccgctcatgcttgtgtgtacaagctcgtactagcttttaaatttttgtagtgctactcatctcctttttttggtttagataggtattagtgcaggttaattagccagtcaggatgggtaatggctagcagcttatgtcagggtagccagctctccccgtttatttccacttttcttgttcacaagttcttttattggtttgctagtattcagctgtggtataaataaactctcggtacatgcaa

SEQ ID NO: 39339 - DNA, 836 bp, Zea Mays
tagtctcattcgattggtttgacatgtatgtgtgttctttttaatgtttctcgtcctcattgctcaactagagtttatgtgcatgtcaaataccatggagtattcatgtacggagtagtatataaagaagagaagatggtcagagttcgtaaccttggacatctgatcgggagtgatgaggaaaaaacagtttgttcattactactcaaagagcttggtcattcaaatgatatatataaaagggaatgaattgaaattcaaagttgaccaaaccaaatcatagcaagaggaaattaataaatgtagtagaagagagccaacaatggaggtacgggtgtgctggttagttaaacctgctgcataagtacctttcgaatctccccctgcacgccagtgagcacgttgacctcgctgagtttaacgataaccttggccagctggtcgaccatccagcgcgtagagccgtccctgtagaggttctgatcgacggagaacacgccacggtggagctgcaggttgttgtagacctgtgggctgtgatgtgcaatacggcgaactacgagcgcggctggggaggagacggcggactgcgcgcgcggctggggaggagacagcagactacgcgcgtggctaggaacgtgacatggcggactgcgcgcgcggttggcggatcggaggagacgacagcacgcgactggggaggagacggcacgcggttggcggccggccggctagggagctcgcctggtgacggcggttggtggcgcgcggcggctggatggtttgggcggcggcggctcgggaaggaagatagggttttgggctttgcactccag

SEQ ID NO: 39340 - DNA, 2440 bp, Zea Mays
agaaaagcgggggcagcgagttgtgcgccctgtgagcttgcagctgttccagactaggacttggggattgtgctgctactcagctgaaagtttatagaaggtggagaagttgtggtgtttccctacctgttagtctgcacttctttgttcctgatcaactgctccgacacgattgttgtcttctcaacctctcttgccaagcatggctgggcaaacggcaaaggcaaaggaagcagaaaaagatgacagacaagaacccggagctgagggggcgaaaaacaagctactgccgtctcaccagcagcaagactctccagcttctgtggcggacaatgattcttcaggtgtctcttcagttcctggcgatgagtcgcctgtcctggatggggattctggtgagttgaaagtggaggaaaacttggatggtaatgggagtaaggaaaagaaaacgtctcagaagagcagtactagtgacggctttgcttctgctaaagtgagtgatgggacaagtagtttgaggaagaccagtggtagtgcgacgatgagtacacgggccgatttcactgagagtgggaagagtagcatgtgccgtgtgagcacggccagtgacattagcgacgagagctcgtgcagcagcatgagcagtgccaccacaaagccacacaaggggaatgattcaaggtgggaggcgatccatgttgtgaagtccagggataatgttcttggactgaatcattttaggctgcttaagaagttgggttctggtgatataggaagtgtgtatctctctgaactgagtggtacacggagttactttgcaatgaaggtaatggataagacttctttggcgagtcggaagaagctgcttcgagctcagaccgagcgggagatcctacagtccctggaccatccatttctaccaaccctgtacactcattttgagacagacaagttttcatgcttagttatggaattctgccctggaggtgaccttcatactcttcgtcaaaggcaacctggaaaatatttctcagagcaagcagcaaagttctatgtggcagaggtactccttgcattggaatacctgcatatgcttgggattatataccgtgatcttaaaccagaaaatgtcctcgttcgggaagatggccacatcatgctatcagactttgatctctctcttcgctgttcagtaagcccaacggtgatcaagtctgcaaatcctggcctagatgcaatgcagaggaacaatgcagcatactgtgcccagcctgcttgcattgaaccatcctgcattcagccctcttgtgtagctccaactacttgctttggcccccggttcttctccaaatctaaatcaaagtccaagtccaagtccaagaaggacaagtcaaagcctgatgctccaaaccaagagaacctcttcccagagctcattgctgagccaactgacgctcgctcgatgtcctttgttggcactcatgagtacctggccccagaaataataaaaggggagggccatggaagtgctgtggattggtggacctttggcatattcttgtacgagctgttgttcgggaagaccccattcaaaggttcaggcaaccgggctacactcttcaacgttgttggccagcccttgaggttcccagagtccccaatagtgagcttctctgcgagggacatgataaggggattgctagtcaaggacccgcagcaccgacttgggtataagcgtggcgctaccgagataaagcagcatcctttcttcgagggcgtgaactgggctctgataaggtgtgcgagccctccagacataccaaagcctgttgagctcgagtgtcgcccaaagcaagtgccatcagcaaatggaaaggtcgcgccagcccctaaccaaaaggggccagataattatctagagtttgaattcttctagggaatttttttttgtgatttctgaactgaaagagtgcatctgggcagatgctgtgaaagaaagtgaaagatgatgagctactctaggcatgtgcttggctggatcttttttttttctgccattagactgtacgctcgtttcaggatatccgagttgttttttcctgctgaactgcttaactctagggtgtactcaatccatcatgtatgttgcaattttcagaacttgcctatggtacttgaaatggacttcagggctacttgctccagctctctgtgtaattgctaatatacattgtaattgatgcttcatcttaggagttaggacatgtcttgctcttcaaatgctgatatctgaacctcgcattgctaatctcagtctgtcgtgaaaaacagaaaccggtgtttgcatttcttggttatccgaaggtgagacatcggcaaggcaatgcaacaagaagcttcgatcttgtgtaatacccaatttgtagatataatataaaag

SEQ ID NO: 39341 - DNA, 2387 bp, Zea Mays
ccgccaagccatgcctcctaattacgccgccgcgagaggctgggagagcgcaagaaccatgatccttgcgctgttcgccgcatcggtcctgtcgacggggcctccgccagcgatggcggcggcgatgcagccgagcgcgacgtgcctgcggcggtgcggcgacatcgacatcccgtacccgttcggcgtcggccccgggtgccacctcgagacgggggactggacgttcatgctctcctgcaaccgcagcgaggacggacggctccggctatacaactaccagatcgaggtgctgaacatgtcggtgcgcctggggcagctgcgcatctacaacatcatcaacccatggtgctacaacgccacgacgcgggcgatgaacgaccagagcaactggtggtacgacatgtccatcaccaacttccgcatcaacgacgcgcagaacaggttcaccgtcatgggctgcaactcgctcgcctacatccggtggcccaacgacagcgccgccgcgtacatgaccgggtgcatggccatgtgccccggcgtggggcggctgaataacggcgcctgcaacggcttcgggtgctgccagaccgccatccccagcgacctgaacgcgtactcggtctccttcgaggagaagttcaacacctcccggatcgccaacttcagcccgtgcagctacgccgtcctcatggaggccgccgccttcaacttccgcaccacgtacgtgacgaccgacgcgttcatgacgaacaacgacggccaggtgccgctcgtgctcgactgggccatcgggaacatgacgtgcgaggaggccaagcggagcgcgtctgcgtacgcgtgcgccagtagcaacagcgagtgcatcgactccaagtacggcaagggccggggctacctctgcaactgctccgccggatacgacggcaacccctacctgctcaacggctgccatgatattaacgagtgcgaagatgcaaggttcaggtacccgtgctctgttcctggtacctgcgtcaacacgatcggatcattctactgcgcgtgccctcacaggacgacgggcaacgccgtaaacggaacgtgcgaggacgaaaagaaccaaattgggtggcagatcgccgttgcagtggcgttgtcgtactgatcgtcacggcgacctgcctctacatgatccacgagaagaggaggctcgccaagatcaaaagcgactacttcaagcagcacggcggcctcctgctgttcgaggatatgaggtcgaggcagggcctgtcgagcttcacgcacttcactcaagaggagctcgaggtgtcgaccaacaagttcgacgagcgcaacgtgatcggcaagggcggcaacggcaccgtgtaccggggcaccaccaaggacggcaccaccgtggcgattaagaagtgccggctggccaacgagcggcagaagaaggagttcggcaaggagatgctcatcctgtcccagatcaaccaccggaatatcgtcaagctctacggctgctgcctcgagctggaggtcccgatgctggtgtacaagtacatccccaacggcaccctgtaccagctcatccacggcaggcgtgaccgcggcgtgccgcgcgtcccgttggcactgcggctcaagatcgcccaccaggccgccgaggcgctcgcgtacctgcactcgtgggcgtcccctcccatcatccatggcgacgtgaagacgtccaacatactcctcgacgaggactacgccgccatggtaaccgacttcggggcctccacgatggcgccgacggacgaggcccagttcgtgacgttcgtgcaggggacatgcgggtacctggaccccgagtacatgaggacgtgcaagctgacggacaagagtgacgtgtacagcttcggcgtcgtcttgctcgagctcctgacgtgccggaaggcgctgaacctgggggagctcgaggaggagaagtacctctcgtcgcagttcctcctgctgctcggcgaggaccgccttgaggagatactggacgagcaggtgaagggcgagcagagcttcgagctgctcgagcaggtcgcggagctggcgaagcaatgcctggagatgaccggcgacaagaggccgtcgatgagacaggtagctgaagagctagacaggctgagtaggctgtcccggcatccctgggggcggcagaactccgaggagattctggcattgcttggcggatcgccgagcacggcctcagaagtagaacttagtaccagtcggaatatcagttttactgatacggcgtacattggaattaggtctccacgttagggcccgttcagaaatccacgttgaatttaaattcatagatggaggataggaaatgattttatgcaaagaaattggaa

SEQ ID NO: 39342 - DNA, 2211 bp, Zea Mays
gaatccatcatgaaggctgagcggagcaaggctgctgctgccgcacagaggcggccgctggcgccgtccgagaagaacaatgcagcagcccccgccggtcggagaacagagagcccttcgaggttcaagcccgtgtcggtgtcgccggcggctcctgcagcgaggcggtgcggttctccgagccccggccccgcctctgcggacggcggctcggcgacgtgcaacggagcgcggtcggctgccgcgccttctcctgcgccgtcctctcggctgaagccctcggccgcggcgaggtccgcgtctgccgtgtctccacgtgacgcggccgccgatggacacggcactccaccccgtgcaaggaagggcaaagactccgaccgcccgtgggcgtcggcgcggagctcgtgctcgtctcccctgcttcgaccagaggcagagcacgggcagtcccctgccactgccagtaaggtagacaggctagtccgtggcctaccttcagagccggtggtcagactgaggccaggagctgtggctgagaggaagacgagcacgagccctcgacctcgtggaaggagcacgagcaagaacaacaccggcgaccaaagccaacacgagaatgctcgccctccggagtcccctgccaacagtgtcgccctcgccgataaacactggtggccggggatgatggctggcctctcttcgacaaccgccgcttctgcggaaaaggctagcaggtctgacgcctcttcgtcatcagatgcttcagcaggacgttctcctccaaggaggacgcgtccatgtgaaggcgcagcaaccggcaagagcgtgaagcggggaccatcgaacgagacggcgcagatcgttcaccggagaaggaaagacaaggcggcggactccagcagcgacgcctcctcgcagatgtcggagagctctaaacccacctgccgcccgatcaagcaggccgtttctctgcccgttccagctctgcgccggtcctcgtctactacctcccggtcctgccagaccccgtcgcggatgaggccgtcagcagcagcttgccaatcgaaatgcgcgtcttcggctgctcgaacggttgtcgaacagcctgcttttagctacatcatcgctgatgcgcggaaagggaagaagaacgcatgccagattgagaacgtacaccagctccgtctgctgagcagtaggtatctgcagtggcgcttcgtgaatgcacattcagaagagacactgtcccatagaaatagtgttgagagtgttctttacaatgtttgggaaagtatctcgacactgcgggatgctatggcaataacaagagacagtgtgcgacacctgcagcaacaagtgaagctgtatcacattctaacagagcagatttgttaccttgagcaatggcctgcactagaagaagaatgcaatggcacactagttgaggcgacggaggctctcaaagcaagcacgcttcgccttccagtcacatcaggagcacaggctgacggaattgcagtcaggaacgctataagctcagccgttgatgtcatgcaagctctgagttcctctatctactacgtgcaatcgaaggtcgaagacaggacatgtttggtttcgggactttcggctacggcaagagaggaaaacgtcgcccttgatcaatgcagagagctcttagctacggcagcaaaactgcaggtgcaggagaccagccttcgcacgcttctgatgcaactgcggcagagatctgcaggatgaactgacaaagatgatgaaggaaaataaccatgtttttgacgtcaacactgccaacatcagcctacgtcgtacgtactggaacatactcccaccaaagtaaacagtgatctgtagagatgagtagcagactgcgcataccgcacgtatacagccatacacagtatctgtccttgggggtatggccgtatgggggcgttgtgcatttctgcaagcctgcagctaacgactcacgacgcttacaattgtttgaggaaaagaaaaaggacaaaaggtgtaaatgattttcaccgtactgtagttcttttatttgtttgtttgttttcatttcataggggacgttagttgtttcttcagggagctagcaatctttcttacccagctcccactgtacatcttgattttttcgagaagtgaaaagaaaagaaaaaggatagaagaagaaccgccaac

SEQ ID NO: 39343 - DNA, 753 bp, Zea Mays
cctacaccatacatcataattaataaaaaaatcctagtatgtgatcgaccaacaattgcatgcataaaacaaaggattggaggaggtcgttgccggaggacgccaccaaggccaccaaatcagaggagttgatcaccgaaggacacctaaaacaccatgcggaccaccgacccttgcagcccgcgcctcgcacgaccattgacgctgccggaaccacctgcgcctcttgtggccaccgccacaagagactcgcgtgaccgtaggatggggtcgtcgctgttgtgcaccctcggggaacctctaccgtcgcacgcgcctttggtccccgccaccgtacgagcctctggccactcgcggctccctaggccacgacggacgctcgcgccttcggggtcgtcatcatcgctcgcgccttgaggaaccgctattgtcacacaaagggggcatcatcgctcgctcacgcctcccggaccaccatcacagcacgtgtctcgggtaaccgccacttctgcgtgagggggtgtcgttactcgtgcgtcgggatggggcataaaaaaatgaaccctagcccgtgtggttccttttatacacgcccggacgtggtgcagctgaaccggatggcaccattgggccaggacttcctctagttattggaagccgagggctcgtaatatacaaatatatttatttgtttgtgtgtgtaaatacatatataattcagttttgttttgaaaatttgaaaaaggcggaaaa

SEQ ID NO: 39344 - DNA, 1539 bp, Zea Mays
gttttagaaccactcagtgatcattcgctgattataagcactgttcaaaaggctccgagcctctgacttccgcccggaagacctgtcgtttcgccgtcaagtgcttcttcctgctgggcgctggctctgctctggcttttccgcggctatctggtcgatccacagattccacactcaccggtgatcgactagcgctggcactcggctactactccgtgacactgtgctacccagtttgatcggcgtcaggaaagaaccgggtacagtacgtcctcgagggagggagggaggaaggacagaaggagcaccgtcactgtggcacatcatatggaacgcagagggcagagagaggcacagcccacagacactactggctaccgctaggcaggccgtggtggaccggagcgcctccaccgcattattgtacccatcagggatcacgtaccgcgctcataaaaggtaacaacggacggacggacggacggatccatcggccggccattcagtcgatcggccacaccagttctgccaatagaattccagatccgcggacgcccgaggccccaacgcacgccgctgcgcgaccagatcatccggcatgacatattgccgtgggctcgcgccgtacgcgtaccacggccggcgcccacagcggcggtacggcggcgcgctgccgctgccaccccgaacaatcgtgcgcgcgtcggcggcatggtgtgcactccgcagccgcactcgcacggcatggagaggcacgcctgacggcccagccgcgcgcgccgagatgcgcctctgcaattctgcatgcgtggtggaagagcgagccatcgagaccgaatgctgggagcgctgcggcctgcgtgcaccgagcgcgtcccgcgtcccgtggaccgggcatacgcgtaggtgctacactgctacccccacgccggcggcagggcagtgtgcgcatcgatcgcattaacgccggcggccggggcggccacggccagaagtggtcgctctaaaacgttgcctttaactcggatcctaggcgtagactctacacgagagcggacccagaattttggcacgtctttaagcttctgtactgctgctctgttctggtgctgcatgaccatgcatgagctacgtatatagtactagtatgtacaggctttagctcgcccgtgaatcagacgaaaaaaagagaacggcgcgtgagtacggtactagcaagtgtatatacggtccgctgtccgctccatgcacggatggatgtccattattgagaaaaatcggtgctgcagagtcggatcgtcgtcacatgcgccaggtccaggtgtgtcacacagtgcacgtacttcgtacaagatgatttgcacatacgtacgtgtacatcacgagcacgagacagcgttaacgttatgtcggttgtgacactttggataattgagctccgtaaaagtctgaaccactaatgcccctccaattctctcggttctgtggcttccaaaatagtcctaagggtttatgtagcagcaagaagatcaatggtgc

SEQ ID NO: 39345 - DNA, 727 bp, Zea Mays
atttagactagctcgttgaacttgttcacagatgtgagctggtctagttcagttctgattggtataatttacagatgtttgacgatcaagacctgggcttctttgccaatttcctgggcatcttcatctttgtcttggttattgcgtaccacttcgtgatggcagacccgaagtacgaaggaaactgatgtcctctagtgcaaagatcctattatctgcaggccgaaatagggctatactgttagctaatgctagtgagatcgcttgacactttgagtgcatatcatggaagctggacatgcagttcctggcattttggttttgcccatgttttaatctgctgaattagtaaatcctggagaattcaaaagcgttttcaagtactgcagttggtggttgtttctggtcctagtgtatgcatgccagaatcttatgaataatattctttgttttgttgcctatttagctgtttagttggttgttagcctgtcaagaaactggggaacggctccgttactagactacattgagtcgtctctcacattggagtctgggagcaccaccaggcagaggcagccatgttcttatgttgttttgtgctgtctgctcaagctttcgttcatctcacctgaggcctcccttcgttgaagagagagcttggatgagagctctgtttttccttctttttttattatttactattcaaaaagtcgagaccagaaaaaag

SEQ ID NO: 39346 - DNA, 2578 bp, Zea Mays
acgatagtacctggacggctggacccaacataccgaatccgacgctccatcgagtgtgtgcggtggcggcgggaggagacgaaagagaaatatgcaggcggtggcacgggcggcgcgtgggctcgcggctgcggcggtggcacgggcggcgcgtgggctcgcggctgcggctgcggctgcgcggccgtcggtgatggaggcagggcacagcgggcaggtgcagcaagctcggggcatcgtggtgcaggtgagggacgggaatctggagccggcgctgtcgatcatggagcgcaagatgcggtccagcggcacggagcgcctcatccgggcgcacacccttctcgacatcaaggactcggagaaccgcttgctcgcgcttaaggagcttatgcagcgtgtccgttcccaggagctcatgctccgcaagatcgtcatcaagcagatcagaaccatggaggaggataatgcagactggtgcgatgaaaatgttaagatagcttgtgaaatatttgctgaggaagtaagagcaaagaacagatcaggttctcacttaaacaagcttgggtacaacaatgtaatggtcaagttcaaagagaggacagggaaaacttacagcgagctacagttcaaaaataaatgggacaagctgaaaaaagattatagtaattggaaacaattgggaaaagagacaggatgtggttgggaccctaacaagaagttgtatgttgctccagattggtggtgggagaaggcaaacatacaattcaaaggcattagcaagtttaaagacaagtcacttcaaaatgcagaagaattgagtgtcatgtttgaagatcttcggaacaccggtgatgatcactgggtcccaaccagtggtgagctaccccaagacactgaagcacaaatacacgatgccatcaacattgaagatgaaaatgctagtgattgtggggaagacacaccatctagttccacatccaagagacgtcgtgtggttgtgacagataaaggtaaaaaaccgaagactacgggaggacaatggatgcaagaccagatgtctaaactttttgaattgaataagcagacaacaacatcttgtgagtctatggtcctggcaagaacacaagagacacctggatcttctataaaagatgttatgcaattagataaaggtaaaaaaccgaagactacgggaggacaatggatgcaagaccaaatgtctaaacttgttgaattgaataagcagacaacatcttgtgagtctatgttcctggcaagaacacaagagacacctggatcttccataaaagatgttatgcaattggtgaaggcatgtggtgctatagctggcagcaaagagcacttcattgcaactcaagtctttacaaaaaaaaatgaaagagaaatgttcttgactttggatacacccgaggagcgctttcagtggttatcaatgaagtatgaatggatgacaatgaacaagaagggctagttagagctactttgttatgcatttatcgtgtcattttttgtttttaccttaccaaacttatctattagaataaattcaaacattctggggaaacaattagtagaaaatttatggaaattttctgttgtgtggtgggcatgtccaaccaatatacaaggcctaaagatccaaactttcgtaatgtgcacgataggataagaaatgatccaaggatatggccacactttaaagattgcattggagccattgatgggactcatatttgtgcaaatccacctccacaagattttcttaggtacctaggaagatctggtaaagcaacacaaaatgtgatggcagttgttgattttgacatgcgtttcacctttgcctctattggtcaacctggttccatgcatgatacaagtgttctctataatgctctacaaatagatgaagatatcttcccacatccacctctggacctggatacttatcaccatataaaggtcaaaggtaccacgttccagagtggagaagaggcccggctcctagtggcgagcaagagatgttcaaccatttgcactcaagtcttcgcaatgttgttgagcgtgtatttggtgtatggaagatgaaatggagaattcttctcaacatgccaaaatatccaatggtaaagcaaaagatgattgttgcagctaccatgtgtctccacaactttattcgtcaacatcatgcacttgacaaggattttgagagatgtgaccgagaccaagattatgtgcccactataccagcaaggtataggaaccaagccctttctcaaagtttattggataccacatcacatgctaatgacaggacaatggacagattccgtgatgatcttgctcttgctattagttcatctagggcataagcttaaggatatttggattttattttagcctccttttgggcatgtggttgtattttgttggaccttaatgaacaataatggatgcatcctgccccgttgttccctttcgatcttcaatagaatctagaaattttcttctgcttgcttttgtctggcgcaatgggaaaatatagaaaatataaaaaaaa

SEQ ID NO: 39347 - DNA, 5355 bp, Zea Mays
ccgcatccgcgccgcgctgttgagaggagggagacgcgaggaggaagaagcaggcaaacaaagcagaagctccgtcccatccccggcagtcccctccatccaagtgatttcaggtatcagctaccgagaaacggagaaggtgaccgcacctcacgcaattcgcccccgccccgccgtcctttccctcctctagggttgtcttgtgggtgcctctgcttcccaccctaggggcaggtccagggccggtccttcttctcgccccgcccccgctgctctcttctctgctgctagagttaggttagtgttcggcgctggggggaggggcgtcctcctccctcgccgtcgccgccaatgcctcccggcggtaggcgcggcgccaagcagcggcccaactggaccagggaaccccagctaggtgacctcgtcctcgccaagatcaaggggtacccgcgttggccagctaagatcagcaggcccgaggaatttaatcatgagccaacgccaaaaaagttctttgtctacttctatggcaccgatgagattgcttttgtaccgctggcagatcttgaggaatttactgagaagacaaagaatgatctgttagaccgagctccaaatatgaaagttaaaagaaaatatgttcaagtatttaatgatgctgtggagcagatctgcaaggcctacaatgagttgccaaaaacatctgaagctgcaaatggagcattgcctgatcagagtgaaaagccttcagagcaccttgtgaggtcacaggatgttggtgagattccaggattgggacaaatggaaggtgatagccctactgattactcgcatacttcagcgaaaaggccagggaccgaggaggatgtcaaagatgatggtcatgaaatatgtgatcattctttagcagtttatcaaaagaaaacatctttactagaggatcctaagcatcccatgacaaagaagtctgctgcatccaagtcttctcttgacatttacatggaacaggagcattcaccaacatctgtccgtgctgaaagggaggctgaagaggtgaaaattgaaaaagagagctgtcccctagatggttttattttggaacctaacttggaggtagtttgtgcccttgaagtgccaaagaaatctaaatccaacaagccgttgaggaatgctgaaaggaaggaaaacaaacgtgctggtattggtagccctattgaaaggattgttgctgaggctgcatctgatgttgtattaaacatgagtgctgacaaagagagcagagaatttaagaagtcaaaaatcatgacaaaacaatcactaactactgattcagagaaaatggattataataaaattgtgcatggcgggcctgacgagcaattgactggaaaatcatctgcagggttttcttccaataagaaatcgctgccagatagtgggcagcacaagatggacagtagtgctgatacacgtccgggaaaaaagccaaggcttatggacagggctggtgaaacagataagacagttgacaagagtgagatgaagtcaaacattgattatggaaagcattatgctgtgaaacatgagcggcctacctctatggaaacgtgtaaaaacacgattcttaagaccagtaccagcgatgatagggcactgagatcaggtggtgttgtatcacccatatcaaggcttcattctgaggtcatggaaccagcatgtggttctgtgacactgtcaactgttgctgattctgttaaaaagggttccagcatgaaggaggatgcctcacgtgttgataggcaattggtgaaacctaagagaagagcatgtcgttttgatgaagatgaggatgaaggacagcgaacaccacttcatagaacttctgctaaatctctctctacacatatagtcccaactgagaaagcaggtattcggggaaaattttcttctcatgttggcaatgtttttggaaaaaagttaggccctgcaagagaagagaaatcaaggagtgttaggatgtcacctgtgaagcatgagccaattttttcttcaccgagtcaggataaagtgcatgctagacaccaggtagtcgagaaaagactgatcacagggttggttgagactcctgctgtcattggtaacaaaatgagcctggttgatggcaaatcctctgctcaagtaaaaatgccggcatcctctgaggtgaagaaacttcgtagtagttcttctaaaccatcacacctaacatctgggaactcccattcccgaaactatcctgccccagaaaagatccccttgctgccccaaccagaagaaacaaaggctaaatctaagctagctacgtctgttgagcataaggtgggcaccactttgtcaactgaacagagtgggaagcgggatcacttgaaagaggaaagatccagttatgttgataaagcagtttcttctgaacctaaccctggctcggccaagtcaataaaacatcttattgcagctgcccaagcaaggaggaaccttatggcttctgttcatgcaaaatttgatgggtcttcgactgataatgctgatattacgtccacaccatatggtttgccgggactaagccctagtcctgttttccgcattccatccccacccagaattgcttttcccgggagtcctggtcaacgtattctgaaaagcccaatagagtttgacaatggtcatggaaagagtcccaaatctaggcaggccagcggttcacctagtggtggtactgatgcagctattgctcgtgatgctttggagggaatgatagagactttatcgaggacaaaggatagtataggacgtgcaacacgccatgcaattgagtgctctaaatatggcattgctggagagattgtcgagcttctcatacagaaattgcagagcgagcctaattttcatcgcagaattgacctcctttttcttgtagattccataacacagtgttctcattctcagagagggcttcatatgttcccactgttcaagcggcattgcctcgtcttctcggtgctgctgctccacctggagctggtgctcgtgaaaaccggcgccagtgccttaaagttttaagattgtggcttgagagaaagattatgccagaagacatactccggaagtacatgggcgacattgaggtgccaaatgatgatactagcactactttaatgttgaagcgaccatcccgtgctgaacgttctgtagacgatcctattagggagatggatgacatgcttgttgatgaatatggaagcaatgcaacttttgagctttctggaattttatcatcaaaagtgtttgaagatgatgaagacttccctaaaaataatgggtcatcaccatttgtttcacaggcacggcctgttgaaaatgatgtcatacgaaaaactgaagatactattgctccagtatatgttgaggaacacattattatagtagagaatgtaactactgatgctgctatggaagatgctttagagttaccaggcaacaaacaacagactgatggagctgtccttattgaacacgactctattcaagatccaggttcagagcaggcaattgaccagaatgactttccctctctacccgatggccctccaccgcttccgtcagattcaccaccacctccacctcctttgcctccttcaccaccacctgttacaccgccgcctccgccaccacctccactttctccagcttcaccacctccgccaccacctcccccactgccatctggaccacctcctcagcctgctccaccacctctggcaacccaggtcacacctcttccttctattcctccgcctgttccttcatctccaccatcattgagttatcagcctccagctcctgagtactttgtgacggccaatggtgatcaattaacccagatgacaggaaatatattgattcaagctattggaaatgcaacaaccttcattcctagtggaccagttaatggacaagctgcggttaattttgttacttcgatgcaggcagaatatggaaacaataacatatttatggcaccacaagcttctaatggtaattaccagtttcggcccactggtgtaccttttcagcaagggaatttcagtgcctttccatctgcacaaacacatccagttcaacctcactctcacatggcacacatgaatcccatgggccaacaagctgtaccacccacgctcaatccttatgctgtgcagtcatttccaaacagtcagagccattatccatccgaggaacattggcggatggcatctggtaacttcagcccagatggccagcataattggctagccggtggcggagcattaccttgctcagaagggccatatgtgcaggatggatattcaaggtcaaacattgacagatcttcaattaatcctatgaaccatcaacatactgttctgaatcatttgccgtatggagcaccactaccaggccatgttccgcagatgctaccagccaggtctgatgtccacactcttaattgctggaggccctcttgatagagttgtaaactgaacttctttatggttttaacgtggaaagctcagaacactggaggcaatttgaattgagtgcaacaattcatggctttgttagtctgtgagatgcacttgcctcattgcctgggtgtaacgatgagatctgccatagtatatggaatggacattttacaatgtctgaagaacgatagccgaacgatgacagggtttgatttgttgatgcgtcgttttggttctcacccgagccagtttttgaagtgaaagcaataataatgttgttggtgcaccgctgaggtgtttaggttttactgctggtttggtgttgggtgatggttcctatcatctcactaaacaagattgttgactgtacatctgggagggaggtgatctgggatattgaggtgggtatcatcatgtgacggcgaggcacttggtgccaaatcgtactgaattttgttatctgggtctcagtctgctgcttttgtcccgcccgtattcgtttattcccgcaggggcaggggcaggaccctgttggctggccaggccacatatcctttttagtcccaagcaagttggagagccacacagtatatattatataaataatagtgagacatatttttttatgagattacttaaaagcaaatcatctctcgtcgtcgtgatacatggtttgttttcctcttttcgtcgtcctactcctgccttaccacaagcaggcacggaaggctgcacgggcaagcattttgcttataaagttcagggtgctgcagatgttggccaatttctaatcttgatacattattggccg

SEQ ID NO: 39348 - DNA, 297 bp, Zea Mays
gtttttacatttacatcttcgggggatactgctcctgtagagctgatataagaaaaagagaaattacatgctatggccccattaaaaacctttctccccctttggaaaggaaaagggtgccatagtaaagaataaaaaagattacattaggttacacataataccgccgaagctcatccgcattctaagatctaggaatgtcgctgtcgtccatatccttcagcctgtaggaaccgggtcttgacgaagatactaccaggaaatgtaacacccggctttaaggaacaaagccaggtg

SEQ ID NO: 39349 - DNA, 2363 bp, Zea Mays
gtgcacttcacacagccattttttctctctctctctcatgcatcgtctatctatattattttatctccccccgtctccacctccccctatattctctctctcccctcctctcctctccccagctacgccagtcctcctccctgtctgcttcggtgcttcgctcccgcactgcgcttggccgctttccctctccccgcaccttctccacctcccccattccgccaccgcacgagcagagctccctcaccaagaggaccaaaaaaaaaaaaaacgagggaggcaagccaggcgggacagcaacgcgacgcgcttgtcattcactcgaggattcctaccatccctgatattctcttatgtatatgctaattctggaagtttatctgtcttcaattggtatattcaacgcatattttcaggagctcatgcaaggcgtaaatcttattgcaagaagggcagctgtgcatgttaagtctcaaatatagactcacttgataacactgcatgagaggttgaaaacttgaggtacagttgatattctggttcagagtatgggttcaaggtttgcatcacatcagctgagcaatggcctgtatgtttctggtcgacctgagcaacctaaggagaaggccccaaccatttgttccactgcgatgccatatactgggggtgacatcaagaagtctggagagcttgggaagatgtttgatctccatgttgagaaatcaagaaaatctggtcctctaggaaacgctccttcaaggaatacttcatttggaggcactgcttccaattctgggcctgtctccaatgctggtggtcggtccaactactctggttccctttcatcttcagttcctggtgctggtggatcagccagagcgaaatcaaactccggaccactcaataagcatggagagccaacaaagaggtcatctggtccccagtctggaggagtaaccccaatggcacgccagaattctggcccccttcctcctgtgcttccgacaactgggcttatcacatctgggcctatctcttcagggccacttaattcgtctggtgctccaaggaaagtatctgggccacttgattctgctgcatcgatgaaaatgcgggctacttcctttgctcacaatcaagctgttactaatctgaacactgaagatggttactcaattcagggaagctttccgaagccaatactctgggctgtgattttgctctttgtgatgggttttatagcaggtggcttcattttgggggctgttcacaatgcaattttgctgatagttgttgtggtcatatttggttttgttgctgcacttcttatctggaatgcttgctggggtagcagaggtggaattgggtttgttagtcgctaccctgatgctgatctcagaacggccaaagatggacaatatgtaaaggttacaggggttgttacttgtggaaatttccccctcgaatcctcgttccaaagggttccaagatgcgtatacacttctactggcttgtatgagtacaggggttgggattccaaagctgccaataccgaacatcggcgttttacatggggtttacgttcaatggagattttcagtccgggcttcgagcattggtgaaaacaggatatggtgcacgtgtgaccccatacgttgatgaatctgttataattgacatcgatccagacaacaaggatatgtcccctgaatttttgagatggctaagagagagaaacctttcaagcgatgatcggacaatgcgcctaaaagaaggatacatcaaggaaggtagcactgtaagtgtgatgggggttgtccaaaggaacgacaacgttctgatgattgttcctccatcagagcccatctcaactggttgtcagtgggccaagtgcgttctcccgaccaaccttgacgggcttgttttaagatgcgaagatacttcgaacattgatgtggtgccagtttaattagcggtgaagagtcgttgccaaagaaagtgtctgttaaatatgagtctgaattgtttcatgcaatgttagttgacaaaaatgtgcaaatgttgggtgtgattatggcaggtggagggtggttcgttaagctggcttttggatgtatagtttctttttcttttagttgtgttttgtcatttctttttaattttcagctccgagatctgaaacttgtgtaaccagatgcctcttaatctaaatcagcgtggcatttagatcgatttgaaagcttacaggtgacaggacttcggatgtacattcttccccttttattgtgttgtcatttattttcttttttaatttcaactcagatctaaaacttgtattcagatacatgaagcagatggtttgc

SEQ ID NO: 39350 - DNA, 1442 bp, Zea Mays
gttgggtatgactagcttactagattgattgcattatgtataactttgttgcaggttcaaacggatgatggctttcttttgtctcttcagcatattccacatggcagaaatggaattgcagataatactggacctccagtttttcttcagcacggtcttttccagggtggagatacatggttcataaactccaatgaacaatcacttggatatatccttgctgacaatggttttgatgtttgggtcggaaatgttcgtggcacacgttggagtaaaggccactctactctctctgttcatgataagcttttctgggattggagttggcaagaccttgctgaatacgacgttttggcaatgttaagctatgtatatacagttgcacagtccaaaattttgtatgtgggacattcacagggaactatcatgggtttggctgcgtttacaatgcctgaaacagtaaagatgataagctctgctgcgcttctttgtcccatttcttaccttgatcacgtcagtgctagttttgttcttagagcagttgccatgcatcttgatgagatgcttgttattatgggcatccatcagttgaacttccggagcgatatgggtgtacagatattagattcgctgtgcgatgatgaacatttggactgcaacgatctgttatcttcaataacaggtcaaaactgttgtttcaattcatctcggattgactattatttggagtatgaaccccatccgtcatcaacaaaaaatttgcggcatcttttccagatgatcaggaaaggcagcttcgcaaagtacgactatggatggtggggaaacctaaggcgctacggccagctgcgtcctccctcattcgatctaagcagcataccggaatcactgccgatatggatggggtatggaggccttgatgccctggctgacgtaacagacgttgagcgcaccatcaaagagctgagatccacgccagagctcttgtacattggtggttatggccacattgatttcatcatgagcgtcaaggcaaaggaagatgtttatgttgacttaatgaggtttctcagggcccagcagggaatgcacagtagctattaggacgcacgtcacgtacgccttcaaataaatgcttatgctatgatgacagtacgaccatgtaaatacggacacagcatagcatgtaaatacaaacagtctattgcattgcatgtaaagtggtgtgtggattgttctccatttgatgtactgctttctgagtacagtacacatgtacatcagtacatgtaacatgtgtatatgacaaaaatgtagcacatgcaacttggcttatttcgtgccgattgtgtgcttgcatttggggaggaaatcgagttgcaaatacataagactatctctagcaccttaggcatctctagcagcttaaccatcaccattcc

SEQ ID NO: 39351 - DNA, 413 bp, Zea Mays
ctaaacaaaccaaaccctattccacgcaccaaacacaagcgcagccgccgtcactgaaactctccctcccacgctgtccctgtctcctcccgacatcgccgtcgtcgcccccgtccccgcagtcgcccgtgctccgcccgctccaccagggcgcctcgccttgggggacggtctccgaccactggcctcccttcaccgcctaccagcgaccacatgctcagtgacgcctaggtcatcggcgccgaagtttggaggccctgtacgtgcttcacgtgcgggttcttcaagaatgcctctgtcacttcctccatggccgaagtctgggagcggcaagatattctttctccaattgctaaacttgtactaaggggtgttgaacaagtaagtctgcaatcatattcgcttcctactac

SEQ ID NO: 39352 - DNA, 3137 bp, Zea Mays
ctgcaactgcaagtctgcaaggcggagaagccggtcgttcgttcatccggtgcgctatcccaaatacagcggacaacttcgcacctttttcacccatcactcgcgaacgcaggtcgcactgtcgcagcatgcttcgcctctccatcgccgtcctcacctcacctctcctccccacgtccgtccccgccgtccgaccccatccgcgccgcctactccgcctccgtctgcgctccctcgccgcctcctcctcgctctcgccgtccgcccgcagcctccgcctcctcgagtggggcaaggtctgcgacgccgtcgcctccttcgccggcactgcccacggccgcgacgccacaacgaaacaactgtgggaggtggaggatgtgagctatgagcagagccagatgctgctccaggagacggaggcggccgtgttgctgcttgacaacgctggtggggcaatggatttctcggggttggatacagttgcgatagagtcagcaatacatagtgtctctgggggcgctgtgataaaaggcctggaagcaatggcagtcactagcctgatgatgtttgttgaatccttgcaagtaaacattaaagctgccatgaaactggatgaaggctcatgtagtcgattaacaacacttacagaaacaattttagatgctgtcattaacaagtcattagtgaaatccatacaagatattgttgatgatgatggctctgttaaagacactgcaagccctgagctgagacggtatcgagagcaagtacagcgtctagaaaacaggttatatcagcttatggacaagttgatgcgcaatgctgatgatgaagcttcattgaagtatgcattgtaaatggaagatgctgcattagaacaaccatggataattcttcattttttgatggattattgctctccaggtcagatgctggaagcatgatagaaccaattgttgctgttccgttaaacgatgagttgcaggaatcaagagcattagtggctaaagctgaactggatgtcttatcaaaacttactgataagattcgtcttgatcttgatagcattcagaatttgcttcaggaaacaattaaactcgataagatcgcagctcgtgcaaaatacagtattgcatatgatggaacatttcctgacctgtatttgccgaactttgagaatgaaactgtcactagtgctacaggtggatctatcaaacaaatttcctcagctcaacttcctaagaaggcatggaaactgtatatgccaaatgcataccatccactactacttcagcggcatcaggaaaatatccatcgtgccaaaagggatgttgcaagtgccacagcggagatccggaggaggaggatatatgggcaagatattgcagaagaagatcaattggcatcagaccttgattccatgaaacttagggtttcccaactggagaaagaccagccagtaccagtagattttatgattgctgaagaaactactgtcttggtgataactggcccaaatacagggggtaaaacaatcagcttgaagacggttggcctggcatcattgatggctaagataggtctatacattctagcttctgaaccagtaaaaattccatggttcaatgctgtttatgctgacattggagatgagcaatctctgacccaatcactctctacattttctggacatctgaagcagattggtgccattcgtgcagagtcaacttcagagtccttggtccttttggatgaggtaggcgctgggacaaacccacttgaaggagccgctctggggatgtctcttttggagtcttttgctgaagctggctcctttctgactctagcaacaactcatcatggagaactcaaaacactaaaatacagcaataactcatttgagaatgcatgcatggaatttgatgaagagaacctaaagcctacattcaagattctgtggggaataccaggtcgctcgaatgcaatcaatattactgaaaggctgggtttgcctttggatatagtagaaagttccaggcgtttacttggaacagctggtgcagagataaatgctttgataatggacatggaaagactcaaacaagaatatcaacaacatcttcaggaggcacaatatcttcttatgcagtccaaggagcttcataacaacttggaactggcacaaaagagcattgtagaccacacttctgctcagagaaaacgaaaggcgagagtaatttcagagtatgctgttatggcccgttctatcattcgtaagaagtttcagcagttccaagaatctgctatagctgaaagagtgaaagaagaagagaatgctgtgaatgatgccaaatctgacagagtgaaggatcctatgccggcaaatacatctgccattggaaacatacagaacatagataccagcttgggcatgacagccaacgatgatgaagatgaggttccagaagttggagattcagtgtacgttcctaagctcaagaatgaagctaccgtggtgaaaatagattcgtccaaaaatgaagtgcaagtccaagccggtatgatgaagctcaaactaaagctgaaagatgttaaggttcagaagcggaaagtatccagatagaacatctacactgtcctgcactagcagatattcagataaatatgcatatgctgtttcgtccaattcgtaccatttcattggcctcattttcagcaataataataatgtggtctttcaagtgaaaatatggatttattatctgcatgtacttctcattcttcactacttgcggtactcaaaaccttcagcagagttccagaacatcttcagattatcacttctttatagaaaatgagcttgtgatttatcacttgtctatataaattttagttcttcgaaggttcttaaaaagaagtagcatgccaatgaaatagttggcactagctggttatttgaaattgccaaattggccacattgtagagatgtttctgtgcggcgccggttttatatggcttcacgctatttccaggagccttctatcccatctatctcatttcttattttaaattttactatgttttttccctaaaccctaaattgtactatgtaaacactgcaatataatgaacggca

SEQ ID NO: 39353 - DNA, 2279 bp, Zea Mays
cggggccgcatctctccccgttagggcccagctgaacactgtcgtcgcctccacctccgcgtttgggccaccgcaagagttcagggctcctctagggttcgagatcaaatccggccagcagagcagcatcctcagcaccacgctcaccatccccctctacctcggcaccggcgtcttcaccctcgggtacacaccacgccttttctcaccatctgagcattgccaaggagctcctctccatccccgatggcaccctcgccccaccaccgacgacgaatgggcgcttcagattcctgatcagcaggagagtcgttgaggctgagacgacgacacgaatgcggcaaggagcttcagattcactgccattagaaacttgcaggtgaggaaggagagggtccaagttcctgacctctgcatcgattgagagggtccaagttcctgacccctgcattgactaattatctttgagtttcatcattatgttgaaattagtatgcgttcaaaatactcaattgattctcacggctaccgtgcctcctagcgaaacttgcttttcgttggagtatctggcgtagtaatggaaaaaattaccttctccctttgagggttccagtccatttcgttctctataattgtcacctacccttcccgagcctacttttgttgctactataagaataagaatgaaaaaagcttcatctctatttgtttctgatatgaattgtgtagcttagagttgtctcttaacttacaatcttacattggtgtaaaacagtgaccacactaaaagcacaaatgcaaggttttacagaccagttgtgatgctgctaccactaacatgtacaaataggaaaggcaagaaaatggcttagagcaagtatttttaaagaaaaagtgatccatttaagaaacctttttattaagttacttctgataccagctcctcaatccgcgagtgtcttcagcttcactttctctatctgttgtacgcgggtgtctcttcgtcttgtgtgtgagttggatgagaactagacaactggtaggaaccactctctgtttcagtttctgtttgtgtttcacttcagttcaggttgtctgcgctcttctcttagggatcgagaatcatagggaggttcctcgcttctataagaaatatgtgcctttttgtttcattttccttgtggagttgtagttcagttcagttcatcttcgtgcatggggagtgcttggttcgattgttcacagccataggtgctacagattcgtctatggcgaagacagaagtttttgttttcatgatgttttcatggaagatggcgagaagctctccacccttatcatagttaactcttttgattaagtgattaaccaatttggtaacacatatttaatgttttagcttgtttggtttagatatggaggtccgtcagtaattttgtattttttttgtattatctttatctggaaactaagttgtatgtagtgacaggtaagaaatactgtggtggtttggacctcagttattggccagatgaagggcggaggccattatcagatcctcgtccacctttgggctactgctgataagaggacgagtgtcgtacacctctccaattccccccttcaatgtggtcagtgttgaatcatctacgtcatacagtgaacaagggcatactgatgagagaagggatgacatggatttttctcattcgagcatcaggttttgtgcgctgattatggtgtggtcgttgggggcatagtacgatgaattggggactgaaagagcatagcagagcagagggcctatctccggcgaacgagaaggcgtaccgcagggccatgaagcgcgcctgcctagccgctgtggccgttctccgcgaggtccggtcactgagcgtttaccattttatggcccgctatctccctccttgtcatggcttggtatggcgtggcgcctggattttagccgctgatcggaattgtcgagtgcgtagggtacaattgggatcgggagattggggcacactgtccatttgcgttagtgagacgtggtgcattataaactgagtcgaccatggcctacttgttttcagtcctataaatttggggtttctgggtgactaattttattaccgtagcttcaggaggttgttgctgttcaaaggataacttcaggttgtgctggaccattcacgtttgcaccatgagcactgggacagtacgatgtgtcgatgtgatattttgatcatgtggaaatgcaatcttcagatccgtccttg

SEQ ID NO: 39354 - DNA, 658 bp, Zea Mays
cgcccagctcgccaggcgccatcccgtccgtgccaggccgccgcgcccagagacccgcccctgcagccgaggacgacgcaccaggagcgcctgacgccacgaagccccagccgcgcacactgccctgcgcactgcgcactgcaactgcctcgactcgccgagcagcccgcgtgcacccgagccgcccgcgaccgtgcccagctgcgacgcctcgaagcccttgcgcgcagcgcccgaccgaagccgccacccgcgccgtccgcgtgaatggagccatttctttggcgttaatggagctttaacaccaccccggcactcgcagcagcgccacgcacccgccacacaaagccctcctctgctctcgccgtgcccaccccgttcgtcgatcgtccgccatccgtggagcctcaccagaactcacgccccaccgtccaaacgcatcgccggagttacgccgtccgtcgtcgacgtgaccgtgcagcatgacgaccacgctcgttccctgcccgacagaccaccccctgctcgtcgacattcacccctgcacatgagcgaacccaaggtttaagacaaccccaacctattaatttattgtctaaattatgtgttgaattaatttatgaatttgtgaattatcgttgtaatattatgcgacttg

SEQ ID NO: 39355 - DNA, 422 bp, Zea Mays
cactagacttaaagtgtgcgaaaattatttgaaaacacaaggaagggttgcatgcaccggggcttgcctgggtaacactaggttagtgttgtttggtgacgtcgatcacttgacgatcatccttggccagatacttgcttcgtctgtccatctccggttccgttcatcagcaccatcttgtggtcgactctgttctggttctccgcatcgcgtggttaattcacgtacctgaatgagatgcattatgcacatgaatgcatataaacataaatatcgcaaacctagatagtgcttgcgatagcgaattaaacacctagcggtgagacgttgaacaatttcatacggagacactaattatcgacgtacaattaagcgcaataattacgcttctcgaacctatcgcaaacatcacgaaacaacaa

SEQ ID NO: 39356 - DNA, 5935 bp, Zea Mays
ccgcacacaagtcctcacgatatttagattcttatgcagctagttatacacgaattcaaattctatatttaaaaggagtaccaaacaggtccaatgtgtgtaataaaaagaaaaaaaaagattccagtagcagcagtaaagcccattcgtatgtggccctgctccggaccgaaagataaagcccatttgaaatccagctcggcctgctgtcagttcaggagcaggacgagtcggggtcggcgcggcggcaggccgcaggccggcagcaggctctcgcttcgctctctcgttgtctgtcgagaggaagaagacgaggcgagggacggcagcagtagcagctccagcatcttctagcttcttcattcatgggattcggtctctactaggattaggggtgcttcatttcatccgatccccaacgacttgacctgattctgatctcgacgacgatgcggaagcgggatctgggcatcctgctgctcgccgccttcgccatcttcttctccctccaccacgaaggcgacttctccttccgggagtcctggtaccacctcaccgacgaggacttccccatcaagtacgaggccgaccgcctgcccccgccgctcgtcgccgatctcaacggcgacggcaagcccgaggtcctcctccccacccacgacgccaagatccaggttctccagccgccccacgcccgccacctcaacgatgactccgccttccaggaggcccgtgtcatggccgacatctctctcctccccgacaacgtccgcctcgcctcggggaggcgccccatcgccatggccgtcggcaacgtcgaccgctcctacagacctggcgaggtcaggaagcaggtgctcgtcgtcgtcacctccggatggtcagtcatgtgcttcgaccataacctcaagaagctgtgggagcacaacctccaggacgatttccctcatgccgcccaccaccgcgaggtcgcaatctccataaccaattatactctcaagcatggagatgcaggcctcgtcatcgttggaggaaggatggagatgcagcatcattcagcagatctcttcgatgaatttatgataccagaacacaacatggatgatcgccgtcgaagcgccagtgagaaacagggctctgaggctggcaatgcagacctgcgccattttgccctttatgccttcgctggacgtagtggcgaccgtagatggagccggaagaatgagaacatccagtcacagccatcagatgcttctgtgatgttaccacagcataattacaaactcgacgttcatgccctcaatagtcatcaacctggtcagttcgaatgtcgtgaattcagagaatcaatccttggcatcatgcctcatcattgggataggagagaggatactaccctacaacttgcacattttaggaagcataaaaggaaacaagttaagagaacgcctggaaaggctgttattaatagcgtgaacaagcccattgaacacaatccacctgggaaggatgcttccaatagaatagctagagctcttgggaaggctgcagatatggctaactcaaataaagccaggaaggcacagaggatgcagtatgttccgacaatcactaatcatactcaagtttggtgggttcctaatgttgttgttgtacatgaaaaggaagggatagaggttgtccatctagcttctggacgtacaatatgcaagcttcatttaaatgaaggaggccttcatgcagatattaatggagatggagttctggatcatgtccaggttgttggtggaaatggtattaaagagcagactgtcgtgagtggatcaatggaagtgctgaaaccctgttgggcagtcgctacatccggtgtgccagtgcgggagcaactttttaacgtctctatctgccattacaaccattttaatctgttccatcatggtgacttctcgagaagttttgggaggacattgatacagctggtttagaggtcgcgactcctatcctggtccagacagacgatgggcataaacacaggagaggaagccatggtgatatcatctttttgacaagccggggagaggtgacatcgtactctcctgggctgctcggccatgatgcggtgtggagatggcaagtatcatcaggggcgacatggtccaaccttccatctccatcgggaatgatggagaacatagtggtgcctaccttgaaggccttctccctacgtgcctatgacccgaaagaggtgatcatcgccggtggtgaccaggaagcggtggtgctctctccttctggtggcatactggccatgatcgagctcccagcgccccccactcacgctcacctcctggaggatttctccggggacggtctcaccgacatgattgtggtaacttccggtggaatatatggattcgtgcagacaaggcagcctggggctcttttcttcagcacgctggtggggtgcctgatagttgtgatcggcgtggtattcgtgtctctgcacctcagttcgtccaatgccgccaaacccagggcttcctcgtctgaatacagatgatgttttgatatgcaaggtcaagagacttttggtactcctatgttctagtagtctatatatttaaccaaatgagaattcgtgttattgtatgataagaattgttcctactagtatatctcatgatatactgatagtgcaatctcgttttttgttgtctaccttggtgttcctagcccccacaaccatttgtacgttggttttttttttaagtttgtttggtcagcaggtcaggcaacaatccagtccatctaatttgagtacatgatggtcaagattgtttcctggtcgacaagttgcctgcccggctataaacaaaatatgatgtcctagcatgcaaagctcgtcttgtctacagtagaatgtgtaaaatagaagatgcagacaagtttgaaatagaaaatgagatataaaatagaagacgtagacaagtttgaaatatagaatgagataggagatctgttgaagatagtttgaagttgaagatagtttgaagatagtcttattgtgttgtcacaattctaccaaagagagggaaagaaaaaaaaatgacaccacacgtcaggctcagctcacagaggccaccgccgccgtgttcctctgtcccgcgggcccccaccccacccgcgtcttcaacttcctgcctgccgctcttctccttgtttgttcccttccgtctaatttggctgcgggtgcaggtggaggccgaggccgaggccaacgccgcctgcgcctggcctgccgtgaggtggaggcggaggcggaggccgaagccaacgccgcccgcgcctggcctgccgttccgcgtcatcttcttccttcgcgtaacgacgccggccaggccaataaataaacaatttccaattccgttcctggaggacgtctgcacggggaccttcccagcgggcgacggccggctgcatccatggcggtggccttcctgctgctgggattgggtttcctccttggcctcctctccctggcgatcgcggaggggctgacgctcctttgggccatccgaagcctcacgcgccgcacatcggcctcacgcagcacgccgccgccatcactccccatccacccgacgccggcgcggtctgtgtctcgccacagcctcaaccgacagggcttcttatggatgctggagcaacccaaggatagcagcatcaatggcgctagcccagggatcagagacaggaagctcctcgtcgaggttttccctgtaaaaatgtctgctacgcttcaaggacattccctcaccttgtctggacccgatgatgcctcgcagctaaccattgacctgctcggttgcacagttgctgctgtttctgcatccaatctgccctcacgtaaatgggccaagaggtatccgataaaactggaaagcaaggaatctggtatttgcagggggagcaaggtatgctatgtttatgcagacacctcttgggagaaggaatcatggtgtaaagcactccgtcttgcttctactacggacaaggacaaactcaaatcccatgaaatgctgacccaagagttccgcagttacatgtcctctctgaaagctggatacccttcctttctgggaccctcgacactctccagtcaggaacatgtgcttgtggacaacactgtgaagaatgatggaccttcaaaactccgaggttttctcaaacgattggtgggaaagaaggcatctgccaaggcttctcaggagagcaaaacaggtccggcgccatctaaacaagatacaagccaacccagtactcctagctccactatgagtttcaacagccagctaccagcttcccccagtgcaaaggtggatgaaaagcttgccgatgacggtacactttgttggaacctcctaatctcccggttgttttttgatgctaaaatgaatgatgagatgaacaaagccatcagagcacgtattcagcgaacattgtcgaacaccagaactccagcctacattggtgagatcacgcttactgacctcaaccttggcaagctcccaccatctctgcacagaatgagagtcctcccactggatttggacgaatcgtgggctttcgaagttgacttcgagtgttctagtggaatactgctgcatatcgaaacaagacttgaggttcaggcgccagagctggaaaaggacattatgaagactgatattagaggcaatcctaatggggacgcgagttcagatttccttgatagtattgagcaatatggtaaccaattcgggccttcagaagtttcggattttgcagcagaggtcaacgatgaagcagataccttaaggaaatcaaagagcgctgggtgggcatcaacatatatgtcaaggtggagaagtatcttgaattcaatagcggaccaggtttcacaggtgccgctatcattggcgattaaaatttcttcagttcgtggaacgatgcggatacatctaaagcctcctccgggtgatcgagtttggtatgggtttacgtccatgccggagatagagtgggagttggaatcatcggttggggataggaagataagcagcagttacatcgcctcgcttatcggcaacaggatcaagatcttggtgatgcccaactgtgaaagctttcctatttcctggatgatagcagatacggatgactgggtgccccgcagaattgcaccttttatatggctgaaccgtgagcccgctgataggcgtgctgcagacacaactagagagatgatgccaggggaagcttccacatccaaggccattgcaaagaacaagtcgagtccgctgccgtctacaaaaagaatcaccaacggttcctggaacaagacaaagatacgtgttgatgggcaagagcaagagcaggcagaagcatcaacgagctcgcagtcttggctggtttcagcaaatggtgatgcaacaagggaacagctgaggatgccactgctgagcagcagcggagacgagagagcaggccctgtggaggagcagcaagcatcaccttctgctgctgaggaggagggagatgcgaagaagaggaagaggcgtgcacgggtgatggatctaggaaggaggatgggcgacaagctggaagagaagggcaagcgtttcgtcgggaagatgcgggagaacgcgaggaacaaccgcttgctattgccggacttggagcaggccaccacccctcctgctcctgctcctagttaggcattttaaggatgttactcgacaaaatgaaaattaatcagttgcagcgcctagcaacagctcctaattaggagcacttgtattatgtaaaagaaagaaagaaaaagcttatgagatatgattgtaccacacagatggatgtatgcatctctcatctcacccactgaattaacacaaca

SEQ ID NO: 39357 - DNA, 270 bp, Zea Mays
cagtttaataaatatttattattatgtgctatcagtttaatatattatatgactgtgtccgcgggtgccataaacccgcgagtagcgggtttgggtaacatacgctacccgtcgtgggtagcgggtacaggtacgggtttaacattaatctcgtaggtgcgggtttgtaatctctgtatctgcggattttaaattcgttgccatccctatccgcgaggctacttcttgagctcaacagagacaatagtgtcactccatataatagctttt

SEQ ID NO: 39358 - DNA, 1619 bp, Zea Mays
tcttcgtcttctcgttcacgcaatcacgcccccgccaaacccaaaccgaccgaaagcggaaagcaaatagcagacggcagacaacagtcgaggggacacaggaaggcgcgaagaagaccgagatcctcgcccaacgccatcacgccactcccccaatactcaggtgtcaggacagcgagcaggcacaagcagatctcactccacgttgctccttccgcccttcctctccgccgctccccggaaggatcatggagcgcgggattcttggctccaggggcgccgtccaaatcttggggtcgaagaccggggccgcgatgtcatgtggcaaaacaacctctacaagttttacttgttctaccaaacacgagctgaacttgcatgtgaatgttaagccgttgcaattgttttgctgaagaaaagatcggagtactgttattaaatcttggtggtccagaaaccctagacgatgttcaaccattcttgttcaacctatttgctgatccagatatcattcgactgcctaggctcttcaggttccttcaaagaccactggccaaacttatttctacttttagagctcctaagagtaaagaagggtatgcttcaatcggtggtgggtcaccattgaggaaaattactgatgagcaggcaaatgctttgaagattgctctggaaaagaaaaaattgaacgcaaatatatatgttgggatgcggtattggtatcctttcacagaagaagccattgatcagattaagaaggataatatttccaagctcgttgttcttccactctaccctcagtactccatatcaacaagtgggtcaagcattcgtgttctccaaaatgttgtcaaggaagattcatatttttctggcttgccaatctccattatcgaatcatggtaccaacgtgatggctatgtgaaatcaatggctgacctaattgaaaaagagctatctgccttttccaatcctgaagaggtaatgatattcttcagtgcacatggtgtgccacttacctatgttcaggatgctggagatccttacagagatcagatggaggattgtatttctttgatcatgggggagctgagatccagaggaatcttaaatggtcacactttggcgtatcagagtcgggtgggaccagttcaatggctgaagccatatactgatgaagttttagtagaacttggtcagaacggtgtgaagagcctcctggctgttccagtaagcttcgtgagcgagcacattgagacactggaagaaatagacatggagtacaaggagttggctctggaatcaggcattgagaactggggccgggtccctgctcttggatgcacttcgactttcatctccgaccttgcagatgcggttgtcgaagccctcccatctgcctcggcgctgggaaccagaaagcctgaagacaccgattccagcatggatctgatgcattacctgaccaagatgttcttcggctcaatcttggcatttatcctgctgttgtcaccaagactggtttctgctttccggaacaccatgctttaggtggttaggtgatgtaatgttgacccttgagggctttttcggtttcatcaaatctatatagatcggag

SEQ ID NO: 39359 - DNA, 2650 bp, Zea Mays
cttcgcttccgtccgaagtctcctcgctgccggggtgtcaagggagggcggccccagcacaagcgccgcccattgatcgctttcctctccttccctctcccctcccagtcgctcgcctaaacctcaccagcgaccagtcgccatcaccatggatggacccgcctccccctccgccgccgccgagactgatacgcggggaggagaagctccatccaaagccaagcgaggcaatgccgaggagaaatatcaacatggacaaccggtttactttcctgaggaactaatggacaattgggtttctttttctcttcgtggcttgtattattgctacaacatctcgttgcaagggtcttgcaacacaactgctgatccaacggacataattttagctgtcaaatgtgacatggggcctgacttctttcggtactcttttaacttgggtggtactgatattaccattaagtacctgtacaagattcatctgaatcaggaacaggtactttttgctagaagattccagatcacggttctttctttgctcattaacagtaacagttcggaggtcagcaatgctataaaatacttccgtgaatggcaggtagatttgggggttgtctatctacttctgcccacagcgtcaggcaaaattgattggtgcggtatcaagttctcaacatcatcagcatatgatgtgactgataaaaatatgagacattgccattcttgtaaagatgctgatatactgcagacaatggatgacccttgctgcaggtgcatacttcagaattctgttgtatatgcccctcgtgaacgaaaattttatattattacaggacttgacttaaatgcaaaccaacctctggatttgaacaataggagtgctgttagctgcaaaagtaaaccactgttggtcgccagtggattattcacagtgcaaaacttcctctacaaatgctacggaaaaaggaaagaacctacgagtgttaagttgccacctgaactctgcaaaatagtcatggcaccggtgtcagcaaatactttgttcagcttctcatttgtgccttccataatgtaccgtatccagtgtctgcttctttctgcaaagttgaaaatccagttgggcccaagaatgcaacagttcaacataacagctatgaagattctggaagcacttacaacaaaggaatgccaggagaaattttcaatggaatcattagaaacacttggagattctttcattaagtatgttacaggccaaaatctttttaacaaatacaaacatcgagaggacatgctaacctctatgagagaagaaaaggtctccaacccagctctatgccagctagcttgcaaaagcgaaattgtgggatacattcgaggtgaactatttaacccccaaaaatggaccattccagggttcggttatgactcacgcggtaacaacaaggttttcttccgagcaaccaataatatgtacagtctgaagaaaatatccataaaaagcaagagaattgctgatacagtggaagccttgactggggcctacctcagtacttgtggtgaactggctgcagttcattttatcaaagcactaggaatggatgttgaactgcatagtaaaatgcaagttgaaaggactattacaacaaaatctgaagaattaattgacgcggaaagcttgcagacaatgctcaaatatgtgttctatgatacttcactgttagtagaagcattgacacatagttcttacaatattactggtattacagcttgcaatgagaggcttgaatttctcggagatgctgtattggactacatcttaacttattacttttacagaaaataccccaattgtacaccagcactgttgacaaatctacgaaaagcttctgtgaacaactgttgctatgcacatgcagctgttaaagcagggttacacaagcacattcttcattcatcgtcaaaacagatggttaacgatcttgagaattcagggcggtcattttcaggcccatcacatggttgggaagctggcattagtctcccggaggatctcgcagatttgtttgaagcaatagctggcgcaatttacgtggacagcgggaacgacaaagaggttgtctggagtgccatcaggcggctactggaacctcttgccacccccgggaccatggagcctgaccccgtgtcggaactgaaggaattatgcgagcacaaacactaccctaagccatcgtactctccaactcgtgacagtgtagctggagtgacaagggtggttgcacaggtgacggctgcgcggactgtgtactccgggactggaacaggccgcaaccaggatgtggcagaggttctcgctgcaaaggctctgctcaaaaagataaaggccgcagcaagaggatgaagcttggacttggcttggaccgggcgggcatttgatatttgggaatttgcgcacatgatagctgttctcgcagaggtaacaaaacaaactactgtagtatataaatgttgtgtatatgaatcaaggacagttgaactacccttggtttcgatagctgcaaaatacaaaacaaaaaaaaactcgaatctactatgcacagtggcttcatgtggtggacccttaatgaaatgatgaattctacgtggc

SEQ ID NO: 39360 - DNA, 3178 bp, Zea Mays
cccgtcccaaatccgttgctctttcccccttgcccccttcccagtctccactctgagcactctcctccgctctgctcctttgctccccacggcaaaccgtaaaccctagcctgaggggcacccctgtcgcagccatgggcgccagccggaagctgcagggcgagatcgaccgcgtcctgaagaaggtccaggagggcgtcgatgtctttgacagcatctggaataaggtctacgacactgagaatgccaaccagaaggagaagttcgaggcggacctcaagaaggagatcaagaagctgcagcggtacagggaccagatcaagacgtggattcagtccagcgagatcaaggacaagaaggttagtgcctcttatgagcaggctctgatggatgctcgaaagcagattgaacgagagatggaacgatttaaagtatgtgagaaggaaacaaaaactaaggccttctcaaaagaagggttaggtcagcaaccaaaaacagatcccaaagaaaaggccaaagctgaaacaagagactggcttaataatgtggttagcgatttggaaagccagattgataacttcgaagcagagattgaagggctttcaattaaaaagggaaagcaaagaccgcctcgattggtacatttagagacgtctattacgagacataaagctcatataaagaaattggagtcaatcttgcggcttttggataatgatgagttgagtcctgagcaagtcaatgatgttaaagattttcttgatgactatgttgaacgtaatcaggaagactttgatgaattcagtgatgttgaggacctctatagcacattgcccatggagaaggttgaagcacttgaagacatggtttcacttgctccttctagtcttgtgaagggtgttgctcctgtttcgactactgcagttttgagcacaaagagttctgttgcaacttcacctactcagcctacagtatcaacagcttcttcacaaagtacatcacaggatcaaacagaggagacagcttcccaagaaagcaatcctgaacctacgccacaaacaccacctccaaaaggtggaaaccctggaccttcagtaccagctgtgcccattgttgtcagtactggtagtgcggctgtttctgtacctgcagaaacaattagttcccctgtgcgactaactgtacccgccacagcagccacagtgctttcttctgctattccacgaagtgctcctgagaatacacttgctgttacctcaattcctgcaaacttatctaccactttgaaggatgatgaaagcatgagtgttcctccacgacgaccatctcctgctactgaaattggaattggcaggggcataactcgaggaacaactagtcaggcattaggtacagctcccataactattggtccagtttcaggaaatggatcggttagtgcacttcctgcaataaatgacttgtccaaaataaatatattgaacactgacgagaagattaacagtgatggtctttctcagcagttggttatgcctcttggtagtaaagttcaaccccagcaggttcccaggactaatgatgcaatcggctctgattctgctaacacaaatgaaaaccctattcttggtggaagagtattttctcctccagttgtttctggggttcaatggagacctcaagctgctgctgcatttcaaaatcaaattgaaactaatcagtaccgtggaaggcctgagatttctgctgatcacagggagaagtacatacagagactgcagcaagtacagcagcaaggtggcagccttctgaatgtttcccatataactggcataaatcagaagcaatttccaacaccacagccaaatccccttctacaacagtttaattcacagagttcctctatatcttcccaagtgaatcttgggcttggagttcaaggatcagacgcggggcatataaaaagtgaagatcaacaaattttggctgaagatgttggtgtggaatcttccgcaacaacaggagcaaataaacaaacaagtgaagatgacacaaagattccatattcgaatccttcagcacctgcagcagaaaacactcagctgcctagggatactgatctatcacctggacagcctttgcaacctggaatgccatcatctggtgttggtgttatcggccgaagaagtgtatctgatcttggtacaatcggagataaccttactggaacttctggtagttctggtcatgatcagaattattatctgcaaatgcttgaagctgcattccacaagcttccacagcccaaggactctgagcgtgctaaaacttacattccgcggcaccctgcagttacccctgctagctacccccaagttcaggcatcaattgtatcgaatcccaccttttgggaaagaattggtagcgacacattagctaccgacatgctgttctttgcgttctactaccaacagaacacatatcaacaatacttggctgctagagaactgaagaagcaatcatggagatttcaccggaggtacaatacctggttccagcggcatgtggagccacaggtcacgactgatgagtatgagcggggatcatatgtatactttgatttccatgtcactgaggatggctcaggatggtgccaaagaatcaagaatgacttcacatttgagtacaactacctggaggatgagctatcagtacaaacaaactaaagtgccatggcagtaggtctggtcaaacctttatgtccaatttgaattttgtagttctcataagagcttgttcggttgcttctggatcaaagaaggttggaggggattaaattccttctagtcaaaattgaatagaaattgatttaacccccctcaatctcctttatccagacgcaaccgaacaatgcctaaggtgactgactgactgttataatctggacccttgacaaaatctccagctgtaaactaatgtgtgaagttggatgcaccgaacatgctgaaattataatcgtgttatgccagccgaatctgtttgacgcagctgtacattgtcgttattatctggatgcgcctgaaaaatattttggatctttcttggcgcctacctgtttatttttagctaactcctggctggcgctttcgatctttctggttcgtttttttatcaaaaaaaa

SEQ ID NO: 39361 - DNA, 931 bp, Zea Mays
taatcctcatcggcaaccccgcgtgctatcaacccccctgtgatcggcgatcccatcccttccaaagcaagcgcccactcaccttgccttgccggacaagcgtgccgcccgcgtcaaagatgcagtcgctgagcccttttctcccactcccctcccttcctctcttcgcctgactcgcacgcgcccccgatgtctgactcccccgcgtgggcacgagccccgccatacgcgcgctgccaaggggggcaaggcgcggcagctgctccacctcgacgcttgggcactcgtcgacgtcatccaggccaacgtgaccccatcgacggcctcaccctaggacccgctcctttcccctagaagcatccgaaggcatggcacccgtagccgccgacgtcgttcgcctcctactcacatggcgaggtgaacgggcactggactgtaagaaatggatgagcagtgacgtgaggagggcccctgcggccgagctatggaggctgatagacggcccgacacaaaggcgatggtcgtggaggctgcggcgacgcacaaggccatcactgggttgtggcggggcaggagagatgagtgggggagactgtgagagtgatgagtgtattctgtaattgagacggactccacccagatttgggtctagagtttgtttcgctataggtatgaaattgctgatcataggttgtttcgctacagaactaagtggaaatggagtttttcatagagtacggagaggcaagccagtaccagatctaagaagtcattggtaaagggaactacagagtagttgctacatcttaagacaccctataagattgtcaactcaattgtgatgaatatgttgttattgaagatggttgccacatccaagattcttctgaatgtaataatgttcaaccgcaagaactgttatgagagattg

SEQ ID NO: 39362 - DNA, 538 bp, Zea Mays
atgtctctgaagtctgaacactcttctcatcctacgactgggataaagcaggtagatcagatcactctgggtcaaggcccggagaagtcagaggacgaaggagcccgagtaggaggcggccgacggcgagccgctgtgcggcgggctatagaatccgccgccgccgccgtactggatgatggcggcggctgcggggcttgcgtggttgtggacgccgtcgtaggtggtgatgacgtagcgggggtcgtcgcggtccctctccacccgcttcttcacgccgcagccctccgacgagcagcggtagtagttcctgcacgtgaacatatgggtgtaccttggatttgggctactcttgacagccttcttgccatacttcctccatttgaatccatcgtccaagatctccacctctgatctcgttctgaacccgatcctaccgagtctcttctcgccaccaccaccctcacaccacctgatcatctgcttctcgctgcgatcgctccgagccccggccaaggtcggcgccggcgatgagtaa

SEQ ID NO: 39363 - DNA, 869 bp, Zea Mays
tctctctcccctgcctgcttttcactccactgtcccacgccgcctcccgcttccccctcgcgctcgctggcggcttaagcatctaccggcgcccgcttccccctcgcgctcgctgcggcctgcttgctgcatgtcaccgtgggaggcgagattagccgatctggtgttcttgccactcggagaggtggttctggggaggcgtaggaggtacctcgttgtcgacacaccaccaagcccctcggatctccttcgtccccaccaccgtcaccgacacacggctccaggttcaggcctcatcctaatggatgcttcggggcgatttggatggtgacctctgctttattacttgggatgacaaactgattccaaagaaggtcgatcctatggactactgcaatgaggtcacacataatggaccatgctgttacactagaggcttcagaagaagagaaaactccttcagattaccagaagacaggagagaaatgtttgagttgcttctgcatagattaagaacgaagtcgatcatggaggcaatggatgcactaccgagtatctttggagcttgccggttgaagaacaggccccactgcaaatcaacatctatgagcttagttttttagatatttcttttgtctcataggttaatccacaatcggtggcatgttgttgtttgttacttagaatttgagtcctctttgtgtaatgttctggagatatatgatcacaacatgaatggagatatatgatcacaacatgaatgaacttgaggaaagtgattaggaggcaatagaaggtattatatctaacaatggttattttactttagctggattgtttaggacactaaataatttcaagtgtatttg

SEQ ID NO: 39364 - DNA, 2392 bp, Zea Mays
ggctgaggttcaccgagccgccgcttcggttctcctctaaaaccctagaaactaactcccacctcccggttcccgccgtcctcgctcgccccccattctccggccctccccaccgccaccattttccccggcgacatgggccgcaatcttccagccgagcaagtggaagcacccaggagcagcaagatggacaagaagagaaagaaggacaagaagcggaagctggcagccgaggccgaggaggaggcggcggtgacggcgacagtggagaccgtgaagagcagcaagaagaagcgggtggagaatgaacccggcgcaggagcagtggaggcggagaacggcgctgagaagaccgtggcggtgaccgggaagggttcggaggaccctaagtacgcgccgctacggtcgttctccgctgccgagctgccgtctcaggtgctcgaatgctgcagcgcgttcgcgcggccgtcacctatccaggcacacgcctggccgttcctcctcgacggccgggacttcatcggcatcgccgccaccggatccggaaagacaatcgcctttggcgtgccggcgctgatgcacatcaggaagaaggtaggggggaaagcagggaagaaggctgtgccacggtgcctcgtgctatcaccaacgagggagctcgctcagcagattgcagatgtacttagtgaggctggtgcaccatgtgggataaaatcagtctgtctttatggtggaactaaaaaggaaccccaaatatctgcccttaaatctggagtggatatagtcataggaactcctggtcgtatgaaagaccttattgaaatgggtgtttgctgtcttaatgaggtttcgtttgtgatgaagcagataggatgctggatttgggttttgaacctgaagtcagggcaattttgagccaaacatcatctgtacgccagatggttatgttcagtgcaacatggcctcttgctgtccacaaattagcccaggagtttatggatccaaatccgataaaggttgttattggatcagaagaccttgctgctaaccatgacgtgatgcaaattgttgaagtattggatgatagaacaagggattcaagattacttgccttgcttgacaaataccatcaagcacaaagggttttggtttttgtgctgtacaagaaagaagctgcacgagtggaaacaatgcttcagagaaggggatggaaggctgtttcagtccatggcgacaaggctcagcatgatagaacaaaagctttatctttatttaaagaagggaaatgcccattaatgattgctacagatgtcgcttcacgtggacttgatattcctgatgttgaagtagtgattaactatagttatcctttgaccactgaggactacgtccacaggataggaaggactggtcgtgctggcaagaaaggtgttgcacatacctttttcactcaagcgaacaaggcacttgctggtgaacttgtgaatgttctgcgggaggctgatcaggttgttcctccagcccttatgaaatttggcacacatgtcaagaaaaaggaatctaagatatacggatctcatttcaaggaacttacagcagatgctcctaaatccacgaagatcacatttggcgattctgatgaggactgatgtgatgacagcttaggccttgttcgtttctatcggattggtaggccggaacgattcctatccggattgcttctctaatttatataaactttgattagctggaacgattccgggtgcaatccgacggaaacgaacaaggccttactgatttttcatccctgctgacggaagcttgatttctccgttggtgatgctatggatgtgatcagatcagccatttgcaagctgattgcagccacggatgagtattgtggcagtgggcaatcccaaaatatagctctcttgttataggttagtttattatgagtagcattcggcttatgtttttctggaccgtccccattatgcattagcttgggctgcttggctgtatgtaataataagcaacattctgcttattatgatttgcattctcttggaggcttagtttggaaacttaaatcgtctccggtatttccagggattgagtgggaaaataagctattttcccactcaatcttcagggaaaccggaggggatttaagttttcaaactagcccagagtgtagttaaattcagtgcgtccttagtacaagcagcccggttatggtaatgataggatagtgaaaggtgtacttctatcctggttagagtaaaaaaagaatatggttttccgtgttatagtaaaaaaaagaggatggttttgcagttggattttgattgggttccatgtgtttgaatcaactttgtgtttccacaacttg

SEQ ID NO: 39365 - DNA, 1347 bp, Zea Mays
gaaaaagcagtggatgcgtcaagaggtacttgctgcaagatctccacagcttttaaacttctatgtggatcttgttagcttagatgctgcatcaaagatacaactaaaaatgttggctgaggaaatgcaagcagttagtaaagggctggaaaaagttcaccttgagtatgatgcttcagaaagggatggtccagtatctgaaatttttcgtgagaaactgaaagagttcaccgacaatgctggagctgatgtgcagtcgttatcttcattgttttctgaagtgggtaaaaaggctgatgcgttgattaagtattttggtgaggatcctgttcgctgcccctttgaacaagtaatctctaccctcttaacatttgtaacaacatttcgaaaagcacatgaggagaacctgaagcaagctgagcttgagaagaaaaaagctgaaaaagaggcagaagcagagaaggccaagaacgcacaattaactggcaaaaatgactctaaaccatcaaatccaagacggcaagctaaacaaaccttagagaggacaaggtctgcaagcagacgaggaagagatgttgggtgataacccgaatggtcagtaattttctgtgcttctgatctgctcgcgaggctaatggacgaccgctgggcaagagaagtttcatggacggacgctggcatccgtcgggtgcagcgcgatcgcatcaaagaaaactctacaggccacccttcaacggtctcactggagaatgccgacgtctgtttttatccatgtcggccatcagggtccagtgctaacttctgactgctgtaaagaattgctaacactgacgctaactccattctttcttttcttttttcatgttacttttccattctttctaacaacggtggccaagtacagccatggcttcgaaaaactaccgcctggtgcttaggtggaaaattgtaaaaaataggcatctgggtgaaaaaaaggtatggagataatctaggtggcaaagagtatcaggagtaaatatgtgatgcaaactcagccagtagtttagctgtaaagttttgtagtgagtgtgtattgccgccactttgtattctatgatcatgaagcagtgaaggcggcgttttctttacgatacgtagtcagatagccttgtcggctacgtgtcgcctgtgtacgtgtgatatatgtgctgtcaattgctgttatgattcaaccttgataaaattaggcatgattcaaatgcatcttttgttagcgtcctaaattgattttagttgaaaataaatagaaatagagtctgtaaaaatgagagtccattgtcacctcaatggctctgtagaaggact

SEQ ID NO: 39366 - DNA, 1951 bp, Zea Mays
tataggccggctaaccctgttctattctgttcaccccgagctccgcctggtatggtataaagaggagcctcttctcctcatcgtccccgcatcgccgcatctttccaccttccctcccctccactcccgcaatctcgtctccgccgtccgccgccgcgccgtagcaaggtaacagagatcacaacaagttaaagcctcaaggaatgctgaaagatgtgctttcctagaagatatttctgttgcgacatcaaggaccttgctgctccccgagggctgctgatctgctcaactcttgatgacctgatctgcatcgattctacaacgttcagactgcgccacgaccaagccataagaagagagaagatatggagtcgacaggaaagattttgatggagcggtatgaggtggggaggctactggggaaaggcacatttggcaaggtgcactacgcaaagaatcttgagtccaacgagagtgttgccattaagatgatggacaaggacaaagtgctcaaggccgggctttcggagcagataaggcgggagatcacaacgatgcggttggtggctcataagaacattgttgagcttcatgaggtcatggcgacgcggaacaacatctactttgtcatggagtatgtgaaaggcggagagctctttgacaagattggcaagagtggcaagctcacagaggccgctgcacacaagtacttccagcagctcattggtgcggtggattactgccacagccgaggtgtgtatcaccgggacttgaagcctgagaaccttctgttggatgagaatgagaacctcaaggtctcagattttggactgagtgcactttcagaatccaaggggcaagatggcttactccacaccacctgtgggactccagcatatgtagctccagaggtgatcagcaagacaggctatgatggggcaaagtcagacatctggtcctgtggtgttgttctatttgtactagttgctggttatcttcctttccgggccccaaacatgatggagatgtatcgcaagatacagaatggtgatttcaggtgccctagttggttttcacacaaactcaagaagctcttgtacaagatcctcgaccccagcccagacacaagaatttcagtgcagaagataaaagagtctacctggtttcgaaaaggccctgtggagacccgtacagtaaaggagaaaattctgagtgagaatgacaccacaaatgctgctccagccgttgctatgaggcgcaagaagaatgttcatgaagacgtgaagcccccgactgtcacaagcttaaacgcctttgaaattatatctttctccacaggattggacctctctggcctatttatcagaaaggagtgtaagaaggagacgcggttcacttctgataagggtgccgtgtccatcatctcgaagcttgaagatgttgcaaaagcactgaatctcagggtaaggaagaaggacaatggtgttgtcaagattcaggggaggaaggtggggaggaagggtgtcctggagttcgacactgaaatatttgagatcacggcatcctaccacctcatcgagatgaaacaaacgggcggtgattcacttgagtacaagaaactgttggaagaggacatccggccagcactgaaggacatagtctgggcctggcatggagatgaccagcaacaaaagtagtagctttggatctctcttttttgttccataaaattgttagatctttcacttcagattgattttgttcgacatgtgcgtgttcttcttactagttacattctttctgtttctgtggaccattggactgtattctgtcgtgcaataattgttgggaggcctgagtttgttagtcgttccattctgaaaactggtatctgttctgtaatggttgtccctatcaataatgaaataattgcgtttgatccttgaaaaaa

SEQ ID NO: 39367 - DNA, 2076 bp, Zea Mays
tttgtctcttgtgcgcttatgggacttatggtgtttactccctcttcggctcttccttccttctccagactcgttcccagagacatgtcaacaatctcacctcggttgctgccctgccatgctgctctttgtccttcccctgctcctgctcgccttgcccctctggctcttgcattcaatggagctgggctttggatcatgagcggagcacatgggaggaaactagcgcagaccgagcttcttgatctggttcggaccgacgcctcgcctaacggtagcggagccggagctggtgcgcgagatcttcctcacgcgagcagaggcgttcgaccgctacgaggcgcatcccgtcgtgcgccagcttgagggcgacggcctcgtcagcctccacggagacaagtgggcgctccaccgccgcgtgctcaccgacgccttctacccggacaacctcaaccggctggtgccccacgtcggcaggtcggtggcggcgctggcggcgaagtggaacgccatggcggccgccgctgggaacggcgaggtggaggtggacgtagcggagtggttccaggctgtgacggaggaggccatcacgcgcgtcaccttcggccgcagctacgacgacggccgcgtcgtgttcgccatgcagggccgcctgatggcctacgcctccgaggccttccgcaaggtcctcgtccccggctaccggtgcgtactacctgatggcggcgcatctcgtctccgtctcggattttcattcaagatacgacgcgttgtttgcaggttcttgcccaccaagaagaactggcagtcgtggaagctgggcagggagatacggcggagcctgacccggctcatcgcccggcgcagcggcatggccgaggaggaggaggaggttcaggccggccactccggaggcttccgcgaccttctcggtgccatgatcaatgccggtgagaggaagacgccggcggcgatcccggtggcggacatgctggaggagtgcaagactttcttcttcgccggcaagcagacgacgacgaaccttctggtctgggccaccgtgctcctggccatgcacccggagtggcaggagcgcgcccgcagcgaggtgctcgacatctgcggccccgacgagctcccgtccaaggagcacctcccgagactcaagactctgggcatgatcataaacgagaccctccggctgtacccgccggcggtggccaccatccgccgcgccaagacggacgtgcagctctcggacgggtgcatgatcccccgcgacacggagctgctcatcccgatcatggccatccaccacgacgccaggttctggggccccgacgccgcgcagttcaaccccgcacggttcgccggcggcacggccagggcggcgaagcacccgctggcgttcatcccgttcgggctgggctcccggatgtgcatcggccagaacctggcacggctggaggccaagctcaccatggcgatcctgctgcagcggttcgagatgaaggcgtccccgaactacatccacgcgccgacggtcctgatgctcctctacccgcagtacggagcgccggtgatcttccggccacgttcggcgcatccggcagcctcatagcgcagatgcttcgcctgtcccccacattcttttgttgattgaaactgatgggaacgccgcaggtctgcctggtgctcgaaagccataggacgtgtcccaaatactccttccgcgaccccctgtgtatatgccaagtgatactagaagccaagaagcactaactttctgtcctagcctgcgcctcggggcctacccaggttgcccgccggaaatgccctcgttaatagaccagatcaggcccagccttttttgttccctgccccatggcgtttgtgtggtatgtgtatgtatttgtaatctgtatagaggtttgctattccatcttctacgttcctagtagagacgaaaatgcaatgggaaaaaaacagagattgagaacaatagcatttgtttaacttgtactccctctgtttttttatttgtcacgctttagtttaaaaatattttaacgggca

SEQ ID NO: 39368 - DNA, 1116 bp, Zea Mays
atggtggcggagacagcggctattggaggtcgaccgtcgtcgcagccttcgcgggtgcgcaagtcggctgtgctctccgtcgccgcttcgtcggcctcctccgctcaccagtaccgtgcctcgcctcgccttccatttggttgtgagagggaagagatggggctcacgttcaccaagctgttcagccggctgttcgccaagaaggagatgcggatcctgatggtgggactcgacgccgccggaaagaccaccatcctctacaagctgaagctcggcgagatcgtcaccaccatccccaccatcggattcaatgttgaaactgtggagtacaagaacatcagcttcactgtctgggatgtcgggggccaggacaagatcaggccactgtggaggcattacttccagaacacgcagggtctcatctttgttgtggacagcaatgatagggaccgtgttgttgaagcaagggatgagctccaccgaatgctgaatgaggatgagttacgtgatgctgtgttgcttgtttttgctaacaagcaagatcttccaaatgctatgaatgccgctgagatcactgataagcttggactgcattcacttcgccaacgtcattggtacattcaaagcacttgtgctacaacgggtgagggattgtatgaaggcctggactggctgtccagcaacattgcaaccaagtcctaaattgtcaagcgaggtttggatcatctaggagcttttggatgatgatgatgatgatggtgctggatatttagggttgggttggtatttccgtatgtaagatgtatgcccctgagctcggcagtttttgagctctgcttaagattctcacagttaaattgttttatgtaatttgggccttgagatgtttctgaaccaaacagctaaaagagttcagttgagttaactggttgccattattacattatgagattctttgatgctccatatgttcaacaccacatcagaaagatgcctgtttttgtgccaggaattgacttgggtctttacctttctgtttgggattaccgaaaacctccgcagtaaaacagtcccatgaaaaatctttgatcaccacttcttttacagagccgagtt

SEQ ID NO: 39369 - DNA, 3517 bp, Zea Mays
taaacataacgaacacgcgcacaaaaaatattgacaaaaaccggaggggtaaaaggggaaaggccacggccgcctggaggagcgagagggcggaagaggggaagcggcagccgcaggcccgcagctcgtcgatggtggttagggtttcgccgcccgcaccctcgaccagctgaagaatcgcccggtggttgaagaggctcgcgcctcgccctacaaggctccaagggaagaggggatagacagcggcggaccgcggcgtgcggctgatggccgagcaggaggggagggacgcggaagcggggggcgatgccgcggccgcagcggtggcgtcgcacaccagcagcatgcagcgtgtcaaagtataccgtttggctgatggtgggaagtgggacgatcaaggaacaggttatgtttctattgattacattgagggttcaaaagaactaggtttgactgttttagatgaagatgacaatgatacactacttatgcacaacatcacatctgacgatatttacagaaaacaagaagaaacaatcatttcatggagagatcgtgaagcagcaacagacttagcgttaagctttcaggaagctgctggatgctcctacatatgggaacacatatgcgatattcagagaaaccttcagttcagtaaccttggtgctctggaagttggtcctcgtcaatcatcagaatctctagaagcctctagaataatgcattctaatgatgattcattccgctctgccaacggcggcgaattcagggagcttcctcctgttgagttgtctaatcttccttttattttgaagactgtattggaggctggcattacagatcagatgcacgtggcagagttgataacacaagataatgactttttcccaaagatagtggacattttcagaatgtgcgaggatttagagaacatagatgatcttcacatgattttcaaattggtcaagggaataatattgttgaacagtccatcgatctttgacaagattttctctgatgagtttattcttgacataataggtgcccttgaatatgatccagaggttccaagagtgcaaaatcaccgtgcttttctgaaagatcatgtagttttcaaagaggccatacgtattgaaaatgtttctgttgtttcaaagattcatcaaacatacagaatcggctatcttaaggatgttatactaccacgaatactggatgatgccactctagcaagtctgaacacaatgatacactcaaataatgcttcggttatttccctgctaaaggatgacacactctttattagacgactatttgccaggatgaggtcatcagatatttcaatggaatcaaaacgagaattggttctgttcttgcatgaattttgcacacttagtaagagtctaccacttgttcagcaactgcgactgtttcgggatctttcaggtgaaggagtttttgaaataatttctgatgtgttgcagagtcaagatagaaaaatcatttcagctgggacagatatccttatactttttcttaatcaggaccctaacctattgaggtcatatattgtccaacaagaaggaaattctcttctaggacttctggttaaaggcatggtaactgacttcagtgaggaaatgcactgccagtttctagaaattctacgcatattgatggattcttttactacgtctggagcacatgacactgtatcaagcctgagattttgttaaatgtttgtgaactgctgtgcttttgtgttgttcatcatccctacagaattaagtgtaattttcttatgaacaatgctatcgagaaaatccttacattgactcaacgaagggagaagtttttggttgtagcagctgttagatttatgcgtactattatatccagaaatgatgaccatctcattcgccatgttgtgaagttcaacttgctgaaaccaataattgatgtctttgttgacaatggggagagatataacatgctacattcaggagtactcgaattgttggaatacatacggaaggaaaatataaaaactctcattatctatgctattgagtctttctgggatgaacttgccatctttgaacactttggaagtattcaggccttcaaactcaagtatcaacagtacctggagagcgctgaaccaaggttgaatgctagtgtgcctgacatgagaaagaaggcagaacaaagaggtcttgagaaggaagaggaagactacttcaatgaggacagtgatgaagaagattcaggctccggccggcgggctaaacatgcacagaaccaaaataacaagcctaagtccaaggtccccaatggaagtgaagctgatgacactgatggcgcctctaggcctaaatctgctggacttgtggactatgacgatgatgacgatgaggacttcaatccaccaccaaaggagccttctaggcctgcagaggatgatgtgcccttaaacatatccccgttgaagcggaagccagtgaatgcagtggatgggaaacattcagacggagagggtcgcaggaggcaaaaaatagaaactagaattagttgtgctaaaattgctgctgttactagtacagctattaagcacacagatctacaaaacaagtatgcttcccacttgcttacgtcagccacaccaagtactgaagccaatggtatttttagtgaacatggtactaactatgaggagcaacaacatcctatggagaacacagaaacttcacgacaaactggtggtgattgtataaaagatgtgggcagtatgtctcccgagaaggccgtaaatactaccaatacaagcgattcggagccttattcagtaagatgactactacacagctggttggtccatgtacccatcctgtgctgtggtcaacaggaaggaatcagaatgtgtttggctccaagcgctgaatgcatcgatatcatgctggaaacatgattggaggtgacatagattgcagctacctttacatctcaagtgtacttgcgagaattgcaatggtatcctactgctccagaacaggtaaacatggtcactccatccgcaaagaagaatcatgtgttcaaccagtgtcaattcaacagaataaagaagaatcatgtgttcaaccagtgtcaattcaacagaataatctgttcagcagtttgctttatccgtgctcattgtactacgaacctccgccgtctacttgaatatcaagcctccacgggcagcaaagaatggcgcaaattattgagactcgacagcaatgagcttgatcagtatgttcagggacggtccggaggtgtccttgagggggtcgccgatgacggcagctttctgagcgtgcgacccaaccgaggctatatctaacaaactgcactatgtaaacagtctacattgtaaaataatattttacacggttatatacactctatttaagcatgatcttagtgtggttgtttaaacatggtcttagtgtggttggatgcaccacttgcccttgtt

SEQ ID NO: 39370 - DNA, 3800 bp, Zea Mays
gaatattagctataacctatgtttgattgtgtatatttgtatacttttattgtgtttcaggaaggacaaaatcatgttgtacaggatcctcccacatatggtgcaccaaagtttgatagaacccccagttagtcatgtcgtgacatgttcttatctctactactaattatgtgcctatcgtaggcgttcacaattccttggttctgtcgtcgcgctcgcctgccatctccctccgcgctccatccgccaccatccgcgctcgcctcccttcgcgcatcctacaaccgcgtgctccttccttcgatggtgcggatcccccgtgactaccatctccctccgccctcccgcgctccatccgccaccatccgcgcttcctacagccgcgcgctccttcgacggcgcggatcccgcaccctcgaatcacgccagcagatcccacaatcaagcagcggcgacaggaataggggcgggctacgcgggcgctactacgacgagggtgagggcgagcgctccggcgccgcggcgccattcatcataatcggtcgagctcctggagggaacggctgcagagcggacgagatcgaggagcgggcgggcgggtgccgcccgtgacggcgcctaggctcaggctccgcgacggccgccacctcgccgcgcaaaggtctcaccggctcccgagaggacagcgcccgcgcctcccaggtttcaaaaaaccttctgagaaggcatgtataaaactttgggcaaaaggagatcttcctacctagcatatcttgcctcggaggagggttgttatattcaatactatgggtttgatggaggtaatttttaacaggcctgttgatattctaaggaaattgtttgatgggaacaccttgagatcacaaatcaaagaattctttaatcgctttggtgctggagaggctgctgcaatgtgcttaatgatagctgcgaagctactttatgttgaagatagtctgataagcaattctgtttctgagaaagccactgaggcatttgaggaccctgggcttgttgggatgcctcaaattgttggtaccactgctttatctaatacacgaacttaggctggaggctttactatgggccaagttgttcaagaagcataacctttgttttctggtgcatatgaagggctttgtttgtgctcgtcaagactactttatctcatatgggagtttcctattatagtgattcgaagaccggctggtactaataaatgcaaggatggtgtaattgtttgtaggctttcagctggggccatgaaaattcttgagagcaagattcattcactggaaacatttttaagatctagaagaaataagagaaggggccacgcagtaccattgacacttaccctcaaggcctacagttgttgtaattgaagcgggtcaagacatagcatttgcaaagatttagttcattctgatcactctgcaatatttcggtagtcgatggatggagaatggtggatcgaggagaccgatgacatactgctgcatcccgtgctgctcaatgggaagcagtaccggccagtctggtcaaacgacggcaccgtgatccacgcagatttctagttaagtttcttctgatggtgatggtactaaagaggactatgttcatatccgggcaaagcgaggccaagccactaacagccaaagccttgcagaaagactagggagaaagaagataagtgagaggatgaagcttcttcaagatcttgttcctgaatgcagtaagatcattggcaaggcaatcatgctcgatgagattatcaactatgtgcagtcattgcaacgacaagtcgagatcatatccaaacaagtaaagccacccactcgatcaccatatctccctctagtcaaaccaggatcaagcggccttactggcccatttaaccaaggaatcatgcagccataattgatgtgcaccattgccaatcccgttgatgttttgcatggagctattcacgaggcgtcaacaatgaaccattattgatttgtccactgttatgttcgttgctggtgcaatcatgggatacattatgttcactgaatctacactcccagttcacactgaacttacccctaaatcttgtggcttccaagattgcagtctagactacggtgatgaatccaataaccaaatatccttggacttttattgtagctttttgtgtgcatttgttccgatacttaacaattaacattatatgacaccatagtttctctaatcacatgtaactccatctagccatctaggtttgtcctaagtcaaacatatcttttaattttgattagaaatatctataaaaaataattgtcttaaataagcagagttatttggttttagtaatgaatttagcaatgccaatgctatttttatcgttctatataaattttagatattcatggtcaaacttaaaaatgtttgacttggacaaatatagatagacctacacatgcattgtgattttaggaagtcctacaattctcctccccaaagtctgctatcaacttctaacagttagtccagttttcatgaacaaatttagttttaatcattctatgttgtgccaaccgccagcaactaataatcagagctgggtcatatcatcatatcatagtagattgtatagctttcttccctgtgcatgcttactggttactagatgaaaaaggtcgtgttacgttatggcgcactcctctcctttgaataggacatgctttcacactctcaattcggcatatccttctagagactagctgtgagttgggtcctaaatgtttcttccatgttcaattcgaatggcattgttgtgttaattagccgtcctgttttgtatttttttcctacaagttatagtggttacattaatgactaaatcaagatcttgacccactttattgatgacacccttttttcttcttattgcttctcctatcgtctctgagtttgtcattccattcaaacacgaaatttgtgtcagtatagatgccatggaaattttggtttagcttgagtattttgtagatacttcattcttgagtattcttgagtttgccttgttataaattgcagcacactccaatggtcttctaaatgaatagcacactatagtcaagagtatgacttaccaaattcattattggttccaagcatcttgaaagagaagtccatcgtctctcttactgtcatctcagcatggctaacagaagcacgcagtaggagtttctccaccttcctttcatcatgctacttcttgctgagggtggcgtgaaaaagtcagcaacaagttcctctatggtggcgacagagaagacaagggaggctctggcgacattgtggcgacgacgagaagcgagcaaggatataaatcgatctgtttctttggaaattagctgtagtagaatatttacgtgatacaaatctctattctctatatctctatatctattacgtttctcatgtctctatttttattataatggtttggaaaaatgtcgctcatcttctgctctaatctttcgaaattaggtgtagtggaatattattgccagatattgctacactacaatagtgaaattattgtccaaaattgaagattgccgtatgccttaggtcactataaaatcgagttattttataataatagttttttgttttacataagccccactcttttatctaaaagcccataaattattgtccaaaatggaagattaagagtttgtttattacttctaaattatcctttctatatctaccatatgtaccat

SEQ ID NO: 39371 - DNA, 1803 bp, Zea Mays
gacggcattacctaaaccataccatagaccatcaatcacttctaacacttttcccgtctcccccttcctcgccgcctccactacagggctttgctcctcccaactctcgaaaccctacccacgcgatgagagatcgatcggtcgagcgcgaattccccagccgcgagcggggggatcggccgccgcccggggtgctgggtcccccgcgccgcgggccggcttacaagacgaagttgtgcgcgctgtggcagcgcggcggctgttcccgcgacacatgcagcttcgcgcacggacacgccgagctccgccggttccccggatcgcgcacctcgttcccaccccgcgccgggagaagagattatagaggtggtgactttagagataggtttgataggaggcgctcacctcataggaggcattcccctgatggagattccaggggccatcgctcccttcgtgaccgacgaccaaattcccaagaaagggaatctagctattcacggtctcccagtaggaagagtgaaatgaggcatgataagaagcctgatgatggagaaactaactcatctaggagtctcagtgtctctgacaataatgatgatagaaaaaaggagacactgttaagtggtgatgataaagaggatcacgaaatacagctcaaacaaataagacaggacatggaacttttgcgtgatgataaatctctcttggagataattttggatgagaagaatgctgaagtgcgcaagatttctagcagattaaatgatcttgatctgcagttaaggaaggagaaagaggaatgccacaggatgacctcaaaaattaaaaagttccttaaagcccatgctcgctttttgaaagcacaggaagaattaaaaagatattctgaagcgtggtgctaatgaagaagtttctagtatcaatgttgatgaagatccaaatgttccttatgaaaggagcccaaatgctgctatagctaagaagagatcaataccatactcaacaagtgaagaagcgaaagccgtgaagaaaagaagagagcgggactctgacacaactaggccagataaatataggtttgaaggtactattgcaggatttgaaaaactaagcaagggaaccgagccaacaaaatctttatatttgaagaagaaactgtgggaagatgaaaaggataagataggcaactttgtctcctcagccaacaccgacaaggtcaaagaatctccggtcaaacatgttttgccctccactggtatggctgctcatgctttggacgatctgtttgaagctgttgaactggaggatagacgtgacacatcaatagaaaatgatgctgatgacgaaactaggtcgcctgttatgcccccacaaccaccaccggtggttaatacttacgagcagtacgaggctgatgacgaggaagtcgacgtggaatgattagaatgccgagatggtactggaatgagctatatagctctcgcgcctgtgtaaagcattatgtaatatgtatttgatgctggagtttaccttgcataaaaagaatcgtcattaatgatccttggtggatgcggtttaagcactcaacttttttgttaatttgatgaaggcaacatgccctgttacctgtacctaatataccacgtggtggctagctagccagccttgtcagtgccctggtacttttgggtggtcttgctgtgctgttcgcggcacttgaaaactgatgttttgtaggactgatgttttgtaggagtattatttgaatggtagccgttgatcttcggctgttgatgcgct

SEQ ID NO: 39372 - DNA, 2659 bp, Zea Mays
cctcaccccaccccaccaggccatcacagtccacgagcacaagcatgctagccgccaggacccctgtctcgctctcgctccaccaccgcatcgtcgccggcggccaccgggggcgatgcgtcgggggcagccaaaggaggcgcggtggcgcgccgtgccgccagttcacccaggcgctccagagcctctggaggcacagtcccccgatccctcctcctgcgcctcccgctgccggcgctgccaccagcggcgaggccgaaccctcgcggcagccgccggtactcgagaacgctgccttcgaggagtactataaggttcagcaaattgtccgcgaggaggagtgggatgccttcatgagtgttctacggaaaccattaccagcgacttttagaatcaatgcctgttgccagttttataaagatatctgttcaaagttagaaaatgaatttaggcgatctttggagagtgagtcttgcatggcacctgaatttctcccggaaggaattgaggaaaaatcaggcactcgaaagttttcatgagtttctgaagcatgagagtgaggttccaccactgtttctgaatgtacaacctgatcaccatattcttgatatgtgtgctgctccaggctctaaaacttttcagttacttgagatgattcaccaatcaaaagaactaggtctacttccaggagcattggaccaacttggcccagtaaacggctcagtctggcctgtaggccgtggcgccggcatggattgttcaggttcatataaagatccctgcaaactacaaaagctagaattcgaccgcatactttgtgatgttccgtgtagtggtgatgggactattcgcaagggtcatgacatgtggagaaagtggaactcaggcatgggtaaccaacttcatcttctgcaagtaaatattgcaatgcgtggtattgcgttacttaaagtgggtggaaggatggtctattcgacttgttcattgaatcctgttgaaaatgaagctgtcatagctgagctccttcgaagaagtggaaactctgttgaactccttgatgtttctagcgagctacctgaattggttcggcgtcctgggcttagcacttggaaggtacaagatcgagaatcttggtttcagagtcacgatgaagttccacacaataggaagaatgtagtatttccaagcatgtttcctgcaagtaatagcaccgaggaaagccataccgtgtgtggtgatgttgaagtgaacataaataatatgaacagcttctcaagaaatatcaacattgaagaaacaagcaaacttaatcaagatatggatggagtttctgttagtcccactaaaattttggaatgcacttctaacattgtgagttcaaagtttccactgcatcggtgcatgaggattgttcctcatgaccagaacagcggggcatttttcatcgcagttcttcacaaattatcgcccttgaatggcagtcagataaaggatactaaaattcagcacagacttgggacagacagaactatacagttccagaaagagcccaagccagaaacacgaccctatgaaactactttgacacgccgtcagcacaatgtttctgaagttgatgatactgaagtgcttggtaggggacagaaattaggcacagacagccaaacttcaaaggataagaactcaagcgaggtcgaaatagttagcattctagcagagtcaggagatagaatggagttgcaaaagcaaagcaggtgggaaggggttgatcctgtcttagttttgaacgatgaagcggtgataaagagtatacaatccttctttggcatcaaggaatcattcccactcgaaggtcatctggtgactagaagtcctgataatgcaaggagaatatattacgtatcaaaatcagttaaagagattttggagctgaattcaaaagttggtgggcagctgaagatagcttcacttggtgttaaaatgtttgaaaggcatagatcaaaggatccctgtccatgtgcatataggttgtcttatgatggattatcgctggtgcttccatccatcagcaagaggatactatatgcatccgcactcgagttccaccgccttgtacagtaccgaagcataagctttgctcattttaccgacaccagattcggggagcaggctgcgtccttgacgcctggttgctgtgttgtagtgttactcgaagggaataggcgtgtagattccatttgtaaggatccctccacaattgccgttgtttgctggagagggaaggggaccattaacgttatggtttctccctcggataggaaggatctccttgaaaggatggcgtatcgatttggatgatggatgccctaacgacgactatggagcttgccttggcatcttgacaaggacctaccttcctatttggttggctgctaattaaaacttggtataccacattaattaattctaggcatgtgtgttttgtttcacattataaagtgggatttgtcaaactttgttacgaatagcaggttcttagtaatttacacacgtcggttggttgggcctggacgaaggaaggatttgtacagatcagatgagagagttttgagtttgcaactatgaactatgtactactatctatctctttcgaccaaga

SEQ ID NO: 39373 - DNA, 1532 bp, Zea Mays
tttgcttctcccgtacacaacctgctccattcttggcgagcgttcaggcgaaagaggaaaaagagaggagtgcaccgcgagtgtacagctcgaagatccacttccaagtgcttccttttaggggaaacatgattgagctatcactatcaggaaaaagagctttggaatttgacggagatcaagttttagatgtgggtcagcaacatcatgttattgcaatatttgtaggaaccttagtcaaactttacaaaggtgaatatacattcttgagtggaacatcagcatgccggtggtacatcaacgaaaatgacattgctgaaatcaaggctttccagaaaagtttgccaagtgaacctgtacctatcaaaaagacctatctccaaaatgatgatgcaactcacaaatttgaggagaaaagtctggaacagctcaagcatgtagaccctttccttgacatgggacaaagatatcagtgcacagctactataattggtatcacagaaaaccaaacatggtgttacaaagcatgcaagatctgtaactcagcaatcattcaaaaggaaaatggttataaatgcacaaaggaaggatgtccatctacacaatttgaatggaagtacaagataccattcattgcaagtgaccacacctataatctagagtttatgttctttgaaaaaaagggaatggagcttataggaaagagtgcatcgactcttcgaaaacaatatgaaccaaaggagataccaccggatataacatcttggataggttataaattcacttttgttgttagagtcctatcaaagaaaagtgtcaagactattgatccatcctttgaagtgcttatgataaaagaaaaataccagaaggaacctattatatcatttatcagctcaagtggagttgtaccagcagaatcatcttcctctacaatggcagaatacaaggaattaccattgctagtgccaattacctccaaagacatagaaaaaaaggagcgatccacttcacaaccagaacacaccgaagaaactcaagatatggacattgaaccatctggcatttgggaagaatctcagatttcaaacaaaagaagctttggagacccaaactatgacaaacaagaaacaactgatgacaaagatgaccttccacaattcaagaaaatcaggagtacccactctcaaggaaaaagcaaaaaatgatgcatgatagactaagaagacaaagtaaagtagtagactttaaaagatcttgactaaagtaatatatctatattttctgtttcgataaacaacgatagcgctagtgctacatcttttaatgtatataaccatgtagtatcaatagcgctacatcttaagcgtgtagcaccagcagcgctacatattttgatgtatataagcatgtagcatcaatagcgctacatcttttgttaaatataagcacatcttttgatatatataagcatgtagcatcaatagtgctagctatggtgctaatcttacattatatggcgtatatgttag

SEQ ID NO: 39374 - DNA, 298 bp, Zea Mays
catttagagccttcagttgattcttctattagccttgctcttagctaatctcaaggctggtcaaacctatgaaatggtgctaagcgcaattcttggcgccattcgaacacatatcgattgcaccaacatctcatattgttctgctagcgtttcgagagtaatttccagaagaaaaaaaagatagttgtgtgttccaaggtttggatccttccgttcagttcaacaagagaggcatttcggcgcagcaatgacttcaacaaaagatgcctgcacgcgatccctttcatagaaagccaag

SEQ ID NO: 39375 - DNA, 443 bp, Zea Mays
tgaagcttcacctagggtgacgaatagcatacatatatacatacacacacacatacatacatacatacatacatacatatatgggtataattatatacgtgcgggtagcgggtatgagtaacatattaaacccgtcgcatgtaacaggtatgggtgcgggtttaatattaaactcgcgagtacgggtttcaaacatgttgtcatccctacgcatgtgtagatacaacaatcgacacattactagccctcttcatctcaacaagctgagggcacgggtgtcccacgcttccacaagctagactttccaacttttgatggcaaggaagatccgctcggatggttgactcgctgcgagcagttcttttggggctagagaacactcgaggtcaacaaggtgtggttagctccgtaccaccttagagcttgttcgattagacctggat

SEQ ID NO: 39376 - DNA, 265 bp, Zea Mays
gacatcctctattaagccctaaattaaggactattaggtgccttatttgaaaaccactaacccacaaccgggggtattgcatacatgtgtattgttatttttgaggccattcagtactgaatggatcgacgctcaaggtaaggtgagatgtgagagcatgaccgaacaaacgttggtctagggaagtgcttaattgtagcgcttgattatatacatgttccacatatgtatatatgaaggctgcgatgtggagtatttacttttc

SEQ ID NO: 39377 - DNA, 3348 bp, Zea Mays
caaaatggcccgggccagcctgcaagaaaaaacttagggttgcaagaaaaaccccagctcctttccttgtattgtcggaaatcactgtctcccctccctaccttcgcaagtttgcgcctaaaccctagctcgcttcccaatggcgccgaagaagcgcaaggccgatcccgccgagtccgccgacgctgcggaggcagccgccggcaaccaccgccaggagccagcgccctcggagcccaagccccgcgccaccatctacttccccatcaccgacgacccgccggagcccgccgccgaggaggacgaggaggatggcgctggcgaagacgaggacgacgtggaggacatcggcaagctgctcgagccactgtcgcgggagcagctcgtcgcgctgctccgcacggcggcggagacgagccccgctacgatggcggccgtgcgccgcgccgtggagtcggaccccgccagcaggaagctctttgtccacggcctcggctggggcgccagcgccgaggacctccgctccgccttctcatgcttcggcgagctcgaggactgccgcgtcatctctgacaagcagtccggcagatccaagggctatgggttcgtcctcttccgctcccgccgctctgcactccgcgccctcagccgcccccagctccaaatcgggggccgtcttgctttctgccacctcgccgcctcaggccccgcgcccccagcttctcagtctcagaaccctagctccaacccaaacaccaatgccaactctaactccaataccaccaccaatgcttctggctcatcatcgtcgcaacctgacaatatgccgcgcaagatatttgttggtaatgtgcatgctgatgtggacgtggaccgcctatataactattttgcacaattcggtgagattgaagagggtccgtttggctttgacaagaacactggcaaaccaaaaggattcgcattgtttgtttacaagtctgtggagagtgctcgccgtgctttggaggagccaatgaagaattttgatggcaagacgctcaatgtgcagaaagccatagatgggaggaccaagggctcatctggaacgaatacaaatgctaactccaatcccactactgcatctgtggctgctgctgcagctgctgcgcagatgactgctcctgccactgccgccattagcccatatgatccatcggcatatggtgccactgcggttcctgacatgagttttgcacaacaagccgctatgctgggatttggtgcacagcaacaggcattcgctcaacccaatgcaatgcttgccatgatagcggcaatgcagaacccagctgcactagggatgacaccagccatgtttgctgctatgaacccagccttcgccgctgctgctttaggtgcaggcgggcagcaggcacagacagctggtcttacgggctttggagctcagggttttgggacgcaggcatttggagctggaggtgcagttttcccaaatgcagcaggtgttcaagcagcaacagctgcatatcaaggaggtggggctcctcctggttttcaagggccacctggatttcaggttggccaagcaactacccagacaagcactgcagtggcagcagctggttatcaggctggggcagctgggcagggccaggtgcctggtgctcagattggaggcactggttttcagggtggatattgacagaactagggccctcctatctgtggtgtgccgccggactcgaagatgagcaataagcttgaacctgttgatgctggcgatgaagatgatggtgactctgggcagggtgaggagggcatctcagcgggcggagggatatgacaacctaaagggcaacgagaacaggagaagcgaagaggtgatgccaaggaaaacggtgaagaggattgaggaagaagtggaagaccaggaagatagtggcggcagcggcgacgacaatggggatggccatgacgaggaggaggaggcagcaattctggataaggagctaaagaaagagaaactgaagaatgctgctgcattaaaggaactgcaagaaaaagctgaacaaaaattgcaggatgagctgcagaggaaggatgaagaaacaagccaacaaattgagaaggcccaagagatagctaaagctgaacttgctgcagctgttgcaaaagagaaagcatcccagattgaacagattgctgaagcaaaccttaatgatgttatgtagcagtagcacaatgactggatgcattgatactgatatagattgatgcgctgtgtatggcattctatgcacgatctgaagaaactaggcagagtcattcagttcataagcttgctctgggcactcttgctttggaacacgctttatccagtggatcaccaatccgatcagaagtggagctattgcgtaaatctgttgaaggcatcgacaaagattcactgttagaactggctctttcatcactcccagaagatgttttagattatggatcagataccatgatggggttgaagcaaaagtttaactccttgaaggaaactatcagacacttcagccttctaccagcaggcggtggtggaatcctggcacatactgttgctcgagttgcttcttcaatcaagattaaaggcgataactctggagatggcattgagtctcttatcaacaaagtagaaaggttgattgtggatggagacttgattacagcggccgatgccttggagcaagggttacatggaactgaagcagaggagatagctaccgagtgggtgaagcaagccaggaaacgagcgatcgccgaacagacccttgctctccttcaggcgtgtgcttcttcgaccacgttctcatgattttggccagacttttttttttcttccttttgtttgcttggatttgccggtttcagtactctgtgaaaaagcttgtttttcccagaccatgttgaaaatgcgtggatggtgaacgagaaaaatcagatacaatactatagcagccagccagccactgggtctcaaagtgggggccctgcctaagtttttcatcgtgtaaacaaagctaataagttttgccctgtagctacttgctgttcgtgacattttagtgtccagttaaagcaatgtttttttaatgcaattgctgaaggattccttgcagatgtggtcatgtagcagttctacaaagggtcagtggacactgaataagtctagttacagcttgttttgttccacccagctcaactaaagtttagtttctgtcactgaatgttttaacgataattacgaatattgaatatagtctaattataaaattaattatacaaatgaaaactaaaaga

SEQ ID NO: 39378 - DNA, 818 bp, Zea Mays
cacgttggtgttgctcatcgacgaagagaagaagcttgacgactgccagttcgacctctggaagcagtcctacgtggccgcatgtgccgatgtggacgacaagctccggtgcagccgccgcttggacgtggtctagagtgactgcaccacgctatccatcgtcaaataggaggacctcatggtcgtcgccaacgtctgtgactcccgggttgttttgggcaccacatccgacgatggcgccatcacgccgtccatgtcatcgtccacctgaagtccaaccttccacgtaagtcactaccgaccgaccatgaattcttgtgcgctgagatgacggccattgctgtcattgtgtgagtgtcctcgaacttgatgtatacagaggagcagcgcatccgatggtgcaatgtccaggtgtactacctcgctgatgagtccggggtgcgcttcgtctggcagccaagccaagagttgtcgggactcgccatgttgtgtgtgtttgatgactactatatcaaggactgtggcgtcatctcggcgccggaggagacatagaggatgaatggcagcaattagcagttcgtcatcctcgccaccgtcggggtagcttttgtgccagcctgcctttaattctcttcgcaaacacacacacttgccttttgtttaagcaagcgcgtatggtggtgcgtgcctgatgactgatgatgtacgagggaaagtctttcgacaggtgtgggacgtgctctccaatgacaagaccatgcaaatcgtggcatatattgaagtctgcatggtactgatgattgcaatgtagtggtgaa

SEQ ID NO: 39379 - DNA, 4296 bp, Zea Mays
ctggtttttagtcaaaacatagcgtgtgtttgtttcgtcacgacagcaactgatgagtaggatatcccgaacgcagttaaaataaaaaaataaaataaaaaatcacgaaatttccccatccgctgccccgtccgcggcgccggtctccgatcgatcgaagcttcggcttccaacacaggccggtgcgaaaacgcccatcaaacccctcccaaaacccagcgtaccgttgccgcgcgccgattcgaacccgccggctgggggaggagccgccgacgccgtctcggcccgcgggggcgaagccctagagatgtcggcgtccgtcgacgccgcgtcggcagtagcggtgccggcggtgccccccgcggtggaggaggccggcggcgcggtggagcaggccaggacgctcatcgcagcgctcaacctgctctctcgcaacctaccgctgccccctgatgtcatgcgcgccgtctcgtccatctaccacgacgggggtgccggcgacagggcgggggaggaggagaagggaggggacgaggagatgccggccgcggatggggcggccgaggggaactgctcggtgtacgccgctggcggcgcgaccgaggggaccaccttgattgaagagcttgaagatgcaatattgaagaatcaaagaacgcccataacctactcagaattggcagcaatacgagaagggcggttcaatgcatccattcagcatcgactagctgaacttgaaggattaccttctactaggggtgaagacttgcaaatgaaatgtttgcttgaattgtatgggctaaagttgttagacttacagaagaaagttcggtcagatatcagtgctgagtattggctacaaaagaaatgtgcatatcctgagaggcaactcttcgattgggggatgatgcggatacggcatcctttttccatgtatggaataggagatagcttttcagtggatgttgatgatgttcaccgcagaaagagattcacagagaggatgtcaagacttgaggaggaaggaaaaaatcaggcagatatcaggaagaggaagttctttgcagaaattctcaatgcttctagagaacaccaggtgcaattagggactactttcaaacaaagaaagcagcggaatgatggcgttatggcatggcatgttcgggcacgccaacgtattacacggcaagaaaaaagcagaattaatcttctgaaaactggtgatcaagaagcatatatgaggatggttgaagagagcaagaatgaacgcttgaaaatgctccttgataaaacaaatgagcttcttgaaggaattggaaaagctgtacagcgacaaaaagatgctgaacatgttagtaagccagaaggagggagtgaagtgccaaaagggtcagaatctgaggattgttctcaaatttcgggcatcaagagtgaatcagctgaggagtctccttcagatgacgatggagacctccctggccctgcagatgaaagtaaattcaatgcaggacgtagacttgattttactgttcattctattgaagaaaaggtaacagaacaaccatctgctctcgaaggtggtgaattgagaccatatcagctagaaggtctccaatggatgctttctctatttaacaacaatttgaatggcattctggctgatgaaatgggtttggggaagacaattcaaaccatagctttgatcgcttatctgttggaaaagaaggaggttgcaggaccacacttaataattgctccaaaagcagtattaccaaattggtctaatgaattcaaaacttgggctcccagcattgggacaattctttatgatggccgtccagaggaaaggaggctgttaagggataagaattttgacggagagcaatttaatgttttgctcacacattatgacctgatactgaaagataagaagttcctaaagaaggttcactggcattatttgattgttgatgaaggacatcgtctgaaaaatcatgaatgcgctcttgctcgaacactggtttctggatacatgatccgccggagactacttttaacaggcactcctatccaaaacagcctgcaagagctctggtctttgcttaacttcatcctgcccaatatttttaattcatcccagaattttgaggaatggtttaatgcaccatttgcatgtgatgtcagtcttaatgatgaggaacaactactaatcatacatcgtttgcatcaagttttgcgtccattcttgctgaggaggaagaaagatgaagtagagaaatatctccctgtgaaaacacaagtaattctcaagtgtgacatgtctgcttggcaaaaagcatactacgaacaagtcacaagcagggaaaaggttgcgctaggatatgggatcagaaagaaggctctgcaaaatctgtcaatgcaacttaggaagtgttgcaatcatccctacctattcgtagagcattataacatgtaccagcgggaggaaatagttagagcatccggaaagtttgaattgcttgatcgtctacttccgaaattgcagagagctggtcacagggttttacttttctctcagatgacaaaattgcttgacgttttagaaatatatttgcagatgtacaatttcaagtacatgaggcttgatggatccacaaagactgaagaacgtgggaggttactggcagattttaataagaagaattcagaatatttcatgtttcttctcagcacacgagccggaggtcttggattgaacttgcagactgcagacaccgtcattatctttgatagtgactggaaccctcagatggaccaacaagctgaggaccgtgcccatcgtatagggcaaaagaacgaagtacgtgtgtttgttcttgttagcgttggttcaattgaagaagagatattggatcgtgcgaaacagaagatgggtattgatgcaaaagtaatccaggctgggttgtttaacacgacctccacagcacaggacaggcgagcattgctgcaggagatactcaggagaggaacaagctcactgggaacggatatccccagtgaacgtgagataaaccgcttggctgctcgaaacgatgaagaattccggttgtttgagaagatggatgaagaaaggaggctaaaggagaactacaaatctagacttatggatggaaatgaggtcccagattgggtgtttgccaatgataatgaaaccttacgcaagaaaaccgtggcagatgaattccggaatataattgttggttcaaagagacgtagaaaggaggttgtctattcggactcttttggtgatcagtggatgaaatccgacgagggatttgaagagattgcaaagatgactccaagggtgaagcgaactgcttattcgcctgacattcaagttgagtacaatgaaaggaggaaaaggcccaagtctgtggaaaacagcgcagatggcgcaagcaacccaacacggacacccgacaaaggaagggctggagtttcatcatacagcaaggatgagaccgaagatgatggtgaagacgaagtcatcaccagtggcttacagaagggtaacagtttcacatggaagacccttggaagaaaaaggtcaagccacttaagttcgtcgtcggactcaaaagggcgaccatcattctaatgtcagttgccttgatgcttttgctcgatgaagcccttctaataatggagtacccctggaggctagcagcgctaccatttcgaaagtaccttgaacctataaacttcaggatggaggctgtagctagcaggactaccattttgaaagtacattgaagctataaacttcagaattagtagtatactctggacttgttgccatgaattcgtaactcaaacgaacttaaattgcgttacagttcaagcctattttgggggtaaaggttattggtaaatagctggtgatggcttgccctgaatttgggctgtcttgtctgcacattccgttgagcagtcttcggctaatgcctgtccagattttactggtttatatggcaagcaaaactgtactaggtgctatctgatgtgcttccaccgaggcaagtcctcaaacaagtgtcatcttttattgtgtatagctagtagagttggctctgtgaatctatatgcacttacatagcctgatagacacacgataactacgtaaaaatagctttgtgcaaagataatttctttttgagttttcccctttaattaatcgcgttgaaactacgcgttcaaatttgtgcttccaagtgccaaacggaattcgctgcgact

SEQ ID NO: 39380 - DNA, 3518 bp, Zea Mays
cctgcagaaatattcattatcttatattcaaataaataaaataaaaaccgactgaatttgcttatttccggctcttgttgaaaccgccacccgattcctccgctcgccaaatcctcgccgtgccctcgtagcaattccttgcgtcggcgcatcatcgcggcctcctctccctctctctctctatctctctcaatctctccgttggcaaatcgttgaatcgacgtgcttggccccggccgctctgagcccgccgccagcctcctcgtctgaagaagaacgacagccgtcgggctccggtggtcccgccgaagaacggcaggtagccagccgcgctcatcacgccggcgactcgattggcattgtattggcctttccgtttgttgtcagatcgaaaagaagaggaaagaatcgggaagcccgcccccctggtggatatgcgaggccatgtttttcatgtcacacccccgaccgattcgcctcgatttcgttcttctgttcttctgcgccgcaatggctccttcgctcgttcatatctgttattctgttgtgaatactcggtttgagtcaatgatgcgatttctttcattcaaaatcttctgggtgctcctgtgttattctgatttattcgctctgtttcgacgccagttaatctatcgtgtcggctgttgacaatatctttggtttcttgtccgcgacagagttctcgaagcaaaacgacctgatgagattcctcaaggggagcaaggtggaggtattgcaggaggcagatgtgccgtttggttcttggaggcctggtgagatcgtctccggcaatggacacgcctactttgtgagatatgatgaaagtcccgttgactccagcgtggctgttgaaagggtgccaagaaggttgatgaggcctcgccctcctgcggatgatcctgtacgctggagtttgggtagtatcattgaggcctttgacagctactcgtggaaggttgccgaggtggtgagagtgcttggaaagaatcaatatctagtcaggctccttgggtcctcgctggagttgagtgcacatgcatcggttcttcgaatgaggaagctttggctagatgacatatggattgtgactcagaagtattctgcaagatgcttggatggtggtgcattccgaggtcaatcaaaagataaaaatttagaccataacttcagaatggacagtcgtcaacttgagaaccagaatgcctttgagggtgatacatctagaggcatcaagagaaaatcgtctgctatatcaacacatcctcaatgcagtgaaatcactaagagattgcggacaccaaatagagatggaaggtactcaaagctggttgatagaagtttttcccctttggctgaaaaggtagatgatgttgattccccatgcattattctacgcgggaaatgcatccatgctggtcataaatggcatactggaacaactgaagaatttagtgatacagagagtatatcatcttctgttggcagttctagtcctaacagtacccctcatagatcacaacattataatttggtctaccaaagtggagatagctgtagtagaactgatgatgatgaagcttctacatctgaaagagaaacatcagaacatgataacaatgggtcgagggaagaaacccatgtgctggaattacatgcttatcgcgcaacaatgttagccttgcatgcttgtgggtcaattagctgggagcaagaggctttgttgactaacctaagggccaaggttggaggcttgtaaagcatccttccataggttcttgtaaatggaggagtctgccacatgttttgcagtgcgataaatgtggcaacatttccaatgaacttccattggtcaagctgggtcaagactggttccagattaatactggttgctggataaaatggtcaaattagattggtttatcatccaaagacaaaaaggtgatctgcttgttgtgtgatttttcacagaacaagcatatttcttctatgatggcatgcacccgtttgactgtccagaagagcacttgagggaacatctgtatcagcaccggagtgtttcctctttccagcaccggagtgtttccaccatcgtcattagaggtaggaccctcccacaacctagaagcaagaccctcgcacgcccgatctgaggatgacttcgagggatatgacgattgacttctcgagtcagacgatgaacttacatttgatgcgcaacctgaaggcccggctaactggaactgggtggctgagctacaataggaggttcaaactgagctgcctgctgaactaagtatgattcaagacgaaaaccactctaagtatgacctctcggatgaggacgtctccgtggaagggacggacgcgtccgatgatgatattttggcagataatcaggacccggctgatgaggatattgaagatatcgagccgaaagaagatgagaaagattcagaggagctcattgttatcgatgatgagccatgggcgccagatccatttattcctgttgttcctaatccgaagactcgagcaccggagattcctgtaccagaagcccctgcgccagtagctcttgcttcagagggtcccccacaaggaaatacaatgcctgagctcgtcccgcaaccggattgggtaaggacaaaatctcacaatcatcaactcaggtgtggctgaagacaatattcgtatggagactactcaaatataccgctgccctgaacactgactgagcatgacgctgccttgattgaactcgaggaattaaagaagcagaatgcccaactgtgactcatctggagaatgaaggacaacctcaggctgccgtgaaacttagattttcctgacttgcagccgacttctatgtagacacaaaattgttgggattacatagtttggccttgcatcaaggaaaagttgcaggttatctgtacagtaatttgccagtcgtcttatgcatatgatgcatacctttttactgttctagtgttttgtaatccagatattgtagccggtgttcttggtgaaatatgcgccaggagagactgagacttattttgccaccttactttgtgcaaagccagctgcccttcaactttgctggacaggcaatcacatattttcagaagtgaagcggtaggccccggtagttctgatgagcaagcaagtgaaaagtttgtatgtggtgtatgacgatgtaccttggatctctttacttccaattgaacctgcacatgttcctggcttcgtgtcatcacaatgaccttgtattgtttcagtgttcacctacagttcatgtaccttaggttccttttctgtttttgccttacacgtaattggttgcagcagagcaccaaggatcggggatgtacaaatcaatatcagtttgcaactttgcatggaaggcatgcccttgcaaggcctcttggacagactccttcctcagtgctgaccgcatttgcagttgcagtgcgttagaggtggctgctgatgct

SEQ ID NO: 39381 - DNA, 240 bp, Zea Mays
caatgcttcaaataacaataaagagtaagtaatagtattacagactagatccatttacataatataaatcaaagtacacagaatcgaaacgtagccaacgtaaacaacccaccataggcagctgactgggggaggtcgctagcctaatcctcgaactcgtcgaagtattggaactcctggaaatccgcctcaacaccttcttctttaactgagcatagattgcaccagaggcaacctggt

SEQ ID NO: 39382 - DNA, 3875 bp, Zea Mays
tctcgttccgcctcctatcggcccagctccaaaccctagcccgccgccgtgctgactcccctagccaggcacgacgtcgaagagagcagcggcggaggcggcaacctgatgcccagccccccgtgggggccatggagctcgtcctcgtcaagcccgcggcaggagctctcgtcgaggtgggctccgggtccgttgccggcgcgggctcgatcccggcgatggtggcggcgcagcaggagattttgcacgaacaggtggaccagctccaacgcctcgtcgtcgctcagtgccgcctcaccggcgtcaaccccctcgcccaggagatggctgccggtgcattgtctatcaagataggtaagaggccaagggatctgttgaatccaaaagcagttaagtgcatgcagtcactttttgccttgaaggacattcttggcaaaaaagaaacccgagaaattagtttactctgtggggtcactgttacacaggttagggaattctttacagttcaacgatcgcgagtgagaaaatttgttcgtctgtctcaagaaaaagcgctgagaatagagacacccaaagagcaggacaattcatactccataaacactgagcagataccgccggacatagaagcacaagctgaagttattgaacctttgagaactttagaaccggtggtcctacagagctctttgcaaccaacgtgtgtccctcagatctcttcgcaatcaatggagctccaacaaagcgatttgcagcacatggaagtcttccaaaactctttgcaacaagcagaggcacaacataacattgcagctcctataatgccatctggagcaatggttatgcaaccaactgacgctaagattagttcagactctgttcaaaaggaagttaagcaagagggagttcattctggtgttgcgtcagaagataagaagttcttggaaagtatctttgctctaatgcagaaggaggaaacattctctgggcaggttaaattaatggaatggattctgcaaataaataatgttacagttcttagtaggttcgtaacaatgggtggtttgaccattatgtcaacatggttgagtcaagcagcaattgaagagcagacatcagttatccatgttattttcaaggctttaccagtccacatgtcagttgttctgcaaacaattaataagttgcgcttttatagaacacaagacatatcgagcagggctaggaacctcctctccagattgagcaaagtgcttgtaaggattcaggcattgaagaaacctcagaaggacttaatatgtaaacaaaggataagtgaaattctccgtgacgagtcttggaaatctgaagttgatattaccgaggaggtacttgctttgactgatggtgctaatgagagcagaaagcctgaacccagaaaaacaccaatgcttctcactgcttctgctattgagacaaataaaaggagttctgtgcagacaaaatccaaacaaaaaagaaaagttctacttgtggagcaaccaaacaagaaagctacgtggaagaatgctaattctgtcaggaacacatctacaaacaatagccggccattatctgcagatgatattcaaaaagcaaagatgcgtgccatgttcatgcaggagaagcgtggcaagattgacataaataaattgagtgataaaccacaagcaatggacacgaaaaaagcagctggattagtaaattcaaatccatcagctatgcccataagtccccatacgtcagctgcacaacctgttgacccaagcccatctacttcaaaacaaagcacagatcctcagcctgataatacagaaatttcaggtggtttgaagttaaacataggttccaaaaacaatgtcatagagaagttggattgcaagagagttctttggcaaataccaccagctgtatggatagacccctcgtggagtgtaggagctggtgacaacagcaaggagcttgaggttcaaacacagaggaaccggcgtgaaaaggaaaccttttatacaagccagaaggacgtcccaatgaatccaaaggacccatgggatctggaaatggacttcgatgacagcctgaccccagaggttccaattgaccaggtgccagatgtggacgccatggaaacggaaagcgttggcgcggcgcctagcgctgtggctcctgttaaggacaagcagattgaatctgcctcatcgacatcaggcgcagttgctgatgatgaggaagctaataccgattacgaattgcttacggtgctactcaggaacccggagcttgtctttgcattaacctctaacaagggggagaacatgcctaacgagcagaccattgcgcttctggatacactgaagcagaccggccttagcctatcagagcttgttaaccgtctggggaacggcgctgggctcccaaaagagccagagccggagccagaacctattcccgcttcgcttccgtcaccaactccgccagaccgtacatcaagggctgtctggataccagaacacgcaatgcaggtgagggctgctccaaccttgcatctgccaagccgggggagtacacctcctgttgcaaatgccgtgcaacaaggcttctcaaacgtttccaacatgtttcccctgtgaataaccttctgaacagagcttcagtgcatcagcatggacagcagcaatacgctttgttgtctgaccctgttgccacgcccttgcatcaacaagcagcggggagcaaaccagctgtagcagcacatccgtcgttgcctgagcctaatgcatcatctcacacagcattcccttggcaatctaatgctgctgacatgacccacgctggacggaatgcgacggctgatccatgggccgccgcccgcgcagctaactcgtatagtacagcatcagcaagcacagtgccgtctgctaaccagaatgcttacggcgatcaaggcaagcagggtgcgtacagctcttatggatcttcggcagcctcgtcccgtcctgttgtaccagggcacgggcatgacagaaatggctacagccggtctgccctggtggagtacccatgggacgggcaccaccagcggcactcgaggtcaccagatcctggcgtggtccgggactacgacaccgactatggcggtgcgcagggctacagtcagcagcccctgacgcagtggagtgcagggaaagtgcagcagcagggctacaatcctgagccgtcaaggcagtggagttcttcccaggcgcaccagggcggctacgcacccgccgagccgtcgaggcagtggagttcttcccaggcgcaccagagctacgctcccgagctaccgaggcagtggagctccgaacgccgtggctacgatgatgcggagccctcgaggacatggagctccggccagcagaacccggaggcgccgaggcagtggagccgcgggaagcaggatccttactacagcccgagccatagccgaagatcgtacgatcagcaccggaggagatagcaaaagcttgctgtattactgctaccacattagctagatcctggatggaggcggtcggttcttgggagggtttgtttcatttgatttgatgtgaggccgggtattcgttgcatttgggctttgtgattgccaccacaagggccattgagaaaagctataggttattatgtatcgatgtagtttttgtctcgaaattaaaaaaaaaatgtatctatctaggtagctggagaggggaaagaagaagaaaaaatgaatgaatgaatgatataactcagggagggtcaagaggccccccggctcgaattgattgcagtcttgaatgctgagtcgaacggttggccaaatttgtcgtctgtgc

SEQ ID NO: 39383 - DNA, 292 bp, Zea Mays
gctacgaggaaaacgattcttaaggggccatgtcgtcgtggactgtatccccttcctgctgatcatcaagtcaagcaggcgaatgctgttgacaagccagctgtgtctagatggcataatcgtccaggccatccctcgcttccttttgttaccagagtcatagacagtaataatctttcttgttcctctgtgtccaataaaaactcagtttgtgatgcttgccaacaagcaaaaagtcatcagttaccttacagtagatctgttagttctactagttttcccttggaacttg

SEQ ID NO: 39384 - DNA, 1801 bp, Zea Mays
cacccggccgtccacctaatcccgagtctcgagcgagtagcgacggccgcgcctgcgcctgcctgcgtcttccgtggcggcgcccctacctctcgaacccgtcaggcggtctggccgacctcgcttcctcggctagctacctactcgccagcgtctattgtccagcaggcgcccagctcccaagcggccgcagtgcccctgcttctgcccttgcacgttcggcccctgtgctgcactgcacagtgagccagacagtaaggtttgttttcttccattcagtttgttgtactgtggagatcaaactagctaagggcagagccaaatttggggattcttcaactgaagccttgtatagatatagtttgaaagatgatgaacgaacacagagaggaggatgccttgagaggtcaagcagtcaaaaaccagaaggcgatatgggacaagaccatggaaatgagattcttgctgcagaaggcgttttctacttccaacaagttaccccaggaatccatcagaacaaggttttgcaatcatgataagcagatagagcaagcatatgatgatcttttgaattcgacgaaacatactttgagcagcatgatggagctgcaggaggctttgcttgagagtaatcaggctacaaaggatgccaatgaaattccttctgcctcaaatggagacaatgacgagtggtcagaagtacagagattgcaggcaaggataacaacattcagaaataccgagatagataaatggcacaggaaaatacaggtgacaacgggtgctgctgcacttaaaggaaagctacatgcatttaatcagaacattagtgatcaagttgctggttacatgagagatccaagccggatgattaacaggatgtacttgaccaactctgctgttagagtatttggaaaggatgtgggagaacctggaacagctgaggaggggcacattatggaaggtgatcctgaacttattgatgattctgagttttatcaacaacttctcaaggagttccttgagtcatgtgatagaggggcatcaagttagttcatttttaattattgaacttattattatttatttacacacataggcgtacacctatcgatcccggattcgattgaaatacattagggccaggatgacctattatccgtctgtttccacccctagaatttatttatatatcaacatgcatactgaaacatggttcatctaacagaagatacatgtttcaagaatttcagttttcatttgtatattcataaactgttaccattctaagatttgtaaaaatgtatatgtttgtactttcaccttaagcgtccaccaaataccatttattgtatgcagagtcggcattttactctctaaaaaagcagcaggttaaaaagagaaagcttgtcgatcgtcgtgcttcgaagagcaggaagatacggtaccatgtccacgagaagatcactaatttcatggcaccggagcccatggttcttcctccaatggctccgaagttgtttgagaatttatttgggaatagcagctagaatccataaactgcagtaggtttacatttctttctgttgccttttctacttctataaactgtagtaggtatgatgtcactagacttagactgaattgtaagttttgatgtcctcatcagttttgtgcgtagacaagcagagcctagttcaccaatcaaattatgcttcgatttgggcctgatgagtgccatttaccggtggacccgcggtgagtcgtgatatacgtgattatcgaaaaatgagttttccta

SEQ ID NO: 39385 - DNA, 734 bp, Zea Mays
gctaaaaaggatgaaacacttataacctataaccaagcatattttatacaatataccaattccaactttagaactaaaagaccaaaagtgtttatacgcattacttatcaaacagaccctagattttggttgaaacagatatatcgatgttacttaatcctaaatattcgaaatagccatcaacattcattcaaatcatgaaatcggccaacatacatagaatatcatacctagaataaactaactaattatgcagggcatcgactatatcaattaatcaaattgacataaccacactagaaaattctatttactagctaataggaatactaagcttatttctttcgtcatcagctcgcccgaatattacctaaattaatctatctttcgcattactaactctatcgtacttcacatatatttaatcctatcgcgacgcgactgcttcaaaatcatgaaaataagcacatcatattcatcgaactacttcaataattaagctaacggaaattttgaatcggcttaccattctaaatctgacgcgctatccgcgaacacggcaaggattctggttcagctcttgtgtcgagcacttggggaataccacgctgctagcttcgtcttcatccgacggttgggatttcttggggatgcacgaacgacgacgaccttcgattgaagtctggagcgagctggcgaggacacgaatttattgagggctctggcgatgacga

SEQ ID NO: 39386 - DNA, 2180 bp, Zea Mays
tttggctgcaaagatctactaattggtttctcgcttcctaattggctcctaactcctcctgggaccccacgtgttcctgcactggagggcgctgagaaaacaccatcctcaaatatattaccgaagcgcactacaactagatcatcctcaactaccagagcatctaggctttcaatatctcaaacagagaatgggaattcgacgattcccactagacctgcaagaagtaactctgtcagccgatcatctatccagtcagctctcatgaatggcaacaacaggacatcagttctgaatacaagcatttcttcagtcacttcaagacctacaactcctagtaggcgaagcagcacagttggcacaccaaagcattcagctccagctgcacgtccagtgcctgcaagatcctctactcctgttaatactcgtccatctacaccagcaaaaactcgcccatctactcctacgagaactcgtccaacagcaccaaactcttcaactgattccgctgctgccaagactacattcacacataatgcaaggccatcaactccaaattcccggtcccgtattgttcccaattcatcttcaagtgcaactcatgtaataagccgtccgagcgcctccttgagtgcaacaagcagaccagggtcttcctcaggtaatgttcctgggataagccgtgccacctcattgtcctcaagttcggttccttcaatgagccgttccagctcacgatcatctacacctacacgacagcctgcaattcgctcatcagctccagctattggtcgttctccttctgttggacggacttctagcatcaacagctttacgacttcgtccaggtctgcagccagtactggcaggaactcagcaccttcatctgctccatcatctcgtccaagttctccaaacccacgaccccgagctccagtgcgacctcttgatatccccgattttccaaatgaaactccaccaaatctaaggacaaaattacctgaaagaccaccatctgctggcagatcacggccaggaatggctttaggcataagatcaaccccaaatactgaaccttcagctgcctcagctcctgtgaagaagatctctgtgcctgctgtgagccgaagtaaattttctgatgcatcatcaaagacctctactctcacaaatggacaccaaaatcgacaggctgacaggtccaatattgacagtcaagctaatagaccctcgagaccttccacgggtaccacagataatggatttgggaggtcgatatcaaggaggtcacttgacatggctatcaagcacatggacattcggcagaacttgggtggcattcgcggcacatccctgtttccccagagcatccgctcggctgctgccaaggtccgtccagctcgggcatcagacccagggcatggcatctcaaacggggaccagcgctacagtgacaatggaaagcagcgtgaacggacacctctcccggggactcaaacggggttctctcacgtaatggtggcagctcaaccgattcgccagacagggggagcatcgggaccaaggagaccctgagcgaactggacatctatggtagctcgcgctatgaagcgatgcttctcagggaggacgtgcggaacacaaactggctgcacgggcttgatgacaagcccgaccaaagccccctgttcgaccaccggttcgagccgctgccggagcccttcagcccgttatgacagctgctgcttgtaaattatggtcatcactatgattgactggtcgggttttctgtccttttgtgctgtcaccattacgtgagagaaccccctttgtgctgcaagatgtgtatggttccgtctgttctctgtcctataattgactggttctgcactccccccaatccaatttcagaaaccgaagacgtttgagattgcggggtttgagtctcttgatttgtgcctagagattggttttccactttccacgaattgttggactgaaagaaaaaagatctataaaagggagtaagttgctgtaatgcttggatgctcgctcgtgtgatccctgccatttatgtgctcggtttgctgtaggtgctccttgctactcttgggtagacccgcttagggtccgtttgccatttatgtgctcggtttgctgtaggtgctccttgctactct

SEQ ID NO: 39387 - DNA, 875 bp, Zea Mays
ctattcgagtgaaagcggcccccaatttctactgtaagcagcaatggcgctctcctgttacttgctcgccggcgcccgggcggcagcctccccttccttctcatcctccgctgccatccgccggcgggaccaccgtctgctgaccttgtccgtggttccgctttcgctctctcagcgatgtcgccacggcctccgcgtgtgctgcgcctcctccacctcttcctcatctccgccgccggcaactcccgaggagcccgacgactacgagttattggacacagctgggaattgtgaccctctatgctcggctgatgaagttagctcacaatactttgaagctaactacaaaccaaaaaatgaccttctaaaagctttaactatcattggcacagccttgactggagcagccgcaataaaccattcctgggttgctgctaatcaggacattgcaatggtgttggtttttgctattggctatgcaggtatcgtttttgaggaatcactagcatttaacaaaagtggagttgcgttattgatggctgtctgcctatgggttatcagaggcattggggctccctcgactgatgtagctgttcaagagttgagccagtcaacttctgaagttagtgaaattgtgtttttcttgcttggtgcaatgactattgtggaaattgttgatgcacatcaaggttttaagctggtgactgataatatatctactcgaaacccaaaaactcttctgtgggtgattggtattgtaactttcttcctgagttcgatcctcgacaacctgacttccactattgtgatggtatccttgcttcgaaaactagtacctccatcagaatatagaaagagaatcaagaggatcagct

SEQ ID NO: 39388 - DNA, 1345 bp, Zea Mays
cacaggcacagatctcatctggtgtgtagtagactcgtcgtctcagctcgcgcgtgctcaccactgacctaccccgcttcaaaacagccaaactggaaaaaaagattctccgtccacgcctcgtcccaaccctagccccgtcgatctcgcatggccaccggcccgcgatctctccacgccctcctcggcggcggcgcagtcgccgacttgctgctgtgtaggcggaggaacgcctcggcggcggccgtggtgggcgccaccgcggtctggttcgtcttcgagcgcgcgggctacagcttcccttccgtcctgtccaacgccctgctcctcctcgtcgccatcctcttcttctgggccaagtccgctttgctgcttaacaggcctcttccacctcttcctaaccttgaggtttcagatgcagttgttgaaaaggctgcagattatgctcttgtatggatcaataggctgctggctgtcggtcatgacatcgccatcaagagaaataggaaagtttttataaaggtctctctctttctttgagcttctcagtttatcacactctctattgtatatttttttcctaactatatatgctcttcctttttcctgttctccttggttcaaaaggtgatattgattttgtggctggtttcatttgttggaatgctcttcaactttcttacactcatttacattggtgtaatgctttctctgttggttccaccactctatgagaagtatcaggatcaggttgatgaaaaggttggcgtagcgcacagtataatatcgaggcacataaataccattgttatcagggctgggcaatcagccaaggagaagaagactgaataaaagaattgttttgatgaacatctctggttgtcaagtggagttatgatagtgggcttttcatctttggactctccatatggccctccacttacattagttctcgatatgctgatctgaggttttgatgtgcgctgttgatttcaggaaatgagacggcttgtgtatttttttctttttgaacatgaggtttactatgggcgcatatcttactcgaaatgatattttgagaaattgcaactcgtgcatacaagtgtgtgggctgcttgcgctgttagccatatgatctctctgtcactgattttaattttaggctgctctgacgaactctgtggagctcattcgatgcccatctgctggtagctcgttttctgaaatactaataagatgtattttgcaaagacagctgtaccgtgtgaatgaatgggttattttgtcgacgattctgtaaggtgtagagaagtctttatcagtggacttttaccgtcaatttctg

SEQ ID NO: 39389 - DNA, 2862 bp, Zea Mays
caccttgtctcctcggctcctggctcctgttggacgccactcgccaccccactttccaaaccagaccacagccgaaaacccccgatcatgccgccgccggtcgaaccctacatcccttcgttcaccgccggcttgtccgcgcacgaggccgccgatgccgacaaagactacctctacttcctccgccacgtccgcctcgacggagacgcctacacggtcgtgattccgtccaaggacggcgcctcctgtcctccccagatcatcaggtacgaacaaccgcactccgatcacaatgccggggcccccgtcgcgggctctgaatgcgggagacaaagggcccatcccccgtcggaggagaactcttgggctacgggtgaggccgccccacacggcgtgaagcgcaaggttccaggcgcgagccccgccggcgaggtccgaagcggtgctgtccgtatggaagaggacaccccgacattggtggcgaagtccgcgtggtatgacttgcaacccgacatcgacgatgactaccgcttcttcctccagaatgctcgcgtggtgaatgacaaattggtgttcaagacggggaactgttcaataactatcggggaccatagtgatgctgaggagcacgacgacaccgaggaggaagagaaagaggaggaaggggaaggggaagaggatgatgaagaagaagcagacgaccttcctgcgtcagggcagtcgggggaggacggtatcggtatggaggaggccggtcctgtgtcagagacagaggacggtgttgactcggatttgccaattccaaaggtctttgagctagtttagcaaaaaatcgtgctatttccgtttcttgtgaagttcgttctaaactcctgataccaaccctttctttgccttgtgacttttgtaaaggaaatttagatctataccattaaaagattacaactttagatgtatatcattgatatctcacttacacgtgggatccacataagtcaatgacatgtggatatctaaagttgtaatcttttaatggtatagatccaattattcctttttgtaacacgtcttgcttataaagggagaaaattggatttctgccattatgaagcttaggattcgctcaaatgccactatgtgaacacgcttcgctaaaaaaccattatgaatcatatgcttacagacaaaatgccatttagggggttatctgaaacataaacttcttttactaaactgactggatgcttgtgcccctggcgacataatcgctgtcgctcatggatcggtccggttccagctgccaggttttcttcaggctctgctctatgcggttgggttagggaaaggagcgatacccactgctgctgcggtgaattgggtgctgaaagatggcctcgggtaccttagcaagatcatgttgtccaaattcggacgccattttgatgttaaccccaaagggtggcgactgtttgctgattttctggagattctgactccagtgttccctcacctgtttgttccagttggggtggctgctggtgctggccgctcagcagcttctttgatacaggctaagacttactttagtattgattatcaatattctatagtctgcatttatggaaatctatgctcattatagcgcaacataggtgttctgccttgtgtatctcggtatcctcataattggtagccatatgaacatgagacttatgatatggccactagaagatgtatgactatctgaagattttcatagcatgtttatactttatactcacctgagcgacggcgattatggccaggggcacaagcgtccagtcagtttagtaaaagaagtttatgtttcaaataaccctctaaatggtattttgtctgtaagcatatgattgataatggtctcttagcgaagcgtgttcacataatgacatttgagcgaatcctaagtttcataatggcagaaatccaattttcttttgtaaaggtgaaggatgaagtggtgagcaaaaatgaagaggatgatgtggggcctggatcagatttgcatattactaacgatcaggtgtattgtgaggtaacaccatgtcattcacatttgttgtgaaatgttatcatgtttcaagcacaggtttccttgtgcccgtcaccattgcttccataccattattttttctcttcatgtttatgtggtgcctggcctaatagacggagaaggtgaaagaaggaggagggaatacgttgaatgatctagccaggagaacaacagatttggatcctttggacaagaaggaagcaagctcaagcaagggacatctggccatgcctctcaatccttcggtcattgtattctccttggatcacaccactggcaagcgtacaggaattacaaggcgttatatggcccccacatatcaatgagaggccaaattcagtttttaaagagaagttgattgagtttctcatcaaaccatttacacaggaagaatatgataggtattttgctctggctagtgatcgcattccaatggtcaaagaacgaaggacccgtaatacggtggcatactatcactggacgcatgagatgagcaagtcatactttgataggtacccagatcttgctcagcaattcagtctccaacgcaataactatacaaatggcttggctcttttgcgtgggcttttcttctggttgcagaacattgagctagaagaccaattcagaccatggagcgatgaatttaaaaagtaccgagttgtcatggaatgtttgtagagggtttacccatactagccattactccatccagttcagaaagtcgtttggtaagttagcgcggtcgtctctgtgcaactctctgacct

SEQ ID NO: 39390 - DNA, 2343 bp, Zea Mays
gtttgaatcccaaacaagtcaaactttttctcaattttttccaatctcatccaatccatgtgtgttagcaataaccgaacaagcccttactcggcaatctcgcagcggtgcccgccccatccccgcggatctccctgtcgcccccaaccaccttccatccctcgtgacctgttcatgccgtcgccgcctcgatcctgtggatctccctgccgcctcccacgtccgtgctcatgacctgttccgcgtccgctgtcacccccagatcgcgcgaggcccatgtccacgcagtcatcgtcgccgccccctggccacgcgagatgccagcgccccctccaccttgcgtgagcgaccccttcatctaccttcaccaccatcttcaatccgcctctgcatcaccgccaaaaccctacccacttccctgctgcccaacaatgaatctgcctccgcaccaccgccaaaactctagcaactatggcagtgaacaacatccggtttcaagtctttggcagctatgctcatggaaaatacgtctatgttgatggtgaccgatctgttctcgcagaatcagcaaaggcttgatatcattgttgttttgctttatcatttgggcatttgaagcaaagctctatggagaaaaggcagggaaatgttgtctttctcatttttgcaggctgacgaatttaatgcagtggcaagagttggggttgctgctgaccatcgtggaatcatctgcagtcgtcgtgtgtccacactccctaacatgttgagcctcttgctgatcagatcaggcttgagaaggaaaatttggttttaataagtgttcttgtctggttcgattaaagaaagattcagtaattgtcttttttaggaacatagattcttcatctgtgtataatgtatttttattatctagattgtgatagttatttcaaggcctggtgatcgtatagcttgaccattgattgatgattatctgttgtcttaaggattggtacactgtatgtgttctttggtgttggtggtactttgctgacttctctatttatggtatcaaatatatctattgagtgttggtacttcaggtgcactatttagactattgggatcaatgctgtcagagctcataataaattggacgatatacgagaacaaggtcaattctaaaatatatgcagtattgcaatagtggatggaaacagaacaaaatagttgttccttgcaggtattgcaatatctcaaaccagataaaagtaaatttttactcaggtattttcacctatcttattacaattcatcaaggtattttcacctagcttattacaattcatcaatcttgcttcactacccatggtaacttgattattttcatgcactaactttttgacgtcctatttcttttcttttcccctttcacctcaaaacactcattttcatctcaaagcactaattaccagatacgccaatgtcatttaaattaattttcagcagtgctattattttttctgctatttgttttggaccgattaatattttgtgtactcttcctatttattcgtgggactgtaactgcaaagcttgtaactcaagtcatatgtgtcttgtgcctgctgttgtagctatggagcagaaaattcatgtgaacccactgaagatactaagccaaacgaagtgtacacatattcagaattctagctcaagctgccctaatcaactgaggaggataaggatgccgtggattttgagagggaggagcccgccaattgccagaagtctgtgcaagctgatgcaaatgcgacagctgccccgtctaaggctgttggcttcttcgggaggacattatacaccacattaattctgcttgttgcgagccatccagatgtgtatgagccatgtgatgatttctttgcccttgttgatgcactactctcagacaaagcacaacttttgacactacaaccaaggttatgtatacgatgacactatcatgcaaggcccactatcctctttgttgtcctctcatggatcctggtccagtggtggaggctgaggaatcagaaaggccctagatcatggccagtcatcgacgcaacggtggagcttatggctggaagtaatatgaagagtctatatctgacaaaaaatcatctaaaattaaatagtgagataagctttgaatagctgatgtaaaattatggagtaacattgtattagttgttgacaaaaaatgtgagaaatttaggtcaataataatatatgtattgtttgtttatatgtacttattgtgcactaatattttatcatataatttgtttgttgtcgtaacgcacgagcgtgcattccgac

SEQ ID NO: 39391 - DNA, 1583 bp, Zea Mays
ccctatcttatttattgtccttattagtcgcgcgtcccatcccaacccaagccacagagccgtccgaatctgctgccagaatgcggtggttctaccgcaaaggctcatcgggcttctccagcgcctccacggctgaggatgtcaccgccggcgtcgacggccaaggtctggtcgccgtcatcacagcgcaggtgcgtcgagcggcatcgggctggagacggcgcgtgtcctggcgttgcgcggcgtgcacgtcgtcatggccgtccgcaacgtctccgccgggctcaaggccagggaggccatcgtggctaagatccccgtcgcacggattgacgttctggagctggacctcagctccatagcttccgtaaggagattcgcctccaattttgactctctaaacttgcctctcagcattctcatcaacaatgctggagtgatgacaaggagctgcacacgttcctgcgacggcctggaactgcatttcgcgacaaatcacattggccattttcttctaacgaacctcttgctagaaaacatgaagaagacatgtagggacagcggtatcgagggacggattgtcaatttgacatcttcggcgcattccataacctatcgtgaagggatatgttttgacaaaattcatgatccatctagtttgaacgactttgttgcttatgggcaatccaagcttgccaatattcttcattctaatgaactgtctcgaatactcaaggaggatggagtgaatatttcagccaatgcagttcatcctggtgtcatcatgactaacctttttaggaacaggactattgtctctgctttactgaactccattggaagaatcatatgtagaacagttgagcagggtgctgcaacgacatgctatgttgcaatgcatcctcaagtgagggggataagtggaaagtacttcaccaattgtgatgtagccaacccgagctcacaagcttcagatgctgagttggccaagaagctatggcaatttagcttgcaaattgtgtcttcttgatctagtgcttatctgaacaagcggtgcacaaattgatgtgctaaattgcagatgcttaggctctcttcagaacaaatggaaaaccatatgaattttttagatcaaaggcattcacccggatttattagaaaaccataagtattttggatgactacaatcctgtaggaaaatgtatgcccttttggaaaaaatgattgcttcctatgagattccttgtattcctataatgatgcatgaattcatattccaaagaaaatttggaggcaaacaaaaataaggttggaccttatagaaacttccctttctgctcctctctctttggttgagttcatctgtttttcctatgttgcatccacctgtgtttttcatgttcctacgttttgagaattttgagtttcaggggggccctcgtattgcttcactttacgtatgtatgtattgccaccaacatcaaatttgaaatccaaacgaccacacaatcacatgattattgcattttttacccccacaaatctcaaataaaacggttgaatagtaaatctaaaatctcgag

SEQ ID NO: 39392 - DNA, 2888 bp, Zea Mays
ttctcggctgttgcccctccttgctcgctggctgtcttccccctgctgcggctcctcagtcctctcgcttctgttcccctatcgtcggcctccacaagcgccacgtctcgcgccctcgtccgctccccgccgatgagctgccgcgcggcgccgtggagtcgcccgtcgcacattgctggtccgcgtgtgcccaccccggcgcggccgcgcttcgcacttggaagtaggaatctgtggaagaactcatggacaattggtgctggtgtttcaaatatgtttgcgctgccatcaacactgtttaggtgcatggcttcaagtggctctggtgatggtgattttgctcggtctacattgactgacgaagcagcaccatttccattatactcttggccagataagcagagaccacgagtgtgcattttaggtggtgggtttggtggcctgtacaccgctttaagacttgaatctcttgtgtggcccaatgataagaggcctcaggttcttctggttgatcaatctgataaatttgtatttaaacccatgttgtacgagctattgtcaggagaagtggatatctgggagatagctccatcttttacagagttgctgaaaaacactagtgttcaatttgtgagagacagtgtaaagcttctgcgcccttctgatcacttaagaagaaaacctggagaaccatgcactggtggagttgttcatctggaaagtggcactgtcattgaatatgattggctcgttctagctttaggggctgaagctaaaattgatgttgttcccggttctgctgaatatgcgcttcctttcacgacattagaggatgccttgagggttgaaagcaagttgaaaatgctagagaggaaaaggtttggtaagagttcccctactattgaggtggcaattgtgggattgggctattccggtgttgaattagctgcgactatatctgagagattaaaaaacactgggactgtaaaggcaataaatgttcaaacaaccgtatgtcccactgctccacaaggaaatcgtgacgctgctctgaaggttcttgagtctcggaatattcagcttttcttgggatattttgtgagctgcatcaaagaggctcctacatctgatgagtcaagtagcacagttacatactctgaagttgacggtgatcataggaaactaattttggaccttcaacctgctgaaagaggcctcaaagggcagaccctcgatgccgatttggtgctgtggacagtgggttcaacatctcagattccacggttacagcctcctgatgctccctatgttattcctctgaatggtcgaggacaggtggagacagaggaaacccttcaagtaaaaggccatccccggacatttgcgattggcgattcagcagctctaagggatccatcaggcaaactcctcccggccactgcacaggttgccttccaacaagcagattttgctggatggaatctctgggcggcaataaatgaccggcctctcctgccgttcaggttccagaacctcggcgagatgatgacgctcggtagaaatgatgccgcggtaacagcaagtttcattgaagggctgaccttggaaggacctctcggacatgccgctcggaagctcgtgtactgcctcagaatgcccacggatgagcaccgggtgaaggttgggatcagctggttcacaaaggctgcgatcgattcgcttgcctccgtgcaaaacgcggtagccagctcgtttcctcccccaacccaaatgggcgactccaccgccaccaacccctcctcgccgaccgcagccatggatcccgactccgaggtcgtcttcgacttcccgccctacctctgccagtacaagagcggccgcatccaccgccccggcggcgcccccaccgtcccagctggcacggacccagccaccggcgtcgtgtccaaggacatccgcgccggccccgcctccgcgcgagtctacctccctcccggcgcagccggcaagatcccggtggtcgtctacttccacggcggcgggttcgtggtcggctcgccggcgcggccgggcacgcacaactacctcaacgacctggtcgcccgctcgggcgccatcggcgtgtccgtctactaccgcctcgcgccggagcacaagctgcccgcggcgtacgacgacgcgtgggcggcgctacggtgggcggcgacgctcggcggcggcgaggacccgtggctgctggagcacgccgacctgtcccgcgtgttcctggcgggctgcagcgccggcgccaacatcgcgcacaacacggccgtgcgggcctccgccgccggcgcgctccccgacggcgtgaccatccgcgggctcgccgtggtgcacccctacttcacgggcagcgaggccgtgggcggcgagatagccttcggccccgagatccggccgttcatggaccgcacctggcggttcgtggtctccgacacggtggggctggacgacccgcgcgtgaacccgttcgtggacgacgcggcgcgcagggcctccgcggggatcccgtgccagcgcgtgctggtgtgcgtggccgagaacgacttcctgctcaaggagcgcgcgctgtggtaccaccgggagatcaaggccagcgggtacgctggcgaggtcgagctgttcgagtctaagggcgtcggccacgcgttccatttcgacatgctggactcggagcagggcgtccagctccaggagcggatcgtggctttcatcaacaaatgagcaccaccgagatgatgaataagagttttttatgctattttaaatatatcatttggatacttcaattgtaatagtacaccgaaagttgttcgattcccgatcccgaaataatatattcgttctgt

SEQ ID NO: 39393 - DNA, 3409 bp, Zea Mays
cccccgcgctgcaagtatttcatttggcttgcatctctcaatcgatgttggacggctgatcgactggcacgtcatggaatggatcatccagatagttgtcccttgtgtgatcagcaggatgagacagtgcatcacttgctggtggattgtgtttttacgagggaagtttggtttagaacactaagcaggctaggtttgcaacatcttgctcccacgtctgatgctacagggtttcaagattggtggagtgaggcagaaagactagtgtctaagcataagaaaaaagatttgtcgtgttgaagacataactgtcagtggcatagttaggggaagtataattcatattcatagagcaaggactgtgactattgcaaaggatggcacaattagtgcctcagagttaggttgcaaggaaggcatcggaaaaggaaagtttctcaagtatggagctggtggtggtgctgggcatggaggccgaggtggcacagggatttacaatggaatgagaagtgaaggaggcctagaatatggcaatgctgatcttccatgtgagctaggaagtggtagtggcggttctgctttgtcagcagataacactgccggtgggggattaattgttattggatccatgaaatggccactttcaaggttgctagtttatggctcgctgaactctgacggggaaagccatagaggcacatcgggaaattcaaatgggacttttaaaggtggagttggtggtggttctggaggatcaattcttttatttcttcaatggtttctgctagagaaaaactcatcattatcggcatctggtggcaatggaggtgtatacggtggtggtggaggtggtggtggtagaatacatttccattggtcatatattgctactggagatgaatatgttcacattgcttctgtcaatggcacaatagtatcaagtggtggatctggtaagaatgatggacattgtggagaagatggaacagtaacaggaaagaaatgccccaagggcctatatggaacattttgcactgaatgcccagttggtacatataaaaacgttgttgggtccaattcatctctgtgcatcccgtgttctgtggatagtcttccaaaccgtgctgaattcatatatataagaggtggtgttaccgagctgccatgcccgtataggtgcatatctgataagtacaagatgccaaactgttacacaccacttgaggaacttatgtatacttttggtggtccttggtctttttcaatcatcctttctttaacagttattcttttggcacttgtcttaagtgctctaagaattaagattggtgagagtgatatcacctaccgggcaactaatgcaatccacaatgatggttgttctttcccctttttgctttctttggccgaggtaccaggggcaagcagggcagaagaaactcagagccatgtccacagaatgtacttcatgggacctaatactttccgagagccctggcatctcccctactcacctcctgatgcgataattggaattgtttatgaagatgctttcaaccgttttattgatgagatcaatttggtggctgcatatgagtggtgggaaggatctatacatagtatactttctgttcttgcgtatccttgtgcctggtcttggaagcaatggcgcagaaggaaaaaaaaccatcgtcttcaagagtatgttaaatctgaatatgatcattcatgtctccgctcctgcaggtcacgggctctctataaaggcttgaaggttggttcaactccagacttgatggttgcgtacatagatttctttctcgggggtgatgagaaacgacttgatgtagcatccaccattcagaagaggtttcccatgtgtctaatttttggtggtgatggaagctatatgtccccatactatctacatagtgatacattgctatcaaatcttcttggccagtatgtatctactgcgatctggaatagattagtcgctggtttgaatgctcaattaaggacagtaagacaaggaagtgtccgttctactttgggccctgttgtttcttggatcaacagtcatgggaatccccaacttgagagacatggtgttcgagtggagttagggtggttccagtccactgcttctgcatattaccagcttggtattatcgtagctgtgaatgagaacttctacaagaatctccgccaccatgagcatgccacagaattttgtgaacgctcaaggaagaacgttgcagttccacttcaggatttcaatcaggcaaatctggatcagccttgcacaagctatgctgtttctagaaagcgattgacaggtggagtcaatggtgggatcataaatgagggaacgctcaagtcactgcactataaaagagactatctctttccattctcattgttattgcgtaattccaggcctctaggctatgcggaaacattgcaattgctcatttgtattgtacttctgggtgatttctccatcaccctgcttatgcttgtacagtactattggatatctgtcggagcttttcttgccatactgctcatcccccctcttgctttgctttcaccttttcttgctggtctcaatgcactttttagccgaggactaaaacgatcttcagtgacccgcatttttgcactttggaacattacttctgttgtaaacattattgtagcaatcatatacggctctttgtatttttggctctcttctttggcggtgtcctcagttcatcaagtatacaacacaaaaagcttcaagagtagagaagacaatgaatggtggatactgcctactatcctttttctcatcaaatcactgcaagctggactagttaactggcacgttgccaatttggaaatccaggactactcgttatttagcccggacccagatagattctgggcaatgtagtcgcctgcagcaagctaagaattgcagaaagcatggtttagtgatcgcaagaatggcaagtattaattattggatgctgaatatttgcgttttgtcccttgcaacgtcatcagcccaatacaatctctgaatctgaaggggtctaacacgctggctggaacttccttctatttatgggaagcgctcctgcgtagtgcactagtgcagatatgttcattttctttttctcagtttttttcccgtcttggtcgtgtgcctagaataggtctgtcgctcggtggggattagatttgtgcattttctttggttcaaattaaaccgttgattcgagtgtacagcaagaaactattgtgattgtcgctctagatgtacatcactgtaagtataatagtagaaccatttcaactgtatacaatcctcaaaggaaagtatgtttctttctattttctttttcctattgtcatcgtt

SEQ ID NO: 39394 - DNA, 1852 bp, Zea Mays
tcaaaatgcaacgctccccacagaaactaagcaaagaaatagcgccaacaagttaaataatgccccctttgcacgtccccggtagtagtactcctcgcaagttctatcacctggtgctgttccatgtgcacccgttctggatccaagtcctgtacttccttttgatctccgttttgggtttcttgatgctgagagtcctgcccatgaagtccagctccgtgcctaggccctcggctctggacctactcttcacgtcggtgtcggcgacgacagtctccagcatgatcgccgtcgagatggaatccttctctaacgcgcagctcctcctcatgaccctccttatgctcctcgggggcgaggtgttcacaagcatgcttggtctccacttcacctgcaccaagctcagaaacaagagagaaacacctcataataatctccatggtaatagcttagagcagagtcgtcgtcgtcaccgtcccatggagatggaagcccaggccgccgccgtccaaatggagcttgcagggttcaacaaggacggccatggcgatttcgcatccatggctaggttgctaatgtttatcgtgctgggctacatcttggtcgtgcacatcgccggctacgcgctcattctaatctaccttagcgtggtcggcagcgcgagagcagtgcttgttaggaagaggatcagcctgagcaccttctccgtcttcacggtcgtctcgtcgttcgcaaactgtggcttcgtgccaaccaacgaggggatggtgtccttcaagtccttcccgggcatgctcctcctggtcatgccacacatcctgctcgggaacacgctcttccccatcttcctcaggctctccattacggcgctcgagagggtcacaaggtggcgagacctctgcgagctgctgagagacagaggacccggcggcgggccagctgcggctgccgccgccgccgctataggctacgaccacctgctcccgggaccgcgcacatggttccttgctctcaccgtggcggtgttcctggcggtgcagctggtgctctactgcgccatggagtggggctccggtggccttggagggctcaacgcgttccagaagctcgttgcagcggtcttcatgtccgtcaactccaggcactccggcgagatggtcgtcgacctcgccaccgtctcctccgccgtcgtcgtgctgtatgtgctcatgatgtatctaccgccttacactacatttttaccggtagcagtggaagacgaccagcagcagcaaaatgaggcacaaccccacgacaatagcacgagcaagagcagcacaagtattagcatctggcacaatctgctcatgtcgccgctctcgtgcctaaccatcttcatcgtcgtcatctgcatcaccgagaggcggcagattgctcgtgacccaatcaacttcagcgtcctcaacatcgtcgtcgaggtcatcagtgcgtatggcaacgtgggattcagcaccgggtacagctgcagcaggctcaagaagttcagcatgcttgggggtcaggcatggaggctgaactgaaccgaagtactatttcgaaactcgctcgatcaacctgatctccaggactccaagactagtacttgaattctcagtctattcagacggaaccggatcatatgacaaatccatctgcgaggagtttggctgcattctgtaaagtcggtaggggcaaggggttgttcatatcctttttatttaaaaataaaaaatagttttatatctcgacttttgaaaattatattttgaggtgtctgtcacccaggggacggcagggagttaaatgtaatttttaataaataggttctcgtcgc

SEQ ID NO: 39395 - DNA, 307 bp, Zea Mays
ggtatgctggcccgacgctgtcgtccttcttcatcctcgtcttcgcctcgacctcgcgtggtgctcggccgtacacagttgctggtcgtcgacgcccctgcgagttgtcaagtcatccctcatgttcacctccatatgatgggtggcgtgggtggtaatgtcctggcgcgctattcgtttggggttcgaggatgtgcttgaaccagagatattccgtggttgctggacgtccttgcaccatggaaacgtcgaagcttcattccaggaaagaaattcctaggaaccgggtaatgaagcaagattcgtg

SEQ ID NO: 39396 - DNA, 2944 bp, Zea Mays
ccgcattgccgtttccgaccgccaactctcccaaggctgctctgctcgcccaccggaattcccgccgcggagggtgctgtggtataagcttgctttaggattggagggctctggttggttgcctagacgccggcgatggcgtcgccggccggcggcgagtctccggcgaagcccgtcctcctgcacggcgacctcgacctctggatcctcgaggcgcgcctgctgcccaacatggacatgttctccgagcacgtgcgccgctgcttcgccgcatgccgcccgccctcctcctgcgggaccaagcacccgccgcccgccgccgctggccgccgccaccaccaccaccaccggaacatcatcaccagcgatccctacgtcacgctgtccgtgtccggcgccgtcgtggcgcgcaccgccgtcatccccaactcccaggaccccgtctgggaggagcgcttcgccgtgccgctcgcgcaccgcgccgccgacctcgagttccaggtcaaggacaacgacaccttcggcgcgcagctcatcggcaccgtcgccgtccccgccgaccgcgttgtctcgggcgacgaggtcgaggactggttccccgtcataggcaccaacggcaagccgtacaagcccgacaccgcgctgcgcctccgcttcaagttccagcccatcgccgacaacccggcctaccgccacggcatcgccggcgaccccgaccacaggggcatccaggactcctacttcccgctccgccacggcggccaactcacgctgtaccaggacgcgcacgtcagggaaggggacctgccagagattgagctcgacaacggcaagacgttccagcacaacgcgtgctgggaggacatctgccacgccatcctagaggcgcaccacatgatatatatcgtcggctggtcggtgtacgacaaggtgcgcctcgtgcgcgaaccatctccgtcgcggccattgcccgagggtggagaccttacgcttggggacctgctcaagttcaagtcgcaggagggtgtcagagtgtgcctgcttgtgtgggatgataagacttcacatgacaagttcttcatcaagacgggtggggttatggcaactcatgatgaagaaactcggaagtttttcaaacattcctcagtcatctgtgttctctctcctcgatatgctagcaataagctcagcattttcaaacagcagctggcaggttgttgggactttgtttacacaccatcaaaagtgtgtgctggttgatacacaagccaggggaaacaagcggaaaattacagctttcattgggggcctagatctttgtgatggccgctatgacacacctgaacacaggcttttcaaagatcttgacacagtattccaaaatgattaccataaccctacattttcggcaggtgcaaagggtcccaggcaaccatggcatgatttacattgcaggattgatggccctgctgcctatgatgtcttgacaaattttgagcaaaggtggcgaaaggcaacaaaatggcgtgaccggtttagaagagtatctcattggaaagacgatgctttaattaaactggagcgtatctcatggattttaagcccttcacccaatgttccaaataatcatcctagtttgtgggtttcaaaagaagaggatcatgaaaattggcacgttcaggtattcaggtcaattgactctggttccctaaaaggatttcctagtgattgcaaagcagcttcaaagctgaatcttgtgtgccgaaagaacctggtaattgataagagcatccacactgcatatgtccgagcaatcagatctgcacaacatttcatttatattgagaaccagtactttcttggttcttcatatgcttggccatcctatgtgaattcaggtgctgataatctggtaccaatagaattggccctcaaaattgcaagtaagattaaagcgggagaacgctttgcagtgtatgtagtgataccaatgtggccggaaggagtccctactgcagcatctgtgcaagaaatccttttctttcaggcccagacaatggagatgatgtataaaataattgcagatgagctcaaggcaacggacaataaggatatgcaccctgaagattacttgaacttcttttgtcttggaaatcgggaagaaccaccatctaatggtagtccagaatcagagaaatctacagataaaagtgcagcggccttagcttcgaaatatcgacggttcatgatctatgttcacgcaaaagggatgattgtggatgatgaatatgtcattctgggttcagcaaacatcaaccagagatccctggctggttctagagatactgagatcgcaatgggtgcataccagcctcattatgcatggtctacaaagaatggacatcctcacggccaggtatatgggtacagaacgtctctgtgggcagagcaccttggaacggttgatgatcgcttcaaggatccttcgagtttggagtgtgtaaggtttgtgaatcaaatagctgtagagaactggcaaaggtttacagcagaagaaatgagtacgttacaagggcacctcctcaagtacccagttaaggtggaggctgatggtaagatcagcccactgtcagaccaggagtgctttcctgatgttgggggcaagattctgggagctccaacttcacttcctgattcactgactatgtagtgttattacataaaaaaacttctttcagagttgaactttgtaattgtctaaaattggcgggtttatcgcagaacttgtactatatctgtaatcatcgatagttggcgcagggaaagttcaagatgttagtggtgctaagttttcccagcgtttgtaaatgaaccatatgataggatcctagacaatgcttccatttccattatgattatacaacagttttcaacatttttgctc

SEQ ID NO: 39397 - DNA, 3887 bp, Zea Mays
cagactcctgccacaccacctaccactagaattgaagccttctgagaagatcaaattgttctgttctgggaaagagcttcaggatgacatctcgttagcaatgcaaaatgtgcgaccaaactccattgtgcatgctgttcgcactgaagtgtacctatggccaaaagcacagaaattacctggtgaggacaagcctctacgccctcctggggctttcaggaaaaaaactgacttgtctatcaaggatggacatgtttttttaatggaatattgtgaagagagacctttgcttctctcgaatgcaggaatgggagcccgtctctgtacatattaccagaaaactacccctactgatcagacagctgcatcactgcgaaacaacagtgatggactgggcacagtgcttgcaattgatcctgctgataaatccccttttctaggagagatacattctgggtcccaccaatcttgtcttgaaacaaacatgtatagatcacctgtatttccccataaggttgcaccaactgattacttattagttcgttcagccaaaggggctctttccctccgtcgcattgacaagctatatgttgttggccaacaagaacctcatatggaagtcttttcaccagggactaagaacatgcaaaattatcttctgaaccgagttcttgcatatgtttatcgtgagtttcgtgctagagagaggcctgatgctattcctcagattcgagctgacgagttacccatacaaagtcctctgacagaagccatagtgaaaaaacgattgaagcattgtgcagatttgaagaaaggaccaaaggggcattttttctggacacagagacctgatttccgggttccatcagaagaagaactgaggagattattgacgccagaaagtgtttgctgttatgaaagtatgcaagctggtttgtatcgtctcaagcgcttaggaattctgaagcttactcagcctgttggattggcttctgccatgaatcagcttcctgatgaggctattgagcttgctgctgcatcacatatcgagagggaactgcaaatcactagctggaatcttacaagtaatttcgtcgcttgtactaatcaggacagagaaaatatagaaagattagaaatcactggtgttggagatccatctggtcgtgggttaggattcagctatgtgcgagtagcaccaaaagcacctgcctccaattcagtgctcaagaagaagtcagctgctgcaaagggtaccactgtaactggcactgatgctgatctccgcagattgagcatggatgcagcccgtgagttgctgctaaaatttggcgtacctgaagagcaaattgataaattaacaaggtggcatcggatcgctatggtgaggaagctttcaagtgagcaagctgcatcgggaattactatcgatgaaattcctgttagtaagtttgcacgtggacaaaggatgtcttttctgcaacttcagcagcaaactagggagaaatgtcaggaaatttgggacagacaagttcagtcactttcagctttagatggtgatgacaatgccagtgacacagaagctcacagtgatctagactcatttgctggggatcttgagaacttgctagacgcagaagaatttgatgatgaggatactagtacagcagacttgagaattgacaaagcagatggaatgagaggacttaaaatgagaaggtgctctacgcaagcccaaattaacaaggaaattgaagatgatgaaacagaggcttctctggcaaagaaactacttgaagacgatggcaatgatgtgaagaggaaaaaacagcctgtggaattgacaaattgtggcacctctttagttgccaataaaatgaagcagagtaagactgggcaaacgatcaaatcatctggttatgctggtgcattaaccccaaaggagaacacaccaagagaaggaaaagaggttgaaaattcttttgttgagggtggtttgtcctcaaaactaaaaccaaagatggcactcgatgtaaatgagactgttctagttaaaaagaaaagtgttccaggaaaggatggacctaaggaaaagaaacagggtgcaagaggggatagtcttgtttgtggagcctgtagtcaggttgggcatatgcggactaacaaactgtgccctaagtatcgggaggatccagaaatgtcagaaatggatgctaattcagttaagcccaactctatggatataaaccatttgcaagcaaagacacctaaaaggttgataacaaaagtttcctctgaagttactgaaactgaagggccagaaggtattgagaagacaaaatctgtcccagtaaagttcaaagtaggggcacctgataaatccttggagaggaacatgtcagtctccgtttcactcgtttctgataaacgtgtcatggatgttacagacagtagatctaccggaaaggtaaacaagatagtgatacctaataagatgaagtctgatgatttccctcctgacactccaaagccatctgttgtatttcggcctcctgctgaagaaaaggatgtacctcgcaaaaagatcaccatcaagcagcctaaaggcatagaccagcaaagacatgttgaatctaggagtgttcaggaacccaccagaaagacaagaaaaattgtagaattgtcgagttttgaggataaaagtagagaggatgatcattgggttggtggggaacccagccaggtgaattcctcacatgggaggaggctgggtctggaaggaaaaataagcaaagccacaatggaaaatgaaagatcctggagagattttgaggagcgaagagaaatgccacaagcaaggctctttgatgctacgatatatgcatcaagggaggaagatcatctaaaggcaaaaaagaaaaacaagaaaaagaaaaaacatgaattcaaagatgatgacttacttgatcacaggccatacagaaatgacaggagggtacctgaaagacatcgagcactaaaacgatctagtccagctcctgtggttggatatgcatcatctgccaagcgtcgcagaggaggagaggttgagctctccaacatattggaaaaagtagttgatcacttgcggggtttgagtggatcactgctgtttttaaaaccagtgacaaagaaagaagcttctgattaccttgatatcatacggtacccaatggatcttggtaccatcagggacaaggtgagaaagatggtgtacagaaacagggatgaattcaggcacgacgtagcacagatacaactcaatgcacacatatacaacgacactcgctatcctcacatccctccgcttgctgacgagctcatggaggtctgcgaccatctgctttacgaaaacgcagatctgctcaccgaggcggaagatgctatcgagtagcaatataaaaagctagatttagcatttggatcttgctatatcctaacatagatgatgtatctatcttctgatctgtaggaggggaaaaggttgtacattttttgggcctagcagcaatctacatgtgatcccgaatccagccagcttctgttggtattgtgttgagaggtagtggaagtacaaaatgtctaggttagccactcaatggcctcatgttgtaaaaatgtagaatgtaatcatgtccatatacatggcatatatcggtccaataatccgattgtgttgcagtatttgatatgatatggaatggcgtttcaattgcagcgtgaatcaagcacgggcctgtgtgcacactttcttccaacttgaaccttatttcttatctggaggtgtatatgcattgaaccctgaaccgcaaagctgatggacaattttttttccaaacatgttgaag

SEQ ID NO: 39398 - DNA, 2854 bp, Zea Mays
atcaaaagcatcgatttgatctcggcacggcccgcccgcatcctcttctccttccctgtcgctttttctgtctacagcttccatggcgctctctctctctgaatgaatactcctccatcttgccttcacctttttcctcctttttatatcaatatataaaatgttgaggttccagggcaaccagcgggtttgaagtttgaactcagtccctccccccgcaagctttctctctctctctctctctctctgatcaaatgtggcgagatctgtgtgagtaagcgtgaataccactacggtttttcgtcctccccttcccttcttgagctacttgagctactctggtcacttcttggagccggcaactgccagttgggggttttttaggacaaagggagcaaaaaaaaacgaacaccttcctgagcttaagacagcatggatcagtacgaggtgctggagcagatcggcaaaggagcatttggctctgccctgctggtcaggcacaagctggagaggaagaagtatgtgttgaaaaagatccgtcttgcgcgtcagacagaccgcactcgccggtccgcccaccaagagatgcagctcattgctaatgtgaggaatccattcattgtggagcacaaggattcatgggtggataagggttgctacgtctgcattgttatagggtactgcgagggaggagacatggctgaagctattaaaagggctaatgatacccacttttctgaggagaagctttgccagtggctagtgcagcttctcatggcccttgactatttgcatgcacatcacattcttcaccgtgatgtgaagtgctcgaatatatttctcactagggaccaaaacataagactcggtatgtcagttgccatcactctacaaaaaggcaatctttgttgttgcaagtacatagttttggcacaatccaatttgccttataaacaaatgcaggtgactttggtctcgcaaaaatattgaccgccgatgatttggcattctcgattgtaggaacaccaagttacatgtgcccagaactcctcgccgatataccttatggtaccaaatctgacatttggtcactaggatgctgcatgtatgaaatggctgcgctcaaacctgcttttagagcttttgatatgcaaaaccttatcaacaagattaccaagtcgatagtatcacctttgccaacaagatattctggtgcatttcgaagacttgttaggagcatgctacggagaagtccagagcataggccaagtcatagttcctgttcaccagtctccaagcgagaagaggatgacattcgccgcagagcccgtttgcagaagcaagggcaggaggaactctttaggcagcgaaaggatgatagcagcctttagcaaaccttctcctgatagaagttctgtcagctctattcggagtgtcaaggacgactacaccgccacacagagtgtcagagagctatcggttgatgaaagcatggtcgaggttgctagtaaacccgtggcatcaaggacctcagatgtcatgaggactccgaaggcgactccgtggaagatgatgacgactctgaggaatcggctagaagctccacaagcatcatatgacagaacgagtcatacagagttttcaagaacaccggttgacaagaggaacagccgcgtggcccgcagagcatcgcttcctctgcccgtatttgagaccccgaagcagcgcagcagcatgagcgtcctggagcggctggagtcccccgacgtctccgtgaactcgcctcgcatcgacagaatcgccgagtttccgctagcttcgtgcgaggaccccttgttctcgaccgtgaagccaccgacacccgccagcgccagcgccagcgccacgcctccgttcgtggaccggtccatcaccaaggacaagtgcacggcccagacgctccggtccgcggcccacgacggtggcaacggcagaagcgaggacggcggcggtttgtcctcgggtcgcaccaccaccacggcagcgtcaagcggtgggacgtcggggtcgttgcagccgaaggggcggttcgacacgacgtcgtaccagcagcgcgcggaggcgctggagggcctgctggagttcagcgcgcagctgctgcagcaggagcggtacgaggagctcggggtcctgctgaggccgttcggccccgacgagatggtgtcccccagggagacggccatctggctcaccaagagcttcaaggaggcgatggccacgggcttgtagcggtggcctcctttcaccggcatggacggatcaggaattcaggatcgcccatcagccttgcaggctgtagacggccggatggcatcgccggtgctggcgtgtgtaggtcaggtaggtaggctatgagaattgagaagagagaggcgttagcgttgacggatcagttgttagttgctgggagtggacacaacaccatctcagtgttggccccccggtttattttgttactatgctagcagttcttagttagttaatggcgctctggctagctagctagtgatgtaccaatgcaacccccccccccccccccccccccccccagcagaattagtagcatcagggagtagcagtagaggtagagctggaggagtcttgagctaggaaggagaaggggattagtgagatataattcctatactgtgatgtagcccaagtatgtaccagtagcttcatatgcatcagtgctgactgctgaagaacattcagacatctatggattcagccattcaggccgattgctacgcttatctgcagttatttgctcctgcaatccaggagtgtggaatgggcgctgacactgttttgg

SEQ ID NO: 39399 - DNA, 3068 bp, Zea Mays
cggaaatcaaccccacaaaacccctgcgtaaagagacccaattgctatctcctccagcatccacccaacggatccgcggcaaccgaccacccatgggatcgctccggggcgcggcagcctcctccgcggcgccgcgcgcgggcgacctggtgaccacgcaggttagccttggtggatttgatgccaccgtcaaggcgctcgatctcgccgacttcctcgagttgaatgcgggctcggtctggcgctgccgcctcaagacctcctggactccgccggacgcctatcccgacttccttctccccaccgtcacctccgccgccgcgccgccgccacagtacgatcgcgtgcctccgcacgccttcgtccactttgcgcgcccggagggcgcgcgcgccgccgccgacgcagcgggccgatccgagctcatcctctccggcaaacccctgcgcgccgcctccgcacaggacagctcccttcgggcatcccgccgccgtagtgtctcgccattccgcttccctggctcgcgcctcgaggtcggggatctcccggcctcggacgccttcatcgccgcctggcgcggcccggcctctgggctcgagttctccgtcgacccgttcgacgggtcttgccacttcatcttcgcccgcgacaccgctttcaaagtccgggagttccgcgagtctgtggtgatgcgctgcgacgtcaagctccagttccccgtccgcgatgttgcggaagtcagggtgttccggctcgactgctcgctgctgatccggctatcggccgcaccgctggtctgttaccgcacggcggatgacgacatccacgtgtccgtgccgttcgacctgctcgacgacgatgacccgtggatacggaccacggacatcactccaagtggtgcgattgggcggtgcggtgcgtatagaatcacattctcgccgcggttctggccaaagatggaacgcgcgctgacgtacatgagggataggagggtggcgatccttgattgcgttggagggtggggggccaggagggggctcaccgtgcgtgatgagcctgagtttggggagcggatgcaggacctgttcttctgcgtgcagcacgccgagggtctcaagtttccggtgttgttcctcgtgaatgctctggtgcacaagggagtaataagtcaacaccacctcacgcctgaattcttcggtttgctccagaggaaggaggatgatgtgaatgtggctgccttgagggaattttggggggacaaatttccagtttttgatgcatgtgggaggctgaagaatctgcaggatagggttgccaggtacctgaaacatcttcgcaacaagattggggatgtcaattctgaggtgaggaggctggtaatcacgcccaccaaggcttattgcatgccaccagaagtggagcgctctaatcgcgtcatccggcattatagtgaagtctcagaccggtttctgagggttacttttatggatgagagaatgcagatgctcaacagtaatgtgctgaatttctctgctgcacaaatcgtcaaagatttgatgtcaaactcgttcctgcataagacaacagtgtacaagcgtgttaaaacgtttttgacagagggattccacatgtgtggcaggaagtactcgtttcttgcattctcatctaaccagctgagggacaggtcagcatggttcttcgcagaggacagaacgacaacagtggaaaccattaggaaatggatggggcggttcacaagtaagaatgtagcaaagcatgccgctcggatggggcagtgcttctcctctacatatgctacggtggtgctgcagccgcatgaggtaaatgagtgtcttgatgaagttgaacataacgggtacattttctctgatggaattggcaagattacgtgcgaccttgcactcgaagttgctcagaagctgcaattgacagataatcccccatctgcttaccagattaggtatgcaggcttcaagggtgttatatctgtctgggaaggaaaaaatgatgggatacgactttccctgaggccgagcatgcacaagtttgagtctaaccatactgtgttagaggtggtctcgtggacaaagtttcagccaggattcttaaatcgtcagattattacattactgtcctccttgaatgtcccggatgctatctttgctcaaatgcaggaagccatgttatctaatctcaacaatattttgtcagactctgatgttgcttttgacattgtaaccgcctcttgtgctgagcaaggaaccactgcagcactgatgttgagtgctggcatttcacctggaactgagccacacctgaaagcaatgctgttagctataaggtcctcacagctgctaggtcttttggagaagacaaggatttttgtgcccaagggaaggtggttgatgggctgccttgatgaacttgggatccttgagcaagggcagtgctttatccgggcatcatctccatcactcaataattgtctggtgaagtatggatcaagattgtctgcagcaaacacaaatgcagagaccattctgggtactatcgtaatggcaaagaatccatgccttcatccaggggatgtccgaatccttgaagctgttgatgtgcctgaactgcatcaccttgttgattgcttggtcttccccaagaaaggtgagaggccgcacgcgaatgaagcatctgggagtgatcttgatggggatctatacttcgtaacatgggatgaaaaccttataccacctggtaaaaagagttggaaccctatggactactccccagctgaagcaaaacaactgccacgcgcagtatcccaacatgagcttcgacattgagtaccttcagaacaagataaggataaagatgttagcttcgtcacaacaacatatggaaacgaaggtggacagagccgggagaaggtgcccacgattccgtatccaagatgaaataggcagaagtcaactttgccctcgcatcatttgtaaatcatatgtactggtcttagggatatatttgtaattttatacaaggctgtacgatcc

SEQ ID NO: 39400 - DNA, 2488 bp, Zea Mays
gacaagtttgtgttattgttggaaaaattggaggactaattaactttacaatgaaaagttatggtcgtgtgaaacctgatgttgttgcatacagtcgagatataattggatcaaagatcagcacaggctgcccttgtggagggtgcttctaaactttcaggaccaaacatgtatgaacaaggtgctggcaggcttgatctctggcagtcatatgaaatcttaaaaaattaccaaccacgtgcaagcatatttcctactatgcttgacttcaccgactgtccatatttctggcctttttgtcgtcaacctatgtatgctggagctatgccagtaatcttcaatgctacaatcctgaacgggatgggggtgattggttatgtaaaggatcaacctttatggcaaccttctgaggatattggcaatcttcttagtgttcacttcacctactcagatgtcatctggccctggacgggataccttgctctacatttgcaagttaaagatgagggttctcagttttcaggcataattagtggcaatgttactctgactatttataccccagcagctcatggagaaagcagcccacggagtagtacatgtattcttcacatgaaggtcaaggttgttccaacacctgttaggtcaaaaaggatactgtgggaccaatatcataatattaagtatccttcaggatatgttccaagggattcccttaatgttcataatgatatccttgactggcatggtgaccacttgcacacaaacttccacattctgttcaacatgctaagagatgcagagtactatattgagacacttggatcaccacttacttgctttgatgctagcaattatgggacattgcttatggttgatcttgaggacgaatactttgatgaagagattcagaaacttagggatgatgttatacacaagggacttggtattgctgtttttgctgagtggtaccatgttgatacaatggttaagatgacattctttgatgagaacacccggagttggtggactccaattactgggggtgcaaatattcctgcaattaatgaacttctggcaccatttggcattgctttgggggacaaaattcttactggtgacttctcaatcaatggtgagcagacccactatgcttctggaactgatatagtgcaatttcctgcgggaggtttcttgcatagcttccagctccaagaaaactcaaagacggtgcaagatcacataggaacactggatacagaaagcacccaggggaaaggcaagctctcctcaattcttggagtaatagaagcaggggaagggaggattgcagtgtatggtgattcaaattgtcttgacagtagtcacatggtaacaaactgctattggcttttgagaaaaatattggagttcactggaaacagagtgaaagataatgtccttttctcagaggcagcacagttaaagtttcctgtttttgagaatatccatcatccatcacgtagaacggatgtaaacttttcaacatactcaacagttgttggcaaggaattaatctgccaccaagattcccggtttgaggtttggggaacgaaaggctatggtgtccaaccaataggcacatcaagaaagcttccagagtaccagatgcatgaaagttctagttctcccaatgtaacaatacaaattgctggcagtagacaagataaagttgaaaggcttcaaagaaatctttcgataccaaatgctgctaaatttgatgataaaagagattattttggatttattggtcatgaggaggttgacataggaatgttaatggcaagccaatggatgataccttgcttcgctgccactgcttgccttatgttgtatcttagttgtagagtgcaacaaaaacgccgcagacgaaggaaggggtcggtggctagtgctaatcggctaacaagtatggtataattcgtcattcgcgcggtggtgctgaaaaggtttttttagcgtatctaagtttcaggcctccagccatgatggataaccaggaagcgccatctgcgcagcatgacagaattttagtagccagaaatccctggtagtgaagacacattttaactcggcaactagaggctgaacttgagagaaagctggctcgtcacttctgtggtcacatggaaagcagcttgtcttcccagattcagccattcgtggcatctactgctgttgcttgtagtcgctcacaattttgttcttcgccacacgtagttgtagccacaaaaatcgctgagagccaatatctagggtagaagctagagctagtcatttgtcatctccttggaatatgtgaaggagatttgagcttctctgtagatccatgagcaataaggggcagggggactcggcatgagcttggcaggtacaaaggaggcttaggcttattgggaactttgtaaagtaaattttgtattgttaatttaaaaaaaagaaccaggcc

SEQ ID NO: 39401 - DNA, 1510 bp, Zea Mays
accctacccacgccgccgccatccagaggctataatacaatcaatcctagcaccctaccataaacactctactttccccacttagttatcgttcttttagctttcacatttatcgactcttgttgcatagtcataaagaaatcctccatatgtttaagatctgatatggaaaatatagtagacttctaactttgatgtgcctcataccgtcgcgtggtcgccattgccttggccaccgatgtatcccgcgcccaggtcgtctccattcggggagctccacggctgcgaaggtgacggctgcgcttccgaccaggatacctggcctctacaccatgtgctacggagtggagtgcactgccgcctctgttgctcctgtatcctcctctcccaccgctcgttgtactgctgtcgctgcttcctcctcgtcacctcaccatcgtgcaactacgacaatggcgacacgctcatggcccctccagcaccaaccgtcacctgtcaggcagccactcgacgagcgcaacgccagggttctcgtcctaggggcgcggatagcgctagcgctgctgcagcgacacgcgacagcagcgcgcgaagccgcggaacggctggccatggaggcgcgggacgctcgggcgagggcgcatgacgctcttatcgtggccttcgacctcgatgcggaggaagatctttcgtgtgtcgtgccacaacccaccgagaatgacctagcagcttctgaagaagaagaagaagaagaagaagaagatagtgaggcagagacggatgagggggaggtgatgctggtgcggcgcaacgtgatgccgccgttagtcacgccaacaatcgacacggggggcagtgttgtgccgttggcttccgccgaggccaagcacatgcctccgctgtcacaaccaaagctgctttttgaccttaatgagaatgcggctgagaatgagatagatgatgcccaggctgagcccatgcgacatcaggcgcttaactccttcaacgtgaaggaggtggcgatggctgctggcgcggaagctaccagggccagcccgtcgacgccacagacgttgcagttgtttccgatcacataccaagatatagtacctcggacgctgcaactcttcaatgatgatgacgaggagatgtaggactgtttatgattgagcttgatgttgtcaaactgatgaaggatgcagttgtgacttgtgaggtgttttttgttccatactttatctgaacttcctaaacttattggtcagtgatttcagtgggggtggagggcatttatgctacttgtgtgccccaaaaatgtattccatacatagctgttgaattgttagtttctgtggcatgtatcatctcttacattacagctcggtttgcactttgtgcatgccaatgcatgataccatttgcagttccatgcatgatgtattgtttcttacagcttggtttgcactttgtgcatgcctatatatgatgctatttgcagtgaacaatgtaa

SEQ ID NO: 39402 - DNA, 351 bp, Zea Mays
gcaaaaaataaggattgggatgtacttaggactcatcggatgaaatggaaggcgcgcacacaggaactggacgtttaggaggatgcgaaggggatgagcggagtgtgactagatctgcgcggcactgccaaaacggtgtggatctcccggaattcaatatttccctccacccggtgtttccaaattgatgatggaacgacgaacgctaatcgtgggcgttgatggcgggcgcagatctagtgcatgtcacccatctggggttagcggtagtcgtggacgggattggagatcccggatttgaggcggggcatggccgggagcggcaaccacggatgggattttgcaacacct

SEQ ID NO: 39403 - DNA, 1481 bp, Zea Mays
aaatttattttgcagtttatcatattgaaattgaatctgcgcttctgctctccacaaagacgccaacaaaaagtatggcagtgaaaaaatagcttatgaagtttcactgattctctcaaaatggctcacctacagccttgcattctgtagttttttttgtgttatagaaatcccttatggttgcaggctaattggcacttttttctctctctgtccttttcagtttggcaacaacttgagcaacagaatcctctgtttttcaaagcatacgatatgaggctaatgcttaagaatcaaataatggtcttcaacaggcttctccaggatcagttcgagattatgaataaagagttttcttcagggatcccttctatgtctcttcctaatgactctaattccaacctattgaagcaagattcatgctttttgccagagactgctcctggaaatgcaatgccagatggtataatgcacaatggaagttcaagtggtataataaatgacacaccatctggcgatcagttacttaatgctagtaaagacttgcatggccttcatagtcaaatagatgcttcaactagtctacagtcagaccagaatgcaactgctgtgctgtatggtgtagacaacgagacaagcgcaacaataaagaccgagtcttgctactcgagtaatgctgattttgccttctgtgggaacactttcctggaatcatgccagtcgataggtgatgcatctggtggtggatccttcagcagctcagagttgaatgggcaaccactaaacgattcaattttggatatggagtcatcatcatttagcttcttgaaccaaatgccccaaagcttcatgttttcagacctggcagatgatttcaaccaaaatgcagaaataacaccatttctcactcctgagacaaatttctccgattcaacagggggagaccatacaggttgagcgggtcatgcacagcgtaccaaccatttgtacataggcacatgggcagtcgaatctgcattggtgaagaacttgaggaccttttgatctagcttgtttatttctctagtttttgcgtcttgatattgtggtagtttggggcttcgggtctggtgggttgtctagcccatcagaacgcgtaatgggtacggagtattggtcttccagtatgttttcagcgttaatttggctaatttcccccgcttggcttgtacaacaaattttatcagtactgagtaccatgagttgtactgctgtatatgctgcttcccactctctgaattggcagaatgattgatgagaagacactgcttggaggagttgcctcagtttcacactgcatgtatgcagcaagttttggacaagaactcatcagctgcttggaatttcaatagtaaacacctggacacaaaatacaacacaactacatttcctatttactgtgataacagtctaaaaaaatcatccagtttctttgacgagaa

SEQ ID NO: 39404 - DNA, 3470 bp, Zea Mays
ccgtacccaggcactacgggccatgccgtgctccggaccgtccggattagccggcactattgcccttctataggcgacggagatgtcagggagacagcgaggacgaggagccgggtcctggtggtcggcggcgccaccggccgcctcggcgtaagcgtcgctcgggccagcctcgccgtcggccaccgaaccttcgcgttcgtccggccccaccaggccaccacttagcacgccccgactctcctacttgctcgtagccgctgacgccactctgctcgaggcggtgcggcaggtggacgttgtcatctacgcggtgcccacgaagcaggcgctcgagcagaagcccctgcttcgggctataaaggaagctggatgcgtgaagagtatatggtggatgcagctggagcatgccaggctatatggctcgtgcagctgctgggggacatcaccggcgtcaaagtctagccatcgctgctgaagatggacaattagtatttttttaaaagagaatgatgttgctaaattgacaatatgcaccatagaagattccaggacattgaacaagatgttgtatctgaggcctctaggaaatgtctgctcaatgactgaattggctgacctctaggagacaaaaatcaagaaatccctgaaaaagttatatgtaacagaagatcaacttcttaaagaaatccatggttcgaagcaggctctccgcatttgcgggggcaaagcttgcctcgatttatcccttcctagacccgactcacgtgggagcatccgacactgcaaatgtggagaggctacttcgaacccgcgacctgatgactttgagatagctttcaccactacccttggtctatccttttttggctctgcgactgggtgtttgaagaatgccatatgtttttccttgagggatttcaagtaataaagtatgctatctgcacagagcaacttagggcataataggcattctcgcaatgatgtttccacaaagcacaaaagtggctatgaaccttctgacacagaaactgagtggcatgaaagcccttggaacgatggagcattggcatcgaataggaatcgtcttcctaaagattctggtaggaatgaccaagttggtactaggaggcaaaacatatctcctaactgcacactagattatcatgctgagaaaacttcaaacttgagatacagtcgtactcctccaagggtcacagaacaaaggcgccatccttctccatttacagctgtgaagaatgaatcacgtaagaagagcagccggacgcctcccagatttcgttcttctatggaaacctttagtagatcatcaataaaggcaaggttttcccgcaatcgttcaatttctgcaccaaaattacggccacaagagaaggaacatcctgctagagctcctgcatttcctggcagtaaccctgtctcaacacatccagaaagagaagttgctgataatatagaagaagattcacatgcagaaaactgttcccaggagatcagtgaattgattgcaaatggcaagttacctaattccagatataatgagtatgcatttacgagcacagagtcgatacctgcaggtgatatcttcttctcccgtgattgcagggctccacttgagaaaacgtcaacaaagcttaacaatattgaccaatcatttacctctgactcaaatgtccatactgagaatgatggcactgttactcaaagtaatttgggccagccatcacaatttgtttcagctcggacaggtctttcgcgcacaactacgaaatccagttatgctactggtcgccattgccagatgagcaccaccaccactttgagtagcccatatagcaatggaaaattaagtggggagagtggaaagtttagtgaaatcactgggaaactagttggaggcgtcatgaaattcacatccagcaaggtgcaaaacgatacgtggcttccatgtatgactgggaaggcatgtcgaaaatcaagaacatcaaacaacaaaaaaaatgatgaatctgaatcaagtttcattcagaaggcacttgtcattgagaagattagacttttttgggctgataaatatcgtccacaaaatttaaatggatttacttgccacagggagcaagtccagcagcttaaacaatcggtctctgcagaattttgcccacatattattttcaaaggtcctccaggatcaggaaagagatctttgtgcagagctgtcctcactgaaatttttggcgattcatctttgaatgtctctcactatttgaagagctgcaatggccaggggtccatatctgtgcctattctcgtcccagtttcatccagcaataaccatgtggaactccacatgaggtttcaatcgaagaacgctagatatgctttgatgactctagcaaatgaaatgtctgataagtgtaaaatcactgagccaattgtgagaaagagctttaaagtgattgttctctatgatgttgataaagtcagccaaaataaccagcgtctgataaaatggataatagattcctcctctgatgcatgcaagataataatgacttgccaggatgaatctaatctcctagattctataaagagtcgttgcaagattatttcaattggtgtgcccagtacacgtgaggtggtagatatccttacctatacatcaagaaaagagagttttgatcttcctacaagttttgctactaccattgcgaatcaatccaggaagaacttgagggaggctatattggctctagaggcatgtaaagccaacaattatcccttcattgatggacaagctataccactaggatgggaggaggttctggaggaacttgcagtagaaattttggatgatcctgcccctaaaaggttatttctggcacgaggcaagctccaaaaactcctggtggaatttgtacctcctaaactaatactccagaagctcgtagaactcttcttgaagggaattcagactggcgtgaagagggaagtctactattggcatgcctactatgacaagaggttgcctgttggtgcaagtgctctgcttaaattggaagaattcgttgccaagttcatgagcatccaccggaagagcatgtcgcatgagcccaagattcctgaggtgccgcagtgaaacctggcagagcatgtcctcgtgcggttcggccgtgtcgaaatcccgtttgtggtggtggtttttctgttttatataattcaccttacgtgatcaactgtcatggtccatgtttttcttgttctatgtatatactatatggtacacatatatgctactactgagtacacaaatatgtccagccgaataaatgtctatacggctataccatctgtgttggcaatatcttgttgcaaaagtttgggagtggacgtataataatcttttgatttgaggtacgtgaattttggctatcagtttgttcttttctttt

SEQ ID NO: 39405 - DNA, 7275 bp, Zea Mays
ccgccacgcaccccctgggtcccctccaccgcccgccggcgttcccacttcaattcgcccagcgcccctttctcctcccgaaaggcagggcaaccctacaaaacgctgtctcggcttcgccgtccagcggaacagtgtacgggagcagttcgtcgcgtgtgtcgcgtcgcgttgcgttgcgccacccactaattcgaacggacgggactgggattcgaaatttcgaacacgcgccgcctgagagagagagagagagtgagagaaagagagagagagagcaggagagatggtcaggcctttgtgatctcccgcggggctggaggtgtgcggggatggatctcgcggggatgaagcggcgggagctccaggcgctctgcaagcggcacggcctccccgccgggggcaccaacgccgacctcgtcggacgtctcgacgccgtgctttcggggcccgctgttgtggaggaggaggttgccggagtgccggcgaggaaggggtgtctgaagcaaacgggcggaggtgccaccgaggccaagaaggttacttttggggcggaggtagggaaggccaggagactgaggtctcgggtcatatggtcgccggtcgttgccaagacaagggggaagtctgctcgagccggtactgattctgctgctgaagacggtatttctgcagatgtgggcgctgatgtcccagtgaggcggtccaggaggaattcgttcaatcctgccgaggctgaggaagcaggagaggctgttgctgttgacaggaagcccaagcgcaagaatcaggagaatgacgagggcgttgctgttatcgctcaggctagagttacgagaaggtcaaatttggagtggtctgctactgtattgcctcctgctgttgagaagaagagagggaggcagaatgcagctgagtctgatgtgcagaagtccgctctggtggaagtaacagctaggactacaaggtctcgctcaatcgtacctgttgtggtgccacccactgtggttgagaacaagaggaggaagactggagatccacaaacaactgtagagttgactatgctttcagatgtgcccagaagtgattttcctgccaccaggtctttaaggaacaaaattgtccacgttaacaacagcgtcgtggacgaaactcacactaccaggcagttggaaaacaagatgcgtccgtctactcgtaggcatcaacaggttgcatcttctccggaggataaaggtcaaaaaattcctgctaccagtaagtcccctctactgaggtggtcacggagaaactattctgaggccaatagtgcaaattcagtaaacatcaaattggccaaagactcgagcacagctcagccattggcacaccataattctcattctgaagatttggagaaacaaccagcagttaaagaaccaattaaacggtcaacacgtaaatctattgctttggctgcacttgagaaagagaaggatgtaattgaaggaaagaaccctgaagcacatgttaggcgatcaacgaggaaatcagttgtgcaggttaaagataccaaaagtattgttgaagagactcaatatgctaacagtgaagatgtggcgaagcaaccagcaactaaaggacctgctagggggctgagacgtaaatctgttatcacagaattgcatgagaaagagaagagtctcattgccgaaaagaacatggaaacagatgaagcgatattaacgcggaagcctgtaatcccagttaaaaatattaaagctgttggtgaaggaattcaaattggtaagggcaaagatgtggataaacaatttgttgtgaagcaacctactaggcgatcatcgcgcaaatctgtgctgcctgatatgcttgagaataatagtggacttctagcacccaaaatgaatgctgagatgaatgttaggagatcaacacggaagtctgttcttcctgacatgcataatgagaagcaagatcaccataaaatggctagaaatgagaacttgcaaagtggtaaatatcaagatggtgagaagcaacagaaagtaaaagattctattaggcaatcaaggagatctatcgctacagtgctacttgagggacaaaataatgatgaaggaaaaaagttcaaaaatcctacgaggaggacaacacacaaatctcatgcccttaatgcagttgaagaggtcagcatggatcacattgaagttggtgaagaaggcttgaaattgaggaagcgcagtaggtttttgctggaaatatcatcttcagctaatgtttcctggaagcatcagaatgcacagatctctaatgaaaaagataacacagaaggatcgcagcaggcatcaaattgcacaacttcaaagagaaggtcttcaaagaagagacgaacaactgctccagaagaagtgatgcctttcaaggtggcaaatgatgacatagttatcatggaagaaacaaaggacacacttgaatataataatgagtctagtagtaaagttcaagaaatttgtcaggttaatgctgcaagagaagagttctcttcaggtccattgcttgtaacagtagctcctagtgacgaaatttgcacagtgcagagtgtagctgtggtgatacctgggtcagaatctggtgacgatgcaaatcaaagttctgataagagtaagcaacctcaggaacattctgtcactcaaactgttgatgaccatttatctgaaacaagaagtgggaaattagatcaatcaacatgcatcacaggattagtctctgacaattgtgttgtctcagaggacaaaacattgatgagtgaagaccgtgaagagcaaagccctgtgtccggagaacagagagttagcttggaagcaaatgccaatgagcctgaggaaaagaacctagctaacgtcacatcaactgatctccacaccaaaagtctgcagcatgatattgacagaatagctaaagagactgataaagaagttttagctcaggagaattgtaatgaccagcctgttcctgcccagactgaccaagaaattaagttaaacgatgaacttgctgatccggatgttttagctcaggagaattgtaatgaccagcccgttcctgcccagactgacctagaaattaagttacacgatgaacttgctgatccggaccatgaagagcaaagccctgtatccggagaacggagagttagcttggaagcaaatgccaacgagcctgaggaaaagaacctagctaacgtcatatcaattgatctccacaccaaaagtctgcagcatgataatggcagaatagctgaagagactgataaagatgttttagctcaggagaattgtaatgaccagcctgttcctgccaacgagcctgaggaaaagaacctagctaacgtcatatcaactgatctccacaccaaaactctgcagcatgataatgacagaatagctgaagagactgataaagatgtttcgtctttggttttccctattgaagagcatgaagaaaaatatgcagtgagccctatagctgttgaaaagagcgtcagtcgggaagccagtgcatgtgaatctgcaggaaaacccctaactgtcatcttttctaacgatctccacaccaaacatctgcaacatgattgtgatgtgctaattaaggagactggtgaagatgttttagctcaggagaattgtaatgaccagcctgttccggcccagactgacctagaaatgaagttaaacgatgaacttgctgatccggaagttttagctcaggagaattgtaatgaccagcctgttcttgctcagactgacctagaaactaagttaaacgatgaacttgctgatctggctatggaatcaggttgtagcattactgaaaggaatgaagggcttgttgctcataatcttgatcaagaaggtttccttgaagcaacaccagagtgcaaacaggaatgtggtttgcctgaggagacagtaatttcctcaaaagaaacaggatctctgctgtgtgcagatcaatcaccaattggtctggaatctttattttcgcaagaaagcatagttgaatcagtggggcattgtgcacttgcttcagcaacaactcataccgaaaatggctttgatgattcaaaagattgccataacaagtctgcacttgaaaatgttcatgtgccagaaccttgttcacacaatgatactaaaggaggcatttttaaaaatgttgattgtatgcatacatcccagcgagatgatagaatggaaggagtaccagaggctaacactgatgaagaacatgttctgtcagcctttttgctggatgcaaatcacctaaacgtagtcattaattctgaagaagtggtttgtgagggtgaagatagtaaggagcttctccattcggaagactgtaaagcttcatccgagaaaacagatgtgaatgatggcaatgtatatggtattagtgatgctgtagtgagatgtgcactgcatgctccagccgatgataattatgagatttttttgggtcccaatactgatgtaccacgtcaggtttataatgacggatgcagtgatgtcaaagaagatcgatttgcttccaaaccctggacaattgatattattgaggatgcctctgtcaaagaaagatcaaatttaaaagattggcaacttgattccaagttggagggcacagaaatagtggaatctggcctttacttcaataaggatattggtaacattttacatagtggatctattggtgaaataactccatctggttctggtttatcaaaagattcatctgtggactatagaggggaggttttagatggcttctcaatggaagcatctcttgaaaggtcttctacacgtggggaacaaaatggttgtagactagatgctattgagaatccttcaattactttagcaacttctggttataagcatgaaggtgctttatctgaggaagcagtgtacacaaagaagaattacgctggaacatgcttgtcaaatcccagggaattaatcatggagctgcaatcccatttctcaaaggaaaacataaatgaatctgatcctcatgacagccttgtattcccaactgctgaaaattcagcagatgaacagctggttaaagtacaccatggttctaatctgtctcagttaggattaactgatctgttggatggaccaattgggtgttccaataccgacgtgttgtgccagtgtgacaatcataaaaatcaatccaatgaggacaaggtagaggaagttgaggcggtgtctgctgctaaatacatagaaagtgaagttgtgctgctcccatctcaagagagatcaaatttgaataatgagcagcttaacaccaagttggaaagcccaaacattatgggatcttgccttaactgtgataacgatgtttgtaatacttcggacaatggatctgtttttgtcattggtaaaagaactccatctgcttctggcttaccagaagattatcctaaggatagtgacttgcaacaaccggttttagatagcttctcagtggtttcatcttttcaagacaatatatctgggaagaaaactgtttctggtgtagcaggcagtgagattctttctttaagtttagcaactcctgattataaacatgaagatggtttctctgaggaagcagtatgcagaacaaagaattatactggaacttcctcggtagatccgaggcatttagacatggaggggcactctatttactctgagggaggtactgaaaaatctaatctgcaagataatcttgcatttctaagcgctgagagtggaaaagatgaacctattatttgccatgttgagaaactggttgacgcacatgcttcttcagatacataccaaggtccttgtcaagatctaggcagacatgaagaacaagagagctgcatgtctattcctatgcaagccaaagaaagtggaggggttttgaggtctagccacacgaaagggtcagttacagcagcccaaattgatttggcaggtgatgcccatcttattgtgagtgataatgctgctgccaagcaagtgtttagtgaggagaaagaggaaacaaaatctatctcttcttcagatattgatatccttcatgaaaaatcatactccagtggacacgatgaccatgctgcttgtgctgccgaaactcagttctaccatccacagaaagcatctatatctgatggactacatttgggtcctagttctttgcaagtagaatcactggatgctttggatagcgatatactgtatgttaacacaggagttctcgagcagcatcataaagagggttactatgaacccagtgtctaccaaatcacttcaggcatttgcacaatgtctgaagctgaaccattcgaagttttagaaactggaaaagatgtaaaaacgccatctaagctagatgagcaacttaatcctgggttggacggagatgaagctgagaaacacagcttagactgtggtacagacaccagtcctgtgatgagcaagagaaccctttcttcaccaggatcaggaccatgccagcagtatgtaaatgaaagcaccaccagtacacagtcgactgataatcacccaaacgacctacccgctccgagatctcctgaacaatccgcgtgttttcagaatgacaacgattcgggttcagtaggcatttgtcaaagcagcaggcgaagaggtatagatgaactttgcggtaagctgcagagtttcaaagtttccagcgccgtaaaaggaagctacgtagctatgggtgcacctcgtccgaagcctggggacagcacgagccgatctgcagccgcgctgctcaggaacatagagaacacaactgctgttaaagctggccgtcctcctgtcaagccaaacgccgatggtaaggactcgtctaggcgagccctgcagcccataagcggaaggcctgacagtaggtagttcggcggttccttaataagtgtgtcgtgtttgtgttcaaccctttgttgaaagccaggtccgtgtatttgtgcagcttgttgtcatgaagctgctgtgtgcgtgtcatttaacataagcgtgcgtgaagttgtgttatggaagtggctaaatatgtgttcgttaggaggtcaattggcttgaactgaccctgctgttccgtgatttctgtctaaatatacttgtgtggctgtgtcactttgattggccttatcgatcacatgcaatgggatcacatctagcgtgctctagggtcctcgtttggtaatcgctg

SEQ ID NO: 39406 - DNA, 1785 bp, Zea Mays
aagcaatgagttccatttagcagcaccggcggcacggcaccccgcagtcccgggctcccggcgtcccgcacccacgccctacaggcagaccaagcaaatggcgatctcgatctcgcaggaggccttcgactccatggtccgggagaacatggaggacctcggcatggaccccgatgaggccctcgctgacgccgttgaggcgctcaccctccagggcgccgatctctcaggtatcgttaagcgcgtgccgggagaggccaccgcggcggaggtgagcccggtggtgcgggttctggacgaactgaaggcctctctcagcgccagcggcgggtcggagcaggatctcgacggacttgtctctctgctcgatgagttgcgcaatctgtgctgctccggcgagggttcggagaatgcagcgatcgcggtacggaatggcgtcgtggaggcgctcgtcgccctgtgcgcgtccgctcgggtcgagcaggagaggctgcttgcttcggccttgaagagtctgagctccgtactccgtgatgtggcaagcactgaaaagttcagacgaagtgagggacccagaattgtcatggatctcttgcaaggaggctcagaaaattcagatttattggatgctggatttagtgttgtggcagcaggttctgctggcaatgaagttgtgaaagagtcctttatggacctgaaggtcgatgaactcattctgcgggttatgaaggataaatcaaaatctaatgtgcaaagtttgtatgatgccattcgtgttctgttgaaacctgatgacaaccgagtggtagcttctcagatgaacttggccaggtatatggatactcccggagatttgctgaaatcggggttgcagaagttcttgtcaatgcacttcgtgagcaagtcgctccttccagtttgccatctgcttgtgctgctttaaagtcgattgcagtcaatgatgaaatatgccgttccatatctgaaaatggtggaattgatgtgcttcttcaatgcatcgacggggctggtgagcagaagaacaaagctgtagcaagatcttgctgctctttgttgtccaagcttgctgcaagcgatgcaaacaagtccattatcattcagcgaggtggttttgataggttcctaaagttgacatccagattttctgaagatcctgctataattcaagaggttatgtctatggtgacggtcctcacactgaggtcaccagaaaatgcagcacgtgcaatggaagaaggctatgggacactggctatacagtcaatgcaaaggttcccctcctccgtgcagactcagaagcaagcatgccttatgattcgcaatcttgttgcccgaaaccctgagaataggatcgtcctgcttaatgatggtgcagaaaagcttattagaaaggcaatggcgctgcacagaagctgtaaagatgctgcttcgtctgccttgagggacctgggcctcgacaactacaatgcatagacaccagtgaccagtcacaccatagaaaatgtgcgtcgagttagtttggtagcggtagaatgttttggaggagaaatacattgtatgagttatcgaggtgccgcactgaaatgagtttgtagaattgcgctactgtggttgcatcaatggtttcagtttgttgggcaatcaaacttcagggctattaggttgtttccagcaaatcgtacatatgatcatacaaaacacttcttttatagagtgagctttaaaatagtagatggagatatataatgaataagttgtttgaga

SEQ ID NO: 39407 - DNA, 1708 bp, Zea Mays
gcgagcccacgtacttttacggaaacgcccacaccgccggctcgtcttctcccgaacccgaacccaccctccccgattcaaaccgtcgccgccgtcgccgagagagtcgtgactccccccagcggcggcctgcgaccacccgttacccagccgtcccttctccgcagacagcatttgcgcccaccccgtcccgtcccgtcccctctccctcgcggaggcccgagagctttgagctgcctcggttaagtcgtcgagtggtccacagggccgccgccgcggcggcggttacaaagcggggagggaattccggcgcgggatgccgcgatcccgctgcgatgcgcggatcagaatatgggtgtgacccaaccgggaagtagtggacactgctggtggaggactagggcctggagtgggagggagctgcggccgcgacgatgtacgtcgcgcgggagtctaccaagctgtggaggagggtgtgcgcggagacgacggcggagctgcagctcctgctccagaagtggcaactgctacttgcagggttggtatttcagtacatccatggattagctgctcgaggagtgcattacttgcatcagcccggaccactgctccaggacttgggatttatggcccttccagagcttggccaagagaaaggttatcttagtgaaagcgttttcactttcatcttcatttcctttctgttgtggagttttcacccttttatttatcatagcaaacgtttctacactgttctactatggcgaagggtgctggcatttctagtggcttcgcagtttttaaggattatgacattctattccactcaacttcctggtcccaattatcactgccgtgagggctcaaaactggccactctcccaccaccaaataatgcacttgaagtgctcctgattaactttcctcgtggagtgctttttggttgtggtgatctgatattttcatctcacatgatcttcactctggtttttgtgcgcacataccataaatatggctcaaacaggtacacggttaatttggttgtattttttgttgataacaagctgccagaaatggcagaccgtacaaatggattgtctctgcttccagtaagcacaaaggataaagacggcaggatgaaggaagaactccataaacttgagaaggacgggaggatgatggatgagttccataaattgttaaatggaaactctatcgatgctacagattggcgacaacgagtgcagatgaatggaaagcacggagaagacacgagccacactgtcgctgatgccacctctgctgggacatgaccagcagcatttctctgtcaatatcgtcttcaatatccacagatggaatctgcgagcaaaaagaaaattgtgtggtgtgctgcctctatcattgtgtgatgaaaggcttctcaggtacccgcgaggttgcgacattcataacagagcgttttgttgtgctttccatggcacgatgacagtctgttgaagtagtaacggaatcaggaccttttcggcttttctatgaggccgcagctacagttttgcatccttcagacgtttcagtgtcgatgatgttagagagggagattgatgtttgatgtaaatattgattagattcagctgtggcaatgggtaatgaacgactaacttatgctgattggtaatttaacgtgagcagctgttatgaccgcttt

SEQ ID NO: 39408 - DNA, 103 bp, Zea Mays
cgcaaaagatcctatgtggaggaccaagtcctcccgctcttcagtcttgtttttcctcatttggtaccaccttggagcaaaagcaacaaaaatttgtcgcttc

SEQ ID NO: 39409 - DNA, 1636 bp, Zea Mays
aactttctttcgtgcgcgcctgtcatcgtccggctcagagccgccacagcctcgccgtcgattctctcccctccccttcgtcctcacgagcgacgaacgtcacgaacccctcctccacctcctgctactatcggcgccggagccctcctctggtctcaccgtgcaaatccccaaccccgaggcagacgcaggccagcccctgtgatggcacagaccaacggcaacgaccccttcagtccccctgtttcccaagaaagggttgtgataacaaacaagcatggtgagaggcttgtggggctgctgcatcacaccgcttcaaacaagattgtggtcttgtgccatggttttatagctaccaagaatgacagcctcattcttgacctggcggaagcgttgacaaaggaagggatcagtgtcttccgcttcgatttcagtggaaatgggtaacaccagaactgtagaaagtgaaggccagtttgagtatggcaactacaggaaggaggctgacgatttgcattctgttgtattgtatctgtgtcaaaaaagttatgatatagcagctgttgttggtcatagcaaaggaggagatgtggtgattctatatgcttctgtccatgatgatgtgggcacaattgttaatttatcgggccggtttgatttaagaaaaggcattgaagaacggataggggaagggtctatcgataaaataaacaaagaaggctaccttgatgtcaaggataaatctgaaaatgccagctacagggtaaccaaagaaagtttgatggaacggcttaatactgatatgcgcgctgcaagtgtttccataagcaagggatgcaggttcttaacagtccatggctcagctgataagaccatacccgtagaagatgcccatgagtttgcgaagcatatacccaaccatgaactgcgtgtcatagaaggagcaaatcataactacacctcacatcgcaaagaagttgctgatgcagtagtagatttcatcacgtccaatgtaaccgtataataaggctgggggatgaatgtcattccagaccacttggtcatgcacctatcgatcccctccatcatggggcaatactggtactaggtgtctattatcttctgaaccgaaaaccccatgtcatgcaggtttgatatgatgatgttgctcgtatgtgctcttaagaattactgtaaatattgaactcctggtagacttgtatgccgcagctcgcagtttatataggctcatatctctatagtttttttttctttcttctttgttcgagggctctattcccttgctcttttttgcctggttcatgtaagttttcttccttgtaccctatagttatttaatttatttaaatttggcactgtggactattttgtacaagaagtcttagtacaaacgtacaagcaggcctattggttcttttagatcgtgatctaatcatagttgtacattttagtacttaaaacctgccccaccaacaggtatataagtattgggcaacaatctgcgtgagctggtggaggatttaaacacacaagaccatttcaacacacgtgaataaattttactctaaaccatttcgacatggtttgttcactagtgcaaaaagaaaagaaaaga

SEQ ID NO: 39410 - DNA, 1803 bp, Zea Mays
cgaggttggcgcgcgccgatacggcggcggaattccggcgaccggctcaacgatccatagctttctttttgtaatctgctccgccagccgaagcaccgggcgttgtcgctcaacctaaccatggcgtcaacctcctctccccaccggaagttgctccactccctggtgtactgggcggtgcagcgctgccggatgtcggagttgccgtgccggctcacggtctccctcaagcgccccgccgaacccgccagctccccgccgctgcgcgtctccggtaacaaatttcggacacgggggtggggagcaaactggaggagttcctggagctcgacgccctggcgcgtgagattcccgtagagagatgggatggcacactcttagtcacaactactggaatcaatgatgaagccatttatcgttatcaaattaatcttcaagaagagacatcaagtgcaagatttagcaagttggctaccgcatacaaaaatcatgcacgattcagtggaactgaagtctgcctttgtctctcaaatgatgctgatgttgatgattttgtattatggttggtttgtttcttcaaaaagatacaagtgctaagagcagcaaatttagcatgtgagctctttgttgagcaaacaggcaacactggttccagaaatgtctgtctaccacaagattctgatgatgtgcatcattctgttacggcatcaagtattgaccagctagtttctggtcttaaagactactcactctcccatgtaaattcttgcgacaagtgtggcatgtgcttatttgatagagatcttctaaagattggaactggagcagcaaaccatgtagaaagaagaaaagctaaccgactacatgttgaagtagtcatagtgattgcacatattgcatctgattcagattgttgtatggcaaattgctcgtccacgcaggttttgtactttgaagattttgtaccttgtcagatattgcagtcctcttttgatgtgttgatgagcacagactggcaaagctatggtttcaagttaaaaggaggtttgatgggtgatgacggaaacgctgttctcgagtgggataacatggcatttgctcgtattgatatttccattcatacttaccacgaatgtgctatgcaagaacggcagggatctccacaggatagataccttttgaggaaggcactcaaatctgctctaactcacttgaaagcagatcatgcaggagattttcttagttgccatggccagagggttcgtgaatacgttcctgaccttgcggaatcaatcgctgggctgatcttgtcatccaccgatgaagagttccaaggcgaatgctttgcgcttcttgggctaggctccgaacaagacgtctctggaggagctgttcagtcgtcgatctgcgagaagatgatccgcatcatagagataaatgacaccaaggataattcagaggacaacgtgccttatctgttcgaatgcgagaagctggatgaagatagcgagctggacgaaggaggtggagatgaagacatggcttccgatttctagcgttgttttcacccgtctaccgtctcgtagagttgtagtgtagttagagatggcaatgggtgtcgaaaacccgaatacttatgtaggtggatatgagatgatttttatattggtggatatgttaatgaacaacaatccctgcccgttggataaacggtacgatacacgcaccgtatatccgtgagtaaaatatatctgtaccatacaactattattatctaataaaattaaaataaaaccctttttc

SEQ ID NO: 39411 - DNA, 1184 bp, Zea Mays
gtgaggtaatcccgcagtgcaggtgagcgaccggcgcctagcgttctgtggccgccgcccttctgccgtccgaccggaccaggtcgccgacgtcgcccctatcccgcacgcgtcatcgcagcgcctccgagtctccgccaagatctgcctcggccacggcgcggcgccgctggagctgcagccgtccagccgactgccttccgccgaccaccgaccaccgaccactggccgagccgccgcagctagctgcgctttgaagcatgggtcgttttgaacaagttactccagaaggccctgaaactaatcagcatgatgagcagcgctccatacgtttacatgcattttctgatctatcacacgtccctgcagccacttttatttatctcttaaaggactgctatggatatggtacgaacaaagcaacctcaaagtttaagatcctcatgcagctggtaaaagtggcattgcataatggtccacagccaggcccgttcacatatgttgtccagtgtatgtatattgtacctctgctggggaaaacttattctgaagggttcagccatatgttgacatcctctttaaagcacttgaaatctgtggaatcagcacagaaagatttcttggaggcaaagcaccttgccgcacaacttgttcttgatatccttgattctattgtaccccatgagaaccgcatattggtcaagcttcttgagacatttgaaattgagttgagagacatggcccgtgctttgtatgattcagagttggacgatggtgatctaatgaaagcacgtgaacatctcagacagcaagttaagcgctgtatggaatcagaatccaatgcacttgctgtgactctaataacacatttttccatccaatgctgtgatgagtccttcatcataaaattgattaaaaacaatcaattagagattgcagagcagtgtgctattttcatgggcaaggaaatgatatcgctagtcgttcaaaagtatctagatatgaaaatgctgaagagtgcaaacaaattggtcaaagaacatgaactcacagaagagtttccagatgttagctatttgtataaagagagttcagtaaagaagttggctgagaaaggatgctgggatattgcagaaactagggccaagaaggacacaaaactcctggaatacctggtaatgtat

SEQ ID NO: 39412 - DNA, 2116 bp, Zea Mays
ggcccacgctcggaaatcgccgcgacgaggtgctggattttgacttgctaccagaaaccggagctaaccaaatctgccgcaaaacccctcgcctgcggcttcgcgttggccggcaaccgccgctgttgccgacacttcaacgcgtacctcgcgcccccgcgctgctgatgcgatcagcgacgcacgccagatccgagcttctgtaggaccttcagccgtccccgtcccatgggggactgcgtcgtcgaggacggccacgtgcaccatccctcggatgaggtggagggcgcggttccattgacggtagccgtggagctcgatgagcgggcgggagagtcacgggaggagggtggtgggcagcggaagaaagtgggcgggatccgaagggagccgtcgttctcgcggtggtgcagggacacctctgtcgccgccgcctccaatactgccgttgctgcggcgatcagcgacagcgacagcgacgactcagaggagttcgacctaccgctcctgccatcctcctcgggcggcgggagctcacctatggacattgaggcgggggcgacggtgagatctgatgatctgccgatctcaccgaggttgcttgcgaaggtcattgggttgatagcgtgttggtacacgctgagcacatgcttgactctgtacaacaaggagatgctggggaagcacatgtggaagttcccggcgccattcctgatgaacacggtgcatttcacgatgcaggctgtggcgtccagggccatagtgtggttccagcaacgtggcctggagggagggccaaacaaaatgtcgtggaaggattactgtttacgagttgctaaagagacagaatttaatctgtggggatttatatttattatgcttgctgctgttatgtctggtttccgctggtccatgactcagattcttctccagaaagaggaatacggattaaagaatccttttaccttgatgagccatgttaccccggtgatggcaatagtaacagcaattatttccattgtgatggatccatggcacgacttcagagcaagtcacttttttgatagttctgctcacataataagaagcagcttgttgctgcttttaggtggcgctttggcctttttcatggttttgacagaatatgtccttgtttctgtgactagtgctgtaacagtgactgtagcaggaattgtgaaggaagctgtcactattctggttgctgtgctattcttcaacgatccatttacatggttgaaggcgcttgggctagcaataataatatttggtgtcagtctattcaatatttacaagtataaaaggttcaaaaaagggcattacaatgaaaatgctgggacaaatacccaatcttccaattggacttcaaaatacgtcatccttgatgaagatactgaagctcaagatgatacaggctgatctgaatgtgatagaatgcagactatatatggcgcttccagagaagcaagatcatctgtgcctgcatagtcttactttcacaggctaactgacttcatattctttgagttcatcaattactctggtcagccatgcacgaacatgacgcttgcagccgtgtggcaagttgggaagattacacatacatggaacatacaagatacaacctggtatcagtacatatgttttgtcctttcattcaaaacaaagaacagtgcatatatctgaacgaggcattctgcattatgtccactaagaaaatgctccatcaaatacaattagaactacagctgacacacttaactttctggaagaggataggactcaattttatagtccattctgattgttgaagagagattcggcatcggaacgtagctttcttttctttatttatttttagatgaaaataaacactcgtatatgtaatgttgtatgtatgggactgtatactgttttacacacgagcaccacaagttgaagttcttcccaccgtattggtattactcgtcttgagagcacagtgccaagtcggcccggtccatctcaactttgtttcccgtattttgagcagcttcaaaattgaactattagacgataaatattcgagaacgcatgtggctatcagcacatctttggc

SEQ ID NO: 39413 - DNA, 211 bp, Zea Mays
tgagaagtcagtttgcatggtagaataagggtgatgctgagccctttttgtgttttacagacttatcacttatcagttctcatagtgtggctatttgtattttatttctgaaaaattttactggttgcttgcctaagtaagtcttcataaacatttaagtggtgtgtagttttgaattgttggccgggtccaattttgtgaaaggaatgct

SEQ ID NO: 39414 - DNA, 689 bp, Zea Mays
tgctcccctgacaccggacagttccgtactcgcccgccgacccaaccctctatcctcgtcgtcttccacctcacgccctctttttactctccagttttttttttctctgctttgccgtacgttggtgcgcctctcccctcctcagctcctctccacggctccaacccacctcggcatcgacgccgatttgttacatggcggactcgccggtggagctgccgaaccggctcgccatactgcctttccgcaacaaggtgctgctccctggagccatcgttcggatccgatgcaccaaccccatgtgaagttggtggagcaagagctctggcagaaggaagataaaggactgatcggggtacttcctgtgcgggactcggaggcaacagctattggctctttgctgtctcctggtgtgggcagtgattcaggcggaggaggcagtaaggccgtcggttctgcaggagagtcatcaaagcagcacctaaaaaatgggaaggagcccattcagtggcacaccaagggagttgctgccagagctttacacctttccagaggggtggagaagccaagtggaagggttacatacattgttgttcttgaaggtctatgtaggttcagcgttcaggaactaaatgcaagaggaccataccattttgcccgtgtttcgcgccttgacatgacaaagactg

SEQ ID NO: 39415 - DNA, 3384 bp, Zea Mays
gcgatttcatcccgttccctctccacgattcaaaaatttcccctttcccactcccaaaacccactccgcctcctccgtgtacggtgtaccccatggcgcccgccgcggccgtcatcggcgctggagattccgatcgtctcgcgcgcgaggtggcgcgggtgctggacgagtgccgcgcatcccacgccgtgcaaccgcgtaagctgcgggagctcgcggccctccgctcctcttcaggaggcggcggccgcctcttcatcgcagccttccacgtcgctgtcacgccgctcttcgccctcgcccgccgatccgctgaatctgaccgcgtcgcccgcttcatctctgccttcgcgtccgcttccgcatcatcggccgacgatggtgggaacgggttcctcgaggagttccttcggttcctcgtcaccgcgtccaaggccgcgcaccgtcccgcgcgattccgcgcatgccaaatcatctctgagattataatgcggctgccagatgatgctgagttgaaggagaggatggtggcattgttgacctattcctcgagaccctagacaatgagccgaatgctgaggttcggaagacaatagttttttctcttccaccatcaaataatacactagagagcgtagttgaatcaatgcttgacattagtgaatcagttagacgagcagcatattctgtgcttgcaactaaatttcccctgcagactcttagcattaagcaaaggactactgtccttcacaggggcctatctgataggtctgcttcagtaaacaacgagtgcctgaagatgctgaaggatgagtggcttgttaagtactgtggaggggatgtgatttcccttctcagatttcttgatgtcgagacatatgaatcagttggagaatctgtaatggcagtgcttctaaaagatggtgctttgcgagtgcaagatgggcacagtattaggcagtacttcactgcaaatggtgaaaaagcagaacgagattccaatattcaactcatggatgctgaggttgctctttactggaaaatcatgtgcaagcatttgcaagctgaagctcaggtcaaaggctcagaggctgcagcaactacaggtgcggaagcagcggtatatgcttctgaggctactgataaaaacgaccttctcgacagtgtccttcctagcacaattactgattatgttgatttggtaaaggcacacctttctgccggaccaaattatcacttcacatcaaggcaattattgctacttggtgaaatgcttgagttctctgatactatgaaccgaaagattgcaagttcttttctgcatgagcttctcgtcaggcctcttgaacatgaagttgatgatgatgggaaccagattgcaattggagacggtgtgagtcttggaggagacaaagactgggcgaaagcagtggcggagttggccaaaaaagtgcattcttctgttggtgaattcgaaatggtggtttccactgttgttgaagagctggctagaccttgcagggagagaacagctgacttcatgcagtggatgcactgtctcgccgtgacaggtcttctgcttcagaatacttcaaccttacggaatctccaggccacagcaattgagccttcagaactgcttcactctttgttgcttcccgcagcaaaacaaaatcatgttgatgtacaaagggctgctttaagatgcctttgtctccttggactgttagagaacagacctaatgcagagttggtgaagcagctacgcttatctttcatcaatgggcctgacttggttagtgccatagcatgcaaggccttgattgaccttgtaacttggcatgggccacaagaaatagatcgagccattggaattgaatcgccagatcctagctacgaaaaatctcagttcactcaagttgacctctctgatatgaatgatgatgatctaaacattggagttcttgatattttattttctggatttcataaagatcactgggaattcgatctagagggtgacaatcatgataatgtcccaaccattcttggtgaaggttttgcaaagattcttctcctcagtgggaattttgcaagtatacctgctgatttgcatactgttatcctcgctaaactcattaaattgtatttctcagaggaaactaaagagctcgaaagattgaaacaatgtatgtctgtcttctttcagcactatccagcactttcagataaacacaagagttgtatctgcaacgcatttgtacctgtcatgaaagccatgtggcctggtttatatggtaatgctgggggtagcactcatgttatttcaaagagacggaaacttgcggttcaagcttctcgtttcatggtgcaaatggtgcaaacccaattattttcaaccgaaagtatggaccaagcttcaaaaagttctgaaagtgcttcaggtttagcagatgcgtcaaacaattttgacatcagcgaggaagggcttgctatccgtatagcactagaggtagccagttgcccagataagaagaccgcagctgggaaagcatatgctttggccctgtgcaaggttgtggtccttctaagattccggcaatcagaacagaaggccatcaagtgcatgagaggccttgtgaatcatttggctgcttcagtggcttccgacaaggagctcgggaaggagctagctcaaatggctgcacggcttagatcgcttgatgcctgtccagacgaagaacttgcacaagatgacgcagatgccatattcaagaaactaggattcgatgatggcttcaagttggacaccaatcaagcagtgcctcctacaccagcaccacggtcagtccggcctccggctcctgccaggagaagagcgagacaggcaccgtcctctagcgatgacagtgacgaggaagcgggagaagctgacgtgcctgcaacatcggcaagcagggttccagccactcccagtatgactgctgctgcacgttctcagagagcaagcaagactgctgctctgagcaagatgtctgcaaaacctgctaccgcgtctgatgacagtgagctggacgggcagtctgacgtcacgagcgaggaggatgcatccgatgaggagtcgttatagccttataggttgctgttattgtctcgtgtaatcgtggactggagtttctgatgacgttgttgagcggaagaaccaagtaatctaactaaattaattacagcggtgacatattgtcactgcattatgtatttctttcgtgttactaagtatgatttaaagccttcatttgcgtttgagctgcagcaatctgcacagacggttttataagcagcaagtgattagttttaaataaaagtcctgacggtggtaaattt

SEQ ID NO: 39416 - DNA, 3587 bp, Zea Mays
ctgcagcagtgcaggtcgctttcttccccaaaattttgaaccccgaaccctagctctgctcctcagttccccgtctccatggacatcggcggcagcggcggcatcatattgtcgcccggatcggaggatgataagtttgcgcggaggcgctcccgccgtgtgagcttcgcggacaccaccgcggtgcacgtgttcgaccgcgacgaggacttcgagacgcctcccgaggagcgcgagcccgactccacccccgcacccccttctcccaggaggtcctcggttggccgggaggttgaggacgacacggaggaggatttcaaccgcccccctgtcatcttcctccacgacgtcgactcgtcgtacccagacagcgccgctgaatccatcgcctccgccgatgatgaaaacttttttggacctgtgtcggcaagctttattcaaacaggaagaccatcagattctggaatgtcagaggatgacaaccatgatataactatggattccaggacgttctctttgcattttcgcaatattgctccaccagatgactgtacagcctactcagctgggagtctaatgacacctaatactgcatctgagggacccctgaaggaacttactgcatctaatcctgcaagagcatcaattaatggccgagatacattgactgacatgagtttgttgagtggtaaccccagaacttatggttatgataagttgtcacccacgttgaacagtatgatgaagaagataaaagggagcaagcaaacaaactctcctaaacttggtatttctgatgtaacttctgattgtgtattaaccttgtctacatctgaggaagaaagtagggaagaaaatttatgcattgacaatggtgtatcttctgatgagctggtcatggttaatacaattgcagagcacatttctatgagaaatccagtttcgaccagcacagatctgattcaagatgacaatgaaatgataattgatgtccaggagaattcaaagaactgcaaccatgatcacatggatgatgaccctggtgccaataatactgcagaacctcctgcaaagatttccccagcatataagtcattcatgattaatggtgatgtgcaatcccacctagtcgatcaatcttcgtcaaaagatcgaccatctggatcaaattgcactgcaagtgtttcctccatgtgtaatgttgacatggaaacccatcttttggatcaactacctggtaaggataacacatatgctgcccagtcgtcaagtgaagctactgccattttgctgatggatgctgagcagctgcggcagaaaaatgaggtgatggatacagaaacagttctacacactccaagaactgcaggtctgcagttgcaagttccacgaggatccatatcctccttacgctcaaaaaggcataagcttttcactaatactgtatccaatagtaaagtagcaagacaggagggttgttcttcgggtactgagtttgttcaccatgacaagagactttcttctctgaagcatcaagaattggctgcagcttcccagttacaattggttgagaagaatgaacttggtcatcgagcaagtgacatgttcagcaatactgaagatcatgattctacgttatctgtttcttctcattctgttccaaagctgaagaaaaccaatgaatcttttgtcctaggcactcctcgaagacatgggctaaatgagtctactaaggtcctagatacattatgtcatgcctttactttggatagccaacctagtcgtgaatgcaactctcatgtggatttaaatggtgttggaagaaagagaactgctgaggaaaatggttatgctgtgcaagagtgtcctgaaaaaaccactaagacagcaagaagccctagaaaatctagaaaagagattccttgtgtatctcagccttctatgattgaagaaaaacagaatggtgctcatgataatggaaagtccgtggatattgattggagcaaggtagtatgtactataactaatgccacggagcaagttttgccagcatcaataagcaagtataatctacaacagcttgacatgctaagcgataggttggatgagattcatatggctagaaaatataaaaggctttctactgctgtgaggatcaaagctttctgtggtgataagcaaaagagattagaggaggcaaggtttctccatgacaagcttttctatgaaaaggcgaagctacaaataaataatatgaagctagttaaactccaaaaaaaggctcaactatgtcaagatggaattcaagagtgctgctttctgaaatccaagattttgggcgctggacacatggaggattcttcacttcctgcagctactacagtcagtgctggtgatagacaggaagaacttgatatcatttctgaaaagaggcttgaactcaaaattattcaacggaaggtggagaaattaaggagttcccttgaatgttttcacaatattgaaggtggcattggtagtgatagtgttgtgaggtatgctgaagagcagttgatgatgagaaatcagcatcgcatcatccactgctctgcaagttgaatgacatagttaaaaggggcaacaagtgtgatatcatcctcaactatcacaatttgttgttccaaagtgatacatctagcatatttgtgaacaattcactgaatggaaaccaaattggaaagacatttccaaatttggatgcatctttggcattcaattttgttttcgaagccgaggagaaccaaagagttagtgatttacagtccttgcagaagaagacaatggaaacaagcttgctgcttggaaatcttattgatgttttagaagaaatcaaattatctaagttggagttagtaaatcttacctccgctgcttttgttttggagtcccagacacgtaaacttggcctccacctgtctttcatgagtttcaagagtggcaagaagattgctttcatcatcgacatgacagacttgaaccgctcggtctacccttctgaaccatctgagctcattaaggtttttgaagcacatactacgctagcacagccaagcatagacgagaccatggcttctataaggaacctgcaatctggtcgcacagcaatactaagattgtgccggatggtatcccggctgattcatggttacaatgatgacctgatcactggagtgcaagctgtaggaagtaaacatcatccggatatgtaggtagtaggcattaacagtgttggttttgtttttgtttttgcatgtaggcttaagatgtttgaatgcataaagcagtccttttcaggtggacgtgcaagcgattttggttactgcaaatccttgtaactgcccgtttattacagcaacaatgcataactggtagcttggtgcgttagagtgatggattacagtcttgcagatatgtcggcactgttgtatacgagttagtctaaaaggagccaggctaatgttttctccccgcagctgggactgttgctgaaagattgtgcattttttttacaacgactccaatatatttaattaagcattgttacgcaa

SEQ ID NO: 39417 - DNA, 281 bp, Zea Mays
gccgagttggttaggtggtatgagaagcactcctcaggtcctaggttcgactcccctaggagcgaatttcatgctgggttaaaaatcccctcgtttgtcccacgccaaagcacatgtctaaggtccggtcccgtcgtggtcgttctcacatgggctacgatgccactgtgtatgggtggggcaggggttcagggtttttctcgacctgtgtgaaaatgtctcttctaaatataatgctcggggctgttatacccctcgcacgttgagtttctttgttagcg

SEQ ID NO: 39418 - DNA, 881 bp, Zea Mays
tcatggggctcccgtagcgtcgactgcttcgagaagctcgagcagatcggcgagggcacttacgggcaagtgtacatggcgaaggagacgggcaccaacgagatcgtcgcgctcaagaagatccgcatggacaacgagcgggaaggggcccagagcgggacgagcaagggagttgacgacaacaagtacaaggggagcatttacatggttttcgagtatatggatcatgacctcactgggcttgctgatagaccaggaatgcggttcattgtgccacagattaagtgttacatgaagcagctgcttacaggcctacactattgtcacgtcaaccaagtcctgcatcgagacatcaagggatctaacctcttgatagataacgagggtaacttaaagcttgctgattttggccttgcaagatcattctccagcgatcacaatggaaaccttaccaaccgtgtgatcactttgtggtatagccagagcagctgactaagatcttcgagctttgtggtacccctgacgacacaatctggcctggtgtcacaaaaatgccatggtacaacaacttcaagcctcaccggccattaaagatacgagttaaagacttctttaaacagtgagtgatacatgacgtatatttgcacctatatggcttttaagtcacctgattattgctcattcttctgtataattatagttttgatcggcatgcactggatctgttagagaagatgttgactttagatccatcacaaaggatatcagcaaaagatgcacttgatgcagaatatttctggacttcacgagcgatgagcgcggccgtgaacaccatgaggatacgggcccccagatggcgtcggctgtgcaggcggccatga

SEQ ID NO: 39419 - DNA, 175 bp, Zea Mays
cttccataatcagcatagatcagcggagcaggttgctttagtggtcaaagagctcgttggttgttatcagttttcgtctggctagtaggtctgttcagtagttttcaatcgtcgtgtaagtcgattcggttttctgtaacttcctgtaagttcttccctatctaatatattggag

SEQ ID NO: 39420 - DNA, 3149 bp, Zea Mays
gaagaaacagtccaacatattttgatttcctgtgtttttgttaaagatatttggtttcaagtcctaagcaaggtggggctgcagtctttatcccctgggactgctgaccttgtgtttcaggagtggtggagggaggctgaaagcaaggtcggaggatcttgctgcactttgaagctgttgattctgcattctttgcttgggtaaatggagtactagttgggtatagccaggatagcagacttcctgctgagtttgaaattactgattgctgccatccttgtgattcggacaaggaaaatgttcttgctgttcaagttatgaggtggagtgatggctcttatcttgaagatcaggatcactggaggttgtctggtattcacagggatgtgctcctactatcaaagccacagatttttatcacagattacttcttcaaagcaaccttggatgaaaatttcagtttagccgatattgaggttgaggtggagattgactcacacaagcaagaccaggagcacgtcccaactttgtctattgaagcaacactcattgataactctggactatctaacagtatagatgctgatctttcatccgctaatgcagtcaatttgaaaccgaagccaaaacgaactcgaagcccttgtcttggttttcatggttatgtacttggtggaaaaatagaaaatccaaaactttggtctagtgagcatcctaacttatacacgcttgttgttctccttaaagatgccaatgggaagcttattgactgtgaatcatgccaagtgggcattcgtaatgtggtcatggcacacaagcaaatgctcgtcaatggatgtcctgttgtgctaagaggtgtcaacagacatgagcaccatccacgccttggaaagacaaatttagaagcatgcatgatcaaggacctgattttgatgaggcaaaacaatatcaatgctgttagaaatagccattacccacagcacccaagcatggtggagagagataagaatcatgcatgcattattgtttggtctctaggaaatgaatcttcatatggacctaatcatgcttccatgtctggttggattcgtgaaagggatccaacaagactcctccattatgagggaggtggttccagaacatcatccacagatattgtgtgccccatgtatatgcgtgtctgggatgttgttaagatagcaaaagatccatctgaaacaaggcctctaattctttgcgaatattcacatgctatgggaaacagtaatgggaatattgatgcgtattggatggccatagacaacacttttggactccaaggaggttttatatgggactgggctgatcagggtttactgaaggaggactcagatgggtctaaattttgggcatatggcggcgactttggagatactccaaatgactccaatttttgcctcaatggcattgtgtggcctgatcggacgattcacccagctcttcatgaagtaaaataccttcaccagcctatcaaaatatcatcagcagataatatgcttaagattgaaaatggacacttttttgagacaacagaagctttggacttcagttgggttcttcatggagatggttgtgtcttgggctctggtccattgaatattccaactttggcaccacaaactagtcagctcatcaacatggaatcatcaccttggtttgccctttggagtgcctgtgcagcaaaagaagtatttttgtctgtgaatgtgaaacaaaggcatgaaacacgatgggctaaagctggtcatctcttggcttcagcacaactgtgtttgcctcagaaaaatggctttgtccccagcgtgatagcattgtccagtagccctttggtctgtgaacgcattggtgataatgtaaccatctgcaagaataatgcctggaaaattaaagtaaacagtcagttgggaacaatcgacagctggaaggtcaacgacgttgagcttatgagcaaggggatactcccatgcttttggcgcgcaccaactgacaacgacaaaggaggtttcttcaccaagccatatgactcgcgatggagagaagccttcctcgacaatgtctcgttccacagcagccagttctctgtcaaggagttgccggacaacaccgtggagttctccaccctctactacggtgttcccgggcacctacccaagcctgacgacgaagcctccgagtccattctcttccgggtgaagatggtatgccggatccacgggtcaggcgacgtggttctcgactacgaggtaaaccccaggagcgacctccctccccttccccgggtgggcgtcgtgttcagcgccgggaggtccctgagccacgtcacgtggtacgggcgcgggcccttcgagtgctacccggaccgcaaggcggcggcgcacgtcggcgtgtacgagagcagcgtggaggagctgcacgtgccgtacattgcccccgtggagtgcggcgggcgggcggacgtcaggtgggtggcactccgcgacgccggcgggctcggcctgtacgcgtcggcgcacggcggctccccgccgatgcagatgagcgcgagctactacggcgccgcggagctggacagggcaacgcacgtccacaggctggtgaagggggacgacatcgaggtgcatcttgaccacaggcacatggggctgggcggcgacgacagctggtcgccgtgcgtgcacgagcagtacctgctgccgccgacgcggtacgccttctccctgcggctctgccccctgctgccgtcgtcgtcgtgccatgacatctacaggtctcagctccccagctgatggtgccgtgtgccggagacccgtcgacgtcgagccttgggaaacaacaatgaacgcaatggcctggccagtgaatgaaagtatataatattgtaataaagcagagacgtattagctcctgcaacggcctcgcgatcgcctggatatgtctatgctgagggggtgtttagttaactaataacctaactacatatggcgccaagttactaaaacttaataaataactattactaactaataaatagtaactgaattcctaacttaataaatacttcctccgtttataaatatatgacaccgttgattttttaaaaacaacttaga

SEQ ID NO: 39421 - DNA, 4169 bp, Zea Mays
accaattgattttcttcacccgtccacctcgtcttgcgctcctctgtctcggcgacgactgtgctaccgccgccgccgccgcaagacttcgtcgggcactttgccggcgacgatttcccaccagcccaacaggatcagaggaggtgatggcgaggagtgacagctgcctggcgcgcgtgggtgccggaattgctatcggtggcgcggtcggcggagccgtcggtgcttgctatggaacttttgaggcgttcagatacaagatccctggattgctaaagatcagatacattgggcaaaccaccgttggcagcgctgcgatttttgggcttttcttgggggctgggagcttgattcactgtggaaaatcctactagtttgtttccctttttttttctgaagtctgaacacacctttgtcgatgggcttcagtgaaaactattcaatgcctgtttcatgtaacagctaatagctcagggttggaaaagaacaatcaagttatgtcctagttttggtgtggatggaaatagaatcaacgttcatctgcacgagaatcgtcaatttctcatctagcgtcttatgttctcatctcattttctttaaaaacgtaaggaattctttactcaccatatactttagctcggcagggcgccgcgaagcgcgcaactttttgtttactagtacttattagcagccggtgaagtaataaaagtgcgtacagcttttgctttactttttgtttacctattgcatccctactttggctctgaagtgtcctgccagcggcctgcgtacttaggcctaatttgataggccatgagtatgtggccagctgagtggcgcgcaggccataaatgcgctgcagtcagaggggctacttctaccgtcgcgagtactgcaccgcgtgcgcgtcctccacgaccagacacgtgtcccgccagtcctcgaccgcgccggcaacacggttcactccaccacgtcctcgcgcgagtgcgtgtctcaggtgttagccacgacgactggccacccggctgctccggtccgtcagttaagacccagcactcgtccttcatcgctctcggtccatcagcacgagcccgtatgaccttcacctcggccgtcgaccaccatccctatgctccacacctacacaccacaagccgaccgatatggttgcacaaaacataatctcacactctggtcagtccacagactaccacagagtgctattcgttgataatcactcatcatcaacccgaaccacaagggaagagacaaatcaaccttgtgttcgcacttttccaaccctatttctccacaagccgaccacaaaggtcaaggcaaatcctttccttaaacttgctcaacgagcgggagatacaaacttcttggggtcttccacaagttggagactcccaagcacacacaaaccgtcaaggaaccaaagttccaagagtaataaattcgcacaagtgaagtttgcaaaacgagctcaagtgagggagagggaggaggagagtgaaaaaccaacaacaaatcaacgaacgtcacctcacaccgaagatcctccaaccgttggaagaggatgcgatttgaggtgtgggagatagagttagagcgcttgttttgagtttggtgagcagtaaagtcagggagagtggctgaagtaaatgaggagagagagggaaaggggagtatatataggtgtccctctctcagggcagaagatttgaaaaatctgtgcaaaggtcggttgaaccgcacccagggccggttcaaccgtctgataggtcagacctatcagaacggccttctgactaaaggtcggttgaaccgcaccctagggccggttcaaccgctattttccagagaggtctgagtataaagtccggttgaaccagccaacagggcgaggttcaaccgcattttgtcagagaggtttgcgaggccggttcaaccgctttttaccagagacttccggaacagagtccggttgaaccgcaccctagggccggttcaaccacacttttccagagacttcttttggagaagtcaggttgaattgcccctgaggtaggttcaacctttcttcctagagagggtatcaaatgcaaattctctggagcggattgaacttttgcaaaccaaattcgaaatgcggttttcaaaatagattttgaagagtagagattttgagctcttgcaaacattttatacctttgtgcgaatccctcttgattgtacggtgaatcctatgactcaagaaaaagtaaatttcgaagagccttctcttggaaacaccagaaacacagtgcgatgtatgaaccaagttttagtagttatcgccttgatccgtgtttcttcctcttttaaaatgtattctgtttatctacctaatttgcaataactaaatatacacttggagcaaacttgttagacaccttatttgttttgtcatttaatgaccaaaaccttcaaaaaggttgattgtacttacaccttcggcggttgcgcagaggaaagcggttgcccgacagcgctcctctcgcatgtacgtatcgagcaagtctgtgaacgacgcggctttggcggcgaagggggcgccccgtcccctcgggtcctcttactgccggcgccggatggggcggctcctttcgctgtcgccttcgtcccaccagctgaggcggcgactgctcctcgcgtggcagacgctccagcctccttggtcgtcctggaggtgccaggagtggttgcccctggtgcggccttctttgagccgccgccttctgcacctggcccggggcaggtttcggtcgccgaggaagtcgttgtcggcgcgcgctcggtggcggcagggtcggtcgccggtctgccgccgccgcccccgccccgtgaagggggttctgggttggcgctgttgcccgcggaggtcgccgcgccctaggtgccaccgccgcctgccgctattgccttgacttccgcaggtgccgcggtacccatgggatctgaggaaatccacggggggcttcccctctccctccctgaaggacggggggcagaggcagaagagtggcagcggaccgagtcagcctcgtctcgggccaactcgagcttagaaactatcgagcgcatgttcggtagcttcgaggaggcgatttcgattgcttgggcgtcgatgacgcgggatctgattccttttggttagcgcctccttatgcggtcggtggctcgagaggaagcgctactagccgcccaacaggaggtggagcagttgcgtgctggggccattcggctcagggagtgggagcgcgagctcaccaccctttgttctgaggctgtccggcttcggagcgagacgccgctcctacgcgtggagcatgacgatgcttagggcaacatggatcacctacgggaggaggggtcccgactctaagaggccctcgatgggatgagccttggggccgagggggccacgccgaaccttggggaggtcgacgcctgtctaggggaggcaaactcggagctccaaagggaacgcaatgcaactggagatgatttcccaagctgaggtcgccaggaaggcagcagaagaggcgaagacggtggcagaaggaaggatacgagagctctcgcttgcttgtgatggcaccgttgtttcgagactccaggcggagacctcactttcggagcggagcgccgagctccaagtgcttcacccgatcgtcggctcggtgtgcactcacctttcttctccaccgccgatcgaggtccctctaatcaatcggctgcgagcgctgtccgatcatgtggagcacgtggtcgtcgagggagcatatcacgggagcatccttgccctgggacagatggtctcccatttcgatgaaatcgactctggtgtgatcgcggaaggcttcgccgccggttgaagtgacgaggagctgggtgccattgaggtgcaggtccatccccacgcccggtcgatcgtgggccgggtcaatgtgaagttcctcctgatcgacccctggagcctgggaccactcgccggtggtccgtccacccattcttagtcggcgttcattgtaatgttttgtaatgactatctttagatgtcctgactgtgatcttatgtataatattatctgttttaaactctgcatccttcctttttcctt

SEQ ID NO: 39422 - DNA, 2299 bp, Zea Mays
cgcgccattttccatccgttaattaacgccgagcatgacaatatacgtctcgtcgttcaccatcagcggaggcggccccggaacgaggtgctgactggtgagccgacgagcaagacgacaagagccacccccacccaccacatctcagaccacaaacgccatcatgcaccgactctgatccaatttcacacgcatactagcgccgccggtagcagcaccggcagccgcgttcctctccgccatggatcccgcgaacagcagcgcgggcgccgagctcgacgacgcgtccgagtggcgcacccgggcgctgggcggcacggagtacagctggctccgcgccgtgccgggcggcaccggcaccacgctgctcgcgctccgcctatcccgcggcgacgcggccgaggcggcgctgcgctccctgcgggacgcgcaccccgtcctccgcgcccgcctccggacctcttctccctccggcccgacgctggcgttccccgatccggcaccgccgttcccgctggcgccgctcccggccccgggctccgcgcccgacttccacgcgctcctcgagcacgagctcaaccgcaacccgtgggccgacgaccccgcgtcctccgacgacgccccggtcctcttcgcgacgctctacgagctcccagccgccacgggcgacgcggcgctgttcgtccggatccacacggtcgcgtgcgaccgctcggcggcgagtgcgctggccagggagctcgtcgcgctgctggccggcgccggcggcgaggagcccgacccggaggatgcggcggcggaagcggggctggaggcgaggatcccccagagggacacctggaagccgttctgggcgcgcgggttggatatggtgggctactccatcaacggcctgcggacgtccacgctgccgttcgtggagaccggcacggagaggtccacgcagatgctgcggctcgggctcggcctcgacgagacgacgaggctgctcgacgcgtgcaaggagaacggggtgaggctgtgctccgccgtggccgccgcgacgatgctcgccgcgcggcagtcgaagccgctggagagcggccagcaggagacgtactctgtcgtgacccttatcaattgccgcaagtttcttgagccagtcttggaggaccgcaacgttgggttcttctactccgccatcaccaacacgcacacgatccacggcggggaagggctgtgggagctggccaagagatgccacgactcgtacaccagcgccaagagcaacaagaaacacctcaccgacatcaacgacctcaacttcctcatgtgccgggccatcgagaacccccagctgacgaccgccggcgcgctacggacggcgctcgtctccgtgttcgaggaccccgtggtcgccgacgtggccgaggtgcagagcaaggccggcgtggaggactgcgtctgctgcgccaccgtgcacggcatcggcccgtcgatcggcgtgttcgactcgatcaaggacggcaagctggactgggcgtgcgtctacccttctcctctgcactccaggaagcaggtccaggagatcttcgacaaggtgacgcagattttgcaccatgcagctgcggctgaggaaaattttggagactgcacctaacgatgtcgtcgggagctttagactgtgttcaacggtgtgcccttggctccccctcccctaccactgtagccgatttaggggctacagtgcgcccctaaatccttcaccggcttcctcctcctcctcctctcccctcccgattccttctctctcccgctaaatggatgggcacgctacgccggatttctcccccgcggtcggttcgttgggccacacaatcgcgcggtcggaaaactccgcggagggcaaaggaggcgaagcaagggcgacgtatccgccgccggagaaggtagccgtcgatccgcttcattggaacttcaaggtccacccgcgatgagcaaagcaggcggtcgatccggcgcggcggtcgggtatggcggccgcggagcagctgaaggagctgggggagaagctgcaggcggtggtgccggctcctgcggatgaactcgccaagctcctcgaggtagttctggttgatttggttcaagatgacggaggaaaaggtggggcggatcttcatcggcgggctgtcgtgtaacaccacgaagcgcacgctcgagcgcaccttcggtcagtacggcaaggtcatcgaggctcagctgctgattcacagagactgcagtcagttcaatttctgcatgttaggaagttagcaaagtt

SEQ ID NO: 39423 - DNA, 2787 bp, Zea Mays
ccaaaaccctcgtcactccatcctcgtccctcccggcgccggaaaaaccagttcgcgtccatcctcctcccctcccacttcgccatggaccccagcttccggttcgacccggacagctccgacgacgaggcggcgggtgctccaccgcggggcggcccggtgcagtcgccgtgggagttctcgtcgtacgcggagtccgtggcggcggagcacgcgcgccgccgcaccacctccatcgacgagaaaatctcgctcctgcgccaggaacgcgggaatcccgtcgttcccgatgactcggggagcgacgtgagcggcagcggggaggatgatagcgacgacgaggagatagagggggagagcggtgacgaggaggacgagctggaggagagcgaggatgagggcggggtcgaagggggcactgatgacgaggagattgaggggagtggcgatgaggaggcgatcggcgatagggagggcgatgaggacgggggtgacgagaagggaggaggcgagctgggagaagaggatgatgcccatgaggaagaagatacggtcgatcagaatgacacgagtggaccagttgatccttctaattttttctcttcttcggatcgggcatcatttcatgcaaattcattccttgagcttaacttgtctcgtccgctagtgcgagcttgtgaagcacttggctaccagaaaccaactccgattcaggctgcttgcattcctctggcattaactggaagggacatctgtggtagtgctattacaggatctggaaagctgctttctctttgcctgtgttggaacgtctactttttcgtccaaagcgtgtacctgcaattagggtgcttattcttactccaaccagagagttggctgctcagattcatagtatggttgagaagttagcccaattcactgatatcagatgttgtctcatcgttggaggtctttcaactaagattcaagaagttgctctaaggtcaatgcctgacatagttgtagcaacccctgggcgcataatagatcatctgcgcaattctctttctgttgggcttgaagatctagctgttgtgatccttgatgaggctgatcgcttgcttgaattgggcttcagtgctgaaattcaagaactgattcgtatgtgtcctaaaaggaggcaaactatgcttttctctgctacaatgacagaagaaattgatgaacttgtaaagctttcactaaacaagcctgtacgccttgaagctgatccttctctgaaacggcctgcaacattgactgaagaggttgttaggatacgacgagcacgtgagtcaaatcaagaagctgttcttcttgcactctgtttgaagactttcaagcgaagtgttatcatttttagtgggacaaagcaatctgcacacaggttaaaaataatatttggtctctctggcatgaaagcagctgaacttcatggcaaccttacacaggcccagcggcttgaggctctggaacttttcaagaaaaaagaagtagattttttgattgcaactgatgtcgctgctcgtgggattgatattgttggtgttcagactgtaataaatttcgcatgcccaagagatgtgaaaacttatcttcatcgtgttggccgcactgcgcgggcaggaagagaaggctatgctgtgacatttgtaaccgatgatgatagatgcctcttgaaagcaattgcaaagaaggctggttcacagctgaaaagtcgcattgttgcagagaaacctgtggctgagtgtgcacgactgattgagcaactagaaggccaaatttctatcatcattcgagaagaaagggtggaaagagaagcaagaaaagctgaaatggaaatcgcaaaggcagaaaatatgatagctcataaggatgagatatactcacggccaaagagaacctggtttgctactgaaagggagaagaaacttttggcagcagcggctaaagaatctttggatcacggtaagagtacctctggagttattagtgctaagaaggccgaagaccttcgtctaaaggagaaaaggagacgagaacatgagaagaatctaccaaggaagaagcgccgaagattggaggcccagcgtgagatgttggaagatgaggatgacgagaaaacaaaggaaaatgatagagggaagcaaccaatgaaaggccaatctctagtggatgctgcttaccgaaaggcaaaatcattgaaggcagccagcaaacgggcccctggtgcaaggaaaggaaagaaagagaagaatgaaaggcaacattctgagaaggctccgaacaggcatgaagagatgcgtgacctgttccaaaatgatatgagtgaatggaaacagggacgctcctcaaagaaaaataacaaatttgcgcccaaaaaatcaaggaactcttttaagagcaaagcaaggtacaagcggaagtagaagactcggccatctccgggtttatattacattcccttgtttcaattttgactgactgatcctgaagaaatatctgggatccagatgtttgcagttaattcaagtttgctttaaacatattctcatatcatgtattgaaactcaccgttttctggggtctcttatgatctcgcgaactgtgttgccgttttgtagttcgtaccatcttaaattttagggttatttggtttctatagacttagcttttaggacccgtttggtttgagctattaaagagtagtcccttcgttttagtcccatttagcatataaattgccaaatgatatgactaaaatag

SEQ ID NO: 39424 - DNA, 1862 bp, Zea Mays
ggaagcaatcgagagcggcaaaattacagatttctccgactacgactgcctgcgccgccgccagccccttgcgttgagcaatatcctcgtcctcccgagagcgatccccgtcgcccctgtccgcggccgccgaggcgccgactcgccggcgcggcgccgtcttccgccactgcgccctaccgcccaggacgaagctccagctccggcccaccgtctccctgccggcactgccgcgccgagggcccgagctcctcctcgccccatgcccccgcggccgccctgcccagctccgccccgcgcgttcgcggctctgcgcccccgccaggccgagcttcgcacgttcgccgtccgcgccttcggcttccgcagttcgcacagctgacagcagtccattcaccgtccgcgcctccggtcaccgcacagtacgacgcgcttccgaggaggttagagcattggctgctatggcgccgcctcacgtcaccaggaagaagggaaagggcgccggcggcaagaccgacctgcgtcccgaccgtaagcagttcaaaaggcaccacaaggaggatgcagcagctgagcagggggatggcaacggagagccgggttctgacctagaggataatattagtaatacatgtcttgaaattgctaatggaactgaagcaaatgctaaaaagagtgataaacagttaaagaaggaagcaagaaaacaaagggaactagaaatcagtgctatggaggaaagggctttgcaggaagatataccacaaactccagatgattttgagaagttggttaggagctccccaaatagtagttttatctggataaagtatatggcaactttgttagatcttgcagatgttaagaaagcacgtgcagtagctgagagagctttaaaaacaataatccccagagaagaagaagagaaactaaatgtttgggtagcatatttcaatctggaaaatgaatacggtagtccaagggaggatgctgtgaaaaaggtattccaaagagccttgcaatattgtgatcccaaaaagctgcacttggctcttcttgcgatgtacgagaggaccgaacagtatgagcttgcagatgaacttctagacagaataaccaaaaggttcaaaacttcctgcaagatatggttatgccgcattcagtttgccctcaagcaagaattcaaatgtggggtgcctgaagaaggaagatccagatttgaactaatattgcgggagtacccaaaaagaacagacctttggagtgtttatctagaccaagaaatccgccttggtgacgtagaagttatacgggcattgtttgagaggagggtggcttgtctgaccctacctccaaaaaagatgcagttcttgttcaagaagtatcttaacttcgagaagtcactgggtaaagacaacgaaagaattcagcttgtgcaacagaaggcaatcgaatatgttcagagttcactgccgtcacaagacaactcttgaactacatggagacttaataagcccacaaacaatcattaggaaatgccagtcgtactgtagatgtgatctctttgatgacattattgtgaaaaggtcaatgtaaaatgtgggctattcaaaattttgtttgaaaccgttatataagttatgaggcattaagtctagtatgtcatgtttcacccaatttttttgaaaggatctatcctaagccggatctggttcgaatattgaccttttctatctgtggtattgactgttgaggcacaattgaatgggtaactgtctgtgctactcctagcttagaaagcacaaaatactagaatatctgtctgcgcttaatccctttattaagggtgcgtttggttgggg

SEQ ID NO: 39425 - DNA, 1985 bp, Zea Mays
cgaggctgtacgcgctctgcgtcagcctgctggcctggaacaccgtcgtctactcgctcacgttcctgagtgctgcatctgccttgcgtagtacggggagaaggaggaggttcggcagctgccgtgcacacacgtgtttcatctcaagtgcatatacagttccagctaacaagggaaatcaaggaagaattgatctttatattagcaggcggatgcaatcactaatcaaaaccacgatgcaaggtaacctaaatggattttaaattttattttggattgttaaatctttatttctgactactattgttttatgtcgtggatgccctcgtgaggttctacgccgacgccttcaggagggattcacagaggccatggtgaggatggccagcttgagtcggctcaccgggagcagcgcgagatccgctacaactaaatgataggaggtttcgctgccatttgcagcgactgtgttccagttcgaccgtttggggaaaaggcaaggaaacaggatctgtcacggaaggcgattcccatttctcagtgatgtcgatgtcctgtactcctgtatatttggattcaacaatatgccattagtatgctgtcaagcgtcctatttgcaagagataaatggcttacgcccgaggggcttattcttccttatcatggtatgatataattatcatacaaaaatgttacactgcttttacagggtgtacctcatctatttgcttgtacaattcatcttactactgctttgacaaacattggtctgctctgctttggtctgtgctttaggattctgtttcattgggagaaacaaatgcccttgcttactttcattataactgtgctatttttttgatccaatgttgttctaagatcaagaagtggaatacttgttctaagggtcccaagttgggtggtggtggtgggaagcgttttcaggtcggtcgtgactttggttatccactgaaaagatatgcttggtggtgctttcttgtgttgaagaacaagtatcccacggaaccacaaccgtttgtattatctggtgatttcctacattattagctggcctaactaaaccatgcgctcagaccctaaaccagctgtaagtctgtaacttaaaagcacagtgcactagcggaatggggttccttgctttttggagcgtttccccagtcagatcggcggcagggcaggtcacgtggacggggctccttgttgctggaactaaataccgtggagagtttgaagtgagactaaagaaacttatggaggaaattaagcaaaatgaagacattattctctttattgattaagtgcacacactgattggagcaggtgcagcagaagtgcattggtgccacaacactggatgagtataggaagcatatagagaaagatcctgccttggaaagaaggtttcaaccagttaaggttccagagcctactatggatgaaacaatacagatcttaagaggacttcgtgagagatatgaacttcatcacaaactgagatacacagatgatgctttaattgctgctgcacagctgtcttatcagtatatcagcgatcgttttctgcctgacaaagccattgacttgattgatgaagctggatctcgtgttaggctgaggcatgcgcagctccctgatgaagccaaagagctggacaaagagctgcggcagataagcaagcagaaaaatgaggctgtacgtggccaagattttgagaaggtatactgttgtttggcacagcggtgacaaagccgatccgctcccacctctctagcaacgtcgatatggttaataccaagcattatgttgtttccttttgagataaatattttgttactgattttaccttttgtctcctcttcttgttttttgttctagaatctgtagcaaatggctaacgatgaggatatccattactttgtttatgacaataaaactgatatgttcaagattccgtagcaacgcac

SEQ ID NO: 39426 - DNA, 343 bp, Zea Mays
acgtatgtgagctcactcttgctgtctcacacccccccccacaggagaagaataggtggtcgaagaggagtcgcctaacactaaggctttcgacttgatctaggtggtgtctcctagtcagctttgtggcgccagggaataatatttagttcgctttattttatcatttatttttgtaagacttccgctatgtaataattacattgataatatttatgacatttatctctatgcactctgttattatatgtgttgtcttctctggcgcatatatgagatgcacccagctttgttccttaaatccgggtgtgacagtagatttcaatcttctttaaaacttcat

SEQ ID NO: 39427 - DNA, 1996 bp, Zea Mays
cagaggcgacggtgggatcgtgccaacgaagcacaacaatgggtggcacgcagcggccgccgacgggcgatgacgcgcctccatgaacggccatgagcgctgacgcttctctcgcctcctccaccaacaacggattctccacaaacggccctggatccgttcgtcgctgctctcttatctgctcttccatccaagcatgtatgcccacccccaatcggaccatcgctggcctcctgcagctaggccgccatcacctccttcaagaaagaaaagccaacgttcccatagtctgcctccagaactcccttgatgaaaggactgccaagttctactgtaattttgtcttgtgtcctatcaaattaattctgctttttgcaggattttcagtgaactcctataatattcattggctgtcgtctctgccattggcgtgcacatacgtgtacagttgggggtcgagcagccagctgctggacgaggatggatggatcggaggatgcatgcatggatcgagcagcggggtgtccaaatcgcgcgcctgtgagcggctcacaggatacgcatcaccggcggggcgttgtgccatgacaaagctccagggcctaacctcatctctcctgtcgcaggacgaccactccatctgtcgtcctccttcatctgtcctatttgtttctctgtttgaacagctaagttttgtggaccttgctggttctgagagggtgaaaaaatctggttcagcaggaaagcaattgaaagaagcgcaaggaaagcaattgaaagaagcgcaaagtataaataaatctctttctgctttggctgatgttattggttctttatcttctgatggacaacatataccttaccggaaccataagttaacaatgcttatgagtgattatctaatgtggattgtctacaaaaaaaaggaaaactataaagtcttcatttttcactttcttgtcagtatttacgaacaaacaaccattactaacgaatataaaaatgtattgttgtgttctacaaatgcttaccaacagtttgaacaattaaggtcaatgttttttgtatttttcttagaaattgtttctgttattgattagttaatgtctataatactttgatggttatgtcttcatccatattaatttgtttgatattattgaatacgaatgaattagtactatttctaataagactcgattatctaatgcgtgtttattaatacttttaagcttaatagtttaatcccaactgcatgtatggtttttcttttggaaaactaaaaataaaataaaatgattggtagttgtggtagcgaagaggaaatgtataatttaatcccaactgcatgtatactttaacgtgtgtcagtggaagggttctagcagggattctcttcccttccgccgaaaatcaccgaggatctattcagggtggaactaactcacatcgaggtttgctcgagctcgctcagcacatagctgaacaaggtccggacgaccgctgttatctgcgtacactggtccaaattatctgcactgaccagaagaggctcatctacgacacgaggacgatgaaggagtgcaacattcaggattttgacttggagaaggcccagcttgacctaaggcatggctacaacagggctgagatgaagttcaatgtgaatcgtgttgataacatggaatcagtttttaaagaaaatctttgtattctcattttaattttatatgcagcccctcaaatcaactttggaacccaaatggtcaagcctttggacggagcaaagggttttatcctcctatataagaagttcaaatggataaacaataaaggcaatgtcaaattttcatgggattctttggacatagcttcactgccattaacaacaccatttgtaattgcatattctacaaaaaagtggctgagggacccaggagttgtggggcgtcacagataatcggcatggaatttagtagtttataacagtgcctga

SEQ ID NO: 39428 - DNA, 3384 bp, Zea Mays
gcggggtgctggcgctgcgccgctgccaacctgcccccactgcccgtgactgctgactagtgactagtctctcagtagccgctccataaaatggggccgagcgcgctcccacacccagactagttccgctgaccgcttgaactctcctccctcgcccgcgcgtctccgccgccccaccggccaccgcccgcgcctccgccgcggcagctgtccaaaagctgaaaatagatagaatcacgagggggggattgcctagacaacgatccttagttaatcaaacacgggctgccagattcgggggggcgttcgcgttcctaccctctcatcactctccccgtaaaaccccggctgggtttatctcatcgccgccgggcggcgagcggtgggaggcaatggcagggtgggggccctccaggctgccgacgtgcgggccgtggggccgcggcgtggcgctggagagggagctgtcgcgggacggcagccactacagcatctccagcggcatcctgccgtcgctcggcgcgcgcagcaaccgccgcgccaagctcaggcccttcatcgtctcgccctacgaccgccgatacagatgctgggagacttttctcataattcttgtgatatactctgcatgggtttccccatttgagtttggcttcattcggaaaccggcgggcgccctagctgcagtggacaatgtcgtgaatgcgttcttcgcagtggacatcatcctgaccttctttgtagcttacttggatagaatgacatacttgcttgaagatgatccaaaaaggatagcttggcggtatactaccagttggtttattcttgacgtggcctctaccatcccaagtgaatttgctcggaagatactgccaccaaacctcagatcatatggatttttcaacatgcttcgtctatggcgtctccgtagagtcagctctctctttgctagattggagaaagatagacatttcaattacttctgggttcgatgtgcaaagctcatatgtgtcacactttttgccgtccactgttcggcatgcttctactatcttctcgctgacaggtatcctgacccaacggatacgtggattggcaattcgatgccagattttcatcagcggggtttgtggattcgatatgtagtatcagtgtattggtcaatcactactcttacaactgtgggttatggtgatttgcacgcggagaacacaagggagatgatattcaacattttctacatgctattcaaccttggattgactgcctatttgattggtaacatgaccaatctggttgtccatggcaccagccgtactcgaaaatatagggatacaattcaagcagcaaccagctttgcactaaggaatcagttaccaagtcggctccaagatcagatgatctcacatcttagcttgaagttcagaacagattcagaaggtcttcaacaacaagagacccttgatgcgcttcccaaggctataagatcaggcatttctcagtatctgtttttcaatcttgtccaaaaagtttacttgtttgaaggggtgtccaatgacctaatttttcaactggtttctgagatgaaagctgaatattttccacctagggaagatgtgatactgcagaatgaagcacccacagacttctatattttagttactggtagcgcggagttgatagagttgcgaaatggcggggaacagatggctggagtggctaaggcaggagatgttgtcggagaaattggggttctttgctataggccccaactattcacagttcgaacaaaatcattatgccagcttctgcgtatgaatcgcactgcctttctcagccttgttcaatccaatgttgcagatggaacaataataatgaacaaccttatgcagttactaaaacagcagaaagacaacagtgtaatggtgggtgttcttaaggagattgagaacatgctagcgcggggtcgtctggacttgccaattaccctctgttttgcggtaaataaaggagacgatttaatgttacatcaacttctgaagcgtggtttggatccaaatgaatcagataacaatgggcatacagcactgcatatagctgcttccaaaggagacgaacaatgtgtcaagcttcttctagactacggagctgatccaaatgctagagactctgaaggaaaagtgcctctatgggaggctttatgtgaaaagcacaatgcagtgatagagctgttagtagagagtggtgcagagctatcatctggagacacggccttgtatgcttgcatcgctgttgaggaaaatgatgctgagctgcttgagaacgttatccgttatggtggcaacataaacaacccaacgaaagacggaaccacaccgctgcatcgtgcggtctgtgatggaaatgttcagatggttgagttgttgctggaacacggagctgacgtcgacaagcaggacagtaatggctggtcgccaagagatctagctgatcagcaaggccatgatgacattcaggctctcttcaaatcacgaaaagcacacaggaagcatgcctcaaatggcagagtggcacctatgctgatagggagattcaacagtgagccctcgatgccagatatgagccatgaaaacgccagagtacgcagcgaagttgttccgcagaagctcctccgaaagagggtgagtttccagaattctcttttcggcgtcatctcttcgtcccacgcccaccaggacaccggccgtctgctctcgaaaggcctcgctggaacagagggtccaaattgccgtcacgactccctcatcagggtgacaatcagctgccccgagaagggggggaacgccgcagggaagctcgtgcgcctaccgcggtcgatggccgagcttctcgaactaggtgcaaagaagttcggcatcaagcctggcaaggtcctgacagttgggggtgctgagattgatgaggtggagcttatcagagacggtgatcatattcttctcgtcagtgatgaatgggtgccagatgttgagcaaattaggccttaacaataagtgagccagctgtggtgctcttattgcaatttgacatgatatggggaaacatgcccctgtgaccctgtgtgcatcagtgcatgtcccccatttaaactgaagtgtagcttatgatggttttgaagctgtaggatgtatccagcttggaaatgaatttgtagtcagctggtctgtatgtagtttcgtcatctctttccatgggaagggattcacaaaatgtaattacatgatttcttttttttcctgtctttagatcaagctttctctggaagtgagaaatattcgtgagtcatgaattttgagatattgatcctatcagttcattttagttgct

SEQ ID NO: 39429 - DNA, 3465 bp, Zea Mays
ctccgctggacgctggttggtggttgccttcgctcttcatccttcaaccaccaagccttggcatcgttctgccctgcgtgtggcggcggtccctggagaggagacaagccgactggcatgcaggcgtggtagagctctcacttcccctcagccaccaatgctaaagtgcgcataagctgctgggagccgatattgcatccgtcgggagcttggcaccaacaaaagctcgagttttccctttttcagcttcggtctggtgcgtgcggcgcggcgcctcccggagatgatggcctcctcgcaggagaaggccacgtcgggtgtcctgaggaacgcggcggcgctgctcgacgaaatgcagctcatgggagaaacgcagggtgcgaagaaggtgatcaactccgagctgtggcacgcgtgcgcggggccgctagtgtgcttgccgcagcgcgggagcctcgtctactacttcccgcagggccacagcgagcaggttgctgctaccactaaaaagataccgaattctcgcatcccaaactacccgagtctcccgccgcagctgctatgccaagtccacaacatcactttgcatgccgacaaagaaactgatgagatttactgccagatgaccctgcaaccgttacactcggaaacagacgtcttcccaattccaactcttggtgcctataccaaaagcaagcaccccaccgaatacttctgcaaaaatctaaccgcgagcgatacaagtacgcatggcggcttctcagtgccgcggagagctgccgagaagctgtttccgcaactggattactcaatgcagcctcctaatcaggagcttatcgtccgagatttgcatgataacatgtggacgttccgtcacatttatcgtggccagccaaagcgacatcttctaacaactggatggagcctttttgttggggcgaaacggcttaaagctggagactctgtcttatttatcagggatgagaagtcacagctccttgtcggtgttaggagggccacccgacaacaaccggctttgtcttcatccgtcctgtctactgacagtatgcacataggcgttcttgctgcagcagctcatgcagcatcaagtggtggctcatttactatttactacaatcctcggacaagcccgtcgccatttgtgattcctcttgcgaggtacaataaggccacgtatctgcaaccatctgttggaatgaggttcgcgatgatgtttgagacggaggagtcaagcaagcgcagatgcacaggtgctattgtgggaattagcgactatgacccgatgcgatggccaaactcaaagtggcgcaacttgcaggtagaatgggatgaacatgggtatggagaaagacctgaaagagttagcatatgggatatcgaaactccagagaacatggttttctcttctcctttgaattcgaagcggcaatgtcttcctagctatggagttccgggcctacaaattggatctgtaaatatgtcatcaattccaagggcacaaggaaatcctatcggtaacttgcagcacatgccagggatgggctcagaattggctctactgcttctcaatcaatctggccagaacatcggaagtccaatcgcttgtcaacaatcatcattttccagcattattcaaaatgctaagcacagctatttccctccaaagacgtttggtgcttccactgcttcaatgaagcaagaaagcatgccttcgactgaagcccagccacagttgaatgctcttggtattcagagaagtgatcgagtaagctgtgaagttcagacagctagtgattcaaatcctgcacaggagatgagtgttaaaccaagagcaccaagaagcacagattcacactcaagccaaagcatttcggatcaaaacagcaagggtgagcctagaacaaaaactcgaaggagcaagaagagctcgtatcagaaaaccatttcagataaatctgagctttgttcagtaccttctcagatttgtgacgacaagaagcatggttcagagccaagactggctgactgtgaagccgaacaagctacctgtgggaataacgaagaatcatctggagcacttacacatggtgattttgctggagagctccaagttcagcagcaggttgaacagcatgaactacttgcgccaccaaagatagaatcatcaaagtcacctgatggagggaagtccgtcagttcgttcccaaaccaagggtgtatcccacagttctttgagggtctggactggatgattccaccttcctattaccaagactccaatggcatccaatcagttaccgcgtcggataacatttttaatccatctgaaggtataccttccaccatgaacgctgatgccttggatgcgtttcaaacatcttgcctttctgagtgctttcctagctccattcaagagttcatcggcagtccggatataaacacactggcatttatgtcgcctgagatgcaacaattggatgccggcagcaacttgccgagcacatccaactcctatgtgcagatgagtttctcggaggagagccacagcgcatccttgagtggccttcacatggaagccatccatataaacagctcgtcatgctctcagccactggcgacggggagcttcgatgcaggggcgttcccgaaactgtcaaacataagagaatgccaacccttgcctctgcaagagatccacaccagttccatgggaacaccttcatgcagtatggacgcggcggcagagtacggcacggatagaagtgcgaagcaaatgaaaccaccggtccggacctatacaaagaagttaggatcagttggaagatgtattgacgttacacggttcagagattaccatgagttgaggtcagccattgcgtgcatgtttggactccaggggaagctggaacatcctggcagttcagattggaagcttgtttatgtcgactacgagaacgatgttcttctcgttggagacgatccatgggaggagttcatcaactgtgtgagatgcatccggatcttatcaccttcggaagtacagcagatgagcgagaacggcgtgcatgtcttgaacgactgcatccaaatagcttagcaaagtcacggctgtatgctctacagcctgcacagtgtaggctcttcttgtaaataaaaatatacagcatgtgcgtcaaattctctggtcgctctgtttcttttgtagcacgagaagaaacaattacagatgtcaacatcctgccaatgccatgtgtgtttctttcaggagtcaaattatttttttacgaagctgaatcgagctaacggacgtgaggaaattctgtaaaacaactgttaatcataaattctgtaaaagtatggtgtcgtggtaggtggggcattaccttagccttccggatgagctggctcgacaacagaccattccattcatagtgagggggcggt

SEQ ID NO: 39430 - DNA, 2756 bp, Zea Mays
agggtcacacccgcaaagctaccgccgcagtgccgcacggcgactccgactctgtctcctgcgcggctccagctcaccctctcctcacatcgaggcggaccggcccacgtcgccggcaaccgaaacgtcggccgtagcctcgcacctccggcatcggcgagcgcgcgcgcccgtccggcggcggagatggcgctgcggcacctggtcacgggccagaacaactgcgcgccggacggcgcctcgtcgtccaaccccctcaacgccctcgccaacgccttccttggccagtcctccaaggcgcagtcaataaaggaacttcctggttctgttagtgttccatctacatctggcttcagcgcgcctgctcccttgtcaaacatccctggttcagaaaatgagttcaaacaagaccagcgaccttttgtgcagggctctgactttattcatggtggtcctgctaatgattggattaagtcttttcggcctccgggggttcctgaacttggtggaatagaagcacactttccagattttgagcaaatttataacaatgcaggaacaacctttcagccgccattggatggtccaccacaaagagtgttgtctggtgtcttgcattcctttctcacaagtggcccagctggtgtgccatttcaacctcttccagtaccagctgctcttggtttatctgaaagtgacaaacagtgcatacgtgatcgtagctgcataatggcacggcatattttttctgaccaaccggaagaatatatacaggctcaggtcaatactttgctgcattcgcttgatatagacaaccgtatgagaggacctatgcatggacaatacccagaactacaggagtactggaaccagtcccaaagttctatgggtcctgccctgatgcataataccgctgataaatggattactgagtttggcaaacaaaataataatccggaaaattgggcaaagtctttcgaacaacaatatggccccaatgggtgggcctctgagtttgaacagcatcagtctcagatggccatgggccagatgggaggagtgaacatggccaacctggctgctatggagcaatcccgaatgcttgcacaaactttagcaagtaataatgatcccaagtttcaggtaaaagaaggtttagcatcccaatccagtggctgggctgatgaatttcaaacacagtacaaagctaatgcaaactcatgggcggatcagtttgcacgtgaagagctttcacaaggggcggataagtgggttagtgagttctctagtcaacataatcaaggtgcgctaaatgagagctgggttgatgagttctcgaaattaaatgtcactgatgaatgggcagaggaattcagtggaggtggttttggcgaaagctctgctgatccgtgggtagatgagttccaagaacacttgtcatctttcaaacaaagttcaggcgcctctcgaggggtttatgtttattctgagaacaacccgtatgttggtcaccctaatccaatgcaagaaggacaggagctcttccgcaagggcctcttaagtgaagctgttcttgctttagaggctgaagttttgaagaatcctgataatgctgaaggttggaggttgttaggcataacacatgcagaaaatgatgatgaccaacaggccattgcagcaatgatgcgtgcgttggaagctaatccgacaaaccttgaagttcttcttgctcttggtgttagtcacacaaatgaattggagcagggagaagcattaaggtatctttataggtggcttcagaatcatccaaaatatggtggccttgtccctccgcagtcaactgattcaccttatggtcctgatgttgttagattgtttaatgacgctgctcagatgtcacctgaagatgcagatgttcatgtagttctgggagtcttatacaacctatcaagagagtatgataaagctataacttcatttaagacagcagtacagctcaaaccacaggactactcactctggaacaagcttggtgcaacccaagcaaacagcatccagagtgctgatgcaatattggcgtatcagcaggcactagacttgaaacccaactacgtgcgtgcatgggcgaacatgggaatcagctatgccaaccagggtctgtatgaggattccattcgatactatgtaagggcagttacaatgaacccaaaagctgacaacgcttggcagtacttgaggatttctcttggcaacgcttcaagagctgacatgattgccgcatgcgacgcccgcaacctcgacgctcttcagaaagagtttcctctctgagtcctccctagctttctccagcagcgatctccatggaaatggaattggaggccagtaacatttttgtatttgcctgttgattcttctgtttttattttgcttaagtgttgttgggtaaatgtataggaactaggaagtgagggggaacaacatcccgtcgatgtgtgaagtatcattgcaagaaggcaatagtggcaaagggggaattatacatctgtaagtacacaggaataaaggaatggttgagtaataaattgtttttagggcgaaccactgcttgttttataaagttaatataaaaaatgcaatgcgggtgcttcttggtggtggtgccagatcgagtttaactgagacgatccaaattaaattccatggtccacgccacgggtcctgctgggccgttaatatacgggacaacctccgctggt

SEQ ID NO: 39431 - DNA, 1047 bp, Zea Mays
catctgatgaatcagcttgattcgtttagtgataagcttgtaaagagaattcttaaagctcatgaaccttataaccataatgacaatactaaatgttctgttgtttctgagagggtatcatatgaatttgttcctgaaaggaaagcttgctcctcattaaacaaatcagtggtacagaatgcaagtggttgtgatagcaataggaacaaatgtttggcatctgggaaagctgtgtccaagaaaaaagatcagagtaccaataatagcttggataaagaaaatatgtcatcttgtggttctggtggcacaaaggtgtcatctccaggctccttgggtttagctagggaggttgattctggaaattgtctctccctcttggataaccggaattgtcctatgactaggacctcaaaggcaaatcacaacaattgtaggcaaactgcgtagttccttcaagaaaggtcatagcaagggtttatctgaagcccagaagcatgaaaagtcgcttcctggctcttcaattgcatgcagtgatattgaagatgccggtgattgcaatgataaccttgtgaaagcacctttcatcaaacaacgtaacagccaactttaagaaaaagggtaagagaacactggagttggtgaatttgcagaatagctcagatttaactgatgttgtcacaaaagataacgttcgacagattagagcaaggaaggtgccagtgtaaacagctactcacatatgatcttggtatttatgtaatttccgtccgatgtaaataaatacttagttctgaaatcatttatacatgcatatccacttgagagtactgttataatggtaggaatcttggtcccggttcaccatgtaacattataatttaaatagggatgggcatgagcctcttaggctatttctagtagatcctctaccttgtatcctatttcaaatttttctgcaaacactgtcagtgtcatctacaattttgtgctccctattttccatggtctacttgagacagttttatgagtttgtgaaggcttatctaa

SEQ ID NO: 39432 - DNA, 1185 bp, Zea Mays
ttcacctcctgctcgcccgcatccgacttgcccgccgaccacctcatccctcctaccgtgtagccctagccccaaccccttggtggcctagctccgtcggtcggcggccaaccgtagcagtcgctcgtcagcaacatcacccagccctagcctcacactgctctcaccagcagtcgccaacaacagcagccagtggcagtgagcatccgcgcacagcacagctcccgccttgattccccgccctccgctcgcggcctcgcgctccagtcactaacaggtagcatcagcaagcagtggcatcgaaggcgtggagaccggccagccgccaacgccctctgtagatcgctcggcctctccaaacgaccagggccagaagtagtgctagtcaacatttcatggaggaccactgagggtgaactatgggccaccgccacccatggctctgttgaggaggtcaacaatgccatatcaaacctgatggcatcataggtacgctagatgattatgcgatatgaagggcatgaaccaaactgaaccacaagatggatgatctgacccagtgccaggatgagagatgctcaccgagtggtcgtcgtttgacaacactagcttagtgttattcgaggcaactctttcacatggatttttaaaatctgtagtgtttaaagaaccagaaatggatttgcttgtttctaattcattttgcttgttggatgtcgatatgcacatgcattttcagtcagcttatgatcaagggtacaaataagatcatgccaactctactccatgtactgctggtgtcacagaaaagtggaaaaaacactgttgaaaaaagaggccattcagaatttagtgaagttcttccaagattgcccagaacagttttttggccatatattggacgctttcttgaagataataacgaaatcttctaggctaaatacaacaatggctaccaatggtttaacaacattgctcattgcaagacttgaccattcaaatttggtggtcgcaaaagtgtggagacttgaattcatataatgtgaggcttaacattagtgcaaacagttgtattttagtttagatttagagcacacttatgtatgcgttgtttgacaatgcttatttatgatatattgaatggtacttatttatattatattaattataatgttgttcaatata

SEQ ID NO: 39433 - DNA, 2042 bp, Zea Mays
gaaaaggggggaaaagaaaaaaagaaaaagttcccgtcttcggtcttcccaaacccccaacatccatgatccatctcatcgacaccccctccgctctccttatcccttccattcgcccaaacccccgccgccgtgacccctgccagcccgcggccttcccctcgttctaggcttcaactgccggcctcgtgtcttctgcgcgtccctgtggcagggcaagtgaagagagagatggcgtcgccaataccgcgcgagtgggtcgggctgcagcagtttcctccggccacccagaccgagctgcacgagctcctcggcaagctcaaggaggaggatgtgagcacattgacaattctggtgatggggaaaggcggagtggggaagtcatctactgttaactccatcgtcggggagaggatcgccactgtcagcgctttccagtctgagggtctgagaccgatgatgtggtcgcgcacaagggcagggttcaccttgaacattatcgacactcctgggcttattgaaggtggatacattaatgagcaggctgttgacatcattaagagatttcttctgggcaagactattgatgttctcctgtatgtggatcgtttggatgcgtacagaatggatacacttgatggacaggttataagagccatcaccaattcatttggaaaagatatttggcgaagatcattggttgtgttgacccatgctcaactctcaccacctgatggaatcgagtataatgatttctttacaagaaggtcagaggcacttttgcgatacatccactcgggagcaggaatcaagaaacgagaatatggggatttccctttgccaatagcattggtagagaacagtggaaggtgcaagactaacgagcatggggagaagatacttccggatggaactccgtgggttccaaaactgatgaaagaaattactgttgttatctcaaacgggagcaagcccattcatgttgatcagaagttaattgatggtccaaaccctaacaatcgctggaagatgttcataccaattatacttgctgtggagtacttcttggtagtaaaaggaatccggagggcgatccatgcagatatcgcaaatgggaaggtggatgactgggagcagcgttaccgggacttggttggaagcagggaccctgtggagcagaaaggttctaccacccggaaccgcaaagcctaagttggtgtagcagaaatgattttattcgtgttgtgacccactcgatctgcttgctgttccttttcctaattatgtgttgagggctttatagagttcgctggttctacttgaaaaataattgctcgtgttgtagttgataagaatatcttttccattttatgatgcttggccctcttcgcaattttgaatattgttatcaaacccctgctattatgtttagcaagttgttaaatagctattggagtaaaaattagcatatttaggagtagttcagttttgaatctagttttggtatgcttgctcctgtcagaaaaggttggcaatggagtcaagagaagagggcgtcgagggcatagaaggttggtcggaacgacctatagtgtagcggtggttcaatggttaggagaaacttgtgttatgcatattggacctgactatctcgctgcacgagaaaggggaaaaaagagtgtctgattgtagcggtggttcaatggtaaaggagaagcttgtgttatacatattggatcttactatctcgctgcacgagaaagggggaaaagagtgtcagatttggttactcgctatacgggaaaaggaaaaaaaatgagaaaaggaaaaaaatgagaacatgagtgtgaagaaattgacatcaactatatttaagaaacatctatcgagttgctaaatctgaatagattgctaaatctggaaagtaaatgaaatttgatagtaagtaactaaatttaacaagtctatttagagaattattggagaagccttttttctcaattatttttaaaatttaaaatttagggagttatttagagaac

SEQ ID NO: 39434 - DNA, 3081 bp, Zea Mays
ctatggatatggatactttttaaaaacttttttacaggtgatttttaaactctattctattgtttattttaaaaagctaattgctcttgatatgggtgcattgattgttggtgccaaatatcgtggagagtgaggatagacccaaggctgttgtcaaagaagttacagattctgatgggcagaccattcttttcattgatgagattcacaaagttgttggagcagcgtccattgcaaggaagatctaccagaggcaagacattggtgtgggtggctttcagaagatttacggtggctgcacctcaagcgcttcggcaaggtggacagcgccaacaagtacgagaccttgctggaggtggtttaggtgatgaccgacctgaagttgatcatcaagcgggcctacatttcctccgacgacgagtggttcatgaacggtgagtggcgctgcctccccctgctgtctttaggaagttaagataggttaaaggaagatggaacctttctagggtgatgcaaagcctgacttttacttggattgtgtaatatttctattttctttcctccccctcccccgaacctgatgtgtgatgtgtgttgggctttgcttcgcctttctgcaggtactaaaccaacttttattcatgttgctttctaaatatattgtgtctatgtatctacatataaattatgtttactaagcatgtactgttttcgagtaccaggttatatacttatagagtgtggatacatgtttgcaatagctccagatcaattgcaaatgaaccttgtgagacatctcctctctggcccaactgcttcatactaagacacattatttttagtttactttttattagcttttttgcttacaatcctgtgaagtgtggtgtcaacagcggaatgatgtatccttgcaaataatatttgttaaaacattttgttaactttctaaaattgtcaatatttctttggttcctgacaaatatagtggtctatttactactgattttagagttttctatttactaatacacccatatagggcagagcttagttgagtctgccgtctgccctggttccacagacatgaaagagaactctatcaatttgtgaagataattttgtgaatcacttgaagttttgactgcttgtatcatacttgactgcctggtttcagtttatttattatcatctttgcgtcaccagtgctttacccatactactcttgaattggcgtaccttgattctaatgtaatttattttagcctaatttgtgtgaatcattgaatttatagaccactgctataggctgatccattatagctgagaactcattactcctaattgaagttaaaattgagttttgtagttttgaagttagttttcactgttgcagactgataatgtgtaacatcttatgagttttgattattgaagattcttcttggtctttattattaaagaatccattttgacatgtttaggtgttttttattacttatgttctgcaggttgatatcgtgattattcacggcattgtcttattggatgttcttgacaaggagctcatcacttatgccattagagttcgctaatgatgtaattgttgacatctatgtatgatctccttgactactatgggaactgtttagtgagaaactatattgttttcagatattgtctgatgaagagctagaaacatatctaaaggtgattgcagtaatatccatgggaacagaagttattgaacatgacttgttaaatatcagagagctatatgatcatgtgttggccctactatatgactatttaagaagcaagatgaacactatcaccgcaattctaacagcactggtgggtgaatcagttggtgccatattgtgcatggtggaagtttggtaaacttggccaagcaacctggtagcataatttaaatacttggtgtagagaaggtttgttattgcttatggataattctggaatcttgtaatttttagctctttttttggtgtgtatctgaaccttatgtgcatcaatgcttagtatgacataagtaaacattacttatttgcttatgttgtctgctaaaacagtctaacatcttgtaaatcatgtggatttcatatttgttacttatttcttttaattggttgtttactaataatgctgtagtggttttactcgatggcgtgcgtcaactttatttgccgatgttgtctgctataattttctttctccactaagaactaaaggttatgtttctctacaggctttattcagagctctaaagaaaagcattctacacccaagtatgggctcatctaccatgcatcctcaattgggaaggcttctcaaaagcataacggaaaaactctcggtctctatctgcaaaagctgctcttgctatccgataggatgcccttggtgttgatgaggacaactccattggcactaagagtcgactgaaggtcgtgacggttgggctggagagcacgctggtaggggaggacctcaacgaccgtgcctttgtctatggcttccttagcttcctggacaagatctcttgcgtaatcgtcctatttgtcttggaattgtacgaagacacgaatgagatgtagcgagatgaggggacacggtgagcaggtacgagatgggcctgatctcctcatacttcaccgtcctctccctggtggtcacatccattctgaggctataggtcaccactccgaaagccattgcaatggaagccccactgcttgtctgacaaactgaagaaaccggtgagtgtagatgtcgatcgggttggaagaaagaagaaagaaatgtgcatcctcttcaattagtttcaattagatttgaaagcaggtcactttgtaatagtatgtgtcttgtcatcgtgttggcacaacacagatgtgtatgatgtagttacgtataactcaagattctcattgctatgctttattataccaacaaagttcagatgtttggatatttctagcttattagggtctgatgcggaacatgtttaaacaaatatatcaaatttgaataatgtcaacatgtgtgatatatagaaac

SEQ ID NO: 39435 - DNA, 1040 bp, Zea Mays
ggtacaatgttaagaaagatgtgcaattcttgccaatatctggtcttgtgggaaccaatatgaaaaccaggatggataaaagcatttgtagttggtgggatggcccatgtctttttgaagttctggaccgtattgtagttcctttacgtgaccccaaaggttcagtaaggatgccgattattgataaatataaggatatgggcactgttgcaatgggcaaaatagagtctggcactatcagagagggtgacagtttgttggttatgccaaacaagtcccatgtgaaagtcattggtttgaacttggatgagagcaaagtacgtcgtgctggacctgctgagaatgtccgtgttaaattgtctggagttgaagaggaggatgtaatggctggttttgtactttcaagtgttgctaatcctgttggtgccgttagtgaattcattgctcagttgcagattttagagttgcttgacaatgctattttcactgccggctacaaagctgtgttgcatattcactctgttgtcgaagagtgtgagattgttgagctcatagaggaaattggcatgaagaaaaagaaagaagaagatccaaagaagaaaaagccaaagaggaagcctctttttgtgaagaacggtgcaattgttgtttgccgcattcaggtgaataacttgatatgcatagagaagttctctgatttccctcagcttggaaggtttacacttagaactgaaggtaaagcttcaagcttggaagttggaagcatattttcatttagtgtccatgtagagaagatcatctatgatgtaacgtatgagatcctatgtttccctttttgtctattactgcctccattcacagttattttagatacattattatttttactagtgcatagcagaagctatgtatccagaaaaaccaaaacgtcttataacttgtaatggaggtagtatttttttgtggtcatcagaaattccatgtcttttacttgttgattctacacttgtgtcatagaatggattatgatgcctttccta

SEQ ID NO: 39436 - DNA, 2137 bp, Zea Mays
tagccataacccataccagagtgctcgcaatcacaagagaaaaaaaagaaacttaataaggagagagaggagcttagcgctgtctctctctcgctcgtgcgtgcgtgcccaattgcaggaaagccacaaagtctcgtgttcctgggggcagggatctcctctcctctcctctggctctttaaccggagaggcgaggagtagtacggagcagcatgaggctgctgtcacctccattgccgtccctgcgctcttccgtcccggccgtcctcctccacctcctcctcctgctgctgctgctgtcctcatgcccctccccggcaaacggaagggccgcgccgtcgtctccgggcgctacggcgcctgtcaccagtgatcatcgtggagcgccaccgtcatttccaccgtgagctagtcatcgcctccatcctcgcctcaatcgccatcgtcgcgattatcctctccacgctctacgcgtggatcctgtggcggcggtcccgccggctgccccgcggcaagagcgcagacaccgcgagggggatcatgctggcgccgatcctgagcaagttcaactcgctcaagacgagcaggaaggggctcgtggcgatgatcgagtacccgtcgctggaggcggcgacgggggagttcagtgagagcaacgtgctcggcgtaggcggcttcggttgcgtctacaaggcagtcttcgatggcggcgttaccgcggcggtcaagaggctggagggaggtggccctgagtgcgagaaggaattcgaggtgtcaatacttgcccgttggccattggtaactggcgaaggggttatttgttcttgtcctgactgcttcggttgcggttgctggcagaatgagctggatctgcttggcaggattcggcaccccaacatcgtgtccctgctgggcttttgtgttcacgaggggaatcactacattgtttatgagctcatggagaagggatccctggacacacagctgcatggggcctcacatggatcagcgctgacctggcatatccggatgaagatcgcactcgacatggccaggggattagaatacctccatgagcactgcagtccaccagtgatccatagggatctgaagtcatctaacatacttttagattctgacttcaatgctaagatttcagattttggtcttgcagtgaccagtgggaacattgacaagggaagcatgaagctttctgggaccttgggttatgtggcccctgagtacctattagatggtattgtgtcagcttaattgtcaacttcgactcacatacataaacaacttcattatcgacagtgaagttctacttccatcccgtatctttcagctactgtgtcgatttcagggaagctgactgaaaagagtgacgtatatgcatttggagtggtgcttcttgagctactaatgggaaggaagcctgtcgagaagatgagtcaaactcagtgccaatcaattgtgacgtgggtacggtgcacacaaagttacactaaacatagccatgccgcagctgactgacagaacaaaacttcccaacatagttgacccagtgatcagggacaccatggatccaaagcatttgtaccaagtggcagcagtggcagttctatgtgtgcaaccagaaccaagttacagaccgctgattactgatgttctccactctcttgtccctctagtccctgtggagctcggagggacactgagggttgtagagccaccttccccaaacctaaaacattctccttgttgaggcgtcccgatcagtcgaagatcacagctacatgctgatgaacttggacgatgtttatcagtaactttatcaccctagctgtgtgccagaggatgacggttccaacctgccggttgctggttggatcgagagagaattctggtttgaaaagagttgtctcctgtgggtttgcttgtacaaagaagtgaaagaaaacaacactcttttccttagaattttaggtcccttctgtacagatcaaagtttgtccaacactatttaaaagaatttgagaatgacgagctttgggttccacatgggtacccgagcactttggtttgctgcgatattttgcttcttgtcgtacttcgataaaactgaaaaatgatt

SEQ ID NO: 39437 - DNA, 4464 bp, Zea Mays
cctggccacaccgcctcttccctttcgctccgctccgctcctgcccccgccccatcccttcctcctccgcctattggcctcgtccgcttccgcttcgacccctccccggcccgcctcggcctcgcgctccctcctcctcctcctcctcctcgcctccgcacccgggcaacccccgccctgccacggcgccgcggccagagccaggctctcccgcgtggaattcacgggacggaggccgctggtgccgcccgccgccgcctccgccaagatggacgccggggagatggaggacgtgcgggccgccgcggccgccgaggaggtcatcagcagcaggggcggctccgtgctggggaagaagaccatcctcaagagcgaccacttcccgggctgccagaacaagcgcctctccccgcagatcgacggcgcgcccaattaccgccaggctgggtcgctgcgtgttcatggtgttgcaatgcccacgatggaagggattgctaatgtgctaaatcatatcggagcacacaagaaaggaaagcaaacccggattctatggcatagtcttcgggaggaaccagttatctacatcaatggtcgaccctttgttttgcgggatgttgaaaagcccttctcgaatcttgaatacacgggaattaaccgggagagagtggaacaaatggagtttcgccttaaggaagatattcttcaggaagcttcaaggtatggtaataagatactggtcactgatgagctgccaagtggtcagatggtggatcagtgggaatcagttgtgtatgatacagttaagactccacttgaggtatatgaggagttgcaacatcaaggctacctagttgactacgaacgtgttccaattactgatgagaaagcaccaaaggaaggagattttgacaacctggtacgtcgaatctctcaagttgatatagaaacagaaattgtgtttaactgccaaatggggagggggcggacaactactggtatggttatagctacattggtttacctaaaccgaattggagcttcaggtatccctagaacgggctctattgggaaggtcttctatgctggaaatgatgtagacgattatatgcctagctcagaagaagcaatactcagaggcgaatatgctgtcattaggagtttagtccgagttctcgaaggtggtgttgaaggcaaaaggcaagtggacaaagttattgacaaatgcgactccatgcagaacctaagagaagctattgctacttaccgcaataacattcttcggcaacctgatgagatgaaacgagaggcatcactttccttctttgtggagtacttggaacgttattacttccttatatgctttgctgtctatgtgcattcggtgagctctgctcaccaaacaacattatcagtagaagttagtttttctgattggatgagagcaaggcctgaactgtacagcattcttcgaaggctattgagaagagatccaatgggtgctcttggttactcaagttcaaaaccccctcttacaaaaattgttgagtctgctaatgggcgtccacaagatatggacgttgttgctgccatgaggaatggagaagttcttgggcgtctaactgttttaaaaagcgaccactgcccaggcagccacagccttaatttacccgagagggtggagggtgcaccaaattttcgggaaatccctgggtttccagtctatggtgttgcaaatcctacagttgatggtattcgagctgttatccagtgcatcagtacaagcaagggagggcgacctgtgctatggcataatatgagagaagaaccagttatctacataaatggaaaaccatatgtgctacgcgaagtggaaagaccttgcaagaatatgctggagtacacagggattgatcgtgatagggtcgaacgcatggaagctcggctgaaggaggacattttacgcgaggcagaaagatatggtggagcgataatggttattcatgaaactgacgatggagagatctttgacacatgggaaaatgtagataatgaagctgttctgactccgttggaggtatacaaaaacttggtgagtgaaggccttccgatcaaatatgcacgggtgcccattactgatggtaaagctcccaaaagttcagactttgacacgatagccttcaatgttactgctgctagcaagggcactgctttcgtattcaattgccagatgggcaggggcagaacaactacaggaactgtgattgcttgcttgctgaaacttcgaattgatcatggcagacctattagaatcccagtttgtcaatatgaccatgaagatgatgctatttactcaactggaggagatgcaacagatcacaatggtcacttgaattcagaatcatggaaacctcgtactttgacgaagttaaattctggatttggaatcaatgacattcttctgctgcgaaaaattacaagattatttgataatggaattgagtgtaggcagactttggatactgttattgatagatgttcagctttgcagaatattcggcaagctgttttgaactacacaagagtaattaatcaacaacatgttgagcctagagttaggagggttgcattaaatcgtggcgctgaatatttggagagatacctcaaattaattgccttttctgcataccttggtagtgaagcatttgatggtttctgtggacaaggacaaacaaagatctcatttaaaggatggctgcaacagcggccagagatccaaaccatgaaatggagcataagactgcgacctggccgttttttcactgtgccgcatgagcagaaagcaacatatccacctccacaaggtgatgtaacaatggaaaccattgtcaaagctcgtagtggttctgttctgggaaagggatcaatactcaaaatgtacttctttcctggacagaaaaggtcaagcagtgtgaatttccggggtgcacctcatgttattaagacacaaccggaagaaacattgcacagaaggtggtcgtcacagatcttagagaggaagtggttgtttacatcaagggatcgccatttgttttgagagaactagatcaacctgttgatactttgaagcatgttggcattagtggtccaatggtagagaacatagagacaaggctaaaggaggatatactctctgaagttaaacagctaggtggtcggttactgcttcatcaagaagaatttaatgcagccacaaatcaatgtagtgtggtaggttactgggaacacatagatctggaggacgtgatgacaccagctgaagtgtacagcacattgagagacaagggctattgtatcgagtacaaaagaatacctctaaccagggaaagagaagcattagctgccgatgtagatgctatacaatcatcaattgatgaatctgctaggtactatctctttatttcacacactggatatggaggtgttgcttatgcgatggccattacctgcctgggactgagtgcagatgcaaagtttgtaatggaagaaacagcagaaacacactttgtatcaacatctcttgcgaaaaatgtgtccatcaaaactaaaactgacatagcacttaagcagggtgactaccgtgacatattaaaccttactagagtgttggtacatgggcccaagagcaaagaagaggttgacacagttattgacaggtgttctggtgctggtcatctgcgcgaagatattatgcattacaggaaagcactgcaagattgttcacatgacgacgacgacgactgtgatgaggaacactcttatctcactgatatgggcacaaaagctttgaggcgttacttttttctgatcaccttcagatcctacctatacagcacgacatcatgcaaaacaacatttacatcatggatgaaggcaaggcctgaacttggccacctttgcgacaatctaaagctggacaaataggccatcttcatgtgacgtgattatgtagttgtgtcacttccttggacacattcacccagagtttcaaaaaggaaggagactaaaagaacgggtagagaggaagcagtggttatgggagttgtggacaatgaaagagcagcttaggctgtccgaaagtagggcattgtactatacttgtcggtgttaattgacaccagcaagcatgtatatattgtcaggcgtattatagatgaacatattagatatttctattgtagtattttctcaaattttaaaagaatcatttcatgcagttcattctcatgtatgtatctgatatgcttgctttttcagcagcgtttttttagacaaagctcttcggcagctttgatttttgacttctctgccttctgggcgtcaatatggccgcagccttttctaggagttgtattgagctaggatgaagcttgaaagaaatacgatgtcttgtttctaaagccccct

SEQ ID NO: 39438 - DNA, 808 bp, Zea Mays
cagagttttagtttacgtaacaccaggggtgttacagccttcccccctaaaaagaaatctcgtcccgagatttaaaactctaggctagataatggaaaaggaaatgcgtcactggcttatttccccattactcctaaaaagcaggggtgtgcccctattggttcataccaaagacaaactacacaaatcctaggacttatgagaacctaggaactcaggaaaatgtttttctaaatactcctccgattcccatatggtttatcttccgggtgttggttccactgtagcttacaaaacttgataaattttcttcgagtgacccgatcctttagatccaacacctttatgtgatattccaagtaggttaaatctggtccaaggttaacatctgcaatcacaataacatgcttgaggactcgaaaacatttctttaactgggacacgtagaacatgttgtgcattgttgacaaattctttggcaactgtaccttataaactacaggtccacgaaatgaactgggtctcaaggcttcacgaataggaaaaggtagtatagaaaagcaaagatagatagcatgaataggatggatgaaacatgtactaagctactacatagggggtttaacttaaaattgtatgtcatgatgcatgctcgtcctattcgtcctcacaattcttgccaacatatagtggctatcacgttctatgacggtggcatacctactcactccgtcattgaacactagtcgtactttcctagggtttagttagtgtacctgcagaaaattccatcacagcccaatttccc

SEQ ID NO: 39439 - DNA, 718 bp, Zea Mays
attacgtcaagcacgtggtgagcaccacgcgagatttattgctttatccgaattctcgggatcgtttgacgacgcaagggatgtcgacgagttggaggcctccagggtcgaacatgacaggggcttcggagctcagtacaagtgacgcagatctggaggatagatcgtcgggatcgactcaaatagcgtaagcatgtccattactcagggctctcgtagggctctcgtcgaacacgagatgcacaagccgcgacatcggtagcgagtgaggtcgacaacaagggcaggactgcacagatcagggctgctgcacacacgacgcaacgacgacaaccagccaggtagacgacgtgatgaggattaaggccgagcgagccgagagggcacgctggcgagcaggaaatagccgccgtggatacaaggagagcgcgcggcactgggcgcgcaggggagcacggcatggcgtagacgccagagcgcgcgacgcgtgcgcaggaagcagcggcggatgcgcacgaccaaggcaccagaggagagctgcacagccggcgagctggagcagggagctcgacgcggctaggacgcgacggcgaaacagagctcacggtagctgggaagcaagcaccagagaagggcagcgactatttcctacagatatccaaggagaggtcacgaccatgggaggaaggttggggcgcgcaggaagaaaccggggaag

SEQ ID NO: 39440 - DNA, 3323 bp, Zea Mays
ccgagagaagcgagcggaccctaaaagagaggaagaaacctgctggcttccttctcgtccccaacaggcgtccccaagactccaacttcctcgatctagccatgtcgtccgcgccgcctgcccaccagtccaagccttccccccaccgccggcagcaccacaacctcggaccgaggtcgccgccgccgccgccgccgcagtcccagcgctacgtacccaaatccgccccccgctgcggcgccaaaaccctcccccccgtcccagccatcgctcactaccgcgctccgatcatcggccgcctcgccctcctcgtccggctctggcgggagctccagcggtagcgtaggtgtccggtcggttgatgcattcgtcgcgtatctgccgcatgacgaggcggtcgcggcgggtctcggcggcctcgatgcacacgagtcgcaggtcgtcgtcgaccacctcaacgacgcacttgccgcgctccttcgggccaagcctcgcgagttctggctccgggtggcacagaacacttctttgcatgaattccttgatagttatctacaattcaggcacaggtggtatgatttgccacaccgaggcccaaagggaactgtagcaggtttggttgttggggagcttgagctttgccgtcgtgtatttatggtcctctatcgcatgatcctggagcaggtcgcggcgagtcccttagcatgaaggagcatgcagcccttctgctggagaaaaaattgcttgatctaccaaaattgttggacatatgtgctatatatgagcatgacaacggcaagttaacaagttcactggttacgaatgttattaatgtgcagccgagtgtactggatgacattaatattgtcattccccagttcctcaacattttccacacgatgcatgataggtgcatgacatctttacaggtgctcacctcaaccggatcaattgataatggatatgttcagcttcagaaagatttcatggaggtgttagattttataaatgatgcgattgttactctggattcttttgttggtgcttatcaacctgccgctttattgttctgtactaattttgaaatgagctatggagttgaggaattgctgaatgctcttgcaaggctgtatagttcattgctaccatcattgctccatgggtttaaagttatgcccaagtctcagagcaatgcagaggcatcacttgacagcacacttagtgacattcctcttgctataaggatgttgtcaaagagaacagcgagatttggttggagattgttgcactactgttatttgaatgatcaagttagggagcatgatgctcaaacttctactaagatgtttccagctaaagtcgaagatcctatgatcaggggagacatcttggttcaaacacttaaagatataaatagagaatccacttactcttctcaagtgaatcatggaaatacttttctccaagaacttgaaagtgaatttcaattaatgagccagattggtgatattcggaacaaaggatggatatacatggatgatgagcagttccagttcttatcacgattgtgtggatctactcacacttcttggaatggcatatctgatttgccagtctcttctcatggtggtgaattacagcagaaggatgaggaaacagcgatggttgagtccaaaattagtcagataagggatcttttccctgattatgggaagggtttcctttctgcttgtctggaagcctacaacctgaaccctgaggaagttatccaaaggatattagaaggaacacttcatcaagatctgctagctttggatacttcattagaagagatgccacacgaaaaacctgcaccaactgctgtgaaagataaagggaagggtatattggtggaaactgtgcctcaaattacaaagaaaccccataaagttgctgagacacattactttgttcaagatggcctatcttcagcaacttcatcagcatcacaaggtccatcttctgcaatttcaccagcatcccttgggccatcttctgcaatttcctcagcattccagggaccatcttctgctatttcatcagcatctctgggcccatcctcatccatatcatctgtcccaaaaggtagatttacaaggaaggccaatgatgatttgccggacactgcaatcctggactcgaaaaatgctaaaaatgcagctagatctgttatccttgactcgcaatatgagtatgaagatgagtacgatgattcatttgatgatcttggcttcagtgtggtagagtcaagttatgaggaaactgatggtgtcaatgacgctgaggcttcatcacatggcccaagatggagttcacagaagaaaccacagttttatgtcaaggatgggaagaattatagctacaaggttgctggttcggttgctgtatccagtgctcgagaagcagctgtcatgaggcaaactcaaaaagagacaatctatggtctgggtcgtggtggaaatgttccttttggtgtcccgaacaggcaacatatagatgtggaggcagaggaggttggtgatgctgacaactcaggcagaggttcaaattcccgtggccggggaagaaaaggcggaagggaaggcaaccgtccggaggagaatgagagctccaatggacgaggctctggctttggtggtaaaagaggaggctggagtcagggcaatccggctgaggaaaactggaaccctaatggtcaacaaggttttggccgtggtggcagaagagggggctggaatcagggtggcccagcgaaggaagacggtaactctagtggcaggcaagaaagttttggccgtggagcaagacggggcagcatgaaccatgaccaatcagccgaggataatgaaggccataataatcccgcacaagactttactcgaggaccagctcctcgtggtggccatggaaggggaggtggccggaaccatcacaggagagatcgggcaatgaagaagcatatgcaaggattgacagggctttagctgctggtagccttatgcttttgatgtgccgtactgtaaatggcatttttggaggcactcctacttgaccatccaaatttttgtgcttgttctgtttttaaatcaaataacgccatgaagtaacccacatatgttctcgtaacatttgtgattgccctaaaaagggtaatagtgtatgtagttctaaacatgcttgtaactcgttaaatacataattaattctctagcgactgaaaagaaaaatcatgaaaccaaaccaattttgttagctttttttgtcatgtgctatccagtaaaaca

SEQ ID NO: 39441 - DNA, 1684 bp, Zea Mays
gctaggcgcaagcagcaggaggtgtgtttgagttgttcagtttcttcgccggccggccggccgggagagacacactgcttgctaattatgactgcgatgatgatgaggaggtacatgcctcacgctctgatggtcctggcgcagctcttcttcacgctcctctacttcatcgccgaggccgccttcaacagggggctcaactccttcgtctacgtcacctaccgccacctcctcgccgcctgcatcctctgcccattcgcctacttcaaggagaagacgctgaggccgaaaatgacaccaatgctgttcctggagatattcgtgctgtcacttgtggggtgagcagagctagcgagcatatatatgcagaacggggagcttaactctgaacatgtacttctcgagcttgaagtacacgtccccgaccttcgtcacctccatgctcaacaccgtggcctcgatcacgttcgtcgtcgccgtcgtcctcaggttggagatcgtagacgtgaggaccctgcgggggctcgccaagatcgcggggaccgcggtgtcgctggccggggtgaccaccatcagcctgtacagaggagcggccgtgaagaggccgtggagggcgcccgccgtccacgtacacggcatcggcggcgccggtcacgtggagccacacgagagctgggtcaaagggtcgctgctcgcgctggcgagctgcatctgctggtcgatctgcttcatcttgcaggcttcgtccataaagaggtacccggccaagctgtctctgacggcgtggacgtccctggtcggcggcctgcagtcggcggccttcgcggcgttcgtgcagcgggacgcgcgggactggctcgtcggcttcggcctcaacttctgggccatcgtgtacgcgggagaaaggccccgtgttcgtcgccatgttcaaccccctcctcaccgtcatggtggcactcctcgcctacttcgtcttcggcgaaaacctatacgttgggaggttgctctcgatcgatcctcttattattatatagtattccagactgagtcgtccagacaagcataattattagttggctgtgttgctgctaatgcatattatggcagcgtgattggagggctgcttgtgattctggggctctacatgctgctgtggggcaaggacaaggaccaagaacagcacgtgtcgtcgtcatcggaggagggcaaagagcaggagcacccccatggccatgatgagctggacctgcactacagcgtcagcttgcgagaagcagcagtcggccgaggccgaccgtgatatgtatgtatgtctgtataagtgatcattttgttggcagttggcactgtacgcactactacagcacacctctgtacaggcggtctggttcgccactacacaggcggttccaggaaccgcttgtggtgcaccgcctgtgatgtagcggtcaatcaaaaaccgcctgtgaaaaacacagattacaggcggtccagttcaacggaaccgcctgtgatagacacacatcacaggcggtccagttcaaaggaaccgactgcattcactataaatcacagacgattttcattatacagattcatatatacagaattttcaaacaggtataatacacagaattttcaaacaggtataaacatattcatatatacagattatacacagatt

SEQ ID NO: 39442 - DNA, 1165 bp, Zea Mays
gcctgttgtccacttccctctcatcctctcgacctcgcttcctccctcccatcgtgccctgccttttcctcacgacctcgccgccacgctcgcgtctcgccgctgattgcggtcccccatggagtcgttgttccatcgtcttcctgtatttgtgctgctgatatgtgtaacttgtgtttctccaggtgaaggcggtcgagcacgcgaccgagatggaggcgacggtggctgccgcggaggccgaggaggaggaggctgctgctgcggcttcgacgccgcagcggtctgggaggaaacggccccgcgcgattgggagtgggcggtaccgctcggtctccagcaggcaggcagtcggccagggacggatggacggagacgacggatggaagccgcagccactagccagccacaccgcagaccgcgcatgcaggagaaagaagcggtgtttgcatggactgggattgccgacttgactgcggattgacggggacaggtgggagccagaaccgcccgaggaccctcttctcctcggccaagtgacccacaccgcaactggaaccctcttctcctcatccgacgacagtggtggccactgctccggccaggcatagcataggcagcctgtagcttcttctacgcctagccatggcctggcaacctgctactcaagagctcctcctggttacacaagccaaaaaagaatggtagtgtgaagtggaatcaaaatgggaactgggtgcagactgcctcaaaggatcagattattaaggattctatactatctatggagatggcccaatccatccttatgatcaaatgatcgataagtttgttttctgatgccagtaaattattgattttggtccatttgctaattcattttgcaactgtatgacattagatccatgaaagagcagcaatccttctgaggggacgtcgctggttagatagttattacagtatcaagatttttatatgttcctttacatattttaaggttcacaaattgatacaggttttatatgtagcagttcatttgttcactgtaaccatacatgtaaaccataagcaaatgtaacataggagattgttatataaagagacttttgcagccactttgatgttttgttttatgcttctttttgtgaaaaattattgtggtgct

SEQ ID NO: 39443 - DNA, 964 bp, Zea Mays
aaggcaataaaatccagtccgtagatgtccctattgggctgctctgttactctgtaagcccaaagctccgaaacagagcccaaaagactacgagctcgcggggaagacggggacttccggagagagagagagagagagagagagagagagagcaggaagcaggggctagacgcggatcggcgagcatgaggggcggcggcggcggcgggatgatggacgatgaagagagggtgggccatgcggagatcccgaccagtttcggtcccgagctgcgcgcctgcctccgatgccgcctcgtcaagacctacgaccagttcagggagaacggctgcgaaaactgcccgtttctagagatggacagagagcacgacaacgtcgtcaactgcaccacccccaacttcactggaattatctctctgatggaccccagtaggagctgggcagcccgttggttgagaattggttcattcctgggtgctatacacttgctgtctcggaggagcttccagaagagtatcaagggatttgtcaagacaacaacgtgcagtatgtgccgcccaagcgtgtctaagtatcaagacggcaatgatggtgtcttggtcctgaagcagtatagataattaggtagaagtatctgtgcttgccaagggaactgctcctcttatgctttgtatccgagtgctaaggcagtctatttcatgttagtgataaggctgtctatttaggtggtgaaccggcgggtgattgaatcttatccaataaccttgatgcctgttcttgaaatctgtgacaatgcggctcatgtgcgtctgtcatgttctttcacatctatgtatatatgaagaaaaatgtaatagctaaaggtcgttggaccatgaaccctcggcccctgaagaccctatgtataagggactcaacatgtttaagtgtaattcgagataaaacataaaaatgtgattaggcc

SEQ ID NO: 39444 - DNA, 1449 bp, Zea Mays
acatccagatccgtccagatccagattcacccgtctggcacttcacttggcatcacccccgccgtcgcgccgcggccggccgggcctgcaccaaggggtccaggtgaataggtgatgcggccgactcacccgcggcgcggcgcggccctcgtgagaactgcaaaaccaccggccgtatacagtaggcctgcctgcctgcctgcctgcctgccagcaaaccctcccgatcggccgcactgaaatgatcagagtgagtcccctcctcctcgcccgcccgctccgtgttcattgccccactccctcacgcctctcgcgcccgccgctccaccaccccaacccccacccacgctcaggggaagggggtctgggttgcgtacaggcgaaaggcacgcgccgccgctgccgcgcgagcctctccgtccccatcgccgcgcagatggatccgtcgtcggagcccctgtacgcgcaggtcgagccgtacgactccgggttcctcaaggtctccgatgtccacaccatctactacgagcagtccgggaacccgcagggccatgcggcggtgtttctccacggcggtcccggagccggcacgtcgcccggcaacaggaggttctttgacccgcagttctacaggatcgttctgtttgaccagaggggtgcaggcagaagcactccccatgcttgtttagagcagaacactacttgggacttggtagctgacattgagaagctcagggagcatcttggcatccctgaatggcaggtgtttggtggttcatggggaagcaccttggcacttgcctacagccaggagcaccctgataaggtcactggccttgttctgagaggaattttcttgcttaggaaaaaggagtttgattggttctatgagggtggtgcagcagccattttcccagatgcatgggaaccatttagagattttattcctgaggatgaaaggaattgtttcgtagatgcttataacaaaaggttaacttcctctgatcctattgttcaggttgaagctgctaagcgctggacgatgtgggagatgatgactgcgcaacttatccaaaacaatgataacattaaacgaggagaagatgatgaattttcactggcatttgcaaggattgaaaaccactactttgtgaataagggatttttaccctcggactcattcctattggacaatgttgataagatccgacatattaaaggttttattgtacagggacgttatgatgtttgttgccctatgatgtctgcttgggatcttcataaggcttggcctgaagcagaattcaagacacgcgcaaatccagttccaagctccggacttcaccgacccagatttctcgtccagagtccagacactcgtggttccaatccagacacacgcagatccagaaatccagaatttttcgtcggcatgagttcaccttttgg

SEQ ID NO: 39445 - DNA, 1715 bp, Zea Mays
ccacaccagcaaaaccaccacaacacccctcgcactacgcgcgccgccgccgccgctagcactggtgagacgagtacggaggagcagcacagggatggacggcggcctcgaggatgagcaggaggacccaagcttcctcaaaccaccacagcacccctcgcactacgggcaccgccactgctgtcgctttcagcgtcggtaagacgagtagggaggggcaatgcagggatggacggtggcctggacggcgagttggaagacgcgggcttcctcgacgagccccgcttcacgatcagcttctcccctccgctaatggaatgagtatttttaccggttaaagtttggttaatgaaggaatagaaaatggggttgtgcaatttcaagactcaggtgtccatggattggagaaatttccatttagatgacccatcaacatcctacattgcctggtgatcacacctgtgtcacctgtatgaatgttggtcaactttcagcctctgttaacaacacaattgaccaagagcggggatgagtagaagaggatgatcctggtgtgtatattactgttcgagcattgcatggtagcatcagagaactacgtaacgacgaggctgagcgacaattccagtgtcccaatgtgtgacccgagttcaactcctctttcgtcgacctcgagatcccagtggatgagtcagaaagtggaggagacagtgtgcaggagcagcctgtttatgtggccgtagtggatctcgcatcctgtttgtgagcttggtattcctcctgaaaacatcactgcaaaccaattgttatttggcacattgggggagtacgccggatttgatcccacagagcccacttcacgcagtgggggtaaagcaaaagcagtgcagcaaataaaacagacaattgttacgattagtgatggcgcaactgatctggaggctcggcaacctggcggagcagactgtgtgccgccagagctagcggagggaggcgggtcattcgatttgccatgcttaggattggagaatcactagagtaatagtatatacatggtggggagtgaaaccaacagaggaagaatccgttcttgatcaaaattagtcggctgcttggttcgtcgtctgcgtgttcgatcggaggttggcgacgccttggcgtggccgctttccgcaagaaagcaaggaaattgtgctgaccgccgctaatgcgctggatatttctgggagtggaaacgaaagtgtactctgaatttcaagttcctgtcaaaagtaagatcctctgacgaagaagatggtatcatttgtcaagtgtatgttgggacttgatgctgttgtttgggacattattgggtcgtcattgttggagaaagttgtgtatctacttacagaattggatgttaatataacatgggaagatattcttcaagataaacacaacaaaggtatatttgacatggagcttgaggatttggctgaggatgaacataaccttggccgcacaagtgtggagacttgaattcatatatacttagttaggctcaatgttagcataaacagttgatgaacaagttttcccattagtattttagtttgaatttagagtacaattatgtatgagttatttgacaatgcttatttatgagatattgaatgatatttatctatattgtattaattatagtgttattaaatatatgtgtttgtatttttctc

SEQ ID NO: 39446 - DNA, 676 bp, Zea Mays
cctcaacaacatcgggatggccgatggggaggacaccggccacgcgagacctcaacaccccatgaagcagtcacgcttcgacttcaccaaggtggatgccgcatttctccccaccatcactggtcgttcgtgggcctctcctcccccacaccgtcacttgctgtgccctccccctccaaccctggtgctatcttttggatctgaccatcggcgctggttattatccccgatagttcggccctctcctctccctctccctaacctcccatcaatccggtcccctgttaggtttgcactcatcagtctcctctcatgtattaagctgtgaaatgagtctccttaattgatgaggaatttggttctatactcgatgccctatgatgcaatccctaatgactgcatatgtgttgagggttactacacactgagggatgtgtgatatatgagggagttgtgtttgtgaaagagctgaactgcacatttgacagaaagagctcaactgcatatgtggtgtgtgtgcactgatggttgccctgacatgtaattgtgccctgataactgatttgctatgttccttttgatcaaaagaggtgatgtacctaatttgccctgtgatgctataatgaaaattattgagctagatactatacttgatcacttgatgaaaataaattag

SEQ ID NO: 39447 - DNA, 2122 bp, Zea Mays
cttgtttcgatcgtctaggtccaaccttcgaatggtacacgatggagggagcgggaagagatgccaaccctttgagcggttacagaattggcaaaaccctgggaattgggtcgttcggtaaagtgaagatcgcggaacatatattgactggtcataaggtggcgatcaagattctcaatcgcaagaagatcagaagcatggatatggaagagaaagttaagagagaaatcaagatactgagattatttatgcatcctcatatcatacgcctttatgaggtgatagatacacctgctgatatctgtgttgttatggagtatgttaaatctggagagttgtttgattacatcgttgagaagggaaggctacacgaagaggaagcccgacacttttttcagcagatcatatctggtgttgaatattgccataggaacatggttgctcaccgtgatttaaagccagagaatcttcttttggattcaaaatgcaatgttaagattgccgattttggcttaagtaatattatgcgtgatggtcactttcttaagacgagttgtggtagcccgaattatgcagcacctgaggtcatatctggtaaactatatgctggtcctgaagttgacgtctggagctgtggagttattctttatgctcttctttgtggcactctcccatttgacgatgagaatattccaaaccttttcaagaaaataaagggtggaatatatacccttcctagtcatttgtcaccttcagcgagggacttgattcccagaatgctggttgttgatccaatgaaaaggattacaatacgtgaaatccgtgaacatgtgtggttcaagatccgacttccgcgctatttggctgtgccgcctccagacactgctcaacaagttaaaaaggtcgacgaggaaactcttaatgatgttattaagatgggttttgacaagaatcagctaattgaatctctgcaaaacagattgcagaatgaggcaacagttgcctattatttactcttggacaataggcttcgtacaaccagtggttatcttggatctgagtttcaagaatctatggactcatctttgtctcaagtaatcgctgaaacaccaacttcagcaactgaacttcgtcagcatgggttttcagaatctccaggttctggcttgaggcagcattttgcagctgaaaggaaatgggcccttggtcttcagtctcgagcacatccacgagaaataataagtgaagtgcttaaagctctgcaagaactgaatgtttactggaaaaagattggacactacaacatgaaatgcagatggagtcctggctgccttgagagtatgatgcataacagtgatagcttcagtgcggagtctgctataattgaaactgatgttttcatggagaaatcaaccccgacagtgaagtttgagattcagctttacaaaacgagggatgagaagtaccttcttgacctgcaaagggtcagtggatcacatcttctctttctggacttgtgttccgcctttctaactcagctgagagttctttgagcctgacatgattggcttcccaagcactccttgatgcacccagtggagtttcaagttacatttgagatgtacataatgaccatatataatcctccagtagattatattttctggagcatgtaatgtagacgttagaggcttgtcctggtttgccaagatggttgttacctaaggtcctaacaagaggccgcaggcgagcccagtccaattagatgatgtgaaaaatttttggcctttttttagtctttggacatgttatcaaattaaggaggtcgtgctagcacgatacccaaactaagaaataccccattgaaaactgaaaacaaagcttgctcgttcatactagtgtcaactctggcactaaagactggtgcttattttactccatagacagtaattagatgtcacattcacgtcacgtgcatattcatcacaactgttttaggtattatggattgcatacgttttcttttggatccttcgttctggtggggtgcactcttgttcgtttgtttttaatctataccagcttctaatacaatattttgtgtctatgaattgcagctgca

SEQ ID NO: 39448 - DNA, 2250 bp, Zea Mays
cgcttcttcacgtcccccctcaatcacatcaccggcactccccattgtccttcatctgctgcctgctcctccgcgcggccatgcccgagctcgcggtcctcgttctcagccacgcgctctttcacgcgcgcctccgttgccgctcttgctcccagactttgccgtggccctctcccgtctctcattggcatttttttatgtagggttactcacactgttacaagggtcattcagcgcctgtcactgctctggctgatagattgcttatggatggtgaatctaaactgcttgcaagtggagggtaccaatccaccttccctacccgtccagctgctcgatgcctctgaaattgatggagcgatacctagcacgcggtgcatgttgttctgaagattctgctgctgttggttgccattcaccctgacagtattgccagtggcaccgtcaactatttcttccctctccgcccgagcctgcagatgaatgtttgacggcacttctcgcctactgtcctcactggtgtttccaaagtctgcagtgagttcggtctcagctctaattaacgaggaagtcatgctaggcaccctctggtcttctcgtctccaaccaaccactaccggcgtgtggatgatagcaggttatctgttgcgtggcataaatcgtccctgttggtgagctgttccaaagactcaaaggttaaagtttgggacacagtggctccttcgagtggttcatcaccatgtgtaggcagtgctcacctcaactcaaacaggccaccaattgctatgaaatgccatgaatccctttgctatattgctgctggagctcaagtgacagcgattgacttgaggacaatgaagaaggcttctgtccttgcactccagaaccacagaatactttcttacggatacgtcaatggctgtgcagtccaaaaaaatgaagagaagggaatttgacattgtcgttcaagcttcaacattgatcacttattggttttcaggaagtctttctgaatgtcagttgctataggattatttgaacaacatctcttccaatggtgatatattttatgatgctcagaatgatttcttgacacctgaatgggacagtgagaatttacaagtggtactgatgattctatccatgttcaaatcatcaagatagtcatcaggttccttcagtaattcaaaccatcactaatcccttctgacgggctatatattctatcggaccaggcacaactatccaaatttcttttctatataacaaacgcggacgtaaagttgctcaaccacgctgtccacgtcgctcctccgtttcccagccattggatcggcaaccaacgacacaagagaattccgtgcgattgtttcttaacgtgaagtttctggacagcgccggacagatagagagaatagaagaatatacacatcttcttcctctcgcttccaaaggtgatgccttccacggagaggagatcgtgcgaccatgatggcagcgactcttgattttgcccatcttcccacgctcaaacggataacagtctccttccttctgtctcttccaatcgtctcttcctagttccataacactctcacaacacgctagcaggacactcattctctcaatcggctcttcccgctgcgctacacgccaccaagagcctccccaactcctccccgtcaaacggcgccgcgtcgcaaggagcacaaccaccccccgtctccttcctcagacgctgtcgcgtttctcgcgcgggttattgcccacggaagcttaaatacttggtgctgaactgctgaagtatgatgtctcactgaaaaacaacgagatggcaatgagaagtgttcaggaagaggggtaatatttactcagagcagcaaaggaaggtcgccccaccaagctgccatgatattcctccacttaccagtgtttcaaattccaatgacatcaggttgaagaaaggaacttcacacatgaaaagagacgatccggacgaccatgaagattaaacgttgctgttaagaaaagccatattttctgtattgcttctaagctgttttatggcctttaaaccaatacttttgcttggcatatatgtagctataactattgtaatataatctctgagcttctcatgctgctattcaacatatcattactcctaccaatatatgtacagtttcagttgacttgcttgctttccgttcttgccttatcaagctaattagctaaactacaattcagttt

SEQ ID NO: 39449 - DNA, 1245 bp, Zea Mays
atgcgtacatctacttgcctcagttttttcaccctcaccgtcctgccacagacattttggctcaacatcattagcatgccatccattgccattttgccacctttggtcctgaatgatgaggattattatcctgagcgaccaggggaaccagattgtccttatttattgagtagtagatgtaagtttaaatctaaatgcaagttcaaccatccaaaggaaatggtgaacgcattaggaacaagaacagacaatgaatcactaatcgctgataccactatcttaccagtgaggccttctgaacccgtttgttcgggtgaagtggattgctcgttttatatgaagacaggcagctgcaaatatggttctatttgtcgcttcaatcatcctgatcggtcagttgtggatatagcttttatggctccagttcaagctactcttccttttccagcacccattgtccctgcagtggcgttaaatccggctgcaaattttctgcaaagctttgatttccatgcaactcacgtgccggttgagcctatgccaatgatctatcctcaaagacctggagaaattgtttgtgatttttacatgaagacaggatcttgcaagtatgctcagaattgcaagtttcaccacccttttgaccggtctgcacctcattccaaagaaaacgaggatacacagcagcctgtggcacttactcttgctggccttccaaggagagaggatgctgaggcctgtgccttctacatgaggtctggcacgtgcgggttcggtgcgcgctgcaagttcgaccaccctcctcgccaggacgatgtctaatacggtgtactccctccgtttcgttttagttgtcgctggatagtacaaaattgaactatccagcgacaactaaaaaaacggaggaagtatcctgtatcaggatgtggtaccatgcgaatcgcactgttaatgcttgatgctgtcactgccatggtgggagcctgacttgtaaagttcagtatcaccggaagtgtttgtcggcgcgtgctggtactaacggtgtaccttcggcggttggatggtgtcaagagtaaaaatacaccgcctgttctcaaactttgactggatgctaatctccaaaatgtgagaaccaagttaccgtaacttgagttaatccgcttgcatggttatgtgatgataaggcgttgggacgtggagtctacatgatggtagggatataggagatcgaatcgcatgttcgcc

SEQ ID NO: 39450 - DNA, 1175 bp, Zea Mays
atactccgtataaagcagagaggagaggagaggagaggagacggggacggcaccggcagcgctccacaggcccaacctgccgtccacggcgcgaaagaagagccgcgaacccgggagtcctgcctgtcctcgtcctcctcccccttgccatccgccgcccatggcgtccgcgtccgcccccgaagtggtggtggtcttcgacttcgaccggaccatcatcgactgggacagcgacgactgggtcatcaccaagctcggcgccgccgacgccttccagcgcctgcgcccaaccatgcgctggaacccgctcatggacaggatgatggcggagctccacgccagggggaagacgcccgaggacatccgcgactgcctcaggagcgcgccgctcgacacgcacgtcgtttccgcagtcaagacggcggcggcgctggggtgtgacttgaaggtggtgagcgacgccaacaccttcttcatcgagaccgtcctggcgcaccacggcgtgctcggctgcttctccgagatcgtcaccaatccggcgagcgtcgacgcggacggcaggctcaggatctcgccgttccacgaccccgcgtccgcgccgcacggttgcagcctctgccctgacaacatgtgcaagtgcagggcaagatactggggaggatccaggcaacaggcagtgacaagaagcggcgccggcgcttcatctacatcggtgacgggaagggagattactgcccgtccctcaagctgggggaaggggaccacgtcatggcaagggagaactaccccctgtggcatctcatctgcgacaacaagcagcttctcaaggctgaggttcatccgtggaacagcggcgaggaactggaaaagacgctgcttaagttggccggcgaagtgatcagtccacctgcacaggcttcacaatttgactacagcaaatgcgagatgagcaatccagcatcctgccctccgtcgtgtgccgcactgattaccgaccaactcttagttcgcaagtactgataaaagtctccatcctgcattcaacatgatatatgtcgtcaatctgcacagcaatttagagatggattatctatgctatacactatgttatcaaataaactgtagcgtggcatggaaggacatgagttgagaattaattgatgccaaaaaaccaa

SEQ ID NO: 39451 - DNA, 359 bp, Zea Mays
tggtcattttttctcattttttcagttcttcatcgtgtaatttatgctgtattaggaagtgtatattggtaatcaaaggtgatatactttaaggaaccttcagccttgctggtgataaggagatcacactgagctgatgctcagaatatacgagacagcagtttggtatgctactgttgtcttctgacttctgctatcgctagagctgcttctcacaactgaaggcatttgattggaacaattcctaatgatctttgtacattactctcgctaagttaataagttgtgtcacgttgatgaacattctgacaggtttagctcatatgctcaaattcttctctcacttgtttcaacttctt

SEQ ID NO: 39452 - DNA, 1604 bp, Zea Mays
ccttactcagcatggaacaggttctctgtcctcataactccaaccaaacaacggcagctagcgagctcccgcggtcccgccgccgccccctggtcctccaaaaaacggctgaaccctaaaccctccctagctcccgccgcctcgcttaaccgcgcccatggccgccgccgctcgcgccgccctcccgcggccccacctctctcttttttcgtcctcccaccgcagcccccatctgtccctcacgccctcctccgcccctcgcctgcgcagcggcgctgccacctcccctgcgctgcagcagcaccaccaggtcaccacgcgcctgggcgacgtgatcgaggcgcagcagttcgaccgggacgcgctgaacgagatcttcgaggtggcgcgggagatggaggccgtggagaggggttcccacggcgcccccagccgcgtcctcgaggggtacctcatggccacgcttttctacgagccctccacgcgcacgcgcctctccttcgaggctgctatgcggaggctcggcggggaggtcgtcaccaccgagaatgcgcgcgagttctcttccgccgccaagggggagacactcgaagataccataagaaccgttgagggttattccgatattattgtactgagacattttgaaagtggagctgcaaggaaagcagcagatactgcaaatattcctgttattaatgcaggtgatggaccagggcaacatccaacccaggctttgttggatgtgtacacaataaagagagaaattggcacactagatggaattaaacttggtttggttggtgaccttgctaatgggaggacagttcgttctctggcttacttgattgctaagtaccagaacattaagatatactttgtatctcctgatgttgttaaaatgaaggatgatatcaagaactacttaaattccaaaggtgttgaatgggaagaaagttcagatttgttggaggtggcatccaagtgtgatgttatttatcaaacacgtattcaaaaagaaagatttggtgagaggattgacctttatgaagctgctcgtggcaagtacatcgtggataaaaaggtcttagatgtgctgccaaaacatgctgtcatcatgcatccccttccaaggcttgatgagatcacagtagaagttgatagtgatcaaagagctgcatattttaggcaggctaagaatggcctctacataaggatggcattgctcaaacttctgcttgttggtcactgacatttcggctagtgctttagcttgtgctgcgtcaagggattagaaggtcaaggacagttaccacaggatgaggcgcatgaaggaaaagactagctaatccctaatgatttaggctacgattatgaacatgtactaaggtcataaatgtatttttatccgtgttgcatctcgtgcctataaataggtgatcagtacccctgtattgttcacgctagattgtaattgctctcgcgtcaacaccttcgaacaagccgaagatatcaatgtaatataaattctgttagtgttcatgtatatatcatgaaatacatatatgaaggaatgaattacatatattatctctatgtattct

SEQ ID NO: 39453 - DNA, 1212 bp, Zea Mays
gaaaagatcccaacaaggcagaacgcacccttctctcagtctcagcgccgtctttcttcgttacctgcccccgctccccgaaggctcgaaccctttacagccggcgaagaagatgcacctgtggccatcgctccggatccgcgactcgttcaagcacggctacctccagaagctggagctcaacctcggcaacatgaagcgcgcgcagcggcagcgccagggccggcagggagagagccaggaggaccaggacggccagcccggcggcaacgggaaggcgccgctgctcgaggaccgctcgccatcggggtccgtgcttgccggcgcgctcgagctcgcctgggacgccgtcttgctcctcacctgctgctgctgttgcttctgctgcggaggagcctgagattgcacatgggacttccttcttgtatatacttcgcccttatatcgatatccaacaaaaatgcacttcacagcacgaggatccaacttccccacctgaggtctatgatctttgacaaagcatgtacatccaaaaattttaggtggaaccacaaacttttctcaccgagaagaatctcacatggagtcttcattgcaagtatttttgaaggagtacgattaataagatatgtggcagtcaatacagcttcactccataggaacttcgaaacattcattgtaaacatcagcgaacgagcaacttccaaaatgtgacgattcttcctttcagccacaccattttgtggaggtgtatcaggacaggatgtctgatcttgtagcgacgaagaggatcacccaactgcccgctaaggagcaacttcaggtgcctgataattcatcagatcacgaaaaccagataacttgtgggcataatgaattgcagtcaaatagttcaaatagtttcggtcagctttgtacatatggttttctattcatccttatgccgcccatagatgtcattgataaacggaaaaaggatccttattttttttgttggaaacccgttgtgtaggtattttgggcgtgtaatcagttcgtatctgtattcaggataatctgtgcggttgctgtttctcaccgacacaaaggcgtttggtccaggtgatgcttgcagcgcatgaatgccgagtctcttgctccctcggtttacaaaaacttgttttagacaggattttgagttaacttttaaaacttcgataacaaataactttt

SEQ ID NO: 39454 - DNA, 2653 bp, Zea Mays
atatgtgtgatttatttgtttctaaatattttccatgcatattctttccaaaccaggcggctgacatcattgctgtttctacctcgttgttggataccttgccagcagtcacaacacctactgaaagggcagatgatgatgatgagacacccatggatgttgatattaaaattaatcttgatgttgatttggaaagacagataactgcagcaattgatccaaagctacttcaacatttggtgaatgctctcttcagaggtacattaagcataaatgattctgatctgtctgaaccatcagatgctgaagtggatgctgtaggatgtatttgtgcttttcttcatgtcacattcaatacattccctctagagcgaattatgactgtactggcctaccggactgaaattgttcctgcactgtggaacttcataaagcggtgccatgcaaaccgaagatggccatttttttcgaagtttgcatcttcattacctgctgatgctcctggttggctccttcccatgtctgtattctgtcccatatacaagcacatgttgaagatcattgataatggggagttttatgagcaagagaaacccctttcccttaaagatttgaagtccttggttcttattttaaagcaggcattatggcaacttttgtggattattccatcctcttctactcagaaagtgtcatccaacccttcaggccttaagaagttgtcagtggagaatgtcaagatcagagctagggttgggttgtctgaattgctcacacagttgcaagactggaacaaccgacttccattcacttctgcaagtgatttctattcccaagaagcaacaagcgaaaattttgtgtctcaggcaatacttggtaatactcgagcatcagagatcataaagcttgctccttttttggctccatttaccagtcgagtcaaaatattcacttcccaattaacgagttctagacaatcaatatcacattctgcattgacaagacaacggttcaaaataagaagaaaccgacttctggaagatgcttttgatcagctaagtttgctttctgaagaagatctcaaaggaccgattcgagtttcatttattaatgaacatggcgaggaagaggctggaatcgatggtggtggaattttcaaggatttcatggaaaatattactcgagccgcttttgatgtgcagtacggtctcttcaaggagacggctgatcatcttttgtacccaaacccaggatcaggattggttcatgaactacatctgcaatatttcaattttcttggaagtctacttgggaaggcaatgtatgaaggcatacttgttgacttgccatttgcaacgttcttcttgagcaagaattgtatcgacatcttctatttttaaagcattacaatggtgatatctcagagttggaactgtattttgttattgtgaataatgaatatggtgaacaatgtgaagaagaacttctccctggtgggagggacatgcgtgttacgaatgataatgttattacttttatccatcttgttgccaatcatcggttaaactaccagatccgtgcacaaagtacacacttcttgagaggttttcaacagcttataccaaaagactggattgatatgttcaatgaacatgaaattcaggttcttatatctggctctttagaaagcttggatattgatgacttgcggtcgaacaccaactattctgcaggatatcatccagatcatgagcttgttgagatgttttgggaggtcttgaagagcttaagttcagacaaccagaaaaaatttctcaagtttgtgactggatgttctcgtggccccctccttggatttcagtatctcgaaccgaaattttgcattcagagagctggtgttccaggtctggaggagcatgcagaccgcttgccgacatcagctacctgcatgaaccttctgaagctccccccctataaaagcaaggagcagatgcaaaccaaactattgtacgcgataaattcagaagctggttttgatctaagttgatcatgatcgggattcagtatttgcagttcagatagtcgctattaaaggcaccaagggccgaactcaaccaaccatcggccccatttgaagccccatgaatgaaggaaatgaaggaaaaaaagaaagaaacgcagttgtttctcagagtagttgaatgtctggagggaggctgcaatatagctgtctgctaactaagggcttcgttctccaagagaaataggcagacgctgtctaatcaatcatgggcatgtacatatgtgcatcattttatacagaaattttatatgtatctaatcaatgctggtttgcggtcatctggtcctttttggcgcatcacttgctcaccttatcccaatttagggctgatttgttaacaatagaattagatgggatacatgagaggaaatccattactatttaaaattaaataacaagggattttctctcatggatctcatccaattcttttgttaccaaatcagcacttagtctttggaaggaggggattgaggggtgtaatctagcttatcaattatataaacacttaatgacctatttatggattactataatctaggtatctagattatataatctacataataa

SEQ ID NO: 39455 - DNA, 318 bp, Zea Mays
tatcaatcgatctaagcctcgctacgcgacaagaaggacaatcggaacatactaatcaggcactcaccaacggtagcggcggaggtgatgttgcccaccatgtcgcacgttccccgcggtggtcctccaccaccgatgagcaattgccgatggctcagtcgattcaatgctttgttcggtcacagtcaagcttctacaacgtctaacgatacccttggaccccttcctaaagctctggcggcatccacggctctaggtgccgacggcggatctccctcacccgcaatgcttattgttcttcatttagggcaatagaga

SEQ ID NO: 39456 - DNA, 3307 bp, Zea Mays
gccgggcgccctgccctgcttaaaaacctcggcccttaattcgctcgcaccggttactactgcagctcctgcttcctcacaccactctccctcgcctgccagagcaggaggaagaaagattggcaggaaccaacagttcatagaccaaggagcgcggtcggggaggaccgaagagagacagagagacggcgagggagcttgcaggtgtaactgttgccgtggaaacgggggagcgatagagagagagacgggccgggacggaggagggtcgcaaggaaggaaaccaggtggaagctagcggagggggagaaatggcgtgaagcatggctggatccaaggtttcgcctttcgcgatatcctgcctattctgcagcgttcgtctcgagttggaaagcggctaccacgcaccccggcgctgtcttgcccggcctgctcatcgtcgtcgtgtataaataggagcagagggggggccagggcctcagaagtcactgcagcgtcacagctaagagatctctcctcctccacctacagctgtagagcgagggagcgagcaagagggagaagagaaggttggtggcagtaggtgggtgtggctagccttcagccagccggcaatggatttcggcgacgaacctgagggctccgacagccagcgccagcggaagcggtaccaccgccacaccccgcgccagattcagcagctcgaggcgatgttcaaggagtgcccgcaccccgacgagaaccagcgcgccgcgctcagccgggagctcggcctggagccgcgccagatcaagttctggttccagaaccgccgcacccagatgaaggcgcagcacgagcgcgcggacaactgcttcctgcgcgcggagaacgacaagatccggtgcgagaacatcaccatgcgcgaggcgctcaagaacgtcatctgccccagctgcggcggcccgcccgtcgccgaggacttcttcgacgagcagaagctccgcatggagaacgcccgcctcaaggaagaggtgaaccatgagctgacaaccacgcgctgtctccggcgacgtcgtctcgtcgccgctggaccgggtgtcgagcatcacgtccaagtacctcggccggccgttcacgcagatgccgccggtgccgaccatgtccgtgtcgtcgctggacctgtccgtgggcgggatgcccgggcagggcctcggcgggccgtcgctggacctcgacctcctcagcggttgctcgtccgggctgccgtaccatatgccggcgcccgtgacggaaatggagcgccccatgatggtggacatggcgacgcgcgccatggacgagctcatccggctcgcgcaggccggcgagcaaatctgggtccagggcatgcccggggacgcgagggaggtgctcgacgtcgccacctacgacagcctcttcgccaagcccggcggcgcgttccgcccaccggaaatcaacgtcgaggggtccagggactcgggcctcgtgttcatgagcgccgtcgcgctcgtcgacgtcttcatggacacgaataagtggatggaattcttccccggcatcgtgtccaaggcgcagaccgtcgatgttctcgtgaacggcttgtgtgggaggagcgagtccttgatcatgatgtacgaggagctgcacatcatgacgccggtcgtcccgactcgcgagctgagcttcctgcgctactgcaagcagatcgaacaggggctgtgggccgtcgccgacgtctccctggacgggcagcgcgacgcccactacggggtgccgtcccgctcccgtcgcatgccgtcggggtgcctcatcgccgacatgtcgaatggctactccaaggtgacctgggtcgaacacttggagatcgagcacatgctcccgatcaacgtcctctaccgcaacctcgtgctgagcggcgccgcgttcggggcgcaccgctggctcgccgcgctgcagcgtgcgtgcgagcggtttgcgtccctggccaccctcggcgtgccgcaccacgacgtcgccggagtgacgccggaggggaagcggagcatgatgaggctgtcgcagcggatggtgagcagcttctgcgcgagcctgagctcgtcgccgctgcagcggtggacgctgctctccggcaccacggacgtgagcgtctgtgtctccacgcaccgcagcacagactccggccagcccaacggcgtcgtcctcagcgccgccacctccatatggctgcccgtccccggcgaccacgtcttcgccttcgtccgcgacgagaacgcgcgctcccagtgggacgtcctgtcgcacggcaatcaggttcaggaggtgtcgcgcatccccaacggctccaaccccggaaactgcatctccctgctgagagggctgaacgcgaaccagaacagcatgctgatcctccaggagagctgcgcggacgcgtccggggcgctggtggtgtactcgccgatcgacatcccggcggcgaacgtggtgatgagcggcgaggacccgtcgggcatccctttgctgccgtcgggcttcgccatcctgccggacgggcggccggggtcgtccggcgcgggcgcgtccagcagcgccgtcccgctcgcggcggcgccgccgcctccgggctgcgtggtcaccgtcgcgttccagatcctcgtcagcaacctgccgtcgtccaggctcaacgccgagtccgtcgccaccgtcaacagcctcatcggcaccaccgtgcagcagatcaaggcggcgctcaactgcgccggcccttgatcgcctcgcctcacccccgccaccctccgccgccacagtgactgacgagagttggtcggcccgttgaatgctcgcattcatggagcccacctgccgctgctcccgcgaagctggcgcaactctctcgctctccatcaacctatccaccaccaccaccaccaccataacagccttttttcccattagatgcagtgtcgttttcctttgctgcttaaaattcgcaggattcgccgaggttttcttcttcttttcttccttccttaggcattcgttcgtgcgccaaagatccatcgaaggctttacgagactgagggagtcaagaacgcaccatgctaccttgtccctttcctctcgctgctgccatttttcgcccctcgttcttccttttccctggcatggtcatccttgtcatgtcgtcattgtcgttggtgccgcagcagaggatgaatggttcgggtattgacttctgtccattaatgtaaagccttcaatgaacattcatttcgattataaatggaaaggaaaaaaaagttctggt

SEQ ID NO: 39457 - DNA, 3294 bp, Zea Mays
atggaaactctaccaaatggctcagtaaataatgctgagcttaaccaggaaaatgagaagtccatgtatgctagtgagtctgaagaagcacgggatatttttgtttacagagaagatgttgtgagcttgaagtccaaggaggatgtccgtggtgtagtattggaggtagctggggaatatgattatgatggtagcatcactgatgatgacattgatactgaggaacatgaagataaaactgcttatggagctgaaaatggtgttgccgatggtggcttgcagtgcagtttggggcccggggagcccggtgcctccacatttgttcttgtggcttacgattatatcgaaagcggaggagcttttggggatccatacaaactctacggtgtctcacagagtcagaaactattaccaaacaaaacagaagatgatagcatgtcgatacaactagaaacgaagggagatcagcaatctgttcctctagaggagcagaacccagaggaccttactcttttgtctcgtttctcatatacaaactggcaattaactgactggtgtctttctcagcgatacacttcatgtactaacgataccatgattgattctgataagcatacatggcagatatgtacatgctcagaaaactcagttccactgtctggtattccagaatctcaagctgatgctcagattgatacagatacaggtcacaggcagacagatgttgattctactgcagatgtattgagtatgtcggatggagataattcatgcatagccaaagaatcagaaacaggaactagtgcatcaagcatctcaaatgagggtccacaggacaatgcaacatctagaaaaaagtttaggaaagatgggacaaaggaatgtggagtagccgcaacagcattgatccctatccacagtccaaatgaacatgaattcttcccggagcagtatgttgtggataaagtcacaaatgatgttggtgttgatgattcttctgaaccaaggcgtgtgggtcttgttagaggtgttaatgctaaggaccgaacagcaactgtgtcatggtttaagcctcctctacatccagaggagccaaaggagatcgcatgtaacgaaattgtgagtgtatatgaactggatgtccatccagattatgattattgctatggagatattgttgtccgcttgccgcctgttaaaccggtaattgagtcaaccaatagcaaggaacaaatggaactggataagacgttagattcctcggaaggatttgctgcttcatattctgcaccccctgatactagtgcagacgaacagctttcacagaaggaatcctgcttgcagtttacaagcctctcttgggctggaaatatagttggctttcaagacggtgagattgaagtcatttggggtgatggatcgatttctaaggttggtcctcatgaaatatatgttgttggtcgtgaagatgatggtgcctcactagatgatggaacagcctctgatggttctagctgggagactgttgatgacaacgaaatggatgtacttcatgattctgcaaagggtgattcgcaaaatgtacctgagaatagcattggaagggaaaatggttcattcagctcccaggatggaagttctgttgcaactggtcccctttcagttgcttttgagtttgtgacccgactggcgagtgatctctttgctcgaggtagaaggcatttagatggatcatcagatgctatggatgaagttgagtctcactggtctaatgagatttcagaaattggtgatgacattgataagtgtaataagaatcatgtggaatcaccagagcatgctgcagtcatagaaaatgattcttctgtcgagaagtctgtagatgtggttatggctgataatcctgtacattctgaatgtttcaaacactttgatgttctgcaatgtcctctagaccaccactaccttgaaaacacaacccaggtggaaaaaagtgggtcaaaaaggtacaacaggaatggagcatacttgagaagaacctaccagactatatttatgtcagggtatttgaggatcgcatggatctcttgagagccgtgattgttggagcaagtggaacaccctaccaagatggccttttcttctttgatttccaccttccacttgagtatccgctagtccctccgtcagcatactatcattctggtggtttgcgtgtaaatccaaacctgtatgtggacgggaaggtttgcttgagtctcttaaatacctggactggcagagggaacgaagtttgggatccatcatcatcaagtattctccaagtactagtttcacttcagggattggttctcaatgaaaaaccctattttaatgaggctgggtatgagaagcaagttggtactgttgaaggggagaagaatgcagtgccgtataatgagaatacgtacctgctgagcgtgaaatccatgctgtatatattgagacggcctcctttgcattttgaggattttgtgaagagccacttccgcaagcgtggtcactacatccttaaagcttgccacgcctatttgcaaggaaatgttgttggcactctcaccgacgacgcgtgcaccaccgacagaagcaaagagcactcgagctctgttggcttcaagcttgtactagcaaagattttaccacggttgattacagccctgaaggacactggagctgactgcgaccaatacgagcacctcgggagaacagaaaccgttacagaaagctgatcattgagtgatttgtacttgattcttttgctttttctctgttttttggggtttcagaaagatggtgacttcaccaccaggctgttttcctataaatgtacattcaaagtttgttgtttcagtcaaacatttggaaaatttggcccaaatgatttagggggggggggggggggggtttgaagtcactagagataatagttagttagctaaaaattgttagtgttattagctagctaactattaccaaatttgctaaaagtatctaatatctaaactattagttagactgtttggatgtcttggctaattttagcagctaactaatagttttagtgcatttaaacacctcttattcgttacatggaactgaactacactgtacagctgatgtttggttaaacttgtaccagcgaagagttggcaatactggaaccaggcctagagattcctggaacagagatttgatgtccatgtatttacgggtggtattggtttcacgaatatacactcgcgggggataaaaaac

SEQ ID NO: 39458 - DNA, 4587 bp, Zea Mays
aaacaacccatccgctccatctgcgagcaagctctagcgatctagcagcatgcaggccctatgacgctcgccatcctcatccgggagcgtggccatgcctccgcccgcctcttcccccacccccggtgccccttccacacaccccccgcaccgctgtcctgcccctctcccctcgcacacccactcccttctaccatctccatgcttggcgccctcaccacctccccgaccgcctctgagctcatcgccttcccccatagcccgaacgagatatttgcgtccgacccgcccatcgacgtggacgccatcatggagaacgagctacggaagaaggacggcggtgcggatgtggaacatctcagatctgtcactctatctccggcgacctgggtcgggcgaggcacttcttttatgtgatgcctgagtggaacttggtatcctggaacaaaatgttgggcgcgtatgcctgtggcaggatgctcaccgaggcgcgggacctgttcgacgcaatgcttgccaggaacagcgccaccttccgataattattagctcgcctcccctcccattttctcagtacaatctactccatgttgttgctgtatgatcagacaaaattcttctatcaggttcgcccgatgagaagaaaggaaaaaaagtactctgaattctgctttctcacgctcgctgttcatcgattcccgagccgattagcagagagtctgctgtttcttctctctgaatttggatggagagactgagctccgaattcagtttcgacacggacgcgggatgatgaatcagttggtcttttttcttgtgctgctgttgggttttcttagattgaggtggtggcacgcccaaagttcttccttccctcactctgcccaaccacgtagtatctcggttcctttgaattctctctctgtttctagcgttggggccctcggggttggatttatgacctggatggatgaattctctgaattcccccttcctctttggatgtttctaccattggaagaaagccaagctctgttccctttactcctgccccctttttttatgtggttctacttgtgctgtgttgcaattacttattactgcaccccaagtgcgttttcgaccaaggaaatcttacgtcttttcatcttcttacttattactgcaccccaagtggtccactccacatgatggccatgtctgcgttgtttgaggctatattattactcattctaaaggatggtcaaggtggtgatgaaaggaaggtatcagaagtccaaaagcacttagtgcccagccgacagcgatgaggagcatgccgcagggcaccgagcaagcgaaaaaagatgggccagctgtctgtgctcacgaggatgcacatcttctgacgttagttaagcctgacaagcacggggatgaacatcgaatggaggcccctctcttgtcctacaagtgtgaggtcgatgacaaggggttttggacgaaactgaagactctatccactagtttatcaaggagctgatggcaccaccaccatatctacgttcgtggccgggcaattctcagggagggcctcggtgtctgtgtttggttatgctactcagagtgatttgaagttggccctaccctgctctttttaaggctgaaatgccctggtcagcctgaagaggaaatctctcagagaaacaaagagtcttcaaaatggtgaaagggtaatataatgattttaccttcctgctcggttattttagtgcgttgtttgccttatagagtaaaacttcccagttccttgtttctccattatgttttgtttaatttgtcttaattatgcagtatactgaaataacttacacaggagaaatttgaggtaaagtattttagaaccggacaaccttcagtttcagtattcagagttagacaatcacacttttccaaaggtatccaatatacaaatgcattagcctatgtgcgagtaaatgatccagtatatatagtcagacacatgaaaaaagccactttaaaaatcataagatttagccttattataagatagtatggcttatctgcatcttccagtataaaaatcatgtcactttaaatcattgcattgcagttcattataggatacatttcatctagagccttattatggagacatgccactgctgaatgtttagcttcaagttgttctctagagccttatatggagactgactgtttggcctgcaaaacatttctctgcagttttaacaatatatttagcattcatggttagtgtacaaagttactactatacacttgtgaagtggaacttgatgatatcttcattttttgactttttgtgctttaggctcctcttcttggatcgactgcagcagttagatctgcacatgtatatctttgtttaattatcgtctccgtattgtaagattaatttgagcttccattctacttttgctccacatatgaaacattaaaagatactctaattatgctatttaactccaagggtggaggtggaatgggtgattataaccacctgcaggttgtgtacatatctttagtacatatccattatgctatttaactccgaaaggagacaatatgcatcagtttcaacaactttgttgtttccttttcatgctgtcttataggatggcattttctgctcaatttgtccgttgctgatttcagtcggagattagattagattagatatgtcgctgatggaagtccaactaatagcgaactgaagaccgccgaccttgtgtctacacccgcacattctgttgcatctatacctccttctacaccagcacttcatgttgctcctgcacttttgtctacccctgtcagatgctcatctccatttatcacgccaccatattgttcctcaggtatgcaagcaatttttatttttgatctttctccttgttagcttgattgatctttctccagtatttatttgtgggcttggttaatctaggttccatttagttgttgaattagttctaaaatcatagtggaaccaaaataatgtgtggatatttgcaaacgagtttctcttgaagtcatggtgtgaggaaaaaaggtaatgtccttcacattattctggtttagtataccttgttgattattgacatatgttggtcatgttggtgctccactaccttgttcgtatattaaggcatgctacatttcttaactacgtaccaatgatgtggatacgatttttgcagcaaagctatttttatcctggtgttatcttatctattctcatgacagtgaatttagttttattgttgacctcccacggttcttgacttcctaacatcggccactttatttttagttgattgactggcatgagggtggatacttgactgttgatttaccaatgtctcggggagaagttgtcattgggggtccaaatgtaactaaaggctatttcaaggatgaagctaaaacaaatgatgattgtgagcccatatatggagaacattataatcaatactgatcctttccataattactgtgttgcgcttgtggcagctgcacaaattgagctgtaaagctaggcttcccaacaaggagttaaaacaacaattcctcaaatttgtgctagaagcaagaggctgttaaagaagtgctctttagcaaaggtttcgtcattcttgcctaccgctgtccctttgcttcagaatacggtgaaacagaagtccttcattggctcttctcatcttggctcacatgcagtacttgaataccagtttcttcctgagcagccaagtgatgcatatgagaggggaagccagttgcgcttctatgatgctctagcagaagtgttaaactcaagggtagattcgttttctataggatcacactttacccatgtagttgagcaggcacctagctatacatttcacagtcaatcatctggttctagctgtttgtcaaatattattgctagcatggctcaaatccaaatattattgctagcatggctcaaatccacggtcaaaaattggcatccctcaagttgtcagatttgaaagctccctcgcatcccctaaaagattgggttatcatgatgaagaacatgtcacgtggacagaaaaacacaagaactatatttatggatatactatttttttcttcttttgtattattatattcatatccttttttacctttatattattattttttatatatgttgtatttgtctaatattacttcatcataatgaggaagctaagattgctagggaggttgaggctcatgaaaagagaattaaaaaggagcttgagagttgagaagcaaggtctactaaatagaaagaaagaagaacaaatgtagagggaaatggagagacatgatcacgagagatgtaatgaagagaggttcatgcgtgaaaggcaaaggaaagaagaaaattccattagcaacagagacgtatacttataactattatggtagataaaaaatgttacaatgtctctcttctatagaacgaaactgggatatcattcattgatatatgttcgattttattcaataattattatataattgtgcaccgtcgca

SEQ ID NO: 39459 - DNA, 1428 bp, Zea Mays
caaggacttctttttctgtaattggcaagtccaaatcctccaggtttatgactgggatacaatggagagattttggcagcaatgtattttcaattatctacgttgcaatcccgaagagcactatttccttcttacggatagtcctgttagtacacctgaaagtcgtgaatgtacaggagaaataatgttcgagaccttcaatgtccctggattatatatttctgttcaatctgtcctcagcctttctgctggatatgcatatctgaaaagtctttctgatgacgattccgataccaggtctgatatgacaggagtagtagttgatattggggatggagctccacaaatcgtgccagttgtaaatggctatgtaattgggagtagcataaagtcttttccttcttccggaagtgatgtaacccagtttatttcgcaacttttacaggaaagaggtgagcttttggcacctgaggattctttggatatatctcgtaaagtgaaagaagtgtattgttatacttgttcagacattgtcaaggagttcaagaagcatgacaagaagcctgataagtacatcaaacattggtcagctgttaaaccaaagacgggggtcccatatacaattgacattggatatgaacgctttcttgggccagagatcttcttcaatcctgagatttactctgccgacttctccactcctttacctgagttgattgataactgtgttcagtctgcaccaattgacacaaggagagctctgtacaagaatatagtattatctggtggatctaccatgtttaaagacttccacaagagactccaaactgatataaagaagatagtggatgaccgtgttgctgcgactaatgcccgtcatcgtgtggaagtgagacctattgaagtcaacgtggttgcccatccaatccagagttatgcagtttggttcggggggtcagtagctgcatctaaccctgaattctttgagttctgccacacaaaggaggaatacgaggaacatggagccagcatctgcagaacaagcccggttttcaaaggaatgtactgaattttcctcacaacccatcgtctagcaggagagttcatttaggtttcttcgatagaatagtcaattttgattcttttctggtccgttgcacaaccattgtcgggctcgggccaccctgactagatttgtagttgtagctctgtttgtactagttgtttggtctgtgttctgcgtcgaatgttgtgtatagccaacagctcggttcctgttcgaggtgcttgattgtagccagaaggcccagaaccttggacagtttagaggggaaatattgttttttttacattagcttgttcagacagatttacggaactcatataataataaatcaggctaatctagagtggccaggatagaagata

SEQ ID NO: 39460 - DNA, 3608 bp, Zea Mays
cacaaccctggttagtactagtacagtagtaataatcgattaaccagaaaaaacctgaaagtgtaacttgatctggaattcctggatccgtgcgcacactctaggcgttgtgcgtgtttggtcccgtcaatcagtcagtctttacgacgcattcgcattcgcgctcacctccagaaccgagatccaccaccgcgcaccttcacgactcggccggcgctccgtcactcatgatggccggccgcccgcgcccgcagacggagctgcactcgccgtccgcctccacgcggcggcgtgagcggtggctggttgtactcggcgtcgcactccacgccgtgtacatgctcagcatcttcgacatatacttcaagtcccccatcgtgcacggcatggatcccgtgccgcctcgcctctcggcgccccccgccaagcgcctcgtcctcctcgtcgcggacgggctcagggcggacaagttcttcgagcccgacgaacgggggaggtacagagcgccgttcctgcgcggtgtgatcgaggagaagggccggtggggagtcagccacgcgcgcccgcccaccgagtccaggcccggccatgtctccctcatcgctggcttctacgaggaccctagtgctgtcaccaaaggatggaaggccaatccagttgagtttgattctgtattcaatcagagtcggcacactatctcatttggaagtccagatattgttcctatattctgcagtaacctacctcacagtacctgggacacttatccccatgaatatgaagactttgcaacagatgcatcatttctggatcattggtcatttgaccagtttcaagatcttgtcaacaggtcttttgacgatattaaattgaggcagttactcctacaagataagttggttatatttttgcatttactgggttgtgataccaatggccatgcacaccgaccctattcaagcatatacctgaacaatgtcaaggttgttgaccaaatagctgaaagtgtgtacaatcttatggagaactacttcaatgacaatcaaacagcatacgtgtttactgcagatcatggaatgagtgacaaaggaagccatggagacggacacccttcaaacacagatactcctcttgtggcatggggtgctggaattagaagcccaaagttcctggcttatacagagaaacctgatgacggctttcggtttgtagataaccacaaacatgatacacccactccaaaagactgggcccttgaaggatttgaaagagtagatgtcaaccaggctgacatagctcccctaatggctacacttgtgggtttgccatgcccgatgaattctgtggggagcttacctactccttatttgaaactaaggaaggctgatgaagttgaagccgttctggccaatacaaagcaaattcttaaccagtttctccgaaagtcactatgatgaccaagactaccaaattaaacaacaaaccatactgttacccctaagcatgtcttcccttatcgatctcagagctgaaggaatccagttcactctacttcaaaccttttaagccactggcgaacttttctttagtgctcagtcagattgaggatcttatatctggaagggactatgaaactgccatggagcaatctgaggagctccgaaggctggctcttgctgggcttcattatttccaaacatatgattggttcatgttaatgactacaattacccttggatatattggatggatggtgaacctcattatacatgtgctacagtcttatacatcatatcctgtaattcttctcaagagggctcaattgtatcctaacaatacctccatgaaagtttacatttgtggatgcttctttatgggtttgtcatccattttgctacttctagagaaatcaccacttctttaccatgcttatgtattgtgcacaatattcctttggacaagaattgtacaaaaaattgattttttgaagtccgtatggagagaactagctaatatgcccttcaagtatatttttaatctcctgaccagttcagttgttgcactgcttgtattggagtttctggttatgagcttctttgataggaaaatttatacgtggtgcttcttggtccttgggatactcggttcaacatatgtagcattgtttattcaagctagtgctgcacttgcgatatacatatggcttgcttgctggttcctgtctgtatttactttgatgccagctgaaattccagaaaacaacaacttggtaatttttagtggagggctcataatacttattggattagcttcaagatggattaaatcaaatagttccagcttttggctatatctcactcgagcaaataaacgggatcctcaatcttttaaactctattttgttcaggttattttagtcgcaatatcttcgataatggtgtggctatctacctcacaccggtcccagaacagagaattgctctcactacaccagtttatcaattggtctgtagctggtgttgctatggtgctacctcttttctcaccacctagtgttctatcccgtcttacatctatattcttgggttttgctcctccatttctgctgctttccattggctatgaagcagttttctatagcgcttttgcaatggtactcattggatggatatttgtggaatctgccaacctgtattgctcagaagaaagtggttctgcacgtcgcagaagccttgcggataactcagtttttggctatgaagaaagacacctgcgactatctgatttaagaatccctttgttatttgtgatattatttaatgtcgccttctttggtactggtaattttgcaagtattgcaagctttgagatctcgtctgtgtacagattcattacagtttttagtccatttcttatggcaggacttcttatctttaagttgtttattccgtttatgcttgtcatatgtacgtttagtgcgatcaccaaggtcgtccgtatcccacggctgggctgttattttcttgtaatactgctttcagatgtaatgactattcatttctttttcctggtacggaataccggtagttggatggaaatcggcaacagcattagccatttcggaatagtgagcgcccaagtggtcttcgttttgctgctctttgccctcacgaatatatacactagagatattttggtctcgtctcggcaactaaccgcacggaaagttatgtaaatcgttcagtttatttagaaatccaaatacatccatccttttatttattcatttttgggtcgactttcattttgggatcaagtttgtagcttagcttttggctaaagttttgtagcttagcttttttgttttctgtgaatggaccttggtgtcaaatttttgtgctaatttcattcgcttacttacagcctgaacagattttacgtacaccattataactatattagctttcctctcgggctatgataaactgaagttgtcttgatctagttcttctcagagttgaagttgatgaagcaatcactggaggcggagcttaaaattacactgcatgctcagctcaaccaggcatagtaattagtaagcaagcaac

SEQ ID NO: 39461 - DNA, 1787 bp, Zea Mays
aaagcacacgcacaccaaactaccaaaccaacagagcaacatcaatgcgccttccgccgccatcaaccaccgcggccgcagccgctgccaccgtcggggccgtactcgccgcagtcgccctccgccgctacctgtccgcttctcgccaccgcgaacccgcccgcgtgcccatgtccgcggccgccggagccaccacgcttgtggtgtacggcaaatcggcgcaggagcaggagctgctggcctccgcggccggttccgtcgtcctcggtgagggcgatccgtccggtgatgtcgccatcgcgctcgcctacgagagcgcgggcttcgacgccgccgcgtacatgagcgcgctccgggcgcgccggttcgggaggtggatgctctggacgcccaggattggttccacgcaggatctcatcacgcgctcgtgttcgcaggaactttgcaaagctaccggtgggcgttgtgtgcgttgccgacgtgcagttcaaagggagaggccgttcaaagaatgtgtgggaatcgccaccaggctgtctcatgttctctttcacatcacagatgcaggatgcacggaagttgccccttatgcaatatgttgtctgcctttcgataactgaagctatcaaggagctgtgccgtgccaagggactaccagaacttgatgtgagaataaaatggcctaatgatctctatctgaaaggattaaaagttggtggcattctatgtacctcatcttatgaacccaaagtgtacaatatttgtactggtgttggtttgaatgttgacaatgagaagcctaccacatgcttgaatgctgcacttcaagaggcaaatcatacatcacccatattgaaacgagaagacatattggcatacttcttcaataaatttgaaaaccttttcgagatcttcatgaaccatggatttcaggttcttgaggagcaatactataactcatggcttcatagtggccagagagttgtcgtacatgatgcacatgaaaacaagtcaggcagtgtcgtcaccatccaggggttaacaccaactgggtacttacatgctattggtgaggataacaaaagctatgagttgcacccagatggcaacagctttgatttcttcactggattggtgaggaggaagatggaagcttagggtatcaatacaatgggatacatggatagattcaacagactgtacaaatgaatggaatgagaacatgatttaagcatcagccccctccatctgtattcaaaccttgtgcttggaataaatagaaggaatgctcttatcacaatcctgaacggccgctttgagacctcaaaccttaacaagtgccccaccctcgcaattccatttgcgacagctcagcataaacaattaagaagacaatcaaccgtgactgaagcccaggcatgagttcagatctcaggtgaagaaatcgcagtgactgaagaccgtttacttgaatgattcatatttcataggaagaatgcatgaaaattatgaagcacatctgctccattgatgggcggacagcttcttcggcagtgtttggggctcatgtttgcatcaggttctgtataactgcagtgttttttctattagtgaactaagttggaaatctgctgcaactgcaagatttgtagcggtgatgtatgagttggtaacttgtatttgcacagatgcttaactgaaaggacatgttatatattatccatgctgtcgttgttggcttgtgcaagtcgtctgggtaactgcatatgcatcattgcgtgtgttcc

SEQ ID NO: 39462 - DNA, 1905 bp, Zea Mays
atatgtccttattgtaggcgtgcacacccgtgttctgcctctcgacgcctgtctgcccgcgccccccgcttgtgatgcccatctcgtctccccgctgtggcagccgccttcgcgtccgccgcgagatccctccgcgcacgggcgcgtcccccacaaaccgcgctccgtgaaatccgcactcccctcgccgcctccccagcccgcagcctctcctcaacctccctccccaaggagctggcggcggcgcgactgcgtcgggagaggacgcagaggacgccgcgcgggggctgcggcaggagctcgactccgagcaggcctccccggagatggcagccagatccggctattgagccccctaaccgagcggatccaagcaagcatacttgcctatggcaaacaagcagtggacttacacaatgatcgaaatgacagactgttcgtgctatcggtttggaaagaacatgtggaaagctaatctcggatcttgcttccttcaggtacagacaacccttgtttttataggagttgtcagagaattgttttcgtgattaaacatgtgtgtttgtttagtggctggtattgttatcatatacccttgtttttagttctatacatattccttaagcatgagcaaattgggggcatttttagtgaagcaattactggtatgtacatgcaattactggtatgtacatggttaatcaaataatttgcatcatggatgttgttttagtgattaatcactcagaaccgatttcctgatgaactggatacactgtttagtgccagctattatttaagcacaagaagtagtcatatacccttgtttttatgtctgtacataccacctggaaatttacacatggggccattttttagtgaagcaattactaaacctgtatagttctggtggctgctataatttttcctgattaatcagagaattgttttagtgattaaccatgtgtgtttagtggctggtattgttgtcatataccttgtttttaggtctgtacatactacctgagcatgaccacatcagccttatgtttgaacaatttcacacatttacatttgtgaatgtgttgaccgtaagcatcatctttatttaaatcagaaacttggttttacaatgatgtctcattgaagttcttgcttttccttgtttgcaaatctgaaatacccttgtatgttctggcggaaagaagacccaaaggaccttgaacagcaaaatctaaggtttcaacattgcagacacacaagagtccagcatgcgccaacgctcctgcagtttgtgacagattgctcaaagaaaagcaagacagctcgccaatcctagaagtggaaaaaaacaacatagaataattagccagctacagggagtaaaccattaagagaagaaacatcgtaatgccatgtttccaaatgggcacaaagaaacttcaagcacctctagacggaagctgtctgcactgaagatcaggacacgaatatcgcgagctttatcaaggctcgccttgtgcggaaggtgtatttctgtgagatctccaagatgaagcattagggggtcaatcgccccagattttacatgtagctaacttagtagggcacccataatccataatttattctctgtagttgtagcagcgacctagaggtgttattctgtagcacattgtgtaacatgtaggagagagataaacacatatccccattctttctactgaaacaccagaaatagttgctcttgctccataattcattaatgtgaacttctgaagccatgccaaggtcttatattgatcctctgttgtcatattgataaaaatagggtatgtaaaaccttttctcataacagtttaacacatattttatatataagttatcgtaatattacatgtttcc

SEQ ID NO: 39463 - DNA, 1404 bp, Zea Mays
ctttcccgtctccgcaccgcacacgcatcgagcggctcggcggctccgtctcatgagagccgtcgctgctgccgcctcgcccccgctccgcgccctcctcctcctctcccgccacccacgccgcgcaggcttcaccaactggccgtcgctgcctaggggccagaacgcaggacccacagccccgccggccgccaccgcccccaagcctgctgcgccgtccaggaggcaaggccgcggcctcactgccagcctgcctcgccaagtcgcccggatctcgacgccccacctgcggccgccggcgaccccgccaaggtgccctgacagacgccatcagagccacggagttcgtgcgctggctggttgtccgcggaagacggtccgccacctccctgctccaacctcgcacctccggttcaccatgaacccttcgtcgtcctcctcctcctctggcgggacgagggtgttgcgccacatggcggcggagctgcgcctagatatgaggaccgatggatacgtgcgcgtccgcgacctgctgaagctcaaccttcagaccttcgccaaggtccctctcaagtctcacactgttgacgagatcagggaggcagtcaggcgggataacaagcagagatttagtctgttggaggaagatggcgagctgttgatccgggcgaaccagggacacacagtaacaatgggatgaagctttatatttcagacaacaaagtgatcttgacagaaggttttggttttgatggcgttgtccctgtgaaatactttgaaagaatcgaaacatggccaggacgagctccaataccgttccaaagataacaggccatgtttcagcattgctagttcgtacgtactgaaaaatgatttgtcatgatgtatcccggagaaccattttttttggtaattcacatacactattttggggggttggcttttttttttgggtgggggggagtcactttgattgtgttgggacctctcagatattcgtttgatgatttttgcatactctgtgaaaagccgtggttcttcgtgacctttttttttggatttttgtgtgtaacgaaaccgaaagacgagcgagttcttttcttcgtgcttgtcaaccgtatatcctaattatctgaattaggcgatgcaaatccatggcgcttaggacatgatatccgtgcatggagtatgagaagaagtatccagaggatgcagcaagcagaccttgaaatgaaaagtatcatcgatctgagagttgcctgctggctgggctggtgtccttcctgtaagttcattaccatctctgctcctggtgttagagctgattgacgtgcggatgatggcttttaaattttaatgtcatgaggcttgatcattcagaaatacagcatagcagtttggcaa

SEQ ID NO: 39464 - DNA, 1151 bp, Zea Mays
gttgaatttagtttagttaaaatgagtttagttcacttgctatgctgatcttcagttaacatttaacatcataatgtctcatgcaggtacccccgaatcctctgcatccagcacctcatcaaccatcccggtaatggttatttttccctcattcactaatgcattggttgaaacatctaaaagccaatttgtttttgttgcagttctataagttcaatgaagaactagctttgctgcttgtgtctgctgttttacaatgtttgttgtgaattgtagagtgaagctctgctaatagtagactttagctgcccatgcttgtgaatgaaattgtgattgtgactgaaattatttgtcttttgctaataatagaaaactgaatatctgaagctttgtgctaataacataatagcaatccagtcacatagttcagtcacatacaaacaattgagtaccatacaaccataggtgaaactgtgtgttatgctgaaactatatgcttgtaactaaaactaccgaatctgctatttttagaatggcataggtgaaactgtgtcgaagctgatatttttatgcttttcatttgtttctagtttggcaatgaggttttagatatatatgattactagaaggcacttatttcatgtttcctatatttttcgtagtaagagccatgtacaaatttgcatattttgggaatagaaaccatacaattagagcattgcaactagctgtgaggaacttcgtaatgatgatagaggctgagaacaggtaacaccatagctttaaggtgcatctacagccttactatcggcgcactagttaaaaactccatattgtgccatgtttggatctgtgtttttgcaacaccatataggataatatgggactaatattttgctgcccgggacaaggctaaagagatctataatttagaatggggggagtagtgtgcatattatagtttaaaaaatgtatgtgtttttgcatatttttgtcgtaattcgatcttctaaatcaagagatttttattttggtaatatgatattccaactcaagtttacattcagtttagactgtaggttctgtctacttttttgttccgttttagagtatcacctatactcatgcaattttacaagaaatatatgcag

SEQ ID NO: 39465 - DNA, 1991 bp, Zea Mays
gggggaagaggaggaacacgaagatggaggaggaggcgccgcccatggagttggtccgggagaagaagctctctgagaagatcacatacctctgttgaagacagtgatcacatatttctagagtcctctggcttgcaggatggtttgagttgcaagaaggatctccatagttgcggcaccaaagcttcagatgaggaaatttctgatcggttgcaagagaatcatgacaacacccagccaagtgataaccataactattcggtagatcaaactcaactgccctttcttcaagccctactgagagtacagatgaaacggaggtgtgtatactcttctatcacccatctcaattttccacaacaaccattgtagttgttgcctatatgccttggttccagcaccataattcccccctagtcatttgacctttttaggatgaaaagtcccctgccctgcccttcattgatctgaaacatggtcggtatccctgttaggggcattgaatttgagtggctaaatgaaaacattatgttaatattatcaactttgcctacacaaaccagttctagagccctgttagctctgtacataaaacatgcagtgacttcttactttgttttgattttttggcaaacttgcacacttatccagaggatagttatgtattactccctccgtaccaaaatagtattcgttttaggttgttaatggattcatacaatatttgatgtatgtgttttatatatgtgtctagattcattgtcatccatttgaatatggacacaaaaataaacaagtaaaataaacagtattgtggaacagagggagtatttttttactgacatggacgtatgggagggcagatttgctcccggctttaatagtacgaattgtttagtagttgaatttttctgaccttcattcattactgacgtgcatctattgttcaccgttaaaacgatcagaggacaccaaacctacagaagcatgaattaatacaagccctcatgttctccaggttgtaccataccattcatacttgtgcgttcacttttgcattgttgtatgggttataaacaaccacctaccaaccatctggtgttgggtttggatcactatggtgaaacatttacagttaatcggagctaattcgtatagcgactttgaaatcttacaaccacaaactggagaacggatgagactgctgtaacaccttatgataagcacaccttttggttctttgtgactgcaacttttggttctctattgactatatactgtacttctgcccacaatgcttccattccattcactcctgataattttatgaccttcattcattgcatctattgtcatcagagattttggatggttctatccacaatggcatcatgtgtattccttgcagtcatcgtttcttggacaaactgccagtggttcactggcatcttctcacagataagtctatagatcctacgtatttggtagtgatgacagcaacagcagcagtaggagctgcaactctactgcagagagtaattcagatacggtaagcttgttttgaagctctactctgctttatccatgagtttgaatctgctctatcatggcattcatttcttgtctcccagaatgtgcttggctatttttttatttccatcctgcaggaccaagccaactcctcccaacccacgaaggccaagttcagttcaggcgtttcactcttcgacatcctgcgcaggacatcagagcagagcaatcaggaaagctgtagcacagtcagcggtgcatcggttctcggcattcaaattattaaagaggttttctagggtgagctcgaaaaattgacaactcccaggaggttcaagacagatcacagtctcacagatggtgcctgtatggttggagattctgaattctgaccactggcctggaagttcacgacgaaagctgtctagaaaaaggcttcaggcgaggctcgtgaaaaagga

SEQ ID NO: 39466 - DNA, 1388 bp, Zea Mays
cgaccgcttcgtcccgcgcgccgtcctcatggacctcgagcccggcaccatggactccgtgcgctcgggccccttcggccagatcttccgccccgacaatttcgtcttccagtccggcgccggcaacaactgggccaagggccactacaccgagggcgccaacaacaacaggaaccgcacccgccatccgcgctccaaatctcgctgctcactttctaagcgcggggaggaggcgggccagctgagtcggtcggcttccgagtcgtcgtcttcggcggggagcatcggccgcacgccgtctggaaggcgggccggccggcgcggcagcgacgtcgacggcgaccgctccagtcgcgagagtttcgaagcccaagatcagaagaggagcatgcatgaaataagtagaggagaaaggcggagttggtctgggcagaagagaaagcctgaacctttagtagaaaagaagtctgttcgtgctgctgcagaagagttctttgcaaaggcttctcaggaacttattggacatagtgattgcaggactattcttctgaaaaatgtgataggacactactctgaggacatccttcgctttgacatgcattcagtgaaccagcttccagtgcctcttgtaccgctcatcggcaagggagtgctagaggaggaggttatggtgagttttgtcgcgactaacggtgagcccacaactacgaccacatcgaagctggtctggtggaacctcttggagcagatgacgatgacgccgacatcctgcacttctgtgatgttgtcgaccaggacgcgggcccctctgttgcgcgcgctctacaaggctggatccatcatcgtgctcggtaagactgacttccttaggccagacatgtctgtccataggcaggtcattgataatgggattcttccaatacttgtgaagatagagaagaaaaaagagaagctccttagtgaaaaaatggaggtgatcaagggtctaagggaaaggttttcacattgcaactcaaacatggacgcgaaccaggtacaacctgtgttggctccagaagcatctgaccctcaacattcatggctagactgcagattggatattagcaagcgcagccctaaacaacttggaattctccaaggttggtcgtctctatggttggaagaaatgtccaaatgctcctattgtgatggctttaaagcaacaaaatgaagatgtgaagagggagtttaatacgagactcacatatattgttacacaattcaagatggtgatgctgacagctcgttggacaggctgtggcagaagaaggctgagatcaagcagtaggtcttgcacgtagttccaccaggaatggactcttgagggatactgtgttagctatgtttta

SEQ ID NO: 39467 - DNA, 3693 bp, Zea Mays
ctcctttccgtttcgcagcgcagcaggatccactaggaccactagatgcagtggagcatcgagccatttccgggggtgagttgaggtgagcagaaccgagctacctggtggaggctggcacctagctaatccacaggaggaagagaggagaacgggagcctttttgatgacaagaacggaggcgtcaggcgtgtgattaacagttctgaagagagtgttacctgcatctgcatggaagagggaggagacccgcagcttccgagcatctccgtggcacgcaccacgtccgaaggcgcgggggccgtcgacttggatctccttgagcagctactgtccggcgacaacggttggctcgaggtggtctcgcgctcgcccaactcggtagcgtttcctccaccctcggccttcttctcggctgacgcgacggccaccacagtgacgacgacggcggcgccggccgcgaacgccagctggttgattcagacgggcggcgcgagcaccccctccgtgcgggagcggttcagccaggccctgtcctacatccgtgatacgcagagcgacggcgacgtcctcgtgcagctctgggtgccggtcaaccgcgatgacgggaagctggtgctgaccaccagcggtcagccgttcacgctcgaccaccgctccgacagcctcatccggttcagggaggtgtccaccaagtaccagttcccagccgacgttaggtcaggggagtcaccagggttgccagggagggtcttcatcggcaggctccctgagtggtcgccggacatcaggtgcttcaccagctacgagtacgccagggtgacagatgcaaagtacctcgatgtccacggcaccatggggctgccagtgttcgagaaaagaagttacagttgcctgggcgttatcgagctgatcatgacaaagcagaagctcaacttcacctctgagctcaacaccatctgcagtgctctacaggcagttaatctcagaagtacagaagtttcgagcattccacgcaaaaagtttagcactgcttcctacaaagatgctttaccagagatactggaggtcctgagggcagcctgcttgacccacaagctgccattagctcagacatgggtcacatgtactcaacaagggaaacgaggcagccgacattctgacgagaactacaggtactgcatttccaccatcgacgaagcatgctttgtgaatgaagccgagatgcggggcttccatgaggcctgctccgaacaccatctgctgcgtggcgagggggtggcagggaaggccctcacgacaaaccagccatgcttcctgccggacattggatcctcaactaaattggaataccccttgtctcaccatgctaagatcttcaggttaaaaggtgcagtggcgatccgactgcggtgcacacgcactgggatagcagacttcgtgctggaattctttcttccaacagattgtgaagcactggaggagcagaagacagtgctggactccttgtcaggcaccatgcgaagtgtttgccagaccctacgtgtggtcacagatagagagatggaaggcgaagcggcgctggaaatgaacgagctgaactcttttactcctcctgagaaggacaaagatgagttgtcctttggaggcaattcagcagatcgtagaggggcctcttggacaagtctggcaggaacttcacagcaagaacccgagttagctgcattgcggatgcatggaacgttctcacctgtggggcagggtccatctctatctggtgttcaggcaactgctgaaggcagtaagacaaaaaggcgcacaaaggccgagaagaccgttagtttgcaggttcttcggcagtacttcgctggtagcctcaaagatgcagcgagaagccttggagtgtgtcccacgaccctcaaaagaatatgcaggcaacatggtataacccgctggccatcacgaaagatcaagaaggtagaccactctctaagaaagctccaacagatcattgattcggttcatggtgcagagacagctttccagctaaacaccctgtacaaggatctcacagacacctcaatatcatctgacaacaatttgtcaggaagtgtcacggttcctccaactaaccagagcaatctcaccgacttcaacaagcaccaaccccacaagtcaagtagcaatatgccatcaacttcacactcacactcctcatgcagccacggttctcagtcaagcccctcgtgtagcgttggtgcaacagaacatgcacaacagggtataattgatctgatgaagtcagaaaatcctgtgaaagacagctctattcagactatgcaaacagaaaacacttcattatatgagcatttctcagttcatgaggctccaattgatcttctacaggatgttactgaaaaggctaatggtgcacatcattcttctcgaagcctgtcatcccccaaccccaagcagaacacagatgcaaatatgagagtaaaggcaacatttggctcagaaaaggtgagattccgactaaacccagagtgcaattttcaaggactgaagcatgagctagcgaaacgtttgagtatagtagacacaaaccccttggttttaaagtacttggatgatgattcagaatgggtcttgatgacatgtgatgcagatctgcaggagtgccttcatgtatacaaactagcagatatccaaacaatcaaaatttcagttcatttagctgttagtccagctacaagggtcacagctggtcacactggtttgtcatgacaacagtatgagcctcaccactttgtgaggtttaatcaaattcaaccaggatcacatggttttgtgcaggggaaaccaaagattccaggagtccagggttggtagctgtgcaatactgcaatgtactatgtaccaccacgtcccagttctactgttagatcaattagtcttgtttctgatgctcaggttaggaactaatgatcaaacaagaatacttgacaatgagagagtcaagaaatcaggataaacagaagtaagcatgcattgcttgtaaatacttattgatgaacctgaatctctgaatgacaatgcaattgattgaattaatagggtgacgtatctacaaatcagatttgctccaactccaagtatgttttgtttctttgagtgctgatgtgcaacaatcattgatggcttctttctgataattgatcagctacaattgtcccttaagatcacagcattccttcatcgcctgagcgatcagcatgctctgttcaatgcacatgaaattctgcttctgaaattgtaattttctgcagcaaggattagatctagaataggatgataggatacttagtttgttcaatatgtttgtccattgcaaaaaaaaataaaaaatgaatggtacactgaattatgggcctctttgaaagaacgtctgctgctgtagacattatagattgttttcctttaagaagcttccatttgtgaaccgtttggtatgtcaattgccaagtatcaatatagagattagattatgccactattataataaccagaatatggaagcacagatgtgactggtgtcaacatatttaattaaagttaacgagcaatcatttattttcaagtttcccatgctaatgaagtaatgatacaagttacaccacagcaagaatagag

SEQ ID NO: 39468 - DNA, 1012 bp, Zea Mays
ctctatggacattctccattttattcgctgacgttgcaaaaacagtggaacttattaaagcaaaaggaggaacagtcacaagggagccaggccctgtcaaaggtgggaaatcagtaattgcctttattgaggatcctgatggttacaagtttgagcttatagaaagagggcctactcccgagcctttgtgccaggcatttggcatggaacttcttcgcaagcgagacaattctgagtacaagtatacgattgcgatgatgggatatggtccagaagacaaaaatgctgtattggagttgacctacaactatggggtgaaggaatatgataagggaaatgcttatgcacagattgctattagtactgatgatgtctacaaaactgcggaagcaattagagtaaatggtggacaaattactcgtgaacctggcccattacctggcatcaccaccaagataactgcatgcacagatccagatggctggaaaacagtgtttgtcgataacatagattttctgaaggagttggaagaatgagctttgctagagatctcaacttggtacatcaagctccatacggttgcaccccgtgagttccatgcatgacctgcaaaatctttgtaaagccacagcctcaaactgaggattgtagataggtcgtccaatctacggcatcatcgcaattgatagttgatagagcattagattttccttgcagatctatatagatgcgcaaccgtttttgtattatgcattttaatgcataagttcaatggaaatgattcatgggtaagaaaatcgtcttctttcaagcggcaatataagggctggtttggtgacttgaatagcaagtgatttatttttccatgaattctctccaatttcattgtcaacaaaccacaaaccagctctgaagtattagagctaccataggctcttagggctagtttagaaatcttacgctcttagggctagtttagatttctatagattaatcctacaggagatttatt

SEQ ID NO: 39469 - DNA, 799 bp, Zea Mays
caatctccaggcccaggaaaaacaaccccggaccgcgtgcgtttcgcttccgcccctgctgtttctgtttcttggcattcaccccctctttctctcgtggcgacgacggcgaccgtcgccttcccctacgcgctaggtgccagggtccgtcgggtccttcgctggcgacgagcaactaccaggtaacctagtggtgtgttcgggaacgtttccgcgggcgggcggcggcccccagtggcgaagatgatccgactaccgacgtacgcagcaggaggcgtccgttgccatcttcttctcctttgagtatatgatactagcaacatccacagtatcaacattcgtgaagtatatattctatgttagtgacatgctaatggaaggtcaatgggagaaaaaggcagtgtatacattttacttggttcatgagctatatgtgactttccgcaacttcagaattcgcattacagattatgtgcgctacagaaagatcacttccaacatgaatgaacgctttccagatgctacatcagaagagctcgatgtgagtaatgctacatgtattatttgtcgtgaggaaatggctacagcaaagaaactgctcgatgggcatctgttccatgtgcattgtctaagagaaataggagaacaggctgaagaagaggttcctctacggcttctccatgggagcttcagctccacaggaaggatcctctctactgggactgtgccgtgctgcttgccccaatgtgcaaggccacattttgcaattaaccatgaagatctgacactgttatttcca

SEQ ID NO: 39470 - DNA, 177 bp, Zea Mays
atgggtgccaccggtctcccagccaccggcgggctctcagccatttcaagtgtggatggcaccgccaccgacggggtgggtgccaccacctctggggtggccagcacaacaatacccgtggatgcatgcacagcctcctcatcaccatggatcacaggtgacgttccatgtttagtt

SEQ ID NO: 39471 - DNA, 311 bp, Zea Mays
tttttggtagcaaatgctttattcttgttaaacgaggtagaaaatccaaatttgctcctaaaactgtagaaggctttttacttggttatgactcaaacacaagggcatatagggtctttaacaagtccactggactagttgaagtctcatgtgacgttgtgttcgatgagactaacggctctcaagtagagcaagttgatcttgatgaaataggtattgaagaggctccatgcatcgcgctaaggaacatgtccattggggatgtgtttcctaaggaatccgaagagcctccaaatgcacaagatcaacca

SEQ ID NO: 39472 - DNA, 2103 bp, Zea Mays
gccatttcccccctaaacccaggtaaccaacaagtttctacaggacttctttagggcacccacgccgccgattctgcctggcgctactgcccctgaagcgcacatggcaaggaagacaagagtccctgaagaaggtgcaagcatggaaattccaacacgatgtcgtcgatcccatcgttcttctaacacaaccacggggaccctaccacaagaggttcttgcagccctgacgtctgccttcaacctcgatgggtcggcgaaggagaacttcgaggatgctttgcttgcgatgctttggcccttcgctgatagagtggcaaccttcaagtcgggcctagtggcaccagaggagggattacgctgctatggagcaccatccatgtggaactttctgattttttttgtgggtgatttccacatttctgtcaagattggttcgtctcttcggctcctccttggcttcgcaagagtggtgccgccagtagctcctccgcgctccgccgggaccgacttgccgctggccgccaggggctccctcgcccaggaccggctccgccgtccaaccgtcctatcccctccggcctccgcccagtgcgggaagcctacaacactgggtacacccttttttaaagaagggtgggcctagcgcagcggtagagcctaccgtctgtaactggaaggtcctgggttcgagccacaacctcatattatgcgggtaaggcttgacgcttaaagatacccttctccagaccccgcacagtgcgggaagcctacggcacttggtacgccctttatattgcaggtgcgcatcttgttatcctccactcgtagatgtcgctagctggtcagtaatccgctgcaaggtacttactctattatgtgtaaaatgtcagtagaactttggtacgccatacatacagcaagtgtcaaatggaccatcctccactgcagttgagtcggatagctttgcctcgatttcctcttgtcttataaagttctccacttgctgtgccaaggcctaccctgcctgaaagcaaatttcatctcttggtttccaagcagaccaaagaactgacaaaaaaattatatttgtaagcttgtgatgtctgttagcaacccagaaccgagcaatcgattgaactctgatatagttaaccacacattgctgaccattcaacaataaaaaaaatgcaacatacttttttcaggtgattcatatcaaagatctgattcacataattaccaagttcagcagttttgcctctgacgatatgggttcttgggagggccaagctaggcagcttttgttggatgaggaagaagacgatgaagagtttttctttcttcttctccctgctatactttcattcctctctgaagagcaaagcgaaactggagcagctattgaaagtttcgtggaattcaagaggagcaccgcagccaaaacgctcgaagctcttgaagaaaagaagaagcatgatgaagatttctctattaaaaagtgtctagaggagttggatacaattgatgggctgacagatgaggatagatcatatgcaatggaagtctttgaatctgggttcaacagagaagtgtttatgagttcaaaaaaccacaatgttaggttgttttggctcaagagagaaattaaagcgcttgctgctatcatgtgatgtgaagtgaatgtggttgtgaagagataggcttacagaaaccgaagaaatccaactgctagtaccgttccagcgagaagacttcagccctgctttctgagtgcttggtgaacgatggaaggcctaggatgctgtttttgtttatgttgcttagagacggatattggaacgaggatataccttgtttgtacggtatcgtgctgccaaaattaatgcgttttaagcaatattttgctaggctaaccacggtttcttttaacggaacttgcctgacgtgatggagcctgctctgtctctagccagaaccccgcgtgttgtcaaggcgaactgtcatactgatcctaaatttagaagcgtcaatgttgagttatcagaacttgaaacaagacagcgtacatatactctacatggataatctcattcgagcaag

SEQ ID NO: 39473 - DNA, 4718 bp, Zea Mays
ccaggtctcatttgggcccaaaggcagaaccggactcgccacctcctgcgcctcccctcttcctgtccaggcctccagggtttaggctcgccgccgtcccgtcccgtcccgtcccgcctcgcccaccgcgcgccgcgatgcctccttccaagggcaagaagaagaacccatcgacgtcgccgcggccgtccccacgcacgccttcatcttgtccctccgctggctccggaactggcgatggcgagagaagcgtcgacctcccatccatcgccgccgccgccgcggagcagttcccggcgctcgtgccacgcggcggtagtggctactttgctggcatcgttgccgaagtggcccctagggatgggagccgcggcggccgcttggggaggctctggctctccgaggccgctatggtcggcgccgggatgcggcctgggtgctttgtctccgtctcactaatttcgtcaagcagtgatcagttagatggttttccattaattaatttatttgaggagtgcaacagattctttgatcttgatctggacaatgatctcctttatggtgaagctgggaaaaactttgtggttgctacagttctcccctcgcgtgaggttccaaagaatggtatcaagctctcttgggatcttgcttgtgttttgggacacccttttgtaggtcgatcattgtttatttgccccttatgtacacttcaggccccaaagcgtagtgatgatgttcatattttacgggtaatgaaatgcaagaatctttatcttagcctagttccacctaatgttggatcttccaaaggcattgaatcagagtctgactaccatcctgaaagaagcgcaatggttatggagacacctaagaggggtccttcaactccactgcgtaagaaggaatcgcatcactttgcttccaacaatggctcttcaatgtgcttggatccaaccactgcaagatcagcactagcagatgagaaaatcaatgagttgttgcatacttcagcattgtggtggctcaatggtagacacttgcttaaaggaaactttgttcctctctcaatatgcggaaaactgtctctatttgtggtcatgggagcagaaccagatagttcttctcaagatgttttgtatgagaatgggaatacactgtctaatgcagaggattcaactaaatcccaggaaaacccagttttattccttgttgacagaaccacaaaagttcatttatctgattctgtctgcacaaagcagcttgactcagataaaccgggtttaccatcagaacctcacgagtatgatgataaaagaaatgcagatttcaatcattctccaacacttggtgggttatctaaagagtcagcaaccataaaaggaataatttcattttcactagctgatcaaattggtctgccaagatacaaaggtattcttctttatggtccacctggaacagggaagacctctcttgcttcttcctgtgcctatgatgcaggggtcaacctttttacaatcaatggaccagagatcattagtcattattacggagaaagcgagcaatctttgtacgatgttttcacttcagccaagcaagcagcacctgctgtgatatttatcgatgaattggatgcgattgctccatcaaggaaggatgggagtgaggcgttatctattagaatggtagccactctgttaaaactgatggatgagattggccctagtgaccgtgttctcttgattgctgctacgaatcgacctgatagcattgatcctgcattgcgacgtcctggaagattggataaagaaattgaaataggagtgccatccccaggacagaggatggacatacttcgccaccttctaattggagttcatcactctctgaccaatgaagaagttgagtctgttgctctagcaacccatggatttgtgggtgctgatctagcagcagtgtgcaatgaggctgcattgagtgctctccggcgttacatcagcctaaaagaaaattcaattcaacaacttggtcatcctggctgtagtttttataagtgtaatagtcaagatactgaagattcaagctcattatcgtcatctttctcaaagttgaccatgtcatcatatgttgcttgcatgaacggtggtaacataaaaagtagcgagtcttatgatgatacagatgaaataccactatatgtaaccaataaggattttgacaaggctaaaacaaaagttagaccgagtgcgatgcgcgaggttattcttgagcttccgaaggtacgttgggaagatgttggtggtcagtgcagtgtcaaggagcaactgattgaagctatccaattaccacaaaaatgcccagaagcatttgaacgtttagggatccgaccccctagaggattgctaatgataggaccaccaggttgcagcaagactttgatggctcgtgctgcagcttctgaagcaaaattgaatttcctggctgttaagggtcctgaacttttcagcaagtgggtcggtgactcagaaaaggcagtgagatcgctatttgcaaaggcgcgggctaatgcaccagcaatattattttttgatgaaatagatgggcttgcagtaactcgtgggcaagaaaatgatggcacgtctgttgctgatagggtcctcagtcagttgcttgtggaaatggatggtttggaccagagagttggtgttactgttattgcagctacaaatcgccctgacaaaattgatcccgcacttctgaggccaggtcgtttcgatagggtgctggatgtgcaaccacctgatgaagctgaccgtgcagatattttccggatccatacacgcagcatgccatgcagtgccgacatgaatctaaatgaactcgctagactcacagaaggctacactggcgccgacataaagctcatctgcagggaagctgctgttgccgcacttgatgagaggtttgacattcaagaagtagcaatgagacatttcaattctgcgatcgacagaacaaaaccttcagatgtcaagttcttccaagaacttgcaaagcaattccgcagatcgttgacttcactgaggaagcaataattctgagaaagcgttgaggaatgggtcaagcatcaccctctcactccctacatttttgcttggtccagagaatggagttggttaatccatacaagtacacggctagcttagccatctggaatcagttcatccaaagaaataaaacatggggtgacctcattctggatattcatgtgatttctcaaagcaggcgccacatcagtgaacctggcgtgactgaatctgggctggtatctaagaagccttgtcctcgttgctctgcatcttcgaaatttctgcgttgttcctctgacttcaattactatgccactgtagatagtattgctttaaaagttgactagaattttctgttccagaaacctttttgctgctatttattgggggagcaattttctcttttctgactcttctcaacattacactcgagagaaacttgctagacatgtttatagatcgagacagtttcagtgggcctgttttaaccttgtcttatctcttctttggaaggatttgagcattgttgccaacattgttccctgtcatcttgctgtcggtatgtttccctgaaggaagtgatggagatggcacagtttatgctgagggcgatctgatctccttaacattttgcacaactgatgtaactgtaggcctgatttttgtctctgggttactgaacttggtggtagcagtaacatctgcatgttttcttggtgtctttggtccactggagctgtcaactgctgtatgagtagatgtcagatgcgatgttcttccagttttctgacttgagcctgtctctcgtcatactcaatgtggccctctgatttagtcccaagcaagggttgctcgtgcttcttagaggcttttacagtcagagtcctgatatctgaacttgcacactcattttctggtcgatcaggcacaggatccacaggtgaccgttcctcaacttcgcatggactgtcagcaggcgcagtggtatcctcttcaatgtgttcgtcagattcatcaatgtcctggatagctaatggcagcattctgcatcaattggcggagttccagccacaagttcagatgcttcagctgacgaatcttgcacgtggggattgctttcagaatgatcaggtgcttttttcaagtgatgctttcagtgatgaattcaggcttagagcagtactgctaccactttttacaggaatgcttgatcccaaacttgcagctgtcatggcaagagctggtggatgctcgtaggaaatgcgggaccggcttctacttcctctttaacatcaggtgtcatgctgctgccatccataactactagagcagcatttatcaggtcttcacatttgttatgtgagggactaaaatttagttagaggaaccaaacatggtcttagtcttcaactcttcatggtttgagcatgggagaaggggggagtggactataaattgggcgtagaggttgtggatttgtgaacctagaatgaaatagattctgctgttattctcaagaaattgaggcatgaagtctaaaaagacgaatttaaaggaaaaataaataaatgttgcagcagtttaaacagccaactttaatccgaagctaacagcctgctttgaacgtta

SEQ ID NO: 39474 - DNA, 1868 bp, Zea Mays
gtctttaacaacccacgatctgaaagcaaagcagcaaagcagaccaacccagcgcagcgcgcaacacctcgccaattgcgacgccgccgccgtcactgtcgccgcaggagtgcgaaccacgctgccgcccgctcccgccgcccaaacagctttatccgagccccgattcgccggatcacatgctgcggccacctctcaaatgacctctcaactccagagcactttgctcctgctcccgctcttcgccgccgctgctttgggccgcggcggcgacgcctcgactgcgccgtcgctggagttccaccatcggttctccgcaccgctgcggcggtgggtggaggcccgagggcgcgcgctccctggcgggtggccggctcccggcagcgccgcgtacgtcgccgcccttgccgggcacgatcgccaccgggcggtgtcggcagcagggggtagtagcagcgacgcaccaccgctcactttcgccgagggaaatgccaccctcaagtttgcactatgctcttgtgaccgttggcacaccgggccagacgttcatggtggcgctggacacaggcagcgatctcttctggctgccttgccagtgtgacggctgcacgcctccagccactgctgcctctggatcagctacattttacatccctggtatgtcgtcaactagtaaagcagttccgtgcaacagcaacttctgtgatcttcaaaaagaatgctccacagcattgcaatgtccatacaagatggtgtatgtctctgcgggcacatcttcttctggatttttagttgaagatgtgctttatctctcaacggagaatgcccatcctcaaattctcaaggcacaaataatgcttggttgtggacagactcaaacagggtcatttctggatgctgctgctcctaatggtctttttggacttggaatagatgaggtttcagttccaagtattttagctcagaaaggtttgacatctaattccttctcgatgtgctttggtcgtgatggtattgggcgaatcagctttggagaccaagagagctcagaccaagaagagacacctcttgacatcaaccgacaacatcccacatacgccatcactataagcgggattactgttggaaataaaccaacagacatggacttcattactatttttgacactggtacttctttcacatacttggcagacccagcgtatacttatataacccagagttttcatgcgcaagttcaagcaaatcgtcatgctgctgactccaggattccttttgaatattgttatgatttgagctctagtgaagcaagatttccaattcctgatataatcctaagaacagttactggaagtatgtttcctgttattgatccagggcaagtaatctccattcaggaacatgagtatgtttattgcctggcaatcgtcaagagcatgaagctcaacattattggacaaaatttcatgactggtcttcgtgttgtgttcgatcgggaaaggaaaattcttggatggaagaaatttaattgtttctcaccttcaacatctgagaactactctccgcaggaagcaaggaacccagctggtgtttcccagttgagaccactgaacaattcagcaccagcagcgttatatgatagcttgctcctgatgcttatcttggtccacctggctgtaaattagtttggttcttaaaatagatactgtagagcttgactagaggtacaccatagagaacaatattgtttagtggttacacgtcctgtaatagagatacttgtgatgccgattttttatggctcattgtacaaccattcccccgtcttgttttcactcaaaagggtatctcagattttatctgtaacc

SEQ ID NO: 39475 - DNA, 245 bp, Zea Mays
accagctattccggcgaggaattacgggtcacccagtggttcacttccaccacgaaggcaatcgacagctccccggagacgcggcgaggctcctcgcccaggcgcaatactcctggcgcgacttcaacgcggattaagcagcgacggtgaaatctcccccctcagctaattgcacgcgacggtggtgaattggttccggtgctcgagtccgtgcaagagggtagaagaggggaggaaaggtggtg

SEQ ID NO: 39476 - DNA, 484 bp, Zea Mays
caagcgctgcgctacacgcccgcgccgtctcctcctcggactgtctcgtccccgagctgcatcggctgcatctgtgattcctgcggtcgacggaagagctgcatcagctgttcgtcgaggccttcttctccgatccaaaaataggtgcctcacaacaacttagaattggttagaacaaatttggaggaaatgagagagaagcgtaggaagaagaggcagagagtagcatcattatttgttacaactgtcatgggtatgattgcggactattattatcggaaaagacctagacattttatggatccctctgagatgatagagagagatgtagctggtcagaaacaaatgctaaggaatatgtatcaaggatcaaatgtttattgcacatgtatatgactcatcaaggcacatgcgcgtagcaaggaacatgtgtatttcgttgtgtacaagttaacatgtaatgtgtacaagttgatgtggttac

SEQ ID NO: 39477 - DNA, 2365 bp, Zea Mays
ggcctgttggagtcagccaaagtgctgctgcacttcaagagtcagccaaaagagctgcttcactctgggtgttgttctctagggttttctgtagccgacctaggccacgcaaagtccaaaacccagagccatcgctgccgcctcggtcgcgattcctaaaggcggcgatggccatgacgcggcgttctgcttcccatctcctatccgccttccggcccttctccctcctcctccagccgcacctcgtcgactcttcgccggcggccgcgtcggcgaggcgggcgatgtcgtcggcgtcggccctgcgtgcacgggacgagaaggatgtggcgcggtggcgggagtcgatgggccggatgcggaatatcggtatctccgcgcacatcgactccgggaagacgacgctcacagagcgagtcctctactacacgggtcggatccacgagattcacgaggtgcgcggccgtgacggcgtcggtgctaagatggactccatggacctagagcgcgaaaaggggatcaccattcagtctgctgccacctactgcacctggaaggattaccagattaatattattgatactccaggtcacgtggatttcaccattgaggttgaaagggcactccgtgttcttgatggagctatacttgtactatgtagtgttggtggagtacaaagtcagtcgataactgttgatcggcaaatgagaagatatgaaatcccaagggttgcttttattaacaagttggaccgtatgggagctgatccatggaaggttcttaaccaggcgcgatccaagctccgtcaccacaatgcagctgtacaagtacccataggattagaagaggagtttgagggccttgttgaccttgtagaaatgaaggcttataagttcgagggatctagtggccagaatgtaactgcttctgatgttccattgaatatggaggatttagtcactgagaagcgtcgtgaacttattgaagttgtttctgaagtagatgaccagcttgctgaagcttttctcaatgatgagccaataacagctaatcagcttaaggcggctattcgaagagctacagtggcacggaagttcataccagtatacatgggaagtgcattcaaaaataagggtgttcaaccacttcttgatggcgtgctggattatctaccgtgcccgttggaggtttataactacgcccttgatcaaaacaaatctgaagagaaggtattattagctggaactccagctgaaccacttgtggcattagcatttaagctagaggaaggtcgttttggtcagctgacctatctaagaatctatgacggcgttatacggaagggtgacttcatatacaatgtcaatacagggaagaaaatcaaagttcctcgcttggtaaggatgcactctaatgagatggaggatattcaagaagcatatgctggccaaattgttgctgtttttggtgttgattgtgcatcaggcgatacatttacggatggaacagtgaaatatactatgacttcaatgaatgtccctgaacctgtgatgtccttggcagtttcacctatatctaaagactctggaggacagttttcaaaagctctgaatcgcttccaaaaggaggatcctactttccgtgtgggtttggatgctgagagtggccagacaattatttccgggatgggtgagctgcatctggatatatacgttgaacgtattaagagagagtacaaggtggatgcaaaggtaggaaaacctcgtgttaacttcagggaaacaattacccagcgtgctgaatttgattatttgcacaaaaagcaatctggcggtcaaggtcagtatggacgagtttgtgggtacattgagcctctaccttcaggttctgatggtaaattcgaatttgataacatgattattggacaagcaattccttcaaactttataccagcaatagagaagggttttaaggaagcttgcaattcaggctcgttgattggtcatcctgttgaaaatttaagaattgtattgactgatggggcttcacatcaggtggattccagtgaacttgcttttaagctagctgctatctatgcttttcgacagtgctacacttctgccaaacctgtaatattagaacctgtgatgaaggtggaactcaaatttccaactgagtttcagggcacagtaactggtgatatgaacaagagaaaagggatcattgttggaaatgagcaggaaggtgacgacaccattgtagtttgccatgttccgctaaacaatatgtttggatatgcaacagctattcgatcagcgactcaggccagggaaggcaaagccgagtgtttggtttaatgaatata

SEQ ID NO: 39478 - DNA, 1454 bp, Zea Mays
aaaacgctgaaaccatcttcttgcacaggaagacaaatcagcagacagcagcactctttcgtgcagcggaggaaagaatcgaggcccttcttgaccgtccgatgaaagatccaacgcccacgatccccgccgcccgcttcacatagccacgccgcctcccctgtccctttcattggccttccgcctccacttgtacacgcctccgccacccgacaaactactcaataaccctagctaaacccccacgccgccgcggcgacctcctccgccggcgggatggacagcctcaggggagtcaagttgccgggcgtgccgaagggcgggagtgcgctcgtgaaggtggcgctgctcggcggcgcggggctctacgccgtcctcaacagcttctacaacgtcgagggcggacaccgcgccatcgtcttcaaccgcctcgaggggatcaaggacaaggtgtaccccgaaggaactcacctgatgatcccgtggatcgaaaggccgatcatctacgacgtccgcgcccgacccaacctcgtcgagagcacgtccggaagccgcgacctccagatggctgtgagcagggagattaggaagattctgactgagagggccaacaacttcaatattgctctggatgatgtgtccatcacaagcctcagctttggaaaagagtttactcatgccattgaagccaagcaggttgctgcacaagaagctgagcgtgccaagttcattgttgagaaggctgagcaggacaagcgcagtgcagttatcagggcacagggtgaggctaagagcgctgagttgattggccaagccattgccaacaaccccgccttcctggctctgagacagattgaagctgccagggagatctcccacaccatggcggcctccagcaacaaggtgttccttgattccagggaccttttgcttggtcttcagcagctgaacgtggggggcaagcaaaagaagtgaagcggtcgtccccaggccatcgcggatgagagtagtttcaggcgatggttttatctgttacagaatgcgcatgcgcgggaatgaacaaagtggcaccatgttgcagtctgtatgtactgacaagtttgtctatcgatctttgattctctgctcttgtaagtcgtgactgatgaatctgttgttgcaattgccttcctggaggcttgctctgatgcgtgtaacagccattccattgctcgtagtcgcagacgtaattcagcgtgtgagttcaatcaggacccgtgtgactggttgtggcatggtggtagcctggcccgacttgtctagtatgtggagccagatttcatatatccaggctaggctcatgctcatatttatgtttggttgtttgcgttcaggtcggataaagatatgtgtttggctgtatgcatcaataccaagatcaaataaagtaaataaataaatcttcaaaattaaat

SEQ ID NO: 39479 - DNA, 3395 bp, Zea Mays
ggagactggagttcacaactgttttcgctgtttctctctcccgtagcccagtttacctcgcctagggcgaccaccgccgccgccctacgccagctgcccaggtcttgggcggaccctttgccggcgacgagcacccaccacaccagatcaaactctagatattgccactctacgtcccagcatcctatgaccacatggtttagacagtgctgtccaggtggatgatgaattgtggtgcccaaacggaggcacgtggcacgcctcttgaagataggcactggttggaaacagattttgttggcgctccaagagttcatacttatgtactttcctttctcaaatcataacaaatcttaggcagttcaagcttagctgaatgtcaacttgcctccacgtgcaagatcccagaaacattgctatgtctcgtccgcttgattttgctgtgcttaaatacaaaaaccaaaagcttgcggaacaactggaagtccacaaatttgagttctgtgctcttgagagtagatttaatgatctaaaagagaaacaaaggacacataataagacacttgttctagtcaaaagttattgggagcgactcatagcagatctgggtatagtttctgtttgcaaaaatgaatcttcacgttcaagctgcagtacagggaacaacaatatacgaaaggaaagttcaggttctcccaattgccaactaggaaatgacgtctcttcagaacaatcaacaacaattgatattctgcagaagctattccttccatcaagtggtccatggcatgtgaataacgagtttgtttctgctgctctcatgaagttgccagaaaatgaacacagcaggcaattgcacaatgctaccagcgatgtgttatccaagcttcatgtggtgatgcgtacagtagataatcttcacttgaaacacaggcagttagcagcgaactatcaaaaacaaagagattcgagtgcctggaacagagctgaacagaaacgtctgaaagaggagttgactagtgttgttgccaagttggaaggaagcaaacaaaaactggcagtactgaaagcacagggagacaataaacaagcaacaccgatcctggttcctacgctgggaaacaaaaatatgactgcagaaaaggtgagagataaacaaacagaactgcaagatcttgaagctactcacaaggagttaatggaattgatttcaaagcgtctggaggaaattagaaggctgcatacagagagaattgaaattttgaacaagttagcaacttttcagaatatactaacggatttcaaaagcattcactcttccaaagcttttcaacttgtcaatgaccaacttcagaagtcacaagcagaactggatgatcaccaaacgttgttagagaaattacaggttgagatggatacctttgtttggcgagaaaggcaatttaatcaaaaagttgatttggctgaaatcccccagaaggtttctgcatactgtgtgtctagaattgctgaccttgaaaaggatgtccagaaactgtgtaatgaaaagaatatgcttgtgctgaaacttgaagaggcttcgagagaacctggtcggaaccaggttatctcagagtttaaagctctggtgtcatcactaccgagggaaatgggtgccgtgcaaagtgaactgtccaaacacaaggatgcttccttacagttgcattctttgcgagcagaagttcattcactttctagtatccaaaccagaaaggaacaagaaattgaagaaatgtcatttagatctgcccatgctggatctgatataagccaacttcaatctctggtccgtgagctgagggaaaatacacaggagcttaagctatttgtggagttgtataagcatgagtccactgattccagacagctgatggaatcgagagatagggaactcgctgaatgggctcgagttcacattctcaaatattctcttagtgaaagtaaattagagcaacgtgtaatttcagccaatgaagctgaagcaatctctcagcagaggttggcaactgctgaagctgagattgctgaattagggcagaagctagaaacttctaggagagatctagtgaaacaatctgatatactgaagtctaaacatgaagaatgtgaagcgtatgttgtggagatcgagagcattggccatgcctatgaagatataatgtcacaaaatcaacaattgctacagcagattattgaaagagatgatcataataccaagcttttcatggagggtgttaaatcaaaacagtcacacgatgctttgcatttggaggtgcgctcgttgcaaagaaatttgcagcatgcaagtactttgatggatttgtgcaaccagaaaactatccgcctagaggaccagctaagaggttggtcagagcggttgaggagactgtcagaggatggaatgcagcagtctatttcattgggcaattatcaaaaaaagctgtctggtatgcatggagaagctccaaagctcaggcagtcaatggatgttctacaagcgaaggctgggagcaatcggctggaaattgctgagctgcttatagaactagagaatgagaggtttggtaaaaagagactagaggatgatcttgatctaatgtcaagtaaagctaattctctaagagagaagacagataattcagcagttcttcagaaacttctccatgaggccaaggagtacaggggaatattgaagtgtggtatttgtcatgataggcagaaagaggttgtgattgccaaatgctaccatctcttctgcagtcagtgcatacagaagccacttgggagccgtcagaagaggtgtccatcttgtggactaagcttcggtgttaatgatgtgaaacctatctacatatgaaacagaaggttggcgcctgtgtcgcagcaccaaaacaaaactgcttggcgcttactaatttccggtatatggtaggcggccatggtaattcagtcggtgatgtagcataagattatgtagcatttaagttgctacatgtgattgctggtacccgctggcatatatgatgctggtgttacctcaagcgccttttgtaaagtctgcttgccttgcccaatctggtagaatagcctgacatcgtcaaccattagttccttttaggagaaaaaaatatccaacaaatgaggattgatgcttcctgcaatagtgagcaatgtacaatatatagctttagtcagtttcattgttgtagctgacagtaagaatgtagttttcttttctttttaatataccggttatccagtttgtatgtttctggagtttgccaattctgtttatcaaaaaaaggagatttagtcatttctaaccatttttttcttgtcacgatatccaaaattac

SEQ ID NO: 39480 - DNA, 1593 bp, Zea Mays
atgccgcgtggcttcctccccaccaacgacaccctacccaaaaccctcgacgcgctgctctcgcccagatcccgcacgtacgcgcggcttccttcccccggctgccgagatgcatccctcttccccagctgctctcccccaccaaaccctcgatgcgcggcttcaacagagccccagcccgagcccatcccaccttcaatgccggatcacgccccatcgccaccaacggtgccccaaaccctcgacgcgcggcttcaacggagtcccagcccgagcccatcccgccttcaacgccggatcttgccccatcaccaccaacgacgctgtcaagcctctggatcctccgcagacgacgtcaagtggtccaacatcgatgtccaagagttcatcgccttcgatccggtctacgggccccagaccatctattctgaactggaacacaggacgctgcgcaagctgttcaaggtggatgccgctgactatatgttatcactatgtggaaatgaggctctcatggaactttcatctcctggtaagaatggaagctttttctacctaactaacgatgatcggtacatgataaagacgatgaagaaatccgaagtgaagaggattgcaatagcctatctcctggctgcagtatgtgaaatctggctcaagggagacgacgatgtagattctgggtatggtttgctgaggagataccgctaccaattgtttgtaggattggtcctctctatagcgtactctattcttctatatggcatatacgttccagactgggagtaccagatagcaggccctggttccagttccacaaagaagtcgttctttgtgaaatgcggagtgagaggagacaccagaccagcttgcaacgcagtcggaatggtcgaccgtacgatcctagggatcgaccacctctatagacgaccagtttatgtgcgcacgaaggtttgatatgggatgcgatgcgacacggacatctcagttttctgctcccttgtcacaaagctcaaataagaaacttcggctaacatgcaggaatgcagtatagattatctagagaatgggcctcttccacctgatgctccatcgtggtgccaggcgccatttgatcctgaaggcctcctcagcttcgttatggcgattgtcacttgcttgatcgggctccagtttagacatgtaattatacatttcgaggtataatgaatgctgaagcaccggggaagaatcgccagttggttggtcccttccttcagcatgctagctctagccttcgtaatggacttcgtcggaatgcgaatgaataaaccactatacacgatgagctacactctggctgctggcgctgcgggtcttctcttccctggaatctatgttcttgttggcccctcttgaacctgagaacatgcatacgaagttctgttaaagttagtcgaaccattttctgattctatgttctctctactgtttgacaacaacacatcttttatgaattaattattaaacaaaacgaggcgcaagaatggattggtaattcatatgttcttttgtgatgcgaatatattctggtaaagacatgttatcgtggag

SEQ ID NO: 39481 - DNA, 572 bp, Zea Mays
cgtccaactcgcatccaacgcccctgccgcatcccgcgtccctcccgcactcgtctctgccgcaccgtacgcgcaggcccgcccgcccgctcccattccccacccccacctatggcggcgctctccgcgcccctccgcgccatcgccgccggatcccgcgtcgccgcgtccgaccccgtcaaggtctcgtgcgtgaggagcactggctcagctcacttcggctgcgcctccatcgatctgccctcgcgttctatgggtccggcggcgaagggaaggcaagatgtacaccgcgaggaagaagatccagaaggagaagggccttgagccctccgagttcgaggactccgttgcccaggagctcaagagcgacctcaaggacctgtacatcaacaatgctatccagatggatgttaccgggagcaggaaggctgttgtcatccacgtcccataccgcctgcgcaaggcctttaggaagatccatgtcagactcgtcagggagctggagaagaaattcagcggcaagtgggtttgccgcatcagcactggtgccgacgttgacagctgttgatcac

SEQ ID NO: 39482 - DNA, 2254 bp, Zea Mays
ggctcttttccatctcgctataaacccttcacgccccggcgtccgcggctcgctcctgttcgcgccgccgactcgcctcgcgtcgcctcactagggtttgcagttcccgtcgcgggcgaaggcggcgtcgtctcgtggcggcgccgtctccgtgtgccttcccgctcccaagcaatggccttggaagatgggagcccagctacttttactccacaagtgattgctaatgcatttgtcaaacaatactatcaaactcttcgatatgccagagaggatgcctataaattctataatgacaaaagtattcttggtcgaacagattctaatgggaaaatgatttgtgtaaccacaattgatgatatcaaggagcaacttgtgtctacagattgtgctgactgtttgatagagatcgagactgttgatgcacagccatcccatgtggatggtgtgatcattttggttgctggatattttacaacggctgttgtgaaacagaagtttatacaatcattttttctcgctccacaggaaaatagtggctattatgttttgaatgatacattcagacttactgggatttcattcgaggtgaaggtagttgcagctaaccatgataacaaaagcacacaaattaccaccctgcccaatgagccagaaatagattcatttaaggagagtgaagtgccaggtgtaccacctgcaggaaacattctcgtcaatgatggagttatcagcacctctgcaaatgttgtttctccagttaagaatgaccctgttgttgagacatgtgtgaaagtggttaacgaggatgttgtgaagatacctgtagccgctccagcttcaactcctgttacagctgaggaagttgttaacaaggattttgtgaagattcctgagtctgctccggctctcccttcatcagttgagaaggctgctccagcacctcccgcatcagttgagaaggctgctgcagcacctcccgcatcagttgagaaaggtgctccagctcctcgcacaccagttgagaaggctgatccagctcctagtgcacctgttgagaaaggtgctccagctcttcgcgcaccagttgagaaggctgatccagctcctcgtgcaccagttgagaaggaagtaactaggaagacttatgcatcagttgttaaaatcccgagggaggacacacagcctgccccagctgccagaccctccaagcccaacctaaatataaagatggttcaaaatacggagaaaaatgtgtcctcaccatcgaaacctgctcatgctactgttaatgccctaccgggcgataagggtgttcctaaaaacaaatcacctgatgcactactttgttttgcagagccagggtactcaatttttgttaagaatttaccttttgaagcaactgttgaaatggtcgaacaagagttcagcaagtttggtgctattaaatctggtggtgtacaagtcaaatgccagcctgatcagttttgctttggctttgtcgaatttgagtctcagcaatccatgctagcagcaatcgaggcttctagggtttatttcggcacaagagaatcatatgttgaggagaaaagaactaaaacacgagttgttgatggtgttatcacccgtggggatgacaatggcaacggcggtggcggtcggttccattctggcagaggtggtggttactatggggacggctacaagcggcagtggggcggtcagaacaacggctactacaacggcgcggataacatgaggaacgactactcaggtcgtgtccgtggaccgcaagggaacggccaccctcagaacggccacggctaccatcagaacggccacggctactactctgggaatggctaccaacagcgacgccccaacagcaatgggaacggactgagggtcgagcgcaacaatggcttcaggcagcaaggccctgcatctgcctagaccttgtcatttttgcagtccatccttgatacgaaagcagtggggatattttgatgtctataggtagatactttgtcatggctgaattttgttgtcgcggttgataagagcaatcgtgcgtcctttgactggaactgtaatgaggagtggagtcagtcgtgtcgcaaaggggaaaaaaacatctatcgaaatccctgctactcttttgtcgtgctgtcctcttcaagctgtctgcgtgtacatcggtttttctgcttagcaattggactgggcggagacaagcttctctccaattctcaca

SEQ ID NO: 39483 - DNA, 2901 bp, Zea Mays
cacacgcggcgcaagcgcaggaggcacgccatctgttcttgctgtcgctctccccaaccccaagcataaacccctgtgtcctcgtacaaaccgaaaccgaaaccaaactccgccacgagtggggcgagcggatacacgagctcgtgaaagcttgatctgctctccttgttttcgatctttcgcagtcgccgatcccccctcccgctcgagacacaatgttgacatatcctatattgaacgaccgatcaattgatcagtggacggttactgagttgaaggatgagcttgagcgaaggtatctgcctgtcagtggttcgaaggatgagcttttgaagagactctttgaggccatgcaggatgagatacttgatggtgagggaaaaacaactgttgtaacttcccctcctgaggaattgaaaggtggtgaaactcctggttccattgatgtatctgttaaccaggcttcaattgagcaacatgttcataaaggtgcttccgaggttgcgaaacagggggtaggtcttgttatctctgttacagaagcttatgatgaaagtacatttgctacttcagaagttactcaggaggctgtggttggtactgcagaagttagtcagagaagtttggatgctgttgcagaagttgagtcttgtctagttgatgcagctgcaactgatgaacccgatggtaatggtcaaggttcagcttcaagtggtgatactatagtgaaggaaggaagtccgcgctctgaaggtcatggcaatactattgagaagaccccagaagatggcaccaataagaaaatagctgtcgatgatgaaccttctgaccttactggtggtgacatcaagttgggcctcgatgtgcacagcaagattctaaagctggaagatgaacccgcacctcctcatgatatgttgcataatcatgaggattctgatgttgttgcagttgctgagccagaagatgacacaagcaaaaaaatgataagtgatgatgtaccgactggtcttatgcataccaatgttgagttaggtgccaaggtagactgcaaaattgaacaggaagaagtatcaacattgtctgatgctgctgcattgcattcttatcctaaggaacatattgtggctgtggcaaaaggccttgcgctcccaaggaggatgctgatgtcaggctacacaagtaatatagacttggacagaaaagaggagagtcctgacataaattcttgtgagaaactgaacttaaataggagttcaggtgatgaatcaatggatgaggatgtgatggaaaggaagcatgccgattcctatatcaaacctgaagatcttagaggaaagacaaaggttacttcggagcatgtgtttaaagatgtttctctgcttgatactcgtgctgagggttcccctgcacactcaaaggaagttgtcactgaagagaagctatcaactccaactgaaaagaggaaacttgaagatcaagaagtcattgaaaataatgagccaatcaaacgccagtacctatggaacgaggatgctgtcaatatttctgatcaacaagcatccaaaataactagtactggtactcagaaggaagttatttgtcctgctccagaacgttcttttggcaggcctaatacagtagcaagaagaaattctccaaaggagcggattgtaccacctgccaaaacatccgcaacaacttctttaagaattgatcggtttgtgcgcccatttactctgaaagctgtgaaagaacttcttggtaaaactggatccatctgcagtttttggatggatgaaatcaagactcactgctatgtcacatactcttcagtggaggaagctgtggccacgaggaatgctgtctacgacctccagtggccctcaaacaacaacaattatctgatcgctgaatttgtcgatccagaagaggtaaagctcaaacttgaaactccaccatctcaaattcctcctatcagtctgagcacagctacagcacagcagacagcaaccttccaacaggcaatggctaaccaaactctagtacctccccatgttcctgctacttcgagaggtttattgcccactccagcacggtttgccaaggtgcctcccacctctgaccctggaccagcaagggagagccttcctccccctccactgagcctggaacctgcccggacactggatgagctcttcaagaagacacagacgtacccaaggatttactacatgccactgtcagaagaggaggtatctgctaaacgtgcagctcacgacaaaggtagaaggggatagtgggctttagtttgtcgctcaagctggtattttgctgactccaccagaccagcagctgcagctctatgaagaactactgcaccgtacttgtccctacatttagctggtattgtgttgaaaggctttagtagtttgttgtgagggaagacctgattgggtacgtggtattttggagttaaggataccgtggcttctccaaatcacgatggcgtgtaattttggcattccatagagtaccacggtttctcaaaactaagatgatgacaaaacatcagggatttgggtccaagtgatggtgtaaatgcagaaaattgacagcattttggcttctccaaatcacgatggctcgttgagtacttttcatgctctatcacactttgttaatagcatcgcacttattgtaggacaaacactgcaaagcaaagtgtattttgtgtccatgttttgagtggcttagtgtccaactcactagtgatcgatagtcttcatgttgtatagcgagtaagcgttcctattgcagtgaattgagtaatttgtttgagtggcactagatggagtgttgcaagattgtgatgcttgttactcttagggctgatttggt

SEQ ID NO: 39484 - DNA, 1412 bp, Zea Mays
gaaaaaaactcacagttgggttcgaccttgccgtctcccactctcccttctcgcgccgttggaggcaaatcgccgcgccgccccctccgcccccgttgtccgccttggttccctcctcgcacctccctcttctgccccctccctcgttgcccgccctccagcgacaactgctcccctcccacacgcgcgactcctcccagcaccgtttagggtctcgcgactcggcggcgaggcggcctttgtcggcaaactcgggcacgacgagttcggaagaatgcacgcggccatcctccacaacaacggcatcgactactatgtcgtcgtcttcgatgtgggcgcgcgcactgcactcgtcttcgtcaccctatgcgccgatggggagcgtgaaccccagtgccgacatggtcctcaatgccaacgagctcattatgaggatatttgttggtaagggacataacacttcacatgcccatatgactttagaagctcatggatccttttagtgtctcctgaaattgaggtatatgaagggatgatagtttgatgccatccacgtgacagtgaccttgaggccattgacaccaatatagatcatgttgagcctgagcacaaagaccttctgagagtccatgaagtgggaggtggctctacaatgtgttgcatccactcagttggatctaatcttactcgtactagggagctactagagttgtagtagaatgtgttcatgcagagcgggcaagaagctttcacagtgggtaaggattcaaacaggactccaacaagtgtgcatgagctggttgtacctatttgttccctggaaactggagtgcttggaaagagaatcaaaaggtctctaactggtgggcatgagatgcagtctacccaggacaagtgatcagggaggctagcatgcatgaatggtgagctgtaattttccatgaaaatgctgcaggtgaaggaagcaatactccaacatgtcaagttacaaaaccttcaagttcagtgagatggggtgacaggagtagctaaccacagttgaggcgacaaaaatacatatccaagtttaggtccttgtgcagatagacagataaacaagtatgacagtcacttcagaagtagcttccactccctatgttttgcaaggtagagagctccacgatgtagattccagacccaatgttgcgcaaggtagtaaaagttgtacacatctgttagcctgttgctgttgttgatctggtgatgaacattctcttctacaaaatcaaaagatgttttatttacatagaaattggacatatgaagcttctgttgagtgcatgataattcaatatattatgggttatattccatgatatgaattcatatgatgtgtttcttgtgatgacgattatagttgtgtcacaaatgct

SEQ ID NO: 39485 - DNA, 1377 bp, Zea Mays
gttaaacctaactgcctctcctgtctcccagtctctcgccgctcgcctctcagccgccgcgtgcctcccagtctcccgccctcgcctctctcttcctctcctctctccctgcgcgccgccgccgtgcctcgccttgcccagagactaaggcgccaggatagtataaatttagttcacgtgattgtggacttctcgccttttggattcaacattttctgcttctcagctctggaatacagaagtgccattgtgggctcaagaggataatgtacgggaggcgtgcatcgcagctgctgaaggagatcgactcctctgaggctggccagctcgtgccattcaacagtgacgtgtttgatcaagtgattagagagtgcaatgagcacaactcacaatttcaatcgttgatcaggtacaaccgagcagaagttatccagagttttagatggaaaattggccctgtgcttcctcatgacatacaagaaaagctccatttctcagaaaaggagtacttcaagaaccactctgcagccattaaatcatacatatcagagatggatatagatttgacagtggacatggttcctcccaaggatccttacattcaggttcgggtgctggaggacattggtgaagtatcgctcggtgaccattctgtgtcattgaccaagaactcactccatttcctaaggcgcacagacgctgaacagtttatatcacagggtcttatggaagaatttctggagtagggatcacatgtatgaatgtatgatggtacaataggatggtgcactgccctcgttctccccagcgatgctgcctgatgccctatttgcaacaatgaaaagacgcgttctgtaccaaggagcttcttaactagtcgctggacgatgatttcgaaagttgtgcaggcagtcctatactagattcattgcctctatttacatgtggatgacttttagttagtgtgccatccaagaaagcagatgttgcaaacattgtaacttgtgtattaacattggttttgctggtagatttcatatttgtgtttccaagattccatgtaatcaagaaaaaaaatgaaatcttggttgaaacagtctttcacagtgaggagttagtttcattttatagctaacatgcaagagacaatatgtctagttaacatttcatctatttctccattaattgcttgcctcatcatctaaactgttgacatgtcacatcatttattaatgagaatgaaacctttataaaactgtcattgagaaacttgattctcttttgtatttcttgcactcaatgtggtaattaggacagaccacttgtgtctgtatgtatcacctacctaggagatgcttgattggaaaccaccagacg

SEQ ID NO: 39486 - DNA, 2022 bp, Zea Mays
cggcaaagggcaaagtgggaaacaatcaagttccacaaaatcgcatctcatctgcttcgactccaccgaggactcccttctttcctcccactcccatctgctctcctcgccgccacctgcgccgtcagagcacggagcagtccgcgaccacgctttcgctgccgctctccgacaggcgacggagccgcagctccagtcgcagtcggctcccctgaattcgggctcgccaaataccctccaatcgtctgcgtccgtcgtccgggacttccggtgcaactgaatccggcaccacctgtgcggcctgtcatggcacttggaagaggagggaggaaggactcaagaggttaaggtacggtatttatagatttggctgaagaaactggttgttgctattatgaagactaagacgagtaggagcttacagaagtctgggagaggtaaccatgtccaaggagaagggccaaactgggttcttgttgctggcggggttttgcttagcacgctttcagtcaaggttgtgtgcaaactaaagcagttgttagacgggaagcagcaaaataatacttccgaagctaaaggaaggcctgaagcatgcaagctgcattcagatctctaccggttcagtgaccaaactggctgctactactggcttgcaaatggtggagtggaagtcaagcaaacacctgcaagtcctgtacccaaatcagttgaatcctcacttccacttgtcaagatacccacaccagaatcaagcaaagagaacagcggtgttatgtggatatcctcacctgatcggcttgaagatcctcgaaggccatttcagtactctaacagttctggctctccctgtgtttcagaatcaggatctgacatttatagcaaaagagaggtcatacagaagctaagacagcacctcaagaaacgtgatgagatgatcatggagatgcaaactcagattgctgatcttaagaactctcttaacattcaggtgacacagtccagcaatctgcagtctcaattggatgctgccaatcgtgatctgtttgaatctgaacgagagattcagcatctaaggaagattattgcagatcattgtgtcacagaagcactctctcatgataaacctttgcaagctgcgcattggcagccagatgccgcaaatgggcattctaatggctatggtgatggttgtgttgatgatgctgacctgcattgtattagcatcgagaagaggaaggtagaagtagagagggtggagatgctcaagaaagaggtggttgaactgaaggaagtcattgagggaaaggactttgtgcttcagagctacaaggaacagaaggtggaactcttctcaaagatcagggagttgcaggaaaagctctcagcacaagtgccaatcatcttgtaggatctatctgtgatactttttagaagattgaatctaagcataatgttgccatgtcccatgagcagcagagggggtcccgcttcagtgaagattgcagaaggtcttggcatttggcaatcgtcacgcatgccaaacaccatgctaggatctttgtggaatgcttctcttttcctttgaggggagctttgcataatgttaggttgatttgtttctttcttggttgtcataatgttaggttggtttgctttcttccttcttcaatatctagcccttggttgctcaaagtttacaaagggattctttttttcagttgctaggcctcaggtaactcaattgaacttcatactcaagttgctgtacaggttctcagatttcaggagacacagaagtctgtactgtgcctctgcctcctgtttcatgcttttttttttgttaagtgatctttggaatgttaggtccatgacatttctactatgagatttgaagactatggcattgcccttttttgtgattccttctggataaaaagcaacttaggcccggtgatgcagtgtatgacattgcccgttgttcatctgatagttattgggggtgtgtgggcagttgcaaaacat

SEQ ID NO: 39487 - DNA, 2584 bp, Zea Mays
ccacgcaccaggacatcgccaccggcaccgcactacggcgtacaggaaaccggacggacagctatgcccgaccgcctcctttctggttctcctcctccctcctccctcccgcgcagatctccacaagcttccagagagcagcagcagcagcagctcgcctccacgcgacacgaggacggacatggcgaccttcaccaagctcgaggattcccccatgttccgcaaacaggtcaattctttggaacatcttactgatgaactgaaagaacggtgctcaaacctgcataaaggatgtaaaagattcatgtacatttctttgttgtctcctgttccacatttgcaaacatttgagatgttctaactgcacataactggaggcaaatgccataaatgcatactgtcttattgcataagtttctgataaggccctttcataaaaattccttttagttcaagaaatacattcagtattttttctttactttgctgttccaggtttcttgttttagtttttgtaatgttccatgagctagtgctcttttattatgttgctaattaccttagtttcaggggatcacttgatgaggcatatgcaggggatctatcatttgcagattctctgcaagcatttggtgctggtctggatgatcctattagtgttgccattggagggcccgtgatgtccaagtttactactgctttcagggagcttgggacatacaaggaactccttcgttctcagcttgagcacatgcttagtgatcgcctgtcacagttcattaacgtggatttaaatggtgtgaaggtaaactctcctctcttctctccacttgaaaccgcacaacatagcatacttgtaactataggttgtaactgaagtaaacaatatagtagttcaggtgctgattttcaatgggcaaataacctttatgcatgtgggattagacttgaacgctcttgcttctgagttcagataacaacaaccacaaagccttttaggccctgtttggcacagcttattttcagcttcttcataaatttaagctgaagttctgccaaacagacagcttctgcagcagcttatcagttcagctgcttctcaaaatgaactaaaagcagccaacaagcagaagctgctttttaccagcttatcagataagctgctttttcaacaagtagtagctgtgccaaacagggtcttagtctcaagcaagttgggtagactagagttgaaacctagcagaagccacaaatcaaggttcaagcacgtggatagctgttttccattcgccctattcaaggctaaatctttaggtgtattccatcttttcaagtatctttttactacctctttccatatgaactttggcctttccctgtctctcttcccattactgtcgcactttaggatcctactacgcattggtgtctttagaggtctttgttggacatgtccaaactatctcaatcggtgttggccaagtttttcttcaattggtgctatccctagcctattgttggcacgaaaatccgtaacccaaacactcgggagagagagcaagtgacatagtggggcgacgagatgctagagcagtatattgccaagcgtgtcctgagtgctacaggaccgatgcatttataggggtagccggggttaggtaaatcaagtaccgtaatgcccccggctaccaactatattcccgccatgcactgtacaacggggtaattataggatagcgagcatgaacccctaattacaccaggtttagtacccttctgggttgcttacaggtgggcctgctgagggcaggtacttcacacagaggccgctaaggcacgaagtccgacagccgtcgttgtaagttgccaccagccatgctaagtctttcgggcgtccgtggaaagttggccccttcgcaagcgagcctgcatggttgactttgccgccgtcttcagatgttgggccctcgtgccttcggcaacacttcctggccttcgcctttctttagctcgctttaatggttcggagaccagatcgagggggtgttatgtcttcgctgcaacacctatcacgtatatcatcgttccagaatcgattccttattgtttgaccacaaatccaagaaaacatatgcatttccacaacacttatctgctgattatgatgtctttttgtaggccaatattcttcaccatacaacatagtaggtataattgccgtcctataaaacttgccttttagttggtgtggtgtcctctcgttacatagaacgtcagatgcttgacgacattttttccatactgctttgattctatagctaacaactttgtcaacatctccatctctctatagcattgatcttaaatatcgcaagatatcattcctggacactacttgaccttctaaactaacatctcatttctcatgtattccttgcttccgagttcggacaaggaacaaaaaaccttaaatagtcctaagatctgtgccttccatcttgggaaaaaggaacaattgcctttccatatggacaataatgtggaagttagattttaacacattgcttacttgatatatgttctt

SEQ ID NO: 39488 - DNA, 924 bp, Zea Mays
cccacacccaaaaatatgagaataacaggtgctacgcgaagggaagggcaggtcaaacaggctgggagagtctcttaccagaatcagaggcgacaaacaccctattcatagcgcgaggcggatccgtggggtccccgaactccggtgaccaattgtcccccccatcgatgatcttgtcaggtgaggccacatccacgtttggcgggatcacgcaatgctcctggaccacctgctggggttggagggtcgccaatggggtagatcgacggtggcggcttcatcttctccccctgctccgatgaggatgctctctaccctcggtttctcgcctatgatggaaggctagctgatgggaagaggggtcgtaggggttcacattttatagtgccacggtggagagatcccaatcgcaatggcctcagattcttagtgagttatttgctcgtggagctcgtcgcgatgaagggaagctgacatgtcggtcccacgcggtagtgatacgtgagagcgtgtggatttcggaaaaagaggggaggctggttgagcgggggcccgcaacaacggcaccaggatgagtccgcacccgcacgcgcttgtgcgtgaaggtgtgtgaatgtctagtggggtcctcctgtaggcacagatgcgagaagcagacgcccacagctgatagactggcggaaggggcccgccggttggtgctagtttgctcgtgggctggttattgtggagatgagttgggtcgagcagtgccaggagggttgggcctgccaggtaagaattcggcccaagcgcaggtaaaggcttcgaacatacctccagctgaatatatggatgcattagcattcaactagtgtgaaaaattgtgttctaagaaactttatatgtactttattgacactattgtgttatgaaaagctttat

SEQ ID NO: 39489 - DNA, 1398 bp, Zea Mays
aaaaaaagcacgcttttgcagctcacccaagcgcagtacgccgcgacagcgtcgactttctgaacgatctggcggcggccgcggctcccaagttcacgaagcgggaggcgcaagcgaagcggctacctctcgccggagatgccgctggggacctctccagtagtggcggaggccgaggcatggacgtgggagaacgcagcggctggagctgccgccgggttcgccacggtcgcggccctccacccgctcgacgtcgtccgcacccgcttccaagtgagcggcggaagggggtggtctgaagtgcctccgtacaggaacaccgcgcatgctgtgtacactatcacacgatctgagggcctgagaggactttatgcaggattttatcccgcagttcttggatcaactgtttcctggggcctatatttctttttctataacagagctaaacaaaggtacttacagaggaagaatgaccagcttcatccagtccatcatctcatctcagctgcagaagcaggtttccttgtttacaaatcccatatggctggtgaaaacaagactgcaactacaaacagctaaacaccatacttctcagtattctggtttttctgatgctttgaaaactattctaagagaggagggatttcttgcactttataggggaattggacctggtcttttgctggtcacccatggcgcaatacagttcacggcctatgaggaacttcgcaaagctatgatattctttaaaagtgcacaatcaagggcagacgacgcaggaggcggggagtcattgctgaattccatcgattttgcggcacttggggctggttcaaaagtagctgctattctacttacttatccttaccaggtcatcagagcccgcttgcagcaacggcctggcactgatggtactccaaagtactcaaatagctggcatgtagtgaaggaaactgcaaagtatgaaggcgtccgtggattttacaggggcatcacgtccaatctactgaaaaaccttccagctgcgtccctcacgttcgtggtgtatgaaaatgttatcaaactattcaaagcaaccaaggagaagacgtagctactcattaaatccaggagtactatgcatggtctgacatttctgagttcaaacgatgcctataatttccattccacgtcaagcccatattttatccatttaacatcgtatatgacaaatatgtaacagtacaggttgtgaccaacctgggtcgtggaaattttttgtacttgcattttgtagagagaaaatacacattttgtttcttcccaaagaaatatgtctttgttatataatccagccgggacgctggcgttgtagatctccgtcctgctgttcggtttaggctgtgtggccgagctatg

SEQ ID NO: 39490 - DNA, 1489 bp, Zea Mays
ccaaccctagccgccactacctgctccctctccctagcagccgacagctgccatccagcgccaccaggaaagccgcccaggcgccccgcctctgcatccgcccgccaggagcagcgcccctgcaacccgctctgaagactcgacgcccagagccgcgcgcaaccccgttcgccgccccgccctccgtctcccgtcgcctcgcccctgcgctccgtcagctgcccctccccgacatatattttcacagacactctctcagttatccaaatattgtcagtcagtttagatggtcggtcagccaccagggcctccccgtccggccgtcgtgcgtccaacagtcgggcaccggcgggcggcggccgctcgcccctgcggcttgggcgctcggccacagccagtgcgggccgtgcggcagtgtccactcgggcctcggccagctgctagctaatcctaatcagtaattacttttgcactttgtggacaagaagttgtgaatgccttcagtgctgcagtgttgggcctatcttcaggttgtgtttcttctcaagtcaaccaagagcagcctcatgatggttcccctcctctgagagaagatgacaagaatgggcattatgtttttgctgttggagataatctcacatctcgttataagatcaatgcaaaaatgggagaaggttagtttggatgaccatatattctgaaatagttgatttaactcgattgggcatgccaatacattcaacaaattttgtctataactgaatgtagctgggactacttggtgtaacctgttagcccctttgatcttattgtgcacacagaaaaaagataactaattttatgagataattccttgcctttgtttgcaaaagtactttggccgataagctggtgttgactaatcattgtatgttgattatgtattcaattcagcatggagttcagtttacttgcatactggctaccatgtatacagaatgctagtgtctgctgacacgttcttttttgcttgttttttgtttgctcttctcaaaaatatagtctacaggaatcagtggtcttctccgctacgctcctgaaatatttgagcagtctggagtggctagtttgttttcagacattggactttctcctcattcaacatcaattctcatgagtacccttaatgctttgctgatactcccttgtataactgccgcaatgctgctgatggatgtctgcgggagaaggtagaatctgagacaccatgaaaattagtgatgcagttgtggacttttgaacaatagctggagtgatatgaaacattagtgatgtagttgtgggcttttgaactgcttcaagctggagtgatgtcgctgtggtgcttttgtgactgatctagctagctatctgtaaatgatctagttgtgaatgatattataattgtgatgtttttgtgaatatataattgtggtgcttttgtgtttatgtgatggatctataactgtgg

SEQ ID NO: 39491 - DNA, 2153 bp, Zea Mays
attaactgagagtctgagactttactggttaatcaggaaatgtctcccgttcacaaaaaagaaggacatgagaagtggggggtggtgactctggctccaaaagaccaaagtttgagcaggatggagcaggagatattgttatggagccacacttaaccgaggataaacctgtgcggatagaccaagaatcatcgtcaacatctaatagggatgctgaggcaagcacatctactagcatgaaacctgttaaaactgaagaagcaggagcagatcttcttcccaaagagatgaatattatgacaattagcgacgataaagctgatggccataatgataaggaaggtgagggtgttacacttgatgggactggaacagagacagggcagataattgtgacaacaataggaggtcacaatgggaagccaaagcagaaggtctcatacatggcagaattggttgttggtactggttcgtttggtattgttttccaggcgaaatgcttggaaactgacgagacggtggcgataaaaaaggtgttacaagataagcgctacaagaatagagagctccagactatgcagttacatgaccacccgaatgtagttcagctgaagcatcacttcttttcaacaactcaaaagggagaagtttacctcaaccttgtacttgaatttgtatccgagacagtttatcgtgttgccaaatactacaaccggatgaaccagcgtgtacccataatatatgttaagttgtatgcatatcagatgtgccgtgcgcttgcttacatccatcgagttgtcggtgtgtgtcatcgtgatattaaacctcaaaatctactggtaagttcccagatccacttttcctcgaagcagtttgtgtggttgttagtgttgcaagtattctgttattcccattttggaccattttgctaccatcttgcttgtaagttgtaacacctgtcaacgcagaaatactgtgtaagtgcacatctgcaggtttgtcatgcaaaatgtctcttaaatctttggagtattttttttgttcagttttacgctaactgctgaaaatgttccttattgcaacttgattaaccttccaggtcaatcctcatacacatcaacttaagatttgtgattttgggagcgctaaaaaattggtccctggtgagcctaacatatcgtacatttgctcgcggtattatagggctcctgaactaatatttggagctacggagtataccactgcgatcgatatctggtctgttggctgtgtagtggctgagcttctgattggtcagcctttgtttcctggtgaaagtggtgttgaccaactggtggaaataataaagattttgggtactccaacaagagaggagatcaggtgcatgaatccaaattattccgaattcaagttccctcagataaaagcccatccatggcacaagctttttggtaagcgcatgccacccgaggctgtcgatctcgtgtcaaggctgctccagtactcaccgaacctgcgctgcactgctgtcgacgcctgtgcccatccgttcttcgatgagctgcgggaccccaaggcttgcctgccgaacggacggccaatgccaccgttgttcgacttcacagcagccgaactcgaagggctccccgccgagcttgtccaccggatcgttcctgaacacatgaggaaggaagtgaattaggtggacggacgtactggggcaaaaaaaaaaaaaaaactccctgtttctctgttggttctgagagatgtgtgagggcacggatatggaggagcggtggtgtattgtaattgtaaagagggctgaaagaaaggtccctctggttgggcgtgtcaccaaagagtggccctagaggcaaaccttacgtttgctcgttgcccttggtgtgtacccagatgtgtatcgatgacataggctggctgctgtatcatcatcagggttgacgctgaacaagagaaattcaagcagggtgctgctagctcgcttcctcccgtagctggaaaccccagaatgccagtttccatcactgcacgtcgtcgcgctgtccactggtgtcccgtaagcatatagagctctgccggctccgctattggcttgcgtgtgtctatcgataatgacttctacggacgctacc

SEQ ID NO: 39492 - DNA, 1293 bp, Zea Mays
gtttgggacaccccctaatcaaggtttaagctttctctattcaaacactcacaaagagagggagaggaatgcccaaggactattctggtcgttgataagagtggggaggatcaacaacatgaaatgctggcggactttgtaagaataccacttgagaaagcaggtggtatgatggcactagtcgatgtttattgtctcttcaaccgtgctaggggaacagagttgatctcaccagaggaccttttgcaagcttgttccctgtgggagaaagttgatgtcccagtcatgctcaggaaatttgatagtggagtgaaggtgatccagaccaaaacacatagtgatgaagaggtatttgcaagaatctcatcacttgcacagaagccagatgctcttcagaaagggattagcccaagtgatgctgcattcacactgggaattgctccagctttagcaaaggagcatcttctaaatgcagaaaacaaaggcctgttgtgcagagatgttagtccagatggattccgcttttttagcaatttatttaatgacattgatccccaaaatattcactcgtaagaaaatcacagccctgccctcctgcaagtttcttttcagatattaccctggatccctgcaagttccttttcagatattacccctttattgattgtgaactttgcaggcaaaaaccccatgggatgtacaaggcgtggatctccgttgcgatggcgtctcactgaaaaagttcgactgggatatattgagatactggttgatcaagctggacatcgatgcaattatagtgtactctttgaaaacgtccgatcaagccagtcattggtgcgatcacaatgtatcctttgaaaacgttagtctgcatatctcgccattatgtaccataacaccaaaagatgtgatatagcaattagcaagcccatttgttctgttgaatgaagagcgtttgagtacgatgtatgaggattcgggctacattggtaaccgtattagcatgcgaccagattaacttttctgtactgactccatccaaaaataatgcaactctggtatagtcctaagctgtactacctcaattttcatcaaaattataagacgagttatgatactaaaaagtactgctagatatatatatttttgataaatataatttaacaatgggtctctgtcctttggagatgctcacaagaataaggataagatgtgtgtgtgtgtgttcataggtgtaaatgtatggacatgtatgagcatctatgttggagtgtgatttcaaaataaaaa

SEQ ID NO: 39493 - DNA, 1195 bp, Zea Mays
  misc_feature (766)..(865): n is a, c, g, or t
ctctctcttcccctccccgttctcccattctctctctcctctcccgagtccctccccctatccccccctctccgcctccgtcgctagggctccattcccctgcgcatccgccgccgccggatcccgcctcgcctccgccgcagcttcggcatcagaatcaccggattcggtggtgtttctcggctgcctcagcttccgccggcggaaggccccaggcggcgctccctgcagccctccggccttcactgagtcctctagaagccaaacatcgttgatacttagaaggcagctgagtatatggtatttgtgggccattgtgctgtccatgcgagcggagagcatgcgtggcacctgtgcttcgggtgatgcccctgaccagagtagctgccgatgcattcggtgtgctgacaatcgcactgtttgctctgtttgctgctctgggcctcttctgcatcttccagtcggtctacttcagggtgcttctcctcgggttttcggtgctgctcaagccaggacatgttgcctttgagggtattatcttcctgtcattcttgatgatgctgtcctgcacgactgttgggatactcttgctggtttactaccctgtagctgattcattggccctccgagatataggccagagggacatagcagaaatggtgccttatgatgattactactatgaaggcacatcgcttgtggccaaccagagtttccgagaaatcgagcggaattctgacacttcaacgaagccgggatccatatnnnnnnnnnnnnnnnnnnnnnnnnnnnnnnnnnnnnnnnnnnnnnnnnnnnnnnnnnnnnnnnnnnnnnnnnnnnnnnnnnnnnnnnnnnnnnnnnnnnntttttcccccaaactagcttaactcatcattagcccagcactctaattccattctatcaaagtagcaagtagctagatcttgcactggctgatgagctgtgttctggcattggctggaagaggctgtgagttggagttcacttttggttggttttgctgctccacaactcataatatctcccagccaataggttacaccatggactaggctggaatggggcctctgctgtgtcgtcgcctactattccttagctgtttctctttgtgacagctgtgccactgagtatatattatatgtatatttgcttgtggccttgaattaaaagcagg

SEQ ID NO: 39494 - DNA, 1445 bp, Zea Mays
ctcgactaatcgtccggtcgtccgattagtcgtcgactaaacacgattagtcgtccagtttaggtcgggacgattaattttccagggctcctgtttcggcctgtttgggatatgggctggacgactgggcccattagtgtaacagtaaaacacacattagggtttaggtcaccttctcctctcctgttccggcggctttttgctcttctctcctgttcaggtggctgtgcctgtgcggcggctcacctctccctgtccaacaccgccctgcaccttcctcctcggtgtcagcatctcaccgtcctcgacggcggcggcccagcagcagtctgcagcggcggcggcccagcagccattagcaccaagatgagtacatcaaccgacggtaacttcaatcactgcacctttcttttgatctgtgccccctcttgaatcccctctgcacctttctcttgatctgtccccccctcttgaatcccctcttcaatctgctgctgccttagccacgattagtcgacctagtcgtcgtcctaatcgcgattagtcgcctagtcgcccaggtgtgtcgactagcaagtcgctcgacttgaaatcattgcattggattactgacataaggggtgagctctctccacaagcattctttaaatattttcagatttgggatcaattacaacagattcaattatgctcaaaaactcatgatcaacatagatggcttccatcatctacggggatctacacttccaagtctgcatatgagcgtttctgcttggggacaacagattttgaacccacttctcgtatctagaagagttggcctccacctaaatgcagattctttttatggctggcagccttgaacagatgttggactgctgaccgtctggctcggcagggattggaacatccagaacactgccttttttgtgatcaggaggaagaaagaattgagcacattcttctcagttgtgttttttctagagaagtttggtatatgccgctatcaatggtaggactgcagcaaggcttcacggaaaggtattccaaaattggtagaaactggcagaggtacaagtgccacccatacaaaggaaaggatttaacaccctggtttcacttgtggcttggatgatgtggaaacatcggaatgcatgtgtctttgataaggctccaccaagcattgccaagatcatccaggaagtcagagatgaggcttctctttggtgtttggctggagcagcagggctgcgtggtctttggccataactgttatgtaatgtggtaaaggtcctctattgttttgtatcctagatgagtccttttaggttcctttgttttcggcctcccgcctccgtaaggagtcctttgtatttggtctgttccagacccttattcttcttcttaatataatgagacgcagctctcctgcgttttcgagagaa

SEQ ID NO: 39495 - DNA, 1251 bp, Zea Mays
ctcccatatcaattacaaagcaatctttagcttccatatataaaattactagtaatggcataagtatttctgtttatgagacatcggtgcataaatttacagtaaaattgtgtcatgtctacacaagtgtcttctcccaccaaccacccaccaagtctctcctgaaaaggcctggtgagagcaaaactcttccacccaccaagtctctcctgtcctgtccaagtaataaagcaccgaaaccggccgccgacgaccaagacctgcaaccgatggaaggcattcagcagctgccagcggacgtcctcgtgtcggtgatctcccgcgccgccgcggggccgagggatgcctgcatcgccgccacggtgtcgccggcgttccgcgccgcggccgactccgacaccgtgtggtcacgcttcctcccggctgacctcgccccgctcgtctacccgacgcctccgccaagatccaagaaggagctcttccttcgcctctctgaaacccatgccctcgttgaagatggcctcatgggagaccggcgccaagtcctatatgattgcggccagggctatggctattatctgggtcgacacgccggactactggcgctggatagtgcgcgaagactcaaggttctcgacatgcgctgaactgttagcggtttgttggctggacatctccggttgcatgccatgcaggatgctgtcaggtgacacgcgctatgcagcctacctggtattcaagatggccgatgactgctttggcctggattctcctcttcaggaggcatcggtcagcgtcggagaggggggcacatcaacggcccactggatcagactacagagctaccacgtcggcgacgaagagaacggcgtaaccgaggaaggagctccacctaggctcccacatgagaggcctgatggctggatggaggtggagctaggagactggtacaaccatggaggcgacgacgacctagtggttcgtgccagtgtgaaggaggccaggtttggaggcaactggaagaaagggcttattgttcagggccttgagattagacctaagaactgattgagggctggttgatcataaaattatatgtatatgtctcagtttggagtgcattcatgttggagctattatgtaataatacgcctgcaggctgcagccgttcctgatgcagggatttttttttcgtctctgcattccttgcgccaaaaataagctttgaggaacatagtgtattgatccggt

SEQ ID NO: 39496 - DNA, 2042 bp, Zea Mays
cgcatcgccggacgccgctcgccctccgcttctgcgactacgtccgagatggccgcctcggcattggcctcccgcgcgctgcggcctccgcacggccgccaccctcccgccccttcgccgcgtccgcgtccgcgctcggcaaccgccgccgctccaaggacgcgctgccgcgcggtggctgcggacgagcgccccgccgaccccgcgttccccgagcgccagaaccgcgggatttccgggtacggacggcaacgcaccaacaaaccaaactgaccattcggatttcaggcttcgcctcctcatcgcgtcgcagttgtcgaccagggcggtggagaggccggaggcggacgtggttgtgataggcagcgggctcggcgggctgtgctgcgccggcctcctggcgaggtacggccaggacgtgctggtgctcgagagccatgaccgcccgggaggcgccgcgcactcgttcgatatcaagggattcaacttcgattcagggccatccttgttctccggattccagtccagaggcccccaggcaaatccacttgctcaggtccttgatgcattaggcgaatcagtcccttgtgcgtcttatgactcttggatggtttatgtacctgaaggacaattcctctcacggataggaccaactgaattcctcaaggtttatatgtttgcagaatggtacaaaccaggatgcttgcttgagtaccctctgggtggaactggagcaataatagatgcccttgtgagcggtattgaaaaatttggtggcagacttgctcttcgttctcatgttgaaaagatcttaatagagaatggtcgagcagttggtgtcaagctacaaagtggacaagttatccgtgcaaagaaagcggttgttagcaatgcatctatgtgggacactttggatctgttaccacccgatgctgtcccaaaatcatatgaagatagagtgaaagcaactccacaatgtgaatcgtttatgcatctccaccttggttttgatgcagagaatgctagagaggaccttgggatccatcacattgtggttgatgattggaacaaaggagttgatggtgaacaaaatgttgttttgatatccgttcccagtgttcttagcaaggacctggcaccgcccggaaagcacattcttcatgcatatactccagggacagaacctttcagtttgtgggagggactggacaggaaaagtgcagaatatcgaagactgaaggaagaacgttctgaggtgatgtggaaagctgtggagcttgctctcggcccaaaatttagccgcgaaaaatgcgacgtgaaattggtcgggacaccgctaacgcacaggagatttctccgaaggaacaggggaacctatggtccagccataaaagccggagaagccactttccctgggcaagcaacaccgatcccccagctcttttgctgcggtgactcgacctttccagggatcggagtgccggcagttgcggccagcggcgcgattgtggcgaacacgctggttccggtgtcgcagcattcagagctccttgacgctgttggaatctgagtggcagatacgtccgtcggtcctgaacgataatcaaagattttcccactgctgttggaaaaagatcgtatggctgaatggagaagaagacgacgacgacgaccgatacagtagagttttctagtcagaacggagactgggaaaatatgttgtacagtatattatttactacgactgcatgaagcttgtgctgcttctgacaaattggtcgcctcgttcgcctgcatgctccttgtattgttctaccgaaagctctgtggcgcatgcaggccttttgtcggacattttttttttctggtatacggaggaaggaccatgtgcttgtttgtacaactctagtcgcagtttgctgaagtccttgaacgacggcaacaaatgccagctgcgctgtcttttcattggagggcagcactggcctggttgttgtttattattattattattattattattattattattattattatta

SEQ ID NO: 39497 - DNA, 387 bp, Zea Mays
tattaatgataaatacctgaccaactaaaagcaactactttgagcttaaccccacatacagctagtccacttcaaccaaacgggacatttgctgagtacgttgatgtgtactcacccttacttaaacaccaaacaccaggttgtccttattgcaaccattgctcaggagaagatgaaggaaatgctgaggatttccaggagtttcaggactttgaggaattctaatctagactagcgacaaccccccttgtcggctgcctgtgaaggccttatcttactacgttttgttcagcactttgatttatgtttaagttaatgattatgcggatgttttgggcatcatgatgtaataaagttatacatagttccgctgttatttgagcattg

SEQ ID NO: 39498 - DNA, 3241 bp, Zea Mays
acatatgcgatgtgaagaatttttttccatggagcccaccccgcaaccctcgaacaccgccgcccaccatgcccagctcccgtagcgccgcacacccccagaaaccggcagcgacagccgggagtacatcccaccctcccctccaacgccgccgcccgccatccccctgccctccgtagttccacgatgttggcttaggccgttgcctagggctccattcccctcccacagctctgccgccgcctcctgtcctctgaaaatggctgacctctaaaatctaaacccttcaaagcttctgtagattcacttcacatcgtccatggccgccgctgctcgcgtggcaatctcacggcccccacctctccctctcccttcctcctcgagcagcagggcgtgtaacctggttgctgggaggagcagcgaccccagcgccaccgctcgcgcggccctcccggctcccgcagcccccacctctccctttcccttcctcctccaacagcaggatgcgaaacctggtggctgggaggagcagagaccccggcgttagggcttctacctccaccgctggcgcgtataagaccaccgcgtcgacaacctcaggcgccaccgtgtttacggccccaaccgccacgacgaggggacgccggcaaggttgatgtcctataaatacatatattacaagcatgatccaaacctgtttggtgaatgggattttgaggtctctaatctctcttgaagtaagctacatcactaagatattgcagcccataccagaagacagaagagggcgcgcgacatccactagtgcaaacgagtcggccttctccaacccgtgtttggtttgaccctgcgctggctggacgtcctccccgaccccattccgcagctcctccgagtgggcgccgactctctccaaaaagaggagcgtccgctagcgagaaggcgagagagagagagagagaaaaaaaatatttgagcagcgagccgcgagcacatcaggcgccactgcctcttcgaaatctccccaccagatttcctccctagaatccgctaccccgatctcgtgtgtcgcccgcggcgatggacacgacggcagcggtggccgcgcgcgtggcgcgtcccacgagcccgtcgcggccgcccaagacgatctgcagcatcaagtcgcaggggctcgacgaggacatggcggcgacgccgcccgtgtttggcaagggcaaggtctcctccgccgcacccgcgacctcgctccaccacaaccaccatgcagacatgccgatggacgcgatcgtctgggcgggtctccctgacgacctgctccccaaggtgctcgcctgtgtgccgaccttcctcctcttccgtcgctaggaggccatccttcgcgaccgggccttcctcgccgcgcacaccgcggtgccctcccacccacgggccctgcctcctcaccttctctaggggcggcagcggcgcccactccccgccgccgatgcactgcagcgtgctcagcatccccctgcatgtccgctacaagctccccttcggcttcctcccgccctgggacctctggctcgtcgggtcctcgggaggcctcgtctgcttctccggcttcaacggcggcgcctccttccgcaccgtcgtctgcaacccgctcacgcgggcctggcgggtgctcccggacatgcatcacaaccagtagaggcagctggtgctcgcggtcgataagacccgccgccagtcattcaaggtgatcgtcactagtgatgtgtatggggacaaggcgctccccactgaggtctaggactccaaggagaataaatggtcggtgcaccagatgatgcctgcgacgaacctgtgctcgtcgaaaatggcgttctacgactctaggttgtacctggatacgctctcgccgctggggctgatgatgtacatagtggatgcggggcgttgggagcatatacctgccaagttcccacggtccctgctcgatggttatctggtggctggagcttgcacgaggttgttcttggttgggtgaatcgggctttacagcaccctatagagtatgaggatctgggagctgaaccatggcagaacagtttgggtggagattagtagaatgccacccaggtacttcagggctctgctgaggttgtcgtctgagaggttcgagtgctttgggcaggacaatttgatctgtttcacgtcgtggaaccagggcaaaggtcttctgtatgatgttgataagaagtcttggtcgtggattaccggttgtgctagtcaactctgcaatagccaggatccctgtgatgtcctattgaatcatggatgttagatttttcaaagtgctgagatgaaaaatgcttcttcgagacactgcaactacaagtagtgggcttgagcaaccgatatttgcaaatcatgcgctgaagactctttactacagcagttataccatctggcagttcttgattagccaaatgttccacatgcattaccaacaatctgctttgtaaagtataccttcttgctcagatccttgttctgattgatatatctctaaagaaagaaatagtttattaatgtgcgttaatgatattgcctgagaggtttaggaaaggaaatatggggcaacaagatagtgagggccttttgtagatagggattccttttgttgtaaaaaaaactttattttcttgtataaaagctaagcccttacagtttgttcttttcgagaggcacttcaacaccaaggcaaatgctgatgaagatgtttgggacggtgaggttgagtaaccgacctggggataactcatggttttattaagcgtgtgtatggtgctgccaataagctcagcacggagattgagggcttgtttggtatggctccagagcaaaactccaaggaggagctggctagagcatgccaaacaacctaactccagagttgtaaactttatgaagtttttgaagttgctgtacaattttttgaagtacctcttttgtggctccgagaactccaaaaaagcaacctagtcatggagtttggagttatttacccgccattgccatcggttatgagaaataatctaaactctggagcagagctgctccaccaagagttttggagtagagctgctctggggtggagcagagccatgccaaacatgccttgagattggagtgctcaaatctcattttgaaagagacctgtccccagattttgtccactatttgatgctcc

SEQ ID NO: 39499 - DNA, 286 bp, Zea Mays
aggccactgcatatatttcttgtaaaattgcatgagagtataggtgatactctaaaacggaacaaaaaaactagacataacctatagtctaaactaacctgcagtctaaactgaatgtaaactttagttggaagatcatattaccaaaagaaaaatctcttgagttagaagatcggaatacaacaaagatatgcaaaaacacatacgtttttaaactataatatgcacactactccctccattccaaattatagatctctttagccttgtcccgggtcagcaaaat

SEQ ID NO: 39500 - DNA, 2213 bp, Zea Mays
cgcctgcgcctccgtctccggccggctctcctcgatcgctacgatttcagggggggcccccggacgaaaccaccaaaaatcccagcgcagatcactcgccggcctcctgctccagcagatcctctcccaaccgacagcgtaacaaaaaccccgggctatcctcttcgctgtctgctctccttcacgctactgagcgcggctctgccaaactgcagggatccatcgtcccgcggggccggccagccggggtagtactacggtgatgaggtccatggagagcacggactcgtcgtccggtgagctaccaccaccgcagaagcagccgagctcggcgccggatctcccgccgggcttccggttccaccccacggacgaggagctggtcgtccactacctcaagaagaaggccgcgtccgtgccactccccgtcgccatcatcgcggaggtcgacctctacaagttcgatccgtgggagctacctggtacgtaaggtagcgcgcgccatatatgccgccatatacatatcctttccaacgtgattgatgaatataatatttattggcatggtgatctcatcttactcattctgctagtgattatactgtatatacagtctcgatcgtgtctattaaaatattattatttttagtcatgtgcatatcttttttcattgtaaataaagtagtactgtgtatatatgcgcatctactagctttgcatacatactgctagcttccatgcatgcatgtgccttactattctcacgcactgtgtggccgcctggacatgcatggttggatactctggatcagataaggcgacattcggcgagcaggagtggtacttcttcagcccgagggaccgcaagtaccccaacggagcgcggccgaacagggcggcgacgtccggctactggaaggcgactggcacagacaagcccatcatggcgtccggcggcaaccgcgagaaggtcggcgtcaagaaggctctcgtgttctaccgcgggaagccgccaaagggcctcaagaccaactggatcatgcacgagtaccgcctcgcggatgcggcgagctcaaccaccagccggccgccgccgccttgcaacgccggaggcaaggccacgtctctcaggctcgacgactgggtgttatgccgcatctacaagaagatcgacaaacttggagtcggcgatccgccgcggatcatggagtgcggcgaggactccgtggagaatgcggtggcagcctacccgacgcatgccgcggctgctgccatggccgtcgcagtcgcaggcggaggaggggcttaccataccggcaattacacttcgctgatccaccaccatcacgaggacagcttcctggtggatgggctgctcacagcagaggacgcgggcggcagctccctgagccagctagccgcggcagccagggcagctgctccaacagacaccaccaagcagctcctcgtcccgtcctccaccaccccgttcaactggctcgacgcgtcggcactcacgattcttccgccggcaaagaggttccatgggtacaacagagacaccactgacggcggcggcacgtccctcccgtcgccgtccgagaggaataacctgcaggcggctgtcggcgccgtcgatagtggcgccagcggtggcactagtgccgtcattccatcatttctcaatccgctcggcgtgcaaggtgcgacaagctatcaccaccacgccattttcggcacaccggtgacgccggaagccgccgcggccgccgcatgcagtttccagcacccctaccagctgtccggcgtgaactggaacccgtaaaaaatccttgataccgacgttgcattggtgcatatggctggcttttcaggtagatcacagcatcaccagcatgtagtagtacagttgttatagtggtagtatcattcagtgaaccacaggacaaattaattaaagcccatgcatattgccgcattgcctactacgagcacgtacctgtacggagctctaagcaaccgcgaaccagctggtagggcgcgatattgagacaaaaaatctagctaggcgagacttagcgatagatatgagatattaattagccatctagcctcttgcatcgtctctatatctacaaattgagccctgcataaaataatttagcctgcatgcacagttcatgacatgcccttcagaaaacaaaattaacagc

SEQ ID NO: 39501 - DNA, 4125 bp, Zea Mays
gtagcactgccctcttcctctctgtcctctcccctgctgccgccccctttcccaaatctggccgcacgacgcaccagccaccaaccgcacacaccccaaacttgaaggcacaacccgagcgctcgcccgcctcgcctctgcgccgcgtccggccgccggtagcgggccggtcacttaccgggagggagaggtgctttggttcctggatgagctgtgaaggaactgggagcaagaagaattgatgtttactccgcagggcaaaggatggaccggctggtcgacgccaactccggccaaccagcggagcggtggtggggctcctgctgcgtcggcgccccttggaaagggcaaaggaagggtcgccgagctcgagcaggagttgcatgaatatcagtacaatatggggcttcttttgattgaaaagaaagaatgggcagcaaaatttgaagaaatcagtgaagtgctgacacagaaagaggagatactgaagagggagcaggcggcacatctgaatgctatatcagagtatgaaaggcgggaggagaacatgcggaaagcactaggtgttgagaagcaatgtgtcgctgatcttgaaaaagccttgcgtgatatacgagcagagatagctgaggttaaatttacatctgagaaaaagataacagatgctcagtctcttgaggctagtttggaggaaaaatccttggagatcgagggaaaacttcatgctgcagatgccaaacttgcagaggcaaaccgcaagaagtctcaagctgaccgtgatttagaagaggcggaagctcgtcaacgtagactggagaaggagaaactgtattttgagacagagcggaaggcccgagaaaagcaacttaaggagcaggaggaatcactgcaggaatgggagaaaaagctgaaggaaagtcagaatagacttaatgagttgcagagatctataaatgagcgagaggagagagcaaataagaatgatcaacttttcaagataaaacaggacgaactggaggaggcacgaaggacagtggaggccgctaaagttactctgaaagtcaaagaggatgatattaacaaaagactaaatgaattacatttacaggaaaaggatgctgactcaaagcgcagtgcattggaagagcaggggaaaaaattggatgagagagaggcaaaggtcactaatagagaaaagaagcttcttgaggatcatcaggtggagcttgaatccaaaagacgggattttgaattagaattagagagggaaaggaaatcttttgatcaaaatatgacacagaagcaagcggatttattgaaaagggagaaagatgttaaatctttggaggctaaactttctaaaagtgagcaggcattgaatgataagaagaaatcaatggaaaacttgcagaatgatcttgatgccaaatctaaggctctgaagagttgggatgaatcattgaaaaatgacgagaaaaggttactgaaagaaaagcagcaaatggatcatgaaagagaacaattggagacatacaaattggagcttgaaaagatcaaatcagcattagaagctgagaaggaaaaaatatcagaagagcagaataatctgaaactcacagcgcaagagaggcaggagcatagcttgttgatagcaaaacttaagaaggagattgaggaatacagaatgcgaagcaactccctatctgaggaaatggaggatttaaggaagcaacggcagaaatttgaagaagagtgggaacaactagacgaaaagagagccctccttgtagaggaggacaaaaggttgaacattgagaggatgaatttagaacggtggcgtgacaacgaagaaaaaaggttaaatgatatgaaactcaaaatggatgaagaatacaagcagcagctggagagtcttgagcgcaaggaaaaggctttgagtgatgatatgaagcacaagcaaatggaaaatgatgaatttctgaagggagaacgtgctgatgttcaacgtaaattgcaactcaaacggcatgaattggagatggagatggagcaaaaacaagccacgaaggagaaggaactggaagaaaaggaaaatgagttaaataagaaaatagattttgtggaaaataaactccgacatgcaattgagttgaatgagtccaagattgagaagttattattggagaaaagggaggtgcagatggaaagagaattactgctggaggaaagaaagaaaacggagactgacaaggcagatattagaagggatattgagagtctgcactcattgagcaagagtttgaaggaacgtcgagaggcatataacagggacaggagcagactcatcgaactatttgaaaagtacaaggcgtgcaaaaactgtgggatttctatttttgagggattggattctctgctgcttaaagacagtgctgaaattgagcatccaagtttggctgttgagggagatgatcatgccttgaccaccgatacatcaggtccagatacaggaacccttgttaattcaggtggtcgtttttctttgttacagaagtgttcaaggcttttcaagttctcccctagaaaaaagggtgagcagtcatcagaacaaccatcagagaggaatatatcttttggtgcaagactcgaggaagcaacacagagcgatggagattatgtgccaactcctgtctatgagatagcccacgattctttcaatgcagaggatgagctcccttctgacggtgaaaccagggagaatgaagagtctgaaaggcatgacatagctgataatgcccagatggagtcttctgttggtgtagcagataacagtatagatattctcggtactaagtcatttgatggtgctaacgacatggcagttgaagcaactattgtctctgttgatcaaaatggcgaggactctgtagttcctgctgaagcaggtgtagagcctgaaacatcagagcaaggtcggcgccagcaaaaccagagaggcagaagaaaaggtggtatgaaaagaacacggtctgttaatgctgtagttgaagatgctaagatgatacttggcgaggtttttgaggagaagactgatgatcagggagatacagtcaaggtgggtgctacacgaaagcggcggtttgctggagctacaataagtgaacaagatgaagaagggagcgaagcacattcagaaagtgtttcacttggagggcagcgccgtaagaggcggcaaactgctggggcagtgacagatgccccaggagaaagacgttacaatttgagacacagtagagctgcaaatgctggcgctgcaacagcccaagcagacaaaaaaaaatcttcaaaagcaagaaataaacatacagtagaagcttctgctgatgacaccgaaggaacatcaaaggttgttgaggaacctgcccctgagagcaagagggtatctgaatctgcagactacgatgcatcccagttgcatgagttttcccaggttgaagttggtgatgcccatgctgtagacggtgagggtgctggtgaggaagatggtgatattttggatggccaagatgcactgcctgatgtgccaatgacaccttctggaagcgagtttggagcggaacaggaagatgaggacgatgatgattcagagaggcgaaaccaatcaatcagcaagaagctatggtcattcttcactacatgacttgctgaagaggtcgtcatgtaggttatttctagcttttgtggtttcgattcatgataccccattcttggaactgtaggtcgtgtgcttttggtgattatgtactagatctcccacttgattgtgcttctctcccgtgtaattgaaatatatttgtagtggacatagtttgatggcactcacagaagtagctgatgagatgtacaatggcgatgatggtatgccctgtaaggctgtaacaccagtagcttggtttgtaattgttcttttcccccggttcgtgttacttcgttgaccttattccggggaaatattttagtgctgtgatgatggtctaaatgtttgttcgcctattgaaactaaatacaatgaattagaataccacagtccacaggagcttcggagacttccatcgtcaagattcc

SEQ ID NO: 39502 - DNA, 3121 bp, Zea Mays
ctcgtgatgcccgtcccgcctccccgctgtggcagccgccttcgcgtccgtcgatccctccgtgcacagatgcgccccaaatcgcgcctcccccaccgcgctccgtgaaatccgccctcctcaacctccccgccacccagaactccctcgcacctcatccttcgcgcgatgctcgccgatgtgccgccttcaaacatcgtcgtcgtcacctcctccccctttcctaggagggcatcctcgccgatgtgtcgccttccaacatcgacaccaccgcgtccccgcaccaccctcccccgtgtgcgtccctggccccctgagctcgcgcaggccggaggaccgcgctcgcccacctgaagattgctccctcccccaaggagctggcggcgacgcggctgcgtcaggagatttgggtccaacttcacatcttattcctcttcagttctcggcagctttggaattgctcagctcagcttttcgacgccgagtctatagctgctgctcaccactgccctcggtgtctgtagtctgtccatggaatgctttcatactgcttgctactcgcagtgtcgtgctgtgcatgcctgccttcgaggcaacaaccaccgtgcatacattgtccgggtcgggctggtatcctttgctgctacttgctgatgctgataagaagaactgcagcttttatcaccccggccgaaaagtcgtctcttgactcgttcgcgctagcttcaaagatagagctaagcaggcgaggcctagaccgtccatgatggcgacaggagctcgacttcgagcgggcctccccagagatgatgctcctccgcagcaggaaatggtagcagcaaacggaacgggccaaccgcagctggtggtggacgaacacaagacgattcttgaagaggtccccagagaagaaaatggcaccctttctgccgccaattatgctgctcaaggtcatgagaatgttgccgctgagtactacaaacaacaggaagaacaggaaaaagttgtcaggagtgaatcattagccatatggctgtctaatatcgcaaatatggttctctttgctgcaaaagtgtatgcttcaacttgttgtcatgatatatcttgtggtttactgccttttcaatgcaaacgccaaatccctatagaaacccaattggaaaagcgtatgcagccactgaaccagggaatgcaagttgggattgcttggctggtcatacgaggtttgatctgttctgggtttcatgtaggaatcaaggaactagctgaggtctccttccctcaagatgacaaacaaacagaaaaaactaccctcaaggtgacctaaacacaaagggagctacataataccctacaagactagaccagtgccctcctaccattggcggcatgggatctcggtgatggaagggcaggggcagcacaggatctactgcattttttacaacgcagtggcagacattggagacgggttcgtgtgggatgccgactcctagctctactgccacgccagacactcttcccatatgaactttttgtgaagctctatagcaaggttgagttgcacccttttggtcttcataaccttggtaacaggccaatttatgctgggaatgcactttgtactgtgaaatataccgacgaggatccttgcatgatgagtattagatcaacttcattttcccctactgctgatgctatgtctgaaacaaaggttgcacctatcacccaggttgatctctctttcctcagtgaagggaaatctacatgggtgaatctgacatcccaagacacaaagcggcatgatcttgcaaatgcatgtgtagtagtcacaggaggcagaggtttaagaagtgctgaaaattttaagttgttggagcagcttgcggagaaatttggtgcagcagcgggcgcgactagggctgctgttgaagcaggttatgttccaaatgaccttcaggatcctcgccggtatatttttacaccatgcccacttttaagaaaatgaaaacacagagttgcaggagaaggctgcagcagcttgaatctcagctaatggaagcgaacagaatcaaagaggaaggcaacactggaagtatccgatggaaggagaacatattagaccaagagaatgaattacagaacataaaacaagagaacgacgacctgcagacaaaggaatcagcggcttctgagaagattaaggaactctcttcccagcttactaatgcaaaatatggcatgataaatagtaacaccaaggagataatgagaaggggggcactgaagaggacgatgaacctgttgtagtagttgccaaaatatgggagaacaacaagtttgttgactatgattcatctaaggagaaggagaatgatggtgactcacaggttgatttggaatcaaacaagggggatgcaggtcttgatagcaacgggttgcactcaactaaggagaacagtggcagggcatcaccaactaaacaacaccagcagtataagaagaagtctctgctgaagagattcggtggtctgctaaaaaagaaaagcgaaaattagcataaaactgtctgatgatattctttgttctatcatttgacatattttttgtaaaccctctcagagatgctgaaagccaacttactattgagagtactatgaaacctctcgcgcagtgtgaaataaatgacagaaatgaagtgtgtgttggtgttggtgctggtgctggagacactaacataaccggtggtattatccaattgtattggagttctattcttgaaaggtgcttggatacaaacgatcaaagcttgaaggaggcttgagtcaattgaatcatctgtaagtaatttagaagaaatattgtttttgttggtgaagcgagtttgttctttcctttgggctctatttatttatgaattgataacccaacaggattgtagtttgtagccatttagatttgaatccgagctatgactgagacgaatacaacatatgcattttgtagccatgtatatctgaatcagagctctgtgattgagatgaatatggttttatgtgccgtcgcaacacactgacattgtactatggtattataagtatcaatatgaagtatttctttg

SEQ ID NO: 39503 - DNA, 3913 bp, Zea Mays
atctatataagccgcgcgcgcggcagccggcagagttgcttccgccaccactactcctgcctgtccctgtccccgactctctctctctccctctctcctgctagctacacccgctgctgtgctgacctcctccgatcctctgcccggcaacaggaatacagcaggggaggagagggggggcaaccggcggcggtcggtcgcggaggatggtgaagttctcgcgggagtacgaggccagcatcatccccgagtggaaggccgccttcgtcgactacaggtgcctcaagaagctcgtcaagaggatcaagatcgcccgccgcgacgccaccagggaagctgggggaggtagcagcagcgacgccaccagcagctacggcttctccgtcctcgaccccgtccgcgccctcgccgcccacttcgcctccgcaacgccgccggcggtctcaccagcgaacggcgacgaggaggaggaggacgacgacgcggagagcttggaaccggattcaggggagctcgtggtggtggccacggccaagcatgagcgagagtttttggagaaggcgggcgaggagctggagaaggtgaacaagttctacgcggcgcaggaggcggacatgctggcgcgcggcgccgcgctcgtcgagcagctccgcatcctggccgacgtcaagcgcatcctcgccaaccacgcggtggcgtcccggcgcagccggcccgccggagactcgccgccgcccccgccgtccgcggacgggcggtccaacagcggccgccacctcctctcctcctcctccccattcctgcaggcctcgccgcagtccatgttagatgggagcgcggagctgccgcaggcgcgcgtggcggaggaggtgatggcggcgctggagcgcaacggcgtgagcttcgtgggcagcgggctgggcagcaaggccaagaaggacggcggcgggaagcagctcacggggcgcgcggccgcgctgccggccacggtgcgcatcgacgtcccgcccaccagccccggccgggcggcgctcaaggtgtgggaggagctcgtcaacgtgctccgcaaggacggcgccgaccccgccgccgccttcgtccaccgcaagaaggtccagcacgccgagaagagcatccgcgacgccttcctcgccctctaccgcggcctcgacctcctcaacaagttcagctccctcaatgtgaaggctttcaccaaaatattgaagaaattcgtcaaggtgtcggagcagcagcggaagactgacctgttctcggagaaggtgaagaggtcgccgttcagcagctctgacaaggtgcttcagctggcagacgaggtggagtgcatcttctcgaggcacttcgcgggcaacgacaggaaggtggccatgaagtacctgaagccgcagcagcccaggaacacccacatgatcaccttcctcgtaggcctcttcacaggcacattcgtgtccctgttcatcatatactcggtcctagcccatgtcgccggcatcttctcttcgacaggaaacacagcctacatggagatcgtctaccacgtcttcagcatgtttgcactcatcagcctgcacgtcttcctgtacgggtgcaacctcctggcgtggaagagcagcaggattagccacaacttcatattcgacttctcccccagcaccgccctgacgcaccgcgacgccttcctcttgtcggcgtccatcatgtgcaccgtcgtcgcggcgctggtcgtcaacctcttcctcagcaacgccggggcgacctacgccaacgcgttgcccggcgcacttctgcttctgtcagcagcggctctcttctgcccattcaacgtcttctaccgctccacgcgctactgcttcatgcgcgtcatgcgcaacatcatgctgtcgccgttctacaaggttctgatggcggatttcttcatggctgaccagctaacaagccagatcgcactgctaagacacctcgagttcacggggtgctacttcatggctggaaccttcacgactcacgcgtatgggagctgcaccagcagctcccagtacaagaacctggcgtacgtgctttccttcctgccttactactggagagcaatgcagtgtctgagaaggtacctggaagaaggccatgacatcgaccagctcgccaacgcgggcaagtacatatcggcgatggtagcagctgctgtcaggttcaagtacgccgcggcaccgacgccgttctggatgtggatggtcatagtgtcgtccacaggcgccaccatctaccagctctactgggatttcgtcatggactggggcttcttagacctcagatctaagaaccgttggctccgagaccagctcatcctcaagaacaagccgatctactatgcttccatgatgctcaaccttgtgctgcgcctggcctgggccgagagcgtgatgaagctccgtctcggtatggtggagtctcgcctgctggatttctcactcgcttcactggaaatcatccggcgagggcactggaacttctacaggctggagaatgaacacttgaacaacgctggaaagttcagggcagtgaagaccgtcccgttaccattccgtgaacttgaaactgattgatcaagtcaaagataagaacttgccagcatgttcccaggaatttaaggaggggggcaagagttccaggaatggacacactgcccctgctagtgcttgcgcaaggattggtgttcaagtgggtaataaaacaaatcagagagcataactgcacaagagcaagacgctgcagatttttaaagatggaattagctcagacggtgccgtgtagttgaggcgccagggtcaggaaagatgatgtgcgtttactctttattggttgattgaggattgttgcatgctaatcgactaacaaatccttgacttcgtcgattcattaacctatgaatgtatctgggaactgatgactgaaaaatattgcatgaaaatacatggtggtcaaacagaatttgaaccatgtttccataaatagtgtttcaaccaagagatgagaaacagcatgaaaacatgcaaggcacaaaataagagagaagtacagaagactgaaaataatttataattgcaggggtaaaaactagataatattacagtgaaagcgcgagatggttgacacggcagatgacaccacatgtgaagcataaacaaagtgcatatattacatggcatgttgcacacaaaataaacaagaaatagctagctacagcctacaagtacctccaatgtgccgggcggtctcttgagacgagaagaacccttgatgatgagtagtcaaatgtaggacagtacagatcatcagggccaatagcttctctcgctgcaatggtgtttccacggtcaaagctgtaggttggctgcgtgtcttccttaaacgtgtcaaaggcgaacagccccataccacatgcagccaagacaaggtttgagtcgccccatacttgggttatcgcagagtgatggatatgagcgttgaattcgggtaactcataggtggcgacaagtttcccctttctcaacgagtattgctgaactcgtgatcttgaccctccttttatttgcagccttccttctgtgctaccaataaataccgagtccccacgtgaaaagattgagtttgctgtgccgccatgtcttgctattttaagcccaatgccagcaggtacacgaaaatcaaatacattgacactttcctgtgtgctgaaaacaccatcatttccttccacctcagatgaactaaccctgtcaaaaaaaccaagcaggtgtgttaaatgatttgaccagggcagatgtcacagaatatattttggtacatctctttcacacaatcagatatgtcatcaacagcatgacaagatatttgcttc

SEQ ID NO: 39504 - DNA, 2637 bp, Zea Mays
gggtcactacttccttcggttttactatcccttcgtttccgctagccttctccttccagagcaaccgcgccattcgtctcctccgtctcgttcgtagtgcaacacatacagcctcgtctggtgaagtgaaagaacgacaagatctgtggtacggcggtgccggccgacatccacccactgtgctaccccttgcggttccagccagcgcagcgatcgattcccgctggccgctgccgtcggtgcctgcccggtcctccactcctcccgctactagtactagtaccagcacactccactgtccactccactgccagtgccatcccattcccatccgaggtaaacgcgtcaacgcgaccagctcacctcgtcatctcccattctctttcatatttgcatgcatctcggttctcggatctgcagcgctcgacgacggggagaatagcgtggcgtgggcggcgccatgaagtacagcaaggaagataagcccgagagggcgggcggcgccggcgcagggtccagggcggtgccggtggcgctcgtcgtcgtcgtgctctgcgccttctccttctacctgggcggcatctacagcacgggacggagcctgctggactccatccagccggcgccgacggctctcctcgccctcggcgccgccacgacgacccgccgtccctccgacgacggccaggctcggccggcactggcgtccacggccgccgtggcgttccccgagtgccccgccgactaccaggactacaccccctgcaccgaccccaagcgctggcggaggtacggcaactaccgcctcagcttcatggagcggcactgcccgccgccgcccgaccggcaccatgttccccaacggcgtcggcgcgtacgtggacctgatgcagggcctggtcccgggcatgcgcgacggcaccgtccgcaccgcgctcgacaccggctgcggcgtcgccagctggggcggcgacctgctggggcggggcatcctcaccgtgtcgctggcgcccagggacaaccacgaggcccaggtgcagttcgcgctggagcgcggcatcccggccatcctcggcatcatctccacgcagcgcctgccgttcccgtccgccgccttcgacatggcgcactgctcgcgctgcctcatcccctggaccgagttcggcggcctctacctcctggagatccaccgcgtcctccgcccgggcggcttctgggtgctctccggcccgcccgtcaactacgagaaccgctggcacggctggaacaccaccgcgcaggcgcagaaggccgacctggacaggctcaagaagatgctggccagcatgtgcttcaagctctacagcatgaagggggacatcgccgtgtggcagaagtccgccgacgcctgctacgacaagctcaccccggtcaccacgcccgccaagtgcgacgacagcgtcgaccccgacgccgcctggtacgtgcccatgcgctcctgcgtcacggctcccagccccaagtacaggaagctggggctcaacgccacgcccaagtggccccagaggctcagcgtcgccccggagcgcatcagcgtcgtcccgggcagcagcgccgccgccttcaagcaggacgacgcccggtggaagctcagggtcaagcactacaagacgctgctgccggcgctggggagcgacaagatcaggaacgtcatggacatgaacaccgtgtacggaggattcgcaggcagcctcatcaaggaccccgtctgggtcatgaacgtcgtctcctcctacggcccaaactccctcggcgtcgtctacgacagagggctcatcggcgtcaaccacgactggtgtgaggcgttctcgacatatccacgcacctatgacctgttgcatcttgatggcctgttcacagcagagtctcacaggtgcgagatgaagtacgtgctccttgagatggaccgtatccttcgtcccacgggctacgccataatccgggagagcacctacttcctcgattctgtggcacccattgccaaagggatgcgatggagctgcgagaagcacagcagcgagaacaaggccgacaaggacaagatcctcgtctgccagaaaaagctttgggcaggaaagcagtgacgagagaggatcatccttcttccttccgagtataaaaaagtaggcatccagatcggccaacaaggcaagaggcgcttcaatacacatggaagatgagcgagtacttctgatacaaagagtgttcggcagttattatcaaaataaataagccgagtaaaactccatataggatccaacagttaccatttttcattaatcacagtttaattctttttctgtaccgacagtttgtaggcaaggagtgggtcaattcatataccatatggtgagcaaatgtaagtttactccacactagatgtgtatagcttggttggtgctactgctatcgatgtaatagcgggccacgtatttacttcacatgttttgtggatcaatatactatgactgtgatgtcctaaagcgacggattttgttgagtgctgctatcagttgacgtcgcaatgcattgttcttgagcaagcaattcctctgaaattgaaatagaaacaaacaagaaaaaggaaccggtaatgca

SEQ ID NO: 39505 - DNA, 1126 bp, Zea Mays
gaggaaagagagggagatgagagaaatagtatggtttagttcacatatcaactggtgatcttctgcgagctgaagtatcttctggcacagaaattggcaagaaagcaaaagaatacatggacaatggaaagcttgtgccggaccaagttgtgacagatatggtggtatcacgactgtcacaaccggatatacaagaaagagggtggcttcttgatggttacccaaggagcttcagtcaagcacaacaccttgaaaatttgaaaataagaccgaatatattcattgtgctagaaatgtgttggaagacggctggatcctgtgactggcaagatttaccatttaaaaaactaccccccggagaatgaggagatttctgcccgacttattacacgttctgatgacacatttgagaaggttaaatcacgtcttgatacgtacaagcaaaattctgaagctattcttcctacatactctgatttgcttaataagattgatggaaactgcccagccgaagttgtttttcaggcgatagatttcctgttacagaagatctgtgagaacacttcagcgagcaagttgaccaaaacaaatggaaaacgaccagattctgcggatacaggttcaaaaaatgagtggcgtggaattccaacgaggttgaataacattccacattctagggaaattagggaatacttctacaacgacgtgttaaaagctacaaaacttgctattgaagataaaaagactcggttgcagatagatatcaatattcctgaacttaaccctgaaatggatgtttaccgcataggaaccctcatggaacttgtaagagaactttctctatcctttgcagatgatgggaaacgtgtcaaggtctgtgttcaaggctccatggggcaaggtgcatttgctggcatcccacttcaactggcaggaaccagaaaaattttggaattcatggactggggtgactatggggcgaagggcaccttcattaatattggagcagtaggtgtgtatgtgttgcccacttattctatacttcagacaatatcaattatcaaatgaaacgaagcatcgtagctttaggttgaatcatcatgcttgtgtacctaggtcgcctcca

SEQ ID NO: 39506 - DNA, 583 bp, Zea Mays
ttgatatcaactcacaaacaaacattttgaaatgaaatttaaaattcattttgaatttagagtgagtttgaggaaatttcaagatttgaattttcggggtgctacaaatgggtagagaaacaagagaagccttgagattaaaagagctcgaagctgcacactcaccagggcctcaagaatacattctagagaatgatctagagttcaaggatgcgcttgccaagcttgaagtggtacatatataagataatagatgaagttgttgatgaagtactcaataacattgcttaaagagttcttagaactttcatgcaataatgtaacaagagtagtattacgtgaaaatagggaccttagaatgagtttaacgactttatggtcgacccatttggtgctcccgaggttgcagatttagttcaccaaggtcttgagctggttgtacatttcttataggccctctcccttgttgacaatgaacctcatgagctctccttaaatgatctccattcttgtaatcttggtgaccttgtaaccttcgtgcaccgtcttgagagcgtcccaaatctccttagccgtttgtagg

SEQ ID NO: 39507 - DNA, 1344 bp, Zea Mays
cgcgggtgtgtggcggcaggaattcgcgggaggaatggctggccggcgggagcccagatcaccctcaatcatgcttcgaccaggccaaagaagacggaattatctccgtcgccatccaccactcacaaccggaccgggggctgatgagatgaacgggaacgggtgcccctcgcctccgccgacgtggactcgctgcctgccccgcaaggcccccaggcctctcggttgcggttgcggttgcgtcccggcggcggtagggtgcgtcggctgggcatggaggccgactccgaggccgcgcgggggagggagggcagcaggggtgtcgcccaagtgctcgcactcggcggcggcggcgggagcggtacagtcggaggaccgccgccgcgaggtgctgtaccgcccggtggagctgcccgggacggggtacgggtctgagctggaggcgcggatcgagaaggtcatctacgcctgccgcttcatgaccttcttcggcatttgtggcttgctcctcggctctgtcccatgcttcctcaagggatgcgttttcgtgatggatgccttcgtcgagtactaccggcacggcgcagggaaggtcatcctcctgctggtggaagccattgagatgtttctcattgcaacggtcacgtttgtcttggggacgggcttgtacgagctcttcatcagtaacatggactccttttacgggtccaacctcttcggcctgttcagccttccggaacggcccaagtgggttgaaatcaagtcggtgaatgatctcaagacaaagctgggccatgtcattgtcatggttctgctggttggcatcttcgagaagagcaagagggtgaccatcacatcctgtgctgacctcttgtgctttgctggatcgattttcctgtcttcagtttgcctctacctgctttccaagctccataccaccaagggaggcagccaggcctgagatgagagtgtttgtattttgatgaggaagtactactactattacaattgatgcttcagttctacgacttctttcaaaccaagcgtccgcacatatcttgaggtacgttgtatagtgcttgggccacgaaggatgatggaacctcaaataaattataatgatgagttctaaccaaccaatgggaggcaatgttccaaaacaaaaaaagaccttgaagtgccctttccaaatcaaaatcaaagttccaggaatccttgaaaaaaatgttctcccacagggacgggacagtttttggtggcgcagttccctgcatatatttgtttgctttttttttcttttcttttttgctttgaacattagctgctacatactctttttccata

SEQ ID NO: 39508 - DNA, 2016 bp, Zea Mays
aaatttccacggaatgaaatatcttctccgtcgccgggcctcccgtccgaatcggatattttttgcgcaccagttctgtcttctgtgggctatccgcctatcccccaaggccccaacccatcactttccacgccgccggccgctgcgctcccagtccggagagacatggactcggaacccgatgtcgagcttcggggccttgacatcgacgtagaacttgacccggaggaccttcagccgtcggtgcccctcaaaaaggtccccggcggcgacctcttcgaggcggcgcgggccggggattgcgaccgcctcgccctcctcctcgacgccggcgccaacgtcaacgcgcgtgaccgttgggactccgtcgcgctctattacgcctgcctggcgggacacgccgaggccgcgcggatgttgctcgaggccggcgccgtctgcgccgagcgcaccttcgacggcgaccgttgccactacgcggccctcaacctgcgcttacgctggctgctcaagtcgttcgaggccaggccgccaccgctcgcgccgctccccaccgcgctgcgggcgacgttccttgcctgccctgccaaccgcaccgctttcctcgagatgctccaggggagcgccggcgccgaatccgccgccctcgccgcggccgccggatttggcccaaaggatgatccatcaagtgcttgccttttccctccagatatcacattctatgtggacagaaagcctgttgaagctcatcgggtcatcctttgtgcccgatctcctttcttcgaaaagaagttcaagacagactggaaagacaggaaggaaactcgaggtagctgttgacgacatggaaaatttggcgcgtgcatgcaaagtttgcaagtgcgaggagttgcaaaaagttttggataaagaagttgtgcatcagaagtatgcggagtacaagtcagcaagagaactggatatggacagctcacagaaacgattcatcttacaagcgcaatccttgcctgaggaagatcgccttccatcagccttgcagcgtattctgcagacttgtctagcaaactcaagagaaggttactgtagtgaggaatcaaatgagatgataaggaactcagaggatgatgatcttgcagatctttatattaaagtaggtgataaggttttccattgtcatcaggtgattttggcctcaaggtcagagtactttagagccaggctatctcgaactgttgattttcttgaaggtaactgtggctttgaagctgctcagaatgttccgcttcttgaggagcatgacataagtgcagaagcatttgaaaagatgctcgaatacatgctgaagaactatttgatgttgcatcaaggtacctgctgtttccccttaagcgggttgtagctgatatgctgctgccatatctcgaacatgtttcgcctgcagaactgtgccactggttgatgatgtcagacatatacggtgtcatgaaaataagggagtatatcttggatatcattgcttgcaactttgagatgtttgcagccacccgggagttccgggccttgctcttgactcttccaccaccatccggagatgactcactacggacaacacgtcccagtgcacctgggactggaggcaacaccgaccaaggcaacattcttgatgatttgcgtgagaagtggctagaagcagagggtgccgagctcgacgagagggatgagagtgcagctctgttcgacaagcgactggagatgcttatgctagttgcagagaaagaagccgatgatgaagacgcttgagtttcggagagtacgtgtgctagggtagcattgtttttgcattcttcactgcgcagttgtttaggtttgtgagttacaagttcatcttttgttgtatgaacttcaaacagatcagttttgacccatcaagtatccagtgagcaagtatttatgaacgaattaaacgatgtaagtttcttgcatataatatgcgattttgatgtagggtctagatga

SEQ ID NO: 39509 - DNA, 2897 bp, Zea Mays
acgggtcgcggctagccggctagagtctcttttccaagcccactcttttttctcctctccacttcgttacgcggacagtgggaggagccacagccattataatagcacgccatacgccaaaagctccactggagccgagcagctactcctcccagtcccaggctcactgtcgctcctcccaagaacccgcccaaagaatcctagaaatccaagaaagggagcaaccaaaacaggaggaggtctgcaggaggaggagcaggtcagcaggaggaggtggtgctgaaggggaagatctcacaagtgtgtgaagaccacacagtctcgcgcactcgcaaacccagtgcgcgctgcggtcttcctcttcgcccaccttcttggagcggggaggttggccatgaggaggtggtggccggctgccctgctgggctgcgcagtggcggtgtccgttctggtggccgccgtggaatgcgctgtgacttacgacaagaaggcggtgctgattgatgggcagaggcggattctcttctccggatccatacactaccccaggagcacccctgatatgtgggaagggctgattcagaaagctaaagacggaggcttggatgtcattcagacctatgtcttttggaacggacatgagcctacgcctggaaattactatttcgaggagaggtacgatttagtcaggttcataaagacggtccagaaggctggcctgtttgtacatctccgcatcggtccctacatttgtggcgagtggaacttcggtttggttgaagtatgtaccgggcatcagcttcaggacagacaacgaacctttcaagacggccatgcagggtttcactgagaaaattgtgggaatgatgaagagcgaaaacctctttgcatcccaaggtggcccaattatcctctctcagattgagaatgagtatgggccagaaggcagggagtttggtgccgcaggtcaggcatatatcaactgggcagcaaagatggcagtcggattgggtactggtgtgccgtgggtgatgtgcaaggaggaggatgcacctgatccagtgatcaatgcatgcaatggtttctactgtgatgcattttctcctaacaaaccttacaagcccacaatgtggactgaagcttggagtggctggttcacggaatttggtgggaccatccgccaacgaccggttgaagatcttgcatttgctgttgctagatttgtacaaaagggtggttcttttatcaattactacatgtatcatggaggaacaaattttgggcgcactgctgggggtcccttcatcacaacaagctatgattatgatgctccaattgatgaatatggacttgttagagaaccaaagcacagtcatcttaaagaactccacagagctgttaagttatgcgagcaggctttggtttctgttgacccagcaattactacccttggtaccatgcaagaggcccgcgtcttccaatctccatctggttgtgcagctttccttgcaaactacaattctaactcctatgcgaaagttgtgttcaacaatgagcaatacagcctaccaccttggtcgattagcatccttcctgattgcaaaaatgttgtttttaacagtgccacagttggtgttcagacatctcagatgcaaatgtggggagatggtgcctcatcaatgacgtgggagaggtatgatgaggaggttgattctctggcagctgctccattgctcaccacaactggtttgcttgagcagcttaatgtcacgagagacagcagtgattatttgtggtacatcaccaggtggcggcaagcctctgtctctcagtgtgcagtctgctggtcatgccttgcatgtctttgtcaatggacaacttcaaggttctgcttatggtaccagggaagatcgaagaatcaaatataatggcaatgctagccttcgagctggtactaacaaaattgcactgctgagtgttgcctgtggattgccgaatgttggagtgcattatgagacgtggaacactggtgttggtggtcctgttgtgcttcatgggctggatgaaggttcacgagaccttacttggcagacttggtcctatcaggttggcctgaaaggcgaacagatgaatctgaactccatagaaggctcaagctcagttgaatggatgcaagggtcattgatagctcaaaaccagcagccattggcctggtatagggcttactttgagactcccagcggggacgagccattggctttggatatgggtagcatgggcaagggccaaatctggataaatggacaaagcattggacgctactggacagcatatgcagatggggactgcaaagaatgcagttacacgggaaccttccgggcacccaaatgtcaatcaggctgtggtcagcccacgcaacgatggtatcatgtgccaaagtcctggctgcagcccaccagaaacctgctggtagtcttcgaggaacttggtggggattcatcgaagatcgccctagtgaagaggtcagtctcaagtgtctgtgctgatgtatctgaggatcacccaaacatcaagaactggcagatcgaaagctacggcgagcgcgagtaccacagggcccaaagtgcacttaagatgtgcacgtgggcagtccatttccgcaatcaaattcgcaagctttgggacacctacgggaacctgtggagatttccagcaaggagattgccactcagctaactctcacacagtcctagagaagaaatgcattgggctccaaagatgcgtcgtcgccatctcccccgagagctttggaggagacccctgcccgagcgtgacgaaaagggtggcggtccaggcagtatgttctcccgtcgcgtagccttacttctccaagcaat

SEQ ID NO: 39510 - DNA, 1356 bp, Zea Mays
ccggtttaatttctcccgtcccgatccggcaacccgaggcccgggctggtgcttctcactagtcagtactcagtagtagtagtagtcactccattccccccacccggctagtagccctgctctgctctctgcctcggctatatatatacgccgcgggcgcaccggtccagcaagcaacaataaagggcggtgtcgaagaggagcttggagcttggaccgacccgagccccatcgagcgagagaggaaataatgggtgaagaggccagctgcaacgctgccagcgcgatggaggccgccaccaacgccaggccggccaaggagaacggacgcgcgccggctgtggcggaggtagtggcccaggaggcggccgctgacccccggctgcagggcatctccgacgccatccgcgtcgtgccgcacttccccaagcacggcatcatgttcaacgacatcaccacgctgctgctgcgccccagggtgttcaaggacgccgtcgacctgttcgtcgagcgctaccgcgggatgcgcatcgacgccgtcgccggcgaggtgatctccgagaaatacgttctcgagtacgggaccgattgcttagagatgcatgtcggagccatcgaacgacctggtgagcgcgtgctgatcaccgacgacttggtcgcgacgggagggacgctctgtgctgcaatcaggcttcttgaacgtgctgaagctgatgtggtcgagtgcgcatgcctcattggcctcccaaaattcaaggatttctacaagttgaatggaaagcccgtctacgtgctggttgagtcccgggaatcagataaataagaacttatgggtcagaggaaagctggcggttcattccttgctgttgtgattgagcagtggagggacatcgacaagccaaccatgggggtgctttagcgttactaaggctagctactaagatcgacttggtgagaggagaggttagaagtgctgggggggggggggggggggtgggggcgttagtcttgtaggctgagtagattttcagagtactgaagagcttgtagttctgccaggaacatgcttattagttgaagcaagtgtgttgatggtccattgcttgttggattttgtggttttgatttgaagggcgcaaaaacatggctggatcagcttgacggaagaacttggacatcaatacgcttagcatcaagtactagcgaagtaggaacttgctacttgtagcgtgttattcctatctttgaactcgttagcttattagtgacaaaattcacaaaaaattggcacgcgaaacggacacaagtcgtagcagaaaaaaacgtgaatatactatctaaaaataaaaataaaaa

SEQ ID NO: 39511 - DNA, 2183 bp, Zea Mays
cgaacaaagttggacccagccttgcctctccccgtggagaattcaaagctccgccgtgtcctcttctggataccggaagtcgtcgccgtccttggaatggcttggcttccttcgctaggaggttttctttctttccggccgactctgtttcttcgaaccttgctcttccagtcagtcgtccttggctcctcttcttccccacacaaacacaacggaatagtcccgaccatactggaaaaccggcgaacttggaaagcaagtcaacaagagtatggcgtccatggagagcctgatcgggatgatgaaccgcatccagcgcgcctgcaccgccctcggagaccacggaggaggaagcgacttgcccaccctctgggagtcgctcccaaccatcgccgtcgtcggaggccaggaattgtcacgcgaaggcctttagtgttgcagctgcaacagacagaggatggatctcaggaatatgcagagttcttgcatatgccgaaaagaaggttttcagactttgttgtgaacttaacaatgattgatcttcctgggttgacaaaagttgctgtagagggacaatctgaaagtattgtgcaagatatagagaatatggttcgctcatatgttgataagcccaactgtattattttggctatatctccagcaaatcaggatattgcaacttctgatgcaattaagctctcaaaagaagttgatccaacaggtgaaaggacgttcggtgtgttgacaaaactggacttaatggacaaaggaacaaatgctctcgatgttcttgagggaagagcctatcggctgcagaatccttgggttggaatcgtcaatcgctcacaagcagatattaataggaaggttgacatgatttcagcgagggaaaaagaaagggaatattttgaaacaagtcctgactatgctcatttatcaagtcgtatgggttctggatatcttgctaagcttctttctcagcatcttgaatctgttatcaaagcacacattcctagtatcacagcgacaatcaacaaaactatagacgaacttgaatcagagctggacatcatagggagagctgtggctgctgatccagggctcaactgtacaccatactggacctctgccgtgcttttgaccgtgttttcaaggaacatcttgatggagggttggcaccatcatccttatttcgcatcttgtatttgtttcgcgtcttgtgaactcttggttgcctaactcaggaggtcaggtggagatagaatatacggcgtgtttgaccataagctccctgctgcttttaagaagctttccttcgaccgctacctgtcggtgcaaaacgtgaagaaggtggtttcagaagcagatggctatcagccccatctcatggcacctgaacaagggtaccggcggcttattgagaagggcatcaactatttcagaggaccagctgaagccacggttgatgcggtccacgttgttctaaaagacttggtcaggaaatccataggggagacagagcaactcagaagatttccgacgcttcaagcagcgatcgcgaccgctgcaaacgaagccctggagcgattccgggaggacgggcgcagcacggcgcttcgtctggtggacatggaggctgcgtacgtgacggtggagttcttccggaagctccctcaggatcctcctgctgatgcgcctgctagcaaggctggaggcaagccttcagcggagccggcggctgcgccgcctcctgaccgctacggtgacgggcacttcaggagcatcgcctccaacgtgtcccagtacatccggatggttggagacgagctcctgcagaagatccccaaggcagctgtccactgccaggttcgcgaggccaagaggtctctgctcaaccatttctacgtgcagatggggaagaaagaggctggggagtttgggcatatgctggacgaggacccggcgatgatggagcgccggcagcagtgcttcaagaggctggagctgtacaaatctgccagggatgaggttgattctgtggcatgggggggcagcagcagataggtcagtggaagcattgtattcgtagggatattcttgttgtatatacaatacaattctatatatattacggtattacatactctaaaaacaaaaaatgatataatttataataaaaaata

SEQ ID NO: 39512 - DNA, 205 bp, Zea Mays
gttgacattgatccaccccatcgcttgatcctcgaaagcaatccaatggttatcactagggagcaagtatgctcgtagaggtttcttgggatgagggagacccttgacggtgcgagaatttctcgccagagtcatatactcgcgacggagtcgctcctcgtcatgggcggaggtctctatgccataatcacagacgagcaagcca

SEQ ID NO: 39513 - DNA, 6013 bp, Zea Mays
atgcacccacgccccgtctctttgaagccgcccgcgtctccacccgagaccccgacccaccccgccctcccccgccgtcgcgctcgcgctcccccgcgacagccgccatgcgccctatctccgccatgcctgcgcctcctcccccgcccgcccgagaaccaccaagtttcccttccttacacagcgaggtccaccatcaacgcccccttccctggcaagccacagccgtccacgttcctggccaccagcgacctcccttctctagcccttagcagcgagcaacacctcctccccatggctgcccccagaccccagtcccgtccgcgcatccgctcccccgtcagcgacgcacctattctcctcgacgtcgcccatggcgtggacggcgacctccctcaccctgcactctggtatgtcaccgtattgcccgcctcctttccccgcaccggcgcagccccctgttgcggcggccccttccccaaacagcacggcaccacgtgctccccctgccgcgcccgcactctccttccccaaacagcacggccccacgacgctcacactctccttccctggcgatatcccctcatctgcgccttgtccctcggagatccccttccatcttcggcaccgagaggaaaatggatggcaatcccatccatcggcgccaaaccctacacatcctccatagtaggcacccgcccctccttacgcggcaccatcggtggggatatcccccaatctgctggaaggagtccgcgccaaatcagagcccgaaatccgtgccaaatccacgctggatgaggtggtggggagaccccccaatctgcgtcccttctacatgcctacacatcctccatagaaggcgccctcctactaaccactaaaaaaccccttccacacgctgacaactccatatatattagtccaaagggagagcacgattaaggccacgcctaccagcttcaccctcctcgcatttgtaagtccaatttttagatttatgatttcagatgttgagttgattttgcaaactggtaagtgttttgtttcatacggcaactctgcacatggacagaatcacagctctgttagcgttgttttatcaaggtacgtccaattccttctatttagttgactgtgattcaatatgcttgttgttcggttttacttgcgacatgctgttggggcatgtgtttgggatggatgacgtttggactagatagtttcagtcagtagccatctaaacaagcccttacagtattcgctatttcatattgaattttcctcatattgtagagaaaatcgcagctaatctgttcactgtggatgagttgccccatggtttgttcttaatcagaagaatggacgtgtgcaccacagtttagtgctaaatcatatggatataggagagatgtgctctctcctgtcctaaaacagttcatgttctcgtttttctattctgacagttcataagcgccggtcttttagatgcccactgacctggacatgttggtagaaatactgggcaggtgggatcaactccgatatttggtcaatttctcaaccactttctgttaatacgcaatttttattgaaaaacataatgacgtgcaatgcaaccaccctattcaatattcgtatggttagcaaaccatacgatcaatagaagatctttttggtagcactaaactacctacatacttgcatgcatgcgtcctaatccttgagtttgagtcaaaattaaatcaaaaattgtcatgatcaatcaaacaggaaagaattgacattctatagtttgcgtaggaaagtgtctctgtgtgttttctttttgaaggatcaaggattgaaggattttcctgcttgacggattagcacttcagtaccagtagttaagttattaggagcagtagcaaaaaggggctatatttgtttagggcttgttcgttttcatctcaatccatgtggatcagaggggtttgagtagctttaaatctacaataggtcaaaagctctactaaaatttttcaatctcatcaaatccatatgtcatatgaccgaacaaggccttagcgggtagggcacatcatcttaacgccaaactgctgcctcgaaaacgagtgtatagggcacaacatttgaaccacatatatgatatcaatcttatcaatctattgtgttaattatgaatcctgcatcaatcaaccagggcccggggcacattttcccaagccattgacaaatgttggtagatgcaggattcatagttacagaaactatgtggttcaaattttgccagtatttgactcatcacatttttcttctctatttcagttcttctagcagttgaagtagtgttttcttggcagatgttcgcctttaggacattgctgcgaggtactgctacaatattggggattacttcattccttaatcatctaatatttttttcatcgtctctgcatttgtttctgcaggggaatcggatatgccacaggctgcatgttgttggagtttctatgtatccccatatcaaatttgtttttccctaatcagggaactcaattgtgcgagtaatagcaggagctcttccgaaaggccttcacatgttaatcctatcgaagaataacatatcaattattgaacgcctcagagaattgacacgattgcgcttgttggatatcaactataataggatatctagaattggccatgatcatctgttaggattggcctcatgttcctctttgaaggagttgtatctggtcggtaacaagatcagtgaggtagatggtcttcaccgacttctgaagctcaaggttctggacttgtgccacattcagtcttctgtagccactatacttggggttggtgcagaggatgctaggaaaatactcaataattatggtacatgtccaattctaagtatggtatattgtgctctaatatttttaggcatcattgtttctgttaaatactttgcccatggttaaggttatgagtgcattggttaatgaaatgtatgacattaaacggtggctgcgtggtgttccatcgtttcgccttgagccattatttaggcgaagagttccacaattgcatactgcacttgaacatatatagtactcatgaagttgttctacatcatattggatttcaatgcttttttatcagtgacagttttctcttttttggtgagtacaataattgtatttttatcttgtaatagattagttttattcatacgacaagcactatgcactgtgatatttgttgatttttcctttacctgccccccttgcactttctaattaaatgtttttgactatggaatggatcttttccattccatgtggtttgggggacaattgatgtgctttgctttgaagacagttgtagtggtcatctgattgtgaatttgtggtgcacaagttggctatgtgttttttccaagaaaatattttcttaacatagtccagcactaggattctcgagtccccgatccccagcacaaacttgctgttgtttccacttttatcgtcaatagttgttagtacttactgattaaattcacattctttaatatatgaactttattgctttctgattgtgcattcagaggggcaacagtacatcattaatccatcaaatgttcaaaaatgtgcatccataggtgcaacattataacagggatacagtcactgctacgtacaataattttatggggctactgtaccacctgtacagtttttcatgatctgtttgagggaccttaacctaggtactaggcaaattttaccattgttgtgaactgactataaaactccttttaaggtggccttaaagtaaatttaagcatgtttgcttgaagccgctcagcctcagatcatcttaagaggttgtggatttattgagtccaacacaagtttggtgttcctttgtacagttttactatggagtaccagactacgagtcattgtttgtgccatgggtccttgacctttgtaactaattcaagtcagatgatatgtatctccttatgaaattcttttctcaactaccgtgatgatatttcaataattgatttcagtttcttctatgcattcaaagtagccaggctatcatgacggcattaagttcttgtatttaaccgttcgaccaaatttgtccaattgttataggtatctgtgaaaatccatgaacaacttatgtgttcatgtctctcattttatgtccttgcatgtcaataactataggtatctgtgtttatcacatatacaagctaacaatatacagttatgggtgagacaacgtcttagttcactgatcacacacatatttttgacagtcaatacttgcaataatgtgatatttgtaaactaatttttcctcaaaaattgtaacctgcatcaggcaaatatgagaaactagcatttgttgatgtttgaagtatatttatgtggatttgtgacttccttacatctcctctttcaaacaattggttcattattattattggtatggtggtgttatcgccccatttgcattaagctgctcactaagtcaaagtagtaaaaagccatggctgttgttacctagaagatgttgtgtatattcaaatcatagtgcttgtgttttgggctggagatagcacaaaataactactaaaactatctattatcaagtgatccatttgcagttttttcaatctgacactcacagactcactggttatatttcagagctgggaagaagctaacgatataccatacttagactcactggttaaggttatgagtgcattggtttgtaaaaaaaatatttcatggtcaccacagtaggagcaacatatccctgtttagcatattgggtaataactgtgctgatagtgtcacttaaacttggtaaacctgcaactgtaaatactgatacgtggactataagttttggccgtgcagttgctgtgtgataactattttgagttttcctaaacagtttcttacctagattgtcgtgaacttgcggtgtagtagcattgtacctattttaacttggccttgtttgtttgattttgtaagtgagggttttaatttagttgctagctcgatgaaagactatgattcgcaagactggatattttcctgcttatgaagaagcggtggcaaccaaattttcgaagtatgtgagttaaaaatctcgtcatgaatgaactcatgttgtttatagatttgcactggaatatgggcatgtagtgggcactactgggctaggagaagatgaagtgtttgtttttaattgcgtctttttgattgctttggcatgtatggctggcaatgtcatgttttttcatttttgtccacttcaatacacatgaaaccgttttggagactaattttgaagtatgtttaaacaattattctatttaaataagatctgcatatgtgatatattgaaaccattttggcaatgtcgtgtttttttatttttgtttaccatctgcatacctttacaaatgtcattttggttattttactgaattatattatatgccacatgactcttttattatttcttttttttaagaaagtcggggccattactcagatggtaaacaaacttgggccatgtaaatggtcgaccttgcctaaactatacctggacgtattggaaagcaatgctgggaaagctatgccatgaaagatatttgtagcagtgttacatgatggcatcaagtgctgggaaaatatttattaatttatggttttgtttctatggaatataggagtcatgattttgtgcatttgatcagagactacattaactagaggatactttctttttttcaaaattacaaaaacaatactaagtgtacctattattgtctactcgtctcatgatgattactatgtagataaattctctaagctatgaacagtgaccaatgaaatatattcatttgcatacagttctcaaactaatgtattcacgtcattatatattgtgccagctttgtcaa

SEQ ID NO: 39514 - DNA, 2092 bp, Zea Mays
cgcaaacccgatgggtacgagtttgggcaaaatttcaaacccgtcatggctacaggttttttaatgggtgtaaatatttttcacggatacgggtttgggatagcaaaacccgacgggtttgtacccgttgccatctcagacaggcccccacgacgagagtcccccgtcccgtctgtccgtctcccagcagtaggcagtgtagcactctcctctgatccggagtcgagtcgattcgagtccactccgctgtccgctcgcaccaactcctccatccaattccaactcggcaactcctccaggcagcccggtgggggaggttggtaggcgccggggcgtgcctgtcggctggcggtttcgggaagcgctgccgcgatccttgcccggatctgggcgccacgatggaggacgccggccgcgagggcggcactgccgcggagaatgggaccgagggggagggctacgtcctcgtcaaggccgcccccgagggggagggggaccccaccgccgccgccgccggaggcgatcgcgaggatctcgctgcctccgccccggcgatggcgatggcggtggcggctgcggacgaggccgcggcaccggccaagaagggtggatccggggccacgaaggcgaggctgcagaacggcagggtccccgccggaacttccgccgccgccgccgccgccgggccgagggtgaagaagcccggggtcctctcacagagcgcctccttcccggcgcggggcgcggtggcggtcgcggccaagaaggccgcggcggcggttgctacgcccaagcaggccaagggcgccgtgcccattggatcagagacggcggcaggccgggcggtggagaagaaggcgagtttggcgcggacacctgttgctcgccggccgatgcttgttaagtctggatcagtggatgcggctgccccaaatgacacagttgttgctgtccaagagtcagatgaaaatacggacaaaccattgaaacaaacacagccagggaaaacagaggatgatgtgcactccaccacatcaagtaccaatactccccgtgcagcagctcgtaagagtgctgctgctgctgctgctggttttagtttcagattggaggagcgtgctgagaagagaaaggagttcttccaaaagcttgaagaaaaaatccatgcgaaggagctggaaaaaacaaatttgcaggagaaatctaaggagagccaagaggctgagatcaaactactgaggaagagcctaacatttaaagccacacctatgccaagcttttacaaggagcagccacccaaagttgagttgaaaaagattcccccaacacgtgccaggtcaccaaggctcggccggcacaaggcagccagttctgctactgctcctgctcctgcagatggttctgtatcatgtgggagcccacggagcactgcaaattcgggcaaggtaaatgaaatcatggagaacatcaaacctcgtgtccctgctagaaaatctattcagaggccagtcacgaaaactccattgcaagtgtctgccaccacaaaggctgaaccaagacccatagctacaaagccgaaaatcgcaaactcgaaacctaaggtttcaagggcaaaggttgcgcaggcgcaaggaaactcagctgaagtccctccttcagaaccttctgcctcggaagagctagtagtcgaacatggcgttggagaagctacaggtcctgatctggcttcacaattggttgcttcgaatgaagtcccagtccatggttgatcaattgcgcattttgcctatttatttccttcttgcagttctgtgaatagtgagggtgtgtgcttcattgaaagttgaatcgctcaaagtgccatggtttatcgtttctggagtaggcatccaaatttttttttcagcttgtcattgagcatgccatgtatattgcttgatattgtgttcatgtttaaaattcccaatcttgtgtatattggatttatatgtctttggacatcctaggattgttgcaatacgtcaatgcaatttgtgcattattttgtagtcgttttacttttagccttttccctcattcttgttagttttac

SEQ ID NO: 39515 - DNA, 1082 bp, Zea Mays
aacaatctcgctctcgctcccgctccggtccttccctttcctggacgattccattccattccgttccgtgggtaatggatgacaagtgggcccgttattgacatatggcattggcaggcctttgtttctcagtcctataaggccgagaacaggcagagcaccgggatctagggtttcgcacccaacacccggagacgaggtgcagagggcagcggtgagcagttggaacgagcttgactatgaggcggaagcgcgtttggtggcggaggcgagggcgtcgtgggataggaaggcaaggggggaggaggaggatgaagaagaacatgatcctgagatgaccttggactactacgcctaccaggctaaaaagtttcgcaacacctggaacatcctctatttcggccacttcggtcgcttcgaggacaccacaaggatccctcctatgcgctttacagagaagccgcctgactccccggcgtacccgcgcactacactgcaggtcttttcgatcaaagttgcagggatagaggggggtttacagtggccactccatgtgtttgggaaggttgccctacgcgacgcagttgatcacaatcgcaatatggtcttcgatcgcactagagacaactgccaaatccttacaaaagaggttccaaatttgaaactgacaggtcctagccgtgctgttctgctggtggatcctgtgactattgaggctgacctgaaagttaaaggccgtactgaatctgaggataaacacttgagctttctagcagtgccattcttggtcatgatcccgctcgagtcatgcctgcgtacaagagatttcaccagcaagcttagcacgctgaggtttgctctcgcaattgttgttctctcagtggaggctacaattagtgtgcgagttcgtggtgggtcatggcctgatggtctccgtgcccagtttgctgcccacacggtgagtataggtcgtgaggaagttgtcttgcttgattctggggacgataaactgcctgtttctgatgatggcactatcaaacttggtcgtcgagttgcatctcaaaaaaaaaaaaaataccaga

SEQ ID NO: 39516 - DNA, 13320 bp, Zea Mays
cctccgcctccctggtccctggtccctactcccatttctcctcgactcgtccaagacaaggaaagtaggaaaccgcctgccctgcgtgtgggctgtctgctgtgttgctagcccagtactttctcttctcgctcacgcggcacgccgagcaaggggaccgacaggcggagcgcttctcagcccctccgcaccttcgggtctcgcgttggtggcgccggcgggcgctgccgatcgccggcggcggccgagatgttggaggaccaggtcgccttcctgctgcagaagtacctcggcaactacgtccggggcctcagcaaggaggcgctaaagatcagcgtctggagaggtgatgtagagctcacaaacatgcaactgaagccagaagctctcaattcattgaaattacctgttagagtcaaagctggctttcttggttctgtgaagctcaaggttccatggagcaggttgggacaagagccagttttggtttatcttgatcgaatttttatactagctgaaccagcaacacaagttgaaggttgcagcgaggatgctgtccaggaagcaaaaagaagtcgagttagggaaatggagatcaaattgttggagcgccaacagcaactgaaatctgaactaagttcatcatggctagggtctttcattggcactgtaattggaaatatcaagttatccattggcaatattcatatcagatacgaagacgtagagagcaatcctggccacccttttgcagcaggtctggtactttcaaagctttcagcagttacagtggatgaccttggcaaggagacttttgccacaggtggtgatttggaccgagtgaaaaagtctgttgaacttgagagtctggcggtgtattttgactctgatagcagttcttggattgtggataaaccctgggaggatttacttccatcagagtggagtcaggtttttgagtttcaggagcaggatggttccagatctgcttcgaaaaagcatgcctacattttacagcctgtatctggcaaagcaaaatatacaaagatacaacttactgaggcaaagaaaacaggacaagcattgcaaaatactgcagtggatttggatgatgttactctgtcgttgtcgaaggatggctacagggacatgttaaagttggctgataatttctctacattcaatcaacggctgagatatgctcatctccgaccatcttcaccattaaaatcggatccacgagcttggtggaagtatgcatacaaggtggtgactcaggaaatgaagaaagcaagcgggaggctatcttgggagcaattattgagaaatgcaagacttcggaagacatatgtatctttatatgcatccctcttaaaatctgacatgagtcgactggttgttgatgaccatgaggagattaagaggctggaccgtgaacttgatatggaggttattctacagtggaggatgttagctcacaagtttgtagaacagtcggtggaaacataccagtatgctcaacaaaataagaagtcctggtggtcatttggatggttgattcctggcctataaaaccctattgtttctatgtcgttaaatatgcagcaactaatttgtctttatgtaggactggctcttcaaaggatgaggaagattcaaagagttttactgatgaagattgggaaagactaaatcggattattgggtacaaagaaaccaacgagtatgtcactgatcaacaggatatgaaactgatgcaatttgattttgaaatacgtatgaaacataatgcatcaaagcttaccattgatgattcggagtgccttgctgatctctcatgccaagatttctgctgcaacttgaaaatgtatccggaggcaaaaatatttgatctgaagctgggttcctacaggcttttatctccatatggcctgcttgctgagagtgcaagtgtcatcgattcttttgttggcctcttctcctacaaaccttttgatgagcaactggactggagtttgacagctaaagcttcgccttgttatataacttatttaaaggattcagttgatcaaattgttggcttcttcaagagtagccctaccattagccagaacctggcactagagactgctgctgctgtacagatgacactagatgaagtgaaacggactgctcaacagcaaatgactcgggtgctaaaagatcagtccaggttttcactgaacatggatattgctgctccaaaaattaccgttcctaccaagttccgaccagatgatgtacatgagactaagcttttgcttgaccttggaaatttagttcttcggacagaggaaatatgggatgcctatacttcagaagagcaggatatatatctaaactttaatttggtgcttagtgatgtctctgcatttctggtggatggtgattaccattggaatgaaacatctgatgaaaagaacttgttgccagtaattgacaaatgtgggattgctttgaaacttcagcagatccagttagaaagtcctctatatccttccacaagaatggcgatacgggtgccttccctaggatttcatttctctcctgcacgctatcatcgtttaatggaaattttaaaattttttcaagatggtgctagtgataatagcaattcagatcatgaacacttgtgggatcatgctgactttgaaggatggtcatctcttctcacatggaagggtgttggaaaccgggaagctgtttggcaacacagatatttgcgtctagtgggtccatttctctatgtatttgaaaatttaatgtctacaacgtacaagcaatggttcagtttacgcgggaaacaagttcaccagattctggaagacactggtgctttaattttgttgtttgataatgatgagggacgaaagatatggcagaaccgtttacagggtgctatataccgtgcatcgggttctgcaatttctagctttcctggagttgctctcccatcagaggcccactcattcaaaggcaactttcttgatgttgctgacacagagaaattatttgttgcgggcattcttgatgaattaaagatatgtttttcatgtggctatgaggttgaactctcaatgaaaggtggcaatttactgataggaactattttggggtcactagaaattgaagaccagtattactatccagggagtcctgtgccaaggttcttggcaaggtcttttattaatagcatgcaaactcaagaactcccgtctcttagccgaaagaacagtgcaggacctagaaacaccccattgatgaaaaatgacagtgaggaaaactttttcgaagcatcagatgattttgatgaatttgaaacacctatgcatcaaaagaggactatatcagactattttagcacccagaaatttttgcctactagcgttccttccctacagccgccaacatttaagcgcattcctgatttgataccagatactgaacttcaaactggcaaattcacattggaaggtagtggcactttcaatagttttgtgaaagctcagatagtgatttatgatcaacattctccccagtacaacagcttggataacagggtagttgtaactgttgccactttatccttcttttgccatcggccaactgttattgcaatcatggaatttatgaatgccatcaaccttgcaaacgggtctgatactgataaagataaaagcacttatcctgctactgtagaagatagtgcaattgaggaatctaagtctgatctggaatcagagccatcaataaaacccttactggctaaaggtaaaagcagaatagtttttcatcttacatccagcatggcagaggcacagatattactgatgaatgaaaatggtgaccggcttgctactttatcacaaaataatctctcgactgatataaaggtgttcacatcatcattcagcataaaggctgcactcggaaaccttaaaataagtgatgatagccttcttagcagccacccttacttttgggtttgtgatatgcgaaatcctggaggtcgttcatttgtggagatcgactttagttcatacaatgttggtgatgaagactattgtggttatgactatagccttgtagggcagctttcagaagttagaattgtttacctcaaccgttttgttcaagagattatcagttattttatgggacttgtgccaaaaagttctgatgccgttgtaaagctgaaagacaataagactaactcagagaagtgggttagcaaaaccgatatggaaggatcacctgctctcaaattggatgtttcattcagcaggcctataattgttatgccccgtgaaactaatagtaatgactttttggagcttgatgttctatacataacagtccaaaatgaattccaatggataggtggtgataagaatgagatgagcactgttcacttagacattttaacagttacagtacgggacataaatttagttattggtatgaatatggtgcgtggtgaaaccataattcaagatgtagaaggtctctcctttgaacttcgtagatcattgcgtgatttgagacatcagttgccagtggtggaggcagcaattaaggtggatgttttgaaagcaacactatccaatcgagaatatgaaattatttctgaatgtgcattgtctaacttctctgagacaccacatcctgtgcctactctggatgatcctcgatatggcacttccactactccatcccatgtatcagcttcttcttcagaaagtattcatgtcttgtccgaaggtgcagaaacatggatagctaataaattttctgtctcaataaatctggttgagctttctctgcattcaggatcgacaagagattctcctctggcgagcgttcaggcgagtggagcatggcttttctataaatcaaacacacggggagaaaattttatgtatgctactctcaaaggattttctgtttttgatgatcgtgaaggaaccaaagatgagttaaggcttgccattgggaaatcagcatctgttcgggacacatcatctgttgatggctatgataatcctaatgaacttgattcaggtgaacgaagaatacaaaaggatctaggccttgagccaatcccctcgatgcttattcttgatgccatcttccgaaaatcttcgtcatccgtctctgtctgtgttcagcggcccaagtttcttgtggcacttgacttcttactagcagtaatcgaattctttgtgccatctgctcagagtcttctatccaatgatgaagacaaggaccttttacatatgatcactccagtagtattgaatgatcaaatttatttccaggagcattcaacatttagtctttcacctcagaagcccttgattgttgataatgaaagatttgatcacttcgtatatgatgggaagggtggaaagttatatttgctggatagtgaggggaaaattctctcaagcccttgtactgagagtttcattcatgtgcttgggtgtaagagattgcaatttcggaatgtcactatagtgaatggtgaatatttggattcctgtatctctctcggtgatgatagctgttattcagcatcaaggaatgaccatgtctacttagtaagagaagatgatgggtccttgtcaacccccagcaaggaaattagaggagacagtgttaaaaatgggagtgctgatatatcaaccgaatttattatggaactacaggctattggaccagagcttactttctatagtacatcaaggaatgctggtgaaaacttagcactgtcaacaaaggttattcatgcccacacagatgcattttgcaggcttataatgaaaggcgacagtatggagatgaatggaaacatacttggtttaaagatggagagtaatggcatcagagttatagaaccatttgacatggtcgtgaaatattccaatgcgtctggaaagacaaatttgcatctactagtttctgaaatatatatgaatttttccttcagtattctcagactgtttttagcagttgaggaagaaatttcagcatttcttaggatgtcgtcaaagaaaatttcactggtgtgttaccagtttgacaaagttgcaactatgcaaggtaatgctaatgatcaagtgttatctttctggcgaccgcgtgctccatctggatatgccatttttggcgattatctcacaccaatgaacgagcctcctactaaaggagttcttgctctgaacacaaacattgttagggtcaaaaggcctttatcgtacaaactagtgtggcaatctggttctccaagaacaaacatttttcatcagaaggacttggaggataagatctctaatattgaccagctctgctctgtttggttacctgtggcacctgcgggttatgttgcaatgggttgtgttgcttcatctggaactgctgaaccacctttgtcttcagctttctgtttaactgcttctttggtttcatcatgtaatctaagggattgcattgcactgagggataacactaacatgatattctggcgagttgataatgcttttggttcctttttacctggagatcctgcaagcatgagtgtggatgggaatgcttatgatcttcgacatatgctgttcgacagtgcagactcatcttccaagactgtctctagaaggcaagatagtagaaatgatttctctcaactagagagatcagaattgacctcaggtcggctatttgatgctgtggcaagctttaaactaatttggtcaaatagtgggacctcttcaccaaaaaagctctcaatatggcgtccaatgttgtctgaaggaatgttttactttggtgacatagctgttaacgggtatgaaccaccaaattcaactgttgttcttcgtgatactggtgaagacacttttctcagagctcctgaaggttttgaccttgttggtcgaattaagaagcaccggggcactgagggtgtatcattttggtttcctaaagctccttcaggttttgtggcattaggatgtgttgcatctaaaagttctccaaccaaagaggacttcagtttgttaagatgtattagaaatgacatggtggctggaggtcaattttctgaggaaagtttatgggattcatctaatgctagaacatctgaaccttttagcttatggactgttgataatgatgctggtacgtttcttgtgagaagtggatatagaaaacctccaaagaggcttgcactgaagcttgcaggtccacctacatcaagcagttcagatagcatcattgttgatgccaaaattaaaacattttctgctgtttcctttgatgattatggcggaatgtattctatgcagatggtgccattatttggggtgtcctttgacagtgttggactaagttatcatggaggtcctcatcatcttaatgcaactgtgagcttgtcttttgtggccagatcctataatgacaagtatagctcgtgggagccctttattgaaccaacagatgcatttcttaggtaccaattcgacatgaatacaccaggttctcctagacaactccgtattacctcaactcaagaccttaatttgaacatatctgtttccaatacaaacatgttatcgcaagcttatgctagctggaataatattagctgtggtgatgaattgtataagaaggaaaccttttcttctactgagcgaccagttcttgatgttcatcaaagaagaagttattatgttgtcccacaaaataaacttggacaagatatttatgtaagaactactgaaaatagaggttcacttgttactctgttgccctctggggatgataggtccataaaagttccggctttaagggatctatcagattctcatttaaatggaagatctgttaaaccatatcggttgatgataactgccattcttgcggatgcagagcttaagcttttgggttctctcaacagcttaagcttttgggttgaactggctagtgtgtccactctaacatggttcccatcccaggtcaaggatgatgaaggattagaaactggtgaatatatgactgctgtgcggctcttttcagaaaaccattccatatctgttcaacaacagagtgcccgtacttgtgctgctattggagaacacttgtcacagaacaccagaaaggtgaactggaacgaaatgttctttttcaaagtcgaacgtgtggacagctatactctagagcttcttgtgcttgatgctggtaaaggtcaaccagttggtatatactctgctccattggagcaagttgtgcaaaagctccctcctacctctaatccggactctgtcaaatttgatttggctttaggagaccttatgtcaactaagacagtggaacaggaaactgttaaacctagtggaaaaataagatttgcggtacttgtttctggtagagctagtgtacaacaagggaacagagccagtcctgaaagcaagactggatatattcagattagcccttcaaaagaagggccatggacaagcatgaagttgaactatgctgtacctgcagcatgttggaggtttggtaattgtgtgattgctagtgaagcaacagtcaaggaaggcaacagatacgttagcatacgttcccttgtgtcagttactaatacaaccaatttcattgttgatttacgtctaaaaggaagaatttctcaaagtgcacgggcagatgaacagggagacagttttggtaaagaggatcaaatcctgattggaacgctggagcccaattctactattccagtcccactatcaggcctctcacatcctcttatgccctatatgttgcagttaaggccggcaaaacatcatgatcatgaaaattactcctggagtgatgtccaggagaggcgcagtcaaaccgagtttagaaaggaggagatcctagatttatgtatatcagatctgtatgaatcggaaaacttgctattctgctcacaggtagatggcacctcgaattcttgtcatggactgtggttttgcttgagcatagaaggcaaggaaataggcaaagatgtacagatggaaccaatatatgattggtgcatcattattaagtccccgttgtgtttgacatactatcttcccattgctgcacattatactgtcagttctagccacctcgataatgaagattcaagttgctcccttggcaccttaagtccgggtgaggctgtaaaggttcacaatgttgatccaagaaaccctttgtacttatccctggttccacatggaggatgggaactgatgcatgagcctgttgttatatcacatccaacccaagcaccttccaaatttatcaatctaagaagctctttatcaggaagattgcctacacttactctgcgtctcattgatatttctggaaggaaagagaagaggcgccttctttcacgttcacatctggaaaggggtgagaagcaactctatgatataaaacacgatgaattggttgagggatacactatagcgtctggattaaattttaagggattaggacttctatcatctgttggacatggtggacggtttggatctgtgaaagaattgtcgcctcttggcgatatggatggagcagttgatctttctgcctatgatgatgatggaaaatgcatgcatattcttctttgttcaaagccatcctcgtatcaagctgttccaacaaaggttatccatgtacgcccgtatataacattcacaaacagggccggacaagatttgtacttaaaacttagtattgaggatgagccaaaggtcttacatgcatatgactggagggtttcctttatgtactccaaggggactactgacaaactgcaggtccgactagtggatacagaatggtgccaacctctggagatagtaaaagaagacactattgttatagcaatgagaaagcagggtggtactcagaaatttgtaaaagctgagatacgtggttatgaggaaggttcaagattcttgattgtattccgtctgggcccagcatatggaccaatcaggattgagaaccggacgagtcataccacaatcagtacttgccagtctggtttaggggaggagagttggatccaagtgaagccacatgcaaccagaaaatattcttgggatgacccatatggacagaaagttattgatgttagcattgataaaggcgatgatacttgtgtcctatgtgttgacctggaaaatcctattggaagttccaccagttttagggaacatggcctcatgtttactgttgataccagtgacattaagatattgaagtttgctgattacataaggaaagaggaagtatatggattgcctggatctgaactgactgatcaccaaggatcgtcattgaaggaaaatgagacagagccaggtgctggacccttggagctcattgttgaacttggagttgttggaatatctttgattgatcataagccaagagagcttttatacttgcatctgcagaaggttttcgtttcatacttgactggttatgattttgggaccactagcaggtttaaattaatccttggcgagttgcaactagataatcagttgccactgtctacaatgcctgttgttttgtctaccgagagcaggcctgattcaaatcgttctgttttcaaagcaaacgttgctgttagcaatgtaacttctaatggcattcaagtttacccacatgtctatatccgggtaactgatcaaacatggagactaaacattcatgaacctattatttgggcactgtttgacttctacagcaatcttcgttttgtcaccaccatcaacagcacaactgtcacggaagtggatcctgagatacgaatagagctcattgatatttcagagataaggctaaaaatatctctggaaactgcgcctagtcaaagacctcgtggtgtcctaggcatatggagccccatcctatctgctgtgggtaatgcactcaagattcaggtgcatctgaggaaggtcatgcacagaagccggtttatgcggaagagctccatcatccctgctatcacgaaccgaatcaagagagatctgattcacaatccgctacatctaatcttttctgtggattttcttggagtaacaaaatcaactttatcatcacttagtaaaggatttgcagagctctctactgatgggcaatttcttcagctgagatcaaagcaggtttggtcaaggagaatcactggtgttggtgatgggctagttcaagggactgaagcatttgctcagggtttggctttcggggtttctggtgttttaagaaagccagttgagagtgccagacagtatggtgttataggtattgcacctggcattggccgtgcttttgtgggtttcattgtccaacctttaagtggggctctggattttttttcactgacggttgatggaatcagtgctagttttatgagatgtgttaacattttaagtaacaaatctgttccgcagaggataagagatcctcgtgctatacatcgtgatggtatagtaagagactatgacaaatttgaagctgctggccagatggccctttatctggcagaagctagcagatattttgcatgcacggatttatttcgagaaccttctaagtacgcatggtctgattactatgaagaccattttattttaccaagccagaggattgctttagtaactaataagcgggtgatgctgcttcagtgcttggatctagataaaatggacaagaaaccttctaaaatactttgggatgttccttgggaagaagtactttcattggagctagcaaaagctgggtatcagaggccttcacatgtaatcatacatctgaagaattttaggaggtcagagaactttgtaaggcttattaagtgcaacattgacaacgaacgggaacctcaggctctttcactttgctgttcaattcggaaaatgtggagatctcaccaagcagcaatgaaagttataccattgaaggttccatcaggccagcgtcatgtgtattttgtgtcagatgatgataaaaaggaatcccacagtttatctaggcctttgctaagctcgggaggaacctctactgatgttgagcaacagttcataaacaatacagttcactttcagaaaatgtggagcagtgaaccagaaattcagagccgatgcaaactagttgccaagcagattgcggatgacggaagggtgttcagcatatggaggcctctctgccctaatgggtatgtctcaattggtgatattgcgcatgttggcatccatccaccgcattttgctgctgtatacaagaatatcaatgggaactttgcactgcctcttggctatgacctggtttggagaaattgtgctgaggattacaagagccctgtatcaatatggcttccaaggccaccggggggatacgtagctcttgggtgtgttgctgtcccttcattcaaggagcccactcttgactgtgctttctgtgtggatgagagactcgcggaggatgccgcgtatgaggagcaaatcatatgggcctcatcggatgcttacccatggggatgctatatctaccaagttcagagcgcctcaatgcagttcatggcacttcgtgtcccaaaagaacaatctgagctaaggcccaagaagatattggagtcatttctgcagcaagcatcagagactcaaacgtcccgtgcatgaagaagctgcacatgatgcttgtgcgtgcaagagaactcggctgggacaaagggcaagtctcgtgcaagaaagctcgaagaatgccacttctttcggatcactccatttctccgttgtcaaagcatacacagaggacagagccttgcatgccaacactcgggttgacggaagtgttgtatactagaatagtaggttaaaggttgtaaatgtaaagttttgtaacgtttgatatagtttttgtccagctacatttgttaaggcccatgtggacgtgggccatattagttgtggctacatattctactaagaagttctcaggactaatcatactttctctaatttaaggttgttaaggcccatgtggacgtgggccatactagttgtggctatatattctactaagggcccgtttggtaaaacttcagctcctgcttctttagcttcagattctgatcctcgtgaggagctgatcctcctgattttcctagaaaatcagaatcatttttaaaaccgtttggcaagtaaactgattcttgtcttctgagggttggtggcc

SEQ ID NO: 39517 - DNA, 1996 bp, Zea Mays
ctttaattggccctaaaagtgtgactgcaagctagatcaggcccacggcccaccttccagacgctcccccggaaactccgcccactcgcacaaaccaagacaaagttgcgatgctccatgctccacgtcacgacgccgcatctaaccctccggcgactcatcgccggcgagccggtccgccacgccatagcctcgtcctgaagcgcacttaatcctacgtctcgttcctctctcgcccccggtaccctccataggcatgggaatggggtctgcgagagggggcgcagggggatggctccccggcgagcggtggcggcgggtcatcttcctcgctctggcggccgtctcgttcctcatctcactcatactcctcttcctatccgcgccgcgtctccgcctcccaagtgtcgtcctgccttacaccaccgcttccgcttctgccgtccgccgcgggcccggcgagccgccctgcctggtgtacctgctgaccggcgcgcgcggcgacgggcgccgcctcctcaggctcctcctcgcggtttaccacccgcgcaaccggtacgtgctccacctctccgccgacgcgccagacgacgagcgcctgagcctcgccaccggggtcgtcgccgcggcgcccgccgtgggagcattcgagaacgtggttattattggcaatcccaccgccgggacgcccgtggggtcctccggactcgccggcacgctccgcgctgcggccgtgctgctccggctccacgctgactgggactggttcctcaccctcaatgccgccgactaccccctcgtcacacaggatgacctgattcatgtcctttcttctgtcccaagggatcttaacttcattgaccacaccggtgacgttggatcaaaagaacctgagaaagttcaacaaattatagtcgatgctggaatttacttgtcagggaggaccaacttctttcgaggaacacagaaacgagcagctcctgaggcttttaagttctttacaggttctccatgggtcatattaaaccggcaatttatagagtactgcattcttgcttgggagaatctccctaggattcttctcatgtacttcaacaatgtaatacaacctcaggaaggggaacattatggtcacatggtggatagtggggcacccttcgcaaggccgtttcaggagaatgatcctctgctggaccagatcgacggcaatatactcaagcgttggagccatggaccagttcctggtgcttggtgcacaggaaggaagaggtggttcagtgatccatgttcccagtggggcgatgtgaatgttttgagaccaggtcctcaagcagtgatgttgcaccaatatgtaaatcggaccttagaagaagcaaagtctagcagcaattcatgcaggcggtagcagcattggcgtctagaacctcatgtcccatggttgaaagctttgagctttttccgcttatccactaagggttctccactctgctgaataaatagctgccacatgtctaagctgaaacaagcactcgtcgcacctggaacaaagccatggagggatgttcttttctgatattttcatgatgactatcatagtcacggatcaggagtttcactttggtctgtgattaatctgtgcaatccccatatttggctcatataacacttccaggcgctgataataggctgaagcttatataactactgttgtttatatgttgcggttatttgttggacagcttatattcatgctagtagatcaagttacgaatcccttatgctcccctgttgtgaggactgtagactgtagaacaagggattttgttacttgttagtcttactgaattcatgttgtgctttggacttacataatatgcctagtcctgtattgtacctaaaatgagactccagtcatctcagtttacctttgaggggtgtttggaagcatattattttttgcagtttcaaagcaatactatggtctttaagaatacca

SEQ ID NO: 39518 - DNA, 2398 bp, Zea Mays
ccccatcccgcgcgtccatcttggtcaagaaaccccaacggcgcgtcgcccccaaaccttagaccccctgcggaaatctctagagccagggtctatccatgggccatcgctgtgcgccagctcttgctccatctctccgcggcggcagcgcaacagccgcccccatgaaagtcgccatcctcaccccccgcgagcctgccccatcccgcttagcgtcgtcccccgccgctgcgcagccgcgacccatctggataaggatgcatccgcttctcccatagccgccactacccctgcctgccctctgctacgaacacgaagataccctggatggaggtggagctctcagaggcttaagatctagaactctatcgcgtactacggattccacagggtgaggagagatacgagcaggtgtcccaccggcgatgcgggtccaatcttcggcattgggagcaatccgcctactcgaccacgaaggttctctgaggcggtgtagccagagatcatgcgggcaacagggaaggacgatagctacgcagcccacatcacgaaggcatataagtgggagttcgccgaaagggaaggtttgcaactggttgtgctaaatccagggactactctgggcccatttttcatgtcatcagtcaataccagcctgaataatctattgcaactcctaagagggtgggtctatcaaggaggacaaacaggttggttgatgagagcaaaggagctttccaagaagttgattgatctgggcatttgtttccttccgtttgatgtgaccatcagggagaccgtcgattgcttcagaagcaaagggctcatctagccctgtgaacatttccagatgtaccagggttactattgcttactagaatgaggcgagagctgcttagctcctttgacattccttctacttagtggcaattggtttggttacttgaacctatgctccatatgatccacgctgattgaattttggtttgttaatacattttgggcaagcagtgctatgagatggagatgatggttaggcatgatctttctataggttaaaagaacagattatccaacagctgatggaacctgcattagagatattatgttgatgtcacaaatttagttgatgctcatgtgaaagcgctcaacaaggcagacactagaaaagtcagtatttacaacgttggaacaggaagaggtttggtaacacgagaattgtttatttatttgtataactattatttattcatatggatagttgtaccctgcacaggttttaatcagtactttacttaatttacatggtaacaagatagagaggcccgcaaatagttaatctgggacaacatatctctgtactggccatagaggacaacaaaaaaatcaaaagttgaagaatcaccaacggtgcctcctttgcaccctccggctcaagaacctaggcccgagccagttcaacaagtcatgcccacagctgaagtgctgaaccaacagatttactgggaatcaatgaatcagcccgaggcacatctgaaatagatcaaaacaaggtagtcgccttggtcgtggttccacatgataatccgccaaaagcaccttcttctaccagtcctggaagcgtggtgactagctggagcaattcagattctgtgcgttgaaaaggaagtgaaagaggtatatcttgtttacattaaaatatcaaagtactttgcagattttatttcagctctgttgcatgatgcactcgcactactgtctactgcaagtaccatcaccataaactctgaacgctctatgttcggtttcatctttttctttaactagattcgctttcctgtttcttataggctattgttcaggtactaatttgccatagtgttggtctatgactgaatggtacaaaatgcatgcaatgaatggatgatactttccagttaaatcatgtaattggaatacagtggtgccgtcagtggtgcggattgggggcttctagagaaagggtctagcgtcgtgcccttcttgacgaacagtgtgttgatgtgtgccatcatcgcactgggaacgaacgtgatggctagcacggggagcatcttgagcatctgctttgtctccaccactcaccatgctctgagcctgtgttggatttggagatccatgcgggcactaccacagtccatagggtgctcatctcttgtgttcttggctcttgcaagcattaggtcgtttctaaaatcacattggcacaatgaactctatggtgtttgaggttgctgaattggatggagcaacaatgatttgtcgcactaacagtaaaagaaacggttacttgttggttttaaatgttagtaattactacgaagtacaataatttgtatggagcatatccagtttagca

SEQ ID NO: 39519 - DNA, 1032 bp, Zea Mays
agatttcgtttctctattgacaagctgtggtatcatttcaggattgtccagcactctggatttgctcctgattttgaccaagagagcgcagacctggctgcaggaagaccaaatgttgagaacgcaaccgttcttttcgaggactggtggggatctggtgttgtgcacgcaaaggtctggatatcagataagaaggatgtgtatataggttccgcaaacaacgactggaaatcccttactcaggttaaggagcttgggatttattttgctggttgcccacagatagcaaaaactgtggaggtctattttcaaaacctgtggacgctttcaaccctcaactcaactttttacaccaaacaagcctgggatacgcagtggcaagtttctagaaaggttccatgctggtctcatttcctacagcccaaagaaagatgcaggtcacccataccactttcagttgacatcccatatgtagatggatatccagctcttgcaaatcctgaaatgattgatgtttcgtttgaaacccctgggtacaagaaacctactcaggagcactacttgagctacctttcctttgcgccacctgagtgcatattcaatggaatttttcagtgtgcgaggatgccaagtttgtttgtctacatcatctggtgacatttggcagattccaagcagatgagcaggggtgggttgacaccatcaagtctgttaagcttgggggaattgtaagaatgaataccatggattggcttgggcagtcacagtatgctacccaaacagtctactggtcatctttatcgtcagcaatctcagaggtagtattctcaaagaacgcgaccgtgaggctactcgtcgcctactgggcgcatctcatcccaaacaccgagaaatacctgaagagcctactgtactccaacgttctctgcgcgtcttcggcgtacaaccactgtggcggcaaggtcgagatcaagtactacgtggttcctgggcacaacgagaccggacctgctctgtcccagggcggcgaag

SEQ ID NO: 39520 - DNA, 1396 bp, Zea Mays
gtccaacgcagccaggatgcgacaatgcgaggcaggctgcttcatgcgtgaaaccaatcgtttcttcggcccggcacatgcaagcagccatgggcgagaaagaataggaccgccgccgccgctttgtccctccgttcacaaccttgtcgcacgagtctcttattcgtgacgaggatgacatcaacatgtgcggcaagggtaccgtctctgcggtgggcgccacaacgtggctgggtgggttcgtgggtttcagtacgcccagcgaaatgcaggacatcgggaggacatgccgttgtgtgcgctgctgttagcttcagaccatgcattgacattcacaagggaaaagttaaacagattgttggctctactcttcgggatttagcaaatgatagcatggaacttgtgacaaactttgaatcagacaaatctcctgcagaatttgctaaattttataaagcagatgaacttctaggaggacatgttataatgcttggcgcaaatccttcaagccaggctgctgcactggaggcactacgtgcatatcctggtggtttgcaagttggaggtgggataaatttggagaatgcaatgtcttaccttaatgaaggggccagtcatgtgatagtgacctcttatgtgtttagtgatggcaagatgaacactgaaaggttaagaaaacttgtcgagctggttgggaaacagaggctcgtgctggacctcagttgtcgaaaaaaggttaggaattgatgaggaacttgtggaactattggggcactattcaccaatcccagtcacttatgctgggggtgtgtcaacaatggacgacctagagaggataaagaaagcaggcaaaagtcgggtagatgtaacaattgggagtgctctagatatatttggaggagatttgccttacaaagatgttgtcctttggcacaggaagcaaagtatggttggtcaagtgtgaagaaacacaaggtattgatcagtattaccagttcatttgattcaagcttctgcacaaagtatattttctgaacatttttgttcaaataattcagttaggctatctccaacagatcctctatctcatctcctatttcaaactattttgcgtcccctattttacactacactggagacagtcttcagtgatgtaattcaaatctgaggagcatgacttgtttgggtttggacaccagggttggcgctaactcaaaaggtggtcaatttgtgagtaatgtactgttcttgacagtttctgacctcgatttgtctattgtaactgaataggctgaattgatgctgatagatacattttgcctgctacaacactgacattctgatttttaagttcctcgtttgagaaaataataatattgatgcaaattttggctct

SEQ ID NO: 39521 - DNA, 3700 bp, Zea Mays
gctgtcaatcgcctccccactgcggcagatccgcaatccgctcctccaccaccgcgctcctcacccacgccagggacaagactgtctacctccacgcccgcctcaccaactccgcggccaccgccaccgccacgcccctcccccatggtcgtcgagtccgagtggtggaaccagcgacgcatgcgcgtcgagggcgacgtgaaataggtgctccaccgcgggcacaacgggcacagtggaggtggaacgagcaccatcgagttctggttccaccgaatccaccgctcgcacaccggatccatcgctcccacatgcccgcacaccggatccaccgctccctcccccgcgatggcctggttccaccgagacaactgcggggctagggtttggattcgtgggtggagcccaaggctagatccagcagggggagggaggtagaggaggggagggaactgctggtggtcggcagtgggcgaaggcgcgacaatccaggatatggattcctgagcgtcacccacccgcccatccacgtcgcgcggtgtagtcatcccctatccgcagccgcctcgctccctctcccacaacaaatccattctcctcctcccactcgacgaggatcgcgaggatgctggaggacgtcgtcgctgtcacgcttgacgttagggcctccgatgcttgacgttagggcctctcgcttgaagaggaacacaaacagagctcatgttttttattttgctctgcattatctactgcttctctgtgggggcgttatttacagtatgtggcctgtttgttgtgttgttcctgcggaagggcgggcgggccgaaggtgtttaagaaaatgttgttgtcaacatcaacctcctggaagggccagaacgcaggcagcgcctcaactcgtcaccccatcagcacggtgagccccttatctggattgttatcatggtacgcggtgcgctgcaagcctgcaagtgacatcaaattggattggtagtcagcgggtgtcatagtgtcagttcgatggaatggttctgcagtgcatgtgcttctgtaatttccgcaagaagcagtcaacttctccctgatatggcactaggacattgtagtgattcccgcacgtttgtggaactcgacaacctaccagagcgccagatgtttcattgagaagagaactcctccagtctggctttccactggtctagtctctcctttaaaccaaatttgataccactcattgaagtcaatagctgggatgtagacatgtgaaaccacacctgtggaactttcagcgtgtgatgactgggtcactggtggaataccgtgttttttgagctgctcgctttcagttcgcggtcatagtcctgtgttttttgccttcagtttcttgatgtagttattgcctaaaatttctatatcttgttcatcgtactggagatgctacttcatgtggagctggtatgtaggatgattatcacgagtacttcaagcgctcattttaggaagacatcgctgcgcaagtgcctcaaggagtggaatggtgagcccctgtccatctactgaacagagaaaataccaggagcaaatgactgcatttttagttaatccttttattcctaaattaattgtgtttgttaatgcttttattcctaaaataagtaaccgagctcgggattcttcgcaatttgatttgcgagatcacccccataaaggcatcatgaatctttatgcctgtaaagacatcccactgtctctttcgttttcgataagatgttttggccgttacataatgcctgtaaggtagaatgccattgcagttgttgcatcagaaagcagccatttaacgccattgtaaagtgagtgatgattaaatacaaccacacttctgtctctcaggtttctgtacatggagtttttattgcacctcttcttccccagcaattagtacttgcagttagactaaatgaatcttgaatgccccttaactgttggctttacatggaactacttttgcatataccagacaactattttgaacttcaatatgtttttcaattccagcaattgatcgaaacatgatatatttgacatattcatgatggatttttgtatttgatgtgtcgctttttcatctatcaatgtaattcttggacataacattgcgcacagtaccggtttttggttgatggtgtctggaggtgtgatgagacaaaaccctttgtacgtgatgaatatggactgatcagcaatgaagtgcttgtggaaaacaatgtactacccgttgtgcagccagagccttctatcagaggaactaatatggataaggatgcccctggagccatcatctcagaacccaagcatgcaaatagcagttatccgccatgtggtctctggaatattattacacaataccatatatgacgttgttcccctttctagcaagggtcttgctctggttcctttttgggatgaccgtcagggaaccataacaggcatgctcactgcatcagattttgttttaatcttgagaaagttgcagagaaacattcaagttattggcaacgaagagcccatttctgcttggaaagaagcaaagctacagttctatggtgggcctgatggtgctgtcatgcagagaacgccattaatccatacaggcaacattgatctcagggccaagaaagaagctcaactcggcatgcttcctgtttgaagcaagggcaacaaacttaccccaccagatctctgtcgccaaagcagggctagtgaataagctgtgtttcctcccggattgtcactgcttttatatttgtgcatttattttgagggaaacattttgcccaaaaaaggcctgcagtgcacgttttaaacaagtcatttgaaccaactcttatgctgaaaactgtatgtgatactgcagaaggcaacacactagcttgataggaaagttggttggcaagcataggtggactctggtgccttcatatatctatatatatattttaagttgacgatcttcgtgatgctgaaactgatgaagacctccgatgaaaaaagagacatgctgcacatgcacgagggtacttgcagatcgatgtcggctctatggacgaacactcgaccaagtcagatgaggagtatgagggcctagccatgcgcgacgtgatggctactggtccgacgatgagcagcaagctgtgagttaaagatgaactcacctgccctggagagtaacatccataggagtgaggcaaaatggctggtaccaccacaacatggacccgttcctgaagatgtccaaggaggtggtagccgacaccataatgtcttgtgtcattgtgtcaccggtcggcaacacactgcgctggtaccggcgggtgttgtgtttcttaggcgtctgcttctgtgctttgagttgtgctatagagtggttgtgccaactactgattttaaaagaaaaaggtgagctgagaatcattgttgaaaacaaacatgtaattgttcgttctcatcagttgtgccaactaccaagcatttcattgatcagaatttatcgttgctcatgagaaccaaaagtaagacacttctcaataacattggatgcaaatttctgctagcttatcttcactatcttttctcgtatcaatataacacacatttatacataatttttgtgttattatatgttttcgttgcaacgcac

SEQ ID NO: 39522 - DNA, 1708 bp, Zea Mays
gcgccattgccaagtcgaggcacgcggccagtggtgccctcgtcatcgtcaatgagcaccgacgccgcgcccctcctccactccacctgcacagcgccgctcgcccccacaccccaacccaaccatccgctccttgtcgccttccgacgctgagtttgctggtgtcgatttgcgccgtcggatgctcgatctggcagccgcctgtgccgacctactcgtcgaatccgatattgatcaggcaatatgtgtctcacatacaagcaaagagaacactgtcttgaggtctgggatatctccagagaaggttttcatggttcctaatgcagttgacactgcaatgtttactccctctcccaagcgcttaaactgtgatgaaatagttattgttgtggtcagtagattagtataccgaaaaggcgccgaccttcttgttgaagtcattccagaagtgtgtcggctatttccaaaggttcgctttattgttggtggtgatggtccaaaacgtgtgcgccttgaagaaatgagggagaagttctcccttcaggatagagttgagatgttaggagctgtacctcatgctcaggtgcgatcggttctgatatctggacatatatttttgaacagttcactcacagaggcattttgcatagccattctagaagcagctagctgtggactgttgacagtgagcactagagtcggtggtgtccctgaggttcttccagatgacatgatagtacttgcagaaccagctcctggagatatggtaagagctgtcaagaaagccatcgacatgctacctggaatagacccccagattatgcatcttcggatgaaagaactttatagttgggacgatgttgccaaaagaactgagattgtttatgatcgtgcaatggaatctccaacaacaaatttactagatcgccttcctcggtatcttacttgtggatcttgggctggaaaactgttttgcctagttatgatcatcaattacctactatggcgccttttagaatttctacagcctgctgtaggtattgaagaagtcccagatatagggccactacatgctcatttaggttcaaggaatgatgaggctcaagagaagtgaaacttaaatctttgacagttttgaaatggttggggacttgaggtggcagtcatggtatcttctgcttgtcagcattcgttctgatccacatgcagtatatgcctttatgatatggcccccgcacagcattttctcttgaagcttcccgtctccgtagtcgcagctgaaagagagtggaacgccttgatttgtaggatttcttgtcatgctggttaaagctatggtccgagtctctgtcattgccagcttcttttttttttcttcctctgcgtaatgcgtagtgagtggatggcctgcgttttaggcacgtcatcaaaccaattatctgctggaacgttggtactctcttgccaccatattgcaactagaagtcttgattggcatgttgccacacaaattcctactatgtttgatgtcttgtatcatgtcggagcaccaattcctgctgtgtttgtgatgtaataatgccaattccaaccagcgacgtgagaccaatctgcatggatccagtcgataatactttttgaatataaaataagtgcaatctcttttcggcactgtttggaattcaagactggccattcgctttgtaag

SEQ ID NO: 39523 - DNA, 2973 bp, Zea Mays
cacaaattgactgtaacctgtttgaccggtagagcatactacccaacagccgccacaacgctcctcctacgtttctttcttcctccacacgcctgcttgttcacctccatggctgatggctccatctcctcctgtccctaaccccctccggccctcccctcctccaaagccctaaaccccacgtagctcggtgtgtcagtccactcgcccgcccggtcggcgccgcacccatctttcggattctaccctaaaggcatgaccttggtcttccaatctggaaattgagtagcaatcaagtatggctgcaagagcaatcacgaggagaaggaagtatcttttcgaccatgttaaaacacctaacctctcatcttcatcctctactttccaacatggaagaattggttctgaagatgagccaaaaataacactactgtttctggagcaaagctctagggattcaagatctgagaaggagcaatactgtgtgaatttgactaataggaatttggcaggtattgctaatagatttctgcgacgtccagctcatgggatatctctttcatattatggaattggaaagaatgactttgggttgccactgggagctagatctatgctgcagtcagttcgtgcatcatcaactgcaaccgcagggcaacctaagttggatattgatgacgaacagagtggggatcagaagcaaaatagaaagaaaaaagagacatccccagaggaatgtgatcaggctgtggaaggcctaagcactgcaaaagctaaagccaaagctaaacaggtccaagaatctctcaaggctagccaatcggccatgcagaaattctgggcaaggcttttgggtattggtcctgctctgcgagctgtggcttcaatgagcagggctgattgggctgcaaagcttaagcattggaaggctgaatttgttactacactgcagcattactggttagggacaaagctactatgggcagatgttagaatctcatcaagattactggtgaaacttgctggtggaaaaagcctttctagaagagagaggcaacagctgacacgcacaacagctgatatcttcaggctggtaccatttgctgtgttcatcgttgttcctttcatggagttcttactgccagtgttcctgaagttatttccaaacatgcttccatcaactttccaagacaaaatgaaagaagaggaagcattgaagaggaaactaaaagcaaggatggaatatgcaaagtttttgcaagatacagcaaaagaaatggcaaaggaagtccaaacatcacgtagtggggatataaaacaaactgctgaagatctggacgagtttttgaacaagatcacgcttggtaaatatgtgcaaatatatgggtatccggccttttggtacagatcactacttgaggttcatgcttcgcaaaaaactgcaagacattaagaatgatgataagatgattcaagctgagggtgttgaatctctttctgaagaggagcttcggcaagcctgtcgggaacgtggtcacctaggtctactgtcaactgaagagatgagacagcagctccgagactggttggatctctcattaaatcatgcagtgccatcttcacttctcatactttcaagagcttttactgtatctgggaaagtgaaacctgaggaagctgttgtagcaacactatcttcactaccggatgaagttgtggatacagttggaacagtactgccatctgaagattcagtttctgagaggaggagaaaacttgaatttcttgagatgcaagaagaacttatcaaggaggaagagaaaaggaaggagaaagaagaaaaagcaaaacaagaggaagaggaaaaggcaaagctcaaagaaacgaagggttctgctgaagatttagctttgaaagaaatgattgaggctactgctagggaagaggaactgcgaaaggcaaaacaacacgacagggaaaaactctgtaatatcggccgagcattggcagtgctcgcatctgcatcatctgtaagcaaggagcgtcaggagttcttgggacttgtcaacaaggagatagaactatacaactcaatgcttgaaaaggagggtgcagaagaagctaagagagcatacatagctgctagagaggaatcagaccatcatgctgaggctgctgcagaagaaaaaatttcatcagcacttattgagaaggttgatgctatgctccaagaattagaaaaggagattgatgatgtggatgcacaaattggaaatcgttggcaactgcttgataaggaccatgatggcaaagtgacccctgaagaggtggcggcggcggcagcttatctcaaggacaccatagggaaagaaggcgtgcaagagctcatcagcaacctttctaaagacacagaaggaaaaatccttgttgaagatattgtgaagctagcatcccaaacagaaaacaatgaagaggaagaggaagcacggtagatgggagagtatatggaaacatcacactcgttcagcagtcaaaactcatgtattgaaaggcaatacgtccatttcttgtgtctcttgactgactttgatagtgacttccaattagcaaggtagattttctgtagaaaggctcatgctgacatgcatttagttagccgccgtgttgtgatttggcaggtaaaattgcaaccaaaatttagaccggttgcatggacgtggataatacagatcaattgtatttgttactactatgcaatcccgaaatattggatctgtttcaaattctcaagtaatcattgatggatgctatttattgaccataaagcttacggaatcattattgttttagctgattttatcgtgaccagttctgatcaatctacgtgcctgcgtggttgctgcattattctgcttggagtcaattttcattagttaaaattaaaggctgcgattttgcaccgaaatgtttctg

SEQ ID NO: 39524 - DNA, 1865 bp, Zea Mays
tctagattagggttacaacttataagtgcttcaagtgtgtgtcggggacctttttggaaggagcgtgtctttgcaaggagtcgaattagctcctggtgttgatcctgaagctctggaagttgctaaggattgtctggagtccatttttagtgttaactcaacagccactggtgacgcaatacaaccaggactgttgtttgagctatttgcttctctcgaagcaaatgaaagagaccaggcaagagctgctttgctgtcacaatctgtttcaaacaagccatctcaaactgcgggtacatcaaatgtcgaagaagactcaaacaaatgcacaacatcaaatagcgacagccaggtggaggatacatttgaactaggagatgaactatttgcaaaattttatgctgcacttgatgaaatcaatttctttaagacatcacctgctggagctgaagatcctggtctactttcaaaagcaacacaatactttgatgatgcattactggcgatgcagaagttgggaaagaaaagggcaagcttagtagacattgcagagtcctttaaatcaagagggaatgaattcatgagatcaaaccaacaccttaaagcggtagagctgtacacctgtgccattgcattgaaccaacaaaatgccatttactattgcaacagggctgctgcatatacccttcttaatatgaacaacaaagctattgaggactgcctgaagtcaattgaaattgaccctcactacagcaaagcatatagccgactcggatctgcttattttgctatggggaattatcacgatgctctgtacaagggatacttgaaagccgccgagcttgatcccagtaatgaaaatgtcaggcagaatattgaggtcacaaaaaagaaactggctgaacaacgagtcccaccagaagagcagaacacacatgcaggccaagctcaaggaccacatccaatatttacaagtggtggtgttcctttcaatctgtttccaccaggaaatgaaggaacgcaggcacgccaagcttctaatggacttgaaggggaacatggtgaaccaggcatacacagggatgatgacgtccatataaatttggctggacccgagcaggctgcggaggctttgagagctgtgatgcagatgcttgggccacagatgggtcaacatgagggtgcacctagaggaccaggttaagcgtgggaggtaggaaaatgtgttacgtggcgtattgtggtctgcaggagtcttatacgggacattattttgtcttctccatcctgacgaagaatggagattctcgtgcgccttattattatagcagcttatctgtgtgctacaacaattccaccgtaatggttaccggcgttcaacttatctgccctgttcatattggcgtaggtgtgtcattagctgtgctggggcctgggtcttgttttgttgagacttgtctcgtaatggctgtcggtccatcatgtgatcttaaattaaagcctttttgcccccctcccctgcttttccgctgcttgtcggttcccagttgatacttggaaaatatttgcaaggttggtgaaaaaaaactgtcactggaatgaagttcatcatcgttattggctggctggcttgctggataaatcataaatgttggaattggtaaatcatatcctcttggactggagggaagttattattacgttactaagctgggtatatctaagatgtttggttcacatgtttataatgtgatgtttataatgtgatgggtaactgataacggtaaatcatgtttgtttaaatccaacgtaatgagataccatgctaagaaatgatgttggtttattcaaatttgttaccgctg

SEQ ID NO: 39525 - DNA, 945 bp, Zea Mays
tgcacccttcttcttctactcccttctcgttgcattcctgttcttttcgcttgtgcgaatggcagagctacgcttactagggtgctgccctgtgtgccccacccaggacacagtatgctgctcaccatggcgctgcgctgtgactcagcaaagtggcaagatgcaaggcttgccgagctgcctagccattataatgcttggtccttgaattgaagtcaattgatttccgatttaataaggcacagtttgtttgagcttctgctgtcgtcttcacatattttaatttttaatgcatgtggggattactgaaattgttgtgcagacatgtgttttgagattgtgtgctatttgtgcctgattttattgcacaggcagggtggtctatctcaaagatttttgaaagttgtttcttattatggtctcacgactctgccatataaactggatgctctggaaccttacatgagaaagagaacagttgaacttcactagggtaagcaccatcaagattacgtggatggcttgaataagtagctggctaccagccctctgtatgtatatacaccctggacgatctgataaaagaagcccacaacaatggtctcgaatcatcactttttctgggaatcgatgcaaccagaaggtggtggcttacctgagggaggtgtgctatagcagattgaaaaggattttggcttgtttactaattttagggaagagtttattcgttcagccttacaactattggggtctggttgggtttggcttgcttgtaagtttctttctattttctttgaagtacagacaccaccggttcaaactaccgatttcctgattgctctttctaaagctaatattctgctggatatttgttgcagtgaagagaaataagagaaagctttcagtagttcatacacgaaacattatctacccacttgcttttgg

SEQ ID NO: 39526 - DNA, 1144 bp, Zea Mays
ctcctttgattttcttctcgtcacccccttcactttactcttccctcacttctggccgcagctttgagctcagtagcaaacaagaagcagcaagatagtgatcctccatgggaaacaccctcggctttggcgtaggtgtcggcctcggcctcggcctcgccgtcggcgccgctgctctgatccagcaccgaggacattgacgagttgtctgccgaggagctgcgcgatgcgatgagctatgtgatgcacaatccgatgctgatccaggtgccggtgttaggaacaacgaagacattctggcgattatctgaggaagccactaggatcagcagaaaactttcattgatactgcgcaaccaccactcagcctgcaagtacctcgaagctcctctgcaggtgtccaatgtctggattgggagcactgggagtgtcaagctaaggggggtcagtttcactggcagcggtttctttagaattgagcgtgtgagagatgactacaagcacctttccagggtcctggaactgttgattatgatctcaggtggggatatcaacaaattgcctccagactacaaagaattcctctcgctcttgaggaggaagaaccttacaagggatgatgaattcttaattgtaaacaatgctgccctactacccatgaaaaaccgcactgaggtattcctgatgctacacgatagaattgtcaattttcttggtcagaaaaatcgagcaaagaagaagaaaatactctccaatctcccttacaagaacaactggttggatactgccacggcaaatgcaaagatcaaccagtgggttgtaaatgttcaaaatgagtacaaaaggactacaattgatctactgcggctcaacagaaatgtaagaagccacttgcatcagtacaaccacgaagatgatattgaggaaattctgtattgtgaatggcccatgctgctcattgtcatggagaagatgttgcacttggaaggtgagctccaagacactggcatccataacaagttcggctagggttctactgcaaaacagatgaaagatgtattctgcatttccatgggttggtacctgacagcctcggacagaatgttaaagcaaccatagcgtggaaaaacatgcttcagttaag

SEQ ID NO: 39527 - DNA, 1788 bp, Zea Mays
aaaaagaaaagcttttcattttacacctcacctccccgtcccaccacgtacaaaggcgacgcgagcagcgtttgcttccctttccctgctgtgctcggcctcgccgcttcctctgccctggctcaacgattcctccgcttttcctttttcaaaatcgccctttcctcgtgcgcgtgtcgactccttcctgctcgccgccgggtctgggctgggtgacgctgcctcggatgaggccgcgctgaccggagccgtagccggaccacccgcccacccatggcgcgcccgcagcgcgtgtatgaggcttggaaagggaacaataaattcttctttggtgggaggctcatattcggacctgacgccaagtcactgatcctgtctgtttcgctcattgtggccccggtattggtcttctgcggattcgttgctcggcatcttcgccaccacttcccggcttacaatgctggatatgcgattcctgcggtagctgtagtgtttatgatttatgtgctagtcctgctcttgattacatcagcgcaggatcctgggatcgttccccgcgcagcccacccgccggaggatgagttttcttatggcaacgctttgtctgggggcacgcctgggaggctacaattcccccgtgtaaaggaagtactggttaatgggatgcctgtgaaagtgaagtattgtgacacctgcatgatttatcggcctcctcgatgctcacactgttcgatatgcaacaattgtgtagagcgctttgaccatcattgcccctgggttggacaatgcattgggcagtatggaaggctttcaaacactctcccgcttctttggggcttctgatatattgtttcattgctctctggtttgttggtggactcactggatttcatttgtacctcattagcaccaaccagaccacgtacgagaatttccgatacagatcagacagcaggcctaacatctatagccaaggatgtctgaataactttctacaagtcttctgcagcaagacaaaaccttctaaacacaagttccgggcctacgcgcaagaggaagtgcggcctccaacggttagcttcggcagggaggtcgatgaggaaccggtcggcgggcctcggccgaaagttgaggacgatcttgaaattggtaccgatcttctgaagatctctcagcggcgcaactacgaggacgtcgatgcagaaacgggaggccgtcgcagtcgcagcagcgaggtggaaggcacggccagtgccagacctgctgtggcgtgctcggagtcccagatccctgcggtcgggggtactgacgtgagggtgcggcactcgagctgggaccggcgaagcgggaactgggacatgtcggctgtgcttacgaggagcgcgtcagatgtgattggacgtagcagcgtgttcgccgcggacgctgcacgtccatctctagaagagactcgctagcgaactgtgtctgtgcatccaggaaacatgtgcgagcggttcggatagcgaggccatttgactcgtggtggtggtgacacacacccaggtgttttggctttggctgccttgattgggtttttgttaccgacccttgtcagttgtcatgtatggacagttatttttagtcagagaatctgcccccattgttgccggcatgttcgtgtgcctgtaaattgcaaatgcaggatcctcatcaacttcaattcttattgggctgtttctttgagaatgcgtaatgtgaaaaagcatctggcctagctctttataggaatggatgcaattttaaagc

SEQ ID NO: 39528 - DNA, 885 bp, Zea Mays
cctagtacctgagtgaagccgggcgcggactttcctcctcactcgtcctgagactaggtctcccatgctagctatggtgggtacaagtgcggtcaatgcacggcaacaaccggggacaatagagcattgtatgccatggcggtgagccctggccgcgaacggggaatcgatggggacagttgatgtgtgcggggacggagtgcccctacatgtcgtgtgtttaggtttaccttgcaaggttaaaaactcgattcgaatcgtctgcttctcgcagctaatgaatctgcttgaccccttgtactgcattgagtaagaagtggagtgaggttttacttgagataacttgttgattgtattaaatgattgttaccatgtatgcttagaaaggagccaacctagctaaattaatgatgctagaattggaaaagctaaaatttattttagacttagctagcgcttttggtaaaccaaacccccagccaaacagctgcatggtctagaggtagaggactagattcctcacaccgggtaagtctagttgagtattagcatactcagccttgcttgtgacacaatttttgcaggtacgctataggacatggttgatggtgtgacttggccttccaccctggcaccgggttggacggtcgagtgggatgctgctccggcagaagaggatcaggaggagtagtgggccaggccttgccctattcctcggcattcgacgttaccgattatgtgctgcactttatgacgaacttgttcccttacatttaaaactccgattgatgtaataaatctagtactttaaattgttgtttcatgttttattgtattccctctgtgactcaccttcgagtgagctagtggtattcgatcacgggg

SEQ ID NO: 39529 - DNA, 2081 bp, Zea Mays
cgccttctctcttgcctccacgtcagccgcggtctttcctagtcatcgctagctagtctgtgtgtgctgtgttgtcgtaaggggtcgtcgtaggcctttaaaaaggaggagagtacgtccagcgcacgaggccgtcttctcttcccaaacccatcccgccgttctcttcctgcttcgttcttctctccacccgtcgctcctccctcctctcggcgagggagacccccctctcttcacagcgtggattattccattcttcgtctgccgtttgccgtggcgcgtcatcgatggcttgactctgatcgtcgtcggcggtgttgctgttttccagagctccaagatcgacaccgacagcatagcacctcctgcacatttgcaggctgtagcgcgcgccacatagatagtagacaggcgaggggcgatagagcagtgtgcgcgactagctagctagctagcttggggcagccgaagatgctggcatgcattgcgtgctcctccaaggaaggcgcagaggacggctcccgtgccgcggccactacgacgacgcctcacggcaaagaagccgtcaagtctctcacctcacagctcaaggacatggtgctcaagttctccggctccagcaagcagtgcaaggggacggccgggacccagtcgttcaggagcagcggggacaggtaccgccgcccctaccccggcttcatcgacgacacaggcttcacgcccgcgagcaaggttctcggcgaggactactacccaaggaccgcattggcgggggcagcaggcgccgccggtggcgcgcgaacggcttcgtcggatacgttggacatgggcaggagcaaccgcaagagccccgggagtagcggctggattccgggcaccgacgaggcagcggcgggcggggacgatgtcctcgctctggaggacgccgccgcgcccagggagtggacggcgcaggtggagcccggcgtccagatcaccttcggtaccatcccgaccggcggcaacgacctcaagcgcatccgattcagtcgggagatgttcaacaagtgggaggcacagcggtggtggggcgagaactacgaccgcatcgtggagttgtacaacgtggtgatgttcagcggccggcagcaagggtgctccactccggtgtcctccgtcgacgacttggcgctgagggactcgtcctactcccgtggcggctcgacaagcaggggcagcccgatcacagcgccgccgccgccgccgccactgccgccggtggcaagcaaagaaccgatcacccggagcgcgtcgtacaaggcaacggcagcagggtcctcctcggcaccgtacgcggccgcgcattccaccagggcggcagcggcatacttcccgtccgcggccgtgcccgacccgtcggaccacgtctgggcgcaccacttcaacatgctcaactccgctgctgcggcggccggcacgtcagcggcgatgggcggcggggccccgtcgtcctacgacccgtcgcgcgccaccacgtcgtccagggacgaggcctccgtgtccctcagcaacgtgagcgacctggaagccacggagtggatcgaggaagacgagccgggcgtgtgcctcaccatccgcgagctcggcgatggcactcgcgaactccgccgcatccggttcagccgggagatattcggcgaggatagggccaaggtgtggtgggagcagaacagggagagaatacaggcggaatatctgtagcaagcgatcagacactgagctgatgcaattttcaggcctgatgggataatcaaatatgtttgtgagaggatagattagggagatgataccgctatatacatggtgaaaacaacgtgaagggggaaactgtgaaagtgaaagaaatggtacctgtccttagttgcctaaactaataataagtttgtacatcgttggtacaatggtaccgtgtctggtttaaagttactttgtactgtacgtgtactgtacatcttggttccttcggtggtttaatttgtttttttaactctgtccatttcttgcgtgtttattacgtcctaactcgcaagtatatattcttt

SEQ ID NO: 39530 - DNA, 1522 bp, Zea Mays
tcggtcaacgcgcccggttcccctttcgagttcgaggtgtcacgacacatcgaggtcatcagtttgaggtttcaacctatttcaccagagctgattggactcatggatgggaacaaagatgaggcattgagatctgtcaagcttgcaaaatctgcatttgcatctggggataggcagcgcgcagaaaaattaattaaaattgctcaaagattggaccctggtcttccacttgatgatttgctgagcccagttgagaaggttggcatcctgaatatttctacttgcaaagacaagactgaaagaggacaagctcttttatacccaaaaacaacaaaagaatctgttggtcctttaaatgttgataaggcttacactgaggagaatattagagtggttcaggatatcaggaaaaagaaggattactatgcagttctcggagtagagagaagatgcactgtggaggaaattaggaaggcatacaggaggttatcactgaaggttcatcctgacaagaacaaggttcctggggcagaagatgctttcaagatggtaagcaaggctttcaagtgcctaagcaatgatcagtcgcggaggacttatgatcagacaggcaccactgaggaccatgaattcaatgagcaatatcccaatgtcatgaggcggggagctgctaggcggagaaggccagcaagaagtggcttctataactatgaagaagattttgatccagatgagatattcaggtccttttatggcacccatgataatatgttccatccccagtatacctacagggctaggggaacaggcaggcaacagcaacagagaagggagcattcagtggagggtggttccagcataaatctaacagtgtttattcaccttgtagtagtactgtttattgtttcgcttgcatttattccagcgcgtcaagctgagtattcgctgcaacagacaaattacttccccatttcaaaggtcactcaaaaacaaggagtggagtacttcgtcagcaaacaagattttgatcagcagtttccacagggtagtcagtctagagagaatcttgaacggcatgttctgatggactataagagtatgcttggaagatattgccatgtggaactccaacgtcgtcaatgggccaaggactaccctacacctcgctgtgacaagctaagggagctgtctgtggcgcagaatgtgcatatgccatcagtttgatctcccgttttcatcatggaagaatattgctcatatttgcagttgtgaaccagtaagccagagcataaaaggcttgtttacatgaagagatacatggctggtgaccaaccggttgaagttgcggttcacgttgatgcagatgcagcacgcccgacacctcacacctccgaactccgatgttgctgctgatgcccgcactgtactgtaaacaatctttcaaaggcaaatggaactgtgggatacatgtggcagtgtggcacttcgatgatgtgctctgttaaatatttttttaggaaac

SEQ ID NO: 39531 - DNA, 2160 bp, Zea Mays
gcagtcttatctcctggagatttttccatccgatgcctcttcttagttcttatcccctctcctctacatttcttacgtagcgcaggcactcatctccttgggatatttccagccgccgcccagtcttcgtcttcttccccacgcgcgtcctccctggtgccgagtctctctctgccaatcgcccatggcgcccagccgcttggcctctctggtactcgctctccctcagtgccctggctcctgcttccctcgccggcgcgctccaatcccctgcacgcggagcttctcctctaccggtgctcctccgtgtgcgcgcgctccatctctctcgcgtcgctcggtctgcgcgtccctgcgtccggatcctctccctccagctcggcgcccatccctgccgcgttgccctctctctcatctccaagccgagaccccagccatgaagctccctggagcctcctcaccgggtgcccagccgtagagttcccctgcgcgcggagcttttccctccctgctcggaccgtgttcttggctccagctcagctctgtcttgtgccggcgtcctctactccatctttttccccagcgcgcgctggtattcgctcgctgctgcgcgcgctctcccctgcctgcttgtcgtggacacgggtcgctgcccatgccgagctccctgtgcgcacaaccatgtcctttgtatgttgtggccggttcccaactcgcgccgcggttctctcctagccccatgtgcacgcctctgttcatggtcgtggtgaggttgtggcgtggcgacgtcgtgtgcgttgcggcagccgtcctggccacggggcagtccgcgccatagagttcgcccgaccacgacctcactttactcctcgcgtcaatgttcgccgagtcttttcccagtccgcgatctctccctgcccgttgttgcgtccttcgtcatcgtgtcgtgtgtgcagcaacgtgattcctccatagtgcctgtcgacgaacttcgctacatcggtttctcgccttcggttcaggtcatgtatgcacgccgaacgcgttcgccgcttaaccctgtgtcgctagagctcgtgacctcgctgtcatcggagtcctcactgaattcgtgtcctcgccagagctcgcgctaacctgctcgaccatacctcgccagctcgctccagaattatctcgttgtcgttttgtgcatcctcaaaaaaaaaacaaagcgtcgggtgaagacaaagctagcagtgtgacgttcaccaagtactcgacgcaagggctgaaccaaaatccttgtcgtattcgtggatagcgcgtcagatttagtatggtaagccaatttatatttctgttagcttaattattgaattagttcgatgaatgcgatgtgattattttcatgattttggagtagtcgcgttgggtagatttgagatgataattatgtgacgtatggtaaattagtgaatggagtttaaatttagtattttaaaatgtctaaacaataatattattagtattaattatgacaaattataattgtttgataaaattaatggtaggctatatatgataacttagagtggtatgtaatttaatccagtcgtgtagtctaaaaagtgatttgcttttattcctgttctagatttaaattccttagaccactgagtctagaatttaattaattaactgataatttgtgtttaggctaatcgtgttaaatgtgtatagtttgttgtttcgtgatgtttgcgttagattcggttaatctagagaagcgtaatcattacacttagtcgtctgtcgataactagtgtttccatatgaaacggtacaacgccttgccgctaggtatttaattcgctatcgcgtagcactatttaggcttgtgatgttcctatctatatgcattcatgtgcataatgcaaatcatttaagtacgttgattaaccatgtgatgcggagaacctgagcctagtcaaccccaagcgcgggctattccgcatggtgatactgatggacgaatctgaagatggataactgaacgagtaccaagaccaaggctgctcgtcaagcatacatcgtctaacaacactaacctagtgttaccaaggcaagccccggtgcatgcaaccccttctttatgtttttaaataatttttacacact

SEQ ID NO: 39532 - DNA, 2905 bp, Zea Mays
ctgcccgaccataacagtgacctagttgctcccaaatatttcaatgtttttaggtgccttcagttttttttgaagttttaaattcgtagtagcctattaggcaaacttatttcatcatgttctaaactggatgtaatagagtttgaaacattgtataatgtatatcaaaacatattaaaatttactagttagttgcccgtgcatcgctacggtttgtatatatgatatacaatttctttgtacaacacaaacaaaacgagctacagtggttagaggcgagtgctctcttcctaaagaccatggtttgaatcctgacagctgcacttttttttgatattttgctggcgcacggggaacgctcgctacacgcatggggagggggacgacacacgacgaaactcacattttatatcaagaagaagtgaagagcttgcatgtgcatctagagaacaagctgattctgctaatggggtaggaaacagcgctcattcaggatcaagagggagtggtgctttactacctttttcctctacacataatgcgtcaacttatggggatgaatttgacacgaccataattacattcaacatggctgtcatcctatatcatcttcatgactatgaatctgcactatctgttttggacccactgtaccgaaacattgaaccaatggacgagccaactgctcttcatgtatgctttctattattggatattacattagctttgcaagatgcaacaaaggctgtggatatagtacagtacttggaaaggtcgtttggagtagctaacacaatgaacccgaatgaaaatgcaagcatagctcagcagcaattagctcaagcgaagcctcctgtgaaaattagcatgcctccagattccgattcaaatgcttatgctggtggatatgagaacctttcgtcaggaattttcccagatgagcaaatagaatttgaatctctatgctctagttttgatggacatcagaatgtgggcaggcgtatcttgaatgatttctcaagggcgtctgctgatcttgctgctactgctgctgatttgaaagttagacttcagatttacaaggtccgtcttctactgctcactaggaaccttaaggttgcgaagcgagaactcaaagtactaatgaacatggcacgtggtagggattcatctacagagcttctcttgaaatctcagctggagtatgcccgggggaattataggaaggctgtgaagctattgagcacaccaaataatcggactgaaccagcaatgctagccattttccacaacaacatgggatgtatactccaccaacagagatcgtatcacgcctctatatggtgctttagcaaagcgctgaaatacagcttatcatttcgttcagagaaaccaatgaagttgtctacattatcacaagacaagtcttgccttatttcatacaactgtggtatccaacatttgatgtgtgggaagcctttgttagcagcttcttgttttcgtgaagccatgccgctcttctacaagcgaccccttttctggctccgtttttctgagtgcagcctgctagctctagaaaagggtctcctgtgtgcaaatggtgcttcctcattcaacgatgagattgaaatcaatgttgtggggtcaggacaatggaggcagttgattgtcaacccagtgaactcgagaagtaatttagattctgcaggtgtgactttaggcgaacataaaaatttggtttcacttggatttgctagacagtgtctacaaaatgcgctgctattattggatgctactgagaaggaaaattgggtaatcgcatctgatacagaggattgggaccaaggaaccgtacatggatataaaagctcaggccagaagaatactacaagtacagattctaaaacaccttcaggcccaactctagctaatgtaaatggagaacaaaagggcacaagcttgaatgctaccttgcagagttctcttgctttctatgacgagatccgtagaaaagagtacatcaaaatcagacaggctgtcctggcgaacttggcatttgttgaattgtgccttgataatcccttgaaaactttgacgtatgcaaagtcagtactgcaggtgacagactgttccaggatgtatgcgttcctcagccatgtatacgcagccgaagctctatgtactttgaacagaacagaggatgccgccgagaatctatcagtttatataagagatggtaatcatgtcgagttgccttatagtgtggagaattctgaaaaggccttggttgagaaagacagtgatggtgaagacttggttgctcctgcagtgacaaaactcgccacagaagaacctgagcagctcaggccggaggaggcccgtggtgtcctgtatatcaaccttggcatgattgctgcaaggcagggagaagttgaaaaagccaactacatggtgagccgtggcctggcgatgttgcccaacaacccccgggcagtgctagcatcggtttacgtagaccttttgcaagggaagtcccaggaagctgtcgtgaagttgagacggtgtaggaatgtgagatttagacccgctagcatagcagccagcagtcagcagtcgagcttagaaaagcctcccctttcatgatttctgtagtttacaattaccgttataatcttttttggaccctgaccccaatgtggatgatcaaagatggtaatgcttctcctgtgtaacatatataagaaatgaactctaactccccttctagctccctcccagattcaggggtggaatgtgttggaactgtaccgttttaatttgccctctttggactgaagagagccaagtgatcaaaatagtttcctatgtttattcaagaatttggaaaataatgtgcagtcagcag

SEQ ID NO: 39533 - DNA, 548 bp, Zea Mays
ctgcctgctcgtttcctgccggtgcccggctctattaccgtgccctgccgttctcagctgctcgccgtggccggctcctgcttggccgccatctcccatggcgaactcgtccctacgcgccgaggtcgtgtgtagttcgcgccctgctcagttgctgctccttgttccccgtgtccgagttcgtccaagttctgctcggatcttgcctgaacccgagcagagctccgtccatggccgccgtcgagtccctgacgcgcgctccgctgtgtggcttccccgcgcgtcttctctgtttcctcgactcgctccttccccaaaatcccatggcgcccggcctcagtgccgctcgctctcccctgccgcgctggctccctgtatccatggcgattttcctctgctcgagctcgcccggcccgagttcccggtcgccgcgtcctgtcgagcttggctccgtgcgcgcgcttctccctgtgtaccgcgctgctccctgcgtgcccagcctcaatttcctgtgcgtgcgctccactgctccctgggcgagttcctcg

SEQ ID NO: 39534 - DNA, 2127 bp, Zea Mays
cttccttgagggaagcagaaccgccttgaccgacgtgactacggtacggcccccaaacccggaacggcagcgaaacgacagccatgcttctccagccgatccccaccgccaccctcgccgctcgaccgagatcaagcgaagcttccttcccctttcgttgccaccgccgccgccgcgtgctcctcccagtccgcgccgacttgaccccgatctccctctcggcctccgccccctcgcggccggccaagccggccgtttgcaccgccgacgagctccactacgcctccgtcgacggtgccgggtggcgactcgcgctctggcggtacaggccaccgcgcaatgctcccgtcaggaatcacccgctgatgctgctgtcgggagtcgggacgaacgccgtcggattcgacctctcacccggggcttcgtttgcccgtcacatgtctagccaaggatttgatacatggatagttgaagtaagaggtgctggtctgagcatgcgtgaatatgatgattctactccatctggctcagtcacttttgaggatgtctctagtggtattcaacctcttaatagtacattcgaggccacttccattcagagttctggtggctatgctagtgattgtgatgaccttggaatagttgctttggatgaaccacctttacttgctgaactttctaatttttttgatcgaatctcaaaactcatggaagaggctgtagttaatggaaattttcatgagatcacagaaaaagtttctgttctctcagaaatggtagagagctctaccattattggtccagtgagagaagaaagtctacgtcttcttaagaattttcaggaccagttggattcatgggagcgttttgtagcaacacaaatggatctgacttctgagtataattgggacttcgaccattacctagaggaggatataccagccgcgctggagtatattaaacaacacagcagagcaaaagatggcaagttgcttgccattggacactcaatggggggaattttgttgtatgcaatgctgtcaagatctggttttgaaggagtttcgtcaaatttagcagctattgtcactttggcttcttctgttgactatacaacatccaattcatcgctgaagctgttactgcctcttgctcatcctgcacaagctcttaatgtccctgctgttccattgggtacattgttggcagcggcgtatccgtgggcatctggtccaccatatcttttttcctggcttaatcctcaaatatcagctcaggacatgatgcatccggagttgctggctaagcttgtttcaaacaacttttggaaggtgggctgtgcaaccgaaatggaaccttctcatacaaggatcatttgcgagagtgtcagactcctgtccttgcattggctggagataaagacctaatctgccctccagatgctgtttatgaaactgtgaaactcattccgaatcacaaggtggactatagagtgtttggaaagccacaaggcccgcattatgcacattatgacttggttggaggccgactggcgatcaatgaggtgtatccatgtatcatagagttcctctctcgtcatgatggttattgatttgattatatgatgctaatacagagtaacttacaacaccatgttcatctcaaaggttttttaagttgagctgaacagtcttttccatggcttggccagaaaataggtgcatgcacgaattctcgtgtgtgttgaagagagagaaaaaaacacgagctcatctgatgtatccttgtaacaagcatcgaccacgtacttcggcgacgaagcaattgatttcgggtcacgccttcgcaacatcaatgtccacacgaagctctgcgactttttttcctggcctgcaagttacccccggcgaaggttttcttcgttgtcttttcgtgatgtaacacattttcacaccccgaatttaagggataaagctgggtgcgtctcatatgtgcgccaaagaagaacaacacatataatgaccaagtgtatagagataaatgtcataatcattattacatagcggaagagtcttacagaaataaatgataacaataaagcgaactaaataattattccttggcgcc

SEQ ID NO: 39535 - DNA, 3167 bp, Zea Mays
acgatcccccttctcgatccctacacgtctcctgaaacgcacgccctcccttggctgccccccgccccttccctttcgccccctctcgcgcaatttccccagcccggaccccaaccccggcggcgctgcagtccaccgcaagtcacctccacctcacgcgaggcctccagccctcgtcgccccgcgcttctcccccacgacccggccgccttcgcgcttgcgccccgcggatcgccggcgcgaccctcaggtgtgtacgtctggcatggcaagggacctatcaactggccctgctttctcttttcatgaatgatgtccttccgttcgaaggacgcacatgcacaaacaagacttaactggccatggagaagccaatcgccgttatcagcgcagctgcttgttgatattccacctgaaatagagttgtccgactaccggagattgccaagttctcgaagcgagagcccatctggacttctccatgacgaaggcgtcaaggaagaacctatccctgatctggacattttctttgaaaggctttacgaatatttctgcgcaaaagggctcaggtgtatcattaccaaatggataatagagatcctcaatgtactttttatggtatgctgtatcgggttctttttcttatttgttgattgggatactcttattcatttgaaatgcggtgtggaggcacttgagtctggggagaaaccatgtgatcttatgaaggccattaagcatgatccattagttcccttcacattgcccaaaatgataactgttggatcaatggtcataatgacagcttatggacttaccaactttctcaagttctttgtacagttaagaagtacactcaatgttcgtcagttctactatgacagacttaaggtcaatgatcttgagattcaaactatatcatggcccaaaataattgagaaagttgtcctgctccagaaatctcaaaaactatgtgttgttagggatctctcagagcatgatattatcatgagaatcatgaggaaagaaaattatttgattgggatggtcaataaaggcattctttcttttccaattcattcttgtgtgcctggggctggcccaactggatcacatgagcatggcaggagaaactatctgatacttccaaagtcccttgaatggaccttaaactggtgcatctttcaaagtatgttcgatagtaaattttgtgtaaggaaagagtttttgacaagcccagatgtgttgagaaagcgacttatatttgttggcattgcaatgcttatcctatcaccctgccttgtgatatttccattggtgtacgtcattctaaggcatgctgaagaaatttataatcaccctagtacagcatcatctagacggtggtcaaacttatcaaggtggatctttagggaatataacgaggttgatcacttctttagacacagaatgaacaacagcgctgttcattctttaaattacttgaagcaatttccaaccccactggtttccatcatggctaaatttgtatcttttgtttctggtggcttggctggtgctctaataatcattggatttgtgggtgaatctattcttgaaggacatatttttggaagaaatcttctctggtatactattgtttttggaacaatagcagctataagtcgaaaagtagtggccgatgagcttcaagtttttgacccagaaggggccatgtgcctcgctgttcaccaaacacattacatgccaaagcgatggcgtggtaaagagaacagcgaacttgtacgaagagaatttgagacattatttccgtatactataatcatgctacttgaagagatggcctccattttcatcactccttacttgcttatttctgaggtacctaagacttcacaatatatgtagacggagtgggagatgtatgcagtctaagcttgtttaacttcaaaaaacatggaaatagaaactatgggtcaccattcaatgctcttaaaggtctcaggagctcccaagggaagatggagaaatcattcttaagtttccagagtgtctatccatcatgtgagccaaatgctgatggcaaacaattcttatctaacctccaaaagttcaaagaaaggcaagtacgtcaacaagctcttgcacaatatcaagcactggaggcttcaggctttgtggcaggcactagaggtcaaagggatgataccttccaacaactccatagcgatattcatggccacgctgaggccaccctgcctcctgtttataacttgagccccttgggattgcttgacacagaccaaagaatgcatccatatatcctggactggtattacacatgtcatccaccacactcggatagagctgagggcccccaatttgaccaagcattccctgagaccggtgtgagcacgagtccaccagcaagggaaacatctgaaattgaagaagtcggagactgggacaacgagttgtatgaaagggttcaaagtcatctgggggcatcaacatcaagtgctttgttctggaacactccagggaaggaccatggtacagaagaaaacactaacagcaattggtgggcacatgcccctgcatatccttctggtccccagggtagcttcatcgagcctccagattttggaaatcgatacatgacaaatcctcattccagtaatcacagtggcggtacatcggagggaagcacgtcggatctagagcagagcaatagcagaagcagaagttcctggaggagccctcaagcgttgtccaagacaagatatatggacgactctgatattgaggaagggctaagcctgcactttgctgatgtccatcagaaggatgaagacgatagacacctggtggtcagggatcatcaagatcccgcaccatctggtcttccagtaagaataatacctagaagcagtgaccctgtgtaagctggttaaacaccacaggattatcacataaaaaaaaactccacaggattagttgatgcatgttaacggttgtattttgttgtttgaaccacatcaaaatcaaatgctgcgtctcgcccgtgaactggcaaaacagtcacagattctttttgtacaggccagtaatgatagaaacattcttttacaagcgtgcttggtaggtgcaacacaagtcacaagtgc

SEQ ID NO: 39536 - DNA, 1810 bp, Zea Mays
cgccaccactatttgccgtttgccgcgcgcgctcttccgttccctcctcgtttcgtttttctcctccacttcttccctccactccatcctcgcttcgcaaacccccaacctgcttctgcttcagacgaggcgagatccccaatccatcaccacatcacactagatcacccaacctccctccacatccatcttgcagcatccgccatggcgccgccgcccaagccagccgaatcttccaccaacaagaagaaggtcacccccgcggaggtcgcattcctcgtcgaccgctacctggccgaaaacggattcaacgccgccctcgccgcgttccgctccgaagccgcgcacatctacagccccaccaaatacagcaagaagacgcccaagaggctcatcccgctcgccgacatcctccacgactacatcgccctcaaggaggcccgcgtcgccatcgaatccgcaatgcaggccatgcaatctctcgtttccacctactacgcatccggctcctcgtccgctgctccgcctcatatgaacatgaacatgaacatgatgatgcctccccttcccccgcctcacgccgccaccggtgcccagccgtcatcgccgccgctcttcttctacgcgccgaattcttcgtcgcctccgtcacaaggaaccgccggccacgcctcgcctctcgttcatcactacgctcacgcatccgccgcgggccttgtccacaactcctcctcagatctgtccactccagctcccacctctctgcccactaataaaaagaggaaggcttcagggaagaccgccgccgcttcagcctccaagagatcctgcattgctcctaatacaaccaccgacgcaaagggtagagctgtacccgcggcgtttcaaccgtcgaatcatcagaagaacatgggttccgctgcccaaccaacttcagctcaacattcagctccactccaaacttcatctgttgcaaagagcttgtttgcgccgctcccacctccggcccactcttctccctacacgccgcagcaacaagatcagcctgctgctgcttatccgtctgcaactccagcgtgtgccgttgcccaacaggaaatcggcccctcccagtgctctatcgtttcttcttccaagaccctcatcgtcagccctctcaaagggagcgcgtactatgctgtcgagaggagctaccatctcagctcccccttgaaaccgaccgcccgcagttcccccttgaaaccaaccacccgcaagttgaacttcgattgcaccgagctaggtccctgtgagcagatttgcgacaaggcctctgcctctgcctcctccgacgaagacaagcaatatgactttgacatggatttcacgaacttcgatatatgtgatggtgaattttcgttttctgagctcctgcttgacttcgatcttgacaatgaaggtgtcctgaacgcttccacaagtgatcaagttcaaaggctagagcctgctgctgctgctgctagtggtcatatggcagcgggtcctgttctacctgattcagtgaagccagtcgcagcagattctgctcaggaattgaatccccaaggagcgaccgctgttacttctgtcagggctattacgaagaggataaagattgtgagccctgccaagggccgggcagcttcttagagcagctagcaggtagattttcagatctcgccaaatcagtctgttccttctcttttctgaacgctgctagcagcgcgggtagtctggcgggggcggcgggagcacggcgtcgggcgtgggcccgtcttcaacctcgaaggcc

SEQ ID NO: 39537 - DNA, 974 bp, Zea Mays
ccagaacaaagtggcgcacacacactagcagcaggcgcgcgggccttgcggacgccagcgtgtgccgagcggaggcaggcaggtgtcgctgggcgcgcagcccacatgtcccccgccgcttccgcaccggtcttctcccacctcggccccctcatccctcctccaactccaatgctctccactcttctccgccaccgcctcaccgccgccgcctcctcctcgtcgccgacccacagcacgcctctccgtctgcgccccctcgccgcagccatgtcgtcgtccgcgtccgcgcctcacggcggccggaagccgaaccgcctcgccgccgagcacagcccctacctgctgcagcacgcgcacaacccggttgattggtacccttggggggaagaggctttccagaaggcgcgcgccaaggacgtccccatcttcctctcgattggctatagcacatgccattggtgtcatgtgatggaggtggagtcctttgagaatgaggaagtggcaaagttgctgaatgattggtttgttagcatcaaggttgaccgtgaagagcgccctgatgttgataaggtttatatgacatatgtatcggcactgcatggtggtggtggttggcctctaagcgtctttttgtcacctgacttgaaacctctgatgggtggtacatactttccaccggatgataattatggaagaccagggttcaagactgtattgaggaaggtcaaggaagcctgggaaactaaacgtgaagcgcttgagcggacgggaaatcttgttatcgaacaattaagggacgcattatctgctaaggctagctctcaagatgtgccaaatgacctagcagttgtctctgttgatcaatgtgtcgaaaagccatctaataaagcatcagttagcccaaccatatcatctagcttcccagagttgcttctgcagaggttctatgactacgcggacatgtactgaag

SEQ ID NO: 39538 - DNA, 2380 bp, Zea Mays
tactgaactagctgagctttgcccaccgaacatttgcctcaggtccctgggaaacctgctgatctccgccgcctatggctgctgcctccatggacgtggaagccggacaggggagaaacgataagaagcgaatttacaaagatctactccttgcctacaagactctgggcgtcgtattcggtggtcttgtcacctcccctctctacgtctacccttccatgaacctgacaaacccgaccgaagaggactatctgggaatctacagcatcatgttctggaccctgacactgatcggcgtcgtcaagtacatctgcatcgccctcaacgccgacgaccacggcgaaggtggcacatttgccatgtactccctgttgtgccagcacgccaacatcggcatcctcccgtccaagaagatatacaccgaggaggagcagggcctggtcccggctcggcccgtcgcggcccggaggcccagcaaggtgaggaggttcatcgagcggagcattacggcgagaaggttgctgcagctcacggcgatcctgggcatgtgcatgctcattggagacggcatcctcacgccggccatctcaatcctgtcagctgttgatggactaagagggcctttcccgtcggtcagcaaaccgactgttgaggctctgtccgcagggattctgatcggtctgttcctgctgcaaaagtacggcacgtccaaggtgagcttcatgttctcgccgatcatggcggcgtggacgttcaccaccccgatcatcggcatctacagcatctggcgctactaccctggcatcttcaagagcgtgtcgccgtactacgtggtacacttcttcgtgaccaaccggaagaggggctggcagctgctcggcggcaccgtcctgtgcatcacgggcgccgaggccatgttcgccgacctcgggcacttcaacaagcggtccatccagatcgcgttcctctctagcatctacccgtcgctggtgctcacgtacgccggccagacggcctacctgatcaaccacgtgggcgacttcggcgacgggttctacaagttcgtgccgcgccccgtgtactggccaatgttcgtcatcgcgacgctggcggcgatcgtggcgagccagtcgctcatctccgccaccttctccgtggtcaagcagtcggtggcgctggactacttcccgcgcgtccgggtggtgcacacctccaaggacaaggagggggaggtgtactccccggagaccaactacctgctgatgctgctgtgcgtgggcgccatcatcggcttcggcgacggaaaggacatcggcaacgcgttcggcgtggtggtcatcctcgtcatgctcatcactaccatcctgctctccctggtgatgctcatcgtctggggcacgcacgtggtgctggtggcgctctacctcgtgcccttcctcatcctggagggcacttacgtgagcgcggtgtgcaccaagatcatgaagggcggctggttgcccttcgccatctcgctcgttctggcgctcgtcatgttcagctggtactacggccggcagcgcaaggcagagtacgagatggccaacaaggtgaccctggagcggctgagcgagctgctggccgcgcccgacgtgcgccgcgccccggggctctgcctcttctacagcaacatgcaggagtggcggtggctcaccccggtgctggcgcactacatcaagaacatgcggtcgctgcacggggttaccatcttcgtcactctccggtaccaactggtggccaaggtggacgccgagagccgcatggcggtccggcgattcggtccccgcggggtgtacggctgcacgatccagtacgggtacgctggcccactgtacgaggaggaggaggaggacctcgccgggcaggtggtgcgggcggtgcgccagcatatcgagcgggaggcggcggcgtcctccacggcggaggtcgaggaggaggcggcggagctggaggaggcgcgcgcggccggggtggtgcacgtcatgggcaagacgaggttccacgtgggcaggaacacgggcctcttcgaccgcgtgctgctcggcttctatgagttcctgcataccacctgccgctccgcgctgccggcgcttgggatcccgctgcagcagcgcgtcgagatcggcatgctctacaaggcctgacgccagacatgcacctgcggctgttgctggtgcaggcttgcaggtgccggtggcttaagactgaggttgcttgatctagttgtaagtgaatctctgtgggaaggatggaataaggtgtctggtgtggaagatgaacttctgatttgtatcaccatatcgtcctgctgtgatatacaaattaatactagttcctttcc

SEQ ID NO: 39539 - DNA, 4051 bp, Zea Mays
gttccgctcgctcgcccgccaccgagagacgacactctacgtgtgtgcctgcgagagcgagagcgcaccagcagagcagacagcttcctctgcggcctgctggtcgcttcgcttcgctccagtccagggcaaaggacggcacatggcggggggcgggggcggccgggacctgccgtcgacgccgacgtgggcggtggccctggtgtgcgccgtcatcgtgctcgtctccgtcgccatggagcatggcctccacaagctcggccactggttccatacgcggcagaagaaggccatgcgggaggccctggagaagatcaaagcagagttgatgctgatgggcttcatctcgctgctcctcgccgtggggcagacgcccatctccaagatatgcatcccggccaaggctggcagcatcatgctgccgtgcaagccgccgaaaggcgccgccgccgccgccgacgacgacaagagcgacggccgccggagactcctctggtacccgccgtaccctggatacgatgagcccgggcaccaccgccgtttcctcgccggcgcggctccggacgacaactactgcagtgaccaaggcaaggtgtccctcatctcctcggccggcgtccaccagctgcacatcttcatcttcgtgctcgcggtgttccatatcgtctacagcgtcgccaccatggcgctggggcgtctcaaaatgaggaaatggaagaaatgggaatcggagaccaactccctggaataccaacccttcacggttccggttcacgcaccagacgtcgttcgtgaagcggcacctgggcctctcgagcacccctggagtgagatgggtcgtggcgttcttcaggcagttcttcgcgtccgtgaccaaggtggattacctgaccatgcggcaggggttcatcaactaccatctgtcgcccagcaccaagttcaacttccagcagtacatcaagcggtccttggaggacgacttcaaagtcgtcgttggcatcagtctcccgctgtggttcgtcgccatcttcactctcttgatcgatatcaagggattcggcacgcttgtctggatctcttttgtcccgctcgttatactcctgctagttggggccaagctggaggttgtcatcatggagatggccaaggagatacaggacaaggcgacggtcatcaagggggcgcctgtggtggagccaagtgacaggttcttctggtttaaccgccctggctgggtcctcttcctcatccacctcacgctcttccagaacgccttccagatggcgcatttcgtttggacactgctcaccccagacctgaagaaatgctaccacgagaggctgggcctgagcatcatgaaagttgcggtggggctggttctccaggtcctctgcagctacatcaccttcccgctctacgcgctcgtcacgcagatggggtcgcacatgaagaagaccatcttcgaggagcagacggccaaggcggtgatgaagtggcgcaagacggccaaggataaggtgcggcagcgggaggcggcaggcttcctcgacgtgctgacgagcgccgacaccacgccgagccacagccgcgcgacgtcgccgagccggggcaactcgccggtgcacctgctccacaagtacaggggcaggtcggaggaaccgcagagcgggccggcgtcgccggggcgggagctcggggacatgtacccggtggctgaccagcatcgcctgcacaggctggaccccgagaggatgaggcccgcctcgtccaccgccgtcaacattgacatcgctgatgccgatttttcttttagcatgcggtgacctgaccttgaacgaattctgtgtccttactcttgtatagggaagcaaaagcatagacggagaacataatgacacgttacgttagggaaagtttcgtttattcatcataaaatagaatacgtaataaactagtatctccctcttctctgtggaaaaaaaactgaactgagacccttacaatgtacagctgcaaaaaaaaatattaaaaaagaatagagcaatcgaaccaggatgaagctatacattggaaacaaccagtactcacactaacaagataggttatcagcaaatacattgttcttgtgaacagctattaggacagctgcactcatcatccacaggaccacaggctagtcagcttttgcacgaacccttctattgtgaacagctactaggaccactgacactgccattccaaccaaatacccagcaacggcaccataagagacacagattggccattcctacagaacatcaaagaaacagaatagtagcaatcagtcataactcataaggtccagaaaaggaatcgtcatcaatgtgacacttgaagataagatctatggttaagtacatgttatgagataaactcatttcttcttattataatgatacacacctctccttcatttttttttgaaaaaaaaagctaaggtaaactcataaaagggacatcaggatattgagaactccaaaggacaaaacacccaacagcacgttaggcaaaccaatgaattccatgtgcttgccttgcaccaaggagcctgcatatatcgtagccaggatattttgggacacgttcacactgcaactagccgtgtttggtattcttgcagcaaacaaaccagaccaacgcaggttcttgtatgttacctgcactgctgtgggcctccacattgcccaaaggcagaatacatgagtcggttctcaaaaaaacaaagtaaaattccatttcccctccatccaggtaatcaaacacgagttactgcatcccagtggcctggcttggcccttggtgcagggaaacaaacaagcccttagaacttgcatccctacatgtttgtgatccccatatgtttaccccagccaggccataaacacaagtatgtttcgtagagctgtttagtgtcatgttaaccatcaagtgtgcacaaacatatccatatgacctagcttttccatgccttgaaattggcaacatactgcttgagattcaaagatggtatgcctacctgccagggcctctcccagtcaaggggcataggccaaccaccgagccatgctcctagcacagctccatgacaaggtgcagagatcatgtagttctcaacatcatttggcatgaaataactgatatgtacaaagacaatgaaatatcatggcacagtggctgtacaaaacaaaagaaagaaatatgcccactacatgaacctgtacagttcaaaagtttacaagtccagaacatacatggagtgagaaagcacattttgccaatcaatcttggatgctccaaagacacatgctgctggaacaaactgaaagataataaaattagtctcgcctgcctcaatcgctaaagctatgcagtaaacacaaagtggtaacttgtgagtacaagattatgaacacaatacaatactggttgttgcagttgcagtctgtgttgctcggttttgtaccagaaaatcagcaaaaatgtcaattaccgtgaacagggacatgaggagtgaccaatatatagtaggtatccagtatctacaaatgcaaattacatcaaataaggaactgttagtacccgtaaattgaaatatcatggtttactttactaaaatcagatgcaagatagaattattgagcaaagcactacagacatcaaattcctagtcatgatgcccactcatgatgtgaaagataagttaaattatttctgaatgtaacttacttgattccaacaggtgcaccaagaacgattgctccaaatgcattaaggaatgctcctggcatgggtggggaaaagatgtgcagaaaaatcagagaaatgaaaaagaggaaaataaacaaatcctagataactcataactaacagtatgactgttgttccatgaaaccgaactagcacttctactgttaccagaactgatggttcagatctgcagcatggtgctgttcgttttgggtttcatattcatacagcaacgtatcaagataagaatgcaatcgaagtcaag

SEQ ID NO: 39540 - DNA, 1752 bp, Zea Mays
caaacgaacagggaaaagggtaaattcgctttcagaggcaagcgctgcgttgccacacagcgggaatcctgcccagagctgccgaatcgggtccaatcccgtcgacctttctggccgccgccgccactggactccatccagaaattaccttcgattcggccggggccgtgggagcggggatggggctcggggaggcggcggggcggctcctggcggccgtggactgggagcgagaggcctacccggcgtacgacgacttcctcgcgctccccgtcttcgtccttttcttccccaccgtccgctacctcctcgaccgcttcgtcttcgagtgggttgcaaggaggcttataaatagaaatggacatcagagcactaataatgaaacagaagaaggaaggaagaagataagaaaattcaaggaatcagcttggaaatgtgtttatttcctgtctggagagcttttagctttgtcggttacatataacgagccttggttcaccaataccagatatttttgggtaggaccaggagaacaggtctggcctgatcaaaagataaaattgaaacttaaggctgtatatatgtatgctgctggattctacacatattccatatttgcacttatgttttgggaaacaaggcgttcagactttggagtgtcaatgtcacatcatgttgctactgtcgtcctgattgttctatcttacgtgttcagatttgctagagttggctctatagtattggcaattcatgatgcaagtgatgttttcctggaagtagggaagatgtccaagtacagtcattgtgattggcttgccaatgtttcgtttctgttttttgttatttcatgggttcttctccgcctcacttattttccattctggattctgagaagtacaagattcgccccattgcagtgttggtctggttcacagtttctttgttgtggtgcttgttgagttgctgtgaggttgtggccttcatcatctatgaggtcttgttgactttggacaaaaagaagcacaattttgatggtcctatatactattatgtgttcaattcccttctattttcactacttgttctccacatatattggtgggtcttaatatatcggatgcttctgagacaaatcaagacaagaaatgttggagatgatgttcgatctgattctgaaggagaagacgaccatgaagactgattggcgtcaccatcttagtttgcatattatgtcggtgctagaagcatcacccccaataccgtccctgagcttatacattctttggctggattccaagaatacgtgcagattatgagaggacgagcatttgttcctcacgagaatcaccgaagccgggctacgatttcttctgtctcgactgctcatttgtgttgtactaagtatgcattagaaacagcgctgcaatgtgttaaaaaagttggatgtcggatataacattcttgtgagtgttcagacaaagtgcagcggtaaatgtagcattccagaaaaaggactggctgtaaactatatggcctttctttcgacaaaccattgtaaaaattgtgtatgccaggatagccttgcttgggatttaccacaatcccaatcagaaactgtcccttctgaagcatgtatttcaccattcagtgattcgcctgatgataatttgataaattcatttatccaacacacctgatgcatatttgctgaaaaatggttcccagttacatatttatcataggggagaccgg

SEQ ID NO: 39541 - DNA, 366 bp, Zea Mays
tcatcaagacatcaccaggttgttgttataccaaacaagtctcaataagaaacaattaaaaactgatacaaaggcaaaaaaggctaacccctgacaatgtttttaacttagggatgtttcaagatgacaacattcatcatgattttgactccctacttttccttgtctcaagcacctcgcctacagaactgacgctctgaaatatgatcggataatattaatataattaagaactgaacaattgctgcaagtagctcgtgagttgtgtatggaattgccattctaattttatgtaaatgtatgctccaataaaacaaaccttgaaccaaggaaccaatgaactcaggtgatgcttttcagtttctc

SEQ ID NO: 39542 - DNA, 4401 bp, Zea Mays
cgccgcggtgcccacgaggcatgagcccatccacatcccaaagtcccacggcaaagccgcgcctctgcggctctgcccgacgccatcgccacgccagacgccagcgcagatctcccttcccgtttgtccttccggcgggcgagggtgacgcccgccacaccgcgagctccagctgctctaatcgatggggcacagctctagaaagaaaaagaagcgcggcgcggccggccgcaaggcagccaaggaccacgccgcgcagctcgaaggagacgagaccgccctcgacgaggagctcacggccctggcttcaattttaggggaggacttcaaagtaacatcagaatcacctcatacacgatgtaatatatgtattaggccttattcggatgacatgggctttgaagatctaaatatttcagctattcttattgtgatatgttttcctggttacccccacaagtgtccaaagttgcggatcctgcctgaaaaaaacttgtctaaagaagatacagatcggctcctttcgcttcttattgaccaggcaaacatttattcccgagaaggacgtgttatgattttcaatttgtttgaggctgcgcaagagtttctatctgagattgctccagctcgtgtttcagtgagcactgcttctttcttgggtttgagctcaactactgatgacaatgtggaagttggctttgacagtgatccttacctgggaatctcttacatatataactccttcgatctatatagtcagttatatgatgatacttattggagtcgacaaggttcagatctgacaacagatagtggcaggaaaaatattgtatctcaagttcaatccaatgttagaagcaagaggaagaccatcattgaaaaatcccacatctcagctgataaggtcaataatgctaaagagtcatctggtgataaagctgaacagcaacatgccacaaagcatggtgccatacgggaggcagctccaactttacatgttgtggatgaggaaactgaaatttacggcaaaagtttgtctgctagcaatacaggaaatacatcagatactcctgaaaggggttttagcagtctaaatgaacctgaggacactgaccttgcagatgaatcttggaatgaacaagattgtgattcggacttcagctcttcaaatgcactaccttatgtttcatacatgttagatgatgcttcacgaaacaagaaaagggatttagttctggtacatctgcttcggatagcctgtgcgtcgaaggattctctttcaagtgctttgccaacaatatcagcagagttgtgcaacataggggttctttccgaatgggctaaggatttaatttctgattctcctgctgtttttggagaaactttcagtcatgtttttgggcaacaaatgatctcttcagagtgttctctattttggagacctgataattcatcatctaagccaaattctcgttatttgaatgattttgaggagctccgttcacttggtcaggggggctttggtcgtgttgcattatgcaaaaacaagctagatgggcgccaatatgctgttaaaaagatacgtctgaaggatagaagtcctcaattgaatgagaagattttaagagaggtagccacactttcaagattgcaacatcaacatgttgtccgttattaccaggcatggattgaaactgaatacggtcatcataatattttgaatgctggcgggtcctgcactgctgagagctctatctttagttatgatgaagtcagcctatcggatgcaggtggtgggaataagcaggaatccacgtacttgtacattcaaatggagtattgtcctaggactttgcggcaggattttgagacatacatctcgtcttttgatgttgaccatgcctggcacctgtttcgacaaattgtggaaggtctagctcatgtccatagtcaaggaatcctacacagagacctgacacccagcaacatattttttgatgtccgcaatgatattaaaattggagattttggtttagccaaatttctgaagctggagcagctagatcatgaccaatatcttcctactgaagcactgggtgtatcaatggatggaacaggtcaagttggtacatatttttatactgcaccagaggtagagcagaaatggccacagattaatgaaaaggttgacatgtacagtttgggagtaatattttttgagctttggcatccatttgccacagcgatggaaaggcatcttgttctttccgatcttaagcagaagggagacccgccattgtcatgggaatcaaaatttcctcgtcagtcagtcctgttaagaagcttgctgtcaccaagcccgtctaaccgtccatctgctgtcgaggtcttgcaaaatgaactgcctcctcggatggaagatgagtggctaaatgatgtacttagaatgatacggacaccagaagacacatatgtttatgaccgggttatatctacaatatttaatgaggacaggttcgccaaaatgcaaggccaacatgatagcagcaaaaagtccactggtaacattgataacagtgaacttttggataccatcgttgaggttgccaaggaggttttcaagcggcattgtgctaaaaggttccaaatatcacctttgcatactttggagtggaattttaccaaaaacaggggaaacacagtgaaaatcttaactcaaggaggagagatgctagaactttgctatgaactgcgaacaccatttgttatgtcaattgcttctaatcagacatcatcattcaaacgttatgaaatatcatgggttcatagaagagccgttggccattcaactccttatcgttttcttcagggtgattttgacattattggcggtacttcaccgattccagaggctgaaatcatcaaggtggctttggacctggggacccgcttttatgattccaagacgctagtcatacgtctgaatcacggtaaacttgctgaagcaatttgctcttgggcaggggtttctcaggatcaaagacaaaatgttgctgagtttctgtcttcaactattgttcagtattggccaaatgaagctgaccgcaagtcacagtggagtttgattagggggcaacttttacaggatcttcgtctttctgaagaagttgttgagaagctacataaagcagatcagcggttttgtggctctgcagatctagtacttgctagattaagagggaccctgttttatgatgaatctgcttgcaaggctcttgatgatctatccgcgcttctgagatgtttgagagtatggtcggtagaacaaccaattactactattgatgtactcatgcctccgtcagaatgttactatacaaatttgtttttccaggtatactcaaaagaaggtaatcatggaccgggtttccatgaaaagttgctggcagttggtggacgatatgattggttggtggaacaagcttgggatgagacatctaaatctaaacccccaggtgctgttggtgtgagcattgcacttgagaaatttcttcctaacaatccttcatctgatctgggattgcgaaggttactgtccagggttgaacctagcatcagtgtacttgtctgttcaaggggtggtggcggtctgttgactgaacgcatggaacttgtcgcagagctttggaaagctaacataatggctcagtttgttcctcaggaagatccaagtcttcaagaacagtatgaatatgccagtgaacatgatattaaatgccttgcaattatgactgaatcaggcctgtcacaaacagaccttgtgaaggtccggcatcttgattttaaaaaggagaaggatgttgaaagagagggactaataaagttcctgtctgatgcaatgtgttcacaatacaaaaatcctacgatctggagctgaccaacggccctcccaagtgcttagtgtatttgttttcaggttctagcagagcatcaaaaaatgtgtctttcgaacttccgggtgaaagcaatgtttgctgttcgaacatgtgaaggcaatcatgcgtgttggcttccgtgcatacggtgaggcagctgttggctctctgcaggttgttgccaaacgttacgccctggtctttactgaagatgggcgccgacgtgcggtgattggccaattggtataatcctggacctcttgattgttctcctgaggaccaatgccatgcaacaaggttgcttcagacacaaggtggcgtgtagttggtgcaattctgcagttttggggctgttggtattatatggatctgaaggtactctttcgagggacttattggtgtcggttctgggggcttctccaaaggcgtgaagaaggacatcgtaaggatcaaagttgcctgcagg

SEQ ID NO: 39543 - DNA, 1516 bp, Zea Mays
atccaattttgggtccgcagaacctcctcctctcgctccgccgccgccttcccctcgcccaccacgctttggtcccaaacccacggtcgctcatcctggacctccacgccatcgaggcagtgaagctgggctcattcgtgcaatcgtgctcaagtctggcatcaactcccccatctaccgggacctccacgcgctcgtctcccacccacgcctgctctccgttgttgcctcgctcctccatatgcccggcctcgtctgcaacgtcccctacacagcgctcccgtcgtcgtcctctgcgtcgaccgctccatccccatgctcatgcgccgcaaggaggccaagccttacgacatgattggtgagaccagaggagcacgagcgcaacctccgtcacccctaagatctcctcaccattgtggccatcctgcaagatcagtactcattatctattaagaaggttacggttagcttggtgtaggataggcactggagagtttgacttgcgatatttgagtacatcccattgctggcgctccgagtatctggccatactattgattcacataccagctaaatttaggaccatcccgattgaaggctcttcccacttaaggcatctggcttggtgtttcttgtttggtgatacctgtacaagcaaatttggtgacctgctacttaaaaactgtttctgcaaagaggtcgtcttgactgatcgcaatgatgaagttctggaggcaagtgttgttgttatgatgaaggcagacccaagtattgaaagggatgatctgattttgctctaggagattgccatgtacatgcttcttgcatgtggagctgtctatgtgatcttgataagaaagatttgtggatgttgacccaacaggaaattgctactgaggtgcaaagtgaatccaagtgaaagtaattaggggagttagctatgtcaaatggaaagagagtggttgctaaaggataggaagctgaagctggatgaaggaagcaactacatgcaaccgatggcaataatgcattgcagggttgaggctcgttagaaatgtcaagttggtcccggacgtgggtatggtgcccgcaaggccgacagagctgagatcaagcactgagatcgtgccctcgtgcctacggctgcatgtcacacctggccagaggcataggctaccactactgttctaagaggacaacctgctcgatagctagcctaggatggccttcagttccagcaaggcttgtcggctcgtctcactgcagaacgctattgttggcgcctaattgaacgaagttgataccggtaggatcccatgaagcaacataagcagcagaagtctgacgaggaatgacatagatgcagtgctttcgtttgttgctactgaaaaaagatctgaaccaagtatttctgtaagtataccaacaagttagttgctactactttgtatattgatcttcgttggccgaatgtttgagtttttttcaaggcacaaacactttattttgagatcta

SEQ ID NO: 39544 - DNA, 2841 bp, Zea Mays
cacgctgttccgttgctgtctgcctccagcctcctgccgttacgagcgcgtcagggtttttccttggccagccggcggcggccgttgcacctcctccatccacccctagtcgaaggtcgccagttcattcatccaggctgctgcgcccgagtccctggccaccgtcgctgggcacctgccgtcctcggaagtcgcaaccggaggtgggatttattaaatttctgagatggcagaatgtcggatacaagactggaagcgcgcttcaactccagagtcagtttctagacatgaaacatcaataccaagaacaaagcaaagaaacatttttagtctattagctcagcgggagctctcacctcgaacaaaaaaccaagcaaaaaatctttggaccaaacctccaagacttgatgcttgtcctattgaatcgaaattttggggcacctatgctcagcatgatctcctttcttgggctgaagcagagttcttgcattggtggattcccaaatattgccctctcacgccttcttcgaaggcaactattgcagctgcatttagtacagatgggagagtacttgcatctacacatggtgaccatactgtcaaaataattgattggcaaactgggaaatgcttgaatgtactgcttggacatcaccgcactccatgggtggttagattccatcctcagcgttctgatattcttgctagtggaagtttggattgtgaagttcgtctctgggatgctaaaacatctcgctgcacagcagaactggtcttctataggccagttgcatcaattgcatttcatgcaactggggagcttctggcagttgcatcaggtcacaaattgtttttatgggactgcaataaacgatgggaaactttggaacttccaatcatactagaaacccgccgttcactgagagctgtgcagtttcacccccatggtgccccatatctacttacaggagaggttcacaaccttgattctgaagattcaacgatgacccctgcacttctgagcaattattccttcagagacacacctctccttggtggttctggggtagataacttgattagtgaactacaatacatgcagaattttgagcaggttggtgcctcatcatcagttccagtcactactggcagttttgatgggtcaaggctacatgatacctctggccatcatctgatgacctctttacctagtgttgggaggccccttctgggtactcatgctgctgaagctcctgccatctcattaagtgtcgggtcagaacaaactacgtctctgcttggtggtggcaccgaattaccttgtacggtgaagctaagaatatggcgccacgaaatgaagaatccatttatcacattagggcctgaggcatgcctcttgacaattcctcatgctgtactttgcagcgaaatgggtacccatgtttcaccctgtgggcgatttttggttgcttgtgttgcatgtgtgctgccacacagttatggtggccatggaagtcagttgcatgaacattatgactctactggggctggaacatcaccaactcgccaagcatttccgtctcgccaaattatatatgagcttcgggtttattctcttgaggacgcaacatttggaacagttcttgcaactagagcaataaaggctgctcactgtttaacttccatccagttttcacccacatcagaacacatactattggcatatggtcggcaacatagttcactgttgaggaccattttgatcaatggggagaccagagttcctgtgtacacagtcttggaggtgtatcgagtttcagacatggagcttgtaagagttcttcctagtgtaggagaggaagtcaatgttgcatgttttcatccttcccctggatcaggtcttgtttatgggactaagcaagggaaggttaggtttcttcggcaccatggtgcatcattcacttgctggggagaacgttcatgaggtattactttcctaccattgaaggcttgtatggattaactattccacatgttttttttggggggggggtgtggacggattgaggggataattagttggagtccaatggccattggagttggatttatccaaacgagcctagagagatttagaggcatgtgctacaaatgcagttctggacataataactgaatttgagcatcgcattcttgtgctgctgaatcttatcttgattatggcttcggcaacatcctggaagaggaatttatggtcaactgagatcatctccaagaccgagagggctaacagaaaacatcagatttcagcatccaattactcttgactaacgttccactctttgcaaaaccattgtgccggcaaggagggctactattttaggtccggttaacgtgtgtaagtagccccgtctatgagaaaatggacaaggaatcgcagcctcattcagcatgaattaccaacgatggttgactactactagtacaaggagacctcaagggatacggtcgcctgtacgaatatggatgcgagccatatactgacggccggcctcccaaagatgcgatgtgttccttagttcgatgattttttttttgaaactgtatagaagcctgcgaagaaatgtagtggttggctgagtgaagtgagggaagggataggcattatttcccttgggtgacattgaccctgtttggatcagattctagccgcgagaatctgattttcgtaataaaaaaatcgaaatcgaagtggtttacggtctatttgttttggccgaataattctttccatttggcattaaatcgccaaaaaccaagaaaaaaagcatggtcctaaat

SEQ ID NO: 39545 - DNA, 1511 bp, Zea Mays
ctcctctgctcctccccagtctccacttcccccaaaccccggccgaccaaccccaaccacggacccggactggctgtccgcctatcacccgccactattgctcttgcagcctgcttctctccccccttctcgccgcgtacgcacgggtcgcacgcacgcacaccccgttcgtgccacactgccacctaacccccctcccccacgatcccgaggctactagcactaggcgtcgtcctcggcagcaacggcggctgggctcccgccgatggcggcgtccctcgccgccgccgcctctcgcctcgccgccaccggcggcgagttgtcgtggtcggcgcggccctgccccgggagtctcgtggcgagcttccccagcgccgggcggctccggcgccccgcttcgggcgtgcggtgcggaggtggggttttgcccgcggccgcggggacgggggcggaagcggaggaagggggccgcttcgttggctggttccgggaggcgtggccttacatccggggccaccggggcagcaccttcgtcgtcgtcatctccggggaggtcatcgccggcccgcacctcgacggcattctgcaggatatatcccttcttcatggtctcgggatcaaatttgttcttgttcctggaacacatgtccagattgataagctcttggctgagagagggaagaaggctaagtatgctggtcgctaccgcattactgattcagattcattagatgctgcaatggaggcagctggccgaatacggctaactatagaagcgaagctgtctcctggaccaccaatgttaaatctccgtaggcatggtgttaatggccgttggcatgaaatctctgataatgttgcaagtggaaatttccttggtgctaagaggcgaggggttgttggtggcattgattatggattcaccggtgaagttaaaaaaatagatgtttcacggataagagaaaggcttgatagagacagcatagttgttgtgagcaacatggggtactccagcgcaggagaggtcttgaattgcaatacctatgaagttgctacagcatgtgctttatccatagaggcggacaagcttatttgcattgttgatggccaaatatttgatgagcatggtagagtcaatcgttttatgtctattgaagaagcagatatgttgatcagaacacgtgctaagcagagtgaaattgctgcaaattatgtgaaggttgttgatgaggaggacatcaatcatgtccgctgcctcccaatgaaacatggtacagaacatggtatgaatggaagggaccatattaatgggtatactgcatcttttcggaatggtgtgggtttcaatgatggaaatggtctgtctggtgagcaagggtttgctattggcggggaggagcgcttgagcaggtcaaatggttacctatcagagttagcagcggcagcatacgtatgccatggttccagcattccaggcttccagcaatgttcataacatccgtgcatgcagg

SEQ ID NO: 39546 - DNA, 3141 bp, Zea Mays
ccccactcccgatgcgtccgccccaacgccgatagtcctcgcccctcccctccccgttgcgcccacccatgccccctccgcgcccgcgcctcccctcaaccaccgcaccgagatcgccgccgatctgagctcccctccccgttgcgcccacccatggtcgctgcttcgacttgctgttgctgctgctcctgcacgacgaccaatgtcagctacttgcttctgtttcgtagcttcgtagtttttgaagttgtgatacagcaacaggcaattcctattatttcctaccttgaaggaagggaacaacgtggtctgcgcgggcatggtgggcgcgtggaaggagaagtcgttgaaggcgccgccgaccgcagctcggctgtcgtcttgctgtcgtcttgctgagactgagacgcgatcaggtcggcggcctgcttccagtcgaacctctgcgccgggatggcgccggtggtgggcgacgcgaagaagttcgaggaagagtggagcgggacgggcgagtccagcagctcggcggggctgagcccgggcgggatggagaagtaggaggagggcgacatcggcggcggcgagatgggcaggctgggcggctgcacggacttgaacttgggcacgcctacgccgccgcccctggtggcgccgcggtggaacagccccctcggtgatggtggccaaccccaagatctatgtggccaaggccgtcgatgcctttgtggagttggcggaggcgagcaggtaaacagatatgcatatatcagggtccatgattttttgcatggcgtagctgatacctgggaacaaagccctggagtctggagaacgtgaactgcgtgacatgaggcaccgttaatttatcatcttacctttttttgactgcctgtttggtgggtgaacgtggtcgtcggatcggatgcgatgtttgctggggccgcgatcatgcgtcacccagtgattattccaggcaggcacttggcaagattgcctatttcttctctggaccacgatttatggtggccataattgttctcaaaacgttgctgccacaccagatccgcttggatttctggacacccccaataaatgattactgttaatccagtggatcagaaaatgacgtctctcttgttttctttgtttttctcctttgtccgtctgctttttgctcttgttctgctgctctaatcaggtggcttccatcctaatccgagtgtactcaacaaggttgagggagagactttggatacccattactgttagggagtcggtctagctacattcgtgataggccaataagttggagtttaatacgtaattcagatgtctatatctttaggaatctcttagtttctgcctaagatgtgggaatctatcaggaattcagctaattcaatgcgggctacttgccacaaaggttaatttttaggtaccagatcatctgatttctcagaagcaaaatgttgtttggagctcagtgacaccatcttgtaatgcctgtgattttacgggaaatggaggatcattctgtccatcccatgtctaagtctaaccatggctccttgtcaggaaatggttatgagatgaaacattcaggccataaagtttgcgattgggattcatcatcgaagtctgatcggtctcaccaagaagcatcagcagcaagtgaaagcagtccaaatgaacacacatcgactcaatcagacaatgatgaagatcatgggaaagataatcaggacacaatgaagccagtattgtccttggggaaggaaggctctgcctttttggccccaaaattacattacagcccatcttttgcttgtattccttatactgttgatgcttattatagtggggttggggtcttgacaggatatgctccacatgccattgtatgttcactcttaatttttcagtttctgtcttcctggccacattctgtccatccccagcaaaatgatacaacgaacactccgggtatgttacctgtggaacctgcagaagaaccaatatatgttaatgcaaaacaataccatgcaatccttaggaggaggcaaacacgtgctaaattggaggcccaaaacaagatggtgaaaaatcggaaggctgcaaaggagggcgagcctttttgggatagcccttggggccgtggaagaccgggatggcatattgaatgcagcgcaatgagtgctcactatttaggacatgtattcgatattcatggtggggggaaagatttgatttttcctcatcatgagaatgagcttgcacaaagccaagctgcttatcctgagagtgaggtgaagtgctggatgcataatggctttgttaacaaggatgataaaaaaatggcaaaatcagataataacttttcacgattagagatgtacttgacttactttaggttcaaattatagtcattttgtgacttattggatttaaatttgagctgagcagataacaagcgacttgggggtattgatatttatttttctgtcttgtttaatctatttgttcaactaatttcaaaacagttagtgcttctgcatctcatcacagatcctgaatacttcctttgtcaaagctttcacttgtctgaaggaagacgtcggccttctgcttctccatcaccatcgttatcatgcaacctgctggaatgccacagcgggacaggagcatggggatgagcaggcgcaagatgatagcaagtggcgccggatcccgacgttcgacgactggaacctgcgggacgacatgcccgtcacccaatacttgcaagcagggacttcttcatcattgtgccgccgacagagaaggacgacgacgaggatctgttcaaggtgcccctgtgttccctgccaagccctacaactacaagaagttctaggagctaactcaggcttacgaggtcctcagtgatcttgaaaatcaagagatctatgatgacagagacaacataatcctacacctgtttcattattggagtaatgcggtgctacatgtatggttctcttcttaaagctgtaagactaaggatcaccttttcctcttcgaacaagagcccaggaactgcgacgaggcgtgcgaggccgacctcggcgccacgcccgactgcccactgacgttgctgctcat

SEQ ID NO: 39547 - DNA, 5426 bp, Zea Mays
ctagtctgtcatatgtggacgctatgatgcatggacagtgggcttcttagggcctttatgggccaggaattcgtcgaagcctgaaggaaggaaaaaaaaaacctaaagatggtcgctgccaccaggtagtttccaggcttccacgtttcactccaccgcttgtttccagttaccaccactccacttctaggttccagccgtgccggcgccgccgcttgcgctactctgcgcgccctcgccgctgcttgcttgctcgcaacttagaaggtgacgccgcctgcccagtgcgagcacgcctccacttgcactgcgggctgcggccctgccgaatctggaaggtgtcgagaagaaatagatccttgcactccatgccgctatgatcagcgctggccgcagcaggcggcgggggcgggcaccggcgtccctgcccacgaccacgaccgctgcttcccgccggaccgagcactccatctcctgctgttattgtgactgcaagatatattccttaaacgacgccctcttcaatttggggtggaagtatgctagatatatgagagcatggttttctgtaggtgtttatctatctctcattgctttagtcagtatatccttgatgctattgtgggagtcaattggtgtgttttattttaggagtggattccttagtgcctggttacagaacctactgacttcaggtctcaacatatctattgtagacaccacaatcattataatgtcaacaatcctgtctattgtttttcatgagtttggacatgccattgcagctgcaaggtctttatgtcttaccttctcatttctatttttttctctcttacatgttgcgtgctttttgttcagttcacctggtactcaaaacatctgtaagcgaggaaaataggcggcaaatagtgggtttattatgagggaataaattactggattatataggcaaggatgttctagggttttagtttatagaaatgacaccaatcacagaggtccttgtgaccttgcctaccacaaaattgatatgtgtgtgtgcgcgcgcgcgtgtggtgtgtgtgtgtgtgtgggggggggggcacatgcacagcaataaggcccacagcctaaaccaattatctgtctaaaaactctcatgaattattttgtttcatattctgacacatcatttgctacttacacaacagtgagggactacagattgaatatgttgctatatttgtcgctgtactttttcctggggcatttgttgctctgaactatgacctactacaaaatatgcctctcttttccatgcttcggatttattgtgcagggatttggaataatgttatgtcacaactgtagggaactgaatgagactggacctgaagacattgaactactgtgtaagcagtctcttagtcataatgtacgtgaactgattagttgaggccacatggagtaccctaaagccaccttctcacgaacaaagtggatgtcaattgtcaatgtctatatgcttcgtacgacgatggtgaaccgaattggcagtcatatagactgtggtgacattgtcacaatagacaatggtcgccaaaccgagtgatagtctgaaattgaccatcgactatgttaaagctatcgtgagggaggctacacttgaggcttcgtcgggcaaacgggagcccttgcccccatcggttgcggcaagtccagagcagcaaccttcttcagcgatggaggcggaaaagaacgccgctgaggaactatcttttctaaagcacgcaactttgggaaaatattgtctgattgtggcgaagaagaaagatgaaggctctttggcgcgacctgttgactaggtgtaaattttgtacactaggccatgctgaagattcgttaggttgagttttgcttgaaggccttggaaaatattatgtctgattgtctgccacgcttcaattgtcgaccaatacatcatgcacggtgaagcttatattacagttgattaccatgatattgctgtgtgggtaatatcttagccgaaggtcatcttgagtgaatgttacaggcatatgaaccacttagatctgatataggacccctgaacacctatatgttggaccctcctttgaagttcttgtttttatctcttattgagtggcccgaagcttgatcttctcattattgggaatatgtgctttgctggtggaactaagttgttgacgtctgagctttgggctcttcccttctactgagctggctatgttctcgtatgtggcgtttttgtggaggttgattatataacattggatcatattgtgatgggtctggtagttgggggttgtaagcttcccactgttgtgactgatgttgcacaattgggcttgaggacgaagaatgtgagttctgcccttgatgctggatgtatgacacatcatagttagtcgagcattaagatgatgtatggcacacattcttcggctggccttcctgcttcacggttgccaattccttatgcttttggatggtgatgctacaatattttgttgtatgctctttattctccccgcaaaatacacaatactagtcaatggcgcgcgccagcgcttgcataggatttccctttttttactgggaaggtagagcggcacaacaacagtcgtcgcccacgcgtgcggctagatgtaccaacggccaagatttttcgcgcgacatggatagtgcgaatgtcgaggaagttgcatcggtttaataagaagaaatagctttcttgattgaccgttgttggagtacctgcctccaaaggtgtggccccccttctgtccctttgtgttgagccaccccagaaactactttgctggctttgctaaggtccgttcgaaggttggcttgttgttggagtttgcggaaactacttttctccatcaaactagggtgtagtctgaattgttcgggcttcccttgcatccttgttgaaaaccctcatgatctctctgtgtttctgttgttcttgtcaacgctgtcgaaagtcattgtgtgctctaatatattcatccatcttctgaaacagcttcttcaaggtttgcggaggctttcaggtgaagtattatgagcatgggtcaactttgagctccttgattgttgacttaatgacaattttaactagtactccttgtgcatgtactttgacttagacaaaccttcacatataactttgaagggattcatctacttcttgaaaacatggaacaatgcatgtgccatgactaggtttgtttgaaagccttggaaacttgcaatcgattgtttcttaagttgttcccatgtggttatcgatctggacaaagggatgagtactaggtttgagctatgccttttgttgacggagggatgagtaccaggtttgagctatgccttttgcggccataatatgatttggctaacattgttgtgtttctgccgaattatgcaatggttgcttcgtaactcatgaggaattgctttgatttcgactgcccatcattcagaggaagcatggacagtttatatgcagcttgccatggggctacctgcaaatcccttgagaacgaagatgcactatcatagatgaaattacatttttacctttccctatttcatagtcaccctttgcaattaagggagtacaataatgtcattttactgcgtagacgtgtcgcacacatcttctcttcgtagaagcttcttatgtctcctctccttcgaagtcctctttatcgacgacaaagctttgctttcaatgccttcggcttcatgcacctttggctcattcagatctaccgaagctttttcaaggagagcggtgatcttcctttggccttcattagctttctggacctgaaaaaccatctaaatattgatttcatcattttggaccttcgactagagacctccccaacaacaaccaaatagaaacaattgctggtttacaaatgccattaaaccctggttagagaagtgcaaatataattctaatgcagtcttagacatacttcacgcgagtgtgaaatgtaacgttatatacttgtatactgaccttgttacttaatcattgtgatgttttataatttttttgttatgatttcatgtttaatagctctgtacagcatgtgtgatgataacattgttacttcctgtgatgttatatcctctctatgtgagtggtgatggcctcatggtcatggaagtccctgaaatatctcctatgtcagaatacttgtccactcatgatgttattctttctgtggatggtctgaaaataaccagaactgatgattggatcaagattctgaaccaaggtactacagcgaaatctagggatcctgaattccttgaaggctctcatagatatgttgccactagttctaccaagggttattgcgtgcccgattcatggatagatgcaagcaaaaatctctggcagataagagacaagctgccttgcccagatgaactgatagccttcgaaaaagttatctgtaacgtctcaaccattttgacagagaagactagcataggtagtgaccagaaggaagttgagggaaaatattgtttgattgcgaaagatgtagtaaagcttagaagatgtggaaacggatggcacatgactgaagatgatgaaagtagctgtgcatgttttgaggatgagcactgtttggtacctgttctgaacccaggcttttcatggattgaggtctcctatgccaggccatactctttgagatgtttacaaaaaggaggaaatttgttatcatcacatactgcaaatagtaactttggacagagtccttgtgaaggatcttttgtttatgtgggtgatctgtcatcagcagcacgttcggttaggttatcccgctaccgacctcgatgggcacttctacttttcattgcagacatcccatatatcttggaaaatggtttaagtagcttgcttcatgcatctgcagcattggctgtaatcaattgcctaccggtgtattttctggatggtgaagcgattctggagactaccttaagctatgtagcttggtttaccccaagactgcaacgcagaattctaaaagtatgcagcgtggtgtggacgggtttattagtcattactttctcaagtatttgttattccacagtgctacattatggcgtatagcaaataacccatgtaattttgtcttgaacaaagagaagatcattttaatggaacatgccaactgtactctgtccattgtaaattataagttgttttgacttttatatatacataacttttgttaggctatcttcagtagactatccacgtactcatattcaagcttcactccttgaatagtgtagtctgtagtgtaaaatagtgttttaggtgactatatggataaactgttggatatgacgtatctacactaggt

SEQ ID NO: 39548 - DNA, 2479 bp, Zea Mays
atatgaatttcatgatttaaatcatattatttttcattaacgggttatgaacaaggtgatctattcttataattcgagatgaactgaattttgtttttctttcttttactttagttacatagtcatgtatcaattatttttgaactaagccatacctattttctgtctctggtttttctgtggtaaggtatcttactgacaggtgggtctaagcccatgtagcactgaaagatctcagtggtgaagttgctatatatatcggaaattaaagcaatgttccccagtggagttgctatgtatatatcaaaattaaagcatgggcacattataacttgtttccttgttaatatttcataaggcacagaactcatggactaagcttgctgtggagatcgacagtccacaagctatgtctctggaccagttagccgatccagccaatagcacctgtgcacaagtaatccactcaaagtcagagatatgtagccacagatggctaccaggtagcagcaacagaaactgcaagaagcaaaaatacactaatgatgactttaagggaaaagacttggagatagatggtcctggaaatctatatatggatcaccaatcttccccaaatgagagacccatcaaagcagcagatcatgaaaacaattccaaggagtcaatgatgggaaatttaggggatgcaactgttcgagctgctgacctaattggttcaatggccaaaaacatggatgcccaacaggcagcaagagctgcagatacccctaatttctcttctgaagtgccagaagggaaaggtaagaatgatgactttaagggaaaggacttggagataggtggccctagaaatttatatatggatcaccaatcttccccaaatgagagacccatcaaagcagcagatcatgaaaacaactccaaggagtcaatgatagaaaatttagaggagccaactgttcgagctgctgacctaattggttcaatggccaaaaacatggatacccaacaggcagcaagagctgcagaagatacccctaatttctcttccaaagtgccagaagggaaagatggtgccaacgatacagtcaatgacgatgaacagcggaatagtgcattaaggcgatcgaatctctcggcttttacaaggtaccatacatctgcggcttccaatcaaggtgggacaggattggtaggtagctgttcgccgcatgataacagctcggaggctgtgaaaacggattctacttacaacatgaagtcaaattcagatgctgccgcaataaaacaaggctccaacggcagtagcaataacaatgacatgggttccactacaaaggatgttgtgacaaaacccagcacaaataacgagagggtgatgttgccctctgctattaaggctaatggatacacgtcaacattccatcctgtgcagcagtggatggttccagataatgcgacagcagggaaagcgaaggctgatgaagtggccaacaatgcaggcagaaatagtcatcctggtgacgtgcagagcaacctgacgcaacaacatcgtccaacccttcattacgtccattttgagaatagtggatcaggtgccctgcaatgtggttcctccaatgtatttgatcccccacttgaaggccaggctaccaataactatggtgtgaaagccgggagcaactcaggcagcaacaaggggcagaataatgggagtacagctggtgcgagcacggctgctgcaaatgctggacggacagatacagagatacgggctatcgataaaagtggacctggaggtggcagtgggagtggcaatgacacatatgtcagacggcttgctgcgagcatgacaccacgacaagaacagctaaagaaatatagagagaaaaagaaagatcggaactttgggaaaaaggtgcggtaccagagcagaaagaggctagccgaccagcggccaagggttcgtggacagttcgtgaagcaagctgtgcaaaatcaagagggagatggagagagatgacccccccccccctctggcttcagctcatggttgttagacgtggcggttgatgattcttccttctctggtgtgatctgatatgatcgacaacacaccatccttccttttcttcattggtttcttcacatctagaatttactgcctgaccgggaaaaaataagctaggaacttctatacatgtgtatgcatttctaatcatgtagaagaataagtgtgtcttgactctagataattttaggtagagtcatgctcgctctcctacattatgtgatgtaactgaagtgttgttgtgttgtcatgtatggtcttggatcactttctgtcaatatattactagcccacaactactattaatttgatgagatgtatataattaaaaatattgtaatagtccttcctttggtaggtagacaacaaacaatcttgaattcagtgcatacataaatcactgta

SEQ ID NO: 39549 - DNA, 1804 bp, Zea Mays
caagccgaccgacggcgaccacctcagcagtcacccgcgatcccacgctctgcccccacctgacacaccctcgcccgcgcgcctcccgtgccccgaggccacgtgaattccccgccctgcccctaccgcccagcatccccagggggcatgccagtaatttccttccgccaccgtgtgccgtccggtctccggaccccggtgggctgtatcctcgcctgacctgcccgcctgcgctacgacgctgcaggccgggctctcgctcgtcgcgtttttatctccacccacctctctctctccgaaaccaaaaccgaccggcctcgctttcgccggttacccggtcaaacgcatcaaccgccggcacgtctccgatcggatcacgatggctgccccgtgcccccgccggtcaggccaggtcgcgtggtcacgtgcgacgcgcatgccgtcctcggccggcgccccagccccctcgccgtgtccttttattctcccccgcctcaccgcccgcatccccaattcacgcccccaccacgacttccgtgctcgccgccttctcggactaggggggttcggctcgagatctgatttcgggcgccggaggactacatggaggttagggagatggcgatggccgcggcggctgcggctgcggcgtccggcgggggaggcgtcaagctgccgccgcccaatcccaacctgccctacagggaggactgctggagcgacggcgagacggcagctctcgtctccgcctggggcagccgctacgtcgagctcaaccgcggtaacctgcgccagaagcagtggcaggaggtggcggacgccgtcaactcgcgccggggagcctccgcgcggcgccgcccgccgcgcaccgacatccagtgcaagaaccgcgtcgataccctcaagaagaagtacaaggccgagctcgcccgcaacgcgccgtccgcctggtcctacttccccgagctcgaccgcctcgtcggcccaaccctcagcgcctccgcctccaagagacccttggcgtctctgcctcctcaattcgctttgcccatgcatccaccagccgtgcggaggcccccgtcgccttcgccgtcatcgtcctccccgccgcagccgcctatggctttgcctctacccaattaccgccgtgggtccccgctccctgctgctgccctcatccagaaggaagccgcggctgctgcggctgctgcgtctgattcagaggactccgatgatgcggctggcggcaataatcacaaattgccccggtcgccttcgcgctcggtgtcgtcactctctgccagtaacaagaagcgctgcagagatgaggctggcagcagtgctgacaaaggtttcagagagttagcaagggcgatcgaagcttttgcggagatgtatgagcgtgtggagagtgctaagcaaaagcatgtggtggagatggagcgccagcgaattgaattcctgaagcaactggaggtgaaacgcatggagaatttcgttgatgcccatgtgaagctggctagagcaaagcgcacgaagaagactacagggggtgctgccgacggtgctggtggtatggagttggttgccaccgttgctgcgctgcctttcgtctccacctccaccttcctctgatattgaggaagagtttagatatggacaatcacaagattgttatgctttatcagagatgtttttaatgctttaacttatgaacttaagaatgggttagtctgttccaagtataatctgctggagcataacaatcctttggcacctctagcttgtgcttgagaatcttgta

SEQ ID NO: 39550 - DNA, 3382 bp, Zea Mays
gtcatagagagccacaggccacaggcaggcaggaggatcggacgagtcagcgaggaagctgcctgctttcagatagagagagttattaagatggcgttgcttcggctgcttgccatctccctgctcttcgcagtggccactcctgtcagggacatcgcccacgatgcctgctcgtcagaagtgaaggatttccagcacctgaacaacagctcggggctccacctgacgctgcaccacccgcagagcccctgctccccggcgccgctgcccgccgacctccccttctccgcggtgctcgcccacgacggcgcgcgcgtcgcgtcgctcgccgcacgcctcgccaagacgccgtcctctcggcccaccttgcttgacgagagccgcgcggggtcgtcgtcgtcgtcgtcccccgatgacgagtcgtccctcgcgtccgtgccgctcggcccgggcacgtccgtcggcgtgggcaactacgtcacccgcatgggcctcggcgttctccatcctggacacgtgcttccagggccaggcggcgcggctgcgcgtgcccgaggtcaccatggccttcgcgggcggcgcggcgctcaagctggccgccaggaacctgctggtggacgtggacagcgccaccacgtgcctggccttcgcgcccgcccggagcgccgccatcatcgggaacacgcagcagcagacgttcagcgtcgtctacgacgtcaagaacagcaagatcgggttcgccgccggcggctgcagctgagaagcgacacctacatacacgcgcatgcacagaccgactcggtaactaaaactaaaacgaacagcgcatgcatgcatctaccgtccggtttcgtctgaaaccatcattaatttcgatcgtccactccacgcacagcaagttctttacggagcttgccgcatatgatatgtacatggtgacaagataaggtacaggagaattgatgaaagaagcgttgccggccagtcgtcgttgcacgagaacaaacacataaattaaaacattattacaggagtagggtatttattgtattgttcaggccagaaaaatatgtggaaagtgggtctttaacttaattcggaagaagcatatagcactccaaaaaaaaaaaaagattcatattcatcacatagccaacagatagcatgtagtagctgttcatgcatgttattcttttggcaagtcctggtcaggaagtactatttactgtgtgtaggacgaataaactgaagtgatgtgtatgtttctgatttctttcgtacttgcaaccccgggcccacgtggtttttttactcccttctatatatactgtggaaaatattgtaacccacgcacaagacacacactcctatgctatatatgttctatgcacaagacacactttgttaacgaacaaagagatcgatgatgcaaatatttatcactatatatatatggctattgttagtttcgtgccttttgcacgatgaatataatggttgaacatgcatgggacgaacaggtggttagcaaatctgtacaagaattcattcacatatcacagtcttcaacgggacaggcctttggattttgatgaggcaaaccaatatctagagaaatgtgaaagagataaatcgcgtgttcttgttcattgcatgactggaaaaaacaggtccgctgctattgttgcagccttcttgatgaagtctagagggtggagacttgcacagtcttttcaatgggtgaaagaccgaagaccacaggttcaactgacagatgcttctcagaaggagcttttggagtatgagctgaagcttttcggacccagtactcaaaccttggttcccactgaatcatttgcttctcttggatttggttatacaaaaccagcaggtgacatgcaaacgcctgtgttcaaccaaacgaccatgccatccatattcgagcgattcaacccaaatgatcgccccgccaatttcacttttggagttgagaggaaagcagaagctaaccctcaagataacaatagtgatggcagggtaaacccaacttcaacggagaacctgatggacagctcttaagatgatttcacgatgtcgctgttcaatctccttgttccagaagtaaacccgctgtaatctgcatgtcgcggaagtaaacctactgctcggtgcctcggcgcaccgaatacttatccggtgtctaggtttcagggaggttttgcccttgtcggatgagaaatggttctctggaaaccgatctttgctttagaatgactgtatgaaatagatgtttgtggctcatctatctgttcctttctcgtatagtttctgattgctattatatggataaggcatagtgcttactgcttaccagtcgggtcgtttatttggtcatgtatatatgtagtcgtccgtaaaaggagaggagagatttttcaggtcggcagctggtggtgacgtgatgagttttagatctttagtccaatgcaacaggagattaagaatctagattatcgcctttttagttcgaaggtttgagaattaatgacagattgataaggtaaacagttatttatttatttattttagtttgtgaacccaactgagtcaattttagagacctttagtcaggtgcattttactcttttactttctcaatatgatgtgtagactactctagaatttctacggatacaatcacgagcgatgtacctgacaatcatgagagatagcgtcatagcaatgtacctgacgagtgatgtagtcatgtacctggacggatcgtcgaccaactggacaaactcaggatgatctatctgtatatggatcaactttaggtcttgtttgaatacgtatctatccataaatatattatattcacatagattaagagattaaggtggatacacaagcaaatcctacatgcatcaaaatattatatccacacgcgtatatagtaactagtgcaagtctccatccactagacttcatcaagcagtatgactttcacacacaactggagtacaagtggaagctgacgcaccgcaggccgcacaaggatccgcaagcatcgaccatggagatccgcacgacgtcgcttgtcacaccgccggtacagccccacgaggtcctgcaagaagcaagatccacacagatcaggaaactcagaagacgaacaccaaagagaatgcagaccacagcatctggtgtctcttccctgccatcatctactcatctcccaacttataacctcaaagaagacaaggacgagtcccctgatccgaacttaccactcttcctgcctattcgtttggcattggcacacaacattgtcgtcagagaaaccacggctgctggtcggcaaggtctaagaacgtggtag

SEQ ID NO: 39551 - DNA, 1192 bp, Zea Mays
acagcgcctccataccatacccgtccccgccgcccggtgagatgccgaggcgcgagcgcgacctgccgcagcaggcctgacctcgcgtatctctcaggagtcaggactcctgaagatcagtttcgtgccttacctcgagagcgcctcctgaaggcatcctttgtggaacagaggaagttgaccatgctcttgatatgttcaaacttatgaagaggtgtgagttagtggatgctcgtatatatgacctgcttatagaaaagctttgtaggattggtagatttgaaattggaagagagctgtgggatgaagctacaaatagtggtcttgtattaggatgctcacaagatctgctcgatcccttgaagacagaggtattcagaccaatctgtccagcacaaagattaagccctcagaactataaacgcttggcctggaaaaagaaggttactgctgttggagtcaaaaaggacattgctatctcagcctcaaggaagaagtcgggagtgtaggaagctcgtgcatcacaaaagcaagaaggcttggtgttcctactcctgtactttatgctgtggatccacttctgcatactttgacagtatgtggatggcttgtctgtcaaggatatacttcttggttttggttcagatggggttaacgaggaacgcctggatgatattagtatcacacagataggaaacgtcgtcggcaaactacatgatggaggccttgttcatggtgatttagaactgtaacaattaattggtggttcttattgatttcggtctgagttttatataaataattcccgagggcgaggacaaagcggtggacctatatgtgctagagagagctttgatctccatgcattcgtcccgtggggatgtggtgaggagactgcataaattggcatccaagttgtcttttgctgattatatgcatacattgattcctttattcggtgactttattttggggaggccaatgacgtatacgggttacggttacataagcagccaacaatattggattcatcagtaattgaaatgtctggtcaatatttgggtttgcttgagcttggctgttattccgcacttgggtccgactaatctgtgccaatgttttctggctatatacaacacaaaactagtccatccgcatcgtggatttgttatttttttcctttcgtccgtgg

SEQ ID NO: 39552 - DNA, 771 bp, Zea Mays
gctgtgtccatgacatctcacatcaagcggatcgcggggtagatttggatgctgcatcaccaccaaggaacttggaactgtgatgcgctcgttggggcagaaccctactgaggctgagcttcaggacatgatcaacgaggttgatgctgatggcaatggaaccatcgacttccctgagtttctcaacctgatggcacgcaagatgaaggacaccgactctgaggaggagctcaaggaggccttccgcgtgttcgacaaggaccagaacggcttcatctctgctgctgagcttcgacatgtcatgaccaacctaggtgagaagctgacggacgaggaggtggatgagatgattcgtgaagccgacgtggacggtgatggccagatcaactacgaggagttcgtgaaggtgatgatggccaagtgagatgatgtgcctgttttgaagctagttcctctcttgatggtagtagctagtctagtgttggagactgactgcatttggtccgccttgttcctctcgctgcatcaatggacatatccgtttgttttctcccaagggattttaccatgtcggtaatttcgttcaaatttgtttatggttgtattaacatttgtgttatcttggtacaatgatcatgcctttcccttctaaatttaggtgttgaatttcttgtagaaatacgtggcatgcatgtgcagatatatccgattttgtttggttttctcgttacttgtgctgtaattctttcgcagcattattacccaacgatt

SEQ ID NO: 39553 - DNA, 653 bp, Zea Mays
cgctgccctcgcttgagggaatgaagtttgcagaacaagattcggatggctcggcacaaagcacagctgatatgacggcttttgtgcaaaaccttcttatgcagatgcaaaccaggttccaagctatgtcggagaacatcatttcaaagatagatgaaatgggtgcgagaattgatgaattggaacagagcctcaatgacctcaaggctgagataggcggtgaaggcatgtcgacgccatctaagatgaaggaagagtcaagaccttcagacagctccgcatgagtgcagcagaagcagcatgactcgtttcagaggccgttgctgtgtcttgggcgttcatcactaacaaatacgtacctgttttaaggtctcatttgagcaagagattgtaacccgtgctacttgtgttttgctgaatggtttgccataaattgtacccgtcttcgttctgtgtagacctacccgtggttatgcgctgagcatgtagtgacagctgctagaatgctagcaccccaattactaagaattcgggattcgcaagcataatttactttgcttctgtgttagttttatcacttacatggatagtagtgtatatatttttaattggcttacatattaaattcatgttcgcaacataatttactttgc

SEQ ID NO: 39554 - DNA, 2712 bp, Zea Mays
ccgtgctcccccgaatttttttcctctccccttccgagttccgacctcgtcgccccgcggctccagctcttcccgttcattccctcgcgccgaagcaactccggaatccgcctgcgcgccaaaaccctagccccagatcccgcgccgcgccgcgccgcccggtgcccagtcggcggcgcccgcgccggccattgccgctcgccgcattgggggcgcttacggcgtctcctccgctcccgaagcagagatctgggccgaggagacctggttgttcgtgggcggtgcaggggatggggcgcgggcggtgggcctcggggatccgcgcggcggcgctggtcctgctcgcggtcgcggctgccgccggagccgccgcgggggatcctgatcccgacgagctcgagcgcgcgtttccaatagtggagccagaccacgggcacacaaaacttcgtctctcagaacaaggtctagaagcaattcgaaggattgaaactcctattgctgttgttggtgtcattggtccatatcgatctggaaaatcttttctcctcaaccagcttctctccttatcttgtgataaaggttttggagttggtcatatgcgagatactaaaactaaaggtatttggatttggggtactcctgttgagatggatgttgatggttccaaagtttctgtcatttatctagacactgaaggatttgaaagtgttgggaaatcaaatgtgtatgatgataggatatttgctttggcaactgtcctaagttcggtgcttatctacaaccttcctgagacggtacgtgaagctgatatatctaggctttcatttgccattgaaattgctgaagaattctatggaagagtgaaggggcaagatgttgcttttgagccagcaaagcttctctggcttatccagagggatttcctccaaggaaaatctgttcaacaaatggtcaatgaagcccttcaacgggtgcctaatgataatggtgacaaatatattgatgaggtcaatcaaatacgagattcgttggcagttatggggaacaacagcactgcttttagcttgcctcagccgcatcttcaaagaacaaaattatgtgatatggaggacaaagaacttgaacccttatatgtaaaacggcgggagcaattaaagcagcttgtttcgtctattgtaaaaccaaaaattgtgcagggcagaactctaaatgggaaggactttgtgtctttcttgcagcagattcttgaggctttgaataaaggcgaaattccatcaacagggtctctagttgaaatttttaacaaagccattcttgatcgctgtctgaaggcgtacagggagaaaatggatggcttaggcttaccagtaccggtagacaaactgcagaaacttcatgagatggcaaatggtgatgctagaattctctttgataagcagcactttggcaaacatcatgctgctcagtcagctctcaagcttgaagatgatattaaaaaggtgtacagaaacttacttctagctaatgaatatcaatcgtcaaagctgtgtgaagctcgcttttctgagtgtgaagataagatggatcaccttcaagtcttgaaacttccttcgatggcaaaattcaatgcaggctttactcactgcaaccaaagtttcgtaaaggaatgcgttggacctgcaaaagaaagctatgaacgtagaatgtcaaagatgcttgccaagtctcgtgctcttttcatcaaggagtacaataacaagcttttcaattggttggtgaccttctctttggtcatggtggtcatcgggcgctttgtcatcaagttcttcctacttgaaatcgccgcttgggtgatgttcatcttcctagagacgtacacgagaatgttctggtcagcggaatcgctgtactataatccagcttggcacatcattgtttcttcctgggaaaccatcgtgtacagcccaattcttgatctggacagatgggccgtcccaattgtcataatgctattatttggggttctttactggagatgcttcggtggtagaaggaagcggggaaggggttcgctcctcccattgtacaagaattcttataactcgagtcgtcgctcgagatcagactagttatacacgcaatgttgaagttattttcttttaaagaatggtacaaaatatctgcctgtagaagaggctaaactgccgaatgtggatcatctgcaagtgcttttggatgggcatgttttgaattttgatggtgccctgccaatgtatctccaattctttttggtggatgaagagaggcggtgaagctgctagtatgggggcggggcacctgcacaaagcctctgttgtaattcgtaccggggtactttttgtgtagctaggttatccttacatgtcacggtcccaattgattgattattgtttacgtccactgcaattttttttggcaagaattttgttttttaacgtcatagatagaaggtagctgttagagcgtgtaccgtgtcaatcatatgttaaaagttataatctggtggtggaatttggaaacgttccttgtttatactgttgttatacagtttatatccacatatatgctatacttctggctaggagctgtgttgtgtttatgttttgcattaagccagtggcactcagaactagcgagtggcagagcgtgctcttcgatggaaaccgaacttgc

SEQ ID NO: 39555 - DNA, 2001 bp, Zea Mays
cccaggccccaactcgcaagtcgcctgccagcccggttagcaaggaagcacgcaggatatttggtgcgcgcgggcggtgtgagcggtgagcctgcaaaagccagcagcagcgagcgtcggtaggggagcccgggcagcggagcacacttgccctctccacctggaaccccgagcaggctccgccggccacggccggtgccgcgacgactcggcacgcgctagctagctagctgttcctcttcccgagggccccaccactaccaccatcctgccgcccggcctcgtgtggcggatgatgattcctagggagccgtggcggccggagcacccttccaactcctgatcccgagctgacccccgccatcgcagcggcggctctgccgcagcgtctgtgtccagggattgattttccttttcagcatgctaggaataacacctttagctgagcgtttaggatatgcaactgagcagcttgcaatatacactggtccaacagttggtggccttctgaatgctacatttggaaatgcaaccgaaatgatcattgcagtatatgctttgaaaaatggaatgatccgagtagtgcagcagtcactattgggttccatattgtcaaatatgctgttggttatgggttgtgctttctttgctggtggtgttgttcaccgcaacaaagaccaaatcttcagtaaggcaactgcagttgtcaactcaggtttactgttgatggctgtcatgggattgatgtttcctgccgttcttcatttcactcattcagaagtgcgtcaaggggcatcagaggttgcactttcaaggttcagtagttgtattatgcttgtggcgtatgccagctatctctatttccaattaagtggacggagcaacatttacagtccaataggcagtgaagaggcgcctattgaggatattgcagaggaagatgaagaagctgagattggcatgtgggaggcagtaacatggcttgcggttttaacactctgggtgtcttttctttctgagtacctagttaacgccattgagggagcatctgattcattgaacctaccggtggcttttatcagtgttattttgcttcctattgtgggcaatgcagctgaacatgcaagtgcaataatgtttgccatgaaagataagcttgacataacactgggtgttgcaattggttcatcaacacagatatcaatgtttgtgattccattttgtgttgttattggttggatgatgggacaaaggatggacttgaattttcagctatttgagacagcaactctcttcataacagtgcttgtggtagcatttatgctacaggatgggactgcgaactacttgaaaggacttatgctgatcctatgttatctaatagttgctgccagtttctttgttcatgttgatccacaatcaagtgatggttgatgccgtagatgctgtaagtaatgcgtcaaataccttttgaaacttgttaatcctttcttgtggaggtgctactccatagcaacgttccacctgtttcaagcagcatgctggcaaaaaaaaaaggcgggaagatcacacattgtcggttccttcatgaaccgcaaaaggaattcttgtattgtgtggataatgaggtgtactaggggtagtctcaatgtatacagaaacaagaagtgccagcatgttacattcgattaattggatgggtgagtccctctttttttttctggttccctttgagatttgggtatatgatttgatgctgactgaggctaagatctctcatccttttttgtggttgatgatgtccgcgcactcatggttctacatctacgtttctttttcttccctagtgattatgtgtacatttgtggttgaccatgtccgcacagtcacggatggtcataccccatgtgaggatcttaatactctaacgccgcgcaaaaattctagtattccttaaaccaaacacatcttgatggcaaatcaatttgtatggcttgtcct

SEQ ID NO: 39556 - DNA, 1732 bp, Zea Mays
ctccgatccagctggtcagtagtgatcagtactagctagctactaccaccgcccccaaaaccattccacctctcaagaacagcgctctggcagcgctggtagtgtagcatcgcgcgttcatcactacgctactaggaatcatatatcatcatcggtcgagagagagagagagcaagcaagtttcctccggcggccggagggtacgtaatcgatcgccggccgccacagcaggatgagcaggatgggcggcaaggactgcgtgccccccgtcgccatggtgctcgtgcagctgggcttcgccgtcatgaacatcgtgtcgaagctggcgctggacgcgggcatgagcccctacgtgctcatcgcctaccgcaacctcatcgccgccgccgtcatctcccccatcgcctacttgcttgagagaagaagcggggcgacgatcacaaagaaggtgctcctgcagatcttctgctcctccatcttcggggcaacgctgaaccaggtgctgttcgtcgtggggctcaagtccaccagcgcgaccgtggcgtgcgcgctcaccaacacgctgccggcgctgaccttcgtgatggcggcggcgctcaagatggagccggtgcggccgggcacggcggcggggcaggccaagctggtgggcacggcggtgtgcgtgggcggatccatgctcatacccttctacaagggccccgtcctcagggtgtgggcgtccccgatccactggcgcttcgcggagcacgcgtcgccccccgccgccgccgccgcggcaggcgcccacacgggccccgccgcggtgctcggggacgtcctcgtcatcgccagctgcgtcgcctgggccgtctggttcattctccacaccaagatctcccaggggttctccgcgccctacaccagcaccgccatcatgtgcctcatggcgggcgtgcagtgcgcgggcgtcagcgccgccctggaccggagcctcgccgtctggaagctcgggttcgacatcaggctctactccgtgctctacatcgggatcgttggctccggggccgggttcacgctcatgtcgtggtgcatccaggtgcgcggcccgctgtacgtgtccatgttcagcccgctgctgctcgtcatcgtcgccgtcgtcggctgggccatcctcggcgacaagatacgcctgggaagtgctatcggctccgtgctcatcgttgccgggctatacatggtgctctggggcaaaggaagggagatggacagaccgggcctcgacaacgacaaaggcgacgaggagaccgccgccgcattgggccttgcggtcgcaagcagcaagggtggtgcggtcgtcgtaagcagccgtgtcgacgccgtcagcagcctgccggtgttctccacaacaactagccccaagaggcagcaactcattcacggatgaaatagctagtgggtcggagttggaggaactggccggggcgaagacggcggcgaagattggattggaggggcataactacagacttgtgcacggttggttgcattgcagttgcatgcagcagcgtcagagtcgtgtggtctgttacaaagaggaagcaaacaaacaggagtgtgatgtggctgtactagtgcctagtggaagctggaagggttgcttgctaccttggatgatttcgtgctactgtcgttgggcttctctgtgtgcgctgcacttcacttgaatgatctgatttggttcctccaaaaa

SEQ ID NO: 39557 - DNA, 1992 bp, Zea Mays
attccaaacgtccctgataacacagtccggaaggaccttttctcgtttttttctctcgctagcaccttgcctccttgcgatttgcgagcgccgcatcgacccccaccgccgacgaacgccgcgccgccgacgtcctgccttctcctcgccggcgagcgccgttccgctgtaccctccgtgattccgccccaacctctgcgtccgaatctcccgcgaaacagtcacggcgatggcggcggccggtggcgtttcaactgacgatgtcccgatcctgcaggcagagaacctcaccagcaacgtcaagtccgtctactacagtcgaacattcttgtcaatcattggtggagttgttgctggaatctggggattcacaggcttgatggggcgtacttcgatagttggaccaggatttcaattgaaggagtttttggtggcctgatgtcattcgtgctgttttggacgtatcctttttcgttgacaatttaaaaacagtactattcatactttatttctgttcttcttgtgcttatatagattatttgattagataggctgaagattgcaaccggctgggatggtaaaccaacatgttcatactccactggttgtagattgggtaacatgctgctattatcgagggactgaacgcctaccaacgaatatttcagatttgtgtttactgctgccatatattttgtcattgtggaatataaataaaaattcaacattttagacaatcatagaaaacaatcagtgaaccagcaaagcagtttatttttttctaaactcaaaacatgtttatgcgtctttcctatctatattcatctgttttcagtgttggtccgtttctgcatgagttcatccttgacgacgtatatagatttgcttatgacattgttcacatcttctgacggacatagaaagagctacactccggaggaaacacggaatcgtcgacgatgaacattcccaattggctttttgtacactcaatttttgtattggtaattgatatagtctgtagtgagactatatcggtgtagacctaagcaaagctcatgaactttgcatttccttggatgatccgtagcagttgcaatttttcatttcaagtgatggatatgaactttgatgttttctggcacaatgttttgtaccctcgagttttctggcacttcgattgatgtacacacttctcaatgcttcaactgatcgagtcactgttaactagccatgtgcgtcttttggaggaactacccatgttatttccaaatcaaaatgcgtccgtgatctaagaagcttcagcactgctaactgaacccatctcttcttatcaggccgaaattttatacacgggcctaagcccagatccaaacttccaaacgcatcttcctctcccatgctgcatcccgcagccagaaccctagcctcgtcgccatggcctcctccttgctccgctcaggcgattgtcgagcgaatgaaggcagttggcgccaaggtcattattgactgattagaacaagccttttcagtggtgaggtcctgcaaatttatgcttcgtttcggatcaacttttaagtgcaaggatggatgagtggcttgtggagaattctcctctatgaacttgtggagaattgatgtggcattgcacaaataggttttcaagcgcgttaatcaaatgaacttgtagagtattgtatcaatgatcaatcactcatcattatgttgtcggatgtgacattagttgtggggctttgggatggaaatggactattatattgttatttgctatgaagattttgtgacctttgaattacaaagtaaaaatgagttacttcatttccaaattgtaagttgtttgggcttttctaaatacataacttctactgtgtatctagacatcatgtacatggagacgcgtggaaaaaaaagatatgtatctgttcataagagtatgctgttttggacaaagtcgcccatatggataacatt

SEQ ID NO: 39558 - DNA, 1008 bp, Zea Mays
gccactccatctctctctggcgcatgggaccccccctctcctgcttctcttcctcgtagggcacctctggcgggttgttgcgctgcctgatatctccaccgcccacggcctcgccttgtcccaactacaaaagcgaacccaatccctcttgactcctctcatccgcctcgtctaaccaccaccacgagggagagttaaagtcgccagtacagaagagtgaaggggagagggttgctgggtccgattcggtgggctcatcgccgtcgggtccacgaattggtgcctaggagtctcgcgtgcttcggggacataatcgatggtctcgctgcggtgggttggtggctggagacctcagaattcgtcgtcatagtgcgagctcctccgcgtgtgcaccgtgcgccgtggccaggggtgtctgcgctgcaattgccaggcatacaagatgacgatggtgcaatgcaagtgtttggtgcttttggttgatagaagctgctggatgcttttggtatttttgaaagatgcaagtcgtgcttctggttgatacttagaagttggtggttcaaaactgaaaaacctgtcaggctgtcacttgcttttggtttcttgtcaaactgctgggcgcctgaacactgctgtgcaccgtacgtcaggctgtcctcatgcatctgttaacagatcttttgtcctctgctgcttagactgctttatgaaatttgaaatgtgatgagacttatgccttatggtgactggtgatagcttattagattagagtatcatacttttggtcatggtcttatggaatatggaatgtgatgggatcattggaccgcatggtatgggtcatggatgtgtaaataaattataatttcattatttcatctctcgtctattaagtattaacagtttattactgtgttgtctatcttgtgacctgaaaatagcttcaaatctgtaacttatgcttgctggcaaccgaatctgtcacctgggcgcagtggtggccctgag

SEQ ID NO: 39559 - DNA, 2521 bp, Zea Mays
ttcgtccgcccgcatctaaattagcggagcgcaaaaggaaatatagccagcgcgcgtggaggcctcctctcctgagccagcgcgtggagctctcccagacggccgccctcctcagccagctgcccacaacagtcagccgaccggcacagcagccagtgcgagtgtggtgtgcccgtcaagtgcggcaagtgcggcagggcgaccgtcgacgcgggcaccctacgcaagccttcttctccagggcgtcgtttgccagcgacgagcaccaccaggtgctttgtgctaggatagcagtgctatgtcaaaagctccagatgatcatttgcaagcaactgagcaggaaggaagtgtccattcaagtcaacaagcagggcaacaacatgtgaatacagcagaccagttctcaaaaacagaactaactgaaggttcaaaaattgaacagcctgtccaagtagagcaacagagttcccacctacaacaagcatatccagaaattcaactacagcaggctgaaacagatagcttccagttagctgaaaaagaaacagggtattttggtcaacagagttctgcaggcgccaaggtggatgtagcccagccttcagtagttcagcagaatgcaaagcaaactgttggtcaacaagcatcatctggtacccaggatacaaagaaaggaccatcgataccatttaatatgttaattccaatcctacaggcacatcttgacagagacaaagatatgcagcttcaaactgtttgggcaaaacttaggcgtaatgaagtcaacaaagatgatttcttaagagttatcaggaatattgttggggatcaaatgctcaagcaggcagctcataaagtttttgtacagatgcaagcacaggcgcaaagaaatagccaggcaaattcaagtcagcagtctttattctctcaactttctgcacagcagatggcttccagtggttcagcacagttacatgatcagaaaattcggccacctggaccacccaaccaaggccagaaaaaccaggtgtcatcttcacctcaggcttttgcaccaccatcaggcacccaaccgcagaatagtgtacactatcttgctcatgataaccctaaccaaaaccctgatgcaaagggaacaaatgttgtaccaaatcaaccatctagaatgaacacatcagttccattgcaaacaaagaacaaacagcatcaaccaacacagttgcagcaggcctcacaacaaatatatggagcaagtaatcctggtgcccaggcttaccctcggtcaatcactggttctcttagatcaccgagtcttgttccagaaacacagccatccatgcatgctcctggaatggctcctgcaaaaatggttcctcctcctactcatccaatgatgcagcacaatgcaactgcatggcaaatgcatcaaaacagggaattgaaaactaacgctccccctccaaatgctaatatgaagcaaaattctgaatctgttggcaaagtacgcatggctggcacaggaaattcttcagctaaaggaaagcagggaactcctaactctacaccaaatgctagtggaggtacaaagagtagcaagaaatcgggtgggcagaagaaatcattggaagcagcaggctctatgcaaccttcaagcaaaaagcagaagacatctggaggctcccaggaacaaagtatcgatgaactaaatgatgtcacagccgctagtggtgttaatattagggctgatggcagtggtgctacagaattggaaaaagaaaaagaagaaagtcgcccaaagaacgtcaagcccaacaaggaagaagatgataaaatgagggcgaatgctgcaaacgtcgctgcccggcaagcagttggaggaagtgatatgctctcaaagtggcagttgatggctgagcaagccagacagaagcgagaaggcattgatgtgtctgctgcttcacagccaggcagagggccaggttccaggcaattatccaaatttgggaaaggtcctggtgagcacccagaaggttcaaagaggagccattcgatggcattcggaactggaggcatgaaaagacccggcaggacagcgtttgctggtccacagcgattgatctccgtgaaggatgtcatttgtgcccttgagagggagcctcagatgacaaaatcaaggctaatctaccggctgcacgagcgattgcctgtagattctaccgtagattagaccggaatagtcatatactttattgtgggcatgcccaattgcccttgcatggtattgaacagcgaagaagcatacccgccactcccatttgttgtgctttggagcggcactgtatattggtgtaaaatttgtatcgcaaaggcggcgaattaccagcaaaaaagggtttctgtacaaaattcactgtaagcggggtctggcatttgccttttctgcaaccacgtctgtgaggttatttctagcagactactcatctcaatatctatatttttaagggttaattagatttttgcc

SEQ ID NO: 39560 - DNA, 2086 bp, Zea Mays
agaagagagaagagggcgggcatcggccagtgggggctctgaggccgagggaggcgaggaaagcggcgggtgccgggccgcccgcgccggtgccgagccgcccgcgccggtgccgaggccctcaccagtcaccaccccctcccctcttccgtctgtcccccgcttgccgccaccgccgctgcccgctcgcgatccttcccctttttaacgctcccgcggccccgcgtcgtgctcccttttgtcgccgctgccttcgtgcccgtactcgcgggttctcctcgctcctcaatctccgcgcctgggcgcggcgttcgccgccggatctgggcgcgggacggtgccccggacggtcgatggcgcgggcggcgctccggttgggcgaccgcgcgctcgcgctcctcgtcctcgtgtcagtggctctgcttccacttgtcagttccgacgatggacacaaacactgcgagggtgttgtcaggggctgggcggattcctccacggggcgcgtgaaggacggggacaaactgagcctcaaggatttgctcttcttcctccacattcctaggactggaggccgcacctactttcactgcttcctaaaaaagctgtatacaaatgcgcaggaatgcccgcgttcttatgacaaactacggttcgacccaagccatcctgattgcaagctggttgttagtcatgatgactatagcttaacttccaagctgccaagggagagaacatctgttgtaacaatactaaggaacccagttgaccgtgtatttagcacatatgagttttcagttgaagttgcagctagattccttgttcacccaaacttaacttctgcaaagttaatgactacccgtgtgttaaaaaagtctcgtgctgtcagtactttggacatctggccttggaagtacttggttccttggatgagagaagatctgttttccaggagagatgccaggggtatcgacaaagttcatagtagtaagaaggttaatgcatatgatgtggaggatatggttatgccgttacatcagtacatcaatgatccagttgcccatgagatcattcataatggggctacctttcagattactgggttaacgaacaattcatactttgatggagcacatgaggttcgacattgtgccagaaagcatccagatcttggtcgtattgtgcttgaagttgctaagaataggctggaccagatgctgtatgtaggacttacagaggatcatgaagagtcagcgaggttgtttgctcatatggtaggagcacaggtgcttttacaatctgggacattgagtttggatctcaaggaagatctgcacagtgagactggatttgatttatttggtgatggagtatgtgcactccctgatcaaaatgaatactcacacccatccatggtggagcccggggatgaagaagcaagcgaacatctgatgactgtgggtaaactgatggaagcttatgaaacttgcatcgctaaactgcggaagtcccaatctagccgtcgtaaaatatcactaaagaaagtggaggaagcaaacttctcaaaagaggcacggaagctggtccccgaggcaattttgaaacaaattatctcgctgaacagccttgacatggaactttatgaccatgctaagaaaatctttacccaggaacatctgatgctgaaagctcagcaatccatggcggggcagcacagacagttggcggaacaagaggagggctggatcggcacgatgtgcagcgacgggacttgctctccctgggtggtggtcttgctgggtctagggatcaccacgatcctagttttggccacattagctgtaacgacgagaaaaagaacgtctaaacttaaggtttaaccagaacttttcatgagacaggtctctagattttggtgtacagtctgatgaatgccccttagcaatctttcggggcagaggtgctagcgtgcgcagaatcatcatgtactaactcgtgcggtcgtactggtatcttcacacaatttgagatgccgcggtggtagtgtggacgtgtagtctaaattgccactccataagaaaaaagcagc

SEQ ID NO: 39561 - DNA, 2678 bp, Zea Mays
gtaactctgatcccaatcttggcagggttatgcgaataggttgaggtggagattgactcacacaagcaagaccaggagcacgtcccaactttgtctattgaagcaacactcattgataactctggactatctaacagtatagatgctgatctttcatccgctaatgcagtcaatttgaaaccgaagccaaaacgaactcgaagcccttgtcttggttttcatggttatgtacttggtggaaaaatagaaaatccaaaactttggtctagtgagcatatgccaatgggaagcttattgactgtgaatcatgccaagtgggcattcgtaatgtggtcatggcacacaagcaaatgctcgtcaatggatgtcctgttgtgctaagaggtgtcaacagacatgagcaccatccacgccttggaaagacaaatttagaagcatgcatgatcaaggacctgattttgatgaggcaaaacaatatcaatgctgttagaaatagccattacccacagcacccaagcatggtggagagagataagaatcatgcatgcattattgtttggtctctaggaaatgaatcttcatatggacctaatcatgcttccatgtctggttggattcgtgaaagggatccaacaagactcctccattatgagggaggtggttccagaacatcatccacagatattgtgtgccccatgtatatgcgtgtctgggatgttgttaagatagcaaaagatccatctgaaacaaggcctctaattctttgcgaatattcacatgctatgggaaacagtaatgggaatattgatgcgtattggatggccatagacaacacttttggactccaaggaggttttatatgggactgggctgatcagggtttactgaaggaggactcagatgggtctaaattttgggcatatggcggcgactttggagatactccaaatgactccaatttttgcctcaatggcattgtgtggcctgatcggacgattcacccagctcttcatgaagtaaaataccttcaccagcctatcaaaatatcatcagcagataatatgcttaagattgaaaatggacacttttttgagacaacagaagctttggacttcagttgggttcttcatggagatggttgtgtcttgggctctggtccattgaatattccaactttggcaccacaaactagtcagctcatcaacatggaatcatcaccttggtttgccctttggagtgcctgtgcagcaaaagaagtatttttgtctgtgaatgtgaaacaaaggcatgaaacacgatgggctaaagctggtcatctcttggcttcagcacaactgtgtttgcctcagaaaaatggctttgtccccagcgtgatagcattgtccagtagccctttggtctgtgaacgcattggtgataatgtaaccatctgcaagaataatgcctggaaaattaaagtaaacagtcagttgggaacaatcgacagctggaaggtcaacgacgttgagcttatgagcaaggggatactcccatgcttttggcgcgcaccaactgacaacgacaaaggaggtttcttcaccaagccatatgactcgcgatggagagaagccttcctcgacaatgtctcgttccacagcagccagttctctgtcaaggagttgccggacaacaccgtggagttctccaccctctactacggtgttcccgggcacctacccaagcctgacgacgaagcctccgagtccattctcttccgggtgaagatggtatgccggatccacgggtcaggcgacgtggttctcgactacgaggtaaaccccaggagcgacctccctccccttccccgggtgggcgtcgtgttcagcgccgggaggtccctgagccacgtcacgtggtacgggcgcgggcccttcgagtgctacccggaccgcaaggcggcggcgcacgtcggcgtgtacgagagcagcgtggaggagctgcacgtgccgtacattgcccccgtggagtgcggcgggcgggcggacgtcaggtgggtggcactccgcgacgccggcgggctcggcctgtacgcgtcggcgcacggcggctccccgccgatgcagatgagcgcgagctactacggcgccgcggagctggacagggcaacgcacgtccacaggctggtgaagggggacgacatcgaggtgcatcttgaccacaggcacatggggctgggcggcgacgacagctggtcgccgtgcgtgcacgagcagtacctgctgccgccgacgcggtacgccttctccctgcggctctgccccctgctgccgtcgtcgtcgtgccatgacatctacaggtctcagctccccagctgatggtgccgtgtgccggagacccgtcgacgtcgagccttgggaaacaacaatgaacgcaatggcctggccagtgaatgaaagtatataatattgtaataaagcagagacgtattagctcctgcaacggcctcgcgatcgcctggatatgtctatgctgagggggtgtttagttaactaataacctaactacatatggcgccaagttactaaaacttaataaataactattactaactaataaatagtaactgaattcctaacttaataaatacttcctccgtttataaatatatgacaccgttgattttttaaaaacaacttaga

SEQ ID NO: 39562 - DNA, 2104 bp, Zea Mays
atgcatggtggaaccctagagcttcacccctttttagcaccagcattccgccgcacgacctcactcaccacaggtgcggcggcgcacactgctgcacactgcactccctccgtcccgcgtccccgttcggcgctctcggcacgaccgccggtagcccgggacgcacgtcgcacggccccatccctcctagcggccggtgacggcaccggcggccctttgctcggctgtgcccaagctgcgagggcgagatctacccccgcgtccgtgcatcttcgtcaggcccttctccggacgagcactcacaggatgtgttctgaagttcatgttgagggagatgcaagtgtcggacagaagggttgcaaggatataaggcgttacaaatgtgaattttgcacagttgtcaggtcaaagaaatgcctaattcaagctcacatggttgcacatcataaggatgaacttgataaatcagaaatatacaactcagatggggaaaagattgttcatgagcaggaacataggtgccaagagtgtggccgttgtttccagaaaccagctcatctgaagcagcacatgcaaagtcactcacatgagggcatagatagttaacagcgtgaagcattggatcccatttaaagaactccaaaatgcgacgaggtattttttattcttgcctgaactagtaacaggttgggatgacctcctgtgaagcttcaacaagattgcctcagtcacgctcactgaagactctttatttgcccactggaagactgccccttcagctataaaagaaaagatcacttgaaccgacacatgcttaagcatgagggcaaattgtttagttgcaccctggatggttgtgatatgaggttcagtatgaaggcagatatgcaacggcatgttaaggaaatccatgatagtaagaacccccatcaatttgtttgtaaggaggacggctgtaacaaggttttcaggtattcatcaaagctgaagaaacatgaggaatctcatggtaggtcagcattaacctgataattaggaaattaataaatgcagagtgttcatattactcacatcatgttcatgtactagtacaagtttttcatttgtccagcatattggttctccaaatttgagtttgtttccttgcagttaaattggactatgtggaggtagtgtgctgtgagccaggttgcatgaagatgttcagaaatgttgaatatctgagggctcataaccaatcttgccatcagtatgttcagtgtgagatatgtggagaaaagcacctgaagaagaacatcaagcggcatctgcaatcacatgacaaggtgccctctgatggaaggatgaaatgcacttttgatggttgtgaacacttcttttccaacaaatcaaatctgaccaagcatgtcaaggcatgccatgaccagctgaaacctttcaagtgcggaatcgttgggtgtggcaaggcgttcacctacaagcatgtcagggataaccatgagacatctggtgctcatgtatacatggaaggagactttgaagagttggatgagcagttgcgtgcccggccaagaggtggtcggaagaggaaagcattgacggtggaaacactgacacgcaagagggtgaccatctccggcgaggcttcatccttggatgatggagtggagtatcttcgctggttgctatctggtggggatgattcaattgattgtcagtagccggcgtctttttgctatcaccgctgctttgtacatgggttagattatgtaatgtaagttgtttggtagactacgatggtgttcatgacgcgtttgatatattgtcagcagtatggtagtgcagggctctcatagtaaagcttgccatttttgttgtatctttaacccacgtgggtccagatgatgtgtttattcctatgtatttacttatctacatgtatccacatgtgcgactttggcgtttgtttgagattataatctgttaaaatatgttggattatataatttgggcagattataattccaaacaaacactgactaatgctctatttgtttaccctctagtttatataatctagcttaaataagttaaaagaaacaaa

SEQ ID NO: 39563 - DNA, 264 bp, Zea Mays
acgtcggcgaaaatttttcaggtcgtccgattcctgatcaaacgtcatatcgtctcttagattcttttcaaatcccagctcactatgtctctggatgcttcggccgacactctccctcacgtcagctcgctttgaccccgtgcggggcttctcctcgtcgtcgtcgcttactccgccgcctcttcctcttcgcgtcgagcgctacagggttcgtgtcctctgcctgctagatctttcctcggcttcattttgtactggcggctg

SEQ ID NO: 39564 - DNA, 776 bp, Zea Mays
aacagtgtgcgatgggggaagcacgagcaagataattgcctgcttgatttcttccttaaccaaaggggtacaatatataggttgccaaatctcagagcaagcaaaacttcattgaaggggagaaacatgtcatatttaactcagaagggagcctggataagtttaacaagcccgggaaactctacacacaactggtgtcagctcagctcaagatccaagacatcaaatcacaaagatcagcgcttcttttagaaatcaatcaagcagattctggagcaagagaaaaacataattcctggctgcactacagcagatggatatgaagtcattggaggaggaatacaaagctctgcaaggtgataaatcgggggaagttgagtacttccagtctcttgatgaaacaattaatgggatgaaggggattttggatcctgtcaaatgccaatgtggactggagtacaacttaaaacttgatggtgaagccatggatataagctaagcaagaacgaccacatacgcagatgcccatctccaccagatttcgtgcattttagatctgtacagtgtgagagatggattattctttggaaggtacagaatcttctcgcatgtatacgggtggatgctttgggcagagcttgacagcgtcatcgcgaataatatagaattctgatgttagaactatctggagcttgaacggactatacggccatagttttgttcaataattgtttttccttacgctcaaccgcttgtccagattgcagacataaaag

SEQ ID NO: 39565 - DNA, 1432 bp, Zea Mays
tttttcagaacatgttagaagccagggaagatcggtgaaatgcttgcattgatataataagtccaggctgaagttattgagctgacagcactaagatataatagtttgagaatctcaatgggttgcttttctacattttgcaagaaaagaagggcaacgcggcaaccaagttcccaccataatgaagacgtacctggctgttcaaatataacaaaatacacttacaaggagctagtaagggcgacaaataactttaacccattgaacaaaattggtgagggtggttttggttccgtttacaagggacagctcaggaatggtacagttattgctgtcaaggtcctttcgtcggagtcaagacaaggagtaagggagtttctgaatgaactcgtggcaatttccgacatctcacatgataatcttgtgaaactttatgggtattgtgcggaaggagaccaaagaatccttgtttacaatcatcttgaaaataatagccttgcacaaacacttctaggctccagccacagcaatatccagtttgattggaaaacacgagtaaatatttgccttggcattgcacggggattagcatacctccatcatggtgtcagtccccacattgttcatcgagacattaaagcaagcaatatacttcttgatagggaccttaccccaaaaatctctgattttggtctagcaaagcttcttccaccaaacgcaacacatgttagcacaagagttgcaggaacactgggttatttggctcctgagtatgctattcgaggacaggtgacacgcaaatcagatgtgtacagctttggcgtgctgcttctggaaattgtttgcgggagatcaaacagcgatacaagattagcatacggagatcagatactcctcgaaaagacatggatgcactacgagcaggggagtctggagaggatcatagacaggtccttgggcggcggcgacctggacgtggcgcaggcctgcaggttcctgaaggtcgggctgctgtgcacgcaggacgtgacgaggcaccggcccgacatgccgagggtcgtcgccatgctgacgggcgagtgggacgtcgagccggagacggtcagcaagcccgccataatcagcgacttcatggacctcaaggtcaggagcacgaggaaagcgagcgacaacgtggccacgccgcctacgtcctcctcgacgttcctgtcctccctcatggcgcactcctcgcccttgctgtcgaacgagtccacgcaggcctccatggcgttcaccggggtgtcggatcgcgagtgatccttgatcccttcgtcaaagactggtcaggctggctggtagtgacctgagttggttggaggtgtggaagacatgtgtagtgtaggcaggcaggcacagatggatttaattgcttcgtttttttttttttttt

SEQ ID NO: 39566 - DNA, 4885 bp, Zea Mays
tttcaccatctgctttaatctgtttctaggattatcgatactgatgtgggcgatccatatgatcctgacatggaggcagttgcttcgaatcgtcctgaggctaatgaaacggttcacccacctccagcatttggttcttcctccaatctagaggcgcttgcgcttgaaacaagtgagagtgatgtaaggagcactggtgatactgatcacagtgtacatctaatttccaggccgatgcacgagataacttttgcaacgattgataagccaaagctccttagtcagctgacttgtttgcttgctgagctcggtcttgacatccaagaagcacatgcattttcaacaattgatggctactcattggatgtatttgttgtcactggatggcatcttgggagtactgagcagctacaaggagatttgcttcagaaatttcacaaaatcgagacacaagcttggcctttatccagctcattatcaccgtcatcagaaggtcagcaaggtggagaaagtatgtcatctgcaagtgttgaaattccaacagatggtgtagatgtttgggaacttgaccttaagctgctcaagtttggaagcaaagttgcttccggatcaaatggtgacctgtaccgtggaacatactgcaatcaggatgtggccatcaaagtagtgaggcctgagcgcatcagtgcagatatgtaccgagattttgcacaagaagtgtacatcatgagaaaggtccgtcacaagaatgtagtgcagtttatcggtgcatgcacaagacaaccaacactgtatattgtaacagatttcatgccaggagggagtgtctatgattacctccataaaaataataatgctttcaagcttcctgaaatactgaaagtggcgaccgacatcactaaaggaatgaactacctgcaccagaacaacataattcaccgcgatctcaagactgcaaatcttctcatggatgaaaacaaggttgtaaaggttgcagactttggtgttgcacgagtgaaagaccaatctggagtgatgactgcagaaactggaacttaccgttggatggcacctgaggtcatagaacataagccctacgatcacaaagcggatgtttttagctttgctattgttctttgggaactgctaaccggcaagatcccttacgagtaccttacaccactgcaagcagcaataggtgttgttcagaagggtattaggccaacaattccaaaagacacacatcccaagctcatcgagcttcttcagaaatgttggcatcgagatccagctgagaggcccgacttctccgagatactggagatccttcagaaactctccaaagaggtgagaactgacactgagggtcgccacaaaacgaagtcagggttcctttcagcgctgaagagaagccactgaagggcactgggcacccagccacctatgatagtttactccaatgtaatgttggtgattgatgcacgctgtaatcacaatcacagcatgattctgaagttctgatgcaagttgaatagtgcgctgtagttgtacagtcacgattttctcgtgtaattgcagttgtctctctctttttggctcaatttgcccttttgttttgttgctttgccctcatgtaatcgtagatgatatttgttggatgttctaacgactggcatagattgaagtgtgctgaaataaattcctgctggtgagaaacagcgcgcttcgtgtcagttaactcggagatttatcatagatgagatgaatttactgatgcagttgactacttgtacagaagcgtcttcttgaaatgactatttcagcgaacttttaatcaaacgaatgatgcattttgacttctggcacaatctcgagtaaaacaggattgtaaaccgactgaccatcatcatcaaatcgcctttcgctgaataataataccccaaacctcagcaaatcaaagattcgacaaaaaaaattacatgtccaactacaaattcgagctagctactgtatctagctatcattcatcagtcatcacctttgagcttcctgaccttgtcgaggaatgcttgacggccggggaaaggattggcgccctttccgcctttccccggcgtcctcttctcgtcgagcgtctcgccggcgcggctactctggcccagccccagaatctccttgctggccatcctgatctgagcctgcttcctggccgacgacgatcccaggacgccgccgtccgccacgccagcatgcaccccgagcatgtccatcttggccgtcctcacctgctcctccctcctcgtccgcacccgctccctcctcttgtcgcgcttccccacggcgccgcccgggtcagccccggcggcggcgccgaacagggagccgcccttcttggcgccgccgggggagctgttgctattgctgttgctttgcttcgtccgggcgcccttccttggaatgcggccgccgtaggatgtgccgaggaggcggaggtcgaggcggccccacccttcctcgtcggagaggtcccacccgaagcgctcggccatctcctggagcggcccgtcgccgtcggcgtcgtaggcgtagtcgtagccgtcggcgtcgccgcggaggaagcggtgcgcgtgctcccactcgacgcggtcgacgtacacggggtcgtcgaggacggcgcgcgcgaggcctgcccagggcgcggtgtccccgtagtcgagctcggccgcgacccaccggaggtacgacggcggcagcgtgcccagcatctggcccctgtacttgccgaactcgatcacgcggtccctcgccggccgagacgacggcgccggcgcaggaggaggcgtgggcgccggtcccgctctcgccggcctggcgcggcaccggcaccggcgcgcgcgcggtggtgggtggtgaggggagggaggcggatgaggtgaggaggcgccgtcgtggacgtgggtgtcggcggagccggggaggagaggcagggtccggcagcggtcggggccagcatcgtcgcctgccgcggcggtcggcagccgaggcagggtctctggtggggactggggagtgatgagcctccgcagcgcacagagggaactacccgctcgtcacacaagtctcgtcataggcgtgatgatatggataaaaaaagggcacatcgtgtcatctctcacggtctcacggtctcacctcatccacatctaccaggcatcagctcgaaagctcagcacatcacaggccagcccaagcagcgatgccagcggtggcgtccctttgggcgccgcccgcggctgcccggcggcggaggttctcccccgtggtctcgtcctcgctgcgccgggtcgcgtcgggcggcgggtctagctggcggagcgagcggcggctcatgtcggagctggagcgcacagtgacagcgggcgcgaccgagcgcgtcatccgcagctacgtcggcaccaagtcggagcgcgccgcgctcgccgcgctctccaggctactcatggactccgaccccctcgccatcccgttctacgaggcggtcacacaggcacggtggttcaaatggagctcgatccacgcagctgcagtcgccgccttgctcgaagccaacggacgcgccggagaatccaggtccctgatcgccgactccgtctcgcagcacctccagcagtcgaccgacgaggtagccctcttctactgcgacctcatagcggcgttctcctcgcgcgggctcaaggaccgggcgacggagttccacatggagctacggtccatgccgccgctctccgggcgcaaggcctacgcggcgatggtcaagtccctgtgcctgctgggcatgccggccgaggccgaggcagcgctcagggagatggtctcgcgagggcaccggcccgaggcggcccagttcggggccgtcgcgaggtgctacggcagggccggctcaccggccgacatggagcgggtcatcgcgtccatggcggacgccggcggcatccgcctcggcgccggcgcggcggatgccgtgctgtcgtgctacagcgcctgccgcgaccacgccaggactctggcgtggctgaagaggatgcggaagctgcgcgtcgcggtgaccgcgaaaggctacaacttggtgctcaactcgtgtccgtcgctcgcttcggtggtgcgggagctgggccctgagcttccgctgtcgacggccgggctggtcgggtggctcaggtctgcgtcgacaacaccggcaccggcagcggaagtggaggtggtgcgggagctcctggcgtcgtcggcgtcggttctggacagggcgatggagtggtcggaggccgaggcgaagctgaacctgcacgggttcagcacggttgcagcctacgtgctggtgctgcagtgggtggacgcggtgaggggccgcgcccgcgcgttgccgttggaggtgtcggtggtgtgcggcgttgggaagcacagtgacgtccgaggcgagtccagagtgcgggagctggcgcaggaggtgctgggacggatggggagtcccctgaagctgtcggcgagaaacagagggcggctcgtggcgaagcgagaccgggtggagcagtggctggccagcttgccggtgcctgaggacggcacagacccatcgcctgatgcagcaaacgaagaaccatttgtatttgcacttttcagaaaacttgggcagtttttttccaaccttatgtagatagatgttgctgcccccatcacaccagcatcgatcgaaagagctggcctggtgaatgaatctgtctcgaacgaactgactgatggcctagtgtgtttgcttggctttggcgccgtatgcaaatctggtgaatgaagcaggcagcgcatttgcctgcctttggcacaggatagc

SEQ ID NO: 39567 - DNA, 3112 bp, Zea Mays
cccccaccccctcccggcctcccctccctcagtccctcctcagccagtctatcgtggcccctcgcctcgctcctctgttcacacacgagcgcactcccctgtctcggtgtctcctcccctctcgctctccatgttcgcggcttccaacgccacggccacccgcctcatcctcccgcgtccttcagtcccgttccgcgcactcctcattccccgccggcggggtcgcctccgccgcgcggtccacgccaacgccgtcgcaggtggcggaggaggcagcgagggcgttgcgaaggagccgccgcggacgctattccccggcgggttcaagcggccggagatccaggtgccagcactcgtcttacgcgtcggcaccgaggaggcgctgcggtgcggggatgaggtggccgacgccgtgtcccggggcgtgggcatcgtcgtgctcgaggccggagaggagggtggaggcagatcgtacgaggccgctcgcgctctcagggccacggtcggggaccgcgcgtacctgctgatcgcggagcgcgtcgacgtcgcttccgcagtcggtgcgagtggcgtcgtgctcgccgacgacggtattcctgctattgttgcaaggagtatgatgatgaaatcaaatgctgactccatatatctccctattgttgctagaaggatacaatctgcaaactctgcattaagcgcttcaagttctgaaggggctgattttctgattgtaaatactggcagtggtgattttgtggatgttataaatgatgttgttggtcaacatgtgaagattccgattttcgtcacgttgaatcatttaagtgaaggaacttattctgacttcacatccaggttgctccaatctggtgcatctggagttgttacatccttagctggcatggaactcctcaatgacgatcttataaaaaaagacttcacaaaggtgggctcagctgaggaactcccacaagcgagttactcttctgctgggatgctggaagatgttaataatgtaatggtcctaactcgtgattgcgagaagactaaagttgctggatttacaaaattggatgaagaagtgataaagttgatagaaatagaaaagcctattctgaacgaagctatcactattatccgcaaggcagcaccaatgatggaggaggttgagcttctagtggatgctgcttctcgcctgaggtgaatttaactcaggaaagtcaacttttataaatgctttacttggaaggcagtatcttcaggagggagttgtgcctacgacaaatgagatcacactactatcatattctgaggttgaatctgaaaactttgaacgatgtgagaggcatccagatggtcaattcatgtgctatttatctgttccaattttaaaggaaatgaatctagttgatacacctggaacaaatgttattcttcagaggcagcaacgactcactgaagaatacgtgccacgagctgatttggtgctctttgtcctatcatcagatagaccattaactgaaagtgaggttggatttcttcagtatgtccagcagtggaagaagaaagttgtatttattctaaataaattggacctctatcggaacagcaatgagcttgaagaagctactgcatttgtcaaggaaaatgcaatgaaattgcttaccgcagaggatgtcacactgtttcctgtatcttcacgctctgctctggaagccaaactttcatattccaaaaacagtgatggaaagcattcaaccgaagctatgtataatgatcctagatggagaagcagcaaattttttgaacttgaggattacttactgagtttcttagatagttcaacggaaaatggaaaagaaagggtccggctgaaacttgaaacaccaataggcattgcagatcgattgttaacttcgtgtcaaaggctggtgaaactagaatatgaaaaggctgttgaagacttagcatccatcaaggatcttgtttatggtgcaaacaattatgccatcaaacttaagtctgatagcagttcctggcagaaccagatttcgtctctcattgagagagcaaaaggtcgagcagttacactcatggaatctacacttcagctgtcaaatattgaccttatttttgcatacacgatcaaaggaaaaacaggcagttccatgagagccacatcatttgttcagaatgatattctgagtccaacccttgatgatgctgtgaatttactaggtgactactcgacatggttgagttctagcaatacccgcgaagcaaatgtatatttggagtgtttctgtgaaagatgggatgcactggttgctccggaagaaagggctctgttagatccaaatgggcttgttaatgaaggggagaaactcaccataaaggcactggaaggcttcaatgccagtgctgccgccaaagattttgaagaggaaattcgagaattggcttttggaacatttggagggctaggtattgctggactgtcagcttctctgttgacatctgttttgtcaactacccttgaagatcttcttgcccttgctctttgctcagctggcggtttttttgttttatcaagtttccctggtcggcggaagcatgcaatagacaagattaacaaggctgctgatgaactctctcgaaaagttgatgaagctatccaaaaggatatctcacagagtgctaataacctaatccgcttcgttgaggttatcagcaaaccttaccaggaagcatgtcagcgaaaaatagattggttacagggcgttcagggtgagctatctgctgtcgagcgtaagctccaaactttgaaagttgaaatccaaaatcttaatggatcataaggtttcatttcaacttgtttatttgcaattattttttggatactaatagtttttgttggtttatactgcgttgtgatgctattgagttgacgtagtgcctttcctgtatatgatgaagtctgaaagtgtaatatgtgttgtaaattcagaataagtgataaactatcacatgataattacacaccttgagaaccgagaaggatgttttgaaaacttgcctttttgataattttacaatatgatgtgggcaagaa

SEQ ID NO: 39568 - DNA, 645 bp, Zea Mays
tgcaaagcaaggcacacaaaaagcattgctcttcagccacaccactcaaaggataatagaaaaaaaagcagatgatgcgttcagaatctgatgacacaagccaagccattgaacagttagttttcaggactcaggaggagtggttcctacttcctagctgctagcatgtactgtagtagctaattaagctgctagctcatcgctggatagatgtctgaacaagcttaatttggcacttgtgtattctgaccacgatctcttctagtactacttgtgtggtgctattgtctggagctttaacggaagatgcatccaagagaaagacatgttgtgctggctccgatcgaatacacgcatgcatggcgaggcagccaggggacgtcgtcatggtggcgtcgttgttccggctgcatagtcagccttgtcaacgacgattgtggcagcgttgggtacttcaccaaccaaaggggtttatagtgatgccgagcgaggtcactgaacatggtgtgtaatgttagattgtttttaatgggtagacatattttttatgtacaactaaactcactgcttgcgcatgttcctattatggggcgtgccccgagcgaagattttaattatgattttggcataaaggtggagctttcg

SEQ ID NO: 39569 - DNA, 2824 bp, Zea Mays
attccaagggctttactcaaataagccaaaggctgaccctactgcatgagtaccgccccaacaccgtcatcgcaagcatcggtctccaccgcaaacggtaacataaaatctggcaaggccaagactggagtggttaccatcgcctgtttaagacgctcaaaagccacaactgcctcttctgtccaccaaaacatcccttttttcagcagtcgagttaatggccgaactatacccccataaccttgcacaaaccttcggtaataaccagttaagcctaaaaaccccctcagctgaataatagttgtgggtcgaggccaatttaccatagcagttgtcttctgaggacctgttgccacctcgttagatgaaataatatgacccagatatgtcagttctgtgcgaccaaaaacacacttcttgtgcttgagaaagaaccgatgactacgtaaagcagcaaacaccagtcgtaaatgctccaaatgcgactgccaactgggactgtacaccagaatatcgtctataaacaccataacaaatttgcgaagatatggggccaacaccatattcattgcacactgaaatgtagccggggcgttagtaagcccaaacggcattacccgaaattgataatgaccctggtgtgttttaaacactgtcttgaattcctcggattcccccatgcgaatctgatgataccccgacgtcatatccagactagagaaaaatttggtacctgctaattcatccaaaatttcctcaacaactggcatagggaatctattctttatcgtcatactgttcaacttccgatagtcaacacaaaaccgacaggtaccaaatttttttgcactaacaacaccggtgaggcaaacagactaacacttggtgtaatcaaccctgcccttaaaagcgcagcaacttggttctcaatcttagccttgtggtagggagaatatttatatggtcgagaattgacaggaacagaacctggtacaagaggaatatggtgatcaaaagacaagatggaggtaaagctatgggcaactcaaaaacatccttaaattcctccaacaacccttgtaattccttgcaatcaaccggattgtcagccacctgaacctcctctaacactgccaaaacccaaatttcatttcccttcagccacttctccacctgcatcttggacacctccttaacctctcgaacatcatccgaatcccctaccaactgtactaactgccccctgtccacaaaactaacaatccttcccttccaatcaaaattcatgggactatgactttgaagccaatcaaaacccaaaatcatatcataagctcccaagtccaaaactctcatatcatccgtgaacgagtgaccattagatcaccactccaaagcttccaccatgcgatcactttgcataagctccccattagccattttaaccttaaaaggttgacactccttcatcaacaaccccaaacgatccaccaattccctgttgacaaaagtggctgaacttccagaatcaatcaatatcaatagagtctgattgcccactaatgctcgcacccgcatacattctttactcgtagcaccactcatagcatgtagagacatataagaacactcttcctcttgctcctcttgttcaatctgatccaactattcctctgtcaatgtcatcccgagttcctcctttgttagtgagttcagttgcaactgcaccctcttcgaacacttcagttgatggcccagctcaaatttgtcaccacaactaaagcacagaccgttctgacgtcgatattccttcaccaaacgttctttagaaagctcagccataccggtacctcccctgacctccgttcttgatccagttgccacaaacttgctaggactggcccccttcaatgacttttgtcgttgcttatccataattctttgctgcaacctagcaaggaacacaacccttcccactgatgacggcacatgagactgcaccggagcttgtaatttgtgctttaaacctttaataaactaagccacataaaatgtctcatcaagagtatgattgtgcactgctgtcgcatagcgcgcatcctaaaatgttttcacatattcttccactgatactgcttgatacagatgcaacaacgcacacatggcttggggatattcttcctcaccaaatctctgtatcaccgcccaaggccccaacccatgctgtattttgaaaatctggaaccatttagatgcattcccttccatactcagagaagctatgataatccagatctgctcaggcacccgatacaaagtaaaataatctaaacacttgtctaaccagatccgtggctcctccatcaaacctaggaaacggttgacgaggcactgcagttgttggtaactccatctcctcgacacacctgttcccaaactcccgattacgaaacaaatttgcatcgtcatacctttgctgcggttctggtggcacaggtcgcggtactcctccccgaaacctgttttcccccaacaaatcagcagactcgagatcgtgggccatctgctccaaccgcaattccgcaaccaccttctccgtcctctccatctgctgcgcgatcaggatgtgctcctctgctgcttgctgtgccacagtcacagccagccccacctgagctaacaactaattttgcacttcctctactcccatcaccttctccgccagtcgatccatcttcgccatcatcttctcccagcgatctgcttcctcctccttcgttgccatcacgtccagtacaaaccgagtttgtactgatggcttggg

SEQ ID NO: 39570 - DNA, 1148 bp, Zea Mays
caactctagcctaggactattatgcggggtcctgaactataggtgaaccaccatcgccttctgccctagatattgataatttaaatagccatggatcatcaaatgcctcctcattaaagggtgacaattcacctcatgtgccaggcaatcatttgcctctagctattcacaaccaagcccagctgttgagattacttgcctatacaaatgatatgaacttggcattcgatgcaactcgaaaagcagaatctgtgattgcatctgctactgggtgtccggaaagaggtgttgttggtgatggccttgcttcggtaaaagcagtcttggatcttaacttcaacaatgtgaatgaactactaaggcttgttcgggtttcaatggaatcaataagcagctgatgatgtgttcaaaaatcggaattgcacagaatgtcacacagtgaactgctgatattggattaacatgcaatctgtgctccgtgatgctggttgcagctatgtcagtatatttttacagtgcaaaacaaattaacttgaaatcaagcattccctttcctaaattggaaattatgtgaaccaaggttctggaattcgggagcggtactgctgcatcttgtggtagtgtaaccatgcattgatgtgtgtttgtttcaatgggtcagaggagatcgattgcgattacctgcactacctgtcatgtacgggcgctcgtacgccaggcagcgtcgcgcccgtgacaggcgccgcgcacaggagcgcgatctgggagatcagcaggaacctatggaaagcagtggccaggaaggaaattagaagaatggaaagttgagggaaggaaaggagagattgattagtgattgattaagtgattgattagtgattgattagtgttaccatgtttaggcttgcctaaaataaaggctctaggacagcaggccgatggctatatatgcggcacaaggagacaggaataaagggcagcaaacaagttatctcctctccacctctctctaccatctaagcctacggctgtgggggataaccacgccggagaagacgaaccgcggctacaaccccatgctctaaacgcccaggcccttgacaacctggtatcacaagtcaggcgatcttcgtcctctcgatcccaca

SEQ ID NO: 39571 - DNA, 3825 bp, Zea Mays
aaacaggggcgcgtctctcctccggtaccggccggcatgagctccacctcatcgggccgccgcgccccctcatcttcggcggcggtcgcctcgtcgccgggacagaagcgggcgagggatgaggccagcagcgggtccccatccgaccccgacgccgccaaaaaccctcgccgcgcttttgcctcctccccgttcgccgacttcggcacctacatggctgcgaagaacagcaagctcgctgcgcagttcgatgccgacgccaacacctcaggcacggacgccggcggtctattcgatggcgtctccatcttcgtggacggcttcacagtcccttctagccaggagctgaaagagattatgctgaacaatggaggccggtttgtcaactacttttccaggcacacggtaacacacattgtttgcagcaacctgcctgatagcaaaatgaagaatctgagagcattcagcagaggacttcctgttgttaagccagcatgggtggtggattccctggcagagaaccggctcctcaactaatagttcttcaagccgaaagcagatgaagctttcttctttcttttctgagaaacaaaatgaaatatgccacaagggggaacaaaacaaccaaaataaggatattgagttccaaccttcatctgctcaggagggatcacagtatcaaagtggggattgtgaaagtgaagcttcaatggatactttggagctatcaaaggactcgttgtcctcagatgaacagaaggcatcagcatttgaagaaagagagagcggagatttcacggttgatgagggtgaatacgattatgaaactgcctgttcggagagccgtaatgacacagatggtaaccttggtgtgcctcaatcccctaatgcaaagtcaaggtgttcaaacttattcagtacaagatctacaggcagtcatttgtccttgtcattggagaaaagtgcagctaaaccttctggccgaccacattcaaccctaacagatccaaattttgttgagaactatttcaagtactctcgactgcacttcattgggacatggagaaaccggtatcggaagcgcttctcaaatttgctagaagctaaaggcattaagttgagtgctgatcattcagggaagaagaaaacaatcattcatattgatatggattgctttttcgtgtctgtggtcatcagaaatatgccagagctgcatgataaaccagtagcagtttgccattcggacaatcctaaaggaacagcagaaatatcgtctgcaaactatcctgctcgaaactatgggataaaggctggcatgtttgttagagatgctaaagctcggtgccctcacctaatgatcgttccttataactttgatgcatatgaggaggttgctgatcagttctatggtactttgcacaaacattgcagtaaggttcaggctttgagttgtgatgaagcttttttggatatgactgaatgcttacatgacaatcctgaggaagtaacacagagaataagaagtgagatttttcatgcaacaaagtgtactgctagtgcaggaattgctgaaaacatgctcctagctcgattggctactagatctgcaaagccgaatggacaatgctttattccatccgaaaaggctgatgattatctgagtagtctctctatcaaagcacttccaggcattggtcatacagtttcatctaaactgaaaagcaaagaaattgaatattgtagtcaacttcgcaatgtttcaaaggatgccctccacaaggatttcggaaaaaagactggtgatcttttatggaattattgtagaggaattgatcattcaattgttggatctgttcaggaaacaaaatctgtgggtgccgaaattaactggggagtcagatttaatgacaacaaagatgccgaacattttcttaacaacctttgcaaggaggtttctctacgcttgcagggttgtggagttcagggacgtactattacccttaaggtgaaaacaagaagggaaggtgctggggaaccaataaaatatatgggatgtggtgactgtgaaaccacgagtcgttctatgacgattgcaggtgcaactgacagttttgtcactctccagagaattgcaaaacaattattttcagctcttcatcttgatgtgaaggaagttcgtggaattggactgtcactatcaaagcttgagcatgcagatttgggccggggagcatcgcaaggacatatgcttgaatcgtggcttgcttcaccagccgccaagctcaagaaacagcagagtgagatactggggaatgttaatgttgcagggaccagcggactgaaggatttgagatctggaccatcacatacagcagaagcgaaccttagaaatgataggtctactgtatttcacaatgtcgagctgcctccgttgtcccaacttgatttggaggtcctgaagaaccttcccccagagataatgtctgaaatgaatgaaatgtacaagggagaattacaaagtcttgtggacaccctcaatagtgacaagggcaaggaaaatagttcaaaatctcttgctttgcctgcagttattcgtaagtctgtacctgccgatgcaaagcttcaaggatacagagaccacagagactccatgcatttggaggaggaacatactaagggaaaatctgacaaacaactatcagaagctaaaccagccaataatgcttcatgctcaagagttagtgcatcaattgagaaaacaacaaaaagtgttacacaacttgatttgatgcctgattcgctaagccaggcagatctaacagttctgcaggaattacctgaggatgtgaaggctgatttgtttagtgcacttccactgcatagatcaggagatcctgcatgcagcacttccaatgtatctgaaagtaaatcacctaatgtggttagagctgaaaatagatcttctaatgatggtggaactgatgatctgaaaaccccaaggtcttttctcccaccaggaagttctcaaaaatggatcgaacagtttagagttagcagttgcctgattttgaacgtaattgcagagcaacacacagattccagctgtcaacgaccattgtcttctgttctagagcctgtagcttcgttcctacctttgtgtcctaacccaggtagtgaagaatggaatgaaactcattcatgtctctccgagcttcttagacactacatacaactgaaagttgaatatgatattgaagagctctacaaatgtttttgccttttgaaaagattctcgtcagcatcagagttttttctggatctacatgatagcatccttcctttcctacaggattctatcagccagcattacggtgggacactgcaattctagctccttgctcaagttgtagccattctattttgctagaaaggaagaagcaatgccgtgaatgtgcggagagacgtgttatgacaatctgcgcctccaagcagctactcaaatcccgtgctggcagattccttggacgcgtttataactttattataactaattgatgccaatgctggaagttttattgatatattcattgcatctatggatcaatagatgccatgtggttcgatatatcattcgtggagcaatggtttgaagggacctttgctgtgctttgatgttcccaggcgaatttcatgtttgcttcataacccatatgaatttcatgttatctttgtgttgctaccaaaaaggttcctggtttgaagttctttgcgtcaaattttcacctatgatctgaagtaccatccgtgcatcctagttattggaag

SEQ ID NO: 39572 - DNA, 4046 bp, Zea Mays
gccactgccgcggccgtaccccgccccgcatgctgcccggaatcagcgcctccgccgccgcagcccttccagaaatctccatcccgaatcctccgcgcccccgcctgcccccgcgcatcccgcagcccccgcccccgcgcatcccgcagccttggcgtcgtggccgccgcctctgctccctcctccatcccgcgcaacaacgacgaccgtcggggcctcgcctggcagatcaagcggggaatccacccgccaggcgtctccctgacagtggtagacggtggcggcgatgggggccgagagcgaggatgccccttccccatcctctaccctcccttgcgattccagcattggtgcccgcatccccgccgtccgaagcatggcgctcttcgtctcctccctcgccgccgccctctcccacctctccctcccatcgacctccaaccccaagcctcacccagcctcgctcctgcgcctgcgctccacctaccgccgcgctgttagcctcgcggtggccggagcaagaacggcaataggatgaagctgctgctgtccaacccctacggcttcagcagcccccgacatcgtgtgtcgggatctgggactccagcggcaaggcgaccactatgccgcacgggcgcggtgcaggagctcctccagcggcgccgcaactgcctctgagccctcatggtccagctcgagtgctcgacgcacccgctccgcacccgcccttgtcccccaggtgtcggcgtgcgggattcggtaacggtgttggagctcatccagtggcgccgcaaccgcctccgatccctcaaggtttggctcaaggctgatggccaggtcgaccgtctcctccatgcgcaggggaagaggaaggagctggagcagacggtgaatagcttctctgatttctccctctccggtcctgttgcaaagagccacaaactggttaggatgtcttggatcatcagacagatcagcatgacttgcaagcagctagctactgtttacagatgtcctctacttgccaaaaaataacaaaggggttctcgttcttgaaagctgcatagatagcacctcaacttggccactaaaacaactaagtttttttatggacatgtctgatgtttttctcaataattgtgcaaattttcctttcataattttcgtcgtcggggggcaggaaccgggcggtgtacgtgctggcgcagtgcacgctggacatgccgccggaccactgccgggcctcctcgatggagccatggcagagagcggcgacggaaggtcagcggcgacaagatggacgtggcggtcttcggggcgcggtgcaccctgcggtatgagatggacctgcagttcttcaatgtcactggcaacagcaagatgctgtccctatatttttacagatatttttaataatgacctcagtggaccctatgcatttcttgagccaccttttgttcaaagatcccttctatataagatacagaaaccaaacacccttgaatcgcagtcacccacgtcgccaacaggagtgacttcctcaccctgctccacgccctgccgccgcagagcgggagcggcggctgcgacggccgcggtgctggggaggaggatgcctccgcgctcgccaactccctcgacgcgctttgcaaggcctgcaagcctgaggtgcgtgtactcactccttcactcgtgcgcaacttgttccttctccaacgtgttccagaacaccacagcatgcctctgtccacagtaagcaagagaacaaaacccgcgggactgtgaacaagcgcagaaagaaatacgaatgcaacaagtcctacattctgttctccttttttggggggccaaaacgttgaggtctcaactcactcgtgcaagcagtttcatcgccacccccatgtgagcaatccgggacaccgcggagatgcctcgtgaggaaagcggtacggcgaggcagagcagcgtcggtggtcgtggaaggatggagcaacaaccccacatgttttgttctaatggtccataagtttgcaccacacaaccatttggttttatctgttgtcatttgaccttgatggaaaggagtgagatgaactatggaggaattctgatattatggatttccatttaacttcatcgtacttgcaagccatgcaatatgctattgttgttattgccctttataatctgtgattggactatactgtgtatttaaagcggtatgccacttcttctaaatactatccaaccacagattgttattgccctttatatcaaatgatttttatattgataattagtacttcattggttcttcatttaattggaattcaaacaaggatttcggtaaatatgagtgtcaacttttgctttgcattcttctgtatagtacaacacacattgtttcttgcatttggaagttgttggtctcatgtaggacacagtggcgccaaggttccagactgtggcgggactgggctctgcagccgctgcaaaggagagtgcttcgtcttcaagcaactctcgaaggagacggccaccaggtcacacaaggccgccaagaacatggccaccggatacacttcggggctgtccaccaatggacctactgcaacaagtactcctccacccgcgtgcctgcataaaatggcaggggttctaccaacaatcaacacacatgtgaagcgaagctgggacgtgcatgtatgtggatccacgacacgtgcatctgtaggaaccctgattttggtatggtttctacactcaaattcatcagtatgatataaggcaatctgctggctggtatttaagagtggccctctcttcatatcatcgaaaggtaaaactattagtggcacacgttggttttttcctttgtttccaacatgtaacattatattaggggtatgtgcagtttagggtaagtaatatactcctttgtgctcagtaagtaattgatagaaggtagaagaaggtagaaacatatgtgcagtttagagtttacctctttatgatttctgggtagccacaatattttcacattgcaattcaagtccttagtaccctggtaatcaaactaacatgtcagagcatcaggcaaattcattgtgcacctgcctattgtatgctaaagaaatcagtttttttgcatgtgttagttgtctcctaacctgctgcattttcaatttttgtgttctgtgttttgtaatttgggagcaccttcaccattgtgttattagagctaggcaccttcaccattgtgttattgatgatctttcttggtctgaatggagtttttgcacctattcacatgccagagagtttatgcattgtcctccttttttggatacactttctgttaaaaaatgctacacagttgcattctacttaccttgtgattttgatggagctctgttgttgtgcttctttgacatttgtcggtcctttgagcattaggtctgcatcatgcattatgttgttatctattgatctatatatcccatattgtggagatcactaaaatcttagtaatttaagttctgttcaaactttcaattccatcgtccgtgaaaaattgataagtatgaatgtgttgacttgactccattttatcttctccttatttgagcttgtattcttattttttaatacattgctgccctgcactgagatttctattgtaaataaacaaagtgctatttaaattttgatttattccttacgaatgtctgttggtttcaggaaagtgctgagagaggtggcatctagaggatgtcatgtcgaacgtgtgaagtttttttagaaatatgtatatttgtgtgaagctttttagaaacttggctccattttattttctatgttcctctcggctttgtttcctatcctttccaatgacttgctatgcatttgcactgtatttggcatgtctaaaactgctacacaaaacttgatatatattttgtctaaaaatactatatccttgttatgcttgattgatctttattttgtctgctcttctattcttgtgtgggtctatcaagaatgag

SEQ ID NO: 39573 - DNA, 5676 bp, Zea Mays
cggctggctgcgcgtcttgttttatggggtatccgcgcggcgctccggttcgcccccaaatctcattcccatgggccggaagaagcgaacctccgcaccaaaccctactccgccaccgctggacgcctcccgccggtcgccggcggcggcggagaagccagccggcatcggcagggaagatgccgccgtgcgcgccgaggtcgacaaagcgcttgcgtgcctgcagcggggcagccacgcgcgtgcgcagcgcctcacgagggacgccatcgcccgccacggggaggcctcaccgctgctcctgcgggcgcacggcaccgtccacgctcgcgccgcctccgtcctcgacgaccacgccagccgcgcgcgccaccagcgtacagcgctccaggcggcccagcgcgccgtccagctcgcgccggactccatcgagctggcccacttccacgccatgctgctcttcgacgctgccaccgactcccgcgcctacgatgaggtcgtcgctgagtgcgagcgcggcctcagcatcgaggccccctccgaccccgcgccccactccctcaggttgcccggccccgacgtcgaccaggtccagtccgagctccgcaacttgatccagaaggccaacctcgcctccatctcctcttgggtcaaaaacatgggcggcgcgggggacgacaagcttcgcctcatccctgtgcgccgtctagcggacgagccaatggaggcccggcttgtccccacggcgccctccccgcgccgcccaaacgagatcaagaaggcgaccaagaccaccgaggagcgccgccaggagatcgaggtacgcctggctgccatgaggctgctgcagcagcagaaggagcagagcaatgatgttgtgtctgctacccctgcctcttcccggtcacatggagatgatgccccctcatcgtctgagtcatcggtgggcggacatcgagctgaccggagaaaaggtgggtctaggaaagcaacaggctcatccgcgtctgagcgcactgaccaggtgcgtgcctactggggctcgataccagtggagcaaaggcttgcattcttaaacactagcatttctgagctcaagtcacactatgcttctgcaatgcacaaggagaaagatgctgccagtgcagcatctgatgtgctcaatgaggtgatacaatttgccaacaagcatgacaagtgggagttcatggtatgtggtaggtgtcgggagcagtttacacatgtggaggcacaccggtggcatgtcatggttgagcatgttgggctactctcatccgagctgcaggaaatggttccgcaggagattgatgctgactgggcagaaatgctcagtggttgcaactggaggccattggatgctactgccgcactgaaactttttgaggaagatcaacacaacaaccttggaccagatagggaggatgaatcgaattcgttagatagttggagtaacaaagccatggacatgtcagaatcctcagcctggtcacacaacgaggagtctagcggttttggagtggtggtgagggaaggtgacaccaagtggccattctcagatgatgacgaaagggccaagattttagaaagaatccattcatcgttcaaaatccttgtgaagaaccataatctttcagtgcacaatctaaacagggtgattcgatttgctgtagaggaactcagggggttgccatctgggtcactactgcttaatcactctttggacgagtcgccactttgcattcgcttcttggaggcatcatcactgcagaaagtagataatttcttgcaggacttaatgcaggcttctggacttaataggaacttacagaaggctgaaggattaggtgacggggatagtttcatccaaaaccacgatgtactagagaaggttacccttaattctgattcatcagaactgatcattgatgggcacaccttcggcggaaagtttgattccgagagtgttgatactgatgcattgctttcatggctgtacgccggatcttcaattggtgagcagctattggcctggaatcgtatgatcgacgaaaggtcaaatcagtgcgtcgaccttattcgagcacttgggagggagttcaacaacctgcaaaactcatgtgaacggaaacttgaacagctgagaaatgaggatgcctttacttctgtggagggcctcttttgtgaagagcaaacacgaagggagcaggtgggacggtatggattccaaactttcgaggagctcctcaggaagcggcaggagtttttggaacacaacactgaggagcagtccgacagtaacagatctgagatagatgcaatctcagctattttgaaggaacttcacacatcacactttggttatgatgaggcccttactggcatggccccacgcttttctgacttcgatgggggcgaagaagatgaatggaggctgcatgattttatacatccaaatgattcaatggtacacatggttgtatcaaagatgaaggaacatgttactatggagattagcaagatagatgctaagattatgcgaactttatctgtgatgcggcaactagagcacaagcttggacctgtttctgctcttgattatcgaatgattcttttaccccttatgaggtcgttcttgcagagccatttggaagagctggtggataaggatgcgagagagagatctgatgctgcaagggaagccttcttggctgaacttgctttggatgctaagaagaatgcaagcaaagggggtgatatgaaacaatcccatgaaaaatcaaaggataagaagaagtttaaggattctcgtagggcaaaggagttcaaggattcaagctggagcgaccagtctctcattcaccaagacagtgctgacgaggaaacaacagagacatttcaaattcttgctgattgtgatgatctggattgcaaattctccacaagtgatgattacttcaatgaacaagaggaagaacttaggcataaggtacaacttgaagcagaggaacgaaagctggaagagactctggaatatcaacggcggatagaggaggaagcaaagcagaaacatcttgcagaacaatgtagaagtacttatgcatcttctgtaattggtacagctcgtctttcaagcactgggaatcaggataaccatgaaagtgcaatcaatcactcttcccgtacttatctcgaaggcataaagtttggtgattttcgctacaccgagaacaatttcagccagaaacttaatggattggattcatctgatgcacatgcattaaccagcagtgatatgaatgctcctagatggaccagcacttgtaaaatcgctccctacgcaaaccacagctatcaaactggaaaacaaaatcggctacatgtgttgccttcagatgatctgcaatttgctcatagagatcacgctgcaggaacagagaagccaaattttgagaaagttggcagtggtgcaataccatcagcggatttgtgcatcaaggatgattttgataaaaggtttcaagaagatcttgatgaagcagtgcgccaaagccttggatacgatgcttatcctgctggtacaataagcacttcaaatgaaacagaagtgtatggcactggccttaaaaatgccgctggtgaatacaattgtttcttgaatgtgattattcagtcattatggcatataaggcggtttcgggacgagttccttaaaacatcatcactgcacaagcatgttgaagatccttgtgctgtctgcgctttatatggtatcttcattgacctgagcaaagcagccaagggacacggagaagctgttgcgcctacttcattgaggatcgctttgagcaaatcctacccgaacagcaaattctttcaggagggccagatgaatgatgcatctgaggtactgggtgtaatctttgagtgtttgcataagtcatacacttcgcgtactgtctgccatggtaaacctcatgagaagaattctattggatcatgggattgtgcaaatatttcttgcatagcacatagtctttttgggatggacgtatatgaacggatgaactgtcacaattgcaagatggagtctcggcggctcaaatatacttcatttttccacaatattaatgctagttcactccgaaccgcgaagatgatgtgtccagattcttcatttgatgaacttttgaaggttgtcataatgaatgatcaactagcttgtgatcaagacgttggcggctgtggaaaaccgaatcacatacaccacatcctttctactcccccacatgtctttacagttggtaagccttttttggctcttggatatttcaggctgcaattattttgcatgtactttcatgtccagtcttgctgttgtttgatgaatatttgacctcacagtattctcttagaatgctttatatgttttattattcctataatcgtgtaggataggttgctgtattctcttagtcgaccatcttcaattgagcaattgtgatctactttgctttttggcacgttacagccttgtgagggggtgatcctgcactaacacttccatgttctatgtttggtgagatcatttgttggcattctcctctacttacctattgaactttcgttttagttttgggatggcagaacaacaaagagaatgtggatgacatatctgcaactttggctggtatttcaactgagatagacattagcatattctaccgtggcctagatcaaggaagcaaacacaccctggtgtcagtggtttgttactatggccagcattatcattgttttgccttcaaggatggacgatgggtcatgtatgatgaccagacagtcaaggttgtaggtagttggggtgatgtgctcgtgatgtgtgaaaagggtcacttgcaaccccaagtgcttttctttgagtctgcaaattaatcattcttcagagtcgtaaagtgttgtgcagtggttaacatgccctcaaatatagggtttttacctgtggccgtgaagattagaaatagagtagcaaattcgttttgagcgggggtatagagtagcaaattcaacagctgcgttggtctctgagctttggtcgagcccctcgtaataagtagtcacctgaggattaaaggagagctgtttacccctctgtttttttaacctttggtatacttgctgaacttcggatccttcatctgccaatgagatttcactgccgatcaagttggtggggacgcattcgacatgaactgccatccaacaattctagccggatctgcctaaagctcttcattatgcaccagttatgtatagaattttgtgcttacaatgaggtgacaggtataggagtgtgactgttttgaggccagaaggtttagagaatggaaggaaatggaattgttggtgcggtgtgtatctgtggagtactgtttgaaaagaggaacgatatctggaatacggtagactttgagaaatctgtagtacacgagtctatgtaaacagggactcgatgagattatgtgagatgagtatagcgatgaataccagactccttatcactactgtttttatagttaaattcttattttttttatttagctaaagattgcgcgcctaagatataaaagaaaccgttgaagtgacaaaagactcaga

SEQ ID NO: 39574 - DNA, 1582 bp, Zea Mays
gccggggccgcatctctccccgttagggcccagctgaacactgtcgtcgcctccacctccgcgtttgggccaccgcaagagttcagggctcctctagggttcgagatcaaatccggccagcagagcagcatcctcagcaccacgctcaccatccccctctacctcggcaccggcgtcttcaccctcgggtacacaccacgccttttctcaccatctgagcattgccaaggagctcctctccatccccgatggcaccctcgccccaccaccgacgacgaatgggcgcttcagattcctgatcagcaggagagtcgttgaggctgagacgacgacacgaatgcggcaaggagcttcagattcactgccattagaaacttgcaggtaagaaatactgtggtggtttggacctcagttattggccagatgaagggcggaggccattatcagatcctcgtccacctttgggctactgctgataagaggacgagtgtcgtacacctctccaattccccccttcaatgtggtcagtgttgaatcatctacgtcatacagtgaacaagggcatactgatgagagaagggatgacatggatttttctcattcgagcatcaggttttgtgcgctgattatggtgtggtcgttggtgagactgcaacgtcctctgtaatcatctctctgacaagttagattatgtgctgaaatttctgttatttttgttggattgtattgttgtgaaagggggcatagtacgatgaattggggactgaaagagcatagcagagcagagggcctatgtaatataattttttatgtataaattgtgcaaaaacaaattacctcttttgggtttcaatcatttgacaacccttggaccctgacattatattagtttacttaccttgaccttgtgatgagttttggaatatttggaggaggttcacatggactgaacagcctgtttagtagctttgcttcagcacagtaaactatatttagaacatttggatggtaaactatttcaatcattgttgttacatggtatcagaggatttggcagtcaagtcaatgccacaattgtgagatattgaaatcgatgataatatatgtcagctccggcgaacgagaaggcgtaccgcagggccatgaagcgcgcctgcctagccgctgtggccgttctccgcgaggtccggtcactgagcgtttaccattttatggcccgctatctccctccttgtcatggcttggtatggcgtggcgcctggattttagccgctgatcggaattgtcgagtgcgtagggtacaattgggatcgggagattggggcacactgtccatttgcgttagtgagacgtggtgcattataaactgagtcgaccatggcctacttgttttcagtcctataaatttggggtttctgggtgactaattttattaccgtagcttcaggaggttgttgctgttcaaaggataacttcaggttgtgctggaccattcacgtttgcaccatgagcactgggacagtacgatgtgtcgatgtgatattttgatcatgtggaaatgcaatcttcagatccgtccttg

SEQ ID NO: 39575 - DNA, 1974 bp, Zea Mays
atcgtcccaacagaacgacggtggaaccctggtctcctccctcttcacccgcacctgcactgcagcacacgcgccgccgaagcgctctgcccacctcgctcccctccagtggccgccggcgcggctcagcggtccatcctcctgacgccacctgcaacggcgccaggcggtgatccattccaactcgcgctccgtcctggtatccaaacatgtggtctttgggaaggtggtcagtggaatagctttgcttaaaaagcttgaagcagttggtagtgaaactggaaatccttcttatcaagtgaaaattgtagactgtggtgaagtttccaacacaaattctccggatctgctaaagggagagaaagatagtggctctgattcagaatcagattcatcaatggatactagctcatccagtgatcataggcgtaagagaagaaaaggatctaagaaggataagcgcaagcccacaaagagaaagggtaaacatacaaggagtaagagaaagagtagaggatccaaaaggcgatctagacggagccatgggagttcaagtgatgattcagtaagctcaaagacagataacagcagttctgacagtgaaaagggtggccatcataccaagcgttccttgccgaaagataaagagagtaccaaaatgacaatttcagaacaaggaagaacttttcaagaagcggacaaagacgaacaaacagttactaccatcaatcgatcacaatcacatgatggaagtaaaccctcaaacaaagatggcaacagggctgatgaaagatctggaaattacaattcagaagataggaatggtccaggtggaagctccaggaacaatcccattcaggttgatgtaaatttaacgaaaccagtaaatgtagatggcaacactggtggtgataatgcagaggctggcatgtctagaactggtgaaggaaggcaccttccaagcaatgattctgtgtccaccaatggtaaagatttaggtgtgggttctgcagacaatgggcaacctcaacgaatcaggaaaggacgtggttttactcagaagtatgggtatgcacgccgatacaggacgccatctcccgagcgtccccctgttcgaccccgctacgatggagggagagatgatagatggaacaatttcaataggtatgaaagaaatggtccttacagtagacgctcgccagtaaggagataccatggctcgccaagagccaatagcccatccaggtacccaagaagagaacgaatgaggagtaggtcacgcagcccagtgaggcgccatgaccgtggagggtatcaccgccccagcccaagacgtagccgcagccctgcagaaccgagacagaatgtgaatgataggcctcgatcaggtcatggcggaggcgatcctgaccacagccctcctgccaacaggtccagatcgaagagccgggaccccttgggacccagatctcctgatgctgccccagccaagagggagagctccagatacaaccgcaggcgcagcagcagctcaaggtccagcagccctgatggaaacaaaggcctggtttcgtactgagaagtaacggcacaacagtttgcaggctccatggaccatgtttcttgctagtttagcatcatgtactcttttgtaatggattctgaacttgaactgctttcgatgcaggtgtagatttatatgttctgttagatttgaatgtttcttatgccagatatttatagaactactgagtagagcaggggaaaggctcgagcctcgtgaactggcttgagcttgctaaggcttggagaggctcgcgagtttgtaagcctgaatcgagactacttttatgactcgctcaaacgccgagccctgagcgaacttgagtcgactcgggagtctgcctaataatattgtgctacgttgttatattattatgtttttaatttattttcttattttttatggattca

SEQ ID NO: 39576 - DNA, 1774 bp, Zea Mays
caccagaggcccaccgtcgcgcccagccccaaatcccaaccctagctccagcctccagccgccgcagctcctctctaggctccactgctccagccgccgcgcctcctgcctggctgcctcttgcctggctgcctcctctgtcctctccacgactccacttctccagtctgagcagtctccagcgaccagaggcagcgccgcagcgcgctcggccgctcgccgttccgcgcggccgcgcctcctctccagcgtcgcgccgcgcctcctctccagcgccagcccgccaccgcggcaccgccaggcgccctgccggccagccggccagccagagccaggcgcgcaacgcgctcgaccgccgaccgccgaccgcacaccgcagcacgggactacgggagcagccgaggcccgaccgcccgagaaattcaagataaaagattttgaagcattttcaagtcttaagaactcggaagataaatttaccttgcatcatcatctcatgaacggttaacacaatttggcccggagcttagttgaatcctgcttccgccactgcggacaaccatggcgtcgtcgaagctgcagctgcctgctgacgacagcgtcctcctgctcatcacccactccaatctcaccaccttcgcagcggacatccgcgtctcgcaacagaccaccgtggaggcgctcaaggacaagctctggcgcaagaccggcaccgccgtcgcttccatgcgcctccagctccgcgacgactccggcaccaagatcgccgacctcgacgacgacgccgcgccactcgcggcctacgccccctacaacggctaccggatccatgtcgttgatctcgacccttcctcactcacctcagggggttggttggaagacacttcccttgtcgacaagtacacaatgtccgatgaaacatacgataagctcgacactaactttcgaaaattcaaagaaaagatggtcccgaaaaactctccgtcagaggataaagaagaatcagaaaagcatatggaggaactatgctccaaaatcaaggtgggtgatagatgtgaagttgagcctggtgccaagaggggcactgtaaaatttgttggtagagctgaagcccttggacgtggattctgggttggagtgcaatatgatgagccacttgggaagcatgacggcatggtgaaaggcattcgcttctttgagtgccctcaaggtcatggggcaattgtgaggccagagaaagtaaaggttggcgacttcccggagagagacccatttgaagacgaggacgatgacgagatttgagtgcgtgtgcgtttggaaaagcaaggggaatgtccttgttgaattgcattcgaaacgtgtgtaaaatgaattcggagatttgagtgtgcgcgcttgcttgcatcttcttgggcaatcatagtgatcacatttcaaggcatgctgttacatctctactatttaagcgtgagctaataaattttccctccaacgcagagtatccaaaaaatggggtggattcgaatcctgctcacttgtataaagcgcatgacttctaccactataacttatttctgtctgtgttatataaattagagatattttgtgtgtatgatactaataattttaaaaaatataatatcatttaagcaaggtttacttatatatctgtagaaacagttacatatatgtgggttcttctactagtcctctgacccggaggaaaagatggagattttcgccaacttagagcatctctaacaatacctcaaag

SEQ ID NO: 39577 - DNA, 1318 bp, Zea Mays
gtccgattgtgcgctgtcgcagcctctgccctctcccagcccgctcctccatctccggtgagacgcgaattgaatcgcatcgaatccatgggcagctcctcgaataccaacacgagcggcggggccagcgacaaggaggagaagaagaaggaggacaagatcaaaggcaaggactcgtcggggccatccttcaaggagaacgaaagggtcctcgcctaccacggccccctcctctacgaggccaaggttcaaaggatcgaaaaccatgaagatgaatggcgctactttgtccattatctcggttggaataagaactgggatgaatgggttgcaaatgaccgcttgttggaattgacggaggaaaacgtgcgcaaacaacaagagcttgataagaatcaggtagttgacaaaacaatgaagtctggacggtcaacacagcataaaccaaaagtctccaatgcggatgcaaaagctgataaagatgacactaagagtctcatgaaggggaagaaacgtaaaagtcagcttgggactgagtttcctttgccactgaagaagcaacttgtggatgattgggagtttgttacgcagatgggtaagcttgtgaagctaccacgatcacctactgttgatgatattctaaagaagtacttggaacaccgggcaaagaaggatggcaagataaatgactcctatgctgagattctgaaaggattacgctgctactttgataaagcattgcctgcaatgcttttatataagaaagagcgagatcagtatgctgaagaagttaaaggtgatgtctcaccatcaactgtatatggagctgagcatctattgcgcctttttgtaaaattgccagagctacttgcttctgtcaatatggaggaagatgcgttgaacaagctacagctgaaactgctggacgttctcaagtttcttcagaagaatcagatcaccttctttacctctgcgtacgatggttcttgtaaaggtgcagatgaggataaaaccaaatgattgcatgtgaacgttttatatcatgtaacatctttcgatggacttgtctggcactattgttgatatgaatgtcgcttaggacaacaatcggtttatgtaggatagatgctgcagattcctgaaagacggtacttgaactgcccggagcatgttgtattttcttaagatgctggaactaagacggcttagttgaattttcactatcaagtgagtctcggtcttgccccaaaaagaatgttttgtacctcctctgtcccaatttatacgacaatttataattcgtatgacttttttggac

SEQ ID NO: 39578 - DNA, 1080 bp, Zea Mays
ccattttttcatccagaaagtggtcatctcctagagtcttcgagtctttagttcagccacgtgaagcttcctgctttttcactccgttcctgcacgccgagctttccatttcctggacacagccccctccccatagcactcggtcctcacctcgccggccctggctgctggtcgccgtcggccgcgagctctccagcgcaggggactccctctatggctggcgcccctgatggccggacctccacctcgccatggccggttgctcctgcactagattatcctcaagcccggtcgcgatatagcagcaacagccataaaaccccatcgtgtcacgctctcgacgtgttcgacggaatatcgcagcaagctccgccccggatctgcacagccccaacacgccgctgaccagcgccatcgcggccactacagctccctcccatcgtgtgctctgcctcatcgcactcgccgtggtcgacgtcgacctcacacagcaacgtcgtcgatccgcgcaaccatgacacacgtcgtcgtcttactatttggacagccccggtcacgatgtcatcgaaccttgccctccgtcgatgtcgggcctcgcgcatcgcgtgctcgacaaaaatctcaaacctgtggacagcacacgcgcgacccgagtttgattctgccaggtacgataattgatcacgtaatgtggaggacaaaggatggattaatctcaaggtgatgctgatgaataaacctgaagaatggatgatctgatgaagtactaggatgggagatgctcaccaagtggtcgtcatttaacaacactaacgtagtgttatcccaggcaagccccggtgcatttgccaccttccttgtgtttacaaaatctttatcacttatatgctgcattaggttataggagttgattgattaaacccttgatgcattaccatccttgaaaggttgattaccacaccttgtcacctgttttataaaagctagagatgcttagtcatgctgatagactaagaaaaatgttttttatctatgactcatgttttttacaaaaaagaaaataggctagggataatgaag

SEQ ID NO: 39579 - DNA, 2377 bp, Zea Mays
cgccactcgccaccccactttccaaaccagaccacagccgaaaacccccgatcatgccgccgccggtcgaaccctacatcccttcgttcaccgccggcttgtccgcgcacgaggccgccgatgccgacaaagactacctctacttcctccgccacgtccgcctcgacggagacgcctacacggtcgtgattccgtccaaggacggcgcctcctgtcctccccagatcatcagaatgctcgcgtggtgaatgacaaattggtgttcaagacggggaactgttcaataactatcggggaccatagtgatgctgaggagcacgacgacaccgaggaggaagagaaagaggaggaaggggaaggggaagaggatgatgaagaagaagcagacgaccttcctgcgtcagggcagtcgggggaggacggtatcggtatggaggaggccggtcctgtgtcagagacagaggacggtgttgactcggatttgccaattccaaaggtctttgagctagtttagcaaaaaatcgtgctatttccgtttcttgtgaagttcgttctaaactcctgataccaaccctttctttgccttgtgacttttgtaaaggaaatttagatctataccattaaaagattacaactttagatgtatatcattgatatctcacttacacgtgggatccacataagtcaatgacatgtggatatctaaagttgtaatcttttaatggtatagatccaattattcctttttgtaacacgtcttgcttataaagggagaaaattggatttctgccattatgaagcttaggattcgctcaaatgccactatgtgaacacgcttcgctaaaaaaccattatgaatcatatgcttacagacaaaatgccatttagggggttatctgaaacataaacttcttttactaaactgactggatgcttgtgcccctggcgacataatcgctgtcgctcatggatcggtccggttccagctgccaggttttcttcaggctctgctctatgcggttgggttagggaaaggagcgatacccactgctgctgcggtgaattgggtgctgaaagatggcctcgggtaccttagcaagatcatgttgtccaaattcggacgccattttgatgttaaccccaaagggtggcgactgtttgctgattttctggagattctgactccagtgttccctcacctgtttgttccagttggggtggctgctggtgctggccgctcagcagcttctttgatacaggctaagacttactttagtattgattatcaatattctatagtctgcatttatggaaatctatgctcattatagcgcaacataggtgttctgccttgtgtatctcggtatcctcataattggtagccatatgaacatgagacttatgatatggccactagaagatgtatgactatctgaagattttcatagcatgtttatactttatactcacctgagcgacggcgattatggccaggggcacaagcgtccagtcagtttagtaaaagaagtttatgtttcaaataaccctctaaatggtattttgtctgtaagcatatgattgataatggtctcttagcgaagcgtgttcacataatgacatttgagcgaatcctaagtttcataatggcagaaatccaattttcttttgtaaaggtgaaggatgaagtggtgagcaaaaatgaagaggatgatgtggggcctggatcagatttgcatattactaacgatcaggtgtattgtgagacggagaaggtgaaagaaggaggagggaatacgttgaatgatctagccaggagaacaacagatttggatcctttggacaagaaggaagcaagctcaagcaagggacatctggccatgcctctcaatccttcggaattacaaggcgttatatggcccccacatatcaatgagaggccaaattcagtttttaaagagaagttgattgagtttctcatcaaaccatttacacaggaagaatatgataggtattttgctctggctagtgatcgcattccaatggtcaaagaacgaaggacccgtaatacggtggcatactatcactggacgcatgagatgagcaagtcatactttgataggtacccagatcttgctcagcaattcagtctccaacgcaataactatacaaatggcttggctcttttgcgtgggcttttcttctggttgcagaacattgagctagaagaccaattcagaccatggagcgatgaatttaaaaagtaccgagttgtcatggaatgtttgtagagggtttacccatactagccattactccatccagttcagaaagtcgtttggtaagttagcgcggtcgtctctgtgcaactctctgacct

SEQ ID NO: 39580 - DNA, 625 bp, Zea Mays
agcttccagctccacgccagttcctggctcgatgtcagcgagcacgccagccacccgcccctgaacgagctccctccactactcgttatctgtgcttccaccctgtcgcatccgcccaggccactggacgccggcgtcgcgttcggctggtcgcgctcgtccttgcctctgcatctaccagcgccctacacctgctcatcgctccccatcgcgctcgacatcatccccagcctcacgctgcactcaccggacagcatcctcctcgccgcgtggagctgctgaatgtggctccccaacgtcgctgttgcctactgctcgctctatagcagctcgccggctccctggaaattccccagccatcgtccggcttccttgcctcgccgttcggtgcgtcgtcatccctgctgtctcgtaacgtcgcgctcctcacactttatttcctctatgtcggtgacgcttgctgaaagcctgaattacgttatccgtggatcaatcgcttggtggagtaattttctagagactggtcatcaccctgaagactcgtgaaattttatttccttagtcctcggctcttctctgcaacaaaggctatagtttgtgctgccgatggtgatgttaagtgccg

SEQ ID NO: 39581 - DNA, 2004 bp, Zea Mays
gtactcagtagtcagaaagacgcaagccggcaaagttcatctgcggctgcttactgttcccaagcagttggcattggcaatccgccagacgcaagcgtccccctccgctcctctcaaccggcacggcgccaggtccgcggcgaaatcggtggacggcatgccgcggcgcgaggcggcgaggcttctccgccgcctgggcccgatcgctgtccagtcgccgaagcgaggcttttcaggcatgcctcataatcaatatgaatccacaaaccacgctgtgaattcttatagaagattccactggattcccagtgtacagcaccctctgtgtggacctacaagtagtgggggaatatatgaaggtcaacgcagtgctaacaaggcttgtgaagttcagaagcgcacatttggttctgctgcaacacagtttcagaggaatccagcctattcagtgctgaactctgatgacattgcttacttcaagagcatcttgggagaaaatggtgtagttcaggatgaagacagagttgcagttgcaaatgtagattggatgggtaaatacagaggtgcaagtcagctagtacttttaccaaaaactactactgaggtatctaagattctttcatattgcaacaccaaacgattggctgtggttccacaaggtggcaacacaggtcttgtaggtggaagtgtgcctgttttcgatgaggtgattgttggccttgcaggcatgaataaaattatttcctttgataacgtaaatggaattcttacttgtgaagctggttgtgtgttggagaatttaagtaccttcgtggaaaatgaagggtttattatgccacttgacttgggagcgaaaggtagttgccacatcggtggaaacatttcaactaatgctggcggcctgcgttttatacgctatggttcacttcatggaaatgttcttggtcttgaagttgtcctggctgatgggactatccttgatatgcttactactttaaggaaagacaatactgggtatgatctgaagcacttatttataggaagtgaaggctcgctaggagtagtcaccaaaatatcagtacttacacctgcaaagctatcttcaaccaatgttgcatttctttcctgcaatgattacacaagctgccagaaattactactggcagctaggaggagcttgggctatgcaacatttggaaggagttcaaaatcctttacctgcatcaccgtacaaattttacgttctagttgaaacaacaggaagtgatgaatcatctgacaagacaaaactggaagcttttttgttgcgttcaatggaagatggtttagtagctgatggagttatcgcacaggatatcagccaagcatcaaacttttggaggatccgtgagggtatatcagaagcatccgtcaaagttggagctgtgtacaaatatgacttgtccataactgtagagaagctctatgatattgttgaagaaatgcgctgccgtcttggtaattgtcagattggatctgtcgataatctacagcttaattaactcaatatgttggttctctaggtgataatgcagaggtattgggctatggccaccttggagatgggaatctgcatttgaacattgtatcaagcaaatatgacgacaatattctcgcacaaattgaaccattcgtctatgagtggacatcagcacaaagaggaagcatcagcgcagagcatggtttggggctaatgaaagctgagaagattcactacagtaaatcacctgaagcagtgagtgtttccatactgccctgccaacacttggaagtatgttgtacataatgattaagaaaatgaccaatcatcctgagttgtagacttgttttcttttgcatttgagctgtctgtttccttagcaagccttagtagacaggtcacatatgaaaaagattgaatataccaagacttgcatacaccaccttttatgcattgttttgaaatgacacaaaacaagaacgatg

SEQ ID NO: 39582 - DNA, 3379 bp, Zea Mays
ggcagacaggcagagagctctgcctccccaggatacttcgcccctcgttccaccgcgagcccttccgcgttccgcctctgttccgccgctcgggacccgggagacgagaagtagtagccccatccccaactggtcctaacccacgggcgttgcttgcctggataaccacggcatcgttctacccgccgggcccgagctaagtcatacgtgcaaacaaagagcagcaaaagaagaacaagtggggcgacagggacagggaggaggggaaggcagaggaaatggaagcctctttcttgaggaaagatggcggtgatcaagccagtgcggcgacaatgtccggcgagcacaggaacaagggccttgactgggatttgaacgactggaggtgggacgccaacctgttcctggccacgccggcggccatcgtgccgtccgagtgcagcagcaggaagctgagtcgagctcagggggagatcgacttcggcgtcgtcgttgacaagaggcggaggctctcgccagaggaggacggcagcgccggttgcagcaattctggggtagcagatggagacaacaatcatgtggtgcctgctcagagagggcggagcagcgaggaggagacacccaggaaaggtgccagttcgagcaccactccgtcctgccaggttgacggctgccatgccgatctcagcggtgccagggactaccataagaggcacaaggtgtgtgaagcacataccaggacgactgtggtctgcatcaagaatgtagagcatcggttctgtcagcagtgtagcaggtttcagcttcttcaagaatttgatgaagggaagaagagctgccgctcgcgtctagcacaacataatggaaggagaaggaaagttcaaccacaaactgttgtgaatgggaattccatgagtgaaaatcaatctctaagtaacacctcaatccttctgttaaaacaactttccaggctagagtgtacagacatagtcattctaaatgtgtgcttgtatgggtggcagctggtagctcctctgagccaatcaatcatcctaattctttggttaaccttttgaagaaccttgctgctattgctagcacacagtcatatcaagatattctaaagaatgcaaattcaaattcaatattgtcaaatgctggtaataatgctgcaaatggatctactgtgcatgagcaaactatacggtcaattccaatcagaggagaatcattagcagagcctccagtgaaaaggcgggtacatgattttgatttgaatgatgcttgctttgaagaagttgagagccgaacagataaaattgtgttcaagctgtttggaaaagagccaaaagattttcctgtagatctacgggaacagatccaacactggttatcgcattatccaactgatatggaaagctatattaggcctggttgtgttattctaactatttacctccgcctccctaattggatgtgggatgagcttgatgatgatccagcttcgtggatagaaaagcttattagcatatccaatgatggactttggagaaaaggatggttgtatgctagggtacaggactgcctaacactgagttacaatggtccgtttgtcttatctggagtgattattttgcattcttctcttttcatagaccagcttcatttgtctttctttacttttttttggtaggtagtcttatgtttgcatctccctggcaactggtaattggcgacaagcatcagagactgtgtgtaactcctattgcagttgcttgttcttcgtctgtaaaattctctgtgaaaggtttcaatatagttcagccaactacaaaattactttgtgtgtttggtgacaaatatttaattcaagaagagacacaaatgctacttgaagattcaactgtgcagcaaggccctcaatgcctgaccttctcatgttccttttcttgtacaagtggaagaggattcatagaggttgaagattatgatcaaagcagcctttgtgttccctttgttgtcgctgacaaagatgtatgttctgaaattcggatgttggagcatggattgaatttaatttcatttgatgaaacctcggaaagaatagatgatctgatggcttatcgcaatcggtcgttacattttttgcatgaaatcggatggctccttcaaaggagccatgtgcgagctacatctgagcagccacagtattgtccagaccgtttccctgttgaaagatttagatggctgctatcctttgcagttgatcaggaatggtgtgctgttttaaggaagcttctgaacaccatgttccagggtgatattgacctagatgttccgtcaccaattgaattcgccttaggagaaaatgtgttgcttactgctgttaaaaaacgctcaaagcctttagttgagtttctattaagatacacagcaacagattacgccccagtgggcagtggagccggcgctccagttcagttcttgttcactcctgcgatgactggactgtcaaatattacacctctccatattgcagcaacaatcagtgatgctactggtgttttggatgctttaactgatgatcctcggcagttgggaatcaaagcgtggaagaacgctcgtgacgccactggcttcactcctgaggaatatgctcgaaagagaggccacatatcctatatccaattggtacaggacaaaattgacagaagggtgagcagagctcatgtctcggttaccatccccagcacaattgatactgccggaaagcatgctagccgattgaagcctgccgaccaaatcacatttggtgtggagaaaaaacagcgagggatgaaccaaacattgagctgcagacaatgtgtccagcaggtccagcagcttgcattccactcccggacaaataggttcttgtctaataggccggcgatgctttccttggtcgccattgctgccgtttgtgtctgcgtaggattgatcatgaagagcctgccacaagttggtggtatgaggcctttcctctgggacaagatacgttggggccccaattgatagactgcacaagacccaacccaattgtatcagtgtatgatgaagatgtttgcgccgagcgaagctagattcttgtaatgtacatgtttcttagactaaatgcctaaattgaaatttctgttccatagtaaaacctgtgaaatgctctaatttgcctagcttgtagctccattgcatttgcatcctgactgaggtaaagcttttacttgtttttattgagaggaaaaaaaactcagtcttagcttgaaaaaatactcgaagtctcaccctttatcactggcgggccgttactatctactctgcaacgatcacaaggtatagtgag

SEQ ID NO: 39583 - DNA, 468 bp, Zea Mays
ctcctccacgcgtgggtgtggaagcgacggcgccgacgctattcacaacggcaacgcgtcccttccaacgccggccgccgccatcttcatcagccaccttttctcatgttcttctggctgctcttaccccaccagtgcaagaacaaggaagtggtgttgcaaagaaactgtgtttgatttttgctgtaacttgactgaagaaacatctctgtttatcatctcccaaacatatagctatatgctcagtactgctcatttttttttgcaatggcaatgagatgtgttagtgcttaaaagtgttagctttgatctattgtgatgtaaacttcattatgtttcctgcatttgctttgatctactgtgatgtaaacacgatttatgttggttctgctatcttttggatgtaatcaaactattattttgctttgttgttgttctgattcaaactattcatgcttgttctgcttt

SEQ ID NO: 39584 - DNA, 2147 bp, Zea Mays
gggcggctcagtcagaccgcgagtctcgactctcgactctcgagtcttggcgtgcccagcccaggtcgtgaaccccagtccagacgtcgccgtcgtcgccgcccgaacccgatggacatccgccgcgggccgccgccgccgcgcaccgcgtcgggcggggtggagccgcggttccgccaggtgggattcgtcacggccgccgagcccgcgcggggggccgccacgccggcgcccgcgtcgcccgccgcgtccgacggcctctcccccgtcatgatcccgcccccgctcatccccgtccccgtccccgtccctgtcgcgcccgcttccgagtccctcgcgccttcttccccgcccccggactcctcgtctcgccccgacgccgtctccgaccttgacgacgacgacgacatcgacgtgtcctgggcgcgcccacccccgcccgccttcccagaaccaaacaagagacaccttactgaaagaaagaatgagcatgctcctccgactccagtttcgcagaaaccaaagctttctaaagcagagagacgtgccattcaggagtcccagcgtgctgccaaagccgctgccaaggaggcaggtttgaaatcaacagccatggcttctgatgctaacaccaagcaacccaaaacagcaaagatatctctgaagaaagatgtcaaccaagttaactctccagttgcttctgataagaagactggtgaacgaccgcctgacaaagatagaaaaaaagatgctcctcaaccccgcatgcaatttgacgatacacatcgggtggtgaaagcaaagaagcgttcagttgttagacaatcagaagctcaaaacagggtcgaactgttcagacatctgcctcaatatgcacatggcactcaactacctgaccttgagtcaaaattttttcaacctgatctgatgcatccttctgtgtacaaggttggacttcaatatttgtctggtgacatatctggtggcaatgctcgctgtatagcaatgcttcttgcattcagagaggcaataaatgattactccatgccttctgaaaaaattctgaatagagatcttactgctaaaatcagtagctatgtgtcatttctcatcgagtgcagaccactttcaatcagcatgggcaacgcaattagatttttgaagaacaggattaccaagctaccacttgcattttcagagtcagaagctaaagttagtcttcaatctgatattgatcgctttataaatgagaagataatagttgcggataaggtcattgttagtcatgctgtcacaaaaatcagagatggtgatgttctattgacatttgggtcagcctctgtcgttgaaatgatttttgataatgctcatgaacttggaaagaaatttcgtgttgtggtggtcgactctcgtccaaaccatgagggacaaggattgttgcgccgattagttgcaaagggtatcagttgcacatatacacacataaatgctgtatcttacatcatgcatgaggttacaagagtgtttttgggtgcctcttcagtactatcgaatggtactgtctactccagagttgggacagctttggttgcgatggttgcacatgcttttggagttcctgttctagtgtgttgtgaagcgtacaagtttcatgagagggttcaactcgattctatatgctttaatgaacttggtgacccagatgctatttcaagagttcctagggatgaaagtttgagcaatctcaaaaactgggctgagaatgaaaatcttcatcttctgaatcttaagtatgatatcaccccttccgattatgtttcaatgctcataacagattatggaatgctcccacctactagtgtaccagtcattgtaagagagtaccggagggagcacgtttggatatagaagccaccgttttcctttctggttttgtttgaggaggatttgtctgcgatgaacactgatccttgtattcggtatataactactcccaaccacgtcttgtagaaaagctgcaagttcttgaagatttagacacaaaaaaatgactagcaaattgtcagagctgttgttcctaagggcgaaccggcgaagccttaatacttgtatgaggtttccgtgtgagggtactgattcaatggttg

SEQ ID NO: 39585 - DNA, 1272 bp, Zea Mays
cacttgtttaagccgcgacctgcgtcccagcatcagtcagtgcatcagcattcatcgccccctgcctccccttccattcgccctcctcccactccaccagctcctgcctgcctataaacccagggccgccctttgactctccttccctgtccagtggcggggccgcttcccttgcgttcgcggagagtctgtctgtctgtctagctagctagctagctgccgagagcgtgaggaggaagggggatccatggcggcggagaacgaggagaaggagacggcctgcgcggggtacaagcacgggccgccatgggtgttcaaaggcagcgcattgtaccagctgcatttggtgaaggcgtcgacggcgcgggccttcgtgccgcgggacctccgcctggttgaggccttcggctacacgctcggcggcatgttcctggcgcgctaccacgacagccctgccggcgaattcgacgagctcgtggtgatcgccggcattgtgtggaacccgccgacctcctgcgcgctggggaggggtgtccgggtgcgctgcacttgctccgcgtggccaacttgctgccctgcgcagctcagctacagcctacagccgcccgtggtttcctactttcctccgtcttcgaaatgcagcagttggatggaactctgaatagtggtgacttgcttgactgagctttttttcagttcttgctgcttctgatctactactgtatgagcttgttttcaggtgggctgccagggtgctggtgaacagcgtcgaagcctgccggcacggccgcaaggaggtaggactgccaagccatgtcgccacattctcgtcaaagaacgaggctgcttcgcttggggatagaccgttggctagaccaaacagcttcctcaacatgctggggatcgggtcgacagccttcgagcaagggaatggccgcgagattgaggtttcagagtccaagggcggctcgtctactcggcatctgtgcaacatcagcctgccatttaccggatcacataaggaccaccagtgggcgggcccagcaatcagaatgtcactcccgagtttcaggcacgtctcgcttgctttgcgaatttcagcggacgtacagtggaccatcctgatcttctcaagtactcctgtcaagtagaatgcaggtgatgacaaaaaacaaaactctgtgaacgtcctgggctagtgagctatccattgatggcgtacgatctacccgtattcgacgcactgttgacatgtttccttccacagggtgc

SEQ ID NO: 39586 - DNA, 1177 bp, Zea Mays
tcatatgcaggtccctgacattgaggattttatatacgaaaaggccaaaacattgacatcgtcaagtaaggcaacaacatctttggtcaaggtggagaaaaaggttggagtttcttcagttataaaagtcatttgcgcagttggagctccagataactgggaggcagttcttggaggcattaaaagcatgaggttatctggtgaagcccccgtagatacgaagggctgtgaaaaagctggttctctccttccacccaagaagatttgcagttctgatatcaactatgatgtcaagccagacaaaagatgaagttacacatgctgctgtggaacgcctctctgaaaacggtttacttgatccggatgctatagtgaggactgatgagaccacgcttgcgaatcttatcaaacctgtcggattctatcagcgaaaggcgcagttcataaaagaagcttctaaaatttgtcttgagcgctttggaggggatattccggattctctgaatgaactgcttgctctgaggggagttggccctaaaatggctcatttggtgatgagcattgcttggaagaatactcaaggaatctgtgttgacactcatgtgcatcgcatttctaaccgacttgggtgggtttttcgggaagggacaagacagaaaactacgacaccagaacagacaagaatttctctagagaaatggctacccaaggatgagtgggaacctataaatccattactggttggatttgggcaaactatctgtactccactgaggcccaaatgcgataagtgtggcatcaacaacatttgcccttctgcttttaaggaatcatcaagcccaattccaaagcaaaagaaaacaaggtctccatagaactctgactgtgacttgtctggcaccgacgtgagataatattttgggttgtccgtcggtggtaaatattatggggtttccttttggtcagttattgttggatcaccttggtgccgtaccattggcatttggcaatggcaagtcatgtatatcattttgtataccggtaaattgttcaagacggtatgaagacacgcttgtctaccagttactgtaacaagcgaaattttcatgtgccaaatgacacatgattcatgaaaggtgggtgcaatgagaaaattctcttgcgtgcaccaaagtct

SEQ ID NO: 39587 - DNA, 2084 bp, Zea Mays
catatttcgcaatccccttctcgtccccttcgcgaagaagcatcatcctccatacatcccctcgtccgcggtctcacatggcagtggcatgagctgcttctccccgaaaaaaacgtttaaataaaaaacaaaacataattataaaccaacacgcctgccaccgaccgatcagacgaccccttccaagaggaaatccaccaccgcggccggggcctcccaggagatctcgccggaggccgcggcagcggcggcggtggggggcgatggcgctcaacatgaagaccctgacgcaggcgctggcgaaggcgtcggctgtgatagagaagacggtgtccacgacggtgcaagaggtgacgggcccgcgcccgttgcaggactacgagctgctggatcaggccgggtccggcgggccggggctcgcgtggcggatctacacggcgcgaccgcgggatggcgccccctcggcgccctaccccgtcgtctccgtctgggtgctggacaagcgcgccctcgctgaggcgcgggcgcgggcggggatgtcgaaggcggccgaggacgcgttcctcgacctcgtccgcgccgacgcggcgcggctcgtgcgcctgcgccacccgggcgtgctgcacgtcgtgcaggcgctcgacgagaccaaggccgccatggccatggccactgagcccgtcttcgcctccgtagctaacgcgctcgggtgccttgacaatgttggcaaggtgcccaaggaggtcaagggcatggaaatggggctacttgagattaaacatgggctgctacaagttgcagagacgttggattttcttcataacaatgctcatcttgcccatcgagctatatcgcctgagacggtatttataacttctaacgggtcttggaagcttggtgggtttggttttgctctttcggttgatcaagcagcagttggtttgagtttgacttcatcacaactatttcattattcggactatgatgtcgaggatacagctttacctcttcaaccatcgttgaactatactgcaccagaattggtccaaagtagagattctaaagttggctctgcttgtgatatgtttagctttggatgtttggcttacaatctggttgctcgtagaccacttctggactgccataacaatgttaaaatgtacatgaatgccttgacatatttaacaagtgaagccttttctaatattccttctgatttggtattggatttgcaaaggatgctatcgatggatgcactatcacgtcctagtgctatggcctttacaggttcttctttcttccgggatgatacgaggttgcgcgctcttcgtttccttgaccatttgcttgtatgtatttattattcccctggataagttaaaagttgtacctgtcaactcagcagcaagagtcttgcctgtttgactagacaatgaaacgacacaatttagtacctgacaatggccctaaattttaaggcaccattcctttcaggagagagataatatgcagaagacagagtttttgaaggcattatcagatatgtggaaggattttgattcccgagttcttcgatataaagtgcttcctcctctttgtgctgagttacgcaacatggttatgcagccaatgattttgcctatggttctaactatagcagaatctcaggataaaggggattttgaactcgcaacactgcctgcgcttgttccagtgtttgcttcagcgtcaggccactcaggaacatttgatatcacatgttcttccaatgctggtccgggcttatgatgacaatgatccccggttacaggaagaagttctgcgtcgaacagtaccactgtctcgtcaacttgacaccaagctagtcaataaagctgtgcttcctcgtgtacatggattagctctaaagacaacagttgctgcggtgcgtgtgaatgcgttgcgctgtttaggagatcttgtgccatccttggacaaagaaggaataatgggtatcttggagactgttcggcgttgcacagctgttgaccatactgcgccaactcttatgtgcacacttggtgttgctaatgcaatctataaac

SEQ ID NO: 39588 - DNA, 146 bp, Zea Mays
cctccaccaaaaacaatcgaagatttgcaccacgcgacgtagatccgagcggcaacgaaaagcaccttgggaggaggagatggggggcggctagggtttggtgagtggctggaagagtttggaaaggaggagatgataggggggcg

SEQ ID NO: 39589 - DNA, 1862 bp, Zea Mays
gatatttctgtgcagaacacaatgttttctgtgctttaagattcaagaagttgctctaaggtcaatgcctgacatagttgtagcaacccctgggcgcataatagatcatctgcgcaattctctttctgttgggcttgaagatctagctgttgtgatccttgatgaggctgatcgcttgcttgaattgggcttcagtgctgaaattcaagaactgattcgtatgtgtcctaaaaggaggcaaactatgcttttctctgctacaatgacagaagaaattgatgaacttgtaaagctttcactaaacaagcctgtacgccttgaagctgatccttctctgaaacggcctgcaacattgactgaagaggttgttaggatacgacgagcacgtgagtcaaatcaagaagctgttcttcttgcactctgtttgaagactttcaagcgaagtgttatcatttttagtgggacaaagcaatctgcacacaggttaaaaataatatttggtctctctggcatgaaagcagctgaacttcatggcaaccttacacaggcccagcggcttgaggctctggaacttttcaagaaaaaagaagtagattttttgattgcaactgatgtcgctgctcgtgggattgatattgttggtgttcagactgtaataaatttcgcatgcccaagagatgtgaaaacttatcttcatcgtgttggccgcactgcgcgggcaggaagagaaggctatgctgtgacatttgtaaccgatgatgatagatgcctcttgaaagcaattgcaaagaaggctggttcacagctgaaaagtcgcattgttgcagagaaacctgtggctgagtgtgcacgactgattgagcaactagaaggccaaatttctatcatcattcgagaagaaagggtggaaagagaagcaagaaaagctgaaatggaaatcgcaaaggcagaaaatatgatagctcataaggatgagatatactcacggccaaagagaacctggtttgctactgaaagggagaagaaacttttggcagcagcggctaaagaatctttggatcacggtaagagtacctctggagttattagtgctaagaaggccgaagaccttcgtctaaaggagaaaaggagacgagaacatgagaagaatctaccaaggaagaagcgccgaagattggaggcccagcgtgagatgttggaagatgaggatgacgagaaaacaaaggaaaatgatagagggaagcaaccaatgaaaggccaatctctagtggatgctgcttaccgaaaggcaaaatcattgaaggcagccagcaaacgggcccctggtgcaaggaaaggaaagaaagagaagaatgaaaggcaacattctgagaaggctccgaacaggcatgaagagatgcgtgacctgttccaaaatgatatgagtgaatggaaacagggacgctcctcaaagaaaaataacaaatttgcgcccaaaaaatcaaggaactcttttaagagcaaagcaaggtacaagcggaagtagaagactcggccatctccgggtttatattacattcccttgtttcaattttgactgactgatcctgaagaaatatctgggatccagatgtttgcagttaattcaagtttgctttaaacatattctcatatcatgtattgaaactcaccgttttctggggtctcttatgatctcgcgaactgtgttgccgttttgtagttcgtaccatcttaaattttagggttatttggtttctatagacttagcttttaggacccgtttggtttgagctattaaagagtagtcccttcgttttagtcccatttagcatataaattgccaaatgatatgactaaaatag

SEQ ID NO: 39590 - DNA, 2158 bp, Zea Mays
agtcgcccgcgtctcccacccccgcctcccccgccgccgcgctcgccctcccccgcctcccccgccgccgcgctcgccctcccccacgacagccgccatgcgccctatctccgccgtgcttgcgcttcctcacccgcgcaatttgcacgcgctccccccgcgacagtcgccacgctcgcacgcactccctctgcaatagctgtcatgcgccctatctccgtcgcatcccgcccgctcgccacgcttgattcctcctttcaatggtgcccacgccgtccaatcccgcccgcggtccttccccacgcggatcccccacccctcctccccaccgccgccgcaacaaatccgcgcacctcgatctgctcaagtgagcgtggctcaacgagaaggccacgtcagatatcctcagcttcgaatcgcccctcgcgttacgtgtccgcgagcagatccagcacctcatacgctcttctccctcccccttcttgaccacgttcctccactcccccccatagctctgggatctggccatggctccctctcctggtgtcgtgtcacccaggaggcggcgctcgatgacttcgtcgacgatggcgttgacgacctggtggtctcgctctaccagatggacctcgatctcacgctcttcctcctccgctcctaactcctcccggagaagatcaagaagtacacgatgcatatctctagggccacggccgaggcgactggtgaagttgcggcaatctgatgcgggaggtggccgacctcatccttagcttccctgacgagacgcccgtcgtcgtcctctctgccatggggaagaccaccaataacctcctcctggccggagagaatgcggtgagctgcggtgcccccaaggcgtccgaaatccctaagctcgctgtcatcaaggacctgcatcttaggacggttgatgagcttggtttagataagtcgattgtttcagggttccacatgcacattcaccgagtcaatcctgcgatcgtgtggcttccatactgggctgttcacctcaccacatttgatggatgttagagagcgatttcagctagggttaatatttgaatatttctgaagagaaatttttgaagtacttctggtggtgctggaacaagttgaaggagaagactgatgatgatattcccatgccagcctatttcaggttcctcgcgctgctcgcattcaagatattttctgctgagcaggtagatgttgctgttctcgaggttggcctaggagggaagtttgatgcaactaatgtggttaaagcacctgtagtttgtggcatatcttcccttggatatgatcatatggaaattcttggtgaccaaatcctgttcttggtgataaacttggtgtcgataaacgggttgttagttctcatgaatgtcatgttgtctcgaaataaagagcttctgtccgcacctaatcgcctaaaatggaaatgtttgactcattgtttaattcggggggaagctgaaggtggtctgatccggtaagagatcttaatctgcattacacttgttggattttgatgtcgcttctgggagtgtttgattgaattctacaccagttctaggaagagaaagcctgaccaagtcatcatctccaggtttgttattgtttggatgcaaaaatcgtcgttagttaacttttttgtgttgaagtaactgtttggttgagaaaattagttgcctatcttctattttctctgttttgttatagcagcaagctgatttgtgtctaatttatagggacgatgttagcgaaagtcaatttaatcaggtgctgaacattgagttgcaacaaatcatcgatggagactgtcaccgcagccagaaaaccacggtctcaatttgaggagcctttccatctatgtttgttagaaggcatataatgcctatttatctcttgtattcgaacatttggcaattaagaaatagaagattacttccccaatatcccttattcctaatctcacctttcacggcttctggtgaacaatcacttgctattaccgactgacatgtccactcctcatatgtgagatattggggttgatatatatgttgttcgtttccatgtaattattgtgtactaacatttattgaataatttttacgccgtaacaacgtacggg

SEQ ID NO: 39591 - DNA, 1267 bp, Zea Mays
gctcgtcggccctccacgcaaacgaaatccagcagaccgacgcgaaccgagaaaaatcccacgaaatctcgtggccgcggcgaccggaagaagaggacgacgacggacggagcggcgatggcgtgccgcgcacttgccctccgctccctgctcctccccgacccgctacaccgcctcccggccgcggcgccacctgtttggagagcgtcccgcggtggccgccgtccgcacctccgctgctgctccggcggcgggggcggggagcccgggcagccgccgcaagaagctgtgctcgaggccatatccacaaggtctaaaggaagggttgcactcacaacaaatatggtcatgggtggtactgtgactgacgatgcaagtgatgaatggcttgttctggatcagaaggtaaattcctaccccacagatagaggatttacagcaattggcactggaggtgatgattttgtccagtcaatggtagttgctgttgaatctgttcttcaagaatcaattcccaagggccgggtatctcagaaattatcttcaagagggaaatatgtttctgtaaacattgggccaattcgtgttgtttctagtgagcaggtccaagctgtgtatcgtgccatgagaagagataacaggatgaaatacttcttatgaagtgcaatttcatgtcctggatgttccctagtccattccatgttgtatcctacgatgcattttcgccatatttgctggacctccggtgaattccaatgacttttatgtgccattcaagcccaaattgaagcttctctactacaaaacaatatgttgggtccagctacgttatttagtgcagggggcgtatatagctactatgtattccctttcttctataatgaataagattcaaaggtgcttgcaagcaataactgtcaaatccaagagatatcctctacaaaaggaaaggagataaggatacagcttcttttgccaacgttcctaatatatctgaaaatttctaggaacttgtttattatgggacggatggagtatgttaaagatgtatgttagtgtttcatattacatgtgttttactattttataaacagtatgaatagtagtataagtgctcctaaattatcgatgtgtgtcttcaattccaagagactattttttactctctatttgactctttatttacctctctataaagattaaaccctatatatagtatcttattcgaacagactttctaacagacaaattagtttagctagtcaga

SEQ ID NO: 39592 - DNA, 279 bp, Zea Mays
gtcggcaggaaagcgagagagctgcctgcggggccgaaagggacgcgtggtccggcccaaaaaacgaccgaccagcgtgcggccgctccactccatcaccatccccatcaccatccattatcccagtccagtccagccacgtgcagagaggcaaccatcaacgacggacgggggtctgcctgcgtgcggtgcggatgcggatgcggatgcggtgaaagttggcagttgcgccgacgacgacgaagacctcgtgctctgctgctccgcatcttcgcgttt

SEQ ID NO: 39593 - DNA, 1765 bp, Zea Mays
ccgccaaaaccttatctcctttaaaacctacgctccacttgcttccctccgttcatggcagctctgccaccgccatggcctacctctccagtctccaccacgcgccttatccccgcctacttctccaccaccgctacctcttcttttctgcatcctccccacctcccgtcgtcactacacgacgccttgttcctacactggcatgccatggccgcgatctgctcgacgtaatgccctacagagacagcaggccctcaggaacggagggaagcagagcaggcccaggcggagcaccgcgtgtcacaaacagctcaactgtgcgaggaaacgccacagcacaggaggcacatatgccgatgtggcgggaaaggacccctggcacgccaaggacgtggaagaaaggggacagggttatgctacaagaacatgcggagggggagtcacaagaaaagagctggaggcgagggctgacacggagtttggagtcaaaagggcccatggtgaggaagagctggactagagacggaaatggaatgcgggcaaaagaatctggaaaggttggaaattcaagagatgagggtacaggaagaagaaacgcatgtaagaaaatgaagaaacccccggatggtgagtatgctggcaagctgagagttgagctggacatgtgctccaagagaggagatgtgatgggggcgatcactctgtatgattccgcagtcgaggaggggatcaagttggggcagcatcactacaatgtgctcctttatctgtgttcttcagcttctcttggttttgtgcaaccagcaaaaagtggtaatatgggtagtggtatcgccagtattggtcctgcacagaaacttgatccatcacccagcagaagcttgggaggttcagagggagacaatgcatatgcatctgaaagtcatgttcaagatcagggaaaaaacaaggccgatttgattccaggtggtttgaaggcacaaacagttagcataccagtagaagatgagcttggagactatgcacgtgcacgaggatttgagatatttgataaaatgtgctcagagaaagagagagttcaaatgagtgaggctgctctgaccgcaaaggcacgtatggcgttgtccatgggtgacagtgatatggcctttgagattgtgaaacagatgaaaggcctgggtttaaagccaaagttgcgctcatatggtcctgctttaacagcattttgcaacagtggtaatgttgaaaaagcatttgaagtagaagcccatatgttggaatctgggatcacacccgaagaagctgagttggagacacttctcagggctagtgtggttggccgacgcggagacaagaaatggcttgaaaagcatgggccttttgaggcagtcgtggatgctgccaatgttggcctgtttagccacaaacacctttctttgagtaaggttaattctgttgccgatgcaataaggctaaggtttacgtcaaaaaaatggcctttgatagttttacataacaagcatctcattggagagcgcatgaaaaaacttaatgatcacaagttggtacaaaagtggaagcaagaaaattcaatatatgcaacccctactggttcaaatgatgattggtactggctgtacgctgctatcagatgcaaatgcttgatcattaccaatgatgaaatgagagaccacacatttcagattttggaaaggaatttcttccccaagtggaaggaaaggcatcagtattgttttcactaaca

SEQ ID NO: 39594 - DNA, 1932 bp, Zea Mays
tccgcgcctctccgcccccacacgcgctttcgctgcaccaaagcgtcgtgtgagctgctacttaacctaaccaacccccaccgccaaagccaaaccattccccccgttcctgattccaattccaaccagcccatcccccttcgaccatacacacagagcggaggcgaaggcaagagcaaacagagtagccgccgccgccgccgtcgtcgtcgtgtgttgagcagggttttgtttttacggcttagctttgagcagcagagatgttgcgagcgctggcggcgaggtgctgcggccactggccgccgggcgccgcggcggcggacgggatgctgtggcaggcggagctgcggccgcacgcggcgggggagttctcgatggccgcggcgcaggccaacctggccatggaggaccaggcgcaggtgctggcgtccccggccgccacgctcgtcggcgtctacgacggccacggcggggccgacgcatcccggttccttcgctcccggctcttcctgcatgtccaacgcgtcgtgcaggagcaggggggcatgagcgccgaggcgattcggagcgcgttcggcgcggccgaggaggagttccataggcaggtgaggcaggagtggaggagccggccgcggctcgctgccgtgggctcctgctgcctgctcggggccatctccggggacacgctgtacgtggccaacgccggcgattcccgcgccgtgctcggccgtcgagtgcccggcggcggggcggccgtcgccgagcggctctccgccgagcacaacgcggcgtgcgaggaggtgcggcgcgagctcgccgcgctcaaccccgacgacgcgcagatcgttgtgcacgccaggggagcctggagggtcaaggggataattcaggtgtcgagatccattggcgatttttatctcaagaaaccggagtatagcctggaccccttgttccggcaagttggggcccctattgcgctgaagaggccagctctcagcgctgaaccatcagttcaagtacgcaagctgaaaccaaacgacctgttcctgatatttgcttcagatggcctttgggagcacctcagcgacgatgctgcggtgcagattgtcttcaagaatccgagaactgggatagccagcagactggtgaaggctgccttgaaggaagcgaccaggaagagggaggtcaggtaccgtgatctgaggacgatcgagagaggggtgaggcggcatttccacgacgacatcagcgtcgtcgtggtctacctcgatggccaccgcgagcgccgccacaccagggtcgttgactcgagcagcaactgcaccagtgcgcccgtcgacatccactcctccaactcccgctagtttccggagccccttgcaacgcgagctgaactctgggtgggaggtgaggtgggtgcagccgtagccatcggaatcggaacaagtcgatatgtacatagcaagcccgtccattggatcggacttatttttaaggtaagaaatagttgatgacgaactggaggttggttaatggagaccaaagaatatatgctctgctcagtgctcaggatcatagaatttaggttccggcctgagaatatatactctttgcaacggatgagatgctcttatttcatttagcatcgtttttttttgtcggaaacttctttatgtatgcagtgccaagattaccactacctggaatcgttgaaactctgcatggttcgtgctgtggaacggattgctcaaatatcttttcgtactgtttagggaacggactgttcagattgttcgctgcgttattaccctttccgtttggataatgatgtataagacacgttcggttgagttttgatttctaaaaaaactgctacgagctttgagttgtgaatgaaaaagttagtgtagattgtggtttgtgaaaaaaaac

SEQ ID NO: 39595 - DNA, 1329 bp, Zea Mays
ctgatgatgtgaagagctttggtgactgagatatgaacaaaacatatgggggaggaggttggtgcaacaccacgcagagctgctccgagcgcaaaatgaccaacttcggttcatctaagtatatgggagcagtaaacttcactgggatactcagcaatgatcacacagaaaatcctgatttctacaactggaatacagttgtcataaggtactgcgacggagcatcatttgctggggatgcagaggggggagatctggatggaaccaaacttttcttcagaggattacgtatctggaaagcagttgtagatgaactcatgggaaaaggaatggacgctgctaaacaggccttgcttacaggctgttctgctggttctctagctgcgctactgcactgtgataatttccatggacggtttcctcatgaagtttcagttaaatgcctttctgatgctggattttttattgacgagaaggatttatctggagaaagatccatgcggtcgctcatcagtggagtagttcaccttcagtgtttctttcctgctgaactgattaagggcatcaccacccccacgtttattctgaactccgattacgattcttggcaggaatggtctagttgcaaagcagatatccggaactgcagttgcgcacaacttgatgtactgcatggattcaagaagaaattagtcagtgaattgaaggttgccgaagataacaaggactggggcctgttcattgattcatgctttacccactgtcaaacaccattcgatatcacatggaattcaccgatctcaccaaggctcggcaacaagtctatctcagaggccgttggggattggtatttcgatagaaggcaaaacgcgaaacagattgactgcgagtacccatgcaaccccacatgcagcagtcttctgcctactgcttgattcgcaaagggctgcactgagatcaccaggcttttctcatttttcaaattagttttgctgaggattcaaaagggagctttgccttattggtaaaacctgcaattgactaaacacgacttgcagtagttgtgcttccatcaaaagcaatatgtcagaaccgttaagcaccaaactttcaggaactgtgcctcgtaacttccacgttcaaagaaattccagcagagcccacccccttagcctcttacaaaatcaccagttcgcatgaaaacccagcaatggaagctcataaggcctactaaatccacacgattaccctgaactcggcaccaagtcaaaccctaattaagcaaagaaagcccatccgcaaatataggactcgagaactcacctccac

SEQ ID NO: 39596 - DNA, 1876 bp, Zea Mays
cgcgacgtggcgtctggcgtggtcgagcctctagagaagcgagccgtgcccgtctctcccaatccactccgtactcggcgctcctcccccgtcgccgccggaaatcaggaagcccaagtgctctcttgggtgcgctcgtcgccggtggcagtgagccagtgatgcatcttcatctccggcttccttattaggatcagcccgtcgatcgatcatggcgtcgtcgagctcggctgctactactagtggtgacagtcagggtctcaaggctcgagatgcctgcatcgtcggcgtcgcccgcacgcccatcggcgcacttctcgggtcgctgtcgtccctccccgccaccaagctcggctccatcgccatccagggtgctctcaagagggcgaaggtcgacccggcgctcgtgcaggaggttttcatgggcaacgtcctcagcgccaaccttggccaggctccggcaaggcaggcagcccttggcgccggcttgcccaactccgtgccatgtaccaccgtcaacaaagtttgttcctcgggaatgaaggctgtcatgtttgcggctcaaagtattcagctggggatcaacgatgttgtggtcgccggtggcatggaaagcatgtcgaatgccccaaaatatgtggctgaagcaagacgaggatcacggttcggacatgatgtccttgttgatgggatgctcaaggatggcctgtgggatgtctataacgatttcccgatgggaatgtgtgctgaattgtgttcagaccagcactcaatctcaagggaggagcaggattcgtatgctatcctcagcaatgaacgtggcatagcagctcaggacagcggtgcattttcttgggagattgttcctgttgaaatttcttctggtagagggaaaccaccagttgttgttgacaaggatgagagtcttgcaaagtttgatccagtaaagctgaagaaacttgggccaacttttaagacgaatggttctgtaacggctggcaattcttctagtataagtgatggcgctgctgcaattgtccttgtcagtggagagaaagccaagaatcttggccttgaagttattgcaaggattacagggtatgctgatgctgcacaggcacctgagctgtttacgacagctccagcccttgccattccaaaggctatatcaaatgcagctcttcaaacttcacagatagattattatgaagtaaatgaggctttctctgttgttgctatagctaatcagaggcttcttggtatcccttccggaaagctaaacttaagtggtggtgctgtttccctgggccatcctatcggttgcagtggtgcacggataattgtcactttgcttgggattcttagacagaaaaatggaaaatttggtgttgctggagtttgcaatggcggcggcggcgcttcagccctcgttttggagctcatgcaaccctcttcgcatatccattcatcattgtgaagttggtgcgagcaaattagcaagacaaaatttgtaaaatgtgctgtatctgtcgtgctgctcagcacagggcattatcttgtactcccttatatgggaaaatatagacgtatatatacccatggaaataacagaggcccggaagaataatgtacagacactgatacagccactgaaagaagacatgggtagtgaacaatctgcgtggacgtgattttgccttgccattttatgttggggcaattgtgagtgcagttgtaagaatctttatgaggaagattcttcaataggcaacaccgaattgaattggtgtaacgtgtgccccaacatgaaatgtaatcatcagattccgatgacaaattatgagctgctcatagttaaggttaagaagaggcgcag

SEQ ID NO: 39597 - DNA, 2605 bp, Zea Mays
cagagcaccacggctgcacgccgtgccgcagtcaacgccgccatcctcgccgctgctacaccacgagccatattgagccacggacaaacgccgatgtgatgtgtcgccgcgattctctcccgcatcacaccgctcgcgtcgcgacagtcaaactcgaccacctagattgctgtgccacgccctcgacgtcatctcagcaccagcccgaagcgcccaggaatgcaaagccaactccaccgcgccgcgcgtgcttgcacagtcgtcgcacgccatgtgcaccattgagccgcgaccgcctgtaagaaggggctcgagctacccctcgacgccgtgcatcttcccgagctgagccaccaccagtcctccgtcgtgagctggttcgccgcggccgtccgtcgtcttgccgttgcagcaccccggaaggccagccgagccatagaccgccgccgatatctacggtcggattaggttcggtgccctcttcgcctctgtctcccgaggtctccctgcggcggcggtcaccgtagtggactccggccacccccacgacaaccggcaaaagggtaagggagtgcaagaactagggtacaccggcctcatgaacagctccattaacaatctctttgatctcatcacgaaccaaggtacgggagtgtgaactatgccgtgcaaagacctgcgcttcactgcctttgcccacacctcaggctagaaaatggttcctgattccgtcaataaccaaggtatgaatagttgaaagctattgcaatatactactgcaacattcattgctttgtgccactttgcttatgttagtaatttcgacatgctctgcttatttagttgacacttgttgatacgattgtgcttgccgtccataagtgagttctaaagactattgatttcattgacgatatttaatcttatgcactatgtttatgtgacctattaatatttttgctgctttgttgattgcttatacctctttactgttatctcaggacagttatagttttccaatttgtacacttacatatagattaataattgaagtccaattgttgttaacaaaaaatattccttagacatatggatgctcatatatttattatttttaaacatcaagaattcctatgaagctacactcattcatttcacaattgctcatacgactgttctgctcctctttaggtaagttctatgtactacctcattcatttcactgccaatatttatgtcaagtaattccatggaaccgtgtttctaaattccacaaatgttgacagaattgttctacgcatctctatgtatgctccaagcactatctctttaatctacgacaagaatttcatagcagctttgactactattgaagttgatctttttactagtgtggtctgcttagcagtaggtagcactacaactagcaatgtatggatgaattaaaggaagtgaagaaggcagacaatcttacataaactctacatcttaaaactgccatgattggcaaagaagctggatgcatcctttgcattggtgtattcttatcaccaagcagtaacgtgaagcaagtcctgaccagattgaagctctgtatcagtacgccaaatttcagtttgagtgtggtaactactcaggggctgctgattacctttaccagtatcgtgctttgtgcacaaacagtgagcgaaatgtgagtgccgtctggggaaagctggcagcagaaatcctaatgcagaactgggacgtagctttggaggaactcaaccgcttgaaggaaataattgattcaaaggttctaaccgggacgtgctttgttctgtgttctttgttctttgtgtacactatatcaccaaccatgttccttcctgatctttgggcagaacttctcatcacctctgaatcagctctagaacaggatatggctgatgcattgggctctgttcatcttctttaaccatgaaaatggtagaaatgggatcattgatctgttcttccaggacaggtacttgaatgctatacagacaaatgcacaccatcttattaggtatctagctactgcagttgttgtcaacaaaaggagaaggaatatgcttgaagagttgattaaggtcattcaacaggagcaccatagctacaaggatcccgtaactgaatttctggaatgcttatatgtaaactatgattttgatggtgctcaacagaaactcatagagtgtgagcagggttctggacaaagaaagcttgtaccttaaaacaggaggatacaagaagctggagtggttgtctgaaggcttttgaactgcttgaagcattagtgtagctttggtgcttttgtgactgatcaactctggagcagctagagtgatgtagttgtgggcttttgaacaatagctggagtgatatgaaacattagtgatgtagttgtgggcttttgaactgcttcaagctggagtgatgtcgttgtggtgcttttgtgactgatctagtcgtgaatgatattataattgtgatgcttttgtgtttatgtgatggatctatgattgtggtatactgattaactgtgtatgtctttatgatttgtgtataaaatatgtgatttgtg

SEQ ID NO: 39598 - DNA, 2696 bp, Zea Mays
gttcgacgcccggctggggtcgttccagcgtgcgccgaggctgtacgcgctctgcgtcagcctgctggcctggaacaccgtcgtctactcgctcacgttcctgagtgctgcatctgccttgcgtagtacggggagaaggaggaggttcggcagctgccgtgcacacacgtgtttcatctcaagtgcatatacaggtggctcaggatcatctcctcttgccctctctgcaagcaagagctcaagtgaactttatattcattacacacatgacattctcgcttattctttggatcaaggtgttagtatcctagacacaacagatattttccagctaacaagggaaatcaaggaagaattgatctttatattagcaggcggatgcaatcactaatcaaaaccacgatgcaaggtaacctaaatggattttaaattttattttggattgttaaatctttatttctgactactattgttttatgtcgtggatgccctcgtgaggttctacgccgacgccttcaggagggattcacagaggccatggtgaggatggccagcttgagtcggctcaccgggagcagcgcgagatccgctacaactaaatgataggaggtttcgctgccatttgcagcgactgtgttccagttcgaccgtttggggaaaaggtgagtcctcccatttcatgtagatgcatgggttgataaacatttgggagaaatgtcccctctttaattcgaaaaatagttgtgtatttgttcgacttatctgcggcgatgtacctttgtacgcgtacaaacatctatagacaaaaacaaaatgacacttcatggatgtagcaagagcgggctacgagaaactagcagatcatgcctaaaattcaattagcattagggtcagacaaaatactacattttctggattacaataatgtataggtgcatgaaaaaaacttgattccaatgtgtgacaaagtgtgaagatgaaagtgcactttcacgctgtcataacgcggatttgttttccttgctcatggaatgtgcatttgtgtgtttgcgtctactgtgcggctacaggcaaggaaacaggatctgtcacggaaggtatgtacacattacagtaaacgttgttcgtagaacatgcactttgtggagtggtctttgaatgagatgcgtttagaattaccttttcatgcagatctcttgttcagaacctggttgcttagtccattcttgttttgggttgctactacaaaaaagcggcaatgctttatatgaatcgcctcttactaatatccagggtcaaatggtggtccttcagtgaccagactaatatttgagcattaatcttatttgtttcacagtcatttcttgtttatcaatatgaatgctatttttttgcgagtggacttgttaactaataagctcatagatatttgaacaaaaaatagtgttttgttctaaaactgtcataaagagtgcatacatcatagctatggtttcaactgtgatttgatgtcctataatattgagtgtcctatagtgtgttgttctgaaacagtcacaaagagggcctaagaagctgatggaatcctcattcaccgccgctaaggagtttgagcgggatcggagaggagacgtcagttcttcctcctctgctcaatgcggccattcgccctgtcccccaaccctgaactccacactgccactccgtgctcattttttctgaaggggaaatattcatctccttgttgttttgtaccatggatactttagcatcattctcatactactaggagtgtaggtaaggagtccacacacgagtttgcaaacaccattaagcctattttgcttgattagtgccctgcaacacttcatatgttcaagacaaaatccatacccatgtctattgttgtatgatattatttgcattgaccgttgctgctcttcttgattgcagtcactaacattgcattaatctatgtgatacatttattcaggcgattcccatttctcagtgatgtcgatgtcctgtactcctgtatatttggattcaacaatatgccattagtgcattggtgccacaacactggatgagtataggaagcatatagagaaagatcctgccttggaaagaaggtttcaaccagttaaggttccagagcctactatggatgaaacaatacagatcttaagaggacttcgtgagagatatgaacttcatcacaaactgagatacacagatgatgctttaattgctgctgcacagctgtcttatcagtatatcagcgatcgttttctgcctgacaaagccattgacttgattgatgaagctggatctcgtgttaggctgaggcatgcgcagctccctgatgaagccaaagagctggacaaagagctgcggcagataagcaagcagaaaaatgaggctgtacgtggccaagattttgagaaggtatactgttgtttggcacagcggtgacaaagccgatccgctcccacctctctagcaacgtcgatatggttaataccaagcattatgttgtttccttttgagataaatattttgttactgattttaccttttgtctcctcttcttgttttttgttctagaatctgtagcaaatggctaacgatgaggatatccattactttgtttatgacaataaaactgatatgttcaagattccgtagcaacgcac

SEQ ID NO: 39599 - DNA, 1504 bp, Zea Mays
acgacccagaaacccgtcgaaaccccagccccaggccgccggttgctttcgcttcgccggagaagagctgagcgcgatggcagcggcgcaggaggaagcggcggcggcgccgccgagcacggagagcgatgctaccgagacggaggaggcaccaccaggcggcgcggagagcgatgctacggcgatggaagcggcggcggagtactcgtggctccagctccgcttcgaccgcccccctcgccggctctaccacttcgcccgccagttccgctccgccacttcctctggcagcaatagtagcggcgagaacttcctcaagggcgtaaagtggtcgcccgacgggtcctccttcctcaccagctccgacgataactccctccgcttgttttacttaccggaggaagcgtacattgcggcggagcccgttgccgaggccgctgtcgaaagtgaagattcttatggagctttcattcaggcgaacgagggtgagccagtgtacgatttctgctggtacccgtgtatgtccttgtctgacccagccacttgtgtatttgcaagcaccagtcgtgatcatccgatacacctttgggatgccaccagtggggaactccggtgcacataccgagcatatgatgccatggatgaaataactgctgcactttcgatttctttcaattcttcaggatctaagctatttgctggatacaacaaagctataagagtgtttgatgttcatcggcctggcagagactttgatcagtattctttactcaaggggggtgaaggaccaactgagaataatatggagcctttgtatgtcttacatggccagcttggtggtgttacacaggtgcttttttcgaaagatgggaactatctgtatactggagggcgcaaggatccgtacatattatgttgggatattcgcaatactgtggacattgtttacaagttgtacagatcagctgatactactaatcaaagaatacattttgatattgagccctgcggtagacatctagccactggtgggcaggatggcatggtccatgtatatgaccttcaaggtggtcaatgggtaaccggctaccaagcagcagctgatactgtaaacgggttctcgttccatccataccttccatttgctgtaacatcatccgggcacagaagatttggcatgcaagatgagtttgaagacgagttaaacttggcaggtgatgagaacagctgctctgtctggatgttttcttcctcacaagaagcttgaagcatttagtgaaaatattggatcaggctgaagctaagcgaagcattggatgcacattcaaatctattgtcactttgatgttcgtgtgcagagagcatcgcggcattgaccacttcctgttgtgttggctgtaattggtgtctgcaaaatgcaaatgtattcactgagatctatagaattaatgacttatttttttgacgaaaaacaaatctagcaatagaacatttaaaaaacaaa

SEQ ID NO: 39600 - DNA, 1699 bp, Zea Mays
atgttttttgcactgaatctggttgtgaaccaaacacacctcagctgctctgtccaaacgcaccctgacttccgagttccgacccccactgctttgcttgctctgcactccgctaattccttccgcggcgatcccgagcaagaaacccagcagcgcggcggatctcgccgggcggcggccgccactatgatgagcggtagctcgcctccgccgccctcgcttcctgccgggagtggaggcttcttcaggggatacacaaagctgtgcaagggcctcgccgtcatattgctcattgtgcaccttgtagtccagttgtttccgtccgccgtcacctatctcgcgcttatccctggaagaacgatcccttttgcttggaacctgataactgcaggctatgtcgagcaaacaattccagggatggttgtcagcatcattggccttcttttatttgggaagttgttagaacctctatggggttcaaaagagttatcaaagttcatttttatcgtcaacctttcaacttctgcttgtgttttcatgactgctattgtgctgtactatataactcagcaagagatctacctctatactcctttttctggattttatggggttctatcaggattgttggtgggcattaaacagcttttacctgatcaagagcttaatctttttgtgctaaaaattaaggcaaagtggattccatctcttgttgcattgatatccattcttggaagcatcttcatatacgactttatgtcttacctcccagttctgttgtttggcatgtatatgagttggatctacctccgttactttcaaaagagacttgagaccagcctgaaaggggatccaagtgaggagttctctttctcaagcttcttccctgaatttaccatttctcgacccaatagcatctgtattccataggttactttgtggaagatctgatgccaggggagaaacattagacacctcaccattacctggttcagattcgtttgaggcaaacaggaggagagagaggggtcaacgggcactggagcaaagattagctgagaagctggctgcagtcaggagttcagagggcggcacatcactggatgccgctgacaaagtttgagtcttctatgcaacgaacaacgagctgtgcggtgcagtttgtgatttcctggcaattcgtttctatgtgatttcaccagccccagcctcaccgccgagtgcttcattttttttatggtttctcatcctaatcatcatcgggaaccaactaatgaagcactgcgcgcccattttccccatggtttctctgtaatcaactagaagtgatcaagtaccaagcagtgtacaatgcgatgctccctaggacaagaactcatctatgttcggtttcctgttttttttcttccaaatggtgcggttgatacttgatagtagttgacacttgacaggaacaaaattatttttgtaaccttttagagctctgtgttggatggcaaattgacggtgctaacggtccggccccgagtctagacggtccgcgcgcgtagtcagttagggttctgagtttcttgctacagttgttggctagattcgcggaattaacttgggagatttgtatgtaatgggttcagccccctcctctataaatatagaggaatacgaccgattaaacattatcaatcgaattaataatcag

SEQ ID NO: 39601 - DNA, 1010 bp, Zea Mays
gcccctcctagtcttccactcttcctccccttctctccggctcccccgaggcccccgacagcgaactcgggactcgccaaccgagaaggaagaactagtcgcgaggtgaagaggagaacctgaggtggtcccgaatcagagacggaagaaggtgggttcaggagcaagccagcctgccgccgccatgaggcgcacctcgaagaaatcgtcgtcgtctacggcgaccgccagcgctgcccagaaggcattgaaacactctgttctcaccttgaagttccccacactgatgttaggattctaatgttagcatggaaaatgggctgtgataagcaaggttattttaccttggatgaatggagaactggcttgaaagctcttcgagctgacagtattagtaaactgaagaaagcatttccagaactggtccaagaggttacaaggccatccaatttccaggatttctacatatatgcatttcgttattgcctcacagaggataagaagaaatgtatagaaataccagttgcttgtgagttgctgaatctagtattaggcttgcagttccgccctcaggttgacaagcttaataattacctcatgtaccaaaatgactacaaggtgataacaatggaccagtggatgggatttattcgtttctgtaatgagataaacttcccatcgcttgacaattatgattcagaccttgcctggcctttgattctagacaattttgttgagtggctacgagaaaataaaagctagatattctattcctgtggtgaagttgtcatccaaaatgtaattttcaagaatgtaggtgactatatcattgtttgcgtttgtaagacatcaattttggaccacccacatgtatatacttcggcagtagtgcaaactcactgataactcccttaccgaattttgtgtttagtagcagttttgggcagccacgttctattccatttaggccttgttctaatattctaattccatatagattgaagtgtgtt

SEQ ID NO: 39602 - DNA, 1592 bp, Zea Mays
aaaaatccccaaatctctccactcccagccgctgcacctggcttcttcgccactctctcctctcctcgttcactctgccaggtggccggccgcccctgctcccatctcccacagccgccgccgccctcagctcctcagccacctcccatggcctcgtctccctgctgcagcgaagccgaccaccgtttcctgcagcctcgatagctcccccccccccccccccccccatgccgtccctgctcacctcaccttcgtcggccgtccttggacgccgtgctcggcgcccgagctccctacgccggccaccatccttcccatggcaggagctccgatcggcccctgctgaccttggcactcggcgtggctccaagcagcgccttctcccccaggaccggctcaccgtcagccgcgagctcctctccctcacgtcccctacagacaagcaggttcgaccgtcgcccaaccccctctccagcgcgcgcatggactcctccctgctcacgccggcctgtgcagtgtcgccggtgagcagcagccacagcaactccgcgctccgccggcttgcggttttgtcaagcccagtagacagcagcaaccccgatgtcttcacgtcgtgcgctccaccccgatttgcgcagcccctgcgcgacgtcgtccacccgctagatgttgacgctgtgccacgcgcaccaagcgttcgacgaaatgcccaaccaacggacagcacgcgggtctcgaacccgattcggctaggtacgctagatgttgagcacgtggacgtgaaagacgtggccttggaactactcctcaagaaggcaaccatgtcggaggagaagcaccaccacctattccaccaccacaagaaggacgaggagcagcccaccggccggcgagtactcagagaccgtggccaccgaggcggtgaccaccggcgacggtgagaacgagtacgaggggtacaagaaggagcacaagcacaagcagcacctcggcgaggccggcgctatcggcgctggcgccttcgggctgtacgagaagcacgaggcgaagaaggaccccgagcacgcgcacaggcacaagatcgaggaggagctcgccgccacggcggccgtgggcgccggcggctacgccttccacgagcaccacgagaaaaagaaggaccacaaggcgccgaggaggcccccggcggcgagaagaagcaccaccacctcttcggctgatgacctggccggcgagagcaccggtccgtcaccgaccgaccgaccgccgcgccgcgccgcctgttttcgttgagtgcatgcctgcatgcatgtttgacgtacgattaacaataagtcccttccggacctctgcgagtgagactgagatgtggggccgcgcgcgtcgaggtgttcctgtacgcgcttgattttctctgcatgtataattgcgttgaataagcgagagccatgtgtgggtgtggctcctcccctcccaaagtcaagcccttatgtgtacctgtggttctttgtactggtatatggagatgatgtgttaatgtaacacgattttatttatcacctcatccaaattatttgttactttaccctcgt

SEQ ID NO: 39603 - DNA, 1951 bp, Zea Mays
cggcaacccctccagctcctatccccaaactcgattgcagctcgtgcaccacacacggacacgaatcctcctccgggtcctccctctggaaaaccaggactacctcggatcagatgcagtgcctaccctgcggaccgtccaccaacgcgcccgctgcgcatgccgcggccaggagcgtcagccgtcggagggttgtcgtcgaagggcgtcacctcggcaacccacgacagcgaggaagcgcctccaaggtcaatgagggcaacaggtgaccgtggtgcaatgtcaagcaaaaccttatggctcgtgtcaaagaggaagcttattgctttgtcagccttttgtcttagcttacattcttcaagcatttgctttgggtgatacgtctgtcaaaatcgaggatgtgactcctaagatttttccatctgggccattatttccaactgagaaacggattgcagagctatttgaaataaatacttactcagttgtgaacatttttgatgcaacactacggccgcagcttaatgttactggtgttgtggagatccctgaaggaaatggttctggtgtagtgtgggacgattttggacatattattacaaattatcatgttgttggcagtgctctttcaaaaaatccgaagcctggtgatgttgttgcacgcgtcaacattcttgctgctgaaggaaaaattttgaaggcaaattggttggtgcagatcgtgctaaagatcttgctgttcttaaggttgatgctcctactgatcttttgaagccaattaatgtgggacaatcctcggccctaagagttggtcagcaatgcttagcaattggaaatccttttggttttgaccatactctaacagttggtgttatcagtggtttaaatcgagatattttaagtcaggctggggtgacaattggaggcggaattcaaacagatgcagctattaaccctggtaacagtggtggtcctttgcttgactcaaaggggcatatgattggtattaatgcagcaattttcacacagacagggacatccgctggtgttggcttcgctatcccatcatcaaccgtacttaaaatcgctcctcagttaatccagtttggaaaagttcgccgtgctggcttgaacgtggacttcgctccagatccaattgcgtatcagcttaacgttcgcaacggagctcttatactcaaggtaaactgcatgtatcagatgttcgcttgcactagcatctccctttcctaccggacgttggctcctccgtaggtacctgggggcagcgccgcagccaaagcagggcttgctccgaccagcaggggttttgccggtaacatcgttctcggtgacatcgttgtcgctgtggatggcaagcctgttaaaggcaaatctgacctgctgagggttctagatgactacggtgtcggagaccaggtgagcttgacgatccggcgaggctccgagaccctggaggcgacgctgcctttagaagaggcagacatgtgagcagtttgtggaaaatagaacccacgtataccgagctgtccacgactgtcgtcccattggaaacaattccatttcactaggaaatattgaagtgtccttttcgctctggacattcccttccatgcacgtgtatgagcatgatcatgagcttcacttctcgtgcttgtagttgccttaagatcagacagcctgatgttggagaacaagctgacctgttagttggattctgttgtcatctcattcccgtcagttcatctgcggtgttggctcaagttctatttttctcggctgacaaagatcgtgcgattgctgtgcacgcggtaaaagccaattaggtagtgtttggttgaggagccaagtagaatggagccgtttcatcactgattctaggaacggagccgctctgttctgtgtttggtaatctggaacggagcgattccgt

SEQ ID NO: 39604 - DNA, 3602 bp, Zea Mays
cacgcttgcaccaaaatgagtgattgcacaggatatgtcctctacaaattgccacagcgtcacaaactcacaacgctacacaatacgcacacttcgcaaagcgtcttcctccgaccccatcgcctctgtggcttcctggctgtctgactgcgtctgcctggtcgtacgcgagcgcgtgcgtcccttcaccgtcacgagcggcgcacaccgtcaccgccacgctccgtcgccttccagaaaatctaaaccccagcggagccggccacggccagtcagccctcacacggactccgacgcgctgcccgctcgcctgccaaacccccaccccctcgccggcgatgctgccgcgtcggtttagcaaccacccgggctcctcctcacccctcccgttcctcgtcgtctgcggcctgctcctcgctgcggccgtagcattttccccggtcgctgccgccgaggccgctggccgcggcggcggcggcggcggcggcggcgctgggcacgagggccgcgcggggaagccggaggtcgaggcggaggcggaggcgcgcggggatggggtggccgtggcggaggccggcggcgaggtggtggctcagggcaatgccacggaggccaaggagggcagcctcgccgacatgatcgaccgcgcgctggagaaggagttcccggagtccgagagcgagcagggcggcggagagaccgatcctggtagcttcaacaacacggtagctgagaagcagggagttcttgaaactgtagctagaagagtaacaaagaagaatgaaaccaaagataacaagtcatttccttttaaggaggtcttcttggatcgatctgagcaagaagatgttcccacattgattgatcggaaggacaatgtttttatcatatcaaacccaaagtcaaaataccctgtgctgcagctggaccttagattgatatcagatcttgttgttgttatcgtgtctgctacatgtggtggaatcgcttttgcttgccttgggcaacctgtgattacaggttatctacttgcaggatctataattgggcctggaggttttagctttgtcaatgaaatggtgcaagtaaggttgaaacggtagcccagtttggtgtgatatttctcctgtttgcattgggacttgagttttctactgcaaaacttcgagttgttcgtgctgttgctgttctcggaggaatgctccaaattatgctgttcatgtttctttgtggtattttggctacactatgtggaggcaaaacaaaagaaggtgtttttgttggtgtgcttctctccatgtcttcaacagctgtggttttaaagtttctgatggaaagaaatagtatcaatgctcttcatggccaagttacagttgggacacttatattgcaggattgtgctgttggtctgctgtttgcgcttcttccaattttgagtggtacatctggccttcttcacggagttgcatcaatgacgaagtcgttggtggtattgataacgttcctgaccattctctctatcctctcccgcacgggcgttccttggtttcttaaactgatgataagtctgtcatcacagacaaatgaactataccagctggcagcggttgcgttctgcttgttatttgcttgggagattcggcttattttctggcttttaccgaagtacccatcccacttggaggatcgctggcatttgctatccacaacggcataaccaagaactgagcattgctgcccttttgccacccacaactacttttcccttgaacacgcaggagagctgctatttgccaattacctataagccagcgtacaagctgggttgccaaacaacaacaacaacaacaacaacaacaacaaagcctttttgggctagagttgaaatccaacaaaaaccacaagtcaaggactcaaggttgccaaacaaccctacaactttgggtctgtttggcaacaatgtttctcaaaaccatggttttacaatactatacttcgcaagggtttggagatcttgggctccaccaaaatgctgttttttcatttggttggtggcccaaaatagatgttggacagttgatcgcttggcaaaaggggattgaatcaccctatcagatgtcctttatgtgaccagcaaggggaaaccctgaaccacttgcttgtgaattgtgtcttctcaaggattttctggtacaacctgctaagaaagttcgggctgcatagtttagccccacagccagatgcagtctcttttatggattggtgggagatggtttcagagacagtaaatggtttggtcagggaaggtcttgactccctcatcattttagggtcgtggatgatttggaagcatcgtaatagagttatttttgatggagggtctcccaaccttcctctgattatggagcatgcagatgaggaaagaagaggctgggaaattgctggagccaaagggctatccttcttggctgcccccttgcatagtgtagtgataagctgggcctgagtctcgagttgggttcatttgcagctggagtaatgatatcaacaacagaccttgcgcaacatactcttgaacaaatcgaacctatccgcaacttattcgctgctcttttccttgccagcattgggatgctaattaatgtccatttcttgtggaaccatgtggatatactccttgcagcggtaattttggtgatcaccgtaaagacatttattgttgctattgtcgtaaaagggtttgggtatagcaacaaaacatctcttcttgtcggcatgtctcttgcacaaataggagagtttgcttttgttctcctaagccgtgcttcaagtatccatctcatcgagggcaagctatacctgcttcttcttggaaccactgcactcagtttggtgacaacccctctgctattcaaaatgatcccagcagtggtccacctcggggttcttttgagatggttttctgtcgataccaatcagctgggcctaaaaaatgatgtcctccgcattgatagcggcaagcgcataaatctgatagtccaaggctcacatgactcatgacacatggcacactgcaagctacttttttgtatggcttgagtttacaagctctgtaaagtgttttcacctgtattgaagagtttgtagcagatatacaagggtggaggcaagagaactcaactcagatcttgctcatagggtgagatcaatcctcccccatcatggagactgcatgggcagttgggtttgccgtttttgagagcagtgtgtctaggatgattggtggagtgagtggctgtcgaccccaaatgagggtctcgtgtaacataagaatgtatgatggttaattgattggatcagcatgataggatctaggcgtgatcgttatgccattgtatcctttcagcaaaactgtgtatcctcgcaacacgaaagtgtgtacaacagtatccatcagatcacgaatttcgttatgtaaccatatactcgtcctagttcatgattttttttcacgcgaggcttctagtaacctgtctatatatcactttgttggattcaggctcacaatgatgggtgtgcctcaacgaattgattgaatccat

SEQ ID NO: 39605 - DNA, 1243 bp, Zea Mays
cgacgaacagaacaactttctccttcttccgcgctgtcgccgtcctcctctcaccccaatctgctcggactctgatcgcagcggacgcgcatccaaccagctcggattctacctctctcccgggtaagacgccgggcctcgcttcggcggatgtgggttaccctattttttccccccttcctctactcgacgaattccgttccataggatatataggatctcttaatctttcccagccgccgcgagccgaggaggaaaggatggagttcgggaggaagcccttgagccttgtggagctctgcgtgcggaaggccatcgacaacctccgctacatgggcagcgtcgacggcgtcgagatggatctgctcaagcgcatcctgccgcactgcacgatggagcagctcacccgcgtagagaacagcaccgagatggatcttagcttggtaactgatccgctgtggaggcgattctaccagcgagaattcggtcaggagcatacgagcaaagtcatcgcaaggctgaaggagcttgggcaaaaaacgccgtacacatggagggagctcttcgcggcgaaaaaagagaaacagaaggaagttgaggataagatgcttgacaaattcacaaagaagtttcaggcagagagagctgagaaacaaagcaagcaaatcaaactctgtacaaaggtgcctccaagcagcaaaaggagtttctttggaggaagtggacctagcagtgtatccagttccagctacaagagccctatactgaagaaggctaggatagaggttaacagtcgagcaagattgcagtctgctatgcaaaagaatacttttgcgaggtcatctcagccaataaggacgacctctgttagtggacagccagtgagaacaactaccattcataggcccaattcaaccgtcaccatcaccaaaccgatgggaaaaagcaggcaaattcagaacagcaggcccaaattctaggaaacggtttgctgcgatatcgcaatttcaactccagagctcatatgtcctctgaagaaagcgcctcctttgtacaaaaggagtagcacaccgtactcatttttttttttggcaaaggagagacgtgccaattgtaacgtaaaaggcgttaccaatgtttgtaacaaacgatttcttgtattaaagaaaaaagggtttgtttcttggtttctctctttattatcatgcaaatggttaatgaattatagaaaataccaggcaaa

SEQ ID NO: 39606 - DNA, 6373 bp, Zea Mays
actagggttacttaacactttgtattttacgcctcgtttccccctccttccattaaaaaaaaaacacacccagacaccctccccccaactccacccgcttccttcgcttcccttcacccccactccaccaaaccctcacgtcgctgggactgggcagcgcagagcagagtagcagacagagcacagcggagcagaaggtggcgagtggaagcaaatggggaatgagtggcggcaaatgggcaatgagtggcggcggcggtagtagctagcatagcatcctcctcgccttttcttctccccgccctctcgcgctctggttgttgcagccagtgggagcgagaggactcgtgctgcctccgtcgcttctccggcacgcctccctcgcccggatctgcgccgctcgcgtgggatcctgagctccgggttggagagctctcgcgttccgggtcaggtgacggtgatggagcccgcggtggctacggcgggtgaagggcagcggttcaagcggatttcgcggcaggcgtggtcggggaacctggaactggatcctttgcttaatgaaagcttagatcagtggccacatctaaatgatctggtacagtgctacaaggctgattttgtgaaggatgactgcaaatatggacgctatgagagtgttgcaccaccatctttccaaaatcaaattttcgagggacctgatacagacatagaaacagaattgcagctttgcaacgcaagacatttcaagcctgaagatcctaccgaagatgatatgccaagcacctcagggaggcaaatgtatgaaaccgaatcatctgcttcatcttcaaaagtgcactgtagtctgtcaccactgccagcatatgagcctgcatttgattgggagaatgagaggtctttgatatttggccaaagggtgccagaaagtataccagcaataagcaacagtggcttgaagataactgtcaaggtactatctttgtcattccaagctggattagttgaacctttcagtggaacgatttgcttgtataacagagatagaagagaaaaactgtcagaagacttctactttcacatacttccaacagatatgcaggatgctcagggttctttggatcgtcgaggcgttttttcattggacacaccttcaccatcagtctgccttttgattcaattggaaaaggctgctactgaagaagggggagtaacaccttctgtttattctcgtaaagagcctgtgcacttagctgagaaagagaagcaaaagctgcaagtatggtctcgaattatgccttgtaaagagtcatttgcatgggccatgattcctctgtttgaaggtaaccatgcgggtggtcttagtgatgctgcttctcctagcagtcctttagcaacaagtttaccaggatcaacttctcaagatagtattgtggaccctattttaaagcttactttagatggaaaagtaaaccattactcgagtggaagctcagttattgtagagatatcaaacctaaacaaagtgaaggaaagctatatagtggactccctccaagatccaaaacggaaagtacataaaccagtgaaaggtgtattgagattagaagtggaaaaacttcatggtggccacaatgatgtggataacacttctgaaggcggaagcatggccaatgatttgaatgatgctggtgacatcaataatggcagaagcaacagaagtagctttgatgggattcacagttttgtgaattctattgccattgcccagaaagatgctcatcacaatggaatcatttctaatgctgagaatggtgacaattttgaagcttttgactttcggatgctgacccgaagtgagccgttttcacaactttttcattgcctctatgtgtacccattgactgttagcttgagccgcaaaagaaacctgtttgttagagtggaactgagaaaggacgattctgacatccgaaagcctccattagaggctgttcatcctagggagcggaatatgatgctacagaagtggggccatacacagattgctgttggaacaagaatggcttcctaccatgatgaagttaaaatcagcctacctgctcttttgacaccccagcatcatcttgtgttcacatttttccatgtagatcttcaaatgaaacttgaagcaccaaaaccagtgatcgttgggcattctgtacttccactgtcgacacatattcagttactttcagatgtatccttgccaattttgagagagctcgttccacattacctgcagggaagtggaaaggagagaatggactatctggaagatggaaaaactgttttcaagttgcgtttaaggctctgttcttcattgttcccggttaatgaaaggataagagacttttttgttgaatatgaccgccatactctacatacaagtcccccatggggttctgagcttcttgaggccataaatagtttgaaaaacgttgaatctactgcattattacaatttctgcaaccaatacttaacatgctgcttcatcttattggcgatggcggtgagacccttcaggttgctgcgtttcgagccatggttaacattttaacccgtgtgcagcaggagtcatcagatggggctgagagaaatagattccttattaattatgttgattttgcttttgatgacttcggcggtcggcaagcacctgtgtatcctggtctgtctactgtttggggaagtcttgctaggagtaaggcgaaaggttatagagttggtcctgtgtatgatgatgtgttggcaatggcttggttttttctggagcttattgtaaaatcaatgggattggaacaaagtcgtctcttctaccacaaccttccattaggtgaagatgtcccaccgctacaattgaaagaaggtgtcttcaggtgcatcatgcagctctttgattgccttctaactgaggttcatgaacgctgtaaaaagggtttaagcttggcaaaacgcttgaacagcacgcttgctttcttttgctatgatcttttatcaataattgagcctcgccaagtttttgagctggtttcgttgtacatggacaagtttgcaggagtttgtcaagcagtccttcatgactgcaaattgacattcctgcagataatatgcgaccatgatctattcgttgagatgcctgggcgggatccctctgatagaaactatctctcgtcagttcttattcaagagatctttctgaccttagaccatgatgatttgtctcaacgagcgaaggctgctcggattctggttgtccttatatgcaaacatgaatttgatgcacgctatcaaaaaagtgaagacaagctgtacattgctcagctgtacttctctcttatagggcagatccttgatgagatgcctgttttctataatctgaatgccatcgaaaagcgtgaagtgctagttgtcattttgcaaattgtaaggaacttggatgatgcaactcttatcaaagcatggcaacaaagcattgctagaaccagattgttcttcaagcttcttgaagaatgtataacccattttgagcacaacaaaacaggaggcagcatgctacttggtgctagttctcggagcccagatgttgagcgccctgcacccccaaagtactctgagcgattatccccatcagtcaatgcatatttgtcggaggcttcaaggcatgaaataaggcctcagggaacaccagaaaatgggtacatgtggaacagggttagccctcaattaagttcccctaatcaaccctattcattgagggaagcacttgctcaagcacaatcttcaagaattgggtcaaccgccagggcattgagagagtctctgcatccagtactgagacaaaaattggaactttgggaagaaaatctcagtactgctgtgagcctcgaagtgttgagaataaccgagaagttttcagctgctgcaggcactagaagcatcactactgattatgcgaagctagattgtgtaacatctatcgtaatgggtcttttatctaggagccaacccttggcattttggaaggctttccttcctgtggtctacaacatatttaatcttcatggtgcaacactaatggcaagggagaatgaccgcttcttgaagcaaattgcttttcatcttttgcggcttgctgtttttcgaaatgattctattaggaaaagagctgttgttgggttgcagattctcgttaggaacgcattcaactatttcaagaacactacaaggttgagagtcatgttgacaattactttgtcagagttgttgtctgatgtgcaagtgactcaaatgaaatccgatggttctcttgaagaaagtggtgaagctcggcgccttagaaaatcactggaggaaatggctgatgtaagaagcaaggatctgttgaaagattgtggcctccctgttactgcattggaggcggcccctgatggttcctctgataatatgtggtcttgggcagaggtgaaacatctctctaaatgtctagtccaggcccttgatgctggtctggaacacgccctcttggattctgtagtgactgtagacagcatttgtgtgatgcacaccaggagatgcaatcatgggctgaagcagcacaatgtgcagttgctgcagctggcgtgatcatgcaggcacttgttggaaggaatgatgctgtgtggagcaaggagcatgttacttcgctacacaagatttgccctatcgtcaacactgatgtgagtgcagaagcatctgcagctgaagttgagggatatggtgcatccaaattaacagtggactcagcggttaaatatcttcaacttgccaataaactcttcacacaagctgaactttatcatttttgtgcaagcattcaggaactcataattcctgtgtataaaagcagaagggcttatggacagctggccaaatgtcatacatcactcacaaacatctatgagtcaattcttgaacaggaggcaagtcctataccattcattgatgccacatactaccgagttggtttctatggtgagcgtttcggcaagctcaataaaaaggagtatgtatttagagaaccacgagatgtacgtcttggtgatattatggagaagcttagtcatatatatgaggttaaaatggatgggagtcacactttacatataattccagattctagacaagtcaatgctgatgagttgcagcctggcgtctgctatttacagatcactgctgttgatcctgtaatggaggatgaggacttgggtagcaggagggaaaggattttttctttatctactggtactgtacgtgcacgtgtttttgaccgttttcttttcgatacaccattcacaaaaaatggaaaaacacaaggtggtctagaagaccagtggaagaggcgtactgtgctccagacagagggttcctttcctgctttggtgaaccgtctgccagtcaccaaatctgaatctctggagttctctcctgtcgagaatgcgattggaatgatcgaaacaagaacagctgcattgagaaatgaactagaagaaccacggagttctgaaggtgatcaactcccaaggcttcaaagcttgcaaaggatactccaaggaagtgtggctgtgcaggtcaacagtggggtattaagtgtgtgcactgcattcttatctggcgagccagcaactaggctcagatcccaagaactgcagcagctcatcgccgcattgcttgaattcatggctgtctgcaagcgtgcaatccgtgtgcatttcagattgataggggaagaagaccaggaattccacacccaacttgtcaatgggttccagtcactcaccgctgagctatctcattatatccctgctatactctccgagctatgatagaactgtaacaagccagaaattaggtagcatgtgaatgattcattctttcagttgcaggttcccaccaaatgtccatatttccattagttttggttgtatagttgcaccgattcctgattttggagtgtaaagtttgtataacctagtgttatctgttatgcaccagttatatgctgagtgccatgttttttgcggtttgctactgtatcacagcgagccgacattttacaacagttatatgtaatgttctgtagtgatacaatagtgcctattctgggtgatatgtatttttttccctgtaggaaatttgctgctgtcgagggcatcctcgcaatttgtttatgcacgatttgaagccttgtgttattgaagtcgttcccataactgtagtttgtttattgttcctagtgtataatgacgccttaaattgctcatgttccatggttgaacaagatttggaacatttcaa

SEQ ID NO: 39607 - DNA, 1694 bp, Zea Mays
cccttttctttcaagctcaatggtactagtgtggtgattgaggaacgttggtgtttctggataattggagatgtactcaggccagcaatctgatcaaggtcctagtgcaaatagtggcagagaattctccgaggcaaattggaattcttacacaatgcatcaaaagatagcttatagtggacaacatgggtttggaccttacggcatgggcttagaagataggctggggttgtatcaatcttcatctggtacattaagtcatgacatccaaatgagtgatgagcatagcggaggtgtgaagaagaggaaaggagtggaggactgtgtcacattgttgcctaatgcaggtgatcaacaaacagaaggttcatctcagccagaaaggaattcaatggaggaggggaacagaaagatttcgcccaaaatacaaagcaaggaagattcttctgatggtgatggtactaaagaggactatgttcatatccgggcaaagcgaggtcaagccactaacagccacagcctcgcagaaagactgaggagaaaaaagataagtgagagaatgaagcttcttcaagatcttgttcctggatgcagtaagatcactggcaaggcagtcatgctcgatgagattatcaactatgtacagtcattgcaacgacaagtggagttcttgtcaatgaaactttcaactgttaaccctgaacttggctttgacattgagcagatcatatccaaacaaatgatgctttcacaagacagacatcttgctttctatggagtcgatccaggatcaagcagccttactgctccattcaaccaaggaatcgtgcagccagcaatgatgtgcaacatttctaatcctgccgatgttttgcacggaactattcatgacgtgtcaacaatgaaccagataccttccatgtgggaaggacttcagagcatgcctcagatgaacttcaaccctggtgtggcagctgatagcggcaccaacaactctggctccatgaagatcgaacagtgagctgctgtatagtagcttcgaaattgttgtgtgaatcactgaatcatcgtaaagcgctctcgagatgaagctttttttgtatagctggaggcctgaccatttatgctggattcctgcggttgctcccatactgtgcggcacattgtttatggtatggcatatggatcgtgtacagctggagctgaagaactgattccactgtaaatttctgttgtgctttggcctgcgaaaattgggatggaaacctagtagcatccatgaaattcaaggacagaagcttgttgggattgggacttgggaccacgtgctgaatactgatgggcctaaacgtactagacgagtactaatagaatcgtagttgtaggtaaaaaaatgcagagtttgaaaccagtggttttgtcagaaattccatggagtttgctatatttatttatgatatcaaaacagaaactgaatggccgctggcactgggctgcaagtctccaacctggttctttccttttcctttgttttttttctaaagatttatctgcaaacttcactgcaccggtgttatctttttttttctaattagagtttcgaggttgataaaatgggcagaattctattcagaaaagaagggattatgggatatttgaacgtactaaagctaataattatgtgctaagattag

SEQ ID NO: 39608 - DNA, 5885 bp, Zea Mays
gtgctcggatctaggtttcaaggccgtcgatcgccgccatggacgccggcggggacgaggacggcgccgggaaggcggcgctggagagcactgccgaggccgcgaccctgccaccggcgtcaacagtggcggtcccgtccccggtcccggcttctgcgcctggggcggccacggggacctcagggtcgggggagaagccggtgaagcggatgatgaagaccccctaccagctcgaggttctggagaagacctatgcggtggagcagtacccgtcggaagctatgcggctggagctgtcggcgaagatagggctgtcggacaggcagctgcaaatgtggttctgccaccgccgcctcaaggaccgcaagccaccgtccaagcggcaacggcgggaggaagagtccgcgctagtaccagtgatgcctccaccgccagtgttaccagcacctgtgatgcctctggcaagcagtgaccttgtggtgggtgctcctgggccgtatgatgagccgctgcacccacttcactcgcgaaggggtgctgggcgtgggcggtcctcagcagtccccaggatttccatgccggatattgggaggaggtattacgagccaccaccaattatgatagcgccgcctatcccgtcgatgcagctcacgcaatatgagctccgtgtgattaattctgtggagtcacagctcggggaaccattgagggaggatggtccagcgcttggcgttaattttgatccccttcctcctggcgcctttggtgcaccgattgttccagagcaacaaaagcagcctgtgcgatcttatgatgcggagatattttcttggcatgatcaaaaactcttaaaggcttcagcatttttacctaatatggaatccccatttgttccaaattcgtttactgggaagagaaaatcaccagttggtaattcagccatagttcaacctcatgttggatcacgggctgttcatgagtatcagttccttcctgagcaaccaagtgatacatatgagagggcaacccgatctcactactatgacactccagtggaagtttcaaatgctaggataccttctatcacatcaggatcacaacttctccatggatctgaggaggctgcgcctagttatgcttttcaaggtcacacatctggttctagcctgttgcctccgtccagcaggccccaagtgtttccagcagcaccaacagattatgagatgactcagtctaatagcaaccttagttctgttcctgttgaaggacagtttgatatttctcaggttgctgcatttgaaaacccacctgtatcatctgaaataatagcttatcatgatgaagatacttctcgcgtggaaagaaaacgaaaacatagtgaagaagcaaagattgcaaaggaagttgaagctcacgaaagacgaattaggaaggagcttgagaaacaagatatgttgaataaaaagagagaggagcaaaggcgcaaggaaatggagagacttgatcgtgagagaagaaaagaggaggagagattactgcgtgagaggcagcgagaagaagagaggttccaaagagagcaaaggcgcgaacatgagcgtatggagaagtttttgcagaagcaatctagacgaagaaacaaaggcaaaaggaggaactccgaaaagaaaaagaagcagcaaggcaaaaggctgccaatgaaagggctactgcacgtaggattgcacgggagtatatggaactggtggaagatgagcgtttggaatcaatggaattagctgctcaaaacaaagggttgccctcaatgctgtatcttgacagcgacacattgcagcagcttgattcctttcgaggcatgctaagtcaatttcctcctacaacggtgagaatgaagttgccattttctataaagccttggactggatccgaggataacgttggaaaccttttgatgtattcatataatttcatctcaggagacattttgctaactggattgcaggtgtggaaattcttaattactttcactgatgttctgggtctttgtccagttacacttgatgagtttgttcagtctcttcatgattatgattcaaggttgttgggggaactgcatattgctctgctgagatccattataaaggatattgaggatgttgctagaactccatcaattgcactgggggtgaatccaggaggtggccatccacaaattgttgaaggggcatatgcctggggattcaatatacgtagctggcaacgccatcttaatcttcttacatggcctgagatattaagacagtttgctttatctgctggttttggacctcaattaaagaaaaggaccgtagaagattcttactatcgtaatgataatgagggtcatgatggtgagaatgttatattgacgattcgaaatggtacagcagcagtgaatgctgctgctaagatgaaagaaagaggttacaccaatcgccgtagatcccgccaccgtctcactcctggaactgtaaaatttgccgctttccacgtgctttcgcttgaagggagcaatggtctcacaatattggaagtagcagaaaaaattcagaaatctggattgagagacctcacaacaagcaagacacctgaggcatccatagctgctgccttgtctagggatacaaagctttttgagagaactgctccttcaacatattgtgtgaagtcgccttatagaaaagatccggctgattctgaggctgtgttgtcagcagcgcgtgaaagaattagggcttttcagaatgtgctttctgactctgaagctgaaaaggaggtagatgaagctgagagggatgatgattctgactgcgatgatggtgatgatgaccctgatggtgatgatgtgaatactgaggtggaagacgacaaggatcctcttcttgctgtcaagtcacaagatgaagtaccgagtacaactacagttattggcataaaggccaatttagatggtgtgggtaatgcattgaactcatcaagtagttttactaaatcagcaaaaggcgctcctctcccttctttaggcaggtccaatgcagcagatacttctaatgatttgcctcttggagtctcatcagctaatcatgaagtagtacctgatgattctgaaaatacacaaattgatgaaagcaatcaagccgagccttgggtacgtgcactagcagaaggtgactactgtgaccttagtgttgaagaacgccttaacgcactggttgctcttgttggtgttgccactgaagggaactctattcgtgctgtacttgaggagcgtttggagttagcaaatgccttaaagaagcaaatgtgggcagaagcgcaacttgacaagaggcgtttcaaggaagaatttactagcagagtacaatataactctgacatgggtttgaagcctgatatatatcaagaaaacaacgtgacagagattacttcaactccagcgtgtgatgcttatagagagaatgatgaacatgtcgggacaatcaacaattgtgagatgcttgatcagcataatcagggtaatgctggtagtctaccttatgagagaaatggcgtatgccaggaaatcctcgcaaccccagatacttcgtatgttcagcagtatgcttatgctgataaaaggcgatctcagttgaaatcgtacattggtcaccgggcagagcagctttatgtttacagatccttgcccctaggtcaggatcggcggcgaaacaggtattggcagtttacaacttcagcatcaccaaatgaccctggctcaggaagaatcttttttgaatccaaagatggatattggagagttatcgactcagaggaggcctttgattctttattggctgccctcgatacacgtggcacccgggaggcacagctgcattcaatgttgcaagtgatcgagccaaccttcaaggaagctattaaaagaaatgtgagtatagaattatctgctggaaggtatccaaagaatggagctactgacatgataagggcaaattatcacagtgaggttggaagctcaagcagtactcctagtgctacatctgacagtataacagcatattctgattcttttaaagtagagcttgggcgtaatgattttgagaagacagctatctcaaaaagggcagatatatttttaaaatggatgtggagggaattctacaatcaggaattgacatgtgccatgaaatacggcaagaaaagatgctctgaattgttgcattcgtgtaattgctgctatcagatttacctagcagaagaaaggcactgttcttcttgccataagactttcaaatccatttacaatttttctgatcatacaacacaatgcgaagagaaacagagaacagaacctttctggaacatgcaaaacactgattattctgtcccaataggaatggcatatataccatcagaagcacttcaaccattttggactgatgtgtatcgaaaatcttggagtgtgaagctgtacactaccaaatctattgctgaaatattccagcttttgactgttctggaaggtgcaataagaccagattgcctctcttctgattttgaaacaagtgagtgtctaaactcacaggttggatctgcttctgtccttccatgggttcccgacactacttcagctgttatgctccgaatgttagaccttgactcagctattttgtatgttcaaaatcaaaagatggatagagatgatggaggtttcatgaaatttccgtcaaggtatacagttgctaagagcaaacaagaaacaacacctgaaacagctggtttggatctgtatgatggaaggtggcttcctggtagtggccgtaggggtcgtggacgtggaagtagaggaggtagcaggggaggcagaggtcgaagtcgaggtggaaggatcccaagaggtgttagcagctcatcaaggatcgagttcaagggtggtattgttgcttctgataaagcgccaaggaagaatgtacgccgagggcgtggtcgtggtcgtggtcgtagacgtggacgtcgaactgtgaggcctcggcagccatctgttggcagagccagatcaattccaaaggaaaatttgttgggaagctttagcatgcttagcagctcaaaggctgctaccattgaggagtctccacgaagctctggcgcagacgagtggggcttggagaccagaacgacatacactgaatgtgatgagaacagctctggatcacagtcagaagataacgaggaaaatggccagcccatggatgatgattatgaagatcaagttccagattactcaataggctattctaccggctcgaggcaccatgtaatgatgtccatgatggaccatgatagtgacgaggaggatgaagatgctgaaggtgatgagaatgtggaagaagatgcagaccttgcagttgacgatgccgatgttgagatggacgaagatgatgaaattggtgatgatggagaggatggtggcgttggaggggagatgaatgcggatgaggatccggatgctacttcatattcatccgattacagcgactaagaaagcagaaataagggaaccttatcccagattcctccctcggcatggaatgcatgtagtaccgagtaggcattcccccccgttgtgagccaaaagggagcttagatgcttaggttcgaaggagcgaggaactgttttttaggcaccgcaggttttaatagaatttctgacgcattcgacgaagtgtttggttgtaccgtggtagttgtgttactggggaattccccgagttattatacaatgtgttaagacaaaatactgtcatatcgcatctggttgccatgcgtctaactggttcacggttttaccgtta

SEQ ID NO: 39609 - DNA, 1841 bp, Zea Mays
actccattccactccactgttctcgctttcccctccaccgacctgagacacagagtgagagcccgcagacaagtgagacaacccaccgcgaaaccgacatcccaatccgtcggaatccgtggccagaggctcgccgccgcccgccgcccgccgcgtcagagacacgctctcccccgggcccggacaaacacctcccggcggggctattttctcaccgcgtggtctctttcgatctatcagagcgacgactaggctaccgccgccctacgccagatgccctggtcttagtcgggcccttctccggcaacgagcacctaacagcagttcttacttctcccatcatgtgtgcagttcagatgattctgctggtgccataggtgtgaagtacttagtggggactggggagtgggcggacaagattttcattatagccatataaaatggagtgttccaattcaactagttcccaagggcatcatgtaggaaagtggaatcaagtgcaaatcattgatccttccattgttgaaatgggaccaagtcaccttccactgagtttcatgagaagatgccgtggagtattgtgtttggtgattatgatattaacagcatttatgatgatggtatacctgtcccctgttactactttccttgtgaggttgttcagtgtgcattacagcagaaagtctacatgcttcctgtttgggatgtggttagccatgtggccttttttgtttgagaagattaacaagaccaggtttgttttctctggtgaaagtgtgccagcaaaagagcgtgttctgttatttgctaaccacaggaccgaggttgactggatgtacttatgggattttgcattgaggaaaggccgcttgcagtgcatcaagtatatccttaagaaaagtttgatgaagttacctgttttcaactgggcatttcacattattgagtttattccggtagagagaaagtgggagattgatgaagcaataatccgaagcaggctttctgaatttaagaacccaaaggatcccctttggctggcagttttcccagaaggcactgattatactgagaagaagtgtatcaaaagtcaagaatatgcagcagagcatggtttgcctgttctgaaaaacgtactccttcccaagacaaagggtttcaattgctgtttgcaagtgctgaggagtaccatagatgctgtgtacgacatcacgatcgcctacaaacaccggccgccgacatttctggacaacgtctacggcgtgggtccttcggaagtccacatccacatcagcagcatccaggtctccgacataccggcgtccgaagacggggtggctggctggctggtggagcggttcaggctcaaggacgagctgctgtccggcttctccgcgctgggccacttccccgacgaagggaccgccgagggggacctgtcgacggccgagtgcctcgcgaacttcgcggccgtggtcgccgtcacgggcctgctcgcgtacctgaccctgttctcgtccgtgtggttcaagctcttcgtggcgttcagctgctcgtctctcacgctcgctacgtgctactctgtacatctgccccagatggtaggttttggctcaggtacccctgcgagcatccacgcgaaggaggcttgagcgtagtagcgttgtgactgtaactgagagctgtatgtatgtcagcagagaatttggtactgctacctggacgcggcttttgtatcaccacgttgctgtgtgtagtatatgtgttggtcaatgtgtttttgctaccgccatcttttatctggttcaagtaattgggcgtattcgttgcctaaggttttg

SEQ ID NO: 39610 - DNA, 503 bp, Zea Mays
atggtggataagacatggatcaatgatgatgctaggtgagcaagacatcaaaatcatcccagagtgctacagtagatattcttgattttagtaggagggaggtcctagaggtagtgttctctgatgctgacaatcagacccaagtgggtatctatgtgttgcaaagtgagcatgaaatggctacatacaataaatgcctggatgaatttgacctcatgggcattccacccgccccaagaggcttgcctcagattgaggttacattcgacatcgatgccaatggaatagtgaccgtctcagccaaagataaggctacgaggaaggatcagaaaatcaccatccgatcttcgggtgggctgtgtgaggctgacatctagaagatggtgtaagaagttgaactgtgtgcctagaagaatcaggaacggaaaagccctcatcaactaatctaattcttttgtccattattttgctgagaagtccatccctcgataagtgttcccttc

SEQ ID NO: 39611 - DNA, 3409 bp, Zea Mays
gccacactgacctatgccattcaccatcgcgcagtcactgcccttccccacgcgcctcggccgccactgtgccatcaccgcccgcccccacgcgcctcggccgccatctgtgcaatcgtcgccatcaccttccttccccacgcgccgaggccgccatccgcgccatcaccttccttccccacgcgcgcgccgaggccgccacccgcgccataaccttcattccccacgcgcgcgccgaggccaccatcaccttccttccccacgcaccgaggccgccatccgtgccatcgccttccttccttacgtgcgccccccctccgtgtgtgccccgcccttgtccttcgctcaccctatgccctgccacctccgccgtgacagcctcactcacctcggatatccatgggacggcgcagtgcgaccccgacctcagcgttccatggaaggcgcgatccactctgctgagctcctcgtccttgcataggcgtacgcgcaggccgaggagctctccatcgagcgcgagcatctcatcgctgagctccagttctttgcagagcgccagccgcgagcgcgagatctcccaggcccacctccagcagaaccttctcatcagcgatgggggaactagatggtgaggaggaggaggaagtggagcgcatcctgtgacggcgatgcgggtagcactagggaaatccagccgcatctactcgccttcgctcaggcttttcccgctggccacaactctgggaccatccacatctacatctgggacaagggtttacctaaaggaaagggcctacttttgcttgctgaaatgagctcagctggcaaccttgcttggactacactactgcggttgtaaagagtgtcgagcaacatcctgctttgtaataggatgtagatcagtaaatcctgcatcttggtctccagcgccgtcgagcccagcattcatccatgccactcctggagtttagatggctgttggaggagatgcccttgggcaacaatataatactcccatttttgtgagtgcatttttgccattcggttctcgttggatggctcacttgcttcttgtcgactggggattaggtgtgttgggttgtggccactggccggcgacagctaggaacaacaacctgtagtaggtgtcaattgaggcgacattgcgtcaggaagcagaagacatgcacacaattggtgaatgacaactttgcatctgtgatttggcccaagaaaatttgttcttaacacttggtgggaataaaaaggaacagagagatagtgatggatggccaggagaggcgagggccacctcaccgtagatggagcccacggcgcacgcaaggagtggcgcaccttctccggctccttgctctgctccaatggcgtcaatgtccacgtgccacgtcatggagcggatgcagcacaattggctagctgtatacatgcatctgttcaatccatggcttctcgacgctctcctaggttttggacttcaaaactttgtcatggtcaaagctagaagctaaatcacaagcagaaccatccgaattagctggagcagtttcattttcagcaagtgctggtcattcactgttaaggagtttgatccacaaacctgcacttggtctaccttgtgtacttatggaaggtcacttgtatgacagtaaagacacgaccacctaactgaacatgccctcaaaggttgcagttcagtttgcatctcttcatttttacagttccaggttgcagtttttcatagcctacttgagacattacagtgtcctacagctgaacctgaaattatcttcaacttgctacttcaagctaaacttgaaaccgtgactaaagaattgcaagccacagaccaggtgcttcaccgcatttctttcatgcaccacctctttcagattatgttaactgaaaataagttgcaaacttcctcaatggtgaggaggctggcaactggctggacatcaagtgatcgagccactggaaatgtttctctgtcaataagtttctctctttttttatataaaaaagtgtccagaaccactggtctgtggcttgcatttctttagtcatggtttgactgcctatatgtgcctaaaacaacacaccaatttcggcatccatccattcatgtgactgctcgcagaactaacgagctaagattcctcccctcaccggcgcttgttcccatggtctcccaacaccgagccgccaattattcccactgtctcctcaccacgagatgctgcccttgtgctctgcatgcagatgcaggtgctaccgaggaagaggaggcgctcccggtcctggcttctaaacgttgtgaaccagatcttggtgcggttgcccgagtagtttactcgtctagaggaggggtttggttgtcgacccgatttggtgggggcttcgccactgggataaggggacagtttggcctactggatctttattgccagttgttggttctgtcctttccattgggctggtactttcttgacggattggttaagcgctgtctgtggggttgttgtgctgctcctcccttcatctcgttttgtggtgattggtggagggggaggaggaagagctaggaggattctctcgcttgttcttgggtcagttcttggcgcggcaggatgaagtatatgaagcttggatcaaagccgaatgtcctttagggcttattcggttattttcaatccatatggattggaggggattgatacggattgaaggggattttgacttactagggattgaatccccctcaatcaccctcaatccatatggattggggtagaaccgaacatgcccttagacggaggggagcaatatcaggtgccttcctggtcatcaggcgacgctcttgatggtacatgttttgatggttttcattacataggacatgtgaaatactattagaagaacatccgcgtataaataattatcttttagattttttgtcttgttagcatgagctctctcaaacattgtctctgcagaggactatgatgctgattataaattatgtgttgtttttcttactataatcattgttggctaatattttaacgaatagtttgcgctccgttgcaacgcacgggcactcacctagtatatatataaaccaataaagaaacagagacattcgactcatccactttcacccgtttcggttttactctaaacacgctatcagccactcacttctccaaagaggaaaaaaggcaacgaccaaacaacaattctcagacgaggttttactggaggcaagaactgagggccaagaaagaacaccgacgagaaagtttaacaggaggcaagaacagggaggaggaaaaccataggtacatgttgatcaacaaagatctcttttttactcttctcatcttcatca

SEQ ID NO: 39612 - DNA, 1267 bp, Zea Mays
ggttgataagatggaaagcaccgaagtccaaactggacgctgattccagatagtaacaccaggaacattctggaggtttactgttcaaagatacacaccataagctgggtgtcaatcgtaacactgtgaatttgctggagagaacatgagaattaaggaggttgatgtgggagtggtggcaatatttgacggtcataatggagctgaggctagtgagatggcttctaagctttttctggattacttcttgctccatgtttattttcttctcgatggcatacactctctgcggttcagaaaatctactgggaaactgacatatagggaagttactatttttaacaatgtatttaatctgtacaagcatggccaatccgaccatgcagagaggtcatgttgggcatcaccagccattctagaccggtcatttcatacggaaattctgaaggaatcactaatgagggcagttcatgatattgatttaacattctccaaggaggcattacagaacaattttgaatctggttcaacagcgaccgtggtcttgatagctgatggacaaattatatctgccaatgttggagattcaaaagcttttctgtgctccgaaggatataatctgcaccatcgaaataatacggtgtaatatcaacacctgaattgacaggctggcagattctgtcagaaaatgacagttttcttattgcgtcatctgatgggatctttgagaaaatgactatgcaagatgtttgtgacctaatgctgcatgcaaaaattcgtgttaaacatgattttggatcctctgccataacacaacgtaatttggcagattacgtagttcatgttgctttacagaaaggcacaacagacaatgtggctgctgtggttgttccattgggatcacctggtagcactggtactacattaaaagattcgtcccagttcgaagaagatctcaagatatctatttctccaatgttgaatgttccatatggattgaagcctgatcatggacatagttcagctgtcattgacatggagtatttcaagcgctcatcaataaagttccagaggttcttggttgaagcaaaacctaagaaacttggttgtttctatttatccgagagtctggatgaagatatggactatatatttagggtgccggaagcataccagcgtgaagaagtccatgacttcaaccacataccagctgagactgccttatattctgatgggggacatccaacaccattgggcaccttctaga

SEQ ID NO: 39613 - DNA, 235 bp, Zea Mays
cacaacttgttaagcgatgaacatgtgtgagctcacccttgctgtctcacacccccccacaggagaagaaaaggtggttcaagaggagccacacaacgaggagtttgatctgatctaggtggcgtctcccagttgacttattggtgccaaggaggaccttagttcgttttatatttatcttttattttataagacttccgcaatgtaataagtgcgctgatgttattgtgacatt

SEQ ID NO: 39614 - DNA, 647 bp, Zea Mays
cgtcaggactcacgagagatatggacgggcgagtggataaaacggctgggttgacatgatcgacacgtacgggttgtccggtttggcacaaggagccgtaacaccgatctcgcttgccggaacgctccgccaacgacgtcatgccgcatccgcatgaaggaagaataaaatcccttgggtgatgacacaaaatgcaagcgtgtttggtcatcattcgatcgtgctgccgtgcgtggattcgcacccgccggcgggatccggacgaatgtcatgtgacaaagctgcaagcggcggtttcgtcatttcttgcatgtagagctagcttgcgtgtgcatgcatgcgagcacgtcacgaaatatatgtactgtcagtatatgcccccatatcacgatggtattcgttaattgctagaggaagtgtgtaaatcatttgatcctctaaatctggaccacaccttgccaagagagcccaacaagagcaacaagaggaaccctagctaataatacatgcaaaaatgcacagcgctcgtacggtacagtccatgagacgtacgtacgtacccctagttttggtgcacacacgttcggcgggcggtgtgccggccggaggaaggcaaggcaacatgcatgtcgaagccgacgtcgacc

SEQ ID NO: 39615 - DNA, 1312 bp, Zea Mays
tttactttgtcgggtaagtcttgcgaaagtacacttcgtactcaaggctttgtcccatgttgttttagatgaagggctacggtcgattgaacccccaaaatcaaatcaataccacttctatctcgcatttattttcagcacaattagaagtagttctagtctagttctagtttagccctagtttagtattccaatccccaaattctctgcctctcctcgactctacgtcgattagaggagtctaggtcggtctgcccgagcctagacaactcctaggatctctcctcccaaacggggtccctcccgggagcgagattcaggagccgccggtgatcttccgccgcccctacgcacgcgcgaaccgtccggccgtcaggcaggggatcctagctcctgcaccaggtcgcggaccgtccggccctgtgccgcggaccgtccgcgtctgaccagggagcaccgccgcctcgcgccaggtcgcggaccgtccggctctgtgccgcggaccgtccgcgcctgaccagagagcaccgccgctggttcttttgaaatgattggcccctccaaaaaggtgtcaacacccatctagctctctatgccaatctcatactgtgattcacacataccatcacaggaaaaacatagatcactacatatggatgaaaacaacgctgatcataaattatttttttagaacaccatacctgctacccgaaacatggactcggcgacgtagaactggagttgtcgacgacggggttcagcatcatcgcagcagtacccaatgacggtgaggtcttttcccaaggttgtgaagtggtccttgacgagagaaagagagcgagctcgatccaaggcatatacgcgagctagagtcaagtgtacgcagcctagcactggtggatcatcgtgcggatcgtggacaaactgcaagacggcgacagacgccatgtgcaggagcccgtctagggagcgcaaactggagaagaggacgccggagaacgcttggagccgaggccggagcgaggagcgcaacttgctgtagttgagcccgtccattgctccggcgtgctatagttttgcagcacggcaacaggaggacaaggagagagcagagaggcgaggcgagccaagctcgtgagatattagaggaagaaataactgagggagtgatatcctgtgtgagcaggacgcgtgggagagcagatgtcgtgagggtctgagggagagacgagcagcggtccacatagtcacggacgatgaaaaaaatcagggagaatagatgtcgagaaatatccaaggagtcagacgtgag

SEQ ID NO: 39616 - DNA, 520 bp, Zea Mays
ccagtttgacctcgtcgtccccgttcgcctggcttagctccacgccgcagagcaccgcacgtcagactccactactgtcatgtgggccctatgtactagattcatctccttcctcctcgggcatgaaacgaactcgtgacccagctggacgcggaatcctcaaccgaatctttgccaaccaatctcgtcccatctggttatccagcgagttcgttgagatccctagctaaccgagcgcctagcaaccagagcaaatcgaagggagagaggagagtagctgccatggttgaatcccgagttcaacgcaggcgagccatcagcgattgaccaagaggatctgagaggtcacatggaggagttcggggactcactaggcacgtgtagtgacctagggagacagaattgctcctctaccgtggagtcaccttgcaatgtgagtgaagctgcatactctaccgattcggattacatcttgtggcgatccattgagaagtctacagtatttatatgtcatcatgac

SEQ ID NO: 39617 - DNA, 468 bp, Zea Mays
ccataccgagtctatgaattatttgaccaaactgagtacatagttaagattaatagggtggagtactaaggcattagtatagccataatgtcaaaatataactgtcatgatctaccaatcacgtgagttctagtacaatagcagagtagttgctctttaccttaccacgaagctagaaaagctttggaagtgaaactaccaatgcagaaaaaaaacatggcaggaatcacaaccttgtgacgaaagaggtactccagcgcaccacccaatggtacgtatttctattgtattcgtaagatttttacctgtaatatcaaatctagtagtcccaccaataggaataacgatttaaataatcaaaatgcaagtaataaaataatggggaaatcgattgcacctacttcactttcttcataaaaaaattccttccatcgccaccttatatgcgaggtgatatagaagttaaag

SEQ ID NO: 39618 - DNA, 2037 bp, Zea Mays
cttcccccaccatcgcgtgtgagtccacggtgtgatgtcacggagcggtggcggctttcccgatccactgtgcgggagaaatccccgtgcagccttcttccagctcttcctactctttgctactcgtcttcgctgatttctgccttaattccatcccttccctgcctagaacttgctttgcttcaccccatcacagcttttggtgcctcgtcatcggcgacctaaccgccggcgaccagataaactaagccaggcccttcgctccgaaagtcgtctctcgtagagagcacttgctcacctgctcctcgccctcctctgctggcagtggacttgcgcggagtggagatccatccggacctggttcgatttcttcatctcggttgcttctctgtccagtgggtggatcactggattgtgggttgtgctaactgcaggctggcttgtcagcctatcataaggaaagtgaaaaagagacaacaaagcaatttgttgtctcattcttaggagctggcgagcactcggcatggcagatgctagttcgaggactgacacctcgactgttgtagacatggatgataagaatcaaaggattattttacgaaatttcaacttctctctgtgggacatctaatggtacaggtcttggagagatgcatgtaaagtgttagaaaacggacagagtggagccatggtcccggcttctaattcatctgaccggtctgacagatctgacaaacctatggaccagaaggttttacgacggcttgcccaaaatcgtgaggcagcaagaaaaagccggctgaggaaaaaggcatatgtgcaacagctagagagcagtaagctaaaacttgcaagcctggagcaagaactccagaaagctcgacagcagggaatcttcatttctagttctggagatcaaactcatactatgagtggaaatggagctatgaccttcgatttagaatattctcgatggcaagaggaacaaaataagcagataaatgagctgaggactgcagtaaatgctcatgcaagtgatagtgacctccgtcttatagtcgatgggataatggcacattatgacgagatattcaggctgaagggcattgctgcaaaggctgatgtgttccatatactttcagcaatcttctcagcaggctgaggatgcattgtcacaaggaatggaagcattgcagcagtccttggcagaaacgctggctgggtcccttggtccatcaggatcttctggaaacgtggcaaactatatgggtcaaatggctatggccatgggaaaacttggcacactcgagaatttccttcgccaggctgacaatctacgacagcagaccttacatcagatgcaacgtatcctgacaatccgacaagctgctcgtgcgcttcttgcaatccatgactacttttcacgtttgcgcgcactgagttctctttggcttgctaggccacgagagtaacatcacccccgttggggtcactcgatgaactgatctgtgaatgtgggactgctggctgcaaactcgcaaagcatttgcagatgactggaggatcagtcctctctgtacaagttgtattaacatcttctggtctcatattgtgctccagtgttgtacaatttagggaaaagcttggattaacttgtaagttatcatgaatttgttattggcatattgtacaattgtattagcaataaaaatagaagtacataagtgctggaagcctggaaggatatccagaatctatattggttggaaacgagcagcagaagattgttatagattgttatgttgctttgaatattcggttgtaagtgccttttttggggtatatagaacaaagaaagattcaggagagatgtagggattcaccagaggctatcggggattgtgcttctaggagctccctggactatctctagcaagtctcatattaagctctactctgtaaacagtgatacattgaattgaacgtgctacggttatgatggtaacatttgctatgcattttttaggatgaattctg

SEQ ID NO: 39619 - DNA, 1324 bp, Zea Mays
cttcgggcccttagccgcgacgagcgccaccagggagtagaagaggttaaccttctggttggaaacgatgtacttcgaaggctatggcttccgtggaagtactttcgagcagacatatcgctgctatcctgcgtctttcatcgacaagccacaacttgaggccggtgacaaaatccacaatgcagcagcagaacggacttcgcattgtggtgttctggagttcattgcagaagaaggcatgatctacatgccatattggatgatgcaaaatcttcttttgcaagagggagatatggtgttcataaaaaatgccaacctccccaagggcacatatgtgaagttgcagcctcatacaacagactttctagatatttcaaaccccaaagcaatcttggagaaaactttgcggaacttttcttgtctaactacaggtgacagcattatggttgcatataataacaagaagtactacattgatatagtagagacaaagccctccaatgctataagtattattgagaccgattgtgaggttgactttgctccaccacttgactacaaagaacctgagccagtaaaacctgctgttcctgcaagcacggagcctggtaccgacgttccagctgaagaagaaccaaagttcatccccttcactggttcaggaaggcgcttggatgggaagccttccaaagataaagatgtgctagcctcttcccctgcaaagcgacaagctaatgcgaccaacggtgtacagccttcaacagccaccacatcacagggcagttcatcgcgtaaggccacaggaaaacttgtctttggctctggtggtaaccgagccgaaaaggcacctgaaaaggaagcagaggagcccaagaaagaagacccaaaattcgcagcattcacaggaaagaaatactcactgaagggctgaataaataggaagacaatgtattatcagtatttccggtgacggacattctcagggagaagcgcttaccaaccctgttatgtgggagggtctttcggtgggatagtggtctctgtttctcctgaactattacccttgtgtagttgtgtcagccacaccggagcaactgatgtataaagccgctcttgtccgataatggatttctgttgagcttgcatgtacattttctaaaaagataactgaaatcgccaaaaaaactacaaatactatctagaattctgttgaaattttagattttatttgcacttatctttgtttcactctagctttgtcactgagactatttcttttttttaaaaatatttatgtgtttagtatagctttgcttcattttag

SEQ ID NO: 39620 - DNA, 1595 bp, Zea Mays
gatttttaaaaataataatatattggaataacagctgaagttagaattgacagttatctcgccaaagaacacgtcacttggcttgcacccccttcaccttggaataaataacagttactataatttgcacttctcttaatctcgttttcattacactgcaacataaataagccagctggcgtgcatgaaattgcgggagacggaggaacgcccaaccgagcccaccaaatccatcaatcaatcgagagcaatcacggggctcccacctccactcactcagcggcattgcacggctaggcagcagccactagccagggccaaccgatgccgcgacatgatggatcgatcgacgctgacgcgaaacccgctggatcttgcgagacttccccaaacaaacgagacagggcggagccaaaaccaaccccaatgggcatgggcgacgcaccgcgcccgtccacccatcgtcctccgcccccgggattccgccaagcgcaaggcgacgaggcgcttgtggccaacaccgtccgtctccctctcgcctcggctcgtcgtccatgggtcaaccgccggcccatgcatgcaatgcatttgatatctgcatggcatgcacgccgcgcgcgccggtgaaaattttcttgttcccgcacgtcgggaactgtaaaaggcgcggcgcgggcggacatgttactaccccgcggcccgtacgtacatcggccggccccacgacggcggtggcgtctggccggcgggcgacggggcccgggcggcgtgcttgctgcacgcattcatggctagcatagcatgcatgccccatgcatgcacggggacctttggactcgggtcgggtcgggaggaaagctgggaaaagggcgcgcggttaggtagctgccaggcggggccaccggtcttgcgcataaatggctcgggacgagggagccgcttttgcttactatctggtgcactactgtttggttgccggggacgccgcgcgcgcgcaccactgggcactgggtccggcccggttgacacatttcgaaatccttgtccgtgctctacctgtaccttgcctgcttgcccagttggcggccgtgctggctggctcacggtcacggggatgatggctccggtccaggccggctcaggcacagccctaaccacagatctaatcaagcatacgcgtacacggcgccatacactaaaacatcgtccttaattgcttttgggtgccgcctgcgtgcaatcgcgtcgcgtgtgtgctccggcctctcggtacgttggttgccaactacatttcatgtgaactcgatcttgccgcgcgtcctgtggatatatagccgtcgatcgtgcatgcattcgatcttgcattgtaagtatttaacatttgttcactggttgcgtgcatgcatgcattctatttaatcagcagggactagggacggagggaatgtttttatatatacaaggggtcatcactgaggcgcatatgcacgcaacagttgccataattaagctttgcatgcaacaattattgcaagcaccggatcatgcatgcacaatcatcgagcaatcatttgtgcaacgtaggagtaagtacg

SEQ ID NO: 39621 - DNA, 971 bp, Zea Mays
cgggtgtgtgtaagatccttggggaactagctcaacaagatacacccttttgtggattcttatggatatcttcctgcaaacacaaagcattctatgatctcagatgaaccaaccactcttgtaatatttgagaggaggtacaatgccattgaggattcccatcctgatctaattgtgggttcaacagataagcaaccccttctcgaaaccccgggagaggtatttcaactaaggaagctgctaccgacttctctgtcctatgactttaatatccatataatggactttcaaccaggcgaatatctcaatgtaaaggaggttcattataatcaacatggacttcttcttttagaggggcaaggaatataccgactgggagagagttggtatcccgtgcaagctggggataccatttggatggcaccgtttgttcctcagtggtatgctgcccttggtaagaccaggacgagatacttgctgtacaaagatgtcaataggaatccattgatatgatcaagaaaccagaacaaggagggaataaatcaaatgtcgagctgtgccaggtataaagaatttcaatgggagatgatcacaggaatgagaaaaggagatcttattgtatgctgaaaaatcttgaaaccaaaaataacgtgggaagttgaatgtgtacttgtgatgtccataactgtcaatctttggtgactagtgcgactggaattgtgatgtaacgtattctggacagcagatgccaagttggatatgctgtgacatttgtgaatggctaatcccatgaatttaggtgatgtttggtttagaaatgataatgcatatgtaaacggtatgagatccaggggcaatgattacaggacaaacagttttccattttgttcggttccaccgtagatagtgttcaggtacgtgtaccgctcaccgttcgggcttgttcggttagagttagattgaaggaggtt

SEQ ID NO: 39622 - DNA, 258 bp, Zea Mays
cggaatttccactgtgattggtcttataaaagacacgaacacctagggcgagatcttgtgacgatttattgatctaaggctaggcccaactagattcgttgtcgaccgtgggggaggggttgcattggatggtgtcatcgatactgacacgaaccgttcggtggcaaccatgtttagtgacgtgacataatctaattaatccgcgtatgttgtgtgcgccatgtcgcctttttacaccatttgaagtccaaaagaaat

SEQ ID NO: 39623 - DNA, 4527 bp, Zea Mays
gctgccagactgcaacagccaccggcggtcggcacgacagcacggtccttccattgttgctcccagctccaacgcagcattactcatctccattctccagtccgataatccactcattacctcatcatcgtttccaaaagcaaagctttccacgcagattccaccattaaattgggcgaacttttttgaattaaaaactcaaatcctggaaaacgagatgcggtaggctggtagtaggaggactaatcatgtgggcgacgctacataaacccgtcgcgcacgccaacttgcgtctcctcctcacagtctccgccttctccggaccactccacttaggcaccgccagcgctgtcgcggcggcggttacgacccgacgctcgagttctagcaggggcgtcgcggccaccgcgatgccttcgtcgtctccgcctccgctgccaccagccgaggagacgaccgcctctgctgccgctctcgcccctgagggtggattctccctcaccgagccctcgttcctcgagtccctcatgccgaagaaggagatcggcgtcgaccgcttcctcgccgctcaccctgagtatgacgggcgcagcgcactcatcgctatcttcgattctggagtcgatccagctgctgctgggttacagactacttcagatggaaagcctaaaatccttgatgtacttgattgcactggtagtggtgatgttgacacgtccaaagtggtgaaagctgatgctgatggtgctattgttggtgcttcaggtgcccgtttggttataaacccctcatggaaaaacccttctcaagagtggcatgttggctgtaaattaatatatgaactgtttactgacacacttacatctcgattgaagaaagaaagaaagaagaaatgggacgaggaaaaccaggaatcaatttccgatgctctgaagcagctgaatgaatttgaaaagaagcatcctaagcctgatgacaccatgctgaagaaggcacatgaagacatgcaaagcagacttgattacctgaggaaacaagctgaaggttatgacgataaggggcctgtaattgacattgttacatggaatgatggtgatgtgtggagggttgctgtcgatacccagacccttgagggtaacaatgatggtggaaaactagcagattttgttcctctgacaaactacaggcttgaacgcaaatatgcaattttcagcaaattggatgcttgctcttttgtagcaaatgtttataatgatgggaaccttgtcagtatagtaactgactgctctccccatgctactcatgtcgcgggcattgcagctgcatttcatccagatgaacctctgctgaatggagttgcacctggagcacaattgatttcctgtaagattggagacactcgcttaggatctatggagacagggacggggctggtgagggccttgatagctgcagtagagcacaaatgtgatctgattaacatgagctatggagagcctacccttcttcctgactatggcagattcattgatctttctaatgaggttgtggacaaacatcgcattatatttattagtagcgccggaaacaatggaccggctttgaacactgtgggtgctccaggtgggactagtacaagcattattggtgttggtgcttatgtttcaccagccatggctgctggagctcactgtgttgtacaaccacctgcaaagggaatggagtacacatggtctagccgcgggcctactgctgatggggatcttggcgtttccattagtgcacctggtggtgcagttgctcctgtaccaacttggacgcttcaatctcgcatgctcatgaatggcacttccatgtcatctccttctgcctgtggtggggtagctcttcttgttagtggcatgaaggctgaaggcattccattaagcccttattctgtaagaaaagcaatagagaatacagccgcatctataagtaatgcacctgaggagaaactgaccacaggaaatgggcttttgcaagttgatagggcttttgaatatgcacagcaggctaagaagttgccacttgtttcttatagaatctcaatcaatcaagtgggaaagtcagttccaaaactaagaggaatatacctccgcgggggcaatgcatgctgccaaacaagtgagtggactgtgcaacttgacccaaaatttcatgagggcgcgagtaacttggagcaactggttccttttgaggagtgcctgcaactgcattctactgatacctctgtggttcaaattcctgagtatatactggtgacaaacaatggacgcagtttcaacattgttgtcaatcctgctaatatcagcagtggccttcactattttgaagtttatggcatagattacaaagcaccatggcgtgggcctattttccgtgtgccaattactgtaataaagcctattgctctattgggagagccaccactattgtcaatttcaaaccttcgttttcaatctggtcatattgaaaggaggttcataaatgtaccttttggagcttcatgggcggaagttactatgcgaacatcagcttttgatactcctagaagattctttttggacactgttcagatctgtccactgaagcgacctgttaaatgggaggctgttgttactttctcttctccatcttcaaagaatttcagttttcctgtagaaggtggcttaactttggagttgtccatagcccagttctggtctagtggaattgctagccatgaacctacctgtgttgattttgagattgtgctgcatggaatatccattgatcagaaagtaagtacccttgatgatcaggataccttatcgacccgtggagtgtaatctttcttcacttcccactgaccgtgataaattgccctctggcaagcaaattattgccctgaccttaacttacaagttcaaattagaagacaatgctgaaataaagccccatgtgccactgcttaacaacagaatatatgacaataaatttgagtctcagttttatagaatatcagattcaaacaagcgtatttactcgtccggagacgtttaccctagttatgtcagactttccaaaggagaatacacgttgcaactgtacataaggcatgagaatgtgcaattcttagagaaactcaaggaactggttctgtttattgagaggaaactagacaaaaaggatttcgttccattgatgttctactcccaacctgatggtcctatagttggaagtggcaccttcaaatccactgttctagttccaggcgaacctgaagcattctatgtgggtcctccgtctagtgaaaaactcccaaagaatgctccacctggggctgttttggttgggtccataacctatggtactgtaagcacatttaacaagaaagatgaacaaaaccaccgtgctccagtatcttatagtatctcatataccattttgccatcaaaggttgatgataaagaaaagggggttttagttggtacaaagagcatacctgaacagttagatgaggaggttcgagacaccaagataaagtttctttccagcgttaagcaactaactgaggaggacaagtctgcctggtcagaacttgtggtttctctgaagtcagaatatccgaagtacacacctttgctttctaagattttgcaatgtgtcctccagaaaggaactgatggtgataagattagccatgaaaaagaggttattgctgcagccgatgaggttgtgggcagtattgataaagaggaactggctaagtatttatctctaaattcagatcctgaagatgaagaagcacagaaattcaagaaaaaaatagaagaaacgcgagatcagttggctgatgcactatatcaaaagtgtcttgcattggctgagattgaatcactgaagtctgatgagtcaattgaggtatctgctaaagatatttttgaggagaattacaaagaattgattaaatgggttgatgtcaaatctgcaaaatatggcacttcgactgttttgcgtgaaaaacgctgtggaagacctggtacagcattgaagattctaaatgatttgattcaaaatgaatctgaaccaaagaaaaagctttatgatttgaagatccagttgattgaggagatgggatggaaccatgtctcaacctacgaaaaacagtggatgcaagtccgctttcccccatgtctgccaccattttgattgtgaactcatttttacaatggctctatcatcctgggttcagtagttgtcattttcattgctgggtgcgtcagttcattatttcgatggcaaacagccaactaggcaagctactggatttgtgcgtttggggacacagttattccatagttattttgtggtacaatatcaggggagtcctttctccaaggagataagacggaacagagatattttgatggacttgaaggagattttatcctcttcaatccttataatgtctatcaaaccaaataaggtttataatccttgtcaaac

SEQ ID NO: 39624 - DNA, 6080 bp, Zea Mays
ttgacaacgtcgtggaagttgggagggaaagcagccccttgtgtaatcaggaaaccaaaacgcacatggtcatggtcatggactcatggtcatttgtcagccaaaatgtaaaagagaaattaccaagccgttgagggaaaatggcttcgtcgtccagctgggtttctatccaatccatgatgtagtccatgtacgggcttattcagttagaggtgaatcgagagttattggtttacaagaagaacaaggaagctgccttgaatttcttagaagaggatacatggctcatcttatcctagctaaacagccggttgcagcttcaaagtgcctgcttgcataaactacatttcattatagcacatcatagagacagtacgagttacaataatcaattttctgtgctgcagaatgctacttggtgggaagagaatgtcaaagcgcctgcttgcataaactacatttcattatagcacatcatagagacaatacgagttacaataatcaattttctgtgctgtagaatgctacttggtgggaagagaatgttgatcaggagatgccgcctgcttagcaagaactgatgttgcacctgctggttggatgcttttctgatctagaactgggaatgtaaaatttgcccaaggagtgtccatgtcttgttgtatgtaaatgaaaaaatatgaaattacacacagagaagtccatgtacaacatataggacatgaaaatctaaaattcaatcaatcatattatttgatacataaattcatatatatttacctttttatgatatagagattgcaggggtgcatcaaattagttgttggtggctgatgtttgtggtgtgaggcatgcttgtgttaacttgttcatctaaacaagaactataaatgttttgtgtacactatggatcaagaatcacgtccttatttgtgtagaagtctgttctttttgtgtaggtttggtctggcttaagttctaatgtccttttactgtggacgatctctaggatatgcagcttgttaaaatgattttgattgcttcgttggtcacattagttctactatcaccatgctggcttcgttggtcacattagtttccttatctcatgaaccatttttggtaaaatgaagtcttcaatgaaatggatggctgctcaattctatttttattgctctcacaattcctattcccacttgtgtgaatgaccaagcgatgatgctatcgcagatggtgtggcatgagcctacaatttcattgtagttatgaaaactgatcagtcaatgatgatgaatcatacgagacttttttacttcagcatgttttttgataggggatgaattttcatgcggtgttatgaactacaggcggaggtgagcagtgggagcgtttgcgtattaaagtgcactacactacaatacttgtttttgtatgttaagcatttactttagcttaatcaatcttgtagtttttaatgttatctttgtcgtccatgcaagaggatctccattgtgtttcgcaagacgagagtcaccaagcacctgttccgttttgtgtagaacttcacgctcattcctatcccggatacttctatccttatccggatgatggtacctagcaacaatgatagtctgtcatcgacctggacgaatagccatagatctctctcaacaatttatgtgccgtcgcaacgcacgggcacctacctaggtcgcaggcagaagcagaactcacctccgcccggcccggctgtataaaaaaaaatcctctcacaccgcacacccgcatctctcccatcacagtgcgccacccgcacccaccaacgaggcaacgaaacccagtcggaagctagaccggcgacaagtgcagcgctcgccgcgatggattctgactacggcgtgccgcgcgagctgtcggaggtgcagaagaagcgcgcgctctaccagcccgaggtgcccccctgcctccaggtacgcaccgccgccgcacctgccccttactcctgctaagttccgtgcgtgcgccattccccgcctacgcgtacagatctgcggtctctcgggtcaagcggcgccagatcccgcattgtcctccggccggatcggtttgttccgtcggcgctgatatctacggttcaccgttcacctactcccgatctctttagccgggatcaggctacagtgcgtgttgcagtatcagctgacgctgactgatgtcgctttcgctggtgacactggatctgagttgtagtgaacgtcacatgtaaatcgtggcgctgtcctgtattttagatcggtctgcatgtctgactcgtgggaggatttgttttttatgctgtcgtgattcatctgttttgtagtgtctggtagcaattgcaactgagagttaactgacgaaattattctgtagcaatgatgatggacctatctacatgtactcacgggtcctataattgtaattgtggaggggcttaggcctaggactcggttgtcgctatcaaattgaccttcttatgtatggaatcgctttggaactcgtctatatgggtggactctcaataaatttctgcatcaaatcggcttttctcttgtttgggccttgggggcacttttgaactggttcctagacgggaagaattgtcaatagcttttcagaacagatttcttgtgtgtttctgttgagttagctcagttcacacacttgaggaacggatttattgactgtatgtaattcaggggactactgtcagggtggagtatggtgacgccgcaattgcagctgaccaggcaggcgctcatgtgatcagccatgcgttccctcacacctatgggcagccccttgcacatttcctcaggaagacggctgttgtccttgatgctaaggtcatatctgaacacccggtggtcagggttggcattgtcttctgtggcaggcaatccccaggaggccacaatgttgtttggggactctatgaggctatcaaggcccacaaccaaaacagcaaactcattggtttcctcggtggatcagatggtttgctagcgcagagaacattggagatcactaatgaagttcttgcttcatataaaaatcaaggtggatatgacatgcttggtcggacaaaggatcagattaggacgacagagcaggtcaatggtgcaatggctagttgccaggctttgaagttggatgctctggttataattggaggtatgctttgttttttaatctatctactaagattttggtacagtgtacatttgctcattaaattttctattttcatcttatgaaggtgtcacttccaacactgacgctgctcaacttgctgagacttttgctgaggcaaagtgtgcaacgaaggtacatttaagttttttaatatatattgcttttttttgttcctttatgtctagttttagtgatcacgtttccttgtgtgtggatgaactgatcccatctattgaacaggttgtaggtgttcctgtaactttgaatggggacctcaagaaccagtttgttgagactactgttggctttgacaccatatgcaaggtagggctgaattgacatcactatatattgcttattatgtggtttatacagttgtttttgttgaagtgtataagttgattgactaccttctcccatcgtccatcaacttaagcttttgggttgaactggttagtgcgtccactctaacatggcatcaaagccagaggtctcgagttcaaatattctggcagaggctttatttgtgcctccacccatttattttcacgtttgtgcctttctccctttctctctggctgcgtttgcgcctttctctctagctgcacgtgaatgggggtgttgaagtgtataagtggattgactaccttctatcagcttaagcttttgggttggactggttagtgcgtccactctaacagttttcaccattgaggttttatattacctgactttgatatggtactatactgtctctgtcaccgctgcagtttactgtcatatttagaatgtgtttatgttctgttactacttactagtttgtaatggcccccttgatcttatttgttgttctatatcaggtgaatgcacaacttatcagcaatgtctgcactgatgctctatctgctgagaaggtacatataacacatgatagatagcattgcaggatcctgtcttgcacattgctcatcatatatcattggctgaatgttgagatttaccgattgcacattgtctaaatgttttgaggcaacccctgtacatataacacatgacatatagcattgcaggatcctgtcttgcacattgctcattatcatatattgttggttgaatgctaagatttaccaattgcacagtctaaatgttttgaggcaatccctgcactaaattagtttgccatgataattattcatgtccaaacgaaaaggaaacagatgaattcctgatcaactttgttaagtctcgatacagaaagaatttttagaagtattggataagcactgttggttgttcatcattggttttagcgatggagcctacatgtcagatcccatatgtgggtacatgtgtgtaggatgcaatgccggcagtagttttactgaagatgctataaaagtttttctcatgaatttgaattactcaatcaaatttctgatctgccgtgtgtctatattctaaatgacagtattactacttcattcgtttgatgggacgcaaggcttctcatgtggcattggaatgtgctcttcaatcacacccgaacatggtcatcctaggagaggaggtggctgcttccaaacttacaatttttgatattacgaagcagatttgtgatgcggttcaggcaagggcagaaaaagacaagaaccatggggttgttcttattcctgagggtcttgtggagagtattcctgaactatatgctctgcttcaggaaatccatggcctccatggcaaaggtgtttctgttgagaatatctcttctcagctttcaccctgggcatctgcactctttgagtttttgcccccttttatcaggaagcagctacttctccatcctgaatctgatgattcagctcaactttctcagattgagacagagaagcttctagcccagttagttgagactgagatgaacagacgtttgaaggagggcacttacaaaggaaagaagtttaatgcaatctgtcacttctttggctaccaagctaggggagcactgccttccaagtttgactgcgattatgcctatgtcttggggcatgtgtgctaccacatcatagctgccggtttgaacggttacatggccacagtgacaaatgttaagagtccagtgaacaagtggcgatgtggtgcggctcctatttcgtctatgatgactgtgcagcgatggtcgcgtggcccttcagccacccaaatcggaaagcctgctgttcacatggctagcgttgacttgaaaggaaaagcatacgatgtattgaggcagaattcttccaggtttttgttggaagatgtctacaggaacccaggtccgctccagtttgaaggaccaggtgccgattcaaagcctatctcactgtgcgtcgaggatcaagactacatgggcaggataaagaaattgcaggaatacctggagaaggtgaagagcattgtgaagcctgggtgctcgcaggatgtccttaaggcggcgctgagcgccatgtcttctgtgacggagacactgaacatcatgacctcatcgtccaccggccagactgcactgtgactcgtttggtgccgttttgtggtgcggatcagaatccccactttttccatggtgtcgattgacaaagttaggagcagtaatcctggtgccacacgggtcattcttttgtagcttcttgggagagttctgtcagttttgaattcgatagtttattatggagaggcttgttggtgagtttgagctcgaataatttttgaaacagacggattgcggaatcttaataaaccaaaatttgtgactgcattcacatttctgccagtcgtctgaatgagaaaaatgtgagagcgatctcttcatctga

SEQ ID NO: 39625 - DNA, 3181 bp, Zea Mays
cacaccacacgatcctggattgatgattaataaataaagcaagacaaagacttttgtgcgatgcgatgccctcacttgggtcgacagagatcatcccctggcaccaccatccagttccaattccaactccaactccctctcccaatcctcgtcactgctgcctctccaagcaacaaggccgcggaagaacagaccacgcggtcagcagcagcaggggagcaagaagaactcctgttgggctgggttcacggttcaccccatttctgaattccgtcctgaggtgtggcagctcacagaagcttccagaaggcgggattgagccaagttcgctccccggatcgccgggaaaccaacaaaagcagccgctttatgcttcttgggccagacgaggaatcctcgagaaaccgatagaagcaaccgggcgctctgctgccggtgatggcggcggaggagctgctgcggaagttacgggagctggaggaaggccaggcggagctcaagcgggagatttccaagctcgtgccggagcagcagcaacagcaccaccaccaccactaccactcctcgcgccgcccgccgcagccttcgccggtgcgccgcgccctccccgcggcgccttccttgccgtcgcggctgcagcgcgtgggccgcgtcgggctcactgaccgccagcacatcagggccctgcacgcgctgggacaggccgtgcatatcattgcccccggcgggaagctcatttactggaaccgttatgccgagcaaatgtatggctattctacatcagaagcagtcggtcacgatgccgttgagttattggtccatcctgatgatgctgaggcagcaaacaatataattgggaatatatttatggggaaatgttggagagggaagtttcctgttaaaaagaagtcaggagagcggtttttcattgtggccaataatactcctttgtatgatgatgatggaagcttggtaggtctcatttgtctctcagttgatacgaagacattagaagatataatcggcccttcaacttcaatgaagtctcatacacatccagtgaagcctcgctttcaagtcaacaatcggcctaaatgcaatttgttaaataaaagttctattgagtctgagcaaactgtccaatcttctatagcctccaagataacaactttggctaccaaagttacaaacagagttcgttctcggatgaagacaggtcagaactgcggcgggtctgagtgtccgtactctgaagatgattccaaggaagaactgacatctagtggaaacacccctagaggtgatgtactgcatggtggcattgttaaaggagataatttccctgggaagtcgagtaaaacaagtagtgaagactcaggggacggaaacgaaaggctttgcaagattagttcaaagacagaggacttattggccaagaaggggatatcatggccctggaaagggcacgaacatagtggtcctgacaagggtcacatgaacccattgcagttccatgataagcaagacaatgatcagatacatctggtcggtccagagtcaattataattccagactaccaagattctgatagcacccaggaaagcagatatgaagtaacgggtaactggtggtctttcaacaacgatagcttcaatagtttgggtagcagtttaagttctaatagcagtgctattgagagagttgatcttgaagcagattgcctagactatgagattctatgggaagacctagtacttggagaacaagtaggtcaaggttcttgcggaacggtgtatcatgctcagtggtatggctcggatgtagcagttaaactattctctaagcaggaatattcagatgaaatgatagataccttcagacaagaggtatctctgatgaagaaactacgtcatccaaatattatactcttcatgggagcagttgcatctccagaacgactttgtattgttacagaatttcttccacgggggagtttgttccgcttacttcaaaagaacactgccaagctggatccaagacgacgagttcacatggctatagacattgcaaggggtatgaattatcttcaccattgtagccctcctattgttcaccgtgatttaaaatcgtcaaatttgttggtagacaagaactggactgtaaaggttgcagatttcggtctttcacgtctaaaactcgaaacgtttttacgaacaaaaactggaaaaggaacgccacaatggatggccccagaggtgttatgtaatgaaccttcagatgagaagtctgacgtgtacagctatggggttattctatgggaacttgtgacccagaagataccctgggataatctcaatacaatgcaggttattggagctgtcggctttatggatcagaggttggacattccaagcgatacagatcctaaatgggcatcgatgatcgagagttgttgggatagcgacccgcagaaacgcccttcgttcctagaggtcctggacaggcttagagatctgcagaagcagtacagcctgcaggctcagatgcagcgtaacctgtccgcggatgctctcctgaaaggcgctgtgaaatgagcgtcgaggaatgctagctctcggaatgtaatggaacatggcactggacacattgacagcgaccagggcaagcgttcatcgacatttgtagcgtctgcgtgctgatgaggaaggctggctacgtgcatcttggtggccttcgtatagaagaggaggagctacagtccggactccggaggctgtaccggcaaaggcggccggtgcatgcatggcttcatgtatctcaaggcctcaacgaagcttcataatgcggtaatcttcggccaagaaggccggacacttgtgaaacgagaatggctaagaaggccggactactttttgtattaacgccccagtttttcaatgggggaaaaatcgaattgtttataaattgtatacttagtctcgataacgttcttgcctgcatatagaaccgggtgtcttcagacgcatggatgggtggtagtagtgtgttcagatgcatagaaagatggtaagcatgtctctgctgctgctttccttactgaatggacctttgatgtcgtcgctcattgcagcgttttctgaacagtgaccacattacagccggctgcacgcctgcacttgc

SEQ ID NO: 39626 - DNA, 1744 bp, Zea Mays
gcctccggggctctcttgcgctcacactcccaccgccgcatatccgagtagagcgccacgaactccacgagctctccgcccagcgagactgtccgatgccccctccttcacccgcctcgcaagtgcgcacttgcgatgctggcgccgcgtagtcgcccacgcgcgggacggtgagtgagatggcgcgctacttccgcagcagcaacctcgcctctaggatcttcgaccgtcagctcatctccccgctccctggcgctaccgttaacacgattagacagttttatgaaaatttggtcccaagctatactatatatgacatagattgcccagattattcgtttcgcaagttcactgatgatgggaaatatcttgtggcttttagccgaaaccatcaagatttgattgtataccgtccaatctggttcacatattcatgcaatgaagaatgtgaaactcatgagcttccgccaaaggcaaagaagtttgacagcttctttaagcagctttattcaattcctcttgcatctagcaatgagtatatttgcaaggactttttcctgtacatggaatgccatcgatttggtttatttgcaacatctactgcacaaagtaacgaatcaactgccactgagggtgcaatacatggggtgccattgattgagaaaataactttccatcttgtgaggctagaagatggtgtgatcctggatgaaaaggctttctgcaatgattttatcaatctggcacatagtattggtgcttacatgtatgaggacctgctttgtattgtttctttgcgataccaaacaatacatatcctacagatacgagattcaggcaaccttgttgaggtacgcaacattggtgcattctgtcgggaagatgatgagctatttcttcactcacatattcagactggttatgggggttcttttcttcctggcataaagcaacggttgttgtcatatattttttgcaagacgtggaatgaggttccagatcagactttgagggtccaacatctaaagaagaagttctattttcacttccaagattatgttgatcttatcatatggaaggtacagtttttggatcgccatcacctatttgtcaagtttggtagtgtggatggagggctaacagcaaatacgttttggatatccctaggtttctcggagtactgaccaaaacctagcattctttgccgtgtacaacatggagacaacagatatcgtttcacttcatcagaattcttcggaggatatctatgccttgtttgaacaattttatgatcattttcatgcaaatccacaagcttcatcacatggaaaatttatctcctctcattccaatgatattcatgctttggatcaacttcgggttataaaaaacaaagcaagtagctcctcacagtttgtgaaaaagatgatgacgtcattaccttacacttgccaatcacaaagtccttcaccgtacttcgacctgtctctttttagctgatttcagcaattgatcggcatcggcattgcacagagcatccaataaaatttatgtcagtgaggcaaaatgttgtcaaatttaagatcaagccaggttcagattctggtgcttctgacagcagagcaaaaagaatctcgtccttcttgtttcacccatttttcccgcttgcactttcgattcagcagacttatatgcagccaactgttgtcaacatccatttcaggagatagaaaaggatgtttac

SEQ ID NO: 39627 - DNA, 1502 bp, Zea Mays
cgcggcacggcggcaccgcccgcgaaaacgcaaccaccggcgccgtcaccctccctggctccggccttcagccgcctcgccagcgacgaccacggctgcgtcacatgacaagacacaacatatcgaagtcgctcgccgtcgtcctccgcgcccgcatgcagcccaatcccatctcctccccgcctccgccgacccctccgccgccgcccacggaccccgaccccgccgccccgcttgtggcttccgtcagccactggctccacgtatctgcctccgccgcctccccgccccccgcggcgctcgacagcttctccgatgggtaccgctccctcgaccttgtcgggcgccgcgaggtcctccgttccctcgccgtcgactacgatgtgccccgcgcgcgtgtccgggatctcatgaaacagtacatgagcgtcacctccgccgaaccatcaggcgtggatgacgtggaggcggaggaggggaaggagggcgccgcgtcggccctgtaccggatggagagggggctccgggatgcactccggccccggtacgccggattccttgaggccatgaacgcgcagccaggtgggctcaagctcctcgccgtgctccgtgccgatctcctcgccttgctgggagaggagaacgtttcagcgctgcgggctctggactcgtacttgaaggagaaactggtgacttggcttagtcctgctgcattgacgctccaccagataacctgggatgatcctgcctcgttgctagagaagattgtggcatatgaagccgtacatccaatcaggaatctgatagacttgaagagaagattgggcattggtcgccgatgctttgggtacttccatccagcaataccaggggaaccactgattttcattgaagttgctttactcaaagatatggaagcatctatacaggaggtcttgtgggatgaccccccaactcctgaatctgaagctagttgtgcactattttactcaatatcgtcaacccagccgggtttatcaggtattaatctagggaagtttcttctcaagcgtgtgattgacatgttgagaagagatatgccatcagtacagcgaacaagctgatggaaaacaagggattgaactattgcaagatatactgaaatcaagacagtgggtaaagtctgacaaattatctgctgcattaaaatcacctcttatgcgtttatgtgcaaggtatcttgccagagagaagaagcgaggaaaagctctagacgctgttgcaaattttcacttgcaaaatggagcaatgattgagagaattaattggatggctgaccaatcagagaagggcattcaacaaagtggaggtatcatggtcaattatctttacagattagagaacatagaagagtatgcattgtcatattcgagtacagggctcatccattcttcacctagcctgtctgagtatcttgagccgaaggatttatgagacaaaatatttctggaacggacttttgc

SEQ ID NO: 39628 - DNA, 3641 bp, Zea Mays
tcagaatcgaagacaaaattactgtaggttcccggacgagtcttctctgcagttctgcaggcgcagaggcactgacaggaggggcctggtgttgaggttagcttccttccgaattcccaaaccgggtatacgctcatcggttcctcggcgctcgcctcgacctccgactcgaagcggccctcctccctcgccggacgacggcgacggccgtggccgtctaacacatccgtggggaaccgctcccttagttgggcctcctccggccatggtgcacagcgcgtacgatgctgtcgagctggtggctgacgtgccgggccacatcgaggccgtcgcctcccacgctgggaagctcctcgtcgcggtttccgacaccgaaggcttcctctggggctccgactgctccttgcgcatctactccgctccttccccctccgacggcggcggcgagatccggtgggacgggccctacgcgctcgagcggcaggagccgcggttctggcggcgcccgcccttagccatggaggtcagcgccagccgcgacctcctgatctcgctctccgagtggatcgcgctccaccgcctccccgggctcgagaccgtcgctgtcgtctctagcaagacaaagggggccaacgtctttgcttgggacgagcggcggggcttccttgccgtcggtcgacagaagcgactcaccgtcttccgcctcgacagtgggcgagaatttgttgaagtgaaggaatttggagtgccagatattctgaaatcaatggcctggtgtggtgataacatatgtcttggaatcaggcgggaatatatgataataaatagcatgaccggggcactaacagaagtgttttcttctgggaggatcgctcctcctttagttgtgcctctccttactggggaactgatccttggcaaggataacattggggtattcgttgatcaaaatggtaaacttattcaagacggcagaattatttggtcagacacaccagcttctgttgttatacataaaccatatgccgtggcccgcctgccacgacatgtcgagatacgctctcttaggccccccaatgcattggttcagacagttgtgctccgtgatgttcaaaagcttgtccaaactgaccactgtatacttgctgctctatctaactctgttcatggtttgttgcctgttcctattggagctcagatagtgcaattgaccgcttctggagaatttgaggaggcgctagcattgtgtaagctacttccaccagaggattcaaatttacgggcagcaaaggaaagctcaatacacataagatatggacactttttgttcgataacgggagttatgaggaggcaatggaacagttttcagattcacatgtggacattacttacgtgttatctctgtacccatctattgttctgcctcaaacaaatattataggtgatcatgacaagctgctggacatgccagaattagcaagggaatcctccgatgtgacagatgagatggaatcatactctttacagcttcaagaaccagatgataaatctccattggaggtaaagaaaatgagtcacaatgctctagctgcccttgtgaagtatttgcagaagaaaagaagtggcataattgagagagcgacggctgaagtaacagaggaggtggtctctggagctgttcaccacagcttaaaattatctgagccatataagtcaaagaagctgagcaagaaacgagctcagacacatacaagctctattgctagagaaatggcaactgtactggatacttgtctgcttcaagctcttattcttactgggcagtcatcaggggcaatagagttgttgaaaggactcaattattgtgacctgaagatatgcgaagagtttttgaaggaaaggagagaatatatggttttacttgaactctataaaagcaatgaaatgcaccgtgatgctctccaactactcaatcaattagttgaagaatcaaaatctgaaatggagaatacatattttaataaaaaatttaactctcaaatgatacttgaatatctcaggcccctttgtagatctgacccaatgctggttttagagtcttccttgtacgtccttgagcgcaacccatcagaaactattgagctctttttgtctgaaaatgttccagcagatttggtaaattcatatctgaagcagcatgccccaaatttgcagtcaacttacttagagctaatgctctcaatgaatgatactgggatcaaccctaatctgcaaaacgagctggtacaactgtacctttctgaagttctagactggtacaagattctgaaggaagagggaaactggacagagaagacatattccccaacacggaagaagttaatatctacgttggagagcaattcaggttacaatacagacgcacttcttaagcgccttccccaggacgctctttttgaggagcgagctatattgtatgggaaaataaatcaacacctcagagctctctctctctatgttcacaagcttcagatgccagagcgagcagttgcatattgtgaccgtgtttatgaagaaagagaacaacaaccgtccaaatcaaatatctattttaatcttctacagattcatctgaacccaagaaaagctgaaaaggaatttgagcagaaaattattccagttgcatcacaatactctggaatccaaaaggctagtgctactaagcccaaagggggtcgcgtaggtaaaaaggttgtagagattgagggggctgatgacatacgctttagccccagcggaacagatagtggccgaagtgatggtgatggagatgatgtaaatgaccgaggccctataatgttaaatgaagcactggaactgttgagccaacggtgggacaggataaatggtgctcaggctcttaggctgttaccaagagatactaaactccaggatcttgtatcatttcttgagccactattgcgtaactctagtgaacatcggcgcaattatttggttatcaaaaacttgattttgcgggcaaacttgcaggtcaaggaggatctgtataatcggtgtcaagctgttgtgaagattgatggagatagtacgtgttctctttgccataagcgtgttgcaaatagtgcttttgcaatatatccaaatggacaggctttggtgcattttgtctgctttaaagaatcacagcaaattaaggccgtcagaggagcaaactctgtgaaacgtagataatatggccgtgatccaggtttggttgatgccagcttatggaattccctctctttggcttcacactggattttagtggactgcttcagaagtttttactggagtaatcttcactctcttcagagatcgagtttatagccgtgcgtgtgtgctcgctctctgttttctggccatcgtactggaaaactggaacccctttcttttggttttcatgtacagaatgtaaatgatactgtaaagtttcggttaacagattgatgatggtcttgattatagtgccgcaatgtgtgctccaaataggtttggacattattattattggatccatgtcattataattctctaagttttgaatggcgctattataattcgtatattcggaggtctacca

SEQ ID NO: 39629 - DNA, 744 bp, Zea Mays
tttttcttttctctctttgtaaagaatatcgagccttcttctcttgagagttgagaacctagctttcaagtgggccaagataaagcccagtttgtcccactgggctgggtacgcacagaacctacccaggcgaacaggatatcgagcctctcctcgtttcggccctcctcgcttgcgcgccgccgccgactatggccgccgccggggtggagcctcgccccaacccgcctcctaccatggcttccgacctccccaacggaagtaaaaccaagtcgcgagagtccgaccggcgccgccgccgccgcaaggtcaagaagaacaagtccgccgctgaggccggtgcccagaacgagggcgggggagcttctagctccgacgccaaggagaacgcagatcctaaccccgagcccatggtggaggtggagatagagtatgtactggagaaggccgagctggacgatcctctcctcgatgacttcaagaccatcttcgaaaagttcacctttaagggcgctgccgcagcagcgaccgaggtatttggattaacgaagcgtttcttcaacccgtcggtcgatgagcgagcctaaagccctgtttgtctacttctaggattatataagtcagcttatggattatataaacacgtaatgatcagcttatggattatcataatctagatattaataatatgtaccgtttgtttgtctcttaacttatttaagaccgtgtttggtttcatgtgga

SEQ ID NO: 39630 - DNA, 6566 bp, Zea Mays
cctgcccctgcaaccccgctccaccgcgcccgatctctatcgtcgacaccaccgcctccggcgaggccttttccgctcttgaggtttccacaggtgcctctcagccctccgcacactgcctcgtgggtttccccgagctcccctgccccaaaccctaaccctagctcctggcgtggggccgtgcaggttcattccctgctcaatcgggcgccccatttggcaccctctgcccccccacagacccgtagggttgcatttcaggaaacagcgtgtctcttttctggacttgggaatctgagaggatactgtgcagtttaatggcacacactgctgactatatgcacatataatgatgcatgggcaaaccatgcttctctggtctagtggctattgagctgtgctctatgggaggtattgctgaatgtggtgtgagcattgacactaaagcttcaccacgtcgagcagccatagagaaagctcaggacgagctcaggcaggaatatgatgttcgtgaagaacgaaggagagagcttgaatttctggagaagggaggcaatcccttggatttcaaacttggccatgtagcttcccttagtgtacagtccacttctgtgacagaacagatagctgaacaaaatgtgataagtgaggccaaaggtagttctgcatttgctacatcacctcatggggattctgttgaaagtaacgacaagccaggaaattcattgtgccgtgaaggcaatacagccgataatattacgcttttggatggagatgccagcagcatgggtgtggataaaattgtgaaacgtggaacaaagagaactaattcagctcaagctgagcagttcctgcactgtgatggtcagaacaatgcaaaagaagaagattctgggttgtaccgtcttggtccaaagagccaagcgtatgcacgacgtaggtcaaagcctatcagagagaatgcatatagtgtatctgttaggtatccaccaattcctccattaagttctcagcaaaaagatgtgacaggattaatcccagaaaccaagactgaggataatggtgtttcatccattggtgattcaaaaccgactagtcctaactctaaaaatttggtgacaaatgcatcattactgaatgataaggtggaaatggagacagaaaatgttcaagcaattcctgaaggcaatcaagcaccgaaaaatgagttatcaaacagcaacaatggtagtcctgctattgagatttcaccaaacagtgtgccggataattctcgtcttactgtaagtgatcagatggttactgcatttgtttctgtggaatccccagatgctatttcaaaagtagctgcttcaaggatagtttgttctctcccatatatatccaatgaaatattgaaagaagcacaaactcttgagaaggcaggtaataacccatctatggtaagtgtggttgacgttcatgcatatggtatggataacaatggtgcagcaccttactctgctgtgaaaagtgctagtttgaatgaaaatgaagttgatccaattcatgaatatgctgccaaagctgttactgaacatccagaccaaaatgagaatcttgtaccagtgaatgcagatgaaatggctgatgaaggcttgaataagatcctacctgatgacaaggatgacaagaaagattgtcaactggaagttagtagtgggcctgtcattttgaatgacagttctactcctgtctatcctgaatttagcaattccttttatgcaagagatggaacagaagtttctaacaatgcagtagattcaaaaaataacgcagaacagcttgcttcttctaatcagggaaaagggaacatggaggaatgcaaagattctgacggaaacaatgcaagtgaattgagtgttgcccaaaagctagtgtctgttattgtgccccctgcttcagacgcaggcgatgtgagtaattttgtagaaaatgatgttgataaatctagcagagatcaggagaaggtagcaaagaaggaatatgaagattctgtcgtggcaaagaaggatcacgaagatgctatcctcagaagggcacggtatatagaggcaaatattaagagggctggtgaatggtctctctgcaatatttctttagagaagaagcagaagagccactgggattttgttctggaggagatggtctggatggcaaatgacttcacacaggagcgtttgtggaaaaatacagttgcagcacagatgtcccattggatttcttctagaggtcgagcggtatttgaagaagcaagcattcagagaaagcagaaatctgttgctagagttctagccaatggtattatgaacttttggtgttcagtccatactttacgagctagtggtggtattcctaaaccaataaaaatcgagcaaccgaatgagctagaggaaaataagcttggtgggttcaaatccggaaaagcggatgaggagtgtttggagcaagaaaagtcgcgccagtctcctattcagagctttgcacttaggtttcttgagtataacattaatgcatctgaatttctgccattagccgaagcaccatcaactcctgacaggctaaatgattttggcattttgaaagcaaatctcttttatggcgtagcacccggtgcaatgcaggcatacagggagtctatggaccgtctccttatttataataacaagaaaattggtgacactgtactcaaggatgattatgagccatcaacatatgcatctgtcacagatgtccctatggagaatgcatatggagatgacgaaagtgaggcacacacctacttattgcctggagcttataatggtggtttggcatcaaaaaatagtcacaaaaagaagcaccatttgcctcagaggatgaatggcgcaaggtcatatgaaattggtgttgacagtccttacgaaccactgtatttggaaagtaaatcaggaaaccagcaactcttatcgaatggcaaacaaacagacttcctctccattcctataaaacgcatccgcacagcagctaggcagcgggttgtgagtccatttcctgctggtgcttctgggacccctcaattcacaaataaaacggacgcatctagtggagatacaaactcctgtcaagatgatcaaagttcattacatggagggtcattttctaggaagaatgcagatatagagtccactgttgattttgacaggcaattgttgtatgatggtagtgaggtgtcgacaaaatctaaaaagaagaaaaagactaagcacccagggtacaaggcactaccaaatgtgtccgaatcttgttcgttgagggctcctggaaagggcaattatgatcatagatctcagatcgatatgatagctcagtatgagcagaaggattatattaaaaagagacaggagacaaatgggaattttggtgttattgatttatcaacagtggttaatggcctacatgctgctaagaagcctaaattgttgaatcaagcaccagatatttcactggaagctcttaaaccaattggtccaatggcctctcttgctgcatcacaaatgagcaacatggcaaatcctacgagggttataaaaatcagcacccgtggaagaaaaagtaaaggactcaagatgcgagctggtcattcaggtcctggaagtccatggtcaagttttgaggatcaggctcttgttgtccttgtccatgatatgggtgaaaactgggaattggttagtgatgcccttaacagcatcatccaattgaagtgcatatacagaaggcctaatgagtgtaaggaacgccataaacttctcaccgatagaagttgtggcgacggtgctgacagcgctgatgactcaggctcatctcaacactatccttctgcattgcctgggattccaaagggtagtgcaaggcaactgtttcagcgccttcaaggaccgtttgaggaagggactctcaagacacacttcgagaaaataatattgcttggtcaaaaattgcatcaaactcgtagaaaggatgagatccatgagctgaggcaaaaaaatccacttcatacttctcatggttttgcactttctcaagcatgtccagggaacttatctggtgtcattttgacgccacttgacctttgcgatggaccttcgaactcggatgcacttacaggatccaatacaagtgggttaggtctttcaaacaataactgctctgttggtcctactcttcctacatcaaatatgaacttaagattaccaggttctcctggtatggttttgggaagcaattcaccattgcctttgaatgctccctctagggatgttcagaggtatggtgtgcctagaccaacctcgatacagggtgacgagcaatcaagaattcattataaccagatggtaaatggcagaaaccttcagcaacctggagttcctgttcctggtgtgttgccatctggtgttgatcggggtgcccgaatgatgccacctgcccatggtgttggaatcatggctggactaaatcgaggtacacctattactaggccaggttttccaaggcttggttctcttggaaacatgtcacccaccgatggtcaaggcttaaaaaatactgtaaacgttcatcctggtgccatactgggacctggaagtactatgttgaggccacgtgacccaatgcagatgtttagacctggccagaattcagaggagcatagacagatgatgatgccagagtttcagttacaagtctcgcaaggaaataatcatgctgtgcatttcagcggtccaccatattccaacactggggcatcttcacctgttcaatctttacctgcccagcagtcccaaccacatcagatgccacaacaatcacacatgtatggaaacacacaccttcttcatacccaaggaacaaaccagtcaaatccacagcaacagcaggcttatgctatgcgcttggccaaagagaggcatatgcaacagatgatgccccaacaacagcgtccattatctgttgccagtgcagtgtcagctgtacagaatggctcaccgatgcaacagcagagccaaggatctgcaacttgcgtaatcccagctacacagacacaacataagcagcaatatcctgcacaaaatgcacaagataactcaatgcttccccatcagccttcagccaccactacacataaacagaagaagcaacagggccagcagcagcctagacaaaatcaacagcaacgaaatcaaggcagtcaacaagctaagcttatgaagagtttaggccgagggaacatgatgcagcagagtcctgtggatgttattcaagcaagtggcatatcaacaagctgtaaagatcaagttcctgataagaatatgatgcaacagggtccagggcattttgttgtaagtaaaggatcaatcccattgatacctcaacctgggaatcaaccaaatgtatacacttctcagatgcctccgtctccaatgcagacaccggatattagtaatcagggtgcagtcaagggttcttccaaccatgccttgttaacttcccagcaaggttcactccatacgccttcacagttggcacagcagcagcagcagcaactacggttcatgaatccgtcacagaataatatgcaaaggttgataatgcaacagaatcggcatgtgaacacagatggcaggattgagttacctgctgaccaagtacagcataaccaggtaatgtcatctgcctcacttgcaagaagtacagattcaggcagcccaggaatctcatctataagccagcggaaacaagagtcatctcatgacccaagtgcaattacctcaacctcgcagctagctagctcacctcaagacacctttgttggaagtgatagggtgttgccatcatccagccaaagcatgccgcaaaggcaaatgtccggtggtgtgcctgtacatggatatggcattggtggccaggtgcagctacaacagtctcggcagcaactccagtctcagcagcagcagcagcagcagcagaggcctgttgtccaaggtggtgtatatgctcacccctcaaattcaggacaaggatgatgctgaaccatactgggcctgcatttctgaagagcctcccttccccttgtaaagttacctgtacaggcgtccgtgctgtggaagatgtgtgcggatgatagtgctctttattcccaactttgagctaactgtagcctcctcggtgtcaggtagataattatttctcctcaccattttggtgccacactgctaccttccatgtagtttgaccctaggttgctggaggtggttcttgtgagggcaaactccttgagtcgtcaaattgtaaccacgacactgggcccagttgtatatttttgccgttgaggtccatgttagaggcaatctcttttgtataagcctgtatattcagctcacaagccagtcaatgaatgcaaagcctttctttgcgtcaaaccaggaatgtaaaaagcttgagcgttttgcgtcgatcacttatcttaacttgtcgtattcaactccgtc

SEQ ID NO: 39631 - DNA, 252 bp, Zea Mays
ggtttatatgacctttctaccgttagcatctttgctgggctcattgcaagtgctagcgtctgcacgagtgataggactggcattgctgctgcactgcagctcacgccttggcgagtgtcagggcaaaggaccaccgaagaaagggatggcacgtaccggcgcgagtcaactactcctcgtcgtcttgctgctctctgcggtcatgagctcctactcggctcgggttccgagaggacggccggacgcgctgcc

SEQ ID NO: 39632 - DNA, 2122 bp, Zea Mays
gcacaagcaaaggcgggggagagagctccgtgcagtcaccgtcgtgttcggaacgagcgagagagcgggagacgagtcgcggcgcctctgctgtgctgtcttcttctccccctctgctctgcttcggctcctcacgcggcctcgccgagacccgcagaaaaacagttggaagaacttattctcatacatagggcctggatttctcgtctcaattgcatatattgatcctggaaactttgagacggatctacaggctggagcacagtacaaatatgagcttctttggatcatacttgttgcatcctgtgctgctcttattattcaatcacttgcagccaggctaggggttgtgacagggaaacatcttgcagagcattgcagggctgagtatcccaaggtcacaaattttgtcttatggattcttgcagaacttgctgttgttgcatgtgacattcctgaagtaattggaactgcttttgctctaaacatgctgttcagaatcccagtatggtgtggtgttctaataactggactcagcactctaatgctcttattgctgcagcaatatggggtccgtaagctagaatttctgattgcatttctggtgttcttaatagcaacatgtttcttagttgaacttgggtattctaaaccaaatgctccagaagttgttaggggcctttttgttcctgaacttaaaggaaatggagctacaggccttgctatctcattacttggtgctatggtgatgccgcacaatctttttctgcactcagcattagtattgtcaagaaaagtgccacggtctgttcatgggattaaggaggcctgcagattctatacgattgaaagtgcatttgcccttacagttgcttttctcatcaacatatctatcatatctgtcagtggttctgtctgtggttcaggtaatttaaacccagaagatcaagcaaattgcagtgatctggacctaaataaggcttcatttttgttaaagaatgtccttggaaactggagctcaaagttgtttgcagttgctttgttggcatctggtcagagttctacaattacggggacatatgctggacaatatgtcatgcaggggtttttagatcttcggatgaaaccctggatacgcaatcttgtcacgaggtccttggctatcctgccaagtttgatcgtgtcaattattggtggttcttcagcagctggccagttgattatcattgcatcgatgatactgtcatttgaactcccttttgctttagttccactccttaaattcaccagcagcaaaacaaagatggggcagcatacaaattcaatattcactgctgtgctgacatggatgatcggctcgtttattgttgtcatcaacacctactttctgataacaagctttgtgaaattgctcgtccagagcgggctgaccaccatttctcaagtattttccggtattttcgggtttttgggcatgctgatttacatagttgcgatcctatacctcgtctttaggaggaacaggaagtccacccagccattgctggagagcgatgctgagcttgcagtatcgggtagcagtgctgatgccggagcagaatgctcgctgggccatttgccccgtgaggacatctccagcatgcaacttccgcagcagcgttcagcttctgatctagattagataacagctgccaggaaaataaatgttttttttgttttttatatagtatagtaattacagaatagggtacgtcaggtattggcttctgttcatcctactgatgatgcttaaggaatgtatacaagaggacggatatctatgctgccaaacaaaaaaatggggcacaaaagaatttagtgcctgtttttgggaagtgatgtgaactgaatcctggaaggggcaaaaaaaaaaaatgttggaatccaattgttgaaaattcttcattctaaacatgaggccgttggtaaaaaatgtctacatgctgtaaacatactatattttgacattattatcacagttaatatatactggacatgctgttttatgtgttgtgcattccagtggctgcaggccttgctcagagctagtttggtgattagagaaatggagaagttctatgta

SEQ ID NO: 39633 - DNA, 800 bp, Zea Mays
caattttacggcgaacgacggtaagcaaccggtcaacccatttgggtcggaggcccattcgtctccgaaatccagagtgggacctgagcgtaaatagaacccgagcccctctccgcctccctccccgccgcacagcctccacagcccgaaaccctcgccgccgatcggtttcggagaagagaagcaaatcaagatgtttctcggctcgctcccgcggcgcccgagcaaggaggctgcgtacaagcagctgcggtcgcacatcatcatcatggcctcctgcgccgccgtcatccgcgccaccccttacatcctccatttcctcgcccgcgacggcgacatccaggaactcaagctcgatctgtaggcccgtccgttgcttccccacctccagagaatctacgggtcgggactgcacctagagctttacaaatgcaaaaagccaaaaacaggtgctacaaaggcaaccgttagttcgaggccactgcaaggtactatggagttagtggctacagtgcctgcttaagtttctttgttgttccaagtttagtgacaaaactgacaatggtgtagcaactgggttgtgctgcgaccagtatttcgtttttgcctacctgtatggtctagtctttgtttgcactggtggatttgcagagatgttatcattcaacaatgttctgtggtcagttgcaattgtccttatgctctgtgaataatgcttggactgccgactgtgtatgatttggtttcggcttgaactttgttgtgtgtcaagctattcctaggcgatgcttgattatatc

SEQ ID NO: 39634 - DNA, 1256 bp, Zea Mays
taggtaaaaacaacgtgagcaggacacagttttctttttggtgcaactccaaccgacggtccggtgctctgcatgagctgtttttcttatacacgtttgtccctgaatttttcctcttgactcgagtaggcatatagtaagagctcctttatggtgttcttgagctttggggttgaaatcgggacagcagtcaaattttcaaagtattttttttcttcttcacactctctgatcgactattttgatctttgagaagcaactattaaaacatacagacttcaaagctgataccactttacacactacagctactttcactctgaaccacctaccaacagttactggttacatgttaggttatggtctaatcatcgggtcgtcttccagttcgcccgtggacacagacactgcatgccattccacaaaactagaacagacatgtcccatccaacctaaggtgccgtttgattcacgaaatgtaacgtaaatggtaacgattcacacttgaataccggtggtaacaaatttgaataaggaggtatccatttgtagtgtgatatcgattacggttggacttaaataaacatatgatctaacgttattggttacccattacgttgccaatatgtgaaccaaacggcacctaagagactgacaatacgggagggacgtgtttgtcgcgagttgcttggccaaactctcaggcaaagggagatgagtgggtgtgttgttcggtggagaaaaaacaaatgaaactcgaggacgagtctgagcctgagttggtcattaatttcattagatgactttgtatctttagttgacttgacttggcaacgggacttggtatatagaagtcagatctagaactccttgaggctctccacccaaacaaccacagcttgctggcaagcctctgaatccatgcatccttcatcaccttccattctgcacttacagcagcagcagcagccgccgccacagcttgctgcgcttgttgtgcgacctcagctcgctccatggaccccttctgcttcagcttgcagataagcggatgtatgtcagttgcgtcatcatttatcactgtccaatgtccatagacatcacaacaagcactcgaagatttgggactgttccaacaaggtatgttctggtctttccatggctttgtagcttctataggcgtataccatatattaccatctcagtaaaagacatttcagcttcctggcccaactcagatgccctgtctagttcct

SEQ ID NO: 39635 - DNA, 1077 bp, Zea Mays
gaaaatttggcgccattccaggaatcgcgaaaagaaaaggtcctacctcgtatcgcgtccaattgctttgctcattctcgtgctcggcaggggaacggtgcgaagcggaggagcggcgatgcagatccgggtgcagtgcgcgtgcggcgagtcgtcgtgcccggaatgggccgtcgtggagctgcagggcgtggtgcagccgcaggcctccttcgccggcgacatccggggactccacatcggccgcctctgctcctccccttccccagcctccgcctcgtccaaggcagggttcaccttcacggtggggtaccacgagctcgccggcacaaaggtgacgctcaagaagcccctgctggtgctcaggaagaagaaggttaatgctggtgctcaggaagaagagccaccgacggcggcggaggtggagctggaggtgatcggcatcatccggcacaagatcctattcaaggaccgccccaaggccctcatctcaaagccgccaaccaaggagaagaaggccgtgcagccagcagcaaagtgacgcgacgccagcaactccgtgccccttgagaatctgaagctctcttggatcggagccaaccggagccttcgtcaattgcaacttcgttggagccttcgatgaagcaactagtattgactgaggcgaagactggtgcctaggcgagagcccgggcgcaagccaaacatcgaggtcgaggactccgtccaccccaacttttcgagggtccctcggcacaggctacgatcctgcaaggagcgaggggtcccaatgtgcgaaggctacgtgacaacaaaggctttaggaaagaagacatgtctgagttaccaagccactatgggggctacccggagagcccatgtgtaagtgtaaccatagggtaaaattgtgagtgcatgtgtccactaggcacgacggtgttgtaattactcgctacatagaatattgtaggaatgtagttggtaaccgggggtacggatgcactttaggccacctaccctagattgccctatcttattgctggacaggacacgtataatgagacgctacagttctct

SEQ ID NO: 39636 - DNA, 2158 bp, Zea Mays
agtgcccaattcgtacctttaaaggcagcaacacacttaaatcggaataacccgtcagtccctcggatctagtccgataaagccacttaccaaggatcgaatatcactagctcactcgaaggagaggcacaaagaaatacaataaagcataatatcacaaatttaagaagtatcagtagcgattacattatcgaagtttcaaaagcagtaacaatagtttttagtgcagcggaaataactaatggagaaaactgagtaacattgcgaagcctggccacactacacctcttggccaagtcacaccatcaatcaaaacaaggaggtacctacaaaaattatgccacaagcaaggctgagtacactaatactcggctagacttatccagtgtgaggagtctactcctctacctctagaccatgaagttgtttggctgaggggtttggtttgccaaacgcactagctgagtctaaaatcaaattttagcttttcaggttctagaataataatttagactagatgagtacctagctatcccttcatggtagcaagcaatttagtcaaccaacatctttttgaaagtaacctcatttgcacttattactcaatgcagtacaatggatcaagcagtctcattagctacgagaagcagacgattcgaatcgagttttaaccttgcaaggtaaacctaaacacacgacatgtaggggcactgcgtccccacacatgtcaaccgtccccatcgattccctggcaacagaacagggctcacggccttggcgtacaatgctccaattgtccccggctgctgctgtgcaacgaccgcacttgtacccaccataatccgacatgggagactccgtctcaggtccaatgaggagtaaagtctgcgggcagattcaatcaggtactaggcttatcagttaccatatttcccaacatgtgtttagtacgttcaaacacttgacataggtatctgcacgttaatccttattccaatttcgtctcatagacaacgcatccccatggatccgtgtccacagaccatcatcattctgttataaaaaatggatacaaccaattcctaacctcgtgcgagtgctagaaaaatcactcgacttctaccgagatcctgatttagcatagcagctactcgacctagcatactagtatccatctcaaaaggaatcctaagttcatgcaaatagggtttcaaacaactcctacacttaagtgcacggtacaagcctacaaactttaagtgtagtaaaatagcatatataaacggttatgcataaaattggggcttgcttggaattcaacactagatagtgtttgctagatgacactcgcttggcgagcatcccctggttaagtccatccttctttaggttgtccaccaactgcatcttgttgttggcaccacatcacttgcacgatcatcatctctcggtcctaaatgagatgcaagttgcatatgtatgaatataaggaaaaatatcacaagatatacaagacacactgtagcaagctagatataaggcgcaagacacggaaccgccaacgatcatacgtaggtgctaattagccatacgttatcgacctacgaatttaacactactaagaaaccgacaaacactatcatatacatagccaccacaaacacgacatcacgagtacaagcatttatttaattggatacaacttttcattagttcttctgttgatcgtacaaaagcatcccagacaacacagttcaatagaggacataggcatcagcgtctatggaactcctatatcacaatcaactagagaaagtgtggcagaacctcccaagttattgggcccacatgcacctgtccttgtctcaaagacctcagacggctatgcatgtgcaccagataacttaacaggatctgtccgagtgtcccagggaccccggataaaccactcacaaccagaaccgcgggattaagtaatacaaatcacacacaccaatattttgcagcggaaatcttattaccaaattttacaagttacaaaaattttacttcgtacatgatcagagtgattactacattgattcaaagaaagaaactttgaacggttataaatttgtcggcgtttcgagacaggggggtccctaagccgacgagtgag

SEQ ID NO: 39637 - DNA, 3024 bp, Zea Mays
gaggaaaagcaaagccaaaggcactccactccactccaccctatgcactgccgcccctgcccgtcccagctctcgctcgtctttctcctcctcctctcgctcgcacccatcatttcggcactccccttcccggagccagctcttccgatggcgtgcagcggcctccgcctctcgctccccgccgccgtcctcgccctcctcctcctcccctccgcgctcgcttccgagcccctcaaccccgaaggcgttgatcgccatcaggcaggggctggtcgacccgcacggcgtgctcaggagctgggaccaggactcggtcgacccctgcagctgggccatgatcacctgctccccgcagaacctcgtcatcggcctgggagtgccgagccagggcttgtcggggactctgtccgggaggatcgccaacctcacccacctcgagcaagtgctgctgcagaacaacaacatcacggggcggctgccgccggagctgggcgcgctgccgaggctgcagacgctggacctctccaacaaccgcttctccggccgcgtgcccaacacgctgggccgcatcaccaccctccgatacctgaggctgaacaacaacagcttgtccgggccgttccccgcgtcgctggccaagatcccgcagctctccttcctggacctgtccttcaacaacctcactggccccgtcccgctcttcccgacacggaccttcaacgtcgtgggcaacccgatgatatgtgggagcaacgccggcgcaggggagtgcgccgccgcgctgccgccggtcaccgtacccttcccgctggaatccactccgggcggcagcagtgagcactcttccttcctgcctctatgtctatcattcatatctacggccagtcaggcaggccagctcgcgcgcctagcagctagtcgcgctcaatgcttttcggccctttctcggagtgcgtggcgtggcgtgcatgcatgcgtcgctgctgccgctgcttttgtgcccttgcctcgccggggtagcggtcgaggggacacggtgctgtcggcatgggggcgccgtcgctctcgcttgcggccgggaatacctgtagtaggctgtatgcctgtatgtagcgctggtggcgcggtctggcctgaaccgtgcatctgctgctgctcgcgcctggggatcagcgtttggcttttgtgtgtgtgtgcgcgcgcagggacagggacaggggcggcggcagcgggcaggtcaaaggctgctggcgcgcggctgccgatcggcgtagggacaagcctgggcgcctcctcccttgtgctcttcgccgtgtcctgcttcctctggcggcgaaagcgccggcacacgggggggcggccctcctccgttctcggcatcatccacgagcggggcggctgcgacctggaggacggcggcggcggtggcgtggtggcggcggcggcgcggctggggaacgtgcgccagttcgggctgcgggagctgcaggcggccacggacgggttcagcgccaagaacatcctgggcaagggcgggttcgggaacgtgtaccgcggccgcctcgccgacggcaccacggtggccgtgaagcggctcaaggaccccagcgcgtcgggcgaggcccagttccgcacggaggtggagatgatcagcctcgccgtgcaccgccacctgctgcgcctggtcggcttctgcgccgcctcgggcgagcgcctcctcgtctacccctacatgcccaacggcagcgtcgcgtcgcggctgcgagggaagccggcgctggactgggcgacgcggaagcggatcgcggtgggcgccgcgcgcgggctgctgtacctgcacgagcagtgcgaccccaagatcatccaccgcgacgtcaaggccgccaacgtgctgctggacgagcaccacgaggccgtcgtgggcgacctgggcctggccaagctgctggaccacggcgactcgcacgtcaccacggcggtgcgcggcaccgtgggccacatcgcgcccgagtacctctccacggggcagtcgtcggagaagacggacgtcttcggcttcgggatcctgctgctggagctcgtcacgggccagcgcgcgctccagctcggcaaggcctccggcgccctgcacagccagaagggcgtcatgctggactgggtgaggaaggtgcatcaagagaagatgcttgacctgctggtggaccaggacctgggcccacactacgacaggatcgaggtggccgagatggtgcaggtggcgctcctctgcacgcagttccagccgtcgcaccggcccaagatgtccgaggtggtccggatgctggagggagacggcctggccgagaaatgggaggccacgaaccggccgggcgtggccgcgggggcgccgtgccacgacgcgctcggctacgaccaccgcaacgactccaacggctccgtcttcttcaacgacttccacgacaacgacagcagcctcagcagcgacgaagcgcggtcgatcgacatggtggaggagatggagctgtccggaccaaggtagcaagcaagcagcccttgccgctgggcgggaagagccactcccttgatatgatagcatcaaattcaaaattcagatgttccgagagcttcaaaaaaaattacaggtagagagagagaggtgtcgagttaagagttgttgcgagtcagtttggaattaaaggtattcctaggtgctttagggtctagagttcagaccacagttgtgtagtttctggtggagccgtccttttccctttgaaaaaaagatgtaaagaaaaaggatggcttctcttttgcttcttttcacaggtttctttttcttttgctgctgctgctgctctccctgctgatccagtgacacaagcacatgcagcactgcagtcctttggtattccggtccactgatctagggtaaccttttgcagcgcaaggatgtatgtagggaatgtgttgcaagtagcgaggcatgcagtcattttgactgcttttgtgacctgtaaaggtcac

SEQ ID NO: 39638 - DNA, 1334 bp, Zea Mays
gtctcttttgttctacacatggaagagtaacttggggtaaaatttctatggttgatgctgagaggaggttgatggcaaatgctctacaagatattgacaatcagcattttgttttgctatctgatagctgtgtacctttgcacagttttgattatgtatatgactacctgatgggtgcaaatctcagttttattgactgcttttatgatcctggaccacatggaaattttagatattcacaaaatatgttgcctgaggtcacagagactgattttagaaagggttcacagtggttctcagtcaaacgccaacatgcgttgatgattattgcagatagtctttactatactaagttcaagcttcattgcaggcctgggatggaagatggtcgcaactgctacgctgacgaacattatttgccaacagtattccgtatgatggacccagatggaattgctaattggtctgtaacccatgttgactggtctgaagggaagtggcatccaaaagcttaccgggcaaagcacgttaatttggagcttctgaagaatatagcatcaatcgacgtgagccaccatgtcactagtgatggcaagaaagtggtcacagagaacccctgcctatggaatggagcaaagaggccatgctacctgtttgcgaggaagttctaccctgaatccataaacaatctcttgaccttgttcgcgaattacacacttatttgagcttctaggtgacgcttagaggctacagggaatattttgttatagaaatccttgtacattggttaggaacataataggagattaattaacaggatagcagttggtgaggagaaggctttcggctttcgctgcagcaacacagtggcttcggatataccacaactggtcattgctactcctttagcctcgtgttgctttcatagtttcttctacccacatttttagctgcggcgttttaccatgtacatcaagctttgtttttacaaggaatggtcattcaataggaaaatctgagatcatggtcttgtatttgccctcaagttctcggttctgactgccaaagcacggttcaaagggatacatggaaaattttactttataggaaacaaatcctacgagttcctgcacgagtcctttgctgcgaagagatccaagactgaccacacgatgcttcaagtagatgatagagaagcgtcatgagctgcctggtctcgatgttcaggtcccactgccccagcccttccactgtcttcccagcacactgctatttggtttatttaggaccagcttggaaactcaaatccttctggaattcgaaattggagattg

SEQ ID NO: 39639 - DNA, 2084 bp, Zea Mays
attttggcccatttaggcgccatgcccagcccaatccaagaaacaacggaacgaggttggatgatgacgtggttttctcctttttccccaccaaaagaaatttgaaatccagtcagtccaggtttccccagcccctccgcttctccaatgtctaccgccgtccacgctgcagccatggcggaggacgccgccgccgatctgcgccggaggatgaaggacaagcgagccgccatcgagcgccggatcaccgactcccgggaccgcgccgccgccgcctcctccgccttcagcgccgccctcctcgaggcgcgctccatcgccaaccagaccgtctccaaccgaggcatatcaaactcttggccccctacttctactactcgcctcttttttcccccttcggctttggcttcgccctcctctccaatctttggtttagttagcataatggatcagccaggtccggtagggttagtgtttccgtgggaagccagcatccaatccaccaccgaggctcctaaaactagtcaaccaggcagctcgattctgcctggcacagccccgcctactatgttggccttgtgctgagatctcactcagtggcagatccaagtaggcaagtaatcaagcacctgcctagtactagtactcatttcttgataaaggtgttctctcgaggtggccgtcgctcaattcatctaccactcatcaatttggcaaacagctttggccgttgccttttagtacaacatttgccattagcatcttatctatatgcttgtttaagctcattattatttgcaaaattactttactcatctctctctctctctctctctctctctgtgtgtgtgtgtgtgtgttttggattggcagcaaaactcagcgaacaaaaacaacacctcaggaaattagaatcagatctagcacaggccctctccgtccaagcaagcagaaggtcaaaacacaagttcatgactgagtcgatttcaaacaccactgcaacaaatgaacatcttagacacttggctatggaccgtaggtctacaagagatgaatgcatgaatgccatatcaaatcaactaaaagatattgaatcccttgaagctgaaagtgacgcacatggagataagagcctagagacggctcttatgtggtatgataagtttcttggttttcaagttgttggaggagaaggggtgaaatttgtgttcaacaaaattgatgtgcaaaatcctgacaagaagtattctttttgcataaaacttgctggagaaagatacatcttagtctggtgtgttccatctgtggacgatgctgaagaattggtgaaggatcttaactgcagcaatgatctgtacaaatttgtgagggccatgagagagatgttccaggctgctacaatcagtggtattttatgctacatattctcgttacgtgttttgtcttcaatcatgacataggttccaagctcaggactattgggcatggtttgcggtagttttttttaagtcttttgaacttagttagttatttggtggtttgtaaatgtagcaaccaactcgtcgttattatttatttggagttatggtttgcgttttttttttgtgtgtgtgtgtgtgcaggaaatctgttgccaagctccttttgccccgacgtttcatccataacatcttcatcgttctcagcgttatcactggattccagaagtgaaaaatagcattaatcagagtcataccatgacattgacttagcaatgggctgcggatatctgtacagtacaagttgaagcacttctgaagccctcttctgttacacacgctagcagtgttgtataatgcttgtctgctgcttgcattttgactccaaactcgcagttttgctgtttgtaactttgtactattacctatcattcttaataatcatggtaatgtttgagccttttaggtgctcgatcccactgattttgatcaacgcattattttgtttttgtttctttattagccacccatcaaaattctcactgcgctttgcttaccaagaacattaattttcatggtttgacgtcttgtgaacagaaattagca

SEQ ID NO: 39640 - DNA, 1002 bp, Zea Mays
gcggcttgctctgtcgacgcacggcacggtcaatttaaagcaacctgtccggcgtgggccgtgtcccggacgagcatcgtgcgcgccgcgccgtgtcggggacgacgacgtcgcacgcatatatgcgcgcaccttggccatgcgtcggaggatccgattcgagcatggcatggcatgagatccgacggtccaacacgcgtgcaatcagtcaccgtaagtgtaaccacaccacggagattgatcgatcgagcggattgctccacagtctattcatcgtcgatcctttcatgtcgtgcatcttggcggccgggggagagctaggcactctcagtcttaggtggcgagccggccggtcgacgacgacctttccgtgcgtggccgcacgcaacagtgacaccagcatgcgcgttcgttgtccacggcgccgcgcgctgacgccgactcgctggtaccgccccctaccgacgggtcgctgcgctggccatggcccgtcgcccattggggcatgggcgtgggcgtggccgtggcgctgtcgccccgcgagcacgccgccctgtaaggggacaacgtcgttagcgcacgtccgcgcgagcgccatccagcggatcggaggaggcgcccgtcgcggccccgcggggcatggcgtgtcgtcgagatgtcccaggccgtcggcacggcgccattactgcgttgctctcccgatccaggcatgctccggcggtcccggccgatacggacggctccagccacgccgcccggccccgcgcggccgacggccagcggatccgacgcgctggctgcagctaggtcgatcacgtacgcgcgtgcgtacacggtacaataagatgtacgtgcaggacctgtctggccgtctcgatctcaggcaagtcgtcgttgggccagggaggaagacagtgcggcagctgccggtacgcgcgcctgcagacatggggctggggggggggggggggggcatgatatgaacgccccgtagcgtacagg

SEQ ID NO: 39641 - DNA, 1816 bp, Zea Mays
cagcatcgccatgcccccgtcgccccacccccgcgcgcgtcttcctccggcatgcgccagcccccccgagctcgcccgcgcaccaatctcgccgtcgggtatcccgcccgcgagcccgcgcaccaagctccttccccgcgacaagctccctcccccgcgacgcgtcttcctcctcgccctagatcgccgccccagctctctcctcaccccgcaatccccgccgcccatgctccgctctctactcgccccagatcgtcgcccctgttcgcgtggattgggtaccggtcccaactatctccatggattgcgcgtccgcgacaacccaatctcctcccggtctccatggaaggcgcgtcctccccccgtgattctcgattccccgcgtccgcgccccagatccactctcctctctcccacaatccccacggactctgccccgtatcaccaccccggctccttagaacgtgatccactctcctctctcctgcaatccccgctacctcaacccagatcgccgccctcgctctcgatcctcgcccacgctctccatggaaggcgaggccgcgatgctcgcgtggatctatgtagaggctgcgacgctctcccaggaagactactgccagtgctccgtgctccatgcgccgcgctggaacgccaccgtgcggtccatgtcctcgtagtatcgcccagactcgcccatgtagtcccacctgcatccaccgaccaccaagcacactctcactgcagaccagagaggattgccacgaataggtgtgtgcagttctactctacccctgcatcgagccggtgtgcgtccaccagaggccggagttgaaggagagcacgtcggcgtcgcgccatgactcggcgttctcgtagatgtcgtccagcatcagcacctgcttcccctggaccacgtcgatgtccaccagaaggaaattcctgcttgagccaattacagaaggccctgatatttgtcaaattgatggttgtagtgttaaattggaatacaagaggaggcaagtcaaatatggtaccaaacggcgcagcagcagttgatgtgcaacccgagtgtactgccgctcgaggaggccagtaagtgccaacaacatgaatagccaaagcagggaaatagggctggcgggggcacatgggtaacttggtcctggagcattggagaaggagcataccacaaggaaaccaacacgcttcttactctagcagagttccttgcttcctgaaggcctcatagctcagattactgggttaacgaacaactcatactttgatggagcacatgaggttcgacattatgtcaggaagcattcgaatcttggtcgtattgtgcttgaagttgctaaggactcgcaaatcccccgccaagcaaactgctagaaatcttttcagaggtggagatgatgaagatgatagtgctgatgccgacacaaatgatcctgttgtaccttggtcattaggtagagtaggagttgggcatatggtgtacatctccggtttgacttgtgccttgagttcaacaaatatgaaagtgctgagagaggtggcatctagaggacgtcatgtcgaacgtgtgaagaatttttttagaaatatgtatatttgtgcgaaactttttagaaacttgactccattttattttctatgttactctcggctttgtttcctatcctttccaatgacttgctatgcatttgcactgtatttggcatgtttaaaactgctacacaaaacttgctatatattttgtccaaaaatactatatccttgttatgattgattgatctttattttgtctgct

SEQ ID NO: 39642 - DNA, 4933 bp, Zea Mays
cagagagagctaggcaaaagccgaaagcctcgccacctaccaaaggcaggccgcaggcacatatatacagagcaactccggccgacaatccaacaagcaaaggagattagattagttttggttgctttgttctagctataggaagaagaagaagaagtacgcagctagttagctactaccggccggccggcccgccggccagacccaccaagaactgaacatggaccgggagatccaccgggtgacgagcctccggcgcgacagctcgctatggcgtcgcggggacgacgtgttctcgcggcagtcgtcgcggttccaggacgacgaggaggacgacgacgaggcgctgcggtgggcggcgctggagcgcctccccacgtacgaccgggtgcggcgcggcatcctggcgctgcacgagggcggcggcggcgagaaagtggaggtggacgtggggcgcctgggcgcccgcgagtcccgcgccctcgtcgagcgcctcgtgcgcgccgccgacgacgaccacgagcgcttcctgctcaagctcagggagcgcatggaccgcgtcggcatcgactaccccaccatcgaggtgcgctacgagagcctccacgtcgaggcgcaggtgcacgtcggcgaccggggcctccccacgctcgtcaactccgtcaccaacaccgtcgagtccatcgggaacgcgctccacatcttgcccagcaggaagcggccgatgaccgtcctgcatgacgtaagcgggatcgtcaagccccggaggatgactctgctgctcggacctcccggctcggggaagaccaccttgctcctggcgctggcggggaagctcgacaaggacctcagggtctcggggaaggttacctacaacgggcacgggatgaacgagttcgtcccggagaggacagcggcctacatcagccagcacgacctccacatcggggagatgactgtgagggagaccttggccttctcggcgcggtgccaaggtgttggcaccagatacgaaatgctcactgagttggcgagaagggagaaggcagccaacatcaagccagatcatgacattgatgtctatatgaaggcctcagctatgggtgggcaagaatccagtattgttacggactacacactgaagatattaggcttggaggtctgtgctgatacgctggtaggaaatgagatgatgaggggtatttctggtggtcaacgaaagcgtgtcacaacaggtgaaatgcttgttggtccggcaagagctctgttcatggatgagatatccactggactggacagctcaaccacataccagattgtgaattcccttaggcagactatccacatccttggtggaactgcagtcatttccttgctccagccagcgcctgaaacatacaacttgttcgatgacattatactcctatctgatgggcatgttgtataccagggcccccgtgaacatgtgctcgagttctttgagttcatgggcttcagatgccctgccagaaagggtgttgctgacttcttgcaggaagtgacatcaaggaaagaccaggggcagtattggtatcggcaggacaggccataccgctttgtgcctgtgaagaaatttgcagatgcattcagtatattccacgtgggccggtccacacaaaatgaactttcagagccatttgataggacccggagccaccctgctgccctagcaacttcaaagttcggtgccagcaggatggagttgctcaaagccactattgatagggagcttctactcatgaagaggaacgcatttatgtacattttcaaagctgttaaccttactgttatgtcgtttatcgtgatgaccacatttttccgtaccaatatgaaacgagacgcatcttatggaaacatctacatgggggcactcttctttgctctcgacacaatcatgttcaatggttttgctgagcttgccatgactgtcatgaagctgccggttttcttcaagcagagggatcttttcttcttccctgcatgggcctacaccataccttcatggattgttcagatccctatcacatttttggaagtcggggtttatgttttcaccacatactatgtcattggatttgatcccaatgtgttcaggttcttgaagcaatatctgctgctccttgcactcaatcagatgtcatctgcccttttccgcttcattgctggaattggaagagacatggttgtgtctcatacctttggccccttagcactgttggcttttcaagcactgggtggctttatacttgcaagacctgatgtgaagaaatggtggatttggggttactggatctctcctctatcgtatgcacagaatgccatttcaacaaatgaatttttggggcacagttggagcaaaattcaaaatggaacaaccgtgggaattggggttcttcaaagtcgtggtgtctttactgaagctaagtggtattggattgggctcggtgtcttggttggatatgctctcctcttcaacctgctctacactgtagctcttgcagttttgagtccattcactgattcccacggatcaatgtctgaagaggaattgaaagaaaagcatgccaatttaactggtgaagtcatagaggtccgcaaggaaaagacatctaggaggcaggaattggagctgtcccacagtgttggccaaaactctgtgcatagcagtgaggattctagtcagaacaggaagggaatggcactcccatttccaccactatcacttacttttaacgacataagatactcggtggacatgccagaggcgatgaaagcgcaaggagtgacagaagatcgtttgcttcttttgaagggcgttagtggttcttttaggccaggagttctaactgcattgatgggtgttagtggtgctggaaagaccacccttatggatgtcttagctggcagaaaaactgggggatatatcgagggagatattaccatctcaggatatccaaagaagcaagagacgtttgcacgcatatcaggatactgtgagcaaaatgatattcattctccacatgtaacagtgtatgagtcactcctattttctgcatggctacgccttccttcaggcatcaacttagaaacaagaaagatgttcattgaggaggtcatggatcttgtagagctcacatcactgaggggtgcacttgttgggcttcctggagtgagtggcctgtcaactgagcaacgcaagaggctaactattgctgttgagcttgttgccaatccttcgatcattttcatggatgagcctacctccggtcttgatgctcgtgcagctgcaattgtgatgaggactgttaggaacactgtcaatactggaaggactgttgtttgcaccattcaccagccaagcattgacatatttgaagcatttgatgagcttttcttaatgaagagaggtggagaagagatatatgttggtccagtgggccagaattcatcaaaattgattgagtactttgagggaattgaaggtattagccagataaaggatgggtataacccagccacgtggatgttggaagtgagctctagttctcaggaagagatccttggggttgatttcagtgaaatctacaggcaatcagaattataccaaaggaacaaggcactcatagaggagctgagcaccccacctcctggctctagtgacctcaatttccctacacagtactccagatcgttctttactcagtgcctagcctgcttctggaagcagaaaaagtcgtattggaggaacccaacctacacagcagtgaggctactgttcactgtagtcattgcgctcatgtttgggaccatgttctgggaccttggacgaaaaactaataaacagcaggatctgttcaatgccatgggatcaatgtatgccgcagttgtatacatcggaatgcagaactctggctctgttcaaccagtggtggtggtggagcgaacagtcttctaccgagaacgagcagcgggcatgtattcagctttcccgtatgcatttggacaggtcgcaattgaaattccttatatctttgtacagactttgctatatggagtgctagtctattcaatgattgggtttgagtggactgttgccaagttcctctggtacctgttcttcatgtacttcacactgctttacttcacgttctacggaatgatggcggttggcttgactcccaacgaaaccatagccgtcattacctcatcggcgttctacaacgtgtggaacctcttctcaggatatctgatcccccgacctaaactgcctgtctggtggaggtggtacagctggatctgcccagtcgcatggacactctacggattggttgcctcccagttcggcgacatcgcgcatccgctggaggactcaccgacaggccagacggtggcgcagttcatcacggattacttcggcttccatcacgacttcctgtgggttgtcgcaggggtgcacgtcgggctgaccgtgctcttcgcgttcctgttcagttttgccatcatgaagttcaacttccagaatagatgaggacaggaggcccaggccattggcaatttttgcattcgtttgttggctgtgggtgggtgggtggacaagcatacctgctgtgcgtgtagcatctacggcccatcgattaggctgagcaagctaccatagtaccatgtaacggtgtatagagtttattttgtatttcaagcttatagaattagaaacactagaagttgtaggcgaacaaaagccttgacaagagttgagcctcctgctgccatggccagctgtagctttatacctgtcagaggcacggagcgcttctcagagaatgtaaaccgtatactggcattctaatgaatcagtgggagcagaattttgaccaagtacctctgcagatgtctt

SEQ ID NO: 39643 - DNA, 203 bp, Zea Mays
tgtaatttcaaacttaaattcatgtgaatctcattcttgcacatgtgcacatttagataatatatcaccatgtgctaacccctgttgctcaaaagaaagcaaatttttgaatgagcatcaagctgcaggatcaaaagaaaggaacaagaaagcaaaacaactaaggagaagacgcattgctcaacctcctcaagatatccacg

SEQ ID NO: 39644 - DNA, 1463 bp, Zea Mays
cagaaatccaatgtgtaccctatcaggtgccccgaggagactattggaagttcagaactggctgctatttacatctgaactgatacatgctactgtatctcatggctctggtgctattgctgagcgaatgccgctcattcaaattcttgtccctcatattatgggtctgaaagagcagctcaaagatccatctaaggatgaagaagatgtaaaagctattgctcgtttatatgcagacatgggtgaatcctatgttgacttgattgccacaggttcagatgattcaattcaaatagtgaacgcattgctagaagttacttcacttctggaatttgatatttcgtctatgacatttaatttctggcaccgtcttaagcgtaacctgatcaagagggactcttatgtatcatatggatcagaggtggcaatcgaagctgagaaaaacagaagattacaagtatttcgtccaaagtttgaaactctggtctctctggtcagttttcgagttgaataccctgaggactatcacaccttttccgaggaagaccgcagggattttagacatgttagatatgctgttagtgatgtgctacttgatgcaactgaagttcttgggggtgactcgacgctaaagctactttccaccaagctagctcaggcatatgggagctgcaacaatgagcagaaccccaagtggcaacctgtagaggctgctctgttctgtatacaagcaattgcgagatcagtctcaattgaggagagggaaattttaccacaggttatgtcactgcttccctgccttcctcaccatgagcagttgctacaaacagtttgttcaaccattggagcattttcaaaatggattgatgctgcaccagctgaattatctattctaccacctttagttgatattctcaataagggtatgagtacatcggaggatacagctgcggctgcttctatggcctttaagtacatatgtgaaggagaaagttctcagggtccctggatggcctcttccagatataccatattgcaatcagtggagttggtggttataaagtttcttcagaggactcgttgcatttggttgaagccctaagtgcggttattacaacgcttccaccagaatctgctagtagagccctggagctaatctgccagccagtaatcaatcccttgcaagaattaatccagcaaggtgatcaagttcttcaacaagtccctgctcggcatttaactgtacatatagaccgactatcaagcattttcagcaatgtgaaacaaccagaagtagttgctgaagctgtatatagatattggccgacactcaagagtatctttgatcaacgagcatgggatacccgtaccatggagtcaatatgccgatcttgcaaatttgctgatctggccaccaggacccccttcgcctgctgtgatagctcggggcccctctacatgca

SEQ ID NO: 39645 - DNA, 2821 bp, Zea Mays
gcccgtcactctcgtcctctcccctcttgctgtgtcgccgcgcgtggaagacgttatcgccttcgccttcctcttcctttccctctccctgaatcctgatttctattcaccttcttcccctcctccgggcggaaggcaaagacctacacgcctatccctctccctcccgggtcccggcttccccttccctgctccccagatcgattcacccagcgggaaaagcggcgcgcagtggggtgcagcaggcgcagcgggctcggcgggcggcgagcggctagcggctagccgcgacgggcggccaatctacagcggaaggcggtgggcggctaccggtggcacatcgacctacggaaagtagaaaggtggggaggactgccctgttcgcatttggagcatcaaaacagggttgcaatctagcacatattacacatcagtggctgataagaaactgcatccagtggatgtaaatttcattggatttgagttttggttgagatggcagttggattgacatctcagctgttccaaagagtaactgctactgacatcttttgccaaaggaacaaatttaggagttctgagatgaggagttctcttcccttgccatccacctcgtttccttcagttgctgatgtcatgtgatgctttacttgcaaatcctgctacctcacttgtggtccctgcaatcgggattattgtgtttgctctgtggggttttttgcctctaatgcgggatattagaaaccgttttgatcatggaggcaactggaagaagagtcctacatatttgatttcttcgtcgtaccttcaacctctacttctctggacaggagcaacactaatctgcaggggtttggatccagttgtcttgccttcagcagcaagtcaagctgtgaaaacacgtctgataacttttgtgagatcattatcaactgtcctggctgttgcatatattctcacaagcttgattcagcaggtacaaaagtttcttatggacatgcgcaatcccaatgatacaagaaatatggggtttgattttaccatgaaagctctttatactggtgtttggattgcttctgtttctctctttatggagttgctgggtttcaatacccagaagtggataactgctggagggtttgggacagtgttgcttacacttgctggtcgagagatttttactaacttcctctcaagtgtcatgatcaatgcaacacgcccatttgtagtcaatgaatggatcgatgcaaagatagatggtgttgatgtctctggcattgttgagcatgttggtttgtggtctccaacactcattagaggtgttgatcgagaagcgatatacattcctaaccataagtttacagtttctatattaaggaataacactcagaggacccattggcgtattaagacctatcttgctattagccacatggatgctggaaaaattgggactatagttgctgacatgaggaaagttttggcaaaaaatccgcatatagaacaacaaaagctgcacaggagagtattctttgagaaaattgatccaaaaaatcaagcacttatgattttcatatcctgctttgtaaagacatcacattttgaggagtatctcaatgtccaggaagctgttatgttggaccttcttagaatagttgggcatcacaaagcaaggcttgctacccaaattcgaacagttcagaaatcatatggcaatgcagacttcgataacattccttttggagaggacatgtatagtcgagtccgtggccggccacttctgattgatacatctgcaaggatcagtgatgacaaacccaggcctcgacctgtatcatcacgtgaggagcagaaagtcaagacaaatggctcggtagatattaagtccagttcccctgaaaatgctagttcaagcaactctgaaaagcaggaaccgaaaaaaatggtgcctgaagatactcgggtgaagaacattaagggtgataatgtgatgccagtaacaccatctttagatcctgctacgtcaacttccaaggctggtaaagggaagacacgggaaccagagcccactgagcggcaaggagatgggtcagtctcggtggctaatccaaagaaagaatctagaccagtttttgaagataacattgttctgggcgtagcccttgagggttccaggaggacactgcctattgaagaaggaaatcctcatctatcactatctgagactgaggtggacaccgaagaggcggcttcatcaccgaaggataagataggccaaagcccaaaactttgaggtccagaaaaaaagccgttcagaggaatctcgataggtcatccgagttcaaactgtatccttgtgaagatttgtcaccaagcctaccttttttgtgcgcttgtgcaaatacaatgccaccacacatcagtgttgtatgcttaaggggtaaattcacactgacgattattcagggaacattacctgtcagtcgtattgctacaggcttgtaaagaagcaagtgcttcaataggcattttgtaaagattatattattgctcatttaagtggcttcttgcatatgcatcggcaattcagcatgcgccgttgcaactgtcatctcggtttccaggtttggcttacgttagttttgtttccaatgccatctgctgcgagctgaaatatcatcgtctcttttcctttttttttttttacaaaagacacgctaagtcgtggagacggtgaattcttccggatggcgtctcatcttgcagacgactaaaacggaataccgcgattatcgaaaaggaaacggaataccgcgcggcg

SEQ ID NO: 39646 - DNA, 1961 bp, Zea Mays
cccccggacccccgtttccttccgatccccatccgccatcccccgttcccgttcttctccttccgtccgaccgtccctcgacactgccgaggccgaacctagcagccgcccacccgacgcccaatccgccggtgcaatcgcaatctccgagggttaatcgactaccggcggctacggcgccgccagtctcctggcttaggctgccaggggatgcgaggagccagcgcagcgcggccgccggccagccgcccccgccccactgcctataccgccagctacagtcggaaacggctgcaaggcagtcggaagagggaagccgcagccgggcactgactccgatccccactctagccaaccccacgcggaccggtccacctcggacgaccacgacgccatctcgcacgcgtgcttccacccaaccacacaaatcttctctcccaggcctaaccttcctccccgcgagctgcctctactgattttgcactggcatgccgtgacgcggaaagatgtggagatccatcttggactgatttcttccttactcggttgaagataccttggtagtcagagcatagaataagggtggactgttattaattttccataggatggaatccttgtggaagctgacctacttgctcgagccggcatcacttgctctcattgccacagctatctctgtggcctatgcatccgcatcgcgtgctctagattatggcaaagagatggagagaaacttggatttttcagaggcttccattacattggatcggtcacaggcactaatgattccccttgcaagctcatgcagtctgttgctgatgttctacttgttctcgtctgtctcacatcttgtgactgcttttactgctgtggcctctgcgatggcactgttcttttgcctgtctccgtatgtcacttatctcaagatgcagttcaatctaatggacccattcgtgtccaggtgttgttcaaagtcttttacacggttgcaaggtttgctgatgctcttctgcatagccacagtcttagcctggttggtttctgggcattggttgctaaataacctactgggaatttccatatgtatagcgtttgtcagccatgtgaggcttcccaacataaaaatctgtgcgctgcttcttgcctgcttgtttgtgtatgatattttctgggtgttcttctcagaaaggttctttggagcaaatgtcatggtttctgttgccacccagaaggcatctaatcctgttcacacagtagcaaataagctcagcctgcccggattgcaattgattacaaagaagctggagcttccagtcaagcttgtatttccaaggaatttgttgggtgggattgttccaggaagcaatcctggtgactacatgatgcttggccttggagacatggccattccagggatgcttctagctctggtactcttttttgataatcggaagttcaaggatgtgaattttccaccagatgtgtctcccccaaaacggcggaattatgtgtggtatgctgtaacaggttatggtattggcttggtagctgcactagctgctgggatcttgtctcagtctcctcaaccagccttactgtacctggtaagtgttgccaggttatacggtcaggtgccatcgacactgggacctgtcatgtacttgtcatggttacggaatgagctatgggagctatgggaagggtctgggacgattctgaacgagaaagctcatttgttggaggtctgagatccaagtggacaataagaaggatctgaacccaccgtgattgaatctaattaaacaatacttgacctcctcataccgaaggagagtatttataagctagaatgttcagtcatgtaagccatcacctagtttcgctcgcaagaggaaacacttacaaatcatgtaactgtttgtaatagaaaagttcaatgcatttcagctttttaacca

SEQ ID NO: 39647 - DNA, 2626 bp, Zea Mays
tatatcgaagaacttttaacggcctttattgatttccgtcaaacggttttagtcttttaacaactcacggtacacaacagtttttttacagctcacaacccacaacagttttttcacagccacgacccaactaaatagacccttactcaccatttgcctgctccagtcttagccgtccaaaaagtatcagatgaggtgttttagcacagaagtggagcgacctagttttacaaacgcaacaacacgactcactttagagagcggtaatgttgagggagacaaatctctctccaccatcgcaccgcgccgtcctcgccctcgccgctgcgcccctcccgcgtcttccgcctgctccggcggcgctctcgcctgcgccgcctgctatggggctgctcacgtcggcggagctcaactacctcgtcttccgctacctccaggagtcaggttttattcatgctgcatttactctaggttatgaagctgggatccataagtgtggcattgatggtaatgcagtcccacctggtgctcttatcactattgtgcagaaaggcctccaatacattgaactggaagcaagtagcgatgagaattatgatgaagttgagagggattttgcgcttttggagccacttgaaatcatcacaaaagatgttgaagagttgcaacagattgtgaaaaggaggaaaattgagagatctcaaactgaacttgagaaggataagggaaaagagaaagaacgtaacgaggagcatgaacgacgtccttgtggcgaaagggagagggaacaacatgaaaaagaaaaagagcaagtcagggacaaggacaaatctgaaaaagatagggaccatgataaagagaaggagaaagagagagaaaggcagcatgcagagcgtactgataaggttaaacacgaggatgattctcttgttggtgcaggtcccactccaatggatgtaagtacaactgttcaggagatatctaacactgatgttactgttttggaaggacacagttcagaggtttttgcttgtgcgtggagtccaactagttctcttctagcttctggccatatgctttggcacactaaacagttacatgccatcattactgaaaatgtgatcagtggtcagatctttgatacatttgaaaaccaaaagcgatgctcacatagatgctatccagcatccagggagggtgagtggatgagaggagtaatctgggttaggaatgtaggacgatcaggagactcaactgctagaatctggacaattccatatggtccatgtggttccgacatgcaaccatattctcctggtgttcatgttttgaaacattttaaaggtcggaccaatgaaaagagcaaggatgtcaccacgcttgactggaatggtgaaggtacactactcgctacgggctcctacgatggacaggcaagaatatggagtagagatggagacctgaagcagacactgttcaaacataagggacccatattttcattgaaatggaataagaaaggagattttctcctaagtggaagtgttgataaaactgctattgtttgggatacaaagacatgggaatgcaagcagcagtttgaatttcattcagctccaacactagatgttgattggagaaataataactcctttgcaacatgttcaaccgataacatgatctatgtttgcaagattggggaacagcgtccaattaaagcattcagtggtcatcagagtgaagttaatgctataaagtgggatccgactggttcttttttggcttcatgttctgatgattggacagcaaagatatggagtatgaaacaagacaaatgtatatttgatttcaaggagcataccaaggaaatatacactattcggtggagcccaacaggcccaggaacaaacaatcctaatcagcagttgcttttggctagcgcatcttttgattcaaccatcaagctttgggaagttgagcagggacgccttctgtacagcttgtccggtcataggcaaccagtgtattctgttgcatttagccctgacggcgagtacttagcgagtgggtccctggatcagtgcctacacatctggtctgtgaaagaaggcagggtcctgaagacctacagaggtactgggggcatattcgaagtgtgctggaacatagaaggcaccaagattgctgcctgtttctccaacaacaccgtctgcgtcatggatttccggatgtagcccaaccagtaggggtagcgacgtagtgcagatcaagcctaaaacaagtctggatcacaagcccttcccatggaaacgtgtgaagagagcggaattgttagcagaatgcagatcttaggtggtggtttttttttttgcccatgtacagttcttttttcctaggttatactgtagcgatgcgttagtagcatggaaatgttttggtggcaatcctcctaatttctgaatgcaatcttaccatatttaaactcttaagtattccatcgttttatatagtcgagaaatacaaatttccattattgacacttggaagagagttgtagagaaaaagaagtgtcgcacatggctagagcacactagctgagatgagacagtatataatactcctgaat

SEQ ID NO: 39648 - DNA, 220 bp, Zea Mays
cgcaaagtaagaacttcacatataataactgaatgtatagggataaatatcataaatatcataaatgtacttattatattacatagcgaaagtcttacaaaataaatgataataataaaacgaactaaatattatttttctggcgccacaaagcttactggtagacgccacctatatcaagtcgaacccctcgttatgtggctcctcttcgaccacctgc

SEQ ID NO: 39649 - DNA, 2840 bp, Zea Mays
tatatacataaccgctggcaggcaggctcatgcgattagcgcggcggcagggcaggcatggagaaggaggcggcggcggagctggagatccccggtgagtgccagtacgcgggggatccagtgttggtgcgaccgagccagccgacgccgcgccacaccctgcacctctccaacctcgacgaccagcggttcctccgtttctccatcaagtacctgtacgtgttcggcgccgacgccgccgtgcccgccgacgcgctgcgggcggcgctcggcagggtgctcgccgactactacccgctcgccggccggctccggccgagcgccgaggaggatgggaagctcgtcgtggactgcaatgccgagggcgccctcttcgccgagggccgcctcccgggcctcgccgccgccgacttcctcagcggcagcgaccggccgcacaagtcctggaggaagctgcactacagggtggaggcgcagagcttcgtcgccgtgccacctctcgtcgtccaggtgagtgagttagtgggggctctcctctcctccctctttcgcttacagtagtaattaatcgcctcttcatgcatgtaatctgtctgtttcttccaaattcttctcctagttaatcagaaacattttatttgttgccgactaaacagccaatcatcatttcccacccccttatgtaagtaaattaccacttgtttgaagtctaaatttttttgtggttacttttggtgcgccctgaggtggttccagtatagagctgatcgatgcaaaaggccacacatttaccagcaacatgtcatgcaactattcctgccgcgcgctggttactttttttcttgatcagtcgcttaggcttaaccttgccatgcttacatataaataactacgccgatctagtttatgttatcatgcactcatgaatgcttgtgctaggacgaagcttttgttccctgcagcgccgcagctttgggcaagagtgacggcctgagcctggcatttgcaattcttaaagttagcaaaaaggaggggatagcgttaggagagtccaaccccttgcttccaccctttctgaaaaaaaggcctttttaggcagacaagcatatggctaggctgtatctttgtccatccaaaatcttttttctccacttgggtgaagttcttatgataccctgcatgcatgcacgcacaatcttctctgatcccttcccccccccaaaaactatgctccaggaaaatcagatcagatcaggtgagaatatcatcatgtcccagtgcccctcaaaacaccatgtcgtcctgttcctgtccttgtcatacacgtactgatgtgcatagcacagtctactacagtgatggctggtaccagagactagaggtcgcaaatgcaattactgtgcactgcagtgcagttcaggtcacgtatagtcctgctgtaactcagcaggagcagagtacgccgatacttttgccaggacccccgaatccaaattcgattcagaattgatagcccctgctggcctgcttttaccttggtgacgaccttacttacacttggcgctgcatgcatgcattcatgtgggatgcaatgcaatgcgatgctgctccctgcactgcaccctgtagctttcaggaaagcgaccgacgcattatcttcctttttttattagtttagatttatatttaccaacaacgaattagcgatccagatcaatgtaaatttgttgtttacctattggtgcttaccccccaaaaaaacaaatcgaaattttgatgacggcatgacgtggcgcgtccactcgcgcctcaggtcacttggctcgcgtgcggcggcatggtcctctgcaccgccatcaaccactgcatctgcgacggcatcggcaccgcgcagttcctccacgcctgaggcccgagctgccgcggggctactacggcaacggcttcgtgctcgggtgcgccaggtccacggcggcccagctgacgtccccgtcctgcggctcggccgcgcgctacggggtgcggctggtgcaggacgccaaggcgtgcgtggacgacgactacgtgcgctccatggtcgacctcctggaggagcggcgcggcgcccgcccggacctggcggccagcctggtgatctcggcgtggacgcgcctgggcctcgaggacctggacttcggcgccggcaaggccgcgcacatgggcccgctcaccagcgagatctactgcgtcttcctgcccgtggtcggcgacccgcacgccgtcactgtgctcgtctccgtcccgcaggccgccgccgacaagttccagcacttctgcctcgggttcctcaaggacgtcgaagtggacgcgaagctcacctgagctactatggctatgatgtatgatccagcttgctagctcgtcgatgagtctcagtttgattttccaccgtgcattctgctttctgcatgctatatgagaaaatgatggagtattatgctaattactcccggtcaatataattgtgtcgaacggatgaaatgaaagatcgtctggtgatgatcatagtcatgcatgtatcggctgcggtccgatccagtagtaatatcaatcaatcaatcggtgatgaggtcctttttgtggtgtcatcaactatctggctcgtggtagctagtcggcgatcatgacgctcatcgtgtcgtgcatatatttgtctgtctctctaattaataaacatgtagtactactagtaattacgatgaagattcatgctcatttattcaattctctactatattaaagcactagttttttctagtttcattgtcgttgtgatccacgtttaaatagtaaaaaaataa

SEQ ID NO: 39650 - DNA, 6386 bp, Zea Mays
gactgttccacgcttccgtcaccgccgcgtcggggccggcgatccaacacaggtgaagtcagctgatatgatgtacctcatttggataacaatttgactggcaccagattttacagaaatatgcaggaggggctagggcaaaggatgcatgtacctcatggtatcaatctgtgtatcgcaacttcttccatgccctttcaggcgcaatctttcattgagcccagtaccggacaagtgaaccctcctgtaacatctgaaaacttatctgctaactcacaagctgttaatgatgctggagcagttgaaggtactgacatgaacgaaaaatcggttcaaaaacctaagaggaaaaaacataggccaaaggtcattaaagaaggacaatcagcaaagctgcagaagcctaaaactcccaagcctcccaaggaaaatgggaatcagcctactggaaaaagaaagtatgtcaggaggaagggactaagtgcaccagctgaacaaattccactatgtgctgatacacacactagagctaaaccaggagtagtccaaagatgtttggactttgatgtggaggaccagcatggacatttggatctggtaccgcaaacccaggaaacagagatacagactggtcctgcggacacacaaccatcaatatctggagttgaaagaagtaatgttcaaatatcataccattggggtggtacaagcagttctattagttcagttgacccaatagctggtatacacggattacaggcagactgcaattctaaaagagtcagttttgatctgaacaattctatagtaagtcagctgccaaccaattattctagtccaatggacagctctgaacaatttttcaattttgatttaagagaagaagttcgaacaaaccagttattgcctcatctaaccagctcggtagatcacacacgacacccctcggtcaattttgaccaatacataagcacatctcaagattgtccagaaaaatcacccagacattatcagatggtcagtagttatagaattctagaaaatatgacaacagcttctcagtataccgaaagggtgtctatggggggcaatttcaaccctgaagcttgtatgggcgaagatgcaataatcaaacaaatggcccaaagctatagacctctagaaagtccatttgtacctcccaatcataatgaaagggatatgatgaacggaaatctgaacgagtttcctgtgaagaatgattacttgaagttttctaccaatagtaactaccaaactggagcaggttttgatcattgttctccagactattcagatgttcttgcaatgggtacaaaaagagaacatgatgctatcagtggccatcagatttctcttggcattgactttattaactcaaatagaacaaggaagttctgtagtgatgaccccctttccactagctctcaaacatcttactgtcctcaatcatgcaaaaggatgaggccagaggatcatagcaatcagctccatggaactatgggtaagctttcttccgcatcagcattttctgatggtttgaacacaaataaagtttcagctatgaaccctagaattggtaccttggctgacgtacaattgttgatggcccttgagaaatcaaaagcttcacaacaaatgtttgagtttgactatgttacgtcacaaaataacatgatccatgaacgtactgggcttgctctgcaaaatattgctgacaaaggatttattgctctacctaataaacagttcccaagcttcgctgcacagaacatacctttgcctggcagtactgtgaaccaattgggagaaagtaataccttgaggaatggagtgcatcaaattcaaccttgggaaattacatataggctacatgactctagagacaatttttctttaccagggaacacacagttctcgaatggcacagtgaatccatcctcagaaaactatattcagagtaatgctattcatgaacatcaatgcttagaaaacgttgtggctaaggtgccagttttgtctgaaacacaaaatacttccactcaagagggccataaccactgcactgctgctactactgatgagcatatcagaactacaagtgatgaagttgttagatccctcacccgacgtgcaagccaaccaactacaaatgggaactacaatattaaatcttctagagtaactgcagaagcaaactgcactgagaagccaagaaaaaggggtcgtccaagaaaagtagtaaaccccaatggggagccaaaagaaagaggtactaaagggaaacaaaatgttggtcatgcagaacttatatcaccaaaaggttcatgtgctgactttttaaaaactaatggtattacttatgcttctgaatcttccactggaattactcctaggatgtcaactgtggagttgaaaagttctgaccaagataaggagattcatggaggtgccatgcctcaagctacagcagcatcagttgatcctttagatggcataattgaaaagattaagctcttaaccataaacggaccagacaagggtgtgtcagaggtacctaaaaatgctcttgttccttatgaaggtgaatttagtgcactgattgcatttgaggggaaggcaaagaaaagccgtcctcgggccaaagtgaacatcgatccagtcaccactatgatgtggaacttattaatggggccagatatgggtgatgatgccgaagggttagacaaggataaagagaagtggcttgatgaagaaagaagagtgttcagaggacgggttgattcattcattgctcgtatgcatctagttcagggggataggcgtttctctcgatggaaaggatcagtcgtggattcagtcgtgggtgtatttcttacccagaatgtttcagatcatctttctagttctgctttcatggcggttgctgccaaatttcctgttaagatagaggtccctaaaaaacctgtggctgagatgtctcatactcctgaacagaaggatagttgttctggactgtttggtgattctatcaaattgcagggcaatatatacattgaagagataagtgacattaaatcgttaattactacagaagataatgaagaaagtaataataacgaattgattggaaactctgctgggaatggagtaaactgtgcaactggaggatgccatgtctcttatagtaagtcactaactggatcccatggaaatgggctatcaggatctgtttttccaactaccggcttttcaggtgtggtagaaactgaagatggatcactggaggatgttatttcttctcaaaattctgctgtttcttcccagaattccccagattatgttgttcgtagaaccgatccaataggttctagttcgttacaaaatttcactgaagagggctgtattatgagaaatatgtccaatgggactggcatctctactgactatacattgtttctgccaattcaagatccaaaaggcatgctcggattatcagaatattgtggacttaatcctcttccagtttcaggtgtgaacaaggacatgttgcttgatctaaacagatcatatcagccattacatacttatatgccctatgatcagaatagtgagtctgatttcacaggtgtgtcatgtttgaaccatatgggtaaatcattccacacaggccctgataaagtgaatctttccagtgttacacagtctgaggctagtctttaccctattgatcctttagaacaaggcgacttttcaccactaattaaacaaaacttccaaccattacatagttcagacgaagtgccatttttcaaggagcactcttcatgtaatgattttttgaggaacaaaactgaagctcattttctggaaccacttgtctgttcaaatcctcaagaggtgtacacaacctcaacagatcaaatgggtgctgaacaatctcaatcaggatgtggccaaaagtacaatgatgccagagttcagacagcatcacatgaaaggcatcagtcttcaaccttgtgtgataaccagaactcttgttcggtggtgttgcaaggagttgcttcagactcaacacagaagttcgttgatactcaaaaggggccgtcaaaagctcgacaaaatggatcaaaagctaaggtacggggccgacctaaaaagaaaactgatgactgggacagtttacggaaaaaagtgctttctaatggtggggacaaacaaagaagtcatgatgcaagggatactgttgattgggaggcagttaggcaagcagaagtacgggaaatatctgaaaccatcagagagagaggaatgaataatatgctagcagaacggataaaggaattcttgaaccgattggtgacagaccatggaagcattgatcttgaatggctaagagatgttcaaccagacaaagcaaaggacttccttctaagcattagagggcttggactcaaaagtgttgagtgtgttcgcctcttgacactacatcatatggcttttccagtggacacaaatgttggtcggatatgtgtgaggcttggatgggtgccacttcaaccactgccagagtctcttcagttgcacctcttggaaatgtatcccatgctggagcacatacagaagtacctctggcctcgactatgcaaactagatcaacgtacattgtatgagcttcactaccaaatgattacttttggaaaggttttctgcacaaaaagtaagcctaattgcaattcatgtccaatgagagctgaatgtaagcactttgctagtgcatttgcaagtgctaggcttgctcttcctgcacctgaagaaaaatgtttggttacattggaagatccaaatgttgtagagttttctcaccaaacatacataaactcagggagtgttggccaacttgagtggagtgcaaattatcctaaacatgctgtttctggtaatcatcagccaatcatcgaggaaccactgagcccagaatgtgaaactgaaaatatagaggcacatgagggtgcaattgaggatttcttttgtgaagaatctgatgaaattcctaccattaatcttaatatcgaggagttcacacaaaacttgaaggactatatgcaagcaaacaatgttgagattgaatatgctgacatgtcaaaggcattggttgccatcacgcctgatgctgcttccattccaactccaaagctcaagaatgtcaatcgtctgaggacagaacaccaagtttatgaactgccagattcacaccctcttctggaaggattcgaacagagagaaccagatgatccctgtccatatcttctttccatatggaccccaggtgaaactgcacaatcgatcgatgcccccaagacattctgtgattcaggggagacgggtagactatgtggaagttcaacatgctttagttgcaacaatatacgagaaatgcaggctcagaaagtcagaggaacacttttgataccatgccgaacagcaatgagaggaagcttcccacttaatgggacgtattttcaagttaatgaggtatttgctgaccattgctcaagtcaaaatccaattgatgtcccacgaagttggatttgggacctcccaagacgaactgtttactttggaacctcagttcctacaatattcagaggtttaacgactgaagagatacaacgatgcttttggagaggatttgtttgcgtgaggggctttgataggacagtgagggcaccaaggcccctttatgcaaggttgcattttcctgtcagcaaggttgttagaggcaaaaagcctggagcagcaagagcagaagaataatagtacattgaagaaatataggggtgctaaccagacgaggatggatagcccgaaatgagatgctgacccaataggtcgccaaatcacctccaaattctaacccaatgacttccatctgtaatgaatggcaataccttgaaaacctgtgatggagatgttttgtggcgacatgatctcttaaattagattccgtctttggtaacagcctagctgttcttgttgagtcgcatattctttattctgaagatcaatatagcaaatgggagaaaaaacatagtgcacagtcgagctgttctaattgtacctcttgtgagtggaatcagttgttgtacaacaggaagatggacctatctgtacaatggtcgtacatgttctttgatcatagtataaacaatgtaagcctcatcagccgttatttgattgtttcaaaacaaaggaaaagcattttcaattcatctgttcaaagactatttccttttccccccttctatcttgagatggaaactgactaattttttacttgtggggatctgacagtgaatatatcaaaa

SEQ ID NO: 39651 - DNA, 2994 bp, Zea Mays
tgttttatcgcaacaattattttctatcaattaattttaagcaatgatctaagatattgttctgatcaaaccgatgctgcctccacactgataattgcaacttcgacatttcatgattatgatccaatttacatttgaagcaccaaacaggtcaactgctgtctttgcttttgcagagttctatcttaattgtactgctagatatgcttggacattagtgccatggctcctcaataccaagctgcgaccttgattgcctctccatcttatccaagtgccattgcttggtcaagcgacaatcttgtggctgttgcatctggtcatattgtaactattctgaatccatctgcgcttgatggaccccgtggattggttggactttgtcgcagtgacccttttcctataggactggttaatagagaagcggcacaacaatcaagtgaagcgcaactcaagaggccaaggcgggcacaatactgctcaatggaccccgtggattggttggactttgtcgcagtgacccttttcctatatgactggttaatagagaaggagtcgcctgccggagttggtcagggaggagtgaaggagttgctggagttggtcaaggactggaggagcaggcgatctcttggagccatgtttattgtccacttccttagcgcgtgtttgctggctgtttgcactatggatggtcatgtgaagctttacaggtcaccaatttgggagctatgtgatgaatgggttgagaagaatacaaatactggggagacagaggttttaggatctgcttatgaattgcaagaatctctttatttcaggtgtcctggacagagaaaactaaagcgatcaagagttgatggttttatttatgacgtcaatgaagttgatttagatgcatcaaaggatgcagacttctcgatcgaaccatgttctaaatcaaagaagaaatatttgaaaaagaatattacacaatagatgctggcgtggttaccagtgatccaatgctcatcggggttttgcaagctcacaaatcatgtgtcagtgtcatagcttggcaagttctttctgcgggctcttcaaaatcctcgttgcttttagctactggatgctcagatggaagtgttaagatatggttagggaatattgaagggttaaatcaatgtgcaagtggagaagtgccatttgcgttagttgctgtggtcgccactgatttatcatctccagtgtcatcaatctcattagccatacctgcccagtctcaacacgaggtcagtttggcaattggaagagtatctgggtcactagaaatatggatatggaatgcatctagcaacaaaattgagattttcagtgcatggcatgcacatgatcaagtggtaacaggtttacaatgggctatggatggctattgtttattcagctgcagtcaggacaattctgcacgttgttggatctctcacgaaaaccaccttgaagaaatttttatgcattcaaattttccagagctaagggagtcagcagacctatcagaactctctgatcgatgctatggtcttacactagcacctggagaacagatgattgctgtggtccgcagtttggatctgaaccttctgaaccagatgtatcaagtcaggacacaaaaggcggtggttgagttcatttggattggtggccaatttgttggtattccactagacaggagcattgatatttgcagttcacagtccacagacttatcctcaagtaatctcatgtggtggggatccaacattttgtggtcgctgaagaaatacgaaaatgtagaaaagaggcttgtgatatgggatgttgtagctgtgctgcaggagttgaagaaatccgcacctgcctttctggagactctagtgcatagttgggtctcagtgttactttcgggcgacccccagtgtgtttctatcgatgctccatcacgttcaatgcatgacatgatgccctatgtcagcacgcggaagctacacttactgaacataatgtgcagaaaagtaatggtcagcattcacacacatcatggtcctggtgctgaaaacggcaatgaggaaacaactgatttctggagcactcttttggtgaggagcgaaacagagctgcgagagaggctggttggcttcacctttgctgcagtcctgaaacggacagcgtatttgttcaatggtacctctactgaaaattgctggtttcctgttggggttgcccagatggattcttgggtaaccatgaattacgacggacaagtgcatgaccagctgcagtctatcagatcaaagatcaaagatttaggaagcaggatcgacggatactctgacgtagaaagctgcccctactgctcttcgccggtccatttcgagtcgcctgacgtagccatctgtggggaaaggcacacactgccgcggtgcagggcgtccatgatcctgtgctccgttgtgcagcctttgtggcactgcgtgtgctgcggaggcacggtcaacaagctgttgccggagtcgttcttcaccatgcaggcgtccaccatgcatgatgaaggatcgctcgatctgtcagcagcctccgtcccactttgccccttctgtggcatcctcctgcagaggtcgatgccggcgttcctgctctccacctcgccggcatagaggctctctgtggatgctagtaggcatccaccaggtgtagcatgcagtagcaatgtagtactagtaaagtttgttctagtcgatgctgcttacactcagttactcttaccaagtatggctggcagagtgtcggttactggtcattttttaggtcccttttgaatgaatacgatgagttcttttgtttggtttcttttggaccctgacggtggcagattaccaggccaagttcagctatctcgaattgtctcattcgattgttgcggacatgcagttctggcagttccaattggttgttgcggacatgcagtcctgtcagttgact

SEQ ID NO: 39652 - DNA, 524 bp, Zea Mays
caggacactgaagagatggcacggctggttgggttggccacttcgagcttttcgcttgcaccggacaggacgaacaagttcatggagatcatcagcgtggttcaggcgcatcaacgctgatattgacaagtaagttctgcagagaaccacaggtttctggccagcgtgggcatggacgatcttaaggcatcctaatcatctatctaacacttatgactttacttttgccaggcttacacagaaacaaccatcgatctgtcgataatttgtttgtatcgttggttatatgactgtcaagtgtaacaccccttataccctcttatatccataaaagtttgttcaacctctgctttgtgtttgcattatatcgtggttgtttcattatagccgatatatatgtttgtccgtactactgatgcaaagtatatccagcgcaacaatgtgtttagttgagttgattatcccccccccccttcttccatgttatactttagtttgttccactcgtgaaaaatatggttcta

SEQ ID NO: 39653 - DNA, 2152 bp, Zea Mays
agcccctccattgcctcattataaccaccaccgtctcttccttgtgtcttctcctcctttccctcccggccacttctctcgtttcgccctccccctcgagcaccccgccggctagggttacggccaccgccttccacgcctcccccacttcccgtaggcggaggctggtcggcgtgcacgcgaccgcggcggcggagatggacccggacttctcgcccgggggcggggggcccagctttgaattcgccttcaacgaggtcaacttctccgaccgggaattgcgtatcgaggtcgtcgccggggatgactacgctccggggtccagcggcgccggtgccggaggaggtggcctcgccgactgggcgcgccaccgcaagcgccgccgtgaggagctcctcaaggagaaagaatctacaactcacatgtcagaccaaacaaattgcaatgaagttgaagcagaagagtgtgatgcgtatgaagaaaatcaagaggaacctgtagcaatggtagaagaatctccacccgatgttggccaagatggtgatgatgggcaaggtattgattcgtcttggactgtggttggtacaccagttttacgagtcaagacaatttatatcagttcagcgattcttgctgcgaagagtcctttctttttcaagcttttctctaacggcatgaaagaatcggatcagagacatgcaacccttagaattactgactcaggttccaagatgaagtgatgaacattcctcttgctggaattgaagccatcttgtcaagtaatgacctccaggtggcatctgaagataccatctatgacttcttgctcagatgggcccgtgcacaatacccgaaatcagaagagagacgtgagatccttagttctcggctgctccctcttgtgcgattcagtcacatgacatgtaggaagctgcggaaggtcctaacatgcacagatatagaccacgagcaggcaaccaagtgtgtcaccgaggctcttctgtacaaagctgatgcaccacaccggcaacgagctcttgcagcggacacaacaacctgtcggaaattcgctgagcgggcttacaagtacagaccactcaaggtcgttgagtttgatcggccctatccacagtgcatagcatacttggatctcaagcgcgaggagtgctctcgactctttcctgcaggccggatatactcgcaagcgttccacctcgcagggcagggcttcttcctctcagctcactgtaacatggagcagcaaagcaccttctactgctttggcctgttcctggggatgcaagagaagggctcaacgagcgtgaccgtggactatgagtttgctgcaaggacgagaccatccggcgagtttgtgagcaagtataagggtaactacacatttaccggtgggaaggcagttgggtacaggaatctctttggaatcccgtggcaggcgttcatggccgatgacagcctcttcttcatcgacgggatgctgcatctgagagctgagcttacgataaagcaacctacgtagatgtgctgccgtcgggttaagtgtgtccagtcatgggtgatgtggaaaatgctgtgtgctgcagatatcctttttgttttttttccttttgttcacgcaccttaatccttacattaatagacagtttggtgatgacaaaatataaaggaaaaaaaagggctggaaagctgccttttgttgtttcactaagatgaaggttgtatgatctctgtctcttcgtagtggaagttgttacaccagatgaaaaagaaaagatatcggatgggaatcctcactagcttgagttctctgcaagtttccagattggccggtatctcactgctaatgagctatgttctggttcgagcttttctttttcttttgttttcttttctttttttgatgggaaggacgagctgtcctattggcagcaaatgcggacgtttgtcgttggtaaggcctgctgctgctgcagtggcgctattgtttgatggcgcatttgacttgcccattgcaaggcggttgcagtgctattgttgtagcttagctaggtaggttgtgcctttctgatgaaccttgaactgtactgtcggcgagcaaacttctactcagttgcttatttgaggctggaaaagg

SEQ ID NO: 39654 - DNA, 442 bp, Zea Mays
caaggaaaggagaggcaggttcctcacatctctcctgccatatctgctgctccagaagctttcctccccctctctgcttcaagagttcaaggtagctggcgctgcacgctccgtcctagcagcaagcttgcagccatggagcccaggaagtcgaattatctcgtcgccctcgtcttggcgtcgttcttgctctccgtcgccgtcgcaggagacatcggaatccacgcaggaagatgacgaaatagcggtggtggtccacgagagaattctcagccaggtgaagatgaacgactacgcgagatacgacccttcaccgaccatggctaagcctcgctccaaggacataccgaactagtcagcccagcccttgtattgagattatatgtagagaaagaagatctctctctctctcttatatatatatatatatatatatatatat

SEQ ID NO: 39655 - DNA, 4301 bp, Zea Mays
aaggcccaggtctattgcctatatatatatattatgtagtccatagggactggtcatctctggttaatcccaaggatgacagaacaaaggcttacaagaggatggttgatgtcagtaggagaattgatgactaccgccagcatccacatttcagtgttcttgcaagttcacttgtctcaagccgggtttcagaatgcctaaagtcatccaagttgtactctaaaaaggcagatggagagacatccacagatacatatggaatgaaatggctaaaggatgttgttctcagcaaaagatcagataatgtttttaggagtattatggttggagacccaaaaattaagttatgggaaattggcattcctgaagatttatcctcaagcctggttgtttctgagcacgtcagttcttataattttcaaagtacaaatctgaagtgcaacctgcaccttctagccaagcaagaactatttattcggcgaaatggaaagctaatgtttcttcggaaggcagaccagctagaaataggagattttgatggtgattgtttgcatggatatatcccacaatctatacgctcaagggttgaacttgaagagctggtaagcttacacaaccagctgttgaatatgcaagacggtcgaaatttggtgtcactaacacatgactctctagctgctgcacatttgttaacaagtacagatgtttttctgaagaaatctgaattacagcagcttcaaatgctatgcctttcagtatcaacaccagcacccgcagttattaaatctatgaattttcaaggttctctgtggactggtaaacaacttttcagcatgcttcttccttcaggcatgaatttcagttgcgatacggagttacatatcatggacagtgaggtgcttacctgctcactgggttcttcttggctacaaaataacacatctggtcttttctctgtcatgttcaaacagtatggttgcaaggcacttgacttcctttcttcagcacaagaagtactatgtgagttcttaaccatgaggggtttaagtgtctctctttcagatctctacatgttctcagaccattactcaaggagaaaactagctgagggagttaagttggcactgtatgaagctgaagaagcttttcgagtcaagaaaatattgttagatccaattaacataccagttctgaagtgtcacgatgaaactgaagatgtaacttacagacaatctgattgtatccagagcaatccatcagttatcagatcttcaatcatggcatttaaagacgtcttccgtgatctcttaaaaatggtgcaacaacatgttagtaatgataactcaatgatggtgatgataaatgcaggaagcaagggtagcatgttgaaatatgctcaacaaactgcatgtattggtcttcaacttccagctagcaaatttcccttcagaattccttcccaactctcatgtattagctggaatggacagaaatcgttgaactatgaagctgagagtactagtgaacgtgtgggaggtcaaaacctttatgctgtgataaagaattccttcattgagggtttgaatccattggaatgtcttctgcacgctatatctggcagggcaaacttctttagtgaaaatgctgatgtaccagggacattgacaagaaaattaatgtatcacttgagagatatacatgttgcctatgatggaactgttagaagttcttatgggcagcaaatagtgcaattctcttatgatagtgttgatgacctagtagataaactcggcgccccggttggatgtcgggctgcttgttccatttcagaagctgcatatggagctttggaacacccggtcaatggtttagaggactcccctctcatgaatctacaagaagtatttaagtgtcacaaggctacaaattcaggggatcatattggtttgcttttcctgtcaaggcatttgaagaagtacagatacggtctggaatatgcatccctagaagttaaaaaccatcttgagcgagtgaacttctctgatttggttgaaaccatcatgattatatacgatggacatgacaaaataagaaacgaaggaatgtggaccacccattttcatataaacaaggcaatgatgaagaaaaaaagattaggattgagatttgttgtagatgaacttgcaaaagagtatgacaccaccagagatcagctaaacaacgcaatcccatcaattcgtatctcaaggagaaaatgtttagtaggtgacgagggtgttaaaagttcatcatgctgtatcgctgtcgtagcacatgctgaacgcaactccatctctcagttggacactatcaagacaagggtgattccaagcatactggatacactgctgaaaggttttttggaatttaaggatgttgagatccagtgtccacatgatggtgaacttcttgttaaagtttgtatgtctgagcattgtaaaggggggaggttctggcctactctacaaaatgcttgcattccagtaatggagttgattgactgggagctgagtcaaccaagcaatgtatctgatattttctgttcatatggcatagactcagcatggaaatactttgttgaatccttgaaatcagcgactactgatactgggaggaacattcgccgggagcacttgctggttattgcagatagcttgtctgtaactgggcagttccatgcattaagcagtcaaggtttaaagcagcagcgcactcggttatcgatctcgtctccattttctgaagcatgtttttctaggcctgcacaaagttttataaatgctgcaaagcaatgttcagtggacaatctgtgtggaagtctcgatgcagttgcttggggcaaagagcctttcaatgggacgtcagggccttttgaaattatgcactcgggaaagccacatgaaccagaacaaaatgagagcatctatgatttcctatgcagctctaaagttcggaattttgaaaagaatcatttggatacccgtagacaaagtactgaaaatgcttcgatatgtagattagcatgcaagtcttctaaaggcagtacgaccgtcaatggtgttgctataactatcgaccaggactttcttcatgctaaagtcagtatatgggataacattatcgatatgcgtacttccttacaaaacatgctaagagagtacccgttaaatggatatgtggcggagccagataaatcacagttaatcgaggccctgaaatttcattccagaggtgctgaaaagatcggtgtgggagtaagagaaattaagatcgggttgaatcctagtcacccaggtacaaggtgcttcattttgctgagaaacgatgataccactgaagacttttcttaccacaagtgtgttcagggtgctgcagactctatctcaccccagctcggaagttatttgaagaaactatattacagagcataagcttatgcaacactcccactagttcatttttttaactaaaacgtggcaaataaaaaagaacggatggagtaggattttggaaagtgttcctggcaacatcttgttctgatcagaccatattaccaatttctgataaggaaactacgtgtcgcattttaaggatgaggtgaaaactgaaagggtctggcgctcagaactcagaaggtcttctggactggaggtgtatgtcaactcaactcaatgggactatgtaaggtgggcctgagtcatgactgcggtttcatgcctgcaattctctagtcagtagtataaatactagtctgcgtgttttctaatatgaagatccatctattttattacttaaccatagcgtagatgattggtaacagatagatacattttatttactgattaaaatgcagcagcgactccccgaacttaaaacaggtaaacgggtgtggaaacttagtggctcattcaaaactgtctaaaatcgggtttgctcaaacaaagtgtcgacatggcatgtcatgttgaaatcatttgagtctctaaatttggtttacagacttttattagtgtgcttcaatcgtagcacaccaaatcagtattcggtttgagcatccgatttctgatggttttgcacaggccggccaagttatatgatctagttttttaacttaggggatctaattgatacaacatgccaagtttaagaatggctattgtatcttactcttatttattgaacaagtaatgcacattcccagtcagccgagcggctttgcgtgatgaatttgatgaactacacaagttaaactaagctacaca

SEQ ID NO: 39656 - DNA, 3206 bp, Zea Mays
gccatctctactcctcgatgtcctacagctgaaaaaacaccttttggtgcaaaggttgttgttttaggaggtgatgctagacaaatactcccagttattgaaggtggtacacggtcgcagattatagatgctgcaataactagctctcctctatggaattctattattgtcttatacttgactgaaaatatgagattaaactcatcccatttggatcctacaagtaagaatgagattgcttcctttagcaaatggttgttggacataggtgacggcaaagtacccgcaagagcaagagacagtgaaaccgaaagatattggataaaaattccgcatgacattttactaacatctcaaaataatagtcttcaatgcattgttgactccgcgtatccagatataagagataggtatgcagagatacaatacttaaaagaacatgcaatactttctccaacaaatgaaattattgacacggtcaacgactttgttgtcactctaatacatggtgatccaaaggaatatcttagctgtgatagcatagtaaaaggaccagacaacaatgattcatatgacttattatatcctgttgaattcctcaattaagttactggcaacaatttcccgcaacatcaattaatactgaaaaaaggagtaccaattatgcttttgcgtaacattaaccaatctgaaggtctttgcaatcgaacgaggttaattattgttactctaggagatctgattattgaagccaagatcatgaccggaaaatataaagacaaaattgtgctgattccacgtgtatgtttaactttaaaaacaccaaggctaccattcactctagaaagaagacaatatcccattaaagtttgttacgccatgacaaataacaggagccaaggacaaactctgtccaatgttactgtgttcttgaaaaaacctattttcacacatggacaactatatgttgctttctctagagttacttcaaaaaaggactcagagtgctgattgaagatgatgatggaaaatcaatagatgaaacgaagaatattgtttaccaggaaatctttactcgatttccttcacattaaggaagttctataattgccgcccatgtatagaataatgtctatataagtgagttttatattccattttatatccaagacaagcctattatgtataatatatgcatctactgaagatggtttctatggcttacaacattcctacttcctttattacaggtacatttcattactctctcccccccttttccctccaattacatacaattttacactcttttaactcacttgaaaaaaatagtaaacctatctacatatacaaaattccatttgttttcatcgttttgtataatactatatattaactcatacatatatctcataaataaatttattataggatacttataaacaaaatgctaactacattttttatctgttccatgttacacagaatgcctaataaaccactttcagcattgactctacaagatcgagacatagaaattcaaatagaggtccacaggaaatgggaatttcgaggtgctattgacaatggacccatattacacatagacatgatcctgacggattgcataggcaatgctatccattgtcaaataccatcattcccagcagctaaaagaggtgatgaatttcaagtgggaaaaatatacaagatgtcccgctttccagtagctcgtgcaaaatcttcctacaaacctgttgatggtgatctcatgtttctaacaagttacgacaagattgatccaaatgaaccaaatgcaaggaacttccatgatgtcattagcattattacagaaatctctgcgattaaacctgtgggaaatgcacgcataccctcatcttacaatcgacatgttctaataaaaaacctcagtgatagcattctgaaaattactctatgggggaaacgtgcacaagaattttatttgaccaacacttatgacccacagaaacaaactcttgtcattgtcttatttgttggttgtttaccaaaagaattccaaggattgaatctgagaagataaacatagaattacccagccttgacggacaagaaattacacctccacaacttccacaacgagaacatcatgaccttaaatacatattacctctaaacccacatgatgtaccggatgaaggatatgaatgcacagtaaccattacaagtattcctgaaggcaagacttggtattatattgcttgcaatacttgcccaaacaaaccaagcattgatcctatcatccgtcaatgctccacatgtggatcaacaaaatactgcttcaggtacaagctcactttcaaggcatcagatggaactgcagaagctgaaatgtttgctttcgacactgttgcaaggacaattattgggaaaccatgtccaatggttgttgcatcattttccagatgcatcagctatcccacctgaaattacagcaatcgtttcacggaaatacacattcattgtagtgttcaacaaccaatcatacagatttctagaaaaagcattgctcataaaaggaattgtagcatcatatggaagaatgacatcactaccaagagttcaagaaaaacttgatgtgcaccttcctcccaatccagccaaaaacaaactgataacaacagctgctcaatctccctctacagtcatgtctagactttccacggcggactcaccaagtgtgagtcgaaagctaacctattctccagcaaaggataaacctgagacaaaccctcttgatgctgataaaaatagagctcctgcaacaacacttgaatcacctacaaaaaggatcaaacaagaccctaagaatcaacaagagtagacgttgtgtgcaacacagtaaggaatacttctgaacatcacgcccaaacttcaacaaacgaagcatattcctcactattttgtctataaatattatgtgtgccttcttctatgaagcaaaccttaccctcgatatgctatatataatatctatgtattgtcatgtaatataaccatctataaactcatcagttgctacaatatattctaagcaaaccttaccctcgatatgctatatataatatctatgtattgccatgtaatataaccatctataaactcatcagttgctacaacatattctcatgttatgcatataaaat

SEQ ID NO: 39657 - DNA, 4167 bp, Zea Mays
tttgctctccgccgcctggtgcttcgcccccctcgctctccgacgactggtgggccgccggcgccggtgccgccctacggcagttgggccttcgttggcctcttcgccggccttttcgccggtgacgagcagccactagcttctgttgctctgcatgcaacgatgaactgatgattattgttgataacagaaatgtgctgttaggttttgttcacatgtgaccatgggcagtcaaagatttctgcaacctgcattgcacctcttattcttagagaactactgcagtggttactaatatattgtgctagccactaggtaatctaacatttctgcaacgataccagcttctcttcttgtttacatggagtgcaacagagatgaggctgctagagcgaaagttcttgcggaaagaaaaatgctggacaaggattttgttggtgcaaaaaagttgattatcaaggtgcagcaactcctcaaagaagtggaagatattgacattccaaaaatgttaactgtttgtgatgttcattgtgctgctggagctaaggtaaatactgagattgattggtacggaatactgcaagtacctgtaaatgctgacgacgcactgataaagaagcagtatcgtaagcttgcccttttgctacaccctgacaagaacaaatttggaggtgcggaggcagcattcaaattagttggagaagcaaacataactctcacagacccatcaaaacgttatgtgcatgacatgaaaagaaacaccttcagaagcgttacggcaagacccaatcgtcagccaccaaaaagacctgcacctgctagatctagttctactcctgtgaatctctacaatatgcatcagcaacatcagcgtcaagcctcaaatcctacagggacgcaaacaacattttggactatttgtccagcttgtggcatgagatatcagtattacctctcgatcttgaagaaagctttgcgctgtcagaattgtttgaagccatttattgcacatgatttgaaggaccaagctattccttccggggcaaatcagcgatctgctggggtttggaaaaatgcaggcacaccacagaactctgcaggacctcaatcaaatgtcactggtcagaaaggctggtctgccacttcaggagttcatgttaataccggttctcatcatgctaatgtgaatacaaagaggaaaactgatggtaacgcaggtggactgaaaaacaaaatgaaatctgcccaggccaccaggaaaccttcaaaagcttcatcaactgctggattgaaaaggggcaggagggcggtgtttgaatctagtgaatctagcatatcagaaactgacagcgacggtgaggtagagattccaaaacatggtcctgctgaaaatagtgcagggccaggtcaacaaactcgcagatctagcaggcagaagcaagaagttaagtataatgaggatagtgatgatgataatgatgatgtggaagatgatgataacacggttgaggatgattttgttgattctcctgcgttgaaaaggctgagaaaaggtggcatgttccatggtgatcacagtactaaaacagcaaagctgaatgaagacaccgctggccataatagtgtgaatagctggggtaacataaaagataaaaagaacggtggtatgccatgtgaagagaaaacttccaatggggttgagcagatgaagagagaaacaatgcatgttggagaaaatagtgatggcaaagaagagctatttcattctgtcagcaacaatggccttggtctaaacgatgatgatgcttcagatgataacaaattcactttcccagatcctgaattttttgattttgacaaacttcgagatgcaagtcaatttagagccaaccaggtctgggctgtctatgatgatcaaggttgtatgcctagattttatgctcgaatcacaagggtaaaaatggttccaaagtttatgctacaatttgtttggttggagttcaatcctgcaaataaagcggaggaggcatggtcttacaggggtctgcctgttgcatgtggacactttacgcatggactgtcagagacaactagtgaaactggtatgttctcccggattatatcattagagagaagcaagacaaagaacttctatgaaatatatccaaggaaaggtgaagtttgggccctttttaagggatgggatattggttggagctcagatgctggcattcacaaaaaaatgaaccatcgctatgaagttgttcaagttctttctgatctcaccacgagcactagcattattgtcatgccacttgtgaagttaaaaggctatgttagcttatttgtgcagtctggagaggcagctccatatgtgatacctcaggttgacacactaaggttttctcattgtgtcccacattatttgacgagcggaactgaaaaagaaggcattccagaaggatctcttgaacttgatcctgcagcgcttccctccaacttggaagaggcttttccttctgctaacccagaatgcagttcagcaagaagccaggagtctgactccaaaaatgctggtttgtccagtggaaatcgcaaaggatccatgaatgtggggcaggggcaacataaaatagccgcgaatggaagggtttgtacaaagacaacaaaggtagagaatatcaagcataacattgatctgtctgaagttacagatgtcgttgacgatagcatttgccaaacagagtatgtatgcgccgattcagaattctacgatttttcagtaagaagatcgctccaaaggttttcacctgggcagatctgggctctctacagtgatatagataaattccccaattactatgcatttatacagaaagtagatctcaagaatgataaagtacaagttagatggcttgatgtctgtcctcaaggagaagtggagaaaagattgtcccaagatcggaccattggcattggaacctttagggttggctacatccacgacatgatgacttacactggtacagatgccttttctcatcttgttgaggccagacctactggcagaaaaggtgaatatgaaatacttcctcgtctcggtgagatatgggcagtttacaaaaattggagcgctggatggactgcgcaggattttgaaaaatgtgaatacgaactggtggagatatttggctatactgattcctccatacaagttcagcttgtgaggaaggtggatggttataagatggtatttatgtcatatagagcagggggtgtgaagacaatacggagggatgagtacccgaagttctctcaccagattccatgctttcacttgacacatgaaaaaggtggcaagcttcgaggctatttggagctcgatcccctatcactaccagaggaatttctctgctgattcgatctgagataaaccttatctacatcaaatctggagcctccggtaatgaagtttctggaacatccacaatttcgtagcactgacgttgttacggtggactcaatctgcacaactaaggcattggcttttggacttttttgctggatggctgtcctgcagctgcaattcacatgtctagtattttttttgcagtaactatttgttgttagcattagctgtatctacggtttgagttctagtgtaaaaattgctacttttaacatcttgcagtgtactctaaattgcagtactgtgtttgaactgtgagatgctagcctgattaatttcctggaactgaaaaatgaaatcgagctggagcaaggttaggctgatcaatcaatgtgtcatgcttgtgttgctgtgcggggacatagatggcatccttcagcgtattatcagaatttatttctattcgcatctctctgtgtataaatgttacacgtcctaattttgatatgaccatgccttttcttgaactctttttatttgctgacaagtattaaagccttgtttgttcctatttgttttatgattaaagtttagttctaggactttagtctctacctgtttgtttgatctcagggactaaacaggttcagagcacattaaatacactatagaaagactaaaatacctcttatatgcttaagttgtctaagagagagaatgttaaaaacacattaatgcactatagaaaactgaaatac

SEQ ID NO: 39658 - DNA, 4620 bp, Zea Mays
atgacgcacgcagagacggaggagacacactgggtgcggagtccagcgaggagcggaggcagaagagtgcttcatccatcatgggatgcagatatttcttgtggtattcatgccatcatggcatgcaatgcaaatatttcttgtgtattcatgcatacatcatgctatacacactgtgctgtagataatgccttagttcttttttttaatgagctatactatggatatgtggtgccgtgctttggagacttgactgcggttgaggatgctgttaatcgtgtcacagataatacaaatgcagcacatgaattggatattttgtcattacgcacgcagcttggttctttaactacaattctgctttgtgttgatgttgctgcaacatctgctaagtcagttcatatgtgccgatttcttctcgatgaggcaacaagcatgttatctgaaatatttccaggaaggtcccccaaagtaggaccaacttactgggatcagatccaagaacttgctaccatatcagtgataaagcgcatacttcagcgtctgcatgacatcttggatctggatactcttccatctcttcaagtgttctttactgagatgagcatctcttcgtcaacggaatgtagcagagttggacaaaagcaacgtcctcttgggcttctgcaccaaatgattgatgacgccttcaaaggaaagcgacagttcttgagtggtaagcttcacaatgttgctagagctattgttgatgaggactttgatactgtttattcgaaagaaggtgtcaacttagaaaagaaggatattttgagctctgaaaaaggcatactccttggtcacgggcttagaattctaaaacaagcatctaggagtgaccttgcatcttcaaatgttgtggatagtggtccagaacacaaaggttctgcaaacagatatctgggccctctatctaccaagccgtcaacatatttatcaaacttcataatatatactgcaaccattggtgacatagttgatggaactgacacaactcatgatttcaactatttctcgttagtctatgaatggccaaaagatctattaactcgtctggtttttgagcgtggaagcactgatgcagcagcaaaggttgctgacacaatgagtgttgattttgtgcatgagattatatcagcatgtgtgccacctgttttacctccacgaacaggacaaggatgggcttgcattcctgtcatacctaccatttgtaatattagttcagaaaacagactatgcaccaagtcttctcctgctcaaggatggagtgcacatgattcgtccttgtcttctcgtcaagaacccctctatcctctccaattaaatttagtgaagcatttagcccagttatcttcagtaagagcagttttggcctgtgtatttggaagcagcatactatctggggacaatgaatcatcttttactcatgtgaaagattcaacacaagctccagaaactgagagatcattttttgaatttgctcttgagcaatcagagagatatccaaccttgaaccggtggatacagatgcagtctaatcttcatcgagtatccgagtcttctataacagataaatccgaagtctctttgcatcaatccaagggaaagttttgtatgaagcgaacccgtgagtctgacagtgatggtgaatcagagcttgaagagaatgtcataagcgggaacaccagttcaagttcactagaatccactaaacatgaagacgctaggctagagccaacaacttttatttcatttgattgggagaatgaagcaccatatgaaaaagctgttgagaggttaattagtgaaggaaaattaagtgatgctcttgctgtgtctgatcgttgtttgcgcaatggagcatctgataatttgcttcagttgctcatcgaacagaaggaagaaaaaggtccaggcacaggacaaattcatccatatggatctcacagtcttgggaatgatacttctcagtactgcttgaggctgagagacaaaaaagttgcagctcagctcgctctaaagtacttgcacagctgggaccttgatgctgcaaccaatgttctaactatgtgcatgtgccacttacctgagaatgatcctatgcgcagtgaggtgttgcacatgaagcaatctttacagaggtatggccatatcatgagtgctgatgagcactacactagatggcaagaggtggaagctgattgtgaagatgacccagagggcttggcactccgtcttgctgccaaaggagctgtttccgctgctttggaggttgctgaaagtgcctctttatcaattgatttgcggagggagttgcaaggccgtcagcttgtcaaactgctaatcactgatccacttaatggcggaggcccagctgcagcttcaagatttctgtcaactttaagggattccaatgatgctcttcctgtagccattggtgctatgaatttattacctgacctgcgttcaaagcagcttcttgtgcatttcttcctcaagcgtacagttgggaatctatcagatgctgagattgcacggcttaatttgtgggcattaggtctccgtgttctttccttattgccattgccatcacaacagcgttgttcttctctgcacgaacaccctcagttgatcgtagaagtactgttgatgatgaaacaactccagtctgcttctttgattttgaaagaattttcttccttgagggatgataagttaattattgcgtatgctaaaaaagcaatctcaattaacgttagctcagctcctagggaacgtcgatcgaatatctctgcatcaagggcaaaacaaaaaaaggctacaactccagctaaaacaaattttgtgcaaagttttggtaactttcagagagaagcacgcaaagcattctcatgggtcccccgtgatagtggcactaaaacacccccaaaagatatccttcggaaaagaaagagttcaggctctggaggtgatagatcctcttgggaagcaatgcctggtttacaggaggagcggacacctgtatatccttctgaggcgcaagaaagacttccttttgtctctgctcctgatgagtgggtgctgacgggagatcctgacaaggatgatgcaactcgttcatcccataaatatgaaacctctcctgatatcacactgttcaaggcattgatatccttgtgcaccaatgagtcagtagctgcaaaaggtgcacttgaattgtgtatgactcagatgaaggttgtgctaagctcccaacagttgcctcttgatgcctctatggacaacatagcccgggcttatcatgcaacggaaacttatgtacaggcactctcttatgctaagaatctatttaaaaagctcgttggtagtagtgatttgtcaagtggctctgaaagaagtaaggaagttgatgatgtttctgtggacactggcagttcaagcactgggagccagtatctggatgagctgtctgatttcctaactcaagcagacatgtggttagggcgtgcagagcttcttcaaagcctgctgggatcaggtattattgcctcgctggatgatatagctgacaaagaatcttcaagtagactacgtgacagattggtcaacgatgaacggtacagcatggctgtatatacttgtagaaagtgcaagattgatgctgtaccagtatgggttgcatggggccatgcattagttcgaatggagcactatgctcaagctcgtgtgaagttcaagcaagcacttcaacaatacaaaggcgatgcaacttctgttgttactgaaataatcaacacaattgaaggagggcctccagttgatgtttcttctgtccgttccatgtatgagcatttggcaaagagtgcggcgaccatctttgatgattccctttctgctgatgcttatctgaatgttctgtacatgccatcgacatttccacgatctgagaggtcccgacagtccagaggtcatgtagacagccaattcaggactgctagttcctaccttgaagatggccctcgcagcaatcttgatagtgtccgatatgctgagtgtattcattacttgcaagattcaaccaaccacggaaggggaaacatctttgtcttcagctccatggagtgatcctttaacaactgattatgggacaattgatgacttgtgtgatctctgtcttggatatggtgccatggctgttttggagaatacaatacggacaataacacaatcgcccacatatcatgaggcacacatgattcagtacatgaacactattatcacccgcatttgcaactattgtgaaacacacaggcattttaattatctctacaacttcctggttctaaaagatgaccatgttgcttctggcctttgttgtattcaattatttatgaattcaatgtctcaagaggaggctttgaggcatttgggacatgccaagacacatttcgaagaagccttatctgtacgagatagaacaatcgaggctactaagttggtattgcggtctgctcggaataagggtgcacctggaaaaatgaccagggaaacgataatgaaatattccactcgtgtttcctatca

SEQ ID NO: 39659 - DNA, 179 bp, Zea Mays
agatgatgatgaatccactaaagaagcaaaacaaattctattttgatatagagagagagtattatttactatacatatgatggttgcatcggcagagagaagctttttaaaattgaaatatttttgtaaactatttatggccaacaataactcaagagaggttaaatggcttggcgatt

SEQ ID NO: 39660 - DNA, 2601 bp, Zea Mays
gcaggctagcagcacacacagtcggagaacgcgcgcacagcagcagcagcacaagagcacacgccctgagatcagggaggaggaagtaagagagaaacgcgcggttggttgctcggcaccacaccgtacgcgcgcgccatggggaactgctgctgcggctccgctgacgccggcacgaagccgccgggtcgtcgtcctactcctaccaaaggaacgccgccgaaggggacgacggcatgggcgccggcgccgaagccgaagccgagcgacgacggcagcagcggggcgaagcagcgagagatgggaggcgacgacgacgacggtgctccgggcccgggcccggtcgtcgggcgggtcctgcaagcgccgaggctgagggagttcacgctcgccgagctgcgggccgccacgcgcgggttcaagccggagatggtgctcggggagggcggcttcggccgggtctacaagggctgggtcgacgagcgcacgctcaacccggccaagagcaacgccggcgtcatcgtcgccgtcaagaagctcaacccggagagcgtccagggcctgcaggagtggcaggtgcgtggcgtggcaggatcgcttcttcctttcgttctgctttgatggaatcgcgtcttagtaatttttctttagaatcctgatgatgatatggaaatttgtggttaattaccctttcttcgcgcggggacactgtacaaagtcaactcttgtagttgccatgaagttgcatttttctgcttttctccgatccctggataagataggacagggatctgaaccaatataatggccatgcagtgcaaatcaatgtgctcattttgtttgcaagtgcagtcggaggtgaacttcttgggtaggctgtggcatcccaacctggtgaggctgctgggctactgcggcgaggacagggagctgctcctggtgtacgagttcatgtccaagggcagcctggaaaaccacctcttcagaagccggggtggaaacttggaggcgctgtcgtggagccggcggctcaagatcgccacgggcgcggcgcgcggcctcgccttcctgcactcgtcggagaagcaggtcatctacagggacttcaaggcgtccaacatcctcctcgactcggatttcactgccaagctgtcggacttcgggctcgccaagaacgggccctccgccgggaagtcgcacgtcacgacccggatcatcggcacctacggctacgcggcgccggagtacgtcgccaccgggcacctgtacgtgaagagcgacgtgtacggcttcggcgtggtgctgctggagctgctgacggggatgcgcgcgcacgacccgaaccgcccgagccaccagcacaacctggtggagtgggcgcggccctacctctccggcgccggcagcaagctcaagaccctcatggaccagcggatcgacggccagtaccacaccaaggccgcgctccgggccgcaaggctcgccggcaagtgcctcacgggcgaccccaagagccggccctccatggacgacgtcgtcgccgcgctcgaggacatcgaggcccttcagcagcaggccgccggggggcaccgggacctgccgccgcggcctggagcgcgccggtctgccgccgtaccatgattcttcacgcggcgcccctgttgatgcagtgcagcatggtcgttgcttggcttgagcaagcctagctgctgattcagacagaacactagcattggttcttcagcttcgttcaactaatcgccggtgttttcattctttactcgattattaatccctcattgttacagcagtatataggttcggtaatgttcttgttggaatcggacaggatgcagggataacgaatgatcacaatcatagcaacatacatgcaggtcccattctgcatttcaacggatgatgagctcgtattgtggccctgtcatcactccagctgctctctgctttgctctgggatatgaagtgacgaaggtagcggtagggcgtccctgttggattaatgtaaactactctggttccaccctctgacctacaatgctgtaaactagcttgttacatgcaacaaacaaactacctgtactgttaagaaactgaactagaagtacaaagtcccatactctgttaccacagagactgtatgcagcagcttactgcatacagactaatcccagttgatgatagggaacaccaacagtcactttgtctccgattctgccacacaaccaccaagcagcaacagacagaagtcactaggcacttgaccattggatgatgacacaagtgtactaggcattaacagatgctgcttgtgcaatgccaacaaattctttacttccaagagagaagggatgcttttactgcatcctgatgagctttgttccattgtcaggacaaatcagtttcacccaaggaaggaacaactgaaaagtacttactggccgttagagtgtaacaagattcttactgttggagtatttgatggcttgtacacatcatcaatacactcaagcaggtttagggttaaaagaacccactctgattcatcatccaagtacttgaggtccacatacatctcctgag

SEQ ID NO: 39661 - DNA, 802 bp, Zea Mays
ctccgttggacatccaaataatctcagccaatgttggataagcttttctttaattggtgctacacctggcctatcacatatattaaggacttgatcccttcttgtatgaccacaaatcaaacacaacggtgcctgtggatcctcttgaatggcagatctctcaggagatggcaaatagcatagttgcatctttagccaatacagtaggagctgctgagtctgtattaagggtggctgcaactggacatgacaagaagctgtttttcaaggtggtttctacattgtattttctagcagctttgggaagggtggtgtcaggcgctgccgttgcgtatgctgccctatgcatcttctgcctctacatgtttgcacaaagcaccgatctgtttgatcagctcccttcttgggtccctgtgggtagggattctttgggcggtactcaggataccgcgtgattttccacatgtacatggattgcagagtttttcttctcttccactgtctgtatatggtcttgcaggctaatagcttgaactatagcatctatctctgcccccacggtattacaactgtacccagtgtttagcaatggagtaatgatctttgtatatatatatgacacgtttgcaacttgccagatgccagtgatgcatcctgtatgttttcggagctcattgcagatctctctggcttgacatggttgttggtcgtgagattttgtgatggtgtgttttgcctgtaatctaaatatctaataaagatctgtctttcatcacgtaatacatgctcatgcattgcgaag

SEQ ID NO: 39662 - DNA, 3925 bp, Zea Mays
atgtctattgtgccttgtgatgtgtgtgtctgtgaattctcaatggatcgtgacccatgggcaaaattccgacgcccaaacagtgagcacccagcccaatcagaggagacacgcacgcaccagcaccctggtgtggccggtgcccggcggccaaacgcgatgccatctccgtctccagccccgccgccagtgctgccgatctcggagcacgaggacgagatagtcgccgcggtggacgcgaacccagtggtggtggtcatcggcgagactggctccggcaagagcactcagctctcccagatcctccaccgccgcggatacacccgtcggggtgccatcgctgtcacccagccccgccgcgttgctgcggtttccgtttccagaagagtagctcaagagcttggtgttccacttggggatgaagttggttatgcaattcgatttgaggacagaacttcagaaagaacatgcataaaatacctcacagacggcattcttctccgtgaaagcctttcaaatcctgagttgaagcagtactcagtaatcatactggatgaagctcacgagcgtagcttaaacactgatatccttttaggtttgatgaaaagattgatcaaggaccgagcttcagatttaaaagttttaatcacctctgcgactcttgacggtttaaaagtttcaaagttcttctcaggatgccctgtgttaaacattcctggaactttattccctgtggagaaattttacagcactgatcgcccaacaaattatatagaatcttcactcagaacagctatagatatccatgccaaggaacctcctggagatgtcttaatatttatgacaggaaaggatgatattgacaagatggtatcaaaattggaggaaagaattcgaaatcttgaggagggctcctgcatcgatgctcttgtccttcctcttcatggttctttgccacctgagctgcaggttagagtatttgctccagcacctccaaactgccgacgcttcattgttgcaacaaatgttgctgaaacttcgctgactgtagatggtgtcgtgttcgtgattgattgtggttatgtaaagcagcgccaatacaatccatcaagtggaatgtattcacttgatgttgtccaaatcagcagagtgcaggctgatcagcgagcagggcgagctggtagaactcggcccggcaagtgctataggctatacccaatttccatatatcagaatgagtttcttgaggcaacagtccctgaaattcaacgctcttctcttgctggaagtgttctgtatctgaaatcgttaaatcttccagacatcaacatactgaagtttgattttctagatccaccatcacgtaagataaaacttcagattctttattcttatagtttcaatcattcttgtggacctgtctgtatgcacctatttgttgcctagttacttattttgtttggagttcgatggctaatttctttttttctcgaacacgcaggagagctacgtatcattatattaaaagaagaaataaacaaggtctaaaatagaccggggtacaattgacgccttacggcagcctgaacgacactaacatagactgacttatctatataactctaggctacatgagagagggaagcaacaagggaggtcaaccccttggccccggcagtctcccacagacggcgctcatccccaacatggattaggaaattagcaatattaggggaaaggccatcaaagatgcatctgttccggtgattccacaaaatttcaactgactgttttctgaagcattgcaaaattatgttattactatgaagtccagtgaagaaactacttttgtgatgactactcatgtcacttttgaattgttacacgtggttaggggaggaaacctcttggaggttgtagttctgatgggtggtatggtagggtgatgggctttgttgctggcaactcgtgatggtttttccagccttggtgaacattggcagtggctacagcttgggcaggggctggtggcagcgcaaaggagagtgagagggaactttaaggcaaaaacacttttctggttaatccatatggatacatccaaaagatgttatatatatgatccacccttcttaattcaattcaagctttcgccacaaagctctcttattctctaatactgataactttttggcggccccgaattggaggggtatggaggttgcagcatgctagccgtaccctctggttgctgcaacatgtagatgtaggtggtggctactgcctcttgggttcagctgggctgcttggcccatgggcattatgccaaaaacataaatgtgtaaaagtgtacttacagaagacataaatggccaaaagggggagctatttggtgccttgaaataaataaaataaaaaatatgttctttggcttctgcctactatttaaaatttacaaatgatttgcaggtgagtcattagaagatgctttgaggcaattatacctcattgatgcaattgatgaaaacggacaaataacggatgttggacgagttatggcagagcttcctcttgagccgtctctttcaaggactttgattgaagcaaatgaattgggatgcctatctcaggcgttaactgttgcatcgattttgtcagcagaaataacattgcgatcacaaggacgtggtggatggaaagaggaaaaggcaggagctccctgatgggtctggctggggtgaccatatacaattgcttcagatatttgaaagctgggaccaaactggctatgacacaaaatggtgctctcatcatgatttgcaggtgcggggtatgaaattgagcaaagatgtgaggaaccaactatgtcagattattcaaaaaattgcaaaaggttcaactgatgtggatgcaaggaaaagccggaagaatgaccctgattatagaaagctgaggagagctctctgcgtaggatatggtaaccagctagctgagaggatgctgcatcacaatggctaccatactgttggctataggacccaacttgtacaggtgcatccatcttctgtactggaaggcgatgagtatggaaagtttccaatgtacgttatttatcatgagctgataagtacaactcgtccatacatgagaaatgtctgcgccgtcgagcaagcctgggttcagcctatattaaagaagctcgacaaattagacataaacagattaagtggtggttcgagtgcaccgggagattctgaacttctgggagacaataagcaagtgaactcgtcaaagaatgacgtgggtgtaaaacaatcagaggtggacagtaaaatccaggcagctcgagagcggtaccttgcacgaaaaggcaagaaatgacaatcgacacgtttaactgatcgctcagcatccttctggtcagcctgaagcttctctgaagatcataccgaggaaccattcgtgttattgtgggtggtgtatgcttcaacgtgcacaaacaagagaatttcttatgtaatcttttgtttgaggactctaaccttttcttttatttggcattactgtgatgtgaccttttccttgggccgaaatattttacaggcttttctgcatgggctagattcttttcccccatattcctatatggtgttgtctgttgaggtcttgtccctcctgcctagcatatgttgagtcccaagcaaggcaacaccgcaatatgatgcgatcttggaagtgatactgatatgcgctctgcttgggtttctctaacaaattttagagtcccgctctccctccctccgttccaaaatataatttgttttagattaattacacattcattaagtaacatatgaatataatttgtatgtatattcattatcatttgaatgaatgtggacaaaaaaaagtgggctagaaggaa

SEQ ID NO: 39663 - DNA, 2693 bp, Zea Mays
atggctccattcggcgacggcggtgtcggctgtggcgatggaggggaggcgctgcgtgggtgggaccctctgcgcagtggcagcgcgccgccaacgatggagggcgcggcggcggcagcggcggcggcggagaggagggtatttggcggcggcggtgacggcgcgtcgttcttctccgggatcgacgggctcatgtttggcgcgaggatggacgaggtcagcaggtgccgcggtgccgccggagctcaggaacattttggcaattctacatctttatctgttggaccatctggccaactgtttaatggtgcaggagactgggatgaatggcagtttggaccgagcacagttcatagtggtggtgctatggcaaactatgcatttgatatgaatctcctttggacagatatgaatccagacaatgctgaatatcacagaaatatccagaatcacttcatgtcaaacattgaaaacatgaatgcttatggtaatagggatcttgatgcttcctccatgtttgattctgatatttcagatgctttatctgggttgaggctgtctaataattcagtaatggatcaaaggaataatagggaagagctagcagatgaaatactcgagcgtcaaagagatttctctaaaactgttgatgaaacccgatcatctttggttggtaatgtttttcatgcacctaggtcagatgtgcatccatcacgaatatatggagatggtattttacggaggcagaccagtgcatgtgcattagatggttccaatgtttcaaggatcaatcgccatcacataaagggtgttgatcgcccatctttggctgaccagctagctataatgcaatcaggcaactttcctagagggaccaatctttctcgcaatgtgtctgtgactaacatgtccaaccccatgagcaacagatacaacagcaatacagacctggatttggctaggagtcgaatgacattttttaaggagatacttgcacaacagtatctgcaggaggataatctgtcatataacgatagtaggatctatcatgatgagccttgttttccctgttcaagaatgcaaagatctggatctcatttttattcaaactcgcggtgcattctatcccatggtgatcggcaatcacggctcttgtccctcaataggaaggcaatgggtagaaatattggatcacatgcctatcatgataatacattatcaaactacctggatgtgctttctttggataatgcagatagaaacggtgctgattcagtggaactgattgatttagtgggtcacgttaaggaaattagtatggatcaatatggaagccggtttattcaacaaaaactcgaaattgcatcactggatgaccgggaaaaaatatttccagagatattatccaatgccattgctctaacaactgatgtttttggcaattatgttatccagaagaaaggcagttaatccaattggcagatcaactcaaaggtcacattttggaactcagcctccagatgtatggttgcagggtagttcagaaggttttggaggtagttgataaggatcgaaagattgacattgttcatgagctcaggaatcatattctgaaatgtattggtgatcaaaatggtaaccatgtgatccagaaatgcatcgagtgtgttcctgaagaccgcattccatttgttattgatcctatactttcacaaattcttgttttatgtacccatcaatatggctgcagagttattcagagagttttagagcattgccatgatcctgtgactcaaagtgctaccatgaatgaaattgtgcagcaaaccttccatctgacagatgataaatttgggaactatgttgttcagcatgtgttgaaacatgggaaaccagaagagcgttcggccatcattcaaaagctctctgggcaagtggtcatcttgagcaagctaaagtatgcttctaatgtcatcgagaaatgtttggagtttggaactcttgaagaacgtgatagccttattggggagatcatttcttctggtcaaacatttcaggaattgatgaaggatcagtttggtaactatgttgtacagaaagtccttaagacatgtgatgaaagatacctagagatgatcctctcgagcatcaagttacacttgaatgaactgaagaattacacgtacggaaagcacattgtgacacgcgtcgagaagctaatcgttacaggagaggaacgagcaaggatggcctccctgagcggccagcgtcagcagcagccaccaaactgtacagctgtcgacgcacactaatccttttttttatgcattggcgtcaaatgcgacggcacattggttccttttaacgcattgtggcgtcaaatacgagtagctagatgagagctaggtttttgggcactgtaaattcttttggccatgtgcaagttcatttacagtggataatagatgtacattgtgctggagcgttcgttagctttggtatggtaggtgatcgagagcagtgctgtgtaatataaatatactcttgttgttcaccgtacgacgtacagttgctcttttgtagcactgatctcgtttttcattcatatgtaatctctaattcattcgtaaggctgctttcaagttccaacccttgtcttaatcagcgccacattagtgatcaattgtgctgtc

SEQ ID NO: 39664 - DNA, 1185 bp, Zea Mays
gctggactgcctatttgacacaccagccccatacgttgccttgggcaatcgagctaatcaatctccgtgcaattccacctcccgaagacccgaactgagtccctccaccgacccaaaccctagcgcgcacccacctccctccccctttcccggcgtgcggtccggcgttggagatgcgggcgctgctcgcggacggcgggatggcgctggcgatggcgccggaggttaacgagtcgtcgggcggtgctgcgttgtcgcaggggctgttatggtgggcgtcggagtgccacggggtgttgtacagccttgcggtgatgctgccgtcgctggccttcgtgggattcctagcatggcaggcgcggcggagcttccgtaggatcagctacggccgctctcacgtcgtcgtcgtcgcgtactacgcgctcctctgggtcgtcgccgtactcaacctcctctggtgcttcctgcagactatatatgtttttggcttcggtgttcctttgttcattgatgctgatcaaggaactggtgggaaatggggcctatggattctccacaaacttgtgcttactggagtttatgggttgattgttttcatgcatcattcaagatggagaaacaggctgcctgcaaaaccagcatactacaactatgtatgtgcgatgttgctattgaatggtgtatcactgtttggatgtttccttgttgcaagtggagctggatttggtttatggttatataatctcacaatcgtatgctatcattcgctttaccttcccctcctatatgtgactttcttagcggactttttccaggaggaagacatgctcctagagagcgtttactattctgaaatgaaggatgctgggttctttgatgctgactgggattaatcggtggctactgcgctctatgaccactccaatgtgaattacgatgtgtttctatctgtgtactctcaacgtagaacagaaaatgtatgtagctaaccgtggtaatgaatggaaatatgtaaatattactggcgcatacttcagatttcaagtgatttcaacactgagattgccaccccaacggttggtgataagttcacgtcagaaagtgctatagcgtgtttggtttgagggtattcccttctcactcctcattttcttatttggtttatagaatgaaatgaattttctt

SEQ ID NO: 39665 - DNA, 3037 bp, Zea Mays
cccgcccgcccaacctataggcgagaccggagagtgccatatcccgcgacgccgcagcatccgcttgactccactttatgcaagtgtgcctccggcgaggcctctcgctagttcggcagcacacctcccgcgtccttcccccactgtctctccaccctacccgcttcttccttcaccaatccgcgtccgacccgatgggtgagggttccgttcctggtaaggacgccaaggggaaggggaaggccaagcaccccgcccaggcttcggccctggtcgctcgcgacgactcctacctggaggccgtcacacataagaggattcgcttgttcgaggagatccaggcaaggcaggccgtcgagcggctgaatatcggcggcgaagttatcaagataactctgcctgatggtgcaatcaaagaagggaagaaatggataacaaccccaatggatattgctaaggagatatcaagtggatttgcagctagttgtttgatagctcaagtggacgaaacactctgggatatggggaggccactggaaggtgactgcaaattgcaaatgttcaagtttgataccaatgaaggccgtgacaccttctggcactcaagtgctcatattcttggagaatctcttgagagagcatatggctgcaagctgtgtattgggccttgcaccacaagaggggagggtttctactatgatgcttactacaatgagctgacattaaacgaggagcactttggtgtcattgaaaaccaagctaaaaaggctgttgcggaaaagcaaccatttgaacgcatcgaggtcagcagggcagaagctcttgaaatgtttgctgaaaataaattcaaggttgaaattattaatgagttgcccgaggacaagaccattacagtatacaggtgtggtcctttagttgacctatgccgtgggccacatatcccgaatacttccttcgtcaaagctttcgcttgtctgaaggcttcatcatcatattggagaggaaaagcagaccgtgaaagcctgcagagagtatatgggaatatctttccctgattctcgacgtctcacggaatataaacattttctagaggaagctaagaaacgtgatcataggatactagggaaatcacaggaactcttctttttccatgaacttagccctggaagctgtttcttccttccacatggtgctagaatatataacaaactgatgaactttatgcgaaaacagtacagagatagaggataccaagaggtgttgagcccaaatatttacaatatgcaactttgggaaacttccggacatgctgcaaactacaaggagaacatgtttgtttttgagattgagaaacaggaatttgggcttaagccaatgaattgtcctggccactgtctaatgtttgctaatagggtccggtcatacagagagttgcctcttcgcatggctgatttcggagtgcttcatagaaatgagcttagtggtgcacttactggtttgacacgggttagaagattccagcaggatgatgctcatatcttctgcagagaggaccaaatcaaggacgaggttaaggctgttttggaattcatcaattatgtttacgagatatttggcttcaaatatgagttggagttgtctacgagaagtatctaggtgaaattgaaacttggaacaaagcagaacaacaattgacagaagctttgaatgagtttgggaagccgtggaagattaatgaaggggatggtgctttctacggtccaaaaattgatattggtgtgtttgatgcccttaagaggaaatttcaatgtgcaaccttacagctggattttcagctgcccattcggttcaagctgacttattctgctgaggatgaagcaaaaattgaaaggcctgtgatgatacacagggcaatcctaggttctgttgaaaggatgtttgccattcttttggagcattacaatggcaaatggcccttatggctaagccctcgccaggccattgtttgttcagtatcttctggttcagtggaatatgcgaaacaggttcttgccatgctacatgaagctgatttccatgttgatattgatgtgagtgacaggacaatacaaaagaaggtacgggaagcccaggtagctcaattcaactacattcttgtcgtaggcgcacaggaggccgagactggaaatgtctgcgttagggtaagagataatgccgacctggccacaatgagcgttgatggcctcatcacacgtttgagggaggaaatcgtagccttcaaatgattttgatgctgcataatttcctagcacttcgcaatcattgactgttcatttgtgattttgattgagttttcagggaacagtactgagttcctccaaggctccaagtgtattcttgttggtacggttggaagctactaagggcatatttagaagcacctagtttttaataaactggtttataaaaactgagatggttccaaacatatcggtttatatcctagtttttaataatctggtttataaaaactggatttctagtttcttaaaaattaagaagctagtctctcttagctaaaaccaatttatgaaaattaaggtagttctaaacatcataaaccaatttttttcttcataatccagtttctacaaactagagataaaaactaggttgcttctaaatagggtctaaacattgtctttttttattaattatatagatgtgaagttaaatgctacctatagtaaaaagttcctagtaaatactacctgtagtgtcaaaacagcttgttgtatttgactttgcatggtcttaaacatatatattgaccactaaattcttttgtacaatcttaaaatgatgagatcatatgcaacttacatgttcttaaactgttttttttggaaatattgatgtttgtatagttttaaaggtttgatgttatataagattttcctgaccgggaggaacatattagttttatgttatataaatttctttgtttcttttatttagaagctatcgtgtaccccct

SEQ ID NO: 39666 - DNA, 1963 bp, Zea Mays
ataacatctcggcaagaggagacaggaggtcggtagtttagttttcagaagccaaattaaattaaaggctgtctgtctcactcactcactcactcccagaagagagaagaccacaccacacaaacaaacacctctttggtttctacaaatagaggacgcactgccactgactgagctacaccggtaaaagctgccaaggatatatatcccaccagtcaggaatgcccgcaaccagacatttcagtacataacaggagctgaacaactaacgtacaggctgacagcagcagatgtatcatcagcaacagctccacacccataaccagcacctgtcctcgtcaaggccaggcttacctcctgagaagcagttcctcctgcacggagcaggcggcggcggcggcggcggagatgcagggctcgtcctctccaccgatgctaagcctcgcctgaaatggacacccgagctgcacgagcgttttgttgaggcggtgcatcagctcggaggcccagacaaggccacgccgaaaaccatcatgaggctcatggggatccctggactcaccctgtaccatctcaagagccatctccagaaatacagactcagcaagaacctccaggcccaagctcatactgccagcgcaaagaatgcgttggtaggctgccggacgggagcagacaacgccctatgccaagggagtgcttcaccgccgccaccaccgccgccgccgcacctgaaccttcagaaggtgtgacacggttcggtaatctggcaggtcaatgcacataagtgaagccctccagatgcagatcgaagtccagagacggctgcatgagcagctagaggttcagagacacctgcagctgcggatcgaagcgcagggcaagtacttgcagtccgtgctggagaaggcgcaggaggcgctggccaagcagagcggcggcgctgacgagacgacgacgacgacgcagcagcagcagcagttgctgctgccggatctcatctcgagagccacggcgacgaggcgcggcaatgtccagcaggagcacctccaccagcagcaccacctcggaggcgacgggtcggtggacagctgcctgaccgcgtgcgaggggtctcggtgccagagggagagggaccaggacctgctgtccatcggcctctcgtccgctccgcctcccactcccactcccagcagaggctacaacgacagaggaggcggcggcagcgccagctgcgaggagttcctgcagtttcttgacgagcccagcagaagaggagcaggaggaggagggtcctcggatgagcagcaggagcttgacctcagcatcagcggcggcaggagcaatccaaggcctcgcggcagccaaagccaaaggatcgacctcaacggatccagctggaactgaatggtcgtccttttagcaatggtctccttcctcgtagctttagctgcagtagggaaaatggccagggtcacagcaggtgccctgtgtgtgggtgcacttccatgccctgcagccatttgcagcaaataactaagcagtgactgatgatgatggtgaattggcatgcgagaaagagaacccagatgcacgttctcctttgacgtctgattagttaactctatagatctgtattccagacatggaaaagtacactgctgagatcctctcatcagtttcaggaatgtacagaactcgcagcggatgcacacgaatccatgctgctgcttctgccttggcccaccagtcagtaagctattcctcgctcggccaagccaacacaagcgatggaaatatccagctcggagctcgctattccactgtagcatgcttcttgtttcgtttgtctgtgcgtggccatcttcgtcccactagtcgctttctgtattcttttcttcctcttttcaactgcccattgctggtttgacacacaacgttgctctgtatttctggaataata

SEQ ID NO: 39667 - DNA, 2273 bp, Zea Mays
gttacatttccacggctcccaccagcgtgagtgcgtgaccagccccaatgccctccaaaccctagtccacagctcctgtaccctggcggccatgccggatctgagcaccagctacctccctcccttccctgaactgtccctcgatgcgggggccctcgccgtcgaccacgcggggaatgctgcagccgccgcctcggccgatgcggcgtccgcgtacgcgtcttcgtctgcctctgtgggcagcggcgtagacgacctcgttattccagcggaatgccggtggaagggccatgtccgcaccttcgacatggcgggcgcgggcgctgtcaccacttgccccgccgcgcggcgtggcggcgggaagaagctgtcactgattccgtcactcgagccggcacggacgcaggcttcagcatcggctccgacgctcgaggaacgcgtgagcgagtgggcggctaagaaggcagcggccggcgttccgactcatcactgcgtgctgcctttcctcaccggggcgccaatggcggtcgaatgtcgtttgtgctccaagattatttatgttggagaagaaataaaatgttcagttaaaaagtgtccacaaatgttccatctcaaatgtgttgcggaagatacttcaaactttaccgttgaaagcttcaggtgccctcaacatgggtgtatggtttgtaagcaaaagatgttcttttggcgctgcggacgttgtacagttgcagcacatacgaaatgtgcaccatggccagtggttcacctaaaaaatgatcaaggaagtgcaatttgctggaggcatccttctgactggctgctgcaaaataagaatgctgactttaccaacagtgtagaggaagtattttgccggctacctcttccatatgttaatgaagacttaaatattgattcaatcatcagggattatgctgaggctgtttataagccacccccctatacatctatcaggcgcaatgtatatctgataaaaaagaagcgcactggtgttcgcgtggatattgggtgcacaaactgcagggctgattctacttgcaaagaagactgtgaatgcaggggtctttctatgagttgttccaagaattgtcgctgctcagatctatgtacaaacaggccattccgcaaggataagaaaattaaaattgtgaagacaaagcgatgtggatggggtgctgttgcgttggagccattggagagaggtgattttgtaatcgagtatgttggtgaagtcattgatgatgcgacatgtgaacaaaggctttgggatataagacggcgtggtgacaaaaacttctacatgtgtgaaatcagcaaagattttacaatagatgcgacatttaaaggcaggttgatggtgagacaagagttggtgtctttgcctctcgttccatcgaagttggagagcccttaacttatgattacaggtttgtgcattttggagagaaagtgaagtgccattgcgaagcagtgaactgccagggatacctgggcagccaaataaagaacccaattcaaagcattcttgccactgtagcaccgcaagtgcagttgcgagagtattcgcccatgcaccacgaagctccaagattgaagccaataaatcacttgttaccctggaccaactgtatagaggtctcttttaacctgagaagcaaaaggaaaattgaccggctatgctgggcccgcaagaagaagagaacatccctcgtgccatcttcaacaagcatgccagcatcgccgagtgaagttcctgccgcggatttctaactgcccttcgttgaagagcaagcctgccctgtataataatttcatggtacattctttacatgcattggttggaaacgattctttcacattgctcatcaatggtgttgtaacctgcaacattctttatttggtttcatagggcattcagtcagtttacgggtggtagtttgtcggaacatgtacccaatttttctgatgaaacaaatgtttgagcttcatgtaatgttggctgctgttttttttatgcgagataatgttatgaaactggatagtccctgtaaacatggcttaaaacatgacagaattattttcttttaggagaatgctaccccttttattttatgtacaaggaattgataaaaagagcagaggtcctagcggcctaggcgtgcgagagcctagagcgcatatctaatcatcagtttaatataaaggcgattaacgaagacacggaacttactgtcctgtcttgattgagttct

SEQ ID NO: 39668 - DNA, 2731 bp, Zea Mays
catctccctccgtcctccgatgggcatgctgcctccctgcatcccgactccatgaccgccgccgccccctcctccactcacacgctccgacacgccttcctccgcattccccgatgttcccctgccacgatacgctccgcctccgcatacctcctcatcacccactacttcgcctcctccactacgccttcagccccgaggcccacccgccgccgcaacacccggccccggcagcatcgcacgccgccgagctctggatcgctaaggcactcgcatcagctgccctcttccgtccgcactgcctcccggccttccgcggcctcacgccctcccatcttgctgccgtggccgcagttaggctcgcgccgtgcgctgggtctgccctccgcatcttctccgccctgcactccccgccgctctctgtacccccttctgagcagtcctacatccacgttatcgcgtttctatgccggtccggtcgccacagggacgcactcaagctgttcgaccaaatgatggatcagtcggggtacttacccgaagcagggttcttctcgttcgtggctggatcctgcaccaatgccggccttcttgatgccgcatcgactttgctcacaaagggctcacggcttggttgctgcattgagccgtatgcatataattacctcttgaactcgttaattgcccatggccgtgcgcaggatgctgttgctttgtttgagagctggattcaggacgggctatattctcccgatgtctggagttttaatgttgttattaagggcgtgtgtcggatggggaatttccagaaggcacttgagttagttgaaaggatgactgagtttgggtgttctccggataccatcacacacaatattcttgttgatgggctatgcagggcgaagcaggtgaacaagggccatgaggtattgagaaggctccagagggatggtgtttgcatgcccaatgctgtgacatacacctcagtaatatcaggttattgcaaggctggcaagatggaggatgcaatgtcagtatataatgacatgcttgaatctggaacaagacccaacacggtcacatacaatgtgcttattaatggatatggaaaggctttggacatggaatctgcagtgagaatgtatcggcagctgattctccgtcactgccctcccgatgttgtgacatttagttctttgattgatggatattgtcggtgtggacagcttgatgatgccaagaggatttggaaggagatgggtctgcatcatattcaaccaaatgtgtacaccttctccatcataatacactcactttgtaagcagaacagatcagcagaagctcttgatattctaagggaactgaatatgcgaacagacattgctccacagacatttatatataacccagtcattgatatactgtgcaagggaggaaaagtggatgaagcaaacttgattgtaacagacatgaaagagaaagggtgtcatcctgacaagtatacatatactattctaataattgggcactgtatgaagggtaggataccagaggcaatcacccttttccacaaaatggtggaagctgggtgtcgccctgacaatattacagttaattcttttgttagttgtgttttgaaggctgggatgcctaatgaggtagatcaaatcatgcttattgcttcaggtcatggtttagctagtcagaaagtttcttctcaacagagccgtagactagatatttcagttgctgtatagttgaattgtgctacaataaagaatgtagagaagagacctgagctgtctcagatagtcagatgcttattgcagcatagaactggtcaggggcggaactagaggcttttattggtgtcatttgacactgatagattttggaaaaccaatgaagaaacagtataatttactgatttacggtgtagatgatactatcctgtaatggtgatgacaccggcagctttattggctggcttcgcccctggaactgggacttctctagatgaggaaaggcgtggaattcatctaagtaaactcaggtgtgaattttgagatattggttgcaccaaggctacctaactatcaaaaagtagtcaaaccaagttgatgctgtgtaaaaatgacaaaggtaagctatttgttgcactgcacattcagtgaagtggctcgcttagtcccacgaagaggagtcaaacaagtgtccatagtgctgctctgccgctgtggtgctacaaaacttgcacacaagaatgctggacacactcctgttatgtaaacattatatccaagcatacgttctgtcagtctccttgaccttttgccaagattcaagagcagctacatttgggagattgttaactggataatattgaattagcatatgcagacccattgcttgaagaattgggttgaagtaaatttactctctagtagtggttctgcagttgtattctttctttagaagcctcggtgcttgaaggattcgatggaagtaatttactttctagcagagttctgtggccagcaggtgagtacttatattggagcaatggatgattgtttcaaacaagacagtctcccaagctaagaagcaacgaggagagttcagtaggttggtgtggttcaagagtctgcaatggaaagtcactgcaagaacctttttcttgcaattggacgaaagccctgcataaagtaattgcagaaaaactgttctggct

SEQ ID NO: 39669 - DNA, 1577 bp, Zea Mays
actcgcagtcgcaccacttgcacacgggcggccaccgcacatcagcacttttacgagccctcctatctctcgatttctcgcgcagcggccctccccttctctcgccgccgccgccgcgtgttccgtcgtctcctctcaccgatggcttttgctaaggtcggtgctgcgacgcaattggagaacagaggcgcgctgtcgaaaaggttacgcaacgacgtgtctgtaagggagggggactggaattgtcctcagtgtggtaatgtcaacttcagttttagaaatgtttgcaaccgtggagcctgtggtgcaccccgtccatcaccgagtccaagtccaccacatgaaagggagacttttgcgattatgaaacgccgcggatgtggcttcgacgaaacggaggcgttggcgagggtttcgacgatatgaaaaaccaggggacagactccactctgaaatagactgacaatcgatattagccgttgagagaacgaataaccatcctccgtccgtgcgccgttgtcttctcctgtctccttcattctccattctacggatcttctcccgtctccttcttctcccgtctcctacggatcttgcctcctgcctgggagatctccttgcctgaacctcagcgtcggacgcaagcttcgtaccaacgccctgctggtaccgcaacgggccattgggcggggcgccgcaacgcccttgttcgtctgtcccatctccacggcaccacgcccttgcacgtcttcgccttctccatggatgcatcagctgcggccaccgacgtcgaggtcgacgagcagtcccccctagtagtggaaggcataggcttgtcttcgggtgtgaatgtagaagacgaatctgtgtttgattgggcttctatggttctcagtggtttgtgggaggaggaagggagacatgatgttcctagtgagacgcaaatgtattcgcaacttggactaattgaagagaacgaggcagaggaaaatagaagggatgaagccttacgaggtggtacaactaattttgatgaatcggaccatgttgattcaggagaccaaaatacaaaccaaccatgtgaggactacctaccggacgagaagagagctaagtatgataaaattaatccctcaatgcagccagtttgtttccgaacatgaaggaatttagaattgctatgagacaatatgccataaagcatgagtttgagcttggaatcgatgtgacttcgactactcgatatgttggctattgcaaagctggtgattgtccttggaggatctatgcacgggaggaaaagaaaggattacctaccatcgtggttgctgtcttgcatgacgttcatacttgcacatctagtggcaagaggaagacgacaacaccaagtagtggatgggtagcatttcacgctattccactaccaatgaagaaaccccaaatgggtgctaaggagttgcaagatatactacaaggatttcataatatctgaattttctgggaaccgaaggagacaaatggttcccagttttgttcccagaatacagtttcaatagagaaaatatagcctgaagaac

SEQ ID NO: 39670 - DNA, 377 bp, Zea Mays
gaactgacaacttttttgagcatttgatcttgaacactttgctttattgacttggttttgcagctatctggttccaaaatacgagcatgtatcacttcagcatgtttcatgcctcccatcacttggagcccattatagcaactgaggacgaggtaagcgcaccctctgataagatcaagtatctttaaaaacttatagacaacctgctggataaattgcaatgctaatctcacctgttgttccattcaatatttttcatttttgtaagagaggcataagctttgaagtagacagaactgattatgtgtgtggagtcgtaggattgaagtagtatgaacaaacaataatcaagatattattaactagtgacattcctt

SEQ ID NO: 39671 - DNA, 3000 bp, Zea Mays
gacagcctacaacccagcaggcgccacgagccttacccccttgctctctccacccacccctccccatcaaacggtgctgggcgtcctaggttgcctcgcccttcacccgtcgtgagtttgacactctccctcccggacctctcgtccctgccgttgcccctgctggcccaccttgccctggggcacgaccaccgactcactttgccgccgatccatacgccggttcatgtccgaccaacgaccgctaccctcctcggatcccgtccaccgccctccccgcatcctggccggccgctgctctcccgccgcaggctcccgttcggcggcccgcgctccccgcgaacggcggctggcagcaagccgctggcggcgcacgacatctccacgtccatgtggcacgacacacgtctctgggacgtgctgctccgatgcggtatcaagggtgccgcggacagcgtcaccaacgtgtgatttgtggcgccgaggacctccccggtggggtcgacgacaactgcaagtacgacaccagcctgcaacgcatctcggatctcggattttttgccaccaatcagcaagagcggcaggagggagcagagctggagatggggcggtgctggtgctgctgccggtgcctaaagctgctctgcttggttctcctcccaccgatcagcttgtgcctcggccgcagctgctgctccaatctgtccccattctcatcgtcgaagatctgctctgtcttctatggtgcctagagtcagccttcagggagagaccgctcccgcaggccaagaagtcgtggggctccgagattgccagtagcggtggccggagctcctccgatgtttccacaccatatgctacaacgttttgtgcttccacgccggatgccacaatagacaagctgaggaagaaaggttaaaattgttgagacaaaggatatatgtaccatatcactgctcctctatcaagcatcgggttctcattctgtatatagttttaccattattacatccattttccttatcaaatgaatatccattttatccctaggaagaatgggataaatgttattaattaggtacgtgatattcgtgaaaggcactgtgactttactatatgaatatgctcaaatcactttaacataaaactctttatataacagatggtaacagaactgttacttatatttcctccaaccattctagacgatttaccctacaatctttcagttccttcattaatacttttcttttcaattcatgcctgatttcctatacaacacacaaatgactatatgtactaaggatagaaataaaactgctacttatgttttatagctccacctagtttagaatcatagattttcctccctgtgcaagcattatattattgtttttttggattggttaactaacagttctcgatgagtatttgctgcaaccactgttgttctttttcctttttaatctattcaaggattgctagtggccgaagggcactgccaccttcttttgcttttacgtgatgcaaggccattgttatgtattccatgtttattattacttcgaacatggctagaatacaatggttcagcatcagcttaatccatggaaggtatggggttggattgtcctcagctgtttattaatcctgtagcacgtcatttactgactattgtgtttaaatggggaaggatgatggagatacaataagcacgaaagtcattattaattttagccttggcgctatatgtttgttagccgaggttacattgttcttcttttggaatagacaaaaaaatgagagccttcactgttgtttatttagtagaggttgagatcgtatttcaaattattaagaacactactgttttagattctttcaaatattcatacgtttgaaaaaactcgcattctccatgattttttggtcatagagaatgtaataaaattttggtaaatagcattgatactcacatactatattattttcctttgtgttgaggattaatgcaaccacagtgttgtggtttgaacactaatcgagaaggcctctttactgttgtctagatctgttataattttcatttacatgcttccatacactttaatattagtaatacaattgtagttagcagattaaaaacttagttaaacatatgtgtactcacgtatttattgtttttctgtacatcaaggattcccatggacatgtggttgtccattgcacatatattgataggaatgttcagctcctttttaggtccaccacatatatatcaatggaaatgcaatgtagatatttaagtagtgagtacataaagcgcttaaaggtgccgttgctcaagttgcagccggaggttgcagctacacaggacacaaattcagtgtttctaagtagataaaagtagtaatggatgaacgaagagggacataacagatggtgtcctgatacgcacttatcttatcgaggaagaaaagattcaggacaggacgaatagaggagagcagtgtgaggtgagctcgaggatccaactctgtctccacgatcgctaggtgtgaaattctcgggggtgtggtgagagtgaggagcatccagctctttatctccacctgctgctggtgtgagtgtgacactgatgatgatggggtaactgttttcaagtcgttcgaataatcacgattaattgtcctagtaggtttagatcaatcatgattaatcgtccaagtcgccgcccaagttcgttagtcagaacgaccaacaagtcgtccgacttgaaaacaatgtggtcacactgtcacatggcatcagcctttaccgctattgttggtaaaggttgttggctaagtcgctatgctcctggtaaaccggattatataatctggattatataatctatacaaaataagctagactatataatcgtgcaagaaaacaaacaagccttaagtatacaatacttaaagtaggaaagctcccatttcaatcttaaactctacc

SEQ ID NO: 39672 - DNA, 527 bp, Zea Mays
caggaattagggttaggggttttttccttctctaatctttcctacgcacttgcctgctcacctcttctttgtcttgaagattgccgccgttctacacttcccgcggccaatgtgcttgccctcgttcgccgtcagtgcggccttcatcagccgcccgcgcagcccccatccgttacccacgtgcggggcctccatccgcggcatccgccacccgcgagcggccctgctcgacgcccacgtgcgactctgctcgccgcccgcatggccccatctgctgctcacgtgtggccctgctcgacgcccgcacgtcctccatccgctactcgcgtgcggccctgctcgccaccctcgcatcgtcttgtcaaccgccgacacagtcgtgccagttgctcgccgaaacgtgcagtttcactcacccgcttatgctctacgatcggattgaagcgcttccatatgatttggagatacctttctggagctctttgcaaggttcttgatacgcaagagcttcaattggttaatttctt

SEQ ID NO: 39673 - DNA, 1075 bp, Zea Mays
taatgtccatatgtttttccctgcagctgtcatagaggaggacaacgattcttatatacatacaaagggcagacccagtgctggaagctcccatgaaaacaaaaaaggccttgaactactgaaggcggctatagaaaaggctggctacactgggaaggtgttcattggaatggatgttgctgcttctgaattcttcagtgagaaggacaagacttatgatcttaatttcaaggaggagaacaacgatggttcgaacaaaatatcaggtgacagcctgaaagatctgtacaagtccttcgtttctgagtaccctattgtgtcgatcgaagacccatttgatcaggatgactggaccacttacgccaaactcactggtgagattggacagcaagtgcagattgtaggagacgatcttctcgttactaatcccacaagggtcgccaaggccatcaatgagaagacctgcaacgctcttctcttgaaggtgaaccaaatcggctctgtgaccgagagtatcgaggctgtcagaatgtccaagcgtgctggatggggagtgatggcaagccacaggagtggcgagacagaggacaccttcatttctgacctctcagttggcctggctacgggccaaatcaagacaggagctccctgccggtctgagcgcctggccaaatacaaccagctgcgcttaggatcgaggaagagctcggtgttgccgcagtccacgccggagcgaagttcagagcaccagtggagccctactgaaccacgtgtgcctagagcctggagaaagaagatgaggatgtttccccactagttcgctgctgctttttgatagaatgcctgtacgatcacagtaatagaagtttggccttgtttgccgaatagctacactagtgggtttttttttctcgtggaaaaaaagaaagaaataaaacctttttttattctgaggagtgacgactgacgagtggtggtccgcactcgtggtaatatcgttgcccaaaatgattttgatggaacgggaaaatgttgctggtctttgccatatatgagtaggggatccaaatgtttc

SEQ ID NO: 39674 - DNA, 2796 bp, Zea Mays
ctgcaggccggagggctgcacctgcgtcaccgcgtctagcggagcgggacatctcgcccgccacagccgctacatcgtcccctactaacggcggcgcgacacccttcagttttagaccgaaaccaatggcctccggcggcgcaccgccgaccgttgccgtcgctgtgcgccccggcggcagcggcagccgcctcgccgcgcggtgggtggccgcgggactcccgggcaacgggcgcgccaccgcgatcactgtcgtccacgtcatccccgagctctcctacgagccttctccgacgggggagcgggtgccgatgccgctggtgggaagggagccggcggaggcgtacgcgtgggaccggcgcgcacgcgcggaggaggcgctgctcccgttccgccgcctctactgctgtggcctcgcgaacgtcaccgtggagacggtagtggttgaaggcgacggtgtcgcggaggcgctgctgcggtacatacgggagtccggcgtacggagcctggtgctcggctcggcgtccttccgctggtttcggagggcgctgagcatcccagatgtccccggtactgtcattcaagctacgcaaaattcatgcaatgtatttgttgtgtccaaacggagactaattatgaaactcgcaagatatcctcaaacgagtgagtctaacagaaacttgaggatcgagtccattagtcatgaaacatttgcactatcacacaggagtttactgtttgacaactttggtgacgatgaagcacaatcagattcattctcccagtcccacagctcacatagtgcttccaatgttgtttcaagttcagaaagttctgaacaagttgcttcaggaagttcaggagtaaattatgcagcaaccgaaggaagtaagaactacgattctcttagctcctggggggaagatccttgggttgcctcaaactccagcgaagagtgccaatctacggatgatgtgtccaaactaaggaaggagctgcaggaaaccttagtagtctatgataaagcttgtgcaaaccttgttagtgttaagaaaaagattcaggtactttctatcgagtgttctgaagaggctaggaaggtggagcacgcgctagagtgggaggaagctttgaagcagacggtgtctgatgagaaggcgaaacagctcgaggtcatcagtgaagtcgagcaagcaggaaaatcattcacccgagaggcttattcaaggtacaagacagaaatggctgccagcatgatctgtcaggataaggtgcagattgttgatgcgattttgacaaagagcagaagttgcaggcggtattcgaagagagatatagagcttgccactgacaacttctctgaagaaaggaagatcggtgagggtggttatggcaatgtgtacaggtgcaccctcgaccacactgaagtagctgtgaaggtcattcaggaaaactccattgacaaaactgatgagttcctgaaggaggttgagattcttagccagcttcgccatcccaacctggttttgttgcttggtttctgtcccgaaattggctgcctggtgtacgaatacctgaagaacgggagcctagaagaccagctcttcaacagcgaagggtgccaaccactgcactggttcctccggttccaggtcgtcttcgaggtgtcctgcggactcgcattcctgcacgcgagaagcccagagcctgtcgtccaccgcgacctgaaaccggccaacatcttgctggacaggaactacgtgggcaaggtcggcgacgtcggtttcgcgaagttcgtctctgatctcgtgcccgactggcagaccgagtacaaggacacgatcgtcgccggcacgctgtactacacggaccccgagtaccagcagaccggcaccgtgcgtcccaagtccgacgtgttcgcgctgggagtcgtcatcctgcagctcctgaccggcagacgcccggacgggctcgttgcgagcgcagagaacgctgtgagaaacggcaggctcgctgatatcctcgactggtctcaggctggttggccgcttgccgaggcagaggtgtttgccaggctcgggttgagatgcgcggccttgaggtgcagggacaggcctgaccttgagtcggaggtgctgccggagctcgacgagatcctgcacaggattacttttgctgtcagtttgagaagccccaaactgacgagcgtaccaagccacttcgtctgccctataacacaggagctgatggaggatcctcacgtcgccgcagacggccacacctacgagcattacgcgatcagagcttggctcaagcggcacaggacatcgcctgttacgaggagtaagctgcagaattcgtccgtaatcccgaaccactcattgcgcggcgcgatacagcagtggaagtcacagttaccggctcagacgaacgagtgaaacgggagtcagggtgccctctcttcttgattcaactgttaatggtggcgaaattattttggagagcacgcaaaaggcctttgcgtttcggtttttgtaagtggttcaaagctgtaaatgaaaaaggaggcagctgtaaattgaagcgcagaatcacgaaggtcgattttgtaactggagtgctaggttctgttgccatagtattggtcatcagttttggaacagagcaagcttaaaagttttttttttgctatttattactccccctctctgaatactgttctgcccaagcaccggcagtcggcagacaaagttttagtgtgtaaactaatatcacatactaacatatgtttttggc

SEQ ID NO: 39675 - DNA, 1127 bp, Zea Mays
gccgtccacattgtatagttctttagctgatcctcaatgttcagttctgtaggatatatgcatgtatgatcaaaatgagtacttggtagaaaaaataacaacttgggatcgagccttgatgagcccaaatgctctctctatgtccatttgtgtgccctcatggcatccaataaacattcacatctctagagtctacgggagaggaatgatcttcacaaacattggccactaagggatgggtgatgtagtacccttagttttgctcatgtccattcaccatgaatttcacatttggtgcttctcccttgatcacgttagtgaacaacgatgattagttcaacacgttgataacgttgtttgaccatgaatccaaaaaagaatgccaaatccataaatcatacaaggcaagtgcctcaaacatgatggtttaggatctaatgtacctcattgtaaactgccatttctattcaatgggacagttctgccactttttatgcatgaaatctatactttctctataatgccaggaaatcccctctctccttggctaaaagtcgcctaaatcgtcaatagtggtacgatgactatactcctcaccaaaatatgaaataacacctctacaaagatgtttgaggcactctaagactaagctttttcctaatttgatataatcatcaagggaatcaacaatgttattgtaggcgagcatgtagaggtcaacagtgcattttttgattggggagagaccattgctattgaatgaataatttctaagagtgaaatagagggaatgttcacccaagctctctaagatttgaagaaagagactcctccgcatgtgatactttaaacgcaagtagagcgaaggctagacatatgggtcgttgaagtagtttgcatcaactgatcatgggcagcttcacgaccctagttgatgtagctccgatgttgcgtcctacgcctcctccttattaaagacatgcatccatcatagtttgatgtagcatatcccatcttcgatcatctcaacgtctgatctcaatgaaaacatgacgtcaatggtttggtggagtgaaacaagagcgagaggagtgaaatgggaagtggtaggagcggataggacaaag

SEQ ID NO: 39676 - DNA, 2898 bp, Zea Mays
cccaagaataattacctaaaaagaacttaggagcccaaactgtaagagcccatctacgatacagcccacccatcaaagtccagccggagtccagactcgccgagccacgccgacgccgacgccgacggcgcgagggagcagacctaaacctccgaaactcctctccgccgccgcacctgcagcaatcatgtcgcagaagaaatcccgcagccggggcgggggaggcggcgccgccgcctccggcgacggccacgaggatctcgcccgcccgccacccctccaggcggtcctcctcgctgacagcttcacgctgaaattccgccccatcaccctcgagcgccccaaggtgctgctaccgctggtgcacatgccgatgatcgagtacacgctcacatggctggagtctgccggggtggaggaggccttcgtcttctgctgcgcgcactcgcaccaggtcaaggagtacttggagaaggccgggtggtccggtaagtccgggcccgggagcatggccgtcacggccgtcgagtcccacgatgcgattagcgctggcgacgcgctccgcgtcatctacgaccgcggcgtgatacacggagattttgttctcatcagtggtgatacagtcagtaacatgagcttgaaggacgctctccaggaacatatggatcggaagaaaaaggacccacttgctgttatgactatggttataaagcattcaaaaccttctatcttgacgcaccaaacccgtcttggtaatgatgaaattgttatggcgatagatcctgagacaaaggagttactttattatgaagacagggcagataactcacacttgcatgttacaattgataaggatatactgaccaataatcctactctccagctgcataatgatatggaggactgctacattgatatctgctctccagaagtcctaagtctttttacagataacttcgattatcagcatcttcgccgtcattttgtgaagggcttactagttgatgatattatggggtacaaaatctatactcatgaattacgctctggatatgctgcaaggattgataattttaggagctatgataccgtgagcaaagatgtaattcaaaggtggacatatcctatggtgcctgatgtagtatccagtcgtgattcctcggagagtagacttcataggcagggaatatacaaggcatcagatgtaacattgtcaccttctgcacaaatcggtgcaaattctgttgttggtagtgtgactagtattgcaggtcactgcaaagttttaaattcagttattggacaaggctgcaagattgggaaaaatgttctgattaacggctcatttatatgggacaatgtcataattgaagatggatgcaaagttagtaactctttagtctgtgatggtgtccatctaagagctggtgctgttgttgaacctggttgtgtactgtcatttaaggttgaagttggaaagaatgttgttgttcctgcccactcaaaagtttcattacttcctcagccttcaaatgaagatagcgatgaagaacttgagtatgctgacactaactctggaattgcagatagtccaccattttccagtatgaggagtaatggtgatcaagcaactgttccttcagaagaagatgagttgggaacatccgagactggcacctgtggtgttgtcggttacatatggacaagtgttgatagtgggatcatggaagaatggagacaatcaattgcccctattcctaaagaaaagcttgaagagctgcagcatgctgtgcctgatgatgataggtcagaagatgaatccaacaatccaactctaccagataaagatgattcttcagacagtctggttgaggatgatgatcatatttctaagtttgagaaagaggtggaagagacattccaacgagctctgggtggcggcgttaatcgagataatttgatactagagattaatggcctaaggttagcctacagccttcaacatgcagattgtgctggagctgtgttctattctgtcatgaagagtgcattactggctgcacaatctagtaatgatactcttttgaagacaactgctgatgcacttggcaagtggaaggatcttttgcgcaattacaccaagacagttgatgaagagatggagatacttttaaagtttgaggaaatgtgtcaagagaccacaaaagatttttctccgctgtttccaaagatcttgccatacctctatgatacggaggtagtaagtgaagatgcaattttgagatgggcggaagagaaagaacatgctgatgagtctgataaagtttttgttaaacagtcagaggcttttattcagtggctcaaggaagcggaagaggaggatgacgaagaagaggaataaccctggagttgagctggcactcgaattctttcatgcattgtgagcgcaggatctgatttgagtgggtctctcgcaaaaatcgaaggacgatgaaaaaaccagaagggccctgggggccaaaagaagaggaaaaagccggcaggagtagcagtggaaggttgcacttgcactgctgggctaagcaatctcgctgtgcgttcgcacatcttctgcagcatgtgctgtttcgagtttataagctgcatactgtgactagtgtgcattgtttaatgttggtgatggttttactatgaccatgagaagagaaagcatgcagttttcctaatactgtttgacctttgtaatcttctggtcgtaaagagttaccgcggaatcacactggacaattcgtcgataagaggaatcgcattttggacttgggatgtgttctgtgcggataagaggaatccatctttagttctggttctgacctcacagccacgctggtcgatcgagat

SEQ ID NO: 39677 - DNA, 1559 bp, Zea Mays
  misc_feature (1)..(1): n is a, c, g, or t
naagcttcagccggtgctggcaatgatggaaggctgagtatagaacacaccagatctatggccccaagctctttgaccccctgctctgcgctttctattcatgtaataaataagaacggcaatgaggatgctttgcctgtctgccttgaagcgaggcctgtagaacgtggtgctggagatatgattggtgttggtgcgctttcaacaaaagaaactgagataaagtgtataaaaggtacaaaaactctttggtcagatcgtatctctggaaaggttactgtcttggctggcaatgcaaatttctgggctgttggttgcgaagatggtttcctgcaggtttacacaagatgtggagtgcgagcaatgccagcaatgatgatgggatctgcagctgtttttattgattgtgacgactcctggaaattgcttcttgtcacaaggagaggtctaatgtacatatggaacctttatgacagggcctgcattttgcatgactccttagcttctttggttgcatctccagatgagtcatctgcaaaagatgctggtacagtaaaggttatatctgccacattctcaagatgtggatcacccttagttgtccttgccagccgtcatgcttttctttatgacatgagcctgaagtgctggttaaggattgctgatgattgttttccagcatcaaattttgctagctcgtttagtttcccacaaggtggggagctaggcaagttgcagattgacataggcaagttcatggcgagaaagcctatttggagcagggttacagatgatgggttgcagacacgtgcccatctggagaaccaacttgcctcttctttggctttgaagtctgcacaggagtaccgtcaatgcctcctatcttatgtacgatttttagcaagagaagcagatgaatctcgtttacgtgaagtttgtgagagcttcctaggtcctccgatgggcatggttggttcggcatcacctactgatcccaaaaatctagcgtgggaccctgatgttcttaagcacaaacttcttaaagaagatatacttccttcgatggcgtcgaaccggaaagtgcagcggctgctcaacgagttcatggacctcctgttagaatatgaaacggatgtcacactgataccgcaacctggaacagaaggcaatggcaatggcaatgacaaggtgatgacctcgtagctacccttgacatgctcagtacagttgctggagagtggagactcaccttccgggtaggtgtgtaggattagtttggcgcggatatggagtgtccaattggagaggtgcttatgtgaatcaattagttgtgcatgtagctggtagactatttattaaggtgaccctgacccccggcaaaaagggaaagggaaggggaaaaaactgtaacgctgagtgtaacagtagaaatggaagcgaggttcgcctggtgattattgtgtcagtgtcagcagtctgtaaaaggacggatgaactcgtgtcctttttcattccaaggcagtattggccttgatagttttttagttgaggctgtgttt

SEQ ID NO: 39678 - DNA, 1215 bp, Zea Mays
tattgaggatggtcacttgagctaacatatatttcaaacttatacttttgtaatcactccgataaactaatgtgaaatttttgtaacctgtaaaatttggtagtaagatttccggtgcaacaatattggtgtgtgtgatttgtgttacttaatcccgcgttctggttgtaagtggtttatctgaggtccttggggcactcggacggatcctgttaagttatttggtgcacatgcatagccgtctgaggtctttgagacaaagacaggtgcatgtgggcctaataacttgggaggttctgccacagtttcctttgtgatattcaagtttgaacttgaacaccgatataattaatcgtctgcgaccggtttagacttagtaaagagtacataaggttaaagaataggctacgtaaggaaaaacattaatgcaatgacggatgagttttgcttgaactctaaaaacagattttttgtcacaatatgcaaatttggaccaaattgaagcgaatcacattcacgaaaatcgtcagcgtgtgatgatttagagagagagagaatcatgcaaacaaaacacgacagtcgttcccaccattcaccgactgtcatgaaagccgcaccaatatgcaatctatcaatcgccaaatcctcccctgaaagcgtgaggatgcttgtatcctttgcagcacttttaaaatgccaaaagagaagttcagtttaagtaggctttctaatattgcatcatcagaatatatcaggggccttttagttaccaagtcttgtcaatatataacttagttacagtttgcaaataaaagtatgcactcgtatctctaacttttaagatatttgtttatagttttcagtgtcgatattcaaggctatttaggcagcatagttcaagagtagtagcaacaaaatatgggaagataaacaatttttatgtagacgctgctcaactacaggtcatgtccgaaagaattccttacctttttagtaagtactgatgagacgttttcttctgcagcagcctacgacctgattcctctctagcagctatgtatgctctcttagcttcttcttcaccctctgcaccctccttttcaagcattgagttgtatagttctatctgcattaagacaaaagtcctattaaatatccaatgtacataatgatatgtcattcaaagatgtttgcatgagaatttctttgtctaaa

SEQ ID NO: 39679 - DNA, 403 bp, Zea Mays
tattacaggttatctatgacaaattgacaggaagaaactgtgaattcgggttgtgaccgtgtcttcgatcgaagaagttgaggcggttgctgagcaatttaatggctatgtgagttcacttcagctcttctagagctatgcacattcttttgctgtcatagtggaccattctcctgtttacttacaattgtaaacttagcaatactctatgaattatgtgatgttcatcactcatggcttcctaccagatcacacattgcataaatgaagttcaacgttaacggttagtcttcagggattcaaatagaacatttgtattctgtttccttgattgagtatattccgttacagaatgtcatgtacggccgcacttacaggcgccgtcgtgacgccaggagggctg

SEQ ID NO: 39680 - DNA, 4066 bp, Zea Mays
aaaatttctggctcctgtcctccgccctctccccctcgaagcgatagatagaataggggcgggcgccgggcggcttcctccgtccacagccacagccatcgccacctccaccaccacctccttctcctcctcctcccgcatctcctcattgcaaaacctcggttcattttcctgtcgcgatctagggtttccggtcgctgcggcgccaatggcggactcgcgccgcacctggtcctgggacgtgtcggggttcgagccgccgcagccggcgacgacgcaggcagcgtcggcaccgaccgctatgccgcgggctccgccgacggccatgatgccccgcccctccgctggggctccccgcgcctcggccggcgcagtgcccgttgccgaccagctggaccagctcgtggacagcgtccagcttgctagagaggactgcttggagcttagacaggaagctagcgacctccttgagtattctaatgcaaaattgggccgtgtcacccgttatcttggatttcttgccgacagaactcgaaaattagatcaagctgcccttgagactgaagctagaatcacccctttgattcatgagaagaaaaggcttttcaatgacctattgaccttgaaaggcaatgtcaaagtgttttgtcgttgtagaccactatttgaagatgagggtccatcagtactagagtttccggatgattttagtatccgtgtaaacacaggagatgaatctttaaccaatcctaagaaggattatgagtttgatagggtatatggaccccacatcgggcaaggtgaacttttccttgatgttcaaccatttgtgcaatctgccctggatgggtacaatatttctatatttgcgtatggtcaaagccgttctggcaaaacacatacactggaaggatctagtcacgatcgtggtttatatctgcggagctttgaagaactgtttgatctttcaaactcggatactacttctacagcacattttaacttttattttactgcctgtgagctctacaatgatcaggttagggatttgctatcagaatctagtagcactgtcccaaaagttcgaatgggggtccaagaatcctttgtggagcttgttcaagagaaggttgaaaatccactagagttttctgcggcactaaagatagcacttcaaaaccgatcagtaaattcgccaaaggccatggtttctcacctgatcattaccattcatatacactacagaaactatgtaacaggggagcatctatacagtaagctttctctagtggatttgccagcaagtgaatgcttgcttgaagaagatgccaacagggacaatgtaacagatttcttgcatgtctcaaagtcactttctgtgttgggtgatgcatttgcctctttaagcgcaaagaaggagcctgttctatatgggaattcaagaatcacacaaatcttagctgactctctaggaagtagctcaaagatcttgctgatcgtgcatgtaagtccaagtgcttcaaatttgtcaagaactttatccacactcagtttttctgcaagagcaagaaatgctgagctgagccttgggaatcgtgacacaataaagaaatggaaagacgtggcaaatgattcacgcaaacaattgcatgacaaagaaaaggaggttctagacctgcggcaagaagttattgggttaaaacattctctaaaagaggctaacgaccagtgcatacttctgttcaatgaagttcaaaaagcctggagagtttcatcttcactccaagctgatctcaagtctgaaaatttaatgcttgccgagaagcacaagactgagaaagagcagaataaccagctaagggatcagatttctcatcttttgaaagttgaacaagagcaaaacctaaagatgcaggaacgggatttaacaattcagtcactacagactaaactcaagtccattgagtctcagcttaatgaagccctcaatgctagcgatgctagatcaactattgggtctgaatctgcttcagtaatttcttccccaaagataacagaatcaactgctgactcatcttcagtgacgaaaaggcttgaggaggaattggcaaaaagggatgcccttattgagaaattacatgaagagaatgagaagctttttgacagacttacagagaagtcaggattaggaagtgctccacaggcttcaagcccttcagcaaacaagccagctaatggtcaaggaagggagataggcaggagtgacagcagcaaaagtcgatcaccagatgtgtttgcatcaccagtgtctcaggataaaactggaaacagtggagctattgtaaaatcaagcaatgagctagcaaaaactacacctgctggggagtaccttacgtctgcactaatggattttgatcctgaccagtttgagggatttgcagcaatagctgatggtgctaataagcttttgatgctggtcttggctgcagttatcaaagctggtgcagctagggagcatgagatacttgccgagatccgtgatgctgtgttttcattcattcgaaagatggaaccgaaaaaagttatggatactatgttagtttcaagagtcaagatattatacatcagatctttgcttgctaaatcacctgaactacagtccatcaaggtctctccagttgagcgtttcttggagaaatcaaatactggtcgaagtagaagttctagtaggggaagtagtcctggcagatctcctgttcaccaccatggtcatggttcccgaactgcgcttgttgatgaacatgtgcatggtttcaaggtgaacattaaacaggaaaagaaatcaaaattctcctcaattgttctgaagcttcgtggtatcgaggaggagacatggagacagcatgttactggagggaagctccgggaaattactgaggaagctaaggccttttcaattggaaacaaggctttagctgctctctttgttcacacgccagctggtgaattacagcgccaaattcgtgcatggcttgctgaaaactttgagtttctatctgtaactggtgcggatgctgctggaggagccgcaggacagcttgaactgctgtcaaccgctattatggatggctggatggctggtcttggtacagcgcagccccctaccactgatgctttaggccagcttttatcagaatacacaaagcgtgtttacacatctcaactacaacacttgaaggacatagctggcacattggcaacggaggaggctgatgatcctgcacatgtcagtaaactccgctctgctctggagtctgtggatcacaaaaggagaaagtcactgcaagaagaccctgatgatcctgccccacagtctaatgcattgggagagggcgaggtttcacagtggaatgtactgcagttcaacacgggaacgactgcgcctttcatcataaagtgcggagcaaattccagtggtgaactggtgattaaggctgatctgcgagtccaggagcctaaaggtggcgaggtgatccgtgttgttccaagaccaacagttcttgcggacttgagttttgaggaaataaaaggtgtgtttgagcaattgccagaggcagttagcttgcttgccttggcacgaacagcagatggtacaagggccaggtattcaagattgtacagaaccttagccagcaaagtgacggccttgaaagagactgttgcagagatggagagaggtggtgttttcaaagatgtacgataaatgctgtgttattgtagagttatttatgatattgatgttgtatatggatgccatttgtcggcatcccttgtaactgtatttgtttttactatgtggaaacctatgttgtaacactattctttggcaagagatgagccttgcctgccccaacccgtaatactatggttgtgcaaggcattaatgtaaattgtagctgcagctgataaatgtctgcagtgctgcaagtctgaactttccaggttatggaactattcaatgtttatttgtattaagcttttaagatgttaaaattgtgctagtttt

SEQ ID NO: 39681 - DNA, 1609 bp, Zea Mays
cgagatctcgcgtggactacctcacgaaggatggagaagtttggacatttagcgttagatcttctgacacgtcgctcccagatcgaatcattcatgtgaactatgatggctttgctgaagatgtcaaagctggtgatgaactatttgcggacggtggaatggccaggtttgaggtgattgaaaagttagggccagatgtgaagtgccgctgcactgatcctggtctgttgctgccacgggctaatcttactatatggcgcgatggcagtgtagtgcgagagaggaacgctatgcttcctacaatttcgtcgaaggattggattgacatagattttggaattgctgaaggtgttgatttcatcgccgtgtcatttgtcaagtctgctgaagtaattaatcatttgaagagttacattgctgcgaggagccgtggaaggggtcattgcaaagattgagagcatcgatgctttgaagaacctggaggagattatccgtgcatcagatggagtaatggtagccagaggggacttgggggcacaaatccccctggaacaggtcccttccatacagcaaagaatagttagaatgtgcagacagctcaacaagccagtcattgttgcttctcagcttctggaatcaatgatcgagtatcctacacctactagggctgaggttgctgatgtttctgaggcagtccgccagcgtgcagatgctctcatgctttctggtgagtcggccatggggaggtacccagagaaggctctcagcgtccttaggagtgttagcctgaggatcgaaaggtggtggagagaggagaagcgccaagaggcactggagcttcaaggtgtctcgtcttccttttctgacaagatatcagaggaaatatgcaattcagcagctaaaatggccaacaacttaggagtcgacgccgttttcgtttacacgaaggatggctacatgggctccctgctctcacgatgccgccccgactgcccgatcttcgccttcacgtcttcgacgtctgtcaggagacggctgaacctccagtggggcctcatcccgttccggctgagcgagtccgacgacatggagagcaacctcaaccgcaccttctccctgctgaaggccaggggcatggtgcagtctggagacctggtgatcgcgctctccgacatgctgcagtccatccaagtggtgaatgtgccctaggaatacgatccccatgtccagctggttccttgacctggaatgtagcatacaattaggaggggcttctttttttgtttgtttgtttgtcatttgagtgtatcccagttcgtagcatgtttctgcctcatgttgaggctctctggatgtcgatattgatttgcgtcagtgtggtttaggttcggactcgaatgctcgatttgaaaattcgaacagaactcggtttgcatcagtgtcatgattaactcaaaccattgttctgtactatatcagaacgtgttactacttatcttagtgtcattcctcagtttcacttggttttttttaaaaaaaatattgggaaaaatgtgcccagtaatctgggaacatatatcatgtgctgatgtgcagtcagtcctgttga

SEQ ID NO: 39682 - DNA, 221 bp, Zea Mays
ggtacgcttattaatcacgagatgtggaggacaagagccgagtcgaccccaagatgacgtaacgggtggactactccgcatagtgaagctaatggacgaatctgaagatgggcagactgaacaagtaccaacacaaaatgctgatggccaagtggtcgtcacctaacaaacactaacctagtgttatccacgcaagccccggtgcatttgccacctccttg

SEQ ID NO: 39683 - DNA, 3343 bp, Zea Mays
caattttccccatttgccattcccgacgagcaccttcaccgtctcctcccagtcccacctcgcgtggcacgccatggctttctccccgcgctcgccgtggtcgcgtgccaagaaaaccgacgtctactcaaccttcgttgtccacggcgatgacgatgaagacgacgcccgcggcggcaggggcccctccacgcgggcggaggaagacgaggaggaagacccctcctcgctgcctccgcttcttcagcggctccccaaggactttggcggcgcctcgttcgacgacgacgaggacccctactcctccgaccctgacgatgcttccctctctgccacggcggccttcaagagcggcgtcccggcctccggtcgatctccgttcctggatctgcggcgctcaagcccccgcgctaccgatgacgacccgtactctaccttcgtcgttcattccaccacacgctcggggagaacctcctccagccctcgcgggtccgcctccggcacattcatccgtcgctcgggtggctcgtctagccctcgcgagtccgtctctggcacattcatccgccggaccggcagcccgtcgagccccgggaagtcagcctccggcacattcatccgccggccagggagcccgtcgagcccccgcgggtcgttctctggcaccttcattcgccacaccagcgggggctccagttcccatgaatctgcctctggcggcggcgggggtttcgggtcctctttctggactccagcggtggagcagtcagaggagctccggcagccatcgcctctgatgcagcaacaacagcaacaacattcaaggcggaagccatcggtcagctcggtgccagacagtgttaccagggaggatccttccaccaagtacgagctgctccatgagcttgggaaaggttcatatggtgcagtgtacaaagcaagggatctcagaacgcaggagcttgtggctgtcaagatcatctcattaacagaaggggaagaaggctatgaagacatacggggagaaattgagatgctgcagcaatgcagccatccaaatgttgtccgctactttggaagctaccaaggagaggagtacctatggataattatggaatactgtggtggtggaagtgttgctgacttgataggcatcacagaggagcctcttgatgaatcccaaatagcttacatttgtagagaagcactaaagggccttgcttacctgcactccatttttaaagttcacagagatattaaggggggcaacatccttctaactgagcaaggcgaggtgaagttgggtgattttggtgtagctgcccagctgacaagaaccatgtcaaagcgcaacacgttcattggtactccacattggatggcaccagaggtcattcaagaaagtcgttatgatggaaaggtagacgtttgggcattaggtgtatctgcaatcgagatggcagagggcatgccaccaagatccactgtgcatccaatgagagttatcttcatgatatctagtgaaccagcacctatgctggaggataaagagaaatggtctctcctcttccatgattttattgcaaagtgtcttactaaagaccccagacttcggcctgctgcaattgagatgctgaagcacaaatttattgagaagtgcaatagtggagcttcgaaaatgttggcaaagatcaaggtagcgaagaagattagagccacactagctgtgcaaaatgagctgtctgaccctgacaatacaacgcaagatgtgccttttcgaataaatgaggactatggggaaactgtccctacaagttctcagcaacacatgaaacatggcacatataatgattgtcaggcaggtgattttggtactatgattgttcatactgaagatggggacgaagtgacagaatcacccattttcccaagaacagaattcatacccggccttggtagcatcaattctttcacacatgatccaaagagagcagaacttatttcaagtttttgggcggagaacataggtgatagtgatgccaataaagaccgagatacagattatggtcctgacatgcaggaatcaaaagtgatctcacctttaactggaacagtgaagaagaatattggtgcagaagggactataaggtgccatgataatcaaattaacttgtcaccaggacttgcaaacacaacaactaaattgaacaacagcccaagccgtaaagcgttttcagttcaggataagctctggtcaatttatgctgccggcaacactgtaccaataccatttcttaaggcaattgacatttcaccactagctctagtatcagaaaatgaatcaggaaatggcctggctgggtcaagtacaaatgatgctttggaggcagttagggagctgttcagtggtgatgggcaggcaaagaaaggacggaaagggcaaaacgaagtatgcggcagattcttttctttaactcttgcagagtaacttatcttttaatgattgcagagggaaacttaggccgttcttagtgggagtttcattctcattaaatgacataccacctaagcaaacaggatgacatggcatgcaattcaatgaagggggatatgagtttcatactttcatgaggatgtatctagacctagacaaatgttgacttgacagctttggaaacagtgcgatggaactatccattgagaatgaccttaggccaatttcagtggggagttctctaacacagttgccgggactgccacgccaacttttgtgtctgtgccaacgggtttcatccgataaaactccctctatctctctccatagttaacctggtccctcttcctccgggtgtgcatcacaggctgacgacaagccccacattgatgaacctggcccaagctctagcttatcataaaacgtgctatgaggacatgccgctacaagattcacaagcgacgcaagagcagcaaacgatacaaaatctttgtgacacacttcgcacaatactgggttgacacaggaatctctacggaagtggaaatttctgtccctgttaatagcctcttggagtttcactatgtagagacggcatcaaattttgctaatcagattttgtggcactaacgcatattgtagcctggttttgtatcgttgtcaatgcatttgttctccaaataaagagaaatagttaagcagaaataaacgaaaagttatttatgttggctattcgaaatcatgggaggcgtgatttctgctgtcttgaccccgtattccttgtgtctggccattgtacgccatgcttcgtgttgttaagtgtcagttttttttagcgcgcgtgtgaat

SEQ ID NO: 39684 - DNA, 2637 bp, Zea Mays
atgtttatctcttgcgcgctcctcttcttcctccctggcgctcggtcgcttctctctggtctccacgcgcaccgcgtccagctccctcctccagctgtgtctgctgctcgccccagcctggagcttcgctcggcttccaactccggcgcccggccgagctccctggtaccgcgcccctacttctccttcttccctgccgcgtgctgagcgctctgctccctagcgcggccctgctttcccaagccaagtccctctttctctctctggtctatgtgccgcgcgtcctggccaagctcccagctcagcgcccagcttctctgcttcctgacgcgcgcgcccagctgagtctgaccccgtcgtgagctcgcccctggcgctcagcttcccgtccagccgcgtgctcctccctgtgccccagctcggcaacagctataagctccctggaaccagcgtctcgtcgagccccgccgcacgtcctgtttccttctcacccatggaagctacgcccagccttaatccccgtcgcgccgtgctcctccctctgtccctgctgcgcgcgtcgagctctggtgattttcctccgcgccctgttccttgcttgcccctgtgccgtcactcagctcgccatggaggttgtccgccatggtactctgcatcccgagctccctgcgccggatccctttccatgcgtgtcgcgcaagctcctctgttgggctcgccagcctccgttgtcctatccacgccagcacgcgactgtggtcgtgttcatcgagttcgccaacactctgttgccgattcgactatcgtcgctgttgcgtgcctcactgcgtgctcgccggggtgtcgtctattgtattcttacactcgccttgccgcttgtgccaacttcggccatcgcgacgtctgctccatcccggcaccctgctcttgtgcttgcactacaagaaactgataaatgttcgtgggtaaaattaagaacgtgggtacttgagttaagttcataggttaagttaagaacgtgggtacccacgttcttaagttaagttcgtaggccctggataaaaccgtcgaacttaacgagttaggaacgtgggtacccacgtttttaagttaagttcgtcgggcttgtggacaccgtcgaactttagaagttgtttggtcgactgtttttcgcccgtgatccatttgcaccgtgatttggtcccgttgttctgcgtttggttgggccgacccgtttccaatagcgtcatgaccggatacggacccgtagcgtctgattaccgctccctgcactgcgtgaatcgatcccgctccccacgccgcctcgtgtgaccggaggacgagagccctagctgcaagacgaccgccgccctgcaaggaccttcgacgacgtgctcatcgccggtgaggaccacctcttcctctctcctctcccctctctcacaccttctccatctccctgttgttcaataccaccaccgatggggtcgctgggtcgccgggacgccggatctcggagtggagggcgccagcaggacgaatgccagggagggggcctccgtcacgacgagctttgacaggctccacaacccgccgacggccagaatctcgctccgccaccgcggctacagggccttcgtgtccgtcccgggggtagcagccaagggtgatgtacaagttggaacttcacttgtactggccactgcacatggtgtatcacaatacaacagatcccttctatagaatcacctgatataagcgtccaaaccaatcacccttctctagaatcgtcttgcttagtccaagagaatacaacagatccattacagaaattcactgctactactcaagattatttgctccagatctattactcaagattatttgccagatcatcttttgcagctcccaatctcagctcccactctttatcactttatatggttggagcctggagaatatgcaccagggctatcccaaagaaacacttgtgcgtttccttaaggctagagagtggaatgtagcaaaggctcataaaatgattgtagaatgtttgaattggaggattcaaaatgaaattgatagtgtgctcgagaggcctatagccccagtagatttatacaaatcaatacgtgattcacaacttattggcctgtcacgatacacaaaggagattcttctgtacaacttcgatggtggtacaatttgttcagtggttattttgaaagaatggcttggcatccatcgcgtcgctgctgctgaaatatctaaaggtctcccaatttttggcattggtgttgggcatagcacatatgacaaagcttcggctatagctacagccaaaatcataaaagtgcctggtttgaagctatcagcactaagccaaataaaggattccggctctcatcaagtgactccccctcatgttgactttgcggatgtctcaattctagtggtggagctacgaacaacaatccgatgtcctgatcgagagcgatggagttaatgtttgaacttgtgtgtttgaacttgtgaactaaaaatgtgaactatggatgtgaacttaacttgtgtgtttgaacttgtgaactaaaaatgtgaactatggatgtgaacttgtgtgaatttgtgaactta

SEQ ID NO: 39685 - DNA, 3131 bp, Zea Mays
tccttcctgatacattcgtgtctcccatcgccaggtagatccctttcctcacgccacgccgagagagaaaagatagagggagaggcaagagtcgcatcgcagacccagaccacgccgccgccacctccgccgccacttccgccggtgatcgagtcgcgtcggcgctaccttcaagctagaagacaataagcatcggcagacatgttcggctccaccaacccatttgggcagtcgtccacaagcccatttggccagacctcgtttggaactccacagggatttggccagtcttccactgctgccaacaatccttttgccccaaaaccatttggcagcccgaccacagcttttggggcacagaccggaagctcgctctttgcaactacatccactggtgcctttggccagcagcaatccactcccgcatttggcacaacatccactggtgcctttggccagcagcaatccactcccacatttggcacaacatcctcatctcagtttgggagctctacaccagccttcggtgcatcccccactcctgcctttggtgccacatcctctggatctttgttcggacagaagccaagttttgggggttttggatcatcttctagccagtcaagtccttttggtaacacgttccagcaaacacaaccaacatttggcagcagcacttttggttcatcaactccgccggcgtttggtgccacggctcctgcatttggcacaactacaccagcctttggcaccacaactgcaccagccttcggtgccacgactagcccagcatttggttcaacttcaacatctttatttggtgcttctagcgccccaatgtttggttcttcagcctttggcacatctgctactggttttggaacttcagggactacagcatttggtgtgagtagtactactccgggttttggatcatcaagcacaccttcatttggcacatcagctagtgcgttcagttttggttcgtcaccatcttttggacaaacagcagtttcctctggtagcactccctttggaacaactccctcaccttttggtgcaccagctcctgcgtttggctcacagacagcagcaccaacttttggacaaccacaatttgctaatcaagctggaggaaccagaataaaaccttattctcaaacaccagatgttgacagtgctactagtggtactcagcctgctgcaaaacttgattccatatcagcaatgcctgagtacaaagagaagagtcatgaagaattgaggtgggaagactaccagcgtggagacaagggtggaccgaacacttctggaactcaaacattggcacctagctttccatcaccaatacaacataacacttttgcttcgacaagtaatccgttctcaacgaacccattttcaacaaacaacccgtttgctcctaagcccactacaactactagttcaccattcaacacctcatttaacaatgcatcagttgcaagttcgagtctattcacatcatcccctggtaccacaatgtttgggcaaccaggtgtttctacacttccagctccagcaacatttgctcaaccgacatcaagtacaccggctttctcctctgggagcctatttggctcaactaatcctggcagtctgtttaccagcagcggtccttcacttttttcaacaccaacatttcaaccatctgcccctgctcagagttcgaacatgttctccttccaacccccaattcaaccagcagcttctaccggtggactcccttttttccccaacacaaatcaggccttgacgggacagccaacttctagcctgtccagtatggtcatgcagtctgctcttgtttcaaatccatttgggatgcttccagcaatgcctcagatgtccatcgggaatggtggatcttcaccttcagttcaatatggaatatcaagtttgccggttgcggagaagcctcttccaagtagatcattgtccatggcggttcctaggcatttgtcacagagaaggataaaactgctgccaagaaaatataatccaatatctgatggcaagaatctccagcaacaccaaaggcagatgcttttttcatccctagagagaacccaaggaacctggtaattcgtccaattgagcagtggtcttcacggagagaaactggccggcaatatactgcaaagaatgttactgattcgaacaaatatgaagatgcttccattgaaagtgagcgtggtaagtctgccatgtcaccaagcagcaggccacctgcagtggaaaatgacaaacagcatgaggccagggccatggctcaacatgcgaatggaaatggtacttcagttgagaggctgttgcctaagcttccacgtgcagattacttcacagagcctagtatagaggagcttgcggccaaagaacgtgcggagccaggctactgcggtcgagtgagggacttcgttgtgggtcgacatgactacggcagcatcaaatttttcggggagacggacgtgaggtgcctcgatctggagtcaattgtggagtttaacgaccgggaggttattgtgtacaaggacgatagcaagaagccccctgtgggcgaggggctgaacaaggctgcagaggtgactctactgaacatcaagtgcgtaaacaagaagaccggggagccgtgccagggggcaagagtggagaggtacagggagatgctggtgaagaaggcggaggagcagggcgcagagtttgtgtccttcgacgctgtcaagggagagtggaagttcagggtgaagcacttcagcgcctacgggctttggtgaaatcctggggagttaagtagtttgtttgttctgatggaacaacgctttacgctcttgtcaattaccatgcttggatctgttgtgctgcttctgtacaatgttgctgctgttaaaatgcttgcaaattgcactgctctgctgctgaaaacaggagcagcagtagaaactaccgcaacaggagggcgtgctacctgctactgttatgtattattattattatactatattctaagtataataagacttagttttttaaatacatgaatattactttatgcacttagatatatgctatgtatggagagaaaataattatat

SEQ ID NO: 39686 - DNA, 2466 bp, Zea Mays
ccctcccctccaaaaaaatctccatcggcatgggctggcacatacagtaacagtagcctagcctccagtccacctctctctctctctttctctggagagagacgcgcaagagaaagaggggggaggacggagggaaaagaagcagaaaaaaaagtaacaaacaagtagcagtagtgaagaagcagaaccgaagggatcggatcggaggaggaagtggtggtgagtggtgacagacagccagacagaagagaagaagaagaagaaggagctgatgacgcaaagagatggggaggaaggatgcagcgcaggcggcggctcgagtttgagcagctgcgtctgcgtgcagcaggaccacagctgatcgagccaagaaagcagctgctgcgtcggtggcagtcgccgaagcagcaggtgccaaagcgatcgagctgctctctgtccgtgctggtccccgtccccctcgcctctctagtctccactccacctcctctcatccatccatccacccacccaattcggcagcagcctccgccgccacactagctagcactagcagtaccacccgcgccgctagtcgctaccagctagcgactgaatcccagcaaggggggaccgggccaggatcggaggcgggagatcgaccgacccgagtagagtcaggcagcagctgcttggcgcggccgcccgcccatggaggacaccctcaagtcgctgtccatggactacctcaacctgctcatcaacgggcaggccttcagcgacgtcacgttcaacgtggagggccgcctcgtgcacgcgcaccgctgcatcctggccgcgcgcagcctcttcttccgcaagttcttctgcggcgccgagcaggccgccgccgggcccggcgcgctgctgctggaccacctcagcccgcgttccccgtccggcacctcctccccgcgcggcgcctccgccgccgcgccgggcgccgccgtcatacccgtcaactccgtcagctacgaggtgttcctgctgctgctgcagttcctctacagcggccaggtgtccctggtgccgcagaagggggagccccggccgggctgcggcgagcgcgcgtgctggcacacgcactgcgccgccgccgtcgacctcgcgctcgacacgctcgccgccgcacgctccttcggcgtcgaggagctcgcgctcctcacccagctggccggcatggtggagaaggcgtcgatcgaggacgtgatgaaggtgctgatggcgtcgcggaagcaggacctgcaccagctgtggaccacgtgctcccacctcgtggccaagtccgggctgccgccggaggtgctcgccaagcacctccccatggacgtcgtgtccaagatcgacgagctccgcctcaagtcctcgctgtcccgccgctcgccgttcctcgcgcaccaccaccacccggcaccggggggcggcatggaggcctcgtccgcggccgacatcgacgaccaccacaagatccggcgcatgcggcgcgcgctcgactcctccgacgtggagctcgtgaagctcatggtgatgggcgaggggctgaacctggacgaggcgctggcgctgcactacgccgtggagaactgcagccgggaggtggtgaaggcgctgctggagctgggcgccgccgacgtgaaccacaccgcgggccccgccgggaagacgccgctccacgtggccgccgagatggtgtgccccgacatggtcgccgtgcttctcgaccaccacgccgaccccaacgtgcgcaccgtcgagggcgtgacgccgctggacatcctccgcacgctcacctccgacctcctcttcaagggcgccgtgccggggctcgcgcacatcgagcccaacaagctccggctctgcctcgagctcgtgcagtcggcggccatggtcatgtcccgcgaggacgcgcacacggcggtcaacgccgcgcccatgtacggcgagccttccggcggcggcggctgcggcgtgtacagtgcgagcggcaccagcagcacgagcttggtgaacctgaacctggacaacaggatggtgtacctgaacctagggatggacgcgcagttcggcaagatgggcgacggcgatgacggcgggggcagggggccgtcttctttgttctccccgcatggctaccattgacaagctggagcggccggctgctgctctactatatatctccttgtaagcttagaactaattaattacatgttgttattcatatccacattacaggagatgaagaagatgatgattggaaagatggcgagacgatcctttaattttttgcactctatctatatatcatcatgtgactcttttagcagctagagacgattagagagagacagagagatcatgcatgcaaagtgatgcatcacaagagcttgggtcgatctttattggtgagttgtctagtctattgatggaggtgttgttttggaaattgta

SEQ ID NO: 39687 - DNA, 2309 bp, Zea Mays
ctctaatcctccccaaccctcttccggttcttctcatcccaactgaccgactaccatggccggcggcggcggcggctctctgtctagcccctccgcctccttcctttccagtcccaccccaacaccgccccctcgtctcctccgcaggtgtagcacgaagtctgcctcacgagatagccccatcctcagaccaaaaaagccgcctccactcttctgcgcggcggcagccactcccacccccgctcccgcggccgcgtccaagtcggctgggtcatggagggacctgtgcagtctcaacgcctgggtggtgcgagactaccgccgccttgtcgactccgtcggcgcgctcgagccggcgcttcggaggctctctgaggaacagttgaaggcgaagacggccgagttccgcagccgcctaacgcgcggggagacgctcgccgacgtccaggccgatgcgtttgctgtggtacgtgaggcggctaggaggacgcttgggatgcggcatttcgacgtccagataattggcggtgctgtgctccatgacggctgcattgcagagatgaagacaggcgaggggaagacgcttgtttccacacttgcggcttatctaaatgcccttacagggaaaggggttcatgtggtgactgtaaatgattatttggcacagcgtgatgctgaatggatgggtcgtgttcatcgctttctcggtcttactgttggtctgattcaggcgggtatgaagtcagatgagagaagagctagctacagatgtgacattacatacactaacaactcggaacttggatttgactatcttcgtgacaacctatctcgaaacaaagaacaactagttatgagatggccaaggccattccattttgctattgtggacgaagtggactcagtacttatagatgagggaaggaatccattattaataagtggagaggataatagagatgcagttcggtatccaattgctgctaaagtcgcagaacttcttatggagggtgttcattacaccgttgaactaaagggcaataatatagatctgacagaggacggtgtagcacatgctgagattattcttgggacagatgatctatgggatgagaatgatccatgggcaaggtttgtgatgaatgctttgaaggcaaaagtgttctaccgaagggatgtccagtatattgtcagggatgggaaagctattataattaatgagttaaccggccgagttgaacccaagagaagatggtctgatggtatccaccaagcagtagaagcaaaagaaggcctaaaaatccagactcggtaattgtggctcaaatcacatatcagtcattgtttaagctttatcctaaactttctgggatgacaggaactgctaagacagaggaaaaggagttttcaaagatgttcaagatgcctgttattgaagtacctacgaatctgccaaatatacgggtggacttgcctatccaagcttttgcgtgtcgagagttctgaatacttgtcagagctacttaaagttcacaagattccacacaatgtccttaatgcaaggccaaagtatgctgcaagagaagccgaaataattgcccaagctggaagaaaacatgctattacaatatctactaatatggctggcagaggaactgacattattttaggtggtaatccaaaaatgcttgcaaaagaaatagtagaagataacatacttccatttttgacccatgaacctcctaatattgacatggaaggggaatccacatcccacaagggtctctcaaatgtagaacttagtccatcatcagtaggtctgcttgccaaagctgcaatcatgtcaaaatatattcacaaaagcgagagaaatgaatggtctttgagtaaggcaaaatccactattgctgaatctatagaaatgggtcaaatgattgggatggagaaactgcaagagcgcatgactgaagagtctgagatgtaccctctttgtgatgcaataggacttgcttatctcagtgtcttaagggattgcgaagttcattgttcttttgaaggtgctgcagtgaagagattaggtgggcttcatgtagtaggaacctctttgcatgagtcacgccgaattgataaccaactgcgcggcagagcaggcagacagggtgatcctgggtcgacacggtttatggtgagcttacaagatgaaatattccagaaatttaatctggacactgaatgggccgtgaggctaatatcaaggataacgaatgatgaagacatagctatcgagagcaatgttgttgtgaaacagg

SEQ ID NO: 39688 - DNA, 1596 bp, Zea Mays
taaaggaagcaggagcaggacgagccccgagatctcgcctcaggattgatgcatcattggcgactgcactgcacttcttcgccatcgatcctggaggctcagatgaggtgataatccagtccacgccgccacaggttgagaggagaagagacgacgtgaaactggagcgactagagcttggcctcgcgagagctcggtccgcgataatggaagccatcaggaagaaggacaaggtatctccgttgcctgacaaggactacgtgccgatgggaccggtgtacaggaacgcccacgtgttccacaggagctacctggagatggagaggcagctgaaggtgtacgtgtacgaggaaggcgagccgccggtgttccacgacgggccgtgccgcagcatatactcgacggagggcaggttcatccactccatggagacggagacggaggcggaggagggccggcggctgcggacccgggacccggcccgcgcccacgtcttcttcctcccgttcagcgtcgtcaagatggtgcagacgatctacgagcccggatcgcgcgacatggccccgctcaagcgcaccgtcgccgactacgtccgcgtgctctcctccaagtacccctactggaaccgcagcctcggcgcggaccacttcatgctctcctgccatgactggggcccgtacgtgtcgtcggcgaacgcgcagctgttcggcaactccatccgcgtgctgtgcaacgccaacacgtcggaggggttcgacccggccagggacgtgtcgctgccgcaggtcaacctgcggagcgacgcggtggagcggcaggtgggcgggccgtcggcgtcgcggcgcccggtcctggccttcttcgcgggcggcaaccacgggccggtccggccggcgctgctggcgcactggggccccggcgggcggcggggaggcgacccggacgtgcgggtcagcgagtacctgccccgcggcggcggcgcgccgtcgtacgcggacatgatgcggcgcagccgcttctgcctctgccccggcggctacgaggtggcgtccccgcgcctggcggaggccctgtacctgggctgcgtccccgtcgtggtggacgacggcgagtacgcgctgcccttcgccgacgtgctcgactgggacgccttcgcgctgcgcctgcgcgtcgccgacattccccgcctcaaggagatcctggcggccgtgtcgccgcggcagtacatccggatgcagcgccgggtgaggatggtgcgccgccacttcatgctgcacggcgggccgccccgccggtacgacgcgttccacatgatcctccactccgtctggctcaggaggctcaacgttaggatcgcagcagctgaatgatgcacatgactgactgactcactgaccaatgtaacgatggatcttgcttacagtttgcaggcgtcatgcgtgtctgatctttgagtctagcgtgcgttggttgcattttgacacgaaggttggaggaatcttggtgtgcaagtggtttttgtaccctgtattatacactactaattaatacacgctgtacgatcagaggaagtgcgtatggtggtttttgtaccct

SEQ ID NO: 39689 - DNA, 1229 bp, Zea Mays
tcgtctcctacttgggttgctccctgctctctgcgctgctgctgctgctgctgccggcgccgatgctgacgagttcatttacaatggtttttccggcgccgatctatccatggatagtcaagcttcagtcacagctacaagacagtactgcgtgcacttgttgtgccagctcttgtaatcaccatgggtgtctgtgcaattatcatgaagctccttatggacgcggtggcgagttctaggaaggctgaaatagaatgggagaaggagtatgggcctccgtcgttcacgtacaaagatctgtcggccgccacgagaggattcgaggacaagatgctccttggaagaggaggcttcgggagtgtcttcagaggagtgctccaccactccgagcagatgatggttgctattaagcgggtgtcgccagagtcgaagaagcaggggatgaaggagttcatcgccgagatcgttatcatcctcgggcaccttcgccaccgcaatcttgttccactgattggctactgccgccacaagggagaactccctcttggttgggctcaaaggagatgcacatcgtcagaggcatcgcgtccggccttttatttctacctgcacgaggactgggagcaggtcgtcatccaccgagacatcaagacgagcaatgtcctgcttgatagcgagatgaacgcgaggataggcgactttggccttgcattgcgaggcttggcaaggcaaccaaagcaaccgatgtgtttgcgttcggtgtgctcatgatggaggctgtctgtggcaggcgaccaatctgggtggacaaggccagtcgagagccccatgccctggcagactgggtgctcgccgcatggcgagatggatccatcgccgacgccgccgtcgacccgagactggatggttacatggaggaggaggtagacctggtgctgaaacttggcttgctctgttctcctcacccctcgccgcatgtgaggcctcgcatgcgactcgtcatgcagtatctacatgggcatgcgccgttaccggcagcacacttgcgagatgctgatactttccacaccattggtgtgagtgtcatgacgatgatgagctgcccatgtcttgtccactcactactataaccgatctttccaacgggaggtgaggtgacgagtattgctgtgtgctatgcaattgggcataaaataaacaatgtatgtatgattataattatactagac

SEQ ID NO: 39690 - DNA, 3039 bp, Zea Mays
ttatcagcaaataaattattgcgaggccagacattagattaagcaatgctagtagacattgttgatctttccagtgatgatgacgaggtggctgttacagaagaacacagtgttgatggaaaaggtgtttatgcgaaggcaaatttttttgacttaactattgacgatggcattcttgaaggagagcatattgcttacgaacaagaacaaggagattctgctcagggcacatcattttataaacaagagttcattgcagatgatggacaagctgaagctgcccagtgcatagtaacattagagttgcaaaatcttggagcagatggtggatgctatgcttctcaatgcacagagacattgttggtgcaacaacttagaagaaatgatggacaaaatgatgctgcccactccacaggaacactaccgatacaagaacttagaacagatggtggacaacacgatgcggcccagtgcacaacaagtctacatatgcaagagcttagagcaactgatgtacaaggtgatgctgcctgtttcacaccaacattacagaggcaagaacatacagcagggaatgaacaaggtgacactgtccagtacacaacaacacaacagggtcaggaatctattgcagatgacacacgaggtgattttactcactgcacaacagcactgcaatggcaaggatctcataaagctcagtgcacaacaacattactaaggcaggagtttctagcagcaggtgatagaatgcaagatgctgcactgttgagaaattcagctgaagctaccacatccttgacaagtacacaacaagggagacacatgagaactgaattattcaatgtgtcaactgcaacaccatttccccggcaattttggaaagctggagagaaagctggagactatggattagcttctcaagctgatctcaacaatgaccacaaccgcttacagattcaccccaagtttcttcattctaatgctacttcacataaatggccattcggtgatatagacaagctagtgttggaactgattaatttctgttatacagctattgcagaactgctcgacaacgctattgatgaggtgagcagtggggcaacctttgtgaaaattgataagatgaagcattctcctaagggggattattcattggtaatagaagataatggcggcggcatgagtccaaaatctctacgacaatgtatgagctttggattttcccagaaaagcacaacttcatccatcgggcaatatggaaatggcttcaaaactagcacgatgaggcttggggcagatgctattgtattcacatgcactaaagatgataggagattgacacgaagtatcgggttgctgtcttacacattccttatgagaagtaactgcaatgacatatttgtaccagtggttgattatgaattggatgccttgtcttcaactttcaagaggaaaatgaactgcggtgaaaaacattttttatctaatcttttcactattttgaagtggtctccattttcgacagaagatgaattattgaatcaattcagcaatatggagtgccatggcacaaaaatcattgtattcaacttgtggttgaatgatgcattggaaatggagcttgactttataactgataaagaggatattttggtctcaggagcaccggaaatacgagcagggcggaatacagtggaaagcttgacacagatgcatgtagcaaaccgtttccgatattcgcttcgggtgtatgcatctatactatacctacatgtacctgaaaactttcaaatcatcttgtgtggacgagctgttgaaccacattatgttgtcaatgatctcatataccgtgaatgtatcatatatcgaccacatgttcaagtaaccacagaggttgatgtcattactacaattggctacttaaaaggtgctccacgacttgatatctatggatttagtgtctaccataagaaccgtcttatactgccctattggcctgcaggttcatgtagtggacgtagaagaggcattgctggggttttggaggcaaacttcataagacctacacatgataagcaagattttgagaggacgggtcttttccaaagacttgagacacgattgaaagacatggcaaaagagtattggacttaccattgtcatatggttggttacactcgggtcatgaaaaagcctcctccagcacattatgtatcaactattgctgagaagggtgatgataacttagcagctcagtctaccacaaagacttatggttacaattcaagagccagggtaccggtagcattgcagccttgttccaatgcatataacacacaagatcctatgcatgctgatgttggtgtcgtgatggatcaaatgaactatggtgcatgcccttcaatgactataaatgtggggacaacattacattcactaagatatgcaccacaacaatctcaatctgaactatgcaaacgaagaaagtcttcggagattcactggagatctcaaaaaaagcagaacaccaatatttattcggataaacctgaaagcgatagtggaacagagatggcagagttcagagttgtacttgactcgtccaccatgctaaaggctgagtgctctgaacttgaggcagcaggaaagcagctggcctctaaggcagataaattgaggatagaactcgatgtgtggcagcggatgtaccagggcctaagtgacaaattgcgatcctacgatgggcttcaaaggttgcgttgcagtcgccattgcagcagctccagtattgggttcatatgagctaagagaagcaattccagcgttggattcacaatcaagttagaaatggcattagtccctcaaagtctatcttttcgtgactgtagatctggcagtatattatttgttagacctagtaagggtttttggggctagtccccttgtaattaactgcataccctgtgtaaggcagacccatctatacttagtctattaatacaactcctaaccctagttagggctagtttttcc

SEQ ID NO: 39691 - DNA, 1063 bp, Zea Mays
cgacgagcccatgtccagccagcggttgccggttgtgaccgtcgtcgttggaaggcgacgcgaagcggcagtgcagtgctcgtcttcgtcggcgcgtcgccgtccggagggcggaggccaaagcttgtacttgtcttcggcggaggggattctgaaatcgaggtgcgcaactaggagagccagttgccacggttgcgcttttgctcatcatcggaggcggttgaagtgtcgatgtttctgtgccttcctgggggtattctggagaaagtcaaggagaacagggctcttgcactgggggcaccgagggtcatcttgtgggagcatgacgtagatgaagcagcgaggacaggcagcaagaaccatggatgtggcctcagggctgttggaccactgcaggccatgctcgttctctgacgataggcaggagctcggggatgactcctcatcagccatcgccctcctggaggagtcccctgttgcaggaagtgagaggttcagtttcaggtcaaggcccctagagctcttcctgttgctgcggctcatcctttggagagtgacgaggcgctggatgcaagcaggtggagatgagagcgatgtgaaatgctctggaaggagagggctatgagctttagaatgctcagaggtgtttctctggtgttgctggagaagggatagatggtatttatagggggtgaggatgggaggtcaattggttttctttaatgtgacataagagctacgctcccatttaattattactcactactatctcatagtagtagcaatagtacaattgtacgcattttattgcctatcatattcatggttggggagtggcgaaggaataggattgaatatgtgttgggtggaagagaagtgctaggtgagaggttttgtggtggcctgttgggtcatatgcaaaagatcaacaaatctgaacgaggaaaaacaggacctgggacacatgcctacagttgagcatttgcttcttcgctcgttgctttttacacaacattaacaggtactgggaaacttttacctggtgcttaacaagttaattcgt

SEQ ID NO: 39692 - DNA, 1525 bp, Zea Mays
cttcttaacagtcggaactcggaatcggaagtggcgtgaagcaacgaaacagcgacacgccatcaacagtaccattcagatcggaatcccagttagctctctgtgccctacctgtcagtgacacagaaatccagtcggcggggctgccgcctgccgcatcctcccctcgcccaccgtcgacgacttgatcccctcccaccgttgaggccgcctcctcacggcagcgagccagcgactcctctcttcgtctcctacaagtagccagacaccactccgactttgccggcaacccgtcgacagcgacgaggcgcagcataaggcatacgggcacggcggccatggcgaccagctccaaacccgccgcgcccgtggaccccatggtcgtgctcgcccacgagttccccgaggtgtcattcgactacgacgagagggatgtagcgttgtacgcgctcggggttggtgcctgcggcgatgacgccgtcgacgagaaggagcttcacttcgtgtaccacagggatgggcagccacacattaagacccttcctacttttgtttctttatttcccaacaagaacagcaatgggcttggatttgttgatgtgcctggccttaactttgatgcaagccttctactgcatggtcaacaatacatagagatctataggccaatcccttcgtatgccagtgttgtaaacagggttaaagtagctggtttgcacgacaaggggaaagcaactattcttgagctcgaaactaccacaagcctcaaagagtcaggggaaattttatgcatgaacaggagtactatctacttgcgtggtgctggagggttttcagactcttcacggccatactcatatgctacctatcctgctaatcaagtttctcgcatttctattccaaattcggcaccttctgcagtatgcgacgaccagacaaagcaatcccaggcattgttatacaggctatctggggattacaatcctttgcattcagacccagatattgcacagcttgctgggttcacccgtccaatcctgcacggcctctgcaccctaggattcgctgctcgcgccgtcataaaatctttctgcaacggcgaaccgactgcggtgaagagcatcttcggccgtttccttctgcacgtctaccccggggaaacgttgtccactgagatgtggcttgacggccagaaggtgcactaccaaacgaaggccaaggagcggaaccgagctgtcctctctggatatgtgttgctccagcacatcccctcgtcattgatggatgacaagatcaaagataataaagtagttcagtaatctagaaaactgttttcttcggtcgtactgtaaagaagatatgaacttatagcttaatatatataagtctaataagttgggtgtggtatacactatacactatacactagatagcactaggtaacatgagggcatgaggctcaaaagctgtatgaaacaaccaatgttcatgaaagttttttttttaatgtttggaagagtttaaa

SEQ ID NO: 39693 - DNA, 4123 bp, Zea Mays
caacatcgcgacctctctcccctcccctgcccctgcccctcccacctccctgcaccgccaaacccctcgctcccgcctcctcctccgccgctctaagatctggtctctcgcggccctgcggcgcgccccgagctcgtcgcctcgcgcgcacgcgagcttccctgcccacccggacacgagccgacgagcgagccccccattgcggcgccccgtttcccccgcacgcggcggcagggcgcggagagcgagtccggcagtccgcgcgcgcctgttcgtgatggggcggtgctggcgccggggctgatgcggaggccgctgccatgtcggacgtctcgttggatctcggcggcatccgggcggggcccgtggagcgtgacatcgagcaggccatcactgctctcaagaaaggagcatacttgctgaagtacggacgtagaggaaaaccaaagttttgtccatttaggttatccaatgatgaatctgtactgatatggttctcagggaaagaagagaaacatctaaggttgagccatatatccaagataattcctgggcaacggacttcaatttttcagaggtatccacggcctgagaaagaatgccagtctttttctctaatttcacatgataggtcattggatgtaatatgcaaagataaagatgaagctgaagtatggttcgctgggctgaaaacactgatttcacgttgtcaccaaagaaaatggagaactgaatctagaagtgatttgctttcctctggtgcaactagtccgaggacttacacacgacggagttctcctttgagttcacctttcagcagcaatgacagcatccacaaggatggcagtgacaattatcgactccgtactccatatggaagcccaccaaagaatggattggagaaggcattttctgatgtcatgctgtatgcagttcctccccgtggtttctttccatcagattctaatgctggatctgtccattctatgtcttctggacactcggataacacaaatgggcaccctagaggcgttccaatggatgctttccgagccagttattcaagtgcagttagttcatctagtcatggttctggtcatgacgatggtgatgctttaggcgatgtttttatatggggagaaggaaccggggaaggaattcttggtggtggtggttcaagagttggaagctcctcaggtgcaaaaatggactgccttgtaccaaaaccgttagaatttgccgtgcgacttgatgtgcagaacatatcttgtggaggaaggcatgctgcacttgttactaaacaaggcgagatatactcatggggtgaggaatcagggggacggcttggtcatggtgttgattgtgatgtgtctcagccaaaacttattgatgctctttctcatatgaacattgagcttgtagcatgtggtgaatatcacacttgtgctgttacactatctggagatctttacacatggggggatggcacatttaaatttgggcttttaggtcatggaaatgatatcagtcactgggtaccaaagcacgtgaatggaccattagagggcatacatgtttcatcaatttcatgtggaccttggcatacagccgtagtaacttccgctggacagcttttcacatttggtgatggatcttttggggttctgggccatggagatcgtgagagtatctcggtccccagggaagttgaatctctcaaagggctacgcacggtgcgggcagcttgtggtgtttggcacactgctgcagttgtagaagtcatggctgggaattcaagttctagcaattgttcttctggtaagatatttacatggggtgatggtgataaaggtcgcttaggtcatggtgacaagggaccaaaacttgtcccaacttgtgtggctgctttggtggagcccaatttttgtcaggttgcttgtgggcattgcttgacagtagccctaacaacttctgggcatgtgtatacaatgggcagtgctgtctatggtcaacttgggaatgcacaagctgatggtatgcttcctgtgcgtgttgaagggaagctacacaaaaactttgtggaggagatttcatgtggcgcttatcatgtggctgtattgacttctaagaccgaggtgtacacatggggaaaaggtgcaaatgggcggttaggtcatggcgatactgatgataagaatactcctacattggtcgaagcactgaaagataagcaagtcagaattgttgtttgtggaattaatttcactgcagcaatatgcattcacaaatgggtatctggagttgatcaatcgatgtgctcaggttgccgtcagccattcaacttgaggagaaaacgccataattgttacaactgtgctctagtattttgtcattcctgcagcagtaaaaaatccctgaaggcttcattagcacctaatacaaacaagccctaccgtgtctgcgatacctgctacagcaaactgacaaagggacttgagacggatatgcattcttcagcgaagcgagctgctactgtaccgggagtcagtgatgcaaatgaggaggatctggaaacaaggtcaaatgctcaactatcaaggttgtcttcaatggaatcttttaagcatttggatagcagatattccaagaaaaataagaagtttgaatttaatagcactcgtgtttcccctgtgcctaatggaagttcacattggagtggactaaacatttcaagatctttcaatcctgtatttggatcttcaaagaagttcttctcagcatcagttcctggatctagaattgtttctagggcaacatcaccgatttcaagaagagcaagccctccacgatctacaacaccaacacctactctgggtggtctaacatctccaagagttgttcccaatgatggcaagccaacaaatgatgcattaagccaagaggttctgaatttgaggtctcaggtggagagtcttgctaggaagtctcaactcctggaagtggagctggaaagaactaccaaacaactgaaggaagctatttctattgctggtgaggaaactgcaaagtgcaaggcagcaaaggaagtaatcaagtcactcactgcacaactatcatctgatggtcaactccattctttatgtaatagttgaaggggatggcagagagattacctggaggagcagccaagaacactaagttgccacctcttcctggaattttcattccaagtgacattccgtctatgcctacggagagtgagggcagcccaagcagctctggagaacaaatcataaatggtcataatggattgcttacttctaatggacaaagttctattaggaataaaacgagccatccagaagttggcaagaatggaggtaggctgcctgatgctgaatcttgccacgatgctgaatgggtagagcaagatgaaccaggtgtttacattactctcactgcgttgcctggaggcgccagagatctcaagcgggttcggttcagccggaagagattcagtgagacacaagcagaacagtggtggcaacagaaccgggcgagggtataccagcagtacaatgtccgcgtgattgacaaatcgaccgccagtgtcaacagtgacattgcggctaactgacactagattgacctggagaaacatacctgattacaagcggagctgaggccatgtaacctgaagggctctctcgtcagtcaagctgggttgctaacgtggctaccattttacctacccccctgagaagaggtggtttctgctcccaggaaaacaggaagttttttttatcttcagttttacataattctttactcttaccccgacccccccccctttttttttctcattgtgtgaaaagtagagtgcttgagcagaggtaatgtaaatgcttagtagaagcaggctaatctatcttgtaaatgcataagcaagcatcggttttagaatgccttgggaatcttccaatatgattgcaaatgcaaatggcaaatctgggccaagtattgatggtctctgaagtttgtagtagagcctgtatgcatataaatctgaagcaatcccgaggtcggaagtcgtacaagtgattaagtactccctctactgaac

SEQ ID NO: 39694 - DNA, 1578 bp, Zea Mays
aaaagatattagtggcatttccctttcttcactggttcccccggcatactctcactcactctctccctctgtccctcctcgtcgttctcccgtgtccgccgtgcactgtctgtctctggtggcggcgactgggcggcctccgccgctgccctacgccaggatcccaggctgcatcttccgtacgccaggtttccaggctgcacccttctctttccttgctgctgtgggaggtcgagtactcgttgcgaacccaagctatttgaactcggatctaatctgatccaattaattgcaagtgtagtacacatttatttttcctacaaagtttatttaactttttggcaaaaaaaaagtattgggccatttgggtgacatgtgtacactcatgtccttcactgtgtccgcccctggttctagcctcatggcagagccgtttcttgatctgagcaggggcgaactgtttgcaggaggagggcctcgccgcaggttgggtgggaggcggagatgagccgggggcggtcgccggagccgctggatttcttcatctggactgtgcaggtgctgcgacttctatcgttcttcgttcttagtttcaatttggtgagctatattgctatttggatgtcgaaatgcataattgatctccctgcgaatttgctgtgcaacaaatgaaatatgaagtgtgatgctccaatcttgtgtcacttgagctaataagggagtgggaatgtgggatagtcattcttcaatatatatatatggcaccttttgccttaacttctaatttcctccaactactgaatttcttttgtggggtaagatcatacatttctgttgtttatacgttgtttgtcttctacggttagcgtactggccaggcttcccttttcattgtataaatggtacaggaagtacacaaatcatttatttttactaaatctggtttctatggatcatgctggttgctggtccttccccgaaatttactcccaattattgttttcataaaaaaattagtgtgcacattgtataaggaaactaatgagtgtgaaataatgtgtacaaaggctaaatggtctttctctgacagtagacccagtctagatcatttagatccaagtacaatgaagtcggccgtaactgtgctgcaggatgtagggttatggttggaggaaataaatcttggaagctaccgccaggcttttgaagaaaatggtgtcaatggagagtatctagaaagcctgtcggtgttcaccactgagcagattcttcgctttataagacgatgccatatgaaatggggagattttatcaccctctgtaaagagttgagacgcatcaaaggttcgaatttcttctgcttctagtatcgcgcttcagaaagggtttgcctgtgcatattcctattatattatttcatttcagtcttcttttgagtttgcataacttctaccttgaacaactgaaatactataaaattctagcaccctaattttcaggcttatatatctcttgaagcaaagacatccctgccatgtggtagtgaaatatgtgctcttcagtgagcaactccttttt

SEQ ID NO: 39695 - DNA, 416 bp, Zea Mays
gttcttacacatctggacaactagcagctttcgataaaatcaattcctggcgaagttgttaaacctgaccaattcagggcgataaacgacgacgagatgtcgatcttgaaggggaagctctaccttcatttcacggtggagttctggcaccggagcagtgcaaggctcttgagtcggtacttctaccaaagctttcgtccaagcggatatacatggagatagatgaatgtaaggagacaaccatgcattgatgtgaacaacatcgaggaatagatgcgcaagaagcaggctcatgctactcaggaggtgtatgaggaggataacaagatgtgcagtgcatgcaacaataagaagactaccatcacttggttgctcttcaagtgtgcacactagtagaaaagagctctaaggtggcg

SEQ ID NO: 39696 - DNA, 4022 bp, Zea Mays
ccccaagcaaccctagctctccctccccctccgcgtcctacagccatcgtcgctctgccttccgcccccgccgtcgccgcagacgcagccggccacccaccactcgcgcctcccccaccgcgtcgcgtgtgggccacagctacagctgcctcctcgagcaacccacactcctttcttcccctgcctgtcgtctctcttccaccttccaccacaagcgccgtcgcagccggtgcctgctccttcccgatccccgaggcaaagctgcgactccgcaactgccgccatggcgttcgagaagatcaaggtctccaacccaatcatcgagatggacggcgatgagatgaccagggtattctggcagtctatcaaggacaagcttatcttcccatttctggacctggacatcaagtactatgatttggggatactgcacggtgaagcaactgatgacaaggtcacagtggaggctgcagaggctactctcaagtacaatgtggctattaagtgtgcgaccattactccaggtgaaactagaagaacgtatgaagctagacttgttgcaatttatagacatgtaagagaggatggagttgagggacaacctatttctgtttcaacagaacaatttgcatcacatgaataataactcattacaaatcccatctgagttgtccaacttgccttaactccttcatttccttgttgataacaataattgatctgggcctcttccaccagaattagtagatacacgtagtcttcttgctatcttgacttcaggctgataataacaacttcagtggaagctccatcctgctgaatacaacaacatacaaacacttctaaagctgtgagtgtaacaaccttttcgctcatgttctctcttttcagaatttgaggtagatgagggcaaaagaatttaacagctattacaacttctgttattgagaacaatcattaaaagcatgcttattaaaacgacgttaaaacgacgtttaaacgtcgtttaaactataaaacgctgacaggaagtgaaacgacaaaacgttttacgattcgtcgtaaaacgttgtttaacgtcgtttaaacgtcgcgttttgacgtttaaacgcggtatagagtgaaacgccgcgtttaatgcgtctgctgctagtaattggcccagcccaattagaaactcccgcccagcccacccagaccgccgctacaagccgcactttcaccagcccaattagtaactcgcgttctcaccagccgtcgcactccagggcgcgctccagcctccaggccgccgctgctccaaccctcctgcgccgcccgtccggcgccgccaggcccgcctctgcgtgccgctgctccaggccgccgccgctccagtcagctgctctccaggccgtcctccctccaggccgctgctctccaggccgctccaggccgctgctctcaaggccgtcctccagccccgcctcagagcctctgcgtgccaccgctccaggccgccgcgctccaggccgtcctccctcctgcgccgcctgtccggctgccagcccctccagccccgcctctgctgtcccactgcggcaggactacagagtacagagactgactgtcccactgtttggtatttgacttgatataattgcctgaaattatgatatattgaaatttccctatgttgtttaaaactacatttaaactttgtttaaaccgtttaaaagttaaaacttacccatgagcgtttcaacgtttcgtcgttttaataaccttgattaaaagtgtaggcattggtgagtacaaacctaaggttaaaagaagaatattttgaataaaagtgtttgtatttgccaaatggcttatgcttttagttgagataggtagtatatcaaagttcagggcatcacatagataagaacgaatttgctccgtgtgcaacaaaaagctcgtttttacactgactcctcttctattgcagcctatagctgccaaatagttggatgcaactggtccatttatctggaaatatttatatttaaaaaaatatcgaaaaacattacatttaaaattttataggtagtcttctttcattctgtggagatcattttcactgataactgaaacaacaattacttcattatattcattcaaggacaagcaccacacaatcaacatcatgtttaaactcaaatcaagacgtgttgagtaaaccatccttttacatgttaccaggagtctaagaaactatagtttgggttgttccagatttgagtgtcatacctaaatttgggtacttgtaagtccagattaaatgcaatgtttcctttctcggtttttggacatcttacaatcataaattatccttttacattaacttgcagcctttcaaaaacatatgttttcccaatattatttattaaatgcttttagtattgtatcttcattttagagtgagaaatccgctactcaattcacatcaggatattagttgtcaaatattttagtactaatattgagggggatggcggagggcattgcgctgcggggttacatcgccgtcaccttcgacatgcgcgacataggtgggtccacagggcgggtgtcgctcacgtgctccatcaagaacatcgagtgaggtggtgtgctgctgctctaaagaagggaggagaggaagtagcgacaatgtcgccaagaccacctggcgcgatgtctcctaccagatcaccaagatcaacatgtacaaggatggtcggcatgtacaagatatgcttaagcatcagaggctccataaagcagctctgctagaattaactgattcactgtcaaggtcaaacatcactatgatattgctgagatggtccaatcagtgacaatgctggtggtattgttgagatggcaggaatgagccacaaaatctgagagaacttatgctcttggtgctgctgacaacacaactgttgctattagaaagggatttgccattggttcaggtgctcttgtgtccctggtgctgtttggtgccttcgttagcagagctggagtgaaggttgtcgatgttctctcctgaaggttttcattggtttgattgttggagacatgtttttgtactggttctctgtcatgaccatgaagagtgttggaagtgtcgccctaaagatggtggaggaggttcgcaggcagttcaacaccattcttgggttgatggagtgaacaagcaagcctgactatgcaacctatgtgaagatttgcactgatgcttcttccatcaaggagatgattccttggggtgctctggtcatgctgactccctcattgatggaacctctttggcatcgagactctctctggcgtttttgctggtgccctggtttttggagtgcaggtgcgcactttgccttctactctctctgtgcacttcaatgtgtttgcttgttctagggtttatggagatttctgctttggacaaattgccatctctacttccaacactgtgctgcataggataacgcaagaagtatattaagaacaaggccatctcagataaaagtagatgtagctttcataggacttaattccagcaaagcaaaggttggcagtgcaccaaacaatagcgtttatacttcattcttatggattggagaagcctatgcaacatgtcaagccagatgacatgcagatgagaaggttctgcatcaatagaaaccagagaaaaatctgtatgtgtctgtatgacatctcagataaagcctgatgatcagcatgatgaaaggtggggagttctatagctggtttaagctggagctagcttctgaagtccggtcaggtgtctgtatgtgttgcccctttttatttcatttcatgagaaaagattgttatttgttccttgaactgtacttggtcgtacttgtgaataaatattttagcatggttgttcgacttctcataatgtttattcgacatcagttcatgatattagtgttacgtgatattttatcatatgaattttgaatatcatagtgatgtttatc

SEQ ID NO: 39697 - DNA, 1786 bp, Zea Mays
catcaacaagtatctctatcctgtcagacaagtagccccccagagcaaacagccctcttctgctctgcagcacgcaccagaccgcacgagcatgtctgcccgccgctcctccgccggcagcgacgacagagaccaagcccggctgcagcagctgggatacaagcaggagctgaagcgcggtctctccgtcgtctccaacttcgccttctccttctccatgatctccgtgctggcgggcgtgacgacgacctacaacaccgggctgcgctacggcgggccggcgtccatgacgctgggctggctcgtcgtggcgctcttcaacggctgcgtggcgctgtccatggcggagatctgctcggcttacccgaccaccggcggcctctactactggagcgccaagctcgccggcaaggactggggtccactcgcctgctggatcaccggatggtttaacatcgtgggccagtgggcttgcaccacgagcgtggacttctcgctggcgcagttcgtccaagtcatcgtcctgctcgccaccgggggagccaacggcggcggttatctggcctccaaatacgtcgtgctcgccatctactgtgccatcctcgtcctgcacgggctcatcaatagcctccctatccattggctggccttcttcggccagcttggagctttctggaatcttggaggtgtgtttgtcctgacggtgttgattccggttgtcgctaaggagagggcgagcatggagttcatgttcacccactgctacacagacgatgccgtggggatccacagcaaggtctacgtactcgccattggtttgctgacgagccaatactctctcctgggatacgacacttccgcccacatgtcagaggagacgaagaacgcggagtggagtggcccgatggggatcgtcgtctcggtcgcgctgtcgagcgtcttcggatggatctacctagtggccctgacatcggcggtgaccgccgacgacgtcccgtccctcctggaccctaccaacgacgccggcgggaacgccatcgcgcaggccctgtacgccaccttccgccggaggttcggcagcggcgccggcggcgtcctgtgcctggcggccatggccgtcgccatattcctctgcggcgtcgcgtccgtgaccagcaactcgaggatggggtacgccttctccagggatggagccatgccgctgtcgcaggtgtggtaccgtgtcaacaagcaggaggtgccgttcaacgtcgtctggctctccgtctcggtggcattcgtcatggcactcacgtcgctggggagccaggtggcgttccaggcaatggtgtccatcacgacgctgggcatgtacatcgcctacgccctgcccatcttcttccgcgtcacggcggcgcggaactccttcgtcccggggccgtttcatctcggacgccgctgcagcctcgtcgtcggctgggtcgccgtcctctgggtggccctcgtcaccgtgctcttctgcttgccggtagcgtaccccgtcgccggggtcaacttcaactacacgccggtggccgtcggtggcgtgctggtgctcagcctcggcgcctgggtgctccacgcgcgcttctggttccgaggccccgtcaccaccattgacgcgtgacatgcccatggtcgatcggccctcacactaatacaaaatagctcaaagcatgtggtggaatttaattttcataggcggttttagttatcaaacatcattgttattgttaatggttatttcttaaaaaaccgccactaaaaa

SEQ ID NO: 39698 - DNA, 1996 bp, Zea Mays
atatacgaggggcagggccccccctcctctcccttcgtccattccgatcactcgctgctcccctctctcgccggagcgagccccgggccggatggcggcggcagcagcagctcctcccgcctccgcgatcgcgtgatggacgccgacgccgacgccgccgcgatccgccgatggacgacgccggaagggcaccaccacccgcgccagcggcggtgaccgtctccgccaccgccgcacccgcgcctaccccgccctccgccacggccgccgccgacaagtcctccctcgaccccgacgcgctttatgaagaggggatgtggcaacagatggccatgaacagcggtgccacaatgcaacctgggtcatatcctgagcgaccaggtgaaccggactgcacttactacctcaggactggattgtgtcgatttggcatgagctgcaggttcaatcatcctccggataggaatctgtattatctgaagaccggaacatgcaagtttggtcctacatgcaaatttcaccatcccagggaaaaggccggaattgcagggagggtgcagctaaacacattaggatatccacttctcccgaatgaaaaggagtgtgcgtattatttaaaaacaggacaatgtaaatatgcaaatacttgtaaattccaccacccagaacttttcaatgtggtgccttcgtcacgtggttcacctatttatacttctgtacattcctctgcaagcgctggtccacagtcatatactggaactatgtcaagctggacttttccacgagcttcttttataccaagccctaggtggcaaagtccttcaaattatgcaccaatggttgtacctcatggccttgtccaagtgccgagctggaattcatatcctggtcagctgcagtcacctggggctcaacaaacttatggaagttcacaacaaggcgaagctagtgcaggaaatcagggaatgctatcaccctatagatccagttcatttcctgtgcctcaatatgcgttgcagagagataatgtatttcctgagagacccgatgaaccagaatgccaatattacatgaagacaggagattgtaaatttggtgcagtgtgcaagttccatcatccccgtgtgagatcacagccccctccggattgtgtcttaagtccaatgggtcttccaatacgtccaggtgaagaactttgcaaattctattctcgttatggcatctgcaagttcggcgccaactgtaaatttgatcatcctacaatggctgctccaatgggagtttatgcatatggtttctctgggtctgcttctgtcgcacccgcttcaactaatgcacctatgacgcgacatcttcttggatctccatcaggttctggatatatgtcttaggtgtcttttttttcagttgacctactttgatgtataaaatccacggcatcgcctcaggcgctgtgaatgtttctcctaacttcccgccgggatgaagttctgtaaattgagttgctgctggagatgtacagcccccccccccccccccccctccccaattaatccagaactttgggaataactgttggaacctaataaacttcagatacagaaacgctggttttcaggtgtttgcactattttgacactgctgcacctatggtccctaacagttgaggtaggaattcttctgaaggagctgaaacctgtagctgcaggtgtgcagtcgaaattatattattgcgtcaatttatttggaacctgtattcagctggtgttggggcagatattggcattcctcttatctgtgaatgctggttttctgatttgaacagtgtatcccagcctacggcttctgccaagacagtaaactcaggacctgtttgggactgttccactattcaaaaaatgaatttgaatctgggattcattattaaagtttcgccgacgaatctgagatcctttttagatagcagcttattcacgtaaggatattctgtctgaaa

SEQ ID NO: 39699 - DNA, 3591 bp, Zea Mays
ttccacttcacacgcttcctccacgccacctcgatctgtgcggcggcaaacccagagatccttgccccgtccgccggcgaaaggcgctcacctcccctcttcgctgtctgcgatgcagaggatactatcgagggccgctcgccggtgcacgaactcctcggcggcgttcaactcacctcacgcgcaggccaatgcagcaagtgttcactctgaagacgccccaacttgttcaaacaagaacgatgattttacatggaagactagttttgttagacccatgcaatcagaagtcgtcaatgccctccgtagaggtgaccggcagcgagcatcattgattctttcgaactttcatcacactaaggaatcactgaccaaggaagatttttcttatatattggagtattgtgcagaggcacctgatcctttgaactccatttggagcttttccaatacttctagtttgttatggaaactttggaactcatggaggagaaggccattggcatgagtaaaagtatctacagatatgtcattagagctctgagcagagggggatatgcgaaggaggcacttcactggctggctcttctaggggagaaagaaagcactcatgccactacaccgatttttaatatctttctaaatgcctgtggtagagcaaatctgaaggacgccgaaaactgtctagagatactggaaaatctttttcttgggaagtctgaaataacatactgtgagcttttgaagcttgcagtgttacagggaaatttgcctgcagcttatgatatctggaaggagtgctctaggtattatagcccaagcattgtcacgcaaaggagatttataagggctttaactgcgctaggtgaccttcaatctgcgtatcacatattgcagcatatggtagcccttgctgcacaaagctgtgactatctgagggtgtcttctaaaagaagataccgatcatcgagactagacattcctgtacctgctttgaatgaatttgaagatctcaacctgccatcatgccaagggaagctggctaccggcgaacatttggttgatgctcaacctgagctatttgatgagaaaactcggccaggcaacaatctttcttataaggttgtagtagatgcgagtgttgcaaatacattgaagtctgcaccaagcacagtaaaacaaattttgagatgggcgttcaatgatgttttgcatgcatgtgtaccgttcaacaactgccagttagctgagcatttatttacagagatgcagaaacttggattgcaaccaacaagttatacatatgacggttttattaaaaccgtgatagctgggaaaggaattgcatatgccaacaaagtgattaacgccatggagagaaggggcattgaaccttacagtgatacacttgctgctctctcagagggtcatagcaatagtttacagttggatttggctgaggagtttttggaaagaatttcagagataaaaccaaagcatataggttcctttaatgctttgctttctggatgtgcgattatgaatgaaccagaaagagctgtccgcatactagctaaaatgaaacatgtgaacatgaagccaactctcaggacatatgaacttttgttttctctgtttggaaatgtaaatgttccttatgaacaaggagatgtgctctctcatgtcgatgtttccaaaaggataagtatcattgagatggacatgtttaacaatggaatccaacacagctttgtgtccatgaagaacttgatacgagcttttggagctgaggggatgatagaggaaatgctgaggtacctgaatatagcagaaaatactctgtggaacataaatcctcatcagaagagtgatctctacagcactgcgttgcatgctctggttgatgtgaaggaaactcacagagcagtaaagatgttcaaaatcatgagatcatgcagtcttccaactaatatttcaatttataataccatgatagagtgctgcaaatggctgccatgcttcaaatcagctagtgctttgctgtctttgatgcttcgagatggtttcaatcctacggttgtgacttttacatcactcctgaaggttgtattagaaaatgataattttgaaggggctctggatctgcttgatatatgcaagattgaaggacttcagcctggcatacagactttcaacacagtactcttacgtgcatatgctagaggtcaaattcatgtccttgaatatattttggagtgtatacatcgatcaaaaatccaacctgatccatcaacactttggtacacgttttgtgcctacgaggagcatgaactgtacaatactgcaattgagtcattgctagtcctcagcatgagaatgatatctgaggatgccggcattcctagtgagaaaagaattgtttttgaagatctaatcctcagtgaagaacctgatgctgaattcaggatcataagggcattccaagcaggcgaagaattccttgcgacagctttactgaacctaagatggtgtgccacaatgggtgccaccgtatcttggtcaccggaggagagtctttgggcaatgaggctggcagcctcgtatgatgctaacaagagaccacatataaacccctcggatgctcccaaatcttggggaaggaatccacttaaccgcccgtattgggaggctaacgggtgattggttgattggttggctacgcttccgttgatcacgcttggcacgtgtttggatggctgcagagcatctctaccgcctgctcccatgcatgcagcgttgattttttcccccactgggtagcctgcatgcgcggaaactcaactccccgtctccccctcgtttccagcggcccaggctggcacgatgctggtgcgagacgcccctacaaccaatcatgcgttaactgaggcagagctggagtctagcgtttcaaatctctctgttgagtatgatgacaatgttgtgttctgttttgctggaagccagtagatgttttgtttacctaactaacatgattgcagtacgatcgggcggcctccctacctgtcgtgaagcttgttccgcatgattgctccaaattggcctcgtaccgttttcaggcttctaggccaacagctctatgttccgattctttacattacttgataggttgctcactttatttacccagttgtaatttctgattatactggctgtcgggagcattagctttgcaaaactgtaggaatatatatgacaacgacgaagatcgagtcgcatggcagtgacagaagaataagaggtgttacgattacaatagctggaaaccaaaacttgctctggttattttgaaggtgtttagattttggaatgacgatgttacaattacactttattctggcaaaggtagattgtagaaggatggatagtgatgcactgttaccgcgtggtactgggttggtctttgtttgttgtacatcagttgttttctggcaggtcgttttgttgacttcgtagctgcccgaataacagaccaattattccatctcagttagagatcatttgtctacggcactcgacattcccttggtt

SEQ ID NO: 39700 - DNA, 4431 bp, Zea Mays
ccggcctcagggcggcgcgcagcccctgcgtggccctgttcccgtgcgcgtcgtcgcgttttaaaactccgttggagtcacgtgtggtgtcgcgcgcttcgccacgcgataatccttttaaattatgttcgagtggtgcgttgtgtcgcgcgcttcgccgcacgacaaccctttttattcacctagaattgtgtatattaatttaagtgtgtagtgtaacgacgattaattaagtatcgaactaattaggatctagtgctaattttatttacgcatcgcatgaatatcaattaatatgattatgttgagataagtattttaatctatagctgcttaacgtaatcgttatgtctctcggctgcagcttcgaccgtcgtagtttcttttctcgcatagtcgtagatgcgagccctgcgccacgcgtctgtttagttgttctattttattgtgtggtgtattgttgttttctatgttaaaaatgtggaatgtatgtttgaactcatataggtaacggtccgttggcagagtccgaaggagttgcaggcgaagaccctgagcaacagctggttggtgaaagcaagtgtcctataacccatttatgtcctacttattttataattcatcccccgtatttacataattcatatataaggatttactagtttttgtttatcttgtccttgttcacctatttgggttgaattatttctggattagctctatgctagcgctcactttaatcaataaacataatgagaattatttatgatacgaggtttacttttagaaattgatgatgacattgtgatatttaaggggctcaagcggtttctcgagtgtctctccgtaaggactggtttgttggatgatcacaaggaaaacagtacaaccatgagggtagatggatgctcttagctaattaattagaggaaccgatgtgtagtttacttcgccgtcatgctgctaataaggttcgatgtatgcggctcgctctaccgagggtggtttgccccttcggacgggcgaataccgaaatgcggacgggcgaataccgaaagacgccttgtgacagcaaacacggaaactgagaacacgagcagaaggcactcgatcgcataggtacagacgtacagtagcacagccgcgcacactaccaccagtcggacacccgccccgagctccggctatggaggaagccgccgccgccgccgctgcttgggcgtctaatgccgccacgcccgtcccatccgagcccatgagatcccctcctgatgctgaagcctccgttgatcctaccgctgttggtgacgatgagcacgactccaaggaggtcgttctgcgcaggtacttcctccaggagtgggagctggtctcagcgatcctccaccgtgtcgtcgccggcggcggcgttgccgaatccgccgatgtccataggatccgctctatcatggacaaatatcaagaagagggtcaactattagagccataccttgagaacattgtttcaccacttatgtcgttggttcggtcaaagacaatggaacttggtgctagtactgatgaacttcttgacattatcaagcctctgtgtatcatcatctacacccttgtcacagtgtgcgggtacaagagtgtcatcagattcttccctcaccaggtttcagatcttgagctcgcagttgctcttcttgagaagtgtcatacaatgagttcagctactgctcttaggcaagagagcacaggagaaatggagactaaatgtgttgttctattgtggctttatatactggtcctgatcccatttgacatatccactgtggatacaagcattgctactgctgataacgtcgatgggcctgaggtcgttccactggtgacaagaatactggacatctgtaaggattatctctccagttctggtccaatgagaaggatgtcaggattattgcttgcaaggctcttgactcgtcctgacatggcaaaagctttcagcagttttatggactgggcacacaagatgttactgtctgtatcagatgactttgttgatcaatttagatccattggtatagtggaagctttagcatcaatatttaagattggtaaccgtagagcactgcatgatgctgtttctggtacttggagtgattgttcacttgtgatgaagactaatgtctcagccaggagtccacttcttagaaaattcctggtgaaactggcccagagagttggtctcatcagcttgcctccacgtttaccatcatggcagtataagtcaattagcagttcgttgggtgcaaacctttcaagttatacagctggagaagtgtattcaagtggatcaagggaacaagttaacattgatcaaataggcatgtgttttttggaagaagatatggatgttccagaaatagcagaagagattatcgacttgctattgactggtttgagggattcagtatgttcttatccttatattatgctgtgaagttttgacttgttctccagaacgtggtagtaatatttacccagttatatgatcttttatattgtaccccatttttattttctttctctttgcttgccggctaatatcttcttttccccacaagggccttcacctgccagtctacctccactgcatttcatatcttaataaatacataacattgcctagattgtcctgtactggagcaaaaacacacacagccttttattgtttggatttctagaattattcgacaatataactgaactttaaatccattaatcaattagtggtttgattgctaaaaatcgagttggtgaaatttttctgtgtagattcctgtatgctactatggtttgtgaacatggttgcttcatacaatcaacacaactgcctctaactctaaggacataaatgcaggattaatggtggtatctgaattgaaataagctctcctgactgtgtatatgagaaactatgtacacaatttgaagtcatgattcactgcttcatgtacttaggaaaacagtagggagtctggtctttgtacttgctattatgtttttttttgcatgttaaaataccaaagtattattgggccatgaaatgcaaatactatcatttgtcttcccagatgaagttatactaagagataagttttttagttattcatctttcccatttatagcctcaaacactgctgtttttgaaaggcgaacactctttgattctgtgtcaggatacaattgtaaggtggtctgctgccaagggaattggtaggataactgcatgtttaacacctgcattgtcggaagatgtgctatcatcaatattgcaacttttttctcctggagagggtgatggctcctggcatggaggctgtttagccttggctgaacttgctcggagagggttattgttaccttctagctttcctgatgttgttcctgttataataaaggctttacactatgatgtaagaagaggtccacatagcattgggtcacatgtaagagatgcagcagcatatgtatgttgggcatttggtcgagcttataccaattatgatatgaaggctgttttggaacaacttgctccccaccttctaaccgttgcttgttatgatcgagaggttaattgtagaagagctgcttctgctgcctttcaagagaatgttggaagacagggaactttcccacatggcattgatattgtgaatacgacagattactttgcactggcttcccgatcaaactcttatctgaatgttgctgtttctgttgctcagtgcaaggagtatctttatccctttgcagatgagctgctttgcaataaaataactcactgggtatataattctctgcaattgtttatggtttaaatgagattgcatctttagtgtttctggtttccacactttttgcctgtgctgcaattgctattaacttcctgagttctacactccttacctggaccgagttctgcactccttaactggaactggtagctgacttgggaaactgaagttaaaatcattagcaatgtaaattccctgtagtaatatttactttgtatattagtgcttcagtaattgaactacttttttttgtcttatgatgtcaatttcgtgctggctttcaccaaactttatcttacatttttttaagttttctcccctcttctttcacttgtgcagcgctttaatatggaattctgttctctaaggagtgttgcttttatgagtcatgacaattaatctcttgggccattgttttttataaatttgacacaggagatgagatttgctacgtttcaatacattgttttgggctgacttctcttcctttctaggagaaaagcttaagagagctggcagctcaggcccttgctttgcttgtacaatatgatatgaattactttggtggacatgcccttgaaaagtt

SEQ ID NO: 39701 - DNA, 2634 bp, Zea Mays
cttcagcccatgaaatgaacgccatctctcttgcgctcggagtccctttggcgcgaagatctggcgccaagccgccgcctccttcccgtcaagaccactcccccggccccacccgccgcccccttcttcttccctagaggcctagacctattccagccgagagtgacaatctccagtccaaagctctattgcagacctcgaatcttccacaaggggcattcgttagtgatggaggcgttcggtgggttcttcgtggacgagaaggcagtgcgagtggagaacatcttccttgagttcctgaagcgattcaaggagtcggatggcgcgggggagccgttctacgaggccgagatggaggctatgcggtcgcgggagtccaccaccatgtacgtagactttgcgcacgtcatgcgcttcaacgacgtcctccagaaggccatctccgaggagtacctcaggtttgaaccatacttatggaatgcatgcaagagatttgtgttggaacaccgggctggcgagaaccgtgccccaatcatctcagatgatagccccaacaaagatatcaacattgccttctataacatcccgatgcttaaaaaactgagagagcttgggacagccgaaatcggtaagctcacagcagtaatgggtgttgtcacacggacaagtgaagtgcggcctgaactattgcaaggcaccttcaaatgcctcgactgcggcaatgttgtaaagaatgtggagcagcagttcaagtacactgagccaataatatgcgttaatgcaacatgccagaaccgaacaaaatgggcccttctccgccaggaaagcaaattcacagattggcagagggtcagaatgcaggagacatcaaaagagatacctgctggatcacttcctcgttcccttgatgtcattctgcggcatgagattgttgagaaggctagagctggggacacggttatatttactggaactgttgttgcagttcctgatgttatggcactaacttcacctggcgaacgagcagagtgtcgcagggaagctcctcagcgaaaaatgggaggtgttcaagaaggtgtaaagggcttgaagtcccttggagttagggatctctcttatcgcctcgcttttgtagcaaattcagtgcaggtcgcagatggcaggagggaaggggacatcagggatcgggacacagatggtgatgacagcgggagacagaaattcacagaagaagaggaagatgaggttgttaggatgaggaacactcctgatttctttaataagatagttgatagcatatgtcctaccgtctttggtcatcaagaaattaagagggcagtgcttcttatgcttttgggtggtgttcataagataacacatgaagggatcaaccttagaggtgacatcaatgtctgtattgttggtgacccaagctgcgcaaagtctcagttcctaaaatatactgctggtattgttccaagatctgtttacacgtcagggaagtcatcatctgctgctggtctgacagcaactgttgctaaagaaccggagactggtgaattctgtattgaggctggtgccctgatgttagctgataatggcatttgttgtatcgatgaatttgataaaatggacatcaaggatcaggtcgctatacatgaagcaatggaacagcaaacaattagcataaccaaagcaggaatacaggcaactttgaatgcacgaacatcaattttagctgcagcaaatccgaccgggggccgttatgacaagtcaaaaccacttaagtacaacgtggcattgcccccagctatcctttcaagatttgatctcgtctacatcatgattgatgaacctgatgaaaacaccgactaccacattgctcatcacattgtaagagtccatcagaaacgtgaagaagcacttgcccctgcatttagcactgcacaactgaagcgttatatatcttttgcgaagtctttgaaacctcagctgagttcagaagcaaagaaagttctggtggagtcgtatgttaccctccgtagaggggacagtactcctggaactagggttgcttacaggatgacagttcggcaattggaagcattgattcggctgtcagaagctattgctcgaagccatttagaaagagttgttctcccagctcatgtccgcctggcagttaaattgctcaagacatcaatcatcagtgttgagtcaagtgaagttgatctctctgactttcaagatgctgaagatggaacaaacgtaccttctgagaatgatgctggacagccagctgaagaaggtgctgctcctcaacagcaggatgcagaaaatgaccaagcagcgggataacggtaagaagaaattggtaataactgaagaacacttccagagagttactcaagctttggttatgagactaaggcagcatgaagagtcagtcaagaaagatggagatggtatggctggcatgaaacaaggggatcttatcatttggtatgttgagcagcagaatgccaaaggcgcatatagttctaccgcggaggtgaaggaagaagtgaagtgtatcaaggccattatagagcatagcatgacgatgcaactaaactcatcaagtatgtgcatatg

SEQ ID NO: 39702 - DNA, 2001 bp, Zea Mays
cggctatacccccagctctgcctcttatcatgtcttctcttctcctacgccgtacgaggcacgtagcatatgcggccgcatatccattgaagcctagacagtgatcgaacgatggagatgacgaccagtggcgctggtggcgtgacaaagctggacgacgacgactatccatcggcggcggcggcagaccggtgtccgccggggacagagaagaagatgtgccgccgggttttgctcgtgggtagcctggtgacgctgcccctcctcgcgttcttcgtcttcagccgagagaacgcgtcagtggcctggttacaggtcgctattgcccagctcaccgccacgaacgacgacgacggagcagcaggcgggtttatggagggcgacgctcctcatggccacgagcccacgacgagttcctcggcgggctgctcgcgccaggcatggaccggcggtcgtgccggagccggtaccagtcgtcgcggtactacaagcacttccccttcgcgccgtcgccgcacctcttgcagaagctgcgcgggtacgaggctcggcacaggcggtgcgcccccggcacgccgctctacgccaaggccgtcgagcagctccggtctggccacagcgccgagggaggcacggagtgcagctacgtcgtgtggctccccttcgacggcctcggcaaccgcatgctgtccatggtgagcggcttcctctacgcgctgctgacgggccgcgtcctcctcgccgcgctgcccccggactcctccgacctcttctgcgagccgttcccgggcgcgacgtggcggctcccggcggaggacttccccgtcgccaacctgttcggggtcgggcaggacatggagcggtcgtacacgaagctcgttgacggcatggtggccgcgaacgcgacggcgggcgtggcaccgtcgtacgtgtacctgagcctagggtggctgctcagggacggtcttttcttctgcggcgagcaccagctcgcgctccgcagggtcgactggctgctgctgtacagcgacctctacttcgcgccgtcgctgtacgcagtggccgagttccaggacgagctccggcggctgttcccggagaaggagagcgtgcaccacctcctgtcccggtatctgctccacccagccaaccccgtgtggagcatggtcaccaggtactaccgcgcctacctggctccggcggcgagaaggatcggcgtgcagatcaggatgttcgaccacgcctccatcccggctgacgacatgtacggccagatcctcaactgctcccggcaggagcacgtactcccggaaactgacgacgttggcgaggctgcgcctagccctacagcgtcgagcggcggctccaaaaaccccaccacggccatcttcgtcgcgtcgctgtacgctgactactacaggcggctgacgtcgaggtactccgcggcgaagggcggcggcgcgacgaggagggtgggcgtgttccagcggacgcacgaggagcggcaggcgacggagagcctggcgcacaaccagagggcgctggcggagatctacctgctcagcttctgcgaggagctggtgacgtccgggctgtccacgttcgggtacgtgagcagcggcctcgcgggcattcggccggcgatcctgctcaccgcgtttgaccacgttgtccccgagacgccgtgccggcgggctgcgtccatcgagccgtgcaacctcacgccgccccggggcgtggagtgcctgagcaggcccgcggacaaggatgacctggcacgccacgtcagggtgtgcgaggatttcaaggacggggtcaagttctttgactagcgggcgtggcgctgttactttattttccatgcattttcctgcttgctatagctacggtagcgtgtgttgattgagcaaggggatgttaacttggtcaaaggtcaactaatgttcctctcggtcaaaacaaatgtttcaccttcatgataacgatcaagtttactattct

SEQ ID NO: 39703 - DNA, 2501 bp, Zea Mays
agcgccaccagcctcattcgtcctcctcgccccatccgcatccgccgccagcagccgaatgcctcacaggccgacctcccgccccatccgcatccgccacatgccacacatgtccaacaccgccagcctcatccgggagccgtgagcaacctcccactccccaccaacgcgccttcgcctcacctcgcgatgcccgagacctgcaatagtcaccgccttcccctgagcggctgagatgcagctccacgcccgtctgcgtccccccaccgcaagagccacgttgtgcctgccgccagccccgacacctccagatgttgcctctatccatcatccgagcttgccgcccccgcccccaaacccagaccccctgcaatcgcgaggaaggggaggacgctgttgcgcgtcgctaagcatcttcgcgcccctcagtgctgctaaggagccctatctatccctgatggcgccccaaccctttgtaatatctccacctcggccatgggcattgcaaccctcgattcaatctctcctcttcgatctcagtatttaagaatttgaatgagatttaggagcaattgaagccattggacattggttgcacaacttgataaagtgaataatctgcttgcgtctgagtttgggagtctataaacatggggaagagcaaatattggtgcctttgtaattggtgaccctgctacaactatttttttctatgaattcacaagggcaatatggtacaccaatgccatacattggacagacaacaataagacttccatataccttcttggttgtatatcttacatatttatcccaaaatgaacttttaaatcatattaatccattatctgcacataagttctcttcacttccctactacccatcaaaaaaagaaaaacgccttgaattgaattagaagttttcacatttgtaccttttgataaatgatattatggtatctccataaaaaagttctcactaatgcatttatttgtttaacatggagtcaccacaaatgtgcttatcttgttgcactttacattataggcatacctttccttgtacagtgagatatctatttcatttttcaggttgaagttgatcttttgaattatggtgtgatagaaggtgatgaatcatgtaaacatttttctgaactaaaagtcttacctccatggatgatcaaagatggcacgaatcttaaaaaggaacaaagaggagagaaaattgagtcacaaaaacttgaaaaatatgaagccagagatgacaagaaacatgactcgaaatatgatcaaagtgtataggaagaatacataaatgcatattatgaggctttgaggaaaaaattggaagaggaagaagcaaaaaagcagaatgtagcatgaaggcaagatttttgtccctgatgctcaaagggaacgccaagttggtaagaaatacaagcacgatgatgatggtgaaggcattgaataggaagagcatcaacctacagttgtagttgattttgagaagtatgaagggatgattgagttcatggagaaggtggtaatacaattgattctatggagctcactggaggagcactaccttttgttagttgcctgcaagaatgtctttggaatccgatctgcttcatggtgcatcttatcctcgattgagtacatggaagaaggttgtgtcaacatggattgtgtcactctcatcgaggactaccataacaagattgaatttgaactcaataagatctatgatggaatcctcaagctctttgcttcccaccttcccccctcactaacagttccaaagtccaaggtcttctacctcaagatgaagggtgattactacaggtaccttgcggagtttgaaacttgatataggagaaaagatgcagccaagaataccatggtggcacacaaaattgctcggttaatttgcttatccttaaattcacggttctcgtattaaatttgctggctaggacattaacctttttatatgtacaatcgatcatttaattgatgtgtttctaaatgaaccaaacaatgagtggcatgctggcacttgaggggatcagtggcgacaataagaggagggttagcattgccctgcagatactcatgaggcctcgactgctcttcctagacgagcccaccaatggtcttaacaggtacgcgcttgcttctgtttcatgcctatcatatgggtgcgatgcccaagtcacaactgatgcaaccaagaaaacacgcaaaaatgtggagtgcttcggcgttcttcatggcagatgttgcgggggctgtcagctagtaaaattttagagttttatgatcctcatagcctagcatctaaacaaagtattcaaacaataaggtagaccaagcatttgcctctatatggtcaaactaatccacttttccatcaacataggtcctaacgtaaccataacccacaaaaaaaacccttatgacgaacctctacactaaactcaacattgtcaacatccg

SEQ ID NO: 39704 - DNA, 2784 bp, Zea Mays
tccaaaaatgctttgactattcaactaattttttcaggccaccagtccaccaggggtccacggcgcgccattagcgaaccgcgacctattcgccgtcgccaatcgccaatcgccaatctcctctccatctcgacatccgcagggcgttcgacgaaatgcgacgcaaacgccttgcggcgcgcgcccatgtggccaggcgtctcccccccgcacgctcctcctcatccggcctcgcgagcgcgcgagggagacgtcgctgtgccagcgcgaggcggacgtcacctcacctccccgccccgcgtagcttttctgacccggatgctacgctgcgtctccactactccgcctcccgccctgccgtccatgtcacgcctcggctccttcctttcgcctcccgactcctgcctgctgccccttgtcctcttccccacctcctccggaatctggccgcgcacctactcgtcgccctctcgttttcccgtctccgctttctttatcctgcgggcggagcgggtagggtggggcggtcgttgctctcggatcaagagaaagggaggaaaaaaaaacagcgctttctttctgtggccggcggttcgcccgtcgctcactggctgaagcggctgcacccgcgccctcttgctgtgtggccactggccaagcgggacacggaactcgagctccgtttggggattccggatcacttcgaggctaaagggattctgatcatcacttaagctcaagatcatgagttggttaaacaaaatttttaagggttcagtaaacagagtttcaaggggtcactatgatggagactggcatgaaggtcattcatctgatcacaccagagatacttacgatgacagtgataatgaagatatagatcgtgccattgcattatcgctagctgaggaagatcataataagggaaagtcggtggctattgatactgactataatctggaggaagatgaacaacttgcacgggctctgcaggaaagcctgaatgcagagtctcctcctcgacagaatgttcctattgaggatgtgccatatgttccagcaaatgaaccaaccccacatgtttacccacggggtggatccaggatttgtgctggatgccaaaacccaattggccatggacgtttccttagttgtatggattcagtttggcatcctcaatgcttcagatgttttgcttgcaacaaacccatatcagagtatgagtttgctatgcatgatgatcagccataccacaaatcctgctacaaagagttttttcatccgaaatgcgatgtttgcaacaactttattccaacaaatagagatggcctcattgaataccgagcacatcctttctggatgcagaagtactgtccttcccatgaagatgatggcactcctcggtgctgcagttgtgaacgaatggagccaagggagatcaagtacataacattagatgatgggaggaaactctgcttggaatgtctcaattctgcagtaatggattctccagaatgtcaacatctttacatggatattcaggaattttttgaaggtttgaacatgaaagtagaacagcaaattccattacttttggttgagaggcaggctcttaatgaagccttggaagccgagaaaaatgggcaccacctaccggaaaccagaggtctatgcctttctgaggagcaagttgttagaacgatcttaaaaagaccacagattggaccaggaaacagaatcttagatatgattataggaccatacaagctgtctcggcggtgtgaagtgactgcaatccttatattatatggtctgccaaggtaaattattttagggctagtttggcaacctaattttcccaaggaaaaatgaactaattttcttggggaaatggggttgccaaactagcccttacctttaattttttcctcgattgttttattgaggtcatcattcaaggtttctgccacttccactgtgaatgaacctttaatggatcctgaaatcgtgatgttcttatgtttgaagcatagctaggtagatctacttacttcttgtttatatgatggttacacagattacaaactggttccattcttgcccatgagatgatgcatgcatatcttcgtctcaaaggattccgaaaccttagtattgaggttgaagaaggcatctgccaagttctatcccacctgtggttagagtcggaaatcatcgctggttctagtagcaacgttgcatccagttcagaagcatcatcatcttcgtcatcctcagctcctacctcttcaaagaagggtgcgaagaccgaattcgagaagaagcttggggcattcatcaagcaccagatcgaaacggattcttccgaggcatacggaggtggttttagagctggctatccggctgttgagcgctatggcttgaaaagaacccttgatcatatgaagttgacagggtctttcccatattaaagcaacagaagtaaaggagggggctttcttccagttgtgaggatacactccacattggaggttttggtttgggttatacataactgatatgcataccaaacgaggggaattgtctgtaaatcaggagaaccctctgctgcgcggaaacttattgcaaactgtctttttataggaaaacgatacatgcaagttttcagacagggaacttgagaggatcatatgtaatttttgggcacttgtttttgactcctttggttatcaaaaacaaggcaacataataagattgaaatttatcttcatctttaaattcatc

SEQ ID NO: 39705 - DNA, 1970 bp, Zea Mays
aatcatcgctcgctgagcttccgttgttgcacagcacatcgatcgacgacgatatcgggaagcaatatggggttggccttgtcgcggctggaggagattaggacgcagtaccgcatggcagcggaagacggcgaggctgacagtccggcaccggcgccagtgtcgccgaccggtgctgctgctgcttccggcggcggcactgaaaagaagaagcaggcggacgactcgtcgtcgtcgtcaaagacgacagaatgggttcctcataagttctctgagatcgtcggtcaaagacgacctggtgaggatatgttccgagggatctaccttccacgatcggatcagcagccgaaaacaaaggtaaactaagagctagtccgggaacctcaatttctcaaaggattttcatttttcaaagaaaaattagtttatttttctataggaaatttgaaatctcttgacaaaattagagttcctaaactagtcctaaataattaattaatacgacaggagcgggggaggataggataggacaggagaagagagcgagcattatttaattggaaaacacatggatggatggatgtattttttaggctttgttcggttattcctattatacatggatcggatgagattggaaaaaatgtagaaattttttgatttgtttagaatttaaaaccatctaatatcacttaatccatatatatggattgattggtaaccgaacaagcccttattattttccattaatccatgcatgcagaagtactgggtagatgggagaaatgccaactgcttcatgctgttccctaaaggattcagcatcacctggggttcggacgcaaggtactggagttggcgcaagctcacacaagaagagaaaagagagatcgaccccgaggaggccaaaatggagatggaggtggcgtacctcaaggacgtgtgctggctggagatccgtgcgaagctggagatgtcccacctcactccgggattcacctacgtcgtcgactttgtagccaagctcgaacagaacggctacggctggtccgagccggtggacctccagatcaattgtcccggcgacgtcgacaggaagccgcggaaggagagtctatggaagacggttgacgggaaaaagtggtcgtacgtcaatgtcggggaggtggaggcggccgggcaaaatggggagatggagatcgccatgctcaggttaggtggggactggaagagaggactcgtcctcaggtgcatcaagattaccccaaaaccctagctagctagctaggttcaccggctataaacgacgacgacgacgatctacgtactccgactgcatgcatgcgcgcgcctctgctgccgtacgtgcaccgtaatacttagcttacttgtgctattagtgctatagtactacgtactactactatttataataagatgaataaatgccatattcatggccatgcgtggaataatatgcactcacactgtctactctctctctctctgtcttataaaatctatgatggtcaaacttcctatcgatattaatttttgaaataagtctactacacattcaacaatctctagaacatcttgagataatggaagagcaaggtaacctagatgtgtctcagcttaagcaaagaatgcctctcttgtgtgaaggctcgcggattcttgaggaagatgggatttatcggaaacaaatatctcatgaaaattgtttactcaaaggtgatgtgatttttttttcatagaattgccaatgggaggaaaagaaaaattagtattctatttcttggaaaagatggagggagaattgaaggagataagaatgttctagaacatgctgtccaattctattctgaccaatttagtcttgctcctagcaatatgttccagaatgagggtaacatctggtctgctttggaaatgttcactatcggaaacgtgttcttcaccgagtg

SEQ ID NO: 39706 - DNA, 2302 bp, Zea Mays
gatagaacgctgcggccgcagccaatcacaggccagagcacatcacactccgctacgctctcatcctccggctcatctcctttctcctccccgatgccaccgagtccaccgccaccacgcccaacacgcgtcataaaaaatgggtacgcatcaataaagaggagcttgggaagttgccaaggcctccgatttcgctaatgcgacgggtacatgaaggaaaggagtaccatagctgtgataggcctcagtgtacacacagcaccagtggagatgcgtgaaaaacttgctgttgcagaggaactgtggccccgtgctattcaagaactcactagcctgaaccatattgaagaggctgctgttcttagtacctgtaatagaatggaaatttatgtggtggcgctatcatggaaccgtggtatcagagaagtagtggactggatgtcgaagaaaagtggtattcccgcttccgagcttagggagcacctgttcatcttgcgaagcagtgatgccacacgccatctgtttgaggtgtcagctggccttgactctttggttctcggtgaaggacaaatccttgctcaggttaaacaagttgtgaggagtggacagaacagtggaggcttgggaaagaacatcgataggatgttcaaggatgcaatcactgctggaaagcgtgtccgcagcgagaccaacatatcatctggtgctgtttctgtcagttcagcggcggttgaactggccctgatgaagcttccgaagtctgaagcactgtcagctaggatgcttctgattggtgctggtaaaatgggaaagctagtgatcaaacatctggttgccaaaggatgcaagaaggttgttgtggtgaaccgctccgtggaaagggtggatgctattcgtgaggagatgaaagatatagagatcgtgtacaggcctctctcagacatgtatcaagctgctgctgaagctgatgtcgtgttcaccagcaccgcatctgaaacttcattgttcgcaaaagaacacgcagaggcactcccccctgtctctgatactatgggaggtgttcgcctgtttgtcgacatatctgtccccaggaatgtcagcgcatgtgtgtctgaagttggcgctgcacgagtgtacaatgtcgacgacttgaaagaggtggtggaagccaacaaggaggaccggctcaggaaagcaatggaggcgcagacaatcatcaccgaagaactgagacggttcgaggcatggagggactcgctggagaccgttccgaccatcaagaagctgaggtcgtacgcggacaggatcagggcctcggagctcgagaagtgcctgcagaaagtagcacctgaggtgcgacggcagcgacagccgcacccttgacgagacgctcgagaacatgcacgccctcaaccggatgttcagcctcgacatggagaaggcgatcatcgagcagaagatcaaggccaagctccgacgtccagaagctcccggtgtctagagcggagcggacacggcaacagaggcaatggatgagcacggggaaaaggaagagaacaagtctcaagattcggctttggcggcggagcagcgcgaggagacggcggcggcggagggagaggacacgtctgaggaatccacggaccagcgcgaggacgggcacgggtataaagcggacgaatcggcgggcctgctgcccgaggacgacgtgggctctggagaagcctcggcggcgccacacttcgggcacccgtgctcgttgttgcgcgcctgcgccggattcctgggcctgcacggctgcggcggcgatcagaagccggcggcggctgccgttgctgcatctgcagctgaagccgccacggcggcggcggcgagctcgtcccaggatgaagaagacggcggcgtcgacatggcgaaggctaacggtttctacatgcatgaggtgatcacccgcgtatgggcggtcgcggtgaggaggccgcggccgcggccgccggatcacgcgagagaagggagcggtggcaatggaggcgtacaccactaggagtagactcgccgcgcatggttgtctaccttggctcgctcatagcctccgcctacataaatattttgcccgtcagagatctgcggccgtctactgtctacatgcacctttaaataaatccatggctatgaagcatgaatgtctgatgtaattcatgtaggcttctccgatgcggacttcaaataagacaaagtagttgtttctgatgtttgagacgttaattaagctgcagcacccaagggcttacgcttgcgttga

SEQ ID NO: 39707 - DNA, 1100 bp, Zea Mays
caaacctaacacgccacgctccgcctccgctcctgctaaacgagacgtctttttgactcctcgtctcttctccgttctgccatctcactatccgtctctgcttagcggcgaagccagagaaacgggagtaaattaggaaaacccgctgtgcgaatcgaacatctcgaaagcgatttactgctgcgtgcgtttcggccgctgatcccgaacacttcctggcttcgtgaggataagttcagggccagccagagttttagatgaagacttgatttctcctctcagataatagagtgtttcaaaatgactgatcaggagcgagatgatgttcccatgttgctaagaaatgttgagctaccaagatttcctctaagaagtacttcaatgtgtataccagtcagggatgatgattatgaagaagacacctttgtgccccatactggtcctctattcgtccagccatcaactcagacggcaccgggaatttcatttacaggtagagacacacctgataggcttcctaaaccttcacagggaaaacaagtcagcaagccacatgcaatcatgccagaagaaataagaggaaataagtggtcttacagtgggcaggttccaaagaatgaacacttgatgatgtctgggcctttggggcaatgtgataatcccgactgtgtgaattgccctcctgcttgtaaaaacagaagacattttcagagaggttcaaatgctttagacaataagatccataatattctttatggtcacagtcgtggatggaagaagaagattgagcaaatcatggcatgcattccgattatgaacccacatgcaaagcctgttcagcggtggaatcaattctttgtcatatcatgcctgattgccattttcattgatcccctgttcttcttcttactatcagtacgacaggatggcaactgcatagtgttaaattgggaaattgctacagcgcttgctgttgtgagaagtgtgactgatgctatttatttcctccacatgttgcttcagattggcttatgttgcaccagagtcacgagtggtgggagctggagacttggttgatgagccaaaaaaagttgctatcc

SEQ ID NO: 39708 - DNA, 1927 bp, Zea Mays
caatctcgcagtcctttcttcctccgacctccgcagcgaatcggaccaggggatagggttccgccgcgcctctccaaccaggcgccactcgccagggtctaggctgatcatggaaggaaacgtcgcagccgggaagaggtcccggacggagacggcgaacggggctgccggcggcgggaagcgctccaaagtacgattgggtgcccgtttggtgagggatgtcgttttctgcactttgtccctggcggttacccggcagttgcaaaaatgctcaatctaggtagccctgctgtatctgcgccatcaagaactcatgtggatcacgccgctcttactggcacctctcattcagcttcgtcaggcaagacacgcatgtgcaccaagtacaatactacagaaggctgcagatttggtgataagtgccactttgctcatagcgaaagagaacttgggaaaccagcgtacatgccttatggagaacctcctatgggcggtcgatttggaggccgacctgaacctgtgcagccagctgccatgggccctccagcaggaaactttggtgcctcggcgactgccaagatcagtgtggatgcgtctcttgccggtggcataattggtaagggcggggtcaacactaagcagataagcagagtcacaggcgtcaagctctgtatccgcgaccacgagtctagccccaacctgaagaacattgagctggaaggcaattttgaccagatcaagcaagccggcgaaatggtgagggacctcatcgcgaccatcagcacgagcatgccggcgaaaaactcatctgctgccgtggctccagcaggaggccgaggcggtggtctgggtagcaagagcaactacaagacgaagctatgcgagaacttcgcgaagggtgcctgtactttcggcgagcggtgccactttgcccatggcgagaacgagcagcggagtggtgctgtttgagagttgagtttaaagatgctgggggtttcgaggccttagtcagcgggaagaccactgagatgcagaggatcgatgtcaatgagcgaattgttggacttgagcgcttgaatccgacaccacgccccacaacatcgccgtttctggagggtcgatggaattttgaatggtttggtgatagcagtcctggagcatttgcggcccgccttttgtttgagaggtcgcctacatcggttgcacactttatgggacttgatgtgttgatcaaggatggatactccaagctctcatctaacctcaagtttctaaacacgatacaaagcaaattcctactgactactcaattgtccgttgagggccccatcaggatgaaagaggaatacgttgagggccttatagcgattcccagaatcaatgaagaatcattgcctgaacagttgaagggcttgcttggccaaactgcaggagctctacaacaacttcctagccctataagggaagctgtttcggaggggcttaaattgccactcggtggggcatttcaacgattattcatgatctcttacttggatgaagaaatattgattgtcagggacgctgctggagcaccagatgtcttaaccagactagaggggccacaaccgagtccaggtgatggcacagcagatgcagtgatatcagaatatgaaagctaatggctgattactaactgtaactccacacctagttcctgtttacggctcctttctcctttggtcgtttttctcaggcctgcgcatgtataaaggctgtagtgttgtcaacgataacgaccacttgagtgatttttacttgcatccctttcggcggctattctgattttttctgaatgcgagcaataatatcagatgaccatcatcattctttatatgaatcaatgtaaaaaaaaggctctgcttgttcaaagctaactgatacttcc

SEQ ID NO: 39709 - DNA, 2393 bp, Zea Mays
tgctggcccatgtgcctgcctgctcaccgactcagttgggcaccagctcttctgtccgcgtgcaggacagcacagtagggcctggcccactgtagcaccagcaaaatgtgaggaggggccagatggtaggctcaacattcagtgatgagaggagactgaaaactaacgtaataaataggtgttgcttcctcgacaaggggcgaagaaagctttagtagcattccagcattaattggtgctggtcaagtaacaaaagatggagctcttggcactgcaaatgcacctattcacatggtcacagcagaaacaggtcaatttaaggatcagctttggcgtaccttccgaagcattgcactaactttccttcttatctcgggcattggtgctctcatcgaagatagaggaatcagcaaaggccttggtctgaatgaggaggttcaaccaagcattgagtctaaaacaaaattcagtgatgtaaagggtgttgatgaagcaaaatctgaacttgaagaaatagttcattatcttcgagatcccatgcgcttcacatgtcttggtggaaaacttcctaaaggtgtcttgcttgtgggccctcctggcactgggaaaaccatgctagctagggctattgctggtgaagctggtgttcctttcttctcttgcagtggaagcgagtttgaggagatgtttgtgggagttggagctcggagagtgcgggacctttttgctgctgcaaagaagcgatctccttgcataatatttattgatgaaatagacgcaattggtgggagtcggaatcctaaggatcaacagtatatgaagatgaccttgaaccagctgctcgttgagttggatggctttaagcagaatgaggggataattgtcattgctgcaacgaactttcctgagtcgctagataaagccctagtcagacctgggcgttttgaccgtcatattgttgttcccaacccagatgttgaaggtcgacgccaaattctagaatcccatatgtcaaagatcttgaaaggtgatgatgtggacttaatgatcattgctagaggaacaccgggattctctggtgcagaccttgctaacttggtaaatgttgctgctcttaaggctgccatggatggtgcaaaagctgtcacaatggatgatcttgagtatgcaaaggaccgaatcatgatgggtagtgagcggaagtcggcagttatctctgacgaatgcaggaagctgacagcataccatgagggagggcatgcccttgttgcaatccacacagaaggagctcaccctgtccacaaggctaccatcgtacctagggggatggccctaggaatggtggcccaactccccgacaaagaccagacaagtgtgtcaaggaaacagatgctagcaaaactggatgtctgcatgggaggccgtgtggcagaagagcttatctttggggatactgaggtgacatccggtgcgtcgtcagatttccagcaagcgaccgcaatggcgagagcaatggttactaagtatggcatgagcaagcaggtcggccttgtctcttataactacgaggacgatggaaagagcatgagctcagaaacgagacttgcgatcgagcaggaggtgaagaacttcttggagaatgcatacagcaatgcgaagaccattcttacaaaacacaacaaagagctccatgctctagccaacgcacttcttgagcatgagaccctcacaggagcccagataaagaacatattagcccaggttcataacaaacagcaacatgagcatactatcgaagcaccacagaaggcctcagtcgcaccagcttcccccgcatcaccagctgcatcagctgctgcagcagcagcagccgccgccgcggcagcacagcaggcggcagccaaagctaagggggtggctggtatgggatcttagcacattagagcacccccactggtttgcattgtgtatatttcaccaaacaagcaaagctgttccagcaattaacgttcaacgagggtcctcggtagtatgctaaactgctgcagcaacagaacatactgattgtgtggaagctactgttcacgtgcctcgagtgcgaagcagaaacgaaaactttatgcattgtagtaggaggcacatttagctggtgattggatcagttttgtacccaaatcgaaaacaatttctgttgtttacaccccaagaattgttacatttcgatctgcctgccgccttcaccctaacagagcataaattgtaatacattctgaataagatgtcctgtgtgcttgaatacaatgtggcagctgccgaatcgattcgtcagccccttcgatgctcatttgttgtatgctatgttttgccaggctaaaacgatcctttgttcttcc

SEQ ID NO: 39710 - DNA, 1915 bp, Zea Mays
cgctggccaagcctggcaggcgcaggcgtgaccgggcagaagcttccgcatccgcagtcctagtcccgcacccggggtcgctgaccggcgacctcatcgccgaggcgaggacgagacagacgacaccgcacccgttaccagcgcggcgcacgaaccggccagttttattcggctgccgtcgcgtgctgcggaatcaggccagggaagtgtgtggggaccggggacagaaatatcctcctgctgctcttcgtcctcgccctcggcgtgctcgcgggcgggcggagcgaggaggcggatcggggagcagagatcccggccggagggatggcgaagggtggcggggagaggggcacgctgctgccggtctcggcggacgacgggaagggcaacgacggagggggaggcggcgacgacgccgtgctgttcaaggggtccgccatgacccgccgaggcggcgccgcggcgctctcctacatggcatgctccgtgctgctagtgatgtttaacaaagcagctctttcttcatacaaattcccttgcgcaaatgtcatcacgctccttcaggttattgttgcgcaccacacctctttccttggcttatttactctacatgctagcttcgatggaatcggtccgtggagttaacgttcctatgtatacaactctacgacgcacaacagtcgtgtttacaatgacaatggagtatttcctggcaaagcagaagcacaccccacctataataggcagtgtggctttgattgtattcggagcatttgttgctggagctcgagacttgtcatttgatgctcgtgggtatgctattgtctttgtggccaacattacaacagctgtttatcttgctaccataaaccgtataggaaaatctagtggccttaatagctttggcctgatgtggtgcaatggtcttgtctgtggaccttcagtactgttcttgacttacattcagggtgacctaaagaggaccatggaatttccataccttcattctcttgggtttcaggttgtgcttctattttcatgcatcttagcatttctactgaactacaccatcttctggaacacaatcctgaattctgcactcacacaatctatgtgtggcaacttgaaggatttcttcaccgttggaattggttgggtgctatttggtggtcttccttttgatcttcttaatgttatcggacagggactaggctttctgggatctggattgtatgcctactgcaagatcagagggaagtagacggaaactccattcaggggccagtgtgcttaacaaagtagcgttgtttatgctatttgctccttggagagaaattttgtaggtgtcctatatgtattgaacttcagccctcatgaacactacaaaactgacaaggaaatagagtataccgaaattttgctgttgctttatgatcgtttctcttttaaactcgtttctcttttaaactcgaatagacgtttacaatgaataacgtatgtataaggcgagagacttgcagaatacaatgaacttatgtaaaaggcacgtgatgcaaaacgatctgactgaaatccgattactctacatccagtcttcaggctcaaatgtgaaactccttggaagatgatctggcggcccctaaatacaagtttttcatttggctagttattaataacaagtgctggactgcagagggcttgactctcggagtgttgcgtgctttgtgagcaagaagaggaaacgtgtgacatatcatctccagctatgtgtttgcaaggaaattttggcactctattctctccccattggtttttgggctgtagtccctaagagaagtgatatttgttttgttgaccggtggagggaagccctgtcctaaattcctaaaggcaataaaaatggattcaacagcgt

SEQ ID NO: 39711 - DNA, 762 bp, Zea Mays
tgcttacccttgaccgggtcgtgaggttggggcgttatgcgcccaaactcacgctcccggtgattgtgttccatgtggtggccattaggcccgtcagcgaagttgagttcgatagatgggcgccgagacgccgaccctaaagagtggatgatgcccatcttagagctgtcgacggcgaaggcaccccgctccagaaacttggttgcacgagcgagttcgagcgtgatgttttcgattcgcttttccacctccggaggccaatcctcgatttgtgcttggtccatcttgagagagatgaaccacgcctctgccttctgctctgaattgtggatcctgcgctcgagttcgccgcagtgccctgccatcgcatccgtgaggcgtgtctccatatgagataactggtcgaggacgcgctgcatcgccgcatccatcgcactcgttgacaccgaacgcagccgccggactggaattggtggtaattcctctaggattgctcttgtccgataccaaatgttagcacgttctagagatacatgaagtaaatagagaggaggaaggagacggagaacacgagaggcagcgtgattctggtttttgtcattcgcttccctacgacttcagttgcaacaagtttaagtattgttactcgtttgcactttgtgttacaaccttgtcacacccggatttaagggataaagccgggtgcatctcatatgtgcgccaaagaagaacatcacatataatgacaaagtgtatagagat

SEQ ID NO: 39712 - DNA, 368 bp, Zea Mays
ggggacccgatccccgattccccgcggggaattcctctattaggggacgggtatgggactaatttagtccccgcggggatctaaatgggggaaatttaatccccgtcgggttcgcggggacggggacggggaaccatcccccgtccccgttccccgtgtacccgccccacgaaactattttatccaagttagttaatttacttgttaaaattatagtaagaactcagtacatagcatgttataaaatagaaaactaaactatgtctcttgtaattttcaatcttgtttgttaaatttgtattaatttgatacaatcaatttaaatttatcttcaaacattgtacttctagcggggacagattccccgt

SEQ ID NO: 39713 - DNA, 757 bp, Zea Mays
gtatatatatgagccccaaaggagctgagttcagcaactcaagcttctcggccagtttcagcgacgtattcagtctagtctgtagacgttaagagcaagatgagcagcagcagtgttcttcttgtcagtgctgttctggtggcgctcgtcaccctgagctcatgcaggagcctgggagagttgtctgagcagaagacctactcctctgctcccagctatggtggctccccaactcctacgtacgcatcaggagaaggccacgagccaacgccaacaccatctcatcatggcacaacaccgacaccatcttacggcacaacaccaagtacacctgctcatggggtccctgaaattcccaagcatggatttgttggatcctgcgactactggaagagccacccagacatgatcattgcagttgttgggtcccttggcaacattggcaagacctttggtgctgcctgcagtctgctcgtcggcaagaagcttgagaatctgcatgatgcactctcgaacaccagaactgatggcgttggtgccctgctacgtgaggggccgggatcttcaagaaggcaaatgaataccactactaggacatggatatctccgtactatactgtttctcacaattcataccacctttcatttcttccccttttggttttctcgtgtaacatcacctctaagctatgttgatcttgttttttttttattgtcatgtattatcatgtctaatatacatatgaaacgaaatcaa

SEQ ID NO: 39714 - DNA, 5024 bp, Zea Mays
ttggtctagagatgagctacgtcttgtctatggtgtttctgagcgtacagaaagcgatggtgcagctaatttaattcagaagttgagagctataaactatgctctgggtgaactaggacagtggtgtgcttacaaggttgcactgtcattcttgacagcactacagaatgatgaaagggccaactatcaggttgatgttaagtttcaagagtcatacttgagaaaggtagttgatttgttacactgccagttgactgaaggggctgcaatgaaaagtgacagtaatgatgttgaaatgcataattctgaaaaccccaagccaaatgaacttgaggagggagagctacctgacagtcatgctgtttctgtaggtgaacatgtagatgaagtcattggtgccgcagtggccgatggaaaagttaccccaagggtgcaagctttgataaaaatacttctcaagtatcagcacactgaggattttcgtgctatcatatttgtagagcgagtggttacagcattagtcctccctaaggtctttgcagaacttccatcgttgggctttatacggtgtgcaagcttgataggtcataacaataaccaggagatgcggtcgtgccaaatgcaggatacaatcacaaaatttcgtgatggccgtgttacactgttagttgcaactagtgttgcagaggaaggacttgatattaggcagtgcaatgttgtcattcgctttgaccttgcaaagactgttttggcctacattcagtctcggggtcgtgctagaaagcctggatctgactacatattgatgcttgaaagaggaaatatgtctcatgaagctttcttgagaaatgctcggaatagtgaagagacattgagaaaagaagctattgagagaactgatctcagtcatctcgatggcacttctatgctaagccctgttgatatatcacctgattctatgtatcaggttgaatcaacaggtgccgttgtcagtctgaactctgcagttggactcgtacatttttactgctcacagctgccgagtgacagatactctattcttcgaccggaatttattatgcaaaagcatgagaaaccagggggttcaacagaatattcttgcaaacttcaactcccttgtaatgccccattcgagaaacttgaaggtcctatatgcagttcaatacgcctggcccaacaagctgtttgtttagctgcttgtaagaagctacatgagatgggtgccttcacagatatgcttttacctgacagaggaagtggggaaggagaaaagactgaacaaaatgatgaaggtgatccactgcctggaacagcacgccatagagagttctttcctgaaggggttgctgaaattctacatggagaatggattttatctggaagagatggttaccaaagttcacagtttattaagttatatttgtattctgtgaactgtgtaaacattgggacttcaaaggaccctttcgttacacaactttcaaattttgctcttatttttggcaatgagctggatgcagaggttttatcgacgacgatggatctctttgttgctaggacaataataacaaaggcatctctcgtattccgtggaccaattgaaattacagaaagtcagctgatcctgcttaagagctttcatgttaggctcatgagcattgtacttgatgttgatgttgatccctcaacaactccttgggatccagcaaaagcatacctctttgttcctgtgggagctgagaaatgtatggatcttttaagagagatagattggactctagttaatagcattgtgaattctgatgcctggaacaaccctcttcagagggcacgcccagatgtctatctaggcacgaacgaaaggacacttggaggggataggagggaatatgggttcgggaagttgcgccatggaactgcatttggacagaaagcccaccctacgtatggtatcagaggagccatcgctgaattcgatgttgtcaaagcgtctggattagttcctggtcgtggatggggacattttaatgattatcaaaataaaggcaagttgttcatggcagattcatgttgggatgccaaagatcttgctggaatggttgtaactgccgcccactcaggaaaaaggttctatgtggacagtatttgctataatatgaatgcagaaaattctttccctaggaaagagggctatctgggtcccttggaatacagctcgtttgctgattactacaagcagaagtatggtgtggagttagtttataagaaacaacctcttatacgggcacgcggtgtttcatactgcaaaaatctactttctcctagatttgagcattctgaagctagcaatggagagttctcagagaatcttgacaagacatactatgtatatttaccacccgaattgtgccttgtgcatcctctccccggatcacttgttcgtggagctcagaggttaccctcaataatgagaagggtggagagcatgcttcttgcaattcaactgaaggacataattgggtatccagttcctgcaaataagatattagaagccttgactgctgcgtcatgccaggagacattctgctatgaaagagcagagctgctgggtgatgcatacttgaaatgggttgtgagtagattccttttcctaaaatatcctcaaaagcatgagggacagctcacaaggatgcggcagcagatggttagcaacatgatcctgtatcaatacgccctgaataaaaacctccaatcttatatccaagcagatcgatttgctccatcaagatgggcagctccaggagtgttacctgtatttgatgaagaaacgagagattctgaaccatccatctttgatgaggaatttactcctagcagtgagttacaaaagaacttgtatgatgactatgatggcgatagcatgcaagaagacggtgaaattgagggagattctagctgctatcgtgttctatcaagcaaaacattagcagatgttgtggaagcacttattggtgtctattatgtagctggagggaaaattgctacaaaccatctgatgaaatggatcggtattaatgcagagttggatcctcaagagatcccatcttcgaagccatataacatacctgagagcataattaaaagcatcaattttgacacattagagggtgcattgggtatcaagtttcagaataaaggcttacttgttgaagctataacacatgcatcaagaccatcatcaggtgtttcctgttaccagcgcctggaatttgttggtgatgctgtattggaccatctcattacgaagcacttattttttacttatacggacctacctccaggccgcttgactgacttgagagctgcagctgttaataatgagaactttgcaagggttgcagttaaacataagctacatgtacatcttcgccatggatcatctgcattggagacacagattcgagagtttgtgaaggatgtccaggaggagctttcgaaaccaggtttcaattcttttggccttggggattgtaaggctccaaaggttctcggagacatttttgagtctattgctggcgcaatattccttgatagtgggtgtgctacctccgtagtctggaaggtttttcagcctctgcttgatccaatggtgacgccggacacccttccgatgcaccctgtaagggagctccaagagcgctgccagcagcaagccgaaggattagaatacaaagcatcccgtacaggcaatgtagctacagttgaagtcttggttgatggcatacagattggtgtagctcagaacccacagaagaagatggcacaaaagttggcggctagaaatgcacttgttgtcttgaaagagaaggaaaccgcagcaaagaaagacactgaaaaggatggcgagaagaaaaacggttctcagttcactaggcagactctgaacgacatctgcttgagaaggcaatggccgatgccacagtacaggtgtataaacgagggtggccctgcccatgccaaaagatttgtttatgcggtaagggtaaatacatctgacagtggatggactgacgagtgcattggagagccaatgccgagtgtgaaaaaggccaaggactctgcagctgttcttctgctcgagctgctgaatcgaaattaccgtggcaagcctgatggaaaataatctttggtgatgttctgtggtggtaggtagacgtggaagcatccatcattctgattatacccccatgcagtgcttttcagcaaagcaaattaatggcctttgttgatgttcttggtggcggtattggtgatatggaggcattcaatgcaagcataagcagagctatggggagtgggattagaggattattattagttttgtctgaggtgactactaggtattttactggcgaggtactgaggtcacaactcacaaatagcagttgcaaattgcaatagaggaaatgatgataggttgatataggatattggaggcctcttattcatcgattgtataagatgtttacagaacagtgcattgatccattaaatttatattgattgatatttttatagtggatgcgcctgcagctgggaactcggggttctctatcttggcctcgccgaccaaatatcacgtacgtcgacgtccgcgaacagtatatatatggcgggcgtgatccccttgcgcatggtacagagcaagacgctgagctggatattctgataatcccgtatactccaacagaaactacagaatggaatcaagttgtacctgcgtttctgctgctcaaaaattgcgagatggaccatggacgtgtgttgtttggcaacaacgacgcaaccagcacggacaagaaggggggacatgcagtctctcgaaacctgtcctatacaattagaaagaaaaaaaagagggaaaataaaaggaaaagaacgcgagggcagggccggccggtcggtcggtgcctgcgccgcacttttgtcatgtgcctagcaca

SEQ ID NO: 39715 - DNA, 3288 bp, Zea Mays
cttgggcctggtccgcagaacctacctctatcctgtcctcccgtcgcctgcgagacgcccacggcccacctatctgcaggctgcagccgctcgccccatcgcgtcgaggacgccgcgccgccaatcgccgcccagctgccggtcttccccgcgcgacctaccccgtcgcctgctaccatgccaggccgggctcttaaatcctagctaggctcagccaatccccgcgccaggatgccgtcaacctcgggtccggttgccgtggcgtcggcttcggcgtcggcgaaagccgcgccgtccccggacgtcgggatctcgccggacctgtacccgtcggaggacgacctggcctacgaggaggagatcctgcgcgagcccttcaagctcaaggggtggtggcgctacctcgtggcccgcgccgccgcgccgttcgccaagcgcgccgtcatctacgagcgcgcgctcaaggcgctcccggggagctacaagctctggcacgcctacctccgcgaccgcctcgaccacgcgcgcccgcaccccatcgatcaccccgcctactcctccctcaacaacaccttcgagcgggcgctagccaccatgcacaagatgccgcgcgtctgggtcctctacctcacctcactcctcgaccagcgcctgctcacgcgcgcgcgccgcgccttcgaccgcgccctccgcgcgctccccgtcacgcagcacgaccgcatctggccgctgtaccttcgcctcgcttcgctcccggcctgccccgtagagacgtcgctccgagtcttccgccgatatctccaattcgacccctcccacgccgaggacttcatcaacttccttgtatccaccaaccactggcaggaggctgctaaccgtctagcttccgtgctcaacgacgatgggttccgctccgtcaaggggaaaacaaggcaccagctctggctcgagctctgcgatatcctcaccaaacatgctgatgaggttgccggcctcaaggtagacgccatactgcgtggtgggatacgcaagttcaccgatgaggtcggcaagctgtggacctcactggctgattactatgttaggagaggcctttttgaaaaagctagggatgtattcgaggagggtgtttcttcagtggttaccgtcaaggagttcagcgtggtatttgaggcatatacacagtttgagcagagtatgcttgcggcaaagctcgaggctgctgaggaagaaggggctgaggatgtgaacgagggagggggcaagaagagcgggatcgataatttatcgaagaaattcctcgatggattctggttgaacgacgaagatgatactgatttgaggatggcaaggtttgagcggctgttggatcgcagaccagagcttcttagcagcgtgctgttgcgacagaatccacacaatgtggaggagtggcacaggagggtgaaactctttgaaaaggatcctgcaaggcaagtagcgacatatgttgaggccgtgaaaactgtagacccgatgaaggcagtcgggaagccccatactctgtgggtggcatttgcaaagatgtacgagaaacacaatcgtctagatagtgctgaagatatcttcaaacgggctactcaagtgaattataaggcagttgaccacttagccagtatctggtgtgagtgggcagagatggagctacgccacaacaattttgacaaggctattgagctgatgaggcaagcaacagcagagccctctgttgaactgctgctgagggggatgagcctgtccaaatgaaagtgcacaaatctttgaaactgtggagcttttatgttgatctggaggagagccttggaaccttagactctacacgtgtagtttatgagagaatactggatttacgaattgccactccacagataattctcaattatgcatatcttcttgaggagcacaagtatttcgaagatgcatttaaagtgtatgaaaggggcgtgaaaatattcaagtatccccatgttaaggccatttgggtaacctaccttacaaagtttgtacatagatacaagagaagcaagttagaacgagcaagagaacttttccatgaagctgtccaacaggctcctccagaggaaaagaagcccctatatttacaatgggcaaaactggaagaggactatggtcttgcaaaacgtgctatgaatgtatatgatgaatctgtaagagctgttcctggcagtgaaaaaatggccatgtatgaaatctatatagcacgtgctgccgaactctttggtgttccaaggacaagacaaatatacgagcaagcaattgaatctggcctcccagacaaagatgttctgacaatgtgcatgaagttcgctgaactagagagaagccttggtgaaattgatcgtttcgcgtgccatctatgtgcatgcatccaactatgctgatccaaataatcctgacttttggaagaagtggaatgactttgagattcagcacggtaacgaagacacattcagggagatgcttcgtatcaaacggacagtggctgctagccgtagtcagacacatttcatactaccggagtacttgatgcagaaggatcataggttaaacctggacgaagccgttgacactctgaaacgtgctggcgtccctgaggacgagatggcagccttggaaaggcaactggctcctggaccatccactgcaccagcagcaacaccaactgccccagcctctgctaacaggacgatgaattttgtcagtgctggagtagaggcgcaggcagacagcagcaggcaacaggctggtaacaacgaggacattgagctgcccgacgagagtgacgacgaggaacccgatgtccaaattgcggagaagagtgttcctgctgcggtatttggtgagctcggcaagagagctgccgagaagaacgaggaaagctcaggtgcccaaggaaatgagcagctgggcgccctcgagaggataaagagacgacgccaatagtaagccgttgctaagattgtgcagccgtggtatcagcacgagctttatttaacgatgttgtacttgttacgtgtaaacaatttctttgtacaaacattgaagggagttgatcggcgtggccatttctgtgtagtcttgggtttgtttcttctccctcgaaagaacatgacaccaaaacatcatttctttggttcgtttctagattttattcgtccaaagcattagacgtgaagaaagccatcaatatcatgaaaggacaggcaacgtccgaaatcatgaaaggac

SEQ ID NO: 39716 - DNA, 1499 bp, Zea Mays
tttctcccgacgcgacgcccgctccctcacgatttccgcccccttgtctgttctcagcatttccgctccccttctcgtgttttcaaactcccaccacgagacgagcgaaccttccacttgtaatccagccgaccgtacccgctgccgtcgcgcgccggcatttgcccctgcccggcgccagctcgatagctctgctgcttcctcgccatctccgactccgcggcgagccgcgcgcccgtcggctagcggaggcgggagggcggcggtaccggtgaagtgtcgtccggaggaggaggaggaggaggagcgggatggggttctgggtagggctggtgttgggggttgcggcgggcctcgccctcatcgtcggcttcgtccgctgcgagaattctcgctccgcccgtcggcgacaactggctgctaccgttgctagtttctcaagaatgacgattgaagattcacgaaagttactccctgctgacctatacccttcttgggttgttttctcatcgcagcaaaagttaaaatggcttaatcaggagctgacaaagatttggccatttgtaaatgatgcggcgtcagaactgatcaaaacctctgtagagcctgttcttgaacaatataggccaataatcattgcgtccctgaagttctcaaaactcactcttggtactgttgcaccacagtttaccggtatttcgatcattgagaatactaaggaatcaggtattgtcatggagctagagatgaattgggatgccaatccaagtatcatacttgctgtaaaaactagacttggtgtcgcgcttccaatacaggtgaaggacattggctttacaggagttttccgcttaattttcaaaccactaattgaagagctaccttgctttggagctgtttgcttttctctacgacagaagaaaaagctggatttccgactgaaggtcattggcggcgaaatttctgctgtacctggaatttcagatgctcttgaggacactataaaaaatgctattgaggactcaataacatggccagtaaggaaagtcattcctattatacctggggactacagtgatctggaactgaagcctgttggtaccttggaggtcaagcttgtgcaggcaagagatttgacaaacaaagatctgataggaaaatcggatccttttgccattgtatatgtgcgaccattaccagacaaaatgaagagaagtaaaacaattaacaacgatctgaaccctatctggaatgaacactttgagtttactgttgaagatgctgatactcagagtgtaaccgtgaagatttatgatgatgatggcattcaagaatctgaattgattggctgtgctcaagtcaggctgaaggatctacagccaggcaaagtgaaggatgtctggttaaaacttgtaaaagatctggagattcaaagggacaggaaagatcggggtcaggggtgttgtcatagacgtacataatatttttctcgtggcata

SEQ ID NO: 39717 - DNA, 208 bp, Zea Mays
cccatttcctccccacatcccatcagtttctctcgtgccagtttctctcgccccggttctctctcgctcgtcgccgcgcagcattagtcgccgagagcgccgtccgcgtcgaatggtactcgccatcgaactccgtcatggtggtgatcgcaatctgtcttcaagcttcgagggatcaaagatcaagcgttggcgaccaagtgatcaa

SEQ ID NO: 39718 - DNA, 2503 bp, Zea Mays
acacctcctacggcacacccacactgcctttgcctactcccgtcccgtcgcagccgtctcgctcctccgtctccattccccgcctcgtcccgccgcagccgcggccgcgaggagccttccccgcctctcttcccgctcgctgggccctgcggctcgcagccagcattccgggctcctggtcgccgtgagccttgggaggttttgcgcggatctgaggctgcccgggctggggaattcgggctgatacctcgcggcgggagtcgggctgagttgatttggcgagtttaggtgtgcggagggaggaattccgggaggaacagttggttggtctgcgagagtttggtgggcggtagggtggtcgggcgggcgggcgggcgacgtacttgcgccccggaggccgccgtcgctgcttcgggcaagcgatgatcgagcagttcgtcaacttcgtcatccggccgcctcgtgcagagtacaatccagatcagtatttatgggagccagagttcactcttgccggaaggaagtataaaaggctagatttggagcttacgaatgaaagaagtcagaccttaaagtgcagccactatgttcctgctgtcatcccagaaaacacttcccttccatgtgtagtctactgccatgggaatagtggatgcagagcagatgcaaatgaagccgctgtcatacttcttccttcaaatatcaccctttttacacttgactttgcgggatcagggctatcaagtggagattatgtcagccttggttggcatgagaagcaggatctcaaatgtgctgtgtcctttctgcgtaagaataagcaagtttcttgtataggtctttggggacgctcaatgggtgctgttacaagtctgctatatggagcagaagacccctcaattgctggcatggttctggatagtgctttcgctaacttatatgacttaatgatggagcttgtagaagtttacaaaatacgagttcctaagttcacggttaagatggctgttcagtacatgcgatgcgtcattcagagaagagctaaatttgacataatggatcttaatgttgtccagtttgcacccaagacgtttattcctgcactatttggacatgcttcaaatgatatgtttattcagcctcatcacacagaccatattcatcaggcttatgcgaccccagttttattacgactctgtttcaatattcttctacaacgttcttcacccacctcagtttccttcaacctgcacacataaacttgataagtattataaccttggtgcttttaagggtgctgctggtactaatgagagcttattgtatgagatcatcaatggtctacgggcagctggcactgatgcaggaagttcatcagctgctacagctagtttcacgaatgctacaaaatcagtagttgaattgctgacagagagggtaaatcagctatctgttaaaaatgataatgacttggtaagtcaatcattgcctgctcttcctcttctacttgagatttttaactccactcgagtgcaggattttcttttggatgaaaaccataaccttactgagatggacggtaacacaggagagtgtcatttagaggataaatcaaacagacaaacagatgaatgctgttcgtataccagctcaaaccgagagagctggggaagatgttcttccttgggtggagctagtgatggattgtcatcaggcgaacagcctgagatacctaatcataagcttaagagcttgacactaagggctctagcaaccccactgagacgggtacaaaggaaacctctcgcgatcccgaaggagaagaatcgatcactgtggaagaggttgaaaaaggagaggcaacagatgggggaaaacatatcccagcgtctgcggttgtgtctccaaggccaggctcgacacaagagaaccaaatcgtcttgacaactgtggatacatatttagctcttggacaaatctgctaggaactcactgatgattcagcaaccgagccgcgccgcaatttggagcttctggcactcagcgccaatcgtgccgtgtacattggttgaacattacctagaaatcttagatcatggattgtcccggacccaatgtgttaactgtcagtctttaatgttcgtttcttatgtttttttccccaatgtaatcctgtaaatttgaaggctagaactgcccatgtacttgtggttgagggagggacaccggttcgttgcttttttcaggatttgtgtagggtttggaggtcgagctgtatcgacagaatctcattttctatgttgctcggtaacgtctctgatttgctatgctggcgtgacatggttgattggttggtgaattgcacacgtgcatcgcatattcacattggttcctgtcctgagccattctctgattttgtgtgggtttgacttcgccatatggcaatcatacgtgttctgcaaatgcgaatccagaatcttatcaccacagcacattccactaa

SEQ ID NO: 39719 - DNA, 2619 bp, Zea Mays
cagcccaactctctcgcagccaatcccgccgctccgccgcccgcacccaatccgtttctctcacccccgccactcgccagcaacgcggacacgccctccgccgctcttcctctgcaccccagtcctctcccacaaccacttccggcggccacgccctcggcttctccgtacttgctgctcgcccgtcccaccaccataattttccaccagcgattgtaaatttgtgggaggcacattcgccgaggatggctgtaaccctacttcgagggatgagaacgccgataccattcagatcgaactccggcttcttctccactgtcctacggcctcggttgtcccgcttcacgactagggcggagagtgcgcaggccacagaacccaaagcggcgcccaggtcaattcagctggcgaccaaggaggcggctgagcagaaaacacaaggcttcgaagccatcatcgggattgagacccatgtccagctctcgaccgtcacgaaggcgttctgctcctgcccttacagctatggttcccagcccaacagcactatctgccccacctgcatgggccacccggggacgctgccggttctgaatgagaaggtggtcgagtgcgccgtgaagctggggctcgccctcaactgcgagatctcaatgacgtccaagtttgatcgcaagcagtatttctacccggacctccccaaggggtaccagatttcccagtttgacatccccattgccaagaagggttgtgtcgatttggaccttccagtggagtttggtggtgggcataggaaatttggggtcacaagggttcacatggaagaagatgctggcaagctgcttcattctgaatccagcagctactctcagatgggggagctaggtataatctcagcagtcccatcttcctggtgaaagtaactatttgaaagtttgaatcatctggctataaatgcatgtgataggctcacacaagaaagggaaatccagagggaatgaaaagaattacacagcgtctcatcacataaaagtacagcagcttcagttattgatcagtggttgctactttggctggttaggttgacctaaacagggctggcgtacctttgctcgaaattgtctcagagccagacatgagaacagggatagaagctgctgagtatggtgctgaactgcaaaggattgttaggtacctgggagtgagtaatggtaatatgcaagaaggttcccttcgttgtgatgtgaacgtttctgttcgaccagttggacaatcagaatttggtacaaaggtggaaataaagaatatgaactcattttctgcgataaatagggcaatcgattatgagatctcccggcagattctgctccataaagaaggccaggctgatcaaattgtacaagaaacccgcctgtgggatgaatcttctcagaaaacttttacaatgcgaaaaaaggagggacttgccgactatagatattttccagaacctgatcttcctgaagtagttatcactagtgactatattaatgaaatcagcaagtcaatgccggagcttccagaagcaaagcgtaggcgttatgagaatatgggactcagcatgcaagatgttctgttccttgctaatgatgataatattggtcatttctttgattctactcttgagcatggtgctgatgcaaagctggctgccaactggatcatgggtgacatcgctgcttatctcaaagatgaaaaagtatccattgatgaaattaaattaacacctctagagctttctgaactgatagcatcaattaagaatggaactataagtgggaagatcggcaaggagatactggccgagctcattgccaaaggcggaacagttaaggctgtgatagaagagaaagatttggttcagatagcagatccagcagcaattgaggcaatggtagataaagtaattgctgataatccaaagcaacttgagcagtaccgtgctggaaaaactaagctacaaggattttttgctggccaggtgatgaaagcatcgaaggggaaggccaacccagttttgttgaataaaattcttggagagaagctaaatgccaaataattatttttacccccatactgaatctcaggcgtccatgaagaatgggacttcaaattcatagaatgagattaatgtgaacgacgtagaagttttgtccacaatacagatattattgtactaagctgatactttaaaagggcgtgttcattatattttatgcgatagcttgccctaatcatttgtgcagtttccatggattgtgtactgacttcgctgtttattttttttcgctctctgcaacccacaatatttataacaattttcattaaaccaaaaatgtattctctgttctaaactataattcgttttagactaaatatacattcattaattaatacaataatttgtatgaacgtctacattcattatcaattatggggaaaaaaaaactagaaaggactatattttggggaggaattattgaacagcagcaatgacctgacctataagaaagagtgtttggtttgaagaatttgaagaataagttagtctattatctacttatctcttactttttaatttcg

SEQ ID NO: 39720 - DNA, 2982 bp, Zea Mays
ccgccagcggccgaatgtcgcgcaggccaacctcgcgccccatccgcatccgccacatgccacacatgtccaacatcgccagcctcgtccgggagccatgagcaacctcccactccccaccaacacgccttcgcctcacctcgtgatgcccgggacctgcagcagtcgccgcctcccctgagcgtctgagatgcagctccacgctcatctgcgtcccccgccgcaggagccacgttgtgcctgccgccagccccgacacctccagatgttgcctccatccatcctccgagcttaccgcctcgcccccgcccccaaaccctagaccccctacaatcacgaggaaggggagaacggccgaggaggatgctccgcaaggaaggggaggacggtcgaggatgacgttgttgctcgtcgctgagcatcttcgcgccctcagtgctgccaaggagccctctctatccctgatggcgtcccaaccgttggccgatcgtcggcgatgatgacccagcctccctctccacgtccctgctccccaactcatacaggaattcacaagagcaatatggtacaccaatgccacacattggacaaacaacagttgaagttgatcttttgaattatggtgtgatagaaggtgatgaatcatgtaaacatttctctgaactaaaagtcttacatccatggatgatcaaagatggcatgaatcttacaaaggaacagagattagagaaaattgagtcacaaaaacttgaaaaatatgaagccaaaggtgacaagagacatgacttgaaagatgatcaaagtgtacaggaagaatacataaatgcatattatgaggccttgaggaaaagttggaagaggaagaagcaaaaagcagaatgcagcatgaaggcaagatttttgtccctgatgctcaaagggaacgccaagttgacaataaatacaagcaggatgatgatgaagaaggcattgaataagtattccagctttcttatatggacagtaggaacccaaggtttgctgtgtaatccattatcaacagttgcactcacattagccttgtggcgattcttttcaaaacaggatgatttaaacccatatgttgttccaatggctatgggcatttaacgtcaactagagagtcccttggatatgactacaagtactatcatcaggaggattgttgctaaccatgaagcttacctgtgtattgtcagctttcaaactcgatgaaccaactgagaaagtactgcttatgaagctagagaagcatggaaggagtgttgctgaatcaaaggcaaaagaagaagctggaagagttttgatttgcatgaaggataggtcctcgacacagttcagcagagatgctggctctatgcccaaggtgtggacaggaaaggaggacataaaagccataactaaaactgttcgctcagttgtacgccagatgctaatatttaatactctatatatagaatactgttgaagacgcttctaaagcactagagtattgtagcactgatggaaggccttcgatgaaatgtttccctgaaagttgcatactacatcgctgaagcactacaatattgtaacactgagggaaggcctttgtatcatgacctaaattcatatagggccctctttgatgagttgattttgagaagtatgaagggatgattaaggtcatggagaaggtggtaatacagttaattctatggagctcactggaggagcactaccttttgccagttgcttgcaagaatgtaattggaatccgatgtgcttcatggcgcatcgtatcctccattgagtatagggaataaggttgtgtcaacatggaccgtgccactctcatcgagggctaccataacaagattgaagttgaactcaacaagatctgcgttggaatcctcaagctctttgcttcccaccttcccccctcattaatagttccaaagtccaaggtcttctacctcaagatgaagggtgattactacaggatattgctttggaggagttggcccccttatcctattaggctttggctgatgcttaacctctcaactctcctgatcttgctcgtggtctccccaaacaggcaaagccaacgaatgaaagggactcactcgcagcaacaaccaaaaagctgatcacgcattctccttttcacatttgttgcatttaattaattcatccaatagcataaattggcactccttttgtgttattgctctttggttggtcttattgttgttgttgtactgcttgccatgtgtattttatcataagtgttgttttggctaatccctaacgatgcaatacatttgagcaacaattcaattgttttgttttttgaacagttattctaaatacccaatgttcacagcatatttcacttcccatggttcactgttttgttgtattagtagctctaattctaaggtgtcaatgaatcttaggcgaaagaattgttcgtagtagtggtccagaacagacttcatactgtgatttacagacttatgttttactagctgagtactcgtgcgttgcaacgggaatatataataacagtacactacgataacttatatacataatatgtgttataccgttatgagaaaatgttttataatcaatttgtgattctggccatacataaattttgttattttaatctatctgtttcaccactacattgcaaccattagtatcatgcagacttcgatatatgtcacgatttgcatggtctcatcattggagagcacgttccacacatgcaggaagaaattcccccgtacatcgttagtcattagacacgtaccaccatatgcttttgcttaaacaaaaaggcaagtgtgtgtgtttgcgaagagaattaaaggcaagtcggcacaaaagctaccccaatggtggcgaggatgacgaactggtcattattgtcggtcctcctctgcgtcacctcctgcgtcgtcaagatgacgc

SEQ ID NO: 39721 - DNA, 2191 bp, Zea Mays
tatgctgtgtcggcgtgcgcctgcggccgcagctagcagcctgtgcttaattggatgcagttgcagcgatccgtcgaccggccggtccatccgtccatggtgagtggcggcagcatcaaggagcagcagcacgagatgaacatctccttcgcgatggtgaaccaccaccaccaccatcagcagcctccatcctcgtcctcttcctcctccatgcacgcggccgctgcgagcttcatgagcggcaaggaggcgtcgtcaggagcgtatgcgtatgaccatctgggcgagctggaccaggcgttgttcatgtacctggatcacggcagaagccatggcggcacgccgcagcaagagcaaaggcagacactcaacatcttccccatgcatgtggagccgtcgccgaagggggagattagtttagttctgcccccggcgccggtgggatacaagcagcctaggtcaccggaccatcaccatcaccagcatgcggccatggaggagttgttggcggagagcaggaggcagcaggagcaccaaccctttgctgccgctgctgagccggcagcagcacccgggatgatcaaaggtgtcaagccactggccaagaaggatcataggagaggcacatcgaccactgaacgcgacccaaaagcttacatccagcaactcgagtccagcaggatcaggctagctcagctcgaacaagaacttcacactacaagagctcatcagggagttttcttccccaacggcggcatcctcgctggccaaagtgtcgtcggcaaaggcgtccccatcggcggcatcgacagcctcagctcagaggcggcgatgttcgatgtggagtacgggcggtggcaggaggagcactaccggctgatgtacgagcttcgggcggcgctgcagcagcacctgccggagggggagctgcagatgtacgtggagagctgcctggcgcaccacgacgagatgttgggcatcaaggagggcgccatcaaaggcgacgtcttccacctcatctccggcgtctggaggagccccgccgagcgctgcttcctctggctcggcggctttcgcccctccgaggtcatcaagatgctgctgagccacgtggatcccctgacggagcagcagatcgtggccgtgtacgggctacagcagtcggcgctagagacggaggagacgctgagccagggcatggaggcgctataccagtcgttgtccgacaccatcctgtccgacgcgctcagctgtccctccaacgtcgccatctacatgggccagatggccgccgccatgaacaagctctccacgctcaagggcttcgttagacaagctgagaaccttcggcagcagacgctccaccggctgcaccagatcctgacggcgcggcagatggcgcgctcgctgctggccatgtcggactacttccaccgtctccggacgctcagctcgctctgggtcacacgccccagggcgccgcaggagcagcagggccacagctagcggcggcgacggccagtggtgacgaccgccggccgcacgcaacgctagctggcgcacgcatgtgtccattcattgcatatatgagtcatgcatggtgcgtgtgtgtgtgtccgtcgcgcgtcgttcgtcatcggttcaaggaacagaccggacaagaattgggctttgcaggtaatagctactaagccagttagggccgggctggggaagagagagctagcgaggccgagggatcaacaaaaggataatgttaagcttagcgacgattgtcgtcttcgttggttgcttgtagctatagctagccatctaggtgtacttgatcgttcgatcgcggtctatcggtacggtcggctcctgcacacagtagtcaatgtgcggctgattgatgatgttctaagttaggtatctcacgatcaccggtcgccggatgcgtatgcctcgtcgccgtcttagtttggagtgttgaagatgtggggtcttaggcaaccgtggtaccgcgggtcgatgtttggcaacgcgaggaactagctagacaccgtgcaaatccgcaacgtacgggccaaaatagagtatatatatatgagtggtaatggagggagaggaggtttatatggtaaatgtagacgtatatacaaactacattttatttatatgtaagttaatgaatatatatttaatctaaaac

SEQ ID NO: 39722 - DNA, 875 bp, Zea Mays
aacccgcgcgccagcccaactgcccaacgaagctatcctcatgcaatgcatagagggctccatacctgtctcctcgagcacaaggtgaataatgccgggtttgttggccttgagtacatccaagatcgtatagatggcacttcaacgacgagcgaggagaggctggagctgctgctgaaatggtgcctccgggagacttgcgatgctgggaaggaatgcatgaggataaactaccacggcacgaagcaagtcacccgagcactcctgccactgctgctggcctccgacagcggaaggatcgtcaatgtctcctcggtgcttgggcagctcaggtttttcggcagcgaggcgctgaagcgggagctggacgacgtggcgagcctgaccgaggagaggctggacgaggtggcgggcgcgttcgtggcggacctggaggccggcgccgtggaggcgcgagggtggtggcccgccgggttctcgccggcttacatggtgtccaaggcggcgctgaacgcctactcgcgcgtcctggcgcggaggcaccccgcgctgcgcgtcaactgcgtgcacccgggcttcgtcaggaccgacatgaccgtcaacttcggcatgctcacgcccgaggaaggcggcagcagggtggtggccgtcgctctgctccccgacggcgggcccaccggcgcctacttccaggagcgccagcaggcgccgttcgtgtgacgcgctctgcctctgctctgcttccttcaccacccgatgcttgatagctatgtatctcttgaagttttcgcttgataatagttgatacacattcaatccccgcgcgtaatctctccgttgcaaaaataatggaatcctaagttttggacaagtaa

SEQ ID NO: 39723 - DNA, 6066 bp, Zea Mays
tcactgtaaaatcttccccaccgcccatatctccctcttatcctctcacgttactctttcctgtttccagaatccactcgacacggttcctggtaccatgggatccctgtgggtgctccatccgtttcctttcgcctacaacaacatcgtcgtgccgcgttgtcgactgtgttcagccccgagccatcgaccaccgaccccaacagcgccgcgcttccctgaccctgaccccaaacatcacaaagacctgcgcacgtgctcctcatcgaagtgctcgacaaaccttgcctcgccaacgtctcgccaagttgtcagacccgtcctcgagtttggtggagtcccaagcttgcacgccgtcgactccctgctcgcctcgcttcgttgtcatcgttcactatcttcgtcctcgtcgtctacctcgccggttctcgcgcccaactggccatcgtgctcgacgtgttttcctccgtgcagattcgcatgtacctttcactccatccgctagtcgcgtggtagagaagatcacgttatcggtggatcaatcgccttgtggagtaatttcttggaggctggtcgtcaccctgaagatttgtggcaaattattttcttagtcattggctcttcactgcaacaaaggcaagaccgagtgcatctaccacattccttgttgtttacaaaacttttatcacttgatatgatgcattaggtgatagaagttgcgtgatcaaacaattgatgcattaccatcctcttgagaatttgaataatcattccttgatacctattttatgaaaaactagtgccgcttagccctgcttaaagtgataagattttgaaatttattttgattactcgttattgttatgtgtgaatgaacttgagttagataattaatatgagaccgagcgggtggcttgcatcgtgaaatgagtcggtgtagtgctccgccagtgtcgattaaggaccgttcgatgtaggcctgatgaggtgagactttgcaactagccacatgctccggtaagcctgaacccagcaattccatacgtaaaaagacaaccgcgcactgggcatgggagatggcgggagtagattgtaccctcctttctagaggctggacggaggagtattgtgctcccgggtagcgcggaccggttcacgttgtggaggatctgtgggaatggttgacatatgcaagggttaagtgctacatatgtcgtgtgcttatgaatccccagctgggtataatcggttcgaatcatcgttgttcctcggttatggagactcaactcactgaccactcatcgtagttaataagtgaaatatgaattggataaaataaagctagatcaggacaagtaaatgatctagattaggcaaatttagaattaggtaagaacttaacttgataattaaaagatggcttaaggatccactattagtaagtgtttctgcaaaatgagtccttgattatatattgcttagccttaccttaattcctaatcagctagcatatccttgagagtctttttccttagtcgggtaagacttgcaaaagtacactccgtacttagaattttcgaacccatgtttttgcaggtactagagttgtgctgttgtggatggtgttaagtgccagtaggcacgaccttcttataagtctaaaatgaggactcattctggattggttcatggtgagggcatttcccagaataaggctaacacatcgaatccacagtcaacatccatgcttgagaatgcagttgcacaactcattagtgtaggcattgatcatactcaccttctgtgaggcataatattgtgtgacccagggtcaagctggagcctggtgggcaaaatattgtgtgacccagccagagggatatcaagttccttgggttgagttctgtgaggcatttcaggcacattatattctgaagggtatcatgagtataaaagttgatgagttctttaacctaaagcaaggtgaaggggagagtgttatggagtatttggagatgtttaatcagttatctcagtatgttgcagcctatgtcggtactgaagccatgaagaagttctacttcatgtgtggccttaatatgaagctccaactcttgatagcacccaatgtggctgaaagttacaatgatgtagtcagtcaggccattctaggtgatgataagattcgccttcatcaagagtctaagagaaagaaatttgccgaagaatcctcaagtagcagtaatcgacatcagaggattgtttatcaacctatcatttgttctcttgatcctccatcctagttacccagttcacaacagtcgtgtgtccgacaggctattgttccttttgtcccacattagtcggatgccccaggcgttcattccaaaaacaatccggtcaacatgaacctatgtgatcactatgggaagtcaggacacactacccaagattgtcgtttgcctaaaccagtggttgagcgacagtcgctaacgactccatcttagagtagtcgacagaatactagaaagaaaagccggactgttcctaggatggggcaggtcaatcttactcatactcatggaatttctgaaggtgcccctgttatgatgagtgtgttttatgtcgccaaccatcctgcagtgactttgtttgatttgggcgcatctcataccttcatcaatagagcctttgttgtgaagtatcaattaccaattgaagaagagaaagatactttctgtatacaatcccctagaggatgcatctatactaaggaaatggtggagaaggtgcccataaatctggagggtcacatttttcctactaacttgcttgtccttcagaagcaggatatagatgtgatccttggcatgaactggttacatcaacatggggctattattgatacattgcaacagacagttcagttggattcacccaatggtagttctaaattactaatccagttgtcaactcctaagagagcagtagaaagagtatatgctgcaactattaaagatgtaaaggatataccggtagttagagagtttccggatgtgtttcccgaagatttgcctagtttacctctagaaagagatgtggaatttgtaatcgaattgcagccaggtaccacacccatatctagaaggtcgtacagaatgccacctaaggagttagcagagctgaagactcagttgcaagacttgcttgataaaggtttcattcgaccaagttcatcaccttggggttgtcctgccatatttgtgaagaagaaagatcaaacactcaggttgtgtgttgattaccgaccgctcaatgagatgactataaaaaacaaatatcctctccctcgcattgatctgctgtttgaccagctcataggagcaaaagtgttctccaagattgaccttaggtgaggttatcaccagataagaatccgtcctgaagatgttcccaagaccgctttcactactcgatatggtctttacgaatatttggttatgtcctttggtctgactaatgctccagctcacttcatgtatttaatgaactctgtgttcatgccgaagctcaacaagtttgtggttgtgtttattgatgatatcctgatatactccaagagcaaggaagaacatgcataccacttacgtattgttctaacatggctcagagaacaccaactatatgctaaatttagcaaatgtgagttttggttgaataaagttcagtttctaggccatgtcttgtctgccgagggtgttgttgttgacccgagcaaggtcaaggatatcctcgattggaaacctcccactattgtacatcaagtcagaagttctcttggaatggcaggctattatcgtcgctttattctagatttctctagaatagccaagcctatcaccgaattgctcaaaaaccatgtcaaatttgtttggtcacctgagtgtgacaaagcttttgagaagctgaaggagctattgattacatcaccagtgcttgctcaaccagatattgcaaagccatttcatgtgtattgtgatgcttctggcattggcattggatgtgtagtgatgcaagaaggccgcgtgattgcctatgcttctcgacaactcaagcgtcatgaagcgaattatccaacccatgatattgaggtggctgctgttgttcatgcgctcaagatttggcgacattatttgctaggtaatacatgtcacatttacactgaccataagagtcagaagcacatttttacccagtccaaattgaacatgagacagagaaggtggctagagttgattaaagattatgatcttgaagttcattatcatcctggcaacgctaatgttgtggcagatgctcttagccgtaagtctcagtgtaactgtctttcggcaaaacctttaattgttaccttgtgccaggaaatggaaaggttgaatttggaaatagttcatcaaggaaccatagctaatctcattcttgaatcaactatccaaagtcaaattgttgatgctcaaaatgtcaacaagggaatagctcatatcaaggagcgagttgtagcaggaatggctacatgttttagaattgatgaaaatggtgttctttggttccaaaaccatttggtagtcccaaaagttcctgagttacgtcaacagatacttgatgaagctcacttatcccgatactccattcacccaggaagtaacaagatgtatcaggatctgaaacaaaggttttggtggaccaaaatgaagattgaaattgctctctatgtcgccaagtgcgatatttgtcaaagggtgaaggttgtgcacttaaaatctgccggacgactacaaccattgcctattccagcttggaagtgggaagacatcagtatggacttcatcgtcggtttgcccaagacatcgagtgggtatgattctatttgggtcatcgtggatcttcttaccaagtcagcccatttcatccccgccaagagcaattgtcctgttctcacttgtgctcaactgtacatcgcccgtgtcgtaagtctgcatggagtacctaagacaattgtgtcagatagaggtccacagtttgtctccaagttttgggaggagttgcataagtcattgggcactaaactgattcacagttgaacctatcatctcaaacgagtgggcaaacagaaagatcagatactggaagacatgttgagggcatgtgttctggtcttttcagaaaaatgggatgaatgtctccctcttgccaaatttttttataataacaatcatcaagagagtatcaagatgttaccctttgaagctctgtatggtagaagatgcaggactcctttaaactggtctggacctggagaaagatgtttctttcgacccgacctggtaaatgaagctgaggaaaaggttcaacttatccaacgcaacctgaagatagcacagtctcgtcataagagttatgctaaccgaaagcatcgacccttggtgttcaaggttggtgattatatctatctaaaggtatcactaatgaaaggtgttaatcgctttggcgtcaaaggaaaactcgcacctcgctatattggtcccttcggaattattcaacagtgtggaccagtagcttatcgccttcagttgccagagcatatgtccgcagttcataacgtgtgccatgtatcacaattgaagaaatgtcttcgagtgccagagcaagctatggatgtctcagaggccaatctcgaaccggatctgacttattcagaatatccaattcgagtattagattagaaggatcgcatcactcgaaggagaacaatcaagttttataaggtgcaatggaacaaacattctaaagacgaagctacttgggaatctgaagattttcttgtggagaattttccagattttcttgctttggtttaaaaaacttacagtattgtaatgtaatcgctagccagcaagtgcaacttggtacatcatccggttggtgtgtaaagaatttcgaagtggttgtgaatactatcttcttcttctcctcctaacctaagcctttagttgttcttaaatctcg

SEQ ID NO: 39724 - DNA, 1747 bp, Zea Mays
ctctctcacacacacttgcctaatccagccacccgactcctatcggttaccggcgacctcaccggcggctaaaaggatttgacttgcggccgccgccgcgcgtcttcgaccgtgctctcccaccccaatctccgggttgattactaccagagactaactcgaatcgtcgatgagcgctcgatcgatcccgtgacggagcggctcggttgctccaaagctccgttctacgccatgctcgccgccgccgccgccatggcggtgaccgtccctcgggcggcttctcattgttttccagcaaatacggccaggaaatgtaggacttgctggagctgtcgtgcggcaagagtcgaggctgggcactcccgattggaggtgagaaaagtcacctatcgacctcctggaactgaacagaacttgttgaatgaaattaacctctctcttcaggaaaaaagttttggtttgatatttggacggagtgggagtggaaagacaacccttttgcagctgttggctggtctatcagaacctacctctgggtctatttgcattcagaagtatgatgatactgggaatcctattggcttgcctgaactgctaacttctcaacgagttggaattgtatttcagtttcctgagaggttcaaactcctgatctgttgctgcttgatgagccacttgctggtctagattggaaggctcgagctgatgttgtgaatctcctaaaggacctgaagaaacatcatactatactggttgtaagtcacgatctaagggaactatatccactagtggatcgctcatggcgaatggaaatggggggaagtttgaaggaggaagctttgcctgtctaaacatgtgcttgtcagtatagctgtcagacagcatgtacatattggtcatccaaatctagtcacatcaactacttttacaaacttagattatgtcggctgggaaatttcttcaagatacaatggagtcagagatggttgtgaacagtcatttggtaatgcgtggtaacttccgagcacgaaaaaatgctagaaaaaatcagcagagatcgtgaatgttagcacggagctttgactactgctggaacggggaacagtctgacgcagacattgttgagctaccatgaacgttgaacattccattgaagtttaggttcaggaatcaggatccagcgatagctccttgttgcaaacatgaggattgcagaaggcctgtacactttgaaaggtggggggtcaagtttcaaaatggtgcggatgatggtttggaaatggtttcctttgttgaagtttcccactggagagattcagagaacatcatttacttgcactatcgatagtctgcatcattcacaatttgctgttccttacgaactcatttgtctggattctggaagaatatgttgtgcacatgagtagattcttgtttcctccaaagatctttgacctgctgttatcaccacttctggcatgcgaggagcaatctcagtcatgcagttatgtatatgaatgtgcacctctgtttgaaacgttcaaaaatgaactagtgggtgacaaatattcgagaacggaggtagtatatacaatattcacaaggcgtgctgtaaatatgtatccacttttacaaacgaagtaacctactgagagttacttgtgccacatagctacctacatcaatgtgtgcatgttcaaagcacgaaacttttctttgtcttctagactcctgttgtcgctttcag

SEQ ID NO: 39725 - DNA, 2005 bp, Zea Mays
cccacttctcctccggcggcgcggcggcgggttacctcccaacagcccgaccatggaagccgacatcgctttcagttccccgacgagatgctgaaggatgctgctgcggtggcgagggcgttgcggcgggagcttgcctccggcggcgccgacagtggggttagggtgttcgtgatggccgacacggcgtacaactcctgctgcgtggacgaggtgggcgcgtcccacatcgatgcgcagtgcgtcgtccactacggccacgcctgcatgagcccaacatcaaatttgccagctttctttgtatttgggaaggcaccgttggatgtccacgcatgtgccggcacattgctggagtgctcaaggaaaagcaataagcgcattctggttttatatggactagagtacgcatatgcattggatgaccttagacagactttcatggagtcatgtaaatcaaattctggcaatcatgaagtccagtatgcagaagttctatgttcagttatgagtccatcatcaagtactacagaagaaaacaaaattcctcagtcgagtggcccctcttgtaatggggatatctccagaaacagcgagtcggcaacattcctgaataatcgtaatggcatggaatgttccagttccacacaaaagtacagccttgctggcatgacatggaatatttcagttgaggagaaaatggaggactatttcatattttggattggacaagatagctcagcatttgccaacatagtgcttaccttcaataaatgtgaaatagttagatatgatgcaatagaaaatcaactcacagcggacgtctctcatctgatgaaaattcttaggcgaagatattacctcgtggagaaggcgaaggatgcaaatattattggcattttggtgggaactctgggtgtagctggttatcttcatataatcgaacaaatgaaagatctgatcaaggccgctggaaagaaatcctatacattggtcatgggtaggcctaattctgccaagcttgcgaattttccagagtgcgaagtttttatttatgtttcttgtgcccaaactgctctgctggatagcaaggattttttagctccagttattacaccttttgaagctgtactagcttttggcaggggaagagagtggaccggagagtatcttttggatttcaaggatttgatcacttcagagaaacaagaagctgcgagcacaacaggagaagcacgcttttcttttatcaaaggtgtctatgtggaagataattgccctcaagaaaatgaggaacaatcggaaacgtcgctcgctctggctgaggtaactgaaaaggcactgagcatccaaaaccagcacaacgacgctgtcctttaccaaggaagagcaatgtcctcaatcgactacctcaaggcacgttcctaccgtggtctaactggagaatacgaaggcccagttcctgattcagtcttggtaggcagaatgggcagggcagctggttacagtgacgagaaaactgagagcgcacagtgaaggtagcattatgcgagttgatcagttgctacaggctccccttttttggcggtgaaaaaccaggagggtgcacaatgattcaatcatgcagcctggatggtttaccaacctgtgtacttttgtttaggtgggctaacaggtttatagacaattgtcaacatttttttattgttgagaatacctgtttctagtcccagggaacaatactttggatgctgttcaatcaggtggcttttttgctattaggaactactagtgtgtgcctaatcagtttgtatgcaatagtgagagctatctcactgatgtggggaagcctttttttttctttctaacaactgtggcatgtgttcagaagatgagatgtacactattcacaacatgcactgtactcatccattatgtttgtacaagacaccaaatttactctgcacattcttatttattggtaccggtagtagttcccaaagcacaa

SEQ ID NO: 39726 - DNA, 1694 bp, Zea Mays
aaccccaccagaccttcaaccgctacatttccgtcactaccggagccgccactcccacgaacgcgcggcggagcggaagcgaaccagaatgcgagtacaggaatggaaagtgggtttctgacaatcgtagaccactatactcagggtttggttgtaagcagtggctttcagagagttggtcctgcagactaacccagcgaaaagatttcgcgtatgaaaaattcagatggcagcctgaagcttgtgagatgccagagtttgaggcctcccagttcttgagaaggataaaaccatcgcttacgtgggcgattctctagggaggcagatgtttcagtcgatgatgtgtatggtcactggtggaaaggagaggctggatgtagaagatgttggcgcagagtatggctttgtgttagcgccgggtgcaaaaaggccagacggctgggcctaccggttcccgagcaccaacacaacaattctataccactggtcatcaacgctctgtgatttggagcccctgaacccatcagaccgagcgaccagttacgccatgcacctggaccgcccgcctgcttttctgaagagcaacctccacaggctccacgttctggtcctcaacaccggccaccactggaaccgagggaagctgagggcgaacaggtgggagatgtatctcggcggagcgccgaacagcgacaggaacaccgccgtcatctggaaggccaagaacttcaccgtccacagcgtcgtcagatgggtggacacgcagcttccccgccaccccaagctgaaggcgttctacaggtcgatatcgccccggcacttcttcaacggtgactgggacaccggaggcagctgcgacaacaccagccctctggccaagggagggagcggcgtccacctcgaccgttcggaggacgccgacgccgagggcgccgtgaggggcaccggggtcaggctcctggacgtcactgccctatcgcggctgagggacgaagggcatatttcacggtacagcatcaaggccacttctggcgttcaggattgcctgcactggtgccttcccggcgtgcctgacacctggaacgagatccttgcggcccagctatagcctgtagctgaatttgaagatgccaagggttatgtcgaattgtttatgggtgaagctcgtatatacagtaactaccacggagtactacgtcgttgccggagacccaatgctgctggtagtgaaacactgagctgcagtacattctttcgggaccgtgcttaactgtagaaaatacagggccttttttttgtgtaagtacatgttgtgtttgcctactgttacctgtgtacgccagttgttaattggagaactggattgatagatagtttggaagtgttgcctgagaggtagggcaacgcatcttgcagcatccagtcctttgagaactcatctgttatgtaccaaacacgaacagagagcatcatgcattgctgatccatgtgatgtggttgttggtacgttgattgttgctaggttcgtcctctcaccccttgtatcaccattgtttatggtacatgtggaatcatctggtaagttctgaatgtcataattaattactgaactgttcttctgatgctgagacctcgaacgtctgatgcaatttgtattcaagatcagagtcccagcggtacttgcacgtgcaaaa

SEQ ID NO: 39727 - DNA, 696 bp, Zea Mays
gtgaggttacgaggatatgaagaatcaccctggtaactggaatctcaagtgccaggcaacttgtgcctttgatcacttttgtttacccaataatgttctttaatatcacttgttcatgcataagtttaactttgatgggacccaataggttaccctagtctgattatcttttaccttgtttacccctaaatcacttgggtagttttgctattgccttttatggttttgggttaatatttcattatatccatgttccaattattatgttattttatttatgttcatataaagatcattatctttaattggaacatggagcttaacttgagaaacacgtgccatcataagggtggaatgggacacccttggctaactaattaggaaagctcgtggaagactagggcaataggggagttgcatgcaaggaggttctcagttgattttgctacgatggcagacagacgagagattcttgcaagtgctcttcccataaactgtaccgggttttcggaagctagtggaactttgtaaaggcctcgtagtggatccctagccattcacctcggtagtgtctaagggtctaactaaccctgacgacatgggatacacgacttgtgggtacaaggtacaacatctgcagagtgtaaaactggtatactagctgagctcacggtcatgagcagctcaggactctcg

SEQ ID NO: 39728 - DNA, 2100 bp, Zea Mays
gcgcacgtagccacagcccagcagctgctgctatcctgcatcgtctccttccccgcaccacacaagcagcccatatcatccatcgcctccagcgcggcgccgacctgcctctccattatttatgcatttccgcccccacccttacctttcccaattcagccgaggaccgcaatcgcagggcactgggagcgattaaaaaaggcagcctcccccgcaagggtaaaaaacaaacaaccaccgcatcgcggcaggcaaggcatcgcccgccagccaccgagcggagggggaagcaaaagcttgataaaaaggagaggaggagacgagacgtgccgtccggacccaagcaacttcctcccaccacctcctccctcccatgcccgcatcgagatcttagcgggacagcgagaggagaggcgacgccgacgcgggcgccccctgatccctcctcgccgccgccgccgaccgaccgaccgggggaggaggaggggaggggaggacggacacgatggaggcggactccgggaagctcttcgtcggcggcatctcttgggagacggacgaggatcgcctccgcgcgtacttcggtcgctttggcgaggtcaccgaggccgttatcatgcgggaccgcaacaccggccgcgcccgtgggttcgggttcgtcgtcttcgccgattccgggatcgccgaacgcgtcaccctcgataagcacatgatcgacgggcgcatggtggaagcaaagaaggccgttcctagggacgaccagagtattgcgagcaagaacaacagcagcatagggtcacctggaccaggacgcactagaaagatcttcgttggaggtctggcctcaaatgttaccgaggtcgaatttaggaggtattttgagcaatttggtgtgataaccgatgtggtagtgatgtatgaccacaacacgcagaggcctaggggctttggtttcatcacatatgactcagaagacgcagtggacaaggcactgcacaagaacttccatgagctgaatggtaaaatggtcgaggttaagagggctgtgccaaaggagcagtctcctggtcctattgcacgttcacctgcgggagggcagaactatgctatgagcagggttcataacttcctaaatggcttcaaccagggttacaacccgaaccccctgggtggttatggcatgagggtggatggaaggtatggtctccttacgggtgcacggaatgggttctcttcgtttggtccaggttatggaatgggcatgaatgctgaaggtggaatgagtgcatattttggtgcaagttctggttttgccaatagctccaatgggcggcaaataggttcttacttcaatagtagttcaaacagattaggcagtccaattggttatgttggccttaatgatgattcaggatcaatactgagttcaatgtctagaaatgtttggggcaatggaaatcttaactacacagggcaaccctacaaacacgaattcttttgctccacctgtaggtggtgggggtattcctggtgatgaaattagttggggaaaccttacttctgttcatgggatgggcaacatttcaagccttggaccgggaaaccttggccgtggaaccggagataacaactttggattgccttctggaacctatgtgaggagcaactcaactggtacaattggcgagccattttctgcatcagccaatccatatgaatcgaacaatctaggtgcatatggcagcagttctatttatggtgactccacctggaggttcaactcatctgaggttgatatacctccttttggtcatgatcttggaaatgttgatccagatattaaatcagaaatatcagcaaactatatgggcaactatactgttaataataatcagacaagcagaggatgacgtagcagcttgttttcaagtcggacgacttgccggtcgttctggctgaccgacttgggcgattaatcacgattagtcggacgacttggacggttagtcatgattggaccaaaccgacttggacgaatcgcgattaatcggacgacttgaaaacatgcattagctacatacttttcttggaggacacttc

SEQ ID NO: 39729 - DNA, 1179 bp, Zea Mays
ggaatcccatttctaagagatgccatcatcgataccaccaccgccacaaaattttctcccactgccatcaccaggggttgggcagagcactcgtattaaccttggggaaatcaagctaaaactagttaagaggattggtctagagcgagcaaagaggtactttgagcacctgcagaggtttttgtctttgaagctgagcaagagtctatttgacaagttctgcctcacaatacttggtgatgataacattcagcttcataaccacctcgtttgctcaattctccacaatgcttgccaagcaagtgggccatcgacagtcagtacacctaaatcaattggagttgccaagaattcaaatcatgtcttaagtcctacagtccctttctctgacattggtgatgttctgcatcatcatgtcaaggaccactatccacgaagcagaaatgcacatgtcgtccaggagaatggtgttgtgcgtttgtccaaactgaagagatttccgcagcctcacagtgaacttgtggaactactgtccaaacgatcacgtgtggagaatgcatattcaaatttatcagaccccataaatagcaactgtcctggtgtctctggtagagaatatgtggaagctgttgcacagcatgctcgaggtccaataattgccccactaggggttgccttctgttctggtcatttcggtgggaattcaaaaaccttgacacttccctctggtgctagcagtgatgactctatttgttgttatgaccttggtcagctgtgtgatacttcatcactgagacagcgtatggggagaatagcagaaacagaagggttggatgctgtgtcattagaatgtgctaattcattgaataatggagttgatttttacttgaaataccttattggatcatgtattgagctagtaagagcaagatctcagcatgatcgaataaatcatatggcactaaaacaacagttaagtcaaaagctaataaatggtgtgcagctccaaaatcaggtgcatggtcaaagtgccactacatgtccgcaaatcagctcggtttcattgcaagacttcaaggctctatcagagacaattcctcagctgcttggagtcaatgcatcactgctgaagtgtttcttcctgtttcatctctattgccttgcgaagtccaagcctgc

SEQ ID NO: 39730 - DNA, 2070 bp, Zea Mays
aggcctgcggcctccgcgtcaccaccatcaagatcgatccatacctcaacaccgatgctggaaccatgtcgccgttcgagcacggggaggttttcgttttggacgatggcggagaggtggacttggaccttggaaactacgaacgttttctggacatcaaattgacccgcgacaacaatataaccacgggaaagatcttccaggctgtcattaacaaggagaggagaggcgactacctagggaagaccgtccaggtagtgccgcacatcacggatgagatacaggactggatcgaacgcgtcgcggtggtcccagtggacggcaaggaagggcctcctgacgtctgcgtcatcgagctcgggggcactataggggatatcgagtcaatgcctttcattgaagcgttaggtcaattctcgtaccgtgttggacctggaaacttctgtctcgttcatgtcagtcttgttccggttctaaatgtagtcggtgaacagaaaactaagcctacacagcacagtgttcgagggcttagagggcttgggttagcgccggatgttttagcatgtcgcagtactgagccattggaggaacatgtgaaggccaagctttcacagttttgccatgtcccggaccagaaggcccatgaagcgattctgaaggttttagacctccagtatgatggaaaggtgcctcgggaacctgagctaacaaagtggactaaaagagccaccaagtttgacaagttgaagactccggtcaagattgccatggttggaaaatacactggcctgtcggattcctacctgtctgtcataaaggctcttttgcatgcatcggttgctatggaaagaaaacttgtagtcgagtgggttccttcctgcgacctggaagattcttcagctaaagagacccctgaagcccataaaaaagcatggaaattgctgaagtccgtctcacggaattccattccatcccagggcgcagatggcgtactcgtccctggagggtttggggacaggggagtccagggcaaaatcctcgccgcgaaatacgcacgcgagaacaacgttccttatcttggcatctgcctgggaatgcaaatcgcggtgatcgagtttgcccgctcggtgatgaagctacgaggtgccaatagcacggagttcgatccagctacgacgtcaccctgtgtcatcttcatgccagagggctcaaaaacccaaatgggagccacgatgaggcttgggtcgaggaggacctatttccatgtcagtggctgcaaatctgcgaagctgtacggcaacgccagctctgtagatgaaagacatcgccacagatacgaggtgaaccctgacatggtcccagactttgagaaggccgggcttcagttcgtgggcaaagatgagagtgggaaacgcatggggatcgttgagcttccctctcacaagttcttcatcggtgcacagttccatcctgaattcaagtcgagaccagggaagccatctccgcttttcttagggctgatagccgcggcgtctgggcagctagaaccattgcttcagcgcagcaatccgacaacgaaagcatgttcgatcagtaaagtcccgaaactgaaactgtaccccactgggcctgtgaataatccactgaacagcttggtgaacgggtactacccaaatgagaagagaaggctaagattcagcaagcccccagctccagcgacacatggttccgacatttttaacgaggaacgccttccagtccgttgaagcgagctagccatagggtggtgaggtctagtgtgatgttgttgttgtttttttctctttcctttttttttggcctggaactaaggcgcgaagtgttttgagtagcgctagtagagcctggaagaagttatctaaactatttgtacattatggaagaacttatctaaggactgaatacacaaatgcttggccatgattgctttgttgccacaatatgaacaaccacgctcagatgaagagtattggtgttgttaaaaaatgccagtgaaattgttgttgttaatgtttgtgcctgtgttgccct

SEQ ID NO: 39731 - DNA, 1204 bp, Zea Mays
ctgcagctgaggttactataactataataagttcccggccggcggcgacggtacgtggagaagtacgtggatcgagctcgatcaagctgaccagggaagacatggcctctctgcagcaacgcaagcaacgcaaggatgagagcggcggcgcccacgcggttgctgatgaggcggtgcgcgggacgggaaaaggcaagagcgaggcggcgccggggcgccggaaggtgacgtacgggttccacctggtggagggccggatgccgcacggcatggaggaccgccacgtggccgagttccggaagctggacgacggcaacgaggtcggcctcttcgcggtcttcgacggacactccggcgccgacgtcgccacctacctccgcgagcacctcttcgacaacatactcatggaccaatcgggctccgatttctggacggacccgacggaggcgatccggcgcgcgtaccaccgcacggaccggaagctgctgaagaaaacggcgggcgacgacagcggcgaggggatgaagaagggcaggcggcgcggcgggtcgacggcggtcacggcgatcctgatcaacggagaggatctcgtggtcgccaacgtgggcgactcccgcgccgtgctgtgcgacgcgggcggcagggccaggcagctgtccgtggaccacgagccgctccgggagcgccgcgccatcgaggcccgcggcggcttcgtcaccgagatccacggggacgtgcctcgcgtagacgcgcagctggccatggcgcgcgcgttcggggaccggtcgctcaaggagcacatcagctcggaccccgacgtggccatcgaggacgtcggagacggcgccgagctgctcgtgctggcgagcgacgggctgtggaaggtcatgtcgaaccaggaggcggtcgacgaggctcggggcatcgaggacgcccggaaggcggcggtcaggctcgtcgacgaggcggtgcggcggggcagcaaggacgacatctcttgcatcgtcgtgcgactgcactagctagtgaacatctgctcggtcgccgggcgaatgtgtgcactgttttagcatcatatgtgcaagtttacatgaaactatggaagattacatgtcaaagcccccaagagtccgtttctttgcttggctgccttcaaaagacaaactctaaactcttgtgaatttgcacaagagaaaaattctag

SEQ ID NO: 39732 - DNA, 334 bp, Zea Mays
ttcttgattatcttgtgtatcttttcaaggatactgtgtagttgaggtgcttgacacacttaaactgttttcatttgtctcgaacattgcttgagttaagtagtttggtattgttagttgtagttaaaccgctcacttgaacggttgaagtgcatgctcaatatcatacgtgtctttactcaaacgtgttcgataaaatccttaaacatcaatttcctcgctcaccatatgttctcctttttatcttaaggatggtgcgtcgtaggaatccgactccgatgatgacgctcaagagattcgtgaagaaactcctccgcggtccagatccaagcgc

SEQ ID NO: 39733 - DNA, 1439 bp, Zea Mays
agcagctgcggacttgcgagcccaggcaggagaggactcgtccacatctattccttccttgttcggccgcccttcctcagttggtcgtcccctcttaccattacttctcctcctccctcgccccgtcggcgggcggccattgacgactggatccttcattcttgttctcaggggaaggacgacccaagacaggaggaggaggaggaggaggaggaggaggaggaggaggaggaggaggaggaggaggaggacagtgccgccatgaccggaggaggggaggagcaggggaggtcgctgttcggcgtgtctctgacaaacaggcctaggtggcagcagttcatgatctgctcctcgggcttcttcttcggctacctcgtcaatggcatctgcgaggttctaccggtgatggtgatgggagccttcatccctggtctgaggcgcaagtacgcgttccaagagtacgtgtcggccgtgatgctcgtcgtcggcctcatactcttcacgctcgcggacgcgcagacgtcgcccaacttcagcatggccggcgtggccatggtgtccggggcgctcgtcatggatgctttccttggcaacctgcaagaagcaatcttcaagatgaacccggacacgactcagatggagatgctgttctgctccactgtcgttggccttccgttcctagcggtgcccatggtgttaacaggagagctcgtgacggcttggacttcctgctcccagcatctgtacgtgtacgcggtgctggtgttggaggcgatggccacgttcgtcggccaggtctccgtgctctccctcatcgcgcttttcggtgcagcaaccacagccatggtgacgacggcgaggaaggcggtgacgctgctgctgtcgtacctgatattcaccaagcccctcacggagcagcacgcgacggggctcctcctcataaccatgggcatcgtcatcaagctcctgccggagaacaaggagagacgcccgcgccggctgcccaagaatgacgacgacgacaagccccgggagagcagagaagcgggggaggaaacagcatgactgctgctatagacccgacacccgagcaaagcagaactgacgccagctcgatcagcaaccctagaagaaattctcagtcctccaaaacagcaatcccaggaggaggatgggatatacatgcaggatagagcactacatacagtaataataacctttttcctcgctcctcccctcgcttttctcatgtgctgtggttaatgttaattgtgcacttcgctctaacatcttaagctttttataaaggcaagggccagaggtctgaattctaattagcgcaatatctaaggtcttgttcagttattcctatcctatgtggattgtatgagattaaaaaaaatttataaaagattttgacttattcaggattgaaatcc

SEQ ID NO: 39734 - DNA, 1391 bp, Zea Mays
atggcgtgcggggatggggcagaagaaaaatttagggaaccgctgcggctagcgtcagataccactcctggcgccgctgacttcctcaaccctatgcggccgacgccggcgctcgtcgccggtggacgcatggtaacaagcttcttatccgccactgaatggatgcttccgtctccggccacgcaagtccacaccatctccgtacttccctcccgtcgcgacttcgccttctccaacctcacgatgttgctcaggaatagcggcggcaacgagggagagagtggcagtactaagttccacgtagtacgggacgacctcctccacccgctcgccaacggcaacaaggcgcgcaagctcgacgccctcctgcccatcctccgccgctgcggcgttactgacatcgttacatgtgggggttgccagagcgcccatgccgcagctatcgcggttcactgtgccgaatggggaatcaggccacatatactgctgagaggcgagcaactggatgttcccacagggtataatctcatctcattgatgtttggcaatgtgacatatgtctctcggtctttgtatgcccaaagagacgagatgctttatgagcatgccataaaggttgcaggatatagtggcacagtgatgtgggcagatgaagttataggaaagggtttgggtgtagatgaggacaccactgatggaaatggttcaagaagagtgatgattgttaaggaaggggcaggtagtgttcaagcactgcttgactccagtggagggttactgctgttatgcttgctgacacacttgaaggatataaacagcgagagagatctcttttatctgattttgagaaggttttcccggaaatctaccatggaatggtggaagatgctactcatgacaatctagttcaatgggtggagcggttttcacctagaagatttggcaaggtgctggatggtgaaatcgcaatgtgccgccaggtagctcaacagaccggtatcctgctggatcctatgtataccttggctgcctgggagcaagctgttgatatatgctgtggagacagtgaagccaaagtcttgatgatccatacgggtggcacccttggcctttttggattggcacaaaggtattcatcacagttcaacacaggcgaacaaccttaggcatgtgcaatgatgatgttcaaatgttacggtttgtgggtatggactatggaatgtgatctttgactttgaataatcaaaagtagaaagaggtggggctttgttaaaggaattggtctttatattgatttggaagctaacatcacgatgtgcgttgaaaatggccttctttgctcgtacatttagaggttgtttgggtttgggacacctccatcggtaagtgtt

SEQ ID NO: 39735 - DNA, 300 bp, Zea Mays
cctaatcctcgggtccccaccctcatagtagattagctagtagtttatttgtttatatgtggatgagaacgagcatgcagtccaaactacagtggcaaagctctccttttttcctagcgcgcatcaactgcaaacaaaagaagctcgatctttgcctagatcaattttaaccatcccctttgtatcattaacaggtatggatggtgaaccttattgaaagggaattatgcttacacctagttcctaaataattttggtgattgaattgcccaacacaaatctttggactaactagtttgc

SEQ ID NO: 39736 - DNA, 1403 bp, Zea Mays
gtcagcctgccggtcgttgctacttagagggtgtaccaacttccgggcaggcatctgcatccaaagggcgctcgattctctagctagctaggatctagcaacacaaacccgtctgtccatatattatgggttggtaacaattaattagactgaagaagatcatctaacgaggatggacgcaaagaaaccatacatgctggctattactacagtagcaatctacaccggcatgtacgtggtctcaaaggctgccttcaaccagggaatgaacagcttcgtcttcgtcttctaccgccaggctgctgcatcgcttctcctcctgcccatcgcacttgttctagaaaggaacacgttaggcatgaatctgtgcaatgcaagtgtgacgctcacgtcagcaaccgtggcgtcggcaacaggaaactctactcccgttatcaccttctgcctggcactgctactgaggatggaggtggtgaagttaaggagcgtctctggcatagccaaggtcaccggcgtagcactgtgcctggccggagcgttggtcatcgccctgtacacggggccgtcgctcagcccagtcaaccgccatcaccgtgcctctggcggcgcccatggcttcaaagctccaacccgtggggggacatgggttacaggcacgttcctgatgcttctgtccaacgtcacatggtccctgtggacggttctgcagggcgcgctgctaaaggaataccccaacaagctcctcgtcacgacctcccagtgcttgttcagcaccgcgcagtcgttcgtcgtcgcagcggtggccgagagggacttctcgaaatgggcgctcaagcttgacgtcagcttgatcgctgttgcttacaccgggtttctcgtaactggcgtatcctactacctgcaagcttggtgtgtgcagataaaaggacctgtcttccttgctgtctggaacccactctgctttgtgctaaccatattctgttcctccttcttcctcggcgagaatgttcacctcggcagcattgtgggtggaatcctcttggtctgtggcctttatagcgtgttatggggtaaaaccttggaggttcatcagactgtggaatctggtgataatacggtcggtgaagtgcaaaatggacaagaagagaagaatcatcaacagaaggtgctggagaagggacgccaagaggaagcatcaatgacagcacccggtgtagtgtgatcgattgcttgattccataaagctagcaatctatggttcatttatgtcatgtctgtggttcttgtacaaattgcctgtgagtcacaataattgtttcaagatctttaaattgttacatgttttaaaggccaaaataaataaaatttaggtgataggcaaaagtaggatgatttttccaact

SEQ ID NO: 39737 - DNA, 2630 bp, Zea Mays
gagaaatttagagggaatcgctgcggatagcgttaggcatgccttccccgatggctcgcatcttccaccgccatctcctcctcgccgtcgtcaccttagccgtggccgcttctctccttcgcccagctgccgcagtgcgcccatttgttttggttctctccggtgaggacttcctcaaggatccggccgcgcacccgtcccttccctctgccgactccgacgacgacgatgggtgggacgacttcgccgacgattcaccggccgccgacccgctactctctccgtcctcctgggcccccctcctcgacccaaccatctctctcccctctggcgatgagacggactcgccggccgacgcgctcttcgtcgcgggcacccgcgcgatgctatccgcagcgtctgatggagacgacgcggcgttcaccacggctgccgcgcagatcgaggcctcggcagaggcggggcacccgggcgcgcagtctgcgctcgcgttccttaccggcgccgggatgacgcgtccggcatcccggtcgctcgcgttcctgctgcacaagttcgccgccgacgcaggagatctccagtcaaagatggccctcgcgtactcctacttccgccaggagatgtatgaagaagctgttatactatacgctgaacttgcagaagctgccctaacaagctccttgatatcaaaggagccaccagtgattgaaccaatccgtcttcacagtgggactgaagaaaataaagaggccttgaggaagtcccgaggtgaggacgatgaagatttccaaatcacagagtatcaggcacagcgaggcaacgctgccaacatgtacaaattagggcttctgtattactatggactacgtgggctccgccgtgattatggaaaagcatttcattggttttctaaggctgttgagaaaggcgagacacgggcattggagcttctgggtgagatctatgctagaggtgctggagtggaaaggaactatactgaagcgtacaagtggttggcacttgctgccaagcagcaacattactcagcttacaatggattgggttatctatatgttaaaggctatggggtggagaagaaaaacttgacaaaagcaagggaacttttcgaacttgcagccgagaataaggaagccggtggacattataaccttgttaatgctgggcaaccaaaagctatttatcaggtggcgaagctgttccagaaaggcattggtcttaagaggaatctccatatggcaacaatgctgtacaagtctattgctgagaggggaccctggagttcactgtccagatgggctctggagtcttatttgaaaggcgatgtagggaaagcattgctcttgtattccagaatggcagatcttggatatgaggttgcacagagcaatgctgcctggattctggataggtatagtgatcaaagtatttgcatgggagaatctagtttttgcacagatatggaaagacatcttcgtgcacatgctttgtggtggcatgcatccgagcagggtaatgagcatgctgctttgttgattggcgatgcctactactatggccggggcgtcgcaagggactatgaacgtgcagcagaggcatatatgcatgctcggtcacagtctaatgctcaagctatttttaaccttgggtacatgcatgagcatggtcatggactcccccttgatttgcacttggcaaaaagatattatgatcaagccgttgaggtggattcagctgctaagctccctgtcatgcttgcattaacaagtttatggctaaggacgaactatgcagacagttttttggttggttttatcgattcacttccagaaatgtatcctgttgttaaggaatgggtggaagatgttctcatggatgaagggaatgcaacaattttgactctctttgcttgccttgtaactgtcctctacttgcgagaacgccaaaggcgtcaagtagcagcagcagccaaccccctaacaacatgatgatgtggccatgtaaatgtcggttttcatgacatgggcaggccttttgcttgagggaactcgagatgtaaaatgatggctcattgacatgactcgcgcactaaattgagtagagggacatgaaagccgctggagactcagacaatgtttgctgcctggcgaatattcacctctccaagacttagggagctatgcttgtaaaggacaacaattcttggaaactggctgctcagaaatacagtttagaaatctcacagatgttgaaaagcatgctccccccttgttgcgcatatgcatggccatggaatttcgacaagcacacacggagaacatttctggaagaggcaactttacaattggtagtttagcgatcgggtaactttccatcagcatttacacgcactgtatagttttctctggatgtgttagttgaaaaggggcggtgcatgttgtgagcagcaattttgcaatagtatccatcagagtttgaagtataaacacattttttgaatagcctgaaaatagatcttacagcagagggtgttgaatgacgacggcagccgcgcgcgcggagcagccattgccgggcggcagaagtgtgcatagcgtggttctctgtagcag

SEQ ID NO: 39738 - DNA, 805 bp, Zea Mays
gggacccgaatcggtcccatccacaagtatatatatgagtggtcgaaccatcacctgcgctatttaagtcattgagaaagtagccaactcgtatgagaaagtttgttgccaaggtcgccagaccggagcaactccgtcattcgtcgtcaacagcatgccgcccatgtcgaggagttgccaacatgtgccgcatcgaggtacaacatctaatgctacaagtagtaattcactcgagtttttccagtccgtcgatggcgttcgtcagcatagccgctctctgtggcccaacctcgccgccgccagctaagctcgcaggcataaaccgctatgaccagctcgttgaagtttgagttcctccctaactctagcgacagctttggcgagtaatttctcatcgtccgttcatcttccggggcaacccagaacatcgtcgtgaccagctcatgcgagcttcgtcactgcgcttccggtttgtcgatcggatctctggttcataataaaaaaaccgaaatgaccagcaaaaaccgagatgatcagcaacaaccaaggtaggttaggggtcttttccatatgataggcttgacgctttccacctaataaataaccaccaccatatacccttttttacatgcaagactgctatacaacacaaatttaacagtaaatacaatcatgataagttggcaatagataggtcatacatttgtaaacaaacctttcctaccgtcaatgtcacatatttctgagcaaccctactagtttattaaaaatgtgatatcttataggtcaaataatttgttttaaa

SEQ ID NO: 39739 - DNA, 1438 bp, Zea Mays
cccggctagcttcgtcttcacctgattcttaggatttcttggggatgcacaaacgacgacaagatcgataatgcatacgcgtgatgagacatggtctggggagatgtgcacaagagaaaatgagcttgtggtgtcgagagtcgacggtgaggagccagcggacaagtagcacgctgacggatccaatatagagctttgggcaaggtcgagagcgctggtgctgcagtcaggacatccagacgacgacgctacggatggtgaaaacagggtgagggtgtgaagcggtgtccgtgaggacaacaccgcatgaatggttgtgtggcatcgacgaccaagacgacggtgaggtccgcgcgactaggcaaaaatatctatggaggacacggcgagcgcagccaaggagcgcggagctcgcagcaccagatattgacgaggactagcacacacgacgaccggccagtctcagaccatcgcgcccaccacgcttctgctgcgcggtcggtgtggtcaacggggacgacggcgctgggggacaacaggactcgcgaccacgacaacaacggtgaggccgacgagcactagagcaggatggggatgcatgacatttcctgaccgagaggatgcagcagacgagcggtcgaccgatgagcaagggcgagatccaagctagggcagggatgaccggtgagcaggtcgtgcatccggccccggcacgccacggccacgagtgagcagccgttgccgtcgaaaaccaggggaggtgcagtgaatttgctgacagaaacgagcgtcgtgcgcccagggtggatggcgcgacatggaggagatcgacgagcagacaggcaggacaccgggcatggagagggagctggggaaggagggccgcgacgcgcaggaaagctagacgccgagcgccatggacaagctcacggcggggtcaggctctgctgggcgcgcgcgtcaggaaagtgagtagagctgagggagagaggaagcaggcgcggtggccggggatccagggcgcggtgagctgcacgacaggggaattccgagctgggagcgtggcatggggaaaccgccatggaaaggacctcagctggctggggctggggctcggccggcgagcttggccggcggcgctgggaactgggcgcgggaggatgcggctggagggaggaacacagcgtgcttgagggagaagcgagcagggagaaacactgaacgccatgggaaagcagttggaggtagaggaaggagacggggaggagcagagaaggaactgtctgatttgggcgagctcggggagcagcgcgcgcggcgcggcaggggagctttgacggcgagcttggagcagggagcgcgcgatgcaggggaggcgcgctgagggagagagagaggcagctgggcgcggcgctgggagcagggaggcgggcgctgc

SEQ ID NO: 39740 - DNA, 1872 bp, Zea Mays
gagaaaacaacagaccatcaatgatctcgagatccccaaatctctttcttaagtaggtaccgctgcgccgcaaacccaccgcttccaccatcgccacccgtcagtccgtcacccctcgcgcccatagtccccttccccataccatgtccgacctccacccgccggagcaccaagtcgccggccaccgcgcctccgccagcaagctgggcccgctcatcgacggctccggcctcttctacaagccgctccaggccggcgaccgtggggagcacgaggtcgccttctatgaggcgttctccgcccacgccgccgtcccggcccgcatccgagacaccttcttcccccggttccacggcacgcgactcctccccaccgaggcgcagcccggggagccgcatcctcacctcgtcctcgacgacctcctcgcggggtttcaggcgccctgcgtcgcagacatcaagatcggcgccatcacgtggccaccgagttcgccggagccctacatcgccaagtgcctcgccaaggaccgcgggaccacgagcgttctgctcggattccgcgtctccggcgtccgagtcgtcggccccgagggcgccgtgtggcggacggagcgcccggaggtgaaggccatggacaccgccggcgtccgccgcgtgctccggcgctacgtgtcatccgttgccgacgaggggatggactgtgcgctcgccgcggcggtgtacggaggaaaaggtggagtcttgtcacagctgcgcgagctcaaggcgtggttcgaggagcagactctgttccacttctactcggcgtcgattcttctgggctatgatgctgctgcagtcgcagcaggcggagatgggggtggggtgacggtgaagctggtggactttgcccatgtggccgagggtgatggggtgattgaccacaacttcctgggcgggctctgctcgctgatcaagttcgtttctgacattgttccggagactcctcatacgcagcctttgggtccttcttaagagaggatcctggcatttcgatttgataacaaaggttccttgcagcgctcgggagatggtgcaggctggtgatgactacggcggcggcgaggcttttccgtccctatctgtctgccccgatggtgcccctatggagtttgtttggttggcttggataagcggtggacaaggtacgcgtgtatatatatactcttcgcagagaagtccggctgggagaagcgagcagactttgccggatttcacgcaaccaaaccgctcgacgctcgggagcatgtttgtttagcgaagacggggcggcttttaattgcatgcagatatcactgcgatgatatttacggttttagaattaaagaaaacaagaaatacacccatggcatgatcacgtgaagggagttggaaaaataaatgggcccgcacaagtgcctttggtcgacgtgataccagccctacaagttttgtctggaaaaagaagcgcctccgagttgtgctgggtgtggagatctgagacggtcgtcggcccacttggttgccttgcctttgccttgcctgcaaacatacggcaacctgctccttttttcgcaaccccttacttccgaagaaactttttttttcccactttgggggttcgattacgttggatctggtttgtgccactcggtcagaggttgtaagcatggagggaggcgtgttgatccggcaactgtgtcagtctttgcgctgcctgccgtttctgcatggcttttgcctgctgcgatccgatgtgtactggagatcgtagtgatggacgtctctacctccaaacgaatccgtccgataaatctaacgcaggttgagagtccatttgggttatgggttgtcc

SEQ ID NO: 39741 - DNA, 308 bp, Zea Mays
gtcgaggaggccgaggaaaccaaagccaggggtgaagaagaagactagcaaagtcaaggttgatctagttgagaagagctatggtgcatcgaggatcactacttaagaacgtgacttacagcaatgaggtaacatatgtagttatgtggtgtaagtaatatggcttaagatgcagagcaaggtccacaaggagtagtgtcaaagccagaaaattatgttggagctcataaatggcaaactagatcaagtcatggagacttggagttttggagtccaacatcgacttcaaacagcctagaaggagcaaa

SEQ ID NO: 39742 - DNA, 1343 bp, Zea Mays
atccgccgcccgcgcacttcttccttcgggcacacaggacaccaccgtcgacggattcatcgcgacgatggggctcgacgtcatggagatcgggatgggcgccgatttgagcctggatctgaggcacttcgcctccaaggccgtgaggcagagcaaggacgacacgccggcgccggacatggacgcatgcatccgccgcctcgaggaggagcggggtaagatcgagatgttcaagcgggacctcccgctctgcgcgcgcctcctcgccgacgtaattgatgtcatgaaggaggaggcggggaagaagaagacgacgacgaggaggaggagtgatcgcaggctggcgtctgcggcagctgatgatgaggaggaggaggcggacggcgccaccgcggacaagagcaagtggatgagcacggcgcagctctggacgggcgattccgggcgggaggacgcggaatcagagaagcaagacaaggggcggtgctcgccggaggccaggtcccgcggcgctctcttaccgttcaaggctgatgtgggctctggcgcgccggcgttcgcgccgctcttcttgagaacggacgacaaggctgcggctgcgcgcgtcggggtgccggatctgtcgtccttgctgtcgccgccggcgaccatgcctcctgcggacgccggcgccgaggagagccgtcgccagaaagaaacattgagttcattcatgctacgccatgcctgcagttgccacgccgaagcaaatcagggagctgatgaaggtggatgggctgacaaacgacgaagtgaaaagccatcttcagaaataccggctgcacaaccgcagggcgcctggatccggcgtggtgcgccagccgatcgtgctcgtgggagggctgtggattccccaggagcaaggcagccctcagtctggatctccccacggccccctccaccacctgtccacctcggtggccgccgtctcgtccgccgccaccgccagctgcgaggaggaagacggccggtccgagagctatggctggaaatgatgaagaggctgctgctgctgctgctgcgccaccaatgtgtgttcactgtttagagaggggagggaggtttcttggcatggtggggatcgccatgggccatggcggaggccaccagttgcagcttcaggaatcgggaggggaattgagtgtagtgtagctgtctgtacacatacatacatacatacagtgagatgggatgagatgagagcgggccttgagcgctcgagatcagaactgatggtgcttcgtcgtcgggtttgtacatcccaaagagaaagagatactagctacagttttgcggcttgttaa

SEQ ID NO: 39743 - DNA, 526 bp, Zea Mays
aaaaagctcccccgcgagtgttcacggggatggccggatgggaagccattcggggaaatccccgttgccaattgccatccctagccgcgtggcgacgcgacgcgagcggctgtatcggcgaggggattcggcgcttgtccagttcccggcgccgactaacggcgtcgacgacgttcctgggccccctgcaaatgcgacgtgccgcgcgctctcgcatcgcatggtcagccgatcgtgaaaacttggcgggcggaaaacgactagtaggtccatttgcgcgtcgtccgccagcttcgtcgggcttttggccggcgcgtataactaattaattaagcagtggcatgcatcatgcatgcacgcttggatttggatgcgtggaagctgatcggtgtcaagcgaaagcgctggggattgggttgggtgacatgcctgctggaggttgcatcgcatacttgcatgatggattgggccgggcgggccggccatatatacgtgataagcccagcccgctgcatgtggcagccag

SEQ ID NO: 39744 - DNA, 1370 bp, Zea Mays
tccagttctcctccgcctctccgggtttgactctgctgcgagcccgaacccgaagcagcagagctgcaaaatctagtctagagcgaaagaaatggcgagcgtggcctccgcgaggtgttacggccttctcctcccgccaagcttcgccggagcacggtgctgctcccgtccgtcctcttcgctccgtctgcggccgcggtggggcctgcgccggccgaggacccccctcgcctgcgtcgcgccgcccgactccgcggagccacagacggatgagcaggctgtgaaagctgaatctatccaagaagatgctccgactagtacacccgaggatgctgggcttccagctctcccgaataaggatctcaacagaagggtagcactactgtccactcttggagcggtggctctgtttgcatcccagaggctcaatcttagcgaggcatctcttaaagatcttgcagccaattcggttccatatgaagaggctctttcaaatggcaggcccactgtggttgagttttatgcagactggtgcgaggtctgcagagaattagctccggatatctacaaagtggaacagcaatacaaggaccgtgtcaattttgtgatgctgaatgttgacaacacgaagtgggagcaagagcttgacgagttcggggtggaaggcattcctcacttcgcctttctggataaggaaggaaacgaggaaggcaatgttgtcgggagacttccaaagcagtatttccttgacaacgtggttgcgcttgcttctggtgatcccgagataccgcacgcacgagtggtcggtcagttctcgagcgctgaatctaggaaagttcatcaagtcgctgatcccagaagtcatggctagcagtagttgttttctatgtggacagctgtaatcatagttctaatgccaagaccgtttgacaagaggagatcctaggctatatactatagttcattcagccctccctgtatcgaacatgcgggcgctgcaaagagctggtagattccacaaaacccggaagaaaaggctggcgcggattccttcagtgatactgaaacggttgcatgttattattatacgagatactgttacgttttttaaaagcagtatagagggtcgaaaaggagagagccagcctcggcccaccatattcgcatcgccgtctcctttgtgtgatcaggctgtctgccactctgttgcccggcaaccttttatgcgtctcttgttttttttttaaagggagagagagttactcttgatttcacaatcaatgatcgcggtgataagataatcgcaaaagtcgtgcgacggagactcgggagggcaggcaaaaggagggcgtgatcccggtggaacgctg

SEQ ID NO: 39745 - DNA, 3241 bp, Zea Mays
ttcacaggctgcacagcacacaaaccccgcgtaggggtagagatcacctcacccctcccgactccggcgcatccattcggtcgctgccggatgcgtgcttgacccggccatggatgactctgtccctttcaatgacctcggtccctccaagcccccgtcggcctctttctacgacgatatgttcgagtcctacttcaatcgcgcggccgaggcccccgagcccgcgcctaaggcttcttcctcgccgtcgacgccgccgcccgtgttcgacaagccagtcttcgacgacgatccttacacggccgatccattcgacgcgatccccttgtttggaggcggtggtggaggggaagaggaagacttgcacggtggcgtccggagtgcggcaaagccggagaggacggagttggaggtggtgggttttgatgaagatttgttccctgggttggctgggagcaccaattttcccatggagaagccggccagggaggtggagcgggaccgtcaaccagtggggttcgacgacgagttgatccctggattcgatggaagcatgaagccagcgccgcaaatggagcctgagacagtggcgtttgatgatgatgtgatccctgactgcagtggaggcacgagctatccctcttcggcaagggaggaacctataacgagacaagaaagtgaatcaatttcctctagcaaaattagcatgagcatgccagaagatcctttcgttactttaggtggtacacacaaatcgggatattcatctttagggttgttttcaaatcttctgaataacattggcatgcctagaaaggaagcggacacaacgcctgataataccagtgggatatttcagggttctgatatctttactgagtttccaaaagccatgccacccttttcgtttacatctgaaaaccagagtgatagaactgaaaggagatatactgaaaacataatcagcacgagtcactccgatcggctgcctcaggagaagacagtccaacaagcatcaacagaagcacctgccaatacattgactgagatgaacttccctgaagcatctgttgtccatgaagtacctgttaccactagttttcagacattgaacccatttgttgaggaagacgatttgttagaggtgaatcaatcttcacaaacgactaatgatgtgtggctaactgttttagatattgctttagtgacactacctacaagtgcgccacctccttcaaggcctccacctccacttgctgctaagaaaccacctactgaatctgtaactagtgaagcatatgcccatcattgtaatcaacgctaccatcactccatatgttcttcaaacacctctaaaacatcccaaattgatgaattggaagattttttcttgacaaagcctgcaaattctgccattggtcatccacaagttctaaagcatgaaggaaatgggcattatccatctgcagctactgcaagtttcatggactggactgagatgggacactgtaaaagggggaaccaaggggcatttgattctatgttcactagcagtcaatatcgacagccagaaatagatgagaaagcagaggtatgtgctcatgaaacagaaagtacagatgaagaaaagagattagagaatgaacaaatacaaagagaacataaagaagagcaaataagagcagaaagggagatggaagaagagcttgagagggaaagagaaaatgtgagacaaagggaacaagaggagcagaggaggcgtgaaaaagaaagagtggccaggcaggctgtagataaggctatacgggaggcacgcgaaagatcagctgctgaagcacgcatgcaagctgagaaggaggctcgtcaaagagcagagcgagctgcagtatggaaagcagcaacagaagctcgtgagagagctgcagtggaggcaaaggaaagagctgcgaaggctgctgcagaagctaaggaaagagaagcagcagaggctagagaaagggctgcaacagaatcaagggaaagggatgccaaagttgccgcagatgcaagggaaagagctgctagggctgctgctgaagctagggaaaaggaaacagcagaatttcaggagaaagctactgcagaagctcgggcaaaggctgagcgagctgctgttgagaaagctgcagcagaagcacggtggagggctgaaagagcagctttcgagagggttgctactgaagttaagcaaagggcttttaatgatgctagagaaagggctgccgctgcagctgcagctgaagcactggcaagagaaaatcagcaaaggagagcaacaacagaacctgaccttgagtcattctttggcatgccttctcgatcaagtagtctaccgagatcatacaacaacacaacaacgaatcctttcgatgttcaacctggcaatgctggttctggtggtgtaaggaggacaccttctggttcaggttttccctttactcagccttcatcaagcaatcttatggatggcctatcttctatatttggagcacctttaccatctgctgtatttcaagaagtggatggagagagtgaagagagaaggaaggcaagattggaacgacaccaaagaacaatggagcgtgcggcaaaagctcttgctgagaagaatgagcgtgacttgcaagctcagcaggagcaagaagagcgacatagaattggtgaatcacttgattttgagataaagaggtgggctgctggcaaagaaggcaacctacgggccttgctaacaacgttgcaatatattctttggcctgaatgtggctggcgacctgtatcattgactgatctgattacagcagcatctgtcaagaaagaatacaggaaagcaacattgtgtatccatcctgataaggtgcagcagaagggtgcaaatcttcaacagaaatacattgcagaaaaggaagcctggaaaaaattcaactcagaagaactcttctaacaacttgtttaggaaaatgttgatcgcaaaacaagtattgggaaggacagggacatactggtccctgtagtaatgaagaaagggagagtagcaggggccctgtttggtaagggtatgtagaagcaggcaccagctcgaggggcgattccggttagctcaaggccagatatgcaggctagtcgctcgtccaatctggagaagcagccgccagctcaaggacgtttcttgctagctctaggctagggaaaatttaactatttg

SEQ ID NO: 39746 - DNA, 2018 bp, Zea Mays
cgtctgcccaccgggctatatgcgcatgcggagtcactcacactgtccatgggcccacgtgtcagcctcacactaggctcgcccaggggcttctgtgtcacaggcatgtggacctcaacccttcttccacctcgcgttcattgcgacctggcgataagttcgcctaagaacgcgatcgcgtaaccactgcggtgcccagaccgcttcggttgaaggaatccctgccttggcttcgcactatatctctacaattccttaagagtataaggagggcgtccaccaccctcaccctggttccgccctccccccgccgctcgccgctaatctcgccgcgcacgccccctccctcgcgtccacagctagcttgccctcgccttcgctgaatccgcccctccccgcactcgcgcatggaaccacccagcctccgcccccgtccaccttggccccggcaccgtaggcggatctgtgcctttcctcgcccgcgtccacccccatcgcctcctcctacaccttctccgccatcggcatcatcgcctccgtcctcggccctccctgcacactgcaaccgcctcctgacgatgctcgcgtgggatggtgacggtgacgcggcgatccgtggcttgtgccccctccgccgcctccagcaccttctctgccatcggcatctccatccttggcgcggcatggttggccctaccctgctctttttaaggctgaaatgccctggtcagcctgaagaggaaatctctcagagaaacaaagagtcttcaaaatggtgaaaggttgattgactggcatgagggtggatacttgactgttgatttaccaatgtctcggggagaagttgtcattgggggtccaaatgtaactaaaggctatttcaaggatgaagctaaaacaaatgatgattgtgagcccatatatggagaacattataatcaatactgatcctttccataattactgtgttgcgcttgtggcagctgcacaaattgagctgtaaagctaggcttcccaacaaggagttaaaacaacaattcctcaaatttgtgctagaagcaagaggctgttaaagaagtgctctttagcaaaggtttcgtcattcttgcctaccgctgtccctttgcttcagaatacggtgaaacagaagtccttcattggctcttctcatcttggctcacatgcagtacttgaataccagtttcttcctgagcagccaagtgatgcatatgagaggggaagccagttgcgcttctatgatgctctagcagaagtgttaaactcaagggtagattcgttttctataggatcacactttacccatgtagttgagcaggcacctagctatacatttcacagtcaatcatctggttctagctgtttgtcaaatattattgctagcatggctcaaatccaaatattattgctagcatggctcaaatccacggtcaaaaattggcatccctcaagttgtcagatttgaaagctccctcgcatcccctaaaagattgggttatcatgatgaagaacatgtcacgtggacagaaaaacacaagaactatatttatggatatactatttttttcttcttttgtattattatattcatatccttttttacctttatattattattttttatatatgttgtatttgtctaatattacttcatcataatgaggaagctaagattgctagggaggttgaggctcatgaaaagagaattaaaaaggagcttgagagttgagaagcaaggtctactaaatagaaagaaagaagaacaaatgtagagggaaatggagagacatgatcacgagagatgtaatgaagagaggttcatgcgtgaaaggcaaaggaaagaagaaaattccattagcaacagagacgtatacttataactattatggtagataaaaaatgttacaatgtctctcttctatagaacgaaactgggatatcattcattgatatatgttcgattttattcaataattattatataattgtgcaccgtcgca

SEQ ID NO: 39747 - DNA, 2482 bp, Zea Mays
ggaaacggactaccagcgctgagccgttccgtttcttttcaatcttggcgttttgtctccattcaatagggaaagggatgtttcgcttgaggctttcctttgtgcctgtgtcttctctgtagctttcaagagaataaaaatttggagcttctctcgcaccagcgtcctttccttcttccttggtttcatgctgacaactagggctgatcttcaggacggcctgttcttggttcggttcctgagagcgattgatagcgccagacggagtttcttctttaggagtcgtgcactatgggtaattgctggtttaaggggaatccatactttaacagggtttcttccaatgcaaccaaagcaggtacgactatttattactttggtttgatctctgtgatgatgtaactgcaactgtagtatgcagaagtttcatatatttgtttgatgccctcaatttagacattaacgaaactgctgctatgtgtgtgttctctcgtcttgatagaatcagggaccatgtccctgctcttgtttagtccaattacggctatttcagtactgaatattttcttcacaaaaaatcagtcctaatgttcaatcttatccaacccaatgattcttttttccctaaccttgacagttgattttatgattattccatgtaatgatcagatacttttgttctgccgtatgaaattcttgttcatcttttggtaacttatttacaaagtttctgaataatctgcaccctgtatttcagtccccgtacttgacttgtctatttgttttctgcagaatctcccaaaattcagagcccctcggagagaactgaaaaggaggattgccagctaccatccaacccgaaagaggtggaggcgctgagaaaggatacagctcgcaatcctttgatagcgttcacatttgaggagctcaagagaatgacaaaaaatttcaggctgaggttatatttcttggacagctctctcacccgaatttagtgaagttgatcggctattgttgtgaagatgaccacagggtccttgtttacgagttcatgcctctaggaagtgtggagtctcatttgttttcaagtaattcttatcctattcttgacagattgttgattggttttatatagtttcttgtcattttgtcataacactgactatggtatatccacacatggcattcatgcaaattctcatactcataactgaaaagaatcgattgaaaacgagcataaacctgtccctcactcctatcctgaaccagtataatttaacttgcttcgagtggcagcattataaatttctgcatgacctatgtggtcagttctgcattattatttgtccatttgagatccaccagtgtatattatcagatcagtggagtatttgttttcataatgcaggggttatggtgccacttacgtggtcgatcagaatgaaaattgcgctcggtgctgcgaaaggacttgcttttctgcatgaagctgagaagcccgtcatctatcgggacttcaagacatcaaatatattactagatgaggaatataatgcaaaactatctgactttgggcttgcaaaagatggaccagttggcgataagtcccatgtttcaactcgtattatgggtacctacggttatgctgcaccagagtacattatgacagggcatctaacggcgatgagtgatgtctacagctatggtgttgtactactggagctcctcacgggccggaagtcactggacaagtcccggccagtcagggagcagatgctggcagactgggcactcccattgttggcacagaagaagaaggtgcttggcatagtagacccaaggcttgccgaggactacccagtgaaggcagtgcagaagacggcgatgctggcgtaccattgcctcagccgcaacccaaaggctaggccgctgatgcgcgacatcgtcgcgactttggagcctcttcaacagctggaggagacccctggagacagcgtggcagtgacacttgaagggacttgaagcagtgttccattcacagctcacatcacagtcacacacagctctggaaaactcgggtgccacgtacttaactatgcatgataatagtagctagctagtgttcttgatatgcaggatgatttcttgattgtttaattaatccatggagacagtagctttgttcagcagaaagttagtgtgtatctcagtaggacggttcatgtgtgtgtatccaggtgttcagtcctggcgtagcgaactccctggcatttcggatgcgggcaagtctgtgcaatctgtatttgcaatgcttgttgcccgcagaggaagcttgcttaccagtgtttgtaacctagtattgtgcagttcatgatctatgcatgttgaataatgtgtgtgtatatatatatataacaggtataacgggagcactgagcttccaatagttaaagaaagcctaagccgaccaaccctgcaacct

SEQ ID NO: 39748 - DNA, 533 bp, Zea Mays
gcgacgcggggctggatctcagtggatcgtggcagcaaggccactctgccacttacaatgccccgtcgcgttttaagtcgtctgcaaaggattcagcacgccgcccgttgggaagggagcttcgaggcggcccgccgcggcgcgtcgaccgggcgggctgagccaatggcacgggcccttggggcgcgaacgccctaacgtgggtcggggcgggcggcgagcagaggcgccggttgctagcttggattctgacttagaggcgttcagtcataatccggcacacggtagcttcgcgccactggcttttcaaccaagcgcgatgaccaattgtgtgaatcaacggttcctctcgtactaggttgaattactatcgcagcgcggtcatcagtagggtaaaactaacctgtctcacgacggtctaaacccagctcacgttccctattggtgggtgaacaatccaacacttggtggattctgcttcacaatgataggaagagccgacatcgaatgatcaaaaagcaacgtggctatga

SEQ ID NO: 39749 - DNA, 647 bp, Zea Mays
tcacgagtcacgagccaagcaggacagaaacagacagtcaaaaaactacgtacatagcgaactcgtcatcaggctcaggccccaacatttggcaccatcagggcatcgcagtaaaagattatcctcgggctgcatagacgtcagctgcgatacttacagactgtattcgcctattcagtggatcatgtaaaactgtttgtaaactggatcgtgtaaaatatgggacagggtagcggctggagacagccaagtcacagacatgagctgaagcattcttcttcctgtcaacagaaaatcaaacaattcccttcttgtgtattgctgataaagatggatcccctccatttggcttcgcttcatcccggttttccaaattcatcggtggctttgaaggctccaatattatattacgctgagtattgccaaaaccaaacccgggtgattcctccagatcaccatcttctgcctcgaccgtaactgtcattgctgttttcgttggcaaaacatgttcatctttgccttcccgcttcagcttcttggaagaagtctcggggttcagtatcctactgtagatggctttcaaagtaccctgtaacctgtatatcaatttcatttgactggatttgtacccattattttgctcctga

SEQ ID NO: 39750 - DNA, 4040 bp, Zea Mays
cacccgccagcgcccagagaggcagagcccgctgccccactcccgccccgagctgtgccgtcggccggccgcccgctcccgaactgcgccgtcggccgcacccccgctcccgagctgcgccgtcggccgcccgcccgcctccgaggatatcgtcgccccggcgttcgcggcccgtgaaaacccacaggcagcaaccctggatttgggcctagcatttttccacgagggatttgggttatcatacagcccagactccaaacccaagaaaaggcacaaactaatcgaaccctaccttcttctccactccacaccagcgctagctagttcctagcttacccacgcacggccgccgcctcctcctcacgcacgcggcagccgcggtacgttatccaggtcgtgccgacgtccgacgacaaagaaggccttgggggcgctggcgcgcatcgcgagtcccctcgccgcctcggagggcaagttcccgaaccggggaatcaaggacgtcgtcaggagcatctgctgcgggaacgtagggaaaatgtcaacgaatcctgatgaacctaagagtcgtgcccggacagactttttgctcaacaatgaactagaggtccagaagttttgggatgagaacaaggtttttcaggctgatcctggcaatgactctccaagccctggggaaaaattctttgggaactttccatacccttacatgaatggcttgctgcatctgggtcatgccttctcattgtccaagcttgagtttggtgctgcataccacaggcttcgtggctccaatgttcttttgccctttgctttccactgcactggaatgcccatcaaggcctccgctgataagctagctagggaaatccaacaatatggatatcctccggtgtttcctgtggcagagggttctagtgctgcagtagccgatgctacccaggctgaccaggttgatgttgttgccccagataagtttaaggggaagaagtccaaggctactgcaaaggctggtgcacaaaagtaccagtgggagatcatgaagagctttggtctagatgatgaagaaattgccagatttcaagatccttatcattggttgactcacttccctccgctggcaaaggaggttctcaagaaatttggcttgggttgtgactggaggagatcattcataactactgacatgaatccatactatgatgcttttgttaagtggcagatgaggaagctgaagaaattgggcaaagttgttaaagacatgaggtacacaatctactctccgttggatggccaaccttgtgctgatcatgatagggcaacaggtgaaggtgtgcagccacaagaatacgtcttgattaaaatggaggtgatatcaccttttcctcccaagctgaagtcattggaagggaggaaggtatacttggcagctgctacactaagacccgagacaatgtatggacagacaaattgctgggtccttcctgatggaatgtatggtgcttttgagattaatgacactgatgtcttcatccttacagcaaggtctgcttttaatcttgcataccaacacctatccagggtccctgaaaaaccaacctgcttatgtgagctatctggcagtgatttgattggtttgccactgaaatctcctcttgccttcaatgaaacaatatatgctcttccaatgctcactgtcttgactgacaaaggtactggcattgtgactagtgtccctagtgattcacctgatgatttcatggcactgcaagatttagtcacaaagccagcattgagagcaaagtatggagtgaaagatgagtgggttcttccttatgagattataccaataatccacattcctgaatttggagacaagtcagcagagaaggtttgccatgatcttaagattaaaagccagaacgacaaggagaagcttgctgaagcaaaaagaatgacatatctgaagggatttactgatggaacaatgattgtaggtgagttcagtggtagaaaggttcaggaagcgaaaccgctgattaaaagtaagcttttggaagaaggcacagctgtgttgtatagtgagccggagaagaaggtcatgtctagatctggtgatgaatgtgttgttgccctcactgatcagtggtatataacttatggcgaggctgaatggaagcagaaggcagtcaaatgtttggaccacatgaatacattctcaactgaaacccgcaatggttttgaacatacgctgggctggctgaaccagtgggcttgttcacgttcatttggactcggtactcgaattccatgggatgagcagttccttgtagaatctctttctgattctaccctatacatggcttattatacagttgcacaccttttgcaaaatggtaatatgtatgggaaagaaatatcttcagtaaggccagaagaaatgacagatgaagtctgggatttcgtgttttgtgatggcccggcaccaaaaagcgagatccctgccgctctgttgaacaagatgaaacatgaatttaagtattggtatccatttgatatccgtgtgtctggtaaagaccttattcaaaaccatttgacattctgcatatacaatcatacagcacttcttcctgagcaccactggcctattggtttccgctgcaatggacatctaatgcttaactctgagaaaatgtccaagtccacagggaatttcctaactctggaagatgccataaaaaagtactcttctgatgccactagatttgcccttgctgatgctggcgatggtatggatgatgcaaattttgtcactgaaactgcaaattctgctgttatgaggcttacaaaagaaatttcatggatggaggaggttacagctgctgaatcaaaattaagaactgggccgcccactacatatgctgaccgtgtgttttcaaacgagatgaacattgcaatcaaagaaactgagaagagctacaatgctttcatgttcagagacgccctgaagtctgggttctatgacctccaattggctagagatgagtacaggctctcttgtggtgcagcaggcatgaaccgtgatctgttgtggcgatttatggatgtccagaccaggcttatcacccccatttgcccacactatgctgagcacgtgtggcagaagatcatgaagaaagaaggctttgcaataaaagctggctggccagccgcggacaccccggatcccacactgagaattgcaaataaatacctgcaggattccatagttttgatgaggaaactgcttcagaagcaagagtctggttctaagaagcctaagaagggagctgcaccggcacctccgtccgaggaaaagaagatgagcattggcctcatatatgtgaacgagcactactctggatggaaagagcagtgcttgaaggtgctgcagtccaagttcgacagccaaagccgctccttctcacccgatcaggaaatcgcagaagctctgaaggagtgccccatcgggcaggaaatgaacctgaagcaggttcagaagctgtgcatgcccttcatcaagctgaagaaggacgaggcaagggaggttggtcctcaggcgctggacttgaagcttccgttcggtgagatggatgttctccgggagaacttggagctgatcaagaggcagctgggccttgagcaagtcgaggtgctctccgcgtcggacgaagctgctcgcgctaaggctggtgaacatgcttcgctgctggagaagaacccaccatcacccggcgaccccatcgccatcttcctcagcaaacagagctgaaaactgaccttgcatatggcccttttgttatttacttcgccgcacatttgcttcttttttgtttttgtttttgtgaaaccagtttcgtgtctgtaaacatagcatgttgtcctccggtttggtgaaaccagttttttctttttctttttctgtcaacagaatatgttatccattctctgggtaaccagttcggctattgtcgacaaagtatgttttgtgtcgctttacatca

SEQ ID NO: 39751 - DNA, 5291 bp, Zea Mays
ccggcctaggtccccgcacgcagaacggcagagcgacgccgcctcgcctccatccccgccgcacatcgccacccggcacgaaccccaaagcacgccgcggcggtcgcccacagcccagcagcaggcagcagggcggtccgaggccgagggttttagaaaccaccacccgatcggtacggccgcacgcacccattcaaccgtccgtcgccatcgtcttctccaccgagtcgccattcgccaaaagaaaaagggaaaaacgtccgcgggggagaggtggaagagaggtgggagcgaaggaaaagcttcccgagtgaagaagtgtttcccaaaggtgtggataaggccgacgcccgacgcggttggaggctccggctcccgagaaagtggggggctttgtcgcgggcctagctccggcggaggaggacgaggcctgctggtggacttgctcgcccgcctagggttttgggctgccggccggcttgctcggaggccgcaagtctaatggctactgagagtgctttccgattgattggtgggacgggggctagggactggagtaagggatttggtgcatttggctcttcagcaggtgccttatcaggggaagacttgggatttgtggataatgacactggggtttatgggggctggaacaaatctgttccaaatcgtagtggaagcgcaccgcctagcatggaaggatctcttgctgctcttggccatctcattgatcagcagagtgggagctttgaagctagtttgacaaccttggataacataactgacagttccaaatctgaggagcaactacgtgctgatccagcatattttgagtattatggctccaaggtgaatctgaatccaaggctccctccgccacttatttcaagggagagtcgccgattaatgaaccgtgttggcaaggctaaagagtggaggatggtctcccaagataacagcagcaaaggctcaatatacgttcctcgatctatgttgtcaactcacaaagaagaacctgaggatgataaatctccaagattggattcaagttcagtggaggatgcccagattgtctccagtgcatccaactttcagagccaggattttatgctgccttacttgcttgaacttgaagagaggtttcaacagagtgttgcttcttcgcctgatagttcatcttctaatccttcaaatagcaacactggtgattctatgcctgtatattctgacataaatttgttaaagagtttgtcatttgatgctttgaagcaatcggatttgaactcttggacaccaaaaggcccactgaaaagtaatgttaacaatgacctttcatcgccacccctttccagttcatcatatcctggtagcaaaactggtacgcaaacttttgagcaagaaaaggctgctgctgacaccaaacatggaaatgttgtgcttggcagtggcgcagctgttactgaagttgataatgtggactccattatgaagaatttgaagttaagtttggatgtccatacatcctcacctgccaagcagaggtggcaggacaatgtcttgcagcagtatggttcctttttaccagcccaaggtgatcctattcaattgactactcaaggaccccatcctcctcatgtaccttttgttgataacttgtctcatgctcagctcaagttgcctgacatccaccaaaatttaccacaacctagtatgacaacacctttctatacaccaaattcttttgggaacccttattatcagaatttgcaccctgctaatgcttttccaacctcaattggaactgggggttatgctgtaagtggttctattttgccaccgtttatggctggctatgctccccaaggtcctcttgctacacctcttgacagttctatgactccaagctttagtggcaggccatctggatttcttccagcagggaatcttacagggggaacagattttatgcagtcatgtaaagtatacggacaatttgagcctggtatgcagccatccattcccgatccgaacttcattcatttctttcagcatccctctttatttcagtatactggaggaaatcaatacaatacaatgggtccaagatttactgttgttgggaatttagctgaaagctttgattcacaaaacacgatacctcaagctgcatctgcatatccatctgatcagaggcttccactgccaataactggctttcctaattctcctacagccagaagaggagggactgttccaaattatcaaggcatttcatcctacattggagtgccaatgacttatcctactagtccagtgtttcagggacaaacattgcctggagtattgcctcctgttaggagaaacgactctgctggatttctgcccccctcaagaaacatcactggtagccctggaattcaagggcagcgagcaagacagaagtttgatgaatcaaagacctgctctttcttagaagagttgaagtccaacagagcgcgcatggttgagctttctgacatcacaggccgtgtagttgaatacagtgctgaccaacatggtagccgattcatccagcagaagttggaaaactgcaccgccgaagagaagacatctgtgtttgccgagattcttcctcatgcttcagcattaatgactgacgtttttgggaattatgtgatccaaaagttttttgaacatggaactcgtgagcaaaggagggatcttgccaccaagcttgttggtcacgttttgcctttgagtcttcagatgtatggctgccgtgtaatccagaagcctcgcaaaccctatcgcctatccctctcgcggtcttgcctcggtctctggcggcggcaccgccgttttacactcctcctccttcgacaacccgtcgcagtagcgtccgtctctggtgtccggctgtccggctctggactcccgacctcgacatcaggatctgcgcctcccgaccggtatgtgggggctctgaagaaggtgcagaaggatctgggcgcgtcggtgttcgagccgctggtgcaggcgtacgccgccgtcgggaagttccctgggatgtggcagcggctgaagatcgagaacgtggaggtcggggaggggacggcccagctgcttgactctatctgcgccgatcaatagcccaagcacgtcctagaggcggcgacagaaatgagttgctggcaagtttgacaaaacaagcagacatggtcttggtggctcagcaggaattaatcacccaaaaaaacagttacaagttgggttcatgcatgtcttacgtcaaggattgtactccccgttaaactgttggttcgggccagtggccggcccggtacgttcaggcccaccgggcgaacgggccggcccggcacgatttatccctgtgcgtgccgggtttgggcatgtcgctaggcacgtgggccagcacgacccggcccgaagcatcaacgggccgtgcctggcccggccctatccgtaccgggccgaaacgggttcggaccgggtccgtgccgggtggcccgtttggacatctataggtccctatttggacctgaagtgaagcattttaaagttgaaggacccagattctcacttcgagagtttatgaacctagatgagaatctaaggctctggaagttatggaacttgaccagaaaatagatctagttcatgagcttgatggtcatattatgcgatgtgtccgtgatcaaaatggaaatcacgttatacagaagtgcattgagtgtgtccccacagaacatattggttttgtagtgtctgcttttcagggacaagttactagcctttcaatgcatccatatggctgccgtgtaattcagagaatcttggagcactgcggtggtaactcacaaggccagtgcataatagacgagatattacagtgggtgtgcatccttgcgcaggatcagtatggcaactatgttacacagcatgttctagaaagaggaaaagctcatgagaggagccaaattattactaaattggccgggcaggttgttaccatgagccaaaataaatatgcatcaaatgtgatagagaagtgttttcaacatggtgatattgcggagcgggatcttctgatcagacggattgtggagcagacagagggcaacaacaatttattggtctgtttggtagtgtagtaaaagtgttccctccattatcccttcctctctttgccaaacgggtcggggttctggaaggtagggctaggacatggggacctgatctcagttcggtacagccaatcagataacaccatgagtatctcagttctgctattccagctttctgggagctgcgaatcctatggattaccaagacatgggatctctgtaaacttatttcttcctgtgttgatgttagtttatatttcctaatcaccttttatattcaatcaggcaatgatgaaggaccagtatgctaattacgtggtccagaagatacttgaaacttgcaacgaggatcagcgggagcttctgctcagccgcgtaaaggatcatatgcaagcattgaggaagtacacatacggcaagcacatcgtaagccgagtcgagcagctctgtggcgacggaactgccgagtcaggttcttgaaacgaaccgccgcctaattcttcataggctggagggtgtcctgctcttttgctcattccgtcagtgacgaagaaagcaaaacggatcaagtctaactctggcgcttcagaacagactaacaaagctgtcgtcgaagattgtataggtgtgactctgttcagggatagtcttcaggttctagaacagaagggtagtggtgtgcatcagtgtatctgtttactggataatagtggttggttaggtgtgtgcagaaaaagtttagtgctatgctttgtatgtgatacatattaactatgccttggaatgttcatatgttgtcctgattacgtgtgatatctctcgttcagttcaagttgcgttttctacatggccatgggaccatctgccgatttgatgaaaaaggaaaggttgtgcacctttgtaagcgggcatggagatgagctgcgctattttttttttttacaaaatgtctgctgggattgaactgtctattttataaaaatatcatattttcttttaatgtcaacagaaaaattacggactgtgtatggatcccatgtagctaaggccagtgagtgttacgatgctttgtcagttgatgttatgtcagtcttttcattgttaattctgaaagtagattttatgccgatgaacctttataaaaag

SEQ ID NO: 39752 - DNA, 2607 bp, Zea Mays
caaacaaaaaatggtctgtactgcctctgcgtgcctccccgtaataaattctccctcccttcctcctctctactctctcttcgcgcgcctgcgattctctccgctgggatgcaagaagaatctttatcctttctccatttccggcaagcggcaggtgttggtaggcagcccaattcgtgttgtagtctgaagaattcgctggcggtggtgcagcttggcttcctctgcttctttttgacgatcaactgtcagggaacgtaacgtaactacatggtcacaattttgatgctggagcaaggcactcatggaccggacagacacatctggatttgttaccggtggatcagacgatgagtaccggttctgcgggtgtcttcctgcaccgtggaaaccaggctctcatggatgattctgcagtgccaattggcttctcaatgacgagctacacgacaggtaaccagtttcagagtcggataacatttggtatagaccaactgggttcagcagtgaacaatagcagcagccatggccgcagaggtttccagaggtggattcatgcgcctgctcaagatgatgggtgcagactagtcctcgggctgggtccgacgccggacccagacgttaactctcctgatcagcagcctgccggtgccggagcagacaagtcgagaccaccacctgtaactttgtttggccagagcttctccttcgctgatccggggacgctgagccttgggattcatcagggccgtagtacgggagcaaataaacacttgggcgccggaaccatcatctctttttccactgtggacgagggctccacgtctgccaggagtagctccggcggctacatgccatcgctgctctttgctcgtcggccaaactgttcgacagctgaagaggaacagggtttgctagatgacacagacacagacaacagtaacgatggtactgaaccttcggcatccatgacggaggcttcatttggtggcgtgagctctgatgctgtgaccctggtaagcaactctggacagcaggctcaacgccggcaccccaagaagtgcaggttcaaagggtgctccaagggcgcgcgaggcgcgacgggcctgtgcatcgctcacggcggcgggcagaggtgccagaagcccgggtgccacaagggcgccgagagccgcacggcctactgcaaggcccacggcggggggcgccggtgcctgcagctcggctgcaccaagagcgcggaagggaagacggaccactgcatcgcccatggcggcggccagcggtgcggctaccctgactgccctaaagccgcgcgtggcaagtccgggcggtgcatcaagcacggcggcgggaagaggtgctcggtcgagggctgcatcaggagcgccgagggaagggtcgggctgtgcatctctcacggcggcgggcggcggtgccagttcccggactgccgcaggggagcgcagggcagcaccctgtactgcaagtcgcacggcggcgggaagcgctgcgtcttcgaggggtgcggcaagggcgccgaaggcagcacgccgctgtgcaaggcgcacggcggcgggaagcggtgcgtgtatgagggcggcggcgtgtgccccaagagcgtccacggcggcacagacttctgcgtggctcacggcggcgggaagcggtgcgcggtgcctgggtgcagcaagagcgcgcgcggccgcacggaccgctgcgtgaagcacggcggtggcaagcggtgcagggtggacgggtgcggcaagagcgcgcaagggagcaccgattgctgcaaggctcacggtggcgggaagaggtgcaacttcggcgacggccaatgcgagaagttcgcgcgcggccggagcgggctctgcgcggcgcacgacactctggtggcctcacagcagcgccgcggtggcggcatgatcgggccgggcctcttccacggcatcgttcgctctgccagcgttgcaaacatgaacagcgactactcgtcgtcgggcgtgagcacggtgtccgactgcgacggctcgcctgaggcggcgacgaggaggcaggagctgatccctccccaggtgctggtcccccggtccatgaaatctttgacggcggcaaccgtgcagccaccgaagaggagcagagaaggaagggtagtcaccgtccccgaggggagggtgcacggtggtggcctcctgtcgttgcttggcgggagcttcatgaacgtcgacaagctctgaagcagtcagcgcttggggctcgatttgacgatttctacctctacaacgctttttcttaccttagaaaaaagtgagaaaatgccactttttctattagagctgtcagattattgtctgtgcataaaaatattttctcgtctacagatcgaacttgtatggtgaaatttagggtaattttgtttcccttgtgccatcaagggtgaacacatgaatttgtcatgtcttatgtgttgaatcgttcgtagcatttccgaaagttttttttggatgcgaaagctttactgctgtacttgttgtgaataagattaatgtgtaacaatcaaacttattgctacactgtgctgaattaccataagattgttcccgg

SEQ ID NO: 39753 - DNA, 2380 bp, Zea Mays
gtcagtgctcatcctttgccttatcttttcgcatagtcgcattcacccagcgtgcgctctcttttgctctctctatctctctcgtggcaacgactgcgcgagcgccggcgcctacgccaggtgcccaggcctccgtcggtcatttcgccaggcattcgtcgcgggctcttcgccggcgacgagcacacccaccaagttgaggattggtcctttacgagcatgttataatgggagagaacggagttcagctgacactgacctccactttgaagagcacaggcaagccacggatcaatgcggacgggctgaataatggatcacatactaccaaagtaagcatcggaaagcgtagagatatagaggagaagcatgaacacggtggcactttccaaccatcaaaaggccagaagcagcagctgtgcacaacatgtgcaaaagggcatacttgtcaatcggtcatcaaccggacaagacaaatgcgagctctaatcgactcaaagaagccttaccaagcacactctgtattcaagcacttaatggatgaggggcacaagccttcattggtcacatacacaattctactgaccgccctgacgaaccagaggatgtttgagtcgattccatcactgcttgctgaagttgaactagctggagttaggccagactccatcttcttcaatgccttgataaatgcgtttgttgaggcgaagcggatgggcgaagcgataaacacattctggaaaatgaaacattctggctgccacccaactacaagcaccttcaacacactgataaaaggttatggcattgtaggcaaacccgaagaatcacagcgcgtcttcgacatgatgggcgttgaaggatcagtcaggcctaacctcacaacatacaacattcttgtgaaggcatggtgtgatcacagaaatcttgaggaggcctggggtgttgtgggcaaaatgcaagcaggtggttttgagcctgatattgtaacttacaataccatagccagtgcatatgccaataatgacgagacatggagagcagaagagctcattgtggagattcagactagagtgcgcaccagtgagcgaacatggggcataatcattggtggttattgccgggagggcaggttggaggaagcattacgatgcgtccagcaaatgaaggatgcaggaagtgttcctaacgtcgtcatcttcaacacactgctgaagggctttcttgatgcaaatgacatggctgctgtcaataagatcctgggtctgatggagaaatttggcatcaaacctgacatcgttacctacagtcaccagttgaacacattcagctcgctgggccacatggctaaatgcatgcatgtatttgacaaaatgatcgaagcaggaattgagccagatcctcaggtatacagcattctcgccaaaggatttgttcgtgctcagcagcctgagaaagcagaagaccttctgttgcaaatgagccatcttggtctctgcccaaatgtcgtcactttcaccactgtcattagcgggtggtgcagcgtggccgacatggagagtgccatgagagtctatgacaagatgtgcaagtcaggcgtctatcccaatctcaggacatttgagactctgatctggggctacagcgaacagaagcagccatggaaagctgaggaagtccttcagatgatgcgggagactggtgtcaagccgaagcaaagcacctactgtctcattgctgatgcatggaaggctgttggtttgactgagaacatcaacaactcaaatggttcccccaatggtccttatgcaatcgagaaattggatcattcaaatgacaattgcaacgtgcgaatatcagaagacaataataacaagctgcagttttttgatgaaagtaatgggcgtgcaatgaatggccgttcacgttccagttttcttcagataacaaatgcactaggcagcagtggtatagtttctgccaaggtcatgaaggctggagaatttccatctgaaagactgaaggctatcaaaaacacatcctttccacaaggatttcaattgttgcatctcgagttttgtaggaagcagcttcggaagaatggtggattctgtagtcagagcatcaactcattcaaaatgggtttctctagcagaggatgcatttattaattcgatgtacacattgggctgaaacttaaacaaaaacaaatctcggtgttccaagtctccgcctatgatgcgggccatttttatgattcagacgcagttcctgcagtgtcaagcatttcaaacgtttaaaaaaaattccacaagcagtttcaaaatacgtgctgtttaaatgcaatagaaactgataagactacacacatgtctaaaaa

SEQ ID NO: 39754 - DNA, 1785 bp, Zea Mays
ggtggccttgtcgagctcgacgacctcggaggcaccccagcggtccagccgcatccacaggcgcgcgccgggcttcttcttggtgatcttccccgacaaggcacccccggcgcccgcggtgactgagaggggagagggcggctgggcggtctgccccgccgctgcagagtccggggtcgcggacggcgaggcggcggtgggggaggcgagaagagccctcgtcgcgttgtcctgcttggagggggaagggaggcgacgcccggagcgattccgcttggaggaggacgaggaggatctggtgaagaacggaagcttccggccgccggatcgcttccccatggcgttgcggcggcggcgtgccgcggcaccggcacggtccacgggggtgaatgggtcggacggcgggttctgtcgtcgtggtcgaactccaaatctgtggtagacgagtgggccggtcagggccaaccgctcgtgagaggaagccctaggatgctggtcggacggttgaaattgcgtgcagcgtcaacgcgccaagttgccgcgctggcgcttgccgcgaaagagagaccactatccagaagcgaagataatatcttcgtcttcccccttctcgccgatggctgcaacacccactgccgccgttttgctcgcgcgcccgctcatcgcactctccagtgctttcacctcccctcatcgtgcgcgggtgccgagcgatccctcctccatctcggtgccgccactgaggagtcgatggtgccagtggcgcggcccgctccgatcgctgccccccgaaggagctccggccgagctgatggaagaggactccaagtttgtgccgttgaacgcggacgatcccatgtacggcccaccggcgctactgctcatcggatttgagaaaggcgaaactgtcacgattcaggccttcctgaaagagcttgaaggtgaattcctcaagaggagatgacaaagcaaaccttatgggatgccatgcacactgagcagcctgatttggaagctgtcaagattgcaggaccactgccaaggatatgcatattttctggtctaactggcgaggagatgatgatgttcatcaacgccttcccagaaaccgggctggaagcagctgcctttgctgcgcttgtccctaacagtgcagagaaggttctcggcgaagtgatcgaggaaataatgggagaccatgagatgctgacaggaaaggactccaaatgagaagaatttgaagcacggacatgcctatcaagaaaattgtcactttgcattctgatatatggcatctaaatctgattcaaattgccgcaacaggaagctgggtatggaaaaaactgttcaagatagtgttgcagaagaaacatcagtttaatttttcttctgataaatacgggtccttttccatctggtcacctccagaatttgagctcctacttactgtatgtcgtacatataatatagtttatagtgaccaacaagttgctcatgactggccagcttttggactttgggggctttctgtccgttgacttttttctattgatttttataatattttatttagcttttcagtacataacaatctagagaggcttctctcagcgtgttttatagcttttagtttatttgtttactcaaaagtcagttgtccagatttttaaacgccaggtcaacatcttatggcttctggctaccagaaactattgaaacaaagctgagataaatattttgagacattcccaatgatggtctcaaaatgttttttttctttcccta

SEQ ID NO: 39755 - DNA, 753 bp, Zea Mays
tcaataatgttattggatgggttgggtttaacttccctctagtattttttggttgggtgtgggatggatatcaaagtaattagatttgggtatgggtgggagtggattggattttttgccattagcaggcctaggtggcagtgcgaaagcagcgctgggcattgttgatccgagaggaggcaggcacggcagatgatatgctcccgacaagggctgctgcccgaaatcccttagctcaatcacgctgggacagtgcgccttgctggaaagggtctccgtcggcattaggaactcttcgtggtagatggccggtgatggagctgacgaccgtgacggtggagacatcttctttgaaggcaggaactttgctggtagtaggaactcggatccaagtgcatcttccttcttcgaacgcagtgacggccttgctggatcatttgtgccgccaaacggaaggaggcaggcgaggatgtcgcaccgtaaattcgagcacccgaggcacggttcccttggcttcctccccaggaagcgatcctctcccgccaccgcggaaaggtgaagtccttcccgagggatgacccaaagaagccctgtcacctcaccgccttccttggctacaaggctggaatgacacacattgtggtgaggtcgagaagcctggctccaagctccacaagaaggaaacttgtgaggctgtgactatcattgagactcctccccttgtcattgtcggacttgtggaatgtgaagacc

SEQ ID NO: 39756 - DNA, 2557 bp, Zea Mays
tcttctcttctattgggacactttgtgataaactgaagcaaacagatccatataaatcagagcttgagacaatgctggtccgacatgtctttcctgaattcagcagtcgtgttggacacctgcgagcaaaggcagcatgggttgctgggcagtatgcccatatcaacttttcagacccgaacaattttcgtcaggctatgcactgtatagtttcaggaatgcatgatccagatcttcctgtgagggttgattcggtctttgcacttcgttcttttgttgaagcctgcaaagatttaaatgagattcgacctatacttcctcagctccttgatgaattttttaagctgatgaatgaggttgagaatgaggatcttgtgttcaccctagaaaccattgttgacaaatttggtgaagagatggcaccttatgcattaggtttgtgccagaatttggctgctgctttctggagatgtatggctagttcagaagctgatgatgaagctgatgattccggtgctttggcagctgttggttgcttgcgagcaatcagcacaatccttgagtcaattagcagcctcccacatctttttacgcaaatagaaccaacattgctgcctataatgcgcaggatgttgacatctgatggccaagatgtttatgaagaagtccttgaaattgtttcctatatgtcattttactcgcctacaatttcactggacatgtggaccttgtggccagtgatgatggaggcgcttaatgattgggctatagatttctttgagaatattcttgttccattagacaactacatttctcggggaactgatcactttcttgcatgcaaagatccagattaccagcaaagcctgtggaaggcacttcaatctattatgatggacgaaaacatggaagattctgatattgaacctgctcccaagctcattgaagttgtttttcaaaattgtaaaggcaacgtggatcactgggttgagcactatctcaggattacaattgagcggttacgtcgagcacacaaaccatacctgaaatgcctccttgtacaagtgatcgctaatgcgctctactacaatcctgcgctgacccttgagattttaaataagctcggggttgcagctgacatttttaaccattggtttgctatgctacgacaagttaaaaaaagtggggcacgtgttaatttcaagagggagcatgataagaaagtttgctgcttgggcttgacctcccttattgcgcttccagctgctaagattccagcagatgctttggatcggatcttcaaagcaacacttgagctgcttgttgcttacaaggaccaagttgcaggtggagtgatccatgtttttagttgtgcttgtgtttttttccctggtgaatacacagaagctaagaagcaaaatgaagaggctgctgatgatatggatggttttgatgctgatgaagaagatgatgacgaagttgactctgataaggagatgggtcttgatgatgaagacggggatgaagtaagcagtcttcagctgcagaaattagccgcagaggctagaggcttccaaccagccgatgacgatgactcagatgatgatttcagcgacgatgagctacactcaccaatagacgaggtggatcctttcattttctttgtagaaactgtccaaggtttgcaggcatctgatcctgccaggttccagaaccttatgcatacattggatttttcttatcaagcgcttgctagtggcattgcacaacatgccgagcaaagaaaaaatgaaattgagaaggagaaatctgagaaggcaaatgcacagtgacgtcataaagcatttctggttcccttcgattgttttgccattttgccggtatagcattggtggacggttaatttcctgcgatttgcaggccgcaggtaagagtttttgcagccttagccaaagtgtaggacaaattcaatcttgtgagatagcatcttggataacctgtcacctcgaccatgttcgtcgtggccagttgtagacgtcttggttgtgcaagaaagtttctctcgaggacagttgctcgttttgttagggccatcaatttttttgggcggcttgtaagttatttgagaatcccacctcaggttgaggggttgtattctcgagtcgtcaaagtttagtaccggtgcggtgtagattgtatatggtttcagttgtctagaacgttgtggcttcatggacgggctgtggtataagtttttattattttttaatttttttgtcaacaagacattgtaattggggtttgtttgtttggtaagagcaagaaaggtcggcactgttatttcttcggtatcattgtccacttgtttcgatattagcagtttacctaatcctatatccaaactccactcttccatattcaaactccactctgaacaatgtaatctatagtgcttttgagtaaactatgaaaagattgctgcagatggttttacaatgatggaaaatgggtattgggataagtggtattgggataagtatcataatgatattgcttg

SEQ ID NO: 39757 - DNA, 759 bp, Zea Mays
ttctggcgttcacacctctggctgccttcatttcctgttgacgactgagcgggcgagcgccggcgccctttgccaggtccgtcggcccgttagccggcgactagcgcctccctttgccaggtcttcgacgtccccttcgccgtcgactggcgcccagcagccagcaggtccggtcgccccttctcgtccttcctgcagttcgaaagcgagcatcgaaaccctaaagcaagctacttgtatttgaatctggcacaattgcaagtgtacacatcagatccttttctatctgtcgtgttctgtctgcctggtacatttggaagaatgggggtttaccttagcactccgaaaactgagaaggtatccgaagatggggaaaatgataaacttaaattcggagtttcatctatgcaagggtggcgtacaactatggaagatgctccttatgcgtcttacctggatactgacacaccgacacaagtgatggaatccgactcagactcggatatccaactcagcatgattttactcaacttcccaattgtgacttggaatccaattgggtgtgaagagtctgattcgccaaaaataaatgtgctttcaatgtccaggttactgggtgtgcttatatggaaacttgtagaatgtcctaggaagtagagaataaagaactaccaaatattggtgcaaagtcttttcacaaatagtactccctccgttcttttttatttgtcacggtttagtgcaaaaatgaactagcgg

SEQ ID NO: 39758 - DNA, 1786 bp, Zea Mays
gaaaatatcgcgaatcctggggaaaaaaaatatttgtgtccacctccctctcacccgtcgcgcgcagagccaaaccaacgactacaccatcgatgtcggccgccgaaccggaagcccatgcggcctccgacggctttgaccggcggcggcgcgagctgcaagcgttcgacgacaccaaggcgggcgtgaaggggctcgtggacgccggcgtcacggccattacggccatcttccgccaccggcccgccggagtccctggaggcgacgacctcgtgcccgccgccgtcccccaccggcgaggccgccggcatcatcccggtcatcgacctcgcggctgcgccgcgacaagaggtggccgcgcgggtgaggcgcgcggccgagaccgcggggttcttccaggtggtcaaccacggcgtgccgcgggagctcatggccgccgcgctcgccggggtgaggcggttcaacgagcagcaggcggaggcgaagcgccgcttctacaccagggacaccgcgcgcaaggtgaggttcacctccaactacgacctcttccagtcggcggccgccagctggcgcgacaccctcttctgcgagctggcgcccgacccgccgcgcccggaagagctgcccgaggctgtcaggggcgcgatgctggagtacggcgacgcggcgacggagctggcgctgcgggtgttggagctcctgtcggagtccctcggcctgcccagcgaccacctgcgcgagatgggctgcgcgcggagcctcaacgtggcgagccactactacccgccgtgcccggagccgcacctcaccctcggcactagcaggcacgccgacgccaccttcctcaccgtcctcctgcaggacgccatgggcggtttgcaggtgctcctcgaccgcggcggctgggtggacgtccctcccctgcccggcgctctgatcgtcaacatcggcgacattcttcaggcccacacacacactctctctccacatcatatcgtctggatctccatttcgctggaaattgtttgcatataatgtgtcgtttggttcatatattgataacgcaatgagaaatcgataacattaaatcatgtttgtttaactctaaccgtaatcgataccacactacaaatggataccacattattcaaatttgttaccgtcggtattcgaatgtgaatcgttactattatcatttacgttacatttcgcaaaccaaacgccacctaacccccactccggccgactgttgtcgcgccttgcccacgtgctgtgctgtgctgtgcatgcagcttgtgagcaacgaccggttcaggagcgtggagcaccgggtcctcgcgaacaagagcaaggacacgccgagggtatcggtggcgtgcttcttcaacgcggacgtgaagaggtctacgaggctttatgggcccatcatcacggatggcggcggcagcagcagccccccgctctacaagagcgtcacggctagagagttcgtcgggtactcgtacagcaaaggcctcgacggtcgcccgcttgagcacttccggttggagggcacaacagcagcatgcccctaagactatctgtgtagttcagtgcgtgtgctagccacgacggcagtttatactacatactccctctcgttctcgaaattcaatgaactaataaaacgcgataaataaattaaaaaaacgaaggatgtacagtcttttactgtataaaagttgtggagcttgaaatagtatacaactttgttgcatcttcgtggtcttgctgtggtgatcaccgg

SEQ ID NO: 39759 - DNA, 1307 bp, Zea Mays
cctggctacctctgtcttcctgctgtgcgcctgtgcttggccggttggcccgttgcgcgttggccggctggcggccgcacgaccgtgctccacctccactgctccacggctgcttgcctgctttgctgcttgctttgctttgctccgcctgcttcggatgtgcagtccgtgctccactgctccgcctgcttgcaaattcggctgcttgcaaagcctgctgccctgcagttgcaaagtctactatcaaagtctcctagacatatgtctttgatattgccataccttatttttgggtcgtgctccgccactgtttctatacattaaggcagtatgttgctcaatacaagtgtgatccaactgcagacttaagccttaggtgcttcatgggtgatgaagcagatggtgttccaggaatccagcacttggttctgggatttggcagaaagactgcacttaaactactgcaaaaacatggttcattagaaaacttgctaaacacagctgcaattagaactgtcggcaaaggttatgcccaagatgctctcactaagcacgcagattacttacgggatgtaaatgttcagtttgatgatagttggctatccacgaggaacacaagcaatgacacctatgttctagcggacttcattcttaaacttaatggcgaaggcagaagctaaacagctggtacactgaaatatttgaacaagctggactgttcctcaccagacacatgatttaacaagaagacagatgcataaaggttggagggggcagttgctggaaaaaatgtgcatacaacatactatatatccttgctccaaagtagtagccatcactcatcacacatgagtacatgacaaattcttgcttgtgttgtggaactggacactgaagtagcctacctgtgttgaagctgggtggaaaatagaggtttggagggtctgtctttggtggatacatgcgtacatggtgtccggaacaaagttatgaacagccaaaaacaagctgtcatggtactactactagctgtagcctgtaaactgcacagacaccttgccaggagattacagatggatgcttcatgcttcagtagcaactcgttgatgtatattgcatgcaatttagaaacaatatatgtcccaatgtatttgtcaggaagcatctttaaatcattagcgactccagggtttcatgaatccaggctagatcattataatgtatatttactggcatcggatattgttttactattccctcatttttttatctgtcacattttagttcaaaaataaagtatcgagcaa

SEQ ID NO: 39760 - DNA, 2432 bp, Zea Mays
agtcgcccgcgtctcccacccccgcctcccccgccgccgcgctcgccctcccccgcctcccccgccgccgcgctcgccctcccccacgacagccgccatgcgccctatctccgccgtgcttgcgcttcctcacccgcgcaatttgcacgcgctccccccgcgacagtcgccacgctcgcacgcactccctctgcaatagctgtcatgcgccctatctccgtcgcatcccgcccgctcgccacgcttgattcctcctttcaatggtgcccacgccgtccaatcccgcccgcggtccttccccacgcggatcccccacccctcctccccaccgccgccgcaacaaatccgcgcacctcgatctgctcaagtgagcgtggctcaacgagaaggccacgtcagatatcctcagcttcgaatcgcccctcgcgttacgtgtccgcgagcagatccagcacctcatacgctcttctccctcccccttcttgaccacgttcctccactcccccccatagctctgggatctggccatggctccctctcctggtgtcgtgtcacccaggaggcggcgctcgatgacttcgtcgacgatggcgttgacgacctggtggtctcgctctaccagatggacctcgatctcacgctcttcctcctccgctcctaactcctcccggagaagatcaagaagtacacgatgcatatctctagggccacggccgaggcgactggtgaagttgcggcaatctgatgcgggaggtggccgacctcatccttagcttccctgacgagacgcccgtcgtcgtcctctctgccatggggaagaccaccaataacctcctcctggccggagagaatgcggtgagctgcggtgcccccaaggcgtccgaaatccctaagctcgctgtcatcaaggacctgcatcttaggacggttgatgagcttggtttagataagtcgattgtttcagggttccacatgcacattcaccgagtcaatcctgcgatcgtgtggcttccatactgggctgttcacctcaccacatttgatggatgttagagagcgatttcagctagggttaatatttgaatatttctgaagagaaatttttgaagtacttctggtggtgctggaacaagttgaaggagaagactgatgatgatattcccatgccagcctatttcaggttcctcgcgctgctcgcattcaagatattttctgctgagcaggtagatgttgctgttctcgaggttggcctaggagggaagtttgatgcaactaatgtggttaaagcacctgtagtttgtggcatatcttcccttggatatgatcatatggaaattcttggtgaccaaatcctgttcttggtgataaacttggtgtcgataaacgggttaattctgttggcaaaattaggatgacacaggtgacatgaagatgccaagtcggtgcatccatactaattgcgactttggtctgtttggacctctggtaaacgacgtagtaggtttggagacctggaactacaaatcaatagtattgggacttaagtgacaacctgaacaagtttaggaacaacttgctagaaaatttttatgctttctaccaatcttacaacgataatttgaaagttgatatttatggtacttatttggtccaggaactagattttttgtacattctttcggatctggattaaacaacgctctctttgtatatgaacaatgctctataaatatacgtttgataattttatatgatatttaataaatagtagctactgtgactgtttcattttgtttttcttaggttgttagttctcatgaatgtcatgttgtctcgaaataaagagcttctgtccgcacctaatcgcctaaaatggaaatgtttgactcattgtttaattcggggggaagctgaaggtggtctgatccggtaagagatcttaatctgcattacacttgttggattttgatgtcgcttctgggagtgtttgattgaattctacaccagttctaggaagagaaagcctgaccaagtcatcatctccagggacgatgttagcgaaagtcaatttaatcaggtgctgaacattgagttgcaacaaatcatcgatggagactgtcaccgcagccagaaaaccacggtctcaatttgaggagcctttccatctatgtttgttagaaggcatataatgcctatttatctcttgtattcgaacatttggcaattaagaaatagaagattacttccccaatatcccttattcctaatctcacctttcacggcttctggtgaacaatcacttgctattaccgactgacatgtccactcctcatatgtgagatattggggttgatatatatgttgttcgtttccatgtaattattgtgtactaacatttattgaataatttttacgccgtaacaacgtacggg

SEQ ID NO: 39761 - DNA, 1231 bp, Zea Mays
tgaataaattagtgtgttagtgcgatgatcctttacttagcagaagtgcgcttgataattatggctagatccgttgtcgtgttggtgtattgttccatggcaatataattgtttttagaattataaagtagtcgcgtcggaggttgtagtctagaattttgaggcaaatttatgcgaagaatattggtaagcatgagtgatgtttgatgaagtcgatgatttgctctgatagtcattatattctatatttagtaatagattagatgtcatgaatgaatgttgatcattactcgagtattttaacgtgaatagcatcgacaagtatgtttcggttaaaatatgaggatttcatgatagagggtgtatatcaatgttttaaagcttttgtggataaaaatgctctcacaagattatatgttgtctgataatgcccaaccagctagatcgaatagtgcgatgccctattcggttagtgtggaattcaagttagtttagaaacgcgatctaaaaggttagtcaaattatttctatttttttgttctaagtcatgggtgttcggtaatggtgagccaaggtataattaatattttggtgttctaggctagctaataaaggtataggccttgtttagaattgaatatttcttgatatttgagttagatccaaataagctagagcaatgagattatggtgcttagtcatttaccgatatctagcgtttgctcgtgagtgttgtaaggcctcaccattaagtgttttatttctcttttgtgtagcatcatattatctcgtgccattcctctgaatgttcataaatgcgcatttttcatttcattaggtgcactagttatgcacgtgatgcggaagacgagccaagttgaccccaagatgacgtaatgggtggactactccgcatggtgatgctgatggacgaatttaaggacggatgacctgatcaagtgccaggacaaggatgatcatcaagagatcgtcgtcttacccacactaacgcagtgttattccaagcaagccccggtgtatttacccttttccttgctatttcaaactctttatcacttggaatgatgcattaggtgataggagttgggtgataaacaattgttgcatttccttccttggaactgtttaccattccttgatacctgttttacttaaaagttttctgatgcttagtcttgccttagaaaacaaaatggtttgttttaaacaa

SEQ ID NO: 39762 - DNA, 2181 bp, Zea Mays
ggtcattccagcactcgattcaacaacaccgatttttgcatcatctttcaccatggagctaataaagaagcgtttgaaggagttcgggatcttcctctcatcaaggcttaaggttttaagaattaaaaagagatttcaggctggaccttttgaagttgaacccatccgtgtaactcattcaattcctgactgttgtggcttagtgcttcgttgtggtgatggcataattttccatactggtgactggaaaattgatgaatcaccagtggatggaaaaaattttgaccgacaagcattggaggaactctctaaagaaggtgttactcttatgatgagtgactcaacaaatgttctatcccctggaagatcaatcagcgaatctgttgttgctggttcattgttgcgacatatttcggaagcaaaaggaagagtaattacgacacagtttgcctcaaacatacatcgaattgggagcatcaaagctgctgcagatttaactggtcgaaaaatggtatttgttggaatgtcactcaggacataccttgaagctgctttcaaggatggaaaggcaccactggatccatcaaccttgatcaaggtagaggatatggatgcgtatgcccctaaagatcttttggttgtcactacaggttcacaaggagagccacgtgcagctctgaatcttgcatcttatgggggaagtcacgctcttaaactatcaaaagaggatgtccttctttattcagctaaggttattcctggaaatgagacacgggtaatgaagatgatgaatcgtctcactgatcttggcccaaaaattatcatgggtaaagattctggcctgcatacctctgggcatgcctaccgagaggagctggaggaagttcttcggattgttaaaccacaacatttcttgcctgttcatggagaactcctatttctcaaagaacatgaatcacttggaagatcaactggcatacggcacacaactgtaataaaaaatggagaaatgcttggtgtatcgcatctaagaaacagaagagttttgtccaatgggtttgtttcattagggaaggaggatcttcagcatggagatcttccgacctcagaaggaacatggtttagcgcagtctggtttgaaaggaaaatttaagattacaacaagatgtctatggcttgataatggaagattgttggacgcactctacaaagcagctcatgctgcattgtcaagctgtcctgtgaattgtccacttagtcacatggagaggatggtagctgaaatcttgaggaaaatggtacggaagtatagtgggaagaggcctgacgtcattgcggttgctatggagaacaccacagcaagtttctcagaacacctcgatgctaaatcatctggaaattttggaccttcctcagctactagccatctgagcatgagtccagctatgagtcttgaaggcagttataaaacacacccagacaacccagaggtggaagctgaagaaacccttcctgaggccgcgagaacagcaccggatgatgcaaccacaagttccaatgctgttaaaattgcacggattgtcaatggggggaagaagcaaaatcttggcaagattggcataatgggtaaggactcatcaatccagtcagctcccgctccagctaaatcttcaaaaaagaacaagtggaaacctgaggaaatcaagagcttaatacagatgcgtggcgagatgaatgagagatttcagagcgtgaaaggaagaatgatcctgtgggaggagatttccgacaacatgttgaagcaaggaataagtcgtactccggcacagtgcaaatcgctttggacatcgttagttcagaaatacgaggaaagcaaggacgcggagagcatgaagacgtggccgtatttcttggccatggataggatcctatcgcagcaaggggaaatggcaaccaaaggatagagaaggctgtagcttagtggtagacgtttattagaacatttgatatgttgtagcagagcccagtcagtgtagtgaggatataagatgaaatgtactgtgtacaggtactgaggtacagcacctggcaatttattgggaccggattcccttgttctgagtaaggtcgacggtcggtagctcgagatcgagatggcgatttactgtgcgtgtgcatcaa

SEQ ID NO: 39763 - DNA, 2436 bp, Zea Mays
cttgctcttgctcttgtattcttgcttatactgtgggccatgctcgggaactagggctgaagattgatgcagtgccattgtgccaataagcaagaaaggcccactaaagggcaattgacgctgggcggcgacggcggggggagactgagcggccgaggagccggtgtggcatcggtgcatcgcagcggcctgaggtcgcgagcagcacagcagggtgcgccaggcgccgacgcggtacggggcaccgcgcgacgcgtgagcgcgtggccggtctcagcaccaagacgcatcaaagccggcgctaggcagggcactatcgcgctgctgcgcagctgtgcctgcgctggtccctggaggattagtgacagcactcaccaatttgtgttttgcagaattgggagaaatcaaataacttcacaacagatcaggaagctttagagcttggcaatggagatgagagcccgggaatctgtaagcatgtcgaaggatctaactggggaaatcacaccttttgccactgccctacatgatgtgttcctccactcccattgctcatcatgcttcaccaagttacttccacaaaccccttgtgtcatgtcttgcatgacatgctgttctcttcgatactgctgttcagagtgcttacgtgcggattcagtggtgcatgtttcctctggtgaatgttgcttttttgtggatcacctcaagagagcctccccttcctatgttactgaaggaacgagtgatttgcgtgctgccctccgccttctgtgtgtgcttgagatacatggtcttgtttcgcctgattcaatcaatcactacagtagaattggtggactttcagcaagtggtattgaggaagctttgaaggaaggtgaggttattgctgagaggatactggaggggagcttattgatgtcatctgctagaaaatcgagggcacagacttgtgttattttttcagacaggcttaaacttgagaagatggcattatgggcagtgattatcaatagcgtcgaggtgcaacttagtgaagggttagctttgggagttgcagtgtatggcccgagtttctcatggttcaaccatagttgctttcccagtgcttcttaccggtttgtactggctccaaggaatgaagactgtgcttcacagaaatcaaaatccagtgtagtccctgctagcaaaggagttgcagctgatgtgtggcatgcttggcaatacgaagatcattctactcatggtacttcattacgttctacgcgatgtattgcatcaccagagccatacactgatcttattctgaattgtgatgtgagggacttggataaagcagaagcagagggtactgttacacctccagcaattgagaatttgggtgatgtcctacaacaggcaatatctgagtacacgtcaaatgatgaccctgaagcttgctgtgatatgattgaaaccatgctttccaacaggttggtgagtggtttgaagcaagaggatatttcagggagaaaacatatactacagcctcttcaccatatctgtcttactgcttacatgacacttgcctctgcttaccggtttcgcgccttaagtttagaagaagctgtccgttcagatggagaaaatactgatgaattttttagaatggctaaagcagcagcagcgtattccctggtacttgcagggagtacacaccatttgttcttatcagaatgttctcttatgatccccctgtctcattttttgttaaacactggacagtctctgttatatcttgttgagtctatcaagggaaagacaaggcaaaatatatccgaggccaggctcagcttttcttcatgtccagcaagttctacagacaatgattctccaccgtaccatgtgttcagatcaacctgtgaagcgtttggcaagcaaatgttatccctgtcactgcggtgctggtcatttctagtgcgaggtttaccctgcctggaaaagataaagagccccatggaatttagtatgcccggaacaacaatatttcagtctgtcctttctgaggaagaccatgccaacctttccgcgcacgagccagtaggtttcacggagagacaagcggggtgcatccttagtttggctctatgttgtatcacctactgcaaatatcttgctaccatatgctacggcccacatcattatctggcagaccatgcaaaatatctacttgaaggtatcgatcctgcacaatgaatcttctttcttggcataggtgtgttgtgaaatcttatgctcttatgagttaatgtaaaacgtgtcgtgattatcaaggctgttgagcttattttctatatgattgtatgctgagctcgttatttattattttgtatggaagcaccatttttctaaaaaaatttggtcactgggaagttgtatcactgatcttgcacctttcct

SEQ ID NO: 39764 - DNA, 1928 bp, Zea Mays
acaaccaagagccaacagagcaacgcccaggcacacacgacgcggaccaggcaaccagctgccgagggaggaaccctagcggaacactgtgcaggtgacggcggcgcgctaccggtgacggcggcgcgctaccggtgacgggggatacggtggcatcgtccccctcggcccctcttccatccccggcgcggcggcgccagcagccggcctgcagatcagctcaacaaagataaccttgcgcatcctcctaagaagatcaagactacccagccaggttctacagaccctcaaaaccttaatcgttagatcatcgccgttctcatgaagggcttatattttacggtgagcacattcttttgctgatggagaccactgaacctctacaggatatcatgtgtgagtttcgtgctggtaagatgtctcatgagggaacacgagtggttccagacacgcgcaagggtcttgtccgcgttgggtgaagagggattagtccattttcagtggcttgaccgtggacagaacatagttgaagatgatcaaatcatctttcctgatgaggcggtctttgagaaggtgacagaatctcctggagggtttacatcttgaagtttaagcaagacagcagaaaattcttcttctggatgcaggaaccaaatgctgatggggactcccagacttgcatgcaagttaatgcctacataaatcgatcattagatgctgaggctgatcttcgagtacctattgaagcagaaatgtctgaagatacggctgatgatgatatctcttccagagctgggaatctagttgagagcatgaccgctgatttggctggtgaagtgacgtctgctgctggacctgtacgcttggaggatctgcagagaattctgagtgcaatacagtcatcaggtgctgcagctgaccctgatgctggagtaggactaggagacatcttgaagcctgatctggtcttgccattaattgaggacttgcccattgaacaattggcatcacatcttccggagggtggctcatggagtcctggtgatatcgttgagcttctccaaagtcctcctttgcgccaacaattagatgcattcacccacgttctgcggactgggcagatagatcttgctcaatttggagttgaccctgacaaatataagttcacggtggtgtcgttcctggaggcattggaagactcggttggaagaggtgcttctgaagctggagacaaggatgcagaggtcgagcgaggcagtggaaatgatgccatggacgagagttgatatccgtgtactaggtgtctgaattcatacgtgacaagtcttgtgttgttgttttgggtagaacgctagctcatagtattttgggcttctggcacacagaaagcaagtttctggacaagttttggacattattgctgctgtgagatgtagtgctaggcaacagatggtctggttggtggatcatggattccatggcattgagaagcttgcaaggctagattgattgtgttctgcgggggtaaatcttgcgtggcgttttgaacgtggattggtaaacagaatagcatcttttgaacgtcggttgttccatgtccacagctgatggtggtggcctcgaatgtcgtactgtacgtccatgtcgatgattccgtcgcaggagcctactactactatatccctgttctatgtaagatatgtgtactccagtacaaacagtatatggacagctcaggatttttttatattgttctacacatacatctttagatgatttttatggatatgatgagtcaaatcttgaggttagaacattatcgaattcataacttacctccaatgacgattgtatggcccctagaatccatttatctcattgagattattgaaatctttactgctttaaaacactagttttatgtgtca

SEQ ID NO: 39765 - DNA, 11927 bp, Zea Mays
tttccttttcaagatctcaaggctatcatgaagcttggtggtcaaagtcccaaaagaatgagggacctatcaagcttgtgggttccaccagtataccggagactcttaagtgctgacaaggcagaaagggacatggtagaaaggtgccttattaaggtgtcatgtgttattctaccacctcaacctctcctttccaaggctgttgcttcagaccttgagcagaagctactctcctgtatggtaaatatgcttgatgatccttccaagaaagttcaaactgtgaagtcatggggatggattgtatctttgcttggtccagatgcagtgaacaatagacctctgcttaataaacttataaaggttcctgagcagatgtttactgatctgaatccacaagttcaggttgctacaatggtttcctggaaaagtttggtggatgcattttttccttctcaggcaactgagattgtggcccagcaaactgtgatttccccattaaaacccattgaacaggcaagtgcacaggtgaaaaggataagattaattatggtgcctatatgtcgagttctgtcaagaagtcgcaatattgtacttagctcttcttgtttgagtacatggcattaccttctacatagacttggtaatctgatcaattatttacccattctggaggctgcttttggaccaatactcaaaataattttctcttttgggatcaatgatcagaacaagccactgtggtcattttgcttgaacctttttcttgattttgtttcatcaaaaaatagggtcagagaggatttatgtgccccagtgaatcagaacttgctagctcaatcatgcaagcatatcaaggccttattggatattcaacacatcaaatggttaccatgggatattagttgctttaatttccaactcaatattcttggcataattcttaagccagaactattccaggacataattcctgaaacaatggtgattgttatggattctgcaacagagattttcagatttcttctaaaaggtattcaaatcgaacttagagagcagcgtgcttatgaacaagtcaatgaatgcattactaacgcgtgcaagtttgcaaagaggttgttgctggatcatgtaggaaagaatagtgttatcaagtgtgctgcattactggaatttggtcttcggtttatgaaagttattgcgaaggaactagatcattctttgttagcttctgaaaacattgaggtatgcttagacatcgaacacataaaggagaaccaacatgcagaatgcagcccaaagctgtccttaccaagaatcagatcactctcttacatggagatggtttctccagcagtttatgtgactgcactgtctctgtccatgatatctcagtatactggagagttttctcatagagatgcagatgaattagtttcaattctggatccatcatcagatgccctggagaattttcatactgctgtctcttttatgtatatgcagatcaggcggccaacatgtaacaaggaaagattaaaatggttgatggtttggaactcgtttgcaaaaaaaatgaacagtcaaattatctcttatttggaaaccaattctggattatgttaccatgatgttctccatcagttcttctgttatccaatccttaattttttataccccaaggggatatccattcttttgaatgctgaaaatagctccgagtcaaaattttctgtcctgcaaaacctggagatggaatcaacaattgaagtttatagatccctctctacaaactcctgtaattcgaagtttttttccaaggttttctttgatggtttttacaaatacttggtttgcactattgatgaaaacatggcattgttccaagccaaccttgagcatttgtcggaggagtttgaaaatgctagtgtcctttctgctcttggtgaaatagtcattggactgttacagaatgatcaaatgttgacctatgctaatcaagagttgaaggaaacacctgaagattcttctgtgtgcagacaaccggaacttttcttgaattgcttcaagcttgctaataggtttatgaagttgtcaagttttcatttcaaagcaaatccagctggacagcaccaggtcacaagcaggtttttttcatctttatctaattttgctgggcatctcactttaaaggaagatgttcttcttttcgagattattggagaccaacttaccgagtggctctctttaagcatcatattgtactctgaaatgcaacaaggacaaattgttgttcatcttgagaacctttggctcaagatggttgagtgcctgaagaggagtcagctagttagtgatgttcccttaataaatcagaagcatcgacttcttcaagctgcactcaatcgcccacatcgccccatttcagttgcaacagcatcagtttgcagagtagcaacacatggcaacacaaccctgcaccctggttgcttaatttctgaatttgctgagttattaatgcatagaagaaaggctcttgatagctccaggaaaacagtcatcacatccaatcctactgatctcacggccgagaggtatgatggatctgtgaatgtctcggtgggtttggggaggaagaggctgaagatcatgaagtattcaactaaaccaaaggaactcaacaaaaatagagccaacatgggcatctcaccaggtaatacggaaaatagggcgtgtaggaaaccagaattaatattggagatgctacagaggaagacatagttgtttgaactcaatgttaggtttaaagaacataaatgtgtacatacgtatagaaagcggaaggtcagtgcaatgatcccctgcaaaagaattaaatccattcaaaattacaagtcattttcattccttacacagccacattgtttgactatagggagatggaaacaacaggatctaatcatgtatgtaattgatgctttggcctgggctcctggctgttacccctttttttttgtgtgttttggtaacctctgagcaagattcttgtgttcttcctcatcgtccctgcagccaacacttcgtttgttaactacagccgcaggttcttttccaatcgcattaataatgctgagaagcaagtcatgtcttcaccatctacattcttacataaggtgcaatttgtctagattgccaaaagctcaaaagccccggttgaatagtgagttagttttaaatctaaaattagtcggttacccgtgcgttgcgatagattacaacaatacccacgtaaattatccattaaaaagatttcaagtttttattgattgccttcgatctttacataatattttttatgaacgcacaagtaccataggtagcaaattagagacctccatccctcgcctccctaatttcaaggtctcgtagagcaggaggggaaggaaagaggcgggtataattgttcgttgccggagaaggacacgacgaagacctgggcatctggaggcgatataggtagtataccgctggatatatagggagagagcacgcaagcggagaaagaagcccggctgaaacagctctaaaccgagagtcacccgcaccatgcgtcagtccgagaagggcgagagaatgcgagtgtcttcctagccctggacctgtcgaagcgacacaacaccaccaccaactccgtaacatatgccaactgctgccacgctatgagccttggttgtccaatatctcagacctggactcctcatcgccaatataacctaagcgtggcaggcgccaccatgtcctcctcgacggcacgcacagagaaaggccaggagcatgaccgactcgctccgtacccgcgtcgacgagcgtcggtcggctcgtggctgcgaccgtgggcggaggtagcaggttggggaggaagaacagggcgaaggccgggaagacgaacgagacgtccgacgatggcgaaaacgatggtgcgcacatgatgtgaaacgtcctcgtggacgtgcaatagccactgcgcgagttggtgtcagacgaatacggagaggagacgcctgctcctacgccctctgtcgagaatgacctggcgcgaaggtggaggcatgtggggaaagggaaaaaaatagaatgacgaacgaggtggtgacaactaagacgaggatcatcattatcgtgtggaggtatatatggccaaatggaccgtgtctggcgagccggcccgaggcacaacccatttaatagtgtatgggccaacccgacacgaaccccgtgcggtgtttgggccgtagcctcggcccgtagtgctgacccgacccgacacgattattttttttattttataaaaattcatatatatatatacatgtgtacaatttaaattaaatattataaatacttgggcatgatgttctactggttagacagcttcgcctagtgtctcccacccttcttccatcagggtgtgggttcaaaccccacctcctacaccgctttttaatattttacgctgagttgattggaagaaatgtagtgacttttgtaaaatgatgacgcgagacgaccgttgaaactggtgctttaaatatagtagagatatttagctttgcaaatcaaattcgatcccgtgtcaaataccagaggattgtggttctcatgccattgtaacccatgaatctttcacactatccagcacacattgatccactgtcctctatggcattgttcttgttcggttacagtggatgaaatccccctgtggatttataacatgtttggtttgagtaataaggtagtccatcatctcctcactcctcgttttcttatttggtttgtggaataaaataagttaatgtatcaccatttcattcctcataagctaataattactaataatatgaggaatgagccatttcaccaatttataaaatatatgcaccatctcatctagaatggattgattcttcaaaccaaacacatccttaatccgggtgtggattgattgaatccataccccacacctaatcctatggtgtgataaatccatcatttaatctatgtatctttcaaagctagttattcttttgatacatggattccaatataaatttgtgcaatatcttcatagatttgttccatacctaatgagctatgaatagaatccatgccttacatagtttaaaaaatttctaaacctttgggttataattcatgatgtgtttaaccgaataaaaaatttgactagacttaaattattttggggcatgacttgtgacatggatttaattccaatccatgttaatccagagctatattggtacgaatgaacaaggcctaattttttttaaatactattttttaaaaagattctttaactctctaggatacatttctacctaacattaaagggagaaagatatctgtctctattgcttaggctaagtcttaccgtgagtttcatgtgcacatttctttctctgttgtttaggtcaagtctcagttggagttttatctgttgtcacataagtatgtttttgtgatgtggtaatatttttcaatacgagaaaatatgctagtttcatatagatgaaacattcataaacttaaataactataaaataaatttgtttctatattgttaaaaggaaaacgtccaaattactcctctcatctatgcatgattcacataaccccataaagtttttttagttcaatttatccctatggttcaatccatctcttaacaaaatttatctttttttatttcttttacgtacaaactgagttttcagtttaaattttattggtgagtagctaatgccataaattagtctagaaaaatatattataactaggtaaatacgcgtgcgttgcaacaggaaaaatagtgcaataataacatatatataactatgttatgctattaattaaaattaagctgtctctagaactttgtaatagtcctacacacgttcatacacgtatcctggaacacctacgcatgaagggtgaataaaagaacaaagggcattgctcaattttatagagtagtcaatccattcagttctatcaagagaataagttgggtattccataagaattcagtgtttcaccggcaacctaccttaagagccgtcaactattgcaatgtgaatgaggaaatggtagaggaattgtttggttatagtggtggcaacggaaataacttcaaggaaaaggaactcccttgtgcagatcctgtatctcaacacatttctctctagttggactcgccaagtggggcatcggggcacgacgcatgtacatggtgaaaagcataggtatacccttaggaaataacttgctccagcacatgttttcgaatgttctgttcatggaacaagtcaaataaacaatcaatacaatcaacatcgtgtaaaacgagaattcttccatctatcgatataatgagatattccataaagaggttcaaagctaactctgtacatataagagcgtcctcagttatgccttcaatatttttaaattgagaactatcttgattggtgttgacattggaacaaagaaaattgttgaagttccgtggcacttgtgcctgacgacaagcagccttaaggactcttgtaattacacccaatgattcaaatgaagctagagtatgttatgtcacgagtattcaggacacattaaatgaataataagaggaccaaaatatacttagcattctcccgtcattagtgcaactgaaataaaggaaatataaaaagtgaaattaatatggtttagtccctttcagtcaccccttgagggactagagacaaacattttagtctctgttttagtcccctgacaatttagggactaaatgagactaaaatagaggaactaatctttagttcctcaaaccaaacatgtccttaacatcaccattttgaatatccataatagtatgaataagtgtcttctatagatggaccaaagtagaaaaaattgagaataacatgtcccatacaccttcctctcgggaagttggaagtagagctggtgtcgaaataagaactcttttgaacatgcgaatcacataatattatagggtctttgcaaaaatcctgcaaaatgaattcaggaattggttcgtactttgtgcaaggtaatatactaatctattgcacataaagtattcgccattgactatagggttcagaagattaatatccgtccaataaatataaaaaaggatagacatagtacgtgctagaggttcacacttaaatggggtctagggaagggataagccgaggcaagctttccctcgcaaatatggagaggctttgaacccgtggcctggtgactcggtaagacaactctcaccactacaccaggccacctaataaatatcacatcaacattaacataaccttttagtcccaagaaagttagggtaagctagagttaaaatccaacaagatgacaccaaaaagagaaatagagagaaaggggagaggaaaagcttttgaaatcactaaaaggaaaaacaactaatcacggttcgggcacgtggatagcttctttccaagcatttctatccaaacacaactccattgggatattccattccttcaattcccttttgattgcctcctcccatgccaagtttggccgtcctctaactctcttcacattattgtcccgtcttatgatgcctctgtgcaccggtgcctctggggtctctggtggacatgctcaaaccatctgaaccggtgttgaataagcttttcttcaattggcgctactcctagccgaccgcatatgacatcgtttctcactcgatccaatcttgtgtgcctacatatccaacgcaacatacacatctctgcgaaacttagctgttggatatgtcgtctcttagtaggccaacactcagccccatataacatagcaggcctaatcgccgtcctatagaatttgcttttcaacttctgtggcactctctttcccataaaattcccgatgcttgacgccatttcatccaccctgctttgatcctatggctaacatcttcattaatatcaccatctctctgtagcatcgatcccaaataacggaaggtgtcctttggtactacctggcctctcaagcttacatctccatcctcactaattgtagtaccaaagtcacatctcatatactctgttttagtcttgctaattctaaatccgtttgactctagggtctgatactctgatgccataactctagctttctatttactccttcccgactttcatctactagaactacatcgtcagcgaaaagcatacactaagagatatctccttgtatatccctcatgacctcatctatcactaaggcagatagataagggctcaaagctgaaccttgatgtagtcctatgttaatcgggaaaaatttgtatcaccatcagttgttcagacgctagtcataaccttgtcatacatgtccttgatgagcgtaacatactttgttgggacttgaaagtcgcctagggggggggggtgaatagggcgaatctgaaatttataaacttaagcacaactacaagccgggttagcgttagaaatataaacgagtccgagagagagggcgaaaaacaaatcgtgagcaaataaagagtgagacacaaggatttattttaccgaggttcggttcttgcaaacctactccccgttgaggtggtcacaaagaccgggtctctttcaaccctttccctctctcaaacggtcacttagaccgagtgagcttctcttctcaatcaaacgggacacaaagtccccgcaaggaccaccacacaattggtgtctcttgccttggttacaattaagttgatcacaagaaagaatgagaaaaagaagcaatccaagcgcaagagctcaaatgaacacaagtcactctctcactagtcactatttgatttggaatgaactaaggacttgggagaggatttgatctctttggtgtgtcttgtattgaatgctatagctcttgtaaggtgtgagaagttggaaaacttggatgcactgaatggtgggtggttgggggtatttataaccccaaccaccaaactagccgtttggtgaaggctgctgtcgcatggcgcaccggacagtccggtgcgccaccggacactatccggtgcgcctgccacgtcacctggccgttggattccgaccgttggagcttctgtcttctggtgcaccggacagtccggtggtgcaccggacaggcactgtttactgtccggtgcgccatcagtctctgctctgactctggcgcgcactgtagcgcattcaatgcgttctgcagacaactgttggcacgaagtagctgttgctctgctggcacaccgaacagtccggtgcgtcaccagacactgtccggtgctacactggacactgtccggtgctacaccagacagtccggtgaattatagcggagcggcctccagaatttccgaaggtgagcaattcggagttggagtccctggtgcaccggacattgtccggtgcgccagaccagggcacacttcggctgacttttgctctctttatttgaatcatttttcggtctttttattggttagttgtgaacctttggcacctgtagaactcataatctagagcaaactagttagtccaattatttgtgttgggcaattcaaccaccaaaatcaattaggaaaaggtgtaagcctatttccctttcaatctccccctttttggtgattgatgccaacacaaaccaaagcaaatatagaagtgcataattgaactagtttgcataatgtaagtgcaaaggatactaagaattgaaccaataatttctcataagatgcacatggattgatttctttatttttaacattttggaccacgcttgcaccacatgttttgtttttgcaaattcttttgtaaattcttttcaaagtccttttgcaaatagtcaaaggtaaatgaataagattgtgagaagcattttcaagatttgaaattttctccccctgtttcaaatgcttttcctttgactaaacaaaactcgccctcaataaaatcctactcttagtgttcaagagggttttagatattagttttgaagaggttgtaccaatttgaaattttatcaagaataagataccgattgaaaaatcatcaattgaaaaatcttttcttaactcaagtttttgaaaattggtggtggtgcggtccttttgctttgggctaatactttctccccctttggcatgaatcgccaaaaacggatacttgagtgaaatataagccctttttattttctctccctatggtaaatagcataagagtgaagattataccaaagttggagagttgcgtggagcgatggcaaaggttgaataatttgatggagtggagtggaagcctttgtcttcgccgaagactctaattccctttcaatctatgacttggtttgaaatacacttgaaaacacattagtcatagcatataaaagagatacgatcaaaggtatattaatgagctatgtgtgcaaaacattaaaagaaattccgagaatcaagaatatttagctcatgcctaagtttgttaaatgtttgttcatctagtggcttggtaaagatatcagctaattgttctttggagttaatatatgcaatctcgatatcccccttttgttggtgatcccttagaaaatgataccgaatgactatgtgtgtagtgcggctatgctcaacgggattatccgccatgcggattgcactctcattatcacatagaagaggaactttggttaatttgtaaccatagtcactaaagggtttgcctcatccaaagcaattgcgcgcaacaatgacctgcgacaatatactcggcttcagcggtagaaagagctacagaattttgcttctttgaagcccgagacagacagagtccttacccaagaactggcaagtccccgatgtgctctttctattaattttacaccctgcccaatcggcatccaaataaccaattaaatcaaatgtggaaccctgagggtaccaaagcccaaacttaggagtataaactaaatatctcaagatttgttttacggccctaaggtgagcttccttaggatcgacttggatcttgcacacatgcatacggaaagcataatgtccggtcgagatgcacataagtaaagtaaagaatctatcatcgaccggtataccttttgatctacggatttacctcccgtgtcgaggtcgagatgcccattggttcccatgggtgtcttgatgggcttggcatccttcatcccaaacttgtttagaatgtcttgaatatacttcgtttgactaatgaaggtgccctcttgggagttgcttcacttgaaatcccaagaagtacttcaactcccccatcacagacatctcgaatttttgtgtcatgatcctactaaactcttcacatgtagattcattagtagtcccaaatatgatattatcaacataaatttggcatacaaacaaatcattttcaagtgttttagtaaagagtgtaggatcggcttttccgactttgaagccattagtgataagaaaatctcttaggcattcataccatgctcttggggcttgtttgagcccataaagcgccttacagagtttatatacatagttagggtactcactatcttcaaagctagaaggttgctctacatagacctcctccttgattggtccattgaggaaggcacttttcacgtccatttggtaaagcttaaagccatgataagtagcataggcaagtaaaatgcgaattgattcaagcctagctacgggtgcataggtttcaccgaaatccaaaccttcgacttgtgaatatcccttggccataagtcgggctttgttcctt

SEQ ID NO: 39766 - DNA, 2126 bp, Zea Mays
gagaaatctcaatccaaagagagccttctccaccgctcttgctcgtccaaccttctccatcgtctcaccttaggtttcgctccccgccgccgccgccatgatgccgcagcagcagcagcccggcatggcccctcctcctccacaggccgcccccggagcgccgccacactggggcggcatcccgccgcctatggcccctcagcatcagtacgcgccgcagatgtggggccaggcgcccccgcccccgcccccgcctcaggccgcgtacggtcaggcgcccccgccgccccaggccgcgtatggccaggcgctcccaccaccccaggccgcgtacggccaggcgcctcccccgccacaggccgcctactacggggcggtacccgcgcccgcggcggtggccgcggcacctgtcgggcccagcgaggtcaggacgctctggatcggggatctgcagtactggatggacgataactacatctacgggtgcttcgcatccacgggggaggtgcaaaatgtgaagctaattcgtgacaagcatactggacaacttcagggctatggttttattgaattcataagccgcgctgctgctgaaagagttcttcagacttacaacgggacaatgatgccaaatgttgagttgccattccggttgaattgggctagtgctggtgaaaaacgtgatgacacccccgactatacaatatttgttggtgatttggctgctgatgttacagactatgtattacaagagacatttagggcacattacccttctgtgaagggtgcaaaagttgtaacagacaagctgacaatgcgcacaaagggttatggttttgtgaagtttggtgatcctaatgagcaagctcgtgcaatgactgagatgaatggcatgctatgttcttctaggcctatgcgtattgggcctgctgcaaacaagaaagctactgttgttcaggagaaaggataccaacaggctcttcatataggacttgagctgcgatgcgtgtcttgtgtaatgcatgacctctgttagtaccaagtgctcagggagttcagtctgacaatgatcctaacaatacaaccatttttgttggtggtcttgaccccaatgtcactgaagatatgttgaaacaagttttcaccccttatggggacgtagtccatgttaagattcctgttggcaaaagatgtggttttgttcaatatgctaacagatcttcggcagaggaggcattggtaattctgcaaggcaccttggttggagggcagaatgtgaggctttcatggggtcgcagcccttcaaacaaacaagttcaggactccaaccagtgggccggggctaatgctggatattatggctacggtcaaggctatgaggcctatgggtacccccagtctcaggaccctaatatgtataattatggagctggagcttatgctggctatccaaattaccaacaacaaccagtagcacagcaaccgccgcagcaacagtgagaggtccagtgacgctactgtcatttgggtgattgacgtggaaatatttatgagttgtaagatgagcttcggatgcaagctggattaggtatacagacatgattttcgtagtactcagattctgagttgccctcgtatcagagcttgtggtcccaatagcctgcagctgcagctaaaacgatctattttggtagcggaatgttttatctgcttattttgtaccgtgtcttccgctactgcggcggagccttgataacttgctatgttggatttttcccgagtgttatcgcatgaatgttgtcatttgccttggtgccatgttggtgttggcaaacgagcgagcagaacctgcagatcgagcagtacctgagcaccattttaacatggtttaacctttttagctggctcttgttaggattggtacattttcactgagtagggcacctagccgaaccgctcggttttcggtgttggcattttgagaagttcggtcatccgtgtcggctttctgttttgttaggtttgtatcgtagatagtactatacgtagaggtgtttgaaatagtgatgagataagaaatgagataaaagagttgttggatacagtcttacatcgtacatcgaatc

SEQ ID NO: 39767 - DNA, 2648 bp, Zea Mays
cgaccatcccactggctgtaccgtttcggcttctttctgctcttcccgagcgtgaaaggaaaccgagaccaccatacccccccgctccgctgctccggaaccctcgccgtgaggtcaccgccgatggccggggactcgtccccttccccggcctccgcacctgtccaggtgcgctgcgctggttgccgtagcatcctcgctgtcggcctcggtgtaactgaattcatctgccccaagtgccgcatggcgcagcgcctcccgccacagctcatggccaagtccacctcgccctcgtcgcctctgcccaaagccccctcgaagccttctctgcctcctacgcagccccggatgggtgcgccgtcggctcagggggtggaccccacgaagatccagctcccctgtgcgggctgccaggccgtcctcaacgtgccccacggtctcgcccgcttccgctgtccgcagtgtggcgtcgaccttgccgtggaccacgccaagctacaaaacttcctcgccgcctccaacagcgccacgtcatcaggccatgccccgacctcggtgaggacgcagccgcctctggcgacattcctctccgtgttgccgctgcagctagtgcctggtgcaacaatttccatggtgctgcctgccgctgaaccacatgaggagatcaatgaggttgccattgatgttgagcgtgatgaagatgaaggtggcactgttggagaaacttttactgactataggccttccaagctatcacttggtctatctcatccagatccagttgtagaaacttcttctctgtcagctgtacaacctcctgaaccaacttactgcttgaatatcatggacgaattagatgagacaaatgcattgtcttgtttgcaaattgaaacaatagtttatgcttgtcagaggcatcttcatcatctccctactggccatagagcaggttttttcattggtgatggggctggcgttggtaagggccgaacaattgctgggttaatctgggaaaattggcagcagggaaggcataaagcagtgtgggtatctgttggttctgacttaaagtatgatgctcgaagagatttggatgatgttggtgctaagtgtgtccaagtgcaccctttaaataagttaccttattctaagctagattcgaaggccattggaattaagaatggagtaatttttgtaacttatagtagcctaatagcatcgtctgagagaggccgctcccgtttgcagcaattggttcaatggtgtgggcaagagtttgatggtcttcttgtatttgatgagtgccacaaggccaaaaatctgattcctgatgccggaagccagcccactcgcactggtaaaacagttcttgagatccaggaaaagttgcacgaggctcgggttgtttactgttcagcaactggtgcatcagaaccacgaaatttgggctatatggttcgtcttggactttggggtgaaggaacatcatttcaaacttttccacaatttttaggtgctcttgagaaaggtggtgtgggagcacttgaacttgttgccatggacatgaaagctaggggtatgtatgtatgccgtacattaagttacaaaggggctgatttttatatagtggaggctccacttgaggaaagaatgatgaacatgtacagaagagcagctgaattctgggctgaactgcgccttgaacttttatcagcaagtgaattatttgctgatggcaattcaaatcaaatatggcgattgtattgggccagccatcaggcacatgtgcatgtctgcaaaggtacctgctgttgtgaggttagctaaagaggccttggcagagaacaaatgtgtggtgattggccttcagagcactggagaagctagaactgaagaagctgtcacaaaatatggagttgaaatggaagactttgtttctggccctcgggagcttcttcttaagttggtagaagaaaactaccctttacctccaaaacctgattcttttcagcaaggtgaagaaacagtcacagagattcagcgtaaacgtgcactggatgtatcatttaaagggcgagttaggaaagtagcgaaagtggtagatgtgagcgatgacgacaccgatgattattctccatctgagtcagatcatgaatcaacagaatctgatgaggagttccacatgtgtcaaatttgcaacacagaggaggagcagagcctgttgcttcattgttctggttgttctcggcatgttcaccctcattgtctaacaccaccatggactgggacgattacggatgattgggcatgctacacgtgcaagatagtagaagacgaggaaaagaagcaagatgcccatgtagctgattgtttaaagagaatttcactcctcatgtctatgaagagaataccatgctctggtggaaaagatgtagtgatcagttgcatggaattgccagaaaaggactaaactcgcttatcagtctcagcctctggatattgtggaaacactgaaacgtctgtgtttttgacggccttgctccctgccttaatgaagccatcaagagaactgacgaggaaagggacctgtgggtgttaggaggggctacaaacttagatctcttaacagccccatcccaggtcttagg

SEQ ID NO: 39768 - DNA, 1919 bp, Zea Mays
gtgagtttggtgatcggatagccaccgctgcatttgacctgacaacatcactctggactacgaggagaggagcttccatggcacgccacagaacagcttccacaaggcggtcaacctgcctgatgtcgtcgtgttcccgagctcgcaagatgaggtacaaaggattgtgatggcctgtaacaagcacaaggttccaattgtaccatatggtggggctacctcaatagagggtcacacactggcacctcatggtggtgtttgcatcgacatgaccttgatgaagaaaataaaatccctgaatgttgaggatatggacgtagttgttgaacctggagttggatggatagagctgaacgaatacctgaagccctatggcctattttttcctcttgatccagggcctggggccaccattggaggaatgtgtgctactcgttgttctggttcattagctgtgagtttgtaggtatggaacaatgcgggataatgtgattaatcttcgggctgttttgccaaatggtgatgttgtcaagacaggctcccgggctcgaaagagtgcagctgggtatgaccttgctcgtttgatcattgggagtgaaggaactttgggtgtaattacagaagtgactttacgactccaaaagcttccatctcattctgtagttgcaatgtgcaatttcaaaacaattaaggatgctgctgatgttgctattgcaacaatgctttctgggatacaggtttcaagagtggaattgttggacgaggttcagataaaggcaataaatatggcaaatggcaaaaatttgcctgaagtgccgaccttgatgtttgaattcatagggacagaagcatatgctctggaacaaactctcttggttcaaaaaattgccactgaacaccatggatcagattttgtttttgtcgaggagccagatgctaaagcggaactatggaagatcaggaaggaggcactttgggctggttttgctatgaaacctgatcatgaagctatgataacggatgtttgtgtccctctatccagacttgctgaatgcatatctacatcaaagcgattgcttgatgcgtcgccattgacttgtctggttattgctcatgctggtgatggaaattttcacacaattatcctgtttgatccaagccaagaggaccaacgaaaggaagcagagagactaaaccatttcatggtccatacagctctgtctatggaaggtacatgcacaggagagcatggtgttggcacagggaaaatgaagtacctggagaaggagttgggcatcgagtcactcaggacgatgaaaagaataaaggcggcgctggatcccaacaacatcatgaatccgggaaagctgatcccgcctcacgtctgcatatgaccgtcacctgactggaggatcgatccccccatggccatcagtgggcttgttggctcactcatcaaaagctttggttccgcgaggcgtgacgcggtgctctgctgacagttgcaataatgcgctgaactgctctgtgcctgtatggcatgcgttggaggcaaatgcacgtaggcgtcacatcaaaactataccggtaccaaaaaaaaaaaaaaaaaactgaactgcctcagggaagggatgggaaataatggagcaaacattcgtctcctgacgccgttttaacaggagaaccctttttacgatcaagtacagcttgacggggccacctagcggtggcgagacggcagcgttctgtactacgcaccacttccgttgccggccgagtcgtcggcacggcacccaccacctcaccaggcggccgcgccacgtccttaccccacgtccccactgtcgcttccggcgatctcgtccggccccgagccgttctcctcgcaaaacgatgctacttccggatcctgattccca

SEQ ID NO: 39769 - DNA, 2378 bp, Zea Mays
aatagccaatatgttcagatgtctattcccgttcagcttgtagcagcttcctagtcctagggttagatttccaagcaccacgccacccgtacacggtttccagcagagcattccggaaggagggggcgcgatgtggcacgaggcgcggcggtcggagcggaaggtccacgacctcatggacgcggcccgccgccgggcgcagcgccgagccgtctacctcgcccgccgccgcggcgacccgcagcaggcgctccaggtctccggcacgcggtgccgcgttcaccgcgacgacgccctgtaccaggccaccgaggaccagcagggattgatacaatggaatggaaagcaagatgttttgattgacagatttgatggccgtgcattgcttgattttatccgagactcgagctctcgcccttttcgagtccaagggaaatctgaagaagaggaagagttagaggaatttgttaattttgaacgttaccgggatttgattaagcatcgtcgcagaggattttctgatgaggccggtttgcagcatgttgtgcaagagttggaggcaaaagctcttcttccttttagctttgacaaaccacaatcctcacagcctcctgctagcaaaggcgcatattcacaggttggatactcatacaagggagacggaaatgaggaatctgaagacctagacagtgatgacgacgacgaagaggaagaagttgatgatgatgacaaggacttcagtagtgatgatagcagtgatgaacgaatggaaagtatagcgaaagaatttgggataaaaagatataactggcttgtttacatggataaaaaaaacaaagaacaggagaagaggcagaaagaaattgttaaaggcgacccatctataaaaaaaatgagccgtagagaaagaaggaaggcttctcagattgagcgggaaaaggagcgggaggcagcacgttctgttggaagggtatcttatcgtgatccttatagggaacaaaggagaagcccatcatatgaagcatattcaaggggcagaagatcaagatcgagatcaagatctcgttcaccatcccattctaggcgtcatggccgtgggatacatgctgaaagcaattattggagcaagcaaaaggctcctagggttgaatatattactgaatttggaggttccgatgataccagtgaaccaaaagtttcagggatctctccgccttcgtctccaatacgaattgacatacctaaccggtcgggaaactcgacttttaatatttgcaaatatacattgggcgaacttttctctgatggagcttattacctcaatcctggtgttctgaagatgactatgtcaggaataggatagatcaagacatggtcatgatggtatctatggtgtaaaaaatagttgttttgtagataggcatgcattttatggttcgttttatttttgctaagcaggaagaagatttaacacacatatatctacagtcagctgtggagtttatgacctgtgcatctttgccatgtaaattattatggctataataccccatattttgcaggttgtctggtggtcaaattcttgaggcacttcacagtgatcctgcctcttctttgtctgtggaacaggaaagaactgcaaaacttttgaaaccttcccccaggtttgtcatgatgattacaatgttatgaagagagcggctgtatgtgcatccaaggtacatcatcagcattagctaaactaagcaaggttgcttctgggggaactggtaaaactccccagactgaaaagaaagaaacaccacaagaaagacttaagaggataatgagcaaacagcttaacaagcaaattaaaaaggacacggctgctgagattgccaagaaacgagaacaggaacgacaaaggcaggaaaaacttgctgaagttggtcgatacaagcgtcgtagccgcagtagaagtcttagccgttccccaccaagaaggcggcgatatagcagaagccgtagtaggagcagaagcccaagaaggtaccgatcccgctcgctctccagttcccggtcgccctctcgctctccaaggtaccgaagcaggtcaagacactgaaaatatccaggcagccactaacaaagtgccttgccatgttgtagttaatttattttatagactttttcattcctgcagcgatgtgtactcatgagaagcctccgtttttgttttcttagtcctattatcgacagtgtgtgttccttgtgtttcagaaggtttattctctgttcctcatggcttgcccctttcaagcaagcgtaattttagggcatgtttggccagaccagcttccaggccgaatttagtagtattgccaagcagttcttttatt

SEQ ID NO: 39770 - DNA, 497 bp, Zea Mays
atctcggaggatggatcatggatggacggatggatcagcaccgggagggaggagaaggaggagggataacgacggacggcccggggaggcctccgaggagaatggaacgccgtgcacgtaggcacgccgccgtggatcgagaaatgcccaaacggggacaccatcatttggtcgtccaaggcaggcgaaggcgaggacggggagggagcgcgccgtgcaggtgctgtgctgggtggttgccgcggccatgcatggttgcctggttggggcgacgagacgagacggcctcgacgtgtggtggtggcctccgactccgacgcgagccagggccagggcgccaggctacgtggagttgaagccagggccacagggaagagaagaaagctcacgggttcctccttgttttacattactggtaacgcacgatacggatctgccactcatgtgggtggcagtaatgcgtgctgccaaaaaagcaacaggacacgccatctgca

SEQ ID NO: 39771 - DNA, 1384 bp, Zea Mays
tatagctctgctcttgttcaagttgagaacagatcgttctcagtcttcttggcctatatttgacgcaaacttcaggcgcatcgttgtggacctataggcggatccctccgccgcgagctccgtatagacaggtccgcataatggatctctcttcttcttccacatttttcattttgcttggagccaatggcggtgagagcagcgagatcttcccgggcgggtggttctcgtctcgatctgatgcggcccctacgatccacacagacctcattttgatgagatgaggactagcggcgcttcttggcagttcgcttgggaatgagacaaatctttgtttgttcagttgctactactgtccctgcttgtgtgctgagaatgtttgggatttgatctgtccccttcttgtggccactgataaactaaaattggatcgaaaatatgcactgagattttgtcttcaccaacacataatgaaatagctagggaattttgtttaacattggtttggtttaaactttgcacggtttggcccacaacaaatgccatgggttttctatttgcccagagaaaacttccagcgcacaagtactcttggtttctgctttgcttccaatcagaactgcagtgtttgagacgacagtaccataatttcaactaaaatgtacatcttcaatcttctttgcaaggctatatataaacacatgtaccatcatatatagattcggttggtggttgcatccaaagtagcacttctcatcctatgagtagtattcccgtgtacaaccaacaggattggttcacctgggaaattatctcgagacaattaagaattgtgttgcactatagttattacatatgttgctttaaaattacaagcttcttttgcagtgtataggctttgtttaagtgaactaaaaataacttgaaaggaattaacacaaccagagaaacgatttgttcagtagcaatgccttttcagttatgatattgtttcagctatattgaactatattcaacaggcaactacaaagtagtgaacttatcaggtgctaatccatcccttgttcatttctttgcctaaccgtattcaaatttattaataaacttgtaatcacgtcatttgggtactccacagaagacaattgcttttggcgtgccagcgttgatgcacataaggaagaaagtaggaggaaagcagggaagtaagctaatgagtactgttttttatttataatatttaagcaagtcattttaaagtattgtcctaaatactgatgtgttctcttccagtattgatgttatctgtcttcttggcctatatttgacgcaaacttcagttctcacagaaacaaatgtgtccatgtactatcttgtgcggatttcg

SEQ ID NO: 39772 - DNA, 1346 bp, Zea Mays
cccccccccccaaccccccaaaaaaaaatccggtcgatcctagctcgcgatgttctccggcaccggaccctccggcggggcagcccactctacgtccaccggtggtgggggtggctcgccttccgacaggggcggccccgcgccctcggcctcggcgtcggtctccacgccagccagcgagagcaccgtcgcccgccgcctaaacggacttgacccccacggcgacgacgctccatcgtcgcagccagccacgagcaagaagaaaaagagaggggcacgagcagttggtcctgacaaaaatggccgtggattgcgtcaatttagcatgagagtatgtgagaaagtcgaaagcaaagggagaacaacctacaatgaggtggcagacgaactggttgctgagttttcagatcccaatattaatattgactctccagatcctgataattcgtctgcgcaacaatatgatgagaaaaatatccgaagaagagtttatgatgcgctgaatgtcctaatggctatggaaattatatctaaagataaaaaggaaatacagtggagaggtctgcccaagacaagtatgaatgatattgaagaactgaagacagaggtcaatggactgaaaggtcggattgacaagaaaaatgcatatctgcaggatttacaagatcaaacacgtcctcatgcaactgtagaagtggagatatcagaagatatgcagcacgtgcattttgatttcaatagcactccatttgagttgcaggatgattcatttgtactgaaagcaatggcattatctggcgaagaagctgattgtacccaagctcctggtgcgaatggaggcgagtgctcaagtacacggaacaattattggcaccaccaccaacaaccgcagcctccagggccaagagtagttagggtaccaaactcgcctcctattccagggatactaaaagggcgtgtcaagcatgaacactaggcttcaatatgcttagtggtgtcaaatgagctatttactttattgtccccagctagttttacctgtagaaaatgcatgtaaattatgcctgtaggggcagccgcagtctaatttgacttcgctgatggatagttcgatttgtgtcatgatatgccatacgcctagctcacgttaactcctagtattcagttgtttggtcgaggaaaagagtctgtggttaagtgtaattgtgtagtttatcttcaaacagtcggcatatcgtatctatgggacgatttgaggaacagtgttgtcagtacactccaattgatatacaataaaatgcaaatgtttgtttacagttcggttggtttctgatggcaatggcaca

SEQ ID NO: 39773 - DNA, 1486 bp, Zea Mays
accaaaattaaagacggcaactctgcctgcacagcattgaccgccgccttcgctcctccacctccccgctcgctctcctgcctccgcgcgggccgcggatcccttcactcgccacagcaagcgctagaagagggaatggagcccggcctcgcatcccgcgtcgcccgttcagccgctcagccgctttccggctgcctgtcgcggcactcgctctcgccgtggctcaagatccagaaccacatttatcctatgccaagtctctgtcacaaggttcctagcacgggaaaatgccacgcttctatgacaacaagttacatcagggaaacatcagatgtcactgatttggactgggaaaaccttggctttggcctcatcgagactgactttatgtatgttgcaaaatgtggaactgatggaatcttttccaaaggtgaagtcctaccatttggtcctatagcactgagtccttcagctggagtcttaaattatgggcagggattgtttgaaggcctaaaagcatataggaaaactgatgggtccatccttctatttcgtccagaggagaatgctataaggatgctaagcggtgcagagaggatgtgtatgcctgctccaactgttgagcaattcgttgatgctgttaaacaaactgttttggcaaataaaagatgggaaggtttatctcctattaatttgatcgttgaggataaatttcaccgtgccagccctggtggaactggaggtgtgaaaaccattggaaactatgcctcggtactgaaagcacaaaagattgcaaaggggaaaggatattctgatgtcctttatttggatgctgttcatgacaaatatctcgaagaagtctcttcctgcaatatttttgttgtgaaagacaatgttatttctacgcctgccattaaaggaacaatacttcctggtataacgaggaaaagtatcattgaagttgctcagagcaaaggtttcaaggttgaggagcgtctggtgtgtgtagatgagttgattaacgctgatgaagttttctgcacggggactgctgttgtggtgtcacctgtggggagtgttacatatatggggaaaagggtggaatatggcaaccaaggagtcggtgtcgtgtctcagcaactatacaagtcacttacaagcctccagatgggcaatgtggaggactggatgggttggaccatgcaacttaatcagtagcggatcacagatattgccttggcagatcccagattattacagctactgggtgcgatagggttttttttggcagatccatcttgagcatatttgactgtacctgtttcccttgagactaagacgaaagtgatcttactgatcttttgtttcaaatctgtaacgataaaataaaatgtggtttgcaccttgccatgtactgtaagaatggacccaaaaaaaaattcatgctgctgttgcttgatatctgaaactgtttatttgctgcagc

SEQ ID NO: 39774 - DNA, 2833 bp, Zea Mays
gcctattgccttgcctgccccttccatcctccttccccacccctccttccatcctcgcccgcgcgctccacacgtccccgccgtcgcgctcgccttccatcctcctccccaccccctccttccatcctcgctcgcgcgctccgcatgtccccgccgtcgcgctcgcctccctcctctttgttgcctccgcgtcggcctccaccccgctctccgacacgcttgccgtcgtcttggatttctggtgcactctcttctctacgacgcgagcaagggcggcgcttgccatggcatcgacgggaaccaggcatcactctccctatctcttgggtacgcgtttatttcatctctagggtctagagtttagtagcaccgccgccaacatccccgccgttgcgacaagcaccgaccgctcgcttccccctccctcctctcgtcggcgccaacgagccgcatgccgtgtgtcgtgtgggtcggctacccgggtatcggcgccagcgagccctcgccccccatccccctgccaatctcggcgtcggcgcgccgctcgccatccccgcaggccacgcccatgcccccgcctccatagtccctgtcatcggcgacctcagatccaacaggatggtacaggcaggaggatcaggccaccgtcgaggaacgcgctcttcgctgtgttccagcgagaagatgagggatcgagggcggcgcaggtggcgagctcgtgggcggaacagactggtgagagcaagaggatggatcaggagcttgagccccaggaggggagctgtttgagcggatgcccaccaggaacaatgtttcctagatcacgatgtttgggccacttttggaagaggtcagggatgacatgttttcaagcttggaggacatcaccaacgcaccatatgcagatctgctctctattaattcaatgaggaaaggaaaggggtcatagaaattagtcttggcagatggaggggaacgtctcaatgactgaggcacatttttactaaattatccctaaattatttgtatttttaaaataacatgtaatcttgttgatctggtttactcaagatgcatcaagtttgtacttggagaagaatcctggagttattttacttgtttccttgatttgtagagacatgccagtgaggagcagtttagtcggttcttgctttatgaagtggatgcaattagaaagacgtacgagcgggccaacatctcgcggtggctcgccttgggcaaccggacctgcccgaccacgatgcaggagctctaggacgacgccctcacccccaacgccactctccgacaactcatcgccgcctgtttatcttagatattgtttgaacgtatgggatgttggaggacagaagacaatcatgtcttactggagaaattactttgagcagactaatgggttagtttggtttgctgatagttcagacataaggaggcttgatgattgccgtgctgaactccacaatctcttgaaagaagaggataaaggtttacctatctaggcagtgttctattgttgatttttgcaaataagcaagacatgcaaggagctctaaaaccaactggaatcgcgaagattttacttagttcgatgtgggagcaaaaggatatgccaaattgaatgtagtttcatcagttatgctctattatggatgttcagaggcatccaatttcagtgtgtactgcaatacttgggtccacctagtcactctccgacagctcatcgccgcttggttctcctgtcggtacacaaggtttaagaagcgctacgcggacttccacggccgcgctgccgatctcgtccacggcctccggggcacggcgatgcccaggagacaggccctcgaggaagagcaatgtacagaagagaaaggtatctcgactattccaaagcacaagtatgcatccaaagcctgttccccaaaaggaacctttatctgcagctctctctgcgcttactcttgttgtgcaatttaatgggtggctatcatttttcctcttgctttattataaacttcctctgcggccagaaactcacaagacatactatgaatacactggcttgtggcacatctatgggctccttgccatgaattcatggttctggagtgccatatatcacagttgtgacacaatttggacagaaaaagctatatttttcatcagatgctgcctttctagggtattccctcattttgacgatagttgattaatcattctggaacttgtactaacaattgaagcaagtggaggcatagcaccaattgtgtctgtgctgcagctctggatgtcagtagacaagaggtgtatcagagagaagcacttcaaggttaatttgttgagcaaattggagatgctggattttgtattttggttgctcatgggtggtgaatgatctgacgacttcagaagaggatagatctgagattacctttcatgcatgtcaaggaagttaagtagctgatgccatcaaagcaatggagaaacgtcaggtgaaccgcgagcagaattctgtggcgcatttgttagcgcagttagttaggactctgttcatacaactgttcgattaagccaaatacctaatttagttttatattggttgttgtcaaagaatttgtgaaatattgaggttgataatatatgtggcgttcgtttttatgtaatcattgttcactaatattttgtcgaatattttatattatatagacattactaagaacgtaaggggtcgctcgtgctctgtaaaggtacaaacaatcatgattgtggaggagcgtgacggcgagggtcgattggcgtccgaccacgatttgca

SEQ ID NO: 39775 - DNA, 4736 bp, Zea Mays
cactaagtgttacccaaatcgtcagagtgagggggaggcggagggtgaatgtgaacttccggatgtctccaattgcttctgatcctgtccactccattaccaagaatagcactccatgtatcttggagtagagggaggaggagggagctcagccagtcatctatggattggtgccccaaacaacaagaccggccgagagggaagagcggaggccggaggggtcagctcttgcacttgtcaggggaggctagtctaggctaggggatctctgattgcctcctatcctctcctagccctgccctgccgcagcgcaacgactccgaaatctgaatcgccgcctccctccgccattcgcgtcagtgacatctattccttcaattcattcagtcaggcgacagcccatgcccttcacacaatcaaaatcgaatgttggttacacaactggaaaaataacgcacaccccgcaacatactagggagtaagaacgacagcgcattgccaggatagaaatcgtcctgatgttcttcgtaagtctggcatttagaccaggctgacaatgtcagcttccgagttcaggattccataccagcaagtttcaccttcgcagcctgctgagaatgtaaatcagtttaagacctgtcgatgtggggagggagacccgaactccacttctgaaactggtgacagtccaccggcctcttgtcctaattgccaggtccttaagagtggacatttactactttcatctaaaggaattggatggacatcatggaaaaagcgctggtttgttcttacgagggcatccctagtgttcttcagaagcgaccctaatgtgccgccacccagaggagctgaaccaattgttacacttggtggaattgacttgaataattctggaagtgtcgtcatcaaagaagaaaggaaacttttgacagtgttctttcctgatggccatggtgaacgaactttcactctgaaggcagaaaccacaggagatctaaatgagtggagaaatgcactggagagtgctatagctcaggcacccagcatagcaaatacaatggggcaaaatccaatattcagcactgatgtagaagcagaatctgctgaatctccagctgaacattcggaggaccgttctgttattggcagacctgcaaaatttgcacttgtagatgctgatggtagtccatcattcttggagaaggccctgaagttcattgaagatcatgggaaaaacgagttctctccagaagaggatgctcatgttattggtgactgtattaagtatgttcttcgagagatgccatcatctccagttcctgcatcatgttgcactgctctggttaaagcataccgaagtgacaaggcaagaagacttgatgagattaatagagtgataaatgaagttttcccagaaccaaatcgacaattgttgcagaggactcggaagaaggttcctgttcttcagatgcttatacggagtctgaggatgatgttgacaaggaatattccacagataatgacacccatgatgacgatggttcttatgattctggtgaagatgacattgaagaagatttggactactctgatgacagtgaacatgacagtaagatcaacgctaatatcaaggatggcaaggttaaaaacaatatctcagaaactgcagaagttgcacaggcagaggatacctctcctatggatatcaatagtcaatccaaccagaagcaagaatcatgtggaccgaatggatccaaagatcgtatactaagatcaacttctcgttcatcatcttccagagaaaaaactatggagaaatcatgcagttcagcacacaagggcaaaagaaccttatggggccgtacttcagcaagaaaagacctgtcaacagaggagattgaatgctgcagcgatgatgaggcccttgttgagaaacttgagagtaacaagattgatctccaatcaaaaattgcaaaggaggccaaagaaaatgcaatcctatggtcaagtctagaaaaacggaaagaagaactacatgagcgtcgtttagcacttgaaaaagaagttgaaaatttgagggaccagctgaagagggtgatgaatttgcgaagggggcaggtgtcctcgccttcaacaatagacagcaaggtcaggggccagcagctgtgctgtgaatcatgcaaccaacgtctcctaaatacagacaggcttagcggacctgaaagctcatcagtggaagcgtcaccgactgttgggagtgatcctgcatttgacatgggtgatatcgagcaatcaaggaagcaagccgcacagcattcgccttcttcaagagacaagccaagtcacgaggcggtcgggggcatcacccagagggctcctcaaagagggcattcgattgccagggagggccaagatgggtcgtcgtcgttgtcatcctctaattcgaagtggaatcttgcgcagaaacaatattcaaatagcccattgataagagggcttcatgtatccagcagactagaggatttcggtggaagcatatcaccagcagcgtcatcggcattagccaagctgacgaaccggctcaacttcctgaaagaacggagggcgctgctggcaagcgagatgcagagcttggatttgggtcggcccccaacagtgaagtccccaacaccaaaaggccatgaaagcaagaatagttgatgttagtctgttcctgtcgtgctcttctgaatgctagatagccttatgattaaaaccagcagtgtagtttgtgtgcatcccgttctcatccatgtagtgctgtctgtacatgtttccacaaaattctgctgcttcaaacttgcagatacatatagatacagattgaacgtgtcagctgctagtaggctgctttgttgaacacactacacaccaagcactagctgttctcattgctgaatggatcgtggctcaaagcactcttcactgatatacatagagagatggatctagtgatctggacatggtgacacattctaaagctcaaaatggctgtctgtccacataaaaacatggataacattgaaggtacaacaaagtgcagagatagctccctccagcattccaactaggataatagggagtctcaacaaagtgcagagttgtctcaggtctaaacttctcctagacgatagactagtagatatgctgctgctactgatctttcatcgggattcaggcatgatgatcctgacggccttgttcgcagtagccctattctcatcggagatggctccacattctgggagatcaaacttcctgtggctcagtaattctgcttccctggtggctcatggcttcaagctcctctagcatagatttctttgcggtccttaccatggattgaggggcaagcaccaaagatggccagagtccgaggctaatgtgatattatgatttatgcatctacagaaagagcaggtagcatgatttatgcatcatgccaaccaccattcactttcactggttatatggaacccagggataaaatgagatacaagcaggcttttatgaacgaaacagtttagtctgttggcaagtacatgtttagtacaaaagaaggatcagaaggaagttgaggaagaaacagttcgactgattaacatatattctttgtttttctcttgaatatgcaggagagttaaggacaaagaaagttgtgtatcattatattaaaaaaagaagaaagaacaagagcccatacaaacgaacacccactcaactcagaacatacaatgcgcctttaaaaaaacgaccaagaatcaactaggtcctcctgatatcaaacttcctctagaaccatgctgcggccaatctccagagtatgagctcctcaccggctagggacatagctcggtcgatggaaagggagaaaccatcaaacacacacctttttcgattggttccaaagaatccatacccctagaacaactagagaattaaggcattttctaacaggggcatgtgctgcagccagagttctttctcaccatgccaccactcatcaaaattttcttcccctagttttggacttaggttatgcagcctgactttttgtaaaagtctaaaccaaaatactcgagcaaagatgcaggagagaaacaagtgattaatagtttcctcagcttgatcacaaagtgggcacattggtgggtgcaggagtccacactttgcaagccgatgagctgtccaacacctatttctcacgacaagccacataaaaagcgacatttttcaggggcaatgcattccaaattctttcccaaaatctaaaggccacaatcctagaatataggttcttatagctagactttgtagattatttcctgtctggtgaaataaagagactaatatcattgattgtgccattgataaaaaggccaaatcacttgccttggctggtagcgaaataaatatgaagcattatttgaaagaaagacttgcccttttattaagagaagaggagattaagtggtatgaaagagcgaaggttaataacctattacaaggtgacaataatactcgcttttcccatctagttgccaatggtaaacaccgcaacaacacatcttcaaattagaacaggaagggtgagttttcatgggagatgataatttaaaggcatatataaagggttgtttggaccaccagagaataccaatataaccttggtggaagattatattgaagatatc

SEQ ID NO: 39776 - DNA, 3594 bp, Zea Mays
tggagtcgggcaaaggtcctgtggtcgcggacgattaagcgatttgctcgctgcagccaggcgtgcaagggtcgttgctcgcaaagccgccttcgttgctagtgcgacggctttggagatgattgttcaagctgagaaggcgaacaccgaggctgccaagaaagctcctagacctctgcgtcgtgatgcatatttcttatatcagtgatggctaatgggtcgtaggaggagcagaaatatttatgtctccaatgatcctgtggcggtggaccaaatgtactgctgaatgcttcaggcgcaggaagccttttcactgtgaagttgcttgcccctactctaagatcgccgcttctgttcagtgtgatgactcaagtggtgatgaaaagctgaactttgctcctgataatgagcctatccagaaatggcaccggtctttgagctctgacagtgttgtgcagacactccgctgtttaaggaggaaacctgcagttgcattcacctactttaaagatacacatagccttggttttcaccatgacttctcaacctactcagagatcatacaaattttgtcccattcattccaggggaagatgctggtatccttgtttcgtgagattctcttgggaactggtagtggtggccctgaaatcttaccgctcattgatcacttgagaaaaacatgtgccacttctcacgtactctcgtatgcagtcaattgcttaatcaaggcatacaccacctgccacgatgcacaagaaacagtagagatgttttgttgcctttgcaggcttggatttgttccaacactttgggctcgcaactttctgctcaaatttgtatctcagagcagtggtgattcacatatggttgtcgcagcttatgatcgaatgaagtgctttcagttgacactggatgctcaatcattgaacatagtcactagatcactttttcaagcaaacaaggcagacgaagcattccaaatgtaggtcgggatgattgaaatgggagtgaaattagatgtacatggattctcatcatttataattggcctttgtgattgtggaaagtttgatctagcttataacatggtaagaagatatgctgttctacaagagatatcccaagagagggttccaattgaagccatggcttataatatggtaatcgatggactatgcaaagaaatgaaactgaaggaggctgaaaaggtcttggagatcaagaccagacatggatctgcccctgatctatatagctatagctatctcattcatagtcattgcaaaatgggtaacctagagaaggcatggtatcatgttgaagacatggtatcccatggcattgagataaattgttacattgttgcttaccttctacagtgcctcaggaagttaggcatggtatctgaagtaattgtgcacttccagaaatttagagatttaggggtccatcttgatggcgtgctttataacattgctatggatgcttattgcaagcttgggaacatgaatgaggcagttaagctactgaatgaaatgatggctggaagtttggtaccagacaaaatccactatacatgcctgatcaatggttattgtctgaaaggagaaacagaaaatgcctggcaagtatttgaggagatgctgaaggcaaatataaaaccagatgtagttacatataacatattggccagtggatatagcaggaatggccttgttatgaaggtatttgacattctagagcacatgatggatcaagggctcgaacctaattcactcacctatggtatagctattgctggtttttgtagaggaggcaacttgagcgaagcagaggtgctgtttaatatagtagaagaaagagggatagataatatcaatgtgctgtacggttctatggtttgtggttatttgcactcaggctggactgaccatgcttacatgctttttcttagagttgctaaacaaggaaatatggtggatcgtttgtcatgttcaaaattgataaacggactctgtagggatgaaaaggttggagaggcttcaactgtatgtaaaatgatgcttgaaaagaatgttgtccctgatgtaatttcatatagcaaacttatatcagcttattgtcagacaagagatatgcacaatgctcgcttatggttccatgatatggttgaacgaggactttctgatgttattgtatacactgtactgatgaatggttattgcaaggttggtcggttgcaagaagcatgtgaattatttgtccaaatgataaatttaggaatcaagcctgatgtagttgcatacacagtgctattggatggccacctaaaggagaccctacaacaagggtggcagggcatcgctaaggaaaggaggaccttttttcttaggacaaagcataaggtgttgctgaactctatgaaagatatggaaatcgaacctgatgtaacctgttacacagtattgattgatggacggtgcaaagcagaatatctagaggaagcacgaggattgtttgatgagatgttagcaaaaggacttatccctgatgttcacacatacacagctcttataaatggatactgtagccagggagaaatagctaaggctgaagatcttttccaagaaatgatagctaagggaatgaagccagatgtactgagcttttcagtattacataagagaaccttgagacatgaaaaggctcattaatatttatgtgtactaatggttatgttgatgaatgtcagtttgactgaaggtgaaggggcgtcctgccaacaaaagggaaggcgaacacctggattgaaagactgctctctcagttcagcattgggtcgtcaaggagaacaaaatgatggtaccttcagcgtgaggatcgatgactgtcaatggagctgtgcaaacacaatcgtggcaaagctggctgtggcactggcgcctatgccatttatgagggttttgcttgaccgttttgtggctgcaactagtggtgtgttcccagacaaccaagagctacaagacagaggtaagctctcgggttccgtcctggggcaatggggagctgttgatgatcctgagtccatgctgcaccacatccattgggcagtaatgaggtggcctgtgcctgccatgttggtatcatccaaacagtctccatgtctgcattatactgatgactggaatgagggtgtgtccaaggaggagctggactctgagatcccacctggcgaggagtcgatatacggatacataatgggaatggcagatacatgtagtctgtagaatccatcaggatttccccttgataggtctcaggtttcactctaatattgtgcattgtccctcaagatgttaatacagcaatttcttgtttagtgctcataacattactccagtctccaggcgtagtgcttggtgtagagacataaaacagataatgcagcaccagtttgtggcttcaaattccgaaacaacagctttgtggaagacagaaaagaacactagtttttggcgaactgttgattcatttcagaatccaaagattggatgacctatttcgtatttcaaaaatgacatccaaatgggc

SEQ ID NO: 39777 - DNA, 2260 bp, Zea Mays
aaatcaccaaagaaatcactccagaattttgaaaaggtgacggaaatagtgaggagcggagaacaccggaatgatccatcctcttgtgctttccctgcccttccccgctataatatcgcgccctcgtcgccatcgtcaccacaccaccactccctcactgccctctcactcccgatccctgcaccactaccgcctcctccgcttcacccctctcgtcgcctcttgcggcgaccggcggcggatcgtccgcggcgcaagcgcaaccatggggctcttcaccgtgacgaagaaggttactgtattccagcagcctcattatctgcagaactttgtccagtcaacattcaatgcccttcctgcagaccaagtaaaaggtgcaaccattgttgtctctggtgatggccgctatttctcaaaagatgctgttcagatcataacaaaaatggctgctgccaatggagtaagacgtgtttgggttggacaaaacagtctcatgtctactcctgctgtatctgctgtcatccgtgaaagaattggtgcagatggatcaaaggctactggtgccttcatcttgacagcgagccataacccaggtggtcctacggaggactttggtatcaaatacaatatgggaaatggtggacctgcccctgaatccgttaccgacaagattttctctaatacaacgacaatctctgaatacctcatctctgaagaccttccagatgttgatatttctgttgtcggtgtcaccagcttcagtggacccgaaggcccctttgatgtggatgtctttgactctagtgtaaattacataaagttaatgaagacaatttttgacttcgaagcaataaaaaagctactgacctccccaaagtttacattctgttatgatgcgctccatggtgttgctggagcttatgccaaacacatctttgtggaagagcttggtgctgatgaaagctcactgttgaattgtgtcccaaaagaggactttggaggtggtcatccggatcctaacctcacctatgcaaaagagttggttgaacggatgggtcttggaaagtcatcctcaaatgttgaacctcctgaatttggtgctgcagctgatggagatgctgaccgcaacatgattctgggtaaaagattctttgtgacaccatcggactctgttgccattatagcggccaatgctgttcaatcaattccttactttgcttctggcctgaagggagttgccaggagcatgccaacatcagctgcccttgatgttgttgcaaagaatttgaatctcaagttctttgaggtgcctactgggtggaaattttttgggaatttgatggatgctggaatgtgctcaatctgtggtgaagaaagctttggcactgggtctgaccacattcgtgagaaagatggcatctgggctgtgcttgcatggctttctattattgctttcaagaataaggacaaccttggaggagataagcttgtcactgttgaagatattgtccgtcagcattgggccacatatggtcgccattattacacacgctatgactatgagaatgtcgatgctggggctgctaaggagctgatggcaaacctagtaagcatgcagtcatcactttctgatgttaacaagttgatcaaggagatccggtctgatgtttctgaagtagttgcagctgacgagtttgagtacaaggatccagttgatggctctgtgtccaagcaccagggcatccgatacctcttcggagatggttcacgactggtgttccgtctatccggaaccggttctgttggtgccaccatccgtgtctacatcgagcaatacgagaaggattcctccaagaccggcagggattcacaggaggcccttgctccactggttgatgttgcgctcaagctctccaagatgcaagagtacactggccgctctgcccccaccgttatcacataaatttttgaagagtgatttacaatgaggaacctgggttatgattcgtcgattactgattaaccgttccctgtgtggttacgggctacggcaggggattgtgactgcttgagggttcggttagcttgtgtgctttgtaagggtgagtgtgtgtttgtgtttagagtgtgtgtttgtgttgtgtgtgttctgtttgtcctgggccataggtcctttttctctctactttaatttaatgatatgtagccctcctttgtattcggaaaaaaaaaatccacatggattgagtgagattgtgtg

SEQ ID NO: 39778 - DNA, 2072 bp, Zea Mays
cacggcgccgcgggtggcagccgtggggggcgcaccgcacgggacctcgcagtctcgctctcgcacaacggaaagtgaggagggggagagcgagagcgagagagagagagagagagaggagagagagagagagagaggagggagggagctcgagaggtcaacgagggggagctggcacgaaagctcagggctccttgctcctcctataaacccagcgcacccgccttccaggctcccattttctcgcccgggagccgcaattccatcctgctgctcgatcatactgaagcagaactcgagcggtgttgaatcgaaatggaaggcaggatgacaagtttggaagccaccatgaaagtttcctcatcgatggcaagcagcatatcaaggaatgctgaccctgaccaacagactctacgccccaattcggtggagcagttttattttccaagacctggtcaatctttgccaggcattcctccattctttgggcctccctcctccagtttgtatcttcctaatgacaatgaagctaaatttggcaatcagtttgaatcaaatccttcacagaatacagattgggatccgcaggctatagtgagcaacctaaccttccttgagcagaagatcaagcaggtaaaagatattgtgcagtctatgagtaatcgagagaaccaattagctggcggttccagtgagctagccgcaaagcagcatcttgtaactgctgatctcactagcattataatccagctcatatctactgctggttccctgctcccttcaatgaagaatccacttcttagcagcaatccagcagttaggcagcttggcaacactcttggttctcctatgggccttggcatgaatgctaatcagagaccaagtgtagacagcaagactgatattcctgacacaggaaaaacttctgattatgatgaactgatgaatagccttaatcctgcccaagatgaaagagatgagatgatcaaatgtccaaatccctgtggtggggaagggtctgaaccgactcccatggaggaccatgatgtgaaggaaagtgatgatggtggtgagggagagaatctcccccctggttcatatgtagtcttgcaattggaaaaggaggagattttagcaccacatactcatttctgcttgatctgtggtaagggtttcaagagagatgctaaccttaggatgcacatgaggggccatggagatgagtacaaaactccagctgctcttgccaaacccacaaaggattcaggtgcagatcatgcacctgttacaaggtactcatgcccatttgtgggttgcaaacggaacaaagagcacaagaagttccaacctctcaaaacaatcttgtgcgtgaagaaccactacaagcgaagccactgtgacaagagttacacctgcagccgttgcaacaccaagaagttctctgtcatcgcggacttgaagactcatgagaagcactgtggtcgtgataaatggctctgttcttgtggaacaaccttctccaggaaggacaagctttttgggcacgttgcccttttccaaggccacacacctgcgcttcccatggaagatgtgaaggtatcagaagcatcagagcaacctcaggacagtgagccgatgaatgaaatggcgaggagtaatatgtatagcttcccctgtagttcgtctgatggtatatcgaacctcgacatgaaaatggctgatgatgatcttgcagttatgggcagcagaacggagatagctgatggatgccgccatcgatgatgacgacaacagcactgccaacctttatttatgttgttgcatgatgctagcttggttcttcctctgttcaagagccatttgagattatgcctttatattttccctaaatgtacttacgtttgtggtcattaataatgatcaaggacttctagcatttcttagacccagatagccccaattttcagtatacatacgcaagtattgcttgttcattttgtctgaatcggcgtgatgcttgtagcactgacaatttatcataacaagctgctcagctattaatctggttctcc

SEQ ID NO: 39779 - DNA, 3366 bp, Zea Mays
cgaactgctggaccggagatggcctaaacatagggtttagaccgttgccgtccctactcccgcctagccgaccccactcgtcccagtcccagtcccagtccgccgcctggttccttcttgctcttccctccactctctacagacgcagattgacaaggaagagagagagaggccgaggggaggaggcgtcgtcgtcttcttctgaatgcctgaactcaacaacagttttatttggattccagatagtatggctgccaaaatggctggagctgtccaagtgctcaaggatgacactgttaaacgcacacccatggcacgacctagtaacggccgtgaaggaaagcccattaggttgctgtcgaaccacttctcagtgaagcttagaggagttgatgctgttttctaccaatacagtgtctgcatcaaatctgaggatgataaggtggttgatagcaagggtattggccgaaaggtcatagataaactattgcaaacatactgttctgagcttgatgggaaggattttgcatatgatggagagaaatgtctatttactgtgggacctcttccacagaataactttgagttcactgttatcttggaggaaacatcttcaagggctgctggtggaagtccagtgcatgaaagccctactcaagctaacaaaaagcgagtcaagcgatcacatctggcaaaaaagttcagtgtagacataagttatgccgcaaagattcctcttcagtcggttgctttggctcttcgaggaagcgagtcagaacatggtcaagatgttctgagagtccttgacgttgttttaaggcaacagcaggctaagagaggttgtctacttgttagacagtcatttttcagtgatgatagtcgaaaccttgttgatttaactggtggagttagtggttgtcgtggactccactctagtttccgtactacaattggtggtctttcactaaatatggatgtttcaaccactatggttgtaactcctggaccagttattgattttctcgtcacaaatcaaaatgtaagagacatcagagatattgactggcccagggccaagaaaatgcttaaaaatctcagagttaaagctaagcacaacaacatggagttcaagattattggccttagtgatcaaccatgctctagacagatgttcccaatgaaagttcgaaatggaaacatcgaaattaaatctgttgatatcactgttcaggattattttaaatccaagcaagttgagctaacaatgccttatctgccatgtcttgatgtgggaaaaccaaaacgccctaattatctcccaattgagttatgccacatggtatcacttcaacgttatacaaaggcactgtcttctcaacaaagggcaatgttggttgaaaagtcacgacagaaacctcaagaaagaatgcgagttgttacagatgctgtaaaaagtaatatgtatgatgatgatccaatcttatcttcatgtggtattgaaattgagaaacaacttactcgtgttgacgctcgtgttctctctgcaccagcgctagttgtgggcaacagtgaagattgcatcccaaacaggggtaggtggaactacaataataagaggctattcgatccagtcaagattgagcgttgggccattgttaatttctctgctcgttgtgacatgagccgaatctcaagagaactgataaactgtggacgcagcaaaggcattttcattgaatgtcctcacagtttggtggatgaggacagccagtctaggagatgttcacctgtggaaagggttgaaaagatgtttgaaaaagtcaaagcaagccttcctggtcctccagagtttctcctttgtcttttaccagagaggaagaattgtgatatttacgggccatggaagaagaaaaatcttcatgaaatgggtattgtcactcaatgcattgctccaagtaataagatgaatgatcaatatttcaccaatgttcttctaaaaattaatgctaagcttggtggaatgaactccaaactggcactggaacatcgtcaaatgataccagttgtgactcaaataccaacattaattcttggcatggatgtttcacatggttctccaggtcgagcagatataccatcaattgctgcggttgttggatctagatgctggccattgatatcacggtacagagcatctgtgcgcacccagtctccaaaggtagagatgattgattctctatttaagccactggatgatgggaaggatgatggcataatgagggaacttctactagacttctaccaaaccagtcaacaaagaaagcctaagcagataatcatcttcagggatggtgttagcgagtctcagtttagccaagtactgaacgtagaacttaatcaaattataaaggcatatcagagtatgggacagggggaccttccgaagttcacagtgatcattgctcaaaagaatcaccacacaaaactcttccaagctgattcaccagagaacgttccacctgggactgttgtggactccggcatagttcatccaagacagtatgatttctacatgtgtgctcatgccggaccaattggtacttcaaggccaacccattaccatgtgttgcttgatgagattggcttctctgcagataatctccagaagctagttctttcactttcatatgtgtaccagaggagcaccactgcgatttctgtggtggcacctatctgttatgcccacctcgcagcagctcagatgggccagttcatgaaatttgaagagtttgcagatacgtcgtcagggagtgtcaattcatcatcgccaccatcaataccagaattgccacggctgcatgctgatgtctgcagttccatgttcttctgttgacgtgattttagtttgaccgttgtggggtagggccaattctttgtgaaaggaaccttaccttatatgttggcacacagcaggctaaccgtttttgtgaagaaaccatgtaggtcgttagttgtcgtatatcgcacgcgtgcatctttttggagcggttttcggctccccccacccacaggtggcggttccgttaggtacagtttccagattttaacgatgctaatacagtaaaagcagtttgtacattctacgcagattttgcagggatacgtggttagatgatctttttgttatgcccagaaatacgtgtgcattggggggttatgaaagtgagctaaatttctgtgcctcgcatggcatccaattgtactcggagattgtgtttgtgctcgatacgcttcctgccactgaaatgcgaaaatgaccacttccactcgctactcgtgacaccacaggaaaatccttgcatcgac

SEQ ID NO: 39780 - DNA, 272 bp, Zea Mays
gccagacgtgtgtgatcaatgacgtcaaccagaaaccgtcgtcgtgcttacgactatcgcgtcgaattagtcagggtaagtaaatttgttattcgtgttagtggatggatggatggtctgactaggtataatatttattagattgcctgagtcattttggtaatttgatcgatgtcgtaggacgaaagaggtctcaataggtctcagtgtttacgggactgtagatgttagaaatggaaagttttactaatatgtatgatacacaggttaac

SEQ ID NO: 39781 - DNA, 1896 bp, Zea Mays
ggcgcccaattctctcccgctctcccctctgctgcaagtctgcaaccgcagcagcacgtccatttcacgtgccctttcctccctccctttcccctgcccccacgccacctccgttcgccgccgcccgccgcgccggcgatggcgatgaccgaagggcttgtgcctattacgcggacctacctcgcgcgctactacgacaagtacccgctgcccccgctgcccgacgccactacggacctcgccgcccggctccgtgctctctccgccgacctcgctgccgttgctcccatcgccccagatgaggagctcttggaacaagaagcagctggcatacctgcccacaaaattgatgagaatttgtggaagaaccgagaacaaatggaagaaattcttttcttgattaacacatcccatcgtcctgtggctcttcaacagaagtccaccccagaagatgctgagatagtttgtacacttgatgatatagaagctaaattgaaggatatgttgaagaacttagaacaatttcagttgaaaaatgctgacaatgttttcaatacagttatgacatacatgccccaagattttcggggtactctaatcaggcaacagcgagaacgctcagagagaaataagcaagcagaggtagatgctctggttagtgctggtggaagcattcatgatcgatatgcattgttatggaaacagcaaatggaaaggagggtgcaattagcacagcttggttctgcaacaggtgtatataagactcttgttaggtatttggtcggtgttccacaggcctatggaagaacaaagagaacgttatggtccagccctttacacccttacaaaactggtgcttgcaattcggttgtatttgcatgtctctttggcacgatatggacaaaggaaaatagagaaggatgacgctgctgtgttgcagcaagctgtggttatctacaccaaggagtttttgaagttcactgaattcattggtgaggtctttgtgaatgcaccattctttatatctgctgaggatgcaggtgccgtggatgcaaggaaaagtgatgagtacaaagaaactattattccagctggaaagacacatgaggtcattttgagtgttgaagctgtaaactcatacatcgcatgggacttttccttgcaacaaggggccctcaacatggacattggctttcatgtggagtacattagcccttcaggggagaaaactttaattcttccataccgacgatatgaagctgaccaaggtaatttttgcactgtttcatcgggatcatacaaacttgtgtgggacaattcatattcttcattcttcaaaaaggtccttcggtacaaggtggatgctgtgccaccggttgttgagccggccttgtcagccacggaactctgaagaggtctgtcttaatataatgatgtaacgagggccgatgcatgcccgagtatagctgtacaaatgtttctgaaggccccacacggtgctgttactgattattccatcgaatgctttgcggtgttctgatcgcagcattccctgatagctcgctgtcagagcgcatggatatgtactttgtgtgcacatggctgcggccacttgtcaccgacgaatgcctgaatataacagaaatgtattatatcgaccaataagagcatgtctgattggaagctgtcgtggtttgtttttattttttttctcgaatacggagagctgtgtgtcattgcaccaggaagaggaagagctgtggacgtgctccctggaaagagcatcccctttggctaccaattgttgaatttgccagtccatattttagcgcttcggatctgctcagatcccgattctgtttggatgaattgagctttgctttccccaacgaaaat

SEQ ID NO: 39782 - DNA, 4586 bp, Zea Mays
tttagatcactcgtttggtcgcttccatctcaagtgctggttgtgcaacagtcattgccatcctccatccctctgaactccgaaggccgaaccagttccgacgaaacggtacggtgacggctcacctcgggggtctccatgtccatggacggccctgccacctcgccggcaagcgaggtgccgttccgcatcagcttctccggccacagcggccacctccgcctcgaccctaccccgcacacgcccagccccattccggacttcgtcctgccgccggcatacccggccgagagcccgagcagcgtgaaggagtacctcgagaggaactacctcgaccccgagctgcacctccccaccgcggccgatagcgggagggtgtgggatgtcgactggtttgccctggccaggccgccgctggagccctccgccccccgcaccatgctcgcgcccgtctgggtgccgcctttccggcgcgggcaggagaagttgcaatccgcggcagagtcgcgagtgtgggaccctgagtccgtgcaaatggagatggtcgacgtgttcgattcggggaccggggggatagcgccccggatgcctggtccggcgaaggacttcgtcagggggagcatcaacaacagaccttttcgtccaggcggtctgcaggatgacgccgctgaggcggctgcgctggaaaaggcgttcccagagggtgcaaggactggtgattgggtgcgtgagctcatgagcggtggcccggcgcaggttgcgcctccagggttccgtaagggattggagctgggccagttgaaggggtatgaaagccactggaagtgtttccgggatggagaacttgtagaggagcaacctgcatcatcatcgaatgacacaatggagaagtactctgtgcagtttgatgatcttttcaagatagcgtgggaggaagatactgccaacaagttgttgaaggacggtgttgttcaacaatctgctgaagaaattggcgaacaaaaagttgatgcattgcaggatgagttcgagagtataacaacgctagatgacgagaaacaggaagttgatgtcataagaaatgttcctgaaactcaaacagacttggatcagatgttatcttctgaagtacaggatacaggcagggaaccaggtgcatcaggtgataagaagccaacacaagatggcatggtttgggcacttgttggtggggacgaggacatagtgactaacttctccaaactcgttccagatatggcaatcgagtttccatttgaattggataagttccagaaggaggctatatattatctcgagaagggtgaatcagtctttgttgcagcccatacttcagctggaaagacggttgttgctgagtatgcattcgcattagcaacgaaacattgcactaggtctgtctatactgctcctattaaaactatcagcaaccagaaatacagagatttttctgggaagtttgatgtgggacttctgacaggagatgttagcatcaggccagaggcaacttgcttaattatgactactgagatattgcgttcaatgctctacagaggcgcagacattatacgtgatattgaatgggtaatctttgatgaagtgcattatgtaaatgatgctgaaagaggtgtagtctgggaggaggtcattataatgctcccgaagcacattaacattgttcttctttcggcaacggtcccaaatactgttgaatttgctgactggattggtcggacaaagcagaagaaaattcgtgtcacatcgaccaacaaaaggcctgttccacttgagcattgcctgttctactctggagaagtgtacaaaatatgtgagagggatatgtttcttgctcaaggatttaaagaagcaaaagatgctttcaaaaagaaaaatttgaataagtttggagtgaaacctggttcaaagtcaggaacccctgcagtacgtgctggaactcaaggcaaaaatccagatacatccaacaaggggagagatcaaaagtacccaaagcaccgcaattccaattcaggagtagccacagttcaacagagctcctcagggccaaagagatttgaatctttattttggatgccacttgtgaataaccttctgaagaaatcccttgtgcctgtggtgattttttgtttctcaaagaatcgctgtgataaatcggcagatagtatgtttggcactgatctcaccagtagttcagagaaaagtgaaatacgtgtcttctgtgacaaggcattttcacgtcttaaaggatctgataggaaccttccacaggttgtaggaatacaaagccttctgcgaagaggaattggagtacaccacgctgggcttctccctattgtgaaggaagttgttgagatgctgttttgccgtggtgtaatcaaggtactgttttccactgagacatttgcaatgggtgtcaatgcaccggcaagaacggttgtgtttgattctttaagaaagtttgatggaaaagaacaccggaaattgcttccaggggaatatatacaaatggctgggcgagctggtcggagaggacttgataacattggtactgtgatcattatgtgtcgtgatgaaattcctgaagaaagcgatttgaaaaatttgatcgttggaaaaccaactcgtttggaatctcaatttcgattaacatacaccatgatactacatcttctgcgtgtggaggaactgaaggtcgaggacatgctcaagagaagttttgctgaattccacgcacaaaagaatttgcctgagaaggaaaagcttcttctgcaaatgcttcgtcaacctacaaggacaatagagtgcataaaaggagagccttctattgaggaatactacgagatgactttagatgctgaggcacacagggaatacataacagaagcaattatgcagctgcctaattctcaacagtttcttacgcctgggagattggtggttgttaaatctgattctgatgatgatcacttgcttggtgttatactgaaaaatccatctgcattgctaaagaaatatgttgttctggtattgactggtgattgcagttcatctgcactagcccctgagttcaataaaaatgaaaagggtcctgtggattttcaaggaggacaatttattgtcctgaaaggaaaacgtggcatggacgatgaatatttctcttctgttagttcacgaaaagcttcaggtgtaatcaatatcaatctaccatacaagggggatgcatctggaatgggctttgaagtaagagcaattgagaataaagaaatcattagtatatgcagcagcaaaataaagattgatcaagtcagacttcttgaggagcctaacaaaactgcatactctagaactgtccaacagcttataaaggagcaaccagatggaaccaagtatcctcctgctttagatgcaataaaagatctaaaaatgaaagacatgtatcttgttgaaagttaccgtgcatatcacatactactgcaaaaaatgtctgaaaacaagtgccatggttgtataaaactgaaggagcatatatcattgatgagggagcaaaagatgtacaaggatcagttgaatgaattgaaattccaaatgtccgacgaggcacttcaacaaatgccagagtttcaaggcagaattgatgtactaaaggtaatccactacattgattctgatctagttgtgcaacttaagggtcgggtagcatgtgaaatgaactccggtgaggagttaatatcaacagaatgtctgtttgaaaatcaattggatgacctagaacccgaagaagctgtggctattatgtctgcattcgtcttccaacaacgcaatgcttcagaaccatctcttactccaaaactggctgaagcgaagaagaggctctatgatacagccataaaattagggaagctccaatccgagttcaaggtgcctgtggaccctgaagagtatgcacgtgataatctcaagtttggccttgttgaggtcgtctacgagtgggcaaaggggacgcctttcgcagacatatgcgagctgactgatgtatccgaagggatcattgtaagaacaatcgtccgtctggacgaaacatgtagggaattcaggaatgcagcttccatcatggggaactctgcgctgttcaagaagatggaggtcgcgtctaacgctattaagcgtgacattgtgtttgcagcaagtttgtatgtcacaggaatctgatgcatgtaacctcgtagtctcccttgcttcttttgttagagaaatcgttgtgctggtggaatgctactaacctaaccttagctagaacaattgttgtggtatttttttttccagttctggattattgcttttgctagttttgcgaagttttctgaagcggcgaccagcagagtaaaggaaaatcgaaagcgggtgggattctcgtttttttttcactgagaatatgattattgtattattagcggaaacaaaacgttctcgtactcaagacacctggaatccgtctagtaggagctcgatgtctaaagcaaaagtgcttaactggattgggaaacactgag

SEQ ID NO: 39783 - DNA, 1341 bp, Zea Mays
aaaaactgcagattttattgtggaattccaaaagcagctacagctagcctacatcgccggtctagctcaacaagattggtaccgtatctataagactataagataaattcgcctgatatatctccaagaaaaagcaagcccatcgtcctaccgtattagcaatggaggcagcagcaggagaggggccgacgacgacgatgaagacggtgtgcgtgaccggcgcggggggtttcgtggcctcgtggctcgtcgagcgcctcctcgccggcggacgatacaagatccacggcaccgtccgcgatcccggcgacgccaagaacgcgcacctgctggggctggacggcgccgcggagcggctgcggctgttcaaggccgacctgctcgacttcggcagcctggcggcggccattgcaggctgtgacggcgtcttccacgtggcctgccccgtccccgactataccctcaccgaccccgaggcaccagctagctagcactcgcccttaatttctcgtcatgcatgcatttgccttcgcttcgatctccatcggacagacagacactcactgactcacacacagtacggcgtacgtctccatgtgttgttgcagaccgagctgctggctcctgccgtgacgggcaccatgaacatcctcagggcgtgctccgacgcccatgtcaggagggtcgtcgtggtctcctctctctcggctgtcatgataaaccctgactggggcgagtgcaaggtcatggacgaaggttgctggtctgatgtcgacctctgcagaactactaaggtatatggaggcacgacatgaagagcatctaactacagtaaaacacattttgaggtacatgctactacaatcaaggttgggggtattctatccaaggaacaagaacatgatagaaatgtcgggatgcagtgataaggacctagctggtgatatggacagtaggaagagcacttcaagtaccatattcttcctataaaaaagtactatcaactagcaatcctccaagcaaagtgtggtggctctcttaagttgcgaagctaagtatatagcagctgcaacaactgcctaccaagctatttggctgacagggttgctgtttgaattgaaggatgaaagagcaagtgtgttagtgttgagtgtgtcattgtccaagaatcatgttctcatgattgatccaaacatactgatgtgagatttcatttgattcgggtatatgacaacatgaagaaaattgaagtgaagttcatcagaacaaaagagtaattgggggatattctcaccaagcctttttgcaagaataagtttgctgaattttgcaacaagattg

SEQ ID NO: 39784 - DNA, 1218 bp, Zea Mays
ctgggctacggcccgtccgctgcatggtctcccttccgagttccgtccacggttcaccccgcaacccgcgtggccgcgttcgatctgtctctgacgagcgacgactccgccgtccccgtgctaggtgccgaggcattcttcggtctctctgtcggcgacgagcacccaccagcagctgtggccactcaatgtcaatgggtgcgtgttcgaggaaatgtcaatggttactgaggagcagtccaatcatactgccaaatgaggctctggttggtttgctttcgttatcatatatgaaaatataaaacattttacctgttgaacatactttcatcaggagagacatgaataccgattgtttgaaagtttgcaccatacatttgtgaattcgtaagataagttagaagtctaaaatgtgaacagttattttatgctgggtgttaatcttcaaattgggcggacatttttttcgcatatttttgtatgtctatatcaattatgtgataatttcttaatagttctaaaattcttatatcaggttctaaagtatttactacctgaacttattctacatcctgttgtgaggccttgtttgaatactttagtattcattttaatccacatgtattgagatggattgatgtgtaaatgaaagtacccaaacaaagcctgagggatgtcccccaaccctgatttctggctttcagtgatagaggtcttacacatgaaattgtaccacaagcatggatcattcatagttctcattcttcctacttacaaaacattctagtactaacacaatccgcaaaatacatctggtttatttataaggtagtgctcaggagaatttaatgtagaataagttcatcgacttcctagaaagaagatcagaaggcccttattatcgtcaggtaggcaataagagctgggattttcagcgtctcctagcagcagtttctctctgtgcattgaagtagacggcagctacagggaggccaaggtcattttcctcagcgaactgccgggtgttgaaatgatctctgaaggatggcacagttacattttgcctaccctgctgcttgaagagcacaaaaatgaacctgtggataccaatgctaggtcttgggctctcgtagcttatgatctgtcgccctgaaatttggaagatgaatggttattaattcaaagaagaactagaacatggaataggctaagcctgaa

SEQ ID NO: 39785 - DNA, 2833 bp, Zea Mays
cgtccttcctgagacgagaaggctaggctagctagagaaaggggggggggagggggcgacaccgaggcgggggcaacgggagcaagcaaggcaaggcaaggcagcagcatgggggagaagcgaacaagaccgcggggcgcgcggacgcccatgtggacgccatgcgcggacgcggcgcggacgtcgtgacacctgcagccccccggcacccggcctgcaccgccatggccctgccgccgccgccgcattgcgcctcaaaacccccctccgcgcctcccgccctctaggctccccgctcgccaaggccaaaccccccaccgttcggttcctgatccggcctctcggcctctccgctggaggtaggggacatggcggaagaggcatcgcctccgcctccgccgcccaagctgctctacattgccgtcgccgacggcgggggccgccgggcgttccggtacacgcgccccgtgctgcagagcaccctgcatctcatgggatgcaagcctcgccatgccttcaagattagcaagagagtattcgatgtaatgaagagtgaattcttggctcaatcaaagtcagacggggcaggcaaacaagaaaattatcctgctcttggccttggagatggaacagatactcaaaaaatgctggagagaagcgatagcagcataccgtttgaattatacaagaaccagactaccgttgttatctcaagagaggagtttgtaagtgttgtatgcgatgccctctctttgtacaagtatgttggacccaaccagaaagcagacctgctcctcgcttgcagggtagtaggctgggtatcacgacagtggtttctactgattccatacgccatatgatgagaggcttcgcagatcaaaaacagaatcctcttctctatgcctcgacctaccatgcaggcgaatatctagatcctattgcagttgctcaggcgaaggcaaagcacaaggcgaataaacccacggttgtttctcatccaaatacctgtggaggcacttcttcagacgacaaatcacagcaagggtcctcggaactacctcctagagccgaactgattggcagcaagcagatggcggtagaaggctacaaggcgcagagcgagatggtgatcgacagcctggacagattaattacctcctgggaagagcagaaagaatccgtgatcgtcgaaggagtgcatctaagccttaacttcgtgatgggattaatgaagaagcatccttccataataccattcatggtatacatcacaaacgaggagaaacacatggaacggtttgctgtgcgtgcgaagtacatgacactagacccagcgaagaacaggtacatcaagtacatccgaaacatcagagccatccaggaatacctgtgcaaccgcgctgacaagcacctcgtgccgaagatcaacaacaccaacgtcgaccagagcgtggccgccatacacgccacggccttcagctgcctccgccggcgagcggccggggagcagctgtacgacctcaacacgaacactgctgccgtagtggacgaggagtacaggaaccagcgtgcggccaacaccttgggttccaagggcatgttccagctgatccagaggcaggggtcttcgaggaaccttatggcgctcctcaacaccgacggctcagtcaccaaagcctggcatgtaggtgccactgacggcggtggggaaaatcttggtggtaatacaagcagcggcaagaagcccgatgaaaatcgtgtgctggatgcctcgcagattgggaaggcagaggcggtcaacctccagttcggtcctttcgggatcagcgcctggatgagcgacacgggtggaaccagccatgctggaagtgtggaagacctgagggctgatggcgtggagactggtggtaggaattactcgtcgtgctgcagttcgccgaagacgtcggattccacttcgaaggagcttatggaggactattcggtctatgtcagcgaagaagaggaagaggaggaagctgacgacccttgtgatgctgaaactgatgaagatctatccgatgaagaaagagacatgcacgagatagatgcaggctctgtggacgagcactcgaccaagtcagacgaggagtatgaggacctagccatgcgcgatgtgatggagagtggcgactggtccgacgatgagcagcaaggcgtcagcaaaaccaagaactcacctaccctggagtgcagcattcatgggagtggggcagctgaagatgatggcataaatggccggtaccaccacaacctggacctgttcctgaagatgtccaaggaggtggtagccagcaacagaatgccttgcgcgtcgtcatagccccaccggccggcgacacgctgccctggtcccggcgggtgatacgtttcttgggctggtgctgtagagtggtggctgtgtctttgtagcgtgtacctgtgcaaactacaagatgccctcacctggatgtaaagagagaccctgatgctttgtccaggcaaccatgttcatccataccatgtagtagtaggagtattagggggtgtttgggaacaaagtttttctgcagttttggaagaatactgcagtattctcaaatactgcagtattatatacataatggtgtttggtaagctgggtaaaatctctgttttcaaaactgaagtattgcaaatactatagttgttttaaggcattctaaacttagctctggacctcagttttcaaaactgcggtattataaactacggtattgtcataactaaagtatagtatagtatttcaaaaactgtggttttcaaaaactttgtt

SEQ ID NO: 39786 - DNA, 3101 bp, Zea Mays
ccaaaattgggttggtttctcctacacttccatgttcgatgcgagcggcgagccaacttcactctcattcgtcttccacaaaccccataaccctagcaccgccgccaccatgtcctcatctccatcttcagtgaaccgccgtcccccgggcccgctagcgttggggctggagtccttggggaagaagatcagcatcggctggtctccgtcccgggcggcatcctctccatctcgtgtcgcacctacgcgaccccactgggccatggcttctttccccgtggtgcaggtcttttcggtcctcaggcttcatccctgtgcaagtgcagggataattgcttctaatctcccgaggctgcataacctaattcagaggcagagcaagggggcgtgagggagatgagggagatcatcagcatccatatcgcgtaggcaggcatccagtgacacctctgtcgggatcgcgagggatgcgttcaacacgttcttcagtgaaacgggcgcagggaagcacgttccaagggccctgtttgtcgacttggagcccactgtgattgacgaggtgaagaccggggcgtaccgccggcttttccatcctgagcagctcatctcacacaaggaagatgctgcgaacaacttcgcccgtggacattacacaggctcaaaatgttcttggaaacaaggggactgaaattgcaaaggtagcacatcggcgaactgatgcggaggcgggcgtggaggcgctcgatgccgtccagcaatcagtagttgtcgctgcatcggcgacttctttcccccaccagcatggccgcgtgaatggttcagttctttccaaagcctacagcttctaggaaatcggatacgatcacccgaaaaaggcaagggggaaatcttcttatagatctgttccgtcattgtgacaatcatttgggagagaaacaagtaaacaacccttttttccataaaactccatctggaagtgcacgacagccactacagttgactaccgatgtaaccaagatgatgcaaaagcatcagctggaaacgccatagttgctgctactgagtaccatccttatatccttatttcctaattgttgtggtgcatgtacaagtttttttaaaacgaattccgaattggttattgctgttagaactcatctgagtgctaccttctcatatgctccttttttctctctggctgttatgttaaaggaccagatacaagtcaatcttcccttcaaattacaatttaattattttatatctggattctgcaagacacttcaaaaaaaaatataacaacatgtggtccctatgttatctactagcatgagccattgttccatgcagtttggtacatagtggcgcatattttgttacatttactttctatattcttagtatatttatagcctatatccccaaactatatcatatacttagcacacacccattgttataatccacgtgcgcatggcgcgcgcactttactagtatacaacattgttggcaacaggagctgatctctttattacacgatgtattggcttggtttctaatgtccactttcccatccctgttttcccctccttcaggacttctttagtgatcttttggtacatcgctgctgatacaaacagcctacccagactgcttttgtgaaggtatgtgcgtacctatattgcttcttgaggctgactcatgtgattggcggtgtttggaagatacattaaagtttaattcgacaaatgtcttttgcttagggctcctagcttggtgtttctttttctgtgatacttgtgcatgcgaagtaggtgaactgctacttaaatggtacatatttagcttaattacttactggtggcattgcagattatatgtttctgtcttaaagatacattagtaggctgtagtactcacactgcttctgttctcatctgttcacacactgcatctattcacagcatgattcagaggcatgcatgaggttgtagtaggcgagaccacccaaaagcactcccaacgcctgaccacaagagctagcagatagcagccctactgttggcaatccaataatcacatacgaagttttccttgaaattttttgagtcttgaattgacttcttccttaatttatagtttcaactcaaaacgaatacactattttttgttgaaccacattttcctctgctcagtttggcatcattattgtatcataatattatcataattaatccattctggtaaactgactctagaaaattttcttgaatggattcctatcttttacagtctaagctacattatgtgcatggaattttgcaatataccttctgtttcttgctcacatgattgatgtgattttgaattcatttagcacactgctttctgagaagccatttgcagtgcaaggatgaaacttggtcagagtgtttaccatatggattggcagtgaaaccaaaaaagaaggcgcgctactgttcttccgttttcatgtcaatgcaacaacagattactgatatagctatgcctggtgagtggagataagtggaggtggcactaccaattccttgatgtaccaggaatgtttggattgttgtattctgacattgtttggctcaacatattcaagttggagtgtcaggtctccaacaattaaacaagatacggaatctgtgtaagcaagagcattcataccttgttagcttccttctctctctctcaagatcgatctagagaccaacaagatcatggacttcttcaagtttgacgtcgataacgtggtcatggtgaccggcgggaggaacaccgggcgtgtaggagtgatcaagaactaggagaagcacaaaggcagcttcgaggtcatcgacgtgctgcttggagctttttgcatgctatgtctagttttctcctatttgttgtacaggaaaacatagaatggaattcaaatttggtggtcgcaaaagtgtggagacttgaattcatataaagttaggcttaacattagtgcaaacagttgtattttagtttagatttagagtacacttatgtatgccttgtttgacaatgcttatttatgatatattgaatggtacttattt

SEQ ID NO: 39787 - DNA, 370 bp, Zea Mays
ggaaaagtacttaacttgtgaagtaaaattttggcataagtacttgtaagctcttcttcaaatgagtctttgaaatttgataagccttaccttgattcctgacaagccaacatatccttgacagtcttttctttagtcgggtaagtcttgctgagtacttgtgtacttagggttttattcccattgttgcagcaggttaccagtcactttgactgtgattgatgttaagtgccggtgggctcggccttctaataagtttaagtacttcttctgtacttcttattgaggatggtcactgagctagcatatatttcgaaactttaaaaaatcaataacagttcaaagttatttctttgaatcacatttaaaa

SEQ ID NO: 39788 - DNA, 2311 bp, Zea Mays
ggctgaggttcaccgagccgccgcttcggttctcctctaaaaccctagaaactaactcccacctcccggttcccgccgtcctcgctcgccccccattctccggccctccccaccgccaccattttccccggcgacatgggccgcaatcttccagccgagcaagtggaagcacccaggagcagcaagatggacaagaagagaaagaaggacaagaagcggaagctggcagccgaggccgaggaggaggcggcggtgacggcgacagtggagaccgtgaagagcagcaagaagaagcgggtggagaatgaacccggcgcaggagcagtggaggcggagaacggcgctgagaagaccgtggcggtgaccgggaagggttcggaggaccctaagtacgcgccgctacggtcgttctccgctgccgagctgccgtctcaggtgctcgaatgctgcagcgcgttcgcgcggccgtcacctatccaggcacacgcctggccgttcctcctcgacggccgggacttcatcggcatcgccgccaccggatccggaaagacaatcgcctttggcgtgccggcgctgatgcacatcaggaagaaggtaggggggaaagcagggaagaaggctgtgccacggtgcctcgtgctatcaccaacgagggagctcgctcagcagattgcagatgtacttagtgaggctggtgcaccatgtgggataaaatcagtctgtctttatggtggaactaaaaaggaaccccaaatatctgcccttaaatctggagtggatatagtcataggaactcctggtcgtatgaaagaccttattgaaatgggtgtttgctgtcttaatgaggtttcgtttgtggttctagatgaagcagataggatgctggatttgggttttgaacctgaagtcagggcaattttgagccaaacatcatctgtacgccagatggttatgttcagtgcaacatggcctcttgctgtccacaaattagcccaggagtttatggatccaaatccgataaaggttgttattggatcagaagaccttgctgctaaccatgacgtgatgcaaattgttgaagtattggatgatagaacaagggattcaagattacttgccttgcttgacaaataccatcaagcacaaagcaacagggttttggtttttgtgctgtacaagaaagaagctgcacgagtggaaacaatgcttcagagaagattgctacagatgtcgcttcacgtggacttgatattcctgatgttgaagtagtgattaactatagttatcctttgaccactgaggactacgtccacaggataggaaggactggtcgtgctggcaagaaaggtgttgcacatacctttttcactcaagcgaacaaggcacttgctggtgaacttgtgaatgttctgcgggaggctgatcaggttgttcctccagcccttatgaaatttggcacacatgtcaagaaaaaggaatctaagatatacggatctcatttcaaggaacttacagcagatgctcctaaatccacgaagatcacatttggcgattctgatgaggactgatgtgatgacagcttaggccttgttcgtttctatcggattggtaggccggaacgattcctatccggattgcttctctaatttatataaactttgattagctggaacgattccgggtgcaatccgacggaaacgaacaaggccttactgatttttcatccctgctgacggaagcttgatttctccgttggtgatgctatggatgtgatcagatcagccatttgcaagctgattgcagccacggatgagtattgtggcagtgggcaatcccaaaatatagctctcttgttataggttagtttattatgagtagcattcggcttatgtttttctggaccgtccccattatgcattagcttgggctgcttggctgtatgtaataataagcaacattctgcttattatgatttgcattctcttggaggcttagtttggaaacttaaatcgtctccggtatttccagggattgagtgggaaaataagctattttcccactcaatcttcagggaaaccggaggggatttaagttttcaaactagcccagagtgtagttaaattcagtgcgtccttagtacaagcagcccggttatggtaatgataggatagtgaaaggtgtacttctatcctggttagagtaaaaaaagaatatggttttccgtgttatagtaaaaaaaagaggatggttttgcagttggattttgattgggttccatgtgtttgaatcaactttgtgtttccacaacttg

SEQ ID NO: 39789 - DNA, 996 bp, Zea Mays
ctcagcctgcctggagatgacggcatattcacttcaaaggacatcaggatgcaaaatcacgtgtggaggacatttggaagaaaatgaacagtggttttcctaataagatgcccaaacctgcaatgacaaagctcagtacaacagaaaaacaaaagaaaaataaaccaacaaataattggatgactgttctaggcctttcaccaagcaaggcacatagtgtcgatcaaggatccaaaaatgggctacaacagacacaacatgaaatgagcgaggatgctaaaaaacttgcagccaaggcccttgcagctgccaaaaatgctgctgctgtggcatctggacgagggaaagtggagatcactgaggtaagggactttgctgggaaggacatcgaaatcaagaaactggttgatgctaattcaaaggaggcaatcgagaaggccagggcaggtggtgccgccccatcagctgtcgataacatcctagagcaaatacggaagaagcagaagctgagcgtcctggacaagacgaagaaagactggggagagtacaaggaagagaaccggggcttgggggaagagctggacgcctacaagaagagctcgaaccagtaccttgacaagcaatcatttctgcagcgaaccgattaccgcgagtttgagcgcgagcgggatgcccggctgtcaatgatggccaagcggaggacagatacgcgggaggactgaaatgtttccctgtaactccgttgtagacattctttcgagataatggtagacactaaattgtcaatgccttccagccccgttaaatcttcttttttagaattataatgtgctgattataatttacaaagatgcaccgtgcatgtgcgtaaattgcatctggtggttttggcaaacatttctgagctgcataaaatgcagtcatgattggatatttctgaaaccgggaaactttgacgaaccagcagcactaagctctgaaagctcgaaaaactaa

SEQ ID NO: 39790 - DNA, 2864 bp, Zea Mays
cgacagggaggcgcgcggggagggagagggacaaaccgagaaaggcacggcacagctgcctgcctcggccctcggcacgcgctcgcgccctggtgactggtgaacactgaggactggaggcggtgggcgcggcgggtccagccaccgcgcggttcacggcggggcgcggcgcgggcgaatgccggccgtttcaacggcgggcggatcggcctgttcccctggcgctgctggcgccccccctaggcggtgactgcgaggcccgatcctgaggcgggcggcgactccgagagggcggttggctggttttcttgccaagtgccagtcagtctctctcgtctcggcgacgccgcgcgaaggtcggaactcggaatcctcttcccggcgtcgtcatcccacccccgtcggttcccttctaactcctggctcctggggccgccgccgagccgaggagaggcgcacgcgcctcgggaatggagctggcgcctccgctccgcctacgggatccgagcctgggatggcttcctgcaacttgcgcagccttttatgtgtcaggactcaagtgtgatgaactgatggggactcttggactataactggtttcctcttattcttccagccaatcctgacaaatgtggcatctcaagctgatagctttaatttatggctctcttttctttatgcacattccatatgctagaggttctgacctaaacaccgataagcaggcccttcttgcatttgctgcatcactgcctcatggcagaaaggtcaactggacctccacaacccaagtctgcacgtcctgggttggcattacatgcacaccggacatgaagcgtgtgcgtgaagtcaggttacctgcaatagggctctttggtcctatcccatcaggcacacttagcaagctcgatgccttggaggtgttgagccttaggtcaaaccgtcttactattaatctccctcctgatgtaccatctattccctcacttcgctctctttatcttcaacacaataacctgtctggaatcataccaagttcactttcttccagtctaacattcttagacctgtcctataactcgttcaatggagaaataccatcgaaggtgcaagacatcactgaactgacagcattgcttctccagaacaactctctttctggacccatccctgaccttcgcctccccaagttgagacatttggatttgagcaacaataacctgagtggacctataccaccctccctgcagaagttcccagctacttcttttctgggaaatgcctttctgtgtggatttccattggaaccatgtccagggacaccacctgcttctccatcgtcgccatcgtcccaaaatgccaaaagaagcttctggaaaaagctcagccttggtatcataattgcaatagttgctggaggaggggttgtattcatattgatcctgatcctcttggtatgtatcttcaaaagaaagaaaaatgcagagtctggcataggatcatcttcatccaaaggaaaggcaattgcaggtaaaaggggagaaaaatccaagggggaatacagcagcagtggtattcaagaagcagagagaaataaactgtttttctttgagggctcttcatataattttgacttggaggatctgttgagggcttcggctgaagtccttggaaaaggaagttatgggactacgtacaaagctgttctggaggatggaacaacagtggtggtcaagagattgaaggaagtggtggcgggaaagagggaatttgaacagcagatggagctaattggcaaggtttgccatcatcagaacactgccccattgcgtgcttactactactccaaggatgagaagctcttggtgtatgactatgtcccactaggtagcctttgtgctgctttgcatggtaacaaagctgctggaagaaccccattggactgggagaccagggtgaagatagctctgggcactgcacgcggaatggcttatcttcactccgtgggtagcggcgggaagttcattcacgggaacatcaagtcaagcaacatccttctctcacaggaactcggcgcctgcgtcaccgagttcggccttgcccagctcatgtccacgccccacgtccacccgcggctcgtcgggtaccggtcgcccgaggtcctcgagaccaggaaaccgacgcagaaatctgacgtctacagcttcggcgtcctcctcctcgagatgctcacaggcaaagcccctctcaggtcccccgggcgcgacgactccatcgaacacctcccgaggtgggtgcagtccgtggtccgggaggagtggacgtcggaggtcttcgacgtcgacctgctgaggcacccgaacctagaggacgagatggtccagatgctccacgtcgcgatggcatgcgtcgcggtcgtccccgacgagcggcctcggatggaggaggtggtcggcaggatcgaggagatccggagctcctactcggacacgaagacgtccccggaggacaatccgagggagggcgctttctaataaatcaccgagtaccacacgtaccggaacggcagtgacttgccgtctacagaaagtaggtcggttggtttgacagctctgtgtccagtgaagctttgcagtcagtcagttgattattcctgatcattctttggtaaaagttgttttctgttcttggttccatgaggtagccccggaacgctggtggtggtttcgtttcattagcgctgctgattactgtagggtgttgtttgtggatcgtgccgcgactcggtttcgtattcgtttgaggcagcccgactctttcaagtttgatttattgaatgcgcataagtttttgccactttcctg

SEQ ID NO: 39791 - DNA, 1792 bp, Zea Mays
tctcaataatgcgcaggccatcctcggcatgcgacgcggggcccgtatgacccagccgtcccagcggccggacggcgacaccaaccacgccccgttccgttgaacagcgtcgagtcgtcgccccatatcaaacgcccacgcagcgccggggatggagcgcggccggcaccagatgagagctgcctcccacacatggcatcgtggccagcagcgtcaaggaggcggtccagcggcggcatgaaaagcgccgagctttcgggctccggtgcttcttacggctatggccggacgtcctcctcccctgatgcctgcggctacggccggcagttctcggcctacagcgcccgctcctcccaggtcagcaggagtggctccttcagtgcggcggcgcagcgggtcgccggcgccttcaccggctgcttcgtgccgcgccggcaggtcaaagccggggaagaggaggaggaggaggagaagaagagcaagcgctccatggattcagcaggatcatggcaggaaggcagggctctcaccatcgctgacgtgtcgaaggcaacatcaaacttcagcgaaaagaacgtgataaggcagggacgctcaagcaccatgtacagaggaaagctcagggatggttctcagatcgccgtcaaatgtgtcacgaaggttgggaaccgaacaccaccgtcatccatgctttggattgctcatagagcaggcgaattgcagcagtgttactaattacctctcctcagctgaacgaccagagtccgacggctgaactctggagggagcttgagaagatccagcacaggaatctggcgaggctctttggattcttcgaacgcgcagctgatagtctcgtcgtagtcgaaatcatgtggaaatggtttagagctcgcgcaacggctcaacatcgcgatcgacgttgctcaggccatcacctacctgcacgagtacaaagagcgtccgatcatccatggcggcatccggtcgtcaggcgtgctactgaccgacgcgctggcggcgaaggtggccggctttgggctggccgggactgcggcctcggggtcgggctcaggctccgacgcaacgccggcgaggagcgccgccgggtacgtggacccggagtacctgatcacgtaccagctgaccgacaagagcgacgtgtacgccttcggcgtcctcctcgtggagctagccaccggccggccgcccgtcgagcgcagccgcggcggcgaggcccggctcaccaccaaatgggcgttgcagaagtgcagagcaggggaagccgtggtggccatggaccccaggatgcggcggagcccggcgtcggtggccgcagtggagaggacgctggcgctggcagcgcagagcgtcgcggcggccagggatgagcggccgtccatgcggcggtgcagcgagctgctgtggaccatccggagagactaccaccgccaggaggagccgcgctgcggcgccgtcgctgcggaacgtagcgacgagtgggtcatcaggtagcttagcttgccagttgaatggatatgattctgctttggattgatcggcatggaactgtaactagcctgtaagtggatgcgaagttctaggaagctgcagatttttttagtacgtacaacttctgtgattactatcaaatgatgtagtcattgcagccaatacctgcgaatttctagaaaacagtagacgttgtaacaatcagacgactttgctgaagtagccacttgatccctcaatcaaatataaataaccatcgaaggatgaggatgttgatgta

SEQ ID NO: 39792 - DNA, 441 bp, Zea Mays
aggataaggaggactctgcctcatagtgtggttgagaaagacactgaagcacttctgctccgtgatgtgcttcttaatgaggaaatcctgatacgtgagttggaagatgggggagctgctaatatccaggaacgaccacttctgatggtagagaaggtggagaaagtaagaactacacttgctgatttgcttgcagcagaagtattctcatcaattgccccaggggagaatagttgccataatatcattgatgttggagcatccacttcaaagcatacatcgtggatggaaaaggtgcatcaaaagaaaccaaggaagccaacaccaaaaccactgaaaggcacaagaaaattaagtcaggtcatgaggaagatgttggggaagaagatccacccagagcagctcaatggacgtagcaatgcagagggccctcttacagtc

SEQ ID NO: 39793 - DNA, 1308 bp, Zea Mays
gtttagctgcgacttgatgcgacttaattcgcctgcggggcgtctgataaaccttgtgagcaatacgcttctatgtaaaaacagtatccacactaatccacatcacaaaccccatcccaattcccaggccccgccgcgtgcttgtggccgccgccgccgccgccgcgagagagagagatgtcgctctgctgctgctgcagcaccgccaccggccgcggcgttctcctccctagcctcctcctcggccgacgccactggacgggtcaccacctcctcaacctccgggccaccacgaccgtcgtatcctcctcctccgcggccgccacctcctccctctcgccgccgcagcagcgccagatcaccgtctacgtggacactctccttgaatggaaccagagaatgaacctcaccgccgtcaccgacgaggccgaggtcatggcgcgccacgtggccgactctctcgccatgctgcccccgctggagcgtgtgtaccgcggccgttccacctccgctggtggcgctatcgacggagtcaggcttattgacgtcggctctggcgctgggctcccgggctggaagtttacgctgttggagtcgatgcggaagcggtgcacgttcttggagcatgctgttgaagccatgaacttgtcaaatgtggatgtggtgtgtgaccgagctgagaaagttggccaaagtcttgatttcagagaaagttatgatatagtagctgcaagagccgttgctgaactgaaagttctagcggagtactgcatcccattggttcgcattggtggtttgtttatagctgcaaaaggacatgatccccatgaagaagtcagaaatgcagaaggtgcaataaagaaattgggtgcttcaatgcttgagttatgtaatgttgaatcaatgggacctcatggtcaacgaacagctgttctatacgtcaaagaacgtgccactccaaaaaagtacccgcgccttccaggtactccttccaaggcgccattatgaggagcatgtagactttttctatcaattaaagaccgataattgtgattgacctagttagtaggccgtcttgctttacaaggatggcagggtatcttggaatcgaatatctgctaagggtttcaggtatatctatgtatggctcatcgtgcttcgtgccaaacaagtttgtacaggaaagcctaaaaaacttttggttcgtgctatatcagtccgaagtgtaaaaacagtggctcaggctagcccgaaaccacgttataccttcgttgggtcatgccggttcaagtccggtccgtatatttg

SEQ ID NO: 39794 - DNA, 295 bp, Zea Mays
acatcgctcacaaagaactatcttaattttatttcacatcactcatatttattcaatccatctaacaattcggctaacaaaaatgcgtgctaagaataaattcagcgcgaatccactacatcgattaacaaatactaattcaggcttttcgtcgatcacatggtagatatcgtactaatttggttcttcgtcagcttattccaactaaactcgcaaatcacttcgaggagcctacgccaacgaacaatcaaatcgtcgtcaccaacactcaccgtatcactgcgcacactaagat

SEQ ID NO: 39795 - DNA, 393 bp, Zea Mays
cacggccagtcggtcggtggtggacaacgagcaggagaggaggcgcatattgggggccttcctcaaaaacacggctaaccattcgttaccagaaaaagctttgacatagatcaatggaagtacgacgaagcaagctttatcacgatgaagcaggaaggcgacatagggagaaggtgttgtccaagctgttaagtgcaaatgatagtattgtccttgttacatttgtgaaccttgtatgtaatttttgagggtatgaatgtaatatcacatgaagttgtacgattgcctataaatagatgaacagtacccatgtactgttcacgctggattgtaattgcattcacgttattgcctttaaacaagccgaaggtaccaatgtaatataagttttaa

SEQ ID NO: 39796 - DNA, 2172 bp, Zea Mays
  misc_feature (2171)..(2172): n is a, c, g, or t
atggtcgcgattgttggatttggtgatagatggcggctacggttgagccatgagattatattccaggcagtttggaatcttctctccattctccgcacaggtgatcgtgaagcctacagacaattctttctagatgctatggttgcggtagaagacgtgctatatgtggcatcattgcatgacagaagtcttagtggtgtgtctcctggaagatgtttagttaaatgcctatgtggatccttggacatattagacacacctgggccttttagtgagctcccagccagttgccgacctaagaatggacctggcgtgctggttgatctgacaggcgatgcaagatggcgcccatttgccacttcgttgattaagctagttaacaaatgtcttacagacgggaccttgtatgtcgatgggctcgttaccatgccatttgtttctgctgcttgttctatcctctgctatggtgatggttctctgcacaaggtttgttttgatttcgcacgtattgttgccacggtaatgactcctgagattcttcctctagaaagcatcattcgttcaatcacatgcattttgagccaagaaattagcgaactctctgatatcagctgctgatattgttaatgttctcaaaagagcagtaaagaccagcaaaagtgcagaacttcaggttgcactgtacactgcatacaagagaataattgaactctgctctgtacaagtatggaaaccagaaatccttctgaagttgctcagcttgccaaaaccttgcagcaaactgatccaatgtattcgagcagttattggcaaatttggtcaaacctttttcactctggatgatggtaacagtcaaagcagtcctcaggcaagatctgaaaaaaatgagttgcaaaaagctggccataaaagaataccacagaacgaggaaagcaattctgccaaacgtcagaagataactgaatcaggattttctgctgccactggatttgaaaaagaagattatggctatgcttttctacagtctttaaattcactgattaattgcctgtcaccagacaatcatgagtcttatccattagaccctgatgttgctatagaaacagtccagagaaacctgtattcctttgatgcatcactgtattttgaagctcttcatactgtaatgcttctccaattcaatcttcctggacacacgaaactgcttgaagatgactatcagttgattggcgatggtacacattttgttaatccaatatatgctgacctcatcagcatgttgaaactgatatgggatgttggtcatgatgtcactgaaacaagttcaaactacaagatagagtatcttttgatgcaagtctttgctaagcttggcaatagactgaattctggatgtgatcttgaattctttgatttggctatctgtaatggaactgctgagattaaaaatgaagcaattatatcactacccataattgtgctgtattctggtcctaggattcttggagcgatgtttaagaaacttgagtcagtggatgctttaggactcgagaacgtggggaaacatattgccttttcacttggttttctatcttgcttaaatggaaccacttattacactgacaatgtggggaaggggaaccattgcaagctattcttggacaagcactatgaacaacctgtgtcaacattagatcttctcttgagaggtttctgttgtcctcaatgtgatatcaggaatagaactatccacaatgaagaacaaatttctatagtgaacattgcaccattacaagttgagaatgcggacttcaatattaacatctccaaggcccacactctccttttcaaatttctctacgcagggacttctgaggaatttatagtttctttggttgaagtattgccacggctattgaggcattctaacaggcgtcttctacttgagatgagaactcaatggaatcagtgttttgaatttctactgtgtcatgaaatgaaagctgtcagggaagcattttctggtgtagtctactgcttcttggaagacagtgttatggatattttgttttctggtggactgggaatgaatggagggtctaaagaacttcaattcatggataagataaaatgtgctttcactgaagctgaagatcctcagattcttttgnn

SEQ ID NO: 39797 - DNA, 816 bp, Zea Mays
ccgccacttcatcccttgattgcacagaattccctcccaatcgacgccaccacatccacgatgcgcctccgcagccgggcaatctttcccctcgtccgcaccaccgccatcaccacgtcggccgtgtcttcgccgccggcggtgctgagcgtaggccacgcgctgcgcgagcgccggcgcttcacggaagacgatgtggcggcgtacgcggcggtcagcggcgaccgcaacccggtgcacctcgacgacgccgttgcccgcgagctgagcgggttccagcgaggccgcgtggtgcacggcatgctcgtggcatctctcttcccttccgtcatcgccgcaagcttccctggcgcggtgtacgcgagtcagacgctcaagtttgccgcgccggtgtatgtcggggatgaggtggttgctcgagtcaaggcactcaacatcaggatgataggtacgacgaactgcagcacgacaagccgatatctcgtcaagttcgcaaccaaatgcttcatggacaaagaggagggcttggttgcaatcgaaggcgaagcaatggctgtcctgcctacactggagctcagctctcagtcgactagcaactaatagtggcctggaaccgggtgactagtcaaatgtttctgctgcttaatagtagtttgagtagcacaatgcttaagctagtcagaaaatcttatgttgtccgtcaggaacttatcatacccaacctggtaatccgtctcctaggaacactgtaggatgtgtgtaaactaaacttatgtaaccttcacattataagcgatgagtgaagtaaacctgttg

SEQ ID NO: 39798 - DNA, 2197 bp, Zea Mays
ttgtcgatggctccgctcctccgcctgcgcctgcccggtgggccagatagcccacatgcaccgcgcagtattagggctgccacggtggcgccgacacgcgtcgatatctcattggagtgcaggactcggaggcagcccatttctaggcagcgccgtctcttcgcgcaccccccaattcgaacgacggagcacgacgcacgcagagccgcagaggtacccctcgctcccttctccgcccctcggcttctcctcctctcttgaatctgggtcgctgctgcttcgattccctttcttccctgacgcttgcttgcttttgcgtccgatttgtaatctaaacatctcgtttccgcacgggtttggtgcgcgtctacttgtggttgggcctctttcgatcgagtaggctcgaggacggggatccatgcccgcttgacctgacgtgatacgcgtactacggatccgtcaaagcctgtactccagacgaaccagtcgattctgtgtaatcatgcatattaagcggcagtttttaccgcttgaaggtcgtcgtagttaggtgctcagatctggcgcttttcaaggttagaggaagtgattgaagctaggagacatgatttcagctaggtttagtttgtggttcattggagacaaaattcgccaagcagatactgtagtacacgttgaattttcgtgatttatactgagaattgtgctttccatctggaaattccccatctgaatatggctagctagagatcgtggctagctagtagctctccgtgccacggatcaataaagtgttaatcgtgcgatgaagttagctcaccgcttgtcctctcaacactgcagatccgtcacactgcaagttttgaaaactgaactgtaagatggcatcagcagagctttcccgtgaggaaaatgtgtacatggcgaagctcgccgagcaggcagagaggtacgaggaaatggttgagttcatggagaaggtagcgaaaactgttgactcggaggagctcactgtggaggagcgcaacctcctgtctgttgcatacaagaacgtcattggagcccgccgtgcctcatggcgcatcatctcctccatcgagcagaaggaggagggtcgaggcaatgaggaccgtgtaacactcatcaaggactaccgtggcaagattgaaactgagctcaccaagatctgtgatggcatcctcaagcttctcgaatctcaccttgtgccgtcttccaccgctcccgagtccaaggtcttctatctcaagatgaagggtgactactacagataccttgctgagttcaagactggagctgagagaaaggacgctgctgagaacaccatggtggcatacaaggctgcccaggacattgctttggctgagcttgctccaactcaccctattaggcttggactggcactcaacttctcagtgttctactatgagattctcaactcacccgatcgcgcctgcagtcttgcaaagcaggcttttgacgaggccatctcggaactggacaccctgagcgaggagtcctacaaggacagcactttgatcatgcagctccttcgtgataacttgaccctatggacttctgacatctcggaggaccctgcggaagagatcagggaggcgcccaagcacgactcgagcgaggggcagtaaagccggctttacgtgcctagaagctagtacctagtgtttgctgctgtctaatgacactatgcaatgtgatctggaccctggtttcttgggtgcgacgcttgtagcagccgtgttatgattatttgtcgggaaaatttgggggctccccatatgagatgctgccgggcaagacctcggcatcccacctcgtttcaggcgggggacgctggagcgtggtccggttgtgttgggaagccccttaaactgttgtcgcttgcattttaaccttttcatcgccgttcagtggtcctaaatctatggctcgtctcagtggtctagtatatgttttcttggttctctcttgattcctcacacggtgagtgggaccgttcgcatttgtctgtcccatcccatcttaacggtgaatgtgttttgtttggtgtctcgttctgatgtgaatttgcagcatctcgatttcatcttcaataagatagtattatataaatactgtcctttcagattagactattaaaaatatattctaacaaatc

SEQ ID NO: 39799 - DNA, 901 bp, Zea Mays
gcagatttttgaagggtcaagccatgtaaacgtcagtcatgttatccacgagctctcatttggcccaaagtatccaggaattgacaacccactggatgatacttcaaggatacttcatgacacaagtggaaccttcaaatactatatcaaggttgttccgactgagtacaaatatctgtcaaagaaaatattgccaacaaatcagtattctgtcacggagtattttcttcccattcgcccaactgagagggcctggccagcggtgtacttcctgtatgatctctcaccaattacagtcaccatcaaagaggaaagaaggaacttccttcattttataactcgcctttgtgcagttcttggtggcacatttgccatgacaggaatgcttgaccgatggatgtaccggcttgtcgagtcagtcaccaactcgaagaccagaagtgtactgcggtaactgcacaattcatgataggcggaaaacagctggtagatgcatgccctgcgatgcttcaaggctgtccgggggagtagcagtatttgaggaaaggtcgatgaaatgaagtagtagcgaggaaagatgtcatgcttcaactgccaaggatcagaagagttcgtgagtcgttactgttgtgaagcacgtcgctgttgtagtgctgtatgatttatttctccgtcacgagtcatgattaacacaaacgaggtacagagactttttttaattcctctgaacattgatcattgtgatatagagcttctccatatatatagagagctattatatatatagtgctgtcaaggacgaacatttgtataaacgggactgggattagaatccctcatttcctctttttttattataaaaaatagagtttgtatttttttattttatgatatttcttgg

SEQ ID NO: 39800 - DNA, 1983 bp, Zea Mays
tcttacaccacaggagagcaaccgtttagagacttcgggtaagacacgagcccaataccacggccctgccagcgatggccacattggcgccaccggcggtggaggtggagccggaggccgatgccatggccctggcgtcggaagccgcggcgcctgagctcccatcgtcgcattcgcagctcgattttttcaagaccagagttcaattattgtgtgaaagtaacacgagagattttgatgcttgggtatcattaataaatgctgcagagggaacatcagcagatgacatagaagttatgagcttggtataccataacttcttgttggaatttcctttgtgctacggttactggatcaaatatgcagctcataaggcacgactatgcacaaccagatatgtaatggatgtttatgaacaagctgtccatgctgtacctcattctgttgatatttgggtcaactactgtgagtttggtatatgtgcatttgaagaacctgctcatgtcagaagtttatttgagagggctttatctcttgttggaaaggactatttgtgttatcacctgtgggacaagtatatagaatttgaaagctctcagaagcagctgattcatcttgccaccatttttatcaacacactaaaatttcccacaaagaagttgcacatgtattatgaaagttttagaaagtttgtaacattattggaacaagaggtgacaagttgtgttgctgaaatattatcagaaaaagtgcatgcttctgaaatggtaggcactgaaggttctgaattagatatatcaactattattgctgacttatttgaccaaaaaggtgggcatcttagtcctgaagcattgaagcattacttatctgctggggagaagctctacaaaatgtccagcaagatttacaaagaaatctgttatttcgaggcatccataaaaaggcctttttttaatgtcaagacacttgatgatgatcagcttgaaaactggcaccagtatcttgactttgttgagaagaatggggattttgactgggctgtaaaactttatgagaggtgtttgatcccttgcgctaattattcggaattttggatccgctattcagagtatgttgacgctaaaggtggccgagaaattgcaaaccatgctctgggtcgagcatcatcatgttttgcgaaggcaggttaaagtattgaggaggcaggtaattgctcaagacagctgaagcctcatgcatgcatgggggcctagcaccgaagtgctcgatgctctcagaacaagttgatttggtggaagagttagggaagagtttacaaacacaggctgagtactgcgcaagaaacatactgtctccactagaacagtggtccaggctcttgaaggatggcattggatcagtgacatcttgacacctctttcctgggctgggatccaacagtttttgctgttatgggatgctgtaagaagagtagtgttaacacaggaggctgatacacatatctgactgcatacttcttctggtcaattctcctccaagtcttgttacaaggccttttttatgggatccattacttttgaaccttggaagaggctgtggaaatcttgggctcctccaaagtgtaagtttttcttgtggctggctattcggaataaatgttggacatctgatagattggaaaggagaggtctggaccacccagagtcttgccttttatgtgatcaatcacaggaaaccatccagcatcttttgtgtacctgtgtctttgcaagacatttttggcattccgttcttttggccttgggtgttggtaatctctctccgtctggagatgagacctcctttgccgattggtggcgaaaatcaagtaagaagattcataaaagcaagagaaagggtatgaacaacatcatcattctgggggcctggtgtttatggatccaccgcaacaaggcagtcttcaatggggagaccccttcg

SEQ ID NO: 39801 - DNA, 760 bp, Zea Mays
tagctaagcacgcatgggatggacttactgatgtcacagctaaaaacatgacttgcatcataacccgacatagtttgtatcatttatatttctgtgagctcttcaggtaaaattcattttatcccaagtttgacgtggtcccactttggtggaagggttcaggtatgcaatcacaaaagcttttgttgtagcttttgtgatgactttcttctctgtgtttgacgttcctgtcttctggcctatactcctctgctactgggttgttctctttgtccttacaatgaagcgccagattgtgcatatgatcaaatacaaatatgtgcctttcagtatcgggaaacagaaatacggtgtgaagaagagtgtcgcaagcaccagttcctcgaaagactgattatgagtctacctcagtaggaacttggcaggggaacaagatacggtggatgatgatgtgctaaatacctaagtgtaatactccattcatatctagatgtagacggatattcgctcctgtttctgactctgggctcactgtttaattcgatattgtgcttagctccctcctatgcttgtatagcgaattccgcatctcagataaattatttcgtttatttactagatatctgggccccgaaaacaataacctccatgctctcagcgagtttcttggttgtgagttggagtgaattaggcgggttttttttataaaaaaaatcaaactgaacagaatgctaaagtttagacgcataacgtttgagcc

SEQ ID NO: 39802 - DNA, 166 bp, Zea Mays
gatctgagacggccaggtgggttcctcctcataaggtaatcagccaaatatagtatgtggtatggagttcatatttttgctacttttctggtgcgacgatgtggcggaggcgatggcagggcctagaacggattggtcgtcctgctctgtgttggaagttatgtga

SEQ ID NO: 39803 - DNA, 997 bp, Zea Mays
agtccatgacaaggggctcggttagtccacagccctagaggctgcagctgcacacttctcttctctgttttcgccggttaaactttccccacttgttgctggccttcgaatctgtggtttgtttgagcttggaagcgaagaacagggaagcaaggacatggatgctttcagtgcagtgatggacaaggtaaagagccacccagaaatgatggagaaggtaagtgcagtgatggacaaggtgaagaagagccacccagaagcggtggaaaaggtcaaggacgaggtgaagagccttgctgacgctctccacctgcggagacatggatccaaagataaagaacctgagtctgaagagaaggccgtagaaggcgaggcagcgcagagcgtcgaggaggaggagggtacctctgctgacaagactgcagaacctaatgtgttggagcaggccgtacaggagattcaggctgtcgccgcagctttgcagcagacagcacctgaaactgaaactgaaattccagttgagactgctgctgctgctgctcctgaaactttggctgaaggagacaagcctgaagaaacaaacagggatgtggagaaagacgacccaaagaagcggctcgatttcgccgggttcttcgccatgctgtttgagaggttctgctccccggccaacaagaagaaagactgagtgattgcaggtcagctgtggatttctcgttttgtgatcttggacgtggaaattacattttactgggtggtgtacagtctgcacttgtgttctattaagataaatctgctcttgcttttttactttcttctggtgcaatgactacagtttacttgatgtatttattgtcgcccttgtggaattgatttagtttatgtgaacgattgatttattttgggttaagataatgcagtgagtgtgtgatgccttgtatggacatgtgagaaccgattttgctcattgtgaacaaaattttagccctactcaagc

SEQ ID NO: 39804 - DNA, 3084 bp, Zea Mays
catttaataccccgaacggaggttcaaacattcgatgtgatagaggctaaattttagcaggggcaaaccaaacaccccctaagtttattcggcaggccttccatgctcaccaatgcattgcctgctacaactacaagtttattcgacaggaatttgatttcaaacaacggcaaaatgaaatcaataaaaggaggaggagaagaaaataatgcaggacgtggagagtggagcaggtcaaccacccagaccactgcaccgcaggctccatcccaaagtactccaaatcaaaagagccgcccggcacaacaagctgccacctggggcccccaccacatccacctccggcgaggcgatgaagcccatcgcccactcactccacgccgccgtcgaccgccgctggctgctccctctggccgttggctccgcgctctcgctcctcctcctcgtcgccctcaccaccttcccctcgccctccgcgccctcctcctcctcagcgctcttcgtggagcacaagctcgccccctccccgccgtcccccgccgcctcgctgccccgcatcgccttcctcatctccggatccgcgggggacgcctccgcgctccgccgcgtcctcctcgcgctctaccacccgaggaaccgctacatcctgcacctcgatgccgaggcgcccgactccgaccgcagcaacctcgccgccgacctcgcctcccaccccgccatcgccgccgcggccaacgtgcgcgtcgtcgaccgcgccaacctcgtcacctaccgcgggcccaccatggtcgccaacacgctccacgccgccgccgccttcttgtggggcgacggcgcctcgcactgggattggttcatcaacctctccgcctccgattacccgctcgtcacgcaggatgatctgatacacgtattctccaagctgccgcgcgatctcaacttcatcgaccacaccagcgacattggatggaaggagtttcaaagggcaaagccggtcatcattgatccagggctctacatgaagaagaaagccgatgtgttctggattccgcagaggcggagtgtgcctacagcattcaagctcttcactggttctgcctggatggcactgtccaggccctttgtggaatactgcatatggggctgggacaacctacctcgcacagtgctcatgtactactcaaacttcatctcgtcgccggaaggatacttccacaccgttgtgtgcaacgcggaggagttcaagaacacgacggtgaaccacgacctgcactacatctcgtgggacaaccctccgaagcagcacccgcactacttgacggcggaggacctggaccgcatggtcgccagcgacgcgccgttcgcccgcaagttccacgaggacgacccggtgctggacaggatagacgaggagatcctgggccgcggcgcggacgtgccgactcccgggggctggtgcgctgggacgcgggagaacgggagcgacccttgctcggtggtcggagacaccgggcttgttgtgcctggccgtggagccgcgcggctgcagcggctggtcacgtcgttgctgtcggaggagaagttccacccaaggcagtgcaagtaaacctgtgcttctacgttgctgttgtactaccacacccacactagtcgtctgtctgtagagccctccctccctccgcattacatgtacttgatcgtccggccatgttgtgatcaatatattttagcttagtttgagctgtccatgttgtgatggacgccgtcgcagcttgataggaattgctgacgacttatttgttcagacatctgaatatctgaacatctgaatgttcagatagcaagtggtagactggagatagcaacatttggaatggaaggatatgcatgcatgggtgagattgaatcttaggacagaaggagggattgtcgcctcaacaaggcaagtcgttatccaacgaactaatcaaagggggatttggtggtgggattgcgacttgttcgtcgtccaacccatctctctctctagaacccttgacgacaagttgggagtccttccaacgcggcggctcctttcgaccaccattgactacatcagacatacatagcttccttgcgtccgtcgatggggaccaccaccttgtccgttccgtttcttccttctctagctcacatcgaccaggtggatggcgcagccgccgccgccgccggagatggagagacctgctgcttccggggcgctcatctacgccatggtggcgcggggcacggtggcggtggcggagcacacgtcctacacgggcaacttccgggacatcgccgcgcagtgcctgcacaagctgccggcggggaacaaccggttcacctacacctgcgacgcccacaccttcaacttcctcgtcagcgacggatacgcatactgcgtcgttgccaccgagtcggctgggcggcagatccctatggccttcctggagatgataaaggaggaattcaacaggagatattcaggtggcgaagcaggaacggctacagccaacagtctcacccgagatttcgggcccaggcttagagaccagatgcagtactgcacggatcacccagaggaagtgagcaagctgtccagagtgaaggcccaggtggatcaggtgaaaagcatcatgatggaaaacatcgacaaggcctttgatcgcggacagcagatcgacgggcttgtcacaaggacggagcagctccacgacgaggccgttgatttcaggcggcaaggcgtgcagctgcggcgcaggatgtggtaccagaacatgaaggtgaagctcatcgtcctcggcgtcgtggtcgcgctcatccttatcatagtcctctcaatttgccatggcggatgcagcaagtgattatttttttttttaaaaaatgtgctggtgctggtcttttgctcgctacctataaacatatctaatttagagattctacttttttactatatatcatcagagtcactttcttgctcccctctaacctagagaacttttctcggcaagatgtatttacttaaaaaaaagatcatagtagaaactactaaagaccgtg

SEQ ID NO: 39805 - DNA, 2074 bp, Zea Mays
agttattactcaaaatccatgccattaaaaaggacttcaactccaagcggaacacttctactcccgttgttaaacggcactaccaacgaaacaacgaggaagaaggccgggagaggaaatcctttggcggcgcgcgcacgcgcggcagacacgtccacatccactgcagcgacgagccagccggtccgcggtcagcagcttggcagcagccccactctggctcccccctccgccatcactgcgcttgtgcgcgcgcacccacccccgcggcccgctcatcacccgcccggtcccgccgcctatttaacgccgcccccaccggggcactcggccctctccgtctcagaacgccccagccttccacctcgaactccgcggcgcccagcgccctcggtaaccgccccccgccccgccacagagacaggtcgacgagacagacaaaggccggccgccatgggagaggacaagaaggcgggcaacaaggacgccgccggcggcgacaagaagaaggacgccggcgccggggccgcgccgcagcccatcgtgctgaaggtcgacttgcactgcgccggctgcgccaacaaggtccgcaaggccatcaagcacgccccaggtgtggagtcggtgacgccggacatggcggcgggtaaggtggtcgtgaccggtccggcggacgcggtggagctcaaggagcgcatcgaggccagggcgaagaagcccgtgcagatcgtctccgccggcgccggcccacccaagaaggagaaggacaaggagaaggagaaggataagaaagcggacggcggcgagaagaaggcggacaaagagaagggcggcggcgagaagaaggccgacaaggagaagggcggcggcgagaagaaggccgacaaggagaagggtgccgacaagcccaaggaggagaagaagaagcccaaggaggagactgtgacgctgaagatccggctgcactgtgacggctgcatcgagcgcatcaagcgccgcatctccaagatcaaaggcgtgaaggacgtggcgttcgacgccgccaaggacctggtgaaggtgaccggcaccatggacggcgccgctctgccggcgtacctcagggagaagctcagccgggacgtggaagtggtggcgcccggcaagaaggacggcggcggcggcggtgacaagaaggacaagggcgcaggagacgggggagataagaagaaggacggtggcggcggcggcggcggctccaggcggctactacggtgccgccccaccgcccaaccaccacgccggcttctaccccaacggcggcggcgtccattacccgcccgcgccagcctacgcgtacggccccacccacctccacgcgccccagatgttcagcgacgagaaccccaacgcctgctccgtcatgtgaactcgctcgcttcgccggtttgccgccgccgccgcgccttggcacccccttcctccgtgtgagaccaagaaccatgggcttgtcctggattagcggtgtctttagttaaaattatcagtgagtagtagctagcttaagcagtgctccgatccgagatcagttcttccagcagacctgtgtaaatgagagtctcgccgccccgccccgccccgccccggtgtaacgcatcgtcatgtgtaaaatctatccggacccgataaagttttgcccttctgtcatcgctaatcgccatttgcgacgccgctgatagtgctcagttaacggccaagttggacgtggtgtcgtgtcgccgtcgacggtgaggtcagcgacgtcggtgagacccgcaggagggttcgagacgcccgcccgcccgctttggccgctcctgccgacgtccagacgggggtgatcatcgcgtcggcgctcacagcgtctgattgcggtaggataattagtcggggtcactagcgctaatgcgggttcttccttgtgcacggtagtgtgttgtcttgtgggtctggaatagctaagggcatgtacaacctagatacagctgcacggtactccaagtataagacacagctaaaacacaacataatacagtggtcatgtctaaaacatgtg

SEQ ID NO: 39806 - DNA, 385 bp, Zea Mays
agggaaaggcaggaacccacccagtgatccttacttcgccaacaaccatattgagcagccgtgattagcagtactgcatcccccaaaccatactctggacaagccctgtttccccgatcaaaccaccgcgtgtgtccggtgaccacctcgacaacacctcggcttcacgtgggcagacgattgtgaaaacgaagaggaagtagaggttgaagaggcaatggcttcatcatcaccaccacctgaggaacatcaagcaggcaactgtttctattttgatatctgcggaaccgagcctgattcaccagtaacacaaggcaagccccggtgcatttgccacctccttgttccttttaaaatctttctcacttacttgatgcattaggtg

SEQ ID NO: 39807 - DNA, 1367 bp, Zea Mays
gatgcatctaagaaaggattccttgctggatgcaaaaaagtgattggtcttgacggttgctggttcaagggttcaaacactggccagctgctttgtgccattgggagagatgcaaacaaccagatgtatccaattgcatgggcagctgttgcaactgaaacatatgattcatggtactggtttctaggattacttcaaaaagatctgaacatcaacattggaggtgatggttgggttgtcatatctgatcaacagaatggtctattgaaggctgtagacgaattgcttcctaacgcagagcacagaatgtgtgccagacacatttatgccaactggaggaagatttatacagacaagaagctgcaaaagaagtggtgggcttgtgccaaggcaccttgcagagttcttttcaacctcagaagggcatggcttgcacaagcttcaccagaaggagcacaagatatgatgaagacatccccagagcattggagcagggctttttttcaagataggggctaactgtgattcagtggataacaacatgtgtgagagttttaacaactccatcatggatgctaggtactatccagtcatttccatgtgtgaagccattagaaagaaggttatggtgaggatacaagagaatagggccaaggctgagaagtggacaggaacaatctgtcctaatatcttcaagaaattaaaaatcaacattctgaggtctggtagttgtgatgtgctgtggaatggtgaagatggctttgaggtgcaagagaaagaagacaggaggtacattgtgaacttggttggtagaacatgtacttgcagatattggcaactctcaggtctgccctgctgccatgctattagctgcatctacaaggcatcaaagctgctagatgatttcactgcaccatgcttcaccaaagcagattacttgaagacctatgcacatgtcctccagcctgttgagggccaagctaactggccaatttcagacatgcctagaccaaaaccaccagcttttgtcaaaatgccaggaaggccaaaaactgaaagaactagagaggtgggggaagcacctaaggggactaaactaagcaggatgggcattaagatgagctgcaggttgtgtgacaaacctgggcataactcaaggaaatgcttcctaaatccagaaacaggaaagaaaaaaaatgctcacattaaaagagatgcaaaaaaaaaggaagagagatgaggcatccacatctgcaccagacaggaacaaaaggtcaactgaacagagcacaacaagggttcatgtgagcacacagcagagtacaagggggacaaggggcagaaggaccacaagggggacaacgatg

SEQ ID NO: 39808 - DNA, 1382 bp, Zea Mays
attaagagagagagagagggagggagggaggctaaaaccttgtggtgtcctgtggtggatggggtagcaaccgcaacatgcacaagctcactttagatggtgttgatgtgatgggtgaacgattggcacaagaggttattgaagaaatcaacagaagaccgtatatcaaaaagatatcttttgttgcacactctgttggaggattggttgctagatatgctattggaagactttataaaccacctaaacgaacatcagaaaatactccacaaactctggatgacaacaatataggtaccatacatggacttgaggcagtgaactttataacagttgcgtcaccgcatcttggttccagaggaaataagcaggttcctttcctttttggagttactgcaattgaaaattttgcatgctacatcattcatttgatatttggaagaactggcaaacacctctttcttactgacaatgatgatggaaagcctccattgctacaacggatggtggacaattggggtgacctgcaattcatgtctgctttgcaagcatttaggcggcgtgttgcatactccaatgttggtcatgatcgtatccttacatcactcctgaaattagcatgcagtaataagccttgtttaaagttttttccataactgaatgttgattaagatattgttgggtggagaacatcatctatcagaaaagattctgaactacccaagtgggttgattcaaccaacaagatttacccgcatattgtatatgaggaactatccaaagcagaagctcctgatcaatgtgctgacacagataactgcacactagaagaacaccttttacaaggacttaagcgcgtttcatgggaaaaggtggatgttagtttccacaatagtaaagtaagatctgcagcacatagtgtgattcaggtaaaagatcctgtgatgcatagcgaaggtgccgacgtcatacagcatatgattgaccaatttattctatagtaaaagccctggtctttggaaacagacctggaccaggatacgtcatttgctaactgcgggctgagtcaccagcctggtgagcacgtttatggaaatcccaggtataagacttagtctctgaatggtggatcaggtatatagttatagagggtggaaacacgtgcgcatgcctgttggttcatttagtcatatgtgatcatatacatgttgtacggtgcatgtaactttagtactatccttgtcattgtaaatgttcatttatttatagtattggtcttagattttagtaaagaaatcttttcaacggcttctttaattagatctttattgtttcttttttttttggctagccgaagatagaaaaaggaaaaatagaaaaaa

SEQ ID NO: 39809 - DNA, 420 bp, Zea Mays
ggggctataaaagggacccctaggcgcatggaggagcacaccaagcatcctttgagcattgttgatcactcacactccattcttgcgcacttgttcgacattcttagtgatttgagctccgttctagtgtgaaacttgtgatagtctcttgagctcaagtctgggttgtgtgtgtgcgtatttgctctgatctttgtgtcttgtgtgagttgctcattcctcccttactccgtgcttctttgtgaacatcaaagtgtaagggcaagaggctccaagttgtggagattcctcgcgaacgggatatagaaaagaaaagcaaaacaccgtggtattcaagtgggtctttggaccacttgagaggggttgattgcaaccctcgtccgttgggacgccacaacgtggactaagcaagtgttggac

SEQ ID NO: 39810 - DNA, 3021 bp, Zea Mays
caaactgctacgccgcccacttctcacccccaccccctcccggcctcccctccctcagtccctcctcagccagtctatcgtggcccctcgcctcgctcctctgttcacacacgagcgcactcccctgtctcggtgtctcctcccctctcgctctccatgttcgcggcttccaacgccacggccacccgcctcatcctcccgcgtccttcagtcccgttccgcgcactcctcattccccgccggcggggtcgcctccgccgcgcggtccacgccaacgccgtcgcaggtggcggaggaggcagcgagggcgttgcgaaggagccgccgcggacgctattccccggcgggttcaagcggccggagatccaggtgccagcactcgtcttacgcgtcggcaccgaggaggcgctgcggtgcggggatgaggtggccgacgccgtgtcccggggcgtgggcatcgtcgtgctcgaggccggagaggagggtggaggcagatcgtacgaggccgctcgcgctctcagggccacggtcggggaccgcgcgtacctgctgatcgcggagcgcgtcgacgtcgcttccgcagtcggtgcgagtggcgtcgtgctcgccgacgacggtattcctgctattgttgcaaggagtatgatgatgaaatcaaatgctgactccatatatctccctattgttgctagaaggatacaatctgcaaactctgcattaagcgcttcaagttctgaaggggctgattttctgattgttgctccaatctggtgcatctggagttgttacatccttagctggcatggaactcctcaatgacgatcttataaaaaaagacttcacaaaggtgggctcagctgaggaactcccacaagcgagttactcttctgctgggatgctggaagatgttaataatgtaatggtcctaactcgtgattgcgagaagactaaagttgctggatttacaaaattggatgaagaagtgataaagttgatagaaatagaaaagcctattctgaacgaagctatcactattatccgcaaggcagcaccaatgatggaggaggttgagcttctagtggatgctgcttctcgcctgagtgagccatttttgttggttattgtgggtgaatttaactcaggaaagtcaacttttataaatgctttacttggaaggcagtatcttcaggagggagttgtgcctacgacaaatgagatcacactactatcatattctgaggttgaatctgaaaactttgaacgatgtgagaggcatccagatggtcaattcatgtgctatttatctgttccaattttaaaggaaatgaatctagttgatacacctggaacaaatgttattcttcagaggcagcaacgactcactgaagaatacgtgccacgagctgatttggtgctctttgtcctatcatcagatagaccattaactgaaagtgaggttggatttcttcagtatgtccagcagtggaagaagaaagttgtatttattctaaataaattggacctctatcggaacagcaatgagcttgaagaagctactgcatttgtcaaggaaaatgcaatgaaattgcttaccgcagaggatgtcacactgtttcctgtatcttcacgctctgctctggaagccaaactttcatattccaaaaacagtgatggaaagcattcaaccgaagctatgtataatgatcctagatggagaagcagcaaattttttgaacttgaggattacttactgagtttcttagatagttcaacggaaaatggaaaagaaagggtccggctgaaacttgaaacaccaataggcattgcagatcgattgttaacttcgtgtcaaaggctggtgaaactagaatatgaaaaggctgttgaagacttagcatccatcaaggatcttgtttatggtgcaaacaattatgccatcaaacttaagtctgatagcagttcctggcagaaccagatttcgtctctcattgagagagcaaaaggtcgagcagttacactcatggaatctacacttcagctgtcaaatattgaccttatttttgcatacacgatcaaaggaaaaacaggcagttccatgagagccacatcatttgttcagaatgatattctgagtccaacccttgatgatgctgtgaatttactaggtgactactcgacatggttgagttctagcaatacccgcgaagcaaatgtatatttggagtgtttctgtgaaagatgggatgcactggttgctccggaagaaagggctctgttagatccaaatgggcttgttaatgaaggggagaaactcaccataaaggcactggaaggcttcaatgccagtgctgccgccaaagattttgaagaggaaattcgagaattggcttttggaacatttggagggctaggtattgctggactgtcagcttctctgttgacatctgttttgtcaactacccttgaagatcttcttgcccttgctctttgctcagctggcggtttccctggtcggcggaagcatgcaatagacaagattaacaaggctgctgatgaactctctcgaaaagttgatgaagctatccaaaaggatatctcacagagtgctaataacctaatccgcttcgttgaggttatcagcaaaccttaccaggaagcatgtcagcgaaaaatagattggttacagggcgttcagggtgagctatctgctgtcgagcgtaagctccaaactttgaaagttgaaatccaaaatcttaatggatcataaggtttcatttcaacttgtttatttgcaattattttttggatactaatagtttttgttggtttatactgcgttgtgatgctattgagttgacgtagtgcctttcctgtatatgatgaagtctgaaagtgtaatatgtgttgtaaattcagaataagtgataaactatcacatgataattacacaccttgagaaccgagaaggatgttttgaaaacttgcctttttgataattttacaatatgatgtgggcaagaa

SEQ ID NO: 39811 - DNA, 3042 bp, Zea Mays
accagcaaaaccaccacaacacccctcgcactacgcgcgccgccgccgccgctagcactggtgagacgagtacggaggagcagcacagggatggacggcggcctcgaggatgagcaggaggacccaagcttcctcaaaccaccacagcacccctcgcactacgggcaccgccactgctgtcgctttcagcgtcggtaagacgagtagggaggggcaatgcagggatggacggtggcctggacggcgagttggaagacgcgggcttcctcgacgagccccgcttcacgatcagcttctcccctccgctaatggaatgagtatttttaccggttaaagtttggttaatgaaggaatagaaaatggggttgtgcaatttcaagactcaggtgtccatggattggagaaatttccatttagatgacccatcaacatcctacattgcctggtgatcacacctgtgtcacctgtatgaatgttggtgggttcgacttgcaatgttgttacaacctgacttgactaatgctcttactcatgcttacaagtaatttgtttcattgggttttgcatgacgtctaatagaatatgttattctgtattcattgtattagtatgttgcaaggggtcataataaatcgggtagcggtaaaatattgtatgactacaagattggcgtcttgagtgcattatgttataatttaaagttcatatttccaaccaaagcaaaaatagtttatgaagcataatagtttttccaatactaaattcttgagtggcatatgtgaaagtactatagctaagacgcgatgaagtatggatcagtgtttatttaatcatttacgatgagatgttatttgtagtgttagttattcatcttcaggttgattctgtacctaactgatatatgtctgtgtgttttcagaaacccctcatatgcaaaagcttaatactgtcaaggctgctacagtggtcataggttagaataaatccatggtaaacttgaacccctacaaactaaagaaaatgccagaatagagaaagtttaagcctagagataagtgagtcaaatccataaaattggcaagtcaaatcatcagtatgaaatgtaccaaggcatattgggtgtagaactatcaaaggtacctaatatgttttgtgtaagtataaaagaaattctggtagaggataacaagaaacatcaagcattgaggccaaggatgaactaatatgatgggcatctattttaagaagctcgattttcagacatcaactatcagttctaggatacagaagactctgaaaggccgcaagaaggtatcaacgacatatctgataactaaatatatgcaccaactgtaggaaaatagtaaaggaaggccctaaatgcccaaaattggccacaatatttcaccgtcaggtctacctactctgttatagtactgtccacactcaacagccgatctttgactgctttagttgcccctcctgttagtttaacaattctgttgagtgttgactccttccatgaattggtcacctagaaaaggtagtaaacatgtgaatgagtgggttgaagaggatgataattacctcaattatatttctgctttcataacttagtttactactttgtattaggtcaactttcagcctctgttaacaacacaattgaccaagagcggggatgagtagaagaggatgatcctggtgtgtatattactgttcgagcattgcatggtagcatcagagaactacgtaacgacgaggctgagcgacaattccagtgtcccaatgtgtgacccgagttcaactcctctttcgtcgacctcgagatcccaggttgaataagtgaagtggatgagtcagaaagtggaggagacagtgtgcaggagcagcctgtttatgtggccgtagtggatctcgcatcctgtttgtgagcttggtattcctcctgaaaacatcactgcaaaccaattgttatttggcacattgggggagtacgccggatttgatcccacagagcccacttcacgcagtgggggtaaagcaaaagcagtgcagcaaataaaacaggtttagttaaactgtatatcttttgcttgcaactttttaattcttactagtgtgctaacctttgtttgtgttcacgaccatggctacaagacaattgttacgattagtgatggcgcaactgatctggaggctcggcaacctggcggagcagactgtgtgccgccagagctagcggagggaggcgggtcattcgatttgccatgcttaggattggagaatcactagagtaatagtatatacatggtggggagtgaaaccaacagaggaagaatccgttcttgatcaaaattagtcggctgcttggttcgtcgtctgcgtgttcgatcggaggttggcgacgccttggcgtggccgctttccgcaagaaagcaaggaaattgtgctgaccgccgctaatgcgctggatatttctgggagtggaaacgaaagtgtactctgaatttcaagttcctgtcaaaagtaagatcctctgacgaaggtgtggttgtgatcatgcataaactaactgttgctgccacatggatcggagagggagatcgatccacagaagatggtatcatttgtcaagtgtatgttgggacttgatgctgttgtttgggacattattgggtcgtcattgttggagaaagttgtgtatctacttacagaattggatgttaatataacatgggaagatattcttcaagataaacacaacaaaggtatatttgacatggagcttgaggatttggctgaggatgaacataaccttggccgcacaagtgtggagacttgaattcatatatacttagttaggctcaatgttagcataaacagttgatgaacaagttttcccattagtattttagtttgaatttagagtacaattatgtatgagttatttgacaatgcttatttatgagatattgaatgatatttatctatattgtattaattatagtgttattaaatatatgtgtttgtatttttctc

SEQ ID NO: 39812 - DNA, 1108 bp, Zea Mays
ctgtgctctgttctgatattgtgttgttaatatatgttctgatattgtgctgttaatatgtgttctgatattgtgttgttattatgttcaaattttagaaagtatgaagaaatatgcccacctctggtagaagaactctgttatattactgactattcatacaccaaggaagaggttttgcaaatggaagcttctgttctgaataacttgaaatttgagatgacagtacctacagcaaaatgtttcttaaggagatttgtacgtgttgctcaagttcctgacaaggtacatgtttcactgttttgcagttcctaccaattccatgtgctggttgatttttttttctttctgcagggctcatctctgcatcttgagttcttagtcaactacatttgtgagctgtcacttctggagtacagcttactttgctatttaccttcaatgaattcctcactttcttactacacgcggtatacaccatctgagttgcgtggttgtgtaagggtactgcaccggctcttccgtttgggccctggaagcaatcttcctgcaattagagaaaaatacagtcagcataagtacaaatttgtagcaaagaagtactgcccacagtcaatccctactaagttcttccaggatctgacaagttagaagccaagattacttctagttactcaatgaaaccttcctgaggtacttagtgtgatactatgatattgatttgacagatagttttgaatgcaaggcatgcgcgcggccttgcgtttagcagataaacaggttcaagtaaactgtatgtcacttgtggcaatgttgtttcagtgttgtgctttgattgcttccagcatcgtcttatacgttgctgttgtggtcttctcacgctgtctagaacttttattgtatagttctggaccttgctcataacaagggtagatagtttggctaaagataaagtgtactcattctctcattgttatctacgtgttgcttctgtattctgaagattctgctctgaaacccagcaaatgtattatcaggcatcagaatagtagagtctgagtcaatttttgctattgggaataagtgggagggtaactttggaaagcaa

SEQ ID NO: 39813 - DNA, 565 bp, Zea Mays
atggccagcgtagcgtgatgaacgagctgagagagaggcatgggattcggcatcctaggccgagcggcgaaggaagacaagctgtagaggcacgtccagatgcgagcctgtggagctgagaaacgacggcgtcagcgcgagctggagctacagggaggcgagggacgccatggggacgagcaggggcggccagcgtgcagggagcaggtgctgcggcggccgacaccattgcagggtcgaggacggtgccctggccgagcagagcagtttgaggtgaggtgcagaccaacgccgaagatggggcatggcgaccggagatggggaagagacgaggacgacctcggatccggcgagcagagcacacggtcgtcggcaacaggggagttagacgtgagctgggtgagcacaggggcgagctagactggggcgttggagacaacgaacagagggtgaggagcagctgagagcaggggctgaccggtggtcaaagcttgaagaagacagcacaaactgctcacaggcgtacggtatagaagtcactagagttggagataggaacgactgg

SEQ ID NO: 39814 - DNA, 3512 bp, Zea Mays
ccgagaccccgacccaccccgcctcccccgccgccgcgctcgcgctcccccgcgacagccgccatacgccctatctccgccgtgcctgcgcctcctcccccgcccgcccgagacccgccaagtttcccttccttgcacggcgagatccaccatcggcgcccccttccctggcgagccacagccgtccatgttcctggccaccggcgacctcccttctctagcccttggcggcgagccaacacctcctcccatggctgccccccagaccccagtcccgtccgcgcatccgctcttccgtcagcgacgcacctattctcccctctctccccgacgtcgcccatggcgtggacggcgacctccctcaccctgcaactctgcacgtgtaagggccgtgttgcccgcctcctttccccacaccggcgcagccccctgtcgccgcggccccttccccaaacagcacggcaccacatgctccccctgccgcgcccgcactctccttccccaaataacacggccccacatcgctggttgcctcgcctcgccggggacccagcacgatggtcagggagctggtgggtgggggagacagggaggagcggaggaggaggtcaagctcaacatggacattgtgttcgtgacgctgccttccccaccgacaccaacgactcactccagaacccggatctggggcccttcctcctcaagccatggtattgggcgagggtggcgccgcctcgcgtgcttgagttcgccgagcgcgccgccagggtgctcgagcgaagaggtgagggcaccgagctcgagctcgccatgaatctccacatcgctgctggcatccactgcggactcagccaccaagccctgacattgtagccagtttcttgcaatcagaacgaatgccagttgatacaagtttgtggcagagatttctctgacacgccaatcagtcttcgatgcgaatgcttgttgctcatatggacttgtggttgtgataatgagttcatctccgtgcacatttgtcgtccttgtggttacagcagttaactgagtagtctctcttgactgcaaaacaagcaatctgttgcctctgctgtgatggtggagcaatttcagcgccaagaatgatatctcgcattttagattgtgtcagtgcagaagtattaacattgtttttctttgcataatcagaaaggatgaggtcccttagtgcacactcaaccttcaaccactgttcatcattcagagatggccatatatgatgtgtttcagtaataattgttttgtcaggtttgagcaacatctttgccttctcattattcacatgaagtgcacgtagaataagcacaatgtgggagaatgttgtgtatgatgatatacttttcaaccaatcatcatatatattataaagaaccatctgtggttcagttgccttcagtataagatcaccaaacttctcaatcttcaagcaagcctggaaaggaagctgcagctcactgcccttaataacaatgttagggaagtcaggtagatggacctccaagggatccaacatgcccttccttgtcacaacaatttgctttggctgctcttctacaggaagagatcgaaccaatgcagcaacctcctcagcggttttccacttggccagctgcccaagacgcttttgccccgcccatacacttgtgtggataacctgcacattattatccatactcagtttaaacctacctatgttcagggttttacagaaaaacaaaatcacatgaaaactagagcagaaattcgaaaagaacaaaccttaagaaaaagttgacccgttcttggattgaaaaatgaaaatagcaccattaattggtttggtggtcaagttaccctaaaatgttttgtgaatagtgactcgatacacatttgtatcatccacgaaccatatgatttgattgctgaatatctctccatagttctgtgaagacaggtatggttcatatattcaaatatccaaacctcatttggagttgtgataccagcaacctttgacatcgattcaagatgctactggagtgttattcatgtgagtgtaatttagtacatgatccaactggtaacaaactttatgatactagcatatcacataatagatgagattactagaaacagctcatgttattgaatatagaaatttcagttctattgtttttacacaaatttgtttgtgatgcttcaaaccgctaatgattttttttaaaaaagttgtgcaatgagcatatcacataatatatgagaatcttaggaataaaccaagttgctaatgagtaaaattttggctttgctttttaaaaaatatgggttcaagttgttcctgacagatgccactgcacaaatggacgttgacacgttgtagtgatcacactgtcacgagagctgagcaaactacagcctgcaagagctacacgtggcatgcttgaccacatcatggtggagaatgcaagtgttaaagttgcattgaatcgcattgccgttgtttctgtcctggatgcacataccctgtcagtgatgtcttatgaagcttggaggctcatacatctgtttctgttggctctctctagctatatgcagtggagctgctaatatgcatgaagtttgggctaggtgagcttcctctttcacttttcaaaccagtataggtattggccgatgtcaagaagacaaggccggcgacgagaggacgacagcgtgcaagaagagaaggcccatgttaggcgcaactataggtgcaactgtgcaaggataggcaacaagtgttcaacaatatgtctgtggatcaattgacctgcatttcagcttttagttgaggatcaaaatctcgtgtcgttcagggccctcggtagagagacattaatgtgtcggcaccgtggatcgtcgcagttgtgggtcactgtaacggcactggtcacaggcaccatctgcctctgttcgtcctcctctattggcctcctcagcacctacagggtccagatggaaaagtttctataatacatatgtaacaaatacatactccttgttcaagagatcgtaagcaagattgtaaacggtatccaacgcagaagcacctaatatggttacagagtattactgatgggcttacctgcagactgcagatgttgttgcaaatgagttgtggagaaccgtagatgcaaatggttggagagcatcttctgcaccacacatctattggcctcacataccagctgaatctgagagcaatgggtacttgtgtgtccggtgcaacggcggcttgaccttacaaatcagtgttgtatgactaatataaaactctctctctctaaagtagcatagttcaccatgcaagttttgtgtattcatggcaacatatctgaaagatttaagattacttctaccttgattttgtagatatgaaatgttgttgtcattgcacgaatcattaatgacttgattttgctctctatatgctatcttagaagtttcagagttca

SEQ ID NO: 39815 - DNA, 283 bp, Zea Mays
gtgagcagcgagagaatcgggtagccgtcatcgccatcccttgtggatgtcaccgttcggggaccaggaggagcatagttgagtgcgccgatgcgtagggcatagtcgtgggctgccttagtcgcactggggtgaaacctagccgcgcgtggcacctgtggtcgtgcatacggccggccatggcgccatggcaaatcaaggcggcgctaccggtcttcacaaggaagaagatgcactgggatcgtagatgtgtggatggatggcctagattgaagcaacaggt

SEQ ID NO: 39816 - DNA, 2481 bp, Zea Mays
cagacttcctctttcttccccttctcagcctttccctctcttctctgctctttgcatctctctcttgttcctcccttcctctctctaaaaaagggttctgatccctttctagaagctcctgggtttctgttgccgacccgagctccccaggggcgctcaggaggcgccgagccggcgaccgctccggcggatctgaggagccgccgcggtcgctttgcctccgttgcgatactgcacaggttccttgtaaactattgattgggaaacactctgaagaagagtttgttggctgcataacatctcctgaagctggtttgaagtttgctgataggaaagatcatgggcgctctctgtgatttctgtggggagcataggtctatggtttactgccgatcagatgcagcatccttgtgtttatcatgtgaccgtaatgtgcattcagctaatgctctttctcggcgtcatacaaggacacttttatgtgaccggtgtgcttcacagcctgctatggtccgctgtctagcagaaaatgcctcgctttgccaaaattgtgattggaatggccacattgcaggatcctcatctgccggacacaaaaggcagactataaattgctattcaggatgtccatcgtctgcagaactttctagaatatggtccttcgtttcagatattcctaatgtagcacctgagccaaactgtgagcaaggaataagcatgatgagcatcagcgacagtggtgtcagtaatcaagataatgctgcaggggacagtattttgttagatatagctagtgcaacacttgtaagtgatattggtacttgtgacaagcttttggtaggttcctcttcaggagctggagtgaacctacttccactggctactggtcaaacagaaacagctggatctgtggattccacaccagataaggattcctgtatgcaggttccctatacgccagataaagatatgttcagtaaggacagcatatatgaagatttttgtgtggatgacgctgaccttgctttcgaaaattatgaagaactctttggtacctctcatattcaaacagaacaactctttgatgatgctggaatagacatttactttgaaatgaaggaagcacctgctgggaattccactgagcagtccaagctgaagcaacctgcaaatagcaatgcggtatctgccgactctgggatgtcgaaccctggagtgaaaggtgattccagtgtttgtacccctttgaggcaggctaggtctagtctgtctctttcctttgctggtttgactggtgagagtagtgcgggagaccaccaagattgtgtggtatcatcattgcttcttatgggtgagcctccttggcagcctcctggccccgagggctcaattgctggaggtagtagagacagtgcactcacacgatacaaggagaagaaaatgagaagaaagttcgacaagaaaatcaggtacgcttctcgtaaggctagagcagatgtgcgaaagagggtaaagggtcggtttgttaaggctggtgaagcatatgactatgatcctctctgccaaacgaggagttactgaagcatatgatctttatccagttttaaattagcaaactgcaaccaaggctcgttgcagctagaacaaaagcactggcaatccaagctattgggccaaactgtgccttcgaaaagaaaaaaaaaggagaaagctgtcggcatgataaaatatagagaaatatttggatgttgcagaagtttttgagtgaggatcctcctttttcctcctgtacagtggttggaagcggtttgagtctctccatcttttgtgaattagcctgaatccagctaaacagacttgttgcattttgatctccattctgcatttctgctgactgccatcagtctacgtacacgggctggcggctgcggtgtttttggaggtgttcgtccagattagacaagatggctagatgtgatctgtgaaatatccttctattataataatgtaaaatttgctgggacctggatgtttctgctattatcaatgtgcaaataccaggtcgtagccaaactggtcgtcagtttgttctttttaagttggtgatggaacccatccaactggacagtggacaccaactttctgtgctcattctgtccaaaccaacctccaaactgactcgatgttagtactatttgtattatgtgactcctgagcaagtgagcttgtgctcaaacctcaaatacgtcctcttgtaccaaaccacgatattggagggtaaatttttgacctgttcctttgttgttgaaacttctggttattttggaaaaaacaaatgtggaacactgctttgtggcttttctgttctgcactgttgtactcagtcttgcaaattagaagacgatgtggcatttttagacatagttatgtatttagatatatactatgtctaaatacctggtgaaagaaatgtatctagaa

SEQ ID NO: 39817 - DNA, 2407 bp, Zea Mays
gcccgctgcggtttgttgctccacctaccaccgccggccccaaaatcccaaatccgtggcaccgccggcggccgcacccccggttgcccgcccttgacacccatcactcgaccccacccgaccgccctcgccgccgctccactccacaaggtgctccgccccagcaccggatccaacaagccagcctaggcactgctgctcgagccgactggccccgagacccgtggaggagaagaaagctgtggtagcagccagtgtgatgaatgatgtggcggcatgatccgaacggcttcttgttcttgtccttcccgggcgctgccactgccgctccttgtttgcatccttcctgcgcaagagcaatggatacatgggtgaggggagctgtgcttgaccaaagggtgtaaaatctggatcatgttttggacaaatgcatcgcttagatcaacaaattatactgtgttgagagtttttgtccgaagaaaatacccttgctggagagcaaatacagctgaacatatctgtaacagctggagctgtccttatcttcattagtcacatctctgggtactcaaaatatgcaattctactgcattagtagcatcacttggtagctgctacggcatcggcatagaagcacaaggagagagggaggggagagtaagagcgatgggggatcttgtcgtcggattggcaaagtcggtggtggagggggttctaacaaaggcccagtcagctattgaggaagagtcaaagctgcgtcagagtgcacagagggaccttgtgttcatcacaggtgaatttgagatgatgcactcctttctcaatgtcgccaatgaagagcgtgccaagaacaacgtggttaggacatgggtgaggcaggtccgtgacctagcctacgatgtagaggattgcattgaatttgttgttcacttggataaccggccccactggtggcgccgcttcataccatcatgtatgccagcatcggcactacccgtagatgcagtggtcgccgagatagagaagatcaaggtcagggttgaggatgtgagcaagaggaactcacgttacagcctcatcagtgactctggatccaagccagtaatgcagcaacaaccagctaccggccctgctattggcacaacaacgcttgacatgtttgttgagtcaagggacgccacgaaaaagcagcaaggcttaggggatatcacacagttgatcactaaagaaaacattgaccttggagtgatctcgttgtggggtacaggtggagatcttggtaagacatccatcataaggaaagcataccaggatcaagaaatctgcgaaaactttggatgtcgaggctggatcaagctaacatatcctttcaatccacataagttcctccagagcttggttactcagttctatacgaattcctgtctgcaacaaggaactactttagatgtagctcaactgaagaggatggtagcaaagcgaggaataattgaagaattcacgaagcaagtggatgggaagaggtacctactcgtcctggaaaacatgtgcacgatgggagagtgggacgctatcagggcatgcctgcctcacaggaataagggcaactggattatcgtgtccaccgagcaccatgaaatcgcaagtttgtgtgttggacattcataccaagtgttggagcttaaacagtattcagctgagtaccctgtatgcgtcttcttcaaggagagcaagaagactggaagagtaatatctagcagtggtgaaatattagaagatgaaatgagccacaggggaggccttacttatggtaggattcccacctctagaaaggctttagccagcagttggatggatcagtctacccttgttggacgtgagtcacaaatgaatgaacttcgtaagtatcagaccacggcccgtttcaaagattggcaagtgatgtctgtgtggggaattgctggtgttggaaaatctgatcttgtcaaaaatttgtactatgaaaggatgcttaaagaggacccaatgtttgacaagtatggttgggtccacgtgtcccatccattcaatttgagggacttctctcggaacttacttttggattttcactcagatgccgtgggaatcagagaccctattcaggagtgtcataagcttctaaaagaacatcagtgtcttgttgttattgatgatctacagtctgtggaagaatgggacttaatacgacctgcacttgtatctagacattccaagagtgttatcatcgtcattacaacagatgaaaaaattgccacgtattgtgcagacgatgaagaggtcgtgtttaatgtgaaatgtctagaagctgaagcatcctttgatctctttaaaaaagagttcggctgcactatccgaagtattcaatgtg

SEQ ID NO: 39818 - DNA, 895 bp, Zea Mays
gcgcggaccgtctggcccacagacgcggaccgtccggaccgcggaccgtccggcctcagggccggacagtccggcgctcaattctggttcgaacaccacgcgatcggccggtggctaccccggtggggtccggcgaccccggccggtggctgcgccttcacgcgcgcgagacaattttccccgccgcgtgctaccccgggtggggtccggcgactctggccggtggctgtgccttcacgcgcgcgagacacgcgatggaacggaacggaatcctcgggaaatcaaatcatcatcgcagaaaggaaatctagaaagagggactgcatctgaggaaggggggcaggctggtgcgtgcagcgtgcccgacagcgacgcgtgcgcggacgcgtgatccagggcgcgccgcgtaggcgtcggagcgaccggccctgcacgggcggcccacaccccccgcgccgatgccctttgctctgcgtctctggctctctgcccttcctggcttcctactagtactggaaaacggaacgaccgcgacggcgaaaggagagtggcgacggccggccaacaccgcaacggcatcggcatgtgcgccccatcaactctggcgcgcaccgagcaagcaactggccgcgtgcgtgcgcacggtatgggaacggggtggcggcggcggggcggccgtttgcccgctccccctctcggttgttcggtcgtcccatcccttcgagcggccggccgtgcgcacaggatcagctgtgcgtgctgtgccgtgtgcaccgacccaccctctctctctctcccccgaatcagcccgtacgctggacacggcgacgccagcagaggcggggcatcgaatcggctccggcagatgccgctcccttccattccagcctctcgg

SEQ ID NO: 39819 - DNA, 2749 bp, Zea Mays
cgccgcctcatgagtcatgacccttgacccgagctgagctgagcagcgttcaaacattcaaaccctagacgaggccccttgcaacggtcggatccattcccatataatatccctccgcccccgacctcctcagcatcccatttttgctctattcgccacccacaaatccactgcagccagcgcatcaggagaagaaggtaagagacgaggggggagatggaggcggcggccatggatttccacacgctctcgcgccgggagctccaggcgctgtgcaagcgcaacggcctccgcgccaacatgaccaacgccgccatggccgaggcgctccaggggctaacctcggtcgacgggatcgacgaaatcggcaccagtctctgtctcccgacgccaggacggtcggcgatgaagtcggcggcgaagatggtggccgtggccgtcgaggagcagcagcacggtagcccgctcccccgcggccgccgcgtatcggtgaaaccaccagaggccatccggatggaggttgaagagggggaggacgagatgaaggagatcgtgaagactcccggcgtggcgctgcgcagcactcgccgcggcactcgggccactcccgcgccgcttcctactccggtggcggcgtgcagtacgcgcgcaacagcggggaggaccgccgctcgtaagacgcgcgacgtggcgccgaccccagccacccggaggagccagaggacagcgtctcgcaaggccgcgggggctgttgaggtggaccgacgcgccgaagatgtatccgaggaaaagacgtcggatatgacgatagctttggatcaggaagctgaggtgttagcggccgcatcaaaggaggagaaggttcagcaagacgaaaagaaagatgtgaaatgtgatgacccaaaggaggaggacaaggtgcagcaagaggaaccaaaagatgttgcctcagatgtgaaaattgatgacccagagcaggaggaagttgccaataaagatgaggaatcggaggagggcgacgaagatgtttcggttaagagctgcaatgatcctaaggtggatgaagtggttgttgtcataggggaacaatcaacaaagtcccatgatgggattgtgaaagagcaggaacctatcagtgttgagaaatctgctcacttgacggtcatggaggattcaacaatcctaggtgtcattgaggacttggctgaattgtcacctgcaagggagatgcctgatgagatcattcctgttactgaagataatgaagtggccatcaatgaggagaccatcaaggaagatgattttgctgacgctattcagactgatcctactccaaaggagattaatctaactgctgcgggggaagataagatcattgaaggcaaagaaggtgctgatgataagatgccacaggctgctgaaactagtgaacatgatgaggacactgaatttaaagaaggggcagctgatgaggtgctgcaggctgagctggcagacaatgaaacaagtgatggtgaagatgaccgtactgaagtgagagaaggggctgctgctaagacgttgcagggtgaactgacagacgatgagactagtgaagatgacctccatgaagatgaagaatgggcttcagatgatgaggaaactgcctctagtgacgagagcgatgaaggtactgagtccaatgaagggagttacattgctgatgcagtgcagatgttgcagggaactgggatagtggaagtggccgacgaagatgcctctactgaagatgatttcagtggcgacctaccaccagagtttgacaatatcatgatattccgtgatgctgaaactgatagtgacagtgttcctccagcgctcgaggaaaaccaggctgttgcatttgcaaccaaagctgcagagtccctaggtgattctgccatgaatgcagagcattatgagggtcctgaggaggctgatgctactgaaaaaacaatgaaagtggttgaggacattgtgaagtccctggatgaatcctccttcaaggagggagaatcaaaggagacgcaaaagaagcagccgcaggattatgatatcatgagcctaataaagcttagaagcacgtacaagaaatgtcttattgcccgaaaggaggggaagaggcctcctctcgaggaggtggatgggaacgcctgcattgaccactgaacagaacaagctgtgtcagtcacaaaattttcgtgaggatggcagctgccacgacgggattgaatagaggaatgctctggttgtgaagtgataactaaggctaccttcaaggcttaatgatcaagggttaatgaaactgtggtttcagccaaccaacctgcaattcctgtggtttttgtccatgttgattaactagtacgaatgccaagttccttgaaagttatacaaatccgttaatgttcagatggcattcagcatgctccatgtgctgcatgccaacatatcattcggcaaattggcaatgcaaactagaattgctaacgcagagtgaattttctagccctgttcgtttttttttccgtggaacctgtttccctttgtatgtcatcgttgaatacaagcctttggacggcccagctcagatgctactcggcccagtttacgacggcctaactgcccaacttttttccaatttagttttgtgtttttttcacggtcctttacaatttcatttcaaaaaatggactccaacctcggcgccatcatagatcttggggtcagc

SEQ ID NO: 39820 - DNA, 2296 bp, Zea Mays
ccggtggcttctcattcattgttgattgattgatcctccccgcctcactcctttgtctcctcgcctcgtgctcgctcgctcccctcgccctggcgaggagggcagcagaaaccctagcggctcaggccgggcgggggttagatgctccaaggttcgagagggaagggtaggttagtggtgcgccatcgactatgggctgcgtcttcggccgggcggctgcgtcgtcctctgcagcgccgaagaagaagtggggcaaggggaggtcgtccccgcagcccgaagcggggtcgccctccgcagtcgccgccaccgacggggacgggaggccgcggcggcggctcgggggccgcagggcgtcgggacccaggcagggttgcgtccccgctgctgccgcggcggagcagctcgccgccggttggccaccgtggctcgtcgcagtcgccggggaggccctccgcggctgggcgccgcgccgcgccgacacgttcgagaagcttaataagataggatcgggcacgtacagcaacgtgtaccgggcgagggacaccgtctctggccggatcgtcgctcttaaaaaggtccgcttcgataacctcgagccagaaagcgtcaagtttatggcccgggaaatactgatcctaaggagactcgaccaccccaacatcatcaaattagagggcttggtcacctccaggatgtcatgcagcctttaccttgtcttcgagtacatggagcatgatcttgctggtcttgcggcaagttgtgatgtcaagttcacgttgcctcagataaaatgttacatacagcagctgttgtcagggcttgagcattgtcatgacaataatgtattgcaccgggatatcaaggggtcaaacttgttgttggataataatgggattcttaagattgcggattttgggctggcaacattctttgatccacgacataaacgaccaatgacgagccgagtggtcacgctatggtaccgtccaccagaattgttacttggtgccactgagtatagtgtaggtgttgatttgtggagtgctggatgcattcttgcagagctcctgtatggaaagcccataatgcctgggcgcactgaggtggaacagttgcacaagattttcaagctatgtggttccccttctgaggagtactggaagaagtctaaattgccacacgcaacaatattcaaacctcaacaaccctataaacgttgcatcagggagacatttaaagattttcctacatcggctctgccattggttgaaactctgcttgcaattgatccagctgagcgacaaactgcctcagctgcattacacagtgattctgccaacatatccaccaagcaaggagatggatgccaagttaagagacgaggaggctagaagactacgagcggctgcaaaggccaagggagaacagaaaaggactcgaccacgtgatcgatctcggagggctggaccagcaccagaagctaatgcagagattcaagcaaacttagacaggcgacgaatgataactcatgcaaatgcaaagagtaaaagtgagaagtttcctcctccgcatcaggatggaggtacgggtaatccgcttggatcctatcatcatatggagcctatgttcgagcaccaggatgcttccttcagtacagtagtccccatagagaaggggacctcacaaacatggtccgggccgttgtttgatccagcagctctcgggcagtcgaggcggaagaagcaaactaccctagatgctaaggctgctgcttactcaaagcagctccaaaaggaaaagggagggatacgagcccgataacaaaatgtcgttttcctggtgagcatgtggagggaccgtgggaaaggttcatcgcctacggatgaattttcttgttttgttcctctggtggttggaaacaggcaacaatgcgctgctgtagggtgaagtcttccggattgtgtacatgtcatgtggtagcgtttccaagtactgtttagatgcttctgaacaagctgccgtcacccggacgggactttaggggtttgagactcgtatttgtgctctttatggcaattcagttgcccatgtgtatatatggagcaattctttcttgtgtatgtacagagacggcggtagctttgatttcttaataatgaatcaagtgtgatggcgaccttcctcacgtaacagtggtccagtaattgttggttgttaaacttgctgcggtggattgcttcgccttgtgattctcaacaagaaggcaatgttctttcagttttcttgtctgtag

SEQ ID NO: 39821 - DNA, 2069 bp, Zea Mays
gcacgaatcttatcgtagtccactcgaagtcgcctcccatttcgcgggtcaccggctcgccgctgcgtcaagcgagcgcttccccccagatctcgacttctcgagcctgtcctccgccccccacaggctctgctggatccagaaccttctagaacccctgcactgcgcggtgcgcgccatcctcctccttccttccatccagatctcgacacccctcgccggcccagacctccggtcctgtcgtggccccggggttcgggcggtgagtgaacctctcgtggaggattggtagtggataattcgtgtgccgccgcttggtttatcgacttcttattctcgcttgttgcgtgtggctgacgcccaagctttagcaacgcagagtcattactacttggttttggttacttggtagtgcccgtgcacaaagtagagggacgtttcaatttcttacacctcgtcaccctgcagcatatttgtttttttatcccgttgtggcgggcattttctgccccatgactgtggctgttctgacagtttgatacgctgattattaggaccggcaggatatgtgatcatggctatggctgctttctaacgtaataatatgatctctgatcgggtgaacttattttcttaatcttgttattaggctgccaaagaatcagtggccatgggatctgctatcctcaacagcattgcccccgaggagcctaaagtggtcgtgccagagtacggtgagacggctgatatccaggacaaggaagttagtatggaacagctctgctccataagcacctatgatcagtggacgccactctctgtttctggccagcttcccaaaccacgctataagcatggagctgtggtgattcagcagaagatgtatgtctttggtggaaaccacaatggccgttaccttggcgacattcaggttttggacttcaaaactttgtcatggtcaaagctggaagctaaatcacaagcagaaccatcagaatcagctggagcagttccgttttctgcatgtgctggccattcagtgattcaatggggaaataagatcctatgtcttgcaggacataccagagaacctgcagaaagtctcagtgttaaggagtttgatccacaaacctgcacttggtctaccttgcgtacttatggaaggtcacctagttcacgtggtggtcagtcagtgacccttgttggagacactctagtggtctttggcggtgaaggtcatgggagatctcttctgaatgatctgcacattcttgatcttgagaccatgacttgggatgaatttgagaccacaggcactcccccttccccaaggtcagagcatgctgctgcttgctttgcagagcggtatcttctgatatttggcgggggttctcattctacatgtttcagtgacctacacctccttgacactcagacagtaagaatattttttgctctaaaactgctatgtaatccttttgggagtccaaatgaatcacttggtcgttacagatggaatggtcaagaccaaagcaacaaggtgttactccagaatcaagagcaggacatgcaggtgtaactattggagaatattggtttattactggtggtggaaatagtaggaaaggtgtctcagatactcttgtactcaacctgtctacgtatgaatggtcagttctcactaatcttgaggcccgtgcaccccctgtaagtgagggctcaagtttagtaatgcacacaattaatggagaaaattttctggtgtcatttggaggatatagtggccgttatagtaatcaggcttatgctctcaaggcaagtctcaaaccaagtgtcccatctcaacaaataaatgaatcagatacaaatggcttttctcccttatctgtggcagaaaattctagcaggaaagtcatatttgaaattgaggaacttaaagatgaaaaggaactccacttagttcaagatcaactttctatcgaacaaaccagggcttccaaatttgaggggagagcgagcagcagatttagccttagcaggccaaacaagctcatcgacttgtaattttt

SEQ ID NO: 39822 - DNA, 2615 bp, Zea Mays
cggcgatctgcgagcctgcgacctgaccaacagacgaccccgttgaacccgccgccgccccgcccgcttgtttccccattcccttcctccttccgcagcaagctccagcctcccaaagcccccactcccccaatagaccatgccggccgctgcgctctagccgaccgccgcccctcccttccccctcctcgccgccatgtccatcgccgccgtgtccgcggatgggctcctcgcgttggccgacgaggctgagcgccggtatgacttttccgccgcggccgcttgcctcgagtccgcgctgcgtccgccctacgccgcagctctcctcccactcaccgaagcccgcgcgcggctccgcctcgcttcgctcctcctcgcgccccgcgggtcctcccgcgtcccgcgcgccggcgctcccgccgccgccaagacgcacctcgagcgcgcgctgctcatcctctcccctctcccctccgcgccaccgcggctcaagctgttggcccactcccacctcgcgggcgcctatgctgtcctgggggcgatcgcgtcgcagaagcacgtgctccaccgcggcctcggcctcctggattcggcttccgcctcggggctcctccagcgcgagccagcgcttctatggacttgcaacttccaggcgcagctcgggtccgttttcaccaatgacggggacgccgcgtcagcgctgtccgcactgtccgtgggagcatccgccgccgccgagctcgggagcccccagctcgagctcttcttcgccgcctccgagctccacgtccacctcctctgctgggaggacagcgctgccgttgagaacgctgtcactcgtgcctcgctgctctgggacgcactcacagccgagcagatggagcactgggttggactcttcttctacacgcagctgctgcagactttctacctgctcaggatctgcgactacaaggctgcctcacagcacgtagagaggttggatacagctgtgaagagtgagatgcagagaggacgccaaattacggcgcttgctaatgatctcagcacactggagaggacactagggcagtctgggctgaaggagcgggagatgctggcattatcgcacaagcaaaggcagctcaagggtcagctgcgagcattgtgtggctatgactcattgaatgatgtgttggattatggggataagctgcttttggcaccaccgctgatgcatggggagtggctcccacggacggcggtgtttgtgctcgtagatctcatggttgttatggtaggtcgcccgaaagggatatttaaggagtgcgggaagagaataaattcaggactccggctcatccatgaggcagatttggaacactcaacaatatggacagcagggctgtacttgatccttttacttcagtttctggaaaacaaagttgctgtggaacttacaaggtcagaatttgttgaagcccaagaggctttagctcagatgaaaaactggtttactcgcttccccacaattcttcaaggttgcgaaagtatcattgaaaatttaaggggacaatatgcacattctgttggctgcttcgatgaagcagctttccactttcttgaagcaaaaaagctgacagagagtaaatcaatgcaatcgatgtgtgaaacctatgcagctgtgtcatatatttgtaagggtgatgcagagtcgtcttcacaggcactagaactggttggtcctgcctatagaacaatggactcatttgttggtgtgcgagagaaaacctgtatcatttttgtttatggactattacttatgagacagcataatccgcaggaagcacggaaccgccttgcaagtggtttgaaaatagcgcaccaacagttgggtaacatccagttagtttctcagtatttgacaatactgggcacattggcgcttcagctacatgacgcagcacaggctaaagagatcctgaagtcttcgttgaccttagctaagacgctatttgatattccaacccaaatctggatcttgtcagtatttacagagttatatcgtgaactggaagagaaggaaaatgaaatggagaactctgagtacgaaggaaagaaggaagacgatctgcagagaagactttctgaagcttattctcattcttttcaccatgagctggtggaaaaatcaagaatccagccgctgcacatgtcaagtaagcagccagagatggctgttccatcagctaatggtgatcttgacatcccagaatcagtggggctttccgctccccagccattcctcaaaagacttgttgaggccgagccgatgaggcgcagtaccaggaggcggcggtagtaatgaaactagtactgtaattaatagcgtagtgaatttgttggttaagtgttgttatgacttgtaacttttagcagtttaggtttttattttcttttgtttgttgtgttgattatgtgtatcttggtttagaatttatagatttggagaactgttggattgacaacattctgagtggtaaaataccaattattccactgtgttgggacggcgtgttacacctgcatctccaccatcagcacctgagggtcttcgttcggctcgcgtgcaaggg

SEQ ID NO: 39823 - DNA, 3027 bp, Zea Mays
ctggaggcgacccgtaacaacgcggagcgtcagcctatagccgtcgctcccgtgtcccgtccgccgtcccccttcctctcgtattcgcttcgccgcccaacccactgtgcaccgctgccttcccgaccgttctcgccgccgccgtctccgcgcctgccaccccgcgcgctcggccaccggcgcccacggtgcggctcgatcaaggccagatcagaacccgccccggtccgcgtcacgccgatattttctgttttttggtacggatctagggttttcctgctgcggattcgttcgattcgctcatggccgctgggcgccatgggggttacagggactacgaggcgagggagcgggagctcgacgcggaggcctccaggaggagcaaggagcagcaccaccatctcggcggccgccaccgcgacgtggaccgccaccgcgatggcgggcgcagcaggggtggcagagactttgccaacggctacggtcgccgacgctcgccgccaccccggagccggctggcgggaaggcttggtgaccgtgagcctggcgaggtgctgagcggtagtgcatctgatgactccggtgggaggccgcatagagggagggagaatggcgtgctcagttccggcagggagggtgatgtgatggcagtcactgatgactccggtgggaggtcgcataggaggagggagaatggcgtgctcagttccggcagggatggtgatgtgatggcagtcacagggatatcttcgccgagcaagaagaggaaattctcaccgataatttgggacagggatagcccaaagccaccacattctgatgcagccagggacaagaaagctgtagaacctgtgccttctgagctccctccgcccccgccgttgcctccacaagaccacatcacactgaggttggctgtggagaagtcacttatggatatagaacctactgttggtacagagagtgctgtgcagttgctggaacatgaggtgaataaggtgacagagcaggaagaggagtatgcaacaatgaggaacatatcgacttcaagatgggctggtgctaatgatgatgatgatgatggggcagctccagtgaagaagaaaagtctgtctcctgcagactcctctgtggcagggcagtggaaaagagcaagtccagaacctggtgaagtatctggaggaaggacaatgtctaggtcatctgactctgggaaaatgagtaatgatgagaaagaagactttgaagcaaatgaagatgactatatggatgtcgacaagggacatgctagtgacagtgatacagaaaaccgtatgtcagatactgactcagacaatgaaatacacagacctgaaacccctgaaagagagaaggcaccacacaggtgtatcaatatgcttcaagattgcagaagtgttgatgagtttgagaggctcaacaaaattaacgagggcacatatggtgttgtatacagagcaagggataagaagacaagtgagattgttgcattgaagaaggtaaagatggagaaggagcgagaaggtttcccattaacctctcttagggaaataaatatcctcttgtctttccacaatccttcaattgtggatgttaaggaagtagtagttggaagtagtctagatagtatttttatggttatggagtacatggaacatgatcttaaaggtgtcatggagaccatgaaacaaccatatacccaaagcgaggtaaagtgtttgatgcttcagctgctagaaggtgtaaaatatctacatgacaattgggtgcttcatagggatctgaagacctcaaatcttttgttgaataaccgtgggccccagaattgttgttaggaacaaaggagtattctactgctattgatatgtggtctgtgggctgtataatggctgagcttcttgccaaagaaccgttattcaatggaaaaacagagtttgaacagctagataagatttttagaacactcggcacacctaatgagaagatttggcctggctatgctaaattaccaggtgtgaaagtaaattttgttaaacaaccgtataatagactaagggataagttcccagccgcttctttttctgggcgaccaatcctgtctgaagctggttttgatctattgaacagactgctgacttatgaccctgataagcgcatatcagcagacgatgctcttaagcacaaatggttctctgaagttcctctgcctaaatcaaaggacttcatgccaacattccctgctcttaatgaacttgacaggcgttccagaaggtatctgaagagtcctgatcctctggaagagcaacgtttgaaagaactgcaagggaacataggcaaccatgggctttttgggtgaactagaagcacttgattgggtctgcaagggaacataggcaaccgtgggctttttggctgaactagaagcacttgattgggtcctgtccgtcctaactgttatgcttcacactgaaatcctgagttcatgaggttagatatcttctgaggcttggtaccggtttaaatggataaggtttctccttgtggcccatcatagaaattttgttgcaggattaacgcttcatccagatcgatcataaaagcaaatataatctacctgcatcataagaagcgcaggggaaggatgccttttgctttcatcaggaaatcaatggcattaatacaacttagaagctaagctgtggctgcttcaagataggaagcttgatggctgtcagcttattgtacctaagtgactaaattttgtggagggccttcaaaagtgttcatctcttactagtgaaccatggtgggattgccgagccgttcggctaaccgggctagccgataattggtggtggtcggctccaccttatcactgttttggattttgaatttggtaaagtttgtaaattttgaaaacttttgatgacattttttgtataaatactatatattatttgaagattttctgctgaaaccaaatttcaaaatacacaacgaatttcaaac

SEQ ID NO: 39824 - DNA, 3346 bp, Zea Mays
aacacaccttgtgaggtctgagtgtctgactaggcactcgatagtcgagactgccggtgccggtgccgccaccgcttccactcgccgccctcccacacggccacacggcaaggcggccagccggccacataccccgcttcgtgtccctcccggttcacggagcccgaagcgctctgcatgtgagcggaggcggcaggcgacgtgtcacggaggcaggcgggcatggccgcatggccacagctggagcgcagccgcggcgacacccaggcaccttcttgcggccttgcctttcctcccgcctccgcctccaattccccaacgggaactgttcccgctcccgcgtctatttatccccggcgatagaggatggtcgagagactggtgcttcttgctggcggtttcttctcgtccggtcgccatggtgcacgagacgagatcacgggtgcacgcagctgcccaggaagaaggcaagctcgcctcaaaaaagcagaaaccagataatgaaaccaaggaaaggggccagaatgtgccctccaagaacaagaagtctgccgacaacgaagggaaagacggggagccggaggcgccaacaaagagcaagaagctcaaagctgaggaatctgagccaaatgggagggaagctgctgcaagagagtttgcagagttttgcaaggccataggagaacgcctctccctcgaggacatgcgcaagatccttcaagccaatgagcaagatgcttctggatcggaggatgcggtcgttccaagatgtgaggatatgatgttctatgggcctctcgagaagtgcccagtatgtgagggtcagcttgaatttaaggagtggaaatacaagtgcactgggaactacagcgagtgggcacgctgtactttcagtactaacgacccttcaaggagaagcggttctatagaagttcctgatgacataaaagatgattttatccgcaagtggctgaagcaacaagaaggaaaggagttccctaaacgtgatcttgatgaagaggctcatatcttctctggcatgatgattgcattgtctggacggatgtcacgctcacatggttacttcaaggagcagatcatgaagcatggagggaaggtcaagaattctgtgcttggtgctacctgtgtcgtggcttctccggctgagagagacaaaggtggctctggaggatttgctgaagcattggagcgtggaactcctgttgttagtgagaattggataatcgatagcattgagaaaaaggaagctcagccttttgctgcctatgatattgttactgatgttgttccggaaggccgaggactcccgctaggccaacttgatccaagtgaggaggccattgagaccttagctgcagaggttaaacttgctggcaagagatctgtccacaaggattccaaactcgataaagacggtggatgtgtctttgagaaggatggcataatctacaactgcgcttttgctgtttgcgatctcggatgccagatgaacgagctatgcatcatgcagctggttatggtccctggaaatcgtttgcacctgttctacaagaaaggcccaattggtcatgaccagatggcggaggaacgggtggaggattttggtagccgtgtcaatgatgctattaaagaatttgttcggctatttgaggaggtcactggaaatgagtttgagccttgggaaaggcagaagaagttcgagaagaagagtatgaagatgtatcccttggacatggatgttggggttgatgtgcgtcacggaggtgcagcacttcgtcagctgggttctgcagcagcacattgcaagcttgatccttctgtttctttcctgctgaaacagttatgtggacaagagatctacaggtatgctctgatggagatggcccaggacctacctgaccttcccatagggatgcttaccgatctccatctgaagagaggggaggaaatgctgcttcagatgaggcgagacgcggagacggtggcagagtccggcccagaagcagacgcgttctggaccgacgccagcagcaaatggttcactctgttccccacaactcggccgtacacgatgaggggcttcgagcagatcgccgacaacgtagcatcaggtttcgagacagtgcgcgatataaacgacgcgtctcgtctcatcggggatgcgttccgctcgacactactggatgacccactctctgaatgctacaagaagctcggttgttgtatcagtgctgtcgccgagggctcggaagactacaagatggttctcaagtacctggagaagacgtacgagcctgtcgaggtggaggatgtggtctatggtgtgtctgtcgagaggatatatgctgttgaatccagcgcattccctttgtacgaggaaatcaggaacctgccaaacaaaatccttctctggtgtgggactagaagctcgaacttgcttaggcacctccacaaagggttcctgcctgccgtctgccatctgcctgtgccagggtacatgttcggcaaagccatagtgtgttccgacgcagcggcggaggcggctcgctacggcttcactgcagtggaccgtccggaagggtacctggtcctggcggtggcctctctgggagaagagatcgaggaagtcaccggaacaccaggggcagaggcacgagtcctggaagagaagaaggtgggcgtgaaaggcgtcgggaggaagacgaccgacgagtcggagcacttcagctggagggacggcgtcaaggtcccctgcggcaagctggtgccgtcggcgaacaaggacggcccgctcgagtacaacgagtacgccgtgtacgaccccaagcaggtgagcatctgcttcctggtcggggtgaagtacgaggagcagaacatggaggtggtgccgccggacgaccagtgaaggagtcgtctcgtggagtgtcctagggcagggcagggcaggccaggccaggaggtggtgggacccattttggttagtggagccggtagcggcgacgcgttggccgtcgggtggaatggaaacgtgaggggtgccagaacatcctgggctgcctgccgcctcctggttttgtgtcaattgccgtgtctgtggctgtgtgtactacttggtagttggtagcgtactttattagtagcgaaggtgctagtgaccctggctaggtacaagcccttgggaggctgcttgctttgtatgctaacagttcgttccgttccgttccagcggcccttttgggtgctgacagttcgttagcacggctctgagagagaacgtgttccgctctggtttagcactaaatgaaaaaaaaaacatgtttccttt

SEQ ID NO: 39825 - DNA, 1095 bp, Zea Mays
gaggatttagcgctcgtggaaaggagacgtctctgaaccgaggctgcgactgcgagggcatcagggcagcgaggcctcttgtcgcgtgaatcccctcgagagccgccggcggagccatggcgcggtccccagctgcctcctcctcctcctacacggatagcacgggatcctcctccgactcaggctccagctcatcgggaatcgaccgccgccgccgccgccaccgccatcggagcagccgccgcaaggagggcacgtcctcgtccgcgctgaaggcgcgcaaggaccggaggtcccgccacaagcgccgccgccacgagcgggagcggcggcggtccgcgtccgacgacgacagctacagcacaagctcttatgacagtgaccgtgaggtgtctggcagatctcggaaacataagaagagcagcagatcaagaaagtttagggagagggagcggagcaaagatagacatcatagacgagacaagagtaaacacaaagagaagaaagagagtgagcatgctgatggccctgtccagctttccaagtttcttggacgggacaaagaaaaggaagaaggtactcaacggagtgcaatctctggtaaaaagataatgatgaagcttgagaagacaaaggaagacaaggcagcagagagcaagcgaaacgaactgttgaagtttctgaatgccagttacgattgatgtgttcgaatcgctggcgcagaaagtgcagaatgcccttttttatcgtctttgcactggtgcttttggtgatacttaagttataaacgttttgtttcttgtctataacttggccaccaaagttttgttatgcttaactagtgactgagtgaaggtctacatgtaattgatttgaattctgtgttgccagtcatggatttgcagcttttaaacccatcctttttgtgattgctccttgtctttgtcaatgtcaaactgtttcactggcgattcattgttcttggcggcttactgccgtggatataaccattttgactcgagtgccactgcctgccacaagccgaggttctaaaaaattgctatggggcaacgtcaaattttaatgagaatggaa

SEQ ID NO: 39826 - DNA, 3925 bp, Zea Mays
cgacgggctcgagcgccggtgagcgctcgcgcacccgggccaataaactggcaccggctcctcctctcgcgtcgcagagcctagcctcgggatgacgtggcgtaccacaacaccaccacacctcactcagccctgcgggtctccgaccaaccatttctagaagcctccaaaccctagcgcaggaggaagaggagttaggaggagctccagggatggcgaaggcgaggaagcagaagggtgacggtgccagtacgggaggaggcgccaccgtgctccaccagaagctctgcctctccatcgacatggagaaccagctgatctacgggtacactgagataaaagttctagctgaaaacaacagatttgctctacatgctgacaatatgacgattcagagcatttgatggatggtgcaactgttgagtttgactattcccctcattggaaaaatgaaagtgatcaaccgaattggtcttcagtatcatgtttgaagactgctgctgatgctgcatgttcaatgtatactttgtctctaaatcgagaagctacaccaaatcttattgtgtcatctgagagatcagtcaagtcaatgactgaacagcagttagatgaaaacagtgaaaagcatgaagaaaatagtggaaggcttgaagaacatggtggaaatcctgttcaaacttcctatgatcaaattgttaatggctgcagtggaagagggaatagaaaattctgcagtggaagaaggaaaggaaaaggaaaatgataaggaaaaagaagaggaaaatggaaatgagaagagcaaggaaactggaaatgagactgaatatgaaaaggtgaagaacataaaactggttcacatagattatattttggagaaggctgaaactggcgttcagttcgttggcaatgtcatgcgtagcagtagtcagacaaggcgggcacactgttggtttccttgtgttgatagtgccacagaacgctatttgacctagaatttacagttagcatggatttcattgctgtcagcaatggtgacttgctttaccaggtctctagtaaggaagatccttcaaaaaaacttatgtgtataaattgaacactccagttagtccacagtggatatccttggttgttggcccacttgaagttcttcctgacagaatcacagaaatgacataaatgtctcacacatatgtttattccctgctttggcaaagcttcagaacactattgcatttttccacaatgcatacagctgttatgaagactatctttctgcaccatttcccttaggtttatacaatcacatttttcttccatctgaaatgacaatattaccagcaagcttaggagcctccacatgcatcctcagttctgatatcttgcatgatgagaaagttatatagatcagataattggcacaagaacgaaactggcttatgcccttgcaaagcaatggtttggaatatacacaagtgcagaggagtccagtgacgaatggcttttggatggtttggctggttttctaactgagttattatcaagcgttaccttgggaataacgaggcgcgttataggcgtttcaaggctaactgctcagtatgtgaatctgatgttagtggtgcaactgctttgagctctactgctgcttcaagtgatttatatggaactcaagcaatcggttcatatgggaaagttcgttcattgaaagctgtagctgttttcaaatgttggagaagcagatgggaccagactcatttcggaagattttgcaggtgatagtggctccaagtcgtgcataaaatctaggcatgagcttcctagcctctcttctcaagcaaattgatcggttcttgcaatttgacaactttatgcctggttataatggggtcttgactgtcagctgcattcgtacccttgtacgaatagcaaagaaggtgccatcttttgtatgccttgatcacatttttgaattggttgcccctttccgcaacatggacaaaccatggaaagttcgaattgaagctagcaggattcttattgatcttgagttacaccataaaggactcgatgcagctcttttgttgttcttgaaatatgtggacgaagaaaagtctttgcgaggttggattgctagagtactttttgatggttttgtatgctttgctatcttttgacatggaagctgttgaaggagcgacaaagttggctgttcatgtcttgcgtatatgtcaaacaagtattgttcctcacgccaatgatcaaataaattttggcaactctagttaggggtggtaacgggccatttaatttagcctagcaaatttacggatcgaatcaagttagggccggatcataaaacaatacaattttgaactaacaaaattaagggctttgttggtttgtgaagcaagtattagggtcatgatccattaccacccctaactctagttggtcttcttcatctgcttgctggcacaaaggcatacaataacatatttcttcgtcatcaagtgttctgcatattgcaagttgctgctggaaggtccccaacgttatttggtgttccaaaggtcctcacaccccctctggtggtcaactacatcttcagtgatcaacacactaaagatgattcctcaattcctcaaccatcatagtctcaggaaccttccactagcactcctagtgtccgggaggtcttaccgacctctggacccactcaagatgctgataattatcttactgcagtgaaagaaggaatgtggtcaaaattagggtgaagcttactgcatcttccagtaaagcatctgatgctgaccatagaggccattctgatggcgcaagaaatgaaaatgaaccgggtcaatgcagctcaatgtcaatggatgcccccatggctggagcagcaaatgaaccattaaatgtaagcaatcataacattgaggaacaaaactcatgtcacgaccttggatcaaggatgtcggcaagtgttagcaatgctaaactaatggacagacatgatatttccaaggagctacagtgcactgctgattccaggctggatactgttcccaaggatcagttctctcctgccattaatccgccggaagttttagacaaacctggcagtcagcttgaaggtgtctccaactatgatgtaaaccaagctccagagactgaacggagtggaaacagaagagagagaaaaaaacaagaaagataaaaagctgaaacgtgacgaaaaactagataaaaaaatatgacccagagtatctagagaaaagctccttaataagaaggaaaagaaagagttggccagaaagcagctagaaggtgaagagctacccctgaacagcggagagcagtgaacccttcaggttcacaggaagttttgccttcaaggccaccagctccagttctaagtgttgaaacacctgttcgaatctctgaaccccaggtatcaagcaaggaaacagctgtagatactgcacgtgcagcagccaaaccaaggataaagatcagagtcaagcccttggtaagaaaatctgaagggaattaaaaaagattgtagaattgtggccagtctgccatcatttgtaaggattactgtacagcaggaaaaatgcgggtttagttattttgtgaatggctgatgtatcctgtaaaaaaacattgctctgctctagtaatttctggggtaatcgaaatctgagttctagggtagtccatattttctgctgcagttgctttagtatctcagcgcttattatctcacaggttttaagtgtttgttcgatttgctgggcctaaaactaaaactgaaggatcgctgtgctcaatttgtagctgttgatgcattcatttcagatttgaggaggcttgacggaattaactgctgagcttgctcaaacatttttatgacgct

SEQ ID NO: 39827 - DNA, 1025 bp, Zea Mays
cagtaacggcccgcttggcgtgcgtcgccgtccaccgccgcgacctcgaggtgtagggccgggttgctgaccgcatcgcccggcgtgtcgctcggcgtcggttcgggcaggccgcggccgcgcgcgtgatcgatggggaagagaccgccgaccgatccgaagcgcttcggggatacgtcgaatgcaggttcatcgtctggatggaccgatgagaagcacatgctctacattacctttttggaggaatcatttgttaaccaattgtacagtagtaagggggaaatgaattcggcagaatcattctatgcaactccaggtgcatggcaaaaatcttcttatagtggaaatggtagaaacacaaaatatgatgagggacatggatattgggggactgtcgaggttgacggagatggagctgattatatggatgatgatgcatcaactaatggtccaagacaagagagagatactagttaccatgcaaggcaaaggaattccagggggtcagctgctttccgtttgcgccagcatgggcattcgttttcttggagagaatcatcagaccagaacttcttggatggggagactcaaggtagcaaggaacaaggaagagggtctagcaaaaaccagcaaaagcatgctgatacgaccaaggtttacgctagcagctcttttgtgattcaggagatcagtcatcctcatggggaagcttaggggccaatgggattggttcatgcaagctaataagtttgtaagaatagcagtgatggaggtgggcagatgtatataaatctgttcattcatctccagatagccaaaagataggtgtttcctgttggtagtgtatctattaggaatgtcgtagattgctaatgacttcctgtaaaatcgtccaggaaggtttcagatattgaggtggaccagctgggtaactgttgttgtgtcccgtaatgtacaagtacagatgtctgcaatgttcatttgacttgttgacaaaatggaattttatgatatttgaaaccccg

SEQ ID NO: 39828 - DNA, 3198 bp, Zea Mays
gctctcgcacgagacacgcacgcccgcgcgcgtgaaggtacgcggaagcaggggcgaggattctccgaagcggagggcgaggcggcggcagcgaccttgagggagatggcggcgggcggtagggtttcaatcccggcaggggcgcggcgcacgatcgcggacatcaaggagatcgccggcggccacaccgacgaggaggtctacgctatgctccgcgagtgcaacatggatcccaacgagaccgttcagaggctcctcctcgaagatacctttcatgaggtgaaaaggaagcgtgacaagaaaaaggaggttagtaaagagccatcagattctcggtggagacctgccgtgcaggggcaaggtggaaagaattgtcggaattgtgcttcacgcagtttgtccagctctaatgattctgctggacgaagtgctatttctggaaaggagaatggaataagtttgatcatgggaaaaggtagtggttctactccgataaccaatatgaatatggatgtcaaagcttccactttcatgccaagtaacagtttgttgagtggtctttgcaacggtccatatcaatcagttgatcctgctgctgtgctggtgtctagttctagtgctgttggtgataagtctggttcaacagccttggctgatcttacaggtggtcttccattcaaagatgtagtcgctactatagatccaaattcactgcaaccattgaaaccagcaccaccatcagatcctgtggttgtatcttttctcaactctcacagccttggtgacgttggtgcttccagacaaactattggaatcaagaagacatcagtagaacataaggtggggcgtgatgtatcaacagacaaagttattccaagtaaagaatggaaacctaaactgacttgcttggctgcttctcaagcaaccgaggatgctaccgtacatgataatgtacctttggctgctgctgacactatcacccaatcagctccagtaccgaattcagctggtacagaggattcgttgaaggtggacatatgtttaaatgatctacagttatcagataagcagcatgtgataattccagatcatcttcaagtttctgagtctgaaaagtatgttctaagctttggaagcttcgacgtcagttttcagcaaactaagggctcttcagatcctgattatgtgaagagctctttaccgaaattcagttcgtctcatgagttggatggcaacattgatgaacttcagtccatgcaaagagatcagaattcaacatctgttgtccaagaggaagctggtcatgttcctcaaccttctgcaaagctagaaaaatgtgcaccctcagcaatggagatttcatctattgcccttatggaatcaaaagactgtgatgacgattcagccacttcaggggatccccaatctacaggaactcatagtgcaccatcttatgtgacatatggatttgcaccacaatcacatgttaatcagattgagaagtccgaatctcattctcagtcgtaccatcccacaactgatgctgatgaacggctgtccccttctcttgctactcaagctgctcacaagtatgggaatatcccagttgttcccacacaaactggccaggatcaagaggggaacgactcacctgtgattatttcatctgtttctgcttccgttgctacccctgctgctggagttctgtcggcttcagttgctatccctcaacagtctgttcctgtatttcgccagcctttaggtgttcatataccacatctcccgatgaattatgtcccttacaatcagtacatttcaccattttttattccaccccctacccttcacccttttatgggtaatgctacattttctcagccaccttcaacaggggtcatgtacccaactcctggaaccgcaagagttcttccacctgtcaaattcccagttccttcattcaagcctggtgctaacattgggagccaggcatctattggagttcctggttgctatggaacatatggttctagtccatcggtttacactaataacgcacccgtgtcatctggaaatctagcagaaaatgacaatgttacttcatctcagttcaaggaaaataacatctattttgctgggctccagaccgacggcttgactctgtgggttcctacacctggacgtgatatttctgctctccaggtcaattccttctatggtctcccccctccgggacaccaggtaacatatgcgcctcaggctggacatggtccttatggagggatctaccacccagcacattctgtggcaggagctactgttactccactgctccagccatctcacacaatggctggagctgttgaaatagttggggcacctggtggtgtttaccagcatccccaagctcacatgaattggggaagttactgataggccatgattattgtttctttgactttgggtgtccatgacaacacatttggcagaggtgttcaagttttaacaaaggtgaacttgatcaggagtgtatatatgttctcagcatggctgatctgcagggcgggttattgcttccagaagcttccagattgttgtggttgtatttgtagcagataatggccatgaaattggttgagtttatctgctcaggttccttaatacaattttagcctcctgcgcccatcctgaaacttctgcaaggagcgtgatttcgctatcttgtctgattgagggtatggagtacttgaaactgaaattgagcaagtggattttcgttctttccgctgctttacatgtaaattaaattttggttcgatgtgtgacagctgttgtacttggtatcagttgtggacttgcagctaaccagagtcaaagtgctttgaaggacttactgagcacgtttctgttcctgtaggctgtagctcagagcctagtgcttcgttatattgcttattactcattattactatttattgttcctatgaactcgtattgtttggggttaaagggccagacatttgttagtgcccctttggtataagaaaaaatggcatgcaggctacgtgccgactcacgaggttggcgtgtgggagtgatgatcggccgaatggccttggatgactctggtttggtctcgggtgggcgaatgatgtgatatgttattatttgagtaattacatttattggacaatgcacgtg

SEQ ID NO: 39829 - DNA, 2395 bp, Zea Mays
atgggtataatgcgagtcgcggacgatgtggaggccaggttggtggtcggggcaggtggcggcggcgggaccgccaccaccacgacggagccgcttctccgccactgccacggcggccgcaaggaggaggacgaccaggggtctaagatccgggacagcccggaggcggagggggcgtccgactgcgggaggacggacggaggctcgctgcggatggtccttgtctccaccgccgtcgccgtctgcggctccttcgagttcggcacctgcgtaagaagacgccgctgccgccgccgcctatccctaaatgcattccttccttccatccctcacctttcgcggaaatgcaacaacacgctcgctgattcgcgttcgacgttactgatgacatgcagctatatacggccttttcttcgtcactaccgtacttttccttctgttctgcgagttgtcgccatttgttttactaccgtcaatctgtaatgcacgcgtgtctcaagaagaagtagtagaatgaagcagacaaagcttcgcaccttcgcccaaggtcctacatgattcatttgcttgcaggtcggctactctgcgccgacgcagtcagggattgtagaggaagtcgggctatctatctccgagtcggagcaatggttggtgccgttactagtgggcgcttggctgattttctcggacgaaaaatgaccatgcggatatcagctactatttgtatattcggttggctctccatacatctggccaagagcgctatcatgctctactttgggagaaccttgctgggtttcagcactggagttctttcttatgtggtgcctgtgttcatagctgaaatagcgccaaagaatctccgcgggggtctcgcaacgtcaaaccagctcttgatctgttccggaagctcagctacctacatcataggagccctggttgcatggcgcaatttggtacttgttggtttagtgccttgtgtcctcttgctagctgggcttttcttcattccagagtcgccaagatggctggccaatgtcggaagggaaaaggaattccacgcctcattgcaaaagctgcgtggagaggatgctgacgtatcagaagaggcaattgagatcaaagagtatattgaatcactctatagccttccaaaggccaggcttcgagacttatttctgagcaaaaatatatatgcagtcattgtgggcgttggcttgatggtttttcagcaactcggagggataaatggtgttggcttctatgcaagttatatcttcagttctgctggtaatcaaatgtctgtactattgtgttgtccttttgttacagccctttatggtttttttttttgattttatcataacttcaggattttctggaaaacttggaaccatcttgattggcattattcagattccaatcacattgtttggggccatactcatggataggagtggaagaagggttctcctgatggtattaacgctacaaagctgagctgatgtgcatacaaagaaagattgttaggtagaatgttttgtgagatccttttatcatataggtctctgcatctggaacatttttgggctgcttcctcacaggagtatcattctatctgaaggcacaaggactgttctcagaatgggttcccacactggctctttccggcatactggtttacatcggggcatactcaattggaatgggtcctgtcccttgggttgtcatgtctgagatattctcaatcaacatgaaagcaactggtgggagcttggtgacccttgttagctggctgggctccttcgcgatttcttactcgttcagcttccttatggactggagctctgcaggtaccttcttcatgttctcttcagccagcttgatcactgtactcttcgtggcgaagctggtccctgaaaccaaaggaaggacactagaggagatccaggactcactaaacaccagaagatagtaatgaatttacttcacactacagaataattaattctaagatggaaaaatgggaatttacaggacacagcagaataattccaagatggaaaacgaatgtaccgtcagacctctgctcatcgatagatatgtatacaagaaacaatatatataattctcacgtcctcccgcttcccctccctttctctcccgcaccacctccgtgtaatacgtagtgtactgtgtaccctatgtaggttaaggaatgctgcagattcagattacgcattatgtaccgtgcccctccagattgtttgagcatgagcagcgacagaaccgacattatgtttatgtaccatgtccctctagatcaaccagcagtacattttttatattcaggatcaacatttatgtatcatgtttttttagggaaaaggctcag

SEQ ID NO: 39830 - DNA, 2007 bp, Zea Mays
tgcaaatcgcacctcctgggggagtactggttaaacgggtccaaatctcggacccgcaaacggacctcacccacccgttcctccatctccgccccttgccggcgatggcaccggcgccggcagcggcctcggcggggcggaagtctcatgtcaccgttctcctcctctacgtagtgtgcggcttgatcctgctgcttctcctcgcctcctactcgccccgcctccagccccacgcccacggccgcagcctccaccgccgcctcaagctccacccaaagagctccttaccatccgacgcttcctccggtgggaacggggggcaacagaagacgcagcaccaaaaccaccatgcggcctccttcgacccgaccatcgccgagctggagcgtcggctggacgacaaggagtgggagcgcgagcactacagcctcctccacggcggcgagccggatgaccatatgaaggagtgggaggagttcctcaaggaggaggaggacttcatcaacgacgacgaccgattcaacatcgccgaccgtatccgcgcgctcttccccaagatcgacgtcgccccgcaggacggattcgtctccctcgacgagctcaccgcctggaacctccagcaggccagggctgaccagcaccaccgctccgccagggagatggagctctacaacaagaacggcgatgagatagtctcattcgaagccttcaatgctctgcgccaagaatcccatggagagggcaatatgcttgggttcgaatggtggaaggaggatcatttcaatgcgtcagatgcaaacgctgatggtttccttgataaaactgagttcaatgatttccttaatccaagtgattcggataatcccaaaatcatcaatttgctctgcaaacaagaaataagagggataaagatggtgatggaaagttaaactttgaagaatactttactgggctacatgaccatatacatggttatgatgacgagaatgcagatatttcccaaattgggaacataacagttgcgaaggatcggtttttcaaacttgacaaagataatgatgggtttatttcggagcatgaactagagcctgttcttgataagctctatctttctgaacgctattattctagacagcaagccatccatgctatttcagaggcagacaaagatcatgatgggaggctgactttggaagagatggttgagaacccctatgcattttatggcagtgtttatctcagcagcagcgacaacgacgacgaagactacttccacgacgaatttcgctgagaccaatattgttactatcctgacacacgcaaggaacacagctgacgagcatcaaggtgcgcacagaggttcggaacgtctagcatactatgtgtgatgcccgggctgggctgctgacagaatgggagagcttagagttacggccatggagtgaggaactagtttttagccgcttggttcttcaagttgtttgtgttaaatggaacgacgacagcatcctagtaccggccaggcccagcagtgatggatgttacgcggcaagttgagccacctttatctaggctgagctgcattggtctccatcctgatgttcctgcagcaggggaaatgtagttcaggagaacaatgagtggaggagcgtcatctctgtggcgagcggcttcagaaatctaacgggaacgtgttgtttggtgtccgaaatgtatgtgtgtgtgtgtatgctatgaattcaattatttctggcagaatgtcgcagtctagcgagctggcccatcccattgagaaacattccatcggctgcatgagtgcgccatggacgggagatggatgtgccgaattattggagggaaagggttcactttattcgtgcctagtcatcagtgtcatcagtacggaggttacagcgtatccacgtggtctgccacgtcatgtgaatcccagccgtggcgcaggtacattctcgctgggtcttgaactggtaataaaagatatttggc

SEQ ID NO: 39831 - DNA, 2645 bp, Zea Mays
cgcgagccactgcacccatccactcgtacgccgcggtgcgccgcagcccgcagcccgcagcccgcagcccgcagcccgcgactccaggcatccacaaaaaaccatctcccccgcggccccggcaccgcacgctcccgacccggcgagtcccactcccacctaagctgagcggccatggcgcggcacctcgcgccttcgtctggaagcctccaccgtctcctcgcgtcctgccactacccgcccacctcccaggcgccgcctccccgtccgctcctcctcccgaagacccgatcggcggctatgcagctcccgcgacgcgggcggcgcgacgtcgtcgccgctgcagctgcctccgcaccgtccccctcttctccgggtaccgaggtggcagtctggggtaaggtctccgccgtgctcttcgatatggatggcgttctctgcaacagcgaggagccctcgcgacaggccggcgtcgacgtcttcgctgagatgggagtcgaggtcgccgtggatgactttgtccccttcatgggcactggtgaggccaatttccttggaggtgtcgcaagagctaaaggagtgaaagatttcaatcctgaaagtgccaagaagagattttttgagatatatcttgacaagtacgcaaagccaaattctggcatcggattccctggggctctggagctcatcttggagtgcaaaaattctggtcttaaggttgccgttgcatccagtgccgacaggattaaggtggatgccaatctggctgctgctggtttgtccgtgtttctatttgatgctattgtttctgctgatgcgtttgaaaaattgaagcccgctccggatatattcctggcagcatcaaagagcttaggtgtcgacacaaatgagtgcattgtgatagaagacgcgcttgctggtgttcaagctgctaatgctgcagaaatgagatgtatcgctgtgacaactactctagaggaaatagcgttacgacaaggcagtccctcgttcatacgaaagaatattggagacatttcaattaacgacattttgtatggtggttctaatgctcgccacaatgaaggggcaggaagtactgagaatagtagttcggtagggaatgctttgtctgagagtctaaacggagcaactgctgctggacattctgacacaaaaggttttccaatctcaaaaaataaagggctgttgggttctcgacgcgaaatattgagatatggaagtctgggaatagccttgtcctgcctttttgttgcagtcagaaattggaaggcaatgcagttcgcatctcccaaaggcctactgaattttctcatgggtggaaatagttcagtttttgccagaaatgaaggtacacagtgcacctaggcatcaccatcctgtcttgcacctcttgcaccaatggtacctggccacccacttcgggctgccactttttaaacacagcacaatgctgttgggtaattggaaattccatcaggcataatgcatgttgatggtgccattgttggctttaggctgggcctgcaaagtaaccgtagtgacaaattctttttagcatgcctagagagattgaaacctagctaggaaacatttggatctgaagctattttgaagattggtctccagttgttatgtgtgtcttgcaggagaatctctgtcatcaagagttcaacaaataaagaagtatctagctgagtttgaatctgggggttctgccacatatgttcctgagtttccaagaaagcttgactggttgaatacagccccacttcagtttggaagagatttgaaaggaagagtggtgctgctggatttttggacatattgctgcattaactgcatgcatgttttgccagacctggattttgtagagaagaagtataaagaaaaacctttcactgttgttggtgtgcactctgccaaattcgataatgaaaaggaccttgaagctatacgtaatgctgttctgcgctacaacattactcacccggttgtaaatgatggtgacatgtacttgtggagagaactgggggtgaactcttggcctacatttgttcttattggacccaacggaaaggttctagcacagatatcaggtgaaggtcatagaaaggatctggatgaagtaattggtgcagcactggaattttatgaagagaagaaactattacaaaatgacccccttcccttggcattggaaaaagacaaggatagtcgtttactaacttcgcctctcaaatttcctgggaaacttgctgttgatgtgcaaaacaatcgattattcatatcagacagtaatcataatcgaattgtggtgaccaacttggaagggcagttcatataccaagttgggagttctgaggaaggattgcttgatggcccatttgatgctgccctatttaaccgccctcaaggtattgcttacaattcaaaaaggaatatcttatacgttgcagacactgagaaccacgctctgcgagaaattaattttgtggacgagactgtgagaacactagctggaaatgggacgaaaggatctgattacagaggaggaggacaaggaacaaaccagtggcatttgtggctgttagaggaacatgaaattttgttggaaactagctgca

SEQ ID NO: 39832 - DNA, 972 bp, Zea Mays
ttttgctgccgcgcgtgtcttggttcttccatcgcccagctcgatgcccagcgcgcgtctctgattttttccaccgccgcgtgcagttctctttcttgtcttcttcttcaatcgtgtctctctctccctcgtccattcccagctcggccgctcctcagctcgcccggccgtgtgctcgcccatggcgcgtctctgctcaagctccatcgcgccgaccgctcatctccctgctagcgcgcgcagccgtgctccactgctcggccaacttttcccaagttcggccagccgaggtctcgcccggccgcgctcccctcgccccatcgcggcgctccagctccagctcgccggcgcttggtttccagctcggatttcgccagccgctgttctttaacccgtgtactggtcggcgtcgtggagttttggtttggttggctcgtcgttgacctcgccggtgtcgtcgaaccgtcgaaccccttcctcagtcgcgtcgggtctccatgctggttgttgtcgttcgttgtcgcgtcgtgtgtgcagcaacgtcgctgattcctccatgatgcttatcgacgaacttcgattcatggattcctcgccttcggttcggctcacgtatgcacgtcgaacacgttcgtcgcttgaccctgtgtcgctagagctcatgacctcactgtcgtcaaagtcctcactgaatttgtgtcctcgccatagctcgcgctaacctgctcgactacacctcaccagctcgctccaaactcgatctcgtcgtcgttccgtgcatcatcaagaaaacccaagagtcgggtgaagacgaagtttgcagcgtgatattcaccaagtgctcgacgcaagggctgaaccagaatccttgccgtgttcgcggatagcatgttagagttagtatgatacgtgaattaaccgcgtgatgcggagaacctgagccaagtcgaccccaagcgcaggctactccgc

SEQ ID NO: 39833 - DNA, 433 bp, Zea Mays
tcggcgaggtatgtatacacactaatcagagcacgatgggttgatgaactgaaagaacccacaaaagaacctggcaaggttattctcaagttatagtgacaaagtgttggtatgaattttcttttttgttttaccagttctcagtattaaaccatgtactcatgtatatgagttatttgatcgtttagttatcttcataaatcatgtaaaatgtactttctacctggtgttattagatggcagcaaaagcataaaatgcatcaactgtaatgttggcttctatgttcttttccaggcaaaacgtgacgagctgcttcagtttgctcgggttatagctcagcaatgtttggaggccttggtttacttgcaccgtctaaggatcattcattgtgacctaaagccggaaaatattcttatcaagagctacaattga

SEQ ID NO: 39834 - DNA, 1625 bp, Zea Mays
gaccgaaccgttgaattgcaatttccgctagaaagccgacgagacaatttcttccgttcgtttcagatcgggcggtggtcctgaccaaggcgctgccggccactggcctctcgcaaccggcgaccgcatctcgaagtagagggtgctggccgccgctctcggaagcgctctggaaggacacggccatggcgatgcgggccgctgcgcgtcaagccatactctctccaccgcttgggccccgcagtcctcgccccttcctctgtggttgttccttgtctatcgctcctcggttggagccgtgccgagcggcgagctccaccaccgcgccggccgccggaaagcatctccctccattgttcagcgtcgcgccgatgatggactggacggacaaccactatcggacgctcgcgcggcttatctcgcggcatgcctggctttatactgagatggtcgtcgccgagaccatcgtgcatcagaaggataacctggataggtttctagcatttccggaggaacaacatcctattgtgctgcagattggtggaagtaaccttgaaaatttagcaaaagcaacagaactggcaaatgattattcatatgatgagatcaacctaaactgtggctgtccaagcggcaaagttgctggtcatggttgctttggtgctcgcttaatgtttgatccagaggagatgccatgtcaactatcgcagctaattgtgatgtcccagttagtgttaaatgcagaattggtgttgacgatcgtgattcttatgaagaactatgtgaatttgtagataaagttatctcaaaatctccaaccaggcatttcattattcatgctcggaaggcattgcttagtggtctcagtcccgcagagaatcggaagattcctccattgaaatatgagtactattttgctttgttgcgggacttcccagaaataaaatttactctaaatggtggcataaccaatgttagtcaagttagtgcatccatgagacaaggtgcacacggagttatggttggccgggctgcttataacaatccatggaacatgctaggacatgtggatggggaaatctatggcaagcaaacaagatacatttctcgtcgccaggtttagcggttgacatatttatttgagctatctgctattactccctttatctgaactatgaactctctgtcttagatacttgagaactaccaagcttatggtgattcaataattgaccagtatggccccagcaggccaaatgtgagacaacttgtcaagccactgttaaacttattccactcagaacctggcaacagcctatggaaacgcaaagctgactctgcattgcgtcattgcaaggagtgctacacatcctttctgtaagaaaaaaaactcggccggggagggaaagaccaccatctcggtattatattaagaaaagaccgaaacaatggtcccggccgagaaaatccccgaaccctgacccatcactaacgggccggcatcaactgtccactctacaacagcccaaccggcaggacatcgtaacccgagagtagatgggacacagcgagaagattttttgaaccaagcctggaaatacgctctcgagggaaatcaaacctag

SEQ ID NO: 39835 - DNA, 374 bp, Zea Mays
gccacatcacccacttcgtctttctctcgcccaaaactgtcgtccgccagaggccgcgtcgaacccatgtcgttcgtctccgtccgcccatggtgatcccctctcattcctctctccatccccatttcctctcgctctctctcgccaggtgtggcgcgcccgcggctcgctggcgtggctagccagcgcagcttgccgacagcagcctggtcgacctgcgcgagcgcgcgcctaggcgtgtccccacttcctcgtacagccgcgcccgctatgccctcaccactgcgccattcgccgtgcccgatcctgcgcattcgaccttcgccatggtcgtgcattgcttgcctcgccccgtcgtcgccctcagtcctcgc

SEQ ID NO: 39836 - DNA, 2888 bp, Zea Mays
cccggttctgatgaccaactcgttgttcaagcgcctccctcgcgggttctgctgtaatacgtgtgatgaactccttgttcaaacgcctccctcgcaagcgcgttgccgccactcgccggagcagccgccgcgtccacgcgcaaccgcgcccgcacccttccctcactacgttctcccgcctctgcgtagaggggccgctcccagccgcgctcgcgctgctctccgagctcgccgcggcggggctccgcgcggaccccgtctccctcacccgcctcgtcaagctctgcgtgcgccacggcacggcagaccacggccggctcattcaccgccacgtcgaggcgcacgggccgctgccccacgacggcgccggcggcctctttgtctccaactcgctcgcctcgatgtacgccaagttcggcctgctcgacgacgcgctcaggatgttcgacggaatgccggtgaggaacgtcgtcacctggacgaccgtcgtcgcggcgctggcgagcgcggacgggaggaagcaggaggcgctcaggttcctcgtggccatgcggagggacggggtggcgcccaacgcctacacgttctcgagcgtcctcggcgcgtgcaccacgccggggatgctcacggcggtgcacgcgagcaccgtcaaggcagggctggactcggacgtgttcgtgcggagctcgttgatcgacgcatacgtgaagctcggggacttggacggcgggaggcgtgtgtttgacgagatggtgaccagagatttggtcgtttggaactcgatcatcgctggttttgcgcagagcggagatggggtcggtgcgatcgagctgttcatgaggatgaaggatgccggattctcgtctaaccagggcaccttgaccagcgtcctgcgggcgtgcacggggatggtcatgcttgaagcggggaggcaggtgcatgcccatgtgctcaagtatgacagggacttgatcctgcacaatgcgctcctagacatgtactgcaagtgcgggagcttggaggatgcggatgccttgttccacaggatgccacagagggatgtgatctcatggagcaccatggtatctggtttggcgcagaatgggaaaagcgtggaggcattgagggtttttgacctgatgaaatctcaaggtgtggcaccgaaccacgtaacgatggttggagtactctttgcctgcagccatgctggtctggtggaagatggctggcactactttaggtccatgaagaggctctttggcattcaacctgagagagagcaccacaactgcatggtcgatctccttggccgagctgggaagctcgatgaagccgtggaattcatccatggtatgagcctcgagccagattcagtcatctggagaacgctcctaggagcttgcaggatgcataaaaacgccagtcttgcagcatacgcagccagagaaatacttaaactggagcctgacgaccaaggcgctcgtgtgctgttgtcgaatacatatgcagatctgcggcagtggacagatgctgagaagccatggaaagcgatgagggaccgaggcatgaggaaagagccagggcgaagctggatcgagctggagaaacgtgtccatgtgttcatcgctggggacctatcacacccgtgctccgacaccataattcaggagctgaaccggttgatcggaaggatcaagtctcttggttatgttccccagacagaatttgtgctgcaggacctcccgaccgagcagaaagaagacctgctgaagtatcacagcgagaagatggcgatagtgtttgggacgatgcatgcggtggatgggaagcctatcaggatcatgaagaacctgaggatctgtggcgactgccacgcgttcgcgaagcttgtctccaagagcgaaggcagggtgatcgtcatcagggaccctgttcggttccaccatttccaggatggagcttgctcatgtggtgactactggtagccaggcacaaacgccccgaaacaaacgacaccaaaggttcccggtgccgtccaccgaccaccggtgacacggcgcccatagcaagagttcaggaggagcgcggagccgttgctggtggtagcggtgtccgtgaggcgcggcgagatgtctgtgcggataaaggcggtggtggacaggttcgtgatggagctcaaggaggcactggacgcggacatccaggaccgcgtcatgaaggagcgggagatgcagacctacatcgcggagcgcgagcgcgaggtcgccgagagggaggctgcgtggaaggccgagctctcccgccgcgaggctgagatcgcgaggcaggaggcgaggctgaaggtggagagggagaacctggagaaagagaagagcgtcctcatggggacggcttcgagccaggatagccaagacggagcgctggagatcaccgtcagcggcgagaagtacaggtgcctccggttctcgaaggcgaagaagtgagaggttgaaccaggacgacacagtcactcagggtcaggggggggtagtggtacaccgaaatctcagtttggaggctagtgtaagagtatctgtcaatctggcacacaggctgtcgctgtacgtgctggtttgatgctcactgcgtcgtgcgtcctcattgatgatttaacgatagggtcattgaaccagcgcacaacctgagaaaatggttgcgctgtccgtcctggggtcacggtagcatgaacctcagaactgataacctctgtttcggacggatacaatcgggttgaatgggagcctttcgtgtgcatgtggaaggtaaaatcctgcggtctctgtgtctggaacatgcttgttgccttgttggaacgaaaaggggagtttcggcttcactgcactggcaac

SEQ ID NO: 39837 - DNA, 528 bp, Zea Mays
gtgcatccctcgcaaaatagcatatgaatatacactcacaatctcaaatccatctcgaattaacgaacaaatagatagacatttgaagcatgatcttgtttatcctataattatcgctaccttctttgttctaccaatgcaaacaaagtctatggctgggtaccaagtatgacaacatggtggtaatatcaaatttcatgttgttagtagtgtttagactgtgcatccctcgcaaaatagcatatgaatatacactcacaatctcaaatccatctcgaattaacgaacaaatagatagacatttgaagcatgatcttgtttatcctgcagcagctacacgatatcactaaccttatcaatacttttgccaacagcagctgcatggtccttttctcctgcttaagtcgtttaaatagtcgatcatttatatgatcactaagaacagttattcgtaaaactttttccccaagaagatcacactgtggtaaaggtttgcacaacccacatttgacctcctcgacgtagcaa

SEQ ID NO: 39838 - DNA, 5642 bp, Zea Mays
aaatatataagagattagtgtagcacggttctgccagtgccatccgcgccctcagccgaggatctccattctcctccccacgcagaatccaccgcgaggttgcagtggtgtcgtgctccccagatctaccacgggcgcgtgcccggatctggcccgacgaacagcggtggagctcgcgcggtgttccattcatggattgggatctcaagatgtcggtctcctaggacctccgcgacttcccccgcgacagcgtcgggcattgccgccgcagctgccgcgccttccctcgcgacggcgccgagccgagcggagtgctccgtcgacctcaagctcggcaggacgacaccaccacgaaggagccggtggctgcaaccgcagcgccgtccgccagcccgatgggcggcgtcgggcattgccgccgcagctgccgagccttcccccgcgacggtgctgagccgggcggagtgctccgtcgacctcaagctcggcgggctaggcccaggagcagcccccggccccggggacctgcgacctgtacaagggccgctgggtgtacgacgagtcccgcgcgccgctgtacaaggagtccgactgcagcttcctcacggagcaggtcacctgtatgcgcaacggccgacgcgacgacgactaccagaagtggcgctggcagcccgacggctgcgatctccccaggtaccaccgccttgcttcctcgcttgcctgccactgattctacagaaacggtgcctatacgtatacgtgtacggtttacgcggcccggcgcgcgtcgtagggtaggtgcgcgttttcgtttgcgggctggatactgtgaattctagcaaaattaccttaattattagctgagcacacctctgtacaccataattatccgagactgagttgaatctgtatgtagaacctgctatgggatggcacttcttgtgactatgttagcagtagattcgtgtttgactgtagtagtaaaataaattgttgatcccaatggattgttctacaacctgtatctattttatgagtcggatccaatgccatctgccgccatgtcaaagcgaggtaagcagcctcttttaccaactggattcggccatttctcgtcgctcgatctggctataaatctcgcctgctcgtgcatgtgacatagttcggctgcttcaaggtgctcggaaaggggatgctgttgtccaaccccatcattgttagggccaagctcatctccaagatcatcgagaagaggatcaatgttactggaggcactgtcttgctgaccgccacataggtctttatgcatcttgttttatctatctgtgataagaaagctttccatttctttttgtggatcatgcgttgtgagataatattctctggtacgtctaattgtgggcatgtattgtccttttctggtgtatggttggaaacgacaaaatcaattgatttcagtctttatcactaatctgagatgcagatgctgtcgacggatatgcatagaagagaacatatatgcataaaagggagtaaaactaagatttggatattttcatccggacacagagtaaagaattctccactctcttgacttgacgaggctatataaccagaggccatcagaggagaactgaagactgagagcattctctgcttataatctttattcctctatattctaaattatttttttcaatccccttccacctggattcgattcgaatcccacaccaccacgtggtgttcttcctatatcgaataaacgttgtttcgcttgtctaatgatcgatagggcactgaaagagtcattcctagagactctacggaaggacacaacggagatggagcagcctgcttgagaagaggcggcggaggagaaggaagcgctcaacctagactcgtggtcgtcgaccagcatgcgccttgacgtcctcttttttgattcatttatttgattttttgaacaaaattgcccttgtctttgtccttcctcccttttttcattttcttaatgccctcatgtaaaatataaggcatgtgttgttcaaatctttcttttaaaactacatgtatttcgtgtgttctatgatgatatatacagaaactggtcttcttgatatgttgatagtggtctgtttgctcttgaaccatggccattcagtgtaatccgtgaatgtcatatattatactccctctattttgaaatatagaacattgaggacatgctacaactaattagcctttttattttgaatcaagttttctctttctgccaaatcttgctattaagcaatagtgcatgcatattttttttctaaatcagaccattttctataggacaaaggagggcatatggaaggacataaaggaaggagggatactggatgaacatatcgtgcatgagaaagaaattgctatttctgatattcaacaaactgttgaatctgttcagcttgacatcaagcaccttcttgaggcagcagcagcaaaagtggcagaagttcagctagaggtgaatcaactttatggttttgctgaaactctgaattcacttaacatcatccaagagcatgatattgttttcaaggatatgcttcattcagagctgactggactaaccaataccatcggggagagctacaggattcaagatgaatgcaagctcccaatgcacatatcgcctgacgtgaacctcgatcggcatcaggaggccaacggaggatcagagcaggaaggcgtggagcttgagctgcagcgagagcttgggcgtgagctgcaagaccaatgcaggcgtctcagtcagcaatacaaccgcacaactctcctactgtctatgaggtgtcagatgttcatgcatattccagtaaagttgaacagagccatcaggagtgcgtacatacagggcatggaaattatctccaaaggccgagccatcttgtagctctgctatggattcgagtcaccgtgggttgccgtgagaagcatgagagccacacagcctgcagatgcgagcagcagtcttcttaatgataaatatgtctacagcttcagtcataactatactgatgcattttaactgcaacgtcactcatcacaataaacatgaaggacataagctttatctcagacactcaatgttgtgcgataacctaatcaggtcacatatgttgtctggatcgtattaccagatgtcatctgataatgtgcaattttagagagtgttgaaggcttctttataacgttctcgagttgtagggttctaaggtccgactggcacgaggctcgttcagtcgtctcgaggagtagcaccccaagatgtaagaatggcattaagggcctgttcgtttcgcatggaatgaaggggtgaaataaatctgccttggattcctttaataattactataagtttgttaattgaaatacaatgagcaggtattttcttcttgtgaaccttacagtttgggttgtctgaatttattgcacttatgtgatctaaacagaaacatgttgtcctgttgccgcccagtttgttaatagaagactgtttctattttcaggagtcagggttctctcaattgcgaatgctcactcttgagtaaagggataggctaaagagcagctccatccagttcgacgaccatagtttttgcgagtgggtgcacaacctcaaattagcaagtacatgcctacatcgtcgacaactaaaggcaattactgagggagctcggtggggaagacctaaaggtgaagacggtaagtttgtcattaagtcattttgactttttattgaatgataacatggatctgattgtccttttctgagtgtttaattccttcttatttagtgccattggacatgtggtagctggctgtcacattgatttgaattcctatatatattctttagatggcataatcattttatcgttgcaaaagttgtttcagataaaattatgtctgcataggttcccttgccccaaagaaactccatgttcagttcaagaccaaattacaaaaagaaatcttcaacctacaatactactactccatttcattccttacaaagtttgtctttccttgatacaaattgcagaatgcactgaatagccttgaaatctttaaaaaagttgtactcacaccagcgcactaatgtcagttaggccatcaatgaagttatagaagtcactgatgtcataagttaggccattgggttgatatccctattttttctttcataaagcccacaaatccctaccatttctatttactgtaaaaagtaacttgtgtactttagaagggaaataaatcaagaagcacgactaactagaagttctgtttaattttttctgaagcggaaaaactcagggagaagctgaggcaggagtgcctgtggaaggggacggaactggcacatggggtggctgacgccctcttcgctgtatcacccaccgaggacctcgacggccctattgtacacctcccaccgcccgctgttcgactcccgcgcgagaagcatgtgtccgaggaggccggaaatcatctctttgtggaatcctgcattcctctgcacgacttcacgtacattattatttcacatgacaatgctacagttacactcttatctaattcacacgtatcatttttgcagcttggtgctgggacctcactgccaggattagtagctgcaaagatacttgtgttgccaccttatcagggtgaaggctatggtcttggtcttcttgaagcaatcaattatattgcacagtctaagaacatttacgatgttacaatagaaagcccttctgattccttgcagtatgtgagatcatccattgactgcctctgtttgctcatgtttgatccgatcaaacctgcactcggtgctattgtctcgtctctgaaggagaccaacctgtcaaaaagggcccaaagtttgagaatggttccaccagctgacctgatggagactatatgtcagaagctgaagataaagaagaaacagttccttcggtgctgggaaattctgatcttcctaagcctcgactctcaggatcataagagcgtggacaactttagggcctgcatatatgacttcatgaagggggagatccttggcagtgcctctagaactaacaggaagcgtctgttgtagatgccaaccagtttcaataaggaggcatcttttgctgtgtattggacacatgagattggggatgaggatgaacaaactgttgagcagcagccagaggatctgaggacgcaggagcaacagctcaatgagctcgtggacatccaaatcgaggatattgctggggtcgccaagaacgtcacttcacgtggcaaggataagatggcagagctggcggttcaatgaatttgggtgaggttcctacttcaaacgacgttaaaatgttgtcgtagcttatctggtgaggtctcttttacgggttggcttcttggtagaaagggaatgtcacagcataggcactgagtagattgtcacggcagattattatgtacttcaattctggaatatttgatgggaatgctattttagattgcttggtaagtgggaaccgcctcaaatcacagaagtagaagcagcttccgattcagccggaaccatttctccaaaaatg

SEQ ID NO: 39839 - DNA, 1978 bp, Zea Mays
gttagcgggagcgggtgccgttggaggaggtctgatctcgtctgcggcgggggcgagagagcaaggccacggcgtcgcggcaatgagcagcaccaccgccgacacatccccggagagcgtcggctcctgccgccctcccactcctcctacttcccttccccctcattcagcgccggcggcggccctccgcggcgctccagtgaggcggcaactggacttcgcggacgcggacgccgactcctgtgccggcgccggtggcgacctggacgactacgacgacttccttatccgcgccgtggatgacattgagcggggctataacgaggccaagcgacgcgctccgccgtgcgtctgcgggcgcggctattgcgcggtgcaacgggacgaccagagcggcgggtggataagtgtaaacatgttgccatgtgtaaggaagttgatcagaatccacaatcaccgcctgttgttagaagtgatcctaaaacaagcaatcgttgtgcattcaacgttccaaggactcctgtaaatgatgctagaacacaaattaataatgttactctcgaaggtgctggtgctacaactccaattaatgtcagtccccaggctgctgttgctgcaactccatttagttacacttcgaaaggtgttggcgctatgactccagttcatgttagtccccaaggtgctggtgctacaactccaattaatgtcagtccccaggctgctgttgctgcaactccatttagttacactttgaaaggtgttggcgctatgactccagttcatgttagtccccaaggtgctggtgctacaattccaattaatatcagtccccaggctgctattgctacaactccatttaattacactttgaaaggtgttggcgctaggactccagttcatgttagtccacaaggtgcacacgctacagcagcagttaaagttagtccccaatggaatagatctaatgatggacgatggaatagatctaatgatggacggccaatttgccagtgtactgcagggaagtgtaaaatattgagagtgggcaatgaagactggtatgtttgccctatacccaagggacaaggtgcatgcagttacaaggtgccagtaacagatgctgttggagctggagacaacgacgacgcaaatggatcagccaatcccgcccaacctaatgacgacgagtggccattcgacgtcatcaacgatgaaatcgtgccgacgccgcgtgctgtagcccagcagaagtcaccgagcacaccgcaccaccagcggagtggcacggcgagaacacctgcgccatcgcccgtgacgccgttcggtagccgcggcgctatgaccgggcgcccaaacgacacctgcttcgggtgcggcgagaaggggcactggatcagcgcctgccctaaaccgtctccgcgaagtaggtgtttccgttgcggcgtggtcggtcacaggccggccaattgtccccagccgagagggtcttagaatagaaggttgtgggtgaactggtggtctgatgctgcttttgggctgtgcctcgtaggcaatcagggctcaggagcagtgctaatgtttctgcttaggaatcttaagagcttgttcgatttgaggtggatcagaggggaatccacctcaaacccaacaagtcttaatcgggtttggcattgtagctacgagagagagagagagagaataatgtgtttgttgagaggtagggtggacaacggtgtaaaggtccgcaattgggccccattgtctgcctagtttagttaatttagttaataactaaattaatgtagttaattcagttaatgtagttcggtacatctatagtacatacatctgcgtcctctgtattggacctttgaagaacgggatgaacatgaaccgaggacggacatattgtaaggtgcatccttgaaacccctgcttgttctttgcttgtgtcctgtcctgacccgtctcgttt

SEQ ID NO: 39840 - DNA, 2225 bp, Zea Mays
caacgccgcagccgccgcgaaatccgcacccacccgcgcgacctctactgccgcaaggccgcagccgccgcgaaatttgcacccacccgcgcgccgcagccctttgtccgcgccggagcctagcaccgaaccgccgcggattcgccactacatcaccggccatggcttcgggcatgccacccgcgccctcgaggtggtgaggcacctggtcaccgcagggcacgacgtgcacgtggtcatcgccgcgcccgagttcgtcttcaccaccgagatcgcctcccccagcctctccgacaagctcgcgtccccgtccacatccgagatgctcgcgcccgcgccttggatggaagcccagaatcgccttccatcgaggattctacaccacgcgtcgcgccccctccccgcacgcaagcccccgcctgcacattctccgccaccccatcccctgtccggcgcgtgtgccacggcctccctcgaccagcggcacgcgtacgccatcaccccctccctactgctcccatccgcggtgctcaccttcgccatcgcgcaatccatcaaggtcctcaccacctggtataaggagaaccggtgggacgcgaagcagctggtgggctccggtgggatgccgtcctcgcactcagccaccgtcacagcgctcgctgtcgccgtcggcctgtaagaggggctcgccagctcgttgttcgccaccgccgtcgtctttgtcttcgtggcacaataagccacttcaggcttcagtctgttctgtgatcagcagaacattatgggctctaaagcaggaggacttttgagattaaatgatctctggtaactgaggagaatgctgtagatgttgattttccttttaggaaggtgaagctctccgatgtggtagggggttagtacccctttcctctcctctagcatgcttaaggaggtattgttgggcttttttatactcatactcagttgtatatatgtttctcaggaatggaaaatgtgcatatatgcttctgattgcagtgagattagcctcgtccaagttatgggatctgccatgaactagacaagattataagtttacagaggccttacatcaagagagtacaagattgccataaggaagtaaagtctttgaggaaagtgaccttatgagaagcttgagaaaatcaacttgtgtgtgagaagttttgtctacttgtgctaattagtcatatgatatttttagtcatgaactagacaagatcagaagtttaaagaggttttaaatcgagtacaagatcgccataaggaagtacaagtctttgaggaaagtgaccttatgaaaagtttgagcaaatcaacttgtgtgcgagaagttttgtctacttgtgctgatcagtcataccttggaatattgctgaactgttgcctttgttgctcattggcttcaatacttcatacaccatcaaatgagtcatgtgcaaaattcttcgaagcatcagttcttgctctagaagaacttcatcaggttatagcgaagaacattgttttagctggatacaaggagatgcagaagctctgagttttgaggatggatctatggatggttacactatcacatttgggatcagaaatgtgacgcacattgagaaagctctatcagaagcttacagttgatggttctaaagcaagggtggaggttcctatgcttggagttgagtcatgtggatgtccctatttttaaatagatagctggttgatggtgatcggcagatagaagacgggcaacatgctaaccaggcatgtgaaccttgaaccttggcaggaaaagtttgctcagatgattcaggaagccggattccagagggtggaatatgaaaacctcctgagcggtgtagttgccattcattctggactgaaactgtagagctgaatacggatggatgttttttcatgggtgcaccgcttctacaattagtagtatttgttgttttttaatgaattctataataggttcggtggcttgtaaaagcagctggtgctggctgtcagcattagcacaatatgtagaataagtagtatttgcgagaagtatgtgctggagcagtagcgtcagtggctattttggcttttaagccagctgacctcttccatttgtaaagcttttttcttggaaacgtgaaaccatccagaacatcaaattagtcttatcacatacctcctgcaatacattttttgttctaaaa

SEQ ID NO: 39841 - DNA, 534 bp, Zea Mays
catgatgttttcatggaagatggcgagaagctctccacccttatcatagttaactcttttgattaagtgattaaccaatttagtaacacatatttaatgttttagcttgtttggtttagatatggaggtccgtcagtaattttgtaattttttgtattatctttatctggaaactaagttgtatgtagtgacaggtaagaaatactgcggtggtttggacctcagttattggccagatgaaggtcggaggccattatcagatcctcgtccacctttgggctaatgctgataagaggacgagtgtcgtacacctctccaattccccccttcaatgtggtcagtgttgaatcatctacgtcatacagtgaacaagggcatactgatgagagaagggatgacatggatttttctcattcgagcatcaggttttgtgcgctgattatggtgtggtcgttgggcagtggcacaagcctggacgtcgttgctgctgccattcaaattttggagatatattttgtgcacataaatggaaca

SEQ ID NO: 39842 - DNA, 1967 bp, Zea Mays
tgtgagtccacggtgtgatgtcacggagcggtggcggctttcccgatccactgtgcgggagaaatccccgtgcagccttcttccagctcttcctactctttgctactcgtcttcgctgatttctgccttaattccatcccttccctgcctagaacttgctttgcttcaccccatcacagcttttggtgcctcgtcatcggcgacctaaccgccggcgaccagataaactaagccaggcccttcgctccgaaagtcgtctctcgtagagagcacttgctcacctgctcctcgccctcctctgctggcagtggacttgcgcggagtggagatccatccggacctggttcgatttcttcatctcggttgcttctctgtccagtgggtggatcactggattgtgggttgtgctaactgcaggctggcttgtcagcctatcataaggaaagtgaaaaagagacaacaaagcaatttgttgtctcattcttaggagctggcgagcactcggcatggcagatgctagttcgaggactgacacctcgactgttgtagacatggatgataagaatcaaaggttagaaaacggacagagtggagccatggtcccggcttctaattcatctgaccggtctgacagatctgacaaacctatggaccagaaggttttacgacggcttgcccaaaatcgtgaggcagcaagaaaaagccggctgaggaaaaaggcatatgtgcaacagctagagagcagtaagctaaaacttgcaagcctggagcaagaactccagaaagctcgacagcagggaatcttcatttctagttctggagatcaaactcatactatgagtggaaatggagctatgaccttcgatttagaatattctcgatggcaagaggaacaaaataagcagataaatgagctgaggactgcagtaaatgctcatgcatgtggaaaacatctgctgaaaggtgcttcttgtggcttgggggtttccgttcgtctgagcttctaaagctccttgtgaatcagcttgagcctctaactgagcagcaattgatggggctgtccaatctgcagcaatcttctcagcaggctgaggatgcattgtcacaaggaatggaagcattgcagcagtccttggcagaaacgctggctgggtcccttggtccatcaggatcttctggaaacgtggcaaactatatgggtcaaatggctatggccatgggaaaacttggcacactcgagaatttccttcgccaggctgacaatctacgacagcagaccttacatcagatgcaacgtatcctgacaatccgacaagctgctcgtgcgcttcttgcaatccatgactacttttcacgtttgcgcgcactgagttctctttggcttgctaggccacgagagtaacatcacccccgttggggtcactcgatgaactgatctgtgaatgtgggactgctggctgcaaactcgcaaagcatttgcagatgactggaggatcagtcctctctgtacaagttgtattaacatcttctggtctcatattgtgctccagtgttgtacaatttagggaaaagcttggattaacttgtaagttatcatgaatttgttattggcatattgtacaattgtattagcaataaaaatagaagtacataagtgctggaagcctggaaggatatccagaatctatattggttggaaacgagcagcagaagattgttatagattgttatgttgctttgaatattcggttgtaagtgccttttttggggtatatagaacaaagaaagattcaggagagatgtagggattcaccagaggctatcggggattgtgcttctaggagctccctggactatctctagcaagtctcatattaagctctactctgtaaacagtgatacattgaattgaacgtgctacggttatgatggtaacatttgctatgcattttttaggatgaattctg

SEQ ID NO: 39843 - DNA, 686 bp, Zea Mays
tgctacagtattatgtaaataatcattcagcttgtaactcacactttattttcttatatcaggggtctgtggttggtctgcatgaacagcagtttggcaatgttcccatccagattactatccagaaatgtaaatctgacaatcagagaaatgatgatccaaattgttgccaatccttatgggaaaatttcgttagcactgtcaaaaaagaaaatttccggcgacctcagagtgcaagatatcagacaaattttaatttgatgatagctgatgttatggttaaccatgcacatgtttttagtgatatagaaaaatcattttagcttcttttaagtcgttatcagatgatgggcaacgacttttcattaggatctacactcgaaaagggccatggttccggaagggcagcatctcatatcaagagatttcagatctggagcatgcagtcatggagttggagttggcaggttatatcgacatgctttcttgcaccattgatccttttgaatatgatatgaaggagattcttgatgtgttaagtgttcctgaaatgaaggaaattctcaaggagcttcctaaggataacacaatccgcacacgtcgacatgagcttgttagcacccttctgtcttcataccgtaatagtacctgtgcatcactaccaaaacggatcctaaaatggactg

SEQ ID NO: 39844 - DNA, 2540 bp, Zea Mays
caatcacagctctcgtcacgacagataaggccatgtgcatccttcgccactcaccagcgctctccagtccacttcacttcatccctgatcggcgatcgcgtcgagcgagcagcgctataacgcacgatgaacttggcgtccgtcgttccctgcgcgcaggcattcctcgcgttaatgactcccgccgctggctcccaccgtcgggtccacacgcatgcggcggcctccaagagcggattggcctgccgcgtcgcgcgcagcgggggcacccggtggctgccggtctcctgtgcagccgggggcggtgcagcatgggaggaatttgcttggtgaggggcttggagtactcttgggggagataggcgttcgcttcatgcttatccaacagagtgagtcatcaaatcagatctaagttcttgaataaactggtgcaatttccagtggtctcaattctttcatctacgatgagcactaatagttgagaaagaacatgccaattcatatcccggttcatacctgctcccgatatctattatcgaggatacttgctcttttacacgacgggtaacagcagttctcatcctctcttatggattctacttgcttctgttccatgtttagcatcgctggcccgagtgttattcctgttgtccaaaatctttgagccttactgctacagggtgtgctgaactttgattctatccatcataatcaaaaaggggaaaaggtgatgtctgcactttctagtttctggaaaagaactctttatgctgtcctttattatgaaataagtgtaggttgaaactcatatatttagttttttgccactaagattaactgtgtgggaagttattatttggaatatttaaattcatgggaaattaaaataaacaaataaaacttatttactcactaggaaaatcatttttagggtgttacatcagtagatccatacagaacaatccggtaaggagaagcagcaatactgggtgcagttgcattagggtttgttgaacaaaggtttccagtagtagtttgcaatccccaggcagaaaatatggtggaatagcaactgatctgcaactagcttatcagccactattgggaatcccaccggcgaacctgcaggttgtcactggggagagagcacctgcagcgctctatgtgtagccaaagaatgtaaggatgcagcttggtccacagtagtaaaaccaaactttgttggcactaaaaaacaagtggattgagcagcttgaaaaggagaattattcagcttcctctattgtgctgaactgacttctgaagcactattttttgctgcaagtgcagttataaggaaaggtgttactgctatgcattggtgctggacctcatgatgaagcattgtgctcattctgtttaggttctgaacttttgtgtttctttcacaggcagtgaagaccattattgtcagtcttgtcttgtgccccattgctataatcatctttttcattgggatcaatctcaataggtgggatggcttgtataaattcgtcaacctctaaagtgaaagttatgtcataacccaccttgatcagtggtacacgggaattgttccatattcaacactgtgcatgtcaacatcttgggctgcaccaaccacaattcccactacccaaaaagctaggtgctggcgccaagcaaagagcttgcctgaaatatggatctggatgaccaagtgcaatagaaatagttttagggtggagaaatgattgggactgatacctgatctatatttttcccttttgtgtgcacacatcttagctagcaatgcatgtattttatataacttctgttgctccttaatatcaggttggtcgtaccacagtcaaatctacagaagacctgattcttggcgttcccttgataactgtcaatctgttggacttgtacttaagtctcatgtatacacaattatacatatgaatatgttttggtgacacttttgttactgaggacactacaaatgtgatgtttcctcgggaagtaacagttccaggctatacacacccattggttgcagttggcacagatctccatttcggaagatgaagatccacgtcaagttgatgcagagatcaaatctgctactgttaattatgctctatatgatggcttctttggtaaatccacagtgtgcccttctttaagatcatctacagcccagttgctggacgcgcttctgcttgcgaagtgacaaaccagtcgtggttccatatcaatggttacgagtggttattcccttctcccttgttttcccgagggaacacaggacgggctaggtgtccataatcataagtcccataaaggaaattaatttaattattatagagttcatatgtaacatttttgtcgtccctgatgaaatatggtgaatttgtcacgcccctatgctgatattatgattggcagattgctttaggtagtgtttggttgaggagccaaatagaacggagccattccatcctgattctaggaacggagccgctctgttctgtgtt

SEQ ID NO: 39845 - DNA, 1540 bp, Zea Mays
gttgcatgttctgccggttccagcctcggtcgcggatcgcccactctcctcccccacggacgcagatcccccgcctcgattcctcattccttcaatggcgcatcccttccttcgatggcgctcctcgcatcccgcctgcccgccgcgctcgattcctccttccttcaatggcgcatcccgcccgcagccaccaatcaacgcccgcggatcctcgtcaatcaactcccgcggatcctccaccctcctccccaccgcggcggatcctccaccctcctcgtcaatcaacgcctgtggtcctcccccacgcggatcctcgcaccacccactcccccgcgtgcgtccctggcccctcgagctcgcgcaggccagaggaccgcgctcgcccccctgaagattactccctccccaaggagctggcggcggcgtgactgtgtcgggagaaggaggccgtagaggacgctgcgcgggggctgcggcaggagctcgactccgagcggtcctccccggagatggcagccagatctgaccattgagccccctaatcgagcggatccaagatttaggcggtggtgaccaatctgaacggcgcacactcgacatggccattgctatggcactaagggagagcaagcccgtgtacctcagcatcagttgcaacctccctgggctacctcattctacctttagttttatgttcaagtacatgattatcgggagaaaccaagatatggtgcttacactatttttgtaaatccttttgtagcaatgtctgtgcgctgggctgaaggcggacgcgcttgctcatcaaccgcgtgcggtcgagtgctagagccaccgattcaccgtcgagtgcatcacccgctacatcgctgggctacagcagaagtatacacaaagtggtggagtccgctccctttggcttcgaacccgacaccaataagccagcgctgtaccagaccgatccatcgggtaccatctctgcttggaaggccaatgccatgggaaggaactccaactctatgtgtgagtttctgaagaactacaaagacctccggcaaggagaccatcaagtttgctatctgtgcacttctagagattgtgaactgaacttaaatcatgcattcagtattggtctctagagaggaagctctgccaagcattactaagaactgatcaggtatacttatccatggtggaaagaaaaggtgattgactcagacttgaaaagaaaagatggcctttgcccattgacgcctgaggagactactcttgtcctcagagcacttgacatcgatagaagtatgcaaatatacattgctgctggggaaatatacggtggaaagcacaggatggcttctctaacttcagcatacctaaatgttagccattcatgctgttggacgccttggatgaactaccttttcttcaacaaagatggagctcatgcagattgatttagtccatttcttgcaatgtaacatatatgtttcatacgaattttgtactcccgtcgcatcgcacgggcactcacctagtatat

SEQ ID NO: 39846 - DNA, 2540 bp, Zea Mays
cgcaccctgatcccgcacaccagtcctgctcatggctccccgaaaccgtcgccccagcctccctcccctccccggctcccccgatttcagctgcccccgaactccgtcccctgttgtccctacctcgattctgccgccgcaaacgccgatgtgagtcgtccgatcccacccgcaaacgccgctccccgcctcgaggctcgccggaacggacgcctggataccgcggccgcaacccaccgccgcgcagggaggttgcgcccgcactaaaatggagcacagggaggctttgccccccacaactcggaggacgtgtgcaggccggagggcatgggggaactcgtgttgaggtctatgcatcaacatcttcttcaagtgcacaagcaccagcacaatggtaactcgtaagctcccataagtggcatgtcaaggtcctctctgagttctggtaaccgataagcgcccccatgaaccctaaccctaaactcccttctcctcctccatgcccctcgatcgaccgattgatggaccccatgcgtgccgggggtgttattgaccatgtcatagaacccaaggttgttggggttcaatgtcggctggacaggggatggtgggggcggccaggtgatgtaagccaaatcgctttcggcctcctccagcagcgctgcgaagacgaggtgctcgaggtggcccagcgggaccacgaactggtgacggaacctgctcaacaaccacgcgcgcttgacctagcccccaccggagaccctcactgtggcctcctgagtcggatcacgcctcaccttgaactgcatcgacgcctcaacctgccggggcaaggtcacgtgccttgcggaggctataagaatgttggggggttgtacaactccatagcttggtgatcacggtggaggactacaacagctcccgcagaaggcctgccagcttgttcgccatggacctcaaccacaacaagctcgatctcttctactgactgctggtgtgcatcagcaccgtcaaccttcatgcatcccctagttcatgtaccggtactttggccgcggcagagtcgacatctgagatatatgaggccttggaattgaggaatggtggatctgattattttgtcaagggtgttcttaagatattgctaaaggaggtgctcgcagggaggaggacctcaacgtggtgggcatactttgcagagatactgtccaaggaaggaatcagtgctgaggtaattccttttgtaaacgttatagtttcactgatcagtgcacgcacccagttacaagtcggattccacgtgcccacgccgtccgcgcaagtttgcatcaaagcgctggggaggatggaatggcagatttgcattaaaccagcgacaccacttcataaccagcaggcaggcaacacactccttcagatcggtgggatgttcgaaaaagataagcccttgtaacctttgtatgcatagtaggcaatccttgtgtagtagaacccagggatgaacattacaatgcccaacatcatgaagaaaattcctgatacaacataaagggccataagtttaggtaaagggagtgaaaatattcatgcataagcactgcatttcatttgaataagtacttaactaaaactgctatatgaaagggttcaaaatgcatcagtacttgaaaggtgaatcagcatccatgcaaattatcaagcctgtgcgagcaaatcacaacttgttctaatcaacaagcagtttagtgcaaatcacaacttgttcttaatattcccctatcataggcttctagcgtggagtatgaaaatatgtgatatatattgtggtggtattgttttctgatgaaatgaatattattaccccataagtggacacaggccagttgaaccaatacgaacccgatcaactacatcgatgcatcaccaacccaagcatcccaatccaaacaacttgtaatttgaaactagaggtacattatagtaccccttttctttttagggaactagactattaaggaacaccttttctctagtggggtacaagactaatataatcagtttgtgtgacccgcctgaaaactatgttctgttatcagtattttgtgccgtcacaattcagttagcagcatgcatgttcaattgttggtgtctttgttaagtttgagtagaaaagctcaatctagcatgctcttcgctctgttttactttccatgattcgttgattatctatgcagtttctgcacgattactatgagtatgtgctttcatatattgtttactcgatgacttgaatagtttacaacgtatgattattgcttaggaccctgcactactaaatcaggggactcgcttgagtcagaaaaacttaggaaccaagttttctctctaagttactgacttcattttctactgtttatagattgcgaactgaatttaaatcaaatacttcagtattggtctctagagaggaagctctgccaaccattactaataactgagaaggtcctggtgcttcaatttggttattagatttaaaaaat

SEQ ID NO: 39847 - DNA, 261 bp, Zea Mays
gccaagccaagcgacaagagcaacaaagaacacaagtgatcctctcacaagccctaatgcactaatgttgattttggggctttgagtggattgattgctttgattggattgattgctttgattggattgattgctttgattgtgtcttcgagtgttgggcttttgctcttgcaatgaatgagaacttagaaatgcttggatagatatgaatgaggtggttgggggtatttatagcaccaaccacttccatagtcgttcgtg

SEQ ID NO: 39848 - DNA, 820 bp, Zea Mays
ggtgggaactataaaaagaagacgtctccgaatccgtctccgcctttcctgtctcctctcgctcgctctccccgtctcccgcacgcccacccgccgccgccgttcgccatgggcctcctcgactcgctgtaccgcgtggtgatgcgccgcaacgccgtctacgttaccttcgtcgtcgccggtgcctttgcgggcgagcgggttgtagactacggagttcacaagatctgggagatgaacaacctcgggcatttatcaatataccattctgaagtctgaagagcatatacggataatctggagtagagcactagagcccattaagacatcatatgcagtgaacatacactcagcctcttgtttaagcaaaaaggtacgaagacataccagttttggggcagaggccagccgaagaatgatatactttggtcgccatttagctccggtttaaccgtttcattttcgcacaataataagctgtgtaaacttcttactctgctgctgagagctgcttcccattcattttactctgaacatgctgtgagggaatttcgtggtgcatggctgaaatctgttatatagagcatatgcaaatacgtctagaggattcctctctctgcccagttcgacattatccgtgcacgtatcctgccctttcaaaatgacaaaggtttctacggactaatttttagcctttctgttttagtccttaaattattaaatacagtgactaaaagagagattatctctattttagtccttatgtttggcaatttagagactaaggtgtcgtttgattcacatatttgtaatgtgatgg

SEQ ID NO: 39849 - DNA, 1076 bp, Zea Mays
cttccgtcctgttctcgtcgcacctctttacctccgccgccgccgctattgtcccattccaatctagaacccatagtcttcttcgtgattgtgcggttctttggtgagagcatgagctcgtctacttccggaacacgagagatgttatctccaaattctacagcaacatctattggccaagttcaaaaggtgcctggttttgccaagcttcagggtgaaaactttgtgtacttcatgcaaacttattcaatcatgttgggacgcactagcagaagttatactgcagactttgatctctctaaatatgaatgtgggagccaatgtgtttcccgatgccatgcatgtatattctacgactttgaactccgccattttgccattgaagtccttggaagaaatggatgcaccattcgaggggtctcttatctcccagtcagcaagctacatatacaaattgcagataaggatacagacaatcaacagatcctactagaagaagagaaggatgtaaccacttgtcttacaaccctgatatctgagttatcaggtcctaaagaatgggtgcctatggaaagactcctttcagagatttctaaacgttttggtaaaaaatggcttcgtgacagggtaagcaagtacttaccacaaaagggcatgtctggctcttcaactaaagttgatcataggccatggtgtagcttgtgggagctactcaggaagcacccagagcattttgtcatgaccacattgacaagaggagaagaaacatcagattatgttggcttggtacacctggtatctgtggaaaatgaaccatgaatcctagacccattattgccattcgaaggacttccgtaccattatgggctagttatgtttgaaataaactaggacatattattgttatcatataaaatttgaagcccattttgtagtatggctatcatgttctattgtaaaactatgcagctttgatgtggtacctttagttttgatctatgcatttcaatgtcggagtttggaaacatttattttgaaagagtttgatttattgggaaaatattattgtgtgttcc

SEQ ID NO: 39850 - DNA, 414 bp, Zea Mays
gctgcgtgtgccacctcctgtcagctctatcccgtatcaccgctcgttgatatttccccgcgtccaaagccgatccctcgtaacagcagccggttcgttgatatttccccgcatccaaagccgatccctgcccctatataagcagaccacgtacctgttggtcattgctccatcgcctagtcgaagaagatccccttgtccatcttgtgccaccacgagcgagcgttgtcgcagatgcaagataaagaagatcgccactgagagatagggtgtgacgatttcgacttgcgcctatgctgcaccctcggatacagcaagtcatctgggagatagagaaggagctgagaaaaggagaaaggaagtgaggtcacgagaaactgaagagcaagttggtacctggaatctcaagtccca

SEQ ID NO: 39851 - DNA, 2251 bp, Zea Mays
tttatctcggccaacgtggacggcgcgtgattttctcttctctcgcagtcgcagcacggcagtcggcagcaggcaggcagccagccagcagccagcagctgcgaatcgaagcggaatcgaagcccaccaccagcagcagtgcccacttgcttggagcgcgagtttaccccgagcaaatcgcggcggcgctcgtgcccgtgcctcccgcgtcgaaccctagtgcaactaccagatccggagatcccgcgcgggcgcgggcgggacaccaagcttctgactcaactcaatccccgcacctgccaatgccaccccctcggcgctgatccgatcccgccgccgccgacactcgcgggcccgccccatggattccgcccggagctggctccagaagctgcagccgcgggacaaggacagagagcggggcgccaagacgccggcgccggcgtcgcccaacggtggcgccggcaactccgcgaggatggccgccgcggcgggggaggaggcgctgtctagcgccaccaagcagaaggtggcggcggcgaagcagtacatcgagaaccactacaagtcgcagatgaagtcgcttcaggagcgcaaggagaggtgagactttgtagagaaaaagctacatccaatgtgtatgcaatgaaaaagcttaagaagtccgaaatgttacgaagagggcaggttgaacatgtcagagctgaaagggacctccttgcagaggttgatagtccttacattgttaagctgtactgctcatttcaagatgatgagtttctgtacctcattatggagtaccttcctggtggtgacatgatgactttactcatgcgcaaggacacactgactgaggacgaatctaagttttatgttgcagagacaatactagcaattgaatctattcacaaacgcatttatattcatagggatatcaagcctgataatttgttgctagatcgaagtggccacttgaagctttcagattttggcttatgtaaacctctagatagcagttgcttcccaaatctgagtgaccttgactatgcagcaggcggacacaacaggaacaactactacattggcagaagaatcggaggatgttggcttactctactgttggtacacctgattacattgcacccgaggtactcctgaagaaaggatatggaatggaatgtgactggtggtcacttggtgcaataatgttcgaaatgcttgtggggtatccgccattttattctgaagacccaatgtcaacatgtaggaagatagtgaattggagaagtcatctaaaattccctgaagaggccagcctttctctagaagctaaagatctcattagcaagctattgtgtaatgtggatcagagaattggaacaaaaggtgcacatgagataaaggcacatccatggtttgcaggtgttgagtgggaaaaactatatcagatggaagcagctttcattcctgaggttaatgatgagttggacacacaaaactttgaaaagtttgaggagactgctcctccaatgcaaacttcatcaaaggcaggtccttggagaaagatgctttcctccaaggacgtgaactttgttggctatacctacaagaactttgaaattgtgaacgatcctgagcttccaggaattgctgagctaaagaaaacgaacaacaagccaaagcgaccaaccatcaaatcattatttgagactgctgatagtgaagaccagccttctgatggcagttttctgaacctattacccacacaactggagctgccagagagccttgagccctctcctcactccagtatctcttctgaggattcccaagcacggaataggtagcaggtctctattcagaggacaagctccataaagtttgcttttgaagagatgtttgtggtgctcagcagccatctaatgtacattgtcctgtacattgttactggtttccaaagttcctttggcaacgacacgaggaggttggttgtcatatagaggaggaggtatttgttctctcctgtaaatccttggattctttgagtttctgagatttattctttcgatatagcatgccaagggggtatgctgcctgtttcctttttacgtgcagaaatctgcatttctacatcgttgttgtaagatttgagacagtgtaaagaaattgcaagtgataaacaagcgaccgaaaatgataatgaaaatgctatttttcttctatacagccttttttctttgcccttgtactt

SEQ ID NO: 39852 - DNA, 317 bp, Zea Mays
acgcagcatggttcgctgcccagcgccgcggtgtcgcggccagccatggctgcgcgtccgacctctgcccagcgagcccagtcgctgccccacgcgcatgctgagcaggctccgaccagcgtccttgcacgcatccccatggttgtgatccttctctccccttccctttgctgctcgtgttcatccatggaagaaattgcctagaactgctgccgtgcgtgaggacggaatgatgattccagaggagagaaagggggaccgtttcctctccgtcccactaaatcccatggtcaatcctctcctacccttcctccatt

SEQ ID NO: 39853 - DNA, 2233 bp, Zea Mays
gcgatcgtaaggtagcggcggcggcggcggcgtggcgacagcaggagtatgattggcccagttcaatcgcgcgggcgcggccaatctggtaggcggtcatcatcagaatccagaatccacataccggcccatttacagcaaggaaccgcgaagcccaagctcgtcttctttcttggaagaggggccgcttcactcgactgaaagcgcaatcaactctagtctctagccacaactcgaagtacgagtaactccggagtccggatggctgcagcgatggacgtcgacgaagccggcggcgaggagaggcgaccgtcagagaaggagctcttccgcgccgctgagtccggcgacgccgccgcgttcgcctccctcgcccccgccgacctctccctgcgcaacgaggacggccgctccctcctccacgtcgccgccgctgccgggcatccccaggtggtgctcgcgcttgcccagtgcggtggtgacgccgcggctagcgtgctgaatgcgcaggacgaggaggggtgggcgccgatccactccgccgcgagctccggcaactctcaaatcgtcgacatcctgcttgagcgaggtacgagaccagctcaatacgtgtgggtggactgtactatttctgctacgttttttttaagattagttggcgcaaaattggtagtacatgacggggttgatgtcttggtgttttctgataacatagtttctagtttctacgataagtttctgacattgcagtaattgctgcagatttgagcatcatgtctcacgtgataaagcgaagcacagtgttacttgctatatgttacttattttgtcctttgggtaatctggctgatttattgtagttgtgatttgtaatatgatgcggtaacatagtggttaatgatgggcatgtgattccttaggctgtaacatttcaaattgatgtttgctaatggtagcttattgctcatggttaaaatcatcatggatattgctcctggttggcaatgtcctccgattggttcgtatttgcagaacttccctgttttgtctgtttataccgcacaagcaaaataacagctggcacctatgtctataacagggcatggtatatctcgatatattgttttttattcttattttcagaatgatatggttttctagaggattgctgagtttttcggtttttcccccctgaataagctttctgatgaattcctattcatcacttgtcctcttcgactggaatgtacctggacaagtccattccagcgtaccagaggccaacactttcctttcataaaaacaaacttatcattttgaaagcaaaagaattgtgaagtattttagcttctaatacgctgtaatagtatctgctatttattaattataagcattatgatattctctttgctgctattcaagtgggtttgtggtcgacattccttattggacttcttaaggaaaaaacagttaattttgtctctataattcttttactttcacccaactagtgcaatcataaatttgtaataccaggtgctgatgttaacctggttactgatggtggtcgaactgctcttcattatgctgcgagtaaagggaggcttaacatagctgaaaaactaatagcccatggtgctaatgtcaacaagaaagacaagtttggctgcacacctttgcatagagctgcaagcactggaaacgcggagctgtgtgaattcctcattgaggaaggtgctgaagttgatgctgttgacaagacaggacaaacacctcttacgcatgctgttatatgtgagaacaaaggggctgctcttctgctaattagacatggtgctgatgttgatgtcgaggacaaggaaggctacactgcccttggccgagcatcgaacagcttcagacctgtactcatcgatgcagccagggcaatgctcgaaggatgatctggtgctctgctcaaagacgatggaaagtgtgatacgagaaactgtgctgagtcgaggtgttaaagcttgttctggtgtgtaaacaaaggggctctctacagaatcagatttgaccctgctagaattttgcccttgttgggtttatttaaccattgtgactaacatctcataagctaagctttggttctcccttctctctttcttttatgtctgttcatgatggcgtatcaggctatcagctaacagatcggtgactgtcacacccggctttaaggaacaaagccagg

SEQ ID NO: 39854 - DNA, 2220 bp, Zea Mays
acaaaactcacgaaccgcacgccacccggaaggccggaacatcggatccacgctcccctttcgccgccaggttcctcctcctcctagatggcgccgctgccgctgccgctgccgccaccgtcagagaagaggccccctcgctcgctctttgaactcccctctgacttcttcgattcatccgttcttctccgggctcacccctccacggccccctccgcggtggaaccgtccgaaccctcccggccgccgccgactcagcagcagcaccaacaactttcagaggctgcggggtccaggtggacgtgcaacacatgtgcctccgagttcgagtcgctacaggagcagcgcgagcactttaagtctgacctgcaccgcctcaacgttaagttgagcatggctggtaaaactattataaaggaagaggacctagataaagcagattctgattctctgtttgatgatttggagatatctagtgtctctggttcagaggacgaacaagaaaatggacctgcatcagaacgtgtactctcggttaaaggcaaggaagaattcaggaagaaactttactttcgttgtgcatcgggtgaaatgatttctatctatagatgcatgctgttgaaagaacatgaagaaccattaattgattgtaagtctggtcagatggagaatgcatcttgtgtacaggaggaggagatgataaatagggtgaagtgtttggcttgtgaaccccgtgacacgtcacatttgagaattgttctactaacaagcggtgggcattttgctggatgtgtgtttgatggaaattctatcatagctcataaaacatttcataggtatgtcgtaagagcaaaggctggtaaaaggcaatctggaaaagatgctactggaaaagttgcacactcagcaggttcttctctacggcgctataatgaagcagcactgaaaaaggaaccgccagatgctcttcgacggggagaagactcagtcagtaattcagtcttgtgatgttcgtccagttccattgactgttcatcgccccaccatgaaggaagcgaaacgggtatattgtaacctaacacaactctactatgagatggaatgttcaaccacagatgaaacactacctgatgctggaagtgtgaaaaatgttgaacaaggtcaaggaaaaaagaatgaagtgactgcagaccctggggaatctatttctgacttgtctgcccgtttggaattgttgaataagaatgaagcagcaaccataccatcatcaaagaacgaaacaacacctcttcatgaggcagcaaagtgtggcaatgctcagctgaccctggagttacttgagcagggtttggatccttgcgtaaaagatgcaagaggaaagacatcttattcgctggcttcagataaggaagttaggaatacattcagaagatttatggcgctcaatcttgacaaatgggactggcatgctgcagatgtgcctagtgcactaacaaaagaaatggaagaatcacaagctgcaaaacaagcagacaaggacgccaaaaggaaagcacgtgcaaaggaattgaagaaattaaaaaaagaaagagaaaaggaagaaaaggagaaggagaaggagaaggctaaggctcaagcatcacaatcacaatctgatgttaaaggcacttcgagcggccaaatggccaacagaactgcaactgcgccaggccttgtaccaaagcatcagacgccacagcaaatacttatagcaaaggaggaggaacgacagagaaaacaagctgaagaaagagagaagagagcagctgcagcagagagaagacttgcggctctcgctgtccaatctgccggaacgagcgcatcaggtgcagcagcaacaaactgctccgcgaagagggcggcaccagatgacaattcgtgttcgtgctgtttcggttccttggtcggcaaggtgccattccaccgatacaactacaaatactgcagcactacatgtatgcatcttcattcagaaatgctgcaggatgattaaggaaaccgcatgatgcgtgattttgatgcaattttacctcatatacaatcaataacaggctttcttccttcccttgtgcctgctttccgtaattttgtcgtgcacatcttcataactttaaaggttcgaaatcacattcgttctggttcgtgctaatgtttttgcttcattttggaacacattttatt

SEQ ID NO: 39855 - DNA, 1970 bp, Zea Mays
aaggcccaaactcgaaagcatccccttctggccttctcaccacgaacacgcgggacacctcggaagcaaccggctcccagatctgccgaagaaccctaccacccaacgttctagaacttcccctctttccccgcatggacggcctcgtggcgccgtcgccatcccactccggcgccacctccggcggcggggcctcccaccgcaagcggaagctcccgccgtcgtcgctctccgacgccaccggcgacgaggacgacgacaccaccgctccgtcatccccctccacggccccatcctcgccctctcgcccgtcatctccatcttcttcgcactccgacgatgacgacgacgactcgctccacacgttcaatgccgcgcgcctcgacggcgcgccgagtgggggctctgcgtccggccgtcctcctaagccggattcctcatcagtgtctgctgctgcggcggcagccgcggctgcggtgggtggaggacctaagccggagcccggctcggcgaacgccggcgacgggaaggaggacacaaaggggctgttcacggacaacctccagaccagcggcgcgtacagcgcccgtgaggagggcctcaagcgcgaggaagattcaggaaggctgaagtttctctgttattctaatgacggcgttgatgaacacatgatatggttggtagggttgaagaatatcttcgcccgacagcttcctaatatgcccaaagaatatattgtacgccttgtcatggatagaactcacaagtcaatgatggttatcaggaacaatattgtcgtggggggcattacttatcgcccttatgcaagagatttggagaaatagcgttttgtgctatcacagctgatgagcaagttaaaggctatggaacaagattaatgaatcatttgaaacaacatgcacgggatgctgatgggctcacacatttcttaacctatgctgataacaatgctgttggctattttgtaaagcagggtttcacaaaggagatcacattggacaaagaaagatggcaagggtacattaaagattatgacggaggaatattgatggagtgtaaaattgacccaaagctgccatatgttgatgtggcaacaatgattcgacgtcaaaggcaggccattgatgagaagatcagagagctttctaactgccatattgtttattcaggaattgattttcaaaagaaagaagctggcattccaagaagactgataaagccagaagatatccctggtctcagggaagctgggtggacgcctgatcaattggggcattctaaatcacgatcatcattctccccggactataatacttacaggcaacagcttactacccttatgcagacagcgctgaagaatctgaatgaacatcctgatgcttggccattcaaagagcctgtggattcacgggatgttccagactattatgatatcatcaaagatcctattgatttaagaacaatgttaagaagagtcgactcggaacaatattatgtgaccctagagatgtttgtagccgacatgaagagaatgttcagcaatgcaagaacttacaattctccagatactatctattacaaatgtgcgacacggcttgaaaacttcttctcgggcagaattactgtactgcttgcacaactctcaaccaagagctaggctggcgtgggctcactggactgggcactactgtcgcatgttgtaaaattattattggctcactggactggacactactgtcgcatgttgtaaaattattaagttgtattgatatagttgtcaccttgctgaatgttcggcacggtgatgaacttttagtttagcattattttaaccaggagggacactgattgatctttacatttcggtctcaacctggccggcctaataatatagattgaggagattcttcaaaaaaaaacgcaaaaaaaaaaaaaaaaactaaactaaa

SEQ ID NO: 39856 - DNA, 2537 bp, Zea Mays
ataaaccctaagacacaagcgcgctgcctgaaccacccagcccacgcgccggcggccgcccgccatggtgaaggcttacctccgctacgagccggccctcaccttcggtgtgattgcgtcgccggagtccaacgtcgtctacgacccctcgggccgccgcctcctcgccgccgccctcgaccgcctcgccgcctgggacatcaagcgtggtcttccctctgtctccttcgcaccttcctcctcctccccttcgctcgccgtctcctgcatcgcttcctcccactccgccgccgtctcctcttcgattgcgagcgggcacgcagatgggagcatcaggctgtgggacgcggaaacaggtgcttgcgaggcaaccctccacggccaccgctccgctgcctccgccctccgcttcggcccctctggcgccgtcctcgcttctggcagcaaggactgcgatgtcatcctctgggacgtcgttgcgcaggctgggctcttccgtctgcgtggccaccgtgaccaggtcaccgatttggtgtttctggattctggtaagaagctgatgagctgctccaaggacaagtttattagggtttgggaccttgaaacacagcactgtcttcaaatcgttggtggtcaccgcagtgagatttggtcaatggatgttgatcctagcgagagatttttagtgtctgggtctgctgatccagagctgcaagtgtttagaatccggcaatcagtggaggaaggcgaggattggagcaagtgggatgtgctcaagctatttggtgagattccacggcagagcaaggaacgagtggcaaatgttaggtttaatagggacggcagtcttgtggtatgccaggtggctgggaagacagcagatatttatagggttcttgatgaaacagaggctgcacgtaaggccaaaaggcgggtgagcagaaagaaggagaaagcatctgcgaaatccatgattgctgaagagaatggcactatcattgatcctttaccagttcaaaacttacaaaatcctactgttattgtcaccgatgtatttaagctatttcaagttttacgtgcaagcaaaaaaatatgttcgattacattctctccaagtaatcctccaagaggatgccttgccactttgtctctatcactcaacaataacatgcttgagacatattcagtggataaggagaaggtatcaaagatgtactcagttgagatgcatggacaccgttctgacatcaggagtgtctcccttaattcggaggacaacctccttatgtcgactagtcataacgctgtcaagatatggaaccctagtacaggggaatgccttcggaccattgactctggatatgggttgtcaagtgctttcgttggaaatcggtatgctcttgttggtacaaaaagtggtacgttggagattatggatattgctagtgggagcttaactgaggccatagaagctcatgctggctccatacggtcaattgtacctattccagatgaagatggaactgttggtgcacgaggctttgtcactggaagtgctgatcatgatgtcaagttctgggaataccaattggtgcagaagtctgataacgactctaagcagctgactgtaactaatgtgaggaccttgaaaatgacagaagatgttcttgctgtctcgatcagtcccgaaggaaagcacattgctgttgctctcttggattgccatgtcaaggtcttccacatggacacactgaaaccatctttaaacctttatgggcacaaacttccagttctctgtatggacatatcatcagatggagctttgctagttactggctctgcggacaaaaatttgaagatatggggtatggattttggggactgccacaggtctatatttgctcactcagacagtgtgatggatgttaagtttgtgtatagaactcattatatgttcagtgtggggaaagatcgcactatgaagtactgggatgctgataaatttgagttattgttaacacttgaaggacatcatgctgaagtttggtgcctcacactcagcagtcgcggtgattttgttgtaacaggttcacatgatcgttccattcggcgttgggatcgtactgaagaacaactgttcattgaggaagagaaggagaaaagattggaagaaacctttgaggctgatttagaaaacgataatgactatagatatgggcagaaagatgatgcccctgatgaaggttctgtgggtgttcctggtaggaaaacaaaagagacagtaacttctgctgatgcaatcatggatgcacttgacactgctgaggaggaactaaaacgcattaatcaacataaaatggaagagcaaattactgcgaaggcagctaaatttcaacctaatgttataatgcaagggcattcaccttcagattatgttctgaatgtagtttcaagcatccgtccaaatgatctggagcaggccctcttgatactggttcatggcaagctaaactgtgtgcaaacttgttaccagctct

SEQ ID NO: 39857 - DNA, 2103 bp, Zea Mays
ctgccgtattcacttttcactcgttcgtccatccttccacgccccccacagaaccgtctccccagcggagcccggcgcctcacggtcgcaatttattgcttgcgcaccgcctcgccgctttggcgtggggcgtttgcctgtgtggcgcttcgcaggtgccgtggcttgccgcttccttcgccgtgctcactagtcaccagagagggaggaggctctggcgctctgcttctgctgccgcttcttcttcttctcctgctgctgctcttacggagataagcagggggggccgggccggggcagggggaggtgacagctgagctgactagctgagtgaagcatggggatggacgccggcggcggcaagctgccgtacagctacgccggccagcaggacggagggaagctggtgaagagcgtcagccgcgtggagccgcgcaggttcggcctgggcctcgtggcgggcttcctcctcgtcacctgcgcctacttctccaccgccaagttcgacgccatccagatcgccatgagcggtcttgaggacgaggagctacaggtgcaggatgcagttgccagtggttccaagaggagcaaagactctgccgccgccgccgccgccacacgcagcgccaatgtcagctcaccctctgtggttcactctcaccatgccatcctccctgctcccgcgcagcggattccagaggttaagcaagcagactcggagacgacgccggcgcgggagcgggagtggaagccgctgtgcgacgtcacctcgaaccggcgcatcgactggtgcgagctggacggcgacgtccgcgtggtcggcgccaacgccagcgtgacgctggtggcgccgccgggcgcggacaaccggaccttccgcgcggagtcgtggcgcatcaagccgtacccgcgcaaggcggaccgcgggtacacgggcaactacttccacgcgttcacggacgtgatcctgccgctgttcctgacggcgcggcggtacgcgggcgaggtgcggctgctggtggccgacctccagccgtggtgggtgggcaagttcctgcccgtgttcaggagcatctccaagtacgagctggtggacctggaccgcgacccgcgcgtgcgctgcttccgccacgtccaggtggggctcaccagccacgccgacttcagcatcgacccgcgccgcgcgcccaacggctactccatgctggacttcacccggttcatgcgcgccgcctacgggctcccgcgcggcgacgtcgtcgcggcggcgccggcgaggcggccgaggctgctggtggtggcgcgcgcgcggacgcggcggttcgtcaacacggaggagatcgtgcgcggcgccgaggccgtcgggttcgaggcggtggtgtcggaagggacgcacgaggtggcgcccttcgcggagctggccaacggctgcgacgccatcatgggcgtgcacggcgccgggctgaccaacatggtgttcctgcccacgggcggggtggtgatccaggtggtgccgctgggagggctggagttcgtggccggatacttccgaggcccgtccgtggacatggggctgcgctacctcgagtaccggatcgagccggaggagagcacgctggtggaccagtacccgcgcgaccaccccatcttcacggaccccaacgggatcaagagcaagggctgggagtccctcaaggacgcctacctcgacaagcaggacgtgaggctggacatggagaggttccggccgacgctccaggaggccatcgcgcacctcaggaaggccaaggccaaggccaatggcgacggaaacaactaggcatcgccgtgcgtatgtagcgtgttcattcgtcctcttattaatctactcttctttttcttctttccttttcgggttatgtcggtgtatgtagcgtgcagaaatcgagcaaatgtatgatatgtggcagggaaagaagctagagcgaataatatattctctctcttgtcatccagttttcgattgaatggcgtatgccaagtgatcaggtgaaggtcgacccggaaatttggttttgccacaataatgggaagattggcgaggccaaatatattagttttggg

SEQ ID NO: 39858 - DNA, 2118 bp, Zea Mays
atcgaacgatttgggggacgaggtgttctatttcacaaaagaggcaaaaaacaaaagccggtaacggaaaccctaatccccccaaatcccgaatccctctcgaatttctatttaatgttcctgttcttcccctccgatccgatgtccccaactgcgctccccgcggcgatcaaacaccggatcgcggcactcgccgccgttgaggaggaggtttccggcgctgcttccagcgccttgccgtcagcaccatgaggaagaagctggacacgcgtttccccgctcctcggattaaaaagatcatgcaaacagatgaagacgttggcaagattgctcaagctgtacctgttctagtgtccaaagcattggagctatttctgcaagatttatgtgataggacatatgatattacaattcggaagggggtcaagactgtgggttcttcccatttgaaacaatgcatacaaacgtacaatgtctatgacttcttgagggaagtagtcagcaaagttccagacattggtccttctgatgttattgctgatgataagcttggcaaaaggaggaaagccgaagaagatggaagtgaggaagaattgaagaggacaagaaataaagccatacaagcaatggcagaggccgtgggagaggtcgtgggagaggtcgccgtagtgtacgtggaccttggcgggaggtggtcacaagtcctgaacaattcaaggaggagaatcaatctagcaaggtagccagcctaaaggtggaggtagcagatgaggtctcgaatgtaactgaagcaaaacaggacactacaccaatgagcaatgccaggccttccttaaggaacattgacttgaatttagatccaaccgatgaagaggatgaggttacagtgccacccgaaccccagctgtcagctccagcaactagttgcgctgcagccactgcagcacctggaccatctgttccacggttaagggaaggagcaaaactcaaggacttctttggtgcttgggaactggctgacatgaacaagatggagatggaccctgtccagtttgctctgtcaacaaaccatagattggaggaggacgaggattatgacaatgaagactagctccgccgttatatagcttcagagttgatgagtaggaatagcaggacaactgtaggttcagcttaactctgtagcagttctcatgtatcatatagccgccaaagctgccgatgtagcttataatgtcccagaggttaaggtcgtttgactagttgactgtaatgttctcaagttaggttctattagcagctattgctttcgcagatagtaccgtttgtacattccagttgctctccagttttatgttatctatccttctgctttcttggatagctgagacctgttggcggatgtatcatgtatggcaagttggcaacaaaaagcaagaaggctttcagattccttagcacatctcattctattacagtggtcaaatatctcattagggtacaatacatgtgggtaagacgctggtttattcattatatcatacttttccagtgggatgacagttaaattctttcattgttgtgctccagcctccagcgaaaagcctgtgcgccttgaagaagaaaaaaacacatcatggcactggaagatgatacctttactacctcaaatatggttatgcaagcacaaggtgaaccggttctacagaaccatgtgagtgttgttcccgtatggtatttcttgtgctagtccctccctgtaaaaagatcctgtacctcaggcgaccgcggcgtctccgacgagctcgaagctctgcagctgcttgaagttctcccacgccttctcccacaccttggcctcgtacagcttcttttcgccgccgccggcctccttcacctcgacggtgaagtggtgcagggtcccggccacgacctggtgcctcaccttcaccagcctctcgaattccagcatcgcgttctgcgcgtgtattatgcatccatgtgagggctccgatctcaaaacttaaaaaaaaaatgtgcggaacgcgtcttacggtcttgctgttgtgctcggcgaccgcgaagcgcgcgagctcgatggcctcgaggtcgttctcg

SEQ ID NO: 39859 - DNA, 3789 bp, Zea Mays
gtacgaggcccatctcccatgacaaatgaaaaccctaatctccagcaccccggcggcctccagcgctcccgctccttgctcgcctccacccgcggccaccaccgccctgcggcccccgccgcttgccagcctccaccgcgccgcgagtcgcgccgttcctgcaccggctggtcctggagcacgggaggacgagcatgtactggttcggccccagccccaaggtgaccatcgtcgactcggacctggccgaggacgtgttgtccaacaagttcggccacttcgagaagctcaaggtcctggcgctgtccaagatgctgggctccggcgtggccagccacgagggcgagaagtgggtcaagcaccggaggatcctcaaccctgcgttccatcttgagaagctcaagcgcatgtgccggcgttttctacgtgctgcgaggagctggtgagcaggtgggcggcggagtcccttggctccgacagctcgtgcgagctggacgtctggccggagctgcagaacctgacgggagacgtcatttctcgcaccgcgttcagcagcagctacagcgaagggagaaggatcttccagctacaggccgagcaagcttcgcttgtcatgaccaacattcggaagatcatgatcctcggctacatgtacttgcctaccgcgaacaataggaagatgcgcaggaacaacagggaggtggagtcaatcctgcgagagataatcgggaagaggatccaggcaaggtgggtctactgctggagacaaacatgagagacgacatggggatgacgatcgaagacgtgatcgaggagtgcaaggtgttctacttcgccgggatggagaccacgtcggtgctgctcacgtggacgatggtggtgctcagcatggacccggagtggcaggaccgcgcgagggaggaggtgacggctctgttcggcagggacggcaagcccgagtacgacggcctaagccgcctcaaagtcgtgaccatggtgctctacgaggtgctccggctgtacccgccggccacctccgtcgtccggcaaacgtacaaggagatggagctgcctgtgctgctcatccaccacgacccggacatctggggaggcgacgcgcgcgagttcaggcccgacaggttctccgagggcgtgtccagggcctccaaggaccccggcgcgttcctcccgttcggctggggcccgcgcatctgcatcggccagaacttcgcgctgctggaggccaagatggcgctctgcatgatcctccagcggttcgagttcgggctcgcgccatcctacgctcatgcgccgcataccgtgataaccttgcatcctatgcacgattgcaagaatgggattgctaagcaagctaagatttcaatggcatattccttcatacataggccattgagcgacgaggcacaccgcgtcagcactcccgtggtggtcacttgcaatgaccagagacgggaggtcttcgttgcccagaacatcgctaacaagaaaattgaccgcaccgttgcattcgacaaggtgctaggtccaaagtctcaacagcaggacgtcttcaaccatgctgttgtgccacttgtcagcgaggttgacggttataattgcacaatatttgcatatggccagactggaactggcaaaacgtacacaatggaaggaggaggggacaaagcactgaatgctgacctcccgactgatgccggtgtcattccaagtgttgttaagcgcatatttgacatcctcgaggcacagagtgcagagtacaacatgaaggtttcttttcttgagttgtacaatgcggagctcactgatcttctagctctacaatgagattgcaagaacgggactgctaagcaagataagatttcaatggcctattccttcatacataggccattgaaccggaaaattttgtcggtattcggtaactataggatcatgtggttgttggtcgagttggaccaattatgctggctcatttgttggatgttttgacaagtcgattctagcttccttatgatctatgttagatttggtaatgcataccagttagtaaagcatttacgatgtacattgttatacatagagctttacatcgcaaaaattatcagtttccctcagttacgatatgcatttagtatttatcgtattttgaaaattaataacctattatactatgataggcttgacttcacgtttatctaaataacttagtgcgatgatgcttgaaaacttatcttccattttgccagatcaatgaataaaaggattattcatatcaatgtccatgcaccttctcagaaaatccttttgtgatgttggtgttggattcctggacctgtactggtacatatgctaagtcatccacaaatctgacccagaattgtaccgttctttttatagccatgtttggtacttgtttgagtgctccatagttcgcaagtttgttttgttatgatgtattttgacatttgaatctcagacatgcttaggaactactgatttgaatttatgggctaacagttccagtatttcaaatagaaagtatgctatatcaaataagttgatgatacttttggtactggagaatgaagttagactgcatttgatattagaagtctgtttgtctgattgcagttgattataaagaagctagagctgatattagaagtctgatattagaagtctgtttgtctgattgcagttgattataaagaagctagagcttccagtcaagtttgatattagaagtcttcttttgcttttacattttgttttttatgatcttgatcttagaagcagggttttggtaccagcttaactaattttctgaagttttatgttcttactttaattataactagatgattgcaataagatatcatgaggcgcgccgaggagaacaggggcctcctctccgcctcctccttcgacaggcagctgctgcggaaggaggtggtgaggagggtcaaggccgcggtggcgggacgtgagtgaagtgagctttgtcgagcctatatgtggaggtcggtcgtgaagctgggactaggacaagggcgagctgaaggctagaagcttgcatggaaggaaacagtgggcgatgaaagcagggaatttgggaggtacatgcgacagagagaagagcaagagaagcaggaagcggagttgttcactcgggctcctgtaaccaaacatgataagcagatcgagaagcgcataaggagacaacttcatgggctaggaggcttaactgacgattttggccttgggatgaacatgctgttgggaggagacaaggaagatgatggcggttcaagaaagtcgcatggcaaaagcggaaaccgaaagaagcacctgaagaacagcaagaagaggatgaggcattagccctagacccacactgttgtagcacttcaatatactgatagagcctagaagacggttcaagcaagccacacgaaaagtgaagccggagaaaataccaagaagccaagtagagaaaaaaagctttggttcctgtcgtattatttctgaaacacaaaacttgatctgagcgactgatcgtgagctaatgtaacagtatgaattatatggcttgaacatggtaggtgtaaaatgttttgttcatcggtagagtattccagatgtgatcggcttaacagtatgaattatatagaactatgtgagccaatgtaacagtatgaattatataagttatcaagatattacatgccctcattgcaatgcacgggcactgacttgttatgataatat

SEQ ID NO: 39860 - DNA, 996 bp, Zea Mays
agaattactaacaaatacccctactttatccgaactgttggttgtgtgtgccttcttctccatttgcttttttccctaaagtttctccgtcctggcggctgagggctgctgcttcgtccctggtggcggctgagggctgctgcttcgtccctgatggcgcctgattgcctgggcgcgatccgcccgtgcttcccatagcgtactccgtccctggcgcccccagtgaggtccgtccgtggcgctccgcctcccgtcgtcttccgtcaccacgctctggtcgtatccccgccgtagcgtcgtccagtgctgccctgcagaccgcacatctgtccacctgctgtgtggtttggttccctccatggattctaccaatccgaaccataaagatgacgagttcccatagaattcgaccgcgaacgggacaaattttggttccaatatgtacaaccagctgaagaaaccggttatattatggcaattgagaccttagatttaagtactattgtaatccgtatggttcttgctattaatttctaggcatatgaaacaaataccgatgagcgtgcaattcctatatattaaagctatgtagctagacgcacagccacataggccacgtcgttcaaatttttgtaagccatccgatacaagatcgttggttaccaggcgcgggagcaaaggtagccaaccacacgacgggactcttccagatggagacgaaacaccacatggcgggggaaggaaaagagcgatcagatctcagacgccgtcgtccgtctccgccaagctgcatcgcctcaaacgctttgtcccggccatcacgccggccatggccgccatgtcgaagaaggcgactctccatcccttccgagttccgagttcatgctcccctccgcccctggcatgggtgaagtctatgtgggaacactgaacctgcaaccgagaccgtagcgattcgacaatatcactagaggatcatacttctacttagggatg

SEQ ID NO: 39861 - DNA, 508 bp, Zea Mays
caatttcggccgatccccacgtcccatcccgcgcggcccacgaagccaacccccttgtcctttcttccacgcgccgtccctctgaagtgtggaccctgcgcgtcggccttccccttggtcacttgcgcgtggtgccggattgggaggatcatctccctcccgagatccttgccgggttgttgcaacggcacgcagaaattggctgggaatcccgatgcttcctcatggcaatttatgcggagcttcttgcctctactgccccggacgaccgctgcgaaaccaggcgtccacgaacgggaaaccaagcaccgccaccggggaaaggggaactcgcgccaccgcggtcggttctcaccttgaccgccgttccaaccccgaagaccagctcggagaaagcgcagacctcgggggaaaagcacagaggcgcctaagggctctggggtcacctggtgtcacctcaattgctcaccggggtttggattccgccgcaggaccgcctcatcgcgtg

SEQ ID NO: 39862 - DNA, 600 bp, Zea Mays
cccgccattagtgcaactaaaataaaggaagagtaaaaagtgaaatttgtatgatttagtcttttttagtcaacctttgtgctttgtgggactagagactaaaataaatcagtctctattttagtctcactgtttggcaatttatgaactaaatgagactaaaaatgaagggactaatttttagtccctcaaactggtcaatttggcagccacggtggatatcacagctgatgtcttgtggtgcgggatggatcgatgagatgccccagtttgcctgcgcttagtagtataccgtacacactaccagaaagggaaagcgtcttctggaaccggaacaaacgaaccaacttggaacaggactagttgaccgtgagagcgcgtcattattcaaatctcaccaatctgagagagctgagcgaccgaaggttccagatccttcccgcactgccgagccgaaggtgcagtcagcggcaagtgcatctccacacgccgccgcccatcccctcgccgccgtccgaacccgcgggcgacgttgcgttgcgttgcccccgcggctaaggaaggggaacagtcgcgatctggcggcggaggccaccggcc

SEQ ID NO: 39863 - DNA, 1188 bp, Zea Mays
atcccaaccacctaccatgggcctggcctggcctggcccatttctatgagaagagaggaggagaactgaagggatcaaagggaaaggaaacctagacaagcgaggcggcggccccgcgttctccgtctccgtctccgtctccgtccgcccggcgtaaagaaaagcctctctcaccacagccgccacgccatggccgaggagaccgacaccaggcctgcctccgcgggctcccgaggccgccccgcgcccgaggacgacgacagggaggagggcgagatcaccgacctcgcctgcgctccttccccgcccgccacgcacccgctcgagcactcctggaccttctggttcgacaacccgcagagcaagtccaagcaggccgcctgggggagctccatccgccccatacacaccttctccaccgtcgaggaattctgggggctttacaataacattaatcaccctagcaaattgatcgtgggagctgatttccattgcttcaagaacaagatcgagccaaaatgggaagaccctatttgtgcgaatggtggtaaatggaccatcagctgtggaagaggaaaatctgatacattttggctgcacactttgtcagtgtgcgtgggaagcaggaaagaattgctatttggacaaaaaatgctgccaatgaagccgctcaggtaagcatcgggaagcagtggaaggaacttctggactacaaggactccattggattcattgttcatgacgatgcaaagaagatggacaaaggcctgaagaaccgttacacggtttgatcctgatgctggaatcccagagagttgtagcagtagctggcccaaatgcatgctgggtggttttatctattgctgatgagttgtttaagcaagatccattcctgtattgtactccataagccacttgggtgttgctttgtattgttcactgctgtgttttttctgtggcaccgcatctacagtactagttgcttgtcgttgttcagttgcgcttgaatctgaactaacggagtctgagcaaaacacagcatattcaaacacggcgagcagcaccgtagccaaggcgacaggaactcaggaagtgcggtgaattagatttgttagatataatcaagttgaatttgtatttagactctgatgggcctgtttgtttcagattatataattaggcttaaat

SEQ ID NO: 39864 - DNA, 4756 bp, Zea Mays
atggtacagaagaacatcaatctcagtaacatcttcaacaccagcagagcacaatcaaaactactcaacatttcactcgtcctcttggctgcggagcctggcgagcttgttggtgaccacgatgtccagttgcgcagcacgctccacaatctccttgcgcttgcgggtggacacgttgtgggcgatctcagcgcagtaagtcctgttgtgcatcagcagcagctccagctcggagacattgtgaacaacaaactttttgaacttgttgggaaggtagtgcctggtcttcttgtcggagccatatccaatgttgggcatcaaggtgcatcccttgaacttacgcctgacgcgggagtcgatacccttgggcctgcgccagcttggctacagaaaacattgtcagcaagattagtttcaacagacagaaatgctagtgcagatgactcaaatatacagtgccaatgcattggaaagatgtgcccatctttttataggatatctacttacacctagtgatagaagtaatatctgagactcaattcatggctctccacaggaaataaaatggaaggaaaattctggcaggtttaggtatggtatggcaaattctggatccatacagttaccagcatggctagaagcaacgagcattttgctaaactggtacagtattgtgcaagggacatttcgagctgcaaacatggtcagaactcagaagtaatatgcattttctaaacttacagaatcagtggcattacatcagcataaactaatcaatttccacaaacagaagggatttgatctctaagcaggcattatgctaatgagctaatccagtacttgtcaagcaaagcttgcatttcaggccgctggagcaaagatttctatctaaatcggacacaggccaacgagctgctagtccaaactgaaatcgtgcaaaaggtattcaaattggtgcacatgtggccattctttcggtgaacctaatggagtgccagtcgaccaacaaggaaccaacgaaggccttaccaaatgctcgcttggcacgcacaagcacaacaagggtcaaggcaacgggtggtgtttttcctaccttaaggcacttgtagcgatcaagatggggcctcttgaactgcttgaccctcttcttcacgatcttctgcgtcagcagcggcaccgccatctgcactttgcgaaccttcggtgatgcggcggtgcttgacgaggcttaacaaaaccagcatccagtaatttccggacatcattggaccatagaggattatttaatagtgcagcaagtgcacctcgaaaatcaaatgatgacggatatgcagtgctctctgtacgaggataactgtgcaaagataaccattagtactaacagccagcagcatcacctatgtaaagagttttctttttcaaataatctaaggaattttcaactgcagtgttaaaaaactattttactaaattaaaatctaacacctagtttggttacaaatatttgagctaaactcaatttattatcatatgtgcttaaagaaactcgacctgcaggggatatgacagctcccgagtatattaagaagaggaccttctttcacgcaggtcaagaaaacccccgaactctgccccacccatacacaacaacattgtagcccatgtgagaacaaccgggaccgggccttagacctatgcttcggccatagttgttaaggcggtaaggcgaagtaaggcggatgaccccctttttatctttaagcgataaggcgtaaagcaaggcgacaccttaaatgtagttaaaaatagaaaaatattaatatttaagaaagcatttaggataaaaacattaataaagaagagaaaaagaaaaggtagtctcgccctacaaatcagccccctagtccattaaatctagagtaagcccactacctctccctctctcctaaacctctccatctgtctccttagtccacagccacaagactcagccgcacaactccatcctcccagccgtcgctccctctctccccactagtatttctctctccacgttggctccctctcttctgtatcggcaccacagctgtgctggagccgccgcacgccgctgtcacgccatggaggagccaccacgccgctgctagagcagccgcggcaccgctggtagagccaccggcggcctctcccactcaccttaggtgtcggaataaggcgagcaggacggcttacgccgccggggcgccttaccgcctaggcgcgccttaacaactatggcttcggcgtgggacaaatgaggggattttttaaccacaggctgaaattcgctcccacgaggattcgaactcaggacctgaggagtgctactcagaccacctaaccaattcagctagaggccctttcgctcatgtgtacttaagatgacattgagagtaaagcagggctcaactgtaaatgatgtaccttaaaaacgataaggtgtagatgaagaacttggtattataggggtatgacaagaacaagcaaagtggtacttaacaaaatcacacatttaagaagagaacttggtattataggtgtcgtgtttttttcaaacccctaaaatggagttctttttttggtaccttcgctttcggcctccatagtgttagagtggacgcactaaccagttcaacccaaaagcttaatctgatggagaaggtagtcaatccacttatacacatcaacacccccactcacgagcagctagagaaaaaggtgcaatcgcagccagagggaaaggcacacacgtgaaaataaatgggtgaaggcacaaataaagcctctaccacgattcgaactcgagatctctgtctttgataccatgttagagtggacgcagtaaccagttcaacgatttttttgcaatttaatccctcttttttttaaaaaaaatgcacatttggacccctggacgacttaatgtcgtttttggaccctttgctcggcgccataggctatggcggcgaggtaacatggctcggcgccatagcatacggcgccgaggtacctagtgcgctggactccttttgatgagctggtgtctacgtggtcgagctcggcgccatgattcatggcgccgagctcaaacaaccgccacacaggttggcaagtggtcggctgggtggattgaatgaaggacgttactgtgcgtattaaatgggttgggtcaacatcaattactgagcacccccatccgccacgcatgtaccctagatttccttaacatattattcaattcatatgtgtttgtgttggagctttttaaaccaaacttgacttagtatttacggctgcgaaaaccaaacttgtcttttggaaggaaagagaaggttgcgaggtcaaagaaacaaacaaagaaaggtgctgtttttccaggtggactaagtgatttcgttgtgctcgtgcatcccccttctaaagcaagctgcccactttctccacttcctctgttctgattctttccatttcctgctcctatttccctttttttcctccctaaatgcgaatttcagcagctacgcggggccccagatgcttgcttattctcgcccccggatgatcctccgttcactgcgctgtgtggtctgcaggggtcgtgggggagattcaggcagcgcatttcctcagagtcagccgccgcttcagcagatcgttcgtgcagaggcaaatgacggccgcagcctcatgccggagctccagcccagcagcctcatgcccatgcgcgccatgtgagcgttggctgggtgccatggcaaacaagctgatcccaaagcatagcgttgttttccctgtcgcgtacaaattcagaagcaaggaaaactggccggctggagatgggagctcggcaccatgattcatggcgccgagctcggccacataggcgccagcgcggcatgggagtctagcgcaccaataacctcggcgccgtaggtcatggcgccgagccgtgttacctcggcgccatggcgtatggcgccgagcaaagggtccaaaacgacattaagtcgtccaagggtctaaacgtgtttttttttcaaaaaaaaaagactagatggcaaaaagttcagaccagttcaacccaaaagcttaagctgatatgagaagttagtcaatgcacttatacacttcaacacatagctggccccttttgtattttttggtctattttggacctctattctcattaatataatgatgcgttgttctcctgtctttcgagaaaaaaactatagcaagaatttgtgaaatgaaaatttactcataactagtgaccaaggcctcagataggtcaatatctacatcagttctaacctctaaaaaataatatggggtttgttgaagctctttggaacacatagtgtgccaattgaacaaacaaaagtacaacctctagatttctggtagactaacatttcccatataatataagacaaggttcaatgcaaaatatagcgctgtttcgaggttcatttctgaaacctgatgaatccttgagtgtaaagccgctcagccaagtgcatggctgtctgaggcccaataccaagtgcacttgatgcaacctgagataaaaaaatatcaagtaaacaaaatttactctattcttacataatgaaacggatgcactttttcatattaatactatcaagtcataacccaacaggagcatcttgggtaccacatttcaatcaagatcatcatgagttcatgacacaac

SEQ ID NO: 39865 - DNA, 2964 bp, Zea Mays
gtctactttcattctactgctatgagtagcaattccccgcgcgcgctctctccgccccggcactaggccaacggcaatcaccactcaccaggtgccaaggtgtcttgtcggccccttcaccaagtgttagtcgggtccttcgccggcgacgggcaccaccagtatggacgaatcacgaaaaagagctgtctctactgcaaatggtaaaaatataagttcatcccttgatgaagactttggaaatgacttcctttcatcttggaagttaccaaaatcaggaaaagacacgattgacttcagtgttgactcagttcccaagagtagcaagaaattcagctttgacaacctagatgattttgggcttaatggagcctttgacaaattaccgtcctttcaaatgggcatgtctgatctggatttttctagccctgacaagaaaaaagtgaagcacaccagttcaaatgcagatctttttgaaaagaaaaaggaaactgacaaggacaatttctccttttcttttgatttcaatgagttgggaaagtttagtcttgatggaaagctaggaattgaagaaaagagtactaatagatttaatggcaaatctgaccctgtctcctcagaggttaaaaaggatacacaaagaggccttttagccaagggcaatgctatccttgaagagaataatagtaaggataaaatgcatacacttgatactcgcacttcaagaccttctcatctgacgaatcatgagaatgtgaagaatgccagtcaaccaacttcaaatatcgatgttgctgattcatctgacaagatgcaagaacataccagtgtcaatcctgcaacaatggaacaaactaaagtagactcagtgctcaatgacaatcctggagagcatcctaaagagatatatgcaatgaaggcagctgttaacataccttctcaggatttctcctgcggtgccatatctagtgaagatccaacacaagggccagcagatcatgtgaacagtaaagatgcacctatagtgaactgtggtaaagttcatgtatcgagggagagtaatgatgatgagcagtcgaatggtttacaatccagggacaccagcattattaattccaatgtgtcaagaagaccgtcgggccaatttaactcccagaatgaggttcttgaggaaagtgtttcgcttaatgaaggaagtcaagacaaccaaagttttagtggcgctcctaagaagtttttaaagaagacatcacatgggacaacaaataccgaggaagagatttcaggtcccaagattctctcttgttcagtgcagagggaaatcagaagtgttgaacctgcaccgatgaaggagagaggaagcttctctcttttatccaagtctgtacatatgaaagcaaccagggttgaactaacttcagaaacagccttaaatcaatcatccagtgcaagtaaagtgataaaaaagatgactacacatcctacagacttgaagagggaacacatgcaagctaatgcagtccctcacaaatctaaaactgctttatcaaaaacatacagcaagctagcatcaaatgggctattggccacctccatgaatgccaaagttgacacgaatgccaaattaggccttgagcctcctatctcggggaagtcgtctctactgaatgctcgaagcagcacaccacatagcgctggacataaagttgttgcaagtcatgtgcttctaaaagctagcaatacttctgattcattgcaaggtgttccttccaaagataataaatcgtcaacaatttctcaactgacaggagcaagaatcacaaaattaggaatcagaagtctgaaatctgacatggccctagagaaagaatcagtacaagtgagtgggacaaagtgttccccggtaacaacatccagaatccttgactccattcctgaaggaaaacctgcattgcctagcccatccataatgcagaaagttcctgaggaatcagctctaaatccaaaagctcctaaagtgctcaaacacatcatgagatctccagctgtaagaaaatcacctagaactgttccggagttgggaaatgaaatgattctgggaagtggaactccaaaagctcatgtggataatgcaatctcctcacgtatgccacctgggatgggagccatttcagatctagagttgcctgtgttagaaaatgatggaaacatagaaaaagctgaggcttgtagaaaggagcttgaggatatatgcattctattgaaaaggaaacatgcagaagctaaagagctagcagttcgggctatcgttaacaacaatacgatgctgatgttaaaccacccgatgattgaggagaaaatttactctattcagaaatttgcgaacgacctgaaatccaagaagtacttatttgaggaagttggcaccattaactctggagcaaatgacttatccagcggagcatgggtaatgtaaatgcaacaaaagagctcaggcgtccagcgtaaatgcaatcttgaatgtgtttcaggaatatctctactgatggacgaagcgaaccttcggacgaaaaggcgtgtagagaagcttcgcacatgcgtgcgagtgaaagggtgttagctaaagttgatagcttcggcgacaatagagaggcttcgggtgcaagccaaaggaaaaggcgacgaaggccttaacccgcgcagccgaagatggagaaaatacgctactgccctaatgacgtctgtaaacattgaatggcacaattgtaatcctgtactaggtcggttcgtctcggttcgtctctcctataaatagatggacagtacctcgtataaagtacatttatccaggtgctacagcttcacatagcccagcctacgaaacaccttcgtgctatcttgcatcaagaagtcaaaggtatgattgtaagcttgtcttgtatgagaagagaaataaaatgttaa

SEQ ID NO: 39866 - DNA, 2326 bp, Zea Mays
cgccaggtgtctaggtcgctgccgccctacgcctacggcaggtgccaggtgcccagctcttgttcggcccgtacgccggcgaggagcaccaccagttccaatggaacatagctctgcagaagattcagacattagcgattcagatattgctgagcacaaggaggagatttgtgcccaactccgagcagggaaattgaacgtgaagcgtggtgaggccttccgctgccctttctgccctggcaagaagaggcaggactacaacctaaaggatctactgcagcatgccacaggaataggggctgcttctaagcgcagcgccaaggtgaaggcatcacacctggggcttgctatgttcttggagaaggatatagccagcacgttggagcaaccattgcaaattgttccctacaagccaaaaactccaaaggatgaagagatctttgtgtggccatggatgggcattgtggttaatttgcagtgtgagttcaaaggcaaagaatgttccagggaaagtgaagaaaggctaacagcacagttctcgcggttcagacccctccaagccacaacccttagggatggaaagaaccaacagttttgcgctatcgtcaagtttgctaaggattggagtggatttaaggatgcaatggcttttgaaaatcattttgtactcgagcagtacagtaagcctgattggaaaaaaagaaattgcagaaaggacgacctttatggatggcttgcaaaaacagatgattacaactcacctgagccaattggggagtatctaaggaaaaatggaaatcttagaagtgttggtgacctggaacgagagggtctgaaagaaactggcgagcgtgtagctcattatgctcgccaaattgacgcaacaaataaacatatgagtgaactggagctgaagaacaatcagaatgcaatgaaacttgataggatgttggaggagaatgatcgattggttgaagagcacaatgaaaggatactaaatatgcagaaagatgctcgtcgaaattcttggaaaataattaatgacaatattagattgcataaagaactggaaaccaagaaaaaaagaaattggcaggagacacgaggaacttgagaagttggttatgaacagtactaacagagaaaagcttgaagcggcaaaagaagagattgcaaaggagaacaggcttctcgatttagcaaccctaaagaagaaggaagaagatgagaagttcttaaaacttgtaaaggaacaagagcaagagaaagaaaatgtcaggaagatgctatatgatttagaaatgcagttggcttccaaacaaaaacttgaactggaaagagaacagttgagggggaatcttgaggtatggaagcatatgggaaaggaagatgcaaaatcgaaggaaatgctcgataagttgcatgaagcactgaaagagaaagatgaagaaatggatcatattgattctataaaccagacccttattattaagcaacgaagaaccaatgatgagctggaagaagccaagaaagaactgactactgacctacttaatatgtcatcagctcgatccattgttggtgtcaaaaaaatgggtgagcttgacaagaaagctttcattgtctcttgcaaagagaaaacagcagacgagttgtcattgtcaattctgtgctcgaaatgggaagatgagatcaggcaaccagaatggcatcctttcaaagttatagatgttggtggacaggcaaaggaaataattcgggaggatgatgagaagctgcaagctttgaaggctgaactgggtgtgcaggcgcacgatgtggtcgtcaaggcccttcttgagatgaacgagtacaatccaagcggcaggtaccccataccggagctgtggaacttcaaggaggaccggagagcaccgatgggcgaggcagtagcctacatagtgaagcagtggaaggcgaacaagaggaagcattaggcgggcctgatgcctgatggcccttgtgccattggttcctgggtcgatgtccctgacagtgagagctgagaccctgatcccctgactttttctgctgatggaagacctagtaccagtagcactactaaaaaaattgtccgatctcttggacggttagattggctatggcacctagtgcaatgatctatatgtataaaaaatatctgtagtgtttaatgattttaccagaactagataaagattatagaatatttattattatacctgttgtgttggaaagtgaacgtggagagagagcgttacggcttccggagagatcagcgtagtttctgtgcgcgtctcgaattccg

SEQ ID NO: 39867 - DNA, 3657 bp, Zea Mays
atggcctcacccacggtcgcctccccgatccgggcgagccccgtcgacaaccccaccgtcgcgccctcactggcctcctgccgctgcgccttatcgctagatgctcgacatccccatccgcgcgctcgaggcagaggccagggacaccaagatgagcccgaccgcgaccgcctagccatcagctccaaagaagaagccaggggaccgatggacgtcagtgttccgtcgtggtggcccgctagatccatattcagcaagaaagatatctcgccatgccggcccagggccgcagcccgtcaccttcctccccccgcacccgccgtgacagccgcctccccacgcccgcttacccgactggccgcacaagatgcccacagtggcccccatcgcgcccacccgctccccccatccaccgcgacctcagccgccacgccgacgccatccccgtcctctagcgcgttgtcgccgtcgtcacaccgccaaaggtgcctgccccctgctaccgaggtcgacgaccagcagcggcaagctgccgagctcgacgacacgcacgccatgcttggccatatggacgagtccatcgcctgctacgagaaggggctccagatccagatgtccgcgctcgatgagcgcaatccctgcctccctgagacctgcaggtgattgacaaggtttaggaggaaacttccaaaagccggtcaagtatggagtgcttaacatcactttggcaacttatatttttttacatgtttgctttgtttgttaacaacataatttatgggctgacaatgtgatcatgtattctttctggtagtcttcgtgtcactgcttgcagttgcaggggagggatcatggctttcttttattttccatgtgcaatgtttaatttagatattcttttatgcaaataacgcggttacactagatcagccaacattctgggaaataagctatatggtcagagtaagaggttcaagagttgatagttcaacaactttaactgagagcaaatctacaagaaaaaggaaacaagcaacctggaacctacaactgcaggagcttgcttgaaagtgaacaatcaaggttgtgtgtatatattatgcccgacatttttgaaggatattgcgagggccattgtatctgctggaaaaatcatttcaacttgtcgaacatggtattaggatacgaattggagtggtcaacagaaattctggacagatatgtcaaatttcagaatccacgatggtcctccaagaaataaagatgctcttgatcatctattgagaagtggaatactaattttttgctgcagcgtgatggataaaggtttttgcgtattcttgggtttttttcctttcctttttggctacacacaactctttttaaatatacattcagtaggtggcaatgcctcctatttccctaaaaatatagcgccaaagagttcaaaattgaattctcataatctgctattaggaaaagaggtcaacttctatattttttacatcaggtaatttggctataatacaacggcatgctgaggtcaacttctgtatttttttctgcaagtaacttggctataatacagcggcatgctccattctgaagctggtcaagaaataaatatagcacttgcaatattttccagtagtcaaacctctccattacttcaattctcgttctcatttttgactatgttcttcatgtcagttcaacataataattaagaggtcgcttgcccctgagacggcttcatgatccatcgaagatggcgcttaatctcgagagctagggagatgaaatgccttttgtacatgatggaaggaaacaaattacgtacatgtatatgtggatcgaattgactgttgcattctgcctgtatttaagcaacggtttccacccaaaacgtctataatttggtccttcctagatgtgtcaaatgtgtttactgcactgcgtttgcttttgtggcagcgccctaatagttgtttataaagtctgatgttaacaaactattgtcatgctatgtaatatatagtcttaacatgttggtttgttgagtgttcgaatatcagttttatattattatgtcaggtgttattagtgttcaattttttaagttcttgttgtacatcctatcattacatgagacaatgttgtgatgtttacaatattgtgttatgtatgttatatcattttggtattatagtataatttaatttgtatcagtttagttctgtattggttgttgccaaaaaaaattatgagatattaaggtcgataataatgttcgtttttatataatcgttttgcactaatattttgttaatttttttgtataccgttgcaacgcacgggcacctaactagtatgagactatgagtacatcaagtgcattcccttagaactcttgttgtgtaaaaaaatgtgtaacatgtcttggtacagagattaatttggtttgtgttttttagactgcaattatatctgggttctcagccttgccatggttagtcaagcccctctatgattttatcagttgattcaggtggttgattatatggtggttcagagagctcgaggtgaatcacagagtacatatagatctctccactccagtcactatgttgggaatcctcagcctttggaggaatcatgagtgcatacttcagtggttctccagtcacttatggcgtaagatttgtctttggtgttacagcacttttgccactgttccgagtagcagagaaggacaactctggcaaactgtgaagaaaataaaagattttcacaagcggaatcttcagaatctgaataaaggagttcgtgggaatcagttgtaccaaaaactggttcagttttcgtattccaagcatactactggaagttcacactgatcggcgacaaactctcgcccaaggagaagttgaaggaggatcagcgtgaacacccactgaaagagagatggagttgaatgagaaatctgaaaagaatacgcaagaggtagatgagaagttccaaaacacaaacttgtatctcaagaacttagagatggagcttcgggagttacaagtgcttcataagcaatcagatagatctgaaagttttactgtgccaacacatgcacacactggtggtgcctgcatctagctattcagatcaaagcctgacaggtaccatagggcaaagtgaagaagaaacagaagagttgagcaagatcacgctagagaataaggatattcagcttgatatcaatataagagtgtttgatggagccgaccctatggagctgcatgtttatgattttaaaggacctggtgtaaccttatcaatgtacaatagcgatgagtttattaggccttttgctaagtcctccatggatatggctctttcaaaaaagtcgtctcttcatctcagcaccaagaatacaatcatcaagaagtatgacgacaggcatggatcatctatgtttctacaagctcgcggtcacatttattaggccttttgctaagttcatggatatggctctttcaaaaaagtcgtctcttcatctcagcaccaagaatacaatcatcaagaagtatgacgacatgcatggatcatctatgtttctacaagctcgcggaaaactgaagatccctattgtgttgagaattt

SEQ ID NO: 39868 - DNA, 2615 bp, Zea Mays
cgtcgtttgcatcaccatcgcccgcgacagaaacacactccgccgaacggttgtgtgcatcgtcgcatctcgcggcaaagcgcacgggccggccattggtggatccggtgggggggccgccagcagccttgctccaccagccgcgatcatggcgggcctactcccagaacctcgcccagccgtggaaggtagatccgatggccaggaccccggctgacgcgggctcggggccccacgctgactcggccccgctgcatcccgaacggataagctcctgccgcgcacggagctcgccgaaccgacacccgccgcgtgtccagggagcgctcccggcgggggtcgctcgcagacgcgaggtcccggagccgcgcgcgcccccgcctataaaactgcagccattctcccctggttcccgcatcccactcgcagcacgagcgctcagcgtctcgtctcctcctccccacaaaaagccgctgaattgctccgtcggcgtcatgtgtggcatcttagccgtgctcggatgctccgactgctcccaggccaggagggctcgcatcctcgcctgctccagaaggctgaagcacaggggccccgactggtcgggcctctaccagcacgagggcaacttcctggcgcagcagcggctcgccatcgtctccccgctgtccggcgaccagccgctgttcaacgaggaccgcaccgtcgtggtggtggccaatggagagatctacaaccacaagaacgtccggaagcagttcaccggcgcgcacagcttcagcaccggcagtgactgcgaggtcatcatccccctgtacgagaagtacggcgagaacttcgtggacatgctggacggagtcttcgcgttcgtgctctacgacacgcgagacaggacctacgtggcggcacgcgacgccatcggcgtcaacccgctctacatcggctggggcagcgacggttccgtctggatgtcgtccgagatgaaggcgctgaacgaggactgcgtgcgcttcgagatcttcccgccggggcacctctactccagcgccgccggcgggttccgccggtggtacaccccgcactggttccaggagcaggtgccccggacgccgtaccagccgctcgtccttagagaggccttcgagaaggcggttatcaagaggctcatgaccgacgtcccgttcggggtcctcctctccggcggcctcgactcctccctcgtcgcctccgtcaccaagcgccacctcgtcaagaccgacgccgccggaaagttcggcacagagctccactccttcgtcgtcggcctcgagggctcccctgacctgaaggccgcacgagaggtcgctgactacctcggaaccacccatcacgagttccatttcaccgtacaggacggcatcgacgcgatcgaggaggtgatctaccacgacgagacgtacgacgtgacgacgatccgggccagcacgcccatgttcctgatggctcgcaagatcaagtcgctgggcgtgaagatggtgctgtccggggagggctccgacgagctcctgggcggctacctctacttccacttcgcccccaacagggaggagctccacagggagacctgccgcaaggtgaaggccctgcaccagtacgactgcctgcgcgccaacaaggcgacgtcggcgtggggcctggaggtccgcgtgccgttcctcgacaaggagttcgtcgacgtcgcgatgggcatggaccccgaatggaaaattacgacaagaacctgggtcgcatcgagaagtgggtcctgaggaaggcgttcgacgacgaggagcacccttacctgcccgagcatattctgtacaggcagaaagaacagttcagtgacggagtgggctacaactggatcgatggactcaaagccttcaccgaacagcaggtgacggatgagatgatgaacagcgccgcccagatgttcccgtacaacacgcccgtcaacaaggaggcctactactaccggatgatattcgagaggctcttccctcaggactcggcgagggagacggtgccgtggggcccgagcatcgcctgcagcacgcccgcggccatcgagtgggtggagcagtggaaggcctccaacgacccctccggccgcttcatctcctcccacgactccgccgccaccgaccgcaccggagacaagctggcggtggtcaacggcgacgggcacggcgcggcgaacggcacggtcaacggcaacgacgtcgctgtcgccatcgcggtgtaacagtaatgaactggaggatagggacgaacgaacgactggtaggtgtggcgtacctgccgcgtgcccaccggccggccatatatatcgaatcccggcccggcgcggcagcacgtgctattgttacgtgtcaccagcgtacgtgtctgtgtagtgcctcgatcgtatctgtacgtctttaggaaaaggtgtgtccgtgtgtattgtatgtgtgtgagcaagcgtgcgtgacgcgctctgcctgtgtgacaaagcagagcagtacaagctcaggcattttctgtccgagcgatgatttgaactggatctatcatctctgaattgaactcggccggacgacgacctaccgctaaaatta

SEQ ID NO: 39869 - DNA, 3250 bp, Zea Mays
gttgagaaagctcatagtggagatgttcattgtgttgattggaatccccttgatgttaactatatcttaactgggtatgatggcattaaggctcgattcagcataatcgttgaaacaaatttgatctctatcagttccttatacgttcaatggtcacctgatagagcatctgtttttggaagttctgcagaagatggtttcttaaacgtgtgggatcatgagaagatccttggacaattgtcagtgtctctgatgatggcgagagcactggtggaggtggaacactgcaggtttattgatatggcagaatccttgtgtcagaaacgtgctttggaggctttccgtttggacccgacgaagtggggaggcttccaagtctgtcattcccttggaggaggcactggatctggaatgggcatgcttctcatttcaaagatcggagaggagtaccctgatcggatgatgctgacattttctgtctttccctcgcccaaggtgtcagacactgttgttgagccatacaatgcaaccatgtctgtccatcggctggttgagaacgctgatgaatgcatggttcttgacaacgaagcactttatgacatttgcttccgaactctgaagctgacgacccctagcttttgtttctggacagttggagacttgaaccacttgatcagtgcaacgatgagtggtgtcacttgctgcctctgcttcctaggacaactgaactctgacctgcacaagcttgtagtcaacctgatctcgttccctcggctctacttcttcatgatcggctttgcgccactcaccttgcgtggctcgcagcagtaccgtgcgctcaccgtctctgagctaacccagcagatgtgggatgccaagaacatgatgtgtgttgctgacccacgccatggtcgctgtctcacagcctctgccatgttccgtggcaagatgagcactaaggaggttgatgagcaaatgattaatgtccagaacaagaactcgtcctactttgtggagtggatccccaacaacgtcaagtttcaccccttcgtccccatcatccgggattcatccttcgacccctcccccccacggtccctccccctacccacaccaacgcgcacacggaccgggagtcgcagcggaaaccacaaaaccagcgtgaaggcgcccgaaccaccgcgagccccgcccaccactccacgaaacccaaacgcacctccgcagcgagggatatcccccatcaccccctaccagtttcaattttcaaaagggcgtggaggcgccgcaccaccgccgccgccaccactgacgagggaggaaacgccacctccccgagccagtccgatgttgtccgaccaggagctggcccagtacgtggagtccctcgtccagcacaccgctgcgcagggtggcaccgggatatcggcggatgccgtggtgcgccagctcggggcgcagctcggcgttgacctctcccccaaggcgcagctcatccgcagcgtcctcgtcgcgctcctcggccccgcggccgcgccggcgccggaccccacgggttcgcgtaaggatcccttcgaccccgcaaccgctgccgccgccggcgggccccgcgccgagactcctccacagcagatgcacttctctaccgccgccgcgtcgtcggcccccgccccttctccagccgttccccacttcttcccgcagcagcaccagcaccagatgcagtacttcctgtccgccccgcagcagtatcagcaccagcagcagcagcaacgcgccggcgcgtccccttcgccgtttgacatccccgcgtcgtaccgctacgggcaccagcccttgccgcaggccgaccaggcgcagctgcagaggctcgtccagctacagcaccagcagcagcaactggccgccgcggcgagagttgcagctgcagcggcaccgactccgggggagagtccccgtgcgccggagccgccaccggcgccggcgccggcagcctccaagaagaacagcagtgctagtgttggagcaaaacgaaaaggtggtcctggagggttaaacaaagtctgtggtgtgtctccagagctgcaagctatcgttggtgaaccagccatggctagaactgagattgttaagcagctttgggcatacattcgcaggaacaatttgcaggatcctaacaataagagaaagattatatgcaatgatgagctccgattagtttttgagactgatagcacggacatgttccagatgaataagcttctgtccaagcatatacgtcctctggagagtaaaaatgattcgaaaccagaagcaaagaaattgaagccacagggtgatgaaccaatttcttcagttgaaactgatgttaaccaacttccccttatggtttctgatgcgcttgctaccttttttggtaccggagaaagagaaatggtccattctgaggctgttaagcgtgtctgggatcacattaaaagcaatgatttagaggatccagagaatcctacggtgatactgtgtgactcgaagcttaaacaactctttggacgtgaaagtcttaccgctcatggtgtctcggaggttgctttcagaccacctttacacgcaatctaccaatatctgactgatgcgactgtttggcttgttggctgcaggcgatacgattttctggactcggctgggctaacatcctgggtagtaggcgctgatgaaaggacaagggatctgctcaaattaagtgttgtatttgtatcctccatattggtgaagactgatttacagtagtaagggaaaaggaaatggcagttgtgttgcatactatctagtcagacatagtagtctacgtgacttggaatgatgcggcgttaaactaaaaaggacagcgagagctgatgtaaattcggcagccgtataccgtaggcgcgtgcgttttctggtaagactctcttgcattgctagtgccctaagttgactcgaaacatctgtacctcgaaatgttgctgtgttaggtgatacctaaccttaatacagtttagatcgttatccttactcatccttttcctgaacccctgcatgtatcatcattgtgtgtgcatcgtatgcggcagcagctgtttacgaaaggaacagctagctactgcttttttctgttcctgcatgatgcaggccgtttacaagatcctgcctactgtacaaggctagatacttgctccttgccctcctggtggtgctgctggtggcgacggcg

SEQ ID NO: 39870 - DNA, 2067 bp, Zea Mays
ggggcttgcctgaataacactaggttagtgttgttagacgatgtccacttgacgatcatccttgtcttcgcattgttccgattatccatcttcaggttaatcaccttgcgaattagtccacacttggggtcgacttgactcatcttccgcttcacgcgattatttatcgtacctcatgagatgcatgatgcacatgtatgagcacgagtataacgagtataatataaataatctacctaaaaaggatgaaacacttaaaaccaaacattaagcatcatggatatcacaatagggcatcgactacatccattaaccaaattgacatattacactagaaaatatatttttattcctagctttttattaactctttaaactatgtatcttaattacttgattaccgatttatctaaatcgatcatctagacctagttaacgggaatacgaatcaacttaccctgactaattcgacgcgatagtcacaagcacgactacgggttccggttgatgtaattgaggggccttcttttcttcggtaatcaattgctgcagatcttttcctcgactgaataattttgacgaaccgaacttgagtcgcgcaggatgtccgagcttttattgcgcacttggtgaataccacgctgctggctttgtcttcacccgattcttgcgatttcttgctgacacgcggaacgacgacgacacaggagggtgacgtatatagagctacacacgcgacgcgacgacgaacgacgctaactggcggaatcgacgacgcgattgggaattaaagtcgagcgagccgagagggcgcgctggcgagcagaaaacaggacgcgcggcgaggctgagcgtctgtaagaaaaacgtgatggccagagaactcagcacgggcgcgatgatttggcagatcaagaaaacatgacgacaagaggcaagatttgcagatgcctcgacgggactggccagacacaaagacacacaaagacgacgacgtggggcgagtagcgcacacgcacgtcgcaacaaaacgatgactgttcagcgcttgatatttcttggagcagagcaagaacgctgggagttcgcagcggtgctccacaacggccatcaccggcgtcgagcaagaggcgatttagtgaggttgacctcaaacaacgcgacgacgagctggaataccagggtgaccgcggcgtgggaggaacggcgaactcacaatgggagggacttcgagctgtggccggcgggcaggaagcgggacgcggcaaaggaagagcgccggcgcgcggccatggctgaacagagaaacgcgcgggccgcgaggagcagggactggccgccagcagagcgcagaaggcgagcagggagctccggcagaggaccgcgcacgcaggggcttgacgacggacggtggccatgggcgagacgcgcgatcggagcataggagcgcgtgccaggaagaaccgagcgggcgctgggcacggccaccggcgggaaaggccgccgcgcagagaaggaagacgagcgcgcggccagccaggcgaacaggagatctgggaaccgcgaccgagggagatggagaggaggagacgagctcggttggctgggtttggggctcggcaggggagccgccatgggaggaggcaaaagggcgagcaggggcgcgcgcgtgccgtggtgtccagtcgcgacgtccgctcggtggtcggcctcggtgaagaagagaggagacgtgagggagcgacgcggcagaggaatccacatccgaccagcaggcgccatggctgggagcttctgcaagctggagggagcagaggaggcgccgagctgaagaagcacgaggaggaagaagaccacggcgcgcagcagcggagcgcgcgacgcagagacccgaagggcgcgcaggcatggaggagcgcgcggcttagaggagccaccatggagagaaccttggctggctgggactgggatgagccggccggacccgagggagataagggagagaggagcacgagggagacaacgcactggagaagacaacctgagcacgacgatgcaaaatatcag

SEQ ID NO: 39871 - DNA, 1786 bp, Zea Mays
tgggctcggttgccccatgccccggtcagtttcacacggctgaagccagccggaacgtgttgaggaggggtgggggatagggttttttcgcaagccagcgaggcagcgaccgttttgtcaccgcaacacccccgccgactccctcgccgccgccaggaatggagtccagcgctaagaagcttagcagcctccgtatcacctcactggatggcgatgatgacgaaaccgaggacccgcatcagccccctccagcaggaccctccgccgctgcagcagattctgatgacgacgatgaagaggaagaagcggaagtgactcttggtgtccttagcaaaccgaaacacccaggcctccttctccgccacttgttccccagcaaggccggcggcatcccggcgtggctagaccccgtgaacttgccgtcggggaagtccagctgctgcggtttttgtggcgagcctttgcagtttgttcttcagatttatgcagcagttgaagacaatgtagcagccttccatcgaactctgttcatgttcatgtgcccatccatggcgtgcttgcttcgagatcaacatgaacaatggaagcacaagcatgggaatccatgtagaagcgtgaaggttttccggtgtcaattgccacggactaatgccttctactcagctcaacctccaaagcatgaccggtctgacaaaccactgtgtccaggagcccatgtatgccactggtgtggtacctggaaaggtgataaaatatgtagtagctgtaagaaagcaagatactgttctgagaaacatcaggcactgcattggcgtactggtcataaaaatgattgcctccagataataagttcttctgctgcttcaaattcagttttgccaactgttggaaaagttcctgctaacactttttggccagaatttgagataaaaatagactatgaaggtagatttgattccgatagtggtgatgagaataactcgaagttgttggtgatgcaaagacatgggaaacctgatgctatgatgcagtcatggatggatcaatttgaggctgattctgacaacaaatgctgggcatcttttcaagagcgggtctcaagagcaccaaatcaagtgttgaggtattgtcgagaaccaaatgctaaacctctctgggcgttatcttctgggtgtccatcaaatgctgatatcccatcatgtagctactgtaaaggtccattatgttatgaatttcaggtaatgccacaattgctatatttctttgttgtgggaaatcaaccagactcccttgactgggcaacaattgctgtctacacgtgtcaaggggcatgtgaccaaagtgttagctacaaagaggagtttgcttgggttcaattgtaccctacaacaactacgaggcaataataatgtttgcctattccttgctgtccaatgctgcaggtgtcaaaaagtttgcagaaagtcagaaacaattcagtaaatacccccgccagaagaattggaggttgggatgctcgaggcagtgagtaggagttgacaggaaccgtctgcaagtacgtacctccttttggtactagagtttctgagatagggaggagtggcttcaatgtttccaggtctattggtcgtgaggagaccgtgggtcccagacacatggtcgttacatcgcctttggtccattttaggcactaccatagggcccatgtagatgtgatggctatagggggtgtttggtttctaaggactaatatttagtcccttcattttattccttttaagtttta

SEQ ID NO: 39872 - DNA, 1775 bp, Zea Mays
atggcgtccgataacctcagcagatccacgtccgtacgtgcctgtcttgtctccctcgccaaccgcgaatacgactccgcgcccgctgaagccttcttcttcctatattgtgctactgtaagagctgctgcattcgccaagggaaacgcggccagtttgccagcacagcaccaacacggccctgccggcatcgtctttctgaggcggcggcgccaagatccagcccaaggagcagcagaagcaagtaaggaaagtgatcagaaaagtggctagcaatcgggctgcagcaagcaactggacgatgatggcttccaggcagtcagagaacaatgcacaagaagaaacatcaccattgacgactcctaacgccaacatagccaggatcatcccttcgctgcccctcgagaccaggtggccaccgttccctctccgacggtacgccaatttttggctgcctgaggtagcattgaaggaaggcgtccccggcgttcattcctgcttcgagccgagacccaccgacgtgttcctcgcaagcttccccaagtctggcaccacctggctcaaggccctcgccttcgcgacgctgaagcgttccacgcatccgccgttcgacgacgaccatccgctgcgccattgcaaccctcatgactgtgtcaggttcctcgaacttgatttcaaccagcagaaggatgagctcgaggcgctcccgtccccgcgtgtgctggccacgcacctcccctactccctgctgcccggcagcatcaccggcgacggagagcgctcggggtgccggatcgtctacgtttgccgggaacccaaggacgtgctggtctcctcctggctgttcacgagaaaggcagcgccggcttgtggggttgacgcccggtcgttcacgatccaggaggccttggagctgttctgtgatggccgctgtctcggcggcccacagtggaaccacgtcctccactactggaaggagagcgtgaggaggcctgacagggtgttgttccttcgttacgaggaggtgctgattgagcccgaggcgcacgtcagaaagctggccaatttcatgggctgtggattctcagaggaggaggaggagcgcggggtggtgagcgccatcgtggagctgtgtagcttggggaagctgagagacatggaggtaaatagaaatggaagcactttgttggggatcaagaacgaaagcttcttcaggaagggagttgttggggactggagcaagcatatgacgcaggagatggcgcagaggctagacaaggtcgtagaggatgcattgcaagggactggattcacctttgcgagcacagcatgatgaggcagtgcgctcatagtagttgcgaactacagaataatgccaaggtcaactcgttttattggtgttgctggttggagatcataccagtcatggtgagcattcttctttggtgatgaagggggaaatatggacatcatcttatcatttaacgaaaattgatttgtgtacaattcatttgtataactttgttacaaaccatatgttgtggcaccttggcacgccaaaaccatatgcattactgtgtaagatttgtcataaagccatgtatcatcattgatatattatcgattaatgtttggagaagctacaattgattgcaagcagacctgggcagattcctaagactatatacagtagcttacccatctacatactcatattcaaacttcactctatcaagagtgcagtctacagtgcggagctgtgcaatacattgttt

SEQ ID NO: 39873 - DNA, 2026 bp, Zea Mays
  misc_feature (2026)..(2026): n is a, c, g, or t
agggattccagcttctggaaccttcctttcgctatacgacctgagttcgcttcaggcagccgccgctctctctctctcccgcgtccgtcccaccttcgcaagccagccacctccctgagaggcctgaccgtgatttcggcgtggcatccaaaggcggtcaagattcgagaggccggaggaaccaagcgtagggcctccgaccccacgtcgtcgtccgcgcgcgccgcccgccgccgcagggagatgggggccgattactacaaggtcctcggcgtcgaccgcggcgccagcgacgacgacctcaagaaggcctatcggaagctcgccatgcgatggcaccccgacaagaactccaccaataagaaggaggcagaaaccaagttcaaggagatctctgtggcatacgaggttgcctgcccctccctctcactctccatgtgtttgtcttgccaggattattactgttccaaattcctcgcctttggggcttcgatccattcgctgtccctgtctttgtggttcatgctgacgaacaaaactgcctgtctgttataccggccagctctttggacacagtagtgaattcgatactgcaatctggaccacgcaccaatactgcaaaggatttaactttaagatgagctcgtgataataaaccaatcttagccagggagtaacaagttttagcttatcgatttgaggttctgattatctgcacagctgaattatacatttccctccatgattcgctttcctactgctactcttgcatctgttgtgttgaccaatcctgtgtgcgcctcttaggtccttagcgatcccaagaaacgtgcaatctatgatcagctaggggaagaagggctcaaggggcagccgcccccaggagcaggaggtcctggcacatctcccttcttccctggcggggctcattccaccgctcaccattttaacccgaggagcgcggacgatatatttaaagagttctttggatcccctggcatgggtggcatgagaacggaaccaggatttcaaaggtcaatgtttggcaacgatatcttctcttcgcgcttccgcgctgagggttccaccagtatgcagcagccattgcgcaaggcagctgcaattgagaatccacttccagtcggccttgcagatctctacaagggtgtgacaaaaaagatgaaaatctcaagagagactattgatgccagcgggagaatctcaaacacagaggatattctgacaatacaagtaaaggctggttggaagaagggaacaaggattacatttcctgacaagggaaatgaagctccaaatatgaaacctgctgatattgttttcatcattgatgagaagccccatgatgttttcactcgggagggaaatgatcttgtcgtgactgagaagatctcactggtggaagcactgactggctataccgcacgtgtcactacgcttgacgggcggagcctatcattgcacatcaactcaataatccatccaaagtacgaagaggtgatgcctggagagggcatgccagtgcccaaggaccccacaaagaagggaaatctgcggattaagttcaacataatgttcccctctaggctgacttctgatcagaaggccgggatcaagaggctattgggttcttaggccgccacctcaaatgacatcttctttatgatgaaagttgtttgtgaatattgccagtaatttgtttgtcacagtttagttttttaaagtggtgcccttagttttgccgatgtcctcatttttacccttagtcgtgtttttttttaagggtgaaccttcaccattttattttagtcaggcagagtgttgtgccctttgcattacggtattccattcagttacaggtgaattaataccgctgtgtaccgccaaccggatttacttaaagaagccaaatttgtatcgctgccaattccacaaacagaatttgcagacttttaatcaccagactgggaacaaacaatggaccgactgactcaagatgaaaacaaan

SEQ ID NO: 39874 - DNA, 2300 bp, Zea Mays
tggctactccataccaactcccgctggcgtttttttttttggggccttttgttcctgcttttctctttcaagaaaattatcctacatattgtagctccgcaacctgttcagcaaaatgaggccttcagatgacagggcacagctttcaggctttgcacaatcagatgaatcgacacttgatgtggaggggcattgctgccatcagccgtcattcccttgttcgccgtcaatgcaaccgattgtttctgggtgcacacacacagagaacagcgcggcatacttcttatggccaacatcaaacctacagcactgtgcagccgaggggcgtgcaaactactttgccaacctttcaaagggacttctgccaaagattggccgtcggctgcccaagggccagcaagcaaacagcttgcttgacttgatgactataagggctttccatagcaaggtactgcgttgctttggccttggaacggcagtgggcttccgcatcaggaaaggggttctaaccgatatccctgcaattctttgcttcgttgctcgcaaagttcacaagaagtggcttgatccggcccattgccttcctgccattcttgcgggtccaggaggtatttggtgtgatgttgatgttgttgagttttcgtactacggtgctccagctcaaactccaaaagtgcaaatattcacagagctcgtggataagttgtgtggcagtgatgaatgtattggctccggctctcaggttgcaagtcaggacacttttggaactttgggcgccattgtaaaacggagaactggcaacaagctggtaggtttcgtcaccaaccgacatgttgctgttgacttggactacccaaaccagaagatgtatcacccattgccacccaaccttgggcctggtgtttatcttggagctgtcgaaagggcaacatcttttatcacggatgatgtttggtatggaatctatgctggaacaaacccagagacatttgtacgtgctgatggggcattcatcccatttgctcatgactttgacatctccacagtcacaactacagttaggggtgttggtgatattggggatgttaaggttatagatctgcagtgtccacttaatagattaatagggaggcgagtatgcaaaatcggcagaagttctggccacacgactggaactgtgatggcttatgcccttgagtacaacgacgagaaaggaataagctttttcactgacctccttgtcgtcggtgagaaccgccaaacatttgatctagaaggtgacagtggaagcctcattatcctgactggccaggacagcgagaagccgcgtcccatcgggataatatggggtggcacagcaaaccgtgggaggctaaagcttaggtgtgaccatggccctcaaaattggaccagtggagttgatcttggccgccttctggatcgtcttgaacttgatcttatcataaccagcgaatcactcaaagatgccgtgcagcagcaaaggcgcgcgttggcggctgcagctaattctgctgctggggagtcgtcgacagcagcagctcccgtcctagaagagaaagtggaggagatcttcgagcctctggggatcaagattgagcagctgcgtcggcacgacgtttcggcctctgaagcggaggaggcagctgggatcaatgtggaagagcgccagttcatctcaaactttgtgggcaggtcccctgtgcgtgatgaccagggtgctccaaggcaaattgcgaacctgaacaatccgtcagaggaagagctcgccatgttgctgcacctaggcgaccagtagcccaagcggcttcgcagacagaatccgacctcgacgggaaacggcgaagcgctcatttcagtgtctctacatcgaagagtcgcaagtagtccgaagaaggtcacctggagttcagcaaactgaacctgcatcagtagcttagaccagcagcttcctggcacaaacattataatgaactatgctgaaacttgattcagcacttacatgatttgggtggtattcccttcagttttgctgtgctcgtgaagactttaatatgtacaatgctgagtccctgtatcaaaacaatgcaggtagtgataaaatcgtattgatcaccttctcttttctaccattatcggtggagttgtctcaagatgactagatcagcttctggcaggcctgtctagtgcccaatgcaactagggcgatggtacaggcccccaattttttgagttttctgaaatagataatataagaaggcaaatattgtttgatgttttgt

SEQ ID NO: 39875 - DNA, 2220 bp, Zea Mays
ccctcccagcggccagcagcagcacgcaccgcgccatcaatccatcgacaagccatctcagctgcccacggctgcactgccactgccacgccatggccctggacgacgcctgcgcctacgactgttgcgcgttacctccaccgctccattgcttggactgggactgggactcggagctgcttcacactcatcgtcacactaccagtgccggaggtgccgccgtccaagcagagccgcccaccttcttcgtcccggcgacgccaggtgtgcagccgtcggcggcgtccagtggcggctacctgcacgacgccatcactcactggagcgacgaccgtcgcagcaagcggcagcggatggcggcggcggtggcaacgacgacgacgcctcccgctcggcgtccggcgaccaccgtcagcgaggaccttcagtgccttcttgcgggcttctgggattcaacaagcgaggccgagggaggagcagacttccgccatgatctgaacaccacgaccccggagccggagccggagacgacgacggagatacgctgcagttttgcctcaggtggttcattcgacgacacgtccttttttttgtggcttttttcaatactagtacggtagtacctgcttcaatttgctctcggttcagttaaacactgctggctaccgacctacgtgctgccccgactccgtgttaaatttgccattgtttgtcagtacgccggtgctgcaagcagagcagaggaggaagcagacaatgggagcggtaggcaccaacagctacgggacaaaacagtggttactggtcgtacttgctctcgccagttctgattctggtcgactgatagatggccggcccattagcccactgggctgctgcagcctgcatatgcacagcagtacagcactcgatctgctcctagattaattgcttgcgtagcgtagcgtagcgactagcgaaggtgtttgttaatttccttaggcagcagcaatagtcgcactactgtgcctccatacaaacagtttggacatgcatgaaactcactccagtttgaagctcgggcgtgcaggcgaggacgaggcagttgcgtcgggcagggaggaccagcagaggggggccagcgcgcaggtgctgctgccagcgccagcggcagtggcgcagcgcggagaggaggaggaggaggaggcaaaggcgaccgcggtagtcccccctcctcggttccccgccaccgcgccagccgctgctcccgtgcagcggcagctgcagctgcaaaaggcggccgagggtgcagccgccacgacgacggcgcccgcctctgcctgctcctctttgctgtcactgtcaggtgggtacgttggggtagatgaacggtgaggaaccattcattactgggctgggacgctgacacgcgctggtggcgatgaggagtacagactacacagagcagcagcagccagcagctgcagtcgctgcaacatggcaataatattttgaacgtatttggcatcggtatacagactacagagagcagccagagtgctgctcgtgcctgcgcaggcttcggtttatctatcgtttggcctgcactacagctcactacacgttacaattcctgctgcagacaaacaaatccaattaaagtttctgtgactagtcgttctttttttacgtacgtttactaaaatgcatgcgttcgtatatactgcaggggaggacagggagaagagaggcgtcggggtgctgtaccccttcgcggtggtcaagccgctggggctagacgacggccgcatgacgacgctcagcgacgtgaaccacagaatcctcaagagaccggcaaggccggtccggcaccccgtcggcccgttcgcgtgcggccccgccgtgtcggcccacggcctcggcctgtccgggaaggtggtcgtcagcctcaccaagatcaggacgggagggaacggcaccataaccatcatcagaacaagaggctgatggatcatggatgtcatcaaccgtttccgatcccgcttcttttttttttgttcttgtttttaggtcgccatgcctgttgtccagggtaatcatggtacattggctgctacggttgtaaatacaccctccgggttggttttcagtgcaggcttctgccttctctactactagtaattaactagctaaaactcccactacatttgaattgaacgtacatcgtacataatatgctgc

SEQ ID NO: 39876 - DNA, 971 bp, Zea Mays
cttgcctagatgcttttgttgtacctaagggatctgattttgggtgggcgcagttgcggagatgcagaggctgggggatttcaggctccctcccttcttcaactacccgccttacttcactttacagcctgtgcgtgagacgcgggaaaagcaagtgcagttatggaaggatctgatacttgattactgtagaagtcaaaagatacatacaatatctctagaagaagatttccccttgttctccaatgcaaagattgagagatctcttagctacgaagcaaaggaagtgttcctcgcagctctcgtcagtgaaggtcgtgcagaatggatggacaaaggtcacaagaagtgcctaattctttggctaaggatacaggattgggcaaatttcatattgaactttgtaaaggataacgggttggaagtaatgactatcgaagaaatacgctctggaattgatacacgtggaactgaactcgagggaattgatcgtggtgttctcatgcgggctctgcggcagttggagcaaaagggaaaggcagctatcttcaaaggcacctctgctgatgacgaaggcgtaaagttttcggtgtaattcttttgcgatccttaaactggcagactaataatctcgttcagccggtgcccttgaacatggcatgagacacccatagcctcgatcattcagtgccctttgaaaatggcatgacacatccttgtaaaaagcagtagggctgatcacattcttcccgagtagtatcctcttcagtgctgcggtaaaatttcccaactcatcttttgttgtagtgaaaaatcggccaagcctgattaaacattgtggagtggttggtaagaagaagttgaactggtcatgcctcttacgctgattgattttccgatatctaagcaaaggtgttcatgaaatgtacgcgggattaattctgggtttattcgaaatgggcgtaagtttc

SEQ ID NO: 39877 - DNA, 2230 bp, Zea Mays
cgcaaatgcgaattagtagtagcgaattagaatagaagcggtgcgtgctgcataaaccaacgatgcacgagcgggcacacgtcggcgtcactccctctctctccttccatttcaagccccccgccccgcccgtagcttcttccaccaggttgacctgctccaagcggaggagagagagagagaagccggcacaagcaagccgtcgccacacggatcaaaaatcgaaacgagagctagcttttaattgacaccagagaggcagcagtccgagcggatcgagctagcagctagcaggccgcgcgcggcggagttgcgggagggagatggacgtgaagcggtcgcggagccctcgggctccgcccgacgacgacaggaagcgtgccggcggcggcggcgggtggcgcggctccggcggcgtccgcccggagatggtgctcgtcggcttcctcctcacgctacccctcctcttcctcgtcttcggcggccgctggggcagcggctccttcccttcgtcgtcgtcgtcgtccgctacctcctctccgcccgtcgtccccaagcctaccgcccgccgcgtggacggcggcggcggcgaccgcggcgcgacgcctcgtcagggccaaaaacctgttggtctgaacaacgtctctgtatcgacggcaacatcagtgtcccaggataagcttctaggcggattgctgtccgcggcattcgacgaatcctcctgccagagccgctacaaatcgaacctgtaccggaagccatccccgttcccgctgtccccctacctggtgcagaagctgaggaagtacgaggcgaggcacaagaagtgcggcccgaggacgaagcggtaccggcgggccgtcaagcttctcaaggccgggcgcaacacggacgactcggagtgcaagagggcctcttctgcgagccgttcccggtcagctcgtgggtgctcccgggcagcttcccgcagaacaatccccacaagctccacatcggcgcgccggagagctacgcgaacatgctcaagaacaacatcgtccgcaacgacgacggccccggcgcgccggcgtcgtcgtcgctgcctccgtacgtctacctccacctggagcagttccagctgaagctgtccgacaacgtcttctgcgacgaggaccaggtcacgctcagcaagttcaactggatgctgctcaagtccgacagctacttcgccccggcgctgttcctgacgcccatgttcgaggccgagctggccaagatgttcccgcggagggaggccgtgttccaccacctgggacggtacctcttccacccgaccaaccgagtctgggggatcgtcaggaggtactacgaggcgtaccttgccagggtcgacgagaagatcgggttccagatccggatcttcccggagaagccgatcaagttcgagaacatgtacgagcagctgatgcggtgcgtcagggagcagcggctgctgccggagctcggccccgccgagccgccgacgaacgcgacggccgacgctggcgacgggaaggtgaaggcggtgctgatcgcgtcgctctactcggggtactacgagaagatccgcggcatgtactacgagagccccaccaagagtggggagatcgtggcggtgttccagcccagccacgaggagcagcagcagtacacgtccaacgaccacaaccagaaggcgctggccgagatctacctgctcagctactgcgacaagatcacgatgagcgcctggtccaccttcggctacgtcgcgtacagcttcgccggcgtgaagccgtggatcctgatccggccggactggaacagggagacctccgacgtcgcgtgcgtccggtccacgtccgtggagccgtgcctgcactcgccgccgatcctcgggtgcagggccaagacggacgtcgacgtcgccgctgtcaagccgtacgtccggcactgcgaggacgtcggcttcggcctcaagttgttcgatagctaactctctcagtggacgtacagctcgacgatccaactcttttctgaactgcgtgtctggcctgtggtctgtggagttaggcatttcgagattcgttgtattcgtttaagcggtaccttgtagtcgtgtacaggtgcgaattaagttaagttacaaaaatgttttgagtactgtttcaaattcgttcttcagaaaacaaatcgcatatatacagtatatagactgctataaatgtttcct

SEQ ID NO: 39878 - DNA, 1003 bp, Zea Mays
ctaaaaccctaaaccgcacaaaaccgcctacgccattccgctgtccgcaatccactccctcctcccacgaaactcttggccatggcttggcgcggcgccgcctcccgctcaatcttcgccgccgtccgtgcccgcgccgcatcctcctcctcctcctcagcggccacgcgcctccgctcggcggctccaattgccgccaccccgcgccgcaccgtccccgcctttgctttcgcggccgcgaggccgttggcggcgatggcggggtaccccgcggcggtcgcggtgaggctcaccgggcactcggcgacgagcgtgcgggcgtgctgtgagctctcccagggtaccctcttctgccgcacttgtcaggatcgttagcaagttagtgatcatgcatcatgatatgtcatcatcgtatgtactgtatatccgtgggcacctatggttgctcattttgtccaagatttgtaatccttatatttgttcaattcgtgttatgcaatgatcctatgcatgtgccttggtagcattgctcctgtttcatgggcagcagcctaagaattttgcagagttgaaccaggaatgggttgttgcttgaggccaaaatgggaaggatcggtgatgaagagattagacagaatgatttgtatcctattgtataaaatgatgtaggtccttttattttcctgtgtgttatctatcttaagaaattagaaggatataatatgcattatttgcgagtttgatagatttttgtttcattggattagtgtattctgagattttggcgtatatttgttttacttcttaacagtattcaatctttcgagataaaccgcttcaattgttttctaaacgacattagacaaaatatgctattttttagcgaaactgcaacatatatgctgcactgctgattttgatgatgtttgaagttttcccaaacgtgctattattttcaacaaatatgtacgcaactctaactataagttagcttcatagtctt

SEQ ID NO: 39879 - DNA, 2078 bp, Zea Mays
accaagctcctgctgctggaaccaaaaatctacagctttggcaactggagacattgctactgcaaaaggatacctatgtcaactacagccaggccttgagctacacaagccaagcactaagccagaaccttgctggtctaaggaaaagaagtccaatccgaaaaattagcagcacattgaactactatctggaggacaactggaaacgtgtttgggtgcttgcagtatggattggaataatggctggattgtttatttggaagttcattcagtaccgtaaccgttatgtctttgatgtgatgggctactgtgtcacaactgcgaaaggtgctgcagagactctcaaactgaacatggcacttattctcttgcctgtatgccgcaacactatcacctggctgcggaatacgaaagctgcacgggcattgccgtttgatgacaacattaacttccacaagggaaccaccttgtatgtgattttccacggctcattagttcatcagaggtgaagtatgctccactgcgcaaatactttggggaaaataaaccaacatatctggatctggtaaaaggagtggagggcataacagggataatcatggttgtgtgcatgcttatcgcttttactctagcaacaaggtggttccgccgtagcctggtgaagcttccaaggccatttgacaaactaactggcttcaatgcattctggtactctcatcatttgttcatcattgtgtacatatcacttgttattcatggagagtgtctataccttatccacgactggtacaaaaggacgacatggatgtaccttgctgttcctgttggtctgtatgtaggggagaggactctgaggtttttcagatcgggcagttattctgtccggttattgaaggtggctatatatcctggtaatgttttgacattgcagatgtctaaacctcccacattccgttacaagagtgggcagtatatgtttgttcaatgccctgcagtttcaccttttgaatggcatcctttctcaattacttcagcacctggggatgactatctaagcattcatgttcgacaacttggtgactggacacgggagctcaaacgggtattctcagcagcttgtgagccacctgtgggtgggaaaagtggccttcttcgagcagacgaaacaaccaagaaagcgttaccaaaacttttgattgacggaccatatggttctcctgcacaagactacagcaagtatgacgttttactacttgtcggattaggtatcggtgccacaccttttattagcatactgaaagacctgctcaataacatcatcaaaatggaggaagaggaagaagcttcaagcgatctttacccaccaattggtcgcagcaaggcacatgttgatcttgacacccttatgaggattacctcaaaaccaaagagggtactgaagacaacaaatgcttacttttattgggtgacacgtgaacaagggtcttttgattggtttaaaggggtcatgaatgaaattgctgaactagatcagaggaatatcattgagatgcacaattatctcacaagtgtttacgaggaaggggatgctcggtcagcactcattacgatgctacaagctctcaaccatgccaagaatggtgttgatatagtttctggaactaaagtgcggacacattttgcaaggccaaattttaaaaaggtcttatctaagctccagttctggcacaggaactaagcaagctctgttatgaattcaatggcaagtctacaacaaaattcgaattccacaaggagcatttctgacatacaacaaggttaatgcagaatattggaacaagggggagaagatgtgatgtatattgggataggctggcctccttcgtgtcaaaacccgagccacgtgaatgtgccagagattaactagaaagacggttccctacccttgcacgatgatgtcacgcaggtctcatcaaactcttgaattttgatacttgaaaattcaaggcatacattttgtagctagcaattttgcaaagtcattgttttgtaaggcaattttgcgaagccaattatcc

SEQ ID NO: 39880 - DNA, 1395 bp, Zea Mays
agcaccaaccgccatccccgcccgccatctgcgcgcgtctggccgtctctctcgcccccgttctcctctctgctatccgcgcccaaatctcaccgtatgtgcgcgtctccatctgcgcgcatctccccagatccactctactcgctccaccacgccgaccccgacccgacaccggcaaccacacggatccactgtgctctccatggccatgaaagggaacgatcttgcgccgacctcaaccaggctctccatggaaggtccgcgtggttccctctcctgcatcccatgatccggatgccgccacaccatggtcgatggtcggggccgtcgaatccggatgcccgcgctctgcgtcgcgtggatcttctagatcacgcgggagctcgaccacaagtccgacggcgagaccatgaagtggctgctagtacatgcttgtcatgctctcccctccacaccccacctcgttagaggcagatcgtgcgggtacagcgccttggctgccgagatcaatgggggcatcctcgccgtcggcaggcccaggcagcactgagttgtgctctgctgcggccgctacttccagatggatggatttgatcaaatagtgaatgtgaaggttgtaatggcaactaatagggcagatactctagatcctgctttgctgtgaccaggtagacttgacaggaaagttgagttcccttgtcccgattggcggcaaaagaggcttgtgttccaagtctatactgctaagatggatttgagtgatgaggctgatttggaagattatgtttgcagaccggataagatcagtgctactgatgttgagttggtttcatggcacataccaagatttttatgcatttgttgttttctaagtattgtattgctagggtacttatgtcctgtgctggccaaagctgtcaaaaccatgagaaaggcagagaaggtgcttcttatagcaaagccacattggtagaccaacagttggagaggaaggtgttgtgatgagcatcatcttgttctacatcatcactaatgaactggttgaacttttggttgctttggtgaatggaggcgacagcatgcagattgccatgtccggatgttatgcgggacctatgtttaatacacttgctggtttgggtacattgttgctagattgatctgggctcttgttatgctgccgagaggtgacatgtagcctaacaagatacttggagttggcctcattgctctttactcaaattttctttttattagagtaagcaatgttggtggaatattgctactacctagagttagataattatttgcttgtaaagttgggatttacatcaaagtacttgcccatggcttccatttttataaatgaaatgaagttatacagtgttgctctgt

SEQ ID NO: 39881 - DNA, 291 bp, Zea Mays
ctcatttattattactaacgctaaccccggcttggagttgtgtttatatttgtaaatttcagtttcgccctattcaccccccctctaggcgactatcaactaccgatctcgcggattcgagtcggctattgaaacggtaaactgataaattatccaaaatagttcgatcgttgcataaattgatgtgctagtacgagacgcattaaggtgcttgataaattgcataagtcgcgaacctctcgtcgacttcgcggtttttgcgagtatcgagccagattcagttatagcgag

SEQ ID NO: 39882 - DNA, 315 bp, Zea Mays
tgaggcctaaactcagcaaaacccgccatccatagctgggtggttttgaggctcaaccaccaaaccgccgtgagtagcacaccacatgcacaacccccatgtcctggacacctgtcccaccagtccgtgaccgtgccagcaacacgatccgcttttccacgtgctcacgctagtgcgtgtcccaggtgtcagccaccatggctagtcactcgacttctttgatccctcggtcaagtcccagcgctcgtccttcaccgctcctagtccatcggcatgaacccacatgatcttcaccttcgtcgtcgaccattgtcc

SEQ ID NO: 39883 - DNA, 2058 bp, Zea Mays
cgaatatccgggcatccggcccaggcatgaacggtcggttaaaccggccaatcctcctctcaagcctcgacgcagcacggcgcgccggcgcgggacgacggcatgacgccgccgtccatcttccaccaccatcgctgcctcgtctccctcccctccgcttccccgacctggacctcgtcccgtcgtctcatccatcaactcgcaaaacccacagtcctgtccctacatctgcgtccagtcttatcctcttccttcgcggttgccgccgtcggcgacgacgaggatgtcgtagtcggggattgcctcgtgttcgacgacgacgctttcgaggaaccggacctggacctcccctcgtccccgtggccgtcggctagcgcctcacgccacggccggaggtcggaggcaggcgagagcgacagcctggtgccggagaggtggaggcatgccgaggaggagatcaacctgacgaagaaggataagcgccgcatcgcgcacgggctgcggttcgggagccgcctcgagcggcgggcgcccccagctgttgctgctcctgatgaattccgcgcgtaccgcaaggggatgctgagcgctgagcgtgagcatgtttctcatgtataccgggggccgctggagaggactcctccgccggaagtgaaggaacatccaccgccggagccggagcctgggacgcgtgtggccccgaggaatccgaggatggggatgggcgttggcacccttgacgacattgatgagtttttcagaagtagggaatatgttcaggatgagatggaggacagcaagagtcctaagggccgtcagaagttgttctcaaatgaggagaagattcttctgaacaagcgagtgcctgatctggaaacagctacttctagtaaatggcttccacttcacacccttgctgcatctggtgatttctatctattgaatagccttttaaaacataacgtggacataaatgcgcttgataaggatggcttaccagcgatccacaaagcaattctttcaaagaaggctgctattatcaattatcttttaaggaactcagcaaatccattcatccaagataaagatggtgcgactctaatgcattatgcggtccaaacagcatgtagtcagaccataaagacacttttactgtacaatgttgacatcaaccgtccagatgattatggatggacacctttgcatcttgcggtacaaacacagaggactgacattgtgaagctgcttttaataaagggcgctgatagaactattagaacccaagatggattgaccccgttggagttgtgcctccggttgggtcatgatgtgcggacgtatgagcttatcaaactacttaaaagtttccgaggacaaaagcagcatgatttagtttagcaactggagggtgtgtgaccctctttgaaccagtgaggttaaccagtgtggtggccttctgggaggccagttttcaatgtaccattcatgattcatggaatcgctcctggtttgagataggaaatagtttacccctagaactggaagcaaacgagcaaaccaggttacagtcgagccatgagaacgggatgaataaacctttctgtaggttggcgctcttcaattattagaggtgaggcgaggcatatgctattcgattattagaatggctctctcttgtccttttggcccattgaattcgtgtttgtgagagccattgatcctggcccacttcacgtggctgggctacgaatctgaactaaatttctggcccgccaacatgtaatgggtcaggattgcaccatcccaaacaggctgttcgggctcgtcaaaaaccgacctttatatgctatgaattcttgttccactaacctatcagctgctgacaattcagctcagatatgttgggaaacgttgatcatgaactaacaagaacgaggattctatgcactcttgtatgcccgatgcaacttcttttgaaatcagtgtgtagcaggaagacatgattgagaacgaggcagagggggagagaagctggagcatttatacacaatttgtaga

SEQ ID NO: 39884 - DNA, 1625 bp, Zea Mays
tatgaagttctatagtttaggattgaatgttcccagatggcagacatggcacaggaaattgtaaaatcaaatggatattcagatgtcataactgtaataaaagggaaagtggaagaaatagaacttccagtcccaaaagtagatgtcatcatctcagagtggatgggctatttcctcctgttcgagaatatgttgaacactgtcctatatgcacgtgataaatggcttgctgatggtggtgtggtcctgccagacaggacttctttgcgtcttactgcgattgaagacgcagaatataaggaagacaaaattgaattttggaataatgtatatggatttgatatgagctgcataaagaaacaggcgatgatggagccactggtagatacagtggatgcaaatcagattgtcactaactgccagttactgaagacaatggatatctccaaaatgaccccaggtgacgcgtcctttactgtaccattcaagctggtagcagagcggaatgattacattcatgctcttgtcgcatactttgacgtgtcgttcaccaaatgccataagctgatgggcttctcaacaggcccgagatcgaaagccactcactggaagcaaactgttctctacctggaggatgttataactatctgtcagggggaaagcctgagtggttccatgacagtcacacccaataagagtaaccctcgagatatcgacattaagctcaagtactccataaatgggcataggtgtcaggtatcaagaacacagttctacaagatgcggtgacaatggaacaaacaagagttgcttcaaagctcattaaattttgtttaacgagtatcttgtttgacagaaattgtgctatttttattgttcatgtactatgcatcaaatattagattctttggaatctagcaaaagtagggagtagattaaactggtctgctgatatgagattgatgtagtgcaaaactgtcatattgccacaaggccgttggtggttgtatgcatttgaagtcggttgcaaattattgctttacgcattccaccattaatccttgccttaggtttttgtgtgtatgtgctcattgtttcaattgcttggacagtcaaaactttcctttgcgtatggttcttgtgacagcaatacaagttacggacagccttttggacaaaaagactgttgtctgtcctttgtttttgtgaggttccttttctttacagcaaatgctgacataggttatcctggagacatgctaagggctctgcaaaaatgcagctgcctaaaatcatttctgcgccggcgacgctgatgttgccatagctatacagttgtttgaaaatgcatttaccgagcgcatcatttagatcggccaagagtcacttcactgggagagaatgctgcaccagaacgtgaaacacgcagatcggtcaagattcagaggaccgggcacataaataaacgaatgaaaaatacggttttcagtaaagctgacgaagttacttgtagaggtatgttgcaatgccaagaatgatgcagatcaagatgatatcaattgtgaagttcctggttgaccgaaactgctcaaaacaaaacacccacattcgtcagtagaaccaag

SEQ ID NO: 39885 - DNA, 1406 bp, Zea Mays
ctcggtctcctcctccactccggcttcggtcttccgttcgaaatccaaagcgagagtctcacagtcggacaacaagcccagaggccagcaagcaacaacaagagcaggcgggatcggaggcgccagcagagcagagacaacaacgccgcgtgcggcgaagtctacgaggaaactgaggaagagaagctagggagcgaggcgcgcagcagccagcagtagagaatcacactagccgatcgattcgagtgcacccacgtcggaaggaacaagtgggggcggagccgcgatgtcggggcggcggccggcgacgtgggaccaggcagcggacgactacgactacctgttcaaggtggtgctggtgggcgactccggcgtgggcaagtccaacctgctatcccgcttcacccgcaacgccttctccctcgactccaagtccaccatcggcgtcgagttcgccacccgcaccatccaggtggacggcaagacgatcaaggcgcagatctgggacacggcggggcaggagcggtaccgcgccatcaccagcgcctactaccgcggcgcggcgggcgcgctgctggtgtacgacgtgaccagggcggacacgttcgagagcgcggcgcgctggctccgcgagctccgggaccacgcggacggccgcggcgccgccgtcatgctcgtcggcaacaagaccgacctggcgcgctccggctcgcgctcgcgccaccaccatccccgcgccgtgccgcgcggggacgccgccgcgctcgcggagcgggagggcctctcgttcgtcgagacctccgcgctcgacgccaccaacgtcgacgccgcgttcgagacgctgctcacggagatctaccgcgccgtcagcaggaaggcgctggccgcctcctccgcgggtgacgatgcggccgccgtcggggaggggcaggcgattcaggtgtccgccggcgactccgccggcctcacgacgcggtgctgcgcgttctagccatgccggcttgtgtagattgacagtgatcgtcagcaacatcggctattcttcgtacgtatagatggaaaagggaggggagggggggatatcaaaatgtgatgttcaggggaaagagtaaaaggattgggctgcttcttcttcactgtcgttacttgtctgaaccactgtcaacggctggattattcattgttcaactgtcctaattccaacagcgagtaaatttcataagcggttcctaaatttacaaatttaaataatagtaggattatatataggaaattgtaactagaccaagtcctcttttttttcttatgcatgagtactaagttctaaacttttcgtgtctttgtctgagtaggatcaagcatcaatgcatcatgcgagtattcttcctgagaaaaactatgagata

SEQ ID NO: 39886 - DNA, 1352 bp, Zea Mays
atttaatattcaacaataaaataccatttgtataaattccagtagtttgttagagatgctacataaacaggtatgtgaaatacatgaacttgagcatgtcttcataacagagacagaaataattcaattcagactgtagactacagtttgaactgcaccattagatcaaacacaaatctgctggagcttctgtgatccaatcatatcacatgctcaatgatttagcacacattctgaaatatattgaagtgtttcagtcagcgatcttaactctgcattattccaaactcaaacaggaccaatgcaaaccttcaaccaggcaggagacaataacattattttggaccccacataaacaaacatcccaacaagtgtttttccctcaccaaatcgacacaatctaacaattccagaaactgagcgtccaacaaaatttaacataagtgaacttacaacttagttctccagctaaacagttaaggaattctcatttacaagtttacaacatttgatgagatccgatgcacccgcgcgctactccgttcatcggccccgatctagtttagtctcggcatttcacactgcacgaatgcaaagtaaaaactaagggggtgtttggtttaaggaatcactccatccaaattaaggggatgcatcatggattcatttctcaaatttggtgggattaccctattcctcatattagtactaacaaactaactataaggaatgaggtggtgatggataaactcattccatttcacaaacaaacaaacatattgaggagtgagaagatgatggactaggtcattactcaaaccaaacaccccataagtgcagggaccaatcccatcacaaccagaaaccccccatgcattacactctttataaactcaaattccacaaattctacgacctctgaacccacagggaggcgactacgattacgcacatgaaatctcggctcaagtcgcacatctcacagccacggccctgcaccacaccgccatggcgccatctaacgaacccacactatgcggagccgaagctaaatcctagcccgaaaccccgagcaaagaatcccgaaaaggcaggaacgtaacaccaatgggtagagacgtagagacgaggaagggaaggggcgggcaggcgtcatctcctcgagcacacggatggtggtggcctcgttggcacccgtgatgctgacgcaagtgtcgatcacctcctacgacgggcgcgccatggctggaggcgaccttgggggtcgcggcgatgcaacgacgaggagggtggggagacaggggaccggggcggagaggcggagaggagtcgcgaagaagcggactcgtgcg

SEQ ID NO: 39887 - DNA, 1132 bp, Zea Mays
ccctgctacgtggttggtacctctagcacaagtgcatatgaacatatacgtccagcaagaccagatagtagataggcctcccacgacagcaactcacctcccgggcctaccaagcagtctctagaaacaaacaaacagcggcaatgtgctaatctcttctgcatttgggcacggcaatcctgacccgaccctccagatttcccgtcgccgagccacgcggatcgagtacccgtcgaactcgccgctgtcggatcgagtacccgtcgaactcgccgctgtcggatcgttctcgcttggggcgatcaagctaacgggatttgaggagatctaggccagccgcgggcagcagccatcagccatgagcgaggtgttcgagggctacgagcggcagtactgcgaggcctccgcctcgctctcccgcaagtgcacggctgcatccgccctcgatggagagaggaagaagcagaagctctccgagatccagtccggcgttgaggaagctgaatcgctgattcggaagatggacctggaggcaaggagcctacagcctagcattaaggctggtttgcttgcaaagctgagggagtataaatctgacctcaacaacgtcaagagtgagctcaagaggatatctgcgcccaatgccaggcaggctacccgggaggagctcctggagtctggaatggctgatactctcgcggtgtctactgatcagaggggaagattgatgatgacaactgaaagactgaatcagtccactgacagaattaaagagagccgaagaactatgttggagacagaagaacttggtgtctcgattcttcaggaccttcaccaacagaggcagtcactactacatgctcatactactttgcacggagttgatgataacattggcaagagcaagaagatcctggctgcaatgtcaaagaggatggataggaacaagtggatcattgggggaatcatcacggctctcgctctggccatccttttcatactctacttcaagctcgctcattaagcttgcctgcagtcagatacgtccaactatgtaaacctaacgcacgttgttctgtcgtgctaactaaactagagaggttagtaaagcagtacttcgtatgaaaagaaa

SEQ ID NO: 39888 - DNA, 2565 bp, Zea Mays
gtcactcactcgggagtcactctcccgtcctgatgccccgtttcaatttttgaactcccgatctggcaatccccacccacgctcccgagcaactttctactcactccggcgtcgcttcgaatcccagcgcggcggcgtgacgcgtgaatgcgtgatcgacgcgcggcgctgctcctccgggaaaccgcatggacgccgccgaccctctctgcgccatcacctcgcctgcgcggctccttccgcggacccttggccccaccccctcgaaggtccgcggtgcgctcctcgaggccatcgcactcgcccggtcgcggggtctgaggagctggttaagcaggctgcaatggtgctgaaggagcacggggacatccagactctctaccatgatgatgcaatgaaagccatgccccccacaaatgtcagcaaagggcaacagggaagaagggcagcactggatcgcaaacgggctcggttcactatgaaggacactggaagcaaagcggtgcctgttgtggatcgatctaagttattgaatatttcggatccagtcgcattcttcatggccttggatcggcttgaagaagctgaggatgagatcaaacggctaaatggagaggcagaaaagcgcatattgatttttgatcctttagacgaacccattagacagcctggtttgcgtgggagaaaatcattccgcagtttcaaagtaactgaggatgctactactcaagatcccattgaggtactggcttcccaaacagcaactatgacaggatctcagttctcacaggatgttatgcatgctgttgctgacaaaaatgaacagtctgttccttcacgatctggtgaagctatttcagatgtttcaggaaaagaagattcattagctgagaaggatggccgtgatgatttggcttatttactgacctcgatccaagatttggatgaatctgaagaggaagcatttatccggaagaccttagggcttaaagaaataaggaagggaagagttagtctctgtaactccattcctggagtcaggtccttaagaagcgatactgaacaaaaaggttcaatgaaggttcgccctccagaaagtcatttgcctcagactcgccaagatcgaatttcagagttggagaaacatttatttcctggaggtgcagcaaatgctaaatgcacagatgatgaatctgaagggtcaccagatattgtgatgggtgaaccatcattagtgcatgattcttccgaggttctgatgaccaatgagaactctactggaagtgaaattgacaggaggaccccaaatctgtgtgccagagcagcagaccacgctcttgatcctgaaccaaacttgcctgatcatgcatacgaaaggcaaaccagaggctcctcacttggtttgtgcaaaaacacagaagttgccaatgaacacgaggaagatgatgtacacatagaatatccaactactggcgggtctacttatcaaacagaagtttcttctcatgatttggagggcagcttgacagaagaattggtcagtgaaccaggtaggcatgcggctccagatgatatctataggacttcacatgcagctgaggatagcattcaacatctagaagtggtcaaacagggtggtgttctacaagacaagtcaagccagtcgttggagatgcctctggaagatattgatccactatatcggcctcagatgcatggtggaagcactaagaaatcgacacctgttctgtgcaatgcactgtccccgatcgaacagaagcaacaagcagctcaagaagggaaaaggaagcaacaggcaaagagggtaaaaaaagtgtctgatgaatctagccatgcactggaaatatcccaagcaaatttcgaaccggagaatgaacctcataatgttgacgtgaacatggagcaaccgacagttatgagtagcgccaaggggcaaaagggagctcaaaggagaaacaagaccaaaaaattgaatcaaagaaaaatccttggagatgttgaccttgcgcggcagtctggagtgagaagaagctcaagaatacgctcgaggcctttggagtattggcttggtgaaagattactatatgggccgatacaggacactttgcctgcagttattggcatcaaagcatactctcctggccaggatggcaagaaaacattgaaagtgaaatctttcgtgtctgaacagtattcagatcttgtcgctcaatttgcgaagtactaaacaagacaccatttttctaagaggatcacgccttgtgacttgttgctttgtcacctgactttatgatgttacatgtgttggtggaaccatagtactgcacaatgaaaaggcacacgtcctaccgaatggttgccagtatctatcttgtttggatgccatttcggctattcgatcggtggagtgtagcgtatgtgcagcggtatcacattagggatcgattcggataggcatggaatccaatagacataacattatttatcatattttaattcgaatttagatacgaatgtagattttatcgttatggatgcaaaatg

SEQ ID NO: 39889 - DNA, 1287 bp, Zea Mays
tcatttttattcatgaggttcacatcctgacttaggttgcagggcagcgatcaagtctccactctccggggatataacggcgatccgaatcgatttactcagctgaggatctctaaccacacgacatatgtagcacttaacccttgcatatgtctaccgttcccacggatcctctactgcatgaacaggtccgcgccacccgagagcgcaccaccccttttaggcggtcctttgccaagagggtacgtgccactctcgccatctctccactcccagtgcgcgattgtcttttcatgtatggaataaccgggttcaagcttaccctgtcccatatccagggcatgtggccagttaagatagtccttgatcatacaggcctacatacgcatccaatccttaattaacctgggtagaacatcacttgttcctagcccaagtcccgatttaagtacttccatccttagaattgtttgtgttccttaggatgaaaagagcacattatagagaactttgcagtaagatcccaccatgctcccaatgaaaatattcttgcaggtagaagccatccttcctcatgataacccctgagctaggcattaatgcaaaagacaacctctatccacaagatctaagcagagctaagcatttttgtaaatcatattttgatacttcaccagaagtatctataaaggtatggatatcaaggtaggcaatgcatccaataatttccaagcaactcctataaacttaatgctcatttcactagacttaaatgtataaaagtctttttaaaaatacaaggaaggggtaaatgcaccggggcttgcctttgttgcagagacggaggtctaaatccctctattaaaccccagttagatggctcccatcacttgatgagcaggcactgaagcagactcctcttcagaaaccacttcttgaattttatcatcttcttctgggaattctaaactttggtgctcacaaggaatcgaccggagaaagcgtgagttgttcggtcaacgcagaggctgttcacggctccggtctgcggtggcacaactccgttctgggtaacaaacttctcgagatactctgaccatggcgaggtggaaggatggttgctgtggcaccagagtaccagacaatggaatggcacttgatgaactgaacaaagccgacgcggaggctaaggagatgaactcaggcttgtacacaccttcacagagatgcccaaggatccaactaaagcttgagacaacagggctccctggacaaacacttaaataa

SEQ ID NO: 39890 - DNA, 2342 bp, Zea Mays
aataacgtaataatggcaaaatagcaaatgcccctatcaccgcctccgacccatggacgtcgagggcgaggtccccgccgccgctgcagcggcgatggcgaacggcctgggcggcgccgatgaggcctctccggcgccggtctcgcccgagcagctcgacgtggaggcgtacgcggcgcagtactcggggcggacccgcctcgcccgaggcgtcttcgtcgcggaccggtgcggggtggaggcgatacagctcgaggcgctgcggatggcgtacgacgagatcaagcgcggggaggacgtgcagctcgaccgcgacgtcgccgccaagatcggcggccgcctcggcccgcgctacggcctcgaccaggcgtgggtcgacaccatcacccgccgcgccgatcagcgcaatgagaagctcgagaacgagctcaacggatacagaactaacttaatcaaagagagcatcagaatgggctacaatgacattggcgatttcttctatgcccatggccaactttcaaaagctacatcaggactcgggactattgcaccacttccaaacatatagttcagatgtgtatgaatgtgattcaggttagcattgagctggggcaatatgcacacatgtttcaaactatgtcagcaaagcagagcaaaccccggactctctggatcctatcattgttgcaaagctgaaagcagctgcaggcttggccaacatggaaacaaagaaatacaaacttgctgcacgcaagagccttaccaccggcctcgtcgatcgcggagtgcgccctagccacatcgccgccaccctcgccctcaacaggtgttgctctctacctacgaggaggaagtggagcagatgggtggtgggtcaggatctcaaggtggcggtagcaacaacgacagggggagcaaatcgatttctgacagaaaaaacagaacgagaaaataacaaggcgttgttgggatggattgatgaggacaattctcacgaacgattgaactgccgctcagctcacctgacagatctgtctgtgcgtaagtgccggtatacaaataccttccaagagtaccacccagtgcaggcaacgttctcggtcaaataaagcgccattaaggaatcacttgcataaattgttgccttcgaggtgccatacttgataaagaatggaactggcaaagcttttggatcgtgtgccaatacctgtgaaagagggcttggaggaacccagtgcaaagatcaatggtctgctgcaagcgtatatttctaggttgaaactagaaggcctttctcttagttctgacatcgtctacattagacaggtagctttgattgctattctcctatcacatggcgctttacttgcttctacagacgctattaactatttctattcagaatgctaacggtctgctattttttcctctctactctacatgtaattcagttctcgggtgttcttgcttggcccttcttagcactattgtctactacactccaaaatgtgcttttaaccagggctgttgtctattgtacctcagttggggatttgccagtagaccaggaatgctgatttaacatttttagtgtttcatgcaaagatggtataggatatatgcaattaattgcaacgatatacggttgctatttccgtatacagttattgtgtccctctctttggatatcgaagaaggtctaccttggagcactttcatggagtttgatggccactattgcggatgataaatatagcgcaacaatctattattattggatctcttgtagttgtcgtatctgatgttgtaagccagaaaatattttcttagaattatcgaattcttcaccgtctttggatagggcgtccgaaggggcgccgcctgatctagtatgatgtaagataagatattttttaagtatttcttgcatgactctgctggtagctggagttgtttacttttaagtgaatttggttataggtataatgatgttttcctacacttgtagtcagtggcgggcttggacctaaatcgatcagaggcccatcattaaagaacaagtcatagctcctcaagaagtcaagatgtggcggtctatggtgccctttgtgcacttgcttcttttgaccgttcagacctgaagaacaaagtcatcgacaatatcaacttccgtaactttctagagctggtgcctgaagtaagggagctggttaatgattttaatgcaagtcgctatggatcttgcttgggtcatctggagaagctaaagcctaacctgctcctggatatccatttgcacgagcatgtagagagtctgtatatggatattcgccacaaagcga

SEQ ID NO: 39891 - DNA, 2186 bp, Zea Mays
gttctcagtatgccccggccccgtcactagaagtcaacggccgttcagttccttccccgctccgtccttcggcatgcttctactcagcccctcgccgcccttctactcagcccctcgccgccgtctaccgccgcagcggtaacggtcccccgccgtgtcctccttactccctacaaccgcctcaaggctacgcccaccccaccgcgcctcgcctgcctccgccttcggcccgccaccccgctccgcggcatttcgtcgaggaccgcgtgccgcgcggccgctgccgatgccgatgccgatgcagtgccctcccaagctcctggaggcgatggtggcgtgcgtggcgcaatggtgcgcattggggaggctctatcgcttgggttcccggtgtgggtggcatcagcctgcgccctcgcgctgtggcggccgccggccttcctctgggtcgggcccaccgcgcagatgcttggcctctccttcacaatgcttggtcggggccttcctttccttagttccgttccccccgctagtacttgtttctacccatcttagtgctgtctcagtgtctcgtgccacttcttccaagttgactcaaactctacttcccctgtgggcttattagctctgttgatgtcctctacatgatattaaaacagctgctggcaatgagatcactgagtaaaggaaattatatctcaaaatgaaaaaatgacagacaagtgattaggagaaaagaagacaaagatttttaaaaagaaccgtacaatttcagtactctagcacaatccttcatcttttgcatattctcactttgatacgagttgttggctttctagtttctataaaatgttctctttactgtgccattatggtggaggcaacaggattaaattctcgagcactcttcagttcatggatacgatcaacacaatcttgcactcacgtctgttccactgtacatgtgcaaactgaggggtgtttactttcttgtgtgtggacatattattcacccctgttttcatttgggggtcattgcatttatagatgtgtaattgatatatgatttatacctacaggaatgggaatgacgttgactttggatgacctcaaaaccacattattgatgcccaaggagttggctgctggatttatactgcaatacacggtgatgccactgtctggattttttgtgagcaaactgttgaaattgccgtcccattatgccgctggactaattttagtggcctgttgccctggaggcacagcgagcaacatcgtgacctatttagcaagggcaaatgttgctctttcagttctgatgacagcagcaagcacttttgctgcagcgttcatgacccctctcctgacgtccaaactcgctgggcagtatgtcgcagtagatccaatgggactgttcgtgtccacatctcaggtcgtcctggcacctgtccttctgggtgctctgcttaatcagtactgcaatggtctggtccaactggtgtccccgttgatgcccttcattgcggtagcagcagtagccgtcctctgtggcaatgctattgcgcagaatgcttcggcagtcctggcatctggctcgcaggtggtcttgtctgtcggttgcttgcatgcatctggctttttcttcggctacgttctctcaagagtacttggcatcgatacctcctccgcgagaacaatctctattgaggttggtatgcagaactcagtgttgggccttgtccttgcaaacaagcacttgggcaaccctctcacggctgttccgtgtgctgtttcgagcatctgccactcggtctacggtagcattttggctgggatctggaggtctatgccaaacaaggacaagggagaatgatgcgatgatcaattcaaccatcagaattctttgttctccaacgatgaaagattttacccgtgagaataaacaccgcagagtggtgagcgctatataaaagcactgggcttgcactgttgttagtggttcatttgctttcttagattcggatagtacagttggtggatccatgattgatgtggatacatataccatgttgccatggcagcctgtttatcacacattcacttcaactagaacattgcggcgccctcacgggcgccctaccaagactcactcttttatgcaagaaacaacgaccaataaaacaaag

SEQ ID NO: 39892 - DNA, 2584 bp, Zea Mays
ccccgcgcgcgtcttcctccggcatgcgccagcccccccgagctcgcccgcgcaccaatctcgccgtcgggtatcccgcccgcgagcccgcgcaccaagctccttccccgcgacaagctccctcccccgcgacgcgtcttcctcctcgccctagatcgccgccccagctctctcctcaccccgcaatccccgccgcccatgctccgctctctactcgccccagatcgtcgcccctgttcgcgtggattgggtaccggtcccaactatctccatggattgcgcgtccgcgacaacccaatctcctcccggtctccatggaaggcgcgtcctccccccgtgattctcgattccccgcgtccgcgccccagatccactctcctctctcccacaatccccacggactctgccccgtatcaccaccccggctccttagaacgtgatccactctcctctctcctgcaatccccgctacctcaacccagatcgccgccctcgctctcgatcctcgcccacgctctccatggaaggcgaggccgcgatgctcgcgtggatctatgtagaggctgcgacgctctcccaggaagactactgccagtgctccgtgctccatgcgccgcgctggaacgccaccgtgcggtccatgtcctcgtagtatcgcccagactcgcccatgtagtcccacctgcatccaccgaccaccaagcacactctcactgcagaccagagaggattgccacgaataggtgtgtgcagttctactctacccctgcatcgagccggtgtgcgtccaccagaggccggagttgaaggagagcacgtcggcgtcgcgccatgactcggcgttctcgtagatgtcgtccagcatcagcacctgcttcccctggaccacgtcgatgtccaccaggaacttgtacgtgtacaaagggtccacggagacgagctgcgtcggcgactgcagcgcggcggcgtgcagcaggcagacgagcgactcccactggttgcgccccagcgagtcgcccacgaacatcaccgtcttccccttcatccgtgtcaggaagaccgtggcacaacgcctgatgtcacgttgtcccagcggcgccgcggccggcgtcacgccacgcggatggtcacccacgccacgtccctagaccggtgtggtacgccggcgcccacagcgtcgatgaggaggaggtcggagcagcagtagctgtcatgggcagtgccgcagatgtggagcagtcgaatgagaggctagacgggctggagcaccacagcaggctggtgtcgctgttggccggtagccgctcctcccccaccggcaccgagagggacttgtgacccaaggatctgttcccgggggatgtggtgtttgcgctcgtcgatgatctcaggctcaaccactccaaggacccataggccatggggttatgcaatccaaaggtctccatcgccaatttcattttgtagacaaataagttagctcttctgatggcataccatttatagattgccaacgatctgaaggcatatatgaaggcttgttatctcttctgtgtttaattgatcagtgactttgatttggacctggttatcagcttgttatttctatctgaattttctcgctttatttgtactacactcgtgctaattatgtgagaatgatttgtgtcactatggtgttcatctgttattttatactattatatgtattcatctgtcatgttgttgaactcctgttatcaattgcagaaggaaattcctgcttgagccaattacagaaggccctgatatttgtcaaattgatggttgtagtgttaaattggaatacaagaggaggcaagtcaaatatggtaccaaacggcgcagcagcagttgatgtgcaacccgagtgtactgccgctcgaggaggccagtaagtgccaacaacatgaatagccaaagcagggaaatagggctggcgggggcacatgggtaacttggtcctggagcattggagaaggagcataccacaaggaaaccaacacgattactgggttaacgaacaactcatactttgatggagcacatgaggttcgacattatgtcaggaagcattcgaatcttggtcgtattgtgcttgaagttgctaaggactcgcaaatcccccgccaagcaaactgctagaaatcttttcagaggtggagatgatgaagatgatagtgctgatgccgacacaaatgatcctgttgtaccttggtcattaggtagagtaggagttgggcatatggtgtacatctccggtttgacttgtgccttgagttcaacaaatatgaaagtgctgagagaggtggcatctagaggacgtcatgtcgaacgtgtgaagaatttttttagaaatatgtatatttgtgcgaaactttttagaaacttgactccattttattttctatgttactctcggctttgtttcctatcctttccaatgacttgctatgcatttgcactgtatttggcatgtttaaaactgctacacaaaacttgctatatattttgtccaaaaatactatatccttgttatgattgattgatctttattttgtctgct

SEQ ID NO: 39893 - DNA, 3132 bp, Zea Mays
ggcagaggcaggcttgcccgggtggcggtggcggctgaaagcctgcaaccaaacaggccccctcgattagcgaaaaaaagcccagcgaaaactaaaaccctcgcatctttcctttcctccccaactgcggccgcctccacccgctccaccgccgatggccgagcctgagcctctgccgcaggtgtcgtctgaacctaccactccgccgcaggaaggcagcggaaggactaagacaaagaacaagaagaatcgttccaagaagcaaccgaagcgagccggcgctgacaccgacgggttatcctcaggcgccagcaccatggttgaggaccctttcttcgtcctcgccggcggaaaggaaggagggtttctggatttggaggagatcgatgaggcagacttcggcatcttcggaggcgtcttggatgacgtaggacagagcgtcgaggaagctgggaaggatcatgggaagaagaagaagaaaacaaagaagcggaagcgtgggggtgatggcgagggcttcagtggcgacgctgcgttggtagttgagaatgaccaggtggatgtcgagaaagtggagaaaaaggtcgaggatggggagaaaggggataagaaggggaagagaaagatgaacatgaagaagaggaaggtgaaggataatgagatgaacagggagagtgatgaggatgttgctagtgacaaagcagaagacatgcaagatgacactgagaatatggaacaaaatgaggacgatgagctgattttgggcgaagatgatgtctctgcatggagggagcttaggctgcaccctctgcttctcaaggcgatgcgcagacttggattcaaagagccaacacctatacaaaagtcttgctttcctgctgcagctcatcgaggcaaggatgttatcggtgctgcagagacaggttccggaaagacacttgcttttggcctcccagttttgcaacgtctccttgaagagcgagaaaaggccacaagattgcagcaggaagatgaaaaaatggaggaacgttcttgtggaagccctcttcgtgctcttattctgacacccactagggagctcgccaaacaggtatgcgatcatctaaaagatgtggccaagttcttaggaatccatgttgttccaattgttggtggtctatcaatggaaaaacaagagagacttttgaaaaaaaagcctgaaattgttgttggaactcctggaagattgtgggaacacatgtcgatgaacaatcaacacctagttgagaatgatcgaacgaggccatttccgtgaattacaatctatcattgagatgcttccactgaccaatggttctgatgaacaagctgcaagaacaatgccaaactgtgagactgtaccaattttgcaaataaagaagcggcaaacctttgtgttctcagccacacttgcactctcatctaattttcggaagaagttgaagcgtggcctatctacttcgaaggcatcgacgcctgatgatgtcagctctattgaagcattgtcaaaacaagctggaatgaaatctaatgctgaaatagttgatttgacaaaggcttcaatcttgcctgagaagcttgaagaatcttttattgagtgcagtgaagaggataaggatgcctatctgtattatatattgagtgttcatggtcaaggtcgcacaataatattttgtacatcaatcgccgcattacgtcacatttcttccatactgcgcattcttggaattaatgtattgacaaaccatgctcaaatgcaacaaagagctcgcatgaaggctgtggatcgcttccgtgaaagtgaaaattccattttggtcgcaactgatggttttgcaaggggtatggattttgatgatgtgcgaacagttatccattatcagttgccacattcaactgatgtctatatccacagaagtggaaggacagcacgcaagtcattggctggctgcagcattgcgttaatctctcctactgacaagtccaggttttattctctttgcaaatctttgtcaaaggagaatctccagcagtttcctgtagatcatacttacatgtctggagtgatgaacagactctcacttgctcggcagattgacaagattgcccgtaaaacttcacaggaaaatgctaacaaatcctggcttcaaaggaatgctgaatctatgggattgattttggatactagtgacagtgaagaagaccatgtgcagggacacaagaaacgaaaggctacttctgcacatctccaaaagcttcaacaggagttgagtgatctcttgcaatgcccattgcagcctaagactttctctcgccgctatttggctggggctggtgtctcacccttacttcagaagcaactagaagagttggccaagagaaatgcaagcaacaatagcagcaagagtaagaataaaggatctgggtttgttgttattggtcaggatcgtgtcgagcccttgcaagcacttcaaaattctgggcaagaggtctgtgtgaacatagacaaagaaagggaaaagcgaagagtcgctgagaactggaggcggaagaagcatgaagaaaagaaacgtacacaagagcagaagcgaaaggataagagaaaagctaaagagatggcttgatgacacatgagatagctaggggccttcaaggggtttacggaagctctttaagctcgcgtcaatcctttcagaaaggaaaggaatgcattcatcaatgttttgctgtaatacaatgcgtgcgctaagttagcgcttgcctttaacagattggaggtggtagtttgattttgttttgcggctgaagaaaataaacttagaatgcacgagcactggctctggatgagaaaagaaattaagcagatagctcacgtataacctcattggatctgtaatatgtacgcctatcagatttaaggtacaaattaattttattagggatgggaatcgactgacctggcctatctttggacttggacctggcccattgccttaaggccaattttaggagtgatggagattatgatcttgctggctatcatgggtttggcctagatatttttctgctataatgcatggacatgaatcctatcaatatttctataaagtattg

SEQ ID NO: 39894 - DNA, 4188 bp, Zea Mays
ccaggccattccgcaccgccaaaattgctccgcgcgggaattccaatttcctccccacctccgcccgcttcccagttcccagtgcacagccgattcgtctccattcctatcttctcccattccctccccagtccgacctccgaccccccatttcgtcgccgccgccgtactcgccgagaacccgccccaaatccataggcccatcccttacccattaacccccaatgcctccgaagaagcgcgccgccgccgccgcctcttcaaagaagccgcagccatcgcagccatcgcagcccgccaagttcggtatcctccacttcttcgagcgccagacccaggcctcccagaacgccaagcgccagaagcccgacccccctgcgcctccccctcctcctccgccgccgcccgagaaggagccctcggaggtctcgccggaggttaccaagacgctggcgccgaagcgtgtcagattttctcccggaatgttgattaagcagagccaggacgatggggtcgcggaggtggtgacttggaagatctcgccggtgaaccatcgccttggtacgacgaagtcgaagcaatttctggggatggcgccccatccgtactcaagcgagaaaaattcctcccttgatgctatgaagaagtggcattcatctccattgggcttgtcaaggtgtactactttgggaagtaattcaggagttcttggatctgctatagttggttgtgatggtgtgggggatactcagagtccatttcggaccccaccatcgctttcctatggctgcaacgagcaagtgagcagtggtgtaacttctgagggaggtgccgaaccatcgggagcagggcagcacaaaaaggcattacttgatcttctagaccaagtagaggatgcaatcatggaagaagaattgcctgctgatcctggaaataaaggagggcaaaccacgaatgaggatatcaccaacaatagccgttctcctgttgctgatactgacttaactatcccatccaagaaaactattcatgtcccacccttcaatagttttcttgtcttggaggtgtccgaaaaacataaagctgatgattcatcatgtgatcgctaccctgttaaggttctgcgtctgctgaatgaacactctggtacagaatgtgccgtgcatctgtgtgatgagtggttcgacagtattgttgggcctggtgatactgtaaatgtcattggagaatttagtaaccatggaaaatgtattgttgaccatgacaataatcttgttattgtccatccagagcaactcatttccgggacacgggctgcttctagcttccaatgtttaagaaggtctgttctcgatgagaggctaaaaagcaatgaatattctaccagcgcgttgactggtactctgcttcaccaagtctttcaggctggattactcaatgatgctccttcatggcagtttttggaacaacaggcaaaggaagtacttctgaaaaatattgaaactttatatgcatgtggagtcaatgaaagcaacatgtactctacgctcattgaagctatccccaaaatgttgaattggttcaagtgtttcttaaagggttcaaaatgttctgatgttgattttggacataacgaagtgagaaagactgttggagtgactgaggtcatggatattgaggaaatggcatgggcaccaagatatggtatgaaaggggttatcgatgcttctgttagatcaagagttgagtcacacaatggtggttcatatgatagaataatgccactagagttcaaaactggcaaagcaactagtggccaggcagctatggaacactcagctcaggtgatgttatacacactgttgatgacagagagatacttgaatgaggatattgacttgggccttctgtattatcttcacacagaccagacattgggcattaaagtaaagaggactgatttaattgggctaataatgcgccgaaacgagcttgctactgagatcctgaaggcatcgatgtcacagagttttcctccaatgttacaggcacacggaggcagtggtacaactagtgggcttggtgatctatttgacaaccttgtgaatcacttaacagtcacacatcataattttcttaaacattgggatagattgattgatcttgaagctagagcttctcaggtaaaaaagaacatcttgcagcctcataattcaaactatgggagtgggagttctgctgtaccttattttgttcttgacataaaaaatggacattcaatagattcttcaggaaaaagcaaaagatacatatataattttgttcagcaaaagatgcagcctgaaacagctgatcagttagatgctcaatttgacagcatagatttcagcctgaaagttggtgattttgtggtgcttagcactcagtctgggagaatagcagttgcaaatggatgtataagagaaataataagtcactctcacataacggtctctttgccacgccgtttgagaattccagatagcaattccttgtcagagcaagaggatctgacacgtgaaatttggcggatagacaaggatgaatttagttcttcatttggaataatgagactcaacattgtccaactatttgctcagaatccacaaaactctcacctgcgcaagttgattgttgatcttgaggcacccaggtttgatagcggaggtctgtttagccaagatcctgcactatcatacataaggtcactaccaaacttgaataatgaccaacaaaggtcactgcataaaattctaggagcaaaggattatgctcttattttaggaatgcctggaacaggcaaaacatacacaatggtgcatgctgtgaagtcattattgataagaggggaatctattttgctaacttcatatactaactcggctattgataccctgctcatgaagttgaagactgagggtgtagattttattcggattggaaggcctgaggctgtacatcctgatgtcagggcccactgcttgtcaacaactgaggcacaatcggttgatgccattaaagcaaggatggagcaagtacaggttgttggagttacttgcttgggaatgtatcatcctttattagcacataagaagtttgacacatgtatcatggatgaagctggacaaattacattgccggtttcactgggacctttgatgcttgcaacaaagtttgttctagtaggagaccattatcaacttcctccactggttcagagctctgaagcgcgagaaaatgggatgggcatcagcttattttggagattgtcagaagcacattcccaggcaatttcagcactgcgatgccagtaccgtatgtcatctggtatcatggagctctcaaattcgttgatttacggtaataggttgtgctgtggttcattggaaattgcaaatgccaaactcaagttttctggtagagaaccaatgcagttgaagttaaaagagatcttgaatcccgatagggctgtgatctttgccaacacagatcaaatacctgcacttgaggcaaaggaacacagaactgtgaacaatcctacagaagcacacattatttcatggatcatcaaagaattactaagaaggggtgtagctcaagatgctattggtatcataaccccatataacgctcaagtgaatatcattcagcaatacactgattgtttggttgaggttcatacgatcgataaataccagggtagagataaggagtgtataatagtatctttcgtgcgctccactgcaaactcaagggctagtggttcttctctgcttggtgattggcacaggatcaatgttctgttgacacgtgcaaagaagaagctcatcatggtgggatcacgtggaacgctttcaacaatacctttgctcaggcttcttgtcgacaaagtagctgagattggtggcctgttggatttgacaaataaggatgcacattctttttcgagaacttgaagttcttgtttgaatgcacaataggatgcacggtagatgaatctggaaggtttttataaggccaagctgtaaataagaatatgctgtaaattttgtttttggaaatgtatagtaaacctagccaagagccacacagctagaggttaggttttgtatattccttccgttagttataacttatttcaatttcatt

SEQ ID NO: 39895 - DNA, 937 bp, Zea Mays
ccctgttctgcctacttgttacgaactagtgaaccactcctcgctcctgatcgttcaccgtagcgccctaattcggatttccccaaatcagttctccgcactgccgtgaacacctcctctgtcgacccaccgctctgtccctccaccagccttcctagctaccattcttgagtcctgaaaacgaagaagaagctatagtcgaagaagaagttgtcccgcaagctgagaatcattcggttgagaacaacttctattttgacatttgtgggacagatccagaacctcctgcaacacaagataagccccgatgcatttacccctttccttgttgttttaaactctttatcacttgagatgatgcattaggtgataggagttgtgtgctaaacaattgctgcatttccttggaactgattaccattccttgatacctgttttacttaaagttttctgatgcttagctttgctttagaaaacaaaatgttttgttttaaacaaaagatgatgcttcatatgggatgggaagttttcaaagaaaagacttgatggtgaatccatcttggtcatgatgggttcaacatctaaaaatatgtacctatgtctggtaccaaacttttggttgtaaatgataaagatgagaccgggcaggtgacttgcacgagaaggaagtctcggtgtagtgtctccgtttgagtcgcttaaagaccgagccgatgtgggcctgctgaccgatgaccctttaactggccacatgcctcgtcatgggcaagctttgcctcggtcggaccaataccataaaggccaccacgcaatgggagtggagagatggcgagagtagcatgtaccctccgtggcaagaggctggacgctggtgtatctgtgctctccgttggcgtgaacccgttctggtcttgagaaacccggtggcgagttgaca

SEQ ID NO: 39896 - DNA, 236 bp, Zea Mays
agagcctcggtccgcgtggttaggcagatttgtggcggtgctgcagttccggtgagaaattcgctggatgctggttactctcccggcttcaatcctgcccggccacgaacttcgtatcgaggcgaatctcacaagccactcactgacgatggagtgccgcccgagacacaggtcgacgacggcggatcttcctcactcgctcccggctacggccgctcctaactccggtgtttatg

SEQ ID NO: 39897 - DNA, 376 bp, Zea Mays
acaaacgacggctgcactggcctgttgatacgaacacatagcacatttttccgcctccacagcggattcaagaacatccagcgtagaaaccacatggttacctactgatgctatggcgcagagatcaccagctaccacacaggcggcagcagaagcactcacggtgtcatgggctgcatcaacggccacggagaacttctgggcacagagctcagcggcagttccatgccgcaatccatggctgcaaaccctagggttacagagctagcacgtggaagaagatatgagatctcaccagcggcggaggcgcgggaaccgccctcggtgcaggatccgccctcggcgcaagatcaccagtgaagggaaaggaaggccg

SEQ ID NO: 39898 - DNA, 426 bp, Zea Mays
ggtaatcaattttttaaggaaggaaatgcatcaattgtttagcacacatctcctatcacctaatgcatcaaacaaggtgataaaagattttaaaacagcaagtaagtggcaaatgcaccggggcttgcctggaagaacagtaggttagtgttgttagacgatgtccgcttgacgaccatcctttgttccgatacttgctccgtttatccatcttcaggttaatccatcaacattatcttgcggagaagctcacgcttaacatcatcttgtggtcgactcagctgtggttctccacatcacgtggttaattcacgtacctaaatgatttgcataatgcacatgaatgcatatcaagacgaatatcgcaagataatattacgattttacacagtaaagaattaaacacttaaggagaaggcatcacga

SEQ ID NO: 39899 - DNA, 3862 bp, Zea Mays
gagacccattcagcccaccggctacacggcccatattccgtactcgtgaacctcgtgctgacgtgctcacacagtcactccgtttagctcaaatccttatcggcgactcggcgtcggagctcacgaccacgaccgcttccacgccctcgaccccgaacccccaatcccggacgcgaccgctgaaccctagcatactccggccatctgctgccggccccggcgatcccccgccatggcctcccccgagggcacaacgtgggtcttcgactgtccccttatggacgacctcgcggtcgccgccgacttcgcggcagcccccgcgggaggatttttctgggcagcgccgccgtcgctgcagccgcaggcgccagtgcagtctgtcgttgccgcgtcggctcccaacccatggtaattgccggattacggtctcgatttgggctcggccgtggcggtggttggttggacttcgtggggttgggttgcatttggtcggggttcgttgccagcatatctgtagattctgtacgtatagtagttcgttatatggatcaatgacttgattggaattcggtgaagcggctgaactgtgggatttggaccgtgtccttggaatcgtgtttgcccaacattaatagtagaactgattatggttctttatgtttccaatttactataccagcgtcgtcctgtggaaggtgtgggctgtggactctgttggttctgccagtggagttgtgtgagaggactgaggaaatggttcacaggatgggtcagtggacctttactataagttctaagtagtatggcgtgaaaggactgttcccatcttatggtgtgcaagctggtaggtaggtgcatataggtagtctcatcaagcctagatgctttcctttgggcacacctttgtgtcatctatactcttgtcacaaaaacatattgtttattaaaacatttaataaagcattagaaactacaaacatcaataaccatcacattatttatttggaaatatgtaagttatatatgtgtagatttgtattcaaaatctgttaaacttgaaggattttaagaatttattctgtgtggccctgtggaatgtgtggatgagtcggtgtacctttactgtaataattctcggtagaacggtggaaaggattgttcacatcttatggtgctccgctggtgggtaggcaactaggcatatataaggcctgtttagtttagcttttttctgactattttttctaagaatctggatgtggagaaaatctgactgtgggaagaatctgaatatcgtggggattacacgcggaggaagatgaagtggtccaaagggtcaatgatctagaaagcgatgtatttctaatatcgtgacgactcgaccgattatgcgttcatgttgattttggacggtttttaccaaaacaattcttatagaagcggactgaaaagctggggcgtttggcagtccgcaacagattttggtggccggaagttgaaaaaagcccaaacaaacagggccacaggtagtgttatggctcctcatctagcctagattgcttttgtgcacactttgtgtcatctatactccctccagtcaccattgaaaatatttagctaaaccttggaaactacaataataactgtttagggttacattatttatttgggaacttaaagttttatgtgtagatttgtatcaaaatacttgcaaaatctcgtaaattcgaagaatttaatctatagaaaaaggtggtcaaatatacgtattgaagactactccaagtcaaaggtggtcaaatattcttgactgaagatagtagtttgcagaatctgttagaaacatacaatcctcattctgcaatcaacttgtggctgctctattgttgggcctttataaggctagttactacccttgttcacagagaagaatagataaattccttttgggtcagtatattctttatgtattgatctcttggttcatccaatagtctgcagaaacaggttgcacacaagttgttgtaattgaatccttcatgattggtgtggtgtgaagaggattaccatattgtgctggggttctgacagctccattgctctttagtacatacaagctcatctttgatgttaagttggagaagttttgaggtgtttggttggctgctttaaacagttgtattgtgtgctgtctgtggtaaattcttcttctatttttccacatatatttcgttagatgtagtttgtagggttatgacttgctatttgctaagttgaaaagcaccaagtagtgattttttatatttactaattattgtcttcgatttgcttgcatagatattttgtttaccatgctatgttatttgtctttttttgcttcttattatggcgcattatcttgatatttggcatcctaagggcgtacccagtgctgtaggcttcccgcactgtgcggggtctggggaagagtatctttaaatatttggcatcctaacattggcttttattttagcagtatggaaatcagtagctctgtggactgtggtcaggaaaaagaacagccaacaaataaacgtccaaggtcagaaagtactacagaatcaagcacaaaagcatccagggagaaaattagaagggacaagctgaacgagagattcttggaattgggtgccattttggagccagggaaaactcctaaaatggacaaaacagctatattgagtgatgctattcgtgtagtaggtgaattgcgtagtgaagcaaaaaagctcaaggattcaaatgagaatctccaagagaagattaaagagctgaaggtctatactatttcatgtggccaagttataaatggtgctgttcagatgggaggtggcacgtgatgtgttgtttaggcacttcatactgttccattttcttgatttatgatcccctttttccatttggtcatttttttttcttatctagatttaattcatccagtcaaataacatgggaataattattagtacacctgtcattctccctccagtttgtggtttagtttattttgggttgcttgcattagcaactttatatccacataatgcgtttttttttcttaaatggttaaaccctgcagctgtataacagtatggacatttgtcaattcttttctctactgtatacacttctttgctacgtgttccataaaatatatagaggtttatgattcagcatctcatgtgctgcaaaaggctttggccttcgattttgctggttgttcatcagaaaaacaatctcaccctgaaatactttccttttgcaggccgagaagaatgagctgcgagacgagaagcaaaggctgaaggccgagaaggagagcctggagcagcagatcaagttcctgaatgcccggccaagcctcgtaccacaccacccagtgatcccagcctctgcgttccctgctccccaggggccagcagccgccgccaggcacaagctgatgatgcctgtgattggctaccctggattcccgatgtggcagttcatgccgccttcagatgttgacacctctgatgaccctaggtcttgtcctcctgtggcgtagaagccgtgcgaaatcctgttggaaagaggcgatgctgccttccattgattcaaatcttgatcggtccgcagtgttgttggtgtagttgattccagaactgaaggggatgttacatgtgtcggacggtgacatggggtgatctgatgacccctttgtatattatatatggtatggtataaataaattccgcgaccagaagctaatgtggatcggtggattagcttatgtctattcttgcctgtttggttatgttcctcctcgcatgtgaaaactgac

SEQ ID NO: 39900 - DNA, 370 bp, Zea Mays
gggaactccgcgagctgcgggggcgcaacactgggagcttggggaagatcacggcgcgctgggacgagcaggaccgagccagagagctcagcctccatgggagggagcaacacgagctggggcagagggtgctcggcgagggacgctggggaggagcggctgggcgcgccatgggagccgccatgggcgcgaacctcccaggtggccgacgagcagggagagagagagggtcagcatggggattgaagaagagagagacgagctggagatgccatggcggggagctcgggaggaatcgccggcgagcagagaagtgcgcaagggcgagctcggccatgggcgctgcgagcggaggggaggcaagttgtgg

SEQ ID NO: 39901 - DNA, 354 bp, Zea Mays
aacaattaatttattacaaccacacatatatgcaataggtgccatgctttcccaggatgtgactcgatactgtgctgggcggaatgtgacaggctagggtacagcaaccctaagccacgctgcctttatcccaagcctaaccatgatggcgatgaatgttgttgttaggctaaaaaaaacctgggtgtgtgtgtgtgtgtgcccctttgttgaaacggtgtatcagtttcatgcaaggtggtgtgtgtgtgtctcaccgccaactatggatgttggtcaactatgaataagaacaataatttgtgatgcttatatatgtttactaaattatttattacgggtgcaaaaccccca

SEQ ID NO: 39902 - DNA, 3018 bp, Zea Mays
cgcacgctgccgtcgaccgctagttgaccttcccttccctcagaaccctaacgagcggtgagccgcctctctcgagcgcctaccactctgccccctgcgccgcctgcggcctgcccccaactcccgcaccatcgcgaagtcctcgacgtctaggtcgccattccagtaccttctagaatatcaggatcgccagcgccgccgcatcgggcggccctgtggcccatggacaagctccgcgtccaccgctgcaccggcgacgcggtcgagtggtccccctctcccatcgtcgcgctcgccgcctctccctgcgcctcccaggtcgccgccgcgcgtgaagacggctcgctcgagctctggctcgtctccccgggctccgtcggctggcacaaccagctcactatacaaggcaacgccgcgtcgagggtcacatcactggtgtgggggcggagaggtggagtgaccggccggctgctctcgtccagcattgatgggtcggtgtccgaatgggatctctttcacctgcagcaaaagatactgttggagttccaatctggcaaatggccatcgaacctttggatgatgctaaaaatactgaaaataatagctcagagtttgctgtcaatggtcatacaaaccaaaatgactccagcgattctgactttagtaacattgatgatggtgacaactctgaggatgaagatggttctaccaacacaagatcttcatatcatgggaatgatttccagcgaatggctcttgcatgtgatgatggttctgtacgattgtttaacgtgcctgattcaggtgcattgacttactatagatttcttcccagagtgagcgggcggtctctcagcgtgacatggagtagtaacgccaaatttgtattttctggcagcagtgatggtttaatcagatgctgggattcaacatctttccatgaaatgtatcgtattactgctggattaggaggggctggtacctcacctgaactttgcatctggacactattgtttctgaggtgtggaactattgttagtggagatagtaccgggagtgtacagttttgggatagccgccatggaacacttctgcaagctcactcctatcataaaggcgacgtgaatgcactaacaactgtgcctggtgagaacagggtattttccgcagggtccgatggccaggtaattttatacaaaatatcaaaagatgaatttggtgctactaaaaatgtggtcaaagagcaagttcacaaatgggtctatgtgggatatgtgagagctcacactcatgatgtaagggcactgaccatggctgtacctatctgtagagaagatacatcacctgaggaaaaggtggtgaagattcgccggcgtgaaaaacatgaatttagttaccacaaatgggctcatcttggtgttccaatgcttatatctggtggtgatgacaccaagctgtttgcatattcagcaagagagtttactcagtttgcacctcataatttctgccctgcacctcaacgccctttgataaagatggctagggatagcacagtcaatggagattctgtaatgcttgtccagtctccaaactggttggatattttacttgtgacagttcagaacaaattgacgactccaagtacatcatcatctagaggagatgctacagtccgacaacttgctcgtttgaaaagcaaggggtccagaaaaatcatttctagtgctgcctctgccaatggaacacttttggcctattcagatggtgtgagaccctgcctctttgcactaaggcataagggtggaaagaagtatacccttgacaaattagagctaccaaaaggattgccctgttctcagagtatggcgtttacggttgattcgtccaatttgatacttgcgggacgtaatggaaaaatatacatcattgacattgcaacaagagaaatttcaaatgtatttcaccctacaagaaaggcagatggagcaaaaatctcaagagaatcacctataacgaagatgttcctaagtgcagatgggcaatggctggctgcagttaactgctatggcgatatttatgtatttaatcttgaggtgcaaaggcaacactggttcatatcccgaatgaacggtggttctgttacatctggtggattttgccccaaaaacaacacacttgtgataactacatctaaaaatgaggtgtatgtatttgatgtggaagcaaaacaattaggcgaatggtccaagcgatatacacaccagttgcccagaagtttccaggaattccctggagaggtcattggcttatcatttcctccgcaaagctcatcgtcagttgttgtatacagtaccagggctatgtgcaacatcgatttcggattgccagttgttgaggatgttggcttgccaaatggatcaggtgcaccagcagagaaggcagacgcaaaaaagagtaaaaaaacaaggcagaagcgtaaggcccgtgatgaagagtctacagaggagaaaaggaacaacttcaacttctttgcgtttaaagaaccagtgctctttgttgggcatctacaggacagttcaattttaatggtagagaagcgatggatggatgttgttgaaggtttcagcgcaccagttgacagacatatatatggcacatgattcttgctaacatcggcctttggcgctcgtgacaagcaaaccattgtttttgtttttttttctcaagtaatgcaaaacatccgtcctcaagcatgtcaacggttgaaaggggctacaagatattgcagcacaaagtgaaagctgcacgtagactttagagtcggggattgtggcaatggtgtattttcttttgttctctagtaatgtagtggactccctgcgccagtttgtcataccttgtcgctgcgcaaaattttgtcacatgtaaacactgtatcatcacttctgttattgttgagctgatatcttctgtttgcctcaggaaaaaaataatagtaggaaaaaaacagtaaaacta

SEQ ID NO: 39903 - DNA, 2214 bp, Zea Mays
cccgcccccgccaccgccattatcagcagcttcgacttctccggccgctccgtccttttggcatttcctcccgtcttctctcgctgcttttcattacctcctcccgcgccgcccgtagtaccgattcgcactcggatggcgtcggcggcgttcaagtccaccacgcgccgcgccctccacgccaccaccacctcccgctccgacccgcccccgtgcccgcgccgcacccgctcgcgctccgtcagcgcggcgccccgcgccgcccacgaggactacgccaacacgcgcaccaacccgctcttcgactccgcggcctccccgtccgcctcgccatctccgccccccggggcggctgctgctactggtgctacctccggccgtggggatgcggcgggccgggagagggggcgtgagccgcggctcaagagcggggggcgcggcggcggtggagggagggcgcggtcggcctccgtcgcgccgccgcagcggcgccacaccgcctcggtggcggactctgctgccgatgtcggcgggaggaaggcttcgcgggcgcggtcggtggccgacgtcgcacgcacctaccggggctccgagaccgatgcagaagccaggggtgtggcaaggaaactgcagtcatggaggagccagcattcagttccagaggggaagcgtaagggaactgatgcaagttgttcatcccaggggtcaacaaccggagcggggtgccggcaaatggatgaaactacacagtcagaatctagcactgttgtttcttcacctggccatctcgagcatgaccactcaactgtcccagtggatccagttctggaaattcctcctgaattcgatccagattctgctgagtttatctctgacattagtgattatgtaacagaatatggaaagaaaaatgttgtggaaatttctcttgagtccaggaacagtgcagcaaaacagcactgggagcaaatggaaatttctcttgagtttgatacagatgcttctgagctggtttcagacacatggcaccatggagcaaaccagcaacggggggaattggaagcttctcttgagtttgatcctgacacctctgagctcgctcctgacataacagaatatacattaaaactaaaacagtcacatgaacgtgctcgaaagcttagggcagatttggcagttgaagagcagcgggaacaagaactgagcagaatgctgaagggcatagtaacagatccaaactttactgagacacataaaaaacggccaagaagaaagagtagcatagaaagactgaaagtgtcaaggcgtttagctgaagaggcaatgaactattttgaggaatgcgtttcaatttcaacaatggatagcactgatttctcatcacctgaggatcctcaaccaaattcagttgtgaatgtcccaccaaagagcaatagtagatttttccacaaagggagatcaatctttcaagaaccccacactctggctgatcaacatggatatcatgtggaatctgacaagcaaactcagtgctcaattagcgcaactggatccgatgtgtctgacagtgttatctttagtcacacaaatggtgctggtttgaaaatcaggagcgtctccagcgatgatcctgatggctttgacactccgcggagcagaagttcttgtttctctttcacccacgagccagtaaaaaagctcgaaaactgcgatgttcggcaataccttgggaatttcggaagggggaacaatacagagctaaaggagacgaggtcaagttattttgccgatgactatgcctcacagaaagttgatccggacttactgaaggatatggtgacctttcagaatcggatagagtatggagggctcgttatatgtaacatcagaacattctgacagtgaacagagccactgtccgaagaagctaagtatagcattgtgcaattatccttttggcgaatgtggttttttggtgactgctataatcttttgtcatgtttctctactaattatcaatgctatgctataatctgtgtggctgtgtgcgtcgtatcttgtatgcgatccacccggattcataatccgtatttctaacgagacagaacaactcctatccagtggtatatattagttagattccttaggccgtgcttagcagatcgtgcaaaactctttttttttactatagactgtattgtttgtatgttggag

SEQ ID NO: 39904 - DNA, 1240 bp, Zea Mays
atgttcgtcctgcgaatccagtccgtcgacttccccgacgccgccgtggcagcagtcgccgccgacgaagtcggcaccagcagcggcggcgttaccacctctcgtccgctctccagccaccctcccccctctaccaccacatcgtccatacttactctcgagctccccggcgcaaaccccgtcgcgcccagccgaagccctaggatcctccacacccgcggcgtcatccacctctaccactcgtcgtcctccacttccacctcctcctcctacgcctcggcggtcgcagccacctcttcctcctcatccgggccggccaccccgcagcccgcctccgactcgcacctgcccctatgtcgcggcacgcgcctcctggtgctcgccgttccgacgcgcgtttcgccggaggactttgttcgcttctgcggcccccacctcgagtgtgcagccgacattcgtttcatcagggatgatggagtggaggaccggtacagcgttctagtggagtttgaggaccagagtagcgctgaatggttctacgccgatctcaatggctggaggttctcaacctctgaggtgtcttatcttcttaattgaattctagtttattcgctgatcatatttgagatcgttgctaaattggcgattaactctcgtttccatggtgtagagtgaggtgtgccatgttctgtttatagctgctgtgcagtatacaccttcctcagaggttgccacaactccaccggctggatccactgaacttccaatgtgtcctgtttgcattggtgaacttactgttttgtatttttttttgtattttggggcctctgcaatacaatttatagtcatatgtacgtgtcaccatggtgtcacatttgaattcaatttgtgatctccgttgaagagatttaggcacctctgttctatcctggccatagttttaactttaaataccattctgtttgatgcaacagcaacccttcatctattattttcacttttcatattttgttggttgtttaagttgtctgccttgtttctggtacacctaactattttctgccatcttaatatgttaatttgtcagaaagattggatcaggacatcagtgggattttggcaactacttgtgatcactctttccgttgctcatgtgtttcagtgtggaccaattcatcctgtccggaacttacccagaggcatgggcatatacataataattattgctgaattcaataaa

SEQ ID NO: 39905 - DNA, 1693 bp, Zea Mays
caaggcccataaaattttaatacctttatcgacgtttatcttcaagctcagacctgagctctgctatccttgcacagggctccgaacacgcgtttccatggctctcctccgactccaagagcagtgctcgctcctccgaatctccagctcccaccacccaaaccccatcgatatcccaagaaatcctcgcaagaaccaacttttagtgcccaatgcggccaagattgccaacgcctccgaaattccggttcctcgcatccccactagcacttccaaggccgcaatcctggcccggaaggccgcgctttggcgggacgcccttgtccccgttgccgccgccttcgcgtcctgtccgctcccttccctcgcggcggagggcgacgggaaagtgagcctcgagtccatcgtggtggcaatcgacgacttcaacaatcgcaaccctttcttcgtggctggggtcgtgttcgtgtggctagtggtgatcccgctcctgcaggagtacgtcttcaagaagtacaagcccgtgagcgccatcgacgcgttccgcaagcttcgcgacgtgccggaggtcgagttcgacgaggaggacgagaaggggtttgtcaaggaggtgctagcgaggttcccagacccggcgaacaccgtcgtctgcgtccttgacaagtagctttgatggtaattcttcgaaagttgctgagctactagttgagaatggttttaaggaagcctatgcaattaaagggggcttgagaggtccggaagggtggcaggcggttcaagaaaactatcttcccccatctgtccatgttttcccgaagaaaaaaaggggcgcgaaattagctcacacagatgcaagcaatgatggaacatacgttcagcaggagggaagcgaggaatcatcggctcctccaagcagtaccctgacttgaagcctccatcatccccaacaccatcaaaaccgacgaattaagagcaatgcaggacaataacatgtgtggaactcaaaaggtcagaagtagttgtctcctgcacaaacatttttgtatacttccaaccgtggatgtccaggagattgactgggatggcatggaagaggaccagcagtggtgtttggagctcttgctgctgttgaggccatggtgaattcttagttgtgtaatttgcgaagcttgtacccgtatgttgtactattaagtgggggcgaaatgacattttgtacctgacttgatacagtttggggtgccttagcgttctcaatttgacaattgtgcttaactcagttttattatcactggctcagacaccgtatataggtggcatcactataattgtaacagaggttcagttcattcacgctacgtacatgctggaagtggtttacattggggataccagtttgagcaacagcattacatcaaacaaagttcaaaatcttaatcaaaacgaatcaagtttgagcgacaacaattcatccaacaaagttcaaaatcttttacaaaaagaataaaaaaaatggcccatgcaggtctcgatccacgctacgtacatgctggaagtggtttacattggggataccagtttgagcaacagcattacatcaaacaaagttcaaaatcttaatcaaaacgaatcaagtttgagcgacaacgaatcatccaacaaagttcaaaatcttttacaaaaagaataaaaa

SEQ ID NO: 39906 - DNA, 1144 bp, Zea Mays
taaaaattcagtctgataggggaattcagaacttaaaattataaaatgggccattttggacccatgggagcagcccatgacgcctattataaaagtgggcggctagggttccaaatcctaaccgcccaaacttctcagccgccgccagaggctctcctggccggcggcgccagggagctcgatcgctcctaagccgcccatcagtcgccagggcgcctgcagccatccagggacccgctcgcccgtgctggggctgccatggcgtgcccgcccatgtggccaaggctggccggatctgcgccctagggctcttgggtggtcgagccgccgccgctaggtgcgttccagccgctggagtcacgcccgaggaggaccgctggggctcaccgaggccggccggccaagcacttgccgcgtcgggggcccactccggggctaggcagaccgcgcccgagcatccgctggagccgtccgcgctgggttgccatcgagggcccgtgcaagggagcgaagccggggccgaggaacgctcgcgcgtctgcgctgagttgctggtgtccgtgtccttggccgggtcgcggccgagccaagcccgcgccgggggtcgagggcggccaagccgccgcccgccgccggggctctccgaggccggccgggcgggcacgcgccacgccgggacgcacggttgcaggggccggatcgcgctgcgccgggtccgtggccgaggacggccacgcccttgcccggaggcagagcagttcgccggcggtcgagcgtggccccggcgcgggtgcggtggcctagccacggcggcaccgccactggcacggttcagtgcaggctgtcctccggtggcgcgggcacgcggctctggccccggccctagccttggcacgcgaccagccgccgccaggcgggcgcggccacgacacggcggaccggccccggcggcgcgggcaacggttgcctgggcgtgcaggccctagcgacgcgcagatgcaattccccggacgcgcgcgggcccggtcaggcgggcggcttcggtgcgcgcggtaggcccccggcggatcccggtccccgcgcgactgcttggcacggcggcacgacttgcgcaggccacgtggtagcgtgggcagcggccccg

SEQ ID NO: 39907 - DNA, 290 bp, Zea Mays
agctaaagggtcctcgatcatcaagcctacattcagtataatccttaatcaacctgggtagaacatcacctgttcctagcccaagtcccgatttaaatacttccacccttaggatgttttgtattccttaggatgaaaagagcatcacagggaactttgcagtaagatcccaccattgctcccaatgaaaatattcttgcagacagaagcaatccttcctcaggataacccctgagctaggcattaacgcaaaggacaacctctacccacaagatctaagcagggataag

SEQ ID NO: 39908 - DNA, 1915 bp, Zea Mays
gaaactttaaaaccgcaccccggctacataccgggcaacgctcacttgccgcaggccacgcatcttggagatggacaggtacgcgcccgcgctcctctgcctttgcctcggcgcgctccgtgccggttccgccgcgcctaccaccaccgggacccccgacggctcggagctgtgggggtacgtcgaagtccggccaaaggctcacctgttctggtggtactacaagagcccgcaccggacgtcgacgcccagcaagccatggccgaccatcctctggctgcagggcggcccgggcgcgtccggcgtcgggctcggcaacttcctggaggtggggccgctggacgtggacctgaagccgcggagctcgacgtggctgcagaaggccgacctcatcttcgtggacaacccggtgggcgtcgggtacagctacgtggaggacgacagcctgctggtgacgaccgactgggagcaggcggcggacgccaccgcgctgctcaaggcgctggccaaggaggtgccgacgctgcagggcagcccgctgttcctggtcgccgagtcctacggcggcaagtacgccgccacgctgggcgtgtccgtcgccagggccgtccgcgcgggcgagctcaaggtcacgctggcaggttggtaaactaccagtcacagtcagtcaaaggtgttgcctgtttcgtgtggatatgataataatgatacaactaccaagtctgtgttgtcgtctgtttcgcgcgcgcgcgcacaaaggtgttgccctcggggatagcttcgtctcaccggtggatttcacggtctcgtacgtgccgctgctcctgagcgtgtcgaggctggatgacaacgccgccggcgaagcaaacaagaggactcagacggtgaaggatcagatcgccgcggggcagttcgcggcgtctcaggggtcgtggaacgacctgctggccttcatagacaccaagagcggcagcgtggacgtgtacaacttccttctcgacagcggcatggacccagtgtccacagactcgtcgccgtcgtcgtcgtcgcccagcagcgtgctgcaggcgctgaggtactcgacgtacctcggcagccagctgggggactcgtccgccggctcctccaacaccatcgacggcatcatgaacggggtcatcaaggagaagctcaagatcatccccaaggacgtcaggtgggtggaggtctccaatgccgtctactacgcgctggtcaacgacttcatgaagccacgaatcgacgagattgatgagctgctatcgtatggtgtgaatgttactgtatacaacgggcagctcgacgtgatctgctctaccgacggcgcagaagcatgggttcagaagctcaagtgggacggactcaagaccttcctgagcctgcccaggcagcctctgtactgcggccccggcaaagggaccaaggcgttcgtccggtcctacaagaacctgcacttctactggattcttggggctggccactttgtaagttcctgctgcgccatctcagtcacatccacctaggatctgcttcccatcccatgtgcctgccgaccagccttgcatcgcgctgagcatgatcggcagcatcacccagtctccagccagttagaagggttttgtttatgtcatacgcaaaggtcaaatgaggaggactctcgagtacagtgaaggtcgcatatatagttgaaagccaattcagttgatcatgatacatgcatacagttctccatcatgtgaaagaaaaaaaatacagcactcgcgtgacaggacaatataatcattttttcagtgattttgtagtgcgtcgattgatttatgttgcatccaaattaccccactttaccaccattatgaacataattcaaactgagcccttagcatatattccatctaaa

SEQ ID NO: 39909 - DNA, 288 bp, Zea Mays
tgacaccatgtgtaggagagagtatgatccatgcgctttgcttaccttaacctcgtcttctcctaaacaaacaactatgcacccgccgcgaatattttggtgctcccactttggcttcctttaggttttgggcaaaaggagggattactgtgagaggttaacgatctctaaaaaaatatactcctcctatattctatacttgggaacagataggtagagagagaaaggatggaagagagataacgttactgtaacctaaggttgttatgaggtggaggtagagagcca

SEQ ID NO: 39910 - DNA, 3570 bp, Zea Mays
cacagggcagggctcctcctcccacgaggagaaaccaaccaaaaaccccgagcccattaaaaccgcgccaccccgcctcgcctcgcgagcgagtgccactgctgccacgaccccgacgcggctccggccatggcccgcctcctccgggccctcgctgccctcctcgtcctcctcctcgcggccgcctccgtcgccgtcgccgacgacggagaaacactgctggagatcaagaaatccttccgcgacggcggcaacgcgctgtacgattggtccggcgacggcgcgtcgccgggctactgctcgtggcgcggcgtgctatgcgacaacgtcaccttcgctgtcgcggcgctcaacctctctgggctcaatctcgagggtgaaatctcagcggccatcgggagtctgcaacgtcttgtctcaatcgatttgaagtcgaatggactctctggacagatccccgatgagattggtgattgttctttgctcgaaactttggatttgtcatctaacaatctagaaggagacataccattctccatgtccaagctgaagcaccttgagaacttgattttgaagaacaacaaactggtgggagtgatcccatcgacactctctcaacttccaaatttgaagatattggacttggctcaaaacaagttaagtggtgaaattccgaatctaatatattggaatgaggttcttcaatacttgggattgcgaagcaatagtttagaaggaagcctctctcccgatatgtgccagttaactggtctgtggtactttgatgtgaagaacaatagcttgacgggtgcaataccagaaaccatagggaactgtacgagctttcaggtcttagatttgtcaaacaatcatcttactggagaaatcccgttcaatattggtttcctgcaagtggctacgttatctttgcaagggaacaagttctctggtcctataccatcagtgattggccttatgcaggcgcttgcagtgctagatctgagtttcaatgagctatctggcccaataccctctatactgggcaacttgacatacactgagaaattatacctgcaaggcaataggttaactggattgataccgccagagcttggtaatatgtcgacactgcattacctggaactgaacgacaatctgttgactgggttcattcctcctgatcttggaaaacttacagaattgtttgaattgaaccttgcaaacaacaaccttataggacctatccctgagaatttaagttcatgtgcaaatctcattagtttcaatgcttatggcaataaattgaatggaaccattccacgttcatttcacaagcttgagagtctgacttatctgaatctgtcatcaaatcatctcagtggagcacttccaattgaggttgcaagaatgagaaatttggacactctggacttatcctgtaacatgatcactggttcaattccctcggctattgggaaactagagcatcttttgaggctcaacttaagcaaaaataatgtggctggacacattcctgctgaatttgggaacttaaggagcatcatggagattgatttgtcttacaaccacctcagtggcctgattcctcaagaggttgggatgctacaaaatttgatactgttaaaattagaaagcaataatattactggagatgtctcttcacttatttactgcttgagtctcaatatcttaaatgtatcatacaaccatctttatggtactgtacctacagacaacaacttctcacgattttcacccgacagcttcttgggtaaccctggactttgtggctattggcttcactctgcttcatgcacacaattatccaatgcagagcaaatgaagagatcctctagcgcaaaggcctcaatgtttgcagctattggtgttggtgccgtattgcttgttattatgctcgttatcctagtagttatttgctggccacataactctccagtgctcaaagatgtctctgtaaacaaaccagataaccttgcttcagcatcaaacaacattcatcccaagcttgtgatcctccacatgaacatggccctctatgtatatgatgatataatgaggatgactgaaaacttgagcgaaaaatacattattggttatggagcctcaagtacagtctacagatgcgacctgaagaactgcaagccaattgcgattaaaaagctgtatgctcactaccctcagagcttgaaggaattcgagactgaacttgagactgttggaagcatcaaacaccggaatcttgtaagccttcaggggtactccctgtcaccatctgggaatctcctcttctatgattacatggaaaatggcagcctctgggacattttacatgcttcatcgaagaaaaagaaactcgattgggaggctcgcctcaagattgctctcggagctgctcaaggcctggcttatcttcaccatgaatgcagtccacgaataatccacagggatgtgaagtcaaagaatatcctcctagacaaagactacgaggctcatcttgctgacttcggtattgccaagagcttgtgtgtgtcgaagacgcacacatcaacgtacgtgatgggcaccattggctacattgaccctgagtatgcacggacatcccggatcaacgagaaatcggatgtgtacagctacggcattgtcttgctggagctgcttaccggcaaaaagcctgtcgacgacgagtgcaaccttcaccacttgatcctatccaaagccgcagagaacacggtcatggagacggtagaccaggacatcaccgacacgtgcaaggacctcggcgaggtcaagaaggtgttccagctggcgctcctttgcagcaagaggcagccgtcggatcgaccgaccatgcacgaggtcgcgcgcgtcctggacagcctcgtctgcccagcaggcccgcccccgaagcaggcgcaggcgcaggcacaggcacaggcgtcggagaagccgtccaccacggcgccgagctatgtcagcgagtacgtcggcctacgaggcggcggcggcggcagcgccctctcctgcaccaactcgtcgagcgcgtccgacgccgagctcttcatgaagtttggcgaggtgatctcgcggagcacggaatagtccaatagatcgacgatcattttgtgttacagtttacaataggtgtctggccggcgccctgtgatgtgactcgctgtaaatatgctgctgccttctcgttgggactccactaggcactagtagctatttttctccgttatgcacgtctctctctttttttttgctgggaaactcgaactgtaactaaaggaatggatttatgtgcaggctgcgtttactgacatgttttgtgattcagctgggacggttatgctattgctctgctcgatcggagcacactgttcaaggctggctggagatcatctgggcactgttactgttacgttatccttcctgggcttcctactcctggatcatgccactgctgcgctgcactgtcgcatgtattaccgtaccgacaaccgctgctgtaaaaaaacaaaaaaaaaa

SEQ ID NO: 39911 - DNA, 1609 bp, Zea Mays
cccagtcacaccatccctccgctgcatcttcaacaaatagcctccggcgcaggtggacgtgggcctcagcgacggcagcttcgcgaggggggccgtgcccagcgcgcagcggcgcatccaccgatgatgtgatatatgaggccttggagttgagggatggaggatctgattatcttggcaagggtgttcttaaggctgtgaacaatgtaaatagcattattggaccagcaattgttggaaagcttgatggaacctccaacgaatggggctggtgcaaacagaagcttggagcaaatgccattcttgcggtctcacttgctgtgtgcaaagctggagctatggtgcagaagattcctctttaccagcacattgcaaatcttgctggaaacaaaactctggtgctccctgtacctgcctttaatgtgattaatggaggatcacatgctggaaacaagcttgccatgcaggagttcatgatcctcccaactggtgcctcattcaaggaggccatgaagatgggagttgaggtgtaccaccatctgaagagcataatcaagaagaactgaagaagtatggtcaagatgctacaaatgttggggatgaaggtggttttgcacctaacattcaggaaaacaaaaaaggccttgaactactgaaggcggctatagaaaaggctggctacactgggaaggtgttcattggaatggatgttgctgcttctgaattcttcagtgagaaggacaagacttatgatcttaatttcaaggaggagaacaacgatggttcgaacaaaatatcaggtgacagcctgaaagatctgtacaagtccttcgtttctgagtaccctattgtgtcgatcgaagacccatttgatcaggatgactggaccacttacgccaaactcactggtgagattggacagcaagtgcagattgtaggagacgatcttctcgttactaatcccacaagggtcgccaaggccatcaatgagaagacctgcaacgctcttctcttgaaggtgaaccaaatcggctctgtgaccgagagtatcgaggctgtcagaatgtccaagcgtgctggatggggagtgatggcaagccacaggagtggcgagacagaggacaccttcatttctgacctctcagttggcctggctacgggccaaatcaagacaggagctccctgccggtctgagcgcctggccaaatacaaccagctgcgcttaggatcgaggaagagctcggtgttgccgcagtccacgccggagcgaagttcagagcaccagtggagccctactgaaccacgtgtgcctagagcctggagaaagaagatgaggatgtttccccactagttcgctgctgctttttgatagaatgcctgtacgatcacagtaatagaagtttggccttgtttgccgaatagctacactagtgggtttttttttctcgtggaaaaaaagaaagaaataaaacctttttttattctgaggagtgacgactgacgagtggtggtccgcactcgtggtaatatcgttgcccaaaatgattttgatggaacgggaaaatgttgctggtctttgccatatatgagtaggggatccaaatgtttc

SEQ ID NO: 39912 - DNA, 2064 bp, Zea Mays
cgccaccggagtgtctggttggagacaagcccgaaccactcgggcggccagttcccactatccggtcgacatttgagtatttgacgcgttttgtttgctgtttagaatttgacaaaatccatccactcttgcctctgtcttctcaacgtaaagacaggcagggcgggcacgaagcgaagggaccagccagcgagcggctcgccggcgacgaccctctccccgccccaccccgcccacggaagcacggagaagatgtccgccgcataccctcgtctcctcctctgtctcctgaccctagccctggctctcgcaggggtcgccgcgggcaagatctcggccccccgcaccccgatctcgcgcgacatctaccactccagtgactctcttctgcgtgaaatcaaggctttggttgctcggcattccagcaaattgagtatggacactatcaaaacaagcaacaaaggctattctgcagagctgtttgtagttacatttaatcatgtgaaggagcgcatggataatggctcaaaagttcatatccttctgaaaggttcattgtcttccagagctttgggcagcatggcagagaacttatcacctccgaagttgcattacgtcttctctatgttttaacggagaagcccaagatcgctggtgtggatatttcatcctttgagaaactgctggagaaccttgtgatcaaagttgtgccgatggaaaatatgaatggtcgcaaacgtgtcgaagaaggggagctttgtgataggagaaatggaagaggagttgatctcaacagaaattggagtgttgactggggaaagaaagaaaaagactacgacccatacgaggagaatcctggtattgctccttttagcgaacctgaggcccagatcatgagggaattatcaaggtcgtttaaacctcatatttgggtgaacgtgcattctggaatggaggccttatttatgccatatgatcacaagaataccacaccaaatggagcatctgcacattcgatgcggtcagtcttagagaatttgaaccgtcgccatttccaagatagctgcctagttgggtcaggtggtggatctgttggatatcttgcacatggtacaacaactgattacatgtatgacattgcaaaggtgccaatgccgttcacctttgagatatatggagatgagaaagcatcttccgatgactgcttcaaaatgttcaatcctgttgacaagaaaacattcgacagagttgttaacaagtggtgcatggcatttctcattctcttcgaggaaggcctgcgaaacctgcgagacgcgcagatagtgtcgcaaggcacgctggaaaactgggtcccaattggaggagacatcgtcgagataaatgtggagcggaagagcagcatccgtgagaggaggaagctggaaggcctcgaccttggaatgcaggagctaaggacatatttccggctattcttgctgtcaacattcctgttgatgttcatgttctgcgcgcggatatcaaagaacagaaaccgagactcaggtaacttgtttgacccttgaatgaagtaccaaagagagcatcggtgggggggggcctcctccgagctgaacttcgggtgcaaagagcgatcccctcagatcagacgaacaaagcgatctgaaacattcagagctggaatacagctctgccttcgcaccctggtattcggagctggacgtcccgtatactttggacacgaaggatggtggcaggcagtgtctgtttaggttacagcagagacgccagacgatgtggctaactgtttaacaaaattgtagctgtaaaaatcgcccatgtcagtttttttttggtgatgcataggttttactactacattttgatggaaggttgttagtgcacccaacacttggtacggtgccatcagttgatgtaacatctcactgatcgagcggtttatgtggaattgtgttggctcgaatttcttctgggttctcaaattcatttcgtaactttcaaagtttaaatatttatatgtatacatatatttaaggtcaaaaaaag

SEQ ID NO: 39913 - DNA, 1465 bp, Zea Mays
aatgtaaatgaaactccgatccaacgggcggcagggcctgctggtcgttgcggaatagtaacgcaacttgactgcaatgtttggctgcgcctacaaatccaacgcaccaacacaccgcgcgcgtcctcatcctcacttcaggtctgcagcccccaactacccccagcctcggaaggaaccttccagaagcgcaagactctaaaggccgtcgccttcccattcttcctcgccgcgggggtcgcctgagttgtttgcagatcacataaacaatggtgaaggctgttgctgtgcttggtagcagcgatggtgtcaagggcaccatctttttcacccaagagggagatggtaagccatttcatattctgtgatatggggtgtttggttccaccaaactaaagtttagtccttatcacatcgaatgtttgaatgataattatggatattaaatatagtttaattataagactaattgcatagatgaagactaaaagataagataaatttattaaacctaatcaagcatgtatttaatacttataattgatattcaaatatttgatgtgtcacgaactaaactttagtcagaaaaacttaacactcctatagtattctatattcaattgaatgttgtcttcaccttgttgactctagctgcttggatctattgttaggccctaccgctgtcaccggaagtgtctctggcctcaagcctggcctccatgggttccatgtacatgcacttggtgacaccaccaatggatgcatgtcaactggaccacactacaatcctgcgagcaaggagcatggggcaccagaagatgagaaccgccatgctggtgatcttggaaacgtgacagctggagcagatggtgttgctaatatcaatgtcaccgacagccagatcccactgactgggccaaactcaatcattggcagagctgttgttgttcacgctgatcctgatgatcttggaaagggtgggcacgagctcagcaagagcactggaaacgccggtggccgtgttgcttgtgggatcattggactccagggctgaaaacgatcgccggacttgggggtgcctgagaggtccgtctcctgccgtccccagcagacgagcctgaacattcggagacatcgtgaaataagagcgtcgctgatctgtgatcatcgtatttgtcattatgcacctgtagcaaccgatggactgaactgtgctggattatgctgttggatcacctgagtatgtgttacatgtcggttttgatgtgacatcctatcgtttcgatgtgttttgtggaagtgttgttgcaagatttcaacagtcacgacttggttttgatatgcagtcagcagcagctcctgagttgtgattgctcagctgcggtccttttctttttttgggataactgatttcttgttgaaatacgctcgctgcatcacctgtgtttagtgctgtcggctagat

SEQ ID NO: 39914 - DNA, 859 bp, Zea Mays
catgcagaagcagagccatgctttatagtcactgacccattctagccagagcaatcgcagcctcaatgctcatccaaaattttgcaagtctggaagcgcctttttgtcatgattaataacctccctacaatatatgaagttgtcacgggaactgccaagaagcaaaccaaggagaaaactccgaaaagcagcagcaagagcaataaagctggcccaaaaccgccacgccagccagaacccaactcaaggggttcgaagatgccacctccgaaggatgaggatgacagcggaggcgaggaagaggaggaagaggaagatcacgaaaacacgctgtgtggttcttgtggtgacaactacggacaggatgagttctggatatgctgcgatgcgtgcgagacttggttccatggcaagtgtgtcaagatcactcctgccaaggccgaacacatcaagcactacaagtgtccgaactgcagcggtagtggcaagagagcccgagcatgatgatgctggatatatccatctctcatgcctgacttgatgtaaaacacccacatggggaccgaatgcccgatggttgttgctttcagtgtaggaccagctgtagggtcttgatgtgctgtttgctgtagtatgtcaaagacgttctagatctattgttagtaactagcaactaattgtagtagcctgtatttcttcaatcttctcccagggcgcctgtgctgaactcaaactgttttagatctaagttgtgcattatgtatcactcatgttagtttgttaaaaaatgtgttagcattcgtatgaaacgccaaccatgtttacaaattaattaacttcaagtctattttgctcgcac

SEQ ID NO: 39915 - DNA, 350 bp, Zea Mays
gttttcgccaacagacaccgaatcccgcccttcgccatggccgacctccccgctccgaccgggatcctggcacccacggactccgccctttgggtgtataagtaccagctctagtggcgtcccgtacccatcgacttggagctggacgagctctggcgagggtcccgccccgcgccaccattgccgttgccgaaagggccgccgccgctctgtattttatggggaagtcacgacgccgccgcaaccggaatcgagtagaaccatcacatcgccacagggctatccatgacgcggtccgacgagttatgatcagctcggctccaatttgcgcgcgaggacacgtgtcatct

SEQ ID NO: 39916 - DNA, 258 bp, Zea Mays
agcaggaccaacggcgcgcagaaggatcaaggaccacaggcacacatacacatctgagcgtggtgcgcggccggcggcaacacggcaggccggctgcacgcctgacgcacagcttgcgcggtcggcagttcctcggtgcggcagggaaggccgtgtactacacagccggctccgtcgcaggtttccaaagccaaggtcactaggtcagcccgtggccgtcgacgaagatcgccgcgatgtgagcaccaggaatcgccg

SEQ ID NO: 39917 - DNA, 601 bp, Zea Mays
gcaacattggcttcctgtattccaaaagctgacggatcttgcatatctgcagaagaagaaagatgaggaaaaagcactgaaggagcttaaggccaaggcacagaagggcgcgattgggggctcgggtctgaagaaaagtggaaagaaatgagactggtcacccgtctccaatacctagaggatgataaggcagctgtctatctgtgttgcgcttcactaagtgtgattgtaacagtggtacctcttgtgttctgtgttccgcgatgttgcagttggttgcttgatcgaaagatgtttcaacctcccatctgctagctatgatacagatggtcccctgataataatgatgacatattctgtgatggatgccacagcattttttgtttttgtttttgcattcagatatttcagcttccttatagttttacatgtcccaactaggaatgagaagtcattctgttggtccaatctaaattttatgtgtgttagtggagtgccaaagagagtggatatgtagaacaatggtttgcatctagatctttttgcctagaacaaatgttcgcatctagatctgacctaatcttcagggctagtgtgcacg

SEQ ID NO: 39918 - DNA, 5266 bp, Zea Mays
tttcgcacacctcaatctgtgccggacgcgaccaaattcgaaattgcccaacgtctcgcctctcgcgacctccgctccccatttcaaaccgaaaggtccgaaaccccatctcgaccccgttctgccgtatctccgatccgcctccgccgccgtctcccctgcccaggcgccggaagtccacctcgggctccagcatatccgcgatgcatctggacggcgtcgacgacgagctcggaggcggcagctgcgccccctcccccgcgcgctttgagctccaagaggatccttccttctggaaggacaacaatgtgcaggttgcgatccgtatccggccgctgagcggcagtgaggtgtcgatgcaggggcagaagcggtgcgtcaggcaggatagtagccagagccttacctggattggacaccccgagtccaggttcactttcgatcttgtcgctgacgaacatgtcacgcaggagggcatgttcaatgttgccggggtgcccatggtggagaactgcatagctggctataacagctgcatgtttgcttacgggcaggaaaaagaattaaggagagatgaaaagctcatgtttacttgtaaatgctcatttttggagatttataatgagcagattctggatctgctcaacccaaattctgtaaacttgcagataagggaggatgccagaaagggtatacatgttgagaatttgacggaacatgaaatctccaatgctcgagaagcgctgcaacaacttattgagggagcagcaaacagaaaggtagcagccaccaatatgaaccgagcaagtagccgctctcatagtgttttcacctgccttatagaaagtaagtgggagtcacaaggtatcaagcaccaccgcttttctcgactcaaccttgttgaccttgcgggctcagagaggcaaaagagctcaggtgctgaaggggagcgattgaaggaagctaccaacatcaacaaatcactatcaactttgggacttgtcattacgaacctaattgctgtgtcaaacaaaaagtcacagcatgttccatacagagattcaaaattaacattcctcctccaggattcccttggaggaaattcaaaaacgaccataattgcaaacataagcccatccagctgttgtgctgctgagacattaagcacattgaaattcgcgcaacgagctaaatatataaggaataatgctataattaatgaggatgcttctggtgatgttcttagcatgcgtttacagatccagaaccttaagaaaagtaatcagccgtttgcaaggacaattgggttctgataaaacagaaagcattgcctctcatgggtttgtctgcgagtcccctagcacattcaaatgggatcagggtcatggcatgttcactccacttacttttgataaaagggctacacagaggaacgattgtgatgctgcccttgtcgctgcttttaggagggaacaagagaaggaagcacaattgaaggcagtaatagatgcaaagcagactgctgaacagctggtagctcaaaagacagaagaggtaagaagtttcaagatgaggcttaagtttcgtgaagaacggatcaaaagattggagcaggttgcttcagggaagttatctgctgaagcacatcttttgcaagagaaggaaaaccttgtaaaggaattagaggtcctgcggggtcaattagatcgtaatccagaaattacaaaatttgcaatggagaatctacaattaaaggaagagctacgaaggttgcagtcatttgttgatgaaggtgaacgagaaatgatgcatgagcaaatcattgttttacaagataagctgcttgaggcacttgactggaagcttatgaatgagaaggaacctattaacaagggtctctcattatttggggagtcagctggcgatgaggaaaatgagtttcttcgtttgcaggctattcaaaatgagagagaaattgagtcgttgcgtaaaaaaatgacattctgccttgaagcaaaagataatcttgaaaggcatgtcaatgagttgaccacagagttggagcttacaaagaaacacaacaacacatataaagagttcaaggctgcccagctccaggagcaaggagaagcagatttacataacttgtctgacgctcagatggaacttaagactttggttgatgcaatagcttctgcgagtcaacgggaggcagaagctcatgaaactgctatcggtttggccaaagagaatgaagaattgaggctgcagcttaaggttttgattgaggataacaagagattggttgagctctatgaacacactgttgtcaatgttgaggcaaatcaagatggaaaccctgtagatgatctgttgaatgcccaaccagcagccacatcagatttccatgcacataactcatctagtgtggcacaggagtctaagatagtagacgaaaaatgcaccaatgaggacaatttctcaagagttacatctgttgaattgcgtcttcagctggaggagatgcatgaggaaaatgatagacttatggggttgtatgagaaagctatgcaggaaagagatgaattcaaacggaaaattttagagcaaagcgactctgaagctgtaaaacatattcagttggacgagaaagatgtcgaaatgagtgaagcagctgagaatcctgaagtgaaacatattcatgactccacaattgcagctttgaaagaagtgctgcagattgttcggagtaagttggagcttgtccaagataaggttgtgtctgctcaggatgcagtaaaatattttaaggcactcgaaatagctagtggtaaggccgaagaactttctgcaagaattgagcttcagcgtctaggtgcgcagcgtggtcaggaagaaatcactttcctgaagtctgtgctatcagaatcacagaagaagaaaaatgcttttgaaggcaagtatttcttgcctgcagcatcatgttggaacttggttttgaagaccaaaagtcttgcggagtccaagtttgatgccagctttggatcaatgaatcagaagaaagaacagttgaatcatctccaaactcgcaaaattgaactatctgctgcaagaacgagagcacgtgaatctgaaactgagttgaaaagcaaaattgatggccttaaagcgaaacttcgcgctcatgaagctcaaagaaaggaggaagaaaaggtcctgtttgctattgataacctggatacttccactacactaatgcataaacccaagaactatggcaaggcaaccgacctgctgaaatctgaggaggatcggatgaagcttctgtgtgaactacagaaggcccgcgaacagcgctccatggtacataaggaaataagaagcatgaatgagtgtgattatattgatcgtgagattggagtccttgaagcagaaatagaggattcctgcatctccatactggaaactgacattgagaagtttgtccgtgacaacactttagcagagatttgggagggtagcgcaaaggatctggaggcattgctggtcgattaccaagactgtgttttccaagtcaacttgaaggaggaagagatcaaggtgtgcagtgagtccttgcagtatcaagccagggacatggataaacttcagtcgaagctgaaccaagcgatccgggagctgggtgagcttctgcaagatagaagaagcctaaccgcttgcagtctggatgaacccacgctgcccgttggtgaaaaggtggcagcagaccttgaggccgtccggattcatgtcgatgaagctaagcagcttttgattctcgacaaccaagctaattcatgaacctgcgcagctagtttcaggtcccttataaagatgcgacgagtgacaggctagtctgtcttggcttctgctgttcagatccttagtacgtagtagcaagacatcagagatgggaagctgcggaatttgcttcattagttggaagctatctgaagccgaatctgctgattcttttttccgtggatcagctaccttcttctggtggtcttgcttcgagtcaaaacaacaggtcctgcaagccactgttccggatccgatttctcctctggtgtacacttcaagatggagcggagaaactgatccgacttaggcttgaccttttgcttctgtaactctccagagactggtagcaactagcaaccagtgggtggacttgtatcacaacttaatctgagccaggtgtcttattttatttatgctataagtgcacaaatgctgcactccagtttcttgtagaaattttcgggctgatcttgaattttacctgctgaagagtttccgtgttctgctgctgtactgtaaacaggtgtgccagccggcggcaacctgtgcggggagcgccaagggctccaggaaagaatcggcggcgggctcgcgatcgggaaggggagcggggcgcatgcgcgagcactggcacggcgacggcgacggcgacggcgaggacgagcatgagccccagccggggtgcggggagggcgcggggcaggcggcggcgaactgcgcggcggtgtgctgctgctgcccgctggcgctgctcgacgtgctgctgctcgtcaccgtccggctccccgcgggcgtcatgcggcgggtgaggaggaggcgccggcgccgccgcggccacggaggtgccggagccaaccggaagaggccggcgcccgcgtcgccttcgggaagcagcggcaaggcgatgatcggagcggcgacgctagacatcgacgaggaggcgcgcggcgaggtggagtcggcggcggcggcggagctggagcgcgagatcatgagctcgcacttctacggcgccggcttctggcgcagcgtctcctccaactccagctcctcgtccaggcgctaccaatagatgcgcgttctggcgtaaatagagcagcagccttcggcatcgtgcaagtgcacttattctgaatggacacgtgcgaaactggcacgtgcgggttgcatcattgtactgctacgccattgtctcgagcatggaccacgccagcagctgcagcttgggatggagaagcgaaaggggtcagtgattgtgcttaggtttttcatctctctcctaatcttttttgtgtaactggagcaggaaatgctgaaacctcaagcttctgtccaaacgatgtactcctatttagtattattgattgattgagaggccgatcgataacaaatgaacaaatagaacactgttcatgacgcagtg

SEQ ID NO: 39919 - DNA, 453 bp, Zea Mays
ctcatatgcccacatggcgaaccgtgggcgtggcaatggcagccgtggctcgggcaattctcgtggctgtggtcagcgtggacgcgtccaggtgtgtggccgaggaaacgacccaccgaagcaacgcaatggagggcggccacaacgatctgatgcagcgagtgggtctcatgacctactgctctgtcagatctgcttcaagacaggccacagggtgtcccggtgctggcatcggttcgatgaaaactacgtcccagaagagcgccacatcaatgttgccatagccatgaacgcctacaatgtcgacaccaactggtacaccaacacaggagcaacagatcatgtcacaaagtgaactaaacaaactgacgatgagggagaagtatcatgggaatgatcagatccacaccgcctctggttcaggatacgaggagaacgattcttagggggcca

SEQ ID NO: 39920 - DNA, 987 bp, Zea Mays
ttgaatcatggcgaggtgattcgatggttccatgtggacaaggtatcctcggcacacgtctacctgaggctaaagaaaggcgagacgatacacaccatcagcgaggccctcctggaggactgtgcgcagctcgtcaaggctcactccattcaagggaacaagatgaacaacgtcgaggtgatctacacgccctgggctaatctcaagaagtccccatccatggatgtcggccaggttggcttccacaacccgcggatggtacatgtgcttatagtcgagaagcgtgtcaacgagatcatcaacaggctgaataaaacccgggtagaacgccgggcgccagacttgaaagcggagaaagaggcatcaaatgcagcagaaaaggccgagaggaagatgcagctgaaagagaagaaacggaaggaggagatggaaaggctggagaaggagaaatgggcggagatacggagctacaagggcctcatggtggccgagaagatgacgtccaaccgccagatcgcctccgccggcaagtccatgcaggaaatggaggatgagttcgtctgaagacgactgtcatcgtcactggagtctacatctctctctctctctctctctgtctgtgtgtgtgttgtgtgtgtacgtacatatgtccatgctcgcgtgataacgacgagtcgaagcaaccaaaagatctcatggatcgattattcgatccgttcctgatcctccgttgatctgtgctctgtacataacatgtgctcccagcatggacatgtataggtcacgagaagagctagcgcgtatgtatacaagtaactagtgacgagctgttgctcggagggatcaacatatatggagttcatcaagagaatcggtgcaacacacttgccgccaggagaaccagctgaggtactaaaaatatatggagttcctcagtttccacgatgtccatgcccaaaggggtagcacaggtaaacatattcagaa

SEQ ID NO: 39921 - DNA, 1174 bp, Zea Mays
caagttgaaaggatttatgttttttcctttccctgtagtcagcattatccacgatttgacatgaaagaacctaaaatagcagctgaaattgccaaggagctacgcaaattccatcaagtagacataccagggtctaaagaaccacaattgtggaatgatatattcaagtttttgaagaaagctgcagcattgaagtttgaggataacatgaagcagaagagatatgaaaagatctcatttagagaaatacaagatgaagttcaagaacttaaggatctcttggacattctgcgcgcgcctgtggtttatgcacacaatgacttgctttcaggaaatctgatgctcaatgatttggaagctaccgtggctatgacattgcaaatcatttcaatgagtatgcaggatttgattgtgactataatttgtacccagataaagatgcccagtatcacttcttcaggaattatctacacactgatagacctagtgaggtggatgcacaagatatggaagtactttatgtggaaacaaacactttcagactagcatcgcacatttactgggcattatgggcccttattcaggcaaaggtatccccaattgactttgactatcttggatacttcttcttgcggtatggtgagtacaagaaacaaagggagtcctgcttctccttggcacaaagctttctctccgagctaaaaaatggctagagcctgagaatctgttcacgagtttatactggtgtacgcatgctcggagcgggtacgcgttgtgatcatcgactgctacccagaaactctattatagcggttgtagcagcccctcattgttgtatctgatgttaggttcatcattgtctaaggactagtttggatactctagtatcgagctcaattcatgtgtatgagatggattcgggtgtaacttaaactaatttacacactaatccaactcaacacatgtggattggggtcaatactaaattacccaaacaaagcctaacagggaagtcaccagtggcaaattatgtacttatatttataataataaacacaatcctgatgggttgtgccctgttgaatttgttcttcgattaattctgccctgtgcaatctgttctgcacttccgagtatatagtttttaatgactgggtagtcctttgaaggtccg

SEQ ID NO: 39922 - DNA, 308 bp, Zea Mays
ggaaaaagcatttgaaacagggggagaaaatttcaaaacttgaaaatgcttctcaaaatcttattcatttacctttgactatttgcaaaagaaccttgaaaagaatttccaaaacattttgcaaaacaaaacaagtggtgcaagcgtggtccaaaatatttataagaagaaaagccatccatgctcatctagtaagtaatacttattggtttcattccaagcaacctttgcacttacattatgcaaactagttcaattctgcacttccatatttgctttggtttgtgttggcatcaatcactaaaaag

SEQ ID NO: 39923 - DNA, 1816 bp, Zea Mays
tgccttttgtgccctagcatggtgcaactaatatatggtctggggccctttggcattttacaaaggcttcctgccaaactttgcaagactgggatcttggaatgtgattatgttcttgacattggagcaggttcaaaagctgtttgtgaggaaagcgacaagctgaagatagagtttttgcagtcaggtggcgtacaattgacgcacagggtttttcttctatagacaaaaggggagaaatgacacctcccccctcgagaattggggaacaaggacagatctgacacctcaattgcgagaaataaaaataacagccgacagttgcatgatccctgaacgaataaattcagaactagaaaacagatgtcagtaaacaacatgtggtgaatgttggaacttgaactgctctagttcagtgggcatctgttgttgcatgcttgggatggatttaatgtttcgttttttttcttccttgtactgaagtgctctgatcggtaacgatcactgtgtgtgaagtgcttgattgttatgtggtatcatgagaatgaataaacataataatggagctgtttttttattttttactgaagaagcaagctgctgccattacattcctgacaaggagtcgagaagcagagcacacgacaacaaacacagcactgtgtgcacacatgctccaattcagatgttgctcctgatcttcatcttgccgaagagcgagtgcctcccctcggcgaccaccagccccgtggcggcgttggcgacgatgacgtgcgtgccggagtaggcgcccttgtggccgagcgccctggcggtgatgcggagggcgtccccgggcgcggcggcgtcgaggtcaacgaagttgacggacatgtcgacggagaccttgaggtggtggccgtcggacacggaggcggcggagccgatctcgtccaccagggccaccacggcgccgggggctatgtgatcgctgccggaggtgaggcgtgcggggaccgtgaaggagcagaggatgtggcctgggcggatgctctccacgcggatcccgtggagcgcgaacccctcgaagaagctgggggcggcggcagaaacagcagctcgacggttgagcgcgtccaccagcgcaccatcctcatcgctcacccttacctgcagcagcgccttcgggtcatggtcatcagaagcggccatggtggttggggagagggactagttggaactagttttttttcttttgatgccagctgccgcaactgcaagcgatatgacatttttgcccctgccgttatgtgtgttagctgtcgcttggatttgggatgtatccgcttccgccgccgtccatggctggggctggggctggcgctcttttggttgccagtgcaaacaggagaaccatttgatgcatctttgtccctgaatgatcctggcctgacacagtgcttgacttgaatagacaagggaagagcaagtcatgcttaatcatggagaaagaaaggctgtgcctgtgataaatatataagtccccctcccacctaaagtacctgttgtagagtgtttatgtaacagtctaagagctagagagtacagtacccaacacaagaaggactgactatgagttgcagttcagttcaccagctatggtccaccttgtcagccagaacagactacgtacgtacgtcatgctgaatgctacgggcacttgggatggaacaggcagctagagtccaagtgtgctcctccttgtcttgcccaattcatgcttggagttggaagaggagcgcctcgggatgttgggcggccggctgctcaactgcat

SEQ ID NO: 39924 - DNA, 4522 bp, Zea Mays
ctcccaaaacattacaacatggtgaaccaccactgccgctgccaccttttcctccagtaacaccaccaccagaattaccagtgccaactatatgcagtgatagtggatcagttccactggtacactcaaatccatcttcagattgtccatataaagaagcagcaatgctaccagaacacaaatctgctgttccacctactctcgaaggacatgaagcaagtgaagttcaattgctgcaatctgatattactgttgaattatcttcatcaaaacattctgagtatacagttcagcatgtgtttggaagcactgaagatacaatttcaaatatctcatcctctatacctgcagcacctccgtacccaatatttcatattgtaacatataattcctcaggttcaatatctgcagagcaagtaaattgcgagcaggctttagatcaaacagcattacccattcatttgaggccattcaaggtggagatatcacaaagtgagacaaccaatggactcttggcctctaaaaccgatgataaagaacatggaggccttccaatcccatcattgccacaaaatttgccccagcctagagaacatatgaaacctccatctccacctcctcctccaccacgaccaccaccttgtcatgcaacacttgtaccttctttgtgtttatcttcaaatccaccttctctaagagaactttatgaaaatcaaccttctacttcccctccaccttttcctagagaatcatttgttgctctacctccacctccagctccacaccctaatcatctatctcttcctggaaaacatattaagccatctccacctcctccacctcctccacctagagaaaatgaagcattttgtccttcgactctactttcacctacaagacatgttatacctcctccaccaactttacatcatattgcacccacatctccatgcttgtatcaaccttctttccctattgatatagaaatccaacctaccttttcagaggatattgtaatagtttcaccttcacattcaacggaggttaatatagttccattgccaccaccacctcctcgtagaatgagtgaaattttgtctcaacctcttgagggtggacaatcagcactgccagcttctcttcttgaagttactaaagaaatcccacctcctcctccccttccccctaaagtacaaaggagatctccattgtctactctttgtggtggaattgtgaatattccattacctccacctccacctccacctccacttcctggaggacatggagaagttccactatcaactcctaaaggatctggggccatcccacctccaccaccctttactaaagggctaggaggaattacattggcaattcaatttcatagtggagacttttcactcctcgaacctaccagagaatcagaaagtacttcacgcttgccaccaccaccactatcttccaatggacatataggagatccaccaccgccgccgccaccaccaccaactatgagtgtatttgtagaggcttccatcccgctgccacctcaaacaggatgcagagaggctccaccaccaccgccaccatctcctggaggacatgtagagtttccaccgccacctccaggggaatgtgcattagctctgccacatcccaaagcaagtgtaggggctccaccaccaccgcctcctcctggaggacatgtagagtctccaccaccaccgccacctccaggggaatgtgcattagctctgccacatcccaaagcaagtgtaggggctccaccaccaccgcctcctcctggaggacatgtagagtctccaccaccaccgccacctccaggggaatgtgcattagctctgccacatcccagagcaagtgtaggggctccaccaccaccgcctcctcctggaggacatgtagagtctccaccgccaccgccacctccaggggaatgtgcattagctctgccacatcccaaagcaagtgtaggggctccaccaccaccgcctcctcctggaggacatgtagagtctccaccgccacctccacctccaggggaatgtgcattagctctgccacatcccaaagcaagtgtaggggctccaccaccaccgccacctcccggaggatatgtaggagctccaccgccaccgccacctccaggggaatgtgcattagctctgccacatcccaaagcaagtgtaggggctccaccaccaccgccacctcccggaggatatgtaggagctccatcgccaccgccacctcctggaggatacataggagctccaccaccgcttccatatggaggaattggaggtgttcctcctcctccaccaccctttggaggactaggaggaactccaccgcctccacctccagcagggtttcgaggtggagctccagcacctcctcctcctcctggaggtcatggaggtccgccacctcctcctcctagaggacatggaggagtaggtggtccccctccccctcctggtgcaccatctcctccaatgcctcctggaatgcctggtggccctcctcctcctccaggtggaagaggaatgcctgctccacctggcggaagaggacatggccttgctcgctcgttaggcccgacattacaaagtgcagtacgaagatcatctctaaaaccactacattgggtcaaagtaacaagggcaatgcaaggaagcttgtgggcagagctacaaaaacaagtggacgctaatagtcgtgctgaattcgatgtaaatgaattggaatctctatttaccattgctccaaagacaaaagctggccccaaatcagaaggccgtggaaaatctcttgggacaaaatctgataaagttcaactgattgatctaagacgggccaataacacagagatcatgttgacaaaaatcaaaatgccgctccctgatatgatgagtgctgctctagctttggatgattcagttctggatgctgatcaaattgaaaatctcattaaattttgcccaacaaaagaggagatggaacttctaaagaactacagtggggacaaggaagctcttggaaagtgtgagcatttctttctagagttgatgaaggtgccgagggttgaatctaagcttcagatattcgctttcaagattcagtttcagtctcagattagagatgttagaaagaatttgcagactgtgtcatctgcttgtgaggagctcagaagctctgagaagttgaaggttatcatgaagaacattttgttaattgggaatacattaaatcaaggcacaccaagaggccaagctgttggttttcgcttggacagcctcctaaaacttatagacacccgtgccactagtggcagaatgacattaatgcactttctatgtaagtcccttgcagagaagtcaccggaagtaatggattttcatgaggaacttgtcaacttggaagcttcttcaaagttgcaactgaaagcattggcggacgagcagctggcagtcgtaaaggggctggagaaagttgaacaggagctaactgcttcagaaagtgatggtccagtttctgatgttttccgtaagactttaaaggagttcattgattgttccagtgctgatgtacgctccctatcagcattctattctgaagtaggtaaaagcgcagatggacttgctgtttattttggagaagaccctgcaaaatttccttttgagcaagttgctacaacccttctgacctttgtggggttgttccggaaagctcatgacgagaacctcaagcaaattgaggctgaaaagaagaaagcccagaaagaagctgaaaaggaggcaaaccaggacaaaactcctgtaaaatcaaaaaatgggaatgcagataaatcgccaagatcaccatcaaccttctaatgatgtacggcagaacttcacatggtcatcatttcttcctcaacgaatgcccgcctttgctggcctgggcacaatttcgcaagcatgaacagtatacaaatccataaattccttgtggacaaatgcttacaagacaagatggttttggttcaacatctatgcatgtatctcatgacactgtacaaagctcacaccccacacaaaaaactaggttcttctgtacaaaatccatactagatccccccccttctgtctatactagcagcaggagtaggtcaatgtttgtaaagtacaaataggagtgtaggtagtgatcagtagcaggtcagaagcaggattagtgctaccacaggcaggttcctaagcagataaagatgagtatcatagccatgtcctttgactccttgactagagcaattgtgagcttcagtgtttcgcctcattattgtcaagagaaaaaagtggccacctgttgcttatttgcattgtgttgcattctcctccaacaatcgatgtggtttttcatggcacaagtttctggcgtagaaaatttgaaaactgttccactaggactgcaaccatgtgactccatacatggggatcatctcaacatctgatga

SEQ ID NO: 39925 - DNA, 1827 bp, Zea Mays
caagcagacgagaagagagaaaaaaactaaaaaaaatggcgccttcattgacagggaaatgacctgacattgtttcagagctagtccgccgtacaagtacaaggatacagccgcaggcccgcagaggaagaggagagcctactctcctgccatggccgcgccgagtccgctcccccgcttcctgatactcctgctcgccgtaacctcctccgcgtttgccgccgccgcggcaaccggggctccggtggtgggggaggactacgtccgtccgccgccggcgcggtgccaccgcaaggcactccttagcctcttcccttggagcaagaaggaggagtccgccgcctcctccgatccgcagcaggtgcacatttctctagctggagaaaagcacatgagaataacatgggttaccaatgataactctgtcccatctgtggtggactatggaactaaagaaagtacatacacaatgaaatctcaaggagaaagcacatcctacagctacttattgtatagttcaggaaaaattcatcatgttgtcatcggacctcttgaagataacactatttattactaccgatgtggagggcagggtccagaattccaatttaagaccccgccctcccaatttcctttgtcattggctgttgttggtgatcttggtcagactagttggacaacatcaaccctgaatcacattaagcagtgtgagcatgatatgcttttactccctggtgatctatcttatgctgattatatgcaacacttgtgggattccttcggcacattggtggagccacttgctagcaaccggccttggatggtgacagaaggcaaccatgagaaggagcacattccattttttgagtcaggatttcaatcttataatgcacgatggaaaatgccttatgaagagagcggatctagatcaaatttgtactactcttttgaagttgctggtgcacacatcataatgctaggttcatacacagattatgatgatagctcagatcagtatgcttggctaaaggctgatcttgccaaggttgatagaaagaggacaccctggctcattgtgttgttgcacgtaccatggtacaatagcaattgggctcatcagggtgaaggcgacagtatgatggcttcaatggagcctttgctgtacgctgctcatgtggatatggagcgagtctacaattccagacctgatccttgtggcgctgtccacataactatcggcgacggtgggaaccgtgaaggcttggcccgcaggtaccgtaacccgaagccagcgtggtcggtcttcagggaagcgagctttgggcacggcgagctaaagatcgtgaactccacccatgcccactggacctggcacagaaacgacgacgaagagccggtgagaaccgatgacgtgtggataaactctcttgctggttcagggtgcatccaggagggcagccgtgaccgtgagtcgaggaagatcctgatgtctccttgatgcttagcagtatagcttgggcctgcgatgtactgtgtatataatgcgtgctacttgataatctaacacctagtaaaagttaatgcgtcgtgctgcttgcctgcgtgtatactggagactggtttgatctggcgcgtttgctgctcttgttgtgttgtaccactatggatgtttgtagcaaagtgacatacgacggtgttgtaatggactgaagatgaatagatgatgttccagtaaggagtgttttgccgtgtctaggaagatacatcaaaatataaatcactccctccttatcaaaatacagttttttcttgctttcttttttttct

SEQ ID NO: 39926 - DNA, 3067 bp, Zea Mays
cggcttccctgccttccactacactcgcagagtcgcaggcagtcactttgcggcgagacgcttgtgtcgctcctttccaccctcagtctcagtcctctcatgatctcattccccaatcggcgacatttccagcaatttggtagtttcccacgcaggctgcgcgcaagcaaccatcccacccctcttccgcggcagtccactgcctcccggaaaatcccacctcgctccgatccaacccgtccccgcaaccagcgcagccgccgcgacggggtccgactcccggccgatctcccgcctccaccagcgccacgtgttctacctggaagggcatgattctggagtttccttgagaaagggagtaagtgctcaaggatggcctcaagggctatcatcaggaggaggaatgacattctacggcacactcatgtgcctattttgtccccttcattcactagcacaattgggcaaggacaatttgattgtgaggttgatcatcaaagatctgtatgttacttttcaaaggaaagtttagcagattctaatcatgctatggcacattgtactttaaataagcgaaagctttgtcatctcagtagcggtttcgcatggcatccagcttgtgaggtttctcttcctacttatggttctagagcacagaactttgtattcccattgggagtcaggtgtttcctgcagtcagtccgcaccacatcaaacacaactgcacagggtcaagttcatattatggacaagaagagtgaggatgagaagcagaagcaacaaaaaaaggaggcatcccctgaagaatgtgatcaggcagtggaaggattaagcactgcaaaagcgaaagcaaaagctaagctggaggaagtgcaaaagactgaccaatcagtggtacagaaattatgggcaaagcttcttggtattggccctgctttacgaattattgcttcaatgagcagagctgattgggctgcaaagttgaagcattggaaggatgaatttatttctacactgcagcattattggttgggcactaagctactctgggcagatgttagaatctcatcaaggctgttagttaaacttgctagtggaaagagcctcacaagacgagagaggcagcagctcacacgcacaacagcagatctattcaggaggccctaaaaaggaaactgaaagcaaggatggaatatgcaaagtttttacaagacactgctaaagaaatggcgaaggaagttcaaacatcacgcagtggagaaatgaaacagactgctgaagatctggatgagttcttgaataaggttaggaaaggtgggcatgcctccaatgacgaaattttgagctttgcaaagctatttaatgacgagctgactttggataacatgagcagaccacggcttgttaatatgtgtaaatacatggggatccaaccttttggcacagaccactacttgcgattcatgcttcggaagaaactacaagacattaagaatgatgataagatgattcaagctgagggtgtggagtctctttctgaatatgagcttcgacaagcatgtcgtgagcgtgggcaccttggtttgttgtcaacagaggagatgcgtcaacagctcagagactggctggatctatcactcaatcattctgtgccatcgtctcttctaatactctcaagagcttttactgtatctggtaaaatgaaacctgaggaggccgttgtagcaaccttatcttccctgccagatgaagttgtcgatacagttgggactgtactgccttctgaagattctgtttcagagaggaagagaaaattggaatttctggagatgcaggaagagcttatcaaggaagaggagaaaaggcaagagaaagatgacaaggcaaaactggaggagccaaaggctactgaagaagatttggctttgaaggaaatgactgagcctactgttagggagaaagaggaactaaagaaagcaaaaacccacgataagaaagagcagctttgtaatatcagtcaagcattggctgtgcttgcatctgtttcttctgttaccaaggagcgacaagagtttttaagccttgtcaacaaggagatagaactatataataacatgctcgcaaaggagggtacagatggtgaagaagaagccaggagagcgtacaaggctgctagggaggaatcagaccatgctgcagaggcagctgtgggagaaaaggtctcttcagctttgattgatagggttgatgctatgcttcaaaagttagaaaaggagattgatgatgttgatgctcgaattggcaatcgctggcagctgctggatagggactgcgatggcaaggtgactcctgaagaggtagctgcagctgcaaattatctcaaagacaccataggagcagaaggcgtccaggagcttatcagcaatctttctaaagacaacgaagggaatatccttgtggaagacattgtgaagctggcgtcacaaacagaggaaaacaacgaagctgaagaaactgcacgatgatttggaatagcagccacattcttggctcttaaaactcgacggtccattccttttttaaaaggaaccgcacataataaagctagttcctggcagtctcatgcaaaaatcaccaagcaggatggtcattctttttgttctgactggcggctgcagagaaaattgtatcctgctgttgaaagatattcatttatacagttaagtcccagcacaaccgatcgttaggttaggaattctgtccgaaatggcaacttgcatttcaaacgtctgccatgaaaatgagaataaattcggcgggctctacagatttttcatctattgtctgaacaaaagtataggcatcaaataagtatctgggtaagtttatactatttgaataagaatcagctggatttgtttaaattcttaacaagaccgttttagcagtttgactatatggtcaatcaaaacactattttgtattgtatattgtactatgtgcacttttgcagtgagatttaaatatgggtatagagatagataagctactagagatagcctaaatg

SEQ ID NO: 39927 - DNA, 2621 bp, Zea Mays
gcagtgtagccctcctgtccgctgttcggtgcccgctgcccacctccctctcctccttccgacctcgccgcctccctccctaaactctaaaccctccaccagccgaagctactgccgcggccgcagcagaggtcgcgacgacgaacgctgaagaagcgccggcgagggagagtcctttactttttcctatgctgtagcaaaacaagcctataccatcttccaaatatactcgttccgtgccggcggcctcccctcctacgcccctgtcgattcttcaatcttcaccaacgtctgcgcgtagcaggctagcagtcggcacggcttcctcagatctgccggacgacttgttgttcgtcaccgactcaccagcaaccaatgtcggccatcagccggcagcaggggaagctgggcggagggtcattgcggcacggcgtccaggcgtacagcaggcaccagcaacagcccatggcaaacgccgcagatgaccctatggtagatgaagccggagtagaagatgccttcacacatgagatcaccgattatttgtacgtccctagataccatgtgttgagttggatggaaactgtggaggggatggtggccggtgtggcggcgcttccgccggtgtatttgatactgaacagagatcttcttgagacgggatggggatggaagaggctggtgccctacagacctggttatgttgagtggcatgtgttcaagaaataccttggggactatttcgaccataatcgtgaagcttttctttgtgccgagcagaagcctgatccatttggatggattattgctgaaaagagtgccctgattgctgcagccaaattgtgcctcaagatggagaaggcacttctcaggtactgtgctagctttctcactcctgacgacaaaaggctgatcctcgggatcaaggaccaggcaaagcaaatgatccaatcagaggtgcttcaagcaatggttcaaatgggtgtccttgttcctactggagatatgactgttgtcagaagaaccgctcaatttttccttaatagctttcaagagtgcctaacagcacaaaggaaggagagagaaatggcaaccgcagaactgggtttcaaaaagcaattaactaaggaggagaagtttgaaaagaggaagcagagacttgctacaatcggagaggatcttttggcgattgctgctgatcaaccatttcgcttccctgccacatttacatttgtggtcagagcattctcagttctagatggtactgggaaaggccttcatcctaggtttcatattacagagattgctaagccctgagtactttttgcattactagcatctgaatacttattcaaaaacacacaaagcttgcacatcttcacttattatgtactgtctatattttcatcttgaacttttctggtactgacttgaaatgtctattaaatttgctagaaatgccaaggaattgctaagatttaatgacgctggtgttgaaatagttgtgaaggtgtgtggagagacatgtgtattcctcctatgacgaattcctcaggctccatgaaggtaagcctgtcttaatgggcttgattgttgaacctgacttagtacttttatccatgtcacgacattgaaccagacagtcactcatgtccttaggatattaacggtatacatcaacaattcattctattttaattgcttgcaaaacttttttggcccttcaaatgagttccacgcatcaagaagtcaagattccaggaggcctaaaataggagaggagggcgcagcttgattcaatccatgtcaagtcaaaggctgctgcgaagtttgcacatgcaagtagaatttagatggtttattcaatttcggttctaatgcttctgacagcagttgtatcagtcctcttgttcagcttacattgtacctacactcagttggaaaacttcaaccacactgcaacaaggtttataaaaggtttgctatcaggaaaaacaaatttatgggctcaaacaaagtgtgatagtgaaagtcattttgcttccagcttaagaaccaagccaagaaaacagatatcaactgtgacgccacactcaaaagcttgtttggtgggagggacaaggttgggatgctggagatctccaagcttttgagtcgtggcttcccgaaaatctccaagcttttgtggtccatggagccagggatggctctttggtaaaagacttcgttgtggatggcctcttttatggtccatgttaagtcccaagtcccactaggtggttaagcagaaaaatcttgtgatggcattaagactttcagactttgtttttgggtctgatgcatgtaaaaaggattcccagtgtttctgttgctcttgcgatcctgtgaggacacatatgagagaaatatttagtttgttgatggcaaatcttgtcttatgttcatgtctgtgcctatctgatcaagcgttatgatatgatcccatgcgtggtactgtgttctttagagatgtacttaattatgtttctcttgcatttcatattgctttgtctaattgttaccgcaaattaagattttattataattccaatttgatatgcctcatcataaccatggttact

SEQ ID NO: 39928 - DNA, 277 bp, Zea Mays
cgcatccaccccaatatccacccatgacatacccacctcaattctcatacccttatatatacacgcccacaccatatgtcccaaatcaaatatgggacatactgtcatacccttacaggttgccaccacatctcgcttggagggacgcaacaagcatatgtgtttaacaggttaaccccacaagtacaagaccggttaagtctccctcagtctggtcagcatgaacaactccaacaagatagctggaatactcgccaaaaaggtagatcaattcggc

SEQ ID NO: 39929 - DNA, 1555 bp, Zea Mays
  misc_feature (1554)..(1555): n is a, c, g, or t
ctaatcataaaaatcgaagacgtttgattcccgcaccacgagtccacggcacaaggaaatgaaacaatccacgcggaacgccgccgccgccattcccatggttttccatgctcggttgcgagccagcaattccatttcagtgtcctccctcgtctcgagaccttgccccatccagcccaacgctccgtccatcaactgaatagcttggcggtgtaaccctgtcgtgtgcgatgagctcctcgccgttgatcaccgccgcggcgtcggctgccgtggtggcgctggctgtcgccaaccgcgtgctctacaagctcgcgcttgtgcctctcaaggcgtaccctttcttcctcgcccagctcaccaccttcgggtacgttgccgtgtacttctcgatgctctacacgaggtaccgcactgggttggtgactagagacatgctggcgctccccaagcaccggttcgtcgctatcggtttgctggaggcacttggagtctttgctggcatgtctgctggagctatgctaccagggcctgcgattcctatactgtcccagtcattcttggtctggcagcttatcttctctgccctgcttttagggaggacatattcggccagacaagtcattggttgcttcctagtagtttctggtgtgattcttgctgttgcaagtggagcggatgatggccagcttctttcagatgtaaagttaatttggccagcactcatgatcgcttcatcagcatttcacgctggtgcatctattctgaaggaagctgttttcattgatggtgcaaaacgtcttaaggggaagcggccagacatatttgtggtcaattcatttggatctggatttcagactgcggaggagctccattcctgcctttgctgtttatagtggtgaatatggcattcaatgtctctctcctcaatttggtgaagatgtcatctgccattgtggcttcacttacagcaacatcagcaggtcctttattgttttttgacccttgattaccccgcctgcattttcatcttctttcttggtgttattgctggtgggtagaccgaatggaggaatataaccatacaatactaattatgcttgttttgaattttagtgccaatatcgatctatattctttcacttcctttgccctacatccctcatggcacggaattaagcacgtctttcatcattggtgccgtgatattgctgatgggcctgattctgtataaccttcctcaatcgtcactgaaacaattgaaggctgattgaaggcgataaagcaccctagactgtcagggattaggttttagtggcggcgacggttcctcgaccgtgcgagcggcggcgatctcaggggcgagtgagggcaggggctccccccgaggcgcgtgatcggcggcggcaacgctcccccggatcgagcgacggcgatgccctcgaggcggatgagcagcgacgcaccctaggttcggtggtgacggtggttgcatgaagcgcggtaggcttcgacagtagcggtggcatccatgagagacatgggtggcttcgnn

SEQ ID NO: 39930 - DNA, 1942 bp, Zea Mays
tgggatcgtcccctccgccgttgcggcgagcaggcagcgagcgccgcagcccgcagcccgcagccaaacgccgccaggccggggaaggggaacggtggaagagaagtggagcaccagcgaaccgcatatgctcggggttcttcgtcgcgcagccctcgccgcagcgtcatcgccggcggcggacctccgacagtttcagtgtgcttaccatagaagcagtgagagattatcacctatccgagccattacaaaatatctgcaaaatttctcgactactttttgttgcacagagaagaccaagaagtttcatatggtcttaattgggctattgctggaaaaggtgtcattgtgaaagataaggtcctccataacttggaaacatctgagcttcagaaaggtggcgctacttaccctgactttttgtctggtataccacttcatgttagaggagatgttattggtggtgtccctggtgtttctaaagctcaatttgcaaagcttctaaaactgtcctggtgcaacaatgagagctgtctcactgagtcatcaggtcacgggttcgaagtagtctctccgtatttgcgggggaaggcttgcttcggtttatccctatcctagacgtcacatatgggagcctccaacagtggatctacctttttttatctccctgtttgttgacagactacttgcttgcataggtgacgttccatctttcatccatctcgtgtctatatgttcaagatggcgccattggttcctcagcagaatgtgatgcaaaggttcgggtcattagtgataatccctctgctgttatgttactgtcgaatgtcctttggaaaataccagatcgtgcgatttcccatgacacatcccctttgactatatatgctaccagttcaataagtaacaacgttaagactgttcttggttctggaacacaatatgctaatggatttgctgtggcggatattgaacgatcatctctaatcctatgcggtaaagcatttgctgattcagctatcgtgaaagatgcacttactgctatgacagccccaatattgtctgcaagaggaggcctccctgttccaggatggattctgaactttggtggttctactgtattattgtttgccccagtggaaatcatgatgtcctgcgtagaaatccacaatgctctattgtccattgactgtggtgcagtcatatcttccaaggggtctactgtgcttttcccaacaaaggcaagcagggagcagaaactgcttaccaaaccaactgcagtaattatcgtatcatctgatagctctggcgccataccatctgtatgtaagctctctcctggccaggctgcctaccatttcttggctggatatcacgatggaaaatttgtcccagcatacaacagagccccctctcctgctgacccacttgcacttgcaagttctttattctcacatttgaaagaagatgatacaccatcgtatctgatcaacgctaagcactctggaaagtacattgacggcaatgggtttatgaaattattaaagctggcactatctcacgatcttcctgacatcaaaactgaaggctctagagttggggaactcaaggggaagtacaggagctttctatccagcaagtttggccaatgtttacccgaggaattctctttttaggagatacaccctgaggttgcaatgaacatgtatatttactggcataggtttacattttggtttgaaaaggtgtcagtattcccattctgtctcagtttcaatgtaatactctattaccttacattgcatctttccgcctcctggtgtttggatatactgacgtaacgacaatgtagctagtacctacatgcatgaattgtcttgtgcactccgcttcagtcaaattttgttaagcagcagaaaattggaaactctcagtatacatg

SEQ ID NO: 39931 - DNA, 3392 bp, Zea Mays
cggacgctccgagggcaagtggtgccggatttttgtcagtctcctccccacctagtctcttgtatccaatacaacctttgccttcattgccgcagttccgtttcacatcccatcctctccatttccaccccctcccatggcctgatttccgagcccccccgccattcgccccgcccccgaatccgccgtctcatcgaacgcccggtgccgtggggagaagcgaggctccggttctttgtttcttggcggccgaaatataagggaatatgattgacgatgaggaaagccaagggattaagaaggtgcatttcagggattcgttctcccagcaccctatagttacctacaagaggcgtcggcagcagaagccacagacgcagcagcaattacggcaaccaccgccatccctacagcagcatccggagccacagctacaggtgaagctggagccaaagactgaagatgtgccggaacagcagtttccgatattgagagcaagggatattggctgggagcatgctgtggatcttgatggaaataaaagacggtggcaatgcaagttctgttctctatgtcgaagtggtggtgtaactactttgaaggctcatctcattgatgacagctgcccaaacgttccaaaggaaatttcaaagaaagtatcaaacttcattgaagagaaaagagcaacacgccttcttttgaataattatgtctttaatgttgatgaggacttcaacacaatacttcaagaagggactgtagaatatgtaaatgaacaacaaccttcaagaaaggctacatatgtgcaaacattatctaagtgtgctattaatgagatagcagcgggaagcaagcaatgtggtgcagaatgtagtggccagccagttgagcattgtgatcagcctgaagagcagtgcacaatggattatggcaggatggatcgattgactagcaataagaaccagattttggacaagaatactgagaattcaaaaaatacaaagatgttgaaaccatgccggaaaagtgagtttaacacaaggaagcacataattattgttgataaaattgggaggcattggaagtgtagatactgtggcatggatgtgtatggtaaaaagtttcagctccattatcatctagctggtgcatttcgtcaggctaagtgtccaaatgttcctagagaagtttttgcaaaagcaagacagcatgttctgacaaagaaaatgctaaaaaagagtaaagctgagcaacagattccttctagtccacatattcttgcccaatctggtgaagaacggcagaacaatgatccattttgtgggaatcagtctcaactgtcaataaacaatgaacctagggagccaatgatggaaggacctcatgacaatggattatgtggtgacacaaaccagttggaggaacaaaaaagtggctttggaattagtgactgctggaggtatgttttggatggacaaatgcacttgcctgatgtacaggagggtgctggaattgggacatgcatccgtgatgctcttctctatggttgtgctgaatttggcacagtacctgacaaaatggaaatggattgtgataaaacagtggatgcgaacactgctaagtgccagaatattcttaaggatgttttaagatcggagaactttgctttgttgtgcagtgtactctgcagaactgtacatcaagatggggaaagaactagatattttgattttggtgtgattgattcaaggatgaaaaatggaaattatgggcctgaacctgaattattcgtccatgatctgaaactgttatgggaagatcttaaagtggctggtcaagatattgttcacctagcaaataatctatcaagcctcacagaggactcctatgaaaagctggttggaagagagagaggatcagatgatgatgagctcaatgaagctgtggtggccaggtctgaaccgaaaaacctagttcaaccaaatgcatcggtacccttgacctcacaaggctttaaccaattattggatcaacccgggccttctgatccttctgttgtatacaaggacagtatctgcaaccgatgtgggaaagtagcaggagctggtagcgttctcaaatgttacaggtgcatgctaccttgccacatttcatgcattgaggctactggttcacccatttcaactggaaggtggtgttgtaaaaactgcagcgctggcactaaggaaccagttgaaggagacatggtcttagcccatggcaatccaaattgcttgcatgaaagttgtgtcgtctgcgacagacttgcggcctgcaggtctccaaaatgtgataactcaagagcattggttatttccagcgtggacccagagattgatacatgttactcatgcaagatatgtggaggcaccgaagaggatgagaagaggttcttgatatgcggcaacgtcctctgccgatacatgtactaccacattgggtgcctcaagtccatgcagatctctaccagtgtagagaggggcagcccgtgctggtactgcccgtcttgcctttgccgagtttgtctgtgtgacaaagacgacgacctgaccattctgtgcgatggttgcgacgaggcttaccatatctactgcataacacctcgccatacttcaatacccaaggggcagtggtattgctcatcgtgcagcgtggagagggcagaagaggggatgagacagtacgagaggaggacgctgaagctccaccggaaggaggatgctggactacaaagttggaattttgatggtgtggacctgctgctatctgccgcggagcagctcaggatagatgagcagctggagactcgtacagattagcgtgttgcacctacactctggtccttttgccgtgctaaagtgagtttgttgtttgaagagcagaggcctgcctcaggatcagagctcgggcaagggcagttaacaaaatttgctgcagtcctctcacgaactgatgaaaatacaaggatcttcaaacagcattcgccttttgagatgcgtgctatatgataacatgctgtaggatatttgtttcgtttatctgtctttttgctttgttgcacttgcacctgcttgagaagatacttaactcgatacaccttactggtatccaaactgcaagggatgttcttaaattcaaggaaaatctccaatttgagagagcaagccgtctttgaaaactgcctcaggtttttgttgaggctgttattatgctttgtggcctgaattattttagacatacaaacttattgcttcacgaccttcttctcaagtcggtctagatacttcttggggcaacgtcgaatgctatgtccttcatccttgcagtagtagtaaacactatttgctttgagg

SEQ ID NO: 39932 - DNA, 683 bp, Zea Mays
cgtacacgtccagcagctttgcatgcgcactagctattattcacacactccgagtccgagctcgagctgaccaacagcaacgcagcaagctagctagaggtataggtacagagcaccagagtagcgcgcggcacgacgcgatgatgaagcagagaggtggcaatggcacaggtgcttctggagcggcgacggcggtgcttctacttgccctgctggttctcgctgcctcgcaggcggacggcgctgccgcggcacgccgtcttggagttggggtcgctgacgatgtgattccgcataataatggctgcaccagtgacccaaacagtttggggccgccctgccacggccaaagcccgcccggccgtaagctactagcggcggagcaggcagatccgtcacctgcgacagggaagctagtctagaagctaggagccacagctccatgattatttaccccatgcatatggcatatgcttggcgaacaattatgtcggtttttataatttcggacgaatctttcgttggttgctatagatatttagtactgtcttgttgtatgtgcctcatgtaagtaacataaatcgtattaggaaggatgtagttagcacttaaaagtatatatatacactaagcttgtaagatttttcagagaacaaaataacaaagttcttcgcttatcaaag

SEQ ID NO: 39933 - DNA, 2875 bp, Zea Mays
tttctttcctcctggcagagtagagtctgcccaccaccatctccattctccactacgtggtccgtgcctcccccaaccgcccactcccctccttcccctcctcgtccttcccgctcctcatgccctggcgacgccattggtagcttcgcttcgtctgttggtcggagcgcaggggaagcgagaggggggagggcgagggcgctaggaggggagggaggagtccgacggagcagtggcaagatgttcgacagcttgctcaactccaagttctacaacaaatgtaagcacgccttcaaatgcatccggacgcggatggctctgataaggcggaagaagcacgccatgatccggttcctgaagaaggacgtcgccgacctcctcgccaatggcctcgacacccacgccttccgaaggggattgccccccagaattcagggaagctgtctcaaccctgatatttgctgctgctcgctatcctgatttacctgaactttgtgacctaaggcacatattcacagaaagatatggaaattttgttgagcattttgttagccaggagttcattcggaaacttgacagtacagagttcactaatgaggaaaggttccaagtcatgcaaagtgttgctgaagaattatccgtcagttttgatgccaaggaattggaactcaagttatgggcctcactacaaacagaacatgatatgcttgagaagggttcaaggaagccagcagaactagcaatgccttcatcgagcaagcagatatgtgtcgagaatgcttcatgtgaagaacaagaggatatccttgagaagagtttgacaaggccaacagaaccagcaatgtctttatttgacaagacaaagtacaatggggatgctccatgtgaaagaaaaaataaggatatgcttgagaattactcaaccaagcccatagaactagcaactgcttcatccaacaagcagaaggttactgagaatgttccaggtaaaagaaactatgatgctgaacctgcacaccataccgagaaagtggagatacagttggtccaaaaagatattcagtctgttgctgatgcacatcatacaattgatgagaattcgaggaagcagcaaccttatgtgtctgatgagaaggaacatttgcagaaaccagtgtctcctgtggacactaacaggacccaaaaagatgttcagaagcttaacagaagagctgtccgccatttggaaaaggagctgatggaggcagtggaacttgatctcaacggcctaccaaaatttggatttggcgcagtcagatttcccgaagcagaaggcaacaaaacagttcaactaaatgtcaagccaaatgaggccgtgagagatttccatattgaaaaagagaatgatgaagtccttcattgttcacgtttgcctggtggttctgaacacaatgggggacatgcagattcagggctaagagctcagggcctagagaatcaaggacatccagtgagtcctcttagtggtaacactagaaaaaaggctccttacactaagctgaatgctgtaaacataaagaatcctactgagaaacaagcaaacaatggtttcttgcatgataaaccgcaacatttagctgatctgggatacccggtgcagaaaggacaaggagacccagagagggcacttactatgctgcctccttatgttgaaccaaagtctaacatgcaacctgtgaatgatgatcctgaaaagcaaactccaagtggttacagaaagcccaacatccctggacaaactgatcacttggaaaacaaaaatgtgcttcgacctgtttctgtcagaaggagaactgcaaagctgccagcacctgttgatgcttatgttgaggtgcctaacaatgcgaaggtcacaagccaaacacccaaaagtcacagaagccactcaagcaggaggaatggtgctaaagatgaccagaaccggaaatgtaatgggactgatgatgttggtagcgagacgaatgctcagataactccaagtagccaatcaaagcacgtaggcaggaggaatggagctttaaaccacaagaacaactctggcaggttgatgcagcgtatgcaacctgaagcagctgagactgctattgattgtggtaatctcttgcctcgaaatgcaaatggacagatgcgacacaacagcgggcgcggtggagacatggatgaggaggaaaggatgatggacaagcttttgatgcactatagcaagaaaggttcggatctgaccaacaatgaaacacatacagatgctgcgcagaaggtttccttgcatcccacgggtagagctatctcgctaccacctgaatctgttggcccgagcaaagatgcgaaggttcctgctcgatgcacatcacttcagccggaaggtcctaggagtgcgcatgttcacccaaaaatgccagacttcgatgaattggctgctcgggtcaaggctctgaggaaggcttgaggtggcataacatgatctctggcttgtgtacacgttctttcagctgaagagttgatccttggttgacagttccctgcaagacacaaccacacagagtcgtgctttgatgtgcagttcctattagagattaaacagatttgtgtatgagtttactcttttttttgtctgttagacgttttttacagtgctcttgttataggttttacttcaaaccaggtgtttgtctagggtgtttgtctagaataggagcactggtttcagttaacacgatatatataataggattgatagggatcccattgctttttctttatttgattggtagggatttgattggatataatgtacctggaaatcgcattggctaaaatgtgtaaatgatgataaatt

SEQ ID NO: 39934 - DNA, 3514 bp, Zea Mays
gttacttttaaccccttccatatgaaaccgttggatctggattagatgctctggatagtttgattgcacgcttgcaccaaaatgagtgattgcacagaatatgtcctccttataaggccttgttcggttattcctattatacatagatttgatgggactgaaaaaaatttaaaagaacttttacttatttgggatttaaacccatcaaatctcactcaatccacatggattgagccagagaccttatgccaatgccatgcgcgcactgccatgcccactgaagcaacgagcctctctaactcccagcccgtcgccggcgctgccttcctctaccgtctctctcatccatccctctctgccctcctcctatgcccccctccccaatgcctccgcggcggagctccgccaagcgacaagatttgtcccccctcccctgccaacgcctccgttgagcatcggacgcgaatctcctcaccgtccgcagcttgttcggccgtcgactacgtcccctcccgggactcatactagtggggaaatcatgatgtccgaactactagtcggtggctaaatgttgtgtgatcatcttgttttgtattgatcagggtgtctgacgatgtatttgaagcacctcaacaaaagctggagtgaatttgaaccactaaataattagaaaggtcaccctgctgcttgatgtctccctcatgtaacaccttaacgtttcttctttgcccctcccctgttttcttttgcttcccctgcaacctgtcagacaccgatcaagcaggtagcatgtagcctatgtaatccctggtcttttaggtctggcaccattcataccctttcccaaacgtaaaataaggtgggattgcacttgcacctaggagtggtaatgacctctaaattttatactataaaatttaagaatcggatcgggctctatttctattcatttttgaactaaaactaattaagggctcaaacaaattgtgaaggaacatgtggatcattcatttgagggctcaaacaaaaaatcatttgggatccaagtttttatttctctgggtcattcatttgacacaaatacctgtattttggagcaagaaaacgtggaacaaaaatgataacctactagaattacctaatgtgtacccacattcacctctactatcatatcgtcagtggagtgcaacatggttgtgtgttccgttctgcggtttaaacatagattgagtttcacttaatggttcatgattctagttgtcatgtggaattcggcgcctaagcagttcatgtcttgctcttctctactatgtactctagtacttgtcatggaacataactaatcaatctttattaaaatgttgtgaccaatatatattttaattaagttgggtttgctactttatattttgattgacaccttattcgtggttggatggctgatatgagggcgcctttacagtgcaatggagaccttaaagtttgggattagtagatggtttggtccttaagcaagatgtcctcggtcaataccgatggaaactctggttcctacagcagcaaatcagcctaccaaactttttcttggggactatcaaatttgcccccaggagaagaacttgatcgcatgtttggacaggaccccctggttcttccggctattgagggaagacagtgtgggatggatcctggatgactagcattacatctatcatacatttgtccagttctctggagttttttatcctttgttttgtaccttcctatgtttctccatttgtcaaggcctaaattccatctttagttacttctggaaatttttctcccatttatttgattccgatttctggataaaagttgctccttggtaatcatgaggagggctctgaaaagatccttgctcagatggtcgccaaggattgtacaatctcaagaattttgtcagtgcttatggttgatttgggctcttctaccagggggtagttgcagcagtcgctagccaagaagatcattatagtttgctgctttataaggtgacacaagggttcctgggtttctcagtctttgactgagagcttctttgtgcaataccatggtgcggtttttcctcaccggccgagtatctgtttttgaaggtagggtttgtacttttcttcttttttaacaaagagataaattgctcgcctttgtgttccagaagaaaaatctcagcaattgtcaaacttcagtttttagttaaggttaatagataccaaacaaaggatactatactattgtttaatacatcgtatattatttggctagtgccagcctttgggctatagaatcctctaccaaataagtagcagatttatttggatggaaggagtgtatctcttattaaatacatacgacaaacatttaaggaacgaacgtcacaaggttatcaatagtaagcttgactgaccttgagttgaacaaaaactttcatgaagacgtatctttggcaatgaattggacaggtaaggttcaagaacacttcagctaaataaatgagtagagttaacatatatctttctcaagggatgggggactaggggagtcactagcattgattgtgcaccttgaatccctttcttttcttatataaggaggtatcctctacactaaactacgaacaagtatcagagacactctctgtcaggtgtctgcaatggacaacctcaaaacccattctgaatatgccgatcaacctcaggggccacaagcaaatgccgtttctttcgctttaccaacaggtcaggtcttagacttagatagtcatatgattggccaacagcacacgaatctgtcatcattctggttctcccttgagcagcacaggctgcagttggatcaggcccttcaactccataaccaacagttgcaggtgtcactgcagcagcaaatatctatgcagaactcaactctactgaaccttgtggaatctatgacaagagatgtgctgatgcaaaagaatgatgagatagccagcctgcgagtagagttgcagaggaaccaagaggatctagaaacaacactgcatgacagagatgagtggatgaagatgctccaagttatagtgaagcatcgagcatggcgaggacagcattggagacagcacagcccaatctgatctgcaaggtctgcaactctggtaatgccggcgtacttatgttgccatgccaacacctctgtgcatgtaagccgtgcgtagcctggcttgcgacatgtcctatctgtggtgctgtgaagactgatgctatcgaggctcgatttgtttataagaagtaaaaacgccaaagcagcaatccgaattcgtttataagagcatgtcagctttcctttttttcgtgttaggtgttataggctgtagccttgttctgttatgcattctggtataatgttctggtagtcttcatgccgatgccatgtttctggattctcaaaatgttttgatatagttgccatgttgtcttcggttactatatttttc

SEQ ID NO: 39935 - DNA, 851 bp, Zea Mays
gaattcgctactgttgaagctgctcagaaggctcttgaatttgttggtcatgacctgatgggacggcctctaaggattgacatggctaccgagaggggtgcatacactcctagcagcgggaaggacaacggttctttcaagaagttcgctccaaggtcaggcaacaccgtgtttattaagggctttgacacctctggtggagaggaccagatccgcaccgctcttgaagagcattttggatcatgtggagatatcacccggatttcaattccaaaggattatgacactggtaatggcgtacatggatttcaaggacccagattccttgaataaagcatacgagttgaatggaaccgaccttggtggctacagcttgtatgtcgatgaagccaagccgagacctgataacagcggtggcttcagtggtgacaggggtggtggcagagggaggagtggcggcttcagtggtggcagaggagggaggagtgacagggggcgtggtggtagccgtgggcgtggatttggaggccgtggtggaaggggtgacagaggccgtggtggaaggggtacgcctttcagacagaccgctggtacagctagtacaggaaagaagaccacctttggtgatgacgattgaagatccatggctggctattatagtgaaaaacgcaaactatattgtaccgttcagacctattgttatctgaggctgtactgcttttttgcttgataattcgacaattgtttttaccatttttaacatttggtgctatcaaagacatgactttttaagtttttataatatgagtagcggcaagttcaaatgttgttggtctttgaatttctgtgat

SEQ ID NO: 39936 - DNA, 1238 bp, Zea Mays
gcggctgccgtcgtcgagcaagaccaagagataccttaatgaaggcagtgatggtgacaatgctccagaaacaagcagtgatgtaagcaatgagagtgacaatgacaatgacaatgaaaggtctattggaagaacaacccaatgtttagtagaaaatatttgcaccgatcaagaaaggttgtccagtgatgactgtgattccagtaaccaggaacctccccctgttttccaatatatggagcatgatgcaccatatggaagacaaccattagcagatatgatttcagtatttgcatgtaagtttcctgatctaaatacatacaagagctgtgatcttctcccgtccagttggatctctgtagcctggtatcccatataccggataccaacaggacctacgctacaagatctagatgcttgctttttaacattccattcattgtcaacaacacctgatggtacgataagcggttgtcctgagacaaataacttacataacagtaaagttgcttctgttcctgggaagatcacactgcctctgatcggcctagcatcttacaaattaaatggttccttgtggacgtcaaatcagcaccatgagcagcagttgactacgtcgcttctgaaagctgctgatgactggctttgccagcggcaagtagatcacccagattaccgcttcttcctcacacactaaattggatgtccatccaaactacctacctactgaacatcacagctcgatgcccactattttattcaatgaacttacattatcactttatatagtccacaatcacaagtaccagtatgctctgtaatatcatttttggggcttagtttatgttagtcccatattggtatctaggcaggattagttggtgactgttttggggttgtactgtaggaaccaattagacatagatcacctatattacgttcagtaccaattgcgggtgtgggtgatctgcaatcgggctaagtaggagattgattggcaatatacatttggcgtacttcaaaggcggttctaggatatattgatgatggcgataaaaatatttttctacttccctctgtgtgtttgatatattgtaacccatgtagtgctgctgctggattgttattatatgtattaccccgagaacgtatcatgtgttaccacaggttaggctgtgtgacatcatgtgatgaaattttggtttgaaatgaaattggcactaaggtggttggacttt

SEQ ID NO: 39937 - DNA, 880 bp, Zea Mays
tatccttccatggagtaggcttgtcagcaactgaagaaacaaagtatggggatattacttgtcataccaagaatgctgatgagggaagggagctattcacaaatactttgtacaactcagttgttaatcagtacaatgtcctcaaatctgctatctttagagatcgtggagcagctgtatcaaacaatgccatctcactgtcacaaccatggcgatgaatgtagctttcccagttatggtcaaccctgatctgaacttcgtttccttgtcattctactgtttgcttgattgacaaatactagtatggtccagattcgatactgaagttaccttttcagaagaacaggtgaactgcaattgtgcaatttttctgggaaaaactcttgaagtttaatctttctgatatcactggactttaccaatcatggtggagcttattactctaatgcagatcctcgctaagatgtctggctggtcaagggtgattggtgattctgcagatagggatcctcgtaacattgcatgccgtcgtccgcaaattactgctccctcaggttgttcagtaatgtgctggttgggcactgaggaatccatcaggttgcatccttttgtctagacgtcgatttgtgttgttgaagtggtaaacattttcatcctgggctgtatcgtcatcatgtatagataggctcgagtctctctcttttttttttggctccacaattttttggagatataaaagcggcaggagttatgacatgcccacagtcggccctccttgtagaaatcctttggatgtaacctgtctctttcttatatacatactgaaagtcaaggcagatatcccgtgtttcgagtacgtggctccgtgactacccgcgtc

SEQ ID NO: 39938 - DNA, 419 bp, Zea Mays
gcccatcgttttccctgtcttctactcgcatggttttctgctcgtcggtgcgtcctctcggctcgctcggctttaattcccaatcgcgtcgtctattccaccggttagcgtcgtctattccaccggttagcgtcgtcgcgtcgcgggtgcagctctatatacatcaccctcgtgtgtcgtcgtcgttccgcgcgtcagcaaaaaaaaacccaagaatcgggtgaagacgaagctagcagcgcgatattccctaagcgctcgacaaattgcctgaatcggaaaagcgctaccgatctcgtggttcgtgtcagctgtggaaacggtaagctgataaattatttagaatggttcgatcgttaaataaattaatgtactagtgtgatgctcattagggtgctcgataaattgcgtaagtcacg

SEQ ID NO: 39939 - DNA, 311 bp, Zea Mays
cagattcatccgcgcggccatcagttcatgccgttatatgaagcaacaagagctagccgaagttttctacacactacactgctgaactgaatgaactgaggcggcctagaaagctaacatggagcgtaatatagcggtgatctcgtccctgtagaagtgcagaatgaagcttcaaggtcatgttgcaatcggccacgccaactgcaccgttgctccatccataaatattagtcgttcttattttttattagtcatttaaccacatttttaaatgtaactatttttatctgtcataattgggatcatatata

SEQ ID NO: 39940 - DNA, 1843 bp, Zea Mays
aggcccggccctcggcttgatcccagcctttcttctcccgttcacagttcaccccacttgctctctttctcccaagtagcaacgaccgcgcgtcctccgccgccgcactaaaccctactccatgtacccaggtctgcgtcgggcccttgccggcgatgagaacccgtcagactgttcggttcaagaatgagctggaacgtaacattactataaagctgggttacgctaatgcaaaaatctacaaatgtgaggatgacagatgtccgcgaccaatgtgctacaaggcctatggaagcggaaaagaagatagccctctatgtgatgtgcctggatttgaaaacactagaatgaaactcctgagacatgtttcttttgttgattgcccgggacacgacattctcatggctacaatgcttaatggagctgctatcatggatggagctcttcttttgatcgcagcaaatgaaagttgtccacagccccagacatcagagcatcttgctgctgttgaaatcatgcgtcttcaacatatcatcattctgcagaacaagatcgatcttatccaggaaagcgcagcgatgaatcagcatgaagcaatccaaaaattcatccagggaacaatagctgaaggtgcacctgtggtgcctatatccgcccagctgaaatacaacattgatgttatctgtgaataccttgtgaagaaaatccccatccctgaaaggaactttacctcacctcccaacatgattgttattcgctcctttgatgttaacaagcctggttcagaggtcgatgaaatcaggggtggtgtagctggtggtagtattctcagggtatgtacatcttagtcatggcatggcgctacaatctgttttccactgtgtttaatgtgaacaaaacatcaatggtatttttttacagggagtcctgagggtgaaccagaagattgaagttcgccctggcattgtcatgaaagatgagactggaaacatcaagtgcaccccaatctactcaaggattgtctcactgtacgctgagcagaatgaactccaatttgctgtcccaggagggcttattggtgtgggaacaaccatggacccaactctaacacgtgctgacagactggttggccaggttcttggtgaagtaggttcactacctgatgtttacgtagagcttgagatcaatttcttcctactccggaggctgttgggtgtcgaagctcaccaagggtgagatcctcatgcttaacatagggtccatgtccacaggcgcccgtgtgctcgctgttaagaacgatcttgccaagctacagctcaccgcgcctgtctgcacgagccgaggagagaaggttgctctgagccgtcgcgttgagaagcattggcgcctcatcggatggggccagatccaggcaggtacaacacttgaagtaccagcgtgcccggtgtaaagcgtcatactcagacgtgagctgaagttgtgtgcaaaagagaaaaaaaaatgagtttgttgttagtcctgtccctgcgttactgcagatccaaagtcctgggtcactctaattttattttgtttcgttcaattttggaggccgtttgcattatgattcctgtgaacattaccaggtcggaaaccagtattgtgaacattatgagtacggcatatggatcagcatttgccaatttcttctttcgcaccaaaatttagacttgccttcatatggtttgtgcctcaagaagtggctgtatgcctgtatatataagactgtctgcaactctctaaatttccctcctatagcgcactatacagccaccttattcaggttctattctctatttttttc

SEQ ID NO: 39941 - DNA, 2027 bp, Zea Mays
ggcacctcgagattcgagcgctgctcccgtactacttactactcgagagtcgagactgctttgttttttttgttgatggaaaagaaccagaagggtagtactcgagagcacgaatcgccacgtccgccagaggatgagcttgagcagctccaactccaacgcgtgacaaaacaaacagaaccgtcacaaaaataaataaaccaaacggggcctaaataaaaagtcgtcgacaaaaatttggcagccataggccatagcccccgctgccccccgggcgcagatcttttctgggcttctggctcccctctcccgccgatcacgccgcctcacctcgccgggcggcgtgatggcgacttccggggccggcgaccacgggcagggccagggccaggggcacggccgcttcgcgtcgtccctgacggcgcgctactcggactgggtgctggagacgctggacgagctcccagggagcttcctgctcacggaccccgccctgccgggccaccccatcgtgtacgcttcccggggcctcgccgcgctcaccggctacgcgccgcgcgacgtgctgggccgcaacgcgcgcctcttccagggcgccgccaccgaccgcgccaccgtcgccggcgtccgcgaggccgtccgcgcgcaccgcccgcaccaggccgccatcctcaactaccgccgcgacggcgccccgcactgggtcctcctccacctcgcccccctattccacgcccgcgacggcaccctgctccacttcctcgccgtccaggtgcccatcgcccccgccgccgtcgcgcgcggggcgacgtgccacacgacggggcatctgctagccgcgtgccgtgacgaggccagcagggtcgcggaggatttcccctgcgccacccacgcgggcaaggtgtttgtcgatatggacaagagagggctggagaccgaggaaccacgtgtacctagcgatagtgagaaagatatggcaataagaagagatgtgactcgattggcatcccagcactcagttcgtcgttaaaactctctctcggactgactcccgcttgcctaacatgccaattatttatgctagtgatgcttttacatcattaacaggttactcaagagaagaaatattgggctgtaactgcaaagtcttaaatgggccaggcactagcttggaggttttagaggagataaatcagcatatttgttctgagcaggcatgcacggtggatctactgagttacagatggaagttcattctgtgatcatctacatgtatctcctatccgagatgcttcgggcaaggttcgcttacatctttctcaggtcttccctgaaagaaactgtctctcaaatgcattaaacaatcactacacaattgctatgtttgtgtgctatgaagctctaaactacggaacagaatagatttgcagtttgctatcagtcagatattccgctcttgtacaaccatcatggggattttttttttcccgactgacttcatacctacgcaggtggcctttcatatctgggttcaccttgacatgggtgcaaagcacgattttagtgggctgacccccgagaaatggctgcttggcgctgttggtgcggtgagggttgctgtgagaggcttgtcggcgtcaggtagcctgttgagaccatcccaatagcagttttagtctcctcgccatttcatgaccacggcgaccggccttccacgatgtacattgctgcttgctattctgtgtaaagcaactgcttagcatgacaaagtaaatgagttcgttttgaaggaaaatccatggtaaatacaagatgttgctgtgactatataaccaggtggggtgaagtaaagaaaaaggaaatagaagctgctgttaggatttatgggcttggcccaattaagaatttctaataattccaggaaaatctcaaaagcccatataagtggatggcaaagggataggtggaaccaatagcatcatattgctagctcttgtggagtagagctagcttaaatatggaagcca

SEQ ID NO: 39942 - DNA, 3141 bp, Zea Mays
cggactcgttcacgcattcgcggttcgcctctttctctcctataaaaatccaccgccccccgccgcctccgcagaattccccaatcccaccgccaggctccgcacgcgcctcggaacctagcccagtcgactccttcagatccggcgggatcgccggctcctaccctcgtcgccacgttccggcatctcggctccccggcgtcctctacccgacttctacacctgccatcttccccaggcggcgtcccgacgaatcgcttggtcgacaggctacatcaccaccaagtcagcatcgacgactcgaaggattcgtgtcgtcgtcgatcgccgatagccggtcgccggtcgccggtcgcctcttcgtagatcgaattggttctgtgattattctggttgcagttcgctgtatttcatctgagatctgaaaaaagttcgggcctatctcgtgatagagaggcctttatatatacgtgaaaaaggagacatactcgccatccgtcatgggtgttgtgtattaccaatataagagtgaaaaggaaatctgttctatgcctgtgctccatgcttttatctctgtgtctgaactcaagcagcttatactgacaagtggtaagcacggccatgggcgaacccacggccgtgccagggaggatattatcatcttcaatgcccacagcggcgaaggagttcagccaagctgtatactggatgaaggatgatccacatgtatctggacatcctaatacaccttgccatactgatcggaaacttatatttataaattgtgaagtgtgtaaattctattgttcccagtatgttcatgaatccaggacatctcaatagcgctgtgagaaatcccaattgttaacctaaaggataaagtcaatctgtcatagtataaacaatctaaacttctcaactttgatgttcaattaattgcaccatttggtgtatatgagaagagttatcttatagcttgccagaatatgtttgttttagtggattattagttgatatctctgttttctatttttgtgttttcagaatatgcagatgaaagagcatccatacctcagaacacaactgtgctggtccgcagaatttccattgccgggcaactgtcagagaagatcgttttgtcccccacgcggaaagtcacagaagaattttctgtgccttgcaagtcagtggttactgactcaagctcaaagtcatgttcttccacggtagtgcaagatgaagatgctgcaattgctgcagtgattgatgccgctgaactcaaatcggaacaactcccgtctaaaaaaggacaaggcagtggaaggtttacgtcaggacgtaactatgggtcattggaaggggaggcacctccaccaggctatgtctgtcgctcttgcggtgttccaggccatttcattcaacactgctcacaggaaaacaagatacctccacctggatacatttgctacagatgccgaattccagggcattttatccatcgttgcccaagcattggtgatcccaagtgcgacaacaataaaatgctttgttctcttgtcccagtagttacacctgtcaatggcattttggattcacttgtcccggcttcccccgttagtgctgttgatgacttgccagcagagctccactgcaggctatgtaaaaaagtgatgagagatgcagtattgacaagcaaatgctgttttgatagtttttgtgatagatgcattcgggattatattattacagagtcgaagtgcatttgtggagtcaagacactagcagatgacctcattcccaatcaaacacttcggagcacaatcagcaatatgttgggaacacagactatcagtggtggaagtggtacaacaagacacagaagttcgtcaggcagcaaccctgaccccaaaatacagagccacactgcctcgacaagggaggtgaagcaatctagagaccaccagctaccagcagcatctgcacttgatgatgtgctccaggttgccacagaaggtgctctagtgaaccagcctcgggagaaattggtacccagtgctaaaatccttggtaaagatggaggcaattttgcacaagtgtcagcagagaagactgtagcaaatgctgaagccctcaaagtaaaggatggaactgaatcgacttcaaaggccaccactgtttcaggggcccgagaacacaatgtcacaaggacagatcaaccgaagaagtggaagaaggcagtcttaaccaagaactttcaacctaacaatgttggatatggttacaatgttccatttgaccctgcatattgcaatcccttcatcaatggatatccttgggcaactgaaccttacatgtatagctcaatgggggtgccgtaccctggttatccgatggatccatattgtgtaaattcctttacctgcataccgtcgcaggctcttgcaatgcaaggctatgcaacaagctaccaaaggcctgaaactgagcccatgcatcgtgggggcactgcagctgcaccttcaaagcgccctgagaggagtgacaggcccaaggacactcgtcatcagccccaatcacgagagcacgagcgacaattgggctcttctcatgtctcagaatcgagaacgaggaacagaacaaggtcaagctccgagggaagggaccgtgggcattccgacagggcctctgttgaccaccatgaggaccactctactaggaagcggacgcgcgattcctctccgaagtacggtgatagacagagcgaccggaggtcgagtcacggttccaggagtatgatgactcctgaggaggatgcaagcgacgatgaatgtaatttcaagaggagatggggtcgcagatcatcaggaggcgtggacacaaggcactgaacggaagaatgtggactacggcggaccgaccaagtgcagcaatacattgctggtcaccagtgctcacctatccattttcttttactcgtaattgtatgtattcccctgcaaacaaaggggaacttccggttccctggcgaaatgtaatggtattaccatgcgatctctccaaatataaatggaagtttgctaagctcacgagttcttttttacttcttttaccctaacgccccgttttggaatcgaattccac

SEQ ID NO: 39943 - DNA, 211 bp, Zea Mays
ccagatccttcactgtacattattaacactaagcagcacacggggcaaggaaacgtggaagatagtgcttgcatgcatgtctgcgacactgcgcagtgcacgcgagtgttagaatccaaagtattcttgctgtagcgatgggtcaaataaatactactctaattgaatcttaatatatacatgtgtgctgtgtatatacttattaataaac

SEQ ID NO: 39944 - DNA, 1765 bp, Zea Mays
ccgcaactgctgtctgtacctcagagctgagcagcagcgtggcaagtgccacctgctgcacggccatcgtctgcaactgcatcgctcgctctctcctttcactgggaacatctatcagctcgcgctcattggccatctttggcttccatggagaggctcattgccggcctacttggcttcctattggttgcatcggtaggaagccatgcagctcgtgctccggatcagtactggaagtctgctcttcccaacactcccatgccgacctccctctcccaactcctcgacgccgctccagccggcggcggcacgaccgtcaacgtcggctggggcggtgttcacgtcgatgctgggcacggtaagcccgggggtacgacggttgacgtaggcaagggcggcgtcggcgtcaacgttaaccctggcaggagcggcaagcccggcggcacgacggttggcgtcgggaagggcggagtcggcgttaacgtcaacccgggatacggaaagcccggcggcaccaccgttggcgtcggaaagggtggcgttggcgttaacgtcaaccccggcaagcccggtggcacaacggtcggcgtcggcaagggcggagtgggcgtcaacgtcaatcccggcaaaccggccggtggtgccggtacaaccgttggcgttggcaaaggcggcgtgggcgtgggcgtcaatcccgggcacggcaagccgggcggcaccacggtcggcgttggcaagggcggggttggcgttcacgtgaacccgggaaagaagcccgtccacgtcaacgtctcccctttcatctacacgtacgccgcgtcggagacgcagctgcacgacgaccccagcgtggcgctcttcttccaggagacggacctccggcccggtaagaagatgaccgtccagttcgccagcaccgggacgaccggcaccaagttcctcccgcggagcgaggccgaggccatcccgttctcctcacagaaggtgcccgagatcctcgcccgcctctcggtggacccggactccgtcgaggcggcggagatggcgcagacgctgcgcgactgcgaggcgcccgcggccaagggcgagaagaaggcgtgcgccacgtcgctggagtccatggtggacttcgccaccgccagcctcgggaccaggcacgtgagggccgtgtcgaccgtcgtggcgaaggagggatcgccgaagcaggagtacacggtgaccggcgtggagcgcgctgccggcggcaccgacgacgacggccgggtcgtggcctgccacgcggagccgtacgcgtacgccgtgttcgcgtgccacctgacgccgcagacgcgggcgtactctgtgtcgatgctcggcagggacggcacggccgtggacgctgtcgcggtgtgccacgccgacacgtccggctggaaccccaagcacgtcgccttccaggtgctcaacgtgaagcccggcaccgtgccggtctgccacttcctgccgcaggaccacgtcgtctggacccgcagcggctgagtctgctggatggccgccgtttgctcgcgtcgcgccgcctggagtgatttgttatgttccagtggcctctaggcatactgtcatattattattataccgaggtatcacgagtttgcttatgtttccagtacttgatgcttgtatggatatggtgtagccagctcagcaagtatcaacccacctgcttaattctgttgtatagttttaaataaacagacaacctctttatggttactgctctcagcct

SEQ ID NO: 39945 - DNA, 1005 bp, Zea Mays
tctctctctcacttctctctctcccactcactctctcctcccaccgttctctctacaccgtgccacccagcagccagccgagcgcgccctgctccggccgctcgcgcgcacgccgagcgagccacacaccgcgcgcgcaggagccgcgttgctatgcccaacgcgccgcgcccgcccaggacacgctgccgaccggcgcgatgctgcgcaggcgaggccggtctggagcgccgtgcctgtaggtccagccgcgctgcctcccgcgcacgccgacacccgagccacgcgacaccgcgatgccgcatgcaccgaccgagcccgaccacgactcccgtcgtccgttcgtgcctgggattaattgaaaatcactgcgactgtttcttcttctccattattctctccctcgttattctctagaaactgacacagtggtggccattgaagaccacgttactccctctatcagacctttcttctccctcctgctccctataaaaagggaacaacagagcctccccattcctacctactcgagtttgtctttctctctagcactcctcgctcatcgccagtgcgttcgacgccatcgttagtgtgtcgttcgtcgccggagtgtgccgttcgtcgccggagttcgccggagccacgtactcgctgtccgtagtcgagccccgctctccgtccggccgaaacccgtcgatccatccccgtcacacgcacgaacccgaagttgatgacgacccaaatttattttatgtattttataaagtgcttttgattcgattcatgtgttgtatagtttgtttgtcgtaatatgaacacatgtgattccgatttgtgtatttgtgtgcgctatggaatttgttagaaatatgcgattagtagtgcaccatgttatttcatgttaatcgacgcgttgatgttggtttagagaaatatgacgtagatttaatagtcacacgttggtggtaaaaatactagataagaatttatagtcaaaattgg

SEQ ID NO: 39946 - DNA, 1654 bp, Zea Mays
gtttcagtgaagctgttgccgggcgatgatacgatatgatatgatgtaataggataccagtgccatttcccacccattaaccttaccttgcctctcttctaatttaaacctctgctgcaagggagcgagagagagagagagaggagaggcacacagcgcgcagagagactagagagagagggtttgtcctcctgcctgccttggcttggctagcttggcctcccctccacctccatcggtgtattacatccgagggcactccatctcttgcgtcccttaacccctccaccaatccaatccaatcccttaaccccgcaccgaatccagacttcgaagcttcctcttcctcccggtcccggccccggccccggccccggagccctgttcttggtacttaggacaaggactgatgggcgaccatctcgcgttgatcgtggaccggctgctgacagagtcgacgctggaggcggcgatcggcggtgggaagcacatggtcgatctgcgtcaggagacggtggatgtcgagtactgccatcgcgggctaggcggcggctcggcgaccaaggtggtggagtgcaggatttgccaggaggaggactgggacacctgcatggaggccccctgcgcctgttgtggcagcctcaagtatgcgcatcggaaatgcattcagcgctggtgcaatgagaaaggcgacactatgtgtgaaatatgcctgcagcaattcaggccaggttatacttctccacaacagctgtttcactatggaagtataccaatgaatttcagagggaactgggagattgccaggcaagatctcaatgattcccagataataacaatgatgcccacggagcgtgattttatggacaattacgatgactactttcctatcaggacaagaagcagcaccttgtgttgccggacaattgccataattttcatgtcactcctggtccttcgccacactcttcctcttgtgattggtgacaatggggagtactcattggccttattctcgcttctggtgctgagaactgcgggaatcctctttccaatcctggtgatggtgagagcattggcaagcttccatcatcgacggcggcagcagatcatttaacactgcaggaaagccaggaagcatatatatcttcatcagagagcgaggaggaagaggaagagtatacagttgccaattctgcacaaacaaactactcgcaaccgcgcttcataccagtctactgacatggccaagaacaagccttccaacctcacatctgacagggaattccagcgcctgagtttagctgacagatgcaaggatgaatggatgatcacaaggggggaaattacaaaattgtgaatgtggtgacatagtaagatagcctgaagccactcgcttctatgcccatagagaagaatgtagtggccctgctacttgtacataggagagagtacagcagcagagtgctgacaaacccggatactgtgactcgagtctctactgcagtaacccttgtgcactgctctccccgtctcaaattatttgttatgaccttacgtagtttttgttatgcatctagatatcaactatatctagatacatcacaaaaatatttacctaagaaagttaaataatttataatttgaatttaag

SEQ ID NO: 39947 - DNA, 2157 bp, Zea Mays
atcaagccaaacaacccggatccccacgggccacgaccccaccaggccaccacgtatacttgcccacgttccccttcccctcgcatccgtttcgtccgtgcgccgccgccagcatcttctcagcccaggccccagacagagcaaaccccccctctaaaattcggttatatttgggctcccgcctccgccgtcgccctacagtcctacaccaggtgccgaggccttcgccggtcaagagcgcccagcagatccgccactgggtttttggatttggagacatggcggaagtggatgacaagctcaaggactacgagatcaggaaggagggagaggcagagatcctcttgcacaagaggaacgccgtcttttacaatcccgtgcaggttcacaacagagacatgtctattgctgttttaaggacctttattgccaagcgcaaggaagaacatgaagcgctggtggacaagaggaacacatcgcatggaaaagacaaactgagtgaaatatcctgtcaaaatggagaggatgcgtcaactggccagcaagatgaaatggaactaaataaagctgaagttcaaattgatgatctgtcaaaagaagcaacaaaacctccttggaaagtaaccagagaacttaagccaccacttgtcctcgaggctttggctgcaactgggttgcgatctctccggtatgcccgtgaagttgagggcttaggaaagatagttgctctggacaatgataaagcttccgtcgaagattgcaagcgaaacataaagtttaatggtgcttccactactagtaaggtggaaacttacttggttgatgctcgaattcacatgctgatgcatccaaaagaatttgatgtggtatggttcattcccaaccaagggcaagtattgtcatgaaatggctttgagaattctcctagccagtattgagagccatgcaaatcggtacaagcgatatattgtgcctgttctctctgtgttcatggatttttatatccgtgtttttgttcgagtattcacttctgcaagtgaaataaagaatacacctctaaaactttcttacatatatcagtgtgttggctgcgactcttttcatcttcaatgtcttgcgaggactgttccgaagaagaataatggtgtgaagcatgcacctgcttttggacctgttgttcctcaagagtgcagtgattgtggaaagaaatttaatgtaggtgggccaatatggtcagctcctattcatgatcaagactgggtagtttctactttgacaggtgttaagtcaatgaaggatagatatcctgcgtatgataaaattacttcagttctaactactgtgtcagaggagctagatgacattccactgtttttcagtctccataacatagcaggcactgtcaagtgcacgtctccgtctctggttatgttccggtccgcagttctaaatgcagggtatcggatctcaagcacccatgttaacccacttggggttaaatctgacgccccttgggatgttatttgggacatcatgcgctgctgggtgaagaaccatcctatcaaggaacaggcacgtgactcacctggcacggtgatcctttcaaaatcgccaaagctagaagcagacttttccagagcagttgctgccctcggcaaatctggggcaaagaagacgaaacgattccttccaaacccagagcggcactggggcccgaaggtcagagcaggccggaagatcacgagcaaacacgtctctctgttgggccctgatgccatcaacgctgccgtgaacggcggcggcggcggtgactgccacagagaagggagcggtgccgcgccagatagtagcaatacagccccagaacccgaggggctggaggacgaaccctcgaacaaacgccagaaagccagcggcgacggggaaccagaaggacagaaggccagcgacggggaaccggcaagcgaagcttgatctgtttggtagtcgttgttgtgcctgtcagcctgtgcttttgctcgttttgtggcccgatgggtgttacctgttttattttgatgcaacgaattttgcttggttttgacagcctgtgggttttagatataagaaaagcaggctccagacccaggcctcgtgcgtgtcgagcctggcaacgtt

SEQ ID NO: 39948 - DNA, 207 bp, Zea Mays
tgctcacctggtaataaacatgttgttatctcaggccatttagggttacaagtgcatgtaataaaaagatctggtggcccataggcacaacaaatagcaatgccatcatggtatttttgtatcatatatcgttttgatccaacatggctagatggtaataacacctttttgcctattcgactggcgtcatatattcctttttctact

SEQ ID NO: 39949 - DNA, 4398 bp, Zea Mays
caagattatatatcttgatcatccatgcgactttcttttgaatgtagaaatcgagccgttcaggaattcagggttttcccctgccctccggtccccgcgcgtactccccgctccgtgctccgcaactccctcttttcccgccgccacgactcgccgtgcgcgccgcatcgccgccgcggaactcgcgcacaacagaccagatattttcccggccgtgcgcacctctcgtcgagaggcgtcgctctcttcctcctctacttcgtcgccctttactgtttcggagccggggcgggttgtcctaggagtcggtttcgttccaagatttcccttctccttccgttcaattcgttttgggtttgtgccgtgcgctgcgcccaatctctacgggccaaggcatccgtggtccgattgggtcagtcttcgtctttctccgagtatctatgggggttcggtcgaatccccgtccgcaacactaagccctgtcctacccgtgatgcgatgcgcggcgaggccggcaatgactgtggtggcggggatacccaagtcctggacggcgggacacctccgttaggttctcctccgagtgatggcgatgagacacaacgcgaggcggatgattgggccctgtacgacgaaacacagcctctggatgatgctgagacccagttaatagacgaggtggaggagggtgtggctggcgattggacggagacacagttgatggatagtggcaacgaggatggtggctgtggcgatgaggatcatggcaatgacggtgacccagtgaagacgaagcaggtggaagatgaagaaggaggcgacgttggtggtggcgtggatgataatgccaacaaatggaccaagacccagttggatgaaaaatgtgaggtggatggagtgaacaacattgttggagacatggttgagacccagttggttgaggaacctgaggaggatgccgacaaggatggattaaatggtcatggtgaacatgatcttggtgagtgggggaagacccagttggttgaagactctgacgaagatataggtgactatgagttgagtgatggcaccgttgtcctaagtgacaatgagagcctctcaggggatgagagggttgtgaagtcaggaatggataaaagggatgtgaagttcggaatggaaggaagaatcgaggggttaactggagagataaggaagcatgatgataataatttggtggattctgatgcatcgacggacgaggagggtgacacagattcagcaagggaaacaaatggcctctgatgcaatacaccccatgccgaaagttgtagatcaatctactaaatgtagcacatcctttggtgaggttgataatgactctcatggttatgtacagaaccatgataaaggtggagctaaaagcagagacaagtgctcaacggcaaaaaagctttttgctgacacaacagctgaggatggagaaaagaacagcagatgtcttgctggattaagctacgctggatcacaagagcctggtgatctgtcacaagcaaatgcttttgatgttgtggacaggttgatttcaataaattgtggattatcatctcaagaaaccatcccaaataaattggaaatagcaaagccacatgcttcaagtaagaggggtactttaatgttggctgagaaggttgaccttggtagaagttcaaatgggaaggccgaaatatttgaatttgtggataaccttgaagatgagggaggaggtgactttttcagtaaaaacagagacatcttgttgccaaaaccaattggtagaggtgaaccaaagagtcattataccagagcaaagaaaccttccacaaaaaaatcatgtggagaaaataaaataggggaagccatgaacaaaagaaattccaaactacctgggaggttggaaactattcctttatcacattcaagactattcaaaagtgacgtaaagagtaagcaggcttatggaagcaggactaagaaaaaccttttgaaggacttagataacctatcaaatgccaaatcgttggaagaacaggaaagggctgatgtagctttgaatgatgttggtccagatactcaaatggctgttgaagctatggaggccctggtacaatgttcacctgctaaaagtttatctgctgaagatcaacctctgctcaatagagatacgatggctgagaagtctggaatagctaaaagtcatttgaagaatggttctcagagaactagcaacatccaggaaggtgtcacaacacgttctaagagaagaaaagtacctgacttcagtaccaagcctcagaaagaaagactaagaggatcaaaggtgcaagaaagttctgagcctatagtaaaagtgaagcataagcaaacaaagtctgtacctgagaaaagcaaagtttcaaaggaatttattgatgaaaataagtaccacgggacacctattgctcaccgaactaggcattgtggtaggaatgacccttctgcatttatcgagttctctaataaacacttgaggagaggcaagaaattgaccggtgacagctccactattcagcaagtgcaaaataaccgaattgcaattgaatctggtttgagttattttgaaaaagaaagcacagagcagatttgtacaaataatgatcaagatcttcagcaatctaaggatggaagcactcaacggaccagtgtaaataatgctcaaaaccttgaaacacacagagttgaaccaacaactgatgttacctgcagagatatcccattgcatcccaaacggcgaagaacgcctacaaaattgatactgtcaacttctgcagcagctgcaaatcatgaaataccatcagaagtggcaagaccatacaagaaaaggcggatttttgtaagaagtgtttctgacctgctaaagtatgcaaagagggaaccttcccatgggagatcagcttctatgctgtccagcatattagagaagtcattagctgcttctcctgtacttaatttttctgtatgtggtgacagcaaaacttcttctgatgtcattagctctgcacagagaccgaaggaatcctcccatgacgaggatacaagtaaatcaccagaaaacaatcctcaagttccaaatcgttccatgaaaacaccgtcaaaagtggttaatgaattgtcacccacttttagtcctgcgaatccatcaaaaggctcaagtagaaacttgtcaaaagcttctgttgcgagagaattgctgaagctagatcctgaaaatgtactaccaaatcagcagagaaaagattctagaagaaggaaggatatggcccatgtcagtattctattaagccatcatttggatgatgatgttgtcaagcgtcagaagaagatcttggcacgcttacgaggttctgaagcattttcaatggccgatgcaacacactttgttgcagatagattctgccgcacaaagaacatgctagaagcaataactattggcaagccaatagttacatcgatgtggcttgaaaattgtggagaagcaggttgttttattgatgagaggaagtatattctgagggatgaaaagaaggaaaaagagataggtttcagcatgcctatatcactggcctcagcttgcaatcatcctcttctgctgggaaaacgagtttttgtaacatcaaatgtgaaaccaagtcaagcagtggtgactagcttggtcaaagcatcatcggggcagccactggagagggtaggacggtccataatgaatgagaaggaagtagctccggacctactggttatctcatgtgaagaagactaccaaacctgtgcaccgctgctcgagaaaggtgcgagtgttttcagcgtggagtttctgctaaacggtatcgtcattcagaagctggagtacgagaggcaccgccttttcttggaccgagtcaaacagacccgctcgtcgcggtggttgaaggacaccgtgcaggaccggtttgtccctgtacccaagcgtcgccgtagataggcgaacaggttcggtgcatagtttttctaactaaatcatgcttctgtttcccgagccttagcagctcaagaccactgtatattgtaggtgttcatatgtgttgtagcctgttttcgcccccttctcagctgaacctgggtggtaagtaattagccagagactgttgagtgtttgatgaaatgttatgtattctgttgttttggagatgtcagatggctagagctggattgtgtgaacttgaggtgccgtttggttcacatatttgtaacgtaatgggtaacggataacgttaaattatgtttgttttagtctaaccgtaatcagataccacactaaaatttaataccagctattcaaatttgttaccgacagtaatcgag

SEQ ID NO: 39950 - DNA, 2839 bp, Zea Mays
atttttacgagttcaccgagaggcggtgtatttcgcagagcgcctgttttgccaaattcctcgtttggttccacgccggacgcatcctcccacgctcgggccgggcgcgtgaacccctcgccgccgtcgcagtcccgttgccggagggcgagagggacgagaaagaagagggcaagatgaagacgaccaaggggggcaaggcgatgaaccccacagacgcgttccgcaaggagcagcggaagaaggagctcaagcggaacaaaaaggaaaggaagaaagtgcgggatgttggcattttgaaaaaggatccggaggctatatgggagcagattgagaaattggagaagatgacactttgcctctttgaattgctagctactttggccctgttttcaacatgaggctgatggtgctctggacaaggctaggaagcataagaaaagacagcttgaggatacatacaatcttattgttaagaaacgaatatgaacagaaaatgaaagagaagggtgaacaaccgattatgttcagccatcttgcaccaccaaagaggcggcctacaggagatgaagatggtagagctaatcctaagcccgaggactctgtttactatcatccaaccttaaatccatctggagcaccgccacctggaaaacctccgatgtacaaatcatctatagggccaaggatcccaccgccttcctcatccagcactggggcctcatcttccatgtcagagtctgaagcaggtccaacgaccctgccaccccctccaccaccaccgccattgccagacacctcagagtccattgatccacctgctcctcctttccctttgcctccactcccgccactgcccccaccaccacctaaacctaacagtgacgcagcattgccaggcttacctctgcctcctcctggtccacctctgagagaatctgtatcaggtcatacagtacttccgccgccactgcctccatcacagaggtcttcaaatccaccaccagcatctagtgcgaatgaaagcaaaacagattctgcttgggtatctactttggatctcttttgcatatttactagtgcttctaatccatttgttaatgcatcaaacccctttccctattgttcaaatgtttggatactggcctttgtgactttgtctgatgtaaccttgtttgcagcccttagttgtgttgcctccaccacccccgccacctgggttgtcaccaaaatcatatgacatggaggctgctggcacttcaaaggacactcctggacttaaagaagatactgcagcgagagtcttaccaccaccgcctccacctagtttgccgcctttacctccaatgcaatctgatatgctatctcctggagtcatgagattaccaccacctccgccaccaccagattcaaggccatcgcttatggctcctggtgttagcaggccccctccacctcctccaggattcccccgtctcaaatgccaataccaccatatgcatcctgtttggttcagctttttttttgactagcttttccgagaatctagctgtggggagaatctggctgtgtagagaatctgagtattattaggattatgtgcggaggaagataaagttgtccatgtggctcaggatctatacagtgacagattactactattgcgacgactcaaccgattatatgtttatgttgattttgaatggtttttacccaaacgaattttatagaagctggctgaaaagctgagtgtttagcagtccgcagcagcttttggtggtcagaagctgcgaaaaaccgaaacaaacagggacatggtgtcctccctggtccgccaccgatgcttaggcctccatttttgctaggaccctctatgcaactagatgagcttgctgcctttgccccaaggcctcagttacctcagcagccatcatatgtaaagtcggctgccccaacagttgttaagagaccattagcacagcacactcctgagctgacggctatggttcctgcatcagttcgtgtcaagagagaatctgcgctccccaaaccaaaaccaaaggtgcagcagcagcagcagctatcaacagcatccatttcaaggccttcagtgaccctcataagaagtgatgctcggccttcttcagcggcacccaagccgccaagtatggacgactcctacttggcattcttggaagatatgaaggaactaggggcacttgatgggtaactcatagagtaactgcctgagtgcacttaacagcttaattcatggaaaacctggacatgggaccttttttttttgcaatgtggtaaatggatagtctctgctcagtcaaccggagctgccgcggagaaagaaaatcatgcagtagtttaattgaaaacccgggaaaacgattgtagtctggctgctggagacctaaaggctctttgtggcccaactgtacacgtttgagatatttggaacttgaatagctgctggctctagcgaaggatatcttacaggtgctctttatgattcatgattgcactggctgatttgcagataataccattacaccagtcgtggggaggactactgttgtgccttaatttttgtatggtgcatttgccttgaaaaccatgacggagttgctgtcctgggaccccatgtaaacttgtgacattcacaaatgtcggtattggttctatagactatagtccggcgacattactggatacgagccacggcttctatataaaagtttcgtgctttctgtgctgaaatctgaaattaacagttttttatttggccagatgggaatatctgtttgcaaactgtgtaacgtatgatgcg

SEQ ID NO: 39951 - DNA, 1566 bp, Zea Mays
aaaaaatacatctccctcgcaccgccggcgttcatcttccgctctctcccttactcgcgctcggcagtcggcacaggcgacggcggcggcgctcgggctctcagcgacggcggcagcggcttcccctctcgcctcgcgccctcgcctccggtcctccgcacaccggtcggtgaccctgtgtgcgtgcctctctctctcctcccccctctagtggatcgtcaacggcttccggccccggaggcttcgccgcgcgcggactgagggcagcgggagccagcagccgctgctccaccaaggcgatcgcgccgctttgagagctcatgccccaaagcgaagcgttacccatccttttagcgcttcagcaggctcaagggtgcgcttagtgctgccttttggaattatcgttcctggccaatttgtcatcagatcaccatacatgacaagggtcatccatgactccggagatggcatgcagaaggaggcacttgatttggtctcatctgatgttaactttcccaagggctgtttcccagactataggattggaccaaacaaccaaatcattgatccagaggaaacgcatgaggccgtacctctcaaggaggttgttgcaaaggaaacagcgcagctgctagagcagcacaggcgcctttctgtgcgtgatctcaaggagaagtttgagaagggtctatctagcgcttccaagctttctgaagaggctaagcgtcgagaagctgcttcattagacaggcaggttcttttgaagaagctcagagatgttttagacacactgaaaggtcgtgtggctggtcgaaataaagacgatgctgaggaagctatctcactggtggaggcactagctgtccagctgacacaacgagaaggggagttaatttatgagaaggctgaagtaaaaaaattggctaacttccttaagcaggtagtagtaacccaaatgaatgggaaggattactcgtcgaattctgtccatgtttttcatattggaaagctgagaataaaacttcaaaaaggatggtctacaaaagcaagagagttatattccaccacgatgaagttatgtgggagccgtggtggtggtaatgctgcagctagggcagttttctggcaagctaggaaaggcctgtcctacactctagcattcgaaacagacagggacaggaatgctgcaattatgattgctcgcaaatttgcttcgaattgcaatatcgctctcgctggcccaggtgaccaagacacctgatgaagtgatcatgcgtgttttgacagagacactgtacataatcaggtgtagattggctgatttttttgggagtctatttgtgtgcttgtgagggtagaggttgtacaccgcgtgacggtaatccccccttccatatatcttatggaggcattgtttttgtttgcctgtttgcagcattagcgacgttctcgaaacgtgatgtacaaattgatcactgttcttgtgcgtcacatctgtaataatatcactgttcttatcgcttctttttgtaagtcaaatatatatatttttaaatttgttcctat

SEQ ID NO: 39952 - DNA, 4897 bp, Zea Mays
  misc_feature (1)..(1): n is a, c, g, or t
ncccgtctccgtctccttctcctcctccccgtcgccgtctccgagtctccctctatttctctccgcccttgttcttctcctctctccctctatcttattacctcaagtagaagtagtatatattttttgtccgccttttcaatttttccttttatctccctgcgtctcttcgtcgtcctcctgctgtggcggccgccggcgatccccgatcggcgatactcagattctagttgtccattgtgctgcactgcagcagtagacaatcgtgtttttcggtgttttgtctgtctctccttgatcattcagatgcctgtacagctcaactgctatagctagctgtatatatctggttgaagaggactaatctagcaacaatgtcatcgcttcagttattgcaactaacagaacgggggcgcaaccttttgtcttcaagaaggagaacacttgcaattgtttctggtgcagtacttgctggtggagctttagcatatgcgcagtcaggtcgatggaaaaaacaccaggaagcaaattcttgcagtgatgcaaactcacatagcagtaataacggaagaactagtcagaacggcattgatggtaaattggttaaaacaaggaaaaagaaaagtggactgaagtccttgcattttttggctgctattttacttaagaagattggcccgaatggaacgaattaccttattggcttgatactaacagcagtcttgcgtacagctgttggccacagattggcaaaagtacaaggatatttattcagatctgcattccttcggcgtattccgacctttacacgtctcattattgaaaatcttcttctatgctttctccaatccacgttatatcagacatcaaagtacttaacagggtctttaggcctgcgcttcaagaaaatcttgacagatcttgtccatgctgattattttgagaacatggtgtactacaagatctcacatgttgatcatcggatcacaaacccagagcaaaggattgcaagtgacataccaaagttctgctcagaattaagtgaccttgtacaggatgatctggctgcaattgtagaagggttaatatacatctggcgcctctgctcttacgcgagtccaaaatatgtgttatggattctggcatatgttataggtgctggtggtacaattagaaaattttctcctgcttttggcaagctgaagtctacagaacaacagctagagggggaatatcgtcaactccattcacgattgagaacccatgctgagagtgtggcgttttatggtggacgggcagagatgttgagcaatctccgataccacaccagcgtgataatatcactatttcaatctcttggaaccatttctattagttcaaggcgcttaaatattctcagtggctatgctaatcgtattcatgaattactggatgtctcgcgtgagctatctggtggccgtgatagattgattactcaaaattcttctgatggaaattatattagcgaggcaaattatatagagttttcagatgttaaggtggtgacaccttctgggaatgtcttggttgataatttgaaccttcatttggagtcgggctctaatctgttgatcactggtcccaatggtagtggaaaaagctcccttttccgtgttcttggtggtctgtggccaatggtatctggtcatattgtcaaacctggtgttggttccaatctcaacaaggaaatattttatgtgccccagagaccatatacagctgttggaacgcttcgcgaccagttaatctatccactcacagcagaccaagagactgaaccacttagctatggtggcatggtggatcttctaaagaatgttgatctggaatacttgctagaacgctatcctcttgataaggaagttaactggggtgacgaattgtctcttggtgagcagcaaagattaggaatggctagactgttctatcataagccaaagtttgctatcctggatgaatgcactagtgctgttacaactgatatggaagagcgcttctgcaaaagggttcgagcaatgggcacatcttgcataacaatatctcaccgtccagcattagttgcgtttcatgaaattgttttatccttagatggtgaaggagggtgggatattcaggacaacagaaatggttccttctctcccgaagttgagtttgatgtgctgaaggcatcagaaagtgatcgcaagtctgatgcacttaccgttcaaagggcttttatcaccagcacaaagggaaatgcgtcaatgaagcccaagaaacattcttattcaacagaggtcatagcatcttcccccagtatggagatagaacatacagtacaatcatctattgtcacacaattgcaatgctctccaagacctttgcctgtcagagttgctgcaatgtctcaaatactggttccaaagctatttgataagcaaggagggcagctgcttgcagtggtacttcttgtattctcccgcacttggatttcagaccgtatagcttcattgaatggaacaagtgtcaagtatgtcttggagcaggacaaagctgccttcattcgtttggctggcactagtgtgctgcaaagtgcagcaaattccatcgtgtcaccctcactgaggaaccttacttcaagaatcgcccttggatggcggattcgcatgaccaatcatttgcttcaatattatttgaaaagaaatgctttttacaaggtattcaacatttcaggtatgagtatggatgcagatcaaagaatgacacatgatgtagagaagttgaccaatgaccttgctggcttgcttactggtatggtgaagccattagttgatattatttggtttacatggagaatgaagcttttgtctgggcgaagaggggttgctatactgtatgcttacatgttcctaggtcttggttttctaagagctgtgtcccctgactttggggatcttgcaaaccaagaacaagaacttgaaggcacgttcaggttcatgcactcaagattgcggacacatgctgagtcaatagctttctttggtggtggatcaagggagaaagctatgattgacgctaaattcatgacattgctcaaccactcgaaggttctattgagaaagaagtggctttatggtatttttgatgattttgtgacgaaacagcttcctcataacgtgacatgggggctgagtatgttatatgctttggagcacaagggagaccgagctttgacttcaactcaaggagagttggcacatgctctgaggttcttggcatctgtggtgtcacaaagcttcatagcgtttggtgatattcttgagttacacaagaagttccttgaactctctggtggtattaacaggatatttgagcttgaggagcttctacaggcatcacaaagcaatcctgtcatgccttctgatgccacaaatgccggttccgaagaaataatttccttccgtggcgtgaacattgtgacaccatcgcaaaagctattggctagccaactgtcttgtgatgtatctcaagggaaaagccttcttgtgactggtccaaatggtagcggaaagagttccatctttagggtgcttcgaggcttgtggcccattgcttctggtagtcttagcaagccatctgaaggaatttttaatgttcctcaacgtccatatacttgtcttggaaccttgagggatcagatcatataccctctctctcacgaggaggcaaagttgaagatgctctcaggcgaaacaagtgacaagtctacagcttccgagctgttggatgatcacctgaggacgattctagagaatgttcgcttgctgtatcttctggagagagaaggttgggatgctaccactaactgggaagatactctatccttgggagagcagcagaggctggggatggctcgtctgttctttcactgtcccaagtatggcatcctcgacgagtgcaccaatgccacaagcgtggacgttgaggagcatctgtacaggctagcaaccaacatgggcataacagtcatcacatcctcacaaaggcctgctctgattcccttccattcgttggaactgaaactcattgacggcgaaggaaagtgggagctatgttccatccaccaataaccgattgccatcaaccagtttatttatgttcaccggagtagggtatttacaagttgcaacgcacagaggaaaaaaaactcgtccactcgggtgtagagtgtgtgacggagtcttttttttttttggtttcccttttcttttctttttctctcccctttgatggaaatcttgcgatacggaaagggagggaggaaggaaatatacggcaggaaaggaaagtattaggagaggttatagatgcaggcttcgtcatttgggatagcatagtacatgttcctggcatgatatgccagcctgattgatttttatacgagatacagaataagttaaaataaaaatggatatggcacaaagtgtgcccttgtaaattaaatgggaaactaatctataggaaattcatcctctctgtgtcgcccttgcatcgaacgtatcccaatccatatgtaatggcctaatgggaagataccgtatgcaatcactcatatttgcgagaaaaggaatcggcaattaaaatactacacattctgtgaggttgtggtgtttggaattctagtttatgctattttagtggtaattatctacaatgttctagaagcaagtcacttttatgatgcgcccgctaacaaggcaagggtattttatagttagaatctaattgacggataccgtacgacaccctaactaaatttaatactcataaaaaataaatttaatatcaaagtactcataaaaataaatttaatatcaaa

SEQ ID NO: 39953 - DNA, 731 bp, Zea Mays
cgccttgtgttggcggccgtaggccgtagggcgagctcccaggtcgacgtggcggggatggctgcgacggccggcggtggcggtggtggaggggctaaggcggcagtgaccgagcagatagcacaagcagtgcggtccacctccaacctcctccagctgatggagcagtcctcccccgctcaggtgctgcaccagctacctcaagtaatatcatccttggatgcttatatggacaggagtttgcaaagtgcctctcaaattaagactgttacacagctcttgtcaaacatggagaacactcagctgaggtacatgttgccttcctctcaaaagaagaaagatcaaaagagtactgaaccttaagaattcagagtcgactgatgtgttcaccgagacataatggaaggatatgttcttgccgttttgtgctaaagaaatttgagttttgtggctctcaagagatggcttggctttatctggtgtaaggatccatcgttgtctactgtctgtcccacatttgctgagttcggttgggggacgctgttaatggaaatattcttctttcttcaaaccatttacgggtgcctaggacctgtatcataaggcaagcatgcctgttagttgtcacacattctggtctatgaacacgttgctttcttgtaattgcattggttgttttagcagtaaattatggtagaaattatgaagtgatcaaagtgtttaacgtggca

SEQ ID NO: 39954 - DNA, 3443 bp, Zea Mays
aaacttagagagtgaagactgaagactcccgcgctttacgggtttggacctcacctgtcaggctgtcacctcatacagtacgctcggctctaccgggcagatgcacccatctgtttcgcggagaagcccgtcctcgtcggagtgtagaggggcgaagcgatccgaactccgagaaccccagggccagggctcagtccacagcgagagcagagaacgcagcggcctgccggcctccgccccgcactcccgcagccatggccgccgccgccgccgtggttgccgagcccaagaccaagtacgatcgccagctcaggatatggggtgatcaaggccaaactgcactggagaaggccagcatatgcttgcttaactgtggtcctaccggaacagaagcattgaagaatctcgtgcttggaggaataggaagtgtgactgctgttgatggctccaaagttgaagcatctgatctggggaacaattttatgtgtaatttctttgctatgtgattccacctgttcttctgaattcatccccagaaattgatggaactcatattctggtaccttatatttgcattcagtggatgaaggatgtttggggcaaccaagagctaaatctatatgttcattcctacaagagcttaatgacgctgttaaagccaagtttgttgaggagtttccaacgcatttgatagacactaatccttcattcttttcccagtttactgttgtcattgctactcagatatatggtgttttgacagtaatatgacattggactaagccactgaatgcatacacaatagctaatgcatagctgccctcttggcattggtgatggcaaaaccttgcactaagggctcgttggatgagaccctggagtatttttgcctggataggtctttgcgtgtgttccatttggatgaccctgatactcttcctgaacctgcttccagagagttctttactgaagctagatgatatttgcaggaaagcagacatcgttttggttgctgcacgttcatatggtctaactggtttggtcagggttagcgtcaaggtacttttttctctcgaacacgcaggagaactgcgcgtcattatattaagaggaaaaaaggtcccaagtggaccaagaaaacaaagtgcccgagaaggcagcagacgagaagagggggacaaaaagaaaaaagagaagaacaaaaataaaagaaactagaaacaagagggaaaaagggggaggggggacaacccccaccaccccatctaaattaatgccacaactgtctaatatcttttgctcctgccattccccaaagcttaacatcctcatgaatctcttgcaaaatgttgcggatactcggaggtaccccatcaaacacgcaagcattcctttgtttccacaaccgccaagacaccaagataagtagggaattaaacgaaaatgttgcgtcaaggtactttgatacatttatgtccaaaacatagttaattatcatgacatcacagttgcagatagcaagacattgtgattttgtacgctcatacattcatattagtgtatggaaaaatactgttgtatatgatttttcccttttctgggagttatgtctctactaccttggcgggaagtcataacaaaagtattttgggaagattcacatatttatttattgttctccaggagcactgtgttatagaatcaaaaccagatcacttcttggatgatttgcgacttcacaatccatggactgaactaaagcaatttgcaaaatcaattgatataaatgataaagatcctgttgtccacaaacatactccatacattgttgtccttgtgagacttgctgaaaaatgggcagatgcccatgatggtaacatgccttcaactaggcaagaaaagaaggaatttaagatgaagaaaattacaaagaagctgtggactcatcatataaagtctcagtcactccaggaatcagtaatgagatccatcagataattgatgatgactctgcggaagtcaattcatcatcagaagatttctggattttagtagctgctttaaaggtattatgtaagcttacaaaagatttaccaagctaaggcagaatttgactgtcttgccctggagcatcatgtaaaggaaatcttgaaacagattggtagagatccggattctatttcaagagcatatatcaaaacattttgtaaaaattctaggaaactaaggatttgtagatatcgtagtttcaaggaggaatttagctccccgattgtctctgagattcagaggtatttcagcgatgaagactgcagttacgcaatgaacttctacattctactacgggctgtcgatcgattggctgccaattatagccgattacctggaatcttcgacaggctgaagacagttgcggcttcagtgctaagcgagatgggtttgaacggagcatccttatcccaagacctggtaaccgagatgtgccggttcgggggtgcggagattcatccagtggctgctttcatcggtggagtcgcttcacaagaagtgattaagctggtcaccaagcagtttgtgcctttggggggaacattcatttttaatggaatcgatctcaaatctcaagttttggtgctataacatggatgtggagcgttggatttgagctggtccagattttgtgccagggcaccgcgctgcccaacgagtacccaagtctcgcagaaaatatcaatacttgcttcgtatgattttttgccaaatgactagcaaattcctagctcacgcggctgttatgcgtaaaaccagaagagctgctgcttttagactacgcctgttatatattagtaggcgaagtaatatgtcagtggggctgatgtgataagatggatggtgttaaagactagcgtgtgcgcgatttgacgaagacgactacgagacgggatgagcaatgagcatgtcggccgagctatggacgcttccatcatatcatggaccgacatcaatgtgcatatgatctcaggtgtccatcgacagaccgaatcttccgtggccagtattccttcggcgacgcggttgccgttagacgaaggaaactgtcgtgtgacagcgaaatgtggttgctacatgctggtagcgcacatagcacactttgggcgtgtttggttcggcttttttctaaatagcttttctgaaaagctggctgtggagaaaagctggctgttgggaaaaactggtggttagaatttaggtgtttggttcgccagctgtgcaaaaaagttgttcgttagaatataggtgtttggatacacagattctcagactgcagattctgtttgaaaaaactatacacattaacaccgaaccaacaaaaggtcattacatataattagtagagttcattacaacataactaccgttacatttacatatttaactatgac

SEQ ID NO: 39955 - DNA, 1593 bp, Zea Mays
gcataacggcgaatagtccatccatcatcagcttgagacggagacgacaagaacgacgctacctcaccatcttaatcttattagcagcaaatagcagatgcagatcaataaacccttaccaagcccaatgcagggagcagattctctctctctctctttctcacacacacacaaccccaatgatccatacacacattttcatttttgagctgatatgttgccacaaagcgaggttctggatgcaaagtgagcagccacaggccacagcaggtcagcagccaattggaagtcactgtcttcctctgaatattctgagaccctcctctcaacactttgtcgagttaacaaagtcacctcatccaatcttgcatccccatctctgtctttgctcctccatggccatggccatggcccgaccttgtgctttccttctcttcttcctagttcttttctcctacgacggatccggtcctgggagcagcaggaggactaggaggagtggcgtcgcgcaggccacgcagagagtcttcctgtatccacaggctcccaaggtctcctccatcgtgagcagcaagtacaggaccgcgtaccacttccagcctcccaagaactggatcaacggtgacgcctttgtgccggataccgtgatcgaggaccggaggctgtggtcaaggattgactacggcaactactacgcttccaagtcgttcttcgactcgaagaaagggaggagggtcatatggggctggacgaatgagacggacagttcgtcagacgacgtcgccaaaggatgggctggaatccatgactatatggttggataaagacagcaagcagctgctgcaatggccggtcgaagagatcgagtcgctccgaggaaaacaagtcagacaccaaggcctggagctcaggaagggggatctgtttgagattaaggaaattgacactctgcaggcagatgtggagatagatttcgagctcacatccataggcagtgccgacccttttgacccttcctggctcttggacatcgagaagcagtgccgggaagcgggcgcgtcggctcatggcccgttcgggctcgtggttcttgcttctgagagcatggaagagcacacctccgtgcacttcagagtgtactacagatcacaggagaagcacatggttcttatgtgcgccgatctgaggaaatcgtccttgagaccggagctgtacacgccagcctacggaggcttctttgagctggacctggagaaggaaaagacggtggtatctctgagaactttgagcttcggtggaggcggcagggtgtgcatcatggccagggtctatccggcggcgctcgtcgacgacggcggcactcgcatgtacgcgttcaacaatggcactagcaccgtcagagtgccccggctagaagcgtggagcatgaggagggcacaggttaacaagggatgaggaggaacacaaggccatttgatagctagaggagaggaacagagcatgggcacatgaattaaacacacactgctggtttaatttgctggaattaatcaatcaatcaatcaacaaacacacgaagattaaatcaaaaca

SEQ ID NO: 39956 - DNA, 1965 bp, Zea Mays
tccatggagacgaaaccggagccgcaccgccagaaccacgtccgccacgaggaagcccaggagggggagcaggcagcagtcatggaacacggcgctctctcgctgcagcgcggagtcaccaacttgttcggcaggcggcacgacgagaagcaggcggtcggccgccggggcgagatcagggaggtggacttcttctcgagggtctccagaccccgggaccaggacagcggcggcggcggcgggcgcggggtgtccggaggcggacgtgacgacgtctactgcttgttcgtgcagatcgagctcgacctgctgaccaccaccacagctgccacgacctgcgccggcgacgaagtgatgcagaccaaaaatcaaaagatagaggcttcagctgtggaagcggagctcaggcgggtagtggaggagaaccggcggctgcgcggaatactggaggagctcacccggagctatggcgcgctgtaccaacagcttctccttgtcacgcagggtcagcaccaccaacatcgactgcatcctgccgatctcatgatcagtaggccatcactggctcatacccacctgaccagcaccgcggcctcgcagtacagcgcgtccactcggctgctgctggaggcgcgcgcgtcgtcctccgccgtggcgcagccgcgtgccgtcgaggacgaggttgtcagcggcgccggcgacggagccggggtcgtcgaggcgtcgccttcgctgagcaatggaggaaacaacgacaacgacgccgccgcggccgacggcaagaggaagacgtctccaccgagagagagtggcgagcaggcggcggcgtcgtcggagctgccgggccggaaggcgagggtgtccgtgcgcgcgcggtcggaggcgccaatgattagcgacgggtgtcaatggcggaagtacgggcagaagatggccaaaggtaacccatgcccgagagcatactatcggtgcacaatggctgtggcatgccccgtgaggaagcaggtgcaacggtgcgccgaggacaagacaattctggtgacgacatacgagggccaccacaaccacccgctaccgccggcggccacgaccatggcgaacaccacgtccgccgcggctgccatgctcctctccggcccggccaccagccgcgacggcgcggctgccctcctcggccacccggcggcagcgctgttccaccactccagcagcagcatcccctacgcgtccacaatggccacgctctccgcctccgcgccgttccccaccatcaccctcgacctcacccagcaggcgcccggaggcctgctgccccacggactgcatcgcccgcccggaggaatgcaccccgtggtggccgccccggcggcggcgatgccgtttcctgcaccatcgccgctggcgatgttccttccgcagcgagcgcccacggtgccgaccgggctgccggtcgcgccgcggcagcagcagcagcagcagtcggtgatggagacggtgactgcagccatcgccgccgaccccaacttcaccacggcgcttgcggcagccatctcgtcggtcatggcaggagcagcgcatcaggctcagcagcctactccacgtgcgagcaacatcatcggcatccccggggatgaggccaacggcggcagcgcgggtgccgccacagcaggtccgagtccgacgacgacggcagccggagcacatgcggcgtccggcggatcgcctcggttcgcgacgcagtcctgcaccacgtccacaacttgagggaactgatgagtacacgtacgtgctgagtttggcgatcacagaccatccatctgctgcactacttcgactacgactgtctgtaaaattgatgagtgtattatgtttattatgcacagaaatgagatataccgaaccatacttgttgtattatgtacagatgaaaattggaaatatacagtagttttagctgaattaatt

SEQ ID NO: 39957 - DNA, 268 bp, Zea Mays
ccacgttagcggatgatgaagaccagagctttcccctaatccctctctcctcgatttctctccccgaagcccgatcccgacggcacgcggttggagtagccgccagctctcggcaacaacagagctctctcactcccatgcacaatgacagggttgggcggtgcacgtcgactggatgaacggggaacagcccatggcggcgatgtcactcggctctccctcacagacggcgatatcggtacctggcggctagagcggtgcagagctt

SEQ ID NO: 39958 - DNA, 2436 bp, Zea Mays
atagtagggtttggactatacaattctcgtgtctcgccctcccccgacgcgccgtctagggtttcacagccgcaccccgatccactagagctatggagttcgacgaatacgagtacctggagaaggcggtggagccggctcccccgccggccaatggttccggctccggcgagaaggaccgcggctcgcgtcgccgcgagggcgacgagggccgcatatcgaagcgctcccgctcgggggaggaccgcgagcggggccggcaccgcagcgttcgggaacaccgggatcgggataaggatgacgggaaggagaaggagaggagccgcgatagccgcgggaaggacagagacagggaagggagagaacgggagaaggagaggggggacaggcaccggcccagagagagggaggtggaacgggagcggaggagcctgagccgttcggagcggcgccgtatcgaggaagaggagatggtgagggagctggagatggagcgcgagcgcagcgagcgacaccactatcgcgaccgtgacgtcaggcgtaggaaagatgacggggcagagccagaagttgatccagaaagggaccagaggactgtatttgctttccagctatctctgaaggcagacgaaagagatgtttatgagttcttctcaagggctgggaaggttcgtgatgttcgtcttatcatggaccgaaactcaagacgttctaaaggagttgggattacacactgaaattttatagtttgctctacatgctgggattatcggcaatttacaagttctaggcaataaagggggcacccaagaaccaagttcgaaacctctacaatttttgatcaaaatgcctgaagttttctgtgaaaaattgaaatgtcttaacatatgatgccccacttattgttcttcttttcttttttacaggaagacatcttttcttggacgcttcgatgtttgtactaaacatatatctaaatttgcaggtacattgagttttacgatgttatgtctgttccaatggcaattgctttgtctggtcaaccgctgcttggacaagcagtgatggttaagccatctgaggctgaaaagaacttagttcagtcaaatgcgacatcaggtggtgcggcttcaggtggagcaagaaagttgtatgttggcaatcttcactcaaatattactgaagaccaattaagacaggtatttgaaccatttgggcaagtggagcttgtacagcttcctctagatgcaatgactggactgtgcaaaggttatggctttattcagtttgcccggcttgaagatgcaaaagctgcacagagtttgaatgggcagcttgatattgccggcagagttattaaggtttcagctgttactgatcatgtgggagtgcaagctagtggaggctccagagctgctctaatgctcaaattggacaggagtggtacagcaaccagcttaactggtggtattggtgctgctggagtggctgtaccagctacttcagttattggggcagcaggagctgcttctcttctgtcaccaacagtttctgctgttggatcagttcctggggcacctgtgcttcctattaccgctcagaatgtgatcatgtccacacctacagaattcttgttgcttaaaaacatgtttgacccatcattggagacggatcctgattttgacttggatattagagatgatgtccaagatgaatgttccaagtttggtgcagtgaagcatatttttgttgacaaaaatactgcaggcttcgtgtatctgcagttcgatagtgtaactgcagcagggaaggcccaacaagcacttcatggaagatggttcgccggaaagatgattacagcgacatttatgtccgatcaggaatacagtactaagttcccaaacttgtgagcatatgcggggaagagttggtcagacccgcatagttcgttcggagagtttgctagtgctgtatcgttggatggtagactagacgaacaccttattgattgtatgacaggatagtttcagttgcagcgctggtcgtgcgtacaatgtttgatgtactttatttacggcatcacacacagtgaccatcccttattttgtccaccgaatgaaatgccctatgatctccaggcacgttggcatatggtttatttatgtacgatctgttggcactggtacgtatttgtatactaagcaaaagcgttacataatcacaatggtacctttattagtcccctgtcgtgggatatgcggccgcattttggccagctttccaatgtgttccattttatttttgttctcatgatgtttcgacatgttttcatcagtttttcctttcaccaaggtcactatttcattccgtttcattttcatttactccactgatactgtatctagttattttatttggtttatcaagaaattataa

SEQ ID NO: 39959 - DNA, 2613 bp, Zea Mays
atgcaacgctggttcccgggcccggcctataaactccacatgtcctccctgcaggctgctcctctcatcgtccgacgcgactgctttccatttgccactgtcggtgtcgacggacgcagatattctgtggctcaaacctttggaggcacgggcacgggcacggggcaccgaagtgttggtatacgcggcagccgggatagcgagcgtatggccacctacttcgtcctcaacaccggcgcgaagatcccgtcggtcgggctcggcacctggcaggccgacaacgggctcgtcggcgacgccgtctatgccgccgtgaaggcaggttacaggcacattgactgtgctcaagcatacaacaacgagaaagaggtcgggtttggtctcaggagagtgctggacgagggcatagtcaagcgtgaagatctcttcatcacctccaagctttgggacattaaccatgcggcggaggacgtcccggttgcactgaacggcacactgaaggacttgcaaactgactacgtggatctctacctcatgcattggccggtgaggatgaagaaaggcgccggcttcggcccgcacgccgtcgtcccgtcagacatccccgcgacgtgggccgcgatggaggagctgtacgacgccgggaaggcgcgcgccatcggcgtcagcaacttctcgagcaagaagctggcggacctgctggccgtggcgcgcgtgcgccccgccgtcgaccaggtggagtgccacccggtgtggcggcagggcaggctccgcgcgttctgcgcctcccaagggatacacctctccgcctactcgccgctgggctcgccgggcacggcgacggtgaaggcgggcgcggtgctggagcacccggccgtcgtctcggcggcggagacgctggggaagacgccggcgcaggtggcgctgcgctggggcgtccagatggggcacagcgtgctcccgaagagcaccgacgaggggaggatcagggcgaatctcgacgtcttcggctggtccttgccggaggacctgctcgccaagttctctgagatcgagcaggaacggctgattcgtgcgggcttctttgttgatcccgacggcgtgttcaaatccatcgaggagttttgggatggcgagatctgaacaactgtcctgactgggaggagctgagtgacggaatttggccactggcaaggcgtactgtgcctgtggaagaataaatttatgcgtatgaactctgaaaggcagcgtagttttcaggtagtttgtgctcggcactccaataattcctcgatgctcaagtggtctatctatcctctaaactctaaaggccatgccgctcaagcggtcttttaagccagcatatgcacaatgggaaaataggtgctaagactctctccagcaagatccggtaaaagcaactctacatacatataagaggagcagcagagaggccattatttctcaggggtttctccatgcgaagaaggcgatattctcgactgttcacgaaaagcatctcaagaaatcagaatggtcctgattctctgttctttcgtcctcgtattccacttcaccgtcccaaagatcctccaagagaacttcgccatcagatcgtaagggatggaccaatcaaatatgtcgaagttctctccgatccttgttctgtcggcactcttaggaagcacactctgccccatttgaatcccccagcgcagagcgacctgggcaggcgttttctgcaacctctcggcaacagacatgacaacggggttgctaaggacgtttggcccactgtatccaggtgatccgggtgagcctaagggcgaatatgcctgcagcaacggaaccagaggctcagccagccaatgggaagtgagagcagatgcttatatatgttctctaaaacttacagaaagatgaacacccgttgactggcacagcttgcgtagcttgtcttgctgccaaactggatggcactcgacctggttgaccgctggaggcacacgcgcaacagcgagcagatcctgcagcttcttgcaggaaaaattgctcacaccaatcgcgcgagctttgcctgcgtggtatagcttctccatcgctccccatgtagcagggatgtccgtagggataaggttttccgggataaacatggttcctttctggatacggattggaccatgaatctgtaaagtaaggtcattatcagatagatcttagcaggtaaacagttgtcagactattatctggtaggtaccaagatcaagaacaggaatttacaaggtacagatctacgtagtcgagccgcaaatcttcgagggccgagcaaagatcctcctgcacatcttcaggtgcatggttacctggcctgcaaaattcagagtttctgatcttagagcagaaaccaatgatccgcatcattgcttcagataagcttgagaagagaagccttaccatagcttagaggtgacaaacagatcttcacgcttgaccacgccatcctcaaatagtttctgtaaagccagtccaacctataaaagagaatagacttcaatctaacaactgattgtttatgaacttggcaatgagttcataggaatttcataacttaac

SEQ ID NO: 39960 - DNA, 1534 bp, Zea Mays
cagatcgtattacccattttttctgaagagaaaagctctgactttaagaaaacatataaaggttgtcatcagaagctgtaggccttccaaatcaacagcatgacatttctcaacaaaattttctcactgacaacttggttccacagaatctagcaattccttcagtcgaatatccaaataatcacaagcaccaatcactcaaaaatgcagcagagaagggaatgcaagccagtgacttacttctagcaaaagcctggttccacagcactcaaccaatgactagaagtcgttcgtcagagttaaggaggaggtatgctgcaatgcaaactaatatgacaccaataactataggaagcattgaagcaattaaccagttaaaacaagattttacaaccacgacaaacagcatacctatgagcaacacacctgttcagacaccaaattttgcatctccttcaagttcatcaacatcccatctggataatccacatatggcagcacaagatactgttacctcagtggtgagcatgctcaaggacacgctcgagcgcaagaagcttggtagccatgctaacaaagacacctcagtaggccatccttttggattctatgatactcagcagtttcaacagaacattcttggaggaacggatttctttcccatcatgacaactgcccaggctcaggattccctgatgcttcccaaggtcgagaggcccatggaaccaaacaatggtagcttcgttccttctacaaaccaagtttggttcggtgcagcttctcgagagccttcgcacagtggatcttctactgctatgaccacttattcagctgggttcgaaatgtgcgatgagctaccacctgcagggcaagcgatgtctatttgtgagagctccagaaaaaacgctgcaaatggaacaaccatcggcagatcgaaaggcaaagaatacagagagagggtacaacaggataatttgaaagatgagagaaagatgagctcaactaatacttctggagcatcgaaagctgataatggagatcctatgaaaaagcgcagggttgagcgctcccgcaaaatggcagaagcgaaggaaagaagctctacaccagtaataccgtccgacatgcaggccgttcttaagcgctgcgaaaccctagagaaggaggttcggtcgctaaagcttaatctgtccttcatgaacaggaaagattcagagcagaccaagcagatcgaggagcttcaacagaagaacgaggacttggccgaagagaaggagcggttgctggaagagatcgagagaattgtctccgaccccaacacttgagcacccaatctcctttttttttgggtaacttatttttgtgtactaatagagttaggcttgaaatggtccttgatacaaatacgtacagtccagcagggcagcaagaattaagtgctggcctaaatgtatcaccattctttccttgttatcacaagtttaatgtatattaataccaacaagcaaagggatcagggattacagtttacttc

SEQ ID NO: 39961 - DNA, 2418 bp, Zea Mays
cggagttgctgcgtggtcgcaccggagggtttatcaacgaaggttaaacaaatcttgccggctcaacgcttcgttaggagaagacggaagactgcagaaactcctgaggaggaggacgcggggaataaaatcgagcgataaaaaaagtatcctgttagagatatgtagtgtgtactacgcatttcagagttcacatgcagtcgtaattaacaggttcattttggtcggaacagttgctgagtttccacatcatgcatggaactgaaatatacatatgcaggaccaggactgctgtggaacagtatcctgaactaaacagctaaaatacacagtagaaactaataaactcactggacactggacagggctgatggatgctaccactgttgattccaaatggatctctcccgccactgaagatgggtccatggacaggcgaggaaacccagctgtcaagacaaccaccggaagatggagatctgccatcctgctgctagctaactatgggctcgcgacgtgcgccttcttcggcgtcggcgtgaacctcgtggtgttcctgcgccgggtgctccaccagggcaacgccgaggcggccaacagcatcagcaagtggactgggaccgtctacatcttctcgctcatcggcgccttcctcagcgactcctactggggccgatacgtcacgtgcgccgtcttccagatcatctacgtgatggggctggtggtcctgtcgctcgcgtcatggctcttgctggtgaagccgtccggctgcggcggcgtcaaggcgcactgcgacgggccgtcggcgcccggcgtcgcgctgttctacctgtccacctacatgatcgcgttcggcaacggagggtaccagccttccatcgcgacgttcgggtcggaccagttcgacgagacggaccccgaggaggcgcgctccaaggtggccttcttcagctacttctacctggcgctcaacgtcggctccctgctctccaacacggtgctggtgtactacgaggactcggggcggtgggtcatggggttctgggtctcggcggccgccgcggcgctggcgctcgtgctcttcctgctcggcacgcccggctaccgccacttcaagccgagcggcaacccgctcacccgcgtcgcgcaggtgttcgtcgccgcgctgcgcaagtggcgcgccgaggtcccgcgtggcgagctcctccacgaggtggtggaagcaggagaggaccctaaggtctcgggcatccgcaagatccttcacagcgacgggctcaggttcctcgacaaggcggcgacgatcacggaggaggaggaggaggagggtccgtggcggctctgcacggtgacgcaggtggaggaggtgaagtgcatcctgaggatgctgcccatctggctgtgcacgatcgtgtactcggtggtgttcacccagatggcgtcgctgttcgtggagcagggcgccaccatggacaccaacatcgggtcgttccacttccccgccgcgagcatgtcgctgttcgacgtcctcagcgtgctggcgttcatcgccatctaccggcgggtgctggtgcccgtcatggcgcggctgtcaggcaacccgcagggcctgaccgagctgcagcgcatgggcgtcgggctcgtgatcggcatggcggcgatggtggtggcgggcgtggtggaggtggagcggctgaagcgcgtggcggccccggaccagccgagctccctgagcgtgctgtggcaggtgccgcagtacgcgctgatcggggcgtcggaggtgttcatgtacgtggggcagctggagttcttcaacgggcaggcgcccgacggcgtcaagagcttcggcagcgcgctgtgcatggcgtccatctcgctggggaactacgtgagcatcatgctggtgagcgtagtcacgagcctcaccgccggtgagaagcgtccggggtggatccctgggaaccttaactcaggacacctcgacaggttctacttcctcctcgccgctctctcgctcgtggacctcgccgtctacgtcgcctgtgccatgtggtacaagggcatcaagcttgacggcggcgacggcgataacaggagaaaggtctctgcgcacgtctagctagccactgcatactggacctcgggccttcagttttcaggttcagagacgtgccgggctggcccctggccgtatgcccgtatagtcttatagagagaggagagagagagagaggaaataaaatgtcaaagaatatgtaaccatccgctcggcgttggatggcccatgttgttatgtatctttggtcagatgatccaagtaacctcatgtgaagtactaatgcaataattatatatggatagtacactatctgtgccttaggacggcacgtaattatatttaatgatgagtgattttag

SEQ ID NO: 39962 - DNA, 2678 bp, Zea Mays
ccctctatcagatttttatctgccgcgccttctgattttttttccaccgtcggaggcatacgtcccctgccctcttcccatatcggtgctcatctcctgggttgaagccgccgcacagccttcatctccccgcccagcccctctctctggcgagcttgacccggcgtcgagctctggcggtcctcctccgctgccactcgttggaccttgcccctgctgcgccgtcgatagctcaccacaccctctcctccctggctcccgagcttcaaccatggagcttgtcccctctctgctcgtcggtgacctacgtcttctccagccaagccgcagccaagctcatctccatagccgacgcccctgccctcctgctcgccatggctggccatcggacgacgcacagcaacctcgccgtttctgagcccgaccccgccatggagctcacggcgcctactgctgctcagccttgggtgccgtcgctgagctcgccctgctccctggtgcttcctgctcgccgtctctggcgagctggctgtcctgcccgtcatggtggcgcgcgctccatctcccatggcgcccggccgcccctctttgctcatcttcgccgtcgggctgggatattccttggtgctacaactgggaggtgctcgccgagccctgtatcactggttaagcgtgcctgcccacaccgtcgtctttgatctctcgctccggtctccttgttcttcatcgcttgccaggtgttcggtaaaatgggtgaaccggtgaacgtcgttaattttatgttttcgagtcaaattactatctggtgcttatgggtgtttttgtgtgtgagattggagaaaggagatcctcggattttgtggatgatgaagtaagatccatgtgacgttcgccaagtattcggtggattgctcgaactaggattcgttgtcgttttcgtgaattcgtgttgttttgatcatgctccacgtatccatccagcgccctgtacctcaacaacaaattctttcacgccgccgcaattgaatcaagaggcagcagcctccctctctcgtgacatcgccggtggtaccaatttgggcgccattgagggtgactacgccacctcgcctgtgccctcgcactcgcaggtaattgcggtggtgccaatttgggcggcagtgcagctggtgacgcctccctcgtagctccacccacaggttactgtcttgctcagatctgccctcattatagaagcaacatcgacttgcgtgcccacgacacaagctcgtgtcagtgctactgccaccatccctccacagcacagccacgctgcctgcctcatgtgtcactactgcgtcctatcctgccacaccggatagaacttctacaaggatatacaaggaagagttagcggatcaaggaactccttatgttcaaaaaacccatgataagcaattttctttctggtttaagaagcatattgcaaaactacgttacgtggatggagaagacattagtgatgacctatttgcattgtcatgtgaaccggaccttcgggttcgaatattttcagcatgtcttgtcgatggggttcgatatcacactattgaccaaataattgagttgcgttataactcagatatgtccaaatgtcgcacagtggttctatttcgttgtgactggtttgacacttatagcaagaaggttagaatgaaagatgatggatattttagaagcatcaaccatggtagttgttggtacaaggatgatccttttattctatcaacacaagcaacaaaagtattttacttggatgacactaaacactgtgaaagctggagaattgttcaaaagtttacacataggcacttatggaatgtcactgaaaatgaaaatgaggaaacacccatgggcttgggactatcataccaagatgaaatatgtgcaggttttcatgtacaagtgaatgaaggaaatttgaatgatgaagtaccggatagtgaagattgtcaccacgtcaatacaagtttagttgatgagtttcgtaaaccaaggcaagacaatgtgcaaggagacgggacaagcgatgatgaagatgaaactatatggcaatatgttagtgatgatgaaagtccaacaattcttgtcgaggatgatgatgatgatagcgatgccgagtaaagactagaaagttgatggtggaagcgttgctgacctatatggatcttggtcatgaaaatggtgacccacatggatattgggtcactatgataggatggtggcaattagtgtgtgctaggatattaaattttattctagattttgggatgtcctaggtcttttagctcggacaaagtctatgcttgtgtcaaatatttttatctttctctatatgtctacagacgaagaaattataatatgtcagaactataatatgaatgagcaccaattcattgattttattcagaaatcatagtatccctttttcctgggcatatgtttcacttaatattgttttagtgtaggctgagtgaggaattgaggatgcatgcagtatgaatatgtgtaggcaatctgaaattctgaatatgtgcacgcaatctaaaattctgaatatgtggagataatctaaatatgtgtaggcaatctgaattgattttagtcttctggtgatattcacttgtgccattgaatat

SEQ ID NO: 39963 - DNA, 1005 bp, Zea Mays
aagcctccgcctcgtctcgacgccttacacccagtgccaaccgccgtgccctcaccctctctatctgcgccgtctctcactctctaccgccgccgccgccgccctacgccacgcaaaaagcgccacaagattcgcccctgctgaaaacgcactcgatggcgtccgcgacgggggtttcctcctcggagatggcggtggaccacgcgacggggccgggcgccgtggacaagccgcggttcgatgctctgacgccgaatgagatgagcggcgggaggccccagttccggaaagtgcccgtcccgcagcaccggttcgcgccgctcaagcgatgctggatggaaatctacacacccgtatacgagcatatgaagatcgatatacgcatgaatctcaaggcaaggagggtggagctaaagacaaggcaagacacaccggacgtgagcaaccttcagaaatgacgtgaagaccctgcgaggggagcatctgtcgcgtgctattggccgcctatcagggaaaggaggcaagaccaagtacgccattgagaactctaccaggacccgcatcgttatcgctgatacaaagatccatatacttggatcctttgttaacatcaaggtcgcgcgggattcgctttgcagtctcatcttgggttcacctgctggcaaagtgtattctaagctaagggctgtatcagctaggttggcggaaaggtattaaattagattggttttgcttgtaccatgtaacggttgcagttttgctgacagtatgttttactagcggatttgtgtgctcggggatgctgggagatttaaattggtgtgtacatgtgctcttgtgccaccacaatctatgtggtggggttgattttgatgaaaattagttattttcttatcctaacccactataaatcgataatatatgtattgaggtgggtatgagtgtagccaaacaaggcttgagatgtgtttctacttgtttcatagagtgcatgttcctttgcga

SEQ ID NO: 39964 - DNA, 2094 bp, Zea Mays
ccgcaaactaaataaaataagcatagggggtcaaataagattacgtgccaacttccaagaggagagctcggaaaaggaaaagaaacgaaagaaaggaaaatcgaggtagaagaaggctatgtgatgtgaggggaaattacgtgagatataagccaaatccattgaattctatcgttagctggctgcttgagctgagttctttgattggcctccggtgagtggtgactcttgagctccgccgcttaacctgccagtgtgcgagctctgcgtcttgctatccctgactattttcctgccttctgtctccattttcctagtgctatactaatttctgaagacctcctggaggaattctctgcttcatttctcgagcggctcttacccgcttcgccggttgtccgatttgctgtgaagcaggagagcggccgccttcagtcaaggaaaatcgctgaagacagccgcagattgccagattcgtagttccgcttctgcttcggcgcacctgttcggtgtggaatgatggaggtgagcccgtctccggagcaaggagtgatggcgggaagggagccgttcgggctgccgaagaccccggcaacgccgccgtcctccgggggcacgcagggcctgcgcatggcgtacacgacggacggcaccgccatcttcaccccggtgagctccgtgccgcccgcgacggcgacataccagcccgtgggcggcagcgccgcgtctgcttcaagcttggctggcgtaggaggcaatggtggcgcgcccgtgcactcgggtggcgcgggtgagccggggaccaagaaaaagcgtggccggccaagaaagtacggccccgacggctccatgtcgctggcattggtgcccgcatccatggctggggagccggcgccggcggctcttggagcttccggtcctttctcgcctaacggcccgaaggcgccgaacactgcgccgtcagcgtcgccggacggcgcgaagaagcggggccggccgaagggctccaccaacaagaagcacgtggctgcgctcggtaatattgggccagcgggggcaggttttacgcctcatcttatttttgtaaaagccggagaggacgtatcggcaaagatcatgtcgttctcgcagcacgggacacgcgcggtctgcatcctttcagcaaacggcgccatatcaaatgtgacgcttcggcaatctgccacttcgggtggaacggtgacatacgagggtcgtttcgagatactgtctctgtccgggtcgtttcttctgtcagagaacggtggccagcgcagtcgaactggtgggctcagcgtttcgctagcaggccccgacggccgtgtcctgggtggctgtgttgccggactcctgacggctgcttcaccggtacagatcgtagtggggagcttcgacgccggtggaaagaagcagccgaagcagcagcagcagcagcagcttgctccgtcaccggcgccactaaatctcgcgccgacgggcgtggcggcagggccgagcagcccgccgtccagaggcacattgagcctaagcgagtcgtccagtggcgccccgccgagcccgccgcacgcaggggccagcggtggccatgggcagcagcagcagcagccacagccaggtggcttctccggtctgttctggaaatgacgagacccccggacaccgtctgaccgtggtagaactggcagaaaggactaaaggcgcgtgaggcactcgtcgaggccgaagctcactcggtgagaagcagcggtagcttgtaggtggtgtcaagactgtgtagctcttgctgttgctgtaggtgtaaatcgtgcgttgtgattgtgaggtggttgcttattgtctgtcgtctggaatggatgccgtgtactgaacctgtgcccccaatgcagcatgtcggaagttcttggtttcttctgcttgggtgcatcggcttgccgcacgatatgcatccatgcccataataatacgtgtatagatccaccttgttgtgaaggtcacacacaactcacaatgcaaacttgtctgaaaagattgatacaaaatggcaaattttcgcgctgctgctggagctgcgcggcg

SEQ ID NO: 39965 - DNA, 3421 bp, Zea Mays
ggacaaatacttttggttgtcctagcaacctcatcagagaaggagagtgagtcactttataaaagggtgaagataaatcgtcttctcaatgtttttaagaatgatccagtgatcccggcatttccagatctgcatctttctcctgctgcaattttgaaggaattgtcatcatattttcaaaatttttccagtcaaactcgtctccttgctcttcaagcgcctcatgaaattcagggtcgtgagctacaagattatcagaggcattacttgattttgaatcacatgggaactatcagagctgatcatgacgacttctctatacgttttgcctctgctatggatcagatgataaggttgaagtcatcagatggtgtgtataatgactggtcccgcgatatcaaagggaacatgtatgatattgttgttgaaggcttccagcttcttagtcgttggactggcaggatttgggaacaatgtgcatggaaattctctcgccctatttcagattctcaacaaaactccatgacatgttttgactatgaaaaggtagtacgctataactatactgctgaagaacgaagggctctgcttgaattaattggttacataaagagtattggattgatgatgcagcattgtgatactttagtgtctgaagctttgtgggaaacgatacacatggaggtccaagattttgtacaggataaacttgatactatgcttcgtacaacatttagaaagaagaaggacctttcccggattctctctgatatgcggaccctctcagcagattggatggccagcactagtaaagcagacccagagcagcactcgctacaccaagaaactgaggaaatgagacaaaacacattttacccaagaccagttgcaccaacagctgcacagattcattgtttgcaatttcttatatgtgaacttgtatctggtggtaatctgagaaaagttggaggactatttgggaatagtggctctggcatacctgtggaagatcttaaacaactagagacatttttctacaagcttagttttttcttgcatattttggattatacagcgactattggtactctaactgatcttggatttctttggttcagagaattttaccttgaatcttctcgtgtcattcagtttccaattgaatgctcgctcccgtggatgctggtgggccatgtcattgaatcagaagatgctggtcttctcgaaagcattttgattccatttgacctgtacaatgactctgctcaacatgcactaacttctctcaagcagagatttctttatgatgaaattgaagctgaggctgatctttgcttcgatcttcttgctcagaagcttaatgagatcatctttacatattataagagctgtgcagcaagtactcttcttgatagttcatttacatatgcatgcgatgatggtgacaagtattttgtcaaacctttgcgattcgacgcgattttcaagttaaggagagtaatggttttagggaggacaattgatctaagaagcataattactcagagaatgaacaaaatattcagggaaaatattgactttctacttgagcgctttgaaaatggagatctttgtggtgttgtggaactgcaacaactgctggatattttggagcttacacaccaatcaatatcaagatttcttgaattggattcttactctcttatgcttagcgagatgcaagaaaatctttcgttggtttcttattcaagtcgcatctcttctcagatatggagtgagatgcagacagatttcttgccgaatttcatcttatgtaataccacacagcggtttgtccggtccgcaaaaggaactcaccactcttcgcatagatcaagcgcttctactgggaaaccttacttctattgtggatcacatggtcttgctgggctgtaccgtgacttttttggagtccctcatatgtttgcagttgttaaacttcttggttccagatcattacctgcaatcatccgtgctttactggatcatatatcaagtaagattacaggtttgctaccgaaaataaatgcactgcaagaagcattaccaaaatctattgggcttctttcatttgatggtggtatagcaggttgccaaaagatagttcatgaaattttgacatgggaagcaaaatctgaagttaaaactgaagttcttcatgaccttaaggaaattggaagtgctttgtattggatgagcattctggacattgtgttgagacaaatcgacactacacagttcatgcagtcagctccgtggctaggattggttccaggaaatgatgggcaagtgaagcatgcctactctgataatactccatttaccacacttttaagtgctgcctctaatgctgtgacatcaagccctacatgcccaaatccatctacgtttcttgtcatgtcaaagcaagctgaagctgcgagtctgctgtacaaatcaaacctcaactctggtagtgtgctggagtatgctcttgcattcacaagtgctgccctggatagacactatagcaaatggagcgcaactccaaaaacaggctttatcgacattactacttcaaaggatttctatcgcatttttagcggtcttcagtatagttacttagaagatagcattaacaatccttcgaagaaacaagaaatgctgggtgattctgtagcctgggctggctgtacgataatgtacttactgggacagcagcagcacttcgagctttttgatttctcctatcaatttctcaatgtggcagaagtagaaagtgcgacagtatcacactatcaatcttcagagaggactaaaagttcaaatttcttgcaaggctacgagggcatcctggaagcgatgaggaaggctaggaggctcaataaccatgttttctccatgttgagggcacgatgtccccttgaggacaaggttgcatgtgctatcaagccaagtggggcaccgcttcaccggatgaagtttatgaacaccgtttctgcattcgagacattgccacaaagagtcacctaaccagcttccaggcaatgtgcagaatgtactcttgtatgcggggttatatgttatgttgtaaggtaaatgtatattatgtagtcacaagtcacaaccatcaaccgtggatcctggacctgaacaggagaatgtgtttgcttgctatatatgaaaattaggtgggtatgttgaagttgaccctgagttcgcaagtttagctttcaactttgagactatctcgctgaaccaaatatgtaaaccagctggagagttgagccagaggacacgtgctagttagctgttcttctcgtgtctgtatttctcagactgctctcaaagtatatttaatgtatgacgattcagattagcttaaaaagttgtgttatccgag

SEQ ID NO: 39966 - DNA, 2358 bp, Zea Mays
gccccttctccgccttcattccccaaacaccaaaacccggctccgcgtctccgccgaagcgggaggcgggcgggggcaggcacctgttcgcgctgcgcgaaattacactccccctccctctcttttctcactccgattccccactcgcgatggccgcgcctcgacccccgccgctgggggccctgggaggcgttgtcggtggcagcggtggcgccgcccccgccgccggggcgcccgccggagtcagcatgcggatgttccacggcgagtcgttccttggcgagatggaggtcttcccgatgaagcgggacggcgaggggggcctccctttcccgaccaacgagatccgcgtcagccacttctcgccggcgagcgagaggtgcccgcctctcgctatcctgcagaccatcgcgcccttctccgtacggtgcaagttgcagaccaagcttacgcctcccaacccgggcctccagcgcttgtatctcacttgtttcaacgagttcaagagtgctgtggtagtagttggggatgaggagctgcacctggtggcaatgccgaccaaatcagggaaggtgccatgcttttggtgctgctcagcacgctcggggctctatgcagcgtccgttggcatgctcaacttgcgctgtcttgccattgtgtttgatcttgatgagacccttattgttgctaacacaatgaagtccttcgaggatcggatcgagatgctctcccgcagaatggatgtcgaagatgatcctatcagaatagcagggatgtctgcagaaatcaaacgatatattgaggacaaagagcttctcaaagaattcattgacatggatacagttacggacaatggcaaaatagttggaacccagaaagaggaggttcaacctatgtctggtggtcaggagcgtgttttccgtccagttatcagactgcctgacaggaatgcaattttgactcgcatcaatccagagaatcgtgataccagtgtttttgtaaagctaagacctgcttgggaagaattgaggagttacctaactgcaaagggacgaaaaagatttgaggtttatgtatgtacaatggctgagagagattatgctcttgaaatgtggagacttcttgatccagaaggcaacttaataagtccacaacagctctcagaacgcgtaaattgtgtaaagtcaggttccaaaaagtccctgcagaatgttttccgagacagaagatgccatccaaagatggccatggtaattgatgaccgacttaatgtttgggatgataaagatcaacacagagttcatgtcgtccctgcatatattccatactatgctccacaagcggagatggccaatgctgttccagttctatgtgttgcaaggaatgttgcttgcaatgttcgtggtgggtttttcagagagtttgatgagaatctattgaggaaagtgttcgaactatactatgaaaatgggttattggatcttccatatgctccagatgttggtgactatttagtctgcgaggataccagttttgtaccaggcaacaaagatcaggctcctatacctgagggcatgaggggaactgaagtagagaagagattaaatgggcagtcatatcggtgggagcaaagggaaggacaacaaatgccatcttcaatccgttcaccagatgacgagggaatgcctatccgaggtactggaggagttaggaatatccagccaaatgggggctcgctagcaataaccccctcggtatatgtcacagtgttgcaagaaattgggcggctgtgcgactccaaggtggaatttagatctactgtaagcagtgtcagaagtatgctattttctgtagaggttctgtttaataatgaaaaaattggaataggcgtcggaaaaacaagagatgaagctcaagttcaagctgctgagaaagctctccaaaatttggagaacagttatttgtcatctggtgctccagttgctggagttcctaagaaagattcaaggaagtcccctgggaggagtggtaatggctttctggaggatgctacttgttcagataacgatatctctatgcgagaaccttctggaagtgcattgaaattggatcattcaaataatgtggatacattgtcgtctattatgagtcttattagagaacattgcttggaggaccaacatgtagtatttcgagatgaagtccagaattctagcccagccaggaatgaagaatatcatttccaggttgaactagcaggattgattctcgggaggggcgttggttcggacagagaggccgcgaagcttctggatctcaggggagttcggctgcgactacggaggcccaattgctcat

SEQ ID NO: 39967 - DNA, 1820 bp, Zea Mays
gccggatcatggcacagcttttttgaccttgtctgtggcccccctcaacctctgcatcgacggcctcgagagaagagtcgccggctcgccgccctgctccggcaccagcaaaaccgccaggttatcccatcatggctgagacaaatgatgccagcccttcgtcgaaactccatacaagattgagactctgggagtttcctgactgttatgtatttgaaccaattgatggccttgctgacttgtacctatcagttagccggaccagcggaacaatgaatctagttcaagacttgccatcacgtggatccactacaaaacataaagttcaaacagtatatggtgtgataggagtactcaaacttgcagttggatcatattttgtggtgatcacggatcgtgattgtgtgggatcctactttggacacgcaatttttaaagtgacaggactaaaaattcttccctgcaataatgcacataacaccacctctactgatcagaaaaaaatggaaacaaaattctcggagctcctggattctgcagagaggactattggccttcacttttcctatgatatcaacctaacactttctgcacagaggctacatgatctcggcgatgaatatagagctcttcctctttggagacaggcagaaccaagatttctatggaatggctacttgttagaacctctaattgagaacaagctgaaccagtacttattgccagtaattcaaggcagttttcaaaatatccaagcagaagttggatcagagatggtaaatgtgaccctgattgcacgtaggtgcacacgaaggataggtactcgaatgtggagacgaggagctgatgcagagggttatgctgcaaacttcgttgaatcggagcagataatgcagtcaaaagggtttacagcatcctatgtacaagtccgaggttctatgccattcttgtgggagcagattgttgatttgacatacaaacctagttttgacattgttagacaagaggaagcgcctcgtgtacttgagaggcacttccatgatttgcaaaagaaatatggagctgtcttagccgttgatcttgtcaatacaggtggcggtgagggccgcctccgtgaaagatatgcaaaatctattgaacctattcttagtgaagatctaagatatgtgcacttcgacttccaccgaatttgtggccatattcactttgagcgtctgtctcagctgtatgatcagatcaaggactaccttcagaaacataagtacttccttataaatgataaaggagagaaaattgaggagcagactggcactacaagaacaaattgtatagattgtttggatcgcaccaatgtaactcagagcatgattggtcgaaaaattctggaaagccaacttcaacgtataggagttcttggtgctggtgatacaataagcaaacatccaacctttgatacaaactacaaaattttgtgggccaatcatggagatgcaataagcattcagtactctggaactcctgctctgaagggagattttgttcggtatgggaagcgaactactcaaggaattctgaatgatttgaggaatgcacttggtagatactacctgaataacttcgttgatgggactaagcaggatgccatggatcttcttcaaggacattacatgacatctgttagtagagatatggcagtgccaagcaaagcaggacttctgcagagttatgcgtccttccgccttgcttttgcattggttatgggagctctaatgttcatgttgatgtcactgagacagggtaagaattctgaatatttctga

SEQ ID NO: 39968 - DNA, 2371 bp, Zea Mays
cagttgcactgcacaccgaaaccttttgttttgcatgggctcttctcgtcaagcgagtcgtcacctacgtatgctaaacgcttcttgggctgcttgcagctcgcattcatatcgttgccacctacacagcactccccccgtagccatatatagcttgctcgcataaacgtcaaaaaggagactcttttggccctcttccggcaccggcaccggcaccggcaccagcgccaatctagctagtcagtttagcttcgctccttcgcttgcttgcaactctatccactagctaggagatggacatgaacaacgggtggcttggcttctccttgtctccttcggcagcgagcaggggcggctacggctacggcgacggaggcggcggagcgagcgcgagcgcgtgcggggatggagagggctcttgcccctcgcctgccgcggctgcctcgcctctccctctcgtggccatgccgctcgatgactctctgcactatagctctgctccagattggaggcacggcgcagcagaagccaaagggcccaagctcgaggacttcatgagcatcacttgcagcaacaagagcagtggccgcagcctctacgacagctgcggccaccacgacgacgagcaggccagcaagtaccacgaggtccacggcatccaccccctctcgtgcgggtcgtactaccacggctgcatcagcagcggcggcggcggcggaggcggcattggcctggggatcaacatgaacgcgccgccctgcaccggcgggttcccggaccaccagcaccaccagttcgtgccgtcgtcgcaccacggccagtacttcctgggcgccccagccgcaagcgcgggcccgccagcaggcgcagcaatgccgatgtacaacgccggcggcggcagcgttgtcggcggctccatgtccatctccggcatcaagtcctggctccgggaggccatgtacgtgcctccggagcgaccggcggcggctgcgctgtcgctcgccgtgacggatgacgtcccgccggccgagccgccgcagctgctgccggcgccgttgccggtgcaccgcaagcccgcgcagacgttcgggcagcggacgtcgcagttccgtggcgtcaccaggcacagatggaccgggcggtacgaggctcacctgtgggacaacacttgcaggaaggaaggccagactaggaaagggaggcaagtctacctaggcggctatgacagggaggagaaggctgcgagggcttatgacctggcagctctcaagtactggggcccctcgactcacataaatttcccgctgagccactacgagaaggagctggaggagatgaagcacatgtcgaggcaggagttcattgcacacctgagaaggcatcaccagcacgggagatggcaggccaggattgggagggtcgctggcaataaggacctgtaccttggcacattcagcacgcaggaggaagcggcggaggcgtacgacatcgcggcgatcaagttccgtggcctcaacgcggtgaccaacttcgacatcagcaagtacgacgtgaagcgcatctgcgccagcacccacctcatcggcggcggcgacgcgtgcaggcgctccccgacgcggccgccggacgcggcgccggcgctcgcaggtggcgccgaccgctcgtcggacgcgccgggcgaccaagccgcgtccgacaactcggacacctccgacggccaccgcggcgcccacctgctgcacggcctccagtacggccaccccatgaaactggaggccggggagggaagcagctggatggcggcggcggcggcagcgcggccggtgcccggcgtgcatcagctaccgatgttcgcgctgtggaacgactgttgattgtggcaatggcaacctggttggtagagtacgtagtagttagtgaagaaatgcatgtcattgcacctgcatgcgcatgcgcgagcacgaggtgtaataactttcggcagtagaagtggcggtgaagaagtggacgacacggcctggggaaggacatgcatggcgtactgcctccctgcaagcgagatgcatgcatgttgcacacgctcgccgtttcttcgcaagatggcgacaattttgccgcaatatgtaatgtaatggttccacatgcatgcatgttattcttcaatgaaacaccccactagtagttatctgatttttgtgatgacgttggcaaactaagctcgccagctttttgcggagtagtgatacaaaaacttacatgcatggtcggtgggtgtagtagattgatctaataataaagtgttcatattagtgcaagaatttggaaaaatgatgcatatgcggactaaattttggtagagtgcaaaaatggc

SEQ ID NO: 39969 - DNA, 3256 bp, Zea Mays
cccaaatcagggctatacatttggccagcaggctgggacgctcagctcccgctcccggacgacgacgatggccttggcgctgcaatggcccctccaattcccactccagctccaggcgcggcctcccgccgttaccgcgggccatcaccgtcgccgccaccgagtcctcgccgtctgccgctccccgccgctcccagctcgctgttgtgccagcgccgccgctgcggccgacacggggaaggcgcagacagcggcgaggagggcttacccattcgatgagatcgagccgaggtggcagcggcactgggaggagcaccgcacgttccgcaccctggacatcggcgaggggctcgacacctccaagcccaagtgctacatcctcgacatgttcccctaccccagtggggctgggttgcatgttgggcacccccttggatacacggcaactgacattctgtcaagattcaagcgcatgaaaggcttcaacgttttgcatccaatgggatgggatgcatttggtcttcctgctgagcagtatgctattcagacgggaacccaccctaagattaccactgaaagaaacattgagcgctttcgcacacagcttaaatcgttgggtttttcatatgattgggatcgtgaaatctccacgacagagccgggttattataaatggacacaatggattttccttcaactgttaaagagaggacttgcttatcaggctggcattgatatcttacaatcaggctgaggtacctgtcaattggtgccctgctcttggaactgtcctggcgaatgaagaagtagtagatggtgtgagcgaacgtggtggctatcctgttatacgaaagccaatgcgccagtggatgctaaggataacatcttatgctgatcgtcttcttgaagatttgaatgatcttgattggcccgagagtatcaaggaaatgcaaagaaactggatagggagatcaaaaggtgctgagcttattttttctgcagttgaccaggaaggacatgacctgggtgccactttattggtttacacaacgaggcctgacacgatttttggtgcaacatatcttgttgtggcacctgagcatgttttactgtcatctctaacatctgaggaacaacgagcacatgtagaggaatacagagaactttcagcaagaaagagtgaactagaaaggactgaacttcagaaggaaaaaactggggttttcagtggttcttatgctaagaacccagcaaccggggaaatcattccaatatgggtggcagattatgttctaggaagctatggcactggggctatcatggcagtgcctgcacatgattctcgcgaccatgaatttgctgtgaaatatgaacttccaatcattaaggttgtaagtccaccgaatggtaattgtgatccagtggaggcatatgaagatgatggcatcatgattaattcatctagttcttcatctggactgaatattaacggaatgctttcccaagatgctgctaagaaagttactgagtggatagagaataatggttttggaaagaaaaaggtaaactacaagcttcgagattggctttttgccagacagcgctattggggtgaacctttccctgtgagctaccttgatgataccaatgaaatggttcctcttacagaagatgacttgcccttgacccttcctgaattggatgatttcactccaactggtactggggagccacctttgaccaaagcaacaaattgggttagaaccattgacccttcatctgggaagcctgcgagaagagaaacaagcaccatgccacaatgggctggatcttgctggtactatttgaggttcatggatcccaaaaactgcagtatattggttgataaggctaaagaaaggtattggggtccagttgacatctacgttggtggtgctgaacattctgtcttgcacttgctttatgcaagattttggcacaaggttctttatgacatgggtgtagtctccactaaagagcccttcaagtgcctgataaatcaaggattgatactaggagaaagacaatgaaggcagatgggtttctgcagactcagactcaagtttgattgattgctaccaagaaaaagtagctccagacaaggttacaaaagttggagatcattatgttctgaaggataatccaaacattcgtctgaatgctcgtgcctacaagatgagtaaaagtcgagggaatgtcatcaaccctgatgatgttgtttcagaatatggcgctgattctcttcgcttgtacgaaatgttcatggggccattgagagattcaaagacatggagcactgggggaatcgaaggtgtgcaccgcttccttggacgaacgtggagactcatagttggtccacaattatctgatggatcatataatgatggaaccatgactaccgaagatgaaccaaccttggatcagcttcgagttcttcacagatgtattgcaagggtcacggaggaaattcaggaaacaagatttaacactgcaatatctgcaatgatggagtttgtgaatgctgcatacaagtgggaaacccagccaaaatctgttattgaatcctttgttctgctgctttcacccttcgcgccacacttggctgaggagctttggtttcgcctcggacatccacaatcattggcctatgaacagtttccagaggcaaaaagtgagtacctggaggaatcaaagcttgtactccctgtccaaatcaatggaaagaccaggggtacaatccttgttgacaaagcgtgctctgaggatgatgtttttcaaattgcagcctcggatgagaaactctccaaatatcttgatgggaaaggcatcaggaagaaaatttatgtgcctggaaggatcttgaatgttatcttagatcaacaaaagtcaaggacctgataattgctcttgtttgtccatttatctcgttatgagtcaggaatagagatcaataagacatgacagatctgtaaatttgttttttagcacttgcagtttactgtcaatttgccaacaacaacaacgtcgaacactcgttaggttaatgttaaaatccaacagaaaccgtcagtcaaggttaagcatatggatagttatttttatgcactctttggggtatttgaaactgctctaggttccagcttcagtgtggagctgtagtttacaatacagatttaaatagttttaacaaatatttttaatcaaaataataaacaaa

SEQ ID NO: 39970 - DNA, 369 bp, Zea Mays
cgaacgggttgaggatgatgacgggcggccggccattgctttcagcattgctgtctttcggatacatcaccgagcaaacaaaacgaaacgattggattcggaactaaaaaacactgaagatctatacgtacgggatgatctgttcctctttcgaaaactctcgtattccatatatatgcgcatgcacacgtacgtttgcagaatgtataaaccgagtcataaatcgactcggtgtacccttgtcacttcttccttggagacgcgctagctgtagctcttgttgctgatgcttgtctcgctctcgccatcgccacgtacgcaccaccgcctcataaaatcatggaaacaacccgtgtacgtatatatagg

SEQ ID NO: 39971 - DNA, 2362 bp, Zea Mays
ctgaatcctatgtcggtagtcgtttgattgatctttttattggaacagcacatatacaaccaccagcaagccaatcatcagatggtctgcctgacatccgtcctgctttcagacatgaaatgagaacaatggtgaaagaacagcagaagagtagtcgcagatatggtgtgatcaagtgtgatccactggtccggcaaggcttggatagaacagcaaagcacatggtcattccgtacatgcctatgttgattcccccaatctgttggacaggatatgacaaaggagcacacctctttttaccatcatatgtaatgcgcacccatggtgctcggcaacagagggacgctgttaaaagagctccaagggaacagatgcaatttgtttttgaggccttgaatactcttgggagcacgaagtggagggttaacaaaagagttcttagcattgttgacagaatctggtcaaatggtggccggcttgctgacttggttgatcgtactgatgttcctgtaccggagaagcctgacactgaagatgaaaccttgctaaagaactggaaatggcacttgagggcagccaagaagaagaacagtgaaaggcattctcagagatgtgatgttgaactcaaacttgctgttgctagaaaaatgaaggatgaagagggattttactatccacacaaccttgattttagaggtcgggcttatccaatgcacccttatctgaaccatttgggttcagatctttgtcgaggggttctagagtttgctgaaggtcggccacttggcaagtcaggattgcgttggctgaagatacaccttgcaaatttgtatgctgctggtgttgataagttgtcatatgatggccggattgcatttgctgagaatcatttggaggaaatatttgattctgctgataggcctttagaaggcagacgatggtggcttggggctgaagatccattccagtgcctggcagtatgcatgaatctcactgaagctttaagaagctcgtctccagaaacaacaatctcacatattcctgtgcaccaggatggctcttgtaatggtctgcaacactatgcggcacttggaaaggataagttgggagccattgctgttaacttagtcgctggagaaaagcctgcagatgtttacaccggaatagctaacagggtgatggaaattatgaggatggatgcacaaaaagatccttctgtagaacctgatgcagctcgtgctcgtctgatagttgaccaggtggacagaaaattggtgaagcaaactgtgatgacatctgtgtatggtgtcacatatattggagcacgtgaacaaataagaagaagactaaaggagaggggggtcattcctaatgactccgaactgtttggtgcatcatgctatgctgctaaggttactcttacagcacttggtgagatgtttcaagctgcccgtagtatcatgaactggcttggtgactgtgccaaggttttgacccttcagcgggagacggataaggttatggtgaagcggcagaggacagctttccctccaaactttgtgcattctcttgatggttctcatatgatgatgactgctgttgcttgcaaaaggcaaggtctgaattttgcaggagttcatgattcatattggacccatgccagtgatgttgatacaatgaataaaatactccgggaaaagtttgtggaactctatgatacacctattctggaaaatctgttggagagctttgagaaatctttccctaaattaaaattcccaccgttgccggagaggggagacttcgatatgaaggaagtccttgagtctacgtattttttcaactagcacaatcaatgttaacagttgcattatacacgctgctgcccggacatatctgagttctgagtgtagatctaccaactcgaatgatgaaagctaggtcatacatgagcataacccgaagagtggctttgcagaagttatcagaagctaagttggtactctgagcattcacaaatgcatcggcatcatttatcgcgttgaagttggcaatgaggtttgctaaataaaagtgggaaccatatcaaagttaaacgagaatccctgtaaatgtaattatgtaatttttttttgtctttagtgtttttattttccttgatcttggtactgtcgagagaaattcggctgaccggtagtttgtcggctggtgctgagtagagattatttcatactttgtagtttaacaatataatttagtaataaagtgatatactagtatttttctcgttgttttagctctgcataaagtttgaaagcttttttttttctcttcaagttaaaagaatggaaactacctgtaa

SEQ ID NO: 39972 - DNA, 2321 bp, Zea Mays
atttgccctgtcgcggtcggtcggtccgtggcgtggacctgaagcagcctcctcacaggctcccttctcacaccgtctctgacttccctcctgcgctcccgtcctgccttcacctgacttgttcgtacttcgctcctgggctcgctggcttcctcagtccttgctgctcgctagctccgttgttcaggcggtgcctgcgccggcgaggttaggcaggactcaggcgaagtgggctagcagccgggtggcggcggcggcggtggattcctgatggagtagaggcaatcaaggaagctggagttgcatggagggaactcaatacagcccttgcatatgatgatgcagtttctgttaatggcagcattcagcagaaggacaaaggaaagcaatgcccttattctatcagaaggatgaatgccacaagattaggggataggtttgctttaaaacttccctgtggactgattcagggctcttcaataactattattggtacacctggtggtcttcttggtaattttaagatagagttaactggggctgcagttcctggtgaaccagaccctccaattgtccttcattataatgtccgccttcttggtgataaactcacagaagatcctgtaatagtccaaaatacatggacaatatctgatgattggggttctgaaaaccgttgcccatctcctgattcagatgctaaggacactacaaaagtggatgatctagaaaaatgtagtagcatggtaggtgaggaccagaaagaaatccttccctctaagtttcattcaaatgtttcggccatgccacctgcaagtaagaagaaagcagaacctagaaagtattttccattcagacagggatatcttgccgtagcaattcttcggatcggagcacatgggatccatatgactgtagatggcaaacatatcacttcttttgcattccgagaggatttggaaccagggtttgtaggtgaagtaagaattgcaggagacattaaattgttatctgtgatagcaagtggcctgcctacaacagaggacttcgagcatgtcactgacttagaaatattgaaggctccacctgtgcccatggataaaccggttgatcttttcattggggtcttctctacagcaaataatttcaaacgccgaatggcagttcgcagaacttggatgcagtatgattctgttcgatcaggaaaagttacagttcgattctttgttggcctggtaagaataaaactttggaggtggacagctatattatgcacaaaaatgagttggtcaatgaggaactctggaatgaagcacgaacatatggagacatccagttgatgccatttgtggattactatagcctgattctttggaagaccatagcgatctgcatctatgggatgaagtactttcttcccttgaccgaactaatgtcaaccatggactgctgtatggtcgtgtcaattctgattcccagccacatcgagatccatatagcaagtggtacataacccctgaggaatggcctgaggagagttatcctccctgggcgcatggaccaggatatattgtttcaaaggacatagctaaagaagtttacaggaaacacaagagtggggagttaaagatgttcaagctggaggatgtcgcaatgggaatatggatcaatgagatgaagaaggatggcttggatgtcaagtatgagaatgatgggaggattttggttgaaggatgcgaggatggctatgtgattgctcattaccaagaaccaagggatatgatgtgcctctgggatcagtttcagaaaacaaaacgaggaacatgttgcaaagaataacagaaatcatgcgaatggtgttttatgttacggtggctgctgttggccgttgcttgaatagacaccttcacgctaaaacgttcttgatgtatacagccctgcctaagaggattctaaaagagctggaactggaaggcaagcaaacaattttttggatatcttcaagtttgtttcgtctgcagtttgaagagtttcaagtcaaactacggcatgggatatgcattgtacacagaatgtagggttacatttgtttttggcataggtaggagggtactgctttgcttactgtgcggcgtgtaaaatagtatcttgctagaatgtaggatacagcgacggcagtttacgttaggatagactgagacagtcttaccagttaccattttttttgaaaggaatgcattttgcatcttgtgtaaagctgtttggtgtccattctcttgtataatcgattcaatgttcatcccacccctgaacttgttttg

SEQ ID NO: 39973 - DNA, 1107 bp, Zea Mays
gcagccatcagcggaaggcacggcacctggtgtccgacgccgacatcccggagccgccgctgttcacggcatcgcacagctgggaagacaccccggagcagagcgtgcggctgaccaagcccgacctgtcggcggcggagcgggtccaggaggccgtgggctgcctcccggcgcggctggaggccgcgctggccgccgacgcgcgcggcatcaggcgctggaccgtccgcgacttctccgacgcgtacaggtccggcgaggtgacgcctgtccaggtggcggcgaggttcctcgcggcggtgagggagagctcgggccctggcgtgagcaatatggccttcttcatcagctgcgaccccgacgacgtcatgaggcaggccgaggaatccaccctcaggtaccagagaggggcgccgctgtccgcgctggacggcgtgctggtgggcgtgaaggacgagatcgactgcctgccgtacccgaccacgggcgggacgcggtggctgggcgcggcgcggcgctgcgaggccgacgccgcgtgcgtcgcgcagctgcgcgcctgcggggccgtcctcgccggcaaggccaacatgcacgagctcggcgccggcaccagcggcatcaacccgcaccatgggtcgacgaggaacccgtacaacgccagcacgatcgccgggggctcctccagcggctccgccgccatcgtgtgcgccggcctctgccccgtcgcgctcggcgtcgacggaggcggctccgtccggatgccggcggcgctgtgcggcgtcgtcgggttcaagcccaccgccgggcgcctctccaacgccggcgtcctcccgctcaactggacggtcgggatgccggggatcctggcggggacggtcgaggacgcgctcatcgcctactcggcgatcgtcgaccagtcccagccgtcctacttgcggccggaactgaatcttcctcagctcggctccacactctccatcggcaacatcaagctcgccagatacggaaagtggttcaatgacagcgccgaggacatcaggagctgctgcgacaaggcgctgcaggcgctgcgcgcgaactacggctggcaggtacggccggcggcgg

SEQ ID NO: 39974 - DNA, 2610 bp, Zea Mays
cttggttgatatatcttggtgcctgcaagtttatatgcttttaagcatataatttgaacagtacaagctcagccttataggaaggactctaataagtggggagcaccaatggatttctgatgacatccccttcagtttctctcagataagcgatgaagataacctaggtttatgtcagggttatacttggtggcaacatcagttcctaagtggaataaagactattgctgtagtacctatgccggcgtttggtgtggcacagttcggttccatgcaaaagtttctggatcaagttaaaggtgcaacatttctgatggaaagtctttcatggtctccttcaacaaaagatgctcagaaagacgctttcatgtacaatccacaatttcaactcgattcttcaaccactagagagggtcttccacgcactaaggctgaaccagaaaactcaaggttggagaatgcaatatccatagattctctgaagaactttgcaattacttcaaatggtctgaatcctcacgtagtggccatgccagtgaactccaaatcgataagtactgttaaattaattcaaagtgacagcaatttgcggtacaataatatttcagagaatgctcaacaattcaaatccgccaaacaacctgattctagttgggcaagtgcagctacatgtttttcaaatttgaccaatcttcaaagaatagagcgcgggctgtcatgcacacctaacaaactacgacattgccttcaaagtgaaaaatcctcaggcttcctggattcgtactcatcaatagtttctacagatgctgagctgaaatgcactttgtttgacaatgccactccatttgttcagagtgatgtgatccaagaggttggtactagtggatctactcgtgcttgtgggctacatgaattgccaaatgaaatatgggcagaaattgcctcaggggaaatgaaaccagtcataaaagaagtcaacgaaaataatggctttctcgaaagcacagcatttgatccagtcatgaatgattggtggggtgacactgccctactagcaggaaacacttcacatctgagtgctactaccatgaactctgtttcaggacaggcaagtagtgaacaattatcaattgaagatagagggctgttttcggaatctgtctttgaggagctgcttggctttgatggtaatgtcggcccagttatggatagcaccgaaccattagctggttttgtctccggttgtcatttgccgaggtacaaccttcaaggttcactttcagtgtgcaaggcacaagtaccgccattgatactcccttccggtagctgtacatccgaaaatgttgtgatgggatcatcaaaagaagcccccgtgtcactgcagaatttatctatggatgattgtggcagtttgaacaccgcaagttccaagatcagccaggtaaagaagcctgaaggagagaaggttgttaagaaaagagctaggccaggtgaaagtacacggccaagaccaaaggaccggcagcagatacaagagcgtgtaaaggagttacgtgagatagttccaaatagtgcaaagtgtagcattgatgctttgttggatcgaacaatcaagcatatgctctttctacaaagtgtgacaaagtatgcagaaaagattaagcaagccgatgaacctaatatgataagcaaggacaatggttctgtattgaatgataactcacatggagttgtcttgaaagacaatccaagtggtggaagcaatggaggtgcgacatgggcctatgaggttgcagggcagactatggtttgtccaataattgttgaggatcttgcaccgcctggtcagatgcttgttgagatgctatgtgaggaacgcggattttttctagagatagctgacaccatacggggatttggacttacaatcttgaagggattgatggaacttcgtgatggaaaaataatggctcgatttcttgttgaggcaaacaagaacgtgacgaggatggatatatttctatcacttgttcagttactgcagcagaacagccgcaatcgatcttcggatcagctagttaaggtcatgaacaatggcattccatcttttgtggatcaccaacaatctcctgcatcaattccggtttggccttgctgagagatagtaattgccacaaacaattcttgtaggccatatttttcaacgagcgttaatgggtacggtttggagttctgattagtacttggtggtgcccgccaactgttgatagaaacgacaggtgttaaggatgtagcaaacgcacattgcggtgtcccgtgtccgaagaaaattcagttagaagatgcacagattctcatgtaacaggtttaggaacattggtgttgtcgtttgtaatttggacactggtgtagtggtgtgaggtagcctatgttgttgtgaagttggtgtgcagtcagtagcaaaattgcctgtgttgctacggtaaataacatttgaaaattaagtgtctgtgttctctttttgatctgctctatctcccgctctccatgggtaaccctatagttggattgccggtctgccatctgtgctcagcacaaactgaatgtccc

SEQ ID NO: 39975 - DNA, 2852 bp, Zea Mays
caaaaacggtggtggggtttctgtttctttaagatttataggaagatagtgttaggcagcccttattggtgggcaggagtatattattgctcgaggtaggaggagagccaggggttgttagaacaagtccagtctagagagggagcgaaccaaaagggagaaataacaaaaaaagaatagagacacacacacacagctctgttcttcttattccaatcctctctcatcttgctggttcatccttgggatcggctctgtcgtcccctagctagttcgttcggtgctgtggtttctgccgctgtatccaagaactcttgctcttgctgagtctgggacttcagttcctcgcagagttaggtgatgccttcacccaaaacaacttgaaggcttgctatgtcccaggtagctatatatctcaaaagttttggtggcagtcttcgaggaagtggagtcatctcaagtttttatcgatcgtcccagccaggctttacatatcttgggtgccgcacacagtatctatgcacctttgacaacaccaatctgattctgatgacaacaacagccactatctcccgtcatccttgcatcgatctgtcagctggcgtcgcctcgtgcttctgaagacgatggccacattcttctccacttccacgaaccagagggacctcgccggaggcggcggcgacatgtcgtcgttccaccactacgcctactcggacccaccagccggcggcctcatgcctttccccgccaccatcgtgtcgtcggaaggccacgtcgcgcacggcggtgacgacggcggcaggggcgcgttcgtggacgtgaacgcgagggacgggccgacgggcggcgccgagatgggcctgcagacgcagctgctcatggcgaacgccgcgtcggcggtgcagcaccaggggctgtcgcttagccttggcacgcagggggtgccggtgtctctttaccagtaccgccaggcggaggcaggcatggccgccgccgcctttctaagcccgaaccaggcgtcggtggcggcgaccaggagcgcgcagagcatctacgtccagaactccaggtacctcaaggccgcgagggagctgctggacgaggtggtcaacgtccaggacgcgatcaagcggaagggggacaagagccagcagggcaaggattccggcggcggcggcggtggcggcgagggcaaggacgccgagacgagcgacgagaaggctggcgagcacgaggggaactcctccgcgccggagctgtcgccgtcggagaggcaggacctccagaacaaagtgtcggcactgatggcgctgctggatcaggtggaccgcaagtacaggcactaccaccaccagatgcagatggtgatgtcgtccttcgacgcggtggccggcgccggcgcggcgaggccgtacacggcgctggcgctgcagaccatctcgcggcacttccggtcgctgcgcgacgccgtcggcgcgcaggtgcagtcgctgcggcggagcctgggcgagaaggacgggtccgcgcagggaggcgggctgccccggctgcgctacatcgaccagcagctgcggcagcagcgcgccatgcagcagttcggcatgatgcagcagccgcagcacgcctggcgcccgcagcgcggcctcccggagtccgccgtctccgtgctccgcgcctggctcttcgagcatttcctccacccgtacccgaaagattccgagaagctgatgctcgctaggcaaacaggcttgtctaggggtcaggtgtccaactggttcatcaacgcgcgcgttcgactgtggaagccgatgatcgaggagatgtacagggaagagttcggggcggagatggactcgcactcgtcgtcggagaacgcggcgggcaacaagggcaaggacgaggcgatatcctcggaggaccacgaggagttccagagcccgtcgagcgccgccgcggccgcagtgccactgccaggccacctcagcgcgttcaagtcggaggcgatcggtgtcatggacgccgccggcattggagcgagctccagcctcgacggcgccgtcatcggcccgtacgcgacgagcctcaacctcggcggcggcggcggcatcctgcaggaggccctcgcgcaccaccaccaccaccacggcggcgccgacgcgaggttcgtgcaggcgtacggcgacatggccggcttcggcggctacgacggcggcagcgtgtcgctgactctgggcctgcagcactgcaacgaggccggcgccggagccggccccgctgagccgcaggccctcctgtacggcagcgccggcgacttcgacttcatcagcggctccgaggacaggcagcggttcgggtcgtcgcagctgctgcacgattttgtggcgtgagcggctggactggacgtcgttggggaataacgtgcgcggacggcgtcagaagcctgggatggccggccggcgccgccgcgggtatacctaccaaccatatgatggccgtacgtcatggtacatggtctcaaattaaccagcaagggtaagcagctgtatatgatatgaggtgtggtataaagtaagtgtagggattattattggtattatttttggtagcttgaagattcgtctaatgatgattcaagtccggccagatatggtgtggtgttgttggacctcaagtgagtccatgtacacacaaatgtttcatgttttgtactgtaccagttgttcagttcagcgctaacaacaacgcagaaacattaagcatactactctgcttttctatacatatataaactcatgatttgaaccttattgtgacatctgatctgagacagatatggcagagaggccagc

SEQ ID NO: 39976 - DNA, 1030 bp, Zea Mays
cgcgtttgtgtgctttttatttgggtcctgccgatgcgcacgcgcccgttgcatctttgcttggtgctggcgcttctttgccatggctggacctgctgttctcaatgagcgtatcctttcttccatgtcccagaaacatgttgctgctcacccatggcatgatttggagataggaccaggggctcctgaattcttcaattgtgtggttgagattcctagaggcagcaaggttaagtacgagttggacaaggcatctggtctgatcaaggtggaccgtgttctttattcctctgttgtttacccacataactatggcttcattccacgcacactctgtgaggataacgaccccctggatgtcctcatactgatgcaggaacaagttgtccctgggtgtttcctgcgagctcgtgctattgggctcatgcctatgatcgatcagggcgagaaagatgataagattatagcagtctgtgctgatgaccctgaattccgtcactacacggacatcacggacctcccaccgcatcgccttcaagagatccgccgcttttttgaagattataaaaagaatgaaaacaaagaggtcgcagtgaatgagttcctgccagcgaaagatgccatcaacgcaatcaagtactcgatggacctgtatggctcatacgtcatcgaaagcctgaggaagtgatctccagctgcttgattgtggttgtggatgctacaccattttctcaacagctcatccagagtaccgtagtacagacttaacacgaacgaactgtaatcgtgaccaagggatgctattaccttctgctcatgttgaaacaatcagcagtgcctttctttccattatatgccatgtcgaatcaaggcaacttggccctgaaatctttgtggtcaagttaaaccagcactttgacagaacaaggattgctggatgcctggattactgttacataaatgaccattactgaacttcatttcttgctcttatcttttggtgagatgcccagttctcatccgatgcata

SEQ ID NO: 39977 - DNA, 3534 bp, Zea Mays
tccgctcctcggatctcttcatctattccccctcctcttctctctccgccggagaaattcaaaaccatactcctcggtactgtctctctccctccccccgtctttccgtctcatcgtttccttgcgcggcggttgctgctcgcccgatctgccgccgtcagccggcgcccgatctgctcctatactgtggcgcggaggcgcggagcagcagctaggaatacaaatacaagatgggcgcgtcaagacccccaagcacccctgcatcgaagggtgagcacacaccgatgtcgactcctggtggcagctcaagggccaaggaggagaagatttttgttacggtgagggtgaggccactaagcaagaaggagctggctgcgaaggatgacgtggcatgggaatgcgctgatacccagacaatcttgtacaagggccccgcgcaggaccgagctgcacccatgtcttacacttttgataaagtgtttgggccagcttgccaaacagacgtcgtctatgaagagggagctaaggatgttgcaatgtctgcactgacaggcattaatgccaccatttttgcatatgggcaaaccagcagtggtaaaacattcacgatgaggggcgttacagagagtgctgttagtgatatttatagacacatagatagtactcctgagagggaatttgtgataaaaatatctgctatggaaatttacaatgagattgtcaaggatcttctgcggcctgactctgttccccttcggttgttagatgatcctgagaaaggaaccattgtggagaagttgcaagaagaaattgcgaaggatagccaacatctgaggcatctaatcagcatttgtgaagaacaaagacaggttggggagacggcactaaatgacactagttcacgttcccaccaaatcattaggctgacacttgagagcaggctccgtgaagtttcaggatgtgttaaatctttcgttgctaacctgaattttgttgaccttgctggaagtgaacgagctgcacaaacacatgccataggtgcaaggttgaaagagggttgccatataaatcgcagtttattgactttgactactgtcatcagaaagctaagttcggggaaaagaagtggacacattccctaccgggactcaaagctgacacgcattctacagctttctttgggtggaaatgcaagaacagcaatcatctgtaccatgagcccagccctgacacatgtagaacaatctagaaatactctattcttcgcaacctgtgcaaaggaagtcacaaatactgcgaaagttaatatggttatatcagataagcaattggtgaagcaccttcagacagaacttgctagactagaatcagagctgaggacccctgaccgtggctcctcttctgatatcctcataatggaaaaggacaggaagattagacagatggaaattgaaatagaggaactcaggaaacagcgagataatgcacagtcagagctcgaagaactgaggaagaagaaggttgatcaccagccagggtggaatccctttgactcgccacaaaaggcgcgaaagtgccttacattttcaggatcgctagagccaagtaacaaaaataagatgatgatgagctcgattaggcaatcatctactgctccatttatgttaaagcatgaaatccgcaagctggagcagctacaacaacagcttgaggttgaagcaaaccgcgccattgaagtacttcacaaagaagttgaatgccacaagcatggcaaccaggatgctgcggaaaccatcgctaaacttcaggcagaaatcagggagatgcaaactgttaggtctgagaacagagacatggagatgattacagatgaaggaaatggatccgatttgaaagatgagatttctagacttcatatgcaagacaatgatattgccaaacttgaggcgaagctggaaaatgtgcaacggtctattgacagattggtgatgtcacttccaaacgttgccatgccgtgtaatgagactaccccaaagtcaaacagatcaaagaagaagaagaggctgcttcttcctctgggtgtgagcaacaacatcaacagagcaaatcttctcagagcaccctgttctccccattcttctagtaggccttcggaatcagaagttgagaacagggcgccagagggtgacactatgtctgttgagggttcagaaaaggctactcccaccaagagtgaagatggagatatgtcatctcgtgatgaaacgccacgctacaggcgctccagttcagtcaatatgaaaaagatgcagaggatgttccaaaatgctgcggaagaaaacgttaggagcatcagggcttacgtgactgaactgaaggagcgagttgcaaaacttcagtaccagaagcagctgctagtctgccaggtcctggagctggaatctaacgagggcaagccgaatggagaggataattctgggcctctacaggatggtcctgattcatgggacagattattcaaagagcagatgcagtgcatcattcatctgtgggatcagtgtcaagtatcgatcatacacaggacccagttctacctgttattcaggggggacaaggctgatcagatatacatcgaggtcgaagtaagaagactcgtatggttgcagcagcactttgccgaggtcggtgatgcaagccctggtgctgttgaagaccctgcagtttcacttgtctccagtatgaaggcgctgaggaacgagcgagagttcctcgcgagaaggatgggatcaaggctgacggacgaagagcgtgagcggctcttcatcaagtggcaggtgcccctggacgcgaagcagcggaagctgcagctggtgaacaagctgtggacggaccccaacgaccaggcgcacatcgacgagagcgcggggctggtggcccggctggtgggcttctgcgagggcggcaacatcagcaaggagatgttcgagctcaacttcgccgtccccacgagcaggaggccgtggctggtgggctggcaacccatctcgaacatgatcagggagaagacccagcagctctggtgagaactgaacgcatcatggcgcagcgccgtgttgtacagatggaatggaacaagagacagacagtgcatttcggtttcagctctggaaattgctgatcaattaattgtggggggaagcgtctctacttccttcccggttgatcaaggcggacaagcggtcgtcggtctggtatccccttcctgtgtccctaaatgtagatggcgaattcgtggagtccgaagaatctgaatgatctcgcattctttacgtaatcccttgccaattttatggcaagttttgtttgctccatttgttttatggtatgatgatctggatctgatgagcccattcaaattcttttgccgagcccccctccctctttttctgctgtctgtctgtgcatcggaattgctggatctatcacgatcttgtttgtcaatcacatcgcaaatacacccaacttttgtttggc

SEQ ID NO: 39978 - DNA, 3097 bp, Zea Mays
cccatgtgtaagcttttctcgcactcgtactccctcctccgctccggctaggaggctgctccctccgccgctccgccttcgtcgcgcggccatcgtttccggctctgtccccggatatctcttcgccaccgcttcctgcgccgcggcgccgccacaaccgaaggcgacccagtcgccttcaacactatggtgactcctcccactgtcgagcaggaggacgaggagatgctcgtgccccgccaggaggcggtcgacaccgacgcagcgcagcccatggaagtggtggcacagactgaggtggtgagcacggcggagagccagcctgtggaagatccgcagacatcacggttcacttggacaattgagaacttcaccaggttcagtgagaagaagcactatttagaggtttttgttgttggcggattcaaatggagtgtgctgattttcccccctgttttgcaactccagctgaagcgctttgagtatgattatatgagagatagcatggttaagattaatgatcgctatgagttccctctgcaacttgatctggatagagatggtggcaaatacattgctccaaatgcagatcgaagtacacgaaacctttacactcttcacagtgttcttgttcatagtggtggggtacatggtggtcactactatgcattcatacggccaactttatctgagcaatggtataaatttgatgatgaacgtgtaacaaaagaagatgctaagaaggctcttgaagaacaatatgggggtgatgaagagttaccccaaataaaccctggtttcaacaacgctccatttaaattcacgaagtattcaaacgcgtatatgcttgtttatattcgtgaaagtgccaaggagaaaattatgtgtactgttgatgaaaaagacattgctgagcatttaagggtaaggttgaaaaaagaacaagaagagaaagaacacaaaaagaaagaaaaagctgaagctcatctttataccataattaaggtagctcgagatgaggatttgaaggaacaaattggaaagggtatatattttgatttggtggaccatgaaaaggtccataatttccgtatacagaaacaaatgccttttagttgtttcaaggaggaagtagccaaggaatatggcatccctgttcagtttcagcgcttctggttgtgggcaaagaggcaaaaccatacataccgccctaatcgtccattgaccgttcatgaggaaacacaatctgtggggcaactgagagaaatatcaaataaggcacacaatgttgagttgaagctgtttttggaagtagaacttgggctggatttgcggcctctccctcctcctgagaagggcaaggaagatattcttcttttcttcaaattctacaacccagaaaaggaagaactctgtttcatggggaggctctttgtgaaggccttgggaaaaccttcagaaatcctggcaaaactaaacgaaatggctggatttccccctgatcaagaaattgagctttttgaggaaattaagtttgagccaaacgtgatgtgtgaaactatagacaagaaactcacttttcattatagtcagcttgaagatggggacattatttgtttccaaaaatcaccaggagcagaatatgatgcacccgtgcgatatccggatgttccttcatttttggagtatgtccataataggcaggttgtacatttccggtctttggagaaaccaaaggatgatgatttttctttggaattgtcaaagcttcatacctatgatgatgttgttgagagagttgctcgccaacttgaattggacgatccagcgaaaattcggcttacaccccacaattgctactctcagcaacctaaaccacagcccgtcaaatatcgaggagtggtgcatctgtcggacatgctcatccactacaatcagacgtctgacatcttgtattatgaagtgttggatataccactgccagaattgcagttcctaaaaaccctgaaagttgcatttcaccatcctacgaaggatgaggttgttattcatagcatcaggcttccaaaaaatagcaccattgctgatgtaatatatgacttgaaaactaaggttgaactgtccagtcctaatgctgaactacgtgtactagaagtcttctaccacaagatctataagatctttccactacatgagaagatagagaatataaacgaccaatattggacactacgtgctgaggagattccagaagaggaaaaaaatataggcccaaatgatcggctaattcatgtttatcacttcaagaaagatattaatcagactcagcagattcagaactttggagaccctttcgttttggtcgttcatgaaggtgagactttagcagaagtcaagaagcgcatacagagtaaactgcaagtctctgctgatgaattttccaagtggaaatttgcatttatatcaatgaatcggccagactacctccaggattcagatgttgtacctactggctttcagaggagagaggtctacggagcttgggagcaatatcttgggatagagcacgctgatactgcaccaaaaagggtctatacagtgaatcagaaccgtcacgcatacgaaaagccggtcaaaatttacaattgagatttctaactaacatggccgcacggtgaaggcctccatacgagaggagcggccagaaaagggaggacagggaatttatactgtcagggggaaaacctcatagttagcgagccattcggtgtggcacggccatgtattccagcgctagaggccagccactgttatttcatctgtagcagccagcagctcctatagcaatgattttctttttgtacaagattttccttctttgccttagggtgatggcgcgagcgcattggtgtccgtttcggttgggcaattgcttcattcttagagcaaagctgggtacataagattttggtaggaagcgtgtatacaggcaggctgtatagttgtggctctctcggcttgatccctcgtatcttgtcttgtgctattgttaatgcagtgacaggggctgactgtaaatcgtggttccaattttcag

SEQ ID NO: 39979 - DNA, 2128 bp, Zea Mays
acgacaatcccctcgccgccgcctcggcctctctacctttccacctttcccacccgccgattcactcgctcgcgcggccgcgactccagcctcccctaaatccgctcgcgcccagcgaggaggcggggtcgcagcgagcgaagattccctccgaatcctctcctccaaaaacttccgatccgcttacgatggctacgcagcagcagcacgcggggccggcgtccgggtcggcgtcggcgtcgagctctagctcggggctgcaccttcccgcctcgccctcggccttcggggacaccacccacaccaaggttttcgtgggcggtctcgcctgggagaccaacagcggcaggctccggcgcttctacgagcgtttcggggacatactcgaggccgtcgtcatcaccgaccgccactctggccgctccaagggatacggattcgtgacattccgtgaagccgagtccgcgaggaaggcatgcgaggaccccacaccagtgatcgacggcaggcgggccaattgtaacctggcttcgttgggtcgagcccagcatcccgtgcaccctgggcggccaagttcagctgggtcctactttggtgtcccagttccaagggctttttatttaggaggttatggccaccaccgaccgtttccacttgggtattaccaaggatttccggttccccagtacaggtaatataattaatttcatcactatttagtttatgtaacattttatgtaacaaaacgctaacatgtcttgcatttacttttggagagtataactgataatatggtgtttgctacataaattagcttgtgcatatggtacctcccctttcagatgttgaaataatctgttccagccatgctcatggaatatgatacgactgtttaaaagccaatagaaatgcattcagttttctgtttgtttgttttccttttgcagttatccttcatatgggaccgaatacatctctccacagggtacattaaatccatatcccgctcagcaatatcttcctatttatggagtctcagctgcagcaaacacagccaaccaaacatttaaccagttgaatccatacatttctggtgggggcaatggttatatgtcggttcatagttacaacatgcctggaaatcaatatgtgcagctcactggatcaaacttcagcagtgcgtcaccaacagctcaaccttcctgtcagactccttttttagtagcgacacccgttcctgcacatccacacctaataattccagccccctcaccccagtttacacaagctagtggttcagaccaaagagcaagctgaactgtgcatccaagcatttgtaccttgaggtacccttagattgcagcaggactaaaaagagcagtgttgctgtatccacagcttttgttcttgcctggcaagagatcatccttgcattcataaggttgtcgttatcatggtcaacagatgtacctggaaatcgtgaagttgtccctatggatggggcaagtgatccaagagcaagggttgctcttgcctttccactcggtttaaatcgtatacgtgtgatggagccagatgcagccttaatgatcctgtatctgacaagctcgtggaaatgtagcctatgctggaacggagtccagcatatgtaagatggattgatccaacgggggattagccatcatggccttcaggtgattgttcatctgaaaattcatgttgtgtgcggtcctagtcccagtcactgcgcacagggtctggtgaccaaaagtgtatccagttctgtacaagcctgcagtcatcgtgttgtctgcgtgactgcatccatcagcctttggacctaatatgcagtcatcattgtgttgtttacactactggttgtagccagtgatggtcattggtttgccccagtctcccaatttaaggtgtgatttatgtgtgtattgctctgtgtttggtggttccaagcatagagcggttctcttgtacttcaaaataaagccatttaatgggaatcccatgacgctggtgccagtgatatgtgctagactgacaatgtgtacctgtgatttatgaattatgacccttttaccgttccattttatcaaataagttatatcaatgccta

SEQ ID NO: 39980 - DNA, 3163 bp, Zea Mays
cccaccaaggccatccgaccaccgcagcctaaatcaccttccgtcgccagctcctagaaacccctctcctgcccggcctcctccctctctcatccgatgggcaagtcaagcaagaaggcggccgccgtggctgcagcgccagcggcggtgcccaaggggaagaagcgggaggcggaggacgagatcgagatggccgtgagcgcgaagaagcagaaggcggcgccaccggcgaaggccgtgccgacgtccaagaaggacgccaaggaggacgccaagtccaagaagcagccgccccccaagaaggctgagaacagcagcagtgactctgaagaggaccccgagtccgaagaggagaatttttataatttgattgagtcggggagggcagacggagatgaggagtttgacgaggacgaggaggacgggttcgagttcggtgacgctgacgaggcgatgcaatgcgtggtgatggcggaaagcagcaccaccgccgcggcgctgcgtgctcacacgcaggactacgaggcgctagctgcgcacaagcgcaaggcccttgccgaggagcaaccccagagggaggagggtcccaaaaggccaagaccggaccaactttcagaagcagaagcagcaaccatgttcgaccaactgatggaaggctttggtcttaggcgtaaaagaaggtcaaaagatggcaagagaaggggaagaaagaaaggaacaaagaataagggcagtgctgaagttattaaaaagttgggtgatgctactctacttttcgctgaagaaaaatttaacgaggaaaaagggggatgcttctctggcaagacactgcattttaaaagcaatgaacgcagatccagaagatgtagatctgaagtatctttgtggttatatgtatcacaacctttgtgaatatcagaaagctgcagaaatatatgaacaaatagtcagaatttatcctgccaatagtgctgttcgtaaagtagcagcccagatgtacagagagtgtggtcaaattgacaatgctattaatttgttgaaagactatgccgatactcaaactttcaacattgactggagcgttctagatttattgatatcactttatctaagaaataatgtttttagtgaagcactaaagcagatcaagagggcacaactacatttgggatctcaacagaaactaccagtacaattgcaggcaaaagaagtaatctgccatgcatattgcggtgacatgaaacatgctgagattttccttcgtgatgtgcgtttggagccatcaaaagaaaacattgatgtgctcaaggaactcgcaagcaatttagaaaaaatgggacgatatgagtatgcagtaaagttttacctgctaattgaaaatgttgctactcaaaatgatggtggtttatgctttgatcacaaagaaatgggtagttggtatgtcaaagctgctcagtgctacatgatcttaggggacaaaaaaaatgctattccttatttttataaagcgttacaaagcatgaaggacaatattggtatacgattgaccttatcctcccttcttattgatgacgacaagacagatgaagctgccactttgctttctcctcccaaaattccagagttgcagtctgctaatactccagaccaacagaaaccttggtggtgtgatgggaaagttaagatggcgcttgcaaaactttattacaataaaggaaatttggaagattttgtggacacaatttttcatcctattctagaaactttgaatgttgaatatgctaatcgaaaggtcaagtcaatgagaaagcttccaaacattgttctgcatgaaagagtcaaagtattgggtgagcaacggccagatagtgtatttcaaggattaaggccaatagcatcacctgatgaattacaaaaggcaaacagagcaaagaaattaattgagaaaaggaccgctgcaaatgaagagttaaaacatgattatctgccaagaacaaagcaagttcctcctgttcctggtctactgacaaatgtggagcatcatcagcttgtgttaaatctttgtcgaacattagctttgctgcagcgatattgggatgcactgcagattatcaaccgaaccctcaaacttggaaatgacgcactcactggtgacaaaaaagaggaactcagatccttgggtgctcaaatagcttatagagctccagatcccagtcatggctttaagtatgtccgttacgttgttcagcagcacccatattctcttgccgcatggaattcctactataaggtggtatcaagaatagaggacaggtttccacatcatttcaaatatctccttcggacaagagaagcgaatcctgactgtgtgcctccaataatcatatccgggcatcgatttactgctataagtcagcatcagtcagctgcccgggattaccttgaagcttataagctggacccagaaaaccctcttattaatctatgtgtaggcactgccttgattagtttggcccttggcttcaggcttcagaataagaaccagtgcatcgtccaagcttttgctttcctgtacagataccttcgcctttgtgataacagtcaggaagcctcgtacaacattgctcgagcgtatcaccacattggcctgaataccttggcagctgtttactacgacaaggctttgtcaaccgaggagaaggatcatcccatccccaagcttccgtacgaggctggttcacgtgcgccagaggatctgaggccagggtattgtgatgtgcgaagagaggcagcgttcaatctgcatctaatctatatgaagagtggagctaccgatcttgcgagacggatcctaaaaacttactgcactgtctaaaagctggtatcgggcaatgttgttgggatcggatatcagatccttcaaggctccttgcattagcttaggatcaagctagtctataaagctagaacattggtgtaatatgtcactagtgactttagatgtgtagctgaagagttaacaacgtgcttgatccagatttaaacgtatattctggtttcacaatgctgtgttatagtcaaatggttcagcgatgctttgcttcatgtgatttattggcaattcattattatttttctctcaaacgcacaggagaacgcatag

SEQ ID NO: 39981 - DNA, 1205 bp, Zea Mays
gagaaaagaataaacagcgaggccttcgtcaaatcaaatcataaacccaaacctcctcgtcctctgtcagactaccactctctccctcgcggactcgcggttgattcctcgcggcggattcgcatcttccgcgtcagggacagggagagtactccgtcggacggttggaggagaacagggagaggagctctgagatggagacggccgcctcggcagcgcgcctggtgaactacccgctcgtcgcggcgcttctcgcgttcgccgtcgcgcagtcctccaagttcttcaccacctggtacaaagatggccggtgggatgccagacagtttatagcttctggagggatgccatcatcccactcagctacagtgacagcactcgcagtggctgtggcgatacaagaaggctttcatagtgcaacctttgcaactgcactagtctttgcatgcgtggttatgcatgatgcttttggagttcggttacatgccggaaagcaggcagaggtgctgaatcaaattgtctatgagctaccagaagaacacccattatcagagacaaagccattgcgtgaaatccttggacatactgttcctcaggttgaattaaatgctttgaattacctcccttgatgttttaactattctgtggccttgccggttaggaaagacagtcaatattcaaataagatgaagtcattgggatatagggccgttccttttcaggtgatcatataatgatgtcagtcaaacaatcgatatatgaagatgctagatgcactttggttgtggccggttgcatccttggagttctcatggctgccgttatgcacctgtctctcgggagttcttagtcaactgttgttcatggatgtcatgacagatgatcacctaatgtctcgctggtgatggctataaagcatgaagcatgatctccgcatggatctggttgtccaagtgtttggtagtacgaagttctaaccgatttagttctggacagtaggatataggttgtgtagcttgaatcggttactgtaaatctgaaaggttttgctttcaactccaactaccaatcacggtgtaatggaagctttgttatacaatcaacagcagtaaattcattctgaggtaacgatcggtatagttgatatatcatgccatcacatttgcttcccgttccaaattgtaagtggttctgacttttttaac

SEQ ID NO: 39982 - DNA, 274 bp, Zea Mays
cgagcatgcagcagcagggggaaggaatcatcccctgctgtctttattattctactcgatccaagcagtcaagaacaaccaggagcctcctctatagtggtggttgcgtttcgccatcagcagcgtgcaaagatactggtaaccatgagcctacatggctttcttcctaaaaacaatttccatggagatctcgatcctgttgggtggaatgtcaattccgtccgggggtgccagtgccaagacggcacgggaggatttacgaggggtcttgtcg

SEQ ID NO: 39983 - DNA, 380 bp, Zea Mays
agttatagcaacttattttatattaaagtatggaaagagtattattattacagaccagaaaaatataagagtgctggagtaatattattacaaccctaggaggcaaaaacccctcctgattaatagtaaaaagtttttagagcaggacacttcatcccgaagcttcaatcctgattttcttccttaggcaccaccttggaacaaaagcaaaaaaaattgctgcttcctcacctacaacaacatgggtttgaaaaccttgagtatgaagtgtactttcacaagtcttacccgtcaaaagaaaagactctcaaggatatgctagtttgagggagtcaacgtaaagctaatcaagaatcaagactctgtttgcaaaaatgctt

SEQ ID NO: 39984 - DNA, 598 bp, Zea Mays
gcagcacgtagaacacgcagcgggctcgcactgcaggacggagcagcagccgtcatagcaggtcatttggagaaggatggatcggcggcaatcaagcagcagcgggatgatggagggaccgttccgattcttgccggccgaagtgaaagagatggaggagcgcctgttcccggtcaccaatcgcaggctggatcacatcctcatggatgagctcgctctgaaatttagctgcttccggcgccgtgctggcatggttcccgtcaagccaaagcaggtgctcaactggttttataacaaccgtaacaagacttctgccaaggtagcagccagggaagcacatgctccatgggagttttgggccaaccatcagcaagctagagctagaggaggctcatccatcagcaagctgaagccaaagaaggcgactacgcacgcaggatcttcctcagggaataattatatcgatgtatatcacaccaagtttgaagctaagtcagctagagatggctcttggtaccttgtcgaagaattcttgactgaaaagttttgtgaatcaggcgatttgggaggacactatgcagaggctaaatgcagttag

SEQ ID NO: 39985 - DNA, 345 bp, Zea Mays
atagcaccgctgcatatgggtccctttcatgtcgtcgttatctgtcttggacggacgtagctgtcaacatgggcctattatgcctggccggccatcttaatcgtttcaggatgaagctgccgtcgtcgatggatcagtcgtgttcagacaccttgttgttcctatagctctcgttgtctatagtagctactactagctgctgctaggatcggagggtttgcactgccgaatgctggagcactgttcactgtgccctactgctgctgctctgctagctggcctggctaacgtcgttgcacctaacaattaattaatgctcattcgatcgagaaatatggagcccca

SEQ ID NO: 39986 - DNA, 2670 bp, Zea Mays
ccacgacggcgcgccgcactctgcccacgacctcgacctcctcccccatgaccacgacctcaaccgctctgccagctccgccacttacgcacgcacgacctcaacctcgcctgattcagcgcatagaagagcgtgtggcgtcgaggtcgagcgtgcggcgccgaggtcgagcgtgcgtcaccgagggagaggaaaaccactgagcgttatttcctaagcctcctgcttgatgtctccaccgtccctcaacgcaattgccgccgcccgggatgcgctccacccccgcccgctaatcgtccccttgcaactgccgccgcggccgccaatcggcccccaagaaccaaaggttcgagctccgcaggtggcaagctccttcttcatccacgccctccctccgccttgagaaccagaggaaaccagagtcaccaaaactacgggcaagactgtacgaagggaaacatagtactcccacgaagaagaagtgctgcaactgcaggaactccaaatgtttgaagttgtttcgagtggcttcgcatcgcaggctgccaagcccaccgagaagcaggtcaaggttgcaaacatactacttgctcatgttggatgacatggaagcagtaggttgaccaaggcaacagctgagatagctcgtgcagccaaccgatcatggcttgctcttcttatcgatactgcatgtgaccagttttcatttatcctacaaagtctgtttgatctcgctatggagcacaaccgcaataaggactcacaatgtaagagcttgaccttgctattcatgctggttcgtcttgctttacatttgcctgggtatcatttggttcacagtgaagtaaattataattgtttagtaaatatttcattttattttgttctacatgttcatcaaaaggtaggcaaggattgcattttctctactgcatatttagtcatctgcattccccaacttatgctgtaaattttgctaccaaattatgctgtagattttgctttgcgatatctcagtaattgcaggagcataatttggtagctaatgtgttattgttttggtcttcccaatgacgactgttgttggcacttggcaggatgattttgtacgtcgtttgtgccaaactgttttagttttgaccaggtttatatgaaaaatagttacacaagtacattgtaaaagttattttataattaatatagtgatactaatttagtgttctacatgttgatattttttactatactttagtcaaccctaacttcgttttgacccaagaattttggaatggacagaatggttctttcattaatccattgttttgttttatatgttgatcagcccatcacaatgcctttgacagtgactttgctttttaaggtgcagtcaatacacatggcatccatcaaattacagaagaagttatttgtaggtatctaagaagttggagttgcatcaaaaggcgagggtgtcgctaagttccaacatgcattaaaattctatttttgtgatataatattttattaaataatttgtgtgtctttgcaacgcactagcattacgcaaactcaaatagaaatttatatattatagtcattcttgtcattccgtatctatgttttattctaatttttaactttcgtggcaacgcacgggcacatacctattatttcatgatgtgtgatctctttctaagacttctatttccatctgaactacaatatatgatatttatcatcatttttttctagatccatctttcatcccatccactctctgaaaatctaagcttgaatgcccaatactaaattttgcattatggaagcagtttgaacaaagaacaatctctgtcactttgtgtggcccaccagtaaaaataagacaacttgttagtctgattatatgcttctttgattaagagggctatgttcaaataaaacattccagtaaactggacaaagtatcttgaactggaagaagcctttcaaaaatacacatcctttttctacagttcaataactcacaacttcaattctggatgcaagtgtttattattctacactctgctgattcagacctgaaaatgtttgcagttgcaaagagaatatcaaataaaatacttgttgagcttaagtttcttcatcaaatcatttttgggaggcttcaaatgcactataccatggtttggtgaaaggagagaagatgaaggtgctggtacatcacaatcaatactagaagcaagacagacgcacccactattgttactgaaggtcaagatgcacaagatgatctgacaacaccacatgcacctaagatgtccaaaaagattactccaaggaagaaaagcaattgaactaccttatgtatattcaaaattagtgtattatccactatgttgtgtcaagaactatgacttcaaaattagtgtgtcatgaactatgctgtttcatgaactatgtcttcaaattctgggaagtggagtgcagtttcttgtataattttgaacatgtccatgtgcacctactctgctaattgtgtcatggactgacatgaattatgtcatgaactctgccaactgtgtcatgaactgggaagtggagtgcaccaaccgtgtcatgaacatgtccagtttactgcaactctgccaatgataataaaatgtccagttt

SEQ ID NO: 39987 - DNA, 306 bp, Zea Mays
tggcaaaccgcacgttgtgccttgtggctgcgcctggaaaccaccatcattctctctccctttcccatcttctctccctgatgctcgcaactgccactacccctatcacctggtggttgccgatcacagcgcccaaatccaaagcaccccggcgagcgcccagacgcccagcttggctgtctcggcgcggcctcttcttctccggcgagtccttcgaccagtttgcgatccgtttccgagcttcgagagatcgaaggtcaagctttggtgaccaagtgatcaagctcctcgagctctacgagattg

SEQ ID NO: 39988 - DNA, 714 bp, Zea Mays
gctgcggcaccaaacaagagcattgctatgataaaacttctagataatagtataggcaacgagcatatccaaggcacatagcactggcatttgctcaggtgctgatcgccgctgcgcacttcctcttcgccatggcctggcctggaactatctacatcgggaccttcctagtcgggctcggatacggagctcactgggccatcgtgccggctgccgtctccgagcttttcggcataaagctagcacttcggcgccatgtacaatttcctcgctctagcaaaccccactggatcccttgtcttctccaacctcatcaccagtaccctgtatgattacgaagccgagaaacaggctcgccagcgtcgtcgtcgggtcatggcggaactgctggcgtcgtctccaagatcgcttcacagcgctggtctttctgctggtggtggaggaggaggaccactcatcaagtgcgaagggcctgcttgcttcttggtcagctctctgattatgtcggcgctgtgcgttgttggagccggcctgagcctcgtcactgttcacaggaccagacgggtttatgctcgtctgtatcggtccgtacgaacgtgaaattttcgtagatagaagtataaaatcctcgtgctacttacttcgtaccaaattatatatgcttgtatatacacacagagttacgttgtaagagaccattcgttgtgtaaatat

SEQ ID NO: 39989 - DNA, 266 bp, Zea Mays
cgcagcagacgaactcgaggtcttcctcttgggcgccatctcgattctaccagcgagcagagtgggaggcaaatggcagagaggattcggaagcgagaaagcaagaactagggcacggaaagcaaaggcggctaaaagcgcagcacttatgggatattctcgagccagataccgtttcaaaaagtgcccagtcagcacccggcggttatttccaaaacaccggcgtgccacgtggtcacccggcagttatttccagaacaccggtg

SEQ ID NO: 39990 - DNA, 2695 bp, Zea Mays
cgggacgacatccagtccagccatggtcggccccgagatgctcgtcgccgcgacggtgaaccaggtcgttcggaagatcaacgagatcatcggcgtcgcgcagggcgagacgaagctgtgctgcagcttcagcgacgacctcgagggcatcaaggacaccctggtataccttgaaggcctcctcaagaacgcggagagcaactcctttgggagcgatagggcgaacctgcggcactggctgggccagatcaagtctctggcttacgatatcgaagacattgttgatggctactactcctccaaggagcaatatgagggaagcaactatgctcagaagggatctttactctgctctttatccaatcccatgctttcgaagataaatttgaaagagcttaccattatttccatagttgggcctgtgggccttgggaagacaacccttgcacaacttattttcaatgatgcaagagctgagacattcagattcagaatatgggttcatgtctccatgggcaatgtcagcctccaaaaaattgggagagatatagttttgcaaactacagaaaaaattgagggaaacatgcagatgcagtcaatcaagaatgttgttcaagacatacttaataagtatagttgcttaatagtgttagatagcttgtggggaaaagatgaagaagtgaatgagctgaagcagatgttgcttacaggtagaaagactgaaagcaaggtcatagtgaccactcacagcagtaaagtagcagagctgatatccactgtgccaccatacaaactgtctttgttgtcagaagatgattgttcagctatattctgtcaaagggcaattgcaggtcagtctatcagtgacccacttttcagggaatatggagaagaaattgttaggagatgtgaaggcatgcccttggtagccaattttcttggatctgtggtgaatgctcaaagacagaggcgtgagatatggaaagctgcaagggataaagacatgtggaagatagaggaagactaccctgaaaacaaaattgtgccaatgtttccatctttcaagatagtatactacagtatgccccatgagctaaggttatgctttgtctactgttcaatctttcctaaaggatatgtcatagataagaaaaaacttattcagcaatggattgcacttgacatgattgaatccaaacatggaaccttgccgcttgatgttactgctgagaaatacattgatgaacttaaagatatttatctccttcaagttttagagaggcatcagattgatgcagaaatatccaatacttctgaagaaaagctctacatgaataatttggcacatgatcttgctaggtcagttgctggtgaagatatccttgtgatcttagatgctgagaatgtacgctgcaatagaaattatgattaccgttatgcacaagtgtcaacttctagcttacaatcaatagatagcaaggcttggccttccaaggcaaggtcactagttttcaagtcaagtgcagaattgcagcatgtcagcgaagttctttcagtgaacaaatatttgcgtgttttggatatcagtgggtgttctgtgaaggagatgcccgctccaatttttcagatgaaacaactgagatatcttgatgcttcaacattgtccattgcagatctgcctccccaaattagtggctttcctaagctacagacactggatctgtctgatactgaagtaactgagctaccagccttcattgccaacttaaagagactgaattatttgaatctccaaggattgcatagtgcagtcatgttatttaagcccacagtcccatacatgctcacaagaagtcaaggaagttggatcaagtagtgatatctcagataccattctaaaggagtctgcaaacagagatgtggcattaggaataagttttccagaaattgatgaagttggttatccacataataatctgaaacaaaaattgacattatcttatcatatggatggacataaaagtgaagagcctaatttcattaccaagcagaactcaactacagagacggtacaactaacccccaggcaccagttcccatcatctacatgtcgtatttcttcgattgcatcaagttctagtgcactatttgcatctggctcctcttcagatgtctcgataacttacaatccagtgtccaatgacaaagcaggcaatcaaacaggacctcagacagagtcaacgcatacggtggtctaagacgagacgatgcgggtaaccaaacatatggtttgtgattcagtccagactcaccgctgaatagagggagtggtaacccaatgggtgacggatctagaatttgactatagggtgatactatctaccatggctagtgcatcacttcttcagtcccgtagtgaatagtgattgagtagaggctggtggactcagttaaatccctcttatgcttttggtgaactgagatggttatcaaactagctatatttggacttatcttgttgtaagactttttaaatatgttgtttatctatcggatttggaacatgtaatatactagctacttatgaacctgaacttataaaataaatgtaatatactagctgtacatgtgaatctgaacttataaaataaattgtgttggatgtatgttgacgtttaattatgtatgatcttgg

SEQ ID NO: 39991 - DNA, 3563 bp, Zea Mays
ctggactcgggctcccaccctatttctttgctgcacctgcacctccgcttcccgtccatatcacgctttgatcgcttcttttttctctccatcatttctccccgtttcgtctcgcttcttttctgtcgcctcccgtttcgtctatctccggccggcctttctgctgcaaggaaaccaatattgtttgctggatctttcaaaaagggaaaccgaattcccgagagcgagcagcagggaatctctgctgaatccgtaggctccgaattggagctggaagtgtagtgatttcctgattggggacataaggtggggtttgtccctactccccagtgagctccacgcggtccctgctgttcttccagtcaaaattctgtacccttcggtgctggggtcaaggaactaggcgtgttgtcctgaactcttgattcctgcttcatggaaattgtatatgtttttctctgaattcaaaatcgtccctattctcccaaagctttctgaggtaaggataagataatgacgtcgtgacctgtttcaatttattttgtagtctctttctcttttgaaggcgcacttgcattctctctgctgcttcttttagtactggttaccgaaatttggactctactgtttggtgaccagtgatttccacagagtttgaaaaaacatttatagatacagggctgcatatatagttttggtttgtgaggttctcaaaggacaatttcatgtgtagtaaatctaagagacatgttaagccattttgttgaatttggatacttttgatttaaggactccagacgcggcatgcatatctgtgtaggtgatcaattgctggtctcttcattgtaacttacataacaagccactcgcctatcttactgttgttcaaatgcaactgcgaaatcttcagttatctttccattggtctggctgtcctttggggttacttgtgtgcattttgcattctgaatgccgtgcatacagaaccatcaatatttcatcattgtggtggcacaccagcctatttgtttttttatcgcaccactaaaagtaatgtagagtgcactagcgagagtggcacttttctacatagttgataatattcactttcaaagcaaagagcactctgtaaattgtttaagtattgacaaaattttaggactgattaatgctagaaacatgatggtgtttccaacagtctgcattgatgcttactgtgggaatctacattagaagagtaatatggagatagaatcgctacgcaattgcagaatataatttttaaggcatatggattaatttataacctatggatgtgcttgatcatcgaaaattcatgagccttcaccttcacccctgaggtctgtgcttgctattggaatatggcaacatgcattgcaaaagtagtaagaaaaacagagctgctatacatcaatcaatgaaatttttagagaccacatggaatttctagcttgttaatgtgcttgaagattcttccaccttcatcttttgcttagcatgtgtcactagtgcctcacatcatacattcagcaaagctcaatgcctgttttgctggatgtgcttatatttctaagcggtgaatgtttttagatttctctcatattgattccagtttcaaggccacatgggacataagggagaagcaagcaaagagctgatagtgaaggtgccatgtgtgtttggaacagggaagaaggatattgtccctctccaaaactataaacatgggttggttgagtaaaatatttaaaggtccagtaaatagagtttcaagaggacactacaacgggaactcccatgaaggctattcagctcagcacactaaatcatatggtgtgcatggcaatgaggacgaagacatggatcatgctattgcattatccttatcagaggaagatcaaaggaagggaaagaccattgataccgggcatcatttagatgaagatgaacagattgcacaggctctgcaagaaaatattggtcataacctagctgaagacgaacagcttgcacgggctctgcaagaaagtatgaatgatggacctcctcgtcagcacattccagttgaagatgttaactcagaaagtactccagcaagcatcttgccctcaaatattttccgcacaagtggcttgagggtttgtgctggatgcagaagtccaattggccgcggtcggtttctcagttgtatggactctgtttggcatcccgagtgcttcaggtgttatgcttgtgatagaccaatatcagagtatgagtttgctgttcatgaaaaccatgcctaccacaggccctgctacaaggagcgtttccatcctaaatgtgatgtttgcagtagctttattcccacagataaaaatggcctcattgaataccgggcccatcctttttggatgcagaagtattgtccttcccatgaaaatgatggtacacctaggtgctgcagttgtgaacgaatggagccaaaggacagtcaatacataacattagatgatggccggagactctgcttggagtgtctgcatactgctattatggagaccaatgaatgccagccactgtacattgatattcaagaattttatgagggtatgaacatgaaagtagagcaacaagttcccttgcttttggttgagcgacaagctttaaatgaagccatggaagcagagaaatctgtgcaccaccttcctgaaacaagaggcctctgcctatctgaggagcagattgtcagaactatattgaaaggaccaattggaccaggcaacagaatcatagatatggtcacaggaccatacaaactcattagacggtgtgaagtgactgcaattcttatactgtacgggctgccaaggctgctaactggctcgattctggctcatgagatgatgcatgcttacctccgacttaaaggataccgaaccctgagtccagaggttgaagaaggcatctgtcaggttctagctcatctttggcttgagtcagaaatcacatcaggttctggtagcatgtcaaccacctcagatgcgtcatcgtcatcttcaacatcttcatcatcgaaaaagggcgcaaagacggaatttgaaaaaagactcggggagttcttcaagtaccaaattgaaacagattcttctgtcgcttatggagatgggtttcgagcaggcatgcgagccattgagcggtacggcttgagaagcacccttgatcatatcaagatgacggggtcttttccatgctgaagctggtttttttttacctcggcttggatatgggtatacatattttttttggagaacttttggttcaggttatacatacgaaaagccgaacttctgtgtcgagaagaggcataaggatttagctatactgtccattgcaggaaaaaaaactgtttcccttttcaattataaaatttcacagtgcagacatgaaggtatgtggtctttagcttggccaaccttgtggaatgctgtcacttgatgcaaaagaaatttcgaatacatatgctttgctgtgcttgaaatgcaatggttggatgctatgct

SEQ ID NO: 39992 - DNA, 3294 bp, Zea Mays
cgaactgctggaccggagatggcctaaacatagggtttagaccgttgccgtccctactcccgcctagccgaccccactcgtcccagtcccagtcccagtccgccgcctggttccttcttgctcttccctccactctctacagacgcagattgacaaggaagagagagagaggccgaggggaggaggcgtcgtcgtcttcttctgaatgcctgaacttttatttggattccagatagtatggctgccaaaatggctggagctgtccaagtgctcaaggatgacactgttaaacgcacacccatggcacgacctagtaacggccgtgaaggaaagcccattaggttgctgtcgaaccacttctcagtgaagcttagaggagttgatgctgttttctaccaatacagtgtctgcatcaaatctgaggatgataaggtggttgatagcaagggtattggccgaaaggtcatagataaactattgcaaacatactgttctgagcttgatgggaaggattttgcatatgatggagagaaatgtctatttactgtgggacctcttccacagaataactttgagttcactgttatcttggaggaaacatcttcaagggctgctggtggaagtccagtgcatgaaagccctactcaagctaacaaaaagcgagtcaagcgatcacatctggcaaaaaagttcagtgtagacataagttatgccgcaaagattcctcttcagtcggttgctttggctcttcgaggaagcgagtcagaacatggtcaagatgttctgagagtccttgacgttgttttaaggcaacagcaggctaagagaggttgtctacttgttagacagtcatttttcagtgatgatagtcgaaaccttgttgatttaactggtggagttagtggttgtcgtggactccactctagtttccgtactacaattggtggtctttcactaaatatggatgtttcaaccactatggttgtaactcctggaccagttattgattttctcgtcacaaatcaaaatgtaagagacatcagagatattgactggcccagggccaagaaaatgcttaaaaatctcagagttaaagctaagcacaacaacatggagttcaagattattggccttagtgatcaaccatgctctagacagatgttcccaatgaaagttcgaaatggaaacatcgaaattaaatctgttgatatcactgttcaggattattttaaatccaagcaagttgagctaacaatgccttatctgccatgtcttgatgtgggaaaaccaaaacgccctaattatctcccaattgagttatgccacatggtatcacttcaacgttatacaaaggcactgtcttctcaacaaagggcaatgttggttgaaaagtcacgacagaaacctcaagaaagaatgcgagttgttacagatgctgtaaaaagtaatatgtatgatgatgatccaatcttatcttcatgtggtattgaaattgagaaacaacttactcgtgttgacgctcgtgttctctctgcaccagcgctagttgtgggcaacagtgaagattgcatcccaaacaggggtaggtggaactacaataataagaggctattcgatccagtcaagattgagcgttgggccattgttaatttctctgctcgttgtgacatgagccgaatctcaagagaactgataaactgtggacgcagcaaaggcattttcattgaatgtcctcacagtttggtggatgaggacagccagtctaggagatgttcacctgtggaaagggttgaaaagatgtttgaaaaagtcaaagcaagccttcctggtcctccagagtttctcctttgtcttttaccagagaggaagaattgtgatatttacgggccatggaagaagaaaaatcttcatgaaatgggtattgtcactcaatgcattgctccaagtaataagatgaatgatcaatatttcaccaatgttcttctaaaaattaatgctaagcttggtggaatgaactccaaactggcactggaacatcgtcaaatgataccagttgtgactcaaataccaacattaattcttggcatggatgtttcacatggttctccaggtcgagcagatataccatcaattgctgcggttgttggatctagatgctggccattgatatcacggtacagagcatctgtgcgcacccagtctccaaagggaacttctactagacttctaccaaaccagtcaacaaagaaagcctaagcagataatcatcttcagggatggtgttagcgagtctcagtttagccaagtactgaacgtagaacttaatcaaattataaaggcatatcagagtatgggacagggggaccttccgaagttcacagtgatcattgctcaaaagaatcaccacacaaaactcttccaagctgattcaccagagaacgttccacctgggactgttgtggactccggcatagttcatccaagacagtatgatttctacatgtgtgctcatgccggaccaattggtacttcaaggccaacccattaccatgtgttgcttgatgagattggcttctctgcagataatctccagaagctagttctttcactttcatatgtgtaccagaggagcaccactgcgatttctgtggtggcacctatctgttatgcccacctcgcagcagctcagatgggccagttcatgaaatttgaagagtttgcagatacgtcgtcagggagtgtcaattcatcatcgccaccatcaataccagaattgccacggctgcatgctgatgtctgcagttccatgttcttctgttgacgtgattttagtttgaccgttgtggggtagggccaattctttgtgaaaggaaccttaccttatatgttggcacacagcaggctaaccgtttttgtgaagaaaccatgtaggtcgttagttgtcgtatatcgcacgcgtgcatctttttggagcggttttcggctccccccacccacaggtggcggttccgttaggtacagtttccagattttaacgatgctaatacagtaaaagcagtttgtacattctacgcagattttgcagggatacgtggttagatgatctttttgttatgcccagaaatacgtgtgcattggggggttatgaaagtgagctaaatttctgtgcctcgcatggcatccaattgtactcggagattgtgtttgtgctcgatacgcttcctgccactgaaatgcgaaaatgaccacttccactcgctactcgtgacaccacaggaaaatccttgcatcgac

SEQ ID NO: 39993 - DNA, 261 bp, Zea Mays
acggagccgagctacatcacgtccgccccttgctctccctctctcgacgacacaccaggcaaacacacacaggctctgtcccatggatgccggccacctcatagtgttcacgaccatgctcgccgtcaggtggtagtcccggcgagcgagatctccccactccaggctctctcccatcggtcactgtcgcctcatgttgtttgcagccgtgctcgccaaccgcggcatggaggcgtccagatctgcttacaagccctccct

SEQ ID NO: 39994 - DNA, 744 bp, Zea Mays
tctccctcacgttctctctctccatttatctcccacgcgcgcagcttccttgtcttcaatttcctggcagcggtgctcctctccctcgccgtgcagctcccgcgcgagctcctctgctggccgctgctgctcggcttccagctcgccatgtccatctccctgctgccgctcgcccatagcgccctcgccttccaacagccagcgacgccagccctctccctgcttgcattcgtacagaaccgcgcagctcctgtgctgagctctgcagccgtgcttcctccaacagcagctgcgtcaccaggccctcaacgtcgtgctgtgcgctgggacagtccatagctcgcctgcgtgcccagccgtctcgaatcatgtcgtcgattctcggcaccgcgagctcaccttcccttacacacatctctacagacactgcctcatcacgcgtctgcgtcatcgatttcgtcgtcgttccttgcgttattaagaaatcccaagagttagatgaaacacgaagctagcagcgtgaaatttaccaatgtgtctcggagaagaagaaggtgacgttccgatgcgtcactaagtgttcgatcaaagacttcaatcggagcttgtcatcgttcttgcaaatattgagtcgatattgattatggtacgttaattgatcgtgtgatgcggaagacgagccaagtcgaccacaagatgtcgctacgcgtgagcttctccacaagatgatgctgatggacgaac

SEQ ID NO: 39995 - DNA, 4905 bp, Zea Mays
cgtctcccctgctaatgcattactaatccaacgaatccttcggttttgtattcttcgcttcctttcgccttcctcttcgcctctctctcgtgttctggcgtcgccgtcgccgctggcgcgagatggtggagacgcggcgaagcgccgcggcgaagcgctcggcggcggtggtggaggaggagaagggctcgctggcatcgccagcgctggagcccgcggaggacgcgccggcgggtcttggagcgggtgacgatgtcgcgtcgtcgcagcccccgaagcgcgcgaaggttgggtgcacggagtcggataccgcgaagccgtcggtggcgccggctgccggcgctgttgcgggtccactgcccaacacggctgggctgcaggccaggaccggcgccatggacaagctggaggccttcttgaagtccaaggaggctcagtccaatccggccggtcataagcaggggactaatgataaagatttatcggcgaagatgaagagagtcatggatttgtcggaggatatatcggagaagataaagagaagcaaggataggttggctgtgttattgaataagccggctgcaggcaccagcaggcgtcaggagccctggtgcagactaatttcacaacattccatgcaccctaccctttctatttacggtgcgattttcacaattggtcatggagcgcatcatgatttcagactggatgaatcatccactgcctcatctgtttgtagactgaagcaagctaagcgaggtgcactccttgaaatctttgaatccaaagttgttcgtgtaaacgggaaatctttggacaaggctgccaaggttaccttaaatggaggagatgaaattatcttctgttcaccagtgaggcatgcttatatatttgagcaacttcatgaggagaaatcaagcacttcagtgttatcttccacttgcacttgcagtagtatccagctggggcaacactcacatttcaatgatattcaggatcatgtgtcatctaaagggcgcaaagcctcatcctttctctttggaagaggtctatcagcagacccacttaatatatgtaaaacgacggagggccggagccagtttatctctgaagataatatatcatctggtcggtgtcagctactaaaggaggatttgattaatgcaacggttgatgtgagtgacatctctgagtcatttgatagttgcccatattatctaagtgagcataccaaacatgctctaatgtcagcagcatttgtacatttacattgcaagaactacttcaagtttacaaaagatatatcttctcttagtcaacgagtgctgctatctggcccaacaggaactgatatgtatcaagaatatctggtgaaggcccttgcaaagtattttggtgctagattgctcactatagattcttccatgctgtttggtgggcaaacttccaaggaatcagaatcatacaaaaagggtgatagagtgaggtatattggctcaggcattatccttgatggacagagccctccagattttggttcacagggtgaaatatttcttccttttgaagaaaacagatcatcaaaggttggtgtaaggtttgataaaaaaattctgggaggaaacaatcttggaggcaattgtgaagttgatcatggtttgttctgttctgttgattctttatgccccgacattccaggatgggaggttacgttcaaacatccatttgatgtgatagttgagtttatctctgaagaaattcggcatggccctttaatcctttttctgaaggacacagagaaaatttgtgggaataatgattcctatcatggtctgaagagcaagctaaaacattttccagctggcgcttttataattggatctcaaatccagcctgacaatcgcaaagagaaggcaaatgttagttctccttttctttcgaagttccggtacagccaagctatacttggcctcacattacaggacattgatgggggaaatgataataataaagaaacatcaaaggcaataatgaagcatttgatcaaacttttcccgaataaagtgacacttgaggcaccacaagctgaaatggagctttcacggtggaaccagatgttaaaccgagatattgaagtccttaaaggaaatgcaaacatttcaaaaatacgctcttttctaacaaggcttggattggaatgcactgaccctgaagcgatattggtcacggatcgcattcttacaaatgagtgtattgataaaataattggttttgctttgagccatcaacttaagaactgtacaaatccagacccccctttgggtagtgtgcagtttgctctatccagcggaagtcttaagcatggcgttgacatgttgaaaagtatccagtctggctcgaagagcagcaccaaaaggaaatcacttaaggatattgctactgaaaacgaatttgaaaagagccttcttgctgatgtcacccctccacatgaaattggtgttacctttgaggacattggagctttagaaagtgtcaaagatactctgaaggagttggtgatgcttcctttgcaaagacccgaacttttcaaccgaggacaacttatgaagccatgtaaaggaattttactttttggcccacctggtacggggaagacaaatgctggctaaggctgtggcaactgaggctggtgctaatttcataaacatatcgatgtcaagcatctcttcaaagtggcttggtgaaggagaaaaatttgtgaaagctgtgttttcactggcaagtaaaattgctccaagtgtaatttttgtggacgaggttgatggcatgttgggaaggcgggagaaccctggagaacatgaagccatgcggaagatgaaaaatgagtttatggtgaactgggatggtctgagaacaagggagaaagaacgtgtattagtacttgctgcaactaacaggccatttgatcttgatgaggctgttgttaggcggcttccaaggaggttgatggtgaatttgccagatgcatcaaataggagaaaaattcttagtgtaatactagccaaggaagatttggcagacgacgttgatctagaaactatagctaacctgacagaagggtactcaggcagtgatctcaagaatctgtgtgttactgctgcacaccgtcctattagggagattcttgaaaaggaaaagaaggagagagcttcagcagaagcagaaaatagatcattgcctccgtcacacactagcaatgatgtccgtgcattaagaacaagtgatttcatacatgcgcatgaacaggtgtgtgcaagtgttccctcggattccagtaacatgagcgagcttgtgcaatggaatgatctctatggagaaggcggatcaaggaaaaagacaacgctaagctacttcatgtagcttaggttataaatatattgggagaagtgccctggcacaaagcagcaatagttggaggcggtgcagttggaaaaaaaaagctatgctcatctgccagacatccatatcaaagagaattgatggttcaggtggagcggaatagaatggaatggaatagtatacatacacatggttgctgcctctgctctgggccatgcatcatgcatctggacaggacggctatcctggcttgcagttgccctatgcagttttgagtgcaatggtcaccatctgtgaagcacggataccacagagatcctggccccaaccactcttttcacaaatggagctgaggacctttggagttctaccaaaagtgatcttaaatctttgttctttgactttccgttttgtgaacggaaggccccactctgctagtatggattgttgatcctccgtttctctggtactgactgaactgctcatacaaaactcgttcaacaggcagaaatgctgcctggtggccttctagagtgcttctttgacgccgcagagagcacatcaaaaaaaatgtgtttgtttcgaacgatttgtgctgcattccattcacggcgatatcaggtgccgttgtttgtgtttggttccgcaatcaagggagtgaaagccattagcacatccaatcaaacaaatagcgatatctctttcactgtaccagttagcgctggtctcggatgctattaacattgctgttgtctgtctcggaaccaaacaccgcctaactcgtcggctgttaaatatttctgaactgaattactgcacttggttggggtttcatgcttatcaagttggcttatatagccaacaatactttgtgcagttctgcatcctctgcctgcttatgcgcgatctcattggctgagcggtacgaagataaaacggtagctaatccgaagcgatggcttctctttttctttctacggtattttgtctctatgaattacagttacagcagtcagaacagctgatttaaaaccgcagcgaaaaggctgattgccttgcccatttttgggtgggtggaggttaatacagatttctgtaatttttttactttaatattgtttgacatattgtgcaaggcaaatgatttcctaatgatttgttctacttgatattgtaatccatattgacctatatgctatgctcagttccttagagcatctccagtacttgatattgtaatccatattgacctaggggaaaaaaaggagaatttaacctgatgacactggtggactatgctatgctcagttccttggaacatctctagtagttttgtaaaaaaatctctctaaagacagatgtaaggagttgctacataataatagggagtaaaaatatctgtactctcatgtagtctttatttttagttaccaaatattataaattatgcctgctgaaactcctctccctcacgttatagaaagttttatgtttttccaatcaaac

SEQ ID NO: 39996 - DNA, 533 bp, Zea Mays
cacaggatcttcgcccgcggtgggatctatcgtacgggtcttgaggtcactcggcacccaaatcctatccaccggagtgcaagcagaggtagcgggcggaaacagtggtgttcttaccagttcttgtacgccgcgattcgcagaccatcgtccatggcatcccgcaactccacagtggttgaaaacaaactccaacgcgaccaccagggctggcgcggccacacgcaccactatcgcgaggaggagacagccactggcgcgcaggagcattaccatccgtctccctgaccgatcccacgaccaagcagacgggatggtgcgccacggaactccctccaatgtcgaccgcacgcagccacggaactcccaggcgttgtgcgagttcatgggaggtgctccattctctatcttctctcgatcgctccctgttcggtctccctttcaggtttccccaagctcggagttcatgggaggtgctcgatctcacagccgggacttgggggtgcacagggaggagggaaggagcaggcctt

SEQ ID NO: 39997 - DNA, 1212 bp, Zea Mays
gcgcccctcctccgtgcgtgccccgcccccgtccttcgctcacccgatgccctgccacctccgccgcgatagcctcccccacgaaatgcccccgtgatgttcgccccgctgcgaacccctccccctagatggaataagcagaggtccaatgcggatccgcggcccccgaccctccaccttggtgtgacagtcgcggctccgtggaggcaacttgctccctcgctcccacctcccacgccgccactgttgtcgccttcagcacgctgcccagcccacgccccccccccccccccgcctccaaatgtggatctgccaccccggccctccaccttggtgtgccttcagcacgccaccactgctgtttgattccttctcctttttgtttaggacgtcgccaaattccatccatctctcagcgccgtggtctcccgatgtggatgggggaaggtacataatgcgctcgaccacattaattttgtcgttaagagtcaaacgatggtttgtgttcacaactgaaaccattggattttgtttttgacatcctcaaggaggaattaaccgagagcttgctgccgcaaagaagatttctcacatctgagatcgggagaagaaagcattttcaaggagaatagccgatctgttgatgtgcttggccttaagactgcttttgcaaccttcatgggttccagagaagaaagcgagggaatggtgcgcctccaagggcgatattccatacttcgagacctctgcgaaggaggaccacaacgtcgacactgctttcctatgcatcgctaggctcgctttggagcatgagcatgaccaagacatttacttcaagacagttgtggaacaagtcccggacactgaacagacaagcggatgtgcttgctaggagccagccatttcctggaaggctggaactacgtggatgttactgaaggactggcccccgatatgtttccctcccattttttcttttgagctccagtaactttattactattctgtgttgctctcactggattttagcacttctgtaagttgtcatcttttaaagttaagaatttttacataagtcttacacatcgaacaaatccaccatgtacattaagatgcaatgcttatcgaacactcaagtattatgctcttgtaacctaaattaatcaaaattgggcaatgatcagcaaccgacttgtgctaaggtagaaaaat

SEQ ID NO: 39998 - DNA, 1723 bp, Zea Mays
catcaacttctgggtttcagacttagctaattggctaattctgaatttcagtaaactttagccatgtttgtacctttgtagtggctaacctgtagggaattaaattaggtctcttatagcaaagcaatagagctataatagaagaccaggtttggttgaaggccataccctagaagctatttggaattggagaaaagggttggctaaagttggaccgtcagactgtacataactgaattttgttattcagttctgagaactgaattacagcaggatgcctagtttggaattcatttgtgactgattcgtggggttttggattaaagtttccatagcaaatctagagaccatagtaaagagagtaagttttgtaaagtgaggtggacttggttccacataaatttggaaataaaagtggccaaaaggtggactgtcagatgttaggattcagacttagaataatatttaagtctgaatttgtgtgtttttattcagttttgggtccttgtggtaattaatccaagaaaaattggggtaagaatgctatagcaaagtgaaagaccatgtaaaggagagcaagtctcatgcaaagcgttggcttgctattgtgcagaatttggagaaaaaggagtgacaaaactctctgtcagacctagtaatgtgctgtttcagattgggaaaatggattttccatgtgtttactcaactttaatgcagcctaacgcttggtatgtatggttataagctaaagaccatatagaagagatttgtagctgtgttgggtgaacaagtttcttatagagaaataagtttggtgctgtctgtaagccatttgctcagaaatccttgtagagtccctaattggaataataagaagaacataatcacatgtggattagaaattttggaaaaaaaagaacaagtttaacaagtgaaacctgatctttggataaagaagcaaaagtgcctagtgggatctagatttttggcgtagtttgaagattgttctaatcctctagaagttcaagttgtaggattcaaatcagaaaagtaagtccttacttaaggcaagcatagagttcttggttatggacgcagagttccctagtatggtttgagagcttagtgatgatattagaatatttagctcccctgttgtttggttagttttgtgtgcacctttagtaaggtgtagtttgtactgctttaaagtatcttctttgtagttgcacaagtatatgcattcatgttcatatcattacatgtagaattcccagaagaagaagaagatgaaattcaagaagtggtttctgaagaggagtctgcttcagtgactgctcatcaagtgatgggagccatctaactggggtttaatagagggatctagaactccgtctttgcaacgaaggtcatagctttgtgctgctgatgatggtgttaagtgccggtgggctcggccttcttattagtctaagtaacccttctatacttcttactgaggatggtcacttgagctagcatatatttcaaatttatacttttgtaatcacttcgataaaataatgtaaaatttttgtaacctgtaaaatttggtaataaggtttccgctgcaaaaatgtgatgtgtgtgatttgtgttacttaatcccgcggttctggttgtaagtggtttatccgatgtccttggggcaatcagacggatcctgttaagttatctggtgcac

SEQ ID NO: 39999 - DNA, 1560 bp, Zea Mays
cgcctttctagctcctgcagtcctgctgttagtgctgttcccctctctcttccccgtcctgcaggctccaggcgctgctgctctcgtcctccgctagcgagcgaatcgctgacgctggcccgacgccgcggcgggaggtatctcgctttcgatcaggtgcgcgtcctactctaactcccagtcgccttcctcatctggctttcgattcggtccggtctgcgcccaacccgtgcgctgggcgaagcttccggaagcttcagggtttatcccggcatttcgttttcagcgacggcgcgcccggatcgcttgatctgacggagtttctatctaggattttggttggggcgtcgttctccggtgcttatctcatttctatttatcggtgcctcgggttcacggccaaattcgctgctgcgtggggctttggagattggagccgattccttaaagtggcggtggcagcgtctggtgggaaccatgagcttcgtgttccgaggaagcagggccgacatcgaggccggtggcttcacagggttcgcccccgagcgccgcaccatgtgtagcgaattcatgcagggagcaggccggtgaatagcaattccttggtttttcttctaactgtttttgttttgttcatggtactgaactcacaccagatgtctcccaatcttttgctttggatagtcttgggagccttcctaatggccacgagccttagaatgtatgccacgtgccagcagcttgctcatgctgcagctgccaacagttttcttggccacactgagctgcgtgtgcatgtaccgccgaccattgcccttgctacgagaggccagttacagagccttagacttcaactggctcttcttgaccgtgaatttgatgatttagattatgacactctgagagcactggatgctgacaatagcctgcatgttccttctatgagtgaagaagaaataaattctcttcctgtcttcaaatataaagtccaggcacagcagggaaatgcccctgcccgaaaaagtgatgaggcatcgcagctatcggtttcttcaactggctccggcaatgagaaaaagcaggatggtttaaaagcagatggaactggcaaaactccacaggatgaactaacatgtagtgtttgcttagagcaagtcatggtgggtgatctgttgagaagcctaccatgcttgcatcagtttcacgtaaactgcatcgacccatggctgcgccaacagggtacatgcccaatctgcaagcaccaggtcagtgatgggtggcatgccacaggcaacggtgaagaggatgcttcatacatggtgtaagtagctgcccaggagtaggccataggtaactagtagctgctaacagaatccgtggaacgctgttttggaggtgacggtttggacttgcaatctagggatgtggtctaatccctgtctaccctaacaaaaaaccgagtgtggaatcagctgtccagtgcactgagttcttgtacaactcatgtttatttctctcattctctgtgatgttgatgcataaaaaggttgctgataatct

SEQ ID NO: 40000 - DNA, 3150 bp, Zea Mays
gacttcacttcgtccccgtcgaacactccacgccgctctagcactctctgcgctctcccatcctcctcgctagccgtactcttcaccgccgaagcttctggttcctcatcgccgccgctacgcgtgagatcgacccgccgccgtcgtacttgctgcaggtctttttccctgactggtaatctagtgttcattctcttaattcaaatggtttcctcccacggagcaagatgaggaaatattcaaactgctcttagccgtgtagcacgacaagtttgttgcagagctggtctacgacaggtggacagctgggatttcttggcactttgtcaagtccacgagtagaagtgtggtggaagattgtcttcgttcaagatgatgcagaggccactgctccgtccggaggagtactccttgaaggagacctcacctcaccttggtggtgcagctgctggtgacaagctcaccaccacctatgacctggttgagcagatgcagtacctttatgtaagagttgtaaaagcaaaggaacttccaaacatggacatcactgggagctgtgacccgtatgttgaggtgaagctaggaaattataaggggcaaactcagcatttcgagaagaagaacaacccagagtggaatcaggtctttgccttctcaaaggagcgtattcagtcatcagttgtggagattgtagtcaaggacaaggatcttgtcaaggatgacttcattggccgtgttatatttgatctgaatgaggtcccaaagagagtgccacctgatagcccgttggctccacagtggtatcggttggaagaccgaaatgggcacaaggtgaagggggagttgatgttggctgtttggatgggcactcaagctgatgaagcattccctgaagcatggcattctgacgcagcctcggtccctggtgatggccttgcaagcattagatcgaaagtgtatcttactccaaagctttggtatctccgtgtcaatgtcattgaagcccaggatcttataccaaatgacagggccaggttccctgaagtttatgtcaaagcaatgctaggcaatcaagtcctcagaaccagggcaccgagccggaccttgaatccaatgtggaatgaagacttgatgtttgtcgcagctgagccatttgaagaacacctaattttgagtgtagaggacagggtggccccaggaaaggatgaagtaattggaaggacaatgatttcactgcaccatgtaccccggaggctggatcacaggttgctaaccagccagtggtataaccttgagaagcatgtgattattgatggtgagcagaagaaagagaccaagttttcaagtcggattcacttgagaatatgcctcgaaggtggatatcatgtcttggatgagtcaacacattacagtagtgatttaaggccaactgcgaagcctctgtggaaacctagcataggcatgcttgagcttggtatcttgacagcacaaggcctgttgccaatgaagaccaaggatgggcgtggcacaactgatgcgtactgtgttgcaaagtatggacagaaatgggtgcgtactaggactataatcgacagcttcactcccaaatggaatgaacagtacacctgggaggtgtatgatccatgcactgtggtcacaattggtgtatttgacaactgccacctgaacggcggggaaaaggtcaatggtgccagggataccagaatcgggagggtccgcatccgtctctcgacgcttgaaactgatcgggtgtatacccactcataccctcttattgtcctgacacctggtggcgttaagaagatgggcgaggtgcagcttgctgtccgtttcacgtgttcgtcactgctcaacatgatgcatctgtacacacagcccttgctgcccaagatgcactacgtgcacccgctgtccgtgatgcaggtggacaacctcaggcgccaagccacgaacattgtctcgacaaggctgggccgcgcagagccaccgctgcgaaaggaaatcgtggagtacatgctcgacgtggactcgcacatgtggagcatgaggaagagcaaggcgaatttcttccgcatcatgagcgtcttgagccccttggtcgcggtgacaaagtggttcgatcagatctgccgctggaggaacccactgaccaccatactgatccatgtcctcttcatgatactggttctttacccagagctgatactgcccacagtcttcctctacctgttcctgataggggtgtggtactaccggtggcgtctgaggcagccgccacacatggacacccgcctctcccacgcggagactgcccaccccgacgagctggacgaggagtttgacaccttccccacttcccgcccgccagacgtcgtgcggatgcggtacgacaggctgcgcagcgtcgcggggaggatccagaccgtggtcggcgaccttgcgacgcagggcgagcggttgcagtcgctgctgagctggagggacccgagggccaccgccctgttcgttgtcttctgcttcgttgccgccatcgtgctgtacgtcacaccgttccgggtcgtggtcttcctcgcgggcctgtacatgctgaggcaccccaggttccgccacaagatgccgtccgtcccgctcaacttcttcaggcgtctgccggcgaggactgacagcatgctgtaggttgtgggcttgtggcagatgcctggctccattgctggttcagtggtttcacccgtcagttgcagctcacagatggtcactctcctaaggtagtgtatccgaaaacaatgaactgccagctatcttcgtgacttttgtagcttctctctgtcgcatggttggttatgtattcagatggttgtgaacctttcctgtagctaggtatgcgtgatgcatgatgcttgaaaactccgggcgttggttaagttattgctttacctacttgctcagcagcagtggtctgctaacgtggtcctctgctgctgcatgtgcatcgtgttgtttggtttccagctcaatttgtcagtttgccacgtgattggtttcagtttttacttgggtaataccgacctgaattccaggcgaattatgaacaggagaccctgcgagttttctactccgcagactggaact

SEQ ID NO: 40001 - DNA, 1523 bp, Zea Mays
aggtatacgaaatcttgagtgagctgtacgtccatttggaagtagcaaagaagcaactcctgatgatgcaactgtaaggacaatctttcttatagctctaagcagttcgaatatattggttcctgattattgtgtctcgtcatggatttattgcgttcattgaaccagaaaattgcatcgcagtgtctacatttgtattctagtttaccaagatctttttgttggagggttcacagtttttagacatcttcctctttctaatcctttcaccgcgtcttattttactctcttctccaaaaaagttactgctctgtaagacttgctcacttctttttcttttcgtagggtggtcaatatcaatgccttgtttatgacttcttattattttccccatgtctatatcctatgtgatggatgcatgggtccaaaaagataaaatgaaaatatactgttagtaaccaatgaattgtacaaaaaatattatatgcaatgactatacattgaaatgcacacaactaaattaaagctatagttacatgcatagtacaattgaatgttacaaatactgcttttattagccagtgttatgtctttatttatactaatgctattcacatactatggagatttagaccattggaaatgcactttgtaatacttaacttggtgttctaaaacataagataggtgttctgaaacataagatatgaaattgcacttggtaatacttagtgtggtgttctaaaacagaagagaggtgttttgaaatagaagagagggtacatatttgagcatatgtagagcccaggtacctcgctctacaacatcaaggattatcttgtcattcataagagttaaaggccctttcttcagtctttcactattaagacacaatttcatgttgcaaagatcttcaatggatgatattgatgacgatatataagggatatcactcttgagccacataagcttgatgaagagattgttgaatctaatcttgagcttgaagcagactttgtacaatttaaatatgatgatcgatcacaaaaggtacttcattctgttgccacaaacatgtttagcgacaaggagatgtgctgctaagtctgtttttacatggaagatgggaaatggacataaacagtgaacatgaagaagggtgtgctagatggaaaggaaaccggtcaagctgattgaataagaagaagtctcttaactactataaatccatccatgaaatggagaagattaatgctaagccacttcaagaaaaaaggttgggtctagtcgttgttgtctctatactggcaaagggaatgcggagatacatttcgagaagaaaaaggcaatgatatggaggtgttttgtctttcattgataaaaaattagaaatgagcaggtgatgaatgtcacatgaatatatttagctatttcaaatggaaaccaactttgttattgtactggcttttgttcataataaaaacacagaaggcaatggaaaatctacatgcaaatgttttgct

SEQ ID NO: 40002 - DNA, 1187 bp, Zea Mays
tggagggaaaatcacaaactgttagtaaaaagaaaaggaaatggagccgctgtatccagcccatgagcctcgaagtgacacagatatcaggttgagaagcccccagcggaaggcacgtgaggtagaagaagccagcgtggtactcaagagtccacaccgaaagaccgctgttgcagctcaggtatcaacgcaggtacaacagccctcgctacctccgcaacagcctgacgaggtcggaaccaaaaattcagcagcggaggttgtaatggacgtcatatcaccgaaaaccactcaggtgggcgttgtccatggcaacccagtcgacgatgacaaggaacagcgggcgcggtacctcaaatactcgcagaaggcgctcggcttcgccgtctgcacgtttgtcgggtacgcaagcaacgcatcgtccaccggaagcgcggccttcaagatggccgccgcgcccttcttcgtggccatcatcgccgacctcctgacgctgaagacgaaggcgaagcacggctgcgccctgatctacctgtcgtcgttccacctgatcctcatgacgtacctcatcttcatcgcgttcgacatggcccacgcctacgccgtcctcttcctgccgctggtcgcctccgcctcccacctccagcagaagctgtggccgccgccgccgcgtgacgacgggagcgccgacgacaggagcaaggccgttagcaaggacctggacagcatcctagagctgtcctctctgatcctcaactggagcagcttcgtcagcgcgatcatgaccgtggtcaggcactttcatcactgctgctggcaaggacaatgacgagatcgcgcccgaggctgtagggctcctgttcttcctcaccatcgttctcgggatctatctcatgctggccaccactgtgagagctccggcgctcaatctccctaccaagtacctcgacgtcctgctcatctgccttctcctcagcactcttatcgccaccgtcatgacgtttagtggtgcaaattggacgggaaagcagtcctctaccggcgggtcaacctaggtgtcttgctgtttcagcgtgttcatatatgtttcattcaatatttacgcctcttattactcacctgcgatgcaaagaaatgctgtctcgatccgtctccagtccaaataatcgaacttccagagtcgtctc

SEQ ID NO: 40003 - DNA, 289 bp, Zea Mays
taagaaacattgtttccaaatgcattggataatgtcacacccggatttaaggaacaagtcgggtgcatctcatacatgtgccaaataagacaacatatacaataacagagtgtatagagataaatgtcataataacatcagagtacttattacattgaggaagtcttaccaaataaaagataaatataaaatgaactaaggatcatcctcggcgccataaagtcaactgggaaatgccacctagatcagatcaaactcctcgttgtgtggctcctcctgaaccacccgt

SEQ ID NO: 40004 - DNA, 1229 bp, Zea Mays
aaagcctgtctagaaccaaacacccctctccaccgactgcaaataatccgactcccactgctgggtgccctgtcccctacctcgggttccgcgcagaggaaggtggagttgctgagtaggctccgatcaccgtatttattgggcctgattggccattgttcggaaggtgaacactgtctacttgtatatgagttcatggccaatgggggtctccaggagcatctctatccaaacagaggttcacatgtaaacatgaagttggctgaagtgtcttcctaccacttaacacagcggataacttgggttcatgtggtggaatctcaaaattggactgggacacaagaatgagaattgcacttgaagcagccaaaggtttggaatatcttcatgaacatgttaatccacctgttatacatagagacttcaagagtagcaatattctcctggacaaggacttccatgcaagaatttcagactttggtctagccaaacttggatctgatagagctggtggtcatgtctcaactcgagttttgggcacacaaggctatgttgcaccagagtatgcattggctgggcatttgactaccaaatcagatgtgtacagttatggtgttgtgcttttggaattgcttactggcagagtaccagttgatatgaagaggtctcctggagaaggtgttttagttaactgggcattgcctatgctcactgaccgagataaagttgtgcggatcttggatccagcatcggaaggtcaatattccttgaaagatgctgtccaagtggctgctattgctgccatgtgtgttcaaccagaggctgactataggccattaatggctgatgttgtccaatcgctggttccacttgtcaagaaccgttataatcagaaatcttgcaatcccaatgtgcaaccatcgaagccacttgactaggagaaaagctagtgtttgatctgcagtttgtgctcgtccttctggaacccttctcgagttctcgtctataacgaactactgttgagacagattcacacgcttcctaacaatgatttcgtctgctggtgccctcctgattttgttgttttttgtaggggtgtgttgtgtgcaggtaggttgcaaatttaaaggggatatagttgaacggtcctgagaacttatttgagtctgaaggcaagtttctgtcacctaaaattaggtgcatgttgatggtgggctgttgggattaat

SEQ ID NO: 40005 - DNA, 2179 bp, Zea Mays
accaatcatttctttgcaatctgcagcctctgcaaactgatcgcgttgctggttgctggtaatcatcggaccagtccacagatatcggaagctctcttgctactgatggcgaagcccagcgtggcggtgccggaggttggcgtaccagcggcgcaggcgtcgtgcacctgcccggggacgctgctcgcgtacccgccgccgcgtggcgccggggtcgcggccgccgtgcggcgcaagtgcctgcaggtggagctcggcgcgggggcgggcctgctgggcggcgccggcgcctggggcgtggagtccatgcgggcgtcgtcgcccacgcacgccagggccgcggccgcgctcgccgccggcggcggcgtcgatgtcgacgtcgacgaggagcgcgccgccagctggatggcgcggcacccgtcggcgctgggcaggttcgagcggatcgtggcggcggccgagggcaagcggatcgtcatgttcctggactacgacggcacgctgtcgcccatcgtggacgaccccgacgccgccttcatgagcgagacggcttttgttggtttggctggcgagaagcagatgcggatggccgtgcgtagcgtcgccaagcatttcccgacggcgatcgtgagcggccggtgccgcgacaaggtgttcgagttcgtgaagctggcagagctctactacgccggcagccacggcatggacatcaagggtccggcggccgccaaggcctcctcttcttctcggcacgccgcaaaggcaaaaggagtagtgttccagccggccagcgagttcctgcccatgatagaggaggtgcacgagcgcctggtacagacgacgcgctgcataccgggggccaaggtggagaacaacaggttctgcgtctccgtccacttcagacgcgtcgacgaaaagatgtggggcgagctgtcagagtcggtgaggggcgtgctgcgggggtacccgaagctgcggctgacgcacgggcggatggtgctggaggtgcggcccagcatcaagtgggacaagggcaaggccctggagttcctgctcgagtcgctcggcttcgcggactgcagcagcgtgctgcccgtgtacatcggcgacgaccgcaccgacgaggacgccttcaaggtcctgcggcgccgcggccaggaccagggcgtcggcatcctcgtgtccaagcaccccaaggagacgagcgcctcctactcgctccaaggccccgcagaggtgatggagttcttgctgcggcttgtcgagtggaagcgcctctccagggccaggctcaggctgcaatgagatgagacggcgcaactgccgtacgtggacacgtacgacgatgcaacggattaagctaactgccaagtgccagttaattaagttaagatcctgcctgctacgtggaatcgtgaacggcactgtctctctactgtccccccgtagtgatcagcatgcatgtacatcgttgtctcatacagtactagctagttagtactaagcatgcctgttacatatatatagcttcatgtgaatgtgttgtactgatgtgtgatcttaaaagtatgctgatgaacggtgtgatatttttttaatccacactacttgctgatttggttcaaagccggacctgtcgtcgtcgaagtgatccagctttgcaacgccattggccaccaccacatcgatcgaaagccacaccaataatgagcaaggcgacgatggaatcttggataacgcatgccacacgggagcgcgcacacgatctttaccatttgatgaagataatgatctacctgtggacgtacgccgcgtgatgacgaagcgcggttggactccactcggaagatcgatggagacgcgcgctctctggccattatattcccccgtgcttgtgcttgtgcttgtgcttccaatcatgtcgtacgtccaatgcaatgtccgggaagatggattgcatggcacggttctggccatcttcaagaagacaacaatccccctccttttccactttcgatggcctcatcgattgatcactgctacagcgtacgtacgtacaatcgtttatcagcttattacctgtcggcctcgctgtcaatttgttgttgggaaagaagcgcatctaaaatcagctcgtcgatccatcttttcagcaaaatgaaatattttatccatcccg

SEQ ID NO: 40006 - DNA, 1103 bp, Zea Mays
tttcaccactaaatttacaagacaagaaacttttcgctgggttgctggcccatggatgacatgctcctctccatgtgatggtggtattcgatatcgtgatgttgcttgttatggaaatctggacgatgacacaatcaaacactaccctgtagatgatgctagctgttcagcagacaaaatgcctgcaagacaggaggcctgtaatcagcagagctgtagtgatcctgagatgacacagtcagtgaatcctaaggaaagtggaatgtctggttggttggtagtattggttgttatcctaggtctcagtgcagctgctggcattgcatttaccagctacacttactacgtgaggagaacctctgggacgagtggttttgtttatgtcatgatggaagcttattcttgaggattgagaggaacgatttcctgtaagtctgtgagcgactgtagaaaatctctggagttggagacaaccagcttgttcattctttggactttggtttgctgttttggtcgtcagaaatggttgtcgtctatttccgctgattcatgtgccgacgaggaactatcccgggtatagcctgggagtctagacaaaacaactgagtgtttctatggtacttgttagctgcaacttttcttcgagggcaattgaagttttgtctaggatagattcatgcatttgatagaggtgtctccgatcataccccgttgcttcttgatactaaatctcctgcctttgtcggatgcaataggctattcaaatttgaactatgttggctacaaagggaaggctttcatgaccatgtcaaagagattcggtcatgttcaaataagggcaagaacttggttcaaagatggaataacaaactgagtgccctactgagatttcttcgtggttgggctgtccagtataatggggaatataagaaaaagaaagtagagctctagaatataatttacacgttggatacagaagctaaaatcagagacctgaatgagaccgaaatagaatgtttggctcactcgagggttcatctgtccaagcttctcagagaagtggaaattaagctttaccaacaggcaaagacaaggaatgttct

SEQ ID NO: 40007 - DNA, 275 bp, Zea Mays
gtgggcccagggacataacgaatattgtacttggagccacgaacgtgcgctgctgaggcaatcttctagcgccctgacacccgagatcttcatatctttggcgtgcatgggaggcttcttgtagaagggatgatgagtacggtgcaccgctcggcacgggtgcactgtttgccagctgatcgatcagacgcgccatctactggacgaccctgacgccgcctgccattggattggacaggacgcattaaatgctgggaggatgcgtcgcctgctgg

SEQ ID NO: 40008 - DNA, 388 bp, Zea Mays
cagtgcccctgatctttatccttgctttttcagatatttcggtgtcctgatcttcagcacttttctgaaccggccccttttcaccgtccttttcttttgatttttgttaagaacaaggtgatctccattaataaaaattgtttactgaacatcagtcttcaaagttactataggatccttgggcctaaaccgaatggaatcaaagatatggcgcttccaattcagccccattccactgtgaccattcctgttctagaattcagtttcagtagctcaacacagttctgacagagcaactttgggatgttgtttctttaatttttgtacaacaaccaaagaaaatgattgtaccaaagttactcccctataatccaactttaatcttgct

SEQ ID NO: 40009 - DNA, 2095 bp, Zea Mays
cgtagacggtgtcatgtttgcaaaattctctgtgatgatgtgaacgaaggtctgaaaaaatcacagaactcactcgaacgacggtgccgccgcttgcctcgccggaccatggccgctgtgccgtcggggttcctcctcatcactggcccgccgggcgtggggaagacgacgctggtcatgcgggtgtttgaaaccctcagaggctcccacccgaacctcaacattcgcggattctatacccgagaggtgagagagggcggagaaaggatagggttcgaggttgtcacgctcgacggtagaactggaccactttcctcatgcaaggtttccaggttgctattatgcatttatgcttgttctaaattctgatattaataaggtaattgttggtatttgtttagcaccgtgtatttgggtatttggaattttgaaatgcgttatctgatactggagattgtcagtagtttaaattgtatctaacagcagcgcgaacacacttcactgaaatgtccacttcttaagtccatcttgcagaataagattcacaatatgtgtagcacatctcatatgaaggtactttcctacaagtatggtacctttactattatttagttgtttcttcagatatgataaaccactgttattagcactagcattatcaactgttactgtcataatttttcctaacccattccatcaagcatctatgtaagttcttcccaatgacatcccccttatgaccctttacttggaagaagctaatgaccttcttatgcaaattccaattatcatcaacgaagtgtgcagtcactgtaatatagtagtcttgttgttgagaagtccaacaatcagtgtgcaagtccatcgggatggaggctcaaaacgagggcaagcaatggacataaactttctaaagcctgccttctcaccaaacgcaaaaggaagttcatcttgtatgaccatttcattaaaagcttgtctaagcaactcaggatcataccttcatgcgctaacaccttgtccatcagtagcttgcaaagtaccttgcttattgtccttgttcagtttatggggattgcgcttacatgtattaaagtgctttcgcattctagatgtaccattggttgttgtatcagcccaaatattatggctgcaatacttgcactgtcccttctttaccatgttgtttgcatcctttattttgatgaaatgctaccacatttcggaacggggagccatcactttcctttcacttcctttgttttctccatcactaacttgaacaacctcaacagaaccacctgtatctcccacatttgaagcacaagcaccatcaacaacaggtttcagtgcagatgacatctacaaaagaataaaatgggcaacacatgatacacatcaacaatcatcccggagtctgttagatggcctaccgtcgggaaatacaaagtagacgtagcatccttggaatcattagcagtacctgagctgcaggttaaggaagaaacagatctcttcatcattgacgaagtgggtaaaatggagctgttcagttcagcatttttccctgcggtaatgagagttattgaatccaatataccagtgttggccaccatacccattcctaggcagggccgggacattccaggagttgcgaggttgcggaatcatcctggagcagctgttttcaccttagacactggtaacagagatacgatgagagatactatatgcagtcagctaaggagtttgttgcagaggtgatctgctaacctccctgtgtctatgtagccactgctttttttgacataagataacaagcaaacgatcaagagtagaagttttctctcagaacctcgagtatctgttttcaagtttagctctgaatggatgataagcatgtcgttcagtttgttcttagttccgtatgtggttattcaatcatgtatttgcattcggtgggggcaaggttttattgccacaataactctcgcttgtatggatgcggttagcatgtagtgactctacaacaggtatcacatgatttgcacaactaatttgctaataggccattattgcctgaatcctacgggcc

SEQ ID NO: 40010 - DNA, 2416 bp, Zea Mays
acacgtttctttaccctaaccttttcgctgctccagcgaggcatacagccgccgccgtttcttcattcttccttgcagcgccgacgctccatcttccgctccctcccttgctcgcgctcggcacgtaggcgacggtggcagcgctcagcctcgggctctcagcgacggcgtcagcggcttcccctctcgccagtcgcctcgtcctccgcacaccggccggtggccctgccagcaaagaggcaacggagagggtttccagaacagagtatacagagggcaaggctgttatgagcaacaaggaggagaaagaatgccaaatgaccaaagaagagaagaggcggaagaagagggagaaacataaggacatgggtcagagcggcgattatgagggtaaggctgttatgagcaacaaggaggagaaagactgccaagtaaccgaagaagagaagaaacggaagaaggggaagaagcataaggacaagggtcagggcagcaattctgatagctcatgtgccaggaaccatagcattgagatggagcaagctgatgtgtcagccaagatggctgaagactcctgcttggagcatgcagaggctgttacgagcaaaagctctgcgaagaaacacaggaagaaaaagaggaaagataaagaggttgaaactattggccagaagcagatactcgatgctgatgaaaatgttgggtcagaagatacgaagaggaacagcagagaaagggaacatgataggaagtcaaagaagcacaaacgaaagcatcaggatgacgagactgcctcaaatggttcttctggtaatcaaattgttttaggggaagataagaggacggaaaaagagtatttagttaccttggatttggaagaggacaataaatctgatatgtcaaagattgggaagaagacagatagcaagaagaagaggagaaaagagagaaatgatggtgttgacctaagacaaaatacactagttggagagggcaagaatggtaagaataacaaagagaaaaaaatgtgtgaggatgagaatggtggcggtgaaagagagaaagaaaacatgggaaagcagaaggataagtgtagacgagtgagcttcactgatcatgtggaggtgtttaatataggtggtagtgatgatgtagagggtgatgggagtggtgaaactgaacttgtgcatggacgacggtttagccctgaggaagatgcaaagctaatggaagcgatattgaaatatgcagagttgaagcaattaggagagaaagggttacagatgattggggaaagtaataagcatccagagaccaggggttgttgggctgaaatagcattacctcatagacccaagaaagccaaatacgcgcgtggaaaggttttacttcaaaggagtgctgaacgtaaatggaccgctgaggagtatgagataattcgacggtttgttgaaaagaacggccgaaattggaaggtattagcaaaagaacttggaaagagtgaaatccatgtaaaagatacttggagacgaataaagttcaaaaatttgaaaagagggacttggagtcaggatgagtaccaaaacttgtttgatttggtaaatctggacatgcgtgtgaaagcccatcaaaacatcaatactggtcaccgtcatataagagataacatttcttgggaggctatcagtgaaaaattaaccactcgtagagccgaagaatgctgcacgaaatggtacgggcaattggcatcgccgctggttaaacaaggaatctgggcagatacagatgactacatgttagtggaagcgcttcaaaatgtcgatgctgtttgtgctgaagatgtggactgggagaaccttctcgagcacaggtctggggagctttgccgtcatagatggaaccagatgattcgcctgatgggtgaccacagatataggcctttcattgagcaagtggaagtgcttgcaaggcggtactgcccagagatgcttgcgtacaggaaaccagtcgcaggtggatcctcggccgacgaacctgctggagcctctgacttgtaatatgggatctttagaaacgttagcagcatatggttctagagctgccaagggtgtcgtcagcactctgatctcaacaaactttggtattgttgagggcttatgtatcttctggatttgaaatcacggatgttttatcgcccaactaatcatgatttggggctcgattagagaacgactaggaatcaggccgtccagttagaactaatagtctgattaagtgttggatgactgttgaaaatgcaatgtgaacttagcagctgtgcacttgcacttttaccttggacttggaaattgccgttgccttcttggctttcaaccttcccagctgctgttaaaaaacggaacctattacccccggt

SEQ ID NO: 40011 - DNA, 2280 bp, Zea Mays
cgctgagcgagcatcagaaattcagcagtccaacgcgtcctccaatcttcgcccccggcaagcaataccgaaaaagccactccttttccttctccgcgcaaagccccaaaccgccgcctcccgttctctcgagtctcgacctctcctctcctctcctcttctcaggtctcacctgagtcacacctccacagacactgagacacacacatacgctatctctcatcgtcctccactcccggcaacggaagtttcactgctgccctcatctaactccccgtctcactgcatattgtcaactgtgcgtattttcagtctgtagaagccatcttttaaagaacattttgggcagaaattgccagtagcatttcttgtggttaacatggacttctcagctggttcctacttctcatcatggcctatcaattctgcttctgagagctacagtttggctgatggttcagcggaatcatatggagaaggaagcatgccaccgtcaacctatttcatgacagctagatcagatcacaatttaaatttcagtgtgcatgaacaggattccactatgcttccaaacgaacagttgacctatgctggtgctggccagattgatctattacctgctgagactctatctagggataagcttcctgaaaatcttctggagcttcaaggacttcagaatatcagcaacctacagagtaatttagtggccccaggggtgtttcagcacaatttaacacctggggtctttcatccacagttgaacactcctggactttcagaactgcctcatgccttatctagttcaattgacagtaatggaagtgaagtttctgcttttctcgctgatctaaacgctgtttcttcagcgccaactttatgttccacattccaaaacgcttcttcgttcatggaaccagtgaatctagaagctttcagtattcaaggcgcacaaagtgattgtgttttgaacagaacaagtcatccgaatgggaatatctcagatagcaaggagtttatcagtggtagtctcccttcttttgctagtgtccaggaaacaaacctagctgctagtggcttcaagactcagaagcaggagcaaaatgcagtgtgcaatatccctactttcactgcacggaatcaaatgtcagttgctgcaatgcaaggagcacttgtccctcaaaagattccttcacggatcaatgataataaaagtgagggtcctgttagccatccttctgatgtacaaactcaaccaaattcagctgttaatggtgttggtgtgaaaccacgagtaagggctcgtcgtggacaagcaactgatcctcatagtattgctgaacggcttcgcagagagaaaatttcagataggatgaaaaatctgcaggatcttgtcccaaattccaataaggcagacaaggcatccatgctggatgaaattattgattatgtgaagtttcttcagcttcaggtcaaggtcttgagcatgagtagggtaggagctccaggagcagttcttccccttctcacagaatctaagactgagggttaccacggccaacctctgccacaaggattactggacgcactagactcggaagacagcttcgtcttcgaggaagaggtcgtgaagctaatggagaccagcatcaccagcgcgatgcagtaccttcagagcaaggggctctgcctgatgccagtcgcccttgcttccgcaatatccacccagaaaggtgtgtccgctgctgcagtccctcctgaacggtgagataaagacacgctcctcccccatgagcacgaggaaacagccgcagatgacagaactcagacggctgaagaatgcagcaatgcaaagcccgtagagtgcagcataggaagttagtctgtgaccagagcgcatggcctcgtctactaatttcgctctcagaatcagctttttttttcgtacctattgcgcatcagttgattttgcctttttgccttctctcttttctttttggccgtatttcatcaggttgcatataaaaaaaagtaaaatctactggttctggcgttctgctatatgggatcttgtgatcaggcatctccaaagtgatcctcttgcccggctgtcagtttgttagctgtagccatctactacctcagtttgaaaaactgagtttatgagctgccccaagaaacctacttagctttgctttgttgtcatggccatgcaatgaatttggctgcctcaaactttgaacaaactagaagtgtaagcaattagaatgaacaacaaca

SEQ ID NO: 40012 - DNA, 979 bp, Zea Mays
cgtcatctcggcccacaacctcagctagtcagctccgccgcttttgctttctctctccaggctctcggcttcgtccacaagctacagccgcgcgctcctccttgacccggcctgaccccgctagttcgccgcctgccgtctgccgccccagcatggccgccgcgtcgtccgccacctccgtccacgacttcaccgtcaaggattcgagcggcaaggacgttgacctcagcgtctacagggggaaggttcttctcatcgttaacgtcgcatcccaatgtggcttaaccaactccaactacactcagcaggcccagctctatgagaagtacaagaaccaaggctttgaaatcctcgctttcccgtgcaaccagtttggtgggcaggagcctggtaccaacgaggagattgcccagtttgcctgcacacgcttcaaggctgactaccccatctttgacaaggttgatgtcaatggtaacaatgctgcgcccatctacaagtttctgaaatctagcaagggtggccttttcggcgacagcatcaagtggaacttttccaagttcttggttgacaaggaggggcgtgttgtggatcgctatgctccaaccacttcacctctgagcattgagggacctcgcgattagatgcgccgctagaccaacctccttgtcaccgtcctagtgcacagctcgccgccgcttactgatgattcttgagcgcctccctatcttccgccttctcctctaactctggtgagcgagagagtggatacgacagcgtcttgctaccacccatggggccccctcgttggtgtgtgctcccattcaagatgagcatgccacagccgagcggcctctcagtggtgccctagtggcctgttcgtgacattgctcctctttgtttcagctttttatagcttctggccatcaaaatttgttgcggactgtcaaatacttagcttttcagccagcttttatgaaat

SEQ ID NO: 40013 - DNA, 1470 bp, Zea Mays
tcgccgcacatctcctcgcgcctcacatcgcctcgccgcgcgtctcctcgtcgctggcctctctcctctagtcgtgggcctccctcctctcgccgttctcctggctgccatacccgggtcgccgatcgcctcccttctcgccgccatagaagatcgccggtcgactcccttctcgccgccatagaagattgtcggttccctccctcgtcgtcgccatagcaggtgaaagaatactcaagacttgttgggatagtcatagtgacggtgcctatggatggagataaatcattcgggaccatcgatgaggaaaacagaaggtttgaaatgccattggtaccaccgccgattccatctactgattcatatccaagagtagagccatcaattccatttaaccgttatcaaaggtgataactatgctgctgaggtgtgggataattgcaaccataggtttgtggttaaagcatatttgcatgagtgctcctgttgcgagtggcaacacactggcaagccttgccagcatgctttatcattgataacagcccgacaaattagaaatgtgaggatggaggactttgttcatgattactattctgtggagaagtttaggaaggcatatgctagacaaatagaacaactcccaagcaaggaaaagtggcccaaggtggagttggcgtttgaggttggtgcaccacttagtaaaaggggagtaggaaggcaacaaaaaaataggatcaaaagttgcctcgaaggtggaagtggtgggtctaaatgcactaaaagggttgctgaaaatgagaatgagaagacaaaaaatgattagaggaaaagtgcggtgtcccaattgtggagaattaggacacaggaaaactagttacaagtgcccactcaacggaacaaagaaaaggccaagaaggccaaggaaaaatagtaccaaaggatggtttcctaaagagtctacgcctgagagaccgaaaactacaagagaacaactaatgcaagagagtcctagaataatgacaagaagacgtcttggaattttgatgggagaggggacatcacaggaggcttcttcgcaagctttggagacttcgacaacaactccaagaaagatgactccaagaaagacgaagagaaagttatgaaattgtatttttaaagacacttagagaaatatgttagtgcggtaataaatatgttagtgcagtaataaagacgactccagttttcagtacgcttgccattctttttatcatgttcatatgttgttagtttcagaattattttcaagactgtaagccatggtttatgagacatgatcttacagtttgtttcggagtgaagttgtgagtaaaaagtggctgaataaacttctgtgttgaagccaatatcatctcccttgtcatttgttccaaaacccctgggtttgccgaagtagatgcctggcacaagaaattaccaattactctt

SEQ ID NO: 40014 - DNA, 619 bp, Zea Mays
ctcgaatatatgtgtcattttgacttcgcatcatacaaatttgtatcatgatatatgcatgctagaatataaaatttttgaagaatagtaaggcaaacgtcatgaacactaaatattctcaaagtttcagcatctgatcggcacgatttggtctgacatcgagtcagcacctaacccatcctcctctgagcaggcaaatggcaagatgacaagcacatctgtgtgtgtggtgtgtggtgtgtggttgtctctcctcatcttgcgtccctgtggttgctccccaactccaacagcacgccgcacatgccgccggatcacgacactggctcccacgcactctcaatatgttatacaaaaggtctttcagtcttgagctctgaatactgtccgacaaaccacgttcgcatccgcatcatatccaactattcattgttccgtaagcagaccaatacctactaatttattcggtggccattagagttctgtgaaggactaaaggctatagctcctcctcctctcgggcagtttcagcgtgcaacgctactagagcagcagaactccaccgctgaaggcatccgctcgctgtagtctgctttaaagcaagtgtggtgtgcatgcg

SEQ ID NO: 40015 - DNA, 775 bp, Zea Mays
aactctttactcgctcactcccccgcgccactgatctctccttccgggaccctaattccgcaggaggccgcgccgggggagtgacgccgatgcagcgccgggtgggcatggcggacggcgaggctaggtgtcggacgctcggcgccgtcatcaaggagaaggatgaggagttcgcgctcttcctcgagatgcgccgacgcgagaaggagcgcggcgctgcggccgccgcggcggaccagcttctgctctccggggacgtcgcggcggagaacgggatgctgctcctcgacccgccgccacccgctggtgggagcttcatttcggcctcttcttcgggtttcctgcagccgtgagccgttcctttgcattttactcatgtgcttatgaagccctagcttatcgtggtttgaatttttggttctttgtggtcgtagagcccaaaccggcggcgtacaaggtggctggcggcggatttaggagggcgcctgggggagtggacgacttcctcaatgcagacgccagcgacaagaacgattacgactgaattcagctggtgttgctgggaaggatgggtcatggacatggtggttgttggaggcttctgacaccaccaggaactccattattctcatctctaaaagttgagccaaaaaggtccctggtgagtcaagctggaacgccaaaggctcgtccaactgccttgaaatcaaggggagaaggtgatgatggtgacatcgagtctgtggaatttccaaagtgtgtggtggcaagtaat

SEQ ID NO: 40016 - DNA, 1975 bp, Zea Mays
tttcaattctccctttctgatggaagggctcgcccctaaaattgtgacgacatatcgagttttggacgtgcaggttcgctgggctgcaactggtgttctccttcacgtcgttgcgcgtgacgagggttggcgaggcgaggaagcgtgctcttgatcccgagtttaaagagggcgggcaacataattggaagcaagttttgtcaaatagcggtattgcaagtatctcggttgtgttgatagcattagtcatcagagggatagataggtgtttagattcaaaagagtcaactcttgttactgctcttattgatggtgttatctgacattatgcttgctataatggagatacatggtcatctgagctcgacattctttgtaaagctaagccacaaattatcacaacattcaagagtgcggaaggctaccattggtggtgtaaccatagatgggcttcttgtagcagcagctggattcttgattgggcttgcatttgtgctgataagatttttcaccactcaatgtgctcctgatgtattctggaaccagctgctagctatacccttggcacagctgccgccctatgtagaagtttgatcgattccttcttgagcgcaacagttcagtatagtgggttctacagtgttcgcaaaaaggtaaagccaacaaagttcaatatttaaaataactcgatgtgtccagggtttgcaagacaagattaagcagctctaagattaagatagttgccatcgatcttgccacaatttttacttgagctgagcagataacaagcggcttgggccagggtctcttggcctacgcgtagacagactccaggaagatgtcgatcttctgcttctccatcaccgtcgttatcatgcagcctgctggaatgccacagcgggacaggagcatggggatgagcaggcgcaagatgactgcaagtggcgccggatcccgacgttcggcgactggaacctgcgggacgacatgcccgtcacccaatacttgcaagcagggacttcttcatcgttgtgccgccggcagagaaggacgacgacgaggatctgttcaaggtgccccagtgttcctgccaagccctacaactacaagaaggtgaaatatgtggtcgaagtagtaagctatataaattcaagtaggaatgcaggatggggtgcattcaactcatgcaggtggcaggttaatggaagtggccaattctgtggcgtggctgagatgattggacctgtcgatttcgacagaagtgttgattactggcagcaggataagtggagtggccagttccctgtgaagtggcacataattaaggatgtaccgaacaatcttctgcggcacatcattcttgagaacaatgacaataaacctgtcacaaatagcagggacacacaggaggttcaattaggttggcatgatgctggtacctatgacaagaacattatcgagtggcccaagtgcagtggcgctaatggtagcttgagattcaaagtcgagttgaagcatggggccaatgctgatcttgtgaatgctatgaagctgatcccgccttcaacgacgtccgaaccccatccgcgatccatgtctgccgcgccatcctcgcccttccatctcagcgcccccattcgtgcttgaaggaaggcccattcgtgttggaacgaatcctcgctcaaaatccatgcgcatccgatgaggatccagagctgccctgctgcccttccatcctctttgtccctttccatcgtcggcgatccacttctatcggcggcgcccccttctagccccttccatagttgtgcttaggtacttctctctatttgtgaaatctagggttcttagtgtacgattgtcaatatctctataaaagaatagattagtgtacgattgtcgatatattgtttgttttcatgtaattgttgtgcactcgcgttttattaataatttgtgagtcgtcgcaacgcac

SEQ ID NO: 40017 - DNA, 3305 bp, Zea Mays
cacaagtgcggtgccataagtgacagccacctcagtctctgtctgtggagctctctctcgcgcgcgttgccatctcgcaggttcttcatctcgtcgctctgttcaggcgcaggcggcgacaggagatggacggggagcaggcggcgcggtgggcggcggcgcaggagggggttcccgtcggggcggaccttgtcgcggcggcgctgcggcagctgcgcttcctcgcggcggtggaccgccgccggtggctctacgacgagggcccgctgctcgaccgggccatacgcaggtacaaagcatgctggcttccgcttcttgacaagcacactaagggtgtggttgtagatggtccattggttgttcctcttgattgtgagtggatatggcactgccatcgccttaacccggttcagtacataagggactgcaagaaagtgtatggcagaatactgaacaataacaacgttgagtcgtccactcaaacaaagtcgacacttgagtcagaaaaagtttggaaagagctgtatcctgaggagcccttcgaattgttgttcacaagaacctttgacactgccgtggatgtcaaccctgcaggtgcagaggaggacattacctatgatctggtctcggctgttaagagacaatcctctttctattatcaggttggaacaccaacaatgcatgatccacggtttctccaagaagctctagctcgatacaaggcgtttctttacctgatcaagatgaatcaagaaaaaggattgcagcgcttccgtgtaccaacctatgatgtggatctgttgtggcacactcaccagctgcatcctattacctaccgcaacgacatggtgaagcttcttggaaaagttctggagcatgatgacaccgatgctgatcgatctgaagggaagaaactcgatgttggatttaccgagactactgaacagttcgagagtacctttggtgtaagatactggaaggctggatgtatgtaccgtggcaacgtgccatctcctgtgacatccactcctcagacattcagtgctgaggttggtactgggtcttacatctgcaaagcccagaaagatcttaatgcccttgatgtaacagttgtagagttatatttacaaattgtagacatcaagaatttaccatctgctgttcaaaaagaaaatgtgtatgtacggttcgccaagaatcaatcagatatgttcatcagtgacggcggcaggttggatatctcaacagttacagggaagaacaccggagtttgtttacagtgtgaacctaccggagaactcattcttgcagtaatggttgatcaattatcaaagaaaccagaaccgatagggaaggtttctttcccactgcacgatttgacagggcctgattctaagctctccttcgagaagtggtttgaactgaaagctcatggatggagccattctctctcaagtcatgtcttttgccacattccatcaaggatcagaacacgggcagctggactcgtttcgtaaatgattgtggtaccgagcttatccgtctccagataagagagcacaaggcgaagaatagcatggccgtcgttcgagaattggttggagtattgaagtcaacaaaaaagcaaattcaacttgcagaattcaaggaaaacaagtggaccctaaaagactccaacttgccaataagtcatggcactgatggcagtctactcgatctcaaaggtgacaaccatctgatcaagctttatcggggaaggaaactggaatacgagcgcaaatgttgcagcgctcactctgaggacgtatcagctgttactgctgtaaagttctgtgctgaacatccatatggcaaagccgttgccttgctagacactgaagctcagcttatcatggtgaacgaggattggctcctacttccatggatctccatatcagtcctgtttatggacggcgatggcggtacgaaacttggcggcggtgccatggttcagaaaggtacagtgtttggatccgacactagcatggtgctagagacacagaccgtcggagcagggagcgtggcatccaatctagcacaatgtggcacttgcagcgccgtgttcggtggtgatgataaagaaatggcgaactgcaaggttgagcatgcgagctctggcgcttctcgcacggttgttgcaagtggtgagaatgggcacactgagactgctggctgtggaggcggctgtggtagcaattgtggacccatgatggctgaagaccccaaggccggcaatgccaagtccggaggctgtggttcggggtgtggtggtggctgcggtggcgcgggaggttgtgggaccatggccaacgaaggccaatccaggtccggaggtgttggcaccttgttgagctccaacgccatgggtggtgagggccagcaggcccattcagctggctgtggctccggctgtggtggtggctgcggcagcggcatggtcatcgaaggctccaaggccaacaacgccatgtccggtggctgtggctctggttgcggtggtggatgcggcagcggcatgctcatcgaaggctccaaggccaacaacgccatgtccggcggctgtggctctggttgtggtggtggttgcggcagtggcatggtcaacgaaggctccaaggccgccaacaccatgtccggcggctgtggctccggttgcggtggtggttgcggtgccctgttcaacgctagcactgctgccggagagggcctgcacaataagtcggctgggtgcggcggcggcgggtgcggctccgggtgcggcggtggcggcggctgtggtagcggcatggctatcgaaggcttcaaggccaaccacgccaagtctggtggctgcggctctggctgcggtggtggtggctgtggcactggcagcatggtcgctgaaggctccaacggcgggaacgccaagtccggcggctgtggcggcggttgcggtggcggaggtggctgcggcggcggaggctgtggcgggggttgcggcgccgtgttcaacgcatgatctcggtggagtggaggcatttgtgcagacatgcagtcgtcgtcgtctactgctagataccacatgctacagcatactgtgtattgctgtgcataatctactaaataaaaggaatgaataaacaatggatggatcggctgcctccgtggcgtttctgcaaacgaaaaatctcggtgttgttgggtgcagggatgaggatgaaaacgatttcaaacggtccgaaacgatatcgtctatttaacggttggttaagaaattacctgattta

SEQ ID NO: 40018 - DNA, 2254 bp, Zea Mays
cagccaagtccctccgtccaacttgccaagttgttcgagtaggtttaagcccagtggcggatccagagggggggcaaagtaggccatggccccccctcaattttatacacccttttatacctaatgattatttagtattaagtgtaaaaaaaaatcaaagttttagatagtataaagtcttgttctagatctctaaaactaatagctagttgctaaaattacccaagaggtttagaatggatcaactaattgttagttatacccctcaaataagtattagttgttagatgccccaacccagctaaatcagttaacaattagctctaaaggtttagaacatggcctaaaacaaccatgttatgagcctgcttgccagattctctcgatcaagtccttgcatctaccagtctgactctaatcttcccgacagcacctaaaccagtctgctcgctgcctcgtttccgccgccgacccattcccgatgtgacgccacccgacttcgcccctttctgacgcctccgtcctttgtcctgtttgacgtccatccgctcgacaagctagatctcgctcgtcgcaacgatatgacttgtcccctgcagtcggcgaacttggcgaactagaaaatcatggctctcatgtgatctttttggcccccctgaattttcgtcctgcgtccgccactgtttaagcccccacagccccacccaataatccgccacgacaataaacaaccagcaccagcagtccagcggcaacaataatcaaatcaaagatcaggaggggggagaaacggcttttctctagcaggccctccggttgtttttattatattgggtgctgttgtttgttgcaggtggtgggtggtgcagggattctttatttctggaggcaggaaggaggaagaagaaagaagaaacatcagaaccgacccgactatcagagatagagagagagaggagctctctcctcttcttttgcttttggtattgttatcttgggatctgattttgtccccatactaggagggagtgagggaaggagggaggaggctgggcttgtttctcctctcttctctcatctcagttcctcctcgcaaggctggccgtcggctcggctctgttgacagcaatccctgcactgcagtcttgccatgctccccacgaggagcgcaccatcagagtgattctgcagaaggattcattctactggcgagccgagctggtgaaggagctataataagcctagcgctcacttcagtcatcagccaagtgattgaaaaaggcaagtcgtctgaattattggttccaagggctctgtagttgcttctccacactttcctatgcttttgcattaatcttgacaactgagtactcaaagctgggatatggctacttattattcgagccctgacagtgaaagagattcacaaacaatgtactcaacagagtcaggcaatgcatcatatcccgtgccatcagccctagggaactttctttatctgaacagtgcatcttctggaccttatacagaatttaatggaattgtccagtctcaacagaatttcatggaacttactggtcatccttcagcaatttcacatgattcatcatccaacgaagctactaacattggcacttcactgacagaacagcgctcttttggtcctttgaaagatatgagaaatgagatgttgatgcatttgatggatggagcacacagcagtggcagtgacctcatccacaatgatgaccatagcactgcacagctcgagtttggcatgttaaacaaccacaattcaacaagtcttccatcagcatcaggccaagggctgtctctgagcctcaatacacatatcttggcaccttcctatccatactggtctgcaaagcaggacttattaacaccaaattcttaccagggtgatgacaacagaatgaagaatatgcagtctgaggcttcacaggcaatccgaaactctaagtatctgaaggcagcacaggagttgcttgatgagattgtcagtgtttggaagagtgttaaacagaaaacagataaaggcccttctgaagcaggaaagtcagatggaaaagagactgatggggggactaaaagtgagggagtatcttttgatccacaagagtctggtgccaatacagcagctgagctttcaactgctgagaaacaagagctccagaataagatggtgaaacttatggcaatgttggatgagattgcatgtttttagctaaaggtc

SEQ ID NO: 40019 - DNA, 556 bp, Zea Mays
atggcttctgatggcactgctgaaatgcgaatgttctgtttcgacaacattgccaagagaatcattggaaaaccatgcgcttctctcttaacatcagctacaagcacttccaatattccaccagatttagcagcgattgtgtccctcaaattcacatttgctgttgtttacaatgaaatgtcatttcaagtttcagaaaaagaactcttcatcaagtcagtcatagcttcacatggaagagacctaaccttcccgtcacccaaactaaagattccagtgcaaccgtcaactccaacgcaactactaggtgcagcaaaacagccagtttcaccttcttcagcactgtccaaactatcgactgccatttctccagagaatagtcctcaaactgaagacaatcttcaaaatgaagaccagaacatactggcttttgaatcaccaccaaaaagggctaggcgtaaatccttgaagtttgactgtgacaaaaatctacacgatgaataaaaatgtatggaaacaagtctggcttcaaagttggaacttctacgcagcagca

SEQ ID NO: 40020 - DNA, 1920 bp, Zea Mays
gttatgtccttgtgccaaactgccaattttgagttaaattcttggatgtggttgggttttattttgtaacatagtcctcagacattggttcgagctttgagggttgttgaaatgcaagagatcttagatcaacaagttgcagaagaagcagctgaggctgagggtgctggtgctatggcgacaataacaaaccaacgtagaactgcaaaaaaaggtgcaggggcaacagttaccccaagaaagggcactcaagaaaaatcgaaggttcagggaaagggctacaaggacaaatgctatgagtctatcaggatggctgttgaggcccgcttcaacaagttgcttactgagcttgtttttgtggaggacttgatggaagctttggaggaagccaaagctattggagatgagcttggcgatatatatgattatgttgcaccatgctttcctcctagtgatagagcaaacgatattcaaaatataaatatcctgaaggtgactggttgggtcgtgcaatatcaagaaaacttgattggtcttggtgtggatgaatcacttgcccaagtttgttctgaaagtggtgcattggatcccctcatgaacatgtatgttgagcgtatgcaggcaacaaccaagaaatggtacagcaacattttggaggctgacaaaacacaaccaccaaagagtacagaggatggaaaactatatacacctgcagcagtggatctattcagaatattgaccgagcaagttcagatagttagagacaacagcacagacgtcatgctatatcgaattgcacttgcggttattcaggtcatgcttgattttcaagcagctgagaggcaaaggcttgaggagccagcttctgatgttggtctggaatctctatgtgcattgattaacaataatctgcgttgctatgaactttcatcagagctaagtagcagtacattggaggcgcttccacaaaactatgctgaacaggttaattttgaagacacctgcaaaggatttcttgaggttgccaaggaggccgtcctccaaactgttagtgttatttttgaagacccaggtgtgcaggatctactcgtgaagctttaccagaaagactggctggagggaatggtcacagaatatcttgtcgcaacatttgctgattactttggtgatgttaaaatgtatattgaagaaagatcatttcgaagatttgtggaggcttgcatagaggaaacaattgtggtctatgttgaccatctcctttctcagaaaaactacataaaagaagaaacgatagagaggatgaggttagatgaagaggtgcttatggatttcttcagggaacacatcaacgtgacaaaagttgaaagcagagtgcggattctggcagatatgagggagctagcttcagctgagagtttggatagctttactctcatttacactaatatactggaacatcaacctgattgcccgcctgaggttgtcgagaagcttgtggcaatgcgggaaggcattccaaaaaaggaagcgaaggaggttgtacaagaatgcaaagagatatacgagaactcgcttgtggatggcaaccctcagaagtccggttttgtgtttggcaaattgaagtgcttgacagcaaagaaaggcatatggaggaagcttgggcagtaagtgtggacttgagcagagtggacagaagtaccacctaggcaaagactgtacgtttcacttctctatgatcattcttttgttcttttgtcgatgctactgttgggtttcacgtttagactatcagtgtgtactcagcttgaggagcaaaaatgtatattccactttgcttagctacagaggattttggtgtaagaatatgtaatttattcaataaaatggttgctatttgcaataagttggcccaagtcatcg

SEQ ID NO: 40021 - DNA, 3257 bp, Zea Mays
gacgaactcttggttctcaagctttcccggccagtctcgcagcaaccctttccctaccccgatcgagcgtgcgtcaaggtcgggatccggcgccgccgcatcccgatccgatgctctccggcgtcgaccacgacgttcccgacggcatcgggatggcgcggctcgcgtggacgcgcctccccaccgccgacggggagggggcgggcccctccacttccgaggccgcggacgacgaactcttatcgggcgctgccatagagagcctcgactacgaggtcatcgagaactacgcgtaccgggaggagcaggcgcagcggagcaagttctgggtgccctactacgtcatgctcaagtggctgttcgctctgctgatcggcgttggtactggattagctgctatattcataaacctggctgttgagaacttctctggatggaaatatactgcgacatttgctataataaagcactcgtattttgtgggattctttgtgtacacagttttcaatttagccctggtcttctcttctgtatatatagtcacaaactttgctccagcagctgctggatctggtattccagagatcaaaggttacttaaatggagtggatacacatggaatcctccttttcaggacattagttgggaagatctttgggagcattggatcagttggaggtggattggctctagggaaagaagggcctcttgttcatactggggcctgcattgcttcgcttcttggacaaggtggatctgcaaagtaccacttgagttctaggtgggtacggatttttgaaagcgatcgtgataggcgagaccttcttatttttgtttttgaggtttcacaacttgaaattctctggccaagtcatgaagctattgttaaagtgacatgtggatgtgcagctggagttgctgctgccttcagagctcctgttggtggggtactatttgccttggaggaagttacttcctggtggagaagtcatcttatgtggagagtattcttcacatctgccgtggtggccgttgtggtgcgttcagccatgaattggtgcaacagtggaaaatgcggtcattttggagctggaggttttataatatgggacatatctggaggtcaagaagattactcataccaggaattgtttcctatggcaattattggtgttatcggtggacttcttggggcattatttaatcaactcaccctctatataactaaatggcggcgaacgtgtcttcataagaaagggaaacgagtccaaatctttgaagcctgtcttatatctttggtaacatccacgatttcctttgtgttgccactactgaggaaatgcagcccatgccctaagttagaaactaattctggcatagaatgccctcatccacctggcacagatgggaattttgttaacttctattgttcacaagatagagagtacaatgatttagcaaccattttcttcaatactcaggatgatgcaatacgtaatcttttcagtgcaaaaacatttcatgaatacagtgcacaaagcctgatcactttcctgttccggctggccagttcgttcccggaataatgattggatctacatatggaaggcttgttggaatgtttgttgtcaagttctataagaaactaaacattgaggagggcacgtatgcactccttggtgctgcatcgtttcttggaggttcaatgagaatgactgtatctttatgtgttatcatggttgagattacaaacaacttgaaactcttgccattgatcatgcttgttcttctggtttctaaggcggttggtgacttttttaatgaagggttatatgaagagcaagcccgattaaggggcatccctttactggattccaggcctaagcaagtcatgagaaatatgaatgcaagggatgcgtgcaagaatcaaaaggttctgaagtttttactccatttgtttttttaagtggaccgtggaaattaccatgtatcactttaccagttctgatgcatccaatcttttgccacctatttaaggttgtctgcctaccacgtgtttcaagggttgttgatatcatttctgttttgcgaactaacaagcataatggtttccctgtaagttatgttcgcagttgttaaacaaagttttcatggggttttgactaattgatttttcccccattcttttcttggttcaggttgttgaccgtgggcagaatggcgagtcacttgtcataggtctcatacttcgtagccacttattggtacttctacaagctaaagtagatttccagaacagtgctttcccctgtgggccaggcgtactgaacaggtttttgtttttctatttataagccaagaatagcacatccaatgcacgttttctggtaataacccaatatattttatattacttaggcacaattttagtgactttgttaaaccagcatcaagtaaaggaaagtcaattgatgatattcatttgacagaggatgaactggggttgtatttggatcttgccccatttttaaatccttcaccatacatagtgccagaggacatgtcgttggcgaaggtgtacaatctcttccgtcaacttggattgagacatatatttgttgttcctaggccttctcgtgttgtaggattgataaccagaaaagatttattacttgaggaggataacaacaatgtgatgccggagctccaatcgacgagtgtaaggggcttgctgaacggcaaaatgctcgggggtaatatacatctggaacgtcctcttcttgacaacctagttattgaatagacacgtagcagcatgtatgtcaaaataattttgatagctagcagttaaccttgcactgcatgttgggacatggcccatgggtattatacttcacatgaatgatgaagcagcagtgagcggataatgcagcatggttttggattctgccgactgttgcgcatggatgttggcgttgcgcatcattttttgctccgtcagcagtggctagggaggcgattccccggtgccgtgtgtttagattaggtgattgtaacttacaaaggcgtccatacatacacaccatccatgtatcccacggtaaatttcgaagactgtatgtataagtacatatttgttatacgatggtaaagacaaaagctatgtaggatttgcgtgctctcatgaaactatgatacgtggctataattacttccggttcccgctgaaatcgctagaattttccattgactacatt

SEQ ID NO: 40022 - DNA, 2185 bp, Zea Mays
gacaaaagggaaaagaataactgaaaaagtaaatcgctcaaaaaaaaaggaaaataaaaaaaaaatcgtagagagttcgattggcagttgctgagcccgagcgcgccctccggcgccgacaagccgggaccccacctccgccggcggcgatgggcaactcgcaggcttcgccggcgtccgcctccagctcccgcttcgtcatggcctcgagggccttcccgaagcaggagctggacggcctccgcgagctattcgcctccctcgcagcgcagtcgcggaccggcggccgcgccatctcacgccccgtcttcctcgaatactaccaggtccgggggcgattaggcgacaggctgttccagctggtggcgaaggagagtggcgggagcgatggggtcacgttcgaggatttgatcatctccaaagttagtgctcgactcaattcgatccactctgttgttcgtttagttgtcgcgagcaaggtcattgatgtgttggtgcctggtggaatttgtccaagcaacatatggaaggggaactcgtgatgaggtcgatgaattcatttatcaactatgtgatgtcacaggagatggcgccttaacaaggtctgatttggaatcagtcttggcgtctgttcatgaaactgtatttgcaataaagaaggaagctgtcgaagtttccaacaatagaccattcgaagaattcctcaactctgcagtgttttcaaaggatgttgaaggggtctcagggaagtctatgtcattatcagactttaggaactggtgcactctcttgccatcattgaggaaattccttggaaatttgttgatgcctcctgattcaggtagaccaggatttgaagtaccactgcttcattatcctgaaaacatctgtactgatacgctgcttctaaataaagagtatgcctggcatattggaggaggtttctcccaacatgaggtgcaagagtggaagcttttatatcatagttctcttcatggacaaagcttcaacactttcttgggcaaagtaacgaatggggatgctcagactgttctgattgttaaagatacagaaggatcaatttatggtggatatgcttcacagccttgggaaaggcacagtgatttttatggtgacatgaagacattccttttcaaatgctatcctcaagcatccattttccgccctactggagcaaacaagaatttgcaatggtgtgctgtaaacttcagctctgagaacataccaaatggtattggatttggagggcagccacatcatttcggactctttttatcagcaaattttgaccaagggcactcatttacgtgtagcacatttaccagccctcccctttccaagacaaataggttcaggccagaagttattgaatgttggggtatacaaatgagaggagcacaagatgaaaaactggagttagtcaaggggacagtcctcgagagattcaaggaggaccggaacatgctgaagatggttggtttggcaaatgcaagtgattaagtgatagaggatcacaatgatgtacatgatggagagtctgtacatcacatgttcataaaaataatcaaatctgagaccatgtttctatattctactgttcatattttgtcactcaaaatattcatctggtccacactttgtaacaattgaccagtcgtgaaggacagccgagccaatgttgcgtttgatctcaagaatgacgtcatccaagataagatggtctcatatgagttcatcccattaactttaatgggatgactttatcctttctgttgtactaatgtgcttgtaagatgagaaagtatctagatctttagtggttttggtgattaatgccaacacaagattattgtaactaacatgtgtgtttacaaagataaattaatgttaggtcacaatgatgaaaatgatttgggcagtcttttgtcttgatgcctctgattatgatttcctaaaattttcaaatgatgaaagataaagttaaagatggactaattctaagtatcgtttagagttgagaaacacttagaataatttagaactttgtttttatttaaccgcactataaatgaggtatgaattaacagtctgatctagataagtcaaataagtttagtatgatacacactaattatctttagctttaagtggcttaggagaggcc

SEQ ID NO: 40023 - DNA, 1594 bp, Zea Mays
atccggttcggttccgtcgtccactctcgttccccagttcgctggaccatctcaaaatcctatcctcctctccttccctccgtatctcatccggccgattcgaatctccggtcccatcctctacggcttcaccccgcgcccaatccagtctgtacgtgaatcttgacaggggagagaagaatcggataaggagacctgcaccttcctccgagcaaagcaggagaggaaacaagaatagaggaggagatggccatgcccaccttacgccttgctcctgacctgccgcccgtatcccgcctctgcttcgggacaatgacgatgggagagcagagcggggcggcgtgctcgctccgcctcctcgacgccgcctacgacgccggcgtcaacttcttcgactccgcagagatgtacccagtcccacagcgcagtgagacgcgcgggcgtagcgaggagctcctcggccgctggttgcgggcccgccgggccccacgggacagcgtcgtcgtcgcaaccaaagtcgcggggccttcagggcagatgacgtggattcgcggcgggccgacatctctcgattcacagaacatcgcagaggcaatcgatggctgtttgcgcaggctgggtgtggactacatcgacctctaccagatacactggccggatcggtatgttccaatgtttggggagacagagtatgatccgaactgccagtacacgtctgttccaatggaagagcaactggaggctctcggaagagcaatagatgctggcaaggtacattggccttagcaatgagacaccatatggtttgatgaaatttcttcagttgagtaaggattctcagttgcttccaaagctactgacactgcagaactcgtataatttgttgtgccgaaattttgattctggattggcagaatgctgccatcatgagagaattagcttgctggcttatagcccaatggcaatgggtatactttcaggaaagtatcacttatctgataattgtggtccgccagacgcaagaatgaatcttttcaaagggagatactctgaaggtgaatcccggtacaaactgcagagccccaaagtgaaagcagctgtgaaggaatacacacagatttctgcaaagtatggcatttctccagtgaccttagcgattgcatttgtcttgagacatccacttgtggcatcggctgttttcggtgcgactaaattgtggcagcttgatgaagttcttcaggcaactacagtccatctttgtgaggaaattgttgctgagatcaatgatgtacatgcaagataccctaacccttgcccataaaattttgcaaaaaaaaaactttatttagcatcacatggatccttatttatcatcgagagatatttttttccaatatagcactgggtatgttttttcccaatatagcaccgccattagatgtgacacttagggcctgtttgtttaccccatggattatataatctggattatttttggaggattatatagggcctgtttgtttaccccccaaattatataatctggattaaataatcctaagaggcaaacaaacagtccagcttatttgcctag

SEQ ID NO: 40024 - DNA, 639 bp, Zea Mays
gggcggtggaggcgccctcatgtcgcaggtactaactagtacgtgcgtgtaaagccactagtccgacgcccctacagctgcaaaaggcgtccgcaggagcaggacagcccccatccgaggacgaggacgacgacgacgagcagcgcagaacacgcatgggggggcgaacattcgcgaggctgccgaaatgggcaggtatggtcgacgacacttcgtcgttaaggaaaagccattccacggcgtgtttcgcggaattgcatgttaattgttattttcgttaaccatgtgtctaggatcttaacttggtatgctgaatcacccgtgtataggttggttcgggaggcgtgtctactcctttaaagtactggttttatgcgttgtatctcgtacatcatatgtgaaacgtgtaagtttgtttctctcttccaattctcctctaccaatgaaccgttactatagatggccagccgtgccgggctaatcgtgccggtccggagcacgacacgacacggctggtgtcgggcccgtgccggcacggcccaataggtagtgtcgtgcctgcaggggcgaatctaggggggtttatcggggtcaggcgaccccgataaattttataaatcctttagcaaaatactgtta

SEQ ID NO: 40025 - DNA, 251 bp, Zea Mays
ccgacatcctctgccctaatgccgtagtccatcgccgagaacacagagagaggagtggaggtctacggcgccgccgacgtcgtctgtggccatcactgtcgttcagtactcgcgtaaagatttcggggaagcttcgtgccgtgagggacctgggcggacctctctcgcatgggaatttggctggactcgccgggaatttctctccgtcgctcacggttcgccgccgaccacatcacgacgtggccagactc

SEQ ID NO: 40026 - DNA, 2251 bp, Zea Mays
aaatccttgaggtcaactaggcctagtacatcaggcgcggatgtcttctggcccggcaatgagaaggaagcgccgccgtccgcatcgtttgacggggacggaatcgcagaagcgcgtgcccgctacgcgatgccatctctgcatcacaaccgctcgtgtttgcgcaaatggctcagatgtgttctcaccgcattatcgagaaacttctattttcgtcacaaggctattccgttccgagagccaaaaactccactgctttcatcaactccggcgacttggagaagacgaagttccagaatccgatcggaagtttggtgctcgcgccttgacggattgatttcggtgcgccgatggggcaggcgttccgcaagctgttcgattccttcttcggcaccagcgagatgagggttgtgatgcttggtctggatgctgccggtaaaaccaccatattgtacaagctgcatatcggggaggttttgtcgactgttcccacgattggtttcaacgtcgagaaagttcaatacaagaatgtgatgtttactgtgtgggatgttggtggccaagaaaagttgaggcccttgtggaggcactacttcaacaatactgatggcttggtatgttttattgctaaaatgatattgatctgtactctactttgtaattgttctgcttgatgagttgggttacttatgtttgtcttggtgagtttatggggatactcctgaaagtattttgtaatgtgtcaagctcatccctggtaatcttcagggcagttaccgtttcccttcaatgaaatattattctacatccattgctgcttttcttccttgagataacattttaaattccagagttttgttgggtttatgattatgaccagttatacatggtaactctttatgcacgtttcgagttgtagatctacgtagttgattcgttggatcgggagagaattggaaaagccaaagctgaatttcaggcaataatcaaagatcctttgatgcttaacagtgtaatactggtacttgccaataagcaagatatgaaaggggcaatgacaccaatggaggtgtgtgagggtcttggcctctacgatttgaagaaccgcatctggcacatccaaggttcttgtgcgctcaaaggtgatggcctttatgagggcttggactggctggcaagcacactgaaggaattgcaagcttcaggtcgcctaccttctggagggacatcgttgttctaagtagcaagcctgcctgtaagatccttcggctgatagcagtaataatggatcaagagcgttttttttgtcatggatacaaactcatccctcgggatttcttgtcagtgatctaacctatgatattgatcttgtaaattctgttactagttcatacaaagctaaccggcggatgcatgttacatatgagaattgaggagtcaacttccacatgctattattgtaagcatttctgtaaactgaagttggcaaacacaaattatcccaacatattggttgccattagatctatcttatggccattcatcaggattgagtttgttgatgctgatggaatgtgaggtattccgaaggaagaaaataacatgaatcctcattgtttccacaatgtgctcccgtaggtgcatttgcttagaaccatgcttcaatgggaggagcaagttcgccgtggcacatctttgacagagaaaaatctcggtgcaagcacctgcacaaaaccaatcctgcgtgaggtggccataatattctggcctaatggcaggattataagaatgggcactgatagcacagctgctgacgctgctagaagaatgggcgttgaagtgaagctgctttgggctaatggccaactagtgctgccccaaacagagcttaaggttggggatatagttgaagtgagggtacagatgcaagcaccagtttcaagtaaaccttctcagggttattgatcatattggttcctcagttcttgccagatcttggcaatgcaacagactgaaggatcgtagacatagccacataggaacccaaacctcaattgtacagtccatttgtcgaaatgaatcgaagaaagaagaattattaggtgcagtaattgttgtctcaaacaggagttcgctgtgtacataagcaactgcaagtagaagctgtctgtccagctgtgcttttccttgtccatagttacagtggtaatgcaaatttcggtaagtaaatctgcagtaaagtttagttagg

SEQ ID NO: 40027 - DNA, 2279 bp, Zea Mays
tttagctcaactctgcagtctagctacacacaatagagcgcagccgcggcgtgatatggttctatgatggttctttgctgttggctagatatatatgctgctagctactaggtgcgtcatccccttgctatgcgcgggttaagtatatatacacagtatataaaaagtatataaagtcttgctgctggcttgagctccttggatacacctatctgcttctgctagctttctttacagagacgacaggatagctagagccgagggagagatcagggtcgacgatagatgggggtgcatggggctgttgccaaacgaccctgcagcaggcagcatctcctcctcctcgtcgtcgctattctcataggtagctacttcgccgccgccgccgccgccgctgcggacgagcagaaaagcaggaatagaggagctggtcgtcgcagccgcaggaggcgggccgcggcggcagtgacgtcgccgcctgcgcccctcatggtgcccatcaccatcctcgagtccgccgtcgacttgggagccgtgtgcatggacggaacaccgcctgcttaccacctgcacccgggctccggagcagggaacaacagctggatcgtcaacctggaggtgaacgggttttacttccgcgggcagcgcgtctgggacgccaccgtccggcacctcctctccatcgggatggccgctgcggaccaggtgttgctcgctggctgctccgccggcgggctggcggtcatactgcactgcgaccagttccaggccttcttccctcggtccaacaacgccgccgccgccggcggtaccaccaccactactaccgtcaagtgcctcgccgacgccggcctcttcctcgacgccatcgacgtctccggcgggcgcagccttcggtcctactactccgacatcgtggccatgcagggggtgggtcccaacctgccgccggcgtgcactgcccgtttggacaccgcctcgtgcttcttccctcagaacgtgatcgatggcgtaaacacccccatcttcctgctcaacgcagcgtacgacgcctggcagatacaggagagcctggcacccagcggagctgaccccagcggagcctggcgagcctgcaagtccaaccactctgcctgcgacgcgacccagatgaaattcctgcaaggtttcagggaccagatggtagcgtccgtgttgggcgggcgcttcgccggctccaggagcaacaacgggctcttcatcaactcctgcttcgcgcactgccagtccgagctgccggccacctggagctggagccacgcggcaggtgcctcccccgccatccaaagcagggggattgccaagtcagtgggcgactggtacttcggtcgagctcaagtcaaggcgatcgactgcccctacccctgcgacggaacatgccgcaacatcatatgatcacagacagacaggctcatgttgttgtaccctgtggctttgtgccgcacacgtcggccgtgtccgctgcagcttgcataactctcgtgggccactaaaagccgacggaattaattgattctcgtcggtggtcaacagaaattaattaaaccttgtccacaaagtcccatcggttctcaagaaccgacgagaattactaattttcgtcgatatattgcttattctcaggtgtgagaaatgttcccgtcattattcatcaagaatggcactcgacatgtgtgttttgccgaatgtccgataaattgcacttaataaatcgttgcaaagagtaagatacccagtaaatattttatcctgctaaatttagaattctgccggattttggtagtgtactcagtaaatattttctgctgcttaattcagagttctgcgtacctgcccgtgctaatcctgtaagaactgaagaatgaattatgcaaaaactctttgattgagcatgtcatatttctgtacaactagtgaaattgatgctatacattctatgaaaaataatatgccgaggcacaggatctgctgataacatcaatagcccaagaaaaaatcagctgattcctgtcatgaagtgcattcctcattcgtattaaccatctttgtacatttggagactggagccactgcaactgaaggcaccggcaacatttctcacaggaagatcatgatgcagcttgggcagcaccaagtttgttagctcctttgtccagtttcttttttgacaccttttgggatgcttcctcctcttgattcttcactactggtttgaactgttgaaaatgaaagtataattt

SEQ ID NO: 40028 - DNA, 263 bp, Zea Mays
tggcaccacaactctcctgcgttccgttgagatccgctattttcgcgtgagagaaatcgtgggcgacggcgtgcgtcccttagtgcgtcgtctgcgttgtcgatcgccaccgagctgcaccaccggcagccgacggcaacaacatgcactatgaggcccgaatccagaccatcgtcacctaccacggctccgtccttggggagagggtgaccaaaactcaagcccgaaccatgtcgttgaccaggaaccagtacctgcaggta

SEQ ID NO: 40029 - DNA, 1589 bp, Zea Mays
cccaacccatcaaccacttcgccttagcgtgaagtcgtgaactctgttcatagtccagggccgccgcctcagcgtggtcttgtacaatggcggaggattctggcgccatcctccgccacatctcctccgtcaaggatatggtcgacaagcttctgaatcagatttacttaaagtggcagagggaaatttggagttccagaaagttgctcacgatgtgattcggaaaagagtttctgataagatggaaaaattcatcaatgaatctatggggtttcaagccaatatgctcaaaagttcaaatgaggatttagttctcttactgaatgaaaaaagttcactggaggatgaaagtgcgaaattgaaagtgaagataaacagtatacatagttcatccaaggaatacattgcagagattcttgaggaagtgaatacagaaaattcagttctggagtctgagctacggtacatgatttcggaatataaggatgtccaaaaggatataaacaacctgaagattctgtttagttcaagcaattcataggacaggttcctcgcgtcactgcaggtatatttaatctggcttggcaactgtccttagagcagagcccgaatttattgtttgattgtgatttttctcattgaggtaacctacttgtaatgacgaaaatacatacaggattgccactgacatcaagacgacaggaataaataccaaattcttcagtaacttgataggaatggcttgtacaggcttaatttatggggactttgcttgatatgttcgaatctcccttaaatatcttctttaggatgtcgcttcctcactaccttagtttaggtcacttttataaacgtaaacactagcaaactcattagttcacagattatattaatcagcaaatattaaaatcatttagtcaaatggactgagttctattttcttgcaaaatactatatccattctcgaatatttgtctctgactagtttttttttcatttagtcaaatggactgagttctattttcttgcaaaatactatatccgttctcgaatatttgtctctgactagttcttttttgaactaaaacaaagtcttgtagtcctacatgtgcacgcataaaataatataatcataaggctggtttggtggactcgaaaataaaggttatccatggagtaagaatctcctcgctgacctaagtgtgcgaggacaacatgcattgcggtaacacagacacgacacatggtaatagtcctgcagcaagtgaagcttggcctcagataatcgagccaacgaacgagggacataataggaatctggatgcttttctaggaatccggatgctgagaaaatctgactgtgtagagaatttaagtatcatgaagaatacatgcggaagaagataaaatagtctatagggtttatattgtagaaagtaacagtttcctattattggaatgactcggccgattttgttttcaagtttattttggacggttttgactaaagtggttcttatataagcggattaaaaagctgggcgtttggcagtctgcagcagtttctggtggccatagctgaaaacaat

SEQ ID NO: 40030 - DNA, 1403 bp, Zea Mays
acaggaacgtgagcggtgagcaaccctaccccaggcccagcttgcgcgctctctctctctctggacgacgacgcctacgccagggccccaggtcgctgccgccctacgccaggtccccttcgccggcgacgagcaccagatgactccaaaatggagtgcatgctcttcaaatagctacagagaactaccttcacatgaaaatggagagtgcaaatcaaccttaacagagtcagtcccttcacctacaagctgttttggcttgcacactgcaaacacaatgtgctccttatcttcacaaaagaaggatggtaatgtttataaaagaaggaagatggataaggattcaaattctcctataacatttgaagatgctaaagaaatggcaacccaaagttgcacaatttctgatgaccactcatcattactgctacccattatctcctcagaggcattgcttttaaattcaacagcaggcatggcaggtcctatcctagattgtgaggagcctgctgatgttccattggagccaaattctggtacagatgatagatgcttcatttcaaacatgtctccaacttccatgactccagacaaaaagaatgctgctgaatgttcctcatcgaatattggccctacagaatcaattaccgagcatatttcaccaagggatctttgcattgccatactgatgaaagatggactaataaatgaatcaagaacaagaatggcacataaagaggaattcactgacaatgatgctaaccctttgttggcatgcaataattgtggctgcttggaacattcattgaagatgctgatatgcgattcttgtgaagcaggatttcatttgtcttgctgcattccttgtattaaggagctacctactgatgaatggtattgtgctccatgcttgtgtaagaaacccaagagtctttatggcaaactctcagagggcaggataaatccttccaggaatactaacacaaggcctcatgggatgagtcacatagagtacatgctgaaggatgctgaaccatatgtaactggggttcgacttggtagagattttcaggcagaggtgccagaatggtctggtccatcatccagcagcgatgtttactttgacgagccctgtgcaattgattctgcagaactaactacatttaatttgtgcaaaatgagtaatcaaagtcattcttccattggtaattggatccaatgccgtgagaccttgaatccaggagattctgacaagcaagttgtctgtggaaaatggagaagggcacccttatatgttgtacagtcagataattgggattgtttttgttgtcttctttgggatccagtccatgctgattgtgctgttccacagcttggaggaggatttggaaaacttgggcccc

SEQ ID NO: 40031 - DNA, 1199 bp, Zea Mays
ccgctccctccgcctccgccgaccgccgcgccacctccgatctcccatttcctcacaacctcacccggctccatccacgcggctccaacgccagccacagcacgagccatggactcgcgcgtcgtggacggcgcaggtgggggtgccgacgcctccttgccggccgatccgccgagccccgtgcccgatccggccgcgggcgggatggatgcgcgcctcccatcggacctgcttcgtgcagtgctgcaaaggctgccgccgatcgacctcgcgcggtccgcctgcgtctgccgagcgtggcgcgcggttgcctccgaccgcgccgtggtcgaggccgccttctgtgcgccctggggagtgcggcgcgtcgtcggagagccggcgacgggggccttctggcgggccgcctcccttgggagatttgcgctgtcgcatgcgatccgccgcggggataccgtccccggtgtcgctctcaagtactccgtgcaggtgaccgatatcaaacgattcaacaacatgatgagtgaccatggcatctattcgagggagaggcttctggttccgatcagcaacccagaaatccttcttggcagcacctgctacatcgagatggaccataacgctaagagagaggttgcaatcttttaccccgagggacgcccaggtggcaaaactgactctgtggcaagcattgtctctgcggagaggagaaacaaaaggattctcgagtcggtgaggcggagcctgcacgtcgatgatggcactgctgcgtactacttatctgttactgagggtgatccgagggctgccatgacggagtactccgaggacctgaggtgggagcagcaacgcgcaggtcggtagattcatatatattccaatggcatatgttaagatcatggtgcttgatccttatcatttggtgtatatattgtacaatctggatggttgtaagtataaatacaaactttggtctaatgaatatagatgcatgtacatgataacaattgccaaatggcatcggtgctgagaacaaaaatcgcgccgggtgataattggctggtgaaaagtattacatgacattcgtgaacctgcttgtttgtaagtaacattgtttgttgttgctaaattccttgcggaatactcgattatgctgccgatttttagtttctgtatttaataatttaaagataaaaata

SEQ ID NO: 40032 - DNA, 2632 bp, Zea Mays
gcatcaaggcgctctacatcaacaccaaggatcagcttgcagacctgctcaccaagccccttgggaagatcaagtttgttgagctttgctccaggtccgggatggcccaactttctcacaagacgacgcccaagacttagggggagaatgatggaataagtcttgagtttctagaggacagcggtcgctttttgactgtcctctgtagtcctttagcatctagaggacagcttgactgtcctctgtagtctctttagcatctagaggacaacagtcgctttttgaccgtcctctgtagtctctttagcatctagaggacaacagtcgctttttgactgtcctctgtagtcgctttagcatctagaggacagcggtcgcttttgactgtcctctgtagtctctttagcatctagaggacaatcctgttgtgtaatgtgtgtgagaaggtgcggtagtgcagcctctagggctataaatatgggtctccaacccttagatgggtatggcattgtgtagagtttgaggaaataaacagaaaattgccccaactcatagtgtcatccttttgatgagagttagagtccctctacttacacggacagggaccccgtgctcacctcgacgttttggcaagagttgatgaggctattcggggccaaactacagatgacgtccgccttccacccccaatcggacggccaaacggaggcggccaacaaagtcatcgtcatgtacctccggtgcttcacaggggaccggcccaagcagtggctgcgttggctgccatgggcggagtacgtctacaacacgacgtaccagtcgtcgctccaggacacccccttcaaggtgtatggccgggatcctccatccatccggtactacgaatcgggggagacgcgggtggctgctgtggccaagaccatggctgctcgggaagagctcctcgcggatgtccgctatcggatggagcaagctcaagccgtacagaagaagttctacgactggctgcaccgcccggtctcctatgccgtgggcgacttggtgctttcctaccgcagctgtctaggggcaagctcaagccgcgtttcgtcgagctgtaccgcatcaccgagtgcatcaacgaggctgctgtccgcctcgccctgcctctgcgtgccaagctgcacgatgtcttccatgtggggtttcttaagaagttcatcggcgatccaccggaggtgccttccccactgccatccatgcttcacggggctgtgactccagaaccggagcacgttgtacgcttccgctcggcacgtggtgtccgccaggtgctcatccactggaagggtcagtctgctgcgtctgcaacttgggaggatgtggctgatttccgcgacaagtttccccaatttcagctcgaggacgagctggacgtcgaggggggagagatgtcatgtacgggcaaacgtataggcgccatcgtgacatcaggcgcgcgcagagcgggctgctcgcacgacacaggaaggtgccaccgttagtggccagatttagaaataaaagattagtttcctttccatgccttaaatctaggagtgattagttgagattagttttctttccatgccttaaatctaggagtaattagttggggcattggcctatatattgtaaccaaacttggaggaaaggaatcaagcaatcagttatcctaaacctgctctctctctctctctctctctctctctctctactagtctactctcaagccgccggtggggatttccctcagggtgaaggcctggagtgcgactacggactgcgtagtcgcggtccggcgttgttaggtgctgaggcgcttgacagttatcaccaatgacaaatttggcaataaatgacattgttctcttgtaccttttcccttttccttctactccaaaatgaacaatctgcagtcttgttgttcactggggtactatgcttgattagatagtgtgttgtcttgttttgtttcttttacttccaagtgaccgtgttggtaatttataatactgtggatagttgggtgggggcataatcaagggtttatatcttttttccaagtatgcaatagcaaacatgaagtagtttcatttgatttaaatcttacaattatgctactttctcaaagttacttttaatgattcatcagtagagcactgagaaacacttcagcttgtggttttcctgctatgaaatatagcaattagtaaatgattagaatacctatggatgcaggattgttgtggcaaatccagattaagtgggcactatggtgggtttgatattttctatcaggatatcagtgcatattggtttttcttggatatggtatgatgagctgcatggatacatcaggtcacccgctcctgtatcccataatggatacatgtgggatatggtatggagaccaaggttttaaagtcggcgagtcgaccctagtcacctaagcaccaataaggcgactaatcgcgattagtcatcgatttgctcgataaatcgagcctagtcgactcctagtcgtccacctatatcaagatcatatgtataaatatatatcaatatatatagctgtagcagtactgcaatacaacagtacactatagttgta

SEQ ID NO: 40033 - DNA, 2328 bp, Zea Mays
gtcatatccaccacccggctactatatatatctccgcactccacggcagcggtgactctgaattcttctcgccaggctaccttcccgtcgtcgcaacggtatccaacagccatgcttctctgatccggagagaaccggtccaggccagcgaggacacgactaagagaagggcctccaagagcaagagtttcaaagacgccgagaacttcgaagtcctcgtccttgagaagagctgcggttgcaagttcaagtctttgaggatcttgctcatagccatcatctccgcgacagtccttacccttgtaaccccgaccttatacgagcgccagttgcagtcagcctcccggtacgtggatgtcgggtggatgtgggacagagcgagttccgatccgcggtacgcatcttctgccgatgttgggtgggaggatgtgtacaaagcactgggaaacctaagaagcggtaaccgccagagtcatctcagagttgggctcttgaatttcaacagcaccgagtatggctcctggacgcagttgctcccagctgacagccacgttatctccactgtaaggctcgagcacgccaaggacagcgtcacctggcagacgctgtaccctgagtggatcgacgaggaggaagagacggagataccctcttgcccgtcgctgccggagccaaacgtgccaagaggtgcgcgctttgacgtcgtcgccgtgaagctcccatgcacccgtgtggcgggctggtcgagagacgtcgcgcggctccatctgcagctctcggcagccaaactggctgtggcgtcctcgaagcgcaaccacgacgtccatgttctcttcgtcactgactgcttcccgatcccgaacctcttcccttgcaagaaccttgtcacacgtgaaggcagcgcctggttgtacagtcctgactccaaggcgttgagggaaaagctcaggcttccagtcgggtcctgtgagcttgccgttccactcaaagccaaatcgaggcttttctcggtagatcgacgaagagaagcgtacgcgacgatactgcattcagcgagcgaatacgtctgcggcgcaatctcggcagcgcaaagcatccgccaggcaggatccaccagggacctggtcatccttgtggacgagaccataagcgaccaccaccggagaggcttggaggcggcggggtggaaggtcagagtgatccagaggatcaggaaccccaaggcggagcgcgacgcgtacaacgagtggaactacagcaagttcaggctgtggcagctcaccgactacgacaaggtcatcttcatagacgccgacctcctcatcctgaggaacgtcgacttcctgttcgccatgccggagatcgccgcgacgggcaacaacgccacgctcttcaactccggcgtcatggtcgtcgagccctccaactgcacgttccgcctgctcatggaccacatcgacgagatcacctcgtacaacggcggggaccaggggtacctcaacgagatattcacgtggtggcaccgcgtccccaggcacatgaacttcctcaagcacttctgggagggcgacagcgaggccatgaaggcgaagaagacccagctgttcggtgcggacccgccggtcctctacgtcctccactaccttggcctcaagccgtggctgtgcttcagagactacgactgcaactggaacaacgccgggatgcgcgagttcgccagcgacgtcgcgcatgcccggtggtggaaggtgcacgacaggatgccccggaagctccagtcctactgcctgctgaggtcgcggcagaaggccaggctggagtgggaccggaggcaggccgagaaggccaactctcaagatggccactggcgcctcaacgtcacggacaccaggctcaagacgtgctttgagaagttctgcttctgggagagcatgctctggcattggggcgagaacagtaacaggaccaagagcgtccccatggcagccacgacggcaaggtcgtgatctgtagatatacgaacaccccatccccatatggcaaccatacatgcatagcaatagcttgtataggtagctatgctttagttcttcgctatatatacagaatacaccactcgatccctgttgttgtcaaggctgcagctctatgtcgctgccggcctgccaccatggctaacgattcttttgggttggctgctgtaataagtttcaggtacatgtaaatttccctgctgaaattacgtgaccgcgtgtgagaaatgaatttgtacagggcgccaaataataattggttggtgcatacaacatatgaccagtcttttgcagt

SEQ ID NO: 40034 - DNA, 2968 bp, Zea Mays
ccccctccagtccaggcctccatgcagaaaggcaccgagaagaagagtccccggtcgctgctatagctacaagcctacgacacacgagagtgtcctccatggcgacggcggcgaggaaagggagcagcagcaggagtgccgcggcggcggccgcgactgtggccgtgttgttcctcacagtagtatcggccgccggcggtgctgcggctactccgcggcggctcctggtggacacggacatggacaccgacgacttgctcgggcttctctacctcctcaagcagaaccggtccgagatcgacgtcaaggccattaccatcagcgccaacgcgtggagcgacgccgggcacgccgtcaaccatctctacgacatgctctacatgatgggccgcgacgacatccccgtcggcgtgggcggcgacggcgggatatcctacgccggcgacgtgcaacgcgacgtcggtggctacctaccactgatcgaccagggcatgtcgacggacggcggctgccggtaccggcaggccatcccgctctcgggccggctggacgtcgacacgaactccggggtccggaagggcttcctcccgcggggctcccgggcgtaccggccgctccggcagcccacggcgcagcgggtgatggcggacgcgctgtccgccggcccgacctcggtgctcctcctgggcacgcacaccaacctcgcgctcctcctgatgtcgcgcccgcgcctgaggcggaacgtggagcgcgtctacgtctccggcggcgccgtgagggcggcgggcaacctgttcacggccgccgccgccaacccggtcgccgagttcaacgtcttcggcgaccccttcgccgcctacctggtgctccactccggcgtcccgatcactatgatccctctcgacgccaccaacaccatccccgtgacggaggcgttctactccgagttccagcggcgccagaggacgtacgaggcacagtactgtctcctgtcgctggacgggggcttctacttgtgggatcccttcgccgtcggggtggccatctccagcatgcgccatggcgatggcgaaaccagcaacgagtttgccgagcttgagtacatgaacgtcaccgtggtaacgtccaacaaaccttacggtgcgcgtgacgacggctctaacccctttttcgatggacgaactactcccaagtttgggctgcgagagggtggagttcacagcggccatgttgagaccgggataagagaccccttctgcctggtgcccggaagcaaccgaggcagatgccaagatgggtacactaaagaagtggccggtccagaagcagtgcagatgcttgtggcaacgagggcgaggccgaacaccaacaaaagtagcccactggacaagaaatttatggagaccttcctagaggttctaaatctcccccaaaacactggacgtttcaacataagcacacagtttccgtactatagagaggttctctacaagccggattccatcatgaacgtgacccgcaggggcgggaagccaaagccagtcgtttttgacatggacatgagccctggggacttcgtgtcgctcatatgcctcctgaaagaacccagacacgagatcgatctgaaggctgttttggtcaacgggaacggctgggctaacagcgctagcattgacatcgtgtacgacgtcctgcatatgatgggccgtgacgacatcccagtcggccttggcaatgccactgcgctgggcagcccgacgcttgggtgcaacaattcctacgcgatcccgcaagggagtggtgggtttgtagattcagacacgctgtatggactggctcggtcgttgccgaggagtcctcgaaggttcatctctgatgatctagaccatcccgagcgccggcacccgagcgctttcgatgtttggcggtcagttaggaagcagctcggtccaggccagaagatcacggctcttaccagcggacctctcaccaatctagccagcattatttcactgtctgacatggacgccggctctgtcatagagagagtttatgttgtcggtggagtggttagagatggaggtgatgacaggggaaacgtgttcaccgttccctccaacagatacgcggagttcaacatgttcctggatccgctggccgcaaagacggtgctagaatctggtctaaatatcacgctcattcctctcaacgtgcagcggaaggtttcttcatttgagggcgtcctcggagctctgaagcaacacacccagcatactcccgagtcaaagcttgtgcgccgtttgctgttgctgctccagcagctccagagggaacaacggaaattctatcaccacatggacatatttcttggagaagttcttggcgcagtttacatggtccaaggatctaacttggagccctctgtggaagtgaagtcaatatgcattgttgccaacacaaccgaaagcataaatgggcttattttggtcaagaagagcgcaaagccagtggatgtattgtatagtttgaatactggagcatattacgaccacctggcaaattctttggttaaccataagcaatctgctcctattggcagctttggagagcaaaaggcaatttggagcaggccacaaaaacatttagggacggacatagcaaaggatagaaaataagcaatctatttgtacaatattgctggaaaaggattagagattagattccaaaagaaaaacagtttacatcatacttcactatcttatagcgtagtacaaaattaaaggagatactcaacacagttacagttgtatgaaagggcttcagtaagcaataaaatttatcttgaatggatttcacatactctgctggacgtgaaacttttgttctacacttgtttcacatttctagtctattatttatgttcaagaaatatcagacaacatttgtattagaatataagttgtagctt

SEQ ID NO: 40035 - DNA, 833 bp, Zea Mays
attttaggcttcatctatataattagattatatttaatatcattaatcatcattcaaacatttgatacgataaagattaaaattttagttgttagatccaaagccattcaaaataaaataactggccggctgctgcgttccaattcaaatacacaatcaacaggcacctgtatattaattttggtctctcaacgatgtcctcggaattgagccgctggcgacatacataagcaacagcctagtcgccatcttttttgtaccgtacgtgccttgcgcccttgcccatccaagtccaacctccctaaactactcctgcgtgctgcctgagcgagtgagcggcgatggaatccttgggtgtgctgctcctgcacccgctcgacacatacctggagcaagaactggatcgccgctgccgcctcctgcgcctctgggaggtgccgcatgaccgccgtggagaattcctccgtgcccacgcatcatcgatccgcgccgtggtcattggcggcggctcgggcttcggcggcaacccggctctcatcgacgacctcccgcggctcgagatcatcgcgtgctacgccgtcggctacgactgcgtggaccttaccagatgccgcgagcgcggggtccgggtcaccaacacccccgacgtgctcaccgacgacgtcgcggaccttgccgtgggactcgccatcgccgctctccgcaggatcccgcacgccgacagctacgtccgcgccgggctgtggaaggccaatgatggccactacggtctcaccactcggctgagatttctcccctacagagccatatgatcctgaaactgatccgtctgt

SEQ ID NO: 40036 - DNA, 1104 bp, Zea Mays
aagcttcagccggtgctggcaatgatggaaggctgagtatagaacacaccagatctatggccccaagctctttgaccccctgctctgcgctttctattcatgtaataaataagaacggcaatgaggatgctttgcctgtctgccttgaagcgaggcctgtagaacgtggtgctggagatatgattggtgttggtgcgctttcaacaaaagaaactgagataaagtgtataaaaggtacaaaaactctttggtcagatcgtatctctggaaaggttactgtcttggctggcaatgcaaatttctgggctgttggttgcgaagatggtttcctgcaggtttacacaagatgtggagtgcgagcaatgccagcaatgatgatgggatctgcagctgtttttattgattgtgacgactcctggaaattgcttcttgtcacaaggagaggtctaatgtacatatggaacctttatgacagggcctgcattttgcatgactccttagcttctttggttgcatctccagatgagtcatctgcaaaagatgctggtacagtaaaggttatatctgccacattctcaagatgtggatcacccttagttgtccttgccagccgtcatgcttttctttatgacatgagcctgaagtgctggttaaggattgctgatgattgttttccagcatcaaattttgctagctcgtttagtttcccacaaggtggggagctaggcaagttgcagattgacataggcaagttcatggcgagaaagcctatttggagcagggttacagatgatgggttgcagacacgtgcccatctggagaaccaacttgcctcttctttggctttgaagtctgcacaggagtaccgtcaatgcctcctatcttatgtacgatttttagcaagagaagcagatgaatctcgtttacgtgaagtttgtgagagcttcctaggtcctccgatgggcatggttggttcggcatcacctactgatcccaaaaatctagcgtgggaccctgatgttcttgcgagtttgcctgccggtgccagatctaggcatcaactccaggctgtatgatttggttgcctggtggcgaggatcgctg

SEQ ID NO: 40037 - DNA, 1655 bp, Zea Mays
cagcgcttcccacacagcagcacagatcgctccttccagtgtcccagccagtcctccggaatgcagtccttgcttgcaggaatccccgcgggcggtgccgcggcggcggcagccgtcggtgggctggtcgcggccgccgcgcttgccgagagggccgaccagaagaaccgcctcaacttgcccccagctgttcctggtttacctatcattgggaaccttcatcagctgaaagaaaaaaagcctcatcagacatttgcaagatggtctgaagaatatgggccaatatacagtataagaactggtgcttcttctgtggtggttgtcaattctgcagaagttgccaaagaggctatggttgcaaaatattcatccataaatactcggaagctacctaaggcactttcagtgctcacacgagacaaaaagatcgttgctatgagcgaccagggtgagctttacaaaatggtgaagcgctatattatggtgagcatgttgggtgctgctgcccagaaacagtttcgtgacacaaggaacacgatgattgacaacatgttgagcacttttcacgcattggtggccgatgacccaaaggctcctctcaacttccgggatgtattccagaatgagctattcggcctatccatgactcaggctttaagcgaggacgtaagttccgtctatgtagaagagtttgggaaggctttatcgagggaggaaatctaccagactgctgtggctgacatgatgatgtgtgcaatcgaggtcgactggagggatttcttcccatacctgggctggatcccaaacaggagctttgaaacaagagtattgactacggaagccaggagaactgcacttatgcaagccctgatcaatcagcaaaaggaaaggatcgcacgtggagagagtaggatgtcgtacgtggacttcctgctggctgagaatacactgacggatgaacaattgctaatgctggtgtgggaagcagtcatagaagctgctgatactaccttggtcaccaccgagtgggccatgtatgagattgcgaagcacccagaaaaacaggaatacctttatcaagaaatccgaaaagtctgcggcaacaagacagtcaccgaggatcacctgccagagttaccgtacttgaacgcggtgttccatgagaccctaaggcggcactctccagttccgctggtgcctccaagacttgtccatgagagtaccaacttggctggctacgaagttccagccgggacacagagcgactgggacgcgcccgaggaatggaggccagagaggtttctggacgggagcttcgaagtcgcagatatgtacaagaccatggcattcggcggaggaaggagggcctgtgcgggaagcatccaggcagtgaacatcgcgtgcacagccatcgcgaggttcgtgcaagagtttgcgtggacgctcaaggaaggcgacgaggacaaggacgacaccatccagcttacaaccaacaggctttacccgttgcatgtgtacctcacacctagaggaaggaaatgagcatcacatttatttggtctctggtctgtgagcatatgatcgaataacaatttattttaaatgaaagcagatccggtcgtctcggcgtacatgtcgcgtttaatattaacaca

SEQ ID NO: 40038 - DNA, 1714 bp, Zea Mays
cgggatcctgctctttcctgcatggtcccttttggagatactgtttgggttgggaggaagtaaaagcggacaagcttggaggttccgaggagggaggaacatatccctttgtagctgcatgaggaggcactgagacaatgagagatgacaactcaagcaagaacaagctgtcctggtccaagacccttgttaggaagtggttcaacatcaaaacaaaggcgaaggatttccattcggattatgcagccgaggaagccggagtgcagtggaggaccagcttctcggatagagacgcatgtaaatccaagaaaagcaggacagagaggttgactaagaggaacgtggagcgagatggtagagtagaaaacggatttgatggtgcttatattacaaacacgcaggactacagggtcttcgttgctacatggaatgtcggcggaaggtcaccatctagtcatttgaacctggaagactggcttcatacttctcctgctgctgatatatatgtgatagggtttcaggaaattgttcccttgaacgctggtaatgttctgttgaccgaagacaacggtccagcgaagaagtgggtttctctcgttagaaaaactctaaacaaccttgaccaacaaggctccggtgtctataattaccacactccctcgccggctccagacccaatcgtggagctcaatgttgacttcgagcgatcatcaaggaggcaacggaactcgtcgtttttccatcgccgttcgttccagtccttgaaccgcagctcaaggatcgacatgatggatccgcactcgttagtggaccgtcgattcagtgtctgcgaccggatcagcttcgggagcaggccaagtgacgttgacaccagcgtgaggtgtggtgggtcgtctgatgatgagactattgacgaggaatcgcctagcggtatgttcttcccaccgatgccgtgtgcgtatggtgctccactatgcgatggttctaggtattgcttagtcgccagcaagcaaatggttgggatttttctcatggtgtgggtacgaagtgacataagggagcatgtgaagaacctgaaggtttcatgtgtgggtagaggcctgatgggctaccttggaaacaagggatccatatcaatgagcatgtctctgcatcagacaagcttctgcttcgtttgcacccacttgacatcaggccaaaaggacggagaccagcttaggcgaaacgcagacgtagtggagatcctgaggaagaccaggttcccgcacgttcacggagcaggtgaagagaagtcaccggagacgatcctggatcacgagctttggttgagatgcacaactggaagcagttgctggaaaaggaccagcttcgcatagagcaaaggtttggccgggtcttcgcgggctggagagaagggaggatctacttcccgcccacctacaagtactcgtacaactccgacaggtgtgatcggatcctatggtacgggcgaggcctgtcccagctgtgctacgtgcgtggcgagtctcggttctcggaccacaggcccgtgtacagcgtattcacggcggaggttcggattccgagccagcagcaggcagcggctcagttcggcggcggcggcggcggcattactcgttccgcgtccctcctggggctggcgctggacgagctgccttatccacgcagttacatggacatcaatttttactga

SEQ ID NO: 40039 - DNA, 3181 bp, Zea Mays
cggtcgtcggcccacctagttccttatccgtcgtctcctacgcctccatccacactccacagccacgccacagtcgttgcccaccacccagagcacgcggcggcttgtcgccgtgcgcgccgccaccatcaccacacgaggcgccggagaaagacatcaagcgcacgcccatggccatgactcctcacgcctcggcggccaccgtagccgttacccctgcgttgcgctttccccacactttgtctgccacgggcctctcctcaccgcctctggctgggggctgcggcggctgccgggttcggttccggcccagccagcgcggccgaggcacgcaggggcggcgaggtggctctcacgtgtcgcgcgtggggggcctgctgggcaccgtattcggcgggggcggccgcgacgacggggaggccacgcggaagaagtacgcagacaccgtggcgcgtatcaactccatggagctcgaggtctccgcgctctcagacgctgatttgcgtgcacgcaccgctgcgctccaggaccgtgctcgctccggggaatccctggattcccttctccccgaagcatttgctgttgtgagggaggcttccaagagagttctaggcctccggccctttgatgtgcagttgattggtggtatggttctgcacaagggggagattgctgaaatgaagaccggagaggggaagactcttgtggccattctgccagcatacttaaatgctttgagtgggaaaggagtgcatgttgtcactgtaaatgattatctcgcaagacgtgattgtgagtgggttggtcaagtcccccgatttctaggactgcaggttggcttaattcaacagaacatgacacctgagcaaaggagggaaaattactcatatgatattacttatgtcacaaacagtgagcttggttttgattatctaagagataaccttgcaatgactgtagatgaacttgtcttgaggaacttcaattactgtgtgatagatgaagttgattcaatccttattgatgaagcaagaacacctcttataatatcaggcctagctgaaaagccaagtgatcggtattacaaagcagcaaaaatagctgaagcttttgagcgagacattcattacacggtggatgaaaagcagagaaacgttttacttacagaagaaggttatgctgatgctgaagaaatactggacatagatgatctgtacgatcctcgtgaacagtgggcttcgtatattctaaatgcaatcaaggctaaggagctcttccttaaagatgtcaattacattgttcgtagcaaggaagtgcttattgtagatgagtttactggcagagttatggcgggcaggcgatggagtgatggtctccatcaagcaattgaagcaaaagaaggtgtacctatacaaaatgaaaccataactctcgcatcaataagttaccaaaacttctttcttcagttccccaaactatgtggcatgactggaactgcagctacagagacccaagagtttgagagcatatataaacttaaagttactgttgtcccaacaaacaagccaatgatacggaaggatgactcagatgttgttttcagagcaacaaatggaaaatggcgtgctgttcttgttgagatatcaagaatgaataaagttggccgtcctgtgcttgttggtaccaccagtgttgagcaaagcgaatctttatcaaagcaattgcgtgaagctgggattcctcacgaggtcctgaatgctaagccagagaatgttgagagggaggcagagatcgtagctcagagtggacgccttggtgctgtgacaattgctaccaatatggcgggacgtggaactgatattatccttggtggcaatgcagaattcatggccaggttgaagttgcgtgagatccttatgccaagagtcgtcaatccaatagatggtgttattgtatccaaaaagcagatgccaccaagaaagacatggaagttgaaatggctgtcaaagaatggggagataaatcattaactgaactggaagcagaagagcggctgtcctattcatgtgagaagggaccaacacgtgatgaagtaatagcgaatttgagaaatgcatttgtgaagatagcagacgaatataaagtttacactgaggaggaaaagcagaaggtcattacagtaggtgggcttcacgtagtaggaacagagcgccatgaatcacgcagaattgacaatcagctccgtggtcgaagtggaagacagggggatcctggaagctctcgcttctttcttagtctcgaggataatattttccggatctttggaggtgacaggatacagggtctgatgcaagcattccgagttgaagatcttcctatcgaatcgaaaatgctaacgagggctctagatgaagcgcagcggaaagttgagaattacttttttgacatcaggaagcagttgtttgagtatgatgaggtattgaatagccagagagatcgtgtatatgcggaaagaagacgtgctcttgcatctgacagtcttcaatcacttattgtggaatatgctgaattgacaatggacgacatattaggggctaacataggacctgatactccaaaggaaaattgggacctgaacaaacttatagctaagctgcaacagtattgccatctgttggatgacttgacaccagaattgttggagggcaaaagctcaagctacgacgatttgcgggagtacctgcgtaagcgagggcgtgaagcttacttccagaaaactgttagttatttctccttttcctttcatggatattgttttttcgcatggttcaaaggttttaagaagttcaacaacaacaacatcaacatagccttttagtcccaaacaagttggggtaggctagagttgaaacccaacaagaagtcaccaaaaagagaaagagagagaaaggggaggggaaaaagtttttgagagaactaaaagggaaaaggcctaatcacagttcgggcacgtggatagtttttttccaagcacttctatccaaacacaactcctttggatattccattccttcaagtcccttttgattgcttccttccatgtcaagtttggtcgtcctctacctctcttcacattattgtcctgtcttatgatgcctttgtgcactggtgcctctggggg

SEQ ID NO: 40040 - DNA, 1357 bp, Zea Mays
tgaattaatcagtgcgcacgactagttaaaaacaaacatcctttgacaagaagtttctaattaaatcatgactgtgtctgggcagcattattatgagagtgaaggtggatgtgctgctacttcccactccccttgatgagcaacaagcacctgcattgagtaatgcaagagtgagatgaaacatctcagcaagctaattgttctgacgagatatttaaaccacaaattgaattaatcaacattttaaaagaatcacaatcaagattagaaatacttgtagatatagaacttagtagtcccaatataaccaatatcatctcatttcctcgaacaaccacaataggttctataacacttccccgcgtcaacaatacctgcaaatatcacttcaatgtatgcataggaatgcaatgtgtaggtactctatcttcatacctctgagagtataaaaccacatcatctgcaaatatcacttcaatgaatgcatatgaatgcaatgcatatgtcctctgccttcatacctctaagggtatgaagccgcatcgtacccctcctcgagcaacgtacgatgctaaattgtaccggtacggtcggaccataggtcacgacaaaacttcagatgcaaatgagtcatgcaatgtatatggcatgctgcatttatctataaccttcacttccttcagatacaatacaaacctcaaataatactttatttaccttcagatacaataccaacctcaaataatacttcatttaccttcagatacaataccaacctcaaataatacttcatttaccttcagatacaataccaacctcaaataatacttcatttaccttcaggggtgtgaattaatctcatgaatcatactcgaatcataatcatcatcaatatatgattgagcatcagtataatgcaagcaagtaaagcatcaccatagagtccaattatgaaagaatccaatacttctgaatattagagtgtaggcaatagaaataacaggtcagaacggaagcaactaccactacattcacttgccttcatcgaagaagaagaaatgtactagacatgatctggagtgtagccacctagggtttccccaagaaaatatgcaagaagagatggggaagaacacctccttgatcctctcttcctcttcaattcaatgtgctcctcctcttctcgatccttgctgcgtagggggagatcttgggggaggaagcaatagaggatggctgccatagggggagggggcggccagccaagggggagaaagggggtggcggccaagagggggggtgaagggaaaaaaaggggtggccacctagggtttttgtgggagaaagaaacgacgcc

SEQ ID NO: 40041 - DNA, 885 bp, Zea Mays
ccttgatatccatacccgttatagatacttcttggaagtatcaaaatttgatttacaaaaatgcttagccctgcttagatcttgtggatggaagttgtcttttgcgttaaggccttgctcaggggttatcctgaggaaagatgacttctacctgcaagaatatattttcattgggagcatggtgggatcttactgcaaagttccctatgatgctcttttcatcctaaggaacagaaacaatcctaaggatggaaatacttaaatcgagacttgggctaggaacaggtgatgttctacccaggttgattaaggattgaatgcgtatgtaggcttgatagagcaaggactatcttagctagccgcataccctggaaatgggacagggcaagctttgcctcgggcagactaaggccagaataagataacacgaaatgggcgtggagcggtggcaggagtagcgtgtaccctccgtggcaagaggctggacggtggtgtatctgtgctctcggtttgcgtgaacctaatctggtcttaagaaccctggggtcgagttgacatatggaaggattaagtgctacatatgtcgtgtggttagagatcctcagctgagtaaatcgattcggatcgccgttatatccccggagagtggagacttgatcactgacctgcaacctaaagtcaggatgtgaacactatggataaaaatgatgttgtcttgatgtgatgtgaaattagactagatgcaaatagagtctattaatacttaatatggcgttaaaagattgaaagtaaggactcactttagtaagctacttctgcaaaagtataagttgatttttgctaaagcctctccttgactcctatttatccagcatacccttgaga

SEQ ID NO: 40042 - DNA, 3454 bp, Zea Mays
acaggaccggactgcgatcggcactgccttctcttctcgctttgaccctttcactctgcgcgcgctatctctctagtggcgtcgtgggcgactgccgcgcctccgtcaggtgccgaggtcttcgtcgggcctttcgccggcgacgagcacctaccagttgtgggatttctcaccgcttgctcgcgatgctgcaatggacgggtggttcgaggaggaaggtgtacgcctccaggaagtcaacacagagcaggcaaaggcagtacttcgaacaaaagcgacggcaacagcagcagccagagctgcagtaccaggatgatgtggcaggaggtcaagcatcacaaaatcaacaacgtcgttcacttgatgttctgaacatcaatgatctggctactccaaataatcatcatagtggatccacaaatacagatggtgccatttcacaagtggattgcattctttcagatgcttctcctaaagaggcgataaagaatatcacttctttatgcaatatcaacatgaaggaagcaggtgagggtgccatttctgtacaaacagtcaagttctcagccaaggtcagtatatccacacagtatggtgagagtgtgcctgcatttggcctgttttatgaatgccagtattgtggattggcagattgtcttcaccctttggtcatcaagatgttgcagaacctgttaatcgtcatgaagatcctcttggttgtaaagtgtcttcatccataaactgtagcaccaggcagaaaaatcaaaatctggaactccaaagtgaaatttcacttattgatttggtcagttacgagggatcaaagaataggttgaccgcacaatctgcccatgaacctcatgtttcattttctgttaaaggccttggtcatatcaagatggaaacacctccccattcaccgcgacgagccaaaagggttttacctttacctccaaagcccatgcggtttatacataaagcaaagcggtctataccatttgatgtcacaaaggcattggattctattaccagtatcaatatgctgaaggagcaaagaccatcagccaaaatgtgcagtatattggatgaagcaggctatgaaaggagagaacagtttaactgttatttaccggattcatctaagagcctcaatgctgacctctatgttgaggacgaggacatgttttatgaacctcaagctgaaaaagattggcaatcaaagcatagtagatcagatggcaatcttgctgatgagaattatgatggactctggaggatggatgaatttaattcagaggatcatctttttactcaaagagacaaacatgttgatataagtggctatggatttaaagacggatactctccagagcgaagaaactcaacaagacctgtcacagtatttgagaatacaggaattcaatcctcacatgatctcttttctgatcattcattgatggatgatgaggacactgaacttttcaagtgggaaagtcacccaccaagtaagaaaaaatccaactcaaatagcaattttggtccttctgcttggccttatgacatggtcgatggttcagagaaaaggagtccaataagtgaagaatcatgctcatctgctgcagcgatgaaggatagaacgtgcaagaaacaatcaccatcaatgaagaatgatatgaacgagaatgacgagtttcatataagattggataagctggatattccaaacatggatgcacctcttcatgggaggtcactgtttaacaatccagaaaagttggataggaaagaaacagcacctcggaagaaacttgagacaaattggttgcaaagtgttactgggcagccaagaactcaagaaccaagctgtcggttatcacttaacgagaaattttctaattgggattctcctactttccgttcaaagagtactactggactaactgataaatcgagttgcaccatgttgcataaggataaatcttctttcgatgccgctccagatttggacatgtatcaaactgtggagtcaactcaaaagaggcctgtttcaaaagttcattctatttatcagaggcctgagaaacctatttttgaagacgaaattcacatgcagcatactgtttcagatatgtttcatgataaaattgaattatcgaacccatatcagaacaagaatctccagagtgacattgatatgagcactttcattgggcagaaggtggagaagcaagaagatgaatttccatgcttcagcagttcaagtgcagacaccttccgtgcagagaaagcagcgcgttctgtaagacaaactgttgatcgacacagtacatgctcacagccttctggcagggattcattcaggcacgggttcagtcctggtttcaatttccaggagtcagaaccaaacacgttttgggcagatagctatgtttgcaatggtacttttcaggcgggtcttgagttcagtggtgtggttgcaagaaaagacagtgataagaatgaagtcaagattgaggcatctgagaaaccagatactaagatattgacaggaacatgttggctctctgcagataacaggaatgtgattaatgggactgaaacatgttctgatggctcagaagcgttcaattgttctgaagcacagaaggaaacttcagcagtagtgacacaaattcctgcgaacttgagctctcttcgggaaacctcagcagaactgttccaagttcgtaatcacgtcatacctgtaaagagggaaaagatagataatcctggtgttgacttcgatgctgtgatgcattcaaaaagcaagatccacgatgttagagatcattctaaactaaatactacgtttcgatctcctttcattggagaggtggtggggattgagaagaagattgtagcgaacgtgtcacccgacaactctgatgttcagtatcagtttatgcttgaacaacgtgttcttcggcggctttgtgttcagaagatagtggtgcctacaccgatgaaggacaggctagacaaggatacaaacttcacgatagcggaggatggatctcttcatgtccttccaaaaagcgtctaacagattcacatcaggggaaggaaatgacaatgtagggaaggaactcatttcatgcccgcgaaatgcaggagcaagcccatacacacgtctgagttcctctgtgctcatattctcatttaagggcacctcgctcgtttgtagtgtctgtttggaaatagtaatctttccttcactcattagtcctagtgttgattttcaccataatatcgcttcaatgtatgcgtgtggaaatatggatttctgaattgtttgttgttacttaagtagtgtttggttccggaatatggtgggacgaagctgtttcactctcaatttattgttgtttggattggttctgtgtagaatagagtggctataaaaaaattatgctca

SEQ ID NO: 40043 - DNA, 319 bp, Zea Mays
gcaggcacctaatttctgcttggggaatagagggatgtagcagcacggtcacttcacctttaattaaaggaacccccacttaataatgttgttaatcagagttggtcaagtccagtgaattactttgttcttggttgagcgtttgttttgggtgggctgagttccttatcccatttgttttacttcagttgggtcctaattaagttttaccacttttgcatttttgtttctactacgtgaattatatgtctttatatcttgtatgaacttcatgtttcccctcctcgttatgctagtttttaaaggaggtgctgccgga

SEQ ID NO: 40044 - DNA, 970 bp, Zea Mays
cttgattagcaatcactgctgcgcccgataggtggcagcgagccagcgagccagcgacccacccgactctgttccaacgagccttccctcccaaacttgcacgctgcccccgcgctcgcctccgcccccgatccagatccaggtactcttcctttcgccgcggctgagaagcaactctccctctctgtcctcttcctgtcgccgcactcattttctcttgccgggtggaatagggaacggccatacaccatggcggatttctccaagctgagataacattgtttgatggttatattgtcgtttacaagtttgtacatgaccttcacttttttgtcaccgctggagatgatgagaatgagctcatcttagcaagtgtactacatggtttttctgattctgttggtcttctactcaggggtgatgttgagaagcggactgcgcttgagaacttggatttgatacttctctgcattgatgaaattgtggatgggggaatcatcctggaaacagatgcaaacaccattgctggtaaggttgcaaccaatgctgttgatggttctgtgcccttttctgagcagacgatatctcaggcactagccacagctagggagcaccttgcaagatctctactgaaatgaacaaccagcaatatgtatgacatatatgtgtgttaaaggttgggctactgaatgttaagggtctttgtagtcgttattcatcccaaagtgctgctgtgacagagcctagttgaatatccgagggattggtcacatgctcgttattttttttgaaccagtgagtttgtagctgccatatttcaggtaaaacataaaataaagagttgtaattgggtgtaatataattttcaccatacaaaaaaaatcatctcaactatcaaaccatggtaaaaggttcaaaattatctatcaaatgattatccctccagaaaagcaaaatacaaagactcaag

SEQ ID NO: 40045 - DNA, 2718 bp, Zea Mays
ccgctgcccacctccctctcctccttccgacctcgccgcctccctccctaaactctaaaccctccaccagccgaagctactgccgcggccgcagcagaggtcgcgacgacgaacgctgaagaagcgccggcgagggagagtcctttactttttcctatgctgtagcaaaacaagcctataccatcttccaaatatactcgttccgtgccggcggcctcccctcctacgcccctgtcgattcttcaatcttcaccaacgtctgcgcgtagcaggctagcagtcggcacggcttcctcagatctgccggacgacttgttgttcgtcaccgactcaccagcaaccaatgtcggccatcagccggcagcaggggaagctgggcggagggtcattgcggcacggcgtccaggcgtacagcaggcaccagcaacagcccatggcaaacgccgcagatgaccctatggtagatgaagccggagtagaagatgccttcacacatgagatcaccgattatttgtacgtccctagataccatgtgttgagttggatggaaactgtggaggggatggtggccggtgtggcggcgcttccgccggtgtatttgatactgaacagagatcttcttgagacgggatggggatggaagaggctggtgccctacagacctggttatgttgagtggcatgtgttcaagaaataccttggggactatttcgaccataatcgtgaagcttttctttgtgccgagcagaagcctgatccatttggatggattattgctgaaaagagtgccctgattgctgcagccaaattgtgcctcaagatggagaaggcacttctcaggtactgtgctagctttctcactcctgacgacaaaaggctgatcctcgggatcaaggaccaggcaaagcaaatgatccaatcagaggtagtgcagagaaacctgtgaagcagcgtgcttcaagcaatggttcaaatgggtgtccttgttcctactggagatatgactgttgtcagaagaaccgctcaatttttccttaatagctttcaagagtgcctaacagcacaaaggaaggagagagaaatggcaaccgcagaactgggtttcaaaaagcaattaactaaggaggagaagtttgaaaagaggaagcagagacttgctacaatcggagaggatcttttggcgattgctgctgatcaaccatttcgcttccctgccacatttacatttgtggtcagagcattctcaggtgtgtggagagacatgtgtattcctcctatgacgaattcctcaggctccatgaaggtaagcctgtcttaatgggcttgattgttgaacctgacttagtacttttatccatgtcacgacattgaaccagacagtcactcatgtccttaggatattaacggtatacatcaacaattcattctattttaattgcttgcaaaacttttttggcccttcaaatgagttccacgcatcaagaagtcaagattccaggaggcctaaaataggagaggagggcgcagcttgattcaatccatgtcaagtcaaaggctgctgcgaagtttgcacatgcaagtagaatttagatggtgaggttttgtctctgttcccatttttataacgactaggtgtttgaattcctaagattaaagtttatgtagattcttatttgtaattagatctctgttaggcatctaactgaataaatgatctcctaaagaattgacagattccatcactgagcagcccttcgccccggtggctgcggtgtcgcactggctgacacctgctcgcagttgcattacaagttttactgactatgtattttcaggtttattcaatttcggttctaatgcttctgacagcagttgtatcagtcctcttgttcagcttacatgtatccctcgcatccttccttggatccacataagtgttaataataattttgttgcatctcctctgctgatcagagctttcaaactcatgacagaataatgtactaaacttcagtttggtgtctatctcagtgtacctacactcagttggaaaacttcaaccacactgcaacaaggtttataaaaggaaaaacaaatttatgggctcaaacaaagtgtgatagtgaaagtcattttgcttccagcttaagaaccaagccaagaaaacagatatcaactgtgacgccacactcaaaagcttgtttggtgggagggacaaggttgggatgctggagatctccaagcttttgagtcgtggcttcccgaaaatctccaagcttttgtggtccatggagccagggatggctctttggtaaaagacttcgttgtggatggcctcttttatggtccatgttaagtcccaagtcccactaggtggttaagcagaaaaatcttgtgatggcattaagactttcagactttgtttttgggtctgatgcatgtaaaaaggattcccagtgtttctgttgctcttgcgatcctgtgaggacacatatgagagaaatatttagtttgttgatggcaaatcttgtcttatgttcatgtctgtgcctatctgatcaagcgttatgatatgatcccatgcgtggtactgtgttctttagagatgtacttaattatgtttctcttgcatttcatattgctttgtctaattgttaccgcaaattaagattttattataattccaatttgatatgcctcatcataaccatggttact

SEQ ID NO: 40046 - DNA, 3255 bp, Zea Mays
gaccccgggaagccgaagaagttagctgtgaggtctttaaagaggagttgttgcattgcagttgcaggttgcacagccgcggaagccagcacctcaaagccatggcggaagtggaccacctcgctgccgagagggccaccgcgcgcttcgacgtcgaggagatgaaggttgcgtgggccggctcacgccacgccgtccacgtcgccgaccgcatggcgcgcctcgtcgcatccgaccctgtcttccgcaaggataacaggaccatgctctccaggaaggagttgttcaaggacactctaagaaaagcagcgcatgcgtggaagcggattgtcgagctacgtcttacagaagaggaagcggatttgctgagacaatatgttgaccagcctggttatgttgatctgcattggggcatgttcgttccagctataaaaggccaaggaactgaggagcagcagcacaagtggttaccactggcttacaagttccaaataattgggtgctatgctcagacggaacttggtcatggctcaaacgttcagggccttgaaacaactgctacattcgatccgaagactgatgagtttgtcatccacagtccaactctcacgtccagcaaatggtggcctggtggcttggggaaagcttccacccatgcagtggtgtacgctcggttgataactgaaggaaaggactatggcatacatggtttcattgtgcaactgcgaagcttagaggatcactccccacttcctggtgttaccctcggtgatattggtggaaagttcggtagtggtgcatataacagtatggataatggtgttcttcgatttgaccatgtgcgcatcccaagggatcaaatgttgatgaggctttcacaagttacaagggaggggaaatatgttcactcaaatgttccaaagcagctgttgtatgggacaatggtttacgttcgccagtcaattgttgcagatgcttctaaggctttgtcccgtgctgtttgcattgctgtacgatacagcgcagtcagaaagcagtttggctctcaagatggtggccctgagactcaggtccttaattacaagactcaacagagcagactctttccattgctggcttcagcatatgcatttagatttgtgggtgattggctcaactggctatatacggatgtaactcagaaactggaagccaaggacttctcgaccctgcaggaagctcatgcatgcactgctggtttgaaagctgtgacaacatcagtaacagctgatgcaattgaagaatgccgaaagctctgtggtggacatggttacttgaacagcagtgggcttcctgagttgtttgcggtctatgttcccgcttgcacttacgaaggagacaacgtcgttttgcttttgcaggttgcaaggattctaatgaaaaccgtttctcagttggcatccgggaaacagcctgttggcacaatggcctacatgggcaaagtgcagtatttgatgcaatgcaaatctgctgtcagttcagctgaagattggcttaaccctgatgccatacaagaggcatttgaagcaagagcgctcagaatggcggtaaactgtgcccagaacataagccaagctgcaagccaagaggaaggtttctatgagcggtccccagatttgcttgaggctgcggtagctcacatccagctgattatcgtgaccaagttcattgagaaggtgcatcaggagattcctggacacggagtgaaggaacagctccaggccctctgcaacgtgtacgcgctgtacatcctccacaagcacctgggcgacttcttggcgactgggtgcatcacgcccaggcagggagcgctggcaaacgagcagctgggcaagctgtacgcgcaggtgcgtccgaacgctgtggcgctggtggatgcgttcaactacacggaccactacctggggtctgtgctggggcggtacgacggcgacgtgtaccctgcgctctacgaggaggcgtggaaggacccgctgaacgagacggtggtgccggaggggtaccacgagtacctccgcccactcatcaagcagcagcagctcaagctctcgaggctctgaagtctgaatcctctctctctctctctctctctctctctctctctgatgtggaagccagccaagatgtgtgtacgttagacatgtgtggtgggtttcagttgatacacgagggagtgagtaataaagagcgagcgagagatgaaacaaagaactgaatttgtatcgtacaacaaagaactttgccgtttggttcacatatttataacgtaatgggtaattgataacgttaaatcatgtttgttttagtccaaccgtaatcagataccacactaaaatttgataccagcttattcaaatttgttaccaccagtaatcgagcgtaaaccattaccatttatgttacatttcttgaaccaaacagcatcttaatttgttgttactgaccacgtgattggttgttaggaacagcagatcctggtcgaagcctagatgcaggctgggcttagcctgtatgcattgatgcaaaccaaaataaattctcttgtttggttgtttgtcctcaattagccaggttcagtacaacccttgtctggtttgctgttttaggtaagttacatggatttagctctaagttacacaactcaactacatttctaaaattacaatgttataaattacacaaatccaaatttatgcaattatatattacaataacttatcctttacatatcctttacaaaattataaaatacaattataatattgatactgaggcacaagaacactttacaaaattgtagtttacaagtatgcattagcagtttaccagcgtccattgcagccacccattctgttctcagttctcaaacaccaaaaacactttaaacaaaacagctcagttctcgattcaatttacaaaaacaccaaaaacacccgatcaagtgtacaatcaaaatacttgtaaacaaaatagctctctgtttagcaaatacttgtaaacaaaatagaccaaaaacaacttggttgtttgatggcaaagtaaatataaaaaattcatgaagagaaggtacaccacttccatttaaatgtgtcacgagcttcgaatcaggaagatatgcactcagcacgttaacacggacgagtttctgacatcaagaaactcgaatggctgcctcgagtggctaggtgaattattcaggaaatctccggtgcacat

SEQ ID NO: 40047 - DNA, 2188 bp, Zea Mays
atctcagtccggagaaatttccagcctctcgcgcacacggccgccggctctgatctctttatccacgtggccccctcccagtgggcacctcaccaccacctgtcgacctcctcatccccagcggtgcggtgccccccggcccctccccagtgccactgtctcgtcggctcgtcgctccgtagaccccgcgcctccgcctccccgccactcgccggaggctgccgccatcgttatgccatggccgtcatcctctcctccgcggcgccaacgatactgactcgtcccacgcgccctcggaggcagccgaggagcggcctccgcgggggcctcgcgcgcctctcagctgcgctcggcctcgcgcacgcgggcgccggcgccggcgccgcactcgccgcgccgctctcctacgaggagatgctgcgcctctcgtccgactccggcggtgatgttggcgggttcgcgctcccggagctcggcctcgacgggctcgttgacttcgtcaacgataaccctctcgtcgtcgcggcaggcgtcgcggccatcgcagtgccgcttctccttgcgcagcttctcggcggaggcggcagctccaagccctactccgtcctgtccgccaaggcggcctaccagcggctgctcgaggagcccgacgcgcagctcgtcgacatcaggccgctcaaggatgcacgagaggccggcacgcctgatctcaaggaggctaagaagaaggctgctgccgtaccttacaacggggaggacaaaaacggattcttgaaaaagttgacactaaagttcaaggacccggagaacaccacgctgatcatccttgacaaatttgatgggaactccgaactagttgctgagcttgtgacagccaatggttacaaagctgcttttgcagtgaaggatggtgcagaaggaagccgaggatggaagagcagtaaccttccctggaaggctccgccaaaaggattcagctttgacttgggcgaattatttggggatggttcagatggtttgcctgtgacaattggtctcgctgcagctactggtttgggagtacttgcctacacagagattgaaactttgctacagtttttggggtcagctgctgttgttcagctagtggtaaccaaactcttgtatgccgaggatcgacaaaagacacttaaacagatcgatgagttctttaacaagaaggttgctccgaaggagcttattgacgaaataaaggaaatcgggcaggctctactacctttacctggcgatgctaaaagccaaccagcactagcaacagcgactcaagttgctgccacacaaacagctgcaccagcagaggacgctaccgcagaagccaccacggaatcagatcctgcaacgccaacacctctttcaccttatacaaatatctcaagccgccatcaacccctacgccaccgtcagtggagtctgaagtcgagacgaaggctagcagcaccgtgactgaaggaccagcagtggtcaattctgcacctatagcagacgctgccacgggatcatctcctgccactactaggcccagacctcagtcaccataccctaattatccagatttcaagccaccatcctcgccttcaccgtcagcaccttaatttggcaagagtacaagaaaccgggtctagaggatattaaagaagttgagttgttcatatggagccggcatctcactagaggtgtatgttgtactatgagcgtgacagtgtggctaagtcactgtggcgagttttctgcagcagtaaatatatgatgtaatgttcattagttatcaatgtgctatgattttctttttgttgtcttattttcgatacatgtaaatgtcgaataactagccgtgagaattgagagttcaagcctatagagcttgatatgtttgatcaaagtaaatgtatcttcttaaaaacatgaaagtcaggtgctttctttttttatcctctataaaaagcacaaagtgatggtgatggttttctgtaaggatcttctatgcagtagtttaagtgtgcatttactgtgtgctagatattataatgtacagatagcctttcttttttagtgaagttagaggagtatgtcattaggtgcttcataaaatcgtggagctagaattgtgaatgtacagaagatatttacataaatcattttatttttttta

SEQ ID NO: 40048 - DNA, 2234 bp, Zea Mays
tcgcctcccacactataaataccccacccatgcccaagccattccgacccaggcaagaggcaacacagcaagcagcagaaaacatctccgggagtccgaaccacccacaggcggcaggccacaccacaggagcgcgtgctgggggagatcctcgcccgcaacgccggcaccgagtacctcgccaagtacggcctcgccgccgctactacggaccgcgccaccttccgcgccaaggtgccgatggcgacgtacgaggacctgcagccgtacatccgccgcattgccgacggcgaccgctcgcccatcctgtcggggcacccggtgtccgagttcctcaccagctccggcacgtccgccggcgagcgcaagctcatgcccaccatcgaggacgagctcaaccgccgccagctgctgtacagcctccagatgcccgtacgtgcccgggatggacaaggggaaggctctccatttcctctttgtcaagtcggagacgaagacgccgggcggcctcgcggcgaggcccgtcctgacgagctactacaagagcaaccacttcaagaaccgcccgttcgacgcctacaacaactacacgagccccacggcggccatcctctgcgccgacgcgttccagagcatgtacgcgcagatgctgtgcgggctgtgccagcgccaggacgtgctgcgcgtcggcgcggtgttcgcgtcgggcctcctccgcgccattcgcttcctccagctcaactgggagcagctcgcggaggacatcgaagccggctcgctcaccccgcgcgtcaccgacccgtcggtgcgcgaggcggtcgccggcatcctccgcgctgaccccgagctcgcggcgctggtccgctccgagtgctccaagggcgactgggctggcatcatcacccgcatttggcccagcaccaagtacctggacgtcatcgtcaccggcgccatggcgcagtacatcccgacgctcaagtactacagcggcgggctcccgatggcgtgcaccatgtacgcgtcctccgagtgctacttcgggctgaacctccgccccatgtgcgacccctcggaggtgtcctacaccctgatgcccaacatgtgctacttcgagttcctgccgatggactccgcggcggcgtccggcggcgacgcgagccagctggtggacctcgcccgcgtggaggtcgggcgcgagtacgagctggtgatcaccacgtacgcggggctgaaccggtaccgcgtcggcgacgtgctccaggtgaccggcttccacaactccgcgccgcagttccggttcgtgcggcgcaagaacgtgctgctgtccatcgagtccgacaagacggacgaggccgagctgcagcgcgccgtggagcgcgcgtccgcgctgctccgcccgcacggcgccgccgtggtggagtacaccagccaggcctacaccaagagcatcccgggccactacgtcatctactgggagctcctggccaagggccccgcgggcggcgccgcggtgggcgaggggacgctggagaggtgctgcctggagatggaggaggcgctgaacacggtgtacaggcagagccgcgtggcggacgggtccatcgggccgctggagatccgggtggtccggccgggcaccttcgaggagctcatggactacgccatctcccgcggcgcgtccatcaaccagtacaaggtgccccggtgcgtgacgttcccgcccatcatcgagctcctggactcccgcgtcgtgtccagccacttcagccccgcgctgccgcactggacccccggccagcgctccgactccgactagacacgcgggccggcgtgcggcgaggcgtgtccggcgcgcttaattagactgggaattcgttccttgcgtatcgcagacgtagaatatgcccgtgaaattaaaatatttgttaattttggaattttgggtactgtcagttagcggctttgagggtaacctgtgatgtgacgagagttggagtcactactgaaggctgagctggtcagctgaagcaacagtcgacgcctgaaggtgttttccggcagtaatggcactgttgtccctatcactttagtagtacggaggacgcggctaacttaaacgttcttccaaatccaaatccaaatctgtacgagctatgcccctgtgcatgcagaagacattgctgcaacattctgattactactaaaaccggctgcgagctcgttgtgcagacgag

SEQ ID NO: 40049 - DNA, 561 bp, Zea Mays
ctcttcttcctccgcacagcgcacaagccgcggaagcagcgcagacccggcaaaatagtgatggctcagaagacgaaggaggcggagatcaccgagcaggattcgctgcttctaacaaggaatttgctccggattgccatatacaacatcagctacatcagaggcctattccatgagaagtacttcagtgataagtcggttccagcactagagatgaagattaagaagctgatgccaatggatgctgagtcaaggagactaattgattggatggagaaaggtgtctatgatgctttgcaaaagaaatatctcaagaccctcctcttctgtatctgcgagaaggaggagggcccaatgattgaggagtatgccttctcatttagctaccccaacaccagtaccgaggaagttgcgatgaacatgagccgtacggggagcaaaaagggcagtactacattcacttcaaatgcttcagaagtaactcctgatcagatgagaatgttcggaccaggagtgaaagcagattgaaacgggccaatgatttcctttgacacatttggc

SEQ ID NO: 40050 - DNA, 3356 bp, Zea Mays
ttccattttcattctcccacccacccggatcctccgcgcgcgccgccaggtccgtcgcgatggccgcactccgcctccccgcccagccggtggcgaggtggccccaccttccttccgcctacgccgccgccgccgccgcgcgtcgggtctcggcccctcgcggccatctcgcggcgcggcgggccaagggggaggagccgccggagccgccggtgaggacgctgctgatcgacaactatgacagctacacctacaacatcttccaggagctgtcggtcgtcaacggcgtgccgcccgtggtcgtgcgcaacgacgagtggacgtggggggacatctttaaccggttgtacaaggaccgcaccttcgacaacatcgtcatctcgcctggccctggatctccggcatgccccgccgacataggggtatgtctgcgcatacttttggagtgtggagatatacccatcttgggtgtctgccttggccaccaggccctgggatttgtacatggtgctgagattgttcatgctccagaagctatacacgggcgactcagtgaaattgagcacgatggatgccacctctttaatcgtgtcccctcaggtagaaattctggcttcaaggtagtgaggtatcattcccttgtaatagaatctggttctctacctgatgatcttacatcgatagcgtggactgcttctccaaatttgctttcttaccttgaaagtgatcgaaccaatgttagtaccttcttgggaacattggataacaatttaatgagaaaccctctagagtacagtaacaatggtggggaactatccaacataggacatgcttgtgagtcagatgatagccgagttatcatgggcatcaggcactctagcaggcctcattatggagtgcagtttcacccagagagcattgctactcatcacggaagacagattttccgaaactttaagaagataacaggaaattttggattgcgctcatcgtggattcaggaaagaaaggttcacagtattggtaaactggaaaaatctcaagtcaattctgcaagtcatcatgattctattcctaaggacttgttgcatactgaaagaatggaactttcagagtctgtacttggaaagagagggattgggaagaagtgtttacgattacaatggaagaagattgaaaattttgtctgtcccacagtaggctctgaagacatatttgcggtgctttttggccatcaaagcggtgaagacacattttggttggatagctcatcagttgaccagaacagggcacgtttttcattcatgggtggtaaaggtgggtccctgtggaagcaaatgtcattccacctatctggtcaaagagccaattgtggaggaatgcttagtatccaagatgcttatggatttactgccaaaaaatttatcaaagacggcttcttggagttccttaacaaggagattgagtccattcaatacaatgagaaggattacgaaggactgccctttgaattccatggtggcttcgttggatatcttgggtatggtcttaaagtggagtgtgatgcatcatcgaacaaggccaaatcaagtactcctgatgcatgcttcgtctttgctgataacactgtggtggttgatcacagcaatggtgatgtgtatattttgtcactgcatgatgaattttattctagtaatggagatgggatatgcaaaaattcaacgcatacttcatggttagtggagactgagaagaagcttctcaggttgggtggtatgccctcaggatcaccaattatccgaaagacacatgctagatcatccagtgtgcataagcagagttttgttgtagagaaatcaaaggaccaatatgttagagacgttcagaattgcttggattatatcagggacggagaaagctatgagttgtgcttaactactcagatgaagagaagagcagactgtataaatgcactccaactctaccttaaactgagaaaacaaaatccagcgccttatgcggcctggcttaacttctcctcagaaaacttgagcatatgttgctcttctccagaaaggtttctacgactagaccgagctggagttctagaagcgaaaccaattaaaggtactatagcacgtggcagaacaccagaggaagatgaatgcttacgtctgcagttgagatacagcgaaaaagaccaggccgagaacctgatgattgtcgacctcttaagaaacgatctcggcaaggtctgcgagccagggagcgtgcatgtcccacgcctcatggacgttgaatcatacagaagtgttcacaccatggtgagtaccgtctgcggaacaaagaagccagatctaagccccgttgattgtgtgaaagcggcctttccaggcggttcgatgaccggggctccaaaagtcagatcaatggagatccttgattcacttgagacaagcccaagaggagtgtactcaggatcgatcgggttcttctcgtacaaccacacattcgacctgaacattgtgatccgaactgttatcctgcacgacggagaagcctcggtcggggcgggtggggcgatcgtagcgctgtcgagcccagaagcagagtacgacgaaatgctgctgaaagcgaaagccccgactgaggtggttgaggatctcgttcagacgatctacagctcagaccggtcggattccatgcagacaactatcagctagatcagataggcaaaggaccattatttgtcgcgacaccaagcgcttacgatggacctcggcaaacaccatgtgtctcagaaatttggtatcagtgaccggtgcgtgctgatgaacattggcagtgggagaggggggggggggggggggtgaggtggcgtatcttctttgcgatggtcatccctttgccagaaggaaataaaggagacgcgaagaggatgtcgaggtcagtcggatccacggttagcatatagagtcaggtgacatggcctctctcaactatagtgtgtgtgtgtgtgtggcatatacggtgagcatatacaagaacaacagtgtgtgtgtggcagaagtgaaacaaactgatacggttgtgttgcactgtcgtaccagttcaatgttcctgaagtgatattattctttgacgttataaatacttcgagggtgggtgggcgaatttcacgttttgtcgacgtttcctgggttgagctttccatccagcttctcaaatcccattttactctgaatattctgttgacagggatttctgttattaaagattcggagcagtttgttgttgttgcttttgacggtgaccttcatgaatcctgactcctgagatgcattttttttgtgttt

SEQ ID NO: 40051 - DNA, 1851 bp, Zea Mays
agattgggctggtccggccactccgacacccttatataaagtcccgaaccctagaggccagcaccttcctccccaactcgccgtctgccttctgcgcctccatttcggcctctgtcccttgcaagttcaatctcacctccaaccatgggtaaagagaagtcccacatcaacattgtggttattggccatgtcgactctggcaagtcgaccaccacaggacaccttatctacaagcttggaggcattgacaagcgtgtgatcgagaggttcgagaaggaggctgctgaaatgaacaagcggtccttcaagtacgcgtgggtgctcgacaagctcaaggctgagcgtgagagaggtatcaccattgatatcgctctgtggaagtttgagaccaccaagtactactgcacggtcattgatgcccctggacaccgtgacttcatcaagaacatgatcactggtacctcccaggctgactgtgctgtccttatcattgactccaccactggtggttttgaggctggtatctccaaggatggccagacccgtgaacatgctctccttgcgttcacccttggagtgaagcagatgatttgctgctgcaacaagatggatgcaaccactcccaaatactccaaggcacgttatgaagagattgtgaaggaagtctcatcctacctcaagaaagttgggtacaaccctgataagattgcctttgttcccatttctggttttgagggcgacaacatgattgagaggtccaccaaccttgactggtacaaaggcccaaccctgcttgaggctcttgaccagatcaccgagcccaagaggccttcagacaagcccctgcgtctgcccctccaggatgtgtacaagattggtggtattggaactgtaccggttggtcgtgtggagactggtgtcatcaagcctggtatggtagtcacctttggtccaactggcctgactaccgaggtgaagtctgttgagatgcaccacgaggcacttcaggaggctcttccgggtgacaatgttggcttcaacgtgaagtctgttgagatgcaccacgaggcgcttcaggaggctcttccgggcgacaatgttggcttcaacgtgaagaacgttgctgtcaaggatctcaagcgtgggttcgtggcctccaactccaaggatgaccctgccaaggaggctgccagcttcacctcccaggtcatcatcatgaaccaccctgggcagattggcaacggctatgccccagtgctggactgccacacctcccacatcgccgtcaagtttgctgagctcattaccaagatcgacaggcgatctggcaaggagctcgagaaggagcccaagttcctgaagaacggtgatgctggtatggtgaagatgattcccaccaagcctatggtggtggagacattctccgcgtatcctcccctgggtaggtttgccgtccgcgacatgaggcagacggttgctgttggagtcatcaagagtgtggagaagaaggacccaaccggcgccaaggtgaccaaggcggccgccaagaagaaatgatgcgatcccgtgtctgcttttgcagtgcctggataacttgccactaaagttgtgtatgcggttgttgctgttattgcgtggactgtttgctgcggtgtctcctgtttgtttgggtagcgcagcgtcggcctcttcaggtgtctgttgtctgttgtctttactatcagtaatgctcctgagacttgtatttctccttttggcgccgctaaatggaattttcgaacaatgattttcgtgttattattttacaaccttttcgaacaatatttacacgtctgatgtgttttgctgaga

SEQ ID NO: 40052 - DNA, 181 bp, Zea Mays
agctcactcttgctgtctcacaccccccacaggagaagagcaggtggttcaggaggagtcacaaggcgaggagtatgatcttatctaggtggcgtttctcagtcgacatttgcgccgacgatccttagttcgtttgatgtttattcttttatttgtattaagtcttccgctatgtaataag

SEQ ID NO: 40053 - DNA, 1768 bp, Zea Mays
gaggaatatgcacaattatattaggtcgaagaagccgccactgccggatctggcgcagcgctagggcacaacgtgcgttggcgaggcaggcgagcgtgccgtgggtctgcgtgcccttggagctcctccaggtgacgtagggccatcacgccaattcacagttcgagatccgacgctggagccgccgctccaccagctcatcggcggtagctccgtgcggacagcgacgtcgacgcgtcgtcatctggtggcatggcagcggtggtcctcaccgatggctcagccatccgcaagagcgcaagcatggggacctctccctcgtcttcgcggggtccaccagcgacagcgcgtccccaactgttgggcccgacctcgccgacagcggtgtggggccatgacttcgaacgacatcgtcctccgcgagccatgagcgtaaaaaggttaggtactgccctatctctgcccctcctctctaatcgatcaatggtaatagcacactacgagtactcttgccattgtattccattagcgacaaatctgctagaaaactatgttatggctagaaactgttagaagtttcaggaatggtgttttatgttacctcgtcatatttttcaagatacatgtcttgtggtcgaaatttcttaagatttcttagttgtcttatagttttgattaagttgacaacttgaagtctggatagagaaattaatgatgaaccagtgtgcaatataagacatatatcatatttaatggtttagtgacatccttattagcacccgttttgaggacatggacttccacatacgtggctgattctcttgaaccatgacggtacaatctctgatttcaactgaagaaaatctctgctttcctgtcctttcccatgaaaatcgtccgagagatgactaggatgaaggatgagaggaataggctgaggatgatcatggcacagtacttggtgtggcttcattcttcatgcaagatctgagcaaccttgagtagcaaatcgaggggaagggtacgagcagcttcggcaagcgccggaacaagacgcacacgctctgcatccgctgcagcagccgtagcttccacctccagaagagcacctgctcctcctgcgattacactgccgcccgcatccgcaagtaaggacaagcctccacgtcgatagaagcaaatcaatccatttcgtttgacaagtagaagattatctgtgttcaaccaaatggacataattagtgctgttttgcaaaagcattttggattttccagtctcaaagcattccaaaaggaagtcttggatgcttggtttgctcatgaggattgtgttctcctaacagccataggatcaggatcacatgaaaattattgaagacgacggtccagggacctctcaagcaacaacctcaatggataaggcatattaaatacattacttcttcagcatcatgggagaaaatcttactgtcagggttcagaggatgttgtacggaatgaagttggttgatttgacgaagaagaaaacatttttagtcttgtggctgtgcgtctagctgttgatgcagctgatgagaagtcggctatagccgagagaatttcagtcatcctgcagaaatatgtcttcccatatgacttctttcgttgttggatttatcatcgagtggagagtggcaatacttagtctggccactacttgtgcttgccaactttgcttaggtaatttcttggcctacttttaagcggtgtcatctgtagacaaaatgag

SEQ ID NO: 40054 - DNA, 318 bp, Zea Mays
gcacgagcaagtgggtaacacataattttgatctagttcattgtgacttgcggcctccccttttgccagcattttttgatacaagtattacttagtcattcttgatgattgctcacattatgtttgggtgtttcctttgcaactcaagtctaacacctttttactctaacttctttgcttatgtctccacccagtttggcgccaccattaaggcagttccgtacgacaatggctgcgagttcaacaactcaagcgcccgccataacccttgctgcatctaggacatgcagtcccaagctgctaaccccccacctgtca

SEQ ID NO: 40055 - DNA, 1709 bp, Zea Mays
cttttaaaaacacaaggaaggggttgcatgcaccggggcttgtcttattgcaggagaagatccaaagtccttctatcacaataaccagttagatggaaccaaccactggatctacagcactggagcagactcctcttcaggaaccacttcttgaatttcaacttacttttatgggagctctacatgaaatgatatgaatatgaatgcttatgcttttgtaatttgcaacgaagatagcaaaacaactctctagactataccaaaatctatggtcttttatgtaaacttgtttcttcaccaactaattcctttcatccactaaccgcaccactacgattcacacgcacatcacaaagcccaagttgatggtgtgaaccacaagcctataaacagtcgcgaacaatctttcctgggacataaaactatgctaccgattaatccaaacacacacgcaaccatgccagtagagatcaaacaaccagtttaatgagtttcacccgtaagtatagatactagaacactacacagaaaccgtggaatcgtaccatgttatcccaactatgggagggcaggaacaaccccgggcatggtcaccacagccagtggcaagtatgtttccaacaaaaccaagggtactagatggcagagaggtgttaggggggtgacgtgggtgtagatgagtagcaaggcacataggggaaaccaggaaatcgtcgagagcacaagcaattcagtttgggctccaaactagcataacaagaggtggcttgatggaggtcgagctggggctatttcagaggggaaatgagaattaacaatccccaacacacacctgcatgtctaccacgcaaggtggaagcacaagaaaaaagtccagcacacctttactgcatgtatgacacctcatgaacagtgaagcagctgaatcatccaagagataggctttacacccttcctgcatctatccttggggtggtgaatttttgacaataaactttcctctctcataagtctcttttgggctagcatatcctagaattccctatatcaatttggtggatggagatactttcatcagattattctaaagctgctcctgttgttctactcgactgaaacctcaagttcagctcccctttttattacctcaaataaccagcaaagaaactttaatgcccccaacacacaaatatcacttggtccaaatctgcaggtagtagatatctgcagatagtagacaaaacagatatgatctcttctgtccacatctcccaaacagtccagaactagatattttgcagcagagctgaagtcactagatccttggttttgcaccccacccatatcccaactcgagcacaccagtggagcacaggaaagggagaaaaatcttcctcaatttcctatcccaaacactgaatcaacttccctgacatcagtgtcccattgcacagctcccagtttggtctactttatctcacaaacttcctcaacaacggccccttcttccctaataaaaaatactctccaatcattgctcttccactttggtacaatacccctaggctgaaaccacatagaacaaaaattatgggacacaaaagtagagcaaaaacactaagaggttcagtttcggctgaagtgaaataatcccccagacagtctgacagaggaagtttaggtgcattttactctaaagtttgttaagc

SEQ ID NO: 40056 - DNA, 2735 bp, Zea Mays
tgaccgtgccgggccaaccccgccggccaccgcccggccacctatttaagcccccgcacctcccacgcctcgccggcagcagcgttgcatcagctgttgtaattacgtggtacaggacagtgcccatttgccgttgccgcgtccagcattcattcattcattgccctggccttcttccttcgggccttcccgtgccgtcgcccaacgcctcacctaccaccaccgcccgccaccaaaccaaaccaacccctcggtcgccgacgccgagtgacgtaaacgatggactcggcgacgtcgggggcgatggagctggtggccgcgctgctgcgcggccgggtgccgcccgagctgggcggggacggcgccgagggccgggcgctcgtcgccacgctcgccgccgcggtgctcggcgccgcgctcttcgtgctctggaggcgcgccgccgccgggaagaagcggaagcgggaggccgccgtcgcggccgcggaggccacgcaggccaaggcgagaggcggtaaggccgccgaggaggagaagccggccgacgacggcaggaaaaaggtcaccgtcttcttcggcacgcagaccggcacctccgaggggtttgccaaggcccttgctgaggaggcgaagtccagatatgacaaggcaagcttcaaagtcgtggacttggatgattatgcagcagaggacgaggaatatgagaagttgaagaaggagaagctagcgttgttcttcgtggcaacgtatggagatggtgagccgactgacaatgctgctaggttctacaaatggttcactgagggaaatgagaggggtgtctggctaaatgactttgagtatgctgtgtttggtctgggcaaccgacagtatgagcatttcaacaaggttgccaaggtagtcgatgagatcctgacagaacaaggtggaaagcgccttgttccagttggtcttggggacgatgaccaatgcattgaggatgacttcaatgcatggaaagaagctctctggccagagttggatagattacttcgggatgaaaatgatgcctctccaggccctacatacacagctgcaattcctgaataccgggttgaattcatcaaacctgaggaggcagctcatttggagagaaacttcagccttgcaaatggccatgcagtccatgatgcccagcatccttgccaggctaatgtggtcgtgcggcaggaactccacacccctgcttctgatcgttcatgcactcatttggagttcgacattgctgcaactggtctcacgtatgaaactggcgaccatgttggtgtatacaccgagaactgccctgaggttgtagaggaggcagagaggttgttgggctactcgccagacacatttttcaccatccatgcagacaaagaggatgacacttcactaagtggcagttctcttgctcctccgttcccctccccaatcacagtgaggaatgcacttgctagatatgccgaccttctaaattcaccgaagaaggcttctctggttgcattagcttcttatgcttcagatcctgctgaggctgatcgtctgaggttcttggcctctgctgctggcaaggatgagtatgcccaatgggttgtggcaagtcagagaagcctgttggaagtcatggcagagttcccttcggcaaagcctccactaggagtcttctttgcagctgttgcccctcgacttcaaccaagatattattctatttcatcttcacctagtatggcaccaaccaggattcatgtcacatgtgcgctcgtgcgcgaaacaacacccgctggaagggtacataagggagtttgctcaacttggattaagaatgctgttccttcggaggagagcaaggaatgcagctgggctccgatatttgtgaggcaatcaaacttcaaactacccgctgatccttcagtaccgattatcatgattggccctgggaccggtcttgcacccttccgtggcttcttgcagacttgctcaaaaagaatctggagctgagcttggtcgatctgtgttcttctttggatgcagaaacagcaagatggacttcatctatgagggcgagctgaacaatttcgttgagcaaggagcactgtctgagctggttcttgccttctcgcgccagggccttgctaaggaatatgtgcagcacaaaatggcacagaaagcatctgaaatctgggacatgatctcccaaggtgcttacatctatgtctgtggtgacgccaaaggcatggccagagacgtacatagagttctccataccattgttcaggagcagggctccctcgacagttctaaggccgagagcttcgtgaagaatctccaaatggagggcagatatctgagggatgtgtggtaaagagcgattggatgaacattcgttcgtattacacacgtgtacaactactaccggaagagcactgacaatggactagatctgatatttttattgcttctatatttatttttattttcttttgcttcgttctcttcaagagctctttgctttctttgcggttctcccaagagttctttgtacctatgtattacaaattctttatatgtataagatgaggacaattttggcaataagcctgtcacgatgttattagtattgccaaataggctttcgtgtgattatgcataatgtataaatgaatccacaaagagtttaggatttggtctaagcagtggagatgacaatggctatc

SEQ ID NO: 40057 - DNA, 6627 bp, Zea Mays
aaaacctttccgtccgttactgctatagcgttcatcatcccattccttccccaccaccacctcctgcttctacactactggactgctgctgctgctctccccctcccctcccctcccctcccctcccggccgccgccgccgccgccgcgtgttctctctcatctagggtttcatctccatctagtcgagcattcccgtgctggggtggggagtgggagactcgactcgatttgattcgactccatttcgtgctagcgcctagcgctgcagagcgagtgaggtgacgggaatggcggctccggggcggaggacggcggacgtgtcctcgtcctcgccctctccgtcccctgccgccccctccaccggcaggcgcctcctgcgcacgcagaccgtcgccaacctcggcgagtccatcttcgacagcgaggtcgtgccgtcctcgctcgtcgagatcgcgcccatcctccgcgtcgccaacgaggtcgaggttgaaaacccgcgcgtcgcctacctctgtcgcttctacgctttcgagaaggctcaccgcctcgacccgacttccagtggccgtggtgttcgtcagtttaagaccgcacttctgcagaggcttgagagggaaaatgaccccacactgaagggaagggtccacaagagcgatgctagtgagatgcaacgcttctaccgcgaatactacaggaagtacatccaggcactgcaaactgtcgttaataaggatgaccgtgcgcgcctcactaaggcataccaaacggctgctatcttgtttgaggttttgagggctgttaatgattcccagtccgttgaagtcgatcaagcgattttggatacacacatcaaggtcgaagaaaagaaaaagctgtttctaccttataacattctcccgctcgatcctgaaagtactggcgaagccattatgcgatatccagagattcaagctgctgtttatgctcttcgcaatactagaggtctgccatggccaaaggaccaagacaagaagcctgaagagaagaatactggcaaagaccttcttgattggcttcaggctatgtttgggtttcagaaagacaatgtgtccaaccaaagggaacatttgatactgttgcttgcaaatgttcatataaggaaaatacccaaggctgaccaacaaccgaagttggatgacaaagctctggatgatgtaatgaagaagctatttaagaattataagaagtggtgcaagtacctcggccgcaaaagcagtttatggttgccaaccatccagcaggaagtgcagcagcgtaagcttctttatatgggtctctacctgctgatttggggtgaggcggccaacttgagattcatgccagagtgtatttgttacatctaccatcatatggcttttgaactctatggcatgctggctggaaatgtgagcccaatgactggtgaaaatgttagaccagcatatggtggtgacgaagaagcctttttgacgaaagtcgtgactccaatatacaaagttatagagaaggaagctgaaaggagcaagaccatgaaatcaaagcattcacattggagaaactatgatgatctgaatgagtacttttggtcagttgattgtttccggctaggatggcctatgagagccgacgctgactttttcaaaactccaaaagatccttatctgaatcatttgaatggagagaacagatctgcaggcaatgtccattggatgggaaaagttaattttgtggagatacgttcattttggcacatattccgtagttttgacagaatgtggatcttcttaatattgtccttacaggccatgataattattgcttggaatggtggaacaccaagtgatatctttgatgctggcgtatttaagaaggttttgagcatatttatttctgcagcaattttgaagttgggtcaagcaatcctagatctcgtatttggctggaaagcaaaaagaagcatgtcatttgcagtcaagctacgatatgtcttgaaattaatatctgctgctgcatgggttgtgattttaccagtgacttacgcgtacacttgggagaatcctactggtcttgcaagaacaataaaaagctggcttggggatggtcagaatcagccatctttgtatatactggcagtagtgatatatatggcaccaaacatacttgcttctatgctatttcttttcccatttatgagaagaatcctagagagttcaaatgttaaggtcataacgatcatgatgtggtggtctcagcctcggttatttgttggtagagggatgcacgaaggtgcattctccctcttcaagtataccatgttctggattattcttttagcaatgaagttgattgtaagcttctatattgagatcaaacctctggtacagccaaccaaagatataatgagagaacctatcaggacattccagtggcacgagtttttccctcatggaactaacaatattggtgttgttatatcactctgggctccaataatcctggtatatttcatggacacccaaatttggtatgcactgttctctactctgattggtggcatctacggggcttatcgtcgtcttggtgagatacgtacattaggaatgttgagatctcgctttgaatctttgcctgaggccttcaatgaacgcttgattccttctgatgcaaataagagtaaaggtcttcgtgctgctttttcgagtagacccaaggcttctggtgacgaaagtgagagagagaaaagagctgcaaggtttgctcaaatgtggaacgccattattacaagtttccgcgaagaggatctcatagacaatagggagaaggatctgctactggttccagactgtaaagaccgtgaacttgatatattccaatggccgcctttcctacttgctagcaagatcccaatagcactggatatggcagcagacagtggtggaaaagaccgtgatctgacgaagaggataaagtcagatccatacttttcctttgctatcagagaatgctatgcttcattcaagaacatcatcaataccttagtatttggtcagcgggagaaagatgtcctagtacagattttcacagttgttgataagcatatagaagaggaaactctgataacgggtctcaatatgaagaaccttcctgcactgagcaagaagtttgttgaattacttgagttactgcaaaaaaacaaggaggaagacttgggtcaggtagttattttgttccaagatatgctcgaggtggtcacgagggatataatggaggaacaggacctgctcgagacgttggattctttacatggtgccaatagtagaaaacatgaaggaattacaccgctagatcagcaagaccagttgtttgctaaagctattaagtttcctgtggtggaatcaaatgcatggactgaaaagataaagaggcttcatcttctgttaactgtgaaagagtctgctatggatgttcctattaatcttgatgctaggcggcggatatcgttcttcgcaaattctctatttatggatatgcccaatgctccaaaagttcggaacatgttgcccttctctatcttgactccttattacaaggaagatgttctgttttcattacaaaatctggaagagcgaaatgaggatggagtttccattcttttctacttgcaaaaaatttacccagatgaatggaaaaatttcctcgaaagggtgggctgcaagaatgaagaggtactccgtgaagatgaacagctggaagagaagctttgtctttgggtgtcatatagggggcagacattaacaagaactgtaagagggatgatgtactatcgaaaagctttggagcttcaggcttttcttgatatggccaacaatgatgatcttatgaaaggctacagagcaatggaagtaatgtctgaggactcaccattaaagactcaatgcaaggctatagccgacatgaagtttacatatgttgtctcatgccaactatatggaattcagaagcgttctaatgagccttgcgcacatgatattttgagactaatgacagagtatccatcacttagggtcgcctatattgatgaagttgaagcacccagcaaagatagaatcaagaagattgaaaaggtttactactcagtgttagtgaaggcttctgttacaaaacctaatgagcctggtcagagccttgatcaggtcatctacaagataaaactaccaggtaatgccattttaggtgaaggaaagccagaaaaccagaaccatgcaataatattcacccgaggcgaatgtctccaaactatagatatgaatcaggtctgcttcatgcactagtaggttttgggatctgttgtctattttgtgcctttggttatgttgagctgtattggcaggagcactatatggaggaggctttgaaaatgagaaatctgctgcaagagtttgagaagaaacatggagtgagacatccatcaatacttggagtcagagaacacatatttacgggcaggaaactagttttgtgacaattggacaacgagtgcttgccaatccactgagggttcggtttcattatggccatcctgatgtcttcgatcgtcttttccacgttacgaggggcggtgtcagtaaagcatccaaaattatcaatcttagtgaggacatctttgcaggattcaattccacattgcgcgaaggcaatgttactcaccatgaatacatgcaagttggcaaaggaagggatgtaggtctcaatcaaatatctctgtttgaggcaaagatagcaaatggcaatggcgaacaaacgctgagccgtgacatctaccggctaggtcatcgctttgatttcttcaggatgctgtcttgttactacacaacaattggtttctacttcagtacaatgattacagtatggactgtatatgttttcctctacggccggctatatcttgtacttagtggactcgatgaagcactggctactggaaagaggtttgtgcacaatacacctctccaggttgctcttgcgtcagagtcttttgtgcaacttggatttttgatggcgctgcccatgatgatggaaatcggtttggagagaggattcagaactgcattgagtgattttatactgatgcagcttcagttggcctctgttttcttcacattctcgttgggaacaaaaactcactactacggaaggacgttactccatggaggagcggaatacagagccactggacgtgggtttgtggtgttccatgccaaatttgctgagaactatcgactttattcccgtagccattttgtcaagggccttgagctgatgattctactagttgtgtatgaaatatttggtcagtcatatagaggggctataacttacatcttcatcaccgtatccatgtggttcatggtgggcacttggctctttgcaccattcctgttcaatccttctggatttgagtggcagaagattgtggatgactggactgattggcacaagtggatcagcaatcgtggaggtattggtgtggcaccagagaaaagctgggagtcatggtgggaaaaagagcaggagccccttcgttactctgggaagcgtggtactattgttgaaatactgcttgcattgcgtttctttatctatcaatatggactcgtgtatcatctgaatataacgaagaagataaccaaggataaccagagtgtgctggtttattgcttctcatgggttgtaattttcgttgttttactcgttatgaagaccgtatcagtggggaggaggaggttcagtgcagagttccagctagtgttccggctgatcaagggtctcatatttataacttttacagccatcgtggtaatcctaatagcaatccctggcatgacggttctggacatctttgtttgcatccttgccttcatgcccactggatggggtttgctcctgattgcccaagctatcaggcctgtgattcaaaagatcgggctgtgggggtcgatcaaggctcttgcccggggctacgagatcctaatggggcttctcctgttcacgcccattgctttccttgcctggttcccgttcgtgtccgagttccagaccaggatgctgttcaaccaggccttcagcagaggtctgcagatctcccgtatcctgggaggacacaagaaagaccgagggacgcggagcaaggagtagtagggctgctgattgaaggtccgtctatcgggagttatgtcgtcctggagcggtctatcaggttcagagaatattagggtccgtatgtatgtatgtgtgtgtcgcacctagcaccagtagtatgtatgtatgtatgcgtatgtaggttcagagaatattagggtccctatgtatatgtatgtatcaggattgctatggtcttttggattggaagatctgagatttgctggtgcaatggccagtatctgacatccaaatgttgaaactataattaggctctgctaatagttagctaacttacagctaacaattagtttattagctggcttacgactaagtagtcagattaaagttgggatgtcggtcgccccctttaggtttagttaggctcgttccaatgggtggcgagagc

SEQ ID NO: 40058 - DNA, 1500 bp, Zea Mays
ctccacccgtgagccgctcccccttccgtcccggccctcccgcttccccgaatcccggagaaaccgccgccatggacaaggccgcgctggtggctgagaacagcacggacgccggcgggtcgtcgtcgtcgttctcgggcctgcgcgcgtacgggcgcgcgctggcgcagacgccgcggcgcctggcgcggcgcgcgtgcgccgccacggcgccccgcgaggagatgagccgcgtgcgcgcgcggtcgggcccgcgcatggcgcgcgcgctgcggtggtgggacctggtggggctcgggctcggcggcatggtgggcgccggcgtgttcgtgaccacgggccgcgccgcccgcatctacgcggggcccggcctcgtcgtgtcctacgccattgccggcctctgcgcgctgctctccgccttctgctacaccgagttcgccgtcgacatgcccgtcgccggcggcgccttcagctacctccgcgtcaccttcggggaattcgcggcattcctgacgggggcgaacctgatcatggagtacgtcttctccaacgccgccgtggcgcgcagcttcacggcgtacctcggcacggcggtgggtgtggacgcgcccagcaagtggaggattcctgtgccgggcctgccccaggggttcaaccaggtggacctcgtcgccgtcggcgtcatcctcctgctctctgtctgcatctgctacaggcctgctgacggcggcgctggcgctgttcacggagctggacgtgctcctgaacctcgtctccatcggcacgctcttcgttttctacatggtggccaacgccgtcgtgtaccgccgctacgtgggcgacccgtgccccggctccggccagaagaggagggcctggccggcgctggccttcatcgcggccttctccctcattgcgatctccttcacgctgctgtggcagttcgcgccggggggcgccgccaaggtcgggctcctgtccgggaccgcggcggtcgcagtcgccgcggttgtcgcgttccaggcgctggtgccgcaggcgcgcgagcccgagctgtggggcgtgcccgggatgccctgggtgcccgccgcgtccgtcttcctcaacgtattcctgctcggctcgcttgaccgcccgtcgtacgtccggttcggcttcttctcggccttcgcagtgctgttctacgtgttctacagcgtgcacgccagctacgacgccgaggagggcggcgcggtggacggaggcggcggcggcgacaagctgcaggaccaaggatgcgatgtgtaggcgtgtagcagagtggctgacgtaggcagacagctcagccttccttgatctaccttttgctttgtttttttgttatgtttagatgtttttagtaggttcttagaactaattgtcattgagttagtgctgatgcatgtccgtgacaccctcgagggaaaaacaacctgaaggaaatagagagagaaatgacaggcagatgcaagatgaaatgcg

SEQ ID NO: 40059 - DNA, 1620 bp, Zea Mays
cgcgcggcgcctccgcaacagcaaccgccgcgcccgagcccctccaccatgtcccattcccaccgctaccaatggcgcccgagcccgagcccaaacccacgcgctgcggcggccgagatcctgccttcaacgacgcgaaccccatcccccacgcgccgcggcggccgagatcccgccttcaacgacgcgaacgccaacggagcccgagcccacctcgccttcaacgcccctgcctccctctttctcctcctcccccgcatgcttccactgcttctctccagcggcgccgccaccgtccctctcgctccagcgagatccagatccggcgcggctcagagtggcaacgcgccgcaaccgcggccgcgccccacacgtgccctatccaaccaccatggagctcttccccatccatccaccacgccgagcgggaggtcgaagtgcgagcgctggccgaccaggcggcccacatagaggccgaggcgcgggccgtcgcgtgcaagaaggtcttccgctcctaccaggcgcttggcggacaccgcgccagcaacgtgcgcggcggcagaggcggctgctgcgcgcctcccgtggctcctccggccccacccccgcagccccagccgccgctgtcgccattgccggagcaccgtgacggaggcgaggacgatgacatgaacgcaaagcagcagccgcgcgagtgtccccactgcggccgcgtgttcttggggcaggctctcggggagcacatcatgcagtcccatgtgtgcgcctcgtcgccgcttgccggcaccgccaccgcctccaccacctcagccgccactcctgcgtcaccgaccaacagtccctccatgatcgatctgaacgtggcgccgcagtccgaggaggtggagcactctgccgtgtcagatccccgcttcaatccaggtgcctgaagctgaagcaggcagatcagcgccctcattctggatagttccgttgctcggaggtgattctaggttgagctttctcttgaagctgcaaatttagcacagggaaatgcaactctaggaataagtgactcttcagcagtatctgcaacaagagccagggcactggctgaggatgcatttttccatccatccattatgtcaatcagttatgcttcagtagagcactatttcgccatttacatgatttgagatcgagcgaagctaagcttttcatcaagatggcgctttgttacaggtggccaccacaagcgaggggtctgcttcaacttcttgacagagacagatcggaggctttcttggcaatggaaagttttgttggtagtagtattagctttatagggggacatgtcattagggttgatcttgtgcttttgaggccttgcttacaggcacggtactactgaaatagttagcaaaagatggcaatactgatgtaatccagaatgtagcagtacatatcaactgccgtcttagtttcagttcatgaagtgaataatgcataccaaactatgtcccagttcaaagcatctagaacagtgaagtattatgtctgtcgcgttttctcattctgataattcatatcaactgcttgtgatgctttgccattatggaattgagtatgctgtgagttcag

SEQ ID NO: 40060 - DNA, 3009 bp, Zea Mays
atcgccttcaccgccacacgctgccacgcgccatatataaccagccgttccctcctctcatgctcccctttccaaatccgtctccgccctcacgcacgcggcccaactagcctaacaaaccctagctagatttagaaaaaaaatttgtccccaatccgaaccgacgaggagctcgccgccgtgagatgtccgagtacgacgagcgctaccagggcaacggcgacatgcccgcagccgaaggcggctatccgcaggccgagtacgccgccgccgccgcgcctgccgccgggggttcgccgcccgcagacagcaagccctccgggttctccgaccacgccgacggccgctcctcccagcaccagcacgagacacaatcacatgacagtggttcctcgaaatctcgagaaagggaccgagaacgcgataagggcaaggatagggagcgtgacagggatcgtggccgagaaaaggggagggaccgagacagggataaggatcgtgaaagaagtgacagagatcgcgatcgccaccacagggaccatcgagagcgcagcgagaaaagggaacaccgtgatcgttctgatgatcgtgaccgtcaccgtgatggtcgtgaccgccaccgtgatgatcgtgattctgagagatatggtgctgtattctttgctaatgtaggagaagagatcgtgacagagatggtcatcgtaggcatcgctcccgctccccttctaagagtcgtgaccgtgaccgcagatctagatctcgttcacgctctcgatcaaagagcaagcgcgtgagtggttttgaccaagcacctccacaacatgcacttcctattgttgctgctggtgctatccctgaaggcaaccttggcgcactttgtcacctgctgccaatggattgagctgactgctgtagctttgatgtacgaggacactatctggtcagcttcctggtatcactgctcctattcccggggttggggtgcttccgaacttgtataatttggctgcaggacagttcaacccccttgttattcagccacaagccatgacacaacaggctacccggcatgctcggcgtgtctatgtgggtggacttcctccaacagctaatgagcagaccgttgccatattcttcaatggagttatggctgctattggaggaaacacagctggtccaggtgatgctgttcttaatgtctatataaaccatgacaagaaatttgcttttgtggagatgagatctgtggaggaagcaagcaatgcaatggctttagatggcataatgtttgagggagcaccagtgaaggttagaagaccaacggactataatccttccctagcagctgctcttggcccgagccagccaaatccaaatctcaatcttgctgctgttggcttaacacctggctctgctggaggattagaaggtccagaccggatctttgtaggtggtctaccatattatttcactgaggctcaagtgcgggagttgctcgagtccttcggacctctgcgtggattcgatcttgtgaaggatagagaaactggtaactcgaagggatatgccttctgtgtttaccaggatcttaatgtcaccgacattgcctgtgctgcccttaatggcatcaagatgggggacaagactcttactgttaggagggcaaaccaaggagcttctcagcctaggccagagcaagagagcatcctgctgcaggcacagcagcaggtgcaaatgcagaaactcgtataccaagtcggaggtgccctgccgacaaaagttgtctgcctgacacaggtagtgacagcagatgaactgagagacgatgaggaatacaatgacattgtggaggacatgagggaagaaggacgcaaatatggtaaaccgcacgaggcccatcgagttctcttataccttctttgttttaaaagctcttacattcagctgttatgattatgattgcctaccctcagttactgaattggtttccttttgtgtttttgtcttttgtgtgtcttttttgtagtcccacataatgccattgcagagtgttttatagtccgaccctatgcaatattggcaatcgggctttaacccacagaagacactattcttttgagtttgattaatcattatatcattagcctcttgcctatatatctctactcactaacacttggacaggtaacttggtgaaagttgtaattccacgacctgaccccagcgatgctccagttgctggtgttggaaaggtgtttttggaatatgcagatgtcgagggctcgaccaaagcaaagacggggatgcatgggcggaaatttggcgggaaccaggtggtggccgtgttctatcccgaggacaagttcgctgctgagcagtatgactgaaagttgtagaacctgttctagagttgcaacacacaatgtgtgtgttttttttaaaatctttgagggtaccgttttctcttgaatttgaatcttatctagttataagtttggtgcaggaccagtcgataagcgataagtttgtgcaggaccattaggctttgtttgggtaattagtattgatcccaatccaaatctatatatgttaatgccttgttcagttattcttattccatatggattggagtgtatcggaatgagttttgacttgctatagatttaaacaaactcaatatcatccattccacatggattgacgaagaaatgaacaagccctaaggccttgttcggttattgatattacatgtgtattggagtgtattgggtggaattgagatgaattttgacttgttatagatttaaaccggctcaatcccacccaatacatgtagattatcaccaaaacgaacaagccctaaggtggattggggtcaatactagagtacccaaactaggccttagttggagggtttgtacttgctactagggcagctaagatgaattcattcgctgtttgttctgggtccattgtttgctcaaattaacaggtgttgttatggtgctg

SEQ ID NO: 40061 - DNA, 2552 bp, Zea Mays
gtgcgcccgcctccctgcctgtggtatgtggaagtgaagtgtggatagacagcgcggcgagacaagcgaacctctgcggcccgcaggctccagcgctcatccacctctcatggccaccgccaccgcttcccgcctcgccgtcctcgcgccgcggccgtcgcgccccgcaccggggcgccggcgacatgctcctgctaccggtcgtggtcctcccctccctcgcagtctctacgcagcgccccgcggccgcgttctctgcctcgcggcccccgcgcccgctgctgcctccaccaccgacgccggccaggaccgcctccagaaggtgcccatttcgaatatcaggaacttctgcatcatcgcgcacattgaccatggcaagtccacactggcggataagctgctggagcttactggcacggtgcagaagagggagatgaaggagcagtttctggataacatggacctggagagggagagagggatcaccataaaattgcaggcagctcggatgcgctacgtcatgaataatgagccttactgcctgaatttaattgatacaccagggcatgttgatttctcgtacgaggtttcccgctctctagctgcctgtgagggcgcacttcttgttgttgatgcttctcaggtgcaatatatatttccttactggtgttgaagctcagacgttagcgaatgtgtaccttgcattggaaaacaaccttgaaatcataccggttctaaataaaatagatcttcctggtgctgaacctgatcgtgtcgcacaggaaattgaagagataattggattggactgtcgtgatgcaattcggtgttcagcaaaggaaggtataggcatcactgaaatattagatgcccttgtgaccaaaatccccccaccaaaagatacatcaaaagatcctctcagggctcttatatttgacagctattatgatccatacagaggtgtaattgtgtacttccgtgttattgatggcagtatgaagaaaggggacaagatatgttttatggccaatggaaaggaatatgttgctgaagaaattggtgtactatccccaaatcagatgcaagtttctgaactatatgctggcgaggttggttatctctctgcttctataagatcagtagcagatgccagggttggtgatactattacacattattcaaaaaaagcacatcatgctttaccaggatattctgaagccactccaatggttttttgtggcttgttccctatagatgctgatcagtttgaggagttgcgggaagcgctggaaaaacttcagctaaatgatgctgccctaaagtttgaaccagaatcttctagtgccatggggtttggcttcagatgtgggttccttggtcttctccatatggaaatagttcaggaaaggcttgagagggaatacaacttgaacttaataattactgcaccaagcgtggtataccgtgtgaactgtgctgatggtgaaactgttgaatgttcaaatccatccttgcttccggagcctgggaagcggaggtctatagaagaaccatatgtgaagattgaaatgcttacaccaaaagattatattggttcaataatggagctgactcaagacagaagaggtgaattcaaggaaatgaacttcatcacagaaagcagggccaaacttatttatgagctaccactagcagagatggttggcgatttctttgatcaactgaaatcacgaagtaaaggatatgctagcatggaatattcagttgttgggtacagagaaagccaactagtaaagctggatatacaaatcaacggggatcctgttgaggcgttgtcaacaattgtgcacagggataaggcatatgctgttggaagggcacttactcaaaagctcaaggaacttatacctcggcaaatgtttagagttcctattcaagcatgtattggcacaaaggtgattgcaagcgaagccctgtctgccatcaggaaggatgtcttatcaaaatgctatgggggtgatatatcaaggaaaaagaagttgctgaagaagcaggctgaaggaaagaaaaggatgaaggcaataggaagggttgatgtccctcaagaagcattcatggccgtgttgagactggaaaaggaggtgctatgaaagtgctcatgaacctttgtgtctccgtaaattaaagacctcttcctgtgcgccactcacaagtatagtcagacgagagctttgagacaacaggcattcactatggttcaacctgtccgctctggaccataggaaccagtcaagcacagatcactcccagaacaaaagcaggtaaatctggcattcgttcgctattttttgcttttttatgtgtcaggctatgatggtaaaacaatcatgtcgccacagagttttgccaggcacatataggaaattcatatgtcaaagtgcatcatgtagtccaattccttgtaacgcatgctacagagacttgtttctacagttgaatataccttgtaaggctgggaccaacagatcgtgcatatgcaaaacaagaggttt

SEQ ID NO: 40062 - DNA, 261 bp, Zea Mays
tataaacctattatattatcatttcgattattagtttgtgtaaacttattataaagcatattaggtgcaagtgataattataatcgtttattagatgaaagacatgtaccgagaggcgttgtggcagaagagaggtcgtcatcgggagttatatccggatgtatctagtaaggatgctcctgttcctcctgaattccccgtgcctaactatgactgtggcagactggcttgggtacatcaatcacaacatccagacacggc

SEQ ID NO: 40063 - DNA, 4079 bp, Zea Mays
agcgacttcgtctgcttcgcatttccccccaattctctcccgcccaaagccccaaaccaccacccaaaatcctctctgccgcccgccgatggccaccgccgccgccatggccgatgacgacgacttcgcctcgccgccgctcgccccgcgtgcgcgggaggaaggaggaggcagaggcgtgtaccaggtgggcggcgtgccggtggagttcccctacaagccctacgggacgcagctggcgttcatgggacgggtcatcgcgacgctcgaccgtgcccggcggcaggggcgctcccacgcgctcctcgagtcgcccacaggcaccggaaagtcgctctccctcctctgctccgcgctcgcctggcagcggcactacccgctccgttcccctcccgcccccgatccattgctccacggcggaggattcgtcccagatgatacgcagccgcagccgacgccagtcgtcccggagaaggctgtcaagaagaagaacgccccgataatctattacgcgacgaggacgcacgcgcagataagccaggttgtccgggagtaccgcaagacgtcgtaccgagtgcgcatggccatcttggcctcaaggaagcactactgtgtcaataaatttgcttgcgcgagcgacaacattgatgagaaatggaatgcacagaaactaagtcggcatccatcccttcagattggtggctgctatgaagttcacgatattgaggatcttgtcagagttggacagaaagcaaaaggatgtccgtattttgctgcacaacacatggcagaagcagcccaattggttttctgcccatataactacctgattagtccggttgtcaggagagcaatggacatcgatatcagtggttccatcattattcttgacgaggcacacaacatagaagatatagcacgtgatgctggcagtattgacatcgatgaagaatcactttgctatttaaaacagatgctaaagctaattcactatggcgaagtgttgcagggagaacttcaaaacctggccgctaatgaggccgttgcaatgatataccaacccttgcacgatattattcaggctcttattggttggattgctgagagggaggacaatttgcataatcatgagttcggacatccggcttcatattggactggtgaaaaggcaatgaatgaacttcagcgggctggtatttctccaatgtatttcccggtattgcaagaatgtgcaacaaaggcaattaaagctgcttcagatactgaatcagatggttcacacttaagtggtggtagtgctatgacactagagagtctattctcttcgttgagctacttttttgctcagaaaggacgcaattcatgtgattatcaacttgctttgcagcgttttgttaaaaaggaaggcaaggacgtaatttcttcaacatgcacaatgagtttgtggtgtctcaatcctgctgttgtttttcaagaaattgcagatcgaacactttcggtaattctgacttctggaacactttcaccaatgggttcctttacatctgaacttggtgtccagtttgaggcctgcatggaagctcctcatgtaattaatgctgattctcaggtttttgcagctgtgctatcatctggtccaacaaggcagatattgaatgctagctataaaactgcggacaattcatctttccaggatgaacttggagcttcactagaggaaatatgcagaattgtgcctggtggtgctctagtgttttttcctagctacaagttgatggacaaattgcaagtgcgctggtctcagacaggtcaatgggcacggcttaatgctcaaaaacatgtgtttgttgagcctaagggaagtagtgaggaactggatcctgttttaaaagggtactatgacgcaatccttggtaaagctcctgtcaagaaaggcagaggtggttcaaaacaaatagcgaagaatcgagtgacaaaaaaatcatcacaggaatcagtgaaagcaggagctgctcttcttgcagtttgccgtgggaaggtatctgaagggattgacttcgctgatgacaatgctagagttgtggttattgttggaattccttttccaaatataaacgatgttcaagtaaagctgaaaaggagatataatgattcatacaaatcatcaaaacatctgttaagtgggagtgaatggtactgtcatcaggcatttcgtgctttaaaccaagctgcaggtcgttgcattcgtcataaatctgattacggaggcataattctgattgatgagcgatatcaggatgacagaaatgttctctacatttccaaatggcttaggaatgcaatcaagaagtatgatagcttccaggagacaatggctaagttgcaaaagttctttcagaatgctcaggaaaaaataaaaattaaagattgtggcatcttccccaaggttaagttggataatgaagcacctcaatctttcagtgatgataaaagaaagttgccgtggccagaattgagttcctcaaaccactcagtatcacgatgtaatcagaaggtaaagactgaatgtcttagtcagaggattccagacattgatggtgtggcggtaaaccaaaaagttgtgggtgtagccaatactggagcaaattatggagtcaaaacagaaattataaaattggaggaggatgattttaaacctagagatcactatcttaaatccattagaagacaggtcacggcaacctactcttgttgagggaacttctgcagcgactccagtagctagtccaagcaactatgctgaggtaaacacctcagtaaatatcaacaatggagatcagattgcagacatgtccatttctcctttttcaacaaacagaaatctttcttccctgtccacactggcagctactcctgaaaggaccacagacaaagactgtcatgattcttttattaacagaagtgtaaattctcactatgagaaaaagagaaggttgagctccccaatgagttgtacttacacgacgcagtctagtcctccaagcaaatcattctgccacactggttctgttatgcctggggatttgaatagaaattctgaattgtgttgtaaaaatataggattgtccaggtgtgaaaatgtcaagtttgaaagaaactacagtccagaagaggtttcagcaaagaagtctatgcaaaagaaacttcttataaattgcattagatgcaaaacagctcttgggttagaagaagatgggtttcttgttacttgtacacaatattattcatcaaaattgtacttggcatatcttttgaaacatgggctatcaacttttggcatcctggaggatgatttttcagcatcgacaccaacagaggtacacgtagtgcagtgtgaagcttcgtcactcaacaaaaatgtatttggcaaattcagcagccagggtcatgtttggtttgcaaaggatggatgtgtatacaacgcaatgacctgttctttgtgctcttctgaaaacacaagtgccatggtcctcggtgtgcaagttcttgcaactgataggtcaaatcaacaattggtggaaaaggtgctcttgttcagtgatcgtttggatgtccagtctgagccatcaaagggacagatttcaagaactcgaagagatgctagtaacatctgccagcaatctgtgatcgaccttgattcttttgcatataaaccattaaagaaagatcctgtggcgctgaactcaagaaggtctaagcttaggttacctgccccgaacaaatccaccactggtacataatttgatggagagtttgagacaatggcgatctttgccgtgaagcattgggaagaactttgttctgtgagatatgacatgcggggagatgcagatgttacgtcgccatggagatttatagtttcaaacatccacatggattagagaagttccctgagctgaagtagggtgtaaaatgcatggcctggcagtagaaaattaggatgctgatgtctatatccatttacatgcgtcccattgtcgattatatctatgaacagtttttgcgttctgaaatttcgc

SEQ ID NO: 40064 - DNA, 1877 bp, Zea Mays
cgcgacgcactcggcgcccggaacgcaacgcagcggcaaaagcgacactgccagcagcgagcgggtggaaccagaccagaccagacatgtcgacgacggagccgctcctctcggccggcgccgagaagaagaagggcggcaagggtccgcgcgtgggcatcgacgaggcgctgtcggcgcacgcgggggagttcgggcggtggcagctgcggcacttcgtggccgtgtcggcggcgtgggcgctcgaggcgctgcacaccatggtgatcatcttcgcggaccgggagccggcgaccgtgccggtgccctgcgccgccgccgggcgggagtgggccggtggcggcggttcaggcgccgctgcgtcgaccgtcgtcgagtggggcctcgtctgcggccagcgctacaaggtcggcctcgcccaggccgtcttcttcgccggctgcatgatcggcgggcgtgttcggccacctgtcggactcgttcctgggccggaagggggcgctgcaggtggtgtgcgtgctcaacgccgccttcggcctcctcaccgcgctgtccccgaactactgggcctacgcggcgctgcgcctcctcacgggcttcagcgcggggagcgtgggcgtgctggccttcgtcctggccaccgagcccgtcggccccgcccgccgcggcgccgcgggcatgtccaccttctacttcttctccggcggcatcgcggcgctcgcggccgtcgcggcgctcttccagggctcctggcgcgcgctctacgccgtcacctcgctcccctcgctcgtcttcgccgtcgccgtcgtgccgttcttcgtctccgagtcgccgcggtggtacctcgtgcgccgccgccccgacgacgccctgcgggtcatccgcgccatcgccgccaccaacggcagggccgtccctgaggatctcaggcttaagctcgacgacgaggagccagggaacaaggacgttggtgggagtacggcgcatgcggcgtcctcgggctccatcgtcgacgtgttccggtcgccgaccacgcgggtgcggcttgtgctctccgtgcttatcaacctcctcagctcggtggtgtactacggcctcagcctcaacgtggtcaacctcaagaccaacctctacgtcaccgtcgtcgtcaactcgctcgccgagatgcccgcctacctgctcacggcgctcctcctcgatcatttcgggcggaagcctctcgccatcggcaccatgctgctcagcggcgtcttctgcaccgccgggagtctcgtacccggcgcagggatcatgagggtggcgtgcggcgtggtgggcatcttcggcatggcggcaacgtacaacctgctgttcatctacacggcggagctgttccctacggtggtgcggaacgcggcgctggggtgcacggcgcaggcggcgcagatgggggccatcgtggcgccgctggtggtgatgctcggggagaggctgccgttcgcggtgttcggcgcctcgggcatcgtcggcggcctgcttgtcttgtacctgccggagacgatgaacaagcccctgtacgacaccatggcgggtctggaggaaggggagaagaacgttgtcaagtgacacatgttgggatctcagatcagatgaaacggtcttttgtagtctcgtgttcactacgatcgaatgtgcaatagtgcaagatgtcgcgaggtgatgaattccacaaagacgaggagagttagtgctggcttactgccaaggagtggggatctagcggtgctgtttttcaggttacgctagtgtacatctaagcgtccagcttgtgcccgactacacatctccaagtttaacgaagaattgtttttcctcgttttccggaggatggaaaatcc

SEQ ID NO: 40065 - DNA, 419 bp, Zea Mays
tgcgtgcgagacgtatacgatacgccgctgatgttggcacgtgggaggttcccctccccccttggctaaccaccaagctatagcaacaggtgacctgtgatcagtggcgtccattagcgtctcttgtccccgattagctagctagctatacgcctatacctagcccacacacacgcctctagcctctctctagctcggcttgtgatctcgcgggcccggctgtgctcgcgggcaggacagcaagagcccttgacggcgatggaagccttgtgtgttgggttgcaatcatgcttgcactacactgtaatctcggctggcggcgacgtcgttcgatcgagatctgcccgattggctttagctgccacgcgcacgatgacactacacaaccaaccaccattatgctcttttcccgcctgggg

SEQ ID NO: 40066 - DNA, 2270 bp, Zea Mays
cttgcttgcataattgtctcgtcgccaagtgagctactcactcagtattccacgcttgacactccgtgacggacgcgcgccctttcccctcttctgcgactcattccggagcgcgctgcctccgatccgcggcaccgcgtcgcgtccgccgatgacgagggcgcacctgccggcggcggcgcagcggcggccgacggtggcgctgcttctgggcctggcgctcgccttctgcctcgccgtcctctccatccagtcctccttcttcgccgccccaggggcgccgggcaggaggctggatctggacgccgacgacgtgcgcgagctcgcggggttccagtcccgcgtccagcagtgcgtggctagcagaggacttggtctcacagcacatattattgatcactgcaagctggtccttaaatttcctgaagggaccaacagcacctggtataatgctcagttcaagatttttgaacctctagaatacaaatatgatgtctgtgaaactatcctattgtgggaacagggaatacttggatgtgaggccggatggatggttggattatgcagctaaaaggatcgcacagcttggtgctgataaatgttacaaccacactctctgtgatgaacttcttagcattttactgcctgctaaaccccctttccatccacgccagttcgcgacatgtgcagttgttggtaactcaggagatctcttgaaaacagagtttggacaagagattgatgcgcatgacgccgtgtttcgggacaatgaggcacctgtcaataagaaatatgcaaaacatgttggattgaaaagagactttcgactggttgtccggggtgctgctcgaaatatggcaccaatactgaagggctcctgtaatgctgtaatcctgatttcttccaatatactatttgtcccttttatataatatgctgtaatccggatttatataatatataactacattcgtgttaacaaacaaatgcaaacttattatcgtttttacaagttccatttatggctgaagttaatgttatcgaatagagtttacatgggtggtaaatatttctgttatagcacatgtgggctgcttttgaaacaagatgtgactatcttgctttccctgcagccgatgaggcacttatcattaaaagtttgacgcacaaagaaatcaatgcggtgataaaggaacttccaaatcctgtctacctttttcaaggtatagttttaagaagaggtgctaaagggactggcatgaagtccatagaacttgccctttccatgtgtgatattgttgacatgtatggttttacagttgatcctgggtacacggaatggacacggtatttctcagcccctaggaaagggcacaatccactgcaaggccgagcttattatcaacttctagaatgccttggggtcattcgtatccattcccccatgagagcacagagagtggaagattggtcagacataccaagcaaagaagagatcagaagggcacacaccatagcttttcgtctaaagaagcatgaaactggccagctagctgaactggggccatttagcaactgcaaggtatggggaacagtcgacccagactacggaccggtatcaggtacttcagacatgagcgagacgcgcaagaattcaaactacagcaagtgggagttgcttccgtttgagaagctgagaagagaagcgcaagaacaccatatccaaatgggtggcgtgtctctatacaagatggacggaaacaagttggatgatcttgtctgtgtgaggcatcagcgttcatcaagttaagaccgtggccgcctaagcctagttgtttggacgctgaattgatttcatggtggatctgaaaggatgctagacagcaagagccagaagatccgatgaagcagctctgctgtacccacttgtaaaattacatgagccatcgggttcagagcgaggcagccctctacctggaatatggaattcttttattggttgttttgggacttgtagccttctaggaatagctacttaagctgtctaggggttgttatgcgcacaccacatgacatggttttcacttcttttaacacagctgtaactgatgcaaatgggtcttgccatttctcaactatgaggtgcagttttgttaccgatccagcagtctctcgattccaaattcgtgacgtttgttgttaactgacaccttatttgactgtcccagttgagttcatttacaggattaatggatacccttcaatcttac

SEQ ID NO: 40067 - DNA, 1779 bp, Zea Mays
ggaatgggagtcgtgccccaccggcggcagcagcaccggtgacgccggcacgcctaaatgcgtcgtcccctcgcctctgcggccctccgcctccgcttcttctcttccacctcccctgcccgccttctctcgccctgcccattccttctatcccgccgtgacgacgacggcggccgcgaggcctcctcgtcgccgctgcccccgctcccgccttctggctcggctttctccccacgcccgctcctcttctctgcatcagctgccgcgggcctcttcagcctccatggcgggtggtggaggcaggctcttcctcctgcagcgtcgcggcccctcggctccgtctctgacgcagctcccgtccggctcaccatctcccgcagttattctctgcgtgtggccaagggcaagaagaaagcacattttgacgatgaacacagccatcgagcggttaacatggcactatggtgcaacttcctcgttttctccctaaagtttggagtgtggatttcaacttcaagtcatgttatgctagctgagcttgtgcattctgttgcagactttgctaaccaggctcttcttgcttatggtttgagcagctcaagacgtgctccagatgctctacacccctatggttattctaaggaaagatttgtatggtctctcatatctgcagttggaatattttgcttgggttccggtgctacaattgtgcatggagttcaaaatttatggaattctcatcctccagagaatattcactgggctgcattagtgattggtgggtccttcctaattgaaggtgcttcactgcttgttgctataaaggctgttaggaaaggtgcagaagcagagggaatgagtatctgggactatatctggcgtggtcatgatccaacttccgttgctgttatgactgaagatggtgctgctgttacaggccttgctattgctgcagcatctttggtagctgttcaaatgacaggaaatgctatgtatgatccaattggctcaatcattgttggcaatttactggggatggttgctatttttctcattcagaggaataggcatgctttaattggccgggccattgatgatcatgacatgcaacgagtccttgaatttctgaagtctgatccggttgtagatgctctttatgattgcaaaagtgaggtgattgggccaggtttttttagattcaaggctgaaattgatttcaatggagttgttctggtacaaaattatttggaaaggactggacgtgggagttgggcaaaacagttgtgagagctatctcatggagccggtcacggacttgaagtagcctccgtgcatttgcgagaagaaggctttcctcaggtcatgaattcgaagcagctttacttgtagaggaagttccgggaagctgcaatgtccaaggatgatacggaattgctaagggtcatggccaactacggggaggatgtagttgaagctctgggatatgaagtggatcggctggagtctgagatccaaaagcttgtgcctgggattaaacatgttgacatcgaggcacacaatcccgaaggacttgctcttagagcagaagttttgtagattacctgtgtacattgcatttgattaacactgttgctggtcgctgccagtttgatttgggtccaccaccattcgataagattgtcttccattggcaatgtaagaatcagatggctgttgttgcgtagcgaggcggtttttttatttggaagaagacgtggtcgcgcctgacatggaaggctt

SEQ ID NO: 40068 - DNA, 317 bp, Zea Mays
ttttatcatagtctacaccatgaatctgcttgaatcctttggccaccaatcgtgcttcatatacgtgaacattttcatccatgtctgtcttttccttgtaaaaccacttgcagttgataggacttgcaccatcgattggatcactcaagttccaaacttgattgtcatgcacagattgtatttcggattccatggctccaagccacttatcggagttagatcccatcattgcttctttgtaggttgcaggcacatcattgtccaacaataatatgtcacgatgctccgtggttaggagtgtgaacttttgagttacg

SEQ ID NO: 40069 - DNA, 2022 bp, Zea Mays
cttcactgtaggcgtccacaggcttggttctgccatcgcgctccgtccgcgatcccctccccgcgcccgatcctccacgctcgatcctcgaatcccgcggcttccttcgatggcacgaccccatccatctcgccagtgtccgtggtcccctccccgcgctccccaccacgacgacacgaccccatccatctcgctgctgtccacgcccagtcgcgcctcccacgatcacgcccacggacgcaacctccctccctccccgtccccgttcatgtcgcccccgtccgtgatcccctccccgccctcctctccgcgaccccatccatcctgtcgccgtccacgcccagcagcgctcaaaagcaaaaaagggtacgaatacgaatcccaatccagggccggagggcgagcgaactcaaaagcaagctgttccagtccaatccgccccagtccaaatctaatcgccgggtttaggcagaaggggtgggacgcggcgaggtttaggcggggtttgttttgtccctttcgtgcgattctgctctccgcgcgggaggcaagtactgacggaagcgaagaccaaggcggaggagggggtccccggcggtggaagtggaacgcgccgatgcgcaagtttcaggactccatcaaggccctccaggccgacatcgatcatgccaatgcgatagcagggtgtcggaattcttgagggactacgatggctcggtcatccagatgcgggtggcgtacagcgccgtcgcgcatttcctcctgcagtggaccgactgcaagctcgccggcgcgctcggcctcctcaaggttatgctatacaaggtgtgcgcggacggctcgtcggcgcttcctgattgggacatggaggccagcatcagggagttttacggcgtcattttcccgttgttgctgcagcttccgagtggcatcaccgagctggacgacaggaagcagaggaagctctgcctcaagaaattcaggagcagggatgagcagctctgggaggtggacacggagagggagcttgagtgtgggatctgcctcgaggttagccccaaggtcgtgctgcccaactgtgcccacatgctctgcatgcggtgctttgaggattggaaatgacacctactctactccgcagcttaaaacctcaagatatgtcggtaatcaaacaagtacaagtttcaaggaaatgggaatttcatggaaatacagacattgggtccatattacacattgatatgattttggctgacaaagagcgctgtctgaggtgcgtggtcaagtcgaggcgaagatgagcaaggaggatgtgctcaaggtgcaggtcttggattcaacatagtactagcagtttggaatcacccgacggggatgctttccatgtaataaatatttttggaacgtttcggatttaacttatgttgtttctattgcaatcaacatggtgtcactatttggattcaccagtaagaatatttgccatttgggcttgttaattagggtgaaattttatataaaacatgcctcgttcacttgctttccagttcttgatttcagatctctgaagccaattacgtacacattttcctaccacgacttttattctgctttccgtttctcaacgtcttggacattgccggcgagcgcggtctcctcgacaacttctactgctaactcgggtgcaagttgctatatgcagatgcccagcaaacttcccaatccagctgccggcaaggagatgaggttcccgacggcgacaattttccactacacaaccggattcttcagcagcatatggatccgttgaagcgccgtgtgacaatgccaccaaagagcagcaacaaacaagctcaaagtctccgctaaccactaatctcataaagcttgaattttctcattgctatgtttccttctcctagcaaagttaagatgtttgcacatttctagcttattaggtccttgtgtggaatgtgtttgaacaatgatctcatttaaacaatatcaacatgtgtgatatat

SEQ ID NO: 40070 - DNA, 2963 bp, Zea Mays
gggtagtatcaatccatatccgtctacccaatgggtaggttcttgcccattaacatacccgtggcggctggagatatcatcccgtatccgtctttgtatgggggtaaaaccgtcggttattcgggtttccgttatgtattgccatcgtctatgcactgcatttcccttcctcacctccggcgcaaaaccgcagcagtaggatcccagccggtcggccgcccaggatgccggagcctgcgtccccgccctcagcggcgggagccggccgccacatatccactccacatcaacaagggagtggagaatgctcccggcgcctcttcgatctcgacctccggccggcctcatgtgggagacgagggacgatgggctcccttccctcagcgtcagcgggttgtgaccccatatagccggatgtcagtcaattcatccatggcgatcaatccattcctcgagcaggccaaggttcttctctgggttttgaggaaggacccatctgcgatgctcatctaattaaggttacctggtcatcttgctactcggtcgcctacaggatcggatagcttactctatctataatcacaccgagcaaactgtccatcctagctacaatgggtagcacgcacaaggaagaagtaggtgtcctggaggaaatacttgacgggagaaaagagccgaggaagctatctttatcagttctaaaacacatcacaaatgacttctcgcacgagcgaataatcggttatggtgggtgcggagaggtttacaagggcatcctgcaaaacggaagcgtcgctgtgaagaaaatcttcagcaacctaaatgttgaagataaggaatttgatcgagagattcagagcatgatgcaggtgaagcatccaaacgtagtgcggtttattggctactgttctaacacagagcatgaactgatgagaaaagaaggcaagtatattaaggtcgaggtgcgagaaaggctgctctgtttcgagcatatcagcaacggaagcctccgcagccacattacagatggactaagagggcttgaatggcacgcacggtataaaataattaagggaatttgtgagggcctacatcatcttcacatggaaaaaaacatcattcacatggatcttaaacctgccaacatactagtacatgatcaaatggtaccaaagattgcagactttggtctatcaaggctggctgaagtatcacgtactatgagcaatgaacggcttttatccctgtgtcataatgctggagctggtgaccgggagcaaggaggagccggacattactaatgtacttcgacggtggagccataggtggaaaaaatcaggacagcgtacaccatcatttcaacgccatcaagtgagtaaatgcataggtttggctaagagatgcaaagaagtagaaccaacaagaaggccttctatatgtgatatacttgctgccctaggcaaaatggaagatatgaattgcagtgatcaacaagtggacgaggaagtcacttatctggaggacatgctaggaatcgagcctcttgatctgcatttcctagtcgaacctaccaagcagatatcctgctcagtccatctgaccaacgctacgaatgactgtttcgccttcattgttcagacgacgaacccgaagcagtactgcatacagccggacagaggcgtcgttccaccacgatctgagtgtagtgttgccatcgtattatcgcaagaaccgacgcataataagcgatgcagcatggaggacgagctaagcgtgcagagcaccagagtggatgagggtgtgacagctgcggatgtgagtgaagcgttgttcactggaaaggaagatagaacggtcgatcacgtgagcctgatggtcggtttcgacatgtcgccatcgccacctgaggaacaaacggaggacttcacgtttgcaccactggcgtcgttgtacgacgaggagccacagttaagcgcggcgaaggtatcagtatggacatccaatcagttggggcgttctggtcgcttctctaagaagaagctagtgtctattctgaaatcctggcgagcaagattaaaggtatcatcccataagaaactcgagactccaaagcatgactgtgagattcctgaagctgtagagcatgaagaagttgccgcgcccaggtgtcccaaaggaccactgccacagcgcgatctttctccactgggcgaagcatgttctaggatgaacatgacggcgatccatgagatcctagtgaacagacattacagagatgatgacctagacccaaacgtgccgtcgctcgaggaatggacacagcagagcagggatatgttggatgataggaaacgtggggacttcacttttcgtgataaagatttccgagcagccatagactggtataccaagtgtatggatgtggggccaaagaaggcgtcaccaacagttctcgttcgacgcagttgctgccacctcatgtgcggcaacctggacgccgccctccgcgatgcaatgcaagcgcagcgtcagtatcccgactgcccaacctcactgtacatgcaagcagtggcactttcaaagctagggatgcatagtcaagccatgggcatgctgattgaggcgtcggagatggaagcgaatcagaaaaagacccgaaaagcagcttaagaagactcaacatgggcgaaacctatataccttcgttttgtttctgtaagctattcttgattgttgtatctgcttgccaaattgtctaggttggagtggaattgggaagctttacctcttggggataatgcatttcttgttgtattcccctctgaggatgaaatgctccgtatggctgatattgagtataagctcaagagtggaatttctattcatatggattaggcctggagatgctaatccggcctattttttttggatgagatttgggtgcatgtttctggtgttccgca

SEQ ID NO: 40071 - DNA, 1582 bp, Zea Mays
gtacgggtctggggagttaatccccgctggggaattccccattgacatctctagttccatccatgtcaggagttgacacagatttgttttcctatttgtagcctatttcccctcatataaatactacagaagcagcaacagctgcaacaagaattgaccctcagtcgctagaacagcaaacgggagcacagccaaatatggtggcattaccaactggtaacatcgagaactggggagagtcagctatggctggtagccctatgactgacacatctacagatccagacactgatgagaggaaccagatgtttgaacaaggacttgttgctgtccccacagcttctgattctagtgacaaatcaagggacaaactagatcagaagacacttcggcgtcttgcccaaaatcgtgaagctgcccggaaaagccgtttacgaaagaaggcatacatccaaaaccttgagagtagcagattgaaacttactcagttagagcaagagcttcaccagactcgtcaacagggtatttttatttctacatcaggagatcaacctcaatcaacaagcggaaatggagctttggcatttgacatggagtatgcacgctggttggaagagcacaacaaacatgtaaatgagttgaggcttgcagtcaatgcacatgccggtgataatgatctccgtggtattgttggtagtgttatggcacactacgatgaatttttcaggctcaagggtgtggcagctagatcagatgtttttcatgtgctgtctgggatgtggaagacccctgctgagagatgtttcatgtggttaggtggcttccgatcatctgaggttcttaagcagtcctcccaacaagctgaagatgctctttctcaagggatggaagcattacaacagtcgcttgcagaaactctagcatctggatccctgggccctgctggaccttctggcaatgttgcaaattacatgggacaaatggcgatggctatgggaaaacttggcaccctagagaactttctacgacaggctgataatctacggctgcaaacacttcaacaaatgcaacgcatctttaaccacccgacaatccgcacgagccctacttgcaataagcgactacttctctcggctgcgtgctttgagttctctttggcttgcccgtccagggaataaattcaatttaactcataaataggatttttttttgtactgtctctagtatgtcaattagtttcttcacattgctcatgtgttgatgggatatttggatctaagatcttatgaatggatgacatgtatgtgttcaagtgaacgctcagttcatattttaggccatcatgggttaattttggagaaaaaacgagttgtaaatacatctggaataatctaagatcttatgaagggatgatattggaggataagatcgatgaacaaataatgcaacatcactgttgggtgatacgacacgatttatatctgaactaaacagctggatatctgtttgcaaagttatgttcttccaaagaatcacagtactgcataggccatccttttcatgaacaatcagtaaccatgtt

SEQ ID NO: 40072 - DNA, 818 bp, Zea Mays
gaggtattcgtctcgatttggagtctagccgccgacgtgcggaaccggggggaaccgctgttgtggttcatcgctgaaactatcggttgatcacgggaggaagtgcggggactcgcgaagggtgctccgtggtgaccaagcgggcgccggtgtggccgtgttcggtggcagttgctcgccgctgtagaggacgcccgggggcgggggaagccatcggcgtcaccaccgtccacatcgctgatacggtgctctgcccttgatcaactaagttccatgcatcacacgtagattgagggaaggggggtattgttgcgctgggccctggaattggtgctcaccgtagtcataccccatgtgccggtcgctacgcaatagagattgggtttgcatcgcattatttccatggtgctacccatcttcgtgtctgatacctcctaggctaagttagcacttcttggcgttcgttttaacctaagggagcgttgaggacgacttcgccggcggtgccccaccacgggctgcgcacgtgccgctggagctcgtggtcggagctacacgatccgcccgggctgtcgatcatgcgattggcatcctggaatttgacaaaggttaccggttcagggggataaattttaatcgttgatctatgagggagtgggtacgattagatcgttgtgtgcgttagactcgaccgcgagatcaggatcgaagggccatcgtaaacctcttgattttgatctgaagcatagaacagttacataactggatgcgaaccatgtacgtggcaggatcagcaattcacgtacacaacagttaca

SEQ ID NO: 40073 - DNA, 543 bp, Zea Mays
actggttataaagccataagaagtccagactcatcaaagtagtgttttgccatgaagaatgaaatgcagtctatgagaataaataaagtttgtgacctaaaggtcatttctaaacgagccaaaacaataggctgcaagtggaccaacaaaagcaagcgtgactctaaagagaacgtagaaactagaaagatataaagctaggcttgtagctaaaggattcacttagagaaaaggaatagattgcaatgaaaccttttcacatgtcttaactaaaaattcattcaagataatcatggcattggttgtgcattacaatttagaactccatcaaatggatgtaaagagtaaagacaacattcctaagcggagagttactagaaaatgtttacatgacacaacctaagggttttgtcacaagagaaaaagaaaatatgggccacttaagaaaagtccatttatgggttgaagcaagcttctagttagttataccttaagtttgatgagactataaaaaatacggttttgaaggaaacaagaaagata

SEQ ID NO: 40074 - DNA, 380 bp, Zea Mays
gtcacaccctaggtccgagtggaaaagacacaccataacccaagaacgatggtggtgcctcctgacatgcaagcagcgacaacaccgcacggggcatgaggatcgagcggcgtccacggaaggcatgaggtgcgtgcgacgatggtcgtgcgtgatatcctccgatccggtgcagttcaggcgccccaactgacgacctccctccgatcttctgtcctcgacggcatcctccgtcaactacctcatccaatccgtgttatgccttcaattattgtgttttatgcctaccacatgcactatttatgctaaaaacttaaggattttatgctcggacacggagttcatacatcagtttattggatgtcatttttgttgcatgc

SEQ ID NO: 40075 - DNA, 551 bp, Zea Mays
gagggggaatcgatctacctgccaaccaccacagccggaggattgttagacaaccacaacttgaaatgaatccttcgaatcctccatcggctgggacagatccagtggttgctgctcagatgcagatgctacagtagatggcaaacacgatgaatgaaatgcaggctcaaatgaggcaagaacgccaggagatgcgtcaggaaaggcaggagatgcgagaggagatgaggcaagaacgacgggaaacgcagcaacaaccaccactacctccaccaccaccacccgttccaccccgggacaagcactgagaattcatgagtcacaagccacctacattctccaactctccagatcccctacatgctgatgactggctgaaatcagtggagaagatgcttaatatcgctcaatgatctgatcgggagaaggtgctctatgcttctagtcgtcttactggccccgctgctgattggtgggactcctacattgctgcccatgatgttgtcaatactattacctgggcagaatttgctacacatttcagaaactac

SEQ ID NO: 40076 - DNA, 648 bp, Zea Mays
cgcgacgcgaaccagctgccgaggaactctagcggagcactgtgcaggcgaaggcggcgcgctaccagtgacggggggatacggcggcatcgtcccctcctccatccctggtgcggcggcgccagcctgcaggtgttgaatgctgatttgttgtggctgattaatcgggttgatcatcgattaatcgtgattagtcggctgatcgcccctctggcgatcagaaacgatcaggcaatctgaaaacattggccgccaaacctccagagcgactcccgcgagccgtgagcaccatagccaaatcaacgcaccagaagctttcacggagctgtctcgtccacgagtgtttcagctgactcctattccctgcgtcaatggcgagctctggcgatgaagggcgtgtggtggtggacctcggctccgcggcggagtcggtggctgccgacgaggaggcacacgccacgcctctccaccagattgagtccctttgcatgcgctgcggcgagaacgtgagtgctcccgtatctcgcctcttctgtttgggagctttttggaaccgtgatatcaccaacactgatattctaaaaataggtatcccgaacaacgcaattgaaattttagtattataatccgttgaactttggatttttg

SEQ ID NO: 40077 - DNA, 373 bp, Zea Mays
ccgctttggcgaaggccatggcgtcccaacctctagagcggcgggcaatgcgtgaggctggtttcacagagcagcgaataccatccgcttccaatggtggaaggataacgagccactgcactccaggcccacctaggctcaagcactctttctggcataccaccatttttgttttttggcttgtcttgcacacctactcgtttgccactgcagcccatttgtccaacctgcagcgtctagcaacaaccatcatcaatcgattatgtagccgatttgaacctctaggcactggtcctctggacgttcgatacattccacatgtaacatgttcttgccattttgtacatactagtgtgttctggttgagtttaca

SEQ ID NO: 40078 - DNA, 1404 bp, Zea Mays
gcgagctgcgagcaacagccaacagccaagaactacgactacggtacggccgtccaccgctctaggactacgacaacaagtcctaaccctagccccggtagccgccaccgccaggctctacgactacggcccggccgtccaccgctcggccgtccaccggtccaccgctctacgcgacggctccatcgctcggctgctccaggctccagcgccctccaggctccagcagatcccggaagcaccgaccacggtccacggcgagtcggcgagcagacagcacaggcgcacaacagtgacggcgagcagacagcacaggcgcacagcctccgcgcatccgcggtccgcgtccggccgtgcagccgcgcagtatactggcttcctaaaggatcaatgtcggctatctctgatcagaagaaacgcaccttggaagcccttcagcaacagtatactgctgcaaaagctaagaaattgcaagatgaacaggttaagagtcagaagaagagcaattttaatacccctaagcctaaatgtgatgcaccaaggggaagcaaaggtccagaaatcactcctcgacgaacatatgcccaaccttctcataaaggtgtagcattttctagttctaattgtcaacaaaagccttccacgtcctcaggtgaagaaatcaatcctgtgtatgctgaactttcttgtgcttttcatgacactttgtccaaaggtgttgtctcggatttggatggcacagaggttgttcacaatgttatatatgacataattcagaaaggtggagatgctgggaaaattacaaagggtgccaaaaagttgaaactggaaaaagggatccttttggataattatgttcagaggggttctagattagtggattcccaagcaagatctttgttgattcattcaaagcgatcaaaaaggcacatgtctctaaaacaacataagaaatgtggttcatttgatttagatggtacattccacaagtacgacctctataagccaatgcatgagatgtggaaggactatatcagagagcttatggatctgagcccgaaaaagaaatttactgagaaccttctttcagcagatcttcatggggcccttctaatagaatgcaaagctgcttcatataaaggtgtaaacggcatcatgattcgggatactgcagagacgtttggaattatatccgaggacaaccgcttccgagttgtaccaaaagctggttcagtgttcgtacttcaagcagatcgctggaagttcacactgattggcgacaagctctcgcccagggagaagttgaaggaggatcagcgtcaacaacgtgcacaatcgctaatcagatagtttccaatggtctgattggtttactgcgtccacacatacagtctcacgtgagcc

SEQ ID NO: 40079 - DNA, 1611 bp, Zea Mays
tttacttctcccgttcgtcccccgtgctctttctccctctcgtggcgctgggcgaccgcctacgcaggccaggcgccgtcgccctaagctacgccaggttcccgggtcttggtcggtcccttcaccggcgaagagcacccaccagacgcgccggtgcctggatccggaggaagtgctgcgggtttcggcggttcgtctctctcgttgtttccggcggggttatgaaggcggtgggatacaacctctacgatagcagcggaaaaagagagcttgattactgaactcaggaaagaactgagggtttctgatgaggagcatagggagctattaaataaagtcaatgaagatgggagcatccgtcaaatgagggagttaagacaggcaggtggaatcccaagtggtctgcatcgtggcaacagggttttatatgatgcagaacctgggcccactaccaagaggcaaagggcatctcattcgattccttcgcaatctgcaggcctccagtcccctatgatgccctcccactcagtttcatctgcaaaatggggtcctttgtcagcaagaggcaagaaggcgaagatggtgaattaaaatttgcctggctgattatcacattgccattaattattcagttgaagattgataaacactccttaaacagatggcacctgaagatataagatgggaatttgatggacatctttcaaatcatgatggctggggcccttctggccctatgctgaagaggcacatgaccaacaacggtgctatggcaggttcaatcaggggaagaggaaggttatcgataaatgagcctataaaagactatgctccacctcaaaatgacatcaataggaattttgattatattgacataccaaatactgaaagtgttgttactgaggtggagagggtgttggccaatccaaatatgcctgaaatcgagaaggcaaggaaactgctgaaagatcaggagcagtcattacttgatgcaattgccagacttgatgaagcatctgatagcgatagtggtaactgatatggctatggaagaccgaaggggttctgctggggtcctggggaatggaacggcattgctacttagttgttggaattggaagattaacatgcatctgtgtatcacctacctcgaccacagaacaaacaaaccacattatggcaaaaaaattgacatgccagaaaatggtgcctggaaactgttgatgcctgaaatgggatttgctggctacacaaaattgagcgcacgaggagcagggatatgcaaatgtcagaactgtttgaatggtgtttcctatgtagcgtagtaaaagtagcttaaatgttctagatgattagcacggatcacttagcattcctgattcagtataggtagatgtctaactctagcataatatccaacttggttgttcttgtactctaatgtgaaaaaggacgttgttcactcttttcatgttggctgcttggctaggactttgttgtgcacgcttttcatttatgctgctggacgtatcttattaactactaagagcatctctaagataggtcctaaacaaggttgtattttaaaatataggccctggagtcttaaaa

SEQ ID NO: 40080 - DNA, 314 bp, Zea Mays
atgacaccgcctcccatctcctccaggccgcgccagggaccgccattgactgcaagagagggagagcagtgtgggaggaagaggcccgtcgcacccttaacttgccgacgctgcccttctgcaccagtggggtggttctggggcatcacaagcacgtgggggatcttcgccgggttcgtgcgcagctcagggtggccggtgataaggcaattttttgccagagttatacacccgtcgtgagcgagccttgttccatggtcgagcccccgtcgccgttcaatcctctggtaagtcaccgggatgctatccctcta

SEQ ID NO: 40081 - DNA, 2592 bp, Zea Mays
ttttttttgattgaaatcctatagaaagtttttttatctggtcttttagaacaaaggattaagttgctataaatcctataaaatttctattgaatggagtatcatgtgattttggaggatttttaacatgaggtccaatctcttggaaatttctatgtgaaattgaaggtgttatataactctattcctatttttttctatccctatgttttacttatactccgttcctaatactccgttccaaaggaggccatagatcttgttcagcagcttggaatatcatgcatggaatctgaactatccaggtctgagctagctttgaacctgagctacctagattgaccacgtgataggtatgtccggttgataggcataggctagctagctgactgactggctaggctccccggccgggtcgtcgtcgtcctcgccgagtacatcagctctgcgctagattattgctttcgcttgcacagtcgttgcacttgtagtacaattcattcattcattcattaaaagcaaggaagaagacttggaactctgctagctagcagtagccagtagctagtgctaccttcccctgctccgacctctatctgtcgttctgtctatctcgtccgtcgccgtcgagccggctatggagatgcagccacagctcggcgactcttctccggaggacaagctcgccagccgccctctgacacccggagggcgctggccggactcgcagtggcggcccgcagaggagaaggccatcgacgactggctccccatcaacgcgcggaggaacgccaagtggtggtactccgccttccacaatgtcaccgccatggtcggcgccggcgtgctcggcctcccctacgccatgtccgagctcggctggggccccggcatcgcggtgctgctgctgtcgtggatcatcacgctgtacacgctgtggcagatggtggagatgcacgagatggtcccgggcaagcgcttcgaccggtaccacgagctggggcagcacgcgttcggcgagcggctgggcctgtggatcgtggtgccgcagcagctggtggtggaggtgggcctcaacatcgtctacatggtcaccggcggcacgtcgctgaagaagttccacgacacggtctgcggcgacgacgaccaccggtgcaagggcagggacatcaagctcacctacttcatcatgatcttcgcctcctgccacttggtgctctcccagctccccaacttccactccatctccggcgtctccctcgccgccgccgtcatgtcgctttgctactcgacgatcgcgtggatcgcgtcggcgcagaaggggaagtcgccggacgtgcactacggcctgcgcgcgacgacgacaccggggaaggtgttcggcttcttcggtgcgctgggcgacgtcgcgttcgcctacgcggggcacaacgtggtcctcgagatccaggccaccatcccgtccacccccgacaagccgtccaagaagcccatgtggaagggcgtggtggtcgcctacgtcgtggtcgccgtgtgctacttccccgcctcgctcgtcggctactgggccttcggcgacggcgtcgacgagaacatcctcgtcacgctcaggaaacccaagtggctcatcgccctcgccaacgtcatggtcgtcgtccatctcattggcagctaccaggtgtacgcgatgccggtgtttgacatgatagagacggtgctggtcaggaagtttgggttccgtccgaccctcatgctccgcctcgttgcccggagtgtctacgtcgggttcacaatgttcgtagccatcaccttcccattcttcagtgcattgctcagcttcttcggtggattcgccttcgcgccgacgacgtatttccttccatgcatcatgtggctgacaatatgcaaacccaagactttcagcatctcatggtttaccaactggatctgcatcgtcctaggtgttctgctgatggtactgtcaccgatcggtgggcttcggcagatcatcttgagagccaagacataccacttctaccaataaagtcgattcatttaacaccaaaaaaagaacccaaggtttgcgtcagatttattttgcagacgctcagcgtgtgtgtctcgagttttgaatcggacttcatcacctttatctccatcgtggcaaaagaaaagaaaagaaaaagtcaaattggacgatgtatggggcgtcatggttctgtgatacccctaggtaggagtttgttttgtgataccatacgcatgtgtatacatcttgtttatatgtattctagagaaagagtgcgcgttactagggagaatgagtgatgacggtttgtatttctttcatccatacttccttcactcatagtcgttcccaattaatgtcacgttacaactcaaacaacgtttatgtatatatccatcaattcatgcttctaaaggggccagtaaatttgtaaagagaaatcacaacgaaatccacaatcagggccatatgaaccatacatcactcaatccatttctccattattgtgacctagctcaatttaccaatacaaaacatacgttagttataataatcatatgttg

SEQ ID NO: 40082 - DNA, 1654 bp, Zea Mays
aatcaatgcagccctgctgctgtagaagtagaacttgatggggaatttggagtcgggtggtaaaggagagaaaaccccaaagaactctaccactattgctcttcagtcaccgttcccagaatacaatggccgtttcgagattggtcttggtcaatctatgctggccccttccaattatccttgtgctgaccagtgctatggcatgcttgcggcttatggaatgagatcgatggtatggtctgtttgttttcagaaaacagtgttctactttgttgcaccgtgtccttaagtatttgcgtgaacatagtactatttcctagcaagcttttgcaccaagatttttttcgcaccaaaatactcagatcacatgtattcttgctacaatcatgcatgtaaacacaaagatcacctgattaatatatatgctcgaactttaccttatactattattatatagcttcattgaataaaagagcaagtacaggttatgaagcatgatactgacagcatcgctgaaatttctaataaacgccagaactctaatggccttttgttttttcttccccacatgtaacgtagtctggtgggagaatgctgttgccactaaatgcgacagctgatgcacccatctatgtgaatccgaagcagtacgaaggcatcctccgccgtcgccgtgctcgcgccaaggcggagagcgagaacaggctcgccaaaggcagaaagccctatctccacgagtcgcgccacctccacgcgatgcgtcgggtaagaggcaccggcgggcgcttcgtcaacacgaagaaagaagggcgtggcacgggcgttgcttcgaacgggggcagcaagacggctgcagcggcaccgtcgcgcctcgccatgccccctagcttccagagtagcgtcgccagcctgtctggctccgacgtgtcaaacatgtacagcggcggcttggagcagcaccttcgggcgccgcacttcttcaccccgctgccacccatcatggaggacggcgaccacggtggtccccccacccgcatctcctcctccttcaagtgggcagccagcgacggctgctgcgagctcctcaaggcgtgaaccgacgaggaggaggggatggctactcagacgaacggccttctcgccgatggctggtcgtctgtaggcaaatcattcttggctgttccgcattggggtgcaacctcatccacatcatctacctacccagtaggccagtaccccctgttccctgaacagtgcttgggttacaggggtcctcctgtgtgtgtgatgatgtggtgtgcctcccccacatgcatttgctgtaacataatagtgtacccaaaccactgcttcggactatcattgtctgtctcggtatggattctctgttgtcacagtgtctgaataattgaggcgtcagacttcaaagttgctccggttcttggagatgggtatgtttgaagcttgcttggaggtctgaaactttgtgcttggtcactcaagaatcaagatgctgagttattgcattctgaacctgtaatttggtgccagcattcagttgttgcagttgacgcatggcttgtattttaaggtagcatcatctgtgctctggtgacgaggtgttcgttctgattatctgagtttactatactgc

SEQ ID NO: 40083 - DNA, 2257 bp, Zea Mays
atagacactggatgtctggatggcatagcgctaaatttgagaccggcaaaatagcaatttttccccctgtgagcccgcgacgcagcgcgaggtgcggccccgtcccctcgccaccggaggagcaggacgacgaggtggcgccggcgcgaggtagtcgcgcgcctggaagagcggcggcatcagagtcgcaggcggaggcgaggaagtgaggggagagccctatagccaccgccgcggggcgtcctgctcgctgcacgcactcccaccattttgtcccaactcgaagctcagactcgtgctgtcgtgcacttcccctcccctagcatcccaagctcctcactgagaaaacaggagatgggaagagacggggaacagactaggcgccggagccgcaagagatcccgcgacgcctccccctcctcgtcggattccgattccttcgactccccatcctctccgagcagtagccctgagcgacggagccgcagcagtaagcggaatagatcatcctcatcgcaccgccacagccgcaagaaaagcgaccggtcgcggagatcccgcgacgaggaccgccggcggcggagaagacggggccaggagagaaagcggcacggtggggatggtggcaggtcctccgactcccaatcgtcggaggaggatagggcggaggaggcgcgggagatcgtccgagatatactcatcgaattgccggccatagccgaagagcttcgccagcttctccaaattatagacagtggtgaaagcattgatatttctggaatttctgacaaactattggtgaagcgcttgaagaaacttttccgatctctgagattgaaagaaagtgcaaacaacaaaagtggaaagccagtgtcaccaaatagagaagcactacaacaggctaactttgatgtgcaaaataaagataaagattatattgtttccgaagagccaaaaattgttgatgtggaagaggaacctcctaaaagaaggataattggtcctgcaatgccatctcgtgaattattggctgcagcagctgaaatgacagaggctcttaggtgccgggatgctgaactggaagccaatgatgatttgctcataggccctccaccgcctgccgtagttgctgaagctgcatctgcaaatgaagctgagcgatttgaagaggttactagaatattggcagctgacacaaattcaccttatgaggttttgggggtaaattggaagatgtcaactgataacatgaagaaaaggtattggaagttgtctcttttagtgcacccggacaaatgtccacatccttccgcacaagaggcattcgtgaaattaaataatgccttcaaagacttacaagaccctgataagagaggtgcaatagacgagaagataaaaaagaaagaggagatggaacaatttgaggttgagcttaaagcaatgcgtgaggctgcggaatggagacgaatacaaggtgtatcactcgcaggtgatgatgaacttttagcaggtccaaaagagtcacagagacctacgagagatgaatggatgaccacattgccacctgagagaaaagcaggagtgccaatgcattcaactacatcatttagtatgaatggtaaagaaggacgtggagacacaagtgtctggactgatacccctcttgatagagcacaaaaagcacaacaaagctatctagaagcctacaataagacaaaggcaattgcagaaggcgacgacgtgaagagcaagaacccggatgcttcaatcgtagataaatacaacacctccaaacgatcagtgtcccttgtgcagaagcaccgagagagtaaaaaggagaaaaagaagcaaaagcagcaggagaaagaggaatgggagggaagccacccatggaagccatgggaccgggagaaggatctgtctgctgggcgccagaatgtggccttagacgcagagaacatgtcgcaaggattatcttcccgtttcgcatctggtgctgttcagcggaacttcctgtgagctgtgtggaaagatactcctggagcttggtctaatcgatgattaatgtccagttattacatcctggtcggcagatggcaaagataatgctgacatataaaaacgagttatgttaccaaggaccatcgtcctgtaatatcgatcgtgcttgttgtgcttattttctcagtgtattatcgggtgagctaaaatggtgccatagtttgttcgtacgatacaattactttttttttcaaac

SEQ ID NO: 40084 - DNA, 1434 bp, Zea Mays
cctcactgaaacctctccaacccctacagtaaatgagcatgacgattgaccaagaactcctcccgtcttcttctctgcccttctataaaacaaaagaacagaagagagcggcaacggcaagaccagctcccgccggccactcgtctagactcgagagcggcacgatgcctccttctctgcaccctccccacctccacttccacaagctcaagcgccgccaccaccccgccgccatggccaagaagggcctggccgccatcctctacaagttccgcgacgtgcactgcccgccctccgcctcgctgccgccgtcgaccccgtccgcgcactacgcccagcgctgctacccgccgccgctgtccgcgtggccctggccgtcgtgccggcacccgcgcaccagctcgttccgcgggcccaaagacgacgccgccgcggtgttccggaccgtgaacaccgtctacgactacgacacgatctcgggctcggagcaggtcctccggcgctcctccatcgatgaggcggcgtgcatcgaccggcgcccactgtcgttgctcggagaggccattgcggagcaggcggtggacgaggaggaggagaaggagacggagctgcgagagacggccgtcgtgcgcggcatgcgttcggagcgactgttcttcgaaccggccggcgcagagttcttgcccaatcagagcgtggcggtggcgccggcgagaggcaaggacgaggcggccacggcggacgtcaagagcgaggaacaagcgacgacagacgcgccgcacgacaaggacgagccgccggcggaggccgtcacggcgaagggcggcgcggtggtggtcacggtggagtccaaagacccgtacggcgacttcagggcgtccatggcggagatggtggcggcgcacgggctgcgcgactgggaggccctggaggagctcctggcgtggtacctcaagctcaacgctaagggtgtccacgctgccatagtcggtgcattcgtcgaccttctcgtaagcatgcagccgcaggcgtcatccccgccgtcgctgccgtcccagtcgccctcgtcgtcgtgcatcaccttcgaggagtgctcctcggcaacctttgacgaggatgactgcaagagctgagctgagctgaactgaggcggagggtgctccgtgttcgccatttctaatcttttttttttgtctcattcagagatagcggtttttgtgaattattttgtgcgcctatggaagaatggaaggtgaggtgaggcctgaatggtgccatggatgtacagttgctaaactacctgatgctgaccatcagaatagattaattgcctagacaactaattgaccatttttatttgctctgcatgttttttatttgtcttttgatgcctgtctcttgcgcgtgaactaaacttgtctactaactctgaag

SEQ ID NO: 40085 - DNA, 2549 bp, Zea Mays
gcaagacaaagacttttgtgcgatgcgatgccctcacttgggtcgacagagatcatcccctggcaccaccatccagttccaattccaactccaactccctctcccaatcctcgtcactgctgcctctccaagcaacaaggccgcggaagaacagaccacgcggtcagcagcagcaggggagcaagaagaactcctgttgggctgggttcacggttcaccccatttctgaattccgtcctgaggtgtggcagctcacagaagcttccagaaggcgggattgagccaagttcgctccccggatcgccgggaaaccaacaaaagcagccgctttatgcttcttgggccagacgaggaatcctcgagaaaccgatagaaggtgcaggcaggcagttagctgggtcgcggaagcctccaaaggcgccattttcgccgccgacctcgcgcgcgccggaagcaacaactccccctcccctgatgcttgccatttgacacacagcaaccgggcgctctgctgccggtgatggcggcggaggagctgctgcggaagttacgggagctggaggaaggccaggcggagctcaagcgggagatttccaagctcgtgccggagcagcagcaacagcaccaccaccaccactaccactcctcgcgccgcccgccgcagccttcgccggtgcgccgcgccctccccgcggcgccttccttgccgtcgcggctgcagcgcgtgggccgcgtcgggctcactgaccgccagcacatcagggccctgcacgcgctgggacaggccgtgcatatcattgcccccggcgggaagctcatttactggaaccgttatgccgagcaaatgtatggctattctacatcagaagcagtcggtcacgatgccgttgagttattggtccatcctgatgatgctgaggcagcaaacaatataattgggaatatatttatggggaaatgttggagagggaagtttcctgttaaaaagaagtcaggagagcggtttttcattgtggccaataatactcctttgtatgatgatgatggaagcttggtaggtctcatttgtctctcagttgatacgaagacattagaagatataatcggcccttcaacttcaatgaagtctcatacacatccagtgaagcctcgctttcaagtcaacaatcggcctaaatgcaatttgttaaataaaagttctattgagtctgagcaaactgtccaatcttctatagcctccaagataacaactttggtatctctgatgaagaaactacgtcatccaaatattatactcttcatgggagcagttgcatctccagaacgactttgtattgttacagaatttcttccacgggggagtttgttccgcttacttcaaaagaacactgccaagctggatccaagacgacgagttcacatggctatagacattgcaaggggtatgaattatcttcaccattgtagccctcctattgttcaccgtgatttaaaatcgtcaaatttgttggtagacaagaactggactgtaaaggttgcagatttcggtctttcacgtctaaaactcgaaacgtttttacgaacaaaaactggaaaaggaacgccacaatggatggccccagaggtgttatgtaatgaaccttcagatgagaagtctgacgtgtacagctatggggttattctatgggaacttgtgacccagaagataccctgggataatctcaatacaatgcaggttattggagctgtcggctttatggatcagaggttggacattccaagcgatacagatcctaaatgggcatcgatgatcgagagttgttgggatagcgacccgcagaaacgcccttcgttcctagaggtcctggacaggcttagagatctgcagaagcagtacagcctgcaggctcagatgcagcgtaacctgtccgcggatgctctcctgaaaggcgctgtgaaatgagcgtcgaggaatgctagctctcggaatgtaatggaacatggcactggacacattgacagcgaccagggcaagcgttcatcgacatttgtagcgtctgcgtgctgatgaggaaggctggctacgtgcatcttggtggccttcgtatagaagaggaggagctacagtccggactccggaggctgtaccggcaaaggcggccggtgcatgcatggcttcatgtatctcaaggcctcaacgaagcttcataatgcggtaatcttcggccaagaaggccggacacttgtgaaacgagaatggctaagaaggccggactactttttgtattaacgccccagtttttcaatgggggaaaaatcgaattgtttataaattgtatacttagtctcgataacgttcttgcctgcatatagaaccgggtgtcttcagacgcatggatgggtggtagtagtgtgttcagatgcatagaaagatggtaagcatgtctctgctgctgctttccttactgaatggacctttgatgtcgtcgctcattgcagcgttttctgaacagtgaccacattacagccggctgcacgcctgcacttgc

SEQ ID NO: 40086 - DNA, 1447 bp, Zea Mays
gaagacttggagcccttgaagcaacgctttccatcagccccagcttggggacaagctggtgctaaagggggggaatacctattttcagaagcccagtgttggcgatatcacggttccaaaaagctcgcttccgttggcttcactcccaactctttactcgctcactcccccgcgccactgatctctccttccgggaccctaattccgcaggaggccgcgccgggggagtgacgccgatgcagcgccgggtgggcatggcggacggcgaggctaggtgtcggacgctcggcgccgtcatcaaggagaaggatgaggagttcgcgctcttcctcgagatgcgccgacgcgagaaggagcgcggcgctgcggccgccgcggcggaccagcttctgctctccggggacgtcgcggcggagaacgggatgctgctcctcgacccgccgccacccgctgagcccaaaccggcggcgtacaaggtggctggcggcggatttaggagggcgcctgggggagtggacgacttcctcaatgcagacgccagcgacaagaacgattacgactggtgagtgcttcggcagtagctaccaactttccactaattagctagtatcaaatttctgctttttcggttgtgggcagcatagccattggtgtgacaatgattctagccaaaccacattgtagcattgtgaacttcaattttgttctgctcttttgtcgtttaaggcttcagagaatttggtgaggtgttaagttttaaccattttaaggcttcagggaatttggtgaggttttaacagtgtaatatttagtacgggttccctaaatcttgattcctcattcccaatgctgaatgcaaagctgcaggactgacaaaactgagaactctacagcttcataagtttcaagctaaatcttcattcttcagttgccttgctagaagcggagcgatgagttccatttttctgtaattttgccttctgtgcatacagtctatctgctgtccatgcattgtctgttaagttgacggtgtaccataaagtttgtctttcgtgaaacttgatgttagttagaattcagctggtgttgctgggaaggatgggtcatggacatggtggttgttggaggcttctgacaccaccaggaactccattattctcatctctaaaagttgagccaaaaaggtccctggtgagtcaagctggaacgccaaaggctcgtccaactgccttgaaatcaaggcaacttgatgttgtgatggaggaggggcaaggggaggaattggaggttatgttgtcggaatcagatgacagtgagtttgatcatgatgatgagtttccaccgtcaactgatggagatgagttgtcaaaaactgaaaagacaaagagaggaggaaagaggtcaagagctggtattcagttgtccccctccaagtgcaaggcgaata

SEQ ID NO: 40087 - DNA, 5023 bp, Zea Mays
tctcctccgaggaagacacataccacaccaccgatgtccgatgcgacgagggagcacataataaaaaaacaataagacaataaaattaaataaaattataaacagagaaaaggacaacgtgaaataccctaggccgtgatcttggcggctgcggcgcgtcggcgatcggcgggggtcgccccgcggccgacgacgtcatgctggggcggcgcggggagatggggtacgaggaaggggagctcgagctggaggagggcgaggcggcctccggcggcggccgtgagctggttattcccgacgcgctcacctgcatcgatgaaagaatccaaaatgtgttgggtcatttacgcaagaaatttgaaggtgaaataactcatatgaatttgggttcgatgtatggatgccatggttcgttcttgccaacatacccacgttcccctttgggctttcctcaatataggaacactgcagatccaaaaaaccatggcagtgcctcgagatccctgcatgtattaacagagaatgcgcaaaagaaccattttgttaagacggaattagacagcagcaggaaaaatgaatactgtcgaatatccaatgagagtgatggcaatcaacagatgttaaacagagcagtcattgggtctgagcagaaagcacgaaaaatacgtatcaagttgaacagcaataaaagtttgccaagaaatactgctgctatatatagtggcctgggcctagatatttccccttcatcatctgcagaagacaacctagatgagactgctggggctctggtgcctgaagttttgcctgatgaatctccacgtgccatacttgagataatgaccagccattatattcctggaggacacttgctctcacccctcaaggaaaatgttctagaattgaaacaaaagcctaaagtgatggtaaaacaagaagcacctgaatttcaagtcaaagtagaattgcatggagactggggctgtacaacctctgctactctggataacaaagataagtgtaccaaggaaatcaagtctgatgaaaagaaagacaagatccccattttcaggagttcaaaaatcagagttaacaaaccatctgctgtgaataagggaactaagcctttacaggatgttttagatgataccggttcaaacttgttgcctacaattgtaaatacagaacatacagttgaggagccagcgaaatttacaggtgcaatttcagataaaatgaagggatcgaaggatggtgcatcaaaaggacacattagtggcaagaacaaaaacattaaggaggaaccttcgcttgatcatggattttctcgtaaaaacagatgtgattctgatgagtacaatggtaaacctcatgccagttcatgtcagttgcaaaacattcccaacaaaacttcgccactggagagggacaaagggaaagtattgcatatggaagatgaaccatctcagtacaaaagcaaggaaaatggagacctgtttagtgcagattccatggctgtcatggtaggaaatgttgatagaaattctttagggatgatgaaagggaagaagaaagtttcttctttgcaagccaccctgtctgggaagttcaagttcaaggcaaaaaaacaattgaatgacaacattgatagaaaaaaatatggtgaagacgagcattatgctttagaccatagaattggtttggataattcatatcaaatagataagagtgtgaggcttgagaaaaagaccatctcatctggggagattgataacaagtcagatgttggaaatgatggtggtgtcaatatctctgccatgtttgatgagaaatcagatgttttgccattagcatctgcatccctgcctgctccagaacccattttaataaatgaacaatgggtgtgctgcgacaagtgtgagaattggcgccttttaccctatgggatgaatccagatatacttcccaaaaaatggcggtgtagcatgcagagttggctgcctggaatgaatagctgcaaaataactgaagacgagaccacaaaagcccttcgggcactttatatggttcctgcacctgaaaataacattaaggatggtggtcatgataatgctatgtcaggcaaaggtacagctattgctccaacttttcagggaaatacacagtccatcagttcactggggaagctaaaaggttcccttgatggagccaatgtggcaaatactttggagtcagctggtatgtcaaagccctcaaagaatctgcatgctccttcaagtagaaacttctctaaactgaaggaaaaaaggaagctggtggaatcatcagataaaggagaaattgttggaaaagaccaatcacgtcgaatgagaagcagtgtaggggttgatcatgataacctgcgagcatcaaagaaaatgaagaaagaatccaatggccctgtgatgaagcatcaaccctctgagtttgaaataagcaaaagtagtcctgccagtgagactctgaaaaacattcagaagcgcagttgcatttctcctggcatgggaaagtatggtttatcttcatcaggtaaacattctcatggtgaggataaagatttctcagctgtggtcattaaaacatcagatacagagaactctggccctcgagactcatccattaagaagagaaaactgaaacaaaggcagtcaagccagcattttcgggatccacactgtagcaacaatgacacaaatggtattacaaaacaaaatattactgaaattaatgctgtgaagaaaaaatccaggtcagaattgaatttgttaaagacagataggatagctactgattctagaggcacagttggtggagttgatgataggatatctactgataaggagtgtttaagtgagcaacttcaagaaaatacccatttccagcatccgtcactcgtagaaggcaccacaaagagggaaatccgtcatgcacaaacacctatagctgcgacttcgagttcatccaagatgtctaactccaacaagtatatagctcattttcaggaaacgagggcctctcctgtagagtcagtttcttcctcacccttgagatcttctgataagaatcctttgggtcgacatagaagctcttcatggacaattacagaaaatgtgcattctcaagagtcagggaagataaattcttcatgctcgaacagaaactatgatcttgggtctgattgtgataaagctaaggctcgtatttctggttgctttaacggagatgtgagtcatcatgttcagaaggatagggactttctgaaagataaacaagatgtgatgaacgcatgtcttataaacaaaggttctggatttggtgctagaaatttccagctgagtcctgaacataaagtcaatccagatgtcctttcatcacatgacaacgatggtcacaagcaaccaacagttcgtcagaatgggaaaacacagccccatttcggttcaaaccaaggtgaccatgcaaatttgacttatgggcatattaagcctggtaaagggaatataccaaataaggaccagaaaacaaatccatctgcagtcaaagcaagcaagcagcagccatccttaaacaatgcatcaaatggtgatgcctcttacaaggcaaggcaaatagaaaaggctgttattgaaaatttggacacgaggaagcacatcactctcaatggtgatgcttcaaatctaacaagtgcatctgttctactgaaggaagctcgagatttgaagcacttgtctaaacgtcttaaggaaaaaggggatgactttgagagtacaagcatgtgctttgaggcgggtctgaaatttctccatgttgcttctctgtgggagaccccaaacattgatagctccaatcaaggggtttctatacaagctatgaaactgtattccgaaacaggaatcctctttggattctgcgctcacgaatttgagcgactcaagaaaatggcgaatgctgctctggcatataaatgtgtggaagtggcatatatgaaggctgctttctttagaagtcctggtgtaattaaagatagacatgcattgcatgcagcatctttgatggttgctccagctgagtctccatcatcttccgcttcagacatcgataatttaaataaccagagcacagttgctaaggctgtttctgcaagaggtgtatactctcctcagattgctagcaattccatatctcggaacaatcatcatttgatgggattgctttcttatgcagaggacacaaataattcatttgagggaaccagaaaatcacaaacttcattttcagcttatctttctggcattgggaagaatcaggtggatgaagttgctcttgtaaggaaagtacttgatttcagttttcataatgtcaagggattgctgcaactgattcgtcattcgttggagtctatcaaccatgaaagtggtaaatgatctaccaagtataggtatcttggaaaagagattaatgatgggaaggttgctttggcaactgtgctatacattggtacctcctccaatctggatgtagaagtaaacaagtttagagagtaatcagttgtgaatggaaagggttcacattgccttctcttggttgcatggaagtattatatgtgggtgatacaaatttcaccagcggcaaactgctaaaacgggtttctttaccaagtcatattgctacttttgttgcccggaatatttcttgtagatgatgactttgactagtgccgaactggcaaagggggttcttaccaagaattagcctgcaaatgttaattgctaagtccaacattcttggtttcagtgtctagtgaatgatcaaatccaagtcctcaatgggaatctaatatacatctaccatagtgttttggaggtgcttcaggatttagcagtctaatattttacaaatttgcggaggttcagtgaggattgtctgactccaatgatagggttcggggtcgcgtcctactccggacgatggtacaaacttcgcc

SEQ ID NO: 40088 - DNA, 1939 bp, Zea Mays
ggaaggtcctcccgcgatcgcatccagccgtccggcccataccgcgaatgtccacgaccgctgcaaaagtttcttcttcaggttcttaatcagtaatcacgcacggacgataaatccaagtaaggaaatccccgatgatctcctgcgcgtcgcagcgccagccactcgattagtggagtccaccaaccaagcacgcgtccctccccgtcccagatcccatcccgcggcagccggtcagtccgatccatctccagtacccagcccgtcacccgccttccccgttcgctctcgtcggcgcgcgatggagggtctcatcaaggggttggtccacgtggccatcgacgccgtggaggacgccgtgagggagagggaccacggccgcgccgacgacgacgaggtgccgaggaggagggcggcccaaagctccgatccagatgacgacggggaggaggaacgcgacgaacgatcgcggtcgacgtgggccgaggacaatcgccatgagaggagggatgacgagggttggaaaagggccgatggtcggaaccagcagcagcaccacgcaggccggcagaaccagtgcgagggggaggaaaggtgggatggcagtggcagccggcggcgtcagcaacagcagcaggcacaaggatacgggaatcagcatcaggaagaagaaaggataaacgatggaggctggcagaccgtcggtgagaaaaagcgccatggaagaccacagcagtctgaagcatggaatggatacagaaagccaccatcagaacaaaagtactctgaggatgtcggtcatatccaccaaggactcaatttcgagcccaccagggaggagctgaatagcttatcgaaagcgtgtagccgactttgggagctcgatatgaaccgtattgttcctggtaaggactacataatcgactgtggcaaggggaagaaagtttatcagaagggtgatatggcatctgaaagcttgttcagctggctaggcgacgatgtgctaagaaaacccacctactcacgtttctgcgcacttctggataactacaacccccaccaggggtacaaagaagttgttacccagcaggataagcacgaagaaatagctttcgttgaagagatcgctagaacagcgccaattaagtacttgcaccggtacttagtgcagaagggggctgtgcctcaggactacgaggacttcaagagaatgctgacatccctatggtttgatttgtatggaagaggtggcaactctagctgctcttctgcctttgagcatgtgtttgttggtgagatcaaaggacggggacaaggggagagtgaggtatcaggcttccataactggattcagttttacctggaagaagccaagggaaatgtggattaccaaggttatatatttccaaggcgccgtggtgaatcgcctgattcagagatacagctgctgactgttcagtttgagtggcatggcgtgctgaaatcggtatccagcacgttgattggcgtcagtcctgagtttgaggttgcactctacacgttgtgcttttttgttggaggggaagacaaccgcgtcgatattggcccgtatagtgtgaacgtcaagtgctaccgattggggaacaacaaaattggatcagcctttcccattgtagagaactgattatctggtgctatgcttctgcaggtttccaaatattcactttcttcgtttcataatcaattacgtgaagttaacaatgtactattttacttgtgcatgaaaaggtaccatactgttcaatttgttgctgccatctgcaatagtattgctacttgcactgctaaaaagttgacgaccgagactgaagttacttttcatgattttgttgctgtggatgtggaagctttccgatgtatattttctgcctttgtcatgtttatttactgatatgctgtt

SEQ ID NO: 40089 - DNA, 3978 bp, Zea Mays
ggggcccgccagcaggcgcgcgcgcacgcagagagctgcggagaggagagagaaagtgtggaaatggggagcgcagggacacggcgtccattttgcggagagggatgcggagcctgctggagcgcgcaatagtgcctcaaaccgtgcaaaatgcggatgcggagtgggatacggagtcttgctggagttggtcttattcgtgacgatgagtcgatgagactaatatgtaaatagcacctcaaaccttagatactagctgtgaagacagtgctacctgtcactctgtcagtcagacacctcgcccgcttcatttcgttcctccgcgtggtcagaaaaaactcagcaagcattggagagcaagagtaggaattaactcaaaggggaggaaggggaagacggcaattatgcacaacggcgtcgacgctcggccggggcccctcctccacctccccggcgcatcaccagctccctgctccggccgccgggtcccatggccgcggtcggggttaggggccgcgctgcggcagccaaatagcccccacggccgcctccgcttcgggcccctcccggccggcgaactctgcaagcggacccaccggagaagctacgtgtcgctgtgcttgtatcgaagtccacactgcagagcgaccatggtaaattgcgcaatggtttcgaagatgccacattttatgacctcaatctgatcctcaatgctgctgttatctaagcatgttgcctgaaacacatctactcaggtgcctcacttcagagtgagcgtgttgttcctcaaggtgtcaaagctgctgctgggtttcagatctctgccgacgacctagcatcacttgttgaaaatcgtgacaccgggaagttgactctgctcggccagctggatggaatcgcagacaagttggcgacgtcgttggctgatgggatcaccacggatgagctcagcctgaatcaaaggcagggcatgtatggagtgaacaagttcacggagagtgaggcccgcagcttatgggagttcgtgtgggaggcactgcaagacactactcttgtaattcttatagcatgtgcccttgtatctttcgttgttggcatcgccacggaagggtggccgagtggtgcccatgatggcattggaatctttacaagtatcctcctggttgtctctgttactgcgacgagcaattatcagcagtctttgcaattcagggatctggacagagagaagaggaaaatttctgttcaggttactagagatggattcagacaaaggatactgatagatgatcttcttcctggtgatgttgtccacctaggtgttggagatcaggttcctgcagatggcctctttgtttctgggtattctgtattggtcaacgagtccagcctaactggtgagagtgaacctgttgtcataagtgaagataaccctttccttttgtcagggactaaagtcctagatgggtcatgcataatgctggttacagcagtagggatgcgaacacagtggggtaaactaatggctgccatcactgaaagtggggatgatgaaactccgctgcagggtaaattaaacggtgttgcaaatactattggaaatatcggtctgttttttgcccttttaacttttgttatcctctcgcaagggttagtgggccagaaatactctgatgggcttcttttaagctggactggagaagatgtactggagatactggaacattttgccattgcagtcacaattgttgttgttgctgttcctgagggattgcctttagcagtgacattgagccttgcatttgcaatgaagaagatgatgagtgagaaggcactggtgcgacagttatctgcctgtgaaactatgggctcagccactgttatatgtagtgataagacaggaacacttacaactaatcgcatgtctgtcacgaaggcctgcatatgtggaaacaccatggaagtgaacaattcatcagtgctttcaagtttttcttccaaagtcccagaatttgctttgcaaattcttatggaatccatttttaacaacactgctggtgaagtggtgattaaccaagatgggaagtgtcagatactagggaccccaactgaggctgctttgttggactttgcattgacaataggtggagacttcaaagaaaaacggcaggaaactaagattgttaaagtcgagccttttaattcaacaaaaaaaaggatgggcatcattctcgagcttcctggtggaggataccgtgcacattgtaaaggtgcttcagaagtagtcttagctgcctgtgataatttcatagatgccagaggtactattgttgcactcgataaaacagctacaaagaaactcagtgatgtcattgaaaccttttctaaagaagcactcaggacactctgccttgcttatcgggaaatggatgatagtttttctgttgacgagcaaataccgctacaaggatacacatgcattggcattgttgggatcaaagatcctgttcgtccaggtgtcaggcagtccgtggcaacttgtcggtctgctggcattgcggttcgaatggttacaggagacaacataaatacagctaaggcaattgctcgtgaatgtggtatacttactgaggatggtattgccattgaaggcgctgagttcagagagaaaaatcctgaagaactcctcgagttgattccaaagatgcaggtcctggcccgatcatcaccacttgataagcatgcacttgtgaaatacttgcgtaccacgtttaatgaggtcgttgctgtgactggggatggtacaaatgatgcaccggcactacgtgaggcagatattggacttgccatgggaattgcagggactgaggttgctaaggagagcgctgatgttgttattcttgatgacaatttctccaccattgtaacagttgcgaaatggggacgctctgtttatgtcaacatccaaaagtttgtgcagttccagctgactgttaatgttgtcgcacttctggttaacttctcttcagcgtgctttacaggagatgctccactgaccgctgttcaacttctttgggttaacatgatcatggataccctaggagcgcttgctcttgcaactgaaccacctgatgacaacttaatgaagaaatcaccagtcggaaggacagggaggttcatcacgaacgtgatgtggaggaatattgtggggcagtcaatattccagtttgtggtcatttggtatctacaaacacaaggggaatacttgtttgggcttgaaagctctgaagctaatactgttctaaatacaatcatattcaacactttcgtattctgccaggttttcaatgagataagctcgagagacatggaggagatcaatgttttgaagggtttgccacagaactccattttcatgagcatcctcggtggcaccatcattttccagttcatcctggtccagttcctaggagattttgccaacaccacgcctctcacccatctccaatggctcgtcagcattctctttggcctcctcgggatgcccattgctgctgccatcaaactgattcctgtggaacctcgcgaagatgatggccggataccataatcatgtacattaagagcaatagatcagcttcaccagctgctaactactgtaaccttacctaatccacaagaataggagcagagcaccaatttgtgaagaaacggtttgtttgactgggacattaatatacccgtattactaaactgtatattgagtcgtccatttagttttattttttccttacaaatagtaccttgtggcttgtatacaccagcgtccatttgctattatgaaatgggatgtggtggattacaataacgtgggattgttacacagtttgtacctgtgtcagttgtaagtagactgcaaatttgaatgcaacacagttataactctagcttgattgttgattcaaacagttcatttct

SEQ ID NO: 40090 - DNA, 1344 bp, Zea Mays
tgaagagatcctaatctatagttttaggacggctaaatacaaggagctgacgtccccctccgtgttcacaagttaactggctacattatgggcttccatcaatcttgatgggcctctatcttactgaggtccttatccagcccgacttagcggaagcccggctcggcctaagcccaaagacgtctagcaaaaataactggtctgaattaatcttccggtcctgaataaagtggaggcggaaacgaagtatctcaggttgcgtggtgcgacaaaccgacaagccaacaatggcgtcgtcagctgctacgaccgcgaagctgatcgcgctcccgccggcgccaacacgcggcggctgctgctgctggaggacacgcaggcccgcgatccccgcggcggcggcgcgcctcaaggtctccgcctccgccgcctcgtcggacgtgccggacttcctctcgtccaattggcttgaaacccgcaagagaaagcccttcggtcccagtttagtgcagaagaagcagtcgaataccagcttgagtccttaaagtacaatgatctgccccgcccagattatgggatagagtttgcaggctttgaccccttcgagaggtcaacttactttggacgacagtttgatctaggacagttcgagcgcttccggcgtctgtttcaccactcaacctacagagtgctgctgggccacagagagagaagaatattgagcagtttatgggttgaagagaaccagttcaagcaaagagtttggatacaaggagcccgtcccgaggaagaagagatatttcaattcacaatggttcagagggtcggaggatcatgggatggttactggctgacagagagcttaataaacgatggagacgcgttctcgggtgggattgcttactgatgtagtgatgattggtgtaaatcgatcaggtgcagactagcaggtggcttgaaaaagctgagagacatgttggtgtgtagaatatgccctggctttctggagatgtttggcactgtcggacacgctagtattgtacaggaagacctctcacggcgcccatagcaccagatggccaagcatgcatatctgtggaatacttttctgttgtacgcctgctgcttgcctggtttggtaagaggaagacggcgctgcacatcttgcgccttcatctgcagcgagttacggcgcggttctttcttgatgtcctctcctttctgtgtaaagtgcttcgagttttggccactgcctcttttcacttttacgtgtctgttgtttggtcgagacgtcgagtctatggtgtcgccagcagctcctgcatgcactctcgcgacctacggcaa

SEQ ID NO: 40091 - DNA, 565 bp, Zea Mays
tttgcttgctgcaatttactgttcaaaagaaagaaaagaagttctgaaccacgtggttgtgtaagcacagttgatttacaatgtcctatttattgttgttatgtttacttgctgatatgtgttatctcacatcttgcattgtttgatgcaggcacctaatttctgcttttgggaatagagggatgtagcagcacggccacttcacctttaaataaaggaaccaccacttaatactgttgttaatcagagttggtcaagtctagtgtattactttgttcttggttgagcgtttgttttggggtgggctgagttccttatcctatttgttttgtttcagttgggtcataattaagttttaccacttttgcattttagtttctactatgtgaattatatgtctttatatcttgtatgagcttcatgttttccctccttgttatgctagttttcaaaggaggtgctgccggatttttgctgtatattctttctttattacatctcttgtgttgagtaagtttggtgggtggggtttgtggtattatccattgtgtgtgaccagtggggt

SEQ ID NO: 40092 - DNA, 2183 bp, Zea Mays
atgatgaaatttaagaagggaggatgttgtggcaaggcgtccaaagatgaaaatacaagaaaagataacatgatactattaggtaagagagaagcaaagcaagcaacaccggctgccgacgcgcaggtcagtacaatgagaggatcgatgttctgcggcggagatctccggtggtggatgttggccatcttcttcctctgcacactaattgctgccgcggaggagcgcgtcgtcacccatctccccggcttccagggaccactccccttccagctccgaactgggtacgtggaggtggacgaggacaatggcgtccgcctcttctactacttcaccctctccgagggctcctcagccgacgacccggtcatgctctggctcagcggcggccccggatgcacttccttcaccggcctcgtctatcagattggccctctcagtttcgaccttgacagctacatgggtggcctgcctaagctggtgtacagacctgagtcctggaccaaggtgagcaatatcatttttcttgattccccggttggagctggattttcatactctgtcaaagagcaaggatacaattcaagtgacacaaaagctgtcagccatattctggtctttctcaagaagtggtttgacgagcacccagagttcttgtcaaatccactttacattggcggtgattcatacgctggtatgattgtgcctaccgtcacttctgaaattgctaagggtaacatcgctcctcaaccttcagtttttgtttcttttttccctgtcagtttttgttgccttttttctggtattatacatgcatatttccttttgcctcatcaacaatttgattttgtgtcatgatgcctttgccttttccaggtttgaaaattgttggtagtaaacctacaatgaatctaaaggtttgaaaattatactgtcagcagcaaaaacatatagagggatactttgagttcccaaactgctatcctatttttggaggacagaattcccctgttaattttgcatacggtgttcagggctgccttgttggaaatccattcacagatcaatcaaactttgatgggccatcgaaaattccatttgctcataggatggctctcatatctgaccaaatgtacaagtcatacaagaagagttgccgtggaggagacaacaggcaccaaagcatccagtgcagaaatagtcttgatgccatagatgagtgtgtcaaggatatatctgagtttcacgttctggagccccgctgtgcttatgcaagccctcaccaatacaatgttctcaagctgaagacgagtttaggtgttcagaagatgcagcagctaccagacttcactgcagaagggcttcacttgtctgagatttctacagagtgcagagtttgtgcctagatgagacaatgctatatacactgtctagaatatgggcaaacaatgccacagtgagggaggctcttgggattcacaagggaacagttcccctatggttaagatgcaacacggacataccgtatttgaaagatattaagagttcagtgaagtaccatttggatgtgaccaccaaaggatacaaaagtctagtttacagtggtgatcatgacatgggtgtaccttatattggcacacaatcctggattaggtcacttaatttctctattgtggatgactggagaccatggtatgttgatgggcaagttgcaggatatacagtgttgtactcaaataacctcacatttgcaacggtgaagggtgctgggcatactgctccagaatacatgccaaggcaatgccttgctatgctttcaaggtggcttgctggtgataccctttgattggcgcatagagatgcactgctacatagttgtatagactttatgtgtatgtaagtgagttacttgggactagttgtctggattgttgtgtctaggcttttcgtcgtttttccctttaataaaccgagcgattgtaatgttttcgggtctgttgtccctaataaaaatttggtcaattcttttgtacctacagtgaaatgcagaactctgcccttttaaaaaagagaggttctatacaattatggtaaactcatgtaatccttttgcaatcctttacagaacctccccgaaaaggattgcaagcataatattcgatcgaaggaaaaaaatcaaataa

SEQ ID NO: 40093 - DNA, 242 bp, Zea Mays
ggacggtaccttttggtcgatggacggtggcggagtcgcgtcggggatggaatgcaccattatctcaggtacgaggctaacacccagcaagtccttcgcgagggtgctggcgtcatcagtccgcttggggttggcacgtagcagggatgttggaactctcaagtgctctcacactctgaagaacgctaagaacacaaagttggaagacacaaacgagatacggcgccgaacgccaccagcgc

SEQ ID NO: 40094 - DNA, 1710 bp, Zea Mays
gcacagcacgcaacgcaaacggtgagcgcacagcacgcagcaaaccagatctcggtcgcccgccggctctccagacggagcgagcccgttccgtcgccgtcacccagcgcgccgatggagcagcagatggtaccactctgtgtgaagagtgtgaagcgaaagaggaaaagggttgaccacagcaatattattctagcattaccagctatatatccatttccacaaaagaaaacggtggcaagtgctgcaggaaagaaaagggcagcaaccaagaaaaacactacaggaagaaacaagacgcgcaacaaggctgcacgtgcacccaagcaaggactgaggaaaggtaaaagaaagaatgctaaggctgctcatgcacccaatgacgatgcactaacggaaggacgtataggttctgtagacatatcaaatggtgcaagcaatgaacatcctgtccaagaggatcaaaaagacctcatacggcaacaacacaacttctcaaacactggagacgacattattgtggatgatcgttcaggtgatgcaaatgaaccaaaaattgttagcaatgaacaatatatttccgatgaagaagcaggcacagtgcagctaccgaaccctgccaaacaagacattctggaagcggattctgcagtggaacaaccatatgttatcaacaacgaacaacagattatggaggaacaaccaggtgtggagaaccaacaaaatgttgcagttaatcagcaacacaaaccagacgaacaagcaggcataatgcaagaacaaaacattggaaatgctttagaagaaaatgtgccagaggatcctacagatctatagtggagatggcatgggtggagatacaactttgattatggtggagctggaaagggctatcgggtttgatctatggcaaagacagtgggatggatggtttgatctacgatagagataatgctggcacacatttttttggtcttggtgtccaactcgacaggctcagtaggcttggcaacaaatttcatgagctcaattggctcatgggagaaaggtggaggatgaagacccaaactttggaaggtatatatgccacaagtacaaagggaagagccttcaaacctcctagcaatatgcattgaggtagacaatgtgtcacataggtgggcttcatgaggattttcacattgacgatgcttgagcaagcaggaggagatgatgatgtgttttttaatagctagtcgacagctagatggccttagggtttagttcggatggatggcctagatttgattcacattgatacatgatacttattccagactacaaaaaacattactatatgcggtgtacgacatgcatatcaccatactttatggtgttgtactaatacgagtaaacgatcaataaccttcgctggatgaaatgggcatgggagttgtgacatcgatataatatattgtgtgcactagagaaataaatcaatttacaaacagaatcattgtatgaacaaagttcttgtgaacttcaaatcacatctagcctagtggatattgtagttgttccaagagatgtgatttttattgccagatcataaagtgaactaattgtgatggcaatttccatcactggatctaaatggtggtgcatccttccacctttaaaacaacgatgaaacttcttattgggttttctagtgggtgttgctcgcttaaa

SEQ ID NO: 40095 - DNA, 1626 bp, Zea Mays
ccgggcccacactgcagtggctggccgccttcacggcttcacctaacgatctggttcgtctcccacctcgcgccgctcgccggattccgccgccctgcccgcgttctcctagacccaacccaaccgagtcctgaaaggggggtcatttgttcagtgatcatcaaccagtgcaccatggcgtctctgattcctccctgcctctccgtccccaccgccccgggacgcgcgcgccttgctgctccgggggcgccgcggcggaggaggatggcggtggtgagggcgaagattcgggagatattcatgccggcgctgagctcaacgatgatggagggcaagatcgtctcctggacggccgccgagggggaccgcgtgggcaagggcgacccagtggtggtcgtggagtccgacaaggccgatatggatgtggagacgttccacgatggcatagtcgcagtcgtcctcgtcccggccggtgggaccgcccccgtaggcgcccctatcgccctcctcgctgaatcagaggaggaggtcgcgctggcgcgggcgcgcgctcaggccctctcgcagggacaaagccaggcaccctctcctccccatgccgccgccgccctggggccacctcctccagcgcctgtggcgcctccagcgacaaagggcatcgcgacaccttacgccaagaaactcgcgaagcagcacagggtggacatcgccggggttgtcggcaccgggccacacggccgcgtcacggcggctgacgtcgaggcagctgctggcatcaagcacaagcgaccccctccacctccaccccctgcttctgttgacgctgcgccactagtgcccgcaagtgcggtgctgccaccagtacccggtggcacggtggtgccgttcacgacaatgcaggcggcggtgagcaagaacatggtggagagcttgagggtaccgacattccgggttagctactccatgatcactgacaagcttgacgcactctatgagaaggttaagtcaaagggggttacaaagacagtgctgctggtgaaggcggcagctgtggcgctcacccaacaccctgtagtaaatgctagctgcagagatggaaagagcttctcctacaacaatgatgtcaacattggagtggctgttgcactcgagggtggccttcttactccagtattagaggatgctgataagatggatatatatctgcttgcacgaaagtggagagtgctgctcaagaaggcacgcatgaagcagctgcaaccaaatgaatacaactctgggacgtttacactatccaatttgggtatgtttggggtggataaattcgacgcaatccttcctgctggtcagggggctatcatggctgttggagcgtcaagacctactgtagtggctgataaggatggtttctttagtatcaagagtgaaatgctggtgaatgttactgctgatcacaggattatctatggtgctgatttggcagcattcctgcaaacatttgcaaagattgttgaggatcctgaatgcctcacattgattcctaaattacaagaaggtaaaagatgccaggcaggcatatggttacgtcctctgaggcgggcctgccttggtgaagagtgaagagaa

SEQ ID NO: 40096 - DNA, 296 bp, Zea Mays
catgtgtgcaagatgcttgagaatacttcaattgtttgtgaacaagatttggagaataagaaatctagttgggacctttatgacaacccttctaacgttgatgaccaccctttagatgttgatgaacttcttgatgcatacaacacagaagatccagagctaagacagatggcaagatccttccttgaagcttctgaccgatccttcgcctatgatgaaattactctatcgtcatctccctaatcttctcagccaaatcacacacaggaaggtctttgtggttttcacccaatttt

SEQ ID NO: 40097 - DNA, 486 bp, Zea Mays
taggagcctggatggaagaatggttttatgtaaagaacaacttgattgaaagagaagatataaaggggatcatccaatgccctatttggtctcgcttcggcatcagaaggctagccactgttcttggaaatgatgtcgaagcatgtcagaaggcttttaatagtgtatgcacttttattggcacaagagacctagtccaagagcacattgcttatagagtgtggcctcttgtgaacgactgggagatgccgaaggagaccactaccgggtccagtcaaggcggcttggtttatctgaaatacaccttcagatacagagatcaatttgatgagccgaacgatgagtggctgaactgtattgaggcaactagtgacgagtttcttggggcctatacaagggccgaagatgatgccatgaccttagccttcggagggcggagcaagaaaagattaaacagagttttcgatgtaattggttttgtatatc

SEQ ID NO: 40098 - DNA, 1854 bp, Zea Mays
ttcagtacggacccaagtccatttcttcttcttcttcttcttgctggggaacggtcccccagaattttctgatggatttggcttggtggcaagaaggtcgattgctgaagctcctgctgacatcaacgtcactacgaatagctcctttgtgctggcggcagataggacatatcgaagggaccctttgaatggcttcaggaaatacccgggcggctggaatatcagtgaagtgcactatttcgcttccgtcggatatacagccattccgctgttcgccattgctctcgtgtggtttgtgatctttttcctggttatgcttgggatttgctgccgtcattgctgttgcccgcatcacacctacaagtattcacgaacagcatatgctctatcattgatacttctaatactgttcacatgtgctgcaattgctggatgtgctatgttatacgatggccagggaaaattccacaagagcacaacaactactctgaagtttgttgttagccaggcaaactatactgttgacaaccttaggaacctatctgatagtttgtctgctgcaaagaaggtcgacatagcacagtcctttttgctgcctcctaatgtgcaaaatgagataaatgaaattcaaggaaagctgaactcatcagctactgatcttgctattaaaacaacagataatgccgcgaagatcaaaaaggtgctaaacagagtgcggcttgctttagttgtcattgcagctgtgatgcttcttctggcatttgttggcttcttgttatccatctttggtctggaattccttgtctctgtcttggttattattggatggatattggttactggaacgtttatcctgtgtggtgtatttcttcttctgcacaatgtcgtttcagatacttgcgttgcaatggaagagtgggttgctcatccgacagaacacacagccctggacgaggttatcccctgcgtggagcctgccacggcgaacgaatccctgtacagaagcaggcaggtgacgttcgagctggtgaacgtggtgaaccaggtgatcaccaacgtgtcgaacaggaacttccccccgcagctgacgcctttgtactacaaccagtcggggccactgatgcctctgctctgcaaccccttcacgcctgatctgagggaccgcaactgcagcagaggagaggttaccttggacaacgcaacccaggtgtggaagaagtacgagtgccagagcaccaccgtctcaggaggagccgagatctgcgcgacggtggggcgtgtgacccccagcatctacgggcagatgaccgcgggcgtgacggtgagccaggggctgtaccagtacgggcctttcctcatccagctgcaggactgcaccttcgtgcgcgacaccttcacgaccatcaaccagggctactgcccggggctggagcgctacagcaagtgggtgtacgtgggcctggtgatggtctcgttggcggtgatgctgtcgctcatcttctgggtgatctacgccagggagcggcggcaccgcgtgtacagcaagcagcaccagccgtacccggtggaggacaagccggcggcgacggtcccgggcgcttgaattgatatggcccgcccgttccagtgctccggcctactcccgtgccgctgtgcatactgtactccgcgcgctagttgggttttacgtggtggtgtaggtggatgatgtaccctggattgttgttcgtttgcttggtgttgctgtatgtttgctgattttaagttgttgtgcattctcgtactgacggtagctggacaatgaattgattgtgttgggattggttattattaggtgttcttcagttcgtttct

SEQ ID NO: 40099 - DNA, 3577 bp, Zea Mays
ccgacgctttcgaatccaaaatttttactaggactcggcgagctcgcctaccgcgccgccatggcgctgctggtgcgcgcgcggctctcctcgctggacgacgacgaagacgactgggcctcggcatcctcgctctcctcggccgcctcctccccgccgctctcgcccgccgccgcctcccctccgccgcgtgcagcggtgctcgccgccccgcgggtcgcggcgcagctctcgtccacggaggaggacgtcagcgagcccttcgacggtacctccagctccggcgacgacgccgacctggacgaggaagtgtccaacggcttcttcttcagcgtcgccagggtaccgccgcccgaggaccttagcacggtccccggcggcgaggcggcgagggctgtttctggggcggagcccgagggaggggacggctggggcactgcggaggagccgctggaggacagcttggtgagcgccgagagcgtcttcgaagcgctcgatgccggcgtcattgcggatggcgacggtacgggcgccgagggttctctgggtggtagcttcctcatttccgggagcttcattggcacgcagaacggcaaggaggctgctgcgtcaggtgatttcgtgctcgtttcagatggtgctgtgctgaaggatgatgacaagcagggggaggaggttggcaatgacgctgcgtctgagcctttaatgatgcatgttgccggtgtcgatgacctgggcaccgtggatgttttggaggggatgcttgatcgtgaggttgctgaattgcttcctattcccagtgctacagaaggagatggtgctggtgctgaaattcacagcagtgagtccgatgcagaagctagtacaaccaatgttgatgctagtcctgattatgctgccacacgagatgtcacatctgatgtcgcgcgagttcatggtaaagttgatgacccagactccattgcagacgatggtcatgataaggtagatgaggaagctgatggtgaccatgaagcttctgatgaccttaaattcatgccgatctcttcaagtgaggatgctgtggaacttgcaaaagaattggaggacaacatgcctacttccaaaggcatgcactttggtgtggatgactcagatgatgtggagatctatggtgatgatgaatttgtagaggggatggatggaaaggagatcgagctttttgattatgcagctttaatcaagcttctaagggctgcaagcagctcacctgaacaaggcaaggctaaggttttcccagttgaatcttccgaacccaggcgtctgcctcctactgtagcaagcaatactaggacgagtgtggcttctgctcctgtgccagaagtaactgctgaccttgagaaagagatgacagatgaggaaaataagatatacagaaaggtggacatggcacgaatcaagtacatgcgtcttgttcatagattggggtatgatattaaccatcaggtaccagtacaagtgttgtatcggcttagtcttgttgaaggttttaagcgcggaaggatgacaaaccattcctcagagaccgagaatgcctggaagagggctttgcagcatgaggcagaggcaattgatgaccttgaattctcctgcaatgttttggtccttgggaagactggagtggggaagagtgcaacaataaattccatcttcggggaagataaatgcaaaacaaatgcttttctaccggcaacatcatctgtgaaggagattactggagttgttgatggtgttaagtttcgtgtcattgacacccctgggcttgggacttcgtccaaggatgaaaaatcaaataggaaagttctcaatgctgtcaagaagtatatgacgagatgccctccagatattattctgtatgttgataggcttgatacccagcgagaggaggcaaatagcctattcctcttgcgaagcattaccagtgtgctaggcctgtcaatatggcccagaacaattattactctcagtcactcaggaggtgcccccccagaaggccctaatggttcggaggtgaactatgatattcttgtgactcatcgaactcgtgcaattcagcaaagcatccggcagataactaatgatcctcaaattgagaatccagtggctcttgtggagaatcatcatctgtgtcggaggaatgcagaaggtgaaaaggtccttcctgatggccttatttggaggcggttcctcctcctcctatgctactcactgaagttgattgctgagatcgataacctctcaacccgtcgtgcttcttctacaggttttttaggtcactttttccaagtgcctccaattccttacttcttatcgtctttgttgcaatatagagagcaccctaggcattccaatgaactgaatgttgggagcctggactcagattttgacctagatgaattgttgaatggggaccaagaggatgaagaagatgactatgatcaacttcctcccttcaagccactaagcaaatcccaggttgcaaagctctccaaggagcaacaaaagttgtattttgatgaatatgattaccgaactaagcttcttcagaagaagcacttgaaggaacagcttggaagatttaaggaaatgaagaagaaagagtttgatgataatgatgtaccttctgatgatcatcccgatgatggatatgatacagatagatatcctatgccagaatggaccttgccatcttcatttgattctgatgatcctgtgtaccgctatcggtgccttgtgtctacaccaaacctcatggtgcgtgctgttaacaatcctgatggatgggatcatgattgtggatttgacggtgtgagtgtccaacacaaccataatgttgctaacaaatatccagcttctctgtgggttcaagttaacaaggacaagaggcagttcaccattcatttggattcctcaatgtcagttaagcatggtgactatgcctcgagcctggctggctttgacatccaaacaatgatgaatcagcttgcttacaccctcagaggtgagaccaaattcaaaggcttcaagaaaaacatcactactggtggtttatccatgacttttttgggaaataacatggtagctggagcaaagcttgaagacaagcttttaattggtaacaggctaacactgtcaggcaacactggtgctgtatccatgagaagtgatgctgcatatggagtgaatgtggaggcaactcttcatgaaaaaacctatcctgtaggtcaaggccttgccactttgggtgcatccttagtgaaatggcgaaaagagtggaccatgactgcaaatttagattcccatgtatctatcggaaggtcttcaaacatggcagttcatgttgatgtaaacaacaaactaactggacgggtcagcatcaaggccagcacttcagaacagttgaacattgcccttttaggtacctgttcagtgataatgtatttgtgggacaagatacaccctggtgcagattctaatgatgactagcactggattaaaccacccaacagctgaaaagatcaagaaggcagtaaagaag

SEQ ID NO: 40100 - DNA, 831 bp, Zea Mays
gcttggtcctgttcgcttctgatatgcgcgcctagctagcgtccctgcgcgcgcatcctcccgcagagtccccagcgccaccggccaacctcgccggccgagctctctccttgctcgccgtcaatttcccggctcgctgtggttgtcactgctcccagtcgcctccatggtgcgctcgcctcggccaccgtcgtcggtcgccgttcgcagcaacgtcaacccgctcgaaccccgcctttggctcggctcaccgtatgcacgccggacgcgttcgccgttaggtcctatatcgttagactcgacggctatggtcgctatcgcgcgcttgtccctgatgcatatcgcacagcattcggatctcgtcaattgactcccgccatctgtcgtgtggtgtactggcgttccctcacggcagaccacgccgtcgtctcaccttattcgcttcgctacagcaccatcgttatctgccagctccaatcacccgccgttcctagtatttttccccaacaccgagactttctgatctcgtcgttcgtcgatgcaatttatgtgtgcggatgaagaaaacgaagccagtatacaaagctcgcgggtgttcagctgaacgtcgtcgttgttccgtacgtcagcaagaaattccaataagtggagaaagacgaagcggcagcatgatattccccaaagtgctcgacacaggagctgaatcagaatcctgaatcagaatccttgccgtgttcgcggataacgcgtcagatttagaacggtaagctgatgaattgttcagaatagttcaatcgatgaataaataaatgtgctagtgcgatgttcata

SEQ ID NO: 40101 - DNA, 1171 bp, Zea Mays
ataccagtcccggtgctgcggaacacacagagcgaggtatctagagacagagagggctgtgtggagagagagagagagagagatcgatggagatgagagcgaagaagagcagcagaagcagcacgagcaacaccagcggcagcacgacgaccacggcggtggagaggaaggagatcgagaggaggaggaggcagcagatgaagagcctctgcgccaagctcgcctccctcatcccgaaagaacactactcctccaaggatgctatgacccagctgggtagcctagacgaggcagccacgtacataaagagactcaaggagagggtggaggagctgcggcacaagagcgcctctgcacggctcttggccgctggcagtggcacgagacgaggcggaggaggaggaggcgcctccacatcgtcggcagcgacgaccacggcgagcggtggcgcaggatcatctgaagaagccggccggcgggaggacgacatgccgccggcggtggtagaggttcggcagcacaatgacgggtcaagcctggacgtggtgctcatcagcagcgcggcgcgacccttcaagctgcacgaggtggtcaccgtgctggaggaagaaggcgccgagaccgtcaacgccaacctctccgtcgccggcaccaaaatcttctacaccatccactgcaaggccttttgcccaagaatcggtatagatgtttcaagagtttctgaaagattaagagcattgggatgatactagactgatatacatattgctaattatatatgaccaaggcgcatatccttttttatgctgtctcattctttactgtgcgaaaagtctccgaggtccattcgttaccaaaagttataatacatgatagaaatttttttttttgcaaacacaactgtagattgttacgttgtaagcaaggttgctacagtttgtagtatatgaatatttcgatcgataaaataggaataaaacaaaatcaacttaacctttcaaatggaaaggagagcatgcagattgcccccgtgtgatgatcatatgagcgccggaccgccggtaccaccacatgaaaacatatccggtgtatatgactctttggtgcatatatagtgtacataaactagcaaagttgacaaaaaattctgaaaaaaattatatatattgtt

SEQ ID NO: 40102 - DNA, 824 bp, Zea Mays
aattaacatgtctgcactctgcagaccttccggtgcatatggttcatctaagcacgacatgatgcacatgcgcatagctattgcactctctgatgaccataaaccaaacagaagtgatgagcagaaacggattgaggatgctggaggagttgttgtttggtctggaacatggagagtaggtggtatacttgcaatgtctagggcatttggcaatcgtttgttgaagcagttcgttgttgcagaccctgagattcaggatctagaaatagatggtgatacggagtttcttattttggccagtgatgggctctgggatgtggtgccaaatgagcatgctgttgcatttgtgaaggacgaggatagccctgaggctgcagcccggaagcttacggagatcgccttcaggcgtgggagcaccgacaacatcacatgcattgttgtagaattttgccacgataagatggttgatggttctcccccgtcaaccaataagagttgacttcatcattcgtgttttaattatcccagatttgctaccatgatgctgcgcctctcgaagtatggtctcatcattggttgtctattatgttcgtttatagtcctgccatgctgattttgtttgcttcggcgcccccaattggttagcctgttgtttggatgcccagcactgtttcgtgcacgctggaccctgactccctgagcacccaggtcaatattatacttcattttcgattttggctgatattacttcatttttgatcttccctattgcggaaaagaaaacttgcgtttcgatctgctgtaagctactaagctcagcggac

SEQ ID NO: 40103 - DNA, 1288 bp, Zea Mays
caaaatcacttctattgaaaaaagcaaaccctaccccctcttctccccttctctcgacggcgccaccatgccgcctccgccctcaaccctagccgccagggcaacaacagtagcaccgcagggcgtaggtggcagagcagggacgcggattccgactgacacttcgtcgtcaagctctcgccatttgtaactccttgctccgccgacctcgacgcaaactacaacttctcgctcgcgcctatccaggatccgctctcgccatggttgcagggacggacccaaataggggaccaagcattcccttagagtttgcacgcttgctgatgcagtgcaagcctgcaacatgcagaggtgcgctagtgccaggtgcggcgagtcagcagatcaaggaaaccgcccgcggccgccccaggggtccaggtctcctcacggcgacgggagagcgcgagccaatgtggagcggttagttggtcgctgctgccaattgttctgcgcttataaaatttcaaggttgttacatttgaattgttattggaaatttcaagtgctccagtatatttattgccagagataaaagcatatgccttggtaactttggtcttgccaatgtattgacatcagatgatcttgtgtcttctataagtatacttgaaaaatttttagtcttgcatttatttgctggtgtttcttgttaccgtattttctccaacaaaggtggtagtaacaccgagttatatgtgcctagaacttcttgctgatataccatatggtactaaatccaatatttggtctctagaatgttgcatttgacaaatgactactctcaggcctgcaaactgcacattacaacgtgaagttggttattgaaagggcgcccatagctgcaaacatagctgtgaccacatgatgatgacgatttactacagcaggcacttgcaatgtcaatggagggtggtgcttcaggatctgcagctgtgactgactctgctatggcagaagctagtgcagttgaccctgacttagcgttggcttcctggtgttgatcccaatgatccatctgttaaagatttgttggcatcattgcacaaccagggagagcaagagaagaaggaagacaagtaagacaaaacagaagacgagaagaactgcttcaagctggagtgatgtcgctgtggtgcttttgtgactgatcatctctggagcttttgtgaatgatctagctagctatttgtaaatgatctagttgtgaatgatattataattgtgatacttttgtgaatatataatt

SEQ ID NO: 40104 - DNA, 784 bp, Zea Mays
gtactggagtggcatttgacaaagcgtgagtgcgagggcgaggatcgcaagtcgtcgacacggtgctgcgaccaagggtgatggcgaggcggagattgaggatgagcacatgaagggaaatgacgatgctgtcgcacacagcgtgaaggcgaatgacaatgacatggatagtgttggacgggaccaaatcagttcagagcttcaaatcgacgaccaacagatcgacatcgggactcaacggcagcacaacaccaccacgagacggaggcgaactggcaacgacggccttggactggtgcgggggctgacagtagggaactccgcgatgggcagcaaggctcgacggcgaatgacgtgatggcaggcagggagagagtgtggactggggaaagactcagtgagcagcaacgcgagaagcaaagcgaggttgcggccgggtggactcggacacaaacacacgcagcgacctcatcgcgtccatcacgtgtgcatcacagacaacagggaggagttcagtgcagtggccatgggcggacagaggagcaggcgattcgatggcgagctgcagcataaaccaaggcaagaccgcgaccgacgagttggagcataggcaagcagcaggcgcgggcgagcagagtagacaggacgccgggtgtcgcaggcaagctccatggatggacctagtcggagcaaggcgcgcatagggaggagtagaggccgagctcggcgaccatggctgggatgcgtagatagtagggggcgagcagaaaaaggactcggcgag

SEQ ID NO: 40105 - DNA, 601 bp, Zea Mays
gccatccaaagccggcaccggttttttgtgtgctcgtccagcgcccacgctcccagcactgccggacgccgacgcactgtccgtaggcgagtctacaggtgagcggcgcaccacagtccgcgggcgagtctttcggagttccggcgcaggcgcgcaacacagtttgcacgcaagcggcgcacccgccctatcggtcgccgctcggctgcccctaacctgaggagcagtccagggtccagcagtcgcttaggtacccttcctgttccagaatccaagctcccttccagaatccaagctcaagtaggatgaagataaatgaggagattttttagtcgctttaagaggttccgcaacaggtggtgctagtccaagtgaagtttcaaagcaactcaagacatatattgttcatgtgagaaggcgtgctgcttttagtacttgtgaagatatagcatctctttctatgaagatggtttagaccggaaagcatgttgtatttcctttagtctacaagctaattgagttggccctattattacatgtgtcaacgacaagtgttaagataacattttcagctgtgaatataattaaaagagaattgcgt

SEQ ID NO: 40106 - DNA, 2139 bp, Zea Mays
cggcgtgtgcttccaaggatatcacttgtgccccttgcctcccaggctctcaattcccaccctctaaatctgtccactcccaccgccactccccctctgccgctgccggaaattcatgttaactattttttttggtgcgtctacatcagaatctcataagcctgcagtcaatttgtcagtttattgagacatccaacttgcatgagttgatcaacaagcccatccctggttccttatggaggcatcatcttccttgcgcttccaagtttctcgttttagttcgttcaagatatggctatgcctttttctggtactcgttcttcagaactgcagcccagcactttcagattcaccatatttggtcggtatggggagctatgacataacagggccagcagcagacgttaacatgatgggatatgcaaatgctgagcagattgcatcaggaattcactttaggctaaaggctcgtgcctttatcgttgctgagcctaacggcaagcgtgtcgtgtttgtaaatcttgatgcttgcatggcatcacagcttgttactataaaggtgcttgaaagacttaaagcaaggtatggagatctttataatgagaataatgtggctatcagtggaatccatacgcatgctggtcctggtggttatctgcagtatgtagtttatattgttacatcacttgggtttgttcgccaatcatttgatgtgattgtcaatggaattgagcaatgcattgttgaagctcacaacaatctccaccctgggaaaatctatgtgaacaaaggtgacctccttgatgccagtgtgaatcgcagcccaagtgcatatctaaataaccccgctgaagagagaggcaagtataagtacaatgttgataaagaaatgaccctcatcaagtttgtagatgatgagtctggtccgattgggagtttcaattggtttgcaactcatggaacatctatgagtcgtacaaattctttgataagtggtgataacaaaggagcagccgcacgtttcatggaagattgggcagaacaaaatggcattccaaaacaggcagctcatgtaaatcacgatggtttggaatcttcacacatgacctctcgacttccgagaagagtctccccaataattcctgaaccaaatgagataactgatgacttagtacaattggcgtcatcctacgaagcctcaggtggacggcgattatcaagttcaagtatcaccaagcgtatcagaagtacccaacaaaacagacctaaatttgtttctgcattctgccagtcaaattgtggtgatgttagtccaaatgtcctgggaactttctgtatagacactggccttccttgtgacttcaatcacagcacatgcaatgggaagaatgaattatgctatggacgagggccaggatatcctgatgaatttgaaagtacccatatcattggcaataggcaatttcaaaaggctgtagatctttttagttcagcttctgaagaaatacaaggcaaaattgactacaggcatacttacctagatttctcaaaacttgaagtgaatgtccgtacaagtacaggaagtcagcaagttgtgaaaacatgcccagcagccatggggtttgcctttgctgctggaaccacagatggtcctggagcttttgactttaaacaaggagatgtcaagggaaaccctttctggagattagtaagaaacttacttaagacaccagggaaggagcaagtcgaatgtcaagcaccaaaacctatcttgctagacactggtgaaatgaaggaaccatatgattgggcgcctgcaattcttccaattcagatcataagaatcggccagctggctatcttgtgtgtccctggagaattcacaacaatggctggcaggaggctacgtgatgccgtcaaagctgtacttacaagtgacaacagtggtgaatttaataacattcatgttgttcttgcggggctaacaaatacatattcgcagtatattacaacttttgaagaatatgagatccaaagatacgagacccctgggtgcattattgcaagctgttttaaccgccgcggaccccttatatttagcgtcacaaagggacaattctacatttttttcatctttgg

SEQ ID NO: 40107 - DNA, 1804 bp, Zea Mays
gcaagctgtaccctgcgttgtcggtggccgcctcccgcccgcgcacatgggtgtcatggggcgtagaccgtggcggcctcagctccggtctccgggattaaagaatccaggtcatggcttcctcgcgccgtgggcgtccatgtcctgctgctgccgccgcgggacctgagaggagaaggacgaggacgaggtggtggttggcggcgtcgcgccgacggcggacatgggttggaggcggggaggaggcgcggatggcgtggccaggagatgggtgctgctgctatgcgtcgggagcttctgcctcggcctgctcttcaccgacaggatgtggagcttgccagaagcagatgaggtagcagtactcccaaatttaagaagagaggaagaggctgagcgcaagactggagactgtaatgttcaaggaaaacacgattacaatgacatgttacgtgtctcagatgctcaccataattcacagactttggataaggcaatagcgaacttggagacagagctctctgcggcaagaactctacaagattctttcctcaatggatctccagtgcaagaagattacaaggcttcagagtctaccggtaggcgcaagtaccttatggtaataggtatcaacactgcttttagcagtcgcaagagaagggattctatccgcaacacctggatgcctacaggggaaataaggaaaaagctggaggaagaaagagggatcatagttcgttttgtaattggtcacagtgctatttcaggtggaattgtcgatagagcaattcaggcagaggataagaaacatggagacttcatgaggctggatcatgttgaaggataccttgagctgtcagggaaaaccaggacatactttgcaacagctgttgctttatgggatgctaacttctatgtgaaggttgacgacgatgtacatgttaatatagcaacacttggaaatatcttatccaaacatatttcaaagcccagggtatacattggatgcatgaagtctggccctgtcctctctgacaaggatgtgaggtactatgaaccagagcactggaaatttggggaagtgggtaataaatattttcggcatgccaccggtcaactgtacgctatttcaaaagatttggcagcctacatatcgctaaacaagcatgttttgcacaaatatatcaacgaggacgtgtctttgggagcttggttgatagggttagatgttgagcatattgatgaccgcagactatgctgcggcactccaccagattgcgaatggaaagctcaggctggtaacacctgcgctgcctcgttcgattggaaatgcagcggtatctgcaactctgtgcagaacatctggggggttcataagaagtgttcagaagatgaaaaggcgctgctgactgtttctttctaatcaaagtgcagtgctgtgtatctgtacattgtgcaaagaatgtgtccggttcataggtggctaaatggcttacaattagacaacaccactggagcaggccgcaattttactcagcgtccgctggtggcactctgaggatttaaggggtgtagagctgaccgattcttttagcaagttggccagttgggtggtcatacatgtattgacctgataaaacaaacactatccgacgagttcagccaggctgtctgagctaagacaggatgaataacggctggttgagctcatgcaagacatttatttggttgattgtacaaattaatgcagaccggtgtagatgctatttggttgactggacaaacaaataaaaaaaaatcttttttg

SEQ ID NO: 40108 - DNA, 195 bp, Zea Mays
ccctattcccctttgtggccgccacaccccctctctctccctctccttctcccccaagtaattgcaacaccacccctcaaccctagccgcctccacctcctctccatggtgcagcctccccgcttggtaccccgtcgtgtgggtgcgagtcttccattggagtttggagggaggaagaaggaagaaaggaaggag

SEQ ID NO: 40109 - DNA, 1892 bp, Zea Mays
cacgcctctgttctaaagttgtcctcagggagataattgtacaaacttttggcatctcacatcaatttactccatccatgatgaatctgagcatgaatggtggtgccaaaaaacttgatgggaaatctatgacaatgctgtggagaaacagctacaatggcatgcaagccaagtttgctgcaaggcagatgccagatgattggcaggaaacaagtacacttttggctacattagagaagattgagtcttggatattttctcgcattgttgagacaatatggtggcaggcactaactcctcacatgcaaaaacgagtagaaggatcatcaactccaaaggctggtagagtgctatgtcctactttgggtgatcagcagtagggcaccttttctgttaacctgtggaaggctgcgtttcacgacgcattcaacagaatgtgccccctcagtgctggcggacatgagtgtggctgtttaccaatattagcaaaactggtgatggagcagtgtgtagcccgtttgaatgttgccatgtttaatgccatccttcgtgaatcatcaagtgagataccaacagactctatatctgacccaattgttgacccaaaagtcctaccaattccagttggtgatctaagctttgggtcaggcgcgcagctgaagaactctattggaaacgggtctagatggctgacagataatcttggcatagatcatgatgactttgaggacataggagatgttgaagacgaaagaagagttgcagctgaaacgaaatcgtttcaacttctcaatgagctaagtgatcatctattttttagtttttcataattttcctttcatggcctccttacatgtttgatttcctatgatccatgagctgccaatcatgataacgcggtttcactatgcaggagatgaacaaggatgcagtcacaactgatgctatcggcagtatcagaacttgatggtgcttgtagactgttcatggtgcttgtagggatgatgtatgtctatggcttactgagctccaaccaactatggcaggagcgttagctaggacagcagtcagtctaacaattgtggacaaagttcagtctaccatacactgaagcgcacccttgttgctaaaggtgtgaacaactttgctcagcagaatggaggatcattgtcactagcagcaagacctcgagcccaggcagttaaccatcagtttctttccttctttctttgggccgagagagcaaagaaggatgatgcactttccaacctgtgtagcacgttgggacaactcaagaaatggcagtggatatggacatagaaattgacaggcaaaacaaagcgctggttcctttcagcgacgacatcactgaactgaattttagactgaaaggcgtgaatcagtgtggacaccagttgctgggcaagtgatatggagccagaattcgggcagttcggagactatcgccttgattgcagaatttaagaacattgttgttttacatgtttttttgcagtgaatcaggccacacatgttgtattagtgagagaatgatgatttattttatattattatggatttcatagattattttagttttccctgaactgcaattgtttcaataacataggaggggactaccttcaatgacatttaggtgaatttttaaggtatgtccattattccattatagagcacaaagcctacttcttacaactcactgtatgttttataattgtatcaaaagcactgaacaaacatagttagctatcacgttcactgttgtctaaatagattgaaataatgtggtgaagccgtcatggactcttaagtagcttagccactgcaaaggatacaattaattataaaacaccaatgaatcaataaaaaaa

SEQ ID NO: 40110 - DNA, 2028 bp, Zea Mays
atcggcaaggctttgctggcttgctgcagaagttgaagaacatcattacaaacgagctccctacaaagtatacagactaaaaaaaatagaaaaggaattccgcataaacccctcccagccaaaaaaaaccacccccgccgcggccgccgagcgagcggtaagcagccgccgcaccacgagagcgggatggcgtcggctccggagccggagaacgggagggaactctacgcgctgctccacctctcgccggacgcctccagcgaggaagtccgcagggcgtaccgccagtttgcgcaaatctaccaccccgataaataccaggacccgcagatgaaggatgtagcaactgaaaacttccaacgaatatgtgaagcttatgagatactatcagatgataacaaaagacaggtgtatgacatctatggtatggaaggtttaaattctggcctggaacttggtcccaagctaactaaaccagaagaaatcaaggaacagttagaacgactgcggcggcgcaaggaggaagaaaaacttttcaagcatgctctacccaatggctcaatcattgctaatttctcagtgccacaatatttaaatgacgggagcatcatgagaggaatggcgatgcttagtcaagttgagttgccagtgtccaagcaaaatactgtcgttgttggtgggaatttgattgtaaatggctcagctggatctggagcagcaaccactgtgctgcgacaccagttgtctcctgtttcctctattgagtttatggccacagctggactacgttctgttattggtgggcagatgtttcgcaacttctggacttgctgtttctttgagagatgggtctatcaacttgtcaaatgcctggactcgccaattgtctgacaatactgttggaaatatacagctagtccttggcgatgaatcaagtatttctgttggatggcaaaagaaggatgaaaaacgtactgcaactggagaagtaaagtttggaactaatttttttggtgcatctgctcattatacacatcgcttctcctccaaatctcatgcacgcatcgctggtagagttggaagcacaatccttgattttgaaattggaggagggaggcgaatatcagaatttagtactgtaaggatgatgtataacataggaattcagggcgtatcttggaagtttgagttacatcgtgctggtcaaaagttaatcatcccagtcttgctttcaactgatttaaatccattatttgttaccagtgcatttgctattccttcaacactgtattttctacttcagacatatgttgtaaagccttactaccttaagcgagaaaagcagaaaacactagaaaagatggaaggcttatctacacagctaactgaagccagaaaggcagctgaaaaagctcaaaaattactggaacctgtctccaaccgtaagaagaatagacagctagagaacaacggattggtgataacgaaggctctatatggcagtcgccaaaaaatcaaaatgagcagtgaattgaatgatatacacaatgacatggcttcacaagtatttgatgtgaccatcccactgaacttcctcgttactgaggcaggccagctcaagcttcatgacgggataaagaagtctggaataatgggtttctacgatccttgtcctggagacccgaagctattacttgtcgagtatacgtttcatggtcataaatacaaggtcatggtggatgactatgaggcgctgttgataccacaagatatccatcaattttgaacggttcctgatgtaaaagccacatcaaaacgattttgggtcatcagctccctttctcacattttttgttccttttgtgttgagctatctctgttttcggtcattccttaatgcgcctcgtatttgtatacacatgtcggtttgtgccacctcgaggtcatacacaccaacagcaggtaataaagctgtagccagtagttttccagaaagaaaaaaaataaaaataaaagtaaaactcaatg

SEQ ID NO: 40111 - DNA, 525 bp, Zea Mays
cagctcgcttcagactcaatctcgtcgtcgttccgtgcgtcatcaagaaatcccaagagtcggatgaagacgaagctaacagcgtgatattcacaaagtgctcgacaaaagctcgaacaagtcgtcgatcgtcatcctcgtctacgccaaaaatccgagaaaattaggcgcagaagaaaataaatcagtacgcggccagagaattctcaatgtagatgaagaagtgtgattcgacgcagcactcaccatgtgcttggtgaaatgctagagctaaatggcgtcgtcgatttcggggtttcaaatcggatttaagtatggtaagccgattgattactcctgctatcgattcgatgtccagattggttatatatatttgtcgatgattatcttgtttgcaacatacacattgtggcggtgtttgatatttattaaactgcttcgtatatacagggtatggtttcgtaaatatcgtgaagaataaatttggtatacgaagtgattagccgattacttctattattatgg

SEQ ID NO: 40112 - DNA, 1708 bp, Zea Mays
atcttcacctgcgtccgcgtgtgctgtctccctctttctctctctgcgacgactgggtgggctaccgccgccgccgccctacgttagataccgaggccttcgccggcgacgaacacccgccagggatggcgaccacagcactgctccgggctctccggcggccctcatccgaagccgcgctgcgattggctacaaaggcaaatgtgcaaacaactaatggatatagacatctgaataacaggaacctaagcgttttcaatgagttttctaagcaactaaagggtgaggccaagagcaatcctgaattccagaaatccatgaaggagttcagcgagaaacttgatgtggtgaaggaagatctcaaagtaagaactaagaaaacgactgagacaatatacaagcgtgttgatgatgtttggagtgaagctgaggagacatctaaaaaggttactgcaaatatcaaagaaaaaatgtttgctgctaaagaagaggtaaaggaaagttttggagttggaaaagaagagagtacaagttgcagggatggtttgcctgaaggttcaaaacatgagaaaactgaggcatcctcacattcagatggcacgactgaagatgccacagacagccatacattgtttactaaattgaagtcaacaatctcatctgcttcaccagtagtatccgatccgaggtcacccggtctacagaagagtggatgaatacaccaagcctgttgtaaccaagggacaagaggtagctgaagatgtcagggaaagatgggagacaagtgacaatccagtggttcagaaaattcaagacttgaatgaatctttgcttgaagaaacctcagctgcggtgacattcagggaaattcggcaacgagacccgtccttttctctttctgattttgttgctgatgtccaagaaatgatcaagccagttttaactgcatattcaaagggtgatgcggagactctaaaaaactactgcaccaaggaagtgattgagcgctgcaaaggagagagagaagcttatgcatcacagggaatattttttgatcacaaaatcctgcacatttcagaagctgatgtattggaaacaaagatgtttggatcttcacccataattatcttacgcttccaaacacagcagatatactgtgttcgagatcgagaaggacaagtcacagaaggaggacaggataccatccaaaccgtcttctattcgtgggctatgcaactcatggacagcgacgaggtgccagaagaagaatcctattacccagtctggcggctgcgtgagatgcaacaagctggcatcaaagctctcatatagctagctgttcaacgagcatgcaagaacgttgatattctttcttttttatttttggctgatttgatgcatcttctcgcagagttagcttgtagcagcgtatactgatagcaacttggtgaaagtgcattatttaatccaacttataagcctcaacaaatttgtaatgacaagagtagcttgaaacaggaaaaaaaataccgatgagcagctttagcctatctcattagtctttctatctcacattctcactccttatccactgcaatgtcctttatctgctccatcagcacaatcctgcttgctgtccaaaatatttcttgacagttccgtagctgcaatgcaaatgacaggaatattgaaaaggtcgctgttatta

SEQ ID NO: 40113 - DNA, 240 bp, Zea Mays
ccgaccgtgatcccaccggcaaacccgaccgtcatcctcctcccccgcctcccttccatcctcgcccgccccttcaatacttctcccgtgccccttccatccccatccgtgctccaccattccacacacgcgccccttccatcctcgtccgtgctcctcccacgacctatgcggcagcggatccgaagcacaacatccacgacgaggtcttctctgtgctgcacgagggtggccaccgcc

SEQ ID NO: 40114 - DNA, 2070 bp, Zea Mays
gagctgtaaaccggcaagcgagtctgccgcctatataaacatggccgggtcgactacggtttagagccgcgcgcacgcctccagcagatagagaagcttggaatggcgatccaaatggacaagacgtccatcatcgtttgctcggtgatcgggtctctagggttgctgagtgccatcctggggttctcggcagaggggacaaagctcactccatataccatactggtgtacggcgacgactgcctctacccgcagaacccggcgatcgggctcgggatctgcgccgccatcttcctggtggtggctcagatcaccttctcggcggtgggcggctgctgcggctgctgcaggtcccgcgccatcccttcggagaccaaaaggatcgtcagcatcgtctgcgccgttttctcatgcggacccagccagctgcggcggcgacggcgacggcgacggcatcggctgtgggcacaccgaacatgccaggagggcagtcgccgtcccccgaggtagtaatgggccagccgctgtttccgtcgggcaaggcgcatcagaacgattaccccgtaaaaccccagggatacgagcacgagcagcagcctcatcaggtgcagcaggtccctcctcctaccgactctcaccacccaccacaaggctacgcacagtccgctgcgccaaaccaccagctccctccgcgcccagccccagcggcagcagccgcagcaccggcggcggtcgcagcggcagccgcagcctcggcaccgagcgtgctgcagccggcgctcgggacggtcgccatgggccagccgctgccgctgcaggtcccgccacagtactgccttcctgtcccggcacctcagatcggaggcgtggacattcctgccgctctcccctctgctgctgctccggcggcagggagcgggtccacgctatcgacggctatccgcaacgaagtagtgagacaagggattagaatggctgcggaggtggtgaaagattccctctttcctgaaaacgggggtagcgttctttccatgatgacggattccgctggaggcgacgctgttcaggttacaaactaattaagtaaggatatgacgatgcgcttattgcttaatgctctgtgcgttataccttgcctttagtttgctgtctgttcttcctcctgtgtatctgtcagtagcttcggcactgtgaagcatgtcctgtgtctgtatacctacttgctgtcgtttgaatcgtcctaaactcgaacttcaagtcacttttttcattgtacctgtgtaatatgtagcttttgcctagtatccatcagaattgtgcagctacactgtttatatgatgattatgcttgtatttatttggaggcgactacatcctctttcatttgccttttagtgttcctagccaaaatattttgccgtcaccgtgttattgatgtctacagaaatgcagctaaacagaacgtgtcgattccaaactaacgtggctcaaatatgaagtcttctatcagtgaccttgggagcaaatcgtgaaaaatgtatctgcttttgatatcctattgtcttacactatctgttcttttttatttatcgtattttagttcacaaataaagtttgtcacaactgaaaataagcacagtgcagtgcagtagaaactagaaaggtgtgtctagcaggcttggcctgtgtgatggttccacaaattgtttggaaatgcttgaggctgcaatggacgatgggccgctggtagtcttctgacttctgaggccgtagcaaacatgagaggcatctgtagtttatttccttttttgccgtaatgcatcatcggattcctcgcaatttaatctggatgcatatgaaatattgtgttgacctgattacgtgccagaattttatgaattataacagttattgtgcattttactatgtgttaatattttaattttaatacaaatatattatattattttgatgggctacatcgtggttctccatgtgtcttctttcgcacgggcacacgggtgagaggcaaatcggttaaaacacgtgaaatttagtgttagaaattgg

SEQ ID NO: 40115 - DNA, 2075 bp, Zea Mays
gggagagattccctggtggacacgtcttcctccgcgaactgcgcccacctccgatctccccggcttgcctacaagtctccctgccccctcacttctcgcgctcttcctcttctccagcctccctctgccaacaactctcgcgagggcgccgtccgcctccgcctccgtctcggggagcgatgacgatcgcgcgacgcctgctccgatccaatgcctccgcccaggcaatcagcttactgaagcatgtaactggcactgcaagtttgcaaggccatgcacatagtccgttggatgcgtcagtcagacattttagttcagctccatctgcccagtctgacacaactgaagaaaatgggttcaagggccatggcatgttggcaccttttacagctggctggcagagcaatgatttgcatcctctaattattgagagatctgagggttcctatgtttatgacatcaatgggaataaatacctggattctcttgcagggttatggtgcacagctttaggtggtagcgagcctcgattagtcaaggcagcaactgagcaattaaacaatttgcccttctaccattccttttggaaccgcacaaccaaaccttcattggaccttgcacaggagatccttagcatgttcactgcaagggaaatgggaaaagttttcttcacaaacagtggttcagaagcaaatgactctcaggtcaaactagtatggtattataacaacgcattggggaggccagacaagaagaaatttattgcacgatcaaaagcataccatggatctacactgatatcagcgagcctaactggtcttcctgccctgcaccagaagtttgatctaccagcaccttttgttctgcacactgactgccctcactactggcgatatcatcttcctggtgagacggaagaagaatttgcgactagacttgccaccaatttagagaatcttattctcaaagaaggaccagaaacaatcgctgctttcattgctgaacctgtgatgggtgccggtggtgtcatccctcctccaaagacctattttgacaaggtcatcactgcatttggaaggttgggaactatgtttggatgcgattattataacatcaagccagatctagtttccttggccaaggctctttcaaatgcctatgtacccatcggggcaactcttgttagcccagagatatcagaggtgattcactcccagagcaataagctcggctcatttgctcatgggtttacatactctggtcatccagttgcctgtgcagtggcaatagaagctttgaaactttaccgcgaaagggatattcctggtcatgtcaagcaaatcgctccaaagttccaggacggaattagggcgttggcagacagcccaatcatcggggagatacgtggcttagggatgattatgggaaccgaattcaccaacaacaaatcaccggctgatctattccctgccgaatggggggttggtgccatctttggagaggagtgccagaagcgcggcatgctggtcagggttgctggcgacgccatcatgatgtcgcccacgctgatcatgacgcccggcgaggtcgacgagctggtgagcatctacggggaagccctcagggccacggaggagagggtgtcagacctgaagatgaaatccgagaagaactaaccaaaagggcgaggacgacgacgataacgcctggcggcaacggtagcagctgatgtacaggtgaataaaatggtcgtgactgcgagatggcaataatgcgcgggaatggtcgacggtcgtctctgatcttggagtgcaaggtcaagctgctcggtcgctaaacaacggtggctgaacttttaaacgggacatagatgtttttttccctaagcaatggcagtatctcaaatgtttgctgccctgtagtttctgaacataaagggttagcagacgttataaaatttaaattttatcgtaaaacagttgttattctcattttctagtgtatcttcctctcccccctcccccaaaaaaacaattgcatgtcttgttgaacttttatgcgattgggcttaggga

SEQ ID NO: 40116 - DNA, 1393 bp, Zea Mays
agccgcttccctccagtcccaagtcccaacccgaactcgcacgccaagaattctagaatctctctttaagagggatacagagtaggaaagagacagagggggcaaagagcgatggacgccgcggtgcggaaggccgcgggcgccggcatcgcgcgcgcgccggcgctggtgctagcgctggtggcggcgggggcgttcctgatctcctacaacttcttcaccatgctgttccacggcggcggcggaataggcgcggcggtgaccgctgggacgagggaccctgtggtggccatgccagcgtggatgcgcgcggcggcggacaccgaggcgcgacggcggccgttccatgtggcgctcacggccacggacgcgccctacagccggtggcagtgccgggtcatgtacttctggtacaagcggatgcaggcgcggccgggcggagaggccatgggcgggttcacgcgcgtgctgcactcggggaagcccgacgggctcatggacgagatccccaccttcgtcgtcgacccgctgcccgctggcaaggaccacggatatgtggtcctaaataggccgtgggcatttgtgcagtggcttcagaaagcaaagattgaagaagagtatatactaatggcagaaccagaccatatatttgtgaaacctctaccaaatttggcccatgacgatgacccagcagcatttcccttcttttacattacaccatcagaacatgaaaaaattatcaggaaatactatgctaaagaaagaggtcctgtcacagatatcgatccgattgggaattctcctgtgatcattaagaagacaattcttgagaagattgcccccacatggatgaatgtgtcaattcaaatgaaagaggatgaagagacagataaagtttttggatgggtgttggaaatgtatgcatacgctgttgctagcgcattgcatggagttcatcatatccttcgtaaagatttcatgatccagccaccttttgatacaaagctccagaatacatttataatccacttcacttatggatgtgactactcactaaagggtgaactgacctatggtaaagttggtgaatggcgatttgacaaaagatcattcccagataggccaccaccaagaaatcttacattgccccctcctggagtaccagaaagtgtggttactctagtgaaaatggtcaatgaagctagtgcaaaccttcctcggtgcaagggtgaaaagaggaggttctactggggtgatctgaagatggccatatgttccgacttccgagttgttggcgaagacagacccatcaatgatttatcgtggagtgcactaaaatttaacacgcctttaagagccttgcagtgtgtgccgcgttggacagaagtatagt

SEQ ID NO: 40117 - DNA, 2014 bp, Zea Mays
acgaggcggagtcgccgcacgccctccgctttccgagtgacagccgcactcggccctcgtagctggaggagtgggggcgcgggagagatgataaggatggcggcagcgtctcagccgccatcgtcagccttgcggatgcacgggtgcggcggcgcggcttctgcgtcgtccgcgcccgtgcgcctcttcacggagtcgcggggtagagtcgtggcgtcgattgggaggggcaggaggcggaggcgcgccatctcgtgctgctcgtctccagacgcagatggccctcgccccgccgcgccaccgacctccgcagcgccttccgacgggtcgatacagctctattcccagatcgagagggtaatcacggaggcggcaaagcagtcccgggaaggctggggttcgactggagattggaccgaagtcgagggatcatgggtgttgagaccgaagtccttggagccatcatttgttgtccactttgttggaggaatttttgtcggagccgctccccagatcacataccgcttcttcctcgagtgtctcgcgaacaggggagctttggtgattgctacaccttatgcgagcggctttgaccatttcttcattgcagatgaagttcaatttaagtttgacaggtgtttgagaaacttggatgagcctgtaaatgatctcccaacgtttggtgttggacattcattgggatctgttatccacatgttgattggatcaagatatgctgtgcagcgaagtggaaatgtactgatgtcctttaacaacaaggaggcaagctctgcgatcccactattttcacctgtaattgttcctatggcacagagttttggccctatattctcccaattggcatcgtatccaacaatccgatttggggcagaagcagctattaagcagcttgagaatctaagcccacctgttgttaagcaacttctacctttacttcaacaacttcctccgttgtatatggacctaataaaagggcgggaggacttcattccaaaaccagaagagacacgccgcctgataaaatcctactatggaatttctcggaatctcttaataaagtttaaagatgatcaaattgatgaaacctctacccttgcacaagtactaagctctgaagcagctattagctcattgcttgatatgtcaattcgatcacttcctggggatcatgggttaccattacaacaggttcttcctgatgttccaccagcaatggctgatgcagtgaaccgcggaggtgaacttctgacaaatctgacaacaggcacaccatgggaggctgttgctaaggaggttggcaccactttgggtactgactcaggcattctacgagcacagatctcaaaagacgttgaaactcttgttgatgtaattgcttcatggacatcttcaaattctggtccaagactacttcgcccatgatcacccagcagtctgcgtacagaaatgttagtaacagtgaagagcaacaggatttaatgatgcattgtgagtaacaaaaagatgatacgagacgttggcaattaaggagttatgttaccttggccggtggaggaaggatgcatggcactggcaataggagcttttgtggacaaactatcttaacccattggcaaagaaacattacgcttcttaacagctggcataaagtcatcgtcatcagaatccacctctattgtttctttgatcaaagtttgactgtcaacatttggaggatttcccacaatttgacttggattggactgttctgcgcacggaatgtcaacgctgaaacactcctggcttgactgaattgttatacgtttgggattattcggaggacggtccacgtgcttcatgttttttagtcaaaattgcatgcataatacacagaactctaaacattaatctgttggatatgcggatgtattgattgtgtggtatgattgaatcaattaatctaaatgttttcaataccaagcataaagccatctagaattttgcatgatactac

SEQ ID NO: 40118 - DNA, 295 bp, Zea Mays
ccgtgccgccccgccttgctccggcgagcccgccctgccccgtgccctggctcggtcgcccgcccccgcgcccggccgtgtcctcgccgaccgcgtcctcgctcgcccgtgctcgcttgccacggcgtgcttgcccgcacgccccgccgtgccttgctcgcgtcgtgacagccccggcgtggcctcgagctcggctcagcgtgcccatggcgcgctgagagcacctagagggggggggggtgaataggtgatcctgtaatacttcaaaatcttaagccacaaaacttgattaatt

SEQ ID NO: 40119 - DNA, 4296 bp, Zea Mays
atgtacaagctccgcggccgtggcggcgggcgcggcggcagcggcgtagcaaagcgaccgatgccctccaacgcccgcggccgtggcgttgcctcctctatcggcgggatggccgggcctcctcgcagtcgcgccgccgccgccgccttgaaacagccggtgggacgcgaggaggcgttctgcctcgagtccagcgggctgcctgcctttgcggctataatacggctgacgcccgacctcgtcgacgagatacggcggacggaggaggccggtggaggcgcccgcatcaagttcaaccctaacatgtacaactcatcggagaacgttatagatgttagtggtaaagaattcaaattcacctgggcatctgaacgaggcgaattgtgtgatatttatgaagaacgtcggagtggagaggatggaaatgggttgcttctggagtgtggctctgcttggcgcaagatcaatcgtgctggaccctgccaatccatctgtcaagagtcaggccaagtcaatggctgctgcagctgtagaaggtaatccacggaggatgcactggaagcagaagagcgaatttcttaagaagaataaagttttgaaggtgaagttatctaacaacatccccaaagggaatatctcaagttcacctgcaccttctcctgaacaacctggagaaagcaatccttcgtttcctgttggatcagatgcaaataatgaagtcataacaccttttgattttaacaaagaggaaaacagtaaatatgagaaatcagttagaaataagatgtctaacaaagatataaatcgccgagcaagttctcatgctgcaaatgtggatgataatacaaatgaagtgcgaagctacttgatatccgtgctctcaaaaaatccaaaaggaatgggcctaaaggccttggagaaagctgttgcagatgcatttccaaatgcatcaaagaaaatacagagcatcatcaagaatattgcaaattaccaaggacctgagaggtatgttctgaaatcagggttggaggtagaaagctcaaaaagtcatgtatctgaaggaatccatcagtaagaaaattgaggaatcggctccaagcctgacgattgatgatcctgatatatgtgagaggattgacattgtgggctccctagttgctccaactgatggaaaactcagtaatgacagtgaaggtaaggctggaacttccagtgacagtggaagcgatagcgatagtgacagcagtaacagtggaagtgatagtgggagccaaagcagaagtgctgcagaaactggtagtggaagcagcagcaatagtgacagtgatggctcatcaagcagcaaggaaggatctgatgcagctgttgatattacgagtgatgatgacaaagcaaatatagcacacacaaaagtagtggatgaccttaatttgtcttcatcgccaagagatttgaaaagactcgatgttgatgatgaacaaattgacattgaaacaaatcttgactacaggagtacatcacctcatattggtctgaataagtttaataccggtaatgatgatgcagcagcagagggctttagtgccggcaaccttagtaagccatctgaaatgtcaggaagcaagaacatgacgagcaccagaatggattctattggagttgataccaaatataatgaaatgtcttttctggacaacctttttgatgactccatgagaatagccagtgaaaactcacccaagggggaagctggtcaattgacagtgcagcatgtcaacaagagaaaatcaacatcaaaggatgaatcaaaatttggcccagtgagtattgctaaacctaaattaaaaaggtcttctggcagcgagaactctacagcaaagcctgagagtgctaaaaaggtcaaagctgacatagcatcgtcaataggttctttatcagagcacaaaagaagtttaccacctgaaaaatatagcaatgataggtttaacaaggggacatgggatgttagccgccatgcttcacaagatagcagtcctgccatgaaaggaagacctttggctcctggaaatttacagaggatagatcagagcccaaatttacctgtcccaacaatgcactctgagagaacaaaagaaaatactgtgaaatcaagtttgaagaaaaaatcagataagtcgcagaaaccatggcatggtatggatggtgactttgggccaggttattcacatggtgtagatcaccacgctaattttgatggctctgatgatttttccacaagaaaaaggagtagacatgggaatcttcttattgatgataaaatgtttaagcgttcgaaggacgctaatgccaatgtagattccatgaatttaaccaaaagttccagagaaactgttgtgcctgatgaaataactgcttttcctgaatctaatgaatgtaatggtgagcagtcaaattctcaaagagataatgttgagagatcaccttacggtaaaaaaaagctccagagggagttttctgatcttgagttggctgaacttcgcaagacttctttggaaaatgacgatggaaggataaggaagcaatttgagagtagttcctccaagtcgcttgatgctaaattaaatgtaattaactcctaccccagtatgaatgacagaaaggttcctgttaccgtctttaatgatactaagaggaaaccttcacctcaagaatatggaattggaggccatataaaccaggaagggtttcccaggaaggcagcagggtatgagtttgatgataataggcctcagcaaaatattccagacagtcagcatttgccaaggatttataatacagattttgagaatttaatatatccagatagttcaggaaaaacaagcaaaagggaaactaggatgacacatggtggaatgctagagtatgctgatatccagaagaagaaaacaacctcaaggcttccacagaatggtactaataatgtcagagtgtctcgaatgcagaaatcaatatccccatcagataatgatgaaagaagtaggaacgactctttgattgagacaaagacaggtaggaagagaaggggcagttcttcagatgatgataatttgtttttctccaagtatgataaagatgctccggagcttaaagatccaataaaagatttctcacaatacaaggattatgtgcaggagtacaatgagaagtatggggtttattcttatttgaatagtcagatagacaaaactatgtcagaatttttaaagattcaggatgatctcaatgttggaaaagaaagaggcaaggaacagtattataacaccttagaaagactcagagacatgtatcatgaatcaggaacaagacataaattgatgaagaaggtcttcgttttgcttcatgaggaactgcagattattaaggaaagaatcaacgattttacggacgcctattcaaatgagtagctgttttactctcataacatgtgactgcttcttgtcaaggctgataatatctgggcatcagcattatgctttgcctttgtagaaatttacttggcttggaaatattcagtcgaaggcacgtatcacaggaaacctgagagacttagggtgtgtttggttgaatgtacatgaagggatggaaaaaggtggccacagatttaatagtgtttggatgagagtcgcgtaggggcgaggtgaacaccggagtagttttaggtggcggcgtgttgccctgcctcatcccactttgtcctcaaaccaaatcagcgtgatgaatttgatagtaatcacggtgaagtggaatcaaagacagttcaaatatcaatggcgtcgctggatacctgcgcggttccgcacaggagagcagaagaaatgattcattactcagggaagaggtgaggttatctctgaggaaacgagtaggccttacatcagcagttttgcagctagtttggcactgtgaccgggcggttctctttgtagatgttctgtgtttttttaaccccctgtgaagggcgagatctctcctctcttggcatttgtacatcgctttgtattagtgtgatccatgtcaaactgaaataaattgctaactgtgtacatatctgtagagccgatagagaagaagttttggagggagagaaaagtctgggacatttttttttgtcgcaaacacccacacaccaattcctaaatcttgcaactggtaacgaagatattggttcgatttttcttcttttacgtcattgacctctttatgtctatgaaactgcgacccatttctcgtctcttg

SEQ ID NO: 40120 - DNA, 600 bp, Zea Mays
accgtctctcacacgctctcatcccttccacgctgccgccgccaaactcagactcgcaagcgggagctccgtctctgccagaaactcgccaccaccgcggcggccacggctccactcgcttcctcgcccaccacctccgcggacaccgagcggaggaagcacgaactgctgcgcgcggttcaggaaatgcggcacggattcgcagcgcgtggggcccgaccaacgcgctgccatcgaggaggccgtcgtggcggtggaggagcgtggtgcggggaagggaacgacgatagatctcgcggcgctcgatggcacctggaggctgtgttacacatcggcatcagacgtgcttgtgctgttcgaggcggctgagaggcttccactcctgcaggtgggccaaatataccagaaatttgagtgcaaagatcgatcagatggtggaattgtgaggaatgttgtaaggtggagcatcgagaacttgctggaggagcaagaaggtgcaacactgatggtctctgcgaagtttgttgtcctgtctaaatgaaatatatttcttcaatttgaggaggtgaagcatccaagggtaacgatgtcgacatgagg

SEQ ID NO: 40121 - DNA, 2391 bp, Zea Mays
actgccatgccgataatttctagccacaattccatgccttgcccgtccagtagctcccatctcatcccatcccgacgaatcaaatctccatcaccacttcaccagtcaccaccttgcctagcctccgtctgctgcggacgccagacatcagtcagcacgagggaagcccaaactctgccgcctcttcctctgcgctgcgctaacaacgattcccgattccatggccgcgaccgccatgattaggattaccactttacgttgccgccacgacccgctctcctcccttccccgcaccacgtcggccgcctgctcctgtacccttccgcctcgatgtcgccaatgcagactgctccctccccattcttctggctgttccccttcctcctccatctttccgcgccgggtccgggtccgcccaacagcagcattgaagcgcatcggtggcggcaacaccagcttcatgggtccagccaacaatggcgccaccacgcttcagcgatcttcatcgcccgaccttcgtcgcagcctgatcgtcctcaagtctactgctggtacaggaggtggcaatgcttcctcaggactgctgcccaccattcttggggtggcgcatctgcttgtgtcgctgggcattgtgctcgccaccgataagttcctcaaacaggcatttgttgccgcgtccatcaagttcccaagcgccctcttcggcatgttctgcgtcttctctgtgctagtcgtgttcgacacattcgtgcctgctctggcgaaggcgttcatggacttctttgagcctgccacgctgttcatccagaggtggctaccgttgttctatgtcccgtcactggtcgtgctgccgctcgccgtcagggatgtcccagcggcttcaggagtcaagatttttgcaatcacttttggcggctggtttgctacccttgcggtcgcaggatatacagcattagctgtgagaaaacttgtgaaaacacagcttataccagcagagcccatgagcaaggcatcgccattttctacagtagaaacctgggcatgggctgctgtattcgttgcatcgttcggtgttgcatgtttcaatcccagagctcttggtaccacagcaagaacatgccttccctttctgctcgctgccactgtgctgggatacatggttggttctgggttaccatctggtgtcaagaaagtgttacatccaatcatcacctgcgcactttctgcagatttggcggcagtagcgtatgggtgattacctcacaaaggcgccctctaatcctggagctggtgacgtactaatgggtttccttgggtctgtgatcatatcatttgcattctcaatgttcaaacagagaaagcttgtaaagaggcacgcagcagagattttcacatcaattgccattgcgtcgacattctctctgtactcaaccgctgtcatagggcgcctgattgggctggagccatcgttaaccatatccatattgccaaggtgtataactgtggcgctggctttgagcatagtatctttctttgaaggtgtaaactcttccctaaccgctgccgtggttgtcgttaccgggctcattggcgcgaatttcgtgcaagtagctatggataaacttggtctcaacgaccccatcgccagaggaatagggacagcttccagtgctcatggactggggacagcagcactgtcagccaaggaacctgaagcgcttcctttctgcgccatcgcttatggtctcacgggaatttttggctccttggtttgctcggttccagtagtgaggcaaagcttggtattcatagctggttaggagcagctcgtgatgatctgaatttgaggatctgattctttagataaaggaaatcgtttcatgtgtaaaagaagtcgtgctcagaagacgaggaagcaaaacgcccccacgttttgggtcaggatgaagaaaggtgaataattccgtaatcaggatgtaactaaaacactagagcaaggcggatccattgtttgtttgatactttgtgatatcacctttctcccttcactgacacgagagatataaagtacttgtaggtttcataaattcgacaatttgtttagacaaattacggtttgtagttggagaagaaaaaatcattccagatctagttgcggagcaaaagcatttgctagtggacggattgcctgctggagatggaatgatgaggttgacacttcgccacacgggccaccgctgatgtcgtgtagttaaggctggttctagctgatgtcgtttagttaagagcctctttgggtacaatgttctcaaaaccttggttctacaatgctatattttgtcagctccaaaaataccatgattttgagaaacatttttaaatgcaacattt

SEQ ID NO: 40122 - DNA, 2555 bp, Zea Mays
aactcacctcatcatcatcactcccccgtccttgatctcctctctctctctctctgtcgccaagagggcgccgccgccaccaacgcaacgcgcgccgccgcagatctccgccaccgacgcgccggccatggagtacgagcgcattgagaagccgttccccgtccagcagggcggcgggttctcgcccaagcggctgcgcgcgatgctgctgggggtggacaagcgccgcaaggggcaggacggcgccgccgaggaggacgaggacggcggcggcgactacggcgccctgccgaaggcccacgccagatccggcgccggcgacggtggtggcggtggaggcgccacgtgcgaagaatacaaggacgtggacgtggtgagcaccacctcagagttctcgtcctcgctggagacagcgggtgggcaccggccccgggacgctcaccccgtcgccacgggttctaggaccagggtgccgcccgaggaggactcgtgcgactcggagagcgtggcatccaacttcgagttccacaaggagcggcgggcagcggcgtcggcggcggcgtcggtcgtccctccattctcaaagcccgccccgtcaaagtgggacgatgcacagaagtggatcgccagcccgacggcgaactgccctggcaggggtggcgcggctcctgcgccgaagaagacagagaaacctggctccggcatcgggaggctgccgctgccggcgaccaaggtcgtggtagaggccactgaggagatagataccaagaggatggatccgagccaggagaagcgagagattgggtggcagaaagcggcgaggtgggccccgcccgacccctgtccggaggcggagccctgcccaacaaagaccacactactcgctgtagaaactacagtggctgctgcttcagcagctgttaatttcaaccgccatgatgcatccaccacgcttcagagcgcagcaacatgcatacctcctccaacaacggtccggtcagtgtcgatgagggacatgggcacagagatgacgcccatcgcaagccaagagccgtcccggaccgggacgccggtgagggcgacgagcccaaactgctcccagccaacgactccacggaggacaatgcagcagctcggagctgagcgagcaggagctgcagaccaaaaccaggagggagatcatgctccttggcacgcagctaggcaagaccagcatcgcggcatgggcgagcaagaaggaggaggagaaggacgcctcgctctcgctgaaaccggtgcccatggaccagtcgacgcagaacataaccgcgatccgtgcggctgcgtgggaggaggcggagaaggccaagtatttagcgagattcaagcgagaagagatcaagatccaggcttgggaggaccatcagaaagcccagatagaagctgagatgaggaaaatcgaggttcgcagactgtttcctgtcaattttcctgttaataacgatgggcgatagatccctgatggattctccacgttaccgagacacacatgcattttcacctcttgagttttaacttgtgaaagtttaaaacacagaggcgaaaagttagcggcctagatcccacacctgctgcggctactatccgtctgaactcaatggcattgccctctctaggctatcatttcatttggacactcccgatgaagatgcaatgcattctcaaatttagcatgagatataacttacagccaggacactagttttcgactgcacctgcacatagcggttggcgtcagtatccatttggatttgacagtagcaagtagtccaagtgttgtttgttcttaatacaggacggcaagtgtttctaggctactgtactcaaatgaggcagcctcgttgtgctgtgccaccactctgtgattcagttcttctgttcagtttgccatagatgttcaggttcagaagaacatacaaacccaaagggtgcagcgctgagctgtgtttgtggatactgcattgttggtatcgatagttttaaccatggcccgtgctttgcgttcctttcctcaaggtcgaggtggagcggatgcgtgcccgcgcgcaagacaagctgatgaccaagctcgcgtcggcgaggcacagcgcagacgagaagcgtgccacggcggagctgaaacggaaccgcgcagccgcgaggaccgctgagcaggcagagcacatcaggaggaccggccgggtgccgccgtcgtttggctgctggaactggtgctcatgaagtgcccatggaagatgagtcgcccgttgagaatgagtcgcttgtaagctgttgtaactatatatatatatatatacacacgtatgtaaggtgtgagatccatgcgtcctgtgctgtggtggttactgtgtaagtgtcacagatgtaccgaattcaaggccgagcttggattcctagtgcacatatgtgataaacttcacaccaagagacctccatgctagttgtgactgaatttgatttgtgctctacttgatgcttatactaacagtccgcactgtgatagagctagatatagc

SEQ ID NO: 40123 - DNA, 843 bp, Zea Mays
aacccacatacggcacatggccacgcagcctataccgcagagcgcagaggcataaaccccccgtaacctaaccccaagtcctagtcccactcccatcctctcgacatctttacgtccctagcggctggtggtcgtccgcctatctggattcggccatcctaggctccgcccatctggatctggtgccttagggactacccccatctagatctggccatcctaggctccaaagaccggacactcggcacgacgatcggcgccttaggcatggacactgaggagccgaggtgcccggggatgtcgcgttcactggcagcgctgggatgtcttccatcgtgctgaggtagatgataatgccaacgtagaaggggatgatgcttagttgggttcaactctatcctgtcctgtcagtttggatggcgaaggtggagtgttgagagcaccatagatggttccaataagagaatgagaaccagaatgtcaaaaactagggtttggaaagattggaagcctctcttcaaaatcacgaacgataagcaagttcggtatgctgctatatgtaagatttgcaatgtagagttgtttgctaagtctagtggtggtactggtcatctattgaggcatgttgctgcttgtaccggaactgtaattgctattatgtgaactgtaactgctactatgtcttcactggtgaaaaatctttgtggtctgtttcactatttgtgactatgtagtatgcgcttgtaaggctgtaactgctattatgtaaactataagtctgtaactgctaatatgcttttatgtcttcactggtgaactataaatatttttgtggtatgttgg

SEQ ID NO: 40124 - DNA, 2925 bp, Zea Mays
gcagcgaagcaggcctccttcttcacaagcgcttctgctaacaggtatttctgaaaccagccgtcgtacgtccatcccaccgggagcaccggcgacgatgccgccgcgaacggtgtccgatgggggagacgacaacggcaccgacgttgctagccgaacgtcgtcgcaccgccgcacggagcacgggcatgggtacaaagtcggcgtcccaccggagaagaacctcctcgccgagatctctgacgcggtgaaggagacgttcttcgccgacgacccgctgcggcagtacaaggaccagcccaggtccaagaagatctggctcggcctgcagcacatcttcccggtgctcgactggagcaggcattactccctcggcaagttcaagggtgacttcatcgctgggctcaccattgccagcctctgcataccccaggacatcgggtattctaagcttgctaacttgccagcagaggtgggactatacagtagcttcgtgccgcctctgatatacgcagtgatgggcagctccagggacatagccatcggcccagtggccgtggtgtcgctgctgctcggtactctccttcagaatgagatcgaccccaagacacacccgctcgagtacaggcgcctagccttcacagcaacctttttcgcaggggtcactcaggcagcgctcggattcttcaggctagggtttatcatagagttcttgtctcatgctgccattgtcggattcatggccggcgctgccatcaccattgcgcttcagcagctgaaaggattccttggaattgcaaacttcaccaagaaatccgatattgtatctgttatgaaatcagtttggggaaatgttcaccatgggtggaattggcagacaatactgataggagcgaccttcctggcattccttctggttgccaagtacattgggaaaaggaataaaaagctcttctgggtgtccgcaatcgcacctctcacttcggtgatcatatccacattttttgtgtacatcactcgtgcagataagcatggcgttgcaattgtcaagaacataaggaaaggcatcaacccaccttcagctagtctaatatacttcaccggcccatacttggcgacaggattcaaaattgggatagtagctggaatgataggcctaacggaagcgattgcaattggaagaacatttgcagccctcaaggattaccagatagatgggaacaaagaaatgatggctctagggaccatgaacattgttggttcactgacttcttgctacgtagccacaggttctttctcgcggtcagcagttaattacatggctggctgcaaaacagcagtgtcaaacgttgttatgtcaattgtcgtaatgcttactttgctactgatcaccccattgttcaagtacactccaaatgccatcctttcctcgatcatcatatcagcagtgcttggtttaattgactatgaatcggcttaccttatctggaaagttgacaaactggactttctagcatgcatgggagcattttttggagtcatattttcatcggtggagtatggcttgctcattgcggttgcaatatctcttgctaaaattcttctccaagtaacacggccaagaacagttttacttggaaaccttccacgaacaactatatacaggaatgtagaacagtatcctgatgctaccaaggttccaggggtgctgattgttagagtggactcagctatatacttcacaaactctaactatgttaaagagagtggttttttttgacaaaaaaaaagaggtggaccatgctgtactttaagagttcgagaagaatgtaaaaccattaaaatgaaagcataagacgctagtgattagaagaatcagctaaagagggaaagcagtgcttaaatagaatctaaatttcagaatcctgaggtggctaagagatgaggaggagcaacaacaggaccagaagttaacaaaaactgagtttctaattgttgacctgtctcgtaagtcacaagaacatatctgagtatatgctatctttttatgtatgttccaatatagtgatcgaaaacattgttctggttctcaacagctgtaattgatatcgacacaagtggaatccatgctttggaggagttggcgaaagctcttgaaaaacgcaaaattcagctggttcttaccaatcccgggccggcggtgatccagaagctccgctcagcgaaattcacggacatgattggtgaagacaagatattcctcacggtcggcgacgctgtgaagaaatttgctcctaagatggtcgataatgtctgatggagtttctgggtcatgtacagtacgagcaagaagtctatctattatgtggcaaagttcagtggcaattatggatttatagagcagaaacagaacagaacgggagtaaataacatggttcgcggaatggtaaataaagaagatgctccggagttggagtgcatcacgtttgcgaggtgtggttggatagaaaacagttggtggcctagttgggcgtctatgtcagtccttgtggttgtggagtctgttccgcgttggcaagcactcagtgatggagatcaaatgcttcatggatcagcagatatgggtgcctgatgattaacatatcatcattgatcgtgaaagaagagttacctcgttggggtttcaggctttgtgtatatcttacagtacttagctcctttccttgtagtttaagttgttatgatgagcttttacatttggcttatatatgtatattctgtaacgttgatgcattgttaagtgttcctgaccccaaaaaaagggggtgcaaaaacgtgattgtgaagtgtgaggaatttgcttttatcgttcctactggcatgcatgtgcaagatgtattgggcactcatatctgctgatccatc

SEQ ID NO: 40125 - DNA, 479 bp, Zea Mays
cgtcgttttagaatatatcgagtcgattcgaatttggtgagcctcgtcactatctttgctaattaatttgattgatggattgattagaaatgtagccgatgattttcttgttctaacgcgagtgcgttgaagtgattatgtttaggtccgttgccatgtctatgtgttgttctatggcgttgggtaggaaagagtcttcctctccatcttgtgcaacagttgtgataattttggatgcttgtttgaatatttatttatgcgatgacgtggtggcattcttaattgtgaggtagctgtatacatgttgtatgatgaaacttgaatttgggatgtggtgtatgccgagatattctagtggatatataagtctagtgctattcaattgaatgtattgttgtttagggctgcagaaacagttttaattacccagcaactttagtgaagtaaaccatgttttctgtagaaatgttatatagtaa

SEQ ID NO: 40126 - DNA, 1241 bp, Zea Mays
ctcgtctacgcctctaaatcgtcgaagccgcacctgagcacctccataatggcaaatttctcgtcgaatagaacctgccgagccggtcgcaggcgcgaggagaatggggacggaggccgacgccgcagccgtggattcgcttcggtcgcagatcccgttccagaccgacggggagctcatcctcccgccgcgcgatgtggggctcgtcctcgtcgacctctgcaacggcttctgcaccgtcggcgccgggaacctcgctcctgttgcgccaaataagcagataagtaaaatggtggaagaggccgctaggctctctaagctgttctgtgatagaaacctgccgatctttgcattcctggatacccattatccagataagccggagccaccgtatcctcctcactgtatcattggtactggggaggagaacttcgttccagacctggagtggttggaaaaggagccaaatgtgactataaagaggaaaagttgtattgacggttacatcagctgcatagaggaggacgggtctagtgtttttgttgactgggtgggaaaatatcagatcaaaactgtcttggtactcgggatatgcacggacatctgtgttttggattttgcaagctcaactctggctgctcgaaatattgaccgagtgcctccattacgagatgtcgtgatttattcagaggggtgtgctacatatgaccttcctgttgagatcgctatgaatatcaaaggagctcttgcccatcctcaggacctgatgcatcatattggactctatatggccaaaggaaggggtgcaaaggttgttgacagggtggttattgaaccttgaataaaaaaaacttccctcatcgtagtgatgttgctagagtttcctgtcttctcatccttccattgtaacaatcagatatatatgcgtcttagcataaagttgttgagatactaatgctagcgacaactatgttgacttgtcgagtatgtagagatgggctcatcattttgtggtgagcttgtacatatttcctgagattactttgtcctgccaaacatgcgccagttctccattggttgctaatgttcggctctgggattgtatattcgtatttaataaaagtactccctcctattccaattcgaattataggatattttgattttttttaatatatgacttttgctatctacagtattcgatatctaaatacataacaaaatatatcaaaaaggcaaaa

SEQ ID NO: 40127 - DNA, 2044 bp, Zea Mays
atatggcgcacggttctgccttgcacccgcgagaccctccactccgcgcagcaccagccgccatccccgcccgccatctgcgcgcgtctggcgtctccctcgcccccgctctcctctctgctgtccacgccctctgctcgcgtgtcttccagccacccgcgagcagagccttcgcccccggatcccacgcccgcgagcagagctgctgtccatgccgtcggatccgctcctccctcggaaggagaatctccaaatctcgccaccatccccgcctaccatctgcgcgcgttggccgtctaccggctacgcgcatgtgactgtcgttggatcccaggtctcgcccaattccaagcgcccccgcttcgagcgtcgcccccaacaagacgtccggatctgcgctagccctagctcgcgaggtcgacgccgatggatccaaggacaccagcgtcgcccctctccgagctcccccaatggccgccgcggggatgttctgctggtccacaccaagtgcgccgtccacaccaagctcctcgccaacgacttcctcctcttttccatggccgcgagctccgctagacaccgctgtcttcgaccctgctgcgccaacaagtgttcgaagaagagggaaatcgagcgccagatggccacggccaagctattcgcggaggaacagctcgcagaggttgtcgccctcaagagaggcatcttcgtggggactggttgttttgctgagaaaaaaataccgatcatggaggccggaggaaggatatcaatattatcaaaaaagcatttataagctaccagctcctggcttcagcttcaaccatgcacatatctctgtccgcagaatttgactactcggttgggccaacaattgccagaggaaggatctcaatattcgatggtgtacagaagagtttaccggttgtttcacccatcttgttattcactatcttgatattcaccatcctgatcagaatgtggccaccaatggccaccatcgagtttttgacatcacacctgtccttcctccccccagttcctagagcccagaggtttggcgctgcacatcactgttccttcttcagtccactcatgtagtcatgtccatggatgaggttttttcctcttgaattcagtgggacaaccgttatgttgtgtttcttggaaaaatgtctttcgttagtgttggtcttctaaataagcgtcacttcataccactttggatctgactacttatcacaagaatgatcagaaaatagcaatattcttggtcctcacttagatacatgtctgaaaactttggtattttctgaagagtggtctgaatcagcagtcttacttgtcctatcaggaatgaaagagcctggaccaacaactcttgctttagggattgatttgacctcattggggttgaatttgaactcccaagataatctttacaagacatttggctctccgtggtcaagtgagccagctgtaggagaacctgattatcagatcccagcttgtttctctgcaaagccaccaccagcactgcaaaagtttcaccctttgacactattctacatcttttacagcatgcctaaagatgccactcagttatatgctgctaatgaactcagctcaatatctagcgtgcttttggaagtctgttcaaggggtggagtgaggagaagatatattttgctcccacatacaagtactcttgcaattcagattcttatgctggagagactgccacatcaaagaaaaagaggagaaccccagcctggtgtgaaagaatactatggcatggagatggcactacagcagtctgtgtccttaagcaaatcacaaaacactgcactagaccagtgaaccatacttgcatagctacggcccatggctaactactattattgttatgacatcaccggtgctggggcggggcccaaatcatcgattaaagcctaggtttttgtgtgacttgggaacacaatacctcggaacctttctaaaggacgctaagttatctgttcctcgaggaaatttcctgtgacca

SEQ ID NO: 40128 - DNA, 5203 bp, Zea Mays
cgcgcaatcgccgccaccgccgcgtcggcacgtccgccccacctcttcgcttaggcacgcgccaaaaccagtcaccggccgcaatctgccaatctcccgagccgcagtcctacgctccggctcctccacctcctaaccgcatttgttgatgacggcggagcaggagtggagtgaggtccaggtccgggccctcgacgggcgatccacggtcgtcaagctgccccttggcgcctccgtccgggacctcaaggccgcgctccggacgtccttcttgcccgcgcaagtctcccccagcttccacctcttcctgaagggtgctaaattgcgtttagacgctgagattggcagccttgctatcggcgatggggacttcattgttctcgtacccttcacaaggacgccacagcagcatttttcagttagcacagcaagtcaagatcagggccactgtccaccaaaacaaccagaagtgtcttctgcggctaattcagcttggcaagacattatggatgacctctcagcaatgccagccagcccacagtctgatgctgcttccaaagatttttactcctcatgtgacccgtgctctgggagatttacggaggatatgaaagcgggtcaaatttcgacaagtgggtcatcaaggaaaaggaggaaaacatgcaaggaaaacggaaatggttccccacaaatggtgtcctcgtctgaagcaaatggtacagctgagaaacacaacataagcaagaaaagtggggtggccaaatctgctgctatgttatgtcatgatatgcaacctttgaaacctgctgaaatggttgaacatctgaaacaaggacttggaaaggaggggcagatcgtacatatccaagagatatcatctagagaggcatcatttacagaacttccttgtaatctttcagaagctatgagagaagcgctgaagagtattggaatatctagactgtatagccaccagtctcaagccataacatcctctatttctggaaggcacattgtcgttgcaacttctacatcaagtggaaagtctctatgttacaatattcctgttcttgaatgtctttcccaagacttgatggcgtgtgctctgtacatatttccgatgaaggctttagctcaagatcagttgaggactttaataaagttgaagaatgcatctcatattgatgttgatgttaaaatatatgatggtgatactcctagagaagatcgtttgtggatcagggataatgctcgactgttaattaccaacccggatatgttgcatgtgtcaatcttgccgtatcatggtcaattccagagaattttatcaaatctcaggtatattgtcattgatgaagcacattcatacaagggggcatttggctgccatactgcgctcataattcggagattgaagcgtatttgttcaaatgtttatggtagttgtcctacattcatattttgtacagcaacctcagcaaatccatgtgagcatgtcatggtaggttattccctctctttagcatagttttgagaagacatggttgtacctagcaaaaagaaacctgctgttcttaatattttttagagtaaaatgcagggtggtccctaaacttgctacaaggtggtatcaaggtctccaaattctgaaaatgcatttcacgtccttgaacttgtcttgttgtgccattgaagtccaaagctctcaaaatgttactttcacgtccttgaatttttcatatcgtgtcatgcaggtccaaaggggtcttagtcaaccctgtgccttgatgtggtaggctgctgtgcatcctcagtggcttaggtcttgaccagtgagtcatgctccatctccgtgctctgcctttctcatcctctctctctatttgtgttgccaagcagacctagcaactatcgcaatcccttacacaccttcattctccatcccctccttaaagtcaacgatgtccctggtagtgattagtgaaggccataagagcgaagctggtgttccacgaagtgtagtgctagaggttgaaatgcgggccccaccatcacgtggcactcactgatcaagaattgagccaagggtatatactgtgggttgtggcatgcaacgtcaaggcatggagcaggtcaggtcctgtttggaccaggacctatatgacactgaggatggacaagtttggggatcttgagagtttaggacctggatgacatcatatgacaaggtttgggagttgaaaatacattttgagagttcgggacttgagtgtcggccaaggacaagtttgttagattgtgtgtgtgggccgacaccgctgttgggctgccggcccattagggttagagttctgtgtctatatatgtaaccctatcagtgtgctcttccccacgtcgcgttttctgttccggcgcaccgactgctagcggccctcgcttgagccgtctttgcagcgcctctctccccttcgcgcttctcccgtcgccggcgtcaacctccctgctaagcccagcgcagacccatgcccggttagaaccgccccgtcgccctccgcttcatcgccttcgttggaaccctcgctgccgcagccttcccggccgtattcaccgctgctgcgaccttcccggctagatccgtctcccctttggccggatcaccattttcatggctggatccgtcgctgtcgtggctttcccgaccggatccgttgacaccccttctattctacctcggacgcgaccaccctgaccggcgcagacgcgtgtgctgccgtcggcctccatggaggggctcctcgacgatcggacgcggaaagaagctagaaggccctcgaggctattgttgtcctgtttgcgtcgccccgccgactgttgacgctcgaacgtcgacccctcccgaagaacaggctactactgcgtgtctcccgaccacgaccatctcaacttcgtctacctcagcatctatgggctatcatctttttggagtgcacatcggtctctattccagctgcaacattcacaccctcacgacgctgcgactgtgggggggtttcaacccgtcggctcctacctttggcttctactccattctcatcgtgtgtggtgcccccgttgcgactgcaggggggatgttacactgtgtgagtgtgccgacaccactgtgggctgccgacccattagggttagggttttgtgtctatatatgtaaccaccacctctatgcaatacaatcaagtcattccaataaagttcaaggactgctcatgtcttttactcattttgctaaaacatagtggcctcatgttataatcttttaaactatgtttgtccaatgtttcaagaatattgcatgtgtggaactggatgtattttctctccacaataaatatgtttgtcctaggaattggccaatttggatgaagtcgagttgattcagaatgatggaagtccttgtggttccaagtactttctcttgtggaatccctcactacctatgacagaaggaaggtcaaaagctagttcagtacataggcgctcaagctcaatagtagaggtttcatatctattttccgagatggttcaacatggcctccgctgcattgcattctgtaaaagtaggaagctatgtgagcttgttctagcttacacgcgtgaaattcttcaggagactgcaaaagaattggtagattctatctgtgtatatcgtgctggctacatagctgaggacagaagaaaaatcgaggctgatctttttggggggaaacttcatggagtcgctgctactaatgctcttgagctaggaattgatgttggacatattgatgcaacattgcatcttggatttcctggtagtattgccagcttgtggcagcaagccggtaggtctggaagaagagctaaacaatcactagccatttatgttgcctttgagggtcctttagatcagtatttcatgaagttcccacataaactatttggcaggtcgattgagcattgccaagttgattcacataatctaaaggttttagaacagcaccttccttgtgctgcttatgaacatcccttgtgcgtgcaatacgatgagtgctactttggctctagtctcgatagtgtaatgacaacccttaaagacaaaggttatatcatcaataatcgagctggacctttttcttcaagcatgtggaactatattggacccgagaaaagcccttcacaggctgtaagcatacgggcaattgagcaggacaggtataaagtgattgacaagttaaatagtcgattacttgaggaaattgaagaaagtaaagccttttttcaggtttatgaaggtgctgtttacatgcatcagggtgccaattacttggttgaggaacttgacttggcatcaaggacagccttctgtaggaaagctgatttgaaatattacacgaaaacacgagactacactgacatcaatgttctcggaggagaatttgcttatcttcctacaagtatatgtagaactaatcgggtgaagacaactgctcaagcaaatgactgcacggtgactactaaatggtttggtttttatcgcatatcaaaatctagcaatacaatatccgacagcttcgagcttaacctgcccccatactcctttacttcccaggcatatgatgtgcagtgcttctgacctaggaacagagtgcgctaatcctcatgaaagccgtggcatcccagacagaatccttttatatgatagacatccaggtggtatcggcatagcatcacaggcccaaatgctcttcgaggaactcctcctggctgctttagaagtcgtttccacgtgcaactgcacaagtgccgttggctgtccaaactgcatccaatcactgacgtgcagcgaatataacgaagttttggacaaggaggcagcgattttgattctgaagggagtaatcgactacgagagatcgtattttgaagcggaagacgcttctcagcgaagctgctgacgtcgaggctacagtaggcagcgaggagtgacgtgttcattactgtttgttcgtttggtgtttctctcgtgtatgtagatgggagaggttcggtctgtatctgcactcacatttgtagcctcgtcatatcaaagttgatatcatatcctacgacaatcaggtccatacatctgtacaacagtacaacccaaacatgtgagagctactggcga

SEQ ID NO: 40129 - DNA, 2116 bp, Zea Mays
ctacaattcgcccccttcccgcacaacgcatcccccttcctcctccccgtcgatggtgttgtcttctctctcaccctaggacaagggagacactatcgctcctctgccaacgatgtcgagtgctcccccacacgtacggagttgttccaaagactcctgtacttcccctgcaagcctcggcggtgaccatcatcgatctatggacctcggtgagtggaggtcacggatctactccaccggtgtcgacgaggtttgtttccccgtcctggagaagcgacgacgcaatagatcttcgtgcactgcagagtcgtctcccccaagccgcaaaggaatcactccactccatcctcgttctttgaatcgatctggtaaaccttggcctttcccccaaatcttcccgctgtccttccaccccctcgcctccataaccccacccactgtactgcttttgtttcacttgctttctgttgaatccatgctacatttgactgtgaattcaggaaatcattaagtataatcgaagtcccgttgatttctggttttgtaggacattatgatctgttttcttgatggtacataaactgagtttttatagttgttagatgcttgttgtattcgtttgtttagttcagactgcagaggttcaacaacagcaggcttagggtatgtgttgatcttaactccattttcattagcccattagaagcaatgtgttattttttggttacattattatcttttggccgtgaatggcaccaatacataattagttggtatgcacagacaactttgtaagcctgacttggtgatagctatggtattatgtaatccaccttagtacacaacactagctgttcatgcatttacttatctgtcatgatatactccaattatcctagtacatctaaataatctggtaaggtatattacatcattcatttgagttgtacactaataaacaaatgttatccatgtgtagagccttgtggtgaaatacttgtcacttgtgtccgtcatcttgtttgttggtttgtttatctatctttttgcaagctcgtccaagagccggccaaaagcaagcaagaagagatgttgatttacttataggttgtagttttaggtgtatctggtggttttgccagaggaactcttagtagtttgagctgagtgaaagcttttaagtttacaattactgaccacaccatgaattacaacgacgtgagcatcagttttgaaggtttagcaaactctggcattttctgactttcatgctgtccatcttccaaatgaagcccttttggaggcaaatctagttttatctgctctatgttatgtcaatactgattttgtatatttgtaagtgctgtggcaatactgattagttatgattattgaaaatatataatttaatggatatgatatacatatttatccttctttaagacactctatttttgtgtgagtgcagtggcaaatgttttcggctgttggccatgaatttatttagtattttatttgatctcatgagattagaacatacatctctagaagctttgaaggacattccttagtcgatatgcccaaatgatggttttcttgaccagattgaagaggactatagtctatagatcatatgctcatttcaacatcaagggcaatttgattcaattaagtctaggatgatgattttcagtacctaggatgaagtttcagagctgccacctaatttcaggccagatttattttccagagccgctagatttcagtttcagagctgcacgatgaatccacacttgattctattttctcttgactttcagagctgcaagatttctacagaattggaagactatgctaccaaaaaagctttcctaatttacctaagatgaagttcagtattgtttaggacgagtcatatgtttatgtctttgtgtctccaaaaatatttgtacacgtatcaagtggtgattattttaagtttcgctactctatatattggctattttatttcaatgagaaatggtttgtccattgcaaccgtgtggagtttctcatttttattaatggcaaatgctgatgtatattcatttttgttgaataaatggtttatttcttg

SEQ ID NO: 40130 - DNA, 252 bp, Zea Mays
ctaagtcgtcgagcccgattgcaccacctaccacaaggattggctaagaaagtctggtgttcactagagctactttgtagaggctgctcttttttgtgcagtaatacacagtaacctgagagagagataaagaagcagatcttgtgctctatgcagttgacaaacaaataaccacatcgacttcagagggatttgaagaaggttcatcaccccgaattgtcttatggaagtaacttgaattatcaactggta

SEQ ID NO: 40131 - DNA, 1714 bp, Zea Mays
actgccccatggcccattgcttacgcataactgcggcggggacacgcgacgctaccgacttcgccgccgcctccttccttccgcccgtcgagtcgaccgaccgattgttcgcgggtcgcggcctccctcctagtcagatccactcaatcccaagaggccaagtccaaaccctacccaccacccttctcaaccagcgatgatggcagcggagccctcgccgtcggttccctccaccgccgctgacgccctggaaaccctcgccctcgactcatcctcgtcgtccgccgccgctaccgcctccacttccaccgaccccctcctccggccacctacctccccgaccgccgccgcgagcgacgacccattcgtcatcgacgacttcgacgaggacgacttctccaccgccccggcgcccaacgtcgcccgccagccgcgcgctgcgcgtggtgatgcggcgtccccagtgttcgccaaaatcaccgtatcggatcccaagaagcacgcggagcccagcggcgggggtgccgccggtgtgatcccggggtccggtagctacttctcttacctcatcaccacccgtcttgcgggcggcggcggggaggtccgcgtgcggcggcgcttccgcgacgtggtgaccctcgcggaccgccttgccgcagcccaccgtggcctcttcgtcccggcccgacccgacaagagcgtcctcgaggggcaggtcatgcagcgccacgacttcgtgagccagcgggtgagcccccgcggtactggactaccacgctgaatgctgctgctccgctggtgccaacgaaagctaggagggacttgtttgggatgtttaagggtctcaagcagacggtggtgaatggactggttgcaacaaagcctccacctgtggagcaggagacagacacagagttcctggcgcacaaggccaggtttgatgacttacagcagcagcttaccataacatcacagcaggcggaagcgcttgttaaagcccaagatgatcttagagaaactacaggtcacttgggaatgacattgattaagctggcaaaatttgaaagagagcaggcaacatgtaattccctaagaagacgtgctggtgaaatccataattttgcaaattctgttttaaagatgagcaggtcacagataaaattaaactctgaaatggtgaaacacctgggcagtatccatgaatacttggagatgatgatatcagttcatcatgcattcacagatcgctctaatgctttatattacgtgcaaagtctgtcagcagatttgttttccttgcacaccagggcagggggacttgaatcttcatcagcaagagatatggggcatgagtggtcaacatatcagaaggtagaggggttgaaagaagcaataagatctgcggaagcagccaaaagtgatgccgttagagaatatgaaagcattaaggaaaacaacatgattgaaataaaaagatttgacaaggaaagacgtcatgatttcattgagatgctgaaaggttttgtggtaactcaggtgtcttattcagaccattttgctaatatgtggacaaaggtaacagaggaaacagaagtatatgccaacaggagcaactgatttgtgaaattgggtcccggcagatgagcaaattggctccacgagaactggcatatgttgcctgcgggagagtctaagaggtttggtgttgtcaagt

SEQ ID NO: 40132 - DNA, 2450 bp, Zea Mays
cccacatccaatcctggggaagacgcgaacccggctccgcggcacgagttgtccgcacgtacggcacgtcggggctggctcgtccgcccgcgagtgggaggccactgtttcctctgcctcaccgggtcgtgtggcggaggggcgtggggccatggttcgcagcgcggggcgacgagcgcgctcctcctctcgcgcagcgccagcgccaccccgcaccgtggctttatatacacccctcctcccaaccctaccgaatcatcactaccaccgctctctcttcctctcctccatctctcaacgcctgaagctcaccgcacctcccctcctcgccgcggatcccccactactccggtaaccgtctctccattcaccctgcctgctgtctcgctagaatcgcctgcctctgccagcgccgtgacgcgggggcgcggtatggctctcccagatccgcctggcattgctcgctcgggtcgtgccaggccgatctgatctcgcatttgctgcgcgctcctcctgctgcggatcccaccggatctcgctggaatcggagcgcgcgtctctttgaaatgccgcagatctgcgtgcttgcgcgcgtgatctaagtccgggcctttcgttaacgaaatggtccgatctgtggtttggtggaggcaatgccatggtttttccccgtgaattttttttgctgattttaggagcttttttctactgtcctatgttagtaggacaaaaaaaaagaaacatagattagcttcaataggcgccttttagaacagattctgtacagcaactcgtggaaacaaatctgcttccttaatgatgttgcttgttttaacaaatgcggcatcgggcgagcttttctgtaggtagaaaatggctgacgctgaggatatccagcccctcgtctgcgacaacggaactggcatggtcaaggctgggttcgccggcgacgacgccccgagggccgtcttccccagcatcgttgggcgcccgcgccacaccggtgtgatggtggggatggggcagaaggatgcctacgtcggcgacgaggcgcagtccaagaggggtatcctgaccctcaagtaccccatcgagcacggaatcgtcagcaactgggacgacatggagaagatctggcatcacaccttctacaacgagctccgtgtggctcccgaggaacaccccgtcctcctcactgaggcgcccctgaacccaaaggctaaccgtgagaagatgacccagatcatgttcgagaccttcaacacccccgctatgtacgtcgccatccaggccgtcctgtctctgtatgccagtggtcgtaccacaggtatcgtgctcgactcgggagatggtgtcagccacactgtccccatctacgagggatacgccctcccccacgccatccttcgtctcgacctggctggccgcgacctcaccgactacctcatgaagatcctgactgaacgcggctactccttcaccaccactgctgagcgggaaattgtcagggacatgaaggagaagctcgcctacattgccctggactacgaccaggagatggagactgccaagaccagctcttctgttgagaagagctacgagctgcctgacggacaggtcatcaccattggtgctgagcgcttccgctgccctgaggtcctcttccagccatccttcattgggatggaagctgctggtatccacgagaccacctacaactccatcatgaagtgcgacgtggatattaggaaggatctgtatggcaacatcgtcctctccggtggtaccactatgttccctggcattgctgacaggatgagcaaggaaatcaccgccctggctcctagcagcatgaagatcaaggtggttgctcctccagaaaggaagtacagtgtctggattggaggatccatcctggcatcgctcagcaccttccagcagatgtggattgccaaggctgagtacgacgagtctggcccgtccatcgtgcacaggaaatgcttctaattctttgggcccaagagatgcaaagccgagaggagccattatcgccagcctcccgccccgtttctttctccttttgttgctgtttcttcattagcatgaacaaagttttctgccggtctatcggcggccgctttctcctattcatcaagactgtaatgtctattgctacctaatgtttctcactttgtcattttggacacatgttcgacctattcaattttaatgagatgcctgatgaggctacttgcaaaaatacatgtggtgttctcaatgaataatatcaaatgttgagctctctatgcctgtgtaaacttgtgtgcctcgttgcatttgccttttgaattttggtcccagtccctcccctgttccatcagattccttcctgtcttgggtgtgctgctgctgcgtggaccaagagtaattctgtccaggctttagcagcg

SEQ ID NO: 40133 - DNA, 1276 bp, Zea Mays
actcggcctgacgccgaccgataaaccccttcccccatcgcttcgctttcgctcccattccccaccatcgccccctttgctcatctccatcccacctgccaatcaaatccttgcgcctcctcccgccatttcgcccccgctcaccaggctaccccccccccccccccccccaaaccctaacccataccgacgatgccgaaggccggcagcggggtggcggacgaggaggacttccgcgccgaggtggacgagcgcctcatcaacgaggagtacaagatctggaagaagaacacacccttcctctacgacctcgtcatcacacacgcgctcgaatggccttccctcaccgtgcagtggcttcccgaacgcaccgagccgccggggaaggaccactgggtccagaagatgatcctcggcacgcacacctccgataacgagcccaactacctcatgctcgcgcaggtccagctgccccacgaagacaccgaggccgacgtgcgccactacgacgatgagcactccgacaacgggttgttcggcgcggccaccggcgagtatggaggatgcatttcagctgctgaatattggtggactaattgttctgagccggccaagcccacgacaaaggtgcaaattgttcagcagataaatcatgatggagaggtcaatcgagctcgctatatgccccaaaattcatttataattgctactaagacagttagtgcagaagtatatgtcttcgactacagcaagcacccatctaagcctccactagatggtgcatgcaaccctgatttacggctgaagggacataattctgaaggatatggcttatcatggagtatttttaatgagggacatttgttaagtgggtctgaagatgctcaaatttgcttgtgggacattaaagcaaatagtagaaacaaaagtcttgatgccctgcagatttttaagcatcatgatggtgtcgttgaagatgttgcttggcacttgaggcatgggtacttatttgggtcagttggtgacgatcatcatcttttaatttgggacctgcggtctccctcgcctgctaggcctgttcagtctgtggtggcacaccagggcgaggtgaactgcctggctttcaacccgttcaatgaatgggttgttgcaactggttctactgacaagactgtcaaattatttgatcttaggaagattcatacttctctgcacacctttgactgtcacaagtatgtgtctgctttttttgttttgttcatagctactgtttgtt

SEQ ID NO: 40134 - DNA, 1837 bp, Zea Mays
cctcgtccccatcccgcaaccgcaagcaaccaccgatccagcccgttcggcctttcggcgaatggtgacgaaccaggacgcggaggcggcatcggcggcagccccggggccaggggcgacggtggacccgatgcgcctagcgtcgcggtggcggtcccagacggagtgggaccgcgcggtgccggagctggaggctgagccggagccgtccgagctcaacaccgtcaacagttcgggactcttctccgtcgtctctacggacaagttgtccgtgaaatacctcggcagccatcaccacggccacgacgtcggtgtcgtgcaggccgaccgccccgctcccacgcgccgggccgtgtactacttcgagatggccgtcaggaacgcgggatacaaggggcagacatccatagggttcacgagcgagagcttcaagatgaggcgacaaccgggttgggagtcaaacagttgtggataccatggtgacgacggccacctttaccggggtctagggaaaggcgaaccgtttgggccaaaattcacatctggtgacataattggcgctggcatcaactacttgtcacaggagttcttcttcacgaaaaatggagctccggttggagccattccaaaagaaattaaaggcccactatatcctacaattgcagttcatagtcagggtgaagagttgactgtaaactttggaaaggaaccattctgttttgacattgagggttatattcttgaagagaaaatgaagcagcaatcggtgtctgataaattgaacttggagacggacatcagtcattggattgtccgctcatatctcctacattatggataccaagatacattaaatgcttttgatatggcaaatgcaactgacccccccaccaatcgccaaaatggtcatgcagaacctcccgaaacgtatggtcttagccacagaaaacttttgcgtcagcttatcatgagtggagatattgactctacattcaaaagacttggggagtggtatccacaagtgataaaggatgagaaatcggttatttgcttactactccattctcaaagattcatagaatatatcagggctgaacaactggaagatgctgtgcactatggtcgtgctaacctggcaagcttcttgacacacgaagcttttgagtggctgctgaaggatagtgtggccctgctggcgtacgagaagcctgcagaatcatgcttgggatacctgatgggctctccccagcgtgaattcgtggcagacgcagtgaacgcggctgtcctgtcgacgaaccccaccatgaaggaccctgagagctgcctctactcgtgtctcgagaggctactaaggcagctcacagtttgtagccttgagcgacgtgcattcaacaacgaccaaggagatgcattcttactccacaaagaaatgcaaaactatgaaaggtctaggcgctcatagcctcataggcatcaggattgttgcgcttctgaagtaaactcggtctgcagcgcccctcagctttcgcaagggtgagcaccgaattgcatggacacagctcaggcgcttcgggaggtgttctaacctctctgtaatcagaaaactcacagtgagataaagccaacgtttcagatttcccctattttgttggttggctaatatgctgtttgacactatgaatgctaaaaagtaaagacgcttcgacatatgcccctggtacaagatcttgtatcatgtcccacgccacgtttgtctacagcatggacatggtcatggagtcacgtacgaccaagcccgacagatatgctgttggcctggtttggtgacagcggctag

SEQ ID NO: 40135 - DNA, 3620 bp, Zea Mays
catcacccccacccccaccctctctctccctccgtcccgccaataaattttcccagcgcgacggcgccccgctctcccgctccgttcctcctcccttccccgaagcttcggcgccccctcgctccctccgccccgttttaagcgcgcccgcctccgaccgaccggccgccacgcgagcgaccgcttcggcaaacggggaggaggaggagtgtttgcttctctgtcttgatcggggaggcgccatggcggacacccgcaaattcgtgctgcccggccaacccccagacatctcgcagatactgcaggaggctcagaaccggtggctgcggcccaccgagatctgcgagatactgtccaactacaagctcttctccatcgccgccgagccgcccaacatgccgaggagtggctctctttttctatttgatcgcaaagtactgaggtacttcagaaaggatggacacaactggagaaagaaaaaagatggcaagactgtcaaagaagctcatgagaaactgaaagctggcagcattgatgtactccattgctactatgcccatggagaggagaacgaaaactttcaaaggcgaacatattggctgttggaagaggatttcactcatattgttcttgtacattacctagaagtcaagggatgcaagcaaagtttcaatcgtgtgaaagaagaacttatgcagctatcgaatgtcgacagtccttcatgttcaaattccatcactagtcagaatcagatgggcccacaaaacatggaggctgctgaaagcccaataagcggacagatttcagaatatgaagacactgaatcagataattgccgagcaagctccagataccaccctctcgctgagatgcagcagcttgtggatggagtcataacggaaaacatgttatacccttccgcatcaactgttggtagtagacaaggttatcatggtgaaatgttgccaataacagataacttagataaccgttcattttctaaccatgacatagctagaatgctcgacggcgccaacattgggctaagcgatgtttccagcactctgtttgattcagtgccattcaatgagcccttcaccaattattcagctgggttcacagagccaacactccattcttcatttgcctgcttagaggctaacgatttggacgatagctcttgtttgcagacatttacatctgaggctctatacactaaccacctcaaccagaaggaagctgatgcactgggtttcactggcatattagcatcagaggtgaacagagatagatataatgatggtagcatcaaacattcactcttgaagcagtcatcattggatctattgacgattgaggctcctggtttgaagaaaaatgacagcttttcaagatggatgagtaaagaacttgaagagctggatgcttatgtagtgaacccttcactttctcaagaccaactattcagcattctcgatgtttcaccaagttgtgcatatattggtacaaatacaaaggtttcagttactggtacattcttggtgaataaaaaacatgtggaaagtcacaggtggtcatgtatgtttggggatgttgaagtaccagctgaggttttgaccgatggcaccctacgctgctatgcaccagcacaccaatcaggaagagttccattttatgtgacctgttcaaacagggtggcttgtagtgaagtgcgagaatttgagtatcgtgattctgaagctcattacatggagacttctcgttcccaagccaatggtgtaaatgaaatgcatctacacattcgtcttgagaagctactcactttggggccagatgaccatcaaatgcttgctataaattccttaatgcttgatgggaaatggtcaaatcaagaatcttctgtcaaggaagtagtttccactgctagggtccaaagtttaaagaaactggtgaaagagaagctgcatcaatggctcatctgcaaagtaaacgatgatggaaagggtcccaatgttctgtgcaaggaaggacagggtgtgattcatttagtagcagcactgggttatgattgggctataagaccgataatgattgctggtgtcaatgtgaacttccgggatgctcatggatggactgcactccactgggctgcatctttgggaagagagcggacagttagtgtcctcatagcaaatggagctgcagcaggagcactaaccgatccaacttctgagttcccttctggaagaagtccagctgatttagcttcagtaaatggacacaaggggattgctggttttctcgcagaatctgctttgacaagccatctgtcagcacttactattagggaatcaaatgatagcactgtagaagcgtgtgggctaccatttgctgaagatctcactggcatcgattctgtccatctcgctggagagggtcctgatgctgaatcacttgaaggttctttaagtgccgtgcggaaatccactcaagctgcagctcgtatatttcaagccttcagggtggagtcattccacagaaagaaagtcgtggaatacggagatgacacctgtggattatctgatgaatgcacactttcacttgtttctcttaaaaatgtcaaaccaggacaacatgatacacatctgcattctgctgctgttcgcatacagaacaagtttcgcggatggaagggaagaaaggaatttatgatcattcgccagagaattgtcaagctacaggctcatgtacgaggacatcaagtgaggaagaactatcggaaggtagtctggtcagtcggtatcgtcgagaaggtcatactgagatggaggagaaagaggcctgggttacgcgggtttcggcccgagaaacaactagaaggtccatcgcaaatccaacctgcaaaggctgaagatgaatacgatttcttgcacgacggcagaaggcaggccgaagccaggctacagagagcacttgcccgggtgcactctatgtcacagtacccagaagcgagagagcagtaccacaggcttacaacctgcgttgctgaaatgaaacagtccaggatgatgcaggatgagatgctaagccaggcggctggtggtgcggacgatttcatggctggactggaggacttgatctgcatagatgatgccccgccccgatgtctgccattcggtgaagctgagcctttttacatcagataggcagggaggcggtttccttgctccccttttgtcagactagccctgtaaatattcttcagctagttgttcaccccgactgtttactcgctttctgctagtgtacaactataacatagtttcaatgcactgattatcggtagaataatcgcctcttatttgatatatagtttatattaattcaacgtattttatggttttatctgtaattctgcattcgtatcgagccataacagtgtgaatttgcgacatccgccatgacccaataatacaagcaccatggcggcggatctgtttgaatgcactatagccaaaccaactaagacttagtttcatagtttgagtactctagtattgaccataatctatatgtattgagttggattggagtgtaacttaaactaatttacatcccaa

SEQ ID NO: 40136 - DNA, 1771 bp, Zea Mays
aggctaaccagtttaccaatctgacgccgtcacaggtcacaccgtctttactagagagagcgccaatcctccccatcccgaccgccgcccccacctcctccgcggccgcctcgcggcgattccgtccgcatctgaccccgatcccaggggcatcgtcctcacctcctccgccagctgccgctcttccgtcctcttccgcagcttctgcgtggggaagaggcggtggcggccgaaccagcgtagtcgtcgccgacgccgctgccagccgccatggaggcgtacaagctctgggtgcgcaggaacagggacctcgtccgatccctcgagtccctcgccaacggctcacatggatactccccgagcgcttcgccaactctgagatcgcaccggaagcagtatatgcactactgggtattgtgagttctgtcaatcagcacataattgatgcgcccactgagaatcactcatttgcctccaaggaacaatctatcccatggggtcttgttgtctctgtactaaaggatgtggaggcggttgttgaggttgctgcccagcactttgttggcgatgatcgcaagtggagctttcttgctgttacagaagcagtgaaagcaggtgtcaggttagctgcttttcgggagagtggatacaagatgctcttacaaggaggggaggtggtaaatgaagaagaggtgaccgttcttgaaaatagttatggagtaaatggtaatggagtaccagccatctatccgatggatggacatgcagaaaatggtcacaaaactatggccaagggtctggatggtaaaaatggatttgtatctaagagtcttgagaaaagagcagtagctgctttgaacaaatttggtgagaacgcaaagatgatgtctgatcctatgtggattcggaggctccaacctactcctgagccaactgtgatggttgccgagaagccaactttggcaagtatttggtctgctaaaggcggtactgggcgcttgtttgttttaggggaggttgttcacatattcaggccacttgtatatgtacttctgatcagaaagtttggaataaaatcgtggaccccgtggctagtgtcgctagctgtggaactcacaagtctaggcgtccattcccatgcaaccgatatgaatcacagattaggaaaagtgcatcagctcagttctgctgagagggatgagttgaaaaggcgaaagatgatgtgggctctttatgtgatgagagatcctttctttgccagttacagcaagcgtcacctcctgaaggctgaacaggttctgaatccggtgccattgattggcttccttacagggaaacttgtagagctactggaggggattcagacgagatacacgtacacatcaggttcatagagatggccaatctgagcctgctgctcgcctctcgatttgccctggcggacatgtgctttgtgcgagttggttgatggttaatggttaatggctaggaactggtgcttaatcctgaaacccgtactgctgtttttcttgccaactgtggcatcgtcgtcttgtggctgcgaagctgcagccacctcgttcgtgtatggcggcagatgagacaattcataatctaagtatatagatataaatagtagtattaccggtttgtttgtatttacgatttatcgtgaactgatggaacataatgtgtatacagcgaaaatttatctgattccaaacatttgttgtttaacagcgaaaattggatgccacatgccaaatgccag

SEQ ID NO: 40137 - DNA, 2005 bp, Zea Mays
gtctgaagcccgtcgaagggagtgacatgttgcaaaattctcatctttcttcccgccggattgacgaaatcgatcgctccgctcccaccggccaccaccagtccaccacacctcgatccccgcaccgcccagccggccgcccgcatccaccgcacaaaaccctaggcatggccccaccctaaaccccttgctccccacctcgtatggtcgtcgtccccttctccctccgcattgcgcgaaaccccatccgcctccgccttcttccggtctccgctgctcgcttcacccgtctcgccatgtcgaccacgccgccggcggcggctaccatatccgtcgagtatgccaagtccgggcgctcaatctgcaaggggtgcagcggggtcatcgcctccggggcgctccgcctcggcgcctctgcgcgcgacccccgtggcttcggcgccaccaagtggtaccacgtctcctgcttaccctcctcgtcgtacccgctcggccccatcgggagtatcaaggggttcgactccattaaggaccatgatcgtgcggaattgcgagaactagagaagaatcataaaagagacaatactgcagtcagccctccggaggaacaacgtccaaagaaagcaaggattcagatgttttcccctgcggagggggtgccagataatgtaacagtctctgttgagtatgcgaagtctggtcgctctacctgcaagggctgcagtgagaatattgccaaagatttgagttgcatgcaggatcatgaccgtgacaagttgcacaaattggtggagaatcacaagagcgatggaaaagcggctgatgtattgaatgagtcaaatctgaagagagaaatggctcacagcatggatgactcgaatgaaggtgctgaaaaggatctggaaggaataaagattcactgcatgggggagtttgaagaaggtgctgaaaagaacctggaagaagcaaagttacctgcagggaacaaaatgattggtccatcgatatccttttcactttctgatataaaaaaagaatacaagaatgctacccttcctgctcattggaaggtttttgatacagttatcttccgtgagaaggaagatggccttcatgcttcatctaagattgctgcatttgattttgatgggtgccttgccaataccagtatgaagagggttggtgcagaccagtggtctttacagcataaatcaattccagaaaaattgcaaagactgtacgatgatggttacaagctggtcatattcaccaatgagtcaaacattgagcgctggaagaacaagcgacaacaagctgttgactccaaagttggccgccttgataactttattgaatgtgttaaagcccctattcaggttttcattgcttgtggtttagggaaaggaaaaggtattccagatgatccataccgcaaaccaaatcctggaatgtggtggttgatggctcagcatttcaattctggaatcaaaattgacatggatcaatctttctatgtcggtgatgctgctgggagagagaacgatcatagtgacgcagatatagaatttgctaaggccatcggtctcaagttccatgttcccgaggagtacttcggtttctaattacctgtgaccagctagtaagatggttacactacgtcgtttagtgtttggatattatcaatactgtggctattctggtatggtgatctacatgtctgtttaaaccgtcaaataatatcccagttattcacttaggtcctgtttgtttccttccagaattatgtaatccatatggattatataagtacttaataacctgcttatggattatcataatctaggtatctagattatataatccacctaataatctgtgttgtttgtttgtctcttaacttatttaagttggattatataatctagagggtaaacaaataaggctaacttgctgacataattgagaaaactcaactctctgtatcgtagagatgttgagtcaatca

SEQ ID NO: 40138 - DNA, 1628 bp, Zea Mays
ttttaggtagtgaacagaataagtcagcagatggtggaggaacttgtagttgatgatacacctgaaacttcaagaggaataattggcctctgtagtgatccatctacaggacttttctatgcatatgatgaaagttctatattccaggtttccacttcagacgagggttgtgacatgtggcaagtttacttggatatgaatcattatgctgctgctttatcccattgccgtaatcctttccagcgtgatcaagtctacctagttcaggctgatgctgcatttgctgcaaaagagtattacatagcagcatccttctatgcaaagataaattacatcctgtcgtttgaggagatcagcctgaaatttatatcaataggatgctctcagaactttcttattgagaaggctcgataacctcaccaaagaggacaagatgcagattacgatgatctcaacttgggctactgagctgtacttagacaagattaatcgcctcctattggaggataccactgtcaccattataaattcagtagcagagcctaatagctctgaatatcgttcgatagtaaatgaattccgtgcttttcttagtgacagcaaagatgtattagatgaagcaacaacaatgaaactactggaaagttacggaagagtggatgagcttgtgtactttgccggtttgaaggagcagtatgaaattgtagttcatcattacattcagcaaggagaagcaagaaaagcattggaagtgcttccaacggcgcaatgttcctgtagaccttgtgtataaatttgctccagatttgatcatgttagatgcttatgagactgttgaatcatggatgatggcgagaaacaggttgaatccagggaaactcataccagcaatgatgcgttatgtgagcgaaccacatgcaaagaatgaaacacatgaagttatcaaatacttggaattttgtgtgaaagatttgaacaatgtggaccctggagtgcataatctgttgctatctctatatgccaagaaggaggatgaatcccagcttttgcaatttctcgacacaaaatttggtaaaggacaaacaaatggccctgacttcttttacgatccaaagtatgctctccgcctatgtcttcaagagaagagaatgcgtgcttgtgttcgtatttatagcatgatgtccatgcatgcggaagctgtggcacttgctttgaaggtattatgcctctgttggaaactgcgccggagagacaaccctgcaggttgccggcgagttcctacctcccagactttcataaggaaacaaactagctattacaaggtaataatccggactgctatcagtcctgatcttgctgattggatccgtccatataagactgatccactaccatactagctatttcctaaaacagaataaagtaaactagcaccaatcaaggattactttcctaacaatctcctcctaagccttgtggtgcaatttgtctacatccaccagtccgacccttagagcgcaactcttgaaatttggtcttcccaagcggtttcgtcaggaagtccccaagctgatcttcgctcctgatgaagcccactttgatctgcccattctcagcacactcccgaa

SEQ ID NO: 40139 - DNA, 483 bp, Zea Mays
cttccacacgactgaagctctacagaaacaccatcagttgaagggggtggcaggaagactgtaaacctactttgtctcgtgggttacttttagtatcaatcaatggtttgggcagtgaatgtactctattatgctacaaatctctctaaaccctaaaccctaaatgcagaacctagaaaatagagttgttcttttagttttctttgatgttaatccaagcatgttgttgcaatcattgcttagtgatggaaacacctaatagctatctaattcattaaccttgtacggttgtgctcagggttccaccaaatggctaacttgtagctaaggggtaccattaaaagctagccatattacattccattagtggcgatgaaattctccaggctggtaattcctcgtaccaattcctacattacctagacaaactgtattgtgaatgaatgtatgtatctatccttaattttcataatcatggcaata

SEQ ID NO: 40140 - DNA, 1114 bp, Zea Mays
ttgtgatcatttgacctgatctcttgctgaaatttccatcacaacataaataataaataatggatagggcaagatcttatgagaccggtatttttaagaaaccatcagattttttacagatgtttaaggacgtacagtcaaaagtcagtgatgttgttctgggaaaagaaaagcccgtggaggaatctactcctgaatatgagaagcttaaaagttacatatttgagctagaaattcatttagcagaggcccaaaaacaagcataccgtcttgtgaaaagacacagagaacttggacaatctttggcggacttcggaaaggcgattaagcttttgggctcttgtgaaggagatttgatggaaaaggtgttttctgaagttggttcaaagtcagagatgttgtcaataaagctacaaagagagacaaccttctctttaactttgaagaacccttgaaagattatgtgcgtgctctacaatctataaaagccactatgctggatcgagctaatgctttcaggcagcactttgatttggatcaggagaggaagtataaagagcttaatcttgaaaaattgaagttcatgaaccctgagaagtatgccgaagcagaatctgagtttagagggttgaaagcagacagtgaggaggctacgaagaagtttgaacacatagtaagactaatgaacgaagagctctctcgtttccaggagcagaaaacagctgacattggactcgcattccatgaatttgccaagggtcaggctaagctagctaaggacattgcggatgcatggcgcagcgtcctcccaaagctcgaagcttgttccacatcataaagtgtgatccgtgtttcctcatgatgtttgggaaggggttggtagctggtgaggtttaggctgttttttttttccagcctgttttgacacggattcctgtatacttgaactgcgggttggaaatgtaccagctgttagattcagttgacataatttcttgctgtttgagcctgtaaccatcatctcttcttagatcaattgacacaactgctggaatcgcgtaataatggtaatcaataatgaagaaatgctgtaccacggtgctggttcctgtaa

SEQ ID NO: 40141 - DNA, 1320 bp, Zea Mays
aaacaatggaaatagcagcacattttatcgcattttttttctctttacgtacctgtacatggtcagctggggaaagcgggagacagggacgggatgccaaacagaaaccaagtccgttgtctcgtcgggacgcggccggaaaagcaggccggccctgcaaggaaagcgagaaagattctcgaggcagagagacggcggggagcccggcgtccggttccgcgcccagcggcctagtagcccgccggtcagcacagcagctcacccgtgccgtgctggtgttgttctgtcgccgcgaccgcgaggcgtcgggtccagccagagccagcgcaccggggccggggcgcgggtgccgctgccgctgccgctgccgctgccgccgaagtgaccgcgcgcgacgacaagcagaagcagggaggcgcggatgcggacgaacgtgacctacccccgcccgcggcctcggcctcggagtttttttatattattattatttttggcgagcaaagccaaactggactcgccaacctggagagccacgtacgtacggcgggtggcgacaaccggacgaccgcccgctcggaggagaaacgaggcgcgagcctgctcggtcgaccggcggcggcggcggcgcagggcgttccatttctttccggcgtgctgttcgtttgccttgcgtgccggacctttgttaggtttggttcgtcgtccccgcgcgcgcgcgcgcgccgcccccacgtgttcaacgcggctcgccgttggttgactgcctgttttgcgacggcaatcaattatgtatacgtacttcgtttctggtcctggtttttcgaatcttaattacgtttcaactttcaaatatgaaaaggaaaatggaagtttcggagaggcgggcaggaagaacttcggcccggttcatggacctggaggccggtggcacgcaggtggacggatcatggatttggtaggggccgggaccgcgagatccggcaggaaacgccaccgcaaccgctcgtacgggagaaccgcgcgctcgctcgctagatctgccgtcccttccggtgcccggtactccggtcccgaaatacagcaggtcgctgtcagtaactggcaaccggctaatttgattgctaatttttagtcttgtgaatattctttaaaaagaagaagatatggttgttattttacccttagcaaccgggaaccgaaaacatgaccgtgttgctggttccgaaaacgtgaaaacaatctcattctcaccgtgttaaaatctagatttagtaacgtaccatgtaatacgtttctgtttctcgatcacatcgatccgga

SEQ ID NO: 40142 - DNA, 1757 bp, Zea Mays
gtccatccttctccctcctaggctccgtcggtctctctctctctttccttatccccggcccgtggcccgtgctaacggtgattagggttccgaatcgtgtttaagcgctgcgaaatcacggctggggcttcgtcctcgagtcgtcgtcctgctggatgtcacctcgtgtcccgcgccgacgccagtgctcgtcctcggagccgcctctctccgacgatcgccggagacggatacggtcgaagccgtcactgcaggccgcgctcgtgcgtcgtagcagatgtctagtagctccaacggccattatcctgctaatggtgcaaagattcttcatagaaaagaaaagaataaagagctcgacaaaaattcagccacttgggtgtgccagaaggacaggcattatgttgaaaaattagaaacagaattgatgaactgctatcaggaaattggatcagttaaatatacggagcgttgaagcaaacttcatgggagagcacattcacagtcttgaactgaagctgactgaacttgaaaagttcccagaaagagtgagagcgatggacaatgagctgatacgatctgattcccagtgctggcttctgatggaagaagtcagatgtaaagaagaggagttgcagaaggcagcctcacagatagagaagcttgaaagtacagctttagattcacaatgcgaaattgagagcttgaaacttgatttgactaatcttgagcagagactatttgacgctgagagattttcccaacatgctggtgagcacaaagctcaatttgacaaactactgggagaacatgagctccagctacatgaagcacagaaaactattcatcaacttgtatgggagaataagcaactgaaggagttgttgcctgtaagagctcctaaacaatctcctcctggatctggatggaaagttaacaaaacattggagaacggtgtgcatgcagaatgcgaaagtggcgatgtaattcttgaaaatatggcaaaacgaaatgaagaatctgaacttctaattgagcagctcaaggaagagcttcgagaacaaaagttaaaggcaaaagaggatgcggaagatctcacccaagaaatggctgaactaagataccagataacaggcatgcttgaggaagaatacaagcgtcgatcttgcattgagcaggcagctattaaacatattcaggagctggaaactcaggtttccaaagagaagacaaaactgagtggggcacttaagcgattgcaggaatcacatgaactagctcgcacacaagctatggagattaagaagttgaaggctgctttagagagattgaattcggtgacgaacctgggtacagtttgcaaatcttgctcttgcgggttctctgcaatgttggtagagctgtctaattgctcgatcgaaggaccttcaggcagcgccagatctctcaattccaaccacattgatgagaagtcacagaatcaggctctaatagagtggcgtccccgtgaagcctcagatgatgacggtgggtaggaagttagatgcctgtacattcatgtgtgcaattggccaactgttgtagataattctttgtattcaccattgttgcctgtaagactgtaaatgcatatgcatttgttgccttagctaacaatgggagttaagctccccaggaagtgaaaatgtcgccttaagatttcacgcatgtcatgaaatttaccagcaaggatctgtcatcacggtttttgatgcaaagac

SEQ ID NO: 40143 - DNA, 5180 bp, Zea Mays
tcccaaatctcattcccatgggccgtaaaaagcgaacatctacaccaaaccctacttcgccaccgtcgtacgccccccgccggccggcgggggctaaggtggctggcaacggcggggaagatgatggcgtgcgcgccgaggtcgaaaaggcactcgcctgcctgcagcgggggaaccacgcgcgggcggtgcgcctcatgagggacgccatcgcccaccacggggaggcctccacgccgcttctcctgcgggcgcatggtactgtcctcgcccgcgccgcctccgtccttgacgacccggccgcccgcgcgcgccgccaccgggcagcgctccaggcggcccagcgcgccgtcgagctcgcgccggactccatcgagctctcccactttcatgccatgctgctcttcgacgccgccaccgacacccgcgcctacgaggaggtcgtcgccgagtgcgagcgcggcctcagcatcgaggccccttccgaccccgcgccccactccctcaggctgcccggccccgacgtcgaccaggtccagtccgagctccgcaacctgatccagaaggccaatctcgcctcagtatctacctggtttaaaaccctgcgtagcgcgggcgacgataagtttcgcctcatccccgtgcaccgttttgccgacgaaccaatggaggcccggctcgtcccctcggcgccctctccgcgccgctcaaacgagatcaagaaggcgaccaagacctccgaggagcgccgccaggagatcgaggtacgcctggctgccatgaggctgctgcagcagcagaaggagcagagcaatggtgttgtgtctgccacccctgcctcttcccagtcacagggagatgaggccccctcatcgtctctgtcattggtgggtggacatcgagctgacaggagaaaaggcgggtctaggaaagcaacaggcttatctgcatctgaacgcactgaccaggcgcgtgcctactggggttcgataccagtggatcaaaggcttgcgttcttaaacactagcatttctgagctcaagtcacactatgcttctgcaatccataaggagaaagatgttgccagtgcagcatctgatgtgctgaatgaggtgatacgatttgccaacaagcatggcaactgggagttcatggtatgtggtaggtgtcggggacagtttacagatgttgaggcacaccggtggcatgtcatgggggaacatgttgggctactctcatctgagctgcaggaaatggtgccgcaggagattgatgctgactgggtagaaatgctcattggttggaactggagtccattggatgctactgcagcactgaaactgtttgaggaagatcaaactgacaatcttggaacagataggggcaaagaatcggatccgacggataattggagtaacaaagacaaccctgacatgtcagaatcctctgcctcgccacacaacggggagtgtaatggctttggagtggtggtgagggaaggtgacggtacgtggccactatcagatgatgacgaaagggcaaaaattttagaaaggatccattcattgttcaaaattcttgtgaagaaccataatctttcagtgtgcaatctaaacagggtgattcgatttgctgtagaggaactcagggggttgtcatctgggtcactactgcttaatcactcattggacaagtcgccgctttgcatttgcttcttggaggcatcgtcactgtggaaagtagctaaattcttgcaggatttagtgcaggcctctggaattaatagaaacctggagaatgatggactaggtgacagggatagttccccccaaaaccacaatgtactggagaaggttattcttagttctgattcttctgaactgatcattgatgggcaaacttttggtggaaagtttgactctgagagtgttgatactgacacactgttttcatggttgtacgctggatcctcaattggtgagcagctattggcttggaaccgtatgattgacgaaaggtcaaatcagtgcatggaccttattcgggcacttgggagggagttcaacaacttgcaaaactcatgtgaacggaagcttgaacagctgagaaatgaggaggcttttatttctgtagaggacctcttatgcgaagagcaaacacgaagggagcaggtggagcagtatgggttccaaagttttgaggagatcctcaggaagcggcaggcggagttgttggaacgcaatactgaggtgcagtccgacagtaacagatccgagatagatgcaatctcagctgttttgaagaaactccacacttcacacttcggttatgatgatgccttttctggaatggccccacgcctttttgacttggacggggtcgaagatgaatggaggctgcatgattttatacatccaaatgattcaatggtacacactgttatatcaaagatgaaggaaaaagttactgtggagattagcaagatagatgctcagattatgcgaaatttatctgtgatgcggcatctagagcacaagcttggacctgcttctgctcttgattatcgaatgattcttttaccccttatgagatcgttcttacaaagccatttgggagagctggtggataaggatgccaaagagagatctgatgctgcaagggaagccttcctggctgaactctccttggatgctaagaagaatgcaagcaaaggggctgatatgaaacaatcccatgaaaaatcaaaggataaaaagaagttcaaggattctcgaaaatcaaaggagctcaaggattcaagctggagcaaccagtctctcattcaccaagacagtaccgatgagggaacatcagagacatctcaaatgcttgctgattgtgatgatctgtgttgcaaatgctcgacaagtgaggattacttcaatgaacaagaggaagaacttaggcatagggtacaacttgaagcagaggaaagaaaattggaagaggctctagaatatcaacggtggatagaggaggaagcaaagcagaaacatcttgcagaacaatgtagaagtacacatgcatcttctgttattggcataaagtttggtgactttagctacaccgagaacgagaacaatttcagccagaaactcaatggaatcgagttcgactcatctgatgcacatgcattaaccagcagtgatatgagtgtttctatgttgacgttgaaaatgaatggggtttgcaataatgcacaacctataaagcctcttggtaattttggcacccaaaatcccaagagaagttctagtgaaccacaaaggtattctcaaggtcactctgcaggaatagagaagccaaattttgagaaagtggtgcaataccatcaacggatgtgtgcatcgaggatgattttgataaaaggtttcaagaagatcttgatgaagcagtgcgccaaagccttggatgcgatgcttatcctgctggtacagtaagcacttcaaatgggacagaagtgtatgggactggacttaaaaatgctgctggtgaatacaattgttttttgaatgtgattattcagtcattgtggcatataaggcggtttcgggacgagtttcttaaaacatcattactgcacaagcatgttgaagatccttgtgctgtctgcgctttatatggtatcttcattgacctgagcaaagcatccaagggacaaagagaagctgttgcacctacttcgttgaggattgctttgagcaaatcctacccaaacagcaaattctttcaggagggacagatgaatgatgcatctgaggtactgggtgtaatctttgagtgtttgcataagtcatacacttctcgtactgtctaccatggtgtatcccacgagaaaaattctattggatcatgggattgtgcaaatatttcttgcataacacataatctttttgggatggacgtatatgaacggatgaactgtcacaattgtaagatggagtctaggcagctcaagtatacttcatttttccacaatatcaatgctagttcactccgaactgcgaagatgatgtgtccagattcttcatttgatgaacttttgaaggttgttataatgaatgatcaactagcttgtgatcaagacgttggcggctgtggaacaccgaatcatatagaccacatcctttctaattccccacatgtctttactgttgttttgggatggcagaacaacaaagagagggtggatgacatatctgcaactttggctggtatttcaactgagatagacattagcatattctaccgtggtctagatcaaggaggcaaacacaccctggggtcagtggtttgttactatggccagcattaccattgttttgccttcaaggatggacggtgggtcatgtatgatgaccagacagtcaaggttattggtagttggggtgatgtgctcgtgatgtgtgaaaagggccatttgcaaccccaagtgcttttctttgaggctgcaaattaattattcttcagagtcgcaaaacgcgctacagcggttaacatgccctcaaatataggttttttccctgcggccatgaagattagaaatagggtagcagattcgttttgagcggggatatatagtactagcattcaacggtgcttttcgttgtgagtccgtaataagcagtcatctgagcattctagagcaaaaaagggagctgtttatcccccccttttttgctttaacctttggtgtaggcgctgaacttctgatctcatctgccaataaatcttcactgccgatcaagcgggtggagcattcgacttgaactgccatccaacagttgtagccgaatctgcatgaactcttcgttatacaccaatcatctatagaattttctgcttacattgggccgggcgggcgttctctctctctctgttttttttttggggtgggggtctggtataggagtgacagttttgaggccaccagatatagaatggaatgatatgggaatgggtgatgcggtgtgaactgtattttgctgtggatgatcttttgaaaagagtaaagctatctggaatatggatatggtaagaaatctgtagtacacgagtctatatatacaatgactcaatgggattatgcgagatgattataacgatgaataccaaaatctttatcacaactgttggttaca

SEQ ID NO: 40144 - DNA, 698 bp, Zea Mays
acgtttctgtttaccgttttgtatatcccgttctcgttccgttttcgttttttacatcgggttcgaaatcgatcgggacaaaactaaccaaatcggttatacgataacggtcggttcgggatttttccatcctactttcatccctagtctccagtccacaatgcggtcgcgcccacgccctcctagtcctccaccaacgacaaagcgtgcatccagatctagtgtccccgttctgttgtccccatccccgttcttctttgtttctttatctccacgatctagtaggtcatctatcctccaagatccgctccagtgttagcagtgagagatcttggtggaagcaatgaatactttgagaagaaaaatgtagctgcagtgcctatgtgataagcttatggattgtagttttgttctctctcaaacactatttttcttccctatatgtgtggatggagatgactatcttttattatctgtaaaaaatcgttttactttttattagcttggttggacatttggtgcctaaactttttattagtttggttggacatttggtgcctattgtgacaagcttatgcagtgcctatgtgacagttgttgttttctgtgaaacacgttgtatcatgttctggtttctgaaaccgttgaatctgtataaacaatctgttgtttgaaactgtttggttggacagttggtg

SEQ ID NO: 40145 - DNA, 1350 bp, Zea Mays
cgccgcctccgtcgaacacagagtcacttcgccacgaacaaaagcgcatcgatctcgctgtcgtcactcctcgtcacccagccacgaacagaggcaccacccagcatggccctgcaggcggcgctcctcccatccaccctctcatccgtccccaagaagtgcagcatcgccgtcgcggcgaaggacacggcattccttagcgtatcccagaaggtgcaggcgctggcggagaccggcaagtggcacgtggtgatggcctgccgcgacttcctcaaggcggccaaggcggccaagggcgccggcatggcggacggcagctacaccatcatgcacctggacctggcctccctcgacagcgtgcggcagttcgtggacagcttccggcgcgccggcatgccgctcgactcgctcgtctgcaacgccgccatctaccggcccacggcaaggacgccgacgttcacggcggacggatacgagatgagcgtcggcgtcaaccacctgggccacttcctcctggcgcgcctgctcctggacgacatgcagaagtccgactacccgtcccgccgcctcatcatcctcggctccatcaccggcaacaccaacacgctggccgggaacatcccgcccaaggccgggctgggcgacctccgcggcctcgcggcggggctgcgcggccagaacggctctgccatgatcgacggctccgagagcttcgacggcgccaaggcgtacaaggacagcaagatctgcaacatgctcaccatgcaggagctgcaccggcggtaccacgaggagacgggcatcacgttcgcgtcgctctacccggggtgcatcgccaccacggggctgttccgcgagcacatcccgctgttccgcctgctcttcccgcctttccagaagttcgtcaccaagggcttcgtgtcggaggcggagtccggcaagaggctggcgcaggtggtcagcgaccccagcctcaccaagtcgggggtgtactggagctggaacaaggactcggcgtcgttcgagaaccagctgtcgcaggaggccagcgatccggagaaggccaagaagctctgggagatcagcgagaagctcgtggggcttgcctgagctcgccggcacggcgacggcgacatgatgactctgtcgagcagaggagctttcgcttcgttgtattatgtgtaccattagcatccattttgtttgtttctagaagttggtaatgaccgtcggagaagagcctgtaattgttcgatcatgtattattgcttacaaaatttttttcaaaaaccgatgaaataaaacaacaggcttaacatctctaaggggcgggcccatgatttgaagtat

SEQ ID NO: 40146 - DNA, 1305 bp, Zea Mays
tcccatttgatttggcccactgcagcccactaaaccgtcctgtacgcagagcccatgcacggttttgagacgagagcagctcagcagcagagcgccagccgccggactcccacgcagcacgtacggacgccatcgaggaaccctaacaagagcacatcacacggggcgacggtttggcgccgcgccaccggcgactggcggctggtgccccctctcggtccccactccccagcacggtgacggcctgctgcagcaggtgatctctgatgtctgattctcttctccagttctccccagtccccgtctccccgacttcctgttcagtgttcaccgttgagtggcctgctgccctgctgtgctcatgtgatgtgctcgttgtgaatttgtgatccgatccgagccagtccccacccagttattaatgaaaatgagatccttgaagatgatgaagaatctgaggaaggaaatgcaaatgaatgaggaagatggttctgggccttctagctcatttgggactgaaaatgcatttcaagtggatgaagatttactttagctagtagatcatttatcacttatcaagtggatgaagatttgctcatttgtttcatgtttgactttgctgcagttggactttgtacttttttgctggacaacctgcagcaatgcagttttactaatgtaatggcttattaacccgttcctgtgagtttgcaatggctgtactgttttttactatgttttacttttacctatggtaatgtctgacagccatacagtgcaggagaaagcagatggtacacttatcctgtgatttttgttgtgttcctaactttgctgggatttttgtttgattaattgattccattgttttgtgtggttgttgctgcagatggtaaattatttctcagactcagagtgcaagaaagttggttcgtccagggaagaggaatagaggttatggttttgtgtgagattgattagcatctaccttcaaatcattctcttggtatttattgagcactgcaagtggttgaggacttgaggtaaacatgctgaagtgcatcttgagccagtcatggaagagaggagcacatatgctacatgcaggaaattcagcaccagctgtactaacttgctggagtcaatttcacagtgggcagttcctggtgttccctacctgtgcactagattagatggttttgccaagtaggaagacttttgttgatcgacctagccaattaggttattttattccatggaaaggttaaatagctcatgttgactaaacataatgatacaatgttc

SEQ ID NO: 40147 - DNA, 798 bp, Zea Mays
cgggtgtatatatgatgcgggactttttcaaagatcttgacgggaggtccagtgactaggcagcaaaatacagttgattgtcagcctcgtactcgagtaagcgaacgcggttcgtggcgctgccggatgagataatcgcgtgacttcttcttcgtctctcccgcgcgcgcgcgcgccgggatgaaacgatcgaggcctgcggttgcttgatttggaggagcgtggcaagcaaaagcatgatgtgctggggtgacgatcagagagcccagaagatgtactagactgattgatggtccgcagcagggtcccagacgctctgtcccgtggttggtcgttttcctcggttgcgagcgagccggggaagagcgcctgctgtgctgccggccggcccacgacggtagcggcggcagctccctgtcttgcctccgacgacgacagggactcaagtgtgtcgtcttcttttttttcttcttcttctactgtggtctgtggtctatgtatcttctacatatttaaggctatcttgctcgtcctctctagatgttgtaggttgctgaagaagcttaggatataaatacttctacatgtatatgaaaacacttgcggaggccatgacagtagccaacagcttcgcgtgtcatcgtctgcgtcgtttaattttactctagcattcgtctcaatccacatgcatcaatatggattgaagtgaatactaagtattcaaacaatgcctcgtaattctgttcatgtaaatattccgtcgaatatgaataaggtttcgcatgtttttggtggctc

SEQ ID NO: 40148 - DNA, 2138 bp, Zea Mays
aaagccaaagccaaaagtcaaaccaaacacaccctaagaatccctgtgttcgtgatatcttggttccaataacctcgcgtctgcgacacaccaacccgaaccttaggtagcgtcccggtccgcggtgccagccaccgcgtgccgccgcctgggtcttccctcctcagctccttcctgagctcggcggtggaatcacgggaggaggcggaatagtaagctgaggcggggccatcgggctccgtggttgaggatgcctgtgctgcgtagcgcggcgcgaagggcccgagaggcgcaggggcatccggcggcagctgatgaaaaagctccggaggcggcggcagcagcattagcagcagccccggcaccaccgccggtggagaagaggcggagagtgacgagggcggaggagagggagcgggaggagatcaggcctagggaggtcgtcgcgggagaaggcggcgacgacgagggggagcgtgggatggacgaaccggacagcgcggcacgcagcgccgacaagctgacattcgatgatgaggacggccccactgtccctgaagcggtccaggtgggtagttcaccgaagtatagagtcgacaggaagcttgggaaaggtggttttggccaagtatatgttggccaccgcatgtcagctactggtccaggtgccgtcgaggtggcactgaagtttgagcataggaccagtaaaggatgtcactatggccctccttatgaatggacagcttacaacgccattggtggcattcatgggtttccccgagtccactacaaaggacgccaaggggattactttgttatggttatggatatgctcggacccagtctgtgggatgtctggaataataaatctcacataatgtcagttgagatggtttcttgtattgctattgaagcaatctgcatacttgagaaattacattcaaaagggtatgttcatggcgatgtcaaaccagagaatttcttgctagggactcctgggacacctgaagaaaagaaactcttccttgttgatcttggcttagctacgaagtggaaggatattgcaacagggcggcacgttaaatatgatcagcgttcagatgttttcaggggaacatttcgctatgctagtgttcatgcacatcttgggagaacaggtagcaggagggatgatttagaatctctagcatatacactagtctttcttctacgaggatgtctaccttggcaaggttatcagggtgacaacaaaagcttccttgtctgcaagaagaaaatggccacctttccagtatctctctgttgcttttgcccacatcctttcagaaagtttgtagagtatgttgtcaacttgaagtttgatgaagaacccgactatgcaaaatgtgcatcactttttcatagtgtactaagtgtagtaggttcaaatccagatgtcagaccaattaacactgatggtgctcagaagcttatacatcaatttggtcaaaagagaggccgattttttatagaggaagaagcagatgaacaaccaaagaagaagatcagggtgggaatgcctgcaacacagtggataagtgtctataatggcagagtacctatgaaacaaaggtaccactacaatgtttcagattcaagagttggacagcacatcgaaaaagggaatgccgatggactgtttatcagttgcataacatcttgttccgatctatgggctctaatcatggatgctggaactggtttcacatcccaaatttatgagctcattccacatttccttcacaaagaatgggtaatggaccaatgggagagggactactatataactgcggttgctggggcaaacaatggcagctcgttggtagtgatgtctaaaggcacaaagtacacacaacaatcctacaaagttagcaatagtttcccctacaaatggataaacaagaaatggcaagatggtttctatgtaacttccatggcaactgctggaagtaggtgggctgttgtcatgtctcataatgctgggttttctaatcagccaatgtaaggaaggatgttgcaaacagagtagttgcatgcctcacaagatctctatcatttgtcttggtcctcatcaagtcatgaatcattccatatccata

SEQ ID NO: 40149 - DNA, 2463 bp, Zea Mays
cgtctgcccaccgggctatatgcgcatgcggagtcactcacactgtccatgggcccacgtgtcagcctcacactaggctcgcccaggggcttctgtgtcacaggcatgtggacctcaacccttcttccacctcgcgttcattgcgacctggcgataagttcgcctaagaacgcgatcgcgtaaccactgcggtgcccagaccgcttcggttgaaggaatccctgccttggcttcgcactatatctctacaattccttaagagtataaggagggcgtccaccaccctcaccctggttccgccctccccccgccgctcgccgctaatctcgccgcgcacgccccctccctcgcgtccacagctagcttgccctcgccttcgctgaatccgcccctccccgcactcgcgcatggaaccacccagcctccgcccccgtccaccttggccccggcaccgtaggcggatctgtgcctttcctcgcccgcgtccacccccatcgcctcctcctacaccttctccgccatcggcatcatcgcctccgtcctcggccctccctgcacactgcaaccgcctcctgacgatgctcgcgtgggatggtgacggtgacgcggcgatccgtggcttgtgccccctccgccgcctccagcaccttctctgccatcggcatctccatccttggcgcggcatggttggccctaccctgctctttttaaggctgaaatgccctggtcagcctgaagaggaaatctctcagagaaacaaagagtcttcaaaatggtgaaaggcgaactgaagaccgccgaccttgtgtctacacccgcacattctgttgcatctatacctccttctacaccagcacttcatgttgctcctgcacttttgtctacccctgtcagatgctcatctccatttatcacgccaccatattgttcctcaggttccatttagttgttgaattagttctaaaatcatagtggaaccaaaataatgtgtggatatttgcaaacgagtttctcttgaagtcatggtgtgaggaaaaaaggtaatgtccttcacattattctggtttagtataccttgttgattattgacatatgttggtcatgttggtgctccactaccttgttcgtatattaaggcatgctacatttcttaactacgtaccaatgatgtggatacgatttttgcagcaaagctatttttatcctggtgttatcttatctattctcatgacagtgaatttagttttattgttgacctcccacggttcttgacttcctaacatcggccactttatttttagttgattgactggcatgagggtggatacttgactgttgatttaccaatgtctcggggagaagttgtcattgggggtccaaatgtaactaaaggctatttcaaggatgaagctaaaacaaatgatgattctgcacaaattgagctgtaaagctaggcttcccaacaaggagttaaaacaacaattcctcaaatttgtgctagaagcaagaggctgttaaagaagtgctctttagcaaaggtttcgtcattcttgcctaccgctgtccctttgcttcagaatacggtgaaacagaagtccttcattggctcttctcatcttggctcacatgcagtacttgaataccagtttcttcctgagcagccaagtgatgcatatgagaggggaagccagttgcgcttctatgatgctctagcagaagtgttaaactcaagggtagattcgttttctataggatcacactttacccatgtagttgagcaggcacctagctatacatttcacagtcaatcatctggttctagctgtttgtcaaatattattgctagcatggctcaaatccaaatattattgctagcatggctcaaatccacggtcaaaaattggcatccctcaagttgtcagatttgaaagctccctcgcatcccctaaaagattgggttatcatgatgaagaacatgtcacgtggacagaaaaacacaagaactatatttatggatatactatttttttcttcttttgtattattatattcatatccttttttacctttatattattattttttatatatgttgtatttgtctaatattacttcatcataatgaggaagctaagattgctagggaggttgaggctcatgaaaagagaattaaaaaggagcttgagagttgagaagcaaggtctactaaatagaaagaaagaagaacaaatgtagagggaaatggagagacatgatcacgagagatgtaatgaagagaggttcatgcgtgaaaggcaaaggaaagaagaaaattccattagcaacagagacgtatacttataactattatggtagataaaaaatgttacaatgtctctcttctatagaacgaaactgggatatcattcattgatatatgttcgattttattcaataattattatataattgtgcaccgtcgca

SEQ ID NO: 40150 - DNA, 2573 bp, Zea Mays
cgcttccgtccgaagtctcctcgctgccggggtgtcaagggagggcggccccagcacaagcgccgcccattgatcgctttcctctccttccctctcccctcccagtcgctcgcctaaacctcaccagcgaccagtcgccatcaccatggatggacccgcctccccctccgccgccgccgagactgatacgcggggaggagaagctccatccaaagccaagcgaggcaatgccgaggagaaatatcaacatggacaaccggtttactttcctgaggaactaatggacaattgggtttctttttctcttcgtggcttgtattattgctacaacatctcgttgcaagggtcttgcaacacaactgctgatccaacggacataattttagctgtcaaatgtgacatggggcctgacttctttcggtactcttttaacttgggtggtactgatattaccattaagtacctgtacaagattcatctgaatcaggaacaggtactttttgctagaagattccagatcacggttctttctttgctcattaacagtaacagttcggaggtcagcaatgctataaaatacttccgtgaatggcaggtagatttgggggttgtctatctacttctgcccacagcgtcaggcaaaattgattggtgcggtatcaagttctcaacatcatcagcatatgatgtgactgataaaaatatgagacattgccattcttgtaaagatgctgatatactgcagacaatggatgacccttgctgcaggtgcatacttcagaattctgttgtatatgcccctcgtgaacgaaaattttatattattacaggacttgacttaaatgcaaaccaacctctggatttgaacaataggagtgctgttagctgcaaaagaacctacgagtgttaagttgccacctgaactctgcaaaatagtcatggcaccggtgtcagcaaatactttgttcagcttctcatttgtgccttccataatgtaccgtatccagtgtctgcttctttctgcaaagttgaaaatccagttgggcccaagaatgcaacagttcaacataacagctatgaagattctggaagcacttacaacaaaggaatgccaggagaaattttcaatggaatcattagaaacacttggagattctttcattaagtatgttacaggccaaaatctttttaacaaatacaaacatcgagaggacatgctaacctctatgagagaagaaaaggtctccaacccagctctatgccagctagcttgcaaaagcgaaattgtgggatacattcgaggtgaactatttaacccccaaaaatggaccattccagggttcggttatgactcacgcggtaacaacaaggttttcttccgagcaaccaataatatgtacagtctgaagaaaatatccataaaaagcaagagaattgctgatacagtggaagccttgactggggcctacctcagtacttgtggtgaactggctgcagttcattttatcaaagcactaggaatggatgttgaactgcatagtaaaatgcaagttgaaaggactattacaacaaaatctgaagaattaattgacgcggaaagcttgcagacaatgctcaaatatgtgttctatgatacttcactgttagtagaagcattgacacatagttcttacaatattactggtattacagcttgcaatgagaggcttgaatttctcggagatgctgtattggactacatcttaacttattacttttacagaaaataccccaattgtacaccagcactgttgacaaatctacgaaaagcttctgtgaacaactgttgctatgcacatgcagctgttaaagcagggttacacaagcacattcttcattcatcgtcaaaacagatggttaacgatcttgagaattcagggcggtcattttcaggcccatcacatggttgggaagctggcattagtctcccggaggatctcgcagatttgtttgaagcaatagctggcgcaatttacgtggacagcgggaacgacaaagaggttgtctggagtgccatcaggcggctactggaacctcttgccacccccgggaccatggagcctgaccccgtgtcggaactgaaggaattatgcgagcacaaacactaccctaagccatcgtactctccaactcgtgacagtgtagctggagtgacaagggtggttgcacaggtgacggctgcgcggactgtgtactccgggactggaacaggccgcaaccaggatgtggcagaggttctcgctgcaaaggctctgctcaaaaagataaaggccgcagcaagaggatgaagcttggacttggcttggaccgggcgggcatttgatatttgggaatttgcgcacatgatagctgttctcgcagaggtaacaaaacaaactactgtagtatataaatgttgtgtatatgaatcaaggacagttgaactacccttggtttcgatagctgcaaaatacaaaacaaaaaaaaactcgaatctactatgcacagtggcttcatgtggtggacccttaatgaaatgatgaattctacgtggc

SEQ ID NO: 40151 - DNA, 2100 bp, Zea Mays
gcggggccacttgtgcgccactgccgttgccttctatccggcgccatctccaccgtccactgccccatccgcagttccacaccacactacgccgccgcagccaggcagacagaggcagccccctcatggctgcccacgccgtcaccccgctcaccatctgctgcctccgccgcggcgttcccctcaaccacagccgccgcctcctcgccgtagccgccgcagcgccagaatcgcccgcgcctacccccgcgccatcccagttgccgcttcccccggttcctcctcgcaagggctacttcccgaagcgtggcgagacagtcgagctcacctgcgaggcgctcgcctttaagggcaagggcgtctgcaaggtcgcgggctccacgttcgtcctgctctgcgatggtgcgctccctggcgagcgcctcatcgcccgcgtccgccgcctccgccgtggcgcctttgccgaggccgccaagctcaggaccctcgagccacaccacgacgccatcgaggcgccctgccccctcgccgctgactgcggcggctgcaagacccagtctctcgcgtacgccgcgcagatccgccacaagcatcaccaggttcgcgacttgctcgtgaactttggcaagtttgatcccaagcgcctggagagctcggagccggatgatatcctcaaacccaccgtgcagtgtgacgagatattccggtacaggaacaaaatggagttctcgtttgggacgaagagatgggtgcaaaaagagttgaaggacaagggtgaggaggtggaggtgaagcaggaaacgaatgaaactgatggatatgcgcttggactgcacgcaccagggttcttcgacaaggtgctacatgtgcagaaatgttttctgcagagtgagccagcagataagttgttcaagaaacctggatggatcctgccataggcctcacaccttatgatgtccataagcatgttgggtttctcaagcatctgatgataagaactggaagaaacatcagcactggaactccagaagtaatggtcaattttgtgacgtcatgttataagccagatgtattgatgcctcttgttgataaaatcacaaaaatacctgaagtggttagtgtcataaataatgtgaactcgtctgttggtaattcatctgtgggtgaacaagaatatactttgtacgggaagccaaacattacagaaatgttgagaggacttgcgttccagatatctgccaactccttttttcagactaatacaaaacaggctgatgttctttacaagcttattgaagattctgctgggcttaaaggagatggctctgaaattgttcttgatctgttttgtggaactggaaccattggtttgacctttgcccgaagggcaaagcacatttatggatatgaagttgtccctgaagccattgaagatgcgcgaaagaatgccaagttgaacggtatcaacaatgcaacatttgttcaaggggacctcaataaaatcaatgaatcattcgggaaggaatttccaaagcctgacataatcatctcagatcctaatcgccctgggatgcacatgaagttaatcaagtggctgttagaagttaaagctcctcgaatagtgtatgtctcatgtaatccagctacttgtgctcgggatttggactacctatgtcatggcgtggaggagaaagatttgagaggattctatgaactgaagagtgtaattcctgtggatatgtttcctcatactcctcatattgagtgtgtatgcttattggagctgcgttgattttcagttttggtcaggtaaacccactggagccttgtttgggtgacgagtattcacctcaatccatataaggcattgttcggcactctagtatttaatacatattgggatccaatacatggtgggattgagtgaatccatcccatgtcacttaaaccatgtgtgtttcaattacagctgagatttaatacatggctaattttccattgtttagttacaccacatggatacattaatttgttgcatgtatttaaaaacatcagtgtccatcatattaggtctctgaagcggatgaaatttgaagcatc

SEQ ID NO: 40152 - DNA, 308 bp, Zea Mays
cgcgtacagatttattttcttctgcgcctaatctttttagagcttggcgtagacgaggatgacgatcgacgacttgttcgagcttttgttgagcacttggtgaatatcacccggctagcttcgtcttcacctgacttttaggatttcttgatgacgcgcggaacgacgatgaccttcgattgaagtcttcgaccgagcacttgataagcgatgtacagggaccctgtttatttttgcataacgtccggggtacggggttggatgagattgagtaaggaagaatgaggttcgacaggctcggcgacgat

SEQ ID NO: 40153 - DNA, 2556 bp, Zea Mays
ctcgtctccaccacttcccctctgcgcctcggcccccacgaaatctggagaccaggacgccattgctcaccttttccgtccagcgcaaggaaaccgcgcgccagagaggccgcttcaggcgcgcgtggaatcgccccgtggccggcggggatgtccggattcgtcggggtcgtcgtgtccgacccttcgctgcaggggcagttcacgcaggtcgagctccgatcgctcaaggccaagttcgtgtctctgaagagagattccggccatgtcaccactaagaacctgccggggctgatgaagaagctgagggggctcaatgaggtggtctccgaggaggagatcgcggccttcctgtcggagtcgtaccctgatagcgatcacgagattgaattcgaatccttcctccgggagtatcttaatctgcaggctcaggtgagtgccaaggaaggtggtgccggcggtggcaggggtggcaagccgtcgtttctcaagtccagcatcactacgctgctgcacaatctcaaccaggcagagaaatcttcgtatgtcgcacacatcaatacttacctccgtgaagacccattcctgaagaagtacttgcccatcgaaccgtctggaaatcagctgttcgatctcatccgggatggggttctgctctgcctcatttagttcttggattgatatcacaaatcataaagattcaacttttagctgatctgaatctcaagaagacaccgcagctggtggagctatttgatgacagcaaggatatagatgaggttttgagcttgtcaccagaaaagatgctacttcggtggatgaaccatcatctgaaaaaagctggctacaagaaaactgttaacaatttctcttcagatgtcaaggatggtgaagcctatgcttaccttttgaaagctcttgctccagagcattcccctgaaactacattggacaccaaggatccgaacgaaagggcaaaactagtacttgaacaagcagagaagttggactgtaagagatacttgaccccaaaggatatcactgagggatctgccaatctaaatcttgcatttgttgcacaaatattccagcacaggaatggtctgaccagtgacaccaaacaagttaccctcacacagacagcaacacatgatgatgttctattatctagagaagaaagagcctttcgaatgtggatcaacagccttggggttgaatcatatgtgaacaatgtcttcgaagatgttcgcaacggatgggtacttcttgaagtgcttgacaaggtgtctcatggatctgtcaattggaagctggcatcaaaacctccaattaaattgccatttagaaaactggagaattgcaaccaagttgtaaaaattgggaagcagttaaagttttctttagtaaatctagctggaaacgatattgttcagggaaacaagaaattgattgttgcacttctgtggcaattgatgagattcaatatcctccagctgttaaacaaactgagattccactcccaagggtccgaaggaaaagaaatttctgatgccgatattctaaactgggccaactgcaaagtgaaggcatccggaagaacatctcgtatagaaagtttcaaggacaagagcttatcgaatggaatgttcttccttgatcttcttagcacagtacagccaagggttgtgaactggaaagttgttactaaaggggaaactgatgaggacaagaagctgaatgctacctacatcattagtgttgcaaggaagattggatgctctgtgtttctgttgccagaggacatcattgaggtgaatcagaagatgatcctaacacttactgctagcattatgtattggagcctacagaaacagccccagtcacagtctgaattgacagaacaatcagaaccatctagcatgacttctgacgcagcctctgaagttgcctcggaggatggtgcttcaacgacagcaccgtccgagtcagaagaggtgaactcgctgtctgatagcatatcgaatttgacaacggatgatgctacttcaaacgccccatctgctgaaaacggaaatggtgtggcagggtcctgatggttatgattatgcaaaccctgttctttttttccccatacagtgctgttacaggaaatagtgctttcatgatgcccaaagttgtcgctaccagaagcgatatttttaatacttctgcttcctgagcatggtagcttgatagatacaacagtcacagatagatatagatgccttttgttcattggatccgcttatactatagtgggggaagataatagtatgtgtcgctggctgggtattttctgtatttctggcatacacccatgcaaaatttactacctcctctgtatcttatcggtcaattcgttcatatgtttattggactagtcaaagcttgtaatgctgttgctgctctgaaccgtgcctgtacataacatatgcttaaaaaggttttgcattgtcctttagtttctgtttgtactgcttgtggatgcgttctttgcatgagatttgttatcatgag

SEQ ID NO: 40154 - DNA, 279 bp, Zea Mays
ctgccttcatgaagcttctgtaaactaccacttcatcagcttcgggcagagggatattattttcccctccagccctcacaattgagatatcacaaaagtacttccccctcattgcatcaatctgcccttgctaaatagttgatttcccgaagacaacatggcttggtctctagggccgatcttcggcatcttcattcccactttttgcatctaaactttcattatcgctggagttctcagatatcctagctagcatctcgtttgcaatcttctcttcat

SEQ ID NO: 40155 - DNA, 5332 bp, Zea Mays
gtcgtccgccgtcacgtcaagccggcacgctgcgcacgctccggccccgcggccccggatgtcagagagacttgtccgagacagcatggggcgacggtccgacggacacgcagatccgtttgccgcccctgtcctgtccgcctgcactgcccgattctgccgcctgtccacgaggcgaggggcggtaaaaggctgggtgtgtgcctgtgtggggtgtgggtaggggaggcagagattgctgcgcgcgccccggagcagagcgagtgcttgccagttgccattactgttcggtgcggtgaggtagtagagggataaagaaagaagggactggaaggaaggaaggagtgagggagatgccggcttcgcctcgtatggggaggggataagggaaggccgatggcaatgccgccgtttctccctcttcgcgaatagctagtacgcgttcaaagcaactgattggctgttgatcagcaagatggatgggaaaggattgtttgcggagatagggatgaaggaggaggacattgccacaatgctgtctgggaagaaagtttccgagctggcagaggatgcgtttgatggttccaaggaagaaagacagatctttgagggtgtcttctgcctaacaaacgttgatggtggattgaatgatcattatcatggaggcattggacatactgttcatgcagggaaagtggtgacaagttctagaaaaccatcaagctctgccgacaattacaaggcagcacactgtcgcatagtagagtccttcactgctggcaacttatcaagctatcgtgtctcctgtcttggtgccgatgagcaggctcatggagcaatgcattctcctgatgctgtccgtttcaagcttgcagtgcagtggacgcctcctcgccctgatcgggtgtacactcgtagggtggtgactcgcaggagcgagagggcaagaatttgcagtgcgatggatttggagagcatcgacatttgcaatttcagtcgtcagagggatggtcgtggccatggacagctttggaaccatcttcggatgcatgcacatcttctgatggtggatgccgggtggaagattgaggccaaggaaagagacaacaggagtaaagttgatcatgtttatgtggcgccagacaatgtgacacgcctgtattctcttcccagagcatggaaatgctttggccagtggttgcttatgacaacaccctgcgtcaatggaaatgagtcaattgactacggaaaggagtggtcgaacatgcatgaatttctgtatgatctgaagaacacactgctatgcctacagtatgaggtccaacgtacgaagccagcactatctttcctctaccagtggcagctccttgatcctttcatggctgttgtttgcatcgataagaaggttgcagctcttaaagatggagtggcactgaaagctgttaacagcaccgtgacttgcctcaatcgcagtgagtgtaagatgttggatgccaagaattcaaataggtcacttggggtcaactccacaagtaaatatatgaatccatatctcagctcctgcaaaaaaagtcttctgccgcttctctctgaatctgattatcagcctgataaggaagggaatactatgcctaatgaagaagcttctctattttgtacaaacaagactagcgaagatgaagctgatcggcggtcattgtgtatgtcagaaatgaatgaaataggcataagaagcacagctcatcacatagttatgggtttacatgatgcaacagcttttcatggctcaagccaaacttgttcggggaggaaaagaaaatttccgtgcatcaagtctaaagaggataatcaaactgaagacaagtctgacccattattctttccacccagctattcatccacattaagtcatctggttgaaaatgttcaaataaatgatgttagccctcatggctatgaaaccacggagattccaaacatgggcaatcgtacagatattcttgataagatgtacctaggagagaatttattgtttgcccccgaaactggtaatatgctacttgaaactacagatgatatcaacaatgaacagcatgatgatgcagctgtctctgagccccaatcggcagataatgatggaagtggaccttctggtgcatcatcactaccaccagagaaagatgcatacatgggatctaaagaggattctattaacgactatcatgatccttcagttgtctctgagttccaaattgctaataatgatgcaaaatgtgaaccttctattgcattcttgccagaaaaggataaagatttggaagctaataaaacgagcttggaaggtccagcaaaaacaggccaattgtcatctgaagctagtggcagcactttgatgatctcagagccacaagtattgtttgtgtccccacaagatgggactctgtctttcatgaacaataatacgaacaaccaagagatgtggaggttcctgaatgtttcccctgataccatggataccgaaatgcagatggactctaattcattggtttacgaggcaagcttgattcagggtttcttgtaccttgacaatgagggttctccaatttgttggacagtgatgaacccggaacctcctaggcgcttgatatgtgctactgctctggaaccaaactcaaagctgtcgaaacagtatgttgaaatgaggttggagaatgatgcatcaacgtctgaacacaagaagggaggaaaattgtctgataaggctgcagatatccaagacaatgtcagtagaaaaaaacagaaagcaaacattgcttctttaaataattgcgtaagtatggacaatttaactgtcaatcctattgatcctgtagttctcaatgagggagagcagacaggtacagcaatcactgagcaggttcctgttcctttgaatctagtgcttgagaacaaaaatgacaaggaccaaggtgagcaaagcagtgaaacttcagaacaacttatgtccaaagaaccacaaaaaagggacatcaaaaggcaaaagagaacatggtctcatacatgcaagtttgatgatgatgaccttctgatgacagctgtaatatataagctgacagcacgttacaggaactcttttcatcggaagctcagaaataaattcggtttcaggcgtcttccaacataccactgggagaatgaagataaaggtgacaggaagaagtttcctggagaagcaaggacggtgttgaacaagttacttgaaatgggcattgttgctagagtggatattcttcaatgtcatggtccaggaggcaaaaatgtgttgaaggatgggaacataactgcgagtggcattcaatgccagtgctgtggtaccacattcacaatgtccaagtttaagtgtcatgcaggtctcaggcaagaagtcccatctctgaatcttttcttggatacaggcaaatcttacagtctttgtcagcttcaagcatggtctatagagcagaaggtgaggaaagagcatgcaaaggatacaatgtcccttcaagcagaccaaaacgatgatacctgtggatcatgtggcgatggtggtgaactgatatgctgtgacaattgtcctgctagttaccatcaagcctgcttgtcttgccagtttgcgcaaagaaagagggactccaagaatgccggtgctgctgcccgcccaccccctcgtggatcgagctttttaaacttcccatggatattccagatggcaactggtactgctctagctgcctttgcgacatttgtggtgaagtaatcgattcaaaggagcttgtaacttcccttcctgctttagattgctcacagtgcgaacgccaataccatgtaaaatgtgtatctgccaaagttccgtgcaatgaggatggatctggtacctggttttgtggaagaaaatgtcacgagatctatatgaccttccgttctcgtgttggagtgcctgatcacatggacgatgatctgtgtttcaccgttcttcgtaacaacggtgataagaaggttcgcacggcagaggagattgctctcatggctgaatgcaacatgaaactcatgatcgccacgagtatcatggaagagtgtttcctgcctattctagatcccaggacagggatagacattattccctccatattgtataactggaggtctgatttacatttcaattacaaggggttctatacagtagtcttggaaagtgatgatagcatggtatctgttgcctccataaggttgcatggtgcaattttagcagagatgcctctggtagcaacttctaaagagaatcgtcagcaggggatgtgcaggcgcctcatggattacattgaggagatgctgaaatccctgaaggtggagatgctgctcctatcagcaatcccgcacctggcggagacatggacatcgacatttgggttcagagagatagatgagtcggacaagaagaggctgagtaaggtgaggctggccgcagttccggggaccgtcctactgaagaaggacctgctgtgtgaatgttcaggcgcggacgccggtgagccgccgagccctaagcccttccaagtttactcgcgcgtgccgagaggccgcaccggtttggatgcagtgtgccaataaagatgacgcagtggatcgaatgcgccgcggtcagtcgtcgtcgtcggtgacagggggcagctggtggtcgtcacggggcctcgtctccggttgctgaagccgaggccgagcacatcagcacgcgccggtttgtgtggtggaaatggaaagcctcgttgctctggtaggagctctgaagatcgctgtcgtctgcttgtagtctgtaaatagcttctccgtcggcgagaagcccagggtccacggccattgtagaaccgaacctgtatgataaaactagaccgtgttggcgccccaccagcgtttagtagtttccgttgccctttgaactcaaagtttcaggctagtccattgtgttcgtttcagaagcctgcggttttcagggggaggggaggtgccagaaagggaggacataacgcacgtgcagaccgagtattatgtggtggtgtcgtagacacgcacgagttgacgaagctataggagcagctcgtgatgagcaatggttggtgcagatgatgatgtcaatgagctcctcccgcagggaccggacctgtggacacggatggagctgaacttgtttgaaggatgcgtagtactaataatatatgcagtcaagccagcctgaacttatttgaatgaggtgtagtactaataatatatgcagccaagccagcctgacactttcata

SEQ ID NO: 40156 - DNA, 763 bp, Zea Mays
attgatctagatgccaaccattaggcatgattcgattctagaagatcctgatggtgacacctcacaaccacaacacatctcggactactaccatgtcagtctcaagaatgtgatgataacatgaccattcaaattggtgaagtacttcagatgcaaattgaggttcaaagatagttaaatgaactacttgagaaatggtcatttgttaaatctgagcagaaaagatcggaaatccaagggcttatggaattggtattgcaaagatcttcatgtgattcggatccttataaggaaagataatttatatacatgagggagccacctattgattcttttgatgtctctacatgtgttgctgcggaggaagccgacagcgcagctatggtcgttgagaagaaggttgtcgcgtctgtgtagcttgtcgccgttgctgcgcacaaggcgggctgcgccatggatgctatctgtttgtattacttttggttggttgcattaagtgttgtactgtgtgtttggtaatgcagttacttttgtattcagtgaactgtttggtaatgcggttccttctgtatttagtgaattgtgtggtactgcgtacacactgtagttccttttgtattaagtgtagtagtgatgaggtaatgcattgcacttgtactactgagctaaatctatgtacttgtgcctgttgtggctaaaaagcatatgttaagaaaatactgctttctgtgaatgaggtactagcaatctgtgtacattatgg

SEQ ID NO: 40157 - DNA, 1181 bp, Zea Mays
cttgatttcgtttatgatcatactatcaaaggcaagtgttatggtttaaaaactttcactcaccccagagctgctgagcaagcaattgcaggcatggacggcaagaaattaggcaatcgtattattcgagtaaatgaagtgcgtacaagaggtccccgagattttggtcgagatggttttagacgagatccaagaaggtatggtagagatccatactgggacagaagggatagggaacagagctatgatcgtgaaagagatccctaccatgacagggatagtgatagatcccgcgagcatgatagagaaagagattatgagcatggtggctttaatagagaagttgactatcccatggatcgagatcatgaagtagacgacatacatcctagagaacatgatcgtgcagcagaaacacataatatggattcagataatgacaaatataaggaacatggatcaagaaaaaggttcagccacccaaaaggtcgtgatagcaaagatttatcgagttccagtgatcttcaaaatgatgttagccagattaaggataaaatctctgcgaaaggacaacacattgcagatttgcagaagaaagctcagaaattagaggacgaactggctgctgcacggaaagtctcttcagaacgacaattagctgttacagacctgtacaaacattttcttcaactccaagactacaacgatagggtcaaaacagctgaacataggctgcagtctcttgttgacgctgccatggccgagcttgacatggccgaagatgctactaccagagatggctcgatgtatgagaacggcgtggtttgaacacccaaagggggctgccagctgtcatgtcacggcttgtgaggtttactaatttgttagatttgtagtttggatttgccatgtataatagaactgtactgtaactagaaacgggaaaatgttgtgtaaggatcagggaatgaatggctgcacagtgcacatttgctatggcttgtttttttttttcaaagttgaatttattagccggcctgactattgctgatacggtatgatctgccctaatatcagagctgttcagttaggcaggtttgacttgagaaacgttcgtgttctgtttgtcaatcacatatatcatgctggcttgttgatgcctgagcttgacgccgtcaatg

SEQ ID NO: 40158 - DNA, 1563 bp, Zea Mays
cttgatccgtttcacttgcagcacgcttggttaaactccgggcgatggccgagcaaggacgcacccgggattggacctatcgacggtggcagcccgcagcccatcggtttcgccgaccggcgcctcgttcgcatcgactccacctcctcctcctcgcacgctataaactagactagagcaatacccgtggtggatgttccaccgcctgctccgccgcgcgatgccgctcccgccgccgcagtccccgcttcctgctccccggatgccgggggtcaccggcgggcgcctcttcgcttcgctgccgtcgccgccgcccctccagtctcgaagagaggtgcatgtgtggtatcttttgcctgatgagttgaaggatgcctcccaactcaagatgtacacggagctcctttccccttctgaaaggaagactgctttgtctatgaacggggaaaagttgcagaaaggtgccgtgctgtcccgtgcactgctgcgcaccaccctctcgagatatacagattgcaaagttgatccaagatcatttgagtttaagaaaaacaagtttggcaaacctgaggtactgtggcgatctgatgacagcaggatggaatggcctttacatttcaatatttcacacacatcatctttgattgtctgtggcataaccatggatactcctattggcattgacgttgaagagaagacacgaaagacagccaagaatattttatctcttgctcgccgttatttcaccccatctgaaattgattatctagctaaaattccagatcctgatgctcagcaaaaggagttcgtaaaactatggactcttaaagaagcatatgtaaaagctcttggaagggggttttcaggcgcccctttcaacaaattctcgattatattggcagcaaatggcagaatccaaatttctgtgtttccaggcaccaaaagtatcgaacggttctgactctatccatgactgtctgtccgagaattggcagtttgcacttgctgaactaaacagttctcattacatggcaatctgtatagaggatgactcaacaagttcagattctggaaacggtagactgccactaggattgaaagtatggaagaccactccgttcgtggaagatatacttgtttctggaacggaagctgtaaaacttgtcagttaagtatgtgagaggatatctgccattggtcaagtgatttcgccagatgacaatgtgatgcaacgaatgtatttggacgaagtatgcgctgtgcagggaggctgaacggttttcttcgagcatactgcatgcattgatgaactgaccactgacactgtgtgctttagttaagatttggaaatgcaatgacatacactttggagtcctgatattcatattagcatatcacgacactgtttcgaaaggaataaacatttatctctctcttgtgtgtgtgtgtggggtaattttagacgtattttgtactgattggtccttgttatctgacggatcattggaagaaatattcatgcatcagcatgcttctatcggtggcataggaattctgctattg

SEQ ID NO: 40159 - DNA, 250 bp, Zea Mays
tgtcctcaatttaacccgggagaggatggcttctacctgcaagtatattttcatttggagcaatagtgggatcttactgcaaagttccctgtgatgctctttcatcctaaggaacagacacaatcctaaggatggaaatacttaaattgagacttgggttaggaaccggtgatgttctacccaggttggttaaggattaacgcgtatgtaggcgtgctgaccgaggaccctttaactggtcacatgcctc

SEQ ID NO: 40160 - DNA, 2067 bp, Zea Mays
aaacaactctcaccatgattacatggaaacccagtatgcattgggcaaaaccaactgaatatttctcagtattgtcagtcaggaacatatgttgcacgtggaggttcagcagataacagtacagtttgtccaccatgctctagcgactttccttttgaaagaataccgatgtcaccaataccatgctcatgtgtcgttccagtttatgtgggttaccggcttaagagtcctgggttctcaaatttcattccatacgaatcccagttccagcagtacttaacatctgggctttcactgtcatcgtaccaattagaagtttctacttttatgtgggaagaaggcccaaggctgaagatggacctgaaaatatttccaaataacactccctttttcactgtaagtgaggtgttcaggcttaatggtatgttcacagcttggcagattgcagactctgatatatttggcccatatgaacttatcagcttcaaccaagggtggtacaacacaataataccacagggtacaaagtctggtctgagtacaggtgccattgttggggtggtcatggcggcatttgttgcagctgccattctttcatccctcgttactatcatcatattgcggagacgctcaagacagtcttcttcaaataaacgcaccgcgaaaagaatttcaatgaaaattgctggtgtaaaagacttcacttttgatgaattgtcacattgtacacatgactttaatgattcaacactaattggccaaggagggtatggcaaggtatacagaggtgtgttggctgatggaatagtagtagcaataaagcgagcacagcaagggtctcttcaaggttctaaggaattcttcacagagatagagttgctatcgaggctgcatcaccgtaatctagtctctttgctcggttattgtgatgaagatgatgaacagatgctggtttacgagtatatgcccaatggaaatctgcgtgatcatctttcagctagagctaaggtgcctctagatttccccatgaggctacggatcgcgctgggatcgtcacgtggtatcctgtatttgcacacggaagcagatcctccaatataccatcgtgacatcaaagccagcaatattctactggactcgaagtttgtcgcaaaggttgctgatttcggtctctcacgccttgctccgctgccagaaacagaggggagtgcccctggtcatgtctccacagtcgtaaaaggcaccccgggttatcttgacccagagtattttctcacccataagctcacggacaagagcgacgtgtacagcctgggcgttgtgttcttggagctgctgactgggatgcagccaatctctcatggaaggaatattgtcagagaggttttggcagccaatcagtcagggatgatattctcggtggtggataaccggatgggctcgtaccctgctgagtgcgtggagaagtttgctgcgctggcgctgcggtgttgccaggacgagacggactcgaggccatccatggtggaggtggttcgggagctggacatgatatggcgcatgacgccggggacggagaacattgcatcgtcagagtctggcgtcatggggatgggctccaacagcaccagcacacccacagcatcggggtctcggatggatgatcactacatttcgtccatggaggtctccggtagcaacctgctcagtggcgttatgcccagcatcaatccgcgctgacctgctagtatatgttgctgttctagcggtgtgtattatagtttggactcaccacgacgaggatgtaggctacttgtgagcaaccaaacatgtattcattctcttatcgggttcaattttattgttgtcacacttagactgtgaaagtttcattccttagacggtctctagcaacgttctctaaatttcatccattaaaaaatatatataattgcactctaaaagattacgtcatttatatcttcatcatccccggtagtctcttttaaatttcatcatctatatcctatcttccatattatcacaaatcctgttattagaaatttt

SEQ ID NO: 40161 - DNA, 1479 bp, Zea Mays
aggaagcagcatatccattcccccaaattcccacacaagaacaacccaaggaggagggtcctcccctccaagattcaagcttctctcttggtttcctccgcagttgcgattctgcggagcgctgaatactacggtaatggattccaagaagatgtatgtttgctccctgcctttgatgccatacgtcgtcttcggattcgtcggctcccaactgccgtcagctcccaactggcagtcctataaagtggatgatccgaatgcgccgagaatgattcttctcgttattttgtacatctacgtcatcttgctggctaaaattaagaacgacaggatctacatcgagacggcaactgccgtggtgatatcttacgtgtcgctacttcaaatcagctggagctacatctggctcgttcccttccccattgtcgcgatcggcttcatcgttgctctgtgcaaggagctcagtcacgaggacgaggccggtggatcacattcacaggagcagagcaatgaaggtgaaggcgaagctactacgtcttcatgggaaaagttcctcctcttcttcagtttcatgctgggggcactgaccatgatgatgactcggctggtggagacggggcgggccattgcccaccgcggcatcgtgccggcgtccgagctgctttggaaagcctcgctcgtggtgctgctggtggcggtgcacgcagtggcggcagagctgctgggagagaacgcgttactcctgtgcatgccggaaatcctgccggtgctgctgtggctcagcgttcgccttgacactgctgacgacaggatcaagctggtcctggacagtaatctgctccccgcagcactacctgcagtcctcgccatgctagcgaagggcgagcccctgctctactgtggccgggaggacaacgcgatcgcacgctcacagttctactgcaagaaccggtggtctcatcatcagccgaccaaatcttcgatgtgtagcatgtacttttcaggggcacatactggatgagacaatggatgctgctgctaaaggaagaagaaaaattacaagtaaagcagggatgcaggctgcttgaagttgcaatgatgcaaatctttgctaaaaatggttggaactttagtaatcgattgtgcttgtaatctgtaatgttatggtggcatctatgtttcgagtatggttttgttcctgtttgaacccagtatttttgatgtattggacagctatatgcccaatatttttgatgtattggacagctatatgcatattgtcatgcagaggttggaataatcaagttattcccttttctaaaaaatatgtaaaaaagatcctccagttcataatttgactgcgaaatgaatattttcataatctgttcccctgttagacatatggtttatcccgcgctaaccgaatttgcagtatctcactaccgaaaacagcttctttgccgagtgtctgaagcactc

SEQ ID NO: 40162 - DNA, 3094 bp, Zea Mays
cagcgcccggtggcagaacatttaccccaaatccaacccaaatcaaatttccccaaacggaggaaagaaacggaagccgaaaagaaaagcgtgctcttttttcatccttcgtgcgtggtgcgcgagcgtgcgcctcccttaccatctcgcgatcccaattcgatccgctcgccagctctccccatcagacctgccctccccggccgggcgattcgccgccgctactcgaattcgcgtggacccgtcatccattctcgctccccggcgccccaaaccctagatccgctgctgttcttcccaccgccgccgccatgttctggcgcatgaccggcctctccgcggcctcgcccgtggatacaattcttgacaaagaaaattttacattggaagaacttcttgacgaggatgaaattattcaggagtgcaaagcacttaactcacgactcataaacttcttacgtgacaaggctcaggtggaacagttgcttcgttatgttgtggaagaagttccagatgatgctgaaaggaagcgatctttcaagttcccatttattgcttctgaaatatttacttgcgaaatcgatgtcattttgaggaccctagtagaggatgaagagctaatggatttgcttttctcatttgtgaaacctgatcatccgcatagtacattattgtctggttacttcagtaaggtggtaatatgtttggtgctgcggaagactgctccacttatgagttatgttcaggggcatccagagatagttgtccagcttgttgacctgattggcatcacatcgataatggaggtgctgatacgactgattggtgctgatgagaccatatattcaaactatggtgatacgttgcagtggttagaaaatacaaatgtacttgaaatgattgcagataagtttaactcgtcggattctcctgaagtgcatgccaatgctgcggaaattctatgtgcagttactcggtgtgcgcctccatctcttgctgcaaagatatgcagtccaagttttgttcggaggttgttccatcacgctcttgaagaatcaagacccaaatctgttctgcttcattcactgtcagtgtgcatatctttgctggatccaaaaagactagcatcagcttcgtatcaagcattcaaaagcaacttaagtcatggggcattggtcatggccagtccagagacagttgatggtatgcttgagagtctaggcaacttgctgaatttattggacacatcggctgctgaaagtgtgttgccaacaacttatggatgtttgcgcccacctcttggaaaacatcgtctgaagattgttgaattcatctctgtgctgcttacaattggaagtgaaactgcagaaaaggagctagtaagacagtcagcaataaagcgatcgattgatttgttctttgaggtaaaagacctgaagttgttgagcatgttcttcatgaatgtgatattgttggtaaaattcttgtttcagaaaggctttcatctttgtcgactgagtctaatgggcctactgttcccactgaaggaaaaacacatccaagagttggaaatgttggccacatgacaagaatagccaataagcttattcagttgggcaacagtaacaacacaatccaggctcacttacaggaaaataatgagtgggttgaatggcaaacaaatgtgctggtcaaacgtaatgaagtagagaatgtttatcattgggcttgtgggcgcccggcgtcattacatgaccgtggtagggacagtgatgatgatgacttccgggacagggactacgacgtggcagctcttgctaataacttaagtcaggcatttcgttatgggatatacagcagcgatgacatcgaagaggcacaaggatcacttgaaagagatgatgaggatgtgtattttgatgatgaatcagctgaggtggtaatatcttctttgcgtctgggagatgaccaggaaggctccctctttacaaattcaaactggttcacatttgatggagagagaggcattgatgaccgatcatctgcctctgttccttcatcatcccccaattctgaggagacatcactaaagactgaggaagctgatgatggtaaagtcattggcactgaggatgaaatggaaacagtgtatcttggaaatggtagtgttgaggaggtaaaagatgtagcagaatgtactgaacagccaaattgttgtactgaggaagagcgattgaaaaatgaagaagggatggaatggcatccaaatgcttcaaataacgataccgaggctgaggctgccgcagagtcttcagccccatcagttgagatagtggcagagaaaacagtagatgaaccattagaggtgggaagaaaattggatgaaccggcagaatcatctttggacagttctgtctctgtagctttgccagctcctgttaacggtagtgagcctgccaactcggaagtatcttctgaacaagtagcccatgccactgatgtgcagcaaccagtgaaggaagctcctgccgaggatgatgatgcaaagaaaactgatgcagccaaaacaaacgagtgaagtagcaacatgctgggctgagctgatcagagcgattgcttgtgaactgaaaactctgtagagtgcagcttgggcatccatcttgcttcatgtgtgctcagctgccacaagatagtctgaagcaaactgctgtacaataagcaagtaattgctctaccatcaaccgtggcatgccactgtacaaatgagcaccactgactaacgcacgtcagtcgccttgtctgaaactggtcattttctttgaagttcaccctccagtccatgtgctttggtggcagtcttcatggcatggtatatgatacctgaaagaacattctttgggtggcaactggttttggctacttagtcttctgttgctttaggttaactttggaactgtaatatgagatgtgattttatttctagtctagctattgtatttttttttcggactctacatgtgtcagttcgatttgaacatgttatttttttcataaagatttgaagacatcttgatcgacggctcctcgtctaccc

SEQ ID NO: 40163 - DNA, 4112 bp, Zea Mays
ctcgaaccaggtccccggacggggacggctgaactcgagctcgagtcctcgcgcgaagtcgctggtgctgctgctataccccggccgccgccatgcgcctcctcctcaccgcggcatggccgtgcgctatcctcctcatccttgccagtgcgctacagtcggcaacggtggcgagttccggtgccgctgctgcccgtctggagtggcaggtcctgaccagggccaacttctcgtcccagatccggctccgcccccacgtcctcctcctcgtcacgatgccctggtatggtgagtccagatcactgatggctgacatagaacgtttggttggttccaatgaggagcttagtcgcctcaagctgatggttgtatacaagaattctgaaaagttgctgacagatgctattggtgctgctgaaggaataactgtggtatactaccaacgttccatgcaattcaaatatcaagggaagcttcgtgcacatgatattctgtctgcagtgcgctatatcatgtcacttgaccatgaggagtccccttttgaggttttgcatacacaagaagatgtcgagaccttcatcgaatctaccgataaatccatactcctttatgaatcatgtggatggttcaccagattggctcatggcgggggcaaccaaagttatgaggcagcgtcatcaaataacaacacagaaaacgttgacatttctgggaagataatgaccagagaaccagatgggccactagagcttgtaagtgtagtgaagaaggttgcatttatatctgattaattagatactgctatgtttctttgagaagaattatctgaactatgaagattcagcaaatatcagaagaacaatccctgaaaatgtacttatttgagatgacaaacaggttatagagaatgaagaacaaacctttggagttgggggtcagcttactggttctccttggaaagttggttttgccttggcaaacgaaagtgtctctgaacaaattggaaacacaaatgatggatatagaaagtgtacaatgcaaaagttccatcaatttgaaagtttctatggaaagcttactgctatagcaagagaatatttgcttccccctgaaatagctaaatttggccttataaccgaaagatcattgttgccttcactggatgttgttaatgaaggcaaccaggatacatggtttgtcatcactcatcatatgggatgcaaaacttgttcagttattgcgaaagatggcgatgatctgagaagtatagtgcaatcccaccataatcttggcattaaggagtgctgatgaaagtagtagagaggctatcttccccagaaacaggccctctgtagttctatttattgatagattatcccactcctcaaaagtcagagatgaaagcaaattagtcctaaagttactaaggcagtatgtgcaaaataattacccatttcatgtcagtaatggggttccaagtagcagtacttccaaagcacgctcaaaagctgtcccttctttgaggaatacaggtatctcagatgcctattctcaaacagcaaggttgagtgcttgggcttctaagcttatggcacttggggacaaaatgtcagttatggtggttaatgatggagatagtatttcttacaaaagttctagccaaggtagtggtgctaatcctgtatatgatgttctcactaagttgctagacaaagcaagaccagggcataagtcaaagaaaacaagaataagtttagtttcacgagatgttggcctaaagatgttgtcagatcattctgaaatcaaagtggttaagtctctatcagttgaagagagtgaatacaaaagaactgatgatgcatctgccactacagctaattccaatgatgatattactgaagcttttgtggatgaaaacacagcaaaagagactgaatatatcaatgatggacaagtaccaagtatacttgagaaatcttcggcaacttaccctgatgaacatgatactgctcgtgaatttaatgatacagaaattgaggacaaaagcataagtgaagcttcagatatgagtgttgatcttaaggaagatgcccccaataatgcagatagtagtagtgaggttggaggtatgctgcataaacacataatggagaaaacagttacagaagcttttcaaattttggaacatgatgaaagaaacttgtacactgaccaagaggaatcagtatcatcaaacgagcaagttgatggatcttcattcctgagtaaaaaaatcagtaaaaccgaagatgcaatttatgaaaacacattcggtctatctgaaggattagaagaaagtgatagaagatgtccccatcatgcaacatgtagctcttcctgtgttcctgtaagagatgacacagactttactgatcaagtaacttcaagtatatctgattaccgttttgctggtgctttctacttctctgatggtggttacagactcctgagaactttaactggtggatcaagaattccgtccctggtaataattgatccagttgaacaaaaacattatatatttcctgaggaaagcgagtatagctatgcttctttacaaaattatcttgacagttttaggaatcgaagtcttccttcatattaccgtggtacctcatcagctataagttcaaaggagtttccaagaccaccttttgttaatcatgatttccatgaggcaaattcgatccctcagttgacagcatttagtttttgtccgttagtatttggacccagaggttgtgattcaaaaagtgaagtatcattttcaaacactgaaaatattgtatctggttggaacaaggatgtaatggtgcttttcagcaactcttggtgtgggttttgtcagcgagcagagctggtggtccgtgagttacaccgatcatttaagagcttttcaagctattcagattctgtatctagaaatgctcaagatgtccacaatgaagagaaaagtgaagaatatgtgatgaagggctttcctgcaatttacatgatagactgcacatcaaatgaatgccaccatttactaaaatctgcaggaagaactttatccggcattgttactcttccctgcggagaacaaaagtgcaatagcatatgaagggggaatgtcagtgtctcacttaatcgaatttttggagtctcatgtgagcaattctcgctatctattggaatataaaggatttatgtggaagaagagaatgacaccacagcacgatgcaccacaggcaattcagtttaaagtcagtgataaaggtagcggcaatgttggttctgagttaccaagtcatccaggtgtcgttacaggatccatccttactgccactaagaagctcgggaccgcagttccatttgataatgccaaggtgctcattgtgtcagctgattctcatgaaggatttcatggcttgatcatcaacaagcgattaagctggggtgtcttcaaggatctggatagctcgatggagcctattaagcatgcaccacttttctatggtgggcctgttgtggtgcagggttatcatcttgtaagcttgtcaagagtatcctcggaggggtacatgcaagtcataccaggcgtctattatggcaacatagttgccacaagccgggtagtcacacggatcaagttgggcgagcaatctgtcaatggcctgtggttcttcctaggctactcggggtggggatacaaccaactttttgatgagctaactgaaggagcatggcttgtgagtgtgaagccgattgagcatttggactggccgaagagttgaaagggttctgtggacctcacgcctcagctgtttctttaggaaaattcagttcatcttgcacatatctgccactctgcccacactgcaccgtgacattgtactgagcttttttttggaacatagcagcactgtgttttcataccattcacaccgtactatggtcacatattttttatacatagtacttttcttatagtgaagaacgttttctgtgttcttccttttgatttcattttttgttcgagattttgggcctgtttggttggcacggctccggctccttaaaaaataactccg

SEQ ID NO: 40164 - DNA, 624 bp, Zea Mays
ctcatattaggtcacgaagcggtacgcgatagtggccataggatttcaaatcaagcccctagatttaattactgcgagatccaactacgaccctccgatcggctatgcacagcccaaattagatccttcttaaatcgaagcagtatgctatgtggaccactgcatcggaaatctgcggcctagattttattaggcccaatctacttacacccgtctgatctgaatcgaacgacatatgttacacctacccaaaccagtatccggatctgattttgaccgcccaatgaataatcaacggaggacgctactccccctctctcccagcccgcgcagatggcgcgcggcggtgccgcccagctccgcggaagtgaagcacaccggagaagcataacttgctccctggtgcgttattctcctcaccgataggtgctacgtgatgagggtggaaccacgaattatcgagacggtcactcaccggtcgtgaccgtgcaaacagacggatccgcgacgggggattgactccggcgagccattcaccgtggatgaagcctcccctgcacaccggcgaggtacatgaaggatccccacaccttgagaaaccccaagggccatacatctatgggg

SEQ ID NO: 40165 - DNA, 5188 bp, Zea Mays
aaaattccaggcagcgcagtgcgcacgccctgcggcaaatacacgaatccccgagccgggggcgagaaaaccgcaaaaggagattctcctcgccccttccactagactactggagtacccgacggcccgaggcggcgagctcgtcggcgactgaccgccgccggagcagccgccgcctcccgctggttcctgtaccacagcctcgcaggagcgcctccgttcgctacgccacccgccactgtgctgtcggaaggcagctcggactactcgcgccgcctcggcttctccgcgctcgccgcccctccgccggcgtgatcaaggatggagctacatcgtgaacctcctgaagctattctgaatgccataaaatttgatctcatgacgagtacggatatggaaaaattgagcagcatgagcataatcgaagtgagtgatgtcactagtccgaagctaggattaccaaatggttccctgcagtgtgagacttgtggatcacaacgtggacgcgactgtgatgggcattttggtgtgactaaactggcggcaacagtacacaatccatacttcatcgatgacgttgttcactttctaaaccgaatatgtcctggctgtctcagcccaagggaaggcatagatacaaagagattggagagagaaaaggttcaagcaacatgcaagtattgttcgaaggatggctctaaactttaccctagcatagtctttaagacactgtcaagtccaagagtattattattcaagagtaaacttcacagaaacgccagcgtgatggaaagaatttcgattgttgcagaagctgctgacagaatgcctaatagatcaaagggtaaaggttcgcttgaaggcctgcccctggatttttgggattttgtaccttctgagaataaacaagtccagtcaaatatgaccaagataatattgtcgccctaccaagtcttctacatgttgaagaaaagtgaccctgaacttatcaaacaatttgtttcaaggcgggagctattgtttctatcatgtttaccagtaactcctaattgccatcgtgttgtagaaattggatatgggcttccagatggacgcctaacatttgatgacagaacaaaggcttacaagaggatggttgatgtcagtaggagaattgatgactaccgccagcatccacatttcagtgttcttgcaagttcacttgtctcaagccgggtttcagaatgcctaaagtcatccaagttgtactctaaaaaggcagatggagagacatccacagatacatatggaatgaaatggctaaaggatgttgttctcagcaaaagatcagataatgtttttaggagtattatggttggagacccaaaaattaagttatgggaaattggcattcctgaagatttatcctcaagcctggttgtttctgagcacgtcagttcttataattttcaaagtacaaatctgaagtgcaacctgcaccttctagccaagcaagaactatttattcggcgaaatggaaagctaatgtttcttcggaaggcagaccagctagaaataggagattttgatggtgattgtttgcatggatatatcccacaatctatacgctcaagggttgaacttgaagagctggtaagcttacacaaccagctgttgaatatgcaagacggtcgaaatttggtgtcactaacacatgactctctagctgctgcacatttgttaacaagtacagatgtttttctgaagaaatctgaattacagcagcttcaaatgctatgcctttcagtatcaacaccagcacccgcagttattaaatctatgaattttcaaggttctctgtggactggtaaacaacttttcagcatgcttcttccttcaggcatgaatttcagttgcgatacggagttacatatcatggacagtgaggtgcttacctgctcactgggttcttcttggctacaaaataacacatctggtcttttctctgtcatgttcaaacagtatggttgcaaggcacttgacttcctttcttcagcacaagaagtactatgtgagttcttaaccatgaggggtttaagtgtctctctttcagatctctacatgttctcagaccattactcaaggagaaaactagctgagggagttaagttggcactgtatgaagctgaagaagcttttcgagtcaagaaaatattgttagatccaattaacataccagttctgaagtgtcacgatgaaactgaagatgtaacttacagacaatctgattgtatccagagcaatccatcagttatcagatcttcaatcatggcatttaaagacgtcttccgtgatctcttaaaaatggtgcaacaacatgttagtaatgataactcaatgatggtgatgataaatgcaggaagcaagggtagcatgttgaaatatgctcaacaaactgcatgtattggtcttcaacttccagctagcaaatttcccttcagaattccttcccaactctcatgtattagctggaatggacagaaatcgttgaactatgaagctgagagtactagtgaacgtgtgggaggtcaaaacctttatgctgtgataaagaattccttcattgagggtttgaatccattggaatgtcttctgcacgctatatctggcagggcaaacttctttagtgaaaatgctgatgtaccagggacattgacaagaaaattaatgtatcacttgagagatatacatgttgcctatgatggaactgttagaagttcttatgggcagcaaatagtgcaattctcttatgatagtgttgatgacctagtagataaactcggcgccccggttggatgtcgggctgcttgttccatttcagaagctgcatatggagctttggaacacccggtcaatggtttagaggactcccctctcatgaatctacaagaagtatttaagtgtcacaaggctacaaattcaggggatcatattggtttgcttttcctgtcaaggcatttgaagaagtacagatacggtctggaatatgcatccctagaagttaaaaaccatcttgagcgagtgaacttctctgatttggttgaaaccatcatgattatatacgatggacatgacaaaataagaaacgaaggaatgtggaccacccattttcatataaacaaggcaatgatgaagaaaaaaagattaggattgagatttgttgtagatgaacttgcaaaagagtatgacaccaccagagatcagctaaacaacgcaatcccatcaattcgtatctcaaggaggttttttggaatttaaggatgttgagatccagtgtccacatgatggtgaacttcttgttaaagtttgtatgtctgagcattgtaaaggggggaggttctggcctactctacaaaatgcttgcattccagtaatggagttgattgactgggagctgagtcaaccaagcaatgtatctgatattttctgttcatatggcatagactcagcatggaaatactttgttgaatccttgaaatcagcgactactgatactgggaggaacattcgccgggagcacttgctggttattgcagatagcttgtctgtaactgggcagttccatgcattaagcagtcaaggtttaaagcagcagcgcactcggttatcgatctcgtctccattttctgaagcatgtttttctaggcctgcacaaagttttataaatgctgcaaagcaatgttcagtggacaatctgtgtggaagtctcgatgcagttgcttggggcaaagagcctttcaatgggacgtcagggccttttgaaattatgcactcgggaaagccacatgaaccagaacaaaatgagagcatctatgatttcctatgcagctctaaagttcggaattttgaaaagaatcatttggatacccgtagacaaagtactgaaaatgcttcgatatgtagattagcatgcaagtcttctaaaggcagtacgaccgtcaatggtgttgctataactatcgaccaggactttcttcatgctaaagtcagtatatgggataacattatcgatatgcgtacttccttacaaaacatgctaagagagtacccgttaaatggatatgtggcggagccagataaatcacagttaatcgaggccctgaaatttcattccagaggtgctgaaaagatcggtgtgggagtaagagaaattaagatcgggttgaatcctagtcacccaggtacaaggtgcttcattttgctgagaaacgatgataccactgaagacttttcttaccacaagtgtgttcagggtgctgcagactctatctcaccccagctcggaagttatttgaagaaactatattacagagcataagcttatgcaacactcccactagttcatttttttaactaaaacgtggcaaataaaaaagaacggatggagtaggattttggaaagtgttcctggcaacatcttgttctgatcagaccatattaccaatttctgataaggaaactacgtgtcgcattttaaggatgaggtgaaaactgaaagggtctggcgctcagaactcagaaggtcttctggactggaggtgtatgtcaactcaactcaatgggactatgtaaggtgggcctgagtcatgactgcggtttcatgcctgcaattctctagtcagtagtataaatactagtctgcgtgttttctaatatgaagatccatctattttattacttaaccatagcgtagatgattggtaacagatagatacattttatttactgattaaaatgcagcagcgactccccgaacttaaaacaggtaaacgggtgtggaaacttagtggctcattcaaaactgtctaaaatcgggtttgctcaaacaaagtgtcgacatggcatgtcatgttgaaatcatttgagtctctaaatttggtttacagacttttattagtgtgcttcaatcgtagcacaccaaatcagtattcggtttgagcatccgatttctgatggttttgcacaggccggccaagttatatgatctagttttttaacttaggggatctaattgatacaacatgccaagtttaagaatggctattgtatcttactcttatttattgaacaagtaatgcacattcccagtcagccgagcggctttgcgtgatgaatttgatgaactacacaagttaaactaagctacaca

SEQ ID NO: 40166 - DNA, 2870 bp, Zea Mays
cacagatgcattgaccaattgaagcgaaccacttcagttactcctagttttcaagagtgggcctcttttcatatcatccaaagggattggatggaaatcatggaagaaacgttggttcatcctcacaagaacatcattggttttcttcaagagtgatcctagtaccttgccccagagaggtggtgaagtgaatgttactctaggagggattgatttgaacaattctgggagtgtggtagtcagagaagacaagaagttattgactgtacttttcccagatggccgtgatggtcgtgcattcactcttaaggcagaaacttctgaagacttgtttgagtggaaaacagcattggaagaagctcttgcacaagctccaaatgcagctcttgtgatgggacataatgggatatttcggagagagaagagaccgatcaagtcattggtgacaggcaggccaattctgcttgcacttgaggatattgatggcagcccttcttttttagaaaaagccctgcgctttcttgagaaacatggaataaaggtggaaggaattttgaggcagtctgcagatgtggaagaagttgacaggagattgcaagaatatgaacaaggaaggactgagttttcagcagatgaagacgctcatgttgtcggtgactgtgtaaagcatgttctccgagagctgccatcatcccccgtgcctgcttcttgctgtacagcattattggaagcgtttcgtctggagactaaggatgctaggataaatgctatgcgttcagctatatctgagacatttcctgagcccaatcggaggttgctgcagagaattttaaaaatgatgcacactgttgcatctcacacttctgaaaatcgaatgactgcatcggcagttgctgcctgcatggcgcctcttctgttgcgtccacttctggctggtgaatgtgagatggatgaggtatttgatatggatggtgacgattctgcgcagcttcttgctgcagcaaatgccgcaaacagtgctcaaggaattgtcgcaactctcttggaggaatatgagggcatttttcatgatgaacacctcagatgttccttgtcacctgaatctcaaattgaagatagtggtactgaagcatcaactgatgatggtaatttggaagccaagggcaatggatttcatgatgcagaaaatgatgtagatcaagaaatggatgatgacaatggcgtggaacgtatacttagtgggaaattgagtgagagcagtggatatgctggcagtgacctctatgactacaaggcagtcaatgctgaggagtcagatgctgaacgccctgtgaagatgttggaaggaaatttgaatttgagcaaagtacagaacagcctttcaactgaaaatggttcagcgaatgtggatagcttactaagcgaaaataatccttctaacccaacagttggtcacgagactttgtctatgggggagatcctttcttcttttgatcctggaatttctgtaccgacccatagtcctgaatattctgtagagagacagacaaacaaaactaatggatctcacccacatgtgaagcggagtaacttttgggggaggaataatgcaaggaagggccaaaactctgaatcagtcgattcatctggagaagaagagcttgctattcaaagactagagattgcgaagaatgatctgcaaaacagaattgcaaaagaggctagagggaatgcaattctacaggcgagtttggaaagaagaaaacaagcgctacatgaacgcagattggctttggaacaggatgtctccaggttgcaagaacaactgcaagctgaaagggatctgcgagctgcattggaggttggcttgagcatgtcttctggacagttttcaagtgctcgttcgatggacgtgaagacaaaggcagaacttgaggagattgctctcgctgaagctgatgttgcaaggttaaaacagaaggttgcagagcttcacctccaactcaatcaacaacgtcaacaccagtatggctctgtagtagatgcaaatgatcgtcatcaccgcctccctggtcatttctcacagcaaaactttgttcaacaaggatttgatatgaaccttgctttctgcaatcaagagaagcagagaaatgaggagagttcggtggagtcatcacaatggagaaacatcaagcagcatgtgctaccttatggttcttcgaggccactcacacgaaagctttcatttgatgcctcctcaagtgaatcaaggggcacagaaccctcaacaagtatgtcaacagagaacacctctgtgtccatcaacgtcccaaagctggcagagggcattgaatttgggaggcaaccaatggtcacatcctccactttggaaccacccgaggtaggaggatgaccgtttgatttcatgattgtaaattcttcagtagtggttcttttctccccgcctggcgattgcagaaaactgcatatacgagtgtaaatgtattttgctcttcgatatggttttagctttcgtgttgtgcgaggatagctccttaagtgggatgtgtgatatagtcttttctgtataacacgttgtcatggagagatgccttttagacaagtttttccagtgttgtggcggtgtatatgtattttgtgcgacttggcgaagaaattgaataggttgactgcttgtatggccgtttgattcatgcctagggcaaaggacaggatgaggaaaactgggatcaaatgagaacccagcacgagtttataaataattcgggggtaggcttgaggctgtgttttattttatccttgcaattagttcccatcgccagtggcttgattccgctccgtgttgtttg

SEQ ID NO: 40167 - DNA, 2004 bp, Zea Mays
cttcactgtaggcgtccacaggcttggttctgccatcgcgctccgtccgcgatcccctccccgcgcccgatcctccacgctcgatcctcgaatcccgcggcttccttcgatggcacgaccccatccatctcgccagtgtccgtggtcccctccccgcgctccccaccacgacgacacgaccccatccatctcgctgctgtccacgcccagtcgcgcctcccacgatcacgcccacggacgcaacctccctccctccccgtccccgttcatgtcgcccccgtccgtgatcccctccccgccctcctctccgcgaccccatccatcctgtcgccgtccacgcccagcagcgctcaaaagcaaaaaagggtacgaatacgaatcccaatccagggccggagggcgagcgaactcaaaagcaagctgttccagtccaatccgccccagtccaaatctaatcgccgggtttaggcagaaggggtgggacgcggcgaggtttaggcggggtttgttttgtccctttcgtgcgattctgctctccgcgcgggaggcaagtactgacggaagcgaagaccaaggcggaggagggggtccccggcggtggaagtggaacgcgccgatgcgcaagtttcaggactccatcaaggccctccaggccgacatcgatcatgccaatgcgatggtgtcggaattcttgagggactacgatggctcggtcatccagatgcgggtggcgtacagcgccgtcgcgcatttcctcctgcagtggaccgactgcaagctcgccggcgcgctcggcctcctcaaggttatgctatacaaggtgtgcgcggacggctcgtcggcgcttcctgattgggacatggaggccagcatcagggagttttacggcgtcattttcccgttgttgctgcagcttccgagtggcatcaccgagctggacgacaggaagcagaggaagctctgcctcaagaaattcaggagcagggatgagcagctctgggaggtggacacggagagggagcttgagtgtgggatctgcctcgaggttagccccaaggtcgtgctgcccaactgtgcccacatgctctgcatgcggtgctttgaggattggaaatgacacctactctactccgcagcttaaaacctcaagatatgtcggtaatcaaacaagtacaagtttcaaggaaatgggaatttcatggaaatacagacattgggtccatattacacattgatatgattttggctgacaaagagcgctgtctgaggtgcgtggtcaagtcgaggcgaagatgagcaaggaggatgtgctcaaggtgcaggtcttggattcaacatagtactagcagtttggaatcacccgacggggatgctttccatgtaataaatatttttggaacgtttcggatttaacttatgttgtttctattgcaatcaacatggtgtcactatttggattcaccagtaagaatatttgccatttgggcttgttaattagggtgaaattttatataaaacatgcctcgttcacttgctttccagttcttgatttcagatctctgaagccaattacgtacacattttcctaccacgacttttattctgctttccgtttctcaacgtcttggacattgccggcgagcgcggtctcctcgacaacttctactgctaactcgggtgcaagatgcccagcaaacttcccaatccagctgccggcaaggagatgaggttcccgacggcgacaattttccactacacaaccggattcttcagcagcatatggatccgttgaagcgccgtgtgacaatgccaccaaagagcagcaacaaacaagctcaaagtctccgctaaccactaatctcataaagcttgaattttctcattgctatgtttccttctcctagcaaagttaagatgtttgcacatttctagcttattaggtccttgtgtggaatgtgtttgaacaatgatctcatttaaacaatatcaacatgtgtgatatat

SEQ ID NO: 40168 - DNA, 3383 bp, Zea Mays
agcccggtcgctcttgctgttggcttatatatgccttggcttcccgactccaaccaacctgacacgacgcccctctcttagcttctctgtcgtaccagcagcagcaaccaacccccccccccccccccgcccttaaacccctcgagctcgcgcgagaggctgtgcgctcagccgccgatcgaattgctctcgctcgtcgatccatgggagaggccgtcaccgccgcggagctgctgtacggcatgccgttgatccggtcggtggccggggatggcgccggcgccggcgttgagaccgccggctgcggtgcgctgctcgtggagctcaagcaactgtggggggagatcgggaagagccgggaggagcgggagcggatggtgcgggagctggaggccgagtgcatgcgcgtgtaccgccgcaaggtcgacgaggccaccggcgagcgggccgctctgcaccagtcgctcgccgcgggggaggccgagatcgccgcgctcgccgccgcgctgggctccgacagcggccctcagctcaaggtgaacaaatggaccatgtcgctgaccgagcgcgtgtcgtcggcaacagccctgctggaagagctgagggcggtgaaagcagagcggagcagacagttcgccgacgtccggtcagagatcgagaagatcaccgccgagatcgctgggaggagctacggctacgagggctccccccgggccagcgaggtgggagaacacgacctgacgatcaggaggctgaacgagtacagggcgcgcctcacgagcttccagaaggagaagtctgaccggctccacagggtcctggagcacgtgacggaggtgcactcgctgtgcgacgtgctcggcgaggacttcatcgcgatcgtgaacgaggtccacccggggctgcacgagacgtccgaccccggcaagcccaccagcatcagcgacagcacgctcgccaccctcgcccaggtcgtggcgacgctcgccgccgagaaagccaagcgagcgaccatgctgcgagaggccgtggtgcccttggtggagctgtgggagctgatggactcgtcggaggaggagcggcggagtttcaggaacgtggcggccgttctgaaccctgacaagctggatgctctgccctccggcgtcctgtcagtggcgacgataaagaagacggaggaggaggtggagaggctgacgaggctcaaggccggccggatgaaggagctcgtgctcaagaggcggctggagctggagagcatttgcaggagcatgcacgtggagcccgatgcgagcaccgtgccggagaaatccattgcgctgatcgactctggcctcgtgaacccttccgagctcatggccagcatcgacgaacagatagcgaaagccagggaggagctccagtccaggagagagatcatggagaagataaacaagtggctgctggcctgcgaggaagaggagtggctggaggagtacaatacggacgagaacagattcagtaccggcaggatcgcacgcctcaacttgaaacgcgcggagaaagcgaggcttatcatcaccaagattccggccgtgattgacagcctgatgagccgtacactcgcatgggagagcgaaagaaagaagccattcctgtacgacggggctcgcttggttgccgtcttggaggagcacaagcaagccaggctcaggcaggaagaggagaggaggcgactcagggagcagaagaagctgcgcaccctgctgagcgagaaggaggcgatgccgcacctgaagcggcccggcagcagcttcggcagggcggccgagccctgcaaagtgaaccggaaacgggttgacgcgggcaggctcgcgtcctccggtggcagtggcaccaccaccagcagcagcagcagcggtggtggtggtgcgagtgcaaccgagctcatcaggccgcgttcctcggcggcgggcgcgggacagtgcggcgagttcttcaaggattttttggagggttactcgtgtcgaaaatattctattgttattgttaaagaatatcttattcagagaattggtgagcttataccatctcttctcttcttctattctatctatctatcttccggcaccggcaggctacggtttgccgggcagggggcaggattcagatcttggagtggcgcgcctgccgtgcacgatttcgcatccgcgaccgcgcagagttgggttggacgggacgacggaggaggaggtggagaggctgacgaggctcaaggccggccggatgaaggagctcgtgctcaagaggcggctggagctggagagcatttgcaggagcatgcacgtggagcccgatgcgagcaccgtgccggagaaatccattgcgctgatcgactctggtaccagttcacagttcctgctttactgatcgactctggttcagatggcttcattttttctaacgctgacgaaattctaccaggcctcgtgaacccttccgagctcatggccagcatcgacgaacagatagcgaaagccagggaggagctccagtccaggaaagagatcatggagaagataaacaagtggctgctggcctgcgaggaagaggagtggctggaggagtacaatacggacgagaacagattcagtaccggcaggatcgcacgcctcaacttgaaacgcgcggagaaagcgaggcttatcatcaccaagattccggccgtggttgacagcctgatgagccgtacactcgcatgggagagcgaaagaaagaagccgttcctgtacgacggggctcgcttggttgccgtcttggaggagcacaagcaagccaggctcaggcaggaagaggagaggaggcgactcagggagcagaagaagctgcgcaccctgctgagcgagaaggaggcgatgccgcacctgaagcggcccggcagcagcttcggcagggcggccgagccctgcaaagtgaaccggaaacgggttgacgcgggcaggctcgcgtcctccggtggcagtggcaccaccagcggcagcagcagcagcagcggtggtggtgcgagtgcaaccgagctcatcaggccgcgttcctcggcggcgggctcgggacagtgcggcgagttcttcaagggcgtgaggcggctctcggcgccgccgttcaactacgtcgccgtgtccaagggccgcagcatgtcctcgtctctagctctgtcctaaactcgaaaccgcacaagtagcgaagacttgtcacgtgtgtgtatatagagtgccactgtaatttgtagccgtgttaccttttacacagatttttttggagggttattcgtctcaaaaaaattcctttgttattgttaaactatttcttgattagagaatttatgagtttatagtatctctaca

SEQ ID NO: 40169 - DNA, 379 bp, Zea Mays
agaacctatcatcgaccggtataccttttgatcaacggatttacctcccgtgtcgaggtcgagatgcccattggttcccatgggtgtcttgatgggtttggcatccttcatcccaaacttgcttagaatgtcttgaatatacttcgtttggctaatgaaggttccctcttggagttgcttcacttgaaatcctaagaagtacttcaactcccccatcattgacatctcgaatttctttgtcatgatcctactaaattcctcacatgtagattcgttagtagactcaaatataatatcatcaacataaatttggcatacaaacaaatcattgttaagagtcttagtaaataaagtaggatcggcttttccgactttgaag

SEQ ID NO: 40170 - DNA, 2136 bp, Zea Mays
tctggcctcattcattggcctcaaccctcaagcatcggctgtgcggacatgctgcgctcctgcacctcctcggccgccgctcccagattcaccgcgccaggacgctcgacggaccgggtgcccgccccctggccgcccttcgcagcggtccccgcctgctgaaacccctcccgcccttagctgtaggcctcgcggctcggcgcggtcgaaagcagctggtgcgcgatcgagaagagtccgccggcttctctggtgcgggctgcggggtgcggtgtttctgaggtccgccgcgccgcgatgaggcgaatgcagcagtgagatgagatggtagtgatcctctactcccagaggtgtaaatgcagtcagaaaattcggcatgagccccctctctgagctggtgtggtctccggatgaaggcttgagcattaaaattgcggcgtctagtcttagcacaagaaaggcttctcttcgttggaatgcagatacattgagcatattgatatcttcacctcaacgaagtggttctggtccaggtgaaaagaacggtgataccataaatgataacctagaggtatcagaaaagatgccatcacaactgcggattcgcagtgacagctcagtgagagtaaccgtggatagccccaatagtacaaatgttgacgccctacaatttacgtctatgagatcgcaggagcaagattcaaagtgctgtgaagggattaatgttatgaacgaaggtaaagaagagtcagaaaactgttgcgtggataagctggaggacatggaagtggggaattgtcccaccagatgctgcaaggatgcttcccatagttcagcctccaggaaaaaagtcgtgcctagcatttcagaaaaccaggcttgctgtgcaaccactttctgcaatgaaagatcttgggaaactaatgcatggcgtgctcggttagtaaaggcagtttgtcagaaagaatctattttgccaacgaacacagagaatccaattttaccttcttccataggaatttcatgtgatgcagtagagttctcaggcaaattggtaggttcccaaggcaagtttcaaagcctgggtgtaagtagtaatgctctagaaattcattctcatgacaattgccaagatccggttctgcacgaaagccataaggatgagcctgttattgctagaggtgagtcagcatctggtgttaatattgttgcaagatgtgagtcggtacctggagttgattccagcaattttgtgagaggcaaagaaaaagttatgtacaatgacagcaattgtggtaacaatacaagggagggtgatgacagcaatgagagcatcgagagctgtacaagtacaaaagccccaaagcgcaagcatgcgcagtgttgtgcagccacgatgccttcttctggaaacaaaagatttagaagagaagacaatgagagttcttgttcgggattattgcaaaaatgtggtacatctttcttcaactggatgtcatcactcacgaatgggttacccatgctagatggagccactgctgccgttccacttgaacagaagttttcagcaagtacaggagatggatctgcagcaccttcccagccacttcaaaacaaccgcagcgttcctatgcaattttttggcttcaattcgctcttccagtccctgtatactcgtaatgttatgataacttcaggagataattgtcgtcaaccagaaagcaactgtgctggacatgtgttcaatagactgaccctggaattaaatgatagcaattctatgttgaacaaagaaattggcatgggtagagaaactcttgatctggctactcagacttcagctgctgaaggatttcagatgatttctggtggctgtagaggaaatgttcagagtcaaattgatattttccaaatgagaccagaaagaaatatgaaactgcccagttccagtaagtttagctctagatctctagaagaaaaacaaaatcagtgcacagctgcctgctcaaatgatgcaacacaaaataaaggtggtttgagggaaagcttgtgggtaactcggcttttgccaaaagcatcagtagaattgatggagggcacaccatgcaatgtagagaatgctgttagtccacaggc

SEQ ID NO: 40171 - DNA, 2081 bp, Zea Mays
aaatccagcaccctgcaccctcttcctccatcgcaccctatcctcctcctccccggtccggcggtccccaccggtccaccacggcaccaccgtctccccgccccccgcgtccgatcaccgcaccggcgaactcggcgagccgctcgtcgctgcacgctaagctgggaatggccgctgcgctcgccagctcaccgcttgttcacctatccacctcccgcctccgcctccccaggccccgggcctcctccagttccgctccaggctgctcgatcggcgtgtgcttgggatggaggctgaaggtcgggtggagggctctgaggcggtgcgaccggcttcgatgcttctccaccgacggcgacggcgtggaggagggggagaagcgtggcgaggaggaggcctcggcgacggcggccccggccccggacccagccccagcggagacacaggtgggcgctgcggaggagctggcgtctgagcggagccgatcagggagcttttcgtcctcatcctcgtccgggaatcctggtgtatcaagcgagccaccactgttgagttttagtgttgataatatcgatacagttaaactattggaacttctaggcccggaaaaggttgacccagttgatgtcatggcaattaaggaaaaactctttggttatacgacattctggttgacaaaagaagagccttttggtgatctcggtgaaggagtccttttcattgggaatctccgtgggaagagggaggaaatctttgcaaaacttcaaaggcaactacgcgaacttgctggtgaaaaatacaatctttttatggtggaggaacccaattcagaaggggatgacccacgtgggggaccacgtgttagttttggtttgcttaggaaggaagtttctgagcctggacctactaccctatggcagtatgtcatttctctgtcacttttccttctcactatgttctcctgtgttgagctaggaattgcatcaaagattagcagtcttccaccagaaattgtttcatatttcactgatccaaattctactggaccccctcctgatatgcaacttctgctcccatttgtggaatcggctttgccagtggcttacggtgtcttggctatccaattatttcatgaaattggacactttttggcagcatttccaaaaaatgtgaaactaggcattcctttctttattccgaacttcacccttggaacttttggtgcaattactcaggcttattactctcttcaaatcctgttggggcaagtgatttagtagaagtacctagccagctgttccagggttcattattgcttggactcattagtagagcaacacttggatacagagctatgcatgctgctacagtttcgatccaccctctagtgattgcaggctggtgtggtttaactactactgcatttaatatgcttcctgttggatgtcttgatggtggaagagcattacagaaaacagggttgtactcagcttcgcatgatgacggggctaccaccttctgcttttgagactgccaggttatgatgttgctgctgaggaagaacaggacactagagggtgcttttggcaaggatgctttgtttggatttggcctcacaacatactcgttgcttggactaggagtgagaacaccggagaaaccatgcttgaacgacgtaagcgatattggaggttggaggaggacggccttgatagcttcagtgtttcttgttgttttgactctcatcccgttgtgggatgaactcgcggaggaactaggtgtagggcttgttacttcgttctgagatacggtccttaccgatagaattaggccgtgatgtagctcaattttgtattgaaatgtagcgtcccatagcgggactgctgtaaaggcatgtgcagtttcctgattaggtgagcaatgatatcacctatgcgagtgtcatgaaattgtgccaagacgctgacgattattatcaattacatacatgtacgcacattttgaccatacgagtacagatacacacaacctacccttctatgagcatcttcaaacgattgggcgtgaagccatgaagtcag

SEQ ID NO: 40172 - DNA, 2456 bp, Zea Mays
taatgtaaaatataccagaaactgcagtttagctcatttagtaaattgtatggaactggagattaccagctagcaactgagttctacatggtttagaagttatgaccaatggagccatttacatagtcaaaaggattacaactctgttcctttcaaagatgtacaagaatgtttaggctaaaaagtaactgtcgacacaccagctcccagtatctgagcttacattacaggggagcggataatatacaccgaatcggccgattgcgcctacaccacgaatgctaatttgcaacggatacaacgcccatggcagcctcctgccatctggacaaaatatagatcatgaggcgcagttgcagaacggaatctgtttgtagcttattatgttcaagggaatggctgtggctttatacctcgctgacaatcatcggtaccgactgatgctggagggcatgccttcgttgagtttgttaagcaactacaatatcctgatagctactgcctaatgttaactaacattcagtagttccaaaagattctcagcttcatgctccttgaaaacctgtatcgaagaacattgctgaggccctttagatgaagaaaatcactagtgacctgttgccaatcgacagagtcaacactcttgctgctctcattttcgcctcctacccatacatacaccattttaactgcttctcctctccagtgcatttttctgagcaaaactcactagtcagctgtttaaccccatttgtactattatctgaggcatcctcggtcctgcgaatactagatggcgcccttggtggcaatacaatagacggcacccttggtggcaatacaagatccttttggagagatggtagctttagaagtgtgaagcctcctctcctttctgctatagaagaggtcttggaaggagagtgtattgattccatgccagaaggctttgaagctccttcattagatgattgagaaaggggagacctggatgatggcaccaaagcatgtgtcagattagatgaagcaggcgagaggccaaatgatggtggagagccagttgtaggtgataaggagggtgagtctgaactatacttcgagctgacacttgaatccgatgataaggagcttggagaaaggaaaggaggtgaggttgatgcctcagcagccaggtgttgtacccgtggatcaaaatccttcattagagcagaatctgaataaacacgagctagcgacctggagataaacttgtgcctcagtaaactccagctactttctctagctggaagatgggtctcatcaccagccccagaagttgaaaatgcagggaccactcccccagtgattgctttgtagacaagctcaaaatcagcgtcataggactcatttttccggcttcctgggtcactcttggatgctgaatcgatctggtccttgctaatctttgtattactatctgaattaggtggcatacttgaaaatgcatcccagaactcctgcggctccagaccttctctcacaaccttgatgtgcccctgcaccttctcatacctcactacctgaaacgcagcagcctttgcatccttttccattaccggatcacacttcattccaacccagacatagagcgacgagagaacatgcacaatgaacgcgcctctagagtcaagggtggctggggatgggtcgttgagcattttgggcaccaaatgcagaggggcatactgggagtgaggcgccatgcggtacatcctgagcactgaatttggtgacagcggaatcgcatgcacacgcttctggcactggagaagctggcatgcaaagcccatgtttggatttgcgatcccccgggcagccttgacaaactggaaggcgtcatcgaagctctggccttccctccacatcaagtaggcgatgaccagcgacgtggagcgtgacaccccctggcagcaatgcacaagcacgcggccgccctgctccctgacgtcctcgaagtagtcaaacacgtcgtacaggatgctggtgatgtcctcggtggggctgtcctgcagccagagggtgcggtagactaggtccgacttgaagtactccgggcagacaaagcccacacagttgagcacgtgggtgatgccgttcttcctgaggatgtcgcggttcttggcgacggcgtcgccgccgaggtagacgtggtcggcgaccttggagcactccttgtcgaagaaggcgatctggtccttgcgcccctgcgaccggagcgaggagaggtcgaggcggagcccctccccgggcttggcgggggaggacccgcccccgccgccgcccgccctggaggcgcccggcgtggtggggttgggccactcgccaacgtcgtcggaccccgccttgggccactcgtccaggctgcggcgggtgatggcgagcggctgcagcggcgggaggcacgaccgcgccttgga

SEQ ID NO: 40173 - DNA, 1592 bp, Zea Mays
aaatactcattttagctctgagaggtaacgtgcgtccgtgccctcacacgtcgtctctctcgccgcgcaccttgtctctgtcctctcccatccatctccctccgcacactccgccgcctcaccttctccccctctctctccccgccgccgtggtccccgccgccacgctgtggcccttcttcgacgccgtctgctccgacaccgccgtcaccttcggctcgctcgtcgcgctccacgagtacctttgagaattcgtcggtagtaccattgtatcattgcactggattaaatcgatgctattcagtcctatatccccgaaggagacgccttgaagttgatagccggacagttcatcaggtagacaagtcaaatcagtgctgcataatatacttgcctcttctgaagtaagcaaaatattttagtataagacaggataattatcgatcataaatacatatgcatgcttataatataattttagctgatagtagcgattgtttgcaatagattttatcgaaaaacagaccattcagtagttatagattctctaatatgtcagccaaatgaactaagaattctgtccagatgaaaataaaagattaaagatgttctcaaagacaaataaaatatgttcgttgggtaattcactgaaaagttttctgctcccgaagccagctatggtgtgacaaaaaatatagcaagtaaatagactccactatgcagcgctataaaatcagaagacaagatgatacgacccaacatgtaatcttgtttgttgcaggtctttactatgactgcaactttgaagtttggtattcatataatcaataggctcaacagtatgtcccttgtaaatgttcttgtttcttacaagtggtgatggtggtagtggtctggtctctgtgtgagcattggtctagaggatcgtgaagctatgcggctcttctttcatgttcaagatgaagttcatgaagcttggatcgaatctggatacctttaatgatgatggcaatgaagtcagaggttataatcactcctgagcacaacgaagaagggatttacacgatcagattctacattcagatgcaggctatctcctgctaatgttgctgccgaagaaatgaacttcttacttttatgtagaggcaacacttactaatatgatgctcgaatttgcaatgaatgatgtgtgtgtgtgctatttttggaccactggtatttaaaactgacaaccatgaagttttggtacacatgaatcccaagcaatttgtgtaaaatatggctaaacaaaacattgatgcctgatttatgatccagctgattttgatgtcaatttattatacatgtatatatctttacaataacttcttatgtatatggttatattgcaaatactattgtctctttactgtctcccgatggggcgtccgaatggatgcctcctcttctagtaaattaaactcgcccggcctctttcgagattcccatgcatgacatgattactgactagtgcgtcgatcgcacgtccactccagaattaggcaccgtactactacgtggccgagaagcagtcaattaatttgttccttcaa

SEQ ID NO: 40174 - DNA, 2270 bp, Zea Mays
ttgcgccgcggcagcagaacaccttcctgacccgaattcaatccgtgcgcaggcaccctccgccggcgatggctcacgcatcgctcggcgcccgccccacgtccccgaggcgacgaccggcacaacgcgccctcgcggcgctacccgacacctgcgacgaaacgcgccaagttcaggagcgcgtcgacacaggggctcgggaacacggtgtcgccatcgcggaaccctagcgagatcgtcgggaaggtccgaaggtgagcacgtgtttgtgtaacctttggctccggttcgcaatggtggacggcgatggtgacagggaacaccagcaatagccggttgtggcagctgccgccgcgtcacatagcgccgagttggaggggcacatcacgtgaatagatctgcgcagtctcgcatcatggcagtgccggcggcctcccgggcatggcgactctccccagtcgaccaggcacctcttcgtcctttgggcccgtaccctccgcttcctcgggcgtgtccgccggccatttggacgccgtcaaaccggttggccgtgtccgggtcatctccgcgcccctcctccaaatggccaaaccctaccttgttgtagctagcctacccctccagacgccattatcttcttggtcagtcctgcccactactcgtctcatcaggaagcacggtgctattggcaaattcgttgaattctatggtgttggtgtgggcgagctatctttgcctgctagggccacaattgccaacatgtctccagaatatggagctaccatgggcttcttccttgtgtcgatgattgaagcatacctgcgagctaacaaaatgtttgtggacaagcatgagcctgagacggaacgagttttctcttcatatctggagctggaccttagtgaggtggagccttgcgtttcaggccccaaaaggcctcatgatcgtgtccctttgaaggaaatgaagtcagactggcatgcttgcctggacaacgaagttggtttcaagggctatgcggtgccaaaggaacagcaaggcaaagttgtgaaattcaacttccatggaaggccagctgaaatcaagcatggcagtgttgttcttgcagcaatatgcagctccacaaacacatcaaatcctagcttcatgattggtgctggccttgtggaagaaagcatgcgaattgggccttgaggtgaagccatgggtaaagacaagccttacccctggatctgtggttgctactgagtacttgaaacatagtggccttcaagattatctgaaccagcaagggttccatgtcgctgcgcatggctgcgccacttgtgtgggcaactctggtgacctggatggatctgtatccgctgctatcatagaaaatgatatcgttgctgctgcggtgctgtatcctactacctgctcaaccttggggacagcatcaccacggaccacatctcctactcggggaagatccccgagggcacacctgcggccaagtatctgctcgagtatggcgtggagcccaagaacttcagctcctatggtggccgccgcgggaacaatgaggtggtgatgaggggagcgtttgccaatatgaggatcgtgaataagcttcttaatggcgaggctggtccctggacaatccatgttcctaccggggagaagctctacgtttacgacgcggcaatgaaatggaaggagatgctgtcagttttacccaattatcgagtgaaggagtatatgaagaaactttacaagacatctgtacaaccctagatgagttgcagtagattccacccattaaggacaaatggacaataatccatcatcgaagccaaatcataagctaaaaggttgagaagatggtgcttctggcatgtggatggcgctatacgattactgtttgtgactcaagtaatctatacacttatggttggcgcaaatacgttcaactaggacatattgattttgaagatgatttagttccacataaactagaagcattgaaagatagcactatatctcaggaaaagatagaatggaactcaaattttggtggttacactggtgtggagacttgaattcatgtatacacttagttagactcaatgttagtgcaaacagttgatgaccaagttttttaattagtattttagtttggatgtatagtacacttatgtatgagttatttgacaatgcttatttatgagatattgaatgacacttgtctatgttatattaattataatgttattaaatatatgggcatc

SEQ ID NO: 40175 - DNA, 1518 bp, Zea Mays
ctcggtccctcccgtcgcgctctcgcctctgcgtctgcgcttctctccagttctccttgtcgtcgagcgggagcgccgagagagagagatgcgaccgcgatgcccccactcgtcccctcgctgctcctcccaatcccagccttgatcctacccgcgccacctcgcctctcccgccaccgctgcttcctgcccgccgtgtcctcctcctcctcctcctcgtcgtccccgcactccagggagccataccgccgccgccgacgcgacaccccgagccagacaccgacgcctgcgccgcgcccatcctcccagccgcagccgcctccgcgccgcgcaaatgccgccacgcccggcgctcggagtcaggaggagctggaggcggcgatctacgacttcatgtgccgctccgccaagccgggagccttccccacccgcgaggagctcgtcgcggccggccgctccgacctcgcggccgccgtcgcgtccagcgggggctggctctccctaggctggtcctccaccgccgcggagggccccgcgacgacggctgcaccgtgctcatcaggcgggggccaccctgactacccgcctgagacgggcgtgtattaccgtggtgatctagcgcccgtctcggtggaggactccgagtgcgaggtccggctcaacgcaggaatcgaggggatgctcaccaggctgcagaaggatagagagcgagcgcggccacctccacggactagtacccacgacacacagggccaaagtgacgatgatgcgggcaacagtggcgctcctagccatacagcggctggtggcaggcatattccaagggctcctgagaatggaagtgtccatggatctcattctcaaaatggaacaatagagggcaacagcacctttcagggttcgaacgatgatgcatggcaaacatggacccttggcaagggcgatttatctcattttgaagctgctgaggtcttacctattgaaagaagaaaagtatcccgacatgatgacattgcatccgtgcaaaatgacattcacaggtcatctaatggtgtggctgtaagcgatttttctagcgatggtgttggcactggaagagatgagatacattcacggcttcaaattctggaattggacctttctgctgctctcaagacattaagatcaagatttgacaaagttttatcagatttgtcaaatagtaatggagcaactgtgttggatgacatctctgatgattgggaatttgaggagacaaaggtaatgcaagctcaggaggagttaagatcaatccgggctaaaatagctgtgttagaagggaagatggctcttgagataattgaaaggaacaaaataattgaagataaacaaaggaggcttgataaagttgagaaggcactgagtgagctccgtactgtctgtattatgtgggccaaccctgcttcagatgttttagtggttgggtcctttgatggctggacaagtcaagatgataatttaattcaaacgtcactgcag

SEQ ID NO: 40176 - DNA, 3838 bp, Zea Mays
gcggcacctacgcggagggcggacgacgacgacgggggagacccggtttgacgcgcggcccgcgggatgcggatgcctctgctctgctctgctcggccgtgcgaatattttactgctcggcctcggccgcggcccgcgggggagccgttgccgttgccgttgccgttggatgtgatgtgcgtgggtggcagtggcagccgcagccgctgccgctgcgtgcgtgagtcaccgcggagtcatcagtgccctgcctgccgttggtgcgctgcctcgtgcctgcgcctacacgaccagttgcttcaaagttcaaatagcgcatcgccaccaccaaagtcggtagtactttcgctagctcccttccgttcccttcccacgaaaaccggagagggagtgagaagaagcaacaagaagcggagagccaacgcgcaacgcaacgccctgagatggcggcgccggcgccggcgccgaagcaggaggagctgcagccgcacgccgtcagggaccagctgccctccgtctcctactgcctgacaagcccgcccccatggccggaggccgtcctcctcggcttccagcactacctcgtcatgctcggcaccaccgtcatcatccccaccgcgctcgtgccccagatgggcggcggcaatgaggagaaggcgcgggtggtgcagacgctgctgttcgtggccgggatcaacacgctggtccagagcttcctcggcacgcgcctccccgccgtcatgggggcctcctacaccttcgtcgcgcccaccatctccatcgtcctcgccggccgctacagcggcatcgccgatccccacgagaaattcgtgcgcatcatgcgggggacgcaaggcgcgttcattgtggcctccacgctccaaatcatcatgggcttcagtggcctttggcgcattgtcgtcaggctgctcagtccgctgtctgctgctcccttggtcgctctcgtcggatttggactctatgagctagggtttccaagtgttgccaaatgtgtggagattggtcttcctcagattttactgctggtggcgctttctcagtacataccacatgcggcccccttgctgagtactgcctttgagcggtttgctgtcataatgtccattgccctcatctggctttacgccttcttcctgacggttggcggtgcctacaagaatgctgcccccaaaacccaattccactgccgtactgatcgatctgggcttgttgggggcgctccatggataagtgtaccctatccgtttcagtggggagcaccaacctttgatgccggtgaagcttttgctatgatggcagcttcttttgttgcccttgtggagtccactggtgcgtttatcgccgtctcacggtacgccagtgcaacaccatgccctccttccgtcatgagccgtggcattgggtggcagggagttggcattttgctaggtggcatatttggaacagctaatggcacctctgtgtctgtcgaaaatgctgggttgctcggtttgacacgcgttggtagtagacgtgttgtgcagatttctgccgggtttatgatattcttctccatccttgctgtgatcgtcaacatcgcccactatgcgatctagttcagcaacgaatctggatctcctcgaaggccacctagaatttggcggatggctggtcggtcggagctcccggccgtgcggcttcctcctgtgagttggttttgagcttggtgcaccctgcgccgctcctccccccccccttcttcgtcgtctacgcacccgctgtcctcgcttctctccccctcttctcgcttggtcttcttcgtgctgggggatggatttgtctcgtctggactttcgaccgggggtgctttttgaagctgatgtttggcgccggttttcctctcctgtttgccccggaagcccgcgctccccatcggcattctggcttgttgtctcgtttggaagatgcatcttcaggcttgatcctgtctcggttggtcatatccttcaagctgcttttggtggttctgccaggggattcatggtcctcccgcttgccgatcgggttttccgtttctcggtttcctccagggatgttgggttccacatctacaactccagatgcatcgctcgttctgaattcaaagctttcttcaacttgtggaactcgggtggaccaaattggaactatgagctcaaactattccttcaggaggagaatgccaactggtggtttgtctcgagcaggaaaaaaatctcattcgctgatgtggttaggcgcccgcctttgactggtgcaaatgctgtcccagttcgtcgacatcgtcgttctttctgttcagctggaaaattgattgctccgaggacttctgttttcaatagattgggtttccctttcggagctcggggtccgaggtctcctgccaactcttcgacctcgggggcctcgtcgcgtgatcttcatcgtgagactgcccctacggcgggttttcccaggcctaacgggtgcaggaatggacgcggatgtcggggctgtgatgattgctccctttcaaattcaaagtcaatttcaaattcaactgttgggcggcattggcctcgtaggttgcagtggcggcccattctgcgtaatgggcccctcaggcctgggcttgggcctagaaggatggatttgtcgggctcggcgcctgaaacgtccttggagctcgcgttgggcgtcacttcaacaaaaccccaacctgcttctccaccctttgctctccggcgatcgtctgagaatctgtcaatggcgtaccagcgcgtggacccggggccgttcctccctccagggttcagcgccgcggtggtccagcatcgtgggattatggtcaggtcagtttcgcagcgtttgccgccatttcacgaggactgggcgattataaatacccatcctttaccggagcacgaggtcttgttccctgcggttagggatgtggtcagggagtaccttgttgagcatcagagggttggtgtccgtgccattcagcgctcacatttgggacaagtgttggtgcaattccgtagtgtgctggagcgggataacttggttattcttggtccccagcagtatttggacgctactttcaccgcggccgccattgggtcgtttgggaggttgattctgtgggaggaggaccgaagtaatatctctagaaccctgctccgtgttcgggtcacttcgctagaggaggttccccaatttattgttttttcggaggccgagggttttgctggggattcctggacggtgcaatgtgaaattatccagcagcttttgcttggcggtcaggcacaggatgaggaccccatccctccgccacctgaggatggtcatcagctccccctggccttcttcgggctgggccaacctttgcccccggctgggcttgacctaaactttcctccggaacctgagggtggagtgttgccggctcagcaggatgacttggggcatggagagtgggatcagtggattgtgaatgagcagcccattcagcaagaccctcaaccccctgtagcatcccaaaaattcaaatcctgaaattttctcaaactcgctctaaattcaaaatgaatttcaaatttcatttcaaaatgtttgcttgcgagttgatatcagcaaataaaatatagttgtctatattctttccaaaatcctcctcaaaatatcctacaaatatttccccaaagatcccctctgattcttttcagaaatactacccaaatattgcaccgatatatctccaagtattttcttcctgagaaataccttcagaatcatttttcaagtccctataaat

SEQ ID NO: 40177 - DNA, 311 bp, Zea Mays
tgtccccgacacatgggtgctggccgccgtgtgccactgcgctcggcctcctgcccatctccttttcttcccatggcggttcttccctagatccgtcccttgctccttcgctcggcccactgtcctggctcgcgcccccacggagcagctcaggtctggcacggcaaacagggaagaagcagccgagttcttcctgcgcgctcctctgccggcaccctgcgtctcctatggcgtgcgcccgccgaggtccttcccatggcgctctgctccagctcccgcgctcggccttagcctggtagatctccctggtg

SEQ ID NO: 40178 - DNA, 2604 bp, Zea Mays
ctcatcaaatcacgattcacataaaaaaggtgtgggagcccgatccgatcgccagatccgccggcctgtgcgccgactcgggcgtccttccacagatcctcttccttctatcgtaggctcgccctcgccgctcgctggagcggaggtctctccctgcagcccatactccttgattcattctattgcctcgccgccggtaagggattttgatctgcacactctgctgctatgaattgatcggagagccgtcaaattcaaattattattatcccgacccgaccggtttgtcgccgattcgattccattgcccttgcccccgtcccccgtgcgtgtcaattatgcgatccgagatgtattgagcttagaaccagggggtctcaaattgagttgatcaggcttcttgctccgcatggtggacgctgctgtttctggcagcgaagatctggcggaatcgcccgagcttcagcttaacgcattgcgagtccttctcggctctatggataagcaggagccagtagccaatggtgaacaaacgataggtcttgctgagaagccgaaggagctgcctgttgccagtaaggatgagaaagcaactgtgcccccgattttagttgattcaaatgctttcaatctaccaagtgaaggccaaacccaagctggcacatctaacatggatgggggccataatggtgcacacaacttttatgcttctcaggcacaaccattctattaccaaggctccggttctgaaaaccctacacaagcatgggatacatatcctccctacatgagtgttgaaggattggaagtgggtccaccagttgtatacaatgaggacccctcattgatgttccatggtggctatggttacgacccatattattctcctattgcaacacctgtaccaaatgctgttagtggagggtgatacaataatgccgattgacccaacacaaggagcttttatcgctgataccctgagtccaaacagcttcctgtttggcccaagacctgaatggttcagatcttcagaaggaactgggtcatttccatcacctgcagcttcacctcaaccttctaggggtgttccagggtcctatgaccaaaacaactttccaatggcttcaagaatggccagtaattatgggggatccgtcaccagctttggccttaatggtagaagtttgatctcaaccgagaaagggcgcaggaggggaaggggcaatgcacttatttgcagctgcaatggtcctcttgactttcttaatgagcaaagtcggggtccacgtgcaactaagcctaagaagcaaccagaggttgacagtaaggatgaggtgcctactacaggagttggtcgtgagttatacaacaagcctgactttgttatggagtacacgaatgcgaggtttttcatcataaaatcgtacagcgaagataatgtgcacaagagtgtcaaatatggtgtttgggctagcaccacaaatggaaacaagaaactggactcagcctatcgcgaagctaaggagaaaggagagcactgtcccattttcctgttattttcggtgaatgccagtgcacaattctgtggtgttgctgagatgattggaccagtggactttgagaaaagtgtggattactggcagcaagataagtggactggtcaattccctgtgaagtggcacatagtgaaggatgttcccaataatcttttccgacatataattcttgaaaacaacgacaataaacctgtaacaaacagcagagatacacaggaggtgaaactagagcaaggaatggagatgctgaagatctttaagaaccatgatgatgatgcatcaatccttgacgactttgagttttacgaggagcgtgagaaagcgctgcaggaaaataaggcacgcctgcatcagcaacatctacccagttctattgttattgagcccaagaaacccttgactgcacccagtgacctcgtgggccatatcaccaagagttttgctgaggctgtgcggcttggtgaggccaagactgtaagccatttgactgagaaggtttctgggggtgatccgtctattcctgtgaagcatgttgaagttaagcagagtggtttatcttaggaactcttgatcgatgtgaatgaactgtaccaaaaattcacccatacgcttcctgatcaaaatgtcgggaatgcatatgcagatggatgatgatgaaacccaagacatcggcaaaagcatgcatgcacactagggtaggtctttgccaaccttggaagcatagtttcttgaatagtttctctctttttttcttctttcttcctagtattttctccccttctcttcgcatcatatgatgattccttagtgtctagcctcaaggagagttgctgtttttgtgtaagcctctgtaagtttcctgttccatcacatatgagtaaggcctttttgtttctttttatttaagtaaaagatccatcttttatgtactgtcgtggcagttttattatactatgtctgaacaaggcctattcactatgtaagcaaaacataaacgctatccaggtgacctggttgtgatgactacagtaataagtaactgaataat

SEQ ID NO: 40179 - DNA, 1201 bp, Zea Mays
gacgtcgcatctaagaaggttcaattcggttgactaagccttgataataaatataccacccaaagagctttctcgtcactgctctcccggccctctctagtctcaacgtttcattccttgagctttgcgatgacatgggagcagcgttagggcgcaggacgtagacgacgacgtacggtcaccggccggcatccatggacgattcaagctcacagccagccacaattgatgcatgcagagtgagcggaggagaagagagaaaccaaaggagggaggaggacgacgacgaggagacggcggcggcggaggcagaggccggcaacggcagccagctgatggtggtgcccgaggacgggtacgagtggaagaagtacggccagaagttcatcaagaacatccagaaaatcaggagctacttccggtgccggcacaggctgtgcggcgccaagaagaaggtggagtggcacccgcgcgaccccagcgcggccctccgcgtcgtctacgatggcgcgcaccagcacggcgccgcgccgccggcggctccggagcagggcggcggcggcggcgcctccaacagatacgagctgggcgcgcagtacttcggcgccgggccggccgggtcagggtgacacctgacaacgcgaggaggaaggccggccggcgtcgcgccacgcatgcatcagttctggctgccgctgcttccaggttccatctctttcgctgcgcaacggacgacggcggcggcaggtggctggtgctgccggtgccggttgacgccttgcgccggcgcaacgtgatgttgagtgcggattggctgttgctgcacgctccgatcaactctgttattgtcctagtaattaggacgatggcgcatatggtttttttatgcatcaaaaataaaatactctctctatcccaaatcaaaattcttttttagataattaataaatccatacagtaattgttttatatatgtgtctagattcatcttcttatatttttggactgaggtttggaagtgggaactagcacagccgctattatgttttgtttttgcaatcctaatctgaaaagtgaacatcaacctcaaggatagggatggcaacgggtttaaaacccgtaggtatagagattacaaacccgtatctacaagattaatgttaaacccgtacccgcacctgttacccgcaacgggtagcgt

SEQ ID NO: 40180 - DNA, 366 bp, Zea Mays
ggcgagagtaacgtgtaccaaccaggccaatggctggacggtggagtgctgtgctcttgggtcgcgtgaacccgttctggtcttgagaaacctgtgggcgagttgacatatgcaagggttaagtgctacatatgtcgtgtggttggagatcctcagctgagtattaatcgattcggatcgccgaacttctcggatatgaagactggatcactgccctgcatcgtagataacaagtgaaactaaagatgctaaaataaagttagtgtaggacaagtgaatgctctagattaggaaaatctagattcaggtaaagtacttaacctgtgaagtaaaattttagcataaggatccactactagtaagctc

SEQ ID NO: 40181 - DNA, 5162 bp, Zea Mays
ccgaaaccccatctcgaccccgttctgccgtatctccgatccgcctccgccgccgtctcccctgcccaggcgccggaagtccacctcgggctccagcatatccgcgatgcatctggacggcgtcgacgacgagctcggaggcggcagctgcgccccctcccccgcgcgctttgagctccaagaggatccttccttctggaaggacaacaatgtgcaggttgcgatccgtatccggccgctgagcggcagtgaggtgtcgatgcaggggcagaagcggtgcgtcaggcaggatagtagccagagccttacctggattggacaccccgagtccaggttcactttcgatcttgtcgctgacgaacatgtcacgcaggagggcatgttcaatgttgccggggtgcccatggtggagaactgcatagctggctataacagctgcatgtttgcttacgggcaggaaaaagaattaaggagagatgaaaagctcatgtttacttgtaaatgctcatttttggagatttataatgagcagattctggatctgctcaacccaaattctgtaaacttgcagataagggaggatgccagaaagggtatacatgttgagaatttgacggaacatgaaatctccaatgctcgagaagcgctgcaacaacttattgagggagcagcaaacagaaaggtagcagccaccaatatgaaccgagcaagtagccgctctcatagtgttttcacctgccttatagaaagtaagtgggagtcacaaggtatcaagcaccaccgcttttctcgactcaaccttgttgaccttgcgggctcagagaggcaaaagagctcaggtgctgaaggggagcgattgaaggaagctaccaacatcaacaaatcactatcaactttgggacttgtcattacgaacctaattgctgtgtcaaacaaaaagtcacagcatgttccatacagagattcaaaattaacattcctcctccagcttccattccattttgaaagttacacatttgatatttctcgctttctatccagttgtgctgctgagacattaagcacattgaaattcgcgcaacgagctaaatatataaggaataatgctataattaatgaggatgcttctggtgatgttcttagcatgcgtttacagatccagaaccttaagaaagtaatcagccgtttgcaaggacaattgggttctgataaaacagaaagcattgcctctcatgggtttgtctgcgagtcccctagcacattcaaatgggatcagggtcatggcatgttcactccacttacttttgataaaagggctacacagaggaacgattgtgatgctgcccttgtcgctgcttttaggagggaacaagagaaggaagcacaattgaaggcagtaatagatgcaaagcagactgctgaacagctggtagctcaaaagacagaagaggtaagaagtttcaagatgaggcttaagtttcgtgaagaacggatcaaaagattggagcaggttgcttcagggaagttatctgctgaagcacatcttttgcaagagaaggaaaaccttgtaaaggaattagaggtcctgcggggtcaattagatcgtaatccagaaattacaaaatttgcaatggagaatctacaattaaaggaagagctacgaaggttgcagtcatttgttgatgaaggtgaacgagaaatgatgcatgagcaaatcattgttttacaagataagctgcttgaggcacttgactggaagcttatgaatgagaaggaacctattaacaagggtctctcattatttggggagtcagctggcgatgaggaaaatgagtttcttcgtttgcaggctattcaaaatgagagagaaattgagtcgttgcgtaaaaaaatgacattctgccttgaagcaaaagataatcttgaaaggcatgtcaatgagttgaccacagagttggagcttacaaagaaacacaacaacacatataaagagttcaaggctgcccagctccaggagcaaggagaagcagatttacataacttgtctgacgctcagatggaacttaagactttggttgatgcaatagcttctgcgagtcaacgggaggcagaagctcatgaaactgctatcggtttggccaaagagaatgaagaattgaggctgcagcttaaggttttgattgaggataacaagagattggttgagctctatgaacacactgttgtcaatgttgaggcaaatcaagatggaaaccctgtagatgatctgttgaatgcccaaccagcagccacatcagatttccatgcacataactcatctagtgtggcacaggagtctaagatagtagacgaaaaatgcaccaatgaggacaatttctcaagagttacatctgttgaattgcgtcttcagctggaggagatgcatgaggaaaatgatagacttatggggttgtatgagaaagctatgcaggaaagagatgaattcaaacggaaaattttagagcaaagcgactctgaagctgtaaaacatattcagttggacgagaaagatgtcgaaatgagtgaagcagctgagaatcctgaagtgaaacatattcatgactccacaattgcagctttgaaagaagtgctgcagattgttcggagtaagttggagcttgtccaagataaggttgtgtctgctcaggatgcagtaaaatattttaaggcactcgaaatagctagtggtaaggccgaagaactttctgcaagaattgagcttcagcgtctaggtgcgcagcgtggtcaggaagaaatcactttcctgaagtctgtgctatcagaatcacagaagaagaaaaatgcttttgaaggcaagtatttcttgcctgcagcatcatgttggaacttggttttgaagaccaaaagtcttgcggagtccaagtttgatgccagctttggatcaatgaatcagaagaaagaacagttgaatcatctccaaactcgcaaaattgaactatctgctgcaagaacgagagcacgtgaatctgaaactgagttgaaaagcaaaattgatggccttaaagcgaaacttcgcgctcatgaagctcaaagaaaggaggaagaaaaggtcctgtttgctattgataacctggatacttccactacactaatgcataaacccaagaactatggcaaggcaaccgacctgctgaaatctgaggaggatcggatgaagcttctgtgtgaactacagaaggcccgcgaacagcgctccatggtacataaggaaataagaagcatgaatgagtgtgattatattgatcgtgagattggagtccttgaagcagaaatagaggattcctgcatctccatactggaaactgacattgagaagtttgtccgtgacaacactttagcagagatttgggagggtagcgcaaaggatctggaggcattgctggtcgattaccaagactgtgttttccaagtcaacttgaaggaggaagagatcaaggtgtgcagtgagtccttgcagtatcaagccagggacatggataaacttcagtcgaagctgaaccaagcgatccgggagctgggtgagcttctgcaagatagaagaagcctaaccgcttgcagtctggatgaacccacgctgcccgttggtgaaaaggtggcagcagaccttgaggccgtccggattcatgtcgatgaagctaagcagcttttgattctcgacaaccaagctaattcatgaacctgcgcagctagtttcaggtcccttataaagatgcgacgagtgacaggctagtctgtcttggcttctgctgttcagatccttagtacgtagtagcaagacatcagagatgggaagctgcggaatttgcttcattagttggaagctatctgaagccgaatctgctgattcttttttccgtggatcagctaccttcttctggtggtcttgcttcgagtcaaaacaacaggtcctgcaagccactgttccggatccgatttctcctctggtgtacacttcaagatggagcggagaaactgatccgacttaggcttgaccttttgcttctgtaactctccagagactggtagcaactagcaaccagtgggtggacttgtatcacaacttaatctgagccaggtgtcttattttatttatgctataagtgcacaaatgctgcactccagtttcttgtagaaattttcgggctgatcttgaattttacctgctgaagagtttccgtgttctgctgctgtactgtaaacaggtgtgccagccggcggcaacctgtgcggggagcgccaagggctccaggaaagaatcggcggcgggctcgcgatcgggaaggggagcggggcgcatgcgcgagcactggcacggcgacggcgacggcgacggcgaggacgagcatgagccccagccggggtgcggggagggcgcggggcaggcggcggcgaactgcgcggcggtgtgctgctgctgcccgctggcgctgctcgacgtgctgctgctcgtcaccgtccggctccccgcgggcgtcatgcggcgggtgaggaggaggcgccggcgccgccgcggccacggaggtgccggagccaaccggaagaggccggcgcccgcgtcgccttcgggaagcagcggcaaggcgatgatcggagcggcgacgctagacatcgacgaggaggcgcgcggcgaggtggagtcggcggcggcggcggagctggagcgcgagatcatgagctcgcacttctacggcgccggcttctggcgcagcgtctcctccaactccagctcctcgtccaggcgctaccaatagatgcgcgttctggcgtaaatagagcagcagccttcggcatcgtgcaagtgcacttattctgaatggacacgtgcgaaactggcacgtgcgggttgcatcattgtactgctacgccattgtctcgagcatggaccacgccagcagctgcagcttgggatggagaagcgaaaggggtcagtgattgtgcttaggtttttcatctctctcctaatcttttttgtgtaactggagcaggaaatgctgaaacctcaagcttctgtccaaacgatgtactcctatttagtattattgattgattgagaggccgatcgataacaaatgaacaaatagaacactgttcatgacgcagtg

SEQ ID NO: 40182 - DNA, 2396 bp, Zea Mays
tataaaaacagacggccagggtcggctccttcggtgggaagggcagacgaagccattcaatccgggaccggggagcgtcgcgctcgcacaccagtgaccagtgacagagggtcggttttctggaggcacttgctggtcccggcgatcgacgacggagcagaattcttctccgatcggctgcccgggcgggagggtccctctgttcggcgatctgcggttctaccaccatcgatttatactgtggctatgtggaggtgtcatcctacacggtgataggttttcttagtacatagcagcttgaggaaaatgtccgatttcgatgaacaggatgacatattcttggagacatctgatgatacaagaagttcggcatatttttcagctaggtgcagcacaagtgaacaattatcagcatcatggggacctgaggatgagctctggacaagtgaattgctgagtgtcaatgaaaggcggcatagattcctggttcggatgggctttgctaaacctattcctactggaatcaccttttcacagtggcagggagaaattttggctgatcgtgcatttcgcgacctggaggacagaattaacagcatctgttcttcatatcggccgtctttttctcatggcgcatctgcaccagatagtactaggaacagcgtcgtgcttgagcttgatgaaatcgagcaccatgaactgaccggaatacttgatgaggttggaacagacagaaccatgaatacaaaccagtcagatggttttcctagtttccctcaacttgttcatttgtttttgcagaagggcagtggtcgtagtccggcaaggggaatggaaatagaattcagtgagaagcaaaatgatcccaagagcttttgtggaaggttcaaaagaaaggaggaggaagatataatctgtatgcacgacacacgtatgaaaagcctgaagagtggaacattgtttgcaacaaaagttgatcagcaaaacaagaagtggatggacttctctgctctgtacatgtgccaagaaatccatgcccacggcggttcaatcagcgtcatgaagttcagtacatctgggaggtatttagcgagtgtgggcgaagactgcgttgtgcgcatctggaggatacacgaagttgaatcctctcctgatctgtacatcagagagacgcctgtcaaatccatggacagaaatatgggcctgaaaatgaaggtgggaaaaggccggggacgtgccctagccataatacccaggaaagttttcaacatcgctgagacaccactgcatgagtttcatggccacacaagtgatatcttggatatgacatggtcaaaatcaaattttctcttgacttcatctaaagacaagactgtacgcatgtggaaagttggctgtgatgactgtctagcagtattcaagcacagagattatgtaacatgcattcagttcaatcctgttgacgaaggatactttgttagcggctcaatagacggtaaagtccgtgtctgggatgtttcagagaggcgagtagttgactgggccgatgcaaaggatatcataactgccgtgggttaccagccagatggacagggtcttatcgttggcatcgctgcagggaggtgccggttctataaccatgcaggtgaaaacgtggaactggagaaagtactgaaggtaacgaagaagaaatctgctggtagacagatcaccagcctgcagttttcgtgcggcgatcctgctcggatcctgatcgcatcagcaggttctaagatacgagtatctgatggaggagctaagatcaaccgaaagtttgaaggtgccgactccaacgtctacatctgggacttggacagaccagcaaggggcaaaagccgcaccagaggaccaagaagggtgcgttcctgcgagcacttcttctcggagggcgtcacgtccgtggcgacatggccgggtctggcgcaccaacaagaagacctccagtcgccggagaagggggccgcccccacgctctgccgcgaccgcgagctctgctcgttcgggacgtggttctcggcagacggcgcgaggggcgccgcgacgtggcccgaggaaaagctgctgccgtccctcaggtacgtcaactgcgccgggatggacgactgccgcgccaaggtgtcggccgcctggaacaaggtcgtcgtcaccggcggcagcgacggggtcatccggtgcttccacaactatggactgccagtgaagctataggcttgcgagatcagagctgtattactgttccttactttcttgtactgtacagttcatgaaagttctaggacgaggaggggtgtacattggtttgcttgctgacttgctgtgaacgagccgttaattaacagggatcttggtacattgag

SEQ ID NO: 40183 - DNA, 1244 bp, Zea Mays
cgcgttgctaccaccgcggcttccttctctacccttccctcgcgtcgccatcgcaagagtatctcaactccgcctcgagacctcccccctcgctggtctcagccatggtgaaatattcgacggagccgaccaaccccaccaagtaacacacgtgagacagcttttgcccttaggaagttgtcactcaccaaggccaaaagttaccttgaggatgtgatcgcccacaagcaggccatccctttccgtaggtattgtggtggtgttgggcgtactgctcaggctaagtctcgccactcaaatggtcagggacgctggcctgtcaagtctgctagattcattctagaccttctcaagaatgcagagagcaatgctgaggtgaaaggacttgatgtggataccatctatgtgtctcacattcaagttaatcaggcttagaagcagcgacgcaggacataccatgctcatggacgcatcaaccataagtctatctaactaaagttgaagttttgctatgcgatgaactgttcttcatttggagcttaacattctgtttgcctacctggtccagcttacatgtcctccccatgccacatcgagctcatcttgtcggagaaggaagagccagtgaagaaagaggctgagtctcagattgcaaccaggaaggcttagagaaggggctctatcttctgtgattggcttagtgagctgaagtcaactaaggtgtatgagaaatgggctaaaaagatctcagggatggagccaccaacaaatccgctagagaggagagcgaacgcagggttgagcggaaaaaacagttcaactccatcctctcgaacatcatgtccaagtgtgactccaaggcgagcagctcagagcccacgaaagaagagtttgagcaagcgcaacagaggctggagagcagaagggccaagaggcgcaagtgatgctgctgccagccttcttgccctatgctgaacattgtctgaaccttttggtgtgacctgaatttaccagcatgcaagtgatggttctaagacccagttttagcgtgtcagagtgtgtgtcatatctcttgtcctctcacggtacactatgttgtatggttatcggttatcaccttgccgagagggaagctctatttgatttgaaagtatcatgacatattttaccgcgacaattatcattacacatttcttcaagttatgttgcaagaataaaaattggcttcagtttcaaaattacta

SEQ ID NO: 40184 - DNA, 258 bp, Zea Mays
aaatgcggcttgcccccaagccacagctgcagttggctcgcttgctgtagtatttgttgcatactgggaggcagctacaagactttgttgtttggcccaacatgaattgtataagtcatgtgttaattggtataagaactgctctccatcttcatcttgatagcagctcaaactaaaagagggccaaggtgttggtcgcagcttatttccatgacccataacctccaattggcacgcacatgcaaacatccctgtgag

SEQ ID NO: 40185 - DNA, 588 bp, Zea Mays
cgatatttgaattcgtcggtaatgtttacgcgactacacgagtcaccttgtacgaatacgactagtgcgctattgtgcggtcagagaacatgttgacgacttgtcatgcaccacgagctgtactacagtccatgaggcgcggaaacaccaacccatgaccggcggacgaggcgcgctcgagcagcgggaggggggagttgcactgcagagccgcagcaacgcgagtatgtacgcgacacgcggtcggcgacggcgagggccgaggagagagcgcgcgcgcgcgtctcaggtgctgacttgaatgcagggagcctgtcgccgcggtccgccatgggatgggagaggtgtcggcgctccccaccagcgcgcgccatgggagccgtgggcgtaaatagttcgtggcgtggttgtgcacttgtgccccgccgacctgccgcgcacgccgcatgcgcgccattcaatgaggccgtggtcgttgccctcgcgcatccccgcggctggctggctggttcccaagtcccacccgccgtccgccgatcggctccagcagaaggaaatttaaggaacacgtcataaatggcatgatcc

SEQ ID NO: 40186 - DNA, 3124 bp, Zea Mays
cggacgcaccatagggaaataaaatccggtggaagggaaagagttctatgggagacacgacggcgcgcacgcgcgtggcgagccagagctcgagcgcaagttccatatcgcgctggagtgcaaagtgcgtcattgggaataactagtatatagcccgtgctaacagaagtctcgtcgtcgtcggcggcggagatgggcaaggcgaaggggaagcagcgtcaggacaagttctaccacctcgccaaggagcaagggtaccggagtcgcgcggcgttcaagctgctccagctcgacgcgcggttccacttcctcccgacggcgcgctcggtgcttgacctctgcgccgcgccgggagggtgggtccaggtggccgtcaaccatgctcccgtgggtgccttcgttgtcggcgtcgacctcgttcctatacgccccatccgcggggcccactcgctcaccgaggacatcaccgccaccaagtgccgcgccgcggtgcggaggctcatggactccaacggcgtctccgcttttgacgtcgtgctccacgacgggtcgcccaacgtcggtggtgcctgggcgcaggaggctacgtcgcaatcggcgctcgtcatagacgcactgcgcctcgctaccatgttcctcgctcccaagggcgccttcatcacgaaggtttttaggtctcaagattacaacgctattatgtactgtcttaaacagttgtttgagaaggtcgaggcgactaaacctacggcaagtcggtctacatctgctgaaatttatatcatttgcctgaaatacaaggctcctgcaaagattcaaccagaacttctcgatataaagcacttattcagtgtggttccagaacagaccaaatctagggatgttttggatggtaggaaaaaaagacaccgtgatgggtatgaagaagggaatacaacattacggaaagttggtttggcatcagactttatatggtctgacacccaggcgccactagagtttttgggctcttacaatgcaatttcattcgataatccagaatccctgcccataaagaatcatgagcttacaacagatgatataaaaaatttctgtgaggacttgcttctgttggataaacatagtttcaagcatattttaaaatggcgaattcgtttacgaaaatcactgtcagcatcatcacaagtcaccccaaaggtcaatgatgctgtggagagcacaaaggtcatggatgatgatgtacttctacaggaaatggaagaattgactagtgtcattgatagaaagaaaaaaagagaaaaaaagcgactatcaaagcgtcgagcaaaggataaagcacgcaaagccacaggaatgcaggttgatgctacaggagatgattatggcgatcctgacctgttttctattagtgttattaagggtggaaaagaacttgaagctgttgaatcagcagagattgatgtggaagatgaaattggagacggtgataatgaggatactcaagctcttgaagactctgatgaggaaatggattctgatgacgaacagcagaggtatgatgcccagcttgaagagatgcttgatgaagcttatgagcgctttgtaactaaaaagggtggtgaaataaagcaagaacgcaagcgtgcaaaacgaataaatcctgatgctgatgcagaactgttagagggaggtgaagatgatggtgatgttgaaatggatcaagattttgatgaagatcaagatcaagaggccaacccccttctgtttgctctagatgagcagaagccaactaaagagcagattgtaaagcaatggtatagtcaggatgtgttcacggaagcagcgaccggtgttactgagcggagcgacactgaagatgaaagggagattttgcagaggaataagaagatggatactggcaaaagggaaaaggtggctaaagcacaggatttgcaacatgatggttttgagattgtaccagcagaacctgtccaaaacgaagaggattcatcttcatcttctgatgaatcagaggatgatatcgatgattacagaaaggctgaagtactagcctatgctaagaagatgctgaggaagaaacagagagagcagatacttgatgatgcttacaacaagcatatgtttgatgacgaagggttacccaactggtttgttgaggatgaaaagaggcataggcagcccatgaagcctgtttcacgtgaggaagtagctgcaatgagggctcagtttaaggagattgatgcccgcccatccaagaaggtcgcagaggccaaggctcggaagaagcgtgtcgccatgaagaaacttgacaaggcacgccaaaaggcagatgctatagcggaccagaatgacataaacgagctatcaaagaggaagatgattgaccggatttacaggaaggcgatgccgaagaagcctcagaaggagtatgttgttgcaaagaagggtgttcaggtgagggctggcaaagggaaggtgttggtggatccacggatgaagaaggacaagcgggccagtgggactgggaagaagggtggcaaaggcgcaaaggggaagggtggccagaaaggcatgagagggaaagctgggaagaaggcagggaaagccccacggtgacagtggctttggttgctttggaccaaattggcgactttggctctggaatcggcttgcatttccttatcagatgaaaagaatgcagcactttgaatctcaagcaatgagatgcagagaccgcctggatgcgcaccgctcaacttgttgatcagagtagaatctgatccaagctcttttgcgttcaagatttggaatcaggctgatgcataggcggccactgactccgagctacttggtgatagcatcaagcagctggccagataccaacttgatgatggctcagctctaagagaatataataagcagtgaggcgatggctcacagtcactgcaaaagccgttactgttgtagtgcttaaacaattgtttcaagtggcttgaagaacgtcagtagaatcgcaggaaccaatcgagacatctctgtacacggaaaggtacagaataatatattcttttaaaacccaccaagggaatagtctactaatttcaac

SEQ ID NO: 40187 - DNA, 316 bp, Zea Mays
ccgaaaccaaatcgccaccgctagcgccatgtccagggcggtgaaagcacgccaccatcgaccgcgtgctacgctgtagccgtgacctggagataccgcccaaaaggttcgccttgttgtgccgcgcgtgcgcgaccacctcgggagggcggaaaccagccgttcgttcctcaattgctcgccgacgtcgaggaaccctgggctttccgccgtgtgccgtggtcgggtcgtctgagtgcataatccgtggtatggccacgaccttgttacccaccactttcccctctccgttttgcgcataatcgcgtagggttta

SEQ ID NO: 40188 - DNA, 1326 bp, Zea Mays
ttaaaaaaatatctctaatatagatatttgcttatagaggacatgatttataggacgttgttggagaaaaaggagatatagaggatagaatattttagaaaagactatagatgacagatatagaaacggatatagagtacattgctggtctaacgatgtggctaggccgataacagaaaacctgacctgaacggctgtaggcaaaccagttgggtgacactgacagcaggggcgggcggggccgatggattttttgaatcggattaggcagccacccatttcaagccgaagagaggaggagagccaagcggcgactggacctggagagccggcatggcacgcctgctcctctccgtctcagtccccatgtccgctagcagcagccgccgcattgtggttcctggtaccgcgcggcaccgaggccgcagcggcgtctgtgtcgctgtgcccgccacctccaccgccaccgccacccaacaagaatttgaccccgcggcggcgccaccgttcgggctgggcgacatccgcgccgccatccccaagcactgctgggtgaaggacccctggcgctccatgggctacgtggtgcgcgacgtggtcctggtgctgggtctcgccgccgccgcggcgcgcctcgacagctggctcgtctggccgctctactgggcggcacagggcaccatgttctgggcgctcttcgtgctgggacacgactgcggccacggcagcttctccaacaaccccagactcaacagcgtggtcggtcacattctgcactcctccatcctggtgccatacaacggctggcggattagccacaggacgcaccaccagaaccacggccacgtggacaaggacgagtcatggcatcccctccccgagcgtctgttcaagagcctggacagcgtcgtcctgatgctgcgcttcaggctgcccttccctatgctcgtctacccattctacctggccaacaggagccccggcaagtccggctcccatttccacccggccagcgacctcttccagcccagcgagagcaaacaagtgctcacctccacggcgtgctggctcgccatggtcgcactcctagctggcctcgccttcctcatgggccctctgcagatgctcaagctctacctggtcccctactgggtttttgtcatgtggctcgacttcgtcacctacctgcgccttagatctctctgcaaaagttggagacatggggcttttcctgacaaatcatgtattgctgcttgatgacaaaatgagaatattctgacaaaataaataatgcatggaaatagaaaacgaggtaccaagtcttct

SEQ ID NO: 40189 - DNA, 882 bp, Zea Mays
ttggagcctactaatgtctgttgccgagacaatcttcttgtgtcctggcgcccgagatctgcgtatccttggcgtgcaggggaagcttcttgtagaagggatgatgagtacaacgtgctgcttggcatggtcgtactgtttgccagcagacccagcaggcacgccgcctgctgggtgaccttgacaccgcctgccagcggatgggacgagacgcattaaatgctgagagggcacgttgcccatcagcacagtgacaggcggcgcgtcttctcctcaataaatgcaggggctgcacaacttcacgtcaggttcgacccagtagcttatgtcatgggccacaagcagcgggtctccgcctgagcgggtagtggagggcaaggcccggacacgtgtcagcgccggacccctgctcataccagggtcctcctcgttctgggaccctgctgaggtttggacctacccgggggctccagacttatatggtccggtgtctttcttgtgggggtccggacttactgggatgtgttgtcttcccttgccacatgacgccctttggcctccccatgtggtggggttaggcgccgtcctccgcgtggcctggagatgtcgcatgggtgcggtgtcttcatgctgtagaagagggtaccccctgatttagggtaccaacagtggctcccaggcccgcctcaggggaggatgcgagcctgcaggtgggaccagagtctgattaacagttggaccactgctcccgcgcgcatgttgctgcaattactgccggcccgcctatggtcttgccaactgctgtgcctattcccacggctgactggcccgtgaccgtcgtacttaatggtactgttgggccatgcatggggctgcctcgag

SEQ ID NO: 40190 - DNA, 4188 bp, Zea Mays
cgcatagggaggggaggaacattagcctggaccctggaaagagcaagcaagtcggcgacgggcaacccgtttcggcggcggcgctagggcgcggacccccagcaagtagccaccgcaggcaagctcctcctcccgcccgcccattggaatgcggagagatccacccgggagtgggtggattggtttcttcctctgttggtaagtgattcctggccgggctttgcttggacggattccgtcctaggagcttttgtttctttgtcgccaggcgaactgaatcttgcttcttccccacacgttgtgctgtggataagcctgctgcttggtgtctatccgttcaggacctgatacttcaaatggactattatggactcagcttggtatctgaaaaagaaccagcatagctacactccctttgcaagactaatagactctaaagatgcctccctcaccatcacctaggagatctctgaaagaagtttgccacgcaagggggcatagttttgtcagtattctgcctgctaaatcgaaggatgatgaactcacgttgttcaaggatatgcagaaatatgagagggataacttcttactggaagcaacagaggattttgatgaatccatctcaaagttgagatattttcgagattcaaagattggtgtcaacattgctgcacgcggagaaaatcgtgatttacttaatactgatggtgaaagaaatgactatgattggctgttgactccaccagagaccccactttttcgttcattggatgatgaagatcaacacattggtatggctcataggggcagggcgcaggttaagccaatatcaatttcgaggtcttccacaatggaaaatactcaaagttttaacagaagaagtgcaagcccaagtaggcttagcccagcaccacgctcatgtagcagcactatgttgacaaggataagatcatcaaattcttcttcacgatgcagccctgcacttcatttgcaaccagcggcaccatcacgaaggtcttcgactcctccagcttctaggacatcaacacctccacaaaggtcaccaagtcctgcttcaaggaggttgagtactggctcaagtgacccaattttaaacagaaaaggaggaacttcgcctgttaaaaccagtaacaggccatcgtcaccaaaacttcaaggttggcaatcaagtgaccctggtttctcttttgacgcacctccgaatctacgcacatctctgtcagatcgtctagtatcccattcaaggggtggatctccttcatctttcagtggattggacatgaattggagaggtagaaggcaatctgtgtctcccactccatcaagaagagccagttcatcgcatagcaatgatcgattcagctcatacagcaaagcatctgcaacatcttctgctgaagacgacctagagtctatgcagtctgtgctgattagttactccagtagcccagctctaagaaagaacatgccagtaataaaatccagaactattgcatcacctaagaagccgtccaagagtttctcccctagttctggtccaaagaggtcctttgattctgcagtttggttaatggatcgtcgcaaagctcctcaagataagttcaggccacttctatcaagtgttccttgcaccacatttggtgttggcaaaggggataatgtacactcatctatgttgtctcataattcctcactcacaacaagcagtaatttaagctctgaccatggtgtcacttttagcccttgtatgggtaatgaacaaggaccaagtgatatagccggtgactgtgaagcaacacctacttacagtttgtctgctactcaaagtagcccaaaatctccaagcacagaaaaaaatgcggaaagtaacatggaagacctcaatatggaaagaagtagaatagtcgagacttcaggtaatgttgcaagtggttccaaggctgggctaactaaaatggcaacatgcactaggtgtgaaaagttatttaatgcgataaaagatgatggagaaattgatttgtgtgaagaatgtggtttagtagatgaggttctttttgtgaaccccaagatagagactttggaagaacatcaaaaagaccacaaaactagaatttctaaaccttgtgttgccttggaagctcctcacattactcccgatcatggtgaagataccaagaagtcatttcttgatagtcagctgttgaatgatgaacctccagctgattgtctgcaaaagtgtcctcagtctcagtcaacaatatatacaaccgacagaatgcttttaatgctgcatggagagaatgttaatgaaaatttaaggccagatgatgttggcaactcttcccaaggaagtagcctcgatatttcatcccatcaatgtaacataaataattatcaacaatcggaactagcatctgtagttgagtgtgataatttaagagatcaaactgccaaccaccagaatgaggtgttccaacgcctgccagggtcagtgtatcaaagcattgaatttgcctctaatacacttacctatgacagttgttgtaaacagggatcggctgggcattcaaatctaaaggttgaaaatacggagggtgctgggatttcagtactgctgcagaagtcaagcagtaacaaatggcctgttatagaagggcgacccttagctggtacaaatattatctgttcagaaccctactatacaagagatggtgttactatgctaaagcgtaccattggatgggatagttcatcagcgtcttccattgatcaagggtctacaaggcaatctggacatttggaacaccttaaaagtagtaatcgtcatgactttgagaagtctcaaataagtagtaccatgagttgtaaaagcattgcatccatgtcagacatgtcaagtagcaattgttcagtttcagtttgtcctcgggatgatgcaattgcagatactggcttcctaaccgacaattcagaaagcagtgctcctcgatccataatttgtactgaagaacttaatgagtcgtgtaagtacacactctcaagtgctatagagtgctggtctgctgcacaggctattgttaatgttggcattggttcaactgaagatgtagtgattcagaaactatgtacaggtaggatggttcacaaagattacacaagtgataactcatgttcatcagatactgaaacatgtagcaatatctcactctctctggctcctgaggaacgatgcatacagaaaattgaagaaggtacctcagttggcactccagaacacccagatggtgattgtggcatcagtaattatcaaatgcagcatgaaacaattcctgaggcagataggttggatgatggttgtgcgtctgttatctctgaggaggccaacataatggggcttcctggtaatgaatcactggctacagttgagggaccaagagaacaaactcaaagatgcttcaccttagaagaggctacggatacaattctcttctgcagctccattgcccatgacattgcatacagggctgcaacaattggactggagcatgaacagcattcagaacttgcttctgctcgtcgcccagcagttcccatggcaggacaatccattcccaggggtgatggttcacggaaaccaccccacagactagtgccaagacataggaaaagatcagaaggtgaaacagttacagaacctgacaagatggaagtggtcgctgaagatcctatacctgttcggccagttcctgaattttcaaggacatcaggcagcttcaagtctccaaaggtcgattcaaagtgcaactgtgcaattatgtagagttatgcatcaactcaagttggcaactatacttattatgatcactaaaatccatggttgcttgttattatttcagcgcatgtgagttaacaaatgaatctgcacccacctggttcagtaagcagcagcgacctacaattttttttggttgtggtgcatttgccctttatttctgggtcatagagtgctcaacgagccattcttttgtaaattcttgcttctccagtcagttctatggtttgtctatttttttttcctgagagtcaacatctcaagcttaagcatatttatataataaaataataacatttatgataccaaataagcatcattagatttttcgttaa

SEQ ID NO: 40191 - DNA, 2441 bp, Zea Mays
tctccctccgccgctagccgctaggtgccgaggccttcatcggtcttccgctggcgacggttcgcctcgcgcgtgcgacgcctgggtggacaaccgccgcggcggcctcaggtgccgaggcattcgtcggtgtcttagctggcgacgaacaccaccagatccctactaacttcgaaccttttgcaaaagttatcgagtgtgcatgtgtacatccatgcccctttattggctccgccccaggtggccgacgaatttgcaacgtctttataagacggctgtaaatctgtgacagttaatattttgcagttgaagctctgtgattttgctgtgggcacattctgtttattgtcttatgatatggcagaatcacggactgtttcgaattctgagaataagcgcactctcccagcatggatgttgaaagcaacctcaggtaatcaaacagcaaagaccgcagatcagaataagcaggcactggaatctgctgacattggggctcttgatcagagcaaacccatcaaaaggaacaacagacggccgctaaaaaacttggattcagtagctgctggtgaactgggagttttgcagcgatgtgagggtagaggaaaggccagaaggaagagcaaggatgctgtcaaagatgaagttgaagaaattgtggaattaaagagtaagaatgcaagaaaaacgagtggaagaggtgctgcaaagaatagcaagaaacggaagttggataatgtcgaatcaggaccatcatcgccagtatcaactgatgatgacatagagcttactgttgaggatcttgtgagcatagctgaagagtttgttaatgctgataaacagaagcaatgtgaactacaaactgtggaggttaccaggcataaagagcatcatctgtgccctaaaatttccactgaggtagatagagggcagtcagtagtaaatgctcaatcagtgaaaggatcgatgcagtgcgcaacagccacaagtaatacaggtgcaatcaagtatacagaagatgagagcactagccatcaagaagtgcaattttcaagtttcaaaacgacagaagatgttgctcaggatatgataaacctgttattcggtcacctattgagtaaacctgttgccaacacagagaagtctgatcctgtagaatcaacgactagaactgtaaatcaggtgccagaggggagaggctggcacagcgaagtaccaaggcaggaggaacctgtgaagaaaccagagcctgtagtagaatcaatgcctacgactataaatcatgtgccagagaagaaagactggcgtagcgagttaacaaagctgggcgaacctgtggcaaagaagaagagcagcctcagggacaaggtggccttgtttctttgactgcatcagatgagatttgggcagtagattgtgattcgtatgggaccgtgtctgctggttctgagcgtgtcccagtcccacggcattgtttttgcatatagttatacctttggttaataagctgtcctctttaaatctagcaagccagccctcactgttgctagatggtattcctgtgtataaaggatgcatggtgcattttctgttggttgaagtacgactgtatgaagtatcggtgttcctcaacgcgacaactacactagagggaagcggtttaaacatcgtagagttattaggcatggaggagcccagctatctccttactcgccatggagcctttgcagaagttgctggagactgacacagctgagagtgtcctgttcccaatcatttacagtgctgcaaaactatggatcagtatgggcgctgatgatgcagccatcttcgtaaaagtggtaatggatcgttgtctatctttgggaggatcagaagaggtttcctttggacaagctctggcgatcggcagatgcaaaaatttgggggcattgagtgtcagacctggatgtgcacagattgccactcccggtaatgctgttgacaggcagttcatcaaggccaacaccatcctcactcttggggatgaggaataccaatggacatgggtgtcgaacttctacgccgcatgcaacaagaacagaacggtcagggacgttttgcacggagtatgtttcttgaatacgaaaacagtgacagagatggcagaattgttatgctatgggactttctcagtaacagaaagacctgacgagaatgaaaccggttagctctggcaccacaaccggaagagccgcgacaaaagccgtgggcggggcttgtgccttgtggggaggagtcctgtcaaacgagtttggctccggagcggggctcctgtctttatgtactcccctgttccaaaatagttgttttagccttttaacaaattcattcaataattaatatatttgttttgtatatgtgtctagatttattatcatattttaaatatagacataaaa

SEQ ID NO: 40192 - DNA, 2898 bp, Zea Mays
ctgctgttcccctcgaccctcgtccgtccgtccgtccgtcacctgacggctcccaaaccctaccccgcagatccctccccttcctctacccccgcctcgccgccggtcttcgtcacccgtcgccgtgcccgtcggcgcggtgttaagggtccgctacgctgcacctcgcggggagaaaggggtgggcctcggggacctccgccctccgcgcaaggtcattgaatgaccttctatacgaatatggatttgaatgcatcaccggtgcctgacgatgatgagcaacagccttatgatgattcagttgaggttgggtatgctcagacggaacatgttgaatctgctgttgcaacattgcgccgggagcgtgaagagagacgcaagagactaaagagagagcagcaggatgatgggtcaaggctacattcccagcagattaggaatgattatgctcctcaacccaaaagacatagtcgcattaaagaggcacctcagggctggctggactgccctgcatttggggaaccaatagataaaatcataccatctaaagttcctcttgacgaaacattcaatgagtcagtgcctcctgggaagcggtactcctcaaagcaactagttaacaaacaaagaaaagctggccgcgaaataggtctggtgattgatttgacaaataccacccgatattattcaccagcagaatggacgaagcaaggtactaagtatgcgaagattgcatgcaaggggagagatgctgtacctgacaatgaatctgttaataagtttgtctatgaggcaatgatgttccttgatcgacaaaaacaatcaaagaatcctaaatatattctggttcactgtacccatggtcataatcgtacaggtttcatgattattcattaccttatgcgcacacacgtctcttgtgttgctgaggcgattagtatatttgctcaaaggcggccacctggcatatacaagagggactatattgaagcattgtattcattttaccatgaggttcctgacaatatgatgatagcatgccctccaacaccagaatggaagagaccagatgatctcgatttaaatggcgaagctaagcaggatgacgatgatgacaatggtgatcctggaccactgcataatgaatcagaggataaagtcatcaccaatgacgatgtgttaggggatgaagtgccatatgaccagcaagaagctttgcgtgtcctatgttatcggttgcttgaaatgcctcttggaagggggcatgcacactttcctggatcacatccagtttctcttaacagtgaaaatctgcaactacttagacagcgatactactatgctacatggaaagctgacggaacacgttatatgatgcttataatgagacatggttgtttcttgattgatcggaattttagctttagaagggttcagatgcgctttccccataggagcctccaaggtctgcaagatatgaccttgattgatggagagatgattatagacacagtaccagattcaggcttgaagagacggtacttggcatatgatcttatggcgcttggctcagtgtccaaaactaggttgccattttctgaaaggtggaaaatgctggaagatgaaataatacagccgcgtaataatgagaaaggccttgagcgtggtgctaagagcaatccgttgtacaaatatgacatggaactattttcggttaggagaaaggctttttgggtgctattaacagtaaaaaaggttcttaaggtgtttattccatcgctatgccatgatgctgatggccttatatttcagctagaacattttgtcgtggatgtgtaattggtggaccaaattttaaacggtgctggatatggaactcctctccctaggctgggatgatccatatgtaactcgtactcatgaaggtcttctaaagtggaaataccctgagatgaattctgttgactttctgtttgagcttacaaatgataatcgtcagctggttttcctatatgagagaggaaaaaagaaacttatggatggtgctcggatatcatttactgatgatgtagatccatcttctgtcgctgggaggattgtcgagtgctcttggaacaaggaagaacagtgttgggcatgtatgcgtattagatctgataaatcaactccaaacgacatcaacacataccggaaggtgatgaggagtatcacagataacattaccgaggagaagcttctcgaagagactgatgagataacgctcctgccgatgtatgccgataggatgaatgttcgtgttcatacaaagatggcacaacacaggcgaagattgccaccacagtgctagtctcgttgctagagtgctgggtcgctctcctagccagcggctggcttctgtagctgtgtaattagtagaggtttcagtagcccccccccccccccccccctatgatgatggccagccaactaattctttgcacttcatttgtgtcttgtcccctgccctcacacctacctgtataggcttccctgtaaattgtgtgctctatgttcctccatattctcccctatggttttatttttcatgggtgtagaatagcgtttaacaaggcgggtggtgttctatgtaggcgttgccatctctcggtgctgcctcgtgctagaataatgtagggtgtactggcgataccatgtggttgcgatatatggcttggttttagtgttttggtttgtgcgcacctgatccgatcctttgtccaacgaagattttttccccttatttttgggtaaaaaaggacgtcaatgttaccactctatggtatagtgcttttttgttcacatggttagatcatgtactgcgtggtccattttttctctttagtgtccgccactttgtgg

SEQ ID NO: 40193 - DNA, 5067 bp, Zea Mays
gaacacagttcacctctcatttctggcagcaattgcatgaagccttgggtacacatctgaatttcagttcagcatatcatccgcagacagacagtgtggcagcccttccaagttatcgggcccacatgcaccaatccttgccttgatggcctcagatggctatgcacgtgtaccaggtaacttaacaaggctatcacgagttcaacaacttaaattcatcatcccaaggatctcccaccatacatgcatattacagtaatcacattcgatacatacacacttcggagataagagcggaagactttataaacattctttaccttttcaaaactcaagttttacatgtttcgaaagagtaatatgtattacaagtcctgatatactcaaagtgcataccttattacaaaagcaggaaggtagaaaccctccaaagcttatacataagcctaactaatcttcctccagaactggaaacaccctccagcctcaggaacacctagagtactcctcatcacctacaacaacatgggttcgaaaaccctgagtacggagtgtactttcgcaagtcttacccgactaaggaaaaatgactctcaaggatatgctggttaaataggaatcaaggaaaaggctttagcaagaatcaacttagatacttttgcagaaatagcttactaaagtgagtccttactttcaacattttaacgccagattaaatattaatagactctggttgcatctagtctaatttcaccatctcatcaatacaacatcatttttattcataatgttcacatcttgacttaggttgcagggcagcgatcaagtctccactctccggggatataacggcgacccgaatcgatttgctcagctgaggatctctaaccacacgacatatgtagcacttaacccttgcatatgtcaaccattcccacagatcctccacaacgtgaaccggtccgcgctacccgggagcacagtactcctccatccagcctccagccaggagggtacacgctactcccaccatctcccacgcccagtgcgcggttgtctttacacgtatggaatagccgggttcaagcttaccctgtcccatatccagggcatgtggccagttaagatagtccttgatcatacaggcctacatacgcatccaatccttaattgacctgggtggagcatcacctgttcctagcccaagtctcgatttaagtacttccatccttaggattgttttgtgttccttaggatgagaagagcattacagggaactttgcagtaagatcccaccatgctcccaatgaaaatattcttgcaggtagaagccatccttcctcaggacaacccctgagctaggcattattgcaaaagacaacttctatccacaagatctaagcagggctaagcatttttgtaaacaatatttgatacttcctgttggggcctttttggtcaccaaacacaataatgaactgcttgacggtacttggcaccttgggttcggctccgcaagatgaacagtagtagcggcctgcgataggtcgccggatcgcctgatagtgccctctacgacggcgcgaacggtccgcggccttgggccggacggtccgcgacctgggcgcagaagcagtgtcttccctgcgtcacaccggacggtccgcagctctgggccggacggtccgtgacctggcgacagggttgtcttcctcctccttgctggaatctagatctcgtcccctggggggaaaagatcttaaggtgctccgggtcgacaggtcacccggggcgtccccagacgatgtggagtcgcctaggaattaagagatcaaatcgaggaagaggtcttggatggacaactagatcttgccccccgggaggggtgagatcctagggtcgtcttgggatcggcaggccacccaagacggatctagacgacgtagagtcgactaggggtggaggtggatatgcggaaggctacaactagaactatgctacatctactcctagggcaggaaaagtaaataaggtaattggttcgattggaatgtgttcgggggttctcaatcggccgtacccctttatatttataggggaggaggtctggaacttttcctaagagatagccaacaaactcccacgtgattagatggataaccacgcacgagataaggataaacatccgaggtaatctaatctcgggacacgcggaccgtccgggcctaagggccggaccgtccactcattttggtgtccaacatatgcccccctgccttttggtggagcttggcgaaccaaaagcatcagtgaaaacttcggaaacaattgacctcatgagcttttgttcccgaagtaaggactcagctcgatgcaagtcatcggctcttgcgatcagataatataaatacttgatggaactttaatgcacagaggccgttttggatcgcatcctcttcggccatgtctacctgatcaacctgtcaataggcaaaaacttgtggtgcccccagcctaaataagcaaacggattcggctagtaatacgaattcatcgccgtaccaccccacacatgagcaggacaacacatcggcgatggatagaacgggacgcaccatgctatccccggaggaggatgacaaggcgatcttggttgtgctaccctttgggtccgtttagtcggcttttgctttcgcacaggtcgcccttttgacttcgtttgttttattggccggttgtgtggaacggccttcttcatatatttggcaagcaactgaccaaaagtagggccgactctactgagtcgtccagacgttttagtagtgttttgtttcctaacacttgtgttggaacgttgtggtccgatggtctgatgttgctgcttctgaccatctgcggaccgtccggccatcatagccagactgtccgcgcctgtctcggactgttcggccttagtactcggatcgtccggcgtacgcaggacaggtgaccgtgatcgagtgtccgatcgtgcttgccccccggtgcctccggtctttcttttgtctggagccttcagagtaaccattctgtgtgacatatttggtgtgcgaggatcaccaatgacgatatttttatttttacttttatcggccacacaaggccgaattatggcctttttgctcgttggctctaatgtggtgacaggaacaggtggcctgtcaattttcacctctttttgaaacctcaaccggccttcgtttatagccgattgtatttgccgacggaagacgacacaatcattggtgttatgaagaaaggagccatgccatttgcaataaacatgcccttttaattgttcaaccggaggaattatatgtgacaatttaatattaccatgtttaagcaactcatcaaatattttatcacatttagtaatattaaatgtgaacttaactttttccttttgtgtcgagtgcgggtgagagcgaacagaaggtttggccttagtgggccaaacaagctcagggacatgtgacttttttagttcttggggcttgggtggccgattatatttatgtcggccttccgcactaggcggatcacatgtgacttctggtgctccggacggtccgacctgcacattcggacggtctgcgggtggatcggacggtccggtactatcctcggactgtccggtcacgtcaggcaacacctgtgacccttgtggtgggctctgtgtaactccggactgtccggcgtagggtgccggacggtccgacggaagggccggacggtccgctattgtgtgcggacggtccggccgtgctcagagttgactcaccatttagcgaagatggtggtgacattcgtcctggatatgagtccatcggcataccagagtatggctggggaaacccatttgttgccgatgtgtttggcgcaattgttttggcgcctaatttatgtgataaaaaactaggcatgtgagtttttcctaatgcatgcgccatcctttctatatcctctgtgatacttttaatccgattatcaaaagaaattctaatagatggaatatcatcgactgacctggcatcacctattgtggggagctgttgcagcacggatgacatgtaattggcgtctatttccctttcttggatggtcttctggtggcaatccaccctgaagtgcgagaggaaccatttattcgccaccttgagcacctgatctttttgtcgttggacctcctcgtctattttcttcatgtcatcttttaatcttttatgctcagcggccgataaattagtgagccttgtgctgctgtttggagaagccctgttgagatctttagaatcggccatataagcctgattttgtagatcttcaacctcgtccccggcggagtcgccaaaagtatgttggtgcctttttggtcaccaaacacaataatgaaccgcttgacggtacttggcaccttgggttcggctccgcaagatgaacagtagtagcggcctgcgataggtcgcaggatcgcctagtagtgccctctgcgacggcgcgaacggtccacggccttgggccggacggtccgcgaccagggcgcaggagcggtgtcttccctgcgtcacaccggacggtccgcagctctgggccggacggttcgcgaccgggcgacagggtcgtcttcctcctccttgctggaatctagatctcgtcccctggggggaaaagatcttaaggtgctccgggtcgataggtcacccggggcgtccccagacgacgtggagtcgcctaggaattaagagttcaaatcgaggaagaggtcttggatggacaactagatcttgcccctcgggaggggtgagatcctagggtcgtcttgggatcggcaggccacccaagacggatctagacgacgtagagtcgactaggggtggaggtggatatgcggaaggctacaactagaactatgctacatctactcctagggcaggaaaagtaaataaggtaattggttcgattggaatgtgttcaggggttctcaatcggccgtacccctttatatttataggggaggaggtctgg

SEQ ID NO: 40194 - DNA, 1086 bp, Zea Mays
tctccccatatacatgaaattttatcttccatggaagtcatgttgtctttgttcttgtttgaaaattcattttgcattgaaaaatattagcgttattacaattgatggtagcaataaatacaataacaacaacaacaaccaagtgtgtcagtcccaagcaagttggggtaggctagagttgaaacccaacaagcacccgcagtcacggttcaggcacatcgatagtcgttttccaagcacaccaattcagacacagatctctagggttcttactttgtttctgaaacaagtacctcgggagcatctacctcattcatgaagccaaattctaaatggattacaccacatggtgtcggattatattcagactgcagcctgacacagttgtgttcgggacccgatgcagctcttttggtatgcttagcattaaccataaaattgaccttgctttgttacaatttttttactggtttgcgaaatcaaatatatctgtaattgcaatgactttgtgtctcattttgtactatgttacccttcacatttgatttataacaggtcttccttttttacatttttatttctaccggtaatatctgaatgctttatacatactattaatacatgaaatcttatctttcttgcaagtcatgttgtgttttgtttgaaagtgccatcttacattaaagaaaattagtgtataatcagttgtggcaataagcaatgtatgttgtcctcattattgtattatgcgaactgcgaaggctgaaattgtgtttatttttcagagagatggttatagttctcactttgttcctactgaagaggatacatcgcatgagaagtctgtgcctggtcctcaatttgttcatgaaacatgggaaacatcacttgaggatttttttcagatacctggtaatgagttctctgaagctaaaactatatttgctgatggtacttttttagagattgctgataccacaaagataggcagagtttttggactggatctgttgcaagaaatgatttaacctcataacgcgggattaagttggaatggacagtttgacgttagtacaatagttgtca

SEQ ID NO: 40195 - DNA, 869 bp, Zea Mays
tcccagccgccgccgactctatctctcccttccctctcaccacctcctcgtcatcctcagcgtgcacgctgcgcgtggccgtagtgggggtggccccgcggcacgtcggctgccgaggcgctggtctcgccgagggcccagatgcaggtgctctcctctaccaacctcgccgctgacttctcccgcgcgctgccgcccggggcacccatccccatgctccgccgtgaggtgctccactccttcctccgccgtcgaggccgagctcgtccagggcctcatcacctccgccgtgaggtgctccactccttcgtcttcaagctctcgccccaggggtgcgctagtgccaggtgcggcgagccagcagatcaaggaaaccgcccgtggccgccccaagcgttacatctgcactggctgctgctggtgacaagcaagaacaaccaaaggatgcaaacatgtccagtgacactgatatgagtacattttagctgcagcttcaagaatttattggcccttttatgtgtaaaataacagtttcctggtgttgatcccaatgatccatctgttaaagatttgctggcatcattgcacagccagaaagaggaagagaagaaggaagacaagtcagacaaaacagaagacgagaagaactgcttcaagctggagtgatgtcgctgtggtgcttttgtgactgatcatctctggagcttttgtgaatgatgtagctagctatctgtaattgatctagttgtgaatgatattataattgtgatacttttgtgaatatataattgtggtgcttttgtgtttatgtgatggatctatgactgtggtatactgattaattgtgtatgtctttatgattcgtgtat

SEQ ID NO: 40196 - DNA, 1658 bp, Zea Mays
aatctttcttgtaccactaagctagtggccacaactcgttggcaacgaggaagcagcaagccgagaagctacgccgcgccgccgccatatatggcacaggctgccggcaccgccgatgccactgatgaggctccactgctgctggcctcgtcggcggcggggtcgacgccgtcgccgccaggttcagcaccgcgccggaacagacctgacgctgatgagcggcgcggagctgttcatgcgggaggacgtggggctcaccgacggcgaggtcgaggtgctggcggggtccatgaacgtgttcatgctcgcgtccatcctcgccgccggctgggtggccgaccacctgggccgccgccgcaccctcgtgctcgccaacgccttcctcatggccggcgcgctcgccatgtcgctcggcaccagcttcgccgcgctcatggcggcgcgcttcgtcaccagcgtcggctccgggttcgcgcgcgtcgtcgcccccgtgtacaacgccgagatatcgcaggcggccacgcgtggcgtcctctcatccatgctcgacatattcatcaacgtcggcatcctgctcagctacgtgtccaactacgcgttcgcgggcctcccggtgcacatcgggtggcgtctcatgtacgccatcggcgtcatcccgcccgtgctcatcgccgccggggtgctcgtcatcatgccagagtcaccgcggtggctcgcgatgcagggccgccacgccgacgcgcgcgcggtgctgttgcgcacgtcggacagcccggcagacgccgacttccggctcggggagatcaagcgagccgccgacgcgccgtcgcccgctgctgcggcgcgccacggtggcggcggtgtctggagggagctcttcgtccggccatccaccacaaccacgagcgtgcggcgcgtcctcggctgcgtcctcgggctgcagttcttcgtgcaggcgtccggcgtcgacgccatcctcctctacagcccgctggtcttcaaggcggtcggcgtggcgtccacctccgccgtgctcggcgccaccgtgtccatcggagccgtcaagacgtgcttcgtcctcgtcgccatgctcttcaccgaccgcctcggccggcgcccgctcctcctcgccagcaccgccggcgtcgccgtgaccgcgaccgccctcgccgtgacgctgtgcgtgggcacggcgtcgccggcgacggccgcggcgtgcctggcgtccgtgctggccttcgtggccgcgtactccatcggctacgggtccgtggtgtcgacgtacagcgcggaggtcttgccgctacggctgcgcgcgcagggctccagcctgggcgtggccgtgaacaggctcacgtgcggccgtgcggggtggtcagcatgacgttcatctcgctcgccgacgccatcaccatgcccgggtgcttcttcctctacgctgcggtgacggcggctgcgtttgtgttcgtgtacacgcggctgccggagaccaagggccggagcctagaagacatggaagtgctcttccgcaagtgagggtggccggtggccacgtatagttgccattagcacaaggtcgcgttcggcagagttagtagaaattatccacaattaccagcagatttggaactccggtcccgcgcgctcgtcggtcgcag

SEQ ID NO: 40197 - DNA, 804 bp, Zea Mays
ccgcgtgctcctcgtacggctcggccgcgacctcgccgtcgttccgcagctcgtcccaacgccgagctcggccctgccctctgctccagctcgaagtcgctgcgttgccgagtccctggccgcgtctgtgtggttgtgttctttcgtgggaacgctcactttgccatggtcatgcactcatgcgctttctactcggtccggcgtgggttttagttgtcggtcaagcgtgcccctgtttcctcagtcgcgtcgggtctccatgccggttgtcgtcgttcgtcatcgcgtcgtgtgtgcagcaacgtcgctgattcctccatgatgcttgtcgacgaacttcgcttcattggtttctcgccttcggttcggctcatgtatgcacaccgaacgcgttcgccacttaaccctgtgtcgctagagctcgtgacctcgctgtcgtcggagtcctcactgaattcgtgtcctcgccagagctcgcgctaacctgctcaaccacacctcgccagctcgctctagactcgatctcgtcgtcgttccgtgcgtcgtcaagaaatcccaagagtcgggcgaagacgaagttagcagcgtgatattcaccaagtgctcgacacaagggctgaaccagaatccttgccgtactcgcggatagcgcgtcagatttagtaggtaagccgattcatatttccgttagcttaattattgaattagttcgatgaatgtgacgtgattattttcgtgattttggagtagtcgtgttgggtaggtttgagatgttaaatatgtgatgtatggtaaattactgaa

SEQ ID NO: 40198 - DNA, 5479 bp, Zea Mays
ctagatccgctttggtctctggaatctggaagtcaccggatccacaactcgcccctctggccgcctccgtcctccgccttatcggccgccgcctcctccttcgtcagtaagacgcctcatcaacctacaaatctcccaatttgtcgtcgcagagattccccttggcacccctaatctcgcaatctgtttcaaggtcgcatgtctctcgaggacgagaagcctttcttcgtcgtcgctgtcgtccccaactgggtgatgctagagcgcgtcgtcttccgcagggacgacgagtccttctcggacggaagcgaggccatcgtggcgaccgaccggcatcgcgtcctgtttcgcgtcggcaccatgatgttcgcaagtctggttcaggaattcttcatctacagcacctcagctggcaaatgagactccatgcgtttgcccatcctctgcagcaccgaccccaatgtgatctggcaactttgcttatggcagaccgacacggttatcctggtcgaccgctggctttgctgggttgactatgagcgaggcatccttttctacgatatgtttggggagcccagccctactgttatcttcagccagttccctctggacaagttccctgacaacaacactcgcaacaaggactgctgctggttgtaccgcagcatgtcgaccacccgtgaggggggtgcgctcctgttcaccaacggctggtgctggcttcactatcaggtgccactccctcatgttatgcaacatcacggagccgaacacggttgggtgtgtatgggaagaggactacacggtcacctccgatgagctttggtctgccaaccctgagtgcctaccgcatgacattctcatgttcccccaagctgacatggacaggccacatgtagtgcactttgtcatcagcgagttcggatacgtgagaaagaatatgtagctggtcaccattgacatgagcaccaggagagtggagtcattttctcagtataccaatgggaggcagtatgccattggaaccgagggcgcttacttgaccaaaataaggttggtgcacaagttgtgtactcgaaatatgcaggcacagaattgaaattcaatgacgccgaccatctcattttgaaataagatgacataattggtattcttgacagtgatgatgtgaaggatatgaaaccaccgaatgatcgcattctgattaaggttgctgctggtggtttgctattgacgcaggcaactaaggagaaaccttctgttggatcagtgagtattttaggtttagtatatgctggatttgcagtaatttattcgattatctgtttattatgaaaaactcggtcggggagggaaagagaaagaccgcactcccgatattatattaagaaaaaaccgaaacatggttccggccaaaaaaaaattcctcgaacctggccgtccatcactagcaggccgtcaccgcccactctgcaacggtccagccggagggtggcgtgcaggacgtaacccgagagcagacggggcatagcgagaggattttttaatcaagccagaaattcgtccccgagggggatcgaacccgggacctgggtgctactcggaagcattgaccattacgctagaggccttaatcattatctgttgattatgattgtttatgttttcaaattatgaacacatggtcaacaactgaatcctttcaaagatttacttattttgatttgggccttttttgaatctacatgttaaatgcatcaatggtgcatttaacatgttctagacttctagtggactagtaacagctgagtatgaggtttgctcgactttttaagtttcaacagttttattatacttacaagttgcaaggattggatttgttttgaataagctgcagattttggccagtaattgatgtcctttagttgtctcgtacttgtgtggttcgcgcgctagaggtttggggatgttactatgtctatagagaaaaacacaagacagaatttagcttgcagctgttagtgcagctgcctaagagttacaatggaggttaggggatgttacaatagggtgccgccttgactggagggaggctggcggcggggggctggaagacgggacctggcaggtggcatgaaggccgacagtggaggacggctggcatggaggtgggcgatgcctgctgcggagagcagggaggtggggaagacgggactggggggcggtcacaggggaggcgccgcggaaggaggcgtagaggacaggggtgggggccagaggggccatgtgggggaaaatcatttcgcttacaatataagcgctttccaggccgcgtactagaaaatcgggatggacgttgtattttggatggtgggctaagcggcttgagaattaagcaaggtgtttgggtggacttatggcttagtttcaccaataagcgggaaataagcagatacaaacagggccttagtgaaggtaagcagtaggcccatgaacaatggattgtcaataccatggtttaaaagtcgtcgcctaggcgtcgcctaggcgacgcctaggcgtccaggcggggaaatcttctaggcgtcggcgccgcccagaggaaatcgtgtatggcgtccgccttggcgaggtaggcgtccgccttggcgtcgtaggcgtctgggcgacgccttttcctccctgggcgacgccttatctcgttttgggctttagggttttggcggctaggcgcgcgttctgttttgggcctgttccactgtgcgcgcgcggcaaaaatacattgtgcgtgcgcggcgccgcggctgctccttcgcgcgcaaatctctctgcgctctctccctgctgctcctctctccctgcgcgcggcggctgctcctctctccctgcgcgcggcggctgctctgcgcgcggcggctgctgcgttctccctgcgcgcgcgcggctgctgcgtgctcccagcgcgcggctccctgctaccagcgcgcggctgctgctctctgcgcgtggtcttgcggctccctgctccttgccgcagtgctagctgctgctgctgactgcgcaacgagtaggtttctgtcaagtgtcaagactgcagcgactagcgacaagccgacaacataatgtcttctcgaaatgaagctccatcttctgtggctgcatccaaggtgcagcctagttctggtacagcagccaaaaaaagacaatcgaccttgcaatttaaggcaaacagtaaagcacagcaaaagacagccaagtccgtagttgagatgttgcggaaaacaccagaggaggtggtggatgagagactttcaggctcttatcagcccacaatcttggctagtgcaaaaagcaaggaggacaaacactatgtggacatgcagtgggctttgttcttctatgagtgcggtgtacctttcaatgccgcagcagctaggcagtttcagattgcaattgaggccacagcacagtttggttcagggtataagcccccaacaccttaccaactaggcgagccattgctacaagaggctgtgaagacaacaaatacaatgagggaggaacatgagcgtgcatggaaacactatggttgcacactcatgtctgatggatggtctgataggaggggacgccatctcattaacttcttagtgaacagcccagagggcacttattttttagagtccgttgatgcatctagtgaagtacatgatgcatacatgcttgctgatttgcttgagaaaaaagttgatgagattgggagagacaaggttgtacaagttgttactgataatggtgccaattacaaagctgcaggcaagcttctaatggagaggattcctactttattttggagtccatgtgctgcacattgcttggacctaatgttggaggacataggaaacttgaaggaattcaagaaaccaattgcacgtgcaaggcgtgtgacaactttcatataccgacacgggagaattcttgctgccatgagagagaaaactggtggggctgatcttgtgaggcctgcagccactcgttttgctacttcctttctcacattgaagagcttgtacaagcacaaggatgctttgaaggctttatttgcaagcacagcttggactgataacagattgtcaaagactagtgctggattggatgtgtataacattgtcttctccacacagttttggaattcagtagaagattgccttagagcttcggggccactacttattgtacttagggtggtagatggagatgagaggccagctatgccagaggtccaagcattgatgaaatgtgcaaaggaaaagatcaatcaaagctttgctgtccaaagcaagaagactttactcaagaaaatcataactataattgaacggcgttgggagaaacaaatggatcacccattgtatggggctgcaatgtatttgaacccaggaaagttgcatcctctcataagaaatgatgatgatgctactgttggtcagctaagaggttgctttcttgatgtgcttgcaagaatggtagatgatgaggaaactagagacaagatcaattctcaagcaatggattacgagtttcttagaggagcagctttttcaaataagatggccaaagataacctacaaactatgaccccacttgagtggtggcgttcgtatggtggtcgtgctattgagttacagagatttgctagacgtttggtgagtctttgtgcgtcttcatcaggttgtgaacgcaattggagtacctttgaatttatccatacaaagaaaagaaaccgattgttgcataagaggttgaattctattgtcttcatttcctacaacagaaagatgaaagctaggttccaaaaactacgccagaagaaggggaaaaactttgatccattggttcatgaggacttcaattgggacaatgagtgggctgattctttgcatgtagtccctgaaggtgggcgtgggtgtgagtgtgaccttacatgggaccttgtggataatgccattggagcatcgcaagcacttcgtggccgaaacttaccaagaagggcccataatgtgtattcaagaagaaattctgttgctgcacaaaacatgtcagaggctgaagaggaagatgaagatgaagatgaagatgttccacatgacgatgcagaaatcacagattgtgaagatgaatctaatggtggcaatgctggtgaagaaggggaggcacccaatatcccaggagagtttgatgatgatttttgagcgacgagagacagggagagtagctattgctagattgcattagcaatttagcatatttgctgcattactaactgcagctagttactattaattatgccattacaaactatctatgtggctatttcagatttggacatttggtattgtgttgttttaaattttgtgacttgttgttgttcctttagaaactactttgtggctatttcatatccattattatgctattg

SEQ ID NO: 40199 - DNA, 2365 bp, Zea Mays
cgaagcaaaccgaaacaaacaaacccaagtgcgcgtccgagcctcgaggcggagaagaaaccggagcgagatatttgcatttcagtccctgcgaagagaaaaccgtcgcgtcctcgccgcgccgctcgcgtcgggatcccgccgccgccctactcggtcgaccatggggacggcgacgatggcgactgcggtgggcgcggccatgctgctctacttcgtgctgagccggcggctggcgggcgaggacgtctcagcccgcggcggtggagggggaggagtcgggtctggaaagcggcggagggggcgcgcgctgcggcggccggtgcagccgccggcgacgtggatcgaggcggtgggcacgctcgcggaaacgctgcgtttcacctactcggagacgctcggcaagtggcccatcggggacctcgccttcggaatcaagtacctcatgcgccgacagggcaatttacatgttgccagtgtatatgctggaagtgattgcattgaattgaaaggacctcaaatcatggaagagctgattgttctacggcggttgattgacctgtgctttcttttctctaagaagccatttccagtgtttcgggaattagctggattttcacaggaggatgttcttattgaggaaccaaaggcggggattttgaagcctgcccatacaattatacgtgatgagtgcaccaaatccttccttgttttgatccgagggactcatagcatgaaagatactctgactgctgctactggggctgtagtgccatttcacctctcacttttggatgaaggcgatgtgagcaaattagtgttaggttatgcacactgtgggatggttgcagcagcccgctggattgcaagaggtgtaacaccatgcctccgtgaagcagtcagacaatgcccagagtaccaaatcaagattgttggccattcattgggtggtggtactgctgcattgctaacctacatccttagagaacacaaagagttttcttcaacaacttgtgttgcatttgcacctgcttcttgcatgacatgggaattagcagaatcaggcaagcattttgtgacaacggttgtcaatggagctgatctggttcccactgtatcaactgcatctattgatgatctccgttctgaggttgtgatgaaacaagcacagaatgtcgcacaggctgttgctagaagtcggtctgcattttcctcatggtcatgcatgggtgcacgtcgtcgaggtgtaggtgtagttactgcatgttctaaagatgatatgagagtggaaacccatgtaacatcaacagttgagtcaaagtctgtccttgtagaacattgtggcgccaagaccatagaagaactgcagtatactgcagctagtgtttctgttcatgatgcagcagaggaagaagaggctcttttgagtgaacatgaaacctccagggagaatgccgaagaagaaacaacagagggtgagttgtggtatgagtttgagaaggacttggatcgacaagctgaaatggaggcacgaacaagggaggaagaggcagctgcagccaaagaaataatggaagaggaaagtgctgtgctaaaaggtgtagatgacaggcagtccttcacaccagatagcttggagaggcagcaattctacccccctggtagaatcatgcacatggttgcaatgcctcccacagacgctgacccagatgatccggttgctgctgacgagtgctgtgttggaatatatgagacccctagagatctttacagcaagattcgactctcaaataccatgatcaatgaccactacatgccaatgtataagaaaatgatggaaacattgattgagaagttcgcgagggatgaggactgctattgtacaggttctactgcagaataacatggaagcatgaatgacctatgtacatcgataactgtacaatactccgtgttagctgttattagcctatctgacattgcaatatacaagaggtgatgtcctcctgacccgtgaaaaaaggattttagttagggtcatgtgagtgtgtgatgtgtaaatgtaaaagaaaccagaatcagcaatttaataccttttccagtcatatttgcttgtactttacaagcatgtgatgcttggatcttgaaatctaaatgtttacaaggcattttaaagtcaggcgcttagcaagaagagcgttttgacattgttcatacagaccaatgggcaatgactacagggaactaaaacgataagagttgcaatggcgcactggtgcttgtttagctagccatactatttgatacttgacatggctgttaagaactgaaatgtaaagtgaaagtagagaacggaagaaattgt

SEQ ID NO: 40200 - DNA, 2340 bp, Zea Mays
ttgttgcctctcccgacgcccctccctaccctacttcaaaacatttcaaaccactctacgcgactacgcctccttcctctcctcaccccctccccctccactcgctcgccactgaggcgcctgaccagtgatcgtaccatctcccctcgaccacagtccaccgcccgtcaccgccccgccccgcccgctcgacgaggccgcggccgccgcgccgggtggtgaagagggtgctgctatgagtagcgctgtgaaggaccaactgcagcagatgtcgacgacgtacgattctctcctgttggagctcaacatgatttgggatgaggtcggtgagcccgacatggcgagggaccggatgctgctggagctcgagcaggaatggctcgacgtctacaggaggaaggtcgaccaggccaatcggtgcagggcccagttgcggcaggccattgcggatgcagaggccgagctcgctggcatctgctcggccatgagcgagccaccgatacatgttagacagtcaaatcagaagttacatggtttaagggaggaattgaatgcgattgtcccatacttggaggagatgagaaagaagaaagttgaaagatgggaccaatttgttgatgtcatagagcaaattaagaaggttgcatctgaaatcaggccttcagattttgtacccttcataattcctgtggatcagtctgatctgtcattaagaaagctggatgagctaacgaaagagctacaatcccttcagaaggagaagagtgatcggctgaagcaagtgatggaacatcttagcactttgcatttgttatgcgaggtgcttggtgtagatttcaaacaaacggtatacgaggtgcaccctagcctgggtgaggctgatggatcaaagaacctaagcaacagtacaattgagagacttgcatcagctgtaaacagattgcgtgaattgaaagtccagaggatgcaaaagcttcaagatttggcatctagcatgcttgaactttggaatctcatggatacaccgcttgaagagcagcagatgttccagaatttaacgtgcaatattgctgcttcagaacatgaaataactgggcctaacaccctctctactgacttcctcagctacgtggaatctgaagttttaagacttgaacagcttaaagcgagcaagatgaaagacctcgttcttaaaaagaagacagaactggaagatcataggagacgtgctcatttgattggtgaggaaggttatgcagccgaatttagcgatgaggctattgaggcaggagctgtcgatcctgcgctggtgctggaacaaattgaggctcacattgccacagtgaaagaggaagcttttagccgtaaggatattcttgagaaggttgaaagatggctgaatgcatgtgaggaggaagcttggctggaagattataacaaagacgacaatcgttataatgccgggaggggggcccacttgacactcaaaagggctgagaaagctcgtattttggttaacaagatcccaggactggtagatgttttgaccacaaaaattgtagcttgggagacagaaagaggaaaggagttcacatatgatggtgtccgcctgcggtcaatgcttgaagactacataatcattcgccaggagaaagagctagagaagaagaggcaaagggatcagaagaagatccaggatcaactcaaagctgagcaggaagcgctgtatggatcaaaaccaagtccatctaagactcaaagcacgaagaaggtgcctagacaatccatgggtggtgcgaaccgaagactgtctcttggtggagccacaacgcaagcccccaaaacagatataatgcactccaagacagctcgtgctgcgaagaaggctgaagatttgggcgctttatctcctagtagcagaggcttggacattgccggtcttcccatcaagaaactatctttcaacgcaagcactctgcgagaggcagaaacaccacgcaagccttttgcccagatcatgccaggaaacaatgtctcgtcgatgcctgcgcggcccatctccaacgacacagaggaagagaacaaaacccccaaaacatttgcagggctcaatccaaaaacgccggtgacagtgacggctcctatgcagttggcggtgacaccagctgtggccaacaaggtcatagccactcctgcaacccttttccaggagaaggcagagtcgccagcgctgcctggggacatcgagtactcgttcgaagagaggcgactcgccgtttacctggccaggaataatcgtcatcctggaatctgtcgtagtgtgggtgtgttcaatctttc

SEQ ID NO: 40201 - DNA, 292 bp, Zea Mays
cttcagtcacgtggtcttcttccccctgctagccgtggcaaccgagctcccctccttccctgccggtgccgcccagccgctccctcctcttctcccatggtcgctccctctaccaagatcggtctctacaactccctgccccagccgcagcaccgtgatttctccctccatgtctcctgcgcatgctctggtcccagcgccgcgctcctttctcccatgctacgcgccgtactcctactgctccctgcgcgctgtggccccctgctcgtcccagccatggagctcgccagcc

SEQ ID NO: 40202 - DNA, 1491 bp, Zea Mays
cagcgagaaactcacgaaaagagaggagccgggaagcaaagcgccgacgactacgccgcaagtcccaacccaacccaccctatccagaatccaggtatatcagatgactcgacatgtcagttctcgatgtttcaaatgctacagtatgttaaataacaggcaaaaggttgagtggaacaataggggtttctctacactccatgcattggtagctgctgccgtttctttctacctggtcatgatctctgacctcttcaatgaagatgcgcacaatagcataataattgacagaaaatcatggctatccgattgcatgtttggggtctcgatcggttactttttgacagacttgacgatgatcatgctgtattttccttctttaggtggaaatgagtatctcttgcatcacggactttctatgtatgcaattggtcttgctttattgagtggcaaagcacacatgtacatcctcatggtcctcttcaccgaaatcacgactccctttgtgaacctcagatggtatttggacgttgctggtcagaagacttgcaatctttacttatacaatggtgtggctctatttgttggatggctggtatgggtatttgaattttccaccccgagaggtactaccagttagcctgggcatctgtggaaatccattgacttctgacaatgtatatttttagaataagatccacagtgttttttttctgttaacattaaaggtagttcatcaatgttccgcaaaaaaataatgtagaaattgtgaaacactgaatgaagctaataaactatcaaaagttatggttgtttcagcgctttatgattatggtattttgcagctgaaaaaactggcagctacagaattatttgtacataaggtttcatcattaaaacggcttgccacagaaaacatatcttgctgtagcggcatggctgcacgcaactgctggaaaaaaatatatgacatcttgtgttatgctgctacggtgcttctgcagcagcatgaagttttttttcttcttgttaaaataggttttggtgcactcatgaattcatgaagtgtgatcgttttctattgccgttgccacccttgtttcccaggcgagatccatcttcagcttagggttctacagcttggtggcagtgccgtcggtggttgcggtgatgaacgtattttggttctggaagatactcaaggggatggtgaaaaccctttctaggaggaagcacagcgaaaatgggagaacagattagaaggaatgaaggaaggatgctactgaactgtacacatgttcatctcaacgcacttacggcactcgcattcatttctcacacagatgtaattatcttgtcttgccgtcaaagattcaaagtcggaatcccgcaactcttaaattgttgcaacagtgccacatgcaccgttactgaatatatattggccactgtcagtgtcagcgtgctcgcttgggagctgattacacgcgc

SEQ ID NO: 40203 - DNA, 321 bp, Zea Mays
cctttggccgtcaccctccccccctcttccctcttctctcttccccaagtgctgcagccgccccctctccattctcaagtttttttgcagcagccatctcctcaaccctagccgccacccccccatctcctcttctccaagtgtcgttcttcctcgtcggaccttcttcgtgtgggtgcaagtttcaattggagaattggtgggaggaagtaaggaggaaaaaggtggaactcaaggtgatcttgaagttatctatgtttttgcgctaaaattcaattgattatatgtttatctatgcgaatcggtagaggtgctgtccag

SEQ ID NO: 40204 - DNA, 2527 bp, Zea Mays
atactactctattaagatgacagtgtcagcgtccacaccccagtgcgcccccgtctcacgaacccgtcccctcacatccctcgcgttgccattgcttggtcctctccgcgcccgccgcccctgctcggctgctccccatgtcccgcgccgcggtgacaaggatccgagaacacccctgcggacgcatccgggattcaaggcctcccctcccttcccctgcccccaccccctcggtgatgcccggatccacgactgctaccgtccagcctcgttctccgtccgcgaccgcttcacggtggcgcagacgctggaggtgtccacagggggcgacaccgtgaccctgcctccgttcgacatcagcgcccctccccccaccaccgtcgatttgtagaagctcctcgcccgttcttgcttcaccagcgattcggggaggccatgcccccctcggccgcaccccttctcctcctcgccgcatcccgcctctgggcagccgcgccacccctccctccacctcgccgtctcctacctcctccccctcgaccgcatctgcctccctctgtggcctcgctaccaaggtcaagatcgtcgagatttgttagggtttggggtttttgcggttgactctgaatcccgccgccgctgctcgcgcaggaggcctcgagctcccagtgctcccctcctcaaccaccctgggtaagtggctcccagattgatagggaaagagttcggactgtaggggctattgaatacttgattgatgccacaagatctggaaatgtgtcccgctatatcaatcacagaagttgttccccaaatctcagcacccgattggttttggtagagagcaaagattgccagcttgctcacattagcttgtttgctaatcaaaacattgccgtaggagaagaactcgcctatgattaccgacaaaagcttgtagcaggcgatggctgcttctgccattgtgggggccttagtgtaggcgtacaatctacgtcgacgccaaaattaaatcaccttcctacatccatagttgatatgaactggacatgcttaatccagggtacatggctgatgtgttcatcttctagaggatatcttgcaccagagtacaccattcaagggcagctgaacaaaaagagcgacgtctacagctttggtgtgctgctgttggagattgtcagtggcagatgccacactgatcctagattacccgttgacgagcagttcctcctagaaaaggtctggacactctatgagttcgatgatctcgagagcatcattgataggacactaaagcgcgattttgacaccgaggaagcactctggttgcttaaggtaagtcttgtgtgcatcccggatagccctaagatcaagtcctccatgtcaatggttgccaagatgctgcaagggtcctcaattaaggtcgaatggatgcaatcaaaactagaagggtgtgcgccatcgaggatcactgcagctaaggcaatcgtgaaggctggaatcgttgttatggcaccgcaagctattagtgtgctaggtggatttaggcctcaagggaaaacgattgacaatgttgtaaaggttgtggagacaacacttgccatgcaggaggctggatgcttctctgttgtgtattagttgttggcagatgatttataagatattgagatcaaaatcaggatgtttccaaactgtctataatcaggatggctattgtagcttttacagtaggttggtattatatgtttccaatttgtgtttttattaaaccattgtctaattggtgtcaggtcttcttcccatgggcggatcattgtcgactggtggtgtcaggtcttcttcccatgggcggtgccctggagcgcctgattgtctcacgtatttgaccagcaacaagggacgaagattggagctgtgtggattgtgtggaggcgacacgggtcaggagcatttcatctgatttacagagaagtaaagagaagttgtttacatttagtcatcctctgtatctgaaacaagactatgtttctaccttgtctttctcatggttcttagcctatggccgaagcttccatgcttgattcttcaaacatccaatgcagatcccttttctctgatggatatgctgatattcaaggctgtggaagagcaggtcaagaagagagtagagaataaggcaatgatcttcgagcagaatgccactgatagtcaacggcaagataaaccaattgcgttgtatgagttttagatcataactcaagttttttgtagatcttggtgctatttcatatgatgtgtcatgtttcagtgattgctttatagtgaacccgtaagatgtaaaatgacctttatgacagaaccatatgtaataacagagtattctgaggaacctttgttgaagtaaatgtaatcgagtttcctagcaatcttgttcctgcagacgagcattggaaaataacagagtattctgaggaaccttagtcgtattaagtttgtgtagaaagaaactgatcataatataatg

SEQ ID NO: 40205 - DNA, 1168 bp, Zea Mays
atagcaatcaactccaaaggaagtaagcaacacagactggaggagggctctctatttcctccctggtcccctaaaatctggaaccatgaaccatcgcattatgaaatgcaatatcctgcccggtttctgtttgcttcaatcaacgccatagttattttaatgtctgtgcacctgcctgcttaaatacgacagtagaggcgcatcaactgttcctttgtcttgttgtgctgtgccctgtaaatgtaaagaagaagaggtcatggtggctcacgatgagaaatgggtgtgaatgatggtaggtggaggtcgaagcgcttgtgatccaagggcccaagctgggcaccgtgctcagccaggtgaagaagctggaggcctccgtgctggtgctcagccagtgcaggccatctccctgctggttaagctgcttcctgcggagcagcggcgaggagtttgtggagcagtgcatcaaccaggcggagtgcctgacgctggcggtgaggaagcagagcaagggcgtcggtgggtacctcatcagcacccggtggcagaagaacttctggctcctggcctgacaaccatgcattttacctagctagttactactgctacatgatcacatttgttttaagtcactcccgtatatgtgctgtcatttcgtgtcatcaagtgcgtcacaagaaagaccatctctctctctccttcatcctgttgtaaagcgaaaagagcctccgaatctgaccacctttctacgaacctgtatcttccctgcaagtctttagcgtgcgtgtagtactgtgatctgcactgaacaatcatgtaatgctgcataaatgaccaattctgttgtacggcgcttcttgcttgctgcaattgacacttgaggctgtacagcttgcggattacgctaccggatgaaacctgattgcttaaccacgagggaagagctacgcaaattcaggataacaacatcggcaaggccaaggcgacgtttcggatgccgaaggtcgaaattggaaagcaatcaaggcgactcacactcaagcttgggtgcgagaaggaagtcttgagttatttctagaagtaaaataatgttcaggtcctgctccgccaaaataatgttctggtcctgcagccgtccctataataaatacttcatccgtttcaattt

SEQ ID NO: 40206 - DNA, 1751 bp, Zea Mays
ttctatctcttctctctcactcccatctcttccaccaggacgaagccgccgccgcctctgccagcgcacccgcctcgcccccgctcgctgcggccgcctctgccagcgcacccgccccgcccccacccgccgcggccgccctcgcccgttgctctcgccgacgcggccacctccggccccgcccgccgtggccgccctgctgtacggctacaagaacaacaacctcaagtggctggagcgcttcgcctacatcaacaccaccatctaccccttcgccttgctcccactgctcgcctactgtaccctgccagccgtctgcctcctcaccggcaagttcattatgccgtcggtcagtaccaccgccttctgttggttctttctacctcagcaatcggcatgcagagcctcaaaaacttaaccacccgttcgaacattgccagcctctgacatgacaccctgctgtaggaagttatcaggtgcatgtcatctcatcttctttgacgtaatggtgtcatgagcatactttaattaggtggatgcgtgcaggtcacaggatcttcaggggctgtagcctgcaggaaaagagggcttttgataatactgagagatgagataatgaatttggtggccgagcctcacatggtgatggtgatccttgtaccttgtccttctctggttcatccataggcgcatgagaggctgctgcatttatcatcgggggctatccgggtctggaccggagctaggaatttatgaggttttgtcactctctagcagaccagctggcaagtggcaactgaacttctgttatttatcaattaaaagaaagaaacttaacttgtgatcgagaaaaaaaagaaaacaacttattagcaaagtatgtattcacatgatcacatccatgttatggctactgggtctattcttttagacaaggattaccccccatgattaatctgactttggtctcccttatcattagaatctagtgagcacgattcttttttttaaaaaatatattagaaatagtaagtacaaacctcttcttgttaattaccctacgaatttgatatgtttcatattaggttcctttataatttatgttcacacacgctaatcaagctaatttctttactttaataaataactataattggtttttgcagcaagaatcttgaagtgagaattgggagaaggaaatggttcttgaagatatgaaaagggaggaagatttgctgaaacaagttaaggaattatacaggaagcagaagcaagagctcatggattatgtcactcaaccagcagcgacacagacgtcacgtgattcgccagcaactcattcacccgcaactcctgagagtaatctgtttggagccaagctctccaacaagtggcggtaacattttggtggcgtacgtccctattttgttggggcttattgcctgttctggcatcagcacgacgtaactagcttttgccacaagcttggtgttagtttgtgagggtgataggccagtgaaattgttctgctgcttagcatagttggccctatggataccaattgatctataggcagccggaaacttggctaatttattatgactatggatgagacttttgtgatgtaattgatgagactattgatttaaatattgttatatgattgtgtgtgagatgttttatatgaaaatatgttgtgatgttgatatatttgttatgttgtgggatgtggtgtaaaataaaaataaaca

SEQ ID NO: 40207 - DNA, 1975 bp, Zea Mays
cagaccacgcaccagggacctcaccgagcacaggtagggtttcggccaccagccatggccgactccgcgccgtccatcccgggcgtcatcgcctccctccaggcctactccacggccctctccgcctttaccgccgcatggcgtgccgtcgagacccacgcctccaccctcgactccgccctcgccgcccgcctagccggcttctcggagctcgagctgatctgctcggcgatggacggagccggcctccgcgcgtacctcaccgagcacagggacgagctcaaggatcccacgcgcgccctcgacgcagccctccaagttgcgcccgacccggggcttctggtcctctccgcggcagcgagtttctgccgcacgctgccggaggtggccaagagcgacggtagcgtcaaggcgtcctgccgcctgctcatcgccttgctcgaccggctgcgcgcgattggtgtcaagccgtcgcctgaggcgcgcgaggaggccagagctgttgcgacggactggaagcgaggcaagcggatcgggacggagacgatgtttaagcaggagacgttcgccttcttgcatctcgtgggagtgtttgggctcgtggaggatgtgggcggtaccagcgaggtgcttgatcttgtcgtgtcgatctcaggtcgtgagcgcgccgttgatgcgttcgtcgtcctgggcctggacctcgaccagcatatgccaatcctcattcagaaaatggtaaacaaaaacaaacagctagaggcagtcaaattcattcaagctcttaatatagcgcacaaatacgctttgttgcctattatgagatcgtacattgatcatgccgcagttgctggtaagatgatccgcatcaggggagatgatcttgctactcagaagttcattaaggaacagaagctagaagaactgcccatttttgaagaagctaacaagcgaatggcacatttggatcagcaaagtgctgagagaaaaagaactgctgctgcagcggctgcggctgctcgaaaggttagtaagaacattgaggagcagcagaaaaggatacaggagctgatgcagcctgctaagagaccaaggtctgagaatgtggtgaaaggatcttcgggccagaacgtgaactttgctggaacctctactcaacagtttaagccacaacagagcattcataaagctggagtgtcaaatcagtatcaagctgctttaacccagaatgtactgccagcaatcgctcagatttcacagctagttgctgggagccatcgtccagttggcatcccaaatcaggcccttgctgttccgcctcaatatggtagtggtagtgcaaattattatggagtgacgtccaccaggccatacaggcccatcactctacctcctggacctggtgctttgaatggtccaagtgcgcaggcatcttcaagatcaaggctctattctggagatccccttgcggctgtctcccgatcatcagataagaagggatcgtcttacaagtattctttgtccagtatgtcaacttatgatcgtaaatgaggatttgttttatctgccagtggacgaacctagtgaaccttgaaagtttgggtttcagaccagagatttggtccctccgtagatgttaagtcattgtagctaacaatgggccttttttacagtaaaggatgtgggtttgtatctagaagagattctcctacagagtctaataaatattgtaggaattctaacttataaggacaagttaggtgtaatggtgagagttatcttaccgagccaccagatcctaggtttgaagtagcctcttcctattttcattgggtcatgaatttgtagtatctgtatttgcagcggaaagcttaccttgttttatgcctttgtcgtgtgagtcttcggtagtgagtctaccctttagggtttgttcgattatttccattccatatggattggaggggattgatatgga

SEQ ID NO: 40208 - DNA, 1910 bp, Zea Mays
aaacaaaatccggcgccgcagtttttcgtttgggaggagagggagggaaggaaggaatcagattggcgcagatgaggctggagggagaagggaggccagatcagttcaccagtcgacgaagcaagcggcaggaggaggcggactagggagtggttggcgcgtcgccgtcgcgagccagtgagctgcctaggagcgctcctttttagtcgctgcgacgcccgcgcctgcgtaggcgccgtgtgctcctgccggccgcactgagcgtggcgagctctgggccagactcgagcgatcttatcagattatcagctgattgtcacggaagatgtcgctagccaagaaagaagaggtttgcagtcaccgacttgtaccgcgcttggacgagcctgcggttggtgtgcctattaagaagaggccatttttcttgtctgaccgatcggttgcatctgccataccgctctcgacaaagcccccatctccaacgaatacaatgcctgttgctgctacagggtcaggctgccgcgaggaacccttcttcaacatcgctaactcagacagaaaagtcatcaccaaagacagtgctacaaggacgtctgcacccgatgatgaattgcaacttcaaaattttttggctctggatttacagttaccatctcgtcaaagtggcaaaaataataactatagctctcttaggaaggatgagaaactgggccagagtcgttcggaacactacaataacgttcctgttgcaaatgaaatcaatgcttctgggaatagtattgttgggagattgcctaacttggatctgaatatacctccggacccagctgattcacttgaaggtttgcctaaaatgcatgaaagtgggagtgggttctatcatcatagaacaattcaacatcagaaagctcaggtgaccccagccgcagccatttctacgataaacagtgggataggtcgaaatatgtgcagtactctgaacatgtctaattcatatgggctttctcataagtctggaccagctgatgttaccttagatttacaacttaaaccaccaactagacctgagctagggataaactggaaaggacttgctcctgctccagaactgagtctctctctatttggtaagcctatggacgagcctgagtttcctagcacccccaatgccttatttcattctggaactgctggaagttccaaaaaggtcagtggggaggctgctgctacacttgggtcagataaggcaccagttgagaagattgtaacacctgttccctgcaatgtaaatcctctgaatactacatcagcaactgtttctggaattgatcagctgccatctaataatttggtgaagaaagaacctgaagaaatatcccagcagcatattattgacggcgctaaaaagccaaatccattagaacgacaaagtgttggacaagttatcggttgtgctgaatctgaaaagacggacagtgcaccccaaggtgctcgtaaaattgggtttgatttgaattctgacatctttgcaaatagtagtatccataatgagtctgatgtagcagcagttgatgccccaataccagctaaaactttacctgatacttgccatgatacgagcatgcctgctgttcctgaagtagacaaatttgtgaagcatgaagaatccacaagtgccaccctcagtcctgttgtggaaacaggaaatggtcatactacactgttggtggaagcaaaatcacagcgttcgcaaggtaatgttgctagccctgctgttgggttatctgaatcctccagccagcccaccgtttctactgtttgcaagccaacagccggccatattcgtgctgatgaggatacgaggcagaggtcttgtgatactaatgaatcttgcggtgcattaccaagtt

SEQ ID NO: 40209 - DNA, 3197 bp, Zea Mays
ccttccgctacgatacaaaagctcgagaacccacgcacgcgcgcaccccccacccaccccacgtctcgcttctccccaccccgcccgctacagcgccggtggggggcccccgcggctgccggcgaccggtcgccgccgccgaggccgtcctcgccgccccgacattctccagctggcagcattagccatggtttagcggaggcgattctccttgcaggcttgcagctgtttccggggtggtggattttcaaggaataaagaatgatcaacctcttcgaattgagcgttggagccagcgccaaggtctcctcaagagatggctctccggtgagaggaactcagtcggagcggaaggagtacgccggatcaaaggcgttgactggcagcacgaggaggagctcgtcggatagatcgggcggtacgcccatgaaaatgctgatagctcaggaaatggccaaggagggggacgcgaatcagaagaccactaacgttgtggcgaggctgatggggcttgacgataatgtggatcttgctaagcctgtcgtgcccccaaacaggaggagtttcccggacggccatttatctgctacactggcaagagtaaacaaccaaattccatttgagaagcacacgagttccgccgaagatgtggagtacaaggatgtctacgaagttgggtaccagccaccaagaggtgatgaatatccaaggaggaggaggccgagtgaagatcatgacaagagaaggatggatcttgtccgccagaagtttgttgaagcaaagcggcttgcgtcacatgataatatcctccagtcgaaggaattccacgatgctcttgagtctgggggactcggttctgcaccaacatcacctcagagaaagcacattactgtgttgaagccctcgaaatcagtggagatgaagggtgacaaagcaattagaaggcagacaaaccatgcagccggaaacagaacagacaggagcaacgtgcacaagtctgatgcagctcatgtgaaggaagataagcttcccaaacacaccaggatagtggtcttgaaacctacctcggtaattgcttccatggagcaatctgagcaaagttatcatgctgatctcgatgattctgaagcgcctgttctgtcaaggcatctgagtgatgagatagattggtcggtacatggaatttctcgacgccacactgaatctttgcagggttgcatacagtcaaatatgttcggcgcagatagaccataccatcagtatgctgaagaagagggcaatagcttgagtgactcagatattggaaccccaacatcacatcactcttgggagtacatctaccggtttagcaatccttactttggctctttgagccatgcttcttgctcccctgagtcacatgtaactagggaggctaagaagcatgcttctgacagatgggcaaccgttccatccagtgagatgacccaggacaaggtaccagtgcgaagaagtttgagcacacttggtgaaatgcttgccatgccggatatgaagaaagaagaggctgctgaacaagcatctcctgatgctacccaccagttgtgtgagccaacagttggcgtatcatctaattgtgctgttggcgaaggtgagggagaaagctccctcaggaaaatctcgaggtcacgatctgttccggtctcttcaacagcttttgatagcctgcggttagatggtggatgtttggatgctcagcataaagaacctacagtgccgaaggaggtcaaacctaagagtgggaaatcatctttgaagggaaaaatcacgagtttcttctcaaaacgtaagaaagcagaaaaggagaagcctagcccatctcccttgggaaccctgaacggtcgaggttcgtcagtcagcactgtagcagttgctaaaccagatgctccacagcatgtttgtgctagttcacaggatgatgtttccttcgaaagtttagaagaccagtttaatcacggaccaatcggagctccggttgatgaacccgaagcaccctctgtgtctaagcctccagcttcgcttgagaagacgctatcatttgagattcgagcttcccacttcgaccagcccagccctacatcggtttttgatgtacaatttgaggatatcagcgagaaatcccccatttcatcagaaagcgcgattactgctaaacaagagcctctatccaggtctataccaatcggatcgatcgcgaggaccttatcatgggacgacgcttcccaagaggctcctccgcagtgttctaccaaaggagacagcaaccacgagcaggagcagcacgagttcgtcgagaagacgctggcatccgctggcttctgcaacgagaagacccaggacatctttgcccggtggcattcgctcgaccggcccttggaccccgccgtggtcgagcagctgctggaacgcaaggtggaggacgccaagtgccgagagaggcggtcgaaccagaggctcctaatcgactctgtcaacgccgccctgctcgacatcggccagagcaaagtctgggggggcgcgtacccttgcaccgcacggcactattccaacgctccgggagttggcacgtgcgatgatgatgtgctagtgaccgacgaggcgtggaggctggtgaggagctggctcttcgatgacgagaacgacatcgccgggttgggggacaacgcgggccttgcggcggactgggttgtcggtagggagatccacggcaaagggtgggccgagacgctgcggatggaggtggacgagatgagcagggagatatgtggcgaggtcctgggcgagttggttggggaggcgttttcggagcttgccggcgctgcggggtggcattgaagctgcctgccttctattttccctgcttgtggtggcgtccacctgctgctgctgcttttacttccaatccggttcttgtgtgtatattaccctcgtaactgctcaaagtgttccctgctgctgcctctctatctgtgttgcatctctttcagcattgatacattcacggtaataacatttacggatgaatacagctgctgcactgcacttgaaatcctctctctttttcctggccacatgttcctttctctgctatggctatgaggttgcacaacgtaattactacctgtgtgctgtgcagcctgttagtggtataatcgcag

SEQ ID NO: 40210 - DNA, 2787 bp, Zea Mays
atgttcaagttcctcaaggaggtggtcgcgggatccggatcgggactcaaggacttcccctacaccatcggcgagccctacgcatcggcttggggctcatggaaacaccaccgcggtacctccaaggatgatgggtcgcctgtgtcaattttttctctgtcagggagcaaccctcaggacagacacatggttgctggtcgcaacggtgttaagagattacgaacagtgcggcatccaaatatcttatcctttttacacagtactgaagcagaagctgcggatggacctgccatgaaatacacaatttatattgtaacagagcctgttatgccactttctgaaaagctcaaggaactgaatcttggtggtacacagagagatgagtactttgcatgggggcttcatcagatatccaaagctgtgagctttctcaataatgactgcaaacttgttcatggtaatgtatgcttggccagtgttgttgttacacaaaccctggattggaagcttcatgcttttgatgttctgtcagaatttgatgctaataatgaagcctctggtagccccatgttgcaatttgaatggttagttggaacacagtacaagccaatggagctgtcaaagtcagattgggcttcaattagaaaatcacccccatgggccattgattcttggggactagggtgtttaatttatgaactattttctggtgcaaagctggctagaacagaggaccttcgaaatactgcttcaatcccaaagtctctacttccagattaccagaggctcttgaattccacaccttctcgtagactaaatccttcaaaacttattgacaacagcgagtttttccagaacaagttagtagagaccatccagttcatggaaattcttaatttgaaagacacctttgagaaagacagtttttttcgtaaactccccaatatagctgaacagcttcctcgtgaaatagttctgaaaaagctgctccctgtattggcttcttctcttgaatttggttcagctgccgctccagccttaactgttttgttaaagatgggttcctggcttcctgctgaccaatttaatatcaaggtcttgccaactattgtcaagctttttgcctccaatgaccgagctatccgagcatgtcttttgcatcacataaatcagtttggggaatcaatgtcagctcaaattgttgacgaacaagtttttcctcatgtagccactggcttctctgatactgatggtactattcgtgaactgacattgaagtcgatgctcgtattagcaccaaaactatacttgcagatgactgattgtctggtccgttattgcagttatctcagcgtacaatctcaggatctctcttaaaatatctctctaagctacaggtggacgaagaacctggtatcaggacaaacacaacaattcttcttggcaatattgcaggctacatgaacgatgggacaaggaagagagtactgatcaatgcattcacagttcgtgcattacgtgataccttccctccggccagagcagctggaatcatggcactgagtgtcactagttcatactatgaaatgacagagattgcaactcgcatcctgcctaacattgttgtgctcacatttgacccaaatagtgatgtccgaacgaaggcttttcaggctaccgatcagttcttgcaaatagcaaaacaacaccatgaaaagcttaatacaggagacaacagtgtggctgaaagtactggtgttaagttaaagcctggaaatgcaggtttacttgggtgggccatgagttctgttacacaaaagggtaaaccttttgaccatgccccaatatctactgcaaatgccaataattctcaagcatcaacaacctcgactgccactccagacactcaggcttccacactagcgtatgcaccatccacatccacctcgcttgatcaagctgcatcagcatcagcaaggtcgtcagtagatgggtggggtgagcttgaggatggtaatatccatgaggagaatagtagcgataaagatggatgggatgatgtagacccatttgaggacaagccatccccatctcttctatccaacatacaggctgctcaaaaacgtccagtggtgcaaccaaagcaaccggttgcaaactcatctaaaccaaacccactgaaagcgccaaagtcagaagacgatcctttgtggggtcctatagctgctgcaccacctaaaagtgcagtaaaatctgcagacatcaagccatcaacatcacataatgatgaggatgacctctggggttcaatagcagcacctccaaaatcatctgggaagcctttgaagccagctgtagcgaatagtgacgacttatggggtgccatcgcagcacctccaccagcaaccaaagccagacccttagcctcgtcaggtaggggccgaggaacaaagccagcgcaaccaaaacttggtgctcaaagaataggaagaacatcttcaactggaatgtgacgtcttatgatatcaagtgttgtacaagaatgcaaagttttcctttttttttcccctgccttgcgttgagtctgtccaggatgacattctttgtaaactagtaaaaagatttatgtatatgagcacagttttgaccaatgtattagtattattttaccattgtgtattaaaatagatccagaagatttttgcacatcacagctgcaatcatcttaagtccatattattaatatattgctatgtcttattttggcgtgataagagcaacttaatg

SEQ ID NO: 40211 - DNA, 193 bp, Zea Mays
tggcccgatgaaatgaacaagacgtggccataacctaaacttgataaaaggagtatgatgggagactgttatttcagcccaagcatattttatgcccatcatagagattacaaggtcaaggattagtatctgattagatacagaggggaaacaatcataagattaagttggtatgccttcgataggtatgggg

SEQ ID NO: 40212 - DNA, 443 bp, Zea Mays
cttcttctcctggccgcagctcccttatctcctccgtgtcagctcgctcggcctccagcgctgcccgctgccatctgttgtagcgtcacaccgctgctgtggagggaccgagggagcagagcaccggagtagccaccgccgctgggggagttccaatcgcctggagtagccgtacagacaagcaacgatggcgtgcagcagcgcgtggtggaggccctccgacctccgatttgaccgtcgctccaagccctctgcacaccggcgcgcccctctggctcggttttgcccagcgctgtgcatcctcctctgcgcagactgctcatctccctcctctgctcggcgcgtccctggctctagctcggcctgtgtgcccctaagctctcccatggtgctaggcgtttctccttgacgcgcgttccgccttgccgtctccctgcgcgccg

SEQ ID NO: 40213 - DNA, 1025 bp, Zea Mays
gccgcccccaccgcggccgcccaagctcgcacccgctgcggctacccctagccccggccccgcccgccgcggccgcccccgcccctggccccgccaggggatccacgccgaggacgactacccgtacctcatggaagaaggctgttgcaaagagaaacaagttcgcacacaaaaatcttcacatgtgaactggatgatactaggatgcagggttctaatcctttgctctggcgtgcgtgtttagccccaagttgatgtcgtcactataactgggtacgaggatgtcctagagaacagcgagatcagcctgctgaaagcgttggcccatcagcctgtcagcatcggcataactgcagggagtagggacttccagttctacagagggggggtgtttgacggggcctgcagcgtcgagctccaccatgagctgacggccgtcgggtacggctcgtcgtatggccagaactacatcaccatgaagaactcgtggggcaagaactggggggagcaaggctacgtcaggataaagatgggcaccgggaagccagagggtgtctgcggaatctataccatggcctcctatcccttgaaaaatgcaacacgctgggggcgatgtccggagagtaagaacgaggcgacacagtatggactcgatatgaccgagcaacaatatcttgagcattcgattccatggatagctgccaatgatgctgcttggcgtgcgttttgtcgttactgggcttcggctgaattcaaggcaaagtctgtgcgacacagttctaatcatggaaccgagtcatatcacaagtatggaggtgatgatcactttcgtttggcaaaacgaatggaagctagcactggtgcagtgcctagtgatgttcaaatataccttagggggcacagaggaccagatcctgcaaatctagatgtgttgtacagccaaaagcaacagattgtgtggctgcatatggtgaggcgatgtctagtcagcatggaccaaactatgattggaggacctcacatat

SEQ ID NO: 40214 - DNA, 1960 bp, Zea Mays
gacgacgcaggcgaacggctgacgaacctgggaggcccaaatccggcccgtcgcggaccgcctcgagtggcgaccctgatccatcctcaacaggcacgcgcactgtctctctcgtatcactctccattctacctctctcttccccaatccaggccagccaaccctagcgcaccggcgatggcgtcggacccggcccctgacgacgcggccgcggccgtgaatgggcacggcaacgacaacggacacggtaacggcccgtccccgtcgaagcgcccccgggcggtgatctcggaagccgagatccgcgtcgagttcgcacaccacgacgcagccgtggcgcgcgtcaacaacggcagcttcggctgctgcccggcctcggtcctcgccgcgcaggcccactggcagcgcctcttcctcgcgcagcccgacgccttctacttccacgttctccagcagggccttctccgctcgcgcgccgccgtcgccgaggtggtgggcgctggcgacgtctccgaggtctccctcgtcgataacgccaccacggccgccgccatcgtcctgcagcacgcagcctggagcttcgccgagggtcacttcgcgcgcggggatgcggtgctgatgctccactacgcctatggtgcggtcaagaagtccatccacgcgtacgtcgcgcgtgcgggggccaccgtcgtcgaggtgcccctcccattccccgtcgcgtccgccgacgcaatcattgccgagttccgtgctgcgctcgcggtcgccaaggaaggagggcgtagggtcaggctcgcagtcatcgaccacattacctccatgcccagtgtcgtcatcccagtcaaggagctcgtcgccatctgtcgagaagagggcgttgacaaggtatttgttgacgctgcccactctattgggcaggtgcctgtggacgtgcgcgacattggagccgatttctatacaagcaaccttcataagtggttcttttgcccccctgctgtggcctttttgcatactcgcaaggatgacccgatagcctcccaactccatcaccctgttgtttcccatgagtatgggaatgggctgcctatggagagcggatggattggaacacgggattacagtgcccagcttgttgtgtccgaggctatagattttgtgaatcgatttgagggtggaattgaggctatacgaaaccggaatcatgagaaagttattgagatgggtaggatgcttgctgaggcatgggggacttttcttggctcacctccggaactgtgtggtagcatggttatggtggggatgcctggttgccttggtgttgagagtgatgatgatgcaatgagagtgaggacaatgttgagaaaggatttccaggtggaggtgccggtatactacaactcaagaagggtggaaggacaggagatgacaaaggataaaaatggtgatccagtgacagggtatgtgaggatctcacaccaggtttacaatgtcacagaggactatgagagactgagggatgttgtcaataaacttgtttctgaagggttcaccagcagcaagttgcggccttctgagaagacatagtcccacagcccatagttgaaaagcatgacgcatggatgctcaatttcacacacctattgcttacttcacactgtgacaactatagtgcaagaagcttaggtgtaatgaccttccagccaggtagcatccacctgaaggcgctgtggccgactacttaggtgtggaccggatcagcgcagccagtacggcttcgtgatcgtgacgttgaagaatgtagtgtaccgccaggaactgacatgtgttgtatttggcgttcagtgtaagtaacaataatgccctggcatgttgtcttctctcacattttgggagctgctgtaacctcagaataatctggaatataaggatatttacagctgctgcaataaataaataaaaa

SEQ ID NO: 40215 - DNA, 4721 bp, Zea Mays
gttgactttaaaacgtagctacagtaaaactatgaggagagagaaggggtcgtcattactgttggctgctgctgaactaccaccgggtgcgggtagctagcgggtagggtaccaaaacggcggcgctagaaaggaaaacctgccgtactgtcccctcttcccttttactgccgcctgccggccgcgagggagggagggacggaggtgctcatctgtgcggcggcttcggtgtcggtcccaggggaggcggggagccatggcgcggaagcacggctggcagctcccagcccacaccctgcagatcgttgcaattacagttttcttccttctggtggttgcgttttatgccttctttgtgccgtttttgggaaagcaagtagttgagtatattgcaattggcgtttatactcctgtggcacttgcagttttcatcctttacattcgatgcaccagtataaaccctgcggatcctgggatcatgtcaaagtttgaggatggccttatcaatataccaaccaatggctctggaatagaaggcatgaatttgccccagaaagtaaacaatgctacaggaacaaactctccaatgtctacttgcagaagttctctagatgggcattctaatcaaagaggttcatccataggggaggcaaacatgaatctaggatcacaactgccaaagaaaagatcaagctgttggttgctaggtgggcttctatgtgctacatttgtcaaggaagactgccgaaaaactgatgactcggagcagcaagcaaatggggaggaggctctgttttgcacattatgtaatgctgaggttcgcaaattcagcaaacactgcaggagttgtgacaagtgtgtggatggatttgatcatcattgtcggtggctaaataactgtgttgggcggaagaattatttcacattccttgctctgatggcaatcagtcttatctggcttgcaattgaatttggagtgggaattgctgttattgtactatgttttgtcgataagaatgcatcaagaaatattcaagacaagttggggaatggcttgactcgtgctccatttgctgttatcgtgggcatatttaccttactttcattggtggcatgcatacctttgggcgaacttctctttttccacataatattgataagaaaggggattacaacttatgattatgttgttgcaatgagagctatgagtgaggcagctccagaggacgaggaaggagaaaatatcatttactcgccatcaaattcagcaacaactgggttcagtgtaggaagttcacttggtattcaccacaaaggtgcttggtgtactcctccaaggatatttatcgatcaggatgaagtgatcccacatctggagcctggaatggtgccttcaaccgtggaccctgatggtgctggatatccggaaagagcaaatagagccaagaaggcagtcaaaatcagtgctcgcagcctcgcaaagctcgataagaatgaggtaatgaaagctgctgcaaaagctcgggcatcatcctcggttctgcgaccaatagatgcccgccatggtcatgaagctgatgtcatctccagcggcagtgccagtgtcaggagcagcatgagtgttgactacagtggcacaaaggaatcaaacagcgagatgaaactttctccgcttcataactcatacccccaaagccttgcaagccaggatgaatacgataccggcacaccaaccgcaagcagtttaagcagtctggtcaacatccacaagcttgcatcccactctcagttcagtgctgcgcctcgccctgcacctccggaaagacctgtgccggcgatggtgcggccacctgttcccaccacacaaataaccaacccagggataccgcggccagctgttcccacaacacaaacaaccaacccgatgttccaatcagccacatcttatgttcgagagaaccgaagggcctctgtcgtctgggatcaagaggctggtcggtacgtgtcagttcctgcacagacaagaacgggaactggagccgacctgccagcaagaaacccacggttcttggcgaacccaagtggcgagccaagcagccatgtgaggggtgttgcacccggcaacacatcgtcctcagcaatgccgtcagggcagccttcggagaggctgacctactctgggcagtcgatattcttcggtggccccatgctgaacacccctagcctgggcgcccagaggaacgaggcaggcgcaagagcgcgtccggagggaagcagagatcctaatgcccagcagcgtgacatccggggtgagaaagcgaggacaggctccttgccagtatttgctcctgggacgatattgcagaggcagaaggggcaagcagataaaacctcgcgggctttgctagtttgcttcaccccttcccttctccccaccgcccccgtccccgtcccccaccactggcactcaggtgaagggattcctgtgccgccgcctgccctcgccttctgcctcccggcgcccactcggccttgcggataatttgcggctcggtcccgggcgtgctcagtctcggttccagtggccgcttcgatgtacctgaccgccgtttccttcccccccgcagccgccttctcgtcctcatcccagaagctgctgcctaggtcggccggggtcggccggcgtctggtggtgcgggcagacgtcaaggtcatatcgacgggcgaggcctgccgccgcgggctcgccgccggcattgacaagctcgccgacgccgtcagcgtcaccctcggccccaaagggaggaatgttgttattgaccaagatgatgtacctaaagtaattaatgatggtgtcacaattgccaaggctatagagctcccaaatgcacttgagcatgcaggtgccacgctacttcaagaaatagcatccaagacaaatagcgctgttggtgatggaactacaacggcaattgttttggctcgggaaatcatcaatcttgggttgttggcagttgccactggtgctaacccagttgcattgagaaggggtattgacaaagccgttcatgagctaattaagatcttgaagagtaaatgtatccctgtgagtacaaaggaggacataaaagctgttgcgtcaatatcatctggcaatgatgaatatgttggtaatctcattgctgatgcattggagaagataggtcctgatggtataatcaaaattgagtcatcatcttcaatatacactacagttgaggtgcaggaaggaatgaagatagacaagggatatatttctccatacttcatcacaaatcaagacaaatcaattgttgaattcgaaaatactagagtgcttttaactgatcagcgtgtgaatgatgttcaagagatacttcccttgctggagaagacaacacagttgagtgtccctttattaattattgccgaggatgtgtcgcatgaggtatattcaacactggttcttaacaaactgaatggattgctaaatgttgcggttgttaaatgtcctggtttgggagatgaaaagaaggccattctccaagacattgctattatgacaggtgcagatttctttgctagtgaccttggctggggtcttcatggcattacttctgatcagcttggtatggctcagaagatcacaataactagtgaatccacaactatcatagcacatccttcaatgagaccagagattgaggccagaatcatgcaactgaaaaaagatctagaggagacaacgagttcctatctaaaagaaaggttctctgcaagaatcgctaaactttcaagaggtgttggagtcatcaaggttggggcagccactgaagctgaactcgaggataggaaactgagagtagaggatgcaaagaacgcaacttttgcagccatcagtgaaggcataactcctggtggtggggtgacatatgttcatttatcaaagcatattcccagcatcatggaccttgtggacgacacagaggagaaaatgggtgtaaatatagttgggaaggcacttcttgtccctgctatgacgatagctcgcaatgccggggcagacggtccagctgtcgtggagaagcttctcgccagcgagtggcgggttggttacaatgcgatgactgacgagtttgaagaccttgtcgctgctggtgtggtggacccgtgcagggtcgcgagatgcgtgctccagaactctgcttctatcgcagggctgattcttatgactcaggctatgatgtttgacaagatcaagaagaagaagtctcccatccccgagattcctggtattccaccgcttcagataagccaaaaagctaaggcttgagctgttggatgctgccctggtgttgttggctggatgagttgtgttgacctaggaagcagcagaatgcccagtgagctgcccaaaccaggtagaacagtgagcacttggaatgcccatgttacactcgttatataatttggtggtcggtgcagtattacttgtcatgtctgcataaattttgcattggcgggtgagtcggcaaccaatttatgtctgacttgggaacgtaaacgaacgaatggttgatttgttgctacatagagggccccctttgggcatcatctcgagcaaagctattttgccttgtatctccctttgaaagcagatctgtttcatcaattaacatacgaggtaacacagtagcttgtag

SEQ ID NO: 40216 - DNA, 6229 bp, Zea Mays
tccgttgcgtaccatcagagatgatgtgggctgctgcttcttggattgctgcccgtctgttcatcctgggagattgggaatcttatctctaccatatatatatatcggcggtgtcgcttgcacgccttcatcggctacgattgtttacgaacaacgaatccgagctgaataacctgatgatgctaccaacttagacgacagttgaactctctgtactcgtatccgtcgaagcgtttgcagagaggttggcgaggcagtgcaggcaagagtgcagcgtcaaggcggggaatcaatagttgaagtagcagtcttgtgcttatctggtcgacagaatcagagaaggtagggccatggaggggaacgcgaggaggacgatggccacagaacagggagggtggcgttgagtggtggccgcgtggcgggaggaggatgataatattcgaccgcaggaagccggatataatggccagtttgggaggtatatttttccaaagattttttatttttccaagagaaattagtttattttcttttagaaaattacaaattttatggaaaaatgggttctcaaactagctctaaatatattttttaacccgtggatcaacccgtatttgatccgaagtcggaccggtataaattaggatattatctcacacgtgtgggatatctgttggataatcaaaattgaccaataatttttttgtctagactatattatacagcaaagaacaaaacctaactccatgaacctcatgtataatgctcccaattctcctccattgaccggcctttctagtcttgttggtttcttgcaatgtgccttaagccccattccaaatatcataggtcgcaccaccgtaggcggctagcactattcaagctccaatcaataataattcttttattaaatttttaattgtgtataacggtggaaagaaatttgattaattatgttattcaatcgttaaaaaatgattgtgtatgtcatatccgatagatattcgaaacccgtccgaaaccagatggccacgggcatagaaataatttcctacccgcggatatgatcacggatggatattagttgcaaccacggatatagttatgggtagatatttgcaatatccaatttaaatgtgacccgttgacatccctttccactagcaaattaggtgtatccatattcggtactgttgtggacttgttctcaaatgctatgaattaagaacaaggctacacaaaaataggttaatggttaatgtcccttcgtccttcgaagcattatttcctcaaggatataatgatcttcggacgaaggttaccaatgatataccttcatcatcacagcttatatatatatatatatatatatatatatatatatatatatatatatatataaatgaaagacgaagcatatgaaacatgagaaataacataaataatcatacgacattggtaatgtatctctattacactatggatgaatgagaacaatattgaattatatttataccttcggcttgacagaaggtaaaaagtccaagcgtgacgcacaaacgaatacaagtcagcgtgaatagtagggggtactattcatctatttataggcacggggcgcagcctgtgtaaatttacattcatgcgcttcatatttactattgacttatggacaacctaatggggactagatagtcttttcctctttatgtcggtttctttttccgccattgcgtcgaagctcccttgcgcgtagcttcggagcaacatcagtcttcgtctcgaccacgcttttcacatcgtatatggttttaacccgaatccgaaggtacctgttcacgtgttacacttggaaaacattgttaaattatgtttttgaggaccttcggaagacgaagacctccaacaggtacaaaaatgacaacctaaatataatcgatttaaaaattaaatatatttgtttttgacaaatgatagcctaaatataattcattttaacttgttgcactagaagatgacacgaataagggtgtgtttaggagtgccctagtttcttgcttcagtgtaaagctgtagtttacaatttaaatttaaatagttttaaaaaatattttaaatataaataataaataaaataacttatatcaaaatgtattttaaaggtttacaacttcaacttcacgattttcttaagatcttaataacctccttcaccaacttctgatatccgacctaatgaagccggatatggatacatttttgacctgtgggtcagccgcatatccgacccaaaattgggtgggcatgtattaggacattacctctcacccttaggttatccattagatatccgaaatcggaccatagtttatttttagcctaacacatattattacacaataaagagaaaaccctaactccctaaaccccaagcactcccaattccacaccgttgatcactctttctagccttgatgacttcctgcgctgtgtgtcgtgtccccttttaagtcccatagaccgtagcaccgttggcgtctggtcgacggctacagtgcccctggccgcagcctgcaccttgcaggtcatcccctctaatgcttgtagtcgccacttcttgcttgcacctcaatcctactgtagtcgcccttccaactaccactcactcttcagtccacgttgttgctacccattcacgcttccagtccaacgccaacgagcctcccccgccactttcatgcggtcctcgactcccaccccttctagtccgtcgacccttccatgttgtaatattgagaatattgcttgttaaaaaacatgtgtattgtataattttttattaattttttaaccgtgtatgatagtgaattgggaagagatttgattaatcatgttattgaattgttgaaaaagattgtgtcatatccgatggatatcagaaacccgataggcacgaacatgaatataattttttaccctcaggtatggtcgcgagcgaatattagttgcaaccgcaaatatgactgggaacagatatttgcaatatctaattttaatccgatctgttgctatccctaggatataaagagccgcccccaatccacatccaagataacaaaattggtattcggagaaaatgatgaaattgcttggataaatatcaatgtatgacgggaaattcacataggtgcacatatgctatttttagacaaaatgatgtgtctaaaggtgtgtctaaatatactagaactaatagttagttgactaaaaaatactagtggaattagctagcttacaaatagctaactaactattagctaatttgctaaaagtagctaataacaaaactattaactagattatttagatatattcaattaattttaacagttaactattagttttagcacattcaaacactcctaagcttctatgctggtttcgtttatgacccgaagtttatcgagcaagtaacaatgatatagcctcaagtaaaaagatataaaagatacatcttacttttgttgtttgctcgatgtcatgacttggagctatatatttgggcagaacgaagagttgtgcattactatcctcatgtattgttgactcgacatttggctcgtggatgtggtgtacagctccgccatcagatggactgtattgtttgtcatcttcgttggagtgcttgagtagctgagattcacttagagatggcaatgagcgccgatcccgatttctcgtagggaattcctctattagagctaatcctcttcttattcaattttaaataagaagtgtattctagcccctacaatcatctccggttttgtgccttccaaaatagtccttagaggatgtggatgagaaagtttcttcctcaaggaaatctaaacggaggaaaatcttcccccggtaggtaaacggggatatggaccgggaagcattcctcatcctcgctccccgcgggacccgttaaacctgaacgtgacaaagttttcatgtattagttaatgataaaaataaataattattttgtctatagatcactcatttatataaatatgcttattttaatgtatatataatgatttcttacatataacaatatgtataagtgaaaatgttttgcattagtaataaataatgtatgttctaattataatttaaacgaggatggcgatccttgtcggggatttatctcgaaacagggatggagaaaaatatggcccgcaaacgttcgtgagaatctttataggaaaaattttatgtcgcatgaacatgcataaaaagctattccctgacggtaaattcctcgttgtcatcggaccgctgagtcatattttgattctatacaaggtcatattcgcttagctctagatcccatactgtccccatgcgtattttggcttatttctttttgtgtgtagtttattatcaattcgtttagttgtacttctattttagtaccacggacgctcgttttgtttcgcataaatatagtactctctttgttcttttctatttatcattgttttgtttaaaaataaatttatggacgataaatgtttgaggaagagtgtagtaataagcaataggtccgattctattgttacagcatcgagatactacttatctctactatacttaaagcatcagtttcaacggtcgttctatgtcatatttttacaaataatccctcacatctatctcaaattaaccatgcatccttccatgcacacaacttccacgtctggcccgttaccagtcgggtggttaaattagcgtaaaatatttataaaatgtggtgttcgaacctaagccctaatggaagaagggcgggagacactaagtggagtcgtctaaccagtagaacatcatggtcaattgtttttgatattgaatataaattttacatatatacgagttttgtaaaataaataaaaatataatcgtgtcaggccggatcagcactacgggccgaggctacagcccaaacatgacacgacgatcgtgtcgggctggcccaggaactattaaatggtccgtgccccagaccagcccgccaggcacgacccatttgtccatctataccttcgcacgataatgatggtgctcacctcagttgccgccacctcgttcgtcattctgcttattttctctctcccctcatgccttcgcctccgtgccacgcattctcggcagacggcgtgggagcaggcgtctcctctccgtattagtccgacaccagccccgacaccgacccgcgcagtggctattgcacgtccacgagggtgtttcatagcatgcacgcaccatcgttttcgctgtcgtcggacgtcccgttcgtcttcttggccttcgcccttttctttctccccaacctgctgcccctgcctacggtcgcagccgtgagccgaccgacgctcgtcaacgcgggtacgggcaagtcaatcttgctcctaacttttcttcgtgcgtgttgccgaggaggacacgacggtgcctgccacacttaggttatcttggcgatgacgagtccagatctgagatattggacaatcaaagcctgtagcgcggcagtagtcgacatatgctacggagttggtggtggtgttgtgtcgcctcggcggatccagggctggaaggcactcgcattctctcgcctttttcggactgacgcctggtgcgggtgcctctcggtttggagttgccctgattgggcttctttctccgcttgtgtgctgtctccatgtatgtatctagcggtatattacctatgtcgcctccagatgtccatgtcttcgtcgtgtccttctccggcaacgaacatgtatgactgcctctttccttcccttcctggtctacgaaactttggaagtgggagaggcgatggatgaggtccctgatttgctacctatggtacccattcgatggtttgacatcgcctgtctacatgaccttttctttaccacgatgtcgactcgcttagtcaaataaaaaaaattatgcagaaagcagagacaatcaataaaaatctttagatctttttggtgcatagtttacgtgggtattgttatgagttgttgcaacgcacgggcaaccgaatagtaacagattaaaacgaaacaaaacacacacaagtgcgtgtaccgttaagtatatcaaggctcgtttgatttgatatttttatttctttatcatgccctttttcaacatatgaaacgtagcg

SEQ ID NO: 40217 - DNA, 1640 bp, Zea Mays
gtccgccgtagtgatgccgcgcgatgaaggccgcgcgggggagacgctgggaaagccgcacctccgcgcccccatcaatcccgcccaccaccaagcttgccgcctaccaaacccgccagctccgcgcgagatccgccacagttatgccgcgcgagggagatggcgggatagccgctaggcagatccgcttgctcgcgagggagaggaaggaaggccgctccgggctaagcagatgcaagtcggtttggatccattaaagtttcgtagccatggaccatgatatgcagctactgatctgcaggtgcttgtcaagaacaaccggccatgcccggggttgccagggaagcccgtccacggtgtcgcaccattccccgcctcgaattcggggtctccaagcccggacgccatcagcacactccgtcagcgatttggaaaccgcgcagatccagaccatcaacgcctagggtggaggggattcttgcatgccgcgcagatccaggccattccccgcctagctgaattttttcatgaccttcacgaagaggtaatggccactgcttctagaggacatggtttattgatccggttgcagcagttagaggcagaattttcaatggttgaaaaggctattgtatctcagacggggcactcaaattacccacatgatgatggattattcttcagatttgatgttgctgctggtgctggagcctcaaaaagaacctgtgaagctggttgctactgttcaacagttcagaattaaaatagttgttactgtacaactgcattattgcaccccttcttgtcgtagcctctacatgagatcgaagctaactgcctggggagcacaaaagcgaatgaatcatgctaataacagggacatgttaaatcattgaatattaagaccgacccgccatatttgctttcggtgagcgacgcgtgcctgtccacggccacgatccgggtctccccgcccaagtagcagagcgacttatcggtcgggcgcgggacgatccggcccccgaagctgcacatcaggcggagctggccccttcgcctcgcccccatccacctccccaattggttctcgttcttcagtgcacgatatcaatccactaaggtgctgggtgcagttaatttcccaaactatatttgggggtgttcagcaaaaactgcgtcaactgcgcccgtgcgggtgagggatcactagaggctggactcgcgctagagatggtcaaggcaaaagcaagggtctgatatgatattgacattcccttagttcctttgcgttactgcgatggtgtgaatggggacgcttcgagtgctcagtattctgaataatttgcaacagtttgataaactgctcagtactctgaattggaattcattgttttcattgcattttcctacattttgctgcccatttaattcaatgtgagtaggagtatcacatttgcatatcttcttcctaccataaagcttaacaagttcggcttgccttcttgcctaaaattgagttacagtatactttcgacagcgcaccttgaatacttgtatgctgtgttctttgtcatctgaactttgtgtgaactgttgtagctatgagcctggaccggcttttgaggaggtcaaagaataag

SEQ ID NO: 40218 - DNA, 1876 bp, Zea Mays
tcgtttcctcctcccagtccaagtctccagctacgagcctacgactgccaggtctccgcttgtcgccgtcacgcgcgcgcaggggcagggcgcaccatccccgcgccgccatgtccggcaccgggtgcctccccaccgacggcccggccctatcccgggtctgccgggacggcgcggccgccgcacggctcaagacggggtcgctgctggccattctcgtcgccagcgccgtcggcatctgcctccccgtcgcgctcacgcgggccttccgcggcagcccaaactacgcgcggggcctgctcctcgtcaagtgctacgcggctggggtcatcctctccacctcgctcgtccacgtgctccccgacgcgcacgccgccctcgccgactgcgccgtcgcctcgcgcaggccctggagggacttccccttcgcgggccttttcaccctcgtcggcgcgctgctcgcgctcctcgtcgacctctccgcctcctcccacctcgaggcccacgcccacgtcggcgcccaccacgaaactccctacgccccgatcccgaagaaggtacccgtgttcgagctcgccggcgaaatgagccccaagaagcgcgctttcttgggcgacgaccgagaagaggaccccgcgccgcacgccgccaccaacggcgcagacccggaccgcgacgacgtggcgctcttcggacccaagaagggcgcccgcagcgacgaggtcccggccatcactgccgggtgccatgccgtcgcccatgaagtggtggaggtaggggaggggcccggtgaggacgaggaggaggccaggaggaagcagaagatggtgtccaaagtgctggagattgggatagtcttccactccgtcatcatcggagttacgatggggatgtcccaggatgtctgtgcaatccggccacttgtggttgcgctctccttccatcaggtgttcgaggggatgggcctgggcggatgcatcgcacagcccccttgtgtcccctgatccctccgtctatggagtttaaaatgattcctggaccctggtcgaaggttccccgtggtccacaacaattaacctgagctggttttgggatggcaacagttggctacatgtgcataatgttctcagtgacgacgccattgggaattcttcttggaatgctagtgttccacatgactggctacgacgatagcaatccaaatgccttaataatggaagggatccttggttcactttcggctggaattctcatctatatggcgctagtcgacctagtttctcttgattttttccacaacaagatgatgtcagcgtctttgaagctgaagaaggcgtgttacattgccttggtgcttggatctgcttctatgtcggtattagctctctgggcataggcattttgaagaaaagccttatttacgatcttcagaggtattgctccttgatgtaaaggaatggataatttgggggccaacagtacactagtccctcatgtaaatttgaacacaaaggaaactgaaaattcacgaccacagtttgtgagctagctgtgtatactaagggctagtttgggagcctcaaacccggagggaattagaggggctaaaatcccttccttattcaattttgaataagaaggggattttagcccctccaatcccctccgggttttggtcttccaaactagccctaaggatgtatatggttatggaaaagtagctgcaagatgtgggatgtagaaaagctgatgtgaggtatgatctatgaaaaagttagccatttggttgagcatcctgcatcaacatacatctacatttctatccacccaactttctcctttcactgatgagcggatcctgcttgtcagactatct

SEQ ID NO: 40219 - DNA, 3882 bp, Zea Mays
cagccacccgcctgccgtccgcccccgcgcttttctttttaccgccgaggcagtgaggcccctcctccctctcgccgttcccaccacttcaagatccgatccatcgtccgtcccatccaatcgccccctctccctcgtgatcccgacgccgacgacgacaacgaaacagctcagtttcgtgtttttctcccgtaccccgcagccccccacacggccacgccccacctccgaatcacaagggtggcaccgtggcagtacaagtagaaacgtcgagtgaaactgaaaccgggggaggggtcgtgggaagaagcaaggccagcagctagcacgcgggccgcaccacaagcgcgccggcaccggccacctacctggtcgcccaacctattgcctataggctataggagtaggcgggagggggacgatatggagtagcagtagccagtaggcagtgtagcactgcggcttctactaccaccgcacctccaacccccgtccgatacctatccaccacaggtctctatccagtccacttgcccttcttctcatccgtcactgcagcgagctctcgcttcgtttccccctttccctcaggactggcagatctgttggtgtgatccccagcttggatcttgttgattcggtgatttgagtagccgattttcttcgagcaaactgaacattattgtgctgccaaaagctgtcggtgggcaagcccctggtcactgcagacatgcagaaacagcataaaccatacattcaggattctcggcagacaaaatgatgtttttaggaagtgtggttttctcagtctctgtttgaaccacaacataccaaactgaatcaagtgataattgtgttctgaccatacgccaagttatacctgaaacttctgcttcatatgttcacccatcataaagatgccaacaaaagttcaggttagcagcgaaaggaatgtgaagatcatatcaggtcgagatgggcaaaagaagggaaattcacagcatgaccaaattgtacgcgtgccaaaggacatggtcacaccagtcaatggaaatgtagatggaaaatttgaagataaagttagagttgtgaagaatgataagttccgaagacaacgagagtcttggggtggggaaagggctgcatgcatgaagggctcaaaaccatggcctggtcgaaaggcaactactgttgatgaacttgtcaaacatatgtcaaatgttccttcatatttacagcgtaaagaaacttctgagcatcttcaagacaaggcgctgaatgttggagttcttgagtggggtcttcttgctaactggtctcagcaacaaaagcatgagctcgctagaagccatggagcatctccatccaatactagcaggtctgtactattctcatctccatcacattcttctgcaagccccagcagcagatctcttgagagcaatcaatctaccccaattagtgactatcatcattcatccatccgagcccagcagagtaggctcgcagataaacaccatgggaaggccagatgttcgcctagcccaaattctgcggtactgagcttattgccaggtcatggcacacatccctgtcaagagaatggttgtaattatgttgacttggatctcaacaatgtttctttagcctcagactctctaggttcttcctctcgaagttgcagtagacatgaaatagttgaagatgaagagactagatggaagattgaagatgttgtccatcattgttctcgtaggctttttacagacagtgataacattgggaaacatttcttcacatcaaataacaaagattccatgtgtaatgatcctgaacagagcagtggcttggattgtgaaaattttgagtcactaatatctgatgctgtgatggatacagctagaaatggcagtaggtcacctgattgtttcttggaggatattgagacatcccgtgaatttcctcgaatcccatattcatgtccacttcccatcatagattcagcagctaaagagattggcaccactagtactgaggctggagataattttattggtacagctgcaaaagtaagtaagaattctagcctaaaccaatctgccctgaatgccactgagaatcctccccgatattctgcaaagtttagtgataggatgcctgatcgccatcaaggttctgtgatgaatcgagtgagccgcagctctagcctcaaggagtcaccacatgctcgacaacccaatgtagttcctcctgttgataagacaggagatcggtcatcacccaacagcaaaggtaggcgaagcccattgaggaggatgttagatccaatattaaagccaagacattctagtccaatacgaccttcatttgttccaaaatgtcatcttccagtcaataccaccaagcaatctctggacttagggggatcagtgccacagaatatgcagcgaaggtcagttgatttggtagtcaattcgaattatcgaattgaagcaaatacaaatcagccacctcgtgtgctattgaacagtgcaagatacatccagaaagaaaaggattcaacaacaacaagacaagcatttctgcagctagcatggaagaatggcttgcctttattcatgctgtcttatggcgattctgatatcctggcagccactgttagaaggaagggcatctctgaaaaggatgatctggaaagcacatatgctgtattcactgttgaagaacctaagaaaaaaagtggagcttggatcaaggcagggggcaagaacaagaaacaccaccttttgtctagcatagttggggaaataaaggttgcacgtcgaaaatcaagatgtcaccatacagcagatgttcatgtatacagggaatttgtgttgcttggttccggatttctaccatcatctgaagaatcgggtgattcacatgttagtggagagtttgcggcttttattagtgcacttcctcagcaagaagcagaaacttcgaatcaatcatcttcacagaataccagacaaaaaaatttagcactaactggctgtggttgccccccactgggaaacttccagcctagttctgcttcagccaatgttattgcagtacttcctgatggcttccatggcaaatcaacgtctgggcagccgttgcctttgattgagaggtggaagtcaggaggagcttgtgactgtggcggatgggatgaaggttgcatgctgagtgtcctcactgatgcggccgaagaaaatgatgccgttcaggctaaccaggcaaaggatggcagccagcgatttgaacttctagctcagggtggatcacgagaagataggcatgccttcagtatgacttcattcaaagaggggctttatacagtggaattcagatcatccattgcattacttcaagcttttgcaatgtgtatagtgatgctacatgggaggtaccctgacaggctgcaagttggttcgcaagcagcgcaggagcatgacctccttgctggtcatgaggtcaaggccatggtagccagtcaaggaagagctccgaccagctatgtgccccaccgtccacctctttctcctgtgggccgagcctagcttatcgcgattaaatgtatgttctttgtgtgtctgtgtcctctttctccttcagtcgcgtagtgctggtgggattgatataccatggtcctcaggcccatatgcaatacgcatattgaaagtgacaatctcagaacaatcaatcggctttagaggtagctacctgtacatgttgtgatgttgatgttgtatgactgtactatgatgcggctgcaaggcccatctcggtgattactcacccgttatatgttctcttatcagttcataagaatacacaaaaaagatgaaaaaa

SEQ ID NO: 40220 - DNA, 3770 bp, Zea Mays
cctgcaaccccgctccaccgcgcccgatctctatcgtcgacaccaccgcctccggcgaggccttttccgctcttgaggtttccacaggtgcctctcagccctccgcacactgcctcgtgggtttccccgagctcccctgccccaaaccctaaccctagctcctggcgtggggccgtgcaggttcattccctgctcaatcgggcgccccatttggcaccctctgcccccccacagacccgtagggttgcatttcaggaaacagcgtgtctcttttctggacttgggaatctgagaggatactgtgcagtttaatggcacacactgctgactatatgcacatataatgatgcatgggcaaaccatgcttctctggtctagtggctattgagctgtgctctatgggaggtattgctgaatgtggtgtgagcattgacactaaagcttcaccacgtcgagcagccatagagaaagctcaggacgagctcaggcaggaatatgatgttcgtgaagaacgaaggagagagcttgaatttctggagaagggaggcaatcccttggatttcaaacttggccatgtagcttcccttagtgtacagtccacttctgtgacagaacagatagctgaacaaaatgtgataagtgaggccaaaggtagttctgcatttgctacatcacctcatggggattctgttgaaagtaacgacaagccaggaaattcattgtgccgtgaaggcaatacagccgataatattacgcttttggatggagatgccagcagcatgggtgtggataaaattgtgaaacgtggaacaaagagaactaattcagctcaagctgagcagttcctgcactgtgatggtcagaacaatgcaaaagaagaagattctgggttgtaccgtcttggtccaaagagccaagcgtatgcacgacgtaggtcaaagcctatcagagagaatgcatatagtgtatctgttaggtatccaccaattcctccattaagttctcagcaaaaagatgtgacaggattaatcccagaaaccaagactgaggataatggtgtttcatccattggtgattcaaaaccgactagtcctaactctaaaaatttggtgacaaatgcatcattactgaatgataaggtggaaatggagacagaaaatgttcaagcaattcctgaaggcaatcaagcaccgaaaaatgagttatcaaacagcaacaatggtagtcctgctattgagatttcaccaaacagtgtgccggataattctcgtcttactgtaagtgatcagatggttactgcatttgtttctgtggaatccccagatgctatttcaaaagtagctgcttcaaggatagtttgttctctcccatatatatccaatgaaatattgaaagaagcacaaactcttgagaaggcaggtaataacccatctatggtaagtgtggttgacgttcatgcatatggtatggataacaatggtgcagcaccttactctgctgtgaaaagtgctagtttgaatgaaaatgaagttgatccaattcatgaatatgctgccaaagctgttactgaacatccagaccaaaatgagaatcttgtaccagtgaatgcagatgaaatggctgatgaaggcttgaataagatcctacctgatgacaaggatgacaagaaagattgtcaactggaagttagtagtgggcctgtcattttgaatgacagttctactcctgtctatcctgaatttagcaattccttttatgcaagagatggaacagaagtttctaacaatgcagtagattcaaaaaataacgcagaacagcttgcttcttctaatcagggaaaagggaacatggaggaatgcaaagattctgacggaaacaatgcaagtgaattgagtgttgcccaaaagctagtgtctgttattgtgccccctgcttcagacgcaggcgatgtgagtaattttgtagaaaatgatgttgataaatctagcagagatcaggagaaggtagcaaagaaggaatatgaagattctgtcgtggcaaagaaggatcacgaagatgctatcctcagaagggcacggtatatagaggcaaatattaagagggctggtgaatggtctctctgcaatatttctttagagaagaagcagaagagccactgggattttgttctggaggagatggtctggatggcaaatgacttcacacaggagcgtttgtggaaaaatacagttgcagcacagatgtcccattggatttcttctagaggtcgagcggtatttgaagaagcaagcattcagagaaagcagaaatctgttgctagagttctagccaatggtattatgaacttttggtgttcagtccatactttacgagctagtggtggtattcctaaaccaataaaaatcgagcaaccgaatgagctagaggaaaataagcttggtgggttcaaatccggaaaagcggatgaggagtgtttggagcaagaaaagtcgcgccagtctcctattcagagctttgcacttaggtttcttgagtataacattaatgcatctgaatttctgccattagccgaagcaccatcaactcctgacaggctaaatgattttggcattttgaaagcaaatctcttttatggcgtagcacccggtgcaatgcaggcatacagggagtctatggaccgtctccttatttataataacaagaaaattggtgacactgtactcaaggatgattatgagccatcaacatatgcatctgtcacagatgtccctatggagaatgcatatggagatgacgaaagtgaggcacacacctacttattgcctggagcttataatggtggtttggcatcaaaaaatagtcacaaaaagaagcaccatttgcctcagaggatgaatggcgcaaggtcatatgaaattggtgttgacagtccttacgaaccactgtatttggaaagtaaatcaggaaaccagcaactcttatcgaatggcaaacaaacagacttcctctccattcctataaaacgcatccgcacagcagctaggcagcgggttgtgagtccatttcctgctggtgcttctgggacccctcaattcacaaataaaacggacgcatctagtggagatacaaactcctgtcaagatgatcaaagttcattacatggagggtcattttctaggaagaatgcagatatagagtccactgttgattttgacaggcaattgttgtatgatggtagtgaggtgtcgacaaaatctaaaaagaagaaaaagactaagcacccagggtacaaggcactaccaaatgtgtccgaatcttgttcgttgagggctcctggaaagggcaattatgatcatagatctcagatcgatatgatagctcagtatgagcagaaggattatattaaaaagagacaggagacaaatgggaattttgtggttaatggcctacatgctgctaagaagcctaaattgttgaatcaagcaccagatatttcactggaagctcttaaaccaattggtccaatggcctctcttgctgcatcacaaatgagcaacatggcaaatcctacgagggttataaaaatcagcacccgtggaagaaaaagtaaaggactcaagatgcgagctggtcattcaggtcctggaagtccatggtcaagttttgaggatcaggctcttgttgtccttgtccatgatatgggtgaaaactgggaattggttagtgatgcccttaacagcatcatccaattgaagggctttggatcttaa

SEQ ID NO: 40221 - DNA, 1398 bp, Zea Mays
ccgccaccgtgtctctcctcttcatccacctcgcgcggagttccgcagcggcgcagctcaaaattcctgccctctcgccatcaaatcatgcgaaggatttgctaaacaggccatccatgttttcgtcatctgtcagtgtcaggtacttgcaaattttctagaaaccttctttagagatccgactaatccattccgtcgatcgagtcccgtccgctccatatggaagaaggcggccgccatgaccatgacgcgggcgaccgcatcagcagcctacccgacgacctcctcttctcaatcctcctccgcatcggatccattcgcgccgccgcgcgcaccagcgtgctctcccgccgctggcgccacgtctgggcccgcctgcccgagctccgcctcggcacatgcgacgagcagccgggggcgacgttcctggacttcgtcgacgccgtcctcgacgcctgctccgccccggccgtccaccgccttgaggtggccatgtactgccatggccttcgagtccatgcgtgccgcctcgtcccgtggctacgcttcgcctcgcagcgccgggtgggggatatccatatccaagtgccatcccagaagaaattcttcttgtctaagcccatcaaagaggagctcgagcttcccgtgtgcgatggagcgacgagaatcaccctctcgctcgagcgacgatggagcctccgcctctgtccggcgggctcgttcatgtcgctgaccgacctgcacataagctgcgccaccatggcaggcagcgagcttggcaaccttgtgtccgagcagtgcccgctcctgaggaatctgtaccttttcgtcaggctggctgctgcttccaacgtgtccatacactccaactcgcttcagtccctctcattcaacgtccaaaacacccagaagctagaagtcatggcccctaagcttgaagtgctggccgtatgtgatgccactaaggcacatatctctgccccaaagctctccgtggtaagttgggacaatgacactggctacaaccctctgtgccaccactttgccaatgctgcccgtcacctccgcctgctacacttgggctcaaagtgtgtatccgcttccctgatgcgtcaattcgatgaagttgatgtgctgaagctgaagctgaacctcctcaatattaagggaacagaggcatacacaaatttattgaatgaaacggctgcactacccaagtgtgaggaattaaagttacgagtgtcattaagggcttcccaacacaactttgcatcaatcatgtttcatatcttaaggagctgcaacaatacaaggaggatttcgataaagatcgattctagcatgttaaatttgagagacaagaaaggcatcacagtttggtggtgcagcgacttctgc

SEQ ID NO: 40222 - DNA, 2994 bp, Zea Mays
  misc_feature (1)..(2): n is a, c, g, or t
nnagcgttccagcggtatgacatgatcccacagaacgctttgagagtagcagaggaaggaggaacgaggaagggtttatagtttggattatatgattggatgatcggatggttagtagtttggattggaagattggatcacatcgcgtagtccacctctcctctccagtttccacgagaaaaaaaaacatattaaatctttgcttaattttgaattgttcgctgtaaattagaacttatatgtgcatatacatgtagtcatgtatcaaatccgccgttcagtcattcagtgctctgttcaagtgtaagtgttcagtaccaatttttaatcatgttcagtattactacatcgtggttcatgatgttcacttggaaaatgttgacctttttttttgttctttgataggtggatcctctttcccaccaagtcaaggtttgtgaattcgggagtgctagaatcttgatcttccacaagagaatgtctccagaagcaatggataggcttctagaaaaagataaagtgccaaacccatgctatagagtatagactgagtttcaacattggaaggctcaactaaatataccagttccggatacacactacaggacaaaggtgcacagcacccgatagcgcgctgccttttttagtgtagaactagaaaaccaacgcacaacacaaaccagagagttctccatggacgtcggtggcggcgccaccggcacacgctgccgagaccccaccgctgacccctcgtcccagttcttcgttgacgctggccatccatacgcagtcgctgcagccactgcgctcacctcccaccgcaccaagtccaagtggtcccacctctcttcggtccccgtcccctcccccttcctggcctccgccgccgccggcgtgctcctcctcctccgccaccgaccgcacaccgcgctccgcttccatgccttcgccatccgccgcctccttccctcccgctcccctccccctctcgtcttctctgccgccgcagcccacgtcgcggcggcctcccgccttcggggccctgccctctccatccttgcctctgcctcccgccactgctcaccggcccagatcttcaatgccctcgctgccacctaccgctgctttgcctccgccccattcatcttcgacctcctcctcctcgcctaccttcgctcccgccgcgacgtcctcgctgcggcctccgtcgcccgccgcatcctcgctgccggcgcacggccgctcccctccactgcggcagctcttcttcgttcactcccttccgccaccgcggccctcgacatgtatcatcaaatctacacgcatccaagtccacggagcaatcacctcctcctgccgactgttcacaccttcaattccctcctccttgctttccaccgcgaaggcaagtgtgatgaattcaagattgtgctccaggaaatggacaaatattcctgcaagcacaacgtgtgcacctacagcatcaggatgtctgggtactgcaatggcgggcatgtggataaggcgcgaacactatgggatgagatgattcaggaagggatccagcctgatataactgcgtacaacacaatgattagtgggtattgccattctggggaggtaggggtggcagaggagatgtttaaaaatatgttgatgggtgggattgattcaagtgccacgacgttcgaatggttggtcagagggcattgtatggcacgggatgtcgaggcagcaatgcttgtgcgtgcagacatgaaaaggaaggggtttgggttggcgccagaggttgttgaggaattgctggatggattatgtcaaaatgggagggttgaggatggcttgagtgttttgcgagaggagatgaagagggaagaatttgtgccaacccggaggagttacgaggtgttgattatggggttttgtgatggagggaaggtggaggtggcaatcagactccaagcagagatggctggaaaaggattcactgctggcagcgaggtgtactatgcatttattagtgcttatgagaagtctgaaaattatgagatggtcgagaagttgaggaaggaaatgtcggcgatgggcacttagagcatgtctagcagctcaccaataattcatccctaataaaatggtattggtggtcaccaatagtgctttttttggaatattggggagactctatagtagattaccaataatctttcccaatacatgggacccacatgtcagaatagaggatgtgggaggaagaagatgacgacagttgttgtggtcccaacacctatagagggagatgcaactccccttttatttgaggggagatgggagatttgttttggtgaccaccaaaaaaagggagagctattggggagctgttggagcaatggaattgcctcatctcccccaatatgacagttttatggggatgagggatggtattggagagctactggatgctctatcggatctgatatttggcttggatattgcacagtgatgcatggatatcaacctcacctaattgcagttgagaactatgagtggtgcaacaaattctgaattggttgaaggagttctctcctagcactatcctggagacggatgttggagaaatatgactgctggatctgcaataggataatgtcttttagtcgatcccttttgtgcttgtttggtgaacttgtgtccccaatctgttgaactctgtaaacatttgctttccataaaagcagagatattctccttaaaaactcagtccagaatggtgatatatgaatgatccctgagagtttataaggtacaaccgtacaagtccaggtgctagagacttctcaatttgctggaaaatgctgtagtattttgtgttgacttgctgtttgatatatgctcagtacctcactgtaaaatgtggttctcttgtttgcctcttaacaaaatcctgagaaatgacatgagaacaaattgagaattagtagatcagtacttaac

SEQ ID NO: 40223 - DNA, 1129 bp, Zea Mays
aagagttcagcactcctctcgcgtcctcattcttcaaccgccacacaaacccctcgcttactgcacctttgcagcaccgctctctcgatcgaatcccaaggaacgaagacgacgacgatggcgtcgtctgcctgcttgctccaagcttccacggccttcgctccacgcttctccctcccgtcccgaccccagcccccgctacacctgcgtctccgcggctcccccaaccgtcgccgtggcatctcactcactgcttcctccgccgcgtccccggaagtcgagaaagagtcctcgccctcgtcctcgccgcaggaatctctgtcgctgtcgcggacagtgtgaaggtgctcaaggtggcagccaagacgaggaaagtacctgccccggaaattctctcggcgctgtccaagatcaagaaggcaaaactcgacacgtcggcattctttgagacactcggtggtaccgagtctccaggcaggacgtggatgcttatcttcactgcaaagggtcggctggagaaagggcagtatttcccagtgacagcagtccaacgcttcgatgctgcgggcaaacgcatcgagaatggcatatatttgggccccatcgggtgcttgaccttcgaagggaggctgtcatggaaaaagaaaatacttgcgttcatcttcgagcgggttcgcatcaaggtcggaccgtttggtcccctggaaatcagcctcggaagcggtgacggtggtagggagcccagcacgaaggaccccttcttcgtttggttctatgttgacgaagagatcgctgttgcgcaaggcagaggcgggggcgtagcttactggtgccgatgtcagcgtgtcccctgaagatccagacatcctcatctcgcttcaatgatcactgtacaatatcaggataaatggataatgttgagtctctagtttgtagggttcatgttcatctttgtactatctgctttgtctccgaaaacgagaaaaaaaggcaattggaggtgtaaataatgaaatgctattaaaatgatacacttatgtttgtgtagtatacggttgataatgtttgcaattaactagtaccccttccatcccataagtatacatctcatttatcagtgagtgaaact

SEQ ID NO: 40224 - DNA, 2395 bp, Zea Mays
cttgggttccgctcttggacatagaagcgagacccacttgaaaaatgcgtggatcctcgcaaacaaatagcagcgcgttgatcttgggtttccgagcactgctcccaggtcacttgctggcttcaataaggaattgggttgcttaccttgactgatataggcaattgagtatgctgctactttaatttgcccgtggaaattcatcagatggattgtctcaaccttaggacatctttccgtgttctgctctcgatacagttgctgctatcatcgttcagtcccttgattgtagcgaacttatcttcggagaagcaagcccttcttgactttgtctctgcagtctatcatggaaacaagctcaactgggataaacatacctcagtttgttcatggcatggcgtaaaatgctcagaagatcagtcacaagtttttgaattgagggtaccggctgctggtcttatcggagtaatttctccaaacactcttggcaagctttattctcttcaagtactgagcctgcggtctaatcgattgaccggaagtcttccagctgatgtggcctcccttccgtctttacgttccatatacctacagcacaatgaactttcaggagggttgccttcttccttcagtcctaacctcagtgtaatagatttctcctacaattccttcacaggagaagtacctgcaagtttacaaaacctcactcagttaaccgttcttaatttgcaagataactctttctctggatccatccctgacctcaagcttcacagtctgaaactattaaatctgagcaacaatgaactgaaaggctcaattcctcgatctctccagaaatttccaaagggttcattttcaaggaatcctggactgtgtgggctacctctagctgaatgctcacatccttcaccagcacgctcacctgaatcatctccatcgcctcaatctccacctttgacacatcatgataagaaactaggcacgggtttcatagttgcagttgctgttggtgggtttgcattgctgacgctaatcgtggttgtgtgcttttcaaagaggaaaggcaaggacgagattgatgtggaatccaaaggaaagggtactgccaccaggagcgagaagccgaagcaagaattcagtagcggcggccaaattgctgagaagaataagttggtgttcttggagggttgcacctatagctttgacctggaggatctactgagggcttctgcagaagtccttggcaagggtagttatggaactgcttacaaagctgtactcgaagatggtactgtcgtggtagtgaagagattaaaagatgttgtggcagggaaaagagagtttgagcagcagatggagctcatcgagaggttgggcaaacatgcaaacctactcccactacgcgcctactactattccaaagacgagaagctcatcgtctatgattatattgacactggaagtgtttcggccatgttgcatggtatccggggcgttaccgcgaagacaccgttagattggaactccagaatgaagatcatccttggaacagcatatggaattgcacatatacattcagaagggggcgcgaagctcacccatggcaatgtcaagtcaaccaacgtactcgtagaccaagatcacaatccttccgtctcggactatggcctcagcgctctgacgagtgtgccggtcaacgcatctcgcgtcgtggtcggctaccgtgctccagagatagtcgagaaccgcaagatcacccagaagtccgacgtctacagcttcggcgtcctcctcatggagatgctcacagggaaggccccgctccagacgcaggggaacgacgacgtcgtcgacctgccgagatgggtgcactcggtggtccgggaggagtggacggccgaggtgtttgacgtggagctgatgaagcaccagaacatcgaggaggagctggtacagatgctgcagatagccatggtgtgcactgccaagtcgccagaccggcgcccgacgatggaggaggtgatcaggatgattgaggggctccgccagtccacctcggagagccgcgcgtcttctgatgagaaatccaaggagtcgaaccctccatcggtgtaaatcctgcgcagctcccttcgtccgcttgatcggttgttgttgccagttgcacctcatttgatttgttagctaatttatttatgattgagtttcttgtaaaccgtggttagcatctgctgcatttagcctcagatagaaagaactgagctttcttattgatagtctgaaactctgtttcatggcgagcgtagaattcttccgctggaaaattgaaattgttagcctgctcgattgcaaatcctttttatacagttgcatctatcagaccatttgacaa

SEQ ID NO: 40225 - DNA, 673 bp, Zea Mays
taattattcttaggtatgtgactttggcctttcaagactgaaagctaacactttcctgtcttccaagtctttggctggaactcctgaatggatggcacctgaagtgcttcgagatgaaccatccaatgagaaatctgatgtctatagcttcggtgttatcctatgggaactaatgacactgcaacaaccatggtgtaacctgaatcctgcccaggtggttgctgctgtaggtttcaaaggaagaaggcttgaaatcccaaaagatctgaatcctctagtagccgtattaattgaatcttgctgggccaatgaaccatggcgaagaccctcgtttgcaaatattatggacactttgaaaccattaataaataaggttccggcacagttgatccgttcagattcgtagcctgttctatacgggtacgggaagatgtattttactgagtggtcctgataacatcaacatgagtgtcctaatactgatctgctataattgaataatccttggatggtattactcattatgataatacaattctcataatctttcaaatgaagtgtgcctggcaatttctttccatggcttaagaaactgtagtgtacaacattggtagtgaagacccatgtggctcgcaatatgttgcgagtgcttctagagggatgagagaaatac

SEQ ID NO: 40226 - DNA, 2169 bp, Zea Mays
gcccgagctcggccggtcgccgccgtaccgtaccagttgcagctcgctaggatccagcgcatgtttccattgtcccacttccatatatatataaataacactactgtggctagtcgtcgtcttccccggacgacccccggccggccggagagcgcgccgccgtgctttcttcctgcggtggtggcgcgcgtatacatcgtcgactcttgacgagctgagggcgtacacacagctagcatacatacacacaaagcccagcagcaggtagtctagccaatcaaacaagcgtcgtttcgtaccgggaggccggccggccgcgcgcggagaagatgctgtcctgcatcgcgtgcgtcaataaggaagaagacggcggccgggaccgcgaggagcatggcggcgacaccccgagctgcagagaccccgtgaagtcactcacctcccagctcaaggacatggtgctgaagctgtcgggcacccaccaccgccagcacggcgcgcagcacaggcgcggcgggtcgccgccgccgccacggggccgggccacctccctgtaccgcagcggctactaccgccccggcgtcgtgcaggacgacatggccgtgcccccggccacgtacctgggaggtggaggcgccggcgcgtcgagcgcgagctccaccccggcgtgggacctgcccgccgccgcccgcgcggacggcgaggcctgcagggagtgggtggcgcaggtggagcccggcgtgcagatcaccttcgtgtcactccccggcggcgccggcaacgacctcaagcgcatccggttcagccgcgagatgtacgacaagtggcaggcgcagaagtggtggggcgacaacaacgagcgcatcatggagctctacaacgtccgccgcttcagccgccaggtgctccccacgccgccgcgctccgacgacgccgaggtcagtcgctgcctctacccgtgcctgccttctgcatgcatgtctcctctgtctcattcacatgcatgtcccatcccatggtgtgaggcgagcttctgtcatacggtgacgctgacatgtcataccacgccacgtcatcgtcgcccaccggccttcctccgaacaagacaagaactgaccagtcgctctcctctcccccagtccaaaatccaaatcctggagctggacctgtctgtcctctgcatgcatgtatccatgcgtcgaaagacgcaaagatcacagctttattagtagtagtactaacagcaacaaaaaaaaaacatttttgtttgtgttccgtagagggagtcgttctactcgcagtctcaggtagggagcccctcggccaccccgtcgccggcgccgctcacgccggagaggatcagctggggcgcgttcgcgcggcaggtggcagcgccgccagcatcatcaggtgccaccggcgccgcgcggcagcacagcttccggccgatgtcgccgccgccgccgtcgtcctccaacccttcggagcgggcctggcagcagcagcagcagcgacacatcggtggtggtggtggcggtggagcggccggcggcaagagccccgccgcctccgaggccgccgccgccgccacggaagcggcgcggaccaccacgtcgtccagggacgacgtgtccgtcagcaacgccagcgagctggaggtgtcggagtggatcatccaggaccagcccggcgtctacatcaccgtcagggagctcgccgacggcagccgggagctgcgccgcgtcaggttcagccgcgagaggttcgcggagctcaatgccaagctgtggtgggaggagaacaaggagaggatacaggctcagtacctttgaaaactgagctggaatgaggctgaatcttactagttcagttgagcagaagctggtgataattatggtgttgtgcaaggggctgacatataattaatctggtataagtatacggggagagtttatgtttcgagttaatttggagatgggggggggggggaggagataggagggggttcatttggagctgggaaagataggaggggatgagataggggttcatgcatgtttagggcacctgacctggctgcccaggtaacttgtgattggtgtaccgtactaaagtttttaccaatccaccactattgcgtctaatgttcagcttcactttctagcatgagtg

SEQ ID NO: 40227 - DNA, 1478 bp, Zea Mays
tacttcgagtagacgagcaagtgattgaggaactcgaagcacagcaagcagaggaatctgagcaggagctcgcagaaggcaagttgtgtccttaatcacattcttcgacctaataattttcatgattttgataatcactgtggcactatcaggcttaatttgatgggacctaataggttatctagttttagttatccaacaccttgcatacaaatgaattattaggtagtcttgctatgctttatctgatttcgggtgttatattatatatgaatcatggtcatgccttattattattattattgttaattggattatttaggatacatgataatatcgttttgttaattggaacatggagcttaacatgagaaaacggtgctaccataagggtggaacaggacgtccttggccagttaattaggaaagctagtatgagttatcctttcccgaaaggggcaagcaggatgtggggagctgctagtatagggaggttctcgggtcgatctatctaagatagccttttcggcgtgggattcttatattgccccctcctgcgtgaatccgtagcgggttctctcttggtagtggaactttagaaaggccttgtagtgctaccctgccttgtctcctcggtagagatgaatgggattcgagaccccttggcgaaaatgggtaacacggcttgtgggtaaagatgtgctacccctgcagattgtaaaattggtatgtgagtcgtgctcacggtcatgagcggctcagaactctcgcattgtgggattaaaacttaacttgtcatgcattgcattgtgggattctattattcatctatgatctattatttagttggattggtatctacttatacttagtactctcttctatgtcctgttagttgtcgttttggacaaggtttcagtcaaacgtataaagttttgactacaaataactattttattatgtagttttgaaacataatgtttatatgcactgatttgtcttaacaagtccttttataaaagtataaatgtattaagagtttatttatatttaaaaaattggtctcagttatattttgaagactgtgtcgctgtcttaaacgacaactaatagtacactgagggagtaactgataataaaattttgtcaaccttttaaaaagtaatgctcagctttaacctttatccttggtaagctttatactacacatgagccccaccataagtgagctcatacacattattactcacacttgctgagtgatgaccgtatgagagcttacccttgctataatcacactagctaaagagcaggtaccaccaaaggatgactactaggatgagttcgacgagatctagatattgtctccaagtcaactatggcatcgtggagataattatcttagttcgagttattttattatcaattattttgtaagacattctcgtaatataataaagttgatgacattcgttttt

SEQ ID NO: 40228 - DNA, 1154 bp, Zea Mays
gatgacgctagaggatttccttgccagggattcctgcgctagggcggtggtgatggaggggaacatggcgttggggttccctgatggtgatggagatgtggcagggagtgtggtgggggagtgggggacatgaggagcggcaggaagcgagcccttctagatcccacggaccgcgccgtcatgcaatggtagaagctcatgatcaagaaccgagagttcgatgtccagggataggaaacaggcatgcatcgtagagacggattcgcaggttatgcaggtcgaggaggagcatatagaaccattaagggagcagagcggaactcagcagccaccgagttttggacaatgtggcaaaaatggtgaaccattggagcatatgcaaattttgatagacaaccttgttggatatgatactatacctacaaacagcttggtgatttctcctggtcatggttatttatacaactttgagatgaaggagctttatggtcttagttataggcatgaaacaccagaaggtcctacaagatttggagaaggcatgttaaccccgctggaccccaaccctctattcacgccaaacctcagccatttggaacatcttctcttcctccggttcatctctaatcttcatcgcttcaagtgttagagcatccacctcaactttgtcatagacttcttccacgagcacacgtgccttcctccttctcacaatcttacaaataacgcttggcagcagactttatctcagatagatcattgagcagtttggaattcattatctctgcactctgttactgtttcctctcctgattcaattcttcctttgagccaataaaaatagtggcaacatcaacattcttataactaccctcccttgaacactattggctgataagtatggactgggccaaggaaaacgtcattagctgcagctgcaatccctgcattcaatctagctcagcgtagcgttagtgagacaactgacctaattatcattgcaaaagaagggcactagaattatagataaccagtatcatagagaccttgcatctgaattttgagtgctatctaaaaagagatcgagagaatgtggatatgctaaactcagaacaagatcgcagcaacctgaatagggtacaaatccagagaat

SEQ ID NO: 40229 - DNA, 2144 bp, Zea Mays
caccgcctgccacccacgaggccacgaccacgagcagcaaccgccgcctgccagcagttctgcttcctcttccttccctctctctgccccagaggccagacacagcgtccccgaaatctagccagccaccgcccaccgcctccctcctccccgcctctctctctttctctctctgcgccaagaaagagaaggcgccacgttgacattgcggatgccgtagcgggggcgcgcgcgccagccatgcgctcgtgatgatccggccgttccagaagatcggccacggcctcgaaaaggttctcgtccaggcgccggaggtcgtcgtcgccgccgtcgttggcctcggacggcacgggcgcctgcctcctcgatggacgcgcaggcgcagcctttcaccaggcgggcgctgtccaggagctgcgggtccaaggggagccggctgtccgttgaccatccgccgccgccgctggccggcggcccttcggcggacaagggggtggcagggagctcgtcctcgctcgcggtgccgcccgagccggcccgtcgtgagggcccgccctcagacgcggagaaggtgagggagaagttctccaagctactgctgggggaggacatgtccggcaccggcaaaggggtgacctctgctctcgccctttccaacgccatcactaatcttgcagcgccgtctgcagcccatggccgacgaccagaaatcgcggtggaagaaggaggtcgactggcttttgtccgtcgccgaccacattgttgaatttgttccttcgcagcaggtcgccgagaatgggacctccgtggagataatgataacccagcaacgtcaagatctacagatgaacatccccgcgctgcgcaagctcgatgcgatgctccttgaatacctcgacagtttcgcgggtaagcaggagttctggtatgcgtcgaaagacgcagatggaccgggcaagggcagcacgccgaggcaggacgacaaatggtggctcccgactgtcagggtccctcctgacggtctgtcaggtgcatacagtaaatggcttcagaaccagaaggacctcgttgcgcaggtgctcaaggcagcaatggctatcaacgctaatgtccttatggagatggaggttcctgaatcgtacacggagtcgctaccgaagaatgggaagtccacccttggggattcagtgtacagacttataaccgacgatcatttcgaccctgaagaactgctacgctccgtggactcgtcggatgaacacagcattgttgatctgaagaacaggatcgaagcctcagcagtcatctggcagaagaaaatgacccacaacaaggacagcaaattgccctggggacatagtcacgagaagcggggaatgttcgaagggagggcggagaacgttcttctcctcatcaagcacaggtttcctggcattgcccagtcggcgctggacataagcaagatccaatgcaacaaggtatgtatgggactgggatgcctcgtcagatatacgccatttgttgctttgtttgttcattcgaatgccttgcgtacctcccttttgtattcgtcaggatgttggccttgccattttggagagctactccaggactctggagagcctggctttcacggtcatgtctcggatcgaggacgttctgagcgcggacttggccgctcgagatctcaggaacacggaatcgatgagaatcgccgccagcttagcttcggacgacaccgacaaggtcgtctcagacgctaaagccgaggtagagaagacggggagaatggagccggtttcgccggcgctatctgacttggtcggcccgaagctgacgaagatctcgccagttgcaaccaagaggttttcgtaccttgagaatctgggtggaacaagaagcccgatagcaagacactagctgctgtaggtagggggtgtagtgagggtagatggatcatgccgtcgcagagccttcggaagaagctttgtacatagcatagatgcccactgcgaacgtttgtctaacgataatgtgacatctaatcgactaatagaggcagaagttcttagagcgcaaacattatcaccaaaaccatgccctgccctggctttcataatcactttatttaacacttttatctt

SEQ ID NO: 40230 - DNA, 1544 bp, Zea Mays
cgggaaagcaattttcaagttcaggcagctagcccactagtatttgctttcatcatcaatggataaaacagtacggttgtggcacatgtcaagcacttattgtttgaaaaccttctcacacactgactatgtgacttgcatacagttcaatcctgttgatgatagatacttcattagtggttccctggatgaaaaggttcgtatctggagtattccaaagcgtgaaattgttgattgggttgatcttcatgaaatggttactgctgcctgctatactccagatggaaagggcgcgctgatcgggtcccacaagggcagttgccatttgtatgatacatctggtacattggcttgcattttaatgacatgctttgctacaaaacacagattgacctgcaaaacaagagaagaaaatctagccagaagaaaataacaggatttcagtttgtcccaggggattcttcaatggtcataatcacatctgcagattcacgaatcagagttcttgatgattttgagctagttcataggtttaaaggattccggaacaccagcagccaaatctcagcttgtttagctggaaacggacggtatattatctcggcaagcgaggattcccgtgtatatatctggaggaacgatgatggttcgaaaccaagtaaaaagaagggcattgtttctgtcacaaatacccatgaacacttccactgcgagagtgtcacggttgctgttacctggccttttaccagcaccacaatgacttctttaatgaaccccaggaaacaagagcttgagcttgggtctgagaatggctattcaccgcaagatctgcaaaccaaacttgctaaggcacaggagatgacagatgttgagtaccggagcacaaatatcacaagttacaactcgaagcataacagtgaccggacatctccggcttggcctgaagaacttgtcacaccaccaaatcaaagtctcagcgctactacctgccatgccaacgagggagaccaagctctgaatcggtcggcctggggcctagtaattgttacagcaggccgtggaggtcaaatcagaacatttcaaaacttcggttttcctgtaagagtatagcatgagtccgaatacataagatagtcactgccattcaggagtgcagtttgtgtatagataggagatagtgggtgagtttcacactattcagggattgggtttgactgttccttggtgcacctgctagagatcagaatcttcatctaacatacactgtcagtagtccaaaacttgtgtatgccaaatttattttaccctgaaggcccaagttgtacatgaaagagaaagccctacagagagcaacactatcagctgactggagataattcatctgtcagcttcaaccctacctttcggttttagacttctattccgaaccatgacatgttcttgtaagaaaagaaaaggaaaaagatagacgtggtgaaattgtcattttggctttatgatctcatggtattggtatcctgaatcttttttcagaccccacctat

SEQ ID NO: 40231 - DNA, 1995 bp, Zea Mays
gtgcgcgtgttctgcctcccgcgatctcgctcgtgatattccagccccgccgccgccgtccccgcccccatccgtgacaccccaccatcaccgccgcgccacgcgcgacaactccatcccccgtccgcacccctaccccgagcatcgcagcgcctcccgcacgaggtcgttgcgcttgtcgatctgatggcggcccatggcaaaggagcaggtagaaaatggccgatgccgaggatatccagcccctcgtctgcgacaacggaactggcatggtcaaggctgggttcgctggcgacgacgccccgagggccgtcttccccagcatcgtggggcgcccgcgccacattggtgtcatggtcgggatggggcagaaggacgcctacgtcggtgacgaggttctgcaaaccgatcatgacaaaaccaaaggtagctttgaagccgcagactctgtctccacaacctgaagcccaagcacctcatgatcctcaaacaccagagcaacaacaaagcgggactggtgtaggcgtgtagctggtgagccgggtagtgaaggaggtgtgtaccaggcctccagtgagcaaatgggcatggtgccggatgcatctgcggccggtggcaggaaggtcgagctggatggggacatgcgatggacatcacaggttggcccctccagtgatccatctcaaacactagccagaagacgaaatgaatcgcaaggggaaactaacatgcgagagaggaggagctagccacaaccaaagagcttggttcaatacttcaatggctagaataatgaacgatatgaagatcaggtagcattatatatgtcaataagaagcagaggagagaagcagcccacatcgcaggagacaaggacttcacttgtttggccagttcaggacttcaggatgttgtcgatgatgtccatgctatattccctcgcttcatgcttaacaatgagggagagactaagtgaggggctgaaggccgttggtgctgtcagaatgtttttttggagttttggtggatgatgctcagtgactgcaatgcaaaggatccttctgttttgtatattgaatgagattacatcactgtttttttcttagcgatatgttgagctcatgtgctcgtttatgttagtcgatctctggctcttgtagtaacttggaaagcttgctgctttttttaagggcatacatgcctgtgatgtgtggtcatgatcatttttttctcctgttattttagttgtcgtatcataaatgccatgtttgcattggtgttccaacatgtcaatattattgaataaatgtttgcattggcggcagcggggacgacgctaagtcgagcaatggcgaagcggcccgtggtggcagtaacggtggagagaagcagggggatgaatccaacggtggcgggatacttagcgctgtggcttccaggattggcgtggtcgtgtccagcgccaacggggaccgcagcggcagcgctgaggatggtgccaagacgagcgctggcgacgctggtcacggtagcaagggcgaggagaaggggcgtggtgtgaacggtggtagaatagtcgagcagatcatttccaatctgccctcagatgatcaggcgcctgatgccgatgaagcttccttgctcatcgccattatcgaagattagctccatgttccgaaggctctctaggtcgtcctcaacgccaggatcaaatcatcagctgagccggagactgaaaacaataaagaaaagcaagcagctggtcatagtaaacatcatgtagcgaggcttagcagattgcttttttttcccgttagaatcagtccacatgtcctcgacacgggctagatttgttctaggattatttttccagtagtaagccatgtatccatggacagtccacagcgcgacgtctaatgtaacatcatcaaggttcttttgactatcccataagaaaccattccttaagacaaccgatattgtgagttgataacc

SEQ ID NO: 40232 - DNA, 1145 bp, Zea Mays
ccaaccctagccgccactacctgctccctctccctagcagccgacagctgccatccagcgccaccaggaaagccgcccaggcgccccgcctctgcatccgcccgccaggagcagcgcccctgcaacccgctctgaagactcgacgcccagagccgcgcgcaaccccgttcgccgccccgccctccgtctcccgtcgcctcgcccctgcgctccgtcagctgcccctccccgaaccttctgcaaattcctattgtttcaagctgcatagaagtctgggattttctgagtgtggattcacagtcagtttagatggtcggtcagccaccagggcctccccgtccggccgtcgtgcgtccaacagtcgggcaccggcgggcggcggccgctcgcccctgcggcttgggcgctcggccacagccagtgcgggccgtgcggcagtgtccactcgggcctcggccagctgctagctaatcctaatcagtaattacttttgcactttgtggacaagaagttgtgaatgccttcagtgctgcagtgttgggcctatcttcaggttgtgtttcttctcaagtcaaccaagagcagcctcatgatggttcccctcctctgagagaagatgacaagaatgggcattatgtttttgctgttggagataatctcacatctcgttataagatcaatgcaaaaatgggagaagtctacaggaatcagtggtcttctccgctacgctcctgaaatatttgagcagtctggagtggctagtttgttttcagacattggactttctcctcattcaacatcaattctcatgagtacccttaatgctttgctgatactcccttgtataactgccgcaatgctgctgatggatgtctgcgggagaaggtagaatctgagacaccatgaaaattagtgatgcagttgtggacttttgaacaatagctggagtgatatgaaacattagtgatgtagttgtgggcttttgaactgcttcaagctggagtgatgtcgctgtggtgcttttgtgactgatctagctagctatctgtaaatgatctagttgtgaatgatattataattgtgatgtttttgtgaatatataattgtggtgcttttgtgtttatgtgatggatctataactgtgg

SEQ ID NO: 40233 - DNA, 1004 bp, Zea Mays
ctccatgtgtaaaggttggataccatagtaaggtgaataagttttctaaagagaaatggactgggtgttacacagggttggcagtaattggtgtcctaattacccctgccaggcatatggaatgcagactgttcagtcgactgttattatggttcagtgagtttttaaccacctttggagctctgtggtgattacttcaagtagaattgggttagggattccacagcaagatgggagaccatatcatgcacaacaaatttgatgcaaagagttggcttgctaccgtagagaatttagagaaaaaattcccagaagaagatgataaaattcaagaagtggtttctgaagaggagtctgcttcagtgcctgctcatcaagtgatgggagccatctaactggggtttaatagagggatttagacctccgtctctgcaacaaaggtgatgaggagttctctatgtgttcatgaggctggagggcgcttccagttctagatgaggattagttaggcttgtgtataaggtttggagggttcctaccttcctgctagtgtaataagttatgcactttgagtatatcaggacttgtaataaatgtaactcttcctatgtaataaccttcagttttagaaatgaaaagaatatttttgtaaaagtcttccgctcttatctccgaactgtgtgtatcgaatgtgattactgtaatatgcatgtatggtgggagatccttgggatgatgagttcaagttgttgaactcgtgatagccttcttaagttacctggtacacgtgcatagccatctgaggccatcaaggcaaggattggtgcatgtgggctcgataacttgggagggctgccacactcataagtatacctttgatcatgtctcttttatatatgctatgactaatgtgttttcaagtgtatttcaaaccaagtcataggtatattgaaagggaattggagtcttcggcgaagacaaggcttccactccactctccgtct

SEQ ID NO: 40234 - DNA, 4030 bp, Zea Mays
cgccgttgcggaattgcggagcgcgccgccaaaacaaacgcgtcctgctgccggaatcagaagatcccgaggggttctgatctgagggcccaccatcctctctacacggcacaggaacccaactactactactacaatcgttgccagggagctcaaccgactcgggaccaaaatcggctgctgttgctggctgggacgaaatcggaggcatccgcctttctcgagagatcgagctccgcgccggagcaggcgggccaggcggtgccgctgctgcctgctggtgggtttacaacatagggatggagtcgagatccatccggattcgacattcgaggtcttctgctttgctgttttaaacctgtagaggcagaggacttgggaatgctgaaaaatgtgcctgcaaaccgacgggggaattttttgtgcaaacaagattcgacctctgttcaagcagatattgttggcttctcatgagtatgggcttcatgctgatactgcccttattttcaatgatttaaagcacagtagattgaaggcctttatatttgttggccatcaccttggagacgacggttaaaatcttctacattctttgataagtggtgtggcgcttgttcattattctatcgttgcatagtttgatacgatggatgggaggaggacaattttgatgggacgatatgaaattggtaaacagctgggacaaggaacctttgcaaaggtcttttatgctcgtaatcttactactggcctggctgttgccataaagatgattaacaaggacaaggtcatgaaggttgggctcatggagcagataaagagggagatctcaataatgaggttagtgaagcatccaaatattcttcagctttatgaggttatggctagcaagagcaaaatttattttgttctggagtatgctaaaggtggtgagcttttcaacaaaattgctaaggggggaaagctcagtgaggatgctgcgaggaaatatttccagcagttggtcagtgctgttgatttttgccacagtcgaggtgtctatcaccgtgacttgaagcctgaaaaccttctacttgatgagaatgaaaaccttaaagtctcagattttggcctaagtgctctagctgagtccaagaggcaagatggtctcctgcataccacatgtggaactccagcttatgttgctcctgaagtgctgagtagaaaaggttatgatggtgcaaagtctgatgtgtggtcttgtggagtaattctttttgtgcttgtggctggttaccttcctttccatgacacaaatttgatagagatgtacaggaagatttccagagccgagtttagatgccctcgttttttctcaactgagctgaaggatctgctacataaaatccttgttccagatccaagcactagaatttctatctcgaggataaagaggagtgcttggtacagaaaaccggttgaagcacatgcaaagaaaaatgaggcagaaacaagcgagaatacttgtacgggtgaaggtacaacttctgtctcaacagagtgcagtacgtctgagggaaatcaagggccattaagcctcccaaacttgaatgcatttgacatcatctgtctctcaacaggttttaatctttctgggttttttgaggataagtatggtcgcagggaagagagatttactaccagacagcctgtaacaacagtatttacaaagctgaaggagcttgccaaacgcctaaagttgagggtcaagaagaaagaaaatgggaccttgaaattggcagctccgaaggaaggaaagaagggtatgcttgagcttgatgcagagatttttgaggttgctccttctttgctcttagttgagttgaaaaaaaccaatggggacacgctggagtatcaaaagctagtgaaagaggagataaggccggcactgaaggatattgtttgggtttggcaagatgatcaacaccagtgctcacaatcaccagagtctctattatcaccaccggagacacaggatgaattgcgattatcattgcctcagcaagagggtcaagacttcttagaagccccattgccatcactatcgcttgaccagttgaaatcaccaactgccccagagcaagcagagcaactgccacaaccagaacagttgcaaacgccaatcgctccagaggagcaaattaactagctctaacagccagctgaaatatgtgtggattgtgaagaaaatgataacaaaaatagttgatacttctttgagggaggtggaaatttcttgaggtattcgtgctttgaaatgattcagtaacctcttttacaaacagatcgtagtacacttgctgtccatgtcctgcagaggaacgtctctcctggagacatacaaaggcatccagatatgtccccatcgaagaaacagttaacaaacaacaatgattcgctgtactggtcaagagcgctctcccctcttcctcttgtagctggtgtggaggctgagctgcatccggtctctgttggccataagagcatggatgcagaaatgaaacagccacttgagggatccatgtccctgaacatcgacagcgaaggtgaaccccacattggaaatggatcgatcgtcgtcgagaaccctgcatctgacctggtgaagtcagaatctgaccgaataaaaaccttttaccagacggtcctgtcggctatcatggtgttcgtcacggcagcgctatcaagctacaaggacatgaagcctctttactcgaccacaagccacggcaaagctcacctcagcaacctcctagtcgacgagggcctattcatattcatgaccttcttgtgtgctatggtcctaatgatgtctgagttcgtcgtgcaccagcatggccggcggggccatgtctggtgctgggttcgcaccattctcgttgcagtcaccggtgtgatgctaatcgtggctgacacaatcctcctcatcgtgacgaaccgaagcaacatgttgctgtcagttcttcttgtaccggaggtgttgcttttcggcgtggccgtgagcgttggagcatggatgcaagagagtttacccagctcggagcttggcagcaggtacgattccgccatgaagggaacctttgatatagctacagttggcaccattgtctcgttcacgcttcaggggggcatcgtctttggctacctgaaaaccccagacagtaatcaggtcaagcatgacccgccgctggacctcgctgcgtgctacgccacctcgacgctctccctgaccggaatgacaatgtgtgccatgccgctggcatatctccccaacggcatgctggaggttctcgtcagagtcgtcgagaggcttaggagtgctgtgctggccgctctggcgatgatggcgctggtcgtctcagtggagttcctggatggattcgtcgtggtctccttctttcccgacgccgtcacgattgccctgtactacgtggtgaagctgttctcggcatgtcaaccccgagaggagatctcacagctggacttcaccttccggatcgttgccgccgcggggttcacgctaatgactggactctatgcggcttttacggggacagatcactatggcttcaacctcaagaccgctatgttcatcctgttgcttgcagttgtgtcgagcttgagccgtctggcaatcccacttcacatgcctgaggcgggagtgggaggagtcatcgagttcggcattgttagtatagctctctcttttcccctgctggcgcttctggctgccattccattggtgttcaaggtcttcgtcgaccattacatcaatcgctagtctttgggttgtctggcgcaattcttcctgtggtacagtgccagtaatgaatgatgcgtttttaaactaagggcataaatttaaaaatcttatttttattactgcatttactcagtctaggttgcttgtttggaagagcaacagcaagagactagccagatcctttgtaaggataaatttggctattattagaagaaaaatgtctttaaa

SEQ ID NO: 40235 - DNA, 1794 bp, Zea Mays
gtaggacgcgttaaggatgaggaggcggaccgagtcgacgaaagtggctccggtgctggtgccatcgaggcggtagacaccggtggcctcaaacgaccgcagctcgtcgctgacttccatctgcggtggcagcggcaagggtttggcagaatgtcagatactctgcgagcgaaacgtgagttggcacagcagacaacacccgcgtgcagcgctgcaatccaaagaagcgaagcaaccaacccccgaaatcttcaacggcgccatcgccactgcgtcatgcccgtcccgcccctcctctcgccacttcgcctgccctcgccagcgccgcccctccaccgcaatggagcgccatggcggcgcccgacgcaactacgtgccgcactacgggtcccccctccgcttcacctggggctcgccgcggcccgtggcgatggcgtgaggcggttcgtcgggacgctgggctcgaagagagcgcgagctgttggtgcaattagggtttctgcgatctctggagacggcggtggcggtgctggtggtacgggaattgcggcggcagcggccgccactgtggtctttgctgtgatgaaccgggtgctctacaagctggcgctcgtgccaatgaagaattaccccttcttcctcgcccagttcgccacatttgggtatgtcctagtgtatttctcaattctcttcataagatttcgcgctgggattgtcactagagaaatgttagcgcttccgaagccacagttcatgctaattggtttactggaagcgctaggtgctgcttcaggcatggctgctgctgctatgttgcccgggccatctattccagtgttgtcacaggagtttgttttcattgatggtgcaaaacgccttgagggaaagaagcctgatatatttgtagtcaactcttttggttctggtttccaggcactttttattttcctactccttccatttctctctaacttgaaagggattccttttgctgaactccctgcatacctaacccgtggtgctgcatgctttctgaatgtgggagggaatctgaaggattgccatggagctcctttgctaccacttctctacataactctgaacatggccttcaacatttctgtccttaatcttgtgaagatgtctacagcagtggttgcttcgctgacatcaactttagcagtacctctttccatctatatactgtcactgcctctaccatatctacccgaaggaacaaatttgagcgcatcttttttgattggtgttgctaccttagtgctcggattgcttctatacaatcttcctcaagaatcaaccaatcaagtaaaggaagattaatctaaacccatatcagatataaggttaacaggaagctattggtgctccactaagaaaatagccgcattttgttgacagtggcttcacagtttggtacataactcatgaagagcagtgttcttctgccacaaacatttgcggtgcaaacatttgaggcaccagctgacttcaaagtttagaaacagcaagttcttgtttcatctgttaacaaaatcctaatggattatgcagctatatataagctctacctgagcggatgtaactactaactactttcagatgagtaagggctttacaaattcattggttgtataattgttctcaccattttttggtcaattcaagactaacataccagactccgtgggatttattatgtaaataagtaatgattgtaaccattataaatcttgattgtatggccaaccatttcaagtgaatgctagatacacg

SEQ ID NO: 40236 - DNA, 660 bp, Zea Mays
ctgatttcaacagcacgagagctcttctgtgccaaggcagaacaagattcggatggctcggcacaaagcacagctgatatgacggcttttgtgcaaaaccttcttatgcagatgcaaaccaggttccaagctatgtcggagaacatcatttcaaagatagatgaaatgggtgcgagaattgatgaattggaacagagcctcaatgacctcaaggctgagataggcggtgaaggcatgtcgacgccatctaagatgaaggaagagtcaagaccttcagacagctccgcatgagtgcagcagaagcagcatgactcgtttcagaggccgttgctgtgtcttgggcgttcatcactaacaaatacgtacctgttttaaggtctcatttgagcaagagattgtaacccgtgctacttgtgttttgctgaatggtttgccataaattgtacccgtcttcgttctgtgtagacctacccgtggttatgcgctgagcatgtagtgacagctgctagaatgctagcaccccaattactaagaattcgggattcgcaagcataatttactttgcttctgtgttagttttatcacttacatggatagtagtgtatatatttttaattggcttacatattaaattcatgttcgcaacataatttactttgc

SEQ ID NO: 40237 - DNA, 2303 bp, Zea Mays
aacccccctttcccgccacaccatctcctcgccgcttcccgccacctctctcccatggcggcgccgtcggcggccacgcgcaggaaactgcagcgcaagttccgcctgcgaggcttcaccctcaaggtggacgccctcgaggaggccgccgccttcctcgaccgcttccccgacgccgaggacgacgcgctcgatctcctcctcgacgagctcgacaaggaaccgctgcagtcgtcgatactggaccgggacgcggtcaggcgcgtggtggcgctgcttgtcgaggccgaggaggcgctcgatgtggcgtcgccagcggccacaagcgcaaggtctgcgctgcgggtggtggacgcgttcctcgtgccgcggttccactacgatccaatcaagaaagtattttacgagcacacaggcagattagctgtccatggagaagctggagataaagcttccctttatagggataggtatcaagtgctgctgcagagactgtctcgtgataaatatttctctaagccggcttttgacacagttgcgaccgaacactgtagttgcgagataacttctgtacagtcgctaattgggtgcactgggcggagatggattatgggggtcatttcgcagttggaggagcgacagttctacttggaggatcttactggagcagttccaattgacttatctaatgccatatcctaaaaaaacagtgttattgttagcacttatggctagttactattatttgtgaacaatgcataacaaactttctacatcttttctttgtcaaataaaacaagtcagcattaaacttcttccagtcacctgtgaaggatgttgtgccaaggaatttcctcttatttcatgtgtggatttcgagattatcgagaaagtatcactactttccttaacatagaacacaaaatcacgtcaggtttttttgttgaaaatactgtaatcgtagccgaaggtgagctgctttcaaatggcattttccaggtaaatacatgtggatttcctcccctggaggacagagaagcgtcagtctcattgctcatgggttttgatttctttgggggaggtgtaataccaactgaagaaacactaaggttatcatcactggaaaaaaaggctgtgaatgatatgtttgtcattctttcggatgtgtggctggacaatcctgagactatggagaagttggctgttgttcttgacgggtatgatagtgtggaagttgtgccttccctctttgttttaatgggcaatttctgctcccggccttgcaatctagcgttcaattcatttgaagaactcagatttcagttcggaaagcttggcgagatgattgcagctcgatctagattaaaggaacatagtcgtttcttattcattcctggacctgatgatgcaggtccttctaaagccctcccaagatgtgcacttccaaaatatctaattgaagaacttcagaagcacataccaaattcaatcttcgtaagcaacccctgcagggtgaagttttacacacaagaaattgtgtttttccggcaagatctcctttacaggatgcggcggtcatgtctcattccaccaacaacggaagaaacaagtgacccttttgaacacctggtagcaactatcacccatcagagccatctttgtccattgcctcttactgttcaacctatcatatggaattatgatcattgccttcggttgtatccaactcctcacacgattgtattgggtgacaaaagcgagcagaaagccttcaaatatactgggatcacttgctttaatccaggttcgtttgcgaatgacagcaccttcgcagcatatcgtccttgcaccaaagaggttgagctttctgcgttggaaggctaataaagggagaataaactgaagttctccaatttgatgaagtgtaaagtcttcgacaaattaaagaactgccacttccacacaaggagccgtgaaaatagcatgactttcatgacgatgtggtgtttctgtgaagagaactgatgctgatatctcatcataggctcagcaaagcagtaggagcagcacattggtgtttgtgcagcatctctagctgtttgtaacaatctttaaatactgcacgttagaccagactattttacttgtactgtttagtttttcattgaatcatggtaacaactaacaagattactttctgacagtgctcataactgctctatcttaatattttgatcacccacctttccaattgttatatttggtagtctagatattgtaccttgtcatgtgttctatatttg

SEQ ID NO: 40238 - DNA, 1602 bp, Zea Mays
aacaagtgatgcgcatccgcgggaaccactttgtatggtcttcatctttgctgagcaaaaagttcttgatgccgctatgaatgacataaacaactcttttggaaaaggaagtgttacaagattaggcagtgctggtggtgcttttgttgagacattcccaagtggttgtctaacactagattttgctctgggtggcggtcttccaaaaggaagagtagtggaggtatatggtccagaaagcagtggaaagactaccctagctttgcatgcaattgctgaaatacagaagcttggaggaaatgccatgcttgtcgatgcagagcatgcttttgatccagcttattcaaaagctcttggggtagatattgaaaatctgattgtctgccagcctgacaacggagagatggcactagaaaatggtacagaacagttacttacagcctctgccccccaaaatagtgcaattctagttgcggaccgtatgtgcagatctggagcaatagatcttatctgtattgattcggtgtcagcgctcaccccacgtgcagaaattgaaggtgagataggaatgcagcagatgggtctacaagctcgtctgatgagtcaagcattgagaaaaatgtcaggcaatgcctcaaaggctggctgtactcttatgttcttgaatcaaataagatacaagattggagtgttctatgggaatcctgaagtcactagtggagggatagccttgaaattctttgcatctgtccgtcttgagatacggctcattgggaagataaaatctgccaagggagatgaagatgttggtgtgaaggttcgtgtcagagtgcagaagagtaaagtatctaggccctacaagcaagctgaatttgaaatcatttttggggagggtgttagtaaattggggtgcgttcttgattgtgctgagctgatggatgtagttgcaaagaagggttcgtggtacagctacaaagatataagattgggccaaggcagagagaaggcactgcagtatctccgagagagcccaaccacctgcgatgagatagaaaaggtggttcgagctatgataccagaaggatccagacatatgagcctactagctttcgggcagtcatcatcaactgaagatgaacaggcgtatgatgaacaataatggtacatgaggttccgaagatggaacacttgtgaaaccgtcaagctctggcttgtgtcccttgcggataacagaaaagatcagaggtaaccaaccaatatggcagttgtgtgagcgctggagtggagttgactaagaccttgttcgtttctgccggattggtgggtcctaacgattcctgaccggattgtttctctaatttatataaactttgattagctggaacgattccgggtgcaatccgacggaaatgaacaaggcctaatgttgtacgtgtactgtggcatggcagaaccgtccggtttaacccaatttcgggcacacctgccagctatttatcactaagtgcaccagagattatatcaaatccgatagtctgttaagcccatccaatgaaagaacttaaaataatccatgtttacatcaggatcataaataaggag

SEQ ID NO: 40239 - DNA, 2577 bp, Zea Mays
gcggctgcaatccggctgcggctgcggcttctacagtatttttctctctatggattgcagctgcagcagtccaaacagctgcaacagtgtcggcttgtagccagccgaacacgcccagtgttcccagccctaaaacacttgacactacgacactaccgtatcagtctggcaggtcctgtgcataatccaccatctcgctcacaggctcgccgcccccgccggcaatggagggcgttcacagcctcctggcccggcccaactccgcgccgttcgccttctcaccgctgcccctccgcaggagccacatttcctaggcgatggcattcggagggcgttcgagtcgcggatagctaagccacctcagtatgggtacagcacagaagctcttgttgggcgacggcaaatgctgcagattgcccatgatactctcacaaaccagagctcgcgcaccgagtacgaccgtgcgctttccgaggaccgtgatgcggcactcaccatggatgttgcctgggataaggttccaggtgtgctgtgtgtgcttcaggaggctggggaggcacaactggtgttagcaactggagagcacttgcttcaggaccgtccacctaagcggttcaagcaggatgtggtgctagcaatggcattggcttatgtggacatatcaagggatgctatggcagcaagccctccagatgtaatctgctgttgtgaggtgcttgagagggcactgaagctcctgcaggaggatggtgcaagcaatcttgcacctgaactgcttgcacagattgatgaaactttggaggagattacacctcgttgtgtattggagcttcttgctcttcctactgatgaaaaacataaaaataaacgccaagaaggtctgcaaggtgcaaaaaacatattgtggagtgttggcaggggtggtattgctactgttggaggaggattttctcgtgaggccttcatgaatgaggctttcttgcagatgacatcagctgagcagatggatttcttctctaaaacaccgaatagcataccacctgaatggtttgagatctatagtgtcgcacttgcccacattgctcaagcaattgcaagtaaaaggccacaattcatcatgatggcagatgaactcttcgaacaacttcagaagttcaatataggttctcaatatccttatgaaaacgagatggacctcgcattagaaagggcactctgctcgttacttgtgggggatatttgcaattgcagaatgtggcttggaattgataatgagtcctcgtcatatagggaccccaaaaatatcgagtttgtggtgaataactctagcatgaacgaagagaatgatcttcttccagggctgtgcaagctcttggagacatggcttgtctccgaggtattcccaaggagcagagatacccgagggacgcagttcagactgggagactattacgacgacccaaaagttctaagctacttagaaaggatggaaggcggtggtgcttcccatttagctgcagctgccgctatagcaaaacttggtgctcaagctactgctgcgcttggtactgtaaaatcaagtgctcttcaagctttcagtaaggttttcccattgacagaacagctagacatgtcaggcaaggatatcccaagtgatgatcttgataaatctcttgaaaaactcgcccaaggaagtgttgctggagacgctatccatgattccagaaatgacgccttgaagattatctctgctggtacactgcttgcactatttgcagtgttaggtctcaagtgcttgcctcgtaacaagtcacttcctgctcttaggggcgagtatgggtctgtggcggttgttgactccattgatgcggcagatgaagagccactggaaatccctaggatggacgcgaagttggctgaagacattgttcgcaggtggcaaagcatcaagtccaaggctttggggccagaacacactgtcacggcattgcaagaggtcctcggcggcaacatgctgaaggtgtgggcggaccgagctgcagagatcgagcgccacggctggttctgggagtacgcgctctctggcgtgacgatcgacagcatcaccgtctccgtggacggccggcgggcagcggtggaggcgacgatcgaggaggtgggccggcttaccgacgtgaccgaccctaagaacgacgacgcgtacgacaccaagtacaccgcccggtacgagatgacctactccaggccagcagggtggaggatcaccgaaggcgcagtcctcaggtcgtaggtagaacggctgtgcttgtgcagctgcagcaggagtaggcgagtagcggtaagctcgattcccattcttttcttttcttttggcagcgtgtgtaaataaacagtgtgagcactggctcgttccagtactagaaagcttggttaggttgctgagtgatgagctcctgaggtcgaaatttgtcatgtagtttttattgatagataatttggtgttactattgctgggtcagatcctctgaaacgattgatcttaatgaaggcggcagtgcatcactgcttaccacatca

SEQ ID NO: 40240 - DNA, 1427 bp, Zea Mays
atccttagcaagcaagttgaggaagaaatcaataattgtagtagtacagtggatccaatcacttctccctcgaatgtcactctcccatgtaatttggttagtacaacacaactaaagaagaaggaggtggagacaaaaagctcaaagcggaaaaaagttaggttgaaaagatgcataagggctaaaaagggacataagaaaaggggaaaatgttcagtggtacgtcgcagactagaataatttgattgattttaattgtattagtgtctaattgtattacttatttcattctcttttataagaaggaacaaaaagctacaacggtgccattcggtgagagtgttccagcagtccaaaatatgtcccctagtacaacaactgtgcaattcgaagatggtgctgtagcagtccctagtactttttgctagaaggaaggggtgcctgaacatgtatggccatccataaattttctcggttgttgatgggaccaatcacctatgatcttactgctgaattttagtttaaaatcagcacagtttgtttttttgtacaacctcggatgtttgtctttgcagatggagaacaatataagcttttgtgttgcctttccactcgcagatggggaatagtatgagcttttgggtagcctctaaattatggatagcttttggttttttgtggctgaagtgtaaagccacttgagtgtttggttttctcaactgccatcactgagatgagatcatcaatatcagttgtataaattggagcatggtcattctggaatcaatactatctgaaacttgttcgctaatttcattcatatttcacaaactggtacaaacatcacaatagcaccagaatatcagtctagaattgatccacaatcatcatactcgatattgatccacaatctcaatctagaattgtttcctatctaatcagaatacatgtctctgtcgccctcctatgaagcaggtagagagcttcgtggctgtgctctcttgaggaagtcgagatctcacaacggaccgtcgctcgagcactccatggaggcagtctgcagatgaacgaagaacagtcatgcctgctttcggggggaaaaaaaaagaacagacatgccgacggtactgcgagacatggctgtcgctcttggacgggtcccgcagcatccgacatggtgatgccagaccgctatggcagcagttggcgacggggaagggaccttgggcggaagacgacggttaaggcgaaggagcgagtcgcctgcttgccatggcgatggaagcggcggccggcagaggatctcatcccgtagaagcgaaggaccgatgggaattagatgggccacctgtcccggcccatgagcgagtcatcgttggatttaaacgcatggtgcatggttaggatgagacgactgcatagacacg

SEQ ID NO: 40241 - DNA, 1966 bp, Zea Mays
cgcacggcctcttctcacgccgcctcgacttcctcttccagcccccgccatccatcctcctcctctgcacatgtacactcacctcaaaacccccaagcatcgtgctaaaacccggcctagccctcgaatccccccttgcccgcgcggagtagacgagcccagcccgtcccatcgaccatggcatcctcagggtccgccgctaacctctggtactgcttggcctaagcatcgcgggcgtcctcctggcagcgcggcgattgaggcaccatacgcgccctgaccacgacgctttcatggcccgcctagagctcctcccaccgccacagcctccgccgtcgcaaggaggccagcccgggcgaggtggcgcaggccatcgccatgttccccagatcctgttccacagcgtcgccttcttccaggtacacccagctctcgccttcttcaggcacagctccaagccgtcaagcgccacccagtcccgattcccttcacaccgtctctcgccctatcctatctgacggtccaagactctgagtttgccgtggtgagtgtgcttcactgcttctctaattcctcccgttgcattggttcgatggaatatggcgctgaggaggaggcggcgaccgatgaccccagtagcagcgggggcaccaggcgttgggcgactgaaggggagcccgaagctgactgtggatgcggacatgcgagatatggcgaagacggccgcgtggagcgttagttcctacagggctggcaacggtgtcacggccctgcacgacaacaaccttgacacctgccgacagtctgatggggctcaagtgtacagccgcaaatggtgaacatccagttccagaagaagttgcaggcgtgtagctgcagcctgcagggctactgcggtgcggaaagagctgcaggcttcggtggaccaactacctgcgcccggacctcaagcgcgggctgctgtcgtcggaggaggagacgacggtgatcgacctgcacgcgcagctgggcaaccggtggtccaagatcgcgtcgcacctgccgggacgcacggacaacgagatcaagaaccactggaacacgcacatcaagaagaagctgaggaagatgggcatcgaccctgccacccacaagcccctccacccacagccagcagctcctcctccgactcagcaggagcaggacacgggcgggtcgcccgaggaggagggggagaaggccgacgcggtcatgatggcagcagctacgccgattatcgggcacgagacggcgccgttctttaccgacgaggaggagatgctggcgcacctccttgacgacatcgacgacttcccacccgcggcttattctcccgacgactcttcttcgccctcctcctcctcctccgcgtcccggtcgtctcactcggcctccgtcgtcacagcgccgtcgtcgagcggagctggtggaagcagcgtcgccgacggcgagcggccgctgcagatggtggagtggcctgagtccatgtggctggacgacgacgtggtgcccggcctggccacgacgccgtgggagttcgaggacgacaaccccttcctcgcctaccagaggaacaacgctctgttcgatcaccagctggaggcatggaacaacgacggcagggtcgagctgttctgaggcgctgagatgatctacttcttcctcgatcgtcattagattagatgtagttaattaatacgtcatccccggcctacgatcgagcagttcgcgttgcacagaccagagcactcacggccgttgaaaataagcaagagaaagagatgaaagtggttgcacgcccggtttcttggttttctaaaacctttggccgggccgaccacaacttgcaaaggaacagttggagagaaaaaaaaatgttcgttagcaatctgccagtgctgtttggcattggagaacccttccgtggattgtttattggacaatgcaa

SEQ ID NO: 40242 - DNA, 2108 bp, Zea Mays
cttaatcgcgcattgtctgaaaaatcgtgcgcgaggagatgatccaatttattcttcagcacattcggtaaaataataaagtcaactgtgcttagacaacgaataaatttttatccaagtttgactaaaccagtgatgtctcaaataatgtatctaatacccagtccgtttccgtgttgcccgaaacagtcacgaaaattatccaaccgagatttggacagaactgtctaagctgtttaaataaatcgaaaccgaactaaccaaaactagaacaaattattagccgatcatgtttcctatttcaaaatcaaataattaatatatgtaacctaagtgtggttttaattcaatttgtttacatcttgtccaggcttaaattctaatattatgaaattcctttcgccaaataaaatatcttcttctgatatttatttcccccaccgccttccttcccatcataatccatgctacctttgttccttatcgtgtgcatgctcaaatctttgagaaatatcaaatgcgctcatactaagccattctcatctcttctttttctttagagcccgcacgtcatctcccttggatatttctccaagcacgtccagccttgactctagaaatttctcacgcttatcttgatcctcatgtacgtaaaatccctggaagacttcatacagttgctggatatttttgtgcctgatcttctgtccaccgtcattctccctcaaaatatctcacgtaactggtcgttatcccctgccgccattatctcactgccgctcaacgactcaacctcatcttcttcaaagtcatcgtgcccgtctccagctcttgtctgtgctggccgtcgcccagcctgtcgatctcatcctcctgtgattttatcagccgctgcacagccttcatcttccttttcattttctctccagccggtatttcttcctgcgcgctccatctctcgttcgcggtgccgcgcccttgcagctcccaaccatggcggtactgctcccagccgcgggccgccgagctccttccagttctctctgctcgcgccctgtaccccgctcaagcccctccttctcccctctgttcaatggtcgccgcccttgttcctttttctgtgccgtgcgtctcctctccctctttcccgcgctcggcctagccatcttgacagcagtcgccggccgaacgtctctctgccggtgctcgccctggtcgcgcgccatcgctcagctcatccgcttggagctctgcgcgcccagccgagcgacttcgtccgcgcgagcttgccccctgctcacagttctttcgtacctatctcccttcggcacgtccctctgcccctgcacgcgctcctgtgtcaatgtcgcgtcctggttcgcccagccctgcacgctctgctcgcccatggaagttcgccgagttctatttctgctcggtcgtgcccctaccgagcctcccatggccgcgccctgggatttgccggagtctgcttccctcgtcgcgcgtctgcgcgcagctcacgccctgctagcccctgctgcgggttgtcgagctctctgcgggttgtcgagctctctgcgcacgctcagcttgctctttccttgcttgccgcgtgcacgaattttatctactcgccacagcgtgtcaagctcccacgccgaatctttttctagctcgccgcgacgtccagtgtgctgcttgctttgctcaccagcatcgtttgcttgctggtctcattctaatttgatttggaattattgcgtctcagccttgatctgtcgcggccgccgtcaaatcgtcagtcgttcaactcaccgatcgcatcttagccggtcgtcgatttcctgttcgccatggtacaacaccgctgttaaatccagtctctaacccgccatgtcgttcgtcgtcctctagtcctagttcgaccccacctcaccagctcgctccaaaaacgatctcgttgttgttctgcgagtcatctggaaatcctgagatttgggtgaagaagcgattctcgcgtagtgctcgtcaaatcttcgacgaacttcttgaacatgtgatcgtcgtcatttctgcaattccaagtcgaatttaggtacgttaat

SEQ ID NO: 40243 - DNA, 2319 bp, Zea Mays
cgcaattcgccaaaaggaaaatctcgccgtcacgccgtcactctacaggaccagttggctgcatatggaggtcgaggacctcgaggatctctacaacatcgacgcgtcgtacgaccaagacgacccggatgaggacgagggggagcagcagagcgaggatgaccaagagatggacatgctaggaggagcggtggcggaggaggacggggcggatgacgctcgaggatccagcgccgacgaggaagaggatgaagaagacgacgaagaggaggaggaggaggagccggagggggcgcggttggtcgcgggcgattgcggaccatccccacgagctagggtttccgagtttgcggcggctgccggcgccgccgtggagcgggcccacacggccaactgccccgtctgtatggacccgtggacctcccaagttgtatcccatgtgggcatgtctatgggagatcttgcctagagaagtggttaacccagcgcgggaaccgaagtgcgacgtgccctcagtgtggcaaaaggtttaaacataaggacatcatcaacctctatgcacaagaggttgctgttcctaatagtgaacttgagaaggaaatttcatacttaaggcgggaaatctgttctctgaagaagatggttgtgcaccatgataaaatgtttgaggagatgatcaagaggcagaatgatggtgttcgctcaaagagacagaaagtggctgagcactcatatgaagccgcaaatctggtggcatctaccccagccacaataagttttagcttacaggtggcccgtgagaaaacgctcaagcccaacatgacacaaagacacacgcagcacaacgctcccggatagtaccacctcgctagctgaaggagaacgagcgagctataaaaaaaggagcagaacgaattacctgtggctggagctcgagtcatcagcatagacacatctaacaaaataatacttgtttctggaagggcaaatgctataggtgctgaatatgttgttaccaagattagcatgctgtccaaccgtgaagtacgcaaaatccatcttcctcctgaaaccaaagctgttagggatatgtgtatcctgcctggtggctctgctatttttacatcactaggaaggaggctatcacttttcagcatggcaactgacagcattgttcttaactgggatttgccggctcctggttggtcgtgtgcagtaggtgcatctggttcacatcatatttatgctggattgcagaacgggatggttgtggtatttgatatccgtcaaactgtgaggcccttgcgttgtatggtggggctatctgcaaatccggttcatactctccactctgtcattgataacaacggttccaggaaggttctttcagcttctgctataggtccctgcatgtgggatgctgatagcaaccaaagcaggccgcatttgctaactgggacgggagatgagcgtgtctgcatatctcttgcatgtgccgctccatggagtgaccttttggtggcttccttccggcccagagttgatccatcaggagatgcagttgccgcatcccaagtttatctatcacaaacgcctacacggtctgggcaggggaaaccagggcagcacacccttatcaggaggaggacgggtaacacctgcttcgctgaaggcacgacttgctatgccaacgtgagcgagctgcgcatgtcaaaatcggccatcataccttacggatacggaggccaccagcagaagcacctgttctcctacggagacgagtcgctgcgtggggtccggacctggcaactgccttcgtttgggatgcatgctgacctctgcacccaccgggagcccatccttgatttaaggtacgctgctgaaactgaaggaccaggtgggtaccttggttgcttaagcgaggagaagctgcaggtgttcagagttaattaattgttaggtagcttagctggtcagtgagggagcagcttctttttgacttttggtagctcagctcagctaattgctaggtaacataacatcactgtgaaggtcgtgcttgtttggtgaagctgctgtgtacatacagggcaacagctgaaattgcctagttttggtgctgctggctgtttgtttgtgtcactgactggagtgaagaccatctccagcaattcctcccatatttcactgactagagagagtagcatagaaagtgtacataaatacacaatgcattccagagacgctacgcatgtgtattatacaagttgacaggtacgcaaacacatacatggagtgttcatacgtaatagcatctgg

SEQ ID NO: 40244 - DNA, 1864 bp, Zea Mays
aaaaggctgtataaaagccacctgcctccctctcacagctcctccctcccaagaactcggaagtcggaagcagggcaagggatggatagcaagtcggtgggaatcgtcggcgcaggcgtgagcggcctagcagcctgcaagcacgccctcgacaaggggttcaggccggtggtgttcgaggccgacggaagcgttggcggagtgtgggcacacaccctggagtccacgaggctccaggcgccgacgacggcgttccggttctcggacctggcgtggccgccggagagcgcgagggaggcgtacccaggccaccgcagggtcatggagtacataaggtcgtacgcgcgtgcgttcgacctcctcaagcacatcaggttcaacagccaggtgctgggcgtcgagtacctcggtgcgaccgaggaagaggtcatgggctgggatcagtggtccggcgatgggacggcgttcggagccgtgaagggtggcggatggcgcctcaccgtccaggacttgaaagtcggtagcactgaggtttttgtggtggattttctcatcctgtgtattggaaggcacagtggaaccccaaacatcccagagttcccagcgaatgggcctgagctgttcaaggggaagatactgcactcgctggactactcctacatggacgacggcgacgctgctgagttcgtgagggggaagcgcgtgacggtgatcggctccggtaaatcggcgttcgacatcgccgcggaggtcgccaaggtgaacgccatgcaccatcgtgtacagaacaaggcactggctggtccacaagtccagcgtgtggggagtcgacctcagctacttctacctgaaccgcatctcgcagctcctggttcacaaacctggtgaaggattcttgcgctgcatgctggccgccgcactctctcccttgagatgggcgatctctaaagcgatcgaaacgtactacaagtggagcgttcctctgcggaagcacgggatggtcccggactacagcttctccttcgccatgtcctcgtgcctgatcgcgatgctgccggaaggtttctacgacagggtcgacgaaggcagcatcgttctcaggaaatccaaggcggtcggcttctctagcgacggagtcgtcctgcgagacagaaacgaaagcgtgagaagcgatatcgtgatcctggcgacggggttcagaggagaccagaagcttagggacatcttcactgcgaactggtgcagggagatagtggcagggtcaccggatacagcagctcctctgtacagagaatgcatccatccccggattcctcagctggctatagtgggttactccgagagcctcaccaacatatacgcctcggagaggatgagcaactgggtagctcaatttctggccggcggcttccagttgccaagcgtgagatgcatggaggagagcgtggcggagtgggcagagtacaagaaccgatacaacgggaggtatttccgcaggtcctgcgtaagcaccgctaacatctggcttaatgatctgctgtgccgagatatggggtgcaaccctagaaggaagaaagggttcctggccgaatggttccagccatatggacctgcggactatgcaggtctttgctgaagatggttgcattgcatgcctgtcagtgcatactcctaggaagagatgacagagttgctacctccatgggtgtaatactgcaatgtgaaacgtacaagcaaaatatgtctgatgtttgaactgtaaggtgtgaacctatgagacctgtctaaacaattttgcaacaatctacagttttgaactcgaacagggagaagatagaaatagtgaacagtcatcgcctatctg

SEQ ID NO: 40245 - DNA, 1396 bp, Zea Mays
cccacatagaaaacaggcctcctcgcctccgtccgtccagctctggtccgagcccatggaaatcgttgccatatcagatcagctccgccatggacccccatctatctgcgaccctcggtgacgcgctccgcccaccgccgcccgggaatggctcgagcgctgctcctgctgcgagtagctgtagcccgctaccctcctctcccggcctcacccgcgctcctccagccgctgctgcgccgccacgcgccctcccagtacaggtcccagctccgcttcctctcctccctctcctcctcgtccgtgtccaccagctcagatgctcccagcgacggcgggggcggccgcgacggggaagaggatggcgcgaagagcggcggccgcgtcgactacttggggatgagcgacgaggagctcatggagcagtgcgatatgggcacgttcaaggcgtccggccccggcggccagcaccgcaacaagcgcgagtccgccgtccggctgaaacaccttcccaccggcatcatcgcccaggctgtggaggatcggtcacaacataagaaccgagcgtctgctttatctcggcttcgaaccctgattgctcttaaaggaggccgataaacctggaagactacactccacctgttgagcttcttcagatattacccctgaagtccagcgttagaggaaaagatgttgggccccaaatcggtccaaataactcaaaattttctccaggaatgcaagctttattagacctgctgtttgctgttgaaggttctgtatcagatgcagcaaagattttaggcctaagcactggtgctttgtcaagattgattctgtcagatgattctctccgaacggccgcgaatgaactgcgagcttcgaagggactgaagcctttgagatgaaatcctttgtaaaatcctcagcttcaagtgcaccatatcccataggtgccatgttcgacagatgtcaggaggcattatttctagggaaaacctttgaggtttcatgcggtttgtttaagggatgttcgtcgtcattagattgccgtaaatatgttcagtaggcagctagtatatcttcagaatatcctcgtttcgtattacatatacccccaatgttctccagcagggcaacaccattacaccacttaaccaatatttttccttgaggacctgttaacctcaaacttttatttgccagccaaaagttgttgaagcggctgtgctgaattgctgatttaattggctgtaactacctcatgggtacacaattctaatcttgtttcctttcagcgtttgatgatgcttttatatcaaattggtgctcttaaatttaaatgcaccatggatctgtttttagcttccattgtcattgcatgaaaactgaaattata

SEQ ID NO: 40246 - DNA, 2176 bp, Zea Mays
cagacgtgcccggctgcatcaccgatctctctccctccctcgctcgtcgcttccgcaggggcagccgcagcaccgcagctacctacctacccacacacgcgattcacgcaagcacacgcagccgctccttccgtcctcaaaccacaggcggaccctgacgagacgtacaagaacctccaccaggccattgagcccttgaccgtgtacgcaaacgaacacgaagcctagctcctccccaatggcctcccatcctcctcctgcggagccgtcttctaagtcaaacaaggggcagagcgagcacgaggagatccacgtctcctcgggcggcgttctggcttacaccgacgacgatgactgcgagagcaggcgccccttgctgctcaggactcccgcctccgccgagtgctactccgtctccgccgccgtcttcccgtttctctttccagctttgggaggccttctgtatggctatgacattggggcaacatccggtgcaaccatatcgctcaagtcgtcgacattcagtggtactacttggtacaatttgtcatctgtgcaaacgggtcttgtggtcagtggctcactgtatggtgctttgatcggctccgtcttggcatatacaattgcagattttttaggacgacgtaaagagcttatccttgcttctatctcatattttattggagcctttctgacagcagtagcacccaatttcactatcatggtggttggccgctttttatatggcataggaattggattgagactgcaccgagccagataagaggcatgctcatttctctaaaggagttctttattgttcttgggatgcttcttggttatatagcaggaaatctctatgttgaagtggtttctggttggcgttacatgtatgcctccagtacaccattatgtctcataatgggagttggaatgtgctggttaccctcatcacctaggtggctcctgttatgtgccatacaagggaaggggaatctgccagagacaaaagaaaatgcaacccggtgcttatgtcggttgcggggtcaagcttcacctgatttggtctcagagcagattgacttgattctagaggaactttcatatattgatcaagagaagcaagctagcttcggtgagatctttcaaggaaaatgtcttaaagcaatgataattggatgtggtttggtgttctttcagcaggtcactggtcaacctagcgttctatactatgctgctacaatttttcagagtgctggattctctggggcatctgatgccactcgtgtgtcaattcttcttggcttactgaagctaatcatgaccggagtagcagtccttgtggtcgacagacttggcaggagaccattgcttattggaggtgtcagtggaattactgttgccttatttttgctgtcctcctactacactttactgaaagatgcctcctatgtggctgtaatagcgcttctactatatgttggttgttatcagctctcatttggtcctattggctggcttatgatctcagaggttttcccgctgaggctgcgagggcgtggactgggcgttgctgttcttgtcaattttgcgtccaacgctctggtcacctttgctttctctccactggaggatttgattggaacgggagcgctcttctctggattcggggtgattgcagtggcatctcttgcattcatattctggatcgtccctgagacaaaaggactcaccctggaagagattgaagcgagtttgtagttgactgatccagacgtcacgttcttccgtcctagtttcactgaactgaagggacttctggtatccttctgtagtttgctgccgtagttagccttctataaacgttctacaagctgttgtagcaataatacttctttccttccgggtataaaccgagatggtcggttgctgcaaagtgtgttctttaccgcagttcatccgattagtcacaattaattttcctgatcgccccctgcacttaactaggcaccatgactcaatcagagcgacgttgattattcaactagtactcgatattttcaaaatggttgctaatggaaagaaaagaaagaaaatgatcttctctctagatcatgatcaagaaaagattaccaggagattcttaaacaatacatcaaatgtctttgtattttgt

SEQ ID NO: 40247 - DNA, 752 bp, Zea Mays
cgccgcgcccgcccccgccgcacccgccgcggccgtcgatccatcaggtcgcagcctcgtctgatttggtacggattttggcaagataccacgtccctaactccgctgtttcaaggataacaaagatggcgtcgccgcggggcgggttcgatgagcaagatcgccggacagagaagggcaccgaggtgttcgtcggcgggctgccgtggtcggccacagaaagcatgctcagacagggatatggttttgtgcggtttgcaaagagggattatgctaatactgccaaaaggcaaaagaatggtattgagagtggactttagaagaatttgaagaattgattcacaaggcattcaaagatgttgtttcagttgaccttgcaatggcttcaaatcttgattcttcaaacaagaagaatatcaatcgaggctttggatttgtgagattttcttctcatgcagtatttgccaaatattattgcctcttcctatgcccccgcccgccccggcctcgcctgccgctcccgcccccgcccccgcccactgctctgctggcgtggccgcccctgtccccgcccgccgcgaccaaccccgcccccgcgataaaaacataccctctccatcctctcctcttttcttcttcctctcctcttcttcctcctcccgtagcggcttcccccgatttcccccgatattgtctcttattagtactggatgatgagatgtgtcttattatgactatggatgagacttttg

SEQ ID NO: 40248 - DNA, 2613 bp, Zea Mays
aagcgtgggcctaccaaccacacatgtcaattctcggaatttctcagaagattggagacgggcgttctcttttcatttggagttttggactagtcgaactgacgaactggcagagcgttcaggatagacatggctgccacctttgccttcatccctctcctgctactggtctgcgtccagagcgcggctcctgttctcggcttcacaaggagcgagttccctgaagatttcgtcttcggatccgctacctcggcttatcagtatgagggtgctgttggtgaggatggtaggagcccaagcatctgggacaccttcactcacgcagggagaatgccggacaaaagcaatggtgatgtagccgccgacgggtacaacaagtacaaggtgtccaagtccatgttatgatttaccagctggatctccctcagatcctggaagacgagtatggtggatggttaagtccaatggttgtgtaagatccagtaactttagatgttagggatattttcccaaaatgaacatatcttgatcatccatgctaccacaaaacgcagggaggatttcacggcatatgcagatgtgtgcttcagggagttcggtgacagggtttcacactggaccactctggatgaagtcaatgtggctgcaattgggtcctatgataatggacaaattgcaccgggaagatgttctgatccatttggaacaaaaaaatgtacagtggggaactcaagtgtggagccatatatagcagctcataacatgctactggcacatgcatcagctaccagactgtacagagaaaaataccaagtgagtaatcttgtacctgaaaacatcacatgtatcttaacattagtgttgtattgtttctttttttcttgaatacacaggagagctgagcatcgttgcattagaagaagaaatgtacatagtgtgcaaacacacacacccacacacttgtaatatcagaatctttttttttaccaagaaatactgtaggggaagcccctacagtaatatcagaatcttataccgtgacatgtgaggttgatccttataatagatcttacatttgaacatgtttcactcatgatccaaggcatcagtttgtcttctaactacaccaaaaacattccctttggctttatatcatcagatatttacccaaacataaaatgattgacctgtaggctgtgcaaaaaggagttgttggtataaatatatatacaatgtggtcatacccactaacaaactccactgccgatttagaagcaactcaaagatttctggacttctattccggctggatactagaaccattggtgtttggagattatccaagcgtaatgaagaagaatgttggttctcgccttccgtcattcagtaaagttcaatctgaagccattcgtggcactctagatttcattggaataaaccactattattctttctatgtgaacgaccgccctttagaaaaaggcatccgtgacttctcactggacattgctgctgactatagaggtaaaacagtttgtcactcgatacatgattatccttttattgcttgcaattctttagatacattccctgggacttctgattcatttatctagagtcacacacacaatggcctacagaagttcaaaacggtgtcacatggaccaaataatttgatgatacttctgaaacatattcgcaattttatgaaacctacaagctaaatgctgtatataacaaaacaattatctgaaacaggttcgagaactgatccgccaataggtcaggtaaggtttttcatcaacaatcttcagaaattcgacatgatagatacatcccttttattttactgcagcatgccccaacatctattcccgctgatcccagaggattgcaacttttggtagagtacctgagtgaagcctatgggaaccttcccatctatatccaagagacaggttatgcaaccacaaacggcagcctccatgatactgacagggttgattacatgaagacccacataagcagcacattggctgctctaaggaatggggctaatgtgaaaggctacttcgcgtggtgcttcctggacgtcttcgagtacctgtcagggttcatgtcgcaatacggcctgtaccgtgttgatttcgaggacgaggcgctaccaaggcaagcaaggctatctgctcgctggtattctaaattcctagagaacaaggggatccatgtagaggacgagcttgatgatgcgggatcacacgttgagcaataagttttctacagcgacacattgatctgtacatcctctagcgagactattgaatactactgtgcgttgcaataagaacacttatattaaaaaaacaaattccatcaaaacctctgtccaggactccaggtaaacaccaccacaatattagggacacggtcctgccagaacaagggaccgtttgtacaactcaagcccatatctgctagagtgtgaggagaaatttcattatttgggtcttaattcggcttcctgtgatctttagggcctgttcgtttttcacggattcaagccctggaatagttcctagccggattacttctctaatttatataaattttgat

SEQ ID NO: 40249 - DNA, 1826 bp, Zea Mays
gcgggcacgacggctgcaggagacccagatgagctgatcgagcagcccgtcgccaagccaaccggacatggtgagcgacggcgcgcgcgggctgctgggcgcgtacgagctcgggcggacgctcggggagggcaacttcgggaaggtgaagcaggcgcggcaccgcggcagcggcgggcagtttgccgtgaagatcatggagcgcgccagggtgctgtcgcagcgcgcggacgagcagatatgccgcgagatcgccacgctcaagctgctcgcgcaccccaacgtcgtccgcctccacgaggtggctgccagcaagacgaagatctacatggtgcttgagctcgtcaacggcggcgagctgctggacaggattgcggccagtgagggaaagctcccggagcaggaggcaaggaggctcttccagcagctggttgatggtgtaagctactgccatgaaaagggcgtctgtcacagagacctcaagctggagaacgttcttgtcgaccggaagggaaacatcaagatctctgatttcgggctcagcgctttaccgcaacatctcgggaacgatgggttgctgcacacgacctgcggtagccccaactacattgcccctgaggttctgcagaacagagggtacgacgggtcgctatcggacatctggtcatgcggggtgattctctacgtgatgctcgtagggcacctcccgttcgacgaccggaacatcgtcgttctctaccagaagattttcaagggcgatgctcagatcccggagtggctctctcccggcgcacggaaccttctccggaggatccttgagcccgacccggcggagcggatcgccatggcagagatcaaggcgcacccatggttccaggagcactacgtccctgtccttcctccgtacgacgacgacgacgaccacgattcagtgaagcaaatcggtgcgggtagtaaaaccactcatcacatcaacgcgtttcagttgatcggaatggcgtcgtccctagacctctcagggttttttgaggaagaggacgtgtcccaaaggaagatcaggttcacgtccgcacaaccgcctgaggatttgttcgccgagatcgaacgctctgcgactgacatgggcttccatgttcacagagggcatagtaagcttaggctgacgcgaaactgcgaccggtcgaagaatcagaagaaccctatgtcgtcgtcgtcgtcgtcgtttctagtctgcaccgaggtttttgagcttagcccctctttgtatgtcgtggagctcaacaagtcccatggcgaccctgcactgtacaggcagctctgtcagaggatctgcggtgacctaggtgtgctcgagatggaccagatctttgggacgaggccgccggtcgccgacgatctcgcgggcttggccttggcgttggagagacgatctgcgacgcctttggttgcgttgtgacgaaaggctgcccccgccggcccccctgaccgtgatgtttgtagcgtcagattatttagtgacgacgaagcagttcagctgcaacgcagctcggaacggttgtgtgatccctcccagaaatagaggacaaggtaaaagagtgtagccgtacacgtgtaggatcatgctccaatgtaaataaagtggtagtagccaccgatgtaaaactgaatgtaaaatctaagaaataaatcgtttatccagtacacagaagctctatagtggtggtactagagctatttgtactaacgtttttcagtgccaccagggtcagtagaaatcgtccttttcactgacggttgttttgcaactgtcagtgcaaataacatta

SEQ ID NO: 40250 - DNA, 380 bp, Zea Mays
agcagaccacatgccgctactctgtgtctccgctccagcacaggcgcacagcgcacagcgccgcagccgcaccacacacagcgttgccacgcgctccgccgctccgcggctccgcgctgcaggcctgcaggctacagcctgcagcagctcgggatctcgggctctcggcgagccgctgctgcctgctggggggctgcgggctggccggctgcggctgggcgctggctgcctggtcgtctgcctctgctagtctgctgcctgctgcagtgctccgctagacgctatcggctagtccgctgtccgcggtcggctgcctctgtgtgactgcgtcccgacgtggtcgtggtcggctgataggatttaaagagctatttcagtca

SEQ ID NO: 40251 - DNA, 5028 bp, Zea Mays
tccgcagcctgtcctccgaaaggccttaaccccaaacgaaaccaccctccgcgacaaagccgactactataggctgtcgtagccaacaagcgcgacatcctccgcccccacctcgccgccggcgatggagccgccttcgcctccggcgacccactccgcggccgtccgtgtcctctcccgcactcctccgccgacctccccgaacccctcctccacgggcccggcggccccgtcgcccgcctcccgcgacggggtcgtcgccgtcggcttcgtgggcgccgcggggaccgcccgcctcgcggaccggatcctcgacgcccacgtcttctctcccggtggctcggcggggagcctcgcgggaagggtaaggtaccaccgcgacgccggcaagaggatggtgttccttcacctcacgccgccgccgcccgcgccgctcgaggcggtggcaggatgctgcgatgacggcgaactaccggagatgctcttcatgttctctgtctgccacgtaattatatttctgcaacaaggcttcagatttaacacacaaaccttaaagaagttccgactgctgcaatcttcaaagcatgctctcgctccatttgtcaagccattggtggcagctgcaatgcctgccagaactgttgcctctgacaccccaacaagagcaacccacagggcttcttccgtctcccctccaacacgccgaggaggtcacgctgggcgtcagtcctcggctatctcacttatgtctggaaccagttcaactccttctgtcttgccaggccaatgcattcctgtattgctctttgtctttgaggatgatgcggttgatgtttcaagtgctgcagcaagtcccgatgatataggtgatgcatcttcatcaaatcagggttctacccctgatggactaccaaaacagagcttagcttcaaaaagttctggttcagtaattatgctttcccgggcagcaaacaaatctgagggcagttcaggcaaaaaactgcattcgtcactggagggacagatccgtgtcttgatcaagaagtgcagggtgcttgcaggcatggagcctggacatattggcccaaggggcgtaagtaacatgagtcatcatttacccctgttctcactcgatacctcgagggtagttgcactgttggaacggtatattaataagaaacaggaaccactggacaccattgcaggactatttgaagattctttgtgctccaaatcgccattggatattctttcgctcgaaaacaactaccatccaacaaaccatgatgactttcagttgatcaaggattttatatttcggcagtctgatgcgctgagagggaaagggggatattcaagcaatgcaagtgccgggtctgttgcaggtgttggcatggtggctgctgctgctgcagcagctgcagcatcagctgcatctgggaaaccagttaatgcacctgacctccctacttttgataaatggttgtccataagtacctctattctaactgcactgttgagtggaagaaatgtgctgagatgtcagtctgaaagcaagactcatacaagtcctactgagaagaatggccaacttcctgtaggatctaatgctattgagatcgcattatcgtgcttggaaagtaacaatgggctgaacatgaaattttcttcatcatggtgtcaaagggtgcttccagctgctaaggagatatacctgaaaggtttgcctgccttttaccccacaagaatgcatgaagtgcagctacagaaggcattgcggtcctttggctcaatggttaaaggaccagcagtcagggtattctcaaagaagctagaagatgagtgccgggcaatatgggaatctggaaggcagcaatgtgacgctgttagcctaactggcagaccatgtaagcaccgcaggcatggcgatttcttttcatcagatgcaatggagcaacattctagtggatatgtcttcctccatgcatgttcctgtggccggtcacgccgccttagagatgatccttttgactttcagacagccaacgtgtcttttaattgtttccaaaattgcgatgacctattacctacccttgcgcttccaagaggcagcaatgatggttcattttcagtatcctcttggtgcttggtgcgtcttggaggagcaaggtactacaagccaacaaaaggactccttcaaagtggatttagctccaaggagaggtatcttctaaggtggattgtatctgttcataaggggcaagtgagaaatgacattcgttctaatactattacttcatccgcaagatctggtatgaacccgcagactcccccaatagtcactggtgaagtaaaatctgccataacccaagtcacagcacaaattaaatatgcaaagcttgaaaattctggaaaacaagctgaagttgaaccagtgagcaacttaggcattaattttggtaaaggtctgccaaattttactatgaaaaagcccttttctgaagttgttgctggcaccacatcaaaagataccgagtttcctgctcttcagcagacaaggccaccaaaacctggtggtcgaaaagatgagcagcgtcaaatgaatatagtagaccagactaatggccgaggtcatgtggctgtcagccaagggtctgtagctgaaactgaatcggcaaaagcaagcagaaacaagagtagtgaaaatgctgatgggaagccctttttacagatagggagcaatatagtaccagtgattgctggaaatgagactagagaaactagtcagccagtacaacagtttgttgtgtatattggatttgagcatgagtgtccctatggtcatcgcttcttactgtcagagaaacatatgaaggagatcgagtcttcctgtttgcagtatcaaagacctcatctaaacaaagaagcagaagtcaagcatgcacaaaagttgctccaaaatgcatctggtttaatagcatctgcagtggacataaacagtgcacggaaaaacagtaagccattggaatcatcagggagaaacagccagcagcaatcactgcagctgaggattgatgcagagacctcacagccttctcctcggctttcagatccacagaatgccaaaaggtgggagcattattttcgaagcgttacaattgatgatggtggagaagcattttcactgatgaacagaaacttgccaatatatatgcgctgtccacattgcaaggtctcagaaaggaaggaacatcaagatgtaaagtttgctggtgttgtgtctcaacttcagcggattttcattgtgacacctgatttccctgttctgttggcaagctgcccacttgtacagtttgaggggtcatgtttgccatcaaatgtctctgatcatgatcgagaaggatcattcagtattgggtgccgagttatcctcccacctgagagctttcttactatgaggcttccctttgtctatggtgttgagacaaaggagggaagtaaatttcccctcaaatactttgagcgacaaccagaactcacagcatggcttgttgcaggcacagccctgcaaatcgtgtcggtaggggatgtcactgagaaagaaaccgttatgaagtgatagacatgtcatataaagctttactggctttagcatgttctagtcatatatcagtgatttgctatcggcattgaataggtctgttgatggttatattctgtctgaagttttcacttctactcctgaacttgtgctgctaagctgttgacacaactattgcttgctttcactgtgctggaagcattgtgaaatagaagttccgctgatatctgcctgacctggatggtgtatatagatgcaagcagagggggcaggcccacaggcaatcacgccgttcttgtctttgtacatgaaaggtgccaggaggttaagtttagctggttatgtaaaggtccgctttttgaggacctgtccagtggatcaatcccattcctagactggtttgccttgaggcttggagattttgtagtaagactattagttcaattgagctgtttgtccagttgatgagttgttttattcctaggcttgttgagaaatctggccttggaatatagaacccagaagaaaggatttttctgaatgatgttgtagcaaacggttgcttgagatgcatgatctcctcaaataaacttgactgatctgcctgtatcccttattctttcttgtatataatgtatgcagtacaggtatttccccgcagtctttggagaagaagatggatttgtgaagtgatagcacaaaaaaaaaagtcatcaggcgcttctggtggtagactggagactgggctggagaaatgttggagctggaaggaaacgcacggatggctcctgcttgacaagtgtaaaggcaggcggcaagcagggacgtcgagtcgaggccccggccggctccaagagcttctttctccaatccaatccaatccaatccagaaccctgactgcagtccatggtattgtagcgctaccatttgtccacgtccgatgggtgaagtgaagcatgactgactgactgcatgggtttgagtgagttgcttggacaagtggctgtgtgtgctggttggctcagggcaggctccacaccaccaacggccggagcagatggacatggacgtctcacttaggaggagaaggcagatgcggcagaagcaccagcacactgaatgcaatcattcaatactcatctacagctagccaagatgtgagaagagagcaaggaagaattgtcaagcctcccacgtttccccaatcttctctcttcttttcatttccccacttttaatatgtttattttcctcttatttgcaacagctcctttaattatatagcaacattttttttaagatatagtagtatatatattaattttatcatatctctagtccgaataccacgcaaaagtagctagtaagtaggatgtaccaactagctacagcagtgtataataaagaaaaaagtcgttgggcggtc

SEQ ID NO: 40252 - DNA, 3751 bp, Zea Mays
tacaaaaagtgagatgaggtgcatgattcaagaactcatgggactaggaggaaggaagtttcacctttatcctttagctccaaccccaagcaaagcaaagaaccatcagcctttactttagtgaaagcactgaaagcagaatctaaaggcaaagctacataagaaatggcatcagaagctcgttgcacatttgcatcaagctacaacattgacagttagcaagctccttgtgttacagaactatagcttccttttgtcaaatattatgcggtgtggcactggcactggatagtggatacatagctgctctcaagataagggacatcaggcagaacggatgggttcggggtcttcaaagtcagagtttgaggactttcatgccaatgcggttgaagaggctgtgaaaaacctagctccttatttggaggacacaagggtgcgaaaccaggccatttactttgatggatgggatggacttggtgcatctgctgtccttaactcgatcgctgaacgccctccgccatctctgaggaacaaatttgatgatattattctacacattgactgttcaaggtggaaaagccggagagcactgcagaggacaattgcacagaaactagggcttcctcaacatgtcatggctgtttttgatagacaagacgaagaggacgatctagttggagtacatgaaggctcaagaactgagataagagacatcgggagagagatatatcgagtcctacaaagacagagcttcttagtggtcttccataacgggagtgataccatggttgacttcaatgactttggcatccctcgagctgctgcagatccttggtcaaacattatccggaaggtattgtggaccttccgtggaaggcttcatgccatcaaagaaacggaggaagtttcaggtcatctcaaacctgataaacgacaaccaaagggaactgagaccgtggacacttcatatctttgctttcgttcgttattttctggaggcccatcagatgtatcttcgtacaggcttcaaatactgtgtgaggaagctgcagcaatagctcaatacacgaataatcctatagtcactcaggaaatagctgaaatatgctgcaggtatttgttatcattgaattccaaggggaatggcaagctagatttcaactggagtgctcatgcctccaactattgggtttgtgatgggattctaaacgaatgccaaccagagcaagcatgggagattgccgcttctctgcacaaagagttacgactggagggctactcatctgctcgtaagttctgtcatcctggtgctgacacaacatcctgggttgtaaccatcaaatctagtgaagatattgtaccaactgtgaagccagagacaacgtctttctttttggcagtcaaaagaaaacatggccattcggttttgccattacccatgaaaatgttccaaagatccgagcaacttcatgttttgaagctctaccactgcagcttcagctttgcttcacctccattcctttgttgcctaaacctaagatttcttggacttgatagctgcacggatcatcaatcaatgaaaccgaaagaaaacaaagaagaggagtcggaggaggcaggggcagagggggaggaggagaatacagcaacaatcgaattctttcaaagcctatgggtgcttgacatatgttgcactgattgggaattgactttatccccaaatacaatagtgaaaatggcaacaaacattagggagataaacataaagaggggaagaatctggcacagcagtatttcatggagatttcttggtaacattcacaagcttcgagtgattgagcctacaagtccttgggagacaagtaataaggatgaatttatggacatggtgaagctggagcttcttgacctgtcagggaataccacaatacaatttttgccaagcttgtcaggtgcaatcagcctcagaacccttattctagatggttgtattgaattgcaacatgttgtgcctgaaacactccctccatggcttgaaacatttagctttgatggaggatataaacaagctaaaatctcatgtatctccttggctggttgtgcaagactggtcaacttcagattgtgtgggtcagtacagaaccttgaggagctggacctctcaaacacatcaatcaaaacacttgacctcagtgataaagtggtgcaggtcccatgcctagagcgcatcatcttgctgggatgtgagcggcttcgtgctgtcctgtggccaaaggatggaatgcccaatctaatggtgctaggcattgacactcggggaggcgcagaagcagctagtgcaaaaacagtacatgataactttgccatcagtaaagaacgagaagaaggagtagcagcaaaggtgttggacaacacagctacaaggaggagacgatgggccctctgcagaagtcgatgatcacctccaagacttacctgacctacagcgatgtgaatattgacaaggcaggtagtgtgaggcagtttcagccactgcaccgtcatgtagagattggtgagggaataagcaactctagcatggtaaccgttcgtgaaatcagcgctgcgatccttttgataaatagggtctactcattgctcgtgcatgacaattcatccatcaggactgttatccctgaaaacataatgtctatagacacgaagaaggtctattggtcttgtctcaggtggtgctgtgtcgagagatgccccagtttggacagtgtcttcgccactaactacgatgccgtctgctttaatgctctagagaccttctgggcagctgatctcttggtggcccgatgtatctggagtaaaggaagaacaactaatgtgaaggacaccgaatccttcgctaaactgcaggctatacatctccactcctgtcctaggctggcatttgtcctcccactatcgtggttctacaccctgtccagccttgagacccttcacatcgtctattgtgataaccttggtcaggttttccccgtagaggcagagttcttaaacgaaatatctactggccatccaggaggtttgttggaattcccaaagctgaagcacatctggctacaggagctacccaagctgcagcagatatgtgaagccaagatgtttgctccggagctcaggaccatcaccttaagaggatgctggagccttaagcgcctccccgctaccgccgaccgcccaggtgatcgccctgtcgtggactgcgagaagaatttgtgggcgaagctggagtgggacgggaaggaggctggccaccacccttgtctcttcgagccacgccactccaagtaccacaagaagagagttcttagaaccacgcttctccgatgagccaaactgaccctggtaggtaagaataaatatatagcttcctgttgttttttccgtttcacgttggattgtgtatcatatgcaataccataatccataatctactgtactgccgccatggaacatcttttagctatcctgcatgctgttagagatggaactaagaacaaatacttatacacacattgttagatgtgttgtgatcggcttatggtcttcctgagctgcacaagtttgtattttccttttgtttatctcgttagttaatcatttacattatcaattatgtaagtttaatttggtgctgtgctggattgaaggcgacatatctcccagctgcttcctacggtacagtgccgactgcccg

SEQ ID NO: 40253 - DNA, 2196 bp, Zea Mays
tttgtttcgttctacctacgtacgtgaacttgcctctcaactgacaccctatacgtacggtatatacgtagtatattaccgacgcaacagggcgcggatggagaggttgacctgcgtttatttattttggagcgcacacgacaccccaagctagtctagctcccaaccaaaacaacaacaacaacaactactcgcaggtcgcaacgccgccgcagcagcctatggaggaggaagccggcagaagctggacgacggatgagagaggagacgacgacggcgaccagctgcgcgggacgacgacggcgacgggcagccggagggtggccgccgccgccgccggcgctagcggcgagatcgagatgctacagacggaggccgccgccacggtcgtcgtcgtcggtggcggggcgtcggcgtcggcgtcggtccagcagggaggaggcgacgcggatgacgaatgcggtatccagcagataccaatatggaagagatttctaacacatgctggacctggtttcctggtttccttggcctacatcgaccccagcaatgtgcaaactgatttgcaggctggatcaagtcacaaatttgagttactatgggttctattctttggattctttttcgtattggttatacaatctttggcagcaaaactgggcatcatcacaggaaggaatcttgctcagatgtgtatgtatgaatatccaaagttagtgaaatatggcctttggttgctcattgaggttggcgtgattgctgccactataccaggagttttaggaacagctttggcatacaacatattgctcaacatcccttttttggttggtgttctgatatgtggagcaagcacgttcctgcttctagctttacagatctatggggttaggaaaatagagctcataggagttatttttatgctccttatcgccatttccttctttgttgaactgagtactgtcaatcctcctatgggtgaggtaattcaaggtctatttatcccgagattgcgaggggtttatgctgtgtcagatgcaattgcactatttagcgtcctcgttgtgccgcataatctcttcctgcattcatcactggtggtatcaagaaaaatatcaccttctccaaaaggatttaaggacacttcaacgttcttcttgattgagaacgcatttgctatgcttcttgtgctacttgtaaatgtagcaattgtgtcaactacagggactatatgtgccaataatactcagctggttgacaacaacaatgcatgtagtggtcttacactgaactcagcgtcagtattattgaagaatatgtttggcagatcaacttcaaaaatatacggcttagcattattagcttctggtcagagtaacacaatgactactagctattcaggacaatacattatgcagggtttctccgggatgaggaaatgcatcgtttttatcattgctccctgtttcaccgtcatacctagtttgataatttgcagtgttgctggtgcccctcacgttcgacaactcatcaacgtgtctgcgatcatcttagcttttgtattgccattttccctagttcccctcctaaaattcagcagcagttgcgcggtgaaggtaccatacaagaactcagcttgtattgtccaagtcgcgtggattctctccattgtaattatggggatcaatatttatttcttctgcaatagcttcataagttggcttgtgcacagtgaactcccaaggatagtcaatgttataattagcacccttgtcttccctttcatggcggcatatattgcagctttaatctacttggctttcagaaaagttaatgctgctggcatattcccttccgtgtcagcttccactgggactgaagtagaagcatggaggcaagatggcaacattgatgatattggtgtacattgatatgtttgaaacacagtatataaatatactctttcattaaaaaaatattttgttcatacaccacacattagggaagacgtcaaaccattattgaaagatgtatatagttatacatatagttttatggttagatttgttgtccctttaggaatgtagtataagcaatttaagttttttttttatctacggtggtatctaatataaggatttatctgtccttggtggtttcccatattgaaaggatcaagatccataagaggaggtt

SEQ ID NO: 40254 - DNA, 1265 bp, Zea Mays
aattctctgcctccgccgccaggacgacggcaaatccgcccagacagggtggacgtcgacgccggcgaatcctgctcggattggtcgccagccaacaaccttagactgaggcaccctgaatccatctgctattgttcagcttggtgttcgggcaatccttgttctcgcctcagcacaaatagatcgccaagatgaatagaagttggttgaatggtacattgttttcccctgaatatatcaatggtgtcaaagaatttatgagctttattcaaagaaaattcggtgaggatgaagatattttgtgtccatgtagtagatgtctcaaccaaaagtcctttcatcaagcctttgtggagaagcatatattaatgaatgggatggaaagtacatatactcgatggattcatcatggagagaactttgaggaagatgccggtcattcgatacatgggacaggtgtgattgatgatgacagctatggtgatgattgttttgatgggatgttacaagacctatgcactgcataagagcaagataaagaggatggtgaaaatgaggatggagacaatactaatgatgacaatgagtcattttatagtgtagtgctgaaagaggcgaaacgtcatatttatcctggttgtaccaaattttcaaggttgtcctttgttgtaaagcttcttcatatgaagtcattatataggatcactaactctgcatttactgcaatattaaagttgttggttgaagcattcccaaagtgcaatacactcccaaaatcatataatgaagcaaagagtcttctaaagaaattaggtcttggatatgtatcaagattagagagcaagaagagatgaagaagaagcaagatgccatggatgctaaacttgagcttatgctaagtcagattcaaccaagttaaagctaactagtatggggtgttaggctttgttggtacttctcttttgctgatgctattgcattctattgatggataaatacgtttcaatccattttttgtctgttgtgctgctagagtagctttagcggcatgtgtggtgtgttggagtggcttacgtgtcagtggttggatacttgctgtaatgacatgctattggatacttgcatgtaatgacatgctggagtgtggtcagtattttttgtgatgagatgctggattaaaatctgagttgtgatgtaatagaattcaacattttgtcattatgttctggattataattaatatatatttaaattattgtgtttgc

SEQ ID NO: 40255 - DNA, 2897 bp, Zea Mays
ttttttttttgtagtcgatctatccaacaagcccggccggaggtttaaacttatcaaatcacgtgaaaagatagctcgccgacgctgacgcagtccggaaacgcgtcgcccagacgcccacacatccatccacaacggtaaagccgccgcggcgatgtcttccgcacccccgcctccgccgtctctgaaccccgaagtgcccccgcgcatcgtccgcgcccccccgcgccggcctcctccgcgcgcgcccggtccgccgccttgggcggagcgtcggcctgccgtgtccgtcgacctcgaccgcggccgtcgctcggtccgcaccgaggtggacggcgtccgcgccgcgtcgctccctgcgcgacaccgcctccgcgtggagggcaaccggtggcagcgggactggaaggtgtccgaggtcgtcgcgcgcttgctcgcgctgcctcatgccgacgcggacgccgtcgacgccgtgctcaactgctgggccggtcgcttcgcacgccgcaacttcccgctgctcatcagagaaattgcaatttctggatccttgaaacatgctgtgcatgtgttccgctggatgaaaaatcaggagaactactgtgctcgcaatgacatttatggcatgatgattaggttacatgctagacacaacaaggttgatcaagcacgtggcctgttctttgagatgcaagaatggcggtgcaagcctaatactgatacatacaactctttgatccatgctcatgctcgagctggccagtggtgttgggccatcaacattatggatgatatgcaacgtgccgctatacctcctagccgaactacgtataataatgttataaatgcatgtggagctgctggtaactggaagaaagctttagaactttgtaagaagatgactgaaaatggtgtagggccagatttgatcacacacaacattgttttgtctgcttttaagaatggagctcagtactcaaaagccatagcttactttgaaattatgaaatcctctaaagttgcccctgatacatgcactatgaatattgtgatccattgccttgtaaagattgggctgtatggggaagctattgagttgtttaactcaatgagggaaagaagaacaacatgtcatccagatgtcgttacatatactagcataatgtattcttattctgtttgtgggcaagctgaaaattgcaaggcggtctttgatataatggttgctgaaggtgtcagacctaatattgtatcctacaatgcacttttgggtgcttacgcctcacatggtatgcacacagaggccttggagacttttaaattactgaagcaaaatgggttgagacctgatatagtttcctatacctccttacttaatgcttatggtagatctgcacagcctgagaaagctagggaggtctttaatgaaatgaggaagaatgcatgcaagccaaataaagtcagttacaatgcacttattgatgcttatggatctgctggaatgttgaaggaagcgattagtctgttgcatgaaatggagcaagatggcattcaaccggatgttatttcaataagtactctgttaacagcatgtggccgctgcaagcagctaactaaaattgacataattcttgcagcagctaagtctcgagggatccaactaaatacagttgcttacaactcaggcatcggaagttatttaagtttgggagattataagaaagctttggtgttatacacgtcaatgagggcaggcaatgtgaagccagatgctgtgacttacaatatactcattagtggatcttgtaaattgggaaggtatgtagagtctctgaaattttttgaagacatgctggacctgaatattcatttgaccaaggaagtctactcatccgtgatttgctcatatgtcaaacagggcaaattaactgaagcagcatctacttttaattctatgaaagaaactggttgcttccccgatgttttgacatatacgacattaattaaagcatatagtgatgatgggagctggaggagagcatgggacctattcaaagagatggaaaataatggcacacagccagatgctattgtctgttcatccctcatggaagcattgaataagggaggtcaacctgaaagggtccttcagttgatagaattcatgaagcaaaaaaagattcaattgaaccaaaaggcttattttgagataatatcttcatgcaccatgttacgagactggaaaacagcaagtcaaataattgaacatttggattcctctctctcatctatttcttttggcacactcaaccatattttaaattttcttggaaaatgtggcaggacagagagcatgatgaagctgttctataagatggtgacttcatgctctactgtgggcctttctacttatacgattctgctgagaaatctcttaattgtggggaaatggagaaagtatgttgaggttttgcagtggatggaagatgctggagtctgcccaacactctatatgtatcaaagcgtgcttccatatatctggagagacaacagtatggactatgttactctcatgcaagaaaaaataaatgcattgagagagaaggtaacatgagcttcagatatgcatttgctcgcttggtatgaactatgaagtactagaagtccataaccgaatactgaaggtagctttagaatgacactagcaggattcaggtaggacataattgtgagtctgcctgccctagtcgggattgaagcaacgaatccctcttcagaaaaaaaaatggatatggagttgatgggtgaccaagatgactatgctaccgtgctacggatttactgactgcaaaggcctacttgagcgaattcaatagtaggggatatatcattgtgaa

SEQ ID NO: 40256 - DNA, 2017 bp, Zea Mays
atggcggcgacgacgttcttcctaaatctcggcggcgggcacgacgaccaggcttttggtgtgggtcgtaaagggtttgtgatgcgctctagggctcagtcttataccagggccaaccaacgactcgaacgagatccccggagctccccagccgagatccccagagcatctgttggcacggccgatttccacggtgaggatgatgtgcctgaccgctgccccgcaggcaaagctcaccgcgccgccgccaaggtcactagcaacatcgcacccgatctggacgtgctcatcgtcaaggccaccagccacgacgacgagccggccggggagcgccacatccgcgagatcctccaccttacgtctggatcccgcgcccacgttgctgctgccgtggcagggtgctcccgcaggctctcccggacccgcgactatgtggtcgcgctcaagtcgctcatgctcgtgcaccgcctccttgtcgatggcgacccgttcttccaccgcgagctcctccatggcacacggcggggtacccgcctgctgaacctctccgattttcgggacgaggcgcactctggatcgtgggatcactctgcctttgtgcgcacctatgcgctctaccttgaccagcgcctcgagttcttcctccaggagcgcaagcaggggttccttgataggttccttgcttgccgccccactggtggcgcaaagcaaagcaggatggtgctggttgcgctgtatcagattgtgagagaaagcttccagctctactctgatatctgcgaggtgctggcggtgctgctggacaggttctttgacatggagtatgcggagtgcgtgaaggcttttgaggcatatgctagtgctgcgaagcagattgatgagctctctgcattctatgcatggtgtaaagatactggagttgcaaggtcatctgagtacctagaggtgcagcgtgtcactgataagttgctagagacgctagaaaagttcatgatggaccgggcaaagaggcctaagagcccaccacgggagcctgaacctgagcctgttaaggaagaacctgagccggatatgaacagcatcaaggcgcttccagcaccagaagattataaggagcctgaacctgtgaaggtggaggaagaggtgaagccagagccacccccacaaccacagggtgacttggtggatctcagagaacatactgttagtgcagatgagcaaggtaataggcttgctctagcactctttcaagggccacccgctgctggtggaaacaatggttcatgggaggctttcccttcaaatggtggcaacgaggtgacttcagcatggcagaatcctgcagctgaacctgggaaggctgattgggagcttgcccctcgtagagacagcaagcaacttgtccatgcagaagccagcaatgtcaagtgccacggcgcaaagaatgtttcacttcttcagaaccagaagcaaagagacttgtcaaaagtgttgtgtcataacgaggagcggaaaagtcagacgatgtcacgatgctgagaagtgagaacttcacatctcatctacgttaaaaatgtgtggtcctgacagcgcccctgagaaatatctgaccacgagtggacccccaagtgctcactatatatgctaggttgcttcttgcttggaaggaggaggcagcaagcgaccgacctgctaagcttcagccttcaggagagagtcgcaagaaagcgccatggtggtgttgccgcatgttttttaattatgtatagtgctcagatgggatctccaatgggaccccagttcactcgtccgtcacaatctggacagacctcaaacactaacgaaacacagggttctgagaccaccatggggatatcctacacatccaatggggccttggggatgccccccatggccaacacaaccacttccgtcaccagtggtacgttcctgatttcaatgctagttgatttcaatgctagttgatttcctcctaaataaactaagtctagattgg

SEQ ID NO: 40257 - DNA, 791 bp, Zea Mays
ttaatgtgtggtatgccccttcgaacatacctcatgtcagctttatctacttcgcaatcaatgctttcactttagatatggccatgctgcaatatccaatgcaatatcttttttgtgtgggggatttagattctaatccccttcttatgcagtgcattaagtattgaacgaggtttacatttggatgttgggttgtattgtcagtactttgtaccaaaaaaactttagtgtggtcgatttagattctaatccccttcttatgcagtacaactcaggtaacaagcaattacgatttcagacacgacaataggtattcttataacccctgcttcaaggggacttgaggagcagagacgaccatccaatgaacaacacatcctagaatggagctcaggaaccagggaatagatcggcaagcgaaaatcagggaagaccctaaaccctaacctttgggcaaaaatatgaagaacagaaatagtcagtgaatgagccaaaataaaacaaagcaagaagttcttagttacaagacgttggatctgcaatctatatctagaggaatgtggaactagagacctacctagacgaatcagacgacgaggaacaaaggaaactgtacctcacaaaacaaatgaagcccaaatggtactagatgaagcgtttgtgctgaagcggagtaggcgaggaagcccacaccaacaagactgaagcgacgtcgagaagagaaagggaagggagacgaaatagctcagaagagaagtgaggcacgatggaaggaagagtgtgctggaatt

SEQ ID NO: 40258 - DNA, 2032 bp, Zea Mays
ccagtctccaggcccaggcaaaacagccccggaccgcgtgcgtttcgcttccggcttccgcccctgctgtttcttggcgttcaccccctctttctctcgtggcgacgacggcgaccgtcgccgcccccctacgcgctaggtgccagggtccgtcgggtccttcgctggcgacgagcacctaccaggcgatccagtggtgtgtttgggaaggtttccgcggtcgggcggcgccccccagtggcgaagatgatccgactaccgacgtacgcagcgttcagcctgctggcgacggcgtcggcggcgtactacgcgttcagcagccgtgagcagttctacccggcgatggtgtacctctccacctccaagatctgcttcgtgctgctcctcaacacgggcctcgtcgccatgtgcgtcgcctggcagctcgccaggcgcctcttcctcggctcgctccgtgaggccgaggttgagcgcctcaacgagcagtcctggcgggaggtcatcgagatcctctttgctgtcaccatcttccgacaggatttctctgtttcctttcttgccatggttgctgcgcttctcctcgtcaaggcgctgcactggcttgcacagaagagggtcgagtacattgagaccacgccctctgtgcccttgctctcgcacatcaggatcgtctccttcatggttttcctgcttaccgtcgactgcctcttcctgtcaaactcgctcaggtcactcatacagaagcaggaggcgtccgttgccatcttcttctcctttgagtatatgatactagcaacatccacagtatcaacattcgtgaagtatatattctatattatgtgcgctacagaaagatcacttccaacatgaatgaacgctttccagatgctacatcagaagagctcgatgtgagtgatgctacatgtattatttgccgtgaggagatgactacagcaaagaaactgctctgtgggcatctgttccatgtgcattgtctaaggtcgtggctagaacgccaacacacttgccccacgtgcagagctccaatcattcccgcagataatggacatgctgtatcagcacgacaacatggagcccaggctggggttcagcctggtactgccactccatcctcagaaggagcaccaggtgagaacatgagcaggcaccaagcaaaacttgaagctgctgcagcggcagcttctttatatggaaggtcttttgtttatcctccagcaaacaccctaaaaagcaggtctgttcctcctcagcctgcatcaagtacaccacaatctgaagcaagtagctccaatcatcagtcacaaaaagaccaagaaatgcagtcccgaaacagcagcgatggtttagtgcctctgcctcttaatgcagatggtgctgttggttcaggaacaagcacaagggaccttgaaaattcacttcagaaggcacaagaaaactttattaagagccagattgagatgttacagatccaactgcaaatggtgcagcgtggcgctgctgggccgcccagtaacgagaatactgagcacacagaagaatgactgaatctgtgaacagacacttctgcatcgtggtgtaataataaggagaatactgatgagcacacagctgaatctgtaaataggcggcgatgaggatgggacaaaagaaagccaaggattggcgatacctggggctgggggaaactgttacatgatgtcttgcctggatttttggcaggcctgttaatttatgcttcactattagtgccttgttgccagcaccagatgtttctctctctctgtgtgtgtgtggtggtttctgtacatgaaagccttttgacgggagaaccaaccatggctagtttaattatgaagttcacttgttgtacccgagggaaaatagaaatgactcttgtttttgcctatctatccatgacttgttgtaccgaggtcctttgattgcagaggcgactgtgagcaacatagacggcaggggttgggaaaagatggccctgttgatgctacaactg

SEQ ID NO: 40259 - DNA, 5072 bp, Zea Mays
gtggagctcctgcactgctgtcaacatgggaaaacacctccccactgcatggttgccaaatctagtgacatctgcccatttcagcagccataaagggctgtgttcagtgaagattttcgcttgccctcagattttagccatagctcactacttgagtgtgcaacccttgtgttcctgctagtattcaccctctccccggacccaagatcgagcttctccagtgtctggcacaccacacctgtgcctggtgaccaaagacaaccgagggctcacctcaccgtggccgagacacttggagcaattgcaccctcggttaaggtgtgttctgcgctctccataatatcgtgaagctcactgaagaagaactgtgaactctactagggtgtgtgatctagaatggagtcgcgccatcgtggaattggcgccgcagacagcttcatcggcaacccttcgaactacgtcgtctccagccaatctcatgcgcgcaccgagagcttgaaaggtcagtggtactctccgcgtagttaatttgaactctactgtaaggttgctatggaatcaagctcgttggattgactgttccaccaacaccgtcgatagtcgtgttctcggatcatcgtggtcaaattaagcacgtgcccgtgtttgtcgtagtctggggagtctgtcagtgccctcgccgccgtcggtgttgcgccaccgtgaccgatcaggtgtgagtcgccggacctatgctcggcagcggcgtggacgtcaggttgcaaataggagtgtaaaggaggggctcaggtgattaggtcagagagacagatgaacagtgcattggatcctttaccagttacttgaatcggcaagggcctccatgaaaagttggatctgcgggcgcggggattcaccgttgctggatcgtcttgggtcggtttcagcccaggcactattcctgatttccctttattatttagctggcagattgaaaaagctatcaaaaatagcaaaaaaatttttttgtgggatttacaataatgtaaagttcctgataaaattgattttagaatttttagatctatcagaaaattttaagtgaattaagggtgctcttggaaaaactattggaattttagaaataagagttgagcaccaaaaatcttggaatttttttggagaagcttgttatccgatgttgaacacttggtaaaagtttgaggttgtttggaagccagttactgagaaaaccttgtaaggatcaaaatagaataagaaaaagaaaactttaatccaagacgtgattaaagctttagaagatacaaaattatcaagtgacaccttagtctttggataaaatttagtgtgttctaatccattgatatttcaagtttgtagtagtagcttgtggggttcagagaaagagtgatgagttcttgctcaagtcatatatgaagtttgtgtatgcttgtcatatgctttagtttatggtgtttatgctccccacatctccttataagagtttgcatttcatattattacataaccattcatgtatttgtaattgacttgtagaacacatctaagaagtggtgtttgaagtgggagcctactccagtgtttactgatcaagtggaggagccatctaactggatatttgatagagggatctagaacctcttcactgcaataaagacaagcccggtgcatttgcccattccttgtatttttaaaaggcttttatacactttaagtctagtgaaatgtgcattaagtttataggagttgcttggaaactatttgatgcgttgactaccttgatatccattccttttatagatacttcttaggaagtatgaaatattgtttacaaaaattgcttagccctgcatagaggtaagtcttggagatagagtttgtcctttgcactaatgcctagcttagagtttatcctgaggaaggatggctctacctacaagaatattttcaccagaatcacggggagatttaatgcaaggttccctatgatgttttaatcaccctaaggtacacaaataagtcctaaggatgaaagtacttaaatcgagacttgagctaggaacaggtgatattctgcataggttgattaaggattatagcaaatgtaggcttgctgatcgatgactatttaactggccacatgccctgatatgggacagggtaagcctaatcttagattgaccaataccagaaaaggctaccacacaatgggaggggagagatggcgagagtagcgtgtaccctccgtggcaagaggctggatggtggagtaactatgctctcgattggagtgaacgcggtctggtcttgagacaacatggggcgggtttggcatatgcaagggttaagggctacatatgtcgtgtggttagtgatccccggctgggtaaattgattcagatcgccattatatcctcagacaatggagacttgatcactgccttgcaatctaagtcatagatggaatcacaatgagtaaaaatgatgttgtattgattaatgtaatgatgaaattagactagatgcaaacaaggcctattaatacttaatctagcattaaaatgttgaaagtaaggactcattttagtaagcttttatgcaaactatttgtaacaccctaaaaattaaaccatgtttataatccaaatttggtgtgtcctatgggtgatcgaaggccgtagatgtatagatctcgtcgagatgattccgatcaattactagtttgccttgtttggagtccggatgagtcttttcgagtgccagttgatctaagccattggatattaggattatggaagtttccttctatttatacctccctaatcctagcagccacgtcctcccacccctagcagccatcacccttttgtgccttgtcccaagagaagagaggaagaacaagggagagaagagaggggagatgagggcataccgtcgcccatcgttgtcgttcctctccaagaattggttggatttcctttcctctctctcttttctccacttgatgaatgctttctcttgttttggatgagttttaggccctgcaattagcctttcttggttggattagatgggggattagattttgatctcgaaattagtctctgcagagtggcagattcgacagtttctgttcatgccagttttctatggtcttagtggcctcaaaaaaataaaaagtctatctatgagtcgtagataatttgtagacctttctatgccacaaagaacacctcaatcgtacattagatcagagagtaattgaagtttgattataacagtttttcagtctcataattctatgcagaatatgttcttctaagatttaggcaattcaatcaacaaaattaaactttgagttagtgagagaagttgtagataatttcataagatttccatattgataaaaaatgtattaatatgaatttagaaactccaattatgtttgttttacaatggttgtacctgtttgcctggcaaaccaagtaggtatgttcactggtgggttttatctagtaaatggtcgaattggttgttccaactatggagacttttgtagagggataaaagtccttattgccagcaaaatttcataatttttggttgattagtttgggagatatcaaactttgaagttaactatgttgctgtctgaaacagattcagtcggttatcttgtcgaatgttttagaacttatagatggcaaaatttaattattcatcgaataccgaagttgtagagtattttgtgtagatgcttccagatattttgtttgatagcactgctgtaataattttaaagatacaaaattaaccaccagcgctgctgctgttggcgggtggtagggagcagtggttgttcacgtcagtgttggggttgtgcgtaggagcgatgttgattgttagcaaattctatgagaatgtttgtactaagtttgattcccacaacaggtggtggggctctggattgtacctagtgccattccgaatcccgacgaaggcaaataaaatgcagtggtggtttgctatcgcttagggatgaaaacgagccggatacagggtcatcccgtatcctaccctaatgtatttctcttggatacaagaccggatacaggtagttaagattcgggacggatacaggacgggaccaggtaataatccggatgggtaagaaacggataacagatactactcaggtaggtatcggataattgtcgggtagttcgtccgatgatattaattgtccaaccatcaaacaaacacataaattaagcaatacataatcatgtatataatagatcaaatgtaagaaaaaaaatcaataaaattgacatcatgtagttcaaagttactaatcacaatgacattgtaaaaaccaacaccacaatatttaaaattcataaaatattctagtttcactcaaaaattgcaaataagttacaaaaactaataaacattttatgcgaagataaatcaagtcctcatatgaaaatgataaagtaaagtattgattatgttgaaacttggatacttacaatggtttcacatgtaactcatacaaataagtgaaagtgaaatggaagaaacatgagcatcttatagatcttataatccaaacattttttatggttattgttgggtgtcttcttctctaccgaaggtcctcaagacaaaaacaccttcggcaagataatacaaaggctcgccgaagctatcatcaacctcggctttgcttctcaagatgaagactgtgtacaagcaacgttgcagaatgtcgaagctcaatagcttcaagtcggaccaagcaaagaaataaaaagactaaatggaccttattaactttagttgcctgtaaataagcgtttaagggtacagatgtaattttatctgggttgcgtcccgtgcctataaatagatgaacggtaatcccgtactgttcatgctggattgtattcactttatgcatccacaccttcgaacaagccgaatgtatcaatgtaatattaatattgttgatattcatttctgttttatgaaatataagaataaat

SEQ ID NO: 40260 - DNA, 1076 bp, Zea Mays
gttagggcctgtagatccctcaaatccctaaccgacccgcgaccccgacccgattgccgtacctccttccgtgtggcatataaatccgacgcgccgacgcctcgattcctcgcctccccgagagcccccgtttctgtcacaaatcgccactaaaaccctagccttccgccatggccacctcccctgccgcctcgtcctcctccgctccgaccgcctccgcggtggctgcggctacgatggctgttgaggccaccgacgggccggtgctcagcgtagtatcgaagcgtctccgcgcactgcggaagaagtacaaccgaatcacgcagatggaggagtcgctcgccgccggcaagacgctcaaccgagagcaggaggaggttctccgctccaagcccgtcgtcgccgctctgatcgacgagctcgagcgcctccgccctccgctcgcctccgccctcgcggaggagctctcctcccgccccgcccccgccccctccgccgcttcctcctccgactcagattcgtcagtccaggacttgcttgcgctcgtctacttcggctccctctttgacgtcaagcagcaaagcgacttcgtctctttggtttacacgcgcgaactcgagcggagcagctgcctcacttatgactacgtcggggatgatccggaggacagtctcgcggagaccgatctgaacgcggtttctgcccttgcctccctcgccgcgttgcgccctcctgctgcagccggagtctcgcaccgtgacgcccttcaggcttgtgctcatcacgcccgcctctggctctgccgtgcggatgaacccatccatcctgactccaccatcacatatgctggggtgagggcaaagctggataggatcatggcatcgggctacttcacagcgcagctagaaatgaggacaccattggatctggctgctgcagtggcaagttttggagctggaggtgtgcaggtgcaagagagcatggttgtgtcacctcaggcaccggaagcagtggaggagagccaggctgttgaaggacacaaggtctgctggagcttgggaaggggcagggtggag

SEQ ID NO: 40261 - DNA, 571 bp, Zea Mays
gggcaactcattatggtaactcaccttcttaccttagcgtaggtgcgtcgttacaagtacattacacttcttagtattcccatgtctgtatacccatacacatccatggggtactgaattccagaaaagtaaatactccacatcgcaatcttcatatatacatatgtaaaacatgtatataatcggacgccacatttaaacactcccctagaccgacgattgtttggtcatgctctcacaactcaccttacctgagcgtcgatccattcagaactgaatggcctcaaaataacaatacacatgtatgcaatacccctggttgtgggttagtggttttaaactaagccacctaatagtccttaatttagggcttaacagaggatgtcgctagcattatagtttttcaaaactgtttttcaaagccaaacaatgtgtttagttgaaaataggtttttcgaaaccaaaacttttgttttgaaaatacgtatgtgaccgtatatacttaatcctgctccgataccagctgtggcagaacctcccaagttattgggcccacatgcacctgtccttg

SEQ ID NO: 40262 - DNA, 1941 bp, Zea Mays
aacataaatccatcttattgaaatactcaaaactctttaactcagagattaaattatttaactcaatgttagctctcatgtcatctataaaattaactgtaggatgtgggcccctaggatttgggggcctacggcggccgggcgggtggccctatgcccagatccggctctggttcacattctcattctctcctatacacggcatattggcatgcaattctgtagcctgcctgacggttttccctgcaaaattgggtatccttgggcttctaccttgatcagaacttcaaaaaaaaacgattcttactacctgcttgcaatagaatctcctcccttccagtttttaaattgtttgtcgtatcctctcgctctccttgagcgtaattaataccttcagtttcgacttccttcaccagttcaccgtgtgttctcccttcctatttgtgtgcatacgccgatacgcgtccatgtgcagcatccagatctcctcgcacgcaagcctcgtactgcctccgtataacctcgcggcggcggcggcggcggcggcgactggtgagcgctcgtgtcatcggaagcatcatcaacctcccgatcaacccgcgcgttcgccagcgctcggatcctagccgggctgacttcctcgcgcgcccgcgcacgcgcgcacatggccgcgctgccgctgcccgtgacgcgcgccgccgccagtgaccagcagcagcagcagggtcacggcggtgcgggcgcggaggtgtggaggagggcggccaaggcgctgctgttcctggcggccgtcgcgctcccgtgcctcgtgctgtaccaccgcgccgtcgtggcgcccggggacctgttcggcgccgccgccattccgtggcggcgcgccgccgccgacctggacagcgaggacgggagtctggagcgagtcctgacggcggcggcgatgcggcggcccagcgacacggtgatcctgacgacgctgaactcggcgtggtcggagccggggtccgtgctggacgtgttcctggagagcttccggtccggcgagagcacgagggagctcctgcagcacctggtgatcgtgtcgctggacacggcggcgcacgcgcgctgcgggcaggtgcaccgccactgcttcgcgctcgtcacggacggcgtggacttctcgggccagaagaacttcatgaccgacggctacctcaggatgatgtggaggagggtcgatttcctcagggaagttctcgagaaaggcttcagcttcgtgttcacggacacggacatcgtgtggttcaggaacccgctgccgcacttctacccggacggggacttccagatcgcgtgcgaccacttcacgggcgacccgagcgacctgaacaacgcgcccaacggcgggttcgcgtacgtgcggtccagcgcggagacggccgagttctacaggttctggtacgcggcgcgggagcgccacccggggctgcacgaccaggacgtgctcaacgccatcaagcgcgatccctacgtgggcgagctcggcgtccggatcaggttcctcagcaccgagctcttcggcggcctctgcgagcccagccggaacctgagcagggtctgcaccatgcacgccaactgctgcgtcggcctgcgccgcaagatcggcgacctcaacgccatgctccaggactggaggcggtacagggcgctgccgcgcgaggagaagcgcgaggtgtcctggaccgtgccgcgcaactgcagtctttttcacacacaggaggagcgtggttgatgaggaagctgttttttatttaaattttttgcaagacttgtcagaacatggatgtgtgatgtgatgtaatgtaaacaaaacatgtatgggaagttcatatgtgttgtttctgtgacttatgcaagttttgcagggtttggaaatagacctagacaaaatgtttgtggttc

SEQ ID NO: 40263 - DNA, 310 bp, Zea Mays
tgagcgggttgggccggccgagcgaggtgagggggaaggaaagagatgggctgagcggcgccagaaatggcccaagagcaagcttatcatttctttttcttttcctattttctattttgtttgtaaattttgaatccaaatttgtcactagttttgaattcaaactataagtaaatacgcaatcaaagacttggaatgatgctaggtatatatttattcattattttacccatttatttatacccatgcaaaacacctaacatgagatgcaatttatagttatttttaattactcttatttatttatcta

SEQ ID NO: 40264 - DNA, 4764 bp, Zea Mays
agcaaagtttttagggttgttgctgcccgtgtgccaggcgaaaaacgtagcctcgcactctcgcaggcggcggcgcatcgagaaacagggctgcggctgttgcttcttccacctctccggccatccggcggtccatcgttccgtgccggcggcctcccctcctacgcccctgccgattcttcaatcttcaccaacgtctgcgcgtagcaggctagcagtcggcacggcttcctcagatctgccggacgacttgctgttcgtcaccgactcaccagcaaccaacgtcagccatcagccggcagcaggggaagctgggcggagggtcattgcggcacggcgtccaggcgtacagaaggcaccagcaacagcccatggcaaacgccgcagatgaccctatggcagatgaagccggagtagaagatgccttcacacaggagatcaatcattcgtacgtccctagataccatgtgttgagttggatggaaactgtggaggggatggtggccggtgtggcgtcgcttccgccggtgtatttgatactgaacagagagatatatgatacatgctcctgcttgctcatgatgccggtttggtgccaaagctatcttcttgagacgggatggggatggaagaggctggtgccctacagacctggttatgttgagttgcatgtgttcaagaaataccttggggactatttcgaccataatcgtgaagcttttctttgtgccgagcagaagcctgatccatttggatggattgttgctgaaaagagtgccctgattgctgcagccaaatcgtgcctcaagatggagaaggcacttctcaggtactgtgctagctttctcactcctgacgacaaaaggctgatcctccggatcaaggaccaggcaaagcaaatgatccaatcagagggtgatcaatctttgattgtaactatatgcttggagtgtattgcgaaggaggccgagttaatgtacaattatttgccttgtgattttgacaccaccgaagaagtcgccgtctgcaataaggttcggcggtctgccttgaatcttatgctctacaaaggttctgaatctgctgttgctgctggtgccatgatggtgtgttcctgatactctctccattcattttataggctttattttgactatgcaaaaaccaatattctgctgtaaattctccctatagtattatgttggtagttacaaaatcatagtcagtagcaagtgcttttaattaggaattgttacgtaactcacattttatgggactaatgtctggtcaaagcatgaacttggatagtcaaaccacaccttataaatatgaatatagggagtaattgtgtattttttaatcctctgttatcctgtcaagcttctttaaccaaactgcaaaaacgatgtacttgaagggtatcacaacagaggctaagtccatttttgacttgcttagtcgagaccatgacgtggtcatggaagtttttacttgtgagagtataagggaacatacagcatcagttctgacccagcttgggaaggaatttgcttgcgagactgctactgtgaacagctcatcagcgcggcctatgggtgatgttagagatctgaactctgaagtatctggttcaatggaagactgtacgagtatggatggagcaaggttttaaagtcggctagtcgactctagtcgcctaagcaccgataaggtgactaatcgcgattagtcgtcgattagctcgattagtcgatcctagtcgactccctagtcgtcctatagtcgtccatctataacaggaccatatatatatatatatatactagattgcaaatctattgacaatattacaatgaaactgtagaatgaatgaatgatcatgttttcactaaaaggtaaagatcacttagacacttaccttggattggagtatacaacagcacactgcaagattagtaggacaacacttctggtatatctccagcagccttactagtgcaaaacgtcatatatctccaacaaagcaagcagaggagggcgtccagcaagcagaggagggcggcggcgcttacagcagcagcaagcagaggagggcggcgctcagagcagcagcaagcagaggagggcggcagcgctcagagcagcagcaagcagaggagggcggcggcgctcacagcagcagcaagcagaggagggcggcgctcagagcagcagcaagcagaggagggcggcagcgctcagagcagcagcaagcagagaagggcggcgacgctcacagcagcagcaagcagaggagggcggcgctcacagcagcagcaagcagaggagggcggcggcgctcagagcagcagcaagcaggggagggcggcggcgctcagagcagttagcagcaagcagatgaagcggtggcgctcaactccagctaggttaaagactgtaacggcattggcacagtttcaggcttttcagcccccctggtgggccggcccaaatagaaaagagcagcctggagcccaaaacaaagcacctagtcgagaacaaccctaatcggacgactaatcgccgactaatcgcgattagtcggacgactaggtttctagtcgccctaatcgcgtcggtggccctaatcggccttgcagcagcgataagtccgactaatcgcgactaatcgcgattagtcggacgactttaaaaccattccgatggagacaatggaaacaatccagttgttggagggggtggctaagaactcgaagaatttaaagttggtggagaaccacgaaaacgagaccagggttgccacgtaagagaagactgcatcagcatcactacttgcctgttttgaaatttaatgtacctttcacggaagccctcactaacattaattgtttgtatgtttcatctcagcttgatgactgaaaataactagggccttgcagggaaaccttcgttgacttctgaggtactgaaggttagtgaagaggcagatgattacgttccaaataggaagtcttgaatactgctgtgacttgtgttttgaaatagatatagtattttctggttctcttgcaaacctcattgttgcagccctaacatttcatggtgtgtttgatttgtggggtgggggtggatgggagacggtcaacccattttttaaagttgttcagttagatgggatgcccaaccagtggggatattcccccgagatcttggatgggatgtccatgcaaatctggtggacagagtagtccatggccttgttgaatacttattgcgcgactggttgtggtcacctaatgtgccttttctttttgctccaattgttcccaatctcatccctcattaacctgtttctgactgggatgcgcacagcaattgggaaccagcaggccctctgtccagacgctggtgctttgtgctccgttgttgtgctgctgctccactggcgtttactagttctagtgccttttcactgatttgtccgcacagggatcctggtgctagtgcttggctgattgctgctgcccctgtgttctccctcaattcgtactgctcatgcaattcctggaggccctaggaattggttctgcagttgtacctgtaggctgtagctgccaatttagttcgattttgaatttggcaggtagttgttgtgcttgtttctagatgcaagagtgcttattgtttgtggtgtttgttattggaaattttggttggtggtagttatttgtccggaaaggttaatgcaatgctgtggcttgtcttgcttttagtcaatggtagtaagttgagtaaaatgttcatgtgtatgtgcagcttgtggtcggcagtgtgaaattttgacctctaattatttgttagtaatgtaattttctcagcaggaatccaattcatgatgatgagctacattattcaagtttagcaactattgattgtgtttcccatcatgccttggatgtgtcaaaacttgaacacaccaatttgaagattatcataccctgcttatctatccacatacaaccaaccaaacaaaaatctgctggatcatcccatttgaaaacttgcaaccaaccaaacaagaatttggctcatgcaatccgtccaacctaatgagctaatacatgtaggagcatcattctatgattctatcctaaatccatggatggccctatcccatccaaccttgcctctccaacccatacggccatacaaacttgtgaccattcattgtaattctcatttcattgtcataagtgcgcctcgtttgacactgttgtttctctcgtcatcattggctttgtgtcggacacgttcatgataatttatctgcagcaacggtcaaatttatgaagctacaaggtgcaagttatgagctgctgtaactaaaaggatctctggtttcttttgagcagctgtctgttgtgtcaagttatgtgctacttgtaacactaaagtaccattttaccttatgacatgcagtgcttggttgttctgtcgtagttaaagaccgtgttgcaataagtgctagttctgtatgtttcctgggtttatgttatcaaatggttgcctggtttgcccactaatgtcatgttgctataagtattcctagctgttgagaaatgcgtgcgcgcgtgccgatcgttgtatcattgggtgcaacatcataggtcattgtagccaagggctatgaagaggggagtttcagatagtccaaaaacaccagggtacatagcaaatacgaaggttcttaggaaggaacagaag

SEQ ID NO: 40265 - DNA, 623 bp, Zea Mays
accgagatgttggtggtttgaggggtacaagaaatacaccattggaagagatagtagcggcattcttacacacactggctcatcatgtgaaaaatagaacaatagggggtttcttcttaaggagtggtgagatagtgagcagaaacttcaatgcatgccgcctagcagtattgaagcttcaccaattgctccttaagaaaccagaacctatacctgagggctgcacagactttggatggaagcacttcaagagttgcttgggtgcattggatggcacacatgtaaaggtgactatcccaactaagctgaaggggagatataggtcaagaaaaggagaaattgtgacaaatgtgttgggtgtttgtgcacctgacatgcagtttatatatgtcttacctggttgggagggttctgcacatgacgggcgtgtgctttgagatgccatcttgaggccggatggattacgtgtccctcaaggttgctattatcttgttgatgctggttacacaaatgcaaatggtttcttagcaccatatcgaggacagaggtatcatctaggaggtttcactactcaaaacccaccacatagtgctgaggagtacttcaacttgtgccatgctaga

SEQ ID NO: 40266 - DNA, 2416 bp, Zea Mays
ctcggccctagggaaggattaggagtgatcgaaatcgaatcggcggccacccggcaccctgcccgcctgtcgacactgtcgggtccggttggtgccccagcgaaaagcaaaagaaatactactaccggaagaaactgcctcctcctctcctcgcttctctctttggaggcaggcgcaggcgggcgagtggtccggtacacctctagctgcagatcccagctcgcgcggtccagcaggccagcactaagctccctccctcctgtccacctggacagcgcgcccgatcgtgaatcgtcgcttgctctggagaaagcttgcatttttttttcgtttcttcttcttcttcttcttcttcttctttttttttttgcttcgcatccttttttcctggcgcggtttcctttgtacgggaaattttcggttggtgcggttggttggtcattttcccgcaccttctctttggttcttgctcgagagcgccatctttcctgctacccgttgactcgggcgggcattccgtcgagcaccttccgtgcggtgtggggagcgacggttcctggtttctcggggacgttccttgatgccgctgttgtgtcaggcgcaggattctagcggatggaatgccacagctgcgctgaaatcaagaagatctgtagcgatcgctggtgcggggtttgaagatgctgcagaaggcgccagcgatcttggtgacacgatgagtcttgcacgcaagcagaaggttgtcaaggaaacagtggagatggaggaggagcaggagtttgtttggaaatctaacctgctcccctacaaggatgatgatgccttcgttcttcctgagagtagcaaggaggaatacgcatcaacatcaggagacacagctccgtctggcaaaatggaccccaggatagaaaggtctggaagcaatgggacaagcaaggtccctagactgggttccatgcttgggacagccagcatggctggatttggcaaggcagtggagattctagacacgttaggctgcttgatgacgaccttgagctcagatggtggctttgtttccaggaccaagaccaaaggatgcaagatatcaattcttgcttttgaggttgccaacacaatacttaaaggtgctagtattatgcaatctctctcggaagacactgtcacatacttcaaacaggttgtgcttccttccgaaggtgtgcagaatttggtttccagtgagatgagtgaactgatgcgaattgcagctaacgacaaaagagaagagctgaaaatattttcccaggagattgttaggttcgggaaccgctgtaaagatccccagtggcataacctggatcgctactttgtgaagttagaatcagagagtgcaccccagaagcagctgaaagaaacagcaatagcagagatgcaaaagttgatgaacctcgttcaacgtacaactgatttgtatcatgagttgcatgcactagacagattcgagcaagagtaccgctctaggctaaacggaaagggtaatacagatagatttgaaaaaggagacaatattcaaattgtgagactagagttgaagacccaaagtagttatgtgaagagcttgaaaaaaagatctctctggtccaagacgttggaagaagtggtcgagaagcttgtagaagttgtgcactacttgcatgtcgagatcgacaatgctttcggaccttctgatggaggaggtgtggtggtgaatgcggaaccaaccgtgagctgtcaaaggctaggtcctgccgggctcgcattacattatgcaaacattatcatccagatatatagcatcgtttctcgatccgggtatgtgccagcaaattcaagagacgccctctaccagggactgccaccgaggatcaagtcggcgctaccaaatgagctgaggacgacctcggcgcctcagctcaccgtcgaccagataagggctaggatggagaagaccctgaaatggctcgcgcccatggccatcaacaccacctgcgcccgaggcttcttcctgaggtttagcgagtgggcgaaatcagggaccgagagcgttggcagacgactgggccaagcggatcgggtcgagacgctgtaccatgcggacaaggcaaggaccgaggatcgcattctggagctggtcgtctggcttcaccacctcgtcagccagagtagccggccggcgttgcaaaaaggccactgaccagatagatgccaggaatggtggaagaagctggagctgttcttgccatggagaggaggacgtccgggtacagtcggggagatgcttgtatatgcgtgctttgtaacatcagctgagtaggttttagttactactttgttctgcttgttgtttgtaagtgtacttgtgaataccacgttatacaatgcaaagaaaaacgca

SEQ ID NO: 40267 - DNA, 2668 bp, Zea Mays
aatactctccccgtttacaccctttctctctcatcgccgctgatttctcctcccctctgaaagccttttgaccgttgcagtctctctctccctctgtccttccgttcccggccactcctctctccctctcttctctctctctgcagactgcacaaagccgccttcgtcttccactcgttcttgtttacacacacagcacagcacagcacagcagcctcccgggaaagagaaggcagttccctcactgtctctcaggattgtggtccaggtcatctccccgttcgctggcttcagcagcagagctcttgctggcaaacaagtgatctttctacagttttagaagggcaggcctttgacactgggtttgctctcttctcatgttcgaagctcggagattatgaatacttctacctattacatgccttatgacaggccaagatatgcacctccatcaccccaggaggcaatgaggacttcttattatgcatcttatgacaggccaagctaccgaccaccatcatcccaggagccaccgaggaattcttatcatgtgccatatgacaggccaagcttcccacctccatcaccccaggagcaggaatcatcaccatgggactccttctggaacccattctcatcgctggacagctttggatatccccgccctcggagtagctatgacaacgtgaccaatgacgatgaactcgcgaggttacagcgggtacgagaggaggaaggaatcccagaacttgaagaggaagacgatgagtgtcaagagcatgtacaaatgcatagaaaagaagaacaagaagatcatgataatgcggatgatgatgatgaagacgatgaggaagatgacgatgacgaatgtgagcattcagatgagtatatggtttctgacgagggcacttgctctgtcaattttgatgctaatatgaagcaagaaacaaagggatttgaatccaaaggtattcagtgtactgaagcaccagaacctcgcaagacagtagaacttgagttaaaggcacacaagaaagaactgatgagaaacagagtagcaaatgcagaagaaactcctggtttcacagtatatctgaatcgaagaccagcaagcttggttgaggccatgaaggatatcgactgtcagttctcgggaatatgtgacgctgctcgggaaatctcagtaatgttggaggcaagtagagctcagtactcagcctcaaacgatctttctgcgaagatgctgaatccggttgcacttttgcgctctgtgtcgtcgcgttcatcgtcttctcgtttccttcttgctccctctagctcaatagatgatctctttgacaatgagactagcagctgttactctgaagaatcttgtagtaccatgtctggaagtcaccactctaccttagatagactctatacatgggagaagaaactgtacaaggaagtaaaggctggtgagcggttaagaatcgagtacgagaagaggttgacacatttgaggaaccaagatgtcaaaggcgaagaaccttcctctgttgataagacttgtgcagcattaagaagcttgcatactcggctgaaggtgtcaatacagacagttcagtcaatatcaacgaggattgaaattctaagggatgaggagctgcatcatcagcttatggagctgattcaagggctatcacggatgtggcgggccatggctgaacgccacaaagcccagaagcgcaccatcgaggacgccaagcttctcttcctccagcaccacccctcggccgccaccgccatctcccttggcccgctagaggctgcaggtcccccaccggctgccttggaattggagtccgagatccaggcgtggcgaggagcgctggaggcctggctgttcgcgcagcgcgcctacgcgcgcgcgctggccgcgtgggcgcgacggtgcctcggcatcagcaccgcggcgcggccaagtagccacgcgctgccgccggcgttcctggcgtgcatggagtgggggcgcgcggtcgacgcggccactgaggcgcgggtgatggacggtctggacttcttcgtcgccggcgtcgggtcggtgtgctcgggcgcggctgccgggatggagggcatggctgggcgcgtgctgtgtgctggcatggcagcggtcaccggcgccttggcggagttcgcggcggcgtctggcgacagctatgacgccgctgtcgcagctgtcgtcgccgcggcgcgtgcgccggagcgcgggaaagaggacggcgtgggacaagtgccggaacgctaggaaagtgctgcggcggttgctttgttggttgaccggcccccgtgacgtagagtggctctgctcaccttgtgatgacgatgggtagggtaggagatggaattaagcatgcagctacgtatgtagtcttgtgattgataagaatgctattacaaggctatctaattttgctagcgactgcttattatagtgtggtggtcctagaccgacaaatctaagcaatagcaacaattggttgtttgtgatacaagcacaagcgaatgggatggagtttgtttatgagagcaagaaccgctacgcgcggctacggggaaactatccgatacgaggaagacgaaggcttaccggtggcttcaaatgcggcttttcccctcgagccgttct

SEQ ID NO: 40268 - DNA, 1754 bp, Zea Mays
atgtatgtatctgcgcatttgccatttctggttacgctttcctctccggcctttccatcatcgccaccatttcgcacctcctccacaccggcaaacaacttcacgtcgcatgatctcgcgggagcgctcgaggatatgcaagtggcggccgctgcggcgtcaatgcgcggcaccgagacggttggcgcgaagtctgctgcgcggcggttgagccgcgtgctggtcgggcgccgccgccgggccgccgtgctgctcctcgcgctggcttacgcggctgcgatgctcatgctcaccattggcggcagcgaggggtctggatccagcggcgtggtggcgggtgtgctaaggcggggcgcgcaatcggcgccccccgggtcggtgtaccgcagccacctcgtgttcgaacggctgctcccggaaatgcgcgccttcgcctcccgcccgaacccgttagtgacatctcaatacaaaaagtttggaaagcaatgggaaccttgtatcagcaaggggttgatacactcagagctaccgccttcaaatggtttcctcatagttgaggcaaatggtggcttgaatcaacaacgcatttcaatttgtgatgctattgccgtggccaaaattcttaatgcaactcttgtgacaccagcatttcatttgaatagcgtttggcgtgattctagcaaatttggtgatatctttgacgaagatcacttcattgagtcacttagaaaatatgtaagggttgtaaaagatcttcctgaagatgtttttctgcgattcaaccataatatcagcataataccaaacatgagaaccaaagctttctcacccccaagttactacttacaacatgtgcttccaaagctgttggagctaggataatatggttgaccgaatgatcaagaggagttttttaagtggcgggaagacatggtagctttttcatgctgtaattatgatggtggctcgacggagaataatgcaatggaaaatgctcgcgaaaggagctggagagggaaattccaccgacctggtcgagtgataaatcctgaggctaaccgaaggaatgggagatgccctttgacacctttggagtttatacaaggtcggaatgatgctgcgaggaatgggatttgacaacactacttccctttatgttgcatccggtaaaatatataacgctgaaaagtacatgactcctcttcgacggttgtttccatttctacaaacaaaacacgctctagttacacctgaggagcttgcacagttcaagggacattcatcaagacttgcagcactggactatactatctgtcttcatagcgaagtgtttgtgatgacacaaggaagcaatttccctcactttctgatggggcacagacgttatatgtatggaggacatgcaaagacaataaaaccagataagcggaagctagttcaactctttgacaatccaaatatcagatgggatcgattcaagcaccacatgcaggacatgcgtcggcacagtgagatgaaaggtttcgcattaaggaaaccacaggaatccatatacacccttcctatgcctgactgcatgtgtcagcaagctgaagcacgatcaagggacacggcaaggagctaggcatgttccacccttcttctaacttgtaagcaggcacattaagcaaaggaaaaataaatattggtttgagcgtagaagagaatatagagatttcaaattatatggcccttgatatgaatcccttcctcaa

SEQ ID NO: 40269 - DNA, 1986 bp, Zea Mays
atgggtgctgacaccttgctgcggagcggcggcgagcctggctccatcgagaggcggcggcgtggggaatatctagggttcctcggaacccgagccccagcacacagacaccgcgcccgcggacactgctcgctccccttctcctccgtcgccgccaccgcagaagcctctaccacgcgcgaccagctcgccgccgcacccgccggggccgacggcctgcacgcgctcgccgagcaggtggtgcagctcgtgctcgccgacggctccggcgccagcagcccgcgcgtcgccttcgccgacggcgtcttcgtcgactcctcgctgaagctcaagccggccttcgaggaggtcgccgtgggaaagtacagggccgacacccagtccgtcgacttccagaaaaaggttgatttgatccccttcccaccgagctcccgaacacttgtgtcctgctaccgtagttcatactcttatgacagtggtcatatcaaccagaacttatcaaggaagtgtgaagcattagttgtgtcaggtttggcagaatatggtgatgaaatagatgggattgccccagctgatatcatgaagattcagcctatcctgcaagaagatctgaaactagatttttcaaaatcacgtacaaataagacagggaatgctgaaattactaagaggagaaggatggtcgtgatagatgaggtgttaagccaagatgagacaccattcttgtacagcctcgtgtttggtgaaggtgttgtcaatgacacaacttctgttgtgttgttcaatgcaatccagaactttgatcctggaaatatcagcggtgccaaattactgaacttcattagcagtttcctttatttgtttggctccagcaccattcttggagtagcttctggacttcttagtgcttataccattaagaagttgtactttggcaggcattcaacctatcgtgaagtttccattatgatgctaatggcttatttatcttacatgctagctgaattgctcgatttgagtggaattctcactgtgtttttctgcggtgtcgtaatgtcacactatacttggcacaatgtaacagaaagttcaagggtcacaaccaagcatgcctttgcaacattgtcgtttatctccgagacttttctgtttctttatgttggtatggatgcattggatatagagaagtggaagattgtcggtcaaacttatagcccggtaaagtctatcgctttgagcagcaccattttagccttggtgctggtttcaagagctgcttttgttttcccactatcctttctatcaaatttgaccaaaaaaactccaaatggaaagatatcttttaggcagcaggttattgtttggtgggcgggtctcatgagaggtgttgtgtctattgcgttggcttacaataaggctgcagtgccacacaagttcgtttggtgtaggtgctgcttgatttttggcggtgcatgccgggtgttcgacaatgtttctgaggttttgtggcagtgtgaggcattttgggagggacatcatcatgcccaacttgaagtcgtccgtgaccacaacagcgagcgcggtgaggccaagaatgaggattcacgaacactgcaattcaattatggttcattcaaacataaggcattggataaattcttaactaaaaaggtcgttgctgtttgtgaatgtggtttggattatgacagacttcagttctgtccgacagatatgcaaaaaaagtactttgagaaacaatttgagttggctgaagcagtaaagctgcccatttttcttcacatgtgtgctgctggtgaagacttctatgaaatcatgacacaaaatttgcacagattccctggtggggttacacattccttcactgactccgcagaagatcgggataggctactttcttttgagaagatgtttatcggcaagttcttgaggtagtggctagaagcaaagaaatttctgacatagaag

SEQ ID NO: 40270 - DNA, 2921 bp, Zea Mays
atcaaatataaatagcatcgtctcactttttttcccaactagtgtgtgatctgtgtgtgagtgtgagattggttcaaattcctatttgaattttagcctttttttactatttaaacatgggagcaggctacccattagtaggtggtaccgtggtagtcagcggtcagcacagccttccctaactatctcgtcaatcgtcagctgcactgcaatctgtggtcgcaacgcaacgtcccccgtcgtggccgcgtgctatcttcctcctccctccctccttgccgcacgcgtcaaaccttgcaaagagagttcggtcgacggcgccagccggcgatggcagcgccgcgccaccgccagggccacattgcgcagtgccttggcaggatcctcgcctgccgcggcagcgccaccgccgccgtcgctgccggcccaggcggccgacggctcaccggcgcggagttcgtcgacggcgtgcggagcctggccgctggcctcgccgaccgcggggtgcgccctggccacgtcgtcgccgccgtcgccctcaacagcgtcgagtacgtgcagctgttcctcgccgtcacctacgccggagccatcatcgcccctctcaactaccgctgggtgcgtgcgtgctcctccacttcatctccttttctcggttcttacagcacacagcactcactccggcaaagagtgcaagtaagtttcgtcgtcgtctccccctgttctgaagcagagcttcgaggaggcggcgcaggcggtggagctcgtgcggccgacggcgttcgccttcgacggcgcgttcagctcctgggcgcttcggctgatggagggcgacaggttcccatccatcggcctctacctcctcctgggcgatccttgcaggaccggccgcgctgctgcaggttgtgctgtacccattaccgacgtcacggggagcctcggcggagctacggcagcggcggcgatggagcccgtgtcggctccagacgacattgctctaatatgcttcacatccggtgaaaaaaccaggctgttacagaacgaatagaattgaaatcgagaaacttggctacaggatgtatagctgatggtacgtactctgattctgatccaaccaggaaccacggggcggcccaagggcgtagcgataagccacacgtccttgatcatccagtccctcgccaagatcgccattgtcggctacggcgaggacgatgtttacctgcacacagcgcctctgtgccacatcggaggggtctcgtcgtgcatggcagtcctgatggccggaggctgccacgtcctggcgccgaagttcgacgccaggtcggcgttcgccgccatccaggagcacggagtgacctgcttcatcaccgtccccgcgatcatggctgacctgctgtcctacgctcggaaagaggagatggcgccgggctgcgggaggacgacggtgaccaagattctgaacggcggcggcgggctgccgctccacctcgtaaacgcagcctcgcaatcctttcctcgggctgctattttctcagcttacgggatgaccgaggcctgctcgtctctgacgttcatggccctcaccacgccaaagcttcaagagccggagccggagccggagacccaaccgtgcggccaccacggaggtgtctgcgtcggcaaaccggcgccgcacgttgagatacggatcggcatggatgacgacggcaccaccgccggttcttcgccgaccgggaacgtcttgaccagaggcttgcacaccatggttggctactgggcaaacggcaaggcggactcatccgagtgtgacaggaacggatggcttgacaccggagacactgggtgggtggacgaggagggtaatctgtggctcttgggaaggcacaagggccgcatcaagaccggaggcgaaaatgtttacccggaagaggttgaatcggtgctgtcccagcaccccggagtggcgagagctgtggtggtcggcgtgccggatagccgtctcggggagagagtcgttgcgtgtgtcagcgtcaaggacggctggaactgggtggatgcgagagctgagcacgagcaccgaggcggaggcgaggaggtgtctcctcagatcctccatggccactgcaggacgaaagaactgagcaatttaaggtgccaaggtcttattaccagtggaggcagccatttccggtgaccacgacggggaagatcagaagggaggagctgaagagggaactcctggcagcaattcgactgcccagcaacctgtagctttttgaggcgatgatctgtttttggaccaaatcttggttcagttcgactccgattgaagtcttctgttttttttggtctgtaggtgcttttagcttttacctggttggagtttaagatgcgaaaaaaagagcgtttgattattggaaacctgtaacatccatgacttttcttcaccttgacaaaagaagtcgagtcaatggcaagtcccatgaaattcagagcatccgattcttggagaactgaaaattgttgacgccttttcagagcgccaatcactcaagaagaaccggcggcggtgctctctggtcagccgcggacggtccgcggcctggggctggatggtccgcgacctggtgtgaggcggcggtgctccctggtcagacgcggacggtccgcggcacaggaccggacggtccgcgacctggtgcagcaggagcccgggttccctgcctgacggctggacggtccgcgcgtgcgcaggggcggcagaggatcgctggcggcgcctgaatctcgctcccgggagggaccccgtcggggaggagagatcctaggagttgtctaagctcgggccggccgacctagactcccctaatcgacgtagagtcgaggagaggcagagaatttgaggattggaatactaa

SEQ ID NO: 40271 - DNA, 1970 bp, Zea Mays
ctatgggcttgttactttccgcgaagtggctttgctttttgatgaggagtcttcaatggaatccagcaaacagagtattgcaattactgtagcacatgagctggctcatcagtggtttggcaatcttgtaaccatggagtggtggacccacttgtggctaaatgaaggttttgctacatggatgagtaatctagctgtaaattctttctttccgcaatggaatatctggacacaatttcttgatgacacaaccgctggtctcaaattggattcacttgaagagtctcaccctattgagaaagcgttggcttcatatataagaaaatttgcctactcaaatgctaaaaccgaggacctttgggctgttcttgaagagaattctggtgaacctatcaagaatatgatgactacatggacaaagcaacaagggtaccctgttattaatgcaaagcttcaagggaattatctggaacttgaacaggcacagtttttgttagatgggtcctctggccccagaatgtggattgttcctataactgcagactgtggttcatattatacacagaaaaaaattctactgaaaggcaaaagtgataggctggatataagagacattgcttcacagtgtggtaaccaagagaagggtggaaacttttggattaagttgaacattaatcaaacaggattttatagagtccaatatgacgataaacttgcagctgcacttcaaaatgcattgcaggccaagaagctgtctgtaatggataaaattggcattgtggaagattcactggccttatctatggcctgcaaacaaaccttaacatcgttgctacgtttactgtatgcttaccgcgaggaggctgattacagtgttctttcacacataaatactgcgagtttaagtattgctaaaatatcggttgatgctactcctggattggtcggtgacatcaaacaacttctgatcaagcttcttctgccacctgctgtaaaattaggttgggacctcaagaatggtgagagccacctggactcgttgcttagaccagtgctcttggttgctcttgtcaaacttgggcatgataagagtataaatgagggagctaggcgtttcagtatctttgtacatgatcggaacacttctcttcttcgtcctgataccagaaagggagtcagatgaagcagaggaaagggggcgtgtcctaagcacactgtgcttttgtaaggacgagaatattgttcttgaatcactgaatcttctttttaccaatgagtttcgcaagcaagatgcatattatgtacttcaaggtcttgacgtggagacgcgtgataccgcatgggtgtggttgaaggataactgggatcgtgtgacaaggaaatacggggacacacaagcaggaggttttatcagatacgtcgtcacattgttcacctccaacgagaaggcagcagagttctcccgcttcttcgcaacccgcaagaagcctgaattcgagagaacactaaagcagagccttgagaacgtccggatcagcgcaaggtggatccagggcatcaagagcgaaccgaggctcgctcaaacggtgcaggagctgctgcgtagaccctgatctgccctcggttgagttgcaggtgtggccggaaataagctggtcgtagatgacatacgctttgtacattctcagtgtgtaaaaggttacctctcttagtgttcatggcagcatgcaaatgtaagctattgggttgaatttttagcccaagcatgtgctagcagtgatctcgtgtctaatttgagaagcgtagaggtttaaaagaagattaaagtgcatttccgattcttaaatttgtgcggctgtgttaatctgatctataaacttttaaaatatatctcttaaaggctcaatatttgttttggtgtttgttacgtgcaaacggacccaaacagatccggtaagtccatctcccca

SEQ ID NO: 40272 - DNA, 629 bp, Zea Mays
gacggagctggagctggcgcttagggaaggctcctccatctgcagctgcaagctccctgtgatagctagaggatgagggaggtggtggctgctggcggaaggctcctccaatggcagatgggtggcattgcagtccatgtcctcagcggcagagtggacttgcgaggtacatgccaaggtggaggagcacccgacctccgatgctaagtgttgcctgtgggggcggggttgtagcaggccttatcggtgcaacaacagccgcagcagctaatgctgtacacggtgcataggtgtgccactagctacaagaccaagtgggatgagctgcacccggtttcctaggtgctgctacttgaaatcgagtggtgtgcaaacctggtagtctgaagacatacaaaaagttcgaggcggaaatatatgtcctcacaaaggatgaaggtggctggcacactgcctttgtcacaaattacagcccccaattctacttcaggacaactgatgtcactggaagagttgagttgcttggggagatgaagatggttttgcccggtgataatgtaactacgaattttgagttgatatcacttgttcctcttgaacctgggcaaagatttgtgcttagggaagga

SEQ ID NO: 40273 - DNA, 3942 bp, Zea Mays
ctgcacggctgcacccgccttgtttggaccgcacgcgcggccacccttctcctcctctcctctcttcttcacctacctattctctctcgctcggcgcgcgtagaagagaagaggcacttcttcctcctcgccggcttcccctcgcgtgtcgcaagtgctttaccctacaccgtggcccgtggatcgtcgccggacgccaggcatcggcaagcggcagcgcagccgtccaccctgagtccctgattttgccaagcgtttcggccgcttaagcgcagtgtatgtctttgcaagaaagatgatgatgtcagctcgatcggaacagattaactgctgctgcaataacccactcagagcacctacatctgctactgcagaaaacagacagcggagcaagccacacggaaatgagcaacaaagaatggttttgaaatttcagtatggtacagaagcatggtggacagcaccagcacagcatgtggccgtgaaatagaagcagcaagttacagatactctttatacaggcctttcctccgaagagtttcacatgtgttggagatgctactctaaaatcatcatctccagaatcagaggaagttcagtaggtgcgaagccacaaggcaaataataatttgtttggtattgcaatcgagggagcaggatgcgtatccttttatttacctcacgagtcaattggtgcaacccttgctggcttcattatccttacaatgttcctgatgtgctcaaaccccatgactatcacccctatgagataaagaaagcttagttgcagcttgccaagcaagttatagactgctacggcagcatttgcaccttcatctgttcgcatcgtgacggtaatgggcctcgcggaaatgagtgccccggtctctgatgaggacgcagcgtaagagatttgatccagaacagttagccttgaagagaaatcggagatccggtggcctttatcagatccataagtgcattgttcacctgcaattcgtagaaggttacatgagttcctactgaacttttcatgatagactgtgaccaagcgagagaagcaaacaccagaaagtattgtgctgagtgcgtgctaagccacatgcctagatacttgaggcaacttgatcccaaatacgacttttagtaacctattgtgtcgtataattccgttattctctgctagacctagtaatggggaacaactatctccaagagtaacatttggttaggtgaccaatgatgctttcagataactgcaacgtctgatgtcatctaagttcgctcagtatatatgacaaaagtgcagcagatttttctcactcaattcttcttcctagtttggtagacaaaacttgagcattagaaagcttaaatttctcaggagaagcttgcagacagacactgtttttgatgttatcttcgttgttggccataatttttgggattttgcaccactatacaacagtttaagaaaataagcagatcgatagattctatcaatgtccttcctagcatttcagtggcacatttcgctattgttttattgaagtccgcattttacctcatctagtttttcatggttccctagatgtgtgccatgcttgagcatgtggtaagccagtaagccacatacctagatacttgaggcaacttggtttcgttataacttttggtaacctattggatcctataattctgtcttttcatgctaaacctagtaatggggaacagctgccttcaaaagcaacatgtattctgtttcacgtttaggtgatggatgatgctttcggataactgagatgtctggtgtcgtcttagttcactcggcaattctggtattctgttgcacgtttaggtgatgaaatatgctttcagttaactgagatggctggcatcttgctcgttcagcaactatggacaagttgcaacagaaatttctcattcggtgctccttcctagtttggttagacaaaagtttagtgttagctagctcaattttgagaaacttgcaaagccacagcttgggatgttaccttcattgcttagcaattttggggagtttcagtttaattaagcaaataagcaaaacaaccaatcacatcaatgcccttaatgtttcagtggcacatgttgctgttttatgagagttctcactttacctcgtctggtctttcatggctcactagatgtgcaccatgaagttctaccattcttgcaacaggaagaaggctttctgctagacgttttgcatggcacaattgcgcaatgatatcgtacctgaattttgtaatgtaagccacatgaaatgcatgtgcaccattctctgaacaagattatccactgttaacaaaactaaccttccatgaataactgaaactagaaagccggcagatcgtattgtatctagctccttagtagtcatgttgtgagtccaacatgcattgatttgcccttcaaaaccacaattagattgcatccctgtcgacgatatgcccttcacatattcctgaaagaagacacggtacagataaaccttccatgaataggttgatgcatgtatgtatgttgtcttcattctggtgtctacctactaatatgtttatattctaaagagggggtatgcaaaacacaaaaccatatattcacaacaaaagacccattcaggaagaatcagaacaaaaaatgaccaaatcaaaaccacataatccaagagtatgggacatatacaaatatgattatattctaaaagggtatgaacaacatagaaccagattcataacaaaagacgacctatccaaatcacatgatccaatggtatgggacagctgaaaaataatgtgtaaaaacaacaaacgtcagccaaaatacccaaatcaatgtctcgggacagaacatgacatatcactcacttgatagaggaccattcttctggtacacgacccaacagtctcctcaaggtattcctgcatagttgcattgttaaatcaaacatataatgcaatggatctgaaaaaaaactaattttcatcaaacgggggattataatggatgcaccgttagttccttaccttcgtataatgcgtttccaagtccacaagggctctttcctctggtgtttttgcccttaagaaacggaatgcaagagaaagcatctgcccatctacctacagaagcaggaagggagaggcttagctcgtgccacgaatagttgaaaataataattggtgtctcttgtagcatttcctttgcattgaacgtattcagcccacaaatatgtatgcaaatatcaaaactccagtacctttgggaagcactgaaagccacctccagtgacattaagcaatgccagcgaacatagcctgtgaggcgcaatcgccgcaagcttgcaagcaatcatggcacctggttgcacacagataacagggtcaatgcctaataaaggtcacacattggagagagagagagagagagagagagagagagagagagagtctcagaatcgaaagacgcacaataggaataggacttacccatggagtggccaaagacgtgagctttcttccaccccaaatgatccatcaaggccaaggcatccgtcgccatgattgccgtcctgccagatacaaaagaacacgtttgaaaacaaatgctcgcccatttttttacatgagcgcgtgaactgaacgtgatggaagatatgattccccccttctttcttccccgtcactcgtttttctcgtggaaaaaactattgtggcagaaagggagcgaaatgtgggatttttctcgtcgaaagctacatgcagctgatgtcgtccaccaaatccccgtgtacggtccttctgaatcgcaaggcgaggaagcaagcaatcctgcgacacctaacgaacggaacggcccaccgatcgttgcaaccgacgacgacgagggaggatttgg

SEQ ID NO: 40274 - DNA, 1062 bp, Zea Mays
ccaagtggataatgcgtctcgcatgaagaaacggatgaacaacatgaccaaatggatttccacccaaatgcatgaccttttgcttgcaaatgtaaactctcaacccttggcttaccaatggtactgagaggacctgctcaatgttaaaagtagttcaacaagttggttttactaacttgtaactgcccagttaacaaaggttgagtttagagatcattttattgagttgtctaaactcactttgattcaacccaccctaaagaaagtacttacaaaaatcaaattaagtcgccaataaccacctaatcatcgctctaatcgtgcctcgaacgtctcccgtgtgattttccagcatgtgtgatcaagtcgagccatggttagtgcttgctaaaatagactagttgcaaagtctgtatctacagatccctccgctggtgattctctcgaatctataccatctttcgtggacttgaattctcgggttagccacatgttaaccgcgacagtattcgacatccacacccatcccctgtgctattaatttcctgtaaccacttgttggtaaacctctttctatgtgttttacccaagaggttgcatctggttctgtttgcgtaaaatcgcgtatttgccgctcgctcaacagactcagatagtacactgtcatcagaaaaaagcaaactgcgcacatggaaccttatgtgttcttctggcagatattgtctctactaatggacatttctaaattggcttaagttgatacatgttatgtccactagagaaaccacatcttgagacactcaccttcactctggactgtcttagggttaccgctgatatggacaagggttacacgcttctctactcttaaaagtctttcgctccaaatcttgggacgagattcttttaaggggggagggttgtaacaccccaggtgtttatattccgctcgacaacgagtacggatttaagcacgtgagatcagtgaataagacggacactaaggtctaattattttcgcctatcgcgattttaatatcgcatctgtttcgtcggtcgcga

SEQ ID NO: 40275 - DNA, 4195 bp, Zea Mays
cgccgcagcccccctccgcagccgacgacgacgagcggaagggaagagggtcaactctcgatctccgcacggtccgtggggacgcacgcacggcgcgcgtggcggtctacccggtcgggggtcggatcctagctgaatcggggagatttgccggccaggaaggaaaacgacaagtgaaacgaagctgtacgtgttcaggtgatcggataatggctagtgatcggataatggttgacactttgaccgaggacaatggtggtgatgctagatcctcatcatctgaagagatgccaagtgaccaacagagtcatcctggggattctttagctgagtggaggtcaagtgagcaagttgagaatggaacaccatccacttcaccagcatactcagacaatgatgatgatgactgtggacctaggccttctgatctttatgggaagtttacatggagaattgataatttctcccaaatcaacaagagagagctaagaagtaattcctttgatgttggtggatttaagtggtatatcttaatttacccacaaggatgtgatgtatgcaatcacctctcactctttctttgtgttgccaaccatgataagctactcccaggatggagtcactttgcgcaatttacaatagctgtaattaatagagaccctaagaaatctaagtattctgatacactgcatcggttttggaagaaagagcatgattgggggtggaaaaagtttatggaactgtcaaaattacatgatggctttattgttgaggatgttcttaccatcaaagcccaagttcaagttatcagggagaagacagaccgtccatttcgttgccttgatggccattaccgaagggaactaattagggtgtatctatcaaatgttgaacaagtttgccggcgctttattgatgaaagaagaagcaagcttagcaggttgattgaggataaactggggtggtccagtttcagtggattctggctagcaatggatccaagtgtgcgtcgacacatgacaagggaaaagactgaaactatattgaaagttatagtgaaacaattctttatagagaaagaagttacatcaaccttggtaattgactctctatatagtggacttaaggcacttgaataccagagcaagaacaaaaaggcgatacctaaactaacagagacagatgctcggagcactccaatggtacttattgatcaggacatgtttgttttggctgatgatgtaatatttctgcttgaaagagctgcattggacacactgccacaccaacatttgcccacaaaagatgataaaagttcgcaaaaccgcacaaaggaaaaaaacactactatgcagtattgctctgaaatggggccatgacttgggaaatcgtctatgatttgtatcttaacgagttatgaactgaaaaagaagagtacacgatggcaactcaggtcaggagttcagcaaagattctattgagcgtgatgatagacgacttatagagctaggctggaagacattggagcttttttccttagctcatatattcagccgaatacaagtggcacatcaagaggctgtggctttgaagcgccaagaggaacttattcgtgaagaagaagaagctgggctagctgaaattgaactcaaggcaaagcgtagtgccgctgaaaaggaaaaacgtgccaagaaaaaacaggcaaaacagaagaaaaatagtcgaaaaggtaataaggggaaaagtggcaagtccaacatcaataaggaaataattatggaccacagtcattcagatgatagaatattggatgatttttgtggacaaattgaagagatgcccttaaatgctgacaaccctgaagaagtttctgatatatctgacagtagagacgataattcagacatgcttcatgttgatattgaagaccgtgaatctagccctgttaattgggagatagatgcttcagaaactcaaactactattcctggaagtagtgaggtgcaaaatgaccatgcaggaaagaggacctctactgtggatgatagctcatcgtcttgttcatctgactcagtgccttcagttactgtgaatggatcatataaaggaggtgcctggacaagcgtcagatcctcatccaataggggaaacaacaggaggaataaggatactgaagcacgggcaggatttgcacaaggtggatcatgttcatcgcataatggttttataggctctggcagcaatgcctctggccactcaaaggaaagacacgaacctgaggatgataaagttgtcttgcagaggaagcaacatgcacaatggaacattgatatcattagctcctccaagtcaagaatggcagagtcttcattttcttctgtgagctctattaagaagcaacctcaaccaaattttttgctagaaagcaccaatagtttgaatcaccgtggaagcgaagcttctggcactgtgacttccactacaacagcgggtgcctcttcaaccccggccactcagttagttttgaataaaggacctgtatccagtgctgcaacccagaatgagaagccactacctctgcaggtgcttgtaccatccaaatctgaagtgcagaagcaggcttccctaactggcagtgcaactaccgaggccgtttcagtatcaaggcccttgactgccccacaagtccctgcagcaaaacaaagtgcaccagtcacttcaacagctcagaatgcaccttttctttctcgttcaatgagtgctgttgggcggttggggaatgaaccatctgccaatgctcctagtttcgttccccgttcacgaacatatcgcaatgccatgatggagaaaagttctggtggtggaagctgtttcacacatcagcaaggttcatcggagcaagcagttgcaccatggcaatcgatgtttacatcgcaacctttcattcggccatcagagaccttgtcttggaaagaggaaacattattgagatctgggtttacatttggaactgtgaagcccgagtcactgaacccatatcagggcagagaagagaactcacagcaagcgagcagcaacagcagtgattgtgcgccatcgagttcaaacatcagaagcgagatcgagaagctgaatttgagcggaagaccacgaagcaagcaactgttgtcagaaatttcgaccagatttactccctatcagccacaaggcttggtcgctgatgagttcccacacctagacatcatcaacgacttgctggatgaggagcagagtgacagaagaagggttcttcaacctgattttgttcaacagtcctatatgcctcatggtgccagcacacctgattatggtgagccatacttgtttgaccagtccgagcaatacttcgatgaggagcctccaaggttttatagtccattgagcagtgctcctcggaggttgagggacctgagctattcgcactttgatctcccatcacactccagcagcagccagtttgatgatctgatgatgagtcagtggccatacagccgcactgacatctccatgcctagttttgggtcagacacaagtggctacccctatcaggtgtgggatctcgcgaatggatcaagcaggtacccatcgtatcgccctgccaatgggcattgagagttttaatgattgcattgacaataatgtgtggttaagtccatgatgttcgcttctgagctgagtgtaattgtaatagttccccatagcagtgatataaagaattgttcctcagtttccttgttcaatcaatagttatatgacccccctcctccctcttttctctagttcagttttgcccagtggtaataaatctaagtcggctaaaatgatctggctaatcgtgttgtgaaatgtgtatgatgcaagcaaatggtagggtgtttttaagccatgccagtgcttcagctgatactacattaaactgggagtattctttgtttctccctctgacgagtgacgacgtgttattgatcgtctcatgttctctttgtatatttcagagtaaattctggatatagcccatggacataaactaattatttgatgcacactctggacctttggggtatgttttattccattgatggatatataagctataaagtaaaatgcgacaggatcaactgcgtgttggggcagaaaaaacaatcactaaggttag

SEQ ID NO: 40276 - DNA, 1040 bp, Zea Mays
aagctaaagaggtgggcgtctggattggtgtggcgatgggctgggcgatccatgagggttgtaggatgctgccccagattgtccctgcaaagagaagatattacatatgttataccagataaatatgtatcatgcgggactagaattttaatactcacagtagtatgagactgagcagggtcaactatagggaacaacagaggtggtggagcaaaaccctgtgcggcgccaaggctctgcatgtactagaacatctctgtcatcctcgcctccatctcctgacgttccctcctctctgtttctagctgggtctataatatacaaagcaaatgttatagtaactcaaataggaggtatataactcaaagaatgacgagttacagaagcactaacctcgagttgttgtatgcgatgatgtgagctgtcctgccgaggtcgtatggctgggctcgtgctccttgctcgcacctgagacagagtgggagtggacgacgagtaaacatgtaatgcatgtacactatgttcctaccttctaataggtgagcatgtaccctaaaaccctaaaccctaactaagaatactaaattaacaaagcatctaaattaactaaattatcctagcaataatactaaaccttaaaccctaaaccaagaaagggattttaccttgatgtggtttcggggtggcgcgggcgaggccggggagaaccacgcggtgagcggcggcgccgcgggtgtggtgggcatggccacgacggcatggaggcggcggtggcggggcggcgacgcggtgagcgtgctttccttttgcttgctctctcttttgtggcacttgtgtgggtcgaccgttgcgcgcaggtagccgttgctctgctggcacaccggacagtccggtggcccaccggacagtccggtgaattatagcggggctgcgcctggaaaacccgaagctgaagagtttgagggcgatcctccgtggtgcaccggacactgtccggtgcgccagaccagggagcatttcggtttccttttttctccttt

SEQ ID NO: 40277 - DNA, 4006 bp, Zea Mays
gtctgcctctcaaatctcaccgcctgctcttcttcggtcccggctcgggctcctccatatgagcgcgcgctaggttctctctcgtcgtctctcgtggcggctggcgacgactggggaccgccggtaggcgcccaggccttcgtcgcgctggtctttctagggcccttcgccggcgacgatcaccctccgcgaccagatccccaccgtcgctggccttcttcgaggcccagatccccattgtaggccccttgcttcttctcctcaaccggagcttccaaaactcccttgcagagcttgtagaggttatggaaggtatgggtgtgccttcaccaccgacagttgggactccgtcggcctcgccctgccgcattacgtcccccgttgatgataccaatgcgtcgcttggccaagaaccagagtgcgcattgacatatatcagacaggacgatcctgacacattcattatctcgggaaattttcatccaaggcatcaaatcgattgggattcaattgaagtagaagaaaggtggaatgaggaaggaagacaggatgttactagtgaacgaggattgtatattcaactcggtttgcataatgaagatgagagggtatttaagcaaagggaagatgattcaagtgctcattgtgctggaaataatagggaagaatttcacgatgaagcttcaactgccatgccttgttctgattttgtattagatgggacaaggactatctatgatatgaacaatcctgtaatggagcctggtagcttgtacgcatcaatggagcagtttagacttgcaattagacagtacgccataaataaagaatttgagttgggcattgaggctaccaacaagactagattcagagggtactgtaaagggcctgattgtccttggagcattcatgcgaggtctgagatgaaaggatcacccactattcaagttattgtcttaaacgatgagcacacatgtacatcgagcgggagacgcaagacaacgacaccaacaggtgcttgggttgcggcaagggctcttccactacttatgaaaaaaccacatatgggtgctaaggagttacaaagtatgttgcaagatacatttggatgcactattacatatgatacaatttggcatgggaaagagaaagctctgaagcaattgtttgggagttgggaagagagtttccaacttctatggtcttggagagaagcagttatacagaagtcaccggatagtattatcgagttggatgttaaaatggatgagggccggccattttttagcagatttttttgtgcacttggtccttgcattactggtttcaaagagggatgtagaccttatcttagtgttgactcaactgctcttaatggaagatggaatggtcacctgtgttgtgccataggggttgatggacagaattggatgtaccctgttgcttatggattctttgaggcagaaacaacagaaaactggacatggttctttcagcagttgcgcaaggctgtgggagatcttcctctactagcattgtgttcagatgcttgcaaaggtctaaaaaatgccatgaacactgttttccctcaagctgaaaaaagggagtgtttcagacacctaatgcagaactacgtgaagcaatttgttggatccgagtacatgtatcctgcagctagagcatataggagggaggtgttcgaccattacttttccaatgtccaagaaattcccaaggtgtctagttggttatatgagcatcatgatagtttgtggtatcgtagtgggtttaatccagccatcaagtgcgactatgttaccaacaacatagcagaagtgttcaacaattggattaaggattggaaagatctgcctgtctgtgacttggctgacaagataaggaaggaaatcatggagttgtttcataggaggagggaaataggacagaggttgcaaggtcgaatactaccctccgtggtccatatcctccatgtaaggactagaggtttaggtcacttaacagttaagaaagctgacaattacattgcggaggtgagggataataataatgtgcactctaagcacattgtgaatgctcaattgagacaatgttcatgcaacgagtggcagcatacggggaagccatgtcaccatgcccttcgcttaataacaacacaacaatttagagatgttcggatggaagattttgtggatgactactactcagttgataagttcatgaaggcttactcgagggtagtggagccaattggtgacaaatctttctggcctacagtgccatttgcaaaagaggtgtgtgcttctattgggaagcgtggagttggccgtcaaaggaaaaacatgattaaagggtgcctagagggaggaagtggtaagaagccaaacgaaaatgaaaatgtcaaaactaagaagatgattcgtgggaagttcaagtgtccaaactgtggtgaattgggacacaggaaagccagctacaaatgtcctttgaatggaacaaaaaaacggaaaaggagagcaaggaaaaatgttactaaaggttggttcccaaaagatgttgaggcatgatgatggtgcatgcactagccacacaaccacccccatgtgatgattgtgatgccagtattgcgaaaatctctccactttcatctcccagacctatctagaggctagtgctggaccagtgtaccctaggagctgggtgccaggtgcggtggcgggcggggcctagcaaagcatgacgctgtaggagggatccagtcatccgatacgtcagcactccggcacagcagtaggcatctcggaagctggcagggccacagggcaccacgcccaaggcttagccgcgcaggcactgagcagccaagtagtcaggcagtcagtgagcagcagcagacggcagcaaggctggaagcgcgaagtacctatataggcatataaggttggctcgggtgggtgagtggtgcgactcgtcctctcatgaggctcgtcaccttgagcaacatgccgatcctgcagcagctgcacctggaggagcagctcctgcgccgcacatcggacaactggtgtgtcatcaacgatggcatggcccctgctaccattctcatgggactgcaggagagtctcggagcttgtcgacatacagccggtcctctgggaccaagtgccgattgtgaggaggttcagtggaggtggcacgtcattgttgattggggaacggtggttgtgactttcatttgcaacaagaatgccgttgccgggctgcagatttatggcaaaaaatttgacagatttggtgaatttcatctgcgtgagaatgactatgcatttagtcactcgaaagtttggcggaaatgctcaatcaataacaaaaaatcgttgggttcatcacacgtcgttcttgtgggattatgatgtaaaaaatatggattatctcaaaatcccaaagcgtgcacctgaatatcgactggcaagaaaccacagatttcttgtgccgcatgaaggagtacataccttcgcggtcagttttcaccgatgaggtcactgcggccctgggagaacacttctcagttcagcccgtggatctacaagcagttctttccggtgatgaaggatccgtgccttctacaaagctgctgtcacaacaggacctagaaagaaattgtttcgtccaaagaatcccttaacaatatagaaagttgaagcgtgaccatgcttgtcgtttttgttgtgaaatatgagcagttttgtcgagctgtgaattcattcaaacattatggtcaacccagtacgtacatacgaatgcccaccaccatctttagtaacaaatggttatgttttggattgtaggtctaccgttccaagcttgggttacacgttatttgcctatgggctctagaccgagtgctaaaactatgagagactggctccaacatactctgtaaatggttatgtactctaaattataaagaaattttttgtcttcttat

SEQ ID NO: 40278 - DNA, 3796 bp, Zea Mays
gcacggcgcacgctgtttgcgcgcagcacctagcaggatgcggatgcacagacctgctcgcgcgtctcatccgcacgcacgcacccacccacaagcaaatggaaaaataaaatcaacgagacctgctctcacatcgctaaccctaaacccccaaatcgcccaccttccgatcgccatcttcgccgccgccgccaccaccacggggcttaccggctggtgccgctgagcgctgtgctcgccgcgggccaccgcccagccccacggcttccctcgagatatctgcatttgaagttgcagtaaacaacactgctatttgtgccaagaattttgggagttattggcataatggagttttcaaagcaagggcaggcacccgtgccaaacaacatcggatcacaaccgctgccctcttcaaatgtccaatctaatcaaacagagcgtccatcaatgttttatccatcatcattgcctggtgactggagttcgcagcagatgttctccatgggaacctcagtaccagttagctcatattgtattgtccccatgaatcagcaaccagtccagctaggtgcttccaggccagagatttcacgtcctttggggccacaacctttgctaagtagggtatcattgaggccaccccagcaggtgctaaatattcatacatctttgccaggaatggctggatcgcaacactcaccatctatggcaggcaggagatcacaacagacaattggttctccaaaggttcaaatgctgaaatctccatcattccagtcatctaataagcgatctgcacagaaggagccaccgtcaaaggttcagcatcagcaacttgaatctgtgaggtccaagttcagggagtcacttgttgctgccctgagtttggattctgatcagcagaataagattcagtctgataatgtgcagtctgctgggtctatagataatttcaaaccaggagcaggagatgcggtacaggatttagtggcaaccacatcaaaagatgtgtgcacaaccaattcaggtgtagacacaactgtagctcccagtagatgtgaggaaaatgagaagttaagcagtgatttagctttagagatgaccacaagcataaatgatggcatgcagcaacagtcaattcaggtttcctcagaagatgacttattgggtcagtgtatggttgcagatgaacttttgcaaggtcatgggcttagttgggtttctgatcttgatgctgggatttctgaacttaacgcagaacctaatgctctaaaaaggccgcggacttctaatgtggagtctgagtcaaaaagaataaagtctgccaatgagttagcaatggagaaggagaaatttaatcaaagagctgaaattctggcgtttagaattgaagaggagctgttcaagttgtttggtggagtaaataagaagtacaaggaaaagggcagatctcttctgtttaatttgaaagacaaaagcaaccctgagttaagagagagggtcttgtctggagatattgtgcctgaacgactttgttcaatgactgcagaagaacttgcctccaaagaactctcagagtggcggctggctaaagctgaggagtttgcacagatggttgtccttccgactatggaggttgaccctaggcgtttggttagaaaaactcacaaaggagagttccaagttgaagttgaagagccagatggtttctcagtggaggttgaacttgggagtaatgttactaatattccatcaaaagctgttgaagatcagacaaagtctaatggaacagctggtaaagtagatgttcaagaaaaggacaaagcatctgatagcgcttcacacgatgaggatggcagaacaggcaacaatggtataccaggtgatgtagaatgtatcgataatgagaaagctgatctcatgcaggaacttatcttggatgatgtgaaggacactgtaaacctcccaccaattccttcgttagatgaattcatgcagggcttagattctgagccaccttttgttgatatctcagttgggactcctcaagaagatgtcaatgactctgacgaacttgacaccaccatggagccttcggatcttccagagacagaagataatgcatctgcaccagaaaaaactgaatctaaatctgataagtcatctgcacaggttaacagcgagcacaggttagagtcaccaggacatatagcggttcaaaattcggatcttactgaaccacgtgatggagagctgagcaaatcctccccatcccctgacaaagatgaagcaaagaaaacaactgttgataatgcctctaattccgattctgttcatcacaatcaggcagccagtctccctatgatacgtgagagcatttgggagggtgcaattcagctgaccgtatcttcgctctgtaatgttgttgctattttcaaaagataacggagctgtgttggaaggagggttcatcggaaagtggccgccaaaatatcttgcagactatcgatgcatatatttcagatgagagagtaggattagctgagcctgcagaaggaatagagctgtacctgtgccctcctcatgggaaaaccgtggaaatcctctcacggcacttgccaaaggagcaccaagagagccttgctgtggcgggatcatccttcatcggagttgtggtatggcggaggcccagcatttccagggcacccacctcccaccacaacaacaggcatgatggttccaagaggcagtcgatcctagggaaaccacaggttacaaatccggccgcaaggccctccctacctcccaactcatacggcgcaccaccaggctttaccagccagcgcgaagaggaagatgtaactgatgacgcccctccaggctttggacccggtgttgctagggatgaggatgatcttcctgaatttaattttgttaaatcgtcacaccatgccgcaaatgtaactgcgcatgcatacaagggcccgtggccacatgtaccaccaccctctgctcgcccagcagagcaaatgagggaactggttcagaagtatggtaaaagatcatctgttcaagaagccccccgtgcctgggatgacgacgacgatgacataccggagtggaaccccacccaccagacgattaagcagcctccactgccgcacgccccacagcaactgccgttgcctccgcctcccgtccagcagatgaacgccgcctaccagcagcagtaccacatcccaagtgctgtgcagcctcaggttcccatcacttcgcttccccatgcctatctccggacccagcagcctcagcctgggcaggcatggcagcagccgagcaatgcttggtggccagcgcagggcgttgctgcccctgccgcacagcaaccccagtatggggtagtgcctggcagcagtggcgtccagggctacgactctagcaacgcgggtggtatggcatggaggccgagatagagcattgtaaaattcagctggttttctattgtagctgtggtcaacctgacgagcgtccgttgtagggtgtctttttttttttattatggttggctgttcatgtaagtataaatggtgtacaaccgtacaaaggatgtaatcttgatagactagatagatagttgctggttgtacccgttcatccgttaggacttgctgcaatcgttttgaacagcagtcgctcttcacttaatgctcttattaggcactgccaacaatagcaataatgtaccgcaaagtttctaaatcattttatgcattgcatggtatttggtggactggga

SEQ ID NO: 40279 - DNA, 2923 bp, Zea Mays
tcaggttcacgccaaccgagatcacagatacaccactgtctagcctcttgccacggagggtacacgctactctcgctatctctccactcccattgcgtgttatcatattctggtattagtctgcccgaggcaaagcttacccatgacgaggcatgtgaccagttaaagggtcctcggtcagcaggcccacatcgacacggtccttaatcgactcagatgaagacactacaccgagactcccttcttgtgcaagtcaaccgcccggtctcagctttattattttcaacccaaagtttggtacctggcagaggtacatcttttccgatgttgaacccatcaaggcctttgacagatccaccatcaagttttatttttgaaaacattcccacccactgaagcatcacctttgttttaaaacaaaacatttttgtatgctaaagcaaggctaagcatcataaaattcttttgggtatcaaggaagggaaatcaattttcaaggaaggaaatgcatcaacggtttagcacacaactcctatcacctaatgcatcaaacaaggtgataaagattttaaaacatcaaggaggtggcgaatgcaccggggcttgcctgaataacactaggttagtgttgttaggtgacatccacttgacgaccatcctttgtcctagcacttgatcaggttatccatcttccggttcgtccatcagcatcaccatgcggattagcccgcgcttggggtcgacttggcttgtcttccgcatcacgcgattaattatcgtacctaattgaaatgcattatgcacatgaatgcaaataaggaacaataacaccagatattacgatgctacgcaaaagagaaataacctacttaatgacgagacattgtggacactaattatcgatatattgttacttacggcaatcatgctcttacaacctagctaaacagtcgaggtagcaatcaacatacattccaattatgaaagtgactaacacacatagaatattatacctagtttagagagcacactaaacgacttataactttaacttcacaagtcttggacacctaatacttataaaatttgataaaagaacttttattaactttctaaactaatttaccggttaacttgtgtatcatatatattagtaaaacttcccatttttaacatctacagtcccgcaaacactgagacctattgagatctcattcatcctacaacatcgaccaaattaccaaaacgactcaggcaatctaataaatattatacctagtcagaccatccatcaatccactaacacgaataacaaatttacttaccctgactaattcgacgcgatagtcggaagttcgatgacggttttcggttgacgtcattgaccacacacgtctcgcgagcgatgtacacaatttctattcttgacctgatacccatgggatttctttttgtcgagctggtgacgcgtggccagcaccagagtgtcttcatggcttggggcttggcgtagacgaggatgacgctcgacgacttgttcgagcttttgttgagtacttggtgaatatcaccctgctagcttcatcttcacctaattcttaggatttttttgatgacacgtggaacgacgacgaccttcgattgaagtctggagcgggctggtgaggtgggggtcgagcaggggatgacgggttcaatgactcgactgtgaacgacgcaacgacgagctggggcaggatccgagctaataggcacagtatgggacagcgaccagcacaatggatgaactaagtcgcggcgaggtcgacgatgtgatagggattaaggccgagcgagccgacatggcgcgctggcgagcaggaaaccacgcgagcactgaacaggaaaaacgacgataccgtcgcacaccgtgcgaagacgaacgacgtgtcgacgaggacctaggatgtgcgacacacgacacgcagtcagcctgtcgcacgaccgagcgatgacgacgaacagccgagtgcggtaaggagctggagaacgacgacgggccaagcagaggagctcgcgcgcgcacagtgaagaactcacggccactagaacgaggtgtgatattcggacttgacgacaacagcgagctagagcattggcgagcttgagagattaatggcgggaatcggcggcagccaacgccaaagcgcacggcaagggaacttcgacgacgagcagagagcttcgcgcgcacaacagaggagctcgacaacacgcagcaggggcaaacgcagtccgagcaggggcgcgagctgcgcgcaggcacgcgcgcaggggacttcggctgggcgcgcgcagggaaaaacaccagagagacgcggctgcgctccatgggaacaggaagctcgcgacccgcgtgaggagcttgcaggggacctgttgacgcctttttggagcgccaaatactcaagaagaaccggcggcggtgctctctggtcaggcgtggacggtccgtggcctagggccggacggtccgcgacctggcgcagggctcgggtcctctacctgacgaccggacggtccgcgccatggggccggacggcccgcgcatgcgcaggggcggcggaagtcgtcgtcggcgacctgaatctcgctctcgggagggaccccgtcggggaagagagatcctaggggttgtctaggctcgggccggccgacctagactcctctaatcggcgtagagtagaagagaggcaaagaatttggggatcgagaggctaaacctaaactagactagaactactcctaggataaaatgtgaaatagaagttgtattgattcgattgatgattacaaattgatcgtagacctctctttttatagaggagggggctggaccctttacacgactggattctgagctaattccgcaaatctagccaac

SEQ ID NO: 40280 - DNA, 2439 bp, Zea Mays
ccgagccgagctggccacgaaccgagcgagccaacgagccgcgagcattttgtccagccctagtcgagagcgagccaaaaactcgaactgttcaaaccccgccagcccttccgctcccacgacccaaccccactgcccggagcccccgagccttctcgaatcttgcgagaaccccaggggcgaggagcagatgtcggcgaggctacgggtggcggagctccgcgcggagcttcagcgccgcggcctcgatgtatccggcaccaagcctgctctcgtgcggaggctggacgccgcaatttgcgaggcggagaaggccgtggtggctgctgcgccaaccagtgtggcaaatgggtatgacgtagccgtagatggcaaaaggaacggcgggaataataagaggaaaaggtccggggatgggggtgaagagggaaacggcgatacgtgtacagatgtgacaaaactagagggcatgagctatcgtgagctgcagggattggccaaggcacgtggagttgcggcaaatgggggcaagaaagatgttatccagaggttgctctcggcgactgctgatcctgctgcagttgcagatggtggtcctcagggcgaaaaggaagtcataaaaggtggtgatgaggaggttgaggtgaaaaaggagaagatggttactgccacgaagaagggagctgcagtgctggatcagcacattcccgatcacataaaagtgaactatcatgtcttgcaagtgggcgatgaaatctatgatgccaccttgaaccagactaatgttggagacaacaacaataagttctatatcattcaagttttagaatctgatgctggtggaagctttatggtttacaatagatggggaagagttggggtacgaggtcaagataaactacatggtcccttcccaacacgagaccaagcaatatatgaatttgaggggaagttccacaacaaaaccaataatcattggtctgatcgcaagaacttcaaatgttatgcaaagaaatacacttggcttgaaatggattatggtgaaactgagaaagaaatagagaaaggttccattactgatcagataaaagagacaaaacttgaaactagaattgcgcagttcatatccctgatctgcaatattagcatgatgaagcaaagaatggtggaaataggttataatgctgaaaagcttccccttggaaagctaaggaaagctacaatacttaagggttatcatgttttgaaaaggatatccgatgttatttcaaaggcggacaggagacatcttgagcaattgactggggaattctacaccgtgattcctcatgactttggtttcagaaagatgcgtgaatttattatcgatactcctcagaaactaaaagctaagctggagatggttgaagcccttggtgagattgaaattgcaactaaacttttggaggatgattcaagtgaccaggatgatccgttgtatgctcgatacaagcaacttcattgtgatttcacacctcttgaagctgattcagatgagtactctatgataaaatcatatttgagaaatacacatggaaaaacacactctggttatacggtggacatagtgcaaatatttaaggtttcaaggcatggtgaaacagagcgatttcaaaaatttgctagtacaagaaataggatgcttttgtggcatggttctcggttgagcaactgggctgggatcctttctcagggtctgcgaatcgctcctcctgaagcacctgttactggttacatgtttggcaagggtgtttactttgctgacatgttttcaaagagtgcaaactattgctacgcctctgaagcatgtagatctggagtactgcttttatgtgaggttgcattgggcgatatgaatgagctactgaatgcagattacgatgctaataacctgcccaaaggaaaattaagtaccaagggagttggtcaaacagcacctaacatggtcgagtctaaggtcgctgacgatggtgttgttgttccccttggcgaacccaaacaggaaccttccaaaaggggtggcttgctttataatgagtacatagtgtacaacgtagaccagataagaatgcggtatgtcttacatgttaacttcaatttcaagagacggtagatgttgcaaagagctgaaactgttgctgagatcttagcagaacatatgtggacttatagcaccaggtgccctcagcctcattttctgagcaaatttggtagcctttgcatttcgattttggtttcaggcttctagccccattgatgattgatactgagtgtatatatgaaccattgatatccaccttccatgtacttaagtttttttaacatgtcccatgcatataaatctgatgaagcatatagcactaatacgattctaacttgagaatgtattttgtgcacaag

SEQ ID NO: 40281 - DNA, 4819 bp, Zea Mays
caggcgcaggcacagcgcattgcccccctccttgtccagcgcccccaaccacaaggagtcaaggaacaggtcggggtccagccatccgaccccttgaatccgcttgccctcctgcttgatcccgccgccaccatctcaaccgcccactccttcctctccctatagggttccctgccgctcctgcgaatcgagcaatcggagacccccgggccgccctccaatgcgagttcctctccttccccctactcaactttccccttttcggctcgattcactacaatctcatgggaattttgccgcaccgccctctcccttcctctccaatgttgttaataatattggacccgtgcgtgcgtgcgtgtatccccgtaggccgtagcagagcacaatccggtggtatttaggactgatatagatttctgccgatagatttaaagttggatggttgatttgttagaatcgggcaaggacgaccatgagcgacgatggcgaccgaacctgcccgctctgtgccgaggagatggacactactgaccagcagctcaagccatgcaaatgcggctatgatatttgtgtttggtgctggcaccacatcatagacatggctgagaaggaggaaacagtgggccgctgccctgcatgccgcacatgctatgacaaggacaggatcgtcaagatggctgccacttgtgacaggacggtggcagataaaaatgtagagaagaagcacaagacccaaaaggttaagccaaaggcagcacccacagcagcagcaacatcaaccgtagaatcaaagaagcatctggctagtgtcagggttatccagagaaatctggtgtatataattgggctacctgcacatttatgcaacgagagtgtgcttgagtgtagggagtactttggtcaatatgggaaagttttgaaggtttcagtttcccgtccgactgggcctccctctcagcaggcatcagcaaccagcaatattagtgtgtatattacttatgcgaaagaagaggaggccatccggtgtattcaggctgtacacaattttgtcttggaagggaaagtgttaagggcatgtttcggtactacgaagtattgccatgcatggctgcgaaacatgattgtctctatttgcatgatgtaggcagtcaggaggatagttttactaaagatgagatcatctcagcatatacaaggactagagtcccccagatggcatctagtgtttcgcaaagacgtacaggcactgtgttacctcctccaggagatgatttctctcacagtgcggtggtttcagccaagcatacattcaagaatggaacacttaataccaccagtcagcccagactttcacctccaaacagtagttctgggaggtccacgcttccaccagctgcatcatgggggcagcgtgatttgaatgccaggataacagctactggagcgacatcatcacaatctcatacaaaaccaaaatcagaatcacagagtaatccattttcaagttcttcagcaatttccagtacaaaaacaccctcttcatggaatgatgatacaagtacagcagcaaaaatgcctgaaggacagcaagtgtcagaaaaagagtctaaaaccttgcagccgtataagcctggtatttcaaaggaaacacaagctctatcgtcactggagtcatcactggacatagacttctcaacaataccttcagcttggaatgatgatgacattgtagtatcagatgggatgccaaaaggaagcgatgaaaatcaagttccaaataaaaatggtgagctaacccatccagcatctaagtcactggttttatctaagaaagacatagaaatgaacattaccagcaaaaatccttcagattttttatcaagtctagcaatatctaaattagatgtaagtactagtgatggtgaccactcagataccaatattactcctaaaagccttacttcaaatgctgtagaatgccaatcttgtcatgctgctggggagaaaatgttggaggatattggatccaaggacatcgacatggagaagatatcttctcagatatcttcagtaacattaggtggcaacgataagattcagagtatggcaggaaatcagcaaccagatgtaatgccatgcacatctattgatgtgcccatggatcagaattttggcagagaccgatctcatctcaatcttaacgagcttttattgccttcagaaaataaggatagtagtctttcttgtcaatatagttctgataagcgtcttgcttggagtttgaagatgcaaaattgtagcgttactcctttaaatgatacaatagactctgcaatgctcactgacaaaccttatagtatactgctggaaggttcagagaaaccatcatatccaccatttgttgaatttcctagtacatgggatacctcattgtggaatgatacaaaaaataacgctgcatcgacgattgacactataacttcttcacagatgcagacagggttttcttcaatcgataacacttatgccttgctaaatggaggtcaagatgggctaggtactgtatatacacatgataatgtttctgtatatacacgtggacgtggtaatgtttctggacatcctggaatgggaagtcatcagcatagagcaatgggttcagtaagaactgatagtataggaagttttgacaagaccataagcgtaaataaggatgagagcagaataatttctgatacgttgtcagagtttaatccatgggatgattcatattcgactgctaacaattttgttaggatgcttagggaatctgaaaataatgatgttcagtgcactgcgccttcatggaaatcaggaaccgggagcaaacagtccagattttcatttgctagacaggataaccaaggaaacttgttggattcatctctcagaaactgtggtattggtactgagcagaatttcagtttgctaccccagaattctcgaagaaatatttaccagaatggtcttgcattccaatctctagagaatgaattttcaaatagtaactttcctggtctattagatatggcaactactggtacatcaatgtctaaaatatctgctcccccaggattttcagcaccaacaagagtaccccctcctggattttctactgcatttccatcccaggatagtttgaaccccactcctgggtttccttctgggattttgtctcatgatgggtctatccccctttctagattcccttcattttcttctggagtttcagctcaggaagtgtctaagctccctactagactgccttctccattttcttctagattttcatcacaggatggtcctgatcccccttctagattccctttttcttctgggttcacatcacaggatgggtctaatcagttgtatggctcaacaaacccaggtttgtttcctgtcccttattttcctagaactagtttgatttctcatcattccttttgtggtgctttgcagaaaatcttctcgggggtactgttctgggtgtcgacggtaatcattatcaatctcagtttggaaggcactcaagtgacatggagtttgatgatcctgctatattagctgtgggcaaagggctgatgcctggaattggcgattcagggctggagatgaaaaatactcgtgcttcacagttgcaaccagcaagtagtgatccaagatttcagctacatgtacagccaaatgtgcagtctcatcaaaacatgagattcacagaccctgtgcaagatggtttgaaccatatgaatgataattacctggcatccagatttttagctcagaaccatggtcctctatctccttatgtgcagattccgcaacaacccagaaactcgcaggttacaaatggtcactgggacgggtggagtgaatcgagacaagggaataacattcctatgtcagacatgtccaggatattatatccaagtgaagtgaacaagttgcacatgctgggttcaaacgatatccataacagagcctttggaatgtgattgtctcctgggataatgtgtgactttgagctgacatattcgcttggggcgttttgtggaagtaactggttgcacaaaacatagtatacctgaggtggttaatggtgttgtgcttatgagctggcacacaatatttattgctattggagttgaccaaaatgaaccttagttttggtccagccagttgaaattaccaggttcattctcgtctatgatttgtgacgcttgaatgaaaagaacgagaagaacaaggcagctgaagttgaaatagatatagagatatgtctatcatgggatttggggcgacctgtgagtgaaagaagcttaggtgtggcagtttgtttttcttgtgtctgtacatgatgatattggtcggtggttgtagtataatttggtgatcggcggtggctgtattaacttgtagtggttgctcttgctccctcttgcttgtttatgttaattaagggaattgaggtgaaggtctagtgttacccatagcataataatatacgatacataactggtttctttgctagcattacttcatttgtttcaacaacagcaaaaaagaaatcccttaacctttcttaaaaacggacactttgttaccgtgcattgagaatacccttggagaagcttctgaactacattacacataggtctatgtggtgcttgaggccagaggtttgagttgtattgtcaaaactccttcgggcctccgcactctgtgtactaggtcggcgtatcaggtctagtttgacctagccaaaagctgccctgggggt

SEQ ID NO: 40282 - DNA, 949 bp, Zea Mays
tttaaaacccaccaaaagaacgatgttatttaaataaaatagatatgtttctttagatattctattgcaatatatattattgcaacttgtagattgttattactgatttttaataaaaatatatattacaatgctttagatttggcacagggcctcaaatttctctggcccggcccaaaggatttggttttggcttgtggagacgtgtcaaaactgaactccgttttgatccgtgatgctctagcttttggacacggtcacagcgacagggggatgatggtccatatgaatatattgcttgggcggcggcggcggcaacatctggtagcattgctccagcgatttcattgaccgaaaaggccttgaaacatctgaacaaaatgagggctgaacggaacgaagatttgtgcttgagaattggagtgaaacagggtggatgctcaggcatgtcttacaccatggagtttgaaaatcgagcagatgccagccctgatgattctgttgtagagtatgatggttttgccatagtctgtgaccccaaaagccttctcttcatgtttggaatggagctggactacagcaacgcactcattggtggaggcttctcttttcagaatccaaacgcaacaaaaacctgtgggtgcggcaaatctttcgcgactgggaaggaatccgaggctgcagcaaaagcttgcaacaactagagtagtgaaatattgatagcaaatcgtgatgtaacttgttatatagcttgctcctgatcaaatcacgtggctccaccacttatacttgtttcgtttcaaaatagttggctttgtttgtttttttcaggataactttgatcagatatatacaagaaaacattaatacttatggtatataattaatattaattgatagagctttgaatctattttattaaacttatctacagataaaaaaatattaa

SEQ ID NO: 40283 - DNA, 2948 bp, Zea Mays
caaatcacaatagctgctagcctgttactgcaggcctctctctctctgtcctctccccagcccgcctccgcttctcgccggactccggccgccgcccgcaacctgtgcctagggctcccgcttccgccacacctgcgcactcggccccggagacggctccttgacgagaggcctgtgggaggagttgcagctgggacgcccggtcggacttgcgtctccgcagctgggagatgctcagctcgtcggcgtccaggagggacgccgcgaggagcggcgcggagctccctcggccgcacgcggtggcagggatggcgcggagcggggagctgcccaagggcgccccctccgcgacggcccctgatgcggtgcggtgcgagggatggatggtgcgccacggccggaggaagatcgggaggtccttcttccacacgcgctacttcgtcctcgacaacggcgtgctcgcgtactacaagaagaagccgagggaccacatgatcccactcaagtcaattattattgatggaaattgcagagtggaggatagagggcttaaaacacatcatggtcaaatgatttatttgctatgcatttacaacaagaaagaaaaggagaaccaaatcacgatgggtggatacgatattgaagatgccctagcctggaagaggaagatagagcttctgattgatcagcaacaggatactacgacagctaaaaaccataaagcttttgcttcgttggactttgatatagatcttggaggaccattttcgttctctgaccatgacagcggacccgaagatgaagaagagccccgacccaccttgcttcgcaggacaactatagggaatggccctcctgattctgtacttgattggaccaaagaggctgacagtgggctgtcaaatcagaatgccaccagtcaggcttactccagaaagaactggaggcttcttagatgccagaatggattgcgcatctttgaagaacttgtggaggttgaataccttgcaagaagctatagtcgagcaatgagggctgtaggagtggtggaagcctcatgcgaggccatttttgggcttgtaatgagcatggatgcatcacgatatgaatgggattgtagcttccaatatgggagtttagttgaagaggtcgatggtcatactgcaatactgtaccatcgtctacaactgaactggttttcaatgttggtctggccacgagatctttgttatgtacgctattggcggcgcaacgatgatggaagctatgttgtgctgtttcgatctaccgaaaatcagaactgtgggcctcaaccaggatttgtgagagcttctatcgaaagtggaggtttcaagatttcccctctcaaaagcctcaatgggaggccccgcactcaagttcaacaccttatgcagattgatgttaggggatggggcgtgaactatttaccatcattccagtactactctttgctgcagatgctgaactgtgttgctggtacaaagaacacacaactatttaacctgattgcgtgaatatttttcgcaaacagatgaaattcatacagttccaaggattccggtgatgcataccatggttaatgcggcctcaatgaaaaaggaccaaaaccttcaagaaccagactcgaagaccaaacaagctgataacaaacatttggatatggtagatgaagagtcggaagatgatgatgactatcaagttcctgatgctgatgtggaggtcaatgtcttattttacagcgaagccctaaaaatattcaccctactcctgtactatgctaaaagttttgttgttcgtcacttcacaataaaatttcattgcacttcatgtacaggaagaacctaccaaatctgacagtgatgctaagaactcagacccaatagatttgtcttggttttcgggcattattcgtcaggatacaaatgagaaaagtcgtaactgttgggcagtgcctgatagcaagatctttaaagttcgtagcaagaactttccacatgacaaatcaaaggtaccagcaggtaagtatctaatggagctcgtagcagttgactggtttaaggacgccaagcgcatggatcatgtcgctaggcggaaaggatctgcggttcaggttgccgctgagaagggaatgttcactttcctggtaaacatacaaattcctggaccaagtcattacagcttggtcctttattttgtctcaaactccttgaagaaaggatcgctgttgcagcgttttgccgatggtgatgatgattttagaaacagcagactgaagcttatcccatctgttccaaaggggtcttggatagtgcggcaaagtgttggaagcacaccttgcttgctggggaaagccgtggactgcagctatttgcgtggtcctgactacttagaaatatcggttcgtccgcggtagccaacggggtcctgggcttggtgtttggcgttgttaccaccttggtagtcgacatggcgtttcttatacaggcaaacacgtacgacgagctcccagagcagctcctaggcgctgcgcggctgtcacacatcgaaccttctgcggccgtgtatcctgtccttgacaacatttcctgaacgggacggacaaatcaacctgtgcagattctttcgttctttccgtccgccccgccacaaaaaggctctcccaatttgttcagccactgcagcattgtgcagctcgatacatttgaggttcagacagacagactgcagcagtccacaagtgccttgtacccttcatacagttttgccatttttttaggtcttttcttttacattttactttactcggtgtagtttgagcttcctacagatattgtaatgcaatagacacatcaaagtgagatatacagatacagcatggttcagaaacaagttcgtgtactttccgattcccgacccactgaaactcg

SEQ ID NO: 40284 - DNA, 4971 bp, Zea Mays
gcgacacgagcgcagcagtccacgacgaggcgtaatgacctgctactcgtctaccggttccgtagtgtgaggattaaggagggaacctctccaacttcgagccccgtcttcttattgccttcccggcctggcggtggcggcatggacgacgccggggagatacacgcgctggggagcctgcggcgggacggatcggtgtggtcggccgcgagcgacaccgtcttctcctcgctgtcgtcgcgcgcggacggcggcgtcgacgacgaggaggccctgcggtgggcggcgcttgagaagctgccgacctacgaccgcgcgaggacggccgtgctcgccatgcccgagggcgacctccgccacgtgaacgtgcagaagctcgacccgcaggagcgccacgcgctgctgcagcgcctcgcctgggtcggcgacgaccaccagcgcttcctctccaagttcaaggaccgcgtcgaccgggtggggattgatctgcccaagatcgaagtgcggtaccagaacctgaacgtcgaggcagaggcgtacgtcggcagtagggggctgcccaccatcctcaacacatacgccaacgtgctcgagggcatcgcaaatgctcttcacatcacaccaagtaggaaacagaaaatatcgattcttcataatgtcagcggcattatcaagccgcacagaatgacactgcttttgggtcctcctggcgccgggaaaacctcactgctgctggccttagctggaacactaccttcaagccttaaagtaacagggaatataacttacaatgggcacacaatggacgagtttgaggcccggagatcagctgcttatgtcagccaacatgatctacacatgggagaactgactgttcgtgagacagtcaatttctctgcaagatgtcaaggaagtggtcatcgctatgacttgctagttgaattgtcaaggagagaaaaggacgcaggaatcatacctgataaagaaactgatacctacatgaaggctgctgctacaggagaccaaaaggctgatgtggtcacaaatcacattctaaaggtcttggggttggatgtctgtgctgacacaatcgttggaaacaatatgttgagaggcatatctggaggccagaaaaagcgagtaactacagctgagatgcttgtcaccccaggacgagctgttttcatggatgagatatcaactggacttgacagctcaacaaccttccagattgtgaactctatccgggaaaccattcacattgttggcggaacagcagttattgctttgctacaacctgcacctgagacatatgacctgtttgatgatataatcctcctgtcagatagtcaggttgtctacagtggtcctcgtgaatatgtccttgagttctttgagtcagttggcttcaaatgccctcagcggaaaggtgtagccgacttcctgcaggaagttacatcaaagaaagatcagagacaatactggaaacatggtgatgacacctaccgatacgtccccgtgaaggagtttgcagaagcatttcaatcgttccatgttggtgaggctatacgaaatgagttggctgtcccattcgacaagagtacgagccatcctgctgctctgaaaacatcaagatatggcgccagcgtgaaagagctacttaaagcaaatatcgacagagagatattactaataaaaagaaattcctttgtatacatattcaaggcagttcagctaacactcatggcactcattacgatgaccgtctttctccggaccaatatgcatcgtgactcaatatcagatggaaggatatacatgggtgccctgttctttggggtcctgatggtcatgttcaatggactggcagaagttggcctaactattgcaaagctcccagttttcttcaagcaaagggatcttctcttctaccctgcatggacatactccttaccatcatggatcattaagactcccctctccttgctcaatgtaacaatttgggttttcataacatactatgttattggatttgatcccaacgtagaaagactttttagacagttcctgctcctcttactaatgaacgaggcatcatcaggattgttccgtttcattgctgggcttgcaaggcatcaggttgttgcaagcacccttggttcattcggcattctgatatgtatgcttttgggtggattcctcctggcaagagagaatgtgaagaaatggtggatttgggggtactggatatcacccctgatgtatgcacaaaacgccatatcagtaaatgaattcctgggtagcagctggaataagcaagtaatccccggttcagcagaaccgcttggaaaactagttctagaatctcgtggactttttcctgaggcaaagtggtactggattggtgttggtgccttgcttggatatgtgctgctattcaatatactctacacaatctgcctcacattcctcaaaccatttgacagcaatcaaccgacaatttctgaggaggcattaaagataaaacacgcaaatctaactggtgaagttttagaagcatcatcgagaggacgggttgccagcactacaacaacaggtactttggacgagagcaatgatgaagcagcttccaaccatgcaacagtaaattctagtccagtcaacaaaggaatggtcctcccttttgtacctctctccatcacttttgatgatataagatacagtgtggacatgccagaggcaatcagagcacaaggtgtcacagagacccggttggaactactgaagggtataagtggttcgtttaggccaggagtccttactgctcttatgggtgtcagtggtgctggcaagacaacactgatggatgtgttggctgggaggaagaccagtggatacattgtgggcaacattaccatatcaggttacccgaagaaacaagaaacttttgctcgtgtgtcaggatactgtgagcaaaatgatatccactcaccaaatgttaccgtctatgaatcccttgcattctccgcatggctcagattacctgctgatgttgattcctcaacaagaaagatgtttattgatgaggttatggagcttgtggagcttttacccttaaaagatgcattggtaggattgcctggtgtcagtggactatcaacagaacaaaggaaaaggctaaccatagctgttgagcttgttgctaatccttctataattttcatggatgaaccgacatctggacttgatgctcgagcagcagctattgtcatgagggcaataaggaatactgtggacacaggaagaacggttgtttgtaccattcaccaaccaagtatagatatatttgaatcttttgatgagctcttccttatgaaacgtggaggtgaagagatttatgtaggcccactagggatgcattcatgtgaactggtcaaatattttgagggcatcgaaggtgtcaacaagataaaagatggctacaacccctcgacatggatgctggaagtgactagtacaatgcaagagcagataactggtattaacttcagtgaagtatacaagaattcagaactgcacaggaggaataaaactttgataaaggagctaagcacgcctccagaaggttcaagtgacctatcctttccaaccgaatactcacaggctttcctcacacagtgtttggcttgcctgtggaagcaaagcatgtcatattggagaaaccctccatatactggtgtcaaatacttctacacgacagtgattgccctgttgtttggaacaatgttctggggtgtgggcagaaaaagggatagtcaacaggacctgttcaatgccattggttccatgtatgcctcggttattttcatgggagtacagaattctggttcagttcagccagttgtatcggttgagcgaacagtcttttacagggaaagggcggctcatatgtactcgccattgccgtatgccttgggacaggtcgtaatcgaactcccatacatctttgttcagtccttaatatatggcgtgctggtgtatgctatgatcgggtttgaatggacagctgacaagttcttttggtacctcttcttcatgtatttcaccctagcatactacacgttctacgggatgatggtggttggcctgactccgaactacaacgtctcctccgttgcttccacggcgttctatgccatttggaacctcttctcgggattcttaataccaagaactagaattccagtctggtggagatggttctactggatttgccccatcgcatggacgctcaacgggctggtcacttcacagtttggagatgtaaccgagacgttcagtgacggtggggtgcgtatatctgacttcgttgaggactactttgggtaccatcacgacttgctgtgggtggtcgctgtggtggtggtcgcgtttcctgtgctctttgccttgctctttggcctctcgctcaagatattcaacttccaaaagaggtaaataaaatgtgagacagcttgattaatcccaaggcgaaaatagcgcaggcgttgcggaagaaagtggggctgtattgtatgtaaatagcgtattcgttgatcagagcttctcaagctccagacaaattgtgtagctgatagaggatcttgtacctgttggtgtaaaattagccgataatgcccaatttctacgatgtgatgaagttcagcttttgcaaagttttgtacatattggcacacactggctgttcgctgcaacactccaacgatgctctgaaatgatggatgtgtttcctcacagtagaaaatatggcgaccccaatagacctaagctgtgttgatcacgatgataacacatgtagtaattagatgtccatgttgaagtgtataaaaggattggataccttctctcatcaatttaaacttttggtttgaactgatcagtgtatctactctaacatgatatcaaatccag

SEQ ID NO: 40285 - DNA, 289 bp, Zea Mays
tctgcagttcgatcgggtggtgatccctataccagctactactcctacgtacgtaagtacgcgcatgcacgcctaccgatggcgacggcgacatactacgcccctcgtctcatttcatgtgcccgttgtagcatggaatgtaccagccacctgcattgcaggccgtgttcctgcgctcccatctgcagagtgcagacccggcgtggcgtgaaagcgagcgagcggggtggcacggcagcatgcagcaaccagcaagcaaagacacagaggatccggggcacgcgtgctg

SEQ ID NO: 40286 - DNA, 416 bp, Zea Mays
cagggatcggtccattcgagggactcgatcacgcctcgcctgagcctagcctcggacaagggcagccgatcccggaggatctccgtctcgcccgaggcccccctccagcgacgaacacatttccggctcgcccgaggccctgtcttcgctaagaagcgaccctgaccaaatcgccgcgccgactgacaaaatcgcaggagcatttaatgcaaaggtggcctaacaccattatcctgacgcgcaccctttagtcgacagagccgaagtgaccgcagtcacttcgccgctccactgaccgacctgacagaaggacagcaccgcctgcgccgcaccgactgcagtgccacctgacagagtgaggctgacagacggtcaggcccgacctcaggcgccataggaagctccgctccgcccga

SEQ ID NO: 40287 - DNA, 2968 bp, Zea Mays
cgctccctccccatgaaacccccttcccccaatctacccctctctgtgcccccgacatccacgctgcctcagcccgccgtccagcgccctctctgcgcctccctccccacaccgcctcagcccgccgttcgccacgctccccacgctgcctccccccgtcgcccctccctcccgcgcggaactccgccatgctccccacgtcgcctccccccatcgcccaccagccgtcgcccaccagcccacactatctcacgccatggatggtggcaacagtccccgcccccgtacctcacacgcatcaggctgggctggccgatcccgccgccgcaaacgccgcgcccagccccgatgtcagcgcggcccgcccgccaacgcactttcggcctccccccgcccctcccttcgcccgcccacccgcaacctccgcgccatccgcaacctccgcccgcttctcacgccaccgacccgacctccgcgccatccgcaaccgtcgtgcgtcttatcccttctctaccgcgcactccgtgtggaacaacctccgcgtaggaagcctcctcccttccccatccccattccccaccacgcgcttcggggacggcgagctccgggcgggagcgaccgccgggcgcttctgctgctggtgcggaggaggaggagcggcgagggtggttcggcgcaggctccacggcggcggtgcccgagccgagttcgactggctggcgctctactgcaacctcacacgcggcgatgggccggacggtaacaatggcaagctggtcctggaggagctgctgtcgtgcgccgccacccaattttgttttccccaaatcctgagctgtgaagagaagaagaagacaaggacgcggcgagtacgatgacgagcgccgcacagcaagtcagcgaggagcacgatgacgcgatgaggaccacgagctgccgaggaagtcaaggacgacgacggcgcagagacccgcgagttgagacatcttcttcgccggcgtgaaccgcaaggctgagacatcttcttcgccgggttcggccacgccgacaccaccgacccgatgtacctatcctagccgtgtttgcaggcctctcaaattgaaccgattgcttcaagggtgccatacatgattgtgttaaccatgagagggattggcctggcactggttcattctacgggaacctcgacttcggtggagaatgtggtgtccctgtccaaactgtgttctacactccaactgaaaaccgtgcaaagttctggtacgcaacagattacgacatgtttagccttctgcattgctcacatggaagaggacttgagacccgggaccgagcagtacagattcatcgagcaatgccacattggcctcatgaagtttcacaatcacagtggtttttacaaggatttcagttcatggttgtacatagtttttttagttttttttttgaaaaatgaggcattttctttttaccggcggcggaggcgatggcaacaagcccttccctattcgaatctctgtgaccacagagcctacctcgctgagctcatcaccgagatcactggtgggatcaatgagctcgccgacgtagcacagttcttttgatgagggttgggcagaggctttaccttttgcgtcagacagtgctctctcacagcaattgtccttttgcctacctgtatcattctgtcatactatctgcaattcagctatgcacagaactatcaaaagcaagcaaagatgctctagagtacctgaggaaggctactttgtgctctataaggattgccaggaaagtgccagatttggcagagaacttcatgggcctggatgcatcattgttaaaggagaaacaccatgggtccttatatctgcaattcagctatgcacagaactatgcaaagcaagcaaagatgctctagagtacctgaggaagttgcaaatacattgatcccttaggggttgagatggaaactgccacaagggagggaggacgtgagtcagctgcacgtgccgacatacacatcacttcctgcctcgctgtccttgatcgagacaaaatcagaagagctgtatctatatgtactccataccttgacgtatgcaggggctagatccataccccggcctatctgccctgtgaggaatgtatacttctgcaagtttgaatactttgacaccttgtgaggagcactctttgaaggtggagaaggtgttgttccaagggaagccagactaccaaaatgttatggttttttagcttctcaatagccggcgacagtgcatacgacctgccccgcgctggggctgtgtctgccttctcctccttcgatgccatgacactgtaaagtgaagccttcgagctaggcgcggaggccagggagatgctatgcgcccacatctaccacgccgccttcatattgctcaagctcgcgctccgcaactcctgccccatctgccgccatgagatgcccaccgatgctgccctgcgggctgccgccagcgtcggcgttgccgaacgcgccgccggggaggaacaagcgtgggatgcgccccacgcgcgcgactttcacctgcctcccaatttgatccgtgagttcaccaggaccagaacttcttcgatgatttgttggaccatccctgctgatacaaacacaatcattttgtggcaggaaatcaccatattagagcttacaaccttcgcatcaactgaagagtttgacactcatgatccaaaggagaacactttgctactcccttacttgaggaaaaggtcaaaaatcattgagatagttgcagcgcgtgatatagtctttgctctatcacagttaggagtatgtgctgcttttagtagcgagacaaatcagagaatatgctttttgaacggaagtctagatgaagttatccgcaatttattttacaacaagaataatgattcattcaaaactgtatcagtatatggttctgaa

SEQ ID NO: 40288 - DNA, 160 bp, Zea Mays
aacaggtggtccaggaggagccttacaatgaagagtaagtcagcttgttggcgccaaggaataatatttagttcactttattgttatcatttatttttgtaagacttccgctatgtaataatgatacttgtgacattgtgacatttatctctatacactt

SEQ ID NO: 40289 - DNA, 2347 bp, Zea Mays
aaacacagaagcgaagaaaacgaacgaattgccgctgaatccttaagaacagacgacgatctgacccgcgggcctctcgtccccttcttcctgcacttcaggtctgcaaccatcatctatctggcttcctattccgcttggtcgcttccctccctccctcgtcctgctcgcgcgcggagtgagcctacaccacagggagaagcaggcgccaaccgtgacaccgagggtacctaactggaggccggtgatctccggttccggcggcggagatggggtcgtcgtcgcggatcttcgagtacttcgtagtgtgcgggctgggcccggagatccggtccctggatggcatcaagggtttccatggcgttgaggagatgtacatgtcggccttccttgaccagttcccgccgtccaaccacgctctgtaccctcctcctcctccgcagctccccacctgtgttttgccagcgggagtaagaatatattcttcagggctggacacagatgatgtctcaacttatccacgtagttatcctatagttttaacagagggagatggctcaaaaatttatgtcagttgtattgcatttcgggatcctatttgtgaagacataattgaggcttaccaaattccggcgaattcgtttgctgataaatgcatctgccttgtgtcccattctcctagtttccaagtccttcgtgatgcccttgaggaaatatttgttctttgtttttctccttcagggtgcagcaagcctttgtgggacataatatctcatatggtgtcacatgtgacattacccacaccaggaaagaatcgtgtcttatttgccattgagaattgtcttctttctgcggaagctcctccaaaagaatggcttccccatgctgatatatcattccagccattggtgcagtgtctggatgttgataaactaatacttctctttacagctgtcctgcttgaaagaaggatattgcttcgatcaaataagtatactctactgactctagtttcagaagccatttgccatttaatatacccaattaggtggcagcatgtctatattccaataatattctctagtggggttgattacattgatgccccgacaccctacatgatggggcttcattctggtgttgacacatctgcagtgacaatggatggttggtggtagatctcgaatacaaccgtataacaataacggaagaaattcctccaataccagaaactgaacataactttcttcgtgttgagattttaaaattactacaacccaatgtcatgggaattgatttcatgaaaatcaatcttgccaatatgggtgacctaagggctggcacaaaatcatggagtcaggaacatgatttccaacttaggctgatatttttgagattctttgcacagatcctgagtggttatcgtaacttcattgatactacttcagcgactggtttcaattctcaagcttttcttaaaaagcgttctcgagcaactaaccagcctgtcgactccatgtcaatgattatgcagtttttggagactcaagggttcttggattatctggagagatgcaacactgcagaagaaaatgcccacaaccttctcgataagttgcaggatgcaaccggaagaggacaaaaccctctaaccatatttccttctcaagtttctgatcctgagattataacaatagccaatcctgagattgaaggactagacaatagacactgctataagaggtttccagcaaatgcaagaacagaagaacaagaagaaaaacgtaagtcgattctagcgttagctagtggggctagtaagcaagtaccgagttctccttctatccgagtaaatgggggcccaaaggcagaaagtctgagcccaagagagagggcggctgagagagaaaggatggttctggacataaaagtgaagctccagggactctggcttcgtcttctgagactaggggcaactgaggatcctctctcatcttttgaatatggcaccatcctagctttgattgagtctgacgcagaaggcatcgggggaagtggctttgttgaatgcatcagagagcatattcattcgggctggcaatgtcgcttgactgatgaacaattcattgctgtaaaagaattgcttaagatggctataactcttgcgaactctcgcaacgacctggcgaccattagagatgctcttgaagtttctgctgaaatgtacagaaaagacccaaacaatgttcaagattatgttcagcgccatctattatcattgtcagtatgggaggagcttcggtatgtcatacttagtgtgaaaacgatcatttccgtattaaattga

SEQ ID NO: 40290 - DNA, 2223 bp, Zea Mays
ccccgccctagctcacacgccaagccccagtacaaacaaagcctacggaatttcccccagctccaattcgcgctgttcgttccctttcagccagtcagtcgccgcctccgctgaactgcaagtccaaactagctagctcactgggcaccgatttcccctaaaattttcgctgcttccaggaggccgcggcgaccatgggcaactgctgcgccgcgccgtcgacggagggaagcggcaagacccgccccaagaagcagaaggagaacccctacaacgtcgcctacaaccgcggcgcggcggcgccgccgccgcccccggcgcgcccgggcctggtggtgctgcgggacccgacggggcgggacctcggcgcggagtacgagctgggcggcgagctggggcgcggcgagttcggcgtcacgtacctgtgcacggagcccgccacgggggcgcgctacgcgtgcaagtccatatccaagcgcaagctgcgcacgcccgtggacgtggaggacgtgcgccgggaggtggacatcatgcgccacatgccgccgcaccccaacatcgtcagcctccgcgccgcctacgaggaccgagacgccgtgcacctcgtcatggagctctgcgagggaggggagctcttcgacaggatcgtcgcccgcgggcactacaccgagcgcgccgccgccgccgtcatgcgaaccatcgttgaggtcgtccagaagtgccacaggcatggcgtcatgcaccgggatcttaaaccagagaactttttatatgcaagcaaggacagttcccctctaaaagcaattgattttggcctgtctgtgttcttcaggcctggcagtccatactacatggccccagaggttctgaagcgaaactatggccctgaagttgatgtctggagtgctggagtgatactttacatacttctttgtggtgtaccaccattttgggcagaaaccgaacagggagtagcgcaggcaatcatacgatctgtggtagatttcaaaagagaaccatggcccagagtatctgagcctgctaaagatcttgtcaggcgcatgcttgacccaaatccattgacacggtttactgcagcacaagtacttgttgaatgggcagagcatccatggctacatgactctaaaaacacgccagacgtttctcttggcgatactgtccgagcaagactgcagcaatttgctgcgatgaacaagttaaagaagaaagcactaagggtgattgctgagcatctgtctgcggaggaagtagctgacataaagcaaatgttcgataagatggacgtgaacaagaacggcaagctaacattcgaggaattcaaggccggcctccgtaagctgggaaaccaaatgcatgattcagaccttcagatactgatggatgctgccgacgtcgacagaaacgggaccttagattacgaggaattcgtcacggtgtctgtccacgtgaggaagataggcaacgacgaacacatccagaaggccttcgcatacttcgaccggaataagagtgggtacatagagatcgaggagcttagagaggcactggctgatgaactggatggcagtgatgaagacatcatcggtggcatcatccgggacgtggacacagataaggacgggaagataggctacgacgagttcgcggcgatgatgaaggccggcactgactggaggaaggcctcccggcagtactcgcggcagcggttcagcaacctgagcctgaagctccagaaggacgggtccctcggcgccgacacacggtaggccgccgagtgtagtggtggtgctggtgttcgtccgtctctttgcttgcttgcttgttttgctgtgcggggtttttgttggttggtcagacagtcagtcaggtcattagattccacctccacgttctgtttccattacacggtgaaccctcagctggagctgtgattcttgggcttgtgattgtagaagaaagatgcacgtacaacgtacgtattgtagatgggtgcagcagcgtgtgctgacaaagaatgctggagtagcacaagacacgagtagtcttgctttgcttgtaacttgtaagtagaatttgttttgtgtgcttgcaatgcatgacgatggtgattgccctgcaaaaccgtgtgaatgcctgcacgcaagctgctcgcgtcgcgaccctcgctcttgctggctgtaaagaaggacggtgtggttttag

SEQ ID NO: 40291 - DNA, 1567 bp, Zea Mays
gcgctagctagctgtcgtcttctccatcaagtagaaccagtagaggaagcaggagaatacaagctactgcccttagaaaaaaaaaaccctacgctagctagcatcctctttccattagccatcctagccttcgccccctcgacgagaagaaccacctcaaaaccgaacagccgcaaaagaaagctgctagctactctatacatgataactagaacaggaccgtgaagtaatatatatataatgacgaagtcaggggcgctacaacttgctcggagcaccggagggtcgcttagcaaggaccaagtcaaatccgccgttgatcagtatgtgaagtaccacgacctccacggaggcgaacaagaatcaagaaagtcaaattacgctgatttggcaaacaagtactatgatcttgtcactggcttctacgaatatggatggggcgactcattccattttgctggcggatatccgggtgaaacttcccgtgaagccattaagcggcaccagcattttatggcactacaattggggctcaagaagggtatgaaggttctggacgtgggatgtggaattgggggacctttaatagaaattgccagattcagctcaacttcaataactggattgaccaacaatgactaccatgtctcaaggggcaaggagcacatcttttcagcaggtttgagtgagcaatgctgctccttgaagggggacttcatgaatatgccaatagctgataacacctttgatgcggcctatgcaatacaggctacatgttacgcaccagaggcacaaggtgtctatagtgaggtctaccgtgtgctgaaacctgggcagtattttgcactggatgaatggtgcctgactgaccgatttgatcccaacaacgctaagcatttgaccgccaaggctgagattgagcttggcgatggcctgcctgacatccgtaccactcgccagtgtgtccaagctatgaaagatgcaggattcgaggtcatttttgcaaaggatcttgctcaagattttccttgcccatggtaccagacgatggatcctaactacttttcatgggctaacttccaatgcacacgcccaggacggataatcacccgtgcaattgtcaatacactagagttcctccgtattgccccagcaggcagcgtgggagcctacaacgtcctaacgagtgcctctgatggccttctaaaaggtggtcgggaaggtatcttcacagcgtccttcttcgtcctgggccgcaagcctctcaaggaaagtgaaatagtgaacggcggcaacctttgagctgcaacatgagtatggggtcgtacttataagagctatgaatcatggccaacgtgttacgtgctgaagtgtgtttaccggtttgtcttatggctcttgcgcgtgtggtgggtcatgttcacgcagtagcatactagcatgtatctgcttgttgtgtgttgtactatgaactatctgaataaaaatgctgtttacgcgttgtattaatcgcaccatttcttggcaacacggctttgatcggaccaatgtattgtctggatctatc

SEQ ID NO: 40292 - DNA, 986 bp, Zea Mays
atggcctcccccgacctgctcttcaatctgtggaacctcttctacctcgacgcctatcaggcagccattaacatcgacgtcccgggcctcgacaccgacgccaccactgagcgcgacaccatcgtcttccgctcctacatcgccctcggctcctatcagacctatggagataagcacgaaagtgaggccaccaaaattgagggaggtgatacaggttcccaagaaggttggaagggatccaagatttgagcctgtttatggatctgttgacaaagaagggtttaggaaaagatacaatttcttatttgatgaagactttcctgctgaaaaataaagactccaaaaaatgattaagaaatctaaggacctagatgccattggagaaatgaagagtcatgtcacgtggattgataagcagttgaagtatcatcctccaaagaacgttgaatcagaaatcttgtgtgagcatatcaagaaagagagggaggcaacaaaggctagaaaacgaccatgctatctgaagaaacctgaacttcacgaaaggaagctgatgaacaagtacaacgagctcaaggaggcaggaaagcttgatgcattcatggaaaagcggcggaggaagaatgcctccaaagatcatcggttcatgtcgtaccaacgcagtggagatgcataatagtttcctgattctggaggcaagcgaaaggatgatggacggtcttctcatggtggctggacactggacagtcagtgtctctgttactttgttgccctagccgtacaatcgtcagctccgtgcacaatctctactagttcttaagaatagagtgcaggcgtccacagtgggtttttatgtttctcatttcactctctgcattttcagttacaactacactgcatatgttgacagatttgttcatatattactccagctgacattttcactatcgcaacaacatctctactattatttgttttttgcatataaa

SEQ ID NO: 40293 - DNA, 2838 bp, Zea Mays
ccgcccgtatggctcagattcacatcgattccgacatcccaaccgtccttgcccctccgctccgtgcttcttcagttcttcctctctgtcacccagtcaccctaccccgttcgttggcctccgctgcgaaatttaaaacctcccaagcagagcgacgcccagagaagccaagaccctatttccccatattattaataaaattggctttggtggaaaaaagccttcccttttggcctgcgcaattcgagattccggaggaccacggcggcggccggatcggggtggcggcgcggttcggtcgccgctgagcggagctgatgcgccgcgcctcctgtgaggaggacaactggtccagcacgccgctcatccaagggcaactggactctagaagaggatgacatacttcgcaaagctgttgaaacctacaagggaaaaaattggaaaaagatagctgaatgttttccaggtaggactgatgttcaatgtttgcatagatggcagaaggttttgaaccctgagcttgttaaagggccttggtcgaaagaagaagatgagatcattactcagatggtaaataaacttgggccaaagaaatggtcgaccattgcccaagctcttcctggacgtattggaaagcaatgtcgggaaagatggcacaaccatcttaatcctgggatcaataaggacgcatggacacaagacgaggaaatcaggctcatccatgctcatcaaacttatggaaacaaatgggctgaattgacaaagtttttaccaggaaggacagacaatgcaattaaaaatcattggcacagctcggtgaagaagaaagttgattcatacagatcatctggtttactggctcaatcccagggcttcacacctgttgaatacactgctggtggtttaaatgttgattcttcatctgcaataaccaatcaaattagcgaaggcagtggttttaatgtttttcgggaggctgaagattcgatggagttaagtcagtcttcgtttgccaagggttcttgctctcaggaggagcaaaatgatgtgactttgggatctcatttgcatgtgcatgaatctttgtgtccagatggttccactaatgatggcaatggtgcttctggtttacctgacattcatcaccgcttatgcacttctgacatggatcaagataaacacttgcaggaaggaatggatttggataaacacttgcagcatgaattctctcaaggaacggatttgcatcttgatgtagatgaagtgccaaacaactttgtgataaaaggtagccagtcatctaatgagcttgcagttcaatttcatgacacagagattatgaatagttcaaaaaatgatggagtgtctttggtaccacatgctataacaccatgtgttcccatcttacctagtgtttctggatgtgtgcataacataaatgtgatatacgaaatgggcataaaaaatgataattgtttccaatctgaaaagtgccaggatatttccattcaatcaggtgcatactcgtctgaagctgcaggcagctttttagcaccactttacccattgcagacatctgaaccagcaataatgatgggtggccctgtgtactatcagagttctgtaatgtcattaccaccaggctttatttcttctgatggtgcttctaatgcatctggtgtcaaatctgagacaagttactatcctgtttctcgccaaaatttggagattaaaacttgccacaatgcttctggtgatcctgaacaaaattcatatattagcagcgaagatgacagaaacaagacttctgaacctatgggcagaatatcagaatctgaaaagaaacagcaagttgatgttgaacaatcatgtttggagcctgcagcctgcattggaaaggaagcattatctagtcatggtgacaccatattaagtaaaaaggaggatgctggagctctatgctatgaacctccttgctttcggagttttgaatttccctttgtcagctgtgagcttgtaaactccagcgatctcccagaatatagtcctcttggcattcgagagttgatgaggacatccttgaacttccctaccccagtaagattgtggggctcccctactagggatggtagccctgatgctgtgctaaagaatgctgccaaaagattcatgtgcaccccgtccataatgaaaaaaaggcacagagatcttttatctccagtttctgatataagaactgacaagaaaccaaatactgaaagggattttatgagctcaggcatatcctctacaagagttgggaaatcttgcatggatagcgctgatgattcagctgatttagtttcaccgaaagagagtgcatttcaaaagaagctgaagctttgtcacgaaaacaaagaaaatttgaatgaaattgctgatcaaggagaaaatgaagccaatgcaaagattggctgatactccaggtattaaaagaggcttagaatctccttctgcctggaagtctcctgtgttcacaccattccaggatgcatacttcatgagcccagcaagcagagcttttgatgccttaggattggtgaagcagattaatgagcagagtgcttctgctgtggaggaagcacatgaagttctggcaaatggaagcccatggaaacaacataacaaggaaaactctgacaaagaaaatatagaaaatacagctttgaagcatgagcatgtcacaagcaaacctccatcgatactcatgcctagttccagtctccggctgttagaaataagcaacaaggattatggatgctaatgcaaattctcagtggcaaactggcaataatctaa

SEQ ID NO: 40294 - DNA, 1147 bp, Zea Mays
cagattcacatggttgaagggggcccgaacgccgcgcttcggagtccgtcttcctctcggcctgcgcagaatcgcaggagacgggtaaaatcccgctgattcgctcggtcctcgcccgtcggctcgctcgaggcaccggctccgacactgcttggcgatttcccccgtgcgacccccggcgatctgagcgcgtgactccgctgcccgccgccgggctccttctccgcgccagcggtcgtcccccctcctcccgcggcagccgtcccctccccgagggtcgacggccgtgccctcctcgagagctctgccgccgttgaaaccacgggctcgtggtaacttgttgtcgtcggagggatccccgatggccgcggaggcagatcagaaagtcgtggtgcacgtgcggtcaacgggcgatgcgccgatcctgaagcaatccaaattcaagatttcaggacgagataagtttctgaaggtcatagagtttcttcgtcgacaactgcatcaggatacactgtttgtctatatcaacagtgcattttcgccaaacccagatgaactggtaatagacttgtataataactttggaattgatgggaagctagtggtaaattatgctttatcggcagcatggggctaagtctgtcttgcagcaaaatgggaaaaaatgcacatgaatcaaccagtgctggagaaaacgtcgtcttttgagccaaagcaatttataaagcacaagccgaaacgagaaagctgtttgcctctatttacaagggaattgcggattccattctgtaatgcatcgcaaatactagtttagttcattattgctgcaacaactttcctgtaatgcaccgcaaatactccgtttactctaactttcctcttcctgtctagatttgcatttgctttttaaattgtgtacgcctgacacgtttggaaaacatggcgacagacgtctgcccttatctaagtataacaatattttctggacgtcctgagttacacatgttccagcgtgtagagaacattgtgatggataacgtggttacacctacttcaaataatatttactcatatataccacatcgtccagaagcgtacacgtatatctgcattacacggatcacaaaaaacccgagccttttccctg

SEQ ID NO: 40295 - DNA, 1913 bp, Zea Mays
gcgggaggtagcgatagggatccgcggcggcggttgtttgccgggaggctggcaggcacgacgtgcacgaggcggctggaacctcggcggggcagttagccgtgcgcgcgcaggattcgcgggaggcaggggcgagcgggggcagtctacacatgactcttaatatttgtagagataaagaatacctccaagaagacttggggaggtcaatgtcacaatcagcttttatcatgtagtaataagcatctctctaacaagtaacaagtacaaagactagttctttcctcttcccacgacccacatcttctctttctcctgtaaaagaaaagaaagggcaatcccatggcaaaaacttcggaagtgattgcagggatagccctgggcatcccactaatgaacggggtgctggtacccatcatcaccatcctcgtgaacagattcttctccatcctcctcaccgacacatccagaaaactcagtaacctggagaacctcaccatcccaagtctgaaggagactctggtacaagtggaggagcagaggatggtgagagcacccaaagatgcgcagtccgagtctgatctgaggactctcgatgggctgacgacggagctcaaagctgccttgtacgaagcggaggaaatcctggatctggtagactattaccggatcaagaagagaatagccgatgacgccgaagagaatggaagaagccgctgggtgcagcagaccctccgcgcttttcgcacctctatggcccgctgccagggcagcagctgggtgcggcacctgcacgactgcgtcggcctttgcgtcgcctgctgcaaggggaccttgttcagaagatcaggtgagcagcttccaatctcccatgcgtcctccgtttccatggcgcagaggctccgtggctggtataggcacctcgtgcaccatatccccagcagcagtcgatctgtgatgcagtggctccgtcactggttccagcacctcgtattcaacttcgctaagctatgtgaatccggcactcagacgctccctggtttgccggccgccgatgtgattgcaactaaccaggattggtcatataaagttattggcatcaacagtaatcagaacgatggcacagcaacagcttctttcttgctaaccattgctagacataacttgacgaaaagaatagagcacatagaaaacgttctcaatgatttgaagaaatcacatctgttgaatcagcaaagcaccatcagcagcagcagtaacaaagaaaagagtagcaggcatgaggatattcagtacctgtacagaagcattgagcggaaggtaattggtcgagataaggagcgtgagaagcttatcagtatgcttcgtaggggacctggtccggacacaccaagctccagtagcagtaaacattattctgtgattggtatatatggcattgcagggtctgggaagagtaccctggcacaatatgtctgtgattatgagaaggccgaaggccaacattttgaccctgtcatgttcattcatgtgtctcagacatttagggtggataagatatttcgtgacatgctgagggagatcaggaaggacaggcaatctgacagcaacagtgttaaatgcctacacgatgagctgaaggaaaagttgagaggaaaatgtttcttgttggtactggatgatctctgggtcagtcgtgagaatcaggaggagcgtgctattctacttactgtgctcgatgctgggcagagtggaagtcgggttctggtgacagctcagaagaaagatgtagctgcagcgttaggcgctgaggagcagatcccgattccggatatggaagaggagcagtacttttcgatgttcatgcactacgccctagaagctgcttacagtttggcgtcttcatgtcgtgg

SEQ ID NO: 40296 - DNA, 1862 bp, Zea Mays
cttggatctccactctccaggactccagggtttgccgtttgcttgacgatcacacgtatcaaaaagggttctcaagtattattggtaaagtatcacaattagatatagcttgaagttgcattttacgcgttgagctatcacattgtagactaacttgtacagttttcttttgcagtccttcttgcttgctttcacatttggggtgttctgctataatttacgttgattatttttcccttgcaatttggcatgcatacaaacatttgctctctatttttctatccaacataattcatgatttaaataaaggaactatttcttaaaagtcttctatttagtttcatcctttggaaaacaactctgctactaatgtgctgccccagaccccagttttacttctatttgacctgccagtgaaagcatttggagattttcttttaatccaccgtgaagcaaattcatggctaaatgctgcaacgtttagtctgtagcagtgtcctacttcttcctacttattaattagttgatggctacttccgtatgagttaacaacttatatgtgagagggcgaacgagacagagttgaaaaccctgcatccatccaatctggacatacataaaagttgtcataaagaaaggcacttgtccaggaaaaatgttttattgactgtcctgctgttcctttccccgctaaataatgtatcaagttaaaacttagctgagataatgtcaacttaagcttttccatgtcggcatatgtgcttcccacaatcttcggatggtcttttttttaaaaaaatctttggcctgcttcatcaagaactagatttgatcatgttcttctctgtgttgatgaattatctacagtttagctataaacacatctgaaatgttagtctattgaaggatacttggatactgaagccatgcatctttaaattgttaacttttctttttgtggtttagtatggatgaataaaaggggaaaaagcaaaagggaacaagcatcctctgatttttattttgatgatgcaatcttagaaaccctacctgaactgaacacctcttttggcattttaaaagtgctgcaaaggaaacaagcatcctcttgcttttgtatctttagtatgttgtcggcatatgtacgctattatgtccttttttggttaaatatctattattcatgggtttgctgttcacatgaatcgcatatagctatcacctttgctgcattcaggttgatgctatgctccaagaattagaaaaggagattgatgatgtggatgcacaaattggaaatcgttggcaactgcttgataaggaccatgatggcaaagtgacccctgaagaggtggcggcggcgacagcttatctcaaggacaccatagggaaagaaggcgtgcaagagctcatcagcaacctttctaaagacacaggaaaaaatccttgttgaagatattgtgaagctagcatcccaaatagagaacaatgaagaggaagaggaagcacggtagatgggagagtatatggaaacatcacactcgttcagcagtcaaaactcatgtattgaaaggcaatacatccatttcttgtgtctcttgactgactttgatagtgacttccaattagcaaggtagattttctgtagaaaggctcatgctgacatgcatttagttagccgtcgtgttgtgatttggtaggtaaattgcaaccaaaatttagaccggttgcatggacgtggataatacagatcaattgtatttgttatgctactatgcaatcccgaaatattggatctgtttcaaattctcaagtaatcattgatggatgctatttattgaccataaagcttacgaaatcat

SEQ ID NO: 40297 - DNA, 925 bp, Zea Mays
ctccagccggccggtgctcattcccaggacatcgtcttctccacgcttctcctcatcgtacgcagattcttggccgtgggagctccccacgccatctcccatggcgcttggcctcccagcccctccccagccgcgagctcgccgagctctccctctccccatggccacgccgcgccctgctccctctgtcttccctggcgcgcgctggtcgttcctaccaatttccttggcctcgctcggtacttctctggtcgtccttactcctgctctctgctcaagcacgccggccgccagatcttcaccgccctgctccatggcgcgccctcccgttttctgctcgctcgcgcacggctcagagccccctggtggtcgcgcgtcttctcccagccagccgagtagttcgccgagctccctccctagcggtccctggctccagctcggccggccctgttccccatggtcgccggctgcttgaccccagctccttgccgtcgcacccctattcctccatggccgcgagctccctctgctgtctgcttcgccgcgcgccaagcccccagccgaggtctcctccctgccgagtcccagccgaactcctccgtacagcgccctgtcgaggcttcccgttcctgcgcgccgtcgccttgctgctcgccttgcgtgcgcggtcctctgtccctgcgcgtagccggtttctcggttcgccgtggagcctgcgcgctcggttctgtccagttcatgtcccgctcggccgtccgcgcgacacgtcatccatggccgctgtccgtcgtcgagtccctacgtgcgcaccagctccctgtgtcgcgttccattcacctaaaccggagttcgccagccgtccatacttgccggtgtgctgctgctctagttcggatctcgcccaagtcgctgccatggttatccg

SEQ ID NO: 40298 - DNA, 776 bp, Zea Mays
cgacgctggctcctagggatattcttcaccgccctcctctcttcttatctccagccgttcctatcctgtccacttcctagaaaattcctagccgctcgtgcaatctccggcacgcagccttggacatcgcctcatctcctcagctgctcgccctgtctacgcgccaggcgacgtaaccagtagcctctgctcgctggcgtcgtgctcctctgctgaattcgacgctccgctgtcctgcgagctcaaccgcgccgaactgccaagccagtggccgacatgctctgtcctcactgtccctgctcgttcccctgctgcaagttgtcgggcaacctgcagctcggacttcaccatcggctctttgcgtgctccgctgcaccagatcgccgcgtcaccgtgaagctacatgccttgccttgcgttgcctttcgctgctgctgtagccgagtcgtcatcgcccaagtgctgagcgctctgaacttgccaccgttctgcagccctgccgtcgactctctactcgtctcgctatgttgtcatagttcactatcctcgtcctcgccgtctaccttgccggttcgtagttgactgttatttatttagaacggttggccgagtacttagttttattggtgtcgtcatctcctgcagctcctcgcgctcaacaagctgtcacgcttggcgtgtttcctccgtgtgacctcacgcgttcctctcgcttcatccggaagctagtcgtgtggtagagcagaaggtgaaagtacaagcgtgatgtaagaatg

SEQ ID NO: 40299 - DNA, 923 bp, Zea Mays
tccgaatagcgtacataaactactctcgttctttttcaaagaaggaaatcgtatatgtgcaatttatccagtttattctatctagtacgtacgagtactccgtttctccaactggtcaaagacgtacatgccgccattactactcccagcggacggattcaggagagagagagagagagagagagagagagagagagagagagagagagaagcacacgctacaaatggagcaccgccgcccattcgccgagcccagcggctgggcctcctcgtgaaaagactcccagcggacgatgcagtggcctttcgcgtgaaaagagacccatcggccgcgcgggacccggcgaattttcaccggcgagacacctgggcgaacgaggtgatgccgcgcggggaaactagagcggcccgtgcgtccacgccggaacagccgtccgatgggccgccggcgcggatctggccgctccctccgcggtacgcgctgtcccacggccacgagcgtataaaggcgtcggaatcgctcggttcggttcggttcagcgagtggggtcgaatgcagccgggcagtccctcggttctgcggtcggccgcgcccggcggcgacgcgtttggggcgcgcggcggccggcacccggcagcgggctttggcacgcgcactggggtttgttcgcgtccgaaacggaaatttgttcgaaccactgatagatgcccgagcgcgagcgcagttgttcccgttgttgtttaagatggataggacaccgcaatgttgtttatcttggggctagatttgacgtggtttagatttctgttcttgaatgagacaacctgtgctcctctttttttcacaagcctgacggtgtgtccgtcctttccgtttgatagttgttggtccaaaaggaaatgaaaggcattttattttatca

SEQ ID NO: 40300 - DNA, 1383 bp, Zea Mays
tccggtttccccattcccacccagaccccactaccattaccaaccagagcgacaagcccgaccgcccgcttccttgcaaacgaaacaaaacaaaacaatggcgacagcgagtgagatcgcggcggtgggcgtaataggcgcggggcagatgggctcgggcatcgcccagctcgccgccgccggaggctgtgccgtacttctcctcgacgccgaccccactgccctctcccgtgccgtcatctccatctccgcctccctacggcgcctcgccgccaagggccagctctcccaggatctcagggacgcggatcttgtgatcgaggccgtcgtggagaacgaagctgtcaagaagaagctattcgtggagctggataaggtcacgaagccctcggccatcctcgcctccaacacgagctccatctccataacccgcctggcttcagctaccaaacgcccctctcaggtgataggcatgcacttcttcaaccctcctccggtaatgaaactgatcgagattatccgaggagccgatacgtcagatgaggtgtttgctgcggtcagatctttctccgaaagactcgggaagtccgttatatgctcgcaagattacccaggattcatcgtgaaccgcatcctcatgccgatgatcaacgaggccttctgggctctgtacaccggagtggcaaccaaagaggacatcgacgcagggatgaagctgggcacgaaccacccgatgggccctctgcagctcgccgacttcatcggcctggacgtctgcctctcagtacttcgggtactccacagcggcctgggagatagcaagtacagcccctgccctctcctcgttcagtacgtcgatgctggccggcttgggaagaagcgtggagtaggcgtgtattcgtatgggcacaggccttcgtccgtcaggccgaagtcgtctctgtaggcgtgagagcaaactgttgggcgaataaaaccaggtgcgtgttgcaattgcacgtcagagaaaaagggagcacagcctagttcagaggtactcagtcggacgcttcaggtcgtgtagattcgtaatggcagggtttgctgctctatgtagaaaagatggttcagtgtttttaatctgataagtggaagtcatgaaacatttccgcagtttgcgttctgctcgagagggtgggagaaacagaaaagctatacttcttttgtattgtaatcctctgtaaactacaaacagacagatctcactctctgaaccggtaaaggaaaccaatgagtttctattgtgaaaaggtgcaacgtagatggtgagtccatctaggatgcttctcatttggaccaaattttatgaaaactttagataatccaaatatggcctgttgtttg

SEQ ID NO: 40301 - DNA, 4887 bp, Zea Mays
ttagtttccccaataggatgagatgtgctgtgttaggagttcgtggattcgaaggaatcagccgaagggcgcagcggaggacgcccgtcgggatcggagcaacgggaactcgcctctaagatggaggacaaggctgtggtaaggaaaagattggtatcaagcaataacactcatgccaaagtagaatctggcacctgtaatgtctgttatgccccttgctcctcttgtttacacccacatattcgggttgtggattcgaatgttgaatgtgcatcctctcagacatgctccacaaggtcagaagtaaaaaacaattcactcgttcgtaatgagaaagggctttgtagtaaaggagaaaacgatgatgagtttagtgcaacctcaggtcatgtttccgactctgtggttgcaagagcatccattgcagacgattcatcagaggttaacatgccatcaaaacgcaggaggctgttaaatgaaaacacaagactacctagagcagaataccttgaagacagcaactcatgtgttactggtatatcagcagaaggcaaacttcatgtggataagaaaaaattatcaacttctgcatccagtcgagatttgactgctaaagattataaagtcaacagcatggctaaccacagcaaactaagaaaccaatgtattgatgaatcaaagaaaggatctgatggtcgtgacatgcatcctagctcatctggtagattttcccctgtagattcttctgttatgacaaaaaagatgctgcgaacccagtcttctgtcagtgcattgagcagattatctcctaacaggcaagctcatgaatttgggaaagcactggataatttatctcatcaaccttgtgagaaggcttctcttttgaagaataatgaacaactacgatgtgggcaattgaacccttgtatagctggtgaaaacaatcatggcacactggcaggctacagtaataggcatgcggacaaagatgttttctcattgaaggatctagacaatggtaccttgtgctcaaaagatgaaatccaagaacatggtggcatccattctaatgatgatgttaagaagaatgtgtgtggcgaacaagctttggatcaagattgttcaagggatatatccagtgacagaaagttgaatatacaacatgatgtgacagactgtgggaattcagaaggtttgatagatgttaatgtttgtgatatatgtggagatgttggtagagagtatcttttagctacatgcaccagatgccttgagggagcagagcatatttactgcatgcgagtgaagttggaaaaagttccagttggtgaatggttttgtgaagaatgccagcttaaggaagatcagaacaatacaagtaactatggtatctcggtggttaatgtgacagaaggaaagaaccaaaggacagaaagtcgaagcaagcctaagacattgcaaattgttgtgcctgattttgatgctctggaagtcacacacagcgcattgacagctgatcggtgtgatggtaacagtaaaaggttgcatttagcttcgactgatacacaaacacggcaactaaaggataccaccccagctgctcaaaggttggatgtgaagaacaaaaaatcattaagtgttacaaaccgtaacaaactgcaagttcttacatctgatttagacacacgaccacacaattatggaacatcaacatctggagtctataccaataaaagtcaaagttcagaatttttgttaaaccacaaaaagctgcgagtttctactgacatgcagtcgccactctcaagcgaaggcctacggagtccaccaatatcatgcaagagacatgcagagagtatgtcgtcccctaagcctaggatcgtcaaggcgggtacccttggaaaacaagatgtcatctctcgtgcgaactcatttaagaaatctaacaagggaggtttaagttcagttgataatattccagtgagaactacccaggctgtcaaaagttctgactctcagacattgtcacggtcatattccttggggaacatggtgaatgctaaagctccagttccttcaccaagaggctttttatccaagcagctatccttcaacagcaccaacaacggaccaaaggtcaaacagttggctgatggggtgtctagcaagttaagacctgcagaacattccccaagagatcctagagataagaaatccatcaaaaagattgtacaatcaggatccttcaaacacgagggttcagattccatagttgctggatcatcaaaaaaaaagcaaacatttcatttgtctcaagatgaaaaaccaggagtactgaaggtaataaaggaaaataatttaacagaaagaagggcttcatttagcttgaaaaaacgaaacattccttcatctccaaggcctgacagctgtatgaagtcaggggaaagaaaaaatgatcaggatatttcaaggtctggaacaagcatacttaaaagtagcaaaaaacctggatatgctgaaaagaagcagaacaatgatttgtccagaagtgataatggcaaggaagatgttaccgtgcatccaaaaacaatggaagtttctggtaaagatgcttacgtagtgaagacatctgatccaccagttcaaccccaatgtgccaaaaaggatagaccaaatgatgttgaggatgacgatttactcatttcagtgaataatgttaacatagcgccaaatgagcatgccgaggtggttcccacaacatttgctgccatgacttatgaatcagatttgcaagatgttccaagagaaagcacctctgatgattcagctccaaaagtggtatgttgccaacaaaagcttttggaaaacacaggagatgattctggtaaaatcgtagaggtggttcaagattcaggagatatattgtctgtgactccacatggtcttcagatggcacacaatctatacccccctgacaataaattgcataaaccagatttgaagaaggaagcttttgctgatcaatcttccgctcttgggaattgtttaaaagattttgttattccagagcagtcttacatctggcagggtgggtttgaggtttcaggacatggaaactcccctgaaatgttcgatgggtttcaagcttacttgtctacttgcgcctcatccaaagtacgtgaagtaggtgaacaattacctgacaaaattcagctagcagaagtcccacggcattcctcatggccactgcaatttaatgaagtaaatccaactgaagataatattgctctttttttctttgctaaagatgttgaaagttatgaaagggcatatggaaaactcttggataacatgcttcttggtgatttgtctcttaaagcaaatattggtggcactgaacttctcattttcccatccgataaattgccagagaggattcaacgttggaatggtttacctttcttttggggcattttttatgcccggaaagcaagtagtccactagagcttcctacaaataattgtccattagaacaaatcaatgaacctgttatccagcatgatattggttcgcctaaggcacatcagcctttgggtatagatttgaatgagtgccctaatgattatatatctgatctgtctctttcacttggatcagagagtgagaagtctggtgcatctttagatcgtaatattgtattagagtccaaacgtgaggatagaagtctgaatgcaagtgaaatacatcatgaagaaactgcaggcacaagacaaattataccggggcatccttctgttgcttcctgtggaactaatcttcccacaatctcaacaggaggtcatgacatgattcaggattatctggctgctgctaaaggtagcacaggaacaccaggtggaaacaaaatggagaaaacagatcagaatgaaactctgttccgtttttcgcagcaactaggtgcaactagatcaatctcacatgagatagaacttaataaacatggtcttttgccctcgcactgtcatttgagtggatcaaagatatgtgatgatcaaaccaaatcaactccaaattcagatatgggtcctttggattttgacatcaccaacaaaaggcagaagacttatgggaaacactcttgcatttttggagatgcaatgacacctatgaaatgcttgtccaagatacatcccttaccggctggacaggataatccatgcgatgttttacagcattgtcatcggggcccttcagatcctgcctctcttaaaaaacctttacctgatcatttcatccacgttctttcatctgacgacgaagattccccagaacctagtactagcttaaataaggcatcatcgaaggcagatgagggctcctccattttatgctcactttccctatccatggtggcaacgaagcgtaatctttctggttcagatattgtagatgatgaaccactgtctctctctcttgggctccctagtgttgtcggtgggagagcagatcaggagatgaagcaattcctgccggagaagccaggcataaacacttaatgcccctttagatttgcgagtgtacagttttgtgcagctgtatggagtttagacagggtagaagtatggtatagctgttaaattatgaatatttttcatttttttctctctcactgttatatgcatctgctgccgttgttagtgataatggtgtgatgatgttactatctgccatatctatgagatatatggtgttagtttcttgagatattatgggtatgacataaaaggatagatcaaaatgtgaatgtttgtgaattcattttgtcatggtttaacttgcattttctatcccgtggcaagtcttgggtgtatcctatcctaatttgc

SEQ ID NO: 40302 - DNA, 261 bp, Zea Mays
gcacgaccttcttataagtctaagtacttcttctatacttcttaccgaggatggtcacttgagctagcatatatttcaaaactataaataatttataacagtttaaagttatttctttgagtcacttttgtaaccactccgataaatataatgtaaattgttgtaacttgtaaaatttggtaataagagttccgctgcaaattgttggtgtgtgatttgtgtttacttaatcctacggtcctggttgtaagtggtttatcc

SEQ ID NO: 40303 - DNA, 4586 bp, Zea Mays
atgaccattagggcaaggggcacggaaaaccgagcaaaatataataaccgagcatctgatattacaggcgcaaacgcaacaggttacaccactagctggcgttctccgaacccctcgcggaaacccttccggctcccgccgctctcccgccgccatcactcgccgctctcccgctgccaaccgttgccttcaggctccagccgccggcacggctctgcgtacggggggattcacttccatccgacaccatctggccttctcttccatctcgtgtttgttcgtgcgcgtggattgttttgtccgtgtctggtgcccgtgcaagagcccctaagctggtgcgtccgccatgtttccccccaaagggcccaaccactacgggcagccgccgccttacggcgggcagcagccgtacagccaaatccctagtagcactggatttgcagccccgacagcagcaggtggcactgatggtggtcggtttggtgggcgtggaggacaaggggctgctgcacagtatggagggccttatgcatcagtgtatggcacccaacaggttggtggacttggtggcaaaggtccagcttcttcaagtcttcctagcttgccaaatcgtccaacttctctcactgagtcatccaagttcacatctgcacctgtggggtctggcctggcaagaccaaatgatgactatatggctgtgcgaggttatgcacagaagcaagaccaatatggcacagattatccactagagagacgtatgtatggtgaacactcggccaatcttggtagaagggatggtctcagtgatttggatagaagatacactgatcagatagctgctggtcatcagagttcatcaatgcgccatcagcagctcttgaaaggtcagctgcagcctggatctgatacgagacaagccgattactttgcaggaaggtctgctccagttcatcaagcatcccaggaaattggtgtatatggaagagttgatgctgataaccacaacatgtccattcttgggactactccatatggaagacagcaagcagcctcattgttggaaggagctccgaggacaaacattgacagcctctatggacaaagatcatcaagtgctggttttggtgcaggtcttcctcctggacgtgattatgcctcagggaaaggcctgctccatccatcttcggatcctgattaccgagatagcatcttaccccatgtacatccaggtgtatcaatgattgatgaccgtagaattgatcggatcggttctcgtcgtgaattggatctaagagatgaagagcgccgaagggacctaatactggaaagagagaaagagcttgagtgggaacgtgaacgtgagttacgggattttcgagaccgtgaaagagaaagagaacgtgaaagggaaagggaccttgaaagactactaagagaacgcgaaagagaaagggagcgcgaacatgaaagagagcgtgaaagagaacgccttcgtgagcgccgggagaaggagagagagcgggaaaggaagcgcggagctgatccaaggcgggagcacactccatctagaggtcctggtgaccggcgacactcttctcttagatctgagaagcctgtgcggcgaatctcccctcgacgtgatgctgggcataggcatcgttcacctgttaaagaaataaagagagaatatatttgcaaggtgtttccatttcgcttcgtggatgatgagagggattatctgtccttgacaaaacggtatcccagacttgcaattactccagaattttctaagattgtcttgaactgggctaaagaaaacttaaatcttcctctggatacaccagtgagtttggagcacgatatccatgattcagatgatggtgctgatgaaggagcaattatctctactgagaaaacatcaagcttcaatactccggccaccatttggaatgcaaaggtactattgatgagtggcatgagcaaaggtgcctttgctaacataacttcattgagaagtactgaggaacgagttgtgcacttgaacaatatcttaaaatttgctgtattcaagaaggatcgttctctttttgcaattggaggcccttggaatgcagatatagatggtggtgacccatcagctgactgttcttgcttgattcgaactgccatcagatgcgttaaggaaacggttcacgttgatctatctagttgcacccactggaaccggtttgtcgaggtacattacaatagaataggcaaagatggactgttcagtcataaagaaattactgttctgtttgtgccaaacttgttggaatgcttgccttcagtggatatatggaagaataactggattctgtacaaaaaatcaaaggcagaaagggagcagctcactgttaaaaagagccctggtgatccaaaagagcagatgcaaggggagctgaacgatggtaaaaatttagatgctgatcaattaaaagaggctgatgttggttgcagtgatatgaaaaatgagaaagacgatgttgatatcaaacagcaaggcaatgatggagagggtacgggtaaagttgaggaacctgttcagaagatgggtggggatgttgaaggaaaaagtacgggtgactcctctattgaccatgcaacaactggggataaaaagcccacaaaaaagaaaataataaaaaaggttgtgaaagttgttcgaaaaaaaataactggaccttcagttgataaatcttctgaggacaagattgttgtagcagaatctgcaaacaaaactgcagaaggggggcaaagtcaacaaaagaatgatgatgctggaaaacaacaggagggagctggtataagtcaacaaccagaagcaaagaaaactgtgaagaagaaaataattcgaaggattgttaaaaggaaagtttctggttcaggttctcagttgaatacccctactacacctgctgaaactagtaggcaagaagcagaagttcagccagaaaaaaatgttgagagttcggccgacgttggaaactctcagactaagctacaagaagggtccaaaattccatctgaagatatctcaaatcagaagaaagaggagaaaccagcggaaaaggaacacccattgactgatctcagtttaaatgcagataagggcaatcacaaggaagcttttgaacaaaaagacatgaaaaacgatggaaagaaggataaaacaaaggatgataaagagaagaatagagacctcaagatggatttaaagcaaaagctacctcttgacacacaagaaaaaaagaggtctgatgaaccaccaaagtatccaggattcattctccaggcgaaaagaaatacagaatccaaactccgcttaacatccctttcattgcatggcctcctagactatactgccaaggatatagaggagtcagtatttgagctttctttgtttgctgagtcattcagtgaaatgcttcaacacagaatgggttgtgttatcctgtcttttcttgagaaattgcacaggcgatatgttgtgaagaggaatcagcgtaagcgccaaagagaggaagatctaaagaaagaagagaaatcttcagagaagcggtctaagactactcatgagactactaaaactgaaagtgttgataatccaggaggcagctttaaaatgacaaaagagggtgaagaaaagatgagcacagatcaatctgcaaatgtccatgctgaactgtcaaaagagggtcagataaaacttggcaccgatcatccaattgctaaccatggagaaccagcaaaagggggtgatgaaaatatggaggaagatcctgaatacgaggaagatcctgaagaagtagaagtatatgaagatgacgaggacatggatgatgctcacgctgaagaacagattgcagaacagaatgagaacacaaacgacagagagattaagccaaaagaagtagcgacaacagatggtggaaataacaaaagtacaagacagcctgaagtagaaaatgttactaatatccatgaaagagctgcttcaatggaagaaaagcagtccgtgccagagataggagatttggtgggaggtggagaaaaggtagttagtaaagagattaagccagcaaaagatgaggtgatcgacaaggacctattgcaggccttcaggtactttgacataaatggagcaggatatctcaaggttgatgatttaaaatgtattcttcacaacatggggaagtttttatcaagcagggacgtgaaggacttggttcaaattgctcttgttgagagcaattctgcaagggacaatcgcataatctatcctaagcttgtgaagattgttgacctgtaatctggcactgcttggcccgcgtcagtccccttgaagttaaccatgctatgatcgttgagaagtcagttatgagaaactattttgtttacttattaatgggttcactgccatttttgtggctacctgtttctacgattatgctacaaggagctgcatttcgtttctgttgaattttttttacggaaattatcaagtcgtgaacgtagcagccgaaaaagataaacgaacattgtat

SEQ ID NO: 40304 - DNA, 4557 bp, Zea Mays
cacttcgcttctcactcgatctgctttgctctgctctcggtctcggctgcttgcctgcttcgagtcgtcgccggcgggagcagagaacccacccgcacggtgcgatgtcgttgaccgcggcccccgtggccttcatcggcctggacgagctcagcgttgagctagctgcctccttcctccgctccggcgcttgcgtccgctccttcacccccgaggcggaacggtcgccttctgcggcgctcgcggagttgaatggcctcctccagtgcgcgagcccagtggaagccgcgcgagatgctgcgctggtcgtcgtgctaagcgatgctggtggggttgacgagttgttcttcggggttgaggggatcgcgaaagggttatgcgcgggttctattgtattgattcattcgacattgctgcctagtcagttggagaagctggagcaggagcttacagatcagaagaaggatgtcttccttctggatggatacattttcactggtttatctgatgaattaaagcaacagattattattgttgcatctgggagacaggacatagcagaaaaagctagcaaatttttccatggtctatacaaaaccatttattttgctgaaggtgaattctgcactagcagaaaaattaggatggtgaatgatttgctggagggcattcattttgttgcgtctattgaagcaatgtatcttggtgttcgagctgggattcatccaacaattatttatgacataatatcgaatgctgctgggagctcgaggatatttgtggagttagttccaaaacttctgagtgaagatcctttgctgattgattttctaaaatcaacaaggaaaaaagcaagccatgtgatggatatgtcaaaatcagtaacatttccactgccacttctgggtgttgcctatcaacaattggtacatggttcatcagcagtaactggagatggatctgcctcaccgctgaaggtttgggaagcatcgtttggagtaaatattgtagatgctgctggcgaacaaatttatgatgcaagcaaattagctgatcagcttgttgcggaatctaaagcagcgaagcggattggcttcattggtcttggagctatgggctttggaatggcatctcatttgctgaaatcagggttctgtgttgttgcttatgatgtctacaagccaacaatggccaggtttgctgatttgggtggatcaacaaaaggttctcctgaggaaatagcaaaagatgtggaaatacttattatcatggttgcaaatgagtctcaagctgatagtgttctttttggaaacgctggtgctgtaccagttttatctgctggaacatctgtcatcctttcttctacagtttctcctggatttgtgatccacctcaacagaagattagaagctgaatgccgacagataaagttggttgatgctccagtatctggtggtgtcaaaagggcggcggatgggacactaactataatgacttcagggacagatgaagccctccattgcactggttctgttctatcagcgctgagtgaaaagttgtatgtaatcaaaggaggatgtggagctgcaagttctgttaagatggtcaaccaacttcttgctggggttcatatagcttcagcagctgaagccatgtcatttgctgctcgactaaatttgagaacgagaagagtcttcgaaattatgcaacatgcaaggggttattcatggatgtttggaaatcgtgtgccacacatgctcgataatgattatacaccctattctgcagtggatatatttgtcaaggatcttggtatagtatcttgtgaaagttccaattcgaggatcccagttcacgtctctagtatagcccaccagctgtttatttcaggatctgcttctgggtggggtagatatgacgatgctgccgttgtgaaggtctatgagacattaactggtgtaaaagttgaagggaaggctccgatgctcagtaaagaagatgttcttcagtctcttccatctgaatggccagaagatccaattgataatcttgtacctattgcatctcatagtagcaaaaagtttcttgtagttttagatgatgatccaactgggactcaaacagttcatgatatagaagttttaactgaatggcctgttgaagcccttgttgaacagttcctcaagctaccaacttgcttttttattttgacaaactctcgttccatgactgctgataaggccatgctgctagtacaaactatctgtaaaaatcttaaagctgcggcagagaaggtccctggtgttagttatacaatagtcttgagaggtgattcaactctacgtggtcatttcccagaggaagctgacgctgctgtctccgtattaggtgagatggatgcttggataatctgtccattttttcttcaaggtgggagatacactattaacgacatccactacgtcgcagactctgatagattaattcctgctggtgaaaccgaatttgccaaggatgcagtttttggctataaatcttccaatctcagacagtgggttgaagagaagaccaaaggacgggttttggagaaccaagtttcaacaatttccataactctcttgcgtaaacaaggaccaactgctgtttgtgagcatctctgtagcttggagaagggctctgtgtgcatcgtcaatgctgctagtgacagggacatggctgtctttgcttctggaatgatccaggctgaattgaaaggaaagcgatttctctgccgcacagctgcaagttttgtgagcgcaaggattgggatcaagccaaagccacctatctgtccaaatgaccttggcttaaaaagagctttaactggaggcctcataattgttggttcatatgtgccaaaaactacaaagcaggttgatgagttgcgatcacagttcgggcaatctcttcgagtcatagaggtgtctgtcgagatggtttcaatgaaatcaatggaggacagagaccaagaaatcagacgaattgttgaactagggaatgcttatatacaatccagaaaagacactctaattctcaccagccgccaactcattactggaaaaactcctgaagaaagcttagaaattaattataaagtgagttcagcactagtggagattgtgagaaggattgatagtaaacctcattatatcattgcaaagggaggaatcacttcatctgatattgctacaaaggcgctggaagctaaacgtgccaaagtcatgggacaagcattagctggtgtacccttgtggcagcttggtcctgagagtagatttcctggggtcccttacattgtttttcctggtaatgttggtgataacagtgctcttgctaaagtggtgaaaagttgggcttccccatctagaagttctacaaaagaaattcttcttaatgcggagaagggcggttatgctgttggtgctttcaatgtgtataaccttgagggaattgaagctgttgttgcagcagcagaggctgaaaagagtcctgctattcttcagattcatccgagtgctctaaagcaaggtggagtcccactggtagcatgttgcattgctgctgcagaacaatccagtggatttgattcagtcatggtggatggttctcatctaactttaggggataacatcttatacacaaagagcatatcttccttggctcatgcaaaaggtttacttgtggaagctgagttgggtaggctctcaggctctgaagatggcatgaccgttgaagaatatgaagcaagatttactgatgttgcccaggctgaggaatttattgatgagacaagcattgatgctctagcagtttgcattggaaatgttcatggaaaatatccacctagtggaccaaaccttaaattcgacttgctaaaggaccttcgtgcattaacattaaagaaaggagttagcttggtcctccatggagcatctggtctatctcatgagctcgtaaagcctgcaaacaagccatgagtggtagatttaaagctctagtacaatgttgaggagtgcatagacttgggcgtgagaaaattcaatgtgaacaccgaggttcggaacagctacctggcgtccctcagaaagccagaaaaggacttgattcaggtgatggcgtctgctaaagaggcaatgaaagctgttgtagcagagaagctgcgcctgtttggatcgtgtgggaaagcctgagcgaagtacttgcgttgcgccggcaacatgcagtacaagaccgactgcatcatcgggttcgtgatgctgctgctactgtgcagttgcttacagttacagctcattgcgttgaacagctgaagtggttattgtactttgcagtgtagcgcaactaaggctaattcataaatcgtaataatgtatgtatgctgccccgctgtaaaaatgctccgtcgttaataaatgccatcgcgcttgctgtgcctttgtttacatttttattcgcctctcgagtgttctaacatgcaatctcagttgtcctatttagccctagtttgaaaactcaaat

SEQ ID NO: 40305 - DNA, 445 bp, Zea Mays
ggctaaaccaaaaattacagggcatagattaaattttctacaactgcatcaggatggcgggttagttccaaaatttcatagggtctcttatgcaaatgaggctggccgaagggtatggactattccccagccgtcctatcagatccagacgtcctagattaaatcgtgttttcaaacgaaccggtatgctttgtggttcatcctatccgatctcaacggcccagaacaatccgagccctagctaccctgtttttaatctcacccgtggatccatcaatcaacgacccaagggatgcctcatgcaatgatttaatctcccccgcccacatcagatcggacgactagagtgctccttcaacctcccatgaaggctggcccgcggcggcgagcgtctgcacggcagttccccaccagagttcacgcaagacgcgcacccgagccctat

SEQ ID NO: 40306 - DNA, 957 bp, Zea Mays
cccccccccagggtctttgggcttcttcaagagccctgtctcgctcgatttgtaaccgactgacatgctctcgcagggaagccggtccaggctgcgctcctgctcaactacgacccctccgggccatctcgcctccttcccgtcgttgcatcaggattaaccaggggcagattctattctgaggaggtagtgaatcagggcacatggaacaccagggttgcagttagctaaattcatcaaagctcatgaatccttatacaacccccacgttattgcaacaaaaaggtgaaaagagcagagcaagagggaacacaactttcagctcttgatatgcaaccactcctggactttgtcaagaggggtaatctgcagactgaattgttctctgttgggctgaaccaacatttggtcacctcaatccatgaaaactggttttgcgcccgctgcattaacagcacaaaaccagaaggtgaaggagtaatagttatgcagattggagcttgcttattagtcactatcttcgcaagcaatggtggctgctgatcagtttgcaatacagtttaaccggaggagtcactaatttccagtatagtttcatgagtgatgttgatcgcaatttgttagtgtttgggatgatagtgctggaatgccgtagatgaccttatgtaacttgtaatgttacgatattctcggccgtagttatgctaatataatagcgaatattgactaatactgatgttcctagtgtgaggttgaagaagctcatgttgaatttgtggaaagtttccaaagcatccaaaagcttaaaagggacattagtttttcatcatttctcaatgtgagctcatgcaaaacattgaaggtttgaaatactttgaatcacgattcacagcaaaatgtatatagaaaaatactgcatatgtatcaagctaaaatctgattgtaatgagatttgag

SEQ ID NO: 40307 - DNA, 4243 bp, Zea Mays
gacaaagatttcttttttcagggaagtgcggccactggtgaggcttgcgtagaggttgatgataacgtgtatggtaggcctgaatgctgctgaggtaactaggagagagcctgaggccgagctgtgcccattgtggattaagaagttcaatagagaactaatgcgaacactctcattttcggagcatgaaacgtttgaccatcccgtggcatgtcttctagttgtgtcatcaatggacaaagaaccagtcaataaatttgttgatctcttcaacacaaatcagttgccatctcttttgaatgaaggcataatggatccacagattttgaagcattatcttgtacttcatgaccagcaagaggggccacaagacatagctgtgaatgtcttagctgaaatgaggagtacccttggtctgaatgactgtaaattattatgcataaattcgtctacagaagcaggtggtagtaatgctgacaattcatggctaccttataaagctcttgttttgaacaatcatgatggatcctgtattcttagtgtggatgatctgaatgagataaaggacttcatgcaagattttgtttcaaaccatatcatcccctacatggaacaaaagatccgtgtcctcaatcagcaggtagccacaacaagaaagggttttagaaatcagatcaagaacttgtggtggagaaaaagagatgatgtcccagaagctccaaatgggccaatgtatacattcacctccatagaatcacagatcagagtacttggtgatttcgccttcatgttacgggactacgagcttgccttgtcaaactacagactactcgctactgattataagcttgataaggcttggaagcgatttgctggtgtacaggagatgagtggactttgctatttcattttggatcagtcgaggaaggacgcggagtattgcatggaaaatgccttcagtacatatttgagaattggatcttctggccagagaaatgctactagatgtggcctttggtgggctgaaatgcttaaaacaagaggacagtatagggaagcatctaatgtgtatttccgtgtttctaatgaggaaccttctttgcattctgctgtactgcttgagcaagccgcttgttgctatctattatgcaatccacccatgcttcggaaatacggatttcacctaatcttagctgggaatagctacttcgtgtctgatcagaaacaacatgctgttcgggtgtacagaaatgctttgttcgtttacaaacaaaacccttggagttacatcaacaatcatgtacactttaatattggaaggtggtatggagttctcgggatacttgacgtagccatcaagcacttgcttgaggtcattgcttgtagccatcagtcgctgactacacaaaacatgttcctcaatgattttttccattatgttcagagcatggggaagaaatttgatgtgtacaagctccaacttcctgtttttaacatgtcatctctcaaagttctacatgaggatcatcgcacttatgcatcacatgcagatgttggcgttagtgaaagcacgtggcaggagctggaggaagaattgatcccatcatcatcaattgtcaaaactaattggctggatactcagccaatgagaaaatacaaggactcctgtatttgtgtggctggagaagcagtaaaattgagtgttgaacttaaaaatcccctccaaattcctgttgctgtttctggcatctctattatatgccagctttccagcactttggatgcattaagttctgatgttagtggactggacttggatggtggggaagataaggttaacacagagccatctatttcaatgttggagactgatggagataagtttacattgtcaaagcttgacattgtattaggaggaggtgaaagtaaaagagtgcaacttgatgttactccaaaggttgaaggtattttgaagttggttgggataaggtggactctttcagagtcagtagtaggttatcaatactttgaatttaatgcacagaaaaaaatcaagaaagggaaaagaggcccacaccgttcttggaataacagcctggttgtaatcaagggtttaccaaaacttacaggatctattgatcgcatgcctacaaaagcgtttgctggtgatttaaagctgcttacactaaatctgagaaaccattccgaatatgctgtgaagggtataaaaatgaaacttagcaacccaagatttttaattcccggcgattcatcggacattggcctcaagttcccacactgcttaaagaggcacgtgcaatcagaaagcagtgttgtatcagccaaaactatgaaggacaatttcaagagtctgctctttgcatttcctcaggatatagaaattcaagcaggggcagcactctcttggcctatttggtttcatgcggcaactcctggaaatgtttctctttatatatctctgtattacgaaatggggagttccagtgatattaaataccgtacactacgcatgcacttcaatcttgaggttttgccgtcacttgacgtatccttttctgtaagcacgtcctcatcaagattgcaagagtatattgttcgcatggatgtcatgaacaagactccatcagagtcatttgtgcttcatcagttatcatgtgtcggtgataaatgggcagtttcagcattggcggcgtgcagttcaatcaactctgttgaaacagtatcagaaaatcaggctgtgtcgtacttcttcaaaattaaggattgtgaggcggattcttgtaaagaggcagaaagtgattcctgcacaagcgatatggctttgtgtccaggaagtagcactgatctgtttgacattgcacgatctccttttgttgattttcaccatcaagaaagatgcaggcaagtgaagatggcaaaggggccatgcagccttcttgattttgttctaatctcaaaggcagttgataactcttccaagcctactccagacttcgaactactttctcatcacacatgtcattgcagtgctctaagccagaaccctatatggtggcttatggaagggcctcggacaattagtcatgatttctcaaagtcttattgtgaggctaacctccaattggtcattcacaattcagaagctcataagattttggtgagagtggtcacttttgatgtaattccagagaaaaccgtccatcctcatgactcaaccagtgctcagggtggatggtatgatgtatcactggaaagtgacgtaaaggccatctctagttccaagagtacacatcaagagaagcgatcttcgaagagcattccaccatatgtttggtgttcattgagttgtgctcaaatcgagctccaacctgacagttgtgctagagttcctctaaaagtgtgcatatttgcaccgggcacatacaatttttccaattatgagctgcaatggaaagtgcatctatctgagggaccacatgtgggtgaaaatgagaaccggttatctggcggtggtctaggctatcctttctatgtcactgtccttcaaggtgtctaagtaattatcaggattcaagaagtaccttcttgagcgtcaatatagaccagtgcaaaactcaggaactacacccaattgcaacgggctgatgataataggtgccagccagtccagtttgtgcaaagatctgccccggaagttccctgactgaatatacttggatacgctcatggttctgcttcggtaccgatatatttacacgtcattttgaaggatgagttctggtgagtacatgtatacaattgtcgctgggaacaaaaactaacggtaattgctggtggatttttggcagacagaatataccgatagaagttttgcttgtctaattgttgatggtggctagtaggagcatatactattcctgtacatcctgtttaacttgtcgctgctagacgatttcgcaaatgtagtatgtagtggtagatggatccgataaattttctgtaattttgacgaggtaatcaggcaatcgtctcgagattgttgttgtatgggcgacagtattttttcattgtttgtacaatccttttaaaaatcatcgtctggccttgagcctttatgccatatgggtatatgttgattccccttttcagttcctcgtatcgacgtccagctgtccacatcaggtgcaagtgtctgaggggtgctgttatttttgatattttc

SEQ ID NO: 40308 - DNA, 3654 bp, Zea Mays
tgacaacgagggcagcctctcgttgcatctctctcgcctctgctgaatggaaccacttgagtacgcattccccaccctaaaaatagaagccaaggttggaagccgaggatcaagacagcaacaatggcaaagaaattactctttttttgctttcccatccctgtcctgtatcatgctcctgccggggctcctagattggtggcgtcccaatcattattcccgggtaaattggttcgctgccgtcaagaatcgcagatccaaccagaaggaccaatcttagtgtgccagaactgtatcacaattccaattttaggccaacatttgggtctaagaaacattaattaactaaggtcgaactcgaggtgagaagtacctgcaggggaggaatctattagttcctgtgcatcctttaggcagctgtggtaatccctattgggggaggtaccaatggccggttaatttggtgatccattgagctgtgcaagcaagcaaataccataggattacaagatgagatggcagaggagcaaattcagttggctcctcagcgcatgcctcatttgtctgctgctgcagctggttggtgcgatcaggactagcttgttctggccacaatcttgcctgccgtctcctgcaatcccaagagaagatgaatcggtggaacaactgtggcacagttgtgctctcgacttgagaattcctcaagatgttagaaacaagttccattacagccttctgttcaacaccatcagcaattcgtatagagaaaatgataataagtcctatcctcagaaggtcggcattgaggaagcaaccacggcaaccttttcacctgcagaagttgccaacacttttctggattgcttaaacaagcataatttccctttctctgatcatggactgcagaagcatcaggaggaaaccataagcttacttcccaactctaacagcatcaaccttccttttgcgatgaaaagaagacgtctacttgaagaagattcagccattgctccaccccgacctaaagcaaaacaggcaataagaagcgttttgtcttccgaaggagaggctcacttgctagtcactaccgtgaaaaagtccggtaaaccagagcccaaaaacaagagcaaggacaacagtggcactattattgctggtttgtcagtggcttgtgttgcattggtggctcttatatgtctgtgttgctgtgcttgtcgtggaagcgaagacccagaatcatcatatgatgacaaaccactgctgagtttgaatatgagtgatttatcaggttcttcacgtaaatcatgctctaccccaattgatgtcaacaggttgggggcattgtcaaccagttcatcagcgagccagcgtaaagaatttaaatttcctcctataaaggcagaagttagagaaatgtcaatgaagtcagagtttgagcgacgcagcaatgtgcaggcgatgaaactaagttctcatgaaataactaccattgctggacgtccggcgacctctactaattctcaggatgtgaaatctgctgttgctgcagttccttctagtaatgccagcgacagcatatgtaaacctgcagctggtccagcaccagcaccaccaccaccaccacgtccaggttatcctctcccaaaggctcctcctgcaccatctgcaccaacaccaccggtaccacctccaaagatgcctacagctgctggttcgagcaatccacccccaccaggacccccaccgcctcctgctcccaggcctgcagttggacccggacctccaccatcaccaagtagtgccggacccggacctccacccccaccaggtagaggtggagctggacctccaccaccagccatgcctggtggtccaaaagcgcgtggtccaccaccattgaagaaggcagggaatgttgcaggtcctcctgtggcagacaataaaacaaagctgaagccattcttctgggataaagttactgcaaatccggatcaagcaatggtgtgggatcaaattaaagcaggatccttccagtttaatgaggagatgatcgagagcctttttggttgtcatgctgctgacaagaaaaatgctgacggcaaaaaggatttagcagcaaaggatacccctcaatttgttaggatactcgatgctaaaaaggcacagaacttagcgatatcactgaaggcattgagtgtttcagctgacgaagtacgtaatgcagttatggaagggcatgaactccctattgatctgatacaaaccttgataaggtggactccaagcagcgacgaggagctaaggcttcggttatacaccggggagctcactcaactgggtcctgcagagcaattcttgaggaccatcattgacataccttacctctatcagcgcctggatgtgttgcttttcatgtccactttgccggaagaagctgcaaatgcagaacaatcatttaaaaccctggaggtggcctgccatgagcttcggaacagccgtctattcaagaagctgctagaggctgtactcaagactggcaaccggatgaacgatggcacctttcgaggtggggcccaggcgttcaagctggacaccctcctgaagctctcagacgtgaagggggtcgacggcaagacgacgctgcttcactttgttgtccaggagatcattcggtcagagggcgtgcgtgccgttcgggccgccaaagagcagaacaacagcagcatatccagcgtgacttctgacgatctcaccgaggatgtcagcgatgacacggagcactacaagcagctaggcctgggcgttgtttcgagcctgggagacgacctccagaacgtgcggaaggcagcaatcctggacgccgatacgctgaccatctcggtggcgagcctggggcacaagttggtgaaggcgaatgagttcttgaacacgggcatgaagagcttagacgaggacagtgggttccatcgcaagcttggcgagttcatcgagcagtcccaggtgcgtgtgacccagcttctggaggaggaaaagaagctacgggcgctggtacgcactactgtagactacttccatgggagcacagggaaggatgagggcctacggctgttcgtcgttgtccgcgacttcctgggaatcctggacaaggtgtgcagagaggtgaaagaggcggctgccaaggctgctgctaataacaagaaaccttcagcggcaggatcaggatcaaagggaaggcaaccgtcgcagtcttcttcgtcgttccgtgatcctcgacagcagctggtgcccgcaattaaagatcggaggagtgcagcggcacgcagctctagttcatcttctgattctgactgactgacagcaaagaatttgtgcagatcacaccagattgatgaggtgatatgggagcacagcaggtagaagagttagcggctatctagttatggattgactcgcttacagcagaatgaaaaagagttagggacactacgccctggtaggttaatttagtatgcacatgatctcaggctctcagctttcgcctccgtaaatattattttatacaaatgtacatcctagatatgtatacaaagatcgttcatggcttaatgaataatattattttatacaaataccttataatatatattgtttgtg

SEQ ID NO: 40309 - DNA, 368 bp, Zea Mays
cctctaaccctctcactcttccctcccgcgtgtatttccgctaacatactctactctgtagcaggcaccaccaccgcgcgctcatggaccctgacccacgaccgccggcagcggcagcggcagcgcaggtgcggctcctcctcatggccatcgcggccgtcgcctgcatcaacgccgccgagccccacctcgccttggcagccttcgtcctttggctcgtcgccatctttcccccgctccaccgccacgactgaggcagccgcaggtatgtgtgcgcgagcgctggacgtggggcccacatcgcacggcgcgtggggtgggaaaaccagtcgggacgcgtgggccgggtccagtatgtcaacgcggag

SEQ ID NO: 40310 - DNA, 408 bp, Zea Mays
ccgatcccctggcgctagcacacggacgaagcaacacacggcggcggtggcgggggacgacgacgtcagcacggcgatcttctcagcgagcgacggctttctctccagtaaccttctggctggctttgcatctgtagatcacttctgctattactatctcaggttttgaacttagaagccctagcaactcggtggcaactggtaacaacagcctagaattgtggttgttggagatgtttgtatttttaattcttgatcacgatgaggacatgtaaaaagttgacaaattagcattgttggtggtaactggtagcagcaactctgttttattttcatgtagtgtatttcctaaaaaagttatttaaatattgtgtaaactacaaattagcataacgcagttgattgtgg

SEQ ID NO: 40311 - DNA, 3501 bp, Zea Mays
atggcggcgatgcagcagttgctactcctgttcttgctcttggtatacctccggccaagtttcggtcagacgaacccccaagatgttgctgcacttcaggctttgatgaataattggcaaaacgaaccaccaagctggacaggttcaactgatccctgcacctcctgggttggaatttcctgttccaatggtcgggtgacagaaatgagattaacaggcatgaatctgcaaggtacattaagcaataccataggccaactatctgctttgaaatatctggatctgtctaataaccaaaatctcgggggtccacttactccaaatattggaaatctgaagcagctcaccgttctgattttgcttggatgcacgttcacagggaatatcccgaaagaaataggcaacttgtcacagctcacattcctggcactaaactcaaataaattcactggtggaattcctccaacacttggccttctttcaaatcttttctggttggacatgtcagcaaatcagttgtcaggacaaataccagtttctccagggttggatcaacttgtcaacacgaggcatttccacttcagtgagaaccagttgacaggcccgatgagcgaaagccttttcagtgataagatgaaccttatacatgtgatatttaataataacaactttactgggccaatcccagcatctcttggacaagtcaaatcacttcaaataatccgactagatcataacattgtcacaattgttgccagccgactagatcataaccaattcagtggtccagttcccaacagtattaccaccctaagtaacctcatggaagtgagcatagcaaacaacctactgaacgggaccgtgccggatctcactaatctaactcagctagattatgtagacctaagcaataataactttgcaagctcgccagcaccaggatggttttcaacattgagatccttaaataccatatttatggatcatggtgaacttaatgggacaatccctagtgctatgttcagtctccccaacctgcagcaagtatcattagctaggaactcattcagtgggaaacttaatatgacaggtaacatcagctcacagttgcaggttgttaacttgacatctaatcaaatcatcgaagcgaatgtaacaggctacagcaacacccttatattaacagagaatcctgtatgtttagacaacactagtttatgcaaactcaagcaaaagcagcaagcgtcatatgccactaaccttggcccatgtgctgccattccatgcccctttgatcagtcagcaagtccagtcacttcacagaactgtgcatgcaccagtcccattcagggtctgatgatcttccaagcacccgccttctctgatgtcataagccccacaatgttccaaattgtggagtcaacacttatgcagaatcttagcctggcaccaagatcagttgccatttccaatgttcaattcagccaaggaaaccctctaacattcatagtgagtatttttccggccagtggaacgagcttcaatcgctcagaagtcataagaatcatttctcctctggtcaaccaaacttataaagccccacccaattttggaccatacagcttcatagcgaacacatactttacagttcccagcaataagaagccctcgatgggcaaggctgcaataattggaatatcaattgggggtgttgtccttattcttggccttgttgcagtagcaacatatgctctacgacagaaaaggatagccaaggaggcagtagagcgaactacaaatcctttcgcatcatggggagctggtgggacagacaacggagatgcaccacaattgaagggtgcaagatactttccattcgaggaactgaaaaaatgcaccaataatttctcagaaactcaggagatagggtctggaggatatgggaaggtgtacaaaggaagacttgcaaacgggcaaatagctgcaataaaacgtgcacagcaagggtccatgcaaggtgcagctgaattcaagaatgagatagaactgctgtccagggttcatcacaagaacctagtgagcctagtgggtttctgctacgaacaaggggaacagatgttggtttatgaatatattccttatgggacactaagggagaacttgatgggtaaaagaggagtgaacttagattggaagaaccgcctcaggattgccattggctcagcaaaaggtctagcatacctccatgaacttgctgatccaccaatcatacacagagatatcaaatcaaccaatatccttttggatgaaagtctcaatgctaaggttgccgattttggtctttcaaaacttgtgtctgacacacaaaagggtcatgtttctacccaagtgaagggaacattgggctatttggatcctgagtattacatgacgcaacagctctctgagaagagtgatgtctacagctttggagttgtcctgctagaactagtaactgctagccagcccatagagaaaggcaggtatattgtccgtgagatcaggacagcaatagatcaatatgatcaagaatactatggcttgaagggcctaatcgatccaaaaatcagggattcagctaaattaattggcttcaggagatttatacagttggctatggaatgtgtggaagagtctgctgttgaccgcccaacaatgaatgatgtggtaaaggaacttgagatcatcatacagaatgaaggggcacaattgttaaactcagcgtctttatcagttgaacaatttggaaatgaaaagagacgagatccttatgcagaacatttgcctatgaatgatgaaagcagcagcagcacttttgactacaacagtgggtattcatactcagctgttcaaccaaagtagataacagtttccactctttgtttttgttgaaggatgtattatacgacattaatcttttccctgttgataaatcaatgaatgagtatttcagaaacacactggcacatgacttgcttcagatgaaacagcagtgaatgtctgatccatctataaaaccattcatgcctctgtactcctttacactgacaacataaggataaaaaatgtccgattagccagtcgaatcaagaactagtccaagacaatattgttgagaggtcatggccatgaagttcttgtcggtggatgccaatatgtgagtacaaaggactgatgagggacaatattataattgatgtttgccctttgttgacaaacagatgatttagtagaggcattgcccatgtgtgttgaaatatctttgtttgattatattaattaacagtgacgaaaataactcagtcattactactgcaatgcatgtctgttgcacttctgtagaagtagcagggacaagttctataaaaaatgttcgctgcacttaattgagtcccatcagcagccagttgggagaatgagataattaaaatatatgaatactcaaaagctaatgtaacaaaa

SEQ ID NO: 40312 - DNA, 1327 bp, Zea Mays
aggaaagacaggccgccactcaccttctctttgctggtggagttcttcctgctagcgctgtgtgggataactgcgaaccagggcttctacctcctgggcctgtatcacctgtcaccaacctacgcctctgcgatacagaacaccgtccccgcgatcaccttcgccatggccgctgtcctcaggctagagcaggtggacctgagcaggaggcatgggctggccaaggtggtgggcacggtggtgagcatcggaggggccaccgtcataaccctgtacaagggcctgccgctgctccatcacagtgatgtgcacgtcaagtcgtctccggtgacgctgtcctcctccagcggcagccccatcctcaactggactctcggctgcgtcttcatcctcggccactgcctctcctggtccggatggatggtccttcaggtagtagtagtactatatatactagcagcatgaagttcttcagtgcatatgagcgcaacactggacgtacgcaatggtgccggtgctgaagaggtacccagccaggctctcggttctgtcactgacctgcatcttcgggctcctccagttcctggccattgccgccttcaccgaggaggacctgagcaggtggaaggtccgctcaggaggggagctcttcaccatcctatacgctggccttgtggcatccggggtagcgtttgctctgcagatctggtgcatcgacaggggaggcccgctcttcaccgccgtcttccagccagtgcagaccgtggccgtcgccgtcatggcttccgccatcctcggggaccagctctacacgggagggatcattggagctgtgctgatcgtcatcggcctctacttcgtgctgtggggcaagagcgccgagaagaagggcgccaggaacctgctgcaggatcagctggcgcagggagcagacgtgacgcggcacctgctcggcggagaagcttcggcgaaagatgaagaagcagccccggccatgctggcgtgatgatcgtttagtcgtctgtcaattggagcacagcgtagtcctgttgcatttgggaccgtatgagtcgtgtgatttcagctgttccaatctggcaaccaagaacaagtgtgcatgggttgccggtgtggaacagtgtgtagccatgctgctgtgagtctgtactctgttgctgtaatgttctgtgcaagcgtaggtaaggtgtataactataaaatcacttcatccataattcgtaccaatctaggtgtggtcacaaactaattggagcttcagatgcacagaattaatactacacaccacctaaaagtgaacgcgaaaaac

SEQ ID NO: 40313 - DNA, 2268 bp, Zea Mays
gttctaccactgtctcctctccgtgacgcacgcccgagatcctctccgcgacacacgcctccctctcctctgccccaccctcctccccacgccatcggcgccgccatcatcggatccggcccaagatgcctccgccccacgcgcccgagtcgtcgaggcacactccttcccgcctccgtcgtccacgcatatctccgcctcacctcggcgcccgagtcgtcgcacgcgttcgcggtggtgtccatcccggcaccggcctcacgcaccgtctacagctcccaactctgctcctctcagttctccctccgcatttcgccttctctcccttcctctccaagcagcgtcctcctcgcctagatccgtacaagcggcaaataacctctccggcggcgagacagatggagtcgacctccggcgaggatgctccgaagcacaacccgattccgtccgcgctcgtctccaacctacagtccgtgctcaccgcccgccgcttgtccgcagccgaggtcagcaccgccgccacagctagcgaggttgaggccttggcttaggaagcagaggcgttcgctgcccccacgggagatgggacgctggcgaggcccatcgtgctactgacctatgccggggggatccggtcggcgggtctcgcggcgctcgtcgacgccctcgttgccgccgaccgctgcgacgtccacgtgtgtgcccccgaatcgtacgtgctgcgacttagaaaaccaaaccacagcgggaccagtgctcggatagggtccgacgacgatgcaagcaaggagtggcgcgcggccgacggggcgcagatcggctcctgcacgtgcagcgcagccgcgtgacagtgaagcagggaggccgcgataggtggcgcagggagggtgcgacggaggcaaagtgcaagcacctggggacttcagaaagaaagagtacaagtctactactgcagaaagcaaggagaatgccaatagaagcagatttcatgtatggatcgggtaatgacctttttgtgttctcctcaactcattatttagctacatatcttattaaatcttaatctttggtcattagctaccagcttgcactattattgtgaaaatccattaactttagtcattgaaatggttagactatcaccacgtaggtgatattagtggcattaagtgattaatctgtggcaaatcctattatcaactattttcttggctaatcattacaatatataatgaagaatactatggcttgaagggatatttatacaattggctatgtatacggtctgcccaggcgcccaacaatgaatgatgtggtgaaggaacttgagatcatcagatagaatgaaggggcacaattgttaaactcagcgtctttatcagttgaacaatttggaaacaaaaagagaagagatccttatgcatttgtctatggatgatggaagcaacaacaacacttttgactacaacagtgggagttcaattaagttgttcacccaaataaaatcttgagcaaaatgggagaaggtttgggttttctgcaatctgtcgtctcctcttctgctgggtatctccattattattctaatgaagagggctacgagttggattttcgtaggtacatttgagcgtgttttggaatgctgggatcgtgaaacacgtgaatatgttgccataaaagttgtacacagtatccacaagtactgtgatgctgcaatgattgagatagatgtgctcaatcgccttgtagaaaatgaaaaatatagatttctgctacacttggggaatcaaagaaaagtgaaagtgccatgtcaaagttgatgaccagaagcttgctattggaaccctctctattgaaaaatacccctagatagaaattgatttggttttcaataaagagtgtgagctgtcacacacatcgaaaactacacgtgtatttttctttggttacaaggttgagcaaccaatcgaggaagatgaataatggatcttgattctgaagatgaagagaaggagctaaacattccagtaatcaaggaaaatggcaaaggtgatgggaaggaggaccagagaagtgaagagaaggcagttgctgcagcttcaaaatcaagtcttgggcttgaaaaaaagcaaggatgagtatgagtctgatgattctaatgagggagaaggtgaaaccggagaatgagcagatgcggctgttcatggacaacagcatcaagaaacctgcaacatgcaacctgattttaagaaatttgccacctgcaac

SEQ ID NO: 40314 - DNA, 1059 bp, Zea Mays
gaataaacaacactttggaggacacacgtgtggacacaaggagtacaaagaaaaaaaatgaagagtatgaacttttatttagtggcccatctaaaagcccattaattcagcacaagttccactagcccagacgtttctttaacctagccttttcactgctccagcgaaggcacagccgccaccgtttcttgatctcccatcttcatcttcttcgtagcgccggcgctccatcttccgctccctcccttagtcgcgctcggcacgcgggtgacggcggcagtggcggcactcaggatcgggctctcagcgacggcatcagcgatatagggtgtgagactaccaaaactcgaaaatgaacaagggaaagatttttaagctagccaagggattcagaggaagggcgaaaaattgcataaggatagcaagagagagggtggagaaggcgctgcaatattcatatagggatcgacgcaacaagaagagagacatgcggtctctttggattgagcgcatcaatgctggtacacgcctccatggggtgaactacggcaatttcatgcatgggttaatgaaggagaacatccaactcaacaggaaggtgctctcggagctgtcaatgcacgagccatacagcttcaaggctcttgtcgatgtgtctcggaatgcatttcctggcaacaggcctgttcctgccaaggaggggctagcgagcattctgtaaacgttttcttcccaataattaaacttgatggtttacatctacatctgaaagtgacctgtctgcttgtaacgtgacgaggaggtccgaaattgtcacgggcattgcacgtgttattcctctatttttttcccacctatctaattgcatgctttgtacctcatgcttataagttttctgaagaacgtgttccattcggtcttcaaagcttttagcagaatcaactgtagattacgtttcgtgcttctgacgggcttggcttgtggcaagaggacagggcaaggctatatcagatcgtgcatgagcatgactgcaacacactgttttgctttgcattctag

SEQ ID NO: 40315 - DNA, 1631 bp, Zea Mays
tgagaagcaactattaaaacatacagacttcaaagctgataccactttacacactacagctactttcactctgaaccacctaccaacagttactggttacatgttaggttatggtctaatcatcgggtcgtcttccagttcgcccgtggacacagacactgcatgccattccacaaaactagaacagacatgtcccatccaacctaaggtgccgtttgattcacgaaatgtaacgtaaatggtaacgattcacacttgaataccggtggtaacaaatttgaataaggaggtatccatttgtagtgtgatatcgattacggttggacttaaataaacatatgatctaacgttattggttacccattacgttgccaatatgtgaaccaaacggcacctaagagactgacaatacgggagggacgtgtttgtcgcgagttgcttggccaaactctcaggcaaagggagatgagtgggtgtgttgttcggtggagaaaaaacaaatgaaactcgaggacgagtctgagcctgagttggtcattaatttcattagatgactttgtatctttagttgacttgacttggcaacgggacttggtatatagaagtcagatctagaactccttgaggctctccacccaaacaaccacagcttgctggcaagcctctgaatccatgcatccttcatcaccttccattctgcacttacagcagcagcagcagccgccgccacagcttgctgcgcttgttgtgcgacctcagctcgctccatggaccccttctgcttcagcttgcagataagcggatgtatgtcagttgcgtcatcatttatcactgtccaatgtccatagacatcacaacaagcactcgaagatttgggactgttccaacaagcaccgagctgttcaaaacgacaagcacttgagaagagttctccctgcatttatgaatacttgtgaaactctgaccatgaatgtaaccttagatattaaatatacatgatggaatgttcaaacttttgtcttctccaaaaatttgagtagacgtttcatttgtggaacctattggtaaaaattcgagttttgaaggccaagctttcgagagcagggttcccaatttcgggcagaaatctccgaaattttcttgagttttggtgggtccgaaatatatatatttccgaaattggcattttaatatgaattataccgctttttaaaaccctatttgcttttgaactagaattcccgacatttcggaaattccctggttttcgctgggggcgaattttttcttttctgaaattgtacactcaaaattttgatttcacaattcacccaagagttttgttccaaacatttttgaaaatgcccagttatcgccggtccaaactcagtatcagccctcaggcttaggaaattcagttggccgggctcttttgtcaaacacttctaccataacgtctgcgaccaagtcaactccttcacaaacagagctgaaaaataaagttatactagtagaatatatatgcgttgcgacggtatataaattatttgataaaatattaacgcacaacggttatatggaaacgaaagcgcaccactggttggaaaaatagggttacctgtctagttcct

SEQ ID NO: 40316 - DNA, 259 bp, Zea Mays
gtgccctaaccatgtcgtgcctagtcgtgcccgggccgggccgtgccgtgccgcccatttggccatctctaactgttacattacatatgacccataagaaaccatcccagcacaacacgatagaaagtcgcacccagcaccacgtactacgttagctgaaggacaacgacgttaaaagtggatgactctctgttcttcagctaacgtggtgctaggtaagataaaaggttgtacgtgcccttatatggttataccttcc

SEQ ID NO: 40317 - DNA, 2191 bp, Zea Mays
ttttcttttcccgtttttataaataaatcagcccgaaaaaaggacgcggtcgtggaccgaacaaacctttccccaaaatttccccttccccgcacaccgaacgaactctcgatctgatccctatccttgcagggcccgcctcggctcaccgatccggccccggatccgctcgtcgctcgacgggatctctcgattgtagtttagacaagcatgctgcatcaggagaacagtgagccgttcgtgaggcaccactctgagcagcttgcgtgtggcaacatgaggggagcagataatggtcgtccgaatttccttcctgagaagtgccagattgcagtttgccagaggggtgaaaaagttagcctatttgatgaagggctgatacatggtgttgatctaaccaatcatattgctcagtcacaattggtgccaagtggtgtcaaggaaacaccaatagtggatcaaaacaagagacctgcatccagtgacatgcttgacatagttgaatgcaaacgtctgaagcaggaaggtcaaatcgtaactaaggaagacaaccatacatctgcagaggattttcatgagtaccccacatacacgacttgcagaagaagctttgactcaccactatctgagagcgaggatagtgaagatgaaggtgtagattcacctctccatttttcacatgctcacacctatgttgaagatgatctatggcctgccagctttcatcatgctctgggcccttttcccttgaggaaacctgttcctatcgggccaaatcatcaggctgaattacctgagtgcaggccattttgtggaagaactgaagaaggcgaaagtgtcaagtggatcagaaacggtgttgtgccaatgcctgatactggtgcatcgtctttggtgttggaacctgttcactgcaaggcagactgtgagtgtcatgatgaaggttcaatcatttgtgtgaaaaagcatgtgagggaagcaagagaaaagctgaagggttctgttggtgcagacaccttcagggagttgggtttgaatgatatgggtgaagaggttggctcaaggtggacagaagaggaggaacatttgttccagcaggttgtcttgtcaaaccctgcttctctgtgcagaaacttttgggatgaactccctcttgccttcccttccaagtccagcaaagaactagtgagctactacttcaatgtattcatgttgaggaagagggctgagcagaacagatttgacccagtgaacatcgacagtgatgatgacgaatggcaggcaggtgacgatggtgagtatccaatcacaggaagaactgatgaatacttgccaactgagtctcttactgatcaagatgatgttgcatgcaatccagttcctttagaaagggatctctatgaagattctgatgatgaggatgagctggacaatgccagtggagacaggcataatggtgcccagagggctggtatgttgtcagagggtaatcgtgtaatgtcggtcatagaacataatcaacagacgttcaagttagatgcagaggcgcaagacgactcttgcacatcatttgaggctcatcaggttggtgttgaaggtgggacacatactgatattgctgatgacaatcattacaggagtgacggctttggtggtggtgcagaacatgggttcttcggtaatcagtgtgacacaaaagagtgggacttcggtctcagtatcggttgggaaaagcatgattttttgtcaacaaacaatgtcatagaagaggtgttcgggaagtgctgtgacactgctgaccaggaccttatctgagccagacgcggaggcttcttgtcagctgcgaaaactttagggttctctgaattgtacagcagtagttggctattttgatttaatgcctcacttgttcttacaggaatctcatctctgtccttggaacatcatctgcttgtgatttcgtcacatgattaatgtaaatccgtagtctgttgatagcctgtggaatgtatgtatcatctttgttgtgacggtgtctcttgacctgagcgttttttctatgtgctagcgagggtcatgtaataaaagctgttgttgttccttgaccctgtctgcaaataaatgtaacctgccagtcaatgtattccgaaaggtcatttttatctgatctgaaatctgtagtcgtttccgc

SEQ ID NO: 40318 - DNA, 1854 bp, Zea Mays
cggactctatctctatctccaaaagtccgttctaatctaatctcttcgtgcgtcgtcctaatcagcgcgagccgcagcccccgctgacgcgaatcgcgacctccgcgcgaccctccgccaccgcaccctccgctgacccggtctccctgccgcctggagcgatgaaaccgcaccctcgcgcccaagcccagactcaaaactcagccaaacccctcgcatcttcctgtggtggcgtcctcctccaacgttggtccgtgtttgtctctatggcgctctcgaatgcctaagccaaggccgaccgcctcgagctggtgctcgacgaaacgccccgcaggaccgagttctcgtagaccatgctcgtcgattcgctggcgagggccggccgacagcacgacgcattctgcctctctgcggagatgcgggcctccagcgtggcctgcgactcccacgtctgcgtatgtcactatgggaagagctacatcttcatcgtaaattatgtgcaaaggttagtctgttaatcatcttgcagatatctgcaaggattctatatgattccaaagtagatgtaataggtattcaggtaaatacaaatgaagttatattgcattgtttttgtcaattgtgtgtatagatttatattggtaagacatttatgtacgttgcaaatacatgctttctgttccctatatcataatataaacaattatgtaccttcctctctgcaagtctgtacagcagtacagacaagctgaagactcagaggtgtagagacgacatggtgtttgctgagggttgcaagacccactgttgcataggctgatctatgcgtcacaccatgaggagtagactgatccagcacgcacaaggtctggtacctctagattagcaaagccacagaacattgaacggcacggcaggtcctgcggtgacttctccatcaaattcggatcaaatagagtgatgaacttggatgcttcaaatcgtggcttatccatcagcttcgaatcggatagagtactactgaacatggacaatataaatcacagtttctccatcatcttcatatcaaacaggatactactgaacttggatactataaatcgaaaaccatctagggtatacatccttaatactcagatcagaccttgagcgattgtaatctaacctatttgattgtgaggggcaggcaacaggttcgattgtgctgctcggtttcgcagaacgcgaagaaaaggtacaagaagggcctggcctggtatgtgcgctgagttggtaatttatggggcgtcgaggagcgcatcccgtttatttgtattctattaagatattctaaaccgaacggcacggtcagacctgttccaacccgaggggccagcactgctccaactcgggatcacacgtctgtattctatatcttttgtagaaaaacttattaaacttttggtcttcacttttcttcttgtcaggctgaactgatttatctcatagtcggaggtgatttttttcttatgattatgatcctaaaggggattcagttggaccgtgctgttttgctataactgtaaagttagggtgccaaatagttgatgcacctgcttcatcatctagaaaaaagaaataaaggagatttctgatgagtttcattttttctttttatggaaccttcgttggtggctcgagcaacatataaaggtgatcatcacttccgacgattaaagtaccagtgtgcagaggaggcatgtaggtgatgcttttcaaaataacaagtcgatggtgcctggcgcgatttcaccaattcaggacccgctttcatcatttgtgtatggagtcctgaatgatggatgattactaccc

SEQ ID NO: 40319 - DNA, 1825 bp, Zea Mays
gttttctcagtctcctccttctccacgcacgtcatctcctaactccccagccgctccttctagccctcatctcgtcggccctggctgctggtcgccgtcggccgcgagctctccaacataggccagcttcctcttcctcccctgtccaagctctccactcgacgcctaggtatccatggcgtctcctccccttcgtttcctctgccatggacgcgagttccaagctcctgctcgtctaggcccccttcccaggcgcccctacagagcccctggccgagcttccccatggtgtctcccccaactatggcgccctctgctcctccaagccggtgacccctcctctctggttctgcgcagggaactccctccatggctggcgtccctgtgctcgcgcccttgatccccatgcccgagctcctctccatcgtctttagctcgccatggtacaacgccactgtcaaatccggtctccagctcaccagcaacttccccttccttgcccttgcacacctctggtgtagcccctccctggtactcgacgaaattgtcatgtggagctctttattgtgtgcagccccatctgcaacaccgtcgaccccggtgagggagttaactggtaaagaagcgaggtccgtgagacgtttgccaagtgttcgatggaaggttcgaactgggaacctcgccgttctcgcggatcttcgggtcggtttgtgaattgcgcaagcatatggtgtgtcggctttcagattcattgctgtccatatgtgtgatatagttggtgaatgaacatgtcaaaggagagtaaattctttaggcatatgagaaaggattgatgattgcggtcataccattcacttcaaagatccttgaaccttgccagtcaagtatcgcatatcgacctccaaatccctggaccatgggaattctaagtctacttgctgaaatttataatcttccaaacctcaagatgaatctgaaatttgatattgaggtgctatttaagaaccttactgttgacataaaggatgtgaaaccaacttccctgctcaaagatcgtctgcgcgaagtcgagggaaatccagatttttcaaataaagatgttactgcatctcaaacccctgtggttgcagaagtcccttcagggaccatcccttcactaactcatatggaacaacaacctgagatcaatatcacatcccgagctatgagccttccaaatatacttaatcagtatgctgctcctgttcgtctacctacaaacagcacggtagaagatgacaaagttgctctgatgatgcctgagcaagtgccctcgttgacccaggtttcgccagcacaaacacaatcaacatcaccatctccattttctgttaaccagcttatggcggctattccacgtgaagagatacgtttcaaaataaatccaaagctcggctcccttggtccacaagtgcaatatagcaaaattatggatttggttttggataaggctaacagggagataatactccctgttattcaaagaagtgtgaccatagcaagccgaactacaaaagaacttattctgaaggattatgcactggagtctgataacaatacgataactcgatccgcacatttgatggttggaacattagccggaagtctggcacatgttacttgcaaggaacctcttcgcgttgcactatattctaatctacggaatctcattcagaaccttatgagcggcagtgaaactatcgagcaacttattcacacgctaatcaatgataacttggatcttggctgtgccatcattgagatttaaaagcttaaggtttacaat

SEQ ID NO: 40320 - DNA, 2632 bp, Zea Mays
ccccctcctccatccaccgcccgttccagcgcgcccgcggccggcggctcacagccgtccacagcatcgagagtctcccagccacagaagatcctggcatcgcctataaattgcccatcacctcatgttcccttccccgcaccgctctgaaaaccattcccaggcccgcccgacttcctgcccttgtacaacgcacggtccccgtcccaatggcccagactctgtccgccgcctccgagctggccaccctgaagcgcccgttcggcaacgacgggttcggcgatggcagcaacaacggcagcgccaccggcgagaagcccaaggcgcggcggcgggaggcggacccggcggcggcgctggccgcggcgcggcacgagttcggcgagcacggcggcgtgaacatgtccatcgaggcgtcggcgacgttcacggtgatggagccggacacgatgcggcggctgttcgcgggcgagctgggccccgaccgcggcgacatgtacatctacagccggcacttcaacccgacggtgctggcgctggggcggcagatggcggcgctggagggcacggaggcgggctactgcacggcgtccgggatgtccgccatctcgtccgtgctgatgcagctggtgggcgccggcgggcacgtggtggcgtcgcggtgcctgtacggcgggacacacgcgctgctggcccggttcctgccgcgcgcctccggggtgcgcgccaccttcgtggacgccgacgacgaggccgccgtgcgcgccgcggtggtccccggcgagacgcgggtggtgtacgtggagaccatgtccaacccgacgctcgccgtcgccgacatccccatgctggcgcgggtggcgcacgaggccggcgccaagctcgtggtggacaacaccttcacccccgtggtggtgtcgcccgcgcgcctcggcgccgacgtcgtcgtccacagcgtctccaagttcatcagcggcggcgccgacatcatcgccgactggatgcgaaggcgacgacgatgacaacgatcaaggccccaagcgacaaggtacagagtcacgcgggcgcggttggtctcgcctagtcacgtagctagaatccccttggccgcgggaacgtgacgtggtgtgacccaccccatcgtctgtgcctggcacgctccatgtgtggcaggtcaggtctggccaaggccaggacgggcgcggcggggcctccagcatggccggcgacccatcctctgccgatccccgtgtttggccgctcaccgtctaatcattttgtctgccgcgcctttttttttttccttgcaacttttctttcgtcgcattgcactgcacccccgctccttcaataatgcgttgctgctggggtgtgcaacgtaggagtagtgcactgcaccgcgtggcttttgtcctggctcctgaccctgccacgtacgacgaaccgcatggcgtcaggacgtgaccgcgcccgcctgttgtcgtctggccaggcctccatcacgccttggcgcgtgcacgagatcgtagccaagccaagcccgcccccgtcagcgcaagcgcaaacgaacaaacctgccacgcatcgcactagtacagtagtgcctgcatagaagcgcgatctgcgggccggcgagcctggtgaacgcgatgatggacctgcaggagggggcgctgatgctgctgggccccacgatgaacgccaaggtggcgttcgagctgtcggagcggctgccgcacctgccgctgcggatgcaggagcactcgcgccgcgcgctggcgttcgccgagcggatgcaggggctgggcctgcgcgtgctgtacccgggcctcccgggccacccgcaccacgcgcgcctggccgccatgggcaacccgggctacggctgcggcggcatgctgtgcctcgacatgggcaccgaggagcgcgccaaccgcctcatgcaccacctccagaacaccacccagttcggcctcatggccgtcagcctcggctactacgagacgctcatgtcctgctccggcagcagcaccagcagcgagatgccgcccgaggaccgcgcgcgcgcgggcatctccccgggcctcgtccgcatgtccgtcggctacaacggcacgctggagcagcgctgggcgcagttcgagcgcgcgctcgcgctcatgcagacgccgacgcccacgcaccacctcaagcaggccgccgaccgcgacggccccgaagccgccaacaaccaccaccgcaagcactgacgcgcttgcgcttccgagcgtgcgtgcgtgcatgcatggcctgtggacttgtgtttgtcgtgttcgtgtatatactactagtgccattcaagcaagaatattaaacaccatctgatccctctggttcagatggatcgatatgccagtgcaagcggctcgatctctggggaacctgggaatggacctgaataaatgggatttgtctttaacggtgtcctccttactctctattattatatggatccaggggcgaatttagggggtttatcggggtcagccgaccccgataaattttataaatcctttagaaaaactctattaaagttcataaaaatttgtataatatagcaaagctgctcttgatgaccccgacaatattttcg

SEQ ID NO: 40321 - DNA, 1918 bp, Zea Mays
gcctaaaccccgaaattataaagaaaaccgcctcggccgcaacttgactatctttgtgaggaccttcaaccatctcaggcggaatggcggcttctggtgagggcgcgtcgctgccgtctccggcgggcggggaggatgcgcaccgccgccgcgtcagctatttctacgagccgtcgatcggagactactactacgggcaaggtcacccgatgaagccccaccgcatccgaatggcgcactcgctggtggtccactacggcctccaccgcctcctcgagctctcccgcccctacccggcctctgaggccgacatccgccgcttccactccgacgactacgtcgctttcctcgcgtccgccaccggaaacccgggtgtcctcgacccgcgcgccattaagcgctttaacgtcggtgaggactgccccgtgttcgacggtctcttccccttctgccaggcctccgctgggggaagcatcggcgccgccgtcaagcttaaccgcggggacgccgacatcaccgtcaactgggcgggcggcctccaccacgccaagaagagcgaggcctccgggttctgctacgtcaacgacatcgtcctcgccatcctcgagctcctcaagttccacaggcgtgtgctatatgtagacattgatgtccaccatggagatggcgtggaggaggccttcttcactacaaaccgagtcatgactgtttcctttcacaagtatggggattttttccctggtactggacatatcactgacgttggggcagccgaagggaagcattatgctctgaatgttcccctgagtgatggtatcgatgacaccacctttcgtggtctgtttcaatgcatcattaagaaagttatggaggtttatcagccagacgtggttgtcctccaatgcggagctgactctttggctggagacaggttaggttgcttcaacctgtctgtgaagggtcatgctgactgcctccgtttccttaggtcgtacaatgttcctatgatggttttaggtggtggaggttacaccatcagaaatgttgcacgctgctggtgctacgagaccgcagttgctgttggagttgaacctgataacaagctgccttacaatgattactatgagtactttggccctgattatactcttcatatccaaccaaaaagtgttgaaaacctgaataccacaaaggacttggagaacataaagaacatgatattggagaacctgtcaaagatagaacatgttcccagcactcaattccatgacagaccgtcagaccctgaagctccagaggagaaagaggaggacatggacaagaggccacctcagcgcagcagattatggagcggaggagcttacgactctgatacagaggatcctgacagcctgaaaagcgagggatgaaccaaaagatgatctgtagaagtttcagaagtgcccccaaagttactgagttgtgaatgggatcgtcgacatgcatgttgaagagtggggacgcatctgaacctgtccgtgctgatatctgccgctgtgcatctgtaacagactgaacgttttgctggttccagctttcctgcgtgttggtaactagactagatatatggccctttggtgggtcccaaactgttgagctggagaaatgaagtgattattctcgcatgattttgtagcatgcatgtaatcattacccattagttcattaggctatcaacagtagtttactcatccccatattcaaacttcactatgtgcgcaaacagtgatttgattgaccatatgattaaactttgaagatggtctttgggtagtgtttggtttcaaagtgtaatgggatggagccgctccgctcttaatttgttgttgtttggattagttgcatataggatagagtgactcgagtttatgcgaagtcg

SEQ ID NO: 40322 - DNA, 1404 bp, Zea Mays
attatattttaggacggagaaaggttttgtaaattttattccgctagggctttgttcttgtttgccgccgccggcaccaccctcagtccccacatggccgccgcctgccttcgccgcctccaccgcatccctcatcctgtccttaagctcgccgcagccactcactggcccttgccattccccggtgccaagttggctccggtcacacagtcgtgcccatccgccgaccgcgtcgaagtacagctgagcgcccgctgccccggttttgcaagtaatggtaacttcaaacatcgatggcatcacaagctgggttcatcagttggtgctgtactgattggacatgcagccttttttcttggtttgagcaatggctctgcatttgcccaggaagattcagttagcccagctgcagctagtgagcatgctgagggaaatgctcctggtttacaaccgattgaagatggatcagtggtctcaaacgaacacacggtcaaatggagaatttacactgataatgcgcgggagtttttccagaaaagacaattggatgaggctgagaagttattccaggcagccctactagaagctaaggaaggatttggacttagagatccacatgtcgcgtcagcccttaacaatctggcagaattttataggctaaagaaagagcatgtgaaagctgaaccactatatttggaagcaattgagatcctggaggaatcatttggacctgatgatatacgggttggaagaactgtgcatagtcttggaatatgctatcatcttcaactcaagcttgctcaagcccagacatgttatgagcgtgctttgaagatagaaggacgtgttctgggggttggtcacccagagtattcaagtacaatgtacagtctagccaaggagttaataaaatcaagacgatttgctgaagctgaaatctggcaaaggaagatattacatgttctggagctttcagagggatgggattcattggtcactgcacgtgcagctgaactcctaagtttaaatcttgaaaccatggagaagttgaaggaatcagaagagctattggaacgatgccttgcagtcaagaaaaagattctacctgaagatcatcttcaggtagcttatacgttggtacacctggcaaggttaacattgcacagagttgtaaaggatcgggatgtaaacagcgatgtaactgcatattacctcgcaaaagcaaaacagttcagcaatgattcaatcaggattacagaaggacaattaaattcttcaagaaaagatcagaataaaattaacaacacatcaactgcagatacagataagagtgcagcaataattcttcatgctgaggtggtgacgacgcccttgcttccttggtgccgcttcttgcttttggtg

SEQ ID NO: 40323 - DNA, 653 bp, Zea Mays
gtcgggccactatccctctggcctcgtctcgtcttctcttctcgcgaatggcggcgctgtgcgatctccgtcgctgccccctccgccagtgatttctgggacgcgcgacgaacacgagttggaaggaggtggtcgtgctttgggcggcgaaggacctgggcgctagcagcctcagaccctgacagatcacaacctgacagatcacaggcgctaccaaaagcgacgggcggccgacggcggcattgcagttggagcgagcgagcgcggtgcctttcggacgacactgagcacagagtgctgagtggaagcaacatatgaagctgacacggaaaaggaaaatggatgatctccttggttatgtttccctgtcttgtgcatgctgcatttcctgctaccgtgaagaccggggtccaggagagtaggagactgaaagcactgtcgagaagactgaaattatcacattgacatgaagaccaaagccatctcttacctacttatctttgtagcttacgtttctattttattctgtcatgaaaactaaagtcttatgtatggtcattatgtactattttggttctgaaaatatttgtttatgttatgaaaactattggttgaaagaatggtgattacggttttggcttgaaggttcagaa

SEQ ID NO: 40324 - DNA, 2918 bp, Zea Mays
attccattccgtcacatattcccgagaaaaaccgtcattcgcgcgcacacgcggtcgcagctgcggtgcccggctcaacgccgcggagatggagggcgacgccaccggagctgacggaggaggcggaggaggaagtggtgagcgttctagcttcgtgatcggcctcatcgagaaccgtgccaaggaggttggtgttgcagcctttgatttaagatcagcctcattgcacctatctcagtatatcgagacaagttgctcatatcacaatacaaatacactacttcatttctatgatcccatggttgtcattgtgcccccaaacaaaacagcagcagatggtatggttggagtttcagaactgatcgataaacattacccagcaaacaaaaaggtcactatggcacgtggttgctttgatgacacaaagggtgctgtcattgtaagaagtctttcagctagggacccatctgctcttggtttagatacttactgcaagcagtattatctttgtcttgcggctgccactgcaacaattaaatggatagaatcagaaaagggtgtgttcattaccaatcactcattatcagttacattcaacgggtcatttgaccatatgagtatcgactcaactagtgttcaaacattggaaattattgaccctctccatactgaactttggggcactagcaacaaaaagaaaagcctctttcagatgctaaagactacaaagactacaggagggtctagattgttgaaagctaacttattacaaccattaaaagatattcagaccatcaatgctcgtctagattgcttggatgagctaatgagcaatgaggagctgttttttggtttgactcaaggtctacggaaatttccaaaagaatcaggttttgaagggggcaaagagttttcttcttcacaacatctatcagactgtatgtgaaaaccctaagtatgctaatatgagaaagagaattggagatgtcattgacgaggatgtggttcattcaagggctccatttgtagcctgcactcaacaatgttttgctgttaaggcaggaattgatggtctgcttgatgttgctcgtcgatctttctgtgataccagtgaagccatacataacctcgccaaaaagtacagggatgattataatatgccaaatttgaagataacctataatattaggcaaggattttactttattattccccaaaaggacatcaccgataggcttcctaataaatttatccaggttgttagacatgggaagaatctccattgctcaagcttggaacttgcttcactgaatgttaggaacaagtcgtctgctgctgagtgcttctcgcgcacggaactttgtttggaagggcttattgacaaaatcagaggagacattgctatccttacattgctcgccgaagtattatgtcttttggacatgattgtaaattcttttgcgcatacaatatctacaaagcctgttgatcgctacacaagaccagagttcacagatgatggtccaatggcaatcaatgctggacgacaccctattcttgagaccttgcatactaattttgttcctaacaatatatttctctctgaagcatctaatatggttcttgtcatggggccaaatatgagcgggaaaagcacatatctccaacagatatgtttaattgtcattcttgcacaaattggctgttatgttccagctcagtttgcatccttaagagttcttgatcgtatatttacacggattggtaacggggacaatgttgagaacaactcgagtacgtttatgacagaaatgaaagaaactgctttcatcatgcaaaatgtttcttcaaggagtttggttgttgtggatgaacttggaagagcaacatcttcctcagatgggttggcaatcgcatggagttgctgtgaataccttctttctgtgaaagcatacactgtttttgccacgcacatggaacgcttgtcagaactttcaacaatgtatccaaatgtgaagatcctccattttgaggttgacttgagaaatgaccgcttggatttcaagttctgcctaaaggatggcatccgacgggtaccacactatgggcttctgctggccagagtagctggtatccctacttcggtgatcgacacttcaacaagtatcacttcacagatcacagagcaggaaatgacaaggatgaatgccaattgcgaggagtactggtcgcttcagatgacgtaccaggttgtgcagcggcttatctgcctgaagtactcgaaccatggcgacgactacatccgtgaagcactgcagaatctcaaggagagctattctgcgggccggctaacataagaggtctcatcagtgtatgccgctggaggatccataagccaatgtatatattcctccgtcaatgtgatactatcttaggtcctcaaacgcacatctatcgttatcgcacatgccatgtaacatcttatcccctattcatatagatgatcacgaagcaagacagcatgtgaatgtttagaacaagtgattattatgacctcagccacatagcttttacgaaaagatttactggaatatatggaacaccaaagtaggagattagagtggtcgatacatacaaactgtaggtttgaacagcaaatgttggcattgttttctgccaatacattaatcgatacagtagcatgagaggaggaggagcacagaaggcggcctagaccacacaagagagcgggaggtagtgtggagccgagcaggacaagaattcatgagggacaaaaaaaaaatgtatggcaaaatcattcattgtcataaaaaacttgtgttttatataatttcagtttcatgtcaatgtatcaataaaataagcaaatataccgttaagtttttgttgaccgagac

SEQ ID NO: 40325 - DNA, 755 bp, Zea Mays
ctgaattcgacctttatttacttcccttcagaaatggcatctataaagcgcccatatcaaacagcaagcacatcgctgtcccagcagcagcgcctgcgcctgtgctctctcctcttcttcctcaaccctcgccgcaacaggagagctctcgatcagcgccgcccggcccacctcgcccgcggcctaacattaggctcggggactacggtgcagccaaggatgacttgccgatctatcgtcgatcaacgagcgacgcctctgatgtctgatctcgacatctatcgtcgtcagaccatcatcatctatcggcaagttgttcttggctacaccgtggctcctgctcctgatgtaaggctttgtcgtctgcggcgacacgtacttttttttcccctatcgtcgtctgatgatgatgatcgagctgagggtaatttaaggaaggtcaatcacatcaaatcaagtgataggataaagctcttgcagattatgcgtgtgtgtggcactgctgctgccagccagtgccaaggccgccatgcatgcacaaatccgtcgtctccaacttcttgcagctgagccagcggctcaacatgtaacactctgccctatcccccccccccccccccccccaaaaaaaaaacttggaactctgcaaaagaggattcaatttatctggtccaactgcacttccagtttgtttccttttttttgccatttgattcagtttttgccacatgacgcttgaataatgcatgttttgg

SEQ ID NO: 40326 - DNA, 1307 bp, Zea Mays
tggggagttagcaaattcaatacttgaagaaaggctgaaagataaagcaggttcttctagtgatggattctatgagtccagaaaagaatgggcggggagaagacactttctgctagctttcgaaggttcagctgaaggattgtacatagtaattcggccagctgttggggaggcttcgagggaaatgtctttggttgagcttaaaagcaagtacaggaaggtctcatctgttgacaaaattagtaaaggctggcaagaagagtacgactcttcatccaagcagtgtatgcacgggccaaaatgcaaactcggaagcaattgcacagtgggtagaaggttgcaggagattaatatattgggtggtctaatacttcctgtatggggtgcagtagcaaaggcactggctaagcaggcacggcagattcacaggagaatacgtgtggtccgcttggagaccacgactgagaacaaacggtttgttgggcttatcattccaaattctgcagtggagtctgtactcgaaggtttgcaatgggtccaagatattgacgaatgatttggcaagaagctactcctttggcagtccttcctttgctttggaccaaatctttgtcgctgaggcaacttgtgcatttcgcttgtgaaacggttgtggttgtacgcagtcaggaaaagtatacgacaacggctgggccacttttgtgttatatatatgaaagttacgtaaacgtttatatcagaccggggtgctgttgtaagttagcctgttgttggaggctacatgcctaaatgctgcacgatgtagtggtgtggagatgtggtggctgtggctcttatgggcctgtgttgtttccctgacaagggtggctcatatggctggcctgagaccgattgggttggggtttgttttctataaacaaaacgaggttgaggattggtcattgtttggtaggctgtacaaacgaatctggttaccgtgcatcagctcatgggtagagttacccgtttcttcttcctggcacctgccgccttgctttacatggtagagacaatgggcctgacaagacctatctcatccaagcaatcaaacagctcctataccatgtttggcatctccgagggagggctgaggctgtactgtcgtgctggattaagcaacagaagttggagccaaataaagcagagtctgctatctagcaggctgtggtgggcacagtctgacgcacttgcagccacctttccttaaaataaaggtgtcgtctccaacatttttttttgccacgttcgtttttggattaaacccagtt

SEQ ID NO: 40327 - DNA, 6635 bp, Zea Mays
gggatttatccgtttcgttatcgcgcgccatgctacagctggtgtgcacttctattacattacatgcatgtggagtaatttacctacggcagattgctgactaaaggcgctgaagtaaaccttccctcagtatacttcctcggatgtcacgtctgcccctctgcgtcatttatggctcagaactcgtcccgtcttcaccgcctcctcacattactagacactggttcgacacaagcaacgaggtttgcggctgcacgccaaattggagaaatcgccaagtcccacccccaggagctgaattcgttgctaaaaaaggtttctcaatatattcgtagtaaaaattgggacacgagggttgcggcagcccatgcgattggtgccatagcagagaatgtcaaacacacatcattgaaggacttgtatgcttccgtgcaagcagaaaaacatgcttccggtttctctgatggaagtgatgatgctggctcagcattgccacggactgatagtgcagcaacatctgatcttgcttttggaagctttgacataggcagggtattggaatttggatctcctctattggcatcaggtggacaggaatacgacattgctgatagtggcaagaatccagcagagcgtctagctcgccaaaagaaaaatctccggcgtcgtttaggactggatttatgtgagcagtttatggatgttaatgacgttatcaaagacgaggatcttcttgcccaaaaaaattattggggttcacatgtacagaataatggattccattcatttaattcaggtcataatattcagcagttggtttctaccatggtccccaggtatcccaagcattctaattttcgctctagacgattaagtgccagggagttaaatatgctgaagcgtaaagcaaagagtaatgcaaaagatcatacaaaggctgtatctgaggatgatgaggttacactgaaaggatctgtgccctccaatggagcttcttctgaacaaggtgtatttgatacagctgtcgaagaagacaatctggagtacaatgagaacggaagatggccttttcaacaatttgtggatcagcttattcatgatatgtttgatcctatttgggaagttcgccatggcaccattatggctttaagggaaattttgacacatcatggtgcttgtgctggagtatattttcctgatctgagcttgccttcctctgacttggatggtaaaaccaactttgactcccttaaaagggaacatggtatcgatctaaacgaagatgtccatttggaacaccttgaaccagcattaaagaagcataagaaagagccaaaatgtgctgaaagtatgatggattgtgataaggagttggttgacagtgattatctaaaaacggaaggagatctgagcaatgtgcctgatgtattaactgccgaaccaaattctactcatgtaaaagttgagcctgagttctgtgttgatgattcagctgacccctctaaaggcgtttcgacatgtaaatcacagaaaaaactcaactccatatcacatctgagttctcatattcttgctccagaaagttcaaaattcatgaaactgatgaaactagccaaatactcatatatgaagaattgggaatttcttcaggattgtgcaatccgcttcctttgtgtgctttcactggaccgctttggtgattatgtatccgatcaagttgtcgccccagttcgtgaaacttgtgctcaagctcttggtgctgtgctgaagtacatgcacccttctttagtatgtcatacattcaaaatcttgctgcagatgcagcacagacaagagtgggaagttcgtcatgggagccttcttggcattaaatacttagttgctgttcgccaggaaatgcttaaagatttgcttgactatatcattcatgcttgtaaagctggtctggaggaccctgatgatgatgtccgagcagtggctgcagaagccctgattccagctgccgactctttagttaggctaaatgaccaaattttgcatccaattgtggtgttgctttgggatatactgcttgaccttgacgatttaagcccatctacaagcagtgtaatgaacttgttagcagaaatatattctcaaccagagatggtcccaaagatgcttggcacagcagcttcaggggaaaagggagaatttgatctaaacgaagcaactcagattgctgagcaagaagacgaactaacatctattgaaaacccttacggtctagctacactgacaccccggctgtggccctttatgagacatagtattacttctgttcggcgttccgccatacgaacactggagaagcttcttgaggttggcaacactaggagttctgctggaacaaccccatctaaactctggccaacatcaatattaggtgatgcactgcaggttgtatttcagaacctacttttggagtcaaatgatgatattcttcagtcttctgaaagggcttggaaacttctacttcagtgccctgagaaggaccttgaatatgctgcaaggttatattttagtaattgggtacaacttgctaccactccatttggctcagcattggattctacaaaaatgtttttaccagttgcccttccacgaggaaatcgttcgagagctgctgcaaagattagatctgctaggctagaacatgagtacacaacaatgatctcgtttggttctacaggggaaagtatttcacatgaaaagcattcggacgttccctctattttttcgaatataattgttggctctgatcctgacaaatctgttactcatacacgggttcttacgtcaatggcccttgggctttttgcctctaagttgcccgtaagctcatggcaagtggttttaagtccactagcaaatcacctcatgtctctctcaggagtccagagacaagtggcttcaatgatcatcgtttcttggttcaaagatctgagaggcagagatcctgtatcagtgggtacattgctagcttttctatcttccttgaaagagtggctggtggacttattgacttgctctgatccagcattacccacaaaaggttctgtgcttccatattctgaactttcaaggacatacacgaagatgcgcaatgaagccaataatttgctccacttaatcgattcatgtgctgctttcaaagattatagtagcagcttaaaccttaacactgacgtgctgactgttgatgatgctatcaactttgcatcaaagcttttgttaccatctgaatctgatattccttcagaaactgagaacattttcttgaataacatagaatcagcaaaacaaggcctattgtctacatcaggttacttgaaatgtgttcagaataatttgcatgtgacagtctgttctttggtggcttctgctgtagtttggatgtcatgtttgcccagcaagttgaaccctgttattttacctttaatggctgccattaaaagagaacaggaggaagtacttcaagataaagctgctgatgcacttgctgagcttatatttagctgcattggccgcaagcctggccccaatgacaagctaaccaagaatctctgcactctaacatgcactgatgctagtgagacacctcaagctgcaataatcaactcaatgcaggttattgaggaccagaatttgctatcgattggaaagcgttttagcagtcatagatccaggggccatacaacgtctggtggcgatgaaaggtcaaaaatggagggttttataagccggcgtggatcagagttggctttcaagcatctctgtgtgaaatttggaccttcattgtttgaaaaccttcccaagttatgggattgccttactgagtttcttagacctgtaaaaacagaagatggtattccggaagatgatgcaagtattgcacagctgggcagatcgtatgaggataaggacccacagtcactcattaataatatccaggtcgttcgttccatttcacctcacttggctgagcccttaaggcctcaactgctaaatctccttccctctattcttgggtgtgttcgtcatcctcatgtggctgttagactagctgctgcaagatgcatcacatctatggcaaagtcattgaccgatgatgtgatggtactggtgatagaaaatgtcatcccaatgttgtccgatttatcttctgtctgtgcaagacaaggagctgggattctgttaagccttcttgttcagggtttggctgtggagttggttccttatgctcctttccttgtcgttcctcttctgaagtgtatgagtgacccagatggttctgttaggcagactgtgactcacagttttgctgctcttgttcctttgctgccattatcaaggggtgcttctttaccatgtggactaagtgaacgcttatctagcagtgctgaagatgtgcaatttctggaacagctccttgacaatacccaaattgatgatttcaagcttaatattgatcttaatgttgaactacgaaggtatcagcaagaagggatcaactggcttgcattcctccgtcggtttaagttacatggaattttatgtgatgacatggggctcggtaagacgctccaagcatctgctattgtagcaagtgacattgcagaagcacgtgcacggaatgatgaaaaaattctgacatctttgattatctgcccttctacattagtggcccactgggaatatgaaatagagaagtacatagacagctctatcttgaaacctcttcagtacgttggttcttctcaggacagagtgacactccgtagtcagtttgataaggttaatgttatcataacatcatatgatattatacggaaggatattgattttcttggaaatatcacttggaactattgtgttctggatgaagggcatataataaaaaactcaaggtctaaaataacgtttgctgtgaaacagctgaaagcgcaacaccgtcttatcttgagtggcacacctattcagaataatgtgttggagttatggtctttatttgacttccttatgcctgggtttcttggaacagaaaaacaattccaagctgcatatggaaaacccttgctagctgccaaagattctaaatgttcagcaaaggatgctgaagctggtattcttgcaatggaggcactgcataagcaggtcatgccgtttctactgagaagaacaaaggatgaagttttatctgatcttccagagaagataatccaggatagatattgtgatctcagtctattgcagctcaaactttatgacaaattttccagctccaatgcaaaagacgagatttcaactatagtaaaagcaaatgaactggaggaatctgcacctcaaccaaaggcaactcggcatgtgtttcaggcattgcagtacctattaaaactatgcagccatcccttgcttgtaactggggagaaccccccaaatcatcttgtggatcttctgaatgaaataggtctgggatctggcagtgagcttcatgagcttcaccactcacctaagcttgttgctcttcaagaaatacttcaagaatgtggtatagggtcagaaatatctagtcctgatgcttctacagctgttgggcaacacagagttttgatttttgctcagcataaggcttttcttgacatcatagagaaggacctgtttcaatctcatatgagaagtgtcacatatttgcggctggatggctctgttgatccagagaagagatttgaaatcgttaaagcattcaattcagacccaaccattgatgtacttctgctaacaacccatgtcggtgggcttggcttgaacttgacatctgccgacacattggtgttcgtggaacatgattggaacccaatgaaggaccttcaggctatggacagagcacatcgattgggtcaaaggaaagtggtgaatgttcaccgtctcatcatgcgtggcacccttgaggagaaggtgatgtctctccagaggttcaaggtgtcagtcgccaatgctgtcatcaatgctgagaactcgagcttgaagaccatgaacactgaccagctgcttgatctgttcacatcaacccctgcttcaagaaaagcaagcgacgagcagagtaagaggaaatctggtggcaaaggcttgaagtccattcttaatggtctggatgagctttgggatcagtcgcagtatgccgatgagtatgatctgaaccagttcctggcgaagctgaacggctgagccaccaccggctggctcgtgtacagtgtataaagcaatttggggcaggttaattttgttgttgctgttgtttgatagaggaaggaaaagattagatgctaacagatataggtggtggttggggttacgatctcaatttttttggtttccatcttcctcaatttttgttttgaggagttgtatatactctgctcacctataatcaaagctgcagctcttatcagaatttcccttgattggtcatggtgactgttccatgtactttgttctgccgcggccgtagctatatggactgctgcagctgcaattcatagaaacaaaatacttcatagaaacaaaatattgtagaagccgcatttggattaaag

SEQ ID NO: 40328 - DNA, 338 bp, Zea Mays
tattaatagaccaagagttgttgggcctgacccattgcacaagggtatgacggtaattacaaggggctaaccccaaaaccctatacatggctctaacactcatgctctacactatacccaaggaagacactcataagactgtgtagtcaattttgagtgctcgtgatttgcaagcacataacacacacaaccaaaaagactaaggctagatcaatcaggcatcttgccaaaaaggcgctgaaaaggaatgtcatctcgaagagctgaagaaggctgaatgttagtcaaataagtggcagtagagataacctcagtccaaaagtgaggggaaacagaag

SEQ ID NO: 40329 - DNA, 2691 bp, Zea Mays
atggcctcgtcatcacattcactgatccaccccagctcttttgatatgttctgtccccggtcgtcccatgatgcttcgtctcgtctcccaagtcccacccaggtcccggaactagccgtcgctctccgcccagccagccactcatcagtccagcctccttcctccactgcctatatatttgcctgccctgctggagccacggcccctctcatccatccatgcacaagcgcgactcctcagcttcctcctctccttccttccttagctgtcccccttcccgccacctctgacccgtttcctgctcctgatcctgacgcacgtacgtctgggctgctgtactacgcgattctcgcggcggcgcccatggacccgtggatcgggcagccttccctgagcctggacctcaacgtcggccttccgacggcggcgaggccgcctgcgaccaccaccaccgccgaggtcttggtcgaggaggacttcctggccgtcaagaaagaccgagaggtgcaggtgcaggcgctcgaggcggagctccggcgagccggcgaggagaacaggcgcctcagcgacatgctccgggcggtggtggccaagtacgcggagctgcagggccaggtcaacggcatggcggcgccggtggtgtccacggcgggcaacagcgccgccgccgccgccgccaaccgccagtcctccgcgtcgtccgacgacggcggcagctgcggcgcccgagcagcagcagcgccgagctcgtcgccgggcccgccaacgcgtcgaccaagcccttcacggcgcactacttcccgcagctgctcgaccacttcgccttcacgcccaacgcgtccacggtcttccgccacaagtacctcctcaacgacaccttctggcgccggcccggcgccggcgccggcgacgacggccccggcccgctgttcgtgtacacgggcaacgagggcgacatcgagtggttcgccaccaacaccgggttcatgttcgacatcgcgcccacgttcggcgccctcctcgtcttcatcgagcaccggttctacggggagtcgaagccgttcgggaacgactcgtacaggtcggccgagacgctgggctacctcacgtccacgcaggcgctggccgacttcgccgtcgtcatcaggggcctgaagcgggacctcggcgccgaggccgctcccgtcgtcgtcttcggcggctcctacggcggaatgctggcttcctggttcaggctcaagtacccccacgtcgccattggtgccctagcttcctccgcgccgatcctgcagttcgaccacataacgccgtggagcagcttctacgacgccgtctcgcaggacttcaagtccgagagctccaactgcttcggtgtcatcagggcagcctgggacgtcctggatgagaggggggccacagacaaagggctcctggacctcagcaaactcttcagagcctgcaagactgtgaagtacgcttattcaatccggaactggctgtggacagcattcacctacactgccatggtggactacccgaccccagccaacttcctggagaacctgcctgcctacccagtcaaggaggttgtccatttgtctgcaaaagtgaacctggactccagctctaccgatcatgaagctttcgcgtgaaaacatctgcagatgtgcaagaccatcgacgcgttccccgcgggcgcagacgtcctggagaaggcgttcgcggcggcgagcctgtactacaactacacgggagaccaggcctgcaacaagatagaggacggagacgacccgcacggcctcgatggctggcaatggcaggcctgcacagagatgatcatgcccatgacgatctccaacgagagcatgttcccgccgtccgccttcagctacgacgacaggtccgacgagtgtttccagagctggggggttcggccgaggccgcactggatcaccactgagtacggtggatataaaatcgataaggtgctcaagaggttcggcagcaacatcatcttctccaacggaatgcgagacccatggagccgtggcggggtgctcaagaacatctcgtccagcatcatcgcccttgttacagagaaaggtgcccatcatttagacttgaggtcttcaacgaagggtgatccagactggctcatagaacagaggaggcaagaggttgagatcattcagggatggattgatcagtatcatcaggacatggcggaaacatcttcctgaagacagggcaagtcagtattcttcttcttacacatggtggaaacagggcgtgtatcatcaggacatggcggaaacatcttcatgaaaacaggacaccttcctgttacggtcatgtttggatccatggaaaaaaataaaggacaaaaaatcaataatttacacactaaacatcagaaattgctgaatcttacacaaagcaggcccctttgtgaattagtaaggggtggtgcaggtgctgggacttcaatccgcgccagagcagtgatcgactgatctcgcaggcctctggccagcggaccaaggcagtcttgagtcttgactcagtttctgttttttttaactgtattgtttcttcttttgttctcggcaaggaacagtcttgacatttttctctgttttatgcatgtagattagggctgggtatccatatttcgagaaaataatagtaatt

SEQ ID NO: 40330 - DNA, 4279 bp, Zea Mays
aactatccagccaccattcacccctccgcactccgcctccgccgcctccctgccctcaactccacgcccggcagggtggccgctcgccggcagccaaaccctaggcgatcgcggaggccaaccacgcttcgggcgcgatcagccgccgccatgcagggcttccccggcggcgcccccgatccgcagcagctacaggccaccatgctcgccatcgagcaggcctgctccctcatccagctgcacatgaatccatctgaagcggaaaaagtgataacttcgctgcattcgtctctcatgccttatcaagtatgcagattcattcttgagacatcccaaaaaccaaatgcaagattccaagctgctggtgcaattggtgatgctgcggtaagggagtggggagttcttacagatgacaataaaaggagcctaataaatattgtttaaactatgttatggagcatgcaagttctcctgatggctatgtgcaatcgaaagtttccgctgtggcagctagattactgaaaagaggctgggttgagttttcggaccaagaaaaagcagctatcttctttgaggttgagcaatctatccggggcatccatgggcctaatcgacagtttgctgcaatcaatttcttggaaaccttggtttcagaattctccccttcaactgcttctgctatgagcctgcctaaggaatttcacgaacaatgtgaatactcactcgaagtgcagtttttgaaggatttttactgctgggcacaagctgctgtgttcaatactgctgacaaaatcttgaattcaactgtaacaataccggacgaaagagcatgttcagcagcattgcgcctgatgtttcagatactaagttggaatttcaaacatactgtggagcacgagagttcagatgctaagataaatttcggcttaaggattgatacgataaatctgaagaagtttgaacgttcgttggtgaagccagggtctatgtggagagagattctaatatcaagtggacaccctacctgggttttaaacttctataccaccttgcgccaaaagtactcatatgatacactgtggggtgattctccaattgctgtctcttgcagacagcttatagtgcagttatgctccttggcaggctctgtgtttcctaatgataatggggatgcacagattaaacaccttatgctgatattatctgctgttgttctatggattgaacctcctgatgtaatcacagcatcaatccgaaatgggggaagtgaaagtgagttcatagatggttgccatgccttgctttcaatcgcatctttaactactggctcactttttgacaacctcctaaaatctataaggccctatggtacagttaatctgctttctgctttgacgtcagaagctgtcaagtcggttctgaataaccagagtgaagaggaaacctggggcatagattcccttgatattttgttagaaacatggaatgttcttttgggggacgtagatgccgataaaaatccaatctcaaccgatggagcacttgcatcttcaagtttgtttaagatgattgtggagtcacacttgaaggctgctgctgattctgcgttcgaggatactgatgatactgaatattttcatgtttctgtttcaaaacgtgatgaacagttagccttgtatgctctaatagcacgggcttctgcaaatactactattccatttcttgcacagttgttttcagaacgatttgcccggctaaatcagagaaatggtgaaagtgatcctactcaaacactggaagagctctattggctgttgttggttactagtcatgtcctaactgactctggcgaaggagaaacactacttatccctgaagcattacaggctggattccctaatgtgattgaagcagcacatcatcctgttgttacactctcctggtctataataaatttttccaggcagtgtttagatccaggaattagggcaaaatacttcagtccacgactaatggaggctgtgatctggttcttggccagatgggttgcaacctatttagtgccacttgacgtgagtagaggaaaagtaagcagagaaattgataatgtgggtacaaatggatcccaacattccagaaaactgctaaacagttttgcttgggaaaataaccaaggagagcttgttcttgattttgttgttctcatttcaatgttagctcttactacctatcagggagaaaatgagttgcagacactgacatgccagaagctacttgctacagtcgttcgccggaaacacacatgcacttatcttgttcaactggattcatggcgtgatcttacaagagcttttgcaagtggacggtctttgctttcattgagtggacgtttacaaaggtctctagcagaaacacttgcctctgcagcttcctgcatcaaagatcctgaagcatctgcacagtacctgagggatctcatgggaccagtggcagggtgcctggtagaaaatgctagcaggagtgatctaaaatctgtggcacagcaagcagatgttatttacatggtctgttgcctattggaacgactaagaggcgctgctagagctactcaaccccgaactcaaaaagttctatttgagatggctcatactgtgatgaacccacttttgactcttctggaggtctacaaaaatcattccacagtcgtatacatgatactcaagtttgtggtggactttgttgatggtcaagctgtattcctggatgctaaagagacatcagctttggtgagcttttgcttgcaactactccagatatactcctctcataacattgggaaggtaatgctctctctttcttcaagtctgcgtaatgagtcacaagcagaaaaatataaggatctgcgagctttgcttcgtcttctgacaaatatatgttcgaaggatttggttggctttctgtctgattgtggcggtgaaggttcacctgatatcgcagaggttatctacattggtcttgatattgtgacccccttgatatctttggatcttctgaaataccctaaacttagtcgtgattattttgtgcttatatcgcacttgttggaactgtacccggaaaaggttgctcacttaaatagtgatgcttttacaaggattattggaagtcttgacttcgggctccgtaatcaggatagcgatgttgttgagaggtgcctggcagcagtaaatgctcttgcttcatacaatttcaaagaaagattaggagggagaggaagactgaactcgcagctcatggaatctgaaggatctaatggcaaactgcaggaaagcatatcaagtcacttcttgagacttctgttgcaaatacttctttttgaagatttcagatcggagttagcaggttatgctgccgatgctttgcttcctttattgttctgtgaacaggagctatatcagaggttggtccatgagttgttggataaacagcagaatccgaccgtaaaatcaaggctggcaactgcgttccataaccttacaagttcaaacaatctctcaagctcactcgaccggccaaacaggcagagattcaggaaaaacctccttagcttcatggcggatgtatcgggcttcatgcagatcaagtagatgcgatggcagggaacaggtgatgtttgaccggtcaattaaaccccgaggaagcactgcaccactgtggtaggggtgcatgtgggcaccacatgtctgtggattgatgagagcgaagactgccacgacaagtctagtagatcttgaagagctagtgtcaccagaaaagacagggagatgagctagtcttagggttggcattcatagcgcatttgctggacaagatggaggcgtccctggccacgagatcgtcgtgtaaatgcgtttgttagacgcacagaaacggtggggattttgtggtggcgactcgttttgttcaattcccacaggcagaaggtagagatgttaagttgatgtaaataccgtttgatttaaacatgccttattcgtaggagaaagcgacacggcttgctgtaacttagggtttattactctttctcgtggcataggatccccaaagaagtctttgctggggtatttgcagccaaacgatgaccagtatgattgcgagaggttttcaatcttttgtaccaaatttggcctgcagttatgatgacactgagtgccgatacaggcatgaggcattccaaaattggcgggcaccacatgtgtctgtctgctgtctcagtggg

SEQ ID NO: 40331 - DNA, 5111 bp, Zea Mays
cggacaccgccggcggatgccgtatctcttctatggccgacctactccttcaagcgcgggagcagctgattgaaggcgatgcgatggatggattggctcagagtgtcaatacggctggactgttctccaccgggtctgggaggccactggctgtcagccagagagccgtaaggagggccagtgcgttggttggcgaggaagtggacgaggctactgataacaataacaagaagagaagtggtgtgcataaagataacttcttcccaatgttccaaagtggatctggtaaggcagtcttgctcaacaaggactcaattcagaaggcaagagctgttctagaagaaaatgttgagaatgcagctggtgccaaacagccaatgttccataccagtacgggtagatctgtcctagtcagcaagagctcaatcgataaggcgagagctgttttagggggtcggatgattgcacatgaaggaaatgtggaaggtccaggtagaccggccaatcagtctctgatatttcaaactagttccggaagaccagttttgatcagcaaaagatacgtcgagagatctagggctctgctgatggatgaagatgttaaaaatattctgtttacctctttgtgtgaaggacaatgggatactggctgccagctcccaattttccaaacaggacttggaaggcctgttgctgtgaaacatagttcaattaaaaaggcaagcacaattttgggggatggagatgttaaaagaagtggtaatggacataccggtgtttgtaccacacctttccaatttgaaacaccaaaatccgttttgatgagtagcagtttgattattaatggcatgacagttacaccagaagaaaatacttcagtgcgagcagaaaaatgtttcaacgatgatggccaattgccgttatttcagactgggtcagggaggtcagtcacagcaagtaagggttcctttaaaagggcaagttctgttctggagccaagaaatattgcaaaggaattggaagatgaatctcatctcaatgatggttatgccacctcaatatttaaaactggacttggaaagtctatcttaccaactgagaactcaagagaaagggcacaatttgtattagaggctaaagaggctgtaaaacaagctgctaccttattgggcttggaggagaataccctttcaacacaattttttggacatgtgagtgataagttaggtacggagataactgttaagcggggaaatccagaacacatgcttgatgttgcatctgcacatgcaatttctagtggcactcataagggttttatttatccaacagaaaaccccacacatatggataaacatcagcagtttggattttctaaaagttctacctcttacgttggtgagcattctatcaggttcagcactgcaggtggccgatcaatggctatctctgtcgatgcactacaacgtgcgaaaagccttttgggtgattcagatttagtggtttctccaaatggttcaattggtcgctctttggcatcagctatagagaatctaccaaaaccaactatttctccgaaaggagatgtatctaacctatcatatggaactagagcaataggatatgctgtacctgacacccctgtgactaaaacaagtgctaatcagtttcatatgggaagggaatatcgtccagtcaatgaaattccaaaggtccccaagcctccctccagatgtttatctgaaggcgacaatgcgagtaactctaaagacaagacccagtggcaccatatgccagctggttctggaaatacggactgcttagcaaatggaaagagaattattggggggagaaactccgtatctccattcaaacggccccgttcttccaggttcatcactccaataaaaaacaacaaactatcttctgctggagaatccatagtgccaccaatgcagatcagtccctgtaggacaatgctatctgtacgttatcctttccaacatcaaaggaaaaattataaagaatattttggtggtcctccttgcttcaaatatttgactgaacatgtgactgatgatgtgaagctcatggatgcaagaagagctgagaagtttagatttcagcatatggatactggtgcagaagagtttcagaaaatgctgctcacatgtggtgcttcattgtcatgtgcaacaaaagaatgggtcagtaaccactataaatggattgtgtggaagcttgcttcacttgagaggtgctacccaactagagttgctggtaaattcttgacggttgacaatgttcttgaggagcttaagtaccggtatgacagagaagtgaatcatggtcatcgatcagcaataaagaaaattttagaagggaattcttcaccatctttaatgatggtcttgtgcatttcagctatttactcttgtccttaccaaaataacaataagttggaggttaacaaggtagatactaatgaagacaacagtggcaaccaaagcttctctgccactaatagaaacatgtctgcaaatattgaattaactgatggatggtattcacttgatgcatcattggatgtggcacttctggaacaactagagaaaagaaagcttttcgtagggcagaagcttcggatatggggagcttctttatgtggttggtctgggcctgtgtcatttcatgaggtgtctggtgttgtcaaattagttgtccacataaatggcacctatcgtgcaagatggaatgatgccttaggattctgcaaacatgttggactcccactggcattcaggtgcataaaagtttctggtggtagagttcctaggacactggttggaatcacaaggatatatcctattctctaccgggaaaggttgcctgatggtcgttttgttgtgagatctgaaaggatggaaagaaaggcgctggaactataccaccagagagtatctaagatcacagaagatattctgtttgaacaacaagaaaactgtgacagtactgatgataacgaggaaggggctacaatttgtaaaatgctagagcatgccgctgagcctgagtttatacttgcgggcatgactccagagcagttgaagtgtttctcatcttatatagaaaagcaaaagattgttaagcaaaatgaagtatctgagaaggttgagaaggcccttgttgttgctggccttagttcaagggatgttacaccatttttgaaagtgagagtgattggccttgtcaataaacattcagcttccacatccagtaacaaggaagggctaataacaatttggaatccgactgagatgcagaaagataatcttgtggagggacaagcttattctgttatgggattggtaccttcgaactattgcaccgaaatcatgtacttgcatgctagaggatcatctacaacatggaagcccttagcatcagctcagactacagattttaaaccattctttacccctcgtagagcaattgaactcttgaaatttggtgaggtgccgatttcaagtgaatttgatattgcaggtcttattttatatgttggcaatacttatttatgtaacaacaagaaaaagcagtggctttttttaacagatggatctaaatttgtctctgggcaagggtgtgaagagcaagattgtcttctagctgttagcttttcgtccgcaaccactgatgaagactctacattatttagttacactctctctggaaatacagttggttttagtaatctggtcaaacgacagaaagacgagacgaggcaagtatgggtagctgaggcaacagagagctcaagctacactctttccaacgagattcctagaaaatctcacctaaaagaagctgcagttttggctgagagatgggcttctagatcttatcataaaattcaagagctaaaagaaagggttttatgtatagttggcaacgctggtgtctgaattataataaacggtaccacctgctgtttttggaaatggtgcaagattttgcttgggggttgtcttagctacaccattatttctcactgatgttggttggttctggttggagcctttttaacgcaatatgaatggcccttgcaaaaaacttcaagagcagcaagatccttgcacaaacttcaaaaatcaacttgaagatgtacacatttgaagacacgaggcttcagggctgttttctaagtctgtgtataaagcctttttcagagggtcgattaactttgagccgtggaaaaggttatggagatcttgggcgccgcctaaatgcaaaacttttctctggctagccattaggaacaaatgttgaactgcagacagataggagaagagggctttctcacctagaggcctgccccctctgcgatcaagagcaggaaacagctcaacacatcctaacgagttgtgtttttgcaaggcttttttggcacaacattatggctcccttcggtatgggtacctcaccccgagtcagaatgaacttatcctttgcagatttgtggcgaaaagtgagcaacaatgtgcataaagagaagagaacaggaataaacaatgctattatcttggaggcctggtgcatttggcggcaaagaaatcgtacggtttttgaaggagatttgccagctgttagcaaggtgcagcaaagttttctagaagagctaacatgtttggtcttgactggggctcatcaccttagcattttagggataattgatactcttagagcggtcggattgggctctcttgatcatatgtaatttttgtttcagtttcgatgtggtgtgggtgatgatcttgctcagcaagatcctcatcttgtaggattttcttttctctctaatataaaatatgggacgcgttcgagaaaaaaaaacttcaagagctaaaagaaaggcttctatgtatagttggcgaccctggtgtctgaattataataaatggtgctgcccgccattttttttggagatgatgcaagattttgcatgggggttcttgccataactacatgtctacatcaatatttctcagtggtacaattagaagatcaacaacccacattggcacattgtatgcacaactttcagaacttcg

SEQ ID NO: 40332 - DNA, 1031 bp, Zea Mays
gcagcacctgaacacgggaaatcccctcgctcgtgtctcagctactgtggccactcatttgccagcaagtggcattatatatattcgttcctccggccgacggccagtacgtacgtaggcgccgacgagctaggtctcgccgccgccgcctcgctcgcggtagagaaagagagagagagaaacagatcgagatatagaacgagaaattttaataaagagaggcgagctagctatctaggtagagagaggccgggccggccgcgcgggggcgggcaagcaagatagaggccgggagcgtgcgcaggaagctgatgaggctgctgtcgttcgtgccctgcggctgccgtgctggacccatcgacgacgcgccgcccacggaccaccacgccaccgcgaggaaccgcaggatcgtcgggaggagggcaaccgccgccaggtcctccgcctctgcggcgcactggcgcccctcgctcggggacatctacgaggactacagcgccgacgcggccagtaataaggccggcgacggcgggccggcgaggggcaggaaagcggcgtcctgggacgtcgcccgggtgctgccccgcgcgcacagcgatgaataccggcaccttgagcgcgcgtcgtccatgccagcgttcgcgccgatggccttccttttctgatcacgtcgtcggcggccgccagccctcgacgacgatgaagtactgcgggaagcatatatatacagattactgtcgacgtattgtagaaccaatgatatatatgcatgcatatgcacatccatcaggccggaataaatctatgcatgcttttgtgtgtgtgacgtacgtgtctatgtatatgtgatgatttggatgagctagctagagtcgtgaacgtacatgccatgtacataattactagtatagttatagtaattaataatactagctatatagctaatagatatcgaaatctctctagctattcgatcaagtcgctcggcttggacgtgtgtgtacataaatgatgagatagataactgctag

SEQ ID NO: 40333 - DNA, 1545 bp, Zea Mays
ttacggttgtttttaaagacttgaatagaatcaaaagatagtgtctagtaactttggagtaccagtgatgcaaagggacactagctctagcgatgtttctgcttctcatgtagggcgtgtaagacgtcgcaaacatccatctgaggctaccacagatgggaatagagctaatggacaaccgttgcttgtcaatgatcagaacaagtataaatcaatgcttatccgtacatattctacagtatggatgattggaggctttgcctttattatttatgtgggtcatctatatatctgggctatggtggttgtgattcaaatatacatggcaagagaacttttcaacctactcagaaaatccagtgaagagaaacaacttcctgggttcaggctactgaattggcacttctttttcacggcaatgctgtacacttatgggcgctttcttagtcggcagcttgtgaatacagtaacttcaacatataagtaccagttcaaacagtatgcctggacgcacatgatacttctaacggtttttgcacagtctgctttcactgtggcaaacatatttgaagggatattctggtttcttttgcctgcttcacttattgtgatcaacgatatatttgcttatttatttgggttctttcttgggagaacaccattaatcaagttgtccccaaagaaaacatgggaaggttttattggtgcatccgtgacaactatcatctctgcatttctgttagcaaatgtaatgggccgtttccaatggttgacatgcccaagaaaggatctgtcaactgggtggctttattgtgatcctggtccaatgtttaagccagagcattactcattgggagagtcggtgccacattggttcccatggaaagatctagccattatgcctgtgcagtggcatgctttagccctaggtttatttgcgtcaataatagcaccattcggaggattttttgcgagtggcttcaagagggctttcaaaataaaggattttggtgacagcatacctgggcatggtggaattactgatagaatggattgccaaatggttatggcagtgtttgcatacatataccaccagtcattcattgcacctcagaacttctctgttgagataatcttggatcagattctaagaaacctgacctatgaggagcaaaaatacctatatgaacaacttggggaaatgttccatgagaggcaattagggcaaaactgagagttagcgtgcttatgaaatgcatgataatttcttgtgtatttaagcattctgctcattatgtagctatagtccttgtccaaacctttgtatagaatggtagaatggagagaatgattgggttttaggtgctttattcactcttcactgacgctgcttaattcactccccttgtcatgatttctgcactctttgtaaaaggggacctgggaagttttattgtttcttatcacttcgtggtgctgtcctcagatcatatattcgaggattcacagaatataagatgaagcagcagtgctagttcttatttg

SEQ ID NO: 40334 - DNA, 863 bp, Zea Mays
aactcacctgcgcggtgacagcacctcgccggcttttcttccctcaggcttgcactttgcacagcctctcacatcacatgccgctgatgcttcgcgtctcctactccttcctgcttccacctattaatccaccccactctcttccctccccgttccacccgcctctaccgccgcgagatccggctccgcttccagaagcttctggaacgcccgttccatgagcgtctgatcggccgccgccatgggctgcgctggatccacccccaaagtcgacgagatctgggatgctctgagggttgccgcggagtccgatctagcccttgcacagaccatcgtggacagtgctggaatcatcgtgtcgaaccctgacatgacgctctgctacgacgagagaggcgccaagtacgagctgcccaagtatgtcttgagcgagccagcgaacctgatccgcgacgggtgattctggaccccaaaaggttttgcagcagcacgaaacagggccacgtgaatttatgcggatggttgattcggtcgctggttctggattgtaactttcagggacagtgaaagctcgtttcagcgctggatgttgtatagtgatgttattggacacgatgtgtagtctctagacctgctactgctgaactcggtcattcagggacagtgaatgcagtgtcgtttaggctatatgctgcagacttattcacctcatatttcagacttcagacttaactgtatctatataaatagtgcagtttgcactcatatttcagacttcagacttcactgtatctatatagatagtgcagtttgcaatgcaaaaaaatgtatgctcagagtctacgagctcagcttgcaaagaa

SEQ ID NO: 40335 - DNA, 1026 bp, Zea Mays
aacccggaggtgggactgggaggcaccgtgtcgtcgtcgtcccctttcccttctctactccgccgccgctcgctcgccggtgaagagcaaatgctgctgctgttacggcagcggctctgttggcgccgcgtatctccgacttacctcgcgcctttgtaggatctgtggagactcgtgagtacgtgacccccacggtggatgaggataggcgggcctcgtccggcagcctgtgctctctgggacgggaggcagagctggcaccagggttatgtccactgtccaccttcgaatgttgacattacattacatgtctacactttcaaatttaagagagagcacgaattgaggccggcccaggtgaacgctgctgaagctgctgctcaattaaaactaggggaacagatggggatgaagcgcgagcaagaaagaaagaaaggctgcacaactggcactgtccactttctgaagggcctggagaacttgtgccaaaagtaacaatggaagtttgttcatgggattgagttgacacagggcttagggagcccactgactggagacacttagcttggaggcctgttcatgaagaaagatatcgagaaagacgtcgaacatgaaatggaggacagcgtgtcaacctaccagaatgctgatgtcggggaaggagagatcagctgctgtcaatagtgtacctctctctattccaactgtgaacctgggattctatgatcatgtgcgtgctatgtaacctatgctgccactgtgcaacgtcacaagtcagcacatgctgcacgcctgcactaggatgtctagcgtatgctggacagctggagtacaatagttgggcgttgctgtctgtttttgtggttgtcatgtacagatgtgctagtgctaatgtatgttgtaggtgttccaggtctatgtaaactggacattctgtaaagaaggtaaaaaaaacaaagaatagtgagatatccatctatactatagttattatgtatcaatgtatgtgtttagagaaagatgttt

SEQ ID NO: 40336 - DNA, 3965 bp, Zea Mays
gcgcggacgctcccgtccccatcgcgacccgtgcgccgggtccacgctgaaccctttcaccggggcggcgaaagatatcagccgcgacgccgacgggctcgagcgccggtgagcgctcgcgcacccgggccaataaactggcaccggctcctcctctcgcgtcgcagagcctagcctcgggatgacgtggcgtaccacaacaccaccacacctcactcagccctgcgggtctccgaccaaccatttctagaagcctccaaaccctagcgcaggaggaagaggagttaggaggagctccagggatggcgaaggcgaggaagcagaagggtgacggtgccagtacgggaggaggcgccaccgtgctccaccagaagctctgcctctccatcgacatggagaaccagctgatctacgggtacactgagataaaagttctagctgaaaacaacagatttgctctacatgctgacaatatgacgattcagagcatttgatggatggtgcaactgttgagtttgactattcccctcattggaaaaatgaaagtgatcaaccgaattggtcttcagtatcatgtttgaagactgctgctgatgctgcatgttcaatgtatactttgtctctaaatcgagaagctacaccaaatcttattgtgtcatctgagagatcagtcaagtcaatgactgaacagcagttagatgaaaacagtgaaaagcatgaagaaaatagtggaaggcttgaagaacatggtggaaatcctgttcaaacttcctatgatcaaattgttaatggctgcagtggaagagggaatagaaaattctgcagtggaagaaggaaaggaaaaggaaaatgataaggaaaaagaagaggaaaatggaaatgagaagagcaaggaaactggaaatgagactgaatatgaaaaggtgaagaacataaaactggttcacatagattatattttggagaaggctgaaactggcgttcagttcgttggcaatgtcatgcgtagcagtagtcagacaaggcgggcacactgttggtttccttgtgttgatagtgccacagaacgctgtccatttgacctagaatttacagttagcatggatttcattgctgtcagcaatggtgacttgctttaccagttagtccacagtggatatccttggttgttggcccacttgaagttcttcctgacagaatcacagaaatgacataaatgtctcacacatatgtttattccctgctttggcaaagcttcagaacactattgcatttttccacaatgcatacaggtgctgatcaatcttttttttttctgtgaaaagtgcttagattggtgttgattttattagtatctcaataagcttattttttaattgatttctgaaatttgcatttcttttgcagctgttatgaagactatctttctgcaccatttcccttaggtttatacaatcacatttttcttccatctgaaatgacaatattaccagcaagcttaggagcctccacatgcatcctcagttctgatatcttgcatgatgagaaagttatatagatcagataattggcacaagaacgaaactggcttatgcccttgcaaagcaatggtttggaatatacacaagtgcagaggagtccagtgacggctaactgctcagtatgtgaatctgatgttagtggtgcaactgctttgagctctactgctgcttcaagtgatttatatggaactcaagcaatcggttcatatgggaaagttcgttcattgaaagctgtagctgttttcaaatgttggagaagcagatgggaccagactcatttcggaagattttgcaggtgatagtggctccaagtcgtgcataaaatctaggcatgagcttcctagcctctcttctcaagcaaattgatcggttcttgcaatttgacaactttatgcctggttataatggggtcttgactgtcagctgcattcgtacccttgtacgaatagcaaagaaggatcacatttttgaattggttgcccctttccgcaacatggacaaaccatggaaagttcgaattgaagctagcaggattcttattgatcttgagttacaccataaaggactcgatgcagctcttttgttgttcttgaaatatgtggacgaagaaaagtctttgcgaggttggattgctagagtactttttgatggttttgtatgctttgctatcttttgacatggaagctgttgaaggagcgacaaagttggctgttcatgtcttgcgtatatgtcaaacaagtattgttcctcacgccaatgatcaaataaattttggcaactctagttaggggtggtaacgggccatttaatttagcctagcaaatttacggatcgaatcaagttagggccggatcataaaacaatacaattttgaactaacaaaattaagggctttgttggtttgtgaagcaagtattagggtcatgatccattaccacccctaactctagttggtcttcttcatctgcttgctggcacaaaggcatacaataacatatttcttcgtcatcaagtgttctgcatattgcaagttgctgctggaaggtccccaacgttatttggtgttccaaaggtcctcacaccccctctggtggtcaactacatcttcagtgatcaacacactaaagatgattcctcaattcctcaaccatcatagtctcaggaaccttccactagcactcctagtgtccgggaggtcttaccgacctctggacccactcaagatgctgataattatcttactgcagtgaaagaaggaatgtggtcaaaattagggtgaagcttactgcatcttccagtaaagcatctgatgctgaccatagaggccattctgatggcgcaagaaatgaaaatgaaccgggtcaatgcagctcaatgtcaatggatgcccccatggctggagcagcaaatgaaccattaaatgtaagcaatcataacattgaggaacaaaactcatgtcacgaccttggatcaaggatgtcggcaagtgttagcaatgctaaactaatggacagacatgatatttccaaggagctacagtgcactgctgattccaggctggatactgttcccaaggatcagttctctcctgccattaatccgccggaagttttagacaaacctggcagtcagcttgaaggtgtctccaactatgatgtaaaccaagctccagagactgaacggagtggaaacagaagagagagaaaaaaacaagaaagataaaaagctgaaacgtgacgaaaaactagataaaaaaatatgacccagagtatctagagaaaagctccttaataagaaggaaaagaaagagttggccagaaagcagctagaaggtgaagagctacccctgaacagcggagagcagtgaacccttcaggttcacaggaagttttgccttcaaggccaccagctccagttctaagtgttgaaacacctgttcgaatctctgaaccccaggtatcaagcaaggaaacagctgtagatactgcacgtgcagcagccaaaccaaggataaagatcagagtcaagcccttggtaagaaaatctgaagggaattaaaaaagattgtagaattgtggccagtctgccatcatttgtaaggattactgtacagcaggaaaaatgcgggtttagttattttgtgaatggctgatgtatcctgtaaaaaaacattgctctgctctagtaatttctggggtaatcgaaatctgagttctagggtagtccatattttctgctgcagttgctttagtatctcagcgcttattatctcacaggttttaagtgtttgttcgatttgctgggcctaaaactaaaactgaaggatcgctgtgctcaatttgtagctgttgatgcattcatttcagatttgaggaggcttgacggaattaactgctgagcttgctcaaacatttttatgacgct

SEQ ID NO: 40337 - DNA, 354 bp, Zea Mays
cgcctgacgcccggacagagcatccacccgtcaccggcgtcggttgtggcggggtggttgggccgttgacgcccgacggtgcccagcgagctgcgcaccaaattagttacgtgaatggcccgggagtcaggaagtccgtgagcgccgacaaaatttcgcttcagtggttaggccgttagggagatcatgatgaggaatcgacgaagactaacaaaggcaacgatgcccgctagaaatccagaatctgaatcaaggtatgcaagtgctggaataccaaccagcttaaatttagatcgctctttttaaagcagcatataaaacgatactttgtgcggaataaaaattcgatgagga

SEQ ID NO: 40338 - DNA, 2079 bp, Zea Mays
gggaaaaaaaatgcacgtcgattggcggtagcctgcctaaccatggcggcgggcgtcctgttcatcatccttggcttcctcctggtgctgccgtcagcaacggcaatagggcaggtctgcggcaacgccggcaactacacggccaacagcacctaccagtccaacctggcctctctcgccgccgcgctcccagccaacacctctacctctccccaactgttcgccaccgccaccgccggccaatcccccgacgcggtctacgcgctcgcgctctgccgcggcgacaccgccagcagcagcaacctcaccgggtgcgccgcctgcgtcaagaactcgttcgcctacgcgcagaggacgtgcccccacgccaaggccgccagcgtgtacgacgacgactgcctcctcggcttctccagcagcgacatcctcatccccgccaacaacatgagcacgctgttccagtactggaacccggcgagcatccccggcggcgacgcctccatggtgagcgccgacgtgaaggacctgctgacgcagaccgctagggcggcggccagcagcccgcggaggttcgccaccgccttcatggacgcatccggcagctccatcccgacgctctactcgctggcccagtgcacgcccgacctgtccgctggcgactgcctggcctgcctccagcggctcgtcagcctgctcaacgccaccacgtccgtgcgcctgggcgggcgggtcctcgtgctgcgctgcaacttcaggttcgagaacatgatgttctacgacggcgcgcccacgacgcgcgtcaccacgccctcgtcgtcagggcccccggcgccaccgtttccggcgccgacgacgacggataagagagctgctgggacgaagccctgggtagttgccgtgtctgtactctgtagcacctcctctagcggtagtagcagcactctgcttcgtcttgtactgccgctggcgaagcagaaggtacacaaaaggtaggcctagattactacgaaagcctacttataacagctcgcgagggggagacgaagtagactgggaaatggaggcgcacctctccgagttttgggtctttgacttgcatcagatattggaggccacagacaacttctccgaagaaaataagcttggcgaaggtgggtttggccccgtctacaagggccagttgcccgagggggttgagatagctgtcaaaagactcgcttcacattcaggacaaggtttcgtagagttcaaaaacgaggtgcagctcatagcaaagctccagcacaggaatctggtccggcacctgggatgttgctcgcaggaggaggagaagattctggtctacgaatacttgccaaacaaaagcctggacttgtttatctttgcagacgaagacagaagatcgttgctggactggaacaaccgtctggcgataatcgaaggaacggcagaggggcttctctacctacacaagcactcccggctgcgtgtcatacaccgagatcttaaaccgagcaacatcctcttggacagcgagatgaaccctaagatctcggacttcgggctagcaaagatattcagctccaacgacgtcagcagcgaaggaggcaccactacacggagagtggtcggtacatacttcggcgtcctcgttcttgagatcatcagtgggaaaaggaattccggcatccatgagtgcggagatttcatcaatatccttggatatgagaatgcggctgatcgaccaaccatgttggatgttgttgccatgctgagtaccaagactaaggtcctggataagccgaaccacccggcgtatttcaatgtgcgggtagggaacgaagaggcgtccactactgctactactatgtcgtgcagtgtgtcgatgagataatataatgtatccatatatagtttgtgttttcaaggctgccatatcaatatttatttatctacataatataatgtatccatactttcatcctatctctctcatatatttttttattaaattgcatgtcatgtcatcctgtatatttatgtgacatactatttaatgagaatggtatatatatatat

SEQ ID NO: 40339 - DNA, 4640 bp, Zea Mays
cttgaaatgtggcaggagctcctgtaagtccgaatggcatcaccttatactcataatgtccattatgggtctgaaatgccgttttgaactcctctccctcctgaattcggatttggtgataacccgctctgtggtccaatttggtaaagatagctgccccactcaactcatcagttatctcatcaaaaactggcataggaaacttgtttttcaccgtataagcatttaacttcctgtaatccacacataatctccattcaccatctttcttcttgacaagcagcacaggtgatgagaaagggcttgaactttgttgtataattccattactcagcatctcctttatctgtttttcaatttcatccttctgttgtggggtgtatctatagggtcgaagcctgaaaggtgtggctcctggtagcagaggtatggagtggtcatacattctttttggaggcaatccttgtggcggcagaaataactcctgatagtgctccaacagtttggatatctgctctggtattgcactaccctccaatgcttctgttggtctgagctcaaacatgtgttccacagcctctttacttaacagacccctcaactgcttgtcagacaaaggaatacaggaatctagttttggttgaattccttgcagctgcactgtctgcccttgatgacagaattctaacttcttttctgcccagtacacagacatgggactataaccttccagccaatccattcccaaaataatatcatagccactcaggggtaagaatttgaaatctgtatgaaaagtaatacccccacacaaccaaggacactggggtgcccagcagtcacaccacagtttcctaccatcagccactttaactggtaaaggtttaggcaattgttgtacattcttgacatctcccatcaaatgcagactcataaaactagctgaacttccagaatccaccagcaccaacatctgtttgtggtgtattgaagcccacaacctgatagttttgttggtttcactgccactcgcagctgctattgatacagctaacaccacctcctcatcctctggtgccacctgactctcacttccatcgacttcaatttctcctaccgcctgagaggtaatcgcccacatttcttccacaacatgtaatggcacactactggaacatgtatgatttgggttccatctttctccgcacttgaaacacaacccctttgctcttcgataagccttgagagcagcaagtttactatcctcagctctgtaactactatttgctcttcgcctctcatcactttggggtaatcctctatggctcaccactggaactgaactaccagccactacggaattcttttggtaacctttggacattccctggttctcaattctcctaccctctcttctacctgtccacacatcctcatgtaataaagctagggaacaagctgtatcgagattgttaggtctctgcatggccaccacagccctcacctcatccttcaagccatccacaaagcgtgctgtgatcatagccgacgtaagttgtccttcatgagctagcagttgatgaagtaacacatcaaactgttcaacatattcacttacagacccagtctgataaatatgatagaactgcctaatcaacaatccatgttgatctcttccgaaacggttaatcaggttagagcaaaactcctcccaactcatatgcctcaggtgatgctccacagactgtaaccaaaatattgccgatccttcaaaatgcatcacggccattctgatccacatctccctggctaccagatagaactcaaaataggtctcacatcgagtcttccacagcttcggattactcccatcaaaaactggaaaatccatgttgggcaccaatgatcctgacccttgtgaccaccctccaggcgaatttctatctactggatcataacgaaaaggagtttgggaccaggcttggttcatacctccatagttggtaaaatttcgccctccttccatgcctggacgccgattcggatcggggcgtcgaagctggtttactccactcgcagaatccaccatcggaggttcagatgatagagcttccactttactgcctccaccagtctcgccaaaactggttggcactcccaccggcctcttctcaaacttctccacctggatttggattccccgcatggtgtctgcaatctccttcatcttcgactcgacctccggcctccacttctgcagatctccctgctccgacatcacgcccttcaccactgtctccatgttccccagagcgccctgcatcaactccatccgccgatgagtctccctgtttccctcttcaatcttcgccaacaactgcgccaatggatcctccgtcttcgccggcgccatctcactcgccctcgcctggaatctcgtccaatattcgtggtggtgctccagagtcggctccgaataccaaatgttagacaacagccggtattctcctgaaccctgtatgcttcgtgttatttcagagttcagaacagagttctctccaggttcgtcaccgtttccagccgcttacaggagtatatatatatctccactctctttccccttttacaagacaagcataatctctagttaactactccactcaggtccaccaatcctgacattaggcctaatcactctgtggctgcgtcttctgggtcccacctccaccggccctggttctcctttctcccgctcagtgcacggaccgccagtgatgctgacaccagccgtcttcacacgagcgccaaagtcttggtgagtccctggtgctccatgtgtctcgaatttaaactctaccatacggtggccgcgcgcgtgatcgggctcgccagcctaagctttcggtcgctgtcctagatagtgttgtcctcgggttcccacgggaaaattaagcgtgtgcctgaacttgccatagatttggggtcgcgatagcgtcgtcgcagtcgtctgtgacgagttgccatggccgatcgagcggaggctcgtcagagttgtacgcagcggggtcggggttaaggttttgcaaaagaaagatagtcgagggacctaagtgaaactgtcagcgagacaaataaatagtggatcgggtcgatacaggtttagtcagaacacggggtcctttttgcaaagacgccagtgtgggcgcgcgggccatcgaccacatgccggtttggtcgggttctgggccggttggattgcttttggcccagaactgttcaccgctttaccttttcttttatccgtgagtttgtaaatagtgccaaaaatagaagaaaattgataaatcaatgggacaaattttattggatgtgttaaatcaagatctctggtgaagttggttgtaggatttttagagatgtcagtaaatattaagtgaattaagggtgatcttcgaaggactattggaattttagaaataagagttgagcaccaaaaatcatgattttttttggagaagcttgttatcagaagttgaacccttggaaaaaattggactatttaaatatgatttgcttagcaagctaattattgccctaaaaagaaaaaggacttcacctatgaaatgaggacacctagtagtttagtgaagtgataaagttgcttaaagagttttaagcttttggataataactaagatggattagttctctaggtttacctaagcaagttcaatttggtcacttttatcaagtgttaagttaggtagaaatatgtgtattgttgtcatatgttttagtttgtgatatttatgttcctcgcctctccttgtgagagtttgcattccatatcattacataagcatacatgtatttgtaattgacttgtaaaacacctagaagaagtggtgtttgaaggaggagtctactccagtggctgctgatcaagtggaggagccatctaactgggtattggatagagggatctgaagcctcttctctgcaacaaaagcaagccccggtgcattcaccccttacttgtatttttaaaaagacttttatacacttaagtctagtgaaatgtgcattaagtttataggaattgcttggaaactatttgatgcatcgattaccttgatatccattgctgttatagatacttctttggaagtatcaaatattgtttacaaaaatgcttagcctgcttagatcttgtggatagaggttgtcttatgcaataatgcctagctcaggggttatcctgaggaaggatggcttctacctgcaagaatatttttgttgggagcatggtgggatcttactgcaaagttccctataatgctcttttcatctttaggaacacaaaacaatcctaaaggtggaagtacttaactcgagacttgggctaggaacaggtaggggtgggcgttcgggttacccgaaattttcgggtcgggtaattcgggtttttaaaatttcgggttttgagaatcgatacccgaaattacaacgagtttttcaatacccgaaaattcgggtacccgaaatttcgggttcggttcgggtattcccgaactacccgaactattgtgttggcttcataaaaacacataaactctattaaattagtataaaaaatatag

SEQ ID NO: 40340 - DNA, 7737 bp, Zea Mays
cgcaacgtcgtgccccacaggtagctgacggatccgtgggcccggcatatgccacacagccacagcaacgaactgcgggagctttacgctcgaaaagccgcgagccttcgttcgtccccgtcaacgtcgcgtttcctctttttcccggttccccgatcccctccgcgttttcctccaccacaccaccacttccctcgccgccactcgcgttcccgcccccaaggattacaccgtggcatctcgctacagccgccgctgatgcatctctccttccatccccctgctccgtcgcatctccctcgccggggcggcgtcgcaccaaccacaaccccatccttcgtcctccggaggaaccagcggaggcggcgccaccaccaccgcccgtaccgcctagccccccgcgcctctctctcagacctcatcgccaacctcccctcctccctcgcgctcgtaggtcccgcggcgctcgcggctgcggccgcggtcgccacctctttctcctcctggtcctcctcgtcccagaccagcctcccgccgccgccccaggaatccgaggactacaacgcgtgcggggatgtcgcgggcgagtgggttctcttcaccagcccggcgccattcaaccgctgcgtgctgctgcgttgcccgtccgtgtctttcgaggacgggctcgacggcgtcaacgagcgcctcctcaccgaggagcggcactacgtgaatctgagcaggggctgcatccccgtggtgcgcggcggggacggtgcctatgatatctcttaccagaggatttgcatcgccctggaggacggtggggtgatcgcgctcgattggcctgataatttgtacttggacaaagagcatggactggattccacggtgcttatggtgcctggtacgcacgaggggagcatggagaggaacattaaggtgttcgtgttagatgcactgaacaacgggtactttcctattgtaatgaaccccagagggtgcggcggctccccggtcactaccccaaggttatttacagcagctgacagtgatgatatctgcacagtggtacagtttataaacagcaagagaccttggacaacactaatgggtgttggatggggctatggggcaaatatgcttacaaagtacctcgtggaagttggagagtcgactcctcttactgctgctgtttgtattgacaacccttttgatatagaagaagcaacgagatcatttcctcatcatataactcttgatgaaaagctcacagctggcctggttgatattttgcgttctaataaggaactctttcaaggtaaagctaaaggtttcaatgttcaaaaggctttatcagccagttgtttgcgtgacttcgatgttgctatatccatggtttcacatgggttcgatactcttcatgacttctatgctgaaattagtacaaggctgtcagttgcccatgttagaatacctctactttttatacagagtgatgatgggactgtgccgcttcttgcagtgccccgcagttcaatatcagaaaatcctttcacaagccttctcttttgttcttgtgtacactccactatgtccatgtttcagagatacagtgtgttatggtgccagaaccttgccttagagtggttatcagcagttgagtttgctcttctgaagggtcgccatccacttatcaaagatgtggacatcacaattaacccgtccaaaggtctagcatttgttgaacctcaagtgaatcaaaggaaatctccaaaaggaaatagttttcgtcaacattctgagcttattttgtataataatgttgcacatggaataaatggactgctagttgattctgcaaataagtactctggtgctcaaaacaaagaaaatgggcagttgaataataatggtgacataggaactgtagacaaagatctggaagaagagttagaagagagttctgaagatgttgagaaaggtcaggcactacaatcagcaagtcttgtgatgaatatgctagatgctacaatgcctggcactctcaatgatgatcagaagaagaaggttctggtagctgtggagcaaggggagactcttgtgaaggctctagaagaagctgtacctgaagacgtgcgcggaaaacttacagcttctgtaactgaaattttacattccaaacgagaaactttcagtttaggtgcattgaatcgacttggctggaacaatgtaagaccaaccactaccaagacattggcccaggaaaagctcaaagattcagatcatgaaagcgggcttaaggataccaaaatggttgatcagaacaggatttctgcaaccgcttttgagggggatctgaaagacattaatatgacaaatgatgataaacctggagaaagcatcgaatcgtcacagggaaagccttctcaaacttctgaacctgttggaacagcgacagaaattggaactgaacagccttataaatcagataaagctaattatggaaccaatgatagcagtgaagggcagcatataacagaacaggacaatgaaatgactccaaagcaagtttctgatgatcagtcagtggccaactgtaatgggccttctaaagaaagggagcaatcagcagatgctacaacagaccagaatctacaatctaacacaacaacagaaaaggaaggtgacacaagtcgcacaggtgaagataagactgctcataatgtgaatgatcaaagcacacaagtctctaaaacagaagaatcaaaaccttcccccattactgtgacccaggcattagatgcattaactgggtttgatgactcgactcaaatggctgtcaacagtgtttttggagttcttgaaaatatgattgatcagtttgagaaacaacaggactctgagaatggtgaaagtgctgatggaaatgatggtatcacttccgtggatgagacagaatctcatgtgaaagagaatacagagaatgtgtcaagtggagaagatataaaccactcatctaaacaaccagaaggtagcagtcctggaaaaactgattcaatcatgtccaaatatgattgtgcttttggtgaggaaaatcccaatttaagcattgtttcatatggtagaggaaaaatgagatattaccgaggaaacaaagttggtgatcatgtgggtgctgatggtatcgagcgagtcagtggcttgcctgactatttattagatatagctgtcaactcttacttgaaggcgcaatatgcaatgtatcttcgtgaatttctttacacagaattgcaactcaaatcaccagagtctaattcagcaactgatcttttccttgatccacaagagggtaaatggaaaattgaagaacagatgggcaatgtgcaaaatgacaattttgaatcctcacaagagtcatctaagatggacaatgctattgagccaccctactttataccaggaaaaaatccagacatcgcatacaagtccaataaatggaataatacagtagcaaccaggtcaaaacctggtaatgatttgaacgaggcacttacacactttgttagagatgaactatcaagtgcccttaaaattgaagttggtcgcaaaatagggataacagatactaagcaacttgaaaggagtcttgcaaatgatgtagaacagattgctgctgaagtttctaaaactgttgtccttgactgtgagttgtattcagccatacatgtgcaaagaagtccaacaactatcaagtttggttcaacacatggaaaaaatgttgttgaagctgtgtcgactgcagttcagcaatctcagcatctgaggaatattcttcctgtcggtgtcatagttggtgtaactttggcatgtttgagaaattacttccatgttggtgtctctaagcatggtgaccatatgatagccactatgaagtcagatatttttggtgaggaagttattgttcaggacagcagcaaagagaatgttcaggatagtggaaaagcaaatacaaacgataataatattgaaaaaaccagtggggagaaccagcaggatatgacgaagtcacagggtcaagatatgatggtcggggctgtgacggctgccctaggtgcttctgctttggtagcacatcaacaaaataaggatgaaaattgcaaggattttgttgagatagaaggtgccaaacatgaggaaactgcacaggaaaagagccagaacagtttgatgagcagttttgctgagaaagccatgtctgtggcaggacctgtagttcccacaaagggtgatggtgaggttgatcatgaaaggcttgttgcagttctagctgaactcggacaaaagggtgggtttttgaggttcattggaaaaattgctctactctggggcggaattcgtggtgctatgagcttaactgataggcttatctcattcttacgtatcagtgagcggcccttatttcagaggattatgggattttctttaatggttctcatcctatggtcccctgttgtgattcctctactgccaacgcttgttcaaagttggacaataagtgcttcaacggggattatcggatatgcttgcattgttggattgtacatttctataatgatacttgtcatgctgtggggcaaaaggatacgtggctatgaggatccagttgagcaatatgggatgaatatttggtcggcgtctaggctgcgagagttttttcaaggtttggttggaggcgtaacggtcgtagggttggtgcactcgataagcattctactcggttttgcagcgtttcggacagggttctcttcatctttagctagaccccttgatcttctcaagtcttctagtaatgtgtttctgctagctcttcgagggcttgccacagcaactagcattgctgttgtggaagaaatggttttcagatcatggcttccagaggaaattgcagttgatcttggttactacaatgccattctgatatctggacttgtgttttctctaattcatcggtcactaccctcagtaccaggtttcttgctactttctctggtactttttgggcttaggcagaggacacaaggaaagcttgctgcacccattggcctacgttctggaatcatgactgccagttatttaatacaaagcagtggtgttttaacatccaaacctgaaacaccgttttggatgattagcacttaccatctgcatccttttgatggtgttatcggcttaagtatctgctccttgcttgctatctttttcttccctcaaaagcctgttcagaaggatacatctgtgtgatgaggctcagaagagtaaaacataatgctggagtgagcttccaacaaggactaatcaccatgcgtatgctgcgagcaatgaagggtttttcctaccatacatgttaaaatgcaatgccctgcaacttgctggcagcaaagagtatgtgctcggttagcttcttgctcatctgactgagggtactgctgattggaatggcttttggatctataactagagtatccaggtcatttgtacttaggcaagtgtgtatactactctatactggattatcgaaatgggggatggtttcttccctacgttgtaaggtggcggaggaacagatgatatgcctaggaagaggaactagtagatgataagagtttgcccctgatattaggcttcctctgaaatgcaggaattctagaggaatatacaggaatttcacaggaatcagtccattctcacagaaaaaatgcaggaaactgaaaaaaaatccccgcattccaaagggggcatcatctaggatttcttcataccgaattatcgattgacttcgaccacataccgtgcttttgttcatgtctttgaacacaggcacacccaaatttcgaggtttacaaggaaaatcgccaggcagtaaaccttcaatgcttttggctaggttttcattctgaaagtcatgtcttccgcgtcagcataatcctgtattcctgtataacctctgttcggacttcgtagtgctcatctgagttctgattcggccgggcaactgtaaattctgtagtgttcgagaaaaaactgtaaattctgtaatattgccaagaattatgaatttacatgaactttacaggtataagttgcccgcctcacttcaccggctcaccgtgcttcacctgctatcttccatggcggcggctcacctcttctgctccgcaccggccgcctatcgcgccgcgaacccacggccccttgctacccgtggccgcgccaaccccgccacgggaacgtatctggtgctcaaaggggtatggtgctcatgtgcacatttcccccgggccacaccatcgagaagattcttcccctgccgcgcgtcgctcagccccgatggatcgctggccatgctcggggctcccagtcccaggatggcgccaccgatgaggaagccgtacatgcgggagcactcttgcctcatcttcccgcccccgcgcggtcgacgcccgctggcggtcatcaagttcctcggcggcgccttcatcggcgccgtccccgaggtcacctacggctacctgctggagctcctggcgctggagggctttgtggtcgtgtgcgtaccatacaacgtcaccttcgaccacgaggccgccgcgcgggaggtattccagagtttccatgcctgctacgacgcgctgctcgcgtcggggctcccggaggccggcctcagcgccctggacatcgcggagctcccgctctactctgttggccacagcaacggggcactgcttcagctgctagtgggaagctacttctcagaaaggataccagaggctaatgccattgtctcattcaacaataggccggcatcggaggctgtgccttactttgaacaggttgtgggatattctgcaaggggtgcatctctcccctgaagtagatgatcaacatatttggaccccctcggcttctggtgtttattctgctaaatctgcttatgacagattgttagtgggtgctaccagttttgatccgacaaaacgtatatggaaatgttgggcgcctcctaggtgcaattattttcctctggttggcttctttaagccgatgttggacagcggaccgtcttgcaaggcatggtttggatcatccggagtactgccccctatgtgaccaggaaaaggaaacagtgcaacatctcctagtggcttgtgttgttgcttgacaagtgtgttttttccatcctgggtttgagtggcctccaactcctcactcctgggattgctgatgaagtattccaagattggtggaaagcagctgaagcaagagtttgtaaggagaagaaaaaaggctttaactcgctggtggcgctttcttcttggaggatttggaaacatcgaaatgcttgtgtctttgatggggtgcccccaagtgtatctaaagtcattcaggacattaaggaggaggccagaatatggtgcttggcgggtgctgctggcatggttcttaggcgataaggcaagataaggcgttggaccaccgcctagacgcctatcttttccaatacagacatctatcagtccagattaaagtggcagtggcaccaatactcaagccaacatctaatcgataagagggccactatcagccaaaaagggaaaacagaataatacttcttttctaagcatccaacaaacaatttgtgtttaaagctgattttggtctaattgtgctttcctactggcctttggaagttac

SEQ ID NO: 40341 - DNA, 1736 bp, Zea Mays
tttttgctcaataacagacccacgggtagaatatttagcccacatatatatcctaacggagtaaataccatcgggtatcgggtcgtgggtacccattgccatctctactccaatcccacgggacaacaaaccctaaatcctcacatcctctcctcactccctcccatctagcggcggccgggcggcgcctccgcacgctgccggcgttgtgcctcgcctctacgcggctccatcagtcctgcgtggccgtcgagtagatctccgtcacaggcgcgagctcatcaccgtccaggcaagcgcgctctagctcccaagccgcgcgctccaggccgcacgtcatccaggtgtcgagctccaggtcgcgccacgccgcgcgccgtctaggcgtcgagctccaggccgcgccacgcctcgcgctccaggccgtgcgctgtccaggcgtccagctccctaggccgcgcgctccagcgtccagacacgccacgcgctccaggccgcgcgccgtccaggcgtcgagttccaggccgcgcgctccagcggtccagccatatcgccctcagcgtctcagccacatcacgtcgaggcgtccagtggctccagcgtctcagcgtatgataagccatgggatatttgttctcataatgaaggaaacaactcagacggggttgattggttggaagataaatcgggtggtgatgtcggcaagaacaaatcagattacactgaaggcggaggtagtggtagtagaccttggtgccagtgcgtctgctcctgctagggctgcgcccagtcttccacaattgatccatattcgtctgagatcaattagaaaaaggaagccaatacataagagtgtctatgatctatgaaagaatgaaagagaggaaagcacaattttactctggatgtgctattacgtaaacctggacgtgctagttatatgtcgtggtagcccacgaccgacggcatcaaaggtgcattgctactctattggggacggtacaacaagcttacgcgacagttgtcaagtggcgcaggcccgataaagctctcacttgaagagataaaaaaagaacttgaatcgggtaaatacgaatgtatgttgcaatatttggatcagctcacacatatatttgtaacgtgtgatgagcataagtcaccatcagtagctgcgtattgtgccaatattagatgtgggaacttaagtagtgcaagtactgggaagcgcaacattgacgagacctcttccagccatgttcggcagaagagctcgaaagttcatgtggctcagtcattacaaaatggcatgacccacgaggatgcaatgcaatttcttaaagaccatgacatcttaggtggtactttaaaattttgtatagccaataagttacttaaagactatcaaaatctgagtacgttctcccgtctggaatcccttgaggaaaggatcagtttcctggaaggaacctggaaattagaatctgatgggtcagtttcctggcagtaacctggaaattagaatctgatccctcttccttaaaggtaagccagtttgtttaggtcttctgtagtcatgtcagttatttatcttgttcttgtgtttttttgctagtctagtctgaccttgatatctaaggggccagctaaaagcaaatacatgtcatggagactgcattcagccttggtttctttctgtctaccttttgaaagtaatgatgactgtatattgctttctg

SEQ ID NO: 40342 - DNA, 1448 bp, Zea Mays
cttcctttacccccacagcttgcgtggtctgtggtctcatctcactcacactcactctctctctcggcgacgtctacgccgagtgcccaggcattcttcaggcgcaggtcgctgccgccctacgccaggtgccccggtcttctttcgtcccttcgccggcgacgaccaccgccaggacagtatagcggatggcttcgtcggtgcgggcgccatcggggtcggtgatcgccgtggcatcgtcctcttcctcagcagccttggccggggtgtgcggcacgggctcgccgtgcgccgcgtgcaagttcctgcgtcgcaagtgccagccggactgcgtgttcgcgccctacttcccaccggacaacccgcagaagttcgtgcgcgtgcaccgcgtcttcggcgcgagcaacgtgaccaagctgatgaacgaaatccacccgttgcagcgcgaggacgccatgaactcgctcgcctacgaggccgacatgcgaattcgcgaccccgtctacggctgcgtgggcgtcatctccatcctccagcacaacctacggcagctccagcaggacctcgcccgcgccaagtacgagctctccaagtaccaggcggcagcggcggcagcatccgcgtcgacggcgccgaccgggccgcaggcgatggcagagttcatcggcagcgcgatgccgaacggcgccgcgcacaacttcatcaaccttggacactcggcggcgctcggctccctcggaggctccaccgccatgttcgggcagcaggagcagttcggcagcaacgcgcagatgctgtccaggagctacgacggcggcgagcccatcgcgaggatagggatgaacaacggcggctacgagttcggttactcgagcgcgacgacgatgggcgggtctgcaggcgctgtctctggcggcctcgggacgctcggcatcagcagcccgccgttcttgaagtctggaaccgccggcggcgacgagaagcccagcggcggttactgacgcgatgaagaaacggggaggaaaaaaatatccatgaaacgcgtgcaaggacttatcctagacgtccgccgttgtcaggagggggctaatttccagacgattttacatggaaaaagtgcgtcgcttgcgtgcgtgcgtgcttgcttttgttgctagattcattgcttgtttgttaattaccacgctatctaccctccccatccacatcatccacgagatcgtcagatattccatgccagcgtccacagagtggcctatgttcttgttattagttgctgtactgcgaagggagggggacaaaatgcatgcttgtccggcccggacctttttttttaccccactcggaagactagcgcccatttgtactccatgtattattgctaggttggctgtaatatatgaagttgaccttttgagaagaggtgcagttgcttatgaagacccccc

SEQ ID NO: 40343 - DNA, 222 bp, Zea Mays
tgggtacctaaaatcaagaactaaatttgttttgttggtttatgcattcgggggctcaagttggatcatcgatagcgggtgcacaaaccacatgacaggggagaagaagatgttctcctcctatgagaaaaccaagacccccaacgagctataacattcggggatggaaatcaaggtttggtcaaaggattgggtaagattgctatatctcttgaccattct

SEQ ID NO: 40344 - DNA, 5595 bp, Zea Mays
cgacagcttgctctcgcccctgccttctcctctcctctgggtgttcccggcggtttcttcgccgctcaagccgcctccactctccctgccgcgctagcaactacgtttcggacttccccgctcgactttcgacctcccctgccgccaacaccgcccaaccgccgtcctccaccaccctcggccggcggcgccccgccttgccggaggcggagcagacgacgcgtggcagccgattccgcgatggatgcatccactgccggcgatggagacacgaatactttgaagaggccatgcaaaacatcgcctccagaaggcgaaacagacaagtataaacggcagaagagggaatgccaggatttctctcccagaaggtaccagcttgatgtctatgaggttgctacgaggcacaacacaattgcgatgcttgacacgggagctgggaagacaatgattgctgtcatgctcatcaagcattttgggaagatcaacaaagcaaacaatgatcgaaagctcatcatattccttgcaccaactgttcaactcgtcacacagcaatgcgaggttattaagagctacactgattttgaggtggagcattatcatggtgcaaagggtgttgatcaatggaaggctcatagctggcaacagcaactcttaaagtatcaggttatggtcatgacaccacaggtgttgctagacgctttacgccaagctttcttgatcttggacatggttagtctcatgatatttgatgaatgccatcacgcaactggtaaccacccatatactaggataatgaaggagttctatcatggatcagagcataagccaaatgtgttcggtatgacagcctctcctatcataagaaaaggggtctcctctgatttggattgcaaaaatcagctatctgagctggaaaatattttagattccaagatacactctgtggtggatagagaagagatagaactttgtgttccttctgcaaaagaagtgaatagatactatgagccaagaactgtttcttttgacgatttaagtgaagaactggaaattttgtgttccaagtatgatgggctgatcatacaattgcataacagatcgaccaatcagtacaaagatgctgatgaaataacaaaagaatcacggaaacgtctctcaaattctttagcaaagatttgctattgcctagaagatgctggtcttctttgtgctagtgaggctactaaaatctgcattgaaaggggccagagaaaaggttggctgaaggggggcagtgacaccactgatcagcaaagtggtcaaaatggacctatcctgtttgcagaaatttcaatgcttcatatggagttttttcaggaagtgttggatataatcggcaaacgcgtccaacagcaacaaggaattgatgcccttctgaactcagagcgtggatgtgtggaagcaaaaaatatgggctatatttcaccaaagctctatgagctcatgcaagtatttctctctttcagtgaccctgataacgttagatgccttgtttttgtggatcgaaagattagtgctagagtcattgagcggacgatgaagaaaataggccaactctcctgtttcagagtctcttttctaactggagggagttcttcagtggatgcactcacccctaaaatgcaaaaggatacactggattcgttccgctctggaaaggtcaacttactgtttactacagatgttgcagaagagggtatacatattccagactgctcgtgtgtaataagatttgatttgccgagaactacccgcagctatgtccaatcacgtggacgagcccgacagagggactctcagtacatactaatgattgaacagggaaatgtgaaacaagatgatttgatatctgggattatgagaagtaaggcctcgatgactgggattgcttcaaaccgagagcctgaggattcacaccccagtttcttacccactgaagaaataaatgaataccatataagcaaaacaggagccaaaataactactgattctagcatcagtgttctcaaccagtactgtgataagctcccgaaggacaagtactacaccccaaggcccaagtttcagttcactcattacggtgatggttatgagtgtactgtaacactaccatccagtgccatgtttcaacttttggtaggtcaaaaagcaagaaacatgcagaaagcaaagcagcttgtttgccttgatgcatgtaagaggctgcatcagctcggagcacttgatgaccatctttctccatcagttgaagagccgcctccggaaatttcaagcaagtctagtatctcgacacctggtgcaggtttaggtacaaccaaacggaaagaactgcatggtacaaccaaagttctttccatgtctggctcttggggttcagatagaagtgtgactaaacttcaaggctacaagttgaattttgtttgtgatcaagttggtcaaaaatactctgcctttgtccttttaattgatgctagtatagcaaaagaagctgctactttagatattgatctatatttgcatgacaagatggtaaaagcttcagtttccccttgtggacctcttgagttggatgcttggcagatggaacaaacaaaactatttcaagcacttctctttaatagtttgtttggaaaactgttcattggatcaaaagcatcaaaaaccccaagggagttcattctcaagaaagatgatgtgttcctttggaacaaagaaaatatgtatttgcttttacctgtggattctactctggattctcataaaagtgtttgcatcaactggagtgtaattgatgtagtggctacagctgttggattcatgagaagcatttattcagatggcaaatgtaacctaactgataaacttaattatgaaaaaaatggtgaagatcttattcatttggccaacaagtcatgcaagggtaatgatcttaaaaatatggtggttctagcaattcacactggaaagatctatactattgttgttgtatctgatttatgtgccaatagtaaatttgatggtacaactgacaagaaagaagcaaaattccggacatttgcagaatattttgagaagaagtatagtatatttctttgtcatcctttacaaccattgctagtgttgaaacccacccataatcctcacaatcttctttcctcaaagaatagagatgaagacaatgttgtggaaaataaaaatagggcgaacagccttgttcacatgcctccagagttgctgattccccttgatttacctattgatgttttgagagtattctacttgtttccatctctgatgcatcgtcttgagtcactaatgctagccagccaactaagaagtgaaattgcatacagagattctgatatatcaagcttcgtgattttggaagctatgacaacacttagatgctgtgaggacttctctatggagcgattagagttattgggggactctgttcttaagtatgcagtgagtgcccatcttttcatgacatttcttaataagcatgagggacagttatcgtccagaaggcaagaaacaatatgtaatgccacactttataggcttggtattgaacgcaggatacagggttacatacgtgatgctgcatttgatcctcgtcgatggcttgctcctggacagctgtccagacgtccttgtccttgtgaatgcccagtaaattctgaggttgtaactgaggatattcataggattgatgacaagtctataattataggcaaggcgtgtgacaagggacacagatggatatgttcgaaaaccatctctgattgtgttgaggctctaattggggcctattatgtcgaagggggattaaaagcagcttttgctgttctcaaatggttccagattgagactgaaatcgaggaagagttaattatggaagctctgtcgagtgcttcagtgcgaaactatcttccaaaagttgatgtagttgaattgcttgaagcaaaactaggctacacttttcaaatgaaaggtttgttaatagaggctctcacccactcatcacagcaagaatctggagcaacatactgctaccaacgcttggagttccttggtgatgcagtcttggatattttaataactcgccatctgttccttagtcataaagacacagatgagggggagctgacagatttacggtctgcatcagtaaataatgagaattttgcacaagttgcggtaaagcacaatctccatcagtttctacaacattcttcggggttcttacaagaccaaattactgaatatgtgaatagtcttgaaagttcgtccatggacagagccagccttttatccagtggaccatgtagggggccaaaagttttaggtgatattgtagaaagtatagcaggtgctattcttattgacagcaaacttgatttggatttagtttggcgggtttttaaacctcttctttcaccaattgtcacacctgagaatttggagttgccccgattcagagaacttaatgagtggtctgacaagaatgggtactttattggaattaagtgtgaaaatcgaggagacagcacaatggctatccttaacttacaactcaaggatttgcttcttgtgaggcaaggttgtgggaagaataaagtagatgcgaaagcacatgcagcttccttattgcttagggatctagagcatgtattcttgttgtgttagcaggaaaaaggacttataattccaaggaatgcaagcagagtggaacaacttgaaaagaattctggtactgtaaaacattgcaacaacgtgcttgatgttatggacacacaaaacgtagcaccacctaggcaaaaggaagtagctgtgttaagtaccaccactcctggctctgttcttgataagccattggttgtgaaggttaagttgagcaaaggaggacctcgtatatcattgtacgagtcgtgtaaaaagcttcagtggccaatgccgacctttgaattcgtgaaggtcgaaccaagcgtgtgctcctcttcctgtggttcgtcacaaaaggttgcgccccaaggattcgcatttgcttcgacaataacgttgcatataccgaacggcgatgtcatcagcctcacaggagatgggcgtgcggataagaagagctcacaggattctgctgcgttgctcatgctctatgagctgcagcggcaacgtagattccaagttcaagaagtatgaggaatcacctcgtggttccatcaccaaagatgcaatgttaccgccaccggcgattattgcttgggcatcttggagtaatgtcaccgccaaatcagtctttagtcgtcagccgcacgggggtgtaagaaaataatgtacttcattctgattctaaattataagacaccccgaattatgtaatctaattatcataatgtcctataatttgaaatggagcggtgttggttactctcgttcccgtctgatggattcagacatttcatctgtacacattaggttctggtgcatgttaaaagagcctggaagggcactgcttacgtccgccgtggtcgtgatgtgtgtacacgtgca

SEQ ID NO: 40345 - DNA, 198 bp, Zea Mays
gcgaacaactccgtcatatttccacgcctataggtgtccccaggtgtcagccactggaactagtgacctgactttttgtagcccctcggtcaagtcccgtccctcgttcttcagtggtcccactccatcgacgtaaaaaccgcatggctctcacattcaaccctaagagatatggatgtgtcgtacaatatcggcaca

SEQ ID NO: 40346 - DNA, 253 bp, Zea Mays
tagcaacataaataattaatccctccttaattaagctatatctactcaaaaagaaaaaagagagggaatctagagagaggtagaacctagggtgagaaagaagagtaacacttgaatttggatgatcattagaaagaaattttataccctcaaattcagggtgttacatagaagtggtcaagggcacaacttgcctggcacttgagattccaggtgccaggatgattcttcagatcctcgtgacctcactgct

SEQ ID NO: 40347 - DNA, 2967 bp, Zea Mays
tgctagggcagctagcactgtgggccaaaattgcaaatgaaacatcatgtggatcaccgagatggatagggagaggcctctcgtgtgtgtgcatcaagcggaaaggcacatatgaaaggatatgcatgaacctcacaccagtgcaggtagcagactaacagctaattgttacaattattgtgcaggagtttctatgatggcaagtgacaactcaaaaggatttccaagggcttttcctttaagctattattagtttcttacagtccaatgagtgtttggtggtcctgtgtgacttcaacgtacaatttgaactctgaagggtagacatggcaaaataggtggtcctgctcaaaaaattgtctgaagaatgtctttccatatgcaccaagatttttattggcgggaaatccttaattgtgtatcacatattaggttaaaagtagtaaagctaatgacttcaataggcaagttgcttaatgagactgaaaccacttgttattctattccgaattgttggtaatttgcaggaagaaaggcttcagagattgaagcatcgcatgaaggtttactttgatccatctagacgagatcaccaggaagccctgaaagctctttggcatgcaacataccctgatcaagaacttgaaggtttgatatctgagcagtggaaggacatgggctggcaaggaagagacccatcaactgactttagaggcgcaggattcatatccctggagaatcttttgttctttgccaagacgttctccgcatcgtttcagagacttctaaataaacagtgcggtaacagagccacatgggagtacccatttgcggttgctggtgtaaatattacattcatgatcatgcagatgctagatctccagtctactaagccaagaacatttgtgcgagccatttttatccaaatgctctcagaggatgagtgggcatttgatctgctctactgtgtcgcatttgttgtgatggacaagcagtggctggacaagaatgcatcttacatggacttcaatgaggtgctgaagtcgacacgagcccagctggagagggagcttatgctggacgatgtcatccgcatcgaagacatgccgtcatacagcctgctttgctagtaaccaaaacaccgaattcgccggagaacagaactgagttgatggttcaactgtatagtacctccctttgtctgatttctgggaggattttttttagcaacaaagtagagtgatgacgtactggtatcatgcttaatttgggctaatgatggtgatatgcacattctcagaagtgttacaatgttctgtacttgtctaagcatttgtcagatatctaatattgatcatttgatccacccatcattctcctatctgcatcatcttttctggggattgccataaactttcatgagcacaacggggaactagaccagcacatttccttgtggtggcgataactatggttgctccagtgacccatcaccattaactgcgcttgccccagggattttagagagcctcgctcccttcatcaccttcctcagcttgtccacgtcctgccacctaccagcctcggcatacaagttggacagtaccacatacactccatggttactgggatttagtttcagcatctccaccgctgcccgctccgcaatctcaatgacaccgtggttcttgcaggccgtcaggagtgctccccatatcacggtgtccgccttgcatgacatctcccgtatcatatcctccgcttccgataagaggccagcacggccaaggaggtccaccatgcatccgtagtgctggattcctggaacgatcccgaagtccttctccatggacctgaacagccggcgggcctcgtccagcagccctgggtgggagcacgccgagagtgccccgacgagtgtggtcgcattcggtggcacaccctcccgctgcatccgtctgaaaaagtcgagtgcacgctcaccgtgcccgaggttcgccagccccgagatgagagggttccatgcagccggcacgcgccgctctggcagcccgtcgaacactgccaaggcctcctcaatggcgccatttttgacgtacatgtcgaccagcgccgtgccgaggatgggaccaactgccacgccccgtgccaccattaggtcgtgcacgtgacggcccatctcgagcccgcccgacggcgaccgcgcgcacgcagacagcaccgaggccagcgcggcgccgcagggctcgaagcccacgcggaccatctggacgaacgccgccatcgcgtcctcgtgcctcccgttctgcgcgtacgcggagaccatggtagtgtacacggccgcgttccgctcgggcacctcgtcgaacaccctgcgcgcggggcggagaaggcccgccacggagtaggcccgaacgaggccattggcgacgtaggcatcgaggtggaccccgtgccggacggcgagcgcgtggagctgttcggtgacggggagagagagcggaaggcgcgcggcggccttcaggaggaaggggaatgtgtgccggccgggcacgagggctccagtgccgtggatgcgggagaagaaggggaatgcggtggccgggtccggggaggaagcgagcacgcggagcgtggtgttgaacatgaaggagttgggcgcgcagggcagggaggagaggagcgcgagtgcggcggcagcgggatccggagagagcgcgacgtaggcgtccaggagccgggacgcggcgaaagcgtcctcggcgaggcggccggagacgagcatggcggcgtgcacgcgggctagggcgcaaggtgtagcgcaacgatcggcgaggagtgagaggttcgggcggaggctgacgcgcgtgccgatggcagccgcgacgagcggcgccgaaggcatatttggatcgtgtgccttcgatgctcggtagatccgtagatggggaggtgccgagcggaaaa

SEQ ID NO: 40348 - DNA, 1399 bp, Zea Mays
aggaaaccatcgtcaatcaaaaatcaaaaacaaaagaagcaaacctcgtcgtcacgccatccctctccacctctcgtcttccagacgcctccaatccgggctcccagcgtctcggaaaagaggagcagcacggcacggcggcgatggcgaggaacgctccaataatatgctaacccgttctacccagtccaattagcagcctcccaaggagaaggagatccaatcctgcgggcgggcgtccccgtatcccatccatcgatccgaatctcggaatctgcaggaccctgcggcgcggcttcttcgtggagaagaggttgctgccgaagccaccgccaggtagccatgtcgtcctccgtgctgagggctgcggccgacagggccattcgcaggcaggccctcacgctgacgaacgccgcggtgtccaggatccggcagctcctcagcctaaggcaacggccatacctgcggctgggtgtcaaagcgcgaggttgcaacggcctctcctacaccctcaactatgccgctagcataccaacagatgggggattagagcggtgatcgcctggccagctgggtgcctgctggatgctgcctagagatgctattccctttgaatggtggccagctgagcgcttgccgcctgctttcctgggaccattgttcaccttaggggctagggatcgctggctatgagcttggggattgccggtttgaggtgatggccgatgattgattatagccaaccggagcaggagaagggatgggtgcagcttgctggaagatgccgccacggagaacagaaatggtagaaggattaggcttgattttccaaaagatgaaaaggggaagttcgatgagcttgtcgaggagaaaggagttaaagtactgatcgaccccaaggctttgatgcatgttataggcaccaagatggactatgttgatgatccattaaagtccgagtttgtgttcataaacccaaattccaaagggcagtgtggctgcggtgagtctttcatgactacaggcagcaaagggtcgacgtcatgaggcgtttttcagtgtaaatgcttagccaagtgtctgcaggctccagctacagattttcttgtgtctgttgcgtcgcagttcattcatatatataataacacagcagtgggtttgtactggatatgcaactaactcgcatttacttgtaagttcacctcaaatgttgttattacatggtctgactctgattatccatgttgtgtatatttgatcgctcgcgatttaagacctcgaaatttgcacgctgcagttggttatttgtaatcgtattcagccgctctgcctctgcataactgcaggagaagagattgtatatatctgactgttatttactgcttagcaaaaaaaaaaa

SEQ ID NO: 40349 - DNA, 872 bp, Zea Mays
cctagccgagctcgccggttccctttccccaagctccacggctggccgcgcccagtgtcctcctctcagctccccacgcgcaccggcttgctccctgctcggttccgtgaccgcgccgtgtgtccatctcctgtgcgcgcgtgctccctccctgttcctccaaaccagtcgagctcctccctgtgtccgtaccgagctccttccttacgccggtctgaaatctctggtgctcgcccagtctggcgcgacaaacagggaaagggaaagaaacagccgagttcctctgcgcgcagccacatcttctcgctcggcctgctccggatccgaagctggtcaccctgtgtgctcgactttgccttgtcgcaaaaccccgacgccgtcgagcctcgctgcccatcgtgaagttccctgttgtcagcctccgcacctgtcctaggtcgtcgtagccagtttgactccgtcccgtggtggtgttgcgttgccatcgagtcccgatatcaatctggtggtcgtcgaagtgaagctctgaacggattcggccacatccagcactacccatgtcgttatcgttcgtcttcgtgctgtgagcgacaacatcgtcatttccttcatgtgctcatcctcgatctccgtctcaccatcacccttaatcacagcactgtgtcgacgacttgcgatcctcactctcgtgctcacgcttcatcgaatgccactccagtactcgttagaagaagagcttcatcagttgattattgaagaaaagaagaaccctaggtgacatctacttagtactcgatagaaagtctaaagtagaatttatcgtcgtgtccatggaagtggagcaacttaatattgatacgttaattaatcgc

SEQ ID NO: 40350 - DNA, 2811 bp, Zea Mays
ctctcaccccgcgcgtctctcttctttccctctgtctaccgcacgcgcccgtggctagctgccagccgcgcgcccgccgccaccccgcgcccaccccactgcgcgccggctggcgcgccgccacccagcgcggcccgccctcgccaccctgtggccccgccaccgccccgctgccccaccgttaaggcaggtgatgcggccgacaagggggcggcgtccaggaacccacaaaatcacgtcgtggtggggaggcacgggattcggatccggccgtggccacacccggaccccatcgaggtgatgcgggcgcaacggatcatggagcgtgtgcaggaggaacagcgccgctggtacggcgtcaaggagccggggcaggtgctcgccgtcaccccgacctactcacgcgcgttccaggcgctccacctcaccggcctcctccactcactccgtcggaatccttgcgcatactggcaaggcagaccaactgctgctcagcgaggaggacaagcagaatatgcctcttccagtccatggccctgcttgcaagtcctcagggcatctgattggatggcacacgttcaactcattgcccttctctaggaagacggccacagttgttggtgaagcagcccctattctgcccagggatttctagtgggctagttttgtgttgaactcgaggatgctgtggaaggaggctgacggcaagcctgactgggtgaaggatcttgatgctgtgggcgagaactttgaggagcgctggttaaaggcatcaaagcgcagtgccgctaagaaactgtcaaaattgtcgaggtcgcataatgattcgctgctgtggatcaacaagatacctgatattatttctattgacgacgaaatctattcaaatgacgatgatccagagagatgggacatgcagattttccgatcaattgattcgaattctgtcaagggttttccaaaagatccacgggaggccactagtaagaatcttgtttgtgggaaaatgtactgattgatatgagcgtgcatacaacatatgtgaatgccatccgaggtgctcaacatttcatctatattgagaaccagtacttccttggctcttcatttaactgggattcacatagagatgttggtgctaataatctgatacccactgagatagcactgaaaattgcaaacaagatttattcgaatgagagattttcagcttatatagtagttccaatgtggcctgagggcaatcctactggtactcttacgcaaagattctttattggcagaaaatgacaatgcaaattatgtatgagataatctataaggccatgaaagaagtaggactagatggtacatatgagccacaggattacctgaatttcttctgccttggtaaccgtgaagccgaggacactacttgcacatctagtggaccattctcaaccagtaacccacagaaaaatacaattatgctgcagcttggatatccaatcaggaccaagctcggaataataggagattcatggtgtatgtgcactcgaaaggcatgattgtggatgatgaatatgtgataattggatccgctaacatcaaccagagatccatggaaggaactagagatacagagattgcaatggctgcataccaaccccagcatacattggcaaatatgctttctgctcctcgtggatagattttcgggtacaggaaaatacagtgtacgtgttgaaactgttatcctgccccaggttgggatagacggtggtacattcgtgttggtagaactgtgagaagaaaagatgggaaaactttgctttcttggctgtgatgattatctgctcaaacaagacatgcaaattgcaaaactcttaaaggatagtattagttctatttgttcatatagttctacagctagttgtttcttgctttgttcatggattgcaatactggataagatcatgatggatgttgtgtgtgttttaatcaccatttctaaaatttattctattggtaagacgattctaagatataggtcggagatggattccttgcatatacataaatagataaagaagcaaccggtttataacaaaaatatgtcttctattttgcctgttgcccaattctcttttagtgtagcctacttacaataattaaaagaagagttggtgtctgtttgagtagacaactaagtgcatatataagtacgtgcatgattttgattactaattgtgattttgatgatctttcttttgaagacggtctaacatataagcgcatgatttagatgaacggaattactattgtgccatttctgaagaatcttactgatttctcttgccttcttagaacaacatgggaagaagtgatgatgacagtccatcgccgccaagaggtcacaagagaagaacttgcagcccaagtcctcgtggtagttatggaggccatggcaagcgccccacaactaatcttatggtgacgaatcttggtccggattgtaggattctaactctcatcaagtgactcctcccctcacgatgactttgcggacagatgtctcaattatagtggtggagctacgaacaacaatccgatgtcctgatcgagagcgatggagctaatgtttgaacttgtgtgtttgaacttgtgaactaaaaatgtgaactatggatgtgaatttatgtgaatttgtgaaattatgtatttgaacttatgtgaatttgtgaacttatgtatttggacttgtgtgaatttgtgatatgaatatatatccatgtgtttgaaatttgtattgtatgtgatattctgtgttgc

SEQ ID NO: 40351 - DNA, 3878 bp, Zea Mays
cgccacgtcatcagttcttcttcttcgtttttttttcgaattttaaacgataattctggtcttgatctcgtcctcgaggcaaatctctttgggaatcgcctgggaagtatcagtagaacgggggagagcttgaggagtagccgagtagggttggagaggcgtaggggcgcgtgtgggcgctcgagctgttgttgctgggcctcgccggctccgttttcttccacctccgcgcgcagcggcagcgcggcagccagcgggggtgggcgtcaagtcaaggcagcgccgtcgtttcatgtccgcggtcaggtttggtgtctaatgcaggtgtggtactggagtactggactactggtcctgtagagcagttcgggggcgagggagatggactggccctggcccctggtcgctgtgccgctccgaactggggcgagggcgagggcgaggtgttcgtgggtaagggtcgcgggcgatgtgcggctgggaggcgggctaccgaggcgtaagaaataaagcagtagtagacgagagagccgcgatttataaagcgggtttgtgtggctcgctgctcgcctccgctccactcctctcacctggtgactgctcctcccacctcgctgtttcttctacgggatcaggttgctgcttgctgcggttcagatccttatccccttctgctttagatgggcctcgcggagcagtgcatggaggtggaggaggtgcgggactcggcgaatcggaggtgatcccggtcatggggtagagtggagtggagggggttgagcgtgtggtatggagccgtcccgtggcggtgttggcggcggcgggcggcggtggggggaggcggagggtgatgcggcggaggaagggagacgaggggaggacgggggcgaggtgagcctgcgggagtggctggaccggccgggccgagcggtggaggcggcagagtgcgtgcacgtgttcaggcaggtggcggaggcggtggcagtcgcgcacgcgcagggggtggccgtgggcagcgcgcggccgtcgtgcttcgtcgtgtcgccgcccttcgcgcgcgtcgccttcatcgagtccgcctccggctccgacgcctcgggctcgtgctcgggctctgacgcctccgaggacgccgacggcgacccggacccggacccggacccggacgcctcgcctccgctgcggcgacgcgacagcgccgtccccggcgaggagcgcgcggggaggtcgttcccgctcaagagcgtgctggccatggagctcagctggtacaccagccctgaggatgcggacgacagcgccgctaccttcgcctctgacgtctacagactgggtgtgctcttgttcgagctgttctatacgttcgaaacgatggaggacaagatgcgggcaatggcgaatctgcggcaccgggtgttgccaccgcagttgctgttcaaatggcccaaggaagcatccttctgccagttgctaatgcaccctgtgccagaaaccagaccgaagatgagtgaggtgctgcagagtgagttccttaatcagtcaaggaatagcctggaagagcatgaagcggcacttaggttacgcgaagagatagaagaacaagaattattgctggattttcttcagcagttgcagaaaagaaagcaagatatagccgacagtttgcagggcactattgctttcctctcttctgacatcaatgaggtaccccaccagcaatctacaattggccactgtgagaacttcttatccgatggggataaagaggtgtgctctggaactgttgaagagcagagtgattgtggatccaggaagcgttttagacctgagctgcaaggtgttgatatggaggaaaataatcgtagtgttgaagaatgttccagaacagtaccatcctctgagttaatccaggaaagtgttctgtctaaaagctccaggttgatgaagaacttcaaaaaacttgaaacagcctattttctaacaaggtccaagttgatgaagcaagttggcagccaaataagtagctgtgatcgagttgttaagaacactactggttcagctgttgggactgagggaagttcactagatgatttttctttggaaaggcaatatggtacaaggcaaagaggttgggtaaactcttttcttgaaggattgtgcaagtatttgtcattcagtaagttgaaagttcgggcagaactgaagcattgtgatttgctgaactcgtcaaacttagtatgctccgtagggtttgaccgagatagagagttttttgcaactgcaggtgtaaataagaagataaaagtgtttgagtataatatgattgtaaatgaacaccgtgatattcactatcctgtagtagagatgtctaatagatcaaagttgagttgtatttgctggaacagttatatgaagagccatattgcatctagtgattttgagggtatagtacaggtttgggatgttactaggagtcaagtttttgttgggatgagggagcatgagcgacgcgtgtggtcggtggacttctcaattgtggacccaacaaaattggtcagtgggagtgatgatggatctgtgaaactgtgggatatgaatcaggcaattttattcttgcacctactgctgggagtattggcactattagaacaagagcaaatgtgtgttctgtacaatttcaacctgatactgctcgctccattgccatcggctctgcagaccacaaaatttactgctatgatctacgtaacatacgagctccttattgtacactagttggccacacaaagactgtaagctatgttaagtatctggatgcatcaacaatactatccgcatctactgacaactcattgaagctttgggacttatcgatgaatccaggaaggataattgacagtccagttcaaacatttacagggcatacaaatacaaagaacttcgttggtctttccatatctgatggttacattgctactggctctgaaacaaatgaggtttttgtctaccacaaagaatttcccatgccagtgttggcttataagttcagcgtgacggaccctatatcgggacaggagattgatgatcagtcacagttcatttcatgcgtctgctggagagggcagtcttcaactctactttctgcaaattccagcggcaacattaagatcttagaaatggactgaggagtttgcatctgtttgagtctcagctataaatagaccgacttcttaggccgtgctcaacaaatcatgcatatagccgtggtagatgtcactgtctagggagttgagtttaaaatgagagattggatgagtaatgctgctagagatagcttaccaagttgtgcgcgtgcgtggcttcaaaatttgtggcgattaaatccagagttgccaacggtgcagcttaatccgagttgcagagttgggaaaggtagtagctgtagcagatttagcgtggttttataggattacagattagcgtggtagcaaaagtagcataaataggaaacagaattggggcgtgggatagtaccacggggaaaggttttgtacatcattggtttgaggtatacttgtacaggcaatcaatccagtttctacctaccagtaccagcatcagacttgctcttgtcatagtgttacttgaaaggtgaaaggtataaatcgctgtacatctgttgaatcagacatcagcatttgcatcattatctcccttttttattttccatataatattgatgaatgtgttaggtcgcagacatcataagacttgttggcattcgtctgcagacgtgaggcgaggagctgtgcataagttaaaagaatcttcagtatttgtctaatgctccgtttgtattgtcgatattggagcacaaa

SEQ ID NO: 40352 - DNA, 389 bp, Zea Mays
caccgaagcttgtctgttagaatcgaacgaagctccagtttgaaatctgcttcggaggaagaaaatattaaagtttcacaagttcataattgaatggccagagtccgctctaccgccagggtggagcgcgtgggggaggaaactgaagcttcggagactctccccatctccgaagccatgcaacgatcgggtctagtgacttcggaaaagatccctcatgacggtgcagaacaagcagaacaagcaatcgctgaagcagaggaaaaagatattgaggaaactgattccgaagatgattatcgcattgccatgccaagcaagccgagccacttggacttcggaaaatctactgtttcgaaggctgatctgtccaagatggtaaaatcggg

SEQ ID NO: 40353 - DNA, 1318 bp, Zea Mays
cacacccgtgtcttccaccaagaggaagccgccgccgatgccgcctccgcctgcatacccgctcccgcccgcgcccgccgcgcttgccggtgcccccgccccggccaaggtttgtgtcgctactcgctagactagaattccgcgcgcggacctttgccggccgagccgttctgcggcatctcgacggggacaaccatgcgaatttccttggcgtccacgttgacgccacctgagccaccaccggtgaaggccggctggccgctgacctccgagacaggggaggcgcccgagctccacaacggccgcgggcctcgacgactgggctaaggccgagcgctcgtcgaagttggactgccgctgcgtcagccccctcgaccgctgcgacaccgacaaccagcgcaccgtgacgtggagcctatcgtcctccgccacctcggcctccatctcggcgcgcccgccctacagcgacaacacgtccgggtccacatgcagcgacgcgatggctgccgtggtgtcagggaactggtccacgatgagcgtccgcgcggcgcagaacttgaagaggaacagcagcagtgtgtaccatatgatgcactggagggcaggcttgagcacgcggccagcctcgcgaggacgaccagcttctgcagcgtgtccgctgccaggaaccggagattcatggcgtacaggtcgttggtggagatgaagtggaaggatttgaatcaaggttcatttattttcaggcgtggaaagtattgcagatagatgtctctattttcacgtcatcattagttgatgttcagaaatcgttggagagaatgttatccaaaggaaatattttaattggccatagcttacatagagatttatgcgccttaaagattgattactctcaagttattgatacaacatacatatttaagtatgcaaatttaccgactactgcatcaccttccttgaacagtctgtgcaaggctgttttggagtatttagttcgagaagaaggagaaccacataattgcttaaaggatgcagaagctgcaatgaatctagttcttgcaaagcttaagaatgagtttaatgaccccattgaaattgctgcaagtattgtaagcgccaaaaaaagatgttcttaaatcttaccattagtatagatgatgccaccttacttctttgtggtaccttcctaggtaactgaatctgattttgtgaagttgctcgctcatagaattctagtgtcttattatgactatggatgagacttttgtgatgtaattgatgagactatggatttaaatattattatgtgattgtgtgt

SEQ ID NO: 40354 - DNA, 1608 bp, Zea Mays
caaagctattgcccagccctggagtctgacgacctcgtttccctgctgtctcgcctctctttcggttctcacggcgacgactgggcgagcgccgcctcccctccctcgctccgtgaggtcctcgccggcgacgagtgccgccgcccgtttccatgttttttccgccgattagtgtccaccagatctagtgaaggctggtaacttgacgcaaggggaatatagacacagaattttttgaacattgatctgtagccagtgctgcaatggctacaaagcttgtggttctcggtatcccctgggatgttgacactgaagggttacgagagtacatggccaagtttggacccctagatgattgtgtcgtcatgaaggagcggtcttctgggcgatctcgtgggtttggctatgtaacattcgcatcagccgacgatgcaaagaatgttcttgattgcgagcatgttcttgggagccgtacattagaagtgaagatagctactccaaaggaagaaatgaaatcacaaggaacaaagaaagctacaaggatatttgttgctcgaattccacagtcagtggacgagtcgatgtttcgtaggcattttgaagcttttggagaaattcttgatctttacatgccaaagagtctgtggacagcatcatgcaagagtcacatgagcttgatggcacaacagtagttgttgatcgcgcgactccgaaggaggaagatgtaagataccccccgagtagaccatctcagggtggctatggtgcatataacgcttacatttcagctgctaccaggtatgcaactttgggtgcaccaacactgtatgatcatcctggatcagcctatggaagagggtactatggatcctctcaagcagtgggcaagaagatatttgttggtagacttccacaagaagcaaacacggatgacctaagacattactttggcagatttggtcgaatcgtagatgcgtatattccaaaggaccccaaaagaagtggccaccgaggttttgggtttgtcaccttcgctgatgagggtgtggcagaacgggtatctcgtagaagccatgaaattctgggccatgaggttgcaatagacacagctgcaccacttgagaatgattcagctggtggtggttacattgatcccatggacctttacggagcttatggttcaatgagatcttttggcaggttctgcggtggtctagattataattacggctatggccccagcagcggaagcagcagatcaaggtcggattggcgataccgaccttactgaacgtgttttagtttacctctagggaaggaaactgaggagatggagaaaagaattacctgtctaagaatgctaagtgaggggggtaccttacgcgtggaatctatcattttgtttcatgttgtgattttggatttgtcgtgattcacattattgacaagatgaaggcagtccttgtagttactgtatggaagtgctgtatgtgtaataaaaaagtatcatttgcgaaaaaagttataacgccatcagacgaggtgcctgcacgtttatatacactcgctctgttccagtatactgttacttctacttctttatttttg

SEQ ID NO: 40355 - DNA, 1843 bp, Zea Mays
tgactttcgtgttcattgtatctccatcatccttcgccatttaaacacaatatttagtaaaggacgtgctacaagattaatcaacaaccgagagtaatccatcaccataccttgttaaaacattgtattctagccgtattcgaagtaataataaacatgaaatacataacaatgcaaattgactttcttcaggaaagtagtaccttaagtggtgcaggcatcacagtgtatcaggctagtcttgtggcctagcttcgttgatatgatgatatcttttaacaatcaaattcaggatttaatctcgaatactgggctgctacgtgcggtaaagggtgatgactgtcttttgtgatcagccagattggcttcaagtatgggcagagattgagagacatgacagtcttaatatgctgcaggcaccaattgatttagagaaaaatcaaggaacgatgcttgagcacaactcaattgattataagtctccagtaaggaaaagagaaacatctcgacctcaccttgtctattgtggcatccggcgtggaagcacaagacgtcgtagcatatggcgtggaaacatcggaggagctccggccaccgctactggcaatctcggaaccccacgacttcttggcctgtggagcggtcttcccctgaaggccaactctaggtgccatagaaaatggagcgaatcttcggcggctggtgccgtacttgcagttgtcgccatcgccgcctaccaagcacacgttggtggcgccgtccgcagcacccatgatgccgcatcggagcagcacgtcgcggagatgagcgtcgtgccacacggatgtagagatgtcgtgcgccaccggacgggagcctgcggcgggagagcaacgttcggccgagatgcggggagggcggtggacgggatccgaggaggccagcggttgaacatgagccgacgcgtgggtcggcggcgaagcgagtcggtggtcgtgccccagggcgaggtgggccaacaagggcgacggcagggacgagaggtctgggagggagtgtcaaactcacggcgggtgaaggacgaggaaaccttggacgccccttgcggcgcggcgccgtttgacggggaggcgtattataattcgttgaacttcggaattgtagtatctgcgtcagatttagctgcagtaatcctcgtttttacggcagtccgtttcttacaacggatccacggagctcctctccccgagcgctgctcttcctcgggcatctccaccgcgcggatggtgatggtcccgggcggcgtcgcgccgctgcactcccacccgggaggcaccgagctcatcttcgtcatcgagggcagcgtcgtctccggcttcatcagcgccacgctcaacagggtgtacaccaagacgctcagcgacaaccccggcctgcagatcctcgacttcgcgctcttcgccaacgacctgcccacagaggtcgtgaacaaggtgaccaacctggacgaactgcagatcgtcaaactcaaggcgctgttcggagggaggggctagacgcatatgtactccgtatataggaacagtcaacggtgttgatcattgaattgtgtgtattattctatacttgtgatggatatttatcttgtcattctataaaataaattgtaacgcgggcagcaagcgtgagagcgaaagtagctgccacatttgatgtactaatatttacatctcgattgttaataataatacattattagcgctagtttgatgaccctattttttaagaaatttagataaattgttgagaatcgctggtaaaaatgaagaaccattcaaattaacagatttctttgagaagaacc

SEQ ID NO: 40356 - DNA, 1980 bp, Zea Mays
gttcccgtctctccggccgctgcaggttatcaaatacggtgaaccttgtgttcctgtgaaattttgcagctcattatacattgaaggcagaaagtcattctccaatctgaaggcgaaacaaggtgtgcacatatatgttctagaggataaagttcactgagctgctgttgggcattggagagcccagttgtggttctatgcctgaaaggaattctttgtaattttctcctgtatctggttctgttatcatcattattttcctggtgtggggcaatcatgtcagagagcgagttagcagtaataaaaccagaggcattgaaaacttatatctggcttcagtgctttgatggctccatacaacaagtggaggaagaagttgccatgttctgccctatgatatgtcgggaaataatgaaaaatgggacagggtcatctaagaatcatgctatagttctaccggaaagagttaatccggcaagtttgagtttgattcttgattattgtcggtttcatcaggtccctgggcgctcaaacaaggagcggaagtcattcgatgaaaagtttgtcaggatagacacagaaaaactgtgtaagttggcttctgcagcccttggtctgcagttaaggccactagttgatcttacttgtggagcacttgctcgaatcattggaggaaaaacacctgatgaagttagagatattttccatttaccagatgacttaacagaggaagagaaactggagccactaaaaaatttaaatgatgatcctacaattcgtttattgaaccgattgtatgcaaagaagcggaaagaactgcaggaacgccagaaactaaaggatgttcaaacacaagaagaacaaaaagacgagagatctttggatgagttactttgttttataaatggagatggagattccagaggtgggaaagcttctaagagtaagaaaaagaataaaagaaggaaagatcaagctaagaatcccacaaaagcgaactccgaacctgtaaataaggagggagcttcctgtgtggttccgtgcaaagcagataatggtaacatttctaggcatccttgccaaagtcaaaatttgcaagataccgagtaccccttcgacaatgctgaccttgacgatggacttgatcctgcaatgagggaggagattgataggtgagggcataagatatcttatgggttgatgcacgcagctctttgttgtgctactggcctgtttctcaatcgaaaaagcctgtttttgtacatgaaacagcaaggttattgatgcttatatactgtcattttgataagtataagctgatttctggactttgaatcgataaattctgttaaatgcttccactcatctttttctgcagttctgcttgaactttgtggttggtgcttgtgcctgtcgcttgatccacccatttactgttgacatgcatgaaacactgccgtgttttgatataacaagcgattgttcttgacaattgacatacagagaagtggccgacttcgagatgaagttgaagctagcttggaccgaaagaatgagtttggagcaggaccaacaaatggagtcacatgttgatacgcggtgaaaaccttaggcaggaaggagttttggtcgagaggtacaggatgacattgcgaggtgctattgtcatatgctgtgatttgaactcttatcattatgaaatgaataaaagggaaaatgatgtgttgttggaagttggcggaaacaataggtcgcttagctctataccgttggttcaatagtgctccagttttttctatccacgtttgggactggcttgttgagttgtttttaccgtgtaaactcggtcaaaatgtttgcaattatggtatttgtggactgctggataattctcagtcaaaaagtttgtgaaaatgtattatttgtggactatttgatacttctcagtcaaaaagtttcaccaaatatggtatttgggca

SEQ ID NO: 40357 - DNA, 3140 bp, Zea Mays
gttgcttttctatacttccagcaacagaacttgtcccaggagatatagttgaagtaggagttggttgcaaagttccggctgacatgagaatggttgaaatgttaagccaccaattgcgtgttgatcaagcaattcttacaggagaaagctgttcagtggcaaaagaggttgaatcaactccagcaatgaatgctgtctaccaggacaaaacaaacattcttttttcgggcactgttgttgtagctggtagagcaagagcaatcgttattgggattggttctaatactgcaatgggaagtatacgtgatgctatgctaagaacagaggatgaagcaacgccgttgaagaaaaagcttgacgagtttggtacttttttggcaaaggtgatagcaggaatctgcatacttgtttgggttgtaaatatcggacatttccgagatccttctcatggtggctttgttaggggtgccatccactattttaaggtggctgttgctcttgccgttgcggctattccagaaggtctcccagctgtggtaacaacgtgcttagctcttggtaccaagagaatggctcgcttgaacgccattgtcaggtcacttccctctgtcgagacattaggatgcacaacagtcatttgcagtgacaaaactggtacccttacaacaaacatgatgtctgtgtcaaaggtgtgtgttgtgcggtctgtgcaccagagaccaatgactgatgagtactccattagtgggacaacatttgctcctgatggttttatttatgatgctgatgggttgcagttagagtttccccctcaatcaccatgtctcctccatcttgctatgtgttcagctctttgcaacgagtccactctacaatacaatcctgataaaaaatcttatgaaaaaattggagagtccactgaagttgctctgcgtgtgctggtggagaaggttggtcttcctggttttgactcaatgccttcatccctcaacatgctaactaagcacgagcgtgcatcatactgcaaccattattgggaaaaccagtttagaaagatatctgttttagagttctcccgagaccgcaaaatgatgagtgtcctctgcagtagaaaacaccaagaaattatgttttcaaaaggtgcccctgaaagtataatggccagatgcacacatatattgtgcaatgacgatggttcttcagtaccattgactatggacattcgtaacgagttggaagctagatttcaaagttttgcagggaaagacacgctaaggtgcttagcattagcattaaaacggatgccagctggtcaacaaagtatttgttatggtgatgaggccaacctcacatttataggattggttgggatgcttgatccaccaagagaagaagtttgggatgctatccactcttgtatgtctgcagggatccgtgttatagttgttacgggggataacaagtctacagcagaatcgctgtgtcggcaaattggtgcttttgagcacttgaatgacttttcagggtattcctatacagcatcagaatttgaaggattgcctcctttggaaaggacaaacgcattacaaaggatggttctgttttcaagagtggaaccttcccataagaagatgcttgttgaagccttgcaagcacataatgaagtggttgctatgactggagatggtgtcaatgatgcacctgctctaaagaaagcggatataggaatagcaatgggatcaggaactgcagttgctaagagtgcttcagacatggttttggcggatgacaactttgccacgattgttgcagctgttgcggagggaagggccatatataataacaccaagcagtttatccgatacatgatctcatcaaatattggggaggtggtttgtatttttgtggcggcagtgcttgggatgcctgacacacttatacctgtccagctactctgggtgaaccttgttactgatggattacctgcaactgcaattggtttcaataagcctgatggcaacatcatgtcagtcaagcctcgaaaggttaatgaagctgtggttagtggatggctctttttccgttatttggtcattggagcttatgttggtcttgctactatagcgggttttgtttggtggttcgtttattctgataatggccctaaattaccatattctgaattgtgtgtatttactggaactattgttccatggcctgctgtcaactttgattcatgttctacaaggcagacttcatattcttgcagtatatttgaggatcgtcatccatcaactgtttcaatgactgtgcttgttgtcgttgagatgtttaatgccttgaataacctaagtgaaaaccaatctctgcttgtcattcatccatggagtaacctgtggcttgttgggtctattattctgaccatgcttcttcatgtagcagtcctgtacattgaaccactatcagcccttttctctgtctctccattgtcgtgggttgagtggaaaattgttctttatctatccttccctgtaattttgattgatgaggttttgaaattcttctcaaggagaagcccacgaggtcgaagattccctttaaggttgtggagacgtgagatacttccaaaagagtcgagagacaattgattttaggcttcagcatatcagatgcatacaatgcaaagcgaaaagcttgtcttctgttagtattgagcctaattttggcaaatgttcatggatgaagatgacattgtacaaatctttatgtggctgatatctagggccgagcatcttcgagaatagagttcgcgactacacaattcattggggggggggggggggggggttctcagaatgctagttttgctcagaaaacatagagaagcttcgaaagccttctcactagttatagacggtgctacacttgtatcagaatgtcagatgcttacaaaaggatgagttcatgcaacacccctttctcccaaccaatgaaatcactgtacgcatcaggttctgtcaaattttcagggtgacagacgccgttctggtatttctgccattttatacatcgcaaaagttttgcaccttgatattgttggaaacaatggcatgttcggctgaaatttacaaccactgccg

SEQ ID NO: 40358 - DNA, 805 bp, Zea Mays
ttttggcccaaaatagaggactaggaggtagtgccgacagaggcacgagcgcctccctcgtcttcgttccgtctctccccacagggaaccgccgcccgtcgcctccagatacgtgcctccggcggaaaatcgatcttctgtatagccagcaaggaggcctctccatctcctccgggaaggctgtgcagcaatggagaagtataacagcaagactcagttagcacccttgagagataccccatttgctctccgtggtgctcttggtagttcaagctcataccttgagcaagccaggggctacacgtcttcccctctagcagctctgcgaccaaagatgtcttctactactggaaatcgactcctgcactcgagttgccccctgtcatctcctgtagcaaaccgcccgctgtcgccccaccttcctctgaagaagccacagttcagcgcgactttctcaatctcgcatcgtatattcggtgtcgcgttgggagttgccatcgtatctgtccctctcgccaccaagttcagcctaatgtttggtgtctgagagcgatttgctgcgtctcaagagaaccatcattttccgtttctgtgtctgtttttcatcgtctcggttaccttgcgacacaactgtaggtgccgttggaataatatctttgccatgcttgcagacttgtgtaataagtaaataaacctataaaataccagtttaactgtttgaggagatttgcctcattatggatatacatgctatgaaagtcgattgtcatcgctaattgaaaaaaaaaatataagagacatgttc

SEQ ID NO: 40359 - DNA, 4023 bp, Zea Mays
ccacgagacaaaatccagaaccaggccggcggcccactcccaccgccgcgcctacgccttcccccgccccccgcgcggaggagggtgccgccggcgatggagacgacggccgcgggcgcgccaagagcgcagacgctgcgggacctcgcggaggagggcaagaagcggggcgtcctgctcctcgtcttcgccttcgggctggccttcctcatgtcccttacgagctcgtcagtttggtttaatctgccatttgccatagctctgattgttttgttccgctacatatcgcttgattatggccttcgtagaaagagcgtaactagaacagatcatgccagtcattcactcgtcaaaacaaaaggtactgaggtaaagaaagtcattcatcagactgaaacggatggaaaaatagattggaggagcaaggttaactcgcctccagttgaagcagcattcgaacagttcacaaggcaccttatctcagaatgggtaacagatctgtggtactcgcgcgtaacacctgacaaggaaggtccagaggaactcatcgatgtagtcaatactgtccttggggagatttcagttcgggcaagaaatgttaaccttatcaatctgctgatcagggatttggtcgatcttatatgcaataatttggaactttatcatttctgtcaagccaagattggaagagagaagtttgtgggccttccttcagagcgtcgtgatgctgaactgaaaatgatccttttagctgaaaacaagttgcatcctgctttattttcagctggcgctgaatacaagtgaagcctcaggatctacaatgtactttcttccggtgtacagcgcgggaacttctcgcttgtgcagttttgagacctgttgtgaacttagcaaatccaaggtttataaatgaaagaatcgaatcctttgctctttcgcatgccaataagttggagaaaggaactgcagaatccttggatgttgtcacaactgttaagcacagggaaccacatatgccctctgttgatgaattttcggcactaatagaccactcaagttcaggtgttgagctcgttcaatttcgtcagggtcaatcgaaaactgcatcagatatacaacctggaaaaagtacaaatccatatagtctaaaattagaatcctctcatgcacctttagtcagtagttcacacccactggagtcaacaagtttagcttcgtcttcccacgttacttctgataatgggttttcgttgcataccaaaagcagcaacagagcaactgcaaatggtcatggtagagagtgtgcacagcccttgggtatcagttctgagcgtgcacatcaagctttagcacttgagcaccttgagaatatgtggacaaagggaaagaactacaaaccagaaaatgtagaacatgtcgcaaaagtgtctgttggatctgcttctctgggctcgacttcagttcagcaatcagttccttgcagcacttcagtttgttacaatcaaagtaattctgaaagaccaacagcgtcatctcagtcaaaggaccagcatttggtaagacactcaactacacctacatatgtaacatatccaaatggcaccccgaaaagcctatctgcagaaatggcagaacatgccggtccagaagactttgcagtagagagtgagagttcatatgccactgaggacgatgaattcaacaatgtgactggacttgattctcctgttaccagagtttgggaaagcaaaagtaaaggaaatgctaccttatcacatatacatcacccactcgaatctcctggtttccatagagcaaagaagaacagaagtcatgtgggaaaactgaagatgtcaagaacttcttcaggaagaaaaaggtcaaggtcaaatgctcagaagcctcctatctggcaagaagtggagagatcctctttctctgttggtgatagtatggacatactaaatacatctgcaaatgatctaaagacgcatgagctagacgaggatcctgaggtggaaagtatggctaggatgtttagtagttcaaatacttcatctttattgttgccatcaagtgactctgcatattcttcaaattattgtggtgccaatgtgctacaagactcttatttgaagttaagatgcgaggtggtaggagctagcattgtcaaaagcgggtctggcatgttttgctgtgtattctatttccgtgaccgacgccaatggtaatagttggtccattaagaggaggtttcgtcattttgaagacctgcatcggcgtctaaaagagtatgctcagtacaatcttcatttacctccaaaacatttcctctcatcaggtttagaggtttctgttgttcgagagagatgcaagctgctcgacatatatctgaagaaccttctgcaaattcctattgtttcaagctgcatagaagtctgggattttctgagtgtggattcacagacatatattttcacggacactctctcagtcatccaaacattgtcagtttagatgaaagatcaaatgggaaaaatataaaagcattgaactcttctggagctttgaatggaaattctatctctggaggtcaatctttgcatggacatatagacgacaccgtacataaggattcagacatcgcttgtgatggtttgagatttaggaaagggaatgtgaacaagaacttgggaaacggtgttagccacacaacagatagtgttagcaacacaactgccaatcattatcaggacaattctggaagtgatccagagcagaatgatcattccttttcaatagattcattaaatcctaagaagttgcgttcaactgaaaccaatgacacatctcaaattccagagtctggaggattttcagtatctcctaatgattggatggccccgaatcttagtgttcccttgtttcatcttgttgatgtggtctttcagctccaagatggaggctggataaggcgtcaagcattttgggtagcaaagcaaatactgcaattgggaatgggagacacgtttgatgactggcttgttgacaaaatccaattacttaggaaagggaggataattgcttttgctgttaagcgcattgaacaaattctctggcctgatggaattttcatgacaaaacatccaaagagaaattcgcctccacctcctcctggtgctcagagcaatggcatgggaaactatctaagcgatgaacaacggatagaagctgctcatcgtgcaaattttgtccgtgaactgataatagataaagccccatctccactagtgagtcttgttggtcgaaaggattatgaaagatgtgctcatgatatctatttctttcttcagtccccggtttgtttgaagcagctagcgttcgaactccttgagctgcttgttctttcttcatttccggagttggatggcactgtgaggaagtggcacgaagataaagagcaattctgcgcccagtaatgtttatcaaacgtttgaatttgtcacgggcggtgtttgtttccaacacatatcgtctttccagagtggtgtggcctgtgaattctgcgaaaataaggtggtggcttcagaggagtgcccgtggatatctcagtttgaagtgggtggtggctttgtgcagtgtgaatatggttagatagtgcgaggatatggtccctttttccaccgggccatggcagaacggtttttgtgcccgatagagttcatttttccccctccagatttggtatacgtaatgctgctgcctgaaaggaaagagatggtggcgcattttttttgcacccgttttggtggtacactggtacccgtcttgtgtaaatctgcatagagataaatgaagtttcgaggtggtcaatgaatgataatagctctctggcatcgtgatgattcgttgtggctccgccttgctgtacgtttttttggtgctgcccctgcgaatcatctcggcactattttgtgatgataaaaaaaaagtaatatgcgctggagattcgtttattcaaat

SEQ ID NO: 40360 - DNA, 2570 bp, Zea Mays
acccgcctacgtgcaccgggcacaagggagcggtcgctgtggacctgggacgccgcggtgccccgtgcccccagacccttctctccctctcgcacgacctcagaggctcagacaagcgcgaaccccgcgaagctgccaagccgcgactgcccctcgacctgcccgcttcctccgacgcctagggttttctaccgggcgccgccgccgcagccgcggccggggatgcaggtggccctgcgcagttagccgcttttggatccaccgccgccgcgcgccatgtcgctcctgcggcggcggaagcagcagcagctaccgccctcggagggcgacgggtccgaccacgacgacaacgacaaggggaagaagccgtcctcgtcctccgcgccgccgtccaaggagcccacgaggcggaccaaggccaagtggtcgtgcgtggacagctgctgctggctggtcgggtgcgtgtgctccgcctggtggttgctgctctttctctacaacgcgatgccagcttcgttcccgcagtatgtcaccgaggccatcacggggccgctcccggacccgcccggggtcaagctgcagaaggaggggctgcgagctaagcaccccgtcgtctttgtccccggcatcgtcaccgggggcctcgagctatgggagggacaccaatgcgctgagggtctcttccgcaagcggctatggggcggcacatttggtgacgtatacaagagacctctatgctgggttgaacatatgtcgttggacaatgaaactggattagacaaacctggaataagggtcaggttcgtgatcaaactttgagcagaataaagagcaatattgaactcatggtagcaacaaatggtggaaatagggtggtggtgatcccacactccatgggggtcctctattttctgcattttatgaaatgggtcgaagcacctcctcccatggggggcggtggtggtccgaactggtgtgagaagcatattaaagctgtaatgaatattggaggacctttcttaggagttcccaaggctgttgctgggcttttctcatctgaagccaaagatgttgccgttgctagagctatcgctcctgatgtcctggactctgattttcttggacttcaaactttgcgccatttgatgcgtatgacccgaacatgggattcaacaatgtcaatgcttcctaaaggtggtgatacaatttggggaaatctggattggtctccagaagatggccttgaatgtaaagctaagaagcataaaaccaatgataccgaggtttctaaggatagcaatggggaaaatatcgaagttcaacctgaacctataaactacggaaggctggtatccttcggtaaagatgtagcagaggcaccttcttcagagattgaacagatagaatttcgtgatgctgttaaaggtaacgatatcgtccattcaaatgcatcatgccgggagatctggacagagtaccatgaattaggatggggtggaataaaggcagtcgcagactacaaagtttacactgccagttctgttatagaccttcttcactttgttgctccaaggatgatgcagcgtggaaatgtccacttttcatatggaattgctgataacttggatgatccgaaatatcaacattacaaatattggtcaaaccccttggaaacaaagctaccgaatgctcctgacatggaaataatttccatgtacggagtaggcattcctactgaaagggcatatgtctacaagttggctccacaggcagagtgctatataccattccggattgacgcctcggctgatggcggggaggaaaacaaatgcttgaaagggggtgtttacttagctgacggcgacgaaactgttccagttcttagcgcgggctacatgtgtgcaaaagggtggcgtggcaaaactcgtttcaaccctgccggcagcaagacttacgtgagagagtacagccattcaccaccctcaactctcctggaaggcaggggcactcagagcggtgcacatgttgatataatggggaacttcgctttgatcgaggacatcatcaggatagctgccggggcaaccggtgaggaaattggtggcgaccaggtttattcagatatattcaaatggtcagagaaaatcaaattgaaattgtaacccatgggaagttaaaagaagtgccccaacccgttcattgcgttcctaaatgcttgcctgagcgcaactctggattttgcttaaatatcgtatttttttcacgcctcattcgtccctctagtaaatttacattgacaggaccccggtgcgacgcggatgttgtaccgtatttttggcattgtatattaaaatgtacaggcgtaagttacatttgctagctgaaattattgcagtagcttgccttttcttttgagcacggaagtgtgctctccattacgtgataacctgtgccaaatctttgacaatcatatcctgaatataagatggaacattatttcgttgtgtgaccatattacaagagcggggaatgtaattgactatccttgacacaaaattacataacagcaa

SEQ ID NO: 40361 - DNA, 1854 bp, Zea Mays
gtctactcgcatcccaatctccgtcgtcccccgcggccccgcctcactccttacgccgcactccacctccacatcgccgcccacacccgaccgcgtggccggcctcatgtgggagcgcggcaggccgccccgcaagccgcgcccgtccccaatcctcgtgccgccgccaccgtcgtcgccgcctccccgcctgaacctcctcctcccgagatccctcctcgcgctcgccgcgcgcgccatgccgtcgcgccgcccctccccggtcctcctcctcctcctcgcgctctcgctcgccctcctcttccttctcctctccccttccttcccctccacctcccgcttctctcgctccctcagctctggctccgctttcgcctcctcatctccggcgtcaacctccgccccgcctgcacccgtcaagatctacctgtacgacctgccggccaagtttacctacggcgtcgtccgtagctataaggctgcgcgtgcgacatctggctccgcggacgccgctgctactctgcccgacgagcaactgcggtacccgggacaccagcactcggcggagtggtggctcttcaaggacctgctccgacgcaggccgcaggaccgccccgtggcacgcgtggacgacccgagcgacgccgacctcttctacgtgcccttcttctcctctctcagccttgttgtcaaccccatccgctctccgctggcagcaaacgcctctggggcggggacagcgtacagcgacgaggccttgcaagaggagttgctagagtggctggagcggcaactttactggcagcgccacagggggagggatcacgttttcatctgccaggatcccaatgccctttacagggtggtcgatcggatcagcaatgccgtactcctggtttctgatttcggcaggttgcgcagcgaccaggcatctctcgtcaaggatgtcatcctgccctactcacatcgaatcaactccttcaaggggagggaaggttcgtgatgcactttttcagattcttgaaaacgaggatgatgtaaccataaaacatggaacacaatcgagggagagtcggcgtgaagctacacaaggaatgcactcatctaaattttgcctgcatcctgccggagatactccctcagcatgcagattatttgatgcacttgtcagtctgtgtgttcctgttatagccagtgattacattgaacttccattcgaagatattatagactacaataaaatatcaatatttgttgggacaagcaaagcagtacagcctggatacttaacttcaactcttcgaagaatcagttcagagaggattctggagtaccagagggaaataaaaaaggtcagacattactttgagtacgaggatccgaatggaccagtgaatgagatttggcgccaagtatcccttaaagcaccactgataaagttgttgactaaccgcgacaaacggttgcttgaaagaggcaccaatggaacagattgttcgtgcatctgctctacaactccaactgacataactgcggccagttaaacaagatggaactcatcggcctacaagctctgtgcctatttcctgtgatcacattgcctgaattttttaggttgtacagttccatgtaaaacgagattaccagccactatttttgaacagtaaatttactaattaccacaatccttgagtttttactagatttgtataggaggagcggatagtcaggaaccttacagtgccctttttgtattgtaagttacattagctattttttgttgtcggcagttcgctgccctagtttttcgacctacataagcatcaatccccgtgccagtgcgtggaccaagtt

SEQ ID NO: 40362 - DNA, 2055 bp, Zea Mays
gccgttctcgtcttccagaagtctctccgtatctccctccccgaagccccgccggaccaccttaacctccccaccacaagcccgcacacaccatcccgctccgctcaagtcgcctccgcattcctgccccctctacccgcccgccgccgcgcggacgacgggagacgccggcaccatgctctgcctctcgctgtgcgcaccgcaccttcacctccacctcccccgcagcccgaccgcacgacccgccgccgccacgtgcaggaacgcgcgctgcatcggcgtcacgctatgcctccggatgccgacgacaccggaggaacggcggcagaagcgcgggctggcccagttcctggacttatcggccgcgccgacactcacgccacccgcgcccacgcccgtgcatctcacgcccgcggccaaacggcgcggggcgctgcgggagatgcgccgggtgtggtgggtgtgcggggtcgggtactgggtgcaggggttccgctgcttcccgtggctggcactcaacttccacctcacgcgcggcatggggctcagccccgccggcctgcaactcctgcagaacgctgggagcctcccgctcgtcgccaagccgctcttcggggtcctctccgatgccgtctacatcggccgcgcccaccgcataccctacatctcccttggagctcattgcttggggagtacttgcaaccattccagttacaggggatgcgtttccaactctaatggcatgcattctcattggaaatctaggagcatctgtcacagaagtcgtaagtgatgctgttgtcacggagttcagtaggacacagaaggctggtgtactacagtcatatgcattcgtagccctggctgcaggatccttgctggggaacttgtctggtggttacattctgcttaaaacacaggaaccaaagatcatgttcacagcattctcagtccttcttggcttccagctagcactgtccctaagtacaaaagagacattgccaagctctcgaggaaactccagaaatcgtcttgtcaaaagctctttggcagctaacttccgcaagcaattctcaaacttgatgacagcgatcagagaggaaaggatcttataccctcttgcatggatcatgacatcctttgctgttgtgcctgttctttctggaaccatgttctgctttcaaacacagtatttgaatctcgatccatcggttattggtctatcgaaagttgtgggacaggtcatggtcttatcactaactgtactctacaatcgatatcttaaaaggataccactgaggtgccttaccacaggacttcagatactatatgctctggcagttttgtcagatttgatccttgtgaaacaagtaaaccttgtgctagggataccgaacgagattcatgttctttgcttctcagctctagctgaagctctagctcagttcaaggtattgccattctcggttttgttgtcaagtctctgcccaccaggctgtgaaggttctttgttcgccttcttcacatctggactggtgctttcagcaatacttagtggagtattcggagttggattgtccaccctgatcggtgtgtcttctgtggactactccagcttgcctttgggtattttgctgcaaagtttggctgcattgctaccgttgggatggatatcctttgtgcctgagaaatggactgccgatgacacggttgtaataaaaagatgaagtgttttcaccatacaaatttccaggcaagatcctgttaggcaatgacacaatgtagataaatgtagcccacccagtcaacactggtgaggttacatgtataggtatccagattctcttcaattagaatagttcttattattactgtactatatgcaatacaggatagcccttatgctcctgctgaatatagcacacaaattgcattgaattagttgtctcgtgaaacgagattggactataaaatttgcttcacatgcatttgttcccataccattagatcctaaactgacgctcagatacatcttctccataaagataaaaaaaa

SEQ ID NO: 40363 - DNA, 1505 bp, Zea Mays
tgccatcgtcgcccatggccagtgcctggccaccgctggcttggccactgcgtgctcgccgcccaatcctgaccaatgggttgcctgcagcgtcacgttaaatccacctgcaactgtagttcttcctcctccctctgtccttagcgcagaagcatcaccctatcttcttcctcgacgccccctgctcctctctctaccgagctcccattctccacggcgtttggcagcagagagcccttctccccagcaggagcagggcctccatggcgtccgacccctctcctttctcctccccgctcggagctctgccatagcgcacacaaatcccttccccctccattcctaggcgcaggaagttctcccccacgccgtccagctccaggccggatccaattcgtgctatccctgctcgtccagaatttcttgccccaagtccggcaatcccctcgccgtggatttcctcgagcttgcctccccatggtcgccaaccatcctgccccctgcccctggtgcgctgggcgcctagtgctctgacctcgacggccaccctcctctctgctcgagcaatgctagggacgtgtggcaagcccttgttcccagcgtcgcgcccttgcctccatcaacactaagaccccggtagcgcctgccatggtcgccgcaggtctctgctccttccccaagctcgccctcatctcccaggtcgccactttcctctccctgcccacatcatcggattctgctcgctgcgtgcttgccggcatgtccgggcgtggccctgcagattcatcataggtacctcctcgaactcctccacactggttgtggacggcattggtatccctctgctccagcagcgttgcggcgccccgagctcctcctccgcgtgctgccatggtcggggtcagtctcatccgacaacgccatgacttccactccgctctgtggcgagcagcccctgcaccatccatgctcgtcgtgtgttcgagagttcacgcgcaagtctctgcgtggtggccgtgtcgctgcaagcttgtgccacgcacccgggcatcgtgtcgcaccaaatagcagcagcaacacaccctcaagcctcgcattgaacctgctcgacgaaaagcgcagcaagctgcgtgtcgttcatccctgcagcaacaccattcttcacttcgcgtcatacatcgcatagccttcatcgctgcacattgtccgcatcggcgcagcagccctcccgttcattctccactcccctcgtcgcgtgtcatcaatctcgtgcttgctgcgcatcccatcctcgtcgtcgtcaaaacccttgctagatgttgtcgctgcgcctcgcgcgacacatgattcggtgaaacacctaaaaccgtggaggcatgcgcgacacgagtcggccaggaccgagagataatgatcgtgccagtgatgtggtgacaaccacaagatgcagtcggtggacgacccaaggaaggatggacttaaccagtggatgctcgccaagcgag

SEQ ID NO: 40364 - DNA, 2512 bp, Zea Mays
cacactcaaaagaagtgcctcgaaaaggaaacgagcaacaggagacagtgaaggggaaggagggggagcgaccaatcggactatcggagcatccaatccaccaccggccgctcgctgttcatccgttacactagcagtataaaacaaaaccctgtgcctctcctttgccggcgcgcagtccagcggcctttccttccttccttcctgtccggtcgcgttccattgctcaccctcctcctccattctccactggtatcgtcgtttcgttccagagagccgtgaaaggcgtaaggcgaaacgaagcgcgaggggcaggatgccgtaggtggcgaccgtttgtgccgctccgatcgtcgggaggtcggcgcctgaggaggccgtgctttgagttcgactggaggagagccttggcgccggtcgttacggcaagtggcgccgtcgccttctacgcaactttgccaggtcagcgcagcctcacgtcgtcgtcgacgattcaggtctccttccttccgttgcattgttcaaaattctcttagagcttttcttttccccttggcattgccgcgcagctgctgtaaactgtaagcatcgcaccgtcacctgttcattcctacgtgggtgagcaacttggtgcagtctgttatgctacgactaacgtagaactgtagatcggaaagcgatcggggtccactacgtggcggctctcgacgtcaacggcgagggatagggcagcgtgtttgacgaaatgctttgcgcagtcaaaagatggccaccacctcgctactctgtttttagttgtacatcctcctctgttctgcgacatcctcgcgcttctaatggacttcccataggatgataagctagtttatgagtcggcaagcgcatccaaaaaaaataaaaacaaaaactcgcaaccatacgttgtcgccacctttaaccggcattgctgttcacgaattggtagacacttgtgctcgctttagcttttcgctctaatatcgtcgtgcactttgctatgtacaacttgccaaattgctctagcagtctagcctctttgtgctgtgctctcttctcaccttccattaaactgatccttaatgactcgagttcgcaacacacagcactgtagaacaagtttgtccgaaaataaaccgtaaccgataactactattctcactccaatttgttttccgttgattacttgttgcaggcccgaatacttccgccagctgctgaagcccgttgccgcacgccttccgagcaacctcaaacccgaaccaaactaaccgaaacgcaatttttggattcagttcctagcaatccaaacacaaacacagccagggatcaagcaacacgactcgagtggtccaatgcagggagaccccggttacgggtacggtggctacggcgccggcgccggcggctacggctacgactacgacgtcgccgccaactgcgccggaggcggctactactcggcggcgaacgaccggtaccctgccgcgcctccgcctgctgcagcctatgaggatccgctcggtggtcggaggcagcacgacttcccggcgccgctcacggggctggagttccagccgtcggacacctgtcccaagaactacgtcatcttcgaccagacgtacgaccggagccgggtgatgttccacccctccctggccaacaacttcggttcctctgccggcggatacgactacggcaaccactgctacggctacgaccagacctaccccggcgagagcgcctaccacggctgcggcgacgacgccggcgccggcgccggcggcgtctcggtccggcagaaggaggacaccgacgagatcgacgcgctcatgagcacggaggaaggcgacgaagaggacgacgtgctcagcaccggccgcacacccggatgccgcgccggcggctccccggattccacgtgctcatccggcgggtacgctgggaacagcagcggcggccggaagcacgagacgggcggcggtgagaagaagaaggagcggatgaagaagatggtgcggacgctcaaggggatcatccccggtggcgaccggatggacacgccggccgtgctcgacgaggccgtgaggtacctcaagtcgctcaaggtggaggtcaagaaggccggcgcgcgtgggtcaagcagctagctttccagctgcaactggtagtctggctttgggctttggcagtcgaaataggagttatctccccgcgcaccggcagataagatgagaccgaccgcctctcattttgattttggcatcagatgccattctgtgtatctgactactacctagcttggccgctgggcctcccaactcaacggcgtctgcgagaagatggtcaaggaggccaacggtgggcaggcttggacgcggtcatccatgagtggttccgacagtggtgattgttggatactcaatctgttatgagaatctacggaacaggaggaaggagtctgcatgaggtctaggaaggaagtggtggattcttc

SEQ ID NO: 40365 - DNA, 1725 bp, Zea Mays
actttctcagagaacagatataacgtaagaaatccctgcaacaacaacaacaaagtcttttagttccaagtcgttagaagtgttggcccatggtcagcaggaacagctcaaatcgaaggaagcatccataatgcctatttttctcttattgaaaaggcagaacattttgtttacatcgagaatcagtttttcatttcaggtctttcaggggatgacacaattaagaatcgtgtattagaagcactatataggcgcatacttagagcagaaaaagagaaaaggcgcttccgggttattattgtcataccacttttacctggttttcagggtggcattgatgatggtggagctgcgtctgtgagggcaattatgcattggcaataccgaactatttgtagaggacctaattcaattcttaaaaatctgtatgatgtggttggctcgaaggcggatgattatatctcattttatgggcttagagcacatggaagatcagatgatgggggtcctctggtcaccaatcagatatatgtgcacagtaaattgatgattattgatgatcgcatggcattgattggctcagccaacataaatgatagaagcttgcttggatctagggattctgagattggtataattattgaagataaagaggttgtcagttctataatggatggaagaccttgggaagctggaaagttctccctcagcctacgactttctctatgggcagaacaccttggtcttcttccaggagaggttagttgcattatggatcctgtggatgattcagcgtacaaaaacatctggatggccactgctaaggagaataccgtgatctaccatcaagtattctcatgtgttcccaacgatcacatccattctaggtatcaatttcgccaaagttttgctcatcgtaaggagaaaattggccacacaaccatagacttgggtgttgccttagaaaacctggaaacgcaacaggagggagacctggcatgtgccaaaccaatggaacggttgcaggacgttcggggtcatattgtttgcttccctttggagttcatgtgccaagaggacttgagacctttcttcagtgagagcgagtattatacatctccacaagttttccattagggcttgttcggttatttcaatttcatgtggattggtgtgtattggagtgaattaggatgaattttgacttgctatggatttaaactgactcaataccatctaatccacatggattaatgttgaaacgaacaagcccttagtgtttattttcccgcttttggcgaaagtccgcccataggtacatgttatagggttattatacttgtatatgcctagatcgtgtctcgtgcctggatgaataggaaaaacaaaaacaaaggaacaaccatatccttgctagtttcgggtatataggatatgacggccaagatttgtacagatcgtttatcagagttagttcgggcagcagatgttgccctattagatgaattcttttatgcaaaataaaatgcacttaaagctgaatttgatgccttgtagtcttgtacattgagcattggcagattctgttgaaatttgttatctgatcattattgtggatgtggtactttggaagtttctgtgaggcagtgagggcacatttggtatattgttttatctaatgtaatcattgttttataggcaattaaatgtacatgctgagacgaa

SEQ ID NO: 40366 - DNA, 3933 bp, Zea Mays
cctgtacctgtttgctgctgttttttctcccacgcgatccaaccgtttgtttacgccgggctaggtttctcgaccgtacggggacaggacatcagtgcaactgtgcaagcgaccgccaccgcattacccggaactgcccagatcttcgtcgaatcgtcgggccctttgctggcgacgagcaaccacagcttgcaatggcacaatagtgacatcttgggaaacaatgaaacgttttgtctatatcaatgatgattcgtgccggtattcctactgtgacaaccggatatccaataccaagtatactctgtggaattttctcccgaaaaatttatgggagcaattcaggcgtttcatgaatcagtattttctactaatagcctgccttcagttgtggtcccgtatcacccctgtcagccctgcaactacatggggtccacttatcatcatcttcattgtttctgcttcaaaagaggcttgggatgattacaataggtatctttctgacaagaaagcaaatgagaggaaaatatggttggtaaaggatggcgtccgcatacagatcaaagcacaggaggtacatgttggagatttagtgtggctccatgagaatgatgagataccatgtgatcttgttctcattggcacttctgatcgacaaggcatttgttatgttgagactgctgctttggatggtgaaactgacttgaaaacaagaaccattcctccaatttctgctaacttgtcagtagagcagctaggaaaagtcaagggtgtaattgagtgccccaacccagacaatgacatacggaggtttgatgctaacatgcgcttgttcctccctataattgacaatgaaaaaagtcctttgactatcaacaatacacttcttcagtcatgttaccttcgatacactgaatgggcttgtggagttgcagtttacacaggcaatgaaacaaaatctggaataagtaggggagctgcggagcccaagttcactgctgctgatgtaataatagacaagctcactattgcaatattcatgttccaagttgttgttgtacttgttctgggttattttgggaatacttggaaggacactcaggggcttaagcaatggtatcttatgtatcctatggaggtagagggcccatggtatgatttcttgattatcccgttacgctttgagctgttgtgctccataatgattccaatctccataaaggttactcttgatttggctaaaggtttgtatgcaaagtttattgactgggatgagcaaatgtttgattgggaaacaaatacacctgctcattcagctaacacagctattagcgaggacctcggacagattgaatatattttgagtgacaaaactgggacactcacagagaataaaatgatcttcaaacaatgctgcataagtgatactttgtatggaaatgacaacggagatgcattaaacggttgtctacttactcattatgttctttacatcctattaagggacaatgttcatccttttcttttctctattaaggcatgcttgttatgtgtatgaattatgagaaattgcggaggtggaattgggggataagggtacatcagccctctaaatggaggagactgagctgggcgtaatacaacacgtcaacacccatggttctatttctgcaagtgagcagttgtaacactccaactactccaagataagtttccgaaaaagaagatgtcagacttgtaaatgcggtctcaagtaatgatcctgatgtcatcaaatttctgttggttatggctctttgcaatacagtggtccctatcaaaagcaatgatggtactgtgtcatacaaagcacaatcccaagatgaggaagctttagttaacgctgcagcaaagctgaatatgatgctcatcagtaaagacaccattacagctgagatttgtttcaatgggtctaagttttggtatgagttgttggacattttggaattcacttctgatcgcaaaagaatgtctgtagtggtaaaggaaggggagactggtaagatccttcttttatcaaaaggtgctgatgaagctctcctgcctcgtgcctgtccaggacaacaaatacagagatatcttgaagcagtagaaatgtattctcagttgggattgcgaaccttatgtttggggtggcgtgatttaaaagaaaatgaatataaggaatggtccaaaaactttcaaaaggctagctgctcattggacaatagagagtttaaaattgctgaagtttgtaatagcttagagcaagaccttcaaattcttggtgttactgctatagaggatcgtcttcaggatggtgttcctgaaaccattaaattgttgaggaatgctggaattaatgtgtggatgctaaccggtgataagcaaaatacagcaattcagattggacttctctgtaacctcataacttctgtcaattgttatctatcagtgggaaaactgaagaggacgtgctaagaagcctagagagggcattatttattatgaaaaatacatctgaaacaaagggtcttgcatttgttttggatggttgggcacttgaattaattttgaagcattccaaggagtcttttactaggttggcgatgctgtcaaaaacagcaatatgctgtcgaatgacacctttgcagaaagcacagcttgttgctatcctaaaatccgttggctacctaactctagcaattggtgatggtggtaatgatgttagaatgattcaagaggctaacattggagtagggattagtggtagggaaggactgcaagctgcaagagctgctgattatagcattgggaagttcaagtttcttaagagattgatacttattcatgggcgttattcatacaatcgaacagcatttatttcacagtactccttctacaagtcacttcttatgtgctttattcagattctgtttgcctttttgtcggggctatctgggactagcttattcaactcaattagcttgatggcttataacgttttctatacaagtttacccgtcatgactataatctttgacaaggatatctctgaaacaacggttatgcagtacccccagattttactgcattctcaagctgggaggcttttaaatctcactacattttgcggatggtttgggcgctcgctatatcacgcactcgtcgttttcttcattacgatatgcgcctactcagatgagaaaagtgagatgcaggaactgtcaatggtagcactgtccggttgcatttggttacaggcttttgttgtgacaatggatacaaactcattcacttgcccgcaaatccttctcatctggggaaactttgtggccttctacatgatcaacttaatactcagtaccgtcccaagtctccaactgtacacaatcacgttccgcctgtgtagccaaccttcctactggatctccatggctctgacggttgcagtaggaatgggaccggtggtggctttcaggtacttgaagaacctgtatcagcctagcgccgttaacatactccagcaggtcgagcagcgcaatggatctatcagaacttctgggaatctggagtcggcgggagccaatctcactaatctactgactggctcacgtaaaaacagggattctaattatcgccctctgctttcagagtctgcggagtctgtaagtgcaagcggcagctaagaattgtctaggctttccgtactagcatgacagtcatacactcatacagacggcagaacagtgaactgtaacagaatcatgcttgtactaaaaaatatttcgtcggggtcaaagccaataattgttttgttggcctaaatttgatcatttttctcagtctgcgctgtggcaccgtctgtgctgtccgctgtcgcacgtagggatggtaataggatctaaattttac

SEQ ID NO: 40367 - DNA, 1233 bp, Zea Mays
ggatgagccggttcgtcatgcccgcatgcacgggcacgagccttgaacacacgcacacctgtgcatgataaaaagggtctctccatgcatgcacgtcaatcacttttgccacgaaaagacgcacacgtaaacgattcggcgagcccgatccagaccggaggagaaaccaatcatggcccccgtcgcgtccacacccaatcgaaatccgttcgtcacgcgagacaggattgcgcgcgatcgagttagtatgtaatataatcctcggctcgccggcacattagcaacaatcacgacgacgacgacgtctttggagctggaccacacgctgaggcctgaggccggccggggcgatcgatcctccggctagccgaagggcccagatcaagatcccgcgaccgcgacgatgcatgcgacccggccgcccgcccgcgcctatttctcgggaattggctcccacgcagcacggattttccgtgcacgacgcgctcgggaacgcccaaaggccgtaaagccggcacggccggcgccacgaccgacgcaggcgcccgcgaccggactgcatgcatgccgatggagcaacctaggagcgacggcgccatgggctatgcatatggccgacgaacgagcggccggccggtggtgcggcgccccgccattattcaaacggcacggcttccccttccccccgacccgatcgaacaccccgggcgcgcggcaaagcaaaaggaatgaggtggtgctgccgccgctttccggagcgggcgctcgcgatctcatcccgactgcccgcccctgccgcggccgggccgtgtggccctatcattggtatctgccgagcgacgccccaaaagcatgacatccgcctcagcttttcaggagctctgcatgccataccatggtctggtcgtcgaaaagctccgcctccgcggacttaacgggtgtgggtgtgactgtgacccaattaagcggctaagctttactgctttagctagctagctagagccctgagcccccgcgcactccggtccgaacaagcaggggccgggtcacgagcggcggcgagtgacgatgacgagagagctctggtgtctcttgtttgtacggcgcatgcatgagagagggactgtttcgccttgcttagcctctcgtacgtgcggtctcctggttgttggaacgtgactgatgacgatgctgctgccgcgccttttcgagagctggcgcatggcgctgatg

SEQ ID NO: 40368 - DNA, 1923 bp, Zea Mays
atccaccacaccactcgagcgcgcgcgcggcccaccgctccgccgctgcccgcccgccgccatgcgagggatcctctcctcttcctccgctctcctccggcgagccggcgcccagctctcgcgcacggactgcagtagcccctcagcgtccgcgacctctcctctccgccgctcccctcttcaggaatctgtacaaatttccagttgatatgcagttagactatgagagtgatccccctcttgacgatacaaaagctattgagaaggagtcatcacttaatgttgctgtttctcaactcgcaattgacttcgatagagactctaatttatgtttggagcgattttcccgtgcaaggaaagcatctgtagtctctactggttctcttaagcttgacctcgctctcggcgttggaggattaccgaagggtagaatggtggagatatatgggaaagaagcatctgggaagacaacactcgcgcttcatgttattaaggaagctcaaaagaatggaggttattgtgcttatattgatgcagaaaatgccttcaacccttcatttgctgaatctattggcgtagacagtgaaaggctcttgatagcccaacctgattctgctgaaaattctctaagcattgtaaacactcttgttggtggttctgttgctgttgttgttgtggacagtgtggcagcacttattcccaaatgtgaaattgaaggtgaaatatacacaaattgtggagacatccaatcccatttgatgactcgggcccttagaaaaattcagtacactttatgtcgatctgaaacacttattatttttgtgaatcaggttagaacaaagaggacatcaagtaatcctgggatctacaaggaggtgccttgcggtggtaatgcactaggattctatgctgcagtcagaatgaggacttcaaggagagaactgcgctatagtgaagatgaggctaccggcgtaggtatatcagtgcagatcatcaagaacaaattggctccagcgaacctgaagaaggaagccggcatcgacatcacattcggtaaggggatctgccacgagtcggagatcctggagacggcttcctccgtcggagtgatcctgaaagacgggtgtgggtattggatcaacaacgagttcctggcaggcaaggtggaagcggagaagttcctgcgtgaaaacgctgcagtggcagatgagatctgcaataccgtgaggaacgagttcttgcaaaggtgacatagggcgaccgattagagaggctaatgcattgttagtcggaaatgttgtaccgtcatgtattcatagaagaagatttatgtaggatgttgctgtgcctgtcgtgtaactttgactcgcaacagttcattgagtttaccagggccattccctcccagatcatatcgttaggttcttctatgttgctggttgaattcagggctgacttgtcatcacacggcttgagggacggccaagaattccaaactgtgcgccgtgcgcggatacgtgttctgtccacagcaagcgaagtggcgtgcaagcgcccctgggaagggattgggtgcgtggacaaagctccacccttgattctgtaaccgcgtgttttgtccctgctcttctctgtcagcgaagcggaggaagcagtcatcggtgcggcaaatgacaaagaaggtttggctgcaacagcaggagatgggccgtgtcgggccaaaaggctgaggaagtgcaacccaaaggtctttgggccggcgtggctaaacagcacaaagtaatccagccgattattaaataagggttcggcggcgcgtagggtttttaggctgtaacagaactctagactctagttcttcttcctttccaagtactatctcaactactctgttctccgtctctgcattctccagatattgtg

SEQ ID NO: 40369 - DNA, 2599 bp, Zea Mays
gcgattggtcaaatcgcagacagtgtctcggacgtcgccgtgcttggattcttgggaagccctgtacctgactactggatccactaccaagctcttcaagttccaggatccattcctctttgtcgggcaagagctcttggcctctgtggattatcagcctgattcacaactctctgcaagaattcgagcgcagatgggccaagaaagcgcggctgacgcgattcctggtttgatggtttctgttggtgtttcgggctaacagactctcttttttttgtttacttcctcaaagttccacttcaacatatggatccgggcttcccgagttggaatctgatcactcgcgtcagtgcttcttagcttccttcatttgccgtcatggaggagcagaactcatggcttattaggaccaagttctcccatactgtctacactagagtggatccacgaagagtagcagctgttgctccggtgggcaaagatgtggtgctgccttttgctccgcttagtaaggatgttgagcggaagctgcagaaaattttcagtatgaagaagtctgcatcgatgcctgttgatcgggatgatgaagacacagggactgcattcaagcactgcgctagcttgccgctagtccggtcctcgcctcagcttgatagggacaaggtcaacaagcccaggagggcgggcctggaggttcctgcaagccccccgatgaactcagagagttgcaagacaccaaaggcaaggagcctggtcaagagcccaagttcgatgatgctcctgagctacttgaacaaggcaccatcaaaccaaggctacagtccgcaaaaggcttatggatctcggcccagaccgagatcaaagtccccccttcccagtatcgcgccttcggaagtgttcagggaagcgaagtctaccagcaagaggtttgcaagccctcctccacagcgaagaggatctgaaaagagtatctatggcaaatcgtttgctagacaggtgtcggatattggtcagagtcctgattggtgttcaactccagtggtatctggtaagcacaagtctcaaaagaatagtgcttggtcaaggaaatccagcggtggaaggaggattagcgcagtaaaccctgcggatgatcgtagggcgcagatggttagaatgaatcaggcggtgcagacgacgttcgattggacgctcgatccatccaagctgcttgttgggcacaggtttgctagtggagcgtgtagccggctgtacaaggggttctatgatgagaagccagttgcaattaaatttatccgccaacctgatgatgacgacaatgggaagacggctgcaaagcttgagaagcagtataacagtgagatcaattcgttgtctcacctgtaccataggaacgtgatcaagcttgtagcagcctacaaatgcccaccggttttttacatcatcaccgagttccttcccggaggctcgttaaggtcatacctaaacaacacggagaaccacccaatccctctggagaagaccatatccatcgctctcgacatcgctcgaggtctggagtacgtacactctcaagggatcgttcaccgcgacatcaagcccgagaacatcctcttcgacgaggactcgtgcgtgaaggtcgctgatttcggtatcgcctgcgaggagaccttgtgtgacgtgcttgtggaggatgaaggcacctacaggtggatggcgcctgagatgatcaagcagaaggcgtacaaccggaaggtggacgtctacagcttcgggctggtcatgtgggagatggtgtccggtagagttccttacgagaacctgacccctttccaggtggcttacgcagtggccaacaggaacttgaggccaacgatttctccagaatgcccatcggccctcgggcccctgatcgagcagtgctgcgccttgcagcctgacaagaggcccgacttctggcagatcgtcaaagtcctggagcagtcccactccatcctctcgcagggtggctgcctcgacgcgcagaagagcggcacctgccaggaccccaagaagcggctcatgcagtggatccagaagctgaaaccaacgcatggcgcctgagtaaccgagttcttacaggctatagcatcgtttcagccgcagttttttttttcttttctgtctagttgggtatgctctcagtagtttagacctgttaaggaggatccttggtttaaggaaccagcgttctaaggcggatgctcgtagctgtgtgaccaaccactggtctgcgagcatagatcttgcagtagctgtacatggttatgcttttgcatctcgtctccccatcatgttaaaacttccctgcaggttgttctcatggatggtaccatagtgtgtgcggtgtgcggtgtgccccctcactcgttgagctgaaagcgagaggaaaatcatacgacgcagagttgactcctgaggccgtctttcgggaaagggtcgtatgctaacacaattattgcgcctttcccttctattgttagcagctgccctgccgtgcttattgtcatcatgatgctgatatctgagacagcaacatctgatggctgcttgtctaaag

SEQ ID NO: 40370 - DNA, 2543 bp, Zea Mays
ctcgccttcgcaatactgcgtccgcctttctctaggcgacaggcgagctcccacgcctcaccaaattttggcgggttttcgacctggacattgctcgttgcccgccctcctcagttcctgcatctctcccattccacagctgccgcctgccggcatatcgcataccctagggcgcagggccactggaaatcgctgaagcgcctcggtgcgaatgctcctctccaacatctttgagccgcacgggacagcaggataagcagcataatggcgtcctattattcctcttggaggcaaaggcagacaatccgatttccaaggctgcaaactataaatcacggtcaggtgatttcattccaacatatgctcgggctgcttgttcgtccagatgttggagtaattgtcatccaaggtattgctggctctggaaagacatgggctgcgaaggctgcataccgggcagcaaggacttcgaatctctttcaagaaaagaaccaaggccataatcaaggaatatctcacagcacggaaattcctcattgttcttgataatgtttattttactgaagagggtatcttagaatacctgggagttcctcgtcctcgacagcaaagtcttggctcaaaaatatttgtgactacacgaactgtgaggggagaatcaatcatggagccagatgtagttataatgccacaacctcttacttatgaagagtcatacgacctgctgcgtgaaaagattggaaaagatatcaactttgcacatgacttaatcagttgctgttttggcatgccgctcacagtcattctattggctggggttctgtatggctcacctacacaagaagcatttgatgagttggtcgcaaaagcgcatgtcactctagaagctcagacatcagcgttaaacaccatgaagcgcctggtgaaatttggataccagcagcttcctaacaataatgtgcgacgatgcttgctgtactgcctactcttcccggaggatcaaggaatttcagtcaaaaatctggcactggaaaacagatggtctactccagaaaactactgattttgatgaggttaaccatattggcaaggaaattcttgatgttctcataaagcatggcatgttatatttggacgtcgatggtgattatatacgtcgatggcatgttatatttggacgtcgatggcatgttatatttggacgtcgatgtagataggaggtcgttcgattccatcacctccgccacctatagcttgactacacgacggcctcaggtatactcgttttttacacaatattaatcgatcatataactgcttgatgtggttagttatttattagtgtatagttagtattaagtgtttaggcattattagattagtaagtatataggtagtagtatatagttatatgtaagcaattatctattacttatttattacttagtaagtatttaggcattagtatattagtagatggggatagtatttagttaggcattagttgatagtgttagtcaggtaccatctttaatggttattgagttatgaatccgtgtttgtaatagatggacaccctagtgacactataacgtggaggaagcgtggaggaagatgtttataggaatgttagttttgatgtaatgaagaacgtgaatgtgatgttcgatgaaaggccctcttttggctagattttcgcaagagcttgtgaggagattagttgcaatttaaacgaccctgtcaacatatcaattgagggtttattgtcccatgttgcatctgggacaatattttgacagttgatctccattggctctgaagatgactggttgaaatatgtcaaaattgtgatgacgattgttcacaaattttgacatatgcatctccagtcgggttgaaatatgtttggatgtggtcgtttgaaagttattctttgaagctccagtcggttatctccacaaatgccaaatgcatctccttgtgaagctcttttgcctaagcttccggaagaagtgatgcttgtgtcggatgctcaatcggtcccaaacgaggttgagatccctcatccagttcatggcgtttgtggggcctcgaattcggtggtaccccccaggacatccctttgacccaggatcatcctagtaagtgtctttaacacgctattcatatgcatcgttaattcgtttgatgagactttaatgtagtatttgctccttcgacgcgatgcatgagttcgacaactatataatggtgcttatctttctgtgcccctatcatccaatatggaccacatatgcagtgcctcaaatagtgttgatgttcagattgaggatgaggaggagctatatgaggctgcacgggtgtaacaccctgaatttgggggtataaaatttctttcttaatacccaccaaattcaggtgttaccctctcctctccttgcttttcttttctttctcctaaatagtgaagaagtatttttgtgttatacttatgtgtaagcctagtaaaataaaaccctagtggtgctttgattgttgcatca

SEQ ID NO: 40371 - DNA, 2001 bp, Zea Mays
taggcgatgctctcgcctcctgcaacaagcaacgcgtggccagcagcccattagcttatatgactgatttggcaaagcttattattagcttatataagaactcagtagaaatggagttcttcacagagtacggagaggcaagccagtaccagatccaagaagtcattggtaaagggagctacggagtagttgctgcagctgtggacacccgcaccggtgagcgggttgctatcaagaagatcaatgatgtgtttgagcacgtctcggatgccacacgcatactgcgggagatcaagctcctccggttgcttcgtcacccagacatagtcgagattaagcacatcatgctccctccttctcggagggagttccaagacatctatgttgtttttgagctcatggagtcggatctccatcaagtgatcagggcgaatgatgacctcacccctgaacatcaccagtttttcctgtaccaacttcttcgagctctcaagtacatacatgccgctaatgtattccatcgtgatctaaagcccaagaatatactggctaactcggactgcaaactgaaaatatgtgactttggacttgcccgtgcatcattcaatgatgccccttcagctatattttggacagactatgtggcaacaaggtggtaccgggcacctgaactatgtggttcctttttctccaaatacactcctgcaattgatatttggagcattgggtgcatatttgctgaacttctcactggaaggccactatttcctgggaagaatgttgtacaccaattagatattataacagatcttcttgggactccatcatctgagaccttatcccggattcgaaatgagaaggccaggagatatttgagctgcatgcggaaaaaatatcccgtgccctttactcataaatttcgacatgctgatcctttggctcttcgtcttctagagcgtttgcttgcatttgatcctaaagaccggcctagtgcagaagaggctctagctgatccatactttgcatcccttgctaatgtggaacgtgagccatcaagacacccgatttctaaacttgagtttgaatttgaaagaaagaagctggccaaagatgatgttagagaactgatctatcgagagattttggagtatcatccacagatgctggaggagtacatgaaaggcggagaacagattagcttcctctatccaagcggagtcgaccgcttcaaactgcagttcgctcatcttgaggagcattacagcaaaggagaaagaggttccccactgcaaagaaagcatgcttccttaccaagggaaagagtggttgtatccaaggatggcaatactgaacaacaaattaatgaccaggagagaagcgcagattctgttgcccgcactaccgtgagccctccaaggtcagaggatgctgacatggatgatgtgaaacccacaagcttaagctctcggagctacctgaagagtgcaagcataagcgcttccaagtgcgtcgttgtcagaaataaacacccagagccagaggatgatggaatacctgaggagatggaaggcaccgtcgatggattgtctgaaaaggtctccaggatgcactcctaaggcaggactgtccatggcgacagcaatctcgacacaagatttctgtctggtgcactgtaatgccgacgacacactgtttggatcttgtgtacacccacagctagttcaactaagatgtagcactagttcgtccatggaggaagcagaatggacgatgaagtgtggtcagcctgtcgaccatgaggtgttttcttccaatggagtctagggtatgtttgagttctacaacggcttgtgccgtacgaagtgtcagcagtgtacgaggaggaggatatcgttgtcagtacacattttgcctgtctagaaaattatgagtactttctccgatcacaagtacatgtacatccatgtttgtcttaagataaaaaaagaaaattcacaaata

SEQ ID NO: 40372 - DNA, 1837 bp, Zea Mays
gagagaggctaagcaccacctgactcggctgaaaatctagcgcgaccggcttttaacacggcccggcccatcaaaatgaatgcactgtactagccggcgaggaccacgtgtacccgccaccgcgccgcgcggctccaccgttcggcggcgctcgggcacggcacgccgtaaaaccctagctcttgcgccccctcctctccaccgcgccggcgagccgtggagacgcggagctaaggatgccgcggaccactgagctggagagccccggctgcccgccgctccgcgccctcaccaccgacatcctcggccttgtcaaagtcgtcgaggcccacgcgaggccggcgggtgccgccaaggtcgtggagacgtggggcgcacccgacgcctcctgcgccatcgtcgctgcctccctcgccgatcgtgccaccgaccccgttttggctgtggcgaggatgaacggcgtggttgagttgctgaatcccctgaacggagatactttggctgctgtcaaggcagtgggaccagcaccaaatgatggtggcgctgaaggtgatcccctcactgcattgcaccttttcacaagacaggcttcggactcgatcttaggaacgtttcttgcttgcactgagcaggggaaagcttctataaggtccatcacgaaagaaaatgcagcttcaggctcacatattgagccatctgctacatgggatgtgtgcggtggggccaatgtgcaattttgctcagttgatcatggtgaaaactatgtgatgtttggagggaaaggtatagaagtgagtttgtgggatattacatcttgtagtaagacatggtctgctaaatctccccgaacaaatagtcttggtatattcactcggccttggttcactgctgggaccttcttgtgcaaggatgatcatcgtaaaattgtagcctgcacaaatagtcatcaggtccgcttatatgatactgcattgcaaagaaggcctgccatctctgttgagtttaaggagtcaccaatcaaggcagttgctgctgatccgaatgggcatgatgtctatattggcacagggacaggggaccttgcttcctttgacatgagaactggactggatagctacttgcgtatttgggacacaaacacaagacagttgctatctgctgtctttctgaagcaacatcttacaactgtggtccttgattcacatttttctgttgaagagcctggagagatgaaatccaagcaactggagtcttcagtggagactgagactgaagtccgaaaagaaaagaagaaaaagagtaaggcaattacagaggatgagactgaggcacaaatccgaaaagaaaagaagagtagaacaattgaagaggaagaacaagctggattggtcgaccatagcgatattaatgatgaagtatatgccagaaaagaaaagaagaaaaagaagagtagaggtattgaagggggcaaggagcgagacagcgacggggaaatttgcagtcccaagagaagaaaatctggagaaagaagcaaatgcctgaagaagaggagcaagaaacagctggttgcctagtacaagtatcatttctcattacccgccttcttgattttgcagaattacacaattttgtgtggtagtttgttcggaattgtatcccttttgaaaccctgcaagggaagtgcatcattttcgtgtgcgcatttttctactctggtgtagctaaattttgagacatacacgctggagtagttacagccaaaacttgaaactaatttttgagatagacatgtgggactaaatttcgagatatacgcgtaggagtttctactataaaa

SEQ ID NO: 40373 - DNA, 870 bp, Zea Mays
tgtgggttgggccgtatctgtaataaagggtgccgtaatgactcactgtaacctcccctcgggggaatattcgggggataaactaggtaattgagggtctaaatgtccatgacagggtcgggcagtccctcgattacctataaatacccccgtactgtgcgtctgtgccaaagcgcgggcataaaaacattgtggctttgacaccccgtgatgttggattatggctggaagaaataaatcttggtggctacaaacaagtatttcaagaaaatagtgtcaatggagaatatctagaaagcttgtccatgtttactactgagcagattctgcgctttattaggcggtgccatatgaaatggggagactttatcacactgtgcaaagagttgaggcgcattaaagtggcgtgccttaaaggggagcaagaagtccgcaggccatggtgggcgccggcatgcctctccgtagttttcgtgagggcagccaagcagaacaggaagtcccgtgttgtctcgttgaagctggaaccataatgcttgtcaagcacttcgaaccgtcgtgcgctagcctaaagtgaattcccagaagaagaagatgaaattcaagaagtggtttctgaagaggagtctgctttagtgcctgctcaacaagtaatgggagccatctaactggggtttaatagagggatttagacctccgtctctgcaacaaaggagaagttttattcacttatctttgggttagttacttcatgtggaggacttgaagcttagaatgtttttatatatctcttatggaaaggcttcacccttccaattattgtaataagttatgcacttcgagtactatcaggacttgtaataaatacat

SEQ ID NO: 40374 - DNA, 751 bp, Zea Mays
gggttcaatattctttgatgtttgtctagatgagtgacttttaaccatactaagttttagatgtgttcaataattgtgagcttgaattgttacttgactctcgatcctatgttctagttaaggaaaatacatagcttgtgtagggttcaatattctttgatgtttgtgttagatttggttaagccagacaaacgtaattgtgatacgtagtgatatgtcaacatatagtaattgtttttaagtattgtggtacatcaatgttatattctaaatatattaggacttgtatgttgctaatgttacttgatgattgatttaggtccgattgactagaacgtcatgtttgatgtagaattagttgtgatgttttgctttaagtctgtatcctccttagtatagcttatctatcttgtgctatatatgctcctactcactcatatgcattatgcatgtcatttaggtacgttaattgatcacgtgatgtggaagacaaagtttggattgatctcaagataatgctgatggacgaagctaaaatgggtgaatcaaacaagtgccagaatgggagatgctcgccaagcaaacatcatctaacaacactgacttagtgttatcccagtttgattatcttgattcctgttttataaagagaactaaagatgcttagccctgcttagataattaaaagttgttcttttttaaaaaaatgatgtgttacatgggatatgggaaatttttgtgaaaaagaaat

SEQ ID NO: 40375 - DNA, 1564 bp, Zea Mays
accgtgagagggggagggggtatttaactgacggcgggacgaggatgcaagctctcgcggcagcagcaactgcagtggcggcgcctacccccgcgcgcctccgtctcccgctcctcttccgcgccccgcgctccgtcaggtcactgtagacccgcttcttcctccaggcttctgcggatctcgtgcagtgccaccactatgggagacgagacctcgacctccgttgctcctcaggagcaggaatccactgtgcgggctgggagtgtcaagcaacagctctccaggctggtcctttcatccctccagactacattgcccgatgtggaggtagaaccgatggttgaagtttcagcaaagtttgctgactaccagtgcaacaatgctatgggattatggtcaaaggttaaaggatctggaacaattttcaaaaaccctaattccattgggcaggccattgccaagaatctgccgtcttctgatattattgaatctgcatctgttgctggacctggttttgtgaacattaccttatcaaaccgctgggttgcacagagaatacaagatatgcttgttaacggcatcaagacttgggcaccagttctgccagtaaataggacagtggttgatttttcatcacctaatattgcaaaggaaatgcatgtgggacatttaaggtctacaattattggagatacattagcacgcatgtttgagttctcgaatgttgttgttctgcgcagaaaccatgtgggagattggggtacacagtttgggatgctaatagaatatctttttgagaaatttccaaattggcaggagataggttgccaggccattggggaccttcagattttctataaagcatccaagcataggtttgacagtgatccagactttaaagcaagggctcaacaaggagttgttcggctacagggaggggaggataaatatcgagaagcatggaaaaaaatttgtgacattagcaggagcgaatttgacttggtctacaagcgcctaaatgtggtgcttgaagaaaagggggagagtttctataatccttatattcctcaagtgctggaggaattgagtaacaaaggcttgatcaaggagagtgagggtgcccgagttatatttattcaaggtcatcaaatccctttgattgttgttaagagtgatggtggcttcaactatgcctcaacagacttaactgctctttggcagagtggatcatatatgttacagatgttggtcagcagcagcactttgacatggttttcagtgctgcaaagatggccggttggctcccagatccaagtgaaaagaagtttccgaaaacaagccatgttggatttggtcttgttcttggttcagatggcaagcggttccgaacccgcagtactgaggttgttcgattggtagagctacttgatgaggctaaatctcggagcaaatcagaactactacaacggctcactgaaaatggcaaaattgttgactggacggatgaggaattagagcaaacttcagaggctgttggatatggtgctgtgaagtatgttctgga

SEQ ID NO: 40376 - DNA, 339 bp, Zea Mays
ctcgggactacatgggaatgggtttgtacaaaactcagttcctttcttctactatggttgacccatcgtcttttgggttgagggattgtagttgttcttgctttttgtttgggggtgggtacactatggtgattaaatgaggtatgtgacaaataaggctcacacgtcatgcacgcttttctttttttccgcacatcactctatgacactgccacccatgttccagctcgcttcatctaccaatgttccatgtcgcaactcgcttgcttacatgtacacttctccacctaattaagtaaagcacctcgcctatgcccaccacgctcatactagcctgca

SEQ ID NO: 40377 - DNA, 335 bp, Zea Mays
gggccgatacatgctaatacccgggggacagaaaaatccccacccgaggcgtggaagacacctcgtcgtcctcctcgcgtgcgagcgccgccaccgcgctcacatcagtgtcgcctggcgtcagcgcattgtgcccttcccatcgaactctgccgaccccacatcttcccatacgagtggtgtttctccaaggttcgctgttggccatatccacgtcgtcatcctcgatccagacgagtgtgtgtgccatatccacaggtcttcgacagatttagatatatgaagctaaagtaatgaaggatgattttgtactatcgtccaacataaggaaagaa

SEQ ID NO: 40378 - DNA, 1889 bp, Zea Mays
ggagtactaattcctaaaacacgtttcggggcgaagcaattctatcctcatcaatcatcggtagggttccggcgattccccatggccggccgccaccgaaacccgctgccaccttcctacccccgcttcacccccacctcccgccacaccatcccctcgacgactaccgcgacccgccgcgcctccccccgcaccaccatatcgacgacttccgcgatccgtcccgcctgccgcctggccaccccgacagcttccaggagccgccgccaccgcatcttcgtcatttcgtgggccacggccacggcggtgccggtggccccctgccacctcagccgcatgtggtagcagcgctggaggagcggctgggcgccgagatcgacgaggcgcatgcgctgctcgcgcagaaccagcgactggctgcgacccacgtggcgctcgtgcaggaggtcgctgccgcgcggcacgagctcggccgcaccgcgaacgcgctcacttccgctcaggaggagagcgacctacgccttcgcgaggtttatgagaggtcactgaagatggaagcagagcttcgggcagtacatgaaatgagagcagatcttgcccaagttcgtatggacattcaaaacctgggtgcagagaggcaggaactcatgggccaagttcagggattaacacaagatttggctcggtctgcagaagacttgcagaaggtatctgcattaaaatctgagatccaagagatcaaacatgaaacacaacatttgaggtacattctgttaaatctttgacctactcttttttgaatatagagaaggtttaaggatttttggcatgcatacaaactcgttattaatgatgcaattatgcacaagagaagcaatgatgcgcaacctgtgtatccgagaaaaaaaatcattattaatgttttatctgctcttccctgctttggcttacgcctttagctcttcccaagcagcatttatgagtgaacattgtcattgttcccttccttttcacctggacaacctagtcaaaacacccctcactcgaaactggaatgatatgttcaaaaagggatttgatggaattttgattgtatgttgagtaatagagagaaaggcgaatctgcaatgaatacctttgcttttattcaactgtatggcatttgttatgacccaatatgcagatcttgtattgagcttgagaagaaaggatatgcagagagttatgagcagggacaggagatgcagaaaaatttgatttcagtggcttctgaggtggagaaacttcgagctgaggttgctaacgcggagaagaggtcacgggccattgtgtctgcaggcaatcaaggttataatggaagctatgggaaccccaaggccaattatgctgcaaacccttataactctggatatggcatgaatcaagcaactgctgccactgattctggttctcagtatggaactggtgcaacgcatggttcttggggtgcctatgacttgcaaagggcgtccgggcgtagataagtactgcgaattcgtcaggtctttcacggaagctttggccatgcctctatgattgttgtggtggatcagatgttgaacaggtggggcacaggtatagatgaatagcgcacacatttgctttagtttagcttctatcggcctgtgcaagggaacatatatctgttgcatcgagtgtcaatgtattggaagttttctatcgagcatgaatatattaaggatacgagcgtcgtgatgtttaactaattattattagttcccctcactctcacccaagaaaataataatgaaactttgaactagttaggtggttattaggtctatataagttgaactggacattttaacatgatatatacatggacggga

SEQ ID NO: 40379 - DNA, 1343 bp, Zea Mays
gcccagtttgcgaggacgatgcgggcgcacgcagcggcatcgcaggacgcagcaaagccctgaaaccgcccccacgtccccctccccgcaccgcagagccagtcagaacagtaacaccggagcggcagctgcagtggccgaggccggagcacgcaaggaaaatggacacgatgagattagtatcaaggccatgggacaggccataaataagacagttatggttgttgaattgattaagagaagggttggaggtcttcatcagaacagtgccactgaatctgttgatatcacagacacatgggaacctttggaagaaggccttctcccactagagacaactcgccatgtgtcgatgatcactgtgacgttatcaaagaagcctctggatacatcatctccaggataccaaccacctatcccagctgaagaagtgaaacctgcttttgactatgaccatgaagattcgtatcctactggccgtggaagaggacgtggtggtgggagaagaggcaggggaagaggtatgagcaatggtccctctccacccgcttatggttacaatgaagagtggggtgaggaaggagattactataatagagggcgtgggagaggaaggtcacgtggacgaggcagagtgcgtggtggctactatggaggcgggaggcgtggtggctacagttatggctatggtgcgagaggcgggtactatgaagagcaagacgaatactatgatgatcctgaagaatatgcccctccaggccgtcgtgggcgtggcagaggaagaagggggatgccttggcgtggccgtggagtctactactagacgatgcgatgcgatgcgatgcgatgcgacatgccaaacgggtgtgctgaagctagcaatggcgtgcttggttggttatctgttctatggagttccgacccagactagaattacccagcagggtccttccaggtgctgtgcctgtgcaactcgtctgggcaagttttgtggctcgctcgtggttttgtagctaggttaagcgagtgaagtttaatcactcggtagcagtgttttcccccttcggacggcatgcatgttgtttattttgctgctaatctacctaccttccaattttgtatggatggtgatggatactggatgcatcagtttcatatttttttttctcctggtaaatctgtagtttttataaagacggttacactgatacctgatgacaagatgaggcaggaagtttgttatgctgcagaataagagcagcatgaaaaaaaatgaatacagctatcgttgttagtgtactagcatttatcttagcgctagattagtttccagtataatcatc

SEQ ID NO: 40380 - DNA, 772 bp, Zea Mays
acgctcgcgcacggctcggtcggcgtcgcgtcggcgatctacctccctccctccctcacagatcagacgccttttgtgcgctgggggatgaaccgtggacgcggagacggacgtgtgtggcgtgcgcgggcggcgccgcctcgtccgctctgggggagccagccgcggcggacgggccgggagagggcggtcgggccggggcatgcgtgcgcgggcaaaacgcagcggccgcgcgcgtcgctgtcgcttgtgtcgcctccccgagccagatcggatcggctgtcgcctacgccgacggggacggacgcggccagcgattggtacgacgtacacggacgcgattaatcatataccccggcggccggctgctgcccctgctgattagtgtagcgacgaccataccatacataccaataccatcgcgtcgattgcgtgtgtacgtgtaccagagggccgatgatgcatgtcgatgggatgcaaagagatagcgtacgatgcattgcattgcaaggtgcagcgagcctgctggccggcccggaagggaagacgaataaaatgctgccgatgccggatggatggatgatgattctgtcgtgcctagtttgcacatcttgatttcggatgagcttatctatcagatatgatggatgcgtggataatctctgactctatctctagctagttctctatctttcggttctcctccctttccataagaacaccttcaactgtgatttaaatcagtgtcttacctcaaaatatagaattcaac

SEQ ID NO: 40381 - DNA, 2428 bp, Zea Mays
ggttgtagcggcgccattactttcgttcacttgttctcactcagctcttcccgtttcccgccctcgctcctcctggactagggttcatggatcccgacaccgccgtggcctccgcagacggggggccattcctagagttcgtagactatgccatctccatgctctcctcgtccgctggcgacggcgatggctatgagtctccgggggacgggccggcgccggcgcggccgccctgggggtgggcggtggcgcagctgctcaagtcctgctgcgcctactccagcggcgtcaccgccgccatccttctctccgacctcttccaatcttggacagaacagcggaaatccctgaccctgaagaggaaggtcaagctgcccaaacttataaacacgaagaataagaggaggaggcttccaaatactgtcacgatcgattctatccacgagaagaacttcctttctcccaatagtgtccttgaagttgttgtcattgccgtgtttgtccttcctggtacaaacatatacatgcttaccttgggagacatgtggagcgcatccacaatcgacatatatctacaccgaaggtactatgactgcataggacaaaatggtatattgaagaagggtcgagaagttatgctcacaggatgttgtcttcgtacagccatggagggatctggccatgctcgtattttgccaacagaatacatggtgatattactggatgaggaacaagatgaagatgccttgctacttgctgcacaattttgcaactattcattctcttctttgattctagaggaaagtagaaacaatgttccgtactcattttatgccaggattgaaaagattgagtccttggaaccatttagatgcgcagaaagaatgcagataattcttgaagacaatgacaatgcgaagatgaagttagttttatggggagagcagacttcacttgcaaatctgtgcagggagcatgcttgcactggacagacctttcatagcaaattttatagacaataatcatgaggattctcaggaactgtgccttgaatatggcagtgcaacacaggtttacatggtgccaatcgctcaacaagaggaacaggtgccttttacacctacccaagtaaagagccaaggacctcggctgtcatgtgttctgactgataatgtagcttcgcaagtaacattaccacgtgatttgtatggttcagttgatttcagcaaatacccgtttcgagcatatgtaagtgaccttcatgataaaatggtgggaatcagtctgtttggtaccgtaactagtgtttgcaaagtaagcacatcagggactacgttctatttggagttggaagacacaacaggagttgttctgatgaagcttatctttgttggaccctggtcattaggtagagtaggagttgggcatatggtgtacatctccggtttgacttgtgccttgagttcaacaaatatccttgaagtctcatggcgtgaaaaggagccagggtctctgtttgttaacttaagcttgctgccagcactcctaaactcatcgtgcctgcataatttatcacccttgtcagatcttccccgttcgacaaacagaacacatatatcccatgttcggttagatggcatcgattgtgacagtttaaaggtgtcgctgttccacaacatttgcggcagtgttgtgaatgaacattcaggtgtactccagtgttcattcttgcagatgtcttggcttggtgcgttgggcaaacggctgtcgagttccttcagatatctcctgacgaatacctagagctccccgaggatgaacgggcaatgtatctctacactctccagaacgaaagctttgtggtggctatcgcgaataccaggaagcgagtcgatggatgtgctgtgggtgatgaagccgtcccagcttgggagatcacgagagcccagaaatgcgaatgagttcgtatagcgctcgagaaagaaatgctgatgctgaaaagttactgtaacacgtgtttcaacctccgtttttcatcaaccaattcgtcgttcagcaatgcagccatatgcatgagttgtccattgactccaaatgatgcttaagcacgatggttaggatgggttcttcgttgacaaagtccgagagtaagacgtcgacgaaggcatagcgtttaactttaagatgggttcactactgaaaaatttcggttgttcttcattcatgttgacaataggttatttgcttggcaacgtagccagccgacttcagatttatctgaaactgtgccttttacatctagggacttgtacccagcaaacaaacgctgcccaccgcggttgagttacggagtgtttggttgtctgattaaaaggttattttgtgtcacattaaatatttaaattttaattatgagttttaaatataa

SEQ ID NO: 40382 - DNA, 4234 bp, Zea Mays
ggtactgtcttctccttccctcgccccttccctccactcgcgatctcgcgccctgccctcccctcggctccctccgcctctcggacagagggtgagagggtattctaacagcccccatatacaccccaccggcgccggaacctacgacgtcgcaatgccgctccagttagagatcaagaggaagctcgcgcagaggtcggagagggtcaagtccgtggacctgcatcccacggaaccatggatcatgtcaagtctttattctggcagtgtctgcatctggaactaccagactcagacaatggtgaaatcttttgaagtcagtgagttaccagaagcaatgggttgttgctggtgccgatgacatgttcatccgtgtgtataactataataccatggataaggtcaagttgttcgaagctcatactgattacatcaggtgtgtggctgttcatccgaccctgccatatgtgttgtcatcatcagatgacatgcttataaagctttgggactgggataagggttggatgtgtactcaaatttttgagggccactctcactatgtcatgcaagtcacatttaaccccaaagacacaaatacttttgctagtgcttctcttgatcgtactgtaaagatttggagtcttggttcccctgatcctaatttcacattggatggtcattcaaaaggtgtcaattgtgttgattacttcactggtggtgaccggccatatctaattacaggctctgatgaccaaactgcaaaggtttgggattatcaaacaaagagctgtgttcaaacacttgaaggacatgcacataatgtctctgctgtatgtttccatcctgagcttccaataataatgacaggttcagaggatggaactgttcgcctatggcactccactacttacaggcttgagaatacacttaactatggccttgaacgagtttgggcattaggttacatgaagggctcacgaagagtcgtgattggatatgacgaaggaacaataatgattaagattgggcgtgaagcacctgttgctagtatggatagcagtggtaaaatcatatgggccaaacataacgaagttcaaactgtcaatatcaaggcagttggtgcggatgctgagattgcagatggagaacgtctgccattggctgtgaaggagctaggaagttgcgacctttacccacaaagtttacggcacaatccaaatgggaggtttgttgctgtatgtggagatggagagtacattatctacacagcgctagcatggagaaatagatcctttgggtctgctcttgaaattgtttggtcaactgaaggagagtatgctgcaagggaaagcacatcaaaaataaagatctacagtaaaaactttcaggagaggaaaagtataagaccagcattctctggagaacgtatatatgggggagtattgcttgctatatgtacaaatgatttcatttgtttttatgactgggcagagtgcaggttgatacgtcgaattgacgtgaatgtaaaaaatgtatattgggctgacagtggtgatttggtgacaatagcaagcgattcgtcattctacattttgaagtacaatagggatctagtttcttctcatctagatggaggggcatcagttggcgaggaaggtgttgaagatgcctttgaattgcttcatgagataaatgaacgtgtccgtactgggttatgggtcggagactgttttatatacaataattcttcatggcgcctgaactactgcgttggaggagaggttactacaatgtttcacttggatcggcctatgtatttattaggatatcttgctaaccaaagtcgtgtatatcttattgacaaggaatttaatgtggtgggttatactttactactcagtttgattgagtacaaaacacttgtgatgcgtggggatttggaacatgcgaatattattttaccatccataccaaaggaacaacacaacagtgtggcacatttccttgaatcacgtggcatgttggaggaagcccttgatatagccactgaccctaattacagatttgatctggctgtgcagcttggaagcctcgaagttgcaaaggcatagtgcaattatagtattatgggcctgtttgtttcggtttctagcagcttctggccaccaaaagctgctgcggactaccaaacgttcagcttttcagtcagcttctataaaattcgttggagcaaaaatcatctaaaatcaacataaacacataatggttgagtcggtgtaatagtaggaatccgtcactttctaaatcctgagccctatgaacaattttatcttcctccacacgtaatcgtaatgatactcagattctccccacatccagattctccccacagctagatttttaaaaaagctggtcagaaaaaagctgaaccaaacaagccctataccacttatctctcaactgtttaggacacatcgtccaagaaattctccttaagcgcaccgccgcaccctgaattctagttgctttgcaggaaattgctattgaggcacatagtgaatcaaagtggaagcagttgggggaactcgctatgtccactggaaagctcgagatggcagaagaatgtcttcttcaagctacagactttagtgggttattgcttctatattcatcacttggagatgctgaagggataacaaaactggcatccatgtctaaagaactaggaaagaacaatgttgctttcctttgcttgtttatgttaggcaaattggaagaatgtcttcaattgttggttgatagtaatcgtattccagaagcagcactgatggcacgatcttaccttccaagcaaagtttctgatattgtctcaatatggaaaaaggacctccaaaaggtgaattccaaagctgcagaatctctggcagatcctgctgagtacccaaacctgttcgaggactggcagattgctctgaatgtagaagctactgttgctcccaagaggggtgtctacccacctgctgaggagtacatgacttatgcggagaggtctaatgacagccttgtggaagttttcaaaagtatgaatgtggaagaagtaccaagtgataatggagatcctgttcatgaggtcactgaggatgacggagtcgagggaagtatggatgatgttgttgaagttgaacccgatgattcaacagatggcggtgtccttgtgaatgggaatgatggtgaggaacactgggtgcttactcctgaccagcagtagagatatcacgacaacattctgcaccagcagattagttgcctattgtaaaaaagtaagtaccattatgtatacgcacaagtcaagaaaaaattaaattgacaaagaaccgtgctcccatacccttgaataaatctatgttgtatgtaatgttttctaggcctaagtagtatgtaatattcttcatgtttggcgtgtaagggcgagtttgagaaccctatttttcaaagggttttcattttttcaaagaaaattagttcatttaaccttaggaatatagtaatcctttggaaaaatggagttcccaaactagtcctaaaacaaattatctgcccgcatgccatggtagaccgtcaattttcctagtatattttgtggtttaaactttcttctcacagttgtaggtcgccacatgttcagactcgatagtcatgtaaaagaagttcctccccatttgtacaaggcgttgtgcgtggtctagtattgcggttacagaaacagtcttggatggtaattagcatttggtctagataagaaattttgtaattcgattcattttgggtgggcattgtagatttgtggtatgttatagattatctacccttgtatgtttaccacatgatacgatactaacattctttaaggttggaatttgttcaccgacacatgggctgcgacctgcatagcatgtgaaagttgtatttttggttccccagttgtcgataacttgatccttggtttctgccatgtattgtactgccttcttgtaacttattttgccttttttagatgtactgtttttagtatatagtgtatttagatacaatgtataaccagttgtataataaaaactagttaagtgtccgtacgtcgctacgacacataaattatacgttcttttgttcacagacaatgtttgagaagcatttcaagtaatgcattacttatatgcttaatagtaaataccat

SEQ ID NO: 40383 - DNA, 1336 bp, Zea Mays
ccccactagaaagtctggaagcgcccgcgcggccccgcgaatattttgaactgagccatccacgcaccgccgccttttgagctcgcggcgagggtttgggcggcgggcgcgacatggccgggaagaagaccaccccagcaaagcccgccccttcttccactcagcgcaacggcagcgccgtccccggttccaagagccggcctaagcaggcttcggaggaggccgcggccgccagcgccaaggcgcagtcgccctccaaaccgcgcaaaataaccaaggagaagccggcggccgcgaagaagaagcgcgagaaaacggagccccaagagggtggcaagcgtaggaagcagcaggtgttagccgacgcggcgacgccatcgaagaagaggaagaagggcggcgaaggcccggaacccaaggaagccacgcccgcgaagaagcacaagccagccgggacgcccccgaagaagcagaaggcgcccagcaaacccgcgacgcctgctaagaagcagcagtcacccggcaaagcggagaagctcacgccgaagaagaagcagcagtcacccggcaaagcggagaagcccacgccgaagaagaagcagcagtcacccggcaaagcggagaagcccacgccgaagaagaagcagcagtcacccggcaaagcggagaaagccgcgccgaagaagcagcagcagcagccagccggcaaagcgcggaagcccgcggcggcggcgacctcgcccacgaagaagaagcaagccaagcgcgagaagcccactcccaccaagaggaagcgcggcgacgacgagcaagcaaaggaggccaagagccccaagagagcgcccgcggatggggcggcgcgcgcatctacgcccgtgaagaagaagctgaaggaccagaaggcggctgcggcaaacatgggtgtgtgcagcttctccatggcgcgggtgcggcagctgatgcgggccgaggaccccaccatccgcccttccagagttcttcttggggaagtttgcagaggatgcttatcacaatgccgcgaaggatcgtaagaaatccattatttacgataatctttcaacagctgtttccagccagaagactttaaagttcctttcagattttgtaccgcagagagttgcagccgaagatgctttgaaggcaatgacgagcaacaactcgtaaccgattatgctagactagattgcagaacagctgatgcaccgtaccctgtggtttctgtccaatttatgatttattaccccgagacctgtattagtccatagataagagtggattcaaatgtttcgtgaaaggatttatttagagctcatga

SEQ ID NO: 40384 - DNA, 1337 bp, Zea Mays
gtacaacactgtgaccaaggaatcgggctttagggatccctatgtccagtaccaccacctcgcctccgccgccggccgccggggaccatccccgcgttctgctccgaggtttcctctcccgtgagacatgcaaggagctggagttcgtgcaccggagctgcggcgcagcggggtaccgcccctcggtgatatcgacatctctgccgcacctggcggccaccggctgcggccacctcctgctcccgttcgtgcccgtccgcgagcgcctccgcgacgctgtggagtccttcttcgattgccacttcgatctcttcatcgagttcaccgggcttatcagttggtgcaagggagcttctattggatggcacagtgatgacaacaagccttatcttaggcaaagggcattcacatttgctacttgaacaatcatggagaggactataagggtggaattttgcagtttcaggatggtgatccttcctgtattgttccagttgctggtgatgttgtcatatacacggctgatactcgtaatgttcattgtgtaaatgaggtaactgaaggggaaaggttgaccctgactctttggttcactagagaccgtgcttatgatgaggatccaaaacttcttaactttctgtctcagacatcattgagctgtgaaccaactgagcaaaattcttatattcctgtaccagcttctgataacatgtatcgcttttcttgtgatcagtctggttttgacatacgatgtgctagagtgcatattctggggtttagttttcactcaagtagtggtgaatgcaatatatctgcgtcaccagctgaagatgacccaatagagttgcttggaaagcaactgcggctcgggaggggagatgatgtctttgagaaaatattttctaacagcttacatgctcttcaggtggtgcaattctactactggaaaaaacatgagctggcagcaaggagggaacaaagtgttgttagttcaggaacagtctgctgtccagttacacatcattcaaaaggaacagaattaccattaccatgcaatcacgcacttgcacaaactatatttggatcatataatactgaggagattgtccagtggaatgattttgcattagctgttgctatgtgggaaaaatattcagaagagttaaagaaacagttgttgacatttttgccatattggttgtccaatgaaaccatttatgttgttgatacctctgagctgcagagagccgaaccaatctaactctccaatggtgatttggactgcctcattcttatgcgacatagctgtggcgtagatatgtttctctcaagctcca

SEQ ID NO: 40385 - DNA, 1541 bp, Zea Mays
ctcacatcttcctttccttccctttcccctcctctctcacgggcttctctctcacatctcgtcatgccgcatcgtcccacgcgtccctccttccgtggtctcaccggcgaccccctcagcacagcaccttgcccggccggctgcccctccgcagtgccttggccccatcgttgcccgagctgcatctcccgcaccctcgtcgcctgagccgccactgtgccttggccccacgagccgtcatgcctagccccgtgtgcagccgtgctcctagtccgtcgtcgtgccttggccctacgtgccgctgtgcctggctcgcgcctgcctgtattcgccaaccactacggcgaagactagtggttgcttgagatcagcgctggttgcctcggctctaggcaaccgtttgtcatggagacagtgaaagatgatgatgctgcaaaactgggtttgatatcaggtaaacatctgctattcgacacttctgtaatagtaagcagaaaggagcaagtcctcattttttatatgtgcaatgttgctttcatgctacacgagaggggtgaatgctagttataaaacaatggattatttgacataatgtagatgagattttcgcaactattcttatgtactgcaatatttgaaataaacagcccttgcaagatgttagggtcctcctaaaacatatgaatgaccattggattagtctaacattactctttaggcttcctagaccatgtaagcagtctttcacaagtccacgatgactttatttaaacatggagttagcacacataggtagagatagtaatggagtggtagttgttaattcttgaactattgaatttggcaaggacatcggttattgaatttggcaagcaaagatttatccctgatttggcaaggacatgttgcagaaatttacatggcgtccgttttcccatattactatactggtaaactaaagctacaaaaatggaggcaagcatattaactcgtttaatgccacgttcacaagtgatatcctagaactttagttttaaatgttaccggtgccagcttccaatgtttattatacttgtttgcatattgatatatttgttcaagttcttcaagctgatggtggtaagtgtgctaccttcctactttcaagcttacaaccttgtttaaatggaattgttttgcgcatgaggtctgcttttggaaacatcttcagtgctaatttgagacaagctcctgcaaggcaagctgcactgggcacagggatactaaacactgttgtttgtgctttttatgattgaggaatacttgaagaagagtacttgtggtctttatcttgtgctgagatgcatgttctttacctaccgaacatcagacccctccagctaccttgctgacgcgtgaacgagaagacgggttagactttgtcgaaaccctcttcgctagtggaggtatcgaccatcactcgtcactgtaccccgatggtgatcgacgatcatgagcttccatattatgtgttgtgatacttgagacttttattatgacta

SEQ ID NO: 40386 - DNA, 1245 bp, Zea Mays
gcgacccattttgccaaatccctcgggaagagaaatttgtcaaaatgggtcgccctcctcgcgacgcagtgcgaccacgccgccaccttcgcctgggaaccgcgaccgctccatgaagaggggatcagatttgctcatcgcgacctaccttgggggttcattttgtgttgttgggttggatggggagaagtgtcgagcacatggtgcttgcagtttggtttgttcgtgttgacaatttctctgtggggcgttgcagggaagatgggggtcgaggagaggcaggcgcagaagagctcctaggaggagcatcccaagaacctcatcgtcgatgccatgatgctggactcccgcgctgtcaatctcgacaaggggccacctgtcgctctggacaagggggctgccctaagatcctgtttttgcttccttcagatgaaggaacatctatcctagagcttggtgctggaataggttgtttcactggagaactcgctaaaacagttaggaacgtttttgcgctagattttattgaaagtgcgattaaaaagaatgaaagcattaaggtatgcagttggatattgcattcagagaggctcaagcgatagctgcaagtagttctaccttgtgcccagttttcttgttcttttagaaaattcttctgctacctatacctgaatgttactgatagcttacactaatggaagtcaaaatatcgtgggacatccagctgagcgagaagatagtgttgcatcaagttcagttttttttgtcatcaagttgtaggctgtgtggtacatccagctgagtgagaagacaatactgcaccaagcgagaagatagtcctgcaacaactcgtgccatcggcttcctcgacggcgaacgctcgtgaccgtaggaaccatattgtagaaacatttgcgtggttgaacaatagatttcaaagtgttttatgaaaattatagagagctattggagcattgtcttttttggatttattatttttaaagagatcccaatacccttgttttggaagctataactttgtgagttgatggagatgcttttactaattctgaattccgatgctgtaacaacatatctgaagagaattgttttggttagaactaggatctctattattcattgttgtgttgttgtaataagacttgccttgcctagctatatgcttgaatggaaggttttgttgggacaacatgtaagtttgttctctatccattacataaggaa

SEQ ID NO: 40387 - DNA, 154 bp, Zea Mays
tttgaacccgtcctgtcccagccctcacccaattaagcaattttgatgagcaagacaatgtcccaaacacaatcgtgggagcagcgcacggacatgtacatgagccccttcgtacttatggtttgcagtgtagtggtaagataggtagattaaa

SEQ ID NO: 40388 - DNA, 279 bp, Zea Mays
tacgcactactactcataccatggttgtcctctaagaatagtgcgtgacagcatttctctaaggggaaatcttttattagcatagttcttagaaagatgcatgtataattacagaatcaaccttagttgattcaaccttctatacattgcactctttctatctggtctttaagatagactcttcagaatacttaggtaagaagagaaaagagtttttagggaagacttttgaaaatccttttgaagatgtctcataatatctgcaaagaagggctacgc

SEQ ID NO: 40389 - DNA, 1305 bp, Zea Mays
tcttttatagtatagattatcttcaagtctatcatacaacacttgcttgtgacatacttatgggtttcttccttatgtgcatgcgtaatattctgttttcttgtagaaacccttctttcatgtgatattatcttctgttaattttgatgctctggtgttctctgactctttttacaatgcagtttgttgcaagattaacagcaggcatcattcagacatatctagaatgtgatcctgagtttaagtactcagaggttctaaatccaaaacgcttcctcaccaatccctctaccccagcccacaatgatgggcttgacaatgcaaattgggacctcatattgtacgtcaacttggagttggttaataagatgtcaaacagaaggtttattgtcaaggaaatgcttgggcagggaacttttggtcaagtagtcaagtgctgggacacagaaactaatgactatgttgctgtgaaggtgataaaaaaccagcctgcattttaccatcaagctatcatggaggtttcactattaagaacgttaaatcagaaatttgatcctgatgatcagcataacattgtccgtatgcttgattatttgtcatttcaaaatcatttgtgcatagcttttgagatgcttggtcaaaacctgtatgaactgctcaaaaggaatcacttaagaggtctgaaattgaaatatgttcaagccttctcaaaacagatattggatgccatggttgtgatgagagaagctggaataattcattgtgatctgaagccagaaaatatcctgttagctcccagcgtcgcaacagctgcagcagtgaaagttattgattttggatcagcgtgcctggagggtaaaacagtttactcgtacattcagagccgctattacaggtctccagaggttctccttggctatccatatactactgcgatcgacatgtggtcattcggctgcatagttgctgaactgtttctaggcttgccattgtttcctggagcaacagaatatgatgtgcttcagagaatggtgaaaattctcggaggccaaccaccagatgaactgctaagggaagctaaaaacactgtaaggttttttaaacatgttggaagtatatatgctggcaatgcggcacctattggtctttctagtgcatacagaattttaagtgaagaagaggttgaagcgagagattccaagaggcaaaagatgggaaagtggtacttcccacacctgaagcttgacagactcatatgtacctatccttggaacaattctgaactggcaggtcttgcattttgat

SEQ ID NO: 40390 - DNA, 2591 bp, Zea Mays
atggagttggattggatcacaatttctaccgacaggaaaagaggctgcagtggaggtggggttggtggtccgggtttgatcaagttcatcaccctcgtcaggccccagccctcgatcgcactcctcacttgtcctctcacctcacctcacctcacctcgcctcgacctcgagcagcgaaagggaggaactctggaccgagaaacaaaaggcaaaagcaccagcaggtgatcaactcccctcggcaacaactccggcctccactcgctgcggatgtttcactcacctgtgacgtgaggcggcacggcagcgattgcgattctatcggagcgctcatcaggatggatagcgccgcggactcgtcttcaccgaggtgccaccacggtcagtatcgacaggatgccggagaactcgaggaccagactagcaccagcaagatgccgtccagtgcttctgagcttccatgctccttgaagcgtgaggtccgagtccttgaaaagcgactggatgatcaattcgtcatgcgccgtgctcttgagaaagcactaggttacaagccttgtgctgttcatgcatcaagtgtgaactgcattccagagccgactgaggagctaatcaaggagatcgcagtgctcgagctagaggtcatatgcttggagaaacatctcctgacactataccgaaaggcatttgagcaacaattgtcccctgtgaactctgcttgtgacgcggaaaataacaagcagccagcaaggtctttttcaggcatactatctgaagcttcagtgctcagtttctcgaccccaaggaagcatcagccagtccagtccagtcgaatggtcctggcacgcaagtccacgcctacagcttctacaagcgaggctagcagtgaaaagatcaacatcggacgcagccattcctcgctcctgcaccgttctgtcagggtgtctccatccgcaaacaatcttgctagagctctgaaaccatgtcatacttcacctctatcttttgttgaggaagggaagtgcatggagcctggagttgtgagcttggcggacatcttggggaccagggttgcggaccatgttcctcaaacgcccaacaagatatccgaggacatgatcagatgcatcgcggccatatacataaggctgagagacgtcccttccgccgccgcgcagcatgccttcttcccctcaccgtgctcgtccttctcttcagcaagcggactgtcttccaaatacactgcagatgtatggagttggagccccaggtgcaggagagagagcttcactgaggcgtggcaggtgcaggacaacgagctaggcctaggcggtggtgaagcaagggactcggggctgcagtacgattctgtgatagaggtgtctgctctttgcaagggcgatcagaggtccgctgacgttaaggacatgctgcgcaagtatatgtcacttgtacagcttctagaaagtgtcgacctcggtggaatgaaaaacgaggagaagcttgctttctggatcaacgtgcataacgcgatgatgatgcatgcccatatagagtacgggatcccacagagcaacagcaaaaggatactgcttaccaaggtatcctacatcgttagtggccagagagtaaacgcggagctgatagagtaccagatcctgtgctgccgagcacactcttctggacagtggcttcggctgctgctccacccgaaatggaagtccggcagggacagggacgaggagctgcaaggcttcgccgtggatcggcccgagcctctggtgcacttcgcactgtcctccggtagctactcggatccagtggtgcggctctacagccccaagagcctgttccagcagctggaggcggcgaaggaggagcacatccgcgccaacgtcgccgtcggcgtgcgcgggcgggggcagcgcaagatcatcctccccagggccctggagctgtacgcgagggacgccgggctgggtgcgcaggaggtggtggccgcggtcgcgtgccacctgcccgacggcctccgggacgccgtgcgccggagcccgccggccgggcgggcgcgcggcggcgtggagtggaagccccacaacctggcgttccggtacctgctggccaaggagctggtcggcgggtcgcccgcgtgcgggcggcagcaacttaagaaatgcggccccccgatcggtgcgccgctgcgtgctgatcggtgatccgtcagcagatcgccgtgggtccgtggccgtgccgagccgagcccgaggtgcggtgcgggggtatcagggtctgtatgtacagagggagatggacaggaagatgatctgaatagtgtgcgctctgctgtagctagtttggatcattctgattggatgggattgaaatgaatatgagtgtatcctaacttgccctcaatcccatgaaaaataagtgtatccaaattagccttcaagtgtgaatagtgccacatgaattcttaccttaggacttgtttaggagctgtttaggagctagaggaatgaagagaattaaaaaggctaaaatcattttgatatttaattttaaataaagagaggattttaatctctct

SEQ ID NO: 40391 - DNA, 3301 bp, Zea Mays
gaagctccctcacgaatcgaatcacatgaatcaccacgcgggagaggaaaaagtgctaggtgtacataaacctggccattagtttcgcaacgttaatggtaacggtaatggttcacactcgataaccaacggtaacaagattgaatataccaatatcaatttctagtatgatatccaattacggttagacttaaataaacaagatttaatcttatcggttaaatatgtgaaccaaacaacacctaaaacttttatactccagtactagacagttgcaacctgcatatatttattcgaaaagaaaacatgattcagcaaacagacaaattctctgtgacataagaaaaaaaccgtccaacttttttaccatccagaaaacgggagctctaccagtgtgccgggtgcgcctggtaaattacgggcgtccatgcatggagccccacccccacctccatgtaggacccacgcccaagtgaccccaccacatacccgtgaatgaaaggaagactgaaaagcagagttcctgccatgttccccgtccccacacgctcacgcggctcccatggtgcacacccacggccacgggccatagcgacaccccccgcggcccgcctatttagccgcccccacccacatcgcggcggggtctccatgcctccagtgtccagtccagagtccaggctccaggactaccaccactccgtctcgtctcgtcctcacaccccactccaccaccacctctgccttgcaaagctttccaccgatccgccgcctcgtccgcgcgctcgcaggcagcagtgtggactacccgccccatactccatcccctactcgaaggacctcgagttattaagttgggcgaggagaggtggttcattccagcagggatccttctcgtgagcccagtcgatctgaccgtccttggtatctggggggggttgttctgtactctctctttaatttgtgagtcgtgacaggttcttgaagtgcaattgttaagagttttagttgtagaggaagagaagggtttgctaatatggcgttggcagggacctccaaagtagtgctgggatgtatcgcctttgggattttctgggtgatggccgtcttccccaccgtcccgttcatgcctgttgggcggacggctgggtccctccttggtgctatgctaatggtcctgttccgcgtcatctccccggaggacgcgtacgccgcgattgacctcccgatcatcggcctgctcttcgggacaatggtcgtcagcatcttccttgagagggctgacatgtttaagtacctcgggaacctgctctcgtggaagagcagaggcagcaaggacctgctcttccgagtctgcatcgtgtccgcgtttgccagcgcgcttttcaccaatgacacatgctgtgttgtcctcaccgagttcatcctcaaggttgctaggcaaaacaacctgccaccacagcctttccttctggcccttgccactagttcgaacatcggctctgctgccacgccgatcggcaaccctcagaaccttgtcatagctgtcgagagtgggatctcatttggccagttcttgctgggagttttcccagctatgatcgttggggttctcacaaacgctgctatcctccttttgtacttctggaaatacttgtcggtggagaaggatcaggagggtgggcagcccacaggaccagaggtggttgccgacgatgaggttacttcccatcggttcacaccggctagaatgtcacatgtttcttctctgaatccagatgacatggattgcgtaagcgaaccgatcatcaggagcaacagtgtcagtactactgggaatgagaacctgagaagcagaagcatcaattctgaggctgacattcagcttgcgatcaagtctctgcgggcatcaagcatgtcgcatgagatggtagaggtctcgacggttcctgatcggagagatgaaggtgcatcctcaaggaagttcacaaggactgctagccagcaaaggagcgtgataatagaggatttagcaccctccccagagattaatggggaaaaggagaaagaaactgaagttgcagagaagagatggaaagtacttgtgtggaagactgctgtttatcttatcactctcggtatgctcattgcacttctaatgggactgaacatgtcctggactgcaatcactgcagctcttgttcttctggcactcgattttacggacgcacaagcttgtcttgagaaggtgtcatattcactgctgatctttttctgcgggatgtttatcactgttgatggcttcaacaaaacgggcataccgaacacactatgggagttagtggaaccatattcacgaatcgatagtgcgaaaggtgttgcacttcttgccgtggtgattcttatcctttcaaacgtggcctctaatgttcctacagtcctattgctcggtacaagagtggctgcatcagcggcttcgatttctcatggttcagagaggaaagcctggctcatccttgcatgggtcagcaccgtggctgggaacctcaccctcctaggctctgcggcgaatctgattgtctgcgagcaggccaggcgggcccagttcttcggctacaacctcaccttctggagccacctccgattcggggtcccgtcgaccatcatcgtcacggcgattggtttgctcatcgtcatcagttactgaaacagctgaaggcagaagagcgtagtgtaagagaagcagaatggataaaaatccttccaataagaagtacatgtaaattaggcttgccctataactcaagtgtgtatcggtacgttatgtctccgtctgtgctcttgctcgtgagcaagcagcacatggctgaccgtgtagcttgcatttccattgcataataggcttatgaagaatgctttggtaatatgattttacagtctgacaaggattgtgaagcagaggcagtgtaccatcaagataatacttctggaagcatataaaaaaatttcgtatatttggatttcaaatccagtctgcttcagactggaaattcatattatcttctggaatcgtgctttattgtcagaaacatgggctaaaattggaaagtccgtcatttattgggcttgcaatgggacaaccttttgggtctgttatatatcactataaccagtgacaactttggttcgcaaactcaaaccagtttctaatctttattttatgatttttatataaagttcttaataggtcctcttgctattttcaatctaaattctaaatactaaaaaaagtttctgtgaa

SEQ ID NO: 40392 - DNA, 2809 bp, Zea Mays
gaaattccacacttaacttgtcttttcatcatagttttacatttccttcatagttttcgttcaaaaatgaactagcggacgacaaatattcgaggacggaagtaatatatgtcaagattataaaagcacagtttaaaaccacatcatccaaataagccctaaacgactttcatactagaaaactcgcaggctgtgtacactaccgctgtgtcagtagcatttacgtaagtatatatgccaaaccatttattaataactctcctcatcacacataaaaaaaatcaagcacggacacagagacagacagcagtcgctcgccctccccaaaatccccatccgcactccgcagctcaaaactctacccaattcaatttcaaaccgcaatctcccctgccttgccttccttccccttcacagcttcatccaccgctcctccaatctccgtcgccatcgccaaccctgagctgaaagcaaggccaacaagcatcatagcagtctcgctctcgcaccacgcgagtgagacaccaggcaaccaccacgagacagggacgggcgccatcctcatccaccaccaccctcccagcttccgttggcttcactcccactgcaggccccacctcactcgctcgcgccacagatctcgcctgccggaaccctaatgccgcaggtggacgcgccgggggagtaacgccgatgcagcgccgtgtgggcatggcggacggcgaggccagggggcggacgctcggcgccgtcatcaaggagaaggatgaggagctcgcgctcttcctcgagatgcgccgacgcgagaaggagcgcggtgctgcggcggcggcagcggcggtggcggcggcggaccagctcctgctctctggcgactccgtggcgggggacgggatgctgcttctcggcccgccgccacccgccgagcccaaaccggtggcgtacaaagtggctggtggcggatttaggagggcgcctggcggagcggacgatttcctccatgcagacgctggcgacaagaacgattacgactggcttctgacaccaccaggaactccactattcccatctctagaagttgagtcgaaaaggtccccggtgagccaagctggaacaccaaagactcgtccaactgccttaaaatcaaggttgtccaaccatccagatcctccatcaagaaccaacctcccattgaggacaacatcatcgaacagcctgaactcagctagttccaaaggttcaaggccttcgacccccacttcccggacaactgttcctgccaaaactggagcttctgtgtcaaggtcgtcaacaccgactttgagatcaacacttccatcagccaggtcaacgaccccttcaagcagggcagttggtcctgctagcaggacttcagctcctataggcagagcatctgcccctgctagtaggtcatccacacctacttcaaggtcatcaatacctgctaccaggtcaacaacaccatcatccagaccctccataccagcacaaagcaagcctacatcaagggcatcaactccaacaaggcgaccttctgccccttcggcccagcatggtaacttagctgcaccagttagatcgtcctcaatctccaaaccaggttcgacaatgcccaaaggttcttcaccagcaaaaactgcagcgccaacaccttcaagaggcagctcccctactgtcaaatcaagaccatggaaaccatctgaaatgcctggtttctctcttgatgcacctccaaacctaaggacatcgctaccagaaagaccaacctctgccactaggggcagacctggggcacctagttctagatcttgctctgttgagagtgggccagctggtcgaccaagacggcagtcttgctctccctccagaggaaggactttaagtggcagcgtgccttcagggagctccatgccagcagtgagaaggtcacatctcaatggaggtgacagtgtgaatccagttcaaatgggtaataagatggttgaaagggttgtgaacatgagaaggctagttcctccaaagcatgatgatcaaagatctagcctgaacagtgtatctggtaaaacttcaaattccccagatagctcgggctttggtaggactttgtcgaagaaatcactggacatggcacttcgacatatggacataaggcgcagcattccaaacaatttacggcctcttatgacaagtatccctccatcatctgttcatagcgcacgttcaggatccacaaggagcagaccaatgagtgtctcagactcaccgctcgcaacaagcagcaacgctagctctgagccgagcgtcaacaacaacctgatgtgcctggacggtatttatatggatgatgagttgtgcagcgatagagcaggaccctatggacggtgatttcacttccaaaaggtttaaaaggcatgattctgatggaaccatttggctacagaatgttcagagcagcagggtggaagatatcgagtacctgacgagcattattattttgttatattttaggttcttcgaatgttcaatatctatccagttccttcgtgtcgtgtcatgctctgcagctccatgtgcaattttaaccatggaccttaatacactattgaaaagtgtcctttatgtgataaatctctagagcagtttatagcatctttgacatgcgatttggtagtggaacatgttccgatggctgaacgtttgtgctccacaacgttcagtgtcgctaatgtaacgtctcctagaatgtgtagttaaacaaattaagcaggagtatttttttttatataag

SEQ ID NO: 40393 - DNA, 605 bp, Zea Mays
actgaaaaccatcatggttcctgcgtttatcacgtcagattggtcatggtacgctagctgaaaaatcgtgcgaagcgaagggtgtggatcaaaacaacccacaatacgatgtcagccgatgagcccgaagatggatggactaagcagatgtcagaacgaaagctgatcatcaagtggccttcatctaacaacactaacctagtgttatcccaggcaagccccggtgcatttgccacccccttgttataaaacttttatcacttatatgttgcattaggtgataggagttgtgtgaataaacaattgatgcattatcattccttggaatttgattactattccttgattcctgtttataaaagagaactaaagatgcttagtcctgcttagataattaaaagttgtttttttaaaaaagatgatgtgttacacgggatatgggaaattgttgtgaaaaagaaattgggatggtgaatccatatggccatgatggattcaacatccagaaaaagtacctctgtaaggtaccaaggattgggaaatggtttaactaaaatgagaccagacgttgagcaggaaaggtcgcccgtctgtgtcgcttaagg

SEQ ID NO: 40394 - DNA, 2929 bp, Zea Mays
cgactactgggcgccacacgcggcgcaagcgcaggaggcacgccatctgttcttgctgtcgctctccccaaccccaagcataaacccctgtgtcctcgtacaaaccgaaaccgaaaccaaactccgccacgagtggggcgagcggatacacgagctcgtgaaagcttgatctgctctccttgttttcgatctttcgcagtcgccgatcccccctcccgctcgagacacaatgttgacatatcctatattgaacgaccgatcaattgatcagtggacggttactgagttgaaggatgagcttgagcgaaggtatctgcctgtcagtggttcgaaggatgagcttttgaagagactctttgaggccatgcaggatgagatacttgatggtgagggaaaaacaactgttgtaacttcccctcctgaggaattgaaaggtggtgaaactcctggttccattgatgtatctgttaaccaggcttcaattgagcaacatgttcataaaggtgcttccgaggttgcgaaacagggggtaggtcttgttatctctgttacagaagcttatgatgaaagtacatttgctacttcagaagttactcaggaggctgtggttggtactgcagaagttagtcagagaagtttggatgctgttgcagaagttgagtcttgtctagttgatgcagctgcaactgatgaacccgatggtaatggtcaaggttcagcttcaagtggtgatactatagtgaaggaaggaagtccgcgctctgaaggtcatggcaatactattgagaagaccccagaagatggcaccaataagaaaatagctgtcgatgatgaaccttctgaccttactggtggtgacatcaagttgggcctcgatgtgcacagcaagattctaaagctggaagatgaacccgcacctcctcatgatatgttgcataatcatgaggattctgatgttgttgcagttgctgagccagaagatgacacaagcaaaaaaatgataagtgatgatgtaccgactggtcttatgcataccaatgttgagttaggtgccaaggtagactgcaaaattgaacaggaagaagtatcaacattgtctgatgctgctgcattgcattcttatcctaaggaacatattgtggctgtggcaaaaggccttgcgctcccaaggaggatgctgatgtcaggctacacaagtaatatagacttggacagaaaagaggagagtcctgacataaattcttgtgagaaactgaacttaaataggagttcaggtgatgaatcaatggatgaggatgtgatggaaaggaagcatgccgattcctatatcaaacctgaagatcttagaggaaagacaaaggttacttcggagcatgtgtttaaagatgtttctctgcttgatactcgtgctgagggttcccctgcacactcaaaggaagttgtcactgaagagaagctatcaactccaactgaaaagaggaaacttgaagatcaagaagtcattgaaaataatgagccaatcaaacgccagtacctatggaacgaggatgctgtcaatatttctgatcaacaagcatccaaaataactagtactggtactcagaaggaagttatttgtcctgctccagaacgttcttttggcaggcctaatacagtagcaagaagaaattctccaaaggagcggattgtaccacctgccaaaacatccgcaacaacttctttaagaattgatcggtttgtgcgcccatttactctgaaagctgtgaaagaacttcttggtaaaactggatccatctgcagtttttggatggatgaaatcaagactcactgctatgtcacatactcttcagtggaggaagctgtggccacgaggaatgctgtctacgacctccagtggccctcaaacaacaacaattatctgatcgctgaatttgtcgatccagaagaggtaaagctcaaacttgaaactccaccatctcaaattcctcctatcagtctgagcacagctacagcacagcagacagcaaccttccaacaggcaatggctaaccaaactctagtacctccccatgttcctgctacttcgagaggtttattgcccactccagcacggtttgccaaggtgcctcccacctctgaccctggaccagcaagggagagccttcctccccctccactgagcctggaacctgcccggacactggatgagctcttcaagaagacacagacgtacccaaggatttactacatgccactgtcagaagaggaggtatctgctaaacgtgcagctcacgacaaagctgttttcagatgcaaccatacttgtcacggcacagcgatcgacaggctctcttctccgcagctgactccaccagaccagcagctgcagctctatgaagaactactgcaccgtacttgtccctacatttagctggtattgtgttgaaaggctttagtagtttgttgtgagggaagacctgattgggtacgtggtattttggagttaaggataccgtggcttctccaaatcacgatggcgtgtaattttggcattccatagagtaccacggtttctcaaaactaagatgatgacaaaacatcagggatttgggtccaagtgatggtgtaaatgcagaaaattgacagcattttggcttctccaaatcacgatggctcgttgagtacttttcatgctctatcacactttgttaatagcatcgcacttattgtaggacaaacactgcaaagcaaagtgtattttgtgtccatgttttgagtggcttagtgtccaactcactagtgatcgatagtcttcatgttgtatagcgagtaagcgttcctattgcagtgaattgagtaatttgtttgagtggcactagatggagtgttgcaagattgtgatgcttgttactcttagggctgatttggt

SEQ ID NO: 40395 - DNA, 1183 bp, Zea Mays
gtgtccagtgagcgctggtacacgatagcgtgcgtcaaggagattttgaactattccgttaaaaaaagaggggagattgtggacttgactgtggacgacggtgtgcatgtcatcggagtacagacggtactgacacaaagggcccagatcagggagtccaaacgggtcgcacccacctgccaggctgccacccgcaatccgcaacagggacaccgggcacagcccacaagatgagcagcggcggcgacagcttcaggcccggtgttcactactaggcctggtacgccagtacggtgtcgtcatcaagctcaactccggcgtcgactaccgagcaaactgaagaatacgtcaatggtcagctgaagaaagaagaaggtgatgccttcataagaggaaatggtggtgcggattatatgatgtgaatattctgagatctatgtcgggcaaattcttgtagcagtcttctgaatatgcagttctgtacatcagtatacccaagcgtacccttgcagacaattaggaagatggtgaaagccaaaactgctgctataaaaaaacacaagccgatggattaaagccgcagcgaacaggctttagcgccggtctggcaaaacttggtcgtttatgagagactttaatatattgtacttttttgttatcattattatgttcatctggcaaaagaattgcaaaagggaaaaagagaagagaaatgagttacatcgccatggccatcaagatatctggtaataattgggcctttagtgatactgataaggtcattgtcattgctggatcctcgatgttgccctgaagcatcggcccggccttgttgtatgcagctgctggttctactttgagtgcggcctttagcttacccgattttttttggtgggggggggggggggggcacactgcagttttgttggacaaattttggtcaccaacaccgccttcaaacggtatggaatgtatcgtgcacaggtgcactgatgaacacgatgcatttcgtgttggagatggaaccaggacaattatgcttctctggcctagaatgatcaagttactgttctgcaattacacattacgccgagctaaatatggcgtggtatgagcactaatcatccataagatgatgtggccctcttgttcaaagatcgccaaactgaagcgatcactcgcc

SEQ ID NO: 40396 - DNA, 2288 bp, Zea Mays
tgttttgcatacatgttgagactgtgcacttgccaaactacatgatagattcatcctcccagcttcgttaattactatcaatgatgttgctgcatatttctttggcatcttctttgggaaaacaccgctgatcaagctctctccaaagaaaacgtgggaaggctttataggtgcatcaatgacaacattgctttctgcatttgtgctactcctgctgaaaatgtactaaccacaccttccatggtggagtgcagggcctccctgttggggcacgagatcgcccacccgtcgtctacaccagattatttctatcataccatcagatagtggatggacaaccaagcgtatgatcttatacgagtggagattggcaacaaagatataaagcttgaatacttagtggaggcatttacaacttcaaatgagtaacattccttgatctgaaatgtgtacaataatcctgatgaactactaaaacacttgccttaatctgaaatgagtacaataaaacatatataaggaaactcaaataagtaaagtcttgcttgtccctcacaccataacatgactgatgaactactaaaacacctgcgaggtctgtcagcgtagcctcctcgacaccttctgcttctgctaactccggtgcaaggtagatccttgctatacttgacaaactaaaggaggaaagggagcaacaagaaggaaaatatggggaggaagatgtggatggttcatgtatatcagaagaagaagatggtgactgggatgtagatgagccagatgaggaggacatcatttacgtaaaatagcccattgtcttctaggaacttggtcatcattcatccagaacacagcaggttgcgttctgcatacataatattgcctatcaagggagaaagattaactggatgaagacagggatcgttgagagtgatctggttctaacagttagtccacattatgttaaggaactcacttatggcccagataaaggtgttgagttggatggtgtccttcgcacaaagcctcttgaaattggaattgtaaatggcatggatgtttatgaatgggatccttcaacagataagtacaccagcgtgaaatatgatgcaacaacggtaactgaagcaaaggctctcaataaagagaggttgcaagctgaagttggattgcctgtggactcgagcatccctgttatagtttttgtcgggcgtcttgaagaacagaaagggtctgacatactcattgcagccattccagagttcgtgggcgagaatgttcagataatcgttcttggcacgggaaagaagaaaatggaggaggaattaatgcagctggaagtgaaatatccaaacattgctagaggcatagcgaaattcaatgttccattggcacatatgatgtttgctgggtctgacttcattattgtcccaagtaggtttgagccatgtggtctcattcagttgcaagggatgagagtttctagctcgctttgttacagttcagatttgagtgcgcattcccatctgttcatcacctggaggacttgttgacacggttgaggaggggtgtcaccggattccacatgggttctttcaatgtcgagtgtgaaactgtagacctagctgacgtgacggcagtagcgtcaaccatcacacgggcctagaacagtacggcaccccggcgttccaagaaatggttcagaactgcatggcgcaaaacctatcctggaaggggcctgcgaagaagtgggaggaggtgcttctgggccttggagtcgaggggagtcaagctggcatcgacgacgcagaggagatcgctccacttgccaaggaaaacgtagctactccatgacgcttggtgcctcggaaacacgcgttggtgataggaagcatcttctaggatcctcctggccttgtggctggagtgagttgttcagtcagacacagtttcgcctctacaacatcttcctcctcctggtggtggtccgaactccgaagcaaattccagtgataaaggatgaactaagaggtccatgtttctattgctagaccttttgcctcctaaatagacgatgtactgcgcttgtaacaagaacctcactttcgtgtcaagtaatatcaacaggtttcataatggtagtgaactgcactggaaaaacctgtaaacaatgcaaacaggattcaaaactaaaacaaatctgctattaaaagctgttattcaaaattgaaaaaaacaaaacctgttaattcagtattataactcagcaaacataaataaaaaaaaca

SEQ ID NO: 40397 - DNA, 1941 bp, Zea Mays
gaaaatggaaaagagtgcattatgagcacggcggctctatcagagcgtgatacattcacaagctgaagagggctcggtcatccggaccggaattcgtaaaggcattagtgcattagcatcgtcaccactcgcgccgtcgtactacctcgccgactccctcgcttcgcagatcgcactaaagggaacacatggatctagcttgattttgtaccaaattcagagcaactgatcgtggggattcgattctccatagtttatttgcggggccgttccgatcagcgatggtgaagaggctcaggcgcaagggcgacgtctcctccgcgccgccgcctaaggccgccgcatctcggtcaaccaatcccgacaaatttaaaaagaagggggtcaaaaccgatccggagaaattgaaggcggcctgcactgaatccgcaaacattgctgaggcgtctgcttcagcgcagacacccaccccgaaaccagtcaagacgagtccggcggccgccgccgccgcagagattgcagatgatcgggtcgcccagagcaaaacggaggacggaaagtttagtaggaaggagacgatgaagggaagagaggagcagaagggagaaggggccagtgatggggtcacccagaccaagactgaggatatgaatgtgactaggaaggaaacgatgaaggggggagagaggaagggggacgggagtaggaaggagatgatgaaggggagggaagagcgtgtgaaaacggaagagaagacagggaaggaaaaggaggaggaaaagagtggctcaggattcatattcatgtgcagtgcaaggacgaagccagaatgctaccagaacggcgtgtttggccttcccagggggaagatggatgtggtggagaagatccagcgagggacgaagctgttcttgtatgattttgacctcaagctactgtatggggtgtacaaggcagatacaaggggaggattggatcttgtgcgtcacgcctttgatggcaaattccctgcacaggttaaatttagcgttttcaaggattgtcttcctattcctgagagtagtttcaagcatgccattaaggagaactacagctcaaagggcagactattggcactgttcaagcctatcagcctttctaaaccagctccacaacatattgaggatattcgaaaaccaagtgattatgaagaaagaagacagttgcaacatattgaagaaagggctgcacctattaatgtccacgcacatcctcttgaagatcggtacaagatgacacggtcattacatccgccactttttgatgagcctcgacgtggtttggtgctaaatccttatcatatgcaagagcctcaacatgttcctcttaattactatcaccaagtggctactaggtctccataccatcaacctcatatggatattatgcacgaaagaactgcagctgaggtaactgtaagagatcaccaagcactgccaggagagcttgctgcacggtctgaacgcgtggatgagctgtaccgttcttacaaactctctacacgcgcaatggacctcagtccgggagcatcctacctgacaacttatgagcacccgactagtgtttatggtgagggcattcagaggccagctttgacaagggttagtggcccaagtgtgcctgtgtccacccgttattcctttgctggcccaccagcatattgatcatccagatgcaagcactcaaatcggccccagccgctgtacaagttactgtaggcaatggcttcttgtacaccgttggaagccaggatagaacctgatggtagtagctttgcagtttaattattgcctttggtttcttttgcaagataaatctatgagatgtaatgtggaccttgtttgacccaagttgttttaactaaaatgcaaaacgatggatgtctttgtgttgatttgcagc

SEQ ID NO: 40398 - DNA, 3286 bp, Zea Mays
cggaagaagccgcaccaggagcaaattcctcctctctcgagggcggttgcgtgctcgcgtgaagaaggccggggccctatctctccgatcgcggtagggcgttcgcagcgccgattcgagccgacgattggccgtccgcgaagaagcagaagtactgaatctgttaaatggtacaacactgttgtcctttgctttgatggtaatgcatgaaattcgaacaccgacatgtcttctgcatcttcaggtttagtgagatctggcctctgcaatagtcacttccttgaaagcagatataaggattattatagttggagttcaatctttggggacatgaattgattctgttatttgtttgactccagtttggggcaatcacgggctttaggttgggtgaggtattgttgtttcaatgaattcaggtactcaggtactatttgaacactgaactaaaaattggagtttcttttcttatttgacatcttgatgtgccaaaatcaagctctcgttaaaggtcaaacaaatgggcaaaatttgggctctttgattagttttttcagtgttaagtggtgaatctactgtggtaaatgggagagctgatccagttgatctatatgccttgtgaggactattttgtcctcaataagaatatatgttcaacatcactgttggacttgtgttgcccttagattgagatggtggcttctcttacaagattgtagcagccttttaactctcgaagagggggccccttcaattgtgagttttgagaagagccaattgctgctaccttcatatcattttgaggactggaaaaggtggaccagtgtcactcttagcatctaccacctagaactttagcccaatggtggtttatatgttgaaattcatcaagtataaaggcgagaagggtagtttcgttgcccacagttaacttgtagggagagaaatattgagatctgtggaaatattggctggagcagcagaatcactcaataattttgattttggatggtagaataggttggcgtaaatttggcaaaaagaacttaaacagttctttcacatcaaattagttgttctgaagattctttccaagtaaaaatcagcttatcatgtatgcttgggccatgaagtaacaattcttttgatcgctgaggatgtcatttgcagatagatattcaatgttgttggaaagagaaagatgctagttgaaaataggtgaattgatgatgttggaaacaagatgcatttattcataagacgaacaaagggacaacaatttcgaggaggaaccctttagctaggttaaacaaaatcaaatccccctgttcatgtgttatggcagggcatcatcataataacacacatgcctccaggatggatcatgtgaacaggttccagagtgaagcacagccttttggcccaaagttatttatgcattctagaactgatgcagcaaatggagctctaccatcaggttatgtgggcgcaccaataagaccaaatggcattccattctcaagtcacaccgggcaatctcatattcagcacagtgatgctcctggaaccatgcttgcatcctattctggctatcctcttgctggaagctccagtagcacctatgcaccacataatactcatcatctgcctgctttgagctatccacataggtctgatgataacttcattctgagttcccatatggatgacagaagggttgcactgaagcggagaaatccaattatttatccagtggatggagtcaataatgggagctgttatgctggcagttcatctaatcctcagttcccatgctacatgcctccaaatcctattcctgctcctgaaccctgccctcctcgaataacatcaaatatgggttcaagctactggactgatcagccctttggtagcaatggaggatctcagaggaatgtgagaggtcgccatgatcacaatcctatccatttgggacacaatccaggtgtagcttgcgcaacaagcagcactcatgggccaccacaccatgctaatgtaattggtcctcaaagtacagcagtgccacaaaatagagcatatttttctatacctccaagagtgactgccccaggcagcgatggaaactgtagcatggttttcagggaagggacatactactctgctccgcagaggaccaacataaatgccccccctgtcctagcacctcctggttcttctgatagtctacattttgtgcatggtgggtatgccccaagagcagcccctcctaacagcatcagcacatatcctgccccggcttttgcgactcctaacaactcagtgacagttacccatgagcctgatatcccttgctatcgacctgccgtccctggctatccgcctgctacctcagcagcagcagcagcagcaagtgttcatgctgaaggtgctgctgcatcttcgagacatctaggtcatgtggctctaggttccagtggtagtgcaaggagtagaaggctgagggattcataccatgcttttcgtccactggttattgaagaaaataacttgagaggaccagcaaccgagcgttttatgatgctaaatcagttatttatccatgaatcgagagaagattctgaccctcactgggacatgaggctggacattgatgatatgagttatgaggagctgctggctttgggagaacgaataggcaatgtcaacacgggcctagctgatgaaaaactttcaagctgtgtgacggagataccctgctgcagctctgcccgtactcatgatgataatgagagcgcaagatgtgtaatttgcctggaggattacaaattcgaggactctgtcgggaagctaaaatgcaatcacaagtatcacgcagactgcatcaagaaatggctgcaggtgaagaacgcttgcccagtctgcaaagcttctgcggcagatgacggcggaggcaccgaatgaagcgccctgccgcccccattcaccctatctcaggcgaagctgtactggctgatctggtttgctgtgtgtaaataatggtcctgaaacggattatttgtgagctgaattaaactcgacatgtaaatttaatcctcaagctagttgcaaattgatggcagcggttagccctacgtgtcagccgtctgacgtaactgcagagagaaaacgtttgcatgcatatgtacagctcgatccaatagaggttattaaatgttaacaatttattagttagttaagccgtctttacgacgtccatcgtcacctaattaaattgcaactaattttc

SEQ ID NO: 40399 - DNA, 2623 bp, Zea Mays
ggctccacgaccacgagcccaaccgggtagcttcttcttcgtccgctgttacccacaccgcgggaagcctccatgcgatcccctgggcggcgcctaccagcgccggcgcggctcgtcgcggctgccctcctcctcgcagctctcaccgggggagccgtcggcgccgatgggtacgggcgggcgaggagggtgtacatgaagaacaaggtcctggagatgttttaccatgcctatgacaactacatgacttatgcattccctcatgatgaattgaagcctcttactaaaagtttcacggactcgcttagtgagcttggcaatttaaatcttgaacacttgccacaggattatagtggatccgcgttgacactggttgagtcattatcaagtcttgttgtcttaggtaacctcacagagtttgagagaggagttctctggctttcagaaaatctgacatttgatgttgatgctcggattaatctttttgagtgtaacataagacttcttggggggcttatttctgctcatattcttgcaaaagactacagcagccagtttaagcatgggctgtatcaagatcaattactacgtcttgctgaaagtttaggcaatcgttttctaccggcatttgagacacctactggattgccgtattcatggattaatcttaaggttcatataccgaactttggcttttttcagactttaaaatcttaattttttgcatgcatgaatcaatcgtaagattcctttacaacctgaaatcgtatggccacttgaatgccatcatttattgtgtgtacatatctgtgtacattcaacaggtcaaactgagaaagggtcttctgcaaagagttaccacatttgtctgaaagcagactacaacaaacattgagtttcttctccaataatttttgaaaaaggacgtgtatagttattaagacaagcatgctcattagtacaattttaacatctatcaacgtttaccttaggaaaactgggatattacttgctatcagctaaaatgataagaatggcaaattataagcatgctatggtagaatgaagaaccacagaatgattactttgtttgaaaaactcaaagttcacatatattagaactctggtactcattacttttgcaattggcatgatacaacaacctttttcagtatggggtgatggaaaatgaaacaactgaaacaagcacatcagggtgtggctcccttatacttgaaatgggtgtgttgtcacgtttgactggtgattctagatatgaagctgcagctcttcgtgctctccgcaagttatggagcatgagaagttcactgaatctagtaggcaccacacttgatgtttttactggcaagtggattcagtattcatccggaattggtgctggtgttgattcattttatgagtatctgattaaagcatatattcttttcggaagtgatgagtactgggatatgtttcattcagcttatcttgcggtgcagaagtacttccgacatggtccatggtatcatgaggctgatatgaggactggagaagcaacgcactggcagctaactagccttcaggctttctggccaggtcttcagacacttcttggagacgtaactgctgcaaatctatcacaccgtgagttttacaatatatggcaaagatttggtgtgctacctgaaagatatcttttggactatggaatgttgcatcctacagagaagtactatcccttgcgtcctgagtttgctgagtcaacattttatctttatcaagctactaaagatccttggtacctagaagtgggtgaaaccattgtgaggtcacttaattactatactaaagtggatggaggttttgctagcatcagagatgtttcaacaatgaaacttgaagatcaccagcacagcttctttctttcagaaacgtgcaaatatctttttcttctgtatgatgattcattcttgaggaatcaaaattacatatttacaacagagggtcatccccttccaataagaagcacgtggcatgagaaatttcctgcagcatatgttcccagcaattggacatctgttaaggatgagatccaaccaattcgcgcgagcgcattatcgtctcaagtttgtcccgagacgattttcggaagaagtgttggtaccccatgggagagtgcgtgccatgttccagatgcgcacgctagccacagatgcaggactgacgatgactgtggaatagaagcaataacatgcaagaagaggacctgcagtatggctggctactgcggcttatttttttataatggaaacaagagttccggctttagcatgataatgcgtacagccaatacaagtcgattattacaattaagaactgctgcatgaatagtgatactaactcaaaggaactaaattacaatactatgactaacactagtcatactcaattcttgaatttgagcgccatccatggtttgcgaagacttccatcgccaccacttccaaaacttgcgaagcaatgaggatttgttgttgcgattcctccttttgtagcagtctccagaatcttaaccagtgagtacatctgaaaataacctgcacaattgatggaattggtttat

SEQ ID NO: 40400 - DNA, 1558 bp, Zea Mays
gaagcaacaccgagcacgagggcattcgacgacgacttcctctctctcacgctagagacgcgcagtcgcgcagagtcctggctttttgcccctttccggctttgccccccttccccccaaaccacaccgatcccaatcccgccgtatccggcgaacgcgcgccgcggccatgtgcagctgctgagagaaggagcgagcgcaacgacgccactggccatggacgagggctattccaacctccccaccagccacctcctcggctccgtccccgctgtgacacaagatgacaggaaattgggtccccccgccgcccaagatgcagctgccacctctcggttgcaggagttcccacctggaggtggtaatgttggagggtatcggccaccaggtggccctgcagatggagatgttgaaaaccaagcagattggaaaggatacttcaatgttgcatcttatgctccatacttcaatgttgatactgatgttgtagttgacaggctcatcagttcagtttatccaatggatggtttttacaggaaaattgatgctaatcctgacatgtatgggcctttatggatcaccactactctgattttcatgcttgctgtgtttgtattttggatcacgcccaagtcttgttcgattttggtgtatgtggggctattctctgtttatcttcatacctgcatctgtacttttgcttattcctgtgggatttcttcaatgggtcatcatagctcttgctggtggtgcatcatcttggttcatcactttaaatttgaaggaatgcactgaaggagctgatctaatggttctgatggctagtgcatcagtgctgcaatttgctctggcactgttcatcaaagtttactttttcgcctgaggtttgcttgatgattttgcaaaggtgacctgatgcgccctttgcccacggcttgttctggaatacatcttttgaaagggcatggcagaccagttctactcgacatcgtgacatacgtactgaccctagattgttatgctttgggcgttcttcatttgaagtgtctaatctgcaagtctctatctagctagggaacagaattttacagcgtgccgtacagagtaccgagtttaggcaccaaagtctttccacgttgttcagtgaaagcccttcacttggatttgcatacaatcctttcttgggtaaagatctccagtgtgtatttgtgtgctagtacgtctcatccggttttcgaacgtccaactgacaactgatttcgcatagctcttttttttaaaaaaaatggtttagcgaataaaattagcatgctctagccacgaattttcaacgaaaaaaggtttccggatttgtttgctatttagctcagaattgaagataagaagagccttatggtcagacgtgtatcttggaatttttgtatggttgcagaagggaaggtcctgttcctaggatcaagagattagaactatgtatagttttttcaaagtaggttcatgtatgttattatttcaaataaacttcctttccacaaatttcattctgagttcatgagta

SEQ ID NO: 40401 - DNA, 4795 bp, Zea Mays
ccttgatttgcagcagcccttgcttaaccttctggagcgtggcttacatctttgcgagatcagcccttatgttggtccacaaatccctcatcgatgaatctggtgattgttgagccggggctgcccctagtggtgtcgcccatggggatgggacggagatgccatcaacgaagatgatgtgacaaaatttggcgttgtacctggggatgggcacgccggcgtccagaaacgtcggctgggggcctctgcccacggccgagcaagaggaggatttctcctttctaatttttgtctgctttatttctcatccattgattacataaatagatcggctggccgcccctatctagctagagatccttatctccttaaaactctcctaaaaactctcaacaaactactaactgataaccttcttagataatctcaactaatctcctaaataatctcaactaatcttttaatcttatctttaactatccttatctaatcccccttggagggcccatggctgttgctgctgcagcccctccatgggtctccttaggccctaacaatataacttagatgaaatgacttaaccaattctacagaaataaattaattaccaattaattatttctattatgaataaacatatccttttaatcttatcctttctaaaagaaaatgtcattataataatcagaggtccaaacatctaataataaattaaaccactgattagactataatatttgtattgctatgaattctataccacttactaattctatgttaagaaaatcttctattatctatttagggggtttaaatgaacctataattataaacttttagataaattctaaaattcaacgtaaacaaatttaactatgaaattacttatcgagtgtttttattaccaacatatgtctaccaattttgtcatagttcatttcaatcccaaattctaaagaaatcgtaaaccaatatcatgtctaataataatccactaattcatcgcatatataccaaaaatcaatagttcacatacgcatgaattctgaatcacaacattctcatattacaacacaataattacaaattcataaactaattcaaaacacgctttgaaaaataaatcaaaattttgggttgtcttcaaccttggacgaacagacggtggtgaggcacgggggcacggtgcgggcacgacgcggtcgacgacggactgcgcgggcacgactaggttcagcggggctcgggcacgtctccagcaaccgaacgacgaacggcgaggcacgacggcgagttccggcggcgagcagggcgcggctccggcgacggcgcgggtaggggagagagacagggagcacgggtagggagggagagagaggagagctcggtcgagtccttttatagagagggagagggcgccagggggagagaaaacggtcggccggccattaatggaggcgaccattacctcaacgttgatggcagccatttcttcactaactaagagattaagtggggagggagtgggggaggtggcggcggctgttactggtgcagggaagaggaggggacgcgggcgcggcgcgcgcacggccaggcggcggcgctgggtggaaaaagagaaggggccgcggggccctgacgggtgcggcccgcgcgccatagagagagcggtgggggggaatgggagaggggtcggctgggccggttagtgggctggcggctagggtttgtgtttttttccttttcttttctattttaaaaatataaatatatattttttaaaataattcaaaaatcataataattataccgaaatttatttataactaaaatatttatttttggaccattatttctatattaatcaattggattttcgttaagaaagaaattctactaaacatccaaaaatcgaatatgagcaaacaaaaattattctagatgcaaataaaaatcaaaaattaggaagaaaatttattaccattaataatctaaatgcattattttagttgatggtttttatagtgttatatgaaagcactttggttttttgaaattaagcaatccagcttttccccgagcctgttggccaagatctttgtcatgaacttagcaaaactgtgaatcaggctaatggggcgaaaatcagcagcaccatgagcgccctccctttttggcaacaatgtgataaaggcagagttgaggaggcgaaggtttctgaagtgaaggatgaaagatcacatttggccacagtttctgaagacaactctgaaatccaacaagattccccgagcattttgtctactgtagacttactccatgcgtgagctgggatgccacaaagttccacatccaccaaaactggcaaggaaacaccagtggaatgagcaaaccgtgaccatttcttgaacttcaactcaaaatccgggcagtgaagcactcttccattatcaaacacccgtactgcagtatcctcatcttgaaaaactagcatgaaatcttctggccaggccttgtgaatggtgaaacttgattcaggcagatcatatatttgtgcaacttccaaaattacctcagaaggtgttactgatggccttgtacccacaacggtgacgaacaaagctgcccttagcctgatttcttcgcgtgcgatggcagggtagaattccatcacacatctgcgtcccggagcagccggaaccgtggtgctactatctaccgggtgcggatcacactggagatcagcacccacctccacctccaaagcaggctgcctgagagaggtgtgcttccgtgctcttatggtgagggcgcctccgtcgctttcttccacgcttggaaggggaggcttgatcctaaaaagaggcccttccctgaacagaggcccctgccgacataggggaggtgtgcactaccctatcctgtccagctgacaggggggtaattctcttccacacttgtttacgtttctccatcacttgtggctgaggcatgaccttgatgcgctgccaggaaggctctttatgcgtagcccgccacttgagacgttgccacaccggaacacgaaccggcagagcaacttgcatgggtgagtccaccggactaggtacaactggacagatagcaacccggtgaccagggagcctgcatatgatacagcgcgtggcctggcggcattgggatgcacgatgggttgtggcggcgaggcagttgaagcatctacctcggaggtccaaagggacttgacgacctgccacccatcatcactcgagcggacgttgctcgaggccttccactggcgacgccaggagggaatggaggccttgaccgcaatcccgggcgacttcggaagctcccgcaccgaacccgccggggagcgtccactgccgtcgtcctcaggagcgcgtccttgaaagttccaggcatggcggcaggcaactcatctccatacgacccaactagagggctgcatgaggatgagcctccgccaatccaagccgggctgacttctgcctaacgttggagcttggaccgtcccttagggagaatcggttccgcggacgaagacaaggaggaggtggagcacgacacctgaagggagggaggaaccgcatgggagcaagcggcagggtaggtggttgccggaacctgggcggcagacggcgagctgttggtggaatgaggggcgccgggtgaggtgggaggcaagggggtgggagacgagggggcgggagccttttttttgcagtgtgtgaactcaacatcatggtggaaactgtacaccctctctcctgaactcaacatcatggtggaaacttactgtacaccagtgactggaaggagcgtcattttcaggcaattgttgtataaaaagagtggagaacattgatggatggttcaagtgtccttgcaagtagcagcttcaaattggaatggaaaaggctctttcctattcacctcgagtactgctgtgtatgactgcagtgacaatggattctgcagtgaggattctccttgtgtacccattggtcaaagcactcgtactgatgtgcttctaaaagctgaaaatgttgtccttgaggcaggcggctgtgttcttagatcggggtcctcatgtttactggctgtcaaaaggaaccttggatgtgcgtcctgatcatatactcaatctgatacattatgaagatgcagcctctcttgtaatttccatcatgaaaaagagattacggagctgcatctttgtgggttgtgacaacgagcctctgtccaggctagagatcatggaccgtgtcaacagaagcaggaaatttgacacacagtttcatggcttcactgggactgatggtccgctggggaagaggatggacaactccaaaactcgggcaaagcttggatggcagcccaagtatccgagctttacagagttccttggtctcagcaatctctaactttcatgcgatgtcactaaatacctgttattaaagatgaatatactgatacataaaagagatgatgacagatttggaagtggaatgttgtttgcttataccgcagttttcgactatcttttgatttcttctgttagatcttgtaaagcattgcagcatggtgtggcatgtacctgtgttgccttctattcgcttctgttaactcatgaaagcattgacttcaatacctgttaattgtttccatggcttcaatctatcgaaccaactgtctctctcgatgttctctagaattgtaacaaaaattccaatggtactttttggataagaacaagttttgatgaaaa

SEQ ID NO: 40402 - DNA, 5092 bp, Zea Mays
tcggatgctagtttttttgtaggaggcactattccctttttgtatagtcgagggagtacgtaactgggtcactgcattaggctagagcaggccatttgagtaagaaattcggccttttgtatgactcagcccactagcccagccccggcaaagcctcacatccatccggagggcgcagcccgtcgctccttctcgccggtcgccgccgcccccctctcatcgtccaaggctgcctccatgcacgccgccgccgccatgccctcccgctgctggtccagactccaaagccctcactcctcccgagcgaacacccaactcacccctcgattgctgtctgtcctgtttctgtttggaatgccgcttctttggctgcttccattccatggcggaaaaatcgcagcctttctggatttgcatcggttatctctttgcctgtgcgggtggagctaagctgcccacgtcctgcacgctgtccccgtctccccgacggatacgcccagcccagtcgacgacaggggagcaacacaacagtgatgtagatggattcagattcagtgatgcaggaagcttctcctgaattactagacatgtagacatgatgacaattcgagtaatcaacttgagtgtcggtaatagtcgctggctccaaggttgtcgacttgtcgtggtgaatggtacaaaggcacatccctatcgtcttggcatacccttggagcagctgacttgactttgtgtgtctgctgcactaggtgcttgtataaagtgtgtcctttacgaagccagagggcacatgtcatctgccttatctggagcacacttaggctttagggggagggaggaagggatatcagttcgtcgatccatccaggggatggctaactacacggcctattgcatcgctttgaaggctaaggatcatcatgatctcagggatatgcatagcttatcagcttgtgcaaagtacctttggagcacttctagggcaacagtgatccgcaatgagctggccaccggatcatggaatttgaacaaaatggttgctgactacatgtatgaggaacaatccagaagtggctcatcttatgatccaaccagcatgaaaggttatcattacttagttgattggcccttggatgagtcaaaactggaagcaaggatgtcatatgcaaaggaattaacagtggatgatgcacagatcattgacatagagaggatatttatgtgcagtgaactaagctccgagctgaaggatgtatgcctttccttctctctttttcttctgctgagaaggcgcttctttgggtttgtctgcgttgaagcttcacagcgaaagacacatgattttgtcttcaagggggttttgtcaaagaatcaggacggaaccctcaattacgacaggatcttcaggttgattgaggttgagttagcttttatgtatgatttcttcttcaccaagtatgctgttctttactatggatctaaaaaggtttcagcaatttggtccctggcatcagccagcttcatgtctgtgacaatctacaagctgatagaaagtgttctttctaaccagaatcggtctgaattcgtgggcacaacaacatctgatgttacaacaacatctgatgttgttgtaacaatactgatagtagcatgcattgttttgcttgagtttatccaagtattacttttttttagcaccatttggtgcagagtatcatttgtttgccattatgttcgagaacaagcaacgaacacaaggagaggcttctgcatgaaactgtttcaaaagttctgctgcatgagattcagggagattattcttaacatggctattggtatcaccaggtcaaggtcaagcgaatactactaccaaaataaacttgggcaatactccttgcttgaatcagtgattagttgcaagtacaagcagagtccacgtaaggtatggtttcacaggtttatgcatcgatattgtagtcttatagtggctccagactttgggtacctttgtaatacaaacaaagactttattcacgcacaacgtatccgcaagaaacatgtgaaacctgcagctatcaagataccagtagaagtaaaaaaggcagttgtccattccctccagcgtacacagggtgtcctagcgaatggagaatcgtcattagtgtacaatgaggtgcatgacctcttatgggcttgcaggcacaatatgctctcagacccaggcaccaactgttacctggacaaggagaatcagacacacatcattttgacttggcacattgcaacgtgttactgcgaggtgcaaacattgaaatgcctttatcctagagttgggggggcactcaagttacatcttgacatcgcaaccatactgtcaaagtactgtgcatacctggtggtctcagcaccgaagttgcttcctgggaactactatgattctagccttgtgtttgatgcagtagcagtggaagctgcacagtttctgcagaaagtggaagacaagtatgaagccttgagaagtttgcctgtatcaacagaaacctccatcttacagagggggatgaagttggcgaggcagctcgaggagatggaatgtgacaagtgttggaaggtgcttgcggatttctgggcagagatgttgctctatatcgcgccttcggaaaatgtgaatgagcatttcgaggcactggcaaatggaggggagtttataacacactggtgggcattgctcacccacgctggcattctagagagggctccaaggaatgtcaacaatgacatagaaaatcaatgggaaggatcatcatcatatggttgcccatctacaactcaggctgcagctgcagcctgtgccacaaatcaacagccaatggctggggaccgtactgtgcaactgattgaaatgaatgtcggagacatagaagatgctaagactgacaggcattatcctggagagatttcatatggtgctgctttaaggcttcgtcgtgcgaactcctacattagcaagtgtagagaagctgctaccttagccaccagcgccacgattaaaccagcaatacgtggaaactgtgagcaagtgaggatgatgattcggcaacaagcatatctaggtcaaaatgtggaactcgcaagtcccagcgcaagcactgctccaagtgagaacaaagagattgaaattgtaatagcatgtgagtaatgttgctatatatgtgtcaatgaatgaaatttgtacatatgcatggggcaacattcacaggttcagctggtcatttgtttgtggagccatgaactattatgaagttgtcctgttattctgaaagtaaaagagtgcagagatcatatgtaatgtgacagatatttagtatcaaaatagtgtacaattgtcttaagatgaaattcgtatatatggggcatcttcattcacaggtcctgctgtatgatgcttgctcatgccatggtgattgctaattttgtgtgttttagttaacacttgttctattcaacatatttctatctgaaaacaagtgtggtctttaaaaataccaaaacttgtgaattccgtgcggaatactgaaacctatgattgatgggatgtttgaatgcactatagctaataattagttggctaaaatattgctagtagaattagctagctaacaaataggtagctaactattaactaatttactaaaaatagctaatagctgaactattaggtagggtgtttagatgtctctagctaatttagtcactaactattagctctagtgtattcaaacactccctgagtatcagaatgcagggaaaaaagctcatcagtggaccaagtggacatcttgacaggagtcacgctactcctgatagcaagggttcctgccaagttgggctacaggaagaatacattgtttgctccaactatcgcacttggcaaaatctcattattactggcaacagctgcacctgggttggatactggagaaggttgcctgaagagactactgaagctaagctactgatgcgttatttggttcagttaatcagttgtatcctctgcccttgtaggctgttgtacctcacctgtgtcagcaacatttttgtgaatctaaaacagttagcacatcaacaatgctgacagactagaaccgggctttgccggtctggatgtactgcttacgtgcattgatgctagtgtggacagcaaatctctgcactgcatcatcagactgtgttcttgaatgaaaactctggagagctgggacgcaaagacatctgtccgagccaactgcagaagatggaagacggttcagactggaaaatagcagcatgtcatcttagagattttgtgatattggcagcatgcatccagtctgtgtaaatgtcatgtgattcaaagagaactaactggaaaaagaagttctgtatgacggcagcaccttaggcagctgggctctcgtggagttccctatggtgtgcatggcatcaaccgcagagctaagagcgtttcttatcccttgaatatctgcctgaaaacatgaggtctcagtatttcaagatgagaagcaacagattgacgaaacttagttcctggtttatggaacaccaaccactgctccatcggagacaggaaggcgcaggacggtggcagtcagagcctgtgtagttcctgacaaagaatgggcatggcccctctccaagaagggccattcttccaggtatttcatctgcgttttttagccccaggaagtcaggaggaggggtcagtcaatgacccgacccctactggttaatgtaaatacatacgtaggaataaaaagaagatagcttgtactttcatctgcatattgtaattttatcagattttgtgcggacaatgtgtactcagaacgaatctagtgtcataaattagcgattagttactccagcgcggcaaactgggtgtacgagctttaacctttaagatagcaattatagttgcatcttcatgaaccatgtcatggccattttaatttgcaagctagtatgaagtccgttttatcagtgagatgggttgtcagtgttgtggaacagatggagaattgagctgtataaa

SEQ ID NO: 40403 - DNA, 1917 bp, Zea Mays
gagatcgcgaccgcgagtcagggtattttgggcaccaccagagcgccaagaagggaaggttggcttctccttcctaccctttccgcgctgcaaccgccaaattctccgactgcctcgcactctcgcagcacgtggggggtgattctctctttcttctcttcctcagccgccaggaaggtggattcttttcgagctcttgcccagctgattatagcggccggctattcttcttgtccggctatccgttccaggacttcggattaagaggcgacgagatgatgcgacgctgcgtctcggcgttggcccgccgccgccgtccagatcgcacggttgatactatgaaggcacgattccaatgtttggttaacatttcctcttcaataagggacactgacagccaaaggtgctcaagtacgtgtgctacttcctgtgctaccgatccagatgttttatcgagagaaacatcgtcatcagaaatgcttgttgattcatttgggaggttccacaattacttgaggatctccttgaccgagcgctgtaatctgaggtgccagtactgtatgcctgctgaaggagttgaactaacaccaaagtcagagcttctgtcacatgatgagataattcgaatcgctgacctttttgttacttctggtgtgaataagatccgattaattggtggagaacctaccgtacgaaaagatattgaagatatttgtttgcatctttctagtttgaagggactgaaaactcttgcaatgaccacaaatggaattgttctttcaaagaaactcccaaagttgaaagaatgtggactcaatgctttaaatataagtttagatacactagtacctgcaaagtttgagttcatgacaaggcgtaaagggcactcaaaggtcttggaatcaatagatgctgctgtagaacttgggtatagccctgttaaggtcaactgtgtcatcatgcgtggtataaatgatgatgagatctgcaattttgttgaattgacgagacacaagcccatcaacgttagatttattgagtttatgccatttgatggtaatgtttggaatgtgaagaagctagttccttatgcagagatgttggacaaagtgcggcaaagttataaaggagtagagagacttcaagatcaccccacagacactgcaaagaatttcaggattgatggacatgttggcactatttcatttattacatcaatgacagagcatttttgtgctggctgcaatagattacggttattggctgatggaaacctcaaggtgtgcttatttggcccctcagaggtaagtttgagagaacccatccgtactggtgttgatgacgctggactgaaggagataattggtgccgcggttaaaaggaagaaagctaaacatgccgggatgtttgatattgccaagacagcaaatagacccatgatacatataggtggctgaggtgtgcagaatttcctcatgtcgaatatgagccaataaaatggatttgccaactgctgggttgctgcctggttttacctgaacgaccatgaaaaagttctctgatgcaatggaccaaactctttccgagtggtttaaacattagaggaggaagtggagtgtattggtcactgcagtcatacaatttagatccgtatacttgaacaaatgaacagtgtcacagaaactcactcagtcttcgcgtgccaaggtgttttggttgtgtacttgtatgttgtatgctcataatgtcacgttgtgtaagctctcttttgagatctcaccgtttgtgaattaaactgctaccttgagatcaatcgcacatcctcgtttccgttttagaaatgagcatttcagaattcagataatggagataatctttagcctacaccgagctgcacacagctaatttggaaacaaa

SEQ ID NO: 40404 - DNA, 737 bp, Zea Mays
aaaaaatacatctccctcgcaccgccggcgttcatcttccgctctctcccttactcgcgctcggcagtcggcacaggcgacggcggcggcgctcgggctctcagcgacggcggcagcggcttcccctctcgcctcgcgccctcgcctccggtcctccgcacaccggtcggtgaccctgtgtgcgtgcctctctctctcctcccccctctagtggatcgtcaacggcttccggccccggaggcttcgccgcgcgcggactgagggcagcgggagccagcagccgctgctccaccaaggcgatcgcgccgctttgagagctcatgccccaaagcgaagcgttacccatccttttagcgcttcagcaggctcaagggtgcgcttagtgctgccttttggaattatcgttcctggccaatttgtcatcagatcaccatacatgacaagggtcatccatgactccggagatggcatgcagaaggaggcacttgatttggtctcatctgatgttaactttcccaagggctgtttcccagactataggattggaccaaacaaccaaatcattgatccagaggaaacgcatgaggccgtacctctcaaggaggttgttgcaaaggaaacagcgcagctgctagagcagcacaggcgcctttctgtgcgtgatctcaaggagaagtttgagaagggtctatctagcgcttccaagctttctgaagagttgttgcctaatgtttcag

SEQ ID NO: 40405 - DNA, 3801 bp, Zea Mays
gttgggccttcttgttcgcttgggtcttgtcttgttagccgatctgtgactcccccgccatcgatgccaagtttgccccgttgccggcgtcacccctcccctcgacggtgaagctcatagcttccctccaccgccggtgtcgcttctcccccgccgaccaagccgtgcctgtcgccggcgtcgcccctcccccactagtgaaactcgcggtctctccaccgcacgcgcctcgtgtagttgtggctgcgtgcaccccctgtagccccggcgataggtcctactgctccatccggtttgcttccggcaacaagatcaacaacaagcgagcgaggtagtgaaaagctgcagctgtgatctctggaggtgctcttcctactctttctggtattttgatggtggcttgatggccagtaatatgcagtcttctgggctgcctcagcctccaagacctcccatgatgggttctagcgctcagccacaaaatcttggaccaccaatgcctatgcagtttaggccagtgatgccttcgcagcatcctcctcagttcatgccaccagcagcacagcagttccgtcctgttggtgagcctatggcgggggctaacgttggcatgccagggcaaatgccacattttccacaacctgggcagcacttgcctcactcaaatcaagttccacctgtatcacaaggggttcccatggtatatcagccagctagaccaatgtcatcagcacctatgcaacaacagcaacaaactgcgtatgctgggggccatttgcccaccatgggtgctcctatgcaacccctgacctatacatatcaaccaacatcgatccctcctgtagcgcaaccctggagtacaggcccaggacagagtgtacatcatgtgcctcctctagtgccgtctgggcaccagccggtgtcagctccaacgactttgcctcctgtcaacttgtctgaacctagctcttcagactggcaggaacacactgcagccgagggaaaaaagtactactataataagaagacaaggcaatcaagttgggagaaaccagttgagttgatgacacctttggagagggctgatgcctcaactgaatggaaagaatttactacaccagaaggacggaagtactatttcaacaaagtgaccaagcaatcaaaatggactattcctgacgagttaaaggttgcacgtgaattggcagagaacgcatcaaatcaacaacctgatcgagaatcaggaatagctactagtgctcttgtcagatctgctgcctttgaaccttctactgcacctgctaatcagtcgtcatctgctgttggtataattgcttccagcgcacatgatggatcatcaaactctgttctttctggtcctcccctgccgcacaatgtggagaatacttccagttctattgttggcatgcaaaatggtggttcgagtactgctgttgttcctgttgcagcaagcacagaagttccattagttgcaacagatgcagggtccagcagaaacaacgatgaaaattcatctctgaccactggggctgacgcagaggatggtacatccgctgaagatttggtggaggccaaaaagaccatgccagttgcagggaagattaatgtcactccagtggaggagaaaacaagtgaagaagaacctgtagtctatgccactaagatggaagcaaaaaatgcgttcaagtccctgcttgagtcggtaaatgtggagtctgattggacatgggatcagactatgagagtcatcataaatgacaaaagatatggtgctttgaaaactcttggagagagaaagcaagctttcaatgagtacttgaaccagcgcaaaaagtttgaagccgaagaaaaacgtatcaaacagaggaaagcacgtgatgatttccttgcaatgttggaagaaagcaaggagcttacatcatcaacaagatggagcaaagcaatacttatgtttgaagatgatgaaagattcaaagcagttgagcgtccaagggagcgtgaagatttatttgagaactatcttgtggaactgcataagaaggaaaaagccaaggctgctgaagaacacaaaagatatgtagcagagtacagagcttttctagaatcatgtgacttcatcaaggcaagcactcagtggagaaaagttcaggaacgcctggaggacgatgaacgttattcccgacttgagaagtttgatcggttggatatttttcaagagtacattcgacacctagagaaagaagaggaagagcagaagcgggtacaaaaggatcaagtgagaagacaagagaggaaaaaccgtgatgggtttcgtaaaatgttggaagaacatgttgctgatggcacacttaatgcaagaactcggtggcgtgattactgtgcacagataaaagattcacagtcctacttggctgtagcatcaaacacatctggctctacaccgaaagagttatttgatgacgtgatcgaggaacttggcaaacagtatcaagaagacaagatccaaattaaagaagtggtgaaatctggaaagattcctatgacaacttcatggacattagaggaattccaaactgctactctggaggatgatgctcttaaaggaatatcaaccatcaacatcaagcttgtatatgacgatcagcttgaaaggctcaaggaaaaagagcaaaaggacgctaagaagcgccagcgcttgggtgaaaatttttcagatcttttgtattccatcaaggaaatatcagcttcttcaacatgggatgattctaaacagcttttcgaggatagccaagagttcagggccttggacagtgagacttatgctagagagctttttgaagagtgcgttgtccacctgaaagaaaggttaaaagagaaagaacgtttgagggaggaagaaaaggcaaaaagagagaaagagcgtgaggagaaagagaagaagaaagagaaagaaaggaaggagaaagaacgcaaagaaaaagaaagagaccaccgggaggagagagaaaaggagaaagggaaggatcgatcaaggagagatgaaatggagtttgatggtgctgatttgaacacccatggtgcaaaagataagaaaagagataaagataaagaaaagaaacataagagacgtcaccatgacacagatgatgtaagctctgagagggatgataaagacgatgctaagaagtctcggaggcatagcagtgatcgcaagaaatctaggaagcatgcacatggctcagattcagatagtgaaaaccggcacaaaagacataaaaaggaccgagatagtagtagaagaaatggagcacatgagctggaagatggtgaacttggagaggatggggagatctattagtctttctgtttgctaccgagattctacttgtagcactcatctccagtcttgttacacatggatttattgccatctcttgcctgttgagttgcgcacttgggctgaagcctaccagctggatttttgctctgccgcacctgtgatgctactgctggggggcaatggatatagcaataacaccagctactgctggggagcaatggatgtagcaataacaccagcccatgcttgacacctttctttggtccttctggcagctgaccaggctaaattttcatttccttcaaagtccatggtgctgtctgtgctgaggtaacagattgctcagtttgcaacgagtttctttgtgagtgatgtgcttttgggagagtatggagtgtttgatttgtcgctcatgtcatgttaaggcttgttcattatac

SEQ ID NO: 40406 - DNA, 914 bp, Zea Mays
aagcaagcagcaacaccgccaaaccctaaacaccaaagccccgcatataaataccttcccctcccatcttttcccctctcctgccgccgccgccgctcccgctcccagctcgtgttccgcttcttgcagccgtcgccgcgaagcgctccagagaacttccgtcaacatgggacacgtggtatgggagccgggcgcaagctcaagacccaccgcaggaaccagcggtgggctgacaaggcatacaagaagagccatttgggcaatgagtggaagaaacccttcgctgggtcatcccatgccaagggcattgtcctggagaagattggtattgaggccaagcagcccaactccgctatccgtaagtgtgctcgtgttcagcttgttaagaatggcaagaagattgctgccttcgtgccaaatgacggttgtttgaactacattgaggaaaatgatgaggtcttgattgctggatttggtcgtaaggggcacgctgtgggagatattcctggtgtccggttcaaggtcgtcaaggtttccggtgtgtctctgcttgcccttttcaaggagaagaaagagaagccaaggtcttagattgctcttgctaccaaaatcagcaagcgtggagttgaaacgggagggcgttagatgattaagaagaatggttgcttgctatgtttgcagtgcattcgtgcaattgttaacctaagattttgttggtgaaaacgatttcttttcagacttgcttctgttgagtgctatcattccatatcaatgtacttcctcttctagaatttttgttgcccgcaagttcatttatttgttgtccgccagtttattttttaaactaaaacgatacaaataaaaaagaacagagtgtaattgctttgtacaattgcatatcttgatagagctta

SEQ ID NO: 40407 - DNA, 2664 bp, Zea Mays
ggagaagggtaaaaggagtcaagaatctttcatgcaccctgggggcttaggaagatgccgggagaagcagcgcaaggagtcctctcgtctacaaaccgtgaaccggaagctgagtgcgatgaacaagctgttgatggaggagaatgaccggctgcagaagcaggtttcccgtctcgtctttgacaacgggtatatgaagaatcgactccacagtccttctgtagccaccaccgacacaagctgtgagtctgtggtgacaagtggtcagcacaaccaacagcaaaacccagcagttctgcatcctccacaaagggatgcgaacaacccagcaggtctactcgctattgctgaggagacattggcagagttcatgtccaaggcgactggaactgctgtcaactgggtgcaaatggttgggatgaagcctggtccggattccgttggaatcatcgctgtttcgcacaactgcagcggcgtagcagcacgagcttgcggccttgtgagccttgagcccacaaagatctgcgaaaggtcattgactcagtccactggaggtccttctggacctaacactccaaattttatcagagctgaggtgcttcctagtggttatctgattcgaccctgtgatgggggaggttccatgatttacattgtggatcatgttaatctgaatgcttgtagtgtgcctgaggttcttcggccactctatgaatcccctaagatactggcacagaagatgactgcggcggcgttgcgacacattaggcaaattgcacatgagtcaagtggtgaaatgccctatggtgctgggcgacagccggctgttctcagaactttcagtcaaaggctcagcagaggcttcaatgatgctgtgagtggctttccagatgatggctggtcttgtttgttgaacaccgatggtgctgaggatattacagttacaatcaactcatctccaaataaacttgttgggtctcatgtcagcgcttccccattattttctgctatggggggtggaatcatgtgcgcaaaagcatcgatgctgctgcagaatgtgccacctgctctacttgtgcgatttttgagggagcatcggtctgaatgggctgatcctggcatcgatgcttattctgtcgcctctttgagggccaacccatacactgttccaggtttaagggctggtgggtttatgggcaaccaggttatactgccccttgcacgcaccttggagcatgaagagtccttggaggttattaggcttgaaggacatggctttagccatgaggaggtgcttatgtcccgggatatgtttcttctacagctgtgcagtggcgtcgacgaggatgcacctggtgcgtgtgcacagcttgtctttgctcctattgatgaatcttttgccgacgatgcaccgttgctgccctcaggcttccgtgtgataccgcttgatgctaagacggatgtgccaacggccaccacacgcacgcttgaccttgcctctgcgctcgaggttggatcaggtggaagcggcatgcgcgcttcatgcgatggttccggcacgtgcgccacgagatcggtcctgaccatcgccttccagttctcgttcgagaaccaccttcgcgagagcgtggcggcaatggccaagcagtacgtcaggggcgtgatggcctccgtgcagagggtggccatggcgatcgctccttctcgcctcggttcgcgtatcgaactgaagcatccgccgggctctcccgaggcacttgcactagctacgtggattggcaggagctacagggcgcacactggaacggagatccgctggtcggacaccgaaggcgcggactctccactgatgctgttctggaagcacagcgacgcgatactctgctgctctctgaagccgccggctttcacgctcaagttcgccaacagcgccggcttcgacatcctggagacgacgatggtgaacatccaggacctgccgctggaggcggtcctcgacgaggagggccagaaggccctgtccgcgcagctccccgcgatcatgcagcagggcctggcgtacctccccggtggcgtgtgcaggtcgagcatggggcggcaggcgtcgtacgagcaggcagtggcgtggaaggtggtgggtgacgacggcgccccgcagtgcctggcgctcatgctcgccaactggaccttcatctgaggctcgcaacatcgctcggcagcgccagaccggatgccgccttttgccctactacgtatcattagttgcttttccgttgtgccgcctgtgttaagaatttgtgtactgtgtggatgatcgagaactgactctgtttgtgtgtgtgcgtgacaaacaactacaacagctgtatgcgtgcctggtcgtggtctcgtctccccggcttgtcgccggcgacattgatcactgttgcaggttgcagtattactatttgctagttctgcttgctcgatcagtactcgcattgcaggttgcagcatgcagcggtagctccactacagggcacacgcagtatcggagcgggcaatggcggcggcatgctctgcgcttgcttgcagttgaagtgttgcctccgtgttggtgtggcctctctcatcgtctacggcacccacttggagccgcccaatgataacattaatgggccgaat

SEQ ID NO: 40408 - DNA, 4355 bp, Zea Mays
gcaagctggaactgaggtcagtttcaaatcattacatcacatttttttgattttggtttcttctccattgtttctcaaaatacaataccaatatataatatatacacaggtacaagaaaaacctcaaatcaaaacggaaagaaaaataatccgtcctgcctgctcgcttcctcctttgtcctttccccgaggtggaaaagacttctcagcctcttccaagtcccatcactgctcgctcacagactggtcccacgtggcgagactgtgctgcctgtgactgtgaatacatgtgcttgcgcatccggaaaatccatctgggcagtctggcagcagggcactcgctcctgccggcgagacgctggagcagtcaagtttcactgacatgtggaccagccaggggcgacgtgatgtggctcggggcttgtggacccgtgtgggtgcgcggagtgggccgaaacgtcttggttcggcgatgcagatgtttgttctacccgaaggctgggtcatgcgtagaggacctgtgcgttgcagggcgcgagcccgacgaactcggtggggcccttgaccacctcccactccaccacttcctcctcgacgccgtggacgccgggtgccgcggcggtgtctgaggccgaaacagtgcccacggcgacgtccagcccggcgccaacaacgtatatccttcgcctcccaccggcgacctccccgatctccccggcgacgacgtgtggccggcgcacctcggggggcaccccgctgccggccaccatccgccactcgtcccgggcctcgtcgtactgcttcagccgccactccccgtactccgccacgatgtacatccggccgccggcgacggcgcaagagcccgtccacccctcccgcatcccgcgcgccatctcgcaccacgagtccgtggcggagtcgtacacggcgccgcgcggcgcgcgctcgaacggccacgcccacccctccgtcacgtacagcttcccacccgccgccgccgcgtcgtaccacgccaccgccgcgccccggcgcggcgcagccggcgaccaccgcccggcatccgggtcgaacacctcggcctcgccgtcctccccggccaccaccacccgccctcccacctccccagccgccatgtacccgcggggcgtccgcatcgccgccgcctcctcccatccgttccgcgcggcgctgtacacggccacgctcgtcaccgccttgtcgctgccctcctcgacgcccccaatcacgtagatctcgccgcggcgggggagccccaccaccgcaaacgacccggccgcggcgccgccgggcaccggcgggagcaggagccacctcctcgagaaagggtcgagcgcctggcactggaggcgtcgcgacacagggtcaaacgcgaaggcgaagaggaagggcagcgataaggacaacgagcccatggctgcgctccccgcgccagcccccgccccctccgcgggagtgaacagcagcggcttggcaggggagtcggtgaggaagcggttccaggtggaggagacggtgcggaagagacggtggtagaggaagggcaggtggaggaggcacttctcggccacctcttccggcaggcccgggataagctccacgacctcttccccctccccgtcaccggcgtccagcacctgctgtttgctcatggacgagaagctcatagtggcggggccgagtggcgcgcgattgttcggtcgaatttggcgcgatccgctgcaccccgctgtgggtgtggggaagctctctcggtctcggttcggcttggtgatggggagagatctctgatggggaatggaagggaagcggggtcggcgggaatttatagaggtgggtgggtcggtgtgtgagcgtgagggtttggaccctggacgcgcaggctgtccgaggcaccgatctcaccggtaacgatggttcgatggcgagaggttgggtgaggcggggccatggtgactggtggcaagtgctgcggcgccggaggacatggctaacatggcggtgtcggcgctggaggcctctctcggcagagcgtatccgcggacagcgcgcgctgtgccagtgtgcgcagcagcagagagaacgtatcggaggagcggcaggcgcgcgcgtgcgcatgtgcgccgggagtctggtgctgcgatcgggcgtgcagtgcacagacagggggcgcgcgggttgaggacggggcgcgcatgcggcatgcgcgccgcgcgtggtgggggcgggggatcgcttgcctcgtctttacgggacactgcgatccgaggcgggagcgcgcagccactcgagccgaggcggtgccgcgctcggggaggcagcccagcgcggggtgctcgcgcgtgcagcccagcgggggccagcagatcgagcatcgcgcgacgatggtgggtgggtggagatgatcaggcgcggggcggtgtaggtgcgtgccgacatcccatgcagccaacgcagtgccccagcccccagggtaggccgataccggagccccgcgccacccaacgccagcgacagcgacgccgcggactcctcctcgccctcgccgacgcgcacggtgcgttcctggaggcgctgctcgacctaaggtgcggccacggcgcactctggctgtgcgacacggcgggcgcccagcggcacgctgagagtgaccttgtccgcctcgtgtcctccgcgcgcgccggcgtcaggctcccgcaggcggcggtgcccgtggcgccagccagcgagcgaggaatagcacttcctgttggccatagatggcgatgaaagccaactgcatcgtccgcacctttcccctacgttgcccgcatacgctctgtagtggcggaccatggcctcccgcttcacctgcagggcgccgccgaccgagcgcgcctgtggcaggagccgctcgctcagaccagattggcgcctcttcagcagcgtgacttctgtccttcaagctatgaagaaacatagaaaggttatctgcaactgcgagacacaagcatttcctatggcatgacagggacacgtatttgggcagtggtggttcatggccgaggcacagttccacgaccagggcgacgtgcacaacatcgccatcgagtgcagtggtggtgtgaggacgtgataccgatgtggaaattactattgccatcgacgacgagagcactttactagatcttcttagaagaggaaactgaacgatgggcacactgcgggtgatcaggtggcagcgatgtgaggacggtcagcatggccatggagatgctgatgaagcctaggttggtcatcctagatgagcccaccattggtttggatagaaactctttcaggcatgaactaactgtactggagaaggttcgacactgtactatgttgttcagttcgtcggagctgtcactcaggacatacctatgatgattgtttctgaactccatgaagagacttatgagatgtatccagaagaaagcaaagttacgtgcgcaaaaggtgctaagaaatggccttgatatttccaggtacttctaggttctggccccgacaagggctgaagaatccaaatatgcatcatatatgaatagctcttttacagtttcagaaaaaagataacaatgcacatgcttgctatcaatgtttcttgctgttgcctttaccacgtggaaaccagactccatcatccctggcatgacggcataacctaactctatcagtgcaaaccaggccccatcatccttggattagatggcttgtctgcccacctctcaggctccttgaccagagaggtcatctcagcgggtggctaattctacttggcgactaaggacgcgagtgcccctggtgtccagtgttttaaaggcgtcgcctaggcgtccaggcgctcaagcaattcgaggcgccttgctcgcctaccttgcctaggcgtccaggcggtggccatttttcttgcctcaccataccaccttaagaaccatgctggtgtcaaggatgatggggtgctgcaccatgtttgttggaatggcattgtctctaattggtctgattgaccttgtgatggtggaggagtcgatggacacagtggctgatgcacctcaagggacaggttgcattgctattgcattgaccaacctacatgttcacgtctgtttagcaccttgttctgcctatttgctttgatgcagtgcatggttcgaagagcttcacaagcagagttcagagagttgctgaattgaaaaggggaattggagaagtcagaaaattctatcgggaactctctacatgatggatatctcaatatgggcacctggaaggatgtcaaaaaacctcaaacaaatgtcaaagggttatgt

SEQ ID NO: 40409 - DNA, 1063 bp, Zea Mays
ctcactgagcactttcatgctttgtaaaactactattctacttcatatttttgtttttactttagggattctgataagctcatttttgagcgcctacagaaagaatttgaggctgcacgggctgctcaaaccgaagagatatcaataaatgatgatgagtggaatgatggtttactggcaaccatccgtgagaaggttcatatggaggctgataggaaggccatgtccaaccaagttatatattgcttggatggagctaggattggcatacagtatgagacattctttgctggagagccttgtgaaatttttcattgtgttttggaaagcaagtcattcctggaaaagatgattatgattgaacacaccttacctttctttctgcctgtacgtgaattagaaagtgatctgttgtcatctaattcaattaaattcattgatcatcttgaagaaattttacaggcttatattgacaggagagagcaggttcgtcttatcaaggagctctacgggaaccaaattggcgagctgttccatagtcttccttataatatgatagagtttgtattggaggattttgagtgcatacgcagacattgtgctggagctaccccatgctttgaagaggattttatcctctcgggacagtgactaaatcgtgacctcaagatgtccagttttgttgtgcataagattcacatctcaatcgtggggcatgtttttgaagatattgttcagaatcttgtggtagtatagcctgcagttgtggactgcaattcctgtgaaagcaaggcagacatttgcgtgggccgctcgaaatattccggctacagttcctgttaaaagaatcaaaatcctaggaaggccttatggtcgaggcataatcttgccaactgctgtccttgtccttgatgtgtgctccttttttttctccactctggctatgtttgtttccttttagaattatactagcgcgttacgcgcgcctgcacgcgcgtgttgacaaacctattttatttcaaatatcaagtatctaagaagacatgctaaaatttcaacaata

SEQ ID NO: 40410 - DNA, 2250 bp, Zea Mays
ggagagggtcccccgacccgtcgtccatctcgtgcctttgcgcagccagctactagggcgtcagctaagtcggtttacacgccgcacaaaaaacacacgaatattcagctagtagcagcgtgaggagaggagagggtcccccgacccgtcgtctctgccttcttgcgctgcatctttccgggtgctcttgtccgctaatggcccgccctcctctcgttttattccaaacccgctcctcccctgctttccctctcttattcaaactcgcagtcccagtcccaggctccatttttctaactccaccggccgttgccaccccctcacttcagctgcttctagttctaccgcacctcagtgactcagtcccccgctaggctcggagcggagcggagccgagcttcacttgccggctgcgaattccggggatgggcaaggcggcgaggtggctccgcggcctgctcggcggcgggaggaaagaccaggagaggcgggcctcgccggcgccgcccaccgcggacaggaagcgctggagcttcgcgaggtcctcgcgggactcggccgaggccgccgcggcggcgaccgagggctccgtgcgcggcggtggcaacgcggcgatcgcgcgggccgccgaggccgcgtggctcaagtcgctctacgacgacacggggcggcagcagagcaagcacgccatcgccgtcgccgcggccacagcggcggcggcggacgcggccgtggccgccgcgcaggccgcggtcgaggtcgtccggctcaccagccagggcccggtcttcggcggcggagggccggtgcccgtgctggacccccgcggccgcgccggcgccgccgtcaagatccagacggcattcagacgcttcttggcgaagaaggcgctgcgagcgctgaaggcgctggtgaagctgcaggcgctggtgcgcggctacctggtgcggcggcaggcggcggcgacgctgcagagcatgcaggcgctcgtccgcgcgcaggcagccgtccgcgccgcccgctacagccgcgcgctacccgcgctcccgcccctccaccaccaccctcccgtccgcgcgcgcttctcgctgcgagcacggcgtggcggcgtacagccggcgcttgtccgcgagcatcgagtcggcgtcgtacggaggcgggtacgaccggagccccaagatcgtggagatggacacggcgcggccccggtcgcgcgcgtcgtccctgcgcaccgaggacgagtggtacgcgcagtcggtgtcgtcgccgctcctgccgccgccgccgccgccgccgtgccagcacctgcaccagtaccaccacctgcccccgcgcatcgcggtgcccacgtcgcgccacttcccggactacgactggtgcgcgccggagaagccgcggccggcgacggcgcagtgcacgccccgctgcgcgccgccgacccccgccaggagcgtctgcggcgccgggggcaacggcggcggctacctcgccgcgtcgcccggctgtcccgggtacatgtcgagcacgcggtcgtcggaggccaagtcgtcgtcccggtcgcagagcgcgccgaagcagcggccgctggagcagcaggagcagcagcagcagccggcccggaagcgggtgccgctcagcgaggtggtcctggaggcccgcgcgagcctgggcggcgccggcgtgggcatgcacaagccgtgcaatacccgcgcgcaggcgcaggacgcgttcgacttccgcaccgccgtcgtgagccggttcgatcggcgcgcgtcggacgccgccgcggcggcggccgagcggcgggatcgcgaattgttcttcctgcagaggaggtggtgaaggtgaaccgatcgaccgcccgaccgggatgattaatcgggtgctgctaatagggaaggctctcattaattccttttcagcatgcatctcctcgctgatccctgttgttccgatcccatccgtgacctctcactgctgtcgttcttcctgcttgcaataagctagtgtgtgtcggggaagtagggagagatttcatcccgtcccgtaccgtttgatttcgtttttgcgttcataaacagtagcgcggctggatcgtcatcatctcgatccatgcatgtacattccgcctgttccccaatcaccatcaatcaacaagaaagagaagcacggtgtcgtttccgagccagcacgagcgtcgcaacgcaacaatggcagcgtcgtttggattttttttctctccattcaaac

SEQ ID NO: 40411 - DNA, 3692 bp, Zea Mays
gcccactcggttttcttccacgccagtacgccaccgtccccatcagtttcgccgctttcgattccattgcaacttcagcttgaactcggaagcagtcagcgactcacctcgtcgtcgcccggtcgccgtgcacgtagatgttcgccaagcggctcttccacagggcactcggagtaggaagaggaggaggaggaggagcctcagcaccagcggcatcaccagcggatgccatccaaatggacgcgcagatctcgactcactgcggggtgccatacacagcttcactactcgccttcgatcccgtccagcgcctcctcgctgtcgcaactctggatggtaggataaaaatatttggcggtgataacattgaaggcctccttatatcaccgaagagtgtgccgtacaagtttttgcagtttattacaaaccagggacttctggttgcaatttccaatgaaaatgaaatccaggtatggaatcttgagttcaggcaactattttattcgtcacagtgggatgtcaacattactgcttttgcagtcatagagaggacctttatgatgtatcttggagatgagaatggccttctttctgtattgaagtatgatgtagatgatgggaagcttcaaataatgccatacaatgttcatatccattctctaatcgaaagatctggtgtttcgttacaggatcctcaacctattgttggaatactgatccagcctgacacttttgggacaaggttgctaattgcatatgagagagggttgttggttctttgggatgtatctgaggaccgtgcagtttctgtcagaggctatggggatttacgcatgaagggtcaaatcaatggtgctcagggggattctggtgaagatcaactaaatactactattgatgacagtgaagaagaaagagaaatttgctctctttgttgggcttcaagagagggctcaactgttgcggtgggctatataacaggtgacatacttctatgggatatgactacaaaatcctccagacaagagaagcaaagtgatgtttcatctaatgttgttaagctacagctggcctcagggagtcgtaggcttcctgttattgtcttgcattggtctgctgggtcagcagtacattctaataaaggagggcatctttttgtttatggcggcgatgatatgggatctgaagaagttctcacggttcttagcctggaatcaactgctggattagaatcagtgagatgcatgtcacgaactgatctcaaacttgatggatcatttgctgatatgattcttattcctgatactggggttcctgataaaagcagaacttctgcactttttattttgacaaatcctggacagctgaatttttatgatggtggctctctattttctgtgcaaaactcaaaagagggaactcctcttcctgaagcacagaaatttccagtcgcaattcctacccttgatcccaacataacggtcactggtctttattcgctaaccgaaagtgaatttccaaatatttcactgaagaaattttgtgctaggaaaaatgctgggcatttcatatcagagaacatgaaatggcctttgactggtggggttccaaatgagatgtcactggacgaagatcatgctgttgaaagaatatacattgcaggctaccaagatggttctgtgagaatatgggatgcaacatttcctgttctaatgccaatgtttgtcttggatggaaatgttgctgatgttaatttggatggagctaatgcttctgtatcatctctagccttttgttcattaagcatgactttggctgttgggacaacaagtggtctggtgcgcatctataaactccgagaacacactgggggttcaagcttccattttgtgagtgaatttaagcaagaagttcatgttgttcatcatgggaaaggatttcattgttatgttgcctttttgtcagcaaattcctcagtgctatctctattatttatggcttcaggtggcctccttgctgcaggctatcagaatggtcaggtggcaatgcttgatccaagtcagttatcaattctattcactgtagatggtgcatcaggaacaaattctcctgttgtttccttgggcatctacagtgttgctgcatctgctgcaaaagcagatcaatcaaagaaagataatcctcaaaatgcaacgttatccagagatgttcttctttccttgacaaaggatgctcgtgttactgtacttgactgtacaacgggtgtgatgataaattcacatatcatacatcagaagcaatcatctgctatttccatgtatgtcatagatgcagagtcagacgagacacaaacccaattatcagaggacaaaattccaagtcaaggtcagacagggaaagatggcaatgatcttgacaaaatacaaacccaaggaattgaaaagcacctgaaaaatgcttcccagctttcgcaaaatggtggttcagattcactccttgtggtgtgctgcgaggatgttttgcttttgttatccctggcgtcattgattcagggaagcagcaagcatctacagaagacgaaacttgcaaaaccttgttgctggtcagcagttttcaaaaacatggatgacaaagtttgtgggctgatattagcttatcagactggcactatagaaatgaggtttgggccagatctggctattgttgctgagacctctttgatgtcattattgcgatggagttacaagacaggcatggaaaaatccacaagctcctcaaatggacaagttactttggtaaatggatctgaatttgcgattatctctcttatggcctcagagaatgacttgaggattccagaatctctgccatgccttcatgacaaagtacttgcagcagctgcggaagcagctatgagtttctcaactgatcagagaagaaagcagaatccagcagcagggattattggtggcttcattaaaggaatgaaaggcaaggctgaagaaaatgcaaaaatgagagaaagtttgacattgcgagctccaagcgaacagttggagtcaattttctcgaaagaaccatttgctgaaccttcaatacccgaccttgatgatccgatggaagaactgtcaatcgatgacatagagattgacgatgaagtagcagtagccctggcacaagcagcatcgtccacatcccaagggaataagagaacaggaggaggagagagcgaagctgtttgaagggtcaaacagtgcggataaaccgagaatgagaacgcagcaggagattctaaccaaatataggtttggcggggacgccgccgccgcagctgctcatgcgaaggataagctgatgcagaggcaggagaaactggagagaattagccaacaaaccgcggagcttcagaatggagcggagaactttgcttccctggcgcaggagctcgcgaaaacaatggagaacaagaagtggtggaagctataaactgggtttgtttgtacgtatgtgtgttgttggatgccacccgtcgttgcgaattgggacacataccagcattaccatttttttgtgtccgtattaatcactttggatattctttttgtgttttggtgatgtacgtgtaaagataaaaaagagagaatgaaaggaaccctcttctcctggctatatgagcgagtctcttattcgtc

SEQ ID NO: 40412 - DNA, 282 bp, Zea Mays
tcgttttaatatttctcatcagtttggtatacttgcgctgttaatgtgggccggtgacgtgcgcgtaaattgcagtagtgaattagtgccaaaataaaatttgatcgggtagaatagtgaagtctagtacgtcgctcgtcacgtatttggtgttatgtgcggaccgggaaacgtcgtcgatttcgtgggttcaagtaggattttagtatggtaagctaattagccacttccaatatttggtttaatggatggattgataggtatgtatgtcgcgacgattat

SEQ ID NO: 40413 - DNA, 525 bp, Zea Mays
tctgaagctagaaaggtcaactttgagcctctgtaaacaacgtaattgaccaagagcggggatgagtagaagaggatgatcctggtgtgtatattactattcgagcattgcatggtagcattagagaactacgtcgcgtcggattcaggtgactggattctaagcgaggctactcatcgcccgtaactttggaagtgtcgatttataagaaggcagaaaatgatgcaaaatctaagtgttcttttggatctcaccaattgtcagcacgtctgcttatagcgaagttctagagaaggaaaagttggaatgaaactcaaattttggtggatgcataagtgtggagacttgaattcatatatacttaattaggctcaacgttagcgcaaacagttgatgaccaagttttttcattagtattttagtttggatttaaagtacacttatgtatgagttatttgacaatgcttatttatgatatattgaatgatacttatctatattatattaattataatgttattaaat

SEQ ID NO: 40414 - DNA, 2382 bp, Zea Mays
gcgccgctcgtctcgacagacacacgcccacggagactcggagagggaggagggagggaggaggggagaggccgagagcacagggaacagacagacatggtcacgggatccatgaagcacctcgtgcaggtggagccggcaagggaggcggcggcggagggcggggcgccatcggcggggcccacgtaccgatgcgcggccggtggcaacgccgcgtcgccgcccgccgtgccggggctcgagtgctgctgggacatattccgcttgtccgtggagaagtgccccgacaacaagatgctgggccgccgcgaaatcgtccacggaaaggctggcagctacacatggctgacttacaagcaggtatacgacaccgtgctcgatgttgggtctgccatccggagctgtggcgtcggcaagggcggccggtgtggcatctatggagccaattctcctgagtgggtcatcagtatgcaggtgccggggcagtagaattcgtattgtgccatgcagaggtacaaattgcttttgttgaggaaaagaagatcggagagatgctcaagacatttcccaatgcgaccaaatatctgaaaacacttgtaagcttcggtaaggttgatcctgggcacaaggaaaaagttgaacagaatggcttgtccatctactcatgggaagagtttctgcaactgggaggtaaagagaagtttgaacttccacccaaggaaaaggatgacatatgtacaataatgtacaccagtggaacaactggtgatcctaagggagtactaatctcgaacaagagcattgttaccattgtttcagcagtagatgagttcctcaacaactcaaacgagcagcttaacatggatgacgtttacatttcctatcttccgcttgctcatatatttgaccgggtgattgaagaggtgttcattcgtcatggtgcttcaattggattttggcgtggggatgtcaaactcttggttgaagacattggagaactcaaaccaacagttttttgtgctgttccacgtgttctagacagaatttatggaggattgcaagataaaattacagctggtggtttcctaaagaaaaccttgttcaatgttgcttacaaatacaaacaaggcaatatgttgaagggaaacaagcatgaagaggctgctgccatgtttgatcgcctggtcttcaccaaggtgaaacggggactaggtggaagggttcgcctgattctatctggcgcagctcccctatctagacatgttgaggagtatctgcgtgtggtaacatgctcccatgtccttcaaggatacgggctaacggaaacctgtgctgggtcctttgtttccctgccgaacaacatgtccatgctgggaactgtcggccctccagtcccgtatgtcgaagtacgcctggagtctgtccctgagatgggttatgatgcactgtcgagcgagacgcctcgtggggaaatttgcatcagaggggacaccttgttctcgggatactacaagcgagaggacctaaccaaagaagtcttggtcgatggctggttccacacaggagacattggtgagtggcagtctgacggaagcatgaagatcattgaccgcaagaagaacatcttcaagctctcacagggagagtacgttgcggttgagaatctggagaacatctttggtcaaactcctgctgttgattcgatttgggtctacggcaacagcttcgagtcgagcctggtagcagttgtgaaccccaacacacaagcactggagcgctgggcagagtcgaacggggtaactggagaatttgccacgatatgcgaagaccctagagcgagagagttcatcttgggagagcttacaaagatgggtaaagaaaagaagctcaaaggctttgagctcatcagggctgttcatctggaccccgcaccgttcgacatggagcgcgaccttatcaccccgacgtacaagaagaagcggccacagctgctgaaacactatcagaccatcattgacggtatgtacaatagcatgaagtaggctctgcacggctccacctgttgcctcacggcatggagaatcaaaatgctttgctagccgtcacctcggcaagcagactccaatgtgaattgagattatttcattagattgtgtcattaaaaagttatgctacatgatgttagctaggttttttttatccctcctggctcctgaaattggcgtacaagctgcgtgaatgcacccgtgtcagtgttgccatctaaataccttagataagcgtatgccctgtgcctcgatttttttaattttaccttttaaaaaaacatatttacatcccctagtgatcaaaacttgacttcagactccaggggcgccgaga

SEQ ID NO: 40415 - DNA, 2124 bp, Zea Mays
aaaatttccttctcattcaaaattaaataaagagatgattttagtcggtccaatctccttcgattttagagaaattccctgggattgggtcccattgttatgtctacgccctaaaccctgcaggcgtcatccgtatcttccttctcagctctggccatgccgcctctcctcttctcccttcgaccctcgccctgttcaggcttcccgctacgccgactcctattccgctgctccgcttcctccgcctccaccttctcgtcgctcgcctcttaccacgcctccttcgcccgccggatggccctcgccggcatccatccgcaccaccgcatcgcggtcggggtctccggtggaccggactcgatggcgctgtgcgtgctcgccacggcctggaagaaggcagcggggaggaaggccggtgatgaggaggatcccgtcgcctcggcattcgtggacgggctcctcggagttgtcgtcgaccacggtctgcgccccgagagcgccgacgaggcgcggctagtgcgtgaccgcgtccgtggcatgggtaatctcatgtacttaggccctgtttgtttcaacttatagattatataatctagattataatttagattatataatctggattatttgctctggattaaataagctaggtgctgctgtttgttagctcagattatttagacttggcttattattcatatgcatacaaatacaacaatacccttgactgttttacttagctggtgggtgagaacgtctatggacaggtggatgacaattggaagtaattttaatcaactttccatgggtagtggatcttttaaaaaaaataagctgaaataagcaccctttgatgagcttataggattatcataatctcaagtgctagattatataatcttatcagataagttgcttgtttgtttcctcactagcttatttacattggattatataatctacatagattataatcccaaacaaacagggccttaacctcgctgtatttgaaacttttatagatgtagtcgagcgtctgggcacaatgtacacagtttagggaatttccagcacttcctttttcgttaagaaatgaccaaatcggtgcttagcctgggtttgtgatcctcaggtcttgtttgttttgaaggattagaacgtagctgtggtaacctctgccatttggctgtctttcgaggttctatactatttttgcaggtgttgagtgtgagattgctaactgtgagtggccgtatggccctccaaagcaagggaaggtgcaagaggctgcccgcgaagtgaggtaccaaaaactattggacatttgtataaagcaacagataggaatcttgcttattgcacaccattctgatgaccaggcagagctctttgttctcagactatctcgccaaagtggggttttagggcttgctggtacagcttttgtgtctcagttgtttgcatctaatgtaaaatatgatggggagagatttcgacgttatggcatacttcttgtgcggcctatgcttgagttttcaaaagatgacatgtataagatatgtcaaggtagtaatcaaccctgggtggaagatccaacgaatactagtatgaagtatgctagaaaccgaattcgggcgtctttaagaaaattatccaccgaaggtcaagctgtacttaaaactgccatgcttgctttaattttatagtccttttatgttgtccaaagcccctgctgattccatctatggtgtgggctgatatcttgatggatttcatagaagggtttccaaaggtcggtgacaaatcagtggtgctcacgatggtagatcggttctccaagtacaaccacttcactgctttgggtcacccttagcagcatcggtggcaaaaactttctttgatgagattgtcaaactccatggcctcccatgctctattgtgagtgattgtgacaccgtatttacaagcttgttctggactgaattgtttagcatggttggagtcaaactgcagatgagctccgcattccacccacaatctgatggccaattgaaagtggtcaaccggattatcaccatgtaccttcgctatcttgctggtgatcggccaaaatcatgactgaaa

SEQ ID NO: 40416 - DNA, 1085 bp, Zea Mays
ctgatcctgccgtccgatcccacctcccgatcctgccgcccggactccccacgaccctacctttcttccttccccgatttcaccgccgccagctgtccaatcccgccgcccagcccccgcccccagaggttggaggtgcgagcgatagccccggcgcccccactgccattacccccgccgcgatgctcgcgttcgtgaggcgtcacgcgcacatcgtgcaacccaacccccttcctccatcgcggcagaacgacatcctccaactccggcggcctccatttccccatcctcttcaacgcgcggcacaacgacctcctcctcccccaccggcggcctccaccagaccaccaccccaccggtcgtcgacctcaaccgtccgttgacctcaaccgtccaccagaccacctcacctcctccaattcccgcgcccgcgcctgatatggaaggtccgccggaggactcgggcgtcgaggccatggcggagcagcaccccttctcccccctgcctcgcgcgcggcggccgagatggtgctggctgggttgttcgagatgatggtccttcccgccctccctgctatcctcgccccaaatcgacgagaatcatgcagcccaaatctgaggtggaggcgtctgcactgtcgatggaggtgtcaagtctgcagtggtgtctgtagatgggaaggcatggtgtgcagcggcagcggccaggtggtgtcgctgagcctgcccttttacgggctcactggcacgctctccacggccttcgggaacctcacattcctgcgtatgctgaacctgagctccaattcattccgcggggaggtcctagcgaccatcgttcgccttgcgcatctgcatgcgctagacctgagctacaacgccttctccgatgctcatgacatttcccaatgcaacaaaatatctgaaaacaattataagctttggtaaggttgatcctgggcacaaggaaaaagttgaacagatatgtagtgcattttaagtgcttgatggttgcgtggaagaggtggggggctaccacgtcggctacgacatcaagctctccagcaccgagtcccctaggtcgg

SEQ ID NO: 40417 - DNA, 1397 bp, Zea Mays
ttttctcttaatgtaggacaactagatttatatactctccatagtagctgctcttgacagaaaagaaagcaacagaagtgccattcatacatgtcaaaagattaatttgcagcaataaattataattccacaggtctgaattgtgtgtacatacatacatgtaaaaaaataatttgcaaggacaggtaataattccacatgtccgacttggtgggttacacatcctactatccccttgtttgttttttaaataatctggtcggatgacaattctactatttgcttctatattttctccaaatctccccttctcttgttctgttacagcttgttaatatcacttgctgcagacaaagtacgtcaaaaggcaacgtctaagtaatatgttgatacacaaagatagaaggttacatgtgcgttgttactatctcacgccaactcagacctctactggataacgttgcacaccatgcgactagacagacactaaatttgggtacctctacaaagcacttaatttattgtgcctctttcgaaaaaggttcttttctttcgtaattacctaaccactgctatactatactaacattttgaattcacatatacaaactcggcttcattactactgacggaacatccgaagcagaattttttgtgtcatggagatacaaattaaaagttagtttattgtaatttccaaaaaaacagcagagagcacttaacaaggcaagggagtatcaatttaaattatgctaccaaaattgtgttgaaaacttacttttacacaaatccttgaaattaacaaaaaaaattgtcttccttgttcactcactgagaacttgtggtgataacggtcccaggccagttgcgagcaacatatgggttgttctcgtgaaggaagttgaacacctcgtccaacagctgcaacagaaaagctcaaggtcaaatttcaaaaaaagaacgtgggcatgagcgtgcgcaatacactagtgttgggaccatgcttcgtcgccgaaggtcctgcaaaaagaaacagcttcggctgaagctgcttgaacatgatgccgaagacaccgttcacgaagcttcggagctacaacatatccgaagacgaagggtcgaaccgacttaaagatagaatgaccatttagcccataagggtctgagtcattgttgtaaacttttatgaggggcataattgtaattcctcatgagttgtgtcctgtgcctataaatagtgaacagtattcctttactgttcacggattcctgtaattgccaacgcatcactcgggaattattgtttgtcaaggcaaaggtataaatgtacctaaacattgtgttcagatattcaaaattcatttaacaagatatgtgaatgatgtcgtttattttca

SEQ ID NO: 40418 - DNA, 1742 bp, Zea Mays
ccccctccagtctccactctccagagtccagacctccactgtccactccaaagccgcagcagcgggcaaaaccaggcacccgcacgatccgattcggcttccgtctcactcatctcgcccggcctccgcggagagatctggcggcggaggcgatgccactgggcgacggcgcggaggcggcggacttcgtgctgccggacgagctcctggcggcgctgccgcgggacccctacgagcagctggatctggcacgccgcatcaccgcgctggcggtgtccgggcgggtgtccggcctggagcgggaggcggggcgcctgcgggcggaggccgcggggaaggaccgcgagaacgccgagctccgggagcgagtggtgctgctcgacaccgcgctgcaggagaccaacgccaggctccgcgccgcgctcgaggacaatattaagctcagcaaggagcgagactcgctggcgcagacgtccaagaagctggcgcgcgacctgcagaagctggagtcattcaagaggcatctgatgcagtcgttgcgtgatgatagttcatcaccacaggaaacagttgacattacaacatgtgaccagccagtagcaacaaaagcatcgtttagtggagatggtggatctggcagccaccctacaacaaatatatttagtgaatctttggatgctggaagtaccgcctcaaggcctccgatccaaaaatatgccctctcatcgcacatcactccttggcttacccccaaggccactcctaaaataatgtccacttctgcttctccaaggcaaatatctaccacagcaacaccgaagctgatgtctggtgctacctcgccaacaaaatctcgaattgaagctcacatgtcaatgacaccatggtatccatcaagcaagcagtcctcggcagctagctcacctccacgaggaggttcaaacccaggtcggactcctcgtgttgatggaaaggaattttttcgccaagccaggagtcgtctatcctatgaacaatttggagcattcttagccaacatcaaagaactcaatgcccataagcagtcccgtgaggaaactctcaagaaagctgaggagatctttggtccagaaaacaaagatctatatctgtctttccgaggcttgctaaatcgtagcatgccgtaggctccgtatgtctctttgtaatgaagttgccgcattggcaacttattgccatctaagttgtggatttgaagatctagttggaagttttgccccccataatccacactaggtttaacgagcgtcgagcggacctctctgaacaactgagtgcgcaaaccagagttgctcctgtaagtgttgcacctgtcgagtgctaaactataggatgcatcctgtcatggtgcctacattcttcgtaaaaccatgaaacagaatcttgggagtaaaattccatctcgtccccaactcaatcatcaattgcaatcggtagctgcatcttgttctgttaacctcgaactaactttttcgttttgctctgtttgtactgaggtttctctgtgaaaagttgatttcgcagctaacaaaagttggcacatgattctgagaacacgggcaatgaaaagaggaaaacactcggacaaacattggtaagatcgatctgcatttccacagcagagttcacctgttttaactaggcagtagatgcacaccaatacctgtaaccatgttccaccttctcatggaaggacagccaaa

SEQ ID NO: 40419 - DNA, 1485 bp, Zea Mays
aaatacacctgttgtttaataatacagtggccatttggtacaggcgtcggactcccaggaggatgaccggtggcaagaggttcggcggcgggcgggtgccgacggggaccccgtccctcgcgtggtcgtccgtcgtcatcgtcgcctccctcctcgttggcgcctccatcgtccacaacatctacaagcctgacatgaccattccacctgtggagggtgccgccggcggcggcggccaagaaagctgagctacgaatggctggacactgcatgcaagagaggaggctgggcatgggagtagtgagggaccggccatcagcacctttttttttttgttctagaacaaaaacgatattatgttgttcttttctgttttgctaccaaaagatgtgaggctgcatagtatttgcttcgttaggcgctactggtcacgcgtaaccatggtatatgtacgttgattttgttttttctaatgcctaataatcactacactcaaaatgtacgggcttgtggtggcactgcggcgggaggtggttggttggttccacttccatccaggctgctccgtggatgcgacggtgattcacgagcggatacgcaagtgtagctgtggcctgcacttggggccggattgtgacccattatcaggcttaggcctgcgtgcggggtcgtttgccgttgtgtacacatggaagaacggggcaccaagtcttgcttccattgccgccgccccttccgtgcacgcgcgcacggcgcacctatacatatgcaccgccccatgccccgcacgccctccctctcccagcgacaccagagagccgaatttacttcgttctcagcctccgttgcccctcgcgcgcgttacgctgtaccaccaggctcgatcggtcgatcctttgctgggcgtcagagaagcatggcagcagctggcaagtcgtcggccatggaggaggtggtggcggcggcggattgactggcaggccgttgacaggggcatcgcctacctgctcatggtggccacgtacgcgcttcactagagccgtcttggcttcggtctgctccggccggcggcagagatcacgggaaggaaggctttgtgagctctgcttcccggcctcagcgtgagagttcccccgcgccaaacttcattcgtttctcttccactcttcctcttgtatggagatggagatggagatatgcctgtgtctttaccactagaaaaaaatgttgttttttctattgtctttctgtgattattctgtgcaaaatggtcaattgttgccaaaacgatcaatgttaccatggtttcggcttgcgtctatcttctgttgtgattgggttcgacattcagagtttgcacaaggccatacatagcatacatatatggcagagtttgcagcgtgaggaaaactgtcatcgccgtgtattttagcattatacataacataccccatccgttcattccaataggcatataagctacca

SEQ ID NO: 40420 - DNA, 2345 bp, Zea Mays
gccttttgttttgtttcctatttcctttccttctcgtgtagcttttcggccggcgaccgcgacctgaccgtccgccactgcgcacctgccggcgtctgggcgacgccccgccgccagcctgccaccaccacgacgcctgcaccggaatccgacactgtctcaaccactccgtcgtgcctatccgaagctcaacggcggagcccggtgggatagggcggaggcgctgaggcctgagggggagactggacctgggctgcacgaggtaggctgtgcggtggcggaaggaatcaccgatgagcgatgcgcaggcgacaggggatggtccgcgctgcgttggctgcggcgggcgcgtgaagacgctcttcgtgcagtactccccgggcaacatccgcttgatgaaatgcgataagtgcaaggctgttgctgatccctacatcgagtgcgagttcatgatcatcttgattgatctcgtcctgcacaagacaagggcgtaccgccatgttctgtttaataagctgagcatgggatcatccgttgacaaggtatgaaatatgaatctatgctttctaggccgactctggttgctgtatcacattcctggaaacatcaaattggtgcttggctcatactgcaaacatcgagtaccacctttcttttggctggtctcatagtagtaatgctctaaatctctaatcatttatgcatttcactttgacttgccttacctaatcagtatgaaacaattgttactggagatgcccacttgtcgagtagttaatgtatggatgaagctaaatatggctttgtcatcgttatccatgctaaattgcctggacccaggtgtgctctcctttctgcattaaagcaaagcatttacttcttcggtatcttttctgtttcaattttatctcgtggagtaacacaagcaatcaggaaggtatggatggcattcaattttactcaataattcccatgcttctgcttgaaaaactggaacttttctttctgccttttgctaacgatagcattcctgtttcaccgaaccttcggccttttgtgatttttcgacccttcacaacagcatacaagaaccaatttgacaacaacatacaagaaccaatttggcacaaaaaagttttctatccgtataggttctaaatgaacagtttggcaatcttgttgcaatctgatctcatattgtagtgatttcataccttccctcaagaacatatttggtgggtatgtcttcatgaccatatataatttgattccttttctaaaatgtctgttgtgttctggtttgcagggaatactttaccggtctactttgatacacattgctcttgacacatgtatccttagaattcataatttttttctttgatttggtttactataaactgtctgcccaacttaagcagtccatgactatgtaatgtaagtcagaatatctttttcgaaaggaaacagagctggtggggcttcttccaggagcattttctcaacagtttccaattgcactgaggttgttggcgatgcattattgggaaacatcgtatttatattcatgttactcctgggagtgcgattttttctcaaattatctttcgatattataaggtatagggatattctgttcgctgtcatcatttcaagctacttcaagttgtttcttttcacaatgatggtttgggagtttccgtcatctgttatattcattgttgagatgtttgttctctcatcaaacgttgtagccctgagagtttccaagagcccactgtttcgcggtctgcttactagcgcacgcagcaaaatacttgacccagcgatggatccttggaacgccatgagagcctgaactcgtacagatcaatcatcctggtgcttccagcgacgtctataggtatactgtggcctgatgatgagctctggtttctatcgagttctttgactgtgttgccttgtctcctccaccccctctccctgtgactgtgagtactatcttcaatgtacttgcggcgaagacggatatggcatctttactcataggcagtagctgttgagtgttgtgtggttggtacttggtcccttgacccaaccaccggcctactactacgtagcatctgcggcgtctcctgttcacgaaagaatgcagcaaaggaaagacctactaggctattaccatcgtgttcttctttggcggttctgtcaacattacctgtgaactctcgtttcctggctgcagctgcagatgtgctccagtggagcctaccgctacgcgctaccactttgtgttggacacttgaactgcaatgcacatgcacagtcacgggcacagatagtct

SEQ ID NO: 40421 - DNA, 2277 bp, Zea Mays
tgatctagcccgtccgaaggaaccacttcacactactctccgcggctctgccgtccgttctcctctcgccgccgccggccgcgcctccaccctcgcggcactcgcatggcggcgccggctctccgtatcactgcgcggctgggacttgcacttgacggtgccaccgccgcgagacggcgcgaggcctcggcgcctgtggcggtgccggccgcgccgtggctgaagaaggcggcggtccggtgtcagcgagccgtcggtgccgctgttgccgagaagaaggatgcgccggtatcggttgcgcaggatagaagcggcgacgggggcgcggcgccggagctcaccgtcgtgatgaagttcggcgggtcgtcagtggcctcggccgagcggatgcgggaggtggcagacctcatcctcagcttccccgaggagcacccggtcgtcgtgctctcagcgatgggaaagaccaccaacaaactcctcatggctggggaaaaggcagtgggctgtggtgcgaccaacgtctcggagcttgatgagctctcctttgtaaaggaattgcatcttgggacgcttgatcagcttgggctagatagatcaattgtttgtggtttgttggatgaacttgaacaacttcttaagggaattgctatgatgaaagagctgactcttaggacacgagattatctagtttcatttggtgaatgcatgtctacaagaatatttgctgcacttttaaacaaaattggagtaaaagctcggcagtatgatgcatttgatcttggctttataactaccgatgatttcacaaatgcggatattctggaagcaacttatcctgctgttgcaaggaggctacatgtggaatggattaatgatcctgctatacctatagtcactggctttcttggcaagggatggagatctggtgcaataactaccttgggcaggggtggtagtgacttgacagctacaaccattggcaaagccttgggattaagagaaatccaggtttggaaagatgttgatggtgttttaacatgtgacccaaatatccatcctaaggcaaaacctgtgccatacttgacatttgatgaggcagctgaacttgcctattttggagcgcaggttttgcatccacaatcaatgcggccagctagagaaggcgatgtacctgtgagggttaagaattcttataaccgtcgagcccctggtacccttatcactaaagcaagagatatgagtaagactgttttgactagcattgttttgaaatcaaatattacaatgcttgatatagtcagcacacgcatgcttggccagtacgggtttctagctaaggttttttcgatatttgaagacttgggcatctctgttgattgtgtggctaccagtgaagtcagcatatctttgacactggatccatcgaaactatggagttgtgaattggttcagcacaaaaatgaacttgatgatgtcattgaagagcttgagaagatagcagttgttcatctactgcagaacaggtcaataatatctttaattggaaatgtgcagaggtcgtctttgattcttgaaaagaagcgtaaatgatcatgcaatactgtgtttgcaattgacatccactgctgcacggcaggctttcaatgttctacgaagaaacggtgtcaatgtccagatgatatcgcaaggggcgtccaaggtgaacatttccttggtggtccatgacagtgaggcaaaacagtgtgttcaagccctccactccgcgttctttgagaatggtttcttgttggaagctgatgagttggatgttctgcatgatggctttacatcgcattccaatggcacaatccacagccattagccgaggatttgatattcatctgtttggctactgtagtgccacttgtgatcaaatcctgatctttggtcgatatctaatgtttttatgaggctacgaaggattcggctttagagctactacccatcagaagtctaggaatttgttcagagccactacttaggattttggttagagattaatgatactgtttggttttctgtacaattgattgaaagtatatacttagttatcttggccaacctatcaaaccacggaggatgcaagcggatttgtccgtaaacctttaaggttagtttggaaacctcatttttgcaagggaaattagttcatttttttttgtgaaaataggaatcccaaaatggagtttctaaactagccataattgttacatgttactacataagccacaaaaaaaa

SEQ ID NO: 40422 - DNA, 2956 bp, Zea Mays
acggcccatctggccatccggttagcaagaccaacaaatgcacactgatacgttcccttcgaacccacctcccatggccaccgtcgactgccccctgccctctcccgcggacctcgacgacaacggattcccggctctaccctcctcccccgctgcctgtagcagcggcttcgcggaggacttctaccgcagcggcaccgactggtcctccttacgcgcccctccgccgctggggccgcccagaagggcacccggtgtgaaggagagaggaggcggctcggccgtgcagagcagcctcttccaggcgtgggggatcgagaagccgcggcgggacgggcgtggggctggggattcatcgcttgtgcagaggagcctcttccaggcatgggggatcgagagaccgcagagggagggtctcggggctggagattcctccccctcctcctccctttccggttctttgttggcaaggaagcggaggcgaggaagcaccgaggaggagcgggtggcggccaagaagcccctcgcgtgccccttctacaagaagattcctggcacaccattcacggtggatgcatttcggtatggacaagttgaggggtgctcggcctatttccttagccactttcatcatgaccattacggtggattaaccaagaaatggtgccatggccccatctattgttctgcactcactgcacgcctagtgaagatgtgcttgtcagtaaattccgaagggagtgacagttaccttgctggaggccaaccattgccctggtgcagctctaatccacttccgactaagtgatggaaagacctgtctccacactggggattttagagcatcaaaaactatgcaatcgcatccacttctccagagaggccgagtaaatttggtttacctggacacaacatattgcaatcccaagtacaagttcccaccccaggaggatgttattgattttgttgtgagaaccactcgaagatatctaaagaaacaaccaaaaaccctcattgttgttggggcatatagcattgggaaagagaatgtgtatctagcaatttcccaagctttagaggcccatatatacactgatgcatcgagaaggcggattctctactcatttggctggccagatttgtccaaaaggctatgttcatgcaatcaaagttcatcacttcatgttctgccccttggatctataaatcatgagaacttgaagaagtacttggagactcttaatggaagattcctagctgtgctggcttttcggcctacaggttggactttctctgaggcaactggaaagcatcttgacctaataaaaccaagctctaatgccaatgtaacaatctatggtgtgccttatagcgagcattcaagtttcactgagcttagggattttgtgatgtttctgaaacctcaaaagataattcctactgttaatgttggcaatgccacaagccgagataaaatgcaagcacatttccgggaatggctgaagagcccgtgataaatatatcctgatcatgtttttttttctatatcggcgtcaactcgactccactcaatgagtgacacagtcatggtacggaaaagaagtggatatatttttaaaggttggtttgcttggtactaaaaatgctatgtttagagtaccacttttcccaacattattccgagattcgttttgtggaacttatctcatttgagaggtaaatgtgttgtttctcgcttgtctggcatttctttgcaagggaactgtaagatgaagaaatattgatttgaattactgtttatcaaaacccattatcagcaacacatttgttgtctccccatgttcaatcgaaatacaagatttcactggctagagcagtgggatttcctagttgcgattgggagtcggtatgctgccttcagaaatatgtggaagaaagtggtacacgacccagcttctgaattctaattagacgataaggtctatagcctaacacctgctgggctgctagtgtcacagcttctattggcaacataagcacaaatttcggctactgtaacgattaaactatttgctcttattcatcccaaatgatttttctacaaggtggtagagtcatgaaatgacgaatggtaaatagtgcatatgttgggtgagatttccgctgctcacaagaataagcttaatgctattgcattaccatcatagttatgggcaatcatctaaatattaccatcattatctaaaaaaatctaaatattaccatagcctgctaagcctagaaaatatttggttagtcccacatctaagtatcctcaaaatgccttgctgttgctgatcaacaggaaccatgttaaaccttccatacctcggtactgtactaggtctcatgcagtagcccatggtggatttgtatgcacgtgtctgatcattggcgttatttggcagtctccatgccagtactaccttcgtgatgttagctcacatacatgtatgggatggatagcttgatctgctcccattgtagggggcgatgctaaaggtaaaacacaatcgatagcttgatctactcgctgatgaaattcacgtgggctaggtggatcaaacacaatcggctgattaagggaggacgacgatagaagaatttagtggatgcgcgatgacgatgatgcaaacgttcagacaggggatcgggaattttctgttgtagcattcgtgcaaaccgtcgtgaatccagtcaatacagcacgtgtacaaatatcaaagctgcaggtttcactgtgcagtgcgcaccgctgtgacagacttctaatattgtaactcaaatattaaaacttgaactcatgatgtaccaccaataagggagttgccccccagcaaatgcgacaactgaataggatctattggcttaacaaggacatagcccctgctgagatcgatttcatagataccatgtg

SEQ ID NO: 40423 - DNA, 224 bp, Zea Mays
aattggcttaccaagaccgaatggattcgatatccgcgagggcgatgacggttttccaatttagacatttggtcgagtcccaagagagcgcttataggcctcgcttctcacgaacattagggatttctcaaccaaagtaagtccgactcaaagcttgcgagagcgtcgacagtctccgaataaaatcttcgatcgaacacctggcgagcattgaactgagcttc

SEQ ID NO: 40424 - DNA, 1440 bp, Zea Mays
atggccggatctgttcggatccgttgcgcttgcgcagctccatgcacatctcgaaaccctaaccacgattcccaggtaacgtttcccactttcccaggaatcgaagcgccgccgtcctcccgcggtcccgcagcgccgaattgccgatgcctgctcaaatgctcaagcagctcaacggactccgcgtcttcgtcaagccccaagtggtactctctaccccgatccagtaccccgatcctgtggttctatgtctggttctacacttctacaatggggaggaagaggttagttgttagaaaagcttctggtcctagtaggatagatgattccagcaatcctagcgaactatcagatggtactggaggtgtttctagtcccttacctagttctagtcccttacctggttcatgtcccttacctggttctagttccttacctggttcatgtcccttacctggtcgtagtaggatagatggttccttaccagtaccatcaaatggtactggaggtgtttctaatggtgatggggatattggtggtgatgtgccagtgccagtaaagggtgctaaaccaattgtttcaagggcagagtgctggaagcatatggataagcgagagattgttgagaatggtataaaaagttatattgctgtatgtcactattgtaaaactgagttgagtgcagattctgctggtggcactgggcatttgaatcgacacttcagagcttgtatgaagaaggcagggcaaacttttggtacaggtgtgcaaactcaactaaacttcgccgcagacggcactgaacaatggatgaaactgacatagaacaatcagatagttctttgatagcccacttatggaagagatcgaagggaaaagaatctgctaactcaacagtaaatcaaaggtggaatcctaatgctgaattgaatcattatctgtctactaactttgcagccactgatcgcaccttgaagggagataaggtaaaattacttgaatggtggagggaacacaagtacagttttccagtattatctcattttgctagagatattcttcttgttcctgtttcaactgtttcctctgaagcaacatttagcacagtgggtagaattattgaagaaaggaggtcctctctttcacctgagacagtggaggccatcacctgccttaaggactggaaaagagcagaagatagaaagcagcatcaacttgaagatcctgagattgaacaagcttttgctgatttcagccaagattagtgttacttttatctagttcatatggactgttattgtaatatggaccattattgtaatatggactgtggacattaaaactttatccgatctgtactcttttccttacagagggagccccacactggggtgtaaggtttttaacgaggcagatcgaggaataaaaaacattttccct

SEQ ID NO: 40425 - DNA, 1586 bp, Zea Mays
gcacaccctagccgtcgccaacctgcagctccatcccggtgcttgcccagacgggtcgccccgtaaggagagaacgtgaccaggcaggagacgacgcttcatgtatccatctccgcctcaatcgaccgtgccaattaacaggctcccaaggaggagatccaatcctgcgggcgggtgtcccgtcgcccatccatcgatccgaatctgcatgtgaccagtctcatcgggctcttctcttttttaggaatgactcatgggtttctcaccatcccttccacttggggatttcaatcgaatggtgaaatggagttaccaatcaacaactagctgaatcagctcccggcctacccgggcttatctccaccggtgcaggttggtgaacaccaccgctgggagcacctcgccaggaacgtgcgtacctcccgtgtctccttcaacccgccatgaatttcttggtttcactcgctagctgatcgactgactgacacacgtacactcatgtctttcagcctttcctcacgctcttcggagacaactcggtctattgtccctgcaaagaatgagaagaaagaatcctcaaacactggcaagcgagaaactaggaaatctataaaaaggactggtgatttaatctcttagccttgacacaacatatgcatagtgtgttacttggtgaaaacttatgcacaaaatttatgttgtcgctttcatgaaggaggcaggttacttggttttaccctttctgcatattatgcaaataattctcaaatgaacatttttcttaattttgtatcaacttttatattgtgttattctttcacgtgtgacctggctatacagagatttatgcctctgcttctctatgctatggagtatcaaatctgttgattttttgttctgataatatagaatgataatggttcatgttgtgaaatgggtagatgatatcattccagatgcaccttatgccataactgaacaatacttattattgttttggtttcaggtgaggatccagttggagtgagggatctgcttgtcaggtcatgaggaacatgcttgcaaatgagggtgtccgttcattctacaagggtttgtccgctggtttgctaaggcaagcaacgcacatagactgctcatcttggatccttcagctatggaatgtttgccaccagagggtgtgatagatttgtgaatgtgtgggatgacattaacaagagaatactatatcagtactcaaaagtgcgcatcaagcattgttgcactgtcattcggtaaggatggccatctgcttgctgtggcatccaactacacttatgaagagtgagaaaaaacgcactttgtctgacaaatctctgtttacgcaatattaaccgctcatgattctcctcacacttgtcctctttgtcgtcttgagttttatttgctgtgacttagcaaaagtgaattccactgatgggactaacgatacctcaatatgttttgtcaataccttaaggagtctattgtcctatttttctttcaaggttcgttgtagacttaaggtacacattatgaatcgtgcgttgccttcttttgagttgtta

SEQ ID NO: 40426 - DNA, 4609 bp, Zea Mays
attccgaaaaaaatcactaacagaaggacggttcaggaagcattgacagatagaagatggattgctgatatcacaggatcactctcggtgggagtattattggattatcttcatctttggaatttaatttcagattttgagctgctgccagatatagaagataaacatacttttagtattgctgcaaatgggacttattctgctaaggctgcatatgatgggttgttcatcggggctgtgcatttcggtcactatgaaagagtttggaaaacttgggccccctctaaatgccacttcttcctctggttatcggtgctaaataaatgctggacaacagataggttggcaaagagaggacttgatcatccggagaagtgtccgctttgtgaccaagagtctgaatctttggatcatattttggtttcttgtgtttttgcgagagaattctggttccggctgaaggttgatgtgcattttcagactacaaaatctggctcctacacctagtacggtgtcttttacgggttggtgggagatgatagacaatggctccggagatatgattatgaagggtgtcaactcccttattgccttgggagcctggattatttggaatcatcggaatcaaattgtctttgatggaatctcccctagtgtttctgcagctctttgtcaggcaagggaggaacaacagttgtgggaaatggcaggagctaagggtctctcctttcttgccgcaaccatcaggggcacctagctgcctggtttatcgctgatgggctggttttgtttttcaggatctgtttgttctttttttgtttttttctcttcttttttctttggtttttttatcccctccggggaggtcttttgtactttggtctattttggaccctcttttccttctacttaatataatgatgtgcagttctcctgcgctttcgagaaaaaaaaacgtcatccgcggcctcaacgaatgctttgccaacattggtcttcacctttgacgtgggcgcctttccccacctttttcgatgcttgctctgagctccttcttgaagtgctcaggccatcagggcacctccattgacccctactgcccttgcggcctctatcattccgcctgctcccgctagtgcgcccttggtcttcggggcctgacctctggcttcctctcgtagtcttgtgtgctttgtggagcgtcggggggctcaggcctagggcctttaggtcccgtaggtcatgagtgggactcaggcctaggactcgactcgtcggtcgtgggtgggaggcggactggctccttcctacaccgcggctcggtgctgggcgcagttaatgtggcgtgcgtagtattgatggtgagagcagccctagggccagatgtggaatccactcgagtggctctctggcggttcgtctgatctccttgccaggcttcgcctcgtccgacctctggcgcggtgcataggggtcatctgggtgcagattcacataggcgagcttctccctatcttatctctcactcgtggtctcgtgggggcccggggatccgatccccgacactcgggatatggatcgccgacgtggggaaaggaggcgctggggtggcagctacacccgcgggaggctagggaggcgtaggccgagcgccgatggccgggtgtagggggatgccgccgaccgcaaccgagaaggggaggtctgtcaccggaggaggaggtgcggcagcggccgtaatcgcaatcgtccgcgcgatggctgcagcggtggttggtgcagtggacgttcgtgccgcttgcgtggggagggaggcgagcacatgaaaaggagaaagggagggaggcagtcgtggacgccgagaaggtgcgggcggacgcggtgacgatcgctctgggagatgcaggggaaggagagggaggggttgccggaggactgctccatgacggtggcgatggccgggggtgcgccgacggctagagtgcctggtggttagggaatgtagaggcttgataccatgttggaatagaaaaccctaaccagagttgatagtgcattaatataatagagttaggtgggtctgaggcccattacaatagaggcattacaatagagcatacagttacgctaacagtatcaaatgcctttgaaatctctagcttcaaaaggatgtatggttctttacttttatgtagggtctgagcaagctgctgcacaagtaagaaattgttgtgaatattcctcctaacaaaggcgctctggttgttagaccagcttaggcagcagggtgccaagcgataagcaaaaatcttggttaccaactttgcaaagcttgagttttaggacttgagctttacaagatgagtttacagcttggacttgatcagatcccatctgaggaaaaggatctccagttttggcacttgaattatcaccattgtcgaatagccaccctaaaatcaaagtatttaatttcttctgtgactgctaaaaggttgaaataacttttctaaaagaaaattgcttgtccatgggagacccctgggcattttttagtttataagttagcaaattacatcctgattggtgattggctaggaaaactagctaaatcagtttccagggaggtaaccacaaattgctgagtcctggatttgagcacaggtggccttcctctcaactgggaagtactttctaatttccttttcagatgtagatgtaatatttccaagaagtacaacccttttccttttttccttgcaccaaaccttttgtaactttgttcccagataccgggttctcggtcttgttagaagtatattactaaacaatctatctgcctacactgcattgttcagcagatgctggattagataaaatgtgattttaacaagtactccctatgttccagtttattaggtggtagtgcatttttgagaaagggcagattgttaggcggcatacatagcaaggcattgcattataaattcctgtggaagaaacacagccgttttatccgacccgatccaacaagtgaatgcaatgcaccagatcagtgtggcacctggcgtgaattaaatcttgctcacactctggtgtgtgtactcttagcgcctttaaattgggtgtggagggagtgtatatgggtgcaaaaataacatagctttgtacaagtaaacaaacatggttggacatcacttttacctaagatttttattgaggactaactgtctctgcttcttacatcctagactgaaaattttccattagatgtccacattgccttggaatgtattgattgtgctatctctttcagcatcaacatgggaaataaggactttgtatacatcaggatcatcgagtccaaaatgtgttgttactcttatgttggagattgctccaagtttttggggcagatggaagagaaggcactcaaattttgacaaaagcatcccttttgctttgctcagccaagtagcaggtataagagagtacttcgcagccaatccagccttgacatctgagctgccttcaacagtagtgaagtcaaaagcatctgaaactttgatcatccagagtgaacatgaagattctgaacttggtgatgaattttatgatgcacttactagaggtgaatccttcgaagatggggatagtgatgatgatgatgatgccacaactccaaaggttgttggcggtgatccacttctagagctacttgcggtcgattggttcaaagttaatgaacgctttgattcagttgccttacatcccaaaagccttgtgcaatcagaagctgcaaagaaacttcctttcatattggttataaatttgcaggtgccagcgaaaccaaattataacttggttatgtactacgctgcagagagaccagtgaacaaagattctttgttgggtagattcattgatggaactgatgcataccgagatgccagatttaaacttataccaagcattgttgagggttattggatggttaagcgtgctgtaggaacaaaagcttgccttctgggcaaagcagtaacgtgcaattatcttcgccaggataactttctggagatagatgttgacatcggttcatcatccgttgcccggagcattattggtctagtattgggatatgtcacaagcatagttgttgatcttgctattcttattgaggccaaggaagagaaagagctccccgagtacattctgggcactgttcgtctgaaccgtgtgaatcccgacagtgctgtatcaatctaattacgtttctagccgatctatgcaaatttactcttatcctcttttattctgagagaaacagcgtggcattttgaaaatgtgaaatagcattactatttgctgatccccaatcgagggtaacatatgtaaattggcatgaggcatgactacgtgacgcctttcgtaaatagaataaatcaatggttatgtaatattaatatcccatatacgcgtgtcataatctatgtggcttaaaagtggcatcaagtcatctagtttcctgtgttaacttcttattccttaggtagtcagacattaacagtgtgtttggtttgaggaatgaagtgatccatctttttctcac

SEQ ID NO: 40427 - DNA, 596 bp, Zea Mays
cgcgcatcgccgtctccgggccgtgggtgcggcgacaggtgtcgcccgctccgccaggaccaccgccttgtttattaatcgcgtcgccaactccggcgagcataaagcacggccgcgcggaccactacagagacggcggcagatcgcttgctagtatataattatctataggtcgtttagctagccttgcagtgcatgttacggccggccggccggggtcttcatgattcgctctgctagctttctgtcagcagctggttgcaattgcatgtcgtcgtttgctctcggccattgcacgtaggccgcgtcccattattattcggcctgctgggttttcattaatgctttcgtggctgatcgagctgcaaagggttattatatatgttaatgcatgtatgtgcggtgaaatgaagcatcctcctcccatttgtatgtgtgattatttgtatgtgtgatggtgtgacgaggcacggctagctagctggggtagctaccatgcttgctttcctcactttttactttggagatccagaaggctcccgaaaagccttaataaacacccaaaaagctgggcgtagctacgcatgtacatccat

SEQ ID NO: 40428 - DNA, 287 bp, Zea Mays
aggaaacacaccagtaatgatctttctcgagcatttcaattgtattattgaaatgtctatgatcatgatattattcctcctttctatccattggatagattgaaggaacaaaggacttttattcttgcattatgtaaccaaagtatatattacttttccatccttttcctttgcaacaaagatggtgaatgaaagaatatcatgaatatgaatttacaatacgtcactacttgcaaaatcaactaagattagtctgcatttggttgctctctgtcacaaggctcctg

SEQ ID NO: 40429 - DNA, 1269 bp, Zea Mays
aaataactcgtcggagtcagtacggtgctctctccgtctcagccgtcgccaactaatctatccccgatcacgcggcgaaccgccgcaacaccactatcaccaatcgcaatggagaaccctccaccgtcctccgccggtccgtactcggcgcccgcgccggcagcgcagcatcaggacgcggcgaaggaggatcaggacgtggcgcagctcgtgctcaacctctgcatcccggagctccgcgagaaggccatcatcatcctttccaagaagcgagaaaaatgtgaagatcttgctctactactatggcactcttttggtacaatggctgcactactccaggaaattgtgtcaatttatcgattactttcacccccacaattatcttttgaccaatcaactcgagtctgcaatgtgcttgtactccttaagtttccactgtacctgtaccctttcttgaacactacctacaaaacaagagaatatgagttcttgaggattagtagcctgagcgtgatcggtgctcttgtgaagtccgatgatcatgaagtcattgtgaatttgctgtgttctgaaatagttcctttgtgtctgcgtgctattgagatgggcagtgaactttcaaaaaaggtggccacttttattctccaaaagattatgcttgacgacacagggcttgcgtacgtatgcgcttcttctgaacgtttctgcgctgttgccaatgtgctagctcagatggtcgaagcacttgctgaacagccttccccgaggacgcttaagaacacaatccgctgctacctcaggctgacagatgatcgaagggcctgccaagcgttacgtgactacctccccatcgcgttgagggacgggacattcaacggcttaatcgaggtcgatctcacagcaaggctatggctccaccagctgctgcataacgtcatgatgtcagacagtggaggcggccctcgccctgccccgggtcctgtgatggggatgtgaatgaagccggtcgccacgcctcatcatctgtgaagatccaagagcgtgcgttgtagctgtaggtagcgaagtagtaacccacagggaagggaaagcaatcgtggtggtgttcacacccttttggagggaacaaacacaaacagctgagctttgtgccgtttggatggcgaagaagcaacgataacacgcgtcttcttgatacaagtctggctggccattggtcgttgggattttgaaatgatatacaggtaaaatttgcactgtgaagaccgc

SEQ ID NO: 40430 - DNA, 3557 bp, Zea Mays
ggcccaaaaatcagcgaataggcccatcagctccagccgcgcgaccgcgtgaacactgaacagccccccggtcgctcctcctccctctaccctccagctccagccgccagccgccagccgcccacgcccggagcaccgccgcaacccgcagcgccgctcgcccggaggccggagcaccgccgctctccccgcacggagcaccgccgcgaccacgccgctgtccatccgccgctccgcgctccctccttcgaccttcgccttggttccgacgcggtgaccgtgcgctaaacccttcgaccttcgcccggaggcgggagcgcggcggaccggagtccggagcaaccgtgagacgagcaggggcggccggcgggcgcggatatttgggcgcaacaactttctgcccttccatttctccaactaagaaggaataggatgccaagagagtttctgcaaccccaatgaagatggcaccagctccgcctccggaggggactgcaattctgctaattcgtggagctcagagttctatcttaacggtgctgctagttatgcttgggtgttagtgctatggctactcattaccaagctgctaccttgattgcctctccgtcttacccaaatgccattgcttggtcaagtgacaatctcgtggctgtcgcatctggtcatattgtaactattctgaacccagctgcgcttgatggaccccgtggattggttggacttcgtcacagtgacccttttcctataggagtggttaagagagaagatctcttggagccatgtttattgcccacttccttagcgcgtgaaactgaaccatgtgcccgatcgatttcatggtctcaacaaggatttgcacctaactatgggtgtttgctggctgtttgcactgtgaatgatcatgtgaagctttaccgatcaccaatttgggagttatgtgatgaatgggtagaggtcgcagatatatcacagttgctgtttaactattataaaattataaacttcggagaggataatggttctcatttgacttcttcgaagaatacaaattctggggaggcagaagttttaggatctacttgtcgatcggaagaatctctttatttcaggggtcctggacagagaaaaataaagccagcaagagttggtggttttatttatgacggcaatgaagttgatttagatgcttcaaaggatgcagacttctcgatggaaccatgctcaaaatcaaagaagaaatctttgaaaaagactgtaaaacccagggatgaagtggttgctgtaaatggacgaaacagcacagggaatgttaaagcatcattgtcctccaatgaacaaaacaaatctcttcctcttatcacggcaaaacagtatgcctgtcgtgctgcacatttgtcttcccttgtagtttcatggtctccagttgtgtcattaagtgatagaacttcttgtttattgaggcattggtgcattcttgctgttggctctaaatctggaaatatttctttttggaaactatataagccagaatattacacaatagatgctggtgtggttaccagtgatccgatgctcatcggggttttgcatgctcatgaatcatgggtcaatgccataacttggcaagttctttctgcgggctcttcaaaatcctcgttgcttttagctactggatgctcagatggaagtgttaagatatggttagggaatattgaagggttaaatcaatgtgcaattggagaagaagtgccatttgtgttagttgctgaggttgccgctaatttatcagctccagtgtcgtcaatctcattgggcatacctgcccggtctcaacatgaggttagtttggcaattggaagagtatccgggttactagaaatatggatatggaatgcatctaccaacaaaattgagagttccagtgcatggcatgcacatgatcaagtggtgacaggtttacgatgggctatcgatggcaattgtttattcagctgcagtcaggacaattctacacgttgttggatatctcacgaaaaccaccttgaagaattttttttgcattcagaattttcagagctaagggagtcagaagatctatcaaaagtttctgatcgatgctatggtcttacgctatcacctggagaagagataattgctgtggtccgcagtttggatctgaaccttttgaaccagatgtatcaagtcaggacacaaaaggcggtggtcgagttcatttggatcggtggccaatttgttggtattccactggacgggagtatcgatatttgcagtccgcagtctgcggacttatcctcaagtaaccttatgtggtggggatccaacatcttgtggtcgctgaagaaatacgaaaatgtcgaaaagaggcttgtgttgtgggacgttgtagctgcgctgcaagagctgaagaaaaccgcgcccgcctttctggagactctagtgcacagttgggcctcagctttatttgcgggcgactcacagtgtgtttctatcactgcccagtcatcacgctcgatgcatgacatgatgccccatgtcagctcgcggaagctgcacttactgaacataatctgcagaaaagtgatgctcggcaatcatgcgcggcatggtcctggtgctggaaacaacagtaatgatggaacaactgatttctggagcactcttttggtagcgagtgaaacggagctgcgagagaggctggtgggtttcacctttgccgcggtcgtgaaacggacagcgtgtctgttcaacggcacctccaccgcaaattgctggttccctgtcggcgtcgcccagatggattcttgggtatccatgaactacgaaaaggtgcacggtcagctgcagtcgatcagatcgaagatcaaagagctaggaagcaggatcgacggatactccgacgtagaaagctgcccctactgctcttcgccggtccgtttcgagtcgcctgacgtggccatctgcggagaaaggcacacgctgtcgcggtgcaggacatccatgaccctgtgctccgtcgcgcagccagtgtggcactgctcgtgctgcgggggcacggtcgacaagctgctgccggagtcgttcttcaccatgcctttggacgccgtccgtgacgacaaaggatcgctcgatctgtcggcagcctccgccccgctttgccccttctgcggcgtcctgctgcagaggtcgatgccggcgttcctgctctccacctcgccggtatagtcttcggatgcccccaggtgttacatgcagtagcaatgcaatgggaatatcgtagtggagccaactaccaagtttgttgtagctgatgctgtatggctgcagagtggcagtgccgtcattggggctcgaaatgtttgtgataggttttgtgacttctttctgcttagcccctctaatatatctcgagatacctattttttatttaccgtaccctgcctctggaccaaagcctatgtggcggtggccgccaggctgagtgcggggcgaggggcttgggccagctcctgcactcagcctgatgaccatgtccg

SEQ ID NO: 40431 - DNA, 2161 bp, Zea Mays
ctccctcccgctcactcgcgcaatccgtcgaactcgaacactgccatggccaccgccgctgccgacgacgatgtcaagctcgaatccttcctccaatggctccagtccaacggcgccgacctccgcagctgcacgatccgcgcatgcggcggcaagggcttgggggttttttccaccgccgcccccgagccgggctccaacgacggggtggcgatggtggtaccgctcgatctcgccatcacgcccatgcgggtgctgcaggacccactcgtcggcccgcgatgccgcgcgctcttagaggacggagtcgtcgacgaccgcctcctcgtcatgctcttcctcatggccgagcgccgacgccctggctcactctggaagccatacttggatatgcttccgagcacctttgggagctccctttggtttactgaggaagagcttgccgaactggaagggacaactttgcaccgagctacgttgattcagaggaagtcattgcaatcctcatttgatgagaaggttaaagggctcgttgaggagcttttgcatgtcgatgaatcagcaagctcagttgaagttttgtttgaggacttcctttgggcaaactcaatcttctggactcgagcactgaacataccattgcctcattcttatgtttttctgggctcatgtggcgatcaacaggccagggctgacaatgatgcccaccaggaaattgatattacagctaaggattgtagtgctgatgagaattctaaaccaagtaacacagagtcaatttgggttgagggccttgtcccaggaattgatttctgcaatcataatgtaaaggcactggcaacatgggaagttgattctgtgggaaatgctaccggaattcctgcttcaatgtacctcttgcttgctgataaaagtcctgctgagactggagcagagatctgcataaactacggcaacaaaggaaatgaggaactactgtacctttatggatttgtggttgacaacaatcctgatgattatctcatggtaaccctcataatgatgttcattatcctttggaagctcttagacagatccagtctgctgatataaaaatgaagctactagagatgcagaagggagaattgaggtgcctcctacccagaagtttgcttgataatggattttttggtatccgttctagtgaagataaggatagcaagaaaaatactggtccgttttcaagttttagttggagtggtcaacgcaaagttccatcatatcttccaaaaattgttttccctcatgaatttatgagtactctacgtactattgccatgcaagaacatgagcttgaacaggttgcttctttacttggagaggttggatatagtgaagacagagaaacatcttgtgcagcgatccaaagtgctatttgggaggtctgcggtgatcagggtgcactgggtttgcttgtggatcttctcggggtcaaaatggctgaacttgaagagggctctggaacagaagcatctgacgccgaactgctcgagcagttcgattccattcagccagaagactacgcgagtgaaagcggcgagaagcacgaaaggaagtcaaagacaaactaccgttcgtgtgtagtgtaccggagagggcaaaagcagctgacgaggctgttcctgagggaggtagagcatcttctggagctttctgcgaaagaacagagctaagagactctcatctggccctgcctgcatcaaggttagaactgcagggttgtgaaaggaggcacacccgttgcgaaagtagaataccgccttcgtttcgttcccttgcgaaagtactactactccgttccaggactacgatttcgtctcccgaggattccggattgcccgttggctgggcatttgtggaggagacgtcgtcttgcactttgctgccacggctaggctgtagctttacctgattcagcttgcagcggcggagctgcagcgaacagccatctagagacagctccagagctctggttttaccaaaatgcgtttcttttctagatgactttgccttcgtcagagatgcatctcctggtctcacgagtcacagttccgactccgagacggtcaaggagattatagtctgctaagattatgtaatctaaagtattttttaaaccggg

SEQ ID NO: 40432 - DNA, 3253 bp, Zea Mays
cgaggaactacgatccccaacggcccaattcaacccgccccacgcgacgccgaccgcagatccttcatctctttcctccctcgtaggcgaacccgactcaaaccctagccccctctccttgccatccccgcccatggatcgcgatcgctcctcacggcgcactcgcaacgacgacgggcaccaccgatcccgcggccgggacgacgaccggcaccgccgccgtagtcgccacgacaccgaggatcaccagcacgacggtggagacgaggaccgtcgccaccgccgccaccgcgacaaggacggtggcagaggcggcgaggatgaccgccggcaccgtgaccatcacgataaggacgacagccgttgccaccgctaccgtgacggcggtgacgacgatcgccgccgcgggaaccgacgttccgtttccccgtccgagtccccgccaccctcggcgaagcgggaccgctcgtctagccgcccccgggagcttgtcgagcgccgcgactccaccgaccgcgagccgcggtcgccgtcgcggaagagaaaggggcacgagggcggtggcgacggggacgagcccggccgcgaagggggcaagcgggccagggcctccgtagacccgcctccacccaaggaggagaggcctaggcgggagcgccggaggtttgaggatgtcggtgcgaatgggaagaatggtgatgtgagtaagtcgagtaaggaaatctcatctcatgggcagaagggggagttatcaattaacggagattcacagaacggcaatgggcctaatgctggttctcagcaactgctcagtgccgttcctatgccatcttctgttcccattccttcaaagatggaagtgcaacatctgctgctggcaaaagtagtaacctatctcttgatgctttagccaaagcaaaaaaagctttgcaactgaagaaggaactgtcagaaaaactcaagaaattacctatgtaccatctctggaacgccggccgtaggtggtgctatcggtattccaggtcttacgaacattcccaatcttgaatctgtgaagcgagcccaagaacttgctgctaagatggggtttcgccaagatccacaatttggtcctcttatcaacttattccctggtacatccactgaagttactgtgccacaaaggcctgcaaaggctcctgttcttcgccttgatgcccaaggtagggaaattgatgagcagggaaacgttatcagcatgacaaagccaacaaatctgagtactctgaaggtcaatataaacaagcagaagaaagaggcttttcaaataatcaagccggacttggactctcttgcaaaatcaagtgttcattttgatgaacggatgggcataaaccaaaagaagctccttcgtcttaaaaggccaggatttcagttcgttgaagagggtaaactcactaggcaggctgaattgcagaaaattaagagtcaatttggtgaagcgcaagctaaagagctcaaagtaaagcaagcccagcttgctaaggcaaagacagaagtagacatgaatccaaaccttattgaggttgctcttggtgtgagagctccaaaacaaaagcagaaggaagagatccctgaaattgagccatgggatgcaaaaattttactttctgccacatatgaggatgtctctgtggagaaacttaatttggacaagatcaccatatatgttgaacatccagaaccatatgatccacctgctgagcctgcaccaccgccgccccagccactgaagttgactaagaaggagcagaagaagttgagaacacaaaggcgtcttgctaaggaaaaagataggcaagaaatgattaggcaaggcctcttggagccacctaagcccaaggtcaaaatgagcaatcttatgaaagtgctaggctctgaagctgtccaagatcccacacggatggagatggaaataagaactgcggctgcagagcgtgagcaggctcacgttgaccgtaacattgcccgcaagctcacaccatctgagcgccgtgagaagaaagaacggaagctttttgatgatccaactaacacagtggagactatagtttgtgtttacaagataagagacctgtcccatccacagacacgcttcaaagttgatgtgaatgcacaagagaataaactgacaggtgctgcggtcattactgatagtatcagtgttgtggttgttgaaggggggaaaaagtcaatcaaaaggtataataagctcatgctaaaccgtatagattgggctgctgctgttggtggtgatgaagacgcagaagcagaagcggaagctgacaagccagtgaatagctgtgaattggtctggcagggtagtgtggcaaagcccaccttccacaggttcactgtacataactgccggagtgaatctgcagctaagaagatattcgttgatgcttctgttcctcactactgggatcttgctgtcaattcctcggagggttctccctgagcaaagcacctgttcagaaccttggtagctactgctgatctttgctggctacatgctagttatgtgtggccagtgttatagcgcttgttatggtaagacccttaccacgagtatctacatcaatggcctcatcagttgaagtactgaactcagtaatgcctggtgttagggggtgtttatccctccattttatttcatttgtccctagattgccaaatacagccatatttgtcaatttaggaactaaaatggaataaaatgtagggactaaaaattagtccctataaaccgaacacccccttaatctgttgtgaacatgctatttcagagatgttattgttggattttcctgtggcctagaaactgttatgtgagcaactgttgaattttgcacgctcagcgtgcatttggaataaaccaattgcatcaaatgactgcgtgtatttagtattgttgcggtgtgaattgcgggcagtgcctgcacatcaattacaaattcatcaacttgtgtggatgtttataatggttcatcaattttaaaagtataattctggatcaataaacttttcaagctcccttggctcgaatttttttttcaagttgtttaacgtactcactcggtcctaaaagaccatctcaagttgtttaggcacacaattacaagttcatcaacttgtgtggatgtttataatggttcatcaactttaaaagtataattctggatcaataaacttttcaagctcccttggctcg

SEQ ID NO: 40433 - DNA, 2926 bp, Zea Mays
cgcagaactgcagaaggcagacccacgtgactctttctcccgtttctctcgtcagtttctccgctcgccccgcggttcccgcttcctacagccctccggtcgactcgggttcccacttcgccgccgctcccccgtttccttcacctcttctcctgcagtcctgcgcaccttcctccctcccagagtcccagtcaaaccctgctcggaagcaaacggacttcggatcctcggctttaccactcgcctcgcggacttcggggtttagtttgggacccgttgctccggagttcttcttaaggtaccctgctggaggttgttttgtatcatggagagtacagacaagaatgacaaaagaaatgctgtcacagaagagtcttctaatcctggacaaaattgtgaagatgacggggatttttcaatgaaaactgaaatgttaaatgtagaagaagcaccaagtttctcgaatgacaaattaaacaacgaatcagaagtgcagattcaagagggaggtaatgattcagaagagggcttaaacggacaaatgaatgaaaggacaagctcagatgtcatggaatgtgcaagctcaaacgagatcacaaaagagaatctttctgaagataaaactgaagagccagtatttgatggaactgaggttcttgaaatagaagaaatgaggcgttcttccaatcaatctggggaacttgactcagaggctcaggggtctgtactcaatgaccgggctgttgcaataaaaaattttgttaaagaaaggagtgcaattgcagtttcaacatttatgcggcgcctttctggcaaaaaggatgagaatgaatttaaggctgaagctgacaagactattggttcagaatacatggactgcgagaaaaccaggacagatgctgaatccaatcctaaagaggtgcaacagaaatctgtggaaagaactgtctggaacccactgaacttcattaaaattggccgggattctgatacttttgtaactggggaagcgttgaatgaaaatgtgcctggtttgttggagataccaccattgaagggtaggataataatatacacaaaactgggatgtgaagattgcaaaaaggttcgtctattcttgcttcggaaaaggctcaagtatgttgagattaacattgacatcttccctggtagaaagttggaattggagaagaatactgggtcatccactgtaccaaaagtgtattttaatgacctactaattggagggttaattgagttgaggaaaatggaagattctggcatacttgatgagaatatcgatgttctgttcaatgaggaatccccatattctgctccattaccccccttacttggagaagatgatgaatcaggaagtgggaagattgatgagctggcaaccattgtcaaaaaaatgagagagtcaatcactcctaaggatagattctataagatgagaagatttagcaactgctttcttggtagtgaagctgtggatttcatatcagaagatcaatatttggagagagatgaggcagtggaatttgcaaggaagcttgcaagaaaatacttctttcgtcatgttctagatgaaaatgtcttcgaagatggaaaccacatatatcgtttcctggatcatgatcccatagttatgactcaatgttacaacatccctaggggcatcatcgatgttgcaccaaagcccattgctgaagtagcatcaaggctgaggttgctatcctgtgccatttttgaagcttatgtatcagccgatggtagacatgttgactaccaaagcatccaaggttctgaggaatttaaaagatatattagaacagttgaggagctccagagggtggaaattgattatttatcacgtgaagagaaacttgctttcttcataaatctctacaatatgatggctatccatgcattagtgacatgtggccatcctgctggaccattggacagaaaaaagttttttggagattttaagtatatcattggtggatgtgcttattcactgtcagcaatccaaaatggcattctacgtggcaaccaaaggccaccatacaacattgccaaacctttcgggcagaaagaccgaagatccaaggtggcccttccataccatgaacctcttgttcactttgctttgatatgtggcaccaaatctggacctgcacttaggtgttactcaccaggggatatcgataaagaattgatggaagctgcacgtgatttcgtgaggaatggaggactgattgttgatcctgaagccaaaattgcatctgcaagcaagattttgaaatggtatagcacagattttggtaagaacgagatggaagtgctaaagcatgctgcgaactatcttgagcccgcagagtcagagcagctcttggaactgctcgccagcactcaactgaaagtcatgtaccaaaattacgactggagcatcaacatttagaaggtggtgcttatcatttttctgaattccgttcagttaactaaatgagaatcgccgacgccgtcttccctaccggagctattaagatttacaaacggtggtgatgttatcagcacggccggtgatgtggagcgagcgagcatgcgtgaacgctgctgcagcgcgcatgattgcttggaacaattaacttctcgccattacgagcgagcgtttgagctgcacgtattttgttttgttgactggctcgatctgaaaaaaaagctgattctacgattttcctcttaccttttaaactctccaaacagtttaaattacctgtctcccatggtttataatggcattttgaactcaaaaccgttgaaattacctctactatggtttaaagtggccttgaagttgattttgtgctttttagttacaaaatccaactaagtatttggtgaggtttttaattcaaat

SEQ ID NO: 40434 - DNA, 2564 bp, Zea Mays
gggtggcgtccctcgtggcccaccccacctccttccgagctccgaggagcgatcggcagggcgcgcctctggccgctttgtcgcgacgcgcgttcgctccaatcctgtcgcggccattaaaagccttcccggctttcccgctcagctcgtctcttccagaaacgtacctcgtcatctcttcgccttcgctacgcaattccgatccacgctgcgggccacttgtgacgactggcggaacccgcgagaaacagaggcgggcgagcggcgatcggagatggcgccggagaagccccggaaggaacaggaggaggagttgatgctggaggatggaggcatcgaggagagcccgcgccgcagcttcgaggactgcggcgactccgaggaggaccgcggggagggcgatgacgaggaggagcgggacagcgaccgcgacggcgtcggttcgacgcgctccttcctgccccaaaagtggccgcagagctacagggaaacaactgacacctacacaatcgctgcatcaccgagctttggttacttaggttcttctacaagcaaatactcgctcctcgaccttggtcgcagtattctgggctctgacctgaagtcacctctaatatcggccaaggctgattctgtcagaaacttgccgaaaacccttggttcaatgagagatgggagagtctcgtttcaattgcaacacacgggagaaatctacattagtcaagggtgcaatgtgacgcaaacagtcttcaacgggattaatgtgcttgctggtgttggccttctttccactccgtttacaattcatgaagctggatggactggccttgcagttctagcatgctttgcgattgtttgctgttatactggaattcttctaaaacattgttttgagagcaaagatggtatctcaagttatccagacattggagaggctgcatttggaagaattggccgtgtgttgatatctattattttgtataccgagctatattcatactgtgtggaattcatcattttggagggtgataacctcacatcaatttttcctaaagctggttttgattggcttgggattcatgttgatggaaaacattttttcggagtgttaactgctattttagtcttgccaacagtatggctgcgagatcttcgagtactctcgtacctttcagcgggtggtgtgattgcaactcttctcgtattcctgtccgttggtttagtcggtgttaccgatggtataggcttccattcaactgggaaggcagtaaactggagtggcatgccttttgccattggtatttatggattttgctactccgggcattcggtatttccaaatatctaccagtcaatgtccgatagatctaagttccctaaggcactgttcatatgtttcgcaatttgcacagcaatatatggctcttttgctgtcattggctttctcatgtttggaaagaacactttatcacaaatcactttaaaccttccaaagcattcgtttgcctcagaagttgcactatggaccacggtgatcaaccctttcaccaaatttgccttgttgttaaacccattagctcggagtttagaagagttgcgtcctgaaggttttatgaacgaaacatcatgcgctattatactgaggactgcccttcttgcatcaactgtatgcattgcctttcttctgccgttctttggtcttgtgatgtctctcattggatctcttcttagtatacttgtggcagtcataatgccacccttgtgtttcctgaagatcgcgcagaacaaagcaacttgtgcacaggtaatcgcaagcatttgtatcgtaatgttgggcgtcatcagtgctgccctggggacatactcctccgtgaaaaagattgtagaaaactactaagctcttcgacaataattgcctgcctgcaccagactccacgtatggaactcgaaatgttgaggcatctatatatacggcgacgactactgtacaatcagagtacaccttatgtacagtcaggatcagctagcactatattcttagaacttggtcgagtgcagcgaggatgcatgttcgttggccttttatggtgccaccatggtcgaagccatagcctgagcatgataatggcgccatgcactgttgtcttgtatcatatgcgctgttctatctcaagttctttttgaaggaagcaggcttgatttgtttgtagtgtgacgttctgtgtgtcaatgcaaaagaataatctggtgaaaaacaccgtgtcctagatgtttcatctcttttttttctttgctcaatttgctagtcaattaaccatatcatcgaactgaacatgtattggcttcggattggaacgcatacatacattctcctaatgttgcacgcaggacagaatgttacacagttacaagtagtgcaaatgtcagcacttcgctgagctgattgtatgtacactatcctaatgatgcacgcaagacaaactggcttggctttaggcatgccagggagcaatttccctgcaatgtacatttaagagggcgtcgatcttggcatctccaccgac

SEQ ID NO: 40435 - DNA, 1081 bp, Zea Mays
ggacgccccggccctcccagcggccagcagcagcacgcaccgcgccatcaatccatcgacaagccatctcagctgcccacggctgcactgccactgccacgccatggccctggacgacgcctgcgcctacgactgttgcgcgttacctccaccgctccattgcttggactgggactgggactcggagctgcttcacactcatcgtcacactaccagtgccggaggtgccgccgtccaagcagagccgcccaccttcttcgtcccggcgacgcgtgtgcagccgtcggcggcgtccagtggcggctacctgcacgacgccatcactcactggagcgacgaccgtcgcagcaagcggcagcggatggcggcggcggtggcaacgacgacgacgcctcccgctcggcgtccggcgaccaccgtcagcgaggaccttcagtgccttcttgcgggcttctgggattcaacaagcgaggccgagggaggagcagacttccgccatgatctgaacaccacgaccccggagccggagccggagacgacgacggagatacgctgcagttttgcctcaggggaggacagggagaagagaggcgtcggggtgctgtaccccttcgcggtggtcaagccgctggggctagacgacggccgcatgacgacgctcagcgacgtgaaccacagaatcctcaagagaccggcaaggccggtccggcaccccgtcggcccgttcgcgtgcggccccgccgtgtcggcccacggcctcggcctgtccgggaaggtggtcgtcagcctcaccaagatcaggacgggagggaacggcaccataaccatcatcagaacaagaggctgatggatcatggatgtcatcaaccgtttccgatcccgcttcttttttttttgttcttgtttttaggtcgccatgcctgttgtccagggtaatcatggtacattggctgctacggttgtaaatacaccctccgggttggttttcagtgcaggcttctgccttctctactactagtaattaactagctaaaactcccactacatttgaattgaacgtacatcgtacataatatgctgc

SEQ ID NO: 40436 - DNA, 1958 bp, Zea Mays
caccaccacacagacacaccaataatgggagcgaggagtagtagcacttggacgcagcacctcctgctgctgttcttcctcgtcctcggcgtcgctaccaacagcagccattcttccaccatcaacatcaccaaccgatgctcctacacagtgtggccggccgccacaccagtgggcggcggcatgcagctggagcctgggaagacctgggtgcttcaagtgcctggcaacacgcaaagtggccgcgtgtgggcgcgcacgggctgttcgttcgacggccccggaaagaaatcctgccagacgggtgactgcggcggcgtgctggcatgcactaccagcggccaaccgccgatgacgatggcagagttcaccctgagtgactccaacaacatggacgactacttcgacatcaccgtcgtcgacggctttaacttgcccatggactttctgccggtgccgtcgtccaaggggtcgtcggggtgcagcaggggtccacgctgcgccgccgacatcacgtcgcagtgccccgatgagctcaaggtgccagggggttgccgcagcgcgtgcaacggatcttcctgcgacgccagcacgattaccagatcattttctgtccccccgtcgatcttgtgtcattgtctccacctccaacttcaccattgtctccgcctccaacttcacctactgcaacaaatggaacaagcagcatcacatcctcatcaaaatccaagaggccaagaatatttggttatgttctaggtggttcaataggtggcttcattttgatcgcatccttggtctttttcttcgtcctgcatagacgacgattgcatcgacgccaagagatgcaggaagaggaggaagcagagtttgggaggctaccagggatgcccagacggttcacatttgagcagctacaggaagcaactgatcagttcagagagaagctgggggaaggaggattcggctccgttttcaaaggacgttttggtgagcaagcaattgcggtgaaacgcttggatagagctggtcagggaaagagggaatttctggcggaggtccagaccatcggtagcattcaccatatcaatctggtgagggtaatcggtttctgcgcagagaaaactcacaggctcttggtttatgagtacatgcccaatggatccctggaccagtggatcttttgccggcaggggcagggcgatgacgacgctcctcgcttggacgtgaaaccacagaacatcctcttagatgacaacttcgacgctaagctctctgattttggactctgcaagctcatcgaccgggataagagccaagtggttactagaatgagaggcacgcctggatatctagctccagaatggttgacgtcgcacatcactgaaaaggctgatgtatatagctttggcgtggttgtgatggagatcatcagtggaaggaagaacctggacacttctcggtctgaaaagagctttcaccttattaccttgctagaggagaagttgaggagtgatcgcttggtagatttgattgatatgtgcattactagtgacagtcaggcacaggagcaagaagcaattcagatgatgaagctcgcaatgtggtgtttgcagattgattgcaaacgaaggcccaaaatgtccgaggtcgtaaaagtcttggaaggctctatcagtgtcgaaactgacatagatcataactttgtcgtgacaaatccaccaagctttagcgctcctagaattgtggtcatgtcagctccacctctagcttcagaagtgtcaggcccaaggtgaaattccttgaggcagtttatttgtgtagagaatttagcagtcctctctaaaacaatatgttcagtgattggaattgtggatatcacaccattgtaaattgtctctagtgtacaacagaaattatgttgctcattcttatatagaaaaccaatagcatgtcct

SEQ ID NO: 40437 - DNA, 1497 bp, Zea Mays
tgcctctcttcaatcggggcttcggcgtcagcgtctcagcgaccagaacaatcaccaccgtccgtccgtcccgttcctcttctcgcaggttggacccgtcagtcacacacctccgaagtcggaacctccctgccccaacacaatggcctcctccctcgccgcgcgccgcctcctctcccgcgcagccgccgtgcgccgtttccccgtccccttcgcctccgccccagcccccgcgatggctccccgcagtttctccgccgacgcgggaccgcctccgccgctcccgccaccgccgccgcagcccgtcgtcgagccgcccacgtcggagggcgcgggtgcctcgtcctcctccaccaccgctggtgccggaggggcccacaggtcgtcgccgggagccgcggcgggggcgcggcgccagggtggtgcgggctacgaggaggagcaggagaaggtcctccgcgcgtcgctgctccacgtgccgcgcatggggtggagcgagtcggccatggtcgcgggggcgagggacgttggcgtgtcccctgccatcgtgggcgcatttccaaggaaggaggccgcccttgtggagtttttcatggatgactgcctccaacaactgatggatcgaattgatgctggagaaggagagcagttgaagaacttgatactgagtgagagactctcaaaacttgttcggatgaggctggaaatgcaggcaccttatatatctaagtggcctcaagcactgagtattcagtctcaaccagcaaacgtctcaacaagcttgaagcagcgagctatcctggtggatgagatatggcatgctgctggagattctgggtcagatattgattggtatgtgaaacgtacagtgcttggtggtatctactcaacctcagaggtgtatatgttgacagacaattctccagcaaggattgaaacgaaagtgtttcactgtttcggagttccgtgatacttggacgtttgtgaaccgcagaataaaggatgctcttgatcttcagaaaaccttccaagaggccgcatacctcgctgaagccgtgggagcaggcatgagcggtaccgtgcagggtgttctcaacagggtcttccagaaccgtagtggatgaactttctttttctcaaacacgtagtgtggatggactaattccgtcttttgcacgctgcacaggataaagcacattttcccgttgaccaactggcgtatgtttataataaagcaaatggtgatgtggttgagatgcatcacgttagggtaggaagtgacgatgtgtatgctggtggtggtgttgaggtgcagatttttcaaatgaatgctttcgtcgcggagtccagtccacacgcatgcgtgcaaagacgtggggcttattataatttgatgccagctgcatgcattacttgcccgggatgccgcgtgatctaagtttagtttgcttgacttgctaaagaaaccaatgaacacgccaagatatcataccaaga

SEQ ID NO: 40438 - DNA, 2604 bp, Zea Mays
cgcgcccggccgtaaaaaaaccggggtcagcgcgtggactcggccgctgggaggatgtatcgcaaattcgcaatcgaatcggcggccacccggcaccctgcctgcctgtcgagtgtcgacactgtcgtgtccggttggcgccccagcgaaaagcaaaagaaataccggaagaaactgcctcgtgcctcctcctctcctcgcttctccctgtagagaacaggccgaggcgggcgagtgctccagtacacctcgagctacataccccagctcgcacggtccagctctgagctccctcctctccacctccacgcccgatcgtgaatcgtcacttgctctgcaacggcgagagcgccatctttgctgctacccattaactcaggcgggcattccgtcgagcaccttccgttcggcgccgggtggcgtggggagcgagtcctgccgggttgcgtggtccgttgcgtgaacgggcgacagttgctgctttcccgggggcgctccttgatgccgctgttgtggcaggcgctgggttctagcggatggaatgcaacagctcctacgcgctgaagtcaagaaggttcgttgccgtagctgatgcgggatttgaggatgctgtagacggcgccagcgattttggagatacgatgagtctcgcacacaagcagaaggttgtcggggaaaccgtggagacggaggaggagcaggaatttgtttggaaatctagcctgctctcctacaaggatgatggtgattccgttcttccagcacgcatcaacatcaggagagacacctctgcctggcaaaatgaacccgaggattgacaggtctggaagcaatgaaacaagcaaggtccctagactgggttccattgttgggacagccagcatggctggatttggcaaggcagtggagattctagacacattaggctgcttgatgacgaccttgagctcagatggtggctttgtttccaggaccaagaccaaagggtgcaaaatatcaattcttgcttttgaggttgccaacacaatacttaaaggtgctagtattatgcaatcactctcagaagacactgtcacatacttcaaacaagttgtgcttccttccgaaggtgtacagaatttggtgtccagtgagatgagtgaattgatgcgaattgcagctaacgacaaaagagaggagctgaaaatattttctcaagagattgttaggttcgggaaccgctgtaaagatccccagtggcataacctggatcgctactttgtgaagttagaatcagaaaatgcgccccagaagcagttgaaagaaacgtcaatagcagagatgcaaaagttaatgagtcttgttcaacgatttgtatcatgagctgcatgcattagacagatttgagcaagagtacttctctaggataaacggaaagggtcacacagatagaattgaaaaaggaggcaatattcaaattgtgaaactggagttgaagacccaaagtagttatgtaaagagcttgaagaaaagatctctttggtccaagacgttggaagaagtagttgagaagtttgtagacattatgcactacttacatgttgagatcaacaatgatttcggatcttctgatggaggtgtgatgaatgccgaatcaactgagagctgtcaaaggctaggacctgctggacttgcattacattatgcaaacattatcattcagatatacagtattgtttctcgatcagggtatgtgccatcaaattcaagagatgcactgtaccagggattgccaccaaggatcaagtcagcactaccaaataaattgagaacgacctcggtgcctcaggagctcactattgatcaaataagggctaggatggagaaaactctgaaatggcttattcccatggccgtcaataccacctgcgctcgaggtttcttgaggtttagcgaatgggcgaaatcagggactgagagggttggtaggcgaccgggtgtagcagatcggattgagacgctataccatgctgacaaggcaaggactgaggactgcattctagagttgctcgtctggctccatcacctcgtcagccagagtaaccggttggcaatgcaaaaagtcactgaccaatgtatctaaccaaaagtcaggaattgtcatatgggccatcacatgctagcatcgcacggcgacttctatccagaaaaaaagaggctgggtttgtcgagtggtccaaggtatccaaaattatatggaaaagaggggacatcaaaattttctgatccagcttgctggttgttttcgtctttgttattaggttgtagatggaatctagagttgttcttgccatggaggtcgtgtgtttttcttctttccatggaggacgtgcggtttttcttgtccggatacagtcgggcatgcagcatgcttatatgtgctccgtacattagctgagtaggtgtagtataagaagagccctttttttttcttctctttgatctgcttgttatttgtaagtgtagttgtgacaatcacattatacaaagaaaacgcacgtcatgtcagtgcagtgaaaaacaaacaaacatgaatctcttttcatatacatatatctgccgtcg

SEQ ID NO: 40439 - DNA, 1599 bp, Zea Mays
cctccctcgctttccggtgctgagcgtgcatcggcagagctgactgtgactggtgaactgaaggaaaggggaggagaaggggagggaagctttgggcgggagaggaagcctagcagcaacagtaggcagtagcagggttgaccggaggggcagtggagtctggagagtaacccaacaaccccctcctcccctccccttctgtcttattgccacctctccacgtctccaccaaacaaggcaacaagggagaagtagatctgcatctgcgagaggaggcagcgggggtggtgatgatggagagccagccgctgcaggccccgacggccacggctccggcccccggatctgcggagccagccggagctccgccggccgtcacccccggcaaggagttcacgcgcacctgcaagggcctcgtcgtcgtgctcatcggaggatacgtgctgctccagctcctcccttcgtcactcaactacctcgccatcatcccctccaagacaatcccctatgtatggaccgtctttaccgctggttacatcgagcaagtcctcccaggggccattggcagttctcttggtcttctcttttgtggaaaggacattgaaccagcatggggccgcaaggaattcttgaagttcattattttgatcaactccatctgtggcattcttgcattttgctttgctattggactctactacgtcactggaaaggagagcttccttgtcacaccactttctggtttccacggttgccttgctggctttcttgtggccctgaagcaactcttaccaaaccttgagcttcctatgtgctttttctggaaaataaaggcaaagtggatgccattctttgttgtatgtttctcaagtatcatggccttcatcgtgcctgattccattaacttcctgccaactttggtgtccgggatgtacgttagctggctttacctgagatacttccaaaggaacccactgactggacttaagggtgatcccagtgatgacttttccttccccagtttattcccagctgccatgagggagcgtggcgagagggttcttgaggaaaggttggcggctgacaatgctggtgacacagaggcctcgcctcgtggccatggcaccgcggaagactgagaactttcttgtgaccatcagctcctcttataggagccatggctttgctccctccagcgtttatagctctgcacttttgtcttctggagatggagctattcagttcacagcgaacgaataatacgatgttcttagtttctctttttttccgcttctttgtctgcgaggatttattggttaaattgtgtactagtcaattgttatggtacagcgaaaaagagagaagagggtgatggcatttgcagcgaggtgttgagattccgttgtagccatgcatttgcagccgattgtttggtactggtcaaagttctgtagtagtcatatactctgcttaaaatatagaaagaagaatggcttcgtcagtatcagatgttgagatatatatttcttttcttttagtgacgtgatttaagccgacaaccggtttcacataagataagaaatcgatgccttgaattta

SEQ ID NO: 40440 - DNA, 523 bp, Zea Mays
tttcatctgtggaaccttttttgcaataaaaggattagtagctactggaagaacgtatgatactagttcttccataaggcaagcatgcaactttttgttgtcaaaacaacaagctacaggtggatggggggaaagctacctttctagtgaaatagggaattatattaatggaaatacccatgtagtgaacactgcttgggcgatgctgtcgttgatatatgctggacaggttgagcgagatcccataccactgtaccaagcggcaagagaattaattaacatgcaactagacacaggagactttccccaacaggaacatgttggatgctttaactctaacttttacctcaattatcctaactaccgcaacttataccccatttgggctcttggagaatttcgccagcggcttggtgcaaacaaaaaatgataccagacaatgttcataattattgtattgctaatgacattgagggtatagatataagtatggttccttgcaagaacatatatattgttttcc

SEQ ID NO: 40441 - DNA, 793 bp, Zea Mays
ctcaaaaaaatatagttttcaaactagctctaaaagacgcaaaaaaataccggcaaagacaagaacaagttcaagggacaaaaaaagacaaattacacaaactgctctaaccataacacaatggaaggaaaatgcctcttcgcgcgaagtataaccaagccgaagcctctttagtacgttcactcgttatataaaattttggaggaaaaaatggaattttgtttctaggatttttcggacataaggctaccgcaccacgttacctgacaatttggttgacgaatactgaagcccgctgctgctgggcaacgattggccattcgtgggcgtttgctgatggcagcggatgggccgccataattcatcagacatggccgcatgggagcgctcaggtcatcagggtgacaaagtcgcaataaggacactcctaaaactacaaggctacaacttgcttgatgccgtgctttccagattgctcatcttcctccttgtcgcggtagctagcgttgccttctctctcatctgtctatctcagcaactgcgaacttcacctctcctttgtatcattagtaagaagcagcagcagtgtacaaccatcccctaaacgaaaaagaacaaactgtgggtttctaaatcgcaagcggtgctgggaaatctcggcgctacgtacaacaacaacaagaagaagaaacagcacagcacaaagtgcagatcttttttccccctaggagtctaggacaaacattggaccactgctagatcatgggcagtttactgataaagtacgcatacg

SEQ ID NO: 40442 - DNA, 361 bp, Zea Mays
taaatcctggctcgagcttgtcgtcgaacatctgacgagtgtcgtgcgacttcactttcttctccataccttccggtgatttctcttaaaccagcgacgatcaacgaggtttgcaaagacgacaagagggcgaaaaccatctatcacaacaactctctaccccgcaaatagcataaaaacagccatatgaagcagtgttaagatcttccgccctcatgacccagatggggctgaccacgaggaggcgaaacacgacgagacgcgtatcggaagagttactgagattaaagatgccgacatgcgccatggcgaggaagagatggaagatgagcacatgaagggaaacaacgatgttgtcgca

SEQ ID NO: 40443 - DNA, 1405 bp, Zea Mays
ggggaataaaggggtaggggattgagccacgattcaagtcagatctggagaggggcttccgtcctgttctcgtcgcacctctttacctccgccgccgccgctattgtcccattccaatctagaacccatagtcttcttcgtgattgtgcggttctttggtgagagcatgagctcgtctacttccggaacacgagagatgttatctccaaattctacagcaacatctattggccaagttcaaaaggtgcctggttttgccaagcttcagggtgaaaactttgtgtacttcatgcaaacttattcaatcatgttgggacgcactagcagaagttatactgcagactttgatctctctaaatatgaatgtgggagccaatgtgtttcccgatgccatgcatgtatattctacgactttgaactccgccattttgccattgaagtccttggaagaaatggatgcaccattcgaggggtctcttatctcccaggtagtgtccctattaaattgaattctcaggacctcattgagattgctggcataaaattctactttcttctaccatctcgctccatttttgccactcttgctgctcgagatgctactatgttgcctccacaatctccatccttgttgcaccctaattaccctgggaatccaagtgctaatgattgtggtcgtagcaatggtgagaatggggttaaaatcagcaatgacatgcaagggaagttggtgaaacaaaagagaagtttttctggagaattggatatatcttacagttatggcaccaaaaaaaatgttgatcgagttggaacacttgatggatgtgataaggatacagacaatcaacagatcctactagaagaagagaaggatgtaaccacttgtcttacaaccctgatatctgagttatcaggtcctaaagaatgggtgcctatggaaagactcctttcagagggtaagcaagtacttaccacaaaagggcatgtctggctcttcaactaaagttgatcataggccatggtgtagcttgtgggagctactcaggaagcacccagagcattttgtcatgaccacattgacaagaggagaagaaacatcagattatgttggcttggtacacctggtatctgtggaaaatgaaccatgaatcctagacccattattgccattcgaaggacttccgtaccattatgggctagttatgtttgaaataaactaggacatattattgttatcatataaaatttgaagcccattttgtagtatggctatcatgttctattgtaaaactatgcagctttgatgtggtacctttagttttgatctatgcatttcaatgtcggagtttggaaacatttattttgaaagagtttgatttattgggaaaatattattgtgtgttcc

SEQ ID NO: 40444 - DNA, 1179 bp, Zea Mays
ctagtgctggacgggctggtggagaggttgaacaaagaaggaaagaggctctatctaggacatctgaagatgccttatctgcatcggaaaacacacttcatgacatagtttctcgatacagttacatggatctttggccatgctcatcaaaagaattggattatctagcgagacaagagtggcttgcgaaaaacattgttaagaaggttgagaaaccagctatgttaaatagcggtagcatgctagacaaaggtgctgcaggatttagtgcgagtgcgaggttattaccacaatctgccaaagttgttcgtcctgagacttctcaaatggttatttatgatccaagacagatgaaaggcccagagtttgcagcaactagcagtgggtacacgaaggaggttgaagccacgctcaaagtgctatcgccgtcgatggtgtcctttattaagaatttgcctgctattgaaggaccatcgccggatatcgatgtggtgctcagcgtgctgctgcagagcacattgccagttgcacagagtgctgggaaagcaggtggcgtgagtgagctctcaggcgttggaaaaacgggactgaaccagaatggatctgtccatagacctccaagggagagaaggaaggacgtggagaggcaaggggcgcaggaggaagaggatgcgtcggcggtgcagagcagggcagctgtgccacgagacatcttcaggcttcggcagattcagaggagccgtggcctgggtgtgggtggtgccgccgtttcgcagtctgggtcctcggcattttctttctcgggcggtggaagcgccttctctggggaccactcagctagcacagattagcctactcaccagacatgttcaacagctcagctcaaagctcaactgcgagtagtgagctcaaaggctacctccagcagatttatatcacattccttttctcatcccctatttcaaacatcactttgcaaacaatatcatctatagtttcatgtcccctattttacactacatgctggagacagtctaaggacataatgacatactagtagggtgcccgtgcgttgctacggcaacttaaaaattgatacaaaacaataacgcaatataattacaatctttgattgatgattttgtagctaacaaacaacgccaccatcagaaaggacac

SEQ ID NO: 40445 - DNA, 343 bp, Zea Mays
cctggttcaggaaagcaaaccgaatgcgaactatgtacgtgccaggatcagaaaatcacgtacaccgcgattacatagttggacatcatcacacattgttcaaaataatagcagaaataatactttattacatcaagatgtccaggacatccacagagtcattaacttaacatagtcattaacgtaatcaaagtgcggatacgacacgtagaagataaggccttcacaagcagctgactatgggtttgccactaaacacgactagaactcatcatagtcctgaaactcctgaaagtcctccatgttgccttcatctcctcctgagcactgattgcaatgggga

SEQ ID NO: 40446 - DNA, 1985 bp, Zea Mays
ccacagccgtggcctcactcgcactactcgccctgctcgtcgtctccccagtccccaccagttgccttcgcatcgccggacgccgctcgccctccgcttctgcgactacgtccgagatggccgcctcggcattggcctcccgcgcgctgcggcctccgcacggccgccaccctcccgccccttcgccgcgtccgcgtccgcgctcggcaaccgccgccgctccaaggacgcgctgccgcgcggtggctgcggacgagcgccccgccgaccccgcgttccccgagcgccagaaccgcgggatttccgggcttcgcctcctcatcgcgtcgcagttgtcgaccagggcggtggagaggccggaggcggacgtggttgtgataggcagcgggctcggcgggctgtgctgcgccggcctcctggcgaggtacggccaggacgtgctggtgctcgagagccatgaccgcccgggaggcgccgcgcactcgttcgatatcaagggattcaacttcgattcagggccatccttgttctccggattccagtccagaggcccccaggcaaatccacttgctcaggtccttgatgcattaggcgaatcagtcccttgtgcgtcttatgactcttggatggtttatgtacctgaaggacaattcctctcacggataggaccaactgaattcctcaaggaccttgagatgtttgttggtgttgacgctgtccaggagtggaaaaaacttcttgatgcagttattcctatgtctgcagctgcaatggctttgcctccgctttccattcgaggtgatctgggcattatatctacagctgttggtagatacactccttcgttgttgaaatcattcatacaaatgggaccgcaaggagctctgggcgctacgaaacttctacgtccattcaaagaaattgttgattcgctggagctgaaaaatccatttgttcgtaactggatcgatcttctgtgctttctacttgctggagttaaatctgatggtgctctttctgcagaaatggtttatatgtttgcagaatggtacaaaccaggatgcttgcttgagtaccctctgggtggaactggagcaataatagatgcccttgtgagcggtattgaaaaatttggtggcagacttgctcttcgttctcatgttgaaaagatcttaatagagaatggtcgagcagttggtgtcaagctacaaagtggacaagttatccgtgcaaagaaagcggttgttagcaatgcatctatgtgggacactttggatctgttaccacccgatgctgtcccaaaatcatatgaagatagagtgaaagcaactccacaatgtgaatcgtttatgcatctccaccttggttttgatgcagagaatgctagagaggaccttgggatccatcacattgtggttgatgattggaacaaaggagttgatggtgaacaaaatgttgttttgatatccgttcccagtgttcttagcaaggacctggcaccgcccggaaagcacattcttcatgcatatactccagggacagaacctttcagtttgtgggagggactggacaggaaaagtgcagaatatcgaagactgaaggaagaacgttctgaggtgatgtggaaagctgtggagcttgctctcggcccaaaatttagccgcgaaaaatgcgacgtgaaattggtcgggacaccgctaacgcacaggagatttctccgaaggaacaggggaacctatggtccagccataaaagccggagaagccactttccctgggcaagcaacaccgatcccccagctcttttgctgcggtgactcgacctttccagggatcggagtgccggcagttgcggccagcggcgcgattgtggcgaacacgctggttccggtgtcgcagcattcagagctccttgacgctgttggaatctgagtggcagatacgtccgtcggtcctggctgattagctgatacccctgcatacaca

SEQ ID NO: 40447 - DNA, 2353 bp, Zea Mays
acgtgtcttctccgtcctgcgaactggcctctgccatccccgttgccaaaacaactcttccttcgttcagtgtcgaactatcgatgcggccgacccgcgcggcgtcgcgtgggggatgggcgttatacgagctgtacaggacaacgagccgcgtggcggcgccggcagtgctattgtggcggcgactgcaagggctggagcacccgacgcggtggccggagcggctaggacggccgtccgcggcgcggcctcggccgggctctccgctcgtgtggtttcatgccgtatcccttggcgagggaatggccgcgcttcccattgttcgccactgcgtccgcctccgtcccggcctccccgtgcttttcaccaccaccaccctctcctcgtccgaagttatcatggatctactccctgatggtgtcatatatcagtttgctcctcttgactgtcctactgcaatagatagttttattggatactggaagccaagtttggtacttcttctggaaagtgaactctggccaaacctcatcatgtctgcagcagcaaaagggattgcagtggctcttttaaatgcacgcatatcattgaaatccttcaaccactggtcgatgcctctaatgttcccattagtttctttgatgctctctaaactatcacttgttgtcccattgagtactattcaagctgttcgttttcagctgctacatacaccaccaggaatcatacattttgctggagatttaaaatatggtatactcaagttttgtctagtctttcctgagaatagattttaagtgatcatatgagtgatttagttttaaagattgtcttgggagcttgaaagataaccaggtttacaaatcaaatgatttattagatgattcatgtaattcacatagctgttggagatgttaataccggggagaatcaggtcaaggaaataaaagatttgcaacggcagtttagcaataggcccctctggatggctgcttctattcacagaggtgaagaagaagtcatcctccgcattcatgaagagttggtcaacgtgtatcccgttctactactaattcttgtgccaagacatcctgaagactgtaagaatatttccttggcactaaagaaacagaaggtcaattttgtgctgaggtcaactagggaagtggtctcttcaatcactagggtatatatggttgatactttaggggaattaagaatgctttacagggtcaccccaattgcagttgttggtggttcatttctacctggcttagccggccataatttttctgaggctgctgccgctggttgtgctgttatgactggaccccacgttggacacttctaccatatgctggtcgaaatgtggcaaataaatcctttagctgtcaagcagagtgttcttttattcattcaggtgtcaggagaatttgaactgctgcaaacactaaaagaactgcttggtgatgccagcactctgggagcacgtcaaagagctgcaaaagatgcattttcgattatgtcagatggagttgtgaaccgtgtatgggatttagtctgcaggctgggcattgattcccaaacaaatacgttgagcagttgacttagctgaggcttattcttgtaatctctgtggagtggaaatgcacagggagactgaaaccaaaaaccggcgattgtggcatgctggcgacctggtgagtggtgagtggtgacaaaggactaagctcacatgatagaacatatatccacgtcatttgctcgacttgctcctgtcggaaatttagatatattccataaaaatcctttgagatgtctgtcatcttttcatttccttgtagcatggatatgatatattttgtcattccttagtgccagccagcagatgatgttttgcagtgccttttcctttgttaaattggcacattcaaggctccaggaatttcaagggccatgccaattttagggttagatgtgaactgttaaatgcatatgacatgctttttcaggcgtgatatgtgtgattgatgttcttttctatcttggcaaagtacagttttggggataggaaagcgggaatgggaaatggacacaatttcctcgaatgtatgccataggttggactgcaatttgcaaattgacctgaggtaaccaggtaccttttatttcttccacacctcgttcaacagtgcacacgtggtagagaagtaacctctttattccaaaagaaatgcatttgattacgagtcaattaagacatgtttggttcactacctaagttgccacattttgcctaacttttctgtctaatgttagttattcaattcgaacgaccaaccttaggtaaagt

SEQ ID NO: 40448 - DNA, 1693 bp, Zea Mays
aattcccgaatctcacacccaaaagtttcccactgccctggtcccccattcaattcttccaactccgccgcttcgcctcgttccgtccgccgcccccatggcgtccgccgccgccacgaccacctccgcccccgcccagaacctcaatccccttagtatcaacatcaagctccccccatggctcagcgggctgcgctgccccttcaccttcgtctgcccgcccccgcccccgcctccgccgccgccgccgcctcctcccccgctgccacctacggaacccgtggtcccacggtcgcggaggttaccaagcctgcgggtgaccacggagtacgatagcgaagagggcgtgtttgtgaacaaggtgtcgtgcaagcttgcgggggacctcgccaaactgcggctctccttccagagcgacccgcaggggcagtggcaagggggcggggaggaaggggacccgctacagcagctcttcgccgcgccgttggtggggctcatcaccaagcgtttctccgtgctctacgacgtcgaggcacgcaacgcgctgctccgcggagactgctcgcttcccggaggcgccgtccagctccgtgcctcgcatgatgtcaaggcacaacaaggagaagtttcggtgatcactagtttgggtgatccattgtataaaatggagttatcatctttggtgccttacagtggtttgccaagggcaacattccactttcctattggtcaagtttcagtggaagagaagagaaatgaagatgatgagaaggtgctgtctgtatatgggattggaaaatctgatttcttggacggtgttcttactgctcagtacaatgaaaatgatcttaatctaagatattgttataaggacaaggaattaactttagttccaagtgtctcgttgccttccaatgcagtatccatagacttcaaaaggcgttttggtcctgatgataagttgagcttcttggaatcacaaaaggagatggagacttctaccgttacatcttcgacactgatgaatggaatgctgtttataaacataaagtgggtaaaaatttcaaagtgaaagctggttatgattctgaggtgcgagtcggatgggcttctctttgggttggagaagaagggggcaaggcgaagactgcgccaatgaaaacaaaacttcagcttatgcttcaagtaccccaggataatcccagaaatccttattttctcttcaatgtgaagaaacgatgggatctgtaaataggtgtaagttatccattatgtggactccaaaggcttcggccaaccttttgttgcaatcttcgtaggtcaacagcaacacaatccatgagctctttctatttatcatatattttcaactactgtacgtagttagtacacagcgccccaagtaatccaaaatttatgtaaactctaaccctaaaccctaagtacttgttcgttttgttctcaatccatgtagattgagtgggattaagtgagtttcaattctaatcaagtcaaaatcttttatatttttttttcaatctcatctaatccacatgggataggaataaccgaacaaggtataaagtgggaaatttggtagtctcggcataccctaaatcttaaagttgtaataccatcaaagtcgtaatagcatctccaacttgagccctaaacgtagttatattttgaaata

SEQ ID NO: 40449 - DNA, 2479 bp, Zea Mays
atcctctctccgtcttctttcatcgagacaaaatatctaccggggatgtggtggtggatgctcgggcattcgtcaaaccactcatcatcccatcccatcccatccaagggaatccgatcaatcccggactcgtcctcccggccaaccctagcttcccttctcttcccctcccccgatggacccgccgccaaccagggacagaggggaggagctggagcctgaaacccgcgccttccccgacgccgacgacccggagacctcccgatctgaacgcgaagagggtatccctccaccgccaccgccaccgcctctgcgccagcagctcatgggggcttgccgcgccgacgagcgcctcaggccgctcctcaccctcaacgtctcctgcggcgcagcggacgaccgactcatcgcacacctcgcgcagcacttcgaggtgtcggaggtgggcatgctcgcgcgttgcctctgtgttcccctcgtttccctgcgcgttggcaaggttcagagggaaggggccctcctctgcccaacacacattagatgctgttggaatgatgaagaagtgatcctgtagctttctctatgtctctgcttccaggaaaaaaaggtaatttgggcgtttgtcataatctctgatatatgaggaaagagaagagggaagctgaaccttgttcttctgccatcatctagcatgcggcttacctttgtttgtgatgatggttatccagagcaactagctctcttgagcaatggctttgaattttctgaagttatgattgaagaaatatcagctgataattctggacgctctttcctaatcagaatttcagaatctaaagtgttttactactggtgtgctgagaagtcgaaggaacatggaatggaacttcttgcaaagatgaaaaaccttttggacgggaggccaacactctctgatctcactggcatctctaattcacgacttgatgcttttgccactcatttacatgcttatcttcttgcatcaagtatcggtgatgttacatcattgggctcacttaatgacttcctgagtacttcaagatcacatgatcaatatttacagctccagtcagatttttccaaaacttccaggttccgtgcctcggctgctagtgcaattaagccaagctctgtctatcaagccagcctaagtccgagatctggcacttttaaagatggggtaccaagggcttcatgtgcaagggttgttgggagggacaagctgaagcgtcgtgtggaatggttaggcccgttaactgctccgcttgatacgaatcctttgacaatcaaccctgattctgccagtgagaagtgtgatgcagattgttcaaagaacaatgttagctcagttccgttggacctgcctctttcgtttcccctgttgccttctatttactcccttggcactcgtccggttcctgaggtttctttggagaaacagtttaagccttactattgctggtgcccaccatgcccatcatcgctgcaatacactgtcacccatttgcatctgccagctacacctgtagatccgttgcccctaccacctttgagttcactgctagcaagtgagcagccaccttcttcaacagtttctgtaaagctggatacaactgatctcccttcccttaatcttccgtccatactgcattcaccacttattcccctacatggtccacaagtgccaacattcacaccattgatgtccgatcccattgtgcatgtcccagtcattgatgtttgttcggcgggtcaggcctatctagtgagttgtgggccgtctataacttcagcagttcccctgctcccgagcttgaagcctctgctgccagaagcagagtcgttagtcgagagaagcgcaagggaaacactgatgaggctcatagcttcgacaccacctgcaagcaatcctctacctggaagtatatcctgggcgaataacaatgtgaagaagcatgttgatgtgtgtcccaatgaaaaagcatccggtacgtcttgtgttgctgctgtgtttggaagtgggattgcacacgctgaggatgaagttccaagcggaggtgattcacaagagccgtttgccgaatacgatggtaccagcaatgaatgtgatgtacatcattggcagaaattctagcttggctgcatcagcatggtaaatagggttttgaggattcgggggtttgatgtcctgtacgcagcagcagccttaaaagtttctgtgcccagccagcatctctatttggtttgcaaatgtaattactagtttgtactgtcttgtttttggcaaacttgctgcgagcctcgtgcttagtttggtttatttatttatgaactttaggcctgttcgaagcacccagtttgtaagaaaatggattatataaactgaagtgattccaaatatatcagtttatgtctcagtttataaaaattggattaccagtttctaaaaaaccaagaa

SEQ ID NO: 40450 - DNA, 3234 bp, Zea Mays
ctgtatctatgatttgtgggtctgagtttaaaatagagaagttcacaactgagagtgacaaaatagcaaattttcctttaaaatgaccgcgcgttttttttaaaaaatgaccgcgcagtagctttggctgaaaaagaaaagaaaaataatcttccttcttccacgatagtcgatacggagcacccataacgttacttttattttgcagttcagcggttcagccccctcaagtcgaggtcgaggtactccgcctccgcaatgccgcccccttccgcctccgcctccccctccgcctcccgcttcgcgaagcactggatagctgacgtcctcgccggcgaagaatccgtcgacttctccctgctcaaggttctggtgggggcctcgtcgaagcccctcgcgggcgccccggaggccacgcgtgagcgggtcgcgctccggtccattcaggaggtgttgtccgtgatagccgctgggggtgatgccgcggccacggcgggggtgcttagtgttgatggcgcccggtcatgcgaggatgggctgtttcggcttatcagagaggttggaagtttcggagaattggagaaggatttgcttccacctttcagtcaagacatccaggaaaatatatgtaccaagaagtttacattaccaggaatttctttccagttgctagaaagagttgagccatggatagcatctatggccccacaaccccaaatggaacacaatggcactgaacaatgtgtcaatgatcagtcactgcgcagcagccacggatgtgtaaatatagagaagcctgtgttccatacagacaatgctggggttcagcaagagaccatggcagatgtagtcaatgaaagtgaaacaggaaatctccaaaaggatccacctgcaccaacttttatttttcaccaaccgtgtatgcctgaaagcaggtcttacgtccctccgcaagaagatactatagatgctgttggtctaggcgctaggtcctcagaaaggagtcctattgtggaggggaacatgtccgttggatctgtgcttgcttcagatggctgtgatgtacctttgcagggaagcattactgagccctttttccagcaggataaacatgaccatactgttatagttggaccaaaatcttgtaagcgaaaatctccaattccatcttactgtgctcatggagatggggcagatggtggtggctccagcaatcagtcatctaaggtttccattcgtgaaggacctagcactcatgccacagtaacttcaggttttgacagaatcagcgatgtcttaccaacagatgcacctgaatctgagcatttgcctgagtgcataactgcacaggatacaaccatttcacagcctgacagcaggaaagctcatttgagtgctctgcaacaggaaaggggtgagaaagtaacccaagatctggaagatatctctgcaaatattgggtcagtggaaaaggaccatattcatggggatctgactttgccatctgccagtgttttactttctataagctgcaatggtgctaatcaaggaagtaaatatgaaaccaaccttcaaccagggactgctacagaggatatgatggctttcgaagagcagaatgcagacaagtctcacttagaagtcagtggtatcaacaaggctaatcaagctctgcatgatgatggcggcgtcatgaaaaataatacagtacatggtgggttgattgtgcagactgctccagtgtctcaaaattgcaatgtaaccttacatgataaaacttcagagcaggaaaatgaaaagaacattcaaaaagataattgccatacttatgttccaggctcttctcaggataggggtggagaaagtgcaaagaaaacaacaaatgaactaaagtctggggacatttcttcaaaaatatgtgttcatttcaatgttcaagacatcaatgatactctggaggacttgtctcaacaaggtttgtgcataaaatgtggtgaaggtggtcagttgttggaatgcaatggctgttttttagccgcccatagcagctgttttggttcatcggcgacatttgaaggaaccaattttttctactgcccggtatgcttgtataagaaagccactgaagcatataaaaaggcaaagaaaacatattgtgaaactaggaagaaccttgttgctttccttggcacagcacaagccaccaatcaacctgacaaacaactaaatggagctcagccaggagctgccaacagagatgaagagcctcatgatgagcaacattctaaagggtgtggcgcatcaaaaggggcccatgaaaatgaagtatacaatcttgctcatcaggatgaagagcatcatcagcagaggaagaagcagaaaataaatgctatagtgctccagaataacaataaaacaccagttaaggatccagagaaaaagcagcaagcggtcaacgaagaagctcgcaaagaaggtggtaatgacaactcatctcatgaaacaggagcttcatctccgagaagatgtgatcctccttcgaatcaggacgttgaggctgaccaggacgatagccttacaacttctaatcaatctggtggttctgatgaaatagaagctacatcttctaatgactctgccaagcaatcatcacccccttggcgtggtatgggacacaacaaaaaaggattgcacgaaaaggagccagctgtatcaagtaaatctggaaaagtaaaaaaggttaatcgatacagctttgctagatttactaaacatgactgaggtcctattttaggattgaatgatatctgactgtgttggtctacatatgcaaataataaagctctaaatggatattactggggtggcattcacatgtaggcatgtagctttcttttgttcttgctcaaacagtttccattattttgttggctcagtatcatggatgacatgaggcgatcagttttgacactattcgaacttgtaaggtcttaggccttttgagaaaacagagaacattaactatgccatgattcatgacaatgatttaatggaaatccggtgtctttttaaggtcttaggccttttgtcatgcattgtttttcaaattcagatgagatattttcagtttttcacatacacatggttatatctatgatatactccctccgtcccaaaatataattcgttttagctcttggtttttatgtttatattcaagtggatgaagatgaa

SEQ ID NO: 40451 - DNA, 1493 bp, Zea Mays
cacagtactctagtgaaagataagttcgcttgcatctcctgacagcagtgatgaaatgtttctttaaaagacccccagagacacagaaggcactaggggatacattagcagctggtctatctgacacccatcaggatgttcatgacagagcacttttttactacaggcttttgcaatacagtcctaatgtagcagaacgtgtagtaaaccctcccaagcaagctgtctctgtatttgcagacacacagagcagtgaaatcaaagatcggatattcgatgagttcaacagtctatcagttgtatatcagaagccatcgtacatgtttacagataaggagcatcgcggaccatttgagtactcagaggatcttacaggcttgactgaggatccagaaaatgtaatttctgcccaaagatatcaagaaaatgataatgatcttttgctaagtacttcagataaagaggacaatggtacaagagccagcaatggttcttccacctctacatacaatgctccttccgatttgattagtccttcattgataagctcgcaagcaccagctgaaacttcactagtaaatactggtgggacatattcctcacaatcaaacttcagtctcgatgaccttcttggccttagcgttactgaagctcctgctttaccacaaccaacactggcccttaactcaaagcctgtgctagatcctggtacgttccagaggaaatggggccagctagcattggcactgtctcaggaatgttctttgagtccacaaggggcagtagctttgatgaatccccaatcactcatccgtcatatgcaaagcaatcacatccaatgtattgcttcaggcggtcagcctccgaactacaagttctttttctatgctcaaaaagatggggctgctgctttcttccttgttgaatgtattgtcaacacagcatcagcgaaggcacagctcaaaatcaaggctgatgatggaactgctgctgaggcattctcgagtttgtttcagtcagccttgtccaaatttgggctttcttgatcctgagtaatttgtctgagcgattcaccggtccacagttttttatgggtttcacagtttgccccaactccactgtcttggcttgtccagtacttgtgatcatattattggagaatcagagtagaaggtgcaaaagggtactggagttttgcggagctaaaaatcctatttgtactatttgggtgaactgtgcatttgtacatgactacatgtcacccagataaatagctgggttatttaggactgtactgtttgatgttctgggttatttaggattgtgatagtttgatgccttgatctcttctgaagggtttcgtttccttgaaggatgtagaaacaacacgcaacaacccctttcatgtatgctatttaccatttcttgcacagatgatcaataagatgtttcgtcttccattttgattcgtattatttagtactattttgaca

SEQ ID NO: 40452 - DNA, 2341 bp, Zea Mays
ccatttccatcgagtaatgaatgggggcctcatctgatatgggcctctcttgacggtcgccttcgcctgctctgggacatatccatacctcaacatcgatgccggaaccatgtctccgctcgagcatggcgaagtgtttgttttggacgacggcggtgaggtggacttggaccttggaaactacgaacgatttctggacatcaagctgactcgtgacaacaacataaccacggggaagatctaccagtctgttattgacaaggaacgtagaggggattacctaggaaaaactgttcaggttgtgccgcacatcacagatgaaatacaagagtggattgaacgtgtggcaatgaatccagttgatggcacagaagagccagctgatgtttgtgtcatagaacttggtggcactataggggacattgaatcaatgcctttcattgaagcattaggtcaattttcataccgtgtagggcctggaaacttctgcttggtgcatgtcagtcttgtaccagttttaaatgtggttggtgagcagaaaacaaagcccacccaacatagtgttcgcggacttagaggacttggactcatgcctgatattttggcatgccgtagtacacagccacttgaagaacatgtgaaagtgaagctcgcacaattttgtcatgttccgatatcaaatatcattaatctccgtgatgtaacgaacatttggcacatccctttgttgctcagagaccagaaggcccatgaagctattttgaaagtgttagacattcagtgtgtgggtaaagttgctcgagaaccccagttgtctgaatggactgaaagagccagcagatgtgacagattgaaatctccggttaggattgctatggttggaaagtatactggcctgtcagattcctacctatctgttatcaaggctcttttgcatgcgtcggttgctttggacaggaaacttgtggtagactgggttccttcctgtgatcttgaagattctgcagcagaagagaatcttgatgcctacgaaaaagcatgggaattgttaaagggtgcagatggtgtgttggtgccagggggttttggagacagaggagttcaagggaaaattctggctgcaaaatatgcgcgagaaaacaacattccatatcttggcatttgcttgggcatgcaaattgcagtgattgagtttgcacgttctatcatgaagttgcacggtgcaaacagcacagagttcgatccaaccacaaaaaccccatgtgttattttcatgccagaggggtcaaaaacccatatgggggcaacaatgcgccttggatcaaggaggacctttttccaggtcactaactgcaaatctgctaaactgtatgggaatgctagctacgttgatgaacggcaccgccacagatacgaggtgaatcctgatatggtcccagaatttgagaaggcagggctttctttcgttggcagggatgaaagtggtaaacgcatggagattatcgaactgccaactcataggtttttcgtcggtgcacaatttcatcctgaattcaagtcaaggcccggcaagccatctccgcttttcttaggattggtagcagcgtcatcaggtcagcttgatcacctgctccaacctggtcttatcagttcgactggcagacacacctgcagcaaaggaggagcgcaaaaattaaaggctgggcacgtcatgaagccactgaatggcctggtgaacgcacactattcagcaaccggcaatggcgccattcccatctagcagcgcagagctgcgacgcgtcgcgtgcttgtttgggatttctcttctaccgttactgcttgttctttttttttccctttccttcgagggtgttcttccgtacgttctgccaggccaactgagaagaagagaagggctgtttgctctagcgacacgggcagccgcgtttccgatgttttaacgtggaagcatttggcatggaagctgtcgcatgcatcaagaggcaaatctagcaggttagctagagtttgattagtagtggtaatccgatatatatgctggttgatttgttcgtttgtttgctaagattacaagggccggtgatgtgcagctagctggtagtgtagcctgccgtctcgcctcatttgtacattgtaaaacaactgctactctccattgactgactgaatggacgagtataaacgtattggaccaacatgctgcgtgtgtgtttagtttatcactggtagaaaagctactatcgaatgccagttttatatacaggcgaggccgatacagaagggattttcagtctaaatttgaattgcattttatttaaat

SEQ ID NO: 40453 - DNA, 2707 bp, Zea Mays
cattccctcaccgtcgccaccgttggagcgtcgcgcggacgatacagagcatgagaggcggagggagcggccgcggccatgggaacgaccaatacagccacaaccaccatcacagctcgttgtgctgcctctctgccgcgccgccgctggctggggacgccaccccgacgctgactccggagccagaggctgccgccgcctcgattgcctcgacggtgtcgacggttgtggtggagggcgtgctgcacaagtggaccaactacggtcgcgggtggcgggagcgctggttctcgctccgcgacggcgtcctgtcctactccaagattcgggccaacgcgggggcgaagacgggggcgggggcgacggacggtgacggggaggttagagtgattggttctagggtggaaggagcgcgccgcacggagaagcctgccggcgtcgtattcctcaaggtgtcagcatttcgggaaagtaagtcagatgacaggagattttacatattttcccccactaagacgcttcacttgaagacaaactcaaaagttgaccgtgttgcctggattgaggctttgatcctggcaaggagtgtttattctcttgggtcacttagcgggagagcaacttttgtgcagagtgatgtttcaatttcaactgcaaggcttagagatcgaatgcatcaggagggtttgaatgagagtcttatacaggactgtgaacaaattgtgctttccgagttctcaagctaccggaagcaactgaagtgtcgttacgaggattacttaagcttgtttgggtcctgcagacataattttgaggaattttacatagtgtattacacacatatttgtgcaggaaggtaaagatggaagtataacacaggggacattgacacgaaatgacttctctagttctaggcatggaaattttagcgaatatagcacaacagaatctgatgagcatgagtttgagaaacacgatggaggcgaattgatttgtgaagatgaatctgcattctttgattctatagattacttcacagagtcagacaacaggtcttcaaccatgttaagtggcaaggaagtagtggattcccaaacacatgattccagtaataatatacaagcacaaatcagacgacggagtaggctgcctgaccctattgagaaagagaaagggatcagtctctggtccattattaaagatagcgttggaaaggatttgacacgagtttgtcttccagtttacttcaatgaaccactctcatcccttcagaagtgctttgaggatttggagtattcatacctcttggatcaggcatatcaacatggaaaagtgggggacagcctcatgagaatcctcaaagtagctgcttttgcggcctctggctatgcttcatctgttgcaaggccttgcaaaccattcaatccattgctaggagagacctatgaagctgattaccctgacagaggaattcgtttttttgcagaaaaggttagtcatcatccaatgctgattgcctgccactgtgaaggcaagggctggaaattctggggcgacagcaatctcaaatccaagttttggggacagtcaattcaagttgaaccagttggcattttgactctagaatttgaggatggtgaaatcttccaatggaataaggttacaacaaccattcacaatctcattcttgggaagttgtactgcagccaccatggaacaatgcatataaaagggaatcgccaatattcatgtaaactgaagttcaaagagccatcacttcttgaccggaatccccatctagtacaaggctttgtagaggacaacaatgggaacaaagcttcgtttttgatagggatgtgggacgaaagcatatattgtagtaactctgatacttccaaggtgaagagcgccgatcaactgaaaggtgcctcgctgctgtgggaaaagaacaaacctgctcctaacccaactcgatacaatttatcttcattcgcgatcacactgaatgagttgaccccagggctgcaggagaaacttccacctactgattcacggctgagaccagaccagcgccacctagagaatggtgaatacgagaaagcgaatgcagagaagctgaggttggaacgacggcaaagaatgtctactaaacttcaagacaatggctggaaatcccggtggttcgagcaagacaccgaggacgggacgtattgctacaaaggtggatactgggaaacaagagagaggggcttctgggatgggtgcctcgacatttttggggagttcgtggagacataagtgccctgttcctgcagtagcagaggttcaagcagccaacacgccacccagaaacaatggagtactgccatctccaatggagcatcctcttgcctctagaagagaagggggaggagccctgtgcgaggagtagagcattcgagatgtgaaggcattgtgccttgaatggtagcatagcatatgattggccacgaataggcattgccaccttgttagtatagtatagttcgatccaatgcaaataagaatgctgacattcattctttggttccttcttgcgttgaacatggatctgttgtcgtggaagaaatttgcttgctcggctaggcaaaagtctgcctacactgtatttgtttgccgatcgaaaaccaaagcaagtcaccatctataactcttcacttccatgaga

SEQ ID NO: 40454 - DNA, 1712 bp, Zea Mays
ctagaccatatggccatcaggtcctgttggtgaagacatgttccactggcaggcaacaataatgggtccatctgatagcccatattctggtggagttttcctagttacaatccattttcctcctgattatcctttcaaaccaccaaaggtacagcaaacgagcatttagggaatgaccattcctttttttttgtgcattttgtcctttgtttgccattgaatttgtaaaataaacatatgcttaagctcatttacttcctaggaggattactctgacatatgcactagatatctgtgatgtttagtaccttgacaatgcatatgagctaatgtgtagtagccaatagcttatcggttagatgccatgcccactaagcgcacttgctgaaaacacttgagttatttttggatgaaacctttaaggccttgttcggttgtgcctggatcgaatgagattggggggattaaatcttcttctattcaattttgactaggaagagatttaatctcctccaatccccttcgatccagacgtaaccgaacaagccctaagggagtggattggagggatcaaatctctttctagtcaaaattgaataggagatttaatccctctgaatccccttcgatccccatacgaccgaacaagctctaagaagattcaagatcgtaacagtttgcgaaaggacctctagccgagttggttaggtggtctgagtagcactcatcaggtcctatggagcgaattttcgagctgtggttaaagaaattttctcgtctgttccatgccaaagcataggtttaaggcctggccctagtcgcggtcgtctcacatgggctacggtgccgttgtgtatgggtgagataggggtttggggggttttctcactgtccggtgcctgtcttacctgttaccctcgtaggtcgagtttttttagattgtcacagtttcatgtgcaatcttgaaacccttgatatctgaaatttacctgccttaccaaatccatatatccttaaaaatgtttgtcacattccgaaccatgtaacctagtatatgtatgcgatacgcaggtggcatttcgcactaaggtgttccatccaaacatcaacagcaacgggagcatttgcctcgacatcttgaaggaccagtggagtccggcactaaccatctccaaggtgctgctgtccatctgttccctgctgactgatccgaaccccgacgaccctttggtccccgagatagctcacatgtacaagacggaccggcacaagtacgagaacaccgcgaggacctggacccagagtgccgcgtgtggtgctgaatgctgctgtattgtgtcacttggaagctgtaattctcagtgtcaaaaaaaactggtacttggaaccattttgcgtcggatggcgctgcaggccagtccatgcttgcgtccttcttcccttcaccagtcatcgtgttggaagaaacataacgttctgtctcttgagtaactggtacgaaacaataatgatcgttggggatttggttgcagcagatgaggccaatcttaacgggagttttacaagagatttatgacattaaatagcatatggtacatatgatttttttataacatatcactacatttatttattattaggtgaaactatgtctatctgtttccaaggtattggagtgaaaccgccgcagagaccaatttattttgtcccca

SEQ ID NO: 40455 - DNA, 391 bp, Zea Mays
ccaagataagatgtaacatttgtttttattagtttaatatctgatattaaatttatttttatggctattaaatatgattgaatatgtcataacacacgtcattgtactagtacatgttgatgtgcttcaactagataagttcaaacgtcctatcatatcgggttcaatcatgccagattgttcggtctatgtttatttggcacgactcttcttacactcatgcttactgtcagatcaggttgacctgtgccttcatgttggatgtgtcgagtcgagacgtgttcggattgggtcaaggttttttggcctttgagtcgagtttttttggttgggtcacattttagataaaaaatcatagctcgtgtctgttccgtagattatttatatctat

SEQ ID NO: 40456 - DNA, 3437 bp, Zea Mays
ctccccgcctggacaccgtcacaccggtcagcctccacgcctcacggatttcgcacccgaaaaaaaaatagaaagcgaaatcaaccaatctcctatcattcacggcctcgccagcgcctcctcctccccctcctccccagaaatttccccacttgcgccgctcgcgatcggcgcccgagctcccggaatcccggcccggtttcgcgaccgttcgccgcgagccttgggccggtccgggctctgattcgcgggcgccgcggccgtggttcgcgcggggaatgctctacctcaagcagccgggcggcgcggacttagggttccggcgggcggcggtggcggctgctgctgctgctgctgcggggctgtgatctgccgctgtggtggatgcgaggttgagccagcacgcgccggggattctgctggcaatggcggaggcggacagctgcctcgagagcttcgagctctacgagtccgagtcgaaattctatattcttggaactaactgtaacaagacaatatggagattactcaagattgatagaatggagccatcagaggtcaatgtacatgaggattctactgtgctctcacagagtgattaccttgatatgctaaaaaatctagacgaacaacacaggtcaactggtggagtcaaatttgtcaccaactgttttggaatcatcggtttcattaagttccttgggccctattacatgttaattattactgagcagagaaagattggggatatatttggtcatatggtgtaccaagtttctaagactgcgatgattgagttatcaaattccactacgagaccaaaattaattaattccaaggacgagaacaggtacaagaagctcttgcagacaattgatcttagaaaagatttcttttttagccactcatatcatataatgagaagtcttcaaaagaactttaatgatccacaagaagggtgggaactatatgacacaatgttcgtctggaatgagttcctaactcgagggattcgtgacattctgaaaactacactctggactgttgcattagtctatggtttttttaagcaggacaaacttgcgatatgtgggaaggatattatgctgactctcattgctagacgctcgaggcattatgctggcaccaggtatctaaagaggggtgtgaatgaggagggcagagtagcaaatgatgttgagactgagcaaattgtttatgaagacatgcttggaccatggcaaataagctctgttgtgcagaacaggggttcgattccactattctggtcccaggagacatcaaagctgaatcttaagcctgatatcatattgcatggaaaggacaaaaattatgaggctaccaggcttcattttgaaaatcttaggaaaagatatggaaatcctatcatcatcttaaacttgattaagacacgtgagaagagaccacgtgaaatcatactccgtcgggaatttgacagagcaataaagattattaatagtggtctaccaggcgaagatcatttgagatatttacattgggatcttcataagaactctcaaagcaaaagtacaaatgcgcttcaagtgcttttgaaggtggcatttgaagctttgaacttgacagaattcttttatcgtcaagtttccccagctcaaagggcagagaattcccctaatttaagccctacactgaaaaatggttttggtcctcatgtgtgtgatgatgacaacaattgtggcaatgcagactatgttgatgatcttgatgacatttcccaagaagatacctgtggcaattatgatcctggcaatggaattgcagaagatagatctgaggtcaatggatctactcaaataaagcctccaaaatttcaaaagggtgtattacgtacaaactgtatagattgtttggatcgcacaaatgttgctcaatatgcctatggcctagctgctctaggataccagttacatgcacttggttctgtagaatctccagaagttcatttagactcccctttgtctcggcatttgatgcatttttatgaacggatgggtgacacacttgctttacagtatggtggttctgctgctcacaataagatattctctgcaaaaagagggcacttgaagttcgccattcaatctcaagagttctttaggactctgcaacggtactacagtaatgcctatatggatgcttacaaacaagcagcgataaacttatttctaggatacttccaaccgcaggtgggaaaacctgcactttgggagccagaatctggtgacgagcatgtacttgatgacgagacaagtaatggcccaaatggagttttaaactcagcacttactggttcaaaaaatgaagggcaacatccaaactggagttctgattcagtgcatgggatgtcttcagcctctgacaattccatgtcaaagtcaaggtatactccgacagtgtctcacattaagcatataagctgtgaactagactattacaatggttctggtgattcaaatttcctggatcttgactggctttcagcttcagacaatgaaaggtcaaaagccataagcactcctgatgtgaatatttcaactgatgatggtgttcatgatgtaatctatgggataacggatgatcaagctgctgagatccaggctcagggattatctaaggattttgtgcagtgggttaatcaaggagagacattttggtactgatattccaagatgggcgtaccatgtaaattcaagccacataatggttgcacttgcaaaaaggggggaaaataagggagaagtctacatgatggcagtccagacctcatttcaaagcatattaactcttaaagaccattgcaaggagggaccatcaatgtgcatgagattgtttgtcaaccatcagcaattcagcattctcttttcggtatacgaatatgatgatgggcttagagtcacacgcactgttagaagacttgtctagggaagtgtaccattctgttcatttattgaagcttgctcaccaggctggtagatagtgcattgttattattttttcttaaaaggaatgaaagaatgtaggtagtttattctttttaagatgtaccattgtccaggcatgatccccatctctccatcgtgtaaatatatatgtcccaagtgttccacttttcccttttccttccatgagagttgaggtgggcatgaaagcaccatttttccctcagtctctttgtatgggttttctgaaatcatgtacatttatattttgtggcaagcggagagattgttgtgtaatttccattgtaccaaacgtccaaacccctcttaccaatagaagtctcttggactgtttgtcacattgcagattgctttaatacttgctttaaactatctgattatgtgtaaaattttcgtgtgattccttagggtccc

SEQ ID NO: 40457 - DNA, 893 bp, Zea Mays
gggaggggagcggttgcccgcgcgggggcgatcagaacaacggatcgaatatgtgacgggcggacggccacggccacgccccctgccacagctctttccgccgcgaaacgccgcgcgccgcgggccagacgagacgcgccgggccggccccccgccgcgtcgcgtcgcgttcgcgtccgaccgcggggaaccaagcgaggccacgcgacgggagaggggaggttcgcgtgcgccgcgcgtgcccaccaacccgagtcgcgcggcacgggaacgggatcctctcctcggtcttccccgccaccgggggaaaaaaacaaaggaaatggtcgtgcgcggtgcgccgcgccgccgaaacgacaccttatcgcacacgcgaaggttcgcctggtgcagaagcaactgcgccgaaatgtaaaaatgtggggcaattctacagtaccgaaaaccgccttcgtttcatggataacgccccccgcgcgcggcgttgcctccttttctggttgctttcgggaaacattttctcgtcgtggcagggcagggcagggcagggcggcaggcgacggcgcgaggctgtgctgtgctgctccgttgccttgccccggacggatgtaatcagaagatattcgtcaggcatatgctcactgctctggctttttacatcttgctgatcgtgaaagattacggcacaatgcttcctggtttgtgctaaccctctgctagccccagataggaactgctggtgtctggttgctatggtccaccacgttgctcaacggtctcagcatgtaaccacgtagagtgtcaaaacgcaaacgctatgtgctggcgctggcccacacatgagggttgacgcacacggtacagtcagcaaagcagctactagtagctttgcc

SEQ ID NO: 40458 - DNA, 1595 bp, Zea Mays
ccgaacctttcacagccgcgttattattctcgtctccagccccccacacgcgctcccctccaccgtccgccgcgcgtccccaccggcggccaccgccaccggcccacctccccggcgccccttacccttctttggcgcgatggtaactcgcggcggcggtagccagtcctacggcttcccgatctactgcgccgcctggctcccgctcgcccacatcatcaagcccgaccctcccgctgccgaggcggatgcggatgacccctcctcctccaccccctcgcttccgatggctgtcctcgggggcggtggcggggagggccggagcggggtgccgaacaagctcgtggtggcggccctcgccaccggggaagaggccgcgccggctctctcccccgatacggtggtcgaggtgaatagtgaggaggaggtgccgtacagaatggccgtccacccgcgtggcgatggcgtgttctgtgccttccccaacggctgcaggttgtatcgatgggaatcacaggaaggagagggaccacagaggttggctttggagccggaccaggatgctttagcagagctgaaagatgtcggtttgcagttggccgtatccttcagtggagaaggttcaatacttgctattggtggtgaagatgggtatttaagagttttcaactggcctaccatggggtctgttctcacagaaatcgatactaaaacatcgattaaggatcttactatcagttccgacgagaagtttcttgctgtgaataggagcagtggcccatgtagagtgtgggatttgcagtcatctgaagttgtagccagtctgccaagagaaacatggaacaatagaaggaagcatcatcgtagttggctcaaaagacatgcggacacttgtaacagttaaaaaggctcatcttggtattgttactacgctgaccttctctcaggattcaagaacattgctgtcaacttccttcgactcttctgcaagggtgacatctgttgggtctccaaagagtaatggaacaagcatatggcccatgctactagttgttattcttgcaattttggtgtactactgtacgcagcacaaagaagacattttggcaatgttgcagcgttgagatagatttctgttcagcccctgactggtctactctgctggacgtattattagtgttgcttcagtgattgaagaaattttggacttgggccaacttcattattctctcaaggacaaacaatacagcaaaaggcactgagccctgttatgttttgtagtaaaaagggtaatgtacttactcatgttgtcgaagtttttgtaagttgatggccgcaagtgatagacatatgtggcaatgtttcttcatgctgcacttgtgaattgcaagatgttcgccccaagagtccaatatagagagttcagaaacaaatttttttggtgtgcgaaacaatttattatgtatgcgtaataaagctgtacaaagaatatctaaaaatgcagatagcttctgggtgcttatacatgtgatgaccaattattgtttggatgacaaaagggagttgtaacactatgctctacatctgtgtgtcgg

SEQ ID NO: 40459 - DNA, 604 bp, Zea Mays
ctttgaccatgcacacaagatttctcccactacggagacttcggatcaacaccgtacagggctgcgtggctcaacctcacctcggcgctgccgatgcgtcgagtaggggctgcgccagccgtgggtcgagcggagaagctccaggacgcggcatgcgatgcacggagccgccaacagagtggctcgcgcggcgcaggcgcgcgcggatgaccaaggtgcattttttcttagtcgtcaactaaatcgcaaatccaatatgaaaattacataccatgtttcttgattcagtaaacggatggcattttttcaatatttttcaatattttagtgcacatttataatgcgggcatggctgctggcgcgcaatgcggtcccgacgcgcggcgcaacaccactacgtcaatggcagtttgtcgcgcatgaatcacaatccgtacacaagaacggatcaaccaataaacataccgctcgtgcatagagggagaatcaaaggctgtcgcgtaggacagttcggctagaccgagagacctgccggctcgacgaagagttgatgcagatctgatcccacaacaacatcaaggtagagcgtgttgataacgtgttg

SEQ ID NO: 40460 - DNA, 3701 bp, Zea Mays
tacagtattttatccagtaaagaagcaaaggtggagaaagagccatgaaaacgagcgctgctagctcacgttcctctgtgcgctggccggtgcgctccatttggaatccgagctcccccacattgaccgcctccgtaccagcgacagcctttccttcaatcatccactgccaactcaattttcttgtggaggccgggcccccatcacccgattcatccctgccactttgcatttcaggtttcagctcacctctcgcgttccttctttctccctcccgctcaccgccagcgccaccatgcccaccgagccacccattgctctcgccgcactaaactctccgccgtagccatcgcccttttggcagaaccatgtgtaattacaactgaagacgctagtatgagccaagaactacaggggaggtcggcggacccgatggcggccgatcacgcgctgccattggcgtcatcagcgccgtcctggccggtctcgacgcacccctccgccgcttccgccgccgccgccgcggtctactacttcggcctttctttcgctctagcgcaggggagagcttccggcgggttcgatcttggtggcgcgaggcggcgggggtgccggtggtcgcgggccatggagctggcgctgcaggagaaggtagccgcgcttgagcgccaggtcgcggagctccgctgtcggcgggccgaggacgccagggccaacgagaaggtggcgggaattttcgcgtcccacgaacagcggtggttcgccgagcgcaagtccctgcgccggcaggtgcacgccgtcgtcgccgctgcgcgcgcgcgcgaggccaagcgcgaggaggagaccgcggagctcaggcgccagctggaggagcagcgggacacagtggcgctcaaggacagggccctggagcaggaggtgcagaggcggcaaggcgcggaggagcgactacgagccgcggagaaggcggaggaggagctgcgggagcgcgccggcaaggaggcgatggagcacgccgcggaggtgcggaagcacaaggcggcgttcgtggagctcgtgtccgcgcagcggcagctggaggcggacctggcccgcgccgcgcgcctcgcggacacggcggaggccgagctccgggccgcgctggagcgccgcgacgaggcggcctccacggccgccgacctctccgccgaggccgcacgcctgcggcgggacgccgaccacaaggacaagatcctctcggcgatgctgcgcaagtccaagatcgacatggaggacagggagatgctggtgcgggaggtcaagatgtgcaaggccagacggaagcaggcggagctggaggccgaccggtggcgcaagatgtgggagtcccgtggccaccgccggggctcctccagatcgtcggcgcggggcgtggccgacctgccggccgggagctcagacaagctgctggccaccgacgccgccgtggcgtgcgccaccaatgaaactaagatattgttcgtggaccacgcggagggcgacgccaagaaggaccaccggaagacgccggcgaaggaactgaacgccattgaatgcgtcgaccgctatgctagccatgtcgtcgacgacaagcccggtatgtccacctgctctgtcttgtactccacttgctcctgctcctgctcctgcctcctgctttgtcctgtactccacttgctcctgctcctgcctcctgctcacaaaatgttactacaagtgtactaattaatctggttagcatatgctgccaggattattggtagaaaaagttttgttttttaatgtgttctaacaagtcctatttgagtactaaatacagcgaatccgtcttaggagatgtgatttagaaatggtgaatatcaaagagcagtgtttaagagtacttgtgactaggctgtgcttctttctttgtacacgtcatgcagctgtggaggaataccaaggcctgcaggagtggttccagatggagacggagaagtacacggctctgatacaacaccggcacacggcggagatcgaggcgttcacggagcagctccggctcaaggacgagaagttggaggcgttccggtggcgcgcggtgagcatggacgtcgaggcggcgcgtctccggagccggatccacgagctggagggccgtctagcgcggcacgagaagcacagcgccgcgctggaggccctgctccaggacagggaaagcgagaacagagcactcgaggagcagctggagacgctccaagcgcaggcgcttggtgtggagatctgcacgccggcccgtggcagtggccaagacgacgggctcgacgaccagtgcatcgcgtgttcgcccgtggatgccgtccagagaacaatgtcatccggaagctcgcggcaccaagagggcgccgaggtcagcaagtatgagacgaagctggacgagctagtcaccctctccccagaagatcacaaggaggatgcaacagaggcgcttgtagtctcggtcggggatctcgcgtgcgccgtcgccgcggcagcaacgtccgtggaacacgagcgaagacatgatgccccggcgagccggcagtctttcaggtctgagatcgaggaggaggaggaggtgtacaccgagccgggcaatgcacacacgacaggtagctcccaagaggcgacgtctgagctcgcgctcgtggtcgtgccgcctgggcacaagagctctgcttggaagacggacatccacgccctagccgtgtcgtacaagatcaagaggctgaagcagcagctgcttgtgctggagaggctggccaacgaatgcaaggatgaggaagccgcggcgacgaagccgtcagggagtgaagccagctgcagcggcggcggcggcagcaggcagcagccgaggtcgaggtaccacacgatgatgtcgttcctcagcaagcacgtcaggcggtaccagtccctcgacgacaagatcgacgacctctgcgctagaatggaggagagcaagaggagcgcggggcggggcgcgggagaggagagccagagccagagcgcggcgctgggccagttcctggaggagacgttccagctgcagcgattcatggtggccacggggcagaagctgctggagacgcagtccaggatcgcggctggcctcgcgcgcgatcgctgctgctgtggcgacggagaagacggcgtggatatgaagaggctcatggaggtggctggggcgctgctgagggacgtgcagcgagggctggaggtgcggatcgcgcggatcatcggcgacctcgagggcacgctcaccttccacggcatcctccgaagcacgcgctgatatatatacacacacgcacaggcacacacacccgacgctgtcctccagacacagcctaaacgttctaacgccaatgttagtagtattaatcagatactgtactagtaccactttttggacttcatgctctaagagatggcttaggctgcgttcgtttgttcaggattgggggcaggaacggttccaggtgatcaaagcctatacaaattacataagtattcctggttggattgattctaggtcacaattccggaacaaacgaacacacccttaacaaatatagtttacacaaaggggcaaaacatcccatcatcgactttgtatgagagtatatatgtccaccgaacctgatttgcttctaacccaaatacac

SEQ ID NO: 40461 - DNA, 1462 bp, Zea Mays
ctttgttcttattcttgatgccgatttattagaagatctccatgcctgccattactgagtgaagttcagccacagatggccactgaaggatttggaggatgacagaagctgcagttacaaggtactggtgccatggatgtgtgagggttgttgaggaggccatgggggaggagatcaagtgcccattttgtggtggtggattcattgaagagatgattggtgaggaatttgatgggttggccagccagcagtcagagcgggattcatcacaatggggagcgtcgaacaacccctttgagcagccaagggcggaggcggacagtgaggatgaagaagatgatgatgattacgatgatgatataggccgtgcatttgagagtttcatcaggaggcatgggcggccatcagctctccgtcgggcgtttgacagcatccaggacgaccttagagctgatagggatagtgacttctccattctgatcaatgccttcaaccaagccctcgctttgcaacgctcagtgcttgatgctgatgaggcccgagatgaccaaggtggatctagcaatgatgatggcttgatggaagaatatgtcctgggggctgggctaaccctgctgcttcaatatttgactgagaatgatccaagccagtatggcacccctcctgcaaacaaagaggcggttgacgctctgcccactgtccaaatagcagaggctgtcagctgttcagtctgccttgatgatcttgagctagggtcccaggcaaagcaaatgccttgtgagcataagttccactctccttgtatactgccatggcttgaactccatagctcctgccctgtgtgccggtttgagctgccatctgaagagacagaagatttggatgagcctagcaatgtggacagaacagagaacacccatgaggaagtcagggccgatggccctgaagatgacagtgagagcagtaacagagcgtgggcccttgttccttggttcagtgggctattctcaacacctgaaccacaaactgtcagaggcgctttcactgatcagcagactcgctccacttctggaaccaacatgaatgctggcgaaagctgatctcttcctcctttgtgaataatgcccatacatctgagaatagcaatggaccttgtcagtagataacttatttttctgtactgataatccttcttggatgaatcgcaaggtacaaagtttgtgacagctccattttttgccaggattttagcgatcatttcactgttgattgatttcatagctactgagcatctctgcatcctatgtgtgcgatcatttactttcttggctctgagaatccacccatgtttattgtcttgaactagtgctagtcgtaaaatgtttgtgatttgtgaacaccagtagaggtaagcctcgtcatgggaagacaccaaacattcttggggagaatctgtcggcca

SEQ ID NO: 40462 - DNA, 3236 bp, Zea Mays
gcaaaaaaaagatttccttgcagcatatgtcagcgcaaccacagcatttcgtcgagcggctggcgtacctgcgcgaacacggagctgtagaacacgggcggccgacggggaggtggctccgcttccgccggagcatcctgccgagtatccgcgcatgcctcctcgcccgcccgccgcggggagcgccatgctgtttgttggcctcggatccccttaatcgcggagcatcgacgtcgatgagagatccgcgagcggtcgcggaggatgaaggtgcgcgccgcgggatggaaggtgagcgccgcggggatcgcggctgcgggatgagtggctgtgcggaggatggaaggcggaggatgaaggtgcgcgctgcgggatggaaggtgagcgccgcggggatcgcggctgcgggatgagtggctgcgcggaggatggaaggtgagcgtcggcggctgcgggatgcgggggaggttcggccgcgggcgtgagcagagcggcagaacgtgcaccacgcgattgtggacgcccatcgcggccgccgccggctcgccgctgctgccaggcgctatgcggccttgctcccgcatactcgcggcgcgtcacttcgtccgcagcttccggttcgatccctcccaaactacctcccccgctgccggatttcgtcggctgaccggagccaacaggccgttcgtgccgaaacctctctttggcattctcctcggaggcttcagatcgaactgtggcgtactgcctgggaaaggggtccccttgggcagcctcggcagcttcctgccggactctgcctaccagctgcacggcgcgcggcttcaacgagatacgagaggtaatgcattctccacatccgccaatgctgtgacagttaagaagccagttggtgacaaggtccagaaagatgcatcaaaaaaggatattgatgaggagattgctgattctcagatattgaaaaaccttgggaagtacttattgttgaatgacagccctgacttccgctttagggttgccttgtcgttggtcctgttagttggtgcaaaggttataaatgttcaagtgcctttcttgtttaagctagctatcgactggcttgcagcccttggtggtgctgaagcttccctggcatcattcactgaaactaatgccaccctattggctctatttgcaagcccagcagctgttctgataggatatggaatcgcacgatcaggagtatcagcctgtacagaactgcgaaacgctgtattttctaaagtgactttgagagcaatccgttcagtatccagaaaggtattttctcacttgcatgagcttgatcttcgatatcatctaagccggcaaactggtgctataaatcgcgtaattgatcgaggaagccgtgcaataaattacatcctcacagtcatggtgtttaatgtcgtgcccacgatactagagattggtatggtgtcaagcatacttgcctacaaatttggttcaacttttgcttggatcacttcagtttcagttgctacttatattgctttcactttggctgtcacacagtggcggactaagttcaggatggccatgaataaagctgataatgcttctagtacggtggcagttgactctcttctcaattatgagactgtgaaatacttcaacaatgaacaatttgaagttgagaagtacgacaaatatttaaggaattatgaggatgctgcattgaagacccaaagtagtcttgcctacctgaactttggccaaaatgttatctttagctcagctttatctacagcaatggttttgagctcatatggaataatgagtggtgctctgactgtgggtgatttggtcatggttaatgggcttttattccagctttcattacctctgaacttccttgggagtgtgtatcgagaatctagacaaagcctcattgacatgaagtcaatgtttcagttgcttgaggaaaaacctgcaataaaggatgagcctcatgcacaacctttgcagttcaagggagggtgcattgaattcgagaatgttcattttgggtatgtaccagaaaggaagattcttgatggtgccactttcaccgtacctgcaggaaagagtgtggccattgttggaactagcggaagcgggaaatcaactattcttagacttcttttcagattctttgattcgacttcaggatctatacgaattgacgggcaagatatccgaggagtgacactggggagccttcgaaaatgtctaggtgtggtacctcaggacacagtactttttaatgacacgattaagcataatatacagtatgggcggttatcagcaaaagatgaggaggtctttgatgctgcccgacgtgctgctattcatgatacaattatgaacttcccagacaagtatgacaccgtagtaggagaacgaggattgaagttaagcggcggggagaaacaacgagtgtcaatagcccgtgtattcttgaaggagccttccattctgttatgtgatgaagcaactagtgctcttgacagcactactgaagcatcaattttgaattctctgaaatccttatcttccgatcgaacatcaatctttattgctcatcgactcacaactgcaatgcagtgtgatcagataattgttttggaggatgggaaggtagtagaacaaggaccacatgattttcttctgtcacagggtgggcgatacgcagaattgtggtatcagcagaacagcactgacgccatggattctgctgcagctagcgtagaggtttgattgaccatgtttaccttttccttctgcaaggggaaaagaagggaaaacacaatcataaccgtgagagagagggatggagccaacttgtctgccttgtaattagaggtaggttttttggttcgggggggaggggggggggggggggggcataaacgtacagttccattttcaagatagccgggaggattttccccccttttgagattgtatagacgatccctgcatgttatgataaccgtaacgtttctgtagcataagggataaagcccagtaagggcctgtttgtttcgcatggaataaagggtagaataaatctggcttggattcctttaataattactataatttttggagatttagaattaattctggtctgttccagtagaaacgaacgggccctaaatattcagttgcctcaggcgtactaccgtttcaatataaatgctcccatgattgct

SEQ ID NO: 40463 - DNA, 1645 bp, Zea Mays
gttcagaccacaggtaaatttatcagatttcgaatcgaatcaaactgtttcgcaagtaccgtcgacccttttgttatcgctaaaaacctcgatccaaaaatatctgtgattttctattataaaaagagagaaagaaataaaaaagagagaaaaatatcatcgctctttcctatcctctgcagccattctccctgatttttttccaccgcccatgggcctagatatcttttttctcagctctatcctctgccgtgcgtgcctggcctgctcgtgtaaaaatctcgccgccgcctccagtctcctttttctctgcagcgccgcggcttccctccccctgagctccctcagccatgacgcgtcttcctccctgcgcatgtccttctgctcggtcccaagctccttgtgcgcgcgctactcttccttcccatgttactgcacgctctaccttccctcccatggcgtccatctccctatgctcgccccttcccctgcttctcctccatggagcacccgcccatggcagccgcgtcctcgagctcggcttcgagctccatctccctacgcggcactccctccagctccttcctctccctctcggttctctgttggcccggtgctctgctcttcccatccacggtgtcgctgctacctctgctcggagtctcctgcgcgcagctcgccaggctctccctctcccatgcgagcgcctctgctccctccaccctgctcgcatggccgcgccggctccctctagtcggccgcgcgcccagccgatgtcccctgcgcgcgtgcctgcgcgtagctcgcgtcctgctcgcccctctgctcgccgagtccttctctagtccgcgccataaaattcgctcggccacggtctcgtcaaattgtgaagcttccttgccgtgcgctctggcatcggctaccgccgattccaccataaagttcacgagcgctccttgctcagtttgtttcgtagtgggcaatttctccacgtttcaattcgtgctgcttgcccttgtgcgctcgctcctcatgcatcgggtttcggcatgttcgcgtttaccgtcgagtcatcgaacctgtcatcccctgctcgacccacacctcgccagctcgctccagactcgatcttatcgtcgttccgtgtgtcatcaagaaatcacaagaatcgggcgaagacgaagttagccgcgtgaagttcgtgtggcacctgccaagcgctcgacaaattgtttgaatcagaaaatcattaccgatctcgcggattcgtgtcagctgttggaacagctgttggaacggtacgtgaattaaccacgtaatgcggagaaccagaactgagtcgaccacaagatggtgctgatgaacgaaactgaagatggacagacaaaacaagtatcagaacaaaggatggtcgtcaagtgatcgacgtctaacaaacactaacgtagtgtttatcccaggcaagcccccgtgcttgcaacccattccttgtgtttttaaataatttttacacactttaagtctagcgaaatgtgcattaggtttctaggcgttgcttggaaaccctttgatgcattgcctaccttgatatccatacctttatagatacttctaatgaagtatcaaaatatgatttacaaaaatg

SEQ ID NO: 40464 - DNA, 2773 bp, Zea Mays
tttcttgcgcaattgctcgcccttgctgacgaggagcagcacctcatactgaagcagcacccagtgctgtgtgttgtccttctggctggagcaagcggagcccaggaggggcggaggcggcaacaccaacaccaacaccacaggccgccgccgcgcctcgagctggctatggcgcacgcgcggggcggcgggggccacggccacggccacgaggaggaagcggaggcggccgtctgcctggacggcgactccgaggcgggcgaagcgcgcagcgcggggcgcgcgccgccgtggcgggaccagctgacggcgcgcgggatggtggcgagcctcgccgtcggcgccatgtacagcgtcatcgtcatgaagctgggcctcaccacagggctcgtccccacgctcaacgtctccgccgcgctcatcgccttcgtcatcctccgcgggtggacgcaggcgctcgcccgcttcggcgtcgctacgcgcccgttcacccgccaggagaacaccgtcgtccagacatgcgccgtcgcctgctacagcatcgccgtcggaggtgggtttggctccttcttgcttgctctgaacaagaggacctacgagatggctggggaggacacggaaggcaaccttccgggaagctacaaggagcctggcattggctggatgaccggcttcctcttcgccgtaagcttcgtcgggattgttgcgctaatacctctaaggaagatcatgataattgactacaaattaacttacccaagtggtactgcaacagctgttcttataaatggattccacacaactcatggagatgcaacggcaaagcagcaagtgaatgggttcacaaaatactttgcaatcagcttcttttggagcttcttccagtggttttactcaggtggagacaactgtgggttttcacagtttcccacttttggacttagagcttggaaacaaacatttttcttcgatttcagtctaacatatgttggcgctgggatgatttgctctcacctcgttaatctatctctccttcttggtgcacttctctcatggggaataatgtggccactggtcagtgatttgaaaggggattggtatcctgcagatatgccagaaagcagcatgagaagcctgcaaggttacaaggccttcatctgcatagcgctcctcttgggcgatggtctttacaattttgttaaggttgttgcattcactgttaagagtctacttggcagatcaagactgaagaatgcaaagaaagaggaagacattccagtgcttgatgaaattcagcgcaatgagatttttacaagagacagtatccccacatggctagcctactctggatatcttgcactatcagctgttgctgtgtttgccattcccttgatgttccatgagatgaaatggtcgcgctctttattcttgcggcctgggctgggaaggactctggtgttgtagctggcctagtgggttgtggtttggtgaaatcactggtgtcaatatccgctgatctgatgcatgacttcaagactggacatcttacattaacatcacctagatcaatgattattgctcaggctattggcactgccatgggctgtgtcattggaccactgacatttttactgttctacaaggcttttgacattggaaaccctgatgggtactggaaggcaccatatgctctaatctaccgcaatatggcaattcttggtgtccagggcttctctgctctgcccctgcattgtttgcagctgtgctacggattctttggatttgcagtggcagccaatctgatgagggacctcttgccaccaaagtacggcaaatgggttccattaccaatggcaatgggggttcccttcctagttggtgcgagctttgccatcgacatgtgtgtggggagcttgatggtcttcatctggcacatcattgacagaagtaaagcatctttaatggtgccagcagttgcatctgggttgatatgtggcgatgggctttggatcttccctgaatccttgcttgccttggccaagatcagtccaccattgtgcatggcattcaggtcttcacactagagtaacaaaatgctcgacatctgagaacagttccatgtccaatcggagaagctgttggcatgccaagtttgttattaattagctgggatatgatacatgcaggtaggtaaagatgcagtgcctatctggatgttacctacatataatgacgtaatgtggtacccctgtaaaatttatcatatgcaagatgatacatcacattagagcaatggtaagtttgagaatttcaccccagtggtaatggatggatgcaagagctagcagtagccaaaattttgcaccataggttgtacccccacccctatagtttaatatggaaccacaagctacagtatacaaaccatcttccaaagacagctgaccctattgtcaatcacagctggttttggtaaaagaaaaatgcagtcaaatcttgcatgaatggttagcaaatcatgtatatatttatgtatgtctttgccataacttggattcacaagatgcaatgtagtaagaggcatcttggtcaggcatctgatacaattgtaaaatcatctgctgcgtccttttatcataaacaaaatcatcaggtgatgtatgcctatgaatagttagcaaaaggtacatatatggttatgtatattaaacacgttctgtgaagaagaaatgtaaccattcaacaagaacaatccaatgatacatttgtcagc

SEQ ID NO: 40465 - DNA, 2483 bp, Zea Mays
tttagctcaactctgcagtctagctacacacaatagagcgcagccgcggcgtgatatggttctatgatggttctttgctgttggctagatatatatgctgctagctactaggtgcgtcatccccttgctatgcgcgggttaagtatatatacacagtatataaaaagtatataaagtcttgctgctggcttgagctccttggatacacctatctgcttctgctagctttctttacagagacgacaggatagctagagccgagggagagatcagggtcgacgatagatgggggtgcatggggctgttgccaaacgaccctgcagcaggcagcatctcctcctcctcgtcgtcgctattctcataggtagctacttcgccgccgccgccgccgccgctgcggacgagcagaaaagcaggaatagaggagctggtcgtcgcagccgcaggaggcgggccgcggcggcagtgacgtcgccgcctgcgcccctcatggtgcccatcaccatcctcgagtccgccgtcgacttgggagccgtgtgcatggacggaacaccgcctgcttaccacctgcacccgggctccggagcagggaacaacagctggatcgtcaacctggagggaggcggctggtgcaacaacgtgagggcgtgccagttccgcaaggcgagccggcgcggctcgtcggacctgatggagaaggagatccccttctccggcatcatgagcagcagccctgtcgacaaccctgatttctacaactggaaccgggtgaagatccgctactgcgacggcgcgtccttcgccggcgaagccttcgacaaggtgaacgggttttacttccgcgggcagcgcgtctgggacgccaccgtccggcacctcctctccatcgggatggccgctgcggaccaggtgttgctcgctggctgctccgccggcgggctggcggtcatactgcactgcgaccagttccaggccttcttccctcggtccaacaacgccgccgccgccggcggtaccaccaccactactaccgtcaagtgcctcgccgacgccggcctcttcctcgacgccatcgacgtctccggcgggcgcagccttcggtcctactactccgacatcgtggccatgcagggggtgggtcccaacctgccgccggcgtgcactgcccgtttggacaccgcctcgtgcttcttccctcagaacgtgatcgatggcgtaaacacccccatcttcctgctcaacgcagcgtacgacgcctggcagatacaggagagcctggcacccagcggagctgaccccagcggagcctggcgagcctgcaagtccaaccactctgcctgcgacgcgacccagatgaaattcctgcaaggtttcagggaccagatggtagcgtccgtgttgggcgggcgcttcgccggctccaggagcaacaacgggctcttcatcaactcctgcttcgcgcactgccagtccgagctgccggccacctggagctggagccacgcggcaggtgcctcccccgccatccaaagcagggggattgccaagtcagtgggcgactggtacttcggtcgagctcaagtcaaggcgatcgactgcccctacccctgcgacggaacatgccgcaacatcatatgatcacagacagacaggctcatgttgttgtaccctgtggctttgtgccgcacacgtcggccgtgtccgctgcagcttgcataactctcgtgggccactaaaagccgacggaattaattgattctcgtcggtggtcaacagaaattaattaaaccttgtccacaaagtcccatcggttctcaagaaccgacgagaattactaattttcgtcgatatattgcttattctcaggtgtgagaaatgttcccgtcattattcatcaagaatggcactcgacatgtgtgttttgccgaatgtccgataaattgcacttaataaatcgttgcaaagagtaagatacccagtaaatattttatcctgctaaatttagaattctgccggattttggtagtgtactcagtaaatattttctgctgcttaattcagagttctgcgtacctgcccgtgctaatcctgtaagaactgaagaatgaattatgcaaaaactctttgattgagcatgtcatatttctgtacaactagtgaaattgatgctatacattctatgaaaaataatatgccgaggcacaggatctgctgataacatcaatagcccaagaaaaaatcagctgattcctgtcatgaagtgcattcctcattcgtattaaccatctttgtacatttggagactggagccactgcaactgaaggcaccggcaacatttctcacaggaagatcatgatgcagcttgggcagcaccaagtttgttagctcctttgtccagtttcttttttgacaccttttgggatgcttcctcctcttgattcttcactactggtttgaactgttgaaaatgaaagtataattt

SEQ ID NO: 40466 - DNA, 1096 bp, Zea Mays
aacctcgaaagattaccaaagctgaccctccagaaaaccaagaaagctcactcctcttccctctctctttcctctcttgcctccgtcgccatgacccaccgcctccttcccctgctcctgctgctccctttgctagcgccgcctgctgcgtctgcacgccagggcgcggggcaggatttgggacagttcccggggctggagtacggcctgccgccgttcgccgccgctctccgggcaagctgccccgtctcgacggaggggtactcgccccccgaggaggtcaagaaccagtcgcatatattggtactcgcaagtggagggccacgcaaagcacagactatgctaagatttggaacagctcgattagtgaaacagtgaagcaagaaccctgcctagcattcagtatcctgtttgtttgcctgaggatattcatcttcttcttcccaaagttctttgctctcgtccaagacttctggacccaatactatgagcaaatcaaccttggaatcctcgccaaattgacccagctgcttgaatgtgtgcctcatgctgtggacgtgagaaagatgtggagcaagttgaggctcatggttggagctaagaacggtaggatatgggcatcatctctaacttcggtgtcacttggtgggcagccttccaggcgagttgctgttggactgatgggctcgaccatctaacggcaacaagagaacgtgctgattcattgaattgctcctgttaaggttgtaactcacatgagcatatttagacagaaattgaattgctcatgttaaggctgtaactcacatgagcatatttagacagaaaaggtctctggctttctgcttagaaacatacatcctgtttgtagcatgtaaatcttagcgatacttgtagcctttgtaagtcatgttgtaacattagtcgtcagtgccccgatcaggcaggctgcctttggcaagagaaaatgcagcacaagcttggtcttcccctccccagaatacatggtcaaatgcgccgttttatcatgtaatctgcaatgatcaatggacatccttcagagatcagtgtcattttctgatggctttgaatttca

SEQ ID NO: 40467 - DNA, 4924 bp, Zea Mays
ttatactataaattttattttgttttccctcaatctctctcctcggctgctcgcctggcgtcgcgtcgcctgcttcctcgttcccgcatcgagacgccgcttcccgtcccttccccctcctctctctctcctcccggccaaccaaaccctaaccctaaacccctcccccaccaacctcggcccagtctccccacccccactgacccggctccccacctccgactcgccacgctggcccgattcgatcgatgtacgtgagcgagctcccgacctcatgatggttttggctgcggggtgaaaagaggcacagcaagcgtcgatggcattgggagatctcatggcgtccaggctcgtccactcctcgtcctccaggggactgtcgtcctcgccgacgccgccgttgcccaatcaacaccaccaccagaaccacaaccataccggggatggcctcctggctgccagcgggccggagcccaggaacgggctggaggccgacgaggtggataagtcggcgcccgtgccgtacctgccccagctggtcgtgctgtgcgagcagcgccacgagcctgaggggatcgatgaggctgcggccgcagccgcagggccctccaccagtggcctcgtctccaagtggcgccccaaggatcggatgaagacaggatgtgttgcacttgtattatgtttaaacataagtgtggatccacctgatgtaattaaaatttccccttgtgcaagaatggagtgctggatagatcctttttctatggcacctcctaaagcccttgagagtattggaaaaacgttgcattcacagtatgagcgctggcaacctaaggctcgatacaagcttcagctggacccaacagtggaggaagttaagaagctttgcaatacttgccgcaaatatgccagatcagagagagttcttttccattataatggccatggcgtaccaaagcctacatctaatggtgagatttgggtgtttaacaagagttacacacagtatattccacttccaattactgatcttgattcatggctgaagacaccttcaatttacgtttttgattgctcagcgtctggaattattgtgaaagcttttctagagcgcctagattggagttctagctcctctgcatcttcacggaaggactgcattcttcttgctgcctgtgaggcacatcaaactcttcctcagagtgcagaatttcctgccgatgtgtttacagcttgcctcacaacacccatcaaaatggctttgcactggttttgtaagcgatcattactccgtggttctctggatctttctcttattgaccaaattcctggaaggcaaaatgaccgtaaaactcttcttggggagctcaattggatttttactgctataacagatacaattgcatggaatgttcttcctcatgatctgttccaaaggcttttcaggcaagatcttcttgttgctagcctctttcgtaacttcttgcttgctgagagaatcatgcgatcagcaaattgttctccagtttcttatccgttgttacctccaacacatcaacaccatatgtgggatgcatgggacatggctgctgagatttgcctttccaagcttcctcagttaattgctgatccaaatgcagagtttcagccaagtccgttttttacggaacaactgacggctttcgaagtgtggcttgatcatggctccgaggacaagaaacctcctgaacagttacccatagttcttcaggtcctgcttagtcaatcacacagatttagagcacttgttctgctcggaagatttcttgacatggggccgtgggcagttgatttggccctgtctgtcggaatatttccttatgtactcaaactgcttcaaacaagtgcaatggagttgcgtcaaattcttgtgtttatatggacaaaaattctctctcttgataagtcgtgccaggttgatttggttaaagatggaggacacacatattttgttaggtttcttgacagtttggatgcttacccagaacagcgtgcaatggctgcttttgttttagcagtcattgtggatgggcataggacaggccaagaggcttgtatgaatgcagggcttatagatgtttgcttgagacacctgcaacctgagaatcctcatgattcacagacagaacctttacttctacagtggctttgtttatgccttgggaaactctgggaagatttccctgatgttcagctgcttactttacaaacaaatacgccagaaattgtactatgcttattgtcggagcctcaacctgaggtcagagctgctgctgtttttgcacttgggactctcctggatactacatcatcaaatggcgctgatgatgattctgactatgatgaaaaggtgaaagctgaaataaatgtagttcgaagccttctgcagatatcttcagatgccagtccccttgttcgatctgaggttgctatagcgcttactcgctttgcattgggtcataacaaacatctcaaatctgttgcggctgagtattggaaacctcaatccaattcattgctgaagtcactgccatcattggcaaatataaataacccaaacaatgtttacagtcccaacaatattctacaaggcagcattggtcctgtgctgagggttggcagtgatagcagtgctgctggtcgtgatggaagaatgtctacaagtagcccaattgcaacaagtagcatcatgcatggctctccccagtcagacgattcttcccaactctctgattctggcttattactgagagagaatgctagtaatggtggtcccggctacactaggtccaggcctgttgataatgtcatttattctcaatttatatcaactatgtgttcttttgctaaagatccttacccaagaattgcaactattggtcggagagcactgtcccttataggtgttgaacaagtagtcatgaaaaatactagatttaatagtggaggtgcacatcggggagagacatctgcttcaaactttggaatggcacgctcttcatcctggcttgatatgaattctggaaacaacttgataaaatttaggacccctcctgttagccctcctcagcatgattttcttccaggattacgccgagtgtgttctatggagtttggacaacatcctataagttcacctgatggcttagctgttccccttttaagctccgctgcagctaccagtaatgctgaactaagtatactccctcaatcaacaatttataactggagttgtggtcacttctctaggcctcttttaattggctctgatgataacgaagaggcaaatgctagaagggaagagagagaacgacttgcactagattatatcgctaagtgccagcgctcctcttgcaagatgacaaaccaaattgctagttgggatacgaggtttgagttgggaacaaaaacagctttattgttgccattttctccgatcgttgttgcagctgatgaaaatgagcaaataagagtgtggaactacgacgatgcgctgccagtgaactcttatcaaaaccataatttgtcagacagagggctatccaaacttttgctgattaatgagcttgatgagagcttgcttttagctgcctcaagtgatggaaatgtacgtgtatggaaaaattttactcaaaagggaggacaaaaacttgtaacggctttctcatccgttcagggacatcgaactgctggtcgcagtattgtgattgactggcagcagcaatctggttatctttatgcatctggtgacatgtcttccatcttgctatgggatcttgacaaggaacaacaactcagcactattcagtcatctggtgatagtgccatttcttcactgtctgcatctcaggtctgctctggacattttgctgctggttttgctgctggttctgtcaggatatatgacatacgctctcctgatagggttgtctatacggccaggccacacgcaccaagaacagaaaaggttgtaggcatagggtttcaacctgggtttgatccttacaaggggttcacttacagcattggcggttcaccggcatgccccagttgttgctagtggctcagccaagcagatgattaaagtgtttagtcttgaaggagagcagttgacaataattcgctaccagccatcttttatgggccaaagaataggcactgtgaactgcctttcttttcacccatacaaatcactcctatctgctggtgctggtgataatgctcttgtctctatctacgccgaggaaaattacaagtaaggtgaggcctacatctcatgacaatgcagccacaaggcaaccggcaggcctggtgttttttggccaagtgatgctcccccgcagcatggtccagctacaagatccaagatggtgtgaagaggctcccggtgcgtattgcctgttgttggacgacgtgtgcaatttgtaagatagagccaagattcgttagccgcctccttgcagaaggtttgtggaacccctaccctgatcatgtcattgaacttggaggctccccccaaataattaatcatacctaggttaaccaaaatgtaaatagacaccgcgtttcgggttgtcggtggtcagcattcctccttttgaagatgcttgtgatgatatgagaaatcaggtttggtaggggctgctgcctgggcaagtggggtttgtgcatatgggcccaggtagtatggttgcacatgtctgctcacagatgctgttgaatggaaggaatgttgtctagtcgcttgcattgtaaccattggagattgtccatttgtatgtatggatcttgtctgtacatctgtaatccgtgcgatgatgtgttttatggaacagtccaaggcttcaggtcttgtggatgcctgctgtgcaattgtttcgggaaa

SEQ ID NO: 40468 - DNA, 2435 bp, Zea Mays
atgcacccacgccccgtctctttgaagccgcccgcgtctccacccgagaccccgacccaccccgccctcccccgccgtcgcgctcgcgctcccccgcgacagccgccatgcgccctatctccgccatgcctgcgcctcctcccccgcccgcccgagaaccaccaagtttcccttccttacacagcgaggtccaccatcaacgcccccttccctggcaagccacagccgtccacgttcctggccaccagcgacctcccttctctagcccttagcagcgagcaacacctcctccccatggctgcccccagaccccagtcccgtccgcgcatccgctcccccgtcagcgacgcacctattctcctcgacgtcgcccatggcgtggacggcgacctccctcaccctgcactctggtatgtcaccgtattgcccgcctcctttccccgcaccggcgcagccccctgttgcggcggccccttccccaaacagcacggcaccacgtgctccccctgccgcgcccgcactctccttccccaaacagcacggccccacgacgctcacactctccttccctggcgatatcccctcatctgcgccttgtccctcggagatccccttccatcttcggcaccgagaggaaaatggatggcaatcccatccatcggcgccaaaccctacacatcctccatagtaggcacccgcccctccttacgcggcaccatcggtggggatatcccccaatctgctggaaggagtccgcgccaaatcagagcccgaaatccgtgccaaatccacgctggatgaggtggtggggagaccccccaatctgcgtcccttctacatgcctacacatcctccatagaaggcgccctcctactaaccactaaaaaaccccttccacacgctgacaactccatatatattagtccaaagggagagcacgattaaggccacgcctaccagcttcaccctcctcgcatttgtaagtccaatttttagatttatgatttcagatgttgagttgattttgcaaactggtaagtgttttgtttcatacggcaactctgcacatggacagaatcacagctctgttagcgttgttttatcaagttcttctagcagttgaagtagtgttttcttggcagatgttcgcctttaggacattgctgcgaggggaatcggatatgccacaggctgcatgttgttggagtttctatgtatccccatatcaaatttgtttttccctaatcagggaactcaattgtgcgagtaatagcaggagctcttccgaaaggccttcacatgttaatcctatcgaagaataacatatcaattattgaacgcctcagagaattgacacgattgcgcttgttggatatcaactataataggatatctagaattggccatgatcatctgttaggattggcctcatgttcctctttgaaggagttgtatctggtcggtaacaagatcagtgaggtagatggtcttcaccgacttctgaagctcaaggttctggacttgtgccacattcagtcttctgtagccactatacttggggttggtgaggctggtggaaggtttcagttcttctatacgtggaactaacctataggaggccagactgctagagcggtagagccagaaagtaatagttggtgacttggcggggacatttatgttatgctacctaattattaatctgtggaaaaggggaagcttttggagtagagcttattttttgttcgggttactatttcctctaattgtgtgaaaactgaaaagtatggttcgtgtctgaaaagcaatagttggtcgaggcatatttttgtatggttccactgtactaccttctatctggtgaattagatcccgattctaaataagttgctctctaatcagattaaacactttaatgtagctggcaattgcttattttgcaggtgcagaggatgctaggaaaatactcaataattatggtacatgtccaattctaagtatgaaagtcggggccattactcagatggtaaacaaacttgggccatgtaaatggtcgaccttgcctaaactatacctggacgtattggaaagcaatgctgggaaagctatgccatgaaagatatttgtagcagtgttacatgatggcatcaagtgctgggaaaatatttattaatttatggttttgtttctatggaatataggagtcatgattttgtgcatttgatcagagactacattaactagaggatactttctttttttcaaaattacaaaaacaatactaagtgtacctattattgtctactcgtctcatgatgattactatgtagataaattctctaagctatgaacagtgaccaatgaaatatattcatttgcatacagttctcaaactaatgtattcacgtcattatatattgtgccagctttgtcaa

SEQ ID NO: 40469 - DNA, 2112 bp, Zea Mays
cagcccaaaatcccacatccgcacccatacggccacacactgaaacacagctatgtgtcgttaaaggcaaacagacccaggattatgtctccaattaaattcccagaaaactctgctcaactcgttctatcgtctgtcgtctcgctctccacatccgttgatccatcccttccaactccaatcaactccgtcccaaactacaatccgtggcaacagaaaaaggtgtatcttttaccagaaacagaagctagattcccggattgctccgcttgatcgctggtgaatcgacccaaccgagtggcccatggccggaaccgagcggctccaccgcccgattgacccgccgcggcccgcgggcagccgctccgtcgtggtcggtgctggtggctcgccggcgaggtgggacgacgataacgacgactgcggcggcggcggacgtgtcgaaggcttggcgggactccacatatttgaccaagaggcagaggagtcaccaaccaaaaacgacatggccaacagccttgatactaactgcactcccattgctaaaggatgcaacactgaaacaaccgaaacttctgtagagtcggaacctgtaaatgtcttgaacctgcttcatgatcataccggcatctgggtccctgtttctgtcccgcctatgacagcgctggccagcgaggattggcacagagggtttcgttgcaatggtgggcacttcccggaagaagagttcagctgggagctggatgaagacaataaggagatgacaatgtgggatgtttttgctgatatggctgtcgcagcaaaagataaggtgatatctgctgcaaaatatgagtatgggagatgtgggatgtcgacagtgtccaacttctttctacaagaggcttggaaggatatggcacaaacacttgtggatgcaaacactggtattgcgaatgagcttcttgagacagagccaactaagtggttgcctgacagtgctgccacctcttgcatgctctgtggcgtgcgatttcatccaataatgtgctctcgccatcattgtcgtttctgtggtggagtattctgcaatggctgttcaaatggcagaagcttgatgcctccaaaatttaggactgcagatcctcagagggtttgtgatgtctgcggagtacgtctagagagtatccaacctcaattgatgaatcagattagtcgggcctcacaacttccaactcgggatgtcacagacctgagtaccttgaggtcatggctgaatttcccttggtcacacacaatggaatatgagatatacaaggctgcaaattctttacgtagttactgtgggaagactgaaaccagagaagtctatccctgatactattcttagacaagcaaaaggccttgctatagttactgtggtgaaggttgggatgatggttacatacaaacttggcagtgggctggttgttgctcgaagagtggatggctcctggtcaccaccgtcagcaatctccacctgtggtattggatatggggctcaggctggaggtgagatagctgactttattattgttctgaggaacacggatgccatcaaaacattcagtgggaaggcacatctatctgttggtgctggtgttagcgcttctgctggccatgttggacgtgcagctgaagctgacttccgtgctggtgatggtggttatgccgcatgttatacatacagttgtagcaaaggtgcctttgtgggctgtgcgttgaatggcggcatagtatcaactagagacactgagaacgcacgattttacggaggtcctgtccaggcatctgatatccttctaggatcgacggcgaggccgcctgcagcctctcctctgtacaaagctctgtcagaattatttgacaagattggaaagtaatcctctctcttgcagaccctgcctcaccttgtaaatacaatcgaatttgtgcccttcaggaattggttggaaacaattgcgcaactgtacagtaaggccattcttcaacacgtcaaatgtgtttagtgatgctaccaacaaaaccactctgtaaatatttgtacattggattgacaatcgcatcaagatgtgaaaaaaggtgtttattctt

SEQ ID NO: 40470 - DNA, 265 bp, Zea Mays
aaaataaccagataacaaaacatgtttcatttcaacggattcgtctgtcaactggcctccaaccacgagtcttgttgtagatctcacacgccatctttttgattttgagacttccgagctccaccaattttcttgccttctttttttgacgaatagcccaagtattaagccaaaaacaacaagagaaaatcacattagtcggatcatcaattcggttagtcccaaagcaacaattattgcgacatctccagatcgcccaaatgac

SEQ ID NO: 40471 - DNA, 4883 bp, Zea Mays
aatcacgccgcatgcgcttcttctccgtgcgtctctatctcttcctccaacgctcagccgtttctccccttcttcacaccgcgcgcagctcgcgcccagcccctgcttccagctcgccatggcgctcggcgtctagctatctccgcgccggaccccctgctcggtgccctccccactgcttccctctccccgaccacgccctgcatcttccatgggcgagcatcctgccgaggtctctccatggccaagcacgcgcggacctgccccgagctcgccctgcgctcggattccgtctctctcgcgcgtcctccctgcttggcctggccgtcagccctccccacgctgctctctgtctctcttctggccgcgctcgcccagcccagcaacccctcctctctctccctcaagttctctgcccggtcgagctccctagtgccgcgccccctgctccctgattttcttgctcgtctccatggccgtcgtgccgggctcctccctgttcctgcgcggtttcccagcttccctgcgcgttcctgaagcttttccatggcgcgtccctggttcctgcttctgttctgtgcgcgcgccccatctcgccgcactcagcttcagctcgctcggccccttccccgcgctctcgcgcccagccgaagtttcctgcgcgtgctagtcggccggagctcctggctcgtatccttccagctcgcccatctgcgcgcagccgtgtcttcaagctcggtgctcctctctgctcggctccgccgcgtcgcgttccccttcccagccatggtggtcgatccctgctgcgcagctccttcggcgccctccctgccgcagcacacgcccgtcgtcctgcctgctcgccgcgcgcgctactccctgtgctcgccggtttttactccggcacgcttccagcgccgtggtctcgccaagatccctgtcgagctcgtccctgcgcgcgcgttttctgcgcgcatcttcctcaagtcgtcgtgtgcccagcttgccccaactcccgttcgtagtggtcgccagtcgtcgatcttgccggttgtcgtcgtcgtttgtcgtcgcgtctttcgccgtcgaccttgcttggtcctatatcaggagaagacgaacctagcagcgtgatattcaccaagtgctcgacaaaagcttgaacaagtcgtcgatcgtcaccctcgtctacgccaagctctgagaagattaggcgcagaggaaaataaatcagtacacggccagagaattctcgatgtggacacagaagaagcgtgattcgacgcagcactcgccctgttttcggtgaaatgctgagctgaaaggtgtcgtcgatttcgtggtttcaagtcggatattataaaggtaagttaattcgtattccagtgaactaggtctataaatagattaaatagaattattagtcgcgataattgttattaatttagtatacacatattgtgatgtttgatttagataaataggtaaatcaagtaattaaaatacatagtttcaagagttaataaaaagctaggaataaaaatagatattctagtgttattatgtcaatttgattaatggatgtagttgatgccctgctgtgatatccatgatgcttaatgcttggttttaagtgttttatcctttttagtgtagattatctatattatactcgttatacttgtgctcatacatgtgcatcgtgcatctgataaggtacgataaataatcgcgtgatgtggaagacgaaccaagtcgactccaagcgcgggctaatctgcaagatgaagctgatggacaaacctgaaggtggataatggagcgtgtaccagaataaaggttgatcgtgaagcagacatcgcctaacaaacactaacctagtgttatttaggcaagccccggtgcatttgccacctccttgatattttaaaaatctttatcaccttgttcgatgcattaggtgataggagttgtgtgctaaaccgttgatgcatttccttccttgaaaaattgattacccttccttgataccctttttgaaaagaattttatgatgcttagccttgctttagcaaacaaaaatgttttgttttcaaacaaagttgatgcttcagtgggtgggaatgatttcaaaaataaaacttgatggtgaatccatcatggtcgtgatgggttcaacatcggaaaagatgtacctctgtcaggtaccaaactttgggttgaaaataataaagctgagaccagacggttgacttgcacgagaagagagtctcggtgtagtgtctccgtctgagtcgattaaggaccgtgtcgatgtaggcctgctgaccgaggaccctttaactggtcacatgcctcatcatgggtaagctttgcctcgggtagactaataccagaataagataacacacaatgggagtggagagatggcgagagtagcgtgtaccctctgtggcaagaggctggacggtggtgtatctgtgctctcggttggcgtgaacttgatctggtcttaagaaccccggtggcgagttgacatatgcaagggttaagtgctacatatgtcgtgtgattggagatcctcagctgagtataatcgattcggatcgctgtaacttcgcggacatgaagacttggtcactgacttacacgtagcaattcagtgaactgatgggatgataaaagacggctagtgcaggtcaagtgattgaactagggtagaaagaactctagatgcaggtaattttatttaacctgacaagtaaaaatggatttttaaggatccacttttagtaagcatttatgcaaaacagagtctttgattcttgataaggcataccttgaatccctctagacagcatacccttgagagtcttttctttagtcgggtaagtcttgttgagtaattccgtactcagggttttattcccagttgttttcaggttatagttttgtgctgctgatgatggtgttaagtgtcggtgggctcggccttcttataagtctaagtaactcttctatacttcttattgaggatggtcagttgagctagcatatatttcaaacttatacttttgcaatcactccgataaaataatgacttgtaaaatttggtaataagatttccgctgcaaaaatattggtgtgtgtgatttgtgttacttaatctcgcgatcttggttgtaagtggtttatccgatgtccttggggcaatcagacggatcctgttaagttatctggtgcacatgcatagccgtctgaggtctttgagacaaggacaggtgcatgtgggaccaataacttgggaggttctgccacaccctatccgcgaggcgaagagggcgcggggaggcgcgaagtccaccgccgcaggcagcgacaaaccaccgccagctacgaagccggctgttctcgggcccagcaagtcttcggcaggtgcgagggctgttgcctccaacgcgggcaagccgccctcggctgagccaacgaaggagcgaaggccgccgtcatcggtgcgcaccgacgaagcggcggcgggtggtgccgactttgacacggacatctgcgtggatgattacctcgttggtgagtttttttgcaacggcaatgatggacaaggttatgatgcagggtcagatgtggggcaactggctgttgtcccgggttcggtggcggacactttgcctatggcagcggttggagcgaagggtacttcgcaggacccatggtccaaggtctgcgccagcggtgagatttcgtcggccaccgccgctaaagacgtggcgggctctgtgtcccagcaactgaggcatgcgtccgagcagctgaagcatgcgactgccttcaccgaccatgttgcgtcgggcgccctgacttcggagttcactgccgagaggcaacgactcgagggcaggatcgagcgcctccaagcgcagcatgcggatgctgctcgagacaagtcagctgcggaaaacaggagccgcaggctgtcggagaggttggtggctgcggaggccgagaaggaggatctcatgcgccagttggcggaggagaggagggatgcaaatagagcctgtgctgaggcgcaggctgcacaagccaaggccaaacttgcgcgggcaaagggcagtctcgcccgccaacgcgtcgaggagatggagacgaggctcggcggcctgcgtgaccgcttagacaagatggaggcctcgacgcgcgtggaggtcgagcggacgcattcgcagcttgtggacgcgtactgggagctgggtgcacggaccgctcccttcgaagcgcctggtcaagatgtgggcctctgcttccttgggtggctacaggaggagctggaggtgctctcgacaattttgacgggcctcatgtccttcgcctccctcgtcacctgtgaggggggcgtgaatgccttgtcccgggagggatgcgggcacttcgaggtcttcgaccagtcggacaaaggcttcgagcgtgaaatcttccaggtcgaggacccggaattgaagcggctggctggggcgctttttgacatgatgtggggcccttacggccgagagactgttcgggagaggtctgaccgggcgctggatcagatggcgcatgatgaagaggtcgaggacctcggtgatctggtcagcacactgcccgaggcgtgggggtggagccggcgcccccatccgatgctggcgagggccccttggcgacccccgtgccgactggagctgacgaaggcttcgtgccggccactgcgccgacgggtgaggacgcttcgaaggtggtgggtgaaccagctgccgaagacccagcagcgtcggtcgggccgtcccaggtggcggaataggggctagggctttcggtgtaaacttttgtttttg

SEQ ID NO: 40472 - DNA, 2761 bp, Zea Mays
agttatttgagtataatgtctctgcaggtagcaaatattaatgccaaagaagagacaccagttggtcatggagaagtaatatgctttagcatctattcagcaaattctgatgtacaggcagctgattttggaaatggcaaaacttgcatttgggttgatgttctagatggtggaaggggtgtcctgatggagtttgctcctttctttgaagattcatcgatcaagaaggtttggcataactatagttttgatagccatgtcattgagaattatggaatcaaaattgctgggtttcatgctgatacaatgcatcttgcacgcctttgggattcatcaaggaaaattgatggtggatattcacttgaaggacttacaaatgaccgtagagtcatggatactgttccagaggatttacctaagcctggaaagacatcaatgaaaaccatctttggcaggaaaaatattagaaaagatggatctgaagggaaagttgtatctgttgagccagtcaagaagttacaaagggaagacagagagttatggatttgttattcttctctagattccatgagcacattgagactttatgacagcttaaaaagcaagcttacaacaaggagatggatcttggatggttgtcctaggggcaccatgtatgatttctatgaacagtactggcgtccttttggtgccctacttgtgaaaatggagacagagggaatgcttgttgaccgtggttacctttcagagatagaaaaggctgctattgctgaacggaaacttgctgcagataagtttcggaaatgggcatctaaatattgtcctgatgccaagtacatgaatgtgaatagcgatattcaaattcgccaacttctctttggtggcattgaaaatagacacaaatctggtgaaacttggccacatagtaaaacttttaaagtgctaaatgaagaaagtgttgctacagagggtaagaagacgtcaaagtatcgtacaatcaaactttgcagtattgttgaagatctgaaaatcgatatgttcaccccgagtggctggccaacagtcagcggggatgcattgagaagtttggctggtaaaatacctacagaatatatttacacaatagatgatattcaagatgatgatgaatataccagtggttcagaaaacccagatgggaattcctcttatggaacagcatatgaagcatttggtggaggaaagaatggaaaagaagcatgccatgcaattgcagctttatgtgaaatatgttctattgattctttgatatccaatttcattcttccgttgcagggagatcacatatcatgtgcagaggggcgcattcactgttcattgaatatcaatactgagacagggcgcttgtcagcaagaacaccaaatctacagaaccaacctgcccttgagaaggataggtataggattcgccaagcttttgttgcagccccgggaaattctcttatcgttgcagattatggtcaggcgggtggtgatttccattctaggacagccatgaatatgtatcagcatatccgtgatgctgtccaagaaaagaaagttcttcttgagtggcaccctcaacctggtcaagagaaacctccagtgccgctattgaaggtttctgttaaagaggcaagagatacactgaagctctggtacagggatagaaaagaagtgttagcttggcaaaaaagtcagaagaagcttgcaagcgagaagggtgaagtctacactttgcttgggcggtcgcgccattttccttacctgactcagtatggtcctggccaacgaggtcatattgagcgtgctgctataaatgcaccagtgcaggtacggatcactaactgtggctcaatgggtacgcttcattgcttctaaaacttgaccttcagcttggtatctctggttggcagggaagtgcagcagatgttgctatgtgtgccatgcttgagatcgaaaggaatgtccgccttaaggagcttggttggaggctcttattgcaggtgcatgatgaagtgatactggaagggccttcagagtctgctgaggtggccaaggctatagtggtggagtgtatgtccaaacctttctacggaaccaacatcttgaacgtcgacctggctgtcgacgccaagtgtgcaaagagctggtatgctgccaaatagactgaggagacgctgtcacctgccacaaggttgatgacaccagtgcaatcgagaccccactgttcggataaaaaatggtggacccgtcgtcatgcagactgcggttccaggaccttgagtttgttgtggtggtaacccaggccctgacaagacaacacgcccatttcttggctgcagcagaacagcggaagacacggaggactctgctgccagcacctggagttgcgcggtgccaaagcataccagacagaattcgagatggcttggatctcgagtgaactagcgcggtgccaaagcatgctgttttgttcataatctcacttgttcagcgtgctggtgcgttaggttagtttacagatttgttctggtgcagtgaggccaattatggtccctgcggttggtatcgatcttggattgtgcattgcatgtagtaccatactgcatctacactgggaccatttttcagataacagaaacattcagcttcatcctcgaaagagaatcagaccaacttgttacaaaaaacagtttcaaacgactggatcaagtttacataacaaaaccgtctcaaaatt

SEQ ID NO: 40473 - DNA, 4379 bp, Zea Mays
gccgaaaaagtgcagctcagccacgaatagcagaaatggccgcagtagtgttttggtccctccgccgccccccacggtctaacacacccgcccgctaattcgccgaccagcctgccatcacccgctcgctgcagccgccgcgcccctcccactcaccaacgcggcaacgcccatggcgcccgtctgctgaaaacacccgccgccatgcctcgcgaccagatggtgaccaatggttttggagcaaaaagggataatgcaggggcaaaaaaatctccccagcaaattcagaggctggagaagttttactctgatgtacagtatccaaagccagaggaaatgggtgagtatgcaacctgtgttggtttgacttacagtcaggtccgtatatggttcaaagagcgaaggagaaaagagaggaggatggagatgggagccattgggtctcagatggaaaggcaatttagtgcacgttccagtggacctagatgcagcagcagttcttcgttttgtaaccaagctcccatctatgacatttcacgttcagagtcggacacctggggtatgagcacggcaggagaggaaagtaaaattctatcacaagttctgtttcccaaggattatatcctgagcaaaattttccgcaaggatggtccacctcttggtagtgaattcgaccccctcccccaaagtgcacatggctgtatcagagacactacatgccatcattcctctgagaaccaaagaactgtgaagaagagaaagatcatagagtcaactaaccagagatctgatgtgtatgagaatactgctcctgtgaggaaacatggaattggcaaaggtctaatgacagtgtggcatgccatgtattcccataacgtgaaatgtcaaagcggtcgaaatttcattgatgaaactggttgcttgaggtctcttagaccgtttgacgattttgatggattagaagatcgcgataatggaaggaagactcaaaatcaaggtatgacacggaaaaagatagtcaaaaggagtaaagttctggtgaatagaaaaaaggtgccgtgtaagagagttactggtccaaaggtgcatcctccaatggcttgccatctttcagttgatgaatcagaatctttagaactacagactgaactagtgactttagtggatgatgaggagctcgagctcagtgaattacaaacaggtccgaatccattgagatgttcagctcacctgtcttcaagtggtagacatgactgccccctttgtaaagatttacttgccaagtttcctccacaaagtttgaagatgaaaaagctattctctacaaaaccttgggagtcatcacctgaaatggtgaaaaagctttttcagtattgatgtccaccccttcatatttgatgagtttgtgcaagcattccatgacaaggactcctcgttgttgggggaagtacatgttggtcttctcaagctactgttgttaaaggctgaaataggaagtgatggtgtatttgttccacgatcttctaaagactgcagatttctcagtttcctgaactttgttagggaacaagaattcgatgccaatgtttggatcagatcgttgaatgctcttacatgggttgagatacttcgtcaagtccttgttgcttcaggctttgggccaaaacagcatttgctgaatcaagaattctttaacaaggagaaaaatcaaatggctaaatatggtttacgtccccgcacactgaaaggagaattgtttgcactgttgtctaaggcaggaagttgtgggttaaaggtttcagtactagccaaatcatctgagattattgatcttaatgtttcgagcccattagaactagagcagttgatatctttagctctctccagtgacatcacattatttgagaagattgcaccttctgcatatcgtctccgtgttgacccccaaattaaaggggaagaagattctatgtcagatagtgatgattctggaagtgttgatgaggatgaggatgctagccgaagtgatgatggatctgatggttcccaaaagttaaaatttcttgagaatgaaagcagacttgctcgaaggaaggagaaaaatgcacatggaagtccaaataaatgtagtgaaattgatgaaagttattcaggtgaaaaatggcttttggcattgatggaaggcgagtattcagatctaagcattgatgagaagttggattgtttggttgctttaatagatgttgtttctggtgctggttctgttccaagacttgaggaaccgcaaagagtcttgcataatgtgcccagagtgcatccaccacaatcaggtgggaaaataaagaaatcaactaaaaacctttgtcaatatagcgatgagtccttaaatggttcaggaagtttggattgttgtcatcaaggccagtcaggaaggcgaaaaaatcaggattacaccactgaccctggaaggaacgatttacctattgctgctcatggaccacaagttgttctcttaggatcagaccgcaggtataatagctattggctcttccttggtccttgtagggaagatgatccagggcatcgtagggtctacttcgagtcctcagaggatggtcactgggaggtgattgattcaccacaggaattactttccttgctatctatcctcgatagcaggggcactagggaagcacatctccttacatcgatggagaagagacaagcctgcctttttgaagccatgaaaaaacatgtggaaggagggaaggcagccaggcttccagcctcatctgattcatactgctcccagacaagtagtggagatggaacttcgcccaagacaagtagtgtggatggagcttcatctgtatcagacattgagaacacttctgttcctacaagcctcaaagatagtaatttggattcatcgtctgccgtagtaattgaaagtgggaggggaggtgatgagaaaatatctatgtgggaacggctgcaagcatttgataaatggatctggacttctttttactccatccttactgctgttaaaagtggcaagaagtcatttaaggagtcactacttcgttgtggaagttgtcatgatctatattggagagatgaaaagcactgcagaatatgccattcaactttcgaggttggttttgatcttgaagaaaaatatgctgtacatgtggcgacgtgcagggagcctgaactttcacatgaggtaccaaatcataaatttctgccatcacagctacaggcacttaaagcagccattcatgctattgaggcctctatgcctgaggcagcttttactggttcttggatgaagtctgctcacaagctgtgggttaagcggctgcgacgaacgtcatcattgccagagcttttgcaggttcttgtcgattttgtaggggcaatggatgttgattggttgtacaaaagttcatctgcgagattgagaacaaatctggatgacatcattgtcgactttcagacaatgccacaaacaacatcagcagttgcactttgggttgtccaattggatgccctcattgcgccttatttggataatgccatggcaagacagctggtgaatgctaggtagcttacaaagatggattcttttgcgtgatgcacaagcaccccgagctgacttctttttctggcaccatctgcaagttttttcttgatgaaagcttttcatctaggtgagacagaacatggggtctgctttgagttcgagaacaagatcttgcgacttgctgtaaagcatggaatatattgttccctcccagcagagcattgcgtcatagacaatgaaaaagttttgttaataatcgttgcttcagatatgtgaaagttttggctttccatgtagcgacacaattgggatgtaagcaatttctgaaacagaccgctgtttgcaggtggtgctgtttgggacttgattaccagctgtgcccttagttttaacggaggggtggttataattttgttccttctatatctgtatgtgctaagttgctcctagtccgtgagagctttctacattaggctatttttgtatgttatgtaaccagtttctattagagtgcagttgtagacatttagaacatgtacaccaatattgtgactgtttgaacaagtgagggaggcatagaagacttcatacggatgaattcatgattagaataaaattgcaccaaaaatcaattttgaaccgttacctttttggtatctcgtatatgttttttttttgtctatgtagtgctagttgataaatttcggatagatgtaaataggaaactgaaactctattcggatagatgtaaatagaaaaatgaaactctatttgtttaaaataagttaga

SEQ ID NO: 40474 - DNA, 1443 bp, Zea Mays
tctatggcggcggcagaggtgtactcgccgaccgcggcggcgcagcagcagagggagaaggcgacgtcgcaggtgtggcgggcggtggtggggtggatcggcttccttgttcaggttctgcttcagatcctccggggcacgccgtcctgcgcccaactctttccttcggcggcgtccggtacccgctcctcttcgggcctgcggcctcgaactcgtcgccggaggtggcctccgtccgtccagctctgaggcgggcccatggaaatcgttgccatatcagatcagcttcgccacggaccccatctgcgacccccggtgacgcgctccgcccacagctctgaggcgggcccatggaaatcgttgccatatcagatcagcttcgccacggaccccatctgcgacccccggtgacgcgctccgcccaccgcccaccgccgcccgggaatggctcgagcgctgctcctgctgcgagtagctgtagctcgctaccctcctctcccggcctcacccgcgctcctccagccgcagccgctgctgcgctgccacgcgccctcccagtacaaatcccagctccgcttcctctcctccctctcctcgtccgtgcccaacagctcagatgctcccagcgacggcgggggcgaccgcgacggggaagaagatggcgcgaagagtggcagccacgtcgattacttggggatgagcgacgaggagctcatggagcagtgcgatatgggcacgttcaaggcgtccggccccggcggccagcactgcaacaagcgcgagtccgccgtccggctgaaacaccttcccatcggcatcatcgcccaggctgtggaggatcgatcacaacataagaaccgagcgtctgctttatctcggcttcgaaccctgattgctcttaaaggaggccgataaacctggaagactacactccacctgttgagcttcttcagatattacccctgaagtccagcgttagaggaaatgatgttggcccccaaatcggtccaaataactcaaaattttctccaggaatgcaagcattattagacctgctgtttgctgttgaagattctgtatcagatgcagcaaagattttaggcctaagcaccggtgctttgtcaagattgattctgtcagatgattctctccgaacggccgcgaatgaactgcgagcttcgaagggcaccggtgctgtactacgtgctcctgacgttgcaggacagcgtgcacaaggtcttctacgccgtcgtcgaggccgctgcagttcgcgcagacaacagccatcttggagggttggcgaggtatccggtctctgcaactcttccacagattggatccagattattccttacatggggtgtcttctggagttttcctgaggtgattgactgactcgagaatttgccgacgcttgaagaaggacctaatgtgagcttttac

SEQ ID NO: 40475 - DNA, 968 bp, Zea Mays
ctattatgctgctttgttgagtgtgatttatatgatgcaaaactatttcaacaactgatactcgacttcttttttcaaattaggtaacttggttcacttaagaactacaccatcatagtacaatcttagtatttggttttgaaaaaaacttcaaggtcgatcttttcataacatttggaatcatgagcaggcatcgactttctcagctgcagtgaattgcagtcacatgatccaattagcctctactatgtgcatacatctcttttctccactacagcacaaccaataatttactatgctaaatggctaggagataaaaagagagtgtttggcatgacactgctacccctttcaagcaagtgctgcaagagtttgaggactggcttggaaatcacaacctgtggaaaaaggagcaagtggaaactgggatttgaagacaaaggtccctgagcagtgcaaggtttcaaaaataaatttacctacctattttatggaatggattaacttgaaggatatctacctcaacttctataacagaagggcaactggaatgatgacaatgatgagagaacttcaactgccaattgttggaaaccaccatctcgggatagacgattcaaaaaatatcgcaagagtggttcagcgcatgcttgctgatggtgctgtgattcaaatcactgctaagagacagtcagctactggcgatgtgagatttcttttcaaggaccgaattaggtgattgaaaagtgacacccccaattcatagtggtgctgatattagttgcctgaaaggcatttcaggattttggagcaaagatagagcgactgaacgctcaatcaacatacaaatatgtctagaaattgtgatgctttaaccaaacaagatcaaattactgtccccaagctcatcttagagtttcaactaaatcacaaattaaaggaaccgtgatatgtgaattagttaacgt

SEQ ID NO: 40476 - DNA, 1294 bp, Zea Mays
agccagttttttccatcggaacggcggttcgcgcacctaattatatgcaccacacgcctataaagccaaccaacccgtcggaggggcgcaagccagacagaagacagcccgtcagcccctctcgtttttcatccgccttcgcctccaaccgcgtgcgctccacgcctcctccaggaaagcgagaggtgagcgcagtcccctttcccctccttccaattcaattcgtcttctcgttcgcagccctaggatttgggggtctggaggggtttgatcgtttctcgccgtgaatctgctttggtgtaaaccaacggatctcggatcgtagtcttcagaagatcccggattttgcggtttggcccctcctggattcaattcgtcgtatcgttcgcagccctaggatttggggatctggaggggtttgatcgtttctcgccgcgaatctgctctggtgtaaaccaacggatctcgggtcgtagtcttcagaaggtcccggattttgcgcttctgcataagaacaacaaatcaaaagcttgatcagctcggtgcctacaaaacctcaacaaccaagtttcatgtctgatctcgacgtccagcttccatctgcctttgatccgtttgctgaggcaaatgctgaggactctggtgctggtcctggaacgaaggattatgtgcatgtgcgcatccagcagcgcaacggcagaaagagtctgactacagtccagggtctgaagaaagagttcagctataacaagatcctcaaggatctgaagaaggaattctgctgcaatggtactgtagttcaggacccagagctaggccaggtcattcagctccaaggtgaccagcgcaagaatgttgctactttcctagttcaggctgggattgcgaagaaagagaacatcaagattcacgggttctaagggacctgtaaatgcttgtgccctatattgtgtgcctccacatattggggagcttgaagcatcgacagttactagtcattgcttacttatataagaacataagtagtatttgctattgtcaagtgtgccttgcttgatgcaagttgtgttttcgtatcattattattatgcacggccatcgtacgtgtatggcttgtatgggttattgccaacttaataaaagcacactctgtttgcctataagcactgatgtttgcctcgtcatgcacatgttgagtcgggttttatttgtattattgcctccttgtatgttgtgatctagcagtgattcatgctgggtcttgaggcggcgtctggttagtccgatgccgttt

SEQ ID NO: 40477 - DNA, 1378 bp, Zea Mays
ggcggccgaggaggcgctcgacggctcggcgctgtccagtaatcagtaggcgccgctgcgtcggcgacttcttctccccaccagcgtggccgcgtgcagggttcaggctgtcacggaactcaagggtattagtgatatacaaaagtttgctttatggcaagtcagtgatgagtgaagggtgactaagaggcttctctaagtgtcaatatacaagacttcattgacgaggagatggtcccagttacattacatggttctgttggacacaatgaagccatccagatatgctattaaaatcctgctagttattatggatttaagttgtaccatgtctgttccatctacagctaggcagagcatgaactatcaaaggatcatgatacagacatctcacatcttagaaaattctgttcagtggttcttcaagggtacatcaggcgcataccaaaaccagtctcagccttctttcctgatccatgatgcctctcagcctataacattgatgacagtgactagtgatactagtgatcatgctggcgaatgctagacgtcattaccatacagcaggccagcagccagtaaggagctccactttggcagcctgccactctgcttcttccactcctgaaaccgagcctgcaggtgcaggcaatgcggttgcttgctggagtccttatccaatcagtgaaggcactaaactcgcaaagccgttggaatctgcgagcaaggtcatgcacatcttgttggatgaagttaatacagcctgcactgcaactcccgcactctcgcgatcgtgtggaagacgtgggcgccgttgagggtcaaaatcttcttgtggcttgcctggcggagacggctctggaccgcagacaggcgacgacgtcacggactcgatgcgagaaccacttgctacctctgcaatacagcggaagaaacttgcgaccatctactggccacttgcagcttctcccttcgagtttgggatggcattttgtcgcaattggggcttcacagaccgtcgctaactgactgcagttcagtccttggttggtggcaaagagtgcgggagctgtggccaccgggcgccaggaagggcggtgattctctctttgcgttggtgacttgggaagtttggaaagagagaaatgcaaggtgcttccggagtgaggcatcctcagttgacgccgtagtttcttccgctcttggtgttgctagcgagtgggtgagagcgggcgcgaaagcccttggttgtattctgagcgagtagtcggctctgtgttgagctggttggccagctcttgtttttgtatttgtgttcgtactcttcttctattaacaaagatgcgcagctctcctgcgtattcgacaaaaaaaaaaa

SEQ ID NO: 40478 - DNA, 1040 bp, Zea Mays
cacatcgcttgcgcctctctctctcggggacaactgcttcacccctgccgccgccctacgcttggtgcctaggtcttcatcggatcgttcaccgggcacaagcatcacccagcagactgggatcgcttctcccccgccgaccaagccgtgcctcccctgttgccggcgtcgcccctcccccaccagtgaaactcgcggtctctctccaccgcacgcacctcgtgtagttgtcgccgcgtgcaccccctgtagccccggcgttgggtcctactgctccatccggtttgcttccggcaacaagatcaacaacaagcgagcgagctgtgatctctggaggtgctcttcctactctttgctggtattttgatggtggcttgatggccagtaatatgcaggcttctgggctgcctcagcctcccagacctcccatgatgggttctagcgctcagccacaaaatcttggaccaccaatgcctatgcaggccagtgattccttcgcagcctcctcctcagttcgtgccaccagcagcacaacagttccgttctgttggtgagcctatgccgggggctaacgttggcatgccagggcaaatgccacattttccacaacctgggcagcacatgcctcactcaaatcaagttccacctgtatcacaaggggttcccatggtatatcagccagctagaccaatgtcatcagcacctatgcaaccacagcaacaagctgcgtatgctgggggccatttgctcaccatgggtgctcctatgcaacccctgacctatacatatcaaccaacatcgatccctcctgtagtgcaaccctggagtacaggcccaggacagagtgtaactcatgtgcctcctctagtgcagtctgggcaccagcaggtgtcagctccaacgactttgcctcctgtcaacttgtctgaacctagctcttcagattggcaggagcacactgcagccgagggaaaaaagtactactataataagaagacaaggcaatcaagttgggagaaaccagttgagttgatgacacc

SEQ ID NO: 40479 - DNA, 2505 bp, Zea Mays
tgcagtcctagagtagtcaaacaggacggacgcacaggcgtcggcgcggcgcggcgcgtgagctcttttgcttgccgcggctgctcgccacgccacgcttcagaagatcacacggtgacggcgggcggacgcgctcccccaatttccctcccattttctactccctcccctttccttccttcaccggcatcggcataggcgtctctccctgatctacctggagtctctctcctcgtactccagcgccgcctgcccctccgaccaccgctgcggcagcgcaccgacttcccgcctgaaccccagatctcacccgcgccatacacgccgccagccccagcccagatctacggcgcgcccgccatggacgccggcgccggggccacggccatccgagtgccctaccgccacctccgcgacgccgagatggagctcgtcagcctcaacggcggcgctcccggaggggacacgggcccgcccccgccaccgcccaaggaccagccgcggagccgcgccgacaggaccaagctcgtgctcgcctgcatggtcgccgcgggcgtccagttcggatgggcgctgcagctctccctccttacgccatacatccagaccctaggaatagaccatgccatggcatcatttatttggctgtgtgggcctataactggttttgtggttcaaccttgtgttggtgtttggagtgataagtgccgttcaaagtatgggaggagaagaccatttattttggctggatgcataatgatatgtgctgctgtaactctaatcgggttttctgcagacctcggttacatcttaggggacaccactgagcactgcagaacatataaaggttcaaggtttcgagctgctattgttttcattctaggattctggatgttggacctggcaaacaatacagtgcaaggtcctgcgcgtgctcttctagctgatctttcaggtcctgatcagtgcaattctgcaaatgcaatattctgctcatggatggctgttgggaatattcttggtttttcagctggagcgagtggggaatggcacaagtggtttccatttctaacgacaagagcatgctgtgaagcttgcggtaatttgaaagcagctttcttagttgcagttgtatttcttttgttatgtatgtctgttaccctgtacttcgctgaagagagcccactagatccaaaagatacacaaggactatcagattctgctcctctgctgaacggttctagagatgctgcccatgcatcaaatgaaccaaataatgaaagatttcctaatggccatgtgggtttaaacaatgtgtcggctaacaacaacactgaggaatttacaaatgtgaattccaacacagagaaaggaggagtcttcaatgatgggccaggagcagttttggttaacattttgaccagaatgaggcatctacctcctgggatgcattcagtgcttctagttatggccctaacatggttgtcatggtttccctttttcctttttgacactgactggatgggacgcgaagtttaccatggggatccaaatggagatttgagtgagaggaaagcttatgacaatggtgtccgagaaggtgcatttggtttgctattgaattcagttgtccttggcgttggttcattccttgttgatccactatgccggatgattggtgcaagattagtttgggccattagcaacttcacggtgtttatttgcatgatggctacaacgatattaagttggatctcttctgatctgtactcaagcaaacttcatcacatcatcggggcaaataaaacagtcaagatcacggcattggttgttttctctcttctcggattgccactctccatcacttacagcgttccgttttctgtgactgctgagctgactgccggtacaggaggtggacaaggtttggccacaggagtcctaaatcttgctatcgtggttccccagtgtcgcttggagcaggtccatgggacgctctgtatggaggagggaataccccggcgttcgtcttggcttcggtcttctccctggcagcaggtgtgctcgcagttctcaagctgccaaagctgtccaactcgtaccaatctgccgggttccatggatttggctgatgctcatgcccaaaacacccccgtctgccatgtaaaacatcacaccaacacttggccccattttgccattcgtttacagagaaatgattcttttttcctcgtacaactacagaataatgacagtgaaagtaggagtttaggtgagagagagagagaggctaggtaggttgatgtgaaggtgtaaaagctgtatcctcctttttttgtttttgtttttgtttttgacagtgtatgtaagagctgtccacaagaaaatttacaagtggtgtaacctgccctcgtttgtacattgtactactactacatgacaatcatatgtcctttgtctttatccaaggttgaagacgtaaactgaggccatctatttatcttg

SEQ ID NO: 40480 - DNA, 263 bp, Zea Mays
tttaatctccatgatccacaacctccaaaagcacataattacagggaggaacaaggatttcatccatacctagggttttccccaagtaaatcttcaagagatggagaagaacatctccttgatcctctcttcctcttcaattcaacgtgctcctcctcttctcgatccttgctgcgtgggggggatctagagggaggaggaagccatggagagggtagggggcggctgccaatggggaggagagcaagagagggagggggcgg

SEQ ID NO: 40481 - DNA, 449 bp, Zea Mays
ccgcattccacggagtgcggctgtggctcccgtcgacacgtggcacaagcagcaggaaaaacaccttccggacccaagattttattgaattcagctctaagcgttcccaatcctctctttcttcccacctctgccatctcggtcgaggtggaggatccggtggccacgatatccacactcttcccctctcccccttccactccttccctgtacgctgcatcgcgagggcggcctgctcaatgccgcaagctgtcccgtttgcatcgcgagggcgatctgctcaatgtcgggagttgtcctcgtcgctagccatctttgccgaggtgggctagctcgccatctcccgcccgcgtgctctcgcgtcctcccgctcccgtgaccttttgctccgcgccatcctgatgtcggtcccacgcccgcgatcttgcgaactcgcctccgtgtacagc

SEQ ID NO: 40482 - DNA, 4359 bp, Zea Mays
gcacggttctgccatcgtctcctctccgcgacgcacgcctccctctcctccgccccaccctcctccccacgccatcggcaccgccatcatcagatccggcccaagacgcctctgccccacgcgcccgagtcgtcgaggcacactcctgcccgcctccggcgtccacgcacatctccgcctcacctcggcgcccgagtcgtcgcacgcgttcgaggtggcgtccatcccggcaccggcctcacgcaccatctacagctcccaactctgctcctctcagttctccctctgcattccaccttctctcccttcctctccaagcaccgtcctcctcgcctagatccgtacaagctgcaaataacctctccggtggcaagacagatggagtcgatctccggcgaggatgctccgaagcacaacctgatcctgtccgcgctcgtctccaacctacagtgcatgctcgccgcccgccgcccgttcacggcagaggtcagcaccgccgccacagctagcgaggctgaggccttggctcaggaagcagaggcgtccgatgcccccacgggagatgggacgctggcgaggcccatcgtgctgctgacctgtgccggaggggaaccggtcggcgggtctcgcggcgctcgtcgacgccctcgttgccgccggccgctgcgatgtccacgtgtgtgcccccgaatcgtacatgctgtgacttagaaaaccaaaccacagcgggaccggtgctcggatagggtccaacggcgatgcaagcaaggagtggcatgcggccggaggggcgcagatcggctcctgcacgtgcagcgcagccgcgtgacagtgaagcagggaggccgcgataggcggcacagggagggtgcgacggaggcaaagtgcaagcacctggggacttcagtcactgaagcagaaagaaagagtacaagtctactactgcagaaagcaaggaggatgccaacagaagcagatttcatgtttggatcggtctgcctaggcgcccaacaatgaatgaagtggtgaaggaacttgagatcatcagatagaatgaaggggcacaattgttaaactcagcgtctttattagttgaacaatttggaaacaaaaagagaagagatccttatgcatttgcctatggatgatggaagcaacaacaacacttttgactacaacagtgggagttcaattaagttgttcacccaagtagataattgtctccactctttcaacaagttattggagtgattatatatgtctgctccatatgaatgccttttcattttagtatcacatctgaaattaccaaccttttagatcgggtattgacattttttgtgttctcctcaactcactatttagctacatatcttattaaatcttaatcttttgtcattagctaccatattgcactattattgtgaaaatccattaactttagtcagtgaaatggttagactatcaccacgtaggtgatattagtggaattaagtgattaatcagtggcaaatcctattatcaactattttcttggctaatcattacaatatataatgaagaatactatggcttgaagggatatttatacagttggctatgctgcttacatgatccatttagctgtctttggatttttggggtaactctccaatatctcacatgaggttctttgtgatagctgttacttaatctgtggtgatctatgtaaatgtggcaacacttgcagttcctcgagcccttgtgcatggatatatcgtttagttgtgtctaataatttgtaattagtggcaacatctttttgttattttggttttatctgctttttattgttataagatctcgattgcaaactggcagttagtacaccattaggttttcctttgtcgtatcaagctaataatgtgtgaagcagggttcccattctgatctttagttttttgtgattttaatagcaataaccttttttcgcaaaaaagtaacaaactttatgcagaatgcggtccgtatagttcccagtatccttttgtacttagatttagtttgatatatggttatgtttattgacagaatgctttttagctttgcagataaaatcttaagcaaaatgggagaaggtttgggttttctgcaatctgtcgtctcctcttctgctgggtatctccgttattattctaatgaagagggctatgagttggattttcgtaggtacatttgagcgtgttttggaatgctgggaccgtgaaacacatgaatatgttgccataaaagttgttcgcagtatccacaagtactctgatgctacaatgattgagatagatgtgctcaatcgccttgtagaaaatgaaaaatatagatctctgtgagtatctcagagacctaattgcttaaagtataaccctattctatttttgacttgacagttcctcttcaatttgtcagctgtgctcaaatttagagatggcttgactatcgtaatcatatatgcatggatgcgttactttatgtttgcttgtatttaatatagaaggctcccttgccttcgttcgatcatgtggtatttgaaagtgatgtctctataaatgaagtaagatcattcgtattgtatccttcctcggattgcttcttttgttctactacaaatatgcccaacatggcagggagaggtatgctcctaaatttcttattttgtgcattgtgaaatgattgttctaacaacatcaagtttgtgttcttcatataatctatctcagattgctctgtgttttgcaggtctcgaggtcaagcctggacccactgtcaagtgtgtgcttggacatgactttatcctgcactttccactgctgcacttggggaatcaaagaaaagtgaaagtaccatgtcaaagttgatgaccagaagcttgctattggaaccctctctattgaaaaatacccctagatagaaattgatttggttttcaataaagagtgtgagttgtcacacacatagaaaactacctgtgtatttttctttggttacaaggttgagcaaccaatcgaggaagatgaataatggatcttgattctgaagatgaagagaaggagctaaacattccagtaatcaaggaaaatggcaaaggtgatgggaaggcagttgctgcagcttcaaaatcaagtcttgggcttgaaaaaaagcaaggatgagtatgagtctgatgattctgatgagggtgagtgattatctcctgaagaaggaaatgttgtgatttgaagggtatggtgcagaaaagttttgtctgcatgtcatgacagtttcatacaacgcacgggcgaacgcactgggagcctaccacctcccgtgctcaccattgccgtgtttgatacctgactgctactgatgttacttcgaatctctggggtgctcatggagtcatggtgcatatgctcatgtttgcagggtgtcagtttttttcatcgtctacttctagagataacaactttagcatgttggttaaagattcttggtgtgctaagcttttcttttttgcttcatttgaaactcaactatatagatggtgccctactttacattttgcaaacacaaactgctccaaaataaatggaagcttatgtcttcatctctcgtgtgcttcatccgtgtgcttggaattttagccccttcttttgcttctaacatagatgcttttgtgttacatgtatttggttaccgaattaggaccatgttttctctttggatatttcagaactaatatccccaaaagattcccttatctaaacacttgagtaggggaagcaaccatgttgtgctgcgataagagcgtagctgatatgtgatttgtaatttgcatctttttaatgtcatgtaacagtaagaccccatatgtatgactcatagttttttgctttccctaagctaggttccaagtgaagacataccccacagacttatcaatatcgataaaaaggattagattagtataaatatatttacctatcactaaaaattgtatattgactttttagaaataatttgtgcgtattgataatgtttgctcggcatcagttcaaactatttggttcgacgtatttataatattattacatatttatatcgtcaatataatattagtactacgatgatattttctcacatggattttacatatcatattaatatttgttgtttcatatctattgttaattcatattatttttagacatgaatttggtacaatatagaagaaattggttggtgctttactgtatggagtatggttttctacaatatacttatgcatgtgactacaacatcgattgttgtcaactgtgcaaatatagaattgttcagacattcttg

SEQ ID NO: 40483 - DNA, 1533 bp, Zea Mays
aagagtccaaagtggaccaaagtacaatgcccaaaaggcagaacaaacagacccaccaaccctcctgctgtgcacagtgccccaacctccttctgcgcatgaaaaacagcaagaaacaaaaggaggcaaacagcaaacgtgccagcaggctccacacacacacctgcactagtcaccagaagctccctggacctaataatggcaacacttaggcctaagccctcaagatgcttggcaccggctagacccccaaggccccaacattctaactcttccaagaaaactctcttaattctgcttatggaaggtttaacaccatcggaaaccgctttattacgatgaagccataaacaccaagcccccatgatgatgacactattaatgcctcttcttttggatttgtgcacttgcttacacaccttcctccaccactcagcaaaagatatctcattagaagcaggagaaagattagcgagccccaacggtgatagaatgcaatgccaaaactgtctagcaaaaatacaactgcaaaggagatgttggatattctccggctcctgatcacataaaggaggatgatccaaccctctcttctgcagtctatcagctgtccaacatttattccgtattgccaaccatagaaaaaatttgcatttgggtggagcccaagatttccataacctcttccctggttcaaaggtaatcaaacccatgaaaaaagccttataacaagatttagaagagaattgcccagagtaagtatggatccacatatgtctatcaacctcttgtgtaagcaccactcctcttaaaacgtccaatagctgcaggtactgatgcagcccaagcaaagaaagaggggtctctatgtcgctgacccactgcccgttctccagagcatgggccacaattctggatgaactagccctttccccaacattagcaactacagcaggggcaagatccttgatacaagatccgtccaaccacctatctgtccaaaaagagtattagacccatctccaaccaaggtaataactgaagaagcaaagaatgtcctgacatgttgcctgaatagggaatttcagcccaacccaaggcctattccgatctgttttttccaaccagaaccatttagtctgtagcgcccaactttggtaaagcaagttagaaatcccaaggccaccaagatttaaaggccttttaattatatcccaagggacaagacaactacctccagataccttctttcttcctttccaaagaaatcctcttcgaatcttgtctatagatttaatcacccacttggaaatattcatggcaatgagaaggcataccgggatggccgaaagcacgaagcgcaccaaagttgtcctaccagcaagattaagcagccgagccttccaattacaatgccgattgacaattttgttgacccaaaccatgagattattccttctaagcttcttgtctgaaattggcaaacccaaataagtgcatgggaaagaggatgaagagcactaaaggatattg

SEQ ID NO: 40484 - DNA, 1795 bp, Zea Mays
ccgccggagacgatggaggaacatcagcaatctaatcatgcagtgggaaggaaaggtgtgggaaggaaaggtggtatgcgaatggttccaaccataatcgccaatgaagtatctgaacggatcgtgagcgcatctgtcggcgcgaaccttataatttacctcacaacgaagtatcaccttggcgctgcaagcagcgccatcatcatcttcgtgtacctagccgccgcgaatttcctgccggtgtgcggagccatcgtgtccgacgcattgctaggtcgctgccgcatggttacactgacgcttttctcctgcactattggaaccacacttctgtgcctgacatcggtgatcgcgcgcctgacaccgccagattgcgtgcagccaaacgaaggctgcgcgccgcctactccgatgcagctgctcgtgctgtgcgcctctcttggcttcatggcgctcggcgcgagcggcgtccgcccctgctgcctggcgttcgccgaggaccagatcgcgcactgggacaccgcgaagaaggaccgtgcgctccgggctctgttcagctggtactacgcgtccgtggggttctcgcagatcgtggccgtcaccgtgctcgtgtacttccaggacaagatgggctggaaggtcgggttcatggtgtcggccgccatcatggcgtccgtcacgctcgtgaactgcgcggcggcgtcgttctacgtgaaggtgaagccgcagaagagcatgtgggttggcttactgaaggtggtggttgttgctgtcaagaaccgtgaccttgtgctgccagaggcagatcatggcgctcagttccattgtttaccgggttcgacacagacggttccatcaaacaaaatcaggtttctgaacaaagcatgcatggtgaggcctcgtccaggcaacagcacaagcgacgacgactacggcagcacaagcgcaggaaacgcctgcacagtggagcaagtagagaacctcaagtcagctctgagcgtgatgcccatgtggtcagccatggtgatgtcgttcctgctgcagagctcctcgttcggggtcctgcaggcagccaccatggaccgccgcgtcggcgcaacaaggttccagatacccgcgggctcgatctcggtcttcgagatcctgaccttcacggcgtggtcaagctgctacgacgcctgcatcgtgccggtcctccggaggatgacggggcggcagcgcgtgctgacgctgaagcagcgcatgggagtcggcgtgtccctggccgtcgcctccatggcggtggcatcggcggtggagacccatcggaggcagcacgccgcgacgacggcggcgaggcacggagacgcagacggagccgcccctcccctcatgtccgcgctgtggctggcgccccagtacgtgctcatggggctgtcgggcgcgttcggtgccatcgcgcagatcgagttctactacgccgtgctccccaagtccatgggcagcttcgtgctggcgctgctcttcttcgggagcggcgtcgccagcatcatgtcgacggtgatcgtcaagctcgtgaacgtggtgaccagcggcaagggcggcgggggtggcgcgccgtggatctcggacgacctggaccagggccggtacgactcctactacgcgctgctcgcggttcttggcgccgtcgacctcgtctacctcgtcgtctgcgctaacgtcttccatgagtcgacgcagaacatgacgctggaagctggcgctgatggccaagacggagaggctcgaggctagctagctagcgtttgttttg

SEQ ID NO: 40485 - DNA, 2960 bp, Zea Mays
cgggcctgcacttttcgtggcgtggtgttacagtcatcactcatcagcagtggcggagcacgacccaaaattaagggcagcaggctttccaagcagccgaatttgaaagcagcaaaagaaagcaggcggagcagtggagcacgggctgcacatccgaagcaggcggagcaaagcaaagcaggcaagcagccgtggagcagtggaggtggagcacggccgtgcggccgccggccagccaacgcccaacgggtcaaccggacaagcacgcgcgcacagcaggaaggcagaggcagccaccagccaggcaagaccgcagcccgcaggaagcagaagccagagacggaggtgggcaggcggccgcggacggacaggcggtcggccggccgggcgagccgcgagcggacgtcttgtgctgcagcggctgtgttgcggcggctgtgctgtgcgggctgcgtgggctgggcggctgaatacctagatttcacttttttactgggccgagttgaggtatggcgcgggccatacttggccataacgggccctccgcccctgctcatcagaacggtgcagaatcattatcagaaacatttggagaaccatacccaacaaaataagcaccagcatttcatcctttgtctcggcattccaataataataatgtggaaacgtaatccctttgggggtaaagcacatagtggactggatgggcgcactattgttgttagaagtctgaagatctcagtacgaaatgtcattgcacaaggaggcttctcttgtgtatatctggcatgtgacacagtacatccatcaaagatgtatgcattgaagcacattatttgcaatgactcagaatcacttgatcttgtcatgaaggagatccaggttatgaacctccttaaagggcatcctaatgtggtcacacttgttgcccatgatgttgttgacatgggccgtacaaaggaggcacttcttgtaatggagttttgtgagaagtccttggtgagtgcaatggagagcagaggtagtggttactatgaggagaagaaggtgcttttaattttcagagatgtctgcaatgctgtctttgccatgcatggacaatcactgccaattgcacatagggatctgaaagctgaaaatgttcttcttggatcggatggtgcatggaaaatatgtgattttggaagcacatcaactaatcataaatgctttaacaaaccagaagagatgggcattgaggaagatgtcatcaggaagcatacaaccccagactacagggccccagagatgtgggatctctacagaagagaagttatcagtgaaaaagttgacatttgggctttggggtgccttctatatagaatatgctacttcaagtctgcatttgacggagaatccaagttgcaggtactcaatggcaattatcatatccctgagcaacccaaatatagcattgctgtcacagggctgatcaaagatatgctggaagcctcaccaaatgccagaccagacatcacacaggtctggtttcgtgttaatgagctactgtcgcttgagttacagaaaaggttacctgatggaccttcaccagccgtttccttgagctcgcaagatgaaggtgctcataaaagaacacctgtgatgcctagaaggaaccctccacctccaagagagcaatctaatagttttttaccgcatggaagctcaaaggcaggagatgcacctttaggtgcattttgggcgacacagcatgcacaaggtgctcaagctgtagttaataggaaccctttgtttgatggggagtcaattaaggcaccactgtcatcaaagcagaaccaaagctgggtggacaccagcatcagtattcctggcaataggcatgatcattctggtcagatgtcactgacaagtaaagcacaaaataactctttgtccaataatggtttcagaggtctctctgacacggagatacaaaattctgggaaaagtagagcacaacaacctcaacccgagccaaaatgtgagaaagacccatttaatagctttgttgcagattttgacactcacaatctcaacattgccgttggtaaggcatccgaacttgaacttgaagtgtccaatctgaaggagcagttgaagaaaaccacattagaaaaggctgagatgacagccaagcatctcctcatcgtcaggagatccaagagctgaagctcactcttgccgagccaacacctccctcaaacaaagtcagctcaaggacacaagattctggatctcagcgaaaggaaaagatccaaggtactgtgtgggagcttgaacaagggatgcttgctagcaactcctcatcagccagttctgatgccaaaacatggcaggctttccctgacacaaagactcaggcccgaccaaaggtcgatcatgcaactaatgggagccaaaacataaccaagaacacaacgtcaggtgcttcccccgatgcgtggggttttggtactgataatttcagaacaccagcaacagcattaagcgctaccacacagatcaacagggcagctgcccaacggagctcatcccaaagatttaacgctggtgtggccaaggtagagcagccatctggatgggctggtttttaacttcaatcgacatgcgttaaccatcattctggtcaacatttgcaatccgcgctacacagctgctgttgccgatggagttgtgatctttgacatccacagggcatcaaaatcggttatttttagtgtgttcatcaattttggttgtgccaactttgatattgattcatgagatcacttgaaattacccgttgttaataagtaaatatatattgacagtattgtgcgtatttctttgtatgattatgaatatgcaacgggagaattcgggcggtatgacggtcccgctcccgccctctggccttccccatcccgacgcctcgtatccac

SEQ ID NO: 40486 - DNA, 1839 bp, Zea Mays
cgagtcacgactcacagcaactgaaaactaaagaaaccgctggcggacgcccaccaaaccaaaaaaaaaaacaaaaaacaaaaaaccaaaaaaccccacgcctttcctcgccggcgaaggagaagccgcagcgctgctcccacgccccctaggagcgcgtgcctccattccatgtgcgcccgcccaccggaggtgttgaagacatatatctggcttcagtgctttgatggttccatacaacaagtggaggaggaggttgcaatgttctgccccatgatatgtcaggaaattgtgaaaaatggcacagggtcatcaaaaaatcatgctattgctctcccggaaagagttaatccagccaatttgagtttgattcttgactactgtcgatttcatcagatcactgggcgttcaaacatggagcggaagtcctttgatgaaaagtttgttaggatagaaacagaaagactctgcgaattgacttctgcagccgacagtctacagttaaagccacttgttgatcttactggccgagcgcttgctcgaatcattgaaggaaagacacctgaggaaattcgtgacattttccatttaccagatgatttaacagaggaagagaaattggagcccctaaaaaatataaatgatggtcctgctaggattcgcctactgaaccggttgtatgccaagaagcggaaagagctccaggagcgccataagctgaaggatgttcaagtacagaaagagcaaaaagatgagagatctttggatgagttacttagttttattaatggggatggaggttcaggaggcaggaaagctaccaagagtaagaaaaagaataaaaggaaggatcatgttgagaaccccccaaaagctgactctgagcctgtaaatgcgaatccagatatgcaagatgatgccgagtacccttttgaagatgctgacctcgatgatggacttgatcctgcaatgaaagaagagcttgatagagaagttgaggcctttgcgaagaggttggattcagtttggaaggagtcacatattggtggtaatggttctgcacggagatttcctgggtttaatcacatgtgagtgttaagctggtaggatcagaaggcagaagcagaggagatttgtggacatacagcctggaagagagtaaaaataccaaacagtcgacttgctcctgtgtgtttgataagggcatgtacaaccctgaaatcatggatcggttttgcgaagtacaaaagacatgttaagagactgtataccctgagcctttggatcataaatgtaagtaagaggcaatgtgtgtagaattgtgtagagacagtctcttcgcggaaagagagcctgtctattgtatttttttcaattaaccctcaagagacttcatattgaaagaggttatacatgtcagagccaagcatgcagacatgctattttgttggggaggaggctgcctagttgggatgaagcttagcatggttcaaggaaaaagtgtagttttttttctttggaaagggaggattagaggtctgtcttgtctgtgttgccagggaggaggctgcctagttgggatgaagcttataatgcagtatatagtgtaaaacagtgttttgaatgactatatggctgaactgttggacacagtttgtatcaatgaaatttcgttgattcactgtattgtggtggtgcacataaaaaatgtcctttttttggctgaccttacgtgggttggaatatactataagcacgtgttcttatttataattaagttaaacaacattttatcgtatatatcaataataatagaattggatagatgaatgatagaag

SEQ ID NO: 40487 - DNA, 1485 bp, Zea Mays
gaggggattaaaggagaaataaactattttccccctcaatcctttccaatcctcccggtatcccggatcaccaaatcagcactaagggccacgacaaccccatacgaatagctttgaacaccacaacccaaaggctgattgaggtcacggaggcactccgctatagcgatcgaatcatctggtgtcatcatggggatggcggtgttacaggaggtagtcccatccatgtgcatattttgggttgaccggaaggcgtagttttcttaatgagcctcatcatgtcctggacgttcgccttgtggtgtggtgagtgtcgagagattatgacattttccatttccaagaaagaggtttgttaaattgtcaagaaacccttattttacagatttagatggatccataattcatagtcatcacatacacacattggtaattataacaaggagacaacattctaagtggcaaaatattgattattttgtgggtgtgtgcatcacctctcgtccatatgtgaggcgacattgccttcacgaccaacatctcccacaagactgcaaatgccagtaactaaactgaagttgtgatgaagatgggacaataggcaaaagacaataaataagggcatggcaatgcttacccttaatctctgctcgtgcctcggcatcctcctccttgatgtagaggcttcctagtggaccccatcaagtatggtgtgcatgacttttagagacatgtacgcacggattgtcaacctctagactgactactccatataacacttagcaatcatcgactatgggggtgataggagcacttcacccctataaataggggtacattgcccctacataacttactttttttctgctgctcatgtgctctcatgtccctgaatcgctctgtatctgaagctttgaagcatcaccagcatctttgagcaccttatgagtgttttgaaagtatatttgtaatcgtttgctataaggaagtatgataaagaacaaaactcataatatgtgactcggatacctttatgttataacttatcacacattcatgtttgctctaatcttcccctcttaatgtgtcccttcttcatgagttgatcaaggaggaggagatctcattactctaattgtgttgccatattttggtttctcacaggaacctccacaggtgaccaacaatggcacccacctacggtgaatccatgaccaacaacaaatctttaccacaccttcgaagaagaccatgacaagcaacaatatcttcattgtctcttcacaagatcaaggctaacttatattccgtgtcatgggggtctagctttgagctcgacaacaagaggtagaggaacgaagcaaaaagaagggtgttgtcacacccagatttaaggacaaatccagacacgtatcaaatgtgtgctaggatatgttgtaatattagagaaataagtgacatgcttccatcatatttaaatatatt

SEQ ID NO: 40488 - DNA, 4183 bp, Zea Mays
aaagcggtcagtgggtggaggcagccaagagtcaccctgtcgccgttgccgtcgccgaggcaggcagagtctccctgtcgccgttgccgtcgccggcctcctcctcctctgccacttcctcccaactcccagccgcaggggccgacggcgacgggagggaagaggcggcagaggtactccgaggggcgcggagagaggctgtgccaggccacgccgtccagtgcctccgggtccgtcgccgcagcttccggccgcgtcggagaggtagcccccggagctcttcgcggaggctcgggaatggtgcactgggttagcgacagtgatggcagtgataacttcgaatgggacagtgatggtaacggggagcagacagtgagcttcaacgctgctggtgctggttcatcagctctggcagcgacgaacactgatgctcctggcccatcgacacgggttgctaatggcaatgggaaggctgggcgatctgcctctttggttcagaagtatgtggacatgggtttctcagaagagattgttctgaaggccatgaaggacaatggggataatggagcagattcattagttgagctccttcttacttaccaggaactaggcaatgacctcaaagtggataatgactttgcttctagttgtgcccccaaaactgctgacgatagtgatgatgatgacacactggaaatctgggatgatgaggatgctggagggagaagcaccagggttgctaactctgttgatgattctgatgacgaggatttcttacatgagatgtcacggaaggacgaaaaagttgattccttagttaaaatggggtttcctgaagacgaggctgcactggctattaccagatgcgggccggatgcatctatttctgttctggtggattcaatctatgcttcacagaccgcaggagatggttactgtggcaatctgtctgactatgaggataattcctatggagggagaagcacagggaacaagaaaaagagaaaaagatatggaggccaagcacagggaagtagaggcccattagatggtagctgtgatgaacccatgcctctcccacatccaatggttggatttaacttgccagaccagtggtcaagacgagtggacagatcgttgcctgcacaagctattggtccgccgtacttctactacgagaacgttgctcttgctccaaaaggtgtctggactaccatatcaagattcttgtatgatattcaaccagagtttgtggactcaaagtacttctgtgctgctgccaggaaaaggggttacatacacaacctgccacttgagaacaggtcacctctcctccccatacccccaaagacgatatcggaagcatttcctcggaccaagaggtggtggccttcatgggacccaagacgacagttcaattgcctccagacttgcgtgtctagtgcaaaattgttagagaggattcgcgtagccctcacaaacagttcagacccacctcctccaagagttcagaagtatgtgttggaggagtgtaggaaatggaacctggcatgggttggcttaaacaaggttgctcctctagagcctgacgagatggagtttctactcggctttccgaaggatcacacgagaggtatcagcaggacagagaggtatcgatctctaggaaattcatttcaggtcgatactgttgcttaccatctctcagttctgaaggatctgttcccacaaggcatgaatgtgctgtctttattctctggtattggaggagcagaggtggctctccacaggcttggcatacagatgaacacggttatttcagtggagaagtccgaggtcaaccggacgattctgaagagttggtgggatcagacgcagacgggtactctgattgagatcactgatgtgcagacactgtcatctgagaggatcgaggcgtatattagaagaattgggggcttcgatcttgtgattggtggaagtccctgtaacaacctcactgggagcaaccgtcaccacagagatggtttggagggcgagcattctgcattgttccatcattattttaggatcttacacgccgtcaagtccatcatggagcgtttgtagttcttagaatctttactgttgttttggttctagtagaatactttgtgaccgaacttgtaaatggtttgcaggttgactggtttagttctcttgccactctaatttaggctagttttttttttatttaatcttctttggtgatcttggtgcagttctgtggcactgttgggtattcaaatgcagattgatccgagaggctgccctgttgcattttctttttaaaatttgtatttgtcaatgagagatcaggtattctggttgccaaaaaaaaatctgaagttgtggagctgagaaaaggacggtgctaagctacaaccacccactgccacaccatgcgcacccccaacccaaaagatcctgcttttgctcacgcttatcaccactcccatctccatccaaaaccataaaaaaaaccagtgcgagctgaagcatccaggctctggaatcatcgtcgggatgtctgtgccagcatcagcccaggtgcctcacaccatacgatctgctgggagctgctgcttcaggtcgtcgcatcaactatctgcgcagaatctgggccgacatcgcaggtggcgggggaccggaaagaagaagatcctttccacccgtggcgtgcttgagtccagaaacggcgcacatcctggtggccttatgaagagaaggaaggtcgtggagcacatcatcctgctcagagccaagcccaacatctcagacgctgaagagaaagacatgctggactacctatacacatcgcagtaccagatgcgagggatactcgcggtctcgctaggccgcatcgaggaccccaacagcgacaacttcacgcacgctgtgttcatgcgtttccagcagaagcaagacatcgcggagttccagagtaacgcgtactactccaaagttgtcgacgagcacgtaaagcccgtttcctatggctcggtttctgtagatttcgagtccgaggtggaagacgacattatacctctctttcgcaggggagaggattttaactacggcgtcgagtttatgctgctggtgtctttcttgaagactgcgtctagagaggcaacggaggacgcattagcgtctcttgacaagttgatcagccaatgcagcgcttctattgtgcaggcaacatgtggctgctgtttggatcgtccggataacgggtacagtcatgctgcagtaatccgtttcccatcatctgatgagttgaagctgttcagggagagcgaggagtacaaggatatgtgggcgtccaagttccgcccgatcgtggagagatccctgcacctgcacttcaccgttgaccccgtggggaaccagctgatgtagaccaaccgagtggtcatccctatacatgggaccaagagcatctgtactgtacagtgtaaaacagagagatggggtaatatagaggataccgatagggtcaacaagtgccagtgctcggttacattacatcacggcaaaaaaaaaacaaaaaaaacaagagaaaatagcctcccttgtcgctcaggagctcagatagatagatagacagatagatgctgagcaccgaccgagttgaggtccctcttgagagttcagttgtgcagcgggtttgacccctgcggcacccttctcttagcctcggacagatcctgcacctgcacgactcgcctccagccaagtttctgttgaccgtgctgcctgaaagacgacgtcccctcggcgtcggattccggaacccgtcggccgtggcagaagaggcctctctgctctgctcccaggagcgagactgtgagcactactactaccatgagcctgaccaagctttgttgcggcaatcccatgctttttcaggcagggtttcaacagcacaagttggagatggcaagggacggtagtttgtaatacatcacgcacaagcaacggaataaagattttatatacgcagacaacaagggcggcacagaaagtaaatccagctcggccatctggagacccgtggcggtgataccagacaccggggcaggcgtgcgcttgcctcaccaattttggtttggtgcggcggacagcgatgcatgcattttcatca

SEQ ID NO: 40489 - DNA, 1917 bp, Zea Mays
ctcttcgcctcattacaatacctttgtgggcttggtgcgtggacttccactggatcccaatcagcttatcacctcacctttgaacactggacatggacttcttcacggaatatggggaggcgagtcagtatcaaatccaagaggtcattggtaagggaagttatggagtagttgctgctgcaattgatagtcacactggggagcgggttgcgatcaagaagataaatgatatttttggtaatgtctcggatgctgctcgcattttgcgggaaatcaagcttcttcgtctgcttcgtcacccaaacatagtccagattaagcacattatgttgccccctacccgaagggagttcaaagatatctatgttgtttttgagctcatggagtctgacctgcatcaagtgatcaaagcaaatgataacctgactccagagcatcaccgctttttcctgtatcaacttattcgtgctctcaagtacatgcattcagcccatgtatttcatcgtgatttaaagcccaggaacatactggccaattcagacagcaaactaaagatctgcgactttggacttgcacgtgcatcatttaacgactctctttcagctatctattggacagattatgtcgcaacaaggtggtaccgggctcctgaattatgtggctcctttttctccagttacacccctgcaattgatatttggagtatagggtgcatttttgctgaagttctcaccggaacgccattgtttcctgggaggaatgttgtgcaccaattagacttaataacagatctccttggaacaccatcgtttagatccttatcccagattcacagtgataaggccagggaatatttgcttggcatgccgaggaagcgccctattccattttctcataagttccgtaatgccgatcctctggctctccggttgctagagcgtttacttgcatttgacccgaaagatcgacctactgctgaagaggctttagctgatccatacttcagtggcctttctaaattggaacttgagccttcagcacaaccaatttcgaaggttgactttgaattcgagggaaggaaactaacaaaggctggtgtgagagaaatgatatatcgggagattttggagtaccatccccagatgcttcaggagtacatcgaaggtggagatcagattcacttcctatacccaagtggggtcgatcgcttccagcgacagtttgctcatctcgaggagaactacaggagaggagtagctagcaccccgccgcgaaggcagcccacatctctgccgagggagcgagtctgctcatcagaagatggccacagtcaggactctgacagcgaagagcagagagcagcatcctacgttgcccgaacaaccataagccctccaagatcacaagaggagggcggcaagctccagcctgcctaccagagcgccgccgccgccgcagactcctgcgccaagagctatctgaagggtgccgctagtatcagtggtgcttccaggcgtggcatcaagggggataatggccgaaaggagaaggaatctccgaggctgtgaaagaggtggcgcaggctcgtcacctgttaggcaaaagaggtagcaatggcgccaatgcgactgcaacgtgggatgtcttagtcatcatgcatccaacaacgcaggggggcagtacaagtatgcaggtcatcctagctaggtcgcccaaattaaagcagcctgcttggaggaattagatttgtgtactgttgttaagttttttttttttttttttttgaattcaactgctagattctggcagatctgtcaaccgcactctccttggtttcccaaaatttactggtttgaacaagtttattactgaatctcgctgtggtgcttcgtctagcattggactggactgctcgtg

SEQ ID NO: 40490 - DNA, 1786 bp, Zea Mays
gcaggctcacctcgctcaccgacacctgggccctaaccccggcaactcgtgctcgccacccgattggccggtataaagccggtagcgcgtcgcgtgagccacacgcgcacggcgcacacatatcccttccttcactggctcactgcggtcccggcaaaagtcagtcaactcagccaacaagcgctgctgctcgggcacgggtggtttgggaggccggacgcaacgtcgggatgcagtcgctgcaggacaaggcgtcggagtggagcggggtggcggccgccgatgcctttgccatcgacgacgtcaacatattcgagtacctcggcggcactccgcagccattcgtcgacctctccaccaatttctacaccagggtttatgaggacgaagaggagtggtttcgggagatattcggggggtcgaagaaggaggatgccatccagaaccagtatgagttcctgatccagcgcatgggcggcccacctctattctcccagaggagaggacaccctgcccttataggacgacaccgaccattcttggttacccaccgagctgcagagcggtggctacaccacatgcaacaagctttggacgcaactgaaagcatagatgtggactcaaaaacgaaaatgatgaacttctttaggcacactgcttacttccttgttgctggcaatgagatgacaaggcaacagggccatggagtagcctgcaaacatgcaacaatgtgcctttatagcattccgtatacaatggagttgaaacaacctccacattcaaagaaacaatggtactgactctttgtaggctttatagccattcttgagcagagagtgtactcaaagtggatagttgtagcttctgccaatatgtttatccttcttcgtctcttgtgctcaagagttattcacagcagtttttcaaatttgacctcaccctagcaaggttaccacaccacatgttaaccatgccacacttatttaaggtcatatttgtttaattttcataagtttgggagccaaagaaagtcattgcctatttaggtcgctgccgagtagagcctagctggctggcagggacatgcggaaaacttatttggttcattgaatcaaaaagatcaggctgagtggagcgtttgtttgtttggttgtactaggatatgttgaatcaaactgaaagaggaaacaatcactaagataatttttattttgcctgaatcgattgtataatacatattttcaccatattgaggcttaatttactttgaaatatatcagtatgccttaaattatgctaatcatatactaatactgttgacactttttcggagcgccaaatactcaagaagaaccggcggcggtgctctctggtcaggcgcggacggtccgcggcctggggccggacggtccgcgacctggcgcaggggctaaggtttcctgcctgacggccggacggtccgcgccctggggccggacggtccgcgcgtgcgcagtggcggcggaagatcgccggcggcgcctggatctcgctcccggggagggaccccgtcggggaggagagatcctaggggttgtctaggctcgggccggccgacctagactcctctaatcgacgtagagtcgaggagaggcggagaatttggggatcgagaggctaaactagaactagactagaactactcctaattgtactggaaataaatgcgaatagaagttgtattgattcgattgatgattacaaatcggccgtagacctctctttttatagaggaggggggctggac

SEQ ID NO: 40491 - DNA, 2143 bp, Zea Mays
ctttcttgcgatgcagatgtagttttggaattggcggattcgtatgctcgtttttttttgcgtgttgcgtgcgtttcagggttggctcttggctgctggtagctggtgctggataatctgctccgccgacgtgtaattcagctacatgtctggggctcagatgaatgttgagagctgctggtagttctcaattgatgcttatcaatgaccccatctataaccgagctgatgctggccagccgccggcatttcctcacttggtgttgtgctaggataatagacagcagattttatgcctttaagcactgttctgatacgccaaacgcaacgataaaaccttgtagctagaattaggataatattcattccactatggctctttcatggtattgttgcgcgtggaaggttttcaatgcctgccccttcattacctcatggccgtcattgggcaccatgtcattcgattgttgcagcgcctttactaattgcgttcgagctgcttctctgcatatatcttgaaagcataagagttagaaatcatccatcttttgatctgaagattgtgttccttcctctgttggcctttgaagcaattatccttattgacaattttagaatgtgtagagctttaatgcctggagatgaagaaagcatgagtgatgaagctatttgggagacgcttcctcatttttgggttgcaatttcaatggtgtttcttatagctgctacaacattcacccttctcaagctgtctggtgatgttggtgctttgggctggtgggatttgtttataaattatgggattgcggaatgctttgcatttcttgtctgtacaagatggtttaatcccatgattcataagtcccccactcatggggaggctagctcatcatcagcggcaattaggtaccgtgattgggaaagtggtcttgtcctcccatcactagaagatcacgaacaagagaagctttgtggtctacctgacattgggggccatggcacaccaccaagcgctcgctacatcccaatatttgctcttttctcgccactatttattctgcaaggtgctggtgttcttttctctctagcaagattagtggagaaggttgttctgctattgcgtaatggaccagttagtcctaattaccttacagcctcatcaaaagttcgcgattgctttgcttttcttcatcatggttcaaggcttcttggttggtggtctattgatgaagggagcaaggaagaacaagcccggttattttatactgaatctactgggtacaataccttttgtggctatccgccagaggtggttaggaaaatgcctaaaaaggaccttgcagaagaggtttggaggctacaggcagctttgggagaacaatctgaaatcaccaagtgtaccaaacaggaatatgaaaggcttcaaaatgagaaggttctttgtaggatttgttatgagggggagatatgcatggtgctacttccctgccggcacagaactttatgcaaatcttgtgctgagaaatgcaagaagtgtccaatctgccgtgtgccaattgaagagcgcatgcctgtatatgatgtttaaacctcactaactcagcttaacaatacaaatttgtgcatgtgggttctgtcatgctgtgcatttagtctcgatcacaactttaagctgattgaggtttgcacttcagaaagggtctgcaatatatgggggaaatacaagtatatcatgtctaaccaaaagcatggatatgtggttgatgagcattgtcgttttggaccagttatctacttagaaaaatgtctgccgaaatttgtgaccgcaatgcttcgtcggcggcttggtggcttttcacaatgtgaagggtcagcgagagcatgtaagggttgtggaagcgtgcctggacaagaaaactcgtgtccgatctttgaccaagaatcacgggagatatgatttcaagccgtactgaggcgattggaaccaattttatgtatgtttgcgatactgtggacttatgtctcttttttttttaaaaaaaagagtacaattctaacatagcgctcgtcaaactattttaagttccattcgatctatataaaaaatattgatgctcatcaaactatgtaaaatgtaatctac

SEQ ID NO: 40492 - DNA, 1076 bp, Zea Mays
ctctctttccccgcagcaaggccccagcggcggcacggcgcagtggcgcaccctctggagtcaccttcttcctgcccaatacggccagcggcggcaccccgaccaggttgaccccgccccggcaacgaccagcgggtcgtacagcacgccgatccaattcctccgtgaaggtcgataaactgtgagatactgagattgaagctgcacactgttttagtttcttcaaggacaaggaacattaatatcaccaaatactttcgtcaatggagcttgaagctgatttcgctgatgaagatgtcagttcaaataatggattacaagatctgtggtcacttgacgagatagattcaaagagagcaagattcccgtgctgcattgtttggactcctcttcctgtagtttcatggcttgccccttacatagggcatgttggaatctgtcaggaggatggggctatcttggattttgctggttcaaatttgtgctgccttcctgttaatcttgcagcacatgtatgcaagcagtcctacagccattcagaagttggagcagcgatgtcatgggatgatgctctgcaatcgggcatgagacgcttccagcacaagtactacaatctgttcacctgcaattgccactcgtttgtggcaaactgcctgaaccggctcgcttacaatggctctgtggagtggaatgttttgaatgtggcttcccttgtttggtttcatggccaatgggtggacaaaatgtctttcgctcggtctttcttgcctttcctaactgtgacatgcatcggtattttaatggctggctggtctttcctggtagggatggcagcattctctattcttttgattggatggtttgtttttacggtatactgcgttaagggtttgatatgttgaccggagaagaattactgaaagcactcattagcgcatcgcagtctacatgtaatcgctgtgctagattcaattaaataattgatgtcatcagcttcagtgattcagaaacctgttcaaattcagaccaatttattttgacttatggaggcggtctcgtgaaaaatttagttcatg

SEQ ID NO: 40493 - DNA, 1493 bp, Zea Mays
gggacccgaatcggtcccatccacaagtatatatatgagtggtcgaaccatcacctgcgctatttaagtcattgagaaagtagccaactcgtatgagaaagtttgttgccaaggtcgccagaccggagcaactccgtcattcgtcgtcaacagcatgccgcccatgtcgaggagttgccaacatgtgccgcatcgagaagtgaggtcacgagaaatctgaagaccaacttagtgaagtacctaaaatctcaagtcacaggcaagttgtgccattgatcactcttctttatctaataatgttctctgttaatcactataacatgctcaggttaattggatgggacctaataggtttccctagttttgtttaccctataccttgcaaaccgatgaactattgggtagacttgctattgctctaactagttttgggattaatgttatatctaaattatgatcatgttccaatattgttgttgatttaattattgttcatgataagattatcgtgttaattgaaacatggagcttaacttgagataaagtgctaccacaagggtggaatgagacgcccttggccaagtaattaggaaagagggagagattaccatacccgaaaggggcaagcagggaggcatcattgcagagtatagggaggtcctcgggtcgaactcctgcgatggcttttcggacaagggattccgatgcttccttcttccttaatccgtagcgggttttctcgaactagtggaactttggaaaggcctcgcagtggatccctaggcattcaccttggaagtgtctaagggtctagctaaccctggttaatcggaaaacacatcttgtgggtaaagatgtgcaacctctgcagagtgtaaaactggtatatcagtcgtgctcacggtcaagagtgactcaggactctcgcatgattaacttatggaactaaacttaatctgtcatatgcattgcattgtgggtgttattattaattgtgatctcttatttaatttgggttggtatcaacttatacttagtaactgctaataaaactttgaccaactttaaaagcaatgctcagctttaaccatttcctttggtaagccttacttcacatgagccccattgtaagtgagctcatgcacattattccccacaacttgttgagcgatgaacgtatgtgagctcacccttgttgtactcacatttccccaggtcaaggacaggtaccacaagataaggatcatgatgctgtgatgagttcgtgagaggtctaggtcgtcgtctcacaatcaactatggttgctgcatctttgtctttgtatgatttaattatttgactattttgtatagaactacattatatattaatgatgtgacattcgtttctgtaccatgagtcatcatatgtgtgagacttgatcctagcacacatttgattcgtgcccgggtttgcccccataaatctgggtgtgacagaagttgtatcagag

SEQ ID NO: 40494 - DNA, 3844 bp, Zea Mays
cctacgcctacacgacggcgctgcggcaagcgccgaccaatccatggcagacgaggcggagtggaacgaggctgaggccgggatcgcggccccgggcgcgggcgtggctcctccagcgcccggaggcggcgaggaaaccaagaggaagagggggaggcccaaaggtagcctcgacacgtataagaggcggaggcggaggcggcgcaccggcgacctggtgtcggcggtgcccgcggctagcctcggggatatgggccactcatgtggctgcattcccgctcccccactccctcccccctgcactgtgtacactgtacgcgacggcggcgtggcaatcacccctcaatccatggaggacgaagcggagggggtcgaggctgagtccgggaatgcgggcgcggcctccgccgccagagacggcgaggaaaccaagcggaagaggggaagtcccgaaggtagcttgaatgagaggaacaaggacaggacgcctaagcccaaggccaaggggaggcggaggcggcgcaccgacgaccagaccttgtcggtgtccgcggtgagcctcggggatctagggctcggggtagcggcggggaccaggtcgatcagagagaggaggccggcgcccaatgcgttcttcgacgtgggcagcgacagcgatactgagcatgatgatgatgatgatgaggagcaaactacgattgatcaggccaatcacgagagtgctaaaacaggtgattctgtaaagaagggaggaagacccaggaaaatggaagcgggccaattgcatactaggacgcagatttccaatggtaaaagcaacggccatacaaatgggaatcctgctgggaagaagaggggaaggggaagacccaagaaactgacagtagaacaagcgattactaggtgccagttctccaatggtgaaacaaacaagagtggtgccgaggcagcaaggagcaaacagtcaaggaatcgtaggatttcacagaatgcaaagaagcggaaaagagatgaagggaaggagtctatgacaaaaaagttgaacaaacggagtaagatgttgactggggaaaatgccctcatgtgccacaagtgcccatattgtcgcaagaactgtaattgcaaggcatgcctaaggatgaggggagttgaagagcctccaaaaaaggagatctctaaagaaaatgaaattcgctatgcttttcatattgtaaccatgctgcttccctggatgagagaactgcgacaagaacagttggaggagaaggaagtagaggctaatatacaaggagtttcaatgaatgagataaaagtggaacaagctgagtttgacctagatgatcgtcgataggtgtaaaacatctattgttgattttcatagaagctgcaagcgttgtttctacgatctttgccttaattgctgcaaggagcttcgcaaaggtgagatcccaggaggagaagaggtggaatatgtgccacctgaacctaaaggtaggagttattcttttggcaagattcatctactgaaggatgctgatagaagtaagaactcctcaaatggcgagtcttacaacggcatgcctgctgttgggaactccaataatggtctgttgctctggaaagcaaaaagtaatggtagcataccttgtccaccaaaggaagtaggaggctgtggtagtacacttctggacctcaagtgtttgtttccagagaagatgtttgccgagctagaatatagagctgacaaagttctcaggagtgggacattagctaaagcaatggttagtagaagtgatcggtgcccttgcttcaatcaatcaggcaagataagaactgaaagcaaatcagtaagggaggctgcaagcaggaagggctcaagcgataacttcctatactgtccagttgctattggtattcaagatgatgacatagtgcattttcagatgcattgggcaaagggtgagccagttgttgtttctgatgtccttcagttaacctctggtctgagttgggagccaatggtaatgtggcgggcattgcgggaaagatccaaaggcaaagcagaagatgagcaatttgctgtttgggcgatagactgccttgattggtgtgaggtggaaattaacatacataggttcttttcgggatatacaacaggcagaactcatgctaggactcactggcctcagatgcttaagctaaaagactggcctccttctagttcctttgacaagcgattgccgcggcatggtgccgaatttattagcgcattgccatttcgtgagtatactgatccacgatatggcccgctaaatcttgcagccaagcttcctgctggtgtcttgaagccagatcttggacccaaaagttacattgcttatgggttctacaaagaattgggcaggggcgattctgtgaccaagcttcactgtgacatgtctgatgcagtaaatatcttaacacacacagctgaagtcacttgtcagactgatattggcttaattgaaaaaatccaaaaagacatgagagagcaagatctgcaggaactatatgggggtctaaattcccgctctgagctcaagttgtcaccagctccaactgaatgcagggatgaatctgttgatgaaggattgaagacctcatatagtagagaaggcaattgtgtaaatagagacaattataatggtttggacatcaatgcattaccacctgatgacgatggagatattgcaaaggataaagaatcatctcctggatcagagtggcaaagtgaactaggtcagagttcagatcacaacaatggggtcaacacaactgatgagatgtacaatggagctcattacatttcacacaatcaaaaaagcactggcaggaaagttggcattaaacctcaagaagagaaatctgaaaaggctgattgcagtggcacatgtgcttatctaaaaggaagttctgaagataatccggaaatgcctattgtggagagctcagaggagcagagcaccggtggtgctctatgggatatcttccgcagacaggattctgataaattgcaagattatcttaggaagcattgctctgaattccggcatatttactgcaatccagtcaaaaaggtattgaaccctggacgtttgaacagaagcttggtgaagctgttttcattcctgctggatgtcctcaccaagtgagaaatttgaagtcctgcatcaaagttgcgcttgattttgtttccccagaaaatgttggtgagtgtgttaagctgacggaggagtttagacgacttccatctttccacaaggctaaagaagacaaactagagatcaagaagatggctgttcatgccctgaacgaagctgtaaacttcctggatcctcgttcctcagaagagttgaaaattggggttggtgagaacatctgtgaggatgaatctgtagatgagaaggagctgccgcctagaagaggagttgaagtgtcaggcgttgatgagaagcctaaatagaaggcgagggaggcatcaagtccaaaagtgaagctgctgatgaggtcgcccattttaggttctcggaatcgtggttaattgatttgtcaaagcccctgttcatgtatggtgatcgctggctgacaccgatggatgaagagaagcaggacacgtgtgtgctgctgatatgtcgtgtcggcgagtgacatgaatatcatccctatccctatggtattattggtcgtttatgtttatgtttgatcatttgtcttattcagttttttttacaaataataaaacaagaggttaaaagtaaatgacgtcatttatttaattttaagacggggcagatgcaaaactgaa

SEQ ID NO: 40495 - DNA, 1807 bp, Zea Mays
gcctccttcgtccctcgatcacaactgctcctctctccactcccctcttcctcgacagatcctcaatcaagcttcatctgtgccgtcgtcggcaatggctccggccttcccacgccgccgtccaacctcccccgactctcctcctcacaccgccgccgctcccatggcccaccctccctgctcgcctccatggccacctggaggcggattcggcctccccgagtcaccgcccaacgtctcgccgcccaaccaaagcgagaaatccactgggcgaagcttctgcacctcccgaacgggggaggggaggggagcacgccagcactatgtgcctgcgggtagggtttctcccggtccgatggcgtccgccatgtcgtcgaggtcacgacccgccggccacttcggagtgttcccggtgaacgctatggccggcacgggaggcagcgacggtggggtgcagctcgcggacaagctcaagataatcaagactgacaactttgaccccgacgcctacgtgcagtccaagtgccgcgccatggacgagaagaaaatggttgtctttgtcatgcaacaagctgtttggaatgttgacactaataatgaggcagttcaaggtttcaggagatctttacatgatgagacaagattatcctacatgttgtcttgtggttcactggagaggctgctcaacatgaggaatctgaagttatggatggtgaggatgacgatgatgaagacgatgatgacgaggatgatgatgattatgatacaaagaagaacaagggaactgctggaggggaagggcaacagggaaaacgacctacaaagtgcaagcagcagtgagcagcggcggtgtgctctttgcaaagccttggagctgcctctcctacaaagtctgaacttgcagagatagtcccacaagagaaatcaccaaaaggtaatgcttcatttttcaggtcatcatacttcttgccatttctcccccgttcattttcaatggatgtggctcagtacgcacgtgttccattgtgattttgttgttccatagcttccattcaaccaatgccgccgagtccaaggtcttctacctcaagatgaagggcgactaccacaggtatactattatcgctagcagatctagaccatgcaagttgtggtttgtagagatcaaaacttaagatctgtgtgtagatatttgtctagacaatgggagtggcaggatgctagtttttagtaaggttggttgcttatctatgaatttgcctgtatcatgcatgatcatgtgttgtatcctgtagcacatggttgaaatataaatttgtgttccatgtttttacccccctacacgtatttcttggatatctgatttctactcatgatgatttggcatgtacctttctgagttcaagttaggtgcatagaggaaggatgctgcggggagcaccatgaattcctacaaagttgctcaggtttcctctgactgttcaccattattggaagcaggacaggcagagagccttggaaccgaactcttggagatggtgcctagcagggaagaggagattaagttgaaagaatacagggaggatgctgtgtcgacttttgtagttgatgattatgtgagacttgagtttaagggctcaactttttccggttcttggaagtcatttagtagccctaagatttcatcaacattcttggtagtaattgctatagtatcaaatgagattgtggtacgagttgctcgagtactaacgttgttgtacattgtgaagctaagtgggtaatatcaaaagggattaagatttat

SEQ ID NO: 40496 - DNA, 2015 bp, Zea Mays
gtagtttgaccacctcacctccctccactccgcaaggcctctcgccgtccttctccttcgacattctcgctgcgctggccgcctgcccccccctctccgtccgtaagctttggccggggcagataacaaaatctgatatccctggggcttcgctgcgccgggtcccctaccttctcacctcacgcaaagcagaagggggaggagttttaggaggtggcaagaggagccatcatcgtgtccgtccgtgctgcccattattgtttcttcttccagcggcaatttctggccacagtggcgggcgctatattactcacaggttcgtggccggtcccggtccgtccgagcaagcagagcggcgtgtcgttcatggcggaggagtgcccgcccactggcggcggcgtggagctctggcttccggacgagttcctggacgacgattttttctccgaggaggagaaggcggcggtcgccgccaggagcgagaacgacgacgaggaggaaggggctgacggcctcccgcgccgcagggctgggctcgtcgtcggcaacgcgaagggccagggggacggttcccctgcaaatgcggaggtgttggccggctcgccgcagtcgattctgtgcggcctgcaggactatggggaggacagccccaacggcgcggcgtcgaaggtttgctcgccgccgtcgtcgccgctggagcgcccgccggcggatccctgggacgttcttaaagaggcggctggccaggtggctcgcctgcgcacaaacagcacccccgtgccaacgaacgacgctgccgccaaccaaggactccccgtcacgccgccggcgaagaagctctccgcgccggcggagactgcgaaggccaaccactcccagccgccgaataactcggtggaagagcgacggattcagattgctcgttttaatgccctgaagcagcggcagctcctcaagcaccggcgggatcgggagctcgccgtcgccacggcggcggcgtggggcaccagtgttgctgggtctcatcgtgccgctgccgccgccgccggcgggtacggtgcgccggcgccggcgccggcgccacgtgtcctgagctcgtacgcgtggcccccgctacagaagcagcggcaggcgccggcgtccccggagggcgtgcgcgccctcttcctcgcccctcctcctggcgccacgcgcgagtgcgccggcaccggcgtgttcatccctcgccaggccggcgcccccgctgagcccaagaaaaggccagcgtgctcgcctgttcttctcccggtgcgcgtcgtgcaggcactcaacctgaacgtcgtggacctcggagcccgtcccatctaccctggcggtttcgttctcgatcacgtcgcatgctcctgtcgtgatcttgcttcgtcagatgcgctggtgagtcggagcaacgccctgctggcgagccgtccgtcccagctccaccatggcgcctcctctcgcgaggtgaatctcccccaggaatggacgtattgaaagcgccgaatcggcaccgctgacgatctcccctaggttgacgggtcatatttgagacaaaaattactgtcgctaatgctagggataggtaggaaggggtagcgtttgctcgcgtgggttagagcgagagtgtgcatagttgtttgactaggaagttggaggcagcaggggttgcatcatcttttgcggtgcagaaacgcatcaggctctcttgcttcttttgttcccgttgcttcaagggtaaggaatctccatctccaggacagaaatagaaccaaccacagtaggagtactaccactccagttttggctgcggcttcatcgttttttatgattgttggagtgcttggttcggttcggcgtggttggagttgggtgcaggaagaacaacaggtgggttgtttcagtgtacttcttgtgagtctagttgcattaacttgacggcttgtgtgcccgttgttctggcttatttttgccatcgaagcaaactggtcagctaccgc

SEQ ID NO: 40497 - DNA, 729 bp, Zea Mays
aatggtgaacaactgtattaaaggatgatgcacatgatcccaaataaaaagtggtgtaacagctgctcaaagtttgactatcaggtggctagcgacagtctattcaaagctgaaatctggaatttcagtgaagagtgcctagtttggagtgcttttgtaattaatccatgtggttttgggctaagaactgtgtggagaagttgtagtccactgtaccgagaacaagttttatcaagtaagatagccttggtgctgcacaaaaagaggagtaaaagtggctccaagttgtgctgtcaggcttaggaggagagaaattcagttagctgttcctaaagaattcagtgtgcttttactcacctttggagctctgtggtaattaatccatggagatttttattaagagctctatggcaaagttaaagaccatttgaaggagaacaagtttatgcaaataattggtcttgttattgtgtgtaatttggagataatagtgttacaaaacttactctgtcagactgagtggtgtgatgtttcagatttctgaaactgaaatttcagtgacattggctatattttagggtaccataacttttgttttatatgcttttagttatgggttgctatacaaaagacatatagctatgaatatagaataactttggtgaagagatagtggtctgttgctatgaagaattgggagatcagagggcctgaactgggaggaatgga

SEQ ID NO: 40498 - DNA, 1251 bp, Zea Mays
gcgcgctgatcgtcttttttaggacgacaatgcatggtgatcgtcatttacaagcaaatgtatgtactccaactttgataaagtcaggatacccaagtcgtcggaaaagtacactccactagctagctactacatatatgtaacagattttccatacgatacgcacggtaggtctagttgaaaggtgtcgacgtccgatcggttccgcggcaaatgcgccgtatatcatcgtgacccgaaattaagctcaaccttaattagcggcccgaccaagccgcgtgccgcacgttcccatcttcacaccgagagatcgatggagcgaaagcgagcgtccgtccagccgcccgcggcccgccgggagggaattgaattgaacgcacacgacgtagtgcacggcacgccccaccggccggggcgacgacgtcgtccgaccacatacgaccgaccccagcgcggcggccgctagctttgacggcgacgcggcccgcgccgaccgcgcacagcccatgcccggcagcaaccaccggccggtcggcgctcgtaccactgtcgcggtgtcgtcgctcgctggccgatcgcattgcactccgttaattgttggacgacgcgcgcgcgcatacagcatgcatgttgttccgccgtactgtgcatcacgacgcgcgactgcgccacccgcggacacgcacgcacgcatattggcaggcgcggcggtatacaagttccgggaccataacagatcgatggagcccggccgtacgtggtgccggttggccggccggcgggccgggacggcgtacggtacgcgcgcgcgagaggtgcgccggccggtatggaggccacgcgcgccaaaattaagggccgtttgcgtttggtcgccgtccggccgtgtgtacctgtcctccgtagcgagcgaactccgtcaacgcggagcacgcgcgccacttcgcattgtcctccatatgcatcttgcatgacagtagctaggacgtggatatatgcatgcatatgcatgggcttccttgttccttcctctattctaaacgtgcccccaataacacaattatgttactgcccgctgcttcgacctttcgagtccattgtccatctgatctttcttcttcgtgctagatggcggaccggaggtgtgagtttactaggggttaggtgtagtagcaatttggcagcttgccacgccatgcagcctagtatatctagcttattatctctagctaggctatacgtctacatatc

SEQ ID NO: 40499 - DNA, 528 bp, Zea Mays
ctacagagaggcggcttgcggcagcttgcgttcccttcgttgccgcctaccccacgcaacgcaacgcaacggatcgccaaatcaacttgagcttgagcatcccaccaatccactccccaacagcaatggacgccgcccagcgccgcgtcggtacccacctccagcgcccgccgccgcccgccgggggctacggcctcaccgtcaaccccaccgcggccgagtacgtccacgggctacagtgtcctcctccctgagaaattgcaaaccggcaggtggaacgtgtaccgatccgcgcgttcaccgttaaggctgataagtagattccctgacaccccagacattggaacgctgcatgacaatttcacgtaagacaccggggccaccaccccacttccatctggcctttttatcttgctttctttcctatctagcttctgtgaaaggttctgttattaccaacaacaatgtgatcggtttactgtttccctttatttttgcgcaaagcttggatttggaaaaaaaagtatc

SEQ ID NO: 40500 - DNA, 2838 bp, Zea Mays
agccggagaacgccgcccgctcccccggcgtgccgccgctgtaattcttcctcctccacccagagctgcacgtccgcgccttgccaccgatggatcccgcgcccgatcagctctctatctccgcctctgccccgttccccaccatcccggctgcctcaagccccaggccccgcgccgcgaggacgcggcgccatgccgcgcccttccggtcggaccaccccaccgccgggagctggcgctccgggatcgatctcccgcgccgtccttcggcctccgccttttcccagcaggagcgttatccttccgtggcctcctggagcgcctctcgcgacgccaactttgtgttcgggagcggcgtggccggtgcgccggagatgaggaggagcttctcgtctggatccggtgaggcatcgttggctgaactttcgtacgcagttcacaggttcgcgttggacggttctggcaggccaagcgacattgacgctcccggaggagaaggtacgcttccagtgacagactccggtggtcgctttggggcccgtggatgcagttccactttgtatgagggcttctctctggattctattcaccatcagactgagcacctcgatgaagaacgtggagtcccgtctcaaaccatacaatgcgagagtgtggggatgcgatcattagcttcaccaacccgcactgatgagaatgctcccattgaatttgcaaagagaggggacagcttgcccattcaagattctgtggatcaaagtagaaattctggacatgatgctaatgcccaccatgatttctttgtttttggtggacatgctgggtccaatagcttcgctaccaatgcaactcaaactaataccagtaaggtacattcagctgataaagaaactgtaacatgtaactctgaacagctaaatacttcagtttctaaagatggaaattgcatcaagttcattttgcaggatgcaaagcatgtgtttggttcaagtgacaatgatcttccaggttcggaaccttgtgaaatttctaccacggtggaaacaccggatactataacctctagctttggatctgaagatgggatcgtgacggtttcttccataaaggtgccttgcaatattgaagtagtaccagcctcagaacttgttgaatgtcagccatttgatgagaaatctttcacctttgacgaccaaaatgtaccatataggaacaaaggaggggttaagggtatgggcatgaacagaggagcttttatgccaaataagtcctcagcaaaccaagcttcttttgaatcagtctcaagaagcgggcattgttctaaaaaagtgtctcctgaagaaaagttaaatttgaaagaagccagtagctctttgcaaacaacagaaagtgggcatgctgaagcagagtttacgtctgcagcaaatacggaacattctggtcaatccgatttcatattttctgcatcaactttccatcaaagcatgttgcacccgcaaagacgacataacaagaaaaaaagtggaggaatgggtaatcatgctagctctattcaaagtctcccttcatccgccattggactcgcatgctcagaagtctcaggaagtcagcaatgtgtggatttagctgccaagtggactgaatacaacaaaatagaacctaacagggttgcaatcagcagaggagccagatgctcaacatcagaaaactttggagaccatgacaattgtgaaacatggcgattaaggggaaaccaagcatatgcagaaggattgttaactaaggctgaagaatgctatacccatgggattgattctttttctccaaatgaagtttcaagaaaagcattaatgctgtgctacagcaatcgagcagctactcggatgtctctgggtaagatgagagatgccctatctgattgtcaagaagccattgatattgattccagttttctcaaggcacacgccagagccgccaactgcctacttgccctgggggatgttgaagaagcacaaaaggcttttgagatgtgtttaaagtctaatcatctatcaagcttggaccataaaattgtagaagaggcttctgatggtctacaaaaagctaagaaaatatctggtttaattagtcattctgaggagtatcttataaagaaagcatttgacaagatacccagtgccttacaaatgatctctgatgctttgtccataagtatttattcagataagttaatggagatgaaagcagaagcactgttactggtctgtatttacgttgcagcgatatgaagaagtaattcggttttgcgaagaaactctttatgtagcagaaagaaatagtgtgtgtttgtgtcttgacaagcagtcagaaagcaataacatggtcaacaatacttgctttgtgaaattgtggcgttatcatcttattgctaagtcatatttcttccttggaaagcttgaagaggctaaccagttcttaaagaagaatgatcaaataaaagtcatggggtgcaggtgtgggaatcaatctcaggactcaattttatcattctccatggctatctctgaactattgcggcttaaagctgctggcaatgaagcattccaatctggtaaatatttggaggctgtggaacattatactgctgctttgatgagcaatagcgagtccctacgctttttagcagtctgcttttgtaaccgtgcagcagcatatcaagcaatgggtcaaattttagatgcaattgcagattgttcactggctatagcccttgatgcagattatgctaaggcatgctccaaacagattttgtgctcaattgcacactgtagtttctaa

SEQ ID NO: 40501 - DNA, 2897 bp, Zea Mays
gatctgacacccctcccacccaaccttgcttcgctcccgcgcctcccagatccgatcttcccatgcctcacttccgctgatcccactgccgccgcggaccgccgcgatggcgtcgcgcccgcctctccgcaccacctccgtcgcctccgtctcatcctccaccgagtcccccacctccaccggcccccccggcggcgtcccgcagtccatcaccgcgctcctcaacaacccgctcccctccgccgccgcctcctcgtactcctggttgtcctggccgcctcccaccatcacgctacccgatgcggctccaccaccgccgtcgcatccctgcgaggtcactcgcgccgacttcgcgccctaccttgccgctgtctccgaccccttcgcgcgcttcgccgacatccgcctccacgccagcgccgagctcgccgccgcctctgacgccgagggcgccccagcggtctcctctggcctcgccgcctgcctccgcgaggtgcccgcgctcttcttcaaggaggacttcgcgctcgaggacgggcccaccttccaggtcgcctgcccgctcgatgatgaagcgctgcaggagcgcctcggacagcaccttgacgtcgttgaagcccaccttgtgcgggagatagcgctccggtccgagtccttctacgaagcgcagggccggctgcgcgggcttgatggggagatagtcacgactgtagggaggatccgcgagctcagagaggtggtccgggttctcacgggggacctcgtcggggcagcgaggcaggtgcaagagctcaatgctacccgaggcaaccttgtgacgctgcagcagaagctaactgtcatcctgtatgtcagccaggcgcttaccgcgctcaagctgcttgtcgcagcagcagattgtgctggtgccctcgatgtcattgataacttgcaaaatctgctagatactgatgaacttgctgggctttattgcttttggcatattcgagatcagctgggaacatcactagattcagtgaacagcattctttcagcagaatttgtgcatgctgctgttcctgatggaaaagctgtagatgttatgattttatcaactgtgaaaagaaaggcttccagcccattgaatgggacggaccatgagggtaatgtagatgaggaggaaagttttattctcagggatcgactcctccccctcattatttgcctactgaggacggacaaacttcctgctgttctcagaatttaccgggatacacttataactgttatgaaagcttcaatcaaaaccacagtaggagagttactcccagttttaactgccagaccaatagattctgactcagtaactggagacagagctaccgatgctgatgctggaggccagtccttagcaaataagttgcggagtctttcatctgaaggatttgttcaacttttatctgccattttcaggatagtacaggtacatttacagcaagcagctgaagtgaaaagaatagttgagtgggtcatgggaaaccttgatggaacgttaggtgttgatgctagtaatcctacgttacaacatggtggtacagttattcctgatacccaagaaaatgactcttcaagaggctctaatactcttacacggagtacttccaagatcccatttgtccaaggaaaaacaaatgatttttccattataaattcgttaaagaatgttcgggctgatgtcttgagagagaacactgaagcagttttcgcggcttgtgatgctgcccatggacggtgggctaagctgctaggtgttcgttctgctttacatcccaggttaaggcttcaagaattcttgatcatctacaacataacagaagaatttatagctgctacagaaaagattggaggcaggttgggttacaacattcgtggaatcctacatcaacaatcgaagcaattcgttgattatcagcataatgttcggatgacaaaaatcaaggcagttctagatcaagagacgtgggttgctgtggatgttcctgaagagtttcaagcaatcgttctttcactttcatccacttattcttctgttaatggcatggagatgcctagcactgatgataactcaaagtttagtgatcatcggtctacaagtcaagaaccgacatattcagctaaaaatattgctgataatggcaaagtaacatccgggactggtgaaaacaaggttgaattcacttcacagactgaaaataatgttgccgggaatctaaagtccaccttgcaaacgattgtacatggaggtgttggctatcatatggtaaactgtggtttaatactgttgaagatgttatccgaatacgttgacatcagtaaatgtttaccatcactatctttggaggtggtccaacgtgttgtggaaatattaaagcttttcaacactaggacttgccaacttgttctcggtgcaggagccatgcaggtgtctggacttaaatcaattacgtccaaacatttagctttggcgagtcaaatcattagttttatgcattctttaattccagatatcaggcgagtacttttcctgaaaatacctgaagcgcgcaaacatctgttaatgtctgagctggatagagtagctcaggactacaagatccatcgagatgaaattcacaacaaacttgtccagataatgagagagaggttgcttgcaaatcttagaaaattaccccaaattgtggaaggctggaatggcccagaggataatgacgtgcagccgagtcaatttgctaaagctgttacaaaggcaagtggttcaaatattccattcacatattacagaagcattttcaaaattggaagtcaatactccctctggcaaagaataggtatgctgcttatttgtgcatcttttagca

SEQ ID NO: 40502 - DNA, 3458 bp, Zea Mays
caccgctccgccccaccatttgaccccacccgtcattccagaatctatttcagccaatgatggcctcggaccgagtagagagcaccgcacgggctctccgtccgttccattcgcccgtgcgcgccatcaccgccgtcgccatggcgtcgctcaagactgccaagaagcaccacgcgcgcctcaacaaccccttcccgcgcgccgtaccgacggccgccatccacgacggcgacggggccctgcgcctgtcgttcgcgtcgacctccaagctcgcccacgcgcacgacttccccgtggggacccgtttccgcctccgctgggacccgtcccgcggcggcgaggtctcgctgtccagggttcctccgtcgtcgggcggcggcgcgatgtgggagaccgtccccggcgtggcgttcctctccgtggcctccgtggccaccgaggccgacgagtgccgcggctccttcgcgctccgcgacggcggcgcccgcctcgtccccgatcgccagcacgtcgacaagatcagggctttctaccgctgcgacgccgaggcaggcggctccgagcccgacctgctgcgcgccgccgcattccggccgtccgacgcgacgcggttcccggtgctggtggtgaccgggctcgtgtccgccgccaagaaggccggcgcgtcgccgtcgtgcacctgctgcgggttgcgcttgcgcgcggcaggtcgccgcgcccggagcgcggcggcggcggcgaggcccgtgctctcggcgcggtactggatccttctcgaggagaagagcgacacgcaggttaggttcagcgtcaagatcggcgactaccaatggacctgctcgcacgctgaccctgccaagtcgcccccggcgacggcgacgaccacgaccacgaccccgaggctccaccgggccagcctgcggcttcgtctgtcggcgcgcgtccagcgagccaccacgagcaagaggacgaggctggccccggccccgagccgtgagcgtgaggaggcgtcggcgctcctgccagcgcccgagcgggcggaggagcggcggccggaggagttcaaccgtgtgttcctgacgtatgcgagcagccgcgacgagcggttcttcgggttcggcgagcagttcagccacgtggagttcaagcggaagcgggtgccggtgctggtgcaggagcaggggatcggcaggggagaccagcccatcacttttgccgccaacctcgtcagctacagccgttcatgaacctacaaggatttaccttccaaaacaacaagattgagacagtgtgtgggcttgaaacgaacagtttcagcaagcaaccgtggggcctttatcgtttgtttgttttgaagcttttgctagtgccaagtggaaaactcgtcacatcgacaacgatttgtggcgtctacgtacttgcatcagtttcttgcgtctgtgtgcttgggatttagtattatgtcctttttgtctgaatttatttgcagctagatttagtgtgtccctgatggtttgttttttctttaggtcaggaggaaactggagcacgacatatgccccctctccgttctacatgacctcaaagatgagatctttgtacctcgaaggatacgagtactccatcttcgacctgacgagacctgacagggtgcaaattcagatttacggcaattcagtccagggacggatacttgacggcgactcaccgacggagctgctcaccagctacacggagtcaaccggacggccgccggttcttcccaggtggatcacgtccggcgccgtcgtcggcatgcagggtggcacagacgccgtccgcagagtttggggccagctcaaggactacgacgtccctgtctctgcgttctggctacaggattgggttggccagaggaagacggcgatcgggtctcagctctggtggaactgggagctcgatgatgcccactacaatgggtggaacgatctagtagacgacctccgcagccacggcatccggacgatggcttactgcaacccttgcctcgtgccggtacatacgttacgtttcgttcacggatcatgccagagaaggtgccccgccgcccccgcgtgctttaattgtgttcttgttcagatggacgagaagcccagcgcgaagaggcacctgttcgaggaagccaggaagctgggcatcctggtgagggacgacgccggcgagccgtacatgatgcccaacacggcgttcgacgtcgccatgctcgacctcaccaacccggcagcgcacgcgtggttcaagagcaccgtcctgcgggggatggtggaccgcggcgtcagcggctggatggccgacttcggcgagggcctgccgctggacgcgcggctgcactcgggcgaggactccgtcgccgcgcacaaccggtacccggagctgtgggcgcgcgtcaaccgcgagatcgccgacgagtggagagccagccgccgccgtgccgcggcggagagcgacgacatcgtcgacgacgacgacggcctggtgttcttcgtgcggtcggggttccgggagagctcccgctgggcgatgctgttctgggagggcgaccagatggtgagctggcaggcgaacgacggcatcaagagcagcgtggtgggcctcctcagcggcggcctctcggggttcccgctcaaccacagcgacgccggcggctactgcacggtggacctgccgccgttcctgcgctaccgccggagcgaggagctcctgatgcgctggatggaggtgaacgccttcacggtcgtgctccgcacccacgagggcaacaggccgggctccaactgccagttctactccagcggccgcacgctggcgcacttcgcgcgctgcgccaagatgtacaaggcctgggagttctaccgcgcgcgcctcgtcggggaggccgcgcggacggggctccccgtggcgcgccacctgttcctgcactacccggcggacgagcgcgtgcaggcgctcacgtaccagcagttccttgtcgggacggagatgctcgtcgtgccggtcctggacaaggggcggaccgcggtgaccgcctacttcccggccggcgccggtgcgtggaggcacgtgtggagcggcaacgagtacgggaccggggctggggtgcagggcgggttcgaggcccaggtcgaagcccggatcgggtacccggccgtattcgtcagggccgggtcgtccgtcggggaaagatttgtgagcaacttgagaaatctcacggtgttgtaatttcggtaaatatacgtaactagctatgtgcgactaggctacaaatatattttttgtttatttttaaatattaagatatatgtggtctgatggttagccttaaatttttggagcagagagatgtgggttcgagtactcgttctgcactattttttgcgggctctggacgtagagagagtgtagccatgtgtcaacattag

SEQ ID NO: 40503 - DNA, 1042 bp, Zea Mays
tatcctcgccactgtagatcttccacgccgaacgtcgcggcgtaggccgttgagccgcccagtttcctcgcggcacgactccatcccacggtggctacaaaggcagaccgactccaccccatagccccgtagccattgcctcgttgacttcttcacgccataaccctaaatccaagcctccatcgccaacctgagaggaagggagagccgcatccgaggagaccgctcctccgtcaccgttgggcctcggagcgcggactcgggggcgtggcgccgtgctcgggacatgctcagccgcgcgatttcgtccgtgggcagctggtggtgcgtggattcatcatcggagttacctcctccgccacggccgctaatgccgaggattcccgctctagccgcgcctattctgggtgagtagctacccatatagttcacgatgtcattccctttgtgtagcgctactcggggtagggaatgggtcgccgtaacaccgtatggctcaactccggtggtctcgccgctgttagaacgggcgccgtcgcccaagtacggtggtcgcgggagcggataacggcggggtcacgggtgtcttggtttcgtcagtgaacgactaagattagatgatcgcatacccgttcgcggctttcggtctagtccgttgatctggatcggacggatagaaacaaatctaaaataataaaatcatcccgtcgtatttgcatccaacggttctcgtcgtgtaccgttttgtgaccgcgccaatctaatctagaccctagatctgagaacggacggccaataccccgcgataccccttcgcaagcacgattttacttaagagtacctagttaacctagtattcaacccgccgtccgacttgagtatttctgagtctatgtaaaccttacgtcgaaacccctaccttctctggtatttgatgccctgtccagagaaatagaaaacctaagaaaaatcaattagaaaatggttttagtattaaattatttgcagaaacttgtttaaaccctagaaaattcatatgaac

SEQ ID NO: 40504 - DNA, 2199 bp, Zea Mays
cgaattttgaaaccctcaccgagtccatccattttttccctctcctctctcctccgctcctccgctccggtctccgccctccctcacctctccgtcccaaaaagggcaacgaaatccagacaccgctccccatctccccttccttcctttcctactcccacactcccccaccctccactagtactagtactagtactagtaccacaaccaccccaccgggaaaaaacccaacaaggggtagggccgccgccgccgccagcgccgccgtgcagatcgcggccggatctacggcgctggggcacgggggtccccggatcgacgacgcctccgccgagggttcggatggctatgcgaaaagaaaaccctgtgcttaatgcttgtcaagcatccaatggccggatcacgcgagctcaagctgctgcaaatcgtcgaagctttggaactttcccttctgttccattgcctgcaaaaaccgaacgaaaacagactgcacaagggaaggcaaaacgaggttcttcatatgacaacaccagtgcaagtgttgcactttcaggcccccagcctaaaaggcgcacagtactcagggatgtgaccaatttgagcaatgctaactctaacaaaagttttgctgctgcaccgaagcttcagacaaagccctctctaaggactggaagaaccgtgagcaaaagcaagccgtgcgcaaaaaagattcctaaaaaaccaccaccagctggtaatggaagtgcattgactaatgttttgaacattgctgaagaaacacaagcggagaagattttggcagagagagtggaacccgttctgttgcttgagaacagggggccactttcattgcagaatgttgaaaggaacagggacagtgcttgtcatgaggtattctttgaggaaagaaacctcagggataaatgtgaaccttctgtgtcaaagaatggggactcttatgtgttagacattgtagatatcgacaaagataatggcaatcctcaaatgtgtgcttcctacgttgtggagatatactcaaacctaatggcttcagagcttatgagaagaccaagtccaaattacatggagggtttgcaacgggacatcacaaagggcatgagagaaatactcattgattggcttgtggaggtttctgaagaatacaagcttgttccagacacgctgtacctaactgtatatcttattgaccggtttctttctcggaactacattgaaagacagagactacaacttgtgggaataacaagcatgcttgttgcctcgaaatatgaagagatatgtgctcctcgagtagaagagttctgtttcataaccgacaatacatacacaaaagcagaggtgctgaaaatggagagccagctgctgaatgacctgggatttaacctttctgttccaactacaaaaacatttctcaggagattccttagagcggcacaagcatctcgtaaaactccttctatgactttaggatttctggccaattatctcgcggagttgactttgaccgaatatgagttcttgaaatttcttccgtcgttggtggcagcatcggccgtgtttcttgctagatggacgcttgaccaatccgacctcccatggaaccagactctagagcactacacctcttacaaatgctctgacattcaattgtgtgtctgtgctctacgggaactccagcataacaccagtaactgccctcttaacgccatccgcgagaagtacaggcatcaaaagtttgaatgcgtagcgaacctaacttcaccggagttccctcggtcgttcttcagctgacacgccaatggcaccgattgcctggcctttttcgagtcgcaagtgagatgaagaaggacagagagatggctccttggcttttcttttgtttgtttgacgtaaaaggttcacccggttgtaaacaacactgtgtgtagggctttttgcttgggctgttgttaattaactgtaaggggagatggtccggctggcttgtatgacgacaaacgacgggatgatgtttgtgttgacacaattcgttcattggtagcctcggaatggaaattagtttattgccagtgattactctggatggaatgactgattgagtgtttgttatatatacatgtgcctgattttacaggatctgtaaagtttttttggatgactagggaatagggatctctg

SEQ ID NO: 40505 - DNA, 924 bp, Zea Mays
gcgctgggtgttcatcagggacatgctcctccatcgcagcaagagcgagccaggcagcggcgcccgccgctagcaagcccgaacgagcctggtcgttctcctccccgtcctaataatcagggaaaggctcgccgcgaggctccgcccctatcgcgcgccgccagcgacagagaatgcttgcggtcccggtggcgaggatggccggccgcgggggcagggcaggggccggggcaggaacgccatcgatctggggcgcccccggcatcgcagcttctctcgcctcctaggaaatcacggagcttccgaacaggatctataggattgaacagaaccactgaacactgataatctctcttccttagcatttgttacaacccgatgcactggtctcctgaagatcccattgttcagtatctgtgtaaaaagaaataacagcagagccttttatcctaagaaagttgggctgtcccggtggcgaggatggccggccgcgggggcagggcaggggcaggaacgccatccatttggggcacccccggcatcgcaacttctctcgcctcctaggaaatcacggagcttccgaacagggctcctacacgatctacatgaagattgtcggggatgacaacgaggagctgagctgcatctcgtttgggttcagcatcagcttcgtcgcgtccgagcctgggcatgagaggcagccagcccatggatgattctgatgaggacgagactgatgattccgatgaggacgagacagatgaaaccaattgccttttaatggtctatgttatcattcaaaattgtcttatgttgacactatgtatatatgctattcacaataatagagccattcatactgttgggcgccttggatgaactatcttttcttcaacaaagatggagctcatgcagattgattta

SEQ ID NO: 40506 - DNA, 916 bp, Zea Mays
gcggcatttttgactccatatccgcgcggcgcctatctggcatcggtgaagagcgggcgctagagcagagtgagcgtgcggttcttggtcatggagcgcggtgccgtcgtccttccgctccagggcgccggggttgggcgcgtcctcctccccgtgcaagtgcgggtacggtcgttcttgaggagcaggagggcgacggagcggcggcgccggctcgcgagttccgcggcgccggcgaggtgcagcaagatgctttggggagggttcaccggagcggaaggcggcgatcaacctccagcacttctttaactacatcgctgtcagcattgtcctagcacagcttgagagttacaatagggaagcgtacttggagctgaaggagttcatcagccgcacctccctgaacgacgccgagattttctgcgaaaagctcatgcgcgagtctccaaggctcaagggactagccttgaggattctggaggtccgatctgcatatgtgaagaacgagttcgagtgggacaatttgaaggaattatccttcaagatggttgatgaggccaacacaaagctcatgagggattacgtcgtcgaggtcagccacattgaagacgaaaactaaaacatcaagtggtttctctttgaactactatattttataggcgaacgataacatcaaatgctttctcttgaaccttgcctacagcattttataagaggcttgcatgtatatatagaagatgtataggttatgaagcgcactagcttgatcctgaaactttgtatgtagcataggtactaaacatagtaagcgcattagcagtgatacaccgtagatgtttagcattacttgaataaaactcggcacgcatacaccgtgttactttcttgatcatcaataggagtgagaacaaaaacg

SEQ ID NO: 40507 - DNA, 616 bp, Zea Mays
aagcaattcatcatggcagattgaaaaagaacaagcactaggtccttttacagtgcattattacttgaacatggcagcggatgacttgggatcaaacccgatgatcaacattagcctcggcaggcagacgccgccgacgctcccaaacgcggtgccaaagaacctgattttagtgagcgcagcacgatcgaccaaccaaattccatttgggtatattaacacaaatcaaataaaccattcacaaaatgagcacaatgttagagaaaatcattcctaaaaaaaacaacgacatttgcacttccctatgtcgccggcgacaatggcgtgccaatgccactccgggttaatttggtgaaaaggaatcatgaggaattgaagggattgagggggaaatgaactaatttcctctccaatccccctccgatccttctataacctcgagtcaccaaatcagccctcattgccccaggatcccgcagctaggaaacaaaccgctatcgacaacgcaatgcgacttcctttactggcgacgtgcctggacctcgtcggcgaggtggagagagaggcttcgtgggatggggatccgaacgacaggaacaacaccggtcatctcgat

SEQ ID NO: 40508 - DNA, 4864 bp, Zea Mays
accccaccatccttcccgagtcgtcctctccattttcccctcccgattcgccccgtcttcccaagccctacgccagcgacaaaaccctaaccggtgggatggcgacgcagccgccctctaccgccactgccgcggttgacctctatgagacggcctcgcagccggacgcccccgccgccggcgacgcctacacttttctcgagttcaacacgcagggggacgacttcgactaccccgacttcccggagctctctcaaccacctccccgatccacgccgctgacgtcctccatccccggcgccggcacgtcgtcctcgtcgtggcctgccccaccgcctccgccgtccgacgcggcctccccggaacccgatctcacgtctcaagacgtccacaccccgccggcctcctcctcctcgccgtcgccgcgttccgcctccaaggcgcgtccgtcggctgcggcggatgggctcgcctccggggttgtcgcacttaacttcgaggatcctgtaggaaccggcgccgtggaggacgggtacgactacagcaagggagacttcgtggaacacgcatgccggtactgcgggatccacaaccctgcgtgcgtggcgaggtgcaacgtaccctcctgccgcaagtggttctgtaactcgcgggggaacacttcaggctcccacattgtcaaccacctggttagggcaaagcataaggaagtatgccttcacaaggatagccctttaggagaaacaattctcgaatgctacaactgtggttgtcggaatgtatttcttcttgggtttatctcagcaaaggcggagaatgttgtcgttcttttatgcagagaaccatgtttaagtgttaatgcactgaaggatatgaattgggatctcagtcagtggtgccctcttatcgacgacaggtgttttttgtcgtggcttgtaaaggtaccttcagagcaggagcagctaagagctcgccaaattagtgctcaacaaatcaacaaagtggaagagctctggaagacaaatcctgatgcatctcttgaagatcttgaaaagcccggtgtagatgatgaacctcagccagttgttttgaagtatgaagatgcttaccagtaccaaaatgtttttgcaccactgataaagcttgaggctgattatgacaagatgatgaaagagtcacagagcaaggataatgtaactgtccggtgggatattgggttgaacaagaagcgtgtagcttactttgtctttccaaaggaagacaatgagttgaggcttgtgcctggagatgaactacgcctgagatatcctggtgatagctcacatcccacatggcaatctgtcggacatgtgattaagctcactgcacaagaggaggtggcacttgagcttcgcgctagtcagggggtgcctactgagctaaatgttggattcagtgtggattttgtttggaagagtaccagttttgataggatgcaaggagcgatgaaaacttttgctgtggacgagacaagtgtcagtggatacatataccatcaccttttgggacatgaagttgagcatcaaataatacgtaataccctaccaagacgctttggtgcacctggacttccagaactaaatgcttcccaggttttagcagttaaaagtgtcctgcagaagccagttagtttgattcaaggtccacctggcactggaaaaactgtcacatctgctgcaattgtgtatcacatggcaaaacaaggtcaaggacaggttcttgtatgtgccccaagtaatgttgctgttgatcagctggcagagaagataagctcaactggtctgaaggttgttagactgtgtgcaaaatctagagaagctgtttcgtctcctgttgagcatctcacacttcattatcaggttaggcaccttgatacttctgagaagagtgaattgcacaagctacaacaactgaaagatgaacaaggtgaattgtccagcagtgatgagaagaaatacaaggcactaaagcgtgccactgaaagagagatactgcagagtgccgatgtcatttgttgcacctgtgttggtgctggagatcctcgtctttcaaacttccgtttccgacaagttcttattgatgagtccacacaggctacagagccggaatgtcttattcctttagtgcttggtgtcaagcaggttgtccttgtcggtgatcattgtcaactgggtccagtcatcatgtgcaaaaaagcagcccgtgcagggttagcacaatctctctttgaacgccttgttatccttggagtgaagccattcaggctacaggtccagtatagaatgcatccttgcctctcggagttcccatccaactgcttctatgaaggcacactgcaaaatggagtgactgttaatgagaggcaatcgtctggaattgattttccttggcctgttccaaatcggcctatgttcttctatgtgcagatgggacaagaagagatcagtgctagtgggacatcctatctcaatagaactgaagctgcaaatgttgaaaaaattgtaacaacatttttaagaagtggtgttgtaccaagccagattggagttatcacaccttatgaaggacagagggcttacatcgtaaattacatggcaaggaatggctctcttcgccaacaactttacaaagaaatcgaggttgctagtgtagactcatttcagggtagagagaaagactacattattctatcttgtgttagaagcaatgagcaccagggaatcgggtttctcaatgatccgcgcaggttaaatgttgcgctaactcgtgcacgttatggcatagttattcttggtaatccaaaagtactaagcaagcagccactttggaatagcttgttgacacattacaaggagcatgagtgcttggtagaaggacctctgaacaacttaaagcagagtatggtgcaatttcagaagccaaaaaagatatataatgaccggagattgttcctgggcggtggtcaaggtgttatgcatggaactaactttggggctggggcctcaagccaagcagcagataagagaagtggcagagggaaaggacaatcgtttgctccttatggccctccaaatggggtgcataagcctggtgtgcacccggttggctatgctgtaccacgtatgccttttcctccatttcctggggctccacattctcaaccatacgcaattccaacccggggtttgcatgggccccttggagctgttccaccggtgcatcaacctggaagtagaaactttgggtcagctcgttcaaatactggtgggcctattggtggccaccttgctcatcaacagaactcccagcaagctatggggagcattgggtcaaattttaactacactggaatggagaatccaagtagtcagccttctggtggagcacaaatgtcccaaactggattaatgacccaggtgcctgtccaaggactaagtcaaacattccgtgatggtttttctattggtgggatgtcacaggacttctttgtagacgattttaagagccaagggtcacatgtgccatacaatattgctgaattttctacccaggcttctcaaggtggttatggtgttgagtttactcaagcgccccaatctggatactctgggaattatatgaaccaaaattcacatcctggatactcccatattggtacaacaaatgacattgtatctcaggatcacatggcccatggatctcatgggatgtttacacaagcgggatataatgatccctcacaagatgagtcgtctcagattcattatggaatggctgccgctggccctctacagtcgcagggcatgatgaaccccttgtactctcaatcctatgctcactacaacacccaaccacagtctcttcaacctccgccccagtgataatgaaagcttgtgataggatgaagccaaattttggaagtttggtgggttgcatcttttggcccacatgtgcacttctccgctgtttcagactcgatggtgcatagacatcagatgcaagcaatgaaggcacactatgtattggctatttatcggggcaggcttgactgaggggcacaaggattgcaacgtatcattgatcgttgtagttcactgcccactttggccacaggagaggtcatatcatcgagaggttgacggcactaccctcatccctcacctgtatagaaaggcaatcggggccaatagtggtacgatgtgaatattccaggatttgctgccattcagaaagtcaagttgcagcaactgcatgcctccatggtaccatgaagacacgcccgtagagtggctttgtatagaggtgctataggcgaggtggacaaccctttcggatatcgcacatggcaagatatttacattgacattttgtatgcacctgatatggttttgatatttatgccacaaatcatttaggtggtgatgcaagtagtttgttgtgattggaaatttgggagtgttcgtgaaagcaagtttgatcctgaaatcttatgggggaatggttgagtgggggttattttgttgtgaaacaggtgtctttgaaaagaaacctttccaggagtgatttcatcaagattgattgttagaatagacattagtaactgttataaatggttaacatggtcaccaaagcggtacgtctagttaacatggccacaaagacattaatcaactttgagacgaatgacaggacctaaaggggcatgttctttggcaaagtagaagtggtcgtctcgcagttttatagcaagacggccattgacttatggttccaccactcccaccccttcccatctttggtagattttctatcatatctcatattt

SEQ ID NO: 40509 - DNA, 2468 bp, Zea Mays
tgcatagcctatcgagcgacggcctacgctcaaaaaacacaaatcgctttccgcgccgccgccgcgccgccgaccggcgctcctcacctctcccgccgcacccatcgtccccccgttcccggctaaaccctgcttgagccctagacaccgcccgcctccgggaggtagagagcatgcacgccaggttcctcagcgcgccgtcccctgcctccgccgccccctccccgtacgttcgcttggccttcacgggcgccctcccgcgccgcgcgtgttggaagccgcgaggccccgcgtccgcgtccgcgccgccgcctcggcctctccactcgctgtgcgcccgggcctccatgcagcccgcctctcccgcgcacgacgggcatggtggtccgccggtgcacggcgtctccaacaccgtcatcggggtcctggggggcggtcagctcgggaagatgctctgccatgcagcgagtcagatggggattagaattgtcatcctcgaccctcttcccggctgccccgcgagctcggtttgcgatgagcacgtcatcgggagcttcaacgatggggacacggtccgggagttcgccaagaggtgtggggtcctaacagtggagattgagcatgttgatgccgccacactggagaagctggaaaaacagggcgttgactgcgagcctaaagcctccacaatcacgattattcaggacaagtacaggcagaaaaagcatttctcaagatacgagatcccattgcctgacttcatggaagtagatactttacgcagtatagaggaggctggggaaaagtttggctatcccctaatggtcaaaagcaagagattagcatatgatggtcgaggaaatgctgtagccaagaacaaagaggagctatcttctgttgttgcttcactgggtgggtttgagcggggcttgtatgttgagagatggactcctttcgtaaaggagctttctgtaattgtggcaaggagcagagacaactctactgtctgctatcctgttgtggaaacagttcacaaggaaaatatatgccatgttgttgaagctcctgctgatgtatctaacaaaataaagaagttagctactagcgtggctgaaaaagctatcaaatcattagaaggagctggtgtctttgctgtagagttgtttttaacagaagatgatcagattttattgaatgaggtagcccctaggcctcacaatagtgggcatcacacaatagagtcatgctacacctcacaatatgagcagcatatacgcgctattcttggccttcctcttggtgatccctcaatgaaagcacctgcagcaataatgtacaacatcctgggcgaggatgagggtgaagcagggttctttctggctcatcagcttatcagtagggcactaaccattccaggcacatcggtccattggtacgcaaagccagagatgcggaagcaaaggaagatgggtcatattacaattgtggggccttctaagataagtgtaaaatcacgcttggacaacttgctgcaaagaaactcgtctgatcccaaggaagccctcgtgttgctattataatggggtcccaatctgatcttcctgtgatgaaagatgctgagagggttttgaaagagttcgacataccttacaggggtttcgaggtcataattgcaggtgcaggcggagcagctcatttaccagggatggtggcttcattgactcctcttcctgtaatcggagttcccattaagacttcaacactatcaggatttgattccctcctatctattgtgcaaatgccaaaaggtattcctgttgcgactgttgctatcgggattgcagaaaatgcaggtttgctggcagctaggattctggctgcaagagatcctgagctccaggacagggtaactaagtaccaggatgatctgagggacatggttttggagacggcagaaaggctggaggaccaaggcccggaggaatttctgaagggaatggattgaccccttttgaagccctggctctggggcctgggaggaatacgagtgtattatgggtcggcgataactcactgtccactcgattatggtttaagatggggagtcatcaagaagatactttaataggctcggctgcattcgattttccttacaattcttttttgataattgtgctatcttaacccatctcaacatgcccttttcccttctaatatagggtatgaattttgggtttagagggggaaaaaagaatgggagtaaacgttgtacgtacgaaaaataaaacggttcgagtaacgtaaaaaacatgcctggatttttcagccgcacaagttgctttgagtcaagtaattgtacatattccctccgttctaaataaggccttgtttggttattaccattgttcatggattggatttggttattatcattgcacatggattgaatgagattataaaaaattaag

SEQ ID NO: 40510 - DNA, 2328 bp, Zea Mays
cgagaacctcttgttccgctgccagtaccatgtgacaacaatgggacaggcagccacggccctgagctgctgagggagaagaaggaccagtttgaccttgtgatcagcaacgtccacatgccggacatggacggcttcaagctcctcgagcttgtgggcctcgagatggaccttccggggattagtaagctttcacttgcccactcctgttcgtgcctttattgcagttgcagcaggccaatgatctcaaaattttggcattgcttgaaaaatcatcattgtgaatgaataggtcttgtatggtaccatctggttactttgtttttttacctccattagacaactgaaaaccttgcccgatttgtaaagaagttttcttgttcaatgcggcattgaatttgggaggaatggcaagtctcatgaaaacttctatatgccctacacgtgaccactaaaagaaagagttagacaggacaaaaggctgcaggtataatgaacgccaattagtttcctacaggaacttcaattatttctgttggttcaatgtacaatgtgcacagcctctgcacaaaaccccattccaattgatatggttttgttactcgattatgctttggtcccagcccgccatcagtcagatttacctctgaaatgtggcatccaaatgttatgttttctgacatcatgcataatatttgaggaaatgccagtctatcctgatgggcgggtttgcatctctattcttcatccacccagtgaagatccaaacggttatgagctcgcaaagagaaaattaccttgtagtctcattgtttcagtttatggtccaatttacaatggcttcactgtaaatgggaaaacaactcgggattattatattgtttttggtttggatttggaatggtttggggtccacaacgatgatgcgtcagagctgttccaagggttggatgatttccattcccctgctgtcaatttgactaggctcgccgtctccgctctgcccaactggcaccaagcagccaatggaacttgagcatccaatggatgatttccattcccctgctgccaattctccaaactgctttgacccttcaactcaatccgcatgtacccaggattctttgcttgctcttctacttctgaaaattcgcaaaatggatagataattccagttaattttaatccattacagcaaacagcgaccgggtgcggaagccggaagggagaggcgcttggttgacccggaacggacggcaagacaccgccgggggttcactgcaaccgcacgcgtggtggccggtgtgggaaggagcccactgctcaagcagcgacgacttccgcaacttctcaggccaagttgtagggagggagggcagcaaagaaagcaagcaagaaagaagccgattccactggtggttaaggttttggattaaaggagagaggttgcaactccctgggccaagcagtagcgcagcaagttcagcaccaatggcagccatatgaaatataaggcaaagcagataaaaagcttaattttttttcaagaaggtaaaggcaatgacagaaaagtgaggagggtcagaggtgtacagatatggatgagggctgaaaagaggagcaggaaggcatgccccatctgtgctacaagggtcggaatggacttgataggacatttgactatgcaacacggaagttatttcaagatatccttttttaactatgctgccgttgctgatcatttgcatttttacatttttcacattatactacagttgaagatacataggtgtcatggtcgggcgcacgtcacggtcatgttgaattgtaacttttctctggttcttgagccagcaacatgaccggtttaatggtgtttttgagaattctgttgattccttctaaatgttaaaattatgttcactaccaggttattagcttttgtactgcacttccacacacatacatattttttcttttttcttataccttccatgtcgtctggtccagaacttgtacactgtggggttaattatggatatggatctatgaaatattattagcatgaaaatatacatggcgtgtatggaacaaaatggactctaatgctttttcttgtgatgtaggatgcttttggcgctgagaggaggaaagctataagatgctaaatctctccattgcatacggaaaaacgtaggaagatttttgttaaggaagcaaaagatacactgaaactctggtatagcaatagaaagaaggttctggcttggcaagtgaaacagaaacagctagcacatgagaagtgtgaattttatactttgctttggc

SEQ ID NO: 40511 - DNA, 604 bp, Zea Mays
caccaatgcaccgcccttccctttcctactcttctctctcctctaaagggaaggtccttgctcctgctcaccattggtccttgcatacttcatcccattcgatggtgcacatgtccttgctactgttcaccattggatatcagtgaggcgaatgggataaactatgcaaaaaagatattcagactactgcaaaattgaagggatagcttcgaagaaagctgcttatcctatgactttgaaaaagagctgctgaaaaaattagagtgatgacttcgtcgtcccttttgcggccttctctgccaagcggatcgcccaaacgcaacgacccttttccgacaacggggcacttctagagtcttcgacgaacgttttttttccacgcaccgacttgaacaacggcagcagagtcttcacaaaaggaggacatctcatgttctacgtcgttcaaattgaatctgacggtccatgttttcctaccgacggggataggctgaaaggtcacgttttggaccggctttgtaaaaatttcttttcttttataaaaaaggttgggttggaggacagctacttttcctactttgaaaaaaggaacaataaaaaatta

SEQ ID NO: 40512 - DNA, 4052 bp, Zea Mays
gtcagaatcatcttttcccactcctgccgtctattttcccgactactctacgtgcgctttctctctctgcgcaactaggtgaccgcgaccgcggccaccgccctacgtcacgtacgtgcttgctagagtctagcctcgtcggttccttcgcatggtctcgttcaggcggacccttcgccggcgaccaacacccaccagcaatttactggaagtgtggaaccacttctgatgctgtctttgtaaatattgatggagctagctgagtagaaatggactgcagtcaagatccccaagaagaaagccatcaaagaagggagaatggtgaagaagcagaaaagacggctgactatggaaatgctttgagtcgtaaggaggtaacagaagagcttcttggttgtgtggttcatagtgaggaagaggcgtacaggttgtactgtgattatgggcatcgaatcggttttagcgtgcggaagggcaaacagtcttactttattggtaccaagaatattcgaacaaaggattactactgctcaaaggaagggcttaaatacgatgagcctgttacagaagcaaattttaatcgaccagacacaagaactaattgcaaagcaatgatccgctttagagttgacgagaaggggcggtggacagttatacgctttgttcctgtacataatcaccagttggcaaaacctggagaaagacacatgctgagatcagccaaatcgcttgctgttggcaaatcaggtgttatagatccattagcatctacagaggcacatccaattaatggtttctctgatatgacaggtgatatagttgagaattcagggtatactataagggaatgttacaatcaagtgggcatgcagagtataacagtaattgaggcaggggatagccaaagtcttgtcagctatttcaagcataaaactaatgaggaaggcatgttctattgggacgtccaagttgatcaagaagggcgcatgacgaacttcttctacagggatggtaaaagtagaaatgattatggctgctttggagatgccattatatttgatacaacctaccgcacaaacaaatataacttgatatgcgccccatttgttggtgttgaccaccattggcaaaatgttgtttttggctgcgcgttcttgttagacgagtctgtaacttcctatgcctgggtatttaaatcattcttggagtcaatgggagggcgatcaccaaaatcaatattcactgatcaggatgaagctattatgcaggcagtcaaacaggttttccctaatacgcaacattgtttttcctactggcatattctgaagaatgctcaatctcatttaggctcactaaatacgtctcaagcatttcaaagtatgtttaccaagtgtatgcaaggatctgactcagaagaggattttaaggaatcatggactgcaatgatccaggaatacaagctacaggataataattggttgattgacctttatacattccatcataaatggtgctcggcgtttaacaaagatacatttgatggtggaattaattcttctcagtggggggaggtttcaagtaatattctcaatggaatttctgatgaaaatacctctcttacacgttttgcccttttgctagaaaaggttgtcaaggatctacgtagaaatgaatctgaagaggattttcgatgtagccaaactgctccagtccgtgcaattaagcatagtaccgttttgaagcaagctgcagaatcatatacacataggatctataaattatttgaagcagaatttctggatgggtgtggagcaacttcatgccatgaaacttcgagtggtggaaatttattgaggtttggaattacaatgcaggggaggggttcaaaagtatgggatgttgttcttgacacttccaccatggagatcagttgtggttgtagaaagtttgaaaggatgggtcttctttgttcgcatgccctcaaagtcttcaccctgcagaatgttgacacaattccagaaaagtatgttttgaaacgctggacaaaagatgccaggagaagcatgtatacacttgctcaggatgattcaacccaacaggaatgcacagaggctgaacttgcatatcgcaatcgggcaatgcagtatgcatataacctaattataaagagccaggaactggaagaatcacgaaaaatattctgggactcccttgaaactggagagaaggcactggaagtgttctttgaaatgagaaacatgcgcactcaagcagccaaggatgctgataagaatgtaaagaagaagaaaaaaacatcaaaaggaacaaacccaaaaaaagctaaacaagccccaggagtttcctcaactggtccagagctgatagtccatactaatgagcatcaatttcaatcttcacaagatgctcagggtaatgcaaccattggaagaccatattactatcaggcttttccaaatgcccctatacaaccaaaccagatgtacatgcatacaaatatgcacacaatgcccctttgcacaccgcaggagagctgcctatcttttcattaagataggggaaaacaaaaggaaacaacaagggagaggcacgaggcacactctcagccacccccggacaaaatccaacttacacacccacactgatgcctaaaattaaataatatgaccacaaccatgagtccatgaccaaggaagactaactgcactcaaagggggagcaactgaaggaggcgcagaggttactgctaagcaccaaaggctgctcagtactcaccgcctggagaaccacttctcaaacacacatgcatttttatgcttccatacttccaagttccaaacaagagctgtctgcatatgctgcaatacgccccaattcaatgtttggtggtgccaagaacatctgaaggatattaaggtccagattcatgtggatgtcattggaaaaccttattgagactttcgctatcaactccgctttgatctctgtggacccatttatggaggcctggtggcacttcatgtttggttggttcaggggctcttcgttctgatctttagggaagcggttattctggctgttgcagtgcaggctgtgcagccccttatccatatagcagtggccagtggcttgctattaatatcactcacaggcaattttagggttgtaaactgtaaggcctcaatccgctgtgggcgtgagtttctccccttccaaggcagtttcctgcatgggttcagcttgagttgagctgctgagttgtgaacgaggaagcaaccaaagcaactgggagcctgggagagtgggagtggaggagctggctgccggcactggccgaggaactactcagtccaagacgtgtgtcgatctgaagtgacgctgacggctgacctatcacctatgttttgggaggggctcagggccggcaacagccatggccgggcaggtctccacacagtggccactggagctagaactggacctggaacggcgccccacctgccaaacggcaatgctgatgaccgcttgacagctgcttccgatgggctggccacctcccactgcccacatatgaaagggaacctggaactgtgtttgctcggcaaccagcactggtttggggaaacagaaagggtacataattgtagattgagagaaaaattagaggatgcagctgttgcttgggttcagtggtgaaggaagcagctagcagcttcttgggttcattcaagagagattggagaagggggaaggattggaaatgttgcttctgattcgcttgaactctgaatttctgattgtttccttgttcacagaatgtagtgtcatgcataacctgggttgccacgccttgtttctgaggcgtgacatgtgactgtcgtgatggtgtttttgaaatttcggttggtaagaaatgctgaaagaagaaatggcgtcattacgttcgttgcattgctttgcctattttgcgtgtttaatggaatatgattgttgtatggcacttcactctgaatgtgagttgttttatgctgagg

SEQ ID NO: 40513 - DNA, 3063 bp, Zea Mays
cgcccactcgtcctctcggctctcgtccagacgcccagtcgccctagccataggcccctagccctagcacagcagcacaacagcgccgccccccgcccccggtggcccggccccccgcccgttcacccgcgcaaccgcgccgcgcgacccgcgtccggcggccgcccatcgccagtgccgtgacacgtcactccgacgccgtcgccaccaaatctcctggcaacgcctcacgtcttctagttctaattccagcctcactgctgccatcacctccgcctgctgtgtgtcttccacctcgcgctgccaaagccgacaaaccctagcccaactctccctaccctcgcccatcccactcctttcgtccgattcgtggaggcgacggaggggctaaggcatgacgaccgatgggcagctcagggagtgggtctccgacaagctcatgagcctcttgggctactccaagagcgtcgtcgttcagtacgtcatcaggcttgcgaaggagtgctcttcacccggtgacctcgtgggcaagcttgttgagtttgggttcagctcgtctgcggagacccgcaccttcgcgtcggatgtctacgccaaggttccccgcagggccagcggcatcagtgaagtagtggcaacagattctggaaggaatgtccgtcgacgaacagaagaggaggatgaagaaggtggcatcggcagttctgatacctggtagagtggcgagaagcctttccactgagccgtcctgggttcgacgcaccctctctacaaaatacagggggaagagaaagaaatgattagagatcagcaggaaaaggctcagctagaaagaaacatgagagaaagagatgcagctaacacaaggaagttgatggagcgacaattatctaaggaagaacaagaggaacttactaggaaatctcaagcaatggacaacaatgacacatctgatctgagaaaattctcaaggcaagcgtacctgcaaaagcgacgagacaaaaaaattgaggaaattcgtgatgaaattctggaccaccagtacatttttcaggatctgaaactaacagaggcagaagaaaaggagttgagatacaagatgaagatatatgatcttgtcaaggaacatgttgagactcctgatgatgttggtgcgtacaaaatgcctgaagcttatgacatgggcgaaaatgtcaatcaagagaagagattcgctgtggccatgcaacggtacaaagatcctaaggccaatgataaaatgaacccttttgctgaacaggaagcatgggaagaacaccaaataggaaaatcgaaactgcaatttggatccaaagataagaagccgtcttcagatgagtatcagtatgtatttgaagatacgattgattttgttaaatcatcagtcatagaaggaacccagcctgaagatgattcagataaagaagacgttgaagcaaaagatattttgaaaagggagctccaggatgagcgaaagacacttccaattttcaaatttagggatgaactgcttaaggctgtagaagagtatcaggttatcgtcatagtgggtgagactgggtccggtaaaacaacacaaatacctcagttccttcatgagtctggttatactgcaaaaggaaaggttgcatgtactcaacctcgtcgagtagctgccatgagtgttgcagcaagagtatctcaagaaatgggtgttaaacttgggcatgaggttggttactctataagatttgaggattgcacttcagataaaacaattattaagtacatgactgatggaatgcttctaagggagttccttggtgaaccagatttggctagctatagtgttgtcatggttgacgaggctcatgagcgtaccctctccactgatatcttatttggtctagtgaaggatatttctcgttttcgaccagatctgaagttgctcatttctagtgccacccttgatgcagaaaaatttagtgactactttgattcagctcctattttcaagatacctgggaggcgatacccggttgaaattcattatacaaaagctccagaggctgattacatagatgcagcaattgtcactgttttacagatacatgttacccaatcccctggcgatatcctggtgtttctcacaggtcaggaggaaattgaaacagttgatgaaatccttaaacacagaacaaggggcttaggcaccaaaatctcagaattaattatatgtcctatttatgcaaatctgcctaccgagcttcaagctaagatatttgagccaacccctgagggtgcccgtaaggtggttctggccactaatatagcagagacttcattaaccattgatggtataaaatatgttattgatcctggcttttgtaagatcaaatcatacaatccccgcacaggaatggaatctctacttattaatcccatctcaaaagcttcggcaaaccagagggctggaagatctggacgcactggacccggaaaatgcttccgtctatacacgagttacaactacatgcacgacctagaagataatactgttccagagatccaacgaaccaatcttgcgaatgttgtgcttacactcaagagtcttggtattcatgacttggttaactttgacttcatggatccacccccatcagaagccctattaagggctctggaacaactttttgctctcagtgcactcaacagtcgtggggagttgaccaagactggaagaagaatggcagaatttccactggatcctatgttgtcgaagatgatagttgcttcagagaaatataagtgttctgatgagatcatctccattgcctccatgttgtcaattggcaattctatattttatcgtccgaaggacaaacaagttcatgcagataatgcaaggttgaatttccacactggcaatgttggggaccatatagcactactaaatgtgtataattcttggaaagaaacagactattcaactcaatggtgttatgaaaactatatacaggaattgcaactgattcgtaatttgtgcaatggcccgtggatgattgg

SEQ ID NO: 40514 - DNA, 2254 bp, Zea Mays
tttttttcctgctcgcgttgtttcgaactcacgcaacgcaagctgagcaaccgctgccggccgcgcacggccgcccacccaccagtccaccactaaagcctcacaccgccacagcagctgccgcggccgagccgacgacgaggatgagcggggccgcgctgtgcgcggcgctgacggagctggggttcgacggggaggacccgctggacgcggatgcgctggagtggccgttccagtatgaggaggcgcgaccgctgcttgcctggatctgctcctgcctccgcccctctaacgtcctctccccgtcccacctggcccagtatgaacaactcgtggaagagggaagactgttagagggtgaagatttggactctgcttttgatagtatttcagctttttcaagcaagaaagacaatcaagaggctgtgtttggatcggaagaaaccattcttgatatccgtgaagcaaaactagcatatagagccgaagtttttgagttacaaaagcagcttgtgcggcagcaagcacaatttgatttgcttgcaggccaggcttcaactcttattcaaggtagaagatcacgtgtatctgctatgtctgcagttagtggagagcttatatcgctagatgagatactttcttccagaaacttggagatgaattcagttcttggaagaatcactgctactacccaggaactagcccattatcattcaggggatggggccatttcgacttgttgctgaggaggggaaatccaaatgttcctgggttagtcttgatgacatcactaattgcttgataagaggagattctgaaaaatcgcatcatcaccaacgtgtcgctgagttgcaacgacttcggtccatatttgcaacaagtgaaagacaatggattgaagcgcaggttgagaatgctaaacagcaggctatactctctatattgaaagcacaagtgtcatccgacgaggctcatatacatagggatatccattctcttaggagaaaaggttctgagcttgctggagagctctcgacactttctcaaaaggtgcaagctttggtatctgagacaataccatgcctgtgttcagaacttgctcaacttcaaggcacatatatcttgcaaggggattatgatttaaaggtcatgcgccaggagtactacattaacaggcaaaaaacgttcatcaatcacttggttaatcagcttgccagacaccagtttctgaagattgcttgccaacttgaaaggaagaatatagctagtgcgtactcattgcttagagtaatagaatctgagttacaaagctacctctcagcagtcaatacccgcttgggtcattataattcattgattcaagctgcatctgaagtacgagaacaaggagctattgatgatcgtgacactttcctccatgcagtgcgagatctcctatgtattcactcaaatgtccaagcaacagtgccaacatacatgtcagcacatgcattggttcagcagatatcagcacttcaatctgacttgctttctcttcagtctgagctggagaacacccttccagctgaccggaaaagatgtatcaatgaattatgtactctgattcaaacagtggaacagcttctatttgcgtcgtcaactactgcagaaccaatattgacgccttggccattgatgcgggcacttgatgatatggaaaatgccaacgctcaagtcgaagtttctgtggaagaagtaaccaaggctcgcacccagaagataaagatctttgaaaatcgtgcccatgaggtggggagggagaggcaaatattcgttgatttcttctgcaaccctgaacgcctcaagaatcaagtcagagagctgacctcccgtgtgaaagctctccaggactaacctgtttctgtaggctggtctcacaggtcgtgatgctttttttttctatgtaaagtttgacttcactccagcgtcaggttggggctgctgtgcagggacggtatggaacaatatacccatcatgtagctcgggggggttcaggctgtaggtccttgtgccacccggaataggatggcattgttgtgatattatttgtagcgatatgtatgttgtaaagtatctcagaaatcacgagccctttctttcgtgtatggttttgcttttgagtaggttgtggtggtacagttgttagcgtccaaaggcacaatcggtactgtagtttggataaatgggatcgatttcctcttcactcgcctctca

SEQ ID NO: 40515 - DNA, 8233 bp, Zea Mays
ctgtccatctctacttctctagtagtagtactttgccattgcgaacgggttaccgaaatttcttcattgcaagcgtctactttctctctctctctctctctctctcgttgcccccgcatactctctgtcttgggcgctctctgtctctggtggcggcgagtagcatactctctgtcttgggcgctctgtctctggtggcgacgactcgccgccgccgccgccgcgataggccacgcctcctggtcgccatttccggatccttaccgacgacgcgcacccaccaccccatctttttccgttcctgctgtgcgacacacaaaccctagctgtatcgggtgggctgtgaaatggaccaagctgcagattcctctgaactgcttcgtcgcatcgaggagctccagcgcgaaaaggatgaaaaacagaattctttggaactattgttaagacggattgaagggctacaatatgaaatggatgaaaaagtagatcttgttgaagtgttaactcgtcaagttgaaaatctgcagcgagagcgtgatgagctcagaaaagatattgagcaattatgtatgcaacaagctgggcctggttatgtttctgttgcaactcgaatgcttactcagaggacagcagctttggaacaggatattgagaacctccagaaaaagttaggtggttgcttaagagagaatcaaaatttgcaagaggagcttgctgaagcttatcgaattaagagccagcttgctgagttacatggtgctgcactatcaaagaacaaggatcttgaaaagcaagtaagatttttccagagcagtgtcgctcaagcgtttgctgaacgggacagttcattaatggagtgtgagaaagcaaaagagcgggaagaagcagtgtcaagaaagtttgctgattttgaggaaaggatgagagaatatcaatcagagattgatgaacagaaacacttaaatgatgacttgcagagagaactgacagaactgaaggcacatacagaattgtccttgaaagttattctaaaattctatgaccttcgttgcagagactctggatgttcttcaagccttactattgaagagaagtgttcaatccttcttggtgattctgctgacaattggagttttagctctgatggcggaacctcaactttgaagtacattgtaaaccacccttatccattataaagaatgattcatatttaagtatgcgatctgtttttttttttgcatttgtattgcaagatacaaattctctgtggcactaaacatcatctggcgcagagccagaaaattatagatatggggacgaaatgctaaaaaataaattattagaaggcaaaatcagcattttcattgaattttatgtgcataagaggaacttatctatcataacagagtgcttgatcctccctccttccgcccctgaacatgttaatgcattgttggctaattggcttgttcagttttattctgggaactaaatgaatgcagaaggtaggaaatgatgaaactttgctggcatctgtttcaggacttatgcagttatgctttgttcccagtttctcattcaacatactgctcaatacatggatagaaaacatccgtattattgatggaagtcataaatttagtgctaatcttctcatttgtcctattcagtaagttatagttcagtatgattgtcatgttctatttgacctaattgtgtcatgtacttgagtaatacaacatgacttgcaggccctaatttgttttcaagaactgtttattgattttttttccagttgatttggtcctaaaccaaagtgctttgcatagttaaggcgagtgtttgacccccgccttaccttcgaagcggtaaagtgtaaggcgagacaacaccttaatcatatataaatataggaaaatatagaaaattagtcttgaatagaagtacgaaagtaccaaacagaagtctataagttcaatataagcaaacataataggctaaaagtccaacataagtaggttctgatactctcatctctcaagttctgatacatcatcaaactcatcaaaaatgggaggattactgtcttcttcgcgttctctcccaccggatatatcatcatcttcactcacattcaagtcatctttcgcatgattggttgccgcgtcctacccgcccagactcgcggcatgcgttggccgggcgcgagcgagtgtttggttgccgcacccacgccctccggactgcatgtgcgcatgcagtttagtgctttttttcgccgttctgcctgcaagcgtggagaagccggaaattaccttcgctgggggaccaggcccgcacgaggcaggcacgtgacagaccggcaaccaatcagcccccttgtggatctggctcaaagtcttcgtccatggcacctccctcttcttcttacggcctcattcttgcatgctttctctatgtaaggccagaactttgtctctgactagcttgccttggaaggttgtgccctcgaagcgactccgatgctctagtagcaacatcaacatgatccatcatgtgaggtcaacaatattatcattgtccctgctggggtgtaccactgatgagtatccactcgttgtcccaatcaaaatcctcaataattaatgggtcatagcttgtgccggctttctccctcatttgaaacctacttcgcatcttttgattgtatgaaacatagaccaagtcattcaaccttttatgcaacaacaagtttctcttctttgtatgtatagtaagtaacaaacccaacctaaataagtagcaagaaatagattgaagctagtaaacataagcgaagtagcaaaaaatggacttacaaattcaaatgtgcttcaattcctctcacaaccggatgaggaagcacaaagtctaaccagtaaccacacgcttggcaaacctttgaaattcatatgctcggccgccatatgaacgttatcaatcaactacgcagatgcaaacagcgacacggtcacacacataggtatacaacagcaggaaagaataaaaaaagatgtgctgaaattagcaatcagccaagcatatagtactttagagggctctttgcttgaatgttttcaagtgccaacttgtttgaaaaatagaccctctatgatcttcataatgcatggcatgctcattaatcttcgaccgtatttcttcattggactccattcttgctagcacataattgaaacaactcctcagctttacaacatatctatcatctccctttggatggcaaagaattttcccaggttcaaataaagtgcagcaccatacgatggatggtccatttgtttcatccaacgaccctcaataatgtccataattttttcagcaatgcttgcttgttttgtgtagggaagctaagccttttctcttttgcaacatccattagtgctgcaatttatgtcatgtatgttttttcatctccatcaactgccctaagcactataagaagtgccaaagctctgaggcaatcttcaactgaagaccaaaaagtcttagctagaataatattacaccccccttccagcctctgtctttgccaacttgttgcagttccatgcatctcacaaaaagtgctctcaaggcatcttgatgtttatgtagacttttcaaagtaaggaatgtggcaaaacgagtggctgctggtcttaaaggatccccctcctatcttctccctcattgcacttagaattcctccatgcctataaataaaagtggtgactcttttggcttgtgcaattagtctttcaaatatccaatatcctccaccatgaggtccaaacaatgtgcagtacaaggaccctagaacaatgttaaaatactatccattagaagcctacccactgccttatatttttttctcgaatacgcaggagagctgcgtatcaattcattaatagtagaggagaaatatatatacaagaaaaaggcccacacacttgcacacacccactaggaacagaactgcaagaacatttgcgcctgttacagcacagaaacgaccctacacaacaactaaaatcggtatgccgtagcctccagaagctgcagatccttggcccctgctgcactccaacacaaaatctcatcaccagccaagcacaaggcagcagccaatcgtggaggtttgcgaccaaagacattcatttctgtgtctccacaaggtccatgcccctaagattatgagagagttaaaacctttctgaatggagcttcgcatagagctggaagaactgctccaccaatccaaaaaggaggtcgcctcaggctgaggggcaagaagtgccaaacccattcggctaagaaaaaagaaccagaactgacacgaaaagagacaggagacaagaaggcgatatagcgtttcacgttcttggtcacacaacacacaagcttcagggtgtggcagattcgtcctttcaagtcgatcagatgtccaacacctattgtgggcagccaaccacatgaagaaggcacatttaggcggcacccacaatttccagatacgctcccatggttcaaagaacaacgagctctgcatgagagcatcatatgccgatcttgctgaatatgccctgacggagagaggctccaaaaatgtctatccggcatttccagcacccctggctgaagctgcaccacgtgtatagcctctcaaataccaagaaactcttgctaactctgccaagaaataactccatggatatcgtggacccatcttgaatctgttagagcatctaggaccatccttcgattagctattctggtgggaatcatactatgtataagtggtgctagttcctttaaccgctgcctcatcaaccatctatcctcccaaaacaaggtggtgctaccatcgcctagttcagtagtcacggccatgttgaaaattccttgcacctgtttatttgcttgtagcttgaaggcagcccatggtctctgtcagcctttggctttgtggaagcagcctccttagtggtttggtatgaacctgaagaccgcctatcatccacaacctattcagggattctctggagcatgcttgcgaccttcccaaccacttttggcatgttttgggcttagttgtagctggttgcctaaactgaaaggcggctctcctccgtttagcagctgtcccggaacttggctgcacaacggagcaatcagattcattctgtcctagcctctgcccctgcacctgcccatgtactggaccaatgttataaggaaaataggcctgttcctcttcttctccaagtaagctgtcatctcttttctaatctcagtggtggtgttgaaacacatgactgtcctcatatcccccggcaaggtgttctttataccttttaattccttctttgttaccatgttgcatcggatgcatgtcaccttatcctgattccctatttctgtccaataaccgtacttccagcctgggtcattgaattttgcctctggatcttgcatggggtgataaggatcaacatcaatgggagcagcagcagcggatgcggatcagacactctccatgacaatggcttactctgtacaggtggatagtaagaaaaaggcaaaggttcagctcactaattaacatcagagagtggggaacagagcagcacggaggcccattatcttgcaccggatttaaagcagagggctgctgctaggatgctggcctgcccgccctgtctggctgcgccagcgccacccctcctgcgtggccacaccccactcctccctgtctgcgcctgcatgccttgcttggcccgtgccgcccacctcgctgtgccgcccgtcctgcctggtcacgccactcctcacccctccttcgaacagaacaggcgcaccgcgcaactcagcctttgaacagagcagcctccgcccacaaccagccgccttttcattcccttattcccataatgcgacaccctagaaccgctttacggacgtctgaggtgccagagcgactagacggtaaggaagatgccttagtgtcaatcttaaggcgggtaaatcacctcattttttctgaccgccttaccgcctaagggacgccttaatagtttgcattagagattttcccttcaatgtatttgacattttttgtaggcatctttagaagaggagaaagagtcacttaaagctaaaatatcgaagctgcaaagcaacctaagaatgggccttgaaattgaacaacatttgcaaagaaatgcacgaatattagagaaaagacaggcactgtatgatggattcctgagaaatggattgtccgaacttcaaaagttctacacatgtcaaaaggctgaaattatgaaaatattggaagaagaatcgttgcggttgatgaaagttgttgcagagattcaggataaactaactgaaatttgtatcaacactgaagttagtgaccaccctgccgatgagattcaatgttgtgacagcagttgtaaagatgtgcatgttactaaagatatcagtcctagcacatgtcgtaagagtgattatcctgctgatcttaactccgtgtcgtttgatgaatctaaagcacttgcacaagccttacaggagaagatggaagcacttatgctcttctcacaggaacaagaaagatacctattagagaaacagagagacctgattgttatcgaggaactccagaagaacttatctcaagtagtacctctagaattcctacttgtcattatttttcaatcacaacgtactatatgacgagtgttctaaatagtacaagtatggtttgtcatgaagttgatacttcataccattactattttgtgcattttgctcctagctgttggaaaggtaaaactgaaccatatgattcttttcgaaagtatggattaaatgactagagttagttttgaagtttgaacttggatttttcttagggaagttcgtcaatatattatggacttgactattcacactgctaacactggtggtttgccagtagtgtcatccttgataagttgatatacagtaattagtcacatttacttctttagtatatgacctatttttaggtgtgagtttctgttgcacatcagcacactttagtgttggatgagtgtgtcgcttgactacttcatcttatgtgtacaggttaaagatgaaaaggtgaaggtcctgatggaattaacaaaactaaaagaacaatatttgctattgaagggctctgctgtcaaggaaggtcatgatactggtgattcatctaaactcattcctgggcatgaccaacaagggatgctgaagactatgctgaagaggacatctttaagacactggatgaggaaagaaagtaatactattggacatgggagctctgatggaaatgatcatacagtttgcaaagaacattcagtggatgttgcaaggtgttggtactgttgagcatctcacttcttcagtgcatagactgcatattgtgcttttgaaggcagggcaggattttttttggttgtattactaggtgataactttcataccaacaaacatgtcaggcttatgatgatatcaagtcagctgatcctttggagagtacctttgaagcgctcaacagtcttataactgaagcaaaccttatgaagacagctcttaatgtggttcttcctgtaagctggtccggggattcatcagatgcaattaaatatgaagctatgtgcgatccatctgattcacctaaatcgaagtctgggaaagtagacccgctctcttctgcaggcatggagatggtggagctactaatattggctgctgagattctcaaggagagctttctggtgaagaaataaggcctccatgtaaggacgagtatggctctccttgtttgtttagaagcatgcaatttaatccttaatttttttgggtgtatatacttaaactgattgctaaaagtgcactactagattatttcggatgtagagaaagagccgaatgtgcactgtaatttacggttcgctgctattgatgtgtcttgtgttggtagactaaaggatttaagagccatgtgtacaaaattcagtttacaagcaaagatcaaagaatagacatgaactagggaaagagaaagaaaaacaaactgaaagttccatacctaaaagcgtcggcactggttgtcgcctaaaggaaggtgaatagacggaatctaaaaattataaactta

SEQ ID NO: 40516 - DNA, 2002 bp, Zea Mays
aaccccttttctcctatccctgcactccccccccccccccccctgctgccccgcgccgaagcaggtgtggcggcgctgcgagcctgcaaccatctccgcagactccgctgcgactcatctgggctacgacccacgtcaaggctgctagttgcgttcgttggagttgcggcttccgcgaatcccccaatccatcccagtcatggcgttctggggggtggaagtgaagcccgggaagccctacacccacatccatcacgctgaccatggccgcctccgcatttgccaggctacactgggcaactgtgatgctgctgcaaggacggtgctgcaatgcaatgttggcaacaagattcccatcaaactttgtagtctaaatccgaaattggccgagacatgccatctagagactgtgaagtcatccttaacatgtaactagagaatcttatggggaagatattgggcactccagcaccgatgaggagcatgataccagtgaggacagctatgaatctgacttcattgatgatcgtgaagttccattatctgagaagtatgggtctggttctatagatgacagtgatgatgagtgcacccaacgatgccacagacaaaaagctgaaaaaacgactcaaaatgctgaaagacggcggcgcttgaagaagcaccaagtaggtagcactgattacgatgatgatgatactccagtcatgaaacatgttgcgaagcgctgtgctcctaaaatatctgatagtggtgatgatgacactcctgtcacaaaacctgttgtcaaacgtagagcttcaatatttgatagtgacagtgatgaagatgataatgtacctatttctcttgcattgggtaagaaagacaatgctaaggttgctgaggaaactgaacatcaaaatggacaggcaaatggcatcaccaaaaaaaggattattgatgtcaagaaaagaaaacagtcttccatcagcgaggatcctgcatcgtcaatggatatgacagatgctaatgcaccatctgtttcaaaacaagttgatgaaataaaaaagaaatcaaagaaaaagatgagaaatcaatcaggggaaaataatgagaagcagtccaatataagaacattggatgacgggttggtggttgaatatttgtcaatgggaaacaatgatgcaaaagtggcttctgatggctgcaaggtctatatcaaatatgttggcatgttgaaggatgggaaaattgttgagtctaatgttagtgaaaagccttacaagttcaagcttggtgctggaaaagttatccgtggatgggatgttggtattcatggtatgcgtgttggcgagaaaagaaagcttacagttccaccttcaatgctctctggcggtaaatcagtgggagaagtacccgaaaattcttcagtcatatatgaaatcgagttagtgaaagtgaaataaagaaaaaatatgtcaggcttttgcatgtgccctatctcagcagctgcaacagttgcaggaattttgttgatatacagatgactcatgctcatgttttgcttccttctggaagaatttatatgtgccactcgtgccacaccataggacatcgagcagtgaactgcagcgggtgctttatccatgcatgccttgactggatacttggttttgcactatctggctacattactttgtaaactgcatacgatggttgaagcactattgtggtctggtgatttgccatatgtttgtgactacttcgcggttcactgctttgaatcatgtttgttttgccaatattgattgagttctgtaatagtttgatcagggtctcttggcttacgtgccagtcttttactgtagaagtggattttttttttccttgttacgtttggcagacgttgaactggtgcaaggcctttaaagtaatggctaatatatcgtccgtgcgtcacgaggatacaaattattcaaaagaatattagagcaaaatgattacttaaaaataaacaata

SEQ ID NO: 40517 - DNA, 3104 bp, Zea Mays
ccggctgcccctccatatcccttcgccttcgtcagttcctacctgcccccagccttctctcccacctccaatggcgctgctcttgccacctcccgccctctccacgacgcctccatttctctccgctccccgaccagcacggctaccctgtctcagatgcactagaactaccaccgccacctcaagcgtctccacctgtcctcccgcatcgacgtcttctccctcgacctcctcgccggtggcgtcggacggcgcagttggaaggaagagcaagaataagagcaggcccctcaagccgagttttgaggaacaggccctccgccgctggtccgcccgggcaccttcccagcgtgcctcggtcccctgggaacaacctcagcagcagtcgcctttgccgccttcgctgccgcaccgggctggccgaggaagtggtgatgcgggcgatcaaaaacgcagtggtggaggctcaagcgcaacgttgcgctccatcgtggactactttgctggcggctcctccgatgacgaaggagttcgagtagaggaaggggcgtgcgacaccaccgcagtaccggaccaagcggcacgggagcaggacgatggatcgcattttcggccgagctatctgcttgggagccacccattctctgcgccatggattcacagggaggaatcgaccaatgataggggggtttccggtccggtggccgaagaggaggaaaggttggacattcgtgatgcttctgatgatgaactgggcttggtggatgaggataaggaagagacggataatggtgaggagcttcttactgggggtttagaagatgaattttatgatgattatgccacaccaactatgaattcttcatatggagtggatttgtcagtggacaaagatgcttatggtagcaggttcgataggagtatgatgcagagcagtgtaaacaccatagttaaaacattgaggaattcgatggaggaaagtgacccgaatgccacggttgagttgtctaatgcagaagattttgtccagaaattgggccctgcactcctgccatgggaaagggaggaggaagatgatgaggcattcagcggtggcagggcggtgaggcgcagcaacacggagctggccgagaggtctattccagagcctgaactgcggaggcttagggacacggcgttgaggatgaaggagaggataaaggttgggccagggggtgttactcaagacatagtggagagcatccacaggaaatggaaggtggatgaggtggtcaagatgaggtttgaaggccctccaagcctgaacatgaagagaactcatgatttactagaggacaggactgggggagttgttatatggaggtcagggagatcagttgtgttgtataggggaatgaattacaactttcaatgtgtgcagtcatatgctaaatttatagaaattgattcgggtaagggagttagcgatgctaatagtgctgtattgagccatgatggtcacaacttacaggcctcaagagcagatggcatgaagagtttaacgtctactggcaatttttctctggagtcctctgaaacatttgatattgataacttcttggatcaattgggaccacggtacaaggattggtctggtcgtggccctatccctgttgatgccgacttgcttcctggtgtagtacatggctacaaaccaccatttagagtacttccctacaagattaaaagcactcttagagataaggaaatgacaactctgcgtagacttgcaaggcaaactgctcctcatttcgctctagggagaaacagagaacaccaaggcttagctgctgctatggttaaattatgggagaaaagtgctattgcaaagattgccatcaagagagggattccaaacacatgcaatgacagaatggcagaagaaatcaagaaattgacaggaggagtgctcttgtcaaggaacaaggagttcattgtcttctacaggggcaatgatttcatagctcctaaagtaaggcaggtcttggtggagaagcaagaacaagccattactcaacaggatgaggaagagctggctcggcttaaagcatcagcctcaattattactatccccaaggatataaagggtcctctagttgctggtactctggcagaaactacagaagcaaaatctagatggggaaagtcagttaatgataagcagagggaagaggagatgaagcatttgtctttgttgaagcatacctctcttttgaagaacttgaagagaaaactgattttggcaaaaacaaaagttgcaaaagcagagaaggctctagctaaagtccaggaatttctcactccagcagagcttccaactgatctggaaacagttacagatgaggaacgcttcttatttcgcagaatcggcctgaaaatgagggcctttttgatgcttggcagacgagaagtttttgatggaactgtacaaaacatgcatttgcattggaagcatcgagagttggttaaaattgttgtcaggggaaagagctttgcacaagcgaaacatattgcaatctctctagaagctgagagtgaaggtgttctcatttcacttgacaagacaactaaaggatatgtaatcattttctaccggggtaaaaactacaggcgaccccaaatcatgaagcctaggaatctactaacaaggaggcaagcattggcacgctctatagagttgcaaaggcgggaggccttaaagcatcacatctcaagtctgcaaggcaagatctcgaagttgcagtcgcaacttgtacaaacaaaggttgcaagtgagaaacatgatctgaagctgcttcaaacagttgaggatgacttctcatcatcagatgatgatgtagaggatgatggggaagaagcttatttgcagacttacagcagcgctgatgaagaagatgccgaggatgatgctaatgaatatatttagactggtgcggttataactaatgaggcttaaggtggtcgtgttatgttctgaagcagtaaaagttcaatgagttttcaggaatggtggaccaaggctgaggatcgggtggctagccaaacaaagaaaggcttcaatttcg

SEQ ID NO: 40518 - DNA, 2093 bp, Zea Mays
ctcaaggcagccttcctcgtcacttccgcagcgacacaatccaagggcccgtccggcagtggcacaccaacccgccgccccgccacgggcgcgcgcgcgaacactgggccccacctggcagcaattcgcccccggcccccatacaaatatccggcgcgtcgcggcgtcggcgtcggcgtcgtttaccagtcttctcacccggtcgccggtcttgagcgaccgcctcgctacttcctcctaccggcgcaggcacacggtttccgcgccagcaaggggtgcccaccgcaaagatccgatcgatcagatcaaaagggaattcctgaaaaggagagaggagcacccttcctcgccatttccgtccaagtgttttcccgaggagtcgtgcgtgcctgctggcgctggggcggctggacgggagcattgctggccgcggcggagcccggcgctcgagtcccttctctcctctcctctcctctcctctgcggggggcagccttttatttgacaacggtataaagaaatcaagtacaaatgaagaggcacatctctgcccagtatttgatgactgaagataggtagcagtatggtagctgctacaattgcgggaatgtttcttgtgtgttttgagtccctctgcacctgttttggcacaaaaaggaaagatgaaagcgaagaccatgttcttgcagaacattccaattccttgagttcttatcaaatgaggtcggtttctgatagaatttctgcaagctcgcttcgagcacctgcaagtccatctagattttcattgtcttcgccaccaagcagaaatgaacctttaaacatcagtcttgaacatgtggttaaactgacacataacttcgctccgaccttgatgattggtgaaggttactttggaaaggtctacagagcgacactgcgagatgggcgtgtagtagctattaaaagggcaaagaaggaaaattttgtttctttacgtactgaattcagcaacgaagtcgcattactaaaaagtattgaacataagaacttggtccgattgcttggttatattgacaaacccaatgaacgaattctcataacagagtatgtaccaaatggcaatcttagggagcatttggatggtcaacatggcctagttttgggatttaatcagcggcttgaaatagctatagatgttgcccatgggttgacttatctgcatctctatgcagcccataatacatagggatgtgaagtcatcaaacattctactgacagaaggcttcatggccaaagtggctgacttcggatttgcaagaactggtcctactgagccaggccagtcacagattgagactgatgtgagaggaacagcagggtatttagatccagagtatctgagatcaaaccatcttacgatcaagagcgatgtgttctcttatggtgttttgcttctagaaatcctttcaggacgtcgtcctattgaggcaaggaggggtccaacagaaaggattacagtgagatgggccttctataagtacaacagaggaaatgttagggacatactggatccaatgttaacagaagcagtgaacgagaatatactgaatagaatctttgatctggcgttccagtgtgtcgctcctacccgcgaagacagaccatccatgaaagaagttgtggagaggctgtggaagataagaagggatcatacaaaaatacaaaggatagcagaattgactctctgaatccttgaaccagctgatcccggttgccgtttttgcttgagggaacatggatcagttcctagtgaagaccaaaggtcaccacataaaaataatgcaaattttgtggttgtgaacaactggaactttgtacagggttgcaaaattgttgttgtattatgttgtattgtacatggctctatgttcaagagatcaaggtgccgaacaatggcctgtgatcgatgatttccctgtgtagccactagcccgtttatcaacataagctgttcagtgatctgtaaggcacaatgtagcttctgtgtaacacctgcattgttggatgaggcttttaaaacagttagatatgaataaaatctttggctagttt

SEQ ID NO: 40519 - DNA, 1459 bp, Zea Mays
gagaatggagactggagccgtctcctcctgtcctcccgagacccgactcaactttttctctgcacgccactgccaattccccgccagcagcagaaatcacactccgcttcatcttccgctggatccctagtctacgccggcctaacgccttgggacctccgctgctgttctctcgccggtcatttttggttcaggggctgatcgcttgatcggatcggtgtcgcagccctatacatcatacatgacgacgcccggctcctgtcctgcgacaaccgccgccacccaccctcccatgtgcgccgctagcgccgcaggtggatcgcaaaaaatggtgcgtccgcgactagtgctcttcggggactccatcaccgagcagtccttccgccccggtggctggggtgccgcactggctgatacctactcgcgcaaggctgatgtagttgtcagaggctatggtggatacaacacaagatgggctcttttcttagtacatcacatctttccgctggatggtttagcaccccctcttgcaaccactattttctttggagcaaatgacgcagccctgttaggaagaactggcgagcgacaacatgttccagtttcagaatataaaaataatctcaaaatgattgttaatcatttgaaggattgttctaattccatggttattgtgcttattacgccacctccaattgatgaagaaggaagagaaagatttgcacgaatgcgaggaagctacctgaaaggacaaatgaaatggctggggtctatgctggttattgcgtcgaactagctagagaaatgtgtataccctgtgttaatatctggtcaaagatgcaggagacagaaggatggcagaaactttacctaagtgacggtctgcatctgacacaggaaggaaacgcagttgtccacaaggaggttgtcgaagcattgagaaatgctggtttcaaagctgaacagatgccgtacgactttcctcatcactccaaaatagatggcagttgtccagaaaaggccttccaatgaaatgatttcgagttgtgtgatgttttggagttttggatcctgcattgaagattacgataacgtccaatgacatgagcttgagctgttacattttgggagtttgaaatcttgcgtatattttggagtttgagatcctgcattgaagattgtaatttcctccgtgcaaaattaaggacctaggcttctccaagatgctggtgttgcttcttctacacttacattttctggattaagacatgttagcttccatttctcgttattgtggtggatggtttggatattgaacgaattgaatattcggatatcatggtgttctgaagataccggatacagatctggatgactggatacagaaacggatactgatatgtagatagttgattagttgtcacttaccctatatagctatcaattacctctaaaaaat

SEQ ID NO: 40520 - DNA, 724 bp, Zea Mays
ggtttatctgatggatccgttccggtagaaattgagttctaccaaaccagatgatgttaagaaaggatcctatgcttgcctgcgcaatgtgaacacggaacggggttctagcagaaggctggcctctgaacagtttgatcaggcagtatcacttcttcagaagaacacatctcttccttctgtgccagacgttgtatcaacaggttgcagctcacccggcctgtctcaggattgctcggtctccatggaggatgctatgtcaacatgcaactcaacagaaagctctgatgttgagtacctcaataataatgacgacccctcaatgacatcttcttcgcattggtgggccagtgatagacctcatttctctgatagtatggatgttgcagaattcaactggaggaaacatagtcctaatcattacacctataaggatccacgactttctacaactcttgcctgtgaaatttacgagagcttgcgagaggctgagactaggaaaatgcctccaacaaactttttggaaaccactcagacagatatgagcaaaaccatgagggcaatattaatagactggcttgtagaagtcacagaagaatatcgtcttgttcctgaaaccttatacctcactgtcaattacattgaccgttatctttctgtcaaagagatcagtcggcacagactgcaattagttggtgttgcttgcttgcttatagctgcgtaa

SEQ ID NO: 40521 - DNA, 1641 bp, Zea Mays
ctctgatctgttttttgaagccataaccatttggtttggagagcccaacacatgtgttgtaaattaggaatcccaagcccgccatacttcaaaggtcttgtgactgaatcccaggccacaaggcagctgcctccattaacctcttttctccctctccacacaaatcattttctgattttatcaattttgataatcacccacttagggacattcatagcaaggaaaagataaactgggatgggtgaaagtacaaagcgcacaagggctgtccttccagcaaggttgaggagcctagctttccaatttggtagcctatccgcaatcttgtcaacccaattcatcaaaatcttgtcaacccaggagttgaagcccttagcattgtttccagaaatctagttaaggagctgcggaaaggctttaactctttaataatcctagttgtctgggagctgtggaagcataggaatgtatgtgtctttaaagaagttagcccagctattcagtctgtccttctcttggtggctttcgaggggcacttgtggtgtcaggcaggagcttctcctgaagtctcttgctcctatatagtgagtgtcctgcccctggtagagtttggtcgtgtaacgttcctcccgaccgctgcagcttggacttggcatatctagttttccagaactatgttgggcccttcgtatgagatggctctggttgcaaaagacagatcccacacgcccatggtctgatctccccataaaagttcctggaaaagctagagctttctttacggaggtggtcattattgaggtgggagatggcacaaatacaaagttttggaaggataagtggctaactggtaagagaattaaagaccttgctccaagtttgtttaatgctatacccaagaggattgtcaatagcaggacagtatatgaggcaattacaaatagaaaatggatcactgatattaagggtccgctgacagtgggagtcttaacatattatctccagttatgagatatgatttcagaatggcagctgcagcctgaggttgaggatagacatgttttcagtatggctcctactggcacctattcagcaaagactgcttacgaagggttctttttggggtctgtggttttccctcatcacaagagaatttggaaaacttgggccttgccaaaatggcgtttcttcatttggctggtagctcaaaaaagagtttggacagcagataggcttgctaaaagagggctggttcatcctgataagtgccccctttgtgatcaagaggatgaaactattgatcatctccttgttacctgttcattttccagggaattctggtatttgttgctaaggaaatttgatatgcattctttggctcctcaaccggatgttggctcatatccgggctggtgggaatcggtggggaatattgttaatggactcaccaaaaaaggacttgattcccttgtcattctgagagactcgatcttgtggaaagatagaaacaaatgtgtctttgatggctgcagccctagtgttaccatgagtcttagagctgtggatgaggaaagggcaaaatgggagattgttggtgccaaggggctttcccatttggcagcaccattagctgagagttaa

SEQ ID NO: 40522 - DNA, 2019 bp, Zea Mays
tgtcctttccgcaacagagcttgtgagcttgaccagcgagaggcgagtggctaggacctaggcctccgatccatgcaggtccctgtgggtttcctcggcaagctctggagcttcgtttccttcgtgcccttcttcgtcctcctcctgcttctgggatccatcaaagctgccctagtcggcccggtcacagcttccatcgtattcttcgggagctctgcggttattattggcctctggcctgctcatttcatctggacatactactgcgttcttaaaacagaaaggatcgggctgcagttgaagattcttactggactactgctgccattgccactgcttctcttgccagtacttgctagcatcgggagtctcctgggtggtactggatacggagtttgcgtacctctcatggcgaccttcgaggctgttggcgagggtgtcactgacaagctgacccattgtttcacggatggaaccgtaagcgcgatggctggagcttgcacggttgtccgtgatgtcaccgatttctgcttccactcgtacttctctttcatggatgatcttattgacaaaatgggggacaatgaagaagcccctctcgacatcaagttgtcttatctaccacggagcatggtcgttgccttaatcgccgttccagtggatgtgctgctgataagcgcagtggctttgtggaaaagcccctgcatgttgttcaaaggatggcagaggttatgtgaggatctagttggaagggaagggccgttcttagaaactgtctgcgtgccttttgctggtttggccattgtgttatggccacttgcggtgattggggggttacttgcttcatttttcagcagcttcttcttcggttttcgcgcgggactggttgcttatcaggaggcttctttccaaatgggacttgcatacatgatttcagcagtagcaattttcgatgaatacaccaatgacttgctttacctaagagaaggatcatgccttccaaggcccaagtatcggagagcagatatcatgagggagtgtgaaactgagcctgcagagaggcaacaaactggccatcacaagcatagaaggacgttacctcgatcaaagacgttcatgcaaaccgtccagcgactacgaccgattcaaatatgggattggttcttccggtcctgtgagctcaatggaaggatactactgagcgagggcctgattactgcccaagacatggagcaatacatcaccaatggaaaatgcaagaagctggacactaaattaccctgctggtgtatcttccagtgcctattacgatctgcgaactctgattcagacggtttggtcatatctgatcatgtccaagtgacgaccctcaactggcccaaagacagagtccttgactggctgctcggaccactcctgctcatcaaggatcaaatgaagaaactggaggtcaccgaagacgaggagatgtgcctgaggaagctgatcatgacaagcaagaacgagaagccatctgactgggacgattcgggtttcccgtcagacgacaacataaagagaggccagctgcagtcgataatcagaaggtaggttgcaagggattgtggcctacatgtcccgagtgccgagtttcaggaggcgcttcatcaacctggtcaaggccatgtatctagaggccatcgaagcaggggccatcgacggatcgcgcaaagttaaggcggatgtggctgacaggtgtgcggaagatattgccggttcatgttcatcaaccgacacgccagcgaacattcacatggtctgatgatgtttcaccagcatagcagagctcgacgagctgtgctgaattctgctatttcttctgtaaaaagaactgtgctgaattgttgtgctaaactgtgccaaggctgcaaacaaatacaatcgagcgaccatatcttctcattagcaatatggcatataatttttgtctaatggtcgtcagatggttaaaaaaatctgttaatacaaacaggaaactcc

SEQ ID NO: 40523 - DNA, 2678 bp, Zea Mays
cccaaagataatattagagcgctgtataccgtcgcgaaagaacatgttatcccaacatgtattgaccttgaccatcttcctcttcttcctggtctgtttctgccactccctccatgatcgcctaacctcagtaacaccactctaccccggtgacaagctcgtctccgacaatggtggcatgtttgctctcggcttcttcaacctcaccaccgtcaactcaacgcgaagcctgtacctcggcatatggtacaacaacatccccgagcgcacctacgtctgggtagccaaccgcaacagcccaatcaccacgccttcagcaaagctagtcctcaccaacacttcccgcctggtgctgtccgactccgagggccgcgtagtctgggcgacagacaacagcgtcgtcgccggcggcagcggcaccggcaccggaggctccggagtgctgcggagcacggggagcttcgagctggagctgcagctgcccaacggcacagcaggcgtggtgtggaagagcctcgaccaccccaccgacaccatcctcccgaccttcaggctgtggaccaactacagggcccacacggcggtgcgcgtcgtcgcctggaagggccctcgggacccttccgccggcgagttctccctcagcggcgaccccggcagccggggcctccagatcgtcatctggcggggcacaggcacaggcacagcgggcggccgctcgtggcgcagcggcgtgtggaacggcgcgggcgccttctcctccatcaacaggttcgtgtactcccaggtcgtcgacgacgggggcacgatctacgcggcgtacaacgccgccggcggccccacgacgcactggaagctggactacacggggaacgtgagcctccgcgtctggaacgtcgagtcgtcgtcgtggagcgtcctcttcgagggccccggcaccggctgcctgggctacggcgcgtgcgggccgttcggctactgcgacgccacggggcgcgacggcggcgtccaggagtgcaagtgcctcgacgggttcgagccggaagacggcttcttccgcgacttctccagagggtgccggaggaaggaagcgctgcaggcgtgcggcggcggcggcgaaggtggcggcgggaggaggcattatttcctggccttgccggggatgaaggtgcccgacaagttcctgtacgtcaggaacagaagctttgaggagtgcgctgccgagtgcgaccgcaactgctcctgcaccgcgtacgcttatgccaacttgagcggcatcgtcaccatgagtgccaccagtgacgtgtcaaggtgcttgctttggatgggggagcttgtcgacaccggcaaggacagtgatttaggaaacaacaacaagaagaagatcggcagcatggctatggagattgtgctcccggtgatggcatgtctgttgatgctcacatcatgtgtatgtcttgtcactatatgcaagtcaagagctcgcacgcgacgatggaacaaggaagcacacgagaggagcgttcacggtttctgggatcaaaatccagaactatcgtgtacaagctttgcggagctcaaagcagcaacaaatagttttcacgaagccaacttgcttggacaaggcggctttggaaaagtatacaaggggacactggaagatggcagggaagttgctgtcaagaggctgagcaacggctctgagcaaggtaaagaacagctcagaaacgaactagtcctcattgcgagtctgcagcacaagaacctggtcaggcttctgggctgttgcatccacgaagacgagaagctgctcatatacgaatacctgcccaacaagagcttagacaaattcctcttcgatcctgcgctcaagtccatgctcgactggccaaaacggttcaacataatcaaaggggtagctcgtggaatcctttacctccaccaggactcaaggatggtgatcatccacagagatctcaaggcgagcaacatcctgctggacgcagagatggaccccaagatctccgacttcggcatcgccaggatcttcgggtgtagggagcagcaagcaacggttacatgtcgcctgagtacactatggagggcatcttctcggtcaagtccgacacctacagcttcggcatcttgctgctggagatagtcagtgggctgaagatcagtgcccctcctcatctactgacgggctatccaagccttattgcctacgcatggaacctatggaaagatgggacggcgagggagttcgtagacgccatggtcgtggagagccgctgctcgcttgacgaagccctgcagtgcatccacatcgggctgctgtgtgtgcaggacagcccgaacgacaggccgctcatgtcgttggtcgtgtccatgctcaacaacgaggccgcgccacgcccagtgcccagccagccgttgtttttcgcgcagaggtaccatgaagccctggcgacgagaggagactattcggaacactctgctaatgacgtcagcctgtcgatgctacaaggccgatagatgttatggcccgtcgtttggatcccttcgattttgaaggaattagaatctacttaacagatcaggctattttgtttcgaatttgacattttaccgttttccaaagtttagatataaagctatttcaaattgattttatgtattac

SEQ ID NO: 40524 - DNA, 2702 bp, Zea Mays
cccaccgccccattccatccatgacggtcgcccctaacccacggtgtcgactgctccaccgtaagcgcctgtttcaccgccaccgccgacttcggttggtcctcacccgcgcgtggatggcgcacgcgcctctctcctccaagtgcgccgtcgacaccaagctcccctgcctcaccgcgcgatctccagccccgccgcgctcgcaagtcttgagatcgagcagatccaccatcctgcgccctcgccccatcacgcactcaccttggccccgcatccctgcgccgccataccctcggcctcgccctcgcctcatcctcccctgcccccgcaccgcatccaacgcgtagatccagcgtcgtcgccgcgatacctgcccatgccaccgcgtgcgcaccccccgtgccgtcggcaaaccctagcgtgatccccaccctgcccccgtcctcctcacatcatcggctcccccgtcatccatatcccagtggacatctctggcgacgagaggatgacgtcgtccggggtggtggccgcccggacaacccgttgctcgccaggccgagtctcctgagacccttgagcttgctcagtgacggagggatgcttccatggaaggaattgaaatacagatcaagaaactctaggctctagcactactccagctcttctggcatctgaccggagaatttgttctcggatagcgctagctgagcaaggctggtgaggctggagacgtcaggttggctacagtgtcggggatgaacccactcagcgcgttactactcagatcaagctccactagctgggcgaggtcgccgatggaggatgggattggccccgtcaaccggttcccctgcaacgccaacttcgtgaggttcttcatgttcccaatccctgttgggatggtgccgttgaggaggttggattcgaggcccaacgtcgtgagcccgatgaggtcgtcgctggccggtggaatagacccggagatgctgttttcccctatgttcagtgcttgaatctccctcgggaggcgggcaatggagcctggcaactagccaccgagcttgttgttgtcaagggcgaggacctgcaggctgccgcagttggtatccacagagtctcgaatctgaaatcgatcgtgttgtatatgttccacgatcccaacgacgtaaaatggttcaagcctattgagcggtggacaaaacatggtcgtcgtggccgcatcatggagaccgttggtactcatggtgccatgaaatgtttattcaacagcagcatgatactgtgtgcatgagcttgtacaaacacgtgtacctaaaatggccttaacaactctaccacgtataaggttgcctgacgtttcgctagatctgtaccagcaggctatccaaacgacgagaatgaaataaccttggagctagcgtggtgtgtagcctatctaaatatttttaggattagaaaattgttttgtattggtccatcttatacttttctttaacattacaccctcattcttcttggtcttagacgactcttttcagtatcaaatccaaattcatgtttaattgcgtgttgagataatgccaacttattccatgttggcatatgtactacccagtacccacaatcatcggagggtcttataagaaacattagggggtaactctacctacatctatcttatacttgaacatcacacccccattctccttggatcaaatttaaaccaacaacaaattcacttgtatgtggaggcatctattttactacttacaggtatgcatcttgactagctcgctgagggggatggcctggtggatctgttgttggtttgcttgtatcctcggcgtctggtggagctgcgccgcctccacgccactgtcaagcgcttcctcggcgtctgcttcggccactagctgccaatcccatacccgtccagatataagcaagctataatgtgcttttgaaatacaagcgaatattgctatagcatgctgcttgagcttagcattcctctttctttcttttgcagcataagaaacactcttacgaagctcttaccaaatctaacggttacaagattcagttcatacttgggttttgctcattgtattgtcttcaagcagggtatgaggaatagtatagatggaacaatttcttctctgttagtggcacattgtcaatggtgtgtctgacaacattctcaaccacatcatcctagagaacaatgagaacaagcctgtcacaaacagtcgtgacactcaggagatatgccttgaacaaggccttcatatcctcaagatattcgaggattatcatgtcagcaaaacatccatcctgaacgaccttgcctcagcaatgggaaacactccaaacccatacgagcaagccatgtccacttgtgtgaatgaccaagcgatgatgctatcgcatatggtgtggcatgagtctacaatttcactgtagttatgaaaactgatcagtcaatgatgatgaatcatacgaaccttttttacttcagcacgttctttaataggggacgaatttgcatgaggtgttatgaactgcaggtggaggtgagcagtgggagcgtttgcgtattaaagtgcattgcactacaatacttgtttgtggatgttgagtgtttactttagcttaatcaatcttatagttttttaattaattaatgttatctttgttgtcca

SEQ ID NO: 40525 - DNA, 621 bp, Zea Mays
gtcgctcccatgcctcagcagtgacgggcatggccaaaacagcgtcgcgcactgtgtaggataacattgtctgggtgcttcctgcctaggtgacttttgtcgcaacttggaggagaccactcaccagtttgcctttccgattggaatttcctgtccttgtccatgttctcgcagaggagatgggctggtttatgagaacatttgaggatgggaacacagctagcagcataggatccatgacataacagccctgttaattattgtgcagcagcggagaagatcgagaagactgtcgcacgcgtttgctatagggagtagactgtcgagaagactgtcgcacgcgttttcgaataagtccagtttttcgcctctgttttatgcacttaatgaataaactagcctttcatgttttgtccttcagtgtaacttgattttgttacctattgctttcactttcaatgattttggtttattctgttatgctgttatcatgtggcattttttcatctcatcaatatcacaaattctatcctcttcataatgttgctagctcttaggagatcctaaatgaatgtatatctgatctcggtcatgcagatgcatcattttagtggttgttgg

SEQ ID NO: 40526 - DNA, 1261 bp, Zea Mays
cacgggtcagataagcttttctctccccttcgcagctgcaaccgctcgccgcgtgctccctttgtactgaaccgcatcctccccgcgccgacctgctccggcgagttaaacatggccgtcctcctccgcagcacctccgccgccgcctcgactgctggcccctcctcggcgctgctcgccaccaccttccgccgctcccgcggctgccttctgccccgtgccgcgccgcagcgccgcttgtatgtggcccgcgcctcggcccagcccctcgaggtctgcgctaaggagtccatcaccatccctggccgcctcggagactgtcctttcacacagagggttttgttgactatagaggagaagcatctgccttatgatctgaagctagttgatctagctaataagccagattggttatttgaaatcaacccagaaggtaaagtgcctatcgtgaagctcgaggaaaaatggattggtgattctgatgttataacacaagcattagaggagaaataccctgaaccacccttggcaactccaccagaaaaagcttcagttggatcaaaaatattttccactttcattggtttcctcaaaagcaaagatccaagcgatggaacagaagaggcactacttaatgagcttacttcatttgatagttatctaaaagacaatggtccatttattaatggtggaataatttctgctgctgatctctctctgggtcctaaactatatcacatggagataactctgggccactacaagaattggtctgttccagattcactttcttatgtaaaaacatatatgaaggagagggagagaggtgtcgattggcgaatggagggtctagatgcaaaggtttgtcgcatggctgtaatatgtacatgaaatgtggtggattttgttaggaattttctagggcatagcatatctggtattcatatccaatctcctttgctttgtatgtcaaatggaaaactccttcgagactcaggtttaatttctttagtggcaaattttttggattggttaaaaaaatctctcattgtgtctcatccactttcgggttacaatgtcatatatgttactctttggttggaccgctgcagaatgaactgttgatgttggtgcgttagtgattggaggcgagattttcatggctggtgcgagcacaataccctacgctcggcggcacgggcgaagggccagcgcgccaactcaggtgccgcgtcggcgtgtaggtgcgtttgggcgtagg

SEQ ID NO: 40527 - DNA, 942 bp, Zea Mays
gaggcacgggccgcgacggccgatcaggtgagtagccggccggcagcggaaaccgaaggcacggccacagcaccaccgcgcggcctcgagagtcgaaaccatcaggccatgttcggttggtcagggattggccgggattgtggcgcaatccacgtggatcatccccggctggaaactttcccgattcacattttaattgtcttcggttcatccaccaggcgaggggagggcgacgcgtgcggctagcgaggcgatggttgcgcgacacgctgacggcgacgcctgcgaccatcgatcatccattgttcatctccatccccttcggtggccaattttctctccgggagaaagctggcgcgggttggaggtgggaagaaagagaaagaagatgttgttgcgccttcgattggattgggttggccttggagcgcgtactgccgccgcatgtattcgctgttccggccctgattctatggtgcaccactgtgctgtgcgccgccccagccctcgaggatttagcaaactgctcagatctgttctcgctttgcttcatcagtgaacactgaacacggtctaatatgcattttgggcttcttttgagtcatgttgttggtgtggaaccgtggaagtaggatgtggactgcaaggatggctagtttactctttactggcattgacagtttacttgtcgttcttcagtcatttggtggcatgtatcatcaagcttctgtcctttctatacattgttatgaacgttgctatgccttttatttcgaatgctgatgcaatctacgagtttctatccttgtatgtgtgcatagacattgttatgaatgctgctaatgtcttttattttgaatgcttatgcaatctattgagttgtatgtgtgtaaagacattgttatgtgtacggttttctatgtcatattcttttgcataaaa

SEQ ID NO: 40528 - DNA, 1891 bp, Zea Mays
ttcacttcaaagcaagttttcgtgtgccggtcaaagaagtgaaagcaaaagcagcaaacgattgaggcggtgccggtggtgacatggagggagggggcgcgggcgccaaaagaagatgctgccatggcccggccaggccccagctgctgccctcacgcgcggcgccatattcccccttgtgttgtgttgtgccttgccgccgattcgcggccccgggcgtatccatacatataccgccggaggcggagacagggacggaatatctctgggccgggcggggcggtggtggagtcccaggaaagcaaagcaaccgaccgacgcagccagccggccggccggcctataagagcccccgcgcggctcgcggtggcatcgaccgtcggtcgatcacccgctgagcttgcttgttttcctgccgcggtcgctgcttggccaggaccagctgcttgctgccgtcgtctcgtctgcggctactccggcctctcatgctggccacgccaccgacgctgcgatacgaagcgccgcggtgggcacgtcggaaatggcatcgtcgctgggagtgggtggtcagcagcaggggcacgggcacgggcacggcgaggccagggcgcggctcaggtggacgcgccagctgcacgaccgcttcgtgctcgccgtggcccagctcggcggcgcagacaaggcgacacccaagtccgtgctgagggcgatggccgtgccggggctcacgctgtaccacctcaagaggcacctgcagaagtaccggctggtggcggtgagccgaggcgtcgcttccccgctgggcgacagcggagatggcaccgacgagcgttcgtcctcgtcctcggagaaccagccggcggacgagtgcgacgacggtaccgtcgccgagccgcatggcgattcttccaggagcgtggcgcggatgcagaggaagctgcaggagcagatcgaggtgcagcggcacctacagctgaggatcgaggcgcaggggaggtacctgcagtccgtgctgcgccgggcgcaggaggtcctcgccgaccacggcctgggctcggcagccggcgcggaggcggagctggcctccgcggtggacaccgggtccctgtcctcctcctgctgctgctccccgacgcgccgccgctccgccgacagctgcgtgacgtcctcctcttcggaggccgagagccaggcccccgtcggcggcgccacgtggctccacacgtgcgccggtacgcgcgactgctccgttgagcaacagccggtgcagggggagaagagtacattcctgcagaggcacggggcagcagaggacggcacttcgtctgagatcgatcccaacggcaacaggtaggggacggagtcggagatcgtgatcggaagcatctctctgctctgcatgtgcccagcgtcggagaacagggaatgaatgattggcggggtggccttcaaggttgggacttggggaggggggccaggcttttgagcaatgtctgctgctgaaacagctacctgctctgctcttcgttccagaatatgatgtgcatgtttattttcgtttatgcgaatggttcttgtgtttcatgtaaaaaaattatgactgcaactcgaggaagggccagctgcaaatgatgcatgcagtgtgcttgaggtagcagtacaatgcaaggatgattgcatggtacagaactgtagtagctactatattattagtaagattgtatgccatcagtgagattgatgccttaagagggtaatggcatgagaactggaaaaggtttagaatgtatattaaggcctcatttgaaatagaggattagtaaaaatatatggatgagaaaaatgtaggaataaagttgcatgccaccttcaatttcataggaaaattttt

SEQ ID NO: 40529 - DNA, 2389 bp, Zea Mays
gtcccgagaagggacaaaggcattatcacttgaagagcaggtccaaaagcaaagcatccgaaacggctgaaccgaggcgggcacgtgccaaccacgtgccttacccgccccgcccgcgtcgtccaggtccaaggtccaactcgcgacgcatctcgatggccgccaccgacgacggtgccgtggactccgcctccgccgcggccgcggccagggccgtcgaggaggcgcgcgcgctgctccccgccccggcgccggactacgacgacgaggatctcgaggagcgcgcgtacgaggcggctgagaaggtcatcgtgtccatctcgggcgggccggacccggaggacgtcgacggcgatggcgacggcgcggagctctgctcgtcctcggggtcgtcaccgccgcccttctcgtggcggaagctctggctcttcacgggccccgggttcctcatgagcatcgcgttcctggacccgggcaacctcgagggcgacctccaggcgggcgccgtcgccggggacacgctgctgtggctgctcatgtgggccaccgccatgggcctcctcgtgcagctcctcgccgcgcgcctcggcgtcgccacaggccgtcacctcgccgagctctgccgcgacgagtaccctgactgggcgcgccgcgcgctctggctcatggccgaggtcgccatggtcggcgcggacatccaggaggtcatcggcagcgccatcgccatcaagatcctcagccgcgggtacctgccgctctgggccggcgtcgtcatcaccgccttggattgctttatttttctttcgctcgaaaactatggggtgaggaaactagaagctgtatttgcacttctaattacaactatggctgtctcatttgcatggatgttcacagacactaaacccaacgggaaagacttattgattggtattttggttccaaaattgagctcaaggacaataaggcaagcggttggggttgttggctgtgtaatcatgcctcacaatgtgtttcttcattcagcactagtgcaatcaaggaaaatagatcaaaataaggaatatcaatttttgcaaaaggattttatggaagcaaggaagccggtaatattggtcttgaaaatgctggacagtatttacaagagaagtttggtggaggattttttcctatactgtacatctgggggattgggcttttagcagctggacagagtagtactataacaggaacttatgctgggcagtttataatgggcggatttctgaatttaaggttaaaaaaatgggtcagggcactgatcaccagaagcttcgcaattgtgcctactataactgttgctttgttcttcgacacatctgattctgcactggatattttaaatgagtggctcaatgtgctccaatcaattcagatcccttttgcactcattccactcatcaccttggtttccaaggagcaagttatgggagtcttcaaaataggccctaacacccaagctgtaacctggactgtagccactctgctgatcactatcaacggctacctcttgatggatttcttctcttctgaaatccgaggtcccctatctggctcgcttctctgcgtggcggtcctcatttatgcctcgtttgttctgtatctcatattgcggggcaccgagctgtccgagaagattgccaaagcgatccgcggcagtttttcatgacaatagtcatcagttttggtcttacatagtgacaagaagtttctcagacagaagagacacgtatcgggagatactaccacacccggtctggtgactgcggactggatactacagcacaccggcatacactgtacagtgattgcttggaagggtccacccatcagttgctgcgaggagcttgcaagcctgtagcagctgctcgttgcatctgctccaggccggaagtaacacatagagatgaacgaattgctgatgttgtacgtgaacattcagagaagacaggttctctttgcaatcaactctcttttttttaaccagtgaagtaaccagaggaagaggacgttgggaatggaagaactggaagtcatttgtattctgtttaatttgcacaggagggtatgtgctcaaccatttttcagggaagccgttggattacaggggtgtttgaatgcactaggaagctaatagttatcggctaaaattagctaaagatatacaaacaaaactattagctattttagtaaattagctaatagttagctagctaattccactagcaattttttagccaactaattgtacgtgatttcattgggcttagagcaactccaacaacaccactaaatgtaatagccaaaatcttagaaataaaataggatccttgattatatgattttatgacta

SEQ ID NO: 40530 - DNA, 4235 bp, Zea Mays
gtcgtgcccgagcccgactcgagccgacgaggagagagctcaggaggcggcggagagaagggagaaaatccccggtagggaggggggaaggaagccaaaggcccaaaggtctcggcgctgccgtagtaccggctgaggcaagatggtgaaggcacgaatgacgacgacggacgtggcggcggaggtgaagtgcctccgccgcctcatcggcatgcgcctagccaacgtctacgacatcacccccaagacataccttttcaagctgatgaacagcagtgggattactgaatcaggggaaagcgagaaggtcttgttgctcatggagagtggtgtcaggttccacaccacccaatacgttcgtgacaagagtaccaccccttcaggtttcactctgaaactacgaaagcacattcgtaacaagagacttgaagatgtccgtatgctcggatatgacaggattatccttttccaatttgggcttggtagtaatgcacatttcataattttagagctatatgcacaaggaaacattcttctcacggattcagaatacacagtattgacactactccgttctcacagagatgacaacaaaggattggccatcatgtcacgtcatcgctatccagtagaagcttgccgtgtttttggcaggactgactttgcaaagttaaaggacatgttgacaaagcctgataaggctgatgataaagaggaaattacgtctggatcaaccgatgctcaggaaacttctcaatccaccaatgatgaagtgttggtaactgaaatatctgaaaaatcactgagtaaaaaagaaaagaaggctgctgcaaaagctaagcagtttggttcaaatgcaaaagtaaacaatggtgctcaatccaataaagctactctgaagacaattcttggtgaggcactggcttatggccctgcactagcagagcatatcatattggatgctggtttggttccaagtacaaaggttgggaaagacccagagagcactatcaatgacagcactgttcagtctctaatggaatctattacaaggtttgaggactggcttgtagatattatatccggccaaaggattcctgagggttatattctcatgcaaaataagatgaccgcaaagaacatcacacccttggaagaggcttcgattaatcataagatatatgatgaatattgccctgttctgttgaatcaattcaagtcaagggaatataatgaatttgcgacatttgatgctgcattagacgagttctacagcaaaatagaaagtcaaaaggtgaatcaacagcagaaagcaaaagaggaatctgcagctcagaggctgaacaaaataaaattggatcaggagaatcgtgtgcatacattgaggaaggaagtggaccattgtgtcaaaatggcagaattaattgaatacaatttagaggatgtagatgcagcaattttggctgtgcgtgtttctcttgcaaatgaaatgagttgggaagctcttactcgcatgattaaagaggaaagaaaggctggaaacccagtagcaggacttatcgacaaactaaattttgaaagaaattgtatcactctactcttgagcaataatcttgatgacatggatgaggatgaaaaaactgcacctgtggagaaggtagaggttgatatagcactttctgcacatgcaaatgcaagacggtggtatgaaatgaagaagaaacaggaaagtaaacaagagaagactatcacagctcatgataaggcgtttaaagcagctgagaagaagacacgccttcagcttgctcaggaaaaaacagtagccgcaatcactcatatgcgcaaagttcactggtttgagaaattcaattggttcatcagcagtgaaaactacttgataatcagtggccgagatgctcaacaaaacgagttgattgtgaagcgctatatgtccaaaggagatctgtatgtgcatgccgagttgcatggagcttccagtactataatcaagaatcacaaacctgacactcctattccaccattaacattaaaccaagcaggatgcttcactgtttgccacagcaaagcatgggattcaaaaattgttacaagtgcttggtgggtgtatccacatcaagttagcaagacagctcctactggcgagtaccttactgttggtagttttatgatccgtggcaagaaaaattttcttccacctcacccccttgttatgggctttggtatactcttccgtttggacgagagctccctagcatctcatttgaatgaaaggagggttaggggtgaagatgaggccctccatgaaatggaagcagagtctcgcaagaagcaaagtaaccctgaatctgatgaagatattggtagtgaaggtgcaaataaggaaactcatgaagatgaatcaaacgggcaaactacaaacattcaacaaaacaatgatcttgagcttcctgatctgtctagcaacattggtactgccaactcatctgaactccttcctgaaatccaagctgaggaaaccttggacaatggaagttccattcttaaggaagaaacaatcgaagcttctgtttcatctcaacttgatgatctgctagataagactctttgccttggccctgcaaaggtgtcaggtaaaagctctctgcttaccagcatcccttcaagtttagcagaagatgatgatgatcttgaagtgaaaaggccaactataagagacaaaccatacatatcgaaagcagagagaagaaaattgaagaagggccaagttaatgatgaaactgctactgattctcaaaatggtgaagctgtagaaacaccaggtacatcaaagcaagaaaagggaaaggcagagacaaaggctactgattctaaagcaagtcagccagatacttcacagcaagaaaaaggaaaggcaaacacaaaggctactggttctaaattaagccagccaggtaattcacaacaagaaaaaggcaagggaagcactcacgctggtaacgctaaagtaagccgtggacagaaagggaagcttaagaagattaaagagaaatatgcagagcaggatgaagaagaaagagagatccgtatggcattgctcgcggtgaagatgattcgtcaaaaatatgttataaatgcaaaaaggctggacatctttctcgcgattgcccagaaagcacatctgaggtggaccgaaatgatggcagtattagtagaagcagagacgatacgggtaccaatactgctcctgctggtggcaacagtcctatggacgaagacgatgttcaagaaattggtgatgaagagaaagaaaagttgattgacttggactacttaactggaaacccactaccaaatgatattttgctatatgctgtacctgtgtgtgccccttacaacgcattgcagacatacaaatatcgtgtaaagattaccccaggcactgcaaagaaagggaaagctgcaaaaaccgcgatgagcttgttcctgcacacacctgatgctaccaaccgtgagaaggagctcatgaaggcatgcacagaccctgagctggtggctgcaatcgtcgggaatgccaagatcacagcgcctggcctcactcaactgaagcagaaacagaagcagaaggggaagaagtctgcaaaacagaactagtgtgaaactggtgggtccaaagaactgatccatccccgattcgcaggaagtgaagctttgcctttgcagaaagtctgtggatgttgtggtttgtcagttgtcgctcgaggcgcatttgggggtatatgcagcctgtcagggagtacacccctttggcgtcacactggtgaggccagagcgacaggcacgcagtaggggacccaagctgcacgtctatgatgcaattgcgatatacagctcataataaaagaagtattgatttcatatgcaactgattggttctttattttatttgtgataccctgaaatgaattccgcacatacatttcatgtgcaattcccactaggcatgaatgagtcgtcgattgtgactcgatggtacatgcagaagcatgtcagaacacaagaaaattatataggttcgggttgcctgaatgagtagtaccatacattttatttggtgctaagtattgagtttgctggtggtgcacatattacaaatgagttgcaggtggtgatggatgagatcttacgtcagtctaatggtagtgagagggatgtcg

SEQ ID NO: 40531 - DNA, 936 bp, Zea Mays
tgccgccatccatcctttttcccttcctcccctcaccccctcgtcggaatcggaacggctgtcgtctgccccttcgcccccctcttcgatccctcaccccacccagtgctagctagctagctagcttctagtggctagtagctcccctcccctgtgggctgcaacctggtttgggttcgcggatcgatcgcgagatcaatcaatccatggcgcggaccaactgggtggccgataagatgctcgacgtctacatctatgactacctggtgaagcgcaacctgcaggccaccgccaaggccttcatcgccgagggcaaggtcgccaccgaccccgtcgccatcgacgcccccggcggcttcctcttcgagtggtggtccatcttctgggacatcttccattcgtccaccgccaaagcctcatccacatccactgccgccgccttcatcgaccacaccgccaagcaacagcagccaatcggcgccgggaccggggcgcctcctcctcatccccttcacgattccagagagcaccagatgaggctccagcagctgctgcaccaacacaacccccacctccacactacaagagatgcttctcctcccgcctctatcaatgccctcaactccgatgtctccgctgtcctcgcgtccaaaatgatgcaagaccgagtcaggaaccccaaccctattgactccgacgcctcacagcatctcctagacgcaaacaggatcgcgcttctaaagtcaccaccacctagccacactgggcctatgcctatgcagcagcagcttcatccaaggaaccagcaacttgacatcaagcccgatgttggtatgccacagagaacgatgcctgcagacccttcttccatgtatgcatcagggatgatgcacccaaaacctgcattacttgccactggccacaacataagtgcca

SEQ ID NO: 40532 - DNA, 684 bp, Zea Mays
ccaccacgtgtggcatggggctgggtggttgttgtttgcctctttagctcttgactcttgtaaaaatcagatcccaccctcaccaccgccagcgggatagccactgctgtcgcgctcctcggttatccctggcggtgagccggtgaccgagtttgcaattccaccctcagcatctttgctagcggtgaggctgccattgttgctcgcttgacgacgctcttcaaggaaacacatggtacatgggcaagttcgtcgtgcggcaacccgcgaagctgggcaacagatcgccatcgcatccaccatggtaggtcttgtggagtgcaaggtgtacgcgtacaaggtcggtctggatgtgatcaagttgctggagcgcatgcagattcgacaagagtttcgccctattcacccccccctctaggcgactatcacctctccacatcaagcactgcgcatgaggatcggtcttctccacgtgaccatgttgagcactgcgccggacattgccagctcgcccagcaggtctaattttatattgctcgctgtatgccttaatgcatgtgttagatttgatttgctggacaaattttgtatggttgtatgtttttatcatacttaaatttggtggacaattttgctggacaaatatttgaatttggcggatttaaaaatattgtatgtgtagtg

SEQ ID NO: 40533 - DNA, 474 bp, Zea Mays
gccaatgacgggggtagccagtcctttgaagtttggcagaagcttaacaatgctcttccaccagaaagatccaacgcttctattgccagggagacctcgagtaagatagtagttgttccagatcagatggacccaaggtaagtcgctgtggttgaattagaagagcctcgttctgcgtttctaagcgaagaactcccaggccaccattcactttcctctgagtgaccgaattccaagcaatcaaaggtggcctcttggagttgatgtcatttcctctccacagacagtgctttctgaaaatatcaatttccttaatgatggttttaggaatcttgagcgtgcacatgaagaacattgatagggctgagaagacagaatttaccaattccaggcgcccagcctgggacaaaaaatttgaagagcaagacagcctcctctgaatcctttgaataagaggtaaatagtgttcctttc

SEQ ID NO: 40534 - DNA, 205 bp, Zea Mays
tttcatttctaagaatgctagatgaatgatgctttttaatagaagctaagaatatttgtaaggaagattcatcttttactgtttaacatgaatgctcatgatagttatgatatctaaatacatatggttaattgcaatattatataaatataggcctccactttgtgttttgcaccaggccaaaataaactcaggtacgggcctg

SEQ ID NO: 40535 - DNA, 2629 bp, Zea Mays
gtttcgttttcccactgccgctcccgcctcctctctgccctgtttccacatttgaccgatcctcttcgattcgatttctacacccccagagcttgccaaacccctcgtctcccaaccctagagagcagcagcagcagcagcagctaccgcatcccttgccatggcgccaagctccccgtcatccgctaggcccacgcgcgcctccggccggaagcgctccgccatggccgaggagatccaccagaaccaggaggaggaggaggaggttgtggctgcgtccaccgccaagcgcagacgcaaggcggcgtcttccgggaagaagcccaagccgacgcccaagcaggccaaaccggccgtggcggggatgaagaagaagggggagaccgagaagacggagcccgttgtggacgacgtgtgcgccgaggagcccgacgaggaggagttggccatgggcgaggaggaggcggaggccgaggagcaggccatgcaggaggtggtggccgcggtcgcggccgggtcgcccggtaagaagagggtggggagaaggagcgccgccgcctcgggcgaccacgtgcccgagttcatcggcagccccgttgctgcggccgaggcgcacagcaactggcccaagcgctacgagcgcagcactgccgcaaataaaccggaggaggacgatgagctcaaggccaggtgccactaccggagcgctaaggtggacaacattgtctactgcctcggggatgacgtttatgtcaaggctggagaaaatgaggctgattacattggtcgcattactgaattttttgagggcactgatcgatgccactattttacttgccgttggtttttccgtgcagaggacacggtcatcaattcgttggtgtcgattaatgttgatggccacaagcatgaccctagacgtgtttttctttccgaggaaaagaatgacaatgtgcttgattgcatcatctccaaggtcaagatagtccatgttgatccaaatatggatccaaaagctaaggcccaactgatagaacattgtgacctatactatgacatgtcttactctgttgcatattctacatttgctaatatctcatcagaaaatgggcagtcaggcagtgaaaccgcttcgggtatttcttctgatgatgcgggtttggagacgtcatctaatatgccagagaggacagcaacccttcttgacttgtattcgggctgtgggggcatgtccactggtctttgcttgggtgctgctctttctggcctgaaacttgaaactcgatgggctgttgatcttaacagttttgcgtgccaaagtttaaaatacaatcatccacagactgaggtgcgaaatgagaaagctgatgagtttcttgctctccttaaggaatgggcagtcttatgtgaaaaatatgttcatcaagacgtggattcgaatttagcaggttcagaggatcaagaggatgctgacactcttgacaaggatgaatttgttgtacagaagcttattggaatacgctatgatggcactggaaggaaaaaaggcgtatattttaaggtccaatgggaaggatatggtcctgaagaggatacatgggaacctattgataacctgagtgactgtccgctgaaaattagagaatttgtacaagaagggcgcaaaagaaaaattctcccgcttcctggtgatgttgatgtcatttgtggaggcccaccatgtcaaggtataagtgggtttaatcggttcaggaaccgtgatgagccacttaaagatgagaaaaacaagcaaatggtgactttcatggatattgtggcatacttgaagcccaagtatgttctcatggaaaatgtcgtggacatactgaaatttgctgatggctacctaggaaaatatgctttgagctgcctagttgctatgaagtaccaagcacgccttggaatgatggtggcaggctgctatggtctgccacagttcaggatgcgtgtgttcctctggggtgctctttcttccatggtgctccctaagtatcctctgcctacatatgacgttgtagtacgtggaggagcacctaatgccttttcgcaatgtatggttgcatatgatgagacacaaaggccatccctgaagaaagctttgcttcttggtgatgcattttcagatttaccaaaggtcgaaaaccatcaacctaacgatgtaatggagtatggtggttcccccaagacagagttccagcgctacattcgacttggtcgtaaagacatgttggattggtcgtttggtgaggaggctggtccagatgaaggcaagctcttggatcaccagcccttacggcttaacaatgatgattatgagcgggttaagcaaattcctgtcaagaaggttggtggcttgatagtgttattgtgccttcctttgttgtttgtcctgaaacaatcttcactctttcctatgacagggagccaacttccgtgacctaaagggtgtcaaggttggagcaaataatgttgttgagtgggatccagaagtcgaacgtgtgtacctttcgtctgggaaaccactgatgagatggtgcaagtactgtgagattcatggttaagacatgctaagttattgcacaaatctttg

SEQ ID NO: 40536 - DNA, 470 bp, Zea Mays
ctggctcttgtagctcctcagagggcggcggtgctggtggggtgcttgcagcttcttctttgatctcacgggacggtgctggaatcttcttcatggtgaggggctcaaacaactctggcaggggatcttgggaggactcggggtgctcttgcttatccgtagcctgagggaagactggaattccttccaagactatggctccttctggtagttcccaagtcttcatctctcctctgatagaaaccgggtgaccttcaagaatatgggggtcttcagctctgatgggttgaacaggattggatgaagcgggctcttggatccgcagggctctacgttggttatgggttaccaggtaggcctccatcagcttctggacatgctcatccttggcttgcttcagggcttcaacagcaacgacttcacgactttccaatgcagttgcacgggcttgagctatggtgagatccaca

SEQ ID NO: 40537 - DNA, 2093 bp, Zea Mays
gactaccattctacaagctatcacaagagtgttgtgggcttgtggcgcagcagcagacggacgccaggtttttttccttttagaccgcaacctcaaaaccctagcttgtccctcctgctcccagatctcttccactcggccactccctagcacatcaaaccctagctccgcccagcccccaaccatgtcggcgatgatgatcatcctgctcaaggagggcacggacacgtcgcaggggcgcgctcaggtggtgagcaatatcaacgcgtgcacggcggtgggcgacaccgtgcggaccacgctggggcctcgggggatggacaagctcatccacgacgacaagggcggagtcaccatctccaacgacggcgccaccatcatgcgcctcctcgacatcgtgcaccccgccgccaagatccttgtcgacatcgccaagtcgcaggactccgaggtcggcgatgggacaactactgtggtgcttctagctgcagaattcttaaaggaagcaaaaccttatatcgaggacggggtgcacccccacagtctaattcgcagttatagaactgcaggcaatatggcaatccaaagggttaaagagctggcagttagcatagaaggaaaaagccttgaagagaagaaatcactgctagccaagtgcgctgctacaacactctcttcaaaacttataggtggtgaaaaagaattctttgcttctatggttgtggatgctgtccttgccattggcaatgatgacaggcttaatcttattgggattaaaaaggttcctggaggtaccatgagagactcttttttggtgaatggtgttgcgttcaagaagacgttttcatatgcaggatttgagcaacaaccaaagaagttccttaatccaaagattcttttgttaaacattgaactagaattgaaatctgagaaggaaaatgcagagatcagattgtctgaccctctgcaataccaatcaattgttgatgctgagtggaacattatttatgacaaactggataaatgtgtgaaaagtggagcaaagatagttctgtctcggctagctattggtgatcttggaacacagtattttgcagatcgagacattttctgtgctggccgtgtcactgaagaagatttgcaacgtgttgctgcagcaactggtggaactgttcaaacttctgtaaataatgtcatcaatgatgtactcggttcctgtgaggtattcgaggaaaagcaagtaggcaatgaaagattcaacatatttagtggctgcccttctggccagacagcgactattgttctccgtggtggtgcagaccagttcattgaggaagctgaacgaagtctccatgatgccatcatgattgtgaggagagcacttaagaactcgacagttgtgccgggtggtggtgctattgatatggaaataagcaagtatctcaggcagcatgcacgaacaattgctgggaagtctcagttctttgtaaattcatttgctaaagcccttgaggttattccacgccaactttgcgataatgctggatttgatgccactgacgttctcaataagctgaggcagaaacatgcatctggtgaaggtgctaattatggtgtagacataaacactggcggaattactgattcctttgcaaactttgtttgggaacctgctgttgtaaagatcaatgctataaatgctgcaaccgaagcttcctgccttattcttagcgtcgacgagacagtgaaaaacccaaagtcggagagcgcacaaggtgaggctgctgccggtgcgatggctggtcgcggtcgaggtgcaatgcgaggacgtggtggcaggggcatgcgcaggcgataaactgggtcaagtagatcatgaagagatgcaccaggcgtttatcagtgtaccgtccgctggatgtgttatagtagacctgagctttggattctaatttgtttgacatttatcttggtttattggcttgtcttttgaacaatgagaaaatcagtgttgtagtttgcgatcctcgtgcgctcaagcgtaaaacatagacatgtgtgcttgtttggaacccgagatgtttgctcacgca

SEQ ID NO: 40538 - DNA, 1225 bp, Zea Mays
ttgtcatcaccaagttgaagatgctgagataacttggccttatctgatacctgacctcgttgatgtattgtgaagtcctcttggattcagccttcagcctgcaggacgggagcacacgccagagcacgctggatgtagcgcaacagcagctgcccccctgccctcgggttgtgtgcgtggctgtgttttttagttggaaaaatttgataatagatggtgaataggtatggaaaatgacattttatgattatagttgtgtataggggaagaatttagagagaaccgttgtagagggtggagatataggggaagagagatagctgacgtggcgggatagtggggtatagggggagaaatttagaggagacgattgaagacagtctaaggctatccgcagcggttccctctaaaattctccccctatatcacttttttacgtcatatcatcaacattttatcccctacttcttcttctcctgcagcggttccccctaaattattcccctatacctcactacaaccataaaatatcattttttatacatacttttcatctattattaattttttctactaataattggaagtgggcccacgtcaacaatgcttggagggcagccgcacgcacgccagaacgagggggaaagagaagcggacctccacgtaggagccctgctaggggcagcgctgcagcgaattttggctcctgtagccggcatacaggggaggggccgggcggcggtaagggttgcgtacaccctaaggcatcaaactgtctccagagaatgtaaaggttgtagcattcgacagttggctgggtgctaggtgggatttctacccgagtgcatgtgaagtttgctgaacttccattacccgtgcccatgtatctgtgatttcgctttgtttgtagcttctgttacctttgttcatgtagcttgtctgacttccactgcctggtgaatatctttgtctgaacatttgtacttactttgcgttgcactgtgtttctgatgaaagttataggttaaccacttctatagaaccaactaatcaagggtgcaaattcctcctagtttatttttttgaattattttagtttcaagtaactggtagatgaggaaagtttcgctgttttttttggtgcaagactatctctagcagatcccctatccaatcctctatctcatcctatattttaaacttcactttataaacagtgccaaac

SEQ ID NO: 40539 - DNA, 2690 bp, Zea Mays
catggtttcagtgtcagcagctggcctggcacagattatgcagtttttggagactcaagggttcttggattatctggagagatgcaacactgcagaagaaaatgcccacaaccttctcgataagttgcaggatgcaaccggaagaggacaaaaccctctaaccatatttccttctcaagtttctgatcctgagattataacaatagccaatcctgagattgaaggactagacaatagacactgctataagaggtttccagcaaatgcaagaacagaagaacaagaagaaaaacgtaagtcgattctagcgttagctagtggggctagtaagcaagtaccgagttctccttctatccgagtaaatgggggcccaaaggcagaaagtctgagcccaagagagagggcggctgagagagaaaggatggttctggacataaaagtgaagctccagggactctggcttcgtcttctgagactaggggcaactgaggatcctctctcatcttttgaatatggcaccatcctagctttgattgagtctgacgcagaaggcatcgggggaagtggctttgttgaatgcatcagagagcatattcattcgggctggcaatgtcgcttgactgatgaacaattcattgctgtaaaagaattgcttaagatggctataactcttgcgaactctcgcaacgacctggcgaccattagagatgctcttgaagtttctgctgaaatgtacagaaaagacccaaacaatgttcaagattatgttcagcgccatctattatcattgtcagtatgggaggagcttcggtcagcaaattatgtaacgttagttactgcacagctcattctcatggcaactcacatggctggattgggattacctgacattgactcttggaatatgattgagaaaatagccgagagaaacaacttgggttataaacagcttatcaaacttagagcattgctcacacatctgcaacaactccggattggctattggggggttgctacagggaaaagccaaccattgcagtcatatggcatggcttcacctcatgcgatcgatgtgattgatgaaagccaacaacctgctgaagcatctgggttgggccgaagttgggtgcaaagtatgtttagcagagacagaagtttaagagccagctctttcaaccgagctagtgatggaaatgctgttgctgccacgggcaaaaccgaaatctcagctgcacaaaagaaaactcaaactaacatgaggacccttagagggcatacaggtgctattactgctcttcattgcgtaacaagaaaggaggtctgggatcttgttggtgatcgtgaagatgctggttttttcatcagcggaagcacagattgcacggtaaaaatttgggatccaagtttgcgtggttctgaacttcgagcaacacttaaagggcatactagggcaattcgaacaatcagttcagatcgtggcaaaatagtttctggagctgatgatcagtctgtcatagtatgggataagcagacttttaagcttttggaagaactgaagggccacgaggcaccggttagttctgtccggatgctctcaggagaacgtgtccttattgcatcccatgatggtactgtgaagatgtgggatgtccggactgatacttgtgttgttaccgtgggtcgttgccaaagtgctgttctctgtatggaatatgatgattccactgggattctggcggctgctggaagagatatcacggcacatgtctgggatattcgctccagcaagcagatgttcaagcttcaagggcatacaaagtggataagatcaatgaggatgaccggagagaccataataacaggtagtgatgattggactgctagagtgtggtcccttaaccggggaacatgtgatgcagtgttagcatgccatgctggtcccgtactatgtgtggaatactcaccttcagataaaggaattatcactggttcagctgatgggctcatacgattttgggaaaatgaaggaggaataaaatgcgtcaagaatcttacacttcacacagcatccgttctgtccattagtgccagtgatcactggctagcgattggtgctgctgataattctatgtctctttttcatcggccacaagaaagattcggtggcttctcaaatgcaggatcaaaagttgcaggatggcagctttacagaactccccaaaaaactgctgcagtggtgagatgtatagcatctgacctggataggaaaagaatatgtagtggtggtcgcaacggactcctgcggctttgggatgcaactacaagcatctaggactgatagatgttcatgtgaaaaggcaattgacatgatgttgcatgccattttccttttagctaggaatttatgtgctatttagaggatgcgaaaggagccggactttgttctactgtttctttatcatctaaaaaaccctgcccagttgagtatatgtttgacgtcgtgtaaaattttgtttatattttcgggttcagatagccttacgtggctacgattttgtaagaactatgagaaacttgggaagttctgtactactaccagtgcaaatgtttgttttagtacaacattattttttatgtgcatattcatcgtatgaacctgcactagtgcaaacatgactgctagcatatgc

SEQ ID NO: 40540 - DNA, 829 bp, Zea Mays
attccattccatcagcttgctctaagagaaagaaaaaaaaggagagcactacctctccctcccactcccattcccagcagcaaggtaatagccatggcgccacacgattccgggcgccttgatcactacaagctggagctccatgagctccactaccagctaacccttgtacaacactggtgtggcaccagcaaagcaaaccaagtagcagtcgcagctcccggaggccgtagtaagctgggaaacttgatcgctaacgattgggatctagaagacccccgtcagaacgggaaaatcgttgcgcatgccaagggcctgcatgtccagtccagcagaggagaggtctcagacgaaagctggcacgcttcgttcgacatcatcttccagcaaggaagcggactggaagggtcgacacttcaggtgatggggcctaacgtctacaagggagagtggtccatcgtcgggggtacaggaaagctgacgatggctcgaggcgtcatctacaaagaagagctgtgtgtggtcgatggcatggccagaattggccttgagatccatgccttctacatccccatggaacgaaaagacgccgcaaagaatgtttggcgctggtgaaatcgtcgtccttttccttcccgtgttccaactgccagtggtcgtcttgtcgtcgtcaataataaaaagacaagtccggtgtcgttagttgatcaggactacctatcagttgtagtaactgtttcggctgctgaaaagccgaaaagcaagcgtcagagattgaaatatgtatcgttcattgaaatatgtatcggacattcggactgcggacgcg

SEQ ID NO: 40541 - DNA, 2607 bp, Zea Mays
atcgaacatcggagagatgcgcgcgggcggcggcgcgcctccccgacacgcaccactctccccgaccgcctccgccactgccacgctagtacccgcttctgtcgccatgcccacgccgcgcctcgtacacctccgccacctcctctcattccgctccgcccttccccgcccgctgggtcccaaccaaagccacccgctccccgggtcggttcacccgtcccttctcctcccccgtgccatggctggtgtcgcatacgcaggtctggcgacggggtcggcggaatacgaggaggtgctcgggtgcctcgcgtcgctgataacgcagaaggtgcgcgcggacaccggcaaccgcggcaaccagtgggagctcatgtccaagtacgtccagatactggaactggaggaatccatcgcgcagttgaaagtggttcacgttgctgggaccaaagggaagggttcaacatgcacatttgctgagtcaatccttcgatcatgtggtttccacactgggctcttcacttcaccacatttgatggatgtccgcgagcgatttcggcttgatgggctggacatttcagaagaaaagtttattaggtatttctggtggtgctggaagacactgaaggacaagactggtgatggtgtaccgatgccggcctactttaggttccttgcactgctagcattcaagatcttttcagatgagcaggtggatgtcgtagtgctcgaggttggtttgggagggaagtatgatgcaacaaatgtggtcagagcacctgtagtttgtggaataacatcccttgggtatgatcatatggaaattcttggaaacacacttggagaaattactagagagaaggctgggatactgaagaaaggagttccagcgtatacagttccacagccagaagaggcaatgtctgtactgatgaagcgagctactgaattgggtgtttctcttcaagttgtccaccctttggacccacagaaattagaggatcaacctcttggactccatggtgagcaccaatacatgaatgcaggtcttgcaattgcattggctaatacctggcttgagaggcaaggccatttgaacagattacatgtcaaacattctggtaccttgccagatcagttcatcaaagggctgtcgagtgcttgtctgcaaggtcgaggacagattattccaaattcacaagtgaactcagaaaatgatcgtgattcttcattggttttctatttggatggggcacatagctcagaaagcatggaaatgtgtgcaagatggtttgcccacgctacaaatagtgatggaatacagccaggtccttcggagcagcctcacactgatagggattccaggaagtttctccttttcaattgcatgactgtaagagatcctcagagattgctcccacgtcttctagatacatgtgctcaaaatgttactcacgtgtaatgatgtctggactctggagaaaatacaagattcccctataaccaatgctgatatggatatcacgtagaaaatgtcctttgttccaatgggtggctggttttccaacgagtggctagttaaccagctggttaagtagtgcatgaactagctgccatactctgcatttgcttgctcttcaagaccaatttacttatatcatgagttgcatgaatgctcctgttggtcttataatattagtaaccatttttctcaggtctccactttgagcatgccttatttgtgccaaaccaatcacagtacaacaagcttggatcccttgcatccccaccttcagagcgtgaacaaattgatttgtcatggcagttgtcgcttcaaaaggtgtggggaaacctgcctcatcacaataaaggtctaaatgatgtaaactctagcggagctacctcggtttttgaatctcttccattggcaattaaatggctaagggaaactgctcaacaaaatcaatcgattcagtttcagattgaactggctgcctacggaccactaaggcactaactggagcttatcgaaatttgtgattgggatagcacaacataccaacttggttacaaggctggaagaaattgaaagacatttttatttcagttccaatcagcggtaaaattgttgtatttaatcgtttctttaagttcctggcgttatgtgccatcacatcctcactccagaaggatgtaaccaatttttagaatgtacaattagtggattctcagcgacacatctttgtatgattggtggacgggtctgcgtagcctttgcaacagacaatcaagaagacgctttgacggcctgctaattcatttttggtggaatttatggctggaacgaaataacagaattttccaaagtcagcatagaagcgttaatcaagtggcccttgcagtcatcagatattgctagtagctgaggtcttgttgatctggtctagtgggtttttgttcttctccttttattttttcttttttaccctctcccctccggttctctggttttgtatcttccatttctttgctctctaatctaatatatttcggagtggcaagtcttttgccccttcctttcaaaaaaaaaaaaacaattagtggattata

SEQ ID NO: 40542 - DNA, 1389 bp, Zea Mays
aattttcgaacccttctgccgttcgtgtgcacctggatggggtccataaatatagaaggcctcttcatcttcctattctcctttctctaaaccgccgcttctgttctgatctgctccccgaaactactaaaacaaatcgaagtggggaacagacaagagagaagggagatggcggaggcggtggcggtggcgtacgaggagcaacggcggaggcagatagaaatgaacaagcggaagctggaggagctgcagctccaccacctctccgccgccgtcagagaggccgccgccgctgccaaaccctcgtcggccaagaagcggaaggcgccggtgccgcgggacgccgccacggagccgccaaggcggtccgaccgactcgccaacctccctgagaagccaatgtaccgcgaggtcagggtgaacttgccatttccggagggcagcaagtccaatgcgcgggtgccgctggacgctgccaactccgtggtggtggagccactacggtggtccgaccgactcgccaacctccccaagaagcccatgtaccacgaggattcggacgaggagaggagctacgccatctctaaggctgaggagctggtgcaagagctgggctccagcttccccatcttcacccagcccatgacactgtcccatgtctccggaggcttctggctgggcctcccgaagcatttctgccgggagcacctgcctaagagtgatgagacgatcaccttggtggatgaggaggatgacgagtcagacacgttctaccttgcaatgcaggctggcctcagcactggatggaaagagttcgccatccagcacaagctgcttgatggagattgcttggtcttccaactgattgagcggacaaagttcaagtgttgcaggtctacataattcgagcaactttgtacttcgaaagtgatcactgatgaaactagtagcttctaatatggttattggagcacggttatgaggcagttgcgttggacaagctctcatctggaatttgctcggcatcttgaactttttgggtggcagaaagttagctgatatataaatgtttacttaacctagtatctagttatttagcagctgctaatttgtgtaattgggcttaccaattgcacggttcagaaacctgcactatgtaaggggatgttgatggcaattgacctcattttataaatgattgatgtctgtccatatttctcttggatcaatttcagtgttcagtcaatcctgtgtggttcattttcttatagttatttggtaccaccattagtggctttgtggtgttagtattcagacacatggtcttgtaaattggactaggcttgctatagggatgaaaacggatacttatttaggtatcaatttttt

SEQ ID NO: 40543 - DNA, 2906 bp, Zea Mays
aaatccgaaccaaccaatcccaatatccgcaggcctccctctgcactggaccacaccacaccctcgcctttcccgcaacccagagcccctctgccaatctctgcacaacatcatcgattccccaggcgaaaaaaaatactctggaccctttttttcaatcagattttcaatcagaggagggtagattggatttgtcagattatccgatctccactgcagcctctctgaagagaagaggcccatccagtccagcctttccgcagttcctggagcaatcctggctcagtgcgtgaagcagcttgattcgcctgcgcaactgatagtcatagaagggagccaagagcttgttcttggctgcttgaccgattcttgattgagctgctgcggatcttgccaaagggccaagagcttgctgtgtctggaattcttggtcagccgtgccggatagggtgagggtgccatgacagcatcgcagtcctcgatgagcggcggcggggagccgggggtgcggacggtggtctggttcaggcgagacctgcgtgtggaggacaacccggcgctggcggcggccgctcggacggccggggaggtcgtgccggcgtacgtgtggtcgccagaggaggacgggccctactaccccggcagggtgtcccggtggtggctcagccaaagcctgaagcacctcgacgcctcgctccgccggctcggcgcctgccgcctcgtcacccgccgctccagcgacgctgtcgtcgcgctgatcgacctagtccgcagcaccggcgccacccacctctttttcaaccgactctacgacccgctatcgctggtccgggaccaccgcgtgaaggagcagctgtcggcggagggcatcactgtgcagtccttcaacgccgatctgctgtacgagccgtgggaggtcctcgacgacgacggcttccccttcaccatgttcgcgccattctggaacaggtgcctgtgcatgccggaccctgccgcaccactgctgccgcccaagaggatcaattcaggtgacctgtcgaggtgtccgtgggacgagctcatctttgaagacgagtccgagaagggcagcaatgcgctgctcgcacgagcgtggtcaccagggtggcagaacgctgacaaggcgctaacggccttcctcgacggtccgctggtcgactactccgcgaaccacaagaaggccgacagcgccagcacgtccctgctgtctccgtacctgcacttcggcgagctcagcgtccgcaaggtcttccaccaggtgcggatgaagcagctgatgtggagcaacgacggcgaccgcgccggcgaggagagctgcacgctattcctccgcgccatcggcctgcgggagtactcgaggtctggagacaagggaggactggctaccctcttgtcgacgctggcatgagggagctctgggccaccggctgggttcacgaccggatacgtgtcgttgtctctagcttcttcgtcaaggtgctccagctgccatggcgctggggcatgaagtacttctgggacaccttgctggatgctgaccttgagagtgacgcactaggctggcagtacatttctgggtctctccctgatggccgtgagcttgaccgcattgacaaccctcagtttgaagggtacaagtttgatccgcacggggagtacgtacggcgatggctaccggagctggcgaggctgccgacggaatggatacaccacccctgggatgcacctgagtctgtgcttcaggctgcaggagtcgagctaggctccaactacccacgccccattgtggagttagatgcagccaattccaggttgcagggtgccctgtcagagatgtgggagcttgaggcagcctcttgtgctgccatcgagaacgggatggaagaaggcctcggcgattccacagatgagccgccgatcgacttccctcaagaattacggatggaagtggaccgacaaccagctcaacctgctatcatccacacgccggtagtggctggttggagacgagaagaccagagggtgcctagcatgacttcctcgttaattagagctgagaccgaactcactgcagactttggcaacaccagtgaggacagtaggccagaagtgccgtcaaacattcatctgcaggctcgggcggagagggaagaaacagttgacggtgccactggcaatactgtcagggtgaatggcaaccaacagcagcagaatcttcagaacaacatgcaccgcgtgctaggtatcgctccatcaatttcagaggcatcgagcagctggacgggtagggaaggtggattggtaccggtctggtcacctccggcagcttcagtacattctgatccatatactgccgacgaggctgacatttcgagtaggagttatttggacaggcatcagcaatcaaatacgatgatgaactggagtcaactctctcagtcattgacaacaggatgggaagtggataattagtgctgtgtgaccggatttaattgattaggagttcggcagagagaattatattatacatatgtaaattatcacattttgttcgtctatatagccttggtgtgcatgcaagtcatcgaacatgcagcttcttggatgcaataattgttgtgaacctagttgtgtagaaccttgtggtttaggttgctaggtgcccacaagatatgtattattcgtcagataagagttttctagcatcaggttcattttgtatctggttattgtcatattgcagttcttggtgatgggatagtcaacacaggtgtattctcagttttatagacagcacttaccttttatctgtgacaacgaggactcaaagggaacatcttggcagtgagattgtgtgccactcttaccttctgctcctttgcctcaat

SEQ ID NO: 40544 - DNA, 655 bp, Zea Mays
tagaggccctttcgcatgctattatgggtgcttttggcaaggatgctttgtttggatttggcctcacaacatattcgttgcttggactaggagtgcttggagggccactgtctcttccttggggtttgtacgtgctaatatgtcagagaacacccgagaaaccatgcttgaacgacgtgagcgatgttggaagttggaggagggcggccttgatagcttcagtatttcttgttgttttgacgctcattccgttgtgggatgaacttgcggaggaactaggtgtagggcttgtttcttcgttctgagatgcggtgcttaccgatagaattaggccgtgatgtagttcagttttgtgttgaaatgtagcttcccacggtggaattgttgtaaaggtatgtggaatttccggattaggtgagcaatgatatcgcttatgcgagtgtaatgaaattgtgccaagtatagacgctaacgattaccaattacatacatgtatgctcacttaaccatacagttttgtgttgtaaactagaatgtatggatttataaaaatgagaataggcatgtcaagtccaggacttgaaatctggctaggcaggttatgctgaatcagacgcggcacttgataaagaaatattttcacagtttactctag

SEQ ID NO: 40545 - DNA, 2482 bp, Zea Mays
gccatcgcgcgctcgcctccctccccgcgcccgcagtccccgccgcaatccccgcgtccgcgcccgcagtccccgccgccgagcagtcccgccgcgccccctctccctgcaaaccccgccacgacgcagcaactgatccaccatcgacgcgcgcgccgcgcgccccgacgcggaacgctggatcccgcgcagcagaaggcggccaaccagtcgccgtcgcccccggcccccaccccgcctgctgcagcaagcggcgtccgctaccgcatgccctcgtccccggacctcctcctccccgccgacgctaccaagatgcgccgctactccgcgctgcccaacggcggccgccaggagacgttggccgaccgcgtgcaccgctaccagggcgtcatgctcgtcatcctcgcctcgctcgcgctcgtctctctcgtcctcctcctcatgccacgctcacccgctggcaccatgggcggcgcccggggcagacaggtacgcactcccccgcccggtgacccgttgccggacttggagtcacgctgcctagactcgcccgctgggtggattcgtcgcgttggaggtcggattgtgaccacgccgtccagttaggatgtcgtcgtctccagatccaggggatggggttgctcggcatggcggccaagggcccctcgcccacgcgtcgcctcctatcgcagccgcacttggccatctcctcgctggtggcctccgtggctctgatccactgcttcctcaacacccggagatggttgacgtcgccttcgccgtctcctcgccagtggcctccaccagccccgcagtccaagacaaagccgcgacatgagtcaacccaagtccggtcgcacctacaccgatgaccgtacccaacgtattcaatctctctattcggcaacaccttaaaaagtggattgcaggcttagataatttttggaacacaacattgctccaaaaaagtttttctgaagaaaaggtatcaatctgcagtttggtaagtgagtctgaatctgcagcaccaaggacttcaataattagtttgaacctgcacttacagttctatgggtcttctcaattcttaataatattatatttttaatgaataattgaatatatattgagtctgtgtcatagattcagtcgccttaacaccctttgttgttttcccacttaagttagttaatgagatgaatggatggaaattacgtagtgaatgtatgataagtccaggctacatgttaaaagacacacttggctacttgagctctgtatttccatgaagaaatcttattgacgggtgctttcatctgctatttggatccgttgctgatggatcttacaaagaagaagttgagctttaagaggaacgtggtgtcattgtcatctgagctcaagggtgtgaggagcaagcttgcttcctaggagcagttgtttgtaagggaatctcaaactagaaagcttgcggagacaaaaacaaggagcatggaagaggaagtaatcaagctgcagaaatgcttataggacaaggatgaacaactgcattcattcacaagtagcacagaacagtaccatcatgagttggatgatcttagaacacatctgtcatttactcaagctacaggagaagcaggaacccaactgaaccttcaacttgcttgttctgggagatctgtgagcaagcgagttgtcctataacagttggctcctcacaatgggtattcgacatgagccccatccctgccacagacttgggaaaggcacagtgatttttatggtgacatgaagacattcctcttcaaattatatctttaagcaaccaattttcgccctactggtgcaaacaagaatttgcaatggataggttactggctgcacttgtttgtgaatacttggagtgaccacaactaagtcacacaatgaaactttactttccagagtgtaacctgccggacttctaatagaatgaactgaaagacttctctaacaaaagtggagctgaggggagcaagagtgctaaaagtggtccaatgtttttagatgttctcgaatgttatctgaaatatgaggtatggtgcataaaaaagtaggaaccacaatgagattgtgatgctgcacatggcacatcaaggtgcgcaagatatgtaccatagaaattatcgtaaagtgcacacagctgtatgtatagatgtttagaagtgaccgaagttaggcttgctcaaccggggcaatgatttacttagcctgctgaaatgtactataggtagcattcaagtttgtgaccatcatgcaagtacatgtgggtttgttgaaattgtgtggtcatcggagatgtagcaaaatgttccctatcgagagctcgtgtactatatttgttttatgaacttaattttgttgatgtaggactattacaaagttctagagacaacttaatttttattacaacataatatgtggtcatacatatgttaatgtt

SEQ ID NO: 40546 - DNA, 911 bp, Zea Mays
acacccctcgcccgtttcttcccggccgtggcatgcacgccttgacatagacgcccctctcgttccttcttctccacactaccagtcaccagacccggtacataccccaggccgcccgcggctaagacataaagcagcgcacacttgcgccgccgatcgaggcatatcgtacagggcgaccgagggagcaaactgacccgtctatggtgttgagggcttgcgcaatggagggcactttcggcgtgccgtattacgagtggctcaagccgcggtcctcctcttcgacgccgccgccatcgccgtcgtcctcgtctacgtcctcgacgacagtctcagcaccatcgatcgaccaactagccgccgccgctgccgatgtcgtcgtccatgatgagcgcgacgccatgatgtgcttgccgcttcttggcaggcttgaagggagggcgacgactcgtgatcttggccataatccgatcaaagaagaggaggccgccggtgttgacctgagcatcggcctgccggcgccggtaactggcgccagcggctactgttctgaagcggcgccttcgtcgcccgtggacgaggatgaggatctcgaggaggaagaggacgagaaggcaaggaaacgtgacagtgacgagtgcaaggtggaaggagcaggtggagagcgatatcgcagtgagatggtggtggtgtccggtgagagaccggccgattacatgcgtgtgggtggggaggagggcatcgtcggcagccgcggccggcggtactggatcccgactccggcgcagatactcgtcggcccggtgcagttcatctgccatgtctgcagcaagactttcaacagatacaacaacatgcagctagtgctgcaaggaacatatatattcgtcatttatgtatctattatctat

SEQ ID NO: 40547 - DNA, 2035 bp, Zea Mays
gttgcccagaaagtttgctgtgtgaaatcgtctacttttttgtattctgaatatgtgcaaggagatactcagttatcttccaaaagttgttggaattgatattgtggagctagctctttgggcaaaggaaaacacactgaccatagataatcaagtgagtacccaagatggtcaagaaacatcagttgctactcaaaccgagaggaaagtaacagtaactgttgaaaatgatctcgtgtcccaagcaaaagaggaggaagaagacatggaggcacttcttgacacgtatgttatgggaataggtgaagcagatgcattctctgagagattgaagcaggagcttgtggctttggaggctgcaaatgtatatcaattactggaaagcgagcctttaatagaagaggtcttgcagggtctggatgctgctagtgcaactgtagatgatatggatgagtggctacggattttcaatctgaagctgaggcacatgagagaagatattgcatcgattgaatcacgtaacaatggcttggagatgcagtctgtaaataacaaagggcttatggaagagctagataaattgcttgagcgtctgcggattccacaggagcatcattaactggaggctcatttgaagagtcacggatgctgaaaaatgttgaggcatgtgaatggttgacaggggccattcgcagtcttgaagttcctaatttggacccatgctatgtcaacatgcgcgctgttagagagaaaaaggcagagctggagaaactgaaaacaacttttgttcgacgagcatcagagtttttgcggaactacttctccagtttggtagacttcatgatcagtgacaaaagctacttttcacagcgtggacaattgaagcggcctgatcatgcagaccttaggtataaatgcaggacatatgcccgacttctgcagcacttaaagagtctggacaagagctgcttaggtcccttaaggaaggcatactgtcattcccttaatttactactacgacgagaggcacgcgaatttgccaatgaacttcgtgcaagtacaaaagcaccgaagaatcctgctgtttggcttgaaggttctggcggctctggtcataatggaagcagttctgatacttcacaggtctcagatgcatactcaaagatgcttacaatatttatcccgcttcttgtggacgagagttccttttttgcacattttatgtgctttgaagtacctgcacttgttccagctggttctcctaatgctaataagagcaaatccggaggaaatgacccggatgatgatctgggtcttatggatccagatggcaacgatctgaaacctgacagtacctctgctgaactgggtacattgaatgaagctcttcaagaattactcgatggaatccaggaagacttctatgcggtcgtagattgggcttataaaattgaccccttgcgttgcatctcaatgcatgggattacagagcgttacctttctggacagaaagctgatgctgcaggatttgttcgcaaactacttgatgacttggaatcaagaatatcagtacagttcagccggtttattgatgaagcatgccatcaaattgagcgtaacgaaagaaatgtgcggcaaactggaattctagcctacattccaaggttagcacaatgttcgcaactttggagaaaattgcacagagtgatcctaaaactgctgatattgtgttgattgagaattatgctgctttccagaacagtctttatgacttggctaatgttgtgccaacgcttgcaaagttctaccatcaagccagtgaatcatatgaactagcttgcactcgccatatcagctcactcatttatctgcaatttgagaggttatttcaattcaaccggaaagttgacgaattgacttacactattgctgctgaggagataccgtttcagctgggattatcaaaaactgacctaaggagggtactgaaatccagcttatctgggaggctcgttcatcccacggtgtcaccatg

SEQ ID NO: 40548 - DNA, 2024 bp, Zea Mays
tgtcgccgcgcgcatcccagtatcccaattcccacggccagacggccacccacacccacctctcaactccgccaagccaagctcgatcagcgaaactcaggcgatcggacgacgccccaccgaacaagtgcagcgcccggcggccctcccccccggaacgaagcttcggcgttctcgtcgtgccgtcgcaagatcataagtctataacaagaaagacaacaaaactatgctgaaagatgtgcttgcatagaagagacttctgctgcaacaccaccaagggcctggtggttcttgcgaaaggtctgcaggcctgctcgtctcttgacttcagcggcgatcaccttgcctgcatctactccacgcccttcagactccgacgccaccgatccataaggcgcagtccacctgattgacaacagaaagctagccctgtgtgcatcatcacacaattttcatagagataaaagatatgaagaccagagggaagactttgacggagcgatacgagatggggaagctgctggggaaaggcgcgttcgggaaggtgcactatgcaagggacctcgagtccaaccagggtgttgctatcaagatcatggacaaggaaagggtgctcaaggccgggctctcggagcaggtaaagcgcgagatcacgacgatgcggctggtggaacacaaaaacatcgttcgtctccatgaggtcatggcgacgcggaacaagatctacatcatcatggagtatgcgaaagggggtgagctcttggacaaggttaagaggagcggcaggctgacggaggctgacacacacagatacttccaacagctcattggcgcactggatcactgccacagccgaggtgtataccaccgagacttgaagcctgagaacctgctgttgaatgagaatggggacctcaaggtgactgactttggactgagcgcgttttcagagtcgaggaggacagatgggctgctccatactgtctgtgggacaccggtgtatatagctccggaggtgatcaagaagacgggctacgatggtgcaaaatcagacatctggtcttgtggtgtcgtcctgtttgttctcgctgctggctacctccctttccagggcccaaacttgatggagatttatcgaaagataaatgatagtgatttcaggtgccctggttggttttcacacaaactcaagaggctgctgtacaagattttgaaccccaaccccagcatgagaccttcaattcaggagataaaagagtctacctggtttcgaaaaggtccaagggagatcagtgcagtgaaggagaaagttcttagcgagaatgccaccgccacaaatgctgccccagtgcttgctgctaggcgcaaggagattgctcatgaagatatgaagcccctggttgccacaaaactcaatgcctttgaaatcatcgcgttctcagcagggttggacctttctggtctgtttatcaaggagtgtaggaaggagacaaggttcacttcagataagccagcattggccatcatctcaaagcttgaagatgtcgcgaaagcactgaatctcaggataaggaagaaggacaacaacactgtcatcattcaagggaggaagcatgggggcaatggtgtccttcagtttgacacgcagatctttgagatcacaccatcctgccatctcgttcagatgaaacaaaccagtggcgatcttattgagtaccagaaactgttggaagagggcatccggccagggctgaaggacgttgtctgggcctggcatggagatgatctgcagcagaagtaggagtagcttcagatgtctcctgtagattatgttatacattccattccttattttttagcaacaacattctcttttttgtattggtggtgatatgaaccattaggctatgttttgttgagcaataattgttgaggagctgagttgttgtgttacattctgaagattgttacagttttgtaatggctgtcaatatcagtaatgaaaataaatgttgttgatcctt

SEQ ID NO: 40549 - DNA, 837 bp, Zea Mays
ggaaagaagccgccggtggcagagagcgtttgtgcggggagtggaggccgctgagctcaatttccgtagtcatcgttgtcccgtgctcagggaggggtcacatgggttctatcgcgggcggagatcgctggtgattgattccctgggcgtgtaggtcaccagagttcggggaactgctcgccggagcgcgaccgctgtaggagaacaacatctccccgtggtcagggcactgcgaggcacaatcgtcgacgagctagtggccgaggattctggtgttcagcaggtagaagttgctgagcaggagctcattgaaggcaagttgtgcccttgaccacttatttacccaataatgttatctataattattttatcatggataggcttaaatttgatgggacccaataggccaccctagtctggttatcttttcaccttgtttacccttgaatttttgggtagtctttgctattgctatatatggttttgggtgttgagataattattacacttgatcattctttattattgttctacttctgctcatgataagaccactatgttaattggaacatcgaacttaacttgagaaacacgtgccaccataggggtggaatgggacgtccttggctgactaactaggaaagctagtggaggactactgttggggaccttcggcattcgaaggtcctcaaaaacaggatttaacagtatttctggaagtataatgtgtgagcaggtaccttcgaactcaagttggtatcacggcgggagaggacccggatagtacgaaggtcttgatacaacgccgaagatgtcagcaggaaagcttcggcgtgg

SEQ ID NO: 40550 - DNA, 1855 bp, Zea Mays
tttcagttactacagtctgttcgcagtgactccaacactggagccagtgcagagctatcgccacactgtccgatctcactggccgctcgatctcatccgtccgctggtaagccataagccaaagaccacaatagatctcgtctccctccgttcccctcctgtccgtcattttctcgtcacctacatatctccggctcgccgtcggcgtcgccgcctcctcctccttcgcccgctggaggcgcccatagcgacctcaccggtgggtttgctgaagtgacatcggccgaggtggaactggttggggggagtccatttcgggttcgagcagcctgagccggcgcgccggcagcgacggagtcgtgcagttgagttgagatggcaaacattccccactccttcgcaggggcctcgcctccgtccccctctccgatggctggcagcagcagcggccccgccccgggccaggcagccaaggacaagaagatggcgtccgcggaacagctggtcctggaactctgcgaccctgaactgcgcgagaacgctttacttgagctctccaagaaaagggagatttttcaagatcttgctccgctgctttggcactcatttggcacaattgctgcgttactccaggagattatatccatttacccgtcactatcaccccccacactgtcacctggagcatcaaaccgagtttgcaatgctcttgcacttctgcagtgtgttgcatcgcaccctgagaccaggatccttttcctaaatgctcatattccattgtacctgtaccctttcctcaacactaccagcaaaacgagaccttttgagtacctaaggcttactagcttgggggtcattggtgctcttgtcaaggttgatgatactgaagtcatcagttttttgctgcaaactgaaataattcctctgtgcttgcgaaccatggagatgggtagtgagctatccaaaactgtggcaactttcatcgtccaaaagattcttctagatgatgttgggctgcgctacatttgcgccactgctgagcgtttctttgccgtaggcagtgttttagcaaacatggttgtttcacttgctgatcagccctccacaaggctgctgaagcacatcattcgttgttacctccggctgtcagataaccctagggcttgtgctgcattgcagagctgccttccagacatgctcaaagatgggaccttcaataactgccttagggatgatccagcgacaaggcgctggctccaacagctcctgcacaatgtgactggcggaggcatgggaggtgctcctcaaccaggaatggatcccatgaacatgggaatgtgatgtgcattctagttgttgcaattcactgcaataacacatcacctctcagtgaattacaactagagaagatctggccactgtccagatgaaacttagtatggtgtagcctgactttctgccggggtaaaaataggaatgttgtttggtattgccataagctaagctgtagaaacaagatcggcaggcttctgttattgtgttcttgcaccggagctcttgtgcgttgacccttcagaacctgagaacaaaggaggaaacccccgtcccgtgaagctttgtcgcagtgccgatcgatcaagatcttgaattgcttcagatgatgccataagaaagcatactgaaaagaagtgtatgccgtgtgctatattttacgagtttatgggttgcttttgtctttctagtggcgtcgtgtaacaaagtccgctgttcttaatttgttcaggtaacaattaattaatccagcaatattttttcccaggttaccaataataatataaaaatatattctataaaa

SEQ ID NO: 40551 - DNA, 987 bp, Zea Mays
ttcaagttgatgccagatggtggcagctgtcagctattttgggtgtagtgtcgcttttgaggaaacgtctcttcaccatgatcaataatcttcccagcatatatgaggttgtcacaggaacagccaagaaagagtccaaagaaaaaactcctaaaagcagcaacaagactaacaaatctggctcaaagccttcacgccaggtagaacccaactccagggtcccaaagatgccacctccaaaggacgaggagagtgaaggggaggaaggtgaaccacaggaagaccatgagagtgcgctgtgcggcgcatgtggcctaggttatgacgacttctggatctgttgcgacttatgcgagacatggttccacggcaagtgtgtcaagatcaccccaaataaagcggagcacatcaagcagtataagtgcccctcgtgcacaggaagcaagagggccaaggcttgattctatctatctacgatatagatatgaattgcggacaatgctccaagaaccgaggagcctttgacgagagttgtaagatgaatcttccgggtagggcagctaatagatttgaatacttcgtgtggatactgtcggcattggtgcttgagatgcctcaaaatatagtgtcagtactgatcaactgttaactgttgtagtttgtggggccctcaggcatctatgttctgtagtctactgtgtggtggtttagataccgtctatgccatttgtgatgaagcagtcgttttaaagttagatcccagtaatttccctactatacatttgtcttcgtgtaatcgtgtttaggcagaatctagcagtgaaggtcaggtcccgattgtttatgcattcgaagatgtcggttaaatatgtggagtcgtagtggttctgcttgtttgtgtgctctcctaacttgttgatgacacttacattttcttcatttggtttctagaagtccatagggtttcaacgataaaattgactaggt

SEQ ID NO: 40552 - DNA, 2947 bp, Zea Mays
cttccccgccgagggctaggcagcattgtatgtcactctcgcgggcggaaccaaaaatggcggcatccaccactccccttcccacgctcgctccctctatcctcattgtatgttactgtcgccgagggcagcattgtatgttatcgccgtagaaagccgaggccgcggccgttcggttcacttttttttttccccttctccttctgctgcaccgccaatgcctcccactaccgtcatgctgctaccagcgtgcaccgtgctgctgctgtgctgccgtctctcgccggccgccgcgtcgtcgcccggcgatgtcggcggaggcggggcaaggaggctgctccaccagccattgttcccaatcgagtggaccccgccgccatcgccgcagccggacttctcctctgacccggcgacgccggacggacctcctggcgccttcttccctcccacgccaccggtggcccctgctggcggcggaggtacgacgacgacgtcctcgccaaccaccgtcgcctccaacgtcccggccggcgcctcgtcagggtctggtgatggcggccaccacggcggccctgccaaggggaccatcgtcgcggcgggggcggccgcgaccgcggccatcgcgctgctggccttcgcgtgcgcgttcctcatcgcgctccgcgcgcgccgccgaggggactcgcagaagctgctcggccccgaccgtgggtccgcgcgccaccactcggcgccctcggccgctgacttcctctacgtcggcacggtggagcccaccacgcccggccgccaccacgggtcccccgccgccgatctcattgggtccccgtaccgcaagctgcgcagcgagcgcgcgcgccgcgacgagcccaccgacaacctgagcccagagctccggccgctcccgccgctgcgccgcgcggccacaatgggctcctctgacgatgcatactacacgccgcgccagcgctccgggggttccggcggcggcggggttggcggcgaaacctggagtgaggccagcgcgtccagcccgcccaccaccaccaccgcgtcccgccgaagcctccccagcctcaccagcgactgctttcctccggtcacggctattgctgcgccgacaccaccccctgcgcggtcccgtcgtacgcccccgcgcacgcgcttctctgctggctcgacccctgacatcaaacagccgccttccccttccgagccgacgtcgcggcgccggttgctcaagccgttgccacctgagggcccccgcattgccatgccgatgccgatcacggcgacaacggcagaggatagtatcgggagcgcgtcgatgcgtaaacaggattacgtggcagacggtatcgttggcaacgacgagccacggccgaagctgaagccgctgcactgggataaggtgcgggcgacctccgaccgcgccatggtctgggaccagctgaagtcaagctgctcattccagttggatgagggcatgatcgaggcattgttcatgaataactcaacgccaaccgcgccgccgagagatgcgggaaggaagactaccgtcccaccgttcaggcaggaggagagggttcttgaccccaagaaagcacagaatatcgccatcctgctccgtgcattgaatgttacacgcgatgaggtctctgatgcactgttggatggcaacactgaatatttggggactgaacttttggagactttagtcaagatggctcctactaaagaggaagaactcaaactacaagattataatgatgacacatcgaagcttggttctgcagagcgctttctcaaatctgtgcttgatataccttttgccttcaagagagttgatgccatgctataccgagccaattttgagtccgaaataaattacttaatgaaatcttttgagacactagaggcagcctgcgaagatcttagaggcagcaggttgttcctgaaactgctcgaagcagtgctgagaactgggaaccggatgaatgttggcacaaaccggggtgaggcaaaagctttcaagcttgacactctcctaaaacttgctgatgtcaagggcactgatggtaaaacaacgctgttgcattttgtcgtccaagaaatcgttcgatcagaagatgcaaaatcagaaaaagaaagtgccatgattacccgtagctctaaagacgagcagttacggaagcaaggcctgaaacttgtctctgggcttagcagtgagctaggaaatgtcaagaaagcagctatgatggacttcgatgtgttgcatggttatgttaataagctagaaacaggtcttgaaaagatcaagtcggtcttgcagctcgagagacaatgcactcaaggccagaagttcttttcgacaatgcaaagttttctcaagaaagctgaggcggagatagagaaagtcagaggggaggagaagagggccttgatgagagtaaaagacatcaccgagtacttccacggtgacaccgtgaaagaggaaccgcaccctctcagaatattcatggtggtgagggacttcctctcgacgttggatcatgtctgcaaggaggacagcaaggctgagggatcggacaagtcacaaagtcacaaaactgaattttggaaggaacagagcgcaccagctatgccaggtttagctgctgaagcggatgtcgcattggcatttgtcatgaggcacacgtttaacggtgggaggtcgaaggggtggggaaattgtggttgtggcttagaaaagctgcccactttcaaagccaaggtctcggtcggagaactgatgaaggtttggaggcgaagggacctaccacttaaatctggggctcctctggacttcgctcggcatcacaccaccttcttgggttgctccgagtacaagcctcggcaaggatcgaagaccaagcgccctagagcgaagagtgtcacgtcccagtga

SEQ ID NO: 40553 - DNA, 2539 bp, Zea Mays
ctaatccaaaccgcctatgcacgttggctggccctactaaacggagaagccccaccacaaacgctactcgccgccgcggcgcgcagacgactgcgactccgcgatggacgaggaggaaagggaggaggtgggagagtacaagctgcaagggttggttgggaggggctcgttcgccgaggtgcaccgtgccgcgcaccgccgcactggcgcgcccgcggcggtcaaggcgatcgaccgccgcctcgtcgacaagcgcgtccacgacggcatcctgcaggagagggagatactcaggagcatcgaccaccccaacatcctccgcctcctcgacaccatcgacaccacgaacatgatgtacctggtgctggagtactgcgacggaggcgacctggacgcgtttctccacaagcacggccggctgccggaggccgtagccaaggacttgatgcggcagctcgcggaagggctgaaggtgctgagggggaggaacatcgtgcaccgggacctcaaaccacaggcattattttaatcacttcattcaattttcgtggttggtaggagattctaatgtccatgggcggatcttacgccgattgccctgggatggatgattgtcggtttgtgtacagaggatttgaccgtgtggagttaaaagacgtttactatagctgtttgtgcacgttttgcaaatagctactgaaatttaattaaacgtgctgttctcaattaattccagttccatttaatgtgaaagaccacagacatttactgaaagtacatgattacacattgtacttttccacatgttcatttgttttggctaaactatgtctggttattgtcttatgtttctgagacacttgcttcaatactgatgaaacttgcagaaccttctcctatcaaccaacggggatgacatcgtattgaaaattggtgactttgggtttgccaggtcgctggtgcatgaaaatttagctgctacaatatgtgggtcgccatattatatggcaccagaaatttggcaagggaaggactatgatgcaaagtcggacttgtggagtgttggtatcattctttttcagctagtcacagggaagttgccattcaccgggagtaatgcttttcagctgcaccaaaatgtcatggctaccgatgatcttaacttcccttcagaaattgaagctgatttatgtcctgattgcattgatttgtgcagaagactcctgcaccgtgatccaaagaagagaataagttttgaagaaatcttcaatcacaagtttttggcaacaacaaggaaatgctatgaatcctgtcatgctgtagaattaagagataactgccagacaatcacctctcctgttgtcctaaaaacaaagtctggaagtattgaatcaaaaaatccgaaagtttttgattcatgggagtggattgaacgagaatatgtgcttgttccggaaaactgtacttctatggaaatgtcttcactcaacatcaagtccacaaaggatgatatggatacaagaacggtcagctatggagtcagccactgtggattgtagacgagggaaaccacctgattatattacaagacttcattctctgaatcaatatgttcttgttcttgcggatcttgctcgggaaaagctatctaaaggcctgtacctggaggcgttatcaattgaacttgtattattaactatctggaaagaggcacttgatgcatgtagcttgctcatggatacatcagatggtgaaaaattctctaaatcttgtcaagaacatttccttgctaagagtggccactcacctatgaatgtagtacaaggattggatttcactcggacggcttctattttttcttggcttgaaagtgggtttatgaaggcatatgatcgtgcagagaagatatcacatgtattacggaaaagtgatgataacaccgagatgccagatgcagtggatgttacattccaaactgctttgtaatatgagaagagtagagctgcgaatgaagttttaggaaatcaaagcagatccgcagagctatattcgaagtctatcatcttgctcacgtttttagtacaggaagcatctatgttgccactaaatccaccgctttccctttcgcctttggatcagcaacgcatccgtaggtacatagctaatttgaacagccatctctgcagtgctcaggttccagggcaacggcagagatcagtccaccatgttgctttttgtctaggaggtggtgttcaatgctttggtgtcatgaacctttgtaaaattgtagttgccgaacaccatgatcctgcccccttttttgtatatatatagataataacaccacatgctctatatggtcgccccttaccatatgttcaaatgactctgaactttatatatttgcaagtgccttgtttgcacatgtaaaaagaaacgggtttcgaaccttctcgcgactgcatactctccgatcctttctagtaccaaggtttgaagctctgaagcaatatatgttctgagatacgggtgtttgatt

SEQ ID NO: 40554 - DNA, 2611 bp, Zea Mays
gcagctccacaacaattcgtgcctgcctgccctgcctctcggacacctccctcgtcctccccctcctacgccgcccccgtcctcggcccccacgcgctcgcgcggcgcacgaggcgacgaacccgacctcctcctccgcgcccgtccctgccaccggtcgccgatgagctcggagggctggggcgctgacctgagttttatggagagaggatgccagagctgcgaagcagtactcgccaagcatgcctaaggtcgaagaagcttgaagatctgcagctaggagagccgcctgcgaaaccggtctcacctgctccgccgagggcaggaaagcgtgctcctacacgtgctgctaggggcagaaagggtgccactgggaaaggagtgccccctgcacctacgactagaagaaagcggggtaatattgtcgacttggaagctgatccagcttgtgaagacccccctaaagctgtcaagggactggaagttgctgctgctgctgcacccaagaaccttcctttgaaggaggtagccgaggttggtgttctgaaaatgaatggtgtgagtgcagagaagattattggggctgaagatgaatcaacagcgacacctgtgccagagagggttcaagtaggtaattctccagagtacataactgacaggaagttaggtaaaggtggttttggtcaggtctatgttggtcgaagggtttctggtggagctgcccgcactggtcctgatgcatatgaggtcgcattgaaattagagcatcgaaacagtaaaggatgcaattatggccctccatatgagtggcaggtttataacactctcaatggttgctatggcataccatcggtccactacaagggtcgtcagggcgactactatatacttgtaatggatatgcttggtcccagcctttgggacgtgtggaattcaatggggcaggcgatgactccaaatatggctgcttgcattgctgtagagagcatatcgattcttgagaagctccattctaaagggtttgtgcatggtgatgtgaaaccagagaattttctgcttggtcagcctggatcgcctgacgataagaaactttaccttatagatctcggtttagcatccaagtggaaagagaataatggtcatcatgttgattatgatcaacggcctgatatctttaggggaacaattagatatgcgagtgtccatgctcatttggggcgcactggtagtaggagggatgatttagagtcactggcatacacccttattttcctgattagaggaagattgccttggcaaggctaccagggagataccaagagtttccttgtttgcaagaagaaaatggctacttctccagagatgctttgttgtttctgtccagctccattcaaacagtttcttgagattgtcacaaatatgaaatttgatgaagagccaaattatgccaagcttatctctatttttgatggtttgattgaagcacctgcgtcgagaccagtcagaattgatggggccctcaaggttggacagaaacgtggaagattgcatgcaaatctagaagatgaacaacctaaaaagaaggttagattagggagcccagcggctcaatggatttcagtttataatgctaggcgacccatgaagcagaggtaccattacaatgtggctgactcaaggctaagtcaacatatagaaaagggtaatgatgacgggctttacgttagttgtgtggcttcctcggcaaacctttgggcactcatcatggacgctggaactggtttctgttctcaagtttacgagctctcaccagtttttctccacaaggactggataatggagcagtgggagaaaagttactacataacagcaattgctggatcaaccaatgggagttcattggttgtcatgtccaaaggaactccttacacacagcaatcatacaaggttgtagagttggacttcctgtaccctagcgaaggcattcatcggcgatgggagagtggttacaggataacttccacagcggccaccaatgaccaagctgctttcatcttgagcatgccaaagcggaagccgatggacgagacgcaagaaaccctccggacctctgcctttcccagttcacatgtcaaggagaaatgggcgaagaatctctacatagcctcgatctgctacggacgaacagtgtgctgatagtcgaagagaggggcggccgcgctgactcaatacggtggcttgcgtcaagagattagagatgtgagatgaacattaaatcaaaaccagttctaatgatgataggatcagtagatctgatgatacggtatggtatcctaccgtagctgtaaagaaatgttgtacccagtgccggccgcgagaccgttactgccatgaagtgaagctaatgcattttggagtctcttcccgggaaaatggaacacaatataatgctcatgtgcaaatcatataggtttaatttcttgcgcactagagtttgcacgtcaaaaaaaatcataatctgaaaaataggccttcatatatatatatacatatatatctatctatatatatatattatatagctaaaataacacaccagtttgaagcaaag

SEQ ID NO: 40555 - DNA, 4136 bp, Zea Mays
ccgcgttctctcccctcatctatctctttctctctcttctctcggcgctagctggttcggcttctctctcccgtcttcgcttcctccccagtccgcaccccccacagacacagagagagagagagagcgtgcgtaccaaacaaaatcccatcgcgagacaacaaaaccaggccaacggattcttttggctgcggtggcggtgctgtggctggtgccccccttgctgcatcgccggctcgccgccgacatcggctcgcgcgtaccctagccggagccggagtcgctccccgcagcccccctcgtttgtctcggccaggtgtggcgcctgaccgcgcagctcgattcgccggattcgagctcctttgcgacggggaacctgcgggcgccgcggaggggatgctcgcacgtccctgctagattcccgcggatctcgcgggcttgctggtggtgaaacgatggctaggtgagtacaagccgcgcgtgatctcctagtggttggtgcgagcggtggacggccaagatgatgccgtcgggcccgccgaacccgatggggcccggtcagccagtgagcggtgcggcagcgtcgctactacggacgagctccagcttgctcagtggcggtggccagcctgggatggctggaggtggtggtggcggcatgctttcttcacagtcgcccttctcctcgcttgtctccccgctcacacagtttggcggcaatggtcttcttggaggcgcctcgaatgtctcctccctgctgaaccggacgacgttcaggaatggtggccctatgccaggtccggggtcgatgcagggtggtgggatgcagatgagtacactccagcagagagctgggttggatggtgccagcgatttcattagcacgggagggtcagaccctctctcattcccgtcttcctcacaggttaatttggtcaatcagatgggatcagataatctgcaagtgacttcacagcagcaacagcagatggatgcagtgcaggatatgcagcagcagcagcagctaccaatgtcttacagccagcaacagttgccggcacaacactcgcagcagctccagcagccacaggctacagtgaagttggagaatggaggaagcatggttagcatcaaatcagagcagcagatgggacagcctgaacagaatggtcctgcccagatgatgcgaagtgctggttgtgtgaaacttgagccacagcagttgcaagcccagatgatgaggagtttaagttcagtcaagatggagcaacagagttcagattcatcagccttcttgcagcagcagcagcagcaacaacaacatcatttgttgcagctgacaaagcagattcgaaattgtccagaccttgtatcaatgggtggaccaaacacaactgcaaaccctcaagctgctgctgctgctgctgctcaactgaccctcttgcagcagcaacggctcctgcatatgcaacagcagcaccaacagcaacagattctaaagaacttgcctttgcaaagaaaccagttgcaacagcaacagcagcatcaacaacagcagcaacaacagcagttacttcgtcaacagagtctaaacatgagaactccaggaaagtcatctccttatgagccaggaacttgtgcaaagagattgactcattacatgtatcatcaacaaaacagaccacaagataacaacattgagtactggagaaactttgtcaatgagtattttgctccaaatgctaaaaagagatggtgtgtgtcactttatggaagcggtcgtcaaactactggagttttccctcaggatgtatggcactgtgagatttgtaatcggaaacctggccgtggttttgaaacaacggttgaggtgctaccacgactatgccaaattaaatatgccagtggtaccctggaagaacttttgtacattgacatgccacatgagtcccagaatacgtcaggccagattattttggactacacgaaagcaatccaagaaagtgtttttgagcaattgcgtgtcgtacgagagggacatctacggatagttttcaatccagaccttaagatcgcatcttgggagttctgtgctaggcgtcatgaagaacttattccacggagatctataataccacagtaatcttggcgcagttgtacaaaagtatcaggctgccgcacagaactcaacgagtttgtctcctcaggacatgcagaataattgtaactcgtttgttgcatgtgcccgacaattggcgaaagcactggaggttcctttagtaaatgatttaggatacacaaaacgatatgttcgctgccttcagattgccgaggtcgtaaactgtatgaaggatttaattgatcacagcaggcagactggatctggacccattgatagcctgcataactttccgcggaggactccaggggttagcactcttcaaccgcagcagcaaactgaggagaagcaggccattccccagagttcaaaccagagtggccaaaattctgctcctatggctggtgtgcagccttctgcctctgccaatggtgacgtgacatcaaataattctctcagttgtgcaccttctacatctgcgccttcaccatcagttgttggactcctgcaaaattcaatgaattcgagacaagatcatccaatgagcggcactaatggtggcccatataatggaggcaatgtggctattccgaaggtgaactctacaagctcactgcagtcaaatccgtctacctctttcccttccccagcaccgacaacatccaataacagcatgatgcatgctcctcaaaacacaaatcagctgagctccccaactacatcatcaagcatacctcccatgcagccacttgatactcaacctcaggaggctgagccaagcgactcgcaaagctcggttcagaagatcttgcaagatctgatgtcatcctgtgttggccactcaggtaatgatacgaagacaccaaatggactaacccatggtgttaatggggttaattgcttagttggcaatgctgtcacgaataactcgggaatgggaggaatgggatttggcgccatgaatgggttcggtcatgggatgagaacggcaatgacaaacaatccgatggcaatgggtgcaaggatgggaatgaaccacagtgcacatgacctatcgcaattgggtcagttacaccagcagcagcagcagcatcaacagcagcatgacataggaaaccagctgttgggtggatttaggtcagcgagcagcttcaataacattcaatatgactggaaaccctcacaatagagcagccagaaaccatagagtttcagtgtgatgatgcatctggcttcgctggcaatgcgtgtggagcatccacatttatggtgccataacctccccttggcccaatagcatttgggcctttgcattaatgccgccatcaaagggtaccataagcgatagcaagcatcccggctggtacatgtaagtctaactgtcagtttagctatctcgtgtgtagctccctgagttttacaacattagtcgattttaccgggagttgcaataccatcatgtgtcacattgtttgtccactctttacccccttcaatgctgtgaaaagaaaggctaagtagctgtagcatgttatagtaggtgtatgtggggtaattcctcattagctcttagatctagtctttcctctgtctatttatacggttatcattgacatattgcggaatggagagccagacttacaggatttgtcactgaaactgtccgagttgggtgcctgtcacttactgcttgctccagttatctgagtgaggaagatactctgaaagaattagagcctctctgcactttttaccatctgtcagatcctattgtgctttgtggtacggaaatgaagttgtccctcgccttttttcctcgttggatgacatgtatcttatcctctgcaattcctaagactactggtgctgatatcctcttatcctcgcgtttggagaattctctttgtagctttactgtgctgcactgttgtataattggcacactgactagatcgaagtaccaccatggaatggatgttctcctagtcttgttgctttatactctctcctccgtctt

SEQ ID NO: 40556 - DNA, 3137 bp, Zea Mays
ccgccgctttaaaccccgtccgtgtcccgctagccgccattgcagagcactgactgagcacaccacccaccagctccgaagtcatgtcccacctcgacgcggcctcgctcctcgccccctcgccgccgctggcaaagccccacccgcgcagccgcttcctctgcctcatctcctccatgctcgccgtcctcggcgcctccctcgcgggtctcctcttattcgcgctccaccccgcgccgaacccggtcccgaactacgcgtcgctcttcctctccctcggatccaacgacaccgccgcctcgcacctccgagcgctcactctccacccgcacgtcgcggggaccaaggcgaacgccctcaccgcccgctacgtgttcgacgcgctctccgcgctctccttccccacccacatcacgccttactccgtcctcctctcctaccccgtccaccgctccctctccctctcggcgccaggccgcggcgtcgtcacctccttctccctaaagcaggagacctaccccaacgacccctacgcagcagccgcggcggagaccatcccgacgttctacgcgtactcggcctccgggtcggtctccgcggaggccgtgtatgctaactacggccgcgaggaggacttctcttacctcgcctcccgcggcgtggacgtcgcgggcaaggtcgcgttcgcgcggtacgggaggatccactgcgaggacatagcgcacaacgcgcgcgccgccggcgccgcggccgcggtggtgtacactgacccgctgcagtacggcggcgcacccggtgaggggtggttccccgactcgcggtggctgccgcccagcggtgtgcaggtggggagcctcttccggggcgtgggggacccgacgacgccgatgtgggcatcgtccgagggctgcgagcgcgtcagcttggaggaggccatgaataccgatgacatgccgctcatcccagccctgccggtatcggctcaggacgcgatggagatacacagagccatgggcggggccgtggcgccggaggactggcagggccgtgaagacggacccgtttaccgcctcgggccagggccggcagttttgaacctgacatatcttgggaatgattcgatggcaacgattgagaatgtcttcgccattatcgagggcgccgaagagcccgatagatgtcattcttggtaaccatcgtgatgcttggacgttcggtgcatctgatcccaacagtggaacagcagctatgattgagttagctaaaaggttttcaatgctgcaaaaacaaggatggaggcctcgaagaactattatcttctgtagttgggacgcggaagaatacggactgacagggtcaactgaatgggttgaagaaaaccgggagatgttgtattctagagctgttgcttatctgaatattgacgtttcagtcgttggtccaggattcctgccttctacaactccccaacttgatgagttacttcagcaagtaactaaagtggttcaagaccctgataattcatctcagactgtgtatgattcatggattaaatcgagcactcctctccgggtgagttgttgcaacttgcttatccaacagcctaccttctatgtagtgctgagaatccagttagttgtcactataaaatagtgattgtattgttaccaagctacaagttccttttcagtttcagttccattcctcgagaattatgtggtttcaggaggacagaccacttcgacttcctgacaaattatataacattactcactattcactgcatatctcttgcgttaaggttcttagactaggtgatggaggatcagactattcagcattcgtccaacatgttggtattccttcgatgaatataatttttggagaaggaccaggatatccggtttaccactccttatatgatgactacgtatggatggcgaaattcggagatcctgcgttccgtaggcatgtggcagctgctagcatatggggaatgatggctttgaggttggcaaatgaagacatcctacccttcaattacatgtcctatgcaattgagcttgaggcatacacaaaaacggtagagaatgaagtgaagggaacaactgtcacttgttcccctctgtacaactcaatcagaactctcggagcggcagctaccaaagtgaataacgaacaaaaggaacttcaaaagctactcttgagcaagcagctgaacaaggattcactgaaaatccgacaactcaatgaccgtcttatgcagaccgagcgtgcattcactagcagggaaggcatcttcaagctagaatggtttaagcatctggtgtatggaccttcagaccagaatgactgggatactgcagtctatccaggtatagccaatgccatagccagcgcccggagcagcaacacttcggagtcctggaagtttgtacagcatgagatctacagagtagccagggccgtgacacaagcatctgctatactgagtggccgtctgacatgacaggattcaaaccatattcgttaaaaaagattgttactgtggatttcggaagttttgacattttttgaaactttcgactatgaaatatctgagttgcagagaaagaccgtgcaccacattagggcttgttcgttttgctctcaatccatgtggattgggtgggattggatgagtttcaatcccaaacaagtcaaaatctttcacaattttttccaatcccatccaatccacatgagataggaataaccgaacaagcccttaaaaggatttggtataggtcagaactttccgatagggggttggaaatttcaacttgggcatactttccaaacacaaaaaagaagtgtgcagtgttgtgcttagtgtctctcagttttatattaaagaatttgttatgcacttaagcacaactagtagtgagagttgagccgctttttagtacaggttccctatactcaagaatagaaaacaagtttacaaagcattgaggttgaagcttgattgaaagctctcatttcctgtacatctattggacaaatctccatttgtgcttaacaactataatcatatcccatatgacttgttggatcctaaatttcttgtcatcaatacaccaaaaacccacttc

SEQ ID NO: 40557 - DNA, 1317 bp, Zea Mays
taggggctctctttccctgtctttcctcttcctccttttcttcctccatccttcacttgccggctgcttgattcttacgaccggtgttttaagaccaactgaggaaaggtccaaatgatgacatatgttggcaagaactggcccatggctgatgcaatcaaaggatcttcagaaagagcttcgaaccaatcccacagagatgtcactcgatccagaagcggaggtccagagagatggagaggccagacatctggagaagttgctgagatgaacggacgacgtcctcctccatgcagtggcacggctcctgccaccgccggtcgagcttcagagcaatcaacccggcgcagtcgagatccaaggctagcagcagctgcatctctacacaccccgcggccgccacccattcagcaagaaacacccatggccataatccaaccacctagccggcaacaagtcgttgtattaaagatagcaatcgatcctcgccatggcctcccgttgctcttgtcccactcggttgagcaaccagcagccattccgcagcagcaggcagccactccatctggcctgccggttcatacgttcagggtagcgactgaccctagggacggccacattgcgatcttgtctcacacagttgaagcaacgactcggcatcatgctgctgccagctctgtggccgccgctgatcaacccggtggcagcggtgtgatgagggccagagaagctcgtgatggcaacagccagaccacgacgcggatggtgtttagaaccgcgctgaaagagttcgtgacgaaacaaatcgcggaaacaaggggccagcaagctagcctcacaacagaagagctccgtggtttcgttgtgcgcaaggccgtggacaatatcatgcggtcagagaaacacatccccggcacacaagagaggattgggaagtacctgaggttctgcagggggaaaataaggaagctcatacaggagtactttcacaagtacgagggaagatttcctcggtgaaacaacaaaatgatgaacatgagcactagcttgaggaggaatgtttggacaacctgttcacagaggcagggttactgtgcttgtttgtttctgtggtcggtctttatgatgaacatcgatcgataatgttgggtctaacggttataaaaaactctggtgtggtgtgttttcattttccatcttaataccacctcaaacttgtgtttggattcggtcaggtgtgatcagaacttcagtcatatcttaccctcattaattattgatgtggtcactgcaatgcaaactggttttcaaccagga

SEQ ID NO: 40558 - DNA, 2293 bp, Zea Mays
ccgcatccgacgacaacgccatcacgccgtccagctcatcgtccacctgaagcccaacctgccacttccatccatcgccgctcactcccacgatcagcgtcgtcgccagtcggcaccatgggttccgacttcaaatcgatccccttgatcgattcaggtatcctgatcagattctgctctgcgctgccctgagacatccaaatttcttttcctcgcatttccacctcaatcgcgctgtaacaccttcctcccatccccaacctcaagaatttggtatccccgtttgggctgcacgttccatgtgggttcaggcttgagagccagctgcccccgtttcttgttcgcctcctgccgccgccgccgcagtgccagtaacttctgcaagcgaagggacgcaactcctcaaggatttgattcatatatttgactctggcttcagtagatacagcttctgttattcgccctctctctgtgcttcgatctctcggttttataacgagcgtacttgtttgttcccaccactgccagatatcggcccgcttgtcgaaaagattgatgatccaagcatggccaacgataaggatttactgcaggttgtccggttactggatgatgcttgcaaggaggccggattcttctatgtgaaaggccatggtattgatgagtcactgatgagggaagtcaggaatgtaacccgtgaattctttcagcttccttatgaggaaaaattaaaaattaagatgacacctcaaagtggatatagagggtatcaaaggataggggaaaatattaccaagggtaagcctgatatgcatgaagcaatcgattgttatactcctattagacctggcaaatatggagatctcgctaaaccaatggaaggatctaacttatggccaaaatacccatcaaattttgaagtactgctggaaaattatatcaaattatgtagagacatttcaagaaagataatgcgaggtatagccttggctttgggaggggcaattgatgcttttgaaggggatacagctggagatcctttctgggtgttaaggttgattggttatcccgtagatattccagaagagcagcgcactgatactggctgtggagctcatacagattatggttagtagatctctccaaagaatttctattgagaaaaaaaaattccatatgtgaaactgtggatgacggtaacttctggtcaatatatgctactattaccccgttaatacaataccatggttttgttgcctacctgtctattaaggaagccacatgttttctagatattttttattattttcaaagattagtggaggctccctattctcgaaatcctgagatcgtttccccatttggtttaaaatgcaggacttctaacactggttaaccaggatgatgacatatgtgcccttgaggtgcaaaatcgttctggtgagtggatatatgcaacgccgattcccggaacctttgtttgtaacatcggtgacatgctgaaggtttggacaaatggaatatatcagcccacccttcacagagttgtcaacaattcccagcattaccgtgtatctgttgcattcttctacgagtccaacttcgatgctgcagtagagcctgttgagttctgccgggagaaaaccggcggtgctgctaagtacgaaaaggttgtgtacggggagcatttggttcagaaagtattgacgaacttcgtcatgtaaatttgctaagtacgacaaataaatctgcattgcagcatcagaactccagacctatttggtgtgtagtgctgtaccagaaaggtagtaacggactaaagcatgcgcccgtctctgaaatttgaccttaacaagagtcgcagacttgcagtgcaggtgatatcacaaggaaatcggggggagatttgttctctctgctgcacggagttgtcgacaaccctgtcgctgaaatctgaatttagcatcagacaactggagatgctacgagtccgtctctgaaatctgaatttagcatcaggcgcgaaattgcctccatttcttcgccaaaccatctaatgatggaagctttgtagctggcaaggccatctcgtgtgacgccgcagccagacgatgccagcgtagcaagttacctaccattagcactggttaactagctagccatactagtgaattactctattccgatcaaatgttggagaattcttttctcatagatactttgatgaaaagaattggtaccaggaaggctatgttcggttctaccacaattcatatgtatcgagcgagtttca

SEQ ID NO: 40559 - DNA, 2098 bp, Zea Mays
ttgcagttttgcactaggcattgattgcatctctagtgcccgtcctccgtcctccggagcggctatgggcgaagagagggagttcgtgggcgctaggttggacgccggcctccgcgctgcccgcttctcgtcgccgccgtctgccgacgagtttgcggcagatgtcgagcccaagaacgtccctgcggtctttcgcggcgtggttaaggagtgggcggcctcctcccgttgggatcctctacatggcggcctcgattacctgctggaaaaagtgggacctgacgtggctgtggaagctatgatgtcaaacactggccatgtgttctacggggatctcagaagccatgagagggctggtttttgctcgggacttgcaaattataaatccagccatatggatggtttgcaattgaggcactaatgctacgtttcctccacctagtgattcatccaaagagcagggaatgcttggggagccagctagttcaagggagacatgttcgaacagttcagagaacttggagcaagtctatttggcacaggcaagctcacattttatgaggctagtgttatcttgaaatggacttagcaatttacttttagcaggtatctattatgaatgcagagaacaaagaaggatgctcattacaagttctggaaggcgacatccaagagcctatatttctgagaggaaaatcattttcgtcaataaacttttggatgaataagggtcacttgagatcaagtactcattacgatccccaccataaccttctctgtgtggtatctggtcgcaaaaaagttactttgtggcctccatctgcatccccattcttatacccgttgcctgtgtatggcgaggcctccaaccacagctctgttagtgtggaggagccagattattcaatatatacaagggcaagatacatgaaggaatattctgaaacagtaattctaaactgcagcgatgttgttttcataccagaaggctggtatcaccaagttgacagtgacgacttaacaatagcagttaacttttggtggaagtcaagaataatgactcaaatgttagaacatatggatgcctactatctacgccgaattatgagcagattggtggaccaggagatgagcataatggcgcagaagagtccttttggtcatttgaaagattgcacggatattcagcatatggccaaaacattgacaggtttccagctattcaatttgcaaaaagattcaccactacgaactctggaaccctccactctgcaagcactctatgaactcatctcactggtccatgatggtgctgaagcggttagccaaatggacaaaatagaagccacatcccagaataaatcctccaaccaaagagatgacacagatacgagtgctgctgcagacgattcatccctcttggacaaagatcctgttgcaaaaatcattttgccagttgaaccacttgaattgcggactatgctgcttgcaatggtgcatactttcccaaggacgttagaaaatttgattctcaacatgcttggggtaggagcagagatactgactaggaagtttgatgagatggatcaacaaacaacaaaagaagaacagtctgagttctacaagatattctatagcgtgtttgacgaccagtacgctgcaatggatgcgcttctgaacgggaaggaattgttttcttttcagatattccagaatgtcctggacaagtatctcggggtgcatgttgaccgacccagcagatttgttactcgtacaaaccaatgaaatggagcgcctctaccctctagtatacaaaacctgaatcggcttgttgagccaagccaatgaagaacgtattatgctgattactgatgtttgagcgtctcgatagataatgtgtttttattggcttgcaaccatattttagggattttttttggacgaaggcggcagtaactgagagcggtgcgcatatgtgagatgcgtgactgctcttgaatgcgatgattacaaacgaaaattaccgttacgcctcgtttggattcatggaatcgaatttcattctaataatattaattctaacgatattaatttaggc

SEQ ID NO: 40560 - DNA, 314 bp, Zea Mays
ccttcttcatattcgcccccgagaactcccacatggccgacttgttctccggcgaatcaaggtgctgcaagattaggcaaacacaggtgtagcggatctgaggagtgctcacatacttaatagctgtggagaagggcctggtgctagagtcaaagcccctaaaggcgatgatggatagactagaaaaggcagcgccctatcgggcgctatacttgtcgcctccctcttatgtttgaagcaattcttaagcaatatcatcaataacactgcaattgcaaattgtggataaatccagacatccagctcaatagcac

SEQ ID NO: 40561 - DNA, 996 bp, Zea Mays
gcctgaagaacagtagaactcagactcgagcgctccaaagcgagccaccgccgatctgctcctccctcttgaccctcctccgtgcgctgcgcaggcatgaggcgcctcctcggcggctccctcgtcctttgtatcgccgcggtggtggagtccaagccgcctctcgactctctgggcataccaccgcaagatgaggcgtactacataggcggcgtgatcaaatgcagggacggatcgggcaggttttccagggaccagctcaacgacgacttctgcgactgccccgacggcaccgacgagcccgggacatctgcatgccctgaggcgaaattctactgcaagaatgcaggccacactccagtcacgatcttctcgtcacgagtgaatgacggcatttgtgattgctgtgatgggagtgatgaatatgacagcaatgtcacctgtaagaacacttgctgggaggctggaaaggtggcaagggagaaattgaagaagaaaattgctacatacgaaaatggtgttgttattcggaaacaggaagttgaaagggcaaaagaggcttttgctaaagatgaagcagatttagcaaaattgaagggcgaagagaaaatgctccaaggacttgttgataaactcaaagagcaaaagaaattaatagagaatgcagaggaagaagagcgtttaagaaaagagaaggaagaaaagagaacaaaagaagaagatgaaaagcaagctgctgttgaaaagggagcgcttgatgcctctcgggatgtagattctaaggaaattcatgatcatctgcaagaaggtgaaaacaagcatgatggacatgcaacaggccatgataatcatgtaacagaaagcagggcatctattgagcagcatggttctgtaagcaaagatggtattagcgttgaaggtggaactgtagatgaattgccgcaggagtctgcagcacctaccatagagaaggtacagttgatcaagattggttaa

SEQ ID NO: 40562 - DNA, 1512 bp, Zea Mays
cgtcgacgtcgatccaaggtgaaaatagtgtcaggacccatggttctcgctcctgcgctcctcgtcgtggcggcgctcctggcccagccgctcgggagccgttccggcgacgacgccggggccgcgaacctgcacccggtcgtgctcgtgccgggctacggctccaaccagctggaggcgatgctgacggcggcgtacgagcccccggcgcctgcctgtgccggctccgcggaccagggttggttccctctctggccaaaccacacggcgatgcgcgacgctagccaggtcccctgcttcgccgaccagatgagcctcgtctacgacgccggcgccgacgactaccgcaacgccgacggcgtcgctacccggaccccgttcttcggctcggcgcgcgccctcatcgggtgggacaggctggtgcagcagctggaaggcatgggctaccgcgacggcgagaccctccacgccgcgccgtacgacttccgctacgccgtggcgcctcccggccacccgtccgcggtgggggaccgctacttccgcgacctcgggcgcctcatccaggagagccgcctcatccatggccgcccggccatcgtggtcgcgcacagcttcggctgcgcgctcacctaccagctcctcctgtcccgcccgctcccctggcgccgccgctacgtgaagcacgtcgtcctcctgggccccgcgctcggcgggttcgcgcatgggatgcgcctcctcagcgccggcatggactacggcctcccgaacgtcccgcggccggcgatgctccggatggcgcggacccagcagagcgccctgtggcgcctgcccacgccgctcgtcttcggggaccggccgctggcgatgaccagcgccgcggcctactcggcgcgcaacgtgtcggcgttcctcgaggccatcggtttccaggaaggcgtgcggccgtacctgacgcgggtgctgccgatgtgggaggcgctgccgccgccgatggtgccggtcaccagcgtcgtcgggttcggcgtcagcacgcccgagacgtacgtgttcggggccgacgggctcgagggggaggccgaggtgctgtacggcgacggcgacggggagatcaacatggtgagcctggcggctgtcgagagatggtcggaggtggaaggccaggtcctgaaggtcgttaggctgcgcggcgtccatcacgacggtttcttcagcatcgatttcgcgttgaatagcacacttgctgagatatcggaggcaggagaaagcgtcattgaacagatcggcattgtatcgtgtcagcagaaatgcagtgattactgagaatttggtggacgggtcctaaaacgtgtcctgcctcacgattgactgattgagaataaaaatggtaggtgatgctagtgcgaattgtattagtgcaccgcacccttgcgctgagagcaacagagtcaagagaggcatcaaaatggaagatacgaaatgtgttttgtgcagccgacaaactgaaaatgggga

SEQ ID NO: 40563 - DNA, 3881 bp, Zea Mays
ctcttctcctgctccgtcgcccgccttcgctgctcgggagtcgggacccacctgaccaaccatggaagctgatccgccgttgccgccagcgagcgcactgatggtggagctcgtggaggaggtcctgctgcgcttcccacctgcggacccggcaagcctcgtccgggccgcgctcgtctgcagacgctggcgccgggacaccggccgcgacgcgcccgtcgactgcgagctcgccgtctgggaccccgccacaggccgccgtacggacctgccccgcctcccctggtcgccctacccctacagctggaacgccgccgtgctctgcgccgccacaatcaccgcctccgcctgtgaccacctcgactgctgcggcggcggccacttcctcgtcgtcgtggtgggcaccaaccacgcggagatgttcgcccatgtctactcgtcggaggcgggcgcgtggaacgcgcccgcgtccgctcggcacccagacgacaacgtcgacttcgcgcccagcgcgctcgccgggaacgcgctctacttcgcgttccagacgggcgcggcggccctggagtacgatttgggcacgcgggagatggcggtggtgcgcctgccgccgccgccacgcttggactggcagcgcgctgtgctcgccaccagggacgatggtcgtctgggactcgccacggcaggcaagtccacgatctacctgtgggcgagggaggcgccgcctcgaggagatgggagttggtatttattacatgacggctgactcagcgcgtccagcaagacgatggatatcttgtattgggcttgcgaacacgacggcccagtctgataattccagcttcgacatcgtcttggcccatttccgcagcctttacatcttccatcagaactccatccggctgctgcacctcgtcaacatgtctgctcacatgttgtctgctgacattccccctgtcttgaaaggacgcttgcccccaagcgaccgcacatggaaagcgacgacggacatcacattcatcttcccaagaatccatagcagcatcacaccccgaccacctgatcaaaacctgatcgatagaagcacctccgcgggaaaccactcgacgctgcagcacttggacaggaacacgaagagcgtcaggcactgagggaagagatgcactcaccaacacatgttgtttgacagaaggtttcaactgggacacatggaacaccggatgcacatgagaagaatccggtagcttcagtttataagcaacagcgcccacacgttgcagcacttcataaggtccaaaatatttgtatgaaagcttatgatttgcccgaacagccactgaagattgaatatacggctgcaacttcaaatataccatatcaccaatttggaactccctctcagacctggatttatccgcctgattcttcatacgctgttgagcccggagcagattgtgctgaaccacacgcatcataagctcacgttgcgacaaccaagcactcaaatccgaatgagagactgaatcatcaatagtcaaaccgaaatggcgaggctgccttccatacaatacctcaaaaggagatttacccaatgaagaatggaaacaacaattataccaatattcagcaactgacaaccatgaattccacttagaagggcaagcctgaacaaagctgcgcaaatacgtctcaagacattgattgacgcgctctgtctgtccgtccgtctgagggtggtacgtcgaactcatctgcaactgggtgcctgataggtgaaataattctttccataagttgctagtgaaaattctgtcgcgatccgacacaatcgattctggcataccatgaagtcgatacacagctgccatgaatacctgggcgacctttagtgcagtaaacggatgacgcaacggcacaaaatgagcatacttggtcaagcgatcaacgaccaccaaaatagtattgtaagatccagactgtggcagcccctcaataaaatccagcaaaattgcttgccatgcttgggtaggaaccggcaatggctgaagtaatccaggatatcgagacctgtcaggtttagcctgatgacacacttgacaagctgcgacaaattcgcgcacagaagtcttcatgcgtggccaataaaagagttgcttcactcgagcataagtaacaggaaatcctgagtgaccaccaatagcactgctatgtaatgcactgatcacagtagtctggaggttagtattctgtcctaaccaaactctgtttttgtaccgaataacaccatcctggagagtataaggaggttgagctgacattgctaaaacagtgaggagctttaaggcctcaggatcttgttggtaacctgcaatcacctcctgtaaccatgtcggagtggacacagaaatagcaacacattcgccatcctcatgtggccggcgagacaacgcatcagcagctgaattatctaccccttttttataaacaatccgataatgaagacccaacaacttggtgaatactttttgttgccattgagtatggagtctctgctcgttgagatgagacaaactgcgatgatcagtgtaaataacaaattcagcatgctgtaaatatgaacgccactggtcgactgccaacagaattgccaaatattccttctcataggcagataatcccatatttgtcattcccagggccttgctcacaaatgccaatggatgaccctcctgctgcagaacagcccccactccagtaccagaggcatcagtttctatggcaaatggtttatgaaaatcaggcaacgctaatacaggagctgaagataacgcttgcttaagagactgaaaggctgattcctgaacatcagtccacacaaagacagcatgcttcttaagcaatgaagttaatggtttggcaataattccaaaattctttacaaacttcctgtagtagcctgctaggcccaaaaatcctcttaattccttgcaagtcacaggtactggccacgacacaacagtagacaccttggacggattagtagataccccagcttggctgataacatgtcccaaataagcaatttcctgtcgaccaaaggtgcatttggacaacttgacctgccaagaatccttgagcaacaactgtaacacctgctcaatatgttggagatgaacctcccacgtagggctataaaccaaaatatcatcaaaaaataccaaggcacatttgcgaagcaaaggctgcaaggtcttattcatggccccttgaaacgtcgcaggggcccccgtaagcccaaacgacattactcgaaactcataatgtccatgatgagtttggaaggctgtcttatgctggtcttgaggagccattcgaatttggtgaaacccagctcgtaaatccagagttgaaaaccaagcagccccatgcaactcatcaaggaactcatcaatgactggaacaggaaatctggttttgactgtgagggcattaaggtgacgataatccacacaaaacctgtaagtgttgtccttcttcttgactagaatcactgaagaagagaactcactttggcttggctgaataattccagcatccaacatctctgtcacttgcttttcgatctcagacttcaatgcaggagcatacctataaggtcgcatatgaaaaggttgtgcacctggcaacaatgcaatatggtgatcacaatccctggtgggcggcaaaccagttggcactgcaaatacagactggtagcgcagaagcagtgactgtagatcaccagacaactcagaaatgatagtctggtccttctcatttaactcagtcaaatggcacacctcaatcagagaacaatgtcctttagaagattgcaacccaaa

SEQ ID NO: 40564 - DNA, 2376 bp, Zea Mays
cgcaactggcaacccacaacacgcgaagccgtgaaccgaagttgcttcgagttttggcgcgcgccgacccaaacaacggcgctccgcgcggcggaggcgatggaccgactccagcgcaggaaccctagcagccggacccatgccacttcgctgaagcacccacggcctccgcgagtgccgaccttccagccccagccggcgtcgaggtccctacaggagccggagccctcctccccagaatataagttctttaagaaattgtgtgaacagccaggccatagctctctttcatacaaacattctcatcaaagccttgaatcaaatgtgtacaggcaaaaacaaggatcgcgcaatgtaactgccccaaaaaagttacatgtccatgataatactgtgtactgtgatgaaccccttgctacaccagctaagaatgaggaaattcctggcgagaaaattagcgtgcaatcctcccattctgaatatgacgataaagatacacctcaagtcggtccacatgatcgcttgctgggtattcatgttctcacacctatatctcatacatcatttgatgttaccgggatttcagtaaatgttgacagagagcctatcagtggacatatcttttcaggaaagagaagcaaattattgaagatagcagccaaaaccatgtccatgggaagtgctgagttgtttcaaagaaggtcggaatttatagttggcatcctgcagagactaggcaccaacaacatcatgagaaagcaagaagggtccatgagtcacagaaaaatggactgcagacatgctcttgctattcccgaaggccattttgataacttgatagactacaagcgaagcaactttaatccattagctaagctgaggaatggtaaaattccatcctcttatgcaagtgatgaagcatgtgagttcatggctttaccatcaggatacaatcagggccctggaagtattgttgatcagaaaaatgacttatctcatgggggtagtggagcaagtgagtgcatggcattgccatgggcgtgtgttaatgatactctgagttctgatcggaagggagacattgttcacaaccaggtttcaaacttgttactagaagatgtcgatcgatacgtccatggaagacatgcttctgctaatgaattgagtttgaatggtcaaacagattcatatggtcaacacagatgggaccctatgttgtcagtaacgttcttgaagtcatttcatgacagactgtacttcccctgtcagaatgaggagcggcatgcagtaccatatgggatttcaaatacctctgagcaacctgaactatgcagctccatagaactgtgtacttgtagttcaataggactggagatagaagacccaaaagaggcgggattgtgtggtaattctgatgctgggtttccatcgtggcttgctcaattagttgggaaaccaactatttcaagcatttttgacagtgggaatgaaattctggatcacaatgacttcagatgcatctccaacttccacagcaacatgttcagttcaaactcaagttgtttgaattccatgtcgactccagagcagtcgtacaaggttggcgcaaagggcctgcttgattcttcatttggtctctcttgtttggctggactggaggagtactccacggacgcagaactgccagatgattctgatagatttcttcaggtgttggaccagttacctgtgaaattcatctcttcagggttttcaaacaacgattccagaatctgggaccatcggtcttcaaatgcagaacctccttttaaccaagattggggcactacacaaccgtggtcatcagtgcatcaactccaacctcattctgattcaggaaccgtgcttggtttcatgccaaatggaagtgcttacagtgatttggtggaacgccatcacagcctcatgctagtccaaggaaacctgagcactgacgttcttggtgctactgatttatcgttctttggatcttgctcaagtttggataacatcacggaggctcctacgttatcttctgatggcataacgtggtagctgtgttggtccactctgaaattttcatccagatcagttcgctacacaaccaaccgttcgctgtatgaaattttgaattcgaagttgcaccacgtataggtgaagttattagctttaatataagttgggaagcaatgtccagaaaattgtgtaatgttagcaaccattactagactttagcatgaagagataccatctggtccaaaattttgacctgaattttggtacctaattactgaagaacagtagctctaatcgacaccacttgggcgcgttggtaagtttgctaaactatcttgcctt

SEQ ID NO: 40565 - DNA, 4956 bp, Zea Mays
gtgggcccagcggggaccaagaggagagggagaccgttcctcttcctcgcctcacctcacctctccacctgccgtcgtcttcctttcgttcctagacacgctagacttggctttggccataccttggactccccttccctctcctctccccgtctcccggcgtgcgtgcgtactacttactgcttgtccaatcgccgcgaccagagctcccgcgcacgctactggagaggattccagcgcccgtcgagcaacaggactctagcgcccgacccgacaaacgacagatagtagctactgcctccctacaccgtctcggcatctccgggggcacggcacgggaacggaggagcggagaaatccatccgccgaaccgcttgctttgcttggcaggcaccccgtacaattgggggttccggttcgaggaacgctcgggggggcgtgtgtgcggccgccttcgctcctcatccagaccacttgattacgccgcgctccctacgacaggaggtgcccaggccgaggtccttcgccggcgacgagcaccaaccagccaattccagagcaaccaaccgcaagggcatgtgacaaactgccgcctgcggtgccttcgccccaggcaatgtgctccgacatggatcagcgcgaccaccacgcaaccagatcttgctaaaaggagcaaacagtgaagaattgaagaaggtcaaacaagtaatgcattttacagtctttgcagcatatcacttgatccttgaaacatctttctttgaagatcaaagggtttttctgaatgatagtactacaaaagaaacttctgctactgctacagaagggacttatggtgttgctgctcttagtgggcctattcctaactttccttcacatgatgattctccggcacttagactgttccatgccacttctaatagctatgctgatgtgaacaaacctttgatatctccaagaaatgtggataaattcagtgcagtatccagcagctcttcaaatgaccttgaacaaggtgcaaatgtcaggtccaataatgccgagaggttaacattaccagtccaagggccactaaggaaattgttcgctgacatgttatgtcaccagaatatttacttacccgttacatcattgcaagaggcaaatgataacaggaaggaagtcagggttgaatccagtcaagaaactgttagtaatggtttccataggccaaagacaggagagtctgtgatttccattgaaaatggggagtccataaatgatgcccagacacaagaaattactcaagcaataatgccaactggttcttctgtaagtgataaggatgcagaatcacctgttatgggagacaatggggcacatagtactacaagtatcattatcaaagagaagcatgctgacggcgatcaagctgatgatgcacttgattctcacagcatactgattttgatgtctagccagtgcacagaaaagcaggttatctgtgaacaaagccatttaacccgtataaaatactatgggagttttgatgtgtccttggggcgatatttgcaagacattctacagaatcagcagaaactgagttgctcttcatgtggagagcctccagagtcgcacatgtactcctacacgcaccgcaatggaaatttgaccgttctagtgaaacgtctggtgcccaaacactatttgcctggcgaatctgaaggaaaaatatggatgtggactagatgctcaagatgtgatcatgaacatggggtatccaaaccaactccaagagtactaatatcagctgaagcacgcaacctctcgtttgggaaatttctggagctcagtttttcaagccactctgcagcaagaaggttatctatatgtggacatctggtcaacagggattgcttgcgtttttttgggctgggctctaaagttgctatgttccggtactcacctgttgaaatttacactacctgcaaaccacaacctactctccaattcgtcaaccccatcagacaggattggtttgaaggacaaaggagaaatgttcatgctaaaagtatggcacttttctctggggttgcaagatttctacagaacttgaagaatgaacatcctgatgcaataacattagcagtcaattgtggcctcacactccctgttaaggacttcactgaactagaagagttgttgataaaagaaaaggcccagtttgagagttctttggacaaggccactgacgaaaatgggaaaccattcgggtctgtgcatggagtattgaatataaattggtactatcaggatcttctacttaagctttacatttgggaccgccgtctatatcaactattctattgcaaatctgtccaactagaaagttgttctaattacaagaatcctgctggtactgttgatgggaactgtgatgataactttggtgttgataagaaaatcggtgaaattacatctgatgaaattacggcagctttgggggtatccagtaccatggagtctgcaagtaacaaacttgatcatcaatcaggtgacaccacagcactcttacttcataaaagccaggaagctgggcactcggaatttccttgcaatggaggtagtaaagctgaagaatcttctattgctcatggtcaaataaaggtagatggcacaacagaaaccacaaatgatccttgttttgaaatatccaatgatatggaggtccaggccaatcttacagtagcagatccaatacccatggaacaggagcgttgtagcactccccaacaattcaaatatccttattgggatgacagggagaggtggatttggaattcattttctgagtctcaaatggcttacagggatgacattgaaattggatatttgggcaaatttgaactcattaacaattatttgccacattatctttctcccttgtttgaacaacatgatgattcatactctccgcagttcgcggtaggtccaggtagtaatattttgtgcataatggaagatgagatatccagcataatagctcgtgctcttgccatatctgatgaacgccaccatttgatagatttaaaattcgagaacggaatggattattccaaaggagagtatgctaaagcaatagagaaatcttttagttttctgtctgaaagttctttcagctcatcaccatggtcatctacagattctgaagcaagcttatcgtctctgtcttcattttcatctgatgacttttctggttatgatagctcatctttattgtccccaatgcatccagaaatgactgtgaatgggaaagtaactctcaaagacaaatattcagttactgttgtatatgacaatcaattctttgcactccgaaaaaagtgttgcccatccgagcttgcatatattacttctttaagccgctgcaagaagtggaatgctcaaggtggaaagagcaaggcctattttgcaaagacgacggatgacaggttcatcattaagcaaatcaagaaaacagagtttgagtcatttattaaatttgcacctgattactttaagcatgtttaccattctctggacactggaagccaaacttgtctcgccaaaatattaggaatctatcaggtaattatatcacgagctcgagttggattcgtttcgttttactgttttctttcccatgtggactaacttgcctgtttcaggttaagcaaattaagcatggtaaagaggtaaagattgacttgatggtgatggaaaatcttctctttggccacaatatttcacgaatttatgacctcaaaggtgctacattttcgcgacgcatcactgactcaaatgatcatgatactgtttacctggatcaaaattatgttgaggacatggggttttctccaatctatattggtggaagaacaaagcatcttttgcagcgtgcaatctggaatgacacggcttttctcacttcggtgaatgtcatggactattctctacttgtgggagtggacaaagagaagcatgaacttgtgtttggcatcattgattatctgaggcaatatacttgggacaaacaactggagacatgggtgaagacttctctggtagtacccaaaaatgttttaccaactgtaatttcccccaaggaatacaaaaaaaggtttaggaagttcatggcgaagtactttctgtcagttccagacacatggagtcctgataatccgtctaagccatgcaaatcccttggtcagagcaatcgcaagttggcggaagtccagaatggtgataacctgtcagagcacccaaatgaagttgaggggtgtgcctaatcatgtgcaggatttcctggcagttttgttgaatcctatcatgttgttgtttggctatatttcactttgtaaaatggtgtacatagaaggacctcactgttgatttatccaaaagtttgcggtttttaggcaaattgttgggcaagtgaggtccacaggacgtgtacctatgttcattgttaatttcacaattattatagtgaaattaagaattcatatgatcatttttttggacctaccacttgtgagactgaagcagtctattcttcacttatgactaactgtccaagaccaagatagacatttcctacctctattgaaattaggtcaatttgagtattatgttgtactgtgtacccccactgtactgctgggatatgtaaaaggttccgtataaatgtctgctcccctgaccttgtttgttgcacgcagcacaatacatattttgtgtttgatggatgtccagtttctgtattgctgcccacttgcacttttttttggttctgcacaatgtacaaccttttcagatctcctggtatagaacatattgcaagctattttctttcgtaaaccgagttacattgttactcagaatgggtaagaataagttacttagtttgttcaatatgcatttatactctgaaaccat

SEQ ID NO: 40566 - DNA, 2539 bp, Zea Mays
gggttctgggctttagcgctcgctcgccggtcggccccaccattccgcgcagttccgcgtgcgaggaacaggaaccgctgctgctctctgcctccgctccgatcctgcttgcgctcgagaaccgcgacgccgacgcccttccttgacgcgttgttgatctgcgagctcaggtcccaaccctttcactaatgtaaagaattgatcatcatacaaggcaagagtgcaagaccaactctgttggctagagtattgcatttatacagatctgcatattagagaagatttttcgtatattttggtgaacatgaagagaaaggcgcagtcaggaaaatctcgctcatggtggtgggacaatcatattagtccacaaaattctaagtggctctctaaaaatctagaagaaatggagaagcaggtgaaacaaatgttggggctcattggcgaaggagagttttctgcagaaaaagcggaggtgttctatgagaagcggcctttacttattactcatgtggagaacttctattgcatgtatcgtgctcttgctgcccgatatgacgatgtaactggacaactacgcaaaaacattccatcatctcttcaatcatatggctcggttggtgtctctgaatcagattctgagacacaatgtttcacatctccagagtttgatatgccacagcaaaagcaaaagcctggaccagatttccttgatttttccattggctctggtgttagctctgatgtatcaaagaagggtagtgaaaggtcttcatcatcttcagattctgattcagagcttgatgaggccaaagaggaaaatggcagtatgttttatgccttgagccaaaaaaatattgagctagaagatgagcttcaagaagtaaggggaaaacttgatgctttagaggaaaaacatgctcattgccaaagagatttgagtaccaactcaaaagatactgaacatgaagaaaacctgcacacttcagatgtggaatccaacacccttcagaaggatgcagaagaaacagattttgctttagagagctcaacagaagtcaacagcgaaaaggaagcattggaagctgtgctgtttgagcggaaaaatgagattgaaatgctgaaaggtgcaatggcctcagctgctaagcagtttgaagttgaattggcacatcgtgatcttgaaattggtaagtgcaagcatgaacttggagtactctcggagaagtatttgcatgataagtctactctcgaggatgagcttagaaggctccatggaataatcaagaatatggaaggtgacttagaaaaaatttcacaggagagattgcagctcaggtctcggattaaagagctcgagcaggcagctcacagcttagactattcagcttccgagatagttgagctacaagaagtaataaggaatacacaagcagaattagaaaaggtcacaaaggagaaagaagtgctcaaagaacacgctaacgaatttgagcaacttttaaagggccttgaggtctcaggtacagaggttgcaaagctaccagaaactatcaagaacctggaagcccagctagaaagatccttcgaagagaaatcagtactccaagaccagatcaagcagctggagcaggttatgtctgaatcttcggagaaacattcacatgagcagttctctcttactgcggatcttttgaagttatctgaagtgaacgcttctcttgaagacaaattgtccgatgtggcggcagagcttatccaagtttatgctgacaaggaagaagaatctctcgataatgagaagcaaatttctgtcctcagtaaagatattgctgatctcaggagaaagcttgaattgttgtcatctgagaaaaccacagttgatgatgagttggccaaactgctagctgatattatgattcgtgacgaaaagatgaagcaaatggatgaccacctaaatcagcttcagttagagcatgccaagctgatggcagaatttgacagtgcacacaggtccttgtcagagctgcatgcgcaggtttctgagctggaagacgaggtagagaagcagaagcttgtgatatccgagagtgcagagggaaagcgggaggccatcaggcagctgtgcttctccattgaacactaccgcagcgggtatcagcagctgaggcagctgctgcaaggccacaggaggccgttggtgatggcaacctgataaatgaacaaagtccgtttgccaacaaattgcgcagttgcttgtctctgggcgtgttctatttgtagctctgttctttcacaacttgtgccgtgtagtttatgttataaagaattctgtgtggtatgtgtgtagaatgtaatgggatgggatatttatgttgttccttcatactcctgtggctgttttctttttccttgctgtccgctgatgaatgttatgatatgcttgaaccttcgtcttttcagtcacgactttatgtggtcaataactgaactgcacaatggaactcccttttcaatctaagacgtgtttggcagaaacata

SEQ ID NO: 40567 - DNA, 1393 bp, Zea Mays
gccttctcaagggcgggaaactctcaaaatcatcttctccgcaccaattccgcaaaccctagaaaaatctcgctccgcaaaaccatgagcgcccctatggagatctccttctctgcgcccccaccccctccggacgcagcgtctaccgccgccgcttccccgctgctggaacctgccgccgcgcagatgctgccccctgtcgccgcggtctcctcctcgcagccgatgcagcagacagctgcggctgcggccgtggttgctccttccccggccgacgataaggtcctcgtgtcagttgaggtactgttgcacgccacgagcgtagctcgccacgaggacgtccaggtggcggtcgagaggatgctcgaagctcgaagcttaagctatgttgatgggcctgtgccaattcctgccgataattcttttcttcttgaaaatgtcaaaaggatacgaataagtgatactgatgagtgggttgagaatcacaaagttctcttattttggcaagtcaagcctgtcgtgcatgtgttccagctgagtgaagatggtccaggtgaggaaccaagcgaggatgatacactctctagctttaatgagtgggccttacctgccaaagaatttgatggtctgtgggaaagtttactatatgaagttggtctcaagcagaggttgctgagatatgctgccagtgctttgctttttactgaaagaggtgtggacacatgtctggtttcatggaaccggattgtacttttgcatggtccacctggaacaggaaagacttccttgtgtaaagcactagcacagaaactttctattcggttcaaatcaaggtattctatgtgtcaattgattgaagtcaatgctcattcattgttcagcaagtggttttctgaaagtggaaaactggttgccaaacttttccagaagatccaggagatggtggaggaagaaagcaacctagtatttgtattaatagatgaagttgaaagccttgctgctgccagacaagctgccatatctggctctgaaccttcagactccattagagttgtgaatgcactgctaacacaaatggacaaactgaagtcttggccaaatgttatcattttgacaacatcgaatattactacagcaatagatattgcatttgttgacagggcagacattaaggcatatgtcggaccccctacgcttcaagcacgatacgagatcttgaggtcatgcatacaggaactcttaagagttggtattcttacatatcctcagggtagtagtgtgccatgtattctgaactattcgaccctgaatgagaagaaacactgtcctgaggctgcagaaccccatggcttctccacctctctggttaaatggtggtggttcatctctcttt

SEQ ID NO: 40568 - DNA, 2426 bp, Zea Mays
atctgcaaaatactgcgtgctctcttcttctggttctcctcatcacattcaccgtcgtcgtcatcacataagcttttatctaggcttgcggctacttgcatcggagcaagtcagtcacatctcacagctcagtgagatccagagccaaagggcggggcgtctcccactcccaatcccaagtccagccgccgccgtctcttgctcgctccaaaagccgttttccagagatctttttcagggccagacgccagccgccgtctctcgcttgcctgcatttccgatcctgaggcagtcctcatctcattctcatccaaccgggaggttgggaacgagatcacagctacagttacctatgtggtataacgatctctgtaaaaccattcccgcacgtgacactgaaagcgaaaccacttggctgcgtgtaggagtagtaggatcctcctcagatcggcttcaaaaatcaaagtgggggggacaacaaggcaggggatgagtgcagctgcaaccaaggtgaagagacgtgtgggcaagtacgagctcggccgaaccataggcgaaggcacattcgccaaggtcaggttcgccaagaacaccgagaccggggagccggtggccgtcaagatcctcgacaaggagaaggtcctcaggcacaagatggccgagcagattaagagggagatttcgaccatgaagctgattaagcaccctaacgttgttcgcatatatgaggtgatgggaagtaaaacaaaggtctacattgtgctggagtatgttaccggcggcgaacttttcgacacaattgctaaccaaggtcgaatgagggaaggcgaggcgaggagttacttccaacaattaatcaacgcagttgattattgccatagcaggggtgtgtaccaccgggatttaaaaccagaaaatctactgcttgactcatatggaaatctgaatgtctctgactttgggctgagcgcgctgtcccagcaaatcaaggatgatggattgctgcacacaacttgtgggactccaaactatgtggcaccagaggtcctagaagatcagggctatgatggtgcaatggctgatctgtggtcatgtggagttatcctgtttgttctgctagctgggtatttaccttttgaggactctaaccttatgacgctgtataagaaaatctcaaatgcagaatacacatttccaccatggacatctttccctgccaagaggttgttgacaagaatccttgatccaaatccgatgacgggttgattttgcgtccatattatagctgagcaactctttcattcctagcagattcatctctccagttccaaatacagttaaatttgctgactagattggtcgaacaaagcagaagaaaattcgtgtgacttcagaataacaatccctgaaatactggaggatgagtggttcaaaaagggctacaagcgcccggagtttgacgagaaatatgacacgccattggatgatgtggatgctgtcttcaatgactcagaagagcaccacgtgacagagaagaaagaagaagaacccgtagctctcaatgcatttgaactgatttcaaggtcagcaggcctaaatcttgggaacctatttgactcggagcaggaattcaaaagagaaacgaggttcacgtcaaaatgtccaccgaaagaaatcattcgcaagattgaggaagctgcaaaacctctaggatttggtgtccagaagaaaaactacaagttgaggctagagaaagtaaaagcagggaggaagggaaacctgaatgttgctacggagatactacaggttgcgccctcccttcatatggtacaagtccggaaagcaaaaggcgacactctggagttccaaaagttctacaagaacctttccaagaccttaaaggacgttgtctggaaatctgaagacctgcaaatgcgagctgcttcttagcatccactagatggcgagatgttcgtacgtgtcagattccattcccgtagcatgatgtgtcgtcagccgtttctgttcactgcactctgcatggtccggtgggcgcgtggcttggcattttcagagaccgcgttgctcgttgcagcccgggatgaaggcgatgcagtaggttttgtggatgtggtgagctctgtatatgcctattgatgagtcatgttgcaagctgtaacgacactatgatccgtgaagtgtagaagcagccaagtatgttctttctatgctgccccatttcccggcagtttccatgcattttgaagaaaaaaatagtggctaactcattgatatttgtatttggtcatcattaataaatcgcctctccatctgtgcatgacccctctatcgttgtaagatttttttacaatcctcatctttctaaggttctgtttttttaccagattatataattcagctcaaat

SEQ ID NO: 40569 - DNA, 1269 bp, Zea Mays
cgccgccggccggcgtcaccatgaaacaaccccatcaaggtgggaggaccgtaccggaaaatatcgggagcaaaaaatcagaccagattttcccccgtgaggcatgaatccagtgttccaagctcccagcggaacaaacaaggaccaatccgtccagggatcggtggagcccgatccgttcgattcgtcgaccaagggagcggcgaagccgcagtcttcatcgtcgtcgctgatcttccttggtacggggtgctccggctcgttgcccgacacacggtgcctcctcaagccgtcgacgccgccctgcggcgtctgttcgatgggcgtctccctccctccggagcggaaccccaactacaggctgaacacctccctcttgatagattattgccatgacgaaacccacaagtacatcctaattgacattggcaagaccttcagagaacaagtcctccggtggtttgtccaccacaaagttccttccgttaattcaatcatcctgactcatgagcacgcggatgctgtcttaggccttgatgaagtctgggtggtacaaccaagaaatggcagaaatgacattgaacaaattcctatttttctcacacaattcaccatggacagtatcgcaagaagatttccctacttgatggagcagaagccagaggatggtgatgaagatgcccaagccgcgaaaattgactggaagataattgaggatgatgtcgacaaaccatttgtagcatcagggctagagtttgtgccgttgccggtaatgcacggagaggggtatatttgtttaggctttttatttgggaggagagccagagttgcatatttatctgatgtttcgagatttctacctaaaactgagaacgttatttcaaagtctggtgctggacaacttgaccttcttatattagaagcaaacgctttgcatggagtgggagattcttccagcacccatttaactctgagtgagagtcttgatgctatcaagaggatccgtcctaaacaagctcttttgattggaatgaggcatttttttgagcatgaaagagaaaaccagatgttggccgaatggtcaatcagagaaggaatatctacacaactggctcatgacggcctgcgtgtattcattgatttgtaataaggtatacaaggtcgctttgcagtattcgaggactactgtattcattggctactcaggaatatcaattgttttatgagattgttgatcagctgcactcttctagagttggcaaggacaaa

SEQ ID NO: 40570 - DNA, 1044 bp, Zea Mays
agcaaaaaaatgccccacactcccacggtcccacccggcgtggcggctggcgtacccgtccccactcgtcgcccatcttccgtgacgtcaccccattctccatcggttcccttcctcgcctcggttcgcgggtacccgagtcgcagacgcacctcaatcgcaaccttttggactcgaaggggggcaatagacagcagggaaagaactgagcgaggagattcccaaggatctcgtcggacgctagaggaagggacgggggacaggcgatggcgggggacgccggcagcggggtggactgggagagcctggcggaggccacctccggggcaatcggctcgctcgtcagcaccaccgtgctctacccgctcgacatctgcaagaccaagttccaggccgagcttcagacgcaccagggcgcgcagaaatataggtgcaaggtgatgattcaggctgcagaccctgatgaggatgatgacgttgattctgaaaggccaagcaagtcaagaacaccaaaaacaatgctaggtgccttgcatgctatctggagcaaggaaggcattccaggcttcttcaaaggcctgaatgctcagatccttaaagcagttctgagctccgccttgctgctgatgataaaggagaagatctcgaagttcacatgggtctcgttgcttgccctgcggcggtatcttttcgtttctcagaagaggatcaagagtgtaactgtataaatactagctccaaacatagcgacatcgtgcttctgtagatgttatgccaaggaattaatctgaggaataatgagcagaaatactgaagcaagagagtgtgtaaagtgtgtatgtgtgatcgatagcatcagagggctcttcaataagtttgttcattcttttttcccctctgaatctctgatagctagtgacacaggtgttgcacggatctgaaactggactgtacttttggctttggttgtctgtaatgtgtaaaatgaattgattggcacataccaagaggggttgtaagtcttgtgatatcacaccaactacg

SEQ ID NO: 40571 - DNA, 414 bp, Zea Mays
gggaaactccagagcgattgggttcttcgccgctgcgcgctgcacaccagggcctgctgcttcgctgccgctggttgcagtaatacaacagagctaaactgaccatttgggccattcatcacttcagcgttgcaagttaattgcaaactactttaaacattaacctatgatggcccagctaagtaacatcatatcttcagaataccgtttgccctgctttatgttatataaaaaatggagcacttctctctataagatataccacctcctcgaaattttattgacatatattgtaggaattcttttacttgacttttgcttccttttgattgagcaggctaagagaaatgcaaaaatgaaagctgagatgaacgaaaagactatgagaaagttcccggtttctcagaaacacat

SEQ ID NO: 40572 - DNA, 1223 bp, Zea Mays
tgacgcttgaagatcactcaacatcctcgtcggaaaatcggagcttccggcgtccgttccgcttcagcaacactatctctctcaaagttactagagactagacgctctgaaggtcccgtggccgtggatgcgaatcgatggccggggttgaggaagaaggcgaggtggcggccctgcgggaggccctgaggcagcaggtgcaggccgtggaggagctgcgggcggagctggaggaggagcggcaggcggcggcgtcaggagccgatgaggcactggctatgatcctgcgtctgcaggcggagaaggcggcggagcgtatggaggcggagcagttccaccgggtggccaaggagcggatccagtatgatgaggacacgctggctttcctcagggccgtcgtcttccaccaggagatggagatcagctcgctcaaccgcaggctgctcgccgtccacgccaccggggacgatcccctttcgccggcagtcgatctcccctggctgaggaagctggccaagagcggcgtggcgtccaggaggaacgcgtccctcccggcggcacacctggaggagctctgctcggagctcgacgtcgtcgtcgacacggacgccgacaagaagagggtgggcgaccggaggccagcaaggacggtctcggacatcggcgaggtgatcagcagggagaaggagtgggcgacgagacccaatcagacggcgccaacgcccaggctgtaccggtcggcctcacactcccacggcctcccccggcgcgcgacgtgctgctccgcgcagtgtggcgtgcgctccgcaggccgggcctcgccagagatcatcgccgaggaagacgagaaatcgtgcaagagcaacgccgcactggaagccgacatcgagcagatcaaggccaccgtgctgtctctccacaccgacctcacaaagctaagagaatccaccttgtccatggcagacgcacattcccagatactagccgagatccacgcaaagctcgacggcgtcacgccgcggcgacagacgaacttcgaaccaaggtctgagctgctgctgaagaaggccaccagaggaggcagcagcaacagttcttcgtcttccaaggagcagagctaccaataccagtggcaggctgacgtgctgatgaaccatttcattgagatggattttaattgttgttagcttcaggctatgaggtaattggcttttgggttgttg

SEQ ID NO: 40573 - DNA, 1106 bp, Zea Mays
gttattattttgtttgaatgaataaattgatagatatgtaggtttcgatgattctcgtagttttagcaagagcggtacatgttgatttaatcgcatcgtctagtatccgtcagttcgtaggttatgcgaggaggattaaattggtatttcgtatccgatgcatggtcgaattagtattacagagaataagtcttgtgtttctaacgtctagctgataggcgctgttagtattgcgtatgacggattttatttgtttgtatggagtcgatgacttgttgtgatagccgttatgttctatgtttgttgatcggtgaaaggtcataggtggatcgttgaccgtttagattaataatcttgaataaatatgagtggtgcgaaataaaattaaaatagttctgtgtgagcgatgtggtataattaataatgcgaagggtaagtttagcatttaattaattagtgaataagttctatctaggccaattgtgttaagtgtgtaatttaagttaattaagatacccagtttatagagttaataaaaagttagaaacaaaaatgattccacacacggatgttaatcataatatcttgtgatgttagtttgaattatatctggttaggttggaggagcatgattgtcgtaagtaacaatatatcgatagttagtgtccgcaatgcctcgccattaagtgggttatttctcttttgcgtagcatcgtaatatcttgtgttattattccttatggtcatacatgtacattgtgcatcccatgaggtatgttaattaatcacatgatgcgaaggaccagagctgagtcgaccacaagatgatgtaaagtgcaagctactccaaaaggtgatgctagtggattaacctgaagatggacgaacttgaggatgggcagacagagcaagtatcggaacaaaagctgatcgtcaagtgatcgacggctaacaaacactaacgtagtgtttattccaggcaagccccggtgcattatccctttccttgtgttttaaaatctttatcaccttgtatgatgcattaggtgataggagttgtgtgctcaacaattgatgcatttccttccttgcaaaattgatcacat

SEQ ID NO: 40574 - DNA, 1400 bp, Zea Mays
tctatttgcagctgccccagtgtgccaaagcttgaagctggggaaatctattgaagttagacaggcagctggtctattactgaaaaacaatctgcgaacgacttacatttccatgcaatcttcatcccagcattatgttaagtctgagctgttaccatgtataggggcaaccaatagggcaattagatccacagttggaacagtgatcagtgtgcttttccaaattgtacgagttgctggatggattgagttgtttcaggcactccataagtgtttggagagtaatgacctggatcacatggaaggtgctatggatgcgatatacaagatctgtgaggatgtccctgaagagcttgatgttgatgttcctggtttgtctgaacgaccgatcaacgtgtttatgccaagaatactgcagtttttccagtcaccacatgcaagtttgagaaaactatcattgggtatcataaaccagtacatagtagtgatgccatcggcactctacatgtctatggatcagtatattcagggattattcaaccttgcaaaggactcttcagcagatgttcggaaactggtttgttcagcctgggttcagctcattgaagttcgcccatcaattttggagccacatcttaaaaatgttactgaattgattctgcaagctaataaagattcagatgatgaagttgctctggaagcttgtgagttctggtctgcatactgtgatgtgagcatgcctcctgaaggtttacaggagttcttgccgcacttaatcccgactttgttgtcgaacatggtatatgctgacggcgatgagtcccttgatgatgctgaggaagatgaatcctttccagacagggaccaggatttgaagccccgcttccatgattctcgattgcatggatcggaaactggagatgacgatgatgatgctgatgctgtaaatgtctggaacctgcggaagtgtagtgctgctgggttggatgttctctctaatgtgtttggtgacagcatccttccaactttaatgccattgattgagcaaaacttggctcgaacagatgatgattcttggaaggagagggaaactgctgttttatgtctaggcgctatagcagaggggtgcattagtggtctatacccacaccttcctcagattgttgcctttctaatcccacttcttgatgataaatttcctcttatacggagtattacgtgttggacgctctctcgatacagcaaattcattgttcagagccttgatcatccaaatggacgcggacaatttgataagattcttatgggagtgctcagaaggatattggatactaacaaaagagtgcaagaggctgcttgttcggcgtttgcaatccttgaagaggaagcttctgaagaat

SEQ ID NO: 40575 - DNA, 1948 bp, Zea Mays
gcatattcgccgccgtcagcctatccaccctcctccgccgctcgcctgcccgctgctgcgcttcaccccgctctcgcctcccgccgccgcgccgtcccggtcgcgatggccctgcgctccccggatctgcggtggctcggatcgctcacgaggcccggccgccttgcaccatccccactcgccgcgctcgcctccccacggcgccgccgccgcgcaccgtccccttcgccctcgccctccgactcctccaccccatctaccgcccctacatccgacagtgggccgggagcggaggggatggaggggctggagtggaagaagatcagtgccaagaggttcgggatcaaggagtccatgatcccccccgaggcctggaacgtactacaccgcctccgcagcagaggatatgatgtgtaccttgttggtggttgtgttcgagatctcataatgaaaaagacgccaaaggatttcgacataataacaacagctgatcttaggtgaaagacactttcttaggatcagctgttatagtaggaaggcgttttcccatatgtcatgtacatgagaacaattccatcgttgaggtgtcaagttttaatacttgtgcaaggggatcaagtggtagccagatttacaattcaaagagccaaaattgtagcaagaatgattttgttcgctggaagaactgccaaaggagggacttcacaattaatgggttaatgtttaacccatattcagaaaagatctatgattacttgggaggcattgaagatattaagaaagctaaggtccgtactgtaattcctgctggcacttcgtttcaggaggactgtgaattgcagctcgtttagggttcagcttccccaaagaaacagcttattatgtgagaacacttgcttgctcagtggcaagacttgataaggcaaggatactcatggagatgaactatatgcttgcttatggttcagctgaagcttctttgaggttgttgtggaggtttggcctccttgaacatttgttgccctttcaggcagcatatttctcttcgactcgttttaagaggaaggataaaggaactaatatgctacttgtcttattttctaagctggataattttcttgcaccgaacaggccatgtcacaatagtctatggataagccttttagcttttcatgaagcattggcacgcaaaccatgtgatcctttgatagtggctacttttgcactagccttttacctgggaggtgatatgtctttggcagtggatatcggaaaatcaatcaaccgacaacatgatactggctttcgggagctcttagaacccaaagtctggactgataagcatttggcaggtgaagtacaaagctttgctgcattgatgaagcaggcattaactgaaatgactgatgagtatcatgtcgcaaatgctatggcaaaaatccctcaagcaccttcctcagatcttgtatttataccactacaagcctacctgaaggttctcaaatttatcgagtgtgttcaatatggcaaaaaggagcgtggccatgaaccaaaacgcgatgggatgatcaattaccataacctgtctaatggtacacatgcagaaataagaaacctctttacactggtggtttttgacacactgtaccctacagacacggaggatgaaaatgactgcagttcttagagagacatcatgattgggatgaattcaatactttgccagacatcaataaatactccatttgtcccaaaatatatttctttctagtcttttttttggtccacattcatcctaatgatagtgaatgtagacatacatacaaactatattcgtagattaattaatgaatgtttgtttagtttaaaacgaattatattttgggactgagagagtaataaataataaatagccagggacaactggagctgctgcatcagagtgaag

SEQ ID NO: 40576 - DNA, 3622 bp, Zea Mays
gtttccctaaccatttcactgctccacgctccagcgaaggcacacaaccgctgccgtttcttcatctcccaatcttcatcttcctcgcagcgtcccttgctcgcgttcggcacataggcgacggcggcggcgctcaggatcgggctctcggcgacggcgctcagggtcgggctcttagcgacggcgtcagcggcttcccctcccgcctcccgttagtcgcctcgcgccctcgcctccggtcctccgcccacccgctggtgaccctgcgagcatgaatcactgacttgtgaaccattacctttatgggaaaagaaaaactccataagcagccctctggccgtctgattgaatctctcaaaatggagaggatgaggaacatcctgactcatagatatccatatccgcatgaacactcaagacattttatcattgctgtgtttgcttgttggcttttcttcatttcctcggataatttgcaaaaccttataatgaagttggacaagaattttaaatggtggtccatgtatgcttgtttgattggcttcttctatttcttctcatcgccttttatcaggaagaccatcaaaccaaactattcgaacttcaatcgatggtatattgcatggatattcttggcagcactataccatctgcccagttttcagtcaatgggcttggatttgcggatgaatctttccctcttcctcaccatttatatttcttctctaattttcttgatggtcttccatatcatatttcttggcctttggtatttgggttttgtttctcgtatggcagagaaaaaaccagagatgcttactataatacaaaactgtgcagttataagcatagcttgctgtgtgttttacagccactgtggtaacaggactgtttcaagagacaaatctattgatcgtagaactgctagctggattgtattctcactttggacaaagcatgatgacaacacactgatttcaaggctattgcgtatgcataaatttaaagaacagatttgctcctcctggtttgctccagttggttctgctagtgattaccctcttctctctaaatgggccatttatggagaattgtcttcaaatggatcaggttcctccaatgaaatttcaccagtctactctttgtgggctacattcatgggtctttacattgccaattatgtcatagagcgttcaacgggatgggttttaactcatcctttgacaatttcggagtatgagaaattgaagaaacagttgaaaccagattttgaggacatggttccctggtactctgggacatcaactgatttatttaaaactgtctttgacctcatgatatctgtgactctgtttgttggtcgatttgacatgcgtatgatgcaggctgctatgaataaaactcctgatgaagctaacagccatgaccttttgtatgatcatcttgatggaaaagatgagctttggtttgacttcattgcagatactggtgatggtggcaactctacatatgctgtagcacgattacttgctcaacccttgttagttataaactctgatgactcgaggctaacatttcctcgtgggcaactgcttctcgttggtggtgaccttgcgtatcccaatccatcctcattttcgtatgaacgacgttttttctgtccttttgagtacgctctccagcctcctgcttggtataagcctgaacatatagcactggagaagcctgaacttccccttggggtttctgagcttaggcggtacagaggaccacagtgtttcatgatacccggaaaccatgattggttcgatggattaaacacattcataaggtatatctgtcataagagttgggtgggtgggtggttcctacctcagaagaagagttattttgcattgaagcttcccaatggatggtgggtttttggtcttgaccaagctcttcatggtgacattgatgtttaccagttcaagttttttgctgagttgtgtcaacagaaggtcggagaaagtgattccgtaattattataactcatgaaccaaactggctccttgattggtattggggtgatagcactggcacaaatgttgcatatttgatacgggagtaccttaggggaagatgcaaactgcggatggctggggacctgcaccattatatgcgacattcttgcattgagtcaaaagaaccagttcatgtacaacacttactcgtaaatggctgtggtggggcctttttgcatccaacacatgtcttcgaaaacttcagggtattttatgggaacaagtatgaaacaaaatctacatatccttcttaccacgattctagcaagattgcacttggtaatattttgaagttccgaaggaaaaattggcaatttgatgtaattggtggttttgtgtactttgtcttggttttctcaatgtttccacaggagacgtgttttgcttggttttcttcatgccgctgctcatcttacttcggcagtgctactgatgctacttatggaattagctattgaaatctgcattcggaaccatctattagcaacatcaggttaccataccctttatgaatggtaccgaaaagtggaaagcgaacattttcctgatcccacaggacttcgcgctcgtctcgagcattggacctttggactttaccctgcatgtattaagtacctcatgtctgcattcgacatcccagaggttatggcagtaactagaagtacaatctgcaaaaaaggaatagagtcccttcccaggggaggtgccatcatctattatgtctgtgttttcctgtacttctgggtcttgtcaacacctgtcgtatcgctggtgtttgggagctacttatatttatgcataaactggttccatatccatttcgatgaggccttctcctcgctgcgcatagcaaactataaggcattcacacggctccacatcaagaaaaacggagaccttgaggtcttcaccctggctgtggacaaggtgccaaaggattggatgctggatccagactgggacatggaacccaagcagccattccagatgagctacaccaggaaattcccaagcaaatggagggctgcgtcgggccttgacccaatcaatgctgtgcgcattgttgaccggtttgtcatcccgcgaacgccctcaagtcctacaacaccaggaggctctgtttcaagtcctacaacaccaggaggctccgtttcaagtcctacaacaccaggaggctttatgagatgatgttcatgctgctgtgaaatataatgtaatgtacacaaggatatcttcgacttctcgggagaaattgtacagtacacaaggtcctctaacataccacgggagaaatagttgggaaaaaaaatagagggcaaatctccacaagatccaaatgttgtacatctggtgttatatcagttgtcctgatcaggtgtaatgataagtttttcaaacttagggtgtgattggtaggctgaatccggccctgcctggttgcatggatgcagcctgaacatgtttggttggttggctctgtgttgggccaagtactggagatacatttcctggccttgggcctgggaatttgtctccaccattgccactctgctgtccg

SEQ ID NO: 40577 - DNA, 4598 bp, Zea Mays
cctttcgttcgacgcggatgccatcttctttttagccccctcccgtcaccaccaccacaggtccacagccgcgctgattggaaaaggggtttcgctcttccggagaaggcaaggcgtttgcggtttgcccgccgccgtgaatcgtatgtgatcgaatcgcgcggcgggtgatggcggaggaaccggtggtcggttatgatggcttcgaggccgccggtgatgctggcgccggtggcgcggaggacaacctgtcgatgtccctcggcgacttcatggcgttcctcgaaactgagcccacgtcacccgaggaaggctggaaggaggagcagcagatgcagcctgcgccagcactcagtatacaggttatacctccagcccaccactgagcactcatgcagtaacggaccgtttggttcagagcttcccaggcagcttcgttgccaggcaaggatgtcatccccaggtgcccaaaatcggatgcctggcgacgcccacagtgcctgtcaaagctgcctgggagcaaagaaaacaggtcaatcaaggttgtttagagatgcctgccaacactgattgttctgaagatttattccaaagccatgaagaaatgcttgagaacgcagaattttggtcaaagtcaaactactcccctgtggagcatctggagtgccatatggaagttaacatggagctgaacgaaggagaacaaatgattgatcacacagaagctagccgatatgaattgtttagcaacgatctgcagagccaatcaagaacttccaacttggacaatgaacattttccaagggatgcatcaaaccacgctaatgttgaagcaactggacctccatatgatctctcaaatggtggtatatccacagagcactcagattggagtgaaattaaatgggggagtacagatgagatgcttggtaatactggtcaggatgatgaccatttcactccgatgggcatgttttgtcttaccaataacacagatattcttgatctttcttgcattgagtccaacatgggtgagagaacggaaagcattcgcaatggcaacagtagttgccttactatgcaggaagaacatttacaggcagaatgtggaggatatcctcatccagattatatatctgttgatatgattgatgaaagatcactgcatgatttgccacatgggttatcacaaaacaatgagcagtatgagatggagcagctcccacagaatatatgtgaaagtggttctatgcagatggcctctccggaccaatattgttcctctccggaccaatattgtgatgatacatctttatcagatttttacatggatgtatcctccccagagtcaatatcctgtgagcagaaccagcctgaagatatttttttcaagagcgagtctagcactgactcttctccagtaccctctagcagaaattccaccacagaggatgctgataaatacttaggtcaaccatcaaaacagttgctggactccaaaatcgttcctttcagcaaccaacacacgtttaagaacatggaatatcaaaaacctctggtattggataaacaatatgcatatagaagcaacaactcttctattcacaattcaacaaaaggttgcttcagtagagatggggacatggtttctgatttatgtgtgctagagggtaataggaatcctgctcctgctcacctatggccttatcaggggaagttccatcataattttcagcaacctgtgtatggtaattccatcattcctgcatttggtggtacgagatacaaaccacacgatgaaagaaccactctgcgccttgcattgcaggatatttcacagccaaattctgaggctaatccacctgatggggttttagcggttcctttattgaggcatcagaaaattgccttgtcatggatggtgaaaaaggagactagtatctcgctttgctatggtggaattcttgcagatgatcagggccttggtaaaactgtatcagccatatcactgattcttactgagcgcccaccagttccacagtcatctactaagaacgagccatgtgaagctgtaactctagatgaagacgatgactgtattggacctcattcggaaaagctgatgcggacatgtagctctcaagtgacaagtaacacagtgaagcaagaaaatcctattgtagcggttaaggcaaggccagctgctggtactttggttgtttgcccaacaagtgttttgcgacagtgggcaggagaactgaagaacaaagttacaagtaaagctaatttatcttttctgatatatcatggtagcaatcgcaccaaggatcctaacgaacttaccaaatatgatgttgtgcttactacatattctatagtaagcatggaagtaccaaaacaatcaaatcctgatagtgatggagaagagaaagggaagcctgacccgtatggtgcacctgtgtcctcttcagggagcaaaaagagaaaggcatcctcttctaagaaaacaaaaaataaaagtgttgcagagagttgcttgcctgaaaaacctcttgcgaaagttgcttggtttagggttattcttgatgaagcacaaagcattaagaactaccgaactcaggttgccagggcttgctggggtttgcgagccaaaagaagatggtgtttgtctgggacacctatacagaatgctgttgaggatctctatagctacttcagatttctcagatacaatcccttacgctgtatataagcagttttgcactctgataaagattccaatcagtaggaacccaaataacggttacaagaagcttcaagctgttttaaagccggtaatgctacgccggactaaagcaaccatgcttgatggggaaccgatcatatccttaccacccaagactgtttcacttaagacggtggacttcactagcgaggagcgtggtttttataacactttagaagttgaatcacgagaacagttcaaggaatatgcagctgctggtactgtaaagcaaaattatgtcaacattctattgatgcttttgcggctaagacaggcatgcgatcaccctcacctagttagaggctatgactcctgttctagttggatgtcttcgttggagatggtgaagaaacttcccatggaacggcagcacaaattacttatttgcttgcaatcttgttctgcgttttgtgctctatgcaatgatgcgccagaagatcctgttgtcactctatgtggtcatgttttttgcaaccagtgcatactggagcaactcactggtgacgacagtgtatgcccagtgtctaattgcagagtccgactaaacacatcctcactcttctccagaggcactcttgaatgctctctgagtaaattagcctctgatttcaagtctgatgatacatgtatggaaatgatacatgctgaaaagcgccctgggatggattcatcctacgcatcttcaaaattgagagctgcattagatattcttctctcattgcctaaaatagatcccactattgatagcaaatgttcaatcgggattgaatctgagaagtttgatggaaagggtatttcagaacaaactgacaccaagttgacagagaaggccattgttttctctcaatggactagaatgctagacttgcttgaagtccatttgaaagcttctcatgtgacatatcgaaggcttgatggaacaatgtctgttgctgcacgggataaagctgtgaacgacttcaatatggttccagaggttactgttatgatcatgtcactcaaagctgcaagtcttggcttgaatatggttgctgcctgccacgtacttatgctagatctttggtggaacccaaccaccgaggaccaagctgtggatagggcacaccgtattggtcaaaaacggcctgtcacggtatcaagattaactataaaagacaccgtggaagatcgtattcttgctctccaggagaaaaagcgggagatggttgcttctgcgtttggagaagacaaatctggttcccgacagactcgattgaccgttgaagacctgaattatctgtttatggtgtagaatcgctcctgagagtgaacagttttgctcattggattggtgttagacgtggtagataaaaatgttctctgaaaaaataacaaaatgctttcatttagggattattagttcttgtagcttgtacagttgcagagatttaggggttgctagcgacgtgtcttccaattctttttgcacgggaagcagtaagatgctgaactaggtgaattcttcagatagctgctatagtgcctgttaacttggggggtgttttctatgtactaatttctagttcctccattttattttcttttacttcctaaattgtcaaacacagatactaaaatagagataatctctcttttagtctatgtgtttagcaatttaggggctaaaagggactaaaatagagagactaaagacaccccttaatgtaatgaagataacgacaatgaagctcagatgatatatatgtacatattcttctcgtatccgataaaccatcgagaatattgggccatattacggagggcttgttctcaa

SEQ ID NO: 40578 - DNA, 308 bp, Zea Mays
gtagttgtaatccattatgagactatgtcaatgcgttatcttggcacaatctatttttgctacgtgagattcattattggtgtcagttcggtagtggtgtcacgattaaggacttatggtgccgcagcgaaactgagagcctcctgtgaatgcgcacacaggattgtgctactcgtcggatgctggtatcaaggtctctagtcatgatccattgtggaactacactgatgtgtgatcttccgtagatatcttccttgaaacaatttcggtgttgtttgtcgaagtgatcaagcaacatatgtcatctt

SEQ ID NO: 40579 - DNA, 4715 bp, Zea Mays
cgattggcggtcgccttattccgtctcccctgctaatgcattactaatccaacgaatccttcggttttgtattcttcgcttcctttcgccttcctcttcgcctctctctcgtgttctggcgtcgccgtcgccgctggcgcgagatggtggagacgcggcgaagcgccgcggcgaagcgctcggcggcggtggtggaggaggagaagggctcgctggcatcgccagcgctggagcccgcggaggacgcgccggcgggtcttggagcgggtgacgatgtcgcgtcgtcgcagcccccgaagcgcgcgaaggttgggtgcacggagtcggataccgcgaagccgtcggtggcgccggctgccggcgctgttgcgggtccactgcccaacacggctgggctgcaggccaggaccggcgccatggacaagctggaggccttcttgaagtccaaggaggctcagtccaatccggccggtcataagcaggggactaatgataaagatttatcggcgaagatgaagagagtcatggatttgtcggaggatatatcggagaagataaagagaagcaaggataggttggctgtgttattgaataagccggctgcaggcaccagcaggcgtcaggagccctggtgcagactaatttcacaacattccatggctgtatttgatgcgacgtttggctgcatttgttgggacgtttggctgcatttgttgggaaacttcaatgttccatacttccattgttatcgcttttatgcatatgctactgtataaaagtaggatttaagcaccctaccctttctatttacggtgcgattttcacaattggtcatggagcgcatcatgatttcagactggatgaatcatccactgcctcatctgtttgtagactgaagcaagctaagtagtatccagctggggcaacactcacatttcaatgatattcaggatcatgtgtcatctaaagggcgcaaagcctcatcctttctctttggaagaggtctatcagcagacccacttaatatatgtaaaacgacggagggccggagccagtttatctctgaagataatatatcatctggtcggtgtcagctactaaaggaggatttgattaatgcaacggttgatgtgagtgacatctctgagtcatttgatagttgcccatattatctaagtgagcataccaaacatgctctaatgtcagcagcatttgtacatttacattgcaagaactacttcaagtttacaaaagatatatcttctcttagtcaacgagtgctgctatctggcccaacaggaactgatatgtatcaagaatatctggtgaaggcccttgcaaagtattttggtgctagattgctcactatagattcttccatgctgtttggtgggcaaacttccaaggaatcagaatcatacaaaaagggtgatagagtgaggtatattggctcaggcattatccttgatggacagagccctccagattttggttcacagggtgaaatatttcttccttttgaagaaaacagatcatcaaaggttggtgtaaggtttgataaaaaaattctgggaggaaacaatcttggaggcaattgtgaagttgatcatggtttgttctgttctgttgattctttatgccccgacattccaggatgggaggttacgttcaaacatccatttgatgtgatagttgagtttatctctgaagaaattcggcatggccctttaatcctttttctgaaggacacagagaaaatttgtgggaataatgattcctatcatggtctgaagagcaagctaaaacattttccagctggcgcttttataattggatctcaaatccagcctgacaatcgcaaagagaaggcaaatgttagttctccttttctttcgaagttccggtacagccaagctatacttggcctcacattacaggacattgatgggggaaatgataataataaagaaacatcaaaggcaataatgaagcatttgatcaaacttttcccgaataaagtgacacttgaggcaccacaagctgaaatggagctttcacggtggaaccagatgttaaaccgagatattgaagtccttaaaggaaatgcaaacatttcaaaaatacgctcttttctaacaaggcttggattggaatgcactgaccctgaagcgatattggtcacggatcgcattcttacaaatgagtgtattgataaaataattggttttgctttgagccatcaacttaagaactgtacaaatccagacccccctttgggtagtgtgcagtttgctctatccagcggaagtcttaagcatggcgttgacatgttgaaaagtatccagtctggctcgaagagcagcaccaaaaggaaatcacttaaggatattgctactgaaaacgaatttgaaaagagccttcttgctgatgtcacccctccacatgaaattggtgttacctttgaggacattggagctttagaaagtgtcaaagatactctgaaggagttggtgatgcttcctttgcaaagacccgaacttttcaaccgaggacaacttatgaagccatgtaaaggaattttactttttggcccacctggtacggggaagacaaatgctggctaaggctgtggcaactgaggctggtgctaatttcataaacatatcgatgtcaagcatctcttcaaagtggcttggtgaaggagaaaaatttgtgaaagctgtgttttcactggcaagtaaaattgctccaagtgtaatttttgtggacgaggttgatggtgaatttgccagatgcatcaaataggagaaaaattcttagtgtaatactagccaaggaagatttggcagacgacgttgatctagaaactatagctaacctgacagaagggtactcaggcagtgatctcaagaatctgtgtgttactgctgcacaccgtcctattagggagattcttgaaaaggaaaagaaggaattgcaattgagtttcaagtggatttgctcacatgcaggagagagcttcagcagaagcagaaaatagatcattgcctccgtcacacactagcaatgatgtccgtgcattaagaacaagtgatttcatacatgcgcatgaacaggtgtgtgcaagtgttccctcggattccagtaacatgagcgagcttgtgcaatggaatgatctctatggagaaggcggatcaaggaaaaagacaacgctaagctacttcatgtagcttaggttataaatatattgggagaagtgccctggcacaaagcagcaatagttggaggcggtgcagttggaaaaaaaaagctatgctcatctgccagacatccatatcaaagagaattgatggttcaggtggagcggaatagaatggaatggaatagtatacatacacatggttgctgcctctgctctgggccatgcatcatgcatctggacaggacggctatcctggcttgcagttgccctatgcagttttgagtgcaatggtcaccatctgtgaagcacggataccacagagatcctggccccaaccactcttttcacaaatggagctgaggacctttggagttctaccaaaagtgatcttaaatctttgttctttgactttccgttttgtgaacggaaggccccactctgctagtatggattgttgatcctccgtttctctggtactgactgaactgctcatacaaaactcgttcaacaggcagaaatgctgcctggtggccttctagagtgcttctttgacgccgcagagagcacatcaaaaaaaatgtgtttgtttcgaacgatttgtgctgcattccattcacggcgatatcaggtgccgttgtttgtgtttggttccgcaatcaagggagtgaaagccattagcacatccaatcaaacaaatagcgatatctctttcactgtaccagttagcgctggtctcggatgctattaacattgctgttgtctgtctcggaaccaaacaccgcctaactcgtcggctgttaaatatttctgaactgaattactgcacttggttggggtttcatgcttatcaagttggcttatatagccaacaatactttgtgcagttctgcatcctctgcctgcttatgcgcgatctcattggctgagcggtacgaagataaaacggtagctaatccgaagcgatggcttctctttttctttctacggtattttgtctctatgaattacagttacagcagtcagaacagctgatttaaaaccgcagcgaaaaggctgattgccttgcccatttttgggtgggtggaggttaatacagatttctgtaatttttttactttaatattgtttgacatattgtgcaaggcaaatgatttcctaatgatttgttctacttgatattgtaatccatattgacctatatgctatgctcagttccttagagcatctccagtacttgatattgtaatccatattgacctaggggaaaaaaaggagaatttaacctgatgacactggtggactatgctatgctcagttccttggaacatctctagtagttttgtaaaaaaatctctctaaagacagatgtaaggagttgctacataataatagggagtaaaaatatctgtactctcatgtagtctttatttttagttaccaaatattataaattatgcctgctgaaactcctctccctcacgttatagaaagttttatgtttttccaatcaaac

SEQ ID NO: 40580 - DNA, 2304 bp, Zea Mays
attaaccgtacacgcggacgggcgcggggcgccgtaggcccctagctgcggtgatccgccgctctcgcagcaccgtcgcgctcgcctccgcccgcccgctcgtcgagtggacgcgcgctgcaccgcgactccagtcatggctagtgttaccgattctttcgtggcggatcttgatgagctattggagtataggacagagaagactatcctggagatgaaaacgcagagacagaaaacttggaagatgatgctaatgatagtgtccctgacctgaaatctcttgatcttgatagtgtctaaaaacatcagaaggcacaatggtataaagacataatgaagatgcacttgaaaggtgactccaatcaaggggccattctgcaagatcaagataccagcttgttgttgattgcaatgcttcatcagtagatattgacaatgagattactataatccacaatttcatacgtgacaagttcaagctaaaggaccctctactagaatcctgtgttcactatccgattgattatgcccgtgttgtctggaagattggaaatgacatggacttaacacttgatttgaaagttatttaccttctgcagacatgatcacaatggcagaaacgacaactggtggggagcctctttctgaagataatttagtaaatactattgaagcatccgacagagctcttaaccttgatgccgacaaagaagatgatacttgaatttttgaagggcagaatgggatacgttgcacgaaaccttgccgccattgttggcagtgctgttgcctcgaaaccgagtcgtgctgccgtgttggtggtttgggagcactggccaaaatgcccgcttgtaatgtgctgcactgctgcttctcggtgcaaaaaagacaaatctgtctggattctctactgcgtcagtgcagtctcgtattggttatctagaacaaactgaagtattatttgaaagcacacctccatctttaagatttcagtctagtagacttatagctgcaaagtcaacactagcaacaaggatcgattgtataaggctatcttcagcagtttactcattctcatctcttattttaacctacactctataaacagtgcattttacagtacaaaacagtgttttacatgttcatatgcacgatctgctggctatagcctaagagatgatccaactagaacggttgtgcagaacttgttagaagaaattagtaagaagattgaaaactggcaacaactaccacctgcaaggcttccaaagccaattccaattccagactttatgcctaaaaagaaacgaggggttgttggctccggaaaatgaaggaaagataatttatttgaaactttctcatgtccaaattgattaaaactattgtacttcatgtaaaagattgctatataatgcccattcacatgtctcatttgcattttgcaatttgttatattactcgagttccctggttgcattacctgtttggctgtttgtcttagttgcattttgcaacttactttgttatatcactctgagtgacccttcaatttcctcttacctttttgtatttgggaactcaattgtgaagatatgcacagaccaacacgatgaagcttgtgaatcggatgaagtttagcatgccagaggagagcacattgggtgatggcttagggaaaggttacggcttgcttgggcaggctggaagcgggaagctacgtgtgtcagctggtcaaagcaaactttctactaaaattgctaaaattttcaaagagaacagttctgagagtagtgtgtgaagattggggttgacatcaagcttagcattttcgccagttcaatttctttcattagaacttggccgattgccatttaaatgactgtttggcagctagcgcccataataattctacagaaaaccatacagtgccagtgatgaagggactaggtgcatagaagaattaagaagagcaactctcggatccgaactgctctttaatttgcttgctccaaagtcatcatcgacaacgctcgctgtactttcttggaagtcaccacgcagcttaagccacaaaaatataccatgtaatcttgacttgatgctccgtcgtatgattctagatgcagctttttgactgctacttttttctttcttgtttgcgcttatgatcgctacagtttccccttatctttggtcctcctatcagttttttacatacagctctactttcttctgtgcccctgtgtgtgatccatctttctccctctcccggaaaagacaaccaacaggagacgatgtggc

SEQ ID NO: 40581 - DNA, 1778 bp, Zea Mays
ccgggcccgcccgccgtcgtgcgcgcctcaactcaaaaaacacaaacggagacgaaaaccacaaccccagcaccaccacgcctaacgccgcctcaatccctcccgtttcaacgattctctccgcctccagctcgccccgccgccgagtgagatccacccgcactcggcccttccgcggcggcgatggcaactggcgccgggtgggcacctgggcggcccgtcgagaggcatggcgcgccccgcggaggcaacgcgcggtccaagtcggtcgtgccgggtccgcgccgcccctccccgtcccccgcgaggtcgcggccagccgccgaccacagcggcagcgctgatttgtgcagagtgagagttgctgtaaggctccggccgaagaattcagaggatttagctcatggtgctgactttgatagctgtgttgagttgcagcctgagtccaagaggctgaaactgaagaaaaataattggagctgtgagtcctacaaatttgatgaggtcttcagtgaaagtgcttcacagaaacgtgtgtatgaggcagttgcaaagcctgtggttgagagtgtattagaaggctataatgggacagtaatggcctatggtcaaacaggtactggcaaaacatacacagttggtcgacttgggaaagatgacccttctgaacgtggtataatggtcagagcattggagcatatcctctctagcctgtcttttgagacagactgtgtcgccatatcatatctacagctgtacttagaatctgtacatgatttactggctccagagaagactaatattccaatagtagaagatgcaaaaactggtgaagtttccttgccaggtgctgcgatagttgaagttaaagatcttgaacatgtttttcaacttttgcaaattggtgaggcaaatcgtcatgctgctaatactaagatgaacacggagtcatctcgtagtcatgcaattttaattatccatttgcaaagaaacacaagaacaaaagaagaaaatggtagctctttatatgatgttagacatgacacttttcctgatgatctgccacttgttctcaaaagtaaactcttgattgtcgaccttgctggatcagaacgaattgataaatcaggaagtgagggtcacatgatcgaagaagccaagttcatcaatctctcgttaacttccttaggaaaatgcattaatgcgctagcagaaaatagttctcatgtacccacaagagattcaaagcttacaaggatacttcgtgattcatttggagggactgctaggacttctcttgttgtgacaataggtccatctgctaggcattactcagaaacttcaagcacaatcatgtttgggcagagggcaatgaaagtagtgaacacaataaagctgaaggaagaggttgattatgaaattctttacaagaagatggagcgtgaggttgaccaactcacatccgagatggagagacaacagaaggttataagaagtgagaaaatgcagatggataaaaggttgaaagaatctgagaggtccttccatgatttaagaatgacatttaacatgcaaattgagggggcaagaatataacaagtgatttattaacccagaatctggagaaggaaaaccgtcatttggaatcttcagtcaaaagattgacgcaggacttagacaaagagagaggccaaaacaatttgttgtccaaacaagtcactgagcttgagaaattgctcgacgaaaacaagtttaacattgtactgttgctgaattga

SEQ ID NO: 40582 - DNA, 2727 bp, Zea Mays
tcctcgcaggcaggcagaggcagtacaggttgttgcaaaacttgcacgtacttgattcctcgcgcgcgcagcgccttgtcgccttgcgaggtttgttttggttgggtcatgagctcatccatccattcccttttccacccatgcatgcatgcatgcatgccactcccttgattagggtttataagccagcaggaggcgctgattgagtcctaatctgcgccactgtaacagcaatcccaaccatgattttcgcacccgctccaggactccggagcagtgctacttcttcatcgctataattaatataattcgtctgctccttcctgcctgaccggggtattaaatcctgtgtatgtacgtagtactaacaaacaaggacaaggcagtaaaaattctcgttacggaacattatctactccgacctcccttgcattttttttttggaattagtacccgggcgttcatcgcgacctgcatgcaactgtttcctcaacgagctagccattacatgcttttagtttttttataaaatatatatgcatgcatggcaaaactttttcctttttaaattttcgggagttaaagaggaggagggtcgaaaattcaaatccccccacccggggcatgcaaacccttcttctttctctccgtagctttgtcttgtagctgcagccatgcatttcccccctactttcatgcagcagcaactaatccatccggatatgctggcgctgcgggagccggagtctcgaacccaaatggcaaaaaaagctgcggggggaggttttaccgctgcctcttcattggaattccaatccttgggattaggatcctctgcggtaatcgccagcctcctgctgcgcttccgcttgcttccccgtccattaataggcctggttatccaaactgttttgccaagtatagcaacatttccctgccccccgtcctgccgactgaaccccgccactgataaaggaaaaaaaatcggttcgggcctttgaattagattttaccgtatgcgcccgcgcgcggtaactgcgcggcctgtctttttttaccaaacagaggcatcgacgacgacactgttgtcccccgacgacgaccccatctctccctggtgcgtgctacacgaccaaacttctctctccttaccttagggtggggtggttttgggggtctcccaggccatgataaagatcaccactggagtggtactgctgcccggccggtcaaagcatgggggccatcgcgtggtgtgtggcccaacccaaagttgtaccctgctgctgctgtaccgcctgcgttgttatcttaggccccgtttcaatctcacgggataaactttagcttcatgctaaactttagctatatgaattgaagtgctaaagtttagctttaattaccaccattagctctcatgtttagattataaatggctaaaagtagctagaaaaaagctgctaaagtttatctcgcgagattggaacacggccttatcttagagtatgaaactgcggttgtaaacatgtttagcgccaactgctatgtacgtgatcaggtgcggcgctacgtgtaccatgacgtcgtccgcctcggcgacctagagaagctcatcgactgctcctgtgtccagtgccaaggtgatcttcctgaagccgaggccgcagtccaggcctttcaagggctccggcaacatctgcctcacgtgcgacaggatcctccaggagcccttccacttctgctccctctcatgcaaggtggaccacgtgatgacgcagggaggggacctgtccaacatcctgcagcactacggcgccggcggtggcggtggcggtggcacggcggacccggaccgcctcgcgttcccgaggttcgagaacctccgcgtcgtcgacggctcggacctcgacgacgacgtccaggtcgtcaccccagactccaccctcgaggacccgaccaacaacgcgggcggcgggtccagcgacaacggtactgacgacgccagacggcaggtcgtcgtccatggcggcggcgaggcggccaagcggaagaaagggggcggcttcttgccccagatcgtgctgtcactcggcggcggcggcggcggcggcaacaggaggaagggtgccccccacaggtcccctctggcctaagcagcgctaccttcatgcatgcgtccccctgctgctgctcgttatatatcacaagtcacaacacacgtagcgcgctgtggttgcatgcagtgatgatggtgtgggtggtagctacagtattaattagtagtagcgtgttataatagtatcttaatggtgattagcctcgtagagagacgacgacaagctggtagctggtcgatcggttttgcttgggggggaaggtcttggtggccttgtgatccgtctagcagctcgctaggaccaaccatggccgccgcgccatctcatgagactttagagagagagagagagagagagggtcatgggggaggtagaggggggagagacggttgtaaaagcagttcccattgttacaggcaccaggtagtaactggtcagtggggcccacttctgcaggcggtggggcccatacgatcgaggtggctaccaattttgtatttgatgtaccaagggttactcgcggtctcgcgcatacaatttccacacctatatatgttatatataaatgataatatatctgaattctgtcccagactaaacaggttgtttt

SEQ ID NO: 40583 - DNA, 1187 bp, Zea Mays
catacatgcatgaggatgagcatcgcgagtcgcggcgctccacgtaacccttgtaccaccatccggtccgggtgtggccagccgcgtcgtactcggcggccgggagacgactttgacctgcttgcacggctggcccggggccatcgtcagttcgtcacaacctgacgtagtgcttgggcacagcgcactgaaaaaaaaaacattaccgtcgcgccgagataaatacgcgctgcggccggacaggctagctagaccggacgcgcacaaggcaataaataaaaagcccaacgctgggctccgctagctctcggtctctctggagtctggactcgcctccacggctccaccatgtatcccaaggcggcagacgaaggtgcgcagccgctggccacgggcatccccttcagcggcggcggcggctactaccaggcgggcggcgcgatggcggcggcgttcgcggtgcaggcgcaggcgcccgtcgccgcctggtccaccgggctctgcaactgcttcgacgactgccacaactgctgcgtgacgtgcgtgtgcccgtgcatcacgttcgggcagaccgcggagatcatcgaccggggctccacgtcctgcggcaccagcggggcgctgtacgcgctcgtcatgctgctcaccggctgtcagtgcgtctactcctgcttctaccgcgccaagatgcgcgcgcagtacggcctccaggatggcatgcgaacatggagaggcaggggcgcgccgccgccgccgtgccgccgcacatgcatcctgggatgacccgctgacgctctgccgctcgcctcacttctgctgaggaaatcaagtgatttggtattggtccgctcccagcaggcagtatcaactactgtaaccaatccatgatctgtatgcggtatcgggctgaactgatactttatggacttgttgcttcaacttagtccgtaaaacgctcaagaccacatgaaaatatggtccataaaacttgttcaaaaatagacattttgcactatattttaattctatgagataaaccatgattatgtttaatctctactactattaaaaacttaaggggtagtttgccttcccatggtttggcctctccctagttgtgacaggtgggctcccatgtctctatatgtgaatttcgtcgacctctcttacggcggttaccttctctc

SEQ ID NO: 40584 - DNA, 1835 bp, Zea Mays
gccatcgccatcgccgccgtcaactctgctacgctctccgcaggttgctgccgggagtctccggctacatcgcggcggagaagaagaaggttgttgacaagatgcaatcaggtggggccaagaacaatcggcgagctgagttgccaactattggccttgccgagcaagtgatagaggaacttgaaacactgaaagccaaagatgtagactggcagggaaaatgctctggcacagtatatattgctggaagtgagtctgagggtcattttcaattgataaacaaggcgtactctatgttttcacacaccaatccgctccatcaagatgtatttaagagcgtagcaaacatggaagctgaagtcgttgcaatgacagcggctttacttggcagcaaagaaaaatcatctggtggacaaatttgcggcaacatgacatcaggtggaactgaaagcatattattagcagtcaaaacatcacgtgactatatgcgatcaaagaaaggaattacaaggcctgaaatgataattgctgaatcagcacattctgcatatgacaaagctgctcaatacttcaatattaaagtgcggcgtgtacctgtgaacaaagagtttcttgcagatgtgaaaggattcaaacgatgcataaatggaaacaccataatgatggttggatctacaccaggatttccgcatggtttaattgatcctattgaggaacttggggaactggcttcgcgctatgacatttgcttgcatgttgatttatgccttggtggctttgtgctgccttttgctcataagcttgggtaccctattcctccctttgatttttctgtcaagggtgttacatccatctcatctgatgttcataagtacggattagcaccaaaaggcacaagcattgtcctgtacagaaatcatgaaattagaaagcatcagtttgttgctgttactgagtggaccggtggcctttacgtttctcccacaattgctggaagcaggccaggtggattgatagcgggagcttgggctgctatgatgtctctcggactgaacggctacttggacagtacaagccgtatcatggatgtttcaaagaaaatacaaagagggattggagagatcccagggttgtttgtgatagggaaaccggatatgaccgttgtggcgttcggctcagacgttgtcgacatatttgaggtgaacgacataatgtcatcaaaaggttggcatctcaatgctctgcagagacctaacagcttgcatatctgtgtgacccttcaacacacgactgtttacgaccaattcctgaaggatctgcaagactctgtcaacactgtgaaagcaaacccaggcccgattagcggcggaaaggctcctatctacggcgccgcagggaagatgccggacagaggcacggtgagggagctgctcgtggagttcatggacagctcttgctgaattcattatggcttgtgagaagaatttgttcttgtacatgaaacttctatttctttttcaactgaaaaggcagagctcctaccatttgtttaaaaaaaaaacattatggcttgtgaaaaacagtcgcagggctgtgatttgttggcctaggtatacaaagttgtcattaggaaaagcggggaaagtcattgaggcgatacaaccacatgtattcacgattacaagaagtttgtccgtatgattgtatatcaatatcacagcatgcatacgcaatgtgtctggttatatatttatctgttcctataaaacattggttgcatttcacgcgtactcacccccgtgaattctcggtaaaataaagatagaaatgactaa

SEQ ID NO: 40585 - DNA, 289 bp, Zea Mays
tacaaatcctaccccccttaaaaataatctcgtcctcgagatttataaggaacatgatacaacaaatttagcttgtagtctagattttagtttctagctagttcaaaaaatcaagagttcccttcttttttttttattagttagttatttaggagagcataggtatatatggttatagatactttattatgcaggataaacgatatcttttaaagcctatataggtttgggcaagaaagagtggggtaaagaaagactccatccaggattgtggatcttgactcatctt

SEQ ID NO: 40586 - DNA, 816 bp, Zea Mays
gacagtatatttaagaacaatcgtcgtaccggaagacgacagtgctagtctcctggttctcggaatgatttcaggcaactcctaccaaagcatgtacagaagctagtacagtgctgcagcctgtgtgccgtcacgccaagccaagccaggagacctcacatcgcatcgcatcgcatctaccagtactgtacagtttagtggagtaaaattcatcgagccggcggagtacaattctgaaccaaagtgcagtggcggacgcacgcatgcatgcatatgcatgagtgatgccagcgggcatcgggatcagcggacttgagagagtactcgcgtagtagcaggacggtggtagtacgggtaggaaacaaacgccactgaccgtagcagtgtaactttggatggatggatgaatatgatcccacggatccccatggcgagaagagagagaacgcatgggcgcccgcacaaccgccagcgccggcgcgtcgacccaggtcgaagcggacgcgagacgggacgggacgggacgggaggcaggtcggcgaaaagctacgtgcggatcggacaaggtcggttgagcagcgagcggaagcggcacggaaacggcaggtcccgggtggcgacagccgtgacgccgtgccctgccaccggcggacccgtcccgcgcgcgcagtccccgcgtcgtcgcctcccgatcccgggcacagcatttctgggccagcctgcctgtcgcttagcgtggagcgagcatagcacggcctggcgcgaccgacccaggaggccaacccgcatgaacacgccgctgcgcccccacccttg

SEQ ID NO: 40587 - DNA, 2762 bp, Zea Mays
gctggtgtgcggaacacactgtcggcatggccgccgccctccgcctgcaacgccagagtctcgccgccagcccctttctcttctccgcccatggcctccgcaccgcaagctcgaggtcatcctcactacgctcgatccgggtgacttctctacatgtccgcggcaattgggttatggcttctgctgttgggtacaacgtcaccatgagcgcaggcgtggacacctacaccaagtcttgggaggcccctactgccacgggtgtcagtttttatccagattataataatctgtacactgttggatgtggtgtctacgtctacgtgttcggtgataatatgacagatatcattggttcttgcacgagtatttgcacagataacagagagatcatggagagcgcaaacactggttctggtgcctgtgaagggttaggctgctgcagcattccaatacgtggcggccaaggcttcactctcaaactaggtcgcctcaatagtaccattccacagttcggtgaagcgctctccaatgtcaagattatcttttcgcaaaactatgacttcgttacagatgatgtttacgcaagttgggtggtgaatacaagcaatgttcacggcatgctacttaacattgcaatcacggaccaaccaagctgcgcgagtgcccagtcccaagagaacaaggatacctacgcatgcagtagtgaaagcatctgcgacgacgatctatcaccatcagggtttaacttaccggtaaccaaaaaaaaccggacctcaccgagaaacgcgtttctcggatttctcgatttttttcgtttttctcaaaataatttcggacaaaattcagagaaaaaaagttcaattcaatcataaaaatatagattatttgtagataatggctaaaagaagtagatggtagcgttttggacctcttctttgtagcctaaatacatagttgtaggtttggacgaactggattcaaaatcgatgaaaatttcggccgataaataaaaaaccggatcccaccgataaacgtgattttcggttttctcgaaaaattttcgccgagaatgttttccctgatcaccatcagtatctcaaggaggctacagttgcttctgccctggtcaaatagagggcaacccctatattgaagatggctgcatagcatattacaacccagaggcgcccaataggaactgtatgagattatgtggaaacataaacgttccatttccttttgggattgaagaaggctgttccgcaaatgataacctacgactcaactgcacaagtaacgacactcttattcttgatcgagggtacacacagtatcgtgtgaccaatttgtcacttgatgatgggcttctgatggttacaaacatgctgaatgacacaagctccaacaatatggagagggtagtcctcgttaactatgacggttacaaccagaacggcttctattcaaccgacttctattcaaccgatgaggacgttgtggatgatattgatgagtgccttattccaaataaatgcaatggaatatgccacaatgttgatggcggtttcaattgtacaagttgccctcatgggaaagagtatgatccaaaaaagaaaaaatgtgtcatgtcagctaagcagcgtattctaatttttgggattgtaattgggcttgtttgtggtcttggatccataagttttgcacttggtgcaattatactcaccggtaagtggaaaaaaggcatccaaaggagaattcgaagagagtacttcaagaaaaatcaaggtctactcttggagcaactaatatcgaatgaaaatgctacaaccaaaacaaagatattcactttggatgaactagaggaagcaaccaacaagtttgatgctactcgtgttctaggtcatggtgggcatggcactgtttacaaagggattttgtctgatcagcgtgtcgtggctataaaaaaatctaaaatagtggagcaaatagagatagatcagttcatcaatgaggttgctattttatctcaaatcattcaccgcaatgtggtgaagctttttggttgttgcctagaagatgaggtacccttgctagtctatgagttcatatcgaatggcactctgtatgacattcttcatgaaaatattgcaacaaaatgcttgttgtcatgggatgatcgaattaggattgcaacggaagcatcaggagcacttgcttatctacactcagctgctgcaataccaattttccatagagatgtgaagtcttctaatatactcttggacgacaacttcactgtaaaggtttcagattttggtgcttcaagatctttatcccttgatgaaacacatgtggtgacaattgtccaaggaacattcggttatttagatccagagtattattatactggttctctaactgagaagagtgacgtgtatagttttggagtgatacttgtggaacttttgacaagaaagaaaccaatttttatcaatgaattgggtgccaaacaaaacttatctcattacttcattgaaggatacaggaagggactctcgtggaaataatagattctcaagttgtggaagaggcagaccaagaagagattaatgatatctcctcacttatagaagcgtgcttaagatccaaaggagggcatagaccaagcatgaaagaagtagatatgagattgcaatgtctaagaacaaagaggctacagaataaaacacatcttttgattgaaaagggtggagaaatggaac

SEQ ID NO: 40588 - DNA, 2058 bp, Zea Mays
attaagtcgttcagggggcaaacatgatttttccccgaaaaaagagctaaaaaatcggcctcatcagcgcacatggtaataccgcaagggcaacatcgtaacttcactgcacaccctatcctccctcgccttcgcctagattcctatctccaccgcgttcgggttcctcccaacacctgcaccgcagaaccaaaccctagctgcgcttcctcctccagatcccggcgccccggccccatggccgccctcgtttctagctccagcttctccgcccgccgtccctccgctctctagctccggatcgcacgcgcacgtaaagacatggagcccgcagccgaggacgccgcagccgctgcgccggactcgtgggagacggccgacatagacgggcccatgagtcggctcatcctctccgcgcgacgcgtgtcctcttcgccggacttcgctgacgaccaggacccgccccagccgccgcccacactgcagccgcagggcgcgccttcggctccctcagatgcgcgcgaggatgtggtagcccaggtcgatcagttcctacgagaggccctcgagaagccaagggagaggctttctgtgctaagaatggagcaagaaattttgaagttcattcatgaccctagtcgtacagagtatgaattcaatggccttccaacttcgtatctgcgtcttgctgcacatcgcctggcgcagcattacttcctgcagtccattgccataccagacaacagtttgcctgatggaactggttcacgtatcatcctccgtaagacaacattcgactgccgactgcctgctgtccgccttgcagatattccagttaacctgccacaagaagacatctctgtggcgaaagtagctattaaacagaggcctcaaaagaatttacatggcatgaacagctcaagtgctcactcttctagagacaacctccaaaaaagcgtcgaagaaagaaaagaggaatacaacaaggcacgagcgcggatatttaacaacagcaatagcagtactgctactgatgagagatcagctgaggaagtgactttacccagtactcttcacaggtccacttccttggagttgaactcaagcaatagaataggtcaaggggctgaaattactcttgagaggagcttgactaccacttcagctagcagcaggtcaaatagaagcaagattgataaggagcctgcagtcaatagaaacaagcagaacaatagggttgcaattttcagagatcgtgagtcagagcgcaaggatcctgattatgacagaagctatgacagtgagcgggtgattggcaaggggaaagattgggatggtccagtatgtgaacaggcgacagggatgtggccttaagccccgttgcccatgggatgcttgccgggttgagctgaggtggcatgatgacgatgctggttcttgctttgcctagtgcaatcgtggcaccattcttggtcaggtttagaagcagaggcatctctgtgcagctgctgttcacggagctggtgtttttaagttctttgtagtcagtgttgtgttgtaaatcaatcagtgttagtttgagtgaacaaacctatttcttgtaccatgtgcatgacaagcaacgactatagttgctaaagatgatgacgaatcgtgtatgcctcacaggcctatttactacagaagtgtttggtgttggaacaatctgatggagtgatgatcttggatttgtgcgtttatgcgatggatgtgttttacctcaaccgtaaggttaacttcaatggagcaaggtgaggataagcactgcagtgacatctatacggctatggccctgtttggcacagctgctgcttgttgaaaaagcaacttatctggctatgaccctgtttggcacagctgctgcttgttgaaaaaataacttatctgataagctggaaacagcttctgcttgttggctgcttttagtgtattatgagaagcagctgaactgataagctgctgcagaagctagctgtttgacagaatttctgcttaaatttgtgaagaagctgaaaataa

SEQ ID NO: 40589 - DNA, 1316 bp, Zea Mays
cgaacgcgtccttaaccgaaatggcggaatcggcctcgcagagggatagccggaggcccagaagcgtccggaaagacagcgcacgaagcaatctttccctttccccaagatgggattcggcttcgttcgtctcgccgcccgcgccgcggtttctcgccggggcatgacgccagcaacctccgcccgccgcgcgctcgccccacccgccgtgccggcggagccccgctgcgggccccactggctcgtggccgcccgcggccacgtgggccactcgcaccaccgcggcggggaggacgagggcgagacatccgagaggatctttcgtctgggactcgccgctgacgtcgtactcaccgcggggaaggccgtcacaggctatctctccggcagcaccgccatcgccgccgatgccgcccactccctctcggacataggcatggaaagtttgaaagtttaggagctcttggaatttcaagtatgctgttggttacttcaggtgggattgcatggcatgcttttgaagttcttcagggagttatgtcttctgctcctgatataattggcaatacattgcatgcacaccatgaccatggtagcagtgggcatcatcatggaatagatttggaacatccagttcttgcattgagcatgacaactttagcaatatctatcaaagaagggctatactggataacaaaaagagctggggaaaaggaaggcagtggtctgatgaaagctaatgcatggcaccatcgtgcagatgctatttcatctgtcgttgccctagtaggggtaggtggttccattcttgggttgcctcttcttgatccactagctggacttgttgtctctggcatgattctgaaagctggtattaagactggatatgagaggggggtaagacagccctcgggcattatattaagaagaagctctcacgcaggtcgagaaaacccccgaacccctgccccacccatacacagcggcaccgtagcccatgtgagaagcgaccgggacgggacggcgggaccaggaccaggccttagacctgtgctttggcgtgggacagccggggagatttttgtaaccacaccctgaaattcgctcccacggggagtcgaacctaggacctgaggagtgctactcagaccgcctaaccaactcggctagaggctcttccacactgcaatctgattacatctgttgcttgtattaagtgattatttttctgtacttccagaaatattattgtcgatgtgtagctttctgaagccaatggctgaaaatattcatgaaataaaagatgacatatgctc

SEQ ID NO: 40590 - DNA, 1841 bp, Zea Mays
cccagatccaaattgtgcagggtaggcagctcgtctcagcgattaccagccgcagaccaaaatgcctttcagttcctgcaagcaaatagagcctgataagcaggaagagcagacacaagagcaccttgctgtgaacttgtaacaggtttgaacttcgaaggaaaagataattttggtgctgtgattgatttcactgtgaggagtgaaatgaggctaagtattgggcaagtccatcgaaatgttcttgcgctggcatcttctcggtcatgttttgttctgggagatcgtgtttcgttcaggatgctgtcccaaccacgggtagctggatttcatcagactgcttggcgtggtagtcaaattttggaagataacaggggaggaccattgactcttgctagcctagaagtgcaaagcagggttgaatatggaaaaaaggggaaaatggaacgaactggaggtccaaagccaagttcaagagcttcttccctctatgtgaaaccaaaggtttcttcaaatgtcaaaccagcaaagagtgccttgatgaagccagctgggataaagaagacactgaaggtagatgaggctctgttttcggccaagtcatttgaagaacttggtttgccacctttgcttgttgaccagttgaacaaggaaggtctgactgccccaactgaggtccaatccgcagcaattcctataatagcacaaaagcatgatgttgtgatccagtcatatactggctcagggaaaactcttgcttatcttcttccaattctttctgatataggccctctgaagaggactatggaacaagaccattctgagaaaagatcaggtatagaagcagtcatcgttgctccttcgagagaattaggaatgcagattgtgcgagaagtggagaagattttgggtcctaatgacaaaagactggtccagcaacttgttggcggagctaatcgttccaggcaggaagaagcattgaagaagaacaaaccaatcattgttgtcggaacacctggccgtatttctgaaatttctgcagcagaattttggagcatgttggaaggagacctggaggcacatctagggatattcttggcccacttgcgagacgatctgagcgtcagactatcctggtttctgcaacaataccattttcagttatacgagcagcaaggagttggggtcatgatccagttctcattagagctaaaagtgtagttccacttgattcaatcactgtgccaagacctgcgttatctcaaagtgacgctaaccccagttcgtcatcgcagtcagtgaaccaagctgctgttggcagcttgccgccatctttggaacactactattgtacggccaaggcgcagcacaaggttgacacattacggaggtgcatccatgctctggaagcacagacagtgattgcatttatgaacaacaccaagccactgaaggatgttgtgtttaagttggaggcccgtggtatcaaagccactgagctacatggagaccttggaaagcttgcaaggtcgacagttttgaaaaagttcaaggatggtgaattcagagttctcgttacgaatgagctgtctgccagaggactggacgtgccagaatgtgaccttgtggttaatctggaccttccaactgactccacacattatgctcacagagctggaagaactggacgtcttgggcggaaagggatcgtggtcacaatatgcgaagaaagcgagggatttgttgtaagaaaaatgcgcaagcagttagatgtggccatcaagccatgcgagttcactgaaggcgagcttgttgtccacaaggaggaagatgtggaataa

SEQ ID NO: 40591 - DNA, 2648 bp, Zea Mays
ctgaagtctgtacttttgaaacatgcaaagcaaatttctagttttgggggtgtttggttcgggagccaccaccggttcgtgtcgggaccggaaaccacgatcagccttgcacagttcccggcttccagccgccgccgccgcggggagcaccggccgttggttcttcgtctccgccccgcttgcgagaagagcgacgcgtttccccttcgaaccctcgtgtatcgtgggtcatggtgacgcctcgtggtagcggcgggagatggtgaagatagtgacgtacaacgtgaatgggctgcggccgcgggtggcgcagcacggctcgctccgctgcctcctcgacgccctcgatgccgacatcatctgcttccaggagaccaaattgtcaaggcaggacctatctgcggatgtaattatggctgatggatatgaggcttttgtttcatgcaaccgctcttcaaaaggccgtggagcatactctggtgttgcaacattttgccgagtaacatcatcattttccagccaggaggttgctttgccagtagcagctgaagaaggctttactggacttcaggactatgcaaaaaatagtcaaactgttggggatttcagtattgcaatgcctgttgaggaggagggtcttggtgaactcacaagagaggacctcttaagggtggacaatgaggggcggtgcatcatcactgatcatggacattttgttcttttcaacatatacggcccagctgttgacggagatgataaagagcgtgttcgttttaagctactattttacaagatactgcagaaaagatgggaacgtctattggctcttggaaagagagtttttgttgttggtgatttgaatattgctcctgcttctatagacaggtgtgacgcggcacctggcttcgagaagcaaatgttccgggaatggctgagatccatgctgagagaacatggaggtcccttttttgatgcttttagatcaaaacaccctgaaaggacaggagcatatacttgttttaatcaaaaaattggtgcagaagagtataattatggttctagaatagaccacattctcatttccggttcctgtctccatcgctgtgattctgtggaggaccatagcattttttgttgccatgtagaagaatgtgagataatgaatcatttcaaaagagggaattctgaaaatttatcaaagtggaaagggggaagaagcagtaagctagaaggatctgatcatattccagtttatattttactgaaagaaatacctgaacttccggtccataatatcccaccatcagctgcaagatatcttccagagatccgtggaaggcaacaaagtatagtatcgttccttgataaagggaaaatttatgagctgcaaaatgctgcaaatttgattcaatctgaagatacagtacttgatagttactgtagtgatggcttggaaaatacaattctagctaagaaaggactggcaactggtataactgagtttgcaaaaggtggtaaccttcctagtttgatgtgcaaggggacagatctgaatcaatggataaatgaaggtttaatgggcatctctcatgtcagccagaaaaaatcactgtctagtaccaagtttgtgccacaaaagaaaattaaacgcaacttatcatcccaaccaacaatcaagtcattttttcaaagaccagggtcaaagacagtaaatgctagtaccagtaccttagttactccagcagaaacattagaccttacaaatcaagcatgtgtttcaaatggtgatacactgcctgaaaacatgcagtgcacaacttcagctgcaaaagttcaggataacacagatgcatcgtcatgttcactttcaacagacaagtctaatgctgcagcattggagtggcagaggatacagaaaaagatgaagatgacactaccacgttgcaaagggcatagtgaaccatgcattccgaggtctgtgaagaagggccctaatataggccgtttgttctatgtctgtgctcgtgctcagggacctgcatcaaatccagaagccaattgtggccactttcagtgggcacctggaaagtctaaagagaagagctctaaagagaaacgtctgtgacttcatttttctcccaggacattttgcttccaatgagtctggtacatcaccttgtcccagcatactgatgacgtggcgatgtatttgtggagaggtaagctgatcaagggcctgtttgggaggtctggctctgactggctccttgctctagtaaccggaggggccacaaaacgtgtcttcaccagctccccattgttttgaaaaggacagaaaacaacttcatgaacattgcagccacagtgccatggataagctacagtagcgcatcagctggaacagccaagagctgtcccaaacgtggcctgaacaagcacttctctcaggcagggatcttctcagaagttatttatttttccgcctggtttagcgtattcaaattcttaatagacaagtcacaagtggccatcagtggagaaatcttacagtcctgtagtaatgttttatatgaaaactaatatggacattatagtattattgcccatatctccccagaaataaagtgccagtcgtgtaaaaaaaaata

SEQ ID NO: 40592 - DNA, 1870 bp, Zea Mays
cacggcactacggcagccagccagccagccagcttctgctggaacaagaacagtacaggtacagcctcctccctccacagcagcgacaccaatggcatcgtggtcgtggacctctgttcactgcagcagctaccccctaccggggccgtcggcacgcttcacgccttctctggtctccgcaacaacaccggcgctcaggcggacgagggcgagggggcagctgcagcgatgcctctgttcccagtacgccggcgaacgccagccgccgccgccgccaccgccacagccggagccggactcgccgcagcagctggagcgcctcttctccaacctcaaccagaccaccatgaagcacgagccagggagcgtcaccagcgccgtcttccttgtggctggcacaacggttggagcaggcatccttgcaatccctgcagtcacacaagaagctgggttcttggcctcggcagtcatatgcatcctctgctggtcatacatggtcgtcacggggctgttggttgctgaagtaaacgtcaataccatgtgtgagctaggatctggtggcgtctcactggtctcgatggctatgcgcactcttgggacatttggagtgagaacatcttgcttatcctatttatttatacattatgcacttcttgtcgcatacgtggcacgctcttcaaatatcataacaaactcattgggcattccaatatgggagagtgctaccctgttttctctagctttcggaggggtatgttactttggaagccagcgattgattggtgcagtaaatggagttctggtagtcggcatcctagcatccttcacttctcttgttgtagtggcaagtggaaacctacagtggagttctcttcttgaagcgaattttgctgctgctccacaaagtataccaataattgctctttcatttgtataccagaatgtggttcctgttctctgtacaaatttggagggagacctgtcaaaaaacagctattgtggcgggtactgccatacccctggctctgttcctagtatgggatggagtaatcttggggacacttccagaccttgcagggagcagcactgtttctgaccccttggaactacttagatcgagtaatgggatagtggggcctattgttgaggcgttctcatttctcgctatagccacatcatacattggatttgttctaggaatctcggacttccttgcagacttgcttaaactaccaagtggccagaacaaaccgctgccatacgtattgactctgtttcctccacttgttctgtcactgcttgacccggagatatttttcaaggcattggactttgcaggaacttatggagttctagtgctgtttggagtttttcctgccgctatgtcttggtcagagagatattcggatgagttggaagctccagtaccccctatagtccccggagggaaatttactctctcggctgtcatgggaggtgcattgcttgtgattgttccagagttaatcaaggatgtaatgcaactacaaggactacactgacaatcggtgcaagtgaaaggacatataacagttacagtaaaacggtccttgagatttttgttgcagtaacaagtacatgtagcaaaagcaaaggcaaaactcgaaagcaatcaagtgcagagattgcagtttcatcgagcatcgacgttggagttgaattgttttttatgagattagcacggggttcagaacttcggttaaatttctgcaaccgaaagaaaaatctaaaattccgtattacactaatatatgtgctttgttgtgaatatataactttgtaattatattttctattgtttatgtcacataaaattcttcttttcattaga

SEQ ID NO: 40593 - DNA, 1554 bp, Zea Mays
cccacgcgctccgcagtctcctctctcctcgggtggctagggttttgactcctagtcctaaaccagctcccacgccgccatgatgcagccgccgccgccacatcagcagcagcaatgggcaatggcgcccccgcccccgccgcagtactaccaggcggggcaccctccgccgccgcccccgcagttctaccaggcgggccctccgcctcccgctatgtggggccaaccgccaccgcaggcggcggcggcgccggcgccggccggcggcggggcgggggacgaggcgaggaccctctggatcggggacctgcagtactggatggatgagaactacctctatagctgcttctcccaggctggcgaggttatttccgtgaagataattcggaacaagcagactgggcaacctgagggttatggttttattgaattcagcaaccatgctgtagccgaacaagttctgcagaactataatggtcaaatgatgcccaatgttaatcaacctttcaaattgaattgggctaccagtggggctggtgagaaacgtggagacgatggttcagattatactatatttgttggggacttggcctcggatgttacagatttcattctacaagatacgttcaagagtcgttatccatcagttaagggtgcaaaagttgtctttgacagaactactggccgttcgaaaggctatggttttgtaaagtttgcagattcggatgaacagacacgggcaatgactgaaatgaatggacaatactgttctagcagggccatgcgccttggaccagcatccaacaagaagaatactggtggaccacaaccatcgagtgctatttaccagaacacccaaggaactgattctgatagcgatccgaacaatactactgtatttgttggcggccttgacccgagtgtgactgacgagcttctgaagcaaactttcagtccatatggagagcttctctatgtcaaaatacctgtaggaaagcgctgcggatttgtccaatattctaacagggcatcagctgaggaggccataagggtgctaaatggaagccagttgggaggtcagagcataaggctctcatggggccgtagccctgcaaacaagcagcctcagcaagagcagagccaatggagcggtggtggctattatgggtatccccaaggatacgatccatatggctatgctcggccccctcaagatcctgccatgtacgcctacgcagcatatccaggtaatgatgtcccgagagtgatcatttgcaagctggtcgcaaagtagctggggggttggggcgcagcaactttggtgcgttggcatgagaaattttgcggcggttgcttgtgttgtgttgtattgttccgacgcccttgtacacgtagcctgtgttgtaactgaatttttgccgaggccttatgagtgactagtgtttcaactgtaactggattgcacatttttgtcgcaaggaatgtactattattgtgtggctcgtgccgctttgaacgctgagtcccggtattaatttttcttcatgctcttat

SEQ ID NO: 40594 - DNA, 1146 bp, Zea Mays
agactcaaattcccgcaccatctcagtgggtcgaccttgcgtaagcagtgagatcacagcactcactatctgtaccacaattccacaaaaagaatattgtgctcaatctcgccggcccttgccgccagcaagttatagcttttaactttctcaggacacgggagcccttcttgccacaaaagttttagttccaactgggagagctagcatggcaagttcgcgctgctttgagaacccgccggtgctggagccggccagcggaggaggcgaggtggttgacgacttcggcgggcagaaggcctacgtcagcggctccgccgggtccaaggccgccgtcgtcctcatctccgacgccttcgggttcgaagcgccaaacctgaggaagatagccgacaaagttgcttcgctcggttacttcgttgtggtgcccgatttcctgcatggggatccatatgaccccagcaataatgcccatagcaatcctggaacgtggatacagtcgcacaatccgcaaacggcattcgaagaggcaaaaccggtaattgcggctataaaggagaagggtgtgtcgagcatcggagctgcaggttactgttggggcggtggttgtggaactggcgaaagttcacgagatccaggctgctgtgttggcacacccttctttactaactgtcgatgatatgaaagatgtcaagtgccccatttccatacttggagctgaaatcgacaggtcagccccgcctgaattgctaaagcagtttgagcaagttctttcagcgaaccccgaggtcgatcactttgtcaaggtttttcctggcgtagcgcatggatgggctgtgaggtacagcgacgacgacgcagcggctgtcacgagtgcggaggaagctttgcgcgacatgagccactggttcaacaagtacctgaactgaattatgtggcggcatatgtgcgtgcaataagctcctaatggtgaacattatgcagggcccccatgctatgcgtgtgttttaaaagtcctcttagtggtggtatttgtactggtctcttacgcaatttttataacatttatcgagaataaagtgatgacacggtgaatgggtatttttataacagtaaaagaggacattttcgacggccaaaaccgta

SEQ ID NO: 40595 - DNA, 2400 bp, Zea Mays
caccgaccaccgctgtggcatactaccttatatactatcgaagaaaaggggatcggaatcgaggagcttcctacactcctttagtcgaatcccaagaatgttctggatttgatatattgaccagtgtggctttctccattccagcctgtctgcggtacttaggaccaactttatcttggcctatcaccaaggctctgaggagatctacacatcctcatacaaaacaattccaacattgtgattccagcctgtctgcggtattgagaactttgtgccctgtccttgttgtctctcatgggcacctcaaaatgtttcttgtttatgaggatccttatcttgactaccatggctatatcagctgccatgaatgctacaatcattgggacactagtaactaagagggactacaagtttgctgagctcatgagactccctgacacatttcttatgttgtttgttctgctgtgctttgacttttcaatatatttgtcattcaagatattgtggtctgcaagaacttcagtagatcagaaaatatgttcacaggtcttgttggagagtggtcatggttacaaagttgggaacaaaaggaaccccctaacagatcatttacttggagagttagaggatactaccaaaacaacaggaattgggcgtgacccagttatggactctgaatgtgaaactaccttacaaaagcaagtcatggtcttcgatcagcaggatgaaacatttgacatcggagagacacccttgtccaagacatccaaggatcatttgggtcaaactgttggtaaagaaactccagtttctgaggccttacatgttgacactactgattcattgtcgttccatgattcacttttcctctctaagcatggatgtattgcaaggaatcccattcttccttatagacaagtttcaactcctaagttccattcagtcaagaatatgcttgacatgatagattatcttgctgttgaaggttttgctaatggagaagttgtaagggatgatgtttctgctgccttaagtcaacaagttgccgaattgatatccataagatgtaatgagataaacaacacagtgagattttgtaatgaatatgctagtagcatgaaatcgaaagttcaagtggtttttccttcacaccaccagtttgctgacattcttgatgacttctgggggaatttgtttgacctgcatggtaatttgacagaaaaaggaaatgccataaggttggaccttcttattgggctggatgttgaggagatcaaaagctgcccgtgctattttgatgtactacctgggggactatgtgatcctttgaagctaaatttaggtaacatggggctaccacctttgtttagaatcattaataacatgtgccctgaacatggaaattgcacattgcctgctgttgtggcattcagaaggcgcatcatggacacattcctcacggaggatcctagtctgttgaaggatgagaaggtatcatattttcctatggacaatgaagtacaatatgaagttcccatatacaaaaacttggacatggttgctcaatccattggcatgggaagtccattggaggagttgaacaaaatggaagttttggttcaaaaatgtccatcacagcaagtagctcatcaggcttccaagacaaatgtttatttctcctacaatgaattgaaagggctactcttgaattcttttcgggtttgtattctgaatatatcggaaattgagaaagctgattggctgtttcagaatagaggcgggtatgacgagaagctagtgggcttggctgctgaaatggtgatatttggagatatacatccaagcggggtattctgtccgaatgcagtagttggtcccgatgaatgcttgaagtgcttccttcggcaaagaaacctttgctttttgggaagtatagtagggttctcaatcgacttcagggcattctggatccagcattcttgaagcctgttcaacctgtctccatatgcccgtgcaccaagagcgtcccagtcgtgagactgcctgatggaagccaacgtatcagcgtggaagctgtgctggagatgctgatggaagttgaggccaccatctacggtgtgaggcacgctggagtctatggcagggagaagaaaagcctgaaatctgttctggaccgctataagctccggctctccgaggtggcatctcaggagtaggatttccttcatattagatcgacataataataataaaataaaaagctgaactctccagctatggtcacagatttctgtatgtctcttatctataagctatggtaataatgttatgctacatggtatgggcttgtgaaccgagactaataatttgacaattcctgaaattctccttgatgctcgt

SEQ ID NO: 40596 - DNA, 2824 bp, Zea Mays
ttacttgttatctagcagaatgcagtctgatttccataattcttgcagcatacatcttttagaatttgtctcaatcaccgcatctgaataagtggttgaatggtatgttccaaactcaacagatgttatcttcattgcagtaagcttttggcccaatggcaaccagaaagctctatcagacactataaggatcttttggtcgatttgggtattagatctaaggattgtctcgatgacagataatgacggatgagactcctgtaattgcttctcagctttcagtcgagcttcaccaatgcagcgttgaagatgtcttaacctctcaggaataatttcaaaggttccagtcaaattgcctacatacagataggcggcatgcagaccaaagaaacataggtaatatgcaacctgttttaatgcatacagtacaataagctccatcttatcttcatatttacagcagctatacaggccttctgaaccttcccctgttatcagttcaagaagcttttgctttgaaatgcttaaaccttgcccatcggagaaagaatgccttaagtatgcactttcttgcaaagcagatgtataacttacatggatgtcattgataaggccttggataatatctgagaggttgacaggatgaatttctatgagtttgttaactttaggtctggttgaaattgaagctgcttgttttgaagaggggatgtctaaggtagaaatatcctcagcttttctcactttattagtgccatttctcacattcaagtagaagcttagcccattggactgtgacgttgactcaaacaaggatgattccttttctgaactcaatttatccatgtgggtatgacctctaacaacattttctagcatgttcttttgagttgcttccaaattagctgatggatcatgagatataggcccaggaacataaacctcattctgcttgtcctcatgttgaggctttgcacttctcggaaaatcctccagaaaaccaatgtcaagcgctggcatctgctggccacttatttgtagttcagaatttaaactgcaaggctttacctcctcaaccatgctctcataagtagagcaactctcccggttgcatggcccttctgataaaagatgccaatccaaataaatcccatctgctgcagatagaggaagtggttttagggagcaaagtacttcttctatagggggaagcatagatcgcattgctttatcatcatgtaaaataggtgtaggtagtgatttgaatgtatcatcaactagagccaattcagagctaaccactgattcatagaaatgttttgcttgatcaaagtcgtctttgaatatttcctcagatgtattcatctcagctttctctgactgaataagaacaagtgacttaaaggcatccttggaaggaaagtcgatgatctttacttcctcaaagagaatgaagcaaggaaaatgtgaacaggtcccatcaggtttgagagggtataatgctgactttttatccagtaaaataccatcattgatccttacaaaatccattactgctacatcatttgctgtaattggtttatctgcttgatactccacaagtggggcatctttgcaaaccaaggcaaaaatgtcaatatcacatggtctcaagaactcatttgagccaaatgatggaagacagacttgtgctccatcaaataagtgttcaataatactatgaaaaaaattggatatcattgtttttgctgggcactcatcaagctcccaagaattcatactaacctccaactggggtattatttgaccattctctagtcctatgatttccatgcagtagctatctttagcataaggacagttatcatcatcatcatgttttacagggacttctacttgataaattgactccgcaaattcagctgcatatggtattcttgtctcagtatcaatatcaatgaaatcctgaaataaagcagaaggatgttcgaggacatgagcacaccgagaaacaataagaatgtgatgctttcatttcatacttgataaatcacaagggaatcaaacaaatgagcatgttaatcataaggtgtttgctcctgaaaccatgggacaagaaaacactatgttattgttatgaccggcagcccaacagccctaataaaaccagctggtttgtttagatggataagcataaattagtttgtttagatgggtatcaattagtttgtttagatggataagtattagctactagctagtttgtttaaatagataagtattagtttggaactcctagatagagttggttaatttgttaggggctgctatcacagtctatatattgtacccctttggttaaagaggcaagcaggcaattatcttgcccgtgcttctcccatcccgttactgttcatcgcgtgaacagtaccgcgccttctccaccagcatctggacggctcccaagcgtccaggtcctggccctagatcccaaacctaccactcgtacgacattcgtaaccctaatcccaacaatctggtatcggtgatgccaggttccgaagaagtcgccaccgggatcaactccacccaccatctccgctgtcaacacatttgccgcaatctgtcgcagcaacatccgatgttgtctcctaggctgatttcatggctttccaggagatggtgctgcaccagtttgccgccctcaccgctgccatcgaccgcatgtccagtaggtcgccaacaccaccgccgcccccagcgcccaccacccctagcactacttctttcccctatggaatgccaggctatggtagcatatctg

SEQ ID NO: 40597 - DNA, 1941 bp, Zea Mays
ctgactggcgttcgtgttccgtgttcgactcgacgcgctcgtgcgtggcatacagacgaacacctcacaaggacaaccagtcccctcactcaggaagcttcccggggaaagaatgtgcgggtgtgcggccctcgtcgccggagcccggccgccacggcccgtcctcccccgcaggctccgtcgccgtcgagggagctccgtccgagcagaggtctcaccaggcggtgagtcccagccgaagaaggtcaccgtcgcaggcgccggctgggccggctttgccgccgcgcaccacctcattaaacaggggtacgatgtcacgcttcttgctgcggagagtggcccaacggaggaggttggcctcagaggattctggcaaccgtatcgcaacatcttcgctttagtcgacgagctggggatctcgcctttcacgggctggaataaagcagcatactattctacggagggccttgctgtcgaatttcccatatttcataaccagccccgattaccagctccctttggagtctttgcatatccagaattccctaatcttcctttgagtgataggctgacatcaattcctgtcatagctgcagtcattgacttcgacaacactgacactgcttggaggaaatatgatgcaagaaaattctgacttcttgctgtgccgtggtgaagtagaagaaaaaattttctctccttggctgcaatcattggagcttaaaggcttaaaatttgtagaaaataaagttccaacaagtttgactacagatgtggatagcggatgcatctcttctattgtttgtggtgatgatgtgtacgaggcagatgcatttgttttagccatgggactctcttctctacaatccatcgtcaaaaacaggaatcttcttcacctatctacagtcgatgtgatctctgtaaaattatggtttgataaaaagatcataattccaaaggttgccaatgtgtgttctggttttgatgattcatctggctgggcattctttgaccttacctcagtatatgatgattattgtgaagaatcaataaccattgtggaggctgaatttgtatgttcatgtcacctttatcagtttgaaaatatacagcattttcatcaggatgtacttactctttcaacttatttctcagtataatgctagccatttggtactcttaagtgatgatgatattgtctatgaagcttcatcacatcttatcaaatgcatacaagattttgagggcgcaattgtgataagatattcaatcagaagatctcctaattctgtaatcaactttcttccaggctcgtataagtacacactgagaggatcaacttcctttccaaatttgtttattgctggtgattggattgtcaaccgacatgggtccttttctaaagaaaaagcatatgtgactggacttgaagctggtaatagggtagtagactattttgacattggggactttgccaaaataattgcagttgaaggagatgagccccatatagagacattgcgaagtctcaatagaagagccaatgaactgaagtcacaaattccattctcagaattctttctccaataattttgttgggatttttctgtgtttgttgagcattgccattgttgtaggcattgttattaagtcggtaaggtaaagcgtggcgacctagccctttgagtcgactagacgcttaaggcgcgcagcgaggtgtcgccatacagatgtcctaacctacaggagagcaatagaaacataccttgttgatgccaattttggagctccagtttcgcttgttccatgtagcgtgtatcccccttacagattgcaacatgaacatgttgtgaattataattaatgtaagaaacaatttataatgcaatgattgaatgaatcatctgtgtaaaatatagattggcttgaaggggatttaac

SEQ ID NO: 40598 - DNA, 4885 bp, Zea Mays
tcctaaagctcaccggatacgtattcctcagttacgccttcgtcgcacgttcacgcctccaccgattcaaacgccggaacacccacgcggtcggcggaggcctccccgtcgtttgcccatgcccttgcgccgccatgccggccgcgccatcgccgccgcgcccggcggtttcctccacctctccctgctcgcctccctccgccaccgcccctcgcttcaggcgcacgcgcagctcctgctcttgggcctcccgctgccccccgccgcggcctcacacctcctccgcccgcacctccgcgccggccatccgcttgcctcgctccgcctcttcctccgcgtgctccgcgaccaccaccccgccacaaccggcgccaccgcttcccaggaggagggggctgttcccgactcccgctccctctccgcggttctcgcagcctgctcccgcctcgagtccccttcccccggactctgcatccacgccttcctcctaaagtcgggattcgcctccgacgtcttcgccgccaattcgctcctccatttctatgccgcgttcggtctccacgccctcgcgtgcaagctgttcgacgaaatgccgaccagggacaccgtgtcgttcaacaccctgatcggttcgtacgtgcagtcgggacgcgttgaacgcgcgttggtggtgttcaggaacatggtggagggagggttccggctggacgagtggaccatcagagcgttgctgggtgcctgtgctgggctaggcgatttcatggtggccaaagctgcgcatgggtttgccagcaggacattgaggcatagattgctcgactctggagaggtggtgattgggttagtggacatgtatgtcaagtgtggtgcagtgcacctcgccaggaaaacatttgatttgtttggggagaaggtgaaggacgtgagagtttggagtgtgatggtatcagggtatgctagggttggggagatcggcatggctcggaagttgtttgatgagatgcccaataaggacttggttgcgtggacagttttggtcggtggatatgtgcaggcaggtagatacaaggaggcacttgggttgttcgaggagatggaagcggcaggacttgaggctgatgagatgacggtcgtcaccgtgctttcagcttgtgcccagaatgatgctattagccttgtaaagaggctccattatcgtatgaaccagaatggattggttagcagaaatgcaagagttgccaccagcttcgtgcacatatatgcaaaacatgggtgcatacagacagctatggatgtgtttcgtggaatcactgatgaattcaagactgtggagttgttcaatgctatgatacatggactcgctcaccatggttatggtgagaaagctatctcactttttgataaaatggaaagcctggggctccaacctgatgacatcacatttgtgggaatcctgtgcgcatgcagtcgcagtaacttggtcgaacaagggtgtaagatgttctcatcaatgctggacaagtacggtgtcaaaccagatgtcaagcatcacgcttgcatggctgatcttcttggaagagctggacgtcttgatgatgcttacaactttatccagaatatgcctttcaaagcaaatcttgtgatatggtcatctcttctgacagcttgcaagatccatggaaataacaagattaggaagcttgtagagaggcaaattctcggattagatgctacctacaagcctgaaaagctgaccttatctggcttattttctgatgagaagaggaaagagctatctgcaagggcgagaaaagctataaagcacaaatctgagcacagatgtacctagtagaactcacatcgaatgatactgtttatcagattgtaattactgatacttccgagctccaccctcagggaaaggtgattgattggatgcctgaagatgtccaaggcattggatttttttcaggatgcattgggagaaggctgcttggaatatcgagagacagctgctctagcattttccttgataaactcacttcctgaaaccccaacagaaggtgtcaccaaccattgtacatatggtacttgccattcatcactctgagtattcgctgaaaatataaagtaggggtgttagttccaatgttaggctaagttttgaaaggaaacatataggtcaatggtgatgcattttcaaatcttgtgtacaagctctggtagtcagcttctgatatggtaggttaatctctgttttcctggcgcagctgctaacctagatttgtcttgaattcactgcaaggattacaattaatcaggcacttgtgcaactgatcttatgacttctgggaatgagatggcagaatagagaaagactggtgaaagagctgtaagctctgagatgctcttttagggcccgtttggttggagagccaggggagtggagcggttccattccagatttagagggtggagcagctgcattccagattctgagagcggagtagaatcgttccattttctgtttggacccaccgcaaagagatagggagaagttgaacggtaggattccaccgttttttggagcgagcttgttccaaatccggtgggaatattcctgatttagagccgttccaccctgaccgctccgtttgctctccaaccaaaagcagaatggatcggctccatcccatctcactcaaccaaatggaccttagaagagcagtagatgaatctaagcggcaaatgtggatggaaatagttcagctagcttcaaccattattttttcagttgaagaggatactatgaatctatgatttggcaattcacttctaatggaatgtacttgtcattctttatataggattattaacttcaactttcagcggtatatataattccagtttacagaatgtagcttgtaagggtatggcgattttgctacagaagataacagggctagcgcaaaaatttggggggaaatcatctattgaatggagagtagacttttgttggaagttggaacaaaagttgctagatttgaggcaggtggccagcataccggaaagaatcagccggtggttctctcttggagtttgtgggtggactgctctactctgtagaagaagcgtctgggcatggaagcaatcttttctttggaacggaacctcttggagtggagttatgtggtgaaaagccatggatcagtgaagaagaggacctggagaaggcaatgtcgtcgggcctttggatctagccccgaggatgatggcttggttggtcaggttcaggtgtttatttcgtgcgtggagctgtgcggttacgtacaggatgtcagttgtcaggggaggtggtgtggtggccaaccactggaaagctaacttttgctctgagtataaaatatggtggcatccttcctggctatatactgtcttgaatgaagtaccaaactagagttggagagcaacctcaaaggcaggggcataagtgatcatgggaaagggacaatgcaaggctgctggtggctcaaagacgtacgttctgaagctggacatgcactgccaatgcaatggctgtgtcaagaagatgaaggacgcggtgaaggagatgatgagcctctcgcaaggggtggagagagctgatgtttcagcagaggcagaggcgggagaggtgagggtggaagtgacgggcggaattgacatggacccagcgaagctctgctgcctgctgcaagaggcgacgaagaagaagcgtgtgaggatagccgaagaagcgagcgtcccatcgcctgggcggcaaaccactctgtctggtcagggtcaggcagaggctgctggtggctggcggcgagatggcgcgggcaccttccctacaaccgtcccgatcccgagcgccccgccggcgccggcgccagaggaggaggcggaggcatggagcgagacgacggcgccttcggagcgttgccggtaccgctgggcggcgcctgtcagcacgttcggtgtgtgggctgcatcggacatcaccgggacgttggccatgttgtaccaccaccacctatgaaccccgcctcatgctgtgtataaaacgaagcagtccgcgccctctctctctccctctctctctctccctccctctctccctctctctctctctgtcgagttagatgggtgtttgatattttggacgcgtttgggcccggggttaaatttagtcctaggttttatatgccaaatatgagggttttaacatttactaatcataaattgataaggcttacttacgggtacctaaaagcttagggtgtgtttggatggagggacgaggaaggatgaagagagataggatgggatcattttaatttgacccgcgtttggtttggaggtccacagtcagggtcaaaaaatattgttcaaaaatggtggatgggactatccctcaaaaaataagggacggggtcaacccagggttgatcccgtctcatccctcgttgacaccgaaccaaacactaccttaaattatcatcacgcaatgcagtcctgagatcccaaacgcgtcgtctataggttgggacaacagcaacgcggcaccgtactagtgcaaagtggggcgaagccgtgaagtgacgcggaagtcgggtgtgtagcagcgcgtcaaccacgcaagtcaaggagggaatcaccacaaaaaaatatagaatagtttcagtttgtatccaccttgattggttatccgcacccttttatcttagatcatcgtatgtattgactttatttgagattatgtttggttgattgtatgtgtgagtcatagtctacatggtgcatacaaaataagtcattttgatattattaacatgcatccatctatatgatgcttaaaatt

SEQ ID NO: 40599 - DNA, 1921 bp, Zea Mays
cggcaagacaaggcttcctcgcacactggcagttgacttgtctccgctcgtcccacctcatcctcctccctgatttttgccacgagctcgtcctagctaggtatgtatttcctctgaggatgatctcgtccacgcatcgtatgtctaggatatctcgcttggttattgtcccgcctccaaatcaaacgcatcctaagtgacacaggcatagagaagctttgctagcgaagtccagtagtgcaactcaccccttcctggtcctgctgctccgccctctccacctagctaccactcccttagagcgccactgccaagccatggcgggaggaggggcggcctaccagagctcgtcggcgtcgccggactggctgaacaagggcgacaatgcgtggcagatgacgtccgcgacgctggtgggcctgcagagcatgcccgggctggtgatcctgtacggcagcatcgtgaagaagaagtgggccatcaactcggcgttcatggcgctgtacgccttcgccgccgtctggctctgctgggtggtgtgggcctacaacatgtcgttcggcgaccggctgctgcccttctggggcaaggcgaggccggcgctcgggcagcgcttcctggtggcgcagtcccagctcacggccaccgccgtgcggtaccgcgacgggtcgctcgaggcggagatgctccaccccttctacccggccgccaccatggtgtacttccagtgcgtgttcgccagcatcaccgtcatcatcctcgccggctcgctgctgggccgcatggacatcaaggcctggatggccttcgtcccgctctggatcaccttctcctacaccgtctccgccttctcgctctggggcggcggcttcctcttccagtggggcgtcatcgactactccggcggctacgtcatccacctctcctcgggaatcgccggcctcaccgccgcttactgggtagggccaaggtcggcgtcggacagggagcggttccctcccaacaacatactgctggtgctggcgggggcaggcctgctgtggctcggatggactggcttcaacggcggcgacccgtactcggccaacatcgactcgtccatggcggtgctcaacacgcacatctgcgcctccaccagcctcctcatgtggaccctccttgacgtcttcttcttcgggaagccgtcggtgatcggtgctgtgcagggcatgatcaccggccttgtgtgcatcacgcctggcgcagaggatcgacgacaccctcggcgtattccacacccatgcggtcgctgggctcctcggcggcgccactactggactctttgctgagcctgtcctctgcaacctcttcctcgccatcccggactccagaggtgcattttatggtggtgatggtggatcacagtttgggaagcagatcgctggcgcactcttcgtcattggctggaacattgttatcacttccataatctgtgttcttattggcctagtcctgcccctccgaattcctgatgcacagctgcttatcggggatgatgctgtacatggtgaggaggcgtatgctatatgggcagaaggcgagctcaacgatgtaacccgccaagatgaaagcaggcatggcagcgtcgctgtaggagtcacacagaatgtttgagcatagttcttgtaaggttgaaagaaagaaaaatacaagtgcatttgtttgctaattgctattaactgatggcacaattgtatgcaacaaaacacctgttcatggaggaatgtagagtgtcaggatttgatttattttttttttggaatctggaatcttttctgctttcatgattgtctatgctgtatatttgaagctgtagaaacaagatattctttggcacaaattgttgcagtagttcatgtcataactcatggaagatcaaaac

SEQ ID NO: 40600 - DNA, 2657 bp, Zea Mays
tgcggtcctggcatcttcagtatcatgtatgtatagtgcggaatggccatgaatttggccagccccggcctcccgatgatggcgttgtacccgcagtcgaagttcgccacctcgaacctcaggaactcggttctgtagttctccggagtcccgaaggtgaccggcatgtagatgtggcccagcgggtattccccttccgtcggcacgatgccgaagaaaggagtgtctgactcgtggagctctttgaggtgaactcccaagccttggagcgtacgggggaaggtgacgttgatgctgctccccccgtccactagcaccttctttacccggctctctcggatcaccggatcgacgaggagcgggtatctgcctggatggtcgaagttgagccattgatcctcccgagtgaaagtgatcgggtgctccgaccaccggtacggggcgggagggccggtggtcgccaccagtatctggcggtcgttgagcttttgttgtcttttgttctcctgcgacccatgtccaccgaagatgacgttgacctccctgtcaacgcgtgggaaagctcctcctcccccctcctcctgctgatggggctgtcgtggttcatctggtccccccctcggcggaggaggcggtagaggttggaagggtcggccgtgcccgacggagtgcttgaagtcccggcagttacggagagtatggcgcatgtccttgtggtacgggcactgggcgtcgaggatgtcgtccagcgtgcgctcgcctccacgaggccctcctcgggcgcgagaggcgggtggtccggcggcgtgtacttcttcacgaggcctcttctcccagcgtttgtcgggtggctggttcgcgtcgcgtcgtggtgctgccggtgcaggctttgctcctccgatgagatcctgggcccgctcgtcggcggtgatgtagaggtcggcttcccggaacagctcctcggaggtagtcggcgccttttgtagtatggctcggacgaaagccgagtcattggatcctctgtagaagtcctcgatcacggccgcctccgtgacctcggggatgcggtttctcatggtctggaaccttttgaggtatgaccggagagtctcgtcccctcggcgcttgatggatttgaggtcccatggttgcgctggcttgtcggagagggactggaagttggcgatgaagcgtcgactgaagtctccccagtcgtcgatgcagtgtcggggtagatgtcgtagccactgcagcgcatcttgcccaaggacgatgggcagatacgcagtcatgacgtcttcggatgctccggcagcccgagcagcggtggtgtagacggctaaccaaccccctggatcttgcttaggttcatatttgtcgacattggataccttgaagttgggaggccattggatggccctaaggcgcggagtaagagcggatactccgcacgtgtcctcctgtcgtcggggatgtcgtctgtcccggggaggggagtggtggtggtgattcctcgaccgtccccgggtggtaccgccagttgaagctgttgccgactcagtcctggtggcctggctttgagtcgggaaggcatgatctcggtcatactcctcccgacggcgaatttcgttttcatgccgtcgttcgcgcgaagcattgatagagcttcgcgcgtctcggcgactgttgatggcgtgtcgcagatcgttcggcgggtgagcgagcgacagaagatggttggccgcctgagtgaacaggcgtcggtatccctcggcgtcgggagtccgaggaagtccgtcagctatccgagctagtacgcctccgacttcgctcggcgtgttcatagctcgggcaaagtcggggttcaggttgcgcccgaaaagcggattctcccggcgttgccttgcatcttgctcggcttgctcctgaatccgtcggcggtcacgtcgtcgggagttccttcgttccctgaagacgcgttcttccggagtttctcctacctccgagacctcgtctcgcgagacaggctgctccggatcccgttccccggcctcgtgatgtcgtcgaacgttcctgcgtcggttcctccgtcggcgggattctcgttgaggtggttcttctccaggcgtggtcggttcgtcgtcagagacggcgggcgactccactctcccgatgaagaggacgtcggggtagaatggtactgctgtcgtggcgactttctttccgttctcctttgaggccggaggaacgggaagaacgacttgcctttccctggtctccttctttctcgcgacccgtgtccattctttcgtcggggaagtagacagcggagtcttccgggtcagcgagcttctagctccagccttcccggagacgatctttttccgaagagccggaggtagcgtctttccagcattttcggagtttgttggaggaaacttctcttctggcagatctgcgatgcggtgtagaattcccccttcatccgctacagatgagattgtcccgaagcagaatacagatccgggacgcacggtgatcttgctgtggaagatgacggccattgagctagcttggatcgtcgacacacacccctacctggcgcgccagctgtcagtgttttgggtccgaccgcacacccggggttgcccctcaag

SEQ ID NO: 40601 - DNA, 1132 bp, Zea Mays
tcgcactgcagttttgacaaaagaatatggaaactgagagtagcagaccccactcggcccatgggatgccaatctggcaaccatcacaaacaacacattcctcctatataaagcacaaaccatatgcctctctcatcgcaactcatactagaacatacagcatttcacaagacacaacataagcaatagccatgggagctgtgaagcatacattgaaaatgctttcatggctcctactcttcgcacaattggctgcggccaccacctccaagtgcacaaatgccacaaatgggactgagactgacagcctgggtgcaatgaaactgaagctgattgccattgcatccatcctcacagctggagcagctggtgtgctagtgccagtacttggccgctccatggccgcgctacatcctgatggtgacatttttttcgctgtcaaggcatttgcagccggtgtcatcctggccacgggcatggtccacattctgccagcagcatttgatgggctgacatccccatgcctctacaaaggtggcagtggtgggaacattttcccctttgcaggactcattgcaatgtctgctgcaatggccactatggtgatagactcactagctgctgggtactaccgccggtctcacttcaagaaggcacggccaatcgacatcctagagatccatgaacaaccaggagatgaggaaaggtctgggcatgcacaacatgtgcatgtgcacacccatgcaacacatgggcattcacacggagaggtggatgtcatcagttcaccagaggaggcttcaatagctgacacgatccggcacagggtggtatctcaggtccttgagctcggaattttggtgcattcagtgataattggggtgtccttaggtgcatctgtgaggtcatcgaccataaggcctcttgttggtgcccttagcttccatcaattctttgaaggcattggcctgggtggttgcattgtgcaggatgggggataaaaaaagagaaagaaggaaaaaaggagatgtacaaagttgaaatggaacattcttggacagcgacatgacatgttacaagaataaactgttgcaaatcaaattttatagtaataacaaaaagcacatatatc

SEQ ID NO: 40602 - DNA, 921 bp, Zea Mays
gcccaaacctccatggccgacgtcgccctgctcaggtccaaccagctccccttcctgttgttgtgtccagccgatgcccctccctccatcttcctctctgcagcaaccctaccatggttgtgccccttcttccatggtgagctcgccccagccccaatgttggatgtgtcgtcgccctcacatccagctcctccatccccctggttcccgcccagctccgaccaggtgaggtcatacatgccatctagggtgaaacaaattttgccttccttttgcaaagacatgttccgtatactagattctttgaactttaatagtcttattgaagatggatctaccatgaagctcaagattgcaaagagatgtctcattatattttgcgcacttgttacacgtcaccggaaacatacagataaccagatgccacatattgtcagctgtgcaatcaaaatatcaaaaaacatccatttaagtaaactcgactctctccccaatcggattgtttcattggcatttgatgtgatttctcgagttttggaaacaggacaggatatagaagaatgggaggaggatactgatgagtatatgcaaaagaatcttccttctgaacttgatgacatttctggatggactgaggatttgttcactgccagaaaaagtgcaatcaatttacttggtgttatagcgctatcaaagggtccaccagttgcatctgcagcatcaaagcgtaagaaaggtgataaaaataaagggaaatctgaaatgagctcaattggggagttattggtcatcccattcctgtcaaagtttcctataccttctcatggtgaggatgcatcatcagtagcagtgcagaattatttcggtgttttgatggcatatggaggcctccaagatgaaccggattctcccattatattc

SEQ ID NO: 40603 - DNA, 303 bp, Zea Mays
cgtccacgtggtggcgcgagcccactgcggagctcctacttcggtgagaaattcccgtctccccgaaacctcgtgcacccggcttcttcccccgagcgtgactcacgcactcgtccaaacacccgggaccaggttactggagtagagcggctatgatgtcgtggttcgacggcggcggcggactcccgtttcccctctccgcccgcgacggtacgaggattggtctcagcgattctcacacgtggatagtcgggagggtagggtgcacacacgagccttataccgggtcgagggaggggtgcc

SEQ ID NO: 40604 - DNA, 1491 bp, Zea Mays
ggaattccgtagacctcgccgtcggccaccgcccgtgcaatttggagttgagggaagttcaccggaaggcagcacgatggttcagaagaagaagaaagcggccgcggcgcccaaactccgcaagcttccgaagcgcgacgcggataagaagctcgggaagaagggtgacatggcagagttcagggcgcagctggactcccttgggctgaagatagtccaagtcacggcagatgggaactgcttcttcagcttgagggcgatgaggaagagcacatgaagtaccgagatatggttgtggattacattgtgaaacaccgtgaggagtttgagccatttatcgaggatgaagttccgtttgaagaatattgcaactctatgctaaaggatgggacttgggctggccacatggagctgcaagccgcttctctgctgacaagaagaaatatatgcattcacatgcttaattcaccacgttggtacataaacaacttttctggccgtgaagctactaacatggttcacttgtcttatcatcatggtgagcattacaacagtgtcaggctgagagaagatccatgtcaaggtcctgcaatgccagttgtcatcaagttacagactgattccaatatatccaacacaaacaataacgctcaaacaaaagcaaaggaggtgaagaaatcttcacacaggtcaacctatgacgacacatcagttaaattggtcatggctggaactggatgttctgacattgccatagctgagcatgttctcggagaaatggatggtgatgttgatgctgctattgagtacctgatagcggagcgacttgcagtcagtactgatgatgcggaggtagacctttatataaaccatgcatttaacggagatgaacctaccaagaggcaagaggataataacatgatcgagcacaaggatgaagcaaattgttccaacgaagatgaaactgtcgagaaaccaaagcattcaaacgctgtgcattctaagaaggagaagtccaaaaccaatggttgttgctcttgtggatctgcaaggaagcacaaggcgtcttgtagtctagccacagcatcatcatcaagagagcctccaagggccaagggcgggcaagggaaaggccagagaggaaagaagcagaagaagaaagagcaagcggaagcagcagctgccaaggccaaggagtctgcaattgtgccagacctaggagctctttgcatctgaacacaagcagcagatacgccagccctgcttttcatccacctgtggcttatcatctcatgcttagttgaagcgaacgcagcagatctgctgcgtgctgactgagggaccgacgtgtaattcatccacaccacacgacaggaggggcgatgatgtcgctaaactagcaggttttgcgatggtatagaatcacaatcgtgtcattggtgtcatgcttactaaacaaatcttgttttgacgcgtaagctgatgagcctg

SEQ ID NO: 40605 - DNA, 868 bp, Zea Mays
ctaaattttaaatttttgcttcccaaacttggacctaagctttgagttaccatactattattatttatttttttgagagatttattttatgaaggaaaggaattcattattggcagatattttattattacaatttttctcttaccaattttttgggctttacagcaggtgtgggcacgatggctggaggccgggcccaatggcaggggcgtggtacggggatggtcctaggccgtcggatctcggatggacggttaggattagatacaatttatttaaataggaactgcccaatcagagatcgaatggctggcctcgatgtcgcctgtgtccgcggcagggagttcgccggagacgaggagcgcggacgctctggggatcctagggagacgaggatggctcggtgaaagtcaccaaaagggggtgaataggcaaaacctgaaaattataaactttgaacacacactttacccggggttaggattagaaataaataataatgagttaggagtgtggaagatagttcctcacacgggtcactaagaccccccaaggatcaccacataattagatatctcttgtttgctttacaatgcgcttggaaagattagagcgagaagaagaaagcaaccaagcaacaatagcaacaaaagaaacacaaatcactctctctctcaagtctctaagcacttgatttgattttggagcttggagaggatttgatgccatgattgtgtctttggagtctattcttttgctctagtgttgaatgaggaagttggaatgcttggatggcttgaatggtggtggttggggtatttatagccccaaccactattccagtcgttgctgtcgatgggcacaccgg

SEQ ID NO: 40606 - DNA, 1231 bp, Zea Mays
cgaccaccaggggtccagtcgtccagggcaccacgcacggaggcaccaggcgtctaggcaccaggccagccgccagcccgccagacggagtgacggaccatccagaattctagattccaggcgtccaaggctccaagccatcctccggtcctcccatccaccaccggtccaccgccactccgccagccgaccactaggtcaccaggccgcaccgctgcagctcgcaatcggcggtcggaggccagcagcctcgtcccctcctctgcagattcaggcaggggacttatcatcctctccggagacgaccagctcagacaacgcaaggggcgccgctgctgctaccgttgtcacggccggcgccactactaaagataatctaatgggtaaaacagtggcctcgccattcaagaagagtcgtcgcgtcaccgccaatcgaagtcgcctcgctgttgaaggaccaccagctacgcccgctaaagattcttccaccatctccagcgtagagttgttgaaatcaacggggttcgatgcacgcaaacccctctttttttacttgaatgtgttctttatttatcaggattccatgtaatatttttttatcacatctcaatgtataattgtatgctagaatttaatccgttgctaattttagattcatttgatgttagtttcagattatgtttgttaatatggtagtagtacttccaattatattttgtagctatgcattcactaatttctacatctgtagctatccattccaattagcacagttgcctcagagtccgcttttagcacaagtggttgtgttcttagcgagcaccgcagccgacttactccagagatcttggaggcgcttatgtgctcacaagattggatgcgacgcaagtatctagatgcatctaatgctgaccaacctgaaacattttggacttgccttcaagagatgtaggaagggatgcagaagcttttactctgagcaacaagactggaattggaagagaagggtgcccttaagctccaacagcttagaagtcttatatattcaaatattaagtattgtgtattgaacaattagatttgaaggcatgattttgtccacagttttgtagaatcaatgctatgttttgtgtgatttgaaggcatgatattgccatttaatgttgaatattgttgaacatgtgataaaattatgttgggttcgatacatttgttatgttggtacttaatt

SEQ ID NO: 40607 - DNA, 320 bp, Zea Mays
ttgacgactggttcgagctttttgtcgcgcactcggcgaatattactcggctagcttcgtcttcacccgacgcacggaacgatgacgggatcgtatttggggcaagctggtggggtaggggtcgagcaggggatgacgggttcgacgacgaacgtgcagagcttcaaactcacgcgcgcgagatagaaagacgcgcgaccagagacttaagcatccgcgatgaaagtgaactagtgacgacactcccggccagacgacgatgaaaacaacaaccgacaacggatgtggcgggttcgaggcggtgttgtgcacgacaagat

SEQ ID NO: 40608 - DNA, 2497 bp, Zea Mays
cccagccttccccaattccggccacacccgctacgcctgtggtgccgcctgccgcctccccttcctcttcgcttcccgtgcaagcttcaccgccgccatctcgtcctctcgttgcgatgcttccctttccgcgccgcggttcctctatccccgccttccctgcccgctccggctcttgcacctgaccaagtccgccaatctgttccccttttccgtacgagggtactatcgccggccatttcgattcggggttgatcggatcagcgtaggctgatgggtcgcgatgctgagaagacctctccgccggtgccatcgtcggaattggaacaggaagaagacgacgactgctacctaagcgatcaggaggacgatgccctagaagagtccgttctccatgtcctcgaggacgagcacctcgaggactgccattggtccgcctcatgcgtgatcaccaaggaatccctcttggcagcgcagaaggaggatcttaggaaggtgatggagctgctagggttgagggagcaccatgcccggacgctcctcatccactaccgctgggacgtggagaggatttttgagcttctcgatcagaagggaagggatagcctcttctcggaggctggtattcctcttcagtacaccaataatgctggtccaacctcctcagcggaggtgacctgcaatgtttgttatgatgatgtgccaccctcgtgtgccttggagatggactgcggccacagctactgcagtgattgttggactgaatatttcattgtgaaaattaatgagggtcagagccggcgtgtcagatgcatggctccaaagtgcaatgctatttgtgatgaagcaataattcggaaactagtcattgcgagacacccagatattgcagaacgttttgaaagatttttgctggaatcatatattgaggataatgatacagttaagtggtgcccaagcacaccacattgtggaaatgctatacgcgtcaaaggtgatatttattgtgaagtggaatgcacatgtggatgccagttttgttttaattgctccttacaaacacactcaccatgttcctgcatgatgtgggagctctggattaagaaatgccatgatgaatcagaaacagtgaattggataactgtaaatactaagccctgtcccaagtgtcacaaacctgtggagaagaatggtggctgcaacctggttgcatgtatatgtggacaagcattctgttggttatgtggtggtgctacgggtagagatcacacgtggtcaagtattagtggccacagttgtggccggttcactaatgatcagactaagaagaccgaacaagcaaggagagacctctatagatatatgcactaccacaacagatacaaggctcacaccgactctcttaagcaggaagcaaagcttaagaatgagatccaagggaagatatccatttcagaaaataaggagtcaaagataaaagattattcttgggtcataaatgggttaaacaggctattcagatcaaggcgtgttctatcctattcgtatccgtttgcattctacatgtttggtgatgagattttcaaggatgagatgactcctcaggagagagaactgaagcagaatttgtttgaggatcagcaacaacaattagaatttaatgttgaaagattgtctggtttccttgagaaagattttcaactttttaccgatgatgaggtcatggatacaatgaagcatgtcatcaatctttccaatgtggttgataggctctgcaaacaaattgcattgagaatgatttgttatatcctctacgcacacctcacaatatcgctccatacaaatctaagggccttgacagggcctcagagctcaatattagctgggatcctgctgaacaaagttcacagtcaacaaaacatagtcaggaggatgaacacaggaaccaaccagcatcgattagtctggggaaacgaactcatgagttgcatggctcgagttctggtaataggggggataatagggggcaccgatctaacaagcgagaccgggtagatgccaatggcggtggtgatgcactttttgatctcaatgtgccagccgaattggtggacaagatctgaagcttcattatctgatgggtgatggcacatccctttgaactgtacagctgacttaagcttcctcaccaacataaaggcaaaaaatactgttcttcttagcccccttgccaccatagagtatacctccatgtcaaaaaaaatttaccctggtgttaggatcccaagatatagagtagcttttaagttctatatgtcgcatttcatgacgtgatttgaagccaatgttcataattctgataaaactagttctactcctcaagcaagatggggatattttggaatgtaacttgaccatgcatgtgttgcggattccagatataatgtatgcagcatggtgaagggaattgtttgttgacaagagtgctggtgtttta

SEQ ID NO: 40609 - DNA, 1712 bp, Zea Mays
tcctggtatccagttcctttctttgcccctcctccgctttcttcggttcttcctctcccccactccccacgctgcctgagaggctgagactaggaaggggaaggaaaataatagtttggcgcgcaaatatccgcctccattcgtacgccgctattctcgtctgcgatccgcagcgcgatgatgatcccgtggggcggcgtggggtgctgtctcagcgccgctgcgctgtatctcctcgggaggagcagcggaagctgctatcttggacactgcaagtaaggtcctaccacttgtagttgccatctctgggagagttggttcagacacaccacttatatgccaacaaagcggcatgagaggtgtaattgttgaagaaacggcagagcaacacttcctgaagcacaatgatgccggatcctggattcaagattcggcagtgatgctttctgttagcaaagaggttccatggtatctggatgatggaactggacgtgtttatgtggtcggtgctcgttctgcagctggtttaattttaactgttgccagtgaggtttttgaggaatcagggaggacacttgtacgtggaactctagattatttacaagggttgaagatgctgggagtaaagcgaactgaaagggttcttccaactggaacctcattgacagttgttggtgagcgaccgcacaaaggacccttttatgcatcatcaaagagcattgatcaacttattgtgaatcttgggaaatgggccaagttataccgaattgcttccatgggttttgcaacatttggtgtcttccttcttgcaaagcgtgcactacagcattttctagaaagaagacggcggcatgaactgcaaaaaagggttcttaatgcagcagcacaaaggcaagctagagaagctgaagggagcaaaggtacatcagacgcagagcctaacagtaaaaaagatcaattagtgttggacatatgtgtcatatgccttgagcaagagtacaatgctgtttttgtgccgtgtggtcacatgtgttgctgtgtggcatgctcttcacatttgacgaactgcccactttgccggagaagaattgaccaagctgtcagaaccttccgccattgatggtgatatatgatgcaaaaaactggcatggtaccaccacatgtactgcttctgaaaccaatttattcttggaacttggaagtgctggctgctatcaaccaacgacatgaactgcaatactggggcgaagcagcttcaatgagtttgctttttgaactgaacagtgagtgatgcaagttgcaagctcataattgacagttgagatactctcactccctacatagtgccaatgggtgctcttgcctgtaatgtactacaactctgtacaggacgctcttgtgtaagtgcacatagattagcagcttgcttattgacaacatcgatgccggtaatatgtactgttgcccatcgggcatttgtgcaaaggaataacaaaatcagctcgtttagttgtgataatcaatttttctggtgggtgagaatgagatgcgtctcttagggtttttttttcgtatccagtttatttgtcaggatcataggaaatagatgatttgaaatatgttgtatgttttaagactgtccgtagcataattctgttatttgggattcaaataatccctctgttctagtatataaagtgtaaccatctctg

SEQ ID NO: 40610 - DNA, 1219 bp, Zea Mays
cgctataccaattcagccgtaaccaccgggcccgatgaatcggccaataaagcatcgtcttgatggcctccttaaccacaccgtcatactctccagcctgctaaacaagctagctagccgccatcaccaatccacaagctagcagtgatgggttgtgcggaggagatcaatctggccgaaccgtggcgggatccttcggcgtgcgtgaacaaaaatttggagagccaccgggactagtagactggcgggcatcgcatcgaccgccggggttggccaccaccgtgaggcacccgattgctgcaacctgttccgtctcgtcgtccattgaaggtgagcgctatctgttgttttcataggcacctgcgattagtagatcctgctcgtaagtatggaggaaggggggttgaggccatttggatgggctacccggtgaatcaccacagcgaggttcatcctacgccagggcggcctcgtttgattctctagatgccggcatcccggtttatcggtagcttctctactcgcagtctagttacacacagcgccggtcacctatggtcgcgcatagccctaagcctagctccccattaatgccggagcttaccaccgagggatgcatggcgtgaccatggctgtgaggcgagaaggaagaagacatgtgtgccgttcggtccatgttcgacggtcctgattatgggagcaaaccgtttcagattgattcatttgggccattagatgcgagctgaacgatccacgttagacctctgttcataacctttgaccatcgatccaaatctgatggcctggttcgctcaccccacagatcttgtgcgcccacggtcgtgtagcccatcatgtggccggactctatcaatgagatcacagcatgtcgcctataatccgtaaaatattattttactcaatatatttgcgttatagatccatttcaaccgttacaagtgcgttaagtttgtaataatatcatctacgtgttagaaacattatttgtcatgaaacgtttttgattgattgattgattaattaattaattattcatccgatgattattaaaatggcgatttagttaaaactaagtcatagtttaaatttgtgcttttataaatacctgttaatgtggttaatgcctactctaatgttttttaaacttatttagtataaacatgatatattttagtgattctcgtgtgttgcgctcggc

SEQ ID NO: 40611 - DNA, 2613 bp, Zea Mays
cggcgacatatactactgcagggagagaatccaaagccctccctcctttgggcttgtctctgcctctctctctcctcccttctcccacccacccctctctcttgctgtgggtgtgctgtggagaggagaaaggaagtagagcaagaacaagaactaataacaccaacaagagctgctgccaactcctgcacagcctgggctctcatcactgattgcccacctattaccttcctcttttgcgatttagaatcacccatatatctacctgctctcggtcctctgtgaactctctcgtcttctaggtttcccaggcctcaagataggcctctggaccaaagcttgaaagcagctgctgttcttgcctctttttttaattcttcatttcgtggttcctggatttttgggttcttaggtttcttgtatcttcccccaaccttgcaaaatcttgtggtgaagtttcttgcgttcgctgtttcgggaccatggacgaaaggattccgccgccgtccctcttgcaatactcgcagtcccctgctcattcttccccccatcccctcaattctatgaggtattcttcctctgaaagagaaaggtgagtgttgttcttgatttttttttatttcttttgtcactattgttctccctgttgttcttggtgagttttgttttgtttttgatcctgccctttcggaatccttctgaggagcacgagatttgatgctgcggtggagatttccgcttaattctaaacttccggatgccatgtttccccttgatcaatgctgccgattgttatggaggagtgatctgtaatcgtagggacttcttttgtgatggctcgctgatagatttgttactgctgtcctaaacggagctgtatggttgactcgctgctaatgggtgtaaactttgtgtgtaacaaatcgctcattggcgatagtcacatgtaaattttaatttgatggatcgttctgtatatatcatatcaaagtttccttttacatttcatttctgcgggattatagctgctttagttttagatcctccaaattatgtttcttcttttgtatcacatggataataaatttagcattggctactgttatcctaacgttgattcttgtttggcagatatctggctgagttgcttgcagagaggcagaaattggccccatttgtgcaagttcttcctttctgtaccaggctcttgaaccaagagattttgcgcgcatcttctatggcgcctaaccataactttgttgatcctgagagaattgagcatggtagcccattaaggttacctggccacccagtgaatggtcagccgatggatctggagggctggtcagggattcaaacagaggcttctcagcatatgggggttctacaagcatcatcaatgggctggaatggtgctcctgtacttgctgccactcctgttgtcaagaaagtcatgaggctggatgttccagtagacaagtatcctaactacaactttgttggtcgtttattggggccgcgaggtaactccctgaaaagggttgaagcttcaacccaatgtagagtttacattcgaggacggggttctgtgaaagactctgttaagacaagctgagggataaacctgggtatgaacaccttaatgaacaactgcatgtgcttgtggaagcagagtttccagcagatatggttgatgtgcgtcttaatcaagctgtgtccatcctagaggatcttcttaaaccaattgacgagtccatggactactacaagaagcagcagctgagggagctggcgattctaaatggcacactgagagaggaaagcccaagccctcacctcagccctagtgtgtcccccttcaactccaccgggatgaagcgcgcaaaaacagggcggtaatctctgttccgaaagccttcatccccccaaatcaatcatggttcaatgcccaattattacacaagctactgctggagatgattggtgatgcatatgctgggatcatcagtgatggcctatgcctgtcatgatctgtgcgctttatcgacaagcacacaaacatgcctgtgctgtgcttggacgaatggtctccgggcttgttgtttgactctactattatttattctttgtgcttctgactgcctaagtattattaacattattggtttgggaaagttaacaaggcccggttggccagtcgctgtagaaagcttggggagaggaggggggggggggggggtgtcaatgtgacggacaataataaggtttcgttggtgtacctgagatagttgtaatatgtcatgtgctgatgcttttgtgtggtgctagtacaagacaaccagacagctatagttgaggcaatgattattttgcgttcataaaatgcatatcggtgtgctttcttcatggttcatgtaccggaaccagtgtaaaatagttcctccgtcccaaaatgttttagctcttgatttttatgtctgtatttataatatataacacatacatcaagtctttcgtgaatccactatttgtctaaaatggattttattttggcacacagaggaagtatcctgtttgagctggtctgtgtgccaaatataaaggtgtatggag

SEQ ID NO: 40612 - DNA, 3395 bp, Zea Mays
gccgcactctccctgctcgcgctgggatattttcctgaagcagctaccgtccttatctccatgatatttccagccgagctccctgatttttgtcacagccgtcttcctcccttatcctcgccgccgccctggtcttcaaaaaatctgccgcgccgcttcagctctggataaaatcccgccggtgctgcccagccgctccttccccagcgcagaccgctccttctccctcctctacgcagtgccgcgtccacctccatctttgccggctggagctccctggtgcttgctcctctgcagtacggagctcctccctgaagcttctatcccctgccatggcgcttcgcttcccctgcggcattctcctttctctaatctccctgctcgccggcagcaacatccagccgcgcagctcttgactcgccggccgagctctctgctcctccctctgttcgctcgcgtgaagccgcgcctctgcgctcgcccagtcttcgcgcggcagctttcccctgccggtgcctagccctgcggccctcctctatcctcccgagcttctgcacagccagcgcgctcgagcccctctcagccatggtcgttcctctgtgcttgggttcaagcttctgcgcgccctcctccctcagggcgacgctccggctcctgctcgctctgctcgcttggctgactcgcgcgcatccctggctcgcctggttcatcgcgcgcacgcccagcgccctggattccctggccgtcgcagccgaggtcctccccatggtggcttcctctgccacgcccagctccctctgctccatgcgcgcgagctcgccgtctctgctcgctgcgcgcgcgctctgcatccatggcggtccccagctccctctgccggccgtcgtcgagccctctgcacacgtacgccgcgcccagctccagcgcttgttccctgctcctatggcggccgagctctccggtgccgcgcgttgagctcccggccgtcgctcaactcgtcggcgtgtgtcctactccttacgcgccgtgtgccggaaagtccctgcttgcaagctatctgttggcctcgcgcgaagctctctgttcatcgtcatcgctcgatcgctgcgtgtcgtgtgtcgcacatcttaggtcctcgtcgttgggtttcgtgcgtgctcgcgtttaccgtcgagtcgtcgaacccgtcatcctctgttcaaaccccacctcaccagctcgcttcaaacaccaccagctcgcttcaaacacgatctcgtcgtcaagcttcgctttagccttagctcgtcggtcacgctcgccagatgttcgatcaaggacttcagctgaaggccgtcgtcgttcaagcaactaccaaatcgagttgtgatgtggcactctaaatgtggagggctccgggagtgcgctatccacgctgctcgtccaccagccgccgcgaggaaacttccgcgtcctcctaccccgcgctggcgactgcatcttccggggccgagccctcgatccagcgcgcttcgccgccggcatcgaggcaggagggcgagaagcggccgtgcggaggcgggtctgtcggcgtagagctcgcaccccttcgaaccgaggccgcgcgacccaccgcaacccaagatccaagccagcttccccctgttcgtcgccggagagtcgccatcggcaaaaggcttcgtcgtccaccgacttcgtcgaaggcagccgacaaaaggaagagaagctcctcgccgccgtcgtcttcgtcttcgattcggtccaccgagccagatccgcaaagagcgaggtacgaactacacaaatccttttttgtttagtactgaatcattaccgtattttattgttcggatttgggggcatggattagggtttgtgggatgtttagggtttacgatctggagcattctaaataatgcgcttcaatttcatgcatcaatggcttattgttgtatccggatgcttaaatttagaccggttttgggggatccatttcgggtttggggggttgttcgtccccgatgattcggttctgtccagattcaaattactcaacattaattttgtatgcgaccatggtaacctaatctgcaaatttataacaggttcacatagatgcaatgtacattgattaagggttcatttcaactgtgtactcatagtttcgaatcccttcgattgagtactttgtataagatacgtaaattgtagtcagtgttaactaattcaacactgtgtttgatgtagccatggattcggagaacgaaaagctccgtaaagcactggctactctgctcagagttgttcaaaagcgtagttgtgacatcgttgatgtcgtcaaatcagccttccagcctttcaactcacctttggtcgacgaattgaaccgagcactagttgagattgacgacctcgccaaggatcttgaagacgtagcagtgcaaactcagtgggaggtagaaaatatggctaacagtcaagtgaaagaacatccacatcaagaggaagcagtagaggaccttctcatacaagatggttcagaagacgacctactgatagacgaagagtcaccaattaactatgaagaccttgtgggctacgacgatggtcgtgactactcaaccgacgacacatatccaatggggagtgattggaaccaggtgatgtctcaatatggaagcttccttagccagattgacgagcagcctattggaacacaacattctgaatttccagttgatgggcaacccgagggctcaagaacaccagctgttactaaaaagccaactcaaagaactaagctagcaaacttcactgctgaagaggacacaagggtatgccatgcatggcttgctgttagttgcgatcccattattaacacagggcagaaacgtcaaggattttggagtaggattactcaagcatacaactcaagacgaggaacattgccagaaaggtccacaaaatctttgatgagtagatgggatactatcaaaacacattgttccacttttgctggatacatgatggcagtcctccgacagaatcctagtggactcagtgacgcagacaagacatcactggcagcttctaggtttgcagcaattgagaagaagcctttccactttttacactgttgggccattcttaaggaccaaccaaaatggatggacaaccacatgggtcaacaacatcagcaagccaacgctaatcccacacattctaacactgtcgatttggatgcagaagaatctgtaccatcaagcttcacatccaagaggccacttggtcgagattcttctaaggaaaaggcaaagaggactaaatctgtggacacatcttcatcagattctgagtttatgacacgcatgggagatctttctttggagcgcccg

SEQ ID NO: 40613 - DNA, 605 bp, Zea Mays
caaaggcccagccccggggccccacccccctggtgcgcttttccgcccacaggctctcagaatctttacacccgcacaagcgcccttgccggctcggccccacctggccgcttcgtcagccgcacgatgtgacggggcgcgcatcgccgccgtccaaggcccgcgcgacgctggccactagttcccgcgcggggatcggacggtcgcggctcgggagcgcgggcggatcggacgctcccggtggcgtcgcggggagagggtgacggtggaacggaggtggagaaacggcggccacaggctcgcggcgctcgccggtgccctggaaaaagcgcaaggggagccgctagatcgccgccagttggccgccaggtgggccccgcgtggcgggggcgcaggccagttcgggcgtttcccaaccgcaaattattcattattgtctgtgagtcctgtgaccttttgcgttttgcggaagggtccctgcttaagcctggatttgcacgtggctaccgtgggaggttttctggctgttatttttcggttcaggtaacaggctttgtaaattagtctctgctgattaatcttctctctattctattttctatttt

SEQ ID NO: 40614 - DNA, 922 bp, Zea Mays
ttttttttgaggtttacctttcagctagctattccttgacagcgatgcttcgggttacttaaggcattggacatgacaagctaggtggaaacacgtacgtagcgggcgcgctgacgccacgtatttgcctgcctccgattcgtcggttgtggaagcgccatttgcctaggagttcccggccctgatgctaacccaacctggaaagataaggggacaggctgctgaggccggaagtgatcgctgagccggagatcaccgtgacggagcgaacggtggaggacgagtgcctgatcctggcgagcgacgggatgtgggacgtgatcagcaacgacatcgcctgcaacgtggcccgccaatgcctggaggacgggaacccgcctcccgccgaccccactgcgggaggaggaggaggagctccggccgccggcgtagtcgtcgtcgccgcccgcgaggccgagccccggtgcctccgcgccgcctcgctcctggccaggctcgccatcggcagggagacacaggataacgtcagcatcgtcgtcgtcgacctcaagcacagggactgagtcagtgagtgagtggtggtatccggtttctgatcctgcagcgcatcagcgtaatcgatctagggctgagctgaactgatactgtgaggaggtgatcgtctagatcgtctagacctttgacatttccttggttctttcgattctaagatataagatttgtagcctgtttcttttctttcggtcgaaatgtatgtgtggagagaaagaaagtggatggaagatttgccgtcctcaactgaaggtggggggaaaaaacggaggacaaaaggaacaatgaaaaagagagcaattgtacagagtatgacaacatgatgctacatttatgtgcattattaataccaacttgtttccgttttctt

SEQ ID NO: 40615 - DNA, 2688 bp, Zea Mays
gagaagaaacaaagacagtagaagtacaggcctgcaaggccaaacagcccagttataatagcggcctactcgctgacttgtgtcccttccggccgtctaccaccgagcgagcttgggctctccccggcctcctccgcctccgcctccgcctccacctccgcctccgcccgccgcgcccgttcccttcccgcgcaccgcgcgtccccgagctatccctggtgctgctggtgctggacgcgcgccagtccgagatcctcggggccctgggaccgaattgctcctcctcttctccgccgcgtctgctgcttggtcgccaccaaaacgtcaggagcacgatgaagcgcaagcacggccgcaagccggcggacaagaaggctgatccgtcggagtccacctcgccggaatccgcgtccagttccagcacggaggcgtcggacagcccgcgaaaccaggctgaggaggataacccgccgctcgtagatgctggggcagcagtgcctgaaccaccgtctcctcctcctgctcaaccttctgagccacctcggaagcccagtgccaccgcgccggctaatcctccagcggacataacgtacagcaggcccaaggtgggggctgtgtacggccgtgtcaaactgaagttcaagtcgtccaagacggtggactcgccgctgcgcccgcagcagcaggattctttggaagctcaagtgctgcctgctgatgctggtgcatcggagagcgctgctgtccctgaagtggtcaaaggagctgatgcggagaaggctacggttgtaatggatgggcagcaagcagaggggcaggggctggagtcgagtgacgcagataaggaaaaggtttcaaggaaagtaggaggcatcaagatcaagttggcggggctgccttctgtagaaagcaacactccggatcggaaatccgattcaacagatgagcgtcctccgagcaagcgggaagctcttttgggaagcaaaaaaatggaggatgcggtggagctgaggagctcacaggagtccgaagaaaaacagtctactccggaacatcagcgcaatgagaaagagctggctgctgcattagaagctattaagaaagttatgaagatggacgctgctgatccgttcaatgttccagtggatcctgttgcattagaaatacctgattattttgatgttattgagactcctatggattttggcacaatatgtcaaaacttggaacgtggtgacaagtatatgaattcagaggatgtatataaggatgtacagttcatatgggataactgtaccaagtacaatagtaaaggtgattacataattgagcttatgaaacgggtcaagaagggcttcatgaaatattggttggccgctggcttgtattctgatgtgctagacagtgatattatgtaggcggcaatgacaaccctggcgatgaggatgcgaaaggccactcaaaaagcaaggttaagaacaaaaggcgacgcccagggaacgatcgccataaaagtgactgcatatgtgctgtttgtcaagttacaaggcgtaagaaagaaagggatgaaatagtggctgttatagataatgaaactgctgcaatggatagtaacccttctgagcagcatgacatggagggaaactctggtgctaataatattggtaatcatgacacttgctctagccaggagcagccgtcacaaacttatgtgtacaaagaggcatcagaagcaaacgattctgagattcagatggaagatgttggaaagttgtccgttgatcagacatctagtttggtgcttcttgactatgaagacgagggttccagacaatatttggtggaaaaaggacagactgagtatagagatatgaacagtaacgaagagcacacccccactggcattcagcctaacgagtactctgatgttgagcatcaccagcaaaaggggcagacagagaccaccagccaagagattgaaatggaggactatcctattcagcaggagaaccctttattcctgcaactccgtgcgagcctcttccccagcaactggagcagcactttcagggggcgacattccctgttccgtccgcgacgccgagccccggtgaaggcgagccctctgcatgtagccatggcggcaataatgaagcggtaggtatttctgggagcctggtttttctgtgaagtgaagctccaggtaggtagcggcgctgactttggcaaaagctgtacccctcaagacatggaagcaggttggaatgctgaggctgattagtagtttatacatacatgtgggtgcgagattagtttgaggcgtgctcccatctctgtaggcggcatatggattcagaattctgtttgatttttattttattttattttatgtggggggtaattgtgatagccacatgttggtccatttgcttgccgccctggaatagggctcttggtctgacgaaacaccctcccatataatttgatgatctgaagggtttgtttattgtctgggcaaattcttctccccaactgcccacctgaccagagagaggaaaaagaaaagagatgctcttcgccccaacagaagatcagactgggatacatacatgattgatgattcggacttgaatatttgctctgacattctggaatcagttgtgctgtagacctgtcacctacctctgt

SEQ ID NO: 40616 - DNA, 5685 bp, Zea Mays
ccgactcccaactcccgaccggctcgcgagctatctcggggacacaaccgactgcctcgcgcctcttcctcatccgtcgtcaccggttgcttcccaccgccgccttgcgcctccatgctctcagcaatgatgggaatagaaggcattgcagccacagtcaccgaggaccctgaaccctcaattcctccaggatttggaccttttgctgcctcggcatcatggggaatccaaaacgatgttaaacctgctgatgatcattctagttctgttttagcattacagagcatcgacgacgatgtggaaattttggaatatctatccagttcagtggatcaccagagtgacacaggttgctgtatttctgggagcaatacctgtaggaaatcactgcgtaatagacctccaatagattatagccgctttgatcagattgcagatgaagattctgatgctgaagtagcagacaagggtgtaaatgcagtgaaacacagacaacaattccctaaaggagtacttcgaggatgtccagaatgtgccaattgtcaaaaggttattgcaagatggaatccatctggtgcacgtaggcctgttcttgatgaggctcctgtttactatcctaccgaggaggaatttcaggacacattaaaatacattgagattatccgcccaacagcagaaccatatggaatatgccgtattgttccaccagcttcatggaagcctccatgccttcttaaagagaaaaacatttgggagtgctcaaaattttctactcgggtacagaaggttgacaagctccaaaatcgtaaatcgcccaagaagagcagaagaggtggaatgatgaagaagcgtagaaagatttcggagactgaagaaaacaatcaccatcaaattggaatgcagcaaaaccaagagagatttggatttgaaccaggaccagagttcacactacagatgtttcagaagtatgcagatgacttcagtgatcagtattttatgaaagataaatgcagagattcaccaccatcagtggaagatattgaaggcgagtattggcgcatagttgaaagaccgacagaggagatagaggtaatatatggtgccgatttggagactggaacttttggcagtgggtttccaaagttatgtcctgaaatgaaatctgatgtggaggataaatatgcacaatctgggtggaatctaaataacctgcctagactacaaggttcggttctttcttttgaaggcggtgacatttctggtgttttagtgccttggctttatgtcggcatgtgtttttcatctttctgctggcatgttgaagatcatcatttgtactcactgaactacatgcattggggtgctccaaagatgtggtatggagttccagggaaggatgctgtgaatttggaggctgcaatgaggaaacatcttcctgagttatttgaggagcaacctgatttgcttcacaacttagttactcagttctcaccatcattgcttaaatctgaaggagtaccagtctaccgatgtgttcagcatgagggagagtttgtcctgacgttcccacgggcataccatgctggttttaattgtggcttcaattgtgcagaagctgttaatgtggcacccattgattggttgccggttggacaaaatgctgttgatctttatcgtgaacaagctcggaaaataactatctcccatgataagctgttgcttggggctgcaagagaagcaataagagctcagtgggacatcctatttctcaagaggaattcttctgttaacttgaggtggaaaagcatatgtggacctgatagcacaatatgcaagtcactgaaggcacgaattgaaatggagttggtacaaagacaaaatatatcctctccatgtcaatctaggaaaatggatagtgagtttgattctactgatagggaatgtgcattgtgttactatgatctgcatctttcagcttcaggctgtccatgctccccagagaaatatgcttgcctggtacatgcaaagcagctttgttcatgcgattgggacaaaaggtttttcctatttcgttatgatgttaatgagttgaatatcttagctgatgctttagggggaaagctaagtgccattcacagatggggtgtctctgatcttggattaagtttgagctcctgtgtcaaacgggaaaaggtccaagattccaagactgttcgcagattaactgatggcccaagacggtcctacatgtcacaggcatcaacagtatcattgattccttcttctgttagcactgaacagaaaaagaatgaagataagacactggatttaggttgcccaggtatgaatttaccaaaaataagtccggaggcaaataatctgcgtccttcgacagaacagataaaatcagaaaatctctcacagctaaaggaaccatgtgtgaagaatgaattatcttgtccgaccagcaatggtaccagccaagaacataaaggagggattggaggccacaaacttgcagcagcaagcatgatggttctttctggtcaatcatttcctgcaaatgctggtgaatcagtgagaaatgcgcatgtcttggcagtatttaaagagggtagagactgtacatcttcacttacacttagggagtatcataacaggccagtgtcaatgattgataatggagctaacatgaagctggatctggaaaacatagacaattctcatatgttgatgtcatcaccagacttcaatgcaactgtatgtcattcttacaaggatcaaacattcttaacactggaaactaatacctctgtgatgactgagaaagatagcagtcaggcccgtaatgcaagccagcagtttgtcagtactgctttaagaacacaaaatgtgtctcaggaaccattgtgtaccgcgattgctccaaagcaactcatagatcctcaagttcagaaaaaatcatatggtgtttttggttctggcagtgcccatcttgggcatctgactgttggtaatcagcaactaaatgagagatggcatcaaagacaatctgattctttatccagtgtggaagttagagctaggggtcattcagctatgatagtgcagcctgctctggaaaatcacagcagaaatggagttgcacagaagggtcctcgcatagctaatgttgtacatagattcaagtgctctgttgaacctatagaaattggtgctgtgttatctgggaagttgtggtcctcaagtcaagcaatcttcccaaaagggtttaagagcagagtaaaatacttcagtgttgtagatccagtacaaatgacatactacatatctgaaatattggacgctggacagcagggaccactttttatggtgactgtagaaaactgtcctggtgaaattttcataaacatctctcctaccaagtgctggaacatggttcgtgaaaggctcaatatggaaataaggaggcagctcaatatgggaagagctaaccttcctacactacagcctccaggatcagttgatggccatgaaatgtttgggttgttaacaccagcaatagttcaggcaattgaggcccgggacagagattatatctgtacagagtactggcgatcaaggccccatgcaacaattgagaatcgagacaatcagaatatgtcacctcaggatccaccccttgttgcactgagggggctcttccagcgggctaattgtgatgaactgcgagcactacgcagtttgctgatgagcaatagaattctgggcgacaattctaggcagcaggcttgccaaatccttgatgaggagattgcgaagcaatggcactgaccagcgtaaatacaggatgttgtactaaccaattgtttggcatgattttgttttgacgggataaatcagttttaaggcttgcttcttccgttgcccttgtgcccattcttttcattcttgtgaccatacccaattctttattgcaagtggtgtcaacaagcatgaggctacagctgcatcacctgcaaggaagtcaaaaactacaaccaagtaaagctattgcacactcctcaacaactgtatgcaagaagcaggatagcggatgaacatgtatcctccagggacttattttaagtaaagctttaaaggcgcagaaagacgtcaaagatgcaagtgctcagatggccataggcaacctgtagtctgaagttattgggcttcaccgtgatcttgaagaaaaagaaataaagctaaatacttttgccaaagatctgattgaagaccacactaagttctagaaatcctctaaagagaaagacaacaaaatttcgaagctagaagttgacaactcgtagagcatgaaacacattgcagagcttgaggcctagataaaagagcaagttgtagcacacaaaggcaaaatggccaaattgaaagagaaggtcaaagatactagtgtaatttttgaggttgaaaaggtgaagcataaaatttctgataatgagagaaccacattatagaaaattgttgatgaactttgggagtctagcgaagaatgcttctactccactgcccagtgttgtaaaaaatttaaaaaataccttcgtctccataggagcattttcaagtgaaaaagaatttgtgcgcggcgacgcctctagtgcggtgaagtggataggagaagtggaggccttcgatgaagtattatccacccgtggtgattattgtgcgtgtataggggcacacgttgcaactttgctgcttgacaaggctagatgcgagcatgtaaaagttgccagctagccagagtttaaatattatgttgatgacaataagattcctttagctgaagcaaccgagcttgggagaaagttttataccgatgtctggcttggtggagggaagaagttagtagatgaagttgctagagaaaatgtaagaaatgtttctttttatcgtttatttttctgtttcgggacttagaattttagtgtttacacaaagactcacaagcttacaaaaaaggcggaagcaataaaggaacctttaagattaaaggaactcgaagatgccctttcgccagaacccaaagagtacaatccagatgaagattcactactgcaggattggctagcacatctggacatgttgtataaaacagtagacaaagttgttgatgatgttttcaataatgttcccgaaagagttaccttttcgaaatagtatatgattattataagggggcttcggcataaaggtcttctctcatggcaaagacatacagtgtgaagatgtaacccgaaggtgataagaatggtcgccgaagctatagccaaagagcttcgacttaatatggtgacgaagaccaaatatgatgctgaccgaaaggggaaaagactatttagtccttaatgattcatgttatgattataaatagatgccagggacataaatgtacttttacctggaatgtgtcccgtgcctataaatagataaacagtagcaccgtactgttcacgctgaattatagtcactctctcgcgtcttcagcttcgagcaagccgaaggtatcaatgtaatatgaattatgttgatattcatacatgttttatgggatgcaaatatgaatgaattaacaagatacaattactatcttcatccttttgcatttctgttcacatattaaatgaa

SEQ ID NO: 40617 - DNA, 306 bp, Zea Mays
tatcaaaacaatgtcacaactttaatatataataggagttctgtataaaataactaaataattacatcatacgaagacaacgatccaacaaccatagttgactgggagacgacggcctagacctctcacgaacgcatcgtgacatccttcatgctccttatcccgcagtacctattcttgatcagtacagcaagggtgagctcacatacgttcatcgatcaacaagttgtggagaataatgtgcatgagctcacttacggtggggatcatgtgaagtgtaaggcttaccaaagaggatggttaaag

SEQ ID NO: 40618 - DNA, 1595 bp, Zea Mays
acgagggggcccacgcctgaatgccaggcctggccgcgacgtgtcgcgcctcgccctccccgactccactccactccactccactcgcccgcgcccgccgcccgcgtgctcctccctcgcgccccgccccgccccgcccctatctatatccattcccgctcgtccccctcaacaaccctcctcaccgcgcactcgtgttcgtgtcatcccgcccgcaggccgcagtccatggccaccgccagcctcgcgctctcgctgcgcctcgcgccgtcctcgcgcccgctgagcctccgccgccggggggccgccggcgtcacctgccgcgccaccaccgccacgttccaccagctcgacgccgtcgcggtgagggaggaggagtccaggttccggacggcggcggcggagggccgcaacctgctgccgctcacgaggtgcatcttctccgatcacctcacgcccgtgctagcgtaccgctgtctcgttaaggaggacgaacgcgatgcgcccagctttctcttcgagtctgtcgagcaggggtccgagggcaccaatgtggggaggtacagcgtggtcggggcgcagccttctatggaggtcgtggccaaggctaaccatgtgacggtcatggaccatgagatgaagtcgaggagggagcacttcgtgcctgatcccatgaggatccccaggacaatcatggagcagtggaacccgcagattgctgacagcctccctgatgcattttgtggaggatgggttggattcttctcatatgatacagtgcgttatgttgaaacaaagaagcttcctttcagtaaggcaccacatgacgataggaaccttcctgacattcatttaggcctctatagtgacgtcattgtgtttgatcatgttgaaaagaaaacacatgttattcattgggtgaggacagactgctatcgttctgttgatgaagcatatgaagatggaagaaatcggcttgaagctttgttatcaagattacattgcctcaatcccaacactttcttctggttctataaaactcaatgttgaaaactttggcccagtaatgcaaaaatcaacgatgtcaagcgaagaatataaaaatatcgttgtccaagctaaagaacacatcttggccggtgacattttccaagttgttttaagccagcgttttgagagacggacattcgccgacccctttgaaatctatcgtgcattgcgcatcgtaaatcctagtccatatatggcctatctacaggcacgaggttgtattctcgtggcatcgagtcctgaaaattcttacccgggtacaaaagaggacaataatcaatcgtccgcttgctggaaccataagaagaggcaaaacaaaagcagaagacaaaactttagaacaattgcttttgagtgatgaaaagcagtgtgctgaacatattatgctagtagatcttggccgaaatgatgttgggaaggttcgatactagagtggtcatggcttaaagttagtaaagtcggttctaaatctaaatattttgcccctgataagcatcctaagaatctggataggaatgtaatttttttcctttttaatacactac

SEQ ID NO: 40619 - DNA, 3953 bp, Zea Mays
aaaaccccaccgctgttcgcgtcctcgtttctctcaatctctctcctctcctcgcctctccttggtgtccgtgttcacgccgtcgctagcgcctgccgcggcgaagcttctgccctccccggcgccgggctcgggtcgtcgtcggccaggcagctgctacgcgtgaacacggtcacaccagtaccacgtgacgtgaacggtgaactcgtgaagaacagagccgccactgaggaaccctagcgacggcggcgtgctaccggtgacattgtccccctcggtccctcctccatccccgacgcagcggcgccagcctgcaggaagcctattcgagacaaggtcgatctttgctgccttggcgagcttcagccgaatcaaggtcgagcatggcggcaggccagtaaatagagcaacacaaaacccttcaaatcaatggagacctctgcagcaaccccgacccggccgccacaccaggcggccacttccccatcgccatcgccctcgtcgtcgttgaggctgtggaggccagcggcgcagcgcaacatgcgcaatcagtggtcccatctgagcgccgccaaggagcagtggctggccgccgttgctgacggtcgtgcccacgcctccgcgctcgtcaacgtccacctctcctgcaggaacatgccggcgatggatttgggggtgctcaaggatatgccggggatccgcgataaggcgaactccaagttggcgcttagagaggagcaatacagcggcatgcttctgtcggcctacaaggagatggggatggtggaggagccccagtattcaaatggttctccgtattagaatttggtgggttaatcatctcttgcttctatggattaagtcaccactatgatctttcgtctgttgggtgtgacaatgatctcctaacccatctatatctgagactactcagagcactatatattctcacatttgaggatgccgatcaatatctgagacagtacacacattcatgtttacatgttttaaatccacatgataaaaatatattatgtttcctttaatcacctcagagagtcttgcccaggagcttgttcagatgtttgtttcagagcaaaagttgaagaggctgctactcttggaatttctctcgattgctttaaaggaaggtgtagaactccagacatcattaaattggggtgatgaactatatgatggtgaatcaaataaacttcagagtattggccttcagtcaggagatgcctactcaccgcctgaaaattggtgtgcagaacgtttagggagtcagagacctggcaatctccctctgcatgaagttttacaggtttatttaaccacttggcatgctaatatgaacatcaaccggaaattggtgaaatatttgagcttgttgaggaggagatgaagattaaactgtcttgaagattccgattcattttgttgggctatccatcaaggaagaagaaatggaaaagaaagatcaatcagttcactattcaccaggattctatatccagtgtctttatctgccttagtagaagccttcagagcttacctatgatcttagaatatagtactggtctccttgtgacccataatttttttaaaaaatttaatgttgggttacactggaatcatattgggaagagcgttggaccaacatatgttattgaaatgagatttctaagttatcaggatcattcgcctagcttcagggtttagatgggcgtcgaggcagcaatcgaggcaaggaggaggcgggggtgggggatgctacaccgaccgtgacgtcgcctactgtcttggaccttctgtgcgccctccttgacaccctcgacgctccacggagctcggaggcggtgaccgtcgaggaggtcggtccctcgaggcgacccggggaaccggttgaaaagtacatcatcccgcctcctatcgttggggcgggtggcgacctcgttcgtgccggatcggacctctcgacatggggagggccgaccctgaggtggatggccaccgagggcaacccctacttcgtccttaatgacacggaggagagggagatgtgggcggagtttcgagcaatggctcaggggcttatggcgaagtccgtggccaagtcgatctccatccgcagcgagcgcgacatatgggccgtgctgcagcgctatcaggccatgttgtgttgcgcaaacgagtagctgacgctgaagagggccgaggcggcgaacctatcgtcgttgtgtgctgagttgaaagacgaggtcgcgactgagcgcgagaaggtgtcgtcgctggaggaggaggtgcgacgcctgagataaggccttcgggtggtgactggtgaacgagacgagtctcggcatcaagccaccgaggcttctcttcaagctgactctcacgaaggacctgggggccgagtggagtacggtccaaggcctaagggcctaaatgggagagctcgaaagggatttggatgctgccattcacacctctaaaactcacccaggccgtcgaccaaaagatggtcgagctgaaggacctgtccgacgcggtggtggagtttggtcgagacctttgcgtcgcggacgttcccttgggtgagtacttgcggagccgcatgcgagccctgagtggctacgtgcggagcgaactccgtgaggccgtccatcttggggtgaagcaagtgttggtcgtagtcgcctcccactatgagattaatctcgagcgggcatgcgaaggctacgtcttgttggacgagcgcaacctcgccgaggccgagatgcagaggctcaccgatgttgtcgaggggtcgggctcagtgtaacaccccgtccaatcccggaccggcggtacttactcctggcagctctctaggatcatttatcatccacacaaaccaacatgggtcttttgtgcgcactttgtcctcactcatgtgcacccgataaaacttcccagtcggtcactaatcctaaattgctccaagccaaacacgcttaacttggaggttcttttgagatatgcttccgaaaaagaagatgtatcttgttggtatggatactctattaattctattaagccttgggccaggatatcaccatctcagggcctaggatatcacaatccacccccttagaagaccgacgtcctcgtcggtcaacctcaatccaggaacctcccctcttagccacatgtgtgtctagtgtcgtcatattccatgccatgtgaccacttagggcccacatgcgccatgtgccatatatccgaaccccctagcccacacacgctcgtgaaacctcaagggtcggctctgataccacttgtaacaccctatccaatccctagaccggcggtacttactcctggcagctctctaggatcatatatcatctccacagaccaacacaagtctttgtgtgcgctttgttctcactcatgcgcacccgagaaaacttcccggtcggtcacttatcccaaattgctccaagccaaacacacttaacttggaggttctttcgaaataggcttccgaaaaagaagatgcaccttgttggtatggatactctattaattctattaagccttcggccaggatatcaccatcctaggggctaggatatcacacttagcattggcgtgccacttcgaggatgaggtggttctgccggtgcagtcccctcctgtcgaatctcactccgctgtggcgcctcccggcgtccccgaggttgacgctgtgcctcataccgcgcagactcttcatttgccctgaggggttataaggaatattttgagttgcgtgtataagtcgtgtattgaacactttgtttttgtatcttgtttatttgctatgttattttttcgcttgttttgtgcccgccgttttgcctttccacagagtcctcatcggaacgtgagttaccttatgggaggatagtgagtgaggataccat

SEQ ID NO: 40620 - DNA, 3687 bp, Zea Mays
atcgttaccctgctttcttctgcgtcgtgcctgtcgcgagcgccgacctacatctgttatcgagtgctcggcaatgtcttcgtcttcgagcgcagccaccgcaccgccgtgggccgaccttctgccggagctgtgcgacctcgtcatggagcatctcgaccccatcaccatacttcgcttccctgccgtctgcaggggttggtccgaagcgtgcgaggagaatccacgcctgttgcgggcgggcgcgcctgcgctgctcacgcccggcctggaccccgacggttgcgagaccgagagcaacgtcgacgcgggcgcattctgcctccacgacgtgtctgccgccggcggcggcggcgggcgcaggtccttttgcggcgaggcagagggattgaagggccgggcctgggtcggcggcaaccatgggtggctggcgaccgcggactggcgctgcgacgtcgagctgctgaaccccgtgactggcgcgcgggttcgcctgccgtccttcgccaccattcccggagtcgaggtcgaggtcaacttccacgtcgtcgcccgtaccgctggtggctactccttaggcaagttccacaagatcctcaaggtcgcgctgtgccggacgccgtcgcacgctgacggccacctcgccatcgctatcttctccggaggtctgctggcgttcacggcggccggcggcggagacaaaggcgagtgcaggtggacggcgttgaagaacgccgcggccgatgtctcgtacatggacgccatcgccctcgatgggaagctgtacgccgtggacgagctcggccgcttgtactcttgggacatcgacgatggagccatgacagagcccacggtggttcagggaccggagaatgacgagatgagccgctatggcactgacctgtgcgggttctacctggctgcttccgtctgcggccagcggcttatgctcatgtgcatacacggctacgacgtcgcccgtgcttacctgtacgggcgaagaagcagatgttgggacagtcgcgtgtggagcagactggtgttcgacgacaggaggagcttctgcgagctcggcatgtcgctccacgagctcgacgctggcggcggcagttggcggcgtgtcacggacctcggcggagatcgcgccctcttcctgggcgcaaactatcctttctacctcacggtccggcacagatttggttctgcggatcttgaggcggactgcgtctacctctccgacacgccctacggctacgacacggccatctttgatctcaaggagggcatcggaggtgacggtcacatcaagcagcagctctattactcactcgtagctgatccgttacagatgcccatgtggtttgtgccaacggactatccacactaataggtggttagccactagtctgtttaatttgtctaagatttagtttctaataataatgagaggcgtgcagtcgtgagttagatagagctacgtgttagagcatctcgaatgttagtcaaaacagatctcacttatcaacaaacagtcacgccttctttcaggggaatatgaagaaatttcatgcaaaaaaggaggatccgggataacagacatgtgcattgccgttcgcccgttcccctaaaaaaaatcgaccctttgtatgtacagctattatttagccccaaagatcgttgaaggccaaactactccgccgcctcatccccctagaactcggttagagcactcccaacgctctccagctcatatggtttttatagaatttattagactgccatatcagctttttgataatgtggcaagagatttattgtgaaaagagcatggaaacgaccaaaatagcgttgagccccgtcggtggtttccatcctcgttttcttccccttccctctgagaaacgaagtctgcttcttttgtgaagtcattaaatgtgttctctgcgtagaaactaccatttgcattgagaagattagtttctataaatggttccttgactaggtggcagctatggaaaccacggagcagagttgggagtgctcttacatacatcacatccgggccttctttcctcgcttcctctgcgcaccgaaattctcgctgacggtgattcggcagaaaaaaaaaactgacgggtagcgaatctgttctgttctacgcccatttggcgagcaacgacatgagccccgcgccgaggaacagggcgacgtacgccgccagctggagcttggcgttcgtctgcagcctcgggttgctgaagtccgcggcgaggagatcgaccagggacatgtacaccaggatccctgcggcggccgcgttgaagacgccctccacgaccagggcggtggcgccgtgcctgctgtagccggaagcgatggcgatgcccagcgcgatgcccgcgggagcggtgagcgagaagaaggccgccatgaccacggccgccctcgccttgaactctgcctggataggtatcgacggattgtgctcagggaaaaggacaggttgtttgtttgttttttcttcatggcatggcgtgtgttcttgtcgaggaggtgccccaagtgggcgttcggaatgctgggaaggtgctcacctgagagatcaccctgtgcctgatggacacggcgacggcggaggcatcctgaggcgaggcaccggcgtggccgtgccctccgtgggcgtgcgtgtgcgcgtgcacgtggcccgcgggctcggcggcggcgccctcctcgtccgcgggcgccgcgcggccctggcctccgtcgacggcgtcgtcgtcgacggggcgcgccttgcggatgtgcgcgcgctggtagtagcccgcggcggcggagtcgaccatcatggtggccatggcagagcacatggcgacgagtcccgcgtaggggaacccgccggccctggcgccgccgccgcaggggggcgcgagcgcgtcgaaggccgcgggcaggatgtgcaccatgccggtggcgaggatgacccccgcggcgaacgccttgacggcgaagaagacgtccccgtcggggcgcagcgccgaggcggagcggcccagcagcgggaccagcacccccgccgcgcccgacgccaggatggacgccaccgcgacgagcttcagccgcagcgccccgcgcgcgtcctcctccttgatcgccgccgcctcgccgccgccacaatcgcaccccacgcccgccgctgccgccgcgccgaccccgggcgtcacctgaacgaggagcagtagcacagcgagccacgccggcagagacgggggaagaggaacccgaactcgcgtggcgtccatggcgtgcgcgcacgtgcgcctggcgtgggagagagggccggtgcggtgagtgacggagggagggagtcggcgccgcgcgcgcgctgagctatataaagctccgcggccgcgagtgtggtgacatggtgagctcacactccggcaacgccgctttgaagcgtggtgggccctgagcagtgtgcaccgtccgatctgggtgtgtgggcacgctctccaactggcagcaagtgttggtgttgccgtggaccttttgtcgtgattgtttggaaaaaaacggatcaggtttgccaccttggttccagaaacgctttaattttttttttcatcccaaaaaatggtgggagttcatctgcattctgatgtacttcataaaaaaacgaaaaataag

SEQ ID NO: 40621 - DNA, 2546 bp, Zea Mays
aaaccacacccggtctccgcctccgtctctgcctcctttcccctcgcttcctcgccggctgggatcttgcggcagctacgctcgctagctctcctccaacccgccgtcggctccctccgattccagtcccgtcctgtctcgccgcttcctggccccccgcttctcacgcggagaccggtcggatttcccacctcaaacatcgccggttttatccactcccgcagacctcttcctcagggacgggattggattggtggtggatcttctcctcaggggaggcacaagatccgttcatcatcctcgtcgcctaaacttggccgctcccgctcccacgctgctgctccaccctcgccgctactagaccagaccacggaggaggagacgaagcgccatgaggcggggagccaccaaggacgacgccgcgcccgacaaggtcatgggccctctcttcccccgcctccacgtcaacgacaccctaaagggcggacctcgcgcgccacccaggaacaagatggcgctctacgagcagttcagcgtcccctcccaccgctacagcgccgccgtaccgcccgcgccttccccagcgcctccatggggcgcgcaacgacccgcctccgcggtcccgtccacgtccgccagccaggttggcggcggcgatagacctatcttcccattatttcgtgtgccttcaactgaacctgttcgttcatcagatcagacgaatgccaactccaatggccagggtgccaatggtacaatagctgaatctgggaggcagaggcagtccacacatcttaagagcaaggatactaatgctgcaggaccacctgccgagggtaataattccgttgggaagaaattggctaatgatgatgattttacagttccctctgtcttgtattctggaatgcctccgcattccagccaagaaaagctcactctcttccctaccacaagcccatgtaagagtgtgcctgcaaaatattctagcactgacaagagacgcttagaaggaatggatgcttctgatgtgaaatcgaagggtccctcaggtatcaaggagaaagagccagtacaagtgaggatagacttggaagacaaagagacaactccgtcatttcaagtgctaaacgacaaaacatggagtccagacccaaagttatcttcgcacatggacaggctgaagaagcaacatgctgaagctgagagttatcagataaggaccaggaatgagaatgctgtcgagacccaaagccctccaaaaaatggagtgtcgttgttgtctaagccatatgttgataggagggaacagaatggtgattctgatctattggggcatggcctaagagagacaggtgtgaagaggaaaagatcacatcatgacgtggagcaaaacgatgatctgtctgattcctctgttgaatctttgcctggaatggagatttctccagatgatgttgtcagtgctattggtcccaagcatttttggaaagcgagaagagctattgtcaagtgcagaagttgatcgctgcatctccacatgtacttattgagggggatccttgccttggcaaatccttggcggtgagcaagaaaaggctggctggagatgtggaaacacagcttgaatcagctaaaaacgatgatggcgtgcgaccaacgcagctagagcactcgaaagagaagactgaagcgaaccaaccttcaccatctcaagacgaacaggccgcaactaatggtgacgttgctgcctcgatgcataccccttccgacaacaaacagaagagctggtgcattcctgcacctccaagtcagtggctgattcctgttatgtccccgtctgaaggacttgtctacaaaccttataccgggcactgccctccggtgggaagtcttttggcgcccccattttttgccagctaccccacctcctcctcctccacagctgggggggatttcatgagttcggcatgtggagccaggctgatgagtgcccctgtgtacttcccgtctttcagcatgcctgcagtgtcagggtctgcagttgagcaagtgagccatgttgcagcgtcgcagcataaacggaactcgtgtagtgaagcggtgttggcatcaagggacagcgaggtgcaaggcagtagtgctagcagtccggcatcttctgaaacagcagctcaacccagggtcattagggttgttccccacacggcacgcacggcttcagagtcggcagcaaggattttccgctcaatacagatggagaggaaacaaaacgacccgtgactggcagataaaaatgaaagaacggagggagtagactaattttttgaccgataattataatgatcgccgtaaattggctggcccgcccgccttatgttttttgttcagtgtaaatatgctgtgtctgtcagaatgatatggcatctgtagctattttggttctgtcagaatcatgttgattggaattcgtcggtcggttgagtaggatgaaaattgggcacagcccatacgtctacagcaacgtcaaataaaggaagagaaag

SEQ ID NO: 40622 - DNA, 4271 bp, Zea Mays
tagtagcctggcagttccgacgctgcttgcggcggcgcttggcaaggccgacaaacggcgaccaggcaggcgagctcgtcgcctcgggggcagggaggaccggagcccctcgcctcggaggaagggaggacctgagttctgtttctcagctttatgatcaagcaggagctctgattaacagaattttttgaattctccccaaattgaagggtgcacctgaagggagttatggatcggaagaatcaaactcctcaaggtcaaatagcacaggtggttgtggaatttcttgaggtagcaatcagctgcatcgtcttcctcaaaggcttctatcctcctcgtgcctttgagaggagaaggtacatgaatgtggtggtccagaaagcactgcatcctgagcttactagctatattcactctgtgactttcggtcttctacctttcattcagaagggattggtagagagggtcgtggtcatcttctatgacaaagggcatgtaccgaccgagaagttcgtcttcaagcttgcagtcaaccagtcataccgttccaagttagaggaggcgaacctggagttcgctctgcgagcattcttgatcaagctgactgttgctgagcctgttaccagaccccttccaccagatggtagctgggaggtgaccgcctacttccggtccctccccggcgacggtgaccgagaagctcagctgtggattcctacggacgccgagctgtggatgcagcctccgcagatcacccccatcaagtcagtcagctgtgaccctctgacgatgcagctctacttggagcaccctagcgtcacggaaccgaaggagccaccggcataatgacaggagcctgcacctgtgggctgtgatacactgcaatagcaagctgggactagacgacagcatgacgaggcaggcaatgcagcttttcaatgagaccaagaacatcaagtccagcatgtcttccttgggcggtggatcgcccgaggaggtcgagaggttctggtctgcctgtgttatgtactgtgtgtcaaggctcagcaaagcgcggaggtcgaaggaaagtggcagtgtctcactttgccagattttgagggcatctaagctgaacattgtggattttttcaaggagatgccgcaattctgcataaaggttgcacacattttgactggcctatatggttcagattgggaaaagaggcttgagttgaaggaactgcaagcgaatgttgtccatttaagcttgctaagcaggcactacaagcgtgcatatcaggagctattcttgccaaatgatggaaagtgttcagacagctcttcagaatcaaacaaccaagaggtttctgattattatcgctttggatggttgctctttttagtcctaagaatccaaacattcagcagattcaaggatcttgtgacatctacgaatgaactagtttctgtgttggctgtacttatcattcatattcctgtgcggctaaggaatttcgatataaaggattcatcctactttggtaagaaatcagataggggagtcagtcttattgcttctctgtgtgaaaaatatcatacctcagaagatgagttgagcaaagcactggagaagacaaatactctcatactggatattttgaaaaagaagccatggacagctacttcagcatgccaacaggataatttgactttcattgatccagaagggttgacagtttttaaggatttgcttcagggaggctcattgaaatcaagtcttctaatcctggaaaaagaatatgaaaatgcaattaacacaagaggcgagctagatgagcgcatgtttgctaatgatgaggacagtttacttggcagtggaagcctttcaggtggagccattaatttaccaggcacaaagagaaagtatgatgttatggcctcacctgcaaaatcaatatcaagcccaaatccaatgtctcctccacgtttttgtctatctcctaaaggaaacagcttttgcaactcaaagatggctcctatcactccagtgagcacagccatgacaactgccaagtggcttcggagtacagtatctccgcttccatcaaaaccttctggggaactattgcgcttcttctcagcatgtgataaggatgtaacagatgacattgtacacagagctgggattatacttggagccatattcacgagcagttcttttggtgaacagatctgtactaatatgcgaagcgctaataggatggatgctatttggacagagcaaagaaaaatggaagcccttaagctatattatagggttctggaatctatgtgtagggcagagtcacagatcttgagtgggaacaatcttacattacttttgtctaatgaacgtttccatcggtgtatgattgcatgttctgcggagttagttcttgcaactcacaagactgtcactttgatgttcccagctgtgttggagaagactggcattacagcctttgacttgagtaaagtcatagagggttttgttcggcatgaagatacactccccagagagttaaagcgtcatctgaattctcttgaggaacggcttctggaaagcatgtcatgggagaaagggtcatcaatgtacaattctttgattgttgctaggccagtactatctatcgaaataaatcggttaggtttactggctgaaccgatgccatcacttgatgcaattgcagcacatcataatatctcaatgggtggcctgccgcctcttcccttccagaaacaggagcgtttgcaagataaagatgaaatcaggtctcccaaaagggcgtgcactgagaggagacatgtgccggtggacagcaattcatttcgatcacaagtgaaggacagtattaaattgaagctaccacctcctcttcaatcagcttttgcaagtccaacaagaccgaatcctgcagcaggaggtgaaacatgcgcagagacaggaatagctgtgttctttagcaagatatcaaaacttgcagccattagaatcagaagtctctgtgaaagactgcaactttctcagcaagttctggagcgagtatattcccttgtccagcaaatccttagccaacagactggtctcttcttcaacaggcacattgatcagatcatactatgcagcatatatggagttgccaagatctctcaactgcaactttcattcaaggagattgtttttgggtataggaaacaacctcaatgcaagccacaagtttttcgaagtgtttatgttcattggcccccaacaagccataatgggaaaacaggagaagatcatgttgatattatcactttctacaatgaagtatttattcctgctgtcaagcctttgttagtggaggttggacctggtgctagtccaaagaggaaagaagagggaaaaggtccatacccagaatcccctcggctagctcggtttccgaaccttcctgacatgtctccaaagaaggtttctgctactcataatgtatatgtctcgccactacgatcatcaaagatggatactttactctcaccaagcccaaagagctattatgcatgtgtcggcgagagtacctatgcgttccaaagcccctccaaggacctgaaggctatcaacaaccgcctaaatagttggaagaaagttagcggacgattgaacttcgacattgtcagcgatctggtcgttgccagtagcctcaacggcgttcaaaatgccaagcccgcagccacggaagtggttcccaccaagacaccggtgaagtgcgagccatctgaatcgtgatctactctgatgctgcatcaccaatccagtgtaacatattataaatggttaggtgtcagatgttctgatttaggagtgtttgaatgcactagagataatagttagttagctaaaaattgttagtggaattagctagctaactattacctaatttgctaaaagtagttgatagctaaaatattagctagactgtttagatgtctcaattttagcagctaactattagttctagtgcattcaaacattcccttagatattaggtggccttatttctgtttgtatttttgacatgtaaacatctttgtgagcagctctaccatctgtaaaatataagaaagctgctctaagagctcccataacccaactctctttgtaagagatagataagtacgatagtcatgtaactttataagttttgaaaaggtctgtaaatacaaatgatcattgtcaattccgtacagttgtgaattgcttgttcatg

SEQ ID NO: 40623 - DNA, 2744 bp, Zea Mays
cctgagtccaccccccgtccctttccctctcctacctccacctccacgacaacaagcaaatccccatccagttccaaaccctaactcaaatgctcgctttgactgcctcagcctcatccgcttcgtcccatccttatcgccacgcctccgcgcacactcgtcgcccccgcctacgtgcggtcctcgcgatggcgggctccgacgacccccgtgcagcgcccgccagatcggtcgccgtcgtcggcgccggggtcagcgggctcgcggcggcgtacaggctcagacagagcggcgtgaacgtaacggtgttcgaagcggccgacagggcgggaggaaagatacggaccaattccgagggcgggtttgtctgggatgaaggagctaacaccatgacagaaggtgaatgggaggccagtagactgattgatgatcttggtctacaagacaaacagcacctaactcccaacacaagcgttacattgtcaaagatggagcaccagcactgattccttcggatcccatttcgctaatgaaaagcagtgttctttcgacaaaatcaaaggtatgttcagccattgagtacaaactgccgagtgccgactaacaaaatgtcataacattgctagtatcaatgcctaccatcatcaattgaagtagtttgttagttactttaaggtaactacttgataaattcttatattcctccatttatttttccttcaagctatgtgtttatgatctgcggtgattatgtcattttattctaaaaaaaactcgacctgcggagggtaagacaacccctggacattatattaagaagaccttctcaagtgggttgagaaaaccctcaaacccctgctccacccatacacagcggcaccgtagcccatgtgagaatgacagcgattggggccatgcattagacctgtgctttggcgtgggacggacgaggggatttcccccgaacccctgccgtagcccatgtgagaatgaccgcaactagggccggacattagacttgtgctttagcgtggaacagatgaggagatttccccccgaacctctgccacacccatacacaacggcactgtagcccatatgagaatgaccgcgaccagagccggacattagacatgttctttggcgtgggacagacgagtggaatttttaaccttagattgaaattcactctcacagggagttgaactcaggacatgagggtgctactcagaccacgtaaccaactcagttagaggccttctgtctgaggagcacttgagtgagagtgttgggagcttctgtgaacgccactttggaagagaagttgttgactattttgttgatccatttgtagctggaacaagtgcaggagatccagagtcactatctattcgtcatgcattcccagcattgtggaatttggaaagaaagtatggttcagttattgttggtgccatcttgtctaagctagcagctaaaggtgatccagtaaagacaagacatgattcatcagggaaaagaaggaatagacgagtgtcgttttcatttcatggtggaatgcagtcactaataaatgcacttcacaatgaagttggagatgataatgtgaagcttggtacagaagtgttgtcattggcatgtacatttgatggagttcctgcactaggcaggtggtcaatttctgttgattcgaaggatagcggtgacaaggaccttgctagtaaccaaacctttgatgctgttataatgacagctccattgtcaaatgtccggaggatgaagttcacaaaaggtggagctccggttgttcttgactttcttcctaagatggattatctaccactatctctcatggtgactgcttttaagaaggatgatgtcaagaaacctctggaaggatttggggtcttaataccttacaaggaacagcaaaaacatggtctgaaaacccttgggactctcttttcctcaatgatgttcccagatcgagctcctgatgaccaatatttatatacaacatttgttgggggtagccacaatagagatcttgctggagctccaacgtctattctgaaacaacttgtgacctctgaccttaaaaaactcttgggcgtagaggggcaaccaacttttgtcaagcatgtatactggggaaatgcttttcctttgtatggccatgattatagttctgtattggaagctatagaaaagatggagaaaaaccttccagggttcttctacgcaggaaataacaaggatgggcttgctgttggaagtgttatagcttcaggaagcaaggctgctgaccttgcaatctcatatcttgaatctcacaccaagcataataattcacattgaaagcgtctgacctatcctctagcagttgtcgacaaatttgtccagttcatgtacagtagaaaccgatgcgttgcagtctcagaacatcttcacttcagatattaacccttcgttgaacatccaccagaaaggtagtcacatgtgtaagtcggaaaatgaggttaaaaactattatggtggccgaaatgctcttttttgttttcctcacaagtggcctacgacacttgatgttggaaatacatttaaatttgttgaattgtttgagaacacatgcgtgacgtgtaatatttgcctattgtgattttagcagtagattctttgccagattatgctttacgcctttacagtgacctaggagtcaagggccccacatattatatttattt

SEQ ID NO: 40624 - DNA, 1791 bp, Zea Mays
tgctggaactaatgtgtaagtttttcataatgctgactatagttgaacatcatgaactaatgctgtgtgtcttcgtgcagcctcgtctgtttgttggtagggggatgcatgaaagtgctttctcacttttcatgtacaccatgttctggattgctcttctcttgataaagtttgcatttagctactacgtggagatcaaacctcttgttgaacccaccaaggttatcatgaagacccccatacatacgtttcggtggcatgaatttttcccaagagaaaagagcaatatcggtgttgttattgcaatttgggctccaatcattctggtatatttcatggatacacaaatttggtatacaatcttctccactctacttggtggaatttacggtgctttccaacggctcggagagattcgtactctggggatgctgcgatctcgctttgattcaatacctttagcctttaactcgtgcctaattcctgttgaaacatctgatgcaaaaaggaagaaaggtctgaggtcttacttacacaatcgtttcaaagagatggaacatgctgacaaggagaatatagcagcaaggttcgcacaaatgtggaatgaaattgtcaccagctttcgagatgaagatcttatagacaatagggagaaggagctgctacttgttccttatgtgtctgatcggacccttggtgtcgtgcagtggcctccatttttgcttgccagcaagatcccgatagcagttgacatggctaaagatagcaatggcaaagaccgagatctgagaaagaggcttgacaatgattattattttaagtgtgcaattgaggaatgttatgcatcatttaagaatatcatcaatggccttgtacagggtgaaccagagaaaagggtcataaataagatatttgtagaagttgaaaaatgcatctctgaggacaaagttattgcagatttgaacatgcgggccctgccagatctctacttcaagtttgttgagttggtaaactacttggagaagaatgaccacccaaacctacctagaaattacatgagaccaagatatgctggacaatatcattagcttggtcacaaagagggcaaacagtagggtgtggcaagccacgcttcgcaagatgttcttttgtccagcatctatctattattctctgcaagagcttttccaaatctgcttccatggtgcaaatctagtaccgatgaaaaagcatcatgcgaacgctcttgcagtgcgatggatgtgactcccgatggggagtgcgctcgcccgggtttgattcctatctagatcaatctggatgtcgcatcggggacatttctcccgaggggaccgagtgtgcctgcctgggattgattcctatctggatcaattcggatgttgcaccggggatattttccctgaggggaacgagtgtgtggtgtggggagtgcgctcgcctggatttggttcctgtctagttcaatccagatgccgcaccggggatatttctcccaaggggaccgagtttgctcggtgggtagtgtgtccctgtaggtttgattcctgtctggatcgattcggatgtcgcaccggggatatttcccccgaggggaccgagtgtgtggtgtgttaagtagtataggtgcatgtgttgcttggtaagtgtgttatgtgatttcgtggccaatctcatttgtgtctgagcgtgcagtctacgtgtgtgcccatatacgagtcagcacgggtgcccatatacgagcgttagatgatagggcaacaatgttttcga

SEQ ID NO: 40625 - DNA, 518 bp, Zea Mays
ggttttaatagataccaattttgaaagtaaacataccaaaatatatcaactaaaatttttcgaaaggtggtggtgcggtccttttgctttgggctaatactctctccccctttggcattaatcgccaaaaacggagactttgggatcccttttaaactttctcctccattggtaaatgaaatatgagtgaagattataccaatcgaagagtggtgtggagtgacggcgaagggtaaatgataccgatagagtggagtggaagccttgtcttcgccgaagactccatttccctttcaatctacgacttactatagaaatacacttggaaacacattagtcgtagatataaaagagatatgatcaaaggtatacaaatgagctatgtgtgcaaagtgtcaatcaaagtttcgggaatcaagtatattttgctcattcctgagtttgctaaaggttttctcatctaatggtttggtaaagatatcggctaattgttctttgctgctaacataggcaatctc

SEQ ID NO: 40626 - DNA, 2520 bp, Zea Mays
caacattgagtcacaaaatgcatcaggagctccatgcaagatcaaaattcgttttgagttgcatttcttatgaatcagtctgcggagaatctgtttggctatcctgcatcagaagcccttggtcaggacgccctcatgcttctggttgattctggtgatcacaatgtggtgaatgacattttccgacgtatttctatgggtgaaagttggactgggaagtttccagttaagagcaaacaaggagatagattttcagctgttgccaccaacacacctttctatgatgaagatggaagtttggtgggtatcatttgtgtttcaagtgattcccgccacttggagcagatattttgtaagcctccaacctctgcaaggcctcaatcagaatcatctaggacatcttgtgatgggagttgcagcaacactagtcgcagaatcaatttgttgaacagaagtccttttgatcctcagatacccctgcaaagcacttttgcatccaggataacgaatttggctaccaaggtcacaaataaagttcgttctcgggtcagcacagacgattatggcatagaacgggaaggtggcagtggtgagagtcattgttcggatcgtggtgcaaaggaagaaccaacatctagcggaacaaatacacctagagggaatgcaccacatggtcccttttctacagatgagaactcccctgggaaatcaacgaacccaagcagtgatgaattagaaggaaaagtaggtctgcacaagtttttgagttcaaaggcagaggcactactgaacaagaaagggatatcatggccttggaaagtgcgcgagaatgacggacctgatgaaagaaatcatgtgatattgttgcatggagaccaagagaatgttatgaatcatcagaaggtttcagattctagcatagctccagattcccaaggcgctgaacacaacctacctagcaaaaatgaggcatcaggttcctggtcctcttacaacaataacagcacaagcagtgcaagcagcacaggaagcactaatagcagtgctctctacaaagtagatcatgaagcggattgtctggattatgagatcttatgggaagaccttgtcattggagaacaaatagggcaaggctcttgtgggacagtatatcatgctttgtggtatggttcggatgtggctgttaaagttttctccaggcaagaatattcagaagatgtgatactgtcctttcgacaagaggtgtcccttatgaaaaaactgcgccatcctaacatactgctcttcatgggtgcggttacgtctccacaacgcctttgtattgtaacagagtttctccctcgtggaagcttgtttcgcttacttcaaaggagtgctaccaagttgggtgtgagacgacatgttcacatggctttagatattgcaaggggcatgaactatcttcaccattccagcccacctatcattcaccgagatttgaagtcatctaatctgttagtcgacaagaactggactgtgaaggtggcggactttggcctttcacgtctcaagcgcgaaactttcttgacaacaaaaacgggaaaaggaacaccgcaatggatggcgccagaggtgctgcgcaacgaaccttccgatgaaaagtctgatgtgtatagctatggggtgatcctatgggagctcgttactcagaagataccctgggaaaacctgaactcgatgcaggtcattggcgcagtaggttttatgaaccaaaggttggatatcccaagcgaagtagatcctcagtggagatcaattatcctgaactgttgggaaagcgacccgcagcaacggccgtcgttccaggagcttctggagaggctccgcgagctgcagaggcgttacgccatccagcagcggaacgcgaagaacagcgtcgaggagtgaagactgaagaatgcaatgcaactctcccaagcggcggcgggcttgctttgaagcattttgcgagccagcagcatgccagatctagagaagggcctgagcctcctgtactggggcctgggggctgctaaggctggaagaagtatgttctacagacgaggcgccttctgtcttcttctttttttttaaaaaaaaagaaagttcttccccatggcaattgtgactgtaattaatttctgggtcctgacagcaagggtcagtagggtagcgagtgagtagtgactgagctcgggcttgcttgctagcgcctctgggttctgattcttgacaacgcaaatgcgtactacgtggttaacagtaacatccaatccagcctccagtttctggcaagggcatgcatgatgatgtgtagattgtctgttctgataggtcagtggtgtgtacatgtgatccccaaccgaacgcattcgactgcgtcgcttcgatatctggttggtcaggttacactgctgaatacgggtgatagatccttcttccctagcaagtagcaatggctgccgaacaagaattcttatatttgagtgctcgaaattaaaa

SEQ ID NO: 40627 - DNA, 1260 bp, Zea Mays
cttctcccctcgcgtgtggcgtggacggtatacctgctccgccggaatcctcgcgcgggctggttgaccgcgagttccgcgggactcacccacctatgcgccgtcgggggggataaagggggagcacctcgtccccacgttctcccttccatccgccggctttacacaaccagagagtaggggagagaaagatcgggcgctgccattgccgtcgttgactctcatctccatcaccgctttgtgtctgtgacccgatccctggtgttcgggtgtgggcgtggatcgttctcggggaagaatccgggtgcgtgggtcctcggggccgggagaattcctcgtcgtcgttacaccgccgctgcggaccgcacttcgccgtagcctgcttccgccgccgttctgtgcatgttgtaagtccctccatggcattctctgttaagcatatgttgcgtaggaagtctcgggtgggaattggtccgttagcttgccatgttggccgtaccccggtgacacctcgccgtatttccggcggcgctgccgctgttcgcagggagtaagacgacgatcaggtgccgttagatctctttttgatggctcggatgtgatagtgtgtagcgtttcagataggggtaacaggaaccgttcgatcgggatcggatgtgagtcactcgctctgggcttcataaatcagggacgtaggatttggatccgagggaccgcgttgcgtaccagttcgcgcgggtgtagaatctaatcggagtcgttcggacggctctgaatgaaggatgccccttcggcctggcgtttttacataaaaaaccttatggaattagataatgaacccgcgattcagttctgatttgtctgagtcttaagaatttttaccccgagactcctgcgcttcacagtatttggcgcccagtccagagaacagaaaaccagagaaagtaaattagaaatagatttttagtgcaacaataattgctagaacttgtataaatcatagaaaattcatgtgagctccaaattgatccattccggtttctaaaattttgtaatattattgtttatcacctagagtctcagttttgacatgaaaacagtagtaaagttaatttctcgcttaatcatatctcaagcacataaaacctttggaaattcataatttaaaatccataactccaaaattaatgattcttatgcctatgatcttattttaatatgtagattattaatatgtattttgtttatatgcttggtgtg

SEQ ID NO: 40628 - DNA, 1733 bp, Zea Mays
ccccattctcctccgtcctctccctctcgacttggcgacaggctctctctcctacccgagaggacagaccgcaccgccacgcacccggcaccccctctcctctctgccgtcatgggacgtgccgcgccgtcttcatcgccgagctcgccgcagctcgggcgcaagcgcacggcggcgcccacaccggagcccccgacaccgcagcgccactgctccatggtcgacgtcatgcgccgctcgcgcgccgtcgccgcgccgccccctgtcgcacgcgcgcgggtgtacacctactacgagacccttctctgtgagacctgcggcctcggtgaccgcgacgacgagatgctcctctgcgaccggtgcgaccgcggctgccataccttctgcctccgccccatcgccgccaaggtccccatcggcccctggttctgccccgtctgcgccccgccgactatggcccccaagagtttcccggtgaagcagaccaagatcgtcgatttcttccggattcagaaggatgagcaggatgcacaggccgccaaatgcaggctctcccaagatggtagaaggcgaaggaagcgttctcttgttatgcacaagaggaggaggaggatactgccatttgttccatctgaagatggagctagaagactcaaacaaatggcgtctctggccactgctttgacgtcttccaaaacaaagttcagtaatgagctgacttacatgcctaacatggctcctaggtcttccaatctggcaagattggaggtaggcggaatgcaggttctgcccaaagaggataaggaaaatatagagctgtgcagaaccatgcagcaaagaggcgaatgccctccacttctcgtggtctttgatccccttgaagggctgacggtgatattaaggatatgaccttcctcgctgaatatactggggatgtcgattatctggagaacagggaaaatgatgattgcgactgtattatgacgctcctcctgccagctgatccttcccaaatgctggtgatttgccctgacaagcggggtaacatttctcgcttcgtcagtggcatcaacaaccacacaccggatggcaagaagaagcagaatgtcaagtgtgtgcggtacgacatggatggagagagccatgttttgctggtcgcctgccgtgatatagcttgtggtgagaagctatattacgattacaacggatacgagcatgcgtatcctactcaccatttcttctaaacaccccccccccccccaaaaaaaaaaaacagttttgacctgaacagtaaggtagtagtaaaggaggctgggtgaaattgatagaactttgccaactaaaaaccaacaacatatactgaagagatcctaaaatgatagacattgataggtgcttagggaactagtaccctgattcaattacaggagccaatgaagaggaattgccattgtctctgctctccagatgcatcttcccattcatattctttcttttttgttatataagaaaatgcagaggaaaaagaagaagaatgttgcagttgagttaactgttggcctgttgctggttcaaggcacatggccgtctctataatgttctgtctactttcaccgtttgcggttgtgctccttacacacagtatgtgtgtgcattgatgtgcacttgaggctaggatatcacaaaagaggttcaagtgatatcacactgttttagagtttgcagatccgaaa

SEQ ID NO: 40629 - DNA, 164 bp, Zea Mays
gttcctaacccaagtcccgatttaagtatttccacccttaggattgtttgtgttccttaggatgaaaagagcatcacagggaactttgcagtaagtcccaccatgctcccaatgaaaatatattcttgtaggtagaagtcatccttcctcaggataacccctga

SEQ ID NO: 40630 - DNA, 2365 bp, Zea Mays
ctaggcaacatggtttttgaattaagttcttcacaagggccagaaacaggattatttttgttcagaaagctggcactggcaatgatctttcgagagttttatcatggggaggtggcctaggtgctgttgagaagcaaggtggcctttgcacaattttacatgacatagagcatgcagcagtcactatccttgatagatggaaggtgacagtagaagataagaaatcaaagaatgtgcttctagtaaagtacatgaacaactatctcggtaggtacacagaaacttcgtttatcggcgctccttgtcgaataaccttagcttactatggtgacaggtatcggttgtgatgcaaaagttgcccttgacattcataatctccgtgagggaaatcctgagaaattctacagtcagattgcagtatcctccgatacttcctcacgtatattacagtatcacttgtactttttttatagatcgaatgttcgtgtaattaatatgtatgtagcaatgaaacaaatataggaagtatcaggcctgctatagatattcagaacactgccaatctacgatgtacagagcaatctgtaatggtacgactaggacacaaaggagcaggtccagatctgaaggtaggtaggtactgacctcgccggagcttgatcttcttcttgtgggtgatgccctgcacggctgcacggagatccggccttggagtcgtccggcggtctgcgtggccttgggtgatgccctgcatggagcttgatcttcttcctgttcgggtcggcggtctgcgtggccttggcgtcgtccggcgcgaagagcacgacgtcgatgccctgcacggagatcctgccgtcggtgtagatgtccgggtccaagaggtagcggatcttgtgcggcagaaaccagaatgaaacgtaccttgtgcggcagaaaccagaagcaaaccggaatcaaacgacggaggcgctcagggcgttggagcgacggaggtgctggtgcatagcgaagacgagacgaggcggcggagaatcgcctggcctcctaaggccagggttgtttccgacgggaaaatggaacgaatatctgcacgagattgggctgccaaatgacacacatgaataatccgaggacaattttctggtgggctttctcccaggagaaaaggccaggaaacccgctggattttgggctgccaaaccagtcctgatatgtcttttttcccccctctagcgcgtctcagtaagacattaaggactaacgcggaggctttaaagagaatctttagttattaaatattaagatgactcttatgtttctttgttgggcttcatcagttcttaaataaggtgctatatgcgagggaaggggccaagagcatcattgacagggcttttgtggacttaccatggcaagttcggttggaagtcgatggcaccgagatcgagataccagaggactcggaaggcgtgcttgtcgcgaacatcccgagctacatgggaggggttgacctgtggcaaaacgagggtgaggatcccgaagattttgacccgcagtcgatccatgacaagatgctcgaagtggtcagcattacaggagcatggcatctgggaacactccaggttggactttctcgggcgcggaggatcgcgcaaggccagtcgatcaagatacagatgtttgcccctttccccgttcaagtcgacggtgagccttgggtccagcagccctgcacgctcaagatatctcatcacgggcttttatgttgaggagagcagttgaagagccactgggtcatgccgctgctatgatcaccgacgtccttgagcatgcagagtccagccatgtaatcactgcttcgcagaagaaagccctcctccgagaaatggctctacggctgtcatgaagcaagcgccgctcattcggacgtcgcagaagaacggtttcctgcctctgcctgcacatcggtggttagtacgaggatctgtgatctcaacatgagctcgatcatgttgttagcagaagatacaggcccggagggacgtgtccacgtgcacatagagtttttttttttggggtcatgttcacgttttggaaatagcgaggcaatgttgtgtgcagctatgtatggtgtgtagacctcgggtaagccagttccttccttctgtgcaaaactagttacgcctgcggcctgccattccgtgttaggttgactggatggatttttagggctgcgtcgctgccacttcggttggtgccccatatgtaaacgagatgggcttgaatgcttggttgtaacctttttttttaatgataggagctctgtcctttaattaagacgaaagaaaacatatgtacaagaaga

SEQ ID NO: 40631 - DNA, 2609 bp, Zea Mays
gaggaaaagcaaagccaaaggcactccactccactccaccctatgcactgccgcccctgcccgtcccagctctcgctcgtctttctcctcctcctctcgctcgcacccatcatttcggcactccccttcccggagccagctcttccgatggcgtgcagcggcctccgcctctcgctccccgccgccgtcctcgccctcctcctcctcccctccgcgctcgcttccgagcccctcaaccccgaagtgcaggcgttgatcgccatcaggcaggggctggtcgacccgcacggcgtgctcaggagctgggaccaggactcggtcgacccctgcagctgggccatgatcacctgctccccgcagaacctcgtcatcggcctgggagtgccgagccagggcttgtcggggactctgtccgggaggatcgccaacctcacccacctcgagcaagtgctgctgcagaacaacaacatcacggggcggctgccgccggagctgggcgcgctgccgaggctgcagacgctggacctctccaacaaccgcttctccggccgcgtgcccaacacgctgggccgcatcaccaccctccgatacctgaggctgaacaacaacagcttgtccgggccgttccccgcgtcgctggccaagatcccgcagctctccttcctggacctgtccttcaacaacctcactggccccgtcccgctcttcccgacacggaccttcaacgtcgtgggcaacccgatgatatgtgggagcaacgccggcgcaggggagtgcgccgccgcgctgccgccggtcaccgtacccttcccgctggaatccactccgggcggcagcaggacagggacaggggcggcggcagcgggcaggtcaaaggctgctggcgcgcggctgccgatcggcgtagggacaagcctgggcgcctcctcccttgtgctcttcgccgtgtcctgcttcctctggcggcgaaagcgccggcacacgggggggcggccctcctccgttctcggcatcatccacgagcggggcggctgcgacctggaggacggcggcggcggtggcgtggtggcggcggcggcgcggctggggaacgtgcgccagttcgggctgcgggagctgcaggcggccacggacgggttcagcgccaagaacatcctgggcaagggcgggttcgggaacgtgtaccgcggccgcctcgccgacggcaccacggtggccgtgaagcggctcaaggaccccagcgcgtcgggcgaggcccagttccgcacggaggtggagatgatcagcctcgccgtgcaccgccacctgctgcgcctggtcggcttctgcgccgcctcgggcgagcgcctcctcgtctacccctacatgcccaacggcagcgtcgcgtcgcggctgcgagggaagccggcgctggactgggcgacgcggaagcggatcgcggtgggcgccgcgcgcgggctgctgtacctgcacgagcagtgcgaccccaagatcatccaccgcgacgtcaaggccgccaacgtgctgctggacgagcaccacgaggccgtcgtgggcgacctgggcctggccaagctgctggaccacggcgactcgcacgtcaccacggcggtgcgcggcaccgtgggccacatcgcgcccgagtacctctccacggggcagtcgtcggagaagacggacgtcttcggcttcgggatcctgctgctggagctcgtcacgggccagcgcgcgctccagctcggcaaggcctccggcgccctgcacagccagaagggcgtcatgctggactgggacctgggcccacactacgacaggatcgaggtggccgagatggtgcaggtggcgctcctctgcacgcagttccagccgtcgcaccggcccaagatgtccgaggtggtccggatgctggagggagacggcctggccgagaaatgggaggccacgaaccggccgggcgtggccgcgggggcgccgtgccacgacgcgctcggctacgaccaccgcaacgactccaacggctccgtcttcttcaacgacttccacgacaacgacagcagcctcagcagcgacgaagcgcggtcgatcgacatggtggaggagatggagctgtccggaccaaggtagcaagcaagcagcccttgccgctgggcgggaagagccactcccttgatatgatagcatcaaattcaaaattcagatgttccgagagcttcaaaaaaaattacaggtagagagagagaggtgtcgagttaagagttgttgcgagtcagtttggaattaaaggtattcctaggtgctttagggtctagagttcagaccacagttgtgtagtttctggtggagccgtccttttccctttgaaaaaaagatgtaaagaaaaaggatggcttctcttttgcttcttttcacaggtttctttttcttttgctgctgctgctgctctccctgctgatccagtgacacaagcacatgcagcactgcagtcctttggtattccggtccactgatctagggtaaccttttgcagcgcaaggatgtatgtagggaatgtgttgcaagtagcgaggcatgcagtcattttgactgcttttgtgacctgtaaaggtcac

SEQ ID NO: 40632 - DNA, 3606 bp, Zea Mays
gaggaacttattgagggtatttggagaaataagaatatgtgttcttaatcgatgctgaagatgccatggaactaaagcttacctgggaagaggctcaagagttgttgcgccctgctcccactgcaaaaccaactgttgtgatgattgaggactatgaatttgaagaatatgatgaaccccctgtctttgcaaagagatcaattttcaccatccgtgcaacaggggaacaagatcagtggattcaatgtgacgactgctcaaaatggcgccggttgcctcttaatgttattgttgcgcccaaatggacatgcaccgacaactcatgggactcaaaatgctgctcctgctctgcgcctgaagagttgaccccaagagagttgcaaagtgttctgcagcagtatgaagaaatgaggaggcgaaagggcagttatggtctgaagctgaacgtcgctgaaatggatgcatccagccttgatgctttcgccaccgccgcagtatttggcgaagtcgggaaccaaggcagcgcctcagtggcgacaaccacaaagcacccccgacatcgccctggctgcacatgcatcgtgtgcatccagccgcccagcggcaagggcccgaagcacagccccgcgtgcacctgcaacgtgtgcatgacggtcaggcgccggttcaagacgctgatgatgaggaagaagcagcggcagtcggagcgcgaggaggcggaggccggcaagaagatcgcatgggtgaacagagacgagcctgaggggagcagcctgtcgagatccccgcagacgcttgacagcacccgagacaacagtgatgtgacggcgaccatgttggacaaggtgtccgacgtgaacaagcaggggcacatcgacgtcgacctcaacctccaccctgctgcccctgccgtccaggctgcgcagcagcagccccggccggtgagcatgatgggtctcttggaagtggcgggccggccgcttgacaactacatgaagcagaatggcctgacgagcctggtgggggagcaaggtggtggcagctccagcacggccacggtccctcctccggctctggtggagagtgaggagcggacgtccaacgagggcctcgtcccatcagcatcggcagagcgggaaccgaacgccatggccgtcgacgaggctggcgagaaccagcaggacaaggctgccgacgacgacgacgacgccgtcgctgccgccgctacttgacgtgattttttttcatggagctgcttctcctggaggctgggagtaacttacgtgtacgtatgaggcttgtgttggttggtgttgtaatctgacgcttaaacattggcttcaataactcatacagagtgagaacctgaaagtatcagtctagagcaagttctttttactggtgctgaaagtatcagtcttgcgcaacccaaaaggaggaaacaaaaattttagaccctccaaaattgtactcccctttggtatgtacaatctgaagtggtaacaaaaatgcactacttttttctaatagaactccgatccaagacatgcttgttttttgtttaggaaaaaaggctaggttcacctgattgtttctgatcttcttccatgtaatattttaacacatttttctttcgaacaaaatataactcagctgtttcaaaaccgtcaaaaaaaaacaacttatgattagctgctcctttttttactgctccaaggctggcctgtgagcaacattgcacccccaccacaggtcaggttcatccagcccatttattattctaaaaaaaaactctactccaaaagatgtgtccagcccagtgaagcccgaaaggaaagaagccagccgctcccgtgggcgacgacatggtcctgtgtccgtgtgaggtacacatgactacgggggccccacctccttcgttcccaatcccagatcccgcactctctttcagaacccaacacgccactgcctagctagtagctagcagagcagctagccaagcaacccagccgagtagccgaccagagagagcgagagaggcagagaggagcggacctgcccgtcgcaatggcgatgccgccgaagcccggcgacccgccgcagcgctcgcctgcgcggagccccaacctcaacctgccctgcccgctgccgccggtcccgggcgggccgcctgcgccgtcggccgccgggttgcccccgccgcgcgcgagtcaccaccgccgcgccagatctgaggtggcctttcgcttctcggacgacctggccggcggcgtgggcggcggcttcgacgagatcggctccgaggacgacctcttctccaccttcatggacatggacaagatcgccggcgccgaccgcgaccgtgccgccgagacctcctcgccgccgcgcccagccaagcaccgccacagcgcctcctttgacggcttcgggatgggggctgccgccggtggcctggccgggcagcaggacggcggcggaggcatgtttggagaggtgatggaggccaagaaggccatgtcttccgagcagcttgccgagctcgctgccatcgaccccaagcgcgccaaaagaataattgcaaacagacaatctgcagcacggtcaaaggaaagaaaatctagatatataacagaactggagcggaaggttcaaactcttcagacagaggctactactctttcagcgcagctcacactattccagagagacacaactggactttcggcagaaaatgctgagctgaagataaggttgcaggccatggagcagcaggctcaactgcgggatgctctaaacgatgcgctgaagcaagaagtggagaggctcaagatagcgacgggcgagatgccgaagtccaacgaacaattcaacatggggatgcagcacgtctcgtacagcggcccttctttcttccatctcccggagcagcacgtagacattcagctgccgcaccatttccagcagcctccgcggaacgtccagatgctgtcccaccccaactccctctcggatatggcgcagcaagactcgcttgggcggctccgggggctggacattggaaaagggtccatggctatgaagccagaggcagaggtcgtggtgaagtcagagggcagctctgtatctgcaggtgaaagcaacaccaccttctagctatacaatacatctgccttccaagaagcctccgtttggtttagagttcttttgttcatagtctgacatcctccttccttgagctgcttcgtccttctcagtaggcctattttttttattccattggttatatctactagttaacattggtcggttgccaatcgttgttgtcgtggtggctgatttctatagggacattgatgtgttggtttcgagtttgttgttgttgttgtgtgtgtggttggttgtttcgagctaggggctgaaagggcaccgagtgtttttttctccacctgttttagttttgttatagatttgacaacaatcgttatgatttctccttctggaaaggtgtacattgtgttgctatgctaatttgtagtgatatttttgatgattccaactgtaccctgctgtgcctgtgcgcgaagctgttgtttcagctgtgta

SEQ ID NO: 40633 - DNA, 2855 bp, Zea Mays
attttccacagcttctggaaacttgatagtttgtctagggaagcttcgagacctctggttttcgtttgtgcagttgcaggaatttcttatggtcatccagaaaacattcaggagaccccttttttctaagcctggactaccaagggagtgcaaaaccaagatatcaagtaacttcgaaagaagaggacacacaaaatgcagaccgcgaggggtggcaatatagtacagaaggcctttcaaagagcatgtccaagtcaaggtacatcaaagtatttggggttgatttgtcccctgataatgtggctgttgctattgtttacttcgtgcaaggagttttaggcctttcgaggcttgctgtcagcttctacttaaaagataatcttcatcttgagccagcagagactgcagttatatctgggttctcagccttgccatggttggtcaagcccctctacggttttatcagtgattccatccctctctttggatatcgaagaaggtcgtacctatttctatcaggcatccttggagcactttcatggagtttgatggccgctgttgtggatgataaatatagtgcagcactctctattattcttggatctcttgcagttgccatatctgatgttgtggttgattctatggtggttgagagagctcgaggtgaatcacagagtacatctggatctctccagtcgctatgttggggatcctcagccttcggaggagtcgtgagtgcatacttcagtggttctttagtggatacttatggtgtaagatttgtttttggtgttacagcacttctgccactgatgacatctgctgttgcagttcttgtaaatgaagaacgcttacctttggggaaaagttcagtctcactttcagtttcaggttcagaattaattgagagctctaagcaacgtatcatgcagatttgggattcagtaaagcaacccagcatactcctacccaccttgttcatattcctttggcaagcaacaccgcaatcagactctgccatgtttttcttcataacaaataagctcgggtttactccagaatttctaggacgcgttacgcttgtcacatctgttgcatccttactgggaatcggagtgtataatttgtttctgaaggaagttccattgaggaaaatctttcttgtgacaacagtcttaggttctgctctcggaatgacacaggttcttcttgtcactgggctcaaccggaagcttggcataagcgacgaatggttctccattggggattctttgattatcacagtccttggccaggcttcctttatgcctgtcctggtgttggctgcaaagttgtgccctgtgggagcggaagcaactttatttgccactttgatgtccatctctaacgccggaggtgttgccggaggtctggtgggcgcgggtctgacgcagttactgggagtcagcagagacaacttcgaaaaccttgctctgctgatcgcgatttgcaatctcagttccctgctacctctgcctcttctgggtctcctgccagatgaatcccgtaatgcagatggtgcacagaccaaaaatgactgatgcttgtatatctccacgcgtctttacaagacgaaagggcatacacatacactcatcggcacaaagcagcgcagctgatgacgtgaacaaaacatggaagctgatgtataggatgtattatctatgatgtatagtaagtaacgttagattaattatgaaacatatttgtaataaatttaattgaaagtataaatactccttttcataaaacgaggtttacatctttttttcagaaggaggacatatcacagacgcagctaaaaaaaggcgtatgtaacatactggtaattgacgcgcgccttgcgcacgtatataataaaaaaaatgtgtgtgtgaggtgggagtgagactcagatagctaaggtaagtcagcatctgctgttgttcaatggcaatctcagcaggctagcacatcataatatgctggtacacgctgatttggtacgtccgtacgttagtgtttacaattatttccagctctgtttccatacatattctcactctagagatgatcatttgcttctgcatctcaacaaaaaatcaaagaaataacaataagtgttattacaccaatcatccattcaagaaactcttttctataaagaaaacatgattatttccagaacatgtctgttgtctcatgtctggttgcaatatgtacgtacatatggatgctatttagatcagagtgaagcgctattgtgttccgcagccccgaaaaccatagtaagcaacttgcattcaaagcaatggtagtacaggtacaatccattaagcaagcagaatcacacactcaggtttgaaacttcctatttcaaacgtgaaagcttgtagagatatctacggatggatgccatctattggataaagtttcacttccccattttcacattttatagtcatttatcgaacaatcagcaatgttggggaccttcggcgtccgaaggtcctcaaaaacatgatttaatagtgtttctggagtataatgtgcaaacaggtatcttcggactcgaatcggtatcacagagggagaagctcaaagcatacgaaggttgatacagcaccgaagctgtgagcagaaaagcttcggcatggtggcaggaaaggaaaccgacttaaagatgaaaaggctattcggacctcgatggattactatagagttattgtcagatgtaaagggcataaatgtaattttgtaagggctgtgtcccgtgtctataaataggtgaacagtatccccgtactgttcacgctgacttggcatttgcttttgcg

SEQ ID NO: 40634 - DNA, 1973 bp, Zea Mays
ggattggaaccacggtcacgaagcgcagcccaagccagccccatcccccaccccccatttccccaataggccaaccccgtctccctcctcagcaacgtgctcggtttcttcctccctcgaatcggctgcaccccgtgccgcgatacgaaaacccaccaaaccctaaccctagctgcagtgccactaccgcccgcttgcccggtctccggagaggaagccgacccaagcaacgatgccgtccgggtcagcgacgcaatttcggtacacgcagacgccgtccaaggtgctgcacctgcggaacatgccgtgggaatgcaccgaggaggagctcgtcgagctctgcaaacccttcggcagggtcgtaaacaccatgtgcaacgtcggcgccaaccgtaaccaggcattcgtcgagtttgcagatcaaaaccaggcaatttcaatggtgtcctattatgcttcatcttcagaacctgctcaagttcgcggtaaaactgtctatatccaatattcaaacaggcaagaaattaccaacaataaaggcactggggattcttctggcaatgtcctacttgtaacttttgaaggcgttcagcctaatgatgttaccatagaagtcattcatttggtattttcggcatttggatttgttcacaagatagctacttttgagaaagcagctggtttccagtatactgatgccccaactgctcttgaagctaaaaactcattggatggaagaagcatccccaaatatttacttccagaacatatcagtgcctgccacatgcgcataaccttctctgcacataaggatttgaatatcaaatttcagtcgcatcgcagcagggattacaccaatccttaccttcctgtgaaccaaacagcaattgaggggattgtgcagcccactgtaggccctgatgggaagataaaggagcctgagagcaatgtacttttagcatcaattgagaacatgcaatatgctgtgacggtggatgttctgcacactgtgttttctgcttttggtgctgttcaaaaaattgccatgtttgagaagaatggtggaatgcaggctctaattcaatatccagatataacaactgcagccgttgctaaacaagctttggagggacactgcatatatgatggtggttactgctcatgatgatagaagcagagactacactctttcagaccctaatgcgcagctgcaagctgctgcacaggcgccagttataagttctccgggagtggcatggcagaaccctgcatcagcaccagctgctcctttctatggaagcacggcggcttcaactcctgttggacaaccgcctgcttggaaccctaacatgcaggcccctggttttgcatctgcatcgacagcgtaccccaacccaccattaatggccaactccacgccttactatcctgctattggatcaagttcaggtgccccgccggtatcgtttcaggcttcacagcagaggccacagtatggcatgccccctggtgctccaccgcacgcaccaccagctggccaaccaatgtacttccagaaataagtggtttcgattcaatgttatcaaagagcattcacgcatattacctgcaactattgttgtccgcaaatgccatctggaatttttttggaagtgcattgtaactcttgtaacttacgagcgccctacgcaagaataccccaggctggctggctattaaaccgtcaaaaatagttttaacctattagcctgcgtggtatattgttatctcaatgccgagttgttttgatgcctcaagtgtttggaaagaaagtatttcgaaaccgtggttttggaatacagttttaagatgtcacgacatgactgtagtactggaatacagttttaagatgtcatgacatgactgtagtactccctctatagaactgtattttttatatcgttcttaacaatacgtgtttgatgattatctca

SEQ ID NO: 40635 - DNA, 178 bp, Zea Mays
acgaatgtcacatctttactatataataggagttatgtacaaaataaataaataaatacatcatatggagacaacgatccagcaatccaaagttgactgggagacaatgacctagacctctcacgaactcatcccagcattctccatgcgccacatccttcggtacatatccttgacc

SEQ ID NO: 40636 - DNA, 630 bp, Zea Mays
gagaaaaccttcgacagtgacccggtccggtgggtgtggctcgcttcctctctgtccgactcctttccttcattttcctcttctgacctccggcagcaccatggagaacgtcgccgcgaatccttccgctgcggccgccgccgcagggaatggcgtccaagcatcgggggccggaggggagcgcccggaggacgcgtcgaagcagaacctggcgcaggtgacgagctcgatccagaagacgctgggcctgctccaccagctcaacctcaccgtctcctccttcaactctgcctcccagcttcccctcctccagcgcctgaacgcgctcgtggcggagctcgacacgatgcagaaactagccgagggttgtaacatccaggtgccaatggaggtcgtcaatttgatcgacgatgggaagaaccccgacgagtttactagggatgtgctcaacagctgcattgccaagaaccagatcaccaagggcaagactgacgctttcaagagcctacggaagcatctccttgaggagcttgaacaagctttccctgaggacgtagaagcatacagggagatccgtgctacttctgctgctgacgtgagcgctagcgcttacgacccacctgcgggcgt

SEQ ID NO: 40637 - DNA, 2733 bp, Zea Mays
atgaggataagaacaagcgtgcacactgccgcgttctgccagccccgccccgcaacccgcagccgccccacgccgcaacccgcagccgccctggcaaccgcccgcatccgtggcttccatccggaaatctcggtcgcgatagcatcccgcaaccgccataatccccccaatctcgcgctcccctgtgctctgcggcctccacatttcacgcagccgatctctgctccctgcgccgtgttcgttcgcgaggttggggccgatgatggcggcggcggggcggactccgatttctgcggcggccaagtcggagacacaggcgacgcccggagaggcgctagcggaggcagccgggtcccacggctggctgcgcgagtacgtggaccgcctcgcgtcctcggcctcctccctctccgggcggtggagcgcgcggtggagccagggacaccacagccgcagccagagcaaccttgcgagattggggccagaacaatagctctatttgctatggaaccacctgctttggttttggatgtccagaataatgtaagtgtaaaataatctgggccatagaccgagtcaattgtgatgtggagactgacgaagttgtctgcattcacggattgaggccaagtcattcttttgtttgtgaactgcaaggagaaacatgtcaatgttgctcgatgtcaatggcggctggtgcatgcatgtatctttcctacaggtctacaattgcatgcactgcaaactaggcgtctgtagagcattaggtatgcatgtagaaggaaagtcctaatgcgatggtggtactgtgatgcatggtcaaggagagtaaggtttagttgttcgtttcagagaataaaagtaccagtagaggttcatccctcctgggcaggcaacgagctaactagataggcacctaacttaggttagtaagttttaattattaccttaacacaacatgatagcgcacatgatgatattgtaaagtattttggcaacaatggtctatttaaactccacagatttattggaacttgagctagcacctgtatgagtcaaggtaagaccaatttaattaattggacaagccgacaagctagcactctcctggagcataatctaaattgtgtacgcccttgttcaaacaattaatatagctgactgttttttaatattatcatttaacagagcctagacttttcaacgaaggttatggatttggcagcaggggaactcctggagattgtgcctcttggaaaaggcttctttcttgccaactatcctatttcaattttggattgaccattatcgtttgtgttcctttgtcctccctcttttacctcttgtagttacacaagaacaacttgattgtgctaaagaggcaatcgaatctacagttctgatgaacttggaatcaagggctaaagtaacctgtctctgtttggtcattatgctctaggatccttcaacttgacatcacaacaatcgttgaggaggtaaccaacttttctagactgcattgagattgtttttgtaccaaactgcaatgtgtgcttatctttgtgcttcaataaatggtgtatatattaggctcttgttcagttagtacgtctcggttttcttaaaatggtgatgttagtgtcttgtgagtaggtggagatgttctggggtcaggggtggtgatctgtgcttttcttttaaattatctgaagcataaccacacaaaagatgttccagagtttgccacaagaaagtatacatgctttttctgttaagtgatgattaatgacatgcttttctatgatgagcatagaaactatggattattctaggccaaattcaatagaggttctagagtctgacataggctatcattttggaatgcttttggacactcggtgtagatgttattttagtgtagcagtatattgtgtattgatgcccttcaatattggattatgagtcatttacttagtcattgttgtggtcaaagcaatatgatgaagaccaatatcatgctttgaatgactaaatcctgcatttctatgcaacgccatgctcagttttagatgagatccacttctccgtgttttcggctctgtttagcctgatactgacgaattcaggacagacaacaatagcagtctcgctctttgcgtccacaattatatttccagatctttatatttggtatatattattcttatgacagtcattgattatggtggatagtactttcattagttatgttcttgtatcttttttcctcatgttacatgcctgggatgtctaaagctgccatattggtctgattgatcttttagtgatatatagaaactgcaagatgttatccgtggacatctagaggtggcccatgcctcacggccaaagcagatcagatgagatttttttggtcttgtgtggttctttttaatctgctcacatgatacttcttattcattgccatccaatttaattaattgccctcgactgaattggttcctttgccattttacttaggaggataaaagaagacactaccttggcacatgcctgttgccacaatggacaaaagaagattagtgttgtgtgatattttttcattcctttgatctattgcatgctatttgtaccccaatcgacaaaatagatgagactcaattcaggagcaaatcaccagtcctgttcacaacccaattcactatggctaaaatatcaaacttatgctccttg

SEQ ID NO: 40638 - DNA, 1012 bp, Zea Mays
gtttatttattttctgtgtgtttattgtcatggtttaatcaatatttatgaagtactagcatcagtttagttatatgctagtaaatctgtattcttttatgtattacacaatatgatcaaattaatcttagactgtgttaatcttgtaagacaagtgccggagcaggagcccgtgaaagtcgggccaagcggaggccgtgctctcctcgttgtgttcatgaaaacgatgtcttggaatcttgtcttaggacagtggtgtccccaagatgatagtatgtcgatttgtacttccggtgaatgcatgtgtccttttccgatggaacatcaagtgctgccatgtttaggggctcaacccacgattgattgaacctcacttgtactttttcctctgtcccaaaaaataaaagtaagttccattttcatttcctaaaaagtcaaatactttaaagtttgatcatatatataaaaaaatcaatatctatatatgttgctgataaccagtactttattagattaaatattgaataatgtatgtttacaataaattcttacattaaaaatatggatgttgctgatgtttgcataaatctagtttaacttaaaacagtttggtctgcacgaaatctaaaactatagttatttgaagacggggtagcatataagcacttgcaaagtacgtaactgtgcagcatgctgatgattagcctaagagacatttatcatgtgaatattttacttatttggtccttttattcatggttggagagatcagaacatcagaagctttcaaggcaaaatttgaactagatcagaattcaactcaagtgcagttgtttggggcgcgcggggcgttgtctggatcgtatgtctgattttgttaacactggttagcgtgttatcttctactttggaatagatacgtgtctaaatgctgcagtacacatttatatatatggagaggcatgcatttaatctcgtgacctacatgttgatctagcaatcaggttactga

SEQ ID NO: 40639 - DNA, 1936 bp, Zea Mays
aacaattttgcgctcaaacaagtctattatatattttccagtagattagagagcacaaaagggtggacgcggaagccacgcacctcgccaccagaaatttcttccccagggccacgggagcgggcacaacacagcacagggccagcagccaggacccaggagggcgagagagctcccggccgaaattccccaacccctcggcaccgcgtccgcgtcccccgtgcgcctgcccacaccctacaccaccgaccaccgtctccgccgtcttcgcttcgccccccaccccgcgaccgaccagcgccatgcgcatccgccgctacgccgcgcgcctcctctccgccaccaccgccgccccctcctcgccgccgcggccgcccgccgcgtcctggctccacaccgacgacgacgacgactgctgcgccttctgcgagctcagccgcccggccccgcaggagggccaggacgccgtcaagcacaaggggcacattgccggccgggtgccggaatccgatgtcagagccgatgagcgcgtcggcctacaccagcgaccgcctgctcccgaagttaaaaaatgcaagattgatcatgtacctcctgtggataaatcttctgtcgggctgcaagttgtgaaatgtgcttctgaggtcagtggagctgtggcgaaaccagaaggtggtactcctgctagcgaagctgctgctggtcctgcagcgaaagctggtgcttttgttgtcaacgatgctgctagtgaacagggagttcaatgtatagcttctccactgggtggtgcctccaagctggaggaggttacagcagggaattcttttgcgaatgggccaaccactgaattaggagttttcaagggtgcatcccttgctaatgaattggctgatgtgccaggggttacgagcattatgccagaagttataggcaaacctagtactgacccaggggctataaccaccgtggtggaagttagtgatataggttctgtcgttcatgaaaccactgaactggaatctgcaggggaggattatattgccagtgaagctgctgctgaaccagaagatgctggcagagcttcttgcaatacagatgatactgctgctttagatgagccactgccgcctagttgtgatccgaacataggcaatgcgcaggttggaaatgcgatggacaccgttgccagtacagtgcggccttctcgatgtgatgctgcagaagaaggtgcttctgtgaattctacagccaatggtcctgttagagccagaggaccaaccgttaagggaggagtgcccaaggataaatctgttgcacccagtgttttacgtgtattggacgtagtgactagaagcattggtaaatcagggagaacagatgttatttgttatgctaggcggacaggtaagaggaagccagagctgcaggaagtgaagacggaaaatattgacttggaagatggtgttctatgcgagaaagaggaggcactgttgagaactgattgttgtgaaagtgtcttgtcaacagccgggtccatagatgttaaacttgccgacataaagaaagaccttatggataattcagctgcaagcaaggttacaaagatgaagagaaatatatttgaatgtaaaattgattactgccacatgacattcaagacaaaagctgagcttgctgcccacaagaagaacatgtgcacagtcaactcatgcagcaagcatttcagatcccacagttacctgaggcgccacgagagcgcacacaacgatgatatgccttacaagtgcccatgggatggttgtaatatggctttcaagtggtcatgggaccgggctgagcatttcaaggtccatgctggggccaagccttacaaatgcatgacgcctttggtggtggcggcggcggcggcagcagctttcctatcggcggcggcgac

SEQ ID NO: 40640 - DNA, 1236 bp, Zea Mays
tggagcccgccccgactctcctttctcgctccctattcttccagctaccaccgaccgcacccaggcccgcccgttgtgccccgttggcgccccacgcccgcccccgccggcgagcctgcccccgcccaccgtccccactctctgtcactcccccacggcctacctcacccctcccacccctccctccttagatccggccatctcctgcccgcctcgacgtcggtcccacgacccggaaccctaaagctcaccccaatggcggtgtcgccggagcccccggtccggcggggagaatggaggcggccctggaggcggcgcgcgccaaggacaccaaggagcgcctggccagggttgagcggctgcacgaggcgctcaacgccgcggcgtgccgtgggctgaccactactgaggtcaccgcgctcgtgcgctcaacgccaacatctgcatctcccagggcggcctccaggcgctctccgccgccgccatcgtcagcggcaaccacttcaagatccacctcaacgccctcgtcccggccgccgtcgaacgcctcggcgacggcaagcagcccgttcacgacgccgcacgacagctcctcattactctgatggaggcatgccacctacttaatatactatccaaagaactcctcggtgattttgagccatgtgctaaactattcatcccgatgctttttaagcttgttgtcataaccgtgcttgtgatcgctgaatctgcagatacatgcataaaaactattctacagaattgcaaggttggtaggattcttcctcgcatagttgacacaacaaagaatgaccggagtgcaatcctccgtgcaaggtgctgtgagtatgcacttctgatactggagtattgggcagatgcctcagggatacaacgttcagctgatttatatgaggatatgataaaatgctacactgtagtaaatgcgatgagcttttcttccattggtgttatttttagcctatcacatatatcattattctgaactcaatcccttcttgtacgtccataaatccaacacaacatacacattttcacaacatttatctactagtggaggtaccgaccatcacttgtcactataactcgatggtgatcagcggtcgtgagcttttatgttatgtgttctgatacttgagacttttattatgactatgtataatatgttgtctcttatttgtactggatgagatgtgtcttattatgactatg

SEQ ID NO: 40641 - DNA, 2408 bp, Zea Mays
actaacaaactttaaatcttttttgaaaaaaatcatacatattccttccaccctactctaattatatacataatttcaaatttaaattcattatactttagctataataaaaaaataaaattgtagacgattttctaatttaaacttgttagaaattttatttttttattactctttatgtatttcaaaatttaacttgaaattttgtatatgattagagtagggtggaaagtatatgtatgaattttttcaatttttttaaactttattagttcatgtgtacagatatgttctcaacaaataaagaaaactttaggcttcatgcaagctgaatttgaagtgtccaagttctgacattgtgccacctgatttgtcctcgactctccacgtcgcgcgctcccatttgagagtctgactggtaggccttggttggattcgaactcacaacgatacggcggagtcccgtgttcggtgttccctgatgggcaactccatcaaccgactcgccggcggcgcgcctctcccgccggagttcgctggaggcatgcctttttgtcgtcaccccatcccaaacatctaggcgttcctcttccccacctctacccgcggttctccctggcccctgggcccgtttgcgtgctactaccggctacggctacggcctacggggaaagcaactgtggcaagtacggagaatgcaagtgcaaccgtccggcacggaggcacaaaagaaagccgccgacgaaacgaaagcgcctgccacctgcgggtgctccccatccggtccaggtgcatgcatctttccctcctcctccccacatcacaatcaccgtcctcctctataaccgcgcctcccctccactctttctctctcgagtcatcttcttcctgcccaatacggcgagcatcggcggcggcgacccaagcaggttgacctcgccccttcaccgaccagcgggtcgtacagcaagccgatccaattcctccgtaaataaaggttgataagctgtgaggttgaagctagagacgccgctgttttaagtttcttcaaggacaagggaacattaatgtcacctaaagtactttcctcgatggaggttgaagctggttttgctggcgatggcgtcggttcaaataatggaccacaagacatgtggtcacttggcgagatagatccaaaaagagcaaggaggacggggctgtcttggattttgctggttcgaatttggtgagcgtggataattttgcttatggttcagttgccagatacctccagcttgacagaaagaaggttaggatgattcgaaacaatttcgttttctggactatgcaatgctcatcttgtactttattatatctaaatcactactaagatgtcaatagatttagggtccatggaactaaaactaaatgcagattttactttccaaaagtcctcagtagcatgcttgcctgccaacataccacaatcatagtatttcgttttatctggtagttccatatattcttcttcttggaaatttgtaggtttcctatttcagaggtgttcctgtttcaatatagatgacatgttaaagttcaattctgaagtttcgtaaactgtttggtttgatttttttctgtgctgccttcccgttaatcttgcagaacacgtatgcaagcagtcttacaaccattcagaattaggagcagcgatatcatgggacgatgctctgcgatcgagcatgagacgcttccagcacaagtactacaacctgttcacctgcaactgccactcgtttgtggcgagctgcctgaaccggcttgcctacaatggctccctggagtggaatgtcttgaacgtggctgcccttgtctggtttcatggccgatgggtggacagaatgtcttccgttcggtcgttcttacctgtcctacccgtgacatgcatcggcatcttaatggctggctggtctttcctgctagggatggcagcgttctctgctctttctgattggatggtttgttttcacagtgtactgcgttaagggtttggtatgttgactggaaaaagaattactgaaagcactccattagtgcattgcagtctaggaattatggatgtaatcgctgtgctggagtcaggtaaatcactcgtgtcctcagcctcagtgattcagacctgtgcaagttcgtcaaacaaaaaaattgacctatggaggtggtctggagataatttggttcatggcaagttcgtcaatttatttagtgctgttccaaggaaaaaagaaattcttttgattcaagcatctctttctgaacttaacaacttgatgtattagttttatatttaatattccaagaaatcacatcatagtatatcaatgctctctaatatatatatatatatatcaacattccccatctag

SEQ ID NO: 40642 - DNA, 2443 bp, Zea Mays
tttctctgtcctcccaactctgaggttgggcatacagaacctgggaggctgatggcaaaattctacctgaagtttgatacaatgaagcttatagtcaaagcttctggctattgcagtttggaagatttattgcatgtcatctgtcactctgcagagataacttggatccaactacgccgaaatgataagaagattctaaatgacataaacgctgacaaagatggtagacttctatttcatattgtcatgaagaatggaaaaaggaagaagcgtgttcagacaagagaagagaaaatattcttgctagcaaatgattgcttaactggagactctctaatccatgatttatccctcaaccaggaaacaaatgcaatatgctcaaatggatgtaggattgccaaatgcatgcgagaatattttatatacaaaaagaattacagatctgccattaattctatgatccttgcaaatagtctgcatcaaaagctttgggagagcagtccatttctgctgaaacaactgcctgggattggaattgtaacagcaaaggctctgaagactgctggagtttatagctttgagaccttggcaactgctgatgcaagaaagatagaattggccacagggcgcaattatccatttgggaatcatatcaaagaatcaatgtcatcattaccacccaaaattgacatacacatagaggaaactggaaacagacttgggaaatcgaccattactgtaacactaactcgtctatcacaggcagttaaatccagtaaacgcaactgtgctgacatggttgtggcctcagaggaagacaatgtgatcctctttcatgagaatataagcccatattctgtaaaagtttttgtgccatgcccccaaaatgcacgggtgactctgaaggttgatctaatatttgaagaatatgttggtcttgatgtccacaagaagcatgtagtaagcagggaagatggtttgtacgtgaccaaggagcatgggatagataaccttgaacctacgtacaatatcccttcagagatttgtttggttagctccaggacaactcgaacaagccgatctcaatctcacactgaacagaaccctctttccaaagaggtttatgtcatagaagatgatggcgctgctgtgagtgctgtcagtgctctcgagaaagctgatgatgcagtgggaaccataaaatttaacaacttggcttcactggaggtcccaagctttgatctactgcctgaagaagagtatggagctcctggaccagcagaggcagaatgcaaaggtgccacagacagcacgatttttgatcacatacgcaaaaagtccaaagacttccccactctgatgctatcaaaatccatggattgctcatatgaacctcttatactgaagaagatgaagatatcaagggaccagtttggagtaaagcatggttgtctgcatgcgggtgaggccaccacaatggattttgatcctgttgagcctagggtctctccaaccaatactgctgagaagttccgcgggatcctgggtagaagttcagaaaggagtcgcatgctgtttggaaaaatggatagcccgtttgagaagagcgagatgctgggcacgacgccagctgaaagttctcttcggttcgcgggtggaaaagacagctcactggagaagaacaagaccctgatcagaactccagctgaaaactctctccaaattgcagcacgtggaaaggagagcaaggtgagcaaggtgctgacaaatctagataaaagccctcttgggtttgcgggtggaaaggagagcaagatgagcaatgtaccgagcacttcagctgaaaactctctccagtttgcagctaggcgtgtcagatcatctgagaagagcaagatgctgacaactccatatgaaagctctcaagcgtttttgggcgaaaaggacagcccatcggagaaaagcaaaatccttattaatagtccagttgagtatcctttcaagaaaggaagtccaggtgaaaatcctttcaaaacatgtagtccagttgaaaactccctcaaatttgcagctcaacgtgacagcccatctgagaagaggaaatcctgcatcagcaatccccttccgcccttccagcaggctgttcaatgcacaaagcaagtaggagttgcaggtcaaccctttgatattaaggaatattgcaaggaaatattgaggagcagaaatgacagtcaaggaggcgatccttttgctggttacaagagtatcttttcttttctatgatctgctgaacagctagcaaatatgatcctgaacaatgtacattatgacactcaaataacagctagcaataatctttttcttgtcattgctgaccatcttctgcccaaagtaggaacataaaatgcatgtgatttggtcaaagtgtgtaaagagttgcccc

SEQ ID NO: 40643 - DNA, 1606 bp, Zea Mays
cgcgggtgtgtggcggcaggaattcgcgggaggaatggctggccggcgggagcccagatcaccctcaatcatgcttcgaccaggccaaagaagacggaattatctccgtcgccatccaccactcacaaccggaccgggggctgatgagatgaacgggaacgggtgcccctcgcctccgccgacgtggactcgctgcctgccccgcaaggcccccaggcctctcggttgcggttgcggttgcgtcccggcggcggtagggtgcgtcggctgggcatggaggccgactccgaggccgcgcgggggagggagggcagcaggggtgtcgcccaagtgctcgcactcggcggcggcggcgggagcggtacagtcggaggaccgccgccgcgaggtgctgtaccgcccggtggagctgcccgggacggggtacgggtctgagctggaggcgcggatcgagaaggtcatctacgcctgccgcttcatgaccttcttcggcatttgtggcttgctcctcggctctgtcccatgcttcctcaagggatgcgttttcgtgatggatgccttcgtcgagtactaccggcacggcgcagggaaggtcatcctcctgctggtggaagccattgagatgtttctcattgcaacggtcacgtttgtcttggggacgggcttgtacgagctcttcatcagtaacatggactccttttacgggtccaacctcttcggcctgttcagccttccggaacggcccaagtgggttgaaatcaagtcggtgaatgatctcaagacaaagctgggccatgtcattgtcatggttctgctggttggcatcttcgagaagagcaagagggtgaccatcacatcctgtgctgacctcttgtgctttgctggatcgattttcctgtcttcagtttgcctctacctgctttccaagctccataccaccaagggaggcagccaggcctgagatgagagtgtttgtattttgatgaggaagtactactactattacaattgatgcttcagttctacgacttctttcaaaccaagcgtccgcacatatcttgagtgaggagcaacaaaactagaagccccaacttgctttgggttcctccgcccattgtcttgtcctgctcgccgcgccagctcatgccaggaagctgggaacgagcagggcgcctgtcagcggcgtgcgtcctccatgcaccccaaggactgctccgcaggaggctgctgctactgctacccagaccgagtctaccactccaggacacagccccagcattggccacaacactcccccgaactgaaacgctagatcagtcatctgtgatctgtactgtacctcaagcttgtgtggcgttcccttgaaattcgtacggtttgtttaaactttgacaggcgtttgccatggagggcaacctgagttcacctgagcgtgcatgcttccatgctttgtttttccgcttttgcgtggaagacttgctgaacatgaggaggtgtagctgggctcttttgtaagttgttactgctcgatgctgtaaacttgaggaggtgtatgtaacctgaccttgtccaacgttttcctgccacgatgaagtagctctgcttg

SEQ ID NO: 40644 - DNA, 4642 bp, Zea Mays
cgccagcccgagccacgatatttgcgctgcgcctcgcctccgcgaagcaacgcggacgccgtgccttgcatttccctttcacaaaaccaaaatccaaaacaaagaggagagcgtcctcctatcctccccttcccctcccccgcggccatctcaccccgatggcctcggcccccttcccgccagtcgcggcgtcggcggcctccgcgccgccgcgcctggccccgcgccaccccttcgctgctgccgcagccgcgcgccgctcctcgctctcgttccgccccgccgcgcgccggcccgttctcccgctccgctcctccgcggtcgcggctaacaccctccgctgcacgcaccgccgcgccgtctcatccaggtcgaggagacgcgcgcaagaactcggcgcggcgcccgcgttggctgcgtcgacctggggcgtcggcgaggagaagggcggttgcctctcgtgcttccccaagagtaggcggggcaggtcggggctcgcgaggttcgcgccgtgcgcgctcccgcacgcgtcgggactatcgtttcgcagccggttgagcgggtccaaggtcaagcctagccatatattgcacgccgctggacctgatgaaccacatgttgcaagtccaacatggtctgatacttcccttgatacacgtgacatggatcatgctattagtaaggaggagcttgaagatgttctcaacactccgcttcctgagcatccgaagctaattcgtggtcaattgaagaatggacttcggtatcttatcttaccaaataaagttccagcaaacaggtttgaggctcacatggaagttcatgttggatcaattgatgaggaggaggatgagcaaggaattgcccatatgattgaacatgtcgcgtttcttggcagtaaaaaacgtgaaaaacttttggggacaggtgcgaggtctaatgcgtatacagacttccaccatacggtgttccatatccactctccaactaaaacaaaggaatatggtgaagacttactcccttctgtgctggatgcattgaatgagatagcttttcatccaaagttttcttcatctcgtgttgagaaggagagaagagcaattctttctgagctccagatgatgaacacgatagagtatcgtgttgattgccagttgttgcaacatctgcactcagaaaacaaactgagcaacagatttcctattggacttgaagagcaaatacagaaatgggatccggagaagatccgtagatttcacgaacgttggtactaccctgctaatgccactttatatctggtgggggaaattgatgatattcctagagctgtgcgggaaatagaggctgtatttgaacacactctttcagaaaatgaaggaaaccctgtaccgagcactagtccatttggtgctatggcaagcctttttgcaccaaaactcccaagtggctttactacaaacctaactggtgaaaaatcacctgccacagataaaataaagcctgtaaaaagggaaagacaagcagttagaccacctgtagagcataagtggtcccttcctgaagttgctcaggacgccaaacccccagcaatttttcagcatgagttgattcagagtttctctatcaacatgttctgtaagatacctgttagcaaagttcagacctacaaggacctgcgtagtgtactcatgaaaaggatatttttgtctgccctacattttcgaatcaatacaagatacaagagctcaaatcctccttttacttcagttgagctggaccacagtgactctggaagggaagggtgcactgtcactactcttactgtaacggctgaaccccaaaattggagaagtgccatcaaagttgctgttcatgaggtgcgaaggctgaaagaatttggtgttacaatgggagaaatgacccgttacatggatgcactgataaaagatagtgaacagcttgctatgatgattgacagtgttccctcagttgacaacttggacttcatcatggagagtgatgcacttggccacactgtcatggatcagttgcagggacatgaaagtttgcttgcagtagctgaaactgtcacccttgaagaggtcaatactgttggtgcggaagtattggaattcatttcagattttggaaaacccaatgctccccttcctgctgctattgtggcatgtgtacccaaaaaggtacatgttgatgacataggtgaaactgaatttgagatatatccagaagaaatcactgaggctatcaaggcaggtcttgaggaacctatttacccagagcctgagcttgaggtgccaaaggaattgatcactcaatcaaagctcgatgaactgaaattgcaacacaatccatcatttgttcctttaaccaaagaggagaatgcggtgaaagtgtttgacagtgaaactggtatatcacaacgccgtctttctaacggaatttccatcaactacaagattacacaaaatgaagctagggttggtgtcatgcggctcatagtagggggagggagagcgacagaagattctgaatcaaagggatctgtcattgttggtgttcgttccctgagtgaaggtggctgtgttggtaacttttctagggaacaggttgaacttttctgcgtcaataaccttatcaactgctcactggaatcaaatgaggaattcatatttatggaatttagatttgctttaagagacaatggcatgcgtgctgctttccaactccttcatatggtccttgagcataatgtatggctagaagatgcatttgatagagcaatccagttatatttgtcttactatcgctctatccccaaaagtttggaacgttctacagctcataagcttatgttagccatgctaaaccatgatgaaaggtttgtagagccatcgccacattcactgcagaagttgactcttcagtcagttaaagatgctgtcatgaaccagtttgtgggtagcaacatggaggtcagcattgttggtgatttcactgaagaagaagtagaatcttgtgttcttgattatcttgggactgtgagggcttcaagttctccaaccatagaggagcgtattgaaaagatttcctttcgaccatttccatcagatgttcatttccagcaagtatacataaaggacacagacgagagagcctgtgcatatattgcaggccctgctcctaaccgttgggggttcgctactgaaggaaatgacctatttaatgtcattcagagatctgacgctgatgggaagagacacatcaatgttcgcagccaccctcttttctttggcatcactttgagtctgcttgctgaaattatcaattctaggctatttacaacagttcgagattccatgggattaacatatgatgtttcttttgaattgaacctttttgacaaattggatcttggttggtatgtgatcgcagtcacttcaactccaagcaaggtccataaagctgttgatgcctgcaaaggtgttctgagaggattgcatagtagccgaattgtggaaagggagctcgatcgggcaaagaggacactgttgatgaaacatgaagctgagacgaagacaaacgcctactggcttggtttgcttgcccatctacaatcttcatctgtaccaagaaaggatgtatcatgcatcaaggaattgacgacattatatgaaaatgcaacgattgaggatctgtatattgcatatgagcacctgaaagttgacgattcttctttgtttgcttgcattgggattgctggcgctgaatctggtgaagatacaaacgatgacgagcctgatgtggatcttcatggcatgggtcccatgggaggccggggtctttcaacaatgaccagaccaaccacatgatcaccattgggatggccaacccttccaagggattaaccttgctccccaagacagggagtcacatggccctaggagactgcatgttgactgtcgtttcccagcaaaactgtttaaagataattcaagcatttgatctggatctggaagactattatatcctgagccacaaccaaaagcttggtggctgcattttttccccgaggagcgttgagttaatgactcagcaaggtcgtgaaaaagaatttattgtttgaggtcatgtagcttcacatgtacagtaaaagcaggttggttcttgcatacagttgttgtaactagtgcgttcagggcattgaagataggatgacagtagatcacagacgttgctgggctgcgaatagcgtaaggcatctgctgtaactgtaacgaaataatgaagcgcagtgtcaggaccctggatagatggcaagtgggtggcatgtgtgcctataaaaagggagaacgtatagaccaagggatatgaaagaaccatttgaacaaactaaatcctctctacctttccattactgttatctcttcataatctctcctctcatgtatcctgtttctctaccttctagaacaatttggctatcagatatcaaattagatcgtcttcctcgctgctatctccttcttcaacccttcttctacctgaacatctctcttctctccgatattcccttctgtggcgctaacacgcaggcatgtaacatttttgtgttattcttttg

SEQ ID NO: 40645 - DNA, 1904 bp, Zea Mays
agctcgggccccggcgccgctggacgcacgcggggctccggctatatgaagccacctcggctcgggccttctcctcccagcatccgtatccctccatcagtccctcgggccatccctagcttcatcccaattcttgttcgtgcagctgctcgtggcagcctgagaccaggcgcgaggatgctggcggtgttcagcggcgaggtggtggaggtgccggcggagctggtggcggcggggagccggacgccgtcgcccaagacgaaggcgtccgagctcgtcgcgcgcttcctggggaccagctgccccgccgccgtgtccgtgcgcctcgccgacctcggccacctcgcctactcccacgccaaccaggccctcctccgcccaaggtactgtactactacatacgctgcctactccgctgcggtccgcagacgcgagccagcgccatggatggacgcagtgctgtgctccccgctccacgcaagcgccatggatggactcagcgccatggatggacaggcatggtacatcattatcaagataattaaaaaaattaaggagttagagttaggaggccgtggcttggcttggcttcccgcacaacaaagagagtgcgtccgatccacatccacatcatgccaccttctggacctcgatccatggacaagcacaagctaggtcaaggtggggggtggctgtcgactgacttgccaacaagcgacgaactgactcgccaactgacttccccaacctccgatgtcactcccgaccagtgagctgatgacgatctggggaaaacaaaaacataataaataaaagcttcccggttcctcgaatccaggtcgttcgcggcgaaggacgaggtgttctgcctgttcgagggggtgctggacaacctggggcggctgagccagcagtacgggctgtccaagggcgccaacgaggtgctcctggtcatcgaggcctacaaggcgctgcgggaccgggcgccgtacccggccagcctcatgctcgcgcagctcgccggcgcctacgccttcgtgctcttcgacgcgtccaccaactcgctcctcgtcgcgtcgggcggcgacgtgcccctcttctggggcgtcaccgccgacggctgcgtcgccttctccgacgacatcgacgtgctcaaaggctcctgcggcaagtccctcgcgcctttcccgcaaggttgcttctactctaatgcccttggaggattgaagtgctacgagaatcccaagaacaaagtgactgccgttcctgcaaacgaggaggaaatctgcggcgcaaccttccagatgttgccagtgagctgaaaagcggaaccgaagaagaagaaagaactcctacaacatttctctgaaaaacttgttcctgcactgcaggtggaaggggctacggtgctcacagcgctgcattaggagatgaggtgtcttcctccgtctccaggcctggactgggggcaactgtacatggtgcctggtggtgtaatgtaacataacggcaatggcatatgcagctgatcctggtctgcctgtatcatctcctcccacccgtaaagagaagttctttctgccgccatcgccatggtcagtcagagcttctctgctatagctgctggatgtgttgtgtgttgcgtctgtatcgtctctagtttgttcgacttacgtggaaacctgagatcagaccgggtatcgagcggctgcttgcatggatggaatgctgtaatcatctgtagtgacaactccattttccttgtcagactgtggcgcatggtccttctgtgcctcgtggatggatgcactgcgattgttgatgctgacttcgcattaacccctctgcagcctatagcctgcagaagggagactaccaccgctcatgtcacaccagtaatctcc

SEQ ID NO: 40646 - DNA, 1183 bp, Zea Mays
cgcgccgcttcacctattcgcccagctgcttctcttccctgtgtgccgctcgccccagctcctcccagccatggcgcgcttccatctcttcctcgcgtcttctaccctggtgccgcgtgagcacgcctctggctcccttcgaactcgcccaagtgctctactcggtcccctgtccatctccctgtgctcggattctccctcctgttacttctccctctacgcgtgagctcgcccctgcgtgcttcgctcgtcccatggcgctcgggtcgcggcgcccctgctcggttttctccatggcgcccggccagggttcccagccgtcgcgccctccgctgtccttcctatcttcccagccggcgctttccatctccagtccaagctccttctttttccttcccatggccacacgcccctggttttccctgcgcacagccgtggccctgctctgctcgtcgggcgcgcaggtccctaccggtgctcagctccagctcagattggtccatgccacgcgtgcgcgtctccctctgtgcatctctctgctagctcgcgctcagcggagctcgatccctgctgcgcgctgagtcctatgccgctccctccctgctcgttcctctctcaagctcgtggtcaccttgctcgtgccccgctcttgctctagcctggcccgtgccttccctgtcctctgcacgcgtgcagttcaccccaactctcgtccgtagtggtcgccagtcgtcgaccatgctcggattccatctcgccaacacctgctcctagtcgacgcttgctcggattcgcgtccctgtgcctagcctgctcgtcgtggacacgggtcgctgcccatgtcgagctcccgtgccgaatccttttttagctcgcccgtgacgcccgacgtcctgcctgctttgctcgcgcggctttctgctcgccagcatgccctctccgtttgctcggccttaatccccatcgcgttgtcgatttcgctggttgtcgtcgttcgtcgtcgtgtcgtgtgtgctcgacctcgccaagatctggccgtgcgagctctacgcgccttggctacgcgtcgctgtgatgttaccgtctcaccgagtctccaagccggccatcaagttctgctttcatttccgtgccgcatgttgaataattagacaaattccaaattaaatttcgaatataaatc

SEQ ID NO: 40647 - DNA, 1957 bp, Zea Mays
atggcgcccaagcgccggggaaatgaaatgggggttaaagagttggatagccttatgactttgattgctgagaagaagcggcaaatggaacaacaagaatcagagacaaatatgcaaatattgctagtcttcttacactgccttagaaagcaaaagctagaagagttgaatgagattcaaactgatctacaatacatcaaagaggatataagttctgtggagagacatagggcagaattatatcgcacaaaagaaaggtactccatgaagctgcgcatgcttttagatgagcctactgcgcaaaaaatgtggccctctcctatagacaaagctagctgtcgctttcttcccaactctcggacaccacttagtggatcatgtccaggaactttacagaataagaagcttgatttgaaagctcaagtaagccatcaaggatttcaaaggagagatgctctaacttcttctgatcctcctaactcccctatacaatcgggtaatgttattgctaggaagaggcgagttcaagcacagttcaatgagcttcaagaatactacctgcaaagacgtcgtactggagcacaggcacgcagacaagaagaaagagatatagttgcaatgaatagagaaggctatcatgcaggtcttcaggatttccagtctgtgctaacaacgttcactcgatacagtcgtctacgtgtcattgcggaactaagacatggagacttgtttcactctgccaatattgtatccagtattgaatttgatcgtgatgatgaactatttgctaccgctggagtctcgaaacgtattaaagtcttcgaattttccactatgtgcattgcccagttgttgaaatggctaccagatctaaacttagctgcctaagctggaacaagtactcaaaaaatattattgcaagcagtgactatgagggtatagtaactgtgtgggatgttcagacccgtcagagtgtgatggaatatgaagagcatgagaagagagcatggagtgttgatttttctcgcacagactcttcaatgctagtatctgggagtgatgattgcaaggtgaaagtgtggtgcacaaatcaagaagcaagtgtgatcaatattgatatgaaagcaaatatttgctcggttaaatataatcctggatcaagcttctacgttgcagtcggatctgctgatcaccatattcattactttgatttacgtaatccaagttcgcctgtccatatttttggggggcacaagaaagcagtatcatatgtgaaattcttatctaacaatgagcttgcgtctgcatcaacagatagcacattacgcttatgggatgtcaaggataactgcccggtacggacattcagaggacacaaaaatgaaaagaactttgttggcttgtctgtgaacaatgaatatattgcttgtggaagtgagacaaatgaggtttttgtttatcacaaggctatctcgaaaccggcagcaagccatagatttgtatcttctgacctggatgatgccgatgatgatcctggttcttatttcattagtgctgtctgctggaagagtgatagccctacgatgttaactgctaacagtcaggggaccataaaagttcttgtacttgctccttgatgttatggagggcgttcaagaggttcacagtactgtccagttgtttcctttcgtgtcattatattcccccaaaattgggaacgggggcataattgatctccggttagggaatgaagttttgcagatggtcagctgacgtagggttttgaggtatcagaatgtgcatagtcatgtttatgttgtataggtgtaattgtgtaaagcagccaagttattggttacaagtgtaacacgagaaatacacattaataaaaaaaaaacctccagctcgtttgtacagagattgtgcttgaacccagaaccttatgtggtaattgcga

SEQ ID NO: 40648 - DNA, 1162 bp, Zea Mays
agaaaagaaagaaaaaattaacagcgggcgggacaaagagcaatggccgggaaggagatgacgccgaactcgaaggcggcggcgccaccggcgacgatacgcctcgtgaacttcatctccgaagaccagcttgacgaggtgaagcggacacgaggggagcgtgtggaggacggcaccgcgcagcgcgacaaacccctcttccagatcctacaggagaacaaggagaagaaggacgccgagttcaatgagcgtttcaagcacagacctccaaaggctttggatgaggatgagacagagtttcttgataaattggctttgtcaagaaaggaatatgaacagcaggtggccaatgaagaagcagaacagctccgcggtttccatgaggctgtagctgcacggtccaccgttgttcatgaactcgagactcctacagtatctagacctgagacctaagccacctacaaagaggagccagcctgcgctcctgaagaacataataatttccgtgaagccgcatgccaagaaaccaaaggttgagacggaagctaaacctgctcccgaggagcggcggccttcagataggcacggctcagatcagaagcaaccagacgacacaaaggcaacgcttggctctctagtggcttatgacgacgacgacgacgaaagtggtgaggacgttgactgacagtggcggcgtttgagaattcagctgtggataacccgcaagatgatggataactgcgttcgagtgttcaggtatggatatggataccgcaagaggttactgggagagatgctgcagccttttgggttttcctcgaggagaggcacttctattgcattctaaaaatcggaagcctttacagaaattttcttgtatgtattgtacaatttgaaaacgagccgggaacattactaatggttggtacgtacgttggtaccacgttgtttgacgaaggaactctgtagatagttgttgtagtttatctgatgagcgcattttgctttcacaaggacgtttagaaaactcgaacgcatcattctcgtctcagagtatgtttcgttggacagtctgtttggttgtgttgcgtggctatgtaaaaagctgcttggactgtgagttgtgaaaaaaatctgctataagctataaaaaaactaaaaa

SEQ ID NO: 40649 - DNA, 1579 bp, Zea Mays
gtttgttcggggtttccaaatcttctgtgagcaaaggggccaatggaaggcaacaacccaatctcaggagttccttcgaacccttcaacgctactacaataacgcctacactgatcacgagaagcaggatgctataaacatgttcttaggtcatttccaacctcagcaagggaaacctgcattgtggaagctggactcagatcagcattacaacattgggaggcaaggaactttaaaagaagagattggaagatcattcataaagaggtcactatcagatggtaacatactgttggagagcagcttgcctgtaactatctgtaacaatgaaacagacaacacagaattgctcccagtgcaacagctggatgatattagagaagcttctgattctgcgccagagatctccatatgcgaacctaacctgtgctccagtatgaactatggcacagtgcctggaagacactccatgtcagaagagcggcagagttatttgaaaagattaggttaccctgaattgcactcttcaaatttctttgaccttgatttgttgtcatcttcaggaaattcgtttgacgaggaagtttttgagaggtcattactgatcaattcacctatggatgtgatcagtcctgaatcatctatgtcatacagtgaacaaggacacactgatgagggaagagatgacacggatctttcccgttctagcagccagctctcagacattcgggactactctgaccactttgcgcagtgggtcgtgaatggagacacgctttgctactaggccctggacttttgtcttggtgacagctcagtagatgtgacacggcaggaaatggaagtctgacggatagagcagatgaaatggctgacgactagccgggctaggtgccgtgcatctacctgcagaggcggcgtagcagaagaggtggtggacatgggagaagtctcgcatcggcatgcttgtggtcactggaaggcttgaacgatgaacgctgatattcgtcggatgcagctttcggtggggtacatgattcaatttgctatggtgaaaattttgaccgtagcttagacaataaataggcaaaatatatctgttcttttagtttagcttaccttgcgtttcccttctccatagaaaagtatcaaaaggaaaaacaatggaaaatctattaggaaaaggaaaaaacaaacaaaccataggtaaagaacacttctgttgtaaatagttagtttgctacagaagtataaatatctggtacttgttgggtttcttggcggtgtctgtttcataattgtttctgtgaaaaagctgaaagaaactcggtatgtcttttaatatgcaccatttttgcttgaggactctccatgacattgcgcagagaggagtgcaagaacttgaatgtctcatgcttctcttgcggtggacatccacgtcgatgacaaaattctagtatatggtacgtagttcattcgaaaggtgcaaggtatccaatttagttttggatatctagagttcacaagatagtacttatctgaaaaatgaaatcaaattaccattgcaaaatataaataa

SEQ ID NO: 40650 - DNA, 2125 bp, Zea Mays
ctttgttgtacataagtttacgtttattttgctataacaccatcgtataaaatggatcactctatccaacctttccgacagcggctgtgtgcaagaaaaatagggtttcaatggcggcagttgtacctccactcacgccgccatcgcctccgaaccccactccccgatccagacaaccaccccgcccagatccggatccacctagtgcatcaagaccgtggctaccggatctcacagcctccgcggatgctgcgagccgccatccccactgaagtccgaccagcgcctcgtcgaggtcttcacccccttcctcgagaattcctcgagaagctcatacgcctaccggatctcacagcctccgcatatgacttgatgagcgagtcaaaggggcgcgacggcgaggaggggaggaggtggagcgcgcggaggaagcagacgaggagcgggagtggagggaaggacgcgacgaggcgggaggccgtggggagcgagagcgggaggtggaggcggctgagagggagcggaggcaagcgcgtggaagcgttgaggagagccgcgaggtgcgcgtggtggacgtggctactgcacgcctccgccgtcgcttgtcgcgtggaggcggaggcggctgccgtattcttcaggcccccgccggtaggagtactaccccctgctccggcgcctgcagtggaaggcaaggagaaggtcaacggtagctggatctggcgagcacgtgaccgcaccccgtctgcggccaggcggtgcccagatccgtttcgatttgcaaccctgcgagtaagatctggttattaagcacgaattgtacatcagcttgcaagtgccaggttcattcggatgttaaagtggcccctacatcggacttcaagggcagtagcaaatctgaaacttggaggatcaagacgctctacgttcgttgatgcctgtgtgacgaccatgtgtttaactgttcttagtctgctgctttgatgactgcaaggttctaatttacctctgtcaggccctactggatctctaatgtgcggataatattgttcttagctgataaacacatgccttttattaacatagtatttctttctaaattactgattttctcacccaagtttaattagttggtttcggcagaggggagagaacatttaagaacacatgcctttttacttcatgttataatttgtaggcatgccatgttcagtgaccgcatgaattgaggtggacagtaagcgatattctcaagtaacatccaatctgatgtcttactatggcatgtgtgggctggcgaaggagtgtctacatcagcggtacttcagcaaggaatactctgaatttctggatgagtttatggccgcagttaggcagaactatggacaaaaggtccttgtccaggtatggaaaataattgaaaatatattatttgtttcctaacgaactgtagcagaccactttctaaaatttgtttggcatcacagtttgaggactttgcaaaccacaatgcttttacacttctcgagaagtacatgacaaaccatcttgtatttaatgatgatatccacgtaatcaaatcagatgctagttaatttatcttgcttttcttaaaagccaatgaattttattccacaaacagtactaactctttagccctgatatttaccgggcacggctgctgtagttcttgcagggattattgctgctctgaagtctgttggtgggactctagctgatcatacattcttgttcttcagtgtgagttatacgatcaagtgactagtgatgtgatttgccatggtgagaaaacttcttacaagatgggcgcaagagctttcctagtggccattctcgcttacacagacctgttttgataagagctgagcagcaatgcttccatttcggaccacgaccttagctaaaggctaatggttcgaaatgtctgaagtaccgaagacagggctagctcctcgttttttgtcatgtcaaataaattgtgtatgattgcaacaatattggcaaaatatcgttgtactttatattttgatatactgtgaacaaaacaagtgccctatgagaccatcgtgatttatgcattttcaaactaaattttacgacactt

SEQ ID NO: 40651 - DNA, 1564 bp, Zea Mays
ccgcggaacagcccccgtgaccgtgaaccaaccagttgtccagttccgctccggcactccacccacccacccagccaccccacgcccgcgagcgaccaactcccctctcgaacggttcgggcctttgcagtcgacagatcgatcaatcagcaccgaccactcgcgacccgattcgaatcgagccagagtcccaggcagcggcggcggcggcgcccgcctccaagaccacctccacccggaccccagccccaaccccaaggttgcaagcccagagttccttagccgaggcagccaccgcttctggtgtggctcttcccaaaggtccgatcgacgtggcgaagcatgttgtccgggacgccggcgccaaaggtctcttcaagggcctggtcccgacgatgggacgcgaggtccctggcaacgcactgatgttcggcgtgtacgaagccacgaagcagtacctggccggcggcccggacacgtcgggcctcggcaggggctcccaggtcctggcgggcggcctcgccggcgccgccttctggctgtccgtgtacccgacggacgtggtgaagagcgtgatccaggtggacgattacaagaagcccaagtactccgggtccctcgacgcgctgaggaagatcgtggcggctgatggggtgaagggcctgtacaaggggttcggacccgccatggcacgcagcgttccagccaatgccgcgacattcgtggcctacgagatcacgagatcggcgcttggttgatttgattggtgctggcctttgccatggccctttgcagtttattcattctccttgcgcggctggagcaacgcgaacaatgcgagacaattttagggaggaaagagagagagaaacttttcacttcaatgatgagattctttaatgaagcaaagcttactaaaagtttgttcatgtggagccacagagtgagtggttggtgacagataagtaatactggccttgtcgtaatggttggttggcctggactagagtgggcatccgacggtgatccgatggcgcgcgagtccgactggtggtgcttgtgatggtgagctgtgtggcccatggttttgttggcgtctggtggtgggtggccctcgtcagctcgcattcggcattcccttttgcccccacaatcccacgttcgccttgcctcctttttcttcttggcctaaattttattctttttctctctcacacacacaaatatatcagtataccgttctccttttattagtgccagtatgtaatggcatgttcggctgcctttctagcagatttttattttagtcttttttctaaaactgttattgttgttacttgacttcaattatcaaaaatcaaggcaatataagttaaatattaggaccttcgttctttggtttaacactttttcaaagtgttaacgagaagcaacattgcatagtataatatgatagtcatcttgtgtgccttaacatttttatgttatctttctttaaatcaagtaggtttacaagcatactttcagctcttgaacactaggtggcacgaaggttcttcgaagg

SEQ ID NO: 40652 - DNA, 809 bp, Zea Mays
tatcataaatgtacttattacatagcaaaagtcttacaatgataaactaagcgaactaaatattattccctggcgccacaaagctgactgagagacgccacctagatcaagtcgaaagcctcagtgctagacggctcctcttcgaccacctgttcttctcctatgggggtgtgagacagcaagagtgagctcacacatgttcatcgctcaacaaggtttagggaatattgtgcatgaatgtaacactccaggttccacaaacaacccggtatgctactgtactacacttccgacgtccatatataaaatttcggcagcatcccctttgcaagattgcataaaagagggagcaacggagtataaacatatatcatgactaaaacatactaagtattattactcggctagcaaggaaagataaacatacgacctgaactgaattaaccagtgcgcacgaccatataaaaaaataaacaaacttcctttgacaataagtttctaattaaatcatggctgcgcctgggcagcgttattgtgagagtgaaagtggacgtgctgctactcctctcattcccaacatgtatcaagtacctgcattgagtaatgcaagagtgagatgacacatctcagcaagtaaaataatatcaaacagtttaaccacataagaacattgttttaccaccacttaattccacaaccttcttattacgaaggtgcagcacgtatacaacgtacaacgcacctagttaccacacctcgcaggtagaaaccacaatagtaacatagtaatgtcacactttatatattcc

SEQ ID NO: 40653 - DNA, 1708 bp, Zea Mays
caacaaccaaaaaaagcccgcacgagacgagagacgagacccagacgtctcgccctcggcttcttcctcccctccctgaccgctgccgcgacctctcggcgaaaccctaacctaccttagaccccgccgccgccgccgcccaagggagagagagacttgcacatcaaagggcgtccgatggggaagaagaagaagcgcgtcgataaggtcttctgctactactgcgaccgcgagttcgacgacgagaagatcctcgtccagcaccagaaggccaagcacttcaagtgccacgtatgccacaagaagctctccaccgcctctggcatggccatacacgtcctccaggtccacaaggagtccgtgaccaaggttcctaatgcaaagcctgatagggagtcaacggagatagagatatttggaatgcagggaattcctgcgcatgtattggctgctcattatggagaagaggaagacccttcaacaaaggtacccaaagtagaagtgcctcaggtaaggcctgttattatgcctaattcgctaggcatggcatttcctccgcgaccagcttatggtgtggcacctccaatctataatcctgcactcaatcctttgatggcccggcctccaatttggcctgctgcaccagcgcaagcttggtatccgcaacaagcagcatatccacaacaatcagctgtttcagttcctcccatagtcgctggcctcccaccacaacagccactattcccaattcagaatgtgcctactcctatgacatcagcagctgctaatgtacttcaaacatcgtttcctatggcccctccaggagtaccttcacctgttgcccctcatgtttcccagcctttgtttcctgttaacacttcagctgtcaatggagctgtaaattccccatttttagcatctgttgcacctggaaccattccagcaagctctccagcagcagtcggtgttgcaggaattggatatggaaccaataaccaaggcactagagatccagcagttggatcttcacctgcagtatccaataataaggcgtctggtgcccaaccagctacgaatgaggtatatctggtgtgggatgatgaagcaatgtcaatggaggaaagaaggttgtcgttgccaaagtatcaggtgcatgatgaaactagccagcaaaactaggtggctgaggttctgccaatacggtagcatttattgtagcttaagtttggtcgagaatgtgacaagagtcttgctccagatgaactctgttgacgcagcaattgatcgaagaatatcagaaagtcggctggcaggacgcatggccctatgaagaatctgggctttgctcggtagattatcccccttgcatttcaccgaaggactctgcctgcgcttgtatctcgctgtgcagcagtcggccctcttcatttagttagcgaatggagttgctgcagttaagaggaatgtgttgtttctgacttgtttgagtgtcgagcctttgttcttctatgtttccagcatcgacaagaaaatgaattagcagcacttaggagttattttggtccaactgtcgcctcattgggaatatattgatgaacacctcaatttctgcccgattgtaacctggtcatgtgctattgccaattgaacctaatgctgtgcattggctggaaagcaacttaaaaatgttacggattttaatattttg

SEQ ID NO: 40654 - DNA, 1991 bp, Zea Mays
cgaagttgtttttgtcacctcaggggctcctctccctgcgtgcgggctttcgtttcgtgcagttgtgtggtttgcgagcgcagagcagttcgtggacgtggagccaggtggtctgctgcccgaagaagccacactacgctccacgcatcgcgtagacggcgtagttggctcgcgggaccccggagtcagcatcgcgccgctctctcccgaagctcgcgcgtctcctcggcgcccggagcgagcctgaggcgcgcggacaaacgatgtcctcgccggcggcggcgacgctgcacccttcccccaccttccttgcctccggccctcgctaccgccgccgcggacatccatcttcgaaggtcagcttccgaaggttggcgccacgattaaaggtcaatgcactttttggatggcctaggggggacacgacagcacgtgaactgatccctcctgctgaatcctatacgctctcagggtcagcctcagaggtaggtgcaaaaccacgtgaggtgtctatatctgttgcttcttcaatcatggacattcctgctgcggattgggatgcctgtgcgtgtgatttagatgatcctggaaattttaaccctttccttacttatgcattcctctcaagcttagaagaatcaggttctgcggtcaaggaaactggctggttaccttttcatattgttgcacgggatgagaatggacatattatagccattctaggggagagtttgtgtttgatcaatcatgggcagaagcttactacaactatggccttgaatactatccaaagctccagtcttgtgtgccttttactccagtaactggtcaaagaatattacttcgaaatacatcataccgtgatcaagtttttgacgcactagtcaaaggtttgatgagcctcactaccaagatgaatgtgtcatcattacatattacgtttccgtccgaaggtgaattcagtaaactgaaggatagtgggttgttacaaagaatcgggttgcaatatcactggagaaatcggaattacaagagttttgatgagtttctgatggatttgaagcagcctaaacggaagaatatcagacaagaacgtaaaaagattcctgcccaaaatttgcaaatgaagcgacttcgtggagacgaaataaagagcagacactgggacaccttctataaattctaccgtaacacaactgataatcattggggcagaccatacttgacaagggatttctttcacctcttgggagaaaagatgggggataatgtgatgcttatagttgctgaaaaagatgataaactagttgctggcgctcttaaccttattggaggtgatacactatttggccggttatggggatgcctgccagatgcttactttcccaatttgcattttgaagcttgctattatcaggcaattgaagcagccatagagttaaacctgagtaaggtggaggcaggtgctcagggagagcacaagatccagcgtggttacctcccagtgacaacttacagctgccactacttttcaaatcctggttttgcggcagctattggaaattatcttactcatgagacggctcaggttaagcatgctattaaggtccttcgtgattccggaccatacaaggaagacatactgaaagagttcgctgctcaacaagacgacgacctgtagaatacagaagggacttaaactatttgcatactgttttatagaactaacatcttctatgtagcaacagggatacaggtcgtccaaagtgttaccaaactacgaatcccacatttggacactgctaggactgtaaatatttaacattgtaacatcagtcttacggcgttgagttgggagctatagctatactcagttgtctcgctcttacttttccccaacagaaggacttgatgcttcctgtatattgcgctttgactttgattagatttataggaaaaaaattacataaatatctgcagctgtcattcag

SEQ ID NO: 40655 - DNA, 689 bp, Zea Mays
cacctgtccttgtctcaaagacctcagacgactatgcatgtgcaccaaataactttacaggatccgtccgattgccccaaggacatcgaataaaccacttacaaccagaaccgcgagattaagtaacacaaatcacacacacaacatttttgcagcggaaatcttattaccaaattttacaggttacaaaaattttgcattattttatcggagtgattacaaaagtataagtttgaaatatatgctagctcaagtgatcatcctcaataagaagataaagacggggtatacttatataagaaggccgagcccaccggcacttaacaccatcacaacagcacaaggttagaacctgaaaaacaacagggaataaaaccctgagtatggaattactcagcaagtcttacccgactaaggaaaagactctcaagggtatgctggataaataggaatcaaggagaggctttagcaagaatcaatttagatacttttgcagaaatagcttactaaagtgagtccttactttcaatcttttaacgccatattaagtattaatagactctatttgcatctagtctaatttcaacatctcatcaatacaacatcatttttatccatagtgttcacatcctgactttaggttgtagaaaagtgaccaagtcttcataaccgcgaaggtacggcgatcc

SEQ ID NO: 40656 - DNA, 312 bp, Zea Mays
cgcacagaaaaataaggtgacgagattttcttattgcagaaagcagccgagtggagtgggcttccaagatggaaaccgtactacgtgcggcggcgttctgttaaaatggaaactaaactccctcgtgctttaatttgctcgaatagtaatatccctcttttatttagtcttcattgagactgagattaacctcttcctcggatgctcttcatgaatggcgcgtcgtctatctagtcggcctccgcttgtcctgctgtcgaccctcggccttcctctcttcgaccttgcattggcctgggcagtgactgtgac

SEQ ID NO: 40657 - DNA, 1535 bp, Zea Mays
gttcttttatcgtcgagtctcggagccatgcaactttacatcaagatgtgccaaggaagctcttgaggtggtccacagaaaatagctcaaggaatgcatgtgaaaggtctgggttgaatgaaaataatcaggacattggtgattcttcagaaaagcaggagcatctcctggctgtgccaggtgtgattctcttatgctgtggccttatgttaccatgctttcatgctgaaaggaaagaagtcagcaggcatgacaatgcaaccattcagcgcaacgcacttgaatcagtttcatcctatgaaggaagcatgtcatctgagaaagtcccaccaactccacatcgaatacctccaagtccctctagatttgcgccgtctccacagatagctagagttggatctgtcaacttaagcatccagcagatcctcagggcaactcagaacttctcaccttcatttaagttaggtgaaggaggatttgggatggtctacagggctgtattgccagatggcaatgttgttgcggtcaagagagctaaaaaggatcagtttgcaggtcctagggatgagttcagcaatgaagtagacttgcttgctaagatagaccaccgaaatttggtgaggttactgggttttactgataaaggaaatgagcgcattatcatcactgagtatgttccaaatggtactcttagagaacatctagatggtcaacatggaagagtcctagattttaatcagcgtctagaaattgcaattgacgtggctcatgcacttacttatcttcatctgtatgcagactttcaaaaaattcaacgaaggcaacacgagagagatactggacccattgctggaagatcacgtggacgacgaggtgcttgaaaagctccttagcctggctttccaatgcgctgctccgacacgggacgaccggccgaccatgaaggaagttggggagcagctgtgggagataaggaaagagtacggaaagagtgttaggaaggtgtgaagatcatggaaaacatttccctgtttctcaagactttccctggaccaaggggactaagggggtgtttggttttatagggattaaattttagttcttccattttattctatttaagtccctaaattaccaaacacggaaatcaaaactttattttagttttagtatttggtaatttagagacttgaatggaataaaatggatagactaaaaataagttcctagaaatcaaacaccctctaagcatgcgaagtatttgtgcccattggataaacacctgatcatctatgtttcttggaagatgtgacctgaagaaatgtacagtgcgataacaccgccatcagtttgtgctttcttgtctcagtttgcagtgcactccctctatggagaatgtatattttggagttctcgcatttcttgattctgttgatatggtattctgatggatgtacccgcatacattactgcaaacggtctgaaataatatacgaagggaaattgtttgtattggaagacactgaagcttccgg

SEQ ID NO: 40658 - DNA, 1026 bp, Zea Mays
gcgcctccgccaaccgtaccgctaccgaacaggagagaggatgccgcgccgggaggtgtcgctgcccgacgccttcaatctcgtcctcggcaaagatcgggacaactggcctcccgcagcgggcctcctcgtggccgcctactacggcgacatccgccgcctcaagggctggagctaatgtgaatggttttggatctatcttataatcccttggcaagagctgcagagaaaggtttgactgaagctatcaagtgcttgttggaagctggtgcaaatccaaacgttcctgacacagatgacgaaattgtcaataagaaaaagtccgagctgaaacgacaaggagctgatgcgtttagcaaggaggattatctaaacgcgtcagtattctacacacaggccctgaaggttgatcagttcgacgcaacactgttctcaaacaggagcctttgctggcttcgcctgggtgatggaaagaaggctttgctcgatgctatagagtgcaaacatctgcgtccgaattggggaaaagcctactaccggcaaggagctgccctgatgtctctggaggattacagcagtgcttatgatgcgttctctcatggcttggagttggacccagaaagcgaagagatggagaaaatgctttgggaggcgatggacctgaagtagtagttgatgtcttggatcgtaagaagatgacttgagaactggaatctcttcaattttggtgtcgtagaattgacacgaacactcggatggttgcctacttttgcattgacctaagtttgctagtcctgaaacgatgctgcctctttttttctgtcgtgtgtaattcacggagggtagcggcagtttagagaccaccgcaggctgctaactatctttgatatgatcgtggtagccgcagctacaacgcttctgacgccctgttaactgaaacgatgtgttcaccgagatgcctttgccgacatgcttggtcccccttcacatgtttttgcttggctaactcgtgttgtttgatcggag

SEQ ID NO: 40659 - DNA, 1741 bp, Zea Mays
gcccgcatctcgcaaccgtcccgcacgagcaaagagccctcgttcccctccccttccgctcgagttcgtcgccgtcgccctgccctcgtatctcctcccacgacaccggtgacaaccacaggccaccgtcctgatcctcatccgggtgatccccaggcaggcaggtcggcgaggagggcagcaagaccgagccgtgcgggggctcgggacgggaacgggacaggaccccaaaatctcagatccttcctgctcgcccgcccgtgcccgtcggcgcgtcgttcttgccgtccgcgccccacctccgccctctcctcctccaggggaatcagatatgccacaggctgcgcgatggtgttgtgggtcttcggctacggctccctcatctggaacctcggcttcgacttcgacgacaaaatcctcggcttcatcaagggctacaaccgcacctttaatctcgcttgtattgaccacagaggcacaacagagcatccggcgaggacctgcacgcttgaaaccgacggcgaggcgacgacgaggccatatgccatggtacaagcctacaaggagaaagtttatccaaaaaacaaggtatgtttggttcatgctaatcctcacctccttcccttgctgccgtctcaggtaaataagatggaactttaaaagaaagttcagttgctatttatgcatcaattgcttaacctgtttgttttggtgacgagctactatcagtcgcgccataacttattgcatgttttctcatgtatcgctttaggaccggtattgctttaggatgtgatatggcatttgacaacgttttttaatttaattactgaaattcgaacgactggaatgcattttgttacgtttattacacaacattttttatttgtttgttgctgaaagtaacatcaattaggaaatgaaatttgtacttggtattcgcctctgtacagttgaactgctgcagcatgagccagaagttggttatgaactaccatataaggttcccttccagagtctcccatgctatatcgtgaattttcccaagcaaagcacctgccaggcgccaatatgccaccggggtagccattaaaatacttaaaatcaactccaaggctcatcgaacgttatccagtgcttcaccgtgtttctgaactccctaaagcagatgttgtcatgttggtcagtttggtgttggtttaatttctacgggtgtcgtatatcagagtcaatcaaaaagtttgactagcaactaatggtgcctatacatgtatttatggagcttcttctggtcatatgtgtagtggatctctcctcctggtcaagaaccattcaggtcataaacccctacgacaggggccacgagggctcatcttcgccactgcccctactcccaccttctgcatgtcctgctcggtgctgttccattccctagcgatgttctccggctaaagacgcttggagtttgtggtgtggtgacacttaatgaatcatacgagaggcttgttcccacatccctatacgaggataaaagaagtaggcgcaatgaggagtcgtgttcattcacaagctctaacagagaaagttggggcagatgttcatctttaggtgcagccagtgatgaattattctcaggcaataataatgataagcagatatgagcccttgggcctccagttcgggcaacaagcatatggcaaagagagtgagggggcatgatattgttttccaattccaacag

SEQ ID NO: 40660 - DNA, 2305 bp, Zea Mays
aggcaggcccgcatcgcgttcgatttccaaccaatcacactccgaccactgtgaccacacgctcgcgcgcccatggcggcgacctcgccgacgccgacgctggcgaagcctgcagccgccgcgcacgcccgagccccgtccgcgggtcccagacgtgtctccttgacctcctgccgctgccaccgccgccgctctactccgtctcggtggaggagtctcccacgatgcagtcgccgtggtgggaagccggtcgtcacagaggtcatcgacgcggcggcaccggataaggggccagagactgggagcaagggagaggaagagaaggaggccgtagcggggcgcggggcgccggggtggctcaggcttgacggggttgcagcggacatcctcgccatcgccgcgcctgccgtgctcgcgctcgccgcggaccccatcacggcgctcgtcgacactgccttcgtcgggcatatcggttcagctcaacttgcggctgttggtgcatctacttccatattcaatttggtatccaagctgtttaatgtgccgctacttaatgtcacaacatcctttgttgctgagcagcaggcaaaggatggcaattcgaacactggaggtgaaagagatgaatttttgacgccactagagaaggcaaggcaaccaaagaaggttcttccggcagtgtcaacatccttggctctagctgctggcattggattactggaaatggattcaccaatgcgagcaccagcagaacagtttcttacactgagggcacttggtgctccaccgatcatagtggcacttgcagctcagggtgcatttcgtggatttctggatacgaggacaccattgtatgctgtgggtgctggcaacctattaaatgcattacttgatgtggtacttatttttccacttggtctaggagtaagtggtgctgcactggccaccgtgacctctgagtacttgacagcaatcatcctcctttggaagttgaatgatgaagtagatctattgtcatggaatataattgaggatggagtcatccgctacctgaaatctggtggtctactaattggcaggacaattgcagtattcttgacactgacactagctacatccctggctgcaagggaagggcctgttccaatggcgggctatgagatatgcttgcaagtgtggttaacaatttctctgctcaatgatgctctagcccttgctggccaggctctacttgccagcgaatatgcaaaagggaattacaagcaagcccgcacggttttatacagagtcctgcaggttggtggtgtgactggttttgtccttgctgcttccttatttgttggatttggatctttgtccttgctgtttacagatgatccagcagttttagatgttgcacggtctggagtgtggtttgtcaccatttctcagccggtgaatgctattgcattcgtggctgatgggctctactatggtgtttctgactttgcctatgctgcatattccacgttttttgcgggagcggtctcatcaatattcctactattagctgctcctaattatggtctcggtggcatatgggctggtcttactctatttatgagtttgcgtgcagttgctgggttctggaggttagggagcaaaggtggaccttggaatgttatcttatctggtcagatagtaagtaaaacaaagatatgaccagattcgattgttcaattgatctcccaccgctagcaggtcggtagcaagaaatgtgcatcctgctgcaggtcatatatagctgacaagcaatatatagcaaaaaatgtgcatcctgcgtgacagggagctgatgcatctctgtggaagatatacgcttgtagttggtgttggatagctgggctatcttgtggctgttgtaggggctcacagctttcaactgtgttgtaccatatactgtataagaaagatctgttcagttataacgaaagaaagaaaactggcttcaaatagaatacaaaaggctgtgtaacgaaagaaagaaagccgagttcaaatagaaaatcccttcatgtaaatttcgttctggaaatcctccttttgaatgaagctttatccaacattctaggattggtaaatccggtaatcatttgtggcattatgtaactcaatgatggtcagaaatataataatctgagttggtttttccgatatgcatcataatcggacattgtatatttgctacgaatttgggtgaacccccagcttcagacaaaagtaatgtgataaaagaaaaggaaagaaatacagaaaaagattaaag

SEQ ID NO: 40661 - DNA, 1477 bp, Zea Mays
catcactgtgtcgcccccacccccctcgccgcatgatgcccgcaacgtccgtggccgtcgcgcccgcccctccccccacctcgagagcggcacccggcaaccaccccactgtcaagatcaccgtgtccatataaggatggatcccctcacccgagaaccactcacgtcgagactaacgcatcccaagccagataaggatggatcccctcacatctccgattatttcgccgtccaaacacatgatttcctggttcaccctcctcccctttggcgtcctccagatcttgccttcgcccgcatcgacgtaggcgacgggggcatgacaggtcggttggtggagcggggctagaggccatcgatggtggttgtggcgacgtgctgctgggaagacgaggcaactctctcctccagcacaccctgtggtggagacttgccatacatatgacgcagctgaagctgcagagggcgcgcctgtgccgacgacggaagcaaagaagctggcgtcctctgtcacgaggtccaagcaggagatcacagaggacttctcgtcgattggcgggacatggcccccacggccgcccaagaagagaccaggtgcaacgacaactcaatatcacaaagaagatccgaaaggcgagaggatttcatttcccggatcgacttacttctaccctccggttgtttgtggacagtattttggtttttttaagaaggaagccccaattcctgtgctagatccaccatgccattcaatgttgcagatcatgacgaatcttgtgattggtttgtgtcaaagcaatggatacacatatattcgcattgcatcatttctatggaggtgaaggatgaggaagaaaaaggggaggagttgcctccagatgttgagactttgaccacaacaattgaataaacatgatgagtgattggaaaatgttcggattcttttgcaagatcaaagtttctatgcacttaatcagcttgtggatttcatcatcttggtcggcaagtttgtacgacaaaggcgacccggagtcaccgtcccttgaaagcgccccacttccggatgatgataggttgcgcattgccagcgagtttagaattgtgccacatggtgatgggggccattatctccttgtcgccctctgtgacaaagtgaaattgaaggattacatgtttcacatcttctttatgttgaaattgtcttgtatgttgtttagaccttttaaaggcaacatgccacacatatctttgttttggtgttcagagctacatatggtactcttcatggtttctgttgcgagtaacagggatatcaggtttttgtacttacctatatggtcatatctgaacctataaactgttgttaggatagatacaaggtgtgcatgatcttctttctattgattcatacttacatatgtagaccatattttatcaacttatctatactatactcaaagcaccagtttcaacggtc

SEQ ID NO: 40662 - DNA, 3703 bp, Zea Mays
tgttgcgccgctcaatttcaatccggaggctgaagccacgggggagaagggcgcatggtttccgcagcgcgcgctgcatcccttctggccttgttgcggcctccggagcgcggatcttgacatcggcgacgacaacggcgaggaggaggatcttctcacggcactgcgaccctgcgagatggacatcgtatgtgaagtgtgtggtgttgttggctacaggcaacttttaatacaatgtagcaattgcaaaaatgctgcaagatattgtttggacccggtaatttatgatgcctcagcaattgaatggttgtgtgacgattgtcctccaaaacataatgaagaaacacaaaaggcagtgggtgctgttgggcctaccatgaacacaatggagtgtctggacctctcaatgggaaaagatggctgctctttttcacagaattgtgttgaaggcttcacccaaggaacaaagtctgactttttttcttcaatcaatgatgttgagacatcatatccatttgttaagggtagttcttgtcctacactaccgaatatggagcaaaaagatggtgtattggaaaatgcggaacaacctcatcttttggagatggttaatcttgatggtacaagccattcacttgtggaccctccattagaaatcaaagaacaaggagcggaagctggcttatttgcttcagttgaagatgtcgagcaaacccatcccattttaactgatgaaactagtcctatatggtcaagtgaggagcaagtagacggttcttgtcctgcatcggaaagccgggagcaacctgttcctttcaaggtggttatactcggaccatggcatgatgtgccaaatagcatcctaagatcaaggcctccttcaaactactcacagtccatgcaaggatcagatctatatgttggaaatgtggatgtattggatctttctaaggagcagttggactcgaggttaaaacctgaagaacaaggagcggaggatggcttatttgcctcagtggaatatgttgagcaaacacatcccaattttactgaggagaaagtagatggttctattcctacaccagcaagttcggagcaacctgatcagttggaggtggttagaccatgggatgatgcgccgaatagtaccctaaggtcaaagcctccatcaaactactcacagccaatgcaaggatcagatctagatgttaggaatatggatgccttggatccatctaaggagtggttggactcaaggttattgtcaaatacggtagagccatcaagttcctcaaatggaggaggcacatctgttgagaaagacaacattgaaaaaacagaacgcttgtcaggcattgacaccgtcacccctggactggataatgtccagggatcaaatccctcagcagagccatcaagttcctcaactggagaaggaaactcagctgttgaaaaacacagtgctgaaatgacagaatgcttgttaggcatgggaattttgaaccctgcactgcataatgtccaggtattgagtccctcgacaccaaaagaatgcttggtttctagcgcagacaagtcagatgtagcaaataggtcagatgaaattaatcacagtctcgatgattttaaccaaagtaatcccaagccagtgctgaagggaagagtctccaaaatgatgtgcccaagacttgcgtttcaactgccaaaagtgttgcctgtatgcgaacatcacaaaagggagatgtcattgccttccaagcatgttagtccacggaaagcaacaaaaagtagctttagaaagcaatatgaaggaccaaacagacatgtttcacgtcatactgaacatcagaaaaccaaactcgttatgaaggacagaaatacaggtcctgctcatatgagaagttgtaggccaacaaagcaaattgattgtacttgctcaagtgcttccttggattcatctacaaagactaaggaagtaaatgatgcagaaccaagatgttctaaatctgtaaaaacttttgagaatgtcatggccaagaaaagaaaacgacctattctatcatatgatgaagatgccaaggccatgcagatggaagtgaggatgcgcaggagacacagggaaagtggtgtgatgaagctgcgaagatccacagaaaattctgatgaagcgatgtgtccaggaaattcaaataatcaacttaccaatgatcatacgaaggcaaggaagcagagaagggccaacaaagacaataaaacaccaccagtgaacgctagtgttccatgcacacagattgatgctgcacgattagcatcagatcagcaaagctttatttgcacgcgacccattgatagaccttactggactggaatcatgaagattggccaggaatatatttcattggttgcacacctgtcaaatcaagcatgcaagaaggtgcaggaattatcgatgtcattaccaccactaatgaaagtaacaaagcattcaaagttgaaagcctggccagggaggtggaaggcatcggaacctactgctgaatgcgttggcttgtatttcttctcagataatatgagggaactggatcaacttgtgcattatctcaatgatcatagcttagtcctaaaatatgtcgttggctttgccaagctgctgatctccccgtctgttttcctaccagagcaatgccaaacgttccaagggaaacgctatctgtggggagtgttcaagcgcaggatgaatacggggagaatacatcatgtgaatgcaaagtgacaccctagtccaataaatccatgttgtgaagggtatcgctagctcaaagagacaacagttcgccaagcactgttgatgcctttttgagctgagaccgacccctgtgatcataagcagccccgcgagaactctcccctacccaggctatcgggccttgtcattgtgcggacgtctgaggtcggagcacttcatttgtttgggagctggaaaaatgaaggtgcactggttggtttctctgaacttgtgaaagggttagcgaaggaccgtactgtaatgttcatggcctggaggaatgatgcagcaagtaggatcagaaatcagaactagccagcgacaatcacgctccagcttctgaaacgttgctgtagccttttgttgatgttcaggactgggagctagattgtcacgatttgacactgaggacgttactgtgcctgcaagcctaacctaagatgtatcaagcatcaagtgctgctgctgctgctatggaaggtcttagccaaaattaaattatgtttctaagctctgcatgcatcttaacctgcgctaataggttttcttgatggcctcaatgggagcagcaggaacctactactttttatgcgcataaactggcacttcgcatgatgtacttgttcataagttggtcaaaaagtcggttccgtggggtaaatccattaaaaaagggtaaattttagcggagggagcagctacagttggcggggaacttgctttagaaaaaagttttagtagcttatatgccttgggagggttacaattttgaagacacattactaattagtgaacgtttggtatatgaggatatttatactttttttcacatccgaaaatatgaaattcagatggatacgacaactcaaggttccgctgataaaatcactaaacaaataccacatctagaacatttac

SEQ ID NO: 40663 - DNA, 3097 bp, Zea Mays
gcttcactccactccactctacttcgtccatacagggaaaacaaaggcagcgtggtctggaatccaaaacagggcgagcggcacggcagcggaggggagaccacggtggttggctggctagttgccctctccgcccgccagagacctctcctctcctgtccccaccccctttggcctttgctcgttcgtggcgctcccgtacgcgtccagcgacgagagtttaccgctccggtttcgcttcgtacgggcggttgatacttgatagcggttgataagaggcgcggcggcggggcgagagagcttggttgcgccgaggttgcgcgaaactactagaaggaggggggacgaggaggagtgcggagtgtgtcttgctttgctttgcctcgcctgtccgggctggttggttggtctcccgctcgctacagtccaagccgacgcacaaatctcggtctcggacgcgccgccgcggtaggattccgggtgcctcgattccttgtttctttccgaggtatccacgaggttcgctgccatggagccagcaggcgtggcgcattgaggcgcgcgtgcggggccgtggagtggaggggcatggatctggaagccgcgggcggcgcggaggcggcgcacgggaagcggcgggcgacgctgctgctagcgtaccagagcctcggggttgtgtacggcgacgtggccacgtcgccgctctacgtctacaagagcgccttcgcgggcgacgacatccagcactcggagggcaacgaggagatctacggcgtgctctcattcgtcttctggacgctcaccctcatcaccctcctcaagtacgtggtcattgtcctccgtgccgacgacggcggggagggcggcaccttcgcgctctactccctcatctgccgccacgtccgcgccggcctcctgcccggcggcggcaccagagatgagctcatggaggaagagaaggccaccgggcgtcgtggcgagcggcccgtgtccagggtcagggcggtgcttgagaagtacagagtgctgcagcggctgttgctgctgttcgcactgctcgggacatgcatggtcatcggggacggcgtgctcacccctgcagtctctgtgttttctgcggtatctgggcttgagttgtcgttggaaaaggaacagcacaaatatatagaacttcctgtggcctgtgccatacttatatgcttgtttgcgctgcaacactacggcacacacaaagttgggtttctttttgcaccaatcgtatgcatttggcttctctgcataagtgcaataggcctctacaatatcatccgttgggaccaccatgtttatcgagccctctcgccatattacatgtatcaattcctcaggaagactcaaactggtggctggatgtcactgggtggaatccttctctgtgtaacaggctctgaagctatgtatgcagatcttggacatttttcgcaatcagcaatacagattgcattcatatatgtggtttatcctgcacttgtattggcttacatgggacaagcggcttttatttcacaacatcacaacttcgagagcagttatcatattggattttatgtgtcagtaccagaaacactcagatggcctgttctggtgattgctatactggcagctgtagttgggagtcaggcaattattactggaaccttttcaatcatcaagcagtgctcttcattaagttgtttccctggagtgaagattgtgcacacatcctcgacagtgcatggtcagatatacataccagaaatcaattggatgctgatgatactctgcctggctgttactattggcttcagagacacaaagcacttggcaaatgcacaagggttggcagtaataactgtcatgcttgttaccacttgcttaatgtcactcgttattgtgctttgctggaacaagagtatcttccttgcccttggtttcctgcttttctttggcgcgatcgaagtaatctacttctcagcttcccttgtcaagtttcatgaaggtgcttgggttcctattactctctccttcatatttatggtggtcatgtgtgtctggcactatggcacgataaagaagtacgagttcgatgtgcaaaacaaggtttcagtaaactggctcttaaaccttggtccttcgctgggcattgttcgtgttcgaggcattgggctaatacatacagaactgatgtctggaatcccagctatcttctcccacttcgtcaccaatctgcctgcgtttcaccagagtataggctatacagggtcattgtcagatacggttatcgcgatgtccagaaagatgacctagagttcgagaaggagctagtcggcaacattgcagagttcatccgcagcagcgcggaatacgacaagaatggcttcgccgaggacacagataagccctccgggaagctgtccaccatcagcactggaattaacatgtgggaagaggatggagaacctgatgcatcctcatcccctcgcaaggagacagacccacgcgacgcagcacccgagcgaaagaaagcgaggttcatgataccaaagagcgcccaggtggacagcgaggtgcggcgcgagctgcaggagctcatggacgccagggaggcgggcatgtccttcatcctgggacgctcgtacatgaaggcgaagagcgggtcgggtttcgtaaagcgggtcgtgataaacttgttgtacgagttcttgaggaagaacagccgtggccctgcgtacgccgcgagcataccccatgcctccactcttgaggtaggaatggtctaccaggtctgacaaacagttagcggggtgtgtaaaggtagaagaaactagaagagatgagacgacgcttgtatatacacccacttgttgctgccgataccgttaacataattacaggataacacagagtagagagacatttgaaaacagctgtggatagcccaaccagaagcatgtgtttagtttcgtgatatgtttgctgctgctgttgacttgctgagtctcagacagtacttgtgagctgtcattgtctgtgagctgtaattgtctgggcgactagcaaaatagcagttttgacgtgc

SEQ ID NO: 40664 - DNA, 395 bp, Zea Mays
taagaaaagagcacacacacaatttagagattaagtcaaacaaatgaaaaaaaatgcatcatgctggagtttctatgtttgtgcattaaatgaaataataatgttaatgataataagataataattactagaagttgaattaaaccctaaatttgaaaatgagggttttgaaaataaaagaaaagaaatatcacataaaacatagggaataaatagatacataaatatattcttttcatctccaaatgtaaattggcacatatgatataagtacaaaatccataactaaaattcaaacttggatttgaaatctaaaaggagaaataaaaatctaaaattgaaaagaaaaagagaaaagaataaagaaaagaaaaaaaagctgatcaacaagtgca

SEQ ID NO: 40665 - DNA, 2216 bp, Zea Mays
ccggatttgatgcgcgcatcttcaaattcgcggccttttttttttgctgcctcgcaaaagctgctgcgtcttagcttttccggcttcttaatttggacgatgtgtacggatcactgtcggccctaattatttccacagttttttaacccgcgggctgttttatatgtgtttctttttgaattgctcgatcccttctggcgctcttcatcttcttccgtggaatggatttttcctttgctcggccttgccctttgctgcctcaggtcccgtctgttttgctctaacgcagcatctggttgcagcagcacaccacaccccttctgttgttttggaataactggaagcctttcgggtttggaatttggcacctagcctgaatgccaccgaaaccattttggagatgagtgggattcattaagtgatccctggcaaatgattgagcaagcagtgacaacttgtacttagcaaaatagtaaattgccaaggctgttgtaatgggggtcaacggtcatcacgaacctcgcagaggatgtaatggcaccgtctgcaatggtagtgtaagatcactagatcattttggtgatgtagatccatggacggcatgggcatacaagcctcgaacgatctcgctcttgctgatgggaacatgctttttaatttgggcaagtggtgctctcgatccagaacggagctcatctgctgatcgtgtttcgtcagtcaagaggggtgtatttgcgatgattgctgtttttttggcttactcttttcttcaggcgccttcaactgtactcattagaccacatcctgccatttggaggctagttcatgggatggcagttgtttaccttgtcgccctcactttcttgcttttccaggggtgctttcaccccctcctgccgaagattgaaaccagatcaggagctatgcactgctgtatttccaccatactcgtgatgatgctaggcaattcatgaagtatcttcatcctgatcttggtgtcgaattacctgaaagatcatatggaactgattgccgcatatatgtacctgaccatccgaaaagcaggtttaacaatgtttatttttttctaggagataatttttgatgagtttgttatcgctcatatcctcggatggtggggtaaggctataatgatacgaaaccaaccacttttgtgggtgttatcaattgggtttgaattaatggagctcacttttcgccatatgttgccaaatttcaacgagtgctggtgggacagcattgtcctagacatattgatctgcaattggtttggtatttggactggaatgagaactgtgcggtacttcgatgggaggacatacgaatgggttggtttgagccgccaacccaacattatcagtaaggtaaaaaggatgctgggacagttcacaccagcgcagtgggacaaggatgagtggcaccctacgcggggtccttggagattcatccaggtgctgagcctctgcgttgttttcatggctgtcgagctgaacacattcttcctcaagttctgcctgtggatccctccgcggaaccccttgattgtctatcggctggtcctttggtggttaatcgcgataccaaccatccgcgagtacaatacctacttgcaagacagcaaaccatttaaaaaggtgggatccttctgctggctttccctggctatatgcattgtggagctcctaatctgcatcaagtttggacacggtctgtttccaaagtcaatgccttcgtggctgatcacattctggtcagcagtcgccttgcttctcgtgctctttgtgtggacgtggaaataccgaacaatgaaaaggaaaatgatataattgtgaccaaaaaaatgatttgtttgcctccattctttacccgatttagtgttatcgtgtacataaaaatttattcaaattgtgtacatgtgctagcagtcaagtcttggtgatctgaagaggattatccatgagaaatttctatgccttctttgtctttgtattttccgtcagcgaagtaggatactggttcccctttggccctttaattcgtctgtattgccgcgtactacttcgttggccgtctcttaaatgtggagaacccttgatgcaacaacctatgaaataatgggattcgaatcccaaactgttgaataatgtttctcgatggcccaggaaaccatatctgcaggttgcacgacactaaca

SEQ ID NO: 40666 - DNA, 569 bp, Zea Mays
gcaaggcaaaagttgcctggcaattctgtccataatacttactactactacttccatgttagaattattcatgacaactgtttgtcaaacctccctacaggtttcgagggcttattctctgcagcacctcaatatcggtggaacgttcatcacagatgaatccctctacgcagtcgcaaacagctgcgcaaatcttaagcttgcccccaagctggtgccgcaggaaatctggctcgaagagcgtcggcatcttcccacgtagcaagctccggctccattccagaccagcagactttgacctgggcgatgtgctccccaccacggtcgatcatgcgacgttggagaacccggacaggcacctggactgcatgtgtatcagtaggtaaatcaggaacgagaacatgattacgacccaaagccagcttcagctgtgagacgtgaaaaaccgggtgaactgagctggaagcaggcaactgaagacggtacgcgacagagccaattcgctccaatatcttgtatggtccaaaaaaacggaaggagagcttgttgttggagcggacagcgacgga

SEQ ID NO: 40667 - DNA, 2020 bp, Zea Mays
ccggtgtcatctcaaatattgtagctgatatcgagtccacttaaacccagcccaaatccaaactctagaaatcgaatacatatatatttatacacaaactattggaccgagaatattcaccaaatcaaaggtagtctaaaatagtgtcgttgaaattattttgattcagtccatttgtcttatgagatccaatttcaaaattcgtagttatctttatactataaaaaaaagaactacacagaagaacaaatgaaagaagggggaaaatatcctcacgtcactctctctctcccttgattttttttctccagccgcagccctgattttctttcttttgccgtgcgtgtggcttagctcatggaggaaaaatcctgaccgccgcacgcgctgcttccttatcttcttctcctggccgcaactcccttatctcctccgtgtcagctcgctcggcctccagcgctgcccgctgccatctgctgtagcgtcacaccgctgctgtggagggaccgagggagcagagcaccggagtagccaccgccgctgggggagttccaatcgcctggagtagccgtacagacaagcaacgatggtgtgcagcagcgcgtggtggaggccctccgacctccgatttgaccgtcgctccaagccctctgcacaccggcgcgcccctctggctcggttttgcccagcgatgtgcatcctcctctgcgcagactgctcatctccctcctctgctcggcgcgtccctggctctagctcggcctgtgtgcccctaagctctcccatggtgctaggcgtttctccttgacgcgcgttccgccttgccgtctccctgcgcgccgtggtatcccggcttttcctagctcggaccgcgttcagtccccagctcgccgtgcccggtcgagctctctgcgcacacgccgcgcacagccgtgtccctatgctcgctgtggccggtttcctgcgtcatgcccgggattttgccgcgcgtccttgcttgctgtctgtccacgcgtcgcgcgtagagcaatgaaacaaaaatccgtgcgcgtcgggctcgcgcgccgaatctttttctaactcaccagcgtgccctctcggctcgctcggctttaaaatccctatctcgtcgtcaacctcgccacgacttagttcatcgtcgcgccgttcaccgtcgagtctcgctaccgatcgtgaagtcccctgctgtcagcctccgcacatgtcctaagctgtcgtagccagtttgcctccatctcgtggtggtgttacgctgccgtcgagtcccgatatcgatctggttgtcgtcgaagtgaagctcagtttaacgctcgccaagggttcgatcaaagattttattcggagactgtcgacgttctcgcaagctttaagtcagagttaatggacgttaagtggattcgttattccagtcgactaaatataatatttattagactacttgaatcgtgtacagtgatttaatcggtagtcatacatgttgtcgatcccttgtgttataatagttattacgttctaggtagtttgcttgggttattagtttcgagtaaattaatattagtacggtatttaacatgtaattgacgaaaaacttggattcatattcattaatcaaagtagtaaatctaagctaaatttattattggcgcgcaagttgttagccgaattgttaggtagattaaataaataggtgtgatgcgaaataaaaattaaattagttcttggtaagcaaagtgatataatttataaagcgagagataagtttagcatttaattaactagctgatgagttatgtttaggctaattatgtttcaagtgtataatttgtttgcaatgtttgtgttagcttcgtttaatttagaaaagcgtaattattgcgcgtagtcgtatattaataactagtgttttcgtgtaagattatacaacgcctcgcccttagttgtttaatacgctatcgtatagcacaatttagatttgcgatattcttgtttatatgcattc

SEQ ID NO: 40668 - DNA, 420 bp, Zea Mays
cacgcgacgtgggcgtggcctcggcggagctaatggttgcgaggaaaaggatgaggctgacgagtgtggaaaaggacgaggctggcgagatactttcttatacccttgaactttgtgctgactattgctttaccacaagcttttagcctaattaaactttgcacttacattattggcatatcctattatagcgagataaggccctacataaatttgttcctactaagcatctatttaatattaactaaagttactaggatactatatatataaaaatttgaatggcagtaatgcaatgtgaccatgtcttaacaattagtcagaataaaagattgaacgacacttttacttttctttagaagatccttatgtaagataatatggatctactacccagtcttctttcctatagacccaatt

SEQ ID NO: 40669 - DNA, 2377 bp, Zea Mays
aaatatcagctgttgataagttgagatatcttcattgccttttggtttatgttcttccagtactgaagggaatttattctgaccaatgctttgaaataggtgttgaaacaagatcttctgatgtcctcagagcaaagataacttctgatgagcagatgtgctgtgacttttgcaaagtgccagtgtttgattatcaccgatactgcccaagatgttcatatgatttatgccttgattgctgtcatgacatacgtcattctcgggccaatgttgcacgaggagaatatactgaaggttatgttgaagataaaggtagagattcttttaatagaagagcaaggttggaaccatctgctgagagtgtcaatgacaagtcattatcttggccaatagatataaataatattgacattaaatctttattccctacatggagagtcaacaatgatggcagcatcacttgtggacctcacgaggctggtggttgtggctcctcaaagttggtattaaggcggatattcaaaataaattggattgctaaacttgtaaaaagttctgaagaaatggtcaatggttgcaaagtacatgatttggaggatggatgcttgtcttgcagtgatggcagaagatcggagtttactggtcagcaaaacctcggtctctcaaaatgctcaaacagtgatgagattggtaggaattgtttgtactcacctgtattggaggacttaaaatatgaaggcatcattcattttcgtaagcattggaaaaacgcggagcctattattatcagggaagcatttgagccttctctatcatcaagctgggatcccttgagtatttggagaggtatccaggagatcatggatgaagaaatggatgaagatgtcatagtcaaggctgtggactgctcgaaccaatcagagatatcgagctcaaacagtttatcaaaggctactcagatggcagcaaaggaggagatggcccacttgttgatgctgaaattgaaagagtggccccgacccaatggggtctcctaaaccttgctgccaagttacccccagatgccttacaacctgaattagggatgaaactgctaattgcacatggaagtcaccgagaacttggtaaaggtgattcaatgacaaatctaatgattaacatgagcgatgtggttcacatgttaatgcatgcaactgaagtgcattaccaatgtcccaagagggtaagggtacagtctgatgtatctgaaatgattgctaatggaactagtgtccatgtaaatgctcatactcctgttcaaaatttgaatctggatattgaagagcaatcacacaaacactcgaaatcacacatcgaggagccaaacactaataattcagaaggatccctggctggtgctgtctgggatgtattccgcaggcaggatcttccaaagcttaatgaatatctagctgctcatcgggaagaatgtgcagctagatgtcaagcagtgtcttctgttaagtatcctatttatgatcaaactgtgtaccttaacgattatcataagaagatgttgaaggatcaatatggaattgaacccttcacattccaccaacatattggtgaggctgttttcattccagctgggtgtcctttccaattgaaaaacctccagtccacggttcaattggctctcaattttttgtcacctgagagtttgccagagtcagtccggctgtcccaagagatccgttgcctgccaaatggccatcttgcaaaactgaagatgcttgaggtaaaaaagatctccttatacgcagcaagttctgctgttagagaaattcagagaataacccttgatcccaagttcaatcttgatcctagttttgaggatcaaaatttgactagggcggtttcagagaacttggcaagagtaaacaaacggaaggtatcttgcagttgagattgtgggggcctggtgaaattatgacatgccattcagaggattgaagtagatatagtgcttgtacatgtattatattgtgtcatatgaaaggaacacattctaattcttattgggttacacattgactttacctgtatattgtgggttaggaagagtaacagttaagcttctgaggaacaagataaaaaggcgctggaaagctcatgtagaattgttagcacaataatctctgttggtagcatctgaagaataattaattagaccgaaattgttacattgtgaacacagggttcaagatttaaatactatattttcaccacggttttgcatttgtgtcaacctgcacgtagtaacgtctaaattactatagtgtttcaaaccaagtgccttttttatatatagcatgatttatctagaaaaatcaaaata

SEQ ID NO: 40670 - DNA, 569 bp, Zea Mays
caaaaatatcacgtgttatctttctcaaaataggatatctagtaccagccaccttccaccaatctagaatcttgaagttttctgtgtcatatggaaccaactcatcatctaagtacctgtctagcttagttcgaaatcttgcacccattggccttctacttgcaacacgagcactcaaagtagacaaaaataccagaactatcaagcgaaggagcagctgactcactgttgtcctcatcaccatccaattgatactccctcattaaatcacatagagaggctttgacttcatcaactctttcaccacacaagtcactagactggcctaacaaggtctcaaagaatccatatatgtaatcaatcttaaaacggggatcaaggacagtagctatggccattggtccttgaatagccttcaagtacttatcaaatttctcaatcattctagctgtcatctcttctgtaatatggatcccacatgtaccccactgcctcatttttgtcttagcctcacaaattttgagaagttgcacattggcagtcacataattggttccagaaaataaaac

SEQ ID NO: 40671 - DNA, 348 bp, Zea Mays
acctttgtagagacgaaataaagccagcaagaaagacgttgtagtggttccttcggtgcttgttttcagaaagagccgggggtactctgctacacgcaaggagctagcagatgaaagcgaatgcgcggtggtggtggcggcggcgagccggcgacacagaacgttttgcagcaaggagaggggttccaattcagaggcacgcagtagaggaaggataggaacaaacgagcctgcctgctggctactggctagggaccccaggtcgcagtgaggcacagcaggaggcttgccatttatttataacgagaaggcgacgagcactagcagcatcgtgccattggagtcgtc

SEQ ID NO: 40672 - DNA, 2264 bp, Zea Mays
gggaggggggagaaaggtgtccaaccaaccttggttgaaatcgttttgtgacacctagcattttacatagcctatataatataacagcccctagaggagggggaggacagacggtgtgtggcatggcataagctatagcggcatcaagtggtgggcacacggagagctggtgactgggcatcggaaccgagcaagcaagcaagcagaagcaggattccggcagagggaggaggaaggaggaaggaaggcggtcgatcgatcggaagcgccggcgccggcgccgccgcaaaggatcgggcagacgagacgacacgaggttatctgaggcgcagagctcagggtgaaagaagaatctagtgaaagtggaaggatccgcgcacgggctccgtccgaagatgctgccctactttgatccggagtacgagaacttcaaccagcgcatcaaccccccaagggtttgcatcgacaacaccacatgcagcgactgcaccttggtgaaggttgacagcatgaacaagaatggcattctgctggaggtgctgcaggtcctgagcgatctggaccttcacatcttcaaagcctacatcacctctgatggtgggtggttcatggatgtgttccatgtcgttgataagcaagggcagaagatcactgatgacaagaccatcaagtacattgagaaggctttaggtccggagagcaatttgctgggcgcaaagggcagcaactcagcggggaggtcggtggggctgcactccatcggcgaccacaccgccatcgagctcaaggggcccgacaggaggggcctcctctcggagatcttcgcggtcctcgccgacctccagtgcaacgtgctggccgccgaggtgtggacgcaccgcatgcgcgtggcctgcgtcgtgtacgtgaacgacgtggccacggggcaggccatcgacgacccggaccgcgtggcccgggtcgaggaccggctgcgccacgtgctccgcgggtacggcggcggcggcggcgcgggggacgacgacgacggcagcggcgcgcacgccaacttcgcggccgcctcttcgacgccgcaccacgtggaccggcggctgcaccagctcatgcacgccgacgtggacgccgtccacggcgacggcgcgcacgcggcggccggcggcgagggcgaccggccggccgtgacggtggagcactgcgaggagaagtcctactccgtggtgaacgtcaagtgcaaggaccggtccaagctgctgttcgacatcgtgtgcacgctcacggacatggagtacgtcgtgttccatgccgccgtgtcgtccgaagccaactacggcatccaggagctgtacatccgccgcaaggacggcaaaacgcttctgaaagacgaagcagagaaggtgatcaggtgcctggaagcagccatctccagaagagtatccgagggattcacgctggaggtgtgcggccgggaccgggtgggcttgctgtcggacgtgacgagggtgctccgggagcacgggctcacggtgagccgcgccgacgtgacgacggcgggcgggcaggccacaaacgtcttctacgtccggaacccctcgggccagccagtggacatgaagaccgtcgaggggctcaggggccagtttggccagaccgccatgctcaacgtcaagagcgtgggcgtgcctgctgcggtggccaaagcggcggagccaagctccggcagcatggtcaggagcagcttcttctccttcggcagcctcttcgcgaagctccgggcctgacaactggtcaggcgattcgaactccagctgtgtgtagaagaaatgaactcagaactagggtagtggactagcgggggtgggcgggggagagaaacagggagcaactgtatctctatgtggcagctgtggttgttgtacagttcataaggagcctctaccagaagaatggtagttctgtggaatgcaggctgcggactgcttgttaaggtaagggtttatcccatctgcgcagaatttaaaaaaaaaacatcgatcctgtcatctgtcgaaactgtctctgattgttcagccccacacaacattccagcatttgcctctgcgtcactgcatgacttgtaacttcatccaaccattctctaatggctaatgctaaaaagtcttagtaatgagagcaagcaactattctccgtatattctgacaaaaggggcagccgtgtatgaacttgcaaactatttgcagacagaatgcaggcaatacgccggcaa

SEQ ID NO: 40673 - DNA, 3006 bp, Zea Mays
catcgaattacaagtgtaccttcaatttgaaggagatgaaagtataagcgtgacgcaaaagcgaatgccaaatcagcgtgaacagtacgggagtactgttcacctatttataggcacgggacacagaccatacaaaattacattcatgccctttacatttaataataattctatggtagtctatcgaggtctgaatagccttttcatttttaagtcggtttcattttctgctaccacgccgaagctttcctgctcacatcttcggcgctgtatcgaccttcgtattatcctggtctactcctgccgcgataccgacttgagtccgaaggtacctgctcacacattatacttccagaaatactattaaatcctgtttttgaggaccttcgtaagccgaaggcccccaacaagcacttttgttggtacagaagctttaattgtagtactagataacctgtataataaagtgatagtaaaaccaatatcgattcttttaactaactaataaacatactgattgcgcgcttagggcatgtatagtggagagacatcaaaacggttctccaagcacaagagacgactaagagactctattatacaatggagtgtctataaatatagtatattaataaatacatgagtaaatgcacttgtaaaacatcatatcaatagaataaacgacgaaatggtgcagtgggaagtgagacgtctgtgtgctatttgggttacgagtcagagacgtctccttacggagagacgactctacgatttttgttgttgttgttacaaataaccctttaaacaactcaagagcctctatattaaatattattgtacatgcccttacgatgtaggtgaggtttgatgattcatgaggaggttggggggtcaaattttctccgagaaagaaaataataaaaaaccggaaagaaaacgcatgaggtgaggaggtgggtccatgtgtgcatgggctgaaatgatggccatgcatagcgcagcgcagggatagaaagagaagaaaggtgagaaagaagtgttcagttcagcatgagcatcccaacgacgaacgagatctcatctctcgtaccccttgagcttttggtcgatctgcagtgggacccatccatcctcacttgcttataacaaccaactaaaacactggtgtaaaaaccagtgcccagcactgccagcagcttcacttcaccctgctgtacctgttactaccaggtttgcccttcactcaccactcaccaaacaccgttaattctaagtagctttgccttaattaagttgcattattatatcgtatgtacctgttgccgccgccgcaggagcatcaccacaactgctcctactagtactagttaaaacatctgtcgtcgtgctcacgacatgcgcgcctcctcctccgcaccttcttcttccccttcttcccagtacatcgttgagctcttccaccgtactccaccattgttttgtttctccccatccccatcttcgtcgtcagcaccacccaagcattctccgcgcttgctctgctccaggtggcgctgcggggatgagcggcgcgacggtggaggaggtgcagatccaggaggctctcctcttctctgaaaccatcaagggtctcaagacactgaggtcgcagctgtactccgcggcagagtacttcgagcttgcctacacgcagcaagacgaaaagcaggcggtgacgaacaacctcaaggagtatgccgtgaaggccctcgtcaacaccgtcgaccacctgggctccatatctttcaaggtgtccagcctaatcgatcagaggttcagtgaggccaccgatgccgatctccggatctcctgcatccaccagagaactcaggccagccaagcctgtgtcgacagagagggcatttcgcagcagtccttggtgatcactgccccaaagtatcacaagagatacatcttgccaggtactacgtcagtatcagctatcctgttcttggctcattctgtatctgtaacggctaattaaaattccatttgggaattgcgcgcagctcaaggccagtcaatgcccagtgccatgcccaacttcagggagatgaacaaggtggtcgtcacaggcagggcgtctcagatgcatcaagtattcagcgctgaaacaagagctaaagagaagaagcagccttcactcagaaagttgcaatccatcgctcgcctaccttcgcagcgtgcacgttcagcgtcgccagcacagcgtgcgcatcccatggcaccagctaagaacgctacacccaccaacagagataagcgatcggaatcaccagttccttcgacagctccagctccactgacaaggtccgcgtcgctctcaaagaaggcatccttgctcaagacatcaagcgtcagggctcaggtcgacaggagcgacgattccaaggacggtgagcgtacccctaagaagagcaagaagttcctcaagtccatcctcagcaggcgcaagtccagaaaagatgagccgctgccgagttactttgacgactactgagccacaggatttttttttcttctccctccgttggacggcaccgcgcgcggtctctgcgtactcctacttcagtttgtttcactttcatccaagtgttatgttctcaatataaatatcgtcttcgtatagaaaatagcttaaagtttacatgaatgcagtgggaagtttcagcaagatgtcatcaccccacttgcctgtttctataagagatgctcagatcaagagtaaacctgtaacagtcgatgggaatacacaagtaacacagaaacatcgggtgtaaaagaggcaattacctctcactctcacgcattgcaacagagagtagaaagtacaagattttctcgaaatattacagctacacaacaatacacaactgatatggatatggcaacgttaacgccagtgctccactccacaaaccccatatatatactccccataccaaatacaatctttgtttggtatggata

SEQ ID NO: 40674 - DNA, 617 bp, Zea Mays
cactagcatttagaggttctaggtgctaggagcccccaggttgtgttccatgctcaaccacaatcaaaattaaccctgaagttctgcaaggagtaattttgacaccttctgtaaagaaggtaacaggggccaaaaggaaaaatgacatcactataatgatagagaagagattaaggttgtccaaggattcctgtggaaagagagcatatgaagtgcattaggaattagagatggaagtggacaattgcacatggacatgacagaagttcctgttgcaatagcaaatattatctcaaccgacccaaccactaagatgagttgtaacaaaaaatcaacattgaaccaaggttctacagcagcagcaggaagaggaggtggaagcaaggatcagattgcttgaagtgtgaaaaaatgattactcgcatgcatgctagctgttggcgtaacatccagccgatggagagattttagtttgctagatgtatatttatacttctgcatgtaatagaaatgaaagatcacttcaaaaatttaggaaattcgtgtatgctactatttttatatgttcatcactggaatcgtgttctaaacaaatatatgttggaattcaaagtcaa

SEQ ID NO: 40675 - DNA, 1171 bp, Zea Mays
cttccctgtaaccctagggtcagggactcaggggagggccggcgtgcccatggaggtcatgggtctcatgctcggcgagttcgtcgatgactacaccgtcagggtcgtcgacgtcttcgccatgccgcagagcgggactggggtcagcgtcgaggccgtcgaccacgtcttccagacaaacatgcttgacatgctcaagcagaccggcaggccagaaatggttgtaggctggtatcactcacatcctggcttcggttgctggctatcaggcgttgatatcaatactcagcagagttttgaagctttgaaccccagggcagttgctgttgtgatagaccccatccagagtgtgaaggggaaggtggttattgatgcattccgcctaattaatcctcagaccatgatgcttggccaggagccacgggcagacgacatcaaatgttgggcacctaaataagccatcgattcagacactactactcgattgcaatcaattaccgaaaaaatgaacttgaggagaaaatgttgctgaacttgcacaaaaagaaatggacagatgggctaattttgaagaggtttgacactcattcaaaaaccaacgagcagactgtccaggaaatgctaaacctagccatcaagtacaacaaggcggtgcaggaggaggacgaactgccacctgagaaacttgcgatagcaaatgtaggtcggcaagatgcaaaaaagcatttggaagagcatgtgtccaatttgatgtcatcaaacatagttcagaccctaggaaccatgctcgacacggttgtattttagtctctactaatattgttgttccaaactgaaacatagcccactctatcgaagcatgacacatgcaatgagctcgatgccggatacatttttggttctaagatttgtttacgaatggatttgtctacattctgttgttaaactccctaccttttctatcaaagcttcagtatgttctagttatatttaagccaatgtgggtccacattgtcaattgggatgtcattacccctgggagaaattgtgtaatgcgattatatgacttgttgcgtgggccgcgtgtgatggcttattttgtttgttccacatgcgttggcaccaagtttctcatgcaaatatttgagtgatcttgcaaactcatctattc

SEQ ID NO: 40676 - DNA, 1813 bp, Zea Mays
cctccccctctgtcctgtcttcctctccttcctcctcgtcgtcctccgccatagtggcgagcacgacaacagccacgcctcacgccctcacctccaatcattggcctccccaacccaacctctccccgccccgtcctgttgagccgggtgattgacggattattagttaatccgggggcttcacctcgttttagcggcctcgttcgttcgcctccgcaaaaggctaacgccagcccgggcgcgcgctaacggcagcaacgacagcaacccgctggctagctagtcctccccacgattcgactccgccaccgtccccggcccagcacaccttttcttctctcctgaagcaaaaaccaccaaagactagtcctacaaaatctaggggttctatggctgtttcaatgagggaggtggatcctgtttttcaaggtgcaggtcaaaaagatggattggaaatatggcggattgaaaagttacaggctgttcctgttcccaaggaatcatatgggaaatttttcacaggagattcctacatagtactgaagacaactgcccttaagaatggttcttttcgtcatgatatccattattggcttggcaaagataccagtcaggatgaagctggtacagctgcaattaagactgtggaactcgatgctgcccttggtggaagagctgtccaataccgtgaaatacagggaaatgagactgagaaatttctttcatactttaagccgtgtattataccagaggaaggtggtgttgcatctggtttcaggcatactgaagtaaatgagcgggagcataaaacacgattatttgtctgcagaggaaagcatactgttcatgttaaagagatacaaaatctaagatattccaattcaatggatcaaattcaagtattcaggagagggctaaagcacttgaggttgtgcaacatcttaaagatacaaaccatgaaggaaaatgtgaagttgcggcagttgaggatggaaagttgatggcagatgctgatgctggtgaattctggggtctctttggcggatttgctcctttaccaagaaagacattttctgaactcaacgggaaagattctacttccacttcaaaattgctttgtgtaaacaagggccaatttgcccctattgattgcgaaattctaaaaagggagctattagattcaacaaaatgttacctactagactgtggttctgaaatttatgtctggatgggtagagaaacaactcttgaagaaaggaaacgaggcggctcagctgctgaggaattactacgtgaaggaaaccggcaaaaatctcatattattcggctcatggaaggatttgagactgtcacattcaaatcaaagtttgataaatggcccaagaaagctgatgcagttgtgtcggatgaaagcagaggaaaagtggcagctcttcttaagcgacaaggatttaatttcaaggatccagcaaaagctgctcctgtaaagcaagagcctcaacctcagattgattgcactggcaacttacaggtttggcgcgtaaatggcagtgataagactttcctttcgttttctgagcaatgcaagttttatagtggagactgctatatctttcaatacacctaccctggatatattggagatgaatgtcttattggtacctggtttgggaagaagagtgtccaggtaactgtttaatgcattttctatttgctgtattgcacatatgattgatacattgccatgaatcttactcaacgtctcattatttagtgcatgtttgtactttatcaacaatgtgctttgtgttgt

SEQ ID NO: 40677 - DNA, 99 bp, Zea Mays
gtttggtttgccaaaagcactagctgagtttctaattcaagttttaactttgtcaaatgtaagtgtgactctcttaaggctaaatgtgtactatcaact

SEQ ID NO: 40678 - DNA, 643 bp, Zea Mays
aaaaaaataaaaaatccgtcgtcgctttgctctgcctccgcggctccgtgtgcccgactgcccgtcccgtgccgccccacttgcagttggagtcgccactcgcttgctgtggtcgggtactcgggtcggcccaccgcctcctaccagcctccgaccaccgcctcgccacttgccccgcgtgcgtcccccgtctccaactccaatggcggcgccctcccacctccacctcccgggctgcccccaaaccctagccctgcccctgccctggccacggggcttctctgctccgcccggcctcctctcccgctcccgacgcctccgcccggtcgccgcgctcgggcccgccgacgccggcgacttgctcggccgagtcgaggcgttactctacaccgtcgcggacgctgctgtctccgcggagcccgtcgcggcggccgggaccaaggaggccgccgccggtgactggctctccagcatcaccaattccatggagaccgtgctcaaggaactgtctccccaacaagttgatctctccttgttctagagatgcagtccacctgaagaaccgtctcaactccatggtcatcttgggcgcttggatcacttggaagcataggaataagtgtgtgtttgataagtgtcgtcc

SEQ ID NO: 40679 - DNA, 300 bp, Zea Mays
ggataagtatgcaccccatgctccttggccgggatacccgagtctctctcgtgactatcccctccgtttcctctcaaatcgtcgtgccatgggcattctcgtcgccgtgtgcagaggagtgatctaccgtcgtcaggaattctccgattggactgttgtgcacgccgtcagctgtaccagagtctttcctcgggtgcatggagggacgctcgtggcggcgctactcggaattggccacgggcgcgccacaattcctcgccgtcgaaccaaatctgccgcgcgccgtgggcagccatgtct

SEQ ID NO: 40680 - DNA, 646 bp, Zea Mays
caactgctccactctcccggctccccgcagccccacgtcggcccatccctcgttcccccctgctccgcaagcgacgtgctggtcgcttcaatggcatctcgggcgcccctgccgggctcgccggcctcgatccccatcctcatcctctccttcttccaagggtcggtatgcggcatcacgttcaccttcaccaaccgctgcggcgacacggtgtggccgggcctgctgtccggctcgaggacgccgccgctggagaccacgggcttcgcgctcgcgccggggcagtcacgctctctgtacgcgccgcaggggtggtcgggccgcttctggggccactccggctgcacctttgatgcctccggcaaggggtcctgcgccacgggcgaccgcggctccggcgaggagtttcaagctgcacgtgatagcatgcaagaggttatggtgagaaattcagttgaagctaccacatccttgacaagtacacaacaagggagacacatgagaactggattattcaatgtgtcaactgtgacaccatttccccggcaattttgatcttgccacgtcaaggtcttctccgagtgagtgaattcacattgatagagattgggcatttcgtggacctagaggacaaatcacatccaaa

SEQ ID NO: 40681 - DNA, 2090 bp, Zea Mays
actcactcaaagatactaaaagggcaggtgtagaggtgaacgggagaccagtagtctagaattctcaccagattctgctgtgcaattactcacagaagccaccaaaccagtttcaggatggaaggggattgagtatcgagcagcatttcctctacataagcctcccggtgctaacttctatcctcctgacatggacaaagcggagtttgaactttggaagagtaaactgacagataaagaacaaaatgatgccactgggtttttcaccgtcataaaacgacatgactctctgtcttcatcgtcattaacacaatcagatggatcggatcagaccaagactaaagatgatctttttattgttccatactccaaggagtatagaccattcctagagaaagcagctgagcttcttgagaaagcatcagcgtgctctgattctccaagcctcaagaatttgctgagaaccaaggcgaatgctttcctttcaaatgattactatgaatccgatatagcttggatggaattggactccaacttagatctcacaattggcccatatgaaacatatgaagatagcctttttagttataaggcaacttttgaagcatttgtcggaatacgtgatgacacagcaacttctcaagttaaactctttggtgatcagctccaggatttggagaaaaaccttccaatggacaatattttcaaatcagatagtatatctgctgctcctattcgtgtgatcaatcttctctacaatgctggggatgtgaagggtccacaaaccattgctttcaatttgcccaatgatgaaaggattgtgaatgaacgaggaacttccatggttatgctcaaaaacatttcagaagccaagttcaagcatatcttaaagcctatagctgatgcctgcatcagagaggaacaaaaggaatatgttgatttcgagccatattatacacatatagtctgtcatgaatgctgccatggaattggacctcattctatcacccttccaagtggtaaaaaaacaacagttagaagggaacttcaagaattccattcagcattggaggaggcaaaagctgatatagttggtctctgggcactgaatttccttattaagaagggattgcttcctaagagcctgtcacaatctatgtatgtctctttcctggctggctgcttccggtcaatccgctttgggctggaagaagctcacggaaaaggacaagctctgcagtttaactggttgtatgagaaaggggcttttgtgttgcagtctgacggaaaattctcagttgattttacaatggttgaggatgctgtagaaagcctgagcagggagatactgacaatacaggcaaagggcgataagccttctgcccaatctcttctccagtcccgtgcaacattgacacaaccattgagaatggcattggagaggatagagcacatgcaggtacctgttgacatagccccggtattcagcacggcaaacaagctatttgcagacatttaactatttgggctcagaatcgttgtgctttagtaccgcccacaatacctggacgaaaccaggaattgctcaagaataaggcggcactaggaattgctcaagaataaggaagcgccccatgttaagcaaagctgataaaaccatggcgatatgtgagtgacctttttatcggaaggaaaattgtttgcatgcttatgtattgacctcaatttttacgtattggagtgatttgatgtgaaatttaaccaaattccacgtccagtacatggccatccaaacatggcctaaagtggtgtttgatcagtgagaattggaataaacccagctttgcctgaacagttgcgaagtactgagttacatcaatgcatattttgtaacaccaaaaaaagatgtattatcctaatggatgattgaacgaaggcattgtatatcgatccccaatggcccaatctttatgcacattctggcttgatcagatctagtttattagttaggcatatgacatctttaactcttaattttctaatgaacttgtcgaagttccatactagttttacattgactaacagataaa

SEQ ID NO: 40682 - DNA, 4500 bp, Zea Mays
cggctgcgagcacacaccacactaggcactagcacacctcccctctcaggctctcagcgccccgccgccgccacgcaattgccagtcctcgcgatatgggcgcgcaagaggaggcagtggacgagatgctgcgcgccgccgccgccgaggtttcaacctcctcggtgaagcgccgcctccgcatcttccaccacaccctacctcctctcatcgcgaaggccatagagtcaccgtcagatactgtattgttagtcgatctcattttccagacattgccaatatatgacgatcgagcatcacgaaaagcagtagacgatttggttattcaggctcttggtgaacccaccttcatgaagccctttgctgcggtacttgtacaatctatggaaaagaatctaaaggttacaaacccccttacaagcttaaagcttctcagatggtcacactatcttctgaaatggagtcagtttgccacacttacaaaaggcgcctttaccagactggccaatgcacaagcagtcttatgtcaagtccttatggatgggtccttccgtcggcgccggacttgcaaacagttattcattcatctcttctccgagcacagtggaatatataagatgtacatagaggagctcagagatttaaggatttccatgagagattctcctgcatttttgaatctaatactggattttaccattacctctccatcattatccactcagtaccagtcagtattccttgatttgtatgtcaaaatcatcttgagttcaaaagatcggccaccgaaagcagccactgaagcttttaagcctcttttcttgaacattgggcatgaggattttaagaatactattataccatcatgcataaagatgctgaaaagaaatcctgaaatcgtactacagtctattggatatcttcttaagacagtccatttagacctaagcaagtattccatggagtttatgccagttgttctgcatcaagctcggcattcagatgaagagaggaggattaatgctttgagtattataggaacactaagtgagaagtcaagtgatccagatgctctaccttccatggtcaatgctatcaaagctgttttaggaggctcagaaggaaaactatcacttctataccagagaattggaatgataaatgctttagagcagctatcaagatctcctccaaagcaaataggcagacttgccccctcagtatcaactttccttctaacgtgttacaaggatgatggtatcgaggaagtgaaattggcgattctatcagcaatagggtcctgggctttggtatcagctgaagctgtccaaccagatgttgtttcatttattgctgcaggcttgaaagagaaagacactttaaggaaggggcatctgaaatttttacgagttatatgcaaaaactctgagtctttaacaaaggttgcttctttattggatcatttgattcagttgtcaaaaactggcttcagcaaggcaacacagcggttggatggaatctatgcactctttgcagtatcaaggcttgctgctgttgatacaaaagcagatggtgccattctgaaggagaaactgtggacattgattgctcaaaatgaaccctcattgatctctttacagttgcttcccaaactagcagatgatgattgcttagccgtcctggatcttgttcaatcactgtttgtagaacagttcttcagggttcgagaatatttttcaatccattcattgctgcagctgctaatatatctactttgccatccaagctgggaagttagaaaggtagcttacgatgttaccaagaaaattttctcaagctccagtggtctagccgaagatattctatttttattcacagactggttgtcactggttggagagagactgtcaatattgaaacaaggtgatatggatagcccttcggattctcagctaccattctttccatctaccgaggtccttgtcaagtgtttgtttttgattgcaccttatgctgttgtgcatagtctgagatcatattctcgaattattttgtgctcccaccacccttgccttaccagctcctcaagcccagctggcgtatataagaggttgcaaagaaggcttagacaagaacagatcttttttgttgacttaattactcccaacatctctgttatctgcaagcacttcataggactccaggagcgcaccttgcacgattccttctctgagagtgatattaagatattctatactccagaggggcagttgtcaaccgagcaaggagtttacattgctgaggctgttgctaacaaaaatacaaaacttgcaaaggggcgtttccgtgcatatgatgatcagatgcaggagacagctcggtctattgtccctgcaaagaatgagaagaaagaatcctcaggcattggcaagcgagaaactgggaaatctacaaaaaggactgctcctatagacaaggctaagactgctaaagaggaggccagagagttgctcttgaaggaggaagcatctgtgcgtatgaaggttgggcaagtgcagaaggatctctccttaatgttggatgctcttggcaagttggctattgctaatcctatatttactcatggtcaactgccgtcactggtaaactatgttgaacctttgctaagttctccaatagtaagcgatgctgcattttgtacaatgttgaggctagcacgttgcacagcccctcctctttgcaattgggcgctcgacattgctgctgcgattcgtgtgatatctgttggtgattttgaaatggttttggatcttacacctgtgatcatggaagatgatagtaagaagccatcatctggcatctttgaacaaatagtaaatgggctgactattgcgtgcaaagcgggtcctcttccagcagattcatttactttcgtctttccgatcatggaaaggatccttctatcttcaaaaaagacatgtcttcatgatgatgtgcttcacatactatctatgcatatggatccaatactaccacttcctcgacctaggatgttatcagttctttatcatgtgctaagcactgttcctgcctatcaaccttcagttgggcctatgctgaatgagctatgcctaggtctaagaggccatgagttagcacaggctcttgtcggtgtatatgcaaaagaactgcatgttaggcttgcctgcttaactgctataaaatgtgttcctgtgcactctgtgcaacgagatttgcaggtgtcaacaagcctctggattgctgctcatgatccggagaaggtggttgctgaattagcagaggaattatgggaccgctttggttttgatgccatcactgattactctggtattttcaatgcactttcccataaaaattacaatgttcgtgctgcatctgctgaggctctggctgcggcattggatgaaaatcaagacaaaatgcaagatgcactttctacccttttctctctgtacattcgtgatattggcactagtgttgaatttggagatgcacactggctcggaaggcagggtattgcattagcactccactctatcgctgacgttttggcctctaaagatcttcctgttgtcatgacatttctcatctcacgcgccctggctgatccaaacgtcgatgttcgtggtagaatgattaatgctggcatccttattattgacaggcatggaaaggaaaatgttcctttgctatttcctatttttgagagctacttgaataaaagggcatcagatgagaaaacatatgatcttgtgagggaaggtgttgttatttttactggtgctctggcgaaacatctatcaaaggatgatcccaaagttcacagtgtcattgaaaagttgttagatgtccttaacaccccatcagaggcagttcaacgtgctgtctcagattgtttgtccccacttatggtatccaaacaggaagagggtcaggctcttgtttctagactcttggatcggatgatgaaatgtgaaaagtatggtgagcgacgaggtgcagcctttggccttgctggtgtggttaaaggatttggaatttcttccttgaaaaaatatggcatcgctgtgacattgcagaaaaatttggaagacagaatgtctgcaaaatctcgtgaaggagctttacttggatttgagtgcctgtgtgagaagcttggcaaactatttgagccgtatgtcattcaaatgcttccgttcctacttgtgtgtttctctgatcaagtcctagcagtgcgcgaagctgctgagtgtgctgctcgggcaatgatgtctcagctcactggtcctggtgtgaagcttgttcttccgtcacttcttaaggtatcaatatatcttatttgatgctatcaaatcataacatttattgtgtccaaatgttctggagaatacaagtgtccagttcatctagttatatattgaaatctgacaaccacttaacttctgctgaatatttagg

SEQ ID NO: 40683 - DNA, 1913 bp, Zea Mays
ataaccaatcaatgcaatcgaaagtttcggcaacacgtgaaaaggaggtcgtgcaaactgcctgtcacaaagatattacagagagtccatgggatccatcttatctttttatggttcatgatgaaagtgattgggaaaaggtgattgagtcgtcgaagcaaataactgttcggatggccaaggcgcttccaaatgaaataaggatcccagaccctactcctgattatatgcgacctgccttctatagtatatctcacagattgggcccggtactgaaaaaggatagtgtccggtgcttcctccgtttgtttgcggaatctcctaaggccatgacatggtatttgaacataaactctgaaacattgacctgcattgtcagccatgatgccctgcgatgtgcaaaagttgtattggagggcaagatgcgtaagctcaattctctgcatgccaaccccaactgcatcaactcatatggatatttcgctctccatgaagctgctgaacggttctctgttgaaatgatcaagttgctcttccgccatggtgcttcagccaatgtgcgcacagttggtgataaggtcattgagaatctactcccactacatgttgcaattgagaacacttgcatgcataagtatctggaggacaatctatcacctcctcagtatcatcgggattatatctacaagctcattcatctgctttgcctaccagagatggttcgtttcattccctctctacacaaagtactactacttatgcagcatgacaaataaaaaatgtttactgtgttataaaaatatttttgaattctcacatgtgtttcggcttcggcatgttccttttcaacaacagcaacagcaacaacacatccttttgtcccaagcaagttgaggtaggctagagatgaaacccacaagaaacaaggatataaaaaacaccgaaagggtataagacagaaggtagagttaaggtaaacagaaaacagacaaagatcacagttcatgcacgttgattgccagttcttttgccagacggagtggcatgttccttttaaaacttagagaaattaagtaaaaattctatttgacaagatatgttttgcttggatgaaataaagtaatgaattaggaagttattcacagctgcttgcttgcatgcaaatgctgaaaggcactcagatctgttccttagccctgtttggtgcagaacatctctttgttggtggctcatgttaggtttcatctagcctacccgccaactagcttgtgattaaaaacactgttgttgcagaagatcttcttggatacgattaggcttcttgctgaaaaaacagataatctagttgatgagctctggaattatattatggacagaaagctcgttcagacttcacttctactgctggcagctcagaagcagattcggaagcatgatttgttcaatactatcatgtatcgcatatacagagagtgttatacgctaggattgccaggtgacgataatggtgaggtgcagaagcagctggaggaaacatttcatcttgttagtataatttcccgtgctggtgaagctctggataaatatatccaggcacattcagaggtatcaccactttctgaatattgcagttacagtgccactcttcctttgattgtacttttatatctgtatctggaaaactacgccattcttttgcatggcctctttaatttcggttgtaagtcaagacatcaagcttaatcgcagatgttggtcaatgtgatttttattttttacataatgttgtgaatactcgagtgttattttttccttttgtattttctggatgcacggaatagaaatgtattgtattttggtgtgtgttaatctcacacagcacctctcacttccattatactacttcactttac

SEQ ID NO: 40684 - DNA, 4112 bp, Zea Mays
tagtgggaggggaagcgatggcggcatacctgacgacgtttgagaggaagagggcgaggaccttggcgacggagccgggtagtaggttgacaatgtacttggcgcagagactagagacggcgcgaaggagagctcgccctcccctccgtcgcgggcaccacaggcaaactgctgcagtgacgacttcctggcgatggcttcctctgtcgctcggagccgcagccgccgcgcgctcggcgcatgtcctcggccgggctggtgtgaggaggtccaggatggtggccgggttccgtcgcacgatcttgttcccaatgcccaggtccccgctgccgccaacgagaggcgcggggccgagcggcgccaacaagtatggcgcctaccgcgcgcggttggcaagcctgccgtgccggttccacctgctagtgctccagcttgacgacgatgtcgccgacctgcgggagctggtaggccgcctggcgtcgaaggcctccgcggaggccatggccgaggcttatgaagactattcttcggaaagggctgaactattgttcaaaacctgccaagttgtcctaaaattctatccttgcgggccccatggtccagcctttgatggaggtttttcaggctttcagctcccaatagcttcccttttccttttcgtcgctcactggctgtctcgctctcacacagaagcagcaggcggtgttgtacgtcatcggtcagtcaacgctggaccaacccaaacccaagagaaggggcaccagaaacacctcaacaaaatcgtgagcagccttggggtctccctgaagtctgaaccacactcaacaaaacccatggtagtttcagaacaaacaaacaaacatggaagccatgggcgagcacacccagcgctcaaaatcctagagagggggaggaacatctcttcttcttcttccttcccttcctactcgagccggtggaggtcagcggggattgaggaggaggaggggaagaggcgaggcaggaaatcaagcgggaatccaagaaccgtaaggatgaccgtggtggagaggagtcgcctccactagacaacacgcaaaaggctatcatgaacgatgttgcgagtctggtgaactccggatccgccaacaccaggtggaacaccgcggagtcgaatccgtgcaactgggaaggaatcacctgcacaaatttgtccgccccgttcttcgcctcttcttcttcttcttgctccatgaaggaagggctgcagtcacttaacctgagcaccaaccggctggctagcccgctcggtgagttggccggcttcccccagctacaagttcttgacctgtccttcaattcctttgccagcagaaatctgagtgcggaattgggttatttccccaagttaaggagcttcaacactagttccaatgacttgaatggtgatgttcctaccagtatggtcggctctttggaggagctggtattgtctagtaataatttgagtggtccaattcctctgcgtttgtttgaatatgaaaatcttactctgctagatctcagccagaataatctgaccggtgctattccagataacttcacgagtctctccaagcttgagactttgctcctttctggcaacaaattgattggggaaataccatcgagtctgtctaatgtgacaacactgtctaggtttgcagctaaccagaacggtttaactggacccatccatagctggattaccaagcatatagggatgttggatttgagttacaacaagctgaatgggacaatcccctcagacttcctctcgcatcaggggttgcagagtgttgatcttaccagcaacttgcttaacggagccattcctgccaccttgtctcaaagcctctaccgcttgaggcttggtgggaaccagcttggtgagaacatcccagggtcagtttgtgataccatgggcttgacttatcttgagttggatgacaaccaattgacaggagttataccttcagagcttagcaaatgcaagaacttgacactgttgaatctggcatcaaatcgtttgcatggtttagtgcccagtattaccggtgaacttgacaaactggtagttctgaagcttcaaaataacaccctcactggacaggttccaagtacattttctgaattaaagagcctaatcacattgaatctcagtaagaattcactcagtggagcgataccaagcggaattttcgagttgccaaagctttcgaacttgtatttgcagggtaaccagtttagcggttttattccgttctccatcagttcatcaaaggatctaatcgagctcaacctgggtgataatgctctgactggtaacatcccaaccatgccaaccactgtgaccacatctcttctgaatcttagtcataaccttcttgacgggtctattccttcaaacatcaactctttaggtgaactagagattcttgatctttctcacaatgccctgtctggtgctgtgccatcttcactatggagcctgcaaagcctgacactgctggacctttcctataataatctgtctgggtctattcctagattcggtccaagtcaaactgtagatattgtcggaaatcctggtcttgtaattgtaaatggtacaggaaacaataatgacactcctactactggtaagaaaaagaggcactatttggtcgtcatcatcttcaccattgccggtactcttgttggattatgtgtgcttgctcttattattgtgatgtcattatcaaagagagtgtatcgtgttgaagatgaaggattaccagctggagaatctgtaccacaaataatcagtggtcgcctcataactatgaacagcatccacacctctgcagttgacttcgtgaaggcaatagaagcagtctccaaccatcagaacatctttttgaagaccagattctgcacctactacaaggctgtaatgcctaatggctcaacatactctgtaaaaaaacttaattctagtgacaagattttccaaattgggagccaggagaagttttctcatgaaattgaggttctagggaaactgaccaattcgaatgtcatggttccattggcctacatcttgactgcagattgtgcctacctaatctatgagcatgcatacaatggcactgtatctgatttgctacatggtggaaaatcagaagttatagactggccgtcacgatatagcgttgctttgggggtggcccaagggctgacatttcttcatgggtgcactcagccggttttgcttcttgatctgtcaacaaggaccatccacttgaagtcaaaaaatgagcctcagattggagatatcgagctttacaagattattgacccttccaggagtacgggaagcttttcaaccattgctggaacagttggttatattccaccagaatatgcatacactatgaggctgacgatggctggcaacgtctatagctttggagtcattttgcttgagctgctgacaggaaaaaaatcggtcagtaatggcactgagttagccaagtgggctctcagtctttcaggcaggcctgatgaaagggagcagatccttgacaccagggtctcaggaacttcaattgctgttcatagccagatgctgtcggtcctgaacatcgctctctcttgtgttgcattctctccggacgctcggccaaagatgcgcaacgtcttgaggatgctcttcaatgcaaagtgaatcagaagcagcctgcaatcagatcatagataaattttgggtgcagttccagcctcgcgtagtttatggatgtcagtgataagtatacaggctgcccttatatagttccataggagatagaaccctagcttatagtagatcattatatgttttatgaattgtgtaattaggtatctgctttgcagtgagtggctatatggtttataagctgtcaaatgtagaggtgcttataagcaaagttgggtattgttctcataggtagggctaggaaaaaaaagctcgagctcgatgagccggcttgcgctcgtgggggcttggctcgtagcggctcgacgcttagaatgagctcgagccgaacctgtttttgtggctcgagaaaagagcg

SEQ ID NO: 40685 - DNA, 295 bp, Zea Mays
cacacttggccacccctccaccctttccccttgggctggccatcctctcctcccatggcagcccctctccacggcttcctcctccctctagatctcccccacgcagcaaggatcgagaagaggaggagcacgttgaattgaaggggaagagaggatcaaggagatgttcttccccatctattcttgcaaactttcttggggaaaccctaggtatggatgagatccttgttcctccctataattatgtgcttttggaggttgtggatcatgggaattaaaggattagaggttggat

SEQ ID NO: 40686 - DNA, 596 bp, Zea Mays
gtctagggcgcagaccgtccggcaacattgccgaaccgtctggcctggaaaggaacccccagagttattacttcatgtccacccgaccacactcgtgtttgaattgcaacccgggaagttgagccaatgctcaatgcagctaacaaatgacacagatcaacacatggcatttaagctcagttcaacagatagtgtggactggttagagcagtttcttccatggtacggcattgttgcggcacgctccacatacactctcattctgaatgtgttcttggagcgagatactgcagaaaagagattctgtgatatgatcctagagagctgtacatgtgaatacaacgacaataacatgtattcggccacaacttattgggagaaattcgttgatcaagagaccaagaaagtggtgaacgaggtgaaactgacagccttgttgtcatcgtctcagcacagacagtcaatagtagctcccgacaagccaaccgggctaggcgtcagggtctcatgggtggagaaaccctggattcgtctgctctccgtggacgcacaccccaccgaaccatggatcataactggtcacgaatgtggacacc

SEQ ID NO: 40687 - DNA, 3781 bp, Zea Mays
cttgttcgcttgggtcttgtcttgttagccgatctgtgactcccccgccatcgatgccaagtttgccccgttgccggcgtcacccctcccctcgacggtgaagctcatagcttccctccaccgccggtgtcgcttctcccccgccgaccaagccgtgcctgtcgccggcgtcgcccctcccccactagtgaaactcgcggtctctccaccgcacgcgcctcgtgtagttgtggctgcgtgcaccccctgtagccccggcgataggtcctactgctccatccggtttgcttccggcaacaagatcaacaacaagcgagcgaggtagtgaaaagctgcagctgtgatctctggaggtgctcttcctactctttctggtattttgatggtggcttgatggccagtaatatgcagtcttctgggctgcctcagcctccaagacctcccatgatgggttctagcgctcagccacaaaatcttggaccaccaatgcctatgcagtttaggccagtgatgccttcgcagcatcctcctcagttcatgccaccagcagcacagcagttccgtcctgttggtgagcctatggcgggggctaacgttggcatgccagggcaaatgccacattttccacaacctgggcagcacttgcctcactcaaatcaagttccacctgtatcacaaggggttcccatggtatatcagccagctagaccaatgtcatcagcacctatgcaacaacagcaacaaactgcgtatgctgggggccatttgcccaccatgggtgctcctatgcaacccctgacctatacatatcaaccaacatcgatccctcctgtagcgcaaccctggagtacaggcccaggacagagtgtacatcatgtgcctcctctagtgccgtctgggcaccagccggtgtcagctccaacgactttgcctcctgtcaacttgtctgaacctagctcttcagactggcaggaacacactgcagccgagggaaaaaagtactactataataagaagacaaggcaatcaagttgggagaaaccagttgagttgatgacacctttggagagggctgatgcctcaactgaatggaaagaatttactacaccagaaggacggaagtactatttcaacaaagtgaccaagcaatcaaaatggactattcctgacgagttaaaggttgcacgtgaattggcagagaacgcatcaaatcaacaacctgatcgagaatcaggaatagctactagtgctcttgtcagatctgctgcctttgaaccttctactgcacctgctaatcagtcgtcatctgctgttggtataattgcttccagcgcacatgatggatcatcaaactctgttctttctggtcctcccctgccgcacaatgtggagaatacttccagttctattgttggcatgcaaaatggtggttcgagtactgctgttgttcctgttgcagcaagcacagaagttccattagttgcaacagatgcagggtccagcagaaacaacgatgaaaattcatctctgaccactggggctgacgcagaggatggtacatccgctgaagatttggtggaggccaaaaagaccatgccagttgcagggaagattaatgtcactccagtggaggagaaaacaagtgaagaagaacctgtagtctatgccactaagatggaagcaaaaaatgcgttcaagtccctgcttgagtcggtaaatgtggagtctgattggacatgggatcagactatgagagtcatcataaatgacaaaagatatggtgctttgaaaactcttggagagagaaagcaagctttcaatgagtacttgaaccagcgcaaaaagtttgaagccgaagaaaaacgtatcaaacagaggaaagcacgtgatgatttccttgcaatgttggaagaaagcaaggagcttacatcatcaacaagatggagcaaagcaatacttatgtttgaagatgatgaaagattcaaagcagttgagcgtccaagggagcgtgaagatttatttgagaactatcttgtggaactgcataagaaggaaaaagccaaggctgctgaagaacacaaaagatatgtagcagagtacagagcttttctagaatcatgtgacttcatcaaggcaagcactcagtggagaaaagttcaggaacgcctggaggacgatgaacgttattcccgacttgagaagtttgatcggttggatatttttcaagagtacattcgacacctagagaaagaagaggaagagcagaagcgggtacaaaaggatcaagtgagaagacaagagaggaaaaaccgtgatgggtttcgtaaaatgttggaagaacatgttgctgatggcacacttaatgcaagaactcggtggcgtgattactgtgcacagataaaagattcacagtcctacttggctgtagcatcaaacacatctggctctacaccgaaagagttatttgatgacgtgatcgaggaacttggcaaacagtatcaagaagacaagatccaaattaaagaagtggtgaaatctggaaagattcctatgacaacttcatggacattagaggaattccaaactgctactctggaggatgatgctcttaaaggaatatcaaccatcaacatcaagcttgtatatgacgatcagcttgaaaggctcaaggaaaaagagcaaaaggacgctaagaagcgccagcgcttgggtgaaaatttttcagatcttttgtattccatcaaggaaatatcagcttcttcaacatgggatgattctaaacagcttttcgaggatagccaagagttcagggccttggacagtgagacttatgctagagagctttttgaagagtgcgttgtccacctgaaagaaaggttaaaagagaaagaacgtttgagggaggaagaaaaggcaaaaagagagaaagagcgtgaggagaaagagaagaagaaagagaaagaaaggaaggagaaagaacgcaaagaaaaagaaagagaccaccgggaggagagagaaaaggagaaagggaaggatcgatcaaggagagatgaaatggagtttgatggtgctgatttgaacacccatggtgcaaaagataagaaaagagataaagataaagaaaagaaacataagagacgtcaccatgacacagatgatgtaagctctgagagggatgataaagacgatgctaagaagtctcggaggcatagcagtgatcgcaagaaatctaggaagcatgcacatggctcagattcagatagtgaaaaccggcacaaaagacataaaaaggaccgagatagtagtagaagaaatggagcacatgagctggaagatggtgaacttggagaggatggggagatctattagtctttctgtttgctaccgagattcactcatctccagtcttgttacacatggatttattgccatctcttgcctgttgagttgcgcacttgggctgaagcctaccagctggatttttgctctgccgcacctgtgatgctactgctggggggcaatggatatagcaataacaccagctactgctggggagcaatggatgtagcaataacaccagcccatgcttgacacctttctttggtccttctggcagctgaccaggctaaattttcatttccttcaaagtccatggtgctgtctgtgctgaggtaacagattgctcagtttgcaacgagtttctttgtgagtgatgtgcttttgggagagtatggagtgtttgatttgtcgctcatgtcatgttaaggcttgttcattatac

SEQ ID NO: 40688 - DNA, 523 bp, Zea Mays
gcccgggcggcctgtttggccatctctactcccaaacaacggagccgcggggtgctcctttcgccgccggcgtgatcaccacacgatgcggggacaaagccaaggccaaggccggcctccgctccgaccccgccgggatatttttctcagcgaatctggagatcgtggtccagattaacagcggtcaggctctcgtccattccgtccgttcgttcgccggttaccgtcgcattccagtctccgatctatcatggatcattcggtcggagcccgaaaccggaacgatcgactggcttcggtttcgctccccaatcccgtgtgcgcgcgccgccctcgctcctccgatccgctccggtttcaggcgtgactgtgattcgatgatggacgagcattgatcgatcggtcggcgtcggtcggtcgatggagcgttcgcgtctgtgattacgtgcggcaatggcggcgtccacgtgttgggtttcaccacactcgtctcgtcagtcaatcatgaagcactcaaagcccg

SEQ ID NO: 40689 - DNA, 1146 bp, Zea Mays
cttatcccctgcaccgctcaagctcgtggaagagaatcccgccgccctgttgattttttcagccatcgcgggataaaaatcgcgtgcgcctttggtctctgcggccgccgtcgattctccctggctccagctcggccatggcgtggggcaccagcggagttccttcccctgcgcgcagctcgtcgagttctccctccagccgcgcccctggctcctactcttccagcgcgcccaccttcccagctcgttctccagcctttctcaagttcgtcgcgcgccccctgtatttctctgtggccgacgctcagctcctagctccggcgcgtgtccctctgctcagctccggccgcgagcagctccctggtgcttggacccggctcagcgcgctccctgctcctatcaccgcgtacgcatctccctgcccaatcaccccctttcttcatctccctcgagctcgccatggagctcgcccctgcctcagcttggactgcgtcgctcggctctggtcaaagaagatccctctgcccagcccctctgctcgcctgccgtgttcgtgctcgagcccttttcctgccgcgcgccgagtcctctgtcgtgctaagctcgctcacctcgtccatggccatcgtgccaagtttgtcctacgcgagctcctctgtttggcccgtcctctgtttggcccgtcgtcgttttccagccccttaccgcactcggctgttgtcgtcgtcgctcggtcgcgcgacaggctgactgcgtgtcgtgtgtcgcacatcctaggtcctcgtcgttcgccttcgcactgtgtgcgacagcatcgtcattttccctatccggtgctcgcgcggttttctgctcgcccgcgtgtcctctcgactcgctcggctttaattcctaatcgcgtcgtcgatctcgtcgtttgccgtcgagtcgttaaacacgtcatcccgcctcgatccccacctcaccagcttaccccagacttcaatcgaaggtcgtcgtcgttcgtgcatccgcaagaaaacccaagaatcgggtgaagacgaattgagcagcgtgattttccccaagcgctcaaccaattgcctggatcggaaaatcgctaccgatctcgcggattcgtgtcagctgtgaaaatggtaagctgat

SEQ ID NO: 40690 - DNA, 415 bp, Zea Mays
atccgcgaacacggcaaggattctggttcagctcttgtgtcgagcacttgggaaataccatgctgctagcttcgtcttcacccgattctcgggatttcttgatgactcgcggaacaataacgagatcgtttttggagcgagctggtgaggtgggggttgtactgggactagaggacgacgaacgtgcagagcttcaaactcacgcgcgtgagatagaaagacgcgcgaccagagacttaagcatccgcggtggcaatttggacgaaagcgaactagtgacgacacttccggccaagcgacgatgtaaataacaaccgataacggatgtgacgggttcggggcagtgtcgtgcatgacaagattaacggtggtctaacggcctggagcatgacacagcagggcgacgaatcgatgt

SEQ ID NO: 40691 - DNA, 14809 bp, Zea Mays
gcccgttcgccgtccgcgcctgcggcttccgcagtccgcacagctgacagcagtccattcgccgtccgcgcctccggtctccggacagcagtgagcgttagcaacaccttcattttggcgcgtcctccgccactggcgcgagcgcgtggcgacagcagctgagcggcggtgccagcgtgagcaaccgagcaggcgcgggcagccgagcgaggcagcagctgctgcgctaatggcacggccgttctcgtcgctggtggactcctcgtatcgccgcaggatcatcgagtgcaaagcggcggcttactccttgcggctcccttcctgcgctaggccgcccgcacgcccccgtttcgctgccagctccgacaacactccagcgcatggaattgatagtagcatcattaccattcagactatgacgcggtgggagaccctgaatcacatggcttacaaatttgggagccttggtaagtctgatggaaaactggccttgaagatactgagttctattgtggagcgttcaggtttagaccgaattacctacgtttactgtatggctgttccaattctcatccaggctcaaatgcattcacaagcaatgtcagtgttgaagcatcttgctgtgacgggcttctcctgcactgctatttttacctccctcttgcggaccatttcacgttttgatcccaccaaccatgtcgtttttgaactccttgtcaaagcatatgtcaaggaaagaaaagtgctagatgcagctgtggcagttctctttatggatgattgcggctttaaggcttcacctgtttcttgcaataccatcctcaatgctcttgttgaggaaggggaatcaaagcatgtttggttgttcttgagagagagtttggcccgtaagtttcctttgggtgttaccacttgcaatattcttctgaattccctatgcaccaatggagaatttagaaaggctgaagatatgcttcagaagatgaagagctgtcacatatctaattctgtcacatataatacaatcctacattggtatgttaagaagggaagatttaaggctgccctgtgtgttctagaagatatggagagggatagtgtacaggcagatgtatatacatacaacatcatgatagataaattatgtagaataaagaggagtacacgtgctttccttttgctcaaaagaatgaggaaagatgacttaacacctgatgaatgtacctacaatactttgattaatggtttttttcgtgaaggtaagataaatcatgctcgctatgtcttcaatcatatgctgagacaaaatttggttccaagtgtagctacttacactacaatgattgatgggtattgccgaaacaggagaattgataaggccctaagtattctatcggaaatgcaaattactggtgtcatgccaagtgaactaacttatagtgctttgttgaatggttactgcaaagtttccatgctgggacctgctatatatcttatggaagatctgaaatcaagaggtataaccatcaataagacgatgcgtactattctcattgatgggttctgtcaagtgggtgagatttccaaggctaaacaaattttgaagagtatgtttgaggatggaattgatccagatgtcatcacttattcagcattgatcaatggtatgtgcaggatggctaagatgcatgaaacaaaagaaattttgtcaaggatgcagaaaagtggaattttacctaatgatgtcctatatacaactctgatttgttactattgtaaggcagggtatgtcaaggaagcactaaagcattttgtggacatttatcgaagggggctagttgccaatccagttatccataatgcattattacatgctttctatagagagggaatgattacagaggctgaacacttcagacaatacatgtctaggatgaatatatcatttgattctgtctcctttaaccgcataattgatagttattgccacagaggtaacatagttggggcattttcagtttatgatgatatggttagatatggctattctccaaatgtttgcacatatcagaatttgcttagaggattatgtcaaggaggccacttggtacaagcaaggcaatttatgtcctgtcttcttgacataccttttgctattgatgagaaaactttcaatgcactacttcttgggatttgcagatatggaaccctagatgaagctttggatctatgcgagaaaatgataaaaaacaactgtttacctgatatccatacctacaccattcttctcagtggtttttgcaggaaaggtaagattttgcctgcgttagtcatcttgcagatgatgttggagaaaggagtagtccctgatactgttgcgtatacctgcttgctgaatgggttgatcaatgaaggccaagtgaaagctgcttcttacgttttccatgagatcatatgcaaggaaggcctgtatgcagattgtattgcctataattcgttgatgaatgggtacctcaagagtcgaaatgtgaataccataaaaaggatgatgtctgatatgtatcagaatgaggtttatccaaactctgctagctataacatacttatgcatgggtatgtcaagaggggacaattttcaaagtcattatatctgtacaaatatatggtgaggaaaggaatcaggccagacaatgttacatatcgtttgctcattcttgggctttctgagtgtgggttgattgacattgcagttaagtttttggagaagatggtcttagaaggcattttccctgatcggttagttttcgatatattgattacagctttcagtgagaaatccaagatgcataatgcactacaagttttcaattgtatgaagtggttacatatgtcacccagcagtaaaacttttagtgccatgataaatggattgatcagaaaaggttacttggaccatagtcacaaagttttacatgagatgttacaagtagggcttcaaccaaaccatacacactatattgcattggtcaatgcaaaatgtcgggttggtgagattgatagagcgtttaggctaaaagaagaaatgaaagctattggcattgtgcctgctgaagttgcggagagttcaattattcgaggactttgtagatgtggaaaacttgaggaggcagtcatagttttcagtagtatgatgcgttcaggaatggtgccaactgttgctaccttcactactctaatgcacagtctttgcaaagaatccaagattgctgatgctttgcacttgaagaggctgatggagttgtgtagattgagggttgatgttgtcagttataatgttttaattactggtttatgcaaagacaaacatatctctgacgcactagatctttatggagagatgaaatctaagggtctttggccgaatattactacctatatcacactcactggagctatgtattcaacagggagagtgcagaatggagaggaactactggaggatatagaagaaaggggacttattccggcatataagcagcctgaaaatcttgaaagacggatggaggatgcaattattaggctgaacatgataagaaactgcagaaaggaagtgccttttagaggggttgagctactacctctagaccctaaacccgtgtgtagtgctgctagtgattgtaaccccactgaaactcggcaacacaaaggaatttgagcatttgaccaatatggttggtacaaaactattggtatcttttctgagtagtgcttgtgatgccttacattgttgtgttcctccactgagggatccatggatccatctctagatatgttgaatatgtgattttccttaaaaagctaattcagaaatacaaaattacctagggaggaagaggaccctcacatatttcagtggatcctgggggcaggtaaaaagggattatgagtgctgatgcgtgatgttaggtatgatatgcataagttacagcaggcattcgaaggtaagaagtgttactatggcaattgttgtatctacatttatgtgccttttgaccccttcttttagttagtattgctaacatctttgcatggaatctcagtggatcttttatcttcaatggttggctagagtgaggaatattaatgaccatatttccttaacatccaactatagctgctgtcctgcacctgcagagttagaagcatcttttttgttgatcgtgcttgagcactttttgtgtttgtatcttcactagtagacaattgacatgcatgtgtgacacacacatgttatgaaaatcatttcatacacaaaaggtaaatattaatgaaaatttattcaaataaactaatatatattatatagcaaatattaatcgatctctgaatgatacagtagggtacggcaacatatctacctataattttggtttgtaccaaaatttgctttcatttattaaggacaatataaatatttaggtgggtatgatgtattgctgagttcatatcaccttccagcattttatctacaaagaaaaccattcaaaatttgctgccagacatgcttgccgttcggtaggtgcactaataggaggaagatggtgctgtagacgcactgtagctagggtttactagtactgtagccgcatccgcactgtagctagggtttctgtaccagcagacattctcacatggtatcaaagccttgactgttccagccgccgccccctcccttgctccagccgccgccgccccctcccttgctctagccgccgccgccccatggctggccggccccctctcccctcctccggcgagctcttccctcctctccctctttcctacagggctgcgttggccgcaccctctcctcccgcgcgcggcgcgactctggccgggcaccccgcgccgccgtccccttggccgggcatcccgcgccgccgcctccctccaccggatccggcgggcccgcgtcggccgcgccaccacccgccgggctggccctcatggccgggagccccgcgccgccaccgccctccggcggctccggcctccggcctcgccggcgcacagcccgcgtcagtcacacctctgccgccgggtctgcccgcccccggccccgctgcccctcctcccgtgcctcctgcgccaccggcgcttccttcgcccgcgccgctgacgggtccggtcggcttcggctttgccggtgtctgtcccgcgccgatctcccttcctcccgcgtcccagatcaccgtgctcggccacgacgccgccctgctgttgcccctggtttttcccggtggcaccattggcacgacggtctacagccagccgtcctctatcacctctacactgcgtgctccttccccttcggatgacgctgcagccatcctcgctgccacccgtgctgccgttgcggcggctcgccagcgggcccatgacgccgcttgtgcccttgagcaggaacaggcggttgtcgacgccatcgagcgctagtacgccgagacctaccgtcgcctcgctggcaagggcgtctcggatggttctcctatgtccgctcgtcacagcgctgacactttcgagcccgcgcccgtcccagcctcgacccttcgcgcctctcttcacgcccaggcggcggccctcaccagcatccgggcaaccgtcaccgacgttctcgcgccggactccactcagtatcctcggtggcgcgaccaggtcctgcagaccctccgccgctacgccctcgccgaccacgtcctccccacggtcgctgcaccgacggaggattggctcctaatggacgaagtggtgctctcttggatccatggcaccctcacggccgaacttcaggacatcgttcgcgtgccggacgatactgctcaccgtatctggggtgcccttgaggctcagttcctcggcaaccgcaagactcggatcctgtacctagagaccgccttccgccagcttgttcagggcgatctctctgtggacgagtactgccgtcagatgaagacgatggcggacacactccgcacccttggggcccccatgaccgatgagagcctcgtgctcaacctccttcgtggtctgagtcctcgcttcgatcgcgtggcccccatcctcacccgcatgaagccgtttcccacctttgcggaggctaagaacgatctgcttctcgaggagctttgcctctccgccgctgcaaccaccgctcccgccacggccctctacagcgcacctcgggctgccccctccgactccggggaggttcctgctccccgcactccggccccgctgccctctggagctctgcgacagactgcttgcttcgtgggggctcgcagccgcggtcgcgaccgtggtcgcaagggcggatgcagtggcggtggcccgtcgggaggccgtagtggctccttgggtggctctcagtggccatccttctacaacccatggactggcaccattcacatgtggcccgggccgtccgcgggtgcctcagcccctcgccccaccgcctctcagcaggtcttctttgccgctgcacccccggcggcaccctcgactcctccccagcctcagcaaggtcttctgccacacctggggtcttcggaccagcccatgtgggggccttggactaacgggtgggacgcacagtccctcgccagctccttctccacgatgacgctggccccgcccacctcagtctctgactgggtggcggattccggcgcctcctaccacaccaccctggacgcatgtattctatcttccacctcccccgcccacccctctcttcgctcttccatcattgtcggaaacaggtccgcccttcccgtcacctcagtaggtgacgcggtccttcccggtcctttccgcttaaccaacgtccttgttgccccccacatcattcaaaatcttctttccatacgtcagttcactactgacaactcttgttccatggagtttgacccgtttggtctttctgtgaaggatcttgccaccatgactcttctcgctcggtgtgacagccccgggcccctctacacgtttcgcctgcttactcccactacttcgacctctgccccacatgttcttgcagcggccgcctcttctgcgacttggcatcgtcgtctcggccaccccgggcgtgatgtgatgtccaagctctccagtagtacttctgtttctggttgtaggggatcttttgagcacctccgtcatgcttgtcagttaggttgccatgttaggctcccattccccacctcctcctctagagcagcagacatttttgatctgatacactgtgatgtatggacatcccctgtaattagcatttctggctataagtattatttactcattctcgatgacttctcgcattatttgtggacttttcctttacgtcagaagtcggacacttttcccaccctgtctcacttctttgcctgggtctgtactcagttcggtcgcaccatccggagcatccagtgtgacaacgggcacgagttctataacaatgcgtcccgtgacttcttcctctctcgcggcatccacctccgcatgtcatgcccctacacgtctcctccaaacggcagggctgaacgtatgattcgcacgacgaacgatgtcgtgctctctctactctttcaggcttcccttcctgctcactactgggctgaggccctcgccactgccacctacctcctcaaccgtcttcccaccaaggcggtgttgcccaccccactcctttgctcttttcggcatccacccctcctataaccatcttcgcgttttcgggtgcgcttgctaccctaatctcgcctccactgctcctcataaactagccccccgctccactcgccgtgtcttcctcggatacttccccgaccataagggatatcggtgtctcgacctcacctcccacagagtcctcatctctcgtcacgtcgttttcgacaagtcggatttccccctttcgtcctctcccgcagcctctctcaccgagctcgacatgttcctcgaccccgactctgtgccccccactgtcgtgcctcccttccctgcaggtccgtccactgctccgcctcgtgaggccccacttgtgacgccctcccccgcacagccacgtgtggcctcgacgcctcctgagtcgccctgcgcggccccatcggcaccgccctccctcgcacagccagcgtcccctccgtcgcctcgcgcggccccgtcgtcccccgcacagccccgtgcggccccggtgcctctcggaccaacgcacactgccccgtcgtctcgctacaccgaccccatccagacgtaccagcgctgtggtcgacgtggtgccccggctcgctctcgcgccgagcccctggcctatcaccccgtcgtcgtccaccgggatcctcgacacatccacccgatggtcacccggcgcgcggcaggtgccctccgggcacctgatcgcctgattctctccacgacctcttctccggctcttccgccggtgcccacgactgtccgtggtgcgcttgccgacccccagcggcgacatgccatggaagcggaatacgcggctctccagggtaaccacacctgggacctggtgccccctcccatcggcgccaacgtggtcaccgggaagtggatcttcaagccgaagctgaacggcgacgggtccctggagcggtacaaagcccgctatgtgctccggggcttcacccagcgccccggggttgactatgacgagaccttcagtccggtggtcaagcctgccaccgtctggactgttctggctctgtccagggactggtcagtccaccaactcgacgtggcgaacgccttcctccacggcaccctgacggagacggtctactgcactcaacccgttgggtttgtcgaccctgctcaccccgacatggtctgcaagctcaacaagtccctctacggcctcaagcaggccccccgggcttggtatagtcgcttcgccactttcttgtgttcgcagggtttcgtcgaggccaagtcggacacgtccctgttcatcctccgtcgcggtccggacactgcgtacctcctctacgtcggtgatatcgtgctcaccgcctcctcccctgggctcctgcgtcacatcatctcctgcctccagcaggagtttgcgatgaaggacctcggggccctccaccacttcctaggggtcaccgtcgagcgcaggccccagggcatgttccttcaccaacggcagtacaccgtcgacctcctcaagcgcgctggcatggtcgagtgcaagccatgcgtgaccccagtggacacccagggcaaggtctctgccgcaggcacccccgtcgctgatccgaccggctaccgcagccttgctggggccctgcagtacctcatcttcacccggcccaacatcgcttacgccgtccagcaagtgtgccttcacatgcacgaccctcgggagccgcacctcaccgcgctaaagcgcgtcctgcggtacttgcgtggcaccatcgactttgggctcctccgccgctccccgaccacggagcttcgcgtctacaccgatgccgactgggcaggctgtccagacacgggccggtccacctcgggctatgccgtcttcctaggggacagcctcgtctcctggtcatcgaagcgccagccgatcgtctcccgctccagcgccaaggccgagtaccgtgccgtggcaaacgacgtggctgaggcgacttggctccgtcagctgcttcaagagctccacagtccgctagcacggagcaccctcgtcttctgcgacaacgtcaacgccgtccacctctccaccaaccctgtccaacactagcacacgaagcatgtcgagatcgatcttcactttgtccgcgagagggtcgcctgtggagatgttcgcgtcctccacgtcccgaccgcctcccagttcgccgacgtcttcaccaaagggcttccgtccgcggtgtttgcagagtttcggtccagtctcaacatctgcagtggctagagtttcgactgcgggggggtgttacagatatatgtatatgggcctggcccattaggacaccagtactgtagccgcactgtagctagggtttactagtactgtaactgcagccgcactgtagctagggtttctgtaacaacagacattctcacattgactacaaactttgataatatattttctcaaatttaaagcaccctaatcatgaggtctatatgaccaattggctgcatctaagctattagacaaactaatgatgcatcattctgactcggactattaatgttttaaaaacatggtgagaacaaaaccaactaagagtgtacctgagcataagtagtagaagtatagtgcatctggctcttaggggaatgaacaaactattacctgatctcatctggaccacggttcaccatcctgttgagaacccatttctcgctcatcaccgagaacgaaatttcgacgaaaaccgtccaaaaaacactaatcctgagcaatttgcaattttcaattttgaaatcatcttttttcatttttcttgctgaaaaccaccgcttcccgattggttttcgctaaaaaacaaccgagaaaccgattttcaattttttcgaccgacttacgtttcaaattcaaataaaatagtttatcggatttctcggcgagataccgctgtttttaccgattttcgctgtttgtttaccgttttttcaaataatttttttgattttttgaattttgaatgattaaaaaaaaaccgctggaaaactgttatcggtctggtccagtaacgggaaaccggactggttttcgccggttttcgagatgttttgtaatccgtggtctggacacatggcaagcatttatcagtaggcaattagatctgctatcagcaataaatagatctgattccctgtgttcctgctatagtaacatttttccaatgtctgtacccttcgatattgttgtaccagtgaggcaatgtgggcaaaccttgtggcttgtgccctcccacctgctatctggtggcattaccgaaagtagaactgctgtcatattatttataagtgattgtttattcttgcaggcatcaaaatgcgcaacattctactcaacatttttatgatcacttagtgcccttatgtcattaatgagttagtatctttttttttctcgaaaaaacgcaggaggactgcgttttagatatatattaagaagagagagacaaaggtctaagagaccaaaaaaacaacaacaacgcactccctatggaggccagtaacactcgtacatgaaaggatccataaaaacacccacacacactccttacaacaacctatgcagggggcagccaagaaggagagccctttggctccagcaatttcccagcctcttctttcctcatctgcatgctccataatcaaaggaaggctgggagaccctccataaaaaatgactctattacgatgcttccaaatcatccacgaccctaaaatgatgagggagtcaagaccttccctgaccagaccatttactgtctctgaaaccatctcccaccaatccataaaggaaactgcatctggctgtggggctaaactatgcagcccgaactttcttagtaggttgtaccagaaaatccttgagaagacacaattcacaagcaagtggttcagagtttccccttgctggtcacataaaggacatctgatagggtgattcaatccccttcttaccaagcgatcagctgtccaacatctattttgggccaccaaccaaatgaaaaaacaacattttggtggagcccaagatctccaaacccttttatagtgcccaaaggtggtagacccaaggaaaagacccatataagctgactttgcagagtatctaccattcgaatataagctgaaaatatgtctatcctcagtgttaggctgcagcacaaaatctgcgagaatattccagaggtgtagataatctacaatggcaccaactgtaagagcccctttgatgtctgcaatccatcgtctgttcaatagggcctgctgcacagttcttctgttaataattctttttggaataatgctgaataatcttggagcaatatcagatacccttttgccatggatccatttatctatccagaacatggtgttggtcccattccccacctcagagatcaacaccttggagaaggaatgggccgtgctaggaatttgaatggacaggctagaccatgggcgtcttgggtcagttttttgcaaccaaagccatcgcatgtggagggcccaacagagcttaggaaggccgtgtgttggcccaagagatctaaagcccgctgctatgcattcgggcgcgtgtgtcgtggcccgacggcctgggtgggcgcgccgtgtgtgcggtggcccgacgggcacgccgtgtgtcggcggtccggttccaagttccaacagccctttgagtgtgctgcttgagttggcaatacagaggaatgaggagataccggccttggtctatgaggccaggccggtggatccccgccatggccgaaattggcgttgtggatggggaagggatgcaagatttggatgccagttgcacggttgaggtgattggggaggtatcggagaggaaccttcaacccaactctagaaactgttttttccctcgaatgcgcaagagaggagatttttgccattataaaacacggcacgttcagcttcatcgaaacggaggcgttggggagggattcgacgatatggaaaaacacaggacgcgcagccgacgaaatagactcaaaatctcttttatgcgtagcgacgggccattaagctcctgcatctgacgccgtgaccttgctgtgacttgcctccatcctttctcttctctcttccaccgagttctctcttccagcaggagaaaccctagccgccgcctcttcaatggaccgggttcctccggttgaagctgtagccgacgcgtacaacgccgcacgagcagctgccgttgctgcagtagaagcgcattcggcggccatcattgcggaggaggcaatcgctgctgtgaagtatgctgcaattgctcgcgaaaagtttgaaggagctgttgattcagtgaagaactcaacctttgtctatgctaatgccactgttgaggctttggtaatatttctgcacactgtttattttctagagatcgaccccgtttatgctgccgggtcacccgaaacaagatcgaccccgtaatgcctggtcacccgaatcaaaacttgtttattgtctagaaggcaccgtgttgtttgtattccattgtagctggtacttgtttcttggttgtttacaggacaatgttgatttgaagtatcatgttagcatcaagaattctctgcgatacgcgattcaagagatgaggagacaatcaacactgctacatacaattaattctatctgttctagtatcccagaagttgaggggggcaagatagggaaggttgttggccacctggaccatgtctgcaagatgctagagaagacttctattgtttgcgaacaagatttggataataagtgtcctagttgggacctatttgaccccccttcggatgttgaagatcaccctgatgttgatgaactacttgaaggatacaactcagaagatccggagctgtgggaaatggcgtttgaggaccggaagtgggaggagaataaagtggcagtctccttggctgagcattgtcgtattatgggttacaattacgaagagatttatgatcgtactgtttgagtcgacaaggggcagcataggaacaaagcaacggctggcattgagtctggcagtggaggcaacaaaggatactggtatcagtgcttgcagctacatcttcagacaactgatgttcttgaagacgaagatttatatgcaaacctgggtgcctccacaaaagtctaaacccttatacatcttgttatatttcctctccaaatgatgctgtggtgttcagacctcacaaaggctgcaggcttggcgtagagatggatttctaagaaaagaaaaaaaatggtgcttcctgcttacaatttattagttatcaaccacaaacactgtgagcttttgcagacagaaattgccttatttatatttacagaaacagatcacactggttgcaacctgcactgcatgatgaaaatgatgtctacgagagaaggggggaaacagaagaagaatctgaagatttagtgaaaccaaaacagaaaggtacataaggtctgatagagattgagaatccaaacctggtgaaattaaagaatataaaggtcaaggacattgatgtggtaatgtattgtggaatcctgttttacaacttcaaccattgattccagtgaagctaatgccatggaatggaattctcaccacgtttgctggctgtacgagtacacaaatctgatgaatggattcagctaaaatgtcatagaatggacccggaatttatgctctttttttgtgctctctcagcatgtgctagctggttaagtactagcattgctattgggcgctattttgtatgcttgttctgctgtcttttggatgtaaacgaacaagtttgcatgcttgttctgctattggataagaagtattagcattgctatttgcatgcttgttctgctggttaagaagttaagaagtattagcatgtgacttgtggagatgtgcatgcttgttccgctcgcactgcttgcttgtttgcaacctgcagcaatctgtgccaaacggacacagggcacgacaggcagtgcaggtaaatgc

SEQ ID NO: 40692 - DNA, 369 bp, Zea Mays
taaactgtttgatattattttacttgctgagatgtgtcatctcactcttgcattactcaatgcaggtacttgatacatgttgggaatgaggggagtagcagcacgtccactttcactctcacaataacgctgcctaggcgcagccatgatttaattagaaacctattgtcaaaggaagtttgtttatttttttatatggtcgtgcgcactggttaattcagttcaggtcgtatatttatctttccttgctagtcgagtaataatacttagtatgttttagtcatgatatatgtttatactctgttgctccctcttttatgcaatcttgcaaaggggatgctgccgaaattatatatatggatgtcggaa

SEQ ID NO: 40693 - DNA, 2656 bp, Zea Mays
tggcacattagcccgggtgatactgcggtgggcccgcgttttggttcctccgccattcgacgccaccggtgtgccgtctggtccgtctaccaagctggaatcggtagaccgtttcgttccatttgtccccacacgcgactaaaatttacatcacctcgaacggcggcggcggcggcggcggcggtttctcatctgcggcgcctcttcgatgctgtttgctttgccaaggctttgatcccagatggggatctcgtcgggtgcagacttccaccagcagcccaccccacaggccgtgctgccgccacgcccccatggccgtgcgccgacgctgcagacgtctctctccctggctggttccgcctcgccggagcaggtcgggtcgcctccggacacacaggagccgctgtcgaactccgacgcggggcatgactccgccacagagagcgccagctcacgggagacttggcctggggagcccggcaagagtggtggcggcgacgctcctcccgtggcatcagcaccgataactgcactgaggatagctgataataaggagaaggaggtggttggtaatggcgtcgccgagctgcaggcctttcggagtaggatcccgagtgcaggccggatgactctcagggaggttgcttgggacagggtggacctcgttgctgagaagatgaagggtatgagcgatgagctgctggacgaaaccaaagccgagctgcagtcgattctggaagggactggcggtcagcaccagattcaggagttcatgtacctgcagaagcttcttcagggcagggttgatctcaccctgcccatccttttgatggctcaccatgtgcagctggagatcctggttgccatcaagactgggatacaggcgttcttgcacccgagcgtcgacataccccagatccgcctcgctgagattttcctgtacaagaggtgccgcaacattgcttgccagagtgctgtgcctgctgaggagtgcaagtgtaacatatgcagtaacaggaacgggttttgtaatctctgcatgtgcgtgatctgcaataagtttgattttgaggtcaatacgtgccgctgggttgggtgtgatatctgctcgcactggactcacacagactgtgcaattcgtgatggaaagattgggactgggcagacgattaagaacggcgttggccatgcagagatgcttttccggtgccaggcctgccagaggacatctgaactgtttggatgggttagggatgtctttcagcaatgtgcacccaattgggacagggatgccttgctgcgtgagcttgactatgtttgcaagatattccgtctaagtgaggactcaaaggggaggaaattgttcagaaaatgtgctgagctagttgaaagattgaggggtggttctgctgaatcaatgactcctagaattctgctacaagcgctgcaagagctggacattgattcctccaagaactttgagcaccaagagccagggcggctgatcactccccaggaggcctgcaaccggatcgctgaggtcgtccaggaagcagtgaggaagatggagatggtggccgaagagaaattgcggacgtacaaacgcgcccgcctcgctgtggaggcgtgcgacagggagctggaggagaaggcccgggaggcccaggagctgaaggtggagcggctgcggaacgtcgcgctggcgaagcggaagtcggaggcggcggggcaggactacgcgagcatgtacctcaagcggcgcctcgaggaggccgaggccgagaagcagtacatcttcgagaagatcaagctgcaggagaaccagcatgccacgagcagcagcggcgggggtgcccgcctcggcggcggagctccctccgccggggaaccctcgcaggcgatgatgctgtccaagatccaggacctgctgaagaacgtgcgcagcgtgccgtccggcaagccagatgggcagcgctccaagtagcagtagcgtcgtggggtgggctcggctgggcgggaactgccactccatcggcctgctggttgttactacttgttattagacgtagtagttgttaactagcagtgtagtaagtttacatgatatatatactgcatttttttggggggaacaaaatgttgattacctgcgcagcattgtcctaggtgtgtttagtagcgacttgttttcactgattatgtgatatgtatgaattgtatgtgcaggtgattcaagtgtaaccaaacagcgtagctgctgtacggataagtgctaaggctgtctgtagcggtaggggtactcttctcgtaaccgttctccctataaattcttctatatatccctctacacattaaatatatattttcacctaactaacataaccaacttatttttctattttctttttccttttcgacacgtccgccatgtcgccatgttggaatttattttttgttaagtaaaaaaatatttgtggtttataaattgtgcagaacatacaaacataatttaagttaaatttaattttggaaatccataacaaactttattattgtgcgtcgtctagatttttcttaaacatcgagacatgaatattgaaccaaacttccgttggaagcacacaacgaacagtcgtacgcagcaagccacggttgg

SEQ ID NO: 40694 - DNA, 4029 bp, Zea Mays
ccccaatacctctacagtctacacctgctctctcgactcccccaaagtcctcacctccccacctggccacctctgcctttgacctcgccggcgccaacccaaacccgccgccgccgatgcctctggcgcactagcttcgcatctccgtcctcaacatggcgtccgagcgcccgctcctcatcgccacaaccccgggcgcctcaacccccgacgacgccccctcgccgcatcccccagcggcgtcactgctcccgccggcccagtcggagcctcctctccgcgcagaccgtctcgccttctccgtggagatccccgacccattccgctcctaccgccgtggcgacggacccgccgccgacccatccgcgtcgttggagagggaacgtgatgtcggggatgacgaatcccgagaggtcatcgtgggagagtcctcaccggagttctctgggaacgccatccgaacggcaaagtactcgttcctcacctttctaccgcggaacctcttcgaacagttccggcggctgtcgtacgtctacttcctcgcaatcactgtgcttaaccagctgccccaggtcgctgtcttcggccgcggtgcgtccgtgctaccactcgccttcgtgctcttcgtcactgccgtaaaggacgcctacgaggatttccgccgccaccgttccgaccgccaggagaacaaccgccttgccaccgtgctcgcactgggcacagctggcgagttccagcccaagagatggaagcacatacgcgtcggggacgtggtacggatcgagtccaatgagacactgccggccgatatggtgctgcttgctaccagcgatcccaccggtgttgcgcacgtccagactgtgaatctcgatggggagaccaatcttaagacgaggtatgccaagcaggagacacatgtcatgttctcccagaatggtggtgttggtggcgtcctgcattgcgaacgacccaacaggaacatttacggattccaagcaaatcttgagattgatggcaagcgtgtctcgcttgggccatccaacattgttcttcgtggctgtgaactcaagaacaccacatgggcaataggggttgtggtatatgctgggaaggagaccaaggtgatgctaaatagctcaggggcgccatcgaagcggagtcgcttggaaacacagttgaatcgggagactgtcatattatctattatgcttattgggatgtgcacaactgcatccgtgcttgctgggatttggctgctgaatcaccggagggagctggagttcacccaattcttcagggagaaggactatacaactgggaaaaactacaactattatggtgttgggatgcagatattcatcacattccttatggcagtgatagtgtatcaggttatcattcctatctcattgtatatatcaatggagctggtaaggcttggacaggcatatttcatgggtgctgataaagatctgtatgatgagtcatcaaggtcaaagttccagtgcagagctttgaatataaatgaggatttagggcaaataaggtatgtgttctctgacaagactgggacactaacggagaacaagatggtcttccagtgtgcgtcaattcgtggggttgattacaactctggtaaagatacaggtggatactcggttgtagtcggtgatcatctgtggacaccaaagatgtcagttaaaattgaccctgagctcgtgaaactactcagggatggtggttcaaatgaggaaccaaagcttgttcttgaattcttacttgctcttgcttcctgtaataccatagtgccgcttgtccttgacactagagactcaaaacagaagttgattgactatcagggtgagtcccctgatgaacaggcactagcatatgctgcagcatcttatggcattgtccttgttgagcgaacatctggttacatagtgattgatgtccttggtgacaggcagagatttgatatactgggacttcatgagtttgatagtgatcgtaagagaatgtctgttatcgtgggctgccctgataagactgttaagctgtatgtgaaaggtgcggacagttcagtatttggaattacaaacaattcatctgaattggacattgttcgtgctacagaggcacatctccataagtactcttcacttggactaagaactcttgttgttggtatgcgtaaactgagtcaatctgagtttgaggagtggcaattagcttatgagaatgccagtacagcagtacttggaagaggaaacttactccgatctgttgctgcaaacatagagatcaatgtcaacatattgggggccactgggattgaagataagcttcaagatggggttccagaagcaatagaatctattcggcaagcagacataaaggtttggattttaaccggagacaagcaggagaccgcaatttctattgggtactcctgtaagctgctgaccaatgacatgacacaaatcgttataaataacaattcaaaggagtcatgtcagagaagtcttgtggaggcgcttgctacaactaagaagctcagagccgcttcatcaattggtacacagggtccattgttagcatcagaaacttctaatgtaactcttgctttgattgtagatggtaacagtcttgtttacattctggagacagatttgcaagacgagcttttcaaactagcaactgaatgtagtgttgtcttatgttgccgagtggctccattacagaaggcagggatagttgcccttatcaagaacaggacaaatgatatgaccttagcaattggcgatggcgcaaatgatgtttcaatgattcaaatggctgatgttgggattggcatcagtggccaagaaggtcgacaagctgttatggcatcagatttttctatgggacaatttagatttttggttcctcttttattagttcatggtcactggaattatcaaaggatggcctatatgatcctttacaacttttacaagaatgctatgtttgtcttggttcttttctggtatgtactttatacagcattcactttgacaactgctatcactgagtggagtagtctcctgtatactgtcctgtatacatcccttccaacgattgtcgtcggcattcttgacaaggatcttaataaggcaaccctgatagcttatccaaagctatatggatctggccagagggacgacaagtacaatgtgaatttgtttgtgctcaatatgcttgaagcactctggcagagtttggtcgttttctacttgccgtattttgcatatagacgaagcacaatagatatgtctagtcttggagacttgtgggcacttgcacctgtcattgttgtaaatatgcaattggccatggacattattaggtggaactggataatacatgcgtttgtatggggcacaatagccgcaacaacagtttgtctctttgtgatagattcgatatgggttcttccaggggcaatttttcatataatggggactggtctgttttggtttttgctgcttatcattgttgttacagcaatggtcccacattttgtgttcaaggctttcacagaacactttaggcccagcgatattcaaatcgcccgtgagatggaaaaatttgcaaatgtcaatcaggtgaaccggttggaatttccaacgagaggactttcatgacaatagtagggaaactatagtatttcgttcttttcttattttcacgtctttcccccctactggtgtgaataggagctgattcatttagctgtaaggtgataggtttaatctctaatgtgcatgtatgtattcgtataaaatttacagaaaaggaaatagaagtccacgtacaagttttcatctgtttgttgcagcattattgcaggctaaatttgtggagagtgtattgtaaatatgggatactgatgcttggagattcaattttcaagtttgtagagagaatgtagatttgggaacacacggatgccaggaaatttaagttccagttttgtttcttccgaaa

SEQ ID NO: 40695 - DNA, 833 bp, Zea Mays
cttgcaggcttgcaatggctatagtctaatatgtgtccccactatatgatactgtaggtgattgggaggccattaaatagtaggcccacgtcatataatgtttcagatcaaataataaaatatatgggaccacacactcttttaataagaaatccaatgtaatactttaggaattcagagaatacatttccatgtcaaacgggtgcaggagatgttaactacatcattgatcatgctgagattgatgttgtcttcatacaagacaagaaaataaaagaggtgaaaacgaataattatccatgctactttttggatctttcatattaaattatggcattacatgagacctttttgttcgtagatactatccccaaacagcaaggctgctaataggctaaaaggtaaggaacgtcgcagtcagctgatccctcgtcctctaccgatgtcgcgtcgccctgcggcctcccccagaagtgtagatccacacaggctcagctacatttctcctcttgttggtaaggaagctcgctctaatggattgctgcgagggttagttctgccctgttcttccgttcctacgctgtcaacaatcaagttccaagtactgacgtatcgccgccgatgacttaggcaatttgaacagtattttggataatccttattcatgtggtatgtcttagaactagtctgtcttaatggcctgtcatttttgtttgactctgcatagagtgtatgctccaataaaatgtgcgcctatcattctaaatattatatgttggagggaatcagactgaatgttggacttgctggacagattagggtaacaaaaataa

SEQ ID NO: 40696 - DNA, 2652 bp, Zea Mays
cattggagatggagaatggtggactgctagagatgctcttaaggcatctgtggattccactgctcaaactggtcatccaggcataggtgatttgcaagaggagttatatcaaatgattaagagtttaaaggaccaatactttgtggaattgaatgaattgtacaataaggtatctatcaagatacaacagattgacaaccaaatgcctgctcaaaagtcagcagagcagtatgaaaagatgaagggctttaaaggaatgctggagcgcactttgcatttcctgcaagttaacaagagcaacattcatccaggtttgagggaaaaaatccccatttacgagaggcaaattctcagtatcctaagttcacaaagaaggaaacctgtgcaggcacctgggcagcaaacgtttcagcaatctagtgggcaagctcctagctctaacatttcacagcaacttcagacttcccaaggtttgcagcagcatgatagtcatactagtcagatgcctcaagcaagtttaccaagtatgaacacaggagtacaaacctctggagcacctgcgcctcaaggaacaaactttggtgttccaacaacacagcaaaatgtcacaaatgcaccacaggctggctctaatttggagaatgctcagggaaataattttaatcatgtgcagcatggttcaatgggtgctgctttgcaacaggaaaggactggtcccatgcagggtgcattgaatgcacagcagcagtccagtagcaacatgatatccaacaatgcaatgagtacaatgcagactaataacaatgcaaatgcgaattcattgcagcagttaaagcagcaacgtcaggagcatcaaatgatgcaaagtcagcaaatgaagcagcgccagcagatgatgcaacagatacaacaaaagcaaacgcttcaaccgcagctcccaatacagcaactaaagaaacaacagcagcaagggcagatgcagtttccacagcttcattctggaaatgatgtgaatgagctaaaggttaggcaaggagctgcaatcaaatctggaatgtatcaacagctgagccagcgtaactattatcagcagataaaacagggtggtgtctttccaatttcttctccgcaaaccctccaaacatcgtccccacaaatttcacaccattctcctcaggttgatcagcacagtctgttgcaatctcaagtcaaaaccgggacaccattgcattcagctaactcaccatttgtcccatctccatcccctcctgtggccccatcaccgatgccaatggattcggataaaccactatccaacttatcttcagttactagtgctgggcaggctggacatcagcaaacatctcttgcacctcaaacacaatctatagccgttaacacaccaggtatatcagcgtcacccttgcttgcagaattcacaagtgctgatggaagtccggccaatgtaccaactcaagttccagccaaatcaagcgcagcagaaaggcctctggaccgtttgcttaaagcattgcgaacaacacagcgtgagtccctaagtgctgcagtcagcgatattggatctgtcgtgagtatgattgacaggattgctggatcagcgcctggtaatggttctagagctgctgtaggagaagatcttgtcgctatgacaaagtgccgcttgcaagccaggaacttcataactcatgacgggagtggtgcatcaaagaaaatgaagcgggacacgagtgctatgcctcttaatgtgtcatcagctggaagcgtgaatgatagcttgaagcaatcatatggtgttggtactccagagctacaatcaactgcaacctcacgtgtcaagtggcaaagggctgaggtaaaccatgctctgatggaggagattcaggagataaaccaacagcttatagatacagagctccatgtctctgaggatgatgctgagtccttcactacatctgaggggggcaaagggacggtcattagatgcacattcactgctgttgctgtttgccccagcttgaaatccgtgtttgcgtcagcgcagatgagtccaattttgccgttgaggttgcttgttcctgctagctacccgaaatgctccccggtgcttctagacaagtttcctgatgaacaatggaactcagacgacctgtctaccaaggccaagacaaagttcagcgtattgctccggggtctagctgagcccatgtcactgcgagaaatcgcaaggacatgggatgcttgcgctcgcaaagtgatcacagagtatgcccagcaaaccggaggaggcagtttcagctcgagctatggttgctgggaaagctgcgtaggcgcttgttaattgcttatattgtatctattattattattataagtatttatgtgtcgagtaaaatagaaaaaaaaacagtgtgtctgctgtatactccatccttttgctattgggtcaatgttggcttgataaatatggtcgtgtacagtacagtgtatgcgtcagtccggttagtatcatgtatgctttgcctctatttacagaacttggttttataactttttttcgtcaccttttatatctaaatattttttaatagtctttttttttccattgattataatgtatgccgttccttccca

SEQ ID NO: 40697 - DNA, 1542 bp, Zea Mays
cttgctcctacaggttcagatctctcatcggcccccactccattagtccatttccattcccatcccgaccccgtcttgccaccggctacacgctctcggagtctcggacgccgcccaaatggaggccatccggaagcaggcctcaaagctccgggagcaggtagctcggcagcagcaggcggtgatgaagcagttcgggggcgggtacggcgcagacggcgtgttcgctgacgaggctgaggcgcaacagcactccaagctcgagaaactctacatctctacgcgcgcggccaagcacttccaaagggatatagttcggggcgtcgagggctacatagtcacggggtcgaagcaagtcgagatcgggaacaagttatgtgaggatgggaagaagtatggcactgagaacacttgtaccagtggtagcacactgtcgaaggcggcattaagttttgctaaggcacggtccatgatggaaaaggaaaggggtaacctgctgaaagcccttggcacacaggttgcagaaccactgagagctatggttatgggagctcctttggaggatgcccgccacctcgcccaaaggtacgacagaatgcgtcaagaagctgaagcgctattgaagtttcaaaacgccaaatgaaactaagagaagcatctggaaatagtgatatgatttcaaggctagaagcggctgagtcaaagctgcaggagttgaaatcaaatatgggggttttgggcaaagaagctttggccgcaatgactgccgttgaaggccaacagcaaagactgacactgcagcgtcttattgcattggttgaatcagagagaaactaccaccaaaaggtcctacaaattcttgatcaacttgagagagagatggtatctgagcgccaaagaattgaaggggcacctcctccggtggttgagagttccatgcctccaccgcctgcatatgaagaagtcaatggtatattcatgaggaatacggtcgcagagttggtcgagaccgtggagtatttcctggctgaggcaatccaatcatatcgagcagagagcgacactgagctcaacctttcagctggtgactacatagtggtccgaaaggtgtcgaacaatggatgggccgaaggtgaatgcagggggagagctggctggttcccctacgactacatcgagaaacgagagcgtgtgcttgcaagtaaagtcgcgcaagttttctaaaacttttgctgagacatccatatattcccggggatgtgcaatgtgtattatgcttgatcgtcagaagagaagatctgtaattttgctggaagctgcctgttggatggcttgttcctgcctggccgtctgcattgttcaaattcatgtggcaggaactgaacattattaatgcttaatcttcattcttcagttatcccgttaatatgtatccatactttttgtttgtttgtttgaagcatacaacaagacgagaaatcaagcgctaattattctgtatcgacaacaagatttatttgaaatcgattcttaatgcgagtg

SEQ ID NO: 40698 - DNA, 2798 bp, Zea Mays
ctcctggactcgggctcccaccctatttctttgctgcacctgcacctccgcttcccgtccatatcacgctttgatcgcttcttttttctctccatcatttctccccgtttcgtctcgcttcttttctgtcgcctcccgtttcgtctatctccggccggcctttctgctgcaaggaaaccaatattgtttgctggatctttcaaaaagggaaaccgaattcccgagagcgagcagcagggaatctctgctgaatccgtaggctccgaattggagctggaagtgtagtgatttcctgattggggacataaggtggggtttgtccctactccccagtgagctccacgcggtccctgctgttcttccagtcaaaattctgtacccttcggtgctggggtcaaggaactaggcgtgttgtcctgaactcttgattcctgcttcatggaaattgtatatgtttttctctgaattcaaaatcgtccctattctcccaaagctttctgagcgcaggaagaaggatattgtccctctccaaaactataaacatgggttggttgagtaaaatatttaaaggtccagtaaatagagtttcaagaggacactacaacgggaactcccatgaaggctattcagctcagcacactaaatcatatgtactgctcagttgcagcttatcctcttaatctttatctttactggtgcaaattagttaatttaagtagaacctaatataaaaaatgaagaaaagaatcatagtgcactgaaatgtgcccccaatattatatactatgagttgcttagtgcacttgccgtatttgtttacttaatttgaaatgggtccttccctatttctaataaataatttttattaaagtatattgttggcatgcctgcctggaaaaatataagtagtgaacaacttaccaatctgtgcttgactaatgaggatccacagtattttttaatgtatatcaggactcacaacaggttgcatgttcctcagtcggagaggaaaggagtagcactggatgtgctttttgcatacttaaccgttccctgcttttttactgtataattaaaatttaatgtagggtgtgcatggcaatgaggacgaagacatggatcatgctattgcattatccttatcagaggaagatcaaaggaagggaaagaccattgataccgggcatcatttagatgaagatgaacagattgcacaggctctgcaagaaaatattggtcataacctagctgaagacgaacagcttgcacgggctctgcaagaaagtatgaatgatggacctcctcgtcagcacattccagttgaagatgttaactcagaaagtactccagcaagcatcttgccctcaaatattttccgcacaagtggcttgagggtttgtgctggatgcagaagtccaattggccgcggtcggtttctcagttgtatggactctgtttggcatcccgagtgcttcaggtgttatgcttgtgatagaccaatatcagagtatgagtttgctgttcatgaaaaccatgcctaccacaggccctgctacaaggagcgtttccatcctaaatgtgatgtttgcagtagctttattcccacagataaaaatggcctcattgaataccgggcccatcctttttggatgcagaagtattgtccttcccatgaaaatgatggtacacctaggtgctgcagttgtgaacgaatggagccaaaggacagtcaatacataacattagatgatggccggagactctgcttggagtgtctgcatactgctattatggagaccaatgaatgccagccactgtacattgatattcaagaattttatgagggtatgaacatgaaagtagagcaacaagttcccttgcttttggttgagcgacaagctttaaatgaagccatggaagcagagaaatctgtgcaccaccttcctgaaacaagaggcctctgcctatctgaggagcagattgtcagaactatattgaaaggaccaattggaccaggcaacagaatcatagatatggtcacaggaccatacaaactcattagacggtgtgaagtgactgcaattcttatactgtacgggctgccaaggctgctaactggctcgattctggctcatgagatgatgcatgcttacctccgacttaaaggataccgaaccctgagtccagaggttgaagaaggcatctgtcaggttctagctcatctttggcttgagtcagaaatcacatcaggttctggtagcatgtcaaccacctcagatgcgtcatcgtcatcttcaacatcttcatcatcgaaaaagggcgcaaagacggaatttgaaaaaagactcggggagttcttcaagtaccaaattgaaacagattcttctgtcgcttatggagatgggtttcgagcaggcatgcgagccattgagcggtacggcttgagaagcacccttgatcatatcaagatgacggggtcttttccatgctgaagctggtttttttttacctcggcttggatatgggtatacatattttttttggagaacttttggttcaggttatacatacgaaaagccgaacttctgtgtcgagaagaggcataaggatttagctatactgtccattgcaggaaaaaaaactgtttcccttttcaattataaaatttcacagtgcagacatgaaggtatgtggtctttagcttggccaaccttgtggaatgctgtcacttgatgcaaaagaaatttcgaatacatatgctttgctgtgcttgaaatgcaatggttggatgctatgct

SEQ ID NO: 40699 - DNA, 773 bp, Zea Mays
atggcaactcgcaacgaacacagattccgaagagagaccagggcatccataattatccaggaaaaacataatgaacagttccttgaatcacagactcgttggcgccaacacagagcttatgctgcttacaaacagcaacagaaagcttctttgattctccaatgcttgtggagggcacgcattgcaagaaaggaacttcggaaactgagaatggaagcaagagagaccggcgcactgaaagaagcaaaagacaagctagaaaagagagtagaagaactcacatggcggttagacgtcgagaagcgtttgagggctgaccttgaagaagcaaagagccatgaaattgaaaagttgcaatctgcactgcaaaaaatgcaagaaaatctcgaggaagcccatgcagcaatagtaaatgagaaagaggctgcaaagttagcgattgaacaggcaccaccaaagatagtagaagtgtcggttattgacaatgcgaaacttgaggagttgacaactcaaaataaagaacttgaggatgaactaagtacgtttaaacaaaaggctgaggatcttgaaaataagcttattgagttccaaaaacagtctgatgaactgtcacaggagacacaagaacaagcatccaaagttactcaacttcaagagctggtcgaaaggcttgaagcaagtttatccaatatggaatctgaaaaccaagttctacgacaacagtcattggttgttgcatcagctgacgaggataaatcaaaatagatagagag

SEQ ID NO: 40700 - DNA, 3666 bp, Zea Mays
cacgagcaccgaccggctacgcagcacggaggacgggaggtgcgccgtcgctcgccggcgatgatcctccacccctgacacgcccgcgattaggttccgtcctctgccgccgcgcaaacgatgtctgccgtcgaccgcggtcgttcccgcgcccgcgacacgagtcagcagcgaactcaacgggaatccggcgacccccagaaatggctgcactgcaaccctcattttcaccagcaatgactttgaagagtagctgcagcgccctgaagttcccaaaaactgcactgttatctggttttggtggcattccacgccttcaagatgcgcaagacaggaacactagcgtcgcttatttgatccccaaggctgcttcagtgactgaccagtcaatagcagagccaccaaaaaccaagcaaaataggcacacagtcgacccaacagctccagaatttctgccactcccatcttttgaagaatgctttccaaggagtaccaaagaatcaagtgaaatcatccacgaggaatcaggtcatgtcctcaaggttccattccggagagtccatttgactggagatcagaagcactttgatacatatgacaccagtggtcctcaaaatataagcccaaggattggactcccaaagataaggaaggaatggattgataggagggaaaagctgggtagtcctcggtacacacaaatgtattatgctaaacagggaattgtaacagaggagatgttatactgtgccagccgtgagaaccttagtcctgaatttgttcggacagaagttgcccgtggacgagccataattccttccaacaagaggcacctggaattggaacccatgattgttggaagaaacttccttgtaaaggtgaatgcaaatattgggaattcagctgttgtgagctccattgaggaggaagttcacaagctccagtgggccacgatgtggggagctgatactgtcatggacctttcaacagggcgacatatccatgagacgcgggaatggattattcgcaactctccggttcctattgggactgttcctatttaccaagcacttgagaaagtaaatggtattgctgaaaatctgagctgggaaatttttagggataccttgattgaacaagctgagcagggcgttgattacttcacaatccatgctggtgtcctgcttcgttacattcctcttacagcaaagagaatgacgggcatagtttcacgtggtggctcaatccatgcaaaatggtgcttaacttatcacaaggagaactttgcatatgaacattgggatgacattcttgacatatgcaatcagtatgatgtggcattatcaattggtgatggtttgaggcctggttccatttatgatgcaaatgatagtgcacagtttgcagaactgctgactcaaggtgaactaacacgtcgagcatgggcgaaagatgtgcaggtgatgaatgaaggcccgggtcacatcccaatgcataaaattcctgaaaacatggagaaacagttggagtggtgtaatgaagcgcctttctatacattgggtcctttgacaactgatattgcacctggttatgatcacatcacttcagccattggtgctgccaacattggagctcttggcactgcacttctttgctatgtaacaccaaaggagcaccttgggttgcccaatcgtgatgatgtcaagactggtgtaatatcctacaaaatttctgctcatgctgctgatttggcgaagggtcatccctatgcacaagcttgggatgatgcacttagcaaggcaaggtttgagtttagatggcttgaccaatttgctttatctctggatccagtaactgctatggctttccatgatgaaacattgccctctgagggtgccaaagtggcacatttctgctcaatgtgtgggcccaagttttgttcaatgaaaatcacggaggatatcaggaagtatgctgatgaaaatggttatggaacagtagaggaagctgtgatacaaggaatgaatgctatgagtgctgaatttttggctgcaaggaaaacaattagtggggaacaacatggtgaagcaggaggggagatctatgtaccagaaagctatgcagctcagaaataaggtttcctcggagacatccattccaaatgaggctaaggcatcagcagctgttctggctagtggctaaggcatcagcagctgttctaccatcttatctaatgagatgtctgagagcctcttagcctggactgttgtgagatgggctgagaaagtccctttgaacctgaacaggataatgcctgcgaagggagtgtgcaattctattttcctgttttccaggaacctatcaaccttttggtggaaattgaggtattgtccatgattgcatggagctcagcaacaaggtacctgttctctacttgtttgcatttctcaaggggaagattcttaacaggtatcagcttcgtcatgacatctaacaattttatttataatgttcaagttatttagttaaatctacacgaccatgaaatttgtcaaagcatttcctagtcctatattatctagttttacttctacgtctatctgttctttgattgtgcgctccatctattctttgatgaagcttgcgagttctactttctagacctattgagataggaccttttggcacggtacaatatcaatactgttttggtgaagggagtatatttacagtagtacaaaaggagatggctaaacctgctacaattttttttagatggacgatgtttgtcaattgagggtgggaagtaccgaccagattgcatttgacttcatccggccatccggtctattaataaataaccaaggaagtggttcttggcaactaccttttcccgttcttgtggtttttttttcaaataggcgtgcttaaatatttcggtcttttaaattaatattataaaattctcgtctgaatatttttcaagtctagtattatgcatgataatttacatatgcatgttgtctgaaagcagaagcagattctcaaggcacctgctaattcaaaaccaaaaataggttgtaacttcgaagttgctgcattggtgaagaataatatattttagttttactctcagctgattgcttgtttgtcatgtttcactccatgcttcactctcggctgtattctgcattataccttgtttatatccaactgccatggccgatgtgagatgttaaatgtgtcggtgaagtaaataattctgctgtggcttttccgctttctgtggttccaatgggctattcccatttgcaaatattgtgtccataaggcggatttccaaatcctgcggagttgaggtgggcacctaatttcttgacgtttctgatcaatttctcatgttatcacaatgtcccttataagtgcttcccgagcagaattgagatgttaattattataaacttccattttggtttatctgaaaccaggaattctatatgaatgtctccttgagtatagtttcattattgtttaaaaggtgcgtctggttctgctacttatgttacgagctgtgaaaaaagttgttgtgaaccgtttgcagtgaaaaaaattaatatcctatttagataaagatattggacaacggaattgagaattgaaatcagc

SEQ ID NO: 40701 - DNA, 1596 bp, Zea Mays
tctgagtcgtgtgtccgtgcctaatggtaccgaccacctaattagagcatctccaagagattccaaaaataaatctcctaatacttagaattgggatctccctaaatgtcttaattccaaaaaaaatgaatcgtctccaacaacccccaatataattcaaaaacacaatgaatcgcaggtacacaatgtctacatataagcttcagatgtttgtataatcttccgatgtgttagttgtataagttgctgcttagaattgtaggtacacaatgtctgcatataagccgttgaaagtataatgttgaacgttccatgataaactctttgtgccaacaaacagaccttgaaaatgattgcataaatattattcttacaacaaccagttcttcaaaaaaattgaaatgttgcatagaggcaaagctcttcattgtttcatactacttgaaacatcgcatgcaggcaccacatctcgcgtcagctcaaagcaacacaataaacagaggtactggtacgactgtcatcgtagtgaccgcggagaccaccggagccgctgacccaacaagctgcacgttgaagttgcaggcgccatgagacgcgttctcgtcgacgacgacgacggtgagcccctagaagtttgatttggcggcagcagtgcagctggaggcgtcagcgtatctcaatgcatggatccatggggtttcaggagagggtgaccgccgccagaagcagaacatcaatgagaagagtttggcgcgtgaaatcgagtgtgctggtgacgggcgatggagtgaatgggtgaaaacaacacgtgaacggaaaatagggtctcgattgggagctcaagcgatggcggatgtttgcgccgtggaggggatgatttccgcatgcgggagtttagagatactgtataggttactgttggaatcgttgtttccttcccccccccctaaaataaggattatgacctagattttaaggatctcttggagatgctcttatgacatgctcttaattatgtcatgctagtggagcccaccctcgagacctgccattaaagcagggcacctgcgcttgttcttcagagacgcgggtcaccatgcgaggacgctaatgctattgctaagccacatcgtctccagcactcgcaggaagagagagaaaggatggatcagacgagaatccatcctggtcctgtagtggagtctgaagctccaagaaagagcacacgcagacgcagatgctgccaatgcgtttcagagggtctctgatcagaaaacggcccgtgtgttttcagcgacgcaaaagcaggaggtacctacctgattctggatggacggctaatctcctcgcctgctcaaaaaaaaaaaacagacaagctgaaggagccgtcgaggtacgtcgtaaacttggccgtcgtcgaggtcccgtgtgcacagctgagctgggccagcgagagcccgccctatgcttcaggcgagatgacacccacttcagacggacagacacggcgcggatggaccggtccgtctggcgtcggtgtcatctctcctgagcgtaggacgcacacccacaaataaccacggctgcagggttcgg

SEQ ID NO: 40702 - DNA, 2691 bp, Zea Mays
tctcaaactccaagtcccaaccaattcagcactcggccacttgggtttatcagctctcgggctagctcttctcccacactccagctgcatcctttcggatcggttggcccgtcgctgcagccgcgaccgaactgcccagatgttcacgtcgaatccaccaaaaatccagcgccctcctgctaccagcacgcaccactgccgcctactaccaccctgcgtccttccgtatccacgtatcttatcatggttctctctgctgcccactgcctcccttgccttgcacatctcggcaagcatccgccagcaagaatcgatttgtttatcaccctcgtcggtgaaaaatcaacttcttttcatgcatgtggcctgcttgacgcgagtttatcgaggtcgccatgaacgggagcaagtgtgacagatgcaagtggaggccatggagatggctcgttgcttcgtgggtcctagcggttattctggagcggggcggcgcggaggtgacggagttggatttggaggagcggcggaacgagcggcgcgacctgctggtgctgcgcgacacgctgcggtcggcgctggacctgcactccaactggacggggcctccgtgccacggcgagcggagccggtggcacggcgtgtcgtgtgacggcgacgggcgcgtggtcggcgtgtcgctcgacggcgcgcagcttacgggcacgctcccgcggagcgcgctccggggcgtgtcgcggctggaggcgctgtccctgcgcgggaacgcgctccacggcgcgctcccggggctcgatgggctgtcgcggctccgcgccgttgatctgtccagcaaccggttctcggggcccatcccgcgcggttatgccacatcgctatgggagctcgcgcggctcgaactccaggacaacctgctcaacggcacccttccggcgttcgagcagcacgggctcgtcgtcttcaacgtgtcctacaacttcctccagggcgaggtccccggcacccgcgcgttgcgacggttccccgcgagcgcgttcgaccacaacctcaggctctgtggcgaggttgtgaacgccgactgccgggaccaggaggggctgccgtcgtccggtgctccagcgtatggaagcagcagtccggtcgtgaggccggctggcgacggcggtcgggcggcacggaagcacttgcggttcaggctggcggcgtggagcgtcgtggcgatctgcctcatcgcggcgctggtgccgttcgcagctgtgttcatcttcttgcaccacaagaagaagagccaggagtgacggcggcggaggacatcaaggacaaggtggaggtggagcaaggccgagggagtggcagccgcagcacggaatccggcaagggggccgagctgcagctcttccgcgctgacggggccagcttcgacctcgacgagctcttcaggtccacggcggagatgctcggcaaggggcggttggggatcacgtaccgggtggccctccaggccggccccgtcgtcgtcgtgaagcggctgcgcaacatgtcgcacgtgccgcgtagggacttcacgcacaccatgcagctcctgggcaagctccggcacgagaacgtcgtcgacctcgtcgcgtgtttctactccaaggaggagaagctggtcgtgtacgagcacgttcccgggtgcagcctcttccagctcctgcatggaaacagaggcgaggggaggacgccgctgccgtggccggcgcggctgtcggtagcgcagggcatggtgcgtgggctggcgtacctgcacaagtccctgccgtacttccaccggccgccgcacggcaacctcaagtcgtccaatgtgctcgtcttcttctcggctcccaacggcaagcagcagaagcaggcggtgccaaagctgacggaccacggcttccacccgctgctcccgcaccacgcgcaccggctggcggcggccaagtgccccgagttcgcgcgccgcggcggcaggcggctgtcgtcccgcgccgacgtgtactgcctcgggttggtgctgctggagctggtgacggggaaggtgcccgtggaggaagacggcgacctggcggagtgggcgcgggtggcgctcagccacgagtggtccacggacatcctcgacgtggagatcctgggcgaccgggggcggcacggggacatgctccggctcacggaggtcgctctcctctgcgccgccgtcgagcccgacaggcggcccaagctgcaggacgtcatcaggatgatcgacgatatcgccggcggcgacggatcagagctggatcgccgttgagctagctccactgtccacgacggcgaagggtgtgggctggtcgacatgatcttcttgatttcagatttatttgatttctgtgtcataatcgtttcgctttcagtttagcttcccttttcaattgtaacattgcaatcgatgctccctgatcgattgccctggtgcagtcagagaaaaggatgtgaactagtgaacttcatatatgtatgtaagcacaggcagaggcccttagagttgcatctttaatttggttggatgctcactgtttttgtgtttagctggggatgaatgaggtacactggtgcatcaaccatcagatcaaaatattatgccaggatcattgtcatacacattcaagctacaggattaggctgatgtgatttaagtgc

SEQ ID NO: 40703 - DNA, 1584 bp, Zea Mays
cctgttggctcgcgatgggtggcggcagggaacacagcccacggtttttgctggctccccgtcaccccctcctccgctccgcctcctgtttatagtcgcctgctgtcgcggcccctttttccttccaccacccaccggccaccaccctccgcgcttgcctagttgccttgactgcctgcctcgtcttaccaccaagctaagctagcgcgttccttccttttttcctccctcgcttcctgttgctcggtccatggaggtggcggcggccgcgacggcgggcgcgggggttgtggagctgcagctcgacctactcgaggcggcggcgccgacggagcgagaggccaagaggcgccgggtgcacccggttccagcgggcccaccggccggggtccagctgctccgccacatgctcgacaggatgcggccggaggacgtgggcctgagcccggacctgagcttcttcagggctcgagacgccacacgtggcggtggcaccccgaccataacgcacacgacgatatacaaatgcccgaatttctcgatggtcatcctcttcctgccgcgaaacgcggtgatcccgctccacaaccaccctgggatgacggtgttcagcaagctgctcctggggtcgatgcacgtcaagtcgtacgactggctcaacactgctgaccccgatccttcttccgccacgagcaccaccagctcttcgtcctccgatggcccatgcctgaggctggcagaactggtggtggacgacgtcttcacggcgccgtgcgacacctccgtgctgtacccgacggcgggagggaacatgcaccggttcaccgccatggcgccctgcgcgatcctcgacgtcctcgggcccccctactccatagaggaggacagggactgcacgtactacgcggaattaccgtacgcacaccactcgctggtggctgcgggcgaggacgtggagcggggccagggccaaggccatctggcgtggcttgaggagatcgacatgccgagagagctcaagatgtgcagcgtccactatggtggaccgccgatctccgacgagtgacgtcgccggccgtctccctcactggttgtactatgtctaactgatcgcggcagagccgtgccgccgccgttgtgtatagcaggcagcagcaagccataggctgtagttacacgaagtcccgatcgattacaatgtttcttgctggcctgcatcgttgttctctagatgccctttctttcttgttatttttgtttctactactactacaagtagacgatgttttgtcctgatgatgaatgatacagataagtcatatatatccacatatttcatttttgtcgtttgggctattctggtcatagtttgtgcgtgttgcgccattttgtccaaatattttcatattatatctaatgtaggtaattcttatggatttcgtagcaacgtgggcacgcacttattgtggtgactatactcatcagcaaatatagcaagtctaatttatcaaaaacaaggagatatagactttgaaatattgaaggaaaccaaaacacctgccaatccacctatcttgtcatggt

SEQ ID NO: 40704 - DNA, 841 bp, Zea Mays
atctccaactctccatcatatatgatgaaactgaatgtttactagctttgaggcccctcgggcaaaataatgcttcttcctgaggatgatccaaatgccactcatatcatgattgccacggggaccggtgttgctccctaccgtggctacctacgtcgcatgttcatggaagatgtcccaactttcaaatttggtggtctggcttggctcttccttggtgttgcgaactctgacagccttctctatgacgaagagttcacaaactaccttcagcagtatccagacaatttcaggtacgacaaagcgctaagcagggagcagaagaacaagagcggcgggaagatgtacgtgcaggacaagatcgaggagtacagcgacgaaatcttcagactgctagatggcggtgcgcacatctacttctgtggtttgaaggggatgatgccggggatccaggacacgctcaagaaggtggctgagcaaagaggcgagagctgggaccagaagctgtcacagctgaaaaagaacaagcagtggcacgtcgaggtttactaggctataagatggcaaggattgtgattgtttagctactgagctgagaaactggacgtatgattgaacgactgtggctgctgcgatgtaatgtaacattgtagacttggattcataagcttctgctccaaatggtgaataaaatgaagcacgcggtttgtagctgctactaccagtatcaggacagtttctttttgctcgtttcgtataggttgattaagctatttttaagggtacatctccttgctttatgttattctgaattttcttatctgagatgcattattgaatt

SEQ ID NO: 40705 - DNA, 2331 bp, Zea Mays
acgtctcgtcagttttttcctttttcccgtggcccgtgggtgtgcgtcctaggtgtgcggcgggcggtgcgccgtgcgcctcctctcctcgccgcgacgctgccgtgttcgcgattcagcgccgtgctcgacgcccctcctctcctcagaagtcagcgccgcatctccggttgcagagacttgcgctgccacatctccgcttttcgtccttcagttgctcgacgcccctcctcccctcagaagtcagcgcagcgtctccactctccacgccggcgcgtcggcgacgcgggtccttcgaataagacggtttgttctcgcatcgggcgtcagccggattcgagggacatagatgatggaagtcgatcttgggtgccaccacgtcgaagcggcttgtgctgtgtagatccggcgaaagcgcgcaggcaaagcccgggtctgcgtcgtcattggcctcatgatcttcgtattgccatcgcgctaaagggaacgaaggcgacgaggtcttaaactttgattgatatatgcggatatgaaaatgcatgcaactacatgctagaagtctgtcttggttgtgttggagaaaaattctttgttacgtttttgttgatagcgttgagtgccaaaaatggagcttctccctgttgaagtcgttggcaacattctttcccatcttggtgttgcgcgtgatgttatgattgcctctgcggtatgccgcaagtggcgagatgcatgcaggaggcatctccgtttgctgtccttcaactccaatgactttccacgggacatgactacacgtcagttggagattgtcatcacacagactatatttcagactatggggctgcaacgcctttcgattcacattgataacacccatgagttctctgcagcaccagtgattgcatggctcatgtataccagggagaccctccgaagcctgtcttacaatgtcaggacaatacccaatgtaagcattcttgaaaagtgtggtaggcaaaagctcgaagtgctagatttggaattggaccataacaccatcacaggtgtcgaaccaagctatcagaggttcacttgtctgaaatccctttccctgaggcatgtcagcattttggccttggatttgagccttttagttgctgcttgcccaagaatagagtcattagcacttgatgtccttgaggttgtcacttcagaattacagtctacgatggagctcacaagccatacattgaaaagtctatttgcaaaatcggtaggtgtagataagatcatacttgatgcagataatttggaagttctgcacctgaatgctttaaatctcgatctgtttgagcttaacgggaaaggaacactaaaacattttaagattgatgatgtcagtgttactcatttggatattggggacaatactgatcatttggaggcagtagacgtgagcaacttcacaatagtctggccaaaattctatagcatgatatccagggcatctaatttgcgtatgctacgattttggggtgttgtgtttgatgacgaggatgagatcgtggattcagaaactatagctgtttcatttcctcttcttaggcatctttcattgagttatgaattacgagatgggttacttcactacagccttcagggatcatcattactggagaatgtctcagttctggaacttggttggacagtaataagtgagcactttggaccctgggtgtttggtatgattggaaggtgtccaaatctcaagaaacttgttattcatggtgttctttctgagacaaaaacgcgagaggatcgccagatgttagcaagctttacctcattcatagtctgtgtcatgaggaagtatgtgcatgttgatgtacaatttgagtatgagtgacagctactaggttgggtgggcatcttgtcattgttcagatgaagctgtgccatcagcaagagatgaaccaacgtgttttgttgcattgggagcagaggctggagataatcgtaggagttgccaaaggtgttgcttatctgcaaggactaagaaaggaagtgatacacagtgatctaaaaccatccgacatactcttggatgaaaactagagagctaaaattgcagattttggcaccacaaaagtgttcgtggatggccagacgaatccaacacttgtacaatagagggacacagggctctagagtacactgtttgagatccagtgtttcaaagtccagccaaaaatgttgaaattcagttgtttgatgaatttggacaatgatgatgatgatttagaatctgatccagagtttgatgaatgatgatgaagagatggtatacaatac

SEQ ID NO: 40706 - DNA, 2006 bp, Zea Mays
gtctggatcctcctatccaattccgtctcgcgttcctctcgtcggctcgtcgctctccgagccgcgaaatggcgcctcctacctctgcatcggcgcggccgctatccctccccctcaccgtccctctctcctgtcaccgctcccacttgctccccgcgcccaacgctcgcctcctcacccggcgccgcgtcgcgctcgcgccgacccggcctggcgccacgctcctatccagcctcagtgacgcccgggaggaggaggaggatgaaagtggtttctatgaggaggatgagcaacaggaattcgaggatgaggaggaacaggggtacgacggggagaacgaggagctggtcgaggtgggatacgtgtcaggcgcgcacggggtgcgcggcgacgtcctcgtcacgccacgcaccgactttccggagctccgccttgccacgccggggacgagatggctgagggctcgagctgctggcaagcagcaggtcagggaattcgagcttgttcggggaagggcgcacacggggaagaagagttggatcgtcagctttgatggcgtcaacaacctggacgaggctaggcaaatagttggttcagctgtacttgtgaaagctcgagatagaccagaaattgaggatgatgaattctattcacttgaccttgttggaatgagagttattgtcaaggagtggaaggacaggaaaaggtttcaacgtcgtgtaattgcaggaaagaaggtactctccgaaatggaccaagtccatgttctggaaggtttggtatcaggggacaaggtccaaaaggcatcacttgcagagcagattgggagcattgactttcaattgttccgacatgcagtacattgtgttagcaagcagattgagagctcttcaatgaatttgctcgctaactcttcactgtcaaggaaaaaagtgatcaaaataccatacaagactctcatcaaccttggggacaaagctgaacatgcattcagtactgaatttaaaaatggacttgacattcttttgaagtccaaagcagctattgtgcttgttagaaacggctctgactctgatactgagtttctgagtttgctcaattcttttagtgaattaatgaaggttgtagaaaataaagtttctccccctttaattgtcattgccccagctggtcatgtggagtcagttcggaaatgcctggtagagaatgactattttggttttgacactcaaaaggtgtgggtgctggaagaggtggagcttccagttgtcagtatatgctcggagggaaacagaaaaaaagttctgatgaagtctccctgggagataataaaaaagccaacaggttctggagcaatcttcagcttactgttatcaaacaaaattttggaaaccctcaatgaaatgggtgtacagtatacacagatctgcagctcatccaacaaaccaatcatcgggcatcctttgctctttggggctgtcgcttcccgcggggctgatgttggcatccaggtctccaagaccggtgaaacattagacgatttcgacgtgatcctttccatcgaccagctgaacaagatgtgccgagatgtcacccagatcaggttctccgctcgctccgaacagaacgtgcacgtcgagcatgtcgacgggcagtgggtcgccgtccagccggaggtggcaaattcccatcgcctgcatgccgaggttacgagtgtcttagactcttgcgctcctgataagctgtgtgtcatggagattgttgagcaataaaagtttcttgcctgtgtactgtacataatcacaagtacttgatagatgcgtgaggtttttcttctgctattgttttgctatgaatttttaggggagcatctacgaaggggaataccagccacccactgccaattctactggtcccagaaggattaaaaacttgttagaggataaggtcgtcctctactcaatccaacagcgatctctaaacagtcctatagatttagagtacac

SEQ ID NO: 40707 - DNA, 642 bp, Zea Mays
tacaaattatctacgacttatatatagactttttatttttttgaggcccctaagaccacggaaaactgggattaacagaaactgtcgaatctgccattctgcagaaaactaaattcgagatcaaaacataaccccacatctaatccaacctctaatcctttaattcccatgatccacaacctccaaaagcacataattacagggaggaacaaggatctcatccatacctagggtttccccaagaaattttgcaagagagatggggaagaacatctccttgatcctctcttccccttcaactcaatatttgtgctcctcctcttctcgatccttgctgcgcggggggagatctagagggaggaggaagtcgtggagaggggctgccatgggaggagaggacagccagcccaagggaaaagaagagaggggcggccaagtgtgggagggggggaaaggggtggcggccaagtaggggcaaaagggggaaaagaccaccactagggttttctttgcgggagaaaagaagcgacgccacagatgactccgacttagcatccaacggcccacaacccttttcctacatccacgcaccgaagatcaacctttggcaacatttttttgggatattacactctaccaggg

SEQ ID NO: 40708 - DNA, 345 bp, Zea Mays
ttttagtttacgtaacaccaggggtgttacagccttcccccctaaaagaaatctcgtcccgagatttaaaagtttaggctcagtaacggaaaaaagaaatgtgtcacaaaattatttcccaatttctcctaccaaacagggggcgtgccactgttggtttaaaattcacaaaccctaaggttttccaaaaactcgaaacttagggcaaggactttgtcttctaaatacccctcagaccttctacatggcttcatcttttgtggggtagttccactgtaccccgtaagacttgatatctttctgtgttttatccaagatgttgtatttaatttgttttggataaag

SEQ ID NO: 40709 - DNA, 1798 bp, Zea Mays
cagggttttattccctgttgtttttcaggtttagttttgtgctgttgttgatggtgttaagtgccggtgggctcggccttcttataagtctaagtaacccttctatacttcttattgaggatggtcacttgagctagcatatatttcaaacttaaacttttgtaatcactccgataaactaatgtaaattttttgtaacctgtaaaatttggtagtaagatttccgctgcaacaatattggtgtgtgtgatatgtgttacttaatcccgcggttctggttgtaagtggtttatccgatgtccttggggcaatcagacagatcctgttaagttatctggtgcacatgcatagccgtctgaggtctttgggacaagaacaggtgcatgtgggcccaataacttggaggttctgccacaagcttctagcaaatcctcaagcaaaggaaggggaaggactacaaaccccgatccaagagggtttgctataggtgtggtaagtccgaccactttattgctaaatgtccatatacaagtgacagtgacaaggacgacgacaagaaagggaagaagaagatggagaagaagagatactacaagaataagggtggcgaggcgcatgtgtgcgagaatgggactccgacgagagctccaccgactcctcctccgatgaggacgccaccaacatcgccatcaacatgggccttctcttccccaacatcggccacaaatgcctcatggctaaggacggcaaaaggaagaagcgcccttctgcagacccctcgcacctctgcctcgcacagcgcgcgcccgtggagcaccatcgccgttcaccgtaacctcgggcccattccacggccgtcgtcgagcttccgtcatgctcattgctccggtaagctccgcctcctcgccagcaactcaagacatcccttggtttgcccctaccccctctattcccctctgctcacgctcaccggattctctccgtgcagccgtgtcgcccccgccgttgatccgggccctcgctgtgttctcaccatcgctcaagcgctccaaagctgtctctcaaggtaacccacctccccacgcccctaatttccctttcgcagccttgttgctcacgcaatcgctcatcgaagtaggctagagccaccaccgggcctctctactgcaaaccgataccctccgatgcctctgcgccggtgtcgtgcccacgatcgagtccgccgtgccaccccgaatatgcctgagccctttccagcgccccaagaccccccggcatgcccgtgcccttgcctccggcggagctccaccatagagtcgggcggcacagccgctcgcagccaaggagaccctacttaggcttgccgcgggatctcaggcatccgtttgagatcaagaggccaagattcaattagagcagacctaatcctacccgtctgttttagatccgaccgctcgggtccgctccctcacccgcgccctgcagctgggcacgaccggtgaggccgcatcgcccctaggccgctgacaaccttggcccgcctatcagtgctcgtccgcgcgtccgcacgcgctcgcgctcagatctgatctcaaccgtccgtgtgcgatcgaatggctgagaataccccataccccttcgtgtgtgttttttgttaaagaaacccttggtttcccgagaatcaacccacagtcctgtaaattcgcgagcaggcccctaacatcttataaacaaatccctgaccttttaaataatcacatatttggacctaattttgtatttcaaacttcgaaacttg

SEQ ID NO: 40710 - DNA, 3125 bp, Zea Mays
cacctccccgattcgtcgatttctccctcccttcatccaatcgggatttctgcttcccgcgctctcctcgcctcctccttcctagaaaacccacaaaaatcatctcgccattcctctccttcgtagaaaactcacaaaaatccctccaggttccagggggcgaggggagagagagagagagagagagagagagagttgagtgcgagagaggcgagggggcggcggcggcggcggcgacaatggggatccaggggctgctgccgcagttgaagtcaatcatggcgcccattagcgcggtggagctgcggggccagacggtggctgttgacacctattcctggctccacaagggcgctctatcctgcggcgaccgcctctgcaagggcatccccaccaccaggcatattgaatattgcatgcatcgggttaacatgttgcggcattttggtgtcagaccaattcttgtatttgatggaggccttctgccaataaagagctatcaagaggggaagcgagcaaggtcaagaaaggaaaaccttgagcgtgccagggaacatgaggctgctgggaactcacgtgctgcttttgagtgctatcagaaggctgttgacattacacctagaattgcttctgaactgattgaggtactgaagaaagaaaatgttaattatattgttgcaccttatgaagcagatgcgcaaatgacattcttatctgttaataaacttgttgatgctgtgatcactgaggattcagatttgataccatttggttgttctagaattattttcaaaatggacaaatttgggcaaggtgttgaatttcagattacacgcctagagcaaaacagagagcttgactttaatggattcacaagacagatgttacttgagatgtgtattttaagtggctgtgactatctcccctcattgccaggaatgggcgttaaacgagctcatgcactcatccaaaagctgaagtgtcacgaaaaggtgatcaagcacctgaggtatggtgctgtttctgttccacctcaatatgaagaggacttcaagaaagcaatctgggcatttaagttccaaagggtctacgatcctgctacagaagatattattcatttgtcaagtgtgcctcaaagcctcattgaagatttggaatttttaggcccatggttaccacagaatattgccaaaggcattgctctagggaacattgatccactcacgaaggaaccattcgagatcaatccagagtgcagtgcaccttctgttcataaggtttgtccaaccagagagcctattgcaccttcaaatgggaggaagaaactagatttgcctgtgcagaaaaatatattgaccaactatttctgcttagcatcccttgaggcaaaacggaaattcagggcgcctaaagtaacacataagcaacaaatattgaatgaagctttgcctagccctcaagctcaaggctctgctacctctgattcagttgaagatactaggttgccaacagatcgcattcaagcttctcaatgtagttctgagcatttaagctctgaacctcctcaaaatgacccaatcagtgttggctctcagtgtagttctgagcgtttcagctgtgagtaccccctcgatgattcagccaacatttcacaatgtagttcacttgatggtggtagtgatcctccttacaaggatactggcaataaagacagaaaggttgaggctggctacgacaacaaaaatagaatacctacaagtccttgcataatgggaaatttaccctggacatcagagccatttttagttccccataacgtgggaccatctataccagttcaacattatactgaaagcactgtggcctctaataataatggcattaccgtaagttcatacttcaaaacagcaaacaagagaatttgcacagatcaaggagaccagttagatgatgactatgatgttagtactggtaatctttgtggagatcaactgaggaaatctggcatgttgaagagaagaaagctttctggcatccaaaagtttgaagatgaaactttacagccgattcattctgacgatagtccaccattcgttgatgaaggtcaagatacagatgatcctgacgatacaaatataagaactgaaggaagatttggatgcaatgtttcccatgtgaatacatacagtggaattgcagaaaaatcaatggataagtttgctgcattgatatcatctttcagataccccggcccccgtgccagtggccttcgtgctcctttaaaggatgtgaaaaacacactttctgtgagatctattcttaaagctccagaaaaagacacattcagacgcacagcaaagaaaacaggtctaggccccccttcaaaaagcagatatacaagtgatgataagggaagtgctgccagcccccctgatattagcgcatttgcttataggcctatgaaaactgttgcttctgaccaaggcaaaaccacagtcggacgtttgaatgggagcagattcagagagaccgcaccgaaagcaactggagggacttctaggagccagttcaaatagaaccagtgccgttggctctctaaatgctgtggtgaaaggaaaacaacccctgatcagagcatttccgtttctgagcatcgttgaagatagttggcattgggcccccggaggacctcgaggggctgcagaggttcctttgcttcagagcccctctgtacctattcatcaacgtggaccctggaggaccgttactgcctgctagtagcagctcgttattttgagctcatcttttgtgctgctcgtcagctcgtgttcaaaccaagcctactgctcatttgctttccctgcagcagcagcagcccctactgttgcatcgaagaaagcaatctcattagcgactgcgttgaactgtagttaagatacttcttgtccatatccttgaggcatgattcgaacggcgtcattgtctcattgacttgtctttatcattcctgaaagataaaagtgaacattgaaatcaaagaaaaaaaaacagtttgtacggtaaagtttgagtttaaaattcattttcaaggtaggcaactggacacactctgagctatccaaagg

SEQ ID NO: 40711 - DNA, 2498 bp, Zea Mays
atggggtacgagcaaggaagggacacagacaaagtttgtttgaagaaaaagaatggcatacggaaattgtcgttggattggtattcaagatgggaggatcagccaaatgacatggaagaagagttatcattaaatatggagaaggaattgcatttgctcgacaatcttgaaccaccatcaaaaatcgagaagctgagaattcgtggctaccggggttcacaattgccatgttggatggcaaagcaaagtgactcttgtggtccagccgatgatacacatatagtaatgcaaagaaatccatctgaattctcccatctgactaaactagtattggacaacttaccaaacttggagcatcttggggagcttgtggaactgccactgataaagatccttaagctcaaaagactgccaaagttgggagagctgcttacgaccacaactggggaggaaggagtggaagcgcaatgttgtttccatcacgtttccactctagtaataattgattgcccgaaacttgttgtgaagccgtactttcctccgtccttgcagagattgacactagaaggaaacaatatgcagttggtttcttcaggatgcttcttccatccacgtcatcatcatgcatctcatgctcatggtgacgagtcttcatcttcctcctattttgcggatgagacgggtactcacctcgagagacttgaacttcgtcggttgacaggatcatcatctggttgggaggtgctgcagcatctcactgggcttcataccctagaaatattcaagtgcacaggccttacgcatttacctgagagcatccactgccccaccaatctctgtagactggtgataacacagtgtgataatcttcgtgtgctgcctgactggcttgtggaactgaaatctctacagagtctggaagtacggttatgtgatgctctccagcagcttcctgaacaaataggagaactctgctcactccagcacctcaccatatcttctttgacttccctgacttgccttcccgagagcatgcagcacctcacctcgcttcgaactctcaacttgtgtctttgtaacgcgttgacccatctgccggagtggctaggcgaactctctgtacttcaaaaactctggctccagggctgccgtggccttacatccttgccccaatccatacaacgccttactgctctagaggacttacttataagctacaaccctgacctagataggcgttgcacggaaggattgggggaggattggcaccttgtctcacatattcaaaatttaaggctacgggactaggggcttcagattagtgcataatattctaaggaagacaaggatggccaggtgagacatttttgtttctctctggcatgtgagcacacatatttattttcttatgtttgtgaaagttgcacagcttagatattggcacttgattatatgctgcctcgtttgttcctcaaaaaatcgtattgtgtgctcgtgttacattgccactttttgctatattgttggttcacaggatccacactcttgctttcattctcatccctacttgttctcaggatccacactcttccctctaagtagcgtcgaaagtcgaaactaactgttccttttttatcagaatctgcagcgtttacatatatgtgcatcaactttggaaaacaagtgtttgcagaggtataaataagttaacgactcatgtgcccactctcaatcttgtacttgatggaaacatgtcaggctttccccttggaaaatctttggcaggtaccgtggcagttcagtgtcctcccaggataacacttgcgaccatactgaacgggtcaatgggcagagtgaatagagatgcaggctaccattgcaggggtacaggaggattgatgtggcgaaccccgcagggaagttaggagtttactctgcagatggtgtctgtgctctgaaccagtttcagtttctctgtaacctcagatatcgatttctgcttgctccacacgaagacagagtttgcagaagcagccagacatgaacacacaagatggcagaagaagtcctggtgcattctgctattggcatttggcagtggcaccctatctgttgggcggtttcgccagcttctttctgctgccgcgcttgcgttgcatttgcattcagctcgctgctcttcttgccttgttgtgtgtgatctgggccaatctgacggcattttgggcacagttggtggtcgcgtatcccgtcggcccgtgttctcagttgctgagccaagcatattcagaatgggtcgcatcgcaacctaacatgtgctccatgttcacaaaaagctgggcccggatgttctctcaatataaagaaaaaaatatattttatgtctaccaattatggttaaagttagttttttcttcctcaactataaaaacccaacacagctccttcatcatcttctaaaaccagacacatgaccgtcctagctgtttttctcgatg

SEQ ID NO: 40712 - DNA, 1978 bp, Zea Mays
gcaatatatttcttaagttagtgggggaggataattgcatacccgtaacagcatacatgcgtttacattgagttttttctctctcttcttgttgacctgaggtgtactccatgcattgttcatgaatggtagtggcgagcaaggtcaaaaggtagaggctgaaagccgcaagccatgcaccgcaatgcaccagcacgcagcacatgcattgcccgccaattcacagtcacaggaacgaggaatcctaccaattccgcgtcgtgacaagaaaagcttcccaacatctctgtcacgggctctcgtagcagaggagtaccactcagcgtctcactccttccccttcccttcccttcccttcagggaccaggccatcagttcttcacgagctgggaagagctcgtgagccgtgcattgaaggcaatggccgctgttcgtagatgctgcctgctggccgcggtgctgctgtggtcggcgctcgcttcagcggccacggccgcgccggcgcctgtggtggccgggccggtgtccagggtggaggacgccaccatgttccggatatactacggtcagagcttcaaggtcatcaagaactccggcgatggcaagagctaccttctcatgcagaacacgtccaagatggcatccaagacgaagtactgcacggggaggattaagtcgttcgtcatccccctcgccagcttctccgtcgacaccacgacctctccagtgtcattctttgagctgcttggagtgctagagagcttgaaaggaataacatcgaaccaagtcgcttctcagtgcgtgctccagtcatatacaagtggaaatgcccagcttgtgaatagaactgatgtgcagacactctcgcagtttactgcgcatttcataagcgatacagatgaagacagaggttgcaactttgcagcatatgtacccttagaagagggcacaccattgcagatggctgagtggatcaagtacctgggaactttcacaaactctgaaaacagggctaatgctgtctacgatgcagttaagaccactaaatgcatctttatttggattgatatgaataagtaataaagtaaagacaaactacctgtgcttaagcaaagtagctgcaaaccttggcacaagattcaagcctgtagtagcgtggattgaattcacacagggaatgtggacatttgttaaagaaagttacatcttacaggtaacacgtcgcgctttctattgaagactcaaagagtagcactcaaataaatcaaaaaaaaatggatcactgatgttcattttttatgaacagtatgtcacagatgcaggagcagaaattgttgatgcaactattacggataagagatttaatagttcagatccagaggatatggataacttccatgctattctgtgtacagtggacgtggtcatagatcagacatatgctttggagcctgcagagtacaaactatccacctttttggagaatattaatgttagccacgactcctgttacagttttgtatcaaatcgcagcatatggagatttgacaaaaggataggagcttctgggacacttggtaaccgaagcaatactattactagtatcatatcttttacctatgtaatgatctaatgaatttttccatctcaaagaaatgatgtcatacacatttactctttttccctttaagattggtccgatggagctatctcacagcctcagttggttcttggagatctcatagaaattttcttcccaacggggaactacataacaatttacttcaggaatcttgcaaaggcatgacctgtgttttcatttcgctacctctttcctttcatttaattgatttatgatttctccagaacaaggttgttgatcagtggaactataataacacaggatgaaggggtcacagagattggtcctgaaatgtgcactaggagcatatccacacccatggatcctataatccca

SEQ ID NO: 40713 - DNA, 2361 bp, Zea Mays
cttgcagtctctcagcctatggtcatcgtggacacgagctcacactgacactgactgacagagtcaatggcgacgggcgtgcttgataggcgcgccccaactaacacgacgtcggtcctcgatgactgactgggtatatatgccatgggtcaccccttccgccaatccagtcaggttcgtcgtccggtcgccgccacctagttgctgccagtccaggctgggaaatcgtatcgtcagggagagcagcatgaaggggcggctgctgctgctgctgtgggcgtgggcggccgccacatgggtgtccgtcagcgccgtgactcgcctcggcagaggcgtcgccggagagcagccgctgtccaggatcgccgtcgagagggtggtcctcgccgtcaacgacgcggcgtacgtcaaggcgtcccctctggttctcgggcacaagggcgagaacagtgagtgggcggacgtggagttcttccacccgaacccgtccgacgacgactggatcggcgtcttctctcccgcaaatttcagtgatgcgatctgtgaggctgagaatacgggtaccccagtgctgtgcactgcacctatcaagtaccagtttgcaaacttcgaaaacgatggctataacaagactggaaagggctacctcaagcttcagttgatcaaccagagggaagatttctcattcgcgcttttctcaggtggtctctcaaagcccaagctgatttctgtctccaacaaggtagcctttgctaatccaaaggcaccagtgtacccgcgtttggcgcaagggaagtcttggaatgaaatgacagtcacctggacaagcggctacgatattacagaagcagttccttttgttgagtggggtgagaaaggaggtcgacgacttcttgctccagctggaacattaacatttgaccgaaatagcatgtgtggctcaccggcacgaactgttggttggcgccatcctggttacatccatactagcttcctgaaggatctgtggccagactcgccgtatacttacaggcttggccataggctgatgaatgggacccgcgtctggagcaagtcatacagcttcaaagcgtcgccttaccctgggcaagattctttgcagcgagttgtcgtatttggggacatgggaaaggcagaggctgatggttcgaacgagttcagcgacttccagcccggttcgttgaatactacttaccagatcatcagggacctcgaagacatcgacatggtggtccacattggggacatctgctacgcggatggctacttgtctcagtgggatcagttcactgcacagatcgaaccgattgcttcaagggtgccatacatgattgcggtaaccatgagagggattggcctggcactggttcattctacgggaaccttgactccggtggagagtgcggcgtccctgcccaaactgtgttctacactccagctgagaaccgtgcaaaattctggtacgcgacggactacggcatgttcaggttctgcatcgcaaacacggaagaggactggaggccggggaccgagcagtacaagttcatcgagcaatgcctgtcgtcggtcgacaggcagaagcagccgtggctcatcttcctcgcgcaccgcgttctcggctactcctcctgcacctactacgaatcggagggcacgttcgaggagcccatggggcgggaagcgctgcaggagctctggcagaagtacaaggtggacatcgccttctatggccacgtccacagctacgaaaggacatgcccggtctaccagtctcagtgcgtcgtcgatggatccgaccactacagcggcccgttccaggcgacgacgcacgtcgttgtcggcggcgcaggagccagcattctcgattctgagttcaccacctcgaagatccagtggagccacttcaccgacttcgaccacgggttcgtcaagctcacggccctcaaccattcctccctgctgttcgagtacaagaagagccgcgacggcaacgtgtatgaccatttcacaatctcacgcgactaccgggacatcctcgcttgctccatcgacaactgcccccggagcacactggcttcctgaagtcccacagtagttgcagaccagaaattttagttcgtagcttttctgtactgcaccgaccaataaatgaggccttttcttttttaataatatataattatatgcatgcactattttcttgtacctatagtcataaatgttagaagccaatttcgatagcaatttaatctaggaaaaaattaagcatgggagatcaagagatagaaaacttatcgtcatcatatgcataactctagaagttatgatggaaaactttcg

SEQ ID NO: 40714 - DNA, 1692 bp, Zea Mays
caggaatgcagttgaggacttgagggtgatttaggattcatgtatctggacctctactccagaaaggggaaacatccaggatgcgcacattttgctatccaaggggggcggagattatcagactcaaactaccaattgccgatcattgccttaatatgcaacttctcaggtgcttgtagaaaaactgcaaggcttaaccatggggatgttgaaactctttttcatgagtttgggcatgcccttcactctctgttgtcaagaacggaatatcagcatttctctggtactagggttgctcttgatgtggctgaaaccccctcaaacctatttgaatattatgcctgggactatcgtgtcttgaagacatttgctctagatgaaacaactggagatgcaataccagaaaagctggtaaaggcactaaatgcttctcggaacatgtttcctgctactgagctccagaggcagatcttctactctataatggacctaaccttgtttggcgagcaatcatccaagcctatggacacgatttccactgttgccgatttgagaaggaagcatacaagtgggaaatacgcagaaggcacacactggcatacacgatttactcatctcgtaacctacggtgctggctactatacctatctatatgctagatgttttgccacaactatatggcaagaagtatgccaagaagacccgttgtcccgcagtgcaggcagtgccatcagggacaaattcttgcggttcggcgggtcaaaggacccatcatccctgctgaaggattttgcaggtgatgccgtcattagaaactccgggagtggaataatcccgaacgctagttccttgtgcaaagaaattggattgtgaaatagcactgtgggggcggaggctggcatctttctgcttgagcttggctgaagggccaagaactaaacctcgagggcttgaggtagtttgagggagattggagatgatttaatcctctcctattcaattcacctctaaccggacaagtccgaacaagtcatgaaggggcagagtcgctggagttccggtgcttgacctctcggcatacattaatggtgtggtgctagcggaagatggttctcctagacatactttcttcaaagtttcacctgcggatggttttgcaatctgtcaaattttactagaggacggttgacggtaccatattattactcccattgcctgggatttttccttcaaaatgttatgatgaagtctgtcagccctgtagcttatagcactgattcataggagccataggtcttccttgctcgtttcatggaaatgagaccccgtttggtaaagattagtgcctttatttttgtcctatttagtctctgaattgccaaaaggtgggactaaaacataaacagaactattttagtctctagtctctcaaggagtgactaaaagagagtaaaccacataaatttcaccttttgtctctcctttattttagttgtactaatagtgtgagaatgctaaaagatattttgacactcttatatatgttttgaatacttttagtctctacaaacaaacagggtagagactaaactttagtccttggcttaaaggaaccaaactgggcctaagaaagatcttgaatgcaaggcagctttgtatcaccgacctgaacagcctgttcagatacttgtt

SEQ ID NO: 40715 - DNA, 742 bp, Zea Mays
gtagcactcactactgactctatagtggtagtagtaattattaccactacactagtactaatcgctgctcctaagcacgtactagtacgagtaggcgctaaaccggcagcttgcttagctttgcctttcagcccccccttggccttggtgatcattgagtagtataattattagactagtgacagcgtcatgatactactgctaacctgtgtgcccttatgatttctggctgggctgtgtggatggagagacgagtaaccatctatgcagcatcattgctaccactccgctagcaggtcagccaacaaacaatttactacaagcgcacagatgtaaagagatggaatgtgctaatgctgtggtcgccaagagtgaatttccttttccatatgctggttggtggccagcctccctttgcggaaaacaatgactacgactcagacgctccggcatgctttcgctgtaaaaaaaaaaaggatcgtcaggcaggcagatagtcaccattctgctttgctccgactcagcctcagcaacgcaccagggttacgtcagttcggtaggctgaagaatgggcttctgcaatacaaatctcaaacatacaacttttttttcttctggattcatctcatggtatttataactgatgaaatagtgtgatccatgtattacagcgggtgctgcatagggggtactactatatattattctgttggaattgtttgcacatgtgtagtgcaagcgc

SEQ ID NO: 40716 - DNA, 1744 bp, Zea Mays
atggataggggagtcgtccacaaatcatcggcggctctagtgcgcgagatgggggaggcaggccatagccatggatggtggagcatgaataatttgctgaggcccccctttgagcagcagcaccacgcttctcttttcatgccgtccacaaccaccagcagcagcaccgccgccgccgcgccctcttcttcttcgtcgtcgtcgccgcctctccaatccttctcctctctgctgctctcgaaccactacccgctgcctaccaccaccagcacgtcgccgtggcagcacgacaccagcatcacaagtagccatggccagccggattcttggagccagctcatacacagcaaggaaagccagcagatggcgtttccaactacgatttgttcggaatccggaggcggcggcagcagctacgtcgtctacggtgccgcagcggctagccatgggagcagcacaagtgatgtcgagatccagttgccatggggaagcagcagcgtactccagcagcagcagaaagcgtcctctcctaggtcttcttccagaaccacagcgacgacgacctctcccggaagcaacatgctggagttctccaacaacagtagcagttcaccacgtgagtgcatcagtacagtatctggatcagctttcaagaaggctaggacccaagaaccctccccggctcaatctactgtgaaggtgaggaaggagaagctaggggatcgaataactgctctccaccagcttgtctccccgtttggaaagactgacacagcgtctgtactccttgaagccattgggtacatcagattcctccatagtcaaattgaggctctgagctccccgtacgtgggcggcagcaatggaggtgggggcggctccaagcagaatcagcagctccacgaggctagtgcgcagagagaaagcaggcacagcatatttccagaagaccctggccagctcctgcatgacagcagcgcaataaagaaacgggccggactgcagcctgctgatggtgagcaggatgaagaaagctgtgatgaagagaagaagaaggatctgagaagcaggggcctgtgcctcgtcccggtgagctgcacgctggacgtgggtgtggacgtggtcgctggccccgcagactactgggcggcagctgcgccggctttcggcatggggttcggtgcgtagatgatgctggccaggacgtacgatcgatgctgtgaggaacacttgtgtgtgtctgtgtgcgccatatgcatgtatgggctgcacctgcatgcatagcatcaggagcagccatcctggtggaagctggagaatgctcaagaaggctggctcctcttgatgctatatatgcgtatggtatatggtgcacacaccgacaatgcatgcatgggcatatattatatagctacagagacgctgagagtatatgacttgcgtttctgtgtttgtgtgtacgtgatgagatcttgtctagctagctagagcgagatcaaacaatttgggtgccatggagaggggcgctatagctgcagatatttaattgttaaggctaggagtactgcgcgcggatctgtaagcaatgcaactcttttaagtcttcgtcattgaggcgtcactgtgtgctatatatatatgcatggccgaaatgtgtaataagtttgtgcgtgcatgctattttccccaaagtttgatcaatttatcgcatcatgccacgatttgtaatctaggttgaatgcac

SEQ ID NO: 40717 - DNA, 352 bp, Zea Mays
cccaccctggccgtgtgcccggcccaacgccgcgcttgatctgcgtagcccagcggtgcccaccctgtgctccccagccacccacgcctatctcaccagcaaaaccacccacgtcgcagtcctgctttcccctccccattcttctcgcctagaacccgcatgccacttggagatcgaaccacctggagcgccatccgccggtgtagccgtccgcctgctgctggccaagcctcagttccgacaagctgcacgccgcgcgagccgcttaagctccatcgagcgagctccctactgcaccattgtcgtctagtcccggctaaggcgagcagccatcgctgtcagccatggaaga

SEQ ID NO: 40718 - DNA, 476 bp, Zea Mays
tccaaactagccataaattagttctcataggagggaaacagacatgcgcttagttagaatctgttctaagagacaattcagcagccttgttcttcgctatacgcctatacggctatacccctcaaaatgtttgctgctggagaaaaagaaaggaggtgtgtgggtccggccccggggcagggcgggtaccggggagggtgcagttccgtacgtcgaggcgcgtgcggggccatcgcctcctcgctgcgccaaccgccacgtgggccgcgcttgggccgccgtgcgtcgtcgtccctggcacgcgcgcgcaggcggcgcgcaatcgcggtcgtgcccggcgccccgaccccgaccggccgaccccgaccccgatcccggccgccgtcttccgatgatggcccacccgggcaattgacgagccaaccaggttccgttcccgtcacgcgccgtcgcgccgacacgtacctgcggtccac

SEQ ID NO: 40719 - DNA, 1472 bp, Zea Mays
ccttgaagcgaaaacgatcgagcttgtatcgcaggcatttcggtacactacgttctccggctgtgtagagcttctgcggagatgggtgccgagttgggagaagcgggtgtccctgcccgggacatggtggacgcgctggaaggcgtgcgctccatcctgctgaaaccgtcggagcgcctcgacgacaagcgcttcacgaggatcgccggcgccgacttcgacgacgccggcctcggcctcgccgggttgctcggctcgctcgcgtccacggggttccaggcctccaacctcggcgacgccatcgacgtcgtcaaccagatgttggactggaggttgtcccacgagaagccaagcgacgactgcgctgaagctgaactcgatcctgcgtacagagaatccgtcaagtgcaagatattcctggggttcacttcgaaccttgtgtcttccggtgttcgggagatcatccggtttcttgttcagcatcgcatggtggacgttattgttacgactgctgggggtatagaggaggacctcatcaaatgccttgcgccaacctacagaggcgacttcactctgcccggagcgctgctgcggtccagaggacttaaccggataggaaacctgctggtgcccaatgacaactactgcaagttcgagcactggatcatgccgatcctcgacaagatgctgctggaacagtccacccaaaatgtttggacgccgtccaaggtgattgctcgccttggcaaggaaataaatgacgaaagctcctacctttattgggcgtacaagaacaacatccctgtgttctgcccagcattgactgacggatcaattggggacatgctgttctgtcactcggttcacagtccaggtcttgttgtcgacattgtacaagatgtacggctgatgaacgcggaaaccatccacgcaagcccaaggaagacagggattatactccttggcggaggccttccgaagcatcatatatgcaacgccaatatgctgcgcgacggagctgactatgcggtgtatgtcaacacagctcaggagttcgatggcagtgattccggggcgcggcctgacgaagcggtttcatggggaaagatcaagagctcagcgagaactgtgaaggtgcattgtgatgcgacgattgcctttccacttcttgtggctgcaacatttgcacgcaaggttcacggcactaaatcaacaaactgaatcggaggcagtgaaattaaaatatggcgctctataactagctgaaactttcctcatatgatggttgagcttgaagcatgaacttttatttgcttgaagggtgtctatctcttagctcgtttactatttatacattactgtaacatatgtatgatatatattcatttgaaaccatttgggttattatcatacaataaaacttgtgtgtacgagaacatttgtgaccctctcttcaaattctcaaaattgtt

SEQ ID NO: 40720 - DNA, 888 bp, Zea Mays
ctaaattctcctagagagaacatcgacaaaggaacttgaagctccgtaggcgaaaggatctctagaaacgactaactaaattctcctaggtaaaaacaagcttctcttttttagattttcttgtacttttcatgcactttttagatttcattgtagttccaaaataattgccaagcaagttacacgactacttgtatttaacaacaagttacattacccaacaaaatatgcatactaaggattaagtggtataaagttttctaaaaccaaggttggctggaagaaaatatccatgattagaaaaaatagacaacaaacaacctgccatagggattcaaatttcaaacaaatgagaaaaatagaaagactacagtctttggatatgtgtatttggatctaatctaattgcaagtgtatatgtgcctactgtctttggatatttgtttttcaatagttacatcctctttactgtatgtgcccatgttttccgagttccgcctcgttcattgcttagcatgtgtaatacttcacttgtagtcgctctatatttctggtgccactgtctcattggtccatttgctcaatgaccgtgactagagggacttgtttatttatctcttagagaggaagaattacaggcgaaatgtcattgctcgtttgctacggatggtttttcgataagaaacccaaaattgttaggtctattctggcaagaaaatgccatatattgaaggagttttcagaggtaaattttctaagagctaaaactgttatattttatttgttactcaaatacatcttgttttgctttatttatatgcccaaatatgttgccataaaactatataaaatagggccctaactcgacattctcaatttgaacttgtg

SEQ ID NO: 40721 - DNA, 2408 bp, Zea Mays
atgcacccacgccccgtctctttgaagccgcccgcgtctccacccgagaccccgacccaccccgccctcccccgccgtcgcgctcgcgctcccccgcgacagccgccatgcgccctatctccgccatgcctgcgcctcctcccccgcccgcccgagaaccaccaagtttcccttccttacacagcgaggtccaccatcaacgcccccttccctggcaagccacagccgtccacgttcctggccaccagcgacctcccttctctagcccttagcagcgagcaacacctcctccccatggctgcccccagaccccagtcccgtccgcgcatccgctcccccgtcagcgacgcacctattctcctcgacgtcgcccatggcgtggacggcgacctccctcaccctgcactctggtatgtcaccgtattgcccgcctcctttccccgcaccggcgcagccccctgttgcggcggccccttccccaaacagcacggcaccacgtgctccccctgccgcgcccgcactctccttccccaaacagcacggccccacgacgctcacactctccttccctggcgatatcccctcatctgcgccttgtccctcggagatccccttccatcttcggcaccgagaggaaaatggatggcaatcccatccatcggcgccaaaccctacacatcctccatagtaggcacccgcccctccttacgcggcaccatcggtggggatatcccccaatctgctggaaggagtccgcgccaaatcagagcccgaaatccgtgccaaatccacgctggatgaggtggtggggagaccccccaatctgcgtcccttctacatgcctacacatcctccatagaaggcgccctcctactaaccactaaaaaaccccttccacacgctgacaactccatatatattagtccaaagggagagcacgattaaggccacgcctaccagcttcaccctcctcgcatttgtaagtccaatttttagatttatgatttcagatgttgagttgattttgcaaactggtaagtgttttgtttcatacggcaactctgcacatggacagaatcacagctctgttagcgttgttttatcaagttcttctagcagttgaagtagtgttttcttggcagatgttcgcctttaggacattgctgcgaggggaatcggatatgccacaggctgcatgttgttggagtttctatgtatccccatatcaaatttgtttttccctaatcagggaactcaattgtgcgagtaatagcaggagctcttccgaaaggccttcacatgttaatcctatcgaagaataacatatcaattattgaacgcctcagagaattgacacgattgcgcttgttggatatcaactataataggatatctagaattggccatgatcatctgttaggattggcctcatgttcctctttgaaggagttgtatctggtcggtaacaagatcagtgaggtagatggtcttcaccgacttctgaagctcaaggttctggacttgtgccacattcagtcttctgtagccactatacttggggttggtgaggctggtggaaggtttcagttcttctatacgtggaactaacctataggaggccagactgctagagcggtagagccagaaagtaatagttggtgacttggcggggacatttatgttatgctacctaattattaatctgtggaaaaggggaagcttttggagtagagcttattttttgttcgggttactatttcctctaattgtgtgaaaactgaaaagtatggttcgtgtctgaaaagcaatagttggtcgaggcatatttttgtatggttccactgtactaccttctatctggtgaattagatcccgattctaaataagttgctctctaatcagattaaacactttaatgtagctggcaattgcttattttgcaggtgcagaggatgctaggaaaatactcaataattatgtcggggccattactcagatggtaaacaaacttgggccatgtaaatggtcgaccttgcctaaactatacctggacgtattggaaagcaatgctgggaaagctatgccatgaaagatatttgtagcagtgttacatgatggcatcaagtgctgggaaaatatttattaatttatggttttgtttctatggaatataggagtcatgattttgtgcatttgatcagagactacattaactagaggatactttctttttttcaaaattacaaaaacaatactaagtgtacctattattgtctactcgtctcatgatgattactatgtagataaattctctaagctatgaacagtgaccaatgaaatatattcatttgcatacagttctcaaactaatgtattcacgtcattatatattgtgccagctttgtcaa

SEQ ID NO: 40722 - DNA, 6647 bp, Zea Mays
cgggactgggattcgaaatttcgaacacgcgccgcctgagagagagagagagagtgagagaaagagagagagagagcaggagagatggtcaggcctttgtgatctcccgcggggctggaggtgtgcggggatggatctcgcggggatgaagcggcgggagctccaggcgctctgcaagcggcacggcctccccgccgggggcaccaacgccgacctcgtcggacgtctcgacgccgtgctttcggggcccgctgttgtggaggaggaggttgccggagtgccggcgaggaaggggtgtctgaagcaaacgggcggaggtgccaccgaggccaagaaggttacttttggggcggaggtagggaaggccaggagactgaggtctcgggtcatatggtcgccggtcgttgccaagacaagggggaagtctgctcgagccggtactgattctgctgctgaagacggtatttctgcagatgtgggcgctgatgtcccagtgaggcggtccaggaggaattcgttcaatcctgccgaggctgaggaagcaggagaggctgttgctgttgacaggaagcccaagcgcaagaatcaggagaatgacgagggcgttgctgttatcgctcaggctagagttacgagaaggtcaaatttggagtggtctgctactgtattgcctcctgctgttgagaagaagagagggaggcagaatgcagctgagtctgatgtgcagaagtccgctctggtggaagtaacagctaggactacaaggtctcgctcaatcgtacctgttgtggtgccacccactgtggttgagaacaagaggaggaagactggagatccacaaacaactgtagagttgactatgctttcagatgtgcccagaagtgattttcctgccaccaggtctttaaggaacaaaattgtccacgttaacaacagcgtcgtggacgaaactcacactaccaggcagttggaaaacaagatgcgtccgtctactcgtaggcatcaacaggttgcatcttctccggaggataaaggtcaaaaaattcctgctaccagtaagtcccctctactgaggtggtcacggagaaactattctgaggccaatagtgcaaattcagtaaacatcaaattggccaaagactcgagcacagctcagccattggcacaccataattctcattctgaagatttggagaaacaaccagcagttaaagaaccaattaaacggtcaacacgtaaatctattgctttggctgcacttgagaaagagaaggatgtaattgaaggaaagaaccctgaagcacatgttaggcgatcaacgaggaaatcagttgtgcaggttaaagataccaaaagtattgttgaagagactcaatatgctaacagtgaagatgtggcgaagcaaccagcaactaaaggacctgctagggggctgagacgtaaatctgttatcacagaattgcatgagaaagagaagagtctcattgccgaaaagaacatggaaacagatgaagcgatattaacgcggaagcctgtaatcccagttaaaaatattaaagctgttggtgaaggaattcaaattggtaagggcaaagatgtggataaacaatttgttgtgaagcaacctactaggcgatcatcgcgcaaatctgtgctgcctgatatgcttgagaataatagtggacttctagcacccaaaatgaatgctgagatgaatgttaggagatcaacacggaagtctgttcttcctgacatgcataatgagaagcaagatcaccataaaatggctagaaatgagaacttgcaaagtggtaaatatcaagatggtgagaagcaacagaaagtaaaagattctattaggcaatcaaggagatctatcgctacagtgctacttgagggacaaaataatgatgaaggaaaaaagttcaaaaatcctacgaggaggacaacacacaaatctcatgcccttaatgcagttgaagaggtcagcatggatcacattgaagttggtgaagaaggcttgaaattgaggaagcgcagtaggtttttgctggaaatatcatcttcagctaatgtttcctggaagcatcagaatgcacagatctctaatgaaaaagataacacagaaggatcgcagcaggcatcaaattgcacaacttcaaagagaaggtcttcaaagaagagacgaacaactgctccagaagaagtgatgcctttcaaggtggcaaatgatgacatagttatcatggaagaaacaaaggacacacttgaatataataatgagtctagtagtaaagttcaagaaatttgtcaggttaatgctgcaagagaagagttctcttcaggtccattgcttgtaacagtagctcctagtgacgaaatttgcacagtgcagagtgtagctgtggtgatacctgggtcagaatctggtgacgatgcaaatcaaagttctgataagagtaagcaacctcaggaacattctgtcactcaaactgttgatgaccatttatctgaaacaagaagtgggaaattagatcaatcaacatgcatcacaggattagtctctgacaattgtgttgtctcagaggacaaaacattgatgagtgaagaccgtgaagagcaaagccctgtgtccggagaacagagagttagcttggaagcaaatgccaatgagcctgaggaaaagaacctagctaacgtcacatcaactgatctccacaccaaaagtctgcagcatgatattgacagaatagctaaagagactgataaagagcatgaagaaaaatatggagtgagccctatagctgttgaaaagtgcgtctgtcgtgaagcaagtgcatgtgaatctgcacgaaaacccctaaccgttatcttttctaacaatctccacaccaaacatctgcaacatgattgtgatgtgctaattaaggagactggtgaagaagttttagctcaggagaattgtaatgaccagcctgttcctgcccagactgaccaagaaattaagttaaacgatgaacttgctgatccggatgttttagctcaggagaattgtaatgaccagcccgttcctgcccagactgacctagaaattaagttacacgatgaacttgctgatccggaccatgaagagcaaagccctgtatccggagaacggagagttagcttggaagcaaatgccaacgagcctgaggaaaagaacctagctaacgtcatatcaattgatctccacaccaaaagtctgcagcatgataatggcagaatagctgaagagactgataaagatgttttagctcaggagaattgtaatgaccagcctgttccggcccagactgacctagaaatgaagttaaacgatgaacttgctgatccggaagttttagctcaggagaattgtaatgaccagcctgttcttgctcagactgacctagaaactaagttaaacgatgaacttgctgatctggctatggaatcaggttgtagcattactgaaaggaatgaagggcttgttgctcataatcttgatcaagaaggtttccttgaagcaacaccagagtgcaaacaggaatgtggtttgcctgaggagacagtaatttcctcaaaagaaacaggatctctgctgtgtgcagatcaatcaccaattggtctggaatctttattttcgcaagaaagcatagttgaatcagtggggcattgtgcacttgcttcagcaacaactcataccgaaaatggctttgatgattcaaaagattgccataacaagtctgcacttgaaaatgttcatgtgccagaaccttgttcacacaatgatactaaaggaggcatttttaaaaatgttgattgtatgcatacatcccagcgagatgatagaatggaaggagtaccagaggctaacactgatgaagaacatgttctgtcagcctttttgctggatgcaaatcacctaaacgtagtcattaattctgaagaagtggtttgtgagggtgaagatagtaaggagcttctccattcggaagactgtaaagcttcatccgagaaaacagatgtgaatgatggcaatgtatatggtattagtgatgctgtagtgagatgtgcactgcatgctccagccgatgataattatgagatttttttgggtcccaatactgatgtaccacgtcaggtttataatgacggatgcagtgatgtcaaagaagatcgatttgcttccaaaccctggacaattgatattattgaggatgcctctgtcaaagaaagatcaaatttaaaagattggcaacttgattccaagttggagggcacagaaatagtggaatctggcctttacttcaataaggatattggtaacattttacatagtggatctattggtgaaataactccatctggttctggtttatcaaaagattcatctgtggactatagaggggaggttttagatggcttctcaatggaagcatctcttgaaaggtcttctacacgtggggaacaaaatggttgtagactagatgctattgagaatccttcaattactttagcaacttctggttataagcatgaaggtgctttatctgaggaagcagtgtacacaaagaagaattacgctggaacatgcttgtcaaatcccagggaattaatcatggagctgcaatcccatttctcaaaggaaaacataaatgaatctgatcctcatgacagccttgtattcccaactgctgaaaattcagcagatgaacagctggttaaagtacaccatggttctaatctgtctcagttaggattaactgatctgttggatggaccaattgggtgttccaataccgacgtgttgtgccagtgtgacaatcataaaaatcaatccaatgaggacaaggtagaggaagttgaggcggtgtctgctgctaaatacatagaaagtgaagttgtgctgctcccatctcaagagagatcaaatttgaataatgagcagcttaacaccaagttggaaagcccaaacattatgggatcttgccttaactgtgataacgatgtttgtaatacttcggacaatggatctgtttttgtcattggtaaaagaactccatctgcttctggcttaccagaagattatcctaaggatagtgacttgcaacaaccggttttagatagcttctcagtggtttcatcttttcaagacaatatatctgggaagaaaactgtttctggtgtagcaggcagtgagattctttctttaagtttagcaactcctgattataaacatgaagatggtttctctgaggaagcagtatgcagaacaaagaattatactggaacttcctcggtagatccgaggcatttagacatggaggggcactctatttactctgagggagatacataccaaggtccttgtcaagatctaggcagacatgaagaacaagagagctgcatgtctattcctatgcaagccaaagaaagtggaggggttttgaggtctagccacacgaaagggtcagttacagcagcccaaattgatttggcaggtgatgcccatcttattgtgagtgataatgctgctgccaagcaagtgtttagtgaggagaaagaggaaacaaaatctatctcttcttcagatattgatatccttcatgaaaaatcatactccagtggacacgatgaccatgctgcttgtgctgccgaaactcagttctaccatccacagaaagcatctatatctgatggactacatttgggtcctagttctttgcaagtagaatcactggatgctttggatagcgatatactgtatgttaacacaggagttctcgagcagcatcataaagagggttactatgaacccagtgtctaccaaatcacttcaggcatttgcacaatgtctgaagctgaaccattcgaagttttagaaactggaaaagatgtaaaaacgccatctaagctagatgagcaacttaatcctgggttggacggagatgaagctgagaaacacagcttagactgtggtacagacaccagtcctgtgatgagcaagagaaccctttcttcaccaggatcaggcatttgtcaaagcagcaggcgaagaggtatagatgaactttgcggtaagctgcagagtttcaaagtttccagcgccgtaaaaggaagctacgtagctatgggtgcacctcgtccgaagcctggggacagcacgagccgatctgcagccgcgctgctcaggaacatagagaacacaactgctgttaaagctggccgtcctcctgtcaagccaaacgccgatggtaaggactcgtctaggcgagccctgcagcccataagcggaaggcctgacagtaggtagttcggcggttccttaataagtgtgtcgtgtttgtgttcaaccctttgttgaaagccaggtccgtgtatttgtgcagcttgttgtcatgaagctgctgtgtgcgtgtcatttaacataagcgtgcgtgaagttgtgttatggaagtggctaaatatgtgttcgttaggaggtcaattggcttgaactgaccctgctgttccgtgatttctgtctaaatatacttgtgtggctgtgtcactttgattggccttatcgatcacatgcaatgggatcacatctagcgtgctctagggtcctcgtttggtaatcgctg

SEQ ID NO: 40723 - DNA, 4040 bp, Zea Mays
cgagggcaaaggggcaacgcgtccaaccggccggacctcaccggctcatccctcatcgccctagtccccaagggccaagtccccaaccccggctgacgactgtgcccgtctccttccctgattcatccgcaagcccacccgtcggcgatcgtccatgacggaggatcgagcgcacaaggtcgccgacgagcccgccgcctcaggcaggcaaagacctgaaagaagaggaagtgggatcaacccgcggaggacttggtctccgcggcggtgacggctgctgccgtgtcggggatgcctgtgatgaatttcggtgctcttcctggcgttgtactgcctggcgtcaccgcatatggagctgctacattgccaagtgtagtccctgttccgtattcattgccgccccatattgcaccatcggtgctccagaatgctgctgcagcagcccagaaattgagtcaggcaaaaataccagatgaggtcattgcacgggaaattgttataaacgatgcagatccatctgtgcgatataagcttacaaaacgacaaacacaagaagagattcagaaatgcacaaacactgtcatcattaccaggggaaaatatcaccctccaaatttacttcctgatggtgagaagcccctctatctacatatctctgctggatctcagttgaaagatactgctgagcgcattaaggcagttgatcgtgcagcttcaatgattgaggaaatattgaaacaaggaacaacctcagagtccatatcggtccctttctcctctagcactggacaagctgttcgtccttttagtgcctcagtttttttgggttttgatgcagatccatcattgaatatcacagctcgaatccgtggtccaaatgatcagtacataaatcatatcatgaaagaaacaggggttactgttgtactaagaggaaaagattcggagaatcttggcagttgtcatagtgaagcctcacaacaacctctacacctatacctcacaagtatgcatttaaagaacctagaagctgcaaaagttttggcagagaacctcctggatacagtagcagcagaattcggtgcttccagaatttcttcttcaaaagtatatggtgctgttccacctcctcagcagttgttagctggtgtcgacacctcaggaacgaaatcagatgttcactatattgtagggcccaatgtgttatcgggagctacacattcctttgcatctactggagttattgctcctgttgttgctcctgcagtgacagtgcaatcaggggctccaacatattctggggttccactacccagtaacatggcctatcctattccaccagcaaacggtggggcattttacagtggttatggggacatttatccccaagcaactccgttgcagcagctggcattcacactcaagcatgcctcatcgtcggcaactcaggctgttccagtgacgtccacaccaacaagcatggctacaaaggggaactcaatcttggatgcggagatggataaacgatcccgaaggaaattccaggaactaccggtttcgaagggcccagcaacagaaagtcaggtacagtttttttttctggtatagcctcgactagttcttaactacaggagctacagcagcctcttcttttgtacttgttctgctgtctcctctattcacctagttttctctgtattacctctcaggcgattaatctaaattccatggcaaccccttccttccctgtgctgttcactagatgcctatcctgatttgatgagatcttccatatactcacatccttgtttgttctctcctttcttagcttagcttgtgccatctttttataccccatcaattcttaccaacacaacttccaaggcgatttcaatatcaggatttggaatttctggcatatttgcttttgtttgtaaattagatgtacactgttgctgtcaactatactaaaaactttgtatgccattgtgagtttgtgacatctattaacattaaaatattctgcataaaaacatttgcccttttgtttatgatggcaccatcaaacatgggaagcacttctaattatccaggagttttgatacaacacagcacatattccacatgcaattcatgatcttatgttttatacgtgtacctgaaagaatataatcatcttattgtttagtccttgtttagcactttggaaattaataactactgtataaatctactttctttgaaggaactttgcttgctcttgtagttcttgcagttccctcaacggagactacaattcaaatttgacattactattaaaaacaatagttggattgtcagattggcatcatcatgtttgttgtattcttatacctgcttctaacatctcatttcattccaggtattttctctgaccttgtctgaagctcacaggtggcaatagatatacatgtgggtttttcacaggcttgtaacaaatcggagtttgcattggctgtggagtgtaactgacaagatgcagagctcttcaaatatcttgttacttttttcagcaaatagaaatttaacctttgtgttttatctgtttctgtttgcttacagagttcactgatgttgattaacattgctagcatgccttaagttttgaaattggttggttggtatagtcttgttattagttgttgttagtaggttttgatacattttatttctttccactctttagagaaagttttgcatttgcaaaatcttcacattcagtggaagctccaagcaatataaatatacaaattacacaaggtccttccatatgaaacttcacttagttaagcagactcgactcatctttgttatgttattatagactctcccaatatgaaaattatatttacagcgcatctgcttctatattaagataacattctgaacttgtcaagggtcatgctaactagtattgtgcttccatgtgagatatgcttatatttgttctgtgtgcaaaattgtttctgatttcattcttatgcatgccattgcgttacctactctataacacaagaatttgatggatgaatcttcttgttttctttcatctttccagaactcacaacaggggtccaaatttgttaagacaggtttagatagttcaggtaacattgggagctcatcaattgcacctccgaagaaagttcaccctggatcaaatggaatgcttccgcaagaagaagcggatatgccatcacatctctctatatccactaagatgctaccaccacccctgaagagcatgctgccactgccacccagaagcatgcccccaccaccacctaagagcatgcctccaccgccaccaaaatttccttcagatgagtttttgtcaagaaacgagaacaagttttttcctttaaaggagccaacagcacctccaaggtcctttgatgcaatatcagtcttgccatctgaacgacgaccaagggagcctaaggaggaaaaaacaaaaggcacacctgtgtctgatactttgctgaaacttattgattatggagatgacgacgatgacggcgatattgatgtgacagacaacacacctaagggcaatccaactcctggttcagagcagaaaccattttgggctgtttaaaactgggtctgctaacgtagtctagtgtgaattcttgttgataaggatgcttgctgccttggtgcatcttctgaattgaagaggcaatcgagctccttgttcgtgtactgtagtaattctaacaggcaatgagatttctttgaacttgtattcattctggcctagtcaaaatgaaccgtttgttgttttggttcagatacgatgatgtttcgtttttagattcgacgttggttgctgaactcgtagcattttaatgtcggtattatataattgttagagcctatgtcaattttgtatccactgtcgtgcaaatttaatttttgtaatcagcctaaggtcacgacattgcttggaaacactttttttaatgaaggaaaatggcaggacatatggtatggtaatt

SEQ ID NO: 40724 - DNA, 2382 bp, Zea Mays
tttcagtcagttcgctccgctcccacatgcctcctccgcctccctctcgccgtcccggcatacccaatccctaggcaccccgccgaaaccctagattctcctctcctgctccgatggctggggcagcggcgtcccccgtggcggcccacgtggtggaacggttccgctcgcggctgcgcgaggaagcgggcagcggggagccgggcgcctccgcggtcgtgcgcttgtacgcggaggcgctccgcgagcttaccttcaactgcaagccggtcatcaccgagctcaccatcgtcgcaggccagcacgccgcgctcgccgccgggggaatcgccggcgccgtctgcgcccgcgtcgccgaggcgcaccagtcagcagctcaggacactaggcaaatgtctgatgtgcaggaggatctgataaatggactaacatcgaatagttcacaaggacggccttcagtgtttcagcatgttgacatttccacaaggagatatccaagcaattttggtgttcagaatggagctcttttggagtaccagaattctgaacatactctaaatcatgggagaattgctaccatgccagctccaccttggcaacagcctattggtcttccattgcgaatacaaggacctgaacatccttcagtacttggtagaataccacagcctgtcgacggtgaaatgccagtcaagaggttggacattagtggcacgtacaatggtttgaatgtagataaacccttggtgaagcataggtcatcacctgctcctgccccgacagaatggctcccccttcaccatgcccaatcacaaactttaccactaattccacctgataccaaacatgttagaagtgcatcagatagtttagaaattagttcttttgttagccatggaggtagttcatcagtatttgttccacggcatcagtatgatgccgtggatcggaaaacaggtaccagtaacttagctcaaccaccatcaccatatcagaaccaagatttgttgccatcaagtcaacaaaatcaaggtacaattttgggaaaccaagctcatcctcatcgtcccctaaagttacatccccatgctcatcctcaccatcaggagacctttagaagctttgcacctggcatgtctgtatctccattccaaggacaaggaggtaatgcaaccatgacaccagtttctgttctgccaacgtctttttctgtacctcctgctgtgccaccctatggcgtgctgtctgcacctgggtttcctatgccaccattaccgcctggaccaccagcacctgtctcactgcagatgggttcatcatcatcacaagttggtggcccccaaccatttgtctctggactgttgagtaaccttatgcggcacggtgtaatttcactggaaccacctagtcaatcccaggattctgttggagttgacttcaatgtagacctcaaggtacggaatgaatctgtcaccaatgctttgtatcaggatcttccaaggcagtgcaaaacttgtggtcttcgatttaaatgccaagaggagcatcgtgctcacatggactggcatgttacaaagaacaggaattcaaagaatcgtaagaaatcttcacgtaaatattttgtcaccgctgttgaatggttaagagcagcagaaacagtaggaaacgatggagttcctgcttttgtgctctcagacccagtcccagacagacaggaagagaaagaaattgctgttcctgcggatgaggagcaaacatcctgtgcattatgtcaagagccatttgaagatttctacagtgatgagactgacgagtggatgtacagaggtgcagtttatatgaatgcaccagatggtaatatcgatggtttggaatggtcacagttgggacctattgtccatgctaaatgtcgatctgggcccggcaatacttcttagggtgggcatagctgggatgatttgatagtttttttttcccgttgcggctgtaggcatgacctgtaaactaatggagactcagattttggtatggttagcttcttttccatctggctcccttaatagccagtgcatagaatgttttttggaacaaaaaggcaggagccagtgcatagaatgtcaatgtgacaatagtgtataactgtaaaatttttgtgtaattcagttgcacagtgctgctttttcattacaactatagtgtgatctatactgaagcttcatgtttagggtttctgcagcacagttgttgacaacggtatatgtatatgtaaccatggtttcactggacatgggaaacaatatatttcaatagtcctgttttcttccgttaatatcttgtgcagaatacatagcagttctctacgttggttggtagctttggaag

SEQ ID NO: 40725 - DNA, 3173 bp, Zea Mays
aaaaaaaacagaaacccgttacccgactcgactcgtctcttcccctccagtctccaccgagccaagccagcctgctccagcggcagacccgctaccgatctcctctgccgcggcccgcggcggcggcgatttcccctccgcgaatgccccttcaccgctgcagttgatacgccacccaagtggttcgttccacccttccttccctcgccggtctctccatcgccgcagcccgcagggcgccaccttgtcggaaggcgcgatccatggaccgctcgatcaacttccgcggcatcgccgggagcgccggaaacatcatgcagggaatggggaaattcgttttcggcaacgaggggatcgagtcaaaggaagatagctacgtcgagagatatctttatcggataagcaatggcacgatacctgatgaccggaggtctgcaatgactgagctgcagtctctagtggcagaaagccgctcggcacagatgtcgtttggagcgatgggttttcctatcctcctcaatattttgaaagaagaccgtgaggatgtagagcttgtgagaggtgccctggagacctttgtgagtgcattgactcctattgagacgtcacaagggccaaatactgaggttcaaccagcgtcagtgaactctgatctgctatctcaagaaaccgagaatatttctcttcttttgagcttattgtcagaggaagacttttatgtgagatactacacaatccaacttctaacagctctacttacaaactcgctgaaaaggtgcccagttacaagaagcaattctattgattcctcgtggtataacagttctcatggacatgcttatggaccgtgaggtcataaggaatgaagcactgttacttcttacttatttgactcgggatgcagaggaaattcaaaaaattgttgtatttgagggtgtgtttgagaagatatttagcattattagagaggagggctattccgatggaggtgtagttgttcaggattgccttgaactgttaaataatttaattcgacacaatgcgtcaaatcagatgcttttgaaagagacaatgggctttgacccattgatatcaatactaaagattaggagaggcagtgcatttaattttacccaacagaagacagtaaatcttcttggtgctttaaatactgtggaattgcttttgatggggggcccatctggtgaagcaggtaaagacgctaacaagaatgcaaatcaaactgcattggctcaggcactgcgatgtattggcaatttggtattaagaaatcctcagaatcttgattctcttgcaagaaaacaagttggagaagagcctcatgttcaacctgcactgaatgccatcttctctataatcttgcggacctctgtagcgcaggaatttgttgctgctgattatgtattcaagtgtttctgcgagagaaatcctaatggccaggcattattagcatcaactattgttccacatccgaaccaaggaaatatgcatgaacctgctatcgacatgccttttggaagtgtacttctgcaagcactggtttcaagtgatgtcaatggagatatggaggcatgttgcagagcatctagcgttctttctcacattgtcaaggacaacatgcaaagcaaggatcgtgtattgcaaattcagcttgagacacttacaccgtccttggggcgcactgagccagtattgcatcgtattgtcacatgtttgtccatcgcagcctcaacagagggagaaaacaaccaaaacaaccaaccagaagaaccgtacattcaacctgttattcttcggctactcatcatatggcttgttgattgttcaaatgctgttaactgcctgttggaatcagcagtgcatctgaactacataatagagcttgcttcaagcaaacgttacactgcttgtgttcgtggactggctgctgttgttctaggtgcttgcatcctgtacaatgctagccatgagaagggccgtgatgcttttgctgttgcagatgctataagtcaaaagattggcctcacaacgtacttcttgaggtttgacgaattgaggagaagcttggcacatcctttgccagagcagcatcatcgcaaggagctttcccgatcaagtgcgaatagcatgtcagatttccaagaaattgaagaggatgaaacaaataaagatgatcaacaccctgtcctctcagaaatatttgattcacagtttgttaattttcttagtaagctcgaggctgatattagagaaaacataatggatatatttagtcggacaaaaactgcaactgcactccttcctactgaattggagcagaagaacggggaggttgatggagagtatatcaaacgactaaagtcgtttgtagagaaacagtgcaatgagatgcaggacttgctggctcgaaacgcaatgttagcagaagagttagtgagaactggtggtggtaccaccacagatacttcacagagaccgaacaacgggcgagaaagggtccagatcgaagccctgagacaagaactggagggagcgagacgacagatagaggcactcgaaactgacaagtcccagatcgaagccgaagctaacaaccaacgaaaccttgcagtaaaactggagtccgatctcaagagcttgtcagaagcttacaacagcatagagcaggccaactaccgcctggatgccgaggtaaaaaccttgcggcagggaggcagtgtgccgtatcctgacgtggaggcaataaaggcgcaagccaaggaagaggctgagaaggacagtgaggcggagctgaacgatctgcttgtctgcctcggtcaggaacaaactaaggttgagaagctgagcacaaggctggcagagctcggcgaagatgtggatgcccttctgcaaggtattggtgacgacactgccattccggacgatgatgacgacgacgatgaagatagtgaagagtgatatgtttatgtaaccctgtaggtctgttggtgcacacaacctcacgttgggtcatgatattgtaatggcaattggcattgtacagtggataatgtgtagacaaaggcaccgttccaatttaagttatttgtggagaaactagttgaaaactaagtggcggaccgtccggtcccggacggtccacacctcgcgat

SEQ ID NO: 40726 - DNA, 469 bp, Zea Mays
tccaaattcaaaagctatttcgaaaaccaaaatcccttggacactttgtgtgttgggggccttcgtcttctaaaggtcctcaaaaacatgactaataatgtttcccaagtgtaatacacatacaggcaccttcggactcaggatgaagctgtacacaatatgggaagcagagtcggaatgaaggctgaaccagtgccaaagctgtgcgcaagggagcttcggctcagtaccagaaaaaggaaccgacttaagaaggaaaaggctatctagtccctgacagattgttcttaagtcaatagtaaacatgaagggtataaatgtaatttcacataggctgcgtcctgtgcctataaatagatgaatagtacccccgtactgttcacgccgacttgtactcgctcatgcatcacgcttgtacctttgccttctgttaagtcgaaggtacaaatgtaattcaatattgttctta

SEQ ID NO: 40727 - DNA, 584 bp, Zea Mays
tggagaatgatgactactcgtcagctgatcagtgccctgctctgcaagtgctgctatgaaggtgagtgatcgaggttgtgcgaccagggcactcacgcaggctctgcagcgatggggtacttctcgtgcagtggtagcgaggcagcggcacaacccatgcccaccgacgggtgcgtacgcgagcaggtgcgcgcggtgctcgctgctcgtggacgcgagcagcgcaagggcggcgccagtgttggcgtgtggtgtggtacactggtgttgctaggcaccagcagagtagagaaggtccaaaaggcatcacttgcagagcacattgggagaattaactttcagttgttccaatacgcagcgcattgtgttagcaagcagattgagaggtacgtaacaccctttgttcaacatccaatcaaagttgcggtttatttttatttttacatttttttgtagctgcaattatacttataatatgttgttggtagccctgtggggtgctggggctcagatttatcatctaaagcaaagaattactgtgctattcggtttatgttgtggtttatttttatttttactttttt

SEQ ID NO: 40728 - DNA, 670 bp, Zea Mays
tagttgaacatagggaatacaatgcagaaaggaaactaaagaaaatattcagcatacttgagaattacagaagaaggtccaaggctttgatgcagtctatcatgattgtgcatgtgaacaaggccactcatagcaccgttcagcaacttaagaacaaagtatctccttaactccaatttgtatgctcgatcgaaagggttccagaatggcgtccctccagatttttccttcaattgccttgcactagttacatttgcatagtctgcagcactatatctcccgtcatcacggaaggcgagccactgtcataaagctaagtcagtcttgcatgcattctgtggggagcctggcaacgaggtagttatgagtaatatacctgttctccagttgctgtctcgaaggcccctaaaagaaactggatgttctcgcatatgtcactagcatcactctgtaaatagaggccaaggaatagttttgtgtgcgtaaatatcatgtgtaagataatagttcaggcttgcagtttctattagcagtttatggtttacgtaacctgaagaaacgcatgagtccttaactcattcagtgccatcaaatcagcttcagaagcatcagcacgggctccagggtataccttaaatacagcccgtgtgcccctgaatggaccttgaac

SEQ ID NO: 40729 - DNA, 1810 bp, Zea Mays
cgagtacatggcattagaaaattaaagctgcagctagctgcattatacgtgctcgagggaatcaaaagttgagcctctcccatctcaatcaaatctataggggagtagctcttgctcttggcttcgctcgctaacaatcagtgaactgaacaccttccgcctcccggtctcctccctgcccggtgctgaagaaccctgccatccccggaactggatcgatctgccgccaactctgaaaatccatccgatccatctctgtcgtccaagtctactccccgatggacattatttaccaggacagcagttgtcttgccctagagcaggcgctacatgatgaaggcgtgggaccaatcgacctacctttcatgcttctcagggccatcacaaaagatttctctgatactcaactaattggcaggggtgggttcggagaggtttacaaggggcatcttttgcacttcagtggagtgtgcgctaccaaataatcaaggggatttgtgagggtgtgggttatcttcaccagcacaatattattcacatggacctcaaacctcaaaatatacttcttgacgataacatggtgccaaaaatcgcggattttggtctgtccaggcgcttaagtgaaaatcagagcaggatcattactaaaacaataattgggacgccgtaggctacctaattacctccgagacatcttttttgatttgtcaacagctcagttgaatacccgttatttgatttaccactcactacatcaatattttttattcttcacgcagggggtatttggcacctgaatttctgagcagcaatgcaatcacattcaaggcggacatatacagtctaggtgttataatcactgagattctgacggggcataaggaatgcaccagtgttgacaaggtgcttgaaagctggacggacatgtttcagacattaggaagccatccgctactagaacaagtagaagtatgcgctgagatagcgataaattgcatgaacgatgacccgagcaacaggcctaccatacaggatattatctccagtatcgatgaaacggacgctcgaagtgtcacaagttcttcaccaggagggcaggttattaccatggccggcagcgaaagcagcagcagtaggagcaggtcgccatgcgcgtcgtgcaggatgctgcgccagcagtgcacacaggagtgcgtgttcgcgccctacttccccgccgaggaacctcacaagttcgccatcgtccacaaggttttcggtggcagcaatgtcttcaagttactgcaggagctgcctgcccaccagagaggggatgcggtgagcagtatggtttatgaggccaacgttcgcaccagggaccctgtctatggctgcgtgggcgccatctccgtgctccagcaacagatctcccagctccagatgcagttctccatggcccgtgctgagatcttaacattgcagcaacagatggatgtcaatgatagcctacccagtcaaaatagctttgacagatatggcaatggtgatctgaaacctgactccccgcccgaaattctttcatcggaggatgaggttgaggaagtttcttccccaatgtctccatagagatttggatttttccattataaagaataggcttcacaaaattgccactggtctcgcatttcatagactcagatagtcagatggacccatcgttcataaactaagtgacaattataatcaaagagatgatctttcgagtggcaaaaatcctaatttctcgtgtccctgtggggatccattaaacttacatatgacgatgtttttt

SEQ ID NO: 40730 - DNA, 653 bp, Zea Mays
gtcagctccgccgcttttgctttctctctccaggctctcggcttcgtccacaagctacagccgcgcgctcctccttgacccggcctgaccccgctagttcgccgcctgccgtctgccgccccagcatggccgccgcgtcgtccgccacctccgtccacgacttcaccgtcaaggattcgagcggcaaggacgttgacctcagcgtctacagggggaaggttcttctcatcgttaacgtcgcatcccaatgtggcttaaccaactccaactacactcagcaggcccagctctatgagaagtacaagaaccaaggcttgttcttgattcattgctcttgctttgaaatcctcgctttcccgtgcaaccagtttggtgggcaggagcctggtaccaacgaggagattgcccagtttgcctgcacacgcttcaaggctgactaccccatctttgacaaggttgatgtcaatggtaacaatgctgcgcccatctacaagtttctgaaatctagcaagggtggccttttcggcgacagcatcaagtggaacttttccaagttcttggttgacaaggaggggcgtgttgtggatcgctatgctccaaccacttcacctctgagcattgaggtcatgcgctagcagcatcaaggctatgtt

SEQ ID NO: 40731 - DNA, 273 bp, Zea Mays
gtctcaataggtctcagtgtttgcgggactatagatgttaaatatgggaagttttactaatatatatgatacacaggttaaccggtaaattagtttagaaagttaataaaagttattctatcaaattttataagtattaggtgtccaagaattatgaagttaaagttataagtcgtttagtgtgctctctaaactaggtatgatattctatgtgtgttggtcgatttcatgatttgaatgaatgttgattgctacttaaaatatttaggatca

SEQ ID NO: 40732 - DNA, 4409 bp, Zea Mays
gaatattagctataacctatgtttgattgtgtatatttgtatacttttattgtgtttcaggaaggacaaaatcatgttgtacaggatcctcccacatatggtgcaccaaagtttgatagaacccccagttagtcatgtcgtgacatgttcttatctctactactaattatgtgcctatcgtaggcgttcacaattccttggttctgtcgtcgcgctcgcctgccatctccctccgcgctccatccgccaccatccgcgctcgcctcccttcgcgcatcctacaaccgcgtgctccttccttcgatggtgcggatcccccgtgactaccatctccctccgccctcccgcgctccatccgccaccatccgcgcttcctacagccgcgcgctccttcgacggcgcggatcccgcaccctcgaatcacgccagcagatcccacaatcaagcagcggcgacaggaataggggcgggctacgcgggcgctactacgacgagggtgagggcgagcgctccggcgccgcggcgccattcatcataatcggtcgagctcctggagggaacggctgcagagcggacgagatcgaggagcgggcgggcgggtgccgcccgtgacggcgcctaggctcaggctccgcgacggccgccacctcgccgcgcaaaggtctcaccggctcccgagaggacagcgcccgcgcctcccaggtttcaaaaaaccttctgagaaggcctgttgatattctaaggaaattgtttgatgggaacaccttgagatcacaaatcaaagaattctttaatcgctttggtgctggagaggctgctgcaatgtgcttaatgatagctgcgaagctactttatgttgaagatagtctgataagcaattctgtttctgagaaagccactgaggcatttgaggaccctgggcttgttgggatgcctcaaattgttggtaccactgctttatctaatacacgaacttaggctggaggctttactatgggccaagttgttcaagaagcataacctttgttttctggtgcatatgaagggctttgtttgtgctcgtcaagactactttatctcatatgggagtttcctattatagtgattcgaagaccggctggtactaataaatgcaaggatggtgtaattgtttgtaggctttcagctggggccatgaaaattcttgagagcaagattcattcactggaaacatttttaagatctagaagaaataagagaaggggccacgcagtaccattgacacttaccctcaagggtaaaaacacaaatatcattgacattgtgcatagagtcttcatcagtatttcactgtcaagtcattgttccatcttcctaggaactgatatatgtaaagatacatagtatattcttatacaatagtatattcatatgaagagaccttgagtacattccacagtatattcttatacaatagtatattcctaggaactgatatacgtaaagatacacagtatattctaaagattctactgcgaatctgcgatggactataccatcatttttgagaaaatagattgtatcccaatcatgtttgtttgctcagatgaataagtttgcttttgagactgattgcactattcttgattggtgtttataactgttgcctgcacaataacatagtttgtctatctgagaaccaagttcctgtctttttagagtgcagcaccattatctttttatttttatcaaacatagctgtcttggtaacttcatatttttgtcctgctagcctacagttgttgtaattgaagcgggtcaagacatagcatttgcaaagatttagttcattctgatcactctgcaatatttcggtagtcgatggatggagaatggtggatcgaggagaccgatgacatactgctgcatcccgtgctgctcaatgggaagcagtaccggccagtctggtcaaacgacggcaccgtgatccacgcagatttctagttaagtttcttctgatggtgatggtactaaagaggactatgttcatatccgggcaaagcgaggccaagccactaacagccaaagccttgcagaaagactagggagaaagaagataagtgagaggatgaagcttcttcaagatcttgttcctgaatgcagtaagatcattggcaaggcaatcatgctcgatgagattatcaactatgtgcagtcattgcaacgacaagtcgaggtagtgttagtgcatctgtagctgaattgttttgtaatatatgtggcatcttgttagtgcatctgcagttcttgtcaatgaaactcgcaactgttaaccccgagcttggctttgacattgagcagatcatatccaaacaaatgctgctttcacaagactgacatcttgctttctatggagtcaaaccaggatcaagcggccttactggcccatttaaccaaggaatcatgcagccataattgatgtgcaccattgccaatcccgttgatgttttgcatggagctattcacgaggcgtcaacaatgaaccattattgatttgtccactgttatgttcgttgctggtgcaatcatgggatacattatgttcactgaatctacactcccagttcacactgaacttacccctaaatcttgtggcttccaagattgcagtctagactacggtgatgaatccaataaccaaatatccttggacttttattgtagctttttgtgtgcatttgttccgatacttaacaattaacattatatgacaccatagtttctctaatcacatgtaactccatctagccatctaggtttgtcctaagtcaaacatatcttttaattttgattagaaatatctataaaaaataattgtcttaaataagcagagttatttggttttagtaatgaatttagcaatgccaatgctatttttatcgttctatataaattttagatattcatggtcaaacttaaaaatgtttgacttggacaaatatagatagacctacacatgcattgtgattttaggaagtcctacaattctcctccccaaagtctgctatcaacttctaacagttagtccagttttcatgaacaaatttagttttaatcattctatgttgtgccaaccgccagcaactaataatcagagctgggtcatatcatcatatcatagtagattgtatagctttcttccctgtgcatgcttactggttactagatgaaaaaggtcgtgttacgttatggcgcactcctctcctttgaataggacatgctttcacactctcaattcggcatatccttctagagactagctgtgagttgggtcctaaatgtttcttccatgttcaattcgaatggcattgttgtgttaattagccgtcctgttttgtatttttttcctacaagttatagtggttacattaatgactaaatcaagatcttgacccactttattgatgacacccttttttcttcttattgcttctcctatcgtctctgagtttgtcattccattcaaacacgaaatttgtgtcagtatagatgccatggaaattttggtttagcttgagtattttgtagatacttcattcttgagtattcttgagtttgccttgttataaattgcagcacactccaatggtcttctaaatgaatagcacactatagtcaagagtatgacttaccaaattcattattggttccaagcatcttgaaagagaagtccatcgtctctcttactgtcatctcagcatggctaacagaagcacgcagcgacaagattaccccacatgttgtatcatggtttactagctagagaggctactcaagatgaggaatttgaagttatgtatggtgaggacgatgatgaagacaaagatgacgaggatgatgatgattatgatacaaagaccaagggggctactggagggggaagggcagcagcgaacgacctgttgagtgcaagcaggaggattcattgactgtattcgtgatgatgatatattatacaatccagataccatgatcaacacactcatactaaatgtcaatgttggtgtcggagaggaaattctccggccgggtggcggaatgcacccgccctaaatcctaagatgaggaggggcctaagtgttttgcctgtgagatggattcgggaagaacacaaaagcacacaagaatttagagtggttcgggccgtcggagcgtaatatcctactccactgtgtgttgtattgctcgagagcttgtatgaacttgtgagtctcagagtctaagtgagtgtgtcttgtaacgtcgtgtgcctccccttttatagctcaagcggggcacgcacaagggtactgagccccgacatgtgggctcaggaacataacggatgtaatacttggagcaactaatgctagtcgccagtgcaatcttcc

SEQ ID NO: 40733 - DNA, 1625 bp, Zea Mays
tttacaaaggcagtttttagttcctgggtttgggcggattggcaggttggtcctgcgaattgcaaccagcagagatgatattgaagttgtggctgtgaatgaccctttcattgatgctaagtacatggcctatatgttcaagtatgattccactcatggcccgtttaaaggttctattcgtgtcgtggatgattcaaccctcgagatcaatgggaagaaggtcacaattacaagcaaaagagatcctgcagagattccatggggtaactttggggctgaatatgttgttgaatcttctggtgtcttcacgacgactgataaagcatcagcacacttaaagggtggtgcaaagaaagtggtgatatctgcaccatcagctgatgctcccatgtttgtagttggagttaatgagaatagctatgatccaaagatgaatgttgtttctaatgcaagttgcactaccaactgccttgctccacttgccaaggttgtccatgaggaatttggcatcgtggagggccttatgacaactgttcatgcaacaacagctacccagaagaccgtcgatggtccttcgatgaaggattggagaggaggacgtggtgctgcccaaaacataattcccagctccactggtgcagcaaaggctgttggaaaagtcctgcctgagctgaatggaaaactcactggtatggccttccgagttccaacaccaaatgtctctgttgtggatttgacatgccggattgagaaaagcgcctcctatgatgatgtgaaagcagccatcaagacggcatcagagggtgcactcaaaggtattcttggctacacagacgaggatgttgtttccaatgattttgttggtgattcaaggtcaagcatctttgatgccaaggctggtattggactgagctcttccttcatgaagctcgtgtcttggtatgacaacgagtggggctacagcaaccgggttctggatctgatcgctcacatggctcttgtgagcgccaagcactgatgttcgtactcgttcctccagtaccagtagtagcctagataagaggctgcagttttgacggccattttcttttagctgttgtttggaataaaagaccaaatgttggaacacttggaactcgcgcaaaactggaatccgattcatgacctgtgttttagttgtagagggggcaaatttgcatcgtactatatgcgggattgttgatcggatgtcgtatggttcattgacttgatttattatgatgcgtggagggctgatttggtgatcagtgatcacggctctctatgagagagaaatctctttgttatttaattttgaatagcaaagagatttttctccatagattctttcgtgatgcctgattatcaaaccagccctaagggctgatttggtggtaagggatcccaagaggatctatgtggagaaattcacttgcaattcaattttgaataaaaggggattcctccccatggatcaccttaggatctcttaccaccaaatcagccctgaatgagttgatattatttagacaacccatgctataatggaaactagtcggttgttcgtgtgttgcgacggtttacaccaatactcacgtaaactatcc

SEQ ID NO: 40734 - DNA, 2160 bp, Zea Mays
atccagtcgaaacccactcacttgatggcaaagtagcgaatcccacgtttcataatggctcggttccaaatttctcccttcccaagcatggcgtccctgccgcagcccccgcgatccccttctcaagcctggcgtccctgccccccgcgatcgcgcctgccaagcatggcgtcgtcgcggccgttgcccccgcgatccccttccatcgacctgccaagcatggcatcgccccggccgttgccacgcccgccgcacacgccgcgatgagatcctggaccccccgcgacatcctcctccaccgcgccatggccgcccccgacgtcctcgcgcgccgctccccgaggtgggcatggtgcgcacgaccatcgcgggggtcacgacggcggcgcggttccaggagctggtggactggatggaggagtggaaggcggcgttcagggacaacagcaagtggacggagacggtgaacctggggctcgggagcctcgcgctcatcatgtccgggctgcttccgttcgccatcgacggggacctcgggttcgggaagcccagcctcgtgctaccctgggtgcgccatggccggctgggatccgcgtccgtgatggtggtgccctgccccagcggcgacatgtcgtggttcttcggcggcaccaggatgtggctgcggctcatggaggtggtcgaatccgaccctttgatgaagcagacaacgaacctgggaatggcgacagaggcgggatcccgtctgtgactgtgagctcgcgctggcggtacctgccattacggtgtacgggtatcatcgccatcatcatccagatccaggacatttccggatagatgacataatctgttcatctcaaatgccacaacattcgtgggcacatgttgccttgttggcttcatttagctcgcccgacatcatattttagcaactatctgtcatatataatctactaaaatggtttattttttcatttactcttatactctcatttttccaaccaggacttctgagcacatggaagatgaaggagacgttgcaactcctttacactttccaaatttttattaaatataccaatatcacgaggtgaaccttcgagtttagtgatttttcatatccatggtttgcagtgccacaaaggcaagcgaacctttgatttggtccatgttctggtctaaccttgttgggtccacactccatgggtcactttcacattactactaccatatctgtgagacagtgcattcaagtaacggtacaatacaaagggtggcaaatgataatagcctgaagaatgatggcacaaaatgatctagagtattctttatcttacttagattttgtcaacattccatcatcatataatctcgaatattttcataaactggttgtgtaaaatggggggatctttctccatgaatctcaatggatctgttgtgcactgcatagctgcggagaagaaaaaggtatcaaatatcaagcagctttacggcagcgaaggatcattcactatgagtggatattaaactgttgcaaggaaaacatcttcattttcatcctaggaagttgaacgatcattctctttttgggcactgctgaaggtgatgttgttcacccaactgagtgtatgccccagctgcttgagcaagttcggcatcacaaagcgaatatcgattgcaatgattatattgtcatggtgactacattggttcttgaggttgaggatttgtctacacaacaagtgaatgataagctcctagaagctgtacaaccttaagcactcgagcaatggagcaatgtggtatgatgagagcataggaggtttgtcgagatgaggtcgaaacatggccccaatgtaactagaccagagcaattgacaatctaggcaatatccgctatctggtccattgtttctctcgtgggtccattgtttctgtcgtgggtcagacgtcttcgacgtgaagagaggttgttttgtcatttccacattctgaagcgtaatgtagtgcagtggacgcatatagctactacgtatgttaaagttgtattttttatatctcatattagatgtatttactattttacaagccttatgaaaatagcaatatgagtggtactaaattattgatatgtattaaagcagcttcttaaaaaaa

SEQ ID NO: 40735 - DNA, 3372 bp, Zea Mays
cgatcctcgccattccgacgccgcactcgcagatcttcccttcgtcctccacgccccacccctcgcgtcgccgctatggccgacgaggccctggaccagccgccagacgcggccccgtctccgtctctggccccagcgacgccgccggcccccgccacctcgtcccccgcggcgctgctccgcccgcgtcgggaggcgttcgagcatgggctcctgcccatccccaagctcatcttcccggagggcatgctagcgcagaccctcgcccagctcaaggagaagctcgccgcctcagtccccgacgggcgcgtgcgcgctgcggccctggctgaggcgctgcagatcccgcaggagcaggcggcgctcgccctcggcacgctcgcggcggtgctcccggccgaggaccccgtgcttggggacggcgccatggatggtgctgccgccgacatccgcgacgtgctgctcttcctctatatccagtcttacaagcgcctcgttccgcggagcgcgcacaaggactcgcccgccgtggcggacgtctggccgtccacctccgcgttcgatgggtacctctccgcgctctccccgatccagcttgttcgcagcaacagccgccgttttatgccttctcaagctgatgaagaaattcatcagttgtcctttctgcaaaagcatatggcgaatattcttactctcttggcagattctgttgagggtgagggtgacgattcactggtattgacaatggagacttttgagcaccttggatttctagttcagttctcagaaggaacttccttaagccaggctgctacattttttgcaaactcagacccagacatgcctgctgtgcctgtccctgctgctcaggttcttgattggatgtcacagaacatagctttttcgctggaatattcttctgagaggtccgtagctaaggaaagcaaccagcaaaccatgtctgatcttgatgtgaccatggctgaggccaatacaagtcactcacggaacagcacaccaagtgctaatcctgcatactacagaaatgtaacgtttgtggagggcttttccaaaacctctgttgtcaagcatgcatctgatgtcaaagggaattcaataaaggttttgaactgtcatgattctgttatctacatattagcaccactgaagtatgctactgtgtatggttgttctgatgctacggttgttcttggtgctgttggtaaggtagtaaaagtggagcattgtgaaagagtgcatatcattgcagctgcaaaacggatttgtattgccaactgccgggagtgcatcttctacctaggagtaaatcaccaacctcttgtattgggggacaaccataaattacaagatcatatgatgcaagtgggtgttgatcccagtgtcaacaaatgggaccaaccttttgtattgggagttgtggatccacatgattcattatcccatcctgctggggttgcagatgttaaagctgaatcagcaacatgtctggatcctgatctattcaccagttttttgattcctagttggtttggggatgaagggcaagagcctataaactgcaatcctttcccactgcctgaaatttatgaggcattccaaagcaaaaagcgttctgctctggaagatatccaaaagatgattcgggagctacagcttgacgagaatcggaaaagggaattggcagctgcccttcatgctcagttcaaggattggttatacgcttcgggcaatatccgccagctctactgtctacaaggtgattaatggtgcaatttacaagactgattatcctctgccgactcctcaaaaacattcgacgattgtcgaagctgacctcttccttccatggaaaggactcccaccctgctcacctgcggtatttacacaagaagaagcgggtgatcttggaaagaagcgggattataagaagccatattatggttttccgcatcaggcccacctccatcagtaggagtctaggccccatcttctaaagaagttaagcaagtttcaacaacatcttctgcagacaacaagatggcagctctgtatgcttatccaaaagtccaagggctttgttacaagtgtgggatgacttactctcgaggacatcgatgtgctgaaacagtccagttgcagatggtggaagaattgtggcagatggtttcattgcctgagactaaaatgttatcgtcgtctgaagctaactcgtcgtctcaagcagttgtgaaagggatatctactccacgtactatgcgctttgtgggccatattggagatatcgatgtgctagcactcctggactcaggaagttctcatacatttctcaacacaatggtagcagaccagttgacaggagtgtcaaccatgaagacgcctgtgaatgtttatgtggccaatgggtcacaaattacttgctgctcggaattggtggatgcttcatggtctattgggggagtgtctttttcgtccacacttcatgtgctgcccctgtctacatatgatctcatagtagggatggattggctcgaagctcacagccctatgctggttaattggtcccaaaagtggcttcatattccttttcaagaatcttcagctacactgcgtggtatatcttcttcagtgatgacaaattcagtagtacaaatgtgcaatatgttggagttgtctgataaggaacatgatatctatgctagcttacctgttcaggttcaagacattattcaacaatttgctgccattttcgagctccctaaaggaatgcctcctatacgagattgcgataatcaaattcctttgttgccaggagctcgacctgtccaaatgagaccatatcagtatgcacctgctcttaaagacgaaattgagaagcaagtagctgaaatgctccagtcaggaattgtgtagccaagcaagagtgccttctcttcttctataatcctggtcaagaaaaaggatcagacctataggttatgtgtggactatggtcatctcaatgcactacatggattacatggagattcaatcaagcaacacacgagttcctagatgaaatacatggagattcaatgtttatctaaatcaaacaacacagttttcgaaatctgttctgacggtggacagaacacagcaaccagtttgtaaaattcataactcttaaactatcaggcctatggttatgaaattttaacaccagtaagataagaaaagcatctacaactttcttataacgaccatgaacggattgtaacattaaattaagtaaacaatgcagtttctgaaatctgtacagaatttggagctgaaatgctccagttattgatgagttcctagatgaactacatggag

SEQ ID NO: 40736 - DNA, 2387 bp, Zea Mays
gcccgccagtaccgggtcggcatgccacgagcgcgcggtcagcatccgcaggtacaacacgcacgcacgcacacacgagcactcccagcccatcccgcccaccaagaatctacccgacccaccggtttatgggctccgctgaaacagtagcccacacgtcagtcccttccacgacacccaaaccgggtcgcccaccgttttcggagtaagccccacctcgagatctatccccgtttccaacctcacatccccttccactcgagctccttcgtttaaacccaaaccctaattgcgacctccgttcccccaaaaccctacggccatggacggcggaggcggtggtgtagggggaggcggagttggggcaggtgtcatggtgggcggcggagtcgggccgggcggcggcgttggcggtggcggcgacgtggagctcgtcagcaagacgctgcagttcgagcacaagctgttctacttcgatctgaaggagaatccgcgggggaggtacctcaagatctccgagaagacctcggccacgcgctccaccatcatcgtccccgtcgacggcgtggcctggttcctcgacctcttcgactactacatccgcaccgacgagcgcgacgctttcagcaaggagctgcgactccagaccaaggtgttctatttcgatatcggggagaacaagaggggccgattcctcaaggtttctgaggcctctgtcaaccgaaaccggagtaccataattgttccagctggcagctctggtgaagagggctgggaagcattcaggagtgtactgctggagataaataacgaggctaccagattgtatgtcctaccaaatcatccaaatcagcaacacatggagccgccagagcgtcttcctggtctgtccgatgatgtgggtgccggatttatagcaggacatggtagccagtctgcttctgggccagaggtagatgtcgaacgcttggttgatctgcctcctcaagaagaaattagtggcatgggtatgtctaaggttatcagggcagatcagaaaaggttcttcttcgacctgggcagcaacaacaggggccattatttgaggatttctgaggtggctggagctgatcgttcgtctattatcttgccgctctcgggtttgaagcaattccatgaaatggttggtcactttgtagatataatgaaggacaggcttgaaggaatgacaggagctaacgtgcgcactgtcgagcccagccagagatgattacccttgactgtgggcctggcaagactgctgttatgcctcctgtaggtttgccatgtggtgtgtggtaatgtagatcacgccgtattaattcatctggtggggataataatgtctctttttctctttattttttgaattcagtggcgaggattgatttgtttgggactttttttctttctttcagtcggaggaataatatgcagtgtattgttcgtggggtggtataattgtggttgctgcaaaaaagaaattaaaaaaagaaaatatcttcttcctccttatctcccgccgccccttcctccgattttttccaggccgccgctgttccgtcgctttcatccgctcgaccacccctggatacaatccagccgcgcgcagccggccttctcccatcttccatggcgtgccccagcctctgctcctcggttctcctttcctgtgcgccgtcacatctccctgctcgttcccatggctcgcccccttcgtctcctcgtcgtggagcttccttccccagccgtgaactcccctgcgcagaccgctcctctcctgcttttcctacgtcgcccagttccagtgcagcggtctcccagcttcctctgtccgactgtccgcttcccatggccggcgcttggccccagctcgccgcgccctggaactccctggcgtgctcgcccgtccgggctctgcccagcgccgcggcttccagctcgctctccagcctccctctctcctgcgccgcaccttgctctctgcttgctgctcgccggtgctccagctatggcgcttcgtcgtcgcagttctctgtcctctgcacgcacctccctgtccacaacgccgttgttccgtacgcttgacccctgaaatcgccggccgtgaccctacggtggtgatgcaccctcgccgtttttagtccctgctcgcctcactttccatggatgcacgcccgcctcgccgttcctctagctgtcgcgctgcgctgttcttagtcgtcccggctctgcctagtcccttgtccggctgagcaagcccctggtgtcgtattcctctaatccaatcttcagtctgtagccgagtccctccgcgcgctcctgtgccatggtcgccgtggagcctcaccgccacagtcccagctcgg

SEQ ID NO: 40737 - DNA, 2821 bp, Zea Mays
ggcaggattgcaggaaggcacaagaagggcaaaaggcaggcagacccgcgcgccattctctagaaccttccacggtccacctccctcgttcctccggcggcacgtgcccgtgccgctcggctcacccgcaaccctccctccacgcctctcctcgtcgacgagcggacccggtccacgcccccacccccttcccatcccaatcccagatcccggccagccctccgattcggccgcgaccgtggtgggttcggtccccctccgatcggggcagcagccatggatcagagccggcgggcggtggagtcgtactggcgctcgcggatggtggacggcgtcacggcggacgacgacaaggtcgcgcccgtctacaagctcgaggagatctgcgagctcctgcgtgcctccgacgccagcatcgtcaaggaggtcgccgacttcgtcctcaagcgcctcgacaacaagagctcccttgttaagcaaaaggctttacggttgatcaaatacgcaattggaaaatctggtactgatttcaagagggagatgcaaaggcactcagcggctatacgccaactagttcattacaaaggccaccctgaccccttaagaggggatgcccttaataaggctgttcgggaaactgcgaatgaggctattgctgcaattttctccacagaggaccctaaacctgctgtcgcaaccgaaagtcttggcaagcgcatacaaggctttggaaatactaattacgagccatctagagatgaaaagaagtctttccttagtgaacttagcgaagtagtgggtattggaagtgcatccatcaagcagggtttgagcaacttcgctgcagcgcatgcaataatgataaatgacaacggcagcacatacaagagccctaatctacgtaggtctttaaccacagaatctgaaaaatatggccggtatgatccaagtgaaattcaaagtgagagccgtgcctcatctgatgcttcaaagaacgtagcttctggttcttggggtccgacttccagttctgcaccatccgatgatactagctcaagtcaaccaggggttaaaactcgtgaagaaagacttctggagacaattgttactgcaagtggtgtgcgattgcaaccaacgcgagatgctctgcgggtttttttaacagaagcttccaaattggatgcagttgccttgagccgcgcacttgaaaacaaactgaattccccattatggcaggttcgcatgaaggctatttgtgtgttggaagccattgtaaggaaacaggatactgatccttattctatcattgcttcatatttcattgagaacacagcttctgttgttaaatgctctgagctgccacaggtttctctcagagagaaggcctcaaaggtcttgaatatgctgattggggaagagcctactggaaccacagcaacaaaatctgcaatggccacacctgttcagatgcctgatttgatcgatacaggtgatcaagatggtctggcaacaagttctggacaggaaagcaatggacaaaaaaatactgggaaagcatatgtttcttcagttgatgatttgcttggtggtgaacctattgctgatacaagtgtcactgctgatagcaatggaagcgatccatttgcagatgtatcgttccatgaggtagaggctaaggagactaatgatctcttctcaggattgatagtagaagaaaaatcatcagctaccatgcacggcagttcttcatcaaacaaaaatgaattaccagatatctttggcagcccccctgattctttcatccaaggtagtgttactgaccaaggaactgtcaatgatttgatgtctggtttgaaccttaatggaacaggtcaggctcatcctccagttaaagcagaacccaatagcaccttcagtggttcacagttctttgatacaaacaatgagatcggccatgtggcaagtgctgcagcattgaatggcattgttggtcaaaactcgttttaccaacagcagcagactcccttgcagtacagcttccctcaacatatgatgctcaatcaatcatttcctgggcaacaattaaattatggtgctatggggattcttcttgctcagcagcagcagttactgcaaaattttggaaatttcaatgctgaacttgggaattcttctttcaattcgatgaacagtggaaatgcatcagtgcttccagatattttcaattcaagtaatcaacctcaaaatcatgttgcagcgatgagcagttcgaagaaagatgacactagagcttttgattttgtttcgcggcacgtgcttcaagaaagtgaaccaggaagcgatgagcatgtccatatgctggcaagagctcaagtgcttgatggacacaaaagctgggactccaaaagctgcatctcgtcacagcctcgcagattggctgcatgatcacacacggctggtttggcatgggatcgggcgcatgtttgaacagttgagaaagaagggttgttccatacggttgaaagacgggatgttgtgtcgtactatgtacttagacaaagactgtttttttactctgaaaaataaattgcatcttccgactttccttatgttctgcccttttctctcttcctttttttattaaaaaaatgagtcagacaccatatacgtatttattacctcaggttttatttcttttctgtacaagtacatggaggatgtttttttttttgcggcaattgtaaagctttgggacacgaataagagggtgcaatatgatatgagctgctacatgatctttgcaatgcaatgctgcctcgtg

SEQ ID NO: 40738 - DNA, 783 bp, Zea Mays
attcattagttccctagctacccacaccggctaaaaccagctaacgagtccgacccctttctccccaccgacccgagaccgcgagagccaggcgccgcacttcacggcgacgccaagccggtagggtgggacgtgtctcgccggcagcccgtctccactggttcactccatcgccattgttggtcccccaccggccaccgcggcagccctacggcgccgttgtgccctacaccgccgccaccgtccactgttccaggattttatcttattgactcgagttaccctaaccatgatggttacctagcttcttacaaggaactaagtatcatgtgccagagttttgaaaaggccctagccaaatgggaaggagttattcaatttttgtcactcgtctctttgcaacgtcatcgagcatccgtttggcgtgttgaagatgaaataggtcttgttaccttcattagagaaagcgctatggcagatgctgattttgaaatgtgtgacaatgatgagaactatatactgattcagagcaacaatttgtttgaagaagatggtgatgaagaacaaggcatgaacgttttctgtgataacattgcaaatgtgttgttcatcatgagagggtgacaagttagagatgttatttgtgttcataaagtagttcattttataccgctgtgagacaagcttgtatgattttaaaatttttagtgttttttgttggttgtttgactttgaaaaaaggggcattttaaactgtgacagaactgctactataacatttga

SEQ ID NO: 40739 - DNA, 3982 bp, Zea Mays
cccatgtgtaagcttttctcgcactcgtactccctcctccgctccggctaggaggctgctccctccgccgctccgccttcgtcgcgcggccatcgtttccggctctgtccccggatatctcttcgccaccgcttcctgcgccgcggcgccgccacaaccgaaggcgacccagtcgccttcaacactatggtgactcctcccactgtcgaggaggacgaggagatgctcgtgccccgccaggaggcggtcgacaccgacgcagcgcagcccatggaaggtactgtggtggcacagactgaggtggtgagcacggcggagagccagcctgtggaagatccgcagacatcacggttcacttggacaattgagaacttcaccaggttcagtgagaagaagcactatttagaggtttttgttgttggcggattcaaatggagtgtgctgattttccccaaggggaacaatgtggaccacttctcaatgtacttggatgttgctgactcaaccagccttccgtatggttggagccgctatgctcagtttagtcttgctgttgtaaaccaaatccagccagagtttacgatacgcaaagagacccaacatcaatttaatgctcgtgagagtgattggggtttcacatcttttatgcctttgagtgagctctatgatgcaagtagaggttacctcgtgaatgatactgttgttgtggaggccgaggttgctgtccgcagaattgttgactattggacatatgactcaaaaaaggaaactggttatgtgggcctgaaaaaccaaggagctacctgttatatgaactcccttctacagacactataccatataccctacttcaggaaggctgtatatcatatgccaaccactgaaaatgacataccatcaggaagcattcccttggcgctgcagagccttttctacaagctccagtacagtgacagtagtgtagctacaaaagagctgacaaaatcttttggttgggacacatatgattctttcatgcagcatgatgtacaagagctcaacagagttctgtctgagaaacttgaggacaaaatgaagggaactgtcgtagaaggaacaattgagcaattatttgaaggtcaccacatcaattacattgagtgtataaacgttgagcataaatctaaccgcaaggaatccttttatgatcttcagcttgacgtcaaaggctgtcgtgacatttattcgtcgtttgataaatatgttgaagttgaacgtctagagggtgataacaagtatcacgcagagaatcatggtctacaggatgcaaaaaagggcgttcttttccttgatttcccccctgttttgcaactccagctgaagcgctttgagtatgattatatgagagatagcatggttaagattaatgatcgctatgagttccctctgcaacttgatctggatagagatggtggcaaatacattgctccaaatgcagatcgaagtacacgaaacctttacactcttcacagtgttcttgttcatagtggtggggtacatggtggtcactactatgcattcatacggccaactttatctgagcaatggtataaatttgatgatgaacgtgtaacaaaagaagatgctaagaaggctcttgaagaacaatatgggggtgatgaagagttaccccaaataaaccctggtttcaacaacgctccatttaaattcacgaagtattcaaacgcgtatatgcttgtttatattcgtgaaagtgccaaggagaaaattatgtgtactgttgatgaaaaagacattgctgagcatttaagggtaaggttgaaaaaagaacaagaagagaaagaacacaaaaagaaagaaaaagctgaagctcatctttataccataattaaggtagctcgagatgaggatttgaaggaacaaattggaaagggtatatattttgatttggtggaccatgaaaaggtccataatttccgtatacagaaacaaatgccttttagttgtttcaaggaggaagtagccaaggaatatggcatccctgttcagtttcagcgcttctggttgtgggcaaagaggcaaaaccatacataccgccctaatcgtccattgaccgttcatgaggaaacacaatctgtggggcaactgagagaaatatcaaataaggcacacaatgttgagttgaagctgtttttggaagtagaacttgggctggatttgcggcctctccctcctcctgagaagggcaaggaagatattcttcttttcttcaaattctacaacccagaaaaggaagaactctgtttcatggggaggctctttgtgaaggccttgggaaaaccttcagaaatcctggcaaaactaaacgaaatggctggatttccccctgatcaagaaattgagctttttgaggaaattaagtttgagccaaacgtgatgtgtgaaactatagacaagaaactcacttttcattatagtcagcttgaagatggggacattatttgtttccaaaaatcaccaggagcagaatatgatgcacccgtgcgatatccggatgttccttcatttttggagtatgtccataataggcaggttgtacatttccggtctttggagaaaccaaaggatgatgatttttctttggaattgtcaaagcttcatacctatgatgatgttgttgagagagttgctcgccaacttgaattggacgatccagcgaaaattcggcttacaccccacaattgctactctcagcaacctaaaccacagcccgtcaaatatcgaggagtggtgcatctgtcggacatgctcatccactacaatcagacgtctgacatcttgtattatgaagtgttggatataccactgccagaattgcagttcctaaaaaccctgaaagttgcatttcaccatcctacgaaggatgaggttgttattcatagcatcaggcttccaaaaaatagcaccattgctgatgtaatatatgacttgaaaactaaggttgaactgtccagtcctaatgctgaactacgtgtactagaagtcttctaccacaagatctataagatctttccactacatgagaagatagagaatataaacgaccaatattggacactacgtgctgaggagattccagaagaggaaaaaaatataggcccaaatgatcggctaattcatgtttatcacttcaagaaagatattaatcagactcagattcagaactttggagaccctttcgttttggtcgttcatgaaggtgagactttagcagaagtcaagaagcgcatacagagtaaactgcaagtctctgctgatgaattttccaagtggaaatttgcatttatatcaatgaatcggccagactacctccaggattcagatgttgtacctactggctttcagaggagagaggtctacggagcttgggagcaatatcttgggatagagcacgctgatactgcaccaaaaagggtctatacagtgaatcagaaccgtcacgcatacgaaaagccggtcaaaatttacaattgagatttctaactaacatggccgcacggtgaaggcctccatacgagaggagcggccagaaaagggaggacagggaatttatactgtcagggggaaaacctcatagttagcgagccattcggtgtggcacggccatgtattccagcgctagaggccagccactgttatttcatctgtagcagccagcagctcctatagcaatgattttctttttgtacaagattttccttctttgccttagggtgatggcgcgagcgcattggtgtccgtttcggttgggcaattgcttcattcttagagcaaagctgggtacataagattttggtaggaagcgtgtatacaggcaggctgtatagttgtggctctctcggcttgatccctcgtatcttgtcttgtgctattgttaatgcagtgacaggggctgactgtaaatcgtggttccaattttcag

SEQ ID NO: 40740 - DNA, 3368 bp, Zea Mays
gcaacacattgactatgctaacattcaatcgtccactccaatcaagacaaccccatatctctagtggcaatccagtagcgcgccgcctctggccgtccgccgtcgtcgccctctccctcgtcctcgcccgtcgcacgtgttgtgtgatccagcggccaaaggcagatccatggaggttatgactggggcactaccgagcctcatccccaagcttgctaatctagtcgctggtgagtacaatctgcaaaagggtgtcaaaggggatatcatgttcctccaagaagagcttgagagcatgagggatgcactcgaggagatctccaaggttccagcagaccagcttcccaacagagataagatttgggctaggaacgtgagagagctctcctacgacatagagcccaagattcgccataaaatggctactgaaattaggacgatcaaaaggcgcatcgttgaggtgcacgaacgacatatcaggtatgaaattaatcttggtcctgataagcttggcaatgctgctgtagatccccgaatatttggtcagtacacagagctgaaagagcttgttggcatcgacgagacaagagatgagttaatcgatattatgatggaagggaatgtagtccccatgaagcaagtgtctcaaactcctgacttgaagaaattattcaagagtttgctctatgatcttggcaagtacatcaatgaagaatcgttggatgagagacagctcatcaatgtactcagagaattccttcaagagagaaggtatttaattgttattgatgacatatgggacatctcagtctggaaaatgattagatgtgctttaccagacaatgatatcgggtacattattgttacaaccacacgcatttccgatgttgctgaaaaagttggtggtgcttataagctaaaacctctttcattgaacaactctcgagaattaatgtataagataatatttgggaacgaaaatagagaaaacactaaagacaaagaaatatgtttagatgaggagcttgcagaagtatcaaataaaatactaaagaaatgtgccggtgtgcccctagctattattacgatggctagtgtactagcttgtaaagcaagaaatgaaatggagtggtatgaggtgtacaactctattggtgttggcattgagaacaatctagatgtggggaatatgagaaagattttgtcattcagctattacgatatggcatcccatctcaagacatgtttattatacttaagtatgtttccagaagattataaaattgagaaagatcgtttgatatggatgtggatagctgaaggctttgtccaatatgtgaaacaagggaagagcctatttgagcatggagagagttacttcaatgaactcataaacagaggtatgatccaacccatatataaccaagctggcatgatatatgaatgtcgtgtgcatgatatggtgcttggtcttatatgttccttgtcaaatggagaaaattttgttacaacattaaatggtttgggtcacggatctccatcaaatatgattaggagattatcagttcaaaatggcaatgagagtcaagctatgactctgcaaaccagaaacttgcagcaagtaaggtcggttgttgcctttccggatgccaccgctagtgtagttacggtcttgaggagcttccgagttctacgtgtactagatttacaagattgtgacctttcacaatgttgcagcctgaagtaccttgggaatctatttcacttgaggtatctaggactatgtaacacaagtattacacagctccctgaagaaattgtaaacttgcaacttctacaaatactggatgtatggaacaataaaatgtattgcctaccctcaactattgtgcagctgagatatttgatgtgcctttacattgatggttttactagagtgccaaacgggattgggagcctaacaagccttgaagaactcacatttctaggcatttatgactccactgtggacattatagaagagctgggccagctaacggagctacgggtactgcatatcgttctttttggtgaatggaacgacaagctggtggagtgcctgcacaagctgaaaaagttgaaatatctatatatcaaggaccgcagtggtcaacttaacattggtggtttggatgcctgggtagcccctccaaatctccaaatattgaatacgcgatcgggttgctggttcaccacactgtcagcatcagcatggatgaatccatctcttcttcaggacctctccttatctaccaccgtgagggagttgcagcaggatgacattataattcttgggagtttgccagctctccgctatctaaatctgatgattgttggtgaggatttgggagttcacaatgaaatccatggggaatgcattgttggtgctggtttgttcccatccctagtatactgccagctctggggaaatgtggcgcctatagtgtttcagcgaggagccatgccacggctcagaacccttgactttcggttatctgttcaagaggtgagaggaatcaacggcagggatggtggtatcgacttgggcctcaggaacctgccatcactccagaaggtttgggttcatttggaccctgagggcgctaacaaggcagaggtgaaggaactggaggctgagttgacgcgtgccatcaaaattcatccaaatcatcctcagctgtatggaattcaggatgaagatgcagatgatgaatgatgcactggagaaaagattaccaattatgcagaagctagtgcactttcaactttcatggcactggtctcaaggattgtctgattcagatggattacttctgtttctgtctcagattcagaatgtgatgtccaccccaatcatccaacccttaaggaacatggtgtcatggtgatgaagatgagccaacttgtgatcatccgctggaaaatggaagagcaatctggtggcctgatggactagcaaacctggaaaattaaagcgtagtgtggcaatgtggcagcctggggaaacctgcaactggcgatctggaggtctggagagaacaaaacgccagtgacagttggggcttaggcttggcaagcctaatattgcaatagcacatatgaataacggttgtttgttgcgactggaagtcctgtttggtttttttacatagtgtttgctgttttcactcatgcctttttcttttgtgttttgtgtactgtcttgggtgttcctagggttgccaaaccgtttttgtgacaccccagtgtcacctagggtttctctcaaaatgccaaaccaagaaccatcattttatgtgaatcaaattaagcatgagcatcaaattgac

SEQ ID NO: 40741 - DNA, 1542 bp, Zea Mays
gtgaaagatgaactatgcgaaccgggtcctacgttagcacgaaaagtcagcggacgatctggacggtggattattacaggggccgcaagtcgacggttcagagattcggatgcatatctggccaacctgcacgtttctgaagcgacaaccacacgtccacacggacgggtgcatcccgacgcccaaatccatggcgagctcgccgcgatctcctccgccggcgcctacgccggaattcgagatctctcggcagtcccgcctctttgtggcgctgtccaagaaggtgatagatctcgatgaactgaggatgctggcggctcagggagtcccagacgcggcgggcgtccgagcaactgtatggaagctgctactgggctatctgcccaatgaccgctcgctgtgggagcaggagctggcaaagaagagagggcagtacgctgctttcaaagatgagttccttacaaaccctgtaggtagaaagagcgcaacaggtgccaacagaaggccaccacaacgtaagtgcagagcatgttgacaatggcttcctgcacaggtcagaggtaacccgagaggagcaccctttaagccttgggaagaccagtgcttggaatcagttttttgagtactcagagattatggagcagattgaccgcgatgtaaagcgcacccaccctgacatgcagttcttctgcggcgactcgtcttttgcaaagtccaatcaggaatctttgaaaaatgtactgttaatctttgccaagctgaatgctggaataagatatgtacaagggatgaatgaagttttggcacccctcttctttgtatttcggagtgatccggatgataaaaatgctgaattcgcggaagcggattcattcttttgcttcgtcgagttgcttagtgggttcagagacaacttctgccagaaactggacaacagtgctgttggcattcgaggtacactagccaagttatcacagcttgtagcaaagtatgatggagaactccagcaacatctggaaataactacggaagttaatccccagttctacgcattcagatggataaccttactgctgacccaggaattcaacttcgccgacaccattcacatctgggacacactattaagtgatcctggtggcccccaggaaaccttgctcagaatatgctgcgcgatgctgatccttgtccggaagcgcctcctggccggcgacttcacctccaacctcaagctcctgcagaattacccaccgacgaacatcagccacctcctctacgtcgccaacaagctgcactgaaccggtctcttctgcgctgctgcgtttgttcagccaaaactgtggcccgagtcccggcattgcaacagaaacacaccgttgcggccatggcttgtgtatcatgtccattaatctgactccctgcattttgtaacttgtattgtatgttcacctgacaaggagttctagtatcccagttaatcaatgtggcatgattatagtgtctaagcatgtctgctgagcgctgaacattctccactttttt

SEQ ID NO: 40742 - DNA, 280 bp, Zea Mays
ccctttggcatgcttcggctacctcatcaatctctagcttcggcttttggaggccgaagcgcgacaagatgggacacatgatgatttctttaatatcttctctcgcttttaaatcattcttcacgtaaaaccactcctccatccaggctccgggccatctcttccgaaaggttcgtactgggtaacttgagccagaacgagcaacgaagctgtagcaaccaaaattgttatggtactgttccttaccctggggtttcgtttcatagcacaattcatgcat

SEQ ID NO: 40743 - DNA, 617 bp, Zea Mays
cacaaatcacacaccaacatttttggagcggaaaatcttattaccaaattttacaagttacaacaagtttacattgtatttatcggagtgattacaaaagtggttcaaaggaataactttgagatgttataaattatttgtaagtttgaaatatatgctagcttaagtgaccatcctcaataagaagtatagaagaattacttagacttataagaaggccgagcccaccggcactttacaccatcaacagcagcagaaagttagaacctgaaaaacaacaaggaataaaaccctgagtatggaattactcagcaagacttacccgactaaagaaaagactctcaagggtatgctggctagagggattcaaggtatggcttatcaagaatcaaagactctgttttgcagaaaagcttactatgagtggatccatagaaatccaattttactagtaatgttaagtaaaattacctgcatctagagttctttctaccctagttcaatcacttgacctatactagccaatttcttatcaacccttcatcttcactggattgctacgtgtaagtcagtgaccaagtcttcatatccgcgaagttacggcgatccgaatcgat

SEQ ID NO: 40744 - DNA, 3238 bp, Zea Mays
aagcctgcacagttgggaacgcctgatttccctgtgcccgcgtatgcaggcaagaggccgctttttcactatttggggccagcatatgagagctattcgagcatccaaacaaccttgtttgcactaccagagactgttcacggagttgtgcagcgtaccaaacgcacccataaactcggtttttccatgttccaggttcaggcagctcctaaaatttataaactgctcccaggccgtccaggtcttatgtttgaggatcctttcttcaactggtttagggatgacacagatgaacaatggaccaggacaattgattttactccatcagctagcatcgggcaatcatctattttatgtctggaggtgccacaacagtgtgagcttccaagaattggcgactactttgtttactataaagagcagaatcttgactttgaatgtcggaatgggtattcatattcctgtggtagcaaccttgtaccaattgtgaaatctcctgattacatagaggtcccttatgagatactcttcaaaatcaaccatttggttcagaatgggacactcagtgggccaacagttgatcatagtttcttccgtcatgttagcccaaaatttgaacctattgatcatataaaacgagcacttttaaagatgacatatttgaaaagcacctgcttgaacccaacagattggttatctgtgcaatactccagaatacggaaatcacgccatgcatcacaaaagttatctaatatatctctggatgatggcttggtctatgtccacagggtgcaagttacccctgctaaagtgtatttttatggacctgagataaatgtctccaatcgcgttgtgcggcatttctctgcagacatagataacttccttcggatttcatttgttgatgaagactgtgagaagctccgttcagctgatttgtcacctcgatctacttctggaaatgatgcaaggagaactgctctgtataatagagttttgtcagtcctttcaaatggcatcaatattggtgacaagcactttgagtttcttgccttttcttcaagtcagcttcgagataactctgcatggatgtttgcttctcggcagggattgactgcgagcgacataaggaagtggatgggggactttcgagatatcagaaatgtggcaaaataaggtatggcggttacaaaggtgttgtcgctgtagatacaagatcaaatcataagctttctttgagaaaaagcatgtcaaagttccagtcagaaaatatcactcttgatgtccttgcatacagcaagtaccaaccatgcttcctgaatcggcagttgattactcttctctcaacacttggggttagcgataatgtctttgagctaaagcagaaggaagccttaaggcagttgaacagaatggtaactgaaccacaggctgctcgtgaagcagttgaacttatgcccatgggagaagtaaccaatgtagttaaagaattgttgtcatgtggctaccagcctgatcatgagccatatctttccatgctgctacaaacttttagagcatccaagcttctagagttgaaaacaaagtcaaggatattcatcacacaggggcgagcaatgatgggttgcctggatgaaacctgcacacttaagtacggccaggtattcgtccaagcttcttacagtgcagatgaccatcgcaaggtcgttgtaactggaaaagtagttgtcgccaaaaatccttgtctccaccctggtgacatacgggttctccaggctgttgatgttcctgctctgcaccacttgtttgactgtgttgtctttccacagcagggaccaaggccgcaccctaacgagtgttcagggagtgatcttgatggggacatatattttgtttcttgggatccacatcttattccgagtcgtttggtggatcctatggactatactccagcttcagcagaaacattagaccatgatgtcactattgaggagatacaggagtacttcacaaactacatagttaatgagagtcttgggattatcgccaatgcgcatgtggtctttgcagatcaggaacgtatgaaggctgagagtccaccgtgcgttcaactggccaagctcttctctatagctgtcgatttcccaaagactggagtgccggctctgattccacatgagctacatgtcaaggagtatcctgacttcatggagaaactcgacaaagtcacctatgaatcaaagggtgtgatcgggaagctctatagggaaataaagaagcacacaccacacataaagcacttcacgagggaagtggcaaggcggtcttatgacaccgatttgattgttgatggctatgaagattacattactgaggctatagagttcaaggaagagtacgatttcaggctgggtaatcttatggaccactatggcataaaaagtgaagctgagataataagtggatgtattctaaagatggcaaagaatttcaccaagagtagtgatgctgatgcaattagaatggcggtgagatctttgaggaaagaagctaggtcgtggttcaatgagatgagcacaggagaggatggccaagatgccatggaggccaaggcctctgcttggtaccatgttacttatcatcagcagtactggggcagctacaatgaagggtatgatcggccgcatcttattagcttcccatggtgcgtatatgacaagcttgtggccatcaagcaggggaggaatctcctcacgcggatggatcgaaacttgaggttccgttgagcattgccagcaggtttgctcctgtacatatccctgatcgtttgcactcagcactgccagcaagtgtgcatgaacgatctgatgaattaagacgggcaaactgccgcaagctgacgctctggcctacgtgcgtcttgaaactttcggatgctgccgtctaactaaatgcatgttccttgatttccactgggaccttgagtttgaagtgtgtaaatatgctgcttatgatgtttttagtattggacctctatcaactgccgttctagttagtaacaatggttgccagtcatggattaccaggtttcgccgagctcctgtatggacgaccacgaaggtctatttcttccattaccaagtgcgaagtgtcacatctaacttgcgtagttgcattcaccttttttctcaaaaaaaaaatgcattcgccctgcaccatcatcaattgcgtagttctg

SEQ ID NO: 40745 - DNA, 3314 bp, Zea Mays
aaacaggacctttagtcctttactcatcctcgttagtcttgactcttgcgcgtccacccctgcgcttttcactagtttggattcggacttcctgcgctccgccaattgcttcctactccacctcctcttctccctccccaagccgccgccgccgccgccgcctcatctcatccccatcacccactcccggcggatcgtcgatggcggcgccggcgatatggcagccacaggagcaggggctccacgagatctgcaccctcctggaggcgcacatctcccccaactccgaccaggcccgcatctggcagcagctccagcactacagccagttccccgacttcaataattacctaaccttcatcctggcccgcggagaggggaaatcaattgaagttagacaggcagctggtctactactgaaaaacaatctgcgaacgactttcatctctatgcaaccttcgtcccagcattatgttaagtctgagctgttaccatgtataggggcaaccaatagggctattagatccacagttggaacagtgatcagtgtacttttccaaattgtacgagtcgctggatggattgagttgtttcaggcactccataagtgtttggagagtaatgacctggatcacatggaaggtgctatggatgcgatatacaagatctgtgaggatgtccctgaagagctcgatgttgatgttcctggtttgtctgaacgaccgatcaatgtgtttatgccaaaaatactgcagttcttccagtcaccacatgcaagtttgagaaaactatcgttgggttgtataaatcagtacatagtagtgatgccatcggcactctacatgtctatggatcagtatattcagggattattcaaccttgcaaaggacccttcagcagatgttcggaaactggtttgttcagcctgggttcagctcattgaagttcgcccatctattttggagtcacatcttaaaaatgttactgaattgattctgcaagctaataaagatccagatgatgaagtcgctctggaagcttgcgagttctggtctgcatactgtgatgtgagcatgcctcctgaaggtttacgggagttcttgccacgcttaatcccgactttgttgtcgaacatggtatatgctgatgatgatgagtcccttgatgatgctgaggaagatgaatcctttccggacagggaccaggatttgaagccccgctttcatgcctctcgattgcatggatcacaaactggagatgatgatgatgatgatgatgctgtaaatgtctggaacctgcggaagtgtagtgctgctgggttggatgttctctctaatgtgtttggtgacagcatccttccaactttaatgccattgattgagcaaaacttggctcgaacagatgacaattcttggaaggagagggaaactgctgttttgtgtctaggcgctatagcagaggggtgcattggtggtctatacccacaccttcctcagattgttgccttcctaatcccacttcttgatgataaatttcctcttatacggagtattacgtgttggacgctctctcgatatagcaaattcattgttcagagccttgatcatccaaatggacgtgaacaatttgataagattctcatgggattgctaagaaggatattggatactaacaaaagagtgcaagaggctgcttgttcagcgtttgcaactcttgaagaggaagcttctgaagaattagtaccccacttggaagtaattttgcagcacctcatgtgtgcctatggaaaataccagagacgaaatcttcggatactctatgatgcccttggtaccctggctgatgctgttggagcagaattaaatcaggcattgggaccaggatttgctcagtttgcggaaccagtgtttcaaaggtgcatcaatcttatccaatcgcaacagttggcaaagattgatcctactgcagctggtgcggtgtatgatagagaattcattgtttgttcgttggacctactgtctggacttgcagaaggtcttggcgctggtattgaaagtcttgttgcacagagcagtttgagagatctgcttttgcaatgctgcatggatgaagcagctgatgttcgacaaagtgcccttgcccttcttggagacctttctagggtttgcccaatacatttgcatccacgtcttcaagaatttcttactgttgcagcaaagcaactgaaccctcagtctgtgaaggatgcggtatcagtagctaacaatgcctgttgggctattggagaattagcaatcaagattggcaaagaaatagcacctgtggtgatcaccgttgtttcgtgcttgattaccatcctaaaatccccagagggtttgaacaagtcacttgttgaaaatagtgcgatcactcttgggaggcttagctgggtctgtccagacatcgtggcccctcatatggagcatttcatgcaagcatggtgcagtgccttgtgcacgatcagagatgattttgagaaagaggacgcgtttcatggactgtgtgcaatggtggcagcaaaccctacaggagccgctggttcattagcttacatctgccaggcctgtgcaagttggactgagataaaaagcgaaggtcttcacaatgaggtgtgccagattctgaatggctacaagcagctgcttggaaacaacggtgggtgggaacaatgcatggccgccctgaaaccagacgttgtgcagaaattagctagatacggagtatgatgagaagcaagctcgtgtggtttattcacctcatacaccgaccatcatctttatggcggagacaagagaggagcagaaaggggtgggggtcgtcgagagtgtctctgctgctgatgcatcatctttacatgtgtggcacttgagagtcgattcggttcgttggtacgccattgtccgttcgttcattgttatactggttggtgcacagcatttccagagcgagagtaggatgtcttggtaaaccccccatgtgtattggttggttgggccagtggacttggttttggtttttttgtcattcctactggcaaacacaacaaggccaccaccctcttgctcgccccaccccggcaacattgagaaaacagaaaggttttgtagcgtgtaattctctctcttttcttggtttcttattattattaggtgtaggattgttttcgagtcttgtttggcaggaagggtttgtacgagaaatcaattgattgctcactcaccacaaaataataaaaaagatcgatcgatggggcttgtatctcctgcgactcttcc

SEQ ID NO: 40746 - DNA, 1348 bp, Zea Mays
ttcgtctcggcggcagcagtgccagccggtagccggccgagtcaatgttggagtactgagtacctacttcctttgcaccgaagcatggtttttaaatcgggtttgtaagttttagatctttatgtcaactaccaatctgaggcggcgactccatcatggagacgttgatggaaggaaaaacgagcatgttgacatatccagtgctgattccctcaatgaacctctattagggaagtccaatgatgacaactttggatcagaggtgtatgatcctagaaaacaggatctgtgggatgatgatatgaagaaagaacaactacactggtcatttcttttctcaaacttgattacacaatgggcacaatggttagcaagcattattgtgagctcaggatctatctttggtagattatcccccttctcttcagagaaccaaataaatccagtatatcttagccctttacaggaacaaaggttggatactttaagacacagattgcaaatctcttttgatggctcccgtattgaacatcaagatgccttgaggcaactctggcgtttagcttatcccgctcgtgagattccaccactcaaatctgaattatggaaggagatgggttggcaaggcaacgatccatctactgatttcaggggtggtggactcatatcgttggagaacctcatcttttttgctaggaactaccctaattcatttcagatgcttctgaacaaagtacaagggcagagatcagattgggagtacccttttgcagttgctggtatcaacgtttcattcatgctggtccagatgttggatctgaagtcaagtgttccatcttctaagtatggaattcgtttccttgaattgcttggacgtgatgagaacgcctttgaccacctgtactgtgtggcctttcggttgcttgatgctcagtggcttgtgaaacgtgcctcctatatggaattcaatgaggtcttgaaatcaacaagaactcagctggagcgggaactggttctagatgatgtgctggaggtgaaggacctgccgtcctacactatgctggatgagtaagctaaagccgagctgttgaacttggacgctggagaattgactaagctggtctgatggctaatagttatctagcgtatgctgatgtctgatcctaaatgcttaggcggcccacatgccattttacattgccgcatattttttttcttgttgtatactgaggtcttatgaggtgtttatatatgattcctttgtaaatattgtgtttgttatatgttatccttttggacatgctggttccaaggaaataaagcaatcgatctcgtattcattttcagc

SEQ ID NO: 40747 - DNA, 901 bp, Zea Mays
aattcccaccacgtgagcagaagcagcacaaccaagagccaacagagcaacgcccaggcacaaacgacacgaaccaggcaaccagctgccgagggaggaaccctagcggaacaggtgacggcggcgcgctaccggtgacgggggatacggcggcatcgtccccctcggcccctcctccatccccggcgcggcggcgccagcagccggcctgcagaccaagaacgcctggatttggataccaagaaactgcaaagctttgtcaaggagaaatcacttgtgattgcggagaaaggcgccctagcaggcagattcggtgctgacactgtaaaatctttggtcagccttacagacacaactaaatcaacacgggagggcggggaggtgaagtaccagttttgttgagtcgtcaactgttcagccacaatatatttcttggatatccggtgtttgttcggtatatcccctgccggaagggattgaaggggattggtgttgtttaactcaattacctgcagtccacaccaaactgaacaaggctatatgtatagattttctttgcttttgtttggaacaaaattttgcatggttgttagcaattgcgaaaaaattgttctcgattgatgtgtgtattcttatttgctgtgagattgtggcatagtcagtgtgtagttcctgatgatgagctgggtgtagtcaaaggttctcaatctgtagtagtcatgtttgaaactgaagtaaaggtgggtggcgtatgaatttattcattcagctattccctctgtcccagaatagttgatgttttagggttgtacatatgaatttataagtataaaaatgatgtggcgcattgaaaacaaggagaaatacagatatattgggaaaaaaaagatgtgagcccgga

SEQ ID NO: 40748 - DNA, 3334 bp, Zea Mays
cgtctctctgaccctctcccctcgtcccgaactggcgaacagtaagcgaaacataaacaaacaaccacggacccaatgaaatcgagggaaggttcacgacacgctgctccccaccactaaccgcactcgattgagcgccatgctgcagctccagccccctgggttcctgcccatcccgcgccggcgcgtcaccgcccgcgggcgtcgcgcccgccctgtcatcgccttcaactcccagtggaagatccccgacgtcgacacagatgcggtgcgggagcgagtgcggtcttggatgtctctggcgcggggcgcgatcgccgacgcggggcgcgcggcgcgggagggagggaggcacaaagaggagcccgagggtgggaagaagaagcagcggaaggaggtgaccgtggaggagcaggcgttcgttgcggtgccagaggtcaccgtggagccgcgggtgccccagggttggctctcgctggacgccgtcgtctccatcgagcagttcgccaggttgaatgggttgacggggagacaggtgcagaggatatttgaatcacttgctccagagcatctgcacaatgacgctcgaagcctggttgagtatagctgcttccgctacttggcaaaagataattctgacttccatccaaacttgaaggagcttgcctttcaaaagcttatctttgtgactatgcttgcttgggaagatccatataacgaagacagcagtccactttcttcgctagacaactattctgtattgggaaggcttgttggagaagatgcctttgcccgaattgctcctgctgttgcaggtgttgctgatgtttcaacagctcattatctctttagggctcttgttggtgcagaaaagggactttcatttgatctgtggacaacatatctagcggaacttttgaaggttcatcatggcaggcaaacacatcaaacgggagataattttttgtatgatgagaaagtcttatgcattggctctagtaaaaaaagacctgttctaaaatgggaggaaaataccgcatggccaggaaaccttaccttgacggacaaggcgctgtattttgaggtaccaagaaaccaatgaggcttgaccttacaaatcagaattcaagggctgaaaagacgaaagttggaccatttggatccaaactatttgactctgctgtctcagtttcttctggttcaatgtcagatgaatggacattggagtttgttgatttcagtggggagatgagacgagatgtgtggctcgccttcatcagtgaaattatttcagtttatagattcattcgtgaatatggtccaggtggtgatgatccagcaatacataatgtgtatggtgcgtacaaagggaagaaaagagctgttagtagtgcagcgaacagtattgcaaggctccagtctctgcagttcatacggagattatatgaagatccagctaagctagtgcagttctcttacctgtccaacgcaccatttggtgatgttgttcttcagaccctagcagtgaacttttggggtgggcctctgactacaaaagccagatctgcaaatcatagatcaactcagtggcatagatcttcagaggacccatctagcggtcgcacacatgtttacgacatagatggcagcgtgtacttgcgcaagtggatgacgtcccccagctggacatctagccactcagccaatttttggagaaattcttctgtcaagtatggtataatattgagtaaatctttagttgtagctgataaaaaccttgtagaaaaggcaatggttgactgtaaagagaagagcaaagtagttgaaaggacacaagcgacaatagttgctgctacaatcgaaggtattccaagtaacattgacctcttcaaggagcttatgcttccttttgcaatagtggctgaaaatttcaagaaactgcaacgctgggaaaatccacgttcaacattttgttttctactattggttcatactgttattttcaggaacatgctttcttatgtatttcctttcaccttgatgacgatggccctttccatgcttgctgtcaaaggactgaaagaacaaggccggttaggtagatcttttggtaaagtgacgattagggatcaatcaccttcaaacacaattcagaagatcctagcccttaaagaggcaatggcctcagtggaaaattatctccagaatctgaatgtctccctgctgaagatccgcacgatccttctagctggccaacctgaggtgacaacacaggtcgcgtttgttctcctagcatcctcagccgtccttcttgtgtttcctttcaaatatgttcttgcattctttacatgtgatcttttcacaagggagctagaattccggagggaaacggtgagagccttcatgaacttcgtgaaggaacggtgggaatcaatacatgctgcccctgtggtcgtgttgccatatgaaggcgctgaaagcagccccaagacactcccggcagaagtttcggggcaagcagaaccccagaatgtccaacgtgggagcggttatgtctcctcaaagaatggcatcagcagttgatccgtgcagctttgagggcatcttgctgtaaacttgtgtacagttaaacttgtatagattactcgagagggcagattaggtatagatcgtaccaattggtggattttgcagagtaatgttccatttacgtcgtagtgaagataactagcgtagacgagaacttaggagagaattttgggtccaattcgctgtcttggatcgttggtctggcagttagggatgtcaagtaagaattttgggtccaattcacggtcttggatcgttggtctgacagttaggaatgtcaagttgacagatgcatgtattcataatccgtttggaacgctgcaggatcggggaatatatatcagcggatgtgcctagacagacaagtgatctgggacgtggtttcagttcaggctgcagagaaagctaatgagatatcctgcacctagaaacctgcttaagtgcgttgatggcatcctgtccgtgtacagcgaacggccgttgattcccaaaggacagcagcaaacacattcggggtctcgcatatgaccgctcagcatggcactaggaggactgattggcacggcacggtaagaacatggcacgacaaatgtgcctcttagccgtgtcatgccagtaccggccctaagcattacatatgtaaaccctaaaatataattttaagaagtttaggtagctcttttgttctttgacaattaatattagagtttatattagtatgtgttttattattgagacatgttcc

SEQ ID NO: 40749 - DNA, 389 bp, Zea Mays
acttttattagcaattactaggtgtaagtaaataccaaaccttaataaaagtaatagaacaaaattaataaataatcccatgcaaatgcaaatgacaaattgaatttaggttccataaattaattatgtgagggtccgagccgctcatgaccatgagcacggctagtatactagttttacactctgcagaggttgcgcatctttacccacaagtcgtgttacccacctgccaaggggtcatgagtctcatacacctctaccgaggaggcgaggcagggtaacactacgaggcctttacaaagttccactagcttcagaaatcccgctacagtttataggaagctccaatgcaggaatcccttgcaggaccgccatcgcagcaaaatcct

SEQ ID NO: 40750 - DNA, 1437 bp, Zea Mays
gggccaaaacccactcgcttccgttcaccatggggccgccggtccaaattcgcgtcacggcccaaaacagtgaaaggcttgccgagccagacagacggagtgcttccagttgcagccaagccaaccgaaaccgatggcgtcgggctcccgcggcggcggcgggagcgacttctccgtggtcgtggtgggctccgacgccggcgccggcgcagcgctcctcgttccctccgaccgccactcgtggcacgactgcctcgccgaggcggacgcctgcttctccgacctcgaggagcgccaggtcgtgcgcgtccagggcaccgatcgggcccgccgaaccatcgtccgtgtcgtcggcaagttcttcccgggtgcgcgaatcggccacgtatttgctccccttacagctgcagttgctcggtcaggcgtggattgctatgaaaaaaaaaaatgaatagaatgagatttaatccctttcgatctatacgcaaccgaatggttttgtcgattcaatcattgggaatgattcatgcgcgtatagtgtaagtatttgatgatttatttaggtgtgagcttgccggttgcaatcctacagtaacgatcgatgctgcagattgtggaatgcggaccaaccaacttctattcaatggatgctccagcaattgacggtgaacgtctgaaaaagtatgtgttctacaaactccgcaccgaattgcctgtgggtccattctgcatcttgtacatgcacagtactgtgcagtctgatgataacaaccctggagtgtcaatcttgaggacaatttatgaggagctttcacctgagtacaaggaaaggcttcaggttttctacttcttgcatcctgggcttcgctccaggctggccatcgccacacttggcaggctatttttaagtggagggttgtattggaaaatcaagtacattagtcgactggagtatctctggggcgatataagaaagggagaggttgaaattccagattttgttattgaacatgataaggttcttgagcaccggccactcactgattatggcatagaaccagatcccctacatcttgctgatgtacctgctgaggaagtggggtactcgcttggaagatacgaagataaatggactccagaagatcgatggtattcagggaattacatgtgattttttctgctgtcgctgaagcctaaaagattattattgtatagtaacacgataatatgagatctgtatgtcagattgctgtgaaaacattggcaaactgtgtttccaacttcatgattcaaattcttttgaggggaaaaggctatagggaaactcctacaacggaattttattaaaaccttttgtaatgaaaatacgattacaaggggaaaagaggacaagaaaagaagaagtttcttgtcatcgtgaatttagccaaatcaata

SEQ ID NO: 40751 - DNA, 3577 bp, Zea Mays
ctgctaccccaaatacgttttttcccttcaaaatttaccctttccagttttcttaagtacttttgctgttttctttttttccctctgacctcaaattaccaaattacccttcatgacctgaacgaagtctcagcattatttttccgtcttctcttaagttctcgtgttctgtctctatccatttgtttactcccgatccccatcagccatggcgataaagtgagggttccaggcggccgccgcttcagggagggctcgcggcggagacaggctcggcgctcgcgcggtcggcaggagctcgcagcgggcaagggctggctctcgggcaggaggtgctcgcagcacggtgctggcaggggtggctcgtggcgcaggcaaggagaagctcacgacaggggcggctaagacttcggtgcgggcacagttgcaggttgcagcagccactcgttgaagatgtttccctctgacgtcgagttactatgaacaattttgatcacttatgtgcttctaccggtagagtgaagaccagaatgacaacataccgttggatagcagagaagtcaatcccatttttgaagaaggatccaaatatgggcgcaaaaaagttacaagaggagctagaggataaatataatgtgaagctaggatactcaacagtgtgggctggtagacagaaggcggtggaacaaatatttggaacatgggaagaaagttttgcagatttgtataggttcaaggcagagattgacgcaaaaatgcctggaagtgttgtcgatttagaggtgcaggaggaagaggatggtgtgtattttcgcagattcttttgttgtttcaaaccaagcattgatggttttctgaacggttgcagaccgtttttgagcgtagactccacagcgctcaatggcagatggaatgggcagttttctgaaaaggtaaaaccgcattgcaatttatcagtttgataatttttgtacaatggagagaccacattatttttcatgtgcaggaagagtcacgccaaacaagggcgaccattaggatcagcaagtacttgcacgcccaaaaggcaaaaagttgtgcaaaacgagtcaactaatattagtccggggcctgttacaagaagccaatcggcgttatcaacgattggtgaaggctcaagccaggaaatggccacacccaaaaggcaacaagttgtgacaaatcaatcaactaatattagtcctgtccctgtcacaaggaggcaattggcattatcaatgctcgatgaaagcacaagtcaggaattggccacaccttcgagggcaaccaaatccccttccaagcctacatcaaggattgcaaggaagatcactccaagaaaattcaaaaagtgaatgtttttgtgtctacaaaactatgatattggatgcttttgtaatcttaattaattagaacggaggcatttggatgatattttggcatatgtatggattgttgacattaaacttgttattgtgcttgctgttatgcttctgtatgggattattgacatttggatgacatttgggcttaatatttaaatcaaacttgctattatgcttgaacgtggtgcacatgtgtgcacgttgctacaattttttaatgcatgagtttgtattttctaccatacctattcttctttttttacattttttattcgtaatgtcttttatactttgggcaaactctgattatactttgggcaaactctgatgtggatgaggaggaccaaacggcgcagctctaatgtgcacaagcagaagggtactttggtcatttgaggtcagagggaaaaaagaaaacagcaaaagtacttaagaaagctgaaaagggtaaattttgaagggaaaaacgtatttggggtagcagccgaatggctaacgtactaagggataaagtctgaaaggctaacgtattgaggggcagcagctgaaaattctctatattaggccccgattctgatgaggcccatatgtcccggcacgtaattacgagcacctcccagtccgacctgttcggatacggagcccacgaggccacgaacgaagccctaatcatccgctccaaactccccgcaccggcagagatcagccgtccacgagagcatcacggctagggtttccgatttcaactaggacccctggatctatgattctatgaaccagaggcgagacgagtggccgcagcatcaggaccgtctccaactcgccagtactcagccgccgcaatcagggacagggagctcgagcgcgcgccccacctgcgccgacgcgatgcgggccaaggtatagggacattctgttggctgtcatcgtttcatgctacttcaagttgtttcttttcacaatgatggtttgggagtttccatcatctgttatattcatcgttgaaatgtttgttttctagtcagtgggatgcatatatacattagtaacagtcttggtaagtacggcacgcttcttgcataacataaattgagacatttatttgagtattcttagaccttttctaggtgtaaggatgcttacacataaaaaacattcatggagcgagcataggccgtggatagcataagataaaactatgttagggttctgtgtagcgtcaactgacatatggtcgtagttttttctattagttctgccattttttcctacgaacatatatgccatggttagatggaaagggccagatgtcttcagttcagttctgacgtcaaatgatcaagtccggaatattggcatgcactttgtatcctatataattatttgatcgatcttggtctcactcagcgtctacaatctacatcgacgtcttctagagttttctgaaatggtagtgtactagtgtgaagacatgccccatgttaaccgtgttgccttaattttttcttcaattttttctagatgtattgatggcttccttctgtactgattttgtgacaattctatttctttatttaggtgtaagttctgttcaatgttgtgagacctgagtataccgtttctttgcagttgttccgcagtttccaaaagcccattgtttcgtggtctgcttactagcgcatgcagcaaaatacttgacccagcgatggatccttggaacgacatgagcctactcgtccacatcatcctcgagcttcaagcacggccctaatcttcggatggactgttctggtgcttctagagacgtttaggtatattgtgccctgattgatgagccttgccatttcctacccagaaaaaaaaccaaattagagttgcttaatgattcaaacaaagctgcttaatcacgcaactgatttaatagtagggctttatataacgagaggggagaccatatgtctctaccaagatacttttcgtgtactcatgttacagtggtttggacttcatgctctaacaatattataaagtaagaccactgcttcacctgttttacatctcccctctcgggacaaaagaaattggattcttgtgtttttgcagataggaattaatttaggctccctttggaacaaaggaaagaatatagaaaacctactgcccctttggaaagt

SEQ ID NO: 40752 - DNA, 2742 bp, Zea Mays
cgcttcttcacgtcccccctcaatcacatcaccggcactccccattgtccttcatctgctgcctgctcctccgcgcggccatgcccgagctcgcggtcctcgttctcagccacgcgctctttcacgcgcgcctccgttgccgctcttgctcccagactttgccgtggccctctcccgtctctcattggcatttttttatgtagggttactcacactgttacaagggtcattcagcgcctgtcactgctctggctgatagattgcttatggatggtgaatctaaactgcttgcaagtggagggtaccaatccaccttccctacccgtccagctgctcgatgcctctgaaattgatggagcgatacctagcacgcggtgcatgttgttctgaagattctgctgctgttggttgccattcaccctgacagtattgccagtggcaccgtcaactatttcttccctctccgcccgagcctgcagatgaatgtttgacggcacttctcgcctactgtcctcactggtgtttccaaagtctgcagtgagttcggtctcagctctaattaacgaggaagtcatgctaggcaccctctggtcttctcgtctccaaccaaccactaccggcgtgtggatgatagcaggttatctgttgcgtggcataaatcgtccctgttggtgagctgttccaaagactcaaaggttaaagtttgggacacagtggctccttcgagtggttcatcaccatgtgtaggcagtgctcacctcaactcaaacaggccaccaattgctatgaaatgccatgaatccctttgctatattgctgctggagctcaagtgacagcgattgacttgaggacaatgaagaaggcttctgtccttgcactccagaaccacagaatactttcttacggatacgtcaatggctgtgcagtccaaaaaaatgaagagaagggaatttgacattgtcgttcaagcttcaacattgatcacttattggttttcaggaagtctttctgaatgtcagttgctataggattatttgaacaacatctcttccaatggtgatatattttatgatgctcagaatgatttcttgacacctgaatgggacagtgagaatttacaagtggtactgatgattctatccatgttcaaatcatcaagatagtcatcaggttccttcagtaattcaaaccatcactaatcccttctgacgggctatatattctatcggaccaggcacaactatccaaatttcttttctatataacaaacgcggacgtaaagttgctcaaccacgctgtccacgtcgctcctccgtttcccagccattggatcggcaaccaacgacacaagagaattccgtgcgattgtttcttaacgtgaagtttctggacagcgccggacagatagagagaatagaagaatatacacatcttcttcctctcgcttccaaaggtgatgccttccacggagaggagatcgtgcgaccatgatggcagcgactcttgattttgcccatcttcccacgctcaaacggataacagtctccttccttctgtctcttccaatcgtctcttcctagttccataacactctcacaacacgctagcaggacactcattctctcaatcggctcttcccgctgcgctacacgccaccaagagcctccccaactcctccccgtcaaacggcgccgcgtcgcaaggagcacaaccaccccccgtctccttcctcagacgctgtcgcgtttctcgcgcggtgcgccccctccctgaaattcttatatacagagcaaggagcaaatatgggattccatgatgtccacgtcgctattttttgacggctcaacttgattgtgccgtgaattgtctgttagctagggagtcatcatttctgttttggcctctaaaataacgtttacagctggaaccgaagtatgcttgacaaatgtaagcagaatattgtcaattgatgtttccttctgcgctattgaaaggaatttacaaattacgtcacattagcaactggtaataggtatagtggccatccaaaatttttagtcccaaattctaaatgttttgtttgacaaatataagaacattttttctaccccttgaaaggactaaatatgggtgtgaggcaaagaattcatcgaactgataagatccaacatattttaataggacgtctatgtggccttcaatggtagaatgataccaagggatgtgatggagctctgttccttttaatgtagggttattgcccacggaagcttaaatacttggtgctgaactgctgaagtatgatgtctcactgaaaaacaacgagatggcaatgagaagtgttcaggaagaggggtaatatttactcagagcagcaaaggtcgccccaccaagctgccatgatattcctccacttaccagtgtttcaaattccaatgacatcaggttgaagaaaggaacttcacacatgaaaagagacgatccggacgaccatgaagattaaacgttgctgttaagaaaagccatattttctgtattgcttctaagctgttttatggcctttaaaccaatacttttgcttggcatatatgtagctataactattgtaatataatctctgagcttctcatgctgctattcaacatatcattactcctaccaatatatgtacagtttcagttgacttgcttgctttccgttcttgccttatcaagctaattagctaaactacaattcagttt

SEQ ID NO: 40753 - DNA, 3711 bp, Zea Mays
cccacgacgacccacgacgcctgcgtcggccctgcccgaactggcgtgcagagcagtgctccacgacgccgccaccacctgccccagcagcggcacgctccgacaacggcgaccatggcggtgcgggcgcggcggctggggagtctgttccctgctagatccagtagatggctgactcatcgaggccctccgtgaacatcatctgcgccggtcgtctgctcggctgcagtggattaggaggcttggtgtggaggcgctcagcagcgggtggaagttcccgtcaaggagtctgtcccgtcaaggagaccgtcgtgccctggacggagtcagagcaagagtcgatcaacattttcctcacgatgattgagcgacacaggcacaattcaccatgatcccatcccccactcaaacctgcaaaatcctgtagccgaacatctcgatggtctcacgtgccattcctttctacaggaataggcctataactgatttcaataagtttatgctgcatttcattcagtgtgtttggatgcatatagagaacacgaagtttaatgtgtttggtgcataatgagaattgaggaaatgggacattctagcatgctatgtgaattgtgaaaggctatagattaatgtgtacagcattttttatgttggaactgcctacatttatgttggtgccgctcccacgagcgcaccaggacgccggcttggaggtacttgcacacaagggtcgagctcggacgtcgtagcggtgcggagggcctcggccgtagcatgccccgccccgccgcgcatgcctgcgcggtcggtgtcccgcagcacccacaccgagtggcctgtcttcaaagtcgtcctcatcctctcctcctggctcaacgagaccatcaacgtctggatgttcatagacctgctcgggttcatgctgttcttcgacctcaccctggtgcacctcggccagtacttcaccaaggtgtctggtatgattgggcacctctcctgctccggcgaccgagctccaaccagggacgtctagcgctagcgcccaggacgcacgaccccctgctcctctatcctcagcgccgagcccctccgtcctgtttctggcagcgaaagcccagcccctgcggcaagctacctactcgatggaatgcccagccgcttgtcggatctacgcagcccctgcgcgacgtcacaaactccgaacggttatacgcgcctcacacaagcatgcgctgaatttctcgctttcccaaccctatcgttttttgggtgtgtatggttttcccaggcagtcaggcgggataacaagcagaggtttagtctgttggaggaagatggcgagctgttgatccgggcgaaccagggacacacactaaaaaaatatagtctggaggtgacctcaatgtaattcaattagtgatggaacatttgggagtctactcattatgtatttcttctatctggaaaaacactcaagggatctttgtttagaggatggagacctaaatctgaccgaccttcattggtggataaatatgcagaaaaaggtatttctgttttttgagaaacaaatgtttgaaaataaattaagattcacaatagtaatatatccgcactttttgtgttatgtgaggtggagtcaagtggaaagatgatcttaaatatacatgttgtcatcttgtatggtgattatgtagtaaaattgatggcaagaaaactactggttactatgactaacacaaaataaaacgttctttttaaaaaaaacttgggtataccgtatactgttattttgatactatggcacttctgtcatgttatatgttttctaaagaatgcttccctgaagcagaacagtcatgttcattatatttcagttatgcatcagtatttgcacttgctaggttgatccttgatttctatggaattcaagtgttggacggatatgtacttatggactagctcagttttggagattagttgttttagttgtttttgtgtcatgtcttctataaagcaaataagttaccatggatcaattttgtgtcagaaggtgactatatcatctctgacaattggaatttcagttgtgagaagctttggtgatagatttttgatatatttctggtttgccactttgtttgcttgtttttttgcatgttttgaacttgttttattattgttaggtgaagcttcaattgatgatatattcttgtcagtatgctctttttgtgcaccttgtttttaatctctggcagaggagaccttcacctaaaaaacaaagatatatgttgaaatggttctttttaaaagattgcaacgtgatccgggtgtcagagattcagaaggtcttggacatcgccgacgagcgtagcctcattgacaccatcttcttctgctacctcgggtgcaatgcaaggttcctccaagagaatccagagtatgttgcacagggtgtaactttagctcagttttcgttccagatacctatacctctgcggcaggactatgtcaaaaagaaaccgaagttgataaatgcaagtgatgaagcaagtacaattacctctaagtcttctgaaccagacgaagtgaaccctatagcctgggcagttcctacaaaacatgagggcgatgccagtgaagaagcttctctcgccgatgagacacttgcatcagaagtagtgctaacccggaagaggaaaataggaagctctttgtcagtagagccaaaccatctctctgatgaacttgaaccaaagttggaggatgcttagaacggggagacgtctaactgaaaagtaaaagtgggcagcgtcgtgatgccaacttacccccctgccatggttttattggtcctctgcttgtttctcgttttccttgggagttagcttctctgttttatgtggtcgcacacggccttatttgtagtattacaccacaaaagctggctgacccccactgagggagggtgattgatgcaagcattgtgtatgatccttggacaagggaatcacggatgtttggttttgtcaccatggctgctactaaggaggcagatcactgcatcaaatatctggactgttctgtgttgcaaggtcaggtcataattgtttagaagtactctacacagaacattttattgttttgtcttcaccaccgagaatccaagagcgcctcccatagcctccacatccacaaggtcctgcttgactgcgacgacgtccaggctgatgccctcatcgtggatcgactcgcctcgctctagaaggagtggcccctctggagttgaatatgcagttataaccaatttttaccccttttatcctagaagagttgccaagacacggtataagaccatgataatagactaagagaggatttgtctctaattattatatgttttatttatgcagtcccatgagaactttgagtatttgcagattgatttattaatatattaaagttaaagattgtatgtgttgagtatgtatccattcttgttggaagtgtcttgcaattccaatccaaggatgtataaaagactgcatgggctaagtatgtgttttttcatgtatttggagtatatatactttttgttgcttgagaacatgtatgtacatacatagaagcttgtcaattgtgtgaacttgagttgatccctgtctaacctgagtatatatatatattttgttgcttgagaacgagtatgta

SEQ ID NO: 40754 - DNA, 2637 bp, Zea Mays
tgcttgcttggaccattcggtattgcaccctctcgctgttgtagcggctgggaaatctcctctattggcgagttggtaacacactatcgctacatcatatgcttctgtccaagctatataagccgccgctgttgtacgccgcttcctccatccactagctgcccggccggccggctagcggagaaacagcccgcccgctcgcctctgcctctgcccctgcacgcccaagatcctcaggccgggccggccgcgtggcagtgccgcgcgcgcgcgagagcgagagggatccatgggcgtctccgaggaggcggcgcgggtgtgggcggagctgcccgtgcgggtggactgggcggccgcggcggcgcaatgcgcgtccctgtgggcgcacgcgcgcgcgctgctggtcgcgccagcggtgcgggtcctggtgctcctgtcgctggcgatgaccgtgatgatactggcggagaagctgttcgtctgcgccgtgtgcctcgccgtgcgggcgctccggctcggcccggaccggcgctaccgctgggagcccatcggcggcggagtcggagacgaggaggaggagtccgggtccggccacggcgccaagtaccccatggtgctcgtgcagatccctatgtacaacgagcgggaggtgtacaagctgtcgatcggggcggcatgcgagctggagtggccgtcggagcgcttcatgatccaggtgctggacgactccacggaccccgttgtaaaggatttggtggagacggaatgccaaagatggaagagcaaaggcgtgaatataaagtacgaggtgagggggaaccggaaggggtacaaggccggcgcgctcaaggaaggactgaagcatgactacgtcgaagactgcgagtacatcgccatgttcgatgctgacttccagcccgagcctgatttcctcctaagggctgtcccattccttgtgcataacccggagatcgccctcgtccaagctcgctggaaattcgttaattctggtgagtgtctgctgacgagattccaagaaatgtccttggactaccatttcaagtatgagcaagaggcaggctcctcactgcattcattctttggcttcaatgggacagccggtgtctggaggattgcagctatcgatgacgccgggggctggaaggaccggacgacggtggaggatatggacctggctgtccgtgcgatgctgcagggctggaagtttgtttacgtcggcgacataaaagtcaagagtgaattgcctagcacgttcaaggcataccggtttcagcagcacaggtggtcttgtggaccggcaaacctgttcaagaaaatgatggtagagattttagaaaacaagaaagtgtcattgtggagcaaaatctacttatggtacaatttcttcttcgttgggaaggtcgctgcccacacggtgacattcatctactactgctgtgcgatccccgtgtctgttttgcttcctgagattcagatacctctctggggagttgtctatatcccgacgctcataaccctcttgaaggctcttggcacaccaagttcgtttcacctggtgatcctctgggttctgtttgagaatgtcatgtcactgcaccggattaaagctgcagcaagtggtcttctggatgctggtggacgagtcaatgagtgggttgtcaccgagaagttgggcgacaccagcaaggcaaagcctggcgccaatggatcagatgatgtaaaggtgatagatgtaaagctaacagaacccctcgttcccaagctagtgaagaggcgagcaagattttgggagaggtacaactgctcagaacttttcgttggaacctgcatacttctgtgtggtttctatgacttgctttttgcaaagaagggatactacatttttctcttccttcaaggcacggctttccttgttgttggctttgggtatgtcggcacactacctcattgcaatgcataagctggcatggacaattcatataccttcttactagaaacagatcaagcaaagttcctctctcctgcccatatggaacttcaatgatagttgagcaatattcccatgatcagtcttggccagacatgattcactgccaagaaggttgttcagatgtcgtcgtcactcttctgtcagtctttattgtcaagaaggccattcaaatagtgtcaccgttccaaatttataataacagtgtttactgaagcatcatgacatacaagaatgattggtgcagcagcatttagtaaacatcccgtagagatgcagttcacagtcgtgaaagaactgcagctgctgtaaatggaatagcaccagttgccaatttctgtagatctccgaacttttttttggaaattttgtgatattactcagagttcagatcaataatggaagattgttggcttcctcagttcataacctgtgtatgcttaaaacttgtaaatgtaaattgttattgacactaataattttgtcgaacccaggcagttcttgaaatgcaaatgtagcatgcaaattttttttttgtcctgtaagaagccaaagatgacttctgggtaacacgtttgatcagacattttccttgatgtagcacatggattagaggatatatttactat

SEQ ID NO: 40755 - DNA, 2117 bp, Zea Mays
ctccaaaccccctgtggccctgtcaccgattccctaccctcaccgtcgcggataattaataaataaaaccccaaaaagaaatatccaaggccgcgccgtgcgcgcaatccccctcgctcgcaccatggcgctgcagctccagctgccgcggccgctcgccgccgcacggccctctatcctcctcccttccccagcccatggtgcctccgcttccgcgaccccccttcacgcccgcgcaggcggcgttgcgttttcgctccagaccaacgtgcgcctcctcaagcccaaccgccgcgtccgccgctctcgggacccctactacgatctcgacgaggacgacgaggaggaggcggagttcgacgaggacgatgaagacgacgaggagggctacgagagcgatgatgacttgtcgggtttggaatatcctggtgtactttattcaaacagccctcgtgcttcaagcaagaaaccaggtatcttaagtgttatgctaaatctatttagaaacagtggtcacttcgtgcttaaactctaatactccaggactccaaactccagtggtaaaagaaaactgggaaggaagacaaaccaaaacccatgacaaatacggtagtccaggaagaagtaagtccatgcatcctaggagtaaagtgggacgatcatcaacagatcttaagaacatggacagagaagttgagttgaaaaatgcaagtatctctcgaagtctgttccagaaactacaagaagaatatgacttcgatgacaaatggttaccactgattgattacttgtgcacctttggactaaaagagtctcattttacttacatctatgagagacacatggcctgctttcaaatcagtcaggcttcagcagaagaaaggttggatttcctgctaaatgctggggttaaaagcaaagatatgaaaaggatactggtgaggcagccacagattctggaatacacccttggcaatctgaaatctcatgttgattttctcgtgagcattggagttccaaatagacgaatagggcaaattatttctgctgctccttcgatgttctcttacagtgtggagcagtctctgaagccaacagtaaggtatctgattgaggaagtaggtattgaggagagtgatgtggggaaagtagtgcagctaagcccacagattctggtgcagaaaattgatagtgcatggaaatctcgatcgcttttcctgtcaaaagaactggatgctcccaaacatagcattgttaagatggtcacaaaacaccctcagctgcttcactacagcattgaagatggaatcttacctcgactaaatttcctgagaagcattggtatgagaaactctgacattctcaaagtattgacaagtcttactcaggtgttatctttgtcattggaggacaatctcaagccaaagtatctttacttggtcaatgacctcaagaatgaggtccaatccttaacgaaatatcctatgtacctgagtttgtctcttgatcaaagaatccgtccccgccatcgttttctggtttccttgaagaaagctccaaagggcccatttcctctgagctcctttgtgcccacagatgagcgtttttgccagaggtgggctgggactagcttggaggcataccatacattcagacagaggttgctgctaacaagtttcgcagagaagtctggaaggaaaacactagtctcaagacggtagatgcctaggtggtgggagtttgtttctcttgagcccacgctcctaacaggtttatactgcatcattaactatagcatatacttatcgtccatatcacctccctaatggtgaaaagtcttcaccgaattccctcaatcagctgcaaatggatgacaatctaagagaaatgcattattgccagtcgccagaatggttggatggacacttggttacctagctctaggagtacctcgccttgacggctaaaactgttgtgcagtcaagctttcggtggaatcgccatgcaaccaaactaccaagtcataaaaagtttccaaaaaaaatatagagggaggttccagttactgaagttatatgaccagtagggaggtcgagcctcgtctactgccttcgtgc

SEQ ID NO: 40756 - DNA, 1767 bp, Zea Mays
aggctaaccagtttaccaatctgacgccgtcacaggtcacaccgtctttactagagagagcgccaatcctccccatcccgaccgccgcccccacctcctccgcggccgcctcgcggcgattccgtccgcatctgaccccgatcccaggggcatcgtcctcacctcctccgccagctgccgctcttccgtcctcttccgcagcttctgcgtggggaagaggcggtggcggccgaaccagcgtagtcgtcgccgacgccgctgccagccgccatggaggcgtacaagctctgggtgcgcaggaacagggacctcgtccgatccctcgagtccctcgccaacgggctcacatggatactccccgagcgcttcgccaactctgagatcgcaccggaagcagtatatgcactactgggtattgtgagttctgtcaatcagcacataattgatgcgcccactgagaatcactcatttgcctccaaggaacaatctatcccatggggtcttgttgtctctgtactaaaggatgtggaggcggttgttgaggttgctgcccagcactttgttggcgatgatcgcaagtggagctttcttgctgttacagaagcagtgaagtgtcaggttagctgcttttcgggagagtggatacaagatgctcttacaaggaggggaggtggtaaatgaagaagaggtgaccgttcttgaaaatagttatggagtaaatggtaatggagtaccagccatctatccgatggatggacatgcagaaaatggtcacaaaactatggccaagggtctggatggtaaaaatggatttgtatctaagagtcttgagaaaagagcagtagctgctttgaacaaatttggtgagaacgcaaagatgatgtctgatcctatgtggattcggaggctccaacctactcctgagccaactgtgatggttgccgagaagccaactttggcaagtatttggtctgctaaaggcggtactgggcgcttgtttgttttaggggaggttgttcacatattcaggccacttgtatatgtacttctgatcagaaagtttggaataaaatcgtggaccccgtggctagtgtcgctagctgtggaactcacaagtctaggcgtccattcccatgcaaccgatatgaatcacagattaggaaaagtgcatcagctcagttctgctgagagggatgagttgaaaaggcgaaagatgatgtgggctctttatgtgatgagagatcctttctttgccagttacagcaagcgtcacctcctgaaggctgaacaggttctgaatccggtgccattgattggcttccttacagggaaacttgtagagctactggaggggattcagacgagatacacgtacacatcaggttcatagagatggccaatctgagcctgctgctcgcctctcgatttgccctggcggacatgtgctttgtgcgagttggttgatggttaatggttaatggctaggaactggtgcttaatcctgaaacccgtactgctgtttttcttgccaactgtggcatcgtcgtcttgtggctgcgaagctgcagccacctcgttcgtgtatggcggcagatgagacaattcataatctaagtatatagatataaatagtagtattaccggtttgtttgtatttacgatttatcgtgaactgatggaacataatgtgtatacagcgaaaatttatctgattccaaacatttgttgtttaacagcgaaaattggatgccacatgccaaatgccag

SEQ ID NO: 40757 - DNA, 1890 bp, Zea Mays
acgacagtcagtaatttctccttatatagccgagagtcgggccgtgctgtgctcgaggacgcacgtaatccccaatcgcccaccacttcgatctactcgagcgagccctagccccgaatctccccggtgcatcaacaggctccgtctgcttctgctgattcccggatcgtctcccccgacgcggctgcgctcacggcttccgccacagccatggagccgcgcatcggcaacaggttccgcgtcggccgcaagctggggagcggctcctttggggagatctacctcggcacgaacgtgcagacaaacgaggaggtcgcaattaaactggaaaacgttaagacgaagcatcctcaattgctttacgagtcgaagttatatagaatacttcaaggaggaactgggattccaaatgttaagtggtttggtgttgagggtgattacaatgttttggttatggacttactggggccaagccttgaagatctttttagctgttgtaacaggaagctgtctctcaaaactgttttgatgattgctgatcaaatgatcaatcgagttgaatttgttcattccaagtcattcttgcatagagatatcaagccggacaattttctcatgggtctcgggaaaagggcaaaccaggtttacattatcgattttggacttgcaaagaagtacagagatacatcaacacaccagcacattccatacagagagaacaagaacttgactggaacggcaagatatgcaagcgtaaatacccaccttggaattgaacaaagccgaagggatgacatggaatctcttggatatgtactgatgtacttcttgagaggaagccttccatggcagggcctgaaagctgggaacaagaaacagaagtatgaaaagatcagcgaaaggaaagttgctacttcaattgaggctctctgccgtggatatcctaccgaatttgcttcttacttccattactgtcgctcactacgctttgaagatccaccagactatcaatacctgaagagattgttcagagacctttttattcgggaaggttttcagtttgattatgtttttgactggacaattctaaagtaccaacatgcacagatgaccacggctccgccacgtgcaattgctccagcagtaggacaaagctctgggatggctcctgtggcaaacaacaatagacattcaggcactgaagagggaaggagaagcgggtggtcaggtgtggacccaacgcgacgccaggctccaccaccagttataaatgcaggcagcctagccaagcagaaatcccctgttcggcctgaggcatcgacatccagagatgctgtgttcgactcttttgggacgctcaagcggatcgtcaaggcgctcgtcttccggcaggcgccactcatctaacccgaagaactacgagtctaccataaggggaatgcagggcctaaactttgacggcgatgacagggttcactattagcatctcatctctttgggaccttggcagggagggtgcattgcgtcaaggcccctcgccgacatggcctatgtaccacgggcggctagacaataaagatgtctgggtgagtgagcctgagcatagacaatggctatgctgctttagcctcccttcccttgtacaggtttgccatttgtttggttgcgcggcgtcctgtgtattttgagttgagattcacatttgctgcgatgtgcgtatgctgctttggttgattcaacgattgggcttttttttttactctctctctctctctctctctctctctctctctctctgataatgttatgttgcccgtgacagatctgagaatgttatgtcatgtgtaactccggaatgctcaactgttatgttttggctgtgcctctgag

SEQ ID NO: 40758 - DNA, 1482 bp, Zea Mays
ttatgaaacaatccaagttcagtgccttggctgggtttgagtgctggcgtgggtcaaaagagcagcaccacgtgtatacctcatgttgtgttggcgcccttggagctctcctttgctgtgttctggccagctcaagaaccactgcatctgccccctataatcagtaccttgggctgccgtattcagtgaagatttcttccttgccctcaaattctagtcaaagttcactgtttgagtgtgcagtccttgtgtactgctggtataaccctctctgcatcctaggtttgcctgtcccagaacccttctccccatggactagatacgctcacttccccatggactagatacgctcactgacacacccctttcccttgcttacatattctgtaatttggggctagttattttggagctcctcactgcccttaaattccagccaagactctttgcatatgcgaggtgttcctgatgttcttaagtctacacagcttcctccctagccaccaaaatttggtctgtacagaggctgggcacaccatcaactgttgttgtggtgaccactccggtcagtttgccgccttgccgtggccggagcgattcaagaagggtcgtgccgtcgtgatctagcactgcggacagcctccacgctggccgagcaactcgcgctttctccagctgttagacaacagccgaagtggtgtttgaaggaggagtctactccagtggctgctgatcaagtggaggagccatctaactgggtattggatagagggatctgaagcctcttctctgcaacaaaagtaatcaggagtgttctaggtgtctctgtggctggaagatgcttctagtcttgaaggaggattagttaggtttaggtgtgagctttggaagggttctaccttcctagttttgtatgtaagttatgcactttgagtatattaggacttgtaataaatgtaactcttcctatgtaataaccttcatttttagaaatgataagaatattttgtaaagtcttccgctcttatctccgaagtgtgtgtatcgaatgtgattactgtaatatgcatgtatggtgggagatccttgggatgatgagttcaagttgttgaactcatgatagccttgtcaagttacctggtacacgtgcatagccatctgaggccatctgggcaaggattggtgcacgtgggctcgataactcgggagggctgtcacagaatggtatcggagcgatcccccattagcatggatattaaagtaatcctttgatagacttcaaaaggattttgagtccaaattattttggaaaaacttaagaatgaataagcaaatcatgatagtagaagtgcaaatagtatatggttaatactaaggactataatatggcttaatttaagatgctaaccactaacccgcaactataatgcatttttttgcaggtacacgaactaaaccctatgaaagtgcgactagtgatca

SEQ ID NO: 40759 - DNA, 3496 bp, Zea Mays
cggcaaccgcgctggacgaggcagtattgctaagagtatcttgccatggcatctcctgcttccgtcaccaacctcggaagcaatgggaggtctggcccgctcccggctgcagctgcaaggagggcgcagttggtcacaaggatcagattcacggggttcgatggcataaggcgatggcagtatgagcctgggaggctttgcaggtgtatggtcgtcactaatctgattgaggagaaggttgttcagttctcgtcaagagggagtgtcagtgtgaaagctgatgatgacaatgatctgcttctgaagccgccacagaagccagtccggtcaaatggacccccggagagcatgaaaacagcatcactgccggatcagaagccagcaggggcaactttagacgacagagagaaggtcagagagtcactggacgctgtattggagaaagcagagaagcttgaggcctccagctttggtaatgcagatggtggcaaccttggttcaaggcagagtaatgtttccatgagtaatggtccaggaccgacagcagtggaggaaggtggtaattcaaggaagacaaaaacactaaagagtgtatggcggaaggggaaccctgtgccaactgtacgtaaggtcattagagagcaaccaagaactgaaacaaggagtcagtctatacctgtggctaaaccttcagtgtcatctgcatctaagccttcccctctgctactatctaaaccttctgtagcacagcctcctcgtcggcctatcaagtctgatacatcaaatgagaaaaaaggacccatccttattgataaatttgcttccaagagggcagcagttgatccgattgtacctgaggaattgttagaccctctaaaaccagtacgaggcccaccagcaaaagtcagagttgatcgtcgtaaaaaaccagacacacaagctggttccagacgacgtatgtccaatgatgatggattagttgatgaggatactactgacgtgccaatttctggtgttccagtgcgcaagggtaggaggtggagcaaggcaaaacgccgcgctgcaaggctagaggctatgcaagctgaagagccagtcagagttgagatccttgaagttggtgaagaaggtatgctgattgaggacttggcatatgagttggcaattggtgaatcagaaattttacgattcttatcggtgagaggagttatgcttgacaatgttcagactctagataaagatttggttaagatggtttgcatggaatatgatgttgaagtactagaaagtggtcctgtgaaagtggaggaaatggctaagaagaaggagttccttgatgatgaagatttggataaattggaagtgaggcctcccattgtgactatcatgggccatgttgatcatgggaagacaactctgttggattatatacgcaagagcaagttggtggcatctgaagctggtggtataacacaagggattggagcatatcaggttcttttaccagtagatggaaaccatcaagcctgtgtttttctggatactccaggacatgaggcgtttggtgcaatgagagctcgaggagctagagtaaccgatatctgtattgttgttgttgctgcggatgatggtgttcggccacaaacaagtgaggcaattgcacatgcaagggcagcaggggtgccaattataatagcaataaacaagatagacaaggagggagctaatgcagaacgagttatgcaagaactttcccaaattgggataatgccagaaatgtggggtggtgataccccaatggtcgagataagtgctcttactggggataatgttgatgaacttctggaaactgtcatgcttgttgcagagttgcaagaattaaaggcaaatccacataggaatgcgaagggcactgttattgaagcatgccttgacaaggccaaagggcctcttgctaccttagttgttcagaatggaaccctaaacaaagctgatattattgtgtgtggtgaagcttatggaaagatccgtgcattgtatgatgactgtgggaagctcgttgacaaagcaggaccatccaatgcagtgcaggttattggcctcaataacgttccccttgccggtgatgaatttgaggttgttgacaaccttgatgttgcacgtgaaagggcgaatgggcgtgctgaagcactgcgcatagaaaggatatctgcaaaagctggggaaggaaaagtcacactctcagctattgcagcatcggtttcatctgcgaagcaagttggaattgatacacatgagctaaatgttatccttaaagttgattttcagggttcaatcgaggctattaggcaagccatccaaactcttccacaagaaaatgtctctctgagattcctccttcaaggtccaggagatgtgagtgttagtgatgttgatctggctgttgcttcggaaggaattatatttggctttaatgtcagagcaccaggatcagttaaaaactatgctaagaagaaaggtgttgaaattcggatgtacaaagtgatctatgatttgattgatgatttacggaaggccatggaaggtcttctcgaacccgctgaggaggaagtaccaattggttcggcaaaagttcgagctgtctttagtagtggcagtggaaaggtggccggatgcatgattacaacaggaaaagttgttcaagattgtaatgtgcgggttcttcgtaaagggaaagaagtatatgtgggttcgcttgattccttgagaagggtgaaagaaactgtgaaggaggttggtgctgggctagagtgtggtattggggtagatgacttcgatgaatgggaggaaggtgacatcatagaggcattcaataccgtgaataaggcaagaaccctcgaggaggcctctgctaccgtgactgccgcactcaaggatgcaggggtccagctgtagaattggcaacacgctgatactcttttttattaatggtatgaaatgttaatttatatatactttgaagctgaatggtgagctgaagctattgtgctgaagctgttgtgagctggaccggtggaccgtttccctgattccttcggtggtggctgaagctgaatggtgagctgctggagagtggagacgtggagtggtggccggtgggcgcctgggcggtggctgccggctggtgcagactgtgcacttgtgcagtgcagtggcgctaatatattgtgtgtggctgtggaagatgcatgtgtggatcggctgtctgtagtgagatggaagatactgtatatagcatatcaaaccatatattcatcgtatatacattaattattgatattgaattttgtcggtcaagcgtatgggccggccaagccaaactgtatttgccgaaagccgcttttgaatcgccgggagtggcaaggcagctagttggggtttcacacgcagcaggtttagattagaagtttgcacggttgcaaaggtttggtttgca

SEQ ID NO: 40760 - DNA, 2287 bp, Zea Mays
aaaagtaccctcgatctccaaccggttcaccactcaccactcaacagccctcccctctcatcatctcctccccccgcacctgcacagcctctcccgccgcgcgccgcctccgcgcgccatccagacgccagtgcgcgtcgcggtccgctgcccgcggtgcgttcaccctctccccatctcccttttcctctcccgcgcgcccttccctacgcgcctccgccggcgacgagtgcccaccagttcaatggtgccttgcttccccaactcggtgaaaaacctcggccgctatcctcgccgcctgcagttgcaagggctacctatgccgatgcaaggttcctggcaccgaaaaccagttcaagaggtagaggtaaacacctgctatcacctagttatagtttgcattcacagacctcttctgaacaaataaaccatgtaccgtcgtcaagatctcgccagaaaaggggctcaagttttgtcgtcagagctgaagctgatttctataacgtacttggtgtctcaagaaatgctagtaaatctgaaatcaagagcgcctatcggaagcttgctaggagctatcatccagatgtaaacaaagatcctggtgctgaacaaaagttcaaggaaatcagcaatgcttatgaggttttgtctgatgatgagaagcgatcaatctatgataaatatggagaagcaggtctgaaaggtgctggcatgggcacaggagattactcaaacccgtttgatctattcgagtccctgtttgaaggattcggtgggatgggtggaatgggtggcggtcgtgctgcccgtaacagaccaatgcaaggtgatgatgagagctacaatctggtactcaatttcaaggatgcggtgtttggtgtggagaaagagattgagataaccagattggaaggctgtaacacctgcgatggaagtggtgctaagccaggtacaaaggcaacgacatgtaaaacttgtggaggccagggccaggtggtctcctccacaagaacaccactcggaatattccagcaagtctccacctgcaatacctgtggtggcaccggcgaattctccacgccttgcaacacctgttcgggcgatggccgagtgcgaaggacaaagaggatcagtctaaaggttcctgccggagtggattctggaagcaggctgagggttcggtctgagggtaatgctggccggagaggaggccctcctggggacctttatgtcttcattgacgttctctctgatcctgttcttaagcgagatgggacaaacattctctacacgtgcaaggtttcttacatcgacgcaatccttgggacaaccgtcaaagtccccactgtcgatggaatggttgacctcaagataccttcagggactcagccaggcacaactctggtgatggccaagaaaggtgttccgcttcttgggaagtcgaatgctcgcggagaccagcttgtgcgcgtacaggttgagatcccgaaacggctgagcagcgacgagaagaagctagttgaggagcttgcaaacctgaacaaggctcagacagccaatagcaggagttgatttattgagcaaatctttttaggacaccatgcttgtggtcacaggcaattttgatgcaaattgcagtgatgaaaagagttggtagtggttcaacacttctacgaactaaagaggtacactggagcgaagcgtgtcatgctcatgccatatctgtggcctcgtttctaagctattggaaaccaagtcggtgaccactggacgtcttgcaatagcttaacatatacgactttattagccattttttgttacacggctttttgtattcttgagagccttaggcaaaatctctggtagtggaatcaggcttagacttttacatttcttgcagaaatgctgcaccattgatggaatatgtaagctgcaccatggaaatgtgactgcagttttatggtttgtgatgcgtcgggggtttattgttttgctcttcaagttcgttatctaaacaatacatttatttgcccctggcaggggcagctgttgatttgaagctgcctctgcgcagagcaggtgcatttttgtggtctaggcagctgttgacatgaagctggttgttctgtgtttgcaactacttgggactctaatttaattttgttcctgtatgatgtttttaataaaatcgcaaatgctttttttctgcatgcacatgcgtaaaggcatccgcatgcacagtaggcattacaaatccggttggaaaggacgaaaatttgtccaaaaa

SEQ ID NO: 40761 - DNA, 7488 bp, Zea Mays
cccgtcgcccccacccctcggtatatccgcctccgcccggcgcctccctctgcctcctctgctccgccctgccgccgcaaggatccaaaccccgaattttgctctctttttatggcactgtgcttttgagaaggcctttaattgtgctgtctgggccacggaacggcaatgtcgcagcttggattagctgcaactgcctcgaaggccttgccactactccctaatcgccagagaagtccagctgggactacatttccatcatctgcattgccgaggccctcaaaccgaaggaaaagccatactcgttcacttcgtgatggtggaaatgaggtatcagatgccaaaaagcacagccagtcagttcgtcaaggtcttgctggcattatcgacatcccaagtgacgcagtttcggaagtcgatatttcacatggacctaaggatcctagggggccaacagattcctatcaaatgaatgggattatcaatgaaacacataatggaagacatgcctcagggtccatggttgttgaattttgtgcagcactaggtggcaaaacaccaattcacagtatattagtggccaacaatggaatggcggcaacaaagttcatgaggagtgtccgtacatgggctaatgatacttttggatctgagaaggcaattcatctcatagctatggcaactccggaagacatgaggataaatgcagaacacatcagacttgctgatcaattcgtagaggtgcctggtggaacaaacaataataactatgccaacgttcaactcatagtggagatagcagaaagagtaggtgtttctgctgtttggcctggttggggtcatgcttctgagaatcctgagctgccggatgcattgaccgcaaaaggaatcgtttttcttgggccaccagcaacatcaatgaatgcattgggagataaggttggttcagctctcattgctcaagcagccggggtcccaactcttgcttggagtggatcgcatgttgaagttccattagagtgctgcttagacgcgatacctgaggagatgtatagaaaagcttgtgttactaccacagaggaggcagttgcaagttgtcaagtggttggttatcctgccatgattaaggcatcctggggaggtggtggtaaaggaataagaaaggttcataatgatgatgaggttagagcgctgtttaagcaagtacaaggtgaagtccctggctccccaatatttatcatgaggcttgcatcccagagtcggcatcttgaagttcagttgctttgtgatcaatatggcaatgtagcagcacttcacagtcgtgattgcagtgtacaacggcgacaccagaagattattgaagaaggcccagttactgttgctcctcgtgaaacagttaaagcacttgagcaggcagcaaggaggcttgctaaggctgtgggttatgttggtgcggctactgttgagtatctttacagcatggagactggagaatactattttctggagcttaatccccgactacaggttgagcatccagtcactgagtggatagctgaagtaaatctgcctgcagctcaagttgcagttggaatgggcatacctctttggcagattccaggagataagttttaaaagcaagcctaatgtttgggcctacttctcagtaaagtctggtggaggcattcatgaatttgctgattctcagtttggacatgtttttgcatatggactctctagaccagcagctataacaaacatgtctcttgcattaaaagagattcagattcgtggagaaattcattcaaatgttgattacacagttgacctcttaaacgcttcagacttcagagaaaacaagatccacactggttggctggatacaagaatagctatgcgtgttcaagctgagaggcccccatggtatatctcagtggttggaggtgctttatataaaacagtaaccaccaatgcagccactgtttctgaatatgttagttatctcaccaaaggccagattccaccaaagcatatatcccttgtcaattcaacagttaatttgaatatagaagggagcaaatacacaattgaaactgtcaggactgggcatggtaggtacaagttgcgaatgaatgattcaacagttgaggcgaatgtacaatctttatgtgatggtggcctcttaatgcagttggatggaaacagccatgtgatttatgcagaagaagaagctggcggtacacggcttcagattaatggaaagacatgcttgttgcagaatgaccatgatccatcaaagttattagctgagactccctgcaaacttcttcgctttttggttgctgatggtgctcatgttggtgcggatgtgccatatgcggaagttgaggttatgaagatgtgcatgcctctcttgtcacctgcttctggtgtcattcattgtatgatgtctgagggccaggcgttgcaggctggtgatcttatagcaaggctggatcttgatgacccttctgctgtgaaaagagctgaaccatttgatggaatgtttccactaatggacctccctgttgctgcctctagtcaagtacacaaaagatatgctgcaagtttgaatgctgctcgaatggtccttgcaggatatgagcacaatatcaatgaagtcgttcaagatttggtatgctgcctggacaatcctgagcttccttttctacagtgggatgaactaatgtctgttctagcaacgaggcttccaagaaatctcaagagtgagttagaggataaatacaaggaatacaagttgaatttttaccatgggaaaaacaaggacttcccatccaagttgctaagagacatcgtcgaggaaaatcttgcatatggttcagagaaggaaaaggctacaaatgagcgacttgttgagcctcttatgaacctactgaagtcatatgagggtgggagagaaagccatgcacattttgttgtcaagtctctttttgaggagtatcttaccgtggaagaacttttcagtgatggcattcagtctgacgtgattgaaaccttgcgtcatcagcacagtaaagacctgcagaaggttgtagacatcgtgctgtctcaccagggtgtgaggaacaaagctaagcttgtaacagcacttatggaaaagctggtttatccaaatcctggtgcgtacagggatctgttggttcgcttttcgtccctcaatcataaaagatattataagttggcccttaaagcaagtgaacttcttgaacaaaccaaactaagtgaactctgttccagcattgcaagaagcctttcagatctggggatgcataagggagaaatgactattaaggatagcatggaagatttagtctctgccccattgcctgttgaagatgctcttatttctttgtttgattacagtgatccaactgttcagcagaaagtgattgtgacatacatatcacgattgtaccagcctcatcttgtgaaggatagcatccaaatgaaattcaaagaatctggtgctattgttttttgggaattttctgaagggcatgttgatactagaaatggacaaggggctattcttggtgggaagagatggggtgccatggtcgttctcagatcacttgaatctgcatcaacagccattatggctgcattaaaagattctgtacagtacaacaactctgaggtcaacacaatgcacattgtgttattgaatgctgaaactgaaagtaatataagtgggacaagtgatgaccaagctcaacataggatggaaaagcttaccaagatactgaaggatagtagtgttgcaagtgatctccaagctgctggtttgaaggttataagttgcattgttcaaagagatgcaggtcgcatgccaatgcgccacacattcctctggtttgatgaaaagaactgttatgaagaagagcatattctccggcatgtggagcctcccctctctgcacttcttgaattgggtaagttgaaagtgaaaggatacaacgaaatgaagtatactccatcacgtgatcgtcaatggcatatctacacactaagaaatactgaaaaccccaaaatgttgcatagggtatttttccgaactattgtcaggcaacccaatgcaggcaacaagtttacgtcggcacaggtcagcgacactggattaggatgtcctgaagaatctctgtcatttacatcgaatagcatcttaagatcactgatgactgctatagaagaattagagcttcatgcgattaggacaggtcattctcacatgtttttgtgcatactgaaagaacaaaagcttcttgatctcgtcccattttcagggagtacaattgttgacgttggccaagatgaagctactgcttgttcacttttaagatcaatggctttgaagatacatgaacttgttggtgcaaggatgcatcatctttctgtatgccagtgggaggtgaaactcaagttggactgtgatggacctgcaagtggtacctggagagtcgtaactacaaatgtcactagtcacacctgcaccattgatatctaccgagaagtggaagatacagaatcgcagaagttactataccattcagctacttcgtcagctggtccaatgcatggtgttgcactgaataatccttatcaacctttgagtgtgattgatctaaagcgctgctctgctaggaacaacagaacaacatattgctacgattttccgctggcatttgaaactgcactgcagaagtcatggcaatccaactgttctagtgttcctgaaggcagtgaaaatagtaaatcctacgtgaaatcaactgagctggtgtttgctgaaaaacatgggtcctggggcactcctataattcccatggaacgtcctgctgggctcaatgacattggtatggtcgcttggatcttggaaatgtcaacacctgaatttcccaatggcaggcagattattgttgtagcaaatgatattactttcagagctggatcattcggcccaagggaagatgcattttttgaagctgtcaccaacctggcttgcgaaaggaagcttccccttatatacttggcagcaaactctggtgctaggattggcatagctgatgaagtgaaatcttgcttccgtgttgggtggtctgatgaacgcagccctgaacgagggtttcagtacatctatctgactgaagaagactatgctcgtattagctcttctgttatagcacataagctgcagctagataatggtgaaattaggtggattattgactctgttgtgggcaaggaggatgggcttggtgttgagaacatacatggaagtgctgctattgccagtgcttattctagggcatatgaggagacatttacacttacatttgtgactgggcggactgtaggaataggagcctatcttgctcgacttggtatacggtgcatacagcgccttgaccagcctattattttaacagggttttctgccctgaacaagctccttgggcgagaagtgtacagctcccacatgcagctgggtggtcctaagatcatggcgaccaatggtgttgtccacttgaccgtttcagatgatcttgaaggtgtttccaatatattgaggtggctcagctatgttcctgcaaacattggtggacctcttcctattaccaaacctttggaccctccagatagacctgtcgcatacatccctgagaacacatgcgatccgcgtgcagccatccgtggtgtagatgacagccaagggaaatggttgggtggtatgtttgacaaagacagctttgtggagacatttgaaggatgggcaaaaacagtggttactggcagagcaaagcttggaggaattcctgtgggtgttatagctgtggagacacagaccatgatgcagctcatccctgctgatccaggtcaacttgattcccatgagcgatctgttcctcgggctggacaagtgtggttcccagattctgcaaccaagacagctcaggcattattagacttcaaccgtgaaggattgcctctgttcatcctggctaactggagaggcttttctgggggacagagagatctctttgaaggtattcttcaggctgggtcagcaattgttgagaaccttaggacatataatcagcctgcgtttgtctacattcctatggctggagagcttcgtggaggagcttgggttgtgatcgatagcaaaataaatccagaccgcattgagtgttatgctgagaggactgccaaaggtaatgtgctcgaacctcaagggttaattgaaattaagttcaggtcagaggaactccaagactgtatgggcaggcttgacccagagttgataaatctgaaagcaaaacttcaagatgcaaagcatggaaatggaagtctaccagacatagaatcgcttcagaagagtatagaagcgcgtacaaaacagttgttacctttatatacccagattgcagtacgctttgctgaattgcatgatacttccctgagaatggcagctaaaggcgtgattaagaaagttgtagactgggaagaatcacgctctttcttctataaaaggctacggaggaggatctctgaagatcttcttgcaaaagaaataagacgaataattggtgacaacttcacgcaccaatcggcgatggagcttatcaatgaatggtacctggcttctcaggccacaacaggaagcactgctggatgggatgatgatgatgcttttgttgcctggaaggacagtcctgaaaactacaagggatatatccaagagctaagggctcaaaaagtatctcagtcgctctctgatcttgctgactccagttcagatctacaagcattctcgcagggtctttctacactattagataagatggatccttctcagagagtgaagtttgttcaggaagtcaagaaggttcttggatgatgatatgataccaacacatccaacacaatatgcgcatgctacatgttatttttcaagtacatacatagaaggatattgcttggccttgattgatcatgtctgatctaagtcgatcattattttcttgaaacttcctttcggacgtggtgctatggttgatgaatttggatgtgtgcgttctgccaggtgtaagcccaaaggtttatacagaccgagttaaggttaggaagagcacgagtgaacttgttctggttttgcagtggttaaggcagaaagttgtttcactgtagttctgagatgtattaccagcggcgctgtaattttagggtgtataatgcggatgctagtaaacaattgagtggttcattaaattttgaactcgaataatatgtttctgtaggcacatgtgacgtaccactacatgaaataaatgtcgctgaactagggcaccagagttttggtaggactaaggttttgtttggttatgggataaggtgagcatctccagcgttcccaaacttgaatttccc

SEQ ID NO: 40762 - DNA, 1045 bp, Zea Mays
tacaggcaaaatatttccggtcctcaaagctcccgcccgccctccttccctccctccctccggcgccagtccaggcacaggcaggcttcagtctccagagatggcgaggaacgagcccctagacttcgagaacgaggacgatccgctcctccccgccccgcgccccgccaagaggagcaaggtcatcggcatggatgatctcctgctggattactttcaatctggtaaaaaggacaagctcaaagttaaggctgccaagtctaagcatggccccaaaggaggatatgattcaggtgaggaagacgacagggctacacagcaagagattacagtctgcaaaatatttgaggaagttcagcaaaagggcaaagtgatggatgctagagacgatgtacccccatggggtcaacaattttttagatgccaggtcgactctaactttatcttctgtttaccattttcagtccaccagatgctttccctttcttgatcaccagccactaagttattcatccttacagaaccccccctcaaatcttagcaatggcggagttgagaattgtcatctcctgcaatcattctctgcaattgaagatataggttttgatctagagatgcatcaaggagaggggttcctcgaaggcatgctgttggatggatggcttctgaatttggttcgcatatgtggttttgttgaagactctgtagcatcgtggacgctgaccaacttgttgcattcacccaatgagaaattacaagtttctgcagctgacttttgggatggcattctttccttggatgaggctggtgaaccgttggtcaaccttgggtattttccaagttactctgttctaaaacgggctatgctgagctatggatatctatttgatacttcaggcactaaggcttcaatctctggaagcactgctgcaggtggccctgatgatagtctgcctcataacatcattgcttggttaagagttgtatctgcttgctgcaaaatcagtaacaaaaacctctgcttctgtgttcatttggtcttgag

SEQ ID NO: 40763 - DNA, 2385 bp, Zea Mays
agtctgtatgagcgccgagaatcgagtttgcgctctcctttccggctttccgcccaaacagccgtcgggcgtcccacggccgccgcccctgccggagatacgcgtagccgggagttaagggatgagtcctcaaatgctgttattggaaacatcttaagttagagtaagttgctgaaactatggaagaggttcaaaactgtgtgatgaagctgcggagcaatccaaggcggcacagggataaagtgtatgttggctgtggggctggatttggtggagacaggctaatggctgcttataagttgctgcagagagtcaaggagcttaattacctagttctcgagtgtttggcagagcgaactctggcggatcgataccgaattatggtgtcaggaggcaaaggctacgatcctcgggtcaaagagtggatgtctttgcttctacccttggcttttgaacggaaagtttgcatcataactaacatgggggcaatggatcctcttggagcacagaaagaagtactgaacctggcatctgtcttgggactggagataacagttgccgtagcttatgaatcatcctttgaaactcaaggaagccctgtattgtccgatgaatcaacaggagggagagggggatgtagcacatatcttggggcagcttcaattgtacattgcttggaaaactataaaccacatgttgtcattacttcacgggttgctgatgcttcactcttcttagcacctatgatctatgaattaggttggaattggaatgacacacagttggcacaaggaacattagcaagccatcttctagagtgtggctgccaactcactggaggatatttcatgcaccctggagatgcatacagggattttccttttgaacaacttctggatttgtctctcccatttgccgaagttagttgcagaggagaagtcattgtcagtaaggttgtagatttctgtaatgtacagttccatcaaatatcaaaagacaaggtcagctgtgatggagcaaaaccttctaatgcttgttgccctgagaaactcctgcaattatctcctactgaaagtggatggaaaggctggggagagatctcatatggggggcatcaatgtttaaagcgtgcccaggcagcagaataccttgtaaggtcgtggataggtgaaaggtacccaggcattaatgaaaaaattgtctcatatgtcatgggctatgatagtttgaaagctattggaggtgatgaggatagttacttggccaagcaagtattggatgtaaggcttcggatggatggtctcttcgagcttgaagagcatgctgttcagtttgtcgaagaatttattgctctatatacaaatggtccagctggtggcggtggaatcagcactggacacaggaaggaaattattctgcaaaagatgctggttgatcgggaaaacatcttttggcgatcgcatgcaaagaaggcgagcattccctgcctgcataatcaagctacatattctgaaacaggtcaggcacgtatttcacaagcgcaacgaaacccaacatgtcgtacaatggccattcaacactttgaagcaagcacggagaccccagcatcccctgctccagctttacctgggaaaagggtcgctctctaccatgtggctcacagcagggccggtgacaaggggaatgatatgaacttctctgtcattcctcactcccctgctgacatcggccggctcaggtccgtaataactccggattgggtgaagaacgctgtgtcacctctgcttggttcgtcttcgtttcctgacgagcgagatgttcagcatcgaaacaagctgcttgagcttgtcaccgtggaaatttactacgtcccgggcataagctccctgaatgttgtggtgaggaatatcctggatggtggcgtcaactgctcgaggaggatagatcggcatggaaagaccttgtcagatgtcatattgtgccaacaagttatcctaccgccatgattgtcaatattcttatccgtattcgaattaaaatatggtaaatagtatctgtattcgaaccaaaatatggtaaatagtgacatccgaatttgtatccgtgcgtatttgatccgaatacatctctattaattgactacagtacccactataaacttatgtgtattaatattattaaggtttgttttttagagcctgtgtgaactctgggagacttgatgctaataccagagccgtgtacaggtgaagacggagcaattctgtcacccgttttacgcttacccatattatattatattatattatattatattaaatattatctcaggaattactttttttcgtttttactgtagcaaaattttggtttgacaaaaaaata

SEQ ID NO: 40764 - DNA, 1958 bp, Zea Mays
ctctttccaaccttgccgggtcgttgccaaatgccaacgcaggcgccgggcagtgcacgcacatggctgcgcgcgtgggcctgctcccgcacgcgatcctcgtctcctcccgagctctacccacgccccgagctcgcgtcccttatcctcttccacccgtcccttcctacctccgccacgcctcctcctccgcctcccgctcctgccgcgcgtcgccgcgttttgtcgcagtccgcgccatggcttcggggaacccctacgccgccgagctcgccgccgccaagaaggccgtcaccctcgccgccaaactctgccagacagttcaacaggatattatgcattctggcgttcaggctaaggcagacaaaagtcctgtcacagtggctgattatggatctcaaatattggtcggtttttccttaaagatggatgtatcatctggaccattttcattggtggctgaagagatgaattgagaaaagatggcgctgaagaaattttggaagatattactgaccttgtcaatgaaaccatctttgatgatggttcatataacatttcgtttacaaaggaaggtatactctctgcaattgatgatgggaagtctgagggaggtccatctggacgacattgggtgcttgatccgattgacggtactaaaggtttcttgaggggcgaccaatatgccattgcattggctctgcttgatgaaggtaaagttgttttgggtgtattggcttgtccaaatcttccattgtcatcaataaacaacatcaatggtaactcttcgggagataaagttggtgccctgttttctgctacaattggttgtggggctcaagtagagtccttagatggctctccaccacaaaagattagtgtttgctccatcgacaatcctgtcaatgcatcattttttgaatcctatgaaagtgcacactccatgcatgatttgactggctctattgcagagaaacttggtgtccaagctcctccagttagaatcgacagccaagcaaaatatggtgctctggcccgaggtgatggcgccatttacttgcgctttccacacaaaggttatagagagaaaatatgggaccatgcagcaggatcaattgtcgtgacagaagctggaggcatagtaacagatgctgcgggaaacgacttggatttctccaaagggagatttctggatctcgacacaggcatcatcgcaaccaacaaggagttgatgccgtcgctcctgaaagctgtccaagaggctattaaagagacgaaccaggctgcctccctcttatagctgttgtagtggtcgacaaaaaagtagttgcaaaattttcgtactggcaaacagcattgctagaagtggacaacatgaataatttgagcatcatcaagacaggcgagcgcttggtgccggtgctcttaaaggccatccaagaggttatcaaggagaaagttgagcagtcgtaatgatgaacagaaattttagttgcacgtgtgacttacatatttcagctgtaccacttttgatcagacacgttcccagtgggtgcttagcagataacagttcttttactgaatactgtaaaagcctttttttttcaaaaataaactaggtttcctccgttttctttctagtgtaaaatctgtttacatcctgcggatcgatgacccgtctgcgaaagccactggaggcagcaacaacatcttcactaatgctcatgtcgctcaactcatttttttagtttttttttttttgcttcgaagcctttatatagcattatagcttgcttcaccgaacgatgttcagttttcaaatggaacatagtatacacttttacaagggaaaatggagttcctaaactagtccttgtataacggtctcacccggtggatgcatgtgtatagaaacatgtcgtgattgttccatcgagaaaccatttcgtaattttgcg

SEQ ID NO: 40765 - DNA, 1442 bp, Zea Mays
ggcccagcgccaggccgccagcatccgacgcatctaaccccttccgatgcgtgtcccgatccaacggtctccgtcgtcccgtccgcgtgataaagcgccggcgcctcttctcgcgtggcctcccgaaggttctaggctcgattgaacaaattggagcggcactacactcctccacgcctccacctccagcctcccactgatctggcctctctcgagttaatcctagatcaatatgagaaggggctacagttacagtccttcaccaccaaggggctacaggagaagggcgcgcagtccaagtcctcatgatcattatggtggtcgtggtagggatctcccaaccagtcttctggtcaggaatctccgtcgggactgcaggccagaagacctccgtcgcccatttggacagtttggtcgagttaaagatatatatcttccaagagattattacactggacgcaacacaagcctaaaagattattgttgaagagaaggaagaaatagagaaattcaattaagtgatctgcaacttaaaagagtactcagtactgttcaagagatgggaagaaatagagttacaagtttaagagatactcacatcatgaagagtttcaagtctgaatttaaactctcatgagtgcaagggatccccgagggtttgggtttgtccagtattatgatcctgctgatgctgctgatgcgaagtactatatggatgggcaggtagttcttggtaggcaaataacagttgtttttgcagaagagaacagaaagaagcctcaagagatgagagctagggacagagtcaggggtcattcttatgatgacaggaggtattctcgctctaggtcgcctcgttattataggggccgctctccttcacgcagccaaagctactcgaggtctccacctcagaatccaagacacagacttagagagaggtcctactccggctcacctgtggacagcagatcaagaagtgggagcccttatgaggatggatatcgcaaatcatcacggagagagaggtctctttctgtcagcggatgaagcagttttacggtctagagctattgctgtgaatctgcgcatggtggcctacttgctatgtctttctgaaccatatatgttctgtctagattatcattcccagtaccagagaagtatcgtgagactgtttgctgtactttctagtcttgaggatacagaagggggtcaccgattctctcagtagatggactattgaccactagctacgccagttccactgctttgtgtatttacaggcagctttgcggtttgaataaaattgtttgcatcgtgaaagctaattggtaaaaagactgaatcatgaaacgaacgttttgcatccctgttccctgatggcatttggatacgattttttgttctttcgacgaacaatttggcaaatctgcatctta

SEQ ID NO: 40766 - DNA, 935 bp, Zea Mays
ggctgtctccgtccggttgtagcgaagtccgacggcgggatccgattgtggcgaagtcacgcccgtgcagtgcgcccacagcaaaaagctccgcggcggtcgcgtgacgtcgcggcaaacggcaaacagcgaattcacagcagcaaacagtgtgaatcctgcaatctccaaacccaagcccggcggcgagatccgcgcggcaggcggacggggccgctcgaccgccttcgtgccttccaattcatgacggtgcggccggggtgggtggtgagggtggcgcatggctcggcggcggcgtggcagcgcgtggcgtgcaacccggagacgctcccgcctgaccgcgtcctcgcgctcatctgctgcgcgccactccacctcctcgcgcgcctcgccgccttcctctgcgtccccttcctccccgggcccgcacacaccccgctccgcctccaccgccgccgcttcctcgtcctccgccccccggagtttgcgccgcaccctttcgcttactccccctcgtcttcctcttcttcgtcggatgaggaagaggacgacgacgatggggacggcatccacgaacacgtcgattgaggtttgtaggccaaaaaggaaaaatggagataactttctcagaacatatctattcatgtgtttttgctacaaggttttgggtcatacctttgtgggagcacaatgtgatcctgatatcctctgcgtctctaattggtcatagcatgctaacttatgggaggttgcttgaggttaaggctcagaaaaggagaatttggggttgaggagggaagaatgaacattggcatgttgtgctggatgctgaactgctcgcccttctatgattctatctcgtagttctcaggatatggcattatgacgacgctcattataaaaagccagatgaagcgtgtctagctacttgggct

SEQ ID NO: 40767 - DNA, 2429 bp, Zea Mays
cctggtcgaaccagattaccagaagcccgacgcatttcgaagcctgagtgcccaacttcccccctccgcctgcccccgcgccgccccgtgaaatcaatcaatccaccgcagctcctcgccgccacgccggagcggagctacctgtgtggccgcgccgaactgcccgcttcccgctctctcctcattcgtcacctccgtctcgcgtccccgcgcttatcagagaggcaacagccgccgctgcgtgccccgttcgcggagctatactatacggggagaccggggtccccggcggccgccgcccgttcccaagctacccagggcggattggtttctgtgaatctctgaggcggagaaggccaccccagggccgaacacagtccgggaaccgattggggcgccgctcggccgacgatgtcgtcgagcaggttctcgccggcgctgcaggcgtccgacctcaacgacttcatcgccccatcgcaggactgcatcatctccctcaacaagaacacctcctcctcctcccgccgcccccagaacaaacagaaagaaactacagtgagctcaaaacctccagaagaagcagtcaagatttcactaaaagactgtctggcatgcagtggttgtataacatcggcagagacggttatgctggagaagcaaagcttgggtgacttcattgatcgtataaactctgataaagctgttattgtatctgtatctccccagtcaagagcatcactagctgcattctttggtctttctcagtcacaggttctcagaaaactgacttctttgttcaagtcgattggtgtaaaggctgtttttgacacaagctcgagtcgagatctatctcttattgaagcatgcaatgaatttgtttcacggtatcagagaagtcaaccatctagtggccaagaagctggagccaatcttccactgatttcatctgcatgtccgggttggatatgctatgctgaaaagactcttggttcatacatactaccttacatatcatctgtaaagagcccacaacaggcaattggtgcagccattaagcaccatgtggctgagagacttggtctaaagccgtatcatgtatatcatgtcactgtgatgccctgctacgacaagaagctagaggccgtccgggatgatttcactttctcagtagatggtaaagaagttacagaggtggattcagtactaacaactggtgaagtgttagacttgatacagtccaaatcgatcgatttcaagacagtagaggaatcttcattggacagattgttaacaaatgttgatgaggaaggccatctatatggggtttctggaggttctgggggctatgcagaaacaatctttcgctatgtagcacatgtaatttacaagagagaaatagagggtcctcttgacttcagaatcctccgaaattcagattttcgtgaaattacactggaggaacctgcagaatgttgttaggaagattaagatgggaaaatgtgaataccacttcattgaagttatggcgtgcccttcaggttgtttgaacgggggaggtcaattaaagcctgttgaaggccaatctgccaaggaacttatccagcaattggagagtgtgtacacacaagatatattaatatctgatcctttccgtaaccctatcgcgaaaaaactatatgacgaatggctggggcaacctggttcagagaatgcaaagaagtatttgcacacagaatatcacccagtggtgaagagtgtggcctcacagttacagaactggtgagaggtttcttgttgcactgggagttcctatgttcttcaagagccaggagggacttgcacacagaacaaacatggcgacctgtccatgctaagcaaatattggtcatacaggaattgaaacttgtcccttttttgcattatagcgaagaagtttttgttagccctataggttttcagctgctttctagttaatgttgtacgctgccaacgggaaacaacctttaaactgcaatgtgtaaaatgaacggagtaggtcttgacgaccttttcattgtttgatactcgtcctttggcgtttttttttttgtctggaagatatgcgagctttgttggttatccatatctgtttttaaatgctcaaagaataaaggaactaaatttctaccctaaaaataatattatgttcttaccagcaaattttttatactataatcctctgcagtcatatttacctcatatcttaaccttatatcaactactttatacttactctgcttttttatttatcgtaatttagtatatttactctgtttttttatttatcgtgatttagtttaaaaagtaactagccgactataaatattcaataattattatattatttttaattctcattcatgcacatgtgcccgctagcttccatataa

SEQ ID NO: 40768 - DNA, 3160 bp, Zea Mays
gaagcctggagaaacgtttgttgttcttccagaacacgccctcggaatcctatcgcctcccacagcacacgacgcgcctttgctgaactctctctgtcgccatgctgccggcggtcgccgctgcatcccccggcctctcacatctgccgcgctaccaccaccttggccgtcgctttcacctccgccgccaccgccttctacctgctattccggccaggctatcgtgtggggccacccacgcccgccgccttctccttgccggcgcgttcgcaaaaggggagggttcttcaggacaggatgttgatcactctgctggtgccacaaattctgggtctgcataccttggtctcttcgttcgattgcttggcttggataatgacacccgtgatagggagcatgctgtttgcacactctatcaatactcccttggtggaaggaagagcatcgatgagataatgcaattccctggttgtattgttctcatcattagcctcctgaaatcagagtccattcttgcctgcgaagcagccacaggtcttctgcgtaacattacgtcagttcacatatataggaagatggctggtgagagtggagcaatggaagaaatcattaatcttctctgtaaatctacaataacccccaagattctagagcagtgtttgtgtaccatttggaacttttctattgatgaaaaatggaggtacaaggttctgaagagcgatgtcctaatgaagattgttggttacctggatgaagaagacatacaagtcaaagaagccgctggtggtatcatatcaaatttagctttgagttcctctagtcatggagctttggttgaagtaggcgtcatcccaaaattggttcatcttttgcaaaccaaagaagatgactataagattattagaaaggaagctaaaagttcactaatacagctggccactgatgattgttactacagccttataatagaggagggtctagttcgggttcctttggttggctcagctgcatataaagcctttaaacctctccctcattcatggccctcttttcctgatggctctaagattcagcggagttctcatccctcaaagtacggtgctaccgaactgctccttggcttgagtgtcaatgagaacgatacaaaaccagatgaagctaaaattaatgctatgataggacgttctaatcagcaattccttgcacgtgttggagctattgagttggatgatcaaggacaagaggaatctggatctgaaaagaatgacatgtataccattttgccatgggtagatggtgttgcacggttagttttaatccttggacttgaagatgtctctgcaatcaaaaaggctgctagagcaatgggtgatgcatcaataaatgaacatatgcgtacctcattcaaggaagctggggctgttaaacctctacttcagctgctcaagcacaaagatgtacatgttagagaagctggtgcttatgcgttggaaaaattatgtgtaagtctgccataatatcaaaacagaaggtggactagaattgcttgtaaatatagtcaaggatcgacatactccagtagaactactagagaagataatttatatactttctcgaatgtttgacatggggatttgcatggttgctgtgccggatactgaaggttataaggatagtgaaaacagtgcaaagacatctgttaaccaagagatgtccagcgagttgatctttgattttgatgctatctcacacttaacggaagttctaaaggaagcatcgccaaggttgcaagcaaaagtctgttgtgtacttgaccatatagcagcttcggagcaacatgccaccgcaatgactgctgcttgcactggttcagtaattgaagctattcttgaaataggggttattcatgggaccagaagtgactctgagaactttgaaattcctagtgtagttataaaagaactcagtgaggctgtgtctgcagctgtgaggttactctcaaagttattgaactttgatcttttcatccgcagcataaacggtgaaaaaatcacttctttgctaagaagaacgctcaaatcaaatttcccccttcagtcaaaggattgtcttgcggcatgcctcattaagctagaatccagagctggcttatcaggagatcatggtgttagtagtatagatatggagataactatctatgagactattccaaggctaattgagcaaatgatgatatcactttcgtttgaaaataaaagaagtgctgtaatagagctcaacaagataatatctggtggtgtgctggaatatacaagagcagtggcagattctggaggcatatttccactggtgaaaatgcttgaagaggcggatggagatgcactggaggctatcttatctatcttatataatctgagcatggatccagagaatcacccagcaataattgctgctggagcagtgcctctgttgaagcggattgttcgtacagaagccccacaatggagtagtgcaattcagctgttgagaacattgcctgtatgacattgatgaagaaaatggccattcatcgccaacaaacattataaactgcacttagggcctgtttggtttgatggctaacttgccacactttgcctaacttttgtgcctaaggttagttcttcaattcgaacgactaaccttaggcaaagtgtggcacatttagccacgaaccaaacagccccttagtgcatgcacagccaatttcttagattgaggttgcggttgaacctagctccagctccctatcatcatcaaaatttgaattttatgatctggaagaaagcatcagcaaggcatttcctccaaagtagcgatatatgctgcccttttggctagttgaaaagcacaccggggcctgatgtgtccttttgctcacatcacatgccacggcaatagctagtaccacgaactattttggataccggcagtttgctggttgtgagaggacccaagaaagttcaaattgtagcttgctaaatcgtcgtgtttcgacactaggtgactttactctttaaaaatgctatcctttttgtgtaacctgaaatcctgaataacctccacggtgccaatatcaaaagaatctctttttgactccagctggggtaatcgtgaggca

SEQ ID NO: 40769 - DNA, 1655 bp, Zea Mays
cactttctgcagagggggcaaaagggtaaagttcttctaccaccgagcgaaccccagcacaccaggtccagtgcccagcctccgtccctctccttcccttacctcgcctcgtctcctctccttgagatctccagggtacgagcgcattcgcgattttggccgcctccgccgccgtccggggagatggcgggtctgggaaaggcgatgtacgcggtggggttctggatccgggagactggccaggccctcgaccgcctgggctgccgcctgcagggcaagtacttcttccacgagcagatttcaaggcatcgcaccatcatgaatatctttgacaaaacccctcatgtgcataaagacgcatttgttgctccaagtgcatcccttattggcgatgttcaagtcgggtcaggagcttccatttggtatgggtgcgtcttaagaggggatgcaaacatcatacaaattggatctgggaccaatatacaagacaattctcttatacatgtggctaaatctaatctaagtgggaaggtctttccaacaaccattggtaataacgtcacagtaggtcatagtgctgtgttacaaggatgcacggttgaggatgaggcttttgttggcattggggcaaccctattagatggtgttgttgttgaaaagcacggaatggtggctgctggagccctcgtacgacagaatactaggatcccttgtggagaggccttgtgcagtggtgactgatgagagagctgtctcactgggtcgcaggttcgaagcagtctctccccatttacggggagaagacttgcctccgtttatgccttcattggatcccactcatgtgggaacctcgggcactgggtctgccctttatacatatttatagtgtccatgagtgggaagtggaacaataatatgctctagaggccttgttttgtatcttatttctgcatgatttcatgactatgctttgttggatttaggtatggggagggaaccctgccaaatttctgaggaagctcacagatgacgagatcagtttcattgcggaatcagctgccaactattccaatctgtccaaggtccatgctgctgagaatgccaaacctcttgaaaagatcgagtttgagaaggtgttgggcaagaagtttgctcaccaggatgagtatgattcctcgattggcgtcgctgaaggggcaccaccagagctcacgtccccaaatccagcccaatgaacctctgtttctgttttctctttggcgccttaatcattttctgttggacagtgctggatcgttgatcggggtactgttccatgacactggtggtttatgtttacttttcctccccaataatcttgggtcgagcgatgttataaagctggccatgcacttcttccagattctgtattcggcatgtttaagatgtgctcccttgaaagacagaccccaaatagacagaaatgcattgtttttacaggtaacatgcactgaactactttgtttcataacctctgaagggtagttttagcaccgtccatattggtcatgagttctgaactatgctttcttgcccggcgtgtatgaaccatctttataaaatctcttaagcacacattcctcctatgaaatgattgatactggattgacacagaa

SEQ ID NO: 40770 - DNA, 722 bp, Zea Mays
agcggactggattttcattaccacttagccagcagcatggccaagctccacttccaaaccagcagttaccttctagtcatcaacatcccagggcccttagtagccagccaaatattcctggagttggtgggcctttatatccttccaagcatctgcctggtggatcattctctgctgagactaataacatgggttttatgaactcacctgctcaaatgcatcaaggtggagcaggtacaaactaccagcaaaagtcagttagtggtcatgcagttccaaatcatgttggtccatcaccaattcgacctccaatgggttctaatatgggtaatagtgatggacactttgaaagagatggccctcacacttatggaaggtctaacattcaccctgatttgcataaacctgatatcaataacattgaccgaggagagatcctccaatgtgggagcggtgcttgtcctcccgctgttgccctgatgccctctgttcgtcgaggaatcttcgggtcatggagtagcagagctcaagcacgagcagcgtcccgcagagctcgggcatctcattatagcgaagccgaagccaaggtcgaggcagccattgagctccttcgggtcgttctccgtgaggcacttcgtcctggcgctttgctggagatggtcatagggaaggggagcgacgaaggcgcgcacttccatgaacggcgcggaggcgaaccttag

SEQ ID NO: 40771 - DNA, 1129 bp, Zea Mays
gttgtttaggaattcattcactgatacatcttattattcagttgaagcgccacatatattgtgttgttgttatgatgaaggcagacccaagtattgaaagggatgatctgattttgctctaggagattgccatgtacatgcttcttgcatgtggagctgtctatgtgatcttgataagaaagatttgtggatgttgacccaacaggaaattgctactgaggtgcaaagtgaatccaagtgaaagtaattaggggagttagctatgtcaaatggaaagagagtggttgctaaaggataggaagctgaagctggatgaaggaagcaactacatgcaaccgatggcaataatgcattgcagggttgaggctcgttagaaatgtcaagttggtcccggacgtgggtatggtgcccgcaaggccgacagagctgagatcaagcactgagatcgtgccctcgtgcctacggctgcatgtcacacctggccagaggcataggctaccactactgttctaagaggacaacctgctcgatagctagcctaggatggccttcagttccagcaaggcttgtcggctcgtctcactgcagaacgctattgttggcgcctaattgaacgaagttgataccggtaggatcccatgaagcaacataagcagcagaagtctgacgaggaatgacatagatgcagtgctttcgtttgttgctactgaaaaaagatctgaaccaagtatttctgatcactgcgttgaaaaggaaaaaaagagagacaaaaccagaaaaaaggaggaaaactggctatatgggcctaccttggcccactgcggggatgcgacccactgcaaaagccggcccgcgcgcggccttctcgcacagaggcggtggtcacattccaatcagaatcctataattattagtaataactcgcagcctatgtgtactgttttctattgttcattggactcgatcggtttgcgctcaacactcctaggagtttttcttcttcttcttcttgtttcttggatgcatgcttgctagttgctacgtaacacttctttttaatgcaagtaacttattagcgttgcctgaaattcatgtcggtacattttgcacgtcaaaatccaagtttggc

SEQ ID NO: 40772 - DNA, 1555 bp, Zea Mays
agaggatttgctgactagaataaaatataatataaaaattcatgagtggacagcctaatatcgctgcaacggcggcgccgccgataaaacggccagccgggcagcggagacgcggagtggggcgcgacggcgcgtaacctgtggggtttcaggttttgtccctgcgtggcagcgacccagccccatcgagcatcgaggcatggaaccgggagccaaatcggaagcaaagcaaggtgaggcaggatctggcgcgggggaaagcggcagcggcaaggtgtatcatgagaggcagaggctgcaattctgtctcctccatgctctcaacaaccttatgcaggaaaaggaatgtttcacccgtgctgagttggacggcatcgctggaaatcttgttctcaatgatccaaacaagggccagtggactcctctaccattcatttttaaacctcaccacaatgttataactgggaactatgatgtgaatgttctcatcacagcattagaagctagaaacaagaaggtggtttggcatgatcgtcgtaaaggggcatcatcggttgatctgaatgcagaaacattggtaggcctggtgatcaatgtacctatcaggaggttcagggggctttggactggcaggcattgggtggcaattcgacgcattgatggcatctggtttaatttggacagtgatctttctgaacccaagcagtttaaggaccaagaaaacgtgattgggttccttgacagtgtgctcagccaaggtggagaactcatggttgtgctgcaagaaatttcctaaaccttacggtttaatcgctgatcataatggacagattggtaaatcgaaggtccagtatgcaacatatacacttggtttattcatatactggtttattggtaaatcgaaggtccagtatgcagacacctgctaacccttggtttgatttattgctgtgcccgtctctatcatatactggattgccaagcaggtgtctgcagtaggtagaacattagcttgctaaatgatgaaaatagcgaacttcaatcctcagcaagaattaatgttgctgcggaattgtacagaactaatagggaggttgcttgtgttgtagttatatgctttggagaaacgaagttatcccatgctcctagaatttgtcagttcgtttgtaagtaccattggatatcagggaacgtaacattatctgtagactgtactagttgatacccctggagtaatcagagcgatgtcccatggtctttcaaatattacaaagcataaaatatatgtagctgtaagatcattgttgtttaatgccatcatatcgagttaggaaggtgatgatgttgagcttgttattgagatgctgtggcgatttaattactttctctccttgcccgtgcacgcactcatgcaatttggtttcagttggggaagcaaaataaccaaagggaaaaatatgtagtttgcctactgtgttctcccgaatttcaacttcggactcagaaacgtcagaggaaacaagaaaagtatccctccagcacgagcagcaacgac

SEQ ID NO: 40773 - DNA, 676 bp, Zea Mays
acttatcttccttatcctatctccatcgccccatttcctatcctcccagccgatcccctctccctcacggcgccctctcccatggccgtcggccctccccgccatggacgtcgctcttccttcctacaggatgtgcagtggtggtctcttaaaagaattttgtgttccagcgtagctatttccactgcaaactatcaaatcattacaaactggcattccatggcttccactagttgagtccccatgataaccaatccttgttatcatatacttcttcaagtttgacgtcagcaacgtggtcatggtgaccggcgggaggaacaccgggcgtgtaggagtgatcaagaactgggagaagcacaagggcagcttcgaggtcatcgacgtgctgcttggaggcttttgcatgctatttctagttttctcttatttgttgtacaagaaaacatagaatggaattcaaatttggtggtcgcaaaagtgtggagacttgaattcatataaagttaggcttaacattagtgcaaaaagttgtattttagttttgatttagagtacacttatgtatgccttgtttgacaatacttatttatgatatattgaatggtacctattgtaatcgtctattattgtaggatattcgagacagtttgataaatactttatgacttataat

SEQ ID NO: 40774 - DNA, 1068 bp, Zea Mays
gctcaccgccaccagctcggctgatccaggccgtccgtccgcccggcggcaggcgcgcacgcggaagcctccaacgcacgcaaaccggcggcgctcgcttcccccttcatcaccgggcccgactccagcatctactgggactgggatcccgtaccccagccgggccccgccgtgcgcgcgcgcgcgtcagagtcgcaccaacctccgccgccgtgacgcctggcaaggctggagcctcagccagtcagccactcagcctccacccgaaattcccgtcccccctccaccatctcgccgcttttccaccctcgtctgctgctgttggtaggagagtacttgtcaattgcttttccaccctcctcctccgccaacccaattcttgccttccggctaccgctgctcctgttaggagtacttgccaattactattggaatcaccttcgccgcctcctcgagaaccaattctagcctaaaacccgcagtgatccgcccaactcccgacccactcatggtcgatcggcgcggccgctgaactgcctgcggcgggggcgagaggacgcgggtcgaggcgggcgatggccgggctggcggggaggcctggttcctggggcggcctggtgctgcgggtggggcaggctctcttcgccgccgcctgcatcggcgtcatgggcagctcgctcggattcgccagctacaccgccttctgctacttgattgcgtcaatggggcttcaaatgctgtggagtttcggacttgcatgtcttgatggatatgccattagagccaataaagatctcaccagtcccattctattgagcttgtttgtcgttggagactggcactaatgaaaaccaatctacggagtgtaggtaacagcaatcctgtcattcgccgcatcaagctcagctgccggtgtagtaatcctatttcaaaaggacgtgctcttctgcagaaggtatccccagctcccctgcggaaaatacgagctcgccacggcgttcgccttcctgtcttgggcgctcagtgcgacatcagcattgatcatgttttggctcctggctgcgttct

SEQ ID NO: 40775 - DNA, 94 bp, Zea Mays
gcacttgtggccgacgttggggaagaggagacctttgttgacggcgatgtttgtggcgtcctcatcggaggaggagtcggtggagctctcatcg

SEQ ID NO: 40776 - DNA, 2012 bp, Zea Mays
cctcgagcgaggcccaaggcccaacaatctcgcagtcctttcttcctccgacctccgcagcgaatcggaccaggggatagggttccgccgcgcctctccaaccaggcgccactcgccagggtctaggctgatcatggaaggaaacgtcgcagccgggaagaggtcccggacggagacggcgaacggggctgccggcggcgggaagcgctccaaagacatggagtcatttcaaactggtctatcaagcaaatcgaagccttgcaacaagtttttcagtacgattgggtgcccgtttggtgagggatgtcgttttctgcactttgtccctggcggttacccggcagttgcaaaaatgctcaatctaggtagccctgctgtatctgcgccatcaagaactcatgtggatcacgccgctcttactggcacctctcattcagcttcgtcaggcaagacacgcatgtgcaccaagtacaatactacagaaggctgcagatttggtgataagtgccactttgctcatagcgaaagagaacttgggaaaccagcgtacatgccttatggagaacctcctatgggcggtcgatttggaggccgacctgaacctgtgcagccagctgccatgggccctccagcaggaaactttggtgcctcggcgactgccaagatcagtgtggatgcgtctcttgccggtggcataattggtaagggcggggtcaacactaagcagataagcagagtcacaggcgtcaagctctgtatccgcgaccacgagtctagccccaacctgaagaacattgagctggaaggcaattttgaccagatcaagcaagccggcgaaatggtgagggacctcatcgcgaccatcagcacgagcatgccggcgaaaaactcatctgctgccgtggctccagcaggaggccgaggcggtggtctgggtagcaagagcaactacaagacgaagctatgcgagaacttcgcgaagggtgcctgtactttcggcgagcggtgccactttgcccatggcgagaacgagcagcggagtggtgctgtttgagagttgagtttaaagatgctgggggtttcgaggccttagtcagcgggaagaccactgagatgcagaggatcgatgtcaatgagcgaattgttggacttgagcgcttgaatccgacaccacgccccacaacatcgccgtttctggagggtcgatggaattttgaatggtttggtgatagcagtcctggagcatttgcggcccgccttttgtttgagaggtcgcctacatcggttgcacactttatgggacttgatgtgttgatcaaggatggatactccaagctctcatctaacctcaagtttctaaacacgatacaaagcaaattcctactgactactcaattgtccgttgagggccccatcaggatgaaagaggaatacgttgagggccttatagcgattcccagaatcaatgaagaatcattgcctgaacagttgaagggcttgcttggccaaactgcaggagctctacaacaacttcctagccctataagggaagctgtttcggaggggcttaaattgccactcggtggggcatttcaacgattattcatgatctcttacttggatgaagaaatattgattgtcagggacgctgctggagcaccagatgtcttaaccagactagaggggccacaaccgagtccaggtgatggcacagcagatgcagtgatatcagaatatgaaagctaatggctgattactaactgtaactccacacctagttcctgtttacggctcctttctcctttggtcgtttttctcaggcctgcgcatgtataaaggctgtagtgttgtcaacgataacgaccacttgagtgatttttacttgcatccctttcggcggctattctgattttttctgaatgcgagcaataatatcagatgaccatcatcattctttatatgaatcaatgtaaaaaaaaggctctgcttgttcaaagctaactgatacttcc

SEQ ID NO: 40777 - DNA, 4568 bp, Zea Mays
aacaacttgaggcaagaatcagaaaaaaagacaaaacaaacatgtccataatcttcagccaaaacgctaaaccaaaaagtcccatcatcccccgaccctttcgccgcgcccgtgcacaaacccgcgccgtcgaagctggccccttgcctcggagtcttgaacgcaaactcggaggatcgcctcgctactctgcgccgtcaccgcccacctcctcgttcttcaatctgctccctgtttgccgtgcagtggagaccagttatccgatttcccttgtcgttggtcgcagatttctccaagaaatctggggacgctgataggaggccgtacagaacgcagcggcagcaatggtgatgtcggagtcggacgacgacgacgacgagccccagctcaacgcggtggagagctactacttcgttgactccacgaacgacaacgagcctgtctgcttctccactctgcctttcctgttcggggacactgatgatcttcctgactgcaagaaaaggctggtgctgcgcgggactggtggtgacccgggcgtcaaggtgtacagtgaggtggtggcctggagtctggggctcgaggggaagcaaccccagtttgcggtgctcacagcagaaggcagacgttgggttcgtctcgttaggcccttgaacagctacgaggagatgatcaggactgtgctgatcacagcgcatatgctgcattttctcatgaggaagcctcatgagccagagagaacgctgtggaaccacctttgcaaagttttcaacaagtttgacgttagaccctcagaggacgatttcaggaaccacatctcactgatgaagcagtttgtggcaaaagatcctatcttagcaaaatcagagattttgcgagtatttgttgaaggaaaatctggaaaaattttcactgaggctggtgcagaccatattgatgttaagcagccattcataactgatgatgaggacatagatgagatgattgtggaagatgccgataatgaatctgatgaagaggaggatggagatttgtttgattcaatatgtgctatttgtgacgacggaggagacatattatgctgtgatggtccatgtatgcgctctttccatgcaaaagaaggaagtggtgaagactcctattgtgatacccttggctacactgaggcagaagttgaggcaatgaaattatttctgtgcaagaactgtgagtataagcaacaccagtgtttcatctgcggagtgttggagccttcaaatggagcagcagctaaggtttttttatgtaacaatgctacatgtggacacttctaccacccgaaatgtgttgcccagcaacttcatcctaataacattgatgaagcctcagaattggagaagaagataacagatgggttttcatttacatgcccaattcactggtgctttcattgcaaaggtttggaggatagaacacaagggcctttgcaatttgctgtttgcagacgctgtccgaagtcatatcacagaaagtgtttaccaagagaaatttcctttgatgaaattgaagagaagggtgtcatcatacgggcttgggaattatcaaaaatgattttgatatactgcctgaaccatgagatcgatagtgaacttgagacacctgtcagagatcatataaagtttccaaggattgaaaaaccacttcaatttgtaaagaagggagctaacttgttgcctaagaagaaaaagaggacttacagtgagtcaattcttgagcaacctcccaaagatactgtgaaaatgaaaagcaaggttcgcatgcaagaaagcgagcaaaacaaacacgacaccagagaagtttctgtgaagagtttcactcaaaacgttgttgacacacctgtaaagaaaaaaggcaagttgaaagagaataaacagttgccttatgtggccaaggatcattttgtaagcagtccaaaatctgtgaaagagcaagaacaagagttggtacctttgcccttatctggaatcaggaagagttcatttcctaaagtggacagtgaaattgaaaagagggtgattagcatactgggaaatgaaatctcttcgttgacaataaaagatgtaacaaggaactgcagtttgccatcaactcatgtatactctggcagaccaactgacaagatgccactaggaaaaattgagcgttctgttcaggctgtagaagctgctttaaaaaagctgaaaaatggaggtagtgtcaatgatgctaaagcagtatgtgaacctgatgttttaagacagcttgcaaggtggcataccaaactcagagtatatatatcaccttttattcatggcacaaggtatagttcttttggtcgacattttacgaaggtggagaaacttgttgagattgttgatagacttcactggtatgtggaatctggtgacatgcatcacttctgctttgaaaagagggattggatgactgtgcaaccaaatgaactgcctcgtggatcccaactaattatggggcttaatcctccttttggagtaaaagcaagtcttgcgaacaaatttattgacaaagcattgacattcaagcctaagctcattgtactaattgtccctaaagaaacaaaaaggttagataagaagaagataccttatgatttgatttgggaagacagtgagtgtcttgctgggaagtccttctatttgcctggttctgtggatcttaatgataatacagttgaagggtggaatgcatccgcgccacccctctatttgtggagtcatcctcattggacaaagaagcacatgcaagtggctgaagagcatggtcacacttgcatggggaagatagcttcccatgttgaaaagagaaatctgtcagatgatctgcccgtgaggaaacaatctgaggctgcaaacaaatggaactccagatcagggaaagagactacatgcaatgacagaaaggacaatctacttgatgatgttactgctaagaagcaagcaggacctgaagaagaaaaggaaactctagggaagatggaccaccatgtgaaaaaggctactataccagatagccttacagtgaagaaacaaactgaagcttccagcaaagctctctctcattgtggaaatgatagaaagattggcaggtacagcagcaggaaatatgatgactggagaagtaagcggacacctgatcacgaagagagcttcccacctgaaaagcaagtggaagttgcatatgaggagacaaaagttattattccaagcaaaaagattactcataacgaacaaagcggtgcttgccgtgaaaatagaaagaattcttgtgtggaggaaaccaagaacgtggagtacaactatgagcagcagactgcagcagggatgaggttcagagagggagaggattctgacatgagtatctcacccccctcgagaccagttgaaccctttgatatgatagctcaccccattggctctctgacaaaagaaccttttgaccctgtgctcaatagaggggctactcatcaggacagttatgcagtaaccaaagaggaatacctgggtcaatttaagaggaaaaacgaccgtacctttactgacattgatgatagctcaaggatgaggggctccagcatcgaagaagtgaccaggccctatattgctgctccaaccagtgatccctacagcttgcggtatagaggagatggcagcttctacaggcatccgagctcagaggatttaaacactacaggcatcagtgcaggatatggacaaattggtggtgacagttacccacaagcaacaggctcgcaaacacataatactagaatgcatggtggaacaagtgatgataattacctgtcggcgagatactcccttggatattcaggttctcgctttagccaaccagcttcaactgttcccgcttttgggctctcaggtgcaagttcacaacgaggctcagtaatagacaagtattcctatgggctctcgggtcccactggaccacaggattctggtattaacagatatgctccaccggacgacggaacgagcacaagatccaagagctccttggctgaacaacagtacccgttcggacaatctggctcttccggtggcgagtggcctcatatctgatcgctggaacttgttgtcgaagtttttttttcaaggcaaaaactgtgggaagttctccacggtacttcattttcatttttagaggggattacatgttatcaaaatcatgcagcttttgacctgacctgggtgtaaattggagtaaaaccacaagcatctatccatgcggggctggtgttaaaaagcaaagttgtttcttataaaactgtctacagcagtctatccatgatttacccaaaattactgttttgtactgtagactgcattgtttgcataatgaagtttgaatatagatgaggatgggtaagagatagactaaggtagtttcatcatacatataagagttgtaatgacatataagtttgaatatagatgaggatggctatccgaggacatgccctttgcacagaaaaaaattcaggactactgccg

SEQ ID NO: 40778 - DNA, 614 bp, Zea Mays
atcttctacaaagtgtgttggcaaaccaccaaaggagacctcatggctgtaattgaatccttccaaaaccagcgctgcaacgatctaaacctcctaaacaaagcaaacatagttctcatcctgaaaaaagaaggagcaaatgcatcacggactaccgccctatcagcctcatccactcggtggctaaggttataacaaagatcctagcactccggctagaacctctcatggataaactaatctcgcaatcacaaagtgagctattatcatcatgacgtggtgcatctggaggtgcagaaacaattggatcttcaacgaaattcccccttcggtttctgagtgcaaggctatgtttaggagtgaaattgtcttattatgccatcgagttaagcctattcttaaggaagatattgcatcttggttgctcaatttagggctgtaactcttccccctctgctccgtcttccttccttttctttgtaattttcctctttctccctaaactcagttcttttgatttaataatattactgtaggtccttcctacagtacctttacttcaaaaaaaacaaagtgcattcataaaaaacggagcatccacgacaacttcctct

SEQ ID NO: 40779 - DNA, 2684 bp, Zea Mays
actaacaaactttaaatcttttttgaaaaaaatcatacatattccttccaccctactctaattatatacataatttcaaatttaaattcattatactttagctataataaaaaaataaaattgtagacgattttctaatttaaacttgttagaaattttatttttttattactctttatgtatttcaaaatttaacttgaaattttgtatatgattagagtagggtggaaagtatatgtatgaattttttcaatttttttaaactttattagttcatgtgtacagatatgttctcaacaaataaagaaaactttaggcttcatgcaagctgaatttgaagtgtccaagttctgacattgtgccacctgatttgtcctcgactctccacgtcgcgcgctcccatttgagagtctgactggtaggccttggttggattcgaactcacaacgatacggcggagtcccgtgttcggtgttccctgatgggcaactccatcaaccgactcgccggcggcgcgcctctcccgccggagttcgctggaggcatgcctttttgtcgtcaccccatcccaaacatctaggcgttcctcttccccacctctacccgcggttctccctggcccctgggcccgtttgcgtgctactaccggctacggctacggcctacggggaaagcaactgtggcaagtacggagaatgcaagtgcaaccgtccggcacggaggcacaaaagaaagccgccgacgaaacgaaagcgcctgccacctgcgggtgctccccatccggtccaggtgcatgcatctttccctcctcctccccacatcacaatcaccgtcctcctctataaccgcgcctcccctccactctttctctctcgagtcatcttcttcctgcccaatacggcgagcatcggcggcggcgacccaagcaggttgacctcgccccttcaccgaccagcgggtcgtacagcaagccgatccaattcctccgggcctcggcgtttcacttcgccatttcgttgaactgctggaagacacgtcggtgcacactagatttggattggggagaggagaagcgacagctttcggatgtgcaaatgtgcctaggttggtttcaaacataggagtatattcagtacccatttattaccaattcgtaactatcttcttcgacttattgtattcaagggaccccttgatatgttagacaaaaaagaagaagctacattaacaaatatcgaaagcctgtaaaatcttttaccaatagatggtgctgataaggacgtagtgatagatttcctacttgtgtatgggtacctcctcagacatagcaaaattaaagcctggtccagctatgcccaaagtacaaatgtgttgggagaagtgagcagcaactgtacttgaggaagaacttgtatcagtggtaaagatattatggtttcgggacccattgcttgcactcttacgtccacgttcggtgtattacatagtgacattgccatatgaaattgtaaagtaaataaaggttgataagctgtgaggttgaagctagagacgccgctgttttaagtttcttcaaggacaagggaacattaatgtcacctaaagtactttcctcgatggaggttgaagctggttttgctggcgatggcgtcggttcaaataatggaccacaagacatgtggtcacttggcgagatagatccaaaaagagcaaggttcccgtgctgcattgtctggactcctcttcctgtagtttcatggcttgctccttacatagggcatgtcggaatctgtcaggaggacggggctgtcttggattttgctggttcgaatttggtgagcgtggataattttgcttatggttcagttgccagatacctccagcttgacagaaagaagtgctgccttcccgttaatcttgcagaacacgtatgcaagcagtcttacaaccattcagaattaggagcagcgatatcatgggacgatgctctgcgatcgagcatgagacgcttccagcacaagtactacaacctgttcacctgcaactgccactcgtttgtggcgagctgcctgaaccggcttgcctacaatggctccctggagtggaatgtcttgaacgtggctgcccttgtctggtttcatggccgatgggtggacagaatgtcttccgttcggtcgttcttacctgtcctacccgtgacatgcatcggcatcttaatggctggctggtctttcctgctagggatggcagcgttctctgctctttctgattggatggtttgttttcacagtgtactgcgttaagggtttggtatgttgactggaaaaagaattactgaaagcactccattagtgcattgcagtctaggaattatggatgtaatcgctgtgctggagtcaggtaaatcactcgtgtcctcagcctcagtgattcagacctgtgcaagttcgtcaaacaaaaaaattgacctatggaggtggtctggagataatttggttcatggcaagttcgtcaatttatttagtgctgttccaaggaaaaaagaaattcttttgattcaagcatctctttctgaacttaacaacttgatgtattagttttatatttaatattccaagaaatcacatcatagtatatcaatgctctctaatatatatatatatatatcaacattccccatctag

SEQ ID NO: 40780 - DNA, 1689 bp, Zea Mays
agcaaagctccttctcctcctcctcctcctcctcctcctcctcctcctccttcctgccgtcgccgacgactgccccacctgtactctcccctgcgtcctcctcctcggctctgctacacgccttccttgcttcctccctccaggcaggccagctccttcctcctcacgctagctcggtgtcttccttttcccttttccagcgcgcgccggccggccggccggccaaattccaatcccatccaccatcttgttcttgtcttctccgacaattaaccatcaatcccaaaacgtcatattcatcttgtcgaggccataaagtcacaacaaacacgtcgtccatgcatccaccaccgcatccatccatgaagcccggcggcgaggaggaggaggatgtgcaggtgctggtggtgcggtcccaccaccactcggaccagagcagcacgaggagccaccaccaccagcaggtcgtcatcagggcgcggccctactaccggcggtggtcgccgtggctcgtctccggcgccaccgtggcctgcgtcgccatcttcctcgtcaccatgtacgtgaacgactgcccgacgcacaactccaactgcgccgccgcagggttcctcggccgcttcgccttccagccgctccgcgagaacccgctcctcggaccctcctccgccactgaagatgggggctctcgatgtggctaaggtcgtccatggccggcaaggatggcgtctgatcacctgcatgtggctccacgccggagttgttcacctgctcatcaacatgctgtgcctcctagtcgtgggcatacgcctggagcaagaatttgggttcgtgaggatcggtctggtgtacctcatctctggttttggcgggagcctcatgtctgctctcttcatacagtccagcagcgtctccgtgggggcctccggcgctctcttcggcctcatcggatccatgctctctgagctcatcaccaactggtcactctacgcaaacaaggtggcggcgctgctaactctgcttctggtgatcctctccaacctggcgctgggcctcctcccccgggtggacaacttcgcccacatcggcggcctcgtctccggcttcctcctcggcttcgtcgtcttcgtccgcccgcacttggactggctcacccagcagcagagaagcggcggcggcgggcaagggcaacagcaagctcctccgccggtggcagcggcgaggaaacgcaagcacaggacgtaccagtatgtgctgtggctggccgccgccgcgctgctcgtggccgggctcacggcggccaccgtgctgcttttccgcgggtacgacgccaaccagcactgcccgtggtgccactacctcagctgcgtgcccaccaggaggtggaggtgcgacgggtcgccgaccacgtgcacggccacgacgcaggagaacaacacgctcagcgtcgtctgcgagggcggcagcaaccgcacgtacgtcgtggcggcggcgtcgcaggacaggatcaaggacctctgcaatcagctctgcacctagcactgcatattcttcgtgtacatcgatccatttttactcaccgtcagagtgaggtcctagctttacagcaagagaaagaatttgttcgatttacaggcaaatatgatatttttgaaatgcagcaaacaaccaaagatttaccatttattt

SEQ ID NO: 40781 - DNA, 598 bp, Zea Mays
aatacgagttcagcgtcttggaggcaacgccgagtgatcgaaggttgacgccggcattttagaagtaatgccgagcgattgaacacgagatcagcgttttagaggcaacgtcgagtgattgaaggtcgacgccggcattttagaagtaacgccgagcgattgaacacgaggtcagcgttttagaggcagcgccgagtgatcgaaggttgacgccggcattttagaagtaatgccgagcgattgaacacgagatcagcgttttagagacaacgccgagtgattgaaggtcgacgccgacattttagaagtaatgccgagcgattgaacacgaggtcatcgttttggaggcaacgccgagtgatagccagccgcacgagttattttgaggataataaccgagtgatgaagtggcacgtcggctttttcggaaatgactgccagatgtccacgtggcatgctgaggttttggaaataaccgccgggtgatgactgggcactttttgaagcggtatctggctcaagaatatcccataagagttgcacttttagccgcctttgcttttcgtgccctagttcttgcatttccgcatctgaatct

SEQ ID NO: 40782 - DNA, 2002 bp, Zea Mays
tctatgcttacatattcagtgctgttcgctcgtgctgtatctgtggccgcgtgagcaggaaatcaccatattagagcttacaaccttcgcatcaactgaagagtttgacactcatgatccaaaggagaacactttgctactcccttacttgaggaaaaggtcaaaaatcattgagatagttgcagcgcgtgatatagtctttgctctatcacagttaggagtatgtgctgcttttagtagcggtacgttcgccgaggacaagacaaaaccggatgctggtttccctctttttgactcaccatgtcaacatggcaatttcaggacccaacgtctctgcgagagaccttgggttcccttatccgaaggcaggcaccgctaagcctacagacgtggtggtgaagttctacgtcctctacgagaagtggcggaggggcgagctcctgggttcttcgtcagttgcgcggtacttgaaaagcatcactcattcgaacggtacgattattcatccttctggatcggagcgttctcttcatgcgtctgttgacgctctaagttcttgctacgtggacaaacagggcaacaagaatttccgggtgtgggtggacagactggtcacatcgccgatcggtacaagcaactggttggtgaggtttgataactgggagatggaaggtggcgttcggtactgctgccgcactactcttctgctgaataacaaggttccaaaagaactagaagtacagattggttgaacttcaaacaaatacaaagagctatgcatacaagtggtggaggcctggtggtaaattgtttatcaagatcgctagagcagttaaatttactcctattatcttctgggatagatttgggatcaaggtcgttgtcgtctccaggtccatcaaatgcgacaaggtcgagcgcacgcaattcagctccgaagtcatctcctttcaacagatccatttagtacctttttctgagttaaactacttcaaacattgctgaagactacaaccagcctacagttgttgtaattgaagcgggtcaagacatagcatttgcaaagatttagttcattctcatcactctgcaatattcgggttctctactatgtgtaatctcatatcaagattaatgagtatcgtgatcgtataattttgaatcctatcaacccatatggcaaggcaaagaaaaatgacagtggacatcattctagattttacaaaatcaaaggagcaaccagacatggctgtcatgatctaagatacttcaacgtgattggatcgaacccaaacatatgactaggagaagctccaaggccactttgtcaagggtctctgcaatgcacctactggtgcatgatttactggaggttgtgcgcatgaatgtgccacacattggtatgggggttggagttgaagcaggagacatgattgttattcctatcatgtgcacactgcctcctcgctgtcatttgtcgtcactctcgtagtcctgataccggagcatggttgccaggggagagcagtccaaggcaaatttgccatgttggagcagtcacaggagccaaggggctgcagtcacaggtcctgctagccaggatggagcaatcataggacctcctagcagtccaaggaaaatttgcgaggtggagtagttgcaacttttgaaacccacgtgataacatgctcaagcgttcgtatgataaaaaagatggcacataatcaaaagaagatctcatgttctgcgtttgtgaacctgtttgtattttttgaacttgttttgtgaacctctatttgtaaacctgtaaaatctgaggttgtgaatagatttgggtaacttcatacaagtggtggaggcctggtggtaatcctggatgcatataaagcgaggcatgcaatatccatagcactcgtttgacagaaggcaacaccatcaaccttgtcctccacctttaaactagcatgagcaccatccttcttcacatttatattcatgtccc

SEQ ID NO: 40783 - DNA, 904 bp, Zea Mays
gataaatctgtagtggcaagacaatacaggagcactcgctgagctcttcctgggtggagtcagaatcttactgtcatccttattcgatggtttctcttctgctaatgattttcgtctgggagtcgaagagcttcgattttcagacttcttttcagctttggcaggctttgaatccgaattgcctttgtcctttgcatctgctttcccttcccagcttcttctcaaggccttgggcccagattcgaagctcaacaaggtgttactaatggagttacccagggaggacttcctccctgccgtagtggccttcaacacagacgcagccttttctagcaaggacagccttgacggcggcgatttctctgctcctttggttctcactctctgtttcatgtcactcgagaatttatcgaacgacgcaggcagagaatgggcgctggtcggggaagacggcgtcgacctagcgctggttgattttgccttcgagctaaccacgtccttcttgtccgagaggaggccattgagcgcctgtttcgagaggttggagttcgacttggtgagctggggcttcttgctctctgtgccgttgctcttgggaggagcattgatcttctctaacctgccctgctctttctctagcgacagggcaccggcatccttggaactaccattggtggaggaggcttgggcggccttgccgctgccaagaagaaaagtggaggagctggtcaccacaagatcctccgggctgccgacgcaggcatggcggcccgggaccggcctgacccccctgaggatcggcaccggggtggctgcctcgagacggtcgacatggacgaactgccccagctggatgacgtcgctgaggatgaggtcgtgctgctcgtccggcagcgacacgtag

SEQ ID NO: 40784 - DNA, 2945 bp, Zea Mays
ggagagtctcagtcctcacagatcgcgcgcgcaccagcaccaccactgccgtctccggcgacgaccacgccgccggccatgccgtcctcctacgctgccgctgcagccggatcctcttcccgcaagccgaatcgcacctccagcgctgccgcacccactcttcgcccaccagcaccctcaccgtcgccggcacccgctcccctggcggtgaaccctagcgtcatctctgattccgacccctcctcctactcatcttcctctgcggatgaggccgatttcgccgcctccgactccgcaactgcctctgttgtctctgcctacctctcggttgctggcgagggggccgacctctcgaaagttggcattttcctctcatccgccgcgcgccgccgatcgccgccgtgccttatctgcttcgatcctatacgcccctctgacccggtgtggtcatgctcttcatcctgctttgccatcctccacctcccctgcatccagtcatgggcgcaccagtcagcatccgggcccgccgtgccgtgcccaacctggggatgccccaagtgccgcttcgcctaccccaagtccgagatcccctcctcctacgtctgcttctgctccaagaccatagacccggctccggacccctggatcctcccccactcttgtggcgacgtctgtggccgccgtcttgatgcgaatctcgactccggctgtgagcatacctgcctgctgctgtgccacccagggccatgcccgccatgcccggccgttgttcctaaagcgacgtgcttctgtggagtgcaccgggagccccgacgctgcgcacatcagcgttactcttgtggggggaaatgcaacaaacgtcttagctgtggactccaccactgtccagtggattgccatgatggcccctgcccgccgtgtgcagtgctggggagtcacaaatgtgagtgtggagagatattggaggagaaattgtgctctgaaaggattttccagtgcaagagggagtgtggtgggatgctagattgcggtaagcataagtgtgagagggggtgccatgggggcaagtgtggggaatgcccactccgaggtcgacgcacttgcccgtgtgggaagaaaaattatccaaggttggagtgtgatgcagaggctgccacatgcggatcaacttgtgagaaggtgcttgggtgtggacgacacaggtgccctgagcgctgccatcgtgggccatgtgatgggacttgccgtcttgtggttactaaggcctgccgttgcggggggttgaagaaggaggtgccctgctaccaagaattgacgtgtgaaagaaaatgtcaacgtttgcgaaactgtggtcgccatgcttgtaaacgacgttgctgtgctggagattgcccaccctgctctgagacttgtgataagaagctcagatgtggcaaccataaatgtctctcaccatgccacagaggcgcttgttcaccttgtcctctgatgaagaccatttcttgcgcctgtggaaaaacatgttttgaggttccttgtgggactgagaagaatcagaaaccacccaaatgctcaaagaaatgcaatatacctcgcctttgccgacacaagcttgaatgccggccccacaaatgccactatggagcctgcccaccttgcaagctgatctgcggggaagaatttccatgtgggcacacgtgtaaagaaaggtgtcatggccctatttctcctccaaactccgagttcacactgaaaccgacaaaaaagaaaatgggaaagcacatagaatgtacacctgggacaccgtgcccaccatgcaaagaggtggttttggtgtcatgctttgggcagcatcttggccaagaacgcactatgccatgttgcaaatggaggccttttccctgtgaaaatttatgtgggaatcctctcctttgtggcaaccattattgtacaaaatcttgccatgtgttagaagtcccattgaatcatcctgaaggagatcgtacaacatctatcagtaaagtgaacgcacttgctatgccttgtgaacaatgcaatcttccttgtcaaagggttagggagcctccttgttcacatccttgccctttgccatgtcatctgaacgattgtccttcttgtaaagtccttgttaaaagaccatgccattgtggtgctatggtgcatgcttttgaatgtgtgttttataacaacttaaatgcaaaggatcagattaaaataagatcttgtggtggcccatgtcatagaaagctaccaaattgcccccatctgtgttcagaagtatgtcaccctggtgtatgcccatcggttgatcagtgcatgaaaaaggtcaacacccgttgtgcatgcagcactctgaaacaagagtggcgatgtcaagatgtcctcaaggaataccgtaagtctggccgggatccaaaagaagtacctaaaagtcagtttggagttggcttacttgcctgcggtgaagattgcaagaagaagctgaaggctccagattcagagttgcatctccggaaaagtcaggagaacaagatccctgctgtggaagtcgtaaatgcacccaaacgcaggaagcggcgtgaccgtggacaagaagttaaaatttcgaaattccaggaagtgaagacttttgtgctgagagcgctactgattattttgctgtcaataatcgttgctgctggtctgtacctgttgtggaaaggtattttctggctttctgactggatgaacgaaatggaagagcagagggcgagtcaaagttttgcaggatcataaacatgtcaccgttttctcactttttgtcactataaactagaaattgtatgcgtgatgtattgttgtatttttattttgctactctgcattgttaagtgaacaaacgatacaattactacatgattcatcgcttatatctgttaaaatgt

SEQ ID NO: 40785 - DNA, 2025 bp, Zea Mays
gcgaaattggttaggctttggatttggtcacgttggggcgagcgttagggcttggtgtttaatcgtgctttcaggaacatggtggtgaccttaatcgagcaataaattcgcatttcaatgatggagacagcatattgaatgggatcagtcaaaacaccatgcccactagtcatgatgatatgatggacctggatggaccccttgataatacatttcaaagatctttgttcccagagaattttcgtgacccttttgctctaatggatccaaattttcagcaccaattttttgacagggttggctccactgatggtgtcactcgtggaccgctagtttcacaccctagagaggtgagggagattcctatagaagttaaggatagtgatcctcaaacaagtccatctggccaggcccctgttattgaggatgttactggacatgagtcttcaaatggccttgaagttcatgaaactatcataattgatgatgaggacagcggattgttatctgcgccatctgctccacatgctagtgttcctagcaatacatcttctgagcccactgctcctccactggttcatgttaatgactatgatgatgacatagaagaggaaatgattagggcagcaattgaagcttcaaagaaggattctgaaggactggcaaatatagcagagcaaggagaccagcatcaagagggagtgaatttgggggaacattcttctgataaagcagtcatgagaaccacagatggaatagttgagagtactagcttcaggaaaggctggaacatctaggcaaccaatagatgaagagagcttccaagaggagactgaagatgtagaagaacaaccgctagttagacgtcgttctcggcgtgccccctctgagaacaccgagctagcacaaatgccgcacccaggagctagccctgttctgaacaatcaccagtctagtggaggtgatttcccatctgagtggggtggcatttcttctgaggaacatgatgaagctgttatgcttgaggctgcaatgttcggcggagtttttggaagaccaatgcatcctttctccatgccttctcacagaagctctacttattatccccaaataactcattcttcatcaccagcattagctgaacagcggttattaagagagcagcaggacgatgagtaccttgcgtcactacaagctgatcaagaaaaagagttgaaggccttacaggatgctgagctccatcgcctagaagaaacaactacaagagaagttgctcttaagaaacagaagcaagagcaggaggaaaggcgtaaaaagcaacttgaggaagaggagctagagtccagtctcgcttccaagcaagcatcattaccatcagaaccgcctccagacgcagagggtgccgtgacagttgtagtccgcatgcctgatggcagtcgacaggggcgttgctttctcaaaactgataaacttaagttcctatttgatttcttagacattgggaggatttgcaagccagggacctacagattggtgaggacatacccgaggcgcacgtttacgagcagtgagggggacgtatcgttcagtgatcttggcttaacaagcaagcaggaagccctatttctagaacagatcacagagtagaggataagtgtttaggcagcatggttatagacaccacagctggagccggagaattttttttacattttatacttgcagcttttgctagtaaaaactcggtctgtgaaaatggttgggttggtcgaagaaaggcgtcacgttacctatacaatgtggacagctacgcatggccgttcattcgcacgagtctcagagtggctctgtacatactgtcggttctgtgaatcaaagcaatgttgcgtatatataagcaaactgcgcagcaacgggagatgatgcgaaacggccgtcagagtttgctgctttcgcatcactggtcactggtgtctcagagacagaactggctgaacgtgtattgaaaaaactgagaaaaatgaa

SEQ ID NO: 40786 - DNA, 920 bp, Zea Mays
tcgcaagcttcagcggcggatcggagaactcaatcgagctaggatcgcagcagcaccgaagcatttgccgatcatcagttcttccatccagtgcagaccaaccaaattaaacacagcatgcaagggatcacgaaggcgctgcggctccacgggaggcagctgaggcacgcggtcctgcagcacatgaacatgaacaaggggatcttctcctgggccaccctgatctcgcgcatacagagcgagtcgccagccgtgatcataccgcacatggggctcgagaacatcaccgtcaacgagattctcagggccaagggggaggccgaggccggagcggtctactggtgcagcaccgcccatctggtgcacgaagcggtgcagcacatggcggcacacaacgttggagctctcgtggttctcaagtcgggggacatgaaccagctcgcaggaattgtgaccgagagagattttgccagaaagatcctcttgccagggcgaccttcacagcaaacaagggtagaggatatcatgacagaagaggacaaggtgatcacggtgtccggtcgtaccaatattctgcgtgcaatggaggttatgacagacaagcgtatcaggcatgttcctgttttcgacgacaaggtagttggaatgatatccatcggtgatgttgttagaacaatcgtggaccagcagcaccaagaagtaaaacagctcaagaagtatatcagaggagactattattagaacactttttaattattattttttacattcggtgtataaacgtaatttggatgtaatcgtttatagatatttaactacaatgtatatttttctctgcgaaaacatggttgatatgtgcccttctgtgtcaagttatgacgagtgattatcgtaagatgatcggctttggttgagtttgg

SEQ ID NO: 40787 - DNA, 2487 bp, Zea Mays
gcctaccgctcctttcccccctcccctcccctccccgtcgtcccccacttccgacgcgcgccaccaaggcaaaagcgcatagcgcagcaacgcaaacccagggaggcgagagcgaggtctccggtcatactactcactcactcccctgctgccgcctgtctcagtgtccactctcgctctcactctcaccagagagcgagcgagagttaagggtggaacggaattaatggcgccagcacaggaggaacaagcggagacttgatcgatcgacaccacatcccttctttcttcctggcgcgagagagcgcctccattcgaccccccctcccctcctagctcctgagctgtagcgtgctgctccgtcaggaccagcgagattactgccgcgtacctcccgctaccaccaccaccactgctctgtttgctgcgtagcagcggccggggctatatagcgcctcggaggaggagctaggtatagacctcgtggcactagcacagccgcccgctatataccgctagtgcactactagctgcttgccaggtcccagccagccagccagccctctcgtcccggattgcgctcgaagcaagcggccgcccgaggcgaggcgaggcgtgcgcgcgccgcgagacgatggacttcggcgacgacgtcatggacggcggctccgacgcccagcgccgcaagaagagataccaccgccacacaccgcgccagattcagcagctcgaggcgatgttcaaggagtgcccgcacccggacgagaaccagcggatgcagctgagcagggagctggggctggagccccggcagatcaagttctggttccagaaccgccggacgcagatgaaggcgcagcacgagcgccaggacaactgcttcctgcgcgcggagaacgacaagatccggtgcgagaacatcgccatgcgggaggcgctccggagcgtcatctgccccacctgcggcggcccgcccgtcgccgacgactacttcgacgagcagaagctgcgcatggagaacgcgcgactcaaagaagagcttgaccgggtgtccagcctgacgtccaagtacctggggcggcccatcacgcagctgccgccggcgcaggcggcgctgtccatgtcgtcgctggacctgtccgtcggcgggctcggcagcccgtcgctggacctcgacctcctcagcggcggctcctcggggtatcccccgttccacctcccgatgccggtgtcggagatggagcggcccatgatggccgagatggcgacgcgcgccatggacgagctcatcaggatggcgcaggccggcgagcacctgtgggtcaaggcgggcggccgcgaggtgctcaacgtcgacacgtacgacagcgtcttcgccaagcccggggccgcctcgttccgcggccccgacgtgcacgtcgaggggtcccgcgactcgggcctagtcttcatgagcgccgtcggcctcgtcgacatgttcatggactcgagcaagtggacggagtttttccctgccatcgtgtccaaggcgcgcacggtcgacgtcctcgtgaacggcatggccgggcggagcgagtctttggttctggtagtagagcagcagctccctccgaccaatgcatcccttgtgtctctcgttcgcacggggggcgtgtgccttggtgatatcgctcaccactgattcgcgccgcatgcagatgtacgaggagctgcacgtgatgtcgccggtcgtcccgacgcgcgagttctgcttcctgcgctactgccggcagatcgagcgcgggctgtgggcgatcgcggacatctcggtggacctgcagcagcacgacgcgaggttcggcgcgccgccgtcgcgctcgtgccgcctcccgtcgggatgcctcatcgccgatatggccgacggctcctccaaggtgacatgggtggagcacatggagatcgaggacagggttcccatccacctgctctaccgcgacctcatcctcagcggcgccgcgttcggggcgcaccggtggctcgccgccctgcagagggcgtgcgagcggtgcgcgtgcctcgtcccggccggtatgccgcaccgcgacattgcagttgcaggagtgacgccggaagggaaacggagcatgatgaagctgtcgcagcggatggtgagcagcttctgcgcgagcctgagcgcgtcgcagctccaccggtggacgacgctgtcggggcccagcgacgtgggcgtccgcgtcacggtgcaccgcagcacggacccggggcagcccagcggcgtggtgctcagcgcggccacgtccatctggctgccggtcccgtgcgaccgggtgttcgccttcgtccgcgacgagcacacgcgctcccagtgggacgtgctgtcgcacgggaacccggtgcaggaggtgtcgcgcatccccaacggctcccacccagggaactgcatctccttgctcagacgcgcgcggcacaacgcatgtgtcatccatcatg

SEQ ID NO: 40788 - DNA, 705 bp, Zea Mays
ggacatctcctaaataatcctcagccgttacttctgctagtccgtgccatgcttatactggtgatcaagatgcctatgtctccaccaccgtcgctcagctgcttgcctctatgttggctggccggatctactgtccgacgcgccactgtttgcgctgtgcttaagcgctctcaccatcaccgcgcctctcttcgccggtgttcgccgggcatacgctcaacctcgccaccgtgggacttacctcgccttcaaaccgtgttcgccgcagcccagccatcgtctacctctacgctcagcacgaaaccgctcgccctacagcctcgtcgcgtcaccattctgcaggcactgagctccacccacctcggtgaaggccaccgtcccctttttcactgtgcactcggcatcagcttcctggtgcacaccgacacaacgctctggtcgtgcgccctccatcgcacgctcagacacttgcccctgttcgtcacctcgggactttgccgtcacccgtacttcgttggttgtcaactttgctggctgtgttcgacctccagccatgtcaccatcgtgcccttcattcgttcgaagaacacctagaagaagtgatgtttgaagaagttcacttaagtgcctgttgattcagtggtggaggtttatctaactacttaccagagtagaataattttaggatcttctcctgcaataagg

SEQ ID NO: 40789 - DNA, 2641 bp, Zea Mays
gtgctgagtggtcgtgtccacctcaccgaatcaccgctcaaccgtcattcctacaggctacagtcctacgtacagccatctggaccagagttctcaactactgccgccggccacctcctccgcccgccgccagcgtctccggctccgatcacctcccccgcccgcttacggccatctccccgcccacctacggccaccgccgcccgcgaaggcgtctccggatccggccacctcctccgcccagcgtgtttaccggacacgtctgccacccgtcaggccctgcccgacgctagggttgggcgacggcgtccaccggctgacgcccggggagatctcgcccgctctgctccatccaggtgcgaagtaatggaggtgctctgcatcggaacagcggataccaagtttgaggagctgcttttcctcgcggcgcaactccgctccgccctcgccgcctctggctccgactcgaaggttcaagtgagcatagtggatgtctccacaactgaaaagacaacggcaaatgatttcaaagacatcatatttatccctagaaatacaattctttcatgtcatttgggtgttgaccaacataatcttccagataacagaggtgaagcaattgcactcatgtcaaaggctcttcagagcttccttaaaaaaagatatgacagtggtatgctggtgggtgctgttggtttaggaggcagtggaggaactgcactaattgctcctgctctgagtgtcagtcgtgttatattatctaatgctgcagcagcttttgctggaatggtacatggaatcttgtcggcgtccaatgagtctgatgaaacgtcaacaaagccaactgttggtattactatgtttggtgttacaacaccatgtgtaaatgcggtcaaggatagactgaacaaagaaggttatgagacccttatattccatgccacaggtgtaggaggcaaagcaatggaagacctagttaggggtggttttatacagggcgtgttggatgtaacaacaacagaagttgcagaccatattgtagggggcatcatggcttgtgatgagaccaggtttgatgcaattatagagaataagatccctcttgttcttagtgttggagccttggatatggtaaactttggagctcgagatacaattcctcttgctttcgcagaccgaaatattcatgttcataatgagcaggtttcattgatgcgtacgactgtggaagagaacaagaaatttgctaggttcattgctgataaaataaacaaatcttcatccaaagttactgtttgccttccccagaagggcatatctgcaatagatgctccaggaatgccattctatgatccagaagctacatctacactgttgggtgaattaaacacccttatacagagaaccgatattcgagaggtgaagctgtttccttaccacatcaatgaccctgaattcgcaaatgcattggtagatgcattcttgagtatggatgtacaggcctctagttcagcccaacctaagcaagatcttaatattggaaaatcctgttcaggacagaaaatttcagatagttctattatatggagaactcctgtggattttccagatgcaaaaccagaaatattgcggaggacgcggtcaatattacataaactgaaggaacagatcagtgacggtactccagttattggagctggtgctggcacaggcatatctgcaaagttcgaagaagctggtggggttgatcttatagtgctgtacaactctggacggtttcgaatggctggaaggggctcactagctgggctcttgccctttggtgatgcaaatgacattgtacttcagatggccaacgaagtgttgcctgtggttaaaggagttcctgttcttgctggggtatgtgctacagatccatttcgtcgaatggaatactttctcagacaactagaaaccattggattttgcggtgtgcaaaacttcccaaccgtaggtctgtttgatgggaattttagacagaatttggaggaaactggaatggggtacagcatggaagtggagatgatttcaatggctcatcgcatgggtttccttactactccatatgctttcaatccggatgaagctgctgccatggccaaggcaggagctcatatcgtagttgcacatatgggtctgacaactgcagggtctatcggggcaatgacagctgccactttagatgatagtgttttacgtgttcaggccattgcggatgcggcatttggggttaatcctgatatcattgttctctgtcacggaggccccatatctggacccctagaagccgagttcgtattgaagaatactaaaagggttcatggattttacggtgcatcaagcatggaaagattaccagtagagcaagctatcacgaacaccatgagagagtacaaaagaatttccttaaaatgagaaccatcgtttacatgcgtgatttaagcctgctgttctttcgttacacttcgcagattctgtcatctctgcctctttatttgtcatatacattttcttaccaatgtacctttcttgttggaatataatcataataaatgttttctttgacgaggctgcgtaatgtcttaattattaccgtccattc

SEQ ID NO: 40790 - DNA, 2640 bp, Zea Mays
cgccgcggggatgttctgctggtccacaccaatgttcgaagaagagggaaatcaagcgccagatggccacgaccaagctattcgcggaggaacagctcgccgaggatgtcgccctcaagagaggcatctccgtggggggctgattgttttgctgagaaaaaaataccgatcatggaggtgtgtccacacatttcttggccactgcctctattgtgtatcctttagttgatagatacatgttagacgtttcttaatatacctcgcgagattgattgagtttgcttgctgactacctatggttaattactagatacatggagccaaatgttatctgatataccagcttccatcacttgggttatttcttgttggctacctgtaatgaatcagtgaatttgactactcggttggcccaacaattgtaagttaccagctccttctattttgcttgagaaaatctgatcttggttgaaatgtcaatgtcattacaaaagagagtaaatcactaacaagaagtttactgattctattttgctcctcgacgtcggcgtccgcatcatccaaggtcagtaactccacttccccaagagccagcgaaactatttgattggtaactaggtgaatttcaaaacatcagtgcatacattgacgatacattagcatttagaatgagtcccctcccatgatgcccgccgaggtagcgccgtcgcggcgcatgccccctacccgcaaaaactgccactgtatggtaatgggaccccttgccatgcttgatgtgtatgtcccttttattgccttcatgatatccaatcataattggagttcaaagtagggacaagaacacaataacaatatatggagaaataattaattaattcatgcactactgagtacaaaaataactttatgtgtcgccgccagacgggattacagctttgtggagcctcacaataatccaggtagcatatagaacatttttacatgtgcttgtgaatgtcccaaatcagatgaccatgtttttcgcacttccggagactctataaggagggtgttcatacttcatatgctccagtacagtacaggaccacatagttacatacatcccacaacttttttattctgtatttgtgcttggagggacacgtgatagtactgctactcttaatgtgttgatctctcagccaccagacaccagacacgcagccggggttggccagcgccagccaccaggccgccgtggctccgacttccaacgtcgtgccccgcctggcaaccgaccgcatccaccgcctcctggctggctgggcagggtagacacaaaggtctcatccagtgctccactcctccgcatccttttctgctccgagacacctgctgaagctggaagtacatggtacaaggatgattactttaattgaattggtctgccactggctgctgccatccactgcgggctcgatcgccacgccgacgccatccccgtcctcgagcgcgccgtcacagtccggcacaagaatcgtatgctgacagcgagcctgaggccggtgcagccgacggcgacgactaccagcagctgcagcctgtcgagcccgactagaggggtgagtggtgctgctcctgatgagatcgctggaggcttaatggagattcctgtaatctatgaggcacttggcgatctcgatgaggcccaaaagcttcttcatagggcactcaggcgagggctcatcgagggagtggagcattgttgccggtgttgtggcacaaatgggcgttctgtactacatggtgggagatggggctagcttgtgtgtagctgttcaagatagacgaggttgcatagttgtttgaggaggcaagggcggttctggagcaggagtgtggcacttctcatcctaatactcttggtgtgtacaacaaccttgctgcaatctataatgccatgggaagtcctaatctgtagtacagatagatggagtacacagcgacatatttagccctggtgctgaaagggggagccacacacttctgattcaagtattatttacccgctatgaattcaaagtcggcactcacgatggccttggacacaatcctgagcaacaagatgttgaaatactatttggacctggctatactggtcttgcggatcttgggaatagttgatatatggcttcaataatgcaagtcatgtttttaacccaccattccatatcaagatactttgagaaacagagtttgaaagctgcatttgctactgcactagctgatccaacagtagacctaaacatgcaaatcaatcatcattctggctagcatgcacccaaggttgaccaaactgattcgacagttttgggatgagatcataacgttcgtccgacttttgcagagatcattacagaactccaagatattctacaccatatctaggcaccgaagggatctctgaatgtgatctagcatgtgttgcttttgggtatccattatggcatgttattttcttaatatagttttaatatccattgacagatgttgacttccatatctatactactctattaaaaacctaatgatatagctaagatcacaaatggattacaaattcttttgttataacaatataacacatatttgtacataaat

SEQ ID NO: 40791 - DNA, 624 bp, Zea Mays
ctcccagccattcctccctttctctggctcatccttctccacgagctgagctcgcccttccctgcttgccgccatctcccaggacgcgctcgcctcggccaccgtcgtcggccgccgttcccagcagctcccaccttcgtcggatcactgacttcggccgtgcacgcgctcagcttcgacatggcgtccaagcagcagcgccctagcgcgtctcctttgcccgccgtgcccttcaccatctagtcgtcaatagctcgctgccgcccatggtcgtcgatctcgtcctcgcctcctgtccgtgcgggcagtccatcctgttcctagcagcgaaagcctagcccctgcggcaagctgcctgctcgatggaatgctcagccgctcatcggatctgcgcagcccctatgcgacatcacaaactccgctcgttgtcgatgccgcgcttcgtacatcgtctgtttgtcacacccgggttttaggtaccaagacccgggcgcaaacataatcattaggtgtgctggtaccaagtctcacacatatgatgaatcatgacacaaaatcgaatgtcacatctttattatataatatgagttctttacaaaataaataaataattacattataagg

SEQ ID NO: 40792 - DNA, 496 bp, Zea Mays
agaaaagactctcaagggtatgctggatttgggaatcaaggagaggctttagcaagagtcaacttagatacttttgcagaaatagcttactaaagtgagtccttacttgcaatattttaacgccagattaagtatcaatagactctgtttgcatctggtctaatttcaccatctcatcaatacaacatgatttttgctcattatgattcacatcctgacttaggttgtagggcagtgaccaagtcttcataaccgcgaaggtacggcgatccgaatcgattatactcagctgaggatcttcgatcacacgacatatatagcacttaacccttgcatatgtcaacccgccaccggggttcttaagaccagatcaggttcacacaaaccgagagcacagatacaccaccgtccagcctcttgctacggagggtacacgctactctcgccaccgctccacgtccatttcgtgttatcttattcaggccttagtctgccc

SEQ ID NO: 40793 - DNA, 1583 bp, Zea Mays
ggtgtctagaagcctcagtaacaacatgggtttcagctatagcagtcttctcgcctttaagacagagaagagattaattcagagttcagaaagaataaaatggaggataatctaccagttaatgtccgggaatatcaagaacttgctaagaaagcactaccaaagatgcactatgattatatcaacggaggagcagaagatgaatatacactgagggagaatattgcagcatatggaagaattctgttacggccacgagtccttatagatgtgagcaaagatagacatgtcaacaagcttattaggatataatatgccatcgccaataattgtcgcacctacaggggcacacaaattagccaatcccgaaggggaggtggccacagcaagagctgccgcagcatgtaacaccataatgatgctttccttctcatcaagctgcaggatcgaggaggttgcctccagttgcgacgctattcgcttttatcagttatatgtgtacaagagaagggatgtttcggcaacattggtacggcgggctgaaagtttaggattcagggcaattgttttgacagttgacacgcctgtgcttggcaggcgtgaagctgatatcagaaataagatgattgctccacctctgtcaaaccttgaaggtttaatgtcattagacgactttgacgatgctgaaggcggctccaagctggaacgattctcacgggagacgctggatccatcattgtcatggaaggacgtggagtggctcaagtccatcaccagcctgccgattctgctcaagggcatcgtcaccgcggaagacgcgaggaaggccgtggaggcgggggcggccggcttgatcgtgtccaaccacggcgcccggcagctggactatgcgccggccaccatctcggcgctcgaagaggtggttaaggcggtggcgggggctgtgccggtgctggtggacggcggcgtccggcgcggcaccgacgtgttgaaggcgctggcgctcggcgccaaggcagtcatggtgggcaggccggtgttctttgggctggcggcgcgcggggaagccggcgcgaggcacgtgatcgagatgttgaacaaggagctggagttggccatggcgctctgcggctgccgtagcgtcgcggaggtcaccagggcgcacgtccagaccgagggcgaccggatcagggccctgctgtgacttataaataagcgaccatatccgaggccgaccaccgtgctgtctgggttgcgatatgatttatatgatacgtgagggcatgtgatcgattgttgcctccacacagataagcttactattgccagagcctgggctggactatgctttcagtgattatctaaatcaaatagactgaatgctaaagggaacatccaatggtgtccatctatatagcatttgttggagtcacatgtagccatttgactgcccatcattaaggcctgaagtcaagagctcaatcaccctgaatccccttcaacgaagaagcccgtaacgtacaagatcgtccggcactccgagagaagctggacgccgtccgcatgtcgtttggtgccgcccc

SEQ ID NO: 40794 - DNA, 356 bp, Zea Mays
tagctcgttcccctcccggcgatccaacaaaccgcgcccgaaatccctaccacctcgggctataaaaccttgtgccgcactcctctcgtaccccacgaccgatccatcgcacctagaaaatggaacaccaggggctgccattgctgggagctcactccaagaggcgaagcgagagctgagtgtcgtcgcatgccagttcggcccacaaccacgaaaagcttgcgctatggcgtggagataagccaatggcccctgacgcgtgtgcgcggggtatttctgagcacgggggttcactggaaccgtgggaattgctcgccggagcaattttggcatcccagatccgcccaacgccgtag

SEQ ID NO: 40795 - DNA, 1578 bp, Zea Mays
gcggtgcccatccaccgactccttgacacacacgggagacaaggcagcccgcagcctccgtgatcacgtggcagtgaaaggcttggcttgtttgcagcagcctccctccatggctccagctggtgatcggagcgccgccgcccggaaccccacaaaataaaacagctcgtcggtgccccaccccacccaccatctcctcctcaccggctttatatatgcacgcgccgcgcaccccggcgccagctacccatgccatgtcacacgacacggcatcgcacgtccaccaccaccccgccgcagcagaagaccccggcggcagcgagtgccggttctgcgagatgacgcggcagcaccatcctcagtgcgcgcggcggctgccgaagcgcatcatcctggtgcggcacggcgagagccaggggaacctggacatgtcggcctacaccaccacgcccgactaccgcatcccgctgacagcgctgggagtcgagcaggcgcgcgccgcggggcaccgcatccgcgacgtggtggcggctggcggcggcaactggaaggtctacttctacgtgtccccctacgcgcgcacccgggccacgctgcgcgaggtgggccgcgccttcccgcgggaccgcgtcatcggcgcccgcgaggagtgccgcgtccgggagcaggacttcggcaacttccaggtggaggagcgcatgcgcgccgtcaaggagacgcgccagcgcttcggccgcttcttcttcagattccccgagggcgagtccgccgccgacgtcttcgaccgcgtcgccagcttcctggagtcgctgtggcgggacatcgacatggggcggctggaccaggaccccagctgcgagaccaacctggtgatcgtctcccacggcctcacctcgcgggtgttcctcatgaagtggttcaagtggacggtggcccagttcgaccgcctcaacaacttcgacaactgcgagttcagggtcatgcagctgggccccggcggggagtactccctcctcgtgcaccacaccaaggaggagctgcagcagtggggcatgtcgccggagatgatcgccgaccagcagtggcgagccacagccagccgccgcaactgggccgaggagttctcctccttcgtcgacaccttcttccaggaccccaacgactcgtcggacgaggaacaagaagcacaagacaaggagacgaacctgctgctggacctggagtaactacaactattcatccgcccacaccctgtttatttctttctttcaatgcctctttgaaattgtttccattggatttggatgacgctttctgttgctgctagtaggggggaagagcagagcagggaggtatggtgtattcatcagtcattgctgatctctttcttcctcagcagagtcattgctagctggaaaactgacaaagctcgcagtgcttggctgtctttaacagttaactagtagaataaagatgacttttttttaatttgcggctttcttcattaattatttatataatcaagatcctttcatacttcatacagcacagggtacgttggcattctaataacaacat

SEQ ID NO: 40796 - DNA, 910 bp, Zea Mays
cagagccttctggaccggggatgaatcgaccggagagaatgagagaagtcaggggacgaatcgaccggagagaatgagagaagtcaggggaggaatcgtctccgtcgtgccgccatcttctccactaagttgacgccggtcgctagtcgccgctctcgacgtcccccctcctccgtcgtccactgcccttggcactacaccagtgtcgtccgccgcatcatcgttcctgcttcgccgcatactcgccgcgccgtcgccgacaaggaccatccgggctgaggcctgctaaaatctccaccacttctctgactacttcgtcatctcctccacgttcgacatagatacaaatgtcttttcccccatcggagctgagtacatccgagtgtcctcactgatagggaccttcctgtgcttccagattgttaatggcgtccggtcaaaaataagttagctataccatcctcaccctcggagctccgtacatgcgagtgtcctcgctgttagggtccacatgtacggatgtctttttccttatcagagctccatacacctgctcgaaattggcttcatcaacttcaacatatttactcaagggaaaaaaggctgcttgattaagagtaaagaagaagacgaagaaagcgaagaaatgagaaaaggctgaagcttaggtgaaccattaggccgaagggactttcgtattttggaatgaacacttatgcagttaaactactgcttattgtaatatagcattttactctttgtagtgttttcccttttttactctaaatgcttttgttgtgtgtgaaaccaagtatttctagtattttgaggcgaaggcgaaaaacaccttgccttcttttcactcgaaaaaagcccccaaagcttacacttaatggccttctgcattatg

SEQ ID NO: 40797 - DNA, 1364 bp, Zea Mays
ttagaatttctacctttcttcactagaatataacatttgcttccaaaaacacgaaaatatgacacattgggtttgttaccggttagaagctcatatgacgtcttcttgaggaggcgatgaaggtagacctggtttatggcgtggcaagccgtgttcacggcttccgaccaaaatcgctcgggggtcttgaactctccaagcatcgtccttgccatgtcaatgagcgtcctgttcttcctttctaccacaccattctgctgtggtgtgtatggagcagagaactcgtgcttgattccttcctcctcaaggtactcctccacttgaaggttcttgaactcggacccgttgtcgctccttatcttcttcaccttgagctcaaactcattttgagctctccttaggaagcacttgagggtcccttgggtttctgttttatcctgcaaaaagaatacccaagtgaagcgggaaaaatcatcaacaattactaagccatacttacttcccccgatgctaaggtaggcgatgggtccgatgaggtccatatgcagcagctccagaggtcttgatgtagtcatcacgttcttgctgtgatgagcatttcccacttgtttacctgcttgacaagctgcacaaggtctatcttttttgaaagtcacatttgttagacctaacacatgttctccgtttagaagtttgtgaaggttcttcatccccacatgtgctaaacggcgatgccacaaccagcccatgctagtcttagcaattaagcatgcatctagaccgacctcctcttttgcaaaatcaactaaataaagtttgtcatctagtacacccttgaaatctaatggaccatcacttcttctaaagacagacacatctacatttgtgaataagcaattataacccatattacaaagttgactaacggacaataggttatgtggcagaacctcccaagttattgggcccacatgcacctgtccttgtctcaaagacctcagacgactatgcatgtgcaccaaataacttaacaggatccgtctgattgccccaaggacatcggataaaccacttacaaccagaaccgcgagattaagtaacacaaatcacacacatcaatattttgcagcggaaatcttattaccaaattttacaagttacaaaaattttatattattttatcggagtgattacaaaagtataagtttgaaatatatgctagctcaagtgaccatcctcaataagaagtatagaagaagtacttagacttataagaaggccgagcccaccggcacttaacaccatcaacaacagcacaaagttagaacctgaaaaacaacagggaataaaaccctgagtatgga

SEQ ID NO: 40798 - DNA, 463 bp, Zea Mays
gccaaaccaggccgggatgagaatggattgggagtgaatccagattgaaatcctggcccagtaaaaattccagaggaggccctggattgcaaccaggactcgaggggccaggaacgaatcccatgcgagcgatgagaagacgtgctgcggcggcgaaagcgagaagacaaggtgtcgatgagcggggatcgcgacgacgacatcctccccaccgccggcaacctccactacgctgtcaagcttctatccagttggcacacaccatgatgagatctagcaaggaatgatttggctagcagttggtatgcttgcatgattggtcagatagagtacaccatgattcctgaaaacatgctgtagtgtgatttaggctgctcgagggggcgagggactcaaatttctgcaggcatgcacgtgttacaactattgagctactgaagatgcatatattgtcctactggag

SEQ ID NO: 40799 - DNA, 217 bp, Zea Mays
tgagatcaaagaagaagctgcaagcaccccgccagcaccatcgccctctgaggagctacaagagccagtcccacttgaagaagagctcaacccagtcttgccacctcagtcaccgccagaagaagtcatcaacatcagctccctcttaacccatccaggagatgcctcagattgaagttgcgctagcctcgctagaagagaagctgccaggtctgag

SEQ ID NO: 40800 - DNA, 3541 bp, Zea Mays
cccagtcccaaccgctctcttctcttcgagcgccatcgccgttcgaaaccagcgccgcccgatcccgagaatacccaccacccctctccctccctcccgctgccgcccccacctccagcagacgcgacgcgagcgcagtccaccctctacgactacacacactctctttctctctctgttctcctttcatctccactcgtccgctttgtcggaaccgttgctggtggctccggggttctgcgactgcgcatagggaatggcgatggcggcggcggttttggaggaggcgctgcgatggggtggaggaagcgttggggacgacaacgtggccgcgcgcagggcagaggaggccgcgataagaaggcatgaagcagccagttggttgcgaaaaacggttgggatagtgtgtgcaaaggacctgccggaagagccctctgaggaggaattccagcttggtctgagaaatggcattgtcctctgcaacgcactgaataaggtccagccaggcgccatacccaagattgtcggagtccagtcagatactgcggtccctgcagatggctcagctttgtgtgcttatcagtacttcgaaaatctgcgaaacttcgttgtcgttatacaagattttggcctcccaacatttgaggtgtctgatttggaaaagggtggcaaaagtgttcgaattgtggactgtgttcttgctctgaagtcattcagtgaaagtaagaaaacagggagacaagctgcatgtaaatatggtggcattttgaagcctttggtttccggaaattatttcatacttaagaattgtgatgcttttatgaataaaaatgcgagaattcacacagaagaggctaccctgaatggttttcgaggagagcaaaacttatctcttgattgttctccagaatcctatgaggtaattacttcagacaaccttagcacgattattcgcacaattctcttagataaaaaaccagaagaaatcccactgattgttgaatcactactaaacaaagttattcaggaatacgagcttcgctttgcaaatcagaacttgatggatgaagagaagcaaaataacttgactacgaaggaggaagccagttttgcagtaaatggtagtaatgcagctcaaaagttccatctgaaggctgaaataaattttgatctacagcacaaacagatcaaggggttgagaggtactgtttcttctatcaagtctggaatggaacaactgaaattgcactactctgaggagttcactaaacttgggaagcatttgtacactatatccaatgctgcttctggataccataaagttcttgaggaaaatcgcaagctgtacaaccagatacaggatcttaaaggaaatattagagtttattgtcgagtgaggcctttcctacctgggcaaataagttccttaagcagtgttgctggaatggaagaaagaaccattacaataatgactcctacaaaatatggaaaagatggaaacaaatctttcactttcaacaaagtctttggtccagcagccactcaagatgaggtcttttcagatatgcaaccattgatacgatcagttcttgatggttttaatgtctgtatatttgcatatggccaaacaggatctgggaagacttatacaatgagcggacctaaagttttaacagaggaaagcctaggtgtcaactataaagcattaaatgacttatttaatcttcaagcacagagaaaggggacaatagattatgatatttctgtacagatgattgagatatacaatgaacaaaaaggacttgcggttccagatgcaagcatagttcctgtcacatctacgtctgatgttgttgaactgatgaatcaaggccaaaagaatcgtgcagtgggttcaacagccataaatgaccgcagtagccgctcccacagttgcttgactgttcatgtgcaaggaagagatttgacatctgggacagttttaagaggttgcatgcatctggtcgatctagcaggcagtgaaagggttgataagtccgaggttgttggagatagactaaaggaggctcagtacataaacaagtcactttcagcactgggagatgtgattgcatccctttcccaaaagaacacacatgtaccttaccgaaacagcaagctcacccagctcttgcaagattcacttgggggacaagcaaaaacacttatgtttgttcacataagcccagaacttgacgctgctggtgagaccataagcaccttgaaattcgctgaacgtgttgcctccgttgaacttggtgcagccaagcaaaataaagaaggcagcgagattagagagctcaaagaacagattgcttccctcaaggctgcattggctaagaaggaaggagaaccagagaacattctaagcacacggtcaagcccaagcatatacagaattagaaaaggcaatgcaacacctgcaactcctaaagacaggcagccaatggaagaagttgggagcctagaggtccagaatgtcttcactccagctcaaaagaggtcaaaaatgcatttgcttggcatcctcactgagaacaactcgtctaactcggttcagaattgcaatgttcctcagaaggaaataggattaggtggttgggttgacaagatggctcttggagacaaccactttgagaactctaattccatcctagagttggagcctgacacagcacagcttccaacttctttttatcatcaaagatatagtcctgtgcaacaaagctgtaggaccgaatcagtaccatcattgggcctacatggctttgattctgctactagttgttctaaccaagagattgtagtgtcaaccatgggactaaaagcttctggtgttgccaatagaggcgcctcaactgtaaaaaagtatgaagctacatcaacgaggagtacaaatctagcaagcaagtctccattgttgcagaaaaaactgcaaacaccaaccaggaacaggaaccagctaacttcgagcaccataggtggaagaagaacaccaaatggaaaaattggcattgcaaagtaatcaattaatgtgaaggcagatttgctgtgaccatgcttagaatggaaaaattggcattgcaaagtaatcaattaatgtcaaggtgggatagcacggagcctaaaaggactgcggtttttgaacctgcagaaggatcaagatcaatcatgtaaactgatgcacattccgataggtagcacattttatttattacattgaagttggaaacagacaccaaagaggacagaaagatgataaatatgaaggaaattcgaattgaggcttctgtacattttccacacttataaagtaatgttgtatcatgtgcctattagccatgacacatcatcacctgaaagttgcttgtattagacatgtgctaagtttacagtttctctgtctcatgtatgttaccctttctcataatggatcgccactcacagactaagagggtgattggtttcacccaactaaaatttagtcccttttacattgaat

SEQ ID NO: 40801 - DNA, 1529 bp, Zea Mays
tgtggacccctctcccactcccctccggccctcccctcccacctcacatcccttcttgcttctcgcctccccacccttcatccacccgccgctcctcaagccccaagctccggcgatatgtcacgcttcggtcgatccggtccgccgccgccgatccgcgacacatattcactcctcgtcctcaacatcaccttccgcacgactgctgatgacctcttcccgctcttcgacaagtacggcgagattgtcgacatctacatcccaagggaccgcaggactggcgactcgcgcggattcgcgttcgtgaggtacaagtacgaggacgaggcacagaaggcagttgataggctcgatgggagattggtagacgggagggagatcatggtgcagtttgccaagtacggtccaaatgctgaacggattaataaagggagaataatggagccagttccaaggcccaggggccgttccagaagccgcagtccaagacggaggtaccgtgatgattatcgagatgactaccaggatagagattatagaaggcgaagccgtagccagagtagagatagatacgcccgtgacagtttgtctcctgcacgaagaagccctagtcatagccgcagccgcagttacactcctgatgattacaagaggcgtggcaaagacagcagcgcatcacctgcaagtaggagccctagtcgctcccctcctcgcaagacgccaccttctcctaagagatctcctgtcaggcacaatgatgaccggtctccacgctcacggagcccttcaacataagcacaattcacttgcaaagcatcttgaacagctcaggatgaatggacttgctctgatcctatgtgtgtgtggctatgcttgtgctcaatggtgggcacttttcagttaaagttttgtagtgctgtctgtcagttgctgcctcaaacttggaatactacttctgtttggcacctgaactgcttatcaaaaactttatttacatggagtgaagatatgctggctgatatgcggtcaacatgcacgtagcttactgttgaagttgatataatctgtgctgtttgcgttgttgatgatgatggctgatgagatgatggaactgcagctgactgcacaatttgctgctgtctgcacctattatgctgacaacaatagaaggcgtggggagaagtttcagcgacagaaatgcctgactagttgattgatcttctggatctgaatgctgatgatttgcttcaaagacttagtctcatgtagtcatgtcatttgtggagtctgctgacccatcaggctctggattttgtaacacgaactttgatatgcttctgtgaaaaaaaatgggtaaccttacataagtgtttagacggtttagtggtgttctgctcttttctttacggtactgaaaaacattgactgttagttgggttgttaacctggttgaatgttatacacacttagttcagctgaattaaattgtttatttgattgttcgttgcgatatgagcgtattccctcct

SEQ ID NO: 40802 - DNA, 1744 bp, Zea Mays
tccattgccatctctagatgaaactacccacatttcgtttctcttcctctccggtccccactagtccccttcccttccctcgcctaccttcgcacgggtgctctgcccgttcgacggccacgccgcgccgcccagctgctccggcacccgcccttcttcgtcgagctcgggatcagcatctcgcttgttctgggctccccattcggcctctcctcgccctaactctattttgcagcatgagaccagcacaacagcccgaatcataggcttgacgcagagaccccatctcatctgcgctcccgcgcgtggcctaacgctaacggagccagaagcaaaggagaggattccacaagcttcgagttgccgaaacattttgttaaatctactgcttgtgtgggatcattagtgcaaatccggtgcttgcgcgtgcaggctgtgctacccatgcgtcttggctattgtgaataaaaggtttcgcctgttgcatctgtcacttgcgatatacccgcgctctgaaatctcgccctagttggtaaaatacaactggtttgcccccaattaggactagtttggatactttgggattagagtgttttggagggattggagagggtgtaaatccccaatagatcagatactctctcaatacatgtcaatccactccaatcccactcattactagagtatccaaactaagccttaggtgactgcaaaacttcatttcaattactctggccctcttttgtgatcatggacatcaagcaaagtgtgtagtaggatgcccctttagggcttgataaaaggagatgatcatgttactcacatatctgaagatgtaacttcatctcgtttcagggtttagagggatgtcttcagaggagctgagggcgagcttttcagatttggcggtgggttcgccaacccagacagagggcaaaacgtatccttcaggtgatttgtcgtctgaggaggtcatgcaagtcacttgtttcacagaggatcttcatgatgtagtacttcactttcagatagtgaggttttctaaacagatctatgtgtgggttggatgcaacacagcaaagtttggccatttatacgctgctgcaaccactaggccggataacagagtgagcgtgacctctgtactaggaggaacatctgataacaccggatcaaaaaggctgcatcctacatgtcccagtgttgaagaccggtctgaacattgtcctagcatgcagcatcccaaaagacagccccattcttgaggcagctgcggagaggaagctggtggagaagctgaaaggtttgggctacattaaaaccgcagctgtgaatgctaacacttccacggcaccatgatccgtggcatgatctagtgagctttcggtcgacgttcatcactagatgcatcatgatcatgagcagttgtgatgtttggtgggcttgattggctaactgtttcatctgttctttcgcgtggtaaaagttattatgaacattttggtgtatggagtgtttaaaagcactagagctaatagatagttggctaaaactactggtgaatttagctagttaactattagctaacttgctaaaaatagttaatagttgaattattaactagtatgtttggatgtctttagctaattttaacagctaactattagctctagtgcatttaaacacacctgtaatgtacttccttttctcgtcctaaaatgagtttccatctcaacatttcaag

SEQ ID NO: 40803 - DNA, 1920 bp, Zea Mays
ttaggccagaggactcgaactcgagacctctaactttgatatcatgactgtaggagaaagttctcagggtccctggatggcctcttccagatataccatattgcaatcagtggagttggtggttataaagtttcttcagaggactcgttgcatttggttgaagccctaagtgcggttattacaacgcttccaccagaatctgctagtagagccctggagctaatctgccagccagtaatcaatcccttgcaagaattaatccagcaaggtgatcaagttcttcaacaagtccctgctcggcatttaactgtacatatagaccgactatcaagcattttcagcaatgtgaaacaaccagaagtagttgctgaagctgtatatagatattggccgacactcaagagtatctttgatcaacgagcatgggatacccgtaccatggagtcaatatgccgatcttgcaaatttgctgtaaggacatgtggaagggtcatgggaatgacgattggtgcaatgcttgaagaaatccaaactctctaccaacaacacaaacagtcttgttttctttacttgtccagtgaagttatcaagatttttggatctgatccatcttgtgcgggctatcttactaacttgatacaaatacttttcagccatacagtgcaacttctcagaacgattcaagattttactgccagaccagatatagctgatgattgctatttgttagcatcaagatgtatccgttactgtcctgatctatttatacctacagaaatgtttcaaagattggttgactgtgcaatggctggtataactatacaacacagggaagcctgtaaatcgatattgtcttttctatctgatgtcattgaccttccaaactcatctgacgggggacagtaccgtaaagttattaacacaatcatacttcaccgtggcgcaacccttactagaataatgattgctgccttaacaggggcgctaccatctggtcgtctggaggaggtttcttatgttctgctgtcacttagcagagtctttggtgagaacatgctgaactgggcaagggaaagcattaatcttataccgccacaagccctaacagatgcagaacgtttgcgcttcttcaacaccatatctgatgctgcttctgggtccagtctccataccataacagatagatttggtgaaatctcagatgtctgtagacgaaacaaaacagtgcaggacctagttcagagtgccttgcggcctcacgatttgaccttcacagtggttccacaacagatgtgacaactggatgtctctgcaaggcaagtttagagagccagttcatgcatagtttcaagttgagaaaagccaccgagtcggtgttgatgcaaggctagctcactgtcatcttcggaattttttctctctcagttcatacaggtttgagttgcggcggcatacagttcagatttgttcagagcatagataggtcagtaagcatcgtaattctttcgtgtttctcctttgtacatgtgccgtaaattgtgtatttggggagggagataagttgtgttgtattatctcaacaacaaagtgtgatacgctggcagatcacgcggaatggtgatctaccatgggcctgattttgcgttggccggtcagcttgtttttgtaaagtgaggtggccatcgattttatcatataagcttataccggctgttgaaggaagatcaagtttgtgtaccctttatgatccccaaatgtgatggccttctggtttgatgatcagaacggctgcagtgttaagctcaccttgaatcagggcagacgtttgagctaatttggctagttgcatctattcgttaactagtgtgtcctcgacaaggtttcgtcccgtgcttgcaggatgacagcaacaggtagcat

SEQ ID NO: 40804 - DNA, 281 bp, Zea Mays
ccgcctacccggcccgtctgaagatgaccggtcctgcatctgtatctgtcggctgccaggcttcaacaacgacagcctataaatcttatctctaaactctcgcgaccgatagatacacatacaatggcacgagccacgaggtagctgccgcgaactcacccaagtggacgcaggagcgaccggcctcggcgccgccgtccctgtcgcgtacgtacgcacggcgagccgtgggggtgaggttatggggcgcagggaccggagtttgtctcgccggaacggac

SEQ ID NO: 40805 - DNA, 1412 bp, Zea Mays
aagccgccgccgccaccaccgcctcacccaagctttcatttgtcatgctggttgcccccgccttatcgtgtaatgccatgttgcccccgcatcatcatctaagatttcgtttgtcgtccgcgctgcagtctgcttcccgtttcactcttatatttttttgttggacggagttgttttgcatcgtttcgatctgtaccgtactgtttcccctcttgttcataacggcggcgacacaaattcttgcgtgctgcgccgctcacgcaaggagggataaatcgactcgtcaagaaatcgtttcagttgccatgactccagtaggcaatatgattgttgcttgactacagttttgtcttccactacttagcttatttgtttgttttattcttacctcgcccgtattttctttgttttattcttacctcgctcccgattttaagatctaatttggtatctgcacggtgcttaccccgggcttgtcggatgtacttgaagaaggaagccccaatgtctgtgctagatccactatgccattcagtgttgcaggccctgatgaattttgtgattggtctgtgtcaaagcaatggatacaaattttcgtaatagaccatttctttattatgtttggtttgatgattcgtttgattgattgatggcagtgatttgacattacccgcgcttctgatctaacccgtgaagcaaagggaaaattaatggttgaatttcttaatatgagccatctagtgatctttcagctgtctccttttattttgtgcgtgagctcatttcattcatgtggttgatttggcggtgatgatacaaccattcagcttacaacgccagttctgcttctgataagtcatgacagataaagctgattcatatctgagccttgatttgtgtcatgttctgacaaactcataattaggatcatgcattttttcttgctccaaaccttacatcccgttggccactgaagtcaacccaatgtttcgaggctacaatcggctccaactacatgcttgtcaggcggtatcataaactgattttttgtggttcagttagacgagagcgatgaagagcaacttttgtgaactagagtttcagatgctaccatggtgacttttttctgggatggagctcatatttgcagtattcggtggtttattaaattcagatatggcacatatgataatgatcagagtggtttctgaacatacgaagtagccgcccaagagctttcaacctgccaagtttcagagctagtgctgttacatcgttggcaatgccacaacattttttcacatacatttatttcccaatgcgttgtccttaatgccatgtccttatgtagcagttcatgaacaagattggaaggatataagcactcaacgaccttcgtcgacagagctgaa

SEQ ID NO: 40806 - DNA, 1401 bp, Zea Mays
cttatacaaggaaggcctgaaagtgactgcaccttgaaacatccctttatagtcggttatttaaatattgaagtgtcaatgttgagcacatgttaaatgacagattactgaattttgttgacattgatttgcatgatgtgaaggatgctcataagcgctttgacaaggctagcctctcatatgaccagattcgtgagaagtacctatcattgaagaaaggtacccgaccagacataacaacggcaattgaagatgagcttcatagtgctcgatcttcatttgagcaagcccgtttcaacctggtcacttcactttcccatgtcgaggcaaagaagagatatgaatttttggaggctgttagtgcgacgatggactcacatcttcgatattttaaacaagtacctccttgcatattttgccttgtggtgtagctatgttatgcatgaatgtgattaatcctatcaatttctatttttttctcgaacgcgcaggagaactgcgccccattatatattaagcagaggaatagaaaaaacagaacaaaacaaaaaaggttttacagtcctccttacggaggccagaaacaggcatacaaataaagatccataaggggatcaaaaaaatcaaactactcaaatcttcctaaggctctaccaagggtgcagccagatgtgtgaggccttttgcaccagccacttcccatcttcttctttcctcatcagcagctctgaggcttgaagacatacttgggttgcagccatcaaaaatgcatttatttcgatgattccataaagtccaagctcctagaatgatgagagagttaaggcccttttttgtgagaccatgaactgctcctcccaccacttcccaccatcccaggaaggagtttgtagtcggctgtggtgcaagagaatgaagaccaaatttcctgagtaaaaggtaccagaactctcgggcaaaagaacattgcacaaggaggtggtctatattttcttcctcttggtcacataacagacatttctctggatgatttaggcctcgctttgccaatctatcagccgtccaacatctcttatgggccaccaaccaaaggaagaagcgacattttggcaaggcccaggacttccagattcttttataatgctcaaatgtcacagatcctaggaacagtccttcatatgctgatttggctgagtacacaccattcgaggcaatactgaaagtatgcttgtcgtcaacctccggctgtagctcgatgccagatagcaaatcccaaagctgaaggtaatctgtcaaaacccctactgacaaagcccctctgatgtcagaaatccatttggcgctaacaattgcttcttgaactgtcctgcaattgattacccgcttcggaattgtgccaat
